United States Patent Application Publication US 2007/0042381 A1 - sequence listing, part 83

SEQ ID NO: 3800507 - RNA, 19 nt, Human
cccgcuugccucggcuccu

SEQ ID NO: 3800508 - RNA, 21 nt, Human
cccgcuugccucggcuccugc

SEQ ID NO: 3800509 - RNA, 16 nt, Human
cccgcuuggcuucuuc

SEQ ID NO: 3800510 - RNA, 20 nt, Human
cccgcuuucuugcugguugu

SEQ ID NO: 3800511 - RNA, 14 nt, Human
cccggaacaagccu

SEQ ID NO: 3800512 - RNA, 17 nt, Human
cccggagcugccccucu

SEQ ID NO: 3800513 - RNA, 17 nt, Human
cccggaggggccuggca

SEQ ID NO: 3800514 - RNA, 14 nt, Human
cccggaucagagca

SEQ ID NO: 3800515 - RNA, 21 nt, Human
cccggaucagagcaggaccuc

SEQ ID NO: 3800516 - RNA, 13 nt, Human
cccggaugcugcu

SEQ ID NO: 3800517 - RNA, 14 nt, Human
cccggauucuggga

SEQ ID NO: 3800518 - RNA, 22 nt, Human
cccggcacagaugcuccaggga

SEQ ID NO: 3800519 - RNA, 13 nt, Human
cccggcacccccu

SEQ ID NO: 3800520 - RNA, 16 nt, Human
cccggcacccucuggc

SEQ ID NO: 3800521 - RNA, 13 nt, Human
cccggcaggcccu

SEQ ID NO: 3800522 - RNA, 16 nt, Human
cccggcaggcccugca

SEQ ID NO: 3800523 - RNA, 17 nt, Human
cccggcaggcccugcag

SEQ ID NO: 3800524 - RNA, 12 nt, Human
cccggcagggcg

SEQ ID NO: 3800525 - RNA, 14 nt, Human
cccggcagggcggg

SEQ ID NO: 3800526 - RNA, 21 nt, Human
cccggcagggcgggcagaggg

SEQ ID NO: 3800527 - RNA, 17 nt, Human
cccggcaugggaaagcc

SEQ ID NO: 3800528 - RNA, 14 nt, Human
cccggccaccucug

SEQ ID NO: 3800529 - RNA, 21 nt, Human
cccggccaccucugcggaccc

SEQ ID NO: 3800530 - RNA, 13 nt, Human
cccggccaccugc

SEQ ID NO: 3800531 - RNA, 14 nt, Human
cccggccaccugcg

SEQ ID NO: 3800532 - RNA, 17 nt, Human
cccggccaccugcggug

SEQ ID NO: 3800533 - RNA, 11 nt, Human
cccggccagcc

SEQ ID NO: 3800534 - RNA, 13 nt, Human
cccggccccagcc

SEQ ID NO: 3800535 - RNA, 15 nt, Human
cccggccccagccag

SEQ ID NO: 3800536 - RNA, 22 nt, Human
cccggcccuaccagcgcccgcu

SEQ ID NO: 3800537 - RNA, 22 nt, Human
cccggcccugggcucggaggcu

SEQ ID NO: 3800538 - RNA, 22 nt, Human
ccgguucacucuucucagccac

SEQ ID NO: 3800539 - RNA, 16 nt, Human
ccgguucuuccagugg

SEQ ID NO: 3800540 - RNA, 21 nt, Human
ccgguuucgaaguugaugcaa

SEQ ID NO: 3800541 - RNA, 21 nt, Human
ccguaaacacgccugcaaacg

SEQ ID NO: 3800542 - RNA, 18 nt, Human
ccguacaacguguccuca

SEQ ID NO: 3800543 - RNA, 16 nt, Human
ccguaccccacccuca

SEQ ID NO: 3800544 - RNA, 20 nt, Human
ccguagaaaucccccuuucu

SEQ ID NO: 3800545 - RNA, 16 nt, Human
ccguaguuauuuugca

SEQ ID NO: 3800546 - RNA, 12 nt, Human
ccguauuucaga

SEQ ID NO: 3800547 - RNA, 11 nt, Human
ccgucaacaaa

SEQ ID NO: 3800548 - RNA, 17 nt, Human
ccgucaacguuguacug

SEQ ID NO: 3800549 - RNA, 22 nt, Human
ccgucaagagugaauucccuca

SEQ ID NO: 3800550 - RNA, 16 nt, Human
ccgucaccaccacccc

SEQ ID NO: 3800551 - RNA, 20 nt, Human
ccgucaccaccaccccuacc

SEQ ID NO: 3800552 - RNA, 20 nt, Human
ccgucacgugcgcugggcac

SEQ ID NO: 3800553 - RNA, 17 nt, Human
ccgucacuaccuggcug

SEQ ID NO: 3800554 - RNA, 12 nt, Human
ccgucagggccc

SEQ ID NO: 3800555 - RNA, 20 nt, Human
ccgucaguaucaggccugcc

SEQ ID NO: 3800556 - RNA, 21 nt, Human
ccgucauggcuuaauguuuau

SEQ ID NO: 3800557 - RNA, 16 nt, Human
ccguccaggagccugg

SEQ ID NO: 3800558 - RNA, 18 nt, Human
ccguccauaucagaacug

SEQ ID NO: 3800559 - RNA, 23 nt, Human
ccguccauaucagaacugugcca

SEQ ID NO: 3800560 - RNA, 16 nt, Human
ccguccccucccaggg

SEQ ID NO: 3800561 - RNA, 14 nt, Human
ccguccucaccccu

SEQ ID NO: 3800562 - RNA, 20 nt, Human
ccguccucaccccuguccuc

SEQ ID NO: 3800563 - RNA, 14 nt, Human
ccguccucccgggc

SEQ ID NO: 3800564 - RNA, 16 nt, Human
ccguccucccgggccc

SEQ ID NO: 3800565 - RNA, 20 nt, Human
ccguccuggagguuccccag

SEQ ID NO: 3800566 - RNA, 23 nt, Human
ccguccuggagguuccccagccc

SEQ ID NO: 3800567 - RNA, 21 nt, Human
ccgucgaggggcucucagcuc

SEQ ID NO: 3800568 - RNA, 15 nt, Human
ccgucuaccugaggg

SEQ ID NO: 3800569 - RNA, 21 nt, Human
ccgucuccaggggcugcuucc

SEQ ID NO: 3800570 - RNA, 13 nt, Human
ccgucucucuccc

SEQ ID NO: 3800571 - RNA, 19 nt, Human
ccgucucucucccauggag

SEQ ID NO: 3800572 - RNA, 13 nt, Human
ccgucugugaauu

SEQ ID NO: 3800573 - RNA, 20 nt, Human
ccgugaagauacuuuguauu

SEQ ID NO: 3800574 - RNA, 23 nt, Human
ccgugaaggcuucucuguucuac

SEQ ID NO: 3800575 - RNA, 19 nt, Human
ccgugaaugggugcccaca

SEQ ID NO: 3800576 - RNA, 18 nt, Human
ccgugacagacuccugag

SEQ ID NO: 3800577 - RNA, 16 nt, Human
ccgugacgucugggug

SEQ ID NO: 3800578 - RNA, 12 nt, Human
ccgugagcccuu

SEQ ID NO: 3800579 - RNA, 20 nt, Human
ccgugagcgccugugcacac

SEQ ID NO: 3800580 - RNA, 14 nt, Human
ccgugaggauguca

SEQ ID NO: 3800581 - RNA, 14 nt, Human
ccgugaggccagag

SEQ ID NO: 3800582 - RNA, 18 nt, Human
ccgugaggccagagacac

SEQ ID NO: 3800583 - RNA, 20 nt, Human
ccgugaguucucagggcucc

SEQ ID NO: 3800584 - RNA, 23 nt, Human
ccgugaguucucagggcuccugc

SEQ ID NO: 3800585 - RNA, 19 nt, Human
ccgugcagacuggagggga

SEQ ID NO: 3800586 - RNA, 19 nt, Human
ccgugccaaagucucccuu

SEQ ID NO: 3800587 - RNA, 20 nt, Human
ccgugccaaguccagguccu

SEQ ID NO: 3800588 - RNA, 14 nt, Human
ccgugccgccugca

SEQ ID NO: 3800589 - RNA, 17 nt, Human
ccgugcucgccccagca

SEQ ID NO: 3800590 - RNA, 16 nt, Human
ccgugcugggcagccc

SEQ ID NO: 3800591 - RNA, 14 nt, Human
ccgugcuuccucag

SEQ ID NO: 3800592 - RNA, 21 nt, Human
ccgugcuuuuaaggaaaggca

SEQ ID NO: 3800593 - RNA, 14 nt, Human
ccguggaccuuccu

SEQ ID NO: 3800594 - RNA, 17 nt, Human
ccguggaccuuccugcc

SEQ ID NO: 3800595 - RNA, 23 nt, Human
ccguggaggaggaaggcaagagg

SEQ ID NO: 3800596 - RNA, 11 nt, Human
ccguggaggcu

SEQ ID NO: 3800597 - RNA, 16 nt, Human
ccguggaggcugcucg

SEQ ID NO: 3800598 - RNA, 21 nt, Human
ccguggauggccguggaugcg

SEQ ID NO: 3800599 - RNA, 17 nt, Human
ccguggccaucccugug

SEQ ID NO: 3800600 - RNA, 19 nt, Human
ccguggccaucccugugag

SEQ ID NO: 3800601 - RNA, 14 nt, Human
ccguggccccagcc

SEQ ID NO: 3800602 - RNA, 19 nt, Human
ccguggccccagccuggcc

SEQ ID NO: 3800603 - RNA, 20 nt, Human
ccguggccccagccuggccc

SEQ ID NO: 3800604 - RNA, 21 nt, Human
ccguggcccuuccuggacagc

SEQ ID NO: 3800605 - RNA, 22 nt, Human
ccguggcccuuccuggacagcu

SEQ ID NO: 3800606 - RNA, 16 nt, Human
ccguggcugcuguggg

SEQ ID NO: 3800607 - RNA, 17 nt, Human
ccguggcugcuguggga

SEQ ID NO: 3800608 - RNA, 20 nt, Human
ccguggcugcugugggaaau

SEQ ID NO: 3800609 - RNA, 21 nt, Human
ccguggcuucccgcucagccc

SEQ ID NO: 3800610 - RNA, 15 nt, Human
ccguggcuuugguuu

SEQ ID NO: 3800611 - RNA, 19 nt, Human
ccgugggcacugaaggcuu

SEQ ID NO: 3800612 - RNA, 13 nt, Human
ccgugggccuggg

SEQ ID NO: 3800613 - RNA, 18 nt, Human
ccgugggcggggccuugc

SEQ ID NO: 3800614 - RNA, 13 nt, Human
ccguggggcaggg

SEQ ID NO: 3800615 - RNA, 17 nt, Human
ccguggggccgccgccu

SEQ ID NO: 3800616 - RNA, 20 nt, Human
ccguggggccgccgccucuu

SEQ ID NO: 3800617 - RNA, 14 nt, Human
ccguggguugcuaa

SEQ ID NO: 3800618 - RNA, 15 nt, Human
ccguggguugcuaac

SEQ ID NO: 3800619 - RNA, 17 nt, Human
ccguggguugcuaacug

SEQ ID NO: 3800620 - RNA, 20 nt, Human
ccguggguugcuaacugaac

SEQ ID NO: 3800621 - RNA, 14 nt, Human
ccgugguccuuugg

SEQ ID NO: 3800622 - RNA, 16 nt, Human
ccguguaaaccaaagc

SEQ ID NO: 3800623 - RNA, 18 nt, Human
ccguguaggaaccugcac

SEQ ID NO: 3800624 - RNA, 18 nt, Human
ccgugucaagcugcucug

SEQ ID NO: 3800625 - RNA, 23 nt, Human
ccgugucaagcugcucugagcca

SEQ ID NO: 3800626 - RNA, 18 nt, Human
ccguguccacccccauac

SEQ ID NO: 3800627 - RNA, 16 nt, Human
ccgugucugucuggca

SEQ ID NO: 3800628 - RNA, 21 nt, Human
ccgugugagugugacagggcc

SEQ ID NO: 3800629 - RNA, 13 nt, Human
ccguguggccccu

SEQ ID NO: 3800630 - RNA, 20 nt, Human
ccgugugggagaccggccug

SEQ ID NO: 3800631 - RNA, 21 nt, Human
ccgugugguaagcaacauggc

SEQ ID NO: 3800632 - RNA, 14 nt, Human
ccguguuccccucu

SEQ ID NO: 3800633 - RNA, 21 nt, Human
ccguguugcagguucauggau

SEQ ID NO: 3800634 - RNA, 22 nt, Human
ccguguugcaugaaggagcagc

SEQ ID NO: 3800635 - RNA, 14 nt, Human
ccguguuugucucu

SEQ ID NO: 3800636 - RNA, 19 nt, Human
ccguguuugucucuucugg

SEQ ID NO: 3800637 - RNA, 13 nt, Human
ccguuacucucca

SEQ ID NO: 3800638 - RNA, 22 nt, Human
ccguuacucuccaaccuggaca

SEQ ID NO: 3800639 - RNA, 13 nt, Human
ccguuagcuccug

SEQ ID NO: 3800640 - RNA, 15 nt, Human
ccguuagcuccugug

SEQ ID NO: 3800641 - RNA, 20 nt, Human
ccguuauuaaaaaucucaaa

SEQ ID NO: 3800642 - RNA, 21 nt, Human
ccguuauuauaauuguaucag

SEQ ID NO: 3800643 - RNA, 18 nt, Human
ccguuccaccccaagaga

SEQ ID NO: 3800644 - RNA, 23 nt, Human
ccguuccugacaucacagcagcc

SEQ ID NO: 3800645 - RNA, 18 nt, Human
ccguucugcuggccugga

SEQ ID NO: 3800646 - RNA, 13 nt, Human
ccguugccaaccg

SEQ ID NO: 3800647 - RNA, 17 nt, Human
ccguugcugacuuagaa

SEQ ID NO: 3800648 - RNA, 11 nt, Human
ccguuggccac

SEQ ID NO: 3800649 - RNA, 16 nt, Human
caggccuccagcucag

SEQ ID NO: 3800650 - RNA, 12 nt, Human
caggccucccuc

SEQ ID NO: 3800651 - RNA, 13 nt, Human
caggccucccucu

SEQ ID NO: 3800652 - RNA, 14 nt, Human
caggccucccucuc

SEQ ID NO: 3800653 - RNA, 17 nt, Human
caggccucccucucucu

SEQ ID NO: 3800654 - RNA, 22 nt, Human
caggccucccucucucuucugc

SEQ ID NO: 3800655 - RNA, 13 nt, Human
caggccucccugu

SEQ ID NO: 3800656 - RNA, 13 nt, Human
caggccucuccau

SEQ ID NO: 3800657 - RNA, 13 nt, Human
caggccucugugu

SEQ ID NO: 3800658 - RNA, 15 nt, Human
caggccucugugucc

SEQ ID NO: 3800659 - RNA, 15 nt, Human
caggccucuuggcag

SEQ ID NO: 3800660 - RNA, 18 nt, Human
caggccucuuggcaguca

SEQ ID NO: 3800661 - RNA, 22 nt, Human
caggccugaaagaggcugaggc

SEQ ID NO: 3800662 - RNA, 20 nt, Human
caggccugccuguucccauu

SEQ ID NO: 3800663 - RNA, 17 nt, Human
caggccuggcaaguggg

SEQ ID NO: 3800664 - RNA, 17 nt, Human
caggccugggccagagu

SEQ ID NO: 3800665 - RNA, 22 nt, Human
caggccugggggcugggcagag

SEQ ID NO: 3800666 - RNA, 23 nt, Human
caggccugggggcugggcagagg

SEQ ID NO: 3800667 - RNA, 15 nt, Human
caggccuguccaaca

SEQ ID NO: 3800668 - RNA, 18 nt, Human
caggccuguguagcugug

SEQ ID NO: 3800669 - RNA, 21 nt, Human
caggccuguguagcugugacc

SEQ ID NO: 3800670 - RNA, 22 nt, Human
caggccuguguagcugugaccu

SEQ ID NO: 3800671 - RNA, 12 nt, Human
caggccugugug

SEQ ID NO: 3800672 - RNA, 11 nt, Human
caggccuugcg

SEQ ID NO: 3800673 - RNA, 18 nt, Human
caggccuuugagaaaggg

SEQ ID NO: 3800674 - RNA, 19 nt, Human
caggcgauccaccugucuc

SEQ ID NO: 3800675 - RNA, 20 nt, Human
caggcgauccaccugucuca

SEQ ID NO: 3800676 - RNA, 13 nt, Human
caggcgcaaggga

SEQ ID NO: 3800677 - RNA, 23 nt, Human
caggcgcaagggaggcccagcgc

SEQ ID NO: 3800678 - RNA, 22 nt, Human
caggcgcuagcacagcucccuu

SEQ ID NO: 3800679 - RNA, 17 nt, Human
caggcgcugaguaugga

SEQ ID NO: 3800680 - RNA, 17 nt, Human
caggcgggacagugcug

SEQ ID NO: 3800681 - RNA, 21 nt, Human
caggcgggagcgguggcccug

SEQ ID NO: 3800682 - RNA, 16 nt, Human
cagggacacgggcagc

SEQ ID NO: 3800683 - RNA, 19 nt, Human
cagggacagagacaccugc

SEQ ID NO: 3800684 - RNA, 21 nt, Human
cagggacagagacaccugcac

SEQ ID NO: 3800685 - RNA, 18 nt, Human
cagggacagaggccccag

SEQ ID NO: 3800686 - RNA, 18 nt, Human
cagggacaggauaagagg

SEQ ID NO: 3800687 - RNA, 22 nt, Human
cagggacccacuucacacacag

SEQ ID NO: 3800688 - RNA, 14 nt, Human
cagggaccccagaa

SEQ ID NO: 3800689 - RNA, 21 nt, Human
cagggacuaugaaugggcaaa

SEQ ID NO: 3800690 - RNA, 12 nt, Human
cagggacucagg

SEQ ID NO: 3800691 - RNA, 21 nt, Human
cagggacucaucuuucccucc

SEQ ID NO: 3800692 - RNA, 23 nt, Human
cagggacugaaaaccucuccuca

SEQ ID NO: 3800693 - RNA, 22 nt, Human
cagggagacuggguaggaaaga

SEQ ID NO: 3800694 - RNA, 13 nt, Human
cagggagagccca

SEQ ID NO: 3800695 - RNA, 16 nt, Human
cagggagagcccagga

SEQ ID NO: 3800696 - RNA, 20 nt, Human
cagggagagcccaggagcuc

SEQ ID NO: 3800697 - RNA, 23 nt, Human
cagggagaggagugacugagcuu

SEQ ID NO: 3800698 - RNA, 17 nt, Human
cagggagaggccaugau

SEQ ID NO: 3800699 - RNA, 19 nt, Human
cagggagcaagggcaggga

SEQ ID NO: 3800700 - RNA, 14 nt, Human
cagggagcagggaa

SEQ ID NO: 3800701 - RNA, 16 nt, Human
cagggagcagggaagg

SEQ ID NO: 3800702 - RNA, 18 nt, Human
cagggagcagggaaggcc

SEQ ID NO: 3800703 - RNA, 21 nt, Human
cagggagcagggaaggccuga

SEQ ID NO: 3800704 - RNA, 23 nt, Human
cagggagcaugagaggaggcagc

SEQ ID NO: 3800705 - RNA, 18 nt, Human
cagggagccuccugccca

SEQ ID NO: 3800706 - RNA, 16 nt, Human
cagggagcggaaagca

SEQ ID NO: 3800707 - RNA, 17 nt, Human
cagggagcggaaagcag

SEQ ID NO: 3800708 - RNA, 17 nt, Human
cagggagcggccggcca

SEQ ID NO: 3800709 - RNA, 23 nt, Human
cagggagcggccggccagccccu

SEQ ID NO: 3800710 - RNA, 19 nt, Human
cagggagcugggcccgaca

SEQ ID NO: 3800711 - RNA, 19 nt, Human
cagggaggacgcucucugg

SEQ ID NO: 3800712 - RNA, 21 nt, Human
cagggaggacgcucucuggcc

SEQ ID NO: 3800713 - RNA, 12 nt, Human
cagggaggagag

SEQ ID NO: 3800714 - RNA, 20 nt, Human
cagggaggagguggcagccc

SEQ ID NO: 3800715 - RNA, 24 nt, Human
cagggaggcaccauucaggaaccu

SEQ ID NO: 3800716 - RNA, 13 nt, Human
cagggaggcagcc

SEQ ID NO: 3800717 - RNA, 14 nt, Human
cagggaggcagccg

SEQ ID NO: 3800718 - RNA, 16 nt, Human
cagggaggcugguccu

SEQ ID NO: 3800719 - RNA, 22 nt, Human
cagggaggcugguccuauggcc

SEQ ID NO: 3800720 - RNA, 12 nt, Human
cagggagggccu

SEQ ID NO: 3800721 - RNA, 14 nt, Human
cagggaggucaggc

SEQ ID NO: 3800722 - RNA, 18 nt, Human
cagggaggucaggcccug

SEQ ID NO: 3800723 - RNA, 23 nt, Human
cagggaggucaggcccuggaacu

SEQ ID NO: 3800724 - RNA, 16 nt, Human
cagggaggucauuuug

SEQ ID NO: 3800725 - RNA, 18 nt, Human
cagggaggugaccccagg

SEQ ID NO: 3800726 - RNA, 17 nt, Human
cagggagguggcugggu

SEQ ID NO: 3800727 - RNA, 12 nt, Human
cagggaguguuc

SEQ ID NO: 3800728 - RNA, 18 nt, Human
cagggauaacaaagaacc

SEQ ID NO: 3800729 - RNA, 19 nt, Human
cagggaucuugcauuccca

SEQ ID NO: 3800730 - RNA, 19 nt, Human
cagggaugagcauggagcu

SEQ ID NO: 3800731 - RNA, 23 nt, Human
cagggaugccaucugugggcacg

SEQ ID NO: 3800732 - RNA, 13 nt, Human
cagggaugcccug

SEQ ID NO: 3800733 - RNA, 14 nt, Human
cagggaugcccugg

SEQ ID NO: 3800734 - RNA, 22 nt, Human
cagggaugcccuggagguggcu

SEQ ID NO: 3800735 - RNA, 17 nt, Human
cagggauggggccacag

SEQ ID NO: 3800736 - RNA, 19 nt, Human
cagggauggggccacagcc

SEQ ID NO: 3800737 - RNA, 18 nt, Human
cagggauguacaaggcga

SEQ ID NO: 3800738 - RNA, 21 nt, Human
cagggauguagauuaagguga

SEQ ID NO: 3800739 - RNA, 21 nt, Human
cagggauguggguuccacaga

SEQ ID NO: 3800740 - RNA, 22 nt, Human
cagggauugauuuuaaaaugua

SEQ ID NO: 3800741 - RNA, 18 nt, Human
cagggcaaagccaggucc

SEQ ID NO: 3800742 - RNA, 13 nt, Human
cagggcaagcucc

SEQ ID NO: 3800743 - RNA, 15 nt, Human
cagggcaagcuccgc

SEQ ID NO: 3800744 - RNA, 20 nt, Human
cagggcaaggguuaaggccu

SEQ ID NO: 3800745 - RNA, 22 nt, Human
cagggcaauaaaaugaccaugg

SEQ ID NO: 3800746 - RNA, 17 nt, Human
cagggcacaccgggcac

SEQ ID NO: 3800747 - RNA, 19 nt, Human
cagggcacaccgggcacuc

SEQ ID NO: 3800748 - RNA, 21 nt, Human
cagggcacaccgggcacucag

SEQ ID NO: 3800749 - RNA, 14 nt, Human
cagggcacaggagc

SEQ ID NO: 3800750 - RNA, 16 nt, Human
cagggcacaggagcua

SEQ ID NO: 3800751 - RNA, 18 nt, Human
cagggcacaggagcuacc

SEQ ID NO: 3800752 - RNA, 12 nt, Human
cagggcacaggg

SEQ ID NO: 3800753 - RNA, 15 nt, Human
cagggcacagggccu

SEQ ID NO: 3800754 - RNA, 16 nt, Human
cagggcacagggccug

SEQ ID NO: 3800755 - RNA, 17 nt, Human
cagggcacagggccugg

SEQ ID NO: 3800756 - RNA, 19 nt, Human
cagggcacagggccuggcc

SEQ ID NO: 3800757 - RNA, 20 nt, Human
cagggcacagggccuggccc

SEQ ID NO: 3800758 - RNA, 19 nt, Human
cagggcaccaagcccacag

SEQ ID NO: 3800759 - RNA, 13 nt, Human
cagggcagaguga

SEQ ID NO: 3800760 - RNA, 22 nt, Human
cagggcagauuuuaguuuuauu

SEQ ID NO: 3800761 - RNA, 13 nt, Human
cagggcagcagau

SEQ ID NO: 3800762 - RNA, 15 nt, Human
cagggcagcagaucu

SEQ ID NO: 3800763 - RNA, 14 nt, Human
cagggcagccaggg

SEQ ID NO: 3800764 - RNA, 15 nt, Human
cagggcagccaggga

SEQ ID NO: 3800765 - RNA, 20 nt, Human
cagggcagccagggagagcc

SEQ ID NO: 3800766 - RNA, 12 nt, Human
cagggcagcccc

SEQ ID NO: 3800767 - RNA, 19 nt, Human
cagggcagccugccuggag

SEQ ID NO: 3800768 - RNA, 17 nt, Human
cagggcagcgccaggcu

SEQ ID NO: 3800769 - RNA, 14 nt, Human
cagggcagcugggc

SEQ ID NO: 3800770 - RNA, 20 nt, Human
cagggcagcugggcccaacc

SEQ ID NO: 3800771 - RNA, 21 nt, Human
cagggcagcugggcccaaccc

SEQ ID NO: 3800772 - RNA, 13 nt, Human
cagggcaggacca

SEQ ID NO: 3800773 - RNA, 18 nt, Human
cagggcaggaccagccca

SEQ ID NO: 3800774 - RNA, 19 nt, Human
cagggcaggaccagcccac

SEQ ID NO: 3800775 - RNA, 14 nt, Human
cagggcaguaccug

SEQ ID NO: 3800776 - RNA, 22 nt, Human
cagggcagugcuagugagcugg

SEQ ID NO: 3800777 - RNA, 15 nt, Human
cagggcaucuccagg

SEQ ID NO: 3800778 - RNA, 19 nt, Human
cagggcaucucugggcugg

SEQ ID NO: 3800779 - RNA, 24 nt, Human
cagggcaucucugggcuggaugag

SEQ ID NO: 3800780 - RNA, 15 nt, Human
cagggcaucuugcug

SEQ ID NO: 3800781 - RNA, 23 nt, Human
cagggcaugaaaugaacacaaau

SEQ ID NO: 3800782 - RNA, 15 nt, Human
cagggcaugccacgu

SEQ ID NO: 3800783 - RNA, 21 nt, Human
cagggcaugccccggccaccu

SEQ ID NO: 3800784 - RNA, 23 nt, Human
cagggcaugccccggccaccucu

SEQ ID NO: 3800785 - RNA, 17 nt, Human
cagggcauggcugggaa

SEQ ID NO: 3800786 - RNA, 22 nt, Human
cagggccacgcuccagcugccc

SEQ ID NO: 3800787 - RNA, 16 nt, Human
cagggccacgugccag

SEQ ID NO: 3800788 - RNA, 17 nt, Human
cagggccacgugccagg

SEQ ID NO: 3800789 - RNA, 12 nt, Human
cagggccacucu

SEQ ID NO: 3800790 - RNA, 17 nt, Human
cagggccacucugccuc

SEQ ID NO: 3800791 - RNA, 18 nt, Human
cagggccacucugccucu

SEQ ID NO: 3800792 - RNA, 14 nt, Human
cagggccaggacug

SEQ ID NO: 3800793 - RNA, 15 nt, Human
cagggccaggacuga

SEQ ID NO: 3800794 - RNA, 18 nt, Human
cagggccaggacugagcc

SEQ ID NO: 3800795 - RNA, 16 nt, Human
cagggccagggcccug

SEQ ID NO: 3800796 - RNA, 17 nt, Human
cagggccaguggggccu

SEQ ID NO: 3800797 - RNA, 18 nt, Human
cagggccaguggggccug

SEQ ID NO: 3800798 - RNA, 22 nt, Human
cagggccaguggggccugugga

SEQ ID NO: 3800799 - RNA, 17 nt, Human
cagggccaugccugccc

SEQ ID NO: 3800800 - RNA, 18 nt, Human
cagggccaugcugaggcc

SEQ ID NO: 3800801 - RNA, 22 nt, Human
cagggccaugcugaggccuggg

SEQ ID NO: 3800802 - RNA, 17 nt, Human
cagggccaugucagaca

SEQ ID NO: 3800803 - RNA, 19 nt, Human
cagggcccaagucccuguu

SEQ ID NO: 3800804 - RNA, 13 nt, Human
cagggccccagaa

SEQ ID NO: 3800805 - RNA, 14 nt, Human
cagggccccagcac

SEQ ID NO: 3800806 - RNA, 15 nt, Human
cagggccccagcacu

SEQ ID NO: 3800807 - RNA, 20 nt, Human
cagggccccaggcauugcca

SEQ ID NO: 3800808 - RNA, 21 nt, Human
cagggcccccaucucaugccc

SEQ ID NO: 3800809 - RNA, 21 nt, Human
cagggccccucacccugccuu

SEQ ID NO: 3800810 - RNA, 22 nt, Human
cagggccccucuccccagggaa

SEQ ID NO: 3800811 - RNA, 20 nt, Human
cagggcccgggaagcaaaug

SEQ ID NO: 3800812 - RNA, 16 nt, Human
ccuaccugugccugac

SEQ ID NO: 3800813 - RNA, 22 nt, Human
ccuaccuguucagugucccggg

SEQ ID NO: 3800814 - RNA, 15 nt, Human
ccuaccuucaaagcu

SEQ ID NO: 3800815 - RNA, 13 nt, Human
ccuaccuugcuuu

SEQ ID NO: 3800816 - RNA, 20 nt, Human
ccuacgucaaacaugaagug

SEQ ID NO: 3800817 - RNA, 14 nt, Human
ccuacucacacagg

SEQ ID NO: 3800818 - RNA, 15 nt, Human
ccuacucccugcaga

SEQ ID NO: 3800819 - RNA, 11 nt, Human
ccuacuccuga

SEQ ID NO: 3800820 - RNA, 13 nt, Human
ccuacuccugacu

SEQ ID NO: 3800821 - RNA, 19 nt, Human
ccuacuccugucuucugcu

SEQ ID NO: 3800822 - RNA, 22 nt, Human
ccuacuccugucuucugcuuug

SEQ ID NO: 3800823 - RNA, 18 nt, Human
ccuacucggcucugcagu

SEQ ID NO: 3800824 - RNA, 23 nt, Human
ccuacucugugucagguggggca

SEQ ID NO: 3800825 - RNA, 18 nt, Human
ccuacucuucucucugcu

SEQ ID NO: 3800826 - RNA, 15 nt, Human
ccaaguccagguccu

SEQ ID NO: 3800827 - RNA, 16 nt, Human
ccaaguccagguccug

SEQ ID NO: 3800828 - RNA, 23 nt, Human
ccaagucccuguuuucugagccc

SEQ ID NO: 3800829 - RNA, 21 nt, Human
ccaaguccgcagaagcccuga

SEQ ID NO: 3800830 - RNA, 15 nt, Human
ccaaguccugaagag

SEQ ID NO: 3800831 - RNA, 18 nt, Human
ccaagucggaacagcaga

SEQ ID NO: 3800832 - RNA, 14 nt, Human
ccaagucuacagag

SEQ ID NO: 3800833 - RNA, 16 nt, Human
ccaagugcaggcuggc

SEQ ID NO: 3800834 - RNA, 14 nt, Human
ccaagugccagagg

SEQ ID NO: 3800835 - RNA, 16 nt, Human
ccaagugccagaggug

SEQ ID NO: 3800836 - RNA, 18 nt, Human
ccaagugccagagguggg

SEQ ID NO: 3800837 - RNA, 13 nt, Human
ccaagugcgugcc

SEQ ID NO: 3800838 - RNA, 20 nt, Human
ccaaguggaccuugagacca

SEQ ID NO: 3800839 - RNA, 22 nt, Human
ccaaguggagccugacagccag

SEQ ID NO: 3800840 - RNA, 14 nt, Human
ccaaguggcagagc

SEQ ID NO: 3800841 - RNA, 17 nt, Human
ccaaguggcagagcuug

SEQ ID NO: 3800842 - RNA, 14 nt, Human
ccaaguggugccua

SEQ ID NO: 3800843 - RNA, 17 nt, Human
ccaagugugugugcgug

SEQ ID NO: 3800844 - RNA, 20 nt, Human
ccaaguuauauaaagagaaa

SEQ ID NO: 3800845 - RNA, 22 nt, Human
ccaaguuauauaaagagaaaau

SEQ ID NO: 3800846 - RNA, 11 nt, Human
ccaaguuccuc

SEQ ID NO: 3800847 - RNA, 20 nt, Human
ccaaguugugcuugagccag

SEQ ID NO: 3800848 - RNA, 22 nt, Human
ccaaguugugcuugagccagga

SEQ ID NO: 3800849 - RNA, 18 nt, Human
ccaaguuguggugcugac

SEQ ID NO: 3800850 - RNA, 16 nt, Human
ccaaguuuccauagca

SEQ ID NO: 3800851 - RNA, 16 nt, Human
ccaaguuuugugaaau

SEQ ID NO: 3800852 - RNA, 20 nt, Human
ccaauaaaccaaugaacgaa

SEQ ID NO: 3800853 - RNA, 17 nt, Human
ccaauaccccauggacc

SEQ ID NO: 3800854 - RNA, 18 nt, Human
ccaauagcaaauucaaag

SEQ ID NO: 3800855 - RNA, 18 nt, Human
ccaauaggcaaauuaauc

SEQ ID NO: 3800856 - RNA, 22 nt, Human
ccaauaguuguugauuggcagg

SEQ ID NO: 3800857 - RNA, 19 nt, Human
ccaauauccucgcucccgg

SEQ ID NO: 3800858 - RNA, 20 nt, Human
ccaauauccucgcucccggg

SEQ ID NO: 3800859 - RNA, 22 nt, Human
ccaauauuggagcauaucaaaa

SEQ ID NO: 3800860 - RNA, 15 nt, Human
ccaauauuguacagu

SEQ ID NO: 3800861 - RNA, 17 nt, Human
ccaauauuuaccagacc

SEQ ID NO: 3800862 - RNA, 19 nt, Human
ccaauauuucugcuuucuu

SEQ ID NO: 3800863 - RNA, 21 nt, Human
ccaaucagagaccaggcccug

SEQ ID NO: 3800864 - RNA, 13 nt, Human
ccaaucagcacug

SEQ ID NO: 3800865 - RNA, 18 nt, Human
ccaaucagcacugaaaau

SEQ ID NO: 3800866 - RNA, 15 nt, Human
ccaaucauauuaaua

SEQ ID NO: 3800867 - RNA, 12 nt, Human
ccaaucauuuua

SEQ ID NO: 3800868 - RNA, 20 nt, Human
ccaauccagguacgcacaga

SEQ ID NO: 3800869 - RNA, 23 nt, Human
ccaauccuaugcaugguuucagc

SEQ ID NO: 3800870 - RNA, 18 nt, Human
ccaauccucacugggugg

SEQ ID NO: 3800871 - RNA, 13 nt, Human
ccaauccugcccc

SEQ ID NO: 3800872 - RNA, 14 nt, Human
ccaaucuuacuuug

SEQ ID NO: 3800873 - RNA, 15 nt, Human
ccaaucuuacuuugu

SEQ ID NO: 3800874 - RNA, 16 nt, Human
ccaaucuuacuuugua

SEQ ID NO: 3800875 - RNA, 15 nt, Human
ccaaugaaaaaaugu

SEQ ID NO: 3800876 - RNA, 12 nt, Human
ccaaugaauaau

SEQ ID NO: 3800877 - RNA, 18 nt, Human
ccaaugaauuauuauaua

SEQ ID NO: 3800878 - RNA, 16 nt, Human
ccaaugagacuugccu

SEQ ID NO: 3800879 - RNA, 18 nt, Human
ccaaugagacuugccuuc

SEQ ID NO: 3800880 - RNA, 16 nt, Human
ccaaugagcuuucuga

SEQ ID NO: 3800881 - RNA, 19 nt, Human
ccaaugaggucugaaaugg

SEQ ID NO: 3800882 - RNA, 19 nt, Human
ccaaugcacauccauuccc

SEQ ID NO: 3800883 - RNA, 18 nt, Human
ccaaugcaccuaaagaaa

SEQ ID NO: 3800884 - RNA, 22 nt, Human
ccaaugcacuuuguucuggcuc

SEQ ID NO: 3800885 - RNA, 23 nt, Human
ccaaugcacuuuguucuggcucu

SEQ ID NO: 3800886 - RNA, 14 nt, Human
ccaaugcagaacuc

SEQ ID NO: 3800887 - RNA, 17 nt, Human
ccaaugcaugcagccac

SEQ ID NO: 3800888 - RNA, 21 nt, Human
ccaaugcaugcagccacugug

SEQ ID NO: 3800889 - RNA, 18 nt, Human
ccaaugccccacuggcag

SEQ ID NO: 3800890 - RNA, 19 nt, Human
ccaauggaaccuccuuucu

SEQ ID NO: 3800891 - RNA, 22 nt, Human
ccaauggaaugugauguucaug

SEQ ID NO: 3800892 - RNA, 17 nt, Human
ccaauguaggagcugcc

SEQ ID NO: 3800893 - RNA, 16 nt, Human
ccaaugucuggagacc

SEQ ID NO: 3800894 - RNA, 19 nt, Human
ccaaugugaacagcggcug

SEQ ID NO: 3800895 - RNA, 14 nt, Human
ccaauguuuaaaaa

SEQ ID NO: 3800896 - RNA, 16 nt, Human
ccaauguuuaaaaaag

SEQ ID NO: 3800897 - RNA, 18 nt, Human
ccaauguuuuccacccau

SEQ ID NO: 3800898 - RNA, 18 nt, Human
ccaauuaaggauuuuaug

SEQ ID NO: 3800899 - RNA, 16 nt, Human
ccaauuaguuuccuuu

SEQ ID NO: 3800900 - RNA, 15 nt, Human
ccaauuauguuaaac

SEQ ID NO: 3800901 - RNA, 14 nt, Human
ccaauucagacagg

SEQ ID NO: 3800902 - RNA, 20 nt, Human
ccaauuccuugcacauagua

SEQ ID NO: 3800903 - RNA, 12 nt, Human
ccaauuccuugu

SEQ ID NO: 3800904 - RNA, 14 nt, Human
ccaauuccuuguag

SEQ ID NO: 3800905 - RNA, 11 nt, Human
ccaauucuuac

SEQ ID NO: 3800906 - RNA, 15 nt, Human
ccaauugugcugcca

SEQ ID NO: 3800907 - RNA, 19 nt, Human
ccaauuucaaguuccaagu

SEQ ID NO: 3800908 - RNA, 22 nt, Human
ccaauuucccacccccacccac

SEQ ID NO: 3800909 - RNA, 20 nt, Human
ccaauuucggauuuuuucca

SEQ ID NO: 3800910 - RNA, 10 nt, Human
ccaauuucuc

SEQ ID NO: 3800911 - RNA, 20 nt, Human
ccaauuugcacauuaaauga

SEQ ID NO: 3800912 - RNA, 22 nt, Human
ccaauuuuaauuuaguaaaugu

SEQ ID NO: 3800913 - RNA, 17 nt, Human
ccaauuuuuuuuuccuu

SEQ ID NO: 3800914 - RNA, 22 nt, Human
ccacaaaaacagguauauacuu

SEQ ID NO: 3800915 - RNA, 16 nt, Human
ccacaaaacaaagcaa

SEQ ID NO: 3800916 - RNA, 23 nt, Human
ccacaaaauaaccaauccuggac

SEQ ID NO: 3800917 - RNA, 12 nt, Human
ccacaaaauaua

SEQ ID NO: 3800918 - RNA, 18 nt, Human
ccacaacccuguuuuaua

SEQ ID NO: 3800919 - RNA, 16 nt, Human
ccacaacgugcaacug

SEQ ID NO: 3800920 - RNA, 22 nt, Human
ccacaacuccugucuaacugcu

SEQ ID NO: 3800921 - RNA, 12 nt, Human
ccacaacugaca

SEQ ID NO: 3800922 - RNA, 15 nt, Human
ccacaacugacacag

SEQ ID NO: 3800923 - RNA, 19 nt, Human
ccacaacugacacaggaaa

SEQ ID NO: 3800924 - RNA, 14 nt, Human
ccacaacuuuuaac

SEQ ID NO: 3800925 - RNA, 16 nt, Human
ccacaagacccuugug

SEQ ID NO: 3800926 - RNA, 21 nt, Human
ccacaagccugagggaaaggc

SEQ ID NO: 3800927 - RNA, 22 nt, Human
ccacaagucuuccagaggaugc

SEQ ID NO: 3800928 - RNA, 13 nt, Human
ccacacacacaca

SEQ ID NO: 3800929 - RNA, 15 nt, Human
ccacacacacacaca

SEQ ID NO: 3800930 - RNA, 21 nt, Human
ccacacacacacacaugcaua

SEQ ID NO: 3800931 - RNA, 16 nt, Human
ccacacacacagaaaa

SEQ ID NO: 3800932 - RNA, 20 nt, Human
ccacacacacagaaaauaua

SEQ ID NO: 3800933 - RNA, 21 nt, Human
ccacacacacagaaaauauac

SEQ ID NO: 3800934 - RNA, 22 nt, Human
ccacacacagaggaagagcagg

SEQ ID NO: 3800935 - RNA, 13 nt, Human
ccacacaccccaa

SEQ ID NO: 3800936 - RNA, 23 nt, Human
ccacacacgcaggaacucccagc

SEQ ID NO: 3800937 - RNA, 15 nt, Human
ccacacagaaugcaa

SEQ ID NO: 3800938 - RNA, 15 nt, Human
ccacacaucccagcc

SEQ ID NO: 3800939 - RNA, 17 nt, Human
ccacacaucccagccca

SEQ ID NO: 3800940 - RNA, 18 nt, Human
ccacacaucccagcccaa

SEQ ID NO: 3800941 - RNA, 14 nt, Human
ccacaccaagcugu

SEQ ID NO: 3800942 - RNA, 20 nt, Human
ccacaccaagcugugccacc

SEQ ID NO: 3800943 - RNA, 13 nt, Human
ccacaccacaucu

SEQ ID NO: 3800944 - RNA, 21 nt, Human
ccacaccauaagcuacugcca

SEQ ID NO: 3800945 - RNA, 23 nt, Human
ccacaccauaagcuacugccauc

SEQ ID NO: 3800946 - RNA, 21 nt, Human
ccacacccagcccacuucugc

SEQ ID NO: 3800947 - RNA, 22 nt, Human
ccacacccagcccacuucugcc

SEQ ID NO: 3800948 - RNA, 15 nt, Human
ccacacccagccuca

SEQ ID NO: 3800949 - RNA, 16 nt, Human
ccacacccagccucag

SEQ ID NO: 3800950 - RNA, 17 nt, Human
ccacacccagccucagu

SEQ ID NO: 3800951 - RNA, 20 nt, Human
ccacacccccaccccuugcu

SEQ ID NO: 3800952 - RNA, 15 nt, Human
ccacacccucuccca

SEQ ID NO: 3800953 - RNA, 14 nt, Human
ccacaccgcagaag

SEQ ID NO: 3800954 - RNA, 20 nt, Human
ccacaccguguaaaccaaag

SEQ ID NO: 3800955 - RNA, 13 nt, Human
ccacaccuccaca

SEQ ID NO: 3800956 - RNA, 15 nt, Human
ccacaccuccacagu

SEQ ID NO: 3800957 - RNA, 14 nt, Human
ccacaccucccuga

SEQ ID NO: 3800958 - RNA, 11 nt, Human
ccacaccuccu

SEQ ID NO: 3800959 - RNA, 13 nt, Human
ccacaccuccugg

SEQ ID NO: 3800960 - RNA, 15 nt, Human
ccacaccuccugggg

SEQ ID NO: 3800961 - RNA, 14 nt, Human
ccacaccugccucu

SEQ ID NO: 3800962 - RNA, 18 nt, Human
ccacaccuggcacugcug

SEQ ID NO: 3800963 - RNA, 19 nt, Human
ccacaccuggcacugcugu

SEQ ID NO: 3800964 - RNA, 22 nt, Human
ccacacguaaugaaacuuggau

SEQ ID NO: 3800965 - RNA, 15 nt, Human
cauuauguuaauauu

SEQ ID NO: 3800966 - RNA, 17 nt, Human
cauuauguuaauauuuc

SEQ ID NO: 3800967 - RNA, 13 nt, Human
cauuauuaaauug

SEQ ID NO: 3800968 - RNA, 12 nt, Human
cauuauuacuuu

SEQ ID NO: 3800969 - RNA, 18 nt, Human
cauuauuacuuuugcugu

SEQ ID NO: 3800970 - RNA, 13 nt, Human
cauuauuaucaac

SEQ ID NO: 3800971 - RNA, 17 nt, Human
ccaccaagagggacgcc

SEQ ID NO: 3800972 - RNA, 21 nt, Human
ccaccaagagggacgccuggg

SEQ ID NO: 3800973 - RNA, 17 nt, Human
ccaccaaggucuucagc

SEQ ID NO: 3800974 - RNA, 14 nt, Human
ccaccacacauccc

SEQ ID NO: 3800975 - RNA, 21 nt, Human
ccaccacacugauccagcccu

SEQ ID NO: 3800976 - RNA, 14 nt, Human
ccaccaccacuggc

SEQ ID NO: 3800977 - RNA, 15 nt, Human
ccaccaccagaaagc

SEQ ID NO: 3800978 - RNA, 18 nt, Human
ccaccaccgcccgucugu

SEQ ID NO: 3800979 - RNA, 22 nt, Human
ccaccaccuaggccacuccucc

SEQ ID NO: 3800980 - RNA, 17 nt, Human
cauucuuauaaauauga

SEQ ID NO: 3800981 - RNA, 21 nt, Human
cauucuucccaacuugccuuu

SEQ ID NO: 3800982 - RNA, 18 nt, Human
cauucuucucuagcuggu

SEQ ID NO: 3800983 - RNA, 21 nt, Human
cauucuucucuguugucguaa

SEQ ID NO: 3800984 - RNA, 18 nt, Human
cauucuucugagcacugu

SEQ ID NO: 3800985 - RNA, 13 nt, Human
cauucuucugauc

SEQ ID NO: 3800986 - RNA, 19 nt, Human
cauucuuggcuuaaucauu

SEQ ID NO: 3800987 - RNA, 20 nt, Human
cauucuuggcuuaaucauuu

SEQ ID NO: 3800988 - RNA, 21 nt, Human
cauucuuguaaggcuuugauu

SEQ ID NO: 3800989 - RNA, 18 nt, Human
cauucuugucacaauaaa

SEQ ID NO: 3800990 - RNA, 14 nt, Human
cauucuuucccaac

SEQ ID NO: 3800991 - RNA, 20 nt, Human
cauucuuugcuugaacacag

SEQ ID NO: 3800992 - RNA, 16 nt, Human
cauucuuuuaaaagac

SEQ ID NO: 3800993 - RNA, 18 nt, Human
cauucuuuuaacuucuuu

SEQ ID NO: 3800994 - RNA, 12 nt, Human
cauucuuuugua

SEQ ID NO: 3800995 - RNA, 16 nt, Human
cauucuuuuguaauuu

SEQ ID NO: 3800996 - RNA, 19 nt, Human
cauucuuuuguaauuuaaa

SEQ ID NO: 3800997 - RNA, 14 nt, Human
cauucuuuuugaaa

SEQ ID NO: 3800998 - RNA, 16 nt, Human
cauucuuuuugaaaug

SEQ ID NO: 3800999 - RNA, 17 nt, Human
cauucuuuuugcucuaa

SEQ ID NO: 3801000 - RNA, 19 nt, Human
cauucuuuuuuucuuggcc

SEQ ID NO: 3801001 - RNA, 18 nt, Human
cauugaaaauguaaguaa

SEQ ID NO: 3801002 - RNA, 19 nt, Human
cauugaaagagaaccaguu

SEQ ID NO: 3801003 - RNA, 10 nt, Human
cauugaaaug

SEQ ID NO: 3801004 - RNA, 16 nt, Human
cauugaaaugagcacc

SEQ ID NO: 3801005 - RNA, 19 nt, Human
cauugaaaugagcaccucc

SEQ ID NO: 3801006 - RNA, 13 nt, Human
cauugaaauguca

SEQ ID NO: 3801007 - RNA, 17 nt, Human
cauugaacacaaacugu

SEQ ID NO: 3801008 - RNA, 15 nt, Human
cauugaacagcaaag

SEQ ID NO: 3801009 - RNA, 21 nt, Human
cauugaagaauguuagaguaa

SEQ ID NO: 3801010 - RNA, 15 nt, Human
cauugaagagagagc

SEQ ID NO: 3801011 - RNA, 16 nt, Human
cauugaagagagagcu

SEQ ID NO: 3801012 - RNA, 16 nt, Human
cauugaagccgacucu

SEQ ID NO: 3801013 - RNA, 18 nt, Human
cauugaagccgacucugg

SEQ ID NO: 3801014 - RNA, 18 nt, Human
cauugaaguaaugaauuu

SEQ ID NO: 3801015 - RNA, 19 nt, Human
cauugaaucuguauggcua

SEQ ID NO: 3801016 - RNA, 22 nt, Human
cauugaauggcuauguuuuuaa

SEQ ID NO: 3801017 - RNA, 17 nt, Human
cauugaauuauaaaagc

SEQ ID NO: 3801018 - RNA, 21 nt, Human
cauugaauucuugguugagga

SEQ ID NO: 3801019 - RNA, 22 nt, Human
cauugaauucuugguugaggaa

SEQ ID NO: 3801020 - RNA, 16 nt, Human
cauugacaaaucugug

SEQ ID NO: 3801021 - RNA, 21 nt, Human
cauugacaaaucuguguauau

SEQ ID NO: 3801022 - RNA, 21 nt, Human
cauugacauuauagacauuga

SEQ ID NO: 3801023 - RNA, 15 nt, Human
cauugaccaagaacu

SEQ ID NO: 3801024 - RNA, 21 nt, Human
cauugaccaagaacugcaugg

SEQ ID NO: 3801025 - RNA, 17 nt, Human
cauugacccauagcaca

SEQ ID NO: 3801026 - RNA, 15 nt, Human
cauugaccuauuucc

SEQ ID NO: 3801027 - RNA, 17 nt, Human
cauugaccugaggcccu

SEQ ID NO: 3801028 - RNA, 18 nt, Human
cauugacgauuccuucuc

SEQ ID NO: 3801029 - RNA, 22 nt, Human
cauugacuaucaaacugaagcc

SEQ ID NO: 3801030 - RNA, 22 nt, Human
cauugacuuucaguaaacauaa

SEQ ID NO: 3801031 - RNA, 16 nt, Human
cauugacuuuuauaaa

SEQ ID NO: 3801032 - RNA, 17 nt, Human
cauugaggaagagucuu

SEQ ID NO: 3801033 - RNA, 21 nt, Human
cauugaguagacacauuuaag

SEQ ID NO: 3801034 - RNA, 14 nt, Human
cauugaguauuguu

SEQ ID NO: 3801035 - RNA, 16 nt, Human
cauugaguauuguuua

SEQ ID NO: 3801036 - RNA, 16 nt, Human
cauugaguugguuacu

SEQ ID NO: 3801037 - RNA, 19 nt, Human
cauugauauugugaacauu

SEQ ID NO: 3801038 - RNA, 22 nt, Human
cauugauauuugugcauuuucu

SEQ ID NO: 3801039 - RNA, 14 nt, Human
cauugauggggaag

SEQ ID NO: 3801040 - RNA, 16 nt, Human
cauugauggggaagga

SEQ ID NO: 3801041 - RNA, 19 nt, Human
cauugauggggaaggaggc

SEQ ID NO: 3801042 - RNA, 23 nt, Human
cauugauugcuguguccaacucc

SEQ ID NO: 3801043 - RNA, 18 nt, Human
cauugauuuccuguguca

SEQ ID NO: 3801044 - RNA, 16 nt, Human
cauugauuugauuuuu

SEQ ID NO: 3801045 - RNA, 14 nt, Human
cauugcaacaaaau

SEQ ID NO: 3801046 - RNA, 14 nt, Human
cauugcaauagaaa

SEQ ID NO: 3801047 - RNA, 17 nt, Human
cauugcacagggagacg

SEQ ID NO: 3801048 - RNA, 21 nt, Human
cauugcacauaagcuuccauu

SEQ ID NO: 3801049 - RNA, 20 nt, Human
cauugcacucuagccugggc

SEQ ID NO: 3801050 - RNA, 16 nt, Human
cauugcagucugcuuc

SEQ ID NO: 3801051 - RNA, 16 nt, Human
cauugcauucuauugc

SEQ ID NO: 3801052 - RNA, 11 nt, Human
cauugcauuua

SEQ ID NO: 3801053 - RNA, 13 nt, Human
cauugccaccagg

SEQ ID NO: 3801054 - RNA, 14 nt, Human
cauugccaccagga

SEQ ID NO: 3801055 - RNA, 15 nt, Human
cauugccaccaggag

SEQ ID NO: 3801056 - RNA, 17 nt, Human
cauugccaccaggagaa

SEQ ID NO: 3801057 - RNA, 15 nt, Human
cauugccauucccug

SEQ ID NO: 3801058 - RNA, 16 nt, Human
cauugccauucccugc

SEQ ID NO: 3801059 - RNA, 18 nt, Human
cauugccauucccugccu

SEQ ID NO: 3801060 - RNA, 12 nt, Human
cauugcccuggu

SEQ ID NO: 3801061 - RNA, 20 nt, Human
cauugccucggcuggcuccc

SEQ ID NO: 3801062 - RNA, 14 nt, Human
cauugccugcgguc

SEQ ID NO: 3801063 - RNA, 14 nt, Human
cauugccuuugaau

SEQ ID NO: 3801064 - RNA, 17 nt, Human
cauugccuuugaauguu

SEQ ID NO: 3801065 - RNA, 22 nt, Human
cauugccuuugaauguuaauuu

SEQ ID NO: 3801066 - RNA, 17 nt, Human
cauugcggacagccacg

SEQ ID NO: 3801067 - RNA, 15 nt, Human
cauugcuagauaaaa

SEQ ID NO: 3801068 - RNA, 19 nt, Human
cauugcucccuaagacugu

SEQ ID NO: 3801069 - RNA, 22 nt, Human
cauugcugaaaaugguauuuuc

SEQ ID NO: 3801070 - RNA, 21 nt, Human
cauugcugagccucugcuccc

SEQ ID NO: 3801071 - RNA, 22 nt, Human
cauugcugcuccuuagcugcca

SEQ ID NO: 3801072 - RNA, 13 nt, Human
cauugcuguagga

SEQ ID NO: 3801073 - RNA, 16 nt, Human
cauugcugucugcagc

SEQ ID NO: 3801074 - RNA, 23 nt, Human
cauugcuuguguaguagaaacua

SEQ ID NO: 3801075 - RNA, 14 nt, Human
cauugcuuuacugg

SEQ ID NO: 3801076 - RNA, 18 nt, Human
cauugcuuucguguaaau

SEQ ID NO: 3801077 - RNA, 12 nt, Human
cauugcuuucug

SEQ ID NO: 3801078 - RNA, 17 nt, Human
cauugcuuuuaaaacua

SEQ ID NO: 3801079 - RNA, 18 nt, Human
cauuggaaauuuagcauu

SEQ ID NO: 3801080 - RNA, 20 nt, Human
cauuggaaauuuagcauugu

SEQ ID NO: 3801081 - RNA, 19 nt, Human
cauuggaacuggaggcagg

SEQ ID NO: 3801082 - RNA, 15 nt, Human
cauuggaagacccca

SEQ ID NO: 3801083 - RNA, 17 nt, Human
cauuggaagaccccacc

SEQ ID NO: 3801084 - RNA, 20 nt, Human
cauuggaagaccccacccaa

SEQ ID NO: 3801085 - RNA, 23 nt, Human
cauuggaagcagguuaaauguuu

SEQ ID NO: 3801086 - RNA, 16 nt, Human
cauuggaauguucuca

SEQ ID NO: 3801087 - RNA, 18 nt, Human
cauuggaauguucucaga

SEQ ID NO: 3801088 - RNA, 19 nt, Human
cauuggaauguucucagau

SEQ ID NO: 3801089 - RNA, 16 nt, Human
cauuggagauguuuag

SEQ ID NO: 3801090 - RNA, 20 nt, Human
cauuggauucugagagcugu

SEQ ID NO: 3801091 - RNA, 20 nt, Human
cauuggcaccuaauccaggc

SEQ ID NO: 3801092 - RNA, 14 nt, Human
cauuggcagcaggu

SEQ ID NO: 3801093 - RNA, 17 nt, Human
cauuggcagcaggugcu

SEQ ID NO: 3801094 - RNA, 21 nt, Human
cauuggcagcaggugcugcua

SEQ ID NO: 3801095 - RNA, 18 nt, Human
cauuggcuauuuaaaacu

SEQ ID NO: 3801096 - RNA, 15 nt, Human
cauuggggcucccag

SEQ ID NO: 3801097 - RNA, 16 nt, Human
cauuggggcucccagc

SEQ ID NO: 3801098 - RNA, 23 nt, Human
cauugggguaguuguguuucaac

SEQ ID NO: 3801099 - RNA, 20 nt, Human
cauuggguccugggucuuuc

SEQ ID NO: 3801100 - RNA, 18 nt, Human
cauugggucuauuccagc

SEQ ID NO: 3801101 - RNA, 20 nt, Human
cauugggucuauuccagcuc

SEQ ID NO: 3801102 - RNA, 23 nt, Human
cauuggguuguagccaaagguuc

SEQ ID NO: 3801103 - RNA, 13 nt, Human
cauugguccaaga

SEQ ID NO: 3801104 - RNA, 14 nt, Human
cauugguggacuac

SEQ ID NO: 3801105 - RNA, 17 nt, Human
cauugguguuguacuca

SEQ ID NO: 3801106 - RNA, 13 nt, Human
cauugguguuguc

SEQ ID NO: 3801107 - RNA, 18 nt, Human
cauugguucccuuugcuc

SEQ ID NO: 3801108 - RNA, 15 nt, Human
cauuguaaaagcauu

SEQ ID NO: 3801109 - RNA, 22 nt, Human
cauuguaaaagcauuuuguaau

SEQ ID NO: 3801110 - RNA, 16 nt, Human
cauuguaaaauaauuc

SEQ ID NO: 3801111 - RNA, 18 nt, Human
cauuguaaacaaacucuu

SEQ ID NO: 3801112 - RNA, 13 nt, Human
cauuguaaaccac

SEQ ID NO: 3801113 - RNA, 21 nt, Human
cauuguaaaccacaaggcugu

SEQ ID NO: 3801114 - RNA, 19 nt, Human
cauuguaaauaguauuuga

SEQ ID NO: 3801115 - RNA, 17 nt, Human
ccaaauguucaucaaug

SEQ ID NO: 3801116 - RNA, 19 nt, Human
ccaaauguuuacagggagc

SEQ ID NO: 3801117 - RNA, 23 nt, Human
ccaaauguuuacagggagccucc

SEQ ID NO: 3801118 - RNA, 14 nt, Human
ccaaauguuuauuu

SEQ ID NO: 3801119 - RNA, 12 nt, Human
ccaaauuaaaaa

SEQ ID NO: 3801120 - RNA, 15 nt, Human
ccaaauuaaaaaaga

SEQ ID NO: 3801121 - RNA, 23 nt, Human
ccaaauuaagagagucuauuuac

SEQ ID NO: 3801122 - RNA, 18 nt, Human
ccaaauuaucaagcuaau

SEQ ID NO: 3801123 - RNA, 12 nt, Human
ccaaauuauuug

SEQ ID NO: 3801124 - RNA, 17 nt, Human
ccaaauuauuuguguaa

SEQ ID NO: 3801125 - RNA, 13 nt, Human
ccaaauucaguuu

SEQ ID NO: 3801126 - RNA, 19 nt, Human
ccaaauucaguuucauaaa

SEQ ID NO: 3801127 - RNA, 22 nt, Human
ccaaauucuuucaguggcuacc

SEQ ID NO: 3801128 - RNA, 22 nt, Human
ccaaauugcuccuaagcuucaa

SEQ ID NO: 3801129 - RNA, 17 nt, Human
ccaaauugugcuucucc

SEQ ID NO: 3801130 - RNA, 21 nt, Human
ccaaauugugcuucuccccag

SEQ ID NO: 3801131 - RNA, 23 nt, Human
ccaaauugugcuucuccccagaa

SEQ ID NO: 3801132 - RNA, 11 nt, Human
ccaaauuuaaa

SEQ ID NO: 3801133 - RNA, 17 nt, Human
ccaaauuuucuuuuuau

SEQ ID NO: 3801134 - RNA, 11 nt, Human
ccaacaaacca

SEQ ID NO: 3801135 - RNA, 12 nt, Human
ccaacaaagcug

SEQ ID NO: 3801136 - RNA, 17 nt, Human
ccaacaacauccauguc

SEQ ID NO: 3801137 - RNA, 13 nt, Human
ccaacaagaaugc

SEQ ID NO: 3801138 - RNA, 19 nt, Human
ccaacaagaaugcauugau

SEQ ID NO: 3801139 - RNA, 21 nt, Human
ccaacaagauugcuuaauaaa

SEQ ID NO: 3801140 - RNA, 14 nt, Human
ccaacaagggcagu

SEQ ID NO: 3801141 - RNA, 23 nt, Human
ccaacaagggcaguggaggugcu

SEQ ID NO: 3801142 - RNA, 20 nt, Human
ccaacacaaggugggcaggg

SEQ ID NO: 3801143 - RNA, 17 nt, Human
ccaacaccaagcacagc

SEQ ID NO: 3801144 - RNA, 23 nt, Human
ccaacaccaagcacagcagccug

SEQ ID NO: 3801145 - RNA, 15 nt, Human
ccaacaccacagaca

SEQ ID NO: 3801146 - RNA, 16 nt, Human
ccaacaccagccccug

SEQ ID NO: 3801147 - RNA, 18 nt, Human
ccaacaccagccccugcc

SEQ ID NO: 3801148 - RNA, 22 nt, Human
ccaacaccagccccugccccag

SEQ ID NO: 3801149 - RNA, 16 nt, Human
ccaacaccaucacagc

SEQ ID NO: 3801150 - RNA, 20 nt, Human
ccaacaccaucacagcuugu

SEQ ID NO: 3801151 - RNA, 22 nt, Human
ccaacaccaucacagcuuguuu

SEQ ID NO: 3801152 - RNA, 22 nt, Human
ccaacacccaaagcauggacua

SEQ ID NO: 3801153 - RNA, 18 nt, Human
ccaacacccaucuguuuu

SEQ ID NO: 3801154 - RNA, 14 nt, Human
ccaacacugccagc

SEQ ID NO: 3801155 - RNA, 17 nt, Human
ccaacacugugcccugg

SEQ ID NO: 3801156 - RNA, 18 nt, Human
ccaacacugugcccuggu

SEQ ID NO: 3801157 - RNA, 20 nt, Human
ccaacacuguggguguguga

SEQ ID NO: 3801158 - RNA, 12 nt, Human
ccaacagccaug

SEQ ID NO: 3801159 - RNA, 11 nt, Human
ccaacagcuac

SEQ ID NO: 3801160 - RNA, 15 nt, Human
ccaacaggagcuggg

SEQ ID NO: 3801161 - RNA, 19 nt, Human
ccaacaggaggacaauuca

SEQ ID NO: 3801162 - RNA, 15 nt, Human
ccaacagguggcagg

SEQ ID NO: 3801163 - RNA, 12 nt, Human
ccaacaguguga

SEQ ID NO: 3801164 - RNA, 22 nt, Human
ccaacagugugaaguuagaauu

SEQ ID NO: 3801165 - RNA, 21 nt, Human
ccaacaguguuaggccuggca

SEQ ID NO: 3801166 - RNA, 12 nt, Human
ccaacaguuccu

SEQ ID NO: 3801167 - RNA, 17 nt, Human
ccaacauacucccaucu

SEQ ID NO: 3801168 - RNA, 21 nt, Human
ccaacaucccauugcccuggu

SEQ ID NO: 3801169 - RNA, 13 nt, Human
ccaacaugcacug

SEQ ID NO: 3801170 - RNA, 17 nt, Human
ccaaccagaccuggaag

SEQ ID NO: 3801171 - RNA, 18 nt, Human
ccaaccagugccaaggac

SEQ ID NO: 3801172 - RNA, 18 nt, Human
ccaacccaaaccuggaga

SEQ ID NO: 3801173 - RNA, 19 nt, Human
ccaacccagccgcugcccg

SEQ ID NO: 3801174 - RNA, 16 nt, Human
ccaacccccaccccac

SEQ ID NO: 3801175 - RNA, 13 nt, Human
ccaacccccagca

SEQ ID NO: 3801176 - RNA, 14 nt, Human
ccaacccccagcac

SEQ ID NO: 3801177 - RNA, 19 nt, Human
ccaacccccauucucaucu

SEQ ID NO: 3801178 - RNA, 14 nt, Human
ccaaccccccagca

SEQ ID NO: 3801179 - RNA, 21 nt, Human
ccaaccccccagcacugagga

SEQ ID NO: 3801180 - RNA, 19 nt, Human
ccaacccccgacuucaucc

SEQ ID NO: 3801181 - RNA, 14 nt, Human
ccaacccguggagg

SEQ ID NO: 3801182 - RNA, 21 nt, Human
ccaacccguggaggcugcucg

SEQ ID NO: 3801183 - RNA, 14 nt, Human
ccaacccucagagc

SEQ ID NO: 3801184 - RNA, 14 nt, Human
ccaacccugccccu

SEQ ID NO: 3801185 - RNA, 17 nt, Human
ccaacccugccccugcc

SEQ ID NO: 3801186 - RNA, 24 nt, Human
ccagaaacuguucccaccugcugg

SEQ ID NO: 3801187 - RNA, 22 nt, Human
ccagaaagccccacccaggcca

SEQ ID NO: 3801188 - RNA, 23 nt, Human
ccagaaagccccacccaggccag

SEQ ID NO: 3801189 - RNA, 16 nt, Human
ccagaaaggagacuag

SEQ ID NO: 3801190 - RNA, 16 nt, Human
ccagaaaucauuuuac

SEQ ID NO: 3801191 - RNA, 22 nt, Human
ccagaaaugucccuuucuucuc

SEQ ID NO: 3801192 - RNA, 15 nt, Human
ccagaacaguaugaa

SEQ ID NO: 3801193 - RNA, 18 nt, Human
ccagaacguggcucugcu

SEQ ID NO: 3801194 - RNA, 20 nt, Human
ccagaacguggcucugcugg

SEQ ID NO: 3801195 - RNA, 15 nt, Human
ccagaacucuguguc

SEQ ID NO: 3801196 - RNA, 21 nt, Human
ccagaagaagagaagcugcug

SEQ ID NO: 3801197 - RNA, 18 nt, Human
ccagaagaauauucagga

SEQ ID NO: 3801198 - RNA, 19 nt, Human
ccagaagaauauucaggac

SEQ ID NO: 3801199 - RNA, 20 nt, Human
ccagaagaauauucaggacu

SEQ ID NO: 3801200 - RNA, 21 nt, Human
ccagaagagaauuaagcccua

SEQ ID NO: 3801201 - RNA, 19 nt, Human
ccagaagaugaacagacug

SEQ ID NO: 3801202 - RNA, 16 nt, Human
ccagaagccucuggcu

SEQ ID NO: 3801203 - RNA, 20 nt, Human
ccagaagcucccccagcaaa

SEQ ID NO: 3801204 - RNA, 17 nt, Human
ccagaaggagacaggca

SEQ ID NO: 3801205 - RNA, 12 nt, Human
ccagaaggcagg

SEQ ID NO: 3801206 - RNA, 15 nt, Human
ccagaagggggccau

SEQ ID NO: 3801207 - RNA, 16 nt, Human
ccagaaguagcuuugc

SEQ ID NO: 3801208 - RNA, 17 nt, Human
ccagaaguagcuuugca

SEQ ID NO: 3801209 - RNA, 13 nt, Human
ccagaagucaaca

SEQ ID NO: 3801210 - RNA, 13 nt, Human
ccagaaguugugg

SEQ ID NO: 3801211 - RNA, 11 nt, Human
ccagaaugaag

SEQ ID NO: 3801212 - RNA, 15 nt, Human
ccagaaugaggcugc

SEQ ID NO: 3801213 - RNA, 21 nt, Human
ccagaaugcuguacaucuauu

SEQ ID NO: 3801214 - RNA, 21 nt, Human
ccagaaugucagauuccuuuc

SEQ ID NO: 3801215 - RNA, 16 nt, Human
ccagaauuuggaaauc

SEQ ID NO: 3801216 - RNA, 15 nt, Human
ccagacaagcuguug

SEQ ID NO: 3801217 - RNA, 18 nt, Human
ccagacacaaacugccaa

SEQ ID NO: 3801218 - RNA, 19 nt, Human
ccagacacaggcccucccu

SEQ ID NO: 3801219 - RNA, 10 nt, Human
ccagacaccc

SEQ ID NO: 3801220 - RNA, 13 nt, Human
ccagacacccagg

SEQ ID NO: 3801221 - RNA, 15 nt, Human
ccagacacucugcuc

SEQ ID NO: 3801222 - RNA, 23 nt, Human
ccagacacugaccauccacucua

SEQ ID NO: 3801223 - RNA, 12 nt, Human
ccagacacuggu

SEQ ID NO: 3801224 - RNA, 17 nt, Human
ccagacagacaacacug

SEQ ID NO: 3801225 - RNA, 11 nt, Human
ccagacagacc

SEQ ID NO: 3801226 - RNA, 17 nt, Human
ccagacagagggucaca

SEQ ID NO: 3801227 - RNA, 13 nt, Human
ccagacagcuccc

SEQ ID NO: 3801228 - RNA, 18 nt, Human
ccagacauaaaggaaaag

SEQ ID NO: 3801229 - RNA, 18 nt, Human
ccagacauacgaaacaca

SEQ ID NO: 3801230 - RNA, 20 nt, Human
ccagacauacgaaacacaaa

SEQ ID NO: 3801231 - RNA, 14 nt, Human
ccagacaugccaca

SEQ ID NO: 3801232 - RNA, 14 nt, Human
ccagaccagagcuc

SEQ ID NO: 3801233 - RNA, 17 nt, Human
ccagaccccaggcugga

SEQ ID NO: 3801234 - RNA, 19 nt, Human
ccagacccccaccccuucc

SEQ ID NO: 3801235 - RNA, 21 nt, Human
ccagacccccaccccuucccc

SEQ ID NO: 3801236 - RNA, 19 nt, Human
ccagacccccagcaacccu

SEQ ID NO: 3801237 - RNA, 22 nt, Human
ccagacccccagcaacccuccu

SEQ ID NO: 3801238 - RNA, 17 nt, Human
ccagaccccucuggcca

SEQ ID NO: 3801239 - RNA, 19 nt, Human
ccagaccugauccuggagg

SEQ ID NO: 3801240 - RNA, 14 nt, Human
ccagaccugcagac

SEQ ID NO: 3801241 - RNA, 16 nt, Human
ccagaccugcagacgc

SEQ ID NO: 3801242 - RNA, 20 nt, Human
ccagaccugcagacgcccag

SEQ ID NO: 3801243 - RNA, 21 nt, Human
ccagaccugccucuucccccu

SEQ ID NO: 3801244 - RNA, 22 nt, Human
ccagaccuggaagaacaggccu

SEQ ID NO: 3801245 - RNA, 23 nt, Human
ccagaccuguuagcagacaggcc

SEQ ID NO: 3801246 - RNA, 14 nt, Human
ccagacgccuggcu

SEQ ID NO: 3801247 - RNA, 17 nt, Human
ccagacgccuggcugcu

SEQ ID NO: 3801248 - RNA, 19 nt, Human
ccagacgcucauucagcau

SEQ ID NO: 3801249 - RNA, 20 nt, Human
ccagacgcucauucagcauc

SEQ ID NO: 3801250 - RNA, 16 nt, Human
ccagacgguucaccag

SEQ ID NO: 3801251 - RNA, 18 nt, Human
ccagacgguucaccagcc

SEQ ID NO: 3801252 - RNA, 20 nt, Human
ccagacgguucaccagccuc

SEQ ID NO: 3801253 - RNA, 15 nt, Human
ccagacucuugccug

SEQ ID NO: 3801254 - RNA, 18 nt, Human
ccagacucuugccuguuu

SEQ ID NO: 3801255 - RNA, 16 nt, Human
ccagacuguggagaaa

SEQ ID NO: 3801256 - RNA, 15 nt, Human
ccagacuguuagaaa

SEQ ID NO: 3801257 - RNA, 21 nt, Human
ccagacuuuacaugacacagc

SEQ ID NO: 3801258 - RNA, 16 nt, Human
ccagagaaagcgcaga

SEQ ID NO: 3801259 - RNA, 12 nt, Human
ccagagaacaag

SEQ ID NO: 3801260 - RNA, 22 nt, Human
ccagauuuaugcauauuauuuu

SEQ ID NO: 3801261 - RNA, 14 nt, Human
ccagauuucacucu

SEQ ID NO: 3801262 - RNA, 19 nt, Human
ccagauuucacucuccuug

SEQ ID NO: 3801263 - RNA, 22 nt, Human
ccagauuuuucggaggccccac

SEQ ID NO: 3801264 - RNA, 22 nt, Human
ccagauuuuuuaaaauuuauau

SEQ ID NO: 3801265 - RNA, 15 nt, Human
ccagcaaacaaaaug

SEQ ID NO: 3801266 - RNA, 14 nt, Human
ccagcaaagcccca

SEQ ID NO: 3801267 - RNA, 17 nt, Human
ccagcaaagcccccaga

SEQ ID NO: 3801268 - RNA, 15 nt, Human
ccagcaacacaagcu

SEQ ID NO: 3801269 - RNA, 15 nt, Human
ccagcaacacagccu

SEQ ID NO: 3801270 - RNA, 18 nt, Human
ccagcaacccuccuauca

SEQ ID NO: 3801271 - RNA, 15 nt, Human
ccagcaacuccaacu

SEQ ID NO: 3801272 - RNA, 13 nt, Human
ccagcaacugaau

SEQ ID NO: 3801273 - RNA, 17 nt, Human
ccagcaacugaauaaau

SEQ ID NO: 3801274 - RNA, 21 nt, Human
ccagcaacuugucuuuuucug

SEQ ID NO: 3801275 - RNA, 18 nt, Human
ccagcaagguggagugga

SEQ ID NO: 3801276 - RNA, 19 nt, Human
ccagcaagugagagcuggg

SEQ ID NO: 3801277 - RNA, 17 nt, Human
ccagcaauauguaaaua

SEQ ID NO: 3801278 - RNA, 17 nt, Human
ccagcacaaacacaagg

SEQ ID NO: 3801279 - RNA, 12 nt, Human
ccagcacacucc

SEQ ID NO: 3801280 - RNA, 13 nt, Human
ccagcacacuccc

SEQ ID NO: 3801281 - RNA, 14 nt, Human
ccagcacacucccg

SEQ ID NO: 3801282 - RNA, 15 nt, Human
ccagcacacucccga

SEQ ID NO: 3801283 - RNA, 20 nt, Human
ccagcacacugggaggccga

SEQ ID NO: 3801284 - RNA, 19 nt, Human
ccagcacagcuuagauuuc

SEQ ID NO: 3801285 - RNA, 13 nt, Human
ccagcacaugaaa

SEQ ID NO: 3801286 - RNA, 17 nt, Human
ccagcaccaccaggucu

SEQ ID NO: 3801287 - RNA, 18 nt, Human
ccagcaccaccaggucuc

SEQ ID NO: 3801288 - RNA, 14 nt, Human
ccagcacccagcaa

SEQ ID NO: 3801289 - RNA, 17 nt, Human
ccagcacccgggcucag

SEQ ID NO: 3801290 - RNA, 20 nt, Human
ccagcacccgggcucaggga

SEQ ID NO: 3801291 - RNA, 20 nt, Human
ccagcaccggaccagccugg

SEQ ID NO: 3801292 - RNA, 17 nt, Human
ccagcaccucagccugc

SEQ ID NO: 3801293 - RNA, 18 nt, Human
ccagcaccucagccugca

SEQ ID NO: 3801294 - RNA, 14 nt, Human
ccagcaccuugugc

SEQ ID NO: 3801295 - RNA, 17 nt, Human
ccagcacuaaagcagug

SEQ ID NO: 3801296 - RNA, 18 nt, Human
ccagcacuaaagcagugg

SEQ ID NO: 3801297 - RNA, 20 nt, Human
ccagcacuaugcuuuccuuc

SEQ ID NO: 3801298 - RNA, 21 nt, Human
ccagcacuaugcuuuccuucu

SEQ ID NO: 3801299 - RNA, 13 nt, Human
ccagcacugccca

SEQ ID NO: 3801300 - RNA, 19 nt, Human
ccagcacugcuugaggaaa

SEQ ID NO: 3801301 - RNA, 17 nt, Human
ccagcacuucaggaggc

SEQ ID NO: 3801302 - RNA, 15 nt, Human
ccagcacuuguauau

SEQ ID NO: 3801303 - RNA, 19 nt, Human
ccagcacuuguccagcuga

SEQ ID NO: 3801304 - RNA, 20 nt, Human
ccagcacuuguccagcugag

SEQ ID NO: 3801305 - RNA, 15 nt, Human
ccagcacuuugggag

SEQ ID NO: 3801306 - RNA, 19 nt, Human
ccagcacuuugggagacca

SEQ ID NO: 3801307 - RNA, 16 nt, Human
ccagcacuuugggagg

SEQ ID NO: 3801308 - RNA, 17 nt, Human
ccagcacuuugggaggc

SEQ ID NO: 3801309 - RNA, 17 nt, Human
ccagcagaaaugccuua

SEQ ID NO: 3801310 - RNA, 19 nt, Human
ccagcagagcaccuuagac

SEQ ID NO: 3801311 - RNA, 15 nt, Human
ccagcagaucccagc

SEQ ID NO: 3801312 - RNA, 18 nt, Human
ccagcagaucccagcuca

SEQ ID NO: 3801313 - RNA, 19 nt, Human
ccagcagaucccagcucac

SEQ ID NO: 3801314 - RNA, 21 nt, Human
ccagcagaucccagcucacgu

SEQ ID NO: 3801315 - RNA, 21 nt, Human
ccagcagauuauucacugauu

SEQ ID NO: 3801316 - RNA, 14 nt, Human
ccagcagcaccugc

SEQ ID NO: 3801317 - RNA, 18 nt, Human
ccagcagcagcaggugau

SEQ ID NO: 3801318 - RNA, 15 nt, Human
ccagcagcagcccaa

SEQ ID NO: 3801319 - RNA, 14 nt, Human
ccagcagccagcca

SEQ ID NO: 3801320 - RNA, 18 nt, Human
ccagcagccagcucucag

SEQ ID NO: 3801321 - RNA, 19 nt, Human
ccagcagccagcucucagc

SEQ ID NO: 3801322 - RNA, 21 nt, Human
ccagcagcccuaaggaucucu

SEQ ID NO: 3801323 - RNA, 13 nt, Human
ccagcagccugga

SEQ ID NO: 3801324 - RNA, 20 nt, Human
ccagcagccuggacccugug

SEQ ID NO: 3801325 - RNA, 12 nt, Human
ccagcaggccca

SEQ ID NO: 3801326 - RNA, 17 nt, Human
ccagcaggcccauggga

SEQ ID NO: 3801327 - RNA, 18 nt, Human
ccagcaggcucucaggcc

SEQ ID NO: 3801328 - RNA, 23 nt, Human
ccagcaggcucucaggccagcug

SEQ ID NO: 3801329 - RNA, 20 nt, Human
ccagcagggucuuuucaucu

SEQ ID NO: 3801330 - RNA, 22 nt, Human
ccagcagggucuuuucaucugg

SEQ ID NO: 3801331 - RNA, 23 nt, Human
ccagcagggucuuuucaucuggg

SEQ ID NO: 3801332 - RNA, 15 nt, Human
ccagcaguacaauaa

SEQ ID NO: 3801333 - RNA, 17 nt, Human
ccagcaguacaauaaaa

SEQ ID NO: 3801334 - RNA, 16 nt, Human
ccagcagucucugccu

SEQ ID NO: 3801335 - RNA, 21 nt, Human
ccagcagucucugccuugccu

SEQ ID NO: 3801336 - RNA, 17 nt, Human
ccagcagucugccugga

SEQ ID NO: 3801337 - RNA, 22 nt, Human
ccagcaguucagagcugcccuc

SEQ ID NO: 3801338 - RNA, 15 nt, Human
ccagcaguuuucaag

SEQ ID NO: 3801339 - RNA, 20 nt, Human
ccagcauaaauaucuucuga

SEQ ID NO: 3801340 - RNA, 16 nt, Human
ccagcaucaccugccu

SEQ ID NO: 3801341 - RNA, 16 nt, Human
ccagcaucacucccca

SEQ ID NO: 3801342 - RNA, 21 nt, Human
ccagcaucacuccccaaggaa

SEQ ID NO: 3801343 - RNA, 18 nt, Human
ccagcaucccuugaccag

SEQ ID NO: 3801344 - RNA, 11 nt, Human
ccagcaucugg

SEQ ID NO: 3801345 - RNA, 18 nt, Human
ccagcaugacauaacagu

SEQ ID NO: 3801346 - RNA, 14 nt, Human
ccagcauuccagcc

SEQ ID NO: 3801347 - RNA, 15 nt, Human
ccagcauuccagccc

SEQ ID NO: 3801348 - RNA, 17 nt, Human
ccagcauuccagccccu

SEQ ID NO: 3801349 - RNA, 17 nt, Human
ccagcauuuagcuggcc

SEQ ID NO: 3801350 - RNA, 17 nt, Human
ccagccaaacccugucu

SEQ ID NO: 3801351 - RNA, 22 nt, Human
aaacucucuuugggaauguuug

SEQ ID NO: 3801352 - RNA, 13 nt, Human
aaacucugagugc

SEQ ID NO: 3801353 - RNA, 22 nt, Human
aaacucuguuacacuuuuugga

SEQ ID NO: 3801354 - RNA, 23 nt, Human
aaacucuuaaaacccaagugccu

SEQ ID NO: 3801355 - RNA, 17 nt, Human
aaacucuugaccucagg

SEQ ID NO: 3801356 - RNA, 12 nt, Human
aaacucuuuaac

SEQ ID NO: 3801357 - RNA, 14 nt, Human
aaacucuuuaacuu

SEQ ID NO: 3801358 - RNA, 21 nt, Human
aaacucuuuggucguuuuuuu

SEQ ID NO: 3801359 - RNA, 12 nt, Human
aaacugaaaauc

SEQ ID NO: 3801360 - RNA, 17 nt, Human
aaacugaaaaucuaaua

SEQ ID NO: 3801361 - RNA, 18 nt, Human
aaacugaaaaucuaauau

SEQ ID NO: 3801362 - RNA, 14 nt, Human
aaacugaagccaga

SEQ ID NO: 3801363 - RNA, 16 nt, Human
aaacugaaugaaaccc

SEQ ID NO: 3801364 - RNA, 14 nt, Human
aaacugaauggaag

SEQ ID NO: 3801365 - RNA, 19 nt, Human
aaacugaggaauuuucuuu

SEQ ID NO: 3801366 - RNA, 13 nt, Human
aaacugagugacu

SEQ ID NO: 3801367 - RNA, 12 nt, Human
aaacugauguga

SEQ ID NO: 3801368 - RNA, 16 nt, Human
aaacugcaauagagac

SEQ ID NO: 3801369 - RNA, 18 nt, Human
aaacugcaauagagacug

SEQ ID NO: 3801370 - RNA, 17 nt, Human
aaacugcacaugauuuc

SEQ ID NO: 3801371 - RNA, 21 nt, Human
aaacugcacaugauuucacaa

SEQ ID NO: 3801372 - RNA, 14 nt, Human
aaacugccagcaac

SEQ ID NO: 3801373 - RNA, 15 nt, Human
aaacugccagcaacg

SEQ ID NO: 3801374 - RNA, 19 nt, Human
aaacugccagcaacgcagg

SEQ ID NO: 3801375 - RNA, 20 nt, Human
aaacugccaguuuuguuucc

SEQ ID NO: 3801376 - RNA, 11 nt, Human
aaacugccccc

SEQ ID NO: 3801377 - RNA, 12 nt, Human
aaacugcccccu

SEQ ID NO: 3801378 - RNA, 19 nt, Human
aaacugcccccucugcccu

SEQ ID NO: 3801379 - RNA, 22 nt, Human
aaacugcuuuuuuuuuuccagc

SEQ ID NO: 3801380 - RNA, 19 nt, Human
aaacuggaacggugaaggu

SEQ ID NO: 3801381 - RNA, 20 nt, Human
aaacuggaacggugaaggug

SEQ ID NO: 3801382 - RNA, 13 nt, Human
aaacuggaaugag

SEQ ID NO: 3801383 - RNA, 12 nt, Human
aaacuggagacu

SEQ ID NO: 3801384 - RNA, 20 nt, Human
aaacuggcaucugacacaaa

SEQ ID NO: 3801385 - RNA, 14 nt, Human
aaacuggcuuuggc

SEQ ID NO: 3801386 - RNA, 23 nt, Human
aaacugggaugaaacuaaagcaa

SEQ ID NO: 3801387 - RNA, 18 nt, Human
aaacuggggccuccagaa

SEQ ID NO: 3801388 - RNA, 15 nt, Human
aaacuggguuccugc

SEQ ID NO: 3801389 - RNA, 16 nt, Human
aaacuggguuccugca

SEQ ID NO: 3801390 - RNA, 16 nt, Human
aaacugguauuuuauc

SEQ ID NO: 3801391 - RNA, 22 nt, Human
aaacugguuuguugcagccaaa

SEQ ID NO: 3801392 - RNA, 14 nt, Human
aaacuguaaaaaau

SEQ ID NO: 3801393 - RNA, 17 nt, Human
aaacuguaauacaauga

SEQ ID NO: 3801394 - RNA, 17 nt, Human
aaacuguacauuuaaaa

SEQ ID NO: 3801395 - RNA, 22 nt, Human
aaacuguacauuuaaaauugcu

SEQ ID NO: 3801396 - RNA, 18 nt, Human
aaacuguacuuugauuca

SEQ ID NO: 3801397 - RNA, 21 nt, Human
aaacuguacuuugauucacau

SEQ ID NO: 3801398 - RNA, 15 nt, Human
aaacugucacuguug

SEQ ID NO: 3801399 - RNA, 18 nt, Human
aaacuguccucuuucaga

SEQ ID NO: 3801400 - RNA, 21 nt, Human
aaacugucgugucauacucga

SEQ ID NO: 3801401 - RNA, 14 nt, Human
aaacuguguaacug

SEQ ID NO: 3801402 - RNA, 17 nt, Human
aaacuguguaacugccc

SEQ ID NO: 3801403 - RNA, 20 nt, Human
aaacuguguacauaacugaa

SEQ ID NO: 3801404 - RNA, 16 nt, Human
aaacuguguauuccaa

SEQ ID NO: 3801405 - RNA, 16 nt, Human
ccaccugaggugggcc

SEQ ID NO: 3801406 - RNA, 14 nt, Human
ccaccugaguuccu

SEQ ID NO: 3801407 - RNA, 12 nt, Human
ccaccugcagcu

SEQ ID NO: 3801408 - RNA, 9 nt, Human
ccaccugcc

SEQ ID NO: 3801409 - RNA, 14 nt, Human
ccaccugccacuag

SEQ ID NO: 3801410 - RNA, 23 nt, Human
ccaccugccacuaggcugggugc

SEQ ID NO: 3801411 - RNA, 14 nt, Human
ccaccugcccauca

SEQ ID NO: 3801412 - RNA, 18 nt, Human
ccaccugcccccuucucc

SEQ ID NO: 3801413 - RNA, 20 nt, Human
ccaccugcccccuucuccca

SEQ ID NO: 3801414 - RNA, 23 nt, Human
ccaccugcccccuucucccacac

SEQ ID NO: 3801415 - RNA, 18 nt, Human
ccaccugcccuuuuuucu

SEQ ID NO: 3801416 - RNA, 13 nt, Human
ccaccugccugcg

SEQ ID NO: 3801417 - RNA, 16 nt, Human
ccaccugccugcgucu

SEQ ID NO: 3801418 - RNA, 23 nt, Human
ccaccugccugcgucuuccgccc

SEQ ID NO: 3801419 - RNA, 13 nt, Human
ccaccugccuggc

SEQ ID NO: 3801420 - RNA, 14 nt, Human
ccaccugccuggcc

SEQ ID NO: 3801421 - RNA, 17 nt, Human
ccaccugccuggccggc

SEQ ID NO: 3801422 - RNA, 22 nt, Human
ccaccugccuggccggccagcc

SEQ ID NO: 3801423 - RNA, 23 nt, Human
ccaccugccuggccggccagcca

SEQ ID NO: 3801424 - RNA, 17 nt, Human
ccaccugccuguugggc

SEQ ID NO: 3801425 - RNA, 15 nt, Human
ccaccugcucugcug

SEQ ID NO: 3801426 - RNA, 22 nt, Human
ccaccugcugagagacccaagg

SEQ ID NO: 3801427 - RNA, 20 nt, Human
ccaccuggaagcccucucug

SEQ ID NO: 3801428 - RNA, 20 nt, Human
ccaccuggaccccugcauug

SEQ ID NO: 3801429 - RNA, 14 nt, Human
ccaccuggccaccu

SEQ ID NO: 3801430 - RNA, 18 nt, Human
ccaccuggccaccugagg

SEQ ID NO: 3801431 - RNA, 17 nt, Human
ccaccuggcccucucug

SEQ ID NO: 3801432 - RNA, 14 nt, Human
ccaccuggccucug

SEQ ID NO: 3801433 - RNA, 15 nt, Human
ccaccuggcucucac

SEQ ID NO: 3801434 - RNA, 19 nt, Human
ccaccuggcucucaccucu

SEQ ID NO: 3801435 - RNA, 13 nt, Human
ccaccuggcucug

SEQ ID NO: 3801436 - RNA, 14 nt, Human
ccaccuggcucugu

SEQ ID NO: 3801437 - RNA, 16 nt, Human
ccaccuggcucugugg

SEQ ID NO: 3801438 - RNA, 15 nt, Human
ccaccugguggccuc

SEQ ID NO: 3801439 - RNA, 17 nt, Human
ccaccugguggccucug

SEQ ID NO: 3801440 - RNA, 20 nt, Human
ccaccugucaaacaaagcca

SEQ ID NO: 3801441 - RNA, 12 nt, Human
ccaccuguccca

SEQ ID NO: 3801442 - RNA, 17 nt, Human
ccaccugucccaccuca

SEQ ID NO: 3801443 - RNA, 11 nt, Human
ccaccugucug

SEQ ID NO: 3801444 - RNA, 12 nt, Human
ccaccugucugu

SEQ ID NO: 3801445 - RNA, 16 nt, Human
ccaccugucugucugu

SEQ ID NO: 3801446 - RNA, 15 nt, Human
ccaccuuaaauuaaa

SEQ ID NO: 3801447 - RNA, 22 nt, Human
ccaccuuaaauuaaacaauuua

SEQ ID NO: 3801448 - RNA, 13 nt, Human
ccaccuucccagc

SEQ ID NO: 3801449 - RNA, 16 nt, Human
ccaccuucccagcucu

SEQ ID NO: 3801450 - RNA, 14 nt, Human
ccaccuucccaugc

SEQ ID NO: 3801451 - RNA, 21 nt, Human
ccaccuucucacauggaauga

SEQ ID NO: 3801452 - RNA, 14 nt, Human
ccaccuuggcucaa

SEQ ID NO: 3801453 - RNA, 16 nt, Human
ccaccuuggcugcagg

SEQ ID NO: 3801454 - RNA, 21 nt, Human
ccaccuuguuggagccugcag

SEQ ID NO: 3801455 - RNA, 17 nt, Human
ccaccuuucagcccacg

SEQ ID NO: 3801456 - RNA, 21 nt, Human
ccaccuuugaagaaguaagga

SEQ ID NO: 3801457 - RNA, 24 nt, Human
ccaccuuuggaaagcucugaccac

SEQ ID NO: 3801458 - RNA, 16 nt, Human
ccaccuuuguuucucc

SEQ ID NO: 3801459 - RNA, 14 nt, Human
ccaccuuuucagcg

SEQ ID NO: 3801460 - RNA, 17 nt, Human
ccacgaaacugcccugg

SEQ ID NO: 3801461 - RNA, 23 nt, Human
ccacgaauuucugugcccuccug

SEQ ID NO: 3801462 - RNA, 17 nt, Human
ccacgacacugcagccc

SEQ ID NO: 3801463 - RNA, 15 nt, Human
ccacgacuggccagg

SEQ ID NO: 3801464 - RNA, 14 nt, Human
ccacgacugucucc

SEQ ID NO: 3801465 - RNA, 15 nt, Human
ccacgacugucucca

SEQ ID NO: 3801466 - RNA, 14 nt, Human
ccacgagggcuggc

SEQ ID NO: 3801467 - RNA, 16 nt, Human
ccacgauccugccacc

SEQ ID NO: 3801468 - RNA, 16 nt, Human
ccacgauuuucuccag

SEQ ID NO: 3801469 - RNA, 12 nt, Human
ccacgccacagc

SEQ ID NO: 3801470 - RNA, 17 nt, Human
ccacgcccguccugccu

SEQ ID NO: 3801471 - RNA, 20 nt, Human
ccacgcccguccugccugug

SEQ ID NO: 3801472 - RNA, 21 nt, Human
ccacgcccucauuacggcucc

SEQ ID NO: 3801473 - RNA, 18 nt, Human
ccacgccucuugaccagg

SEQ ID NO: 3801474 - RNA, 19 nt, Human
ccacgccucuugaccaggc

SEQ ID NO: 3801475 - RNA, 21 nt, Human
ccacgccucuugaccaggcug

SEQ ID NO: 3801476 - RNA, 15 nt, Human
ccacgcgugccgugg

SEQ ID NO: 3801477 - RNA, 18 nt, Human
ccacgcuagggcuggcuc

SEQ ID NO: 3801478 - RNA, 15 nt, Human
ccacgcucacccccu

SEQ ID NO: 3801479 - RNA, 16 nt, Human
ccacgcuccagcugcc

SEQ ID NO: 3801480 - RNA, 13 nt, Human
ccacgcugacuac

SEQ ID NO: 3801481 - RNA, 18 nt, Human
ccacgcuggagugcagug

SEQ ID NO: 3801482 - RNA, 15 nt, Human
ccacgcugucuccag

SEQ ID NO: 3801483 - RNA, 19 nt, Human
ccacgcugucuccagaccc

SEQ ID NO: 3801484 - RNA, 21 nt, Human
ccacgcugucuccagaccccc

SEQ ID NO: 3801485 - RNA, 15 nt, Human
ccacggcaccugggc

SEQ ID NO: 3801486 - RNA, 16 nt, Human
ccacggccuccuuucc

SEQ ID NO: 3801487 - RNA, 18 nt, Human
ccacggcuaagaggcugc

SEQ ID NO: 3801488 - RNA, 18 nt, Human
ccacguccugucagugcc

SEQ ID NO: 3801489 - RNA, 17 nt, Human
ccacgucugucuucaca

SEQ ID NO: 3801490 - RNA, 14 nt, Human
ccacgugccaggcc

SEQ ID NO: 3801491 - RNA, 15 nt, Human
ccacgugccaggccc

SEQ ID NO: 3801492 - RNA, 16 nt, Human
ccacgugccaggcccg

SEQ ID NO: 3801493 - RNA, 23 nt, Human
ccacguggcugcgugccccugcu

SEQ ID NO: 3801494 - RNA, 16 nt, Human
ccacgugucuuccacu

SEQ ID NO: 3801495 - RNA, 16 nt, Human
ccacguuccacaguug

SEQ ID NO: 3801496 - RNA, 20 nt, Human
ccacguuccacaguugccac

SEQ ID NO: 3801497 - RNA, 21 nt, Human
ccacguuccuuacugcagaau

SEQ ID NO: 3801498 - RNA, 23 nt, Human
ccacguucucucugccugugagc

SEQ ID NO: 3801499 - RNA, 13 nt, Human
ccacguuuugaaa

SEQ ID NO: 3801500 - RNA, 13 nt, Human
ccacuaaaaauau

SEQ ID NO: 3801501 - RNA, 14 nt, Human
ccacuaaaaauauu

SEQ ID NO: 3801502 - RNA, 22 nt, Human
ccacuaaaagaucgcaguuugc

SEQ ID NO: 3801503 - RNA, 21 nt, Human
ccacuaaccuugccugguaca

SEQ ID NO: 3801504 - RNA, 20 nt, Human
ccacuaacuagagcagcccu

SEQ ID NO: 3801505 - RNA, 16 nt, Human
ccacuaagcagaggag

SEQ ID NO: 3801506 - RNA, 13 nt, Human
ccacuacaccugg

SEQ ID NO: 3801507 - RNA, 17 nt, Human
ccacuacaccuggcuga

SEQ ID NO: 3801508 - RNA, 21 nt, Human
ccacuacacuccagccugagc

SEQ ID NO: 3801509 - RNA, 22 nt, Human
ccacuacacuccagccugagca

SEQ ID NO: 3801510 - RNA, 15 nt, Human
ccacuacauucuguu

SEQ ID NO: 3801511 - RNA, 16 nt, Human
ccacuaccccuugauu

SEQ ID NO: 3801512 - RNA, 14 nt, Human
ccacuagccucagg

SEQ ID NO: 3801513 - RNA, 15 nt, Human
ccacuagccucaggg

SEQ ID NO: 3801514 - RNA, 16 nt, Human
ccacuaggacucugag

SEQ ID NO: 3801515 - RNA, 19 nt, Human
ccacuaggacucugaggcu

SEQ ID NO: 3801516 - RNA, 20 nt, Human
ccacuaggacucugaggcuc

SEQ ID NO: 3801517 - RNA, 16 nt, Human
ccacuaggcugggugc

SEQ ID NO: 3801518 - RNA, 23 nt, Human
ccacuaggcugggugcccacagc

SEQ ID NO: 3801519 - RNA, 22 nt, Human
ccacuaguaaguaauuaugcac

SEQ ID NO: 3801520 - RNA, 17 nt, Human
ccacuagugcaaaucau

SEQ ID NO: 3801521 - RNA, 14 nt, Human
ccacuaucugggug

SEQ ID NO: 3801522 - RNA, 13 nt, Human
ccacucaagacca

SEQ ID NO: 3801523 - RNA, 17 nt, Human
ccacucaagaccaaaug

SEQ ID NO: 3801524 - RNA, 20 nt, Human
ccacucaagaccaaauggaa

SEQ ID NO: 3801525 - RNA, 18 nt, Human
ccacucaagccaagcagc

SEQ ID NO: 3801526 - RNA, 20 nt, Human
ccacucacaacagcugccug

SEQ ID NO: 3801527 - RNA, 17 nt, Human
ccacucacacagccagg

SEQ ID NO: 3801528 - RNA, 13 nt, Human
ccacucaccccgg

SEQ ID NO: 3801529 - RNA, 12 nt, Human
ccacucagagac

SEQ ID NO: 3801530 - RNA, 15 nt, Human
ccacucagagacaug

SEQ ID NO: 3801531 - RNA, 17 nt, Human
ccacucagagacaugca

SEQ ID NO: 3801532 - RNA, 12 nt, Human
ccacucagcccc

SEQ ID NO: 3801533 - RNA, 20 nt, Human
ccacucaggccaacaagcca

SEQ ID NO: 3801534 - RNA, 22 nt, Human
ccacucaugugacucuuuccaa

SEQ ID NO: 3801535 - RNA, 15 nt, Human
ccacucauuucaucu

SEQ ID NO: 3801536 - RNA, 14 nt, Human
ccacuccaagccag

SEQ ID NO: 3801537 - RNA, 16 nt, Human
ccacuccaagccagca

SEQ ID NO: 3801538 - RNA, 18 nt, Human
ccacuccaagcccagccc

SEQ ID NO: 3801539 - RNA, 20 nt, Human
ccacuccagaccccuggcuu

SEQ ID NO: 3801540 - RNA, 18 nt, Human
ccacuccaucugguagaa

SEQ ID NO: 3801541 - RNA, 22 nt, Human
ccacucccacuucccugacacu

SEQ ID NO: 3801542 - RNA, 13 nt, Human
ccacucccaggca

SEQ ID NO: 3801543 - RNA, 16 nt, Human
ccacuccccaccuuca

SEQ ID NO: 3801544 - RNA, 20 nt, Human
ccacucccuugcuggcccca

SEQ ID NO: 3801545 - RNA, 19 nt, Human
ccacuccgagaggugggcc

SEQ ID NO: 3801546 - RNA, 22 nt, Human
ccacuccggcccuccagagccc

SEQ ID NO: 3801547 - RNA, 13 nt, Human
ccacuccucccuc

SEQ ID NO: 3801548 - RNA, 12 nt, Human
ccacuccucuga

SEQ ID NO: 3801549 - RNA, 14 nt, Human
ccacuccucugcug

SEQ ID NO: 3801550 - RNA, 15 nt, Human
ccacuccucuuauuu

SEQ ID NO: 3801551 - RNA, 12 nt, Human
aaagaugaaguu

SEQ ID NO: 3801552 - RNA, 20 nt, Human
aaagaugcaaggaccaggac

SEQ ID NO: 3801553 - RNA, 16 nt, Human
aaagaugcagccgccu

SEQ ID NO: 3801554 - RNA, 21 nt, Human
aaagaugccaauuauuguuac

SEQ ID NO: 3801555 - RNA, 22 nt, Human
aaagaugcucagguacagagaa

SEQ ID NO: 3801556 - RNA, 17 nt, Human
aaagaugcucuucugug

SEQ ID NO: 3801557 - RNA, 17 nt, Human
aaagaugcuucucacug

SEQ ID NO: 3801558 - RNA, 19 nt, Human
aaagaugcuuuuaacagag

SEQ ID NO: 3801559 - RNA, 18 nt, Human
aaagauggaguuucuaag

SEQ ID NO: 3801560 - RNA, 19 nt, Human
aaagauggaguuucuaagg

SEQ ID NO: 3801561 - RNA, 21 nt, Human
aaagauggaguuucuaagguc

SEQ ID NO: 3801562 - RNA, 12 nt, Human
aaagauggccuu

SEQ ID NO: 3801563 - RNA, 21 nt, Human
aaagauggcugugccucugcc

SEQ ID NO: 3801564 - RNA, 22 nt, Human
aaagauggggucuguaaaaucu

SEQ ID NO: 3801565 - RNA, 13 nt, Human
ccagggccagaag

SEQ ID NO: 3801566 - RNA, 14 nt, Human
ccagggccagggcc

SEQ ID NO: 3801567 - RNA, 13 nt, Human
ccagggcccagag

SEQ ID NO: 3801568 - RNA, 15 nt, Human
ccagggcccagagcc

SEQ ID NO: 3801569 - RNA, 18 nt, Human
ccagggcccagagcccag

SEQ ID NO: 3801570 - RNA, 11 nt, Human
ccagggccccu

SEQ ID NO: 3801571 - RNA, 22 nt, Human
ccagggccccucuccccaggga

SEQ ID NO: 3801572 - RNA, 14 nt, Human
ccagggcccgcacc

SEQ ID NO: 3801573 - RNA, 16 nt, Human
ccagggcccgggaagc

SEQ ID NO: 3801574 - RNA, 15 nt, Human
ccagggcccugcaga

SEQ ID NO: 3801575 - RNA, 14 nt, Human
ccagggccugagcc

SEQ ID NO: 3801576 - RNA, 18 nt, Human
ccagggccugagccaagc

SEQ ID NO: 3801577 - RNA, 16 nt, Human
ccagggccugagccug

SEQ ID NO: 3801578 - RNA, 16 nt, Human
ccagggccuggaagac

SEQ ID NO: 3801579 - RNA, 21 nt, Human
ccagggccuggaagacagaga

SEQ ID NO: 3801580 - RNA, 17 nt, Human
ccagggcuauagcucag

SEQ ID NO: 3801581 - RNA, 12 nt, Human
ccagggcuccag

SEQ ID NO: 3801582 - RNA, 16 nt, Human
ccagggcucugcccca

SEQ ID NO: 3801583 - RNA, 18 nt, Human
ccagggcucugccccagu

SEQ ID NO: 3801584 - RNA, 14 nt, Human
ccagggcugccccu

SEQ ID NO: 3801585 - RNA, 15 nt, Human
ccagggcugcccuga

SEQ ID NO: 3801586 - RNA, 16 nt, Human
ccagggcuggacugag

SEQ ID NO: 3801587 - RNA, 18 nt, Human
ccagggcuggacugaggc

SEQ ID NO: 3801588 - RNA, 19 nt, Human
ccagggcuggacugaggcc

SEQ ID NO: 3801589 - RNA, 18 nt, Human
ccagggcugggaggaagg

SEQ ID NO: 3801590 - RNA, 18 nt, Human
ccagggcuggggcagccu

SEQ ID NO: 3801591 - RNA, 22 nt, Human
ccagggcuuacggcccuggccu

SEQ ID NO: 3801592 - RNA, 19 nt, Human
ccaggggaaaaucagccug

SEQ ID NO: 3801593 - RNA, 19 nt, Human
ccaggggaaagaugagcuu

SEQ ID NO: 3801594 - RNA, 12 nt, Human
ccaggggaaccu

SEQ ID NO: 3801595 - RNA, 19 nt, Human
ccaggggagcagaggggca

SEQ ID NO: 3801596 - RNA, 13 nt, Human
ccaggggagcccu

SEQ ID NO: 3801597 - RNA, 14 nt, Human
ccaggggagcccuc

SEQ ID NO: 3801598 - RNA, 19 nt, Human
ccaggggcaggcacagcac

SEQ ID NO: 3801599 - RNA, 18 nt, Human
ccaggggcccacagggaa

SEQ ID NO: 3801600 - RNA, 12 nt, Human
ccaggggccccu

SEQ ID NO: 3801601 - RNA, 22 nt, Human
ccaggggccccuccagcuugug

SEQ ID NO: 3801602 - RNA, 23 nt, Human
ccaggggcugcuuccuccuggaa

SEQ ID NO: 3801603 - RNA, 14 nt, Human
ccaggggcuggcuu

SEQ ID NO: 3801604 - RNA, 21 nt, Human
ccaggggcuggcuucaggagg

SEQ ID NO: 3801605 - RNA, 18 nt, Human
ccagggggaaggccaagg

SEQ ID NO: 3801606 - RNA, 19 nt, Human
ccagggggaaggccaaggg

SEQ ID NO: 3801607 - RNA, 23 nt, Human
ccagggggagcugggccuggucu

SEQ ID NO: 3801608 - RNA, 15 nt, Human
ccagggggcaagagg

SEQ ID NO: 3801609 - RNA, 22 nt, Human
ccagggggcuuccugaggggag

SEQ ID NO: 3801610 - RNA, 14 nt, Human
ccaggggucucccu

SEQ ID NO: 3801611 - RNA, 18 nt, Human
ccaggggucucccuggag

SEQ ID NO: 3801612 - RNA, 18 nt, Human
ccaggggucucccuggcu

SEQ ID NO: 3801613 - RNA, 22 nt, Human
ccaggggucuugcaaaauuccu

SEQ ID NO: 3801614 - RNA, 17 nt, Human
ccaggggugggacaccc

SEQ ID NO: 3801615 - RNA, 22 nt, Human
ccaggggugggacacccuguga

SEQ ID NO: 3801616 - RNA, 16 nt, Human
ccaggguagcccgccu

SEQ ID NO: 3801617 - RNA, 20 nt, Human
ccaggguagcccgccugcca

SEQ ID NO: 3801618 - RNA, 13 nt, Human
ccagggucccugg

SEQ ID NO: 3801619 - RNA, 12 nt, Human
ccagggucucca

SEQ ID NO: 3801620 - RNA, 16 nt, Human
ccagggucugugugaa

SEQ ID NO: 3801621 - RNA, 16 nt, Human
ccagggugagagcugc

SEQ ID NO: 3801622 - RNA, 14 nt, Human
ccaggguggcagca

SEQ ID NO: 3801623 - RNA, 14 nt, Human
ccagggugugugcu

SEQ ID NO: 3801624 - RNA, 15 nt, Human
ccaggguucccccag

SEQ ID NO: 3801625 - RNA, 22 nt, Human
ccaggguucccccagcccugug

SEQ ID NO: 3801626 - RNA, 21 nt, Human
ccaggguugaccccagaggau

SEQ ID NO: 3801627 - RNA, 16 nt, Human
ccaggguuuuaacuuu

SEQ ID NO: 3801628 - RNA, 23 nt, Human
ccagguaauggcaugagauagcu

SEQ ID NO: 3801629 - RNA, 18 nt, Human
ccagguaccagcugcgcu

SEQ ID NO: 3801630 - RNA, 18 nt, Human
ccagguaccuugaccuuu

SEQ ID NO: 3801631 - RNA, 17 nt, Human
ccagguacgcacagaca

SEQ ID NO: 3801632 - RNA, 13 nt, Human
ccagguagaaacu

SEQ ID NO: 3801633 - RNA, 17 nt, Human
ccagguagaacgccagg

SEQ ID NO: 3801634 - RNA, 16 nt, Human
ccagguagcugggauu

SEQ ID NO: 3801635 - RNA, 15 nt, Human
ccagguaggccaagg

SEQ ID NO: 3801636 - RNA, 20 nt, Human
ccagguaggggccccucuca

SEQ ID NO: 3801637 - RNA, 18 nt, Human
ccagguaucuccaggauu

SEQ ID NO: 3801638 - RNA, 21 nt, Human
ccagguauucguuaucuaaua

SEQ ID NO: 3801639 - RNA, 18 nt, Human
ccaggucccccugcagcu

SEQ ID NO: 3801640 - RNA, 12 nt, Human
ccagguccccuc

SEQ ID NO: 3801641 - RNA, 22 nt, Human
ccaggucccuuucauuugcuau

SEQ ID NO: 3801642 - RNA, 21 nt, Human
ccagguccugguggggcagcu

SEQ ID NO: 3801643 - RNA, 18 nt, Human
ccaggucgggcucagcuc

SEQ ID NO: 3801644 - RNA, 23 nt, Human
ccaggucgggcucagcucuggcu

SEQ ID NO: 3801645 - RNA, 16 nt, Human
ccaggucuccuccacc

SEQ ID NO: 3801646 - RNA, 19 nt, Human
ccaggugaggucagcacau

SEQ ID NO: 3801647 - RNA, 20 nt, Human
ccaggugaggucagcacauc

SEQ ID NO: 3801648 - RNA, 16 nt, Human
ccaggugcacagacgu

SEQ ID NO: 3801649 - RNA, 14 nt, Human
ccaggugcagaggu

SEQ ID NO: 3801650 - RNA, 18 nt, Human
ccaggugccuuucaaauu

SEQ ID NO: 3801651 - RNA, 15 nt, Human
ccagguggaaggcag

SEQ ID NO: 3801652 - RNA, 20 nt, Human
ccagguggaaggcagacagc

SEQ ID NO: 3801653 - RNA, 16 nt, Human
ccagguggccacucca

SEQ ID NO: 3801654 - RNA, 17 nt, Human
ccagguggcugacccag

SEQ ID NO: 3801655 - RNA, 21 nt, Human
ccagguggcugacccaguccc

SEQ ID NO: 3801656 - RNA, 22 nt, Human
ccagguggcugacccagucccu

SEQ ID NO: 3801657 - RNA, 22 nt, Human
ccaggugggcgggcagcacagc

SEQ ID NO: 3801658 - RNA, 23 nt, Human
ccagguggggugaggcagugggu

SEQ ID NO: 3801659 - RNA, 22 nt, Human
ccagguggugggcauucucucu

SEQ ID NO: 3801660 - RNA, 23 nt, Human
ccaggugugcacguggcaugugg

SEQ ID NO: 3801661 - RNA, 22 nt, Human
ccaggugugguugcucacagcu

SEQ ID NO: 3801662 - RNA, 23 nt, Human
ccagguguuaacauuccaagacu

SEQ ID NO: 3801663 - RNA, 20 nt, Human
ccagguucaagcgauucucc

SEQ ID NO: 3801664 - RNA, 16 nt, Human
ccagguucuauuugga

SEQ ID NO: 3801665 - RNA, 22 nt, Human
ccagguucuauuuggaauuuau

SEQ ID NO: 3801666 - RNA, 23 nt, Human
ccagguucuccguuagcuccugu

SEQ ID NO: 3801667 - RNA, 23 nt, Human
ccagguucugguuagcucagccc

SEQ ID NO: 3801668 - RNA, 13 nt, Human
ccagguugaaaga

SEQ ID NO: 3801669 - RNA, 17 nt, Human
ccagguugucacugaga

SEQ ID NO: 3801670 - RNA, 13 nt, Human
ccagguuuaagcu

SEQ ID NO: 3801671 - RNA, 12 nt, Human
ccagguuuuuca

SEQ ID NO: 3801672 - RNA, 14 nt, Human
ccagguuuuucaau

SEQ ID NO: 3801673 - RNA, 18 nt, Human
ccagguuuuucaauuaaa

SEQ ID NO: 3801674 - RNA, 19 nt, Human
ccagguuuuucaauuaaac

SEQ ID NO: 3801675 - RNA, 21 nt, Human
ccagguuuuucaauuaaacgg

SEQ ID NO: 3801676 - RNA, 22 nt, Human
ccagguuuuucaauuaaacgga

SEQ ID NO: 3801677 - RNA, 15 nt, Human
ccaguaaaauugcca

SEQ ID NO: 3801678 - RNA, 24 nt, Human
ccaguaaaguguaacauaugcaaa

SEQ ID NO: 3801679 - RNA, 23 nt, Human
ccaguaaaugggggugcauuuga

SEQ ID NO: 3801680 - RNA, 20 nt, Human
ccaguaacgcgucuuccuga

SEQ ID NO: 3801681 - RNA, 12 nt, Human
ccaguaagauca

SEQ ID NO: 3801682 - RNA, 16 nt, Human
ccaguaagaucacugu

SEQ ID NO: 3801683 - RNA, 17 nt, Human
ccaguacaagaucucag

SEQ ID NO: 3801684 - RNA, 18 nt, Human
ccaguacaccccaccucu

SEQ ID NO: 3801685 - RNA, 19 nt, Human
ccaguacauucucaguuuu

SEQ ID NO: 3801686 - RNA, 13 nt, Human
ccaguacuuguca

SEQ ID NO: 3801687 - RNA, 15 nt, Human
ccaguacuugucaua

SEQ ID NO: 3801688 - RNA, 17 nt, Human
ccaguauacaagauaag

SEQ ID NO: 3801689 - RNA, 14 nt, Human
ccaguaucuauaua

SEQ ID NO: 3801690 - RNA, 18 nt, Human
ccaguaucuauauaugug

SEQ ID NO: 3801691 - RNA, 14 nt, Human
ccaguauuagacug

SEQ ID NO: 3801692 - RNA, 14 nt, Human
ccaguauuguacaa

SEQ ID NO: 3801693 - RNA, 18 nt, Human
ccaguauuuagaagccaa

SEQ ID NO: 3801694 - RNA, 20 nt, Human
ccaguauuuuugcugcuucu

SEQ ID NO: 3801695 - RNA, 17 nt, Human
ccagccccacccaggag

SEQ ID NO: 3801696 - RNA, 18 nt, Human
ccagccccacccaggagg

SEQ ID NO: 3801697 - RNA, 19 nt, Human
ccagccccacccuguuuug

SEQ ID NO: 3801698 - RNA, 18 nt, Human
ccagccccacuccucugc

SEQ ID NO: 3801699 - RNA, 13 nt, Human
ccagccccacugc

SEQ ID NO: 3801700 - RNA, 17 nt, Human
ccagccccacugccagc

SEQ ID NO: 3801701 - RNA, 13 nt, Human
ccagccccagcca

SEQ ID NO: 3801702 - RNA, 16 nt, Human
ccagccccagugccca

SEQ ID NO: 3801703 - RNA, 23 nt, Human
ccagccccauccucuguacagag

SEQ ID NO: 3801704 - RNA, 16 nt, Human
ccagcccccacagugc

SEQ ID NO: 3801705 - RNA, 21 nt, Human
ccagcccccacagugcugucu

SEQ ID NO: 3801706 - RNA, 23 nt, Human
ccagcccccugaccacucagaga

SEQ ID NO: 3801707 - RNA, 17 nt, Human
ccagccccggcccuggg

SEQ ID NO: 3801708 - RNA, 14 nt, Human
ccagccccuacugc

SEQ ID NO: 3801709 - RNA, 21 nt, Human
ccagccccuagaaacccaagc

SEQ ID NO: 3801710 - RNA, 14 nt, Human
ccagccccuagccc

SEQ ID NO: 3801711 - RNA, 18 nt, Human
ccagccccuagcccagga

SEQ ID NO: 3801712 - RNA, 23 nt, Human
ccagccccuagcccaggagagag

SEQ ID NO: 3801713 - RNA, 15 nt, Human
ccagccccucccacc

SEQ ID NO: 3801714 - RNA, 16 nt, Human
ccagccccucccacca

SEQ ID NO: 3801715 - RNA, 18 nt, Human
ccagccccucccccaucu

SEQ ID NO: 3801716 - RNA, 21 nt, Human
ccagccccucccccaucuccc

SEQ ID NO: 3801717 - RNA, 17 nt, Human
ccagccccucuggucgc

SEQ ID NO: 3801718 - RNA, 23 nt, Human
ccagccccucuggucgcuccugc

SEQ ID NO: 3801719 - RNA, 15 nt, Human
ccagccccucuuccc

SEQ ID NO: 3801720 - RNA, 13 nt, Human
ccagccccucuug

SEQ ID NO: 3801721 - RNA, 20 nt, Human
ccagccccucuuggagaagu

SEQ ID NO: 3801722 - RNA, 15 nt, Human
ccagccccugcccca

SEQ ID NO: 3801723 - RNA, 16 nt, Human
ccagccccugccccuc

SEQ ID NO: 3801724 - RNA, 15 nt, Human
ccagccccuggaugc

SEQ ID NO: 3801725 - RNA, 11 nt, Human
ccagccccugu

SEQ ID NO: 3801726 - RNA, 19 nt, Human
ccagccccuguagaacuca

SEQ ID NO: 3801727 - RNA, 10 nt, Human
ccagccccuu

SEQ ID NO: 3801728 - RNA, 19 nt, Human
ccagccccuuagacagagg

SEQ ID NO: 3801729 - RNA, 15 nt, Human
ccagccccuucugac

SEQ ID NO: 3801730 - RNA, 16 nt, Human
ccagccccuucugacc

SEQ ID NO: 3801731 - RNA, 17 nt, Human
ccagccccuucugaccc

SEQ ID NO: 3801732 - RNA, 15 nt, Human
ccagccccuuuccaa

SEQ ID NO: 3801733 - RNA, 19 nt, Human
ccagcccggccugcuccca

SEQ ID NO: 3801734 - RNA, 20 nt, Human
ccagcccggccugcucccag

SEQ ID NO: 3801735 - RNA, 15 nt, Human
ccagcccgggagccu

SEQ ID NO: 3801736 - RNA, 16 nt, Human
ccagcccuauggaugu

SEQ ID NO: 3801737 - RNA, 16 nt, Human
ccagcccucccugucc

SEQ ID NO: 3801738 - RNA, 20 nt, Human
ccagcccucucacugugucc

SEQ ID NO: 3801739 - RNA, 18 nt, Human
ccagcccugccuggagga

SEQ ID NO: 3801740 - RNA, 22 nt, Human
ccagcccugccuggaggaccug

SEQ ID NO: 3801741 - RNA, 14 nt, Human
ccagcccugcuggc

SEQ ID NO: 3801742 - RNA, 16 nt, Human
ccagcccugcuggccg

SEQ ID NO: 3801743 - RNA, 21 nt, Human
ccagcccugcuggccgccuca

SEQ ID NO: 3801744 - RNA, 24 nt, Human
ccagcccugcuggccgccucaccc

SEQ ID NO: 3801745 - RNA, 17 nt, Human
ccagcccuuccucugcu

SEQ ID NO: 3801746 - RNA, 20 nt, Human
ccagcccuugagcuccccaa

SEQ ID NO: 3801747 - RNA, 21 nt, Human
ccagcccuuuuguugagccag

SEQ ID NO: 3801748 - RNA, 22 nt, Human
ccagccgacccccucucccugc

SEQ ID NO: 3801749 - RNA, 18 nt, Human
ccagccgagcaggaggcc

SEQ ID NO: 3801750 - RNA, 14 nt, Human
ccagccgccaugcu

SEQ ID NO: 3801751 - RNA, 20 nt, Human
ccagccgccauugccaccag

SEQ ID NO: 3801752 - RNA, 17 nt, Human
ccagccgcucuccugcc

SEQ ID NO: 3801753 - RNA, 21 nt, Human
ccagccgcucuccugccacau

SEQ ID NO: 3801754 - RNA, 23 nt, Human
ccagccgcugcccggcgcccucu

SEQ ID NO: 3801755 - RNA, 13 nt, Human
ccagccggcaugg

SEQ ID NO: 3801756 - RNA, 22 nt, Human
ccagccggccaauggaaaccuc

SEQ ID NO: 3801757 - RNA, 23 nt, Human
ccagccggccucucuggccuccc

SEQ ID NO: 3801758 - RNA, 20 nt, Human
ccagccggggcgaguggcac

SEQ ID NO: 3801759 - RNA, 22 nt, Human
ccagccgguaccugggaagggg

SEQ ID NO: 3801760 - RNA, 18 nt, Human
ccagccgugaugcucagg

SEQ ID NO: 3801761 - RNA, 20 nt, Human
ccagccgugaugcucaggcu

SEQ ID NO: 3801762 - RNA, 21 nt, Human
ccagccgugaugcucaggcuu

SEQ ID NO: 3801763 - RNA, 17 nt, Human
ccagccuaagaugaaga

SEQ ID NO: 3801764 - RNA, 20 nt, Human
ccagccuaugagcauccuga

SEQ ID NO: 3801765 - RNA, 20 nt, Human
ccagccucaaauccaggacc

SEQ ID NO: 3801766 - RNA, 10 nt, Human
ccagccucag

SEQ ID NO: 3801767 - RNA, 12 nt, Human
ccagccucagcg

SEQ ID NO: 3801768 - RNA, 14 nt, Human
ccagccucagcucu

SEQ ID NO: 3801769 - RNA, 11 nt, Human
ccagccucagu

SEQ ID NO: 3801770 - RNA, 15 nt, Human
ccagccucaguccuc

SEQ ID NO: 3801771 - RNA, 20 nt, Human
cagaagggguuuggucuggg

SEQ ID NO: 3801772 - RNA, 15 nt, Human
cagaagguauuccuu

SEQ ID NO: 3801773 - RNA, 23 nt, Human
cagaaguaggggaagaauaauuu

SEQ ID NO: 3801774 - RNA, 14 nt, Human
cagaagucaaggcu

SEQ ID NO: 3801775 - RNA, 17 nt, Human
cagaagucaucuugcua

SEQ ID NO: 3801776 - RNA, 22 nt, Human
cagaagucaucuugcuaccagu

SEQ ID NO: 3801777 - RNA, 13 nt, Human
cagaagucuuuca

SEQ ID NO: 3801778 - RNA, 17 nt, Human
cagaagugagcuuugcu

SEQ ID NO: 3801779 - RNA, 14 nt, Human
cagaagugcaucug

SEQ ID NO: 3801780 - RNA, 13 nt, Human
cagaaguggagcu

SEQ ID NO: 3801781 - RNA, 17 nt, Human
cagaagugugacuggcu

SEQ ID NO: 3801782 - RNA, 13 nt, Human
cagaagugugauu

SEQ ID NO: 3801783 - RNA, 22 nt, Human
cagaagugugauugggaauaaa

SEQ ID NO: 3801784 - RNA, 22 nt, Human
cagaaguuuaaauauuaagcau

SEQ ID NO: 3801785 - RNA, 16 nt, Human
cagaaguuucugccgc

SEQ ID NO: 3801786 - RNA, 11 nt, Human
cagaauaaagc

SEQ ID NO: 3801787 - RNA, 12 nt, Human
cagaauaaagca

SEQ ID NO: 3801788 - RNA, 14 nt, Human
cagaauaaagcaau

SEQ ID NO: 3801789 - RNA, 17 nt, Human
cagaauaaagcaauuuu

SEQ ID NO: 3801790 - RNA, 18 nt, Human
cagaauaaagcaauuuuc

SEQ ID NO: 3801791 - RNA, 19 nt, Human
cagaauaaagcaauuuucc

SEQ ID NO: 3801792 - RNA, 20 nt, Human
cagaauaaagcaauuuuccu

SEQ ID NO: 3801793 - RNA, 22 nt, Human
cagaauaaaguucugaguguuu

SEQ ID NO: 3801794 - RNA, 20 nt, Human
cagaauaaguuauugcaguu

SEQ ID NO: 3801795 - RNA, 21 nt, Human
cagaauaaguuauugcaguuu

SEQ ID NO: 3801796 - RNA, 17 nt, Human
cagaauaaucuuugggu

SEQ ID NO: 3801797 - RNA, 16 nt, Human
cagaauacuuuucucu

SEQ ID NO: 3801798 - RNA, 21 nt, Human
cagaauagcaaggugcucaca

SEQ ID NO: 3801799 - RNA, 14 nt, Human
cagaauauguuuca

SEQ ID NO: 3801800 - RNA, 15 nt, Human
cagaauauguuucaa

SEQ ID NO: 3801801 - RNA, 17 nt, Human
cagaauauguuucaaac

SEQ ID NO: 3801802 - RNA, 13 nt, Human
cagaauauuucua

SEQ ID NO: 3801803 - RNA, 12 nt, Human
cagaauauuuua

SEQ ID NO: 3801804 - RNA, 22 nt, Human
cagaauauuuuuauauuuccuu

SEQ ID NO: 3801805 - RNA, 23 nt, Human
cagaauauuuuuauauuuccuuu

SEQ ID NO: 3801806 - RNA, 15 nt, Human
cagaaucaaagcaau

SEQ ID NO: 3801807 - RNA, 21 nt, Human
cagaaucaaagcaaugcauuu

SEQ ID NO: 3801808 - RNA, 16 nt, Human
cagaaucauaugauuc

SEQ ID NO: 3801809 - RNA, 14 nt, Human
cagaaucauugcuu

SEQ ID NO: 3801810 - RNA, 15 nt, Human
cagaaucauugcuua

SEQ ID NO: 3801811 - RNA, 13 nt, Human
cagaaucccuuaa

SEQ ID NO: 3801812 - RNA, 16 nt, Human
cagaauccuggcccuc

SEQ ID NO: 3801813 - RNA, 16 nt, Human
cagaaucuaaagccag

SEQ ID NO: 3801814 - RNA, 18 nt, Human
cagaaucuacccaaagga

SEQ ID NO: 3801815 - RNA, 16 nt, Human
cagaaucucugaauuu

SEQ ID NO: 3801816 - RNA, 16 nt, Human
cagaaucugaauguaa

SEQ ID NO: 3801817 - RNA, 13 nt, Human
cagaaucuuguuu

SEQ ID NO: 3801818 - RNA, 19 nt, Human
cagaaucuuguuuugaaaa

SEQ ID NO: 3801819 - RNA, 20 nt, Human
cagaaucuuguuuugaaaau

SEQ ID NO: 3801820 - RNA, 16 nt, Human
cagaaucuuuguuaag

SEQ ID NO: 3801821 - RNA, 15 nt, Human
cagaaugaaaaauga

SEQ ID NO: 3801822 - RNA, 14 nt, Human
cagaaugaggcugc

SEQ ID NO: 3801823 - RNA, 20 nt, Human
cagaaugcaaccaagucaca

SEQ ID NO: 3801824 - RNA, 18 nt, Human
cagaaugcugcaggacuu

SEQ ID NO: 3801825 - RNA, 11 nt, Human
cagaaugcugu

SEQ ID NO: 3801826 - RNA, 17 nt, Human
cagaaugcuguacaucu

SEQ ID NO: 3801827 - RNA, 18 nt, Human
cagaaugcuguacaucua

SEQ ID NO: 3801828 - RNA, 20 nt, Human
cagaauguaagugggcccac

SEQ ID NO: 3801829 - RNA, 12 nt, Human
cagaauguaucu

SEQ ID NO: 3801830 - RNA, 13 nt, Human
cagaauguaucug

SEQ ID NO: 3801831 - RNA, 22 nt, Human
cagaauguugauuacagugcag

SEQ ID NO: 3801832 - RNA, 19 nt, Human
cagaauuaaacuuuuaauu

SEQ ID NO: 3801833 - RNA, 15 nt, Human
cagaauuaacuccau

SEQ ID NO: 3801834 - RNA, 21 nt, Human
cagaauuauuuuuaaaaagaa

SEQ ID NO: 3801835 - RNA, 15 nt, Human
cagaauucccagcug

SEQ ID NO: 3801836 - RNA, 21 nt, Human
cagaauucugcuaccucacug

SEQ ID NO: 3801837 - RNA, 21 nt, Human
cagaauugaaacacuuuuuug

SEQ ID NO: 3801838 - RNA, 13 nt, Human
cagaauugaucau

SEQ ID NO: 3801839 - RNA, 19 nt, Human
cagaauuucccaaagcagu

SEQ ID NO: 3801840 - RNA, 18 nt, Human
cccaagcuuggcagccga

SEQ ID NO: 3801841 - RNA, 20 nt, Human
cccaagcuuggcagccgagc

SEQ ID NO: 3801842 - RNA, 19 nt, Human
cccaaggaaagccccagca

SEQ ID NO: 3801843 - RNA, 15 nt, Human
cccaaggagcacagg

SEQ ID NO: 3801844 - RNA, 18 nt, Human
cccaaggagcacaggucc

SEQ ID NO: 3801845 - RNA, 20 nt, Human
cccaaggagcacagguccca

SEQ ID NO: 3801846 - RNA, 22 nt, Human
cccaaggagcacaggucccacc

SEQ ID NO: 3801847 - RNA, 15 nt, Human
cccaaggaggaaaaa

SEQ ID NO: 3801848 - RNA, 22 nt, Human
cccaaggaggaaaaacagacaa

SEQ ID NO: 3801849 - RNA, 21 nt, Human
cccaaggcaaggggugccugg

SEQ ID NO: 3801850 - RNA, 22 nt, Human
cccaaggcaaggggugccuggg

SEQ ID NO: 3801851 - RNA, 23 nt, Human
cccaaggcaaggggugccuggga

SEQ ID NO: 3801852 - RNA, 23 nt, Human
cccaaggccuuccccuggcacug

SEQ ID NO: 3801853 - RNA, 22 nt, Human
cccaaggcugcgucuggagggg

SEQ ID NO: 3801854 - RNA, 23 nt, Human
cccaagggaucugguccuaccca

SEQ ID NO: 3801855 - RNA, 19 nt, Human
cccaagggcaaaauuccca

SEQ ID NO: 3801856 - RNA, 21 nt, Human
cccaagggcaaaauucccagg

SEQ ID NO: 3801857 - RNA, 18 nt, Human
cccaagggccuggccuga

SEQ ID NO: 3801858 - RNA, 15 nt, Human
cccaaggggcagucu

SEQ ID NO: 3801859 - RNA, 21 nt, Human
cccaagguucugggugcagga

SEQ ID NO: 3801860 - RNA, 22 nt, Human
cccaaguagggggucuaaaauu

SEQ ID NO: 3801861 - RNA, 12 nt, Human
cccaaguccaaa

SEQ ID NO: 3801862 - RNA, 17 nt, Human
cccaaguccugaagagg

SEQ ID NO: 3801863 - RNA, 24 nt, Human
cccaagugguuuccacaugcucug

SEQ ID NO: 3801864 - RNA, 22 nt, Human
cccaaguugggggucagugcug

SEQ ID NO: 3801865 - RNA, 23 nt, Human
cccaaguuuccauagcaacagga

SEQ ID NO: 3801866 - RNA, 12 nt, Human
cccaauagcugc

SEQ ID NO: 3801867 - RNA, 11 nt, Human
cccaauauuau

SEQ ID NO: 3801868 - RNA, 12 nt, Human
cccaauauuaua

SEQ ID NO: 3801869 - RNA, 16 nt, Human
cccaaucagcacugaa

SEQ ID NO: 3801870 - RNA, 21 nt, Human
cccaaucccuuuauuaccccc

SEQ ID NO: 3801871 - RNA, 17 nt, Human
cccaauccucccagaaa

SEQ ID NO: 3801872 - RNA, 22 nt, Human
cccaaugagacucuagggucca

SEQ ID NO: 3801873 - RNA, 19 nt, Human
cccaauuaggaaguguaac

SEQ ID NO: 3801874 - RNA, 18 nt, Human
cccaauuuugcagggagc

SEQ ID NO: 3801875 - RNA, 13 nt, Human
cccacaaagccuu

SEQ ID NO: 3801876 - RNA, 22 nt, Human
cccacaaagccuuaucaagugu

SEQ ID NO: 3801877 - RNA, 21 nt, Human
cccacaaaggagagcuagcag

SEQ ID NO: 3801878 - RNA, 13 nt, Human
cccacaagaaaug

SEQ ID NO: 3801879 - RNA, 15 nt, Human
cccacaagccugagg

SEQ ID NO: 3801880 - RNA, 16 nt, Human
cccacaagugguggua

SEQ ID NO: 3801881 - RNA, 23 nt, Human
cccacaaucuuaaggggcagcuu

SEQ ID NO: 3801882 - RNA, 13 nt, Human
cccacacacacac

SEQ ID NO: 3801883 - RNA, 20 nt, Human
cccacacacacacacaugca

SEQ ID NO: 3801884 - RNA, 14 nt, Human
cccacacaccccaa

SEQ ID NO: 3801885 - RNA, 15 nt, Human
cccacacacucgccc

SEQ ID NO: 3801886 - RNA, 21 nt, Human
cccacaccauaagcuacugcc

SEQ ID NO: 3801887 - RNA, 12 nt, Human
cccacacccugg

SEQ ID NO: 3801888 - RNA, 15 nt, Human
cccacaccguguaaa

SEQ ID NO: 3801889 - RNA, 15 nt, Human
cccacaccuccacag

SEQ ID NO: 3801890 - RNA, 14 nt, Human
cccacaccuccucu

SEQ ID NO: 3801891 - RNA, 15 nt, Human
cccacaccucugcca

SEQ ID NO: 3801892 - RNA, 12 nt, Human
cccacaccuggc

SEQ ID NO: 3801893 - RNA, 19 nt, Human
cccacaccuggcccugggg

SEQ ID NO: 3801894 - RNA, 22 nt, Human
cccacacggaggcaucugcacc

SEQ ID NO: 3801895 - RNA, 23 nt, Human
cccacacggaggcaucugcaccc

SEQ ID NO: 3801896 - RNA, 13 nt, Human
cccacacucacuc

SEQ ID NO: 3801897 - RNA, 21 nt, Human
cccacacucagauccuccuca

SEQ ID NO: 3801898 - RNA, 11 nt, Human
cccacacuccu

SEQ ID NO: 3801899 - RNA, 14 nt, Human
cccacacuccuaca

SEQ ID NO: 3801900 - RNA, 19 nt, Human
cccacacuggggugccgcc

SEQ ID NO: 3801901 - RNA, 22 nt, Human
cccacacuggggugccgccugc

SEQ ID NO: 3801902 - RNA, 14 nt, Human
cccacacuucccug

SEQ ID NO: 3801903 - RNA, 15 nt, Human
cccacacuucccugg

SEQ ID NO: 3801904 - RNA, 12 nt, Human
cccacagaaaga

SEQ ID NO: 3801905 - RNA, 23 nt, Human
cccacagaaagacugagcucaag

SEQ ID NO: 3801906 - RNA, 13 nt, Human
cccacagaaagag

SEQ ID NO: 3801907 - RNA, 12 nt, Human
cccacagagaca

SEQ ID NO: 3801908 - RNA, 12 nt, Human
cccacagcaggc

SEQ ID NO: 3801909 - RNA, 18 nt, Human
cccacagcccacguccug

SEQ ID NO: 3801910 - RNA, 19 nt, Human
cccacagcccacguccugu

SEQ ID NO: 3801911 - RNA, 22 nt, Human
cccacagcccacguccugucag

SEQ ID NO: 3801912 - RNA, 16 nt, Human
cccacagccccaucug

SEQ ID NO: 3801913 - RNA, 22 nt, Human
cccacagcgcuggccgggaccc

SEQ ID NO: 3801914 - RNA, 17 nt, Human
cccacagcgucccuggc

SEQ ID NO: 3801915 - RNA, 20 nt, Human
cccacagcucccaccccacc

SEQ ID NO: 3801916 - RNA, 16 nt, Human
cccacaggcccuuccu

SEQ ID NO: 3801917 - RNA, 18 nt, Human
cccacaggcccuuccucu

SEQ ID NO: 3801918 - RNA, 15 nt, Human
cccacaguugcucua

SEQ ID NO: 3801919 - RNA, 17 nt, Human
cccacaucccaucgucu

SEQ ID NO: 3801920 - RNA, 14 nt, Human
cccacaucccuggg

SEQ ID NO: 3801921 - RNA, 19 nt, Human
cccacaucccugggccugc

SEQ ID NO: 3801922 - RNA, 20 nt, Human
cccacaucccugggccugcu

SEQ ID NO: 3801923 - RNA, 24 nt, Human
cccacaucccugggccugcugcug

SEQ ID NO: 3801924 - RNA, 15 nt, Human
cccacauguccagca

SEQ ID NO: 3801925 - RNA, 16 nt, Human
cccacaugugacacau

SEQ ID NO: 3801926 - RNA, 22 nt, Human
cccacauuggaagagcagcacc

SEQ ID NO: 3801927 - RNA, 15 nt, Human
cccaccaccccagcu

SEQ ID NO: 3801928 - RNA, 13 nt, Human
cccaccaccuagg

SEQ ID NO: 3801929 - RNA, 16 nt, Human
cccaccaccuaggcca

SEQ ID NO: 3801930 - RNA, 19 nt, Human
cccaccaccuaggccacuc

SEQ ID NO: 3801931 - RNA, 19 nt, Human
cccaccacgauguggcccu

SEQ ID NO: 3801932 - RNA, 14 nt, Human
cccaccacggccac

SEQ ID NO: 3801933 - RNA, 20 nt, Human
cccaccacggccacuggcca

SEQ ID NO: 3801934 - RNA, 13 nt, Human
cccaccaggcugc

SEQ ID NO: 3801935 - RNA, 16 nt, Human
cccaccaggcugcuca

SEQ ID NO: 3801936 - RNA, 14 nt, Human
cccaccaucugcug

SEQ ID NO: 3801937 - RNA, 16 nt, Human
cccaccaucugcuguc

SEQ ID NO: 3801938 - RNA, 19 nt, Human
cccaccaucugcugucuuu

SEQ ID NO: 3801939 - RNA, 20 nt, Human
cccaccauuuggcaucccug

SEQ ID NO: 3801940 - RNA, 22 nt, Human
ccagcugaugacucaagauucc

SEQ ID NO: 3801941 - RNA, 16 nt, Human
ccagcugcaaaguguu

SEQ ID NO: 3801942 - RNA, 17 nt, Human
ccagcugcaaaguguuu

SEQ ID NO: 3801943 - RNA, 13 nt, Human
ccagcugcaccag

SEQ ID NO: 3801944 - RNA, 14 nt, Human
ccagcugcaccccu

SEQ ID NO: 3801945 - RNA, 20 nt, Human
ccagcugcaccccuuccugg

SEQ ID NO: 3801946 - RNA, 17 nt, Human
ccagcugcaccugccag

SEQ ID NO: 3801947 - RNA, 18 nt, Human
ccagcugcaccugccagc

SEQ ID NO: 3801948 - RNA, 19 nt, Human
ccagcugcaccugccagcc

SEQ ID NO: 3801949 - RNA, 18 nt, Human
ccagcugcacugaugcug

SEQ ID NO: 3801950 - RNA, 19 nt, Human
ccagcugcacugaugcugc

SEQ ID NO: 3801951 - RNA, 17 nt, Human
ccagcugcccccagagc

SEQ ID NO: 3801952 - RNA, 19 nt, Human
ccagcugcccccagagcca

SEQ ID NO: 3801953 - RNA, 17 nt, Human
ccagcugccccucccug

SEQ ID NO: 3801954 - RNA, 16 nt, Human
ccagcugcccuauggg

SEQ ID NO: 3801955 - RNA, 17 nt, Human
ccagcugcccuuccgca

SEQ ID NO: 3801956 - RNA, 21 nt, Human
ccagcugcccuuccgcagugu

SEQ ID NO: 3801957 - RNA, 18 nt, Human
ccagcugccgaccagagc

SEQ ID NO: 3801958 - RNA, 15 nt, Human
ccagcugccuauuga

SEQ ID NO: 3801959 - RNA, 12 nt, Human
ccagcugccucc

SEQ ID NO: 3801960 - RNA, 18 nt, Human
ccagcugcgcuugcuuuu

SEQ ID NO: 3801961 - RNA, 20 nt, Human
ccagcugcgcuugcuuuucu

SEQ ID NO: 3801962 - RNA, 21 nt, Human
ccagcugcgcuugcuuuucug

SEQ ID NO: 3801963 - RNA, 14 nt, Human
ccagcugcucccca

SEQ ID NO: 3801964 - RNA, 21 nt, Human
ccagcugcuccccucccuccu

SEQ ID NO: 3801965 - RNA, 12 nt, Human
ccagcugcucug

SEQ ID NO: 3801966 - RNA, 22 nt, Human
ccagcugcucugcccagagcug

SEQ ID NO: 3801967 - RNA, 19 nt, Human
ccagcugcugagccgcaga

SEQ ID NO: 3801968 - RNA, 11 nt, Human
ccagcugcugu

SEQ ID NO: 3801969 - RNA, 18 nt, Human
ccagcugcuugggcuuca

SEQ ID NO: 3801970 - RNA, 17 nt, Human
ccagcuggaggcagggg

SEQ ID NO: 3801971 - RNA, 22 nt, Human
ccagcuggaggcaggggcuucc

SEQ ID NO: 3801972 - RNA, 23 nt, Human
ccagcuggaggcaggggcuuccu

SEQ ID NO: 3801973 - RNA, 14 nt, Human
ccagcuggccggga

SEQ ID NO: 3801974 - RNA, 15 nt, Human
ccagcuggccuggac

SEQ ID NO: 3801975 - RNA, 13 nt, Human
ccagcuggccuuu

SEQ ID NO: 3801976 - RNA, 12 nt, Human
ccagcugggagg

SEQ ID NO: 3801977 - RNA, 14 nt, Human
ccagcugggaggca

SEQ ID NO: 3801978 - RNA, 18 nt, Human
ccagcugggaucugacug

SEQ ID NO: 3801979 - RNA, 14 nt, Human
ccagcugggcucug

SEQ ID NO: 3801980 - RNA, 16 nt, Human
ccagcugggcucugca

SEQ ID NO: 3801981 - RNA, 22 nt, Human
ccagcugggcucugccacccua

SEQ ID NO: 3801982 - RNA, 19 nt, Human
ccagcuggggccaggcugg

SEQ ID NO: 3801983 - RNA, 21 nt, Human
ccagcuggggccaggcugggu

SEQ ID NO: 3801984 - RNA, 15 nt, Human
cgcugagccaccugc

SEQ ID NO: 3801985 - RNA, 21 nt, Human
cgcugagccaccugcccuuuu

SEQ ID NO: 3801986 - RNA, 20 nt, Human
cgcugaguauggagcagccu

SEQ ID NO: 3801987 - RNA, 13 nt, Human
cgcugaguggcag

SEQ ID NO: 3801988 - RNA, 16 nt, Human
cgcugaguggcagggg

SEQ ID NO: 3801989 - RNA, 20 nt, Human
cgcugaguggcaggggacag

SEQ ID NO: 3801990 - RNA, 13 nt, Human
cgcugaugcuggg

SEQ ID NO: 3801991 - RNA, 14 nt, Human
cgcugaugcugggc

SEQ ID NO: 3801992 - RNA, 16 nt, Human
cgcugaugcugggcug

SEQ ID NO: 3801993 - RNA, 13 nt, Human
cgcugauguucac

SEQ ID NO: 3801994 - RNA, 19 nt, Human
cgcugcaaccuguugauag

SEQ ID NO: 3801995 - RNA, 17 nt, Human
cgcugccacccaccucc

SEQ ID NO: 3801996 - RNA, 20 nt, Human
cgcugccacccaccucccug

SEQ ID NO: 3801997 - RNA, 21 nt, Human
cgcugccagccuugagcccug

SEQ ID NO: 3801998 - RNA, 23 nt, Human
cgcugccccaucuccccucagcu

SEQ ID NO: 3801999 - RNA, 13 nt, Human
cgcugccccuggc

SEQ ID NO: 3802000 - RNA, 17 nt, Human
cgcugccccuggcagcc

SEQ ID NO: 3802001 - RNA, 21 nt, Human
cgcugcccggcgcccucuguc

SEQ ID NO: 3802002 - RNA, 18 nt, Human
cgcugccgcaccccagag

SEQ ID NO: 3802003 - RNA, 15 nt, Human
cgcugcucugcccca

SEQ ID NO: 3802004 - RNA, 13 nt, Human
cgcugcugucaca

SEQ ID NO: 3802005 - RNA, 18 nt, Human
cgcugcuucgugggauac

SEQ ID NO: 3802006 - RNA, 13 nt, Human
cuugcucugcacc

SEQ ID NO: 3802007 - RNA, 14 nt, Human
cuugcucugcugac

SEQ ID NO: 3802008 - RNA, 23 nt, Human
cuugcucugcuugacaacaucug

SEQ ID NO: 3802009 - RNA, 14 nt, Human
cuugcucuggaccu

SEQ ID NO: 3802010 - RNA, 17 nt, Human
cuugcucuggaccugcc

SEQ ID NO: 3802011 - RNA, 18 nt, Human
cuugcucuguuugugggg

SEQ ID NO: 3802012 - RNA, 19 nt, Human
cuugcucuuucuacucuga

SEQ ID NO: 3802013 - RNA, 20 nt, Human
cuugcucuuucuacucugaa

SEQ ID NO: 3802014 - RNA, 21 nt, Human
cuugcugaaacgcaucuaguu

SEQ ID NO: 3802015 - RNA, 20 nt, Human
cuugcugaaucggaaucucu

SEQ ID NO: 3802016 - RNA, 17 nt, Human
cuugcugagaggggcug

SEQ ID NO: 3802017 - RNA, 19 nt, Human
cuugcugagaggggcuguc

SEQ ID NO: 3802018 - RNA, 18 nt, Human
cuugcugagcuguuuaua

SEQ ID NO: 3802019 - RNA, 21 nt, Human
cuugcugcacucuugcacaug

SEQ ID NO: 3802020 - RNA, 13 nt, Human
cuugcugcccugc

SEQ ID NO: 3802021 - RNA, 10 nt, Human
cuugcugccu

SEQ ID NO: 3802022 - RNA, 19 nt, Human
cuugcugccuucuggauuc

SEQ ID NO: 3802023 - RNA, 16 nt, Human
cuugcugcuagaacuu

SEQ ID NO: 3802024 - RNA, 19 nt, Human
cuugcugcuauuuuacugu

SEQ ID NO: 3802025 - RNA, 19 nt, Human
cuugcugcugauuuaaaca

SEQ ID NO: 3802026 - RNA, 17 nt, Human
cuugcuggacggggacu

SEQ ID NO: 3802027 - RNA, 21 nt, Human
cuugcuggacggggacugggg

SEQ ID NO: 3802028 - RNA, 13 nt, Human
cuugcuggcccca

SEQ ID NO: 3802029 - RNA, 15 nt, Human
cuugcuggccccagc

SEQ ID NO: 3802030 - RNA, 16 nt, Human
cuugcuggccccagcc

SEQ ID NO: 3802031 - RNA, 22 nt, Human
cuugcuggccccagcccugcug

SEQ ID NO: 3802032 - RNA, 22 nt, Human
cuugcuggcuacgccucuucug

SEQ ID NO: 3802033 - RNA, 23 nt, Human
cuugcuggggacggggggcccca

SEQ ID NO: 3802034 - RNA, 16 nt, Human
cuugcuguauaugcag

SEQ ID NO: 3802035 - RNA, 19 nt, Human
cuugcuguaugcugaucau

SEQ ID NO: 3802036 - RNA, 13 nt, Human
cuugcuguccuga

SEQ ID NO: 3802037 - RNA, 17 nt, Human
cuugcuguccugaucug

SEQ ID NO: 3802038 - RNA, 13 nt, Human
cuugcugucucug

SEQ ID NO: 3802039 - RNA, 16 nt, Human
cuugcuguuggucaug

SEQ ID NO: 3802040 - RNA, 19 nt, Human
cuugcuguuuguccugaga

SEQ ID NO: 3802041 - RNA, 13 nt, Human
cuugcuuaaaugu

SEQ ID NO: 3802042 - RNA, 17 nt, Human
cuugcuuaaauuucuua

SEQ ID NO: 3802043 - RNA, 22 nt, Human
cuugcuuaccuugacuguugau

SEQ ID NO: 3802044 - RNA, 13 nt, Human
cuugcuucccuaa

SEQ ID NO: 3802045 - RNA, 14 nt, Human
cuugcuucuuacug

SEQ ID NO: 3802046 - RNA, 19 nt, Human
cuugcuucuuacugauaau

SEQ ID NO: 3802047 - RNA, 20 nt, Human
cuugcuucuuacugauaauu

SEQ ID NO: 3802048 - RNA, 14 nt, Human
cuugcuucuuucua

SEQ ID NO: 3802049 - RNA, 20 nt, Human
cuugcuugauuguauggugg

SEQ ID NO: 3802050 - RNA, 14 nt, Human
cuugcuuggcugcu

SEQ ID NO: 3802051 - RNA, 18 nt, Human
cuugcuuguaccucuggc

SEQ ID NO: 3802052 - RNA, 13 nt, Human
cuugcuuguuaca

SEQ ID NO: 3802053 - RNA, 22 nt, Human
cuugcuuguugggauuccugac

SEQ ID NO: 3802054 - RNA, 20 nt, Human
cuugcuuuaccuuuucaggg

SEQ ID NO: 3802055 - RNA, 21 nt, Human
cuugcuuucuaugcuguuugu

SEQ ID NO: 3802056 - RNA, 13 nt, Human
cuugcuuugauuu

SEQ ID NO: 3802057 - RNA, 18 nt, Human
cuugcuuuguguucuuug

SEQ ID NO: 3802058 - RNA, 14 nt, Human
cuugcuuuucaugc

SEQ ID NO: 3802059 - RNA, 16 nt, Human
cuugcuuuucccucuu

SEQ ID NO: 3802060 - RNA, 17 nt, Human
cuugcuuuucccucuuu

SEQ ID NO: 3802061 - RNA, 20 nt, Human
cuugcuuuucccucuuuucu

SEQ ID NO: 3802062 - RNA, 14 nt, Human
cuuggaaaaaguga

SEQ ID NO: 3802063 - RNA, 22 nt, Human
cuuggaaaaauccagaaagaaa

SEQ ID NO: 3802064 - RNA, 17 nt, Human
cuuggaaaccugcccug

SEQ ID NO: 3802065 - RNA, 20 nt, Human
cuuggaaaccugcccugccu

SEQ ID NO: 3802066 - RNA, 22 nt, Human
cuuggaaaccugcccugccuga

SEQ ID NO: 3802067 - RNA, 23 nt, Human
cuuggaaaccugcccugccugag

SEQ ID NO: 3802068 - RNA, 21 nt, Human
cuuggaaacuggaugagguca

SEQ ID NO: 3802069 - RNA, 14 nt, Human
cuuggaaauauuaa

SEQ ID NO: 3802070 - RNA, 15 nt, Human
cuuggaaauauuaaa

SEQ ID NO: 3802071 - RNA, 21 nt, Human
cuuggaaaucaaauguaaagu

SEQ ID NO: 3802072 - RNA, 16 nt, Human
cuuggaacauuggaau

SEQ ID NO: 3802073 - RNA, 22 nt, Human
cuuggaaccguaggacccaagc

SEQ ID NO: 3802074 - RNA, 15 nt, Human
cuuggaacugaaggg

SEQ ID NO: 3802075 - RNA, 23 nt, Human
cuuggaacuugccugccuuucca

SEQ ID NO: 3802076 - RNA, 19 nt, Human
cuuggaagagccugcaggu

SEQ ID NO: 3802077 - RNA, 20 nt, Human
cuuggaagcuccgcuuucua

SEQ ID NO: 3802078 - RNA, 16 nt, Human
cuuggaagcuguuugg

SEQ ID NO: 3802079 - RNA, 19 nt, Human
cuuggaagcuguuuggaaa

SEQ ID NO: 3802080 - RNA, 16 nt, Human
cuuggaaguacaugaa

SEQ ID NO: 3802081 - RNA, 18 nt, Human
cuuggaaguugcauggca

SEQ ID NO: 3802082 - RNA, 21 nt, Human
cuuggaaguuucauauauugu

SEQ ID NO: 3802083 - RNA, 22 nt, Human
cuuggacaagacaaaccaaguc

SEQ ID NO: 3802084 - RNA, 15 nt, Human
cuuggacacgcucag

SEQ ID NO: 3802085 - RNA, 17 nt, Human
cuuggacauccuccucc

SEQ ID NO: 3802086 - RNA, 21 nt, Human
cuuggacauccuccucccacc

SEQ ID NO: 3802087 - RNA, 13 nt, Human
cuuggaccucugc

SEQ ID NO: 3802088 - RNA, 14 nt, Human
cuuggaccucugcu

SEQ ID NO: 3802089 - RNA, 17 nt, Human
cuuggaccucugcucug

SEQ ID NO: 3802090 - RNA, 13 nt, Human
cuuggagaaauga

SEQ ID NO: 3802091 - RNA, 19 nt, Human
cuuggagaagucucagcua

SEQ ID NO: 3802092 - RNA, 14 nt, Human
cuuggagaccuuac

SEQ ID NO: 3802093 - RNA, 16 nt, Human
cuuggagaccuuaccc

SEQ ID NO: 3802094 - RNA, 15 nt, Human
cuuggagagacacag

SEQ ID NO: 3802095 - RNA, 13 nt, Human
cuuggagccccag

SEQ ID NO: 3802096 - RNA, 15 nt, Human
cuuggagccugcaga

SEQ ID NO: 3802097 - RNA, 20 nt, Human
cuuggagccugcagagcugc

SEQ ID NO: 3802098 - RNA, 18 nt, Human
cuuggagcguggacuggu

SEQ ID NO: 3802099 - RNA, 19 nt, Human
cuuggagcuauuuuccagg

SEQ ID NO: 3802100 - RNA, 18 nt, Human
cuuggagcugagccucuc

SEQ ID NO: 3802101 - RNA, 13 nt, Human
cuuggaggaagga

SEQ ID NO: 3802102 - RNA, 17 nt, Human
cuuggagggucccaagc

SEQ ID NO: 3802103 - RNA, 22 nt, Human
cuuggagggucccaagcugggc

SEQ ID NO: 3802104 - RNA, 15 nt, Human
cuuggaggugucugu

SEQ ID NO: 3802105 - RNA, 22 nt, Human
cuuggauauauaggcuauuuuc

SEQ ID NO: 3802106 - RNA, 21 nt, Human
cuuggaugaguuuugggaagu

SEQ ID NO: 3802107 - RNA, 15 nt, Human
cuuggauguauaugu

SEQ ID NO: 3802108 - RNA, 13 nt, Human
cuuggauuaaaua

SEQ ID NO: 3802109 - RNA, 16 nt, Human
cuuggauucuuuccau

SEQ ID NO: 3802110 - RNA, 16 nt, Human
cuuggauuuaguuuca

SEQ ID NO: 3802111 - RNA, 20 nt, Human
cuuggcaauaaauuuugaaa

SEQ ID NO: 3802112 - RNA, 16 nt, Human
cuuggcaccaaagaug

SEQ ID NO: 3802113 - RNA, 20 nt, Human
cuuggcaccagacacccagg

SEQ ID NO: 3802114 - RNA, 21 nt, Human
cuuggcacccaagaccucagg

SEQ ID NO: 3802115 - RNA, 14 nt, Human
cuuggcagccuugu

SEQ ID NO: 3802116 - RNA, 23 nt, Human
cuuggcagguaggaauauuauau

SEQ ID NO: 3802117 - RNA, 19 nt, Human
cuuggcaucacagggcaga

SEQ ID NO: 3802118 - RNA, 16 nt, Human
cuuggcaucagcuggc

SEQ ID NO: 3802119 - RNA, 22 nt, Human
cuuggccagaagggggccauga

SEQ ID NO: 3802120 - RNA, 15 nt, Human
cuuggccaugcagaa

SEQ ID NO: 3802121 - RNA, 19 nt, Human
cuuggccaugggaggccuu

SEQ ID NO: 3802122 - RNA, 20 nt, Human
cuuggccaugggaggccuuu

SEQ ID NO: 3802123 - RNA, 23 nt, Human
cuuggccaugggaggccuuuccc

SEQ ID NO: 3802124 - RNA, 13 nt, Human
cuuggcccaggag

SEQ ID NO: 3802125 - RNA, 14 nt, Human
cuuggcccaggagu

SEQ ID NO: 3802126 - RNA, 15 nt, Human
cuuggcccaggaguu

SEQ ID NO: 3802127 - RNA, 20 nt, Human
cuuggcccaggaguuuggcc

SEQ ID NO: 3802128 - RNA, 21 nt, Human
cuugaucaguaguuugcauuu

SEQ ID NO: 3802129 - RNA, 16 nt, Human
cuugaucauuuuggga

SEQ ID NO: 3802130 - RNA, 16 nt, Human
cuugauccauuucuaa

SEQ ID NO: 3802131 - RNA, 18 nt, Human
cuugauccauuucuaauu

SEQ ID NO: 3802132 - RNA, 18 nt, Human
cuugaucugcucagcccu

SEQ ID NO: 3802133 - RNA, 19 nt, Human
cuugaucugcucagcccug

SEQ ID NO: 3802134 - RNA, 20 nt, Human
cuugaucuguauauacaaua

SEQ ID NO: 3802135 - RNA, 22 nt, Human
cuugaucuguauauacaauaac

SEQ ID NO: 3802136 - RNA, 12 nt, Human
cuugaugaagaa

SEQ ID NO: 3802137 - RNA, 13 nt, Human
cuugaugaagaag

SEQ ID NO: 3802138 - RNA, 21 nt, Human
cuugaugagcugugcacaaag

SEQ ID NO: 3802139 - RNA, 20 nt, Human
cuugaugaguguaacaagaa

SEQ ID NO: 3802140 - RNA, 22 nt, Human
cuugaugaguguaacaagaaag

SEQ ID NO: 3802141 - RNA, 18 nt, Human
cuugaugcacagagaagc

SEQ ID NO: 3802142 - RNA, 19 nt, Human
cuugaugggauucuggaca

SEQ ID NO: 3802143 - RNA, 19 nt, Human
cuugauguaaggaugggca

SEQ ID NO: 3802144 - RNA, 12 nt, Human
cuugaugugccu

SEQ ID NO: 3802145 - RNA, 18 nt, Human
cuugauguguuaucucuu

SEQ ID NO: 3802146 - RNA, 14 nt, Human
cuugauguugcuua

SEQ ID NO: 3802147 - RNA, 15 nt, Human
cuugauuaaaucaac

SEQ ID NO: 3802148 - RNA, 16 nt, Human
cuugauucagucacau

SEQ ID NO: 3802149 - RNA, 12 nt, Human
cuugauucauaa

SEQ ID NO: 3802150 - RNA, 13 nt, Human
cuugauucugcag

SEQ ID NO: 3802151 - RNA, 22 nt, Human
cuugauucugcaguaaaucuuu

SEQ ID NO: 3802152 - RNA, 12 nt, Human
cuugauuggaag

SEQ ID NO: 3802153 - RNA, 13 nt, Human
cuugauuggaagg

SEQ ID NO: 3802154 - RNA, 19 nt, Human
cuugauuuaaacacacaga

SEQ ID NO: 3802155 - RNA, 21 nt, Human
cuugauuuaucacacaaagca

SEQ ID NO: 3802156 - RNA, 23 nt, Human
cuugauuucaaaguuuuguugua

SEQ ID NO: 3802157 - RNA, 21 nt, Human
cuugauuuuagccuucucugu

SEQ ID NO: 3802158 - RNA, 13 nt, Human
cuugauuuuccau

SEQ ID NO: 3802159 - RNA, 15 nt, Human
cuugcaaaaaggguc

SEQ ID NO: 3802160 - RNA, 13 nt, Human
cuuggcugcagga

SEQ ID NO: 3802161 - RNA, 14 nt, Human
cuuggcuggaccca

SEQ ID NO: 3802162 - RNA, 13 nt, Human
cuuggcuggugug

SEQ ID NO: 3802163 - RNA, 14 nt, Human
cuuggcuggugugg

SEQ ID NO: 3802164 - RNA, 22 nt, Human
cuuggcuggugugguacagaga

SEQ ID NO: 3802165 - RNA, 17 nt, Human
cuuggcuguagaaggag

SEQ ID NO: 3802166 - RNA, 13 nt, Human
cuuggcugugagg

SEQ ID NO: 3802167 - RNA, 16 nt, Human
cuuggcuuaccugacc

SEQ ID NO: 3802168 - RNA, 23 nt, Human
cuuggcuuaccugaccucuugcu

SEQ ID NO: 3802169 - RNA, 18 nt, Human
cuuggcuuggcccuggca

SEQ ID NO: 3802170 - RNA, 20 nt, Human
cuuggcuuuuacugaagccu

SEQ ID NO: 3802171 - RNA, 12 nt, Human
cuugggaaauau

SEQ ID NO: 3802172 - RNA, 20 nt, Human
cuugggaagacuccuagcug

SEQ ID NO: 3802173 - RNA, 18 nt, Human
cuugggaauggauccugg

SEQ ID NO: 3802174 - RNA, 16 nt, Human
cuugggagagccccug

SEQ ID NO: 3802175 - RNA, 18 nt, Human
cuugggaggaagcagaau

SEQ ID NO: 3802176 - RNA, 21 nt, Human
cuugggaggaagcagaauaaa

SEQ ID NO: 3802177 - RNA, 23 nt, Human
cuugggaggaagcagaauaaagc

SEQ ID NO: 3802178 - RNA, 19 nt, Human
cuugggaggccccacuggg

SEQ ID NO: 3802179 - RNA, 21 nt, Human
cuugggaggccccacugggga

SEQ ID NO: 3802180 - RNA, 20 nt, Human
cuugggagugugguuucuuu

SEQ ID NO: 3802181 - RNA, 15 nt, Human
cuugggcaauauucu

SEQ ID NO: 3802182 - RNA, 19 nt, Human
cuugggcaauauucucugu

SEQ ID NO: 3802183 - RNA, 13 nt, Human
cuugggcaccccc

SEQ ID NO: 3802184 - RNA, 17 nt, Human
cuugggcacccccagcc

SEQ ID NO: 3802185 - RNA, 18 nt, Human
cuugggcacccccagccu

SEQ ID NO: 3802186 - RNA, 21 nt, Human
cuugggcacccccagccuggg

SEQ ID NO: 3802187 - RNA, 13 nt, Human
cuugggcagagcu

SEQ ID NO: 3802188 - RNA, 14 nt, Human
cuugggcagcaucc

SEQ ID NO: 3802189 - RNA, 20 nt, Human
cuugggccaaauccgcucuc

SEQ ID NO: 3802190 - RNA, 23 nt, Human
cuugggccagaaguaccagacua

SEQ ID NO: 3802191 - RNA, 15 nt, Human
cuugggcccacaccu

SEQ ID NO: 3802192 - RNA, 15 nt, Human
cuugggcccagcugg

SEQ ID NO: 3802193 - RNA, 18 nt, Human
cuugggcccagcugggcu

SEQ ID NO: 3802194 - RNA, 12 nt, Human
cuugggcccucc

SEQ ID NO: 3802195 - RNA, 15 nt, Human
cuugggcccucuggu

SEQ ID NO: 3802196 - RNA, 15 nt, Human
cuugggcccuucccu

SEQ ID NO: 3802197 - RNA, 14 nt, Human
cuugggcccuuuga

SEQ ID NO: 3802198 - RNA, 16 nt, Human
cuugggcccuuugagu

SEQ ID NO: 3802199 - RNA, 17 nt, Human
cuugggccuaggcugca

SEQ ID NO: 3802200 - RNA, 23 nt, Human
cuugggcgccgugcugggcagcc

SEQ ID NO: 3802201 - RNA, 12 nt, Human
cuugggcggcug

SEQ ID NO: 3802202 - RNA, 18 nt, Human
cuugggcggcugagagcc

SEQ ID NO: 3802203 - RNA, 18 nt, Human
cuugggcucugaugaaaa

SEQ ID NO: 3802204 - RNA, 13 nt, Human
cuugggcuucauc

SEQ ID NO: 3802205 - RNA, 22 nt, Human
cuugggcuucauccuccucaga

SEQ ID NO: 3802206 - RNA, 19 nt, Human
cuugggcuuccauuugugu

SEQ ID NO: 3802207 - RNA, 16 nt, Human
cuuggggaauuuccuc

SEQ ID NO: 3802208 - RNA, 16 nt, Human
cuuggggaccagagcu

SEQ ID NO: 3802209 - RNA, 22 nt, Human
cuuggggaccagagcugccacc

SEQ ID NO: 3802210 - RNA, 22 nt, Human
cuuggggagaccucuacugccu

SEQ ID NO: 3802211 - RNA, 19 nt, Human
cuuggggaggacaaaacuu

SEQ ID NO: 3802212 - RNA, 22 nt, Human
cuuggggaguuaagaccuggca

SEQ ID NO: 3802213 - RNA, 23 nt, Human
cuuggggaguuaagaccuggcag

SEQ ID NO: 3802214 - RNA, 21 nt, Human
cuuggggccaccaaagcugcc

SEQ ID NO: 3802215 - RNA, 12 nt, Human
cuuggggcccag

SEQ ID NO: 3802216 - RNA, 15 nt, Human
cuuggggcccagugc

SEQ ID NO: 3802217 - RNA, 18 nt, Human
cuuggggcucacacaccu

SEQ ID NO: 3802218 - RNA, 15 nt, Human
cuugggggaaaauac

SEQ ID NO: 3802219 - RNA, 21 nt, Human
cuugggggaacgaugugucug

SEQ ID NO: 3802220 - RNA, 22 nt, Human
cuugggggaacgaugugucugu

SEQ ID NO: 3802221 - RNA, 22 nt, Human
cuugggggacagggcuggccca

SEQ ID NO: 3802222 - RNA, 17 nt, Human
cuugggggcucagcaag

SEQ ID NO: 3802223 - RNA, 15 nt, Human
cuuggggggcugagg

SEQ ID NO: 3802224 - RNA, 22 nt, Human
cuuggggggcugaggugggagg

SEQ ID NO: 3802225 - RNA, 20 nt, Human
cuuggggggugaugagggca

SEQ ID NO: 3802226 - RNA, 22 nt, Human
cuuggggggugaugagggcagc

SEQ ID NO: 3802227 - RNA, 22 nt, Human
cuugggggguuuuuacuccagu

SEQ ID NO: 3802228 - RNA, 21 nt, Human
cuuggggguccuccuccaggg

SEQ ID NO: 3802229 - RNA, 22 nt, Human
cuuggggguccuccuccaggga

SEQ ID NO: 3802230 - RNA, 17 nt, Human
cuugggucccagggaag

SEQ ID NO: 3802231 - RNA, 15 nt, Human
cuuggguggagaagc

SEQ ID NO: 3802232 - RNA, 17 nt, Human
cuuggguggagaagcca

SEQ ID NO: 3802233 - RNA, 20 nt, Human
cuuggguggagaagccauug

SEQ ID NO: 3802234 - RNA, 21 nt, Human
cuuggguguaacaggucuccu

SEQ ID NO: 3802235 - RNA, 16 nt, Human
cuuggguuagaccuac

SEQ ID NO: 3802236 - RNA, 14 nt, Human
cuuggguucugaua

SEQ ID NO: 3802237 - RNA, 17 nt, Human
cuuggguuuuuguuacc

SEQ ID NO: 3802238 - RNA, 15 nt, Human
cuugguaagaagccg

SEQ ID NO: 3802239 - RNA, 23 nt, Human
cuugguacuacuagaugucuuua

SEQ ID NO: 3802240 - RNA, 20 nt, Human
cuugguacuugcugcuauuu

SEQ ID NO: 3802241 - RNA, 21 nt, Human
cuugguauuuggauaucuguu

SEQ ID NO: 3802242 - RNA, 16 nt, Human
cuuggucacagccagg

SEQ ID NO: 3802243 - RNA, 17 nt, Human
cuuggucacagccaggc

SEQ ID NO: 3802244 - RNA, 14 nt, Human
cuuggucacauaca

SEQ ID NO: 3802245 - RNA, 16 nt, Human
cuugguccugcugcag

SEQ ID NO: 3802246 - RNA, 22 nt, Human
cuuggucuaacuuuugugugaa

SEQ ID NO: 3802247 - RNA, 19 nt, Human
cuuggugccuaauguucca

SEQ ID NO: 3802248 - RNA, 13 nt, Human
cuuggugcuggga

SEQ ID NO: 3802249 - RNA, 12 nt, Human
cuugguguaauu

SEQ ID NO: 3802250 - RNA, 17 nt, Human
cuugguguaguugaacu

SEQ ID NO: 3802251 - RNA, 17 nt, Human
cuugguguccaccuggc

SEQ ID NO: 3802252 - RNA, 14 nt, Human
cuugguguccuuuc

SEQ ID NO: 3802253 - RNA, 20 nt, Human
cuugguguccuuucccucca

SEQ ID NO: 3802254 - RNA, 21 nt, Human
cuugguguccuuucccuccac

SEQ ID NO: 3802255 - RNA, 19 nt, Human
cuuggugugacccucugaa

SEQ ID NO: 3802256 - RNA, 17 nt, Human
cuugguguuaaaacacu

SEQ ID NO: 3802257 - RNA, 21 nt, Human
cuugguuauuuguuuaccacu

SEQ ID NO: 3802258 - RNA, 22 nt, Human
cuugguucaauaaagcacugag

SEQ ID NO: 3802259 - RNA, 23 nt, Human
cuugguucaauaaagcacugagc

SEQ ID NO: 3802260 - RNA, 14 nt, Human
cuugguucauaaau

SEQ ID NO: 3802261 - RNA, 17 nt, Human
cuugguucauaaaugaa

SEQ ID NO: 3802262 - RNA, 13 nt, Human
cuugguuccccca

SEQ ID NO: 3802263 - RNA, 16 nt, Human
cuugguuccuggggca

SEQ ID NO: 3802264 - RNA, 14 nt, Human
cuugguugaggaaa

SEQ ID NO: 3802265 - RNA, 14 nt, Human
cuugguuggcuggc

SEQ ID NO: 3802266 - RNA, 15 nt, Human
cuugguuggcuggcc

SEQ ID NO: 3802267 - RNA, 19 nt, Human
cuugguugguaggguggga

SEQ ID NO: 3802268 - RNA, 17 nt, Human
cuugguuuccaaaggca

SEQ ID NO: 3802269 - RNA, 15 nt, Human
cuugguuuguaaauu

SEQ ID NO: 3802270 - RNA, 20 nt, Human
cuugguuuguaaauuaacuu

SEQ ID NO: 3802271 - RNA, 18 nt, Human
cuuguaaaaauuaaaagu

SEQ ID NO: 3802272 - RNA, 18 nt, Human
cggaggaaagacaacaca

SEQ ID NO: 3802273 - RNA, 13 nt, Human
cggaggaccaggg

SEQ ID NO: 3802274 - RNA, 19 nt, Human
cggaggagaagaaggaaau

SEQ ID NO: 3802275 - RNA, 21 nt, Human
cggaggcaaaaggcagugggg

SEQ ID NO: 3802276 - RNA, 16 nt, Human
cggaggcaaagcuggc

SEQ ID NO: 3802277 - RNA, 19 nt, Human
cggaggcaaagcuggcuca

SEQ ID NO: 3802278 - RNA, 16 nt, Human
cggaggccacaugagu

SEQ ID NO: 3802279 - RNA, 14 nt, Human
cggaggccccaaag

SEQ ID NO: 3802280 - RNA, 18 nt, Human
cggaggccccaaaggaaa

SEQ ID NO: 3802281 - RNA, 18 nt, Human
cggaggccccacugaugc

SEQ ID NO: 3802282 - RNA, 15 nt, Human
cggaggccgaggcca

SEQ ID NO: 3802283 - RNA, 12 nt, Human
cggaggcugugu

SEQ ID NO: 3802284 - RNA, 23 nt, Human
cggaggcuugucagagcugggag

SEQ ID NO: 3802285 - RNA, 19 nt, Human
cggagggaauugaggucug

SEQ ID NO: 3802286 - RNA, 17 nt, Human
cggagggauuccccuaa

SEQ ID NO: 3802287 - RNA, 20 nt, Human
cggagggugacgggggugaa

SEQ ID NO: 3802288 - RNA, 19 nt, Human
cggagucagugccaggucc

SEQ ID NO: 3802289 - RNA, 23 nt, Human
cggagucauuuuguguugaagag

SEQ ID NO: 3802290 - RNA, 16 nt, Human
cggagucccaccuugg

SEQ ID NO: 3802291 - RNA, 18 nt, Human
cggagucccaccuuggcu

SEQ ID NO: 3802292 - RNA, 22 nt, Human
cggagucguggggugugcuggg

SEQ ID NO: 3802293 - RNA, 19 nt, Human
cggagugagaagcuuugcc

SEQ ID NO: 3802294 - RNA, 13 nt, Human
cggaguugggggu

SEQ ID NO: 3802295 - RNA, 18 nt, Human
cggaucagagcaggaccu

SEQ ID NO: 3802296 - RNA, 16 nt, Human
cggaucaggcucccag

SEQ ID NO: 3802297 - RNA, 19 nt, Human
cggaucaucaacaagauuu

SEQ ID NO: 3802298 - RNA, 14 nt, Human
cggauccuaagcau

SEQ ID NO: 3802299 - RNA, 22 nt, Human
cggauccugcacugacucugga

SEQ ID NO: 3802300 - RNA, 16 nt, Human
cggaucugagaaucuu

SEQ ID NO: 3802301 - RNA, 16 nt, Human
cggaucuuuggacaga

SEQ ID NO: 3802302 - RNA, 19 nt, Human
cggaucuuuggacagaagc

SEQ ID NO: 3802303 - RNA, 14 nt, Human
cggaugauuucuau

SEQ ID NO: 3802304 - RNA, 14 nt, Human
cggaugcugcuucc

SEQ ID NO: 3802305 - RNA, 14 nt, Human
cggauuauuuuuuc

SEQ ID NO: 3802306 - RNA, 17 nt, Human
cggcaaccccaguucug

SEQ ID NO: 3802307 - RNA, 19 nt, Human
cggcaaccccaguucugcu

SEQ ID NO: 3802308 - RNA, 16 nt, Human
cggcaauaaaagccca

SEQ ID NO: 3802309 - RNA, 22 nt, Human
cggcaauaaaagcccaggagcc

SEQ ID NO: 3802310 - RNA, 13 nt, Human
cggcacagccugg

SEQ ID NO: 3802311 - RNA, 19 nt, Human
cggcacccccugcagcuug

SEQ ID NO: 3802312 - RNA, 19 nt, Human
cggcaccugggcccugggg

SEQ ID NO: 3802313 - RNA, 20 nt, Human
cggcaccugggcccuggggc

SEQ ID NO: 3802314 - RNA, 17 nt, Human
cggcacggucuucccuc

SEQ ID NO: 3802315 - RNA, 22 nt, Human
cuugcaaaaucaguuuuccucu

SEQ ID NO: 3802316 - RNA, 15 nt, Human
cuugcaacacacaga

SEQ ID NO: 3802317 - RNA, 17 nt, Human
cuugcaacacacagaca

SEQ ID NO: 3802318 - RNA, 18 nt, Human
cuugcaagaaucagugca

SEQ ID NO: 3802319 - RNA, 15 nt, Human
cuugcaauggcagcc

SEQ ID NO: 3802320 - RNA, 13 nt, Human
cuugcacacauca

SEQ ID NO: 3802321 - RNA, 14 nt, Human
cuugcacacaucau

SEQ ID NO: 3802322 - RNA, 23 nt, Human
cuugcacacaucaucuguaagcu

SEQ ID NO: 3802323 - RNA, 19 nt, Human
cuugcacacuccccugcac

SEQ ID NO: 3802324 - RNA, 15 nt, Human
cuugcacagucacug

SEQ ID NO: 3802325 - RNA, 19 nt, Human
cuugcacagucacugcucu

SEQ ID NO: 3802326 - RNA, 22 nt, Human
cuugcaccccaaagcuuuccug

SEQ ID NO: 3802327 - RNA, 16 nt, Human
cuugcacccgccucuc

SEQ ID NO: 3802328 - RNA, 17 nt, Human
cuugcacccgccucucc

SEQ ID NO: 3802329 - RNA, 18 nt, Human
cuugcacccgccucuccc

SEQ ID NO: 3802330 - RNA, 19 nt, Human
cuugcacguauuuuaauag

SEQ ID NO: 3802331 - RNA, 21 nt, Human
cuugcacuaaaguauguaaag

SEQ ID NO: 3802332 - RNA, 19 nt, Human
cuugcacuggccuucugau

SEQ ID NO: 3802333 - RNA, 14 nt, Human
cuugcagaacugua

SEQ ID NO: 3802334 - RNA, 20 nt, Human
cuugcagagaagccuuggua

SEQ ID NO: 3802335 - RNA, 18 nt, Human
cuugcagcacucacacag

SEQ ID NO: 3802336 - RNA, 22 nt, Human
cuugcagcacucacacaggacc

SEQ ID NO: 3802337 - RNA, 18 nt, Human
cuugcagcuaaggagggg

SEQ ID NO: 3802338 - RNA, 23 nt, Human
cuugcaggaaggacuaugaaaag

SEQ ID NO: 3802339 - RNA, 20 nt, Human
cuugcaggucucaacccuuu

SEQ ID NO: 3802340 - RNA, 17 nt, Human
cuugcaguagauuuucu

SEQ ID NO: 3802341 - RNA, 21 nt, Human
cuugcaguagauuuucuuuaa

SEQ ID NO: 3802342 - RNA, 15 nt, Human
cuugcagucaucaga

SEQ ID NO: 3802343 - RNA, 16 nt, Human
cuugcagucaucagaa

SEQ ID NO: 3802344 - RNA, 17 nt, Human
cuugcagucaucagaag

SEQ ID NO: 3802345 - RNA, 22 nt, Human
cuugcaguucagcaccacccua

SEQ ID NO: 3802346 - RNA, 21 nt, Human
cuugcauaauaagcuaaagag

SEQ ID NO: 3802347 - RNA, 22 nt, Human
cuugcauaauaagcuaaagagg

SEQ ID NO: 3802348 - RNA, 20 nt, Human
cuugcauacaaacaagcaua

SEQ ID NO: 3802349 - RNA, 21 nt, Human
cuugcauacaaacaagcauau

SEQ ID NO: 3802350 - RNA, 15 nt, Human
cuugcauccaacucc

SEQ ID NO: 3802351 - RNA, 15 nt, Human
cuugcauccuuccua

SEQ ID NO: 3802352 - RNA, 16 nt, Human
cuugcauccuuccuau

SEQ ID NO: 3802353 - RNA, 17 nt, Human
cuugcauccuuccuaua

SEQ ID NO: 3802354 - RNA, 14 nt, Human
cuugcaugaagaga

SEQ ID NO: 3802355 - RNA, 14 nt, Human
cuugcaugaggcua

SEQ ID NO: 3802356 - RNA, 13 nt, Human
cuugcaugcuugc

SEQ ID NO: 3802357 - RNA, 21 nt, Human
cuugcaugguuuagaaagcuu

SEQ ID NO: 3802358 - RNA, 12 nt, Human
cuugcauuccca

SEQ ID NO: 3802359 - RNA, 18 nt, Human
cuugcauuuaaaagacag

SEQ ID NO: 3802360 - RNA, 16 nt, Human
cuugcauuuuagcuaa

SEQ ID NO: 3802361 - RNA, 12 nt, Human
cuugcauuuuug

SEQ ID NO: 3802362 - RNA, 14 nt, Human
cuugcauuuuugca

SEQ ID NO: 3802363 - RNA, 14 nt, Human
cuugccaaggcaga

SEQ ID NO: 3802364 - RNA, 13 nt, Human
cuugccacacccc

SEQ ID NO: 3802365 - RNA, 22 nt, Human
cuugccaccccacccucccugg

SEQ ID NO: 3802366 - RNA, 23 nt, Human
cuugccaccccacccucccugga

SEQ ID NO: 3802367 - RNA, 19 nt, Human
cuugccacuaagccaugaa

SEQ ID NO: 3802368 - RNA, 15 nt, Human
cuugccacuuugcac

SEQ ID NO: 3802369 - RNA, 23 nt, Human
cuugccagagauccaaaagaagc

SEQ ID NO: 3802370 - RNA, 14 nt, Human
cuugccagaugcug

SEQ ID NO: 3802371 - RNA, 19 nt, Human
cuugccagcugcugagccg

SEQ ID NO: 3802372 - RNA, 22 nt, Human
cuugccagcugcugagccgcag

SEQ ID NO: 3802373 - RNA, 12 nt, Human
cuugccagucuu

SEQ ID NO: 3802374 - RNA, 15 nt, Human
cuugccaucagugaa

SEQ ID NO: 3802375 - RNA, 16 nt, Human
cuugccaucccucccu

SEQ ID NO: 3802376 - RNA, 17 nt, Human
cuugccaucccucccuc

SEQ ID NO: 3802377 - RNA, 15 nt, Human
cuugccaugugacuc

SEQ ID NO: 3802378 - RNA, 23 nt, Human
cuugcccacuccugcucugcucg

SEQ ID NO: 3802379 - RNA, 19 nt, Human
cuugcccagagaugccucc

SEQ ID NO: 3802380 - RNA, 22 nt, Human
cuugcccagagaugccuccacc

SEQ ID NO: 3802381 - RNA, 15 nt, Human
cuugcccagccugga

SEQ ID NO: 3802382 - RNA, 17 nt, Human
cuugcccagccuggaug

SEQ ID NO: 3802383 - RNA, 18 nt, Human
cuugcccagccuggaugc

SEQ ID NO: 3802384 - RNA, 16 nt, Human
cuugcccagggcucag

SEQ ID NO: 3802385 - RNA, 18 nt, Human
cuugcccagggcucagcc

SEQ ID NO: 3802386 - RNA, 13 nt, Human
cuugcccauccug

SEQ ID NO: 3802387 - RNA, 17 nt, Human
cuugccccaacccccag

SEQ ID NO: 3802388 - RNA, 19 nt, Human
cuugccccaacccccagca

SEQ ID NO: 3802389 - RNA, 21 nt, Human
cuugccccaacccccagcacc

SEQ ID NO: 3802390 - RNA, 14 nt, Human
cuugccccaucacu

SEQ ID NO: 3802391 - RNA, 17 nt, Human
cuugccccaucacugcg

SEQ ID NO: 3802392 - RNA, 15 nt, Human
cuugccccccacccc

SEQ ID NO: 3802393 - RNA, 16 nt, Human
cuugccccccuggccu

SEQ ID NO: 3802394 - RNA, 23 nt, Human
cuugcccccugcccguguacaua

SEQ ID NO: 3802395 - RNA, 18 nt, Human
cuugccccggccccggcc

SEQ ID NO: 3802396 - RNA, 21 nt, Human
cuugccccggccccggcccca

SEQ ID NO: 3802397 - RNA, 13 nt, Human
cuugcccugaccu

SEQ ID NO: 3802398 - RNA, 19 nt, Human
cuugcccugaccucccagc

SEQ ID NO: 3802399 - RNA, 16 nt, Human
cuugcccugcucccuc

SEQ ID NO: 3802400 - RNA, 14 nt, Human
cuugcccuguuaaa

SEQ ID NO: 3802401 - RNA, 12 nt, Human
cuugcccuuccc

SEQ ID NO: 3802402 - RNA, 15 nt, Human
cuugcccuucccugu

SEQ ID NO: 3802403 - RNA, 18 nt, Human
cuugccgaaacuggaagu

SEQ ID NO: 3802404 - RNA, 17 nt, Human
cuugccgaggagccagg

SEQ ID NO: 3802405 - RNA, 18 nt, Human
cuugccgaggagccaggc

SEQ ID NO: 3802406 - RNA, 18 nt, Human
cuugccgcgucgcccucc

SEQ ID NO: 3802407 - RNA, 23 nt, Human
cuugccgcgucgcccucccaggc

SEQ ID NO: 3802408 - RNA, 23 nt, Human
cuugccgucuaccugaggggccu

SEQ ID NO: 3802409 - RNA, 20 nt, Human
cuugccuagggccuggucca

SEQ ID NO: 3802410 - RNA, 14 nt, Human
cuugccuccaggug

SEQ ID NO: 3802411 - RNA, 19 nt, Human
cuugccuccauggugccuc

SEQ ID NO: 3802412 - RNA, 20 nt, Human
cuugccuccauggugccucu

SEQ ID NO: 3802413 - RNA, 21 nt, Human
cuugccuccauggugccucug

SEQ ID NO: 3802414 - RNA, 14 nt, Human
cuugccuccccauu

SEQ ID NO: 3802415 - RNA, 15 nt, Human
cuugccuccguguca

SEQ ID NO: 3802416 - RNA, 19 nt, Human
cuuuccugauggcaggaug

SEQ ID NO: 3802417 - RNA, 14 nt, Human
cuuuccugccccag

SEQ ID NO: 3802418 - RNA, 19 nt, Human
cuuuccugccccaggccug

SEQ ID NO: 3802419 - RNA, 13 nt, Human
cuuuccuggaugu

SEQ ID NO: 3802420 - RNA, 14 nt, Human
cuuuccuuccucuc

SEQ ID NO: 3802421 - RNA, 16 nt, Human
cuuuccuuccucucau

SEQ ID NO: 3802422 - RNA, 16 nt, Human
cuuuccuuccuucccu

SEQ ID NO: 3802423 - RNA, 13 nt, Human
cuuuccuucuugc

SEQ ID NO: 3802424 - RNA, 15 nt, Human
cuuuccuugcucaac

SEQ ID NO: 3802425 - RNA, 19 nt, Human
cuuuccuuguggcagagga

SEQ ID NO: 3802426 - RNA, 16 nt, Human
cuuuccuuuccccagc

SEQ ID NO: 3802427 - RNA, 13 nt, Human
cuuuccuuuuucc

SEQ ID NO: 3802428 - RNA, 18 nt, Human
cuuuccuuuuuuaaaaau

SEQ ID NO: 3802429 - RNA, 13 nt, Human
cuuucgaggccug

SEQ ID NO: 3802430 - RNA, 20 nt, Human
cuuucgaggccugaagccag

SEQ ID NO: 3802431 - RNA, 17 nt, Human
cuuucggauccagggag

SEQ ID NO: 3802432 - RNA, 15 nt, Human
cuuucgucacccuug

SEQ ID NO: 3802433 - RNA, 21 nt, Human
cuuucguccacagcuuccugu

SEQ ID NO: 3802434 - RNA, 19 nt, Human
cuuucguuuguuuguuuca

SEQ ID NO: 3802435 - RNA, 13 nt, Human
cuuucuaagaaau

SEQ ID NO: 3802436 - RNA, 16 nt, Human
cuuucuaagaaaucaa

SEQ ID NO: 3802437 - RNA, 23 nt, Human
cuuucuacaaagcacuagagaau

SEQ ID NO: 3802438 - RNA, 14 nt, Human
cuuucuacaggcca

SEQ ID NO: 3802439 - RNA, 16 nt, Human
cuuucuacccagcgag

SEQ ID NO: 3802440 - RNA, 16 nt, Human
cuuucuacuuccaaga

SEQ ID NO: 3802441 - RNA, 14 nt, Human
cuuucuagaaagaa

SEQ ID NO: 3802442 - RNA, 17 nt, Human
cuuucuagcuaauggaa

SEQ ID NO: 3802443 - RNA, 14 nt, Human
cuuucuagcuguug

SEQ ID NO: 3802444 - RNA, 21 nt, Human
cuuucuaguccuauucuauug

SEQ ID NO: 3802445 - RNA, 18 nt, Human
cuuucuaguggucuuugu

SEQ ID NO: 3802446 - RNA, 16 nt, Human
cuuucuaguugaaaau

SEQ ID NO: 3802447 - RNA, 18 nt, Human
cuuucuaguugaaaauaa

SEQ ID NO: 3802448 - RNA, 14 nt, Human
cuuucuaucauuuu

SEQ ID NO: 3802449 - RNA, 16 nt, Human
cuuucuauccucugua

SEQ ID NO: 3802450 - RNA, 17 nt, Human
cuuucuauccucuguaa

SEQ ID NO: 3802451 - RNA, 17 nt, Human
cuuucuaugcugcuuuu

SEQ ID NO: 3802452 - RNA, 20 nt, Human
cuuucuaugcugcuuuuaua

SEQ ID NO: 3802453 - RNA, 17 nt, Human
cuuucuauuguacagaa

SEQ ID NO: 3802454 - RNA, 17 nt, Human
cuuucucacuaaaucuu

SEQ ID NO: 3802455 - RNA, 16 nt, Human
cuuucucaguuuucau

SEQ ID NO: 3802456 - RNA, 20 nt, Human
cuuucuccaaaguuauccag

SEQ ID NO: 3802457 - RNA, 13 nt, Human
cuuucuccaggac

SEQ ID NO: 3802458 - RNA, 21 nt, Human
cuuucuccuuagucuucucau

SEQ ID NO: 3802459 - RNA, 13 nt, Human
cuuucuccuuuuu

SEQ ID NO: 3802460 - RNA, 15 nt, Human
cuuucucuaauaaua

SEQ ID NO: 3802461 - RNA, 19 nt, Human
cuuucucuaauaauaaaua

SEQ ID NO: 3802462 - RNA, 22 nt, Human
cuuucucuaauaauaaauaguu

SEQ ID NO: 3802463 - RNA, 20 nt, Human
cuuucucucagccuuacauu

SEQ ID NO: 3802464 - RNA, 21 nt, Human
cuuucucucagccuuacauuu

SEQ ID NO: 3802465 - RNA, 22 nt, Human
cuuucucucagccuuacauuug

SEQ ID NO: 3802466 - RNA, 18 nt, Human
cuuucucuccagccugac

SEQ ID NO: 3802467 - RNA, 14 nt, Human
cuuucucuccccaa

SEQ ID NO: 3802468 - RNA, 13 nt, Human
cuuucucucuucc

SEQ ID NO: 3802469 - RNA, 14 nt, Human
cuuucucugaggac

SEQ ID NO: 3802470 - RNA, 15 nt, Human
cuuucucugaggaca

SEQ ID NO: 3802471 - RNA, 16 nt, Human
cuuucucugcuucagc

SEQ ID NO: 3802472 - RNA, 17 nt, Human
cuuucucugcuucagcu

SEQ ID NO: 3802473 - RNA, 21 nt, Human
cuuucucugcuucagcuugcu

SEQ ID NO: 3802474 - RNA, 17 nt, Human
cuuucucuucucuguuc

SEQ ID NO: 3802475 - RNA, 18 nt, Human
cuuucucuuucccugguc

SEQ ID NO: 3802476 - RNA, 17 nt, Human
cuuucucuuucucucuu

SEQ ID NO: 3802477 - RNA, 14 nt, Human
cuuucucuuucuuc

SEQ ID NO: 3802478 - RNA, 16 nt, Human
cuuucucuuucuuccu

SEQ ID NO: 3802479 - RNA, 12 nt, Human
cuuucucuuuuc

SEQ ID NO: 3802480 - RNA, 13 nt, Human
cuuucucuuuucc

SEQ ID NO: 3802481 - RNA, 23 nt, Human
cuuucucuuuuccccuuuccugu

SEQ ID NO: 3802482 - RNA, 20 nt, Human
cuuucugaacagcuggugua

SEQ ID NO: 3802483 - RNA, 23 nt, Human
cuuucugaacagcugguguagcu

SEQ ID NO: 3802484 - RNA, 20 nt, Human
cuuucugaagccucacuuau

SEQ ID NO: 3802485 - RNA, 14 nt, Human
cuuucugaauugca

SEQ ID NO: 3802486 - RNA, 18 nt, Human
cuuucugaccuucagcuc

SEQ ID NO: 3802487 - RNA, 17 nt, Human
cuuucugagugccuucu

SEQ ID NO: 3802488 - RNA, 18 nt, Human
cuuucugagugccuucug

SEQ ID NO: 3802489 - RNA, 19 nt, Human
cuuucugagugccuucugu

SEQ ID NO: 3802490 - RNA, 21 nt, Human
cuuucugagugccuucugugg

SEQ ID NO: 3802491 - RNA, 15 nt, Human
cuuucugaucaaggc

SEQ ID NO: 3802492 - RNA, 18 nt, Human
cuuucugaucaaggccuu

SEQ ID NO: 3802493 - RNA, 20 nt, Human
cuuucugaucaaggccuuau

SEQ ID NO: 3802494 - RNA, 19 nt, Human
cuuucugcacacaaauauu

SEQ ID NO: 3802495 - RNA, 14 nt, Human
cuuucugccucuca

SEQ ID NO: 3802496 - RNA, 12 nt, Human
cuuucugccugg

SEQ ID NO: 3802497 - RNA, 14 nt, Human
cuuucugccuggag

SEQ ID NO: 3802498 - RNA, 15 nt, Human
cuuucugccuggagu

SEQ ID NO: 3802499 - RNA, 17 nt, Human
cuuucugcucagcuucu

SEQ ID NO: 3802500 - RNA, 23 nt, Human
cuuucuggauuauucugggggcu

SEQ ID NO: 3802501 - RNA, 19 nt, Human
cuuucuggcuaugcauuug

SEQ ID NO: 3802502 - RNA, 20 nt, Human
cuuucuggcuaugcauuuga

SEQ ID NO: 3802503 - RNA, 13 nt, Human
cuuucuggcucuc

SEQ ID NO: 3802504 - RNA, 19 nt, Human
cuuucuggggccuaauaaa

SEQ ID NO: 3802505 - RNA, 18 nt, Human
cuuucuguauauacuuuu

SEQ ID NO: 3802506 - RNA, 20 nt, Human
cuuucuguauauacuuuuuu

SEQ ID NO: 3802507 - RNA, 13 nt, Human
cuuucugugcccu

SEQ ID NO: 3802508 - RNA, 21 nt, Human
cuuucugugugcaccuuacca

SEQ ID NO: 3802509 - RNA, 19 nt, Human
cuuucuguguuuauucaaa

SEQ ID NO: 3802510 - RNA, 16 nt, Human
cuuucuguuccaaauu

SEQ ID NO: 3802511 - RNA, 17 nt, Human
cuuuaaaugcugcuuuu

SEQ ID NO: 3802512 - RNA, 19 nt, Human
cuuuaacucaggacuccag

SEQ ID NO: 3802513 - RNA, 20 nt, Human
cuuuaacucaggacuccagc

SEQ ID NO: 3802514 - RNA, 21 nt, Human
cuuuaacucaggacuccagcc

SEQ ID NO: 3802515 - RNA, 17 nt, Human
cuuuaagcagcucuugc

SEQ ID NO: 3802516 - RNA, 19 nt, Human
cuuuaagcagcucuugcua

SEQ ID NO: 3802517 - RNA, 21 nt, Human
cuuuaagcagcucuugcuaau

SEQ ID NO: 3802518 - RNA, 23 nt, Human
cuuuaagggaguguacucccagg

SEQ ID NO: 3802519 - RNA, 19 nt, Human
cuuuaagggcaugccuugu

SEQ ID NO: 3802520 - RNA, 22 nt, Human
cuuuaagggcaugccuugugcu

SEQ ID NO: 3802521 - RNA, 17 nt, Human
cuuuaaguagauaagca

SEQ ID NO: 3802522 - RNA, 17 nt, Human
cuuuaaguuucaggaua

SEQ ID NO: 3802523 - RNA, 19 nt, Human
cuuuaauaucaucaguauu

SEQ ID NO: 3802524 - RNA, 17 nt, Human
cuuuaauaugaaauuuu

SEQ ID NO: 3802525 - RNA, 21 nt, Human
cuuuaauauguauuuuaugua

SEQ ID NO: 3802526 - RNA, 17 nt, Human
cuuuaaucuucaguuuu

SEQ ID NO: 3802527 - RNA, 16 nt, Human
cuuuaaugauaugcuu

SEQ ID NO: 3802528 - RNA, 12 nt, Human
cuuuaaugcauc

SEQ ID NO: 3802529 - RNA, 23 nt, Human
cuuuaaugcaucuagauuaugga

SEQ ID NO: 3802530 - RNA, 20 nt, Human
cuuuaaugucacaggcaggu

SEQ ID NO: 3802531 - RNA, 13 nt, Human
cuuuaauguuuuu

SEQ ID NO: 3802532 - RNA, 18 nt, Human
cuuuaauuaccaaccugu

SEQ ID NO: 3802533 - RNA, 19 nt, Human
cuuuaauuaccaaccuguu

SEQ ID NO: 3802534 - RNA, 15 nt, Human
cuuuaauuccaugaa

SEQ ID NO: 3802535 - RNA, 17 nt, Human
cuuuaauucucauguga

SEQ ID NO: 3802536 - RNA, 23 nt, Human
cuuuaauuguuaagauaugaugu

SEQ ID NO: 3802537 - RNA, 18 nt, Human
cuuuaauuuauuuuugca

SEQ ID NO: 3802538 - RNA, 21 nt, Human
cuuuaauuuauuuuugcaugg

SEQ ID NO: 3802539 - RNA, 22 nt, Human
cuuuaauuuauuuuugcauggc

SEQ ID NO: 3802540 - RNA, 18 nt, Human
cuuuaauuucugucagaa

SEQ ID NO: 3802541 - RNA, 13 nt, Human
cuuuaauuuugga

SEQ ID NO: 3802542 - RNA, 20 nt, Human
cuuuaauuuuuuuaaccaaa

SEQ ID NO: 3802543 - RNA, 21 nt, Human
cuuuaauuuuuuuaaccaaag

SEQ ID NO: 3802544 - RNA, 23 nt, Human
cuuuaauuuuuuuaaccaaaggu

SEQ ID NO: 3802545 - RNA, 13 nt, Human
cuuuacaaaaaga

SEQ ID NO: 3802546 - RNA, 18 nt, Human
cuuuacaaaacaaacuca

SEQ ID NO: 3802547 - RNA, 18 nt, Human
cuuuacaaacaaaagcau

SEQ ID NO: 3802548 - RNA, 20 nt, Human
cuuuacacaauagaauuaua

SEQ ID NO: 3802549 - RNA, 14 nt, Human
cuuuacacacacag

SEQ ID NO: 3802550 - RNA, 22 nt, Human
cuuuacacaucagucacaaguu

SEQ ID NO: 3802551 - RNA, 19 nt, Human
cuuuacacucggcuuugga

SEQ ID NO: 3802552 - RNA, 14 nt, Human
cuuuacaugcaauu

SEQ ID NO: 3802553 - RNA, 16 nt, Human
cuuuaccaaacagcaa

SEQ ID NO: 3802554 - RNA, 20 nt, Human
cuuuaccaauugaaguaaaa

SEQ ID NO: 3802555 - RNA, 15 nt, Human
cuuuacccucaucug

SEQ ID NO: 3802556 - RNA, 19 nt, Human
cuuuacccuugagcccucc

SEQ ID NO: 3802557 - RNA, 22 nt, Human
cuuuacccuugagcccucccca

SEQ ID NO: 3802558 - RNA, 19 nt, Human
cuuuaccuuuuuuauacau

SEQ ID NO: 3802559 - RNA, 22 nt, Human
cuuuaccuuuuuuauacauaaa

SEQ ID NO: 3802560 - RNA, 23 nt, Human
cuuugaauauguaguaucuauau

SEQ ID NO: 3802561 - RNA, 15 nt, Human
cuuugaaugacaaag

SEQ ID NO: 3802562 - RNA, 16 nt, Human
cuuugaaugcggccca

SEQ ID NO: 3802563 - RNA, 23 nt, Human
cuuugaaugcuuuuugaauguua

SEQ ID NO: 3802564 - RNA, 13 nt, Human
cuuugaauguuaa

SEQ ID NO: 3802565 - RNA, 13 nt, Human
cuuugaauuuuca

SEQ ID NO: 3802566 - RNA, 15 nt, Human
cuuugaauuuucauu

SEQ ID NO: 3802567 - RNA, 18 nt, Human
cuuugacaauugggagcu

SEQ ID NO: 3802568 - RNA, 21 nt, Human
cuuugacaauugggagcugcc

SEQ ID NO: 3802569 - RNA, 14 nt, Human
cuuugacacucugc

SEQ ID NO: 3802570 - RNA, 17 nt, Human
cuuugacauuuaauuua

SEQ ID NO: 3802571 - RNA, 21 nt, Human
cuuugaccuaaauuauuuacu

SEQ ID NO: 3802572 - RNA, 17 nt, Human
cuuugaccucugcagca

SEQ ID NO: 3802573 - RNA, 24 nt, Human
cuuugaccucugcagcaauaaagc

SEQ ID NO: 3802574 - RNA, 14 nt, Human
cuuugaccugccuc

SEQ ID NO: 3802575 - RNA, 14 nt, Human
cuuugaccuguugg

SEQ ID NO: 3802576 - RNA, 18 nt, Human
cuuugacgccaucccagc

SEQ ID NO: 3802577 - RNA, 22 nt, Human
cuuugacgccaucccagcccca

SEQ ID NO: 3802578 - RNA, 20 nt, Human
cuuugacucuauaagcaaau

SEQ ID NO: 3802579 - RNA, 16 nt, Human
cuuugacugagcagac

SEQ ID NO: 3802580 - RNA, 21 nt, Human
cuuugacugaugcugagauuc

SEQ ID NO: 3802581 - RNA, 18 nt, Human
cuuugacuggagggucca

SEQ ID NO: 3802582 - RNA, 15 nt, Human
cuuugacuuuuugca

SEQ ID NO: 3802583 - RNA, 15 nt, Human
cuuugagaagccuuc

SEQ ID NO: 3802584 - RNA, 18 nt, Human
cuuugagacaguuucuua

SEQ ID NO: 3802585 - RNA, 23 nt, Human
cuuugagaucuaaaaauaacugu

SEQ ID NO: 3802586 - RNA, 21 nt, Human
cuuugagcccacaaagccuua

SEQ ID NO: 3802587 - RNA, 14 nt, Human
cuuugagcucccac

SEQ ID NO: 3802588 - RNA, 21 nt, Human
cuuugagcuuaaucuuugaaa

SEQ ID NO: 3802589 - RNA, 13 nt, Human
cuuugaggaaacc

SEQ ID NO: 3802590 - RNA, 22 nt, Human
cuuugagggacugccucugcca

SEQ ID NO: 3802591 - RNA, 14 nt, Human
cuuugagguggaag

SEQ ID NO: 3802592 - RNA, 18 nt, Human
cuuugaguuuccucaggc

SEQ ID NO: 3802593 - RNA, 22 nt, Human
cuuugauauauaggacauugau

SEQ ID NO: 3802594 - RNA, 15 nt, Human
cuuugaucagguggg

SEQ ID NO: 3802595 - RNA, 14 nt, Human
cuuugaucaugaau

SEQ ID NO: 3802596 - RNA, 13 nt, Human
cuuugauguguug

SEQ ID NO: 3802597 - RNA, 15 nt, Human
cuuugauguguuguu

SEQ ID NO: 3802598 - RNA, 16 nt, Human
cuuugauguguuguuc

SEQ ID NO: 3802599 - RNA, 15 nt, Human
cuuugauguuaacac

SEQ ID NO: 3802600 - RNA, 17 nt, Human
cuuugauguuaacacau

SEQ ID NO: 3802601 - RNA, 19 nt, Human
cuuugauguuaacacauuu

SEQ ID NO: 3802602 - RNA, 20 nt, Human
cuuugauuauuugcauguua

SEQ ID NO: 3802603 - RNA, 21 nt, Human
cuuugauucacauguuuucaa

SEQ ID NO: 3802604 - RNA, 22 nt, Human
cuuugauucacauguuuucaaa

SEQ ID NO: 3802605 - RNA, 21 nt, Human
cuuugauucauaguaacuucu

SEQ ID NO: 3802606 - RNA, 18 nt, Human
cuuugauucuccuucagc

SEQ ID NO: 3802607 - RNA, 21 nt, Human
cuuugauugcacauuguuguu

SEQ ID NO: 3802608 - RNA, 13 nt, Human
cuuugauuuacag

SEQ ID NO: 3802609 - RNA, 14 nt, Human
cuuugauuuagauu

SEQ ID NO: 3802610 - RNA, 19 nt, Human
cuuugauuuagauugagua

SEQ ID NO: 3802611 - RNA, 12 nt, Human
cuuugauuucca

SEQ ID NO: 3802612 - RNA, 19 nt, Human
cuuugcacacuuuggccca

SEQ ID NO: 3802613 - RNA, 22 nt, Human
cuuugcacacuuuggcccaggg

SEQ ID NO: 3802614 - RNA, 18 nt, Human
cuuugcacagcucuccgg

SEQ ID NO: 3802615 - RNA, 22 nt, Human
cuuugcacgacgcccucucccc

SEQ ID NO: 3802616 - RNA, 22 nt, Human
cuuugcacgugcuguuugcugu

SEQ ID NO: 3802617 - RNA, 13 nt, Human
cuuugcacugagg

SEQ ID NO: 3802618 - RNA, 23 nt, Human
cuuugcacugagggccacacuau

SEQ ID NO: 3802619 - RNA, 16 nt, Human
cuuugcacugauauau

SEQ ID NO: 3802620 - RNA, 20 nt, Human
cuuugcagacaggcaagcac

SEQ ID NO: 3802621 - RNA, 15 nt, Human
cuuugcagggcagcc

SEQ ID NO: 3802622 - RNA, 17 nt, Human
cuuugcagggcagcccc

SEQ ID NO: 3802623 - RNA, 19 nt, Human
cuuugcagggcagccccac

SEQ ID NO: 3802624 - RNA, 21 nt, Human
cuuugcauaugagccgugaac

SEQ ID NO: 3802625 - RNA, 22 nt, Human
cuuugcaucguccccuccccca

SEQ ID NO: 3802626 - RNA, 16 nt, Human
cuuugcaucucaguau

SEQ ID NO: 3802627 - RNA, 15 nt, Human
cuuugcauggauuuc

SEQ ID NO: 3802628 - RNA, 20 nt, Human
cuuugcauugucugucugca

SEQ ID NO: 3802629 - RNA, 15 nt, Human
cuuugcauuuggaau

SEQ ID NO: 3802630 - RNA, 17 nt, Human
cuuugccacccucaugc

SEQ ID NO: 3802631 - RNA, 18 nt, Human
cuuugccacccucaugcu

SEQ ID NO: 3802632 - RNA, 21 nt, Human
cuuugccacccucaugcugug

SEQ ID NO: 3802633 - RNA, 13 nt, Human
cuuugccagcuuu

SEQ ID NO: 3802634 - RNA, 16 nt, Human
cuuugcccaacaccag

SEQ ID NO: 3802635 - RNA, 18 nt, Human
cuuugcccaacaccagcc

SEQ ID NO: 3802636 - RNA, 23 nt, Human
cuuugccccaccuuuauuaaaau

SEQ ID NO: 3802637 - RNA, 19 nt, Human
cuuugcccuucuuucuacc

SEQ ID NO: 3802638 - RNA, 11 nt, Human
cuuugccucaa

SEQ ID NO: 3802639 - RNA, 14 nt, Human
cuuugccuccugug

SEQ ID NO: 3802640 - RNA, 15 nt, Human
cuuugccuguucagu

SEQ ID NO: 3802641 - RNA, 16 nt, Human
cuuugccuguucaguu

SEQ ID NO: 3802642 - RNA, 13 nt, Human
cuuugccuugggc

SEQ ID NO: 3802643 - RNA, 20 nt, Human
cuuugcgcuccuggcccagc

SEQ ID NO: 3802644 - RNA, 21 nt, Human
cuuugcgcuccuggcccagcc

SEQ ID NO: 3802645 - RNA, 18 nt, Human
cuuugcuaaagacaugaa

SEQ ID NO: 3802646 - RNA, 21 nt, Human
cuuugcuauggggacauucca

SEQ ID NO: 3802647 - RNA, 17 nt, Human
cuuugcucauauuuccc

SEQ ID NO: 3802648 - RNA, 19 nt, Human
cuuugcuccaccccacuca

SEQ ID NO: 3802649 - RNA, 17 nt, Human
cuuugcucuucaagaaa

SEQ ID NO: 3802650 - RNA, 14 nt, Human
cuuugcugagagcu

SEQ ID NO: 3802651 - RNA, 13 nt, Human
cuuugcugcuaca

SEQ ID NO: 3802652 - RNA, 11 nt, Human
cuuugcugcug

SEQ ID NO: 3802653 - RNA, 13 nt, Human
cuuugcuguaaga

SEQ ID NO: 3802654 - RNA, 17 nt, Human
cuuugcuguaagauguc

SEQ ID NO: 3802655 - RNA, 22 nt, Human
cuuugcuguaagaugucuguuu

SEQ ID NO: 3802656 - RNA, 20 nt, Human
cuuugcuuaugaauauuuau

SEQ ID NO: 3802657 - RNA, 14 nt, Human
cuuugcuugaaaga

SEQ ID NO: 3802658 - RNA, 15 nt, Human
cuuugcuugaacaca

SEQ ID NO: 3802659 - RNA, 21 nt, Human
cuuugcuugaacacaguauuu

SEQ ID NO: 3802660 - RNA, 22 nt, Human
cuuugcuugaacacaguauuuu

SEQ ID NO: 3802661 - RNA, 23 nt, Human
cuuugcuugaacacaguauuuuc

SEQ ID NO: 3802662 - RNA, 14 nt, Human
cuuugcuugcagua

SEQ ID NO: 3802663 - RNA, 20 nt, Human
cuuugcuugccucucuguuu

SEQ ID NO: 3802664 - RNA, 20 nt, Human
cgguuauaaaaaaugguuca

SEQ ID NO: 3802665 - RNA, 20 nt, Human
cgguucaaggucacuguuuc

SEQ ID NO: 3802666 - RNA, 16 nt, Human
cgguucaccagccucu

SEQ ID NO: 3802667 - RNA, 16 nt, Human
cgguuccuacacagga

SEQ ID NO: 3802668 - RNA, 17 nt, Human
cgguuccuacacaggac

SEQ ID NO: 3802669 - RNA, 12 nt, Human
cgguucuuccag

SEQ ID NO: 3802670 - RNA, 15 nt, Human
cgguuuauauaagcu

SEQ ID NO: 3802671 - RNA, 22 nt, Human
cgguuuaucgcccuggcaggca

SEQ ID NO: 3802672 - RNA, 13 nt, Human
cgguuucuuuuua

SEQ ID NO: 3802673 - RNA, 15 nt, Human
cgguuugaagccugg

SEQ ID NO: 3802674 - RNA, 16 nt, Human
cgguuuuacugcagcu

SEQ ID NO: 3802675 - RNA, 15 nt, Human
cguaaccacggaaaa

SEQ ID NO: 3802676 - RNA, 14 nt, Human
cguaacccaacucu

SEQ ID NO: 3802677 - RNA, 13 nt, Human
cguaaguacagag

SEQ ID NO: 3802678 - RNA, 17 nt, Human
cguaaguacagagaagc

SEQ ID NO: 3802679 - RNA, 21 nt, Human
cguaaguacagagaagccauc

SEQ ID NO: 3802680 - RNA, 16 nt, Human
cguaaguuuaaaggau

SEQ ID NO: 3802681 - RNA, 14 nt, Human
cguaauaauuauua

SEQ ID NO: 3802682 - RNA, 23 nt, Human
cguaauucuuauuccauauuaga

SEQ ID NO: 3802683 - RNA, 12 nt, Human
cguaauuuaacu

SEQ ID NO: 3802684 - RNA, 21 nt, Human
cguacaaguaguucuguauuu

SEQ ID NO: 3802685 - RNA, 13 nt, Human
cguacaguucuuc

SEQ ID NO: 3802686 - RNA, 13 nt, Human
cguaccccacccu

SEQ ID NO: 3802687 - RNA, 17 nt, Human
cguacguaauaagguuu

SEQ ID NO: 3802688 - RNA, 14 nt, Human
cguacuaaggauac

SEQ ID NO: 3802689 - RNA, 14 nt, Human
cguacugcagccuc

SEQ ID NO: 3802690 - RNA, 15 nt, Human
cguacugcagccucc

SEQ ID NO: 3802691 - RNA, 14 nt, Human
cguacuuauaaaga

SEQ ID NO: 3802692 - RNA, 19 nt, Human
cguagaaguuuuuguacug

SEQ ID NO: 3802693 - RNA, 15 nt, Human
cguaggcuacagaga

SEQ ID NO: 3802694 - RNA, 20 nt, Human
cguaggcuacagagaagccu

SEQ ID NO: 3802695 - RNA, 21 nt, Human
cguaggcuacagagaagccuu

SEQ ID NO: 3802696 - RNA, 17 nt, Human
cguaguagggucaggcc

SEQ ID NO: 3802697 - RNA, 21 nt, Human
cguagucggcacagccugguc

SEQ ID NO: 3802698 - RNA, 14 nt, Human
cguaguucccugaa

SEQ ID NO: 3802699 - RNA, 22 nt, Human
cguaguucccugaaaacccaga

SEQ ID NO: 3802700 - RNA, 17 nt, Human
cguauaaaagccuguuu

SEQ ID NO: 3802701 - RNA, 22 nt, Human
cguauaaaagccuguuuaagag

SEQ ID NO: 3802702 - RNA, 16 nt, Human
cguauagcuguauuga

SEQ ID NO: 3802703 - RNA, 18 nt, Human
cguauauauaagaaagac

SEQ ID NO: 3802704 - RNA, 23 nt, Human
cguauauauaagaaagacaucuu

SEQ ID NO: 3802705 - RNA, 17 nt, Human
cuuucagauacuggauu

SEQ ID NO: 3802706 - RNA, 16 nt, Human
cuuucagaugucuucu

SEQ ID NO: 3802707 - RNA, 19 nt, Human
cuuucagaugucuucugcc

SEQ ID NO: 3802708 - RNA, 19 nt, Human
cuuucagcaagauaaacau

SEQ ID NO: 3802709 - RNA, 15 nt, Human
cuuucagcaggcagc

SEQ ID NO: 3802710 - RNA, 12 nt, Human
cuuucagcuguc

SEQ ID NO: 3802711 - RNA, 14 nt, Human
cuuucagcugugaa

SEQ ID NO: 3802712 - RNA, 12 nt, Human
cuuucagguacu

SEQ ID NO: 3802713 - RNA, 20 nt, Human
cuuucaucaaucauuguaca

SEQ ID NO: 3802714 - RNA, 22 nt, Human
cuuucaucaaucauuguacagu

SEQ ID NO: 3802715 - RNA, 16 nt, Human
cuuucaucacacuggg

SEQ ID NO: 3802716 - RNA, 21 nt, Human
cuuucauggggugaugcuggg

SEQ ID NO: 3802717 - RNA, 23 nt, Human
cuuucauuaaaggcuucucucuc

SEQ ID NO: 3802718 - RNA, 18 nt, Human
cuuucauuuacuguggcu

SEQ ID NO: 3802719 - RNA, 15 nt, Human
cuuucauuuugcuuu

SEQ ID NO: 3802720 - RNA, 16 nt, Human
cuuucauuuuuuucca

SEQ ID NO: 3802721 - RNA, 20 nt, Human
cuuucauuuuuuuccaggcu

SEQ ID NO: 3802722 - RNA, 22 nt, Human
cuuucauuuuuuuccaggcugg

SEQ ID NO: 3802723 - RNA, 18 nt, Human
cuuuccaaaauuuuucaa

SEQ ID NO: 3802724 - RNA, 22 nt, Human
cuuuccaaaguacacuguuuca

SEQ ID NO: 3802725 - RNA, 19 nt, Human
cuuuccaaaugcccagcuu

SEQ ID NO: 3802726 - RNA, 16 nt, Human
cuuuccaauucuccuu

SEQ ID NO: 3802727 - RNA, 13 nt, Human
cuuuccacagaag

SEQ ID NO: 3802728 - RNA, 14 nt, Human
cuuuccacccccuc

SEQ ID NO: 3802729 - RNA, 16 nt, Human
cuuuccacccccuccc

SEQ ID NO: 3802730 - RNA, 22 nt, Human
cuuuccacggagccacuccucu

SEQ ID NO: 3802731 - RNA, 18 nt, Human
cuuuccacuccuccuagc

SEQ ID NO: 3802732 - RNA, 12 nt, Human
cuuuccagcuca

SEQ ID NO: 3802733 - RNA, 14 nt, Human
cuuuccaggaaggc

SEQ ID NO: 3802734 - RNA, 22 nt, Human
cuuuccauccauggccagcagc

SEQ ID NO: 3802735 - RNA, 18 nt, Human
cuuuccauuggaucucau

SEQ ID NO: 3802736 - RNA, 15 nt, Human
cuuuccauuucucuc

SEQ ID NO: 3802737 - RNA, 13 nt, Human
cuuucccaacacc

SEQ ID NO: 3802738 - RNA, 19 nt, Human
cuuucccaacacuucagac

SEQ ID NO: 3802739 - RNA, 16 nt, Human
cuuucccaacucuagc

SEQ ID NO: 3802740 - RNA, 15 nt, Human
cuuucccaagccuuc

SEQ ID NO: 3802741 - RNA, 17 nt, Human
cuuucccacccagccug

SEQ ID NO: 3802742 - RNA, 15 nt, Human
cuuucccaccccaac

SEQ ID NO: 3802743 - RNA, 23 nt, Human
cuuucccaccccaaccugcucuc

SEQ ID NO: 3802744 - RNA, 22 nt, Human
cuuucccacccuguucccaguc

SEQ ID NO: 3802745 - RNA, 15 nt, Human
cuuucccagucuguc

SEQ ID NO: 3802746 - RNA, 17 nt, Human
cuuucccagucugucga

SEQ ID NO: 3802747 - RNA, 18 nt, Human
cuuuccccaccagaugcu

SEQ ID NO: 3802748 - RNA, 22 nt, Human
cuuuccccagcaucacucccca

SEQ ID NO: 3802749 - RNA, 20 nt, Human
cuuuccccaugucucgacuc

SEQ ID NO: 3802750 - RNA, 13 nt, Human
cuuuccccugugg

SEQ ID NO: 3802751 - RNA, 17 nt, Human
cuuuccccuuccuuuua

SEQ ID NO: 3802752 - RNA, 18 nt, Human
cuuucccggacugcaagc

SEQ ID NO: 3802753 - RNA, 15 nt, Human
cuuucccuacccucu

SEQ ID NO: 3802754 - RNA, 13 nt, Human
cuuucccucccuu

SEQ ID NO: 3802755 - RNA, 16 nt, Human
cuuucccucccuuccu

SEQ ID NO: 3802756 - RNA, 13 nt, Human
cuuucccugaacu

SEQ ID NO: 3802757 - RNA, 19 nt, Human
cuuucccugcuuaaugaaa

SEQ ID NO: 3802758 - RNA, 15 nt, Human
cuuucccuuaucaaa

SEQ ID NO: 3802759 - RNA, 17 nt, Human
cuuucccuucaguaccc

SEQ ID NO: 3802760 - RNA, 12 nt, Human
cuuucccuucca

SEQ ID NO: 3802761 - RNA, 14 nt, Human
cuuucccuuccucu

SEQ ID NO: 3802762 - RNA, 19 nt, Human
cuuucccuugcuuuucccu

SEQ ID NO: 3802763 - RNA, 21 nt, Human
cuuucccuugcuuuucccucu

SEQ ID NO: 3802764 - RNA, 23 nt, Human
cuuucccuuguagcuccuccccu

SEQ ID NO: 3802765 - RNA, 21 nt, Human
cuuuccgucaacguuguacug

SEQ ID NO: 3802766 - RNA, 19 nt, Human
cuuuccguggcacugcaua

SEQ ID NO: 3802767 - RNA, 16 nt, Human
cuuuccuaagaccugg

SEQ ID NO: 3802768 - RNA, 16 nt, Human
cuuuccuaaggcugca

SEQ ID NO: 3802769 - RNA, 20 nt, Human
cuuuccuaaggcugcaaggu

SEQ ID NO: 3802770 - RNA, 22 nt, Human
cuuuccuacuugcacucuucua

SEQ ID NO: 3802771 - RNA, 18 nt, Human
cuuuccuaucauggagug

SEQ ID NO: 3802772 - RNA, 19 nt, Human
cuuuccucaaaacuucaga

SEQ ID NO: 3802773 - RNA, 13 nt, Human
cuuuccuccucug

SEQ ID NO: 3802774 - RNA, 14 nt, Human
cuuuccuccucuga

SEQ ID NO: 3802775 - RNA, 15 nt, Human
cuuuccuccucugac

SEQ ID NO: 3802776 - RNA, 16 nt, Human
cuuuccuccuggcaga

SEQ ID NO: 3802777 - RNA, 18 nt, Human
cuuuccuccuucacuguu

SEQ ID NO: 3802778 - RNA, 19 nt, Human
cuuuccuccuucacuguuu

SEQ ID NO: 3802779 - RNA, 14 nt, Human
cuuuccuccuucca

SEQ ID NO: 3802780 - RNA, 14 nt, Human
cuuuccucuucccc

SEQ ID NO: 3802781 - RNA, 22 nt, Human
cuuuccugaauccaaacuaauc

SEQ ID NO: 3802782 - RNA, 15 nt, Human
cuuuccugaggcugg

SEQ ID NO: 3802783 - RNA, 18 nt, Human
cuuuccugagucccaucc

SEQ ID NO: 3802784 - RNA, 10 nt, Human
cuuuccugcc

SEQ ID NO: 3802785 - RNA, 13 nt, Human
cuuuccugcccca

SEQ ID NO: 3802786 - RNA, 11 nt, Human
cuuuccugccu

SEQ ID NO: 3802787 - RNA, 23 nt, Human
cuuuccuggacacucagaccuga

SEQ ID NO: 3802788 - RNA, 15 nt, Human
cuuuccugugccagg

SEQ ID NO: 3802789 - RNA, 16 nt, Human
cuuuccuguucagcau

SEQ ID NO: 3802790 - RNA, 13 nt, Human
cuuuccuuccuaa

SEQ ID NO: 3802791 - RNA, 14 nt, Human
cuuuccuuccuaau

SEQ ID NO: 3802792 - RNA, 15 nt, Human
cuuuccuuccuuccc

SEQ ID NO: 3802793 - RNA, 22 nt, Human
cuuuccuuggcucccauucacu

SEQ ID NO: 3802794 - RNA, 17 nt, Human
cuuuccuuggcuuuaug

SEQ ID NO: 3802795 - RNA, 19 nt, Human
cuuuccuuguuccccauca

SEQ ID NO: 3802796 - RNA, 17 nt, Human
cuuuccuuuccccagcc

SEQ ID NO: 3802797 - RNA, 15 nt, Human
cuuuccuuuucuuua

SEQ ID NO: 3802798 - RNA, 21 nt, Human
cuuuccuuuuucccaauaaau

SEQ ID NO: 3802799 - RNA, 14 nt, Human
cuuucgaggccuga

SEQ ID NO: 3802800 - RNA, 20 nt, Human
cuuucgggccauguugcccc

SEQ ID NO: 3802801 - RNA, 15 nt, Human
cuuucguacauuggc

SEQ ID NO: 3802802 - RNA, 14 nt, Human
cuuucgucacccuu

SEQ ID NO: 3802803 - RNA, 18 nt, Human
cuuucuaaacaagauuuu

SEQ ID NO: 3802804 - RNA, 15 nt, Human
cuuucuacaauguga

SEQ ID NO: 3802805 - RNA, 20 nt, Human
cuuucuacagggcugacauu

SEQ ID NO: 3802806 - RNA, 15 nt, Human
cuuucuacccagcga

SEQ ID NO: 3802807 - RNA, 17 nt, Human
cuuucuacccagcgagc

SEQ ID NO: 3802808 - RNA, 17 nt, Human
cuuucuagaccaauaaa

SEQ ID NO: 3802809 - RNA, 15 nt, Human
cuuucuagccagagg

SEQ ID NO: 3802810 - RNA, 19 nt, Human
cuuucuaguggucuuugua

SEQ ID NO: 3802811 - RNA, 23 nt, Human
cuuucuaguggucuuuguaagag

SEQ ID NO: 3802812 - RNA, 17 nt, Human
cuuucuaguucagcugc

SEQ ID NO: 3802813 - RNA, 18 nt, Human
cuuucuaguucagcugcc

SEQ ID NO: 3802814 - RNA, 14 nt, Human
cuuucuaugcugcu

SEQ ID NO: 3802815 - RNA, 15 nt, Human
cuuucuaugcugcuu

SEQ ID NO: 3802816 - RNA, 21 nt, Human
cuuucuaugcugcuuuuauau

SEQ ID NO: 3802817 - RNA, 15 nt, Human
cuuucuauuccaaag

SEQ ID NO: 3802818 - RNA, 15 nt, Human
cuuucuauuguacag

SEQ ID NO: 3802819 - RNA, 13 nt, Human
cuuugcuuucugc

SEQ ID NO: 3802820 - RNA, 16 nt, Human
cuuugcuuucugcuca

SEQ ID NO: 3802821 - RNA, 17 nt, Human
cuuugcuuucugcucag

SEQ ID NO: 3802822 - RNA, 21 nt, Human
cuuuggaaaaugcauuguauc

SEQ ID NO: 3802823 - RNA, 14 nt, Human
cuuuggaaccagac

SEQ ID NO: 3802824 - RNA, 11 nt, Human
cuuuggaagga

SEQ ID NO: 3802825 - RNA, 21 nt, Human
cuuuggacagaagcagcucuu

SEQ ID NO: 3802826 - RNA, 16 nt, Human
cuuuggacccugaggc

SEQ ID NO: 3802827 - RNA, 17 nt, Human
cuuuggacgcacacagc

SEQ ID NO: 3802828 - RNA, 22 nt, Human
cuuuggagaagaguguggaguc

SEQ ID NO: 3802829 - RNA, 15 nt, Human
cuuuggagacuuucu

SEQ ID NO: 3802830 - RNA, 16 nt, Human
cuuuggagaucaagga

SEQ ID NO: 3802831 - RNA, 23 nt, Human
cuuuggagcuuuuuucuuuaaga

SEQ ID NO: 3802832 - RNA, 14 nt, Human
cuuuggaggugcug

SEQ ID NO: 3802833 - RNA, 14 nt, Human
cuuuggaguccccu

SEQ ID NO: 3802834 - RNA, 17 nt, Human
cuuuggaguuaaaaugc

SEQ ID NO: 3802835 - RNA, 14 nt, Human
cuuuggauucuaaa

SEQ ID NO: 3802836 - RNA, 20 nt, Human
cuuuggauucuaaauacaug

SEQ ID NO: 3802837 - RNA, 12 nt, Human
cuuuggcacugg

SEQ ID NO: 3802838 - RNA, 17 nt, Human
cuuuggcacuggggcac

SEQ ID NO: 3802839 - RNA, 24 nt, Human
cuuuggcaggugcagcccccacug

SEQ ID NO: 3802840 - RNA, 13 nt, Human
cuuuggcccaggg

SEQ ID NO: 3802841 - RNA, 13 nt, Human
cuuuggccugagu

SEQ ID NO: 3802842 - RNA, 22 nt, Human
cuuuggccugaugaccaauuuu

SEQ ID NO: 3802843 - RNA, 19 nt, Human
cuuuggcuauuagagauca

SEQ ID NO: 3802844 - RNA, 21 nt, Human
cuuuggcuuaauuccaaucau

SEQ ID NO: 3802845 - RNA, 13 nt, Human
cuuugggaauguu

SEQ ID NO: 3802846 - RNA, 13 nt, Human
cuuugggaggcca

SEQ ID NO: 3802847 - RNA, 20 nt, Human
cuuugggaggccgaggcggg

SEQ ID NO: 3802848 - RNA, 17 nt, Human
cuuugggaggcugaggc

SEQ ID NO: 3802849 - RNA, 17 nt, Human
cuuugggaggcugaggu

SEQ ID NO: 3802850 - RNA, 19 nt, Human
cuuugggauuuaauuucca

SEQ ID NO: 3802851 - RNA, 21 nt, Human
cgugccagucgcgcugccugu

SEQ ID NO: 3802852 - RNA, 16 nt, Human
cgugcccggggcagca

SEQ ID NO: 3802853 - RNA, 13 nt, Human
cgugccuccacca

SEQ ID NO: 3802854 - RNA, 21 nt, Human
cgugccuccaccaccacuggc

SEQ ID NO: 3802855 - RNA, 23 nt, Human
cgugccuccaccaccacuggcca

SEQ ID NO: 3802856 - RNA, 12 nt, Human
cgugccuguguc

SEQ ID NO: 3802857 - RNA, 14 nt, Human
cgugccugugucca

SEQ ID NO: 3802858 - RNA, 15 nt, Human
cgugccuguguccau

SEQ ID NO: 3802859 - RNA, 16 nt, Human
cgugccuucagcucua

SEQ ID NO: 3802860 - RNA, 19 nt, Human
cgugcgcugggcacuuccc

SEQ ID NO: 3802861 - RNA, 17 nt, Human
cgugcuacugcacucca

SEQ ID NO: 3802862 - RNA, 16 nt, Human
cgugcuccagccuggc

SEQ ID NO: 3802863 - RNA, 18 nt, Human
cgugcuccagccuggcuc

SEQ ID NO: 3802864 - RNA, 14 nt, Human
cgugcucuuuguuu

SEQ ID NO: 3802865 - RNA, 16 nt, Human
cgugcucuuuguuuug

SEQ ID NO: 3802866 - RNA, 17 nt, Human
cgugcucuuuguuuugu

SEQ ID NO: 3802867 - RNA, 15 nt, Human
cgugcugggcagccc

SEQ ID NO: 3802868 - RNA, 16 nt, Human
cgugcugggcagcccg

SEQ ID NO: 3802869 - RNA, 21 nt, Human
cguggaaagggugcugcuucc

SEQ ID NO: 3802870 - RNA, 20 nt, Human
cguggaacguuuuuccuguu

SEQ ID NO: 3802871 - RNA, 12 nt, Human
cguggacaccug

SEQ ID NO: 3802872 - RNA, 13 nt, Human
cguggacaccugc

SEQ ID NO: 3802873 - RNA, 15 nt, Human
cguggacaccugccc

SEQ ID NO: 3802874 - RNA, 16 nt, Human
cguggacaggugugcc

SEQ ID NO: 3802875 - RNA, 14 nt, Human
cguggaccuuccug

SEQ ID NO: 3802876 - RNA, 17 nt, Human
cguggaccuuccugcca

SEQ ID NO: 3802877 - RNA, 19 nt, Human
cguggacugagugggaagc

SEQ ID NO: 3802878 - RNA, 13 nt, Human
cguggagagggau

SEQ ID NO: 3802879 - RNA, 17 nt, Human
cguggagcagaaucagu

SEQ ID NO: 3802880 - RNA, 16 nt, Human
cguggagccagggagc

SEQ ID NO: 3802881 - RNA, 21 nt, Human
cguggagcgggguaugaagag

SEQ ID NO: 3802882 - RNA, 14 nt, Human
cguggagcugccug

SEQ ID NO: 3802883 - RNA, 18 nt, Human
cguggaggaaugcucccc

SEQ ID NO: 3802884 - RNA, 22 nt, Human
cguggaggagcagugcaggcac

SEQ ID NO: 3802885 - RNA, 13 nt, Human
cguggaggagguu

SEQ ID NO: 3802886 - RNA, 19 nt, Human
cguggaggagguugggagg

SEQ ID NO: 3802887 - RNA, 14 nt, Human
cguggaggcugcuc

SEQ ID NO: 3802888 - RNA, 15 nt, Human
cguggaggcugcucg

SEQ ID NO: 3802889 - RNA, 16 nt, Human
cguggagggaggcccc

SEQ ID NO: 3802890 - RNA, 19 nt, Human
cguggagggaggccccagg

SEQ ID NO: 3802891 - RNA, 20 nt, Human
cguggagggguaggggcugg

SEQ ID NO: 3802892 - RNA, 21 nt, Human
cguggagggguaggggcuggg

SEQ ID NO: 3802893 - RNA, 20 nt, Human
cguggauuaaacuuaugaau

SEQ ID NO: 3802894 - RNA, 15 nt, Human
cguggcaaauauaaa

SEQ ID NO: 3802895 - RNA, 15 nt, Human
cguggcaccuccucg

SEQ ID NO: 3802896 - RNA, 21 nt, Human
cguggcagauaaucagccucu

SEQ ID NO: 3802897 - RNA, 23 nt, Human
cguggcauagcccagacacagaa

SEQ ID NO: 3802898 - RNA, 13 nt, Human
cguggccagcccg

SEQ ID NO: 3802899 - RNA, 19 nt, Human
cguggcccaaggcuggcag

SEQ ID NO: 3802900 - RNA, 14 nt, Human
cguggccccagccu

SEQ ID NO: 3802901 - RNA, 19 nt, Human
cguggccccagccuggccc

SEQ ID NO: 3802902 - RNA, 22 nt, Human
cguggccccagccuggcccagc

SEQ ID NO: 3802903 - RNA, 18 nt, Human
cguggcccugcccucucc

SEQ ID NO: 3802904 - RNA, 14 nt, Human
cguggcccuuccug

SEQ ID NO: 3802905 - RNA, 17 nt, Human
cguggcccuuccuggac

SEQ ID NO: 3802906 - RNA, 20 nt, Human
cguggcucgacuauagaaaa

SEQ ID NO: 3802907 - RNA, 13 nt, Human
cguggcucugcug

SEQ ID NO: 3802908 - RNA, 21 nt, Human
cguggcugcccacacacccca

SEQ ID NO: 3802909 - RNA, 23 nt, Human
cguggcugugcucucaccagcug

SEQ ID NO: 3802910 - RNA, 14 nt, Human
cguggcuucugaug

SEQ ID NO: 3802911 - RNA, 14 nt, Human
cgugggagccagcc

SEQ ID NO: 3802912 - RNA, 17 nt, Human
cgugggagcgugggagg

SEQ ID NO: 3802913 - RNA, 20 nt, Human
cgugggaggcgggaguggag

SEQ ID NO: 3802914 - RNA, 16 nt, Human
cgugggauucagagaa

SEQ ID NO: 3802915 - RNA, 22 nt, Human
cgugggcugggcccacaaaggc

SEQ ID NO: 3802916 - RNA, 23 nt, Human
cguggggagggccguaccccacc

SEQ ID NO: 3802917 - RNA, 18 nt, Human
cguggggcagcacagaga

SEQ ID NO: 3802918 - RNA, 15 nt, Human
cguggggugugcugg

SEQ ID NO: 3802919 - RNA, 19 nt, Human
cgugggucuguuuuccuuu

SEQ ID NO: 3802920 - RNA, 16 nt, Human
cgugguaugucugcca

SEQ ID NO: 3802921 - RNA, 17 nt, Human
cgugguaugucugccau

SEQ ID NO: 3802922 - RNA, 17 nt, Human
cguggucacugcuguca

SEQ ID NO: 3802923 - RNA, 21 nt, Human
cgugguccccaacagcgacau

SEQ ID NO: 3802924 - RNA, 14 nt, Human
cguggucuuuuccu

SEQ ID NO: 3802925 - RNA, 13 nt, Human
cgugguggucccu

SEQ ID NO: 3802926 - RNA, 20 nt, Human
cguguacauagugcauuguu

SEQ ID NO: 3802927 - RNA, 22 nt, Human
cguguagcuauggaaguugcau

SEQ ID NO: 3802928 - RNA, 18 nt, Human
cguguaggaaccugcaca

SEQ ID NO: 3802929 - RNA, 17 nt, Human
cguguauugagauuucu

SEQ ID NO: 3802930 - RNA, 22 nt, Human
cguguauugagauuucuuaaau

SEQ ID NO: 3802931 - RNA, 15 nt, Human
cgugucaaugugugc

SEQ ID NO: 3802932 - RNA, 14 nt, Human
cguguccaccccca

SEQ ID NO: 3802933 - RNA, 16 nt, Human
cguguccccugacagg

SEQ ID NO: 3802934 - RNA, 21 nt, Human
cgugucuggcacagccuggcu

SEQ ID NO: 3802935 - RNA, 14 nt, Human
cgugucuuccacuu

SEQ ID NO: 3802936 - RNA, 15 nt, Human
cgugugagugugaca

SEQ ID NO: 3802937 - RNA, 17 nt, Human
cgugugagugugacagg

SEQ ID NO: 3802938 - RNA, 21 nt, Human
cgugugagugugacagggcca

SEQ ID NO: 3802939 - RNA, 13 nt, Human
cgugugcaggagc

SEQ ID NO: 3802940 - RNA, 22 nt, Human
cguguggcaauagugggcccuc

SEQ ID NO: 3802941 - RNA, 19 nt, Human
cguguguacacgggacuga

SEQ ID NO: 3802942 - RNA, 12 nt, Human
cguguguagagu

SEQ ID NO: 3802943 - RNA, 17 nt, Human
cguguguccaugugugu

SEQ ID NO: 3802944 - RNA, 22 nt, Human
cgugugugcaagugucugugug

SEQ ID NO: 3802945 - RNA, 12 nt, Human
cgugugugugcg

SEQ ID NO: 3802946 - RNA, 22 nt, Human
cgugugugugugugugugugca

SEQ ID NO: 3802947 - RNA, 17 nt, Human
cguguguuuuucuauua

SEQ ID NO: 3802948 - RNA, 18 nt, Human
cguguguuuuucuauuaa

SEQ ID NO: 3802949 - RNA, 15 nt, Human
cguguucaauauuuu

SEQ ID NO: 3802950 - RNA, 13 nt, Human
cguguuccccucu

SEQ ID NO: 3802951 - RNA, 18 nt, Human
cguguuccccucuugucu

SEQ ID NO: 3802952 - RNA, 15 nt, Human
cguguugccuugaac

SEQ ID NO: 3802953 - RNA, 15 nt, Human
cguguuucugacucu

SEQ ID NO: 3802954 - RNA, 20 nt, Human
cguguuucugacucugagcu

SEQ ID NO: 3802955 - RNA, 21 nt, Human
cguguuuggguuuuuuuccuu

SEQ ID NO: 3802956 - RNA, 12 nt, Human
cguguuuguguu

SEQ ID NO: 3802957 - RNA, 21 nt, Human
cguuaaaaacagauuuggaaa

SEQ ID NO: 3802958 - RNA, 22 nt, Human
cguuaacauugaccaagaacug

SEQ ID NO: 3802959 - RNA, 14 nt, Human
cguuacagcucccc

SEQ ID NO: 3802960 - RNA, 21 nt, Human
cguuacuagcagucacuugau

SEQ ID NO: 3802961 - RNA, 21 nt, Human
cguuacucagggcuccuccca

SEQ ID NO: 3802962 - RNA, 14 nt, Human
cguuagcuccugug

SEQ ID NO: 3802963 - RNA, 14 nt, Human
cguuagggaagaga

SEQ ID NO: 3802964 - RNA, 22 nt, Human
cguuauguguguauauguaugu

SEQ ID NO: 3802965 - RNA, 15 nt, Human
cguucaccccuccac

SEQ ID NO: 3802966 - RNA, 22 nt, Human
cguucauggaacgcguugaaau

SEQ ID NO: 3802967 - RNA, 12 nt, Human
cguuccacaguu

SEQ ID NO: 3802968 - RNA, 17 nt, Human
cguuccacaguugccac

SEQ ID NO: 3802969 - RNA, 10 nt, Human
cguuccagcc

SEQ ID NO: 3802970 - RNA, 20 nt, Human
cguuccaugaugcugggauu

SEQ ID NO: 3802971 - RNA, 19 nt, Human
cguuccugacaucacagca

SEQ ID NO: 3802972 - RNA, 18 nt, Human
cguucucacacccaccgu

SEQ ID NO: 3802973 - RNA, 13 nt, Human
cguucucucuuug

SEQ ID NO: 3802974 - RNA, 17 nt, Human
cuuucuauuugacuugu

SEQ ID NO: 3802975 - RNA, 20 nt, Human
cuuucucaaagaaauauuaa

SEQ ID NO: 3802976 - RNA, 21 nt, Human
cuuucucagccgcuucugacu

SEQ ID NO: 3802977 - RNA, 15 nt, Human
cuuucucaguuuuca

SEQ ID NO: 3802978 - RNA, 13 nt, Human
cuuucuccagcca

SEQ ID NO: 3802979 - RNA, 16 nt, Human
cuuucuccagccagca

SEQ ID NO: 3802980 - RNA, 14 nt, Human
cuuucuccaggacc

SEQ ID NO: 3802981 - RNA, 15 nt, Human
cuuucuccaggacca

SEQ ID NO: 3802982 - RNA, 20 nt, Human
cuuucucccaggccaggcuc

SEQ ID NO: 3802983 - RNA, 23 nt, Human
cuuucuccccugcccccaggacu

SEQ ID NO: 3802984 - RNA, 15 nt, Human
cuuucuccuuagucu

SEQ ID NO: 3802985 - RNA, 18 nt, Human
cuuucuccuuuaauugua

SEQ ID NO: 3802986 - RNA, 19 nt, Human
cuuucucgauuuuaucuuu

SEQ ID NO: 3802987 - RNA, 14 nt, Human
cuuucucuaauaau

SEQ ID NO: 3802988 - RNA, 18 nt, Human
cuuucucuaauaauaaau

SEQ ID NO: 3802989 - RNA, 16 nt, Human
cuuucucuacuuugag

SEQ ID NO: 3802990 - RNA, 13 nt, Human
cuuucucucccca

SEQ ID NO: 3802991 - RNA, 17 nt, Human
cuuucucuccccaaccc

SEQ ID NO: 3802992 - RNA, 15 nt, Human
cuuucucuccuuucu

SEQ ID NO: 3802993 - RNA, 13 nt, Human
cuuucucugccag

SEQ ID NO: 3802994 - RNA, 14 nt, Human
cuuucucugccagu

SEQ ID NO: 3802995 - RNA, 21 nt, Human
cuuucucuuucccuggucccu

SEQ ID NO: 3802996 - RNA, 21 nt, Human
gaaacacacugaggcagggaa

SEQ ID NO: 3802997 - RNA, 12 nt, Human
gaaacacagcug

SEQ ID NO: 3802998 - RNA, 13 nt, Human
gaaacacagcugu

SEQ ID NO: 3802999 - RNA, 14 nt, Human
gaaacacagcuguu

SEQ ID NO: 3803000 - RNA, 16 nt, Human
gaaacaccaaaaaaau

SEQ ID NO: 3803001 - RNA, 23 nt, Human
gaaacaccaaaaaaauccagaaa

SEQ ID NO: 3803002 - RNA, 15 nt, Human
gaaacacuaaauguu

SEQ ID NO: 3803003 - RNA, 16 nt, Human
gaaacacuaaauguua

SEQ ID NO: 3803004 - RNA, 19 nt, Human
gaaacacuaaauguuaaag

SEQ ID NO: 3803005 - RNA, 14 nt, Human
gaaacacuccuugc

SEQ ID NO: 3803006 - RNA, 17 nt, Human
gaaacacugacuccugu

SEQ ID NO: 3803007 - RNA, 22 nt, Human
gaaacacugggcuucuagaacc

SEQ ID NO: 3803008 - RNA, 14 nt, Human
gaaacacuuucucu

SEQ ID NO: 3803009 - RNA, 16 nt, Human
gaaacacuuugcauaa

SEQ ID NO: 3803010 - RNA, 19 nt, Human
gaaacacuuugccuccugu

SEQ ID NO: 3803011 - RNA, 22 nt, Human
gaaacagaaaaauauguaccaa

SEQ ID NO: 3803012 - RNA, 22 nt, Human
gaaacagaaacaaaaacacuaa

SEQ ID NO: 3803013 - RNA, 21 nt, Human
gaaacagaggaccagcacacu

SEQ ID NO: 3803014 - RNA, 14 nt, Human
gaaacagauaccau

SEQ ID NO: 3803015 - RNA, 21 nt, Human
gaaacagauaccauacucauu

SEQ ID NO: 3803016 - RNA, 18 nt, Human
gaaacagaugaaaagccu

SEQ ID NO: 3803017 - RNA, 12 nt, Human
gaaacagccagc

SEQ ID NO: 3803018 - RNA, 18 nt, Human
gaaacagcuaaugggaca

SEQ ID NO: 3803019 - RNA, 15 nt, Human
gaaacagcucgacuu

SEQ ID NO: 3803020 - RNA, 20 nt, Human
gaaacagcucgacuuuaaaa

SEQ ID NO: 3803021 - RNA, 14 nt, Human
gaaacagcugccuu

SEQ ID NO: 3803022 - RNA, 19 nt, Human
gaaacagcugccuuagcuu

SEQ ID NO: 3803023 - RNA, 15 nt, Human
gaaacagcuuucaag

SEQ ID NO: 3803024 - RNA, 18 nt, Human
cuuuuauugacacagaaa

SEQ ID NO: 3803025 - RNA, 16 nt, Human
cuuuuauuguauaaac

SEQ ID NO: 3803026 - RNA, 21 nt, Human
cuuuuauuguauaaacuauca

SEQ ID NO: 3803027 - RNA, 21 nt, Human
cuuuuauuuuacacagaaaca

SEQ ID NO: 3803028 - RNA, 22 nt, Human
cuuuuauuuuacacagaaacac

SEQ ID NO: 3803029 - RNA, 13 nt, Human
cuuuuauuuugaa

SEQ ID NO: 3803030 - RNA, 14 nt, Human
cuuuuauuuugaaa

SEQ ID NO: 3803031 - RNA, 15 nt, Human
cuuuucaaaacauuu

SEQ ID NO: 3803032 - RNA, 22 nt, Human
cuuuucaaauagggucuaacuc

SEQ ID NO: 3803033 - RNA, 23 nt, Human
cuuuucaacuuggcuuccuuucu

SEQ ID NO: 3803034 - RNA, 13 nt, Human
cuuuucaaggcuu

SEQ ID NO: 3803035 - RNA, 17 nt, Human
cuuuucaaguauuuaag

SEQ ID NO: 3803036 - RNA, 13 nt, Human
cuuuucacauucu

SEQ ID NO: 3803037 - RNA, 14 nt, Human
cuuuucacauucuu

SEQ ID NO: 3803038 - RNA, 19 nt, Human
cuuuucacauucuuauaaa

SEQ ID NO: 3803039 - RNA, 15 nt, Human
cuuuucaccauucgu

SEQ ID NO: 3803040 - RNA, 16 nt, Human
cuuuucacccuucuac

SEQ ID NO: 3803041 - RNA, 17 nt, Human
cuuuucacccuucuacu

SEQ ID NO: 3803042 - RNA, 16 nt, Human
cuuuucacugcuggcu

SEQ ID NO: 3803043 - RNA, 17 nt, Human
cuuuucacugcuggcug

SEQ ID NO: 3803044 - RNA, 20 nt, Human
cuuuucacugcuguuauauu

SEQ ID NO: 3803045 - RNA, 16 nt, Human
cuuuucagauugugga

SEQ ID NO: 3803046 - RNA, 14 nt, Human
cuuuucagcuucug

SEQ ID NO: 3803047 - RNA, 23 nt, Human
cuuuucagcuucugcugggcugg

SEQ ID NO: 3803048 - RNA, 13 nt, Human
cuuuucagggcug

SEQ ID NO: 3803049 - RNA, 20 nt, Human
cuuuucagggcuggcuccug

SEQ ID NO: 3803050 - RNA, 23 nt, Human
cuuuucagggcuggcuccugauc

SEQ ID NO: 3803051 - RNA, 21 nt, Human
cuuuucagguuugucaucaga

SEQ ID NO: 3803052 - RNA, 20 nt, Human
cuuuucauaaccuagccuua

SEQ ID NO: 3803053 - RNA, 16 nt, Human
cuuuucauaucauuuc

SEQ ID NO: 3803054 - RNA, 17 nt, Human
cuuuucauauuugcacu

SEQ ID NO: 3803055 - RNA, 13 nt, Human
cuuuucaugcaaa

SEQ ID NO: 3803056 - RNA, 14 nt, Human
cuuuucauugcugu

SEQ ID NO: 3803057 - RNA, 13 nt, Human
cuuuucauuugug

SEQ ID NO: 3803058 - RNA, 19 nt, Human
cuuuuccacuccauugucg

SEQ ID NO: 3803059 - RNA, 16 nt, Human
cuuuuccauuaugcug

SEQ ID NO: 3803060 - RNA, 22 nt, Human
cuuuucccaaagcaucccucuu

SEQ ID NO: 3803061 - RNA, 17 nt, Human
cuuuucccacuccaagc

SEQ ID NO: 3803062 - RNA, 18 nt, Human
cuuuucccacuguuuaag

SEQ ID NO: 3803063 - RNA, 21 nt, Human
cuuuucccauuuaucuaaaua

SEQ ID NO: 3803064 - RNA, 17 nt, Human
cuuuucccauuuguaau

SEQ ID NO: 3803065 - RNA, 19 nt, Human
cuuuucccauuuguaauuu

SEQ ID NO: 3803066 - RNA, 17 nt, Human
cuuuucccccaaagugg

SEQ ID NO: 3803067 - RNA, 15 nt, Human
cuuuuccccuuuccu

SEQ ID NO: 3803068 - RNA, 16 nt, Human
cuuuuccccuuuccug

SEQ ID NO: 3803069 - RNA, 20 nt, Human
cuuuucccucuuuggcuccc

SEQ ID NO: 3803070 - RNA, 15 nt, Human
cuuuucccucuuuuc

SEQ ID NO: 3803071 - RNA, 13 nt, Human
cuuuucccugcuu

SEQ ID NO: 3803072 - RNA, 20 nt, Human
cuuuucccugcuuccaggaa

SEQ ID NO: 3803073 - RNA, 18 nt, Human
cuuuucccuguacuuuuc

SEQ ID NO: 3803074 - RNA, 21 nt, Human
cuuuuccuacuuuuccuuccc

SEQ ID NO: 3803075 - RNA, 22 nt, Human
cuuuuccuacuuuuccuucccu

SEQ ID NO: 3803076 - RNA, 23 nt, Human
cuuuuccucccuuggguucugau

SEQ ID NO: 3803077 - RNA, 16 nt, Human
cuuuuccuguuguauu

SEQ ID NO: 3803078 - RNA, 18 nt, Human
cuuuuccuguuuuuguua

SEQ ID NO: 3803079 - RNA, 20 nt, Human
cuuuuccuucccucaaagcu

SEQ ID NO: 3803080 - RNA, 16 nt, Human
cuuuuccuucccuuuu

SEQ ID NO: 3803081 - RNA, 20 nt, Human
cuuuuccuugcauacaaaca

SEQ ID NO: 3803082 - RNA, 13 nt, Human
cuuuuccuuggca

SEQ ID NO: 3803083 - RNA, 13 nt, Human
cuuuuccuugggg

SEQ ID NO: 3803084 - RNA, 17 nt, Human
cuuuuccuuggggcagg

SEQ ID NO: 3803085 - RNA, 16 nt, Human
cuuuuccuuugugguu

SEQ ID NO: 3803086 - RNA, 11 nt, Human
cuuuucguuaa

SEQ ID NO: 3803087 - RNA, 20 nt, Human
cuuuucguuaacauugacca

SEQ ID NO: 3803088 - RNA, 21 nt, Human
cuuuucuaaccaagaggcugg

SEQ ID NO: 3803089 - RNA, 18 nt, Human
cuuuucuacccuagccau

SEQ ID NO: 3803090 - RNA, 21 nt, Human
cuuuucuauuccuucuggccu

SEQ ID NO: 3803091 - RNA, 13 nt, Human
cuuuucucagcug

SEQ ID NO: 3803092 - RNA, 15 nt, Human
cuuuucuccaugagu

SEQ ID NO: 3803093 - RNA, 17 nt, Human
cuuuucucugguaauau

SEQ ID NO: 3803094 - RNA, 14 nt, Human
cuuuucucuuucuc

SEQ ID NO: 3803095 - RNA, 16 nt, Human
cuuuucugaccaaaga

SEQ ID NO: 3803096 - RNA, 11 nt, Human
cuuuucugauc

SEQ ID NO: 3803097 - RNA, 14 nt, Human
cuuuucugauccag

SEQ ID NO: 3803098 - RNA, 18 nt, Human
cuuuucugauccaguuuu

SEQ ID NO: 3803099 - RNA, 13 nt, Human
cuuuucugcauuu

SEQ ID NO: 3803100 - RNA, 20 nt, Human
cuuuucugcauuuugcuauu

SEQ ID NO: 3803101 - RNA, 19 nt, Human
cuuuucuggccaaaagcag

SEQ ID NO: 3803102 - RNA, 21 nt, Human
cuuuucuggggaaagacacug

SEQ ID NO: 3803103 - RNA, 23 nt, Human
cuuuucuguccgagcuuugaaaa

SEQ ID NO: 3803104 - RNA, 18 nt, Human
cuuuucugucucucucuu

SEQ ID NO: 3803105 - RNA, 13 nt, Human
cuuuucuguguuu

SEQ ID NO: 3803106 - RNA, 18 nt, Human
cuuuucuguguuuacaga

SEQ ID NO: 3803107 - RNA, 22 nt, Human
cuuuucuguguuuacagagaug

SEQ ID NO: 3803108 - RNA, 16 nt, Human
cuuuucuguucuaguu

SEQ ID NO: 3803109 - RNA, 15 nt, Human
cuuuucuguuugcua

SEQ ID NO: 3803110 - RNA, 18 nt, Human
cuuuucuuaacaaccugg

SEQ ID NO: 3803111 - RNA, 19 nt, Human
cuuuucuuaacaaccuggc

SEQ ID NO: 3803112 - RNA, 14 nt, Human
cuuuucuuacuccu

SEQ ID NO: 3803113 - RNA, 15 nt, Human
cuuuucuuacuccuc

SEQ ID NO: 3803114 - RNA, 11 nt, Human
cuuuucuuauu

SEQ ID NO: 3803115 - RNA, 15 nt, Human
cuuuucuuccuggcu

SEQ ID NO: 3803116 - RNA, 23 nt, Human
cuuuucuugcaugaggcuagugu

SEQ ID NO: 3803117 - RNA, 13 nt, Human
cuuuucuuggaca

SEQ ID NO: 3803118 - RNA, 20 nt, Human
cuuuucuuggacacuuaauu

SEQ ID NO: 3803119 - RNA, 12 nt, Human
cuuuucuuggca

SEQ ID NO: 3803120 - RNA, 19 nt, Human
cuuuucuuguuuaucagca

SEQ ID NO: 3803121 - RNA, 17 nt, Human
cuuuucuuuagagaacu

SEQ ID NO: 3803122 - RNA, 22 nt, Human
cuuuucuuuagagaacugaaaa

SEQ ID NO: 3803123 - RNA, 16 nt, Human
cuuuucuuucagccaa

SEQ ID NO: 3803124 - RNA, 17 nt, Human
cuuuucuuugccaucuc

SEQ ID NO: 3803125 - RNA, 22 nt, Human
cuuuucuuugccaucucugcuc

SEQ ID NO: 3803126 - RNA, 14 nt, Human
cuuuucuuuuguua

SEQ ID NO: 3803127 - RNA, 16 nt, Human
cuuuucuuuuguuacu

SEQ ID NO: 3803128 - RNA, 18 nt, Human
cuuuucuuuuguuacugu

SEQ ID NO: 3803129 - RNA, 19 nt, Human
cuuuucuuuuguuacuguu

SEQ ID NO: 3803130 - RNA, 20 nt, Human
cuuuucuuuuguuacuguuc

SEQ ID NO: 3803131 - RNA, 16 nt, Human
cuuuucuuuuuacaua

SEQ ID NO: 3803132 - RNA, 23 nt, Human
cuuuucuuuuuacauaacugccu

SEQ ID NO: 3803133 - RNA, 14 nt, Human
cuuuucuuuuucuc

SEQ ID NO: 3803134 - RNA, 13 nt, Human
cuuuugaaacaau

SEQ ID NO: 3803135 - RNA, 14 nt, Human
cuuuugaacccagg

SEQ ID NO: 3803136 - RNA, 20 nt, Human
cuuuugaacccaggaguuca

SEQ ID NO: 3803137 - RNA, 21 nt, Human
cuuuugaagcauagauaauau

SEQ ID NO: 3803138 - RNA, 13 nt, Human
cuuuugaauauuc

SEQ ID NO: 3803139 - RNA, 23 nt, Human
cuuuugaauccaugcuugggugu

SEQ ID NO: 3803140 - RNA, 14 nt, Human
cuuuugaauuguua

SEQ ID NO: 3803141 - RNA, 18 nt, Human
gaaagacaccauuuaucu

SEQ ID NO: 3803142 - RNA, 15 nt, Human
gaaagacacugccug

SEQ ID NO: 3803143 - RNA, 18 nt, Human
gaaagacacugccugggc

SEQ ID NO: 3803144 - RNA, 20 nt, Human
gaaagacacugccugggcug

SEQ ID NO: 3803145 - RNA, 14 nt, Human
gaaagacagagcug

SEQ ID NO: 3803146 - RNA, 22 nt, Human
gaaagacauccauaaagaagca

SEQ ID NO: 3803147 - RNA, 17 nt, Human
gaaagacaucuuucucu

SEQ ID NO: 3803148 - RNA, 16 nt, Human
gaaagaccauuuuucc

SEQ ID NO: 3803149 - RNA, 18 nt, Human
gaaagacuaucuaaaugu

SEQ ID NO: 3803150 - RNA, 19 nt, Human
gaaagacuauucaaacagu

SEQ ID NO: 3803151 - RNA, 17 nt, Human
gaaagacugaagaaagu

SEQ ID NO: 3803152 - RNA, 19 nt, Human
gaaagacugaagaaagugu

SEQ ID NO: 3803153 - RNA, 14 nt, Human
gaaagacugagcuc

SEQ ID NO: 3803154 - RNA, 14 nt, Human
gaaagacuuccaaa

SEQ ID NO: 3803155 - RNA, 19 nt, Human
gaaagacuuuuccaacccu

SEQ ID NO: 3803156 - RNA, 14 nt, Human
gaaagagaaggugg

SEQ ID NO: 3803157 - RNA, 11 nt, Human
gaaagagagaa

SEQ ID NO: 3803158 - RNA, 15 nt, Human
gaaagagagaaaaua

SEQ ID NO: 3803159 - RNA, 17 nt, Human
gaaagagagaaaauaaa

SEQ ID NO: 3803160 - RNA, 18 nt, Human
gaaagagagaaaauaaaa

SEQ ID NO: 3803161 - RNA, 17 nt, Human
gaaagagagagaaacaa

SEQ ID NO: 3803162 - RNA, 18 nt, Human
gaaagagcacuuaagaga

SEQ ID NO: 3803163 - RNA, 16 nt, Human
gaaagaggaaaagaaa

SEQ ID NO: 3803164 - RNA, 20 nt, Human
gaaagaggcagcuugaaacu

SEQ ID NO: 3803165 - RNA, 22 nt, Human
gaaagaggguaauaaccagaca

SEQ ID NO: 3803166 - RNA, 20 nt, Human
gaaagaggugaccccagggc

SEQ ID NO: 3803167 - RNA, 15 nt, Human
gaaagaguaggaaga

SEQ ID NO: 3803168 - RNA, 17 nt, Human
gaaagaguccauuguuu

SEQ ID NO: 3803169 - RNA, 14 nt, Human
gaaagauaacuagg

SEQ ID NO: 3803170 - RNA, 12 nt, Human
gaaagauuugua

SEQ ID NO: 3803171 - RNA, 14 nt, Human
gaaagcaaaaaugc

SEQ ID NO: 3803172 - RNA, 17 nt, Human
gaaagcaaaaaugcuaa

SEQ ID NO: 3803173 - RNA, 18 nt, Human
gaaagcaaaaaugcuaau

SEQ ID NO: 3803174 - RNA, 15 nt, Human
gaaagcaaagcacag

SEQ ID NO: 3803175 - RNA, 20 nt, Human
gaaagcacagaggccuccug

SEQ ID NO: 3803176 - RNA, 15 nt, Human
gaaagcacagguggg

SEQ ID NO: 3803177 - RNA, 17 nt, Human
gaaagcagaacagugau

SEQ ID NO: 3803178 - RNA, 22 nt, Human
gaaagcagaacagugauuacca

SEQ ID NO: 3803179 - RNA, 18 nt, Human
cuaaugaagggaaaggau

SEQ ID NO: 3803180 - RNA, 13 nt, Human
cuaaugagacuga

SEQ ID NO: 3803181 - RNA, 17 nt, Human
cuaaugaggagagaaaa

SEQ ID NO: 3803182 - RNA, 20 nt, Human
cuaaugaggagagaaaauau

SEQ ID NO: 3803183 - RNA, 23 nt, Human
cuaaugaggagagaaaauauaug

SEQ ID NO: 3803184 - RNA, 23 nt, Human
cuaaugauggcccauucuacuug

SEQ ID NO: 3803185 - RNA, 12 nt, Human
cuaaugauguuu

SEQ ID NO: 3803186 - RNA, 16 nt, Human
cuaaugccucuucauu

SEQ ID NO: 3803187 - RNA, 15 nt, Human
cuaaugcgcaggcug

SEQ ID NO: 3803188 - RNA, 16 nt, Human
cuaaugcgcaggcugg

SEQ ID NO: 3803189 - RNA, 19 nt, Human
cuaaugcgcaggcuggccc

SEQ ID NO: 3803190 - RNA, 20 nt, Human
cuaaugcgcaggcuggcccu

SEQ ID NO: 3803191 - RNA, 14 nt, Human
cuaauggcaugaga

SEQ ID NO: 3803192 - RNA, 12 nt, Human
cuaaugggacac

SEQ ID NO: 3803193 - RNA, 19 nt, Human
cuaauggguauuuaaacaa

SEQ ID NO: 3803194 - RNA, 17 nt, Human
cuaauguauuuuauugu

SEQ ID NO: 3803195 - RNA, 18 nt, Human
cuaauguauuuuauugua

SEQ ID NO: 3803196 - RNA, 20 nt, Human
cuaauguauuuuauuguaac

SEQ ID NO: 3803197 - RNA, 13 nt, Human
cuaaugucuucau

SEQ ID NO: 3803198 - RNA, 16 nt, Human
cuaaugucuucauaaa

SEQ ID NO: 3803199 - RNA, 19 nt, Human
cuaaugugccuaguucuuu

SEQ ID NO: 3803200 - RNA, 23 nt, Human
cuaauguggaccuuagaauacag

SEQ ID NO: 3803201 - RNA, 19 nt, Human
cuaaugugguuauuucucu

SEQ ID NO: 3803202 - RNA, 15 nt, Human
cuaauguuugcauau

SEQ ID NO: 3803203 - RNA, 14 nt, Human
cuaauuaacauaua

SEQ ID NO: 3803204 - RNA, 17 nt, Human
cuaauuaacauauaaua

SEQ ID NO: 3803205 - RNA, 23 nt, Human
cuaauuaauauauuaaaauucca

SEQ ID NO: 3803206 - RNA, 13 nt, Human
cuaauuaauuuca

SEQ ID NO: 3803207 - RNA, 16 nt, Human
cuaauuauacuacuuu

SEQ ID NO: 3803208 - RNA, 18 nt, Human
cuaauuauacuacuuugu

SEQ ID NO: 3803209 - RNA, 13 nt, Human
cuaauuauuuuaa

SEQ ID NO: 3803210 - RNA, 16 nt, Human
cuaauucaaggaauuu

SEQ ID NO: 3803211 - RNA, 20 nt, Human
cuaauucaaggaauuucuua

SEQ ID NO: 3803212 - RNA, 15 nt, Human
cuaauucaauucaaa

SEQ ID NO: 3803213 - RNA, 19 nt, Human
cuaauucagccauguacag

SEQ ID NO: 3803214 - RNA, 20 nt, Human
cuaauucccauuuugcaaaa

SEQ ID NO: 3803215 - RNA, 14 nt, Human
cuaauuccccagau

SEQ ID NO: 3803216 - RNA, 15 nt, Human
cuaauuccuuucuau

SEQ ID NO: 3803217 - RNA, 15 nt, Human
cuaauucuuuaauga

SEQ ID NO: 3803218 - RNA, 21 nt, Human
cuaauucuuugaccuguuggg

SEQ ID NO: 3803219 - RNA, 22 nt, Human
cuaauucuuugaccuguuggga

SEQ ID NO: 3803220 - RNA, 12 nt, Human
cuaauucuuugc

SEQ ID NO: 3803221 - RNA, 14 nt, Human
cuaauucuuugcaa

SEQ ID NO: 3803222 - RNA, 16 nt, Human
cuaauucuuugcaaaa

SEQ ID NO: 3803223 - RNA, 19 nt, Human
cuaauugcuguugaaagca

SEQ ID NO: 3803224 - RNA, 11 nt, Human
cuaauugcuua

SEQ ID NO: 3803225 - RNA, 13 nt, Human
cuaauugcuuauu

SEQ ID NO: 3803226 - RNA, 14 nt, Human
cuaauugcuuauuu

SEQ ID NO: 3803227 - RNA, 19 nt, Human
cuaauuggccucuuuaaga

SEQ ID NO: 3803228 - RNA, 15 nt, Human
cuaauugguacuuuu

SEQ ID NO: 3803229 - RNA, 15 nt, Human
cuaauuguauaacag

SEQ ID NO: 3803230 - RNA, 20 nt, Human
cuaauuguauaacagguuau

SEQ ID NO: 3803231 - RNA, 22 nt, Human
cuaauuguauaacagguuauuu

SEQ ID NO: 3803232 - RNA, 14 nt, Human
cuaauuuauaaaaa

SEQ ID NO: 3803233 - RNA, 21 nt, Human
cuaauuucaaaaauauaacuu

SEQ ID NO: 3803234 - RNA, 17 nt, Human
cuaauuucaaaaugcuu

SEQ ID NO: 3803235 - RNA, 18 nt, Human
cuaauuucuccucccuuc

SEQ ID NO: 3803236 - RNA, 21 nt, Human
cuaauuugcauuaaauucaca

SEQ ID NO: 3803237 - RNA, 22 nt, Human
cuaauuuuuaagaauugaguaa

SEQ ID NO: 3803238 - RNA, 11 nt, Human
cuaauuuuugu

SEQ ID NO: 3803239 - RNA, 20 nt, Human
cuaauuuuuguauuuuucgu

SEQ ID NO: 3803240 - RNA, 21 nt, Human
cuaauuuuuuuguauuuuagc

SEQ ID NO: 3803241 - RNA, 15 nt, Human
cuacaaaaacacagc

SEQ ID NO: 3803242 - RNA, 18 nt, Human
cuacaaaaacacagcaag

SEQ ID NO: 3803243 - RNA, 22 nt, Human
cuacaaaaccuacccucaguga

SEQ ID NO: 3803244 - RNA, 18 nt, Human
cuacaaaacgcgcagaug

SEQ ID NO: 3803245 - RNA, 21 nt, Human
cuacaaacaaaauuucuauua

SEQ ID NO: 3803246 - RNA, 15 nt, Human
cuacaaagaagacau

SEQ ID NO: 3803247 - RNA, 18 nt, Human
cuacaaagguuuaaauga

SEQ ID NO: 3803248 - RNA, 19 nt, Human
cuacaaagguuuaaaugaa

SEQ ID NO: 3803249 - RNA, 20 nt, Human
cuacaaagguuuaaaugaac

SEQ ID NO: 3803250 - RNA, 15 nt, Human
cuacaaaucaguaau

SEQ ID NO: 3803251 - RNA, 16 nt, Human
cuacaacaagaguuua

SEQ ID NO: 3803252 - RNA, 12 nt, Human
cuacaacagccu

SEQ ID NO: 3803253 - RNA, 16 nt, Human
cuacaaccuccgccuc

SEQ ID NO: 3803254 - RNA, 14 nt, Human
cuacaacugagucc

SEQ ID NO: 3803255 - RNA, 19 nt, Human
cuacaagagcagccugugg

SEQ ID NO: 3803256 - RNA, 15 nt, Human
cuacaagauuuagaa

SEQ ID NO: 3803257 - RNA, 14 nt, Human
cuacaauauguaca

SEQ ID NO: 3803258 - RNA, 21 nt, Human
cuacaauauguacauuucuaa

SEQ ID NO: 3803259 - RNA, 21 nt, Human
cuacaaucucuuuuuguuugc

SEQ ID NO: 3803260 - RNA, 17 nt, Human
cuacaaugugaacuuua

SEQ ID NO: 3803261 - RNA, 19 nt, Human
cuacaaugugaacuuuauu

SEQ ID NO: 3803262 - RNA, 21 nt, Human
cuacaauuaauaguuugucua

SEQ ID NO: 3803263 - RNA, 16 nt, Human
cuacaauuuucuccca

SEQ ID NO: 3803264 - RNA, 12 nt, Human
cuacacacccug

SEQ ID NO: 3803265 - RNA, 22 nt, Human
cuacacacugucaugcuucauc

SEQ ID NO: 3803266 - RNA, 22 nt, Human
cuacacaggacagggguuccuu

SEQ ID NO: 3803267 - RNA, 23 nt, Human
cuacacagucugcaagauucuga

SEQ ID NO: 3803268 - RNA, 17 nt, Human
cuacacauuuuuaaauu

SEQ ID NO: 3803269 - RNA, 12 nt, Human
cuacaccacaca

SEQ ID NO: 3803270 - RNA, 16 nt, Human
cuacaccacucuggca

SEQ ID NO: 3803271 - RNA, 13 nt, Human
cuacacccagcaa

SEQ ID NO: 3803272 - RNA, 22 nt, Human
cuacaccccuccccugcccuag

SEQ ID NO: 3803273 - RNA, 17 nt, Human
cuacaccuauuauccca

SEQ ID NO: 3803274 - RNA, 13 nt, Human
cuacaccuugagg

SEQ ID NO: 3803275 - RNA, 20 nt, Human
cuacaccuuucuccuuugua

SEQ ID NO: 3803276 - RNA, 14 nt, Human
cuacacuaagagag

SEQ ID NO: 3803277 - RNA, 15 nt, Human
cuacacucaccugca

SEQ ID NO: 3803278 - RNA, 14 nt, Human
cuacacuccagccu

SEQ ID NO: 3803279 - RNA, 15 nt, Human
cuacacucuccuggg

SEQ ID NO: 3803280 - RNA, 16 nt, Human
cuacacucuccugggc

SEQ ID NO: 3803281 - RNA, 14 nt, Human
cuacacugggugcu

SEQ ID NO: 3803282 - RNA, 22 nt, Human
cuacacuguauuacauaaauaa

SEQ ID NO: 3803283 - RNA, 14 nt, Human
cuacacugugcuga

SEQ ID NO: 3803284 - RNA, 17 nt, Human
cuacacugugcugaguc

SEQ ID NO: 3803285 - RNA, 18 nt, Human
cuacacugugcugagucu

SEQ ID NO: 3803286 - RNA, 16 nt, Human
cuuuuuuauacauaaa

SEQ ID NO: 3803287 - RNA, 21 nt, Human
cuuuuuuauggcgauucccau

SEQ ID NO: 3803288 - RNA, 13 nt, Human
cuuuuuuauuaau

SEQ ID NO: 3803289 - RNA, 15 nt, Human
cuuuuuuauuaauca

SEQ ID NO: 3803290 - RNA, 13 nt, Human
cuuuuuuccuccu

SEQ ID NO: 3803291 - RNA, 19 nt, Human
cuuuuuuccuuuccaccuu

SEQ ID NO: 3803292 - RNA, 22 nt, Human
cuuuuuucucugauacagaaaa

SEQ ID NO: 3803293 - RNA, 13 nt, Human
cuuuuuucugccu

SEQ ID NO: 3803294 - RNA, 20 nt, Human
cuuuuuugaaauaauaaauc

SEQ ID NO: 3803295 - RNA, 16 nt, Human
cuuuuuuggccaucug

SEQ ID NO: 3803296 - RNA, 14 nt, Human
cuuuuuuggcugcu

SEQ ID NO: 3803297 - RNA, 20 nt, Human
cuuuuuuggggauaugcuua

SEQ ID NO: 3803298 - RNA, 19 nt, Human
cuuuuuugucccccaacuu

SEQ ID NO: 3803299 - RNA, 22 nt, Human
cuuuuuugucccccaacuugag

SEQ ID NO: 3803300 - RNA, 13 nt, Human
cuuuuuuguuuug

SEQ ID NO: 3803301 - RNA, 15 nt, Human
cuuuuuuucuacugu

SEQ ID NO: 3803302 - RNA, 18 nt, Human
cuuuuuuucuauauuauu

SEQ ID NO: 3803303 - RNA, 17 nt, Human
cuuuuuuucucuagagu

SEQ ID NO: 3803304 - RNA, 19 nt, Human
cuuuuuuucuguaccaguu

SEQ ID NO: 3803305 - RNA, 20 nt, Human
cuuuuuuucuguaccaguua

SEQ ID NO: 3803306 - RNA, 21 nt, Human
cuuuuuuuggugauucaaaug

SEQ ID NO: 3803307 - RNA, 12 nt, Human
cuuuuuuuguau

SEQ ID NO: 3803308 - RNA, 18 nt, Human
cuuuuuuuuaaugugcug

SEQ ID NO: 3803309 - RNA, 21 nt, Human
cuuuuuuuuccccccuagaaa

SEQ ID NO: 3803310 - RNA, 15 nt, Human
cuuuuuuuuguaugu

SEQ ID NO: 3803311 - RNA, 18 nt, Human
cuuuuuuuuuaaguucuu

SEQ ID NO: 3803312 - RNA, 15 nt, Human
cuuuuuuuuuccaaa

SEQ ID NO: 3803313 - RNA, 17 nt, Human
cuuuuuuuuucucuuuc

SEQ ID NO: 3803314 - RNA, 22 nt, Human
cuuuuuuuuucucuuucucucc

SEQ ID NO: 3803315 - RNA, 14 nt, Human
cuuuuuuuuuucuu

SEQ ID NO: 3803316 - RNA, 16 nt, Human
cuuuuuuuuuucuugg

SEQ ID NO: 3803317 - RNA, 23 nt, Human
cuuuuuuuuuucuuuauaagaaa

SEQ ID NO: 3803318 - RNA, 23 nt, Human
cuuuuuuuuuuuguuugaugcag

SEQ ID NO: 3803319 - RNA, 15 nt, Human
cuuuuuuuuuuuucc

SEQ ID NO: 3803320 - RNA, 21 nt, Human
cuuuuuuuuuuuuuaauaaau

SEQ ID NO: 3803321 - RNA, 18 nt, Human
cuuuuuuuuuuuuuuggu

SEQ ID NO: 3803322 - RNA, 21 nt, Human
cuuuuuuuuuuuuuuugacaa

SEQ ID NO: 3803323 - RNA, 19 nt, Human
gaaaaaaaaaaagaaagaa

SEQ ID NO: 3803324 - RNA, 18 nt, Human
gaaaaaaaaaagaagaag

SEQ ID NO: 3803325 - RNA, 13 nt, Human
gaaaaaaaaagaa

SEQ ID NO: 3803326 - RNA, 17 nt, Human
gaaaaaaaaagaaaaaa

SEQ ID NO: 3803327 - RNA, 21 nt, Human
gaaaaaaaaagucagacugcu

SEQ ID NO: 3803328 - RNA, 22 nt, Human
gaaaaaaaaaugccauaauaca

SEQ ID NO: 3803329 - RNA, 16 nt, Human
gaaaaaaaacagugga

SEQ ID NO: 3803330 - RNA, 18 nt, Human
gaaaaaaaaccugagauu

SEQ ID NO: 3803331 - RNA, 15 nt, Human
gaaaaaaaagaaagc

SEQ ID NO: 3803332 - RNA, 22 nt, Human
gaaaaaaaaguuucagagaagu

SEQ ID NO: 3803333 - RNA, 18 nt, Human
gaaaaaaaccacacaaag

SEQ ID NO: 3803334 - RNA, 23 nt, Human
gaaaaaaacuuuuauaaauuaaa

SEQ ID NO: 3803335 - RNA, 20 nt, Human
gaaagcagauaccucacccu

SEQ ID NO: 3803336 - RNA, 19 nt, Human
gaaagcaggggcuacaaga

SEQ ID NO: 3803337 - RNA, 23 nt, Human
gaaagcaggggcuacaagaggga

SEQ ID NO: 3803338 - RNA, 18 nt, Human
gaaagcauaaagcucaaa

SEQ ID NO: 3803339 - RNA, 18 nt, Human
gaaagcauauugacuuuu

SEQ ID NO: 3803340 - RNA, 18 nt, Human
gaaagcaucaccucaggc

SEQ ID NO: 3803341 - RNA, 19 nt, Human
gaaagcaucaccucaggcc

SEQ ID NO: 3803342 - RNA, 15 nt, Human
gaaagcauccaugug

SEQ ID NO: 3803343 - RNA, 21 nt, Human
gaaagcauguggcauguucau

SEQ ID NO: 3803344 - RNA, 15 nt, Human
gaaagcauuugaaug

SEQ ID NO: 3803345 - RNA, 16 nt, Human
gaaagcauuugaaugc

SEQ ID NO: 3803346 - RNA, 20 nt, Human
gaaagcauuugaaugcauuu

SEQ ID NO: 3803347 - RNA, 23 nt, Human
gaaagccaaggagucacugagac

SEQ ID NO: 3803348 - RNA, 15 nt, Human
gaaagccaccucucc

SEQ ID NO: 3803349 - RNA, 18 nt, Human
gaaagccaccucucccuc

SEQ ID NO: 3803350 - RNA, 14 nt, Human
gaaagccaggcagg

SEQ ID NO: 3803351 - RNA, 19 nt, Human
gaaagccagucuuaacauu

SEQ ID NO: 3803352 - RNA, 20 nt, Human
gaaagccagugacuccagga

SEQ ID NO: 3803353 - RNA, 13 nt, Human
gaaagccccaccc

SEQ ID NO: 3803354 - RNA, 18 nt, Human
gaaagccccacccaggcc

SEQ ID NO: 3803355 - RNA, 21 nt, Human
gaaagccccacccaggccagg

SEQ ID NO: 3803356 - RNA, 18 nt, Human
gaaagccuguuccccuca

SEQ ID NO: 3803357 - RNA, 18 nt, Human
gaaagccuuaagcugcag

SEQ ID NO: 3803358 - RNA, 22 nt, Human
gaaagcgccuccaacccuagca

SEQ ID NO: 3803359 - RNA, 20 nt, Human
gaaagcgcggacgugcuggg

SEQ ID NO: 3803360 - RNA, 16 nt, Human
gaaagcuagagauaug

SEQ ID NO: 3803361 - RNA, 17 nt, Human
gaaagcucacuguagcu

SEQ ID NO: 3803362 - RNA, 22 nt, Human
gaaagcuccucgagggcaggga

SEQ ID NO: 3803363 - RNA, 13 nt, Human
gaaagcucuagaa

SEQ ID NO: 3803364 - RNA, 20 nt, Human
gaaagcugacuuggcuggug

SEQ ID NO: 3803365 - RNA, 21 nt, Human
gaaagcugagaacuccugacu

SEQ ID NO: 3803366 - RNA, 23 nt, Human
gaaagcugauuacugucaauaaa

SEQ ID NO: 3803367 - RNA, 21 nt, Human
gaaagcugcugugaucccagu

SEQ ID NO: 3803368 - RNA, 19 nt, Human
gaaagcugguggcagaguc

SEQ ID NO: 3803369 - RNA, 20 nt, Human
gaaagcuguguuuauaugga

SEQ ID NO: 3803370 - RNA, 21 nt, Human
gaaagcuugcccuggugccuc

SEQ ID NO: 3803371 - RNA, 23 nt, Human
gaaagcuuugaauacuaaauuau

SEQ ID NO: 3803372 - RNA, 15 nt, Human
gaaagcuuuggcagu

SEQ ID NO: 3803373 - RNA, 21 nt, Human
gaaagcuuuguugaaagaaag

SEQ ID NO: 3803374 - RNA, 11 nt, Human
gaaaggaaaga

SEQ ID NO: 3803375 - RNA, 19 nt, Human
gaaaggacacuagaagauu

SEQ ID NO: 3803376 - RNA, 13 nt, Human
gaaaggagacuag

SEQ ID NO: 3803377 - RNA, 17 nt, Human
gaaaggaggcaugccuc

SEQ ID NO: 3803378 - RNA, 15 nt, Human
gaaaggagguggggg

SEQ ID NO: 3803379 - RNA, 15 nt, Human
gaaaggaguagaaaa

SEQ ID NO: 3803380 - RNA, 16 nt, Human
gaaaggaguagaaaaa

SEQ ID NO: 3803381 - RNA, 14 nt, Human
gaaaggauauuuaa

SEQ ID NO: 3803382 - RNA, 17 nt, Human
gaaaggauuucucuuua

SEQ ID NO: 3803383 - RNA, 17 nt, Human
gaaaggcauucucugaa

SEQ ID NO: 3803384 - RNA, 15 nt, Human
gaaaggccagcacuc

SEQ ID NO: 3803385 - RNA, 16 nt, Human
gaaaggccagcuggca

SEQ ID NO: 3803386 - RNA, 19 nt, Human
gaaaggccagcuggcagca

SEQ ID NO: 3803387 - RNA, 14 nt, Human
gaaaggcucagucu

SEQ ID NO: 3803388 - RNA, 12 nt, Human
gaaaggcuccag

SEQ ID NO: 3803389 - RNA, 13 nt, Human
gaaaggcuccagg

SEQ ID NO: 3803390 - RNA, 15 nt, Human
gaaaggcuccaggag

SEQ ID NO: 3803391 - RNA, 16 nt, Human
gaaaggcuccaggagc

SEQ ID NO: 3803392 - RNA, 17 nt, Human
gaaaggcuccaggagca

SEQ ID NO: 3803393 - RNA, 19 nt, Human
gaaaggcuccaggagcagc

SEQ ID NO: 3803394 - RNA, 19 nt, Human
gaaaggcucugaaagccag

SEQ ID NO: 3803395 - RNA, 23 nt, Human
gaaaggcugcuguacugaaguaa

SEQ ID NO: 3803396 - RNA, 22 nt, Human
gaaaggcuguuaaauacaggaa

SEQ ID NO: 3803397 - RNA, 19 nt, Human
gaaagggacuuggaagcuc

SEQ ID NO: 3803398 - RNA, 17 nt, Human
gaaagggagcagagaag

SEQ ID NO: 3803399 - RNA, 14 nt, Human
gaaagggagggcuc

SEQ ID NO: 3803400 - RNA, 15 nt, Human
gaaagggagggcucu

SEQ ID NO: 3803401 - RNA, 17 nt, Human
gaaagggagggcucuga

SEQ ID NO: 3803402 - RNA, 19 nt, Human
gaaagggagggcucugagg

SEQ ID NO: 3803403 - RNA, 13 nt, Human
gaaagggccagga

SEQ ID NO: 3803404 - RNA, 18 nt, Human
gaaagggccaggagaugg

SEQ ID NO: 3803405 - RNA, 16 nt, Human
gaaagggcccagagag

SEQ ID NO: 3803406 - RNA, 20 nt, Human
gaaaggggagagccugcugg

SEQ ID NO: 3803407 - RNA, 16 nt, Human
gaaagggggucccagu

SEQ ID NO: 3803408 - RNA, 22 nt, Human
gaaagggggucccagugggagg

SEQ ID NO: 3803409 - RNA, 14 nt, Human
gaaaggggugcuuu

SEQ ID NO: 3803410 - RNA, 15 nt, Human
gaaaggggugcuuuu

SEQ ID NO: 3803411 - RNA, 19 nt, Human
gaaagggugcugcuucccu

SEQ ID NO: 3803412 - RNA, 18 nt, Human
gaaagguacuauauuugc

SEQ ID NO: 3803413 - RNA, 14 nt, Human
gaaaggucaccuca

SEQ ID NO: 3803414 - RNA, 20 nt, Human
gaaaggucaccucacucagc

SEQ ID NO: 3803415 - RNA, 14 nt, Human
gaaaggugguguuu

SEQ ID NO: 3803416 - RNA, 13 nt, Human
gaaagguucugcc

SEQ ID NO: 3803417 - RNA, 14 nt, Human
gaaagguuuacauu

SEQ ID NO: 3803418 - RNA, 13 nt, Human
gaaagguuuugga

SEQ ID NO: 3803419 - RNA, 13 nt, Human
gaaagguuuuuuu

SEQ ID NO: 3803420 - RNA, 16 nt, Human
gaaaguaauuucuucu

SEQ ID NO: 3803421 - RNA, 17 nt, Human
gaaaguacacucugcug

SEQ ID NO: 3803422 - RNA, 19 nt, Human
gaaaguacacucugcuguu

SEQ ID NO: 3803423 - RNA, 20 nt, Human
gaaaguacauuuuuugaaau

SEQ ID NO: 3803424 - RNA, 21 nt, Human
gaaaguacuucuccacccugc

SEQ ID NO: 3803425 - RNA, 16 nt, Human
gaaaguagaacuuacu

SEQ ID NO: 3803426 - RNA, 21 nt, Human
gaaagucagaaucagaagaua

SEQ ID NO: 3803427 - RNA, 20 nt, Human
gaaagucagaugcccagagg

SEQ ID NO: 3803428 - RNA, 20 nt, Human
gaaagucagccauaucucca

SEQ ID NO: 3803429 - RNA, 21 nt, Human
gaaagucauuggcuuuauccu

SEQ ID NO: 3803430 - RNA, 23 nt, Human
gaaaggugccauggaagaggcua

SEQ ID NO: 3803431 - RNA, 16 nt, Human
gaaaggugguguuucu

SEQ ID NO: 3803432 - RNA, 18 nt, Human
gaaagguuacccuguaac

SEQ ID NO: 3803433 - RNA, 20 nt, Human
gaaagguuagagaauaaauu

SEQ ID NO: 3803434 - RNA, 14 nt, Human
gaaagguucugccc

SEQ ID NO: 3803435 - RNA, 19 nt, Human
gaaaguaaauaaaaggacu

SEQ ID NO: 3803436 - RNA, 15 nt, Human
gaaaguaauuucuuc

SEQ ID NO: 3803437 - RNA, 19 nt, Human
gaaaguaauuucuucucaa

SEQ ID NO: 3803438 - RNA, 13 nt, Human
gaaaguacauuuu

SEQ ID NO: 3803439 - RNA, 10 nt, Human
gaaagucaga

SEQ ID NO: 3803440 - RNA, 19 nt, Human
gaaagucagauucuugcau

SEQ ID NO: 3803441 - RNA, 14 nt, Human
gaaagucauuggcu

SEQ ID NO: 3803442 - RNA, 17 nt, Human
gaaagucauuggcuuua

SEQ ID NO: 3803443 - RNA, 21 nt, Human
gaaagucuaucuaaugacaug

SEQ ID NO: 3803444 - RNA, 18 nt, Human
gaaagugaauaaacuuca

SEQ ID NO: 3803445 - RNA, 20 nt, Human
gaaagugaauaaacuucagc

SEQ ID NO: 3803446 - RNA, 13 nt, Human
gaaagugaauuug

SEQ ID NO: 3803447 - RNA, 19 nt, Human
gaaagugaauuugaaugaa

SEQ ID NO: 3803448 - RNA, 23 nt, Human
gaaagugaauuugaaugaaaaau

SEQ ID NO: 3803449 - RNA, 16 nt, Human
gaaagugagcaguguu

SEQ ID NO: 3803450 - RNA, 20 nt, Human
gaaagugaggaaauaaaguu

SEQ ID NO: 3803451 - RNA, 21 nt, Human
gaaagugauaucccccagccu

SEQ ID NO: 3803452 - RNA, 15 nt, Human
gaaagugaugacaua

SEQ ID NO: 3803453 - RNA, 13 nt, Human
gaaagugcauuuu

SEQ ID NO: 3803454 - RNA, 20 nt, Human
gaaagugcauuuuuguaaau

SEQ ID NO: 3803455 - RNA, 16 nt, Human
gaaagugccagaaagu

SEQ ID NO: 3803456 - RNA, 21 nt, Human
gaaagugccuuucaggaucua

SEQ ID NO: 3803457 - RNA, 18 nt, Human
gaaaguggugcucaguug

SEQ ID NO: 3803458 - RNA, 20 nt, Human
gaaaguggugcucaguugua

SEQ ID NO: 3803459 - RNA, 16 nt, Human
gaaaguguaaagcauu

SEQ ID NO: 3803460 - RNA, 15 nt, Human
gaaaguguucuguua

SEQ ID NO: 3803461 - RNA, 21 nt, Human
gaaaguguucuguuacaaaau

SEQ ID NO: 3803462 - RNA, 17 nt, Human
gaaaguuaacauuaaug

SEQ ID NO: 3803463 - RNA, 23 nt, Human
gaaaguuauugauaaguucauac

SEQ ID NO: 3803464 - RNA, 13 nt, Human
gaaaguucaugcu

SEQ ID NO: 3803465 - RNA, 17 nt, Human
gaaaguugcaaggcaaa

SEQ ID NO: 3803466 - RNA, 21 nt, Human
gaaaguugcaaggcaaauguu

SEQ ID NO: 3803467 - RNA, 19 nt, Human
gaaaguugcacggcugcug

SEQ ID NO: 3803468 - RNA, 22 nt, Human
gaaaguuuggggacaugugauu

SEQ ID NO: 3803469 - RNA, 22 nt, Human
gaaaguuuucagaaccucuucc

SEQ ID NO: 3803470 - RNA, 13 nt, Human
gaaaguuuuguaa

SEQ ID NO: 3803471 - RNA, 16 nt, Human
gaaauaaaaaagucuc

SEQ ID NO: 3803472 - RNA, 14 nt, Human
gaaauaaaaagagu

SEQ ID NO: 3803473 - RNA, 18 nt, Human
gaaauaaaaccuuucaaa

SEQ ID NO: 3803474 - RNA, 19 nt, Human
gaaauaaaagugaaugaaa

SEQ ID NO: 3803475 - RNA, 22 nt, Human
gaaauaaaccuuaauauuucuu

SEQ ID NO: 3803476 - RNA, 14 nt, Human
gaaauaaacgucuu

SEQ ID NO: 3803477 - RNA, 20 nt, Human
gaaauaaaggaugugauugu

SEQ ID NO: 3803478 - RNA, 19 nt, Human
gaaauaaaguuaaguuugu

SEQ ID NO: 3803479 - RNA, 15 nt, Human
gaaauaaauagcuau

SEQ ID NO: 3803480 - RNA, 21 nt, Human
gaaauaaauguaucauagaaa

SEQ ID NO: 3803481 - RNA, 17 nt, Human
gaaauaacaaaauggac

SEQ ID NO: 3803482 - RNA, 18 nt, Human
gaaauaacaauguuaagg

SEQ ID NO: 3803483 - RNA, 17 nt, Human
gaaauaacacagcaguu

SEQ ID NO: 3803484 - RNA, 22 nt, Human
gaaauaacagaagaaaauagaa

SEQ ID NO: 3803485 - RNA, 22 nt, Human
gaaauaacuccuucuuguagua

SEQ ID NO: 3803486 - RNA, 16 nt, Human
gaaauaagaaaaauca

SEQ ID NO: 3803487 - RNA, 18 nt, Human
gaaauaagaaaaaucaug

SEQ ID NO: 3803488 - RNA, 19 nt, Human
gaaauaagcuauuugaugu

SEQ ID NO: 3803489 - RNA, 23 nt, Human
gaaauaagcuauuugauguaaua

SEQ ID NO: 3803490 - RNA, 20 nt, Human
gaaauaagugcccucuccca

SEQ ID NO: 3803491 - RNA, 11 nt, Human
gaaauaauaaa

SEQ ID NO: 3803492 - RNA, 20 nt, Human
gaaauaauaaaaaauuucag

SEQ ID NO: 3803493 - RNA, 14 nt, Human
gaaauaauaaaucu

SEQ ID NO: 3803494 - RNA, 19 nt, Human
gaaauaaugcuacaauuuu

SEQ ID NO: 3803495 - RNA, 23 nt, Human
gaaauaaugcuacaauuuuaaga

SEQ ID NO: 3803496 - RNA, 12 nt, Human
gaaauaaugugu

SEQ ID NO: 3803497 - RNA, 13 nt, Human
gaaauaaugugua

SEQ ID NO: 3803498 - RNA, 20 nt, Human
gaaauaauuguuguucuguu

SEQ ID NO: 3803499 - RNA, 18 nt, Human
gaaauacaaaaauacuca

SEQ ID NO: 3803500 - RNA, 19 nt, Human
gaaauacacaaguaaacau

SEQ ID NO: 3803501 - RNA, 17 nt, Human
gaaauacagacuggaug

SEQ ID NO: 3803502 - RNA, 19 nt, Human
gaaauacagauaaaugauu

SEQ ID NO: 3803503 - RNA, 22 nt, Human
gaaauacagauaaaugauucaa

SEQ ID NO: 3803504 - RNA, 22 nt, Human
gaaauacagauuuugauagcaa

SEQ ID NO: 3803505 - RNA, 16 nt, Human
gaaauacagucuucca

SEQ ID NO: 3803506 - RNA, 17 nt, Human
gaaauacaguucugcuc

SEQ ID NO: 3803507 - RNA, 21 nt, Human
gaaauacccuucuuuuaugag

SEQ ID NO: 3803508 - RNA, 11 nt, Human
gaaauaccuca

SEQ ID NO: 3803509 - RNA, 17 nt, Human
gaaauaccucauguuua

SEQ ID NO: 3803510 - RNA, 21 nt, Human
gaaauacuacuuaccauaugu

SEQ ID NO: 3803511 - RNA, 15 nt, Human
gaaauacuguuugag

SEQ ID NO: 3803512 - RNA, 19 nt, Human
gaaauacuguuugagguuu

SEQ ID NO: 3803513 - RNA, 19 nt, Human
gaaauagaaaaacccugcc

SEQ ID NO: 3803514 - RNA, 23 nt, Human
gaaauagaaaaacccugccccca

SEQ ID NO: 3803515 - RNA, 20 nt, Human
gaaauagaaauuuccagaga

SEQ ID NO: 3803516 - RNA, 20 nt, Human
gaaauagcuccguggagcag

SEQ ID NO: 3803517 - RNA, 18 nt, Human
gaaauagcuuaugaaaag

SEQ ID NO: 3803518 - RNA, 14 nt, Human
gaaauaggaaacaa

SEQ ID NO: 3803519 - RNA, 15 nt, Human
gaaauaggaaacaag

SEQ ID NO: 3803520 - RNA, 18 nt, Human
gaaauaggaaacaaguga

SEQ ID NO: 3803521 - RNA, 20 nt, Human
gaaauaggagggaaaccuuu

SEQ ID NO: 3803522 - RNA, 19 nt, Human
gaaauagucauuugugaau

SEQ ID NO: 3803523 - RNA, 20 nt, Human
gaaauagucauuugugaauu

SEQ ID NO: 3803524 - RNA, 22 nt, Human
gaaauaguguggaaauuaagaa

SEQ ID NO: 3803525 - RNA, 18 nt, Human
gaaauaguucaaagccaa

SEQ ID NO: 3803526 - RNA, 22 nt, Human
gaacucauuccugccugucucc

SEQ ID NO: 3803527 - RNA, 15 nt, Human
gaacucccuuucaac

SEQ ID NO: 3803528 - RNA, 23 nt, Human
gaacuccuaaaccuuugccccug

SEQ ID NO: 3803529 - RNA, 13 nt, Human
gaacuccuggccu

SEQ ID NO: 3803530 - RNA, 14 nt, Human
gaacuccugggcuc

SEQ ID NO: 3803531 - RNA, 14 nt, Human
gaacuccuuggccu

SEQ ID NO: 3803532 - RNA, 15 nt, Human
gaacuccuuggccua

SEQ ID NO: 3803533 - RNA, 17 nt, Human
gaacucgguguccccac

SEQ ID NO: 3803534 - RNA, 20 nt, Human
gaacucgguguccccaccau

SEQ ID NO: 3803535 - RNA, 20 nt, Human
gaacucuaucugggccuggg

SEQ ID NO: 3803536 - RNA, 11 nt, Human
gaacucugaca

SEQ ID NO: 3803537 - RNA, 14 nt, Human
gaacucugacaagg

SEQ ID NO: 3803538 - RNA, 19 nt, Human
gaacucugacaagggcuga

SEQ ID NO: 3803539 - RNA, 16 nt, Human
gaacucugccugcccu

SEQ ID NO: 3803540 - RNA, 16 nt, Human
gaacucuggcuuccag

SEQ ID NO: 3803541 - RNA, 17 nt, Human
gaacucuggcuuccagg

SEQ ID NO: 3803542 - RNA, 13 nt, Human
gaacucugggcuc

SEQ ID NO: 3803543 - RNA, 14 nt, Human
gaacucugggcuca

SEQ ID NO: 3803544 - RNA, 19 nt, Human
gaacucugguggcacagga

SEQ ID NO: 3803545 - RNA, 12 nt, Human
gaacucuuccuc

SEQ ID NO: 3803546 - RNA, 19 nt, Human
gaacucuucucauuacuug

SEQ ID NO: 3803547 - RNA, 15 nt, Human
gaacucuugacagcu

SEQ ID NO: 3803548 - RNA, 22 nt, Human
gaacucuuucuggccugccuuc

SEQ ID NO: 3803549 - RNA, 18 nt, Human
gaacugaaaacauaaaaa

SEQ ID NO: 3803550 - RNA, 14 nt, Human
gaacugaaaagaga

SEQ ID NO: 3803551 - RNA, 22 nt, Human
gaacugaaaggcuuuucaacca

SEQ ID NO: 3803552 - RNA, 12 nt, Human
gaacugaacacc

SEQ ID NO: 3803553 - RNA, 22 nt, Human
gaacugaacaccauugaaggcu

SEQ ID NO: 3803554 - RNA, 23 nt, Human
gaacugaacaccauugaaggcuu

SEQ ID NO: 3803555 - RNA, 20 nt, Human
gaacugaaccggcuuuacca

SEQ ID NO: 3803556 - RNA, 19 nt, Human
gaacugagcuccucugggc

SEQ ID NO: 3803557 - RNA, 20 nt, Human
gaacugaucauguuuaugag

SEQ ID NO: 3803558 - RNA, 22 nt, Human
gaacugaucauguuuaugagaa

SEQ ID NO: 3803559 - RNA, 18 nt, Human
gaacugcacaugaagaaa

SEQ ID NO: 3803560 - RNA, 16 nt, Human
gaacugcagaccuguc

SEQ ID NO: 3803561 - RNA, 19 nt, Human
gaacugcagaccuguccuc

SEQ ID NO: 3803562 - RNA, 17 nt, Human
gaacugcaggcccuggc

SEQ ID NO: 3803563 - RNA, 18 nt, Human
gaacugcaggcccuggcc

SEQ ID NO: 3803564 - RNA, 19 nt, Human
gaacugcaggcccuggccu

SEQ ID NO: 3803565 - RNA, 19 nt, Human
gaacugccauuauuuucug

SEQ ID NO: 3803566 - RNA, 19 nt, Human
gaacugcguuaugaagagc

SEQ ID NO: 3803567 - RNA, 17 nt, Human
gaacugcugccacugag

SEQ ID NO: 3803568 - RNA, 20 nt, Human
gaacugcugggcuuggcagc

SEQ ID NO: 3803569 - RNA, 16 nt, Human
gaacugcuuucuuucg

SEQ ID NO: 3803570 - RNA, 14 nt, Human
gaacuggacucagg

SEQ ID NO: 3803571 - RNA, 18 nt, Human
gaacuggagccaugggca

SEQ ID NO: 3803572 - RNA, 18 nt, Human
gaacuggcaauugucuau

SEQ ID NO: 3803573 - RNA, 21 nt, Human
gaaaucccuguuuaauauuua

SEQ ID NO: 3803574 - RNA, 15 nt, Human
gaaaucuaguauuuc

SEQ ID NO: 3803575 - RNA, 12 nt, Human
gaaaucucaccc

SEQ ID NO: 3803576 - RNA, 15 nt, Human
gaaaucucuuugccc

SEQ ID NO: 3803577 - RNA, 15 nt, Human
gaaaucuuuaaaaaa

SEQ ID NO: 3803578 - RNA, 11 nt, Human
gaaaugaaaaa

SEQ ID NO: 3803579 - RNA, 16 nt, Human
gaaaugaaaacaugua

SEQ ID NO: 3803580 - RNA, 19 nt, Human
gaaaugaaaacauguaaua

SEQ ID NO: 3803581 - RNA, 17 nt, Human
gaaaugaaagcagggac

SEQ ID NO: 3803582 - RNA, 13 nt, Human
gaaaugaaauuua

SEQ ID NO: 3803583 - RNA, 12 nt, Human
gaaaugaacauu

SEQ ID NO: 3803584 - RNA, 16 nt, Human
gaaaugaacauuccaa

SEQ ID NO: 3803585 - RNA, 19 nt, Human
gaaaugacuaaaaaacaaa

SEQ ID NO: 3803586 - RNA, 17 nt, Human
gaaaugaggcaugaguu

SEQ ID NO: 3803587 - RNA, 22 nt, Human
gaaaugaggucuguuuaaagug

SEQ ID NO: 3803588 - RNA, 16 nt, Human
gaaaugauagauuuga

SEQ ID NO: 3803589 - RNA, 20 nt, Human
gaaaugcauuauuuugaaug

SEQ ID NO: 3803590 - RNA, 16 nt, Human
gaaaugccuuacuuug

SEQ ID NO: 3803591 - RNA, 22 nt, Human
gaaaugccuuacuuuguaugau

SEQ ID NO: 3803592 - RNA, 14 nt, Human
gaaaugcugaccca

SEQ ID NO: 3803593 - RNA, 13 nt, Human
gaaaugcugccug

SEQ ID NO: 3803594 - RNA, 16 nt, Human
gaaaugcugccugccu

SEQ ID NO: 3803595 - RNA, 15 nt, Human
gaaaugcugcuggcc

SEQ ID NO: 3803596 - RNA, 17 nt, Human
gaaaugcugcuggccaa

SEQ ID NO: 3803597 - RNA, 15 nt, Human
gaaaugcugggcuga

SEQ ID NO: 3803598 - RNA, 15 nt, Human
gaaauggaaagcaga

SEQ ID NO: 3803599 - RNA, 17 nt, Human
gaaauggcuugaagcca

SEQ ID NO: 3803600 - RNA, 19 nt, Human
gaaaugggcagagcagaga

SEQ ID NO: 3803601 - RNA, 20 nt, Human
gaaaugggcagagcagagac

SEQ ID NO: 3803602 - RNA, 14 nt, Human
gaaaugguuguauu

SEQ ID NO: 3803603 - RNA, 15 nt, Human
gaaaugguuguauua

SEQ ID NO: 3803604 - RNA, 14 nt, Human
gaaauguaaacugc

SEQ ID NO: 3803605 - RNA, 22 nt, Human
gaaauguaggcaucaugcaugu

SEQ ID NO: 3803606 - RNA, 14 nt, Human
gaaauguaguugau

SEQ ID NO: 3803607 - RNA, 18 nt, Human
gaaauguaguugauguau

SEQ ID NO: 3803608 - RNA, 15 nt, Human
gaaaugucuggagaa

SEQ ID NO: 3803609 - RNA, 17 nt, Human
gaaaugucuggagaaua

SEQ ID NO: 3803610 - RNA, 18 nt, Human
gaaaugucuggagaauaa

SEQ ID NO: 3803611 - RNA, 21 nt, Human
gaaaugugaauuuuuauuguu

SEQ ID NO: 3803612 - RNA, 16 nt, Human
gaaaugugguuuuccu

SEQ ID NO: 3803613 - RNA, 20 nt, Human
gaaaugugugugaugugaca

SEQ ID NO: 3803614 - RNA, 23 nt, Human
gaaaugugugugaugugacauuu

SEQ ID NO: 3803615 - RNA, 21 nt, Human
gaaauguuaaagguucacagg

SEQ ID NO: 3803616 - RNA, 15 nt, Human
gaaauguuuuaaggc

SEQ ID NO: 3803617 - RNA, 18 nt, Human
gaaauguuuuguaaacau

SEQ ID NO: 3803618 - RNA, 22 nt, Human
gaaauguuuuguaaacauuuau

SEQ ID NO: 3803619 - RNA, 21 nt, Human
gaaauguuuuuaauaaaagaa

SEQ ID NO: 3803620 - RNA, 23 nt, Human
gaaauuaacuuacccuguauauc

SEQ ID NO: 3803621 - RNA, 15 nt, Human
gaaauuaagaagaaa

SEQ ID NO: 3803622 - RNA, 16 nt, Human
gaaauuaagaagaaac

SEQ ID NO: 3803623 - RNA, 16 nt, Human
gaaauuaccuguggau

SEQ ID NO: 3803624 - RNA, 18 nt, Human
gaaauuaccuguggauau

SEQ ID NO: 3803625 - RNA, 13 nt, Human
gaaauuagggccc

SEQ ID NO: 3803626 - RNA, 23 nt, Human
gaaauuaguacuccccuccuuga

SEQ ID NO: 3803627 - RNA, 13 nt, Human
gaaauuauaucug

SEQ ID NO: 3803628 - RNA, 19 nt, Human
gaaauucaacguuaauaau

SEQ ID NO: 3803629 - RNA, 12 nt, Human
gaaauuccaaag

SEQ ID NO: 3803630 - RNA, 15 nt, Human
gaaauuccuguagca

SEQ ID NO: 3803631 - RNA, 19 nt, Human
gaaauucguguguuuuuuu

SEQ ID NO: 3803632 - RNA, 16 nt, Human
gaaauucuaaagagca

SEQ ID NO: 3803633 - RNA, 14 nt, Human
gaaauucugaauuu

SEQ ID NO: 3803634 - RNA, 21 nt, Human
gaaauucugaauuugcaaagu

SEQ ID NO: 3803635 - RNA, 13 nt, Human
gaaauucuguuuu

SEQ ID NO: 3803636 - RNA, 14 nt, Human
gaaauucuguuuuu

SEQ ID NO: 3803637 - RNA, 18 nt, Human
gaaauucuguuuuuaaaa

SEQ ID NO: 3803638 - RNA, 18 nt, Human
gaaauucuuguuauggua

SEQ ID NO: 3803639 - RNA, 15 nt, Human
gaaauugaaaaguua

SEQ ID NO: 3803640 - RNA, 21 nt, Human
gaaauugaauacuuugaaugu

SEQ ID NO: 3803641 - RNA, 17 nt, Human
gaaauugccugacgaac

SEQ ID NO: 3803642 - RNA, 18 nt, Human
gaaauugcuuuguauugu

SEQ ID NO: 3803643 - RNA, 22 nt, Human
gaaauuggaacagaauguuuua

SEQ ID NO: 3803644 - RNA, 14 nt, Human
gaaauuggcuggau

SEQ ID NO: 3803645 - RNA, 13 nt, Human
gaaauuguauauu

SEQ ID NO: 3803646 - RNA, 19 nt, Human
gaaauuguauauuguaauu

SEQ ID NO: 3803647 - RNA, 21 nt, Human
gaaauugucuagcagagcagg

SEQ ID NO: 3803648 - RNA, 14 nt, Human
gaaauuuaaacuau

SEQ ID NO: 3803649 - RNA, 20 nt, Human
gaaauuuaauucauguuucu

SEQ ID NO: 3803650 - RNA, 16 nt, Human
gaaauuuauaaacuuu

SEQ ID NO: 3803651 - RNA, 17 nt, Human
gaaauuuauaaacuuuu

SEQ ID NO: 3803652 - RNA, 19 nt, Human
gaaauuuauuaguuaauau

SEQ ID NO: 3803653 - RNA, 22 nt, Human
gaaauuuauugaggaaaaauau

SEQ ID NO: 3803654 - RNA, 20 nt, Human
gaaauuuccacucaggucug

SEQ ID NO: 3803655 - RNA, 13 nt, Human
gaaauuuccagag

SEQ ID NO: 3803656 - RNA, 13 nt, Human
gaaauuucuguga

SEQ ID NO: 3803657 - RNA, 14 nt, Human
gaaauuugauuucu

SEQ ID NO: 3803658 - RNA, 22 nt, Human
gaaauuuuaaccuaugauauuu

SEQ ID NO: 3803659 - RNA, 21 nt, Human
gaaauuuuaccaaguuauaua

SEQ ID NO: 3803660 - RNA, 14 nt, Human
gaaauuuuagaaau

SEQ ID NO: 3803661 - RNA, 22 nt, Human
gaaauuuuauaugcuuacugau

SEQ ID NO: 3803662 - RNA, 21 nt, Human
gaaauuuucaagagucuaaua

SEQ ID NO: 3803663 - RNA, 20 nt, Human
gaaauuuucuagacuuucug

SEQ ID NO: 3803664 - RNA, 16 nt, Human
gaaauuuucuugauuu

SEQ ID NO: 3803665 - RNA, 20 nt, Human
gaaauuuucuugauuugagu

SEQ ID NO: 3803666 - RNA, 17 nt, Human
gaaauuuugcaaauaua

SEQ ID NO: 3803667 - RNA, 21 nt, Human
gaaauuuugcaaauauaaaca

SEQ ID NO: 3803668 - RNA, 17 nt, Human
gaaauuuuguaagaagg

SEQ ID NO: 3803669 - RNA, 17 nt, Human
gaaauuuuuauuuuucu

SEQ ID NO: 3803670 - RNA, 12 nt, Human
gaaauuuuucau

SEQ ID NO: 3803671 - RNA, 17 nt, Human
gaaauuuuucauauuuu

SEQ ID NO: 3803672 - RNA, 19 nt, Human
gaaauuuuucauauuuuaa

SEQ ID NO: 3803673 - RNA, 15 nt, Human
gaaauuuuucuucuu

SEQ ID NO: 3803674 - RNA, 16 nt, Human
gaacaaaauaaauugg

SEQ ID NO: 3803675 - RNA, 14 nt, Human
gaacaaagcuguua

SEQ ID NO: 3803676 - RNA, 19 nt, Human
gaacaaagcuguuaaacug

SEQ ID NO: 3803677 - RNA, 19 nt, Human
gaacaaauauucagaauau

SEQ ID NO: 3803678 - RNA, 13 nt, Human
gaacaaaugaaga

SEQ ID NO: 3803679 - RNA, 14 nt, Human
gaacaaauuuacag

SEQ ID NO: 3803680 - RNA, 15 nt, Human
gaacaacauauacaa

SEQ ID NO: 3803681 - RNA, 20 nt, Human
gaacaaccucggcuccugga

SEQ ID NO: 3803682 - RNA, 17 nt, Human
cuagagaagauaauugu

SEQ ID NO: 3803683 - RNA, 21 nt, Human
cuagagaagauaauuguugaa

SEQ ID NO: 3803684 - RNA, 23 nt, Human
cuagagaaguggacuggaggagc

SEQ ID NO: 3803685 - RNA, 15 nt, Human
cuagagaaugcacag

SEQ ID NO: 3803686 - RNA, 23 nt, Human
cuagagacagaagcaggcuggag

SEQ ID NO: 3803687 - RNA, 22 nt, Human
cuagagagggaggcaagcccug

SEQ ID NO: 3803688 - RNA, 20 nt, Human
cuagagagugugauguucac

SEQ ID NO: 3803689 - RNA, 17 nt, Human
cuagagauauggcagcg

SEQ ID NO: 3803690 - RNA, 17 nt, Human
cuagagaucugguuuug

SEQ ID NO: 3803691 - RNA, 14 nt, Human
cuagagcagggauu

SEQ ID NO: 3803692 - RNA, 11 nt, Human
cuagagccugc

SEQ ID NO: 3803693 - RNA, 12 nt, Human
cuagagccugcc

SEQ ID NO: 3803694 - RNA, 18 nt, Human
cuagagccugcuggaucu

SEQ ID NO: 3803695 - RNA, 16 nt, Human
cuagagccuucagccu

SEQ ID NO: 3803696 - RNA, 11 nt, Human
cuagagcuccu

SEQ ID NO: 3803697 - RNA, 17 nt, Human
cuagaggaaaagaaaga

SEQ ID NO: 3803698 - RNA, 15 nt, Human
cuagaggcagggagg

SEQ ID NO: 3803699 - RNA, 19 nt, Human
cuagaggccagccccaccc

SEQ ID NO: 3803700 - RNA, 18 nt, Human
cuagaggccugaggauga

SEQ ID NO: 3803701 - RNA, 20 nt, Human
cuagaggccugaggaugagc

SEQ ID NO: 3803702 - RNA, 21 nt, Human
cuagaggcuuccuucauuucc

SEQ ID NO: 3803703 - RNA, 18 nt, Human
cuagagggaccucuccca

SEQ ID NO: 3803704 - RNA, 19 nt, Human
cuagagggaccucucccag

SEQ ID NO: 3803705 - RNA, 21 nt, Human
cuagagggaccucucccaggg

SEQ ID NO: 3803706 - RNA, 22 nt, Human
cuagagggauacacugaaguua

SEQ ID NO: 3803707 - RNA, 15 nt, Human
cuagaggguuccugu

SEQ ID NO: 3803708 - RNA, 19 nt, Human
cuagaggguuccuguagac

SEQ ID NO: 3803709 - RNA, 15 nt, Human
cuagaggugagaaau

SEQ ID NO: 3803710 - RNA, 17 nt, Human
cuagaggugagaaauuu

SEQ ID NO: 3803711 - RNA, 15 nt, Human
cuagagguucaaaga

SEQ ID NO: 3803712 - RNA, 20 nt, Human
cuagagguuuuaugauauuu

SEQ ID NO: 3803713 - RNA, 23 nt, Human
cuagaguccaagguuuaaagagu

SEQ ID NO: 3803714 - RNA, 21 nt, Human
cuagagucccagguuggcucu

SEQ ID NO: 3803715 - RNA, 19 nt, Human
cuagagucugaacagcugu

SEQ ID NO: 3803716 - RNA, 20 nt, Human
cuagagucugaacagcugua

SEQ ID NO: 3803717 - RNA, 17 nt, Human
cuagagugaacuugggc

SEQ ID NO: 3803718 - RNA, 16 nt, Human
gaagagagcaugagag

SEQ ID NO: 3803719 - RNA, 21 nt, Human
gaagagaggagaggagagagg

SEQ ID NO: 3803720 - RNA, 13 nt, Human
gaagagaggaguu

SEQ ID NO: 3803721 - RNA, 16 nt, Human
gaagagaggaguucaa

SEQ ID NO: 3803722 - RNA, 20 nt, Human
gaagagaggaguucaaugau

SEQ ID NO: 3803723 - RNA, 17 nt, Human
gaagagaucaggaagag

SEQ ID NO: 3803724 - RNA, 16 nt, Human
gaagagauccaaagac

SEQ ID NO: 3803725 - RNA, 17 nt, Human
gaagagauccaaagacu

SEQ ID NO: 3803726 - RNA, 14 nt, Human
gaagagcagcaccu

SEQ ID NO: 3803727 - RNA, 18 nt, Human
gaagagcagcaccuccuc

SEQ ID NO: 3803728 - RNA, 15 nt, Human
gaagagcaggcacau

SEQ ID NO: 3803729 - RNA, 13 nt, Human
gaagagccacagu

SEQ ID NO: 3803730 - RNA, 14 nt, Human
gaagagcccagucu

SEQ ID NO: 3803731 - RNA, 17 nt, Human
gaagagcccagucuguu

SEQ ID NO: 3803732 - RNA, 12 nt, Human
gaagagccccac

SEQ ID NO: 3803733 - RNA, 16 nt, Human
gaagagccccacucuc

SEQ ID NO: 3803734 - RNA, 19 nt, Human
gaagagccuuccacccagg

SEQ ID NO: 3803735 - RNA, 21 nt, Human
gaagagcgcaguguuuugcaa

SEQ ID NO: 3803736 - RNA, 17 nt, Human
gaagagcuauuauauaa

SEQ ID NO: 3803737 - RNA, 20 nt, Human
gaagagcuguucacagccag

SEQ ID NO: 3803738 - RNA, 14 nt, Human
gaagagcuuagaaa

SEQ ID NO: 3803739 - RNA, 16 nt, Human
gaagagcuugcuuuga

SEQ ID NO: 3803740 - RNA, 17 nt, Human
gaagaggaacugggccu

SEQ ID NO: 3803741 - RNA, 15 nt, Human
gaagaggagcccuca

SEQ ID NO: 3803742 - RNA, 18 nt, Human
gaagaggaggggaagagg

SEQ ID NO: 3803743 - RNA, 15 nt, Human
gaagaggcgggccag

SEQ ID NO: 3803744 - RNA, 13 nt, Human
gaagagggccugu

SEQ ID NO: 3803745 - RNA, 18 nt, Human
gaagaggguguguuugaa

SEQ ID NO: 3803746 - RNA, 17 nt, Human
gaagaggguuuuaggua

SEQ ID NO: 3803747 - RNA, 14 nt, Human
gaagaguauggauu

SEQ ID NO: 3803748 - RNA, 14 nt, Human
gaagaguccucuga

SEQ ID NO: 3803749 - RNA, 16 nt, Human
gaagagugaaauacca

SEQ ID NO: 3803750 - RNA, 14 nt, Human
gaagagugagaggg

SEQ ID NO: 3803751 - RNA, 16 nt, Human
gaagaguggaggugga

SEQ ID NO: 3803752 - RNA, 17 nt, Human
gaagaguguacuggggg

SEQ ID NO: 3803753 - RNA, 15 nt, Human
gaagauaaacgugga

SEQ ID NO: 3803754 - RNA, 21 nt, Human
gaagauaaacguggauguuac

SEQ ID NO: 3803755 - RNA, 20 nt, Human
gaagauaauguaaagguuuu

SEQ ID NO: 3803756 - RNA, 13 nt, Human
gaagauaauuguu

SEQ ID NO: 3803757 - RNA, 17 nt, Human
gaagauaauuguugaaa

SEQ ID NO: 3803758 - RNA, 16 nt, Human
gaagauaccaucagca

SEQ ID NO: 3803759 - RNA, 15 nt, Human
gaagauaggcucugc

SEQ ID NO: 3803760 - RNA, 18 nt, Human
gaagauaggcucugcaca

SEQ ID NO: 3803761 - RNA, 20 nt, Human
gaagauaggcucugcacaga

SEQ ID NO: 3803762 - RNA, 14 nt, Human
gaagauaguaacug

SEQ ID NO: 3803763 - RNA, 18 nt, Human
gaagaucacgcuccccgc

SEQ ID NO: 3803764 - RNA, 17 nt, Human
gaagauccuaaaacaaa

SEQ ID NO: 3803765 - RNA, 15 nt, Human
gaagauccugugagg

SEQ ID NO: 3803766 - RNA, 22 nt, Human
gaagaucucugcagggccgcca

SEQ ID NO: 3803767 - RNA, 14 nt, Human
gaagaugaaucaau

SEQ ID NO: 3803768 - RNA, 16 nt, Human
gaagaugaucagaccu

SEQ ID NO: 3803769 - RNA, 13 nt, Human
gaagaugcagcuc

SEQ ID NO: 3803770 - RNA, 24 nt, Human
gaagaugcgagcgcuaucuucaca

SEQ ID NO: 3803771 - RNA, 22 nt, Human
gaagaugcuccagcaacacagc

SEQ ID NO: 3803772 - RNA, 18 nt, Human
gaagauggauaugaccag

SEQ ID NO: 3803773 - RNA, 13 nt, Human
gaagauggcuguu

SEQ ID NO: 3803774 - RNA, 16 nt, Human
gaagauggcuguuagc

SEQ ID NO: 3803775 - RNA, 19 nt, Human
gaagaugucaucccauugu

SEQ ID NO: 3803776 - RNA, 17 nt, Human
gaagauugagauguguu

SEQ ID NO: 3803777 - RNA, 23 nt, Human
gaagauuguuuaucuagauguaa

SEQ ID NO: 3803778 - RNA, 21 nt, Human
gaagauuugcccauuuacacu

SEQ ID NO: 3803779 - RNA, 16 nt, Human
gaagauuuucagucua

SEQ ID NO: 3803780 - RNA, 17 nt, Human
gaagauuuucagucuag

SEQ ID NO: 3803781 - RNA, 20 nt, Human
gaagcaaaaacgaaagcugg

SEQ ID NO: 3803782 - RNA, 13 nt, Human
gaagcaaacacau

SEQ ID NO: 3803783 - RNA, 14 nt, Human
gaagcaaauaaaua

SEQ ID NO: 3803784 - RNA, 23 nt, Human
gaagcaacccaaauguucaucaa

SEQ ID NO: 3803785 - RNA, 20 nt, Human
gaagcaaccucaguaauuua

SEQ ID NO: 3803786 - RNA, 22 nt, Human
gaagcaaccucaguaauuuaga

SEQ ID NO: 3803787 - RNA, 23 nt, Human
gaagcaaggaagauauacaugaa

SEQ ID NO: 3803788 - RNA, 20 nt, Human
gaagcaaguaaaaaggcuaa

SEQ ID NO: 3803789 - RNA, 20 nt, Human
gaagcaaugcuucaucccuu

SEQ ID NO: 3803790 - RNA, 23 nt, Human
gaagcacaccaaucuuacuuugu

SEQ ID NO: 3803791 - RNA, 15 nt, Human
gaagcacagaauauu

SEQ ID NO: 3803792 - RNA, 17 nt, Human
gaagcacagaauauuuu

SEQ ID NO: 3803793 - RNA, 13 nt, Human
gaagcagaauaaa

SEQ ID NO: 3803794 - RNA, 12 nt, Human
gaagcagagaga

SEQ ID NO: 3803795 - RNA, 11 nt, Human
gaagcagagug

SEQ ID NO: 3803796 - RNA, 19 nt, Human
gaagcagcaacuuguccua

SEQ ID NO: 3803797 - RNA, 22 nt, Human
gaagcagccucuccccaggucc

SEQ ID NO: 3803798 - RNA, 12 nt, Human
gaagcagcucuu

SEQ ID NO: 3803799 - RNA, 14 nt, Human
gaagcaggcuacac

SEQ ID NO: 3803800 - RNA, 19 nt, Human
gaagcaggcuacacugaca

SEQ ID NO: 3803801 - RNA, 13 nt, Human
gaagcaggcugga

SEQ ID NO: 3803802 - RNA, 15 nt, Human
gaagcaggcuggagg

SEQ ID NO: 3803803 - RNA, 19 nt, Human
gaagcagguuaaauguuuu

SEQ ID NO: 3803804 - RNA, 19 nt, Human
gaagcagguucccaagcuc

SEQ ID NO: 3803805 - RNA, 19 nt, Human
gaagcagguugaggggcuc

SEQ ID NO: 3803806 - RNA, 22 nt, Human
gaagcagguugaggggcuccug

SEQ ID NO: 3803807 - RNA, 16 nt, Human
gaagcagugcccaggu

SEQ ID NO: 3803808 - RNA, 18 nt, Human
gaagcagugcccaggugg

SEQ ID NO: 3803809 - RNA, 14 nt, Human
gaagcaguuguguc

SEQ ID NO: 3803810 - RNA, 16 nt, Human
gaagcaguugugucag

SEQ ID NO: 3803811 - RNA, 11 nt, Human
gaagcauccag

SEQ ID NO: 3803812 - RNA, 13 nt, Human
gaagcaugaaaaa

SEQ ID NO: 3803813 - RNA, 18 nt, Human
gaagcaugaacagugcac

SEQ ID NO: 3803814 - RNA, 16 nt, Human
gaagcauguaggagaa

SEQ ID NO: 3803815 - RNA, 18 nt, Human
gaagcauucucauuggaa

SEQ ID NO: 3803816 - RNA, 19 nt, Human
gaagcauucuccccagugu

SEQ ID NO: 3803817 - RNA, 17 nt, Human
gaagcauuguaaaauaa

SEQ ID NO: 3803818 - RNA, 17 nt, Human
gaagcauuuacuuugug

SEQ ID NO: 3803819 - RNA, 12 nt, Human
gaagcauuugua

SEQ ID NO: 3803820 - RNA, 18 nt, Human
gaagcauuuguauuuugu

SEQ ID NO: 3803821 - RNA, 22 nt, Human
gaagcauuuguauuuuguguga

SEQ ID NO: 3803822 - RNA, 13 nt, Human
gaagcauuuuaua

SEQ ID NO: 3803823 - RNA, 10 nt, Human
gaagccaaag

SEQ ID NO: 3803824 - RNA, 12 nt, Human
gaagccaaagaa

SEQ ID NO: 3803825 - RNA, 13 nt, Human
gaagccaaagagu

SEQ ID NO: 3803826 - RNA, 18 nt, Human
gaagccacaggccugaga

SEQ ID NO: 3803827 - RNA, 22 nt, Human
gaagccacccucccagcucuga

SEQ ID NO: 3803828 - RNA, 22 nt, Human
gaagccacgguguucugugaua

SEQ ID NO: 3803829 - RNA, 16 nt, Human
gaagccagcaggcucu

SEQ ID NO: 3803830 - RNA, 19 nt, Human
gaagccagcaggcucucag

SEQ ID NO: 3803831 - RNA, 23 nt, Human
gaagccagcaggcucucaggcca

SEQ ID NO: 3803832 - RNA, 12 nt, Human
gaagccagccuu

SEQ ID NO: 3803833 - RNA, 20 nt, Human
gaagccagccuucuuccauc

SEQ ID NO: 3803834 - RNA, 15 nt, Human
gaagccagcugcccu

SEQ ID NO: 3803835 - RNA, 13 nt, Human
gaagccagcuugu

SEQ ID NO: 3803836 - RNA, 22 nt, Human
gaagccagcuuucccugccucu

SEQ ID NO: 3803837 - RNA, 19 nt, Human
gaagccaggaauuucccag

SEQ ID NO: 3803838 - RNA, 13 nt, Human
gaacaacugauac

SEQ ID NO: 3803839 - RNA, 16 nt, Human
gaacaagagaagcauu

SEQ ID NO: 3803840 - RNA, 21 nt, Human
gaacaagcaaacccagacggc

SEQ ID NO: 3803841 - RNA, 13 nt, Human
gaacaagcuucag

SEQ ID NO: 3803842 - RNA, 15 nt, Human
gaacaaggcaaggcu

SEQ ID NO: 3803843 - RNA, 19 nt, Human
gaacaauauugacuuuguc

SEQ ID NO: 3803844 - RNA, 14 nt, Human
gaacaaucaaagca

SEQ ID NO: 3803845 - RNA, 14 nt, Human
gaacacacacauau

SEQ ID NO: 3803846 - RNA, 22 nt, Human
gaacacacuguguccuggugcu

SEQ ID NO: 3803847 - RNA, 15 nt, Human
gaacacagaaagccu

SEQ ID NO: 3803848 - RNA, 14 nt, Human
gaacacaggcagcu

SEQ ID NO: 3803849 - RNA, 15 nt, Human
gaacacauuucucug

SEQ ID NO: 3803850 - RNA, 22 nt, Human
gaacacauuucuuuuuaaaaaa

SEQ ID NO: 3803851 - RNA, 23 nt, Human
gaacacauuucuuuuuaaaaaaa

SEQ ID NO: 3803852 - RNA, 19 nt, Human
gaacaccauugaaggcuua

SEQ ID NO: 3803853 - RNA, 16 nt, Human
gaacacccuauauuuu

SEQ ID NO: 3803854 - RNA, 17 nt, Human
gaacacgcguauuuaca

SEQ ID NO: 3803855 - RNA, 20 nt, Human
gaacacuagacaagccagaa

SEQ ID NO: 3803856 - RNA, 18 nt, Human
gaacacuauuuucagaau

SEQ ID NO: 3803857 - RNA, 19 nt, Human
gaacacuauuuucagaauc

SEQ ID NO: 3803858 - RNA, 15 nt, Human
gaacacuccuucaca

SEQ ID NO: 3803859 - RNA, 17 nt, Human
gaacacuccuucacaga

SEQ ID NO: 3803860 - RNA, 14 nt, Human
gaacacucugagac

SEQ ID NO: 3803861 - RNA, 19 nt, Human
gaacacuggcagacugugu

SEQ ID NO: 3803862 - RNA, 22 nt, Human
gaacacuggggacuuggccucu

SEQ ID NO: 3803863 - RNA, 22 nt, Human
gaacacuuauaagugaagugau

SEQ ID NO: 3803864 - RNA, 20 nt, Human
cuaggaacacuccuucacag

SEQ ID NO: 3803865 - RNA, 15 nt, Human
cuaggaagaauuuua

SEQ ID NO: 3803866 - RNA, 20 nt, Human
cuaggaagaauuuuaaaaau

SEQ ID NO: 3803867 - RNA, 21 nt, Human
cuaggaagaauuuuaaaaaug

SEQ ID NO: 3803868 - RNA, 22 nt, Human
cuaggaagaauuuuaaaaauga

SEQ ID NO: 3803869 - RNA, 19 nt, Human
cuaggaagagcaggacucc

SEQ ID NO: 3803870 - RNA, 14 nt, Human
cuaggaauauagau

SEQ ID NO: 3803871 - RNA, 15 nt, Human
cuaggacacaguucc

SEQ ID NO: 3803872 - RNA, 16 nt, Human
cuaggaccacucagcc

SEQ ID NO: 3803873 - RNA, 21 nt, Human
cuaggaccacucagccccuag

SEQ ID NO: 3803874 - RNA, 22 nt, Human
cuaggaccacucagccccuagg

SEQ ID NO: 3803875 - RNA, 22 nt, Human
cuaggacugaauuaugaaacuu

SEQ ID NO: 3803876 - RNA, 13 nt, Human
cuaggagaagagu

SEQ ID NO: 3803877 - RNA, 20 nt, Human
cuaggagaagaguugaggaa

SEQ ID NO: 3803878 - RNA, 18 nt, Human
cuaggagauaucugaggg

SEQ ID NO: 3803879 - RNA, 21 nt, Human
cuaggagauaucugagggagg

SEQ ID NO: 3803880 - RNA, 13 nt, Human
cuaggagcaaagc

SEQ ID NO: 3803881 - RNA, 16 nt, Human
cuaggagcaaagccug

SEQ ID NO: 3803882 - RNA, 17 nt, Human
cuaggagcaaagccugu

SEQ ID NO: 3803883 - RNA, 20 nt, Human
cuaggagcaaagccuguuca

SEQ ID NO: 3803884 - RNA, 13 nt, Human
cuaggagggagac

SEQ ID NO: 3803885 - RNA, 23 nt, Human
cuaggagggagacacuggccccu

SEQ ID NO: 3803886 - RNA, 15 nt, Human
cuaggaggguccucu

SEQ ID NO: 3803887 - RNA, 21 nt, Human
cuaggauaaaaagccagggcu

SEQ ID NO: 3803888 - RNA, 16 nt, Human
cuaggcaggaccugug

SEQ ID NO: 3803889 - RNA, 16 nt, Human
cuaggcaguaggccgg

SEQ ID NO: 3803890 - RNA, 18 nt, Human
cuaggcaguuagagaugc

SEQ ID NO: 3803891 - RNA, 20 nt, Human
cuaggcaguuagagaugccu

SEQ ID NO: 3803892 - RNA, 20 nt, Human
cuaggcaguucaaagcagga

SEQ ID NO: 3803893 - RNA, 22 nt, Human
cuaggcauucuggaccucuggg

SEQ ID NO: 3803894 - RNA, 19 nt, Human
cuaggccacaccaucuccu

SEQ ID NO: 3803895 - RNA, 15 nt, Human
cuaggccacuccucc

SEQ ID NO: 3803896 - RNA, 16 nt, Human
cuaggccagagcccac

SEQ ID NO: 3803897 - RNA, 17 nt, Human
cuaggcccccacuugcc

SEQ ID NO: 3803898 - RNA, 22 nt, Human
cuaggcccccacuugccucuuc

SEQ ID NO: 3803899 - RNA, 12 nt, Human
cuaggccgggcg

SEQ ID NO: 3803900 - RNA, 15 nt, Human
cuaggccuaguccug

SEQ ID NO: 3803901 - RNA, 15 nt, Human
cuaggccucagccag

SEQ ID NO: 3803902 - RNA, 18 nt, Human
cuaggccucagccagaga

SEQ ID NO: 3803903 - RNA, 17 nt, Human
cuaggccuccuggccca

SEQ ID NO: 3803904 - RNA, 18 nt, Human
cuaggccuccuggcccag

SEQ ID NO: 3803905 - RNA, 23 nt, Human
cuaggccucucaccucugugccu

SEQ ID NO: 3803906 - RNA, 13 nt, Human
cuaggccuggcca

SEQ ID NO: 3803907 - RNA, 14 nt, Human
cuaggccuggccag

SEQ ID NO: 3803908 - RNA, 19 nt, Human
cuaggccuggccagaugca

SEQ ID NO: 3803909 - RNA, 16 nt, Human
cuaggcgagugccagg

SEQ ID NO: 3803910 - RNA, 15 nt, Human
cuaggcgugagaagc

SEQ ID NO: 3803911 - RNA, 22 nt, Human
cuaggcucagagaugugcaccc

SEQ ID NO: 3803912 - RNA, 15 nt, Human
cuaggcucagcggcg

SEQ ID NO: 3803913 - RNA, 17 nt, Human
cuaggcucgccuucccu

SEQ ID NO: 3803914 - RNA, 22 nt, Human
cuaggcucugucuggaagaugg

SEQ ID NO: 3803915 - RNA, 23 nt, Human
cuaggcugcauugaaaagagcug

SEQ ID NO: 3803916 - RNA, 14 nt, Human
cuaggcuggaagga

SEQ ID NO: 3803917 - RNA, 17 nt, Human
cuaggcuggaaggagga

SEQ ID NO: 3803918 - RNA, 19 nt, Human
cuaggcuggaaggaggaag

SEQ ID NO: 3803919 - RNA, 19 nt, Human
cuaggcugggugcccacag

SEQ ID NO: 3803920 - RNA, 22 nt, Human
cuaggcugggugcccacagccc

SEQ ID NO: 3803921 - RNA, 21 nt, Human
cuaggcuuaauaccuggguga

SEQ ID NO: 3803922 - RNA, 16 nt, Human
cuagggaaacuucccg

SEQ ID NO: 3803923 - RNA, 11 nt, Human
cuagggaagaa

SEQ ID NO: 3803924 - RNA, 20 nt, Human
cuagggaagaaagcagaaca

SEQ ID NO: 3803925 - RNA, 14 nt, Human
cuagggaagauaau

SEQ ID NO: 3803926 - RNA, 15 nt, Human
cuagggaccccuccu

SEQ ID NO: 3803927 - RNA, 17 nt, Human
cuagggaccccuccucc

SEQ ID NO: 3803928 - RNA, 13 nt, Human
cuagggaccuggg

SEQ ID NO: 3803929 - RNA, 14 nt, Human
cuagggaccugggg

SEQ ID NO: 3803930 - RNA, 18 nt, Human
cuagggagccauuugaga

SEQ ID NO: 3803931 - RNA, 15 nt, Human
cuagggccuggguuu

SEQ ID NO: 3803932 - RNA, 16 nt, Human
cuagggccuuggaaau

SEQ ID NO: 3803933 - RNA, 14 nt, Human
cuaggggaaugagg

SEQ ID NO: 3803934 - RNA, 22 nt, Human
cuaggggaaugagggggcucag

SEQ ID NO: 3803935 - RNA, 16 nt, Human
cuaggggucaggcucc

SEQ ID NO: 3803936 - RNA, 21 nt, Human
cuaggggucagggaccaagga

SEQ ID NO: 3803937 - RNA, 23 nt, Human
cuaggggucuuguuaagugcagu

SEQ ID NO: 3803938 - RNA, 13 nt, Human
cuaggguccuggg

SEQ ID NO: 3803939 - RNA, 15 nt, Human
cuaggguugcuggag

SEQ ID NO: 3803940 - RNA, 18 nt, Human
cuaggguugcuggagccu

SEQ ID NO: 3803941 - RNA, 19 nt, Human
cuagguacgaugacagugu

SEQ ID NO: 3803942 - RNA, 17 nt, Human
cuagguagagucugagg

SEQ ID NO: 3803943 - RNA, 17 nt, Human
cuagguaggaaaugugg

SEQ ID NO: 3803944 - RNA, 15 nt, Human
cuagguaggguuuaa

SEQ ID NO: 3803945 - RNA, 15 nt, Human
cuaggucaaggccug

SEQ ID NO: 3803946 - RNA, 17 nt, Human
cuaggucaguacccacc

SEQ ID NO: 3803947 - RNA, 21 nt, Human
cuaggucaguacccaccugag

SEQ ID NO: 3803948 - RNA, 22 nt, Human
cuaggucaguacccaccugagc

SEQ ID NO: 3803949 - RNA, 21 nt, Human
cuagguccccauacuccuaug

SEQ ID NO: 3803950 - RNA, 12 nt, Human
cuaggucuccag

SEQ ID NO: 3803951 - RNA, 12 nt, Human
cuagguggaaaa

SEQ ID NO: 3803952 - RNA, 17 nt, Human
cuagguggcaaggcugu

SEQ ID NO: 3803953 - RNA, 13 nt, Human
cuaggugggccag

SEQ ID NO: 3803954 - RNA, 23 nt, Human
cuagguggguugaaagccaagga

SEQ ID NO: 3803955 - RNA, 15 nt, Human
cuagguucaauuccc

SEQ ID NO: 3803956 - RNA, 19 nt, Human
cuagguucccggucccgag

SEQ ID NO: 3803957 - RNA, 13 nt, Human
cuagguucccugu

SEQ ID NO: 3803958 - RNA, 12 nt, Human
cuagguuuaacu

SEQ ID NO: 3803959 - RNA, 12 nt, Human
cuagguuuauga

SEQ ID NO: 3803960 - RNA, 16 nt, Human
cuagguuuaugacagu

SEQ ID NO: 3803961 - RNA, 22 nt, Human
cuaguaaguaauuaugcacuaa

SEQ ID NO: 3803962 - RNA, 16 nt, Human
cuaguaagugccuucc

SEQ ID NO: 3803963 - RNA, 12 nt, Human
cuaguacugugu

SEQ ID NO: 3803964 - RNA, 15 nt, Human
cuaguacuguguacu

SEQ ID NO: 3803965 - RNA, 17 nt, Human
cuaguacuguguacugu

SEQ ID NO: 3803966 - RNA, 17 nt, Human
cuaguaguuccugcuac

SEQ ID NO: 3803967 - RNA, 17 nt, Human
cuaguaucaaaagaaag

SEQ ID NO: 3803968 - RNA, 23 nt, Human
cuaguaucaaaagaaagaaaauc

SEQ ID NO: 3803969 - RNA, 14 nt, Human
cuaguauugacaaa

SEQ ID NO: 3803970 - RNA, 20 nt, Human
cuaguauugacaaaauguua

SEQ ID NO: 3803971 - RNA, 19 nt, Human
cuaguauuucuaugaaaua

SEQ ID NO: 3803972 - RNA, 22 nt, Human
cuaguauuucuaugaaauauua

SEQ ID NO: 3803973 - RNA, 13 nt, Human
cuaguauuugaau

SEQ ID NO: 3803974 - RNA, 14 nt, Human
cuaguauuugaauu

SEQ ID NO: 3803975 - RNA, 15 nt, Human
cuaguauuugaauua

SEQ ID NO: 3803976 - RNA, 24 nt, Human
cuaguauuugaauuaaaacuucuu

SEQ ID NO: 3803977 - RNA, 16 nt, Human
cuagucaagcuccucc

SEQ ID NO: 3803978 - RNA, 21 nt, Human
cuagucaaucaagucuguuua

SEQ ID NO: 3803979 - RNA, 18 nt, Human
cuagucagagagaguguu

SEQ ID NO: 3803980 - RNA, 16 nt, Human
cuagucagccacaugg

SEQ ID NO: 3803981 - RNA, 15 nt, Human
cuagucccuuccaca

SEQ ID NO: 3803982 - RNA, 15 nt, Human
cuaguccggacccac

SEQ ID NO: 3803983 - RNA, 15 nt, Human
cuaguccuuuacuaa

SEQ ID NO: 3803984 - RNA, 21 nt, Human
cuagucguggagaugucuucg

SEQ ID NO: 3803985 - RNA, 23 nt, Human
cuagucuccuuugcacugagggc

SEQ ID NO: 3803986 - RNA, 13 nt, Human
cuagucucucugg

SEQ ID NO: 3803987 - RNA, 18 nt, Human
cuagucugugugcugugg

SEQ ID NO: 3803988 - RNA, 23 nt, Human
cuagucugugugggacuguacac

SEQ ID NO: 3803989 - RNA, 21 nt, Human
cuagugaauguaggcuggcuu

SEQ ID NO: 3803990 - RNA, 17 nt, Human
cuagugacccacaugcc

SEQ ID NO: 3803991 - RNA, 20 nt, Human
cuagugaccccuucccuguc

SEQ ID NO: 3803992 - RNA, 18 nt, Human
cuagugacuuguguccca

SEQ ID NO: 3803993 - RNA, 14 nt, Human
gaaccucagccugg

SEQ ID NO: 3803994 - RNA, 15 nt, Human
gaaccucagccuggc

SEQ ID NO: 3803995 - RNA, 14 nt, Human
gaaccucaggcuuc

SEQ ID NO: 3803996 - RNA, 14 nt, Human
gaaccucccagagg

SEQ ID NO: 3803997 - RNA, 13 nt, Human
gaaccuccuuucu

SEQ ID NO: 3803998 - RNA, 22 nt, Human
gaaccucgaguacugugggcaa

SEQ ID NO: 3803999 - RNA, 12 nt, Human
gaaccucugucu

SEQ ID NO: 3804000 - RNA, 17 nt, Human
gaaccugacguagcugc

SEQ ID NO: 3804001 - RNA, 15 nt, Human
gaaccugaugaaaau

SEQ ID NO: 3804002 - RNA, 20 nt, Human
gaaccugaugaaaauaaaga

SEQ ID NO: 3804003 - RNA, 17 nt, Human
gaaccugcacacgagca

SEQ ID NO: 3804004 - RNA, 12 nt, Human
gaaccuggaacu

SEQ ID NO: 3804005 - RNA, 16 nt, Human
gaaccuggaacuuggg

SEQ ID NO: 3804006 - RNA, 18 nt, Human
gaaccuggaccaaagcug

SEQ ID NO: 3804007 - RNA, 12 nt, Human
gaaccuggccuu

SEQ ID NO: 3804008 - RNA, 14 nt, Human
gaaccuggccuuca

SEQ ID NO: 3804009 - RNA, 16 nt, Human
cuggagucuccugagg

SEQ ID NO: 3804010 - RNA, 14 nt, Human
cuggagugcagugg

SEQ ID NO: 3804011 - RNA, 23 nt, Human
cuggaguggccacuaagcagagg

SEQ ID NO: 3804012 - RNA, 18 nt, Human
cuggaguggcucgccagg

SEQ ID NO: 3804013 - RNA, 19 nt, Human
cuggaguguggcugaggag

SEQ ID NO: 3804014 - RNA, 16 nt, Human
cuggaguuacauuaau

SEQ ID NO: 3804015 - RNA, 16 nt, Human
cuggaguuagggacug

SEQ ID NO: 3804016 - RNA, 23 nt, Human
cuggaguuauugaagcagagugg

SEQ ID NO: 3804017 - RNA, 24 nt, Human
cuggaguuauugaagcagaguggc

SEQ ID NO: 3804018 - RNA, 15 nt, Human
cuggaguugaucugg

SEQ ID NO: 3804019 - RNA, 16 nt, Human
cuggaguugaucugga

SEQ ID NO: 3804020 - RNA, 20 nt, Human
cuggaguugaucuggaaccc

SEQ ID NO: 3804021 - RNA, 14 nt, Human
cuggaguugcauug

SEQ ID NO: 3804022 - RNA, 15 nt, Human
cuggaguugcauuga

SEQ ID NO: 3804023 - RNA, 14 nt, Human
cuggaguuugggau

SEQ ID NO: 3804024 - RNA, 17 nt, Human
cuggauaaagccacuga

SEQ ID NO: 3804025 - RNA, 17 nt, Human
cuggauaacuuccacag

SEQ ID NO: 3804026 - RNA, 13 nt, Human
cuggauaauuuug

SEQ ID NO: 3804027 - RNA, 15 nt, Human
cuggauaauuuugca

SEQ ID NO: 3804028 - RNA, 20 nt, Human
cuggauacaguauaaaaaua

SEQ ID NO: 3804029 - RNA, 14 nt, Human
cuggauagacgagu

SEQ ID NO: 3804030 - RNA, 13 nt, Human
cuggauaggagcc

SEQ ID NO: 3804031 - RNA, 18 nt, Human
cuggauaggagccugcug

SEQ ID NO: 3804032 - RNA, 21 nt, Human
cuggauauuuucaaauuguau

SEQ ID NO: 3804033 - RNA, 22 nt, Human
cuggauauuuucaaauuguauc

SEQ ID NO: 3804034 - RNA, 23 nt, Human
cuggaucaaaguaggcaggacca

SEQ ID NO: 3804035 - RNA, 14 nt, Human
cuggaucacagcug

SEQ ID NO: 3804036 - RNA, 14 nt, Human
cuggaucagcgugg

SEQ ID NO: 3804037 - RNA, 18 nt, Human
cuggaucagcguggccuu

SEQ ID NO: 3804038 - RNA, 12 nt, Human
cuggaucaguaa

SEQ ID NO: 3804039 - RNA, 23 nt, Human
cuggauccccucugucuacaaau

SEQ ID NO: 3804040 - RNA, 16 nt, Human
cuggaucuaccuggag

SEQ ID NO: 3804041 - RNA, 13 nt, Human
cuggaucucccag

SEQ ID NO: 3804042 - RNA, 15 nt, Human
cuggaucuccccacu

SEQ ID NO: 3804043 - RNA, 14 nt, Human
cuggaucugugagg

SEQ ID NO: 3804044 - RNA, 22 nt, Human
cuggaugaaauaacuccuucuu

SEQ ID NO: 3804045 - RNA, 20 nt, Human
cuggaugaaguuaucuggcu

SEQ ID NO: 3804046 - RNA, 15 nt, Human
cuggaugacauuaaa

SEQ ID NO: 3804047 - RNA, 20 nt, Human
cuggaugagcucccacaagc

SEQ ID NO: 3804048 - RNA, 22 nt, Human
cuggaugaguagcgcuauaguu

SEQ ID NO: 3804049 - RNA, 15 nt, Human
cuggaugauacuaau

SEQ ID NO: 3804050 - RNA, 16 nt, Human
cuggaugauacuaaua

SEQ ID NO: 3804051 - RNA, 18 nt, Human
cuggaugauacuaauaaa

SEQ ID NO: 3804052 - RNA, 20 nt, Human
cuggaugauggucuucagcc

SEQ ID NO: 3804053 - RNA, 15 nt, Human
cuggaugcagccuca

SEQ ID NO: 3804054 - RNA, 16 nt, Human
cuggaugcagccucac

SEQ ID NO: 3804055 - RNA, 12 nt, Human
cuggaugccauc

SEQ ID NO: 3804056 - RNA, 15 nt, Human
cuggaugcccaggaa

SEQ ID NO: 3804057 - RNA, 16 nt, Human
cuggaugcccaggaau

SEQ ID NO: 3804058 - RNA, 15 nt, Human
cuggauggagcccag

SEQ ID NO: 3804059 - RNA, 16 nt, Human
cuggauggggcugcac

SEQ ID NO: 3804060 - RNA, 18 nt, Human
cuggauggugugccuucc

SEQ ID NO: 3804061 - RNA, 21 nt, Human
cuggauggugugccuuccaga

SEQ ID NO: 3804062 - RNA, 19 nt, Human
cuggaugguucccagaggg

SEQ ID NO: 3804063 - RNA, 16 nt, Human
cuggaugucugaacuu

SEQ ID NO: 3804064 - RNA, 17 nt, Human
cuggaugucugaacuuu

SEQ ID NO: 3804065 - RNA, 21 nt, Human
cuggaugucugaacuuuggga

SEQ ID NO: 3804066 - RNA, 13 nt, Human
cuggauuaaacuu

SEQ ID NO: 3804067 - RNA, 23 nt, Human
cuggauuaaacuuaaucuaaaug

SEQ ID NO: 3804068 - RNA, 23 nt, Human
cuggauuauucaaaaugauguau

SEQ ID NO: 3804069 - RNA, 16 nt, Human
cuggauuauucugggg

SEQ ID NO: 3804070 - RNA, 14 nt, Human
cuggauucagccuu

SEQ ID NO: 3804071 - RNA, 15 nt, Human
cugcucuugggcaau

SEQ ID NO: 3804072 - RNA, 19 nt, Human
cugcucuugggcaauauuc

SEQ ID NO: 3804073 - RNA, 15 nt, Human
cugcucuuucucugc

SEQ ID NO: 3804074 - RNA, 16 nt, Human
cugcucuuucucugcc

SEQ ID NO: 3804075 - RNA, 19 nt, Human
cugcucuuucucugccagu

SEQ ID NO: 3804076 - RNA, 20 nt, Human
cugcucuuucucugccagug

SEQ ID NO: 3804077 - RNA, 21 nt, Human
cugcucuuucucugccaguga

SEQ ID NO: 3804078 - RNA, 22 nt, Human
cugcucuuucucugccagugac

SEQ ID NO: 3804079 - RNA, 20 nt, Human
cugcugaaaaccaucuggcc

SEQ ID NO: 3804080 - RNA, 13 nt, Human
cugcugaaacaac

SEQ ID NO: 3804081 - RNA, 20 nt, Human
cugcugaagcugccugcuuu

SEQ ID NO: 3804082 - RNA, 16 nt, Human
cugcugaaggcucauu

SEQ ID NO: 3804083 - RNA, 15 nt, Human
cugcugaaggcucga

SEQ ID NO: 3804084 - RNA, 23 nt, Human
cugcugaaggcucgagcaugccu

SEQ ID NO: 3804085 - RNA, 24 nt, Human
cugcugaaggcucgagcaugccug

SEQ ID NO: 3804086 - RNA, 18 nt, Human
cugcugacagacacaggc

SEQ ID NO: 3804087 - RNA, 19 nt, Human
cugcugacagacacaggcc

SEQ ID NO: 3804088 - RNA, 20 nt, Human
cugcugacagacacaggccc

SEQ ID NO: 3804089 - RNA, 11 nt, Human
cugcugaccaa

SEQ ID NO: 3804090 - RNA, 20 nt, Human
cugcugaccaauugugcugc

SEQ ID NO: 3804091 - RNA, 22 nt, Human
cugcugaccaauugugcugcca

SEQ ID NO: 3804092 - RNA, 22 nt, Human
cugcugacccagccuguuuuaa

SEQ ID NO: 3804093 - RNA, 16 nt, Human
cugcugaccuccacag

SEQ ID NO: 3804094 - RNA, 19 nt, Human
cugcugaccuccacagcuu

SEQ ID NO: 3804095 - RNA, 13 nt, Human
cugcugaccugcu

SEQ ID NO: 3804096 - RNA, 18 nt, Human
cugcugacuguuuucucu

SEQ ID NO: 3804097 - RNA, 14 nt, Human
cugcugagaaccug

SEQ ID NO: 3804098 - RNA, 17 nt, Human
cugcugagaaccuggcc

SEQ ID NO: 3804099 - RNA, 18 nt, Human
cugcugagaaccuggccu

SEQ ID NO: 3804100 - RNA, 16 nt, Human
cugcugagagacccaa

SEQ ID NO: 3804101 - RNA, 16 nt, Human
cugcugagauccugga

SEQ ID NO: 3804102 - RNA, 23 nt, Human
cugcugagauccuggacugaggg

SEQ ID NO: 3804103 - RNA, 15 nt, Human
cugcugagcucugag

SEQ ID NO: 3804104 - RNA, 16 nt, Human
cugcugagcucugaga

SEQ ID NO: 3804105 - RNA, 23 nt, Human
cugcugagcucugagaggcccug

SEQ ID NO: 3804106 - RNA, 17 nt, Human
cugcugagggaccagcc

SEQ ID NO: 3804107 - RNA, 19 nt, Human
cugcugaguccgaccuggc

SEQ ID NO: 3804108 - RNA, 15 nt, Human
cugcugcaaggccuu

SEQ ID NO: 3804109 - RNA, 23 nt, Human
cugcugcaccaacccagccgcug

SEQ ID NO: 3804110 - RNA, 22 nt, Human
cugcugcagaggggcaggcccu

SEQ ID NO: 3804111 - RNA, 20 nt, Human
cugcugcaggggcucuggag

SEQ ID NO: 3804112 - RNA, 14 nt, Human
cugcugcaugcccu

SEQ ID NO: 3804113 - RNA, 15 nt, Human
cugcugcaugcccuc

SEQ ID NO: 3804114 - RNA, 21 nt, Human
cugcugcaugcccucucaggc

SEQ ID NO: 3804115 - RNA, 13 nt, Human
cugcugccacuga

SEQ ID NO: 3804116 - RNA, 18 nt, Human
cugcugccaguaccagcc

SEQ ID NO: 3804117 - RNA, 14 nt, Human
cugcugcccaaucu

SEQ ID NO: 3804118 - RNA, 12 nt, Human
cugcugcccagc

SEQ ID NO: 3804119 - RNA, 13 nt, Human
cugcugcccaggc

SEQ ID NO: 3804120 - RNA, 19 nt, Human
cugcugcccaggcugugca

SEQ ID NO: 3804121 - RNA, 14 nt, Human
cugcugcccccacc

SEQ ID NO: 3804122 - RNA, 12 nt, Human
cugcugcccucc

SEQ ID NO: 3804123 - RNA, 13 nt, Human
cugcugcccucca

SEQ ID NO: 3804124 - RNA, 19 nt, Human
cugcugccgccccacccag

SEQ ID NO: 3804125 - RNA, 17 nt, Human
cugcugccucuuucccu

SEQ ID NO: 3804126 - RNA, 21 nt, Human
cugcugccucuuucccuagga

SEQ ID NO: 3804127 - RNA, 22 nt, Human
cugcugccucuuucccuaggaa

SEQ ID NO: 3804128 - RNA, 11 nt, Human
cugcugccugc

SEQ ID NO: 3804129 - RNA, 21 nt, Human
cugcugccugcccgcacagca

SEQ ID NO: 3804130 - RNA, 14 nt, Human
cugcugccugcuuu

SEQ ID NO: 3804131 - RNA, 12 nt, Human
cugcugccuggc

SEQ ID NO: 3804132 - RNA, 23 nt, Human
cugcugccuggccacugcucccu

SEQ ID NO: 3804133 - RNA, 23 nt, Human
cugcugccuucugacggcccugc

SEQ ID NO: 3804134 - RNA, 16 nt, Human
cugcugcuacaauguc

SEQ ID NO: 3804135 - RNA, 13 nt, Human
cugcugcucccuc

SEQ ID NO: 3804136 - RNA, 17 nt, Human
cugcugcucccucagac

SEQ ID NO: 3804137 - RNA, 21 nt, Human
cugcugcucccucagacuggg

SEQ ID NO: 3804138 - RNA, 22 nt, Human
cugcugcucuuggcuggaccca

SEQ ID NO: 3804139 - RNA, 13 nt, Human
cugcugcugagaa

SEQ ID NO: 3804140 - RNA, 19 nt, Human
cugcugcugagaaccuggc

SEQ ID NO: 3804141 - RNA, 20 nt, Human
cugcugcugagaaccuggcc

SEQ ID NO: 3804142 - RNA, 22 nt, Human
cugcugcugagaaccuggccuu

SEQ ID NO: 3804143 - RNA, 12 nt, Human
cugcugcugccu

SEQ ID NO: 3804144 - RNA, 17 nt, Human
cugcugcugccuggcca

SEQ ID NO: 3804145 - RNA, 16 nt, Human
cugcugcugcgcccuu

SEQ ID NO: 3804146 - RNA, 15 nt, Human
cugcugcugcugcug

SEQ ID NO: 3804147 - RNA, 14 nt, Human
cugcugcugcugug

SEQ ID NO: 3804148 - RNA, 13 nt, Human
cugcugcuggcug

SEQ ID NO: 3804149 - RNA, 14 nt, Human
cugcugcuggcugg

SEQ ID NO: 3804150 - RNA, 13 nt, Human
cugcugcugggcu

SEQ ID NO: 3804151 - RNA, 14 nt, Human
cugcugcugucccu

SEQ ID NO: 3804152 - RNA, 16 nt, Human
cugcugcugucugggu

SEQ ID NO: 3804153 - RNA, 18 nt, Human
cugcugcugucugggugc

SEQ ID NO: 3804154 - RNA, 20 nt, Human
cugcuuugcgugcccggggc

SEQ ID NO: 3804155 - RNA, 21 nt, Human
cugcuuugcgugcccggggca

SEQ ID NO: 3804156 - RNA, 23 nt, Human
cugcuuugcgugcccggggcagc

SEQ ID NO: 3804157 - RNA, 21 nt, Human
cugcuuugcucuucaagaaau

SEQ ID NO: 3804158 - RNA, 22 nt, Human
cugcuuugggauuuaauuucca

SEQ ID NO: 3804159 - RNA, 21 nt, Human
cugcuuugggcugcccuggug

SEQ ID NO: 3804160 - RNA, 19 nt, Human
cugcuuuguuaccuuaaaa

SEQ ID NO: 3804161 - RNA, 20 nt, Human
cugcuuuguugugugccucu

SEQ ID NO: 3804162 - RNA, 15 nt, Human
cugcuuuucccuaag

SEQ ID NO: 3804163 - RNA, 18 nt, Human
cugcuuuucccuaagcca

SEQ ID NO: 3804164 - RNA, 23 nt, Human
cugcuuuuccuuggggcaggcag

SEQ ID NO: 3804165 - RNA, 14 nt, Human
cugcuuuucugccc

SEQ ID NO: 3804166 - RNA, 19 nt, Human
cugcuuuucugcccuggcu

SEQ ID NO: 3804167 - RNA, 21 nt, Human
cugcuuuucugcccuggcugc

SEQ ID NO: 3804168 - RNA, 22 nt, Human
cugcuuuucugcccuggcugcu

SEQ ID NO: 3804169 - RNA, 24 nt, Human
cugcuuuucugcccuggcugcugc

SEQ ID NO: 3804170 - RNA, 21 nt, Human
cugcuuuugucuaugggacuc

SEQ ID NO: 3804171 - RNA, 13 nt, Human
cugcuuuuugaaa

SEQ ID NO: 3804172 - RNA, 18 nt, Human
cugcuuuuugaaaugaaa

SEQ ID NO: 3804173 - RNA, 16 nt, Human
cuggaaaccacagucc

SEQ ID NO: 3804174 - RNA, 17 nt, Human
cuggaaaccuuccaccc

SEQ ID NO: 3804175 - RNA, 11 nt, Human
cuggaaagaag

SEQ ID NO: 3804176 - RNA, 21 nt, Human
cuggaaaggcucagucucagg

SEQ ID NO: 3804177 - RNA, 22 nt, Human
cuggaaaggcucagucucagga

SEQ ID NO: 3804178 - RNA, 15 nt, Human
cuggaaaggggagag

SEQ ID NO: 3804179 - RNA, 17 nt, Human
cuggaaaggggagagcc

SEQ ID NO: 3804180 - RNA, 23 nt, Human
cuggaaaggggagagccugcugg

SEQ ID NO: 3804181 - RNA, 19 nt, Human
cuggaaaggggggagcugg

SEQ ID NO: 3804182 - RNA, 20 nt, Human
cuggaaaggggggagcuggg

SEQ ID NO: 3804183 - RNA, 21 nt, Human
cuggaaaucaggguuaguauu

SEQ ID NO: 3804184 - RNA, 16 nt, Human
cuggaacaaauuauuu

SEQ ID NO: 3804185 - RNA, 17 nt, Human
cuggaacaaauuauuuu

SEQ ID NO: 3804186 - RNA, 21 nt, Human
cuggaacacuagacaagccag

SEQ ID NO: 3804187 - RNA, 17 nt, Human
cuggaacauccuuugca

SEQ ID NO: 3804188 - RNA, 15 nt, Human
cuggaaccaucagaa

SEQ ID NO: 3804189 - RNA, 16 nt, Human
cuggaacccagacuca

SEQ ID NO: 3804190 - RNA, 12 nt, Human
cuggaaccucag

SEQ ID NO: 3804191 - RNA, 23 nt, Human
cuggaaccucagccuggccagac

SEQ ID NO: 3804192 - RNA, 19 nt, Human
cuggaaccuugcuguccug

SEQ ID NO: 3804193 - RNA, 17 nt, Human
cuggaacucagugugac

SEQ ID NO: 3804194 - RNA, 23 nt, Human
cuggaacucuaucugggccuggg

SEQ ID NO: 3804195 - RNA, 16 nt, Human
cuggaacugucucuca

SEQ ID NO: 3804196 - RNA, 16 nt, Human
cuggaacuugaacuga

SEQ ID NO: 3804197 - RNA, 19 nt, Human
cuggaagaacaggccucuc

SEQ ID NO: 3804198 - RNA, 13 nt, Human
cuggaagacagag

SEQ ID NO: 3804199 - RNA, 13 nt, Human
cuggaagagagga

SEQ ID NO: 3804200 - RNA, 12 nt, Human
cuggaagcacag

SEQ ID NO: 3804201 - RNA, 19 nt, Human
cuggaagcacagaaaacua

SEQ ID NO: 3804202 - RNA, 22 nt, Human
cuggaagcacagaaaacuagaa

SEQ ID NO: 3804203 - RNA, 15 nt, Human
cuggaagcacauguu

SEQ ID NO: 3804204 - RNA, 14 nt, Human
cuggaagcagugcc

SEQ ID NO: 3804205 - RNA, 17 nt, Human
cuggaagcagugcccag

SEQ ID NO: 3804206 - RNA, 22 nt, Human
cuggaagcauuuguuucuacuu

SEQ ID NO: 3804207 - RNA, 17 nt, Human
cuggaagccagcuuucc

SEQ ID NO: 3804208 - RNA, 22 nt, Human
cuggaagcuaauuugcauuaaa

SEQ ID NO: 3804209 - RNA, 21 nt, Human
cuggaagcuuuguccccugcu

SEQ ID NO: 3804210 - RNA, 17 nt, Human
cuggaaggggcccgugg

SEQ ID NO: 3804211 - RNA, 19 nt, Human
cuggaaggggcccguggga

SEQ ID NO: 3804212 - RNA, 16 nt, Human
cuggaaguccaaugug

SEQ ID NO: 3804213 - RNA, 20 nt, Human
cuggaagugcuaauuuugaa

SEQ ID NO: 3804214 - RNA, 13 nt, Human
cuggaauaagaag

SEQ ID NO: 3804215 - RNA, 21 nt, Human
cuggaauaagaagcaaauaaa

SEQ ID NO: 3804216 - RNA, 19 nt, Human
cuggaaucuggagaccagg

SEQ ID NO: 3804217 - RNA, 20 nt, Human
cuggaauggaaggguucugg

SEQ ID NO: 3804218 - RNA, 23 nt, Human
cuggaauuccuaacuuuucaaug

SEQ ID NO: 3804219 - RNA, 21 nt, Human
cuggaauuugcaagucauggc

SEQ ID NO: 3804220 - RNA, 13 nt, Human
cuggaauuuuuau

SEQ ID NO: 3804221 - RNA, 15 nt, Human
cuggaauuuuuuauu

SEQ ID NO: 3804222 - RNA, 17 nt, Human
cuggaauuuuuuauucu

SEQ ID NO: 3804223 - RNA, 18 nt, Human
cuggaauuuuuuauucuu

SEQ ID NO: 3804224 - RNA, 15 nt, Human
cuggacaagcagagg

SEQ ID NO: 3804225 - RNA, 14 nt, Human
cuggacacaggccu

SEQ ID NO: 3804226 - RNA, 13 nt, Human
cuggacagagggg

SEQ ID NO: 3804227 - RNA, 14 nt, Human
cuggacagagggga

SEQ ID NO: 3804228 - RNA, 22 nt, Human
cuggacagaggggacucugggc

SEQ ID NO: 3804229 - RNA, 14 nt, Human
cuggacagccccac

SEQ ID NO: 3804230 - RNA, 16 nt, Human
cuggacagcugugccu

SEQ ID NO: 3804231 - RNA, 17 nt, Human
cuggacagcugugccuc

SEQ ID NO: 3804232 - RNA, 18 nt, Human
cuggacagcugugccucg

SEQ ID NO: 3804233 - RNA, 20 nt, Human
cuggacagcugugccucgcu

SEQ ID NO: 3804234 - RNA, 12 nt, Human
cuggacagcuug

SEQ ID NO: 3804235 - RNA, 14 nt, Human
ccucccuucucccu

SEQ ID NO: 3804236 - RNA, 15 nt, Human
ccucccuucucccug

SEQ ID NO: 3804237 - RNA, 17 nt, Human
ccucccuucucccugga

SEQ ID NO: 3804238 - RNA, 17 nt, Human
ccucccuucugcuacug

SEQ ID NO: 3804239 - RNA, 12 nt, Human
ccucccuuucuc

SEQ ID NO: 3804240 - RNA, 17 nt, Human
ccucccuuuuuccuugu

SEQ ID NO: 3804241 - RNA, 18 nt, Human
ccucccuuuuuccuuguc

SEQ ID NO: 3804242 - RNA, 19 nt, Human
ccucccuuuuuccuugucc

SEQ ID NO: 3804243 - RNA, 20 nt, Human
ccuccgacagcccccucugc

SEQ ID NO: 3804244 - RNA, 20 nt, Human
ccuccgaccacuuccagggg

SEQ ID NO: 3804245 - RNA, 15 nt, Human
ccuccgauccuuccu

SEQ ID NO: 3804246 - RNA, 18 nt, Human
ccuccgccaaugcacggc

SEQ ID NO: 3804247 - RNA, 20 nt, Human
ccuccgccaaugcacggccu

SEQ ID NO: 3804248 - RNA, 14 nt, Human
ccuccgccaggcga

SEQ ID NO: 3804249 - RNA, 14 nt, Human
ccuccgccauccac

SEQ ID NO: 3804250 - RNA, 13 nt, Human
ccuccgcccugcc

SEQ ID NO: 3804251 - RNA, 15 nt, Human
ccuccgcccugccac

SEQ ID NO: 3804252 - RNA, 18 nt, Human
ccuccgcccugccacuca

SEQ ID NO: 3804253 - RNA, 19 nt, Human
ccuccgccuucacuccggu

SEQ ID NO: 3804254 - RNA, 15 nt, Human
ccuccgcggcgggcc

SEQ ID NO: 3804255 - RNA, 13 nt, Human
ccuccggacuggu

SEQ ID NO: 3804256 - RNA, 21 nt, Human
ccuccggccaggugccuccug

SEQ ID NO: 3804257 - RNA, 12 nt, Human
ccuccggccucc

SEQ ID NO: 3804258 - RNA, 15 nt, Human
ccuccggccuccccu

SEQ ID NO: 3804259 - RNA, 17 nt, Human
ccuccggcgucagccuc

SEQ ID NO: 3804260 - RNA, 23 nt, Human
ccuccggcgucagccuccagccu

SEQ ID NO: 3804261 - RNA, 15 nt, Human
ccuccgggaccccca

SEQ ID NO: 3804262 - RNA, 16 nt, Human
ccuccguauuucagac

SEQ ID NO: 3804263 - RNA, 19 nt, Human
ccuccgucacuaccuggcu

SEQ ID NO: 3804264 - RNA, 15 nt, Human
ccuccguccauauca

SEQ ID NO: 3804265 - RNA, 15 nt, Human
ccuccuaaaaggccc

SEQ ID NO: 3804266 - RNA, 21 nt, Human
ccuccuaccccucccagcuga

SEQ ID NO: 3804267 - RNA, 19 nt, Human
ccuccuaccgaaaccuugc

SEQ ID NO: 3804268 - RNA, 15 nt, Human
ccuccuagccaccca

SEQ ID NO: 3804269 - RNA, 20 nt, Human
ccuccuagggaaaaguucau

SEQ ID NO: 3804270 - RNA, 20 nt, Human
ccuccuagggcauuguaucu

SEQ ID NO: 3804271 - RNA, 19 nt, Human
ccuccuauucuauaaaacu

SEQ ID NO: 3804272 - RNA, 13 nt, Human
ccuccucaccccc

SEQ ID NO: 3804273 - RNA, 16 nt, Human
ccuccucacccccagc

SEQ ID NO: 3804274 - RNA, 13 nt, Human
ccuccucaccuca

SEQ ID NO: 3804275 - RNA, 16 nt, Human
ccuccucaccucaugc

SEQ ID NO: 3804276 - RNA, 13 nt, Human
ccuccucaccucu

SEQ ID NO: 3804277 - RNA, 14 nt, Human
ccuccucagaucuu

SEQ ID NO: 3804278 - RNA, 23 nt, Human
ccuccucaucccguguucuccuu

SEQ ID NO: 3804279 - RNA, 19 nt, Human
ccuccuccaaaggcccccu

SEQ ID NO: 3804280 - RNA, 14 nt, Human
ccuccuccaccacc

SEQ ID NO: 3804281 - RNA, 18 nt, Human
ccuccuccaccaccgccc

SEQ ID NO: 3804282 - RNA, 17 nt, Human
ccuccuccaccucaccu

SEQ ID NO: 3804283 - RNA, 18 nt, Human
ccuccuccagccccuguc

SEQ ID NO: 3804284 - RNA, 18 nt, Human
ccuccuccagggacagca

SEQ ID NO: 3804285 - RNA, 23 nt, Human
ccuccucccacccggcugcagag

SEQ ID NO: 3804286 - RNA, 12 nt, Human
ccuccucccaug

SEQ ID NO: 3804287 - RNA, 13 nt, Human
ccuccucccaugu

SEQ ID NO: 3804288 - RNA, 18 nt, Human
ccuccucccaugucacug

SEQ ID NO: 3804289 - RNA, 13 nt, Human
ccuccuccccacu

SEQ ID NO: 3804290 - RNA, 14 nt, Human
ccuccuccccacuu

SEQ ID NO: 3804291 - RNA, 14 nt, Human
ccuccucccucccu

SEQ ID NO: 3804292 - RNA, 17 nt, Human
ccuccucccugcaucug

SEQ ID NO: 3804293 - RNA, 14 nt, Human
ccuccucccuuagc

SEQ ID NO: 3804294 - RNA, 12 nt, Human
ccuccuccugac

SEQ ID NO: 3804295 - RNA, 13 nt, Human
ccuccuccuuccc

SEQ ID NO: 3804296 - RNA, 15 nt, Human
ccuccuccuuccuag

SEQ ID NO: 3804297 - RNA, 17 nt, Human
ccuccucggcuggcugu

SEQ ID NO: 3804298 - RNA, 21 nt, Human
ccuccucuaacaggggcuggu

SEQ ID NO: 3804299 - RNA, 19 nt, Human
cuggccuggcccugcccug

SEQ ID NO: 3804300 - RNA, 21 nt, Human
cuggccuggcccugcccugag

SEQ ID NO: 3804301 - RNA, 23 nt, Human
cuggccuggcccugcccugagga

SEQ ID NO: 3804302 - RNA, 13 nt, Human
cuggccuggccug

SEQ ID NO: 3804303 - RNA, 17 nt, Human
cuggccuggccuggccc

SEQ ID NO: 3804304 - RNA, 16 nt, Human
cuggccuggggucagg

SEQ ID NO: 3804305 - RNA, 18 nt, Human
cuggccugucugugaaga

SEQ ID NO: 3804306 - RNA, 17 nt, Human
cuggccuuccacuuggc

SEQ ID NO: 3804307 - RNA, 17 nt, Human
cuggccuucggccucca

SEQ ID NO: 3804308 - RNA, 19 nt, Human
cuggccuugggauccaggc

SEQ ID NO: 3804309 - RNA, 22 nt, Human
cuggccuugggauccaggcccc

SEQ ID NO: 3804310 - RNA, 15 nt, Human
cuggccuuguccuca

SEQ ID NO: 3804311 - RNA, 19 nt, Human
cuggccuuuguaagugcag

SEQ ID NO: 3804312 - RNA, 21 nt, Human
cuggccuuuuucauuuaucua

SEQ ID NO: 3804313 - RNA, 13 nt, Human
cuggcgcagccaa

SEQ ID NO: 3804314 - RNA, 13 nt, Human
cuggcgcaggugg

SEQ ID NO: 3804315 - RNA, 21 nt, Human
cuggcgccaacaacuucucca

SEQ ID NO: 3804316 - RNA, 22 nt, Human
cuggcgccaacaacuucuccau

SEQ ID NO: 3804317 - RNA, 19 nt, Human
cuggcgccaucgccgggac

SEQ ID NO: 3804318 - RNA, 15 nt, Human
cuggcgccuccgagg

SEQ ID NO: 3804319 - RNA, 18 nt, Human
cuggcggcugggguccca

SEQ ID NO: 3804320 - RNA, 13 nt, Human
cuggcgggauggg

SEQ ID NO: 3804321 - RNA, 19 nt, Human
cuggcgggaugggccaccg

SEQ ID NO: 3804322 - RNA, 15 nt, Human
cuggcggggggccca

SEQ ID NO: 3804323 - RNA, 16 nt, Human
cuggcggggggcccau

SEQ ID NO: 3804324 - RNA, 22 nt, Human
cuggcguagaaguuuuuguacu

SEQ ID NO: 3804325 - RNA, 13 nt, Human
cuggcgucugucu

SEQ ID NO: 3804326 - RNA, 14 nt, Human
cuggcgucugucuu

SEQ ID NO: 3804327 - RNA, 15 nt, Human
cuggcgugcaguggu

SEQ ID NO: 3804328 - RNA, 20 nt, Human
cuggcuaaagauaauugcua

SEQ ID NO: 3804329 - RNA, 20 nt, Human
cuggcuagaggccagcccca

SEQ ID NO: 3804330 - RNA, 17 nt, Human
cuggcuagaguccucac

SEQ ID NO: 3804331 - RNA, 19 nt, Human
cuggcuagaguccucacuc

SEQ ID NO: 3804332 - RNA, 18 nt, Human
cuggcuauagaugucuuu

SEQ ID NO: 3804333 - RNA, 23 nt, Human
cuggcuaucaaagaauaagaaaa

SEQ ID NO: 3804334 - RNA, 14 nt, Human
cuggcuaugcauuu

SEQ ID NO: 3804335 - RNA, 23 nt, Human
cuggcucacacuuggcucugagg

SEQ ID NO: 3804336 - RNA, 12 nt, Human
cuggcucacaga

SEQ ID NO: 3804337 - RNA, 16 nt, Human
cuggcucacagacugg

SEQ ID NO: 3804338 - RNA, 19 nt, Human
cuggcucacagacuggaga

SEQ ID NO: 3804339 - RNA, 16 nt, Human
cuggcucacaguacag

SEQ ID NO: 3804340 - RNA, 19 nt, Human
cuggcucacaguacagcau

SEQ ID NO: 3804341 - RNA, 14 nt, Human
cuggcucacccagu

SEQ ID NO: 3804342 - RNA, 21 nt, Human
cuggcucagguggggucacuc

SEQ ID NO: 3804343 - RNA, 20 nt, Human
cuggcucauauuccugcagc

SEQ ID NO: 3804344 - RNA, 22 nt, Human
cuggcucauauuccugcagccu

SEQ ID NO: 3804345 - RNA, 23 nt, Human
cuggcucauauuccugcagccug

SEQ ID NO: 3804346 - RNA, 24 nt, Human
cuggcucauauuccugcagccugg

SEQ ID NO: 3804347 - RNA, 19 nt, Human
cuggcuccaaacccucgag

SEQ ID NO: 3804348 - RNA, 21 nt, Human
cuggcuccagaugcagggcag

SEQ ID NO: 3804349 - RNA, 13 nt, Human
cuggcuccagccu

SEQ ID NO: 3804350 - RNA, 14 nt, Human
cuggcuccagcugg

SEQ ID NO: 3804351 - RNA, 17 nt, Human
cuggcuccagugaaacu

SEQ ID NO: 3804352 - RNA, 15 nt, Human
cuggcucccacaggc

SEQ ID NO: 3804353 - RNA, 18 nt, Human
cuggcucccacaggcagc

SEQ ID NO: 3804354 - RNA, 19 nt, Human
cuggcucccacaggcccuu

SEQ ID NO: 3804355 - RNA, 14 nt, Human
cuggcucccagggc

SEQ ID NO: 3804356 - RNA, 13 nt, Human
cuggcuccccugc

SEQ ID NO: 3804357 - RNA, 19 nt, Human
cuggcuccccugcagcccu

SEQ ID NO: 3804358 - RNA, 15 nt, Human
cuggcuccccugggg

SEQ ID NO: 3804359 - RNA, 18 nt, Human
cuggcucccucacucuca

SEQ ID NO: 3804360 - RNA, 20 nt, Human
cuggcucccucacucucagg

SEQ ID NO: 3804361 - RNA, 21 nt, Human
cuggcucccuccuccaggccu

SEQ ID NO: 3804362 - RNA, 23 nt, Human
cuggcucccuccuccaggccugc

SEQ ID NO: 3804363 - RNA, 14 nt, Human
cuggcucccucuug

SEQ ID NO: 3804364 - RNA, 17 nt, Human
cuggcuccucuguggug

SEQ ID NO: 3804365 - RNA, 18 nt, Human
cuggcuccucuguggugu

SEQ ID NO: 3804366 - RNA, 22 nt, Human
cuggcuccucuguggugucugc

SEQ ID NO: 3804367 - RNA, 17 nt, Human
cuggcuccugaggggca

SEQ ID NO: 3804368 - RNA, 22 nt, Human
cuggcuccuuuacaaaagaaau

SEQ ID NO: 3804369 - RNA, 15 nt, Human
cuggcucuaauucac

SEQ ID NO: 3804370 - RNA, 13 nt, Human
cuggcucuacaca

SEQ ID NO: 3804371 - RNA, 16 nt, Human
cuggcucuacacauau

SEQ ID NO: 3804372 - RNA, 14 nt, Human
cuggcucucaccuc

SEQ ID NO: 3804373 - RNA, 19 nt, Human
cuggcucucaccucuaggu

SEQ ID NO: 3804374 - RNA, 13 nt, Human
cuggcucuccaag

SEQ ID NO: 3804375 - RNA, 14 nt, Human
cuggcucuccaagu

SEQ ID NO: 3804376 - RNA, 15 nt, Human
cuggcucuccaagug

SEQ ID NO: 3804377 - RNA, 16 nt, Human
cuggcucuccaagugc

SEQ ID NO: 3804378 - RNA, 17 nt, Human
cuggcucuccuggcccu

SEQ ID NO: 3804379 - RNA, 15 nt, Human
cuggcucucuccagg

SEQ ID NO: 3804380 - RNA, 20 nt, Human
cuggcucugagcgccuccau

SEQ ID NO: 3804381 - RNA, 14 nt, Human
cuggcucuguggcg

SEQ ID NO: 3804382 - RNA, 14 nt, Human
cuggcucuuccagg

SEQ ID NO: 3804383 - RNA, 15 nt, Human
cuggcucuucugccc

SEQ ID NO: 3804384 - RNA, 16 nt, Human
cuggcucuucugccca

SEQ ID NO: 3804385 - RNA, 20 nt, Human
cuggcucuugauaccccccu

SEQ ID NO: 3804386 - RNA, 21 nt, Human
cuggcucuugauaccccccuc

SEQ ID NO: 3804387 - RNA, 22 nt, Human
cuggcucuugauaccccccucu

SEQ ID NO: 3804388 - RNA, 20 nt, Human
cuggcucuugugcuggaugg

SEQ ID NO: 3804389 - RNA, 20 nt, Human
cuggcucuuucgucacccuu

SEQ ID NO: 3804390 - RNA, 17 nt, Human
cuggcugaacccugugc

SEQ ID NO: 3804391 - RNA, 21 nt, Human
cuggcugaacccugugcuggu

SEQ ID NO: 3804392 - RNA, 12 nt, Human
cuggcugaagga

SEQ ID NO: 3804393 - RNA, 15 nt, Human
cuggcugaaggacug

SEQ ID NO: 3804394 - RNA, 16 nt, Human
cuggcugaaggacugu

SEQ ID NO: 3804395 - RNA, 16 nt, Human
cuggcugagccuggcu

SEQ ID NO: 3804396 - RNA, 13 nt, Human
cuggcugagcuga

SEQ ID NO: 3804397 - RNA, 13 nt, Human
cuggcugagggca

SEQ ID NO: 3804398 - RNA, 15 nt, Human
cuggcugagggcagu

SEQ ID NO: 3804399 - RNA, 22 nt, Human
cuggcugagguuccucugccug

SEQ ID NO: 3804400 - RNA, 23 nt, Human
cuggcugagguuccucugccugc

SEQ ID NO: 3804401 - RNA, 16 nt, Human
cuggcugccagcuauu

SEQ ID NO: 3804402 - RNA, 18 nt, Human
cuggcugcccagaccccu

SEQ ID NO: 3804403 - RNA, 16 nt, Human
cuggcugccccaaccu

SEQ ID NO: 3804404 - RNA, 19 nt, Human
cuggcugcccuggcccuga

SEQ ID NO: 3804405 - RNA, 15 nt, Human
cuggcugccuccacu

SEQ ID NO: 3804406 - RNA, 20 nt, Human
cuggcugccuccacucccac

SEQ ID NO: 3804407 - RNA, 20 nt, Human
cuggcugcugaucgccuucc

SEQ ID NO: 3804408 - RNA, 16 nt, Human
cuggcugcugccccca

SEQ ID NO: 3804409 - RNA, 19 nt, Human
cuggcugcugcccccaccc

SEQ ID NO: 3804410 - RNA, 13 nt, Human
cuggcugcuugcc

SEQ ID NO: 3804411 - RNA, 19 nt, Human
cuggcuggagaauguggag

SEQ ID NO: 3804412 - RNA, 18 nt, Human
cuggcuggagccuagaac

SEQ ID NO: 3804413 - RNA, 13 nt, Human
cuggcuggccuca

SEQ ID NO: 3804414 - RNA, 17 nt, Human
cuggcuggccucaccca

SEQ ID NO: 3804415 - RNA, 21 nt, Human
cuggcuggccuugugguccaa

SEQ ID NO: 3804416 - RNA, 11 nt, Human
cuggcuggcug

SEQ ID NO: 3804417 - RNA, 15 nt, Human
cuggcuggcugcagu

SEQ ID NO: 3804418 - RNA, 17 nt, Human
cuggcuggcugcaguga

SEQ ID NO: 3804419 - RNA, 15 nt, Human
cuggcugggcaugga

SEQ ID NO: 3804420 - RNA, 22 nt, Human
cuggcugggggccucacuccag

SEQ ID NO: 3804421 - RNA, 20 nt, Human
cuggcugggguggccugugu

SEQ ID NO: 3804422 - RNA, 21 nt, Human
cuggcugggguggccugugug

SEQ ID NO: 3804423 - RNA, 21 nt, Human
cuggcugguguuaacagaagg

SEQ ID NO: 3804424 - RNA, 20 nt, Human
cuggcugguuagagguuccc

SEQ ID NO: 3804425 - RNA, 16 nt, Human
cuggcuguaaggcucu

SEQ ID NO: 3804426 - RNA, 19 nt, Human
cuggcuguaaggcucuaga

SEQ ID NO: 3804427 - RNA, 14 nt, Human
cuggcuguccaccc

SEQ ID NO: 3804428 - RNA, 12 nt, Human
cuggcugugggc

SEQ ID NO: 3804429 - RNA, 17 nt, Human
cuggcugugggcucccu

SEQ ID NO: 3804430 - RNA, 18 nt, Human
ccucugggaaccucccag

SEQ ID NO: 3804431 - RNA, 19 nt, Human
ccucugggaaccucccaga

SEQ ID NO: 3804432 - RNA, 20 nt, Human
ccucugggaaccucccagag

SEQ ID NO: 3804433 - RNA, 22 nt, Human
ccucugggaaccucccagaggu

SEQ ID NO: 3804434 - RNA, 12 nt, Human
ccucugggacug

SEQ ID NO: 3804435 - RNA, 16 nt, Human
ccucugggcaggaccu

SEQ ID NO: 3804436 - RNA, 15 nt, Human
ccucugggggguggc

SEQ ID NO: 3804437 - RNA, 19 nt, Human
ccucugguaaccucuuacu

SEQ ID NO: 3804438 - RNA, 16 nt, Human
ccucuggucgcuccug

SEQ ID NO: 3804439 - RNA, 21 nt, Human
ccucuggucgcuccugcccac

SEQ ID NO: 3804440 - RNA, 17 nt, Human
ccucuguacagagccca

SEQ ID NO: 3804441 - RNA, 23 nt, Human
ccucuguacagagcccacgcccc

SEQ ID NO: 3804442 - RNA, 17 nt, Human
ccucuguaccccaugac

SEQ ID NO: 3804443 - RNA, 20 nt, Human
cuggggagcccgucucagug

SEQ ID NO: 3804444 - RNA, 23 nt, Human
cuggggauccccgccuggccagg

SEQ ID NO: 3804445 - RNA, 17 nt, Human
cuggggaugucucucau

SEQ ID NO: 3804446 - RNA, 17 nt, Human
cuggggaugugggaggg

SEQ ID NO: 3804447 - RNA, 18 nt, Human
cuggggauugggccccug

SEQ ID NO: 3804448 - RNA, 14 nt, Human
cuggggcaaguccc

SEQ ID NO: 3804449 - RNA, 23 nt, Human
cuggggcaggaggggagugaggc

SEQ ID NO: 3804450 - RNA, 12 nt, Human
cuggggcaggcu

SEQ ID NO: 3804451 - RNA, 17 nt, Human
cuggggcaggcugggcc

SEQ ID NO: 3804452 - RNA, 19 nt, Human
cuggggcauccaugggguc

SEQ ID NO: 3804453 - RNA, 18 nt, Human
cuggggccacacagaaac

SEQ ID NO: 3804454 - RNA, 12 nt, Human
cuggggccaggc

SEQ ID NO: 3804455 - RNA, 15 nt, Human
cuggggccccaccgu

SEQ ID NO: 3804456 - RNA, 19 nt, Human
cuggggccuagacucugua

SEQ ID NO: 3804457 - RNA, 22 nt, Human
cuggggccuagcgaucucuccu

SEQ ID NO: 3804458 - RNA, 17 nt, Human
cuggggccuaucagugu

SEQ ID NO: 3804459 - RNA, 19 nt, Human
cuggggccucggagccuca

SEQ ID NO: 3804460 - RNA, 12 nt, Human
cuggggccugac

SEQ ID NO: 3804461 - RNA, 20 nt, Human
cuggggccugacugcucaga

SEQ ID NO: 3804462 - RNA, 14 nt, Human
cuggggccugagag

SEQ ID NO: 3804463 - RNA, 19 nt, Human
cuggggccuggcagggagg

SEQ ID NO: 3804464 - RNA, 14 nt, Human
cuggggccuguacu

SEQ ID NO: 3804465 - RNA, 20 nt, Human
cuggggccuguacugccugc

SEQ ID NO: 3804466 - RNA, 23 nt, Human
cuggggccuguacugccugcuug

SEQ ID NO: 3804467 - RNA, 17 nt, Human
cuggggcgcgugaggcc

SEQ ID NO: 3804468 - RNA, 18 nt, Human
cuggggcgggccccucau

SEQ ID NO: 3804469 - RNA, 15 nt, Human
cuggggcguggggag

SEQ ID NO: 3804470 - RNA, 13 nt, Human
cuggggcucagag

SEQ ID NO: 3804471 - RNA, 14 nt, Human
cuggggcucagagc

SEQ ID NO: 3804472 - RNA, 17 nt, Human
cuggggcucagagccgg

SEQ ID NO: 3804473 - RNA, 14 nt, Human
cuggggcucugugc

SEQ ID NO: 3804474 - RNA, 20 nt, Human
cuggggcugaggcugaggca

SEQ ID NO: 3804475 - RNA, 14 nt, Human
cuggggcuggccuc

SEQ ID NO: 3804476 - RNA, 12 nt, Human
cuggggcugggc

SEQ ID NO: 3804477 - RNA, 13 nt, Human
cugggggaagaag

SEQ ID NO: 3804478 - RNA, 15 nt, Human
cugggggaagaagcu

SEQ ID NO: 3804479 - RNA, 20 nt, Human
cugggggacccaauguagga

SEQ ID NO: 3804480 - RNA, 14 nt, Human
cugggggaguggaa

SEQ ID NO: 3804481 - RNA, 13 nt, Human
cugggggaugggc

SEQ ID NO: 3804482 - RNA, 17 nt, Human
cugggggcaacuggcca

SEQ ID NO: 3804483 - RNA, 18 nt, Human
cugggggcacaagacuga

SEQ ID NO: 3804484 - RNA, 22 nt, Human
cugggggcacaagacugacgcc

SEQ ID NO: 3804485 - RNA, 13 nt, Human
cugggggcacagg

SEQ ID NO: 3804486 - RNA, 20 nt, Human
cugggggcagccugcguggc

SEQ ID NO: 3804487 - RNA, 14 nt, Human
cugggggcaggagg

SEQ ID NO: 3804488 - RNA, 22 nt, Human
cugggggccaugagcuccagac

SEQ ID NO: 3804489 - RNA, 13 nt, Human
cugggggccucac

SEQ ID NO: 3804490 - RNA, 16 nt, Human
cugggggccucacucc

SEQ ID NO: 3804491 - RNA, 17 nt, Human
cugggggccucagugcc

SEQ ID NO: 3804492 - RNA, 18 nt, Human
cugggggccucagugcca

SEQ ID NO: 3804493 - RNA, 12 nt, Human
cugggggccuga

SEQ ID NO: 3804494 - RNA, 14 nt, Human
cugggggccuggcu

SEQ ID NO: 3804495 - RNA, 17 nt, Human
cugggggccuggcuggc

SEQ ID NO: 3804496 - RNA, 23 nt, Human
cugggggccuggcuggcugaggg

SEQ ID NO: 3804497 - RNA, 18 nt, Human
cugggggcugaggagcag

SEQ ID NO: 3804498 - RNA, 19 nt, Human
cugggggcugggcagagga

SEQ ID NO: 3804499 - RNA, 16 nt, Human
cuggggggacccagug

SEQ ID NO: 3804500 - RNA, 17 nt, Human
cuggggggacccagugc

SEQ ID NO: 3804501 - RNA, 18 nt, Human
cuggggggacccagugca

SEQ ID NO: 3804502 - RNA, 19 nt, Human
cuggggggacccagugcag

SEQ ID NO: 3804503 - RNA, 22 nt, Human
cugggggggauuguaaaauggu

SEQ ID NO: 3804504 - RNA, 13 nt, Human
cugggggguggcc

SEQ ID NO: 3804505 - RNA, 17 nt, Human
cugggggguggccaggc

SEQ ID NO: 3804506 - RNA, 19 nt, Human
cugggggguggccaggccg

SEQ ID NO: 3804507 - RNA, 14 nt, Human
cugggggugccagg

SEQ ID NO: 3804508 - RNA, 19 nt, Human
cugggggugccaggaccag

SEQ ID NO: 3804509 - RNA, 15 nt, Human
cugggggugggccag

SEQ ID NO: 3804510 - RNA, 17 nt, Human
cugggggugggccaggc

SEQ ID NO: 3804511 - RNA, 20 nt, Human
cuggggguucuuucuuccuc

SEQ ID NO: 3804512 - RNA, 23 nt, Human
cuggggguucuuucuuccucugc

SEQ ID NO: 3804513 - RNA, 12 nt, Human
cuggggucccca

SEQ ID NO: 3804514 - RNA, 17 nt, Human
cugggguccccagggcu

SEQ ID NO: 3804515 - RNA, 18 nt, Human
cugggguccuggggccuc

SEQ ID NO: 3804516 - RNA, 19 nt, Human
cugggguccuggggccucg

SEQ ID NO: 3804517 - RNA, 21 nt, Human
cuggggugacccggcaccccc

SEQ ID NO: 3804518 - RNA, 15 nt, Human
cuggggugccgccug

SEQ ID NO: 3804519 - RNA, 16 nt, Human
cuggggugccgccugc

SEQ ID NO: 3804520 - RNA, 16 nt, Human
cugggguggccaccag

SEQ ID NO: 3804521 - RNA, 12 nt, Human
cugggguggccu

SEQ ID NO: 3804522 - RNA, 16 nt, Human
cuggggugggcaguuu

SEQ ID NO: 3804523 - RNA, 13 nt, Human
cuggggugggguc

SEQ ID NO: 3804524 - RNA, 20 nt, Human
cugggguguuaguggcaccg

SEQ ID NO: 3804525 - RNA, 19 nt, Human
cugggguucagccccuccu

SEQ ID NO: 3804526 - RNA, 21 nt, Human
cugggguucagccccuccucu

SEQ ID NO: 3804527 - RNA, 16 nt, Human
cuggguaaaugcaaag

SEQ ID NO: 3804528 - RNA, 20 nt, Human
cuggguaacuagggaagaua

SEQ ID NO: 3804529 - RNA, 16 nt, Human
cuggguacgagggaug

SEQ ID NO: 3804530 - RNA, 18 nt, Human
cuggguacugaaagccuu

SEQ ID NO: 3804531 - RNA, 15 nt, Human
cuggguacuucuuga

SEQ ID NO: 3804532 - RNA, 20 nt, Human
cuggguacuucuugaaggug

SEQ ID NO: 3804533 - RNA, 14 nt, Human
cuggguacuugugg

SEQ ID NO: 3804534 - RNA, 19 nt, Human
cuggguacuuguggacaca

SEQ ID NO: 3804535 - RNA, 20 nt, Human
cuggguacuuguggacacag

SEQ ID NO: 3804536 - RNA, 14 nt, Human
cuggguaggaaaga

SEQ ID NO: 3804537 - RNA, 17 nt, Human
cuggguaggaaagagga

SEQ ID NO: 3804538 - RNA, 19 nt, Human
cuggguauuggaaauggau

SEQ ID NO: 3804539 - RNA, 14 nt, Human
cugggucacacacg

SEQ ID NO: 3804540 - RNA, 21 nt, Human
cuggguccaggggaugggagg

SEQ ID NO: 3804541 - RNA, 18 nt, Human
cuggguccuugcaccccu

SEQ ID NO: 3804542 - RNA, 23 nt, Human
cuggguccuugcaccccucacuc

SEQ ID NO: 3804543 - RNA, 19 nt, Human
cuggguccuuuucagaagu

SEQ ID NO: 3804544 - RNA, 15 nt, Human
cugggucgcccugga

SEQ ID NO: 3804545 - RNA, 17 nt, Human
cugggucgcccuggacu

SEQ ID NO: 3804546 - RNA, 18 nt, Human
cugggucgcccuggacug

SEQ ID NO: 3804547 - RNA, 22 nt, Human
cugggugacagagcaagacucu

SEQ ID NO: 3804548 - RNA, 14 nt, Human
cugggugacauuug

SEQ ID NO: 3804549 - RNA, 21 nt, Human
cugggugacauuugggagaca

SEQ ID NO: 3804550 - RNA, 15 nt, Human
cugggugcagcugag

SEQ ID NO: 3804551 - RNA, 14 nt, Human
cugggugcaggagc

SEQ ID NO: 3804552 - RNA, 21 nt, Human
cugggugccccguccacggcu

SEQ ID NO: 3804553 - RNA, 19 nt, Human
cugggugcgaccccaucug

SEQ ID NO: 3804554 - RNA, 23 nt, Human
cuggguggcaccagcagccugga

SEQ ID NO: 3804555 - RNA, 14 nt, Human
cuggguggcacugc

SEQ ID NO: 3804556 - RNA, 15 nt, Human
cuggguggcacugcc

SEQ ID NO: 3804557 - RNA, 12 nt, Human
cuggguggccca

SEQ ID NO: 3804558 - RNA, 13 nt, Human
cuggguggcccau

SEQ ID NO: 3804559 - RNA, 21 nt, Human
cuggguggcccauccccccuc

SEQ ID NO: 3804560 - RNA, 19 nt, Human
cuggguggccucgggacac

SEQ ID NO: 3804561 - RNA, 17 nt, Human
cuggguggcuacucugu

SEQ ID NO: 3804562 - RNA, 20 nt, Human
cuggguggcuacucugugcc

SEQ ID NO: 3804563 - RNA, 15 nt, Human
cuggguggcucacuc

SEQ ID NO: 3804564 - RNA, 13 nt, Human
cugggugggcucu

SEQ ID NO: 3804565 - RNA, 15 nt, Human
cugggugggcucugu

SEQ ID NO: 3804566 - RNA, 15 nt, Human
cuggguggggcagug

SEQ ID NO: 3804567 - RNA, 15 nt, Human
cuggguggguggugg

SEQ ID NO: 3804568 - RNA, 22 nt, Human
cugggugggugguggggagggg

SEQ ID NO: 3804569 - RNA, 13 nt, Human
cuggguggucugc

SEQ ID NO: 3804570 - RNA, 20 nt, Human
cuggguguaaaaccuggaga

SEQ ID NO: 3804571 - RNA, 20 nt, Human
cuggguguccccgcugcugu

SEQ ID NO: 3804572 - RNA, 21 nt, Human
cuggguguccccgcugcugug

SEQ ID NO: 3804573 - RNA, 16 nt, Human
cuggguguggcgcagc

SEQ ID NO: 3804574 - RNA, 21 nt, Human
cuggguucccuuuccuuccau

SEQ ID NO: 3804575 - RNA, 13 nt, Human
cuggguuccugca

SEQ ID NO: 3804576 - RNA, 17 nt, Human
cuggguucuacccaggu

SEQ ID NO: 3804577 - RNA, 15 nt, Human
cuggguugcagacag

SEQ ID NO: 3804578 - RNA, 17 nt, Human
cuggguugccuuuauuu

SEQ ID NO: 3804579 - RNA, 16 nt, Human
cuggguugcgggacag

SEQ ID NO: 3804580 - RNA, 20 nt, Human
cuggguugcgggacagagua

SEQ ID NO: 3804581 - RNA, 15 nt, Human
cuggguuggagggug

SEQ ID NO: 3804582 - RNA, 18 nt, Human
cuggguuggcgcacccuc

SEQ ID NO: 3804583 - RNA, 22 nt, Human
cuggguuggcgcacccuccccu

SEQ ID NO: 3804584 - RNA, 13 nt, Human
cuggguuggugca

SEQ ID NO: 3804585 - RNA, 19 nt, Human
cuggguuggugcacaguga

SEQ ID NO: 3804586 - RNA, 20 nt, Human
cuggcuguuggcugggggcc

SEQ ID NO: 3804587 - RNA, 12 nt, Human
cuggcuguuuga

SEQ ID NO: 3804588 - RNA, 16 nt, Human
ccugagcuuuggacac

SEQ ID NO: 3804589 - RNA, 17 nt, Human
ccugagcuuuggacaca

SEQ ID NO: 3804590 - RNA, 22 nt, Human
ccugagcuuuggacgcacacag

SEQ ID NO: 3804591 - RNA, 23 nt, Human
ccugagcuuuggacgcacacagc

SEQ ID NO: 3804592 - RNA, 23 nt, Human
ccugaggaagcgugaaggccgag

SEQ ID NO: 3804593 - RNA, 18 nt, Human
ccugaggacauggcuucu

SEQ ID NO: 3804594 - RNA, 22 nt, Human
ccugaggagucugagguccuga

SEQ ID NO: 3804595 - RNA, 14 nt, Human
ccugaggaucagaa

SEQ ID NO: 3804596 - RNA, 22 nt, Human
cuggguuggugcacagugauuu

SEQ ID NO: 3804597 - RNA, 22 nt, Human
cuggguuuaaggggagaggaaa

SEQ ID NO: 3804598 - RNA, 22 nt, Human
cuggguuuauuacauggcagug

SEQ ID NO: 3804599 - RNA, 13 nt, Human
cuggguuucuagc

SEQ ID NO: 3804600 - RNA, 15 nt, Human
cuggguuuggacccc

SEQ ID NO: 3804601 - RNA, 18 nt, Human
cuggguuuggaccccagc

SEQ ID NO: 3804602 - RNA, 20 nt, Human
cuggguuuggaccccagcug

SEQ ID NO: 3804603 - RNA, 23 nt, Human
cuggguuuggaccccagcuggga

SEQ ID NO: 3804604 - RNA, 16 nt, Human
cugguaaaaugaagaa

SEQ ID NO: 3804605 - RNA, 17 nt, Human
cugguaaaaugaagaau

SEQ ID NO: 3804606 - RNA, 16 nt, Human
cugguaaacuauuugu

SEQ ID NO: 3804607 - RNA, 17 nt, Human
cugguaagaaaaagcaa

SEQ ID NO: 3804608 - RNA, 18 nt, Human
cugguaagaaaaagcaaa

SEQ ID NO: 3804609 - RNA, 20 nt, Human
cugguaagauuguuauuaaa

SEQ ID NO: 3804610 - RNA, 22 nt, Human
cugguaagauuguuauuaaaug

SEQ ID NO: 3804611 - RNA, 15 nt, Human
cugguaauauugacu

SEQ ID NO: 3804612 - RNA, 18 nt, Human
cugguaauuuguaucuga

SEQ ID NO: 3804613 - RNA, 22 nt, Human
cugguaauuuguaucugaagga

SEQ ID NO: 3804614 - RNA, 23 nt, Human
cugguacccagccaucugcccag

SEQ ID NO: 3804615 - RNA, 18 nt, Human
cugguacucccucucagg

SEQ ID NO: 3804616 - RNA, 13 nt, Human
cugguacucuccu

SEQ ID NO: 3804617 - RNA, 17 nt, Human
cugguagaagggaaagc

SEQ ID NO: 3804618 - RNA, 21 nt, Human
cugguagacacaggauagaua

SEQ ID NO: 3804619 - RNA, 17 nt, Human
cugguagccugcagaag

SEQ ID NO: 3804620 - RNA, 15 nt, Human
cugguagcucaggug

SEQ ID NO: 3804621 - RNA, 20 nt, Human
cugguaggaauagcauguca

SEQ ID NO: 3804622 - RNA, 17 nt, Human
cugguaggaccaagcau

SEQ ID NO: 3804623 - RNA, 18 nt, Human
cugguauauccaaaagcu

SEQ ID NO: 3804624 - RNA, 19 nt, Human
cugguauauccaaaagcuu

SEQ ID NO: 3804625 - RNA, 14 nt, Human
cugguaucucagaa

SEQ ID NO: 3804626 - RNA, 19 nt, Human
cugguaucucagaaagugc

SEQ ID NO: 3804627 - RNA, 13 nt, Human
cugguauggcugc

SEQ ID NO: 3804628 - RNA, 16 nt, Human
cugguauggcugcagu

SEQ ID NO: 3804629 - RNA, 18 nt, Human
cugguauggcugcagucc

SEQ ID NO: 3804630 - RNA, 22 nt, Human
cugguauguaaaagaaaaucca

SEQ ID NO: 3804631 - RNA, 12 nt, Human
cugguauuaaau

SEQ ID NO: 3804632 - RNA, 16 nt, Human
cugguauuaaaugcca

SEQ ID NO: 3804633 - RNA, 19 nt, Human
cugguauuaaaugccaagg

SEQ ID NO: 3804634 - RNA, 18 nt, Human
cugguauucuguucugga

SEQ ID NO: 3804635 - RNA, 20 nt, Human
cugguauugguggcuuuccu

SEQ ID NO: 3804636 - RNA, 17 nt, Human
cuggucaaacaaacucu

SEQ ID NO: 3804637 - RNA, 19 nt, Human
cuggucacacacagguguu

SEQ ID NO: 3804638 - RNA, 18 nt, Human
cuggucacaggacucugc

SEQ ID NO: 3804639 - RNA, 21 nt, Human
cuggucacaggacucugccuc

SEQ ID NO: 3804640 - RNA, 14 nt, Human
cuggucaccuagga

SEQ ID NO: 3804641 - RNA, 18 nt, Human
cuggucacggauuugugu

SEQ ID NO: 3804642 - RNA, 15 nt, Human
cuggucacuucuucu

SEQ ID NO: 3804643 - RNA, 16 nt, Human
cuggucaggcccuggu

SEQ ID NO: 3804644 - RNA, 17 nt, Human
cuggucagguauuucag

SEQ ID NO: 3804645 - RNA, 13 nt, Human
cugguccagggcu

SEQ ID NO: 3804646 - RNA, 17 nt, Human
cugguccauagagagca

SEQ ID NO: 3804647 - RNA, 16 nt, Human
cugguccaugauggag

SEQ ID NO: 3804648 - RNA, 19 nt, Human
cugguccaugauggaguca

SEQ ID NO: 3804649 - RNA, 16 nt, Human
cugguccaugcagggg

SEQ ID NO: 3804650 - RNA, 17 nt, Human
cuggucccacgagggug

SEQ ID NO: 3804651 - RNA, 19 nt, Human
cuggucccacgagggugcc

SEQ ID NO: 3804652 - RNA, 22 nt, Human
cuggucccacucaguccauagc

SEQ ID NO: 3804653 - RNA, 21 nt, Human
cuggucccagccagcaguuca

SEQ ID NO: 3804654 - RNA, 14 nt, Human
cugguccccuccuu

SEQ ID NO: 3804655 - RNA, 19 nt, Human
cuggucccggggccagcac

SEQ ID NO: 3804656 - RNA, 9 nt, Human
cuggucccu

SEQ ID NO: 3804657 - RNA, 17 nt, Human
cuggucccuugcagcua

SEQ ID NO: 3804658 - RNA, 19 nt, Human
cuggucccuuguauccccu

SEQ ID NO: 3804659 - RNA, 19 nt, Human
cugguccgugggacggugc

SEQ ID NO: 3804660 - RNA, 19 nt, Human
cugguccuaggcuggaagg

SEQ ID NO: 3804661 - RNA, 16 nt, Human
cugguccuuccaggcc

SEQ ID NO: 3804662 - RNA, 22 nt, Human
cugguccuuuuuggucgaggag

SEQ ID NO: 3804663 - RNA, 14 nt, Human
cuggucgccuucca

SEQ ID NO: 3804664 - RNA, 13 nt, Human
cuggucgcuccug

SEQ ID NO: 3804665 - RNA, 20 nt, Human
cuggucguaaacaucucaga

SEQ ID NO: 3804666 - RNA, 23 nt, Human
cuggucucaaacuccugaccuca

SEQ ID NO: 3804667 - RNA, 16 nt, Human
cuggucucacccugga

SEQ ID NO: 3804668 - RNA, 23 nt, Human
cuggucucacccuggaggcaccu

SEQ ID NO: 3804669 - RNA, 20 nt, Human
cuggucuccugcccccacac

SEQ ID NO: 3804670 - RNA, 16 nt, Human
cuggucucgaacuccu

SEQ ID NO: 3804671 - RNA, 20 nt, Human
cuggucucuaggcuggggaa

SEQ ID NO: 3804672 - RNA, 14 nt, Human
cuggucucuccuug

SEQ ID NO: 3804673 - RNA, 12 nt, Human
cuggucucucua

SEQ ID NO: 3804674 - RNA, 22 nt, Human
cuggucuguagaagagggauaa

SEQ ID NO: 3804675 - RNA, 18 nt, Human
cuggucuuauuuguaaag

SEQ ID NO: 3804676 - RNA, 16 nt, Human
cuggucuuccuuuuug

SEQ ID NO: 3804677 - RNA, 15 nt, Human
cuggucuugagaugu

SEQ ID NO: 3804678 - RNA, 20 nt, Human
cuggucuuguuagaaaacaa

SEQ ID NO: 3804679 - RNA, 16 nt, Human
cuggugacaccagccu

SEQ ID NO: 3804680 - RNA, 18 nt, Human
cuggugacugauucuuca

SEQ ID NO: 3804681 - RNA, 23 nt, Human
cuggugagagggccgggcagagg

SEQ ID NO: 3804682 - RNA, 16 nt, Human
cuggugagcagacugg

SEQ ID NO: 3804683 - RNA, 18 nt, Human
cuggugaggaagcuccag

SEQ ID NO: 3804684 - RNA, 17 nt, Human
cuggugaggccuugcuc

SEQ ID NO: 3804685 - RNA, 20 nt, Human
cuggugagucuuggcggcag

SEQ ID NO: 3804686 - RNA, 20 nt, Human
cuggugcagggccuccauuc

SEQ ID NO: 3804687 - RNA, 12 nt, Human
cuggugcagugg

SEQ ID NO: 3804688 - RNA, 19 nt, Human
cuggugcauuacagagagg

SEQ ID NO: 3804689 - RNA, 12 nt, Human
cuggugccaccu

SEQ ID NO: 3804690 - RNA, 14 nt, Human
cuggugccagccuu

SEQ ID NO: 3804691 - RNA, 17 nt, Human
cuggugccagccuuccu

SEQ ID NO: 3804692 - RNA, 20 nt, Human
cuggugccccccaccccugg

SEQ ID NO: 3804693 - RNA, 19 nt, Human
cuggugcccugcuuucaga

SEQ ID NO: 3804694 - RNA, 20 nt, Human
cuggugcccuggaugcccag

SEQ ID NO: 3804695 - RNA, 16 nt, Human
cuggugccuccagagg

SEQ ID NO: 3804696 - RNA, 16 nt, Human
cuggugccuggcucuu

SEQ ID NO: 3804697 - RNA, 19 nt, Human
cuggugcggcuggccaugg

SEQ ID NO: 3804698 - RNA, 20 nt, Human
cuggugcggcuggccaugga

SEQ ID NO: 3804699 - RNA, 18 nt, Human
cuggugcucucugccacu

SEQ ID NO: 3804700 - RNA, 17 nt, Human
cuggugcugcagcaccg

SEQ ID NO: 3804701 - RNA, 17 nt, Human
cuggugcugcaguaugu

SEQ ID NO: 3804702 - RNA, 13 nt, Human
cuggugcugccac

SEQ ID NO: 3804703 - RNA, 22 nt, Human
cuggugcugccacacuucaggc

SEQ ID NO: 3804704 - RNA, 14 nt, Human
cuggugcuggaggu

SEQ ID NO: 3804705 - RNA, 23 nt, Human
cuggugcuguggccagggugaga

SEQ ID NO: 3804706 - RNA, 17 nt, Human
cuggugcuuaugcucuu

SEQ ID NO: 3804707 - RNA, 12 nt, Human
cugguggacagu

SEQ ID NO: 3804708 - RNA, 16 nt, Human
cugguggacaguccug

SEQ ID NO: 3804709 - RNA, 19 nt, Human
cugguggacaguccuggga

SEQ ID NO: 3804710 - RNA, 21 nt, Human
cugguggacaguccugggaga

SEQ ID NO: 3804711 - RNA, 15 nt, Human
cugguggacccaggg

SEQ ID NO: 3804712 - RNA, 15 nt, Human
cugguggagaaagca

SEQ ID NO: 3804713 - RNA, 21 nt, Human
cugguggagaaagcacugacc

SEQ ID NO: 3804714 - RNA, 21 nt, Human
cugguggagaacucuggcuuu

SEQ ID NO: 3804715 - RNA, 16 nt, Human
cugguggcagaguccu

SEQ ID NO: 3804716 - RNA, 16 nt, Human
cugguggcagcucacc

SEQ ID NO: 3804717 - RNA, 13 nt, Human
cugguggcagcug

SEQ ID NO: 3804718 - RNA, 14 nt, Human
cugguggcaguggg

SEQ ID NO: 3804719 - RNA, 19 nt, Human
cugguggcagugggagcug

SEQ ID NO: 3804720 - RNA, 23 nt, Human
cugguggcagugggagcugccug

SEQ ID NO: 3804721 - RNA, 11 nt, Human
cugguggccca

SEQ ID NO: 3804722 - RNA, 12 nt, Human
cugguggcccag

SEQ ID NO: 3804723 - RNA, 14 nt, Human
cugguggcccagga

SEQ ID NO: 3804724 - RNA, 20 nt, Human
cugguggccccguuucuggu

SEQ ID NO: 3804725 - RNA, 21 nt, Human
cugguggccccguuucuggug

SEQ ID NO: 3804726 - RNA, 21 nt, Human
cugguggcccgacagccuggc

SEQ ID NO: 3804727 - RNA, 18 nt, Human
cugguggcccucuccccu

SEQ ID NO: 3804728 - RNA, 20 nt, Human
cugguggcccucuccccugc

SEQ ID NO: 3804729 - RNA, 23 nt, Human
cugguggcucccggagggcccug

SEQ ID NO: 3804730 - RNA, 22 nt, Human
cuggugggaggggcgcccaccu

SEQ ID NO: 3804731 - RNA, 23 nt, Human
cuggugggaucugugcccagaga

SEQ ID NO: 3804732 - RNA, 18 nt, Human
cuggggcaggcugcuuca

SEQ ID NO: 3804733 - RNA, 16 nt, Human
cuggggcaggcugggc

SEQ ID NO: 3804734 - RNA, 18 nt, Human
cuggggcauccugugcca

SEQ ID NO: 3804735 - RNA, 15 nt, Human
cuggggccacacaga

SEQ ID NO: 3804736 - RNA, 17 nt, Human
cuggggccacacagaaa

SEQ ID NO: 3804737 - RNA, 13 nt, Human
cuggggccaggcc

SEQ ID NO: 3804738 - RNA, 19 nt, Human
cuggggccaggcugggucg

SEQ ID NO: 3804739 - RNA, 18 nt, Human
cuggggccuaauaaaacu

SEQ ID NO: 3804740 - RNA, 24 nt, Human
cuggggccuagcgaucucuccugg

SEQ ID NO: 3804741 - RNA, 21 nt, Human
cuggggccuaucagugugccc

SEQ ID NO: 3804742 - RNA, 15 nt, Human
cuggggccuccagaa

SEQ ID NO: 3804743 - RNA, 20 nt, Human
cuggggccucggagccucau

SEQ ID NO: 3804744 - RNA, 16 nt, Human
cuggggccugacugcu

SEQ ID NO: 3804745 - RNA, 18 nt, Human
cuggggccugacugcuca

SEQ ID NO: 3804746 - RNA, 19 nt, Human
cuggggccugacugcucag

SEQ ID NO: 3804747 - RNA, 12 nt, Human
cuggggccugag

SEQ ID NO: 3804748 - RNA, 14 nt, Human
cuggggccuggacc

SEQ ID NO: 3804749 - RNA, 16 nt, Human
cuggggccugggacaa

SEQ ID NO: 3804750 - RNA, 19 nt, Human
ccugaggaugggucagagc

SEQ ID NO: 3804751 - RNA, 20 nt, Human
ccugaggaugggucagagcu

SEQ ID NO: 3804752 - RNA, 15 nt, Human
ccugaggcagguccc

SEQ ID NO: 3804753 - RNA, 18 nt, Human
ccugaggcagguccccag

SEQ ID NO: 3804754 - RNA, 19 nt, Human
ccugaggcagguccccaga

SEQ ID NO: 3804755 - RNA, 15 nt, Human
ccugaggcccagagg

SEQ ID NO: 3804756 - RNA, 17 nt, Human
ccugaggcccagagggc

SEQ ID NO: 3804757 - RNA, 21 nt, Human
ccugaggcccagagggccugc

SEQ ID NO: 3804758 - RNA, 23 nt, Human
ccugaggcccuucucuccagccc

SEQ ID NO: 3804759 - RNA, 13 nt, Human
ccugaggccuaga

SEQ ID NO: 3804760 - RNA, 15 nt, Human
ccugaggcucaggga

SEQ ID NO: 3804761 - RNA, 14 nt, Human
ccugaggcuccacu

SEQ ID NO: 3804762 - RNA, 20 nt, Human
ccugaggcuccacuuggucu

SEQ ID NO: 3804763 - RNA, 12 nt, Human
ccugaggcuccu

SEQ ID NO: 3804764 - RNA, 18 nt, Human
ccugaggcuccugugcua

SEQ ID NO: 3804765 - RNA, 14 nt, Human
ccugaggcugagac

SEQ ID NO: 3804766 - RNA, 15 nt, Human
ccugaggcuggacuc

SEQ ID NO: 3804767 - RNA, 13 nt, Human
ccugaggcugggc

SEQ ID NO: 3804768 - RNA, 15 nt, Human
ccugaggcugugguc

SEQ ID NO: 3804769 - RNA, 20 nt, Human
ccugaggcuuuggauuugac

SEQ ID NO: 3804770 - RNA, 22 nt, Human
ccugaggcuuuggauuugacau

SEQ ID NO: 3804771 - RNA, 13 nt, Human
ccugagggaaagg

SEQ ID NO: 3804772 - RNA, 19 nt, Human
ccugagggaaaggccagca

SEQ ID NO: 3804773 - RNA, 13 nt, Human
ccugagggagcuc

SEQ ID NO: 3804774 - RNA, 21 nt, Human
ccugagggaggaccuggggca

SEQ ID NO: 3804775 - RNA, 23 nt, Human
ccugagggaggaccuggggcaca

SEQ ID NO: 3804776 - RNA, 23 nt, Human
ccugagggcagaaagguucugcc

SEQ ID NO: 3804777 - RNA, 19 nt, Human
ccugagggccccucugccc

SEQ ID NO: 3804778 - RNA, 23 nt, Human
ccugagggccccucugcccagcu

SEQ ID NO: 3804779 - RNA, 19 nt, Human
ccugaggggagacagagca

SEQ ID NO: 3804780 - RNA, 20 nt, Human
ccugaggggagacagagcaa

SEQ ID NO: 3804781 - RNA, 22 nt, Human
ccugaggggagacagagcaacc

SEQ ID NO: 3804782 - RNA, 19 nt, Human
ccugaggggcaucugcccc

SEQ ID NO: 3804783 - RNA, 13 nt, Human
ccugagggucccc

SEQ ID NO: 3804784 - RNA, 13 nt, Human
ccugagggucugu

SEQ ID NO: 3804785 - RNA, 19 nt, Human
ccugagggucuguagguug

SEQ ID NO: 3804786 - RNA, 15 nt, Human
ccugaggguggagac

SEQ ID NO: 3804787 - RNA, 22 nt, Human
ccugaggucaggaguucaagac

SEQ ID NO: 3804788 - RNA, 20 nt, Human
ccugaggucagggagugcug

SEQ ID NO: 3804789 - RNA, 19 nt, Human
ccugaggucaucggcgugg

SEQ ID NO: 3804790 - RNA, 23 nt, Human
ccugaggucgggaguuggagacc

SEQ ID NO: 3804791 - RNA, 21 nt, Human
ccugaggucuggcugcuugcc

SEQ ID NO: 3804792 - RNA, 23 nt, Human
ccugaggugggcccaggaccagc

SEQ ID NO: 3804793 - RNA, 14 nt, Human
ccugagguguacca

SEQ ID NO: 3804794 - RNA, 22 nt, Human
ccugaggugugggggcugcagc

SEQ ID NO: 3804795 - RNA, 22 nt, Human
ccugaguaaaaaagcugugugc

SEQ ID NO: 3804796 - RNA, 17 nt, Human
ccugaguacuccacacu

SEQ ID NO: 3804797 - RNA, 23 nt, Human
ccugaguacuccacacugcacaa

SEQ ID NO: 3804798 - RNA, 13 nt, Human
ccugaguagcugg

SEQ ID NO: 3804799 - RNA, 15 nt, Human
ccugaguagcuggau

SEQ ID NO: 3804800 - RNA, 15 nt, Human
ccugagucacccaug

SEQ ID NO: 3804801 - RNA, 18 nt, Human
ccugagucacccaugaag

SEQ ID NO: 3804802 - RNA, 16 nt, Human
ccugagucccaucccu

SEQ ID NO: 3804803 - RNA, 19 nt, Human
ccugagucguacagaaagc

SEQ ID NO: 3804804 - RNA, 21 nt, Human
ccugagucguacagaaagcug

SEQ ID NO: 3804805 - RNA, 21 nt, Human
ccugagucgugaccugcuagg

SEQ ID NO: 3804806 - RNA, 18 nt, Human
ccugagucuccugugccc

SEQ ID NO: 3804807 - RNA, 23 nt, Human
ccugagucugcuauauuuucaug

SEQ ID NO: 3804808 - RNA, 15 nt, Human
ccugagugagagggg

SEQ ID NO: 3804809 - RNA, 18 nt, Human
ccugagugagaggggagg

SEQ ID NO: 3804810 - RNA, 15 nt, Human
ccugagugccuggcc

SEQ ID NO: 3804811 - RNA, 19 nt, Human
ccugagugcuugcuuuuca

SEQ ID NO: 3804812 - RNA, 14 nt, Human
ccugaguggaucuc

SEQ ID NO: 3804813 - RNA, 23 nt, Human
ccugaguggaucuccaaggacca

SEQ ID NO: 3804814 - RNA, 16 nt, Human
ccugaguggugccaaa

SEQ ID NO: 3804815 - RNA, 13 nt, Human
ccugaguuccuga

SEQ ID NO: 3804816 - RNA, 20 nt, Human
ccugaguugcuuuucagcug

SEQ ID NO: 3804817 - RNA, 20 nt, Human
ccugauaaaacaacagcucg

SEQ ID NO: 3804818 - RNA, 17 nt, Human
ccugauaacaaccugga

SEQ ID NO: 3804819 - RNA, 18 nt, Human
ccugauaacaaccuggag

SEQ ID NO: 3804820 - RNA, 15 nt, Human
ccugauauaaaugca

SEQ ID NO: 3804821 - RNA, 14 nt, Human
ccugaucaaugaca

SEQ ID NO: 3804822 - RNA, 17 nt, Human
ccugaucaaugacagag

SEQ ID NO: 3804823 - RNA, 14 nt, Human
ccugaucagaccac

SEQ ID NO: 3804824 - RNA, 15 nt, Human
ccugauccagccucu

SEQ ID NO: 3804825 - RNA, 17 nt, Human
ccugaucccagagagcc

SEQ ID NO: 3804826 - RNA, 21 nt, Human
ccugaucccauuuuccucuga

SEQ ID NO: 3804827 - RNA, 13 nt, Human
ccugauccuggag

SEQ ID NO: 3804828 - RNA, 19 nt, Human
ccugauccuggaggcccag

SEQ ID NO: 3804829 - RNA, 14 nt, Human
ccugaucucuuccu

SEQ ID NO: 3804830 - RNA, 19 nt, Human
ccugaucugacauccccac

SEQ ID NO: 3804831 - RNA, 13 nt, Human
ccugaugaaaaua

SEQ ID NO: 3804832 - RNA, 13 nt, Human
ccugaugacagag

SEQ ID NO: 3804833 - RNA, 16 nt, Human
ccugaugagauuuuua

SEQ ID NO: 3804834 - RNA, 16 nt, Human
ccugaugcucauauca

SEQ ID NO: 3804835 - RNA, 14 nt, Human
ccugaugcucccuc

SEQ ID NO: 3804836 - RNA, 20 nt, Human
ccugaugcucccuccccugc

SEQ ID NO: 3804837 - RNA, 23 nt, Human
ccugaugcugacauucaccugcc

SEQ ID NO: 3804838 - RNA, 14 nt, Human
ccugaugcuucuuc

SEQ ID NO: 3804839 - RNA, 17 nt, Human
ccugaugcuucuucaga

SEQ ID NO: 3804840 - RNA, 19 nt, Human
ccugaugcuucuucagaga

SEQ ID NO: 3804841 - RNA, 19 nt, Human
ccugaugcuuuugucuaau

SEQ ID NO: 3804842 - RNA, 20 nt, Human
ccugauggcaggauggccug

SEQ ID NO: 3804843 - RNA, 21 nt, Human
ccugaugggguggaaggcaug

SEQ ID NO: 3804844 - RNA, 19 nt, Human
ccugauguguccucaggga

SEQ ID NO: 3804845 - RNA, 21 nt, Human
ccugauguguccucagggagc

SEQ ID NO: 3804846 - RNA, 19 nt, Human
ccugauucggcugucucag

SEQ ID NO: 3804847 - RNA, 15 nt, Human
ccugauugugucucu

SEQ ID NO: 3804848 - RNA, 19 nt, Human
ccugauugugucucuuggu

SEQ ID NO: 3804849 - RNA, 14 nt, Human
ccugauuuacaguu

SEQ ID NO: 3804850 - RNA, 17 nt, Human
ccugauuuacaguuuca

SEQ ID NO: 3804851 - RNA, 18 nt, Human
ccugauuuagauaugcaa

SEQ ID NO: 3804852 - RNA, 20 nt, Human
ccugauuuaggagaagccag

SEQ ID NO: 3804853 - RNA, 22 nt, Human
ccugauuuaggagaagccagga

SEQ ID NO: 3804854 - RNA, 17 nt, Human
ccugcaaacagaacagg

SEQ ID NO: 3804855 - RNA, 18 nt, Human
ccugcaaacgcugccugc

SEQ ID NO: 3804856 - RNA, 21 nt, Human
ccugcaaacgcugccugcccg

SEQ ID NO: 3804857 - RNA, 15 nt, Human
ccugcaaagcccagc

SEQ ID NO: 3804858 - RNA, 18 nt, Human
ccugcaaagcccagcuug

SEQ ID NO: 3804859 - RNA, 23 nt, Human
ccugcaaaguacagguacuuugu

SEQ ID NO: 3804860 - RNA, 18 nt, Human
ccugcaacaccuuguuuc

SEQ ID NO: 3804861 - RNA, 21 nt, Human
ccugcaaccugauugugucuc

SEQ ID NO: 3804862 - RNA, 17 nt, Human
ccugcaacucaaggacu

SEQ ID NO: 3804863 - RNA, 13 nt, Human
ccugcaaggacua

SEQ ID NO: 3804864 - RNA, 14 nt, Human
ccugcaaggcccac

SEQ ID NO: 3804865 - RNA, 20 nt, Human
ccugcaagggcuccccacug

SEQ ID NO: 3804866 - RNA, 16 nt, Human
ccugcaauaaaauggg

SEQ ID NO: 3804867 - RNA, 14 nt, Human
ccugcaaugaaagg

SEQ ID NO: 3804868 - RNA, 20 nt, Human
ccugcaaugaagucucugaa

SEQ ID NO: 3804869 - RNA, 22 nt, Human
ccugcacaaagcccuuccaugu

SEQ ID NO: 3804870 - RNA, 17 nt, Human
ccugcacaagccagggu

SEQ ID NO: 3804871 - RNA, 23 nt, Human
ccugcacacaagcccacagcaca

SEQ ID NO: 3804872 - RNA, 23 nt, Human
ccugcacagcaggcugccagugc

SEQ ID NO: 3804873 - RNA, 15 nt, Human
ccugcacagugacuu

SEQ ID NO: 3804874 - RNA, 20 nt, Human
ccugcacagugacuucugag

SEQ ID NO: 3804875 - RNA, 21 nt, Human
ccuggaaccuugcuguccuga

SEQ ID NO: 3804876 - RNA, 20 nt, Human
ccuggaacucuaucugggcc

SEQ ID NO: 3804877 - RNA, 22 nt, Human
ccuggaacucuaucugggccug

SEQ ID NO: 3804878 - RNA, 17 nt, Human
ccuggaagaacaggccu

SEQ ID NO: 3804879 - RNA, 23 nt, Human
ccuggaagaacaggccucuccau

SEQ ID NO: 3804880 - RNA, 16 nt, Human
ccuggaagagcagccc

SEQ ID NO: 3804881 - RNA, 14 nt, Human
ccuggaagagccca

SEQ ID NO: 3804882 - RNA, 15 nt, Human
ccuggaagagcccag

SEQ ID NO: 3804883 - RNA, 18 nt, Human
ccuggaagagcccagucu

SEQ ID NO: 3804884 - RNA, 17 nt, Human
ccuggaagccagcuuuc

SEQ ID NO: 3804885 - RNA, 21 nt, Human
ccuggaagcuguguccuugca

SEQ ID NO: 3804886 - RNA, 23 nt, Human
ccuggaagcuuuguccccugcuu

SEQ ID NO: 3804887 - RNA, 20 nt, Human
ccuggaaggacauccauguu

SEQ ID NO: 3804888 - RNA, 22 nt, Human
ccuggaaggacauccauguucc

SEQ ID NO: 3804889 - RNA, 17 nt, Human
ccuggaaggcccagcac

SEQ ID NO: 3804890 - RNA, 18 nt, Human
ccuggaaggcccagcacc

SEQ ID NO: 3804891 - RNA, 16 nt, Human
ccuggacacaggccug

SEQ ID NO: 3804892 - RNA, 16 nt, Human
ccuggacacucagacc

SEQ ID NO: 3804893 - RNA, 13 nt, Human
ccuggacagcugu

SEQ ID NO: 3804894 - RNA, 14 nt, Human
ccuggacagcugug

SEQ ID NO: 3804895 - RNA, 16 nt, Human
ccuggacagcugugcc

SEQ ID NO: 3804896 - RNA, 19 nt, Human
ccuggacaguaucccacau

SEQ ID NO: 3804897 - RNA, 23 nt, Human
ccuggacaguaucccacauccaa

SEQ ID NO: 3804898 - RNA, 20 nt, Human
ccuggacauccucuucugcu

SEQ ID NO: 3804899 - RNA, 23 nt, Human
ccuggacaugaagauucuuuccc

SEQ ID NO: 3804900 - RNA, 19 nt, Human
ccuggacauuuuuucaguc

SEQ ID NO: 3804901 - RNA, 16 nt, Human
ccuggaccagccucuc

SEQ ID NO: 3804902 - RNA, 12 nt, Human
ccuggaccccca

SEQ ID NO: 3804903 - RNA, 15 nt, Human
ccuggacccccagcu

SEQ ID NO: 3804904 - RNA, 17 nt, Human
ccuggacccccagcuuu

SEQ ID NO: 3804905 - RNA, 23 nt, Human
ccuggaccccccuuucacaggca

SEQ ID NO: 3804906 - RNA, 14 nt, Human
ccuggaccccugca

SEQ ID NO: 3804907 - RNA, 15 nt, Human
ccuggaccccugcau

SEQ ID NO: 3804908 - RNA, 15 nt, Human
ccuggaccucugaca

SEQ ID NO: 3804909 - RNA, 21 nt, Human
ccuggaccugcccugggccac

SEQ ID NO: 3804910 - RNA, 23 nt, Human
ccuggaccugcccugggccacac

SEQ ID NO: 3804911 - RNA, 14 nt, Human
ccuggacuccugca

SEQ ID NO: 3804912 - RNA, 14 nt, Human
ccuggacugagggg

SEQ ID NO: 3804913 - RNA, 14 nt, Human
ccuggacugcuacc

SEQ ID NO: 3804914 - RNA, 17 nt, Human
ccuggacugguggcccc

SEQ ID NO: 3804915 - RNA, 13 nt, Human
ccuggacuugccu

SEQ ID NO: 3804916 - RNA, 14 nt, Human
ccuggacuuuccug

SEQ ID NO: 3804917 - RNA, 13 nt, Human
ccuggagaacuag

SEQ ID NO: 3804918 - RNA, 23 nt, Human
ccuggagaacuagaaccuggagg

SEQ ID NO: 3804919 - RNA, 21 nt, Human
ccuggagacccaccccaccug

SEQ ID NO: 3804920 - RNA, 22 nt, Human
ccuggagacguggaaccucugu

SEQ ID NO: 3804921 - RNA, 13 nt, Human
ccuggagagcuag

SEQ ID NO: 3804922 - RNA, 21 nt, Human
ccuggagauccuccugcagac

SEQ ID NO: 3804923 - RNA, 15 nt, Human
ccuggagauggggag

SEQ ID NO: 3804924 - RNA, 21 nt, Human
ccuggagcagaagcagcaacu

SEQ ID NO: 3804925 - RNA, 15 nt, Human
ccuggagccaacugc

SEQ ID NO: 3804926 - RNA, 12 nt, Human
ccuggagccaga

SEQ ID NO: 3804927 - RNA, 14 nt, Human
ccuggagcccagag

SEQ ID NO: 3804928 - RNA, 17 nt, Human
ccuggagccccugggug

SEQ ID NO: 3804929 - RNA, 22 nt, Human
ccuggagccccugggugggugg

SEQ ID NO: 3804930 - RNA, 20 nt, Human
ccuggagcccgaggcaccag

SEQ ID NO: 3804931 - RNA, 21 nt, Human
ccuggagcccuggagacccca

SEQ ID NO: 3804932 - RNA, 15 nt, Human
ccuggagcuccuggg

SEQ ID NO: 3804933 - RNA, 18 nt, Human
ccuggagcuccugggaag

SEQ ID NO: 3804934 - RNA, 17 nt, Human
ccuggaggaccugagcc

SEQ ID NO: 3804935 - RNA, 18 nt, Human
ccuggaggaccugagccu

SEQ ID NO: 3804936 - RNA, 19 nt, Human
ccuggaggaccugagccug

SEQ ID NO: 3804937 - RNA, 12 nt, Human
ccuggaggccca

SEQ ID NO: 3804938 - RNA, 23 nt, Human
ccuggaggccccaacccuguccu

SEQ ID NO: 3804939 - RNA, 21 nt, Human
ccuggaggcggugcggcaggg

SEQ ID NO: 3804940 - RNA, 16 nt, Human
ccuggaggcugccucc

SEQ ID NO: 3804941 - RNA, 18 nt, Human
ccuggagggcuagaacug

SEQ ID NO: 3804942 - RNA, 20 nt, Human
ccuggaggggcuagaaccua

SEQ ID NO: 3804943 - RNA, 18 nt, Human
ccuggaggugccagcaaa

SEQ ID NO: 3804944 - RNA, 22 nt, Human
ccuggaggugccagcaaagccc

SEQ ID NO: 3804945 - RNA, 14 nt, Human
ccuggagguggcug

SEQ ID NO: 3804946 - RNA, 23 nt, Human
cugguucggauuugggguggauu

SEQ ID NO: 3804947 - RNA, 20 nt, Human
cugguucucaauuccaacag

SEQ ID NO: 3804948 - RNA, 20 nt, Human
cugguucucaucuuucuuga

SEQ ID NO: 3804949 - RNA, 23 nt, Human
cugguucugaugaugugccuggg

SEQ ID NO: 3804950 - RNA, 20 nt, Human
cugguucuuguguuggcugu

SEQ ID NO: 3804951 - RNA, 13 nt, Human
cugguugucauuu

SEQ ID NO: 3804952 - RNA, 21 nt, Human
cugguuguuucuguuccaaau

SEQ ID NO: 3804953 - RNA, 15 nt, Human
cugguuuacacuuua

SEQ ID NO: 3804954 - RNA, 13 nt, Human
cugguuucacugg

SEQ ID NO: 3804955 - RNA, 23 nt, Human
cugguuucauuucuacugugacu

SEQ ID NO: 3804956 - RNA, 16 nt, Human
cugguuuccugcccug

SEQ ID NO: 3804957 - RNA, 21 nt, Human
cugguuuccugcccugggagg

SEQ ID NO: 3804958 - RNA, 18 nt, Human
cugguuucucauucuugu

SEQ ID NO: 3804959 - RNA, 19 nt, Human
cugguuugccgguggugca

SEQ ID NO: 3804960 - RNA, 16 nt, Human
cugguuuggggcgagg

SEQ ID NO: 3804961 - RNA, 17 nt, Human
cugguuuggggcgaggc

SEQ ID NO: 3804962 - RNA, 16 nt, Human
cugguuuguucccugu

SEQ ID NO: 3804963 - RNA, 14 nt, Human
cugguuuugcuauu

SEQ ID NO: 3804964 - RNA, 21 nt, Human
cugguuuuggcaucucugucc

SEQ ID NO: 3804965 - RNA, 20 nt, Human
cugguuuuuggauuaaauua

SEQ ID NO: 3804966 - RNA, 13 nt, Human
cuguaaaacgcug

SEQ ID NO: 3804967 - RNA, 13 nt, Human
cuguaaaacuaag

SEQ ID NO: 3804968 - RNA, 14 nt, Human
cuguaaaacuuuau

SEQ ID NO: 3804969 - RNA, 18 nt, Human
cuguaaaagauuaaacug

SEQ ID NO: 3804970 - RNA, 19 nt, Human
cuguaaaagcaaguccugc

SEQ ID NO: 3804971 - RNA, 11 nt, Human
cuguaaaaucu

SEQ ID NO: 3804972 - RNA, 15 nt, Human
cuguaaaaugaaauu

SEQ ID NO: 3804973 - RNA, 20 nt, Human
cuguaaaaugcaaaaaaucu

SEQ ID NO: 3804974 - RNA, 15 nt, Human
cuguaaacacagaca

SEQ ID NO: 3804975 - RNA, 17 nt, Human
cuguaaacacucagcug

SEQ ID NO: 3804976 - RNA, 18 nt, Human
cuguaaacacucagcugu

SEQ ID NO: 3804977 - RNA, 20 nt, Human
cuguaaaccucucgagggca

SEQ ID NO: 3804978 - RNA, 19 nt, Human
cuguaaacucaaaacuuaa

SEQ ID NO: 3804979 - RNA, 17 nt, Human
cuguaaagaaagagaga

SEQ ID NO: 3804980 - RNA, 21 nt, Human
cuguaaagaaagagagaaaau

SEQ ID NO: 3804981 - RNA, 12 nt, Human
cuguaaagaauu

SEQ ID NO: 3804982 - RNA, 23 nt, Human
cuguaaagagaccuaccucaggu

SEQ ID NO: 3804983 - RNA, 14 nt, Human
cuguaaagaguugc

SEQ ID NO: 3804984 - RNA, 21 nt, Human
cuguaaagauguuuauuucag

SEQ ID NO: 3804985 - RNA, 22 nt, Human
cuguaaagauguuuauuucagg

SEQ ID NO: 3804986 - RNA, 16 nt, Human
cuguaaagcaaaagau

SEQ ID NO: 3804987 - RNA, 15 nt, Human
cuguaaagugccuua

SEQ ID NO: 3804988 - RNA, 16 nt, Human
cuguaaauaccauuga

SEQ ID NO: 3804989 - RNA, 14 nt, Human
cuguaaauauguuu

SEQ ID NO: 3804990 - RNA, 20 nt, Human
cuguaaaucuaacauuauua

SEQ ID NO: 3804991 - RNA, 17 nt, Human
cuguaaaugguguacau

SEQ ID NO: 3804992 - RNA, 18 nt, Human
cuguaaaugguguacaua

SEQ ID NO: 3804993 - RNA, 21 nt, Human
cuguaaaugguguacauaaug

SEQ ID NO: 3804994 - RNA, 23 nt, Human
cuguaaaugguguacauaaugua

SEQ ID NO: 3804995 - RNA, 16 nt, Human
cuguaaauuauuuuaa

SEQ ID NO: 3804996 - RNA, 18 nt, Human
cuguaaauuauuuuaaau

SEQ ID NO: 3804997 - RNA, 22 nt, Human
cuguaaauuauuuuaaauuaua

SEQ ID NO: 3804998 - RNA, 17 nt, Human
cuguaacacaagccaca

SEQ ID NO: 3804999 - RNA, 20 nt, Human
cuguaacacaagccacagaa

SEQ ID NO: 3805000 - RNA, 21 nt, Human
cuguaacacaagccacagaag

SEQ ID NO: 3805001 - RNA, 22 nt, Human
cuguaacacaagccacagaagc

SEQ ID NO: 3805002 - RNA, 16 nt, Human
cuguaacacuccucug

SEQ ID NO: 3805003 - RNA, 17 nt, Human
cuguaacacuccucugc

SEQ ID NO: 3805004 - RNA, 16 nt, Human
cuguaacacuuuacaa

SEQ ID NO: 3805005 - RNA, 23 nt, Human
cuguaacagguauuuuguuucuu

SEQ ID NO: 3805006 - RNA, 15 nt, Human
cuguaaccucuucag

SEQ ID NO: 3805007 - RNA, 19 nt, Human
cuguaaccucuucagaggc

SEQ ID NO: 3805008 - RNA, 23 nt, Human
cuguaaccucuucagaggcccuc

SEQ ID NO: 3805009 - RNA, 17 nt, Human
cuguaacuacuuuauaa

SEQ ID NO: 3805010 - RNA, 15 nt, Human
cuguaacucuaaaag

SEQ ID NO: 3805011 - RNA, 19 nt, Human
cuguaacucuaaaagaucc

SEQ ID NO: 3805012 - RNA, 13 nt, Human
cuguaacugucac

SEQ ID NO: 3805013 - RNA, 16 nt, Human
cuguaacuuaaaauag

SEQ ID NO: 3805014 - RNA, 16 nt, Human
cuguaacuuccaaaua

SEQ ID NO: 3805015 - RNA, 22 nt, Human
cuguaacuugauccauuucuaa

SEQ ID NO: 3805016 - RNA, 20 nt, Human
cuguaagaaaauaucacuug

SEQ ID NO: 3805017 - RNA, 21 nt, Human
cuguaagaaaccuacugccca

SEQ ID NO: 3805018 - RNA, 23 nt, Human
cuguauaaguuauuuuuguacau

SEQ ID NO: 3805019 - RNA, 21 nt, Human
cuguauacagugcagagccuu

SEQ ID NO: 3805020 - RNA, 13 nt, Human
cuguauacuuuag

SEQ ID NO: 3805021 - RNA, 16 nt, Human
cuguauagacaguuug

SEQ ID NO: 3805022 - RNA, 17 nt, Human
cuguauagacaguuugu

SEQ ID NO: 3805023 - RNA, 18 nt, Human
cuguauagacaguuugua

SEQ ID NO: 3805024 - RNA, 16 nt, Human
cuguauagauuagaau

SEQ ID NO: 3805025 - RNA, 16 nt, Human
cuguauagauuagaga

SEQ ID NO: 3805026 - RNA, 16 nt, Human
cuguauaguuaggaua

SEQ ID NO: 3805027 - RNA, 18 nt, Human
cuguauauaaaauauuuu

SEQ ID NO: 3805028 - RNA, 14 nt, Human
cuguauauaaaugg

SEQ ID NO: 3805029 - RNA, 19 nt, Human
cuguauauacaauaacaua

SEQ ID NO: 3805030 - RNA, 13 nt, Human
cuguauauacuuu

SEQ ID NO: 3805031 - RNA, 22 nt, Human
cuguauauauuuauggccgggc

SEQ ID NO: 3805032 - RNA, 16 nt, Human
cuguauauuuguauga

SEQ ID NO: 3805033 - RNA, 19 nt, Human
cuguaucaacccagaaaca

SEQ ID NO: 3805034 - RNA, 16 nt, Human
cuguaucacucugugu

SEQ ID NO: 3805035 - RNA, 15 nt, Human
cuguaucaguggauu

SEQ ID NO: 3805036 - RNA, 14 nt, Human
cuguaucccaugag

SEQ ID NO: 3805037 - RNA, 22 nt, Human
cuguaucccaugagccucagca

SEQ ID NO: 3805038 - RNA, 17 nt, Human
cuguaucggagacagug

SEQ ID NO: 3805039 - RNA, 18 nt, Human
cuguaucggagacaguga

SEQ ID NO: 3805040 - RNA, 14 nt, Human
cuguaucuguguag

SEQ ID NO: 3805041 - RNA, 19 nt, Human
cuguaugaaagauuguggg

SEQ ID NO: 3805042 - RNA, 14 nt, Human
cuguaugaucaaau

SEQ ID NO: 3805043 - RNA, 16 nt, Human
cuguaugaucaaaugu

SEQ ID NO: 3805044 - RNA, 21 nt, Human
cuguaugaucaaauguuuaau

SEQ ID NO: 3805045 - RNA, 16 nt, Human
cuguaugcugaucauc

SEQ ID NO: 3805046 - RNA, 20 nt, Human
cuguauguauuagugauauu

SEQ ID NO: 3805047 - RNA, 20 nt, Human
cuguaugucaacuuuaugca

SEQ ID NO: 3805048 - RNA, 19 nt, Human
cuguaugugcuguaauuua

SEQ ID NO: 3805049 - RNA, 16 nt, Human
cuguauguucaacuag

SEQ ID NO: 3805050 - RNA, 21 nt, Human
cuguauucucaaacacaguua

SEQ ID NO: 3805051 - RNA, 13 nt, Human
cuguauugaauca

SEQ ID NO: 3805052 - RNA, 14 nt, Human
cuguauugaaucau

SEQ ID NO: 3805053 - RNA, 20 nt, Human
cuguauugaaucauguagua

SEQ ID NO: 3805054 - RNA, 14 nt, Human
cuguauuguaacua

SEQ ID NO: 3805055 - RNA, 14 nt, Human
cuguauugucugaa

SEQ ID NO: 3805056 - RNA, 17 nt, Human
cuguauuuaagcaaaua

SEQ ID NO: 3805057 - RNA, 14 nt, Human
cuguauuuaauuuu

SEQ ID NO: 3805058 - RNA, 15 nt, Human
cuguauuuaauuuug

SEQ ID NO: 3805059 - RNA, 18 nt, Human
cuguauuuaugugugagg

SEQ ID NO: 3805060 - RNA, 13 nt, Human
cuguauuugaaag

SEQ ID NO: 3805061 - RNA, 17 nt, Human
cuguauuugaaagugcc

SEQ ID NO: 3805062 - RNA, 18 nt, Human
cuguauuugaaucagccu

SEQ ID NO: 3805063 - RNA, 22 nt, Human
cuguauuugccggugccuagga

SEQ ID NO: 3805064 - RNA, 15 nt, Human
cuguauuugugacua

SEQ ID NO: 3805065 - RNA, 21 nt, Human
cuguauuugugacuaauugua

SEQ ID NO: 3805066 - RNA, 13 nt, Human
cuguauuuuaaaa

SEQ ID NO: 3805067 - RNA, 21 nt, Human
cuguauuuuauuuagacaaga

SEQ ID NO: 3805068 - RNA, 22 nt, Human
cuguauuuuauuuagacaagag

SEQ ID NO: 3805069 - RNA, 20 nt, Human
cuguauuuuguauuguuuca

SEQ ID NO: 3805070 - RNA, 20 nt, Human
cuguauuuuguuuuugucuu

SEQ ID NO: 3805071 - RNA, 18 nt, Human
cuguauuuuuuuuucuaa

SEQ ID NO: 3805072 - RNA, 16 nt, Human
cugucaaaacacugug

SEQ ID NO: 3805073 - RNA, 17 nt, Human
cugucaaaacacugugg

SEQ ID NO: 3805074 - RNA, 20 nt, Human
cugucaaaacacuguggaac

SEQ ID NO: 3805075 - RNA, 17 nt, Human
cugucaaacaaagccag

SEQ ID NO: 3805076 - RNA, 20 nt, Human
cugucaaacauuaguacuuu

SEQ ID NO: 3805077 - RNA, 22 nt, Human
cugucaaacauuaguacuuuau

SEQ ID NO: 3805078 - RNA, 18 nt, Human
cugucaaaugaugugcaa

SEQ ID NO: 3805079 - RNA, 18 nt, Human
cugucaagaggcaaagga

SEQ ID NO: 3805080 - RNA, 19 nt, Human
cugucaagccauuuuuaca

SEQ ID NO: 3805081 - RNA, 14 nt, Human
cugucaaggcucag

SEQ ID NO: 3805082 - RNA, 20 nt, Human
cugucaaggcugcuuagaau

SEQ ID NO: 3805083 - RNA, 21 nt, Human
cugucaagugggaucugucac

SEQ ID NO: 3805084 - RNA, 19 nt, Human
cugucaaugggaccugugg

SEQ ID NO: 3805085 - RNA, 20 nt, Human
cugucaauuacaggaaguac

SEQ ID NO: 3805086 - RNA, 19 nt, Human
cugucaauuucccugacuc

SEQ ID NO: 3805087 - RNA, 13 nt, Human
cugucacauugca

SEQ ID NO: 3805088 - RNA, 19 nt, Human
cugucacauugcauucuau

SEQ ID NO: 3805089 - RNA, 23 nt, Human
cugucaccaagcucacaguuccu

SEQ ID NO: 3805090 - RNA, 16 nt, Human
cugucaccacccugcu

SEQ ID NO: 3805091 - RNA, 13 nt, Human
cugucaccucuuc

SEQ ID NO: 3805092 - RNA, 19 nt, Human
cugucacgcagccaccagg

SEQ ID NO: 3805093 - RNA, 16 nt, Human
cugucacucaggcugg

SEQ ID NO: 3805094 - RNA, 18 nt, Human
cugucacucaggcuggag

SEQ ID NO: 3805095 - RNA, 19 nt, Human
cugucacucaggcuggagu

SEQ ID NO: 3805096 - RNA, 13 nt, Human
cugucacugcagg

SEQ ID NO: 3805097 - RNA, 13 nt, Human
cugucacuguggg

SEQ ID NO: 3805098 - RNA, 19 nt, Human
cugucagauccaggagcuc

SEQ ID NO: 3805099 - RNA, 22 nt, Human
cugucagauccaggagcuccag

SEQ ID NO: 3805100 - RNA, 24 nt, Human
cugucagauccaggagcuccagug

SEQ ID NO: 3805101 - RNA, 21 nt, Human
cugucagaugagaacaaagcu

SEQ ID NO: 3805102 - RNA, 22 nt, Human
cugucagaugggaagacaugaa

SEQ ID NO: 3805103 - RNA, 17 nt, Human
cugucagccgggcccug

SEQ ID NO: 3805104 - RNA, 23 nt, Human
cugucagccgggcccugaguaau

SEQ ID NO: 3805105 - RNA, 22 nt, Human
cugucagcuaaagaaguuugaa

SEQ ID NO: 3805106 - RNA, 18 nt, Human
cugucaggaagaaaucac

SEQ ID NO: 3805107 - RNA, 12 nt, Human
cugucaggaggc

SEQ ID NO: 3805108 - RNA, 14 nt, Human
cugucaggauugcg

SEQ ID NO: 3805109 - RNA, 15 nt, Human
cugucaggauugcga

SEQ ID NO: 3805110 - RNA, 19 nt, Human
ccuggcuccgcugugugga

SEQ ID NO: 3805111 - RNA, 21 nt, Human
ccuggcuccguccaggagccu

SEQ ID NO: 3805112 - RNA, 15 nt, Human
ccuggcuccugaggg

SEQ ID NO: 3805113 - RNA, 22 nt, Human
ccuggcuccuugugccagagaa

SEQ ID NO: 3805114 - RNA, 16 nt, Human
ccuggcucucaccucu

SEQ ID NO: 3805115 - RNA, 19 nt, Human
ccuggcucucaccucuagg

SEQ ID NO: 3805116 - RNA, 11 nt, Human
ccuggcucuga

SEQ ID NO: 3805117 - RNA, 20 nt, Human
ccuggcucugaccgaaacag

SEQ ID NO: 3805118 - RNA, 17 nt, Human
ccuggcucuguggcuug

SEQ ID NO: 3805119 - RNA, 13 nt, Human
ccuggcucuugug

SEQ ID NO: 3805120 - RNA, 16 nt, Human
ccuggcugaaggacug

SEQ ID NO: 3805121 - RNA, 22 nt, Human
ccuggcugaccccaaagagccu

SEQ ID NO: 3805122 - RNA, 23 nt, Human
ccuggcugaccccaaagagccug

SEQ ID NO: 3805123 - RNA, 19 nt, Human
ccuggcugagccuggcugg

SEQ ID NO: 3805124 - RNA, 17 nt, Human
ccuggcugagggcagcu

SEQ ID NO: 3805125 - RNA, 20 nt, Human
ccuggcugagguuccucugc

SEQ ID NO: 3805126 - RNA, 13 nt, Human
ccuggcugccggc

SEQ ID NO: 3805127 - RNA, 21 nt, Human
ccuggcugcugaucgccuucc

SEQ ID NO: 3805128 - RNA, 23 nt, Human
ccuggcugcugaucgccuucccc

SEQ ID NO: 3805129 - RNA, 20 nt, Human
ccuggcugcugcccccaccc

SEQ ID NO: 3805130 - RNA, 21 nt, Human
ccuggcugggacugggaacag

SEQ ID NO: 3805131 - RNA, 16 nt, Human
ccuggcugucugaggc

SEQ ID NO: 3805132 - RNA, 13 nt, Human
ccuggcuuccuua

SEQ ID NO: 3805133 - RNA, 23 nt, Human
ccuggcuucuggagcccuugggu

SEQ ID NO: 3805134 - RNA, 14 nt, Human
ccuggcuucugugg

SEQ ID NO: 3805135 - RNA, 22 nt, Human
ccuggcuucuguggggccccuc

SEQ ID NO: 3805136 - RNA, 16 nt, Human
ccuggcuuuucacugc

SEQ ID NO: 3805137 - RNA, 17 nt, Human
ccuggcuuuucacugcu

SEQ ID NO: 3805138 - RNA, 20 nt, Human
ccuggcuuuucacugcuggc

SEQ ID NO: 3805139 - RNA, 19 nt, Human
ccugggaaagagauuuaaa

SEQ ID NO: 3805140 - RNA, 20 nt, Human
ccugggaaccuuccugucuu

SEQ ID NO: 3805141 - RNA, 19 nt, Human
ccugggacagggagcagcc

SEQ ID NO: 3805142 - RNA, 20 nt, Human
ccugggaccuccccugaggc

SEQ ID NO: 3805143 - RNA, 18 nt, Human
ccugggacggcggcagua

SEQ ID NO: 3805144 - RNA, 14 nt, Human
ccugggacuuccau

SEQ ID NO: 3805145 - RNA, 18 nt, Human
ccugggacuuccaugccu

SEQ ID NO: 3805146 - RNA, 20 nt, Human
ccugggacuuccaugccuua

SEQ ID NO: 3805147 - RNA, 22 nt, Human
ccugggagaaaucuggcuucug

SEQ ID NO: 3805148 - RNA, 17 nt, Human
ccugggagaaccucagg

SEQ ID NO: 3805149 - RNA, 15 nt, Human
ccugggagacagacc

SEQ ID NO: 3805150 - RNA, 13 nt, Human
ccugggaggcagu

SEQ ID NO: 3805151 - RNA, 12 nt, Human
ccugggaggccc

SEQ ID NO: 3805152 - RNA, 23 nt, Human
ccugggaggcggagaguacagug

SEQ ID NO: 3805153 - RNA, 23 nt, Human
ccugggaggcgggcgcacugccu

SEQ ID NO: 3805154 - RNA, 13 nt, Human
ccugggaggcucu

SEQ ID NO: 3805155 - RNA, 20 nt, Human
ccugggaggucaaggcugca

SEQ ID NO: 3805156 - RNA, 23 nt, Human
ccugggagguggagguugcagug

SEQ ID NO: 3805157 - RNA, 18 nt, Human
ccugggagugagcugguu

SEQ ID NO: 3805158 - RNA, 23 nt, Human
ccugggaguuuuguauucaucuu

SEQ ID NO: 3805159 - RNA, 17 nt, Human
ccugggauaggggcaga

SEQ ID NO: 3805160 - RNA, 16 nt, Human
ccugggaucccucauc

SEQ ID NO: 3805161 - RNA, 15 nt, Human
ccuguucaaggcccc

SEQ ID NO: 3805162 - RNA, 21 nt, Human
ccuguucacucuacuuagcau

SEQ ID NO: 3805163 - RNA, 12 nt, Human
ccuguucagcau

SEQ ID NO: 3805164 - RNA, 15 nt, Human
ccuguucagcuccag

SEQ ID NO: 3805165 - RNA, 18 nt, Human
ccuguucauggcagaugu

SEQ ID NO: 3805166 - RNA, 15 nt, Human
cuuaaaaccugcuuu

SEQ ID NO: 3805167 - RNA, 22 nt, Human
cuuaaaacuaggcauuuguaaa

SEQ ID NO: 3805168 - RNA, 18 nt, Human
cuuaaaagaggaaaauga

SEQ ID NO: 3805169 - RNA, 24 nt, Human
cuuaaaagcuaucuucauguaaau

SEQ ID NO: 3805170 - RNA, 14 nt, Human
cuuaaaauaagcag

SEQ ID NO: 3805171 - RNA, 14 nt, Human
cuuaaaauacaaga

SEQ ID NO: 3805172 - RNA, 22 nt, Human
cuuaaaauagcaacacucuaua

SEQ ID NO: 3805173 - RNA, 14 nt, Human
cuuaaaauauuuua

SEQ ID NO: 3805174 - RNA, 14 nt, Human
cuuaaaaugcaaua

SEQ ID NO: 3805175 - RNA, 14 nt, Human
cuuaaaauuugaaa

SEQ ID NO: 3805176 - RNA, 15 nt, Human
cuuaaaauuugaaac

SEQ ID NO: 3805177 - RNA, 20 nt, Human
cuuaaaauuugaaacauugc

SEQ ID NO: 3805178 - RNA, 19 nt, Human
cuuaaacaaaaauuaaaau

SEQ ID NO: 3805179 - RNA, 14 nt, Human
cuuaaacaaaugua

SEQ ID NO: 3805180 - RNA, 15 nt, Human
cuuaaacaccccuca

SEQ ID NO: 3805181 - RNA, 18 nt, Human
cuuaaacaguugcacagc

SEQ ID NO: 3805182 - RNA, 19 nt, Human
cuuaaacaguugcacagca

SEQ ID NO: 3805183 - RNA, 22 nt, Human
cuuaaacaguugcacagcaucu

SEQ ID NO: 3805184 - RNA, 15 nt, Human
cuuaaaccuucaguu

SEQ ID NO: 3805185 - RNA, 12 nt, Human
cuuaaagaaagu

SEQ ID NO: 3805186 - RNA, 22 nt, Human
cuuaaagaaagucgaauuaaua

SEQ ID NO: 3805187 - RNA, 20 nt, Human
cuuaaagaaguauuuuuaga

SEQ ID NO: 3805188 - RNA, 18 nt, Human
cuuaaagaauucaaauuu

SEQ ID NO: 3805189 - RNA, 18 nt, Human
cuuaaagcugccuguagu

SEQ ID NO: 3805190 - RNA, 20 nt, Human
cuuaaaggcaccaucuaaua

SEQ ID NO: 3805191 - RNA, 18 nt, Human
cuuaaaggugucuuccuc

SEQ ID NO: 3805192 - RNA, 14 nt, Human
cuuaaagucaggag

SEQ ID NO: 3805193 - RNA, 11 nt, Human
cuuaaaguuga

SEQ ID NO: 3805194 - RNA, 15 nt, Human
cuuaaaguugucacu

SEQ ID NO: 3805195 - RNA, 23 nt, Human
cuuaaauaaaagaaaugcacaau

SEQ ID NO: 3805196 - RNA, 17 nt, Human
cuuaaauaagaaacuuu

SEQ ID NO: 3805197 - RNA, 20 nt, Human
cuuaaauaaugcuucagaua

SEQ ID NO: 3805198 - RNA, 18 nt, Human
cuuaaauaucaaucauuu

SEQ ID NO: 3805199 - RNA, 11 nt, Human
cuuaaaucuua

SEQ ID NO: 3805200 - RNA, 12 nt, Human
cuuaaaucuuaa

SEQ ID NO: 3805201 - RNA, 21 nt, Human
cuuaaaugaaagcauguggca

SEQ ID NO: 3805202 - RNA, 16 nt, Human
cuuaaaugagaaggaa

SEQ ID NO: 3805203 - RNA, 12 nt, Human
cuuaaaugugaa

SEQ ID NO: 3805204 - RNA, 13 nt, Human
cuuaaaugugaau

SEQ ID NO: 3805205 - RNA, 22 nt, Human
cuuaaaugugaauuacuaacuu

SEQ ID NO: 3805206 - RNA, 18 nt, Human
cuuaaauguuauguauau

SEQ ID NO: 3805207 - RNA, 14 nt, Human
cuuaaauuaaacaa

SEQ ID NO: 3805208 - RNA, 15 nt, Human
cuuaaauuaaacaau

SEQ ID NO: 3805209 - RNA, 14 nt, Human
cuuaaauuccucaa

SEQ ID NO: 3805210 - RNA, 18 nt, Human
cuuaaauuucuuauguga

SEQ ID NO: 3805211 - RNA, 17 nt, Human
cuuaaauuuuaauuuau

SEQ ID NO: 3805212 - RNA, 17 nt, Human
cuuaacauauuuacuaa

SEQ ID NO: 3805213 - RNA, 17 nt, Human
cuuaacaugcuguguaa

SEQ ID NO: 3805214 - RNA, 17 nt, Human
cuuaacauucuguaaaa

SEQ ID NO: 3805215 - RNA, 20 nt, Human
cuuaacauuucuaacucuga

SEQ ID NO: 3805216 - RNA, 24 nt, Human
cuuaacauuucuaacucugaugua

SEQ ID NO: 3805217 - RNA, 14 nt, Human
cuuaaccaguugug

SEQ ID NO: 3805218 - RNA, 12 nt, Human
cuuaaccaucuu

SEQ ID NO: 3805219 - RNA, 13 nt, Human
cuuaacccaagga

SEQ ID NO: 3805220 - RNA, 22 nt, Human
cuuaacccugacaaauuuuaau

SEQ ID NO: 3805221 - RNA, 14 nt, Human
cuuaacggcuccag

SEQ ID NO: 3805222 - RNA, 15 nt, Human
cuuaacggcuccagg

SEQ ID NO: 3805223 - RNA, 13 nt, Human
cuuaacucuuugc

SEQ ID NO: 3805224 - RNA, 12 nt, Human
cuuaacuucaca

SEQ ID NO: 3805225 - RNA, 14 nt, Human
cuuaacuucuugcu

SEQ ID NO: 3805226 - RNA, 19 nt, Human
cuuaagaauuccaaaaaaa

SEQ ID NO: 3805227 - RNA, 19 nt, Human
cuuaagacagaguauccug

SEQ ID NO: 3805228 - RNA, 18 nt, Human
cuuaagacagcauguguu

SEQ ID NO: 3805229 - RNA, 19 nt, Human
cuuaagaccaccucaaauu

SEQ ID NO: 3805230 - RNA, 20 nt, Human
cuuaagaccaccucaaauuu

SEQ ID NO: 3805231 - RNA, 18 nt, Human
cuuaagagaauauuuuaa

SEQ ID NO: 3805232 - RNA, 18 nt, Human
cuuaagcaaaagaaaaag

SEQ ID NO: 3805233 - RNA, 19 nt, Human
cuuaagcaaaggggacagc

SEQ ID NO: 3805234 - RNA, 17 nt, Human
cuuaagcaucuggcucu

SEQ ID NO: 3805235 - RNA, 21 nt, Human
cuuaagccacugccucucccu

SEQ ID NO: 3805236 - RNA, 22 nt, Human
cuuaagccacugccucucccuc

SEQ ID NO: 3805237 - RNA, 17 nt, Human
cuuaagccaucuuggua

SEQ ID NO: 3805238 - RNA, 11 nt, Human
cuuaagcugau

SEQ ID NO: 3805239 - RNA, 13 nt, Human
cuuaagcuuugga

SEQ ID NO: 3805240 - RNA, 18 nt, Human
cuuaaggacaaagugcca

SEQ ID NO: 3805241 - RNA, 14 nt, Human
cuuaaggggcagcu

SEQ ID NO: 3805242 - RNA, 15 nt, Human
cuuaaggggcagcuu

SEQ ID NO: 3805243 - RNA, 18 nt, Human
cuuaaggggcagcuucua

SEQ ID NO: 3805244 - RNA, 19 nt, Human
cuuaaggugaggccugucu

SEQ ID NO: 3805245 - RNA, 21 nt, Human
cuuaaggugaggccugucugu

SEQ ID NO: 3805246 - RNA, 20 nt, Human
cuuaaguacuguagaaaaga

SEQ ID NO: 3805247 - RNA, 19 nt, Human
cuuaaguauaucauguaaa

SEQ ID NO: 3805248 - RNA, 18 nt, Human
cuuaagugaggaaaucaa

SEQ ID NO: 3805249 - RNA, 21 nt, Human
cuuaagugaggaaaucaaagu

SEQ ID NO: 3805250 - RNA, 21 nt, Human
cuuaaguuaguuccacugaga

SEQ ID NO: 3805251 - RNA, 17 nt, Human
cuuaaguuucucagcuc

SEQ ID NO: 3805252 - RNA, 21 nt, Human
cuuaauaaaaaugacagacug

SEQ ID NO: 3805253 - RNA, 19 nt, Human
cuuaauaaacuguggugcu

SEQ ID NO: 3805254 - RNA, 18 nt, Human
cuuaauaaauucagauau

SEQ ID NO: 3805255 - RNA, 21 nt, Human
cuuaauaaucaagagccuuaa

SEQ ID NO: 3805256 - RNA, 19 nt, Human
cuuaauacuguuauucuuu

SEQ ID NO: 3805257 - RNA, 17 nt, Human
cuuaauaguauuuauga

SEQ ID NO: 3805258 - RNA, 20 nt, Human
cuuaauauauagcauuuaug

SEQ ID NO: 3805259 - RNA, 19 nt, Human
cuuaauauucuggagucau

SEQ ID NO: 3805260 - RNA, 12 nt, Human
cuuaauauuucu

SEQ ID NO: 3805261 - RNA, 19 nt, Human
cuuaauauuucuucaaaua

SEQ ID NO: 3805262 - RNA, 20 nt, Human
cuuaaucauuuucauuccua

SEQ ID NO: 3805263 - RNA, 16 nt, Human
cuuaaucuaaauggaa

SEQ ID NO: 3805264 - RNA, 17 nt, Human
cuuaaucuuuucacaaa

SEQ ID NO: 3805265 - RNA, 23 nt, Human
cuuaaugaaguuugaauguuaaa

SEQ ID NO: 3805266 - RNA, 21 nt, Human
cuuaaugaaugagucuguugu

SEQ ID NO: 3805267 - RNA, 14 nt, Human
cuuaaugagauagu

SEQ ID NO: 3805268 - RNA, 15 nt, Human
cuuaaugcuucuuuc

SEQ ID NO: 3805269 - RNA, 22 nt, Human
cuuaauggcugauaauuuuaaa

SEQ ID NO: 3805270 - RNA, 16 nt, Human
cuuaauguaucaaacu

SEQ ID NO: 3805271 - RNA, 14 nt, Human
cuuaauguucuuau

SEQ ID NO: 3805272 - RNA, 15 nt, Human
cuuaauguuuauucc

SEQ ID NO: 3805273 - RNA, 19 nt, Human
cuuaauuaaguaaacuaau

SEQ ID NO: 3805274 - RNA, 17 nt, Human
cuuaauuaauuugauua

SEQ ID NO: 3805275 - RNA, 12 nt, Human
cuuaauuacuua

SEQ ID NO: 3805276 - RNA, 14 nt, Human
cuuaauuauuauaa

SEQ ID NO: 3805277 - RNA, 19 nt, Human
cuuaauuauuauaaaaaua

SEQ ID NO: 3805278 - RNA, 16 nt, Human
cuuaauuauugauguu

SEQ ID NO: 3805279 - RNA, 13 nt, Human
cuuaauucaaaua

SEQ ID NO: 3805280 - RNA, 13 nt, Human
cuuaauucuguuc

SEQ ID NO: 3805281 - RNA, 22 nt, Human
cuuaauucuguucugauauuaa

SEQ ID NO: 3805282 - RNA, 23 nt, Human
cuuaauucuguucugauauuaau

SEQ ID NO: 3805283 - RNA, 16 nt, Human
cuuaauuguucauuuu

SEQ ID NO: 3805284 - RNA, 12 nt, Human
cuuaauuuccuu

SEQ ID NO: 3805285 - RNA, 21 nt, Human
cuuaauuuccuuuuugacacu

SEQ ID NO: 3805286 - RNA, 21 nt, Human
cuuaauuuggaaacuaauaaa

SEQ ID NO: 3805287 - RNA, 18 nt, Human
cuuaauuuucaguauaau

SEQ ID NO: 3805288 - RNA, 23 nt, Human
cuuaauuuugguuguauucuuug

SEQ ID NO: 3805289 - RNA, 20 nt, Human
cuuacaaaguguauuuuaua

SEQ ID NO: 3805290 - RNA, 14 nt, Human
cuuacaaaugaaaa

SEQ ID NO: 3805291 - RNA, 21 nt, Human
cuuacaauauugauugggaaa

SEQ ID NO: 3805292 - RNA, 22 nt, Human
cuuacaauuuuuuuaauuuugu

SEQ ID NO: 3805293 - RNA, 13 nt, Human
cuuacacaaaggg

SEQ ID NO: 3805294 - RNA, 20 nt, Human
cuuacacaagacuuucccca

SEQ ID NO: 3805295 - RNA, 13 nt, Human
cuuacacaauggu

SEQ ID NO: 3805296 - RNA, 20 nt, Human
cuuacaccucguuagggaag

SEQ ID NO: 3805297 - RNA, 20 nt, Human
cuuacacugccuguauacuu

SEQ ID NO: 3805298 - RNA, 21 nt, Human
cuuacacugccuguauacuuu

SEQ ID NO: 3805299 - RNA, 17 nt, Human
cuuacacuuacuguugu

SEQ ID NO: 3805300 - RNA, 16 nt, Human
cuuacagcaaauccuu

SEQ ID NO: 3805301 - RNA, 18 nt, Human
cuuacagcaaauccuuug

SEQ ID NO: 3805302 - RNA, 15 nt, Human
cuuacagccucugac

SEQ ID NO: 3805303 - RNA, 14 nt, Human
cuuacagcugggug

SEQ ID NO: 3805304 - RNA, 16 nt, Human
cuuacaguaggagccc

SEQ ID NO: 3805305 - RNA, 23 nt, Human
cuuacaguaggagcccagcucug

SEQ ID NO: 3805306 - RNA, 15 nt, Human
ccuuauucaggaaaa

SEQ ID NO: 3805307 - RNA, 18 nt, Human
ccuuauugcuguccugga

SEQ ID NO: 3805308 - RNA, 16 nt, Human
ccuuauuuuuucccaa

SEQ ID NO: 3805309 - RNA, 12 nt, Human
ccuucaaagcug

SEQ ID NO: 3805310 - RNA, 22 nt, Human
ccuucaacaauucuaaaaugau

SEQ ID NO: 3805311 - RNA, 13 nt, Human
ccuucaacugaaa

SEQ ID NO: 3805312 - RNA, 14 nt, Human
ccuucaagcucuga

SEQ ID NO: 3805313 - RNA, 19 nt, Human
ccuucaaguuagcucagga

SEQ ID NO: 3805314 - RNA, 16 nt, Human
ccuucaauaaaguauc

SEQ ID NO: 3805315 - RNA, 22 nt, Human
ccuucaauaaaugguauagcaa

SEQ ID NO: 3805316 - RNA, 12 nt, Human
ccuucacaaagc

SEQ ID NO: 3805317 - RNA, 17 nt, Human
ccuucacauacccuccc

SEQ ID NO: 3805318 - RNA, 20 nt, Human
ccuucacauccuguguuucu

SEQ ID NO: 3805319 - RNA, 20 nt, Human
ccuucaccuuuguccccacc

SEQ ID NO: 3805320 - RNA, 19 nt, Human
ccuucacugucaccacccu

SEQ ID NO: 3805321 - RNA, 22 nt, Human
ccuucacuucugaccacacuuc

SEQ ID NO: 3805322 - RNA, 11 nt, Human
ccuucagacac

SEQ ID NO: 3805323 - RNA, 17 nt, Human
ccuucagacacccucaa

SEQ ID NO: 3805324 - RNA, 18 nt, Human
ccuucagacuuugcuucc

SEQ ID NO: 3805325 - RNA, 20 nt, Human
ccuucagagagcagugcuuu

SEQ ID NO: 3805326 - RNA, 23 nt, Human
ccuucagagagcagugcuuuugg

SEQ ID NO: 3805327 - RNA, 18 nt, Human
ccuucagagguggcucug

SEQ ID NO: 3805328 - RNA, 20 nt, Human
ccuucagauccuaccccuga

SEQ ID NO: 3805329 - RNA, 15 nt, Human
ccuucagcccucacc

SEQ ID NO: 3805330 - RNA, 20 nt, Human
ccuucagggugaugccaggu

SEQ ID NO: 3805331 - RNA, 22 nt, Human
ccuucaguaacccccacuggac

SEQ ID NO: 3805332 - RNA, 19 nt, Human
cuguuggacccgcucugga

SEQ ID NO: 3805333 - RNA, 17 nt, Human
cuguuggauuccaugcu

SEQ ID NO: 3805334 - RNA, 19 nt, Human
cuguuggauuuguuuaaaa

SEQ ID NO: 3805335 - RNA, 14 nt, Human
cuguuggcagugag

SEQ ID NO: 3805336 - RNA, 15 nt, Human
cuguuggccagugug

SEQ ID NO: 3805337 - RNA, 18 nt, Human
cuguugggguggguauaa

SEQ ID NO: 3805338 - RNA, 21 nt, Human
cuguuguaagaauucugauug

SEQ ID NO: 3805339 - RNA, 18 nt, Human
cuguuguacauuuaugau

SEQ ID NO: 3805340 - RNA, 15 nt, Human
cuguuguagaagaca

SEQ ID NO: 3805341 - RNA, 17 nt, Human
cuguugucaccuucacc

SEQ ID NO: 3805342 - RNA, 12 nt, Human
cuguugucauug

SEQ ID NO: 3805343 - RNA, 14 nt, Human
cuguuguccucccc

SEQ ID NO: 3805344 - RNA, 15 nt, Human
cuguuguccuccccu

SEQ ID NO: 3805345 - RNA, 18 nt, Human
cuguugucucuucuccuu

SEQ ID NO: 3805346 - RNA, 16 nt, Human
cuguugugccacagag

SEQ ID NO: 3805347 - RNA, 23 nt, Human
cuguugugccacagaguguagcc

SEQ ID NO: 3805348 - RNA, 17 nt, Human
cuguuguguucguucuu

SEQ ID NO: 3805349 - RNA, 17 nt, Human
cuguuguguuguuguua

SEQ ID NO: 3805350 - RNA, 22 nt, Human
cuguuguuaucuguuugagaaa

SEQ ID NO: 3805351 - RNA, 19 nt, Human
cuguuguuaugaugugcuu

SEQ ID NO: 3805352 - RNA, 23 nt, Human
cuguuguuguuaaugaaaauguc

SEQ ID NO: 3805353 - RNA, 20 nt, Human
cuguuuaaaaaaccacaugg

SEQ ID NO: 3805354 - RNA, 19 nt, Human
cuguuuaaauauuucaaga

SEQ ID NO: 3805355 - RNA, 23 nt, Human
cuguuuaaauguuuuucuaugua

SEQ ID NO: 3805356 - RNA, 12 nt, Human
cuguuuaagaaa

SEQ ID NO: 3805357 - RNA, 22 nt, Human
cuguuuaagaaaaguauuuuga

SEQ ID NO: 3805358 - RNA, 18 nt, Human
cuguuuaagacacuuccg

SEQ ID NO: 3805359 - RNA, 16 nt, Human
cuguuuacaagaaaaa

SEQ ID NO: 3805360 - RNA, 17 nt, Human
cuguuuacaagaaaaaa

SEQ ID NO: 3805361 - RNA, 20 nt, Human
cuguuuacaagaaaaaauga

SEQ ID NO: 3805362 - RNA, 13 nt, Human
cuguuuacagugu

SEQ ID NO: 3805363 - RNA, 17 nt, Human
cuguuuacugcaagguu

SEQ ID NO: 3805364 - RNA, 17 nt, Human
cuguuuagauaauacac

SEQ ID NO: 3805365 - RNA, 20 nt, Human
cuguuuagcagcagccuuua

SEQ ID NO: 3805366 - RNA, 18 nt, Human
cuguuuagguuccccugu

SEQ ID NO: 3805367 - RNA, 19 nt, Human
cuguuuagguuccccuguc

SEQ ID NO: 3805368 - RNA, 21 nt, Human
cuguuuagguuccccugucaa

SEQ ID NO: 3805369 - RNA, 20 nt, Human
cuguuuaguagcagugauug

SEQ ID NO: 3805370 - RNA, 15 nt, Human
cuguuuauagaauaa

SEQ ID NO: 3805371 - RNA, 16 nt, Human
cuguuuauauguguug

SEQ ID NO: 3805372 - RNA, 15 nt, Human
cuguuuauggccuca

SEQ ID NO: 3805373 - RNA, 21 nt, Human
cuguuuauggccucagcugcc

SEQ ID NO: 3805374 - RNA, 22 nt, Human
cuguuuauggccucagcugccu

SEQ ID NO: 3805375 - RNA, 13 nt, Human
cuguuuauuacuu

SEQ ID NO: 3805376 - RNA, 14 nt, Human
cuguuuauuacuuc

SEQ ID NO: 3805377 - RNA, 15 nt, Human
cuguuucaaacuuua

SEQ ID NO: 3805378 - RNA, 18 nt, Human
cuguuucaaagccaagac

SEQ ID NO: 3805379 - RNA, 21 nt, Human
cuguuucaaagccaagaccuc

SEQ ID NO: 3805380 - RNA, 17 nt, Human
cuguuucaacacagacc

SEQ ID NO: 3805381 - RNA, 15 nt, Human
cuguuucaaucacug

SEQ ID NO: 3805382 - RNA, 11 nt, Human
cuguuucacaa

SEQ ID NO: 3805383 - RNA, 21 nt, Human
cuguuucccagcaguggacuc

SEQ ID NO: 3805384 - RNA, 16 nt, Human
cuguuucccuucccuu

SEQ ID NO: 3805385 - RNA, 16 nt, Human
cuguuuccuagcugug

SEQ ID NO: 3805386 - RNA, 19 nt, Human
cuguuuccugacauugucu

SEQ ID NO: 3805387 - RNA, 16 nt, Human
cuguuuccugggcacg

SEQ ID NO: 3805388 - RNA, 17 nt, Human
cuguuucucuugagcug

SEQ ID NO: 3805389 - RNA, 12 nt, Human
cuguuucugaaa

SEQ ID NO: 3805390 - RNA, 16 nt, Human
cuguuucugaaaagaa

SEQ ID NO: 3805391 - RNA, 23 nt, Human
cuguuucuggacccuuauaaaau

SEQ ID NO: 3805392 - RNA, 19 nt, Human
cuguuucuuccuguuaaug

SEQ ID NO: 3805393 - RNA, 12 nt, Human
cuguuucuugcu

SEQ ID NO: 3805394 - RNA, 19 nt, Human
cuguuucuugcuuguaccu

SEQ ID NO: 3805395 - RNA, 12 nt, Human
cuguuugacaaa

SEQ ID NO: 3805396 - RNA, 15 nt, Human
cuguuugacaaaccu

SEQ ID NO: 3805397 - RNA, 15 nt, Human
cuguuugacaccucu

SEQ ID NO: 3805398 - RNA, 19 nt, Human
cuguuugacaccucuuuuu

SEQ ID NO: 3805399 - RNA, 23 nt, Human
cuguuugacaccucuuuuuucgu

SEQ ID NO: 3805400 - RNA, 13 nt, Human
cuguuugauucuu

SEQ ID NO: 3805401 - RNA, 14 nt, Human
cuguuugauucuuu

SEQ ID NO: 3805402 - RNA, 19 nt, Human
cuguuugcugauggucugg

SEQ ID NO: 3805403 - RNA, 13 nt, Human
cuguuugcugugc

SEQ ID NO: 3805404 - RNA, 17 nt, Human
cuguuugcuucaccgug

SEQ ID NO: 3805405 - RNA, 21 nt, Human
cuguuugcuucaccguggauu

SEQ ID NO: 3805406 - RNA, 23 nt, Human
cuguuuggaaauaaaucuuccua

SEQ ID NO: 3805407 - RNA, 19 nt, Human
cuguuuggauuuuuaauua

SEQ ID NO: 3805408 - RNA, 21 nt, Human
cuguuuggauuuuuaauuaaa

SEQ ID NO: 3805409 - RNA, 21 nt, Human
cuguuugggaagagcuuagaa

SEQ ID NO: 3805410 - RNA, 16 nt, Human
cuguuugggccccucu

SEQ ID NO: 3805411 - RNA, 20 nt, Human
cuguuugggccccucuccca

SEQ ID NO: 3805412 - RNA, 17 nt, Human
cuguuuguagugaaaua

SEQ ID NO: 3805413 - RNA, 11 nt, Human
cuguuugucau

SEQ ID NO: 3805414 - RNA, 20 nt, Human
cuguuuguuuacaaaaucag

SEQ ID NO: 3805415 - RNA, 14 nt, Human
cuguuuguuucaag

SEQ ID NO: 3805416 - RNA, 15 nt, Human
cuguuuuauaauuuu

SEQ ID NO: 3805417 - RNA, 13 nt, Human
cuguuuuaugacu

SEQ ID NO: 3805418 - RNA, 21 nt, Human
cuguuuuauuuuaauucaguu

SEQ ID NO: 3805419 - RNA, 16 nt, Human
cuguuuucccacgagg

SEQ ID NO: 3805420 - RNA, 20 nt, Human
cuguuuuccucccuucugcu

SEQ ID NO: 3805421 - RNA, 21 nt, Human
cuguuuuccucccuucugcua

SEQ ID NO: 3805422 - RNA, 23 nt, Human
cuguuuuccucccuucugcuacu

SEQ ID NO: 3805423 - RNA, 14 nt, Human
cuguuuuccuuucu

SEQ ID NO: 3805424 - RNA, 18 nt, Human
cuguuuuccuuucucacc

SEQ ID NO: 3805425 - RNA, 18 nt, Human
cuguuuucuaguguauca

SEQ ID NO: 3805426 - RNA, 22 nt, Human
cuguuuucuaguguaucaaaau

SEQ ID NO: 3805427 - RNA, 14 nt, Human
cuguuuucucuuga

SEQ ID NO: 3805428 - RNA, 20 nt, Human
cuguuuucugagcccgggcu

SEQ ID NO: 3805429 - RNA, 18 nt, Human
cuguuuucuucuauucca

SEQ ID NO: 3805430 - RNA, 17 nt, Human
cuguuuugaguuccuau

SEQ ID NO: 3805431 - RNA, 14 nt, Human
cuguuuugccagcc

SEQ ID NO: 3805432 - RNA, 20 nt, Human
cuguuuuguacauagauuua

SEQ ID NO: 3805433 - RNA, 20 nt, Human
cuguuuuguggucagcugua

SEQ ID NO: 3805434 - RNA, 13 nt, Human
cuguuuuguugac

SEQ ID NO: 3805435 - RNA, 20 nt, Human
cuguuuuguugacauucuga

SEQ ID NO: 3805436 - RNA, 21 nt, Human
cuguuuuguugacauucugaa

SEQ ID NO: 3805437 - RNA, 14 nt, Human
cuguuuuuaaaaau

SEQ ID NO: 3805438 - RNA, 16 nt, Human
cuguuuuuaaaaauua

SEQ ID NO: 3805439 - RNA, 16 nt, Human
cuguuuuuaagcuguu

SEQ ID NO: 3805440 - RNA, 13 nt, Human
cuguuuuuaccca

SEQ ID NO: 3805441 - RNA, 13 nt, Human
cuguuuuucacau

SEQ ID NO: 3805442 - RNA, 17 nt, Human
cuguuuuucagggaggu

SEQ ID NO: 3805443 - RNA, 14 nt, Human
cuguuuuuccauag

SEQ ID NO: 3805444 - RNA, 15 nt, Human
cuguuuuucggacag

SEQ ID NO: 3805445 - RNA, 17 nt, Human
cuguuuuucggacaguu

SEQ ID NO: 3805446 - RNA, 17 nt, Human
cuguuuuucuaacuggg

SEQ ID NO: 3805447 - RNA, 15 nt, Human
cuguuuuucugggug

SEQ ID NO: 3805448 - RNA, 15 nt, Human
cuguuuuuguuucuu

SEQ ID NO: 3805449 - RNA, 17 nt, Human
cuguuuuuuccugagcu

SEQ ID NO: 3805450 - RNA, 18 nt, Human
cuguuuuuuccugagcuu

SEQ ID NO: 3805451 - RNA, 21 nt, Human
cuucacaaucugucaguucua

SEQ ID NO: 3805452 - RNA, 21 nt, Human
cuucacaauggugcucauuuc

SEQ ID NO: 3805453 - RNA, 13 nt, Human
cuucacacacaga

SEQ ID NO: 3805454 - RNA, 22 nt, Human
cuucacacacaggcaacugagg

SEQ ID NO: 3805455 - RNA, 18 nt, Human
cuucacacugcaagagcc

SEQ ID NO: 3805456 - RNA, 20 nt, Human
cuucacacugcaagagccuu

SEQ ID NO: 3805457 - RNA, 13 nt, Human
cuucacagagugu

SEQ ID NO: 3805458 - RNA, 18 nt, Human
cuucacaguagagccagc

SEQ ID NO: 3805459 - RNA, 20 nt, Human
cuucacaguagagccagcuu

SEQ ID NO: 3805460 - RNA, 21 nt, Human
cuucacaguagagccagcuug

SEQ ID NO: 3805461 - RNA, 22 nt, Human
cuucacaguagagccagcuugg

SEQ ID NO: 3805462 - RNA, 12 nt, Human
cuucacaguguu

SEQ ID NO: 3805463 - RNA, 13 nt, Human
cuucacaguguuu

SEQ ID NO: 3805464 - RNA, 15 nt, Human
cuucacauuaaaaaa

SEQ ID NO: 3805465 - RNA, 17 nt, Human
cuucacauuaaaaaaug

SEQ ID NO: 3805466 - RNA, 22 nt, Human
cuucacauuccccuggggaccc

SEQ ID NO: 3805467 - RNA, 19 nt, Human
cuucaccagagcauuucca

SEQ ID NO: 3805468 - RNA, 22 nt, Human
cuucaccagaggaaucacucuu

SEQ ID NO: 3805469 - RNA, 23 nt, Human
cuucaccccaguggccacucagc

SEQ ID NO: 3805470 - RNA, 15 nt, Human
cuucaccccccacuc

SEQ ID NO: 3805471 - RNA, 18 nt, Human
cuucaccccggcaggccc

SEQ ID NO: 3805472 - RNA, 21 nt, Human
cuucacccugaaugguuccau

SEQ ID NO: 3805473 - RNA, 15 nt, Human
cuucacccugaguuu

SEQ ID NO: 3805474 - RNA, 15 nt, Human
cuucacccuggagcc

SEQ ID NO: 3805475 - RNA, 18 nt, Human
cuucaccuaagucucugu

SEQ ID NO: 3805476 - RNA, 20 nt, Human
cuucaccugauucaacuaaa

SEQ ID NO: 3805477 - RNA, 21 nt, Human
cuucaccugauucaacuaaaa

SEQ ID NO: 3805478 - RNA, 20 nt, Human
cuucaccuuuguccccaccg

SEQ ID NO: 3805479 - RNA, 18 nt, Human
cuucacgaaguguugcau

SEQ ID NO: 3805480 - RNA, 16 nt, Human
cuucacggcaggacaa

SEQ ID NO: 3805481 - RNA, 18 nt, Human
cuucacuacuuuaauaaa

SEQ ID NO: 3805482 - RNA, 22 nt, Human
cuucacuccggugugccugcag

SEQ ID NO: 3805483 - RNA, 15 nt, Human
cuucacuccugcugu

SEQ ID NO: 3805484 - RNA, 13 nt, Human
cuucacugccuuu

SEQ ID NO: 3805485 - RNA, 17 nt, Human
cuucacugccuuugcuc

SEQ ID NO: 3805486 - RNA, 13 nt, Human
cuucacuguauaa

SEQ ID NO: 3805487 - RNA, 12 nt, Human
cuucacugucac

SEQ ID NO: 3805488 - RNA, 21 nt, Human
cuucacuguccuccaagccag

SEQ ID NO: 3805489 - RNA, 16 nt, Human
cuucacuguugaaaau

SEQ ID NO: 3805490 - RNA, 13 nt, Human
cuucacuucugac

SEQ ID NO: 3805491 - RNA, 15 nt, Human
cuucacuucugacca

SEQ ID NO: 3805492 - RNA, 21 nt, Human
cuucacuucugacucuucccc

SEQ ID NO: 3805493 - RNA, 21 nt, Human
cuucacuuuaauucucaugug

SEQ ID NO: 3805494 - RNA, 14 nt, Human
cuucacuuuugcaa

SEQ ID NO: 3805495 - RNA, 11 nt, Human
cuucagaaaga

SEQ ID NO: 3805496 - RNA, 19 nt, Human
cuucagacagagaggacug

SEQ ID NO: 3805497 - RNA, 11 nt, Human
cuucagacaua

SEQ ID NO: 3805498 - RNA, 15 nt, Human
cuucagacuuugcuu

SEQ ID NO: 3805499 - RNA, 16 nt, Human
cuucagagacuccugc

SEQ ID NO: 3805500 - RNA, 18 nt, Human
cuucagagacuccugcag

SEQ ID NO: 3805501 - RNA, 22 nt, Human
cuucagagacuccugcaggcag

SEQ ID NO: 3805502 - RNA, 24 nt, Human
cuucagagacuccugcaggcagcc

SEQ ID NO: 3805503 - RNA, 19 nt, Human
cuucagagagcagugcuuu

SEQ ID NO: 3805504 - RNA, 22 nt, Human
cuucagagagcagugcuuuugg

SEQ ID NO: 3805505 - RNA, 16 nt, Human
cuucagagagcuggua

SEQ ID NO: 3805506 - RNA, 18 nt, Human
cuucagagauaggccugu

SEQ ID NO: 3805507 - RNA, 18 nt, Human
cuucagagcugacacagg

SEQ ID NO: 3805508 - RNA, 13 nt, Human
cuucagaggcuga

SEQ ID NO: 3805509 - RNA, 20 nt, Human
cuucagaucagugcuugagu

SEQ ID NO: 3805510 - RNA, 21 nt, Human
cuucagaugggaggaaagaga

SEQ ID NO: 3805511 - RNA, 17 nt, Human
cuucagauguggagcca

SEQ ID NO: 3805512 - RNA, 17 nt, Human
cuucagcaagagagaac

SEQ ID NO: 3805513 - RNA, 20 nt, Human
cuucagcaaguuagaacuag

SEQ ID NO: 3805514 - RNA, 14 nt, Human
cuucagcacuuuag

SEQ ID NO: 3805515 - RNA, 16 nt, Human
cuucagcauucccucc

SEQ ID NO: 3805516 - RNA, 17 nt, Human
cuucagcauucccuccc

SEQ ID NO: 3805517 - RNA, 18 nt, Human
cuucagcauucccuccca

SEQ ID NO: 3805518 - RNA, 15 nt, Human
cuucagccaccucuc

SEQ ID NO: 3805519 - RNA, 17 nt, Human
cuucagccaccucucuu

SEQ ID NO: 3805520 - RNA, 18 nt, Human
cuucagccaggagcuggg

SEQ ID NO: 3805521 - RNA, 15 nt, Human
cuucagcccccagcc

SEQ ID NO: 3805522 - RNA, 16 nt, Human
cuucagcccccagccc

SEQ ID NO: 3805523 - RNA, 17 nt, Human
cuucagcccccagcccc

SEQ ID NO: 3805524 - RNA, 20 nt, Human
cuucagcccccagccccucc

SEQ ID NO: 3805525 - RNA, 19 nt, Human
cuucagcccucaccccugg

SEQ ID NO: 3805526 - RNA, 17 nt, Human
cuucagccuaguggcuu

SEQ ID NO: 3805527 - RNA, 13 nt, Human
cuucagccuccca

SEQ ID NO: 3805528 - RNA, 14 nt, Human
cuucagccucccac

SEQ ID NO: 3805529 - RNA, 15 nt, Human
cuucagccucccaca

SEQ ID NO: 3805530 - RNA, 17 nt, Human
cuucagccucccacagu

SEQ ID NO: 3805531 - RNA, 20 nt, Human
cuucagccucuuucuguccc

SEQ ID NO: 3805532 - RNA, 14 nt, Human
cuucagccugaggc

SEQ ID NO: 3805533 - RNA, 22 nt, Human
cuucagccugaggcugagacug

SEQ ID NO: 3805534 - RNA, 16 nt, Human
cuucagcgguuuauau

SEQ ID NO: 3805535 - RNA, 18 nt, Human
cuucagcgguuuauauaa

SEQ ID NO: 3805536 - RNA, 18 nt, Human
cuuccuccagcugcacca

SEQ ID NO: 3805537 - RNA, 20 nt, Human
cuuccuccagcugcaccaga

SEQ ID NO: 3805538 - RNA, 22 nt, Human
cuuccuccagcugcaccagagc

SEQ ID NO: 3805539 - RNA, 15 nt, Human
cuuccucccucauuc

SEQ ID NO: 3805540 - RNA, 12 nt, Human
cuuccucccucc

SEQ ID NO: 3805541 - RNA, 14 nt, Human
cuuccucccucccu

SEQ ID NO: 3805542 - RNA, 18 nt, Human
cuuccucccucccucuuu

SEQ ID NO: 3805543 - RNA, 20 nt, Human
cuuccuccgaggccaguacc

SEQ ID NO: 3805544 - RNA, 16 nt, Human
cuuccuccuccccacu

SEQ ID NO: 3805545 - RNA, 18 nt, Human
cuuccuccucccuccugc

SEQ ID NO: 3805546 - RNA, 18 nt, Human
cuuccuccugacacccca

SEQ ID NO: 3805547 - RNA, 12 nt, Human
cuuccuccuggg

SEQ ID NO: 3805548 - RNA, 15 nt, Human
cuuccuccugggccc

SEQ ID NO: 3805549 - RNA, 21 nt, Human
cuuccucucauccuuuucucc

SEQ ID NO: 3805550 - RNA, 14 nt, Human
cuuccucuccaccc

SEQ ID NO: 3805551 - RNA, 15 nt, Human
cuuccucuccugucu

SEQ ID NO: 3805552 - RNA, 15 nt, Human
cuuccucuccuuccu

SEQ ID NO: 3805553 - RNA, 17 nt, Human
cuuccucuccuuccuug

SEQ ID NO: 3805554 - RNA, 20 nt, Human
cuuccucucgcggcccucag

SEQ ID NO: 3805555 - RNA, 21 nt, Human
cuuccucucgcggcccucagu

SEQ ID NO: 3805556 - RNA, 22 nt, Human
cuuccucugaggcugaaauuca

SEQ ID NO: 3805557 - RNA, 20 nt, Human
cuuccucugcagcugaccuc

SEQ ID NO: 3805558 - RNA, 16 nt, Human
cuuccucugcuaaauu

SEQ ID NO: 3805559 - RNA, 14 nt, Human
cuuccucugcuccc

SEQ ID NO: 3805560 - RNA, 15 nt, Human
cuuccucuugacccu

SEQ ID NO: 3805561 - RNA, 19 nt, Human
cuuccucuugacccugcac

SEQ ID NO: 3805562 - RNA, 14 nt, Human
cuuccucuugucug

SEQ ID NO: 3805563 - RNA, 19 nt, Human
cuuccucuuuuccuuccca

SEQ ID NO: 3805564 - RNA, 19 nt, Human
cuuccugaaacuauauuuu

SEQ ID NO: 3805565 - RNA, 15 nt, Human
cuuccugacacuuua

SEQ ID NO: 3805566 - RNA, 17 nt, Human
cuuccugacacuuuaau

SEQ ID NO: 3805567 - RNA, 14 nt, Human
cuuccugagcuuua

SEQ ID NO: 3805568 - RNA, 23 nt, Human
cuuccugaggggagacagagcaa

SEQ ID NO: 3805569 - RNA, 14 nt, Human
cuuccugaguucag

SEQ ID NO: 3805570 - RNA, 19 nt, Human
cuuccugauugguuucucu

SEQ ID NO: 3805571 - RNA, 23 nt, Human
cuuccugauugguuucucuucuc

SEQ ID NO: 3805572 - RNA, 21 nt, Human
cuuccugcaggcaggaacaaa

SEQ ID NO: 3805573 - RNA, 21 nt, Human
cuuccugcauucacccagaca

SEQ ID NO: 3805574 - RNA, 19 nt, Human
cuuccugccccucuuucuc

SEQ ID NO: 3805575 - RNA, 20 nt, Human
cuuccugccccucuuucucu

SEQ ID NO: 3805576 - RNA, 18 nt, Human
cuuccugccuggucuccu

SEQ ID NO: 3805577 - RNA, 19 nt, Human
cuuccugcuuccucagagg

SEQ ID NO: 3805578 - RNA, 14 nt, Human
cuuccugcuugcca

SEQ ID NO: 3805579 - RNA, 17 nt, Human
cuuccuggacagcugug

SEQ ID NO: 3805580 - RNA, 20 nt, Human
cuuccuggacagcugugccu

SEQ ID NO: 3805581 - RNA, 22 nt, Human
cuuccuggacagcugugccucg

SEQ ID NO: 3805582 - RNA, 14 nt, Human
cuuccuggagacug

SEQ ID NO: 3805583 - RNA, 13 nt, Human
cuuccuggagcag

SEQ ID NO: 3805584 - RNA, 19 nt, Human
cuuccuggccgccuggguc

SEQ ID NO: 3805585 - RNA, 23 nt, Human
cuuccuggccggugugggggccc

SEQ ID NO: 3805586 - RNA, 15 nt, Human
cuuccuggccugaga

SEQ ID NO: 3805587 - RNA, 19 nt, Human
cuuccuggccugagaguca

SEQ ID NO: 3805588 - RNA, 18 nt, Human
cuuccugggcacacgcug

SEQ ID NO: 3805589 - RNA, 20 nt, Human
cuuccuggggcaucuggcga

SEQ ID NO: 3805590 - RNA, 22 nt, Human
cuuccugggucuucagcauucc

SEQ ID NO: 3805591 - RNA, 17 nt, Human
cuuccuggucgaaaguu

SEQ ID NO: 3805592 - RNA, 22 nt, Human
cuuccuguaacacaagccacag

SEQ ID NO: 3805593 - RNA, 17 nt, Human
cuuccugucccaccucu

SEQ ID NO: 3805594 - RNA, 21 nt, Human
cuuccugucccaccucuucuc

SEQ ID NO: 3805595 - RNA, 15 nt, Human
cuucaguugcuuguc

SEQ ID NO: 3805596 - RNA, 19 nt, Human
cuucaguugguguguuuuu

SEQ ID NO: 3805597 - RNA, 14 nt, Human
cuucaguuguuuuc

SEQ ID NO: 3805598 - RNA, 20 nt, Human
cuucaguuucacagaaaaua

SEQ ID NO: 3805599 - RNA, 14 nt, Human
cuucauaaaugaag

SEQ ID NO: 3805600 - RNA, 23 nt, Human
cuucauacuugaacguuuucuaa

SEQ ID NO: 3805601 - RNA, 15 nt, Human
cuucauauauuucuc

SEQ ID NO: 3805602 - RNA, 17 nt, Human
cuucauaucauccacac

SEQ ID NO: 3805603 - RNA, 20 nt, Human
cuucauaucauccacacaug

SEQ ID NO: 3805604 - RNA, 23 nt, Human
cuucauaugaaaggugccaugga

SEQ ID NO: 3805605 - RNA, 20 nt, Human
cuucauauucuaaaaccauu

SEQ ID NO: 3805606 - RNA, 15 nt, Human
cuucauauugcugag

SEQ ID NO: 3805607 - RNA, 19 nt, Human
cuucaucauucccucucau

SEQ ID NO: 3805608 - RNA, 15 nt, Human
cuucaucccauucca

SEQ ID NO: 3805609 - RNA, 23 nt, Human
cuucaucccauuccaggcagccu

SEQ ID NO: 3805610 - RNA, 15 nt, Human
cuucaucccuuucca

SEQ ID NO: 3805611 - RNA, 19 nt, Human
cuucauccuuagcaacagc

SEQ ID NO: 3805612 - RNA, 16 nt, Human
cuucaucuaauaugau

SEQ ID NO: 3805613 - RNA, 13 nt, Human
cuucaucuccagg

SEQ ID NO: 3805614 - RNA, 19 nt, Human
cuucaucucccaccuagca

SEQ ID NO: 3805615 - RNA, 15 nt, Human
cuucaucugcccaac

SEQ ID NO: 3805616 - RNA, 14 nt, Human
cuucaucuggcaac

SEQ ID NO: 3805617 - RNA, 14 nt, Human
cuucaucuggcugc

SEQ ID NO: 3805618 - RNA, 12 nt, Human
cuucaucuuccc

SEQ ID NO: 3805619 - RNA, 14 nt, Human
cuucaucuuccugu

SEQ ID NO: 3805620 - RNA, 22 nt, Human
cuucaucuuccuguguccugaa

SEQ ID NO: 3805621 - RNA, 12 nt, Human
cuucaucuucuc

SEQ ID NO: 3805622 - RNA, 16 nt, Human
cuucaucuucucagcu

SEQ ID NO: 3805623 - RNA, 17 nt, Human
cuucaucuucucagcuc

SEQ ID NO: 3805624 - RNA, 16 nt, Human
cuucaugacagccucc

SEQ ID NO: 3805625 - RNA, 17 nt, Human
cuucaugcaaugacauc

SEQ ID NO: 3805626 - RNA, 18 nt, Human
cuucaugcacuuaaagaa

SEQ ID NO: 3805627 - RNA, 20 nt, Human
cuucaugcauagguuuagca

SEQ ID NO: 3805628 - RNA, 13 nt, Human
cuucaugcaugga

SEQ ID NO: 3805629 - RNA, 14 nt, Human
cuucaugccagcua

SEQ ID NO: 3805630 - RNA, 16 nt, Human
cuucaugccagcuacu

SEQ ID NO: 3805631 - RNA, 17 nt, Human
cuucaugccuuuguaag

SEQ ID NO: 3805632 - RNA, 19 nt, Human
cuucaugccuuuguaaguu

SEQ ID NO: 3805633 - RNA, 19 nt, Human
cuucaugcucagcccugac

SEQ ID NO: 3805634 - RNA, 21 nt, Human
cuucauggaacucagcugucu

SEQ ID NO: 3805635 - RNA, 22 nt, Human
cuucauguucaauuauuucccc

SEQ ID NO: 3805636 - RNA, 15 nt, Human
cuucauuagagcagg

SEQ ID NO: 3805637 - RNA, 15 nt, Human
cuucauuauucucug

SEQ ID NO: 3805638 - RNA, 14 nt, Human
cuucauuauuuuaa

SEQ ID NO: 3805639 - RNA, 20 nt, Human
cuucauucaauauugacauu

SEQ ID NO: 3805640 - RNA, 17 nt, Human
cuucauuccuuccacua

SEQ ID NO: 3805641 - RNA, 18 nt, Human
cuucauucuaucaagccc

SEQ ID NO: 3805642 - RNA, 13 nt, Human
cuucauucuccuu

SEQ ID NO: 3805643 - RNA, 12 nt, Human
cuucauucucgu

SEQ ID NO: 3805644 - RNA, 22 nt, Human
cuucauucucgugagucauuua

SEQ ID NO: 3805645 - RNA, 21 nt, Human
cuucauugagaguuuugucuu

SEQ ID NO: 3805646 - RNA, 17 nt, Human
cuucauugauuuccugu

SEQ ID NO: 3805647 - RNA, 20 nt, Human
cuucauugauuuccuguguc

SEQ ID NO: 3805648 - RNA, 22 nt, Human
cuucauuguacuaccuguguau

SEQ ID NO: 3805649 - RNA, 23 nt, Human
cuucauuguacuaccuguguaua

SEQ ID NO: 3805650 - RNA, 15 nt, Human
cuucauugucccucu

SEQ ID NO: 3805651 - RNA, 16 nt, Human
cuucauugucccucuu

SEQ ID NO: 3805652 - RNA, 13 nt, Human
cuucauuuaaaaa

SEQ ID NO: 3805653 - RNA, 14 nt, Human
cuucauuuaaaaaa

SEQ ID NO: 3805654 - RNA, 16 nt, Human
cuucauuucauuguau

SEQ ID NO: 3805655 - RNA, 19 nt, Human
cuucauuucauuguaugau

SEQ ID NO: 3805656 - RNA, 11 nt, Human
cuucauuugua

SEQ ID NO: 3805657 - RNA, 18 nt, Human
cuucauuugugucaaugg

SEQ ID NO: 3805658 - RNA, 22 nt, Human
cuucauuuuauuaauauuuuuc

SEQ ID NO: 3805659 - RNA, 19 nt, Human
cuuccaaaaauuauuauaa

SEQ ID NO: 3805660 - RNA, 14 nt, Human
cuuccaaagaaugu

SEQ ID NO: 3805661 - RNA, 12 nt, Human
cuuccaaagcag

SEQ ID NO: 3805662 - RNA, 15 nt, Human
cuuccaaauaaauaa

SEQ ID NO: 3805663 - RNA, 15 nt, Human
cuuccaaauaauaaa

SEQ ID NO: 3805664 - RNA, 20 nt, Human
cuuccaaauaauaaagucua

SEQ ID NO: 3805665 - RNA, 16 nt, Human
cuuccaaauccccuaa

SEQ ID NO: 3805666 - RNA, 19 nt, Human
cuuccaaauccccuaagca

SEQ ID NO: 3805667 - RNA, 21 nt, Human
cuuccaaccauuuaucuugaa

SEQ ID NO: 3805668 - RNA, 17 nt, Human
cuuccaacugcugcccc

SEQ ID NO: 3805669 - RNA, 16 nt, Human
cuuccaagaccugacu

SEQ ID NO: 3805670 - RNA, 17 nt, Human
cuuccaagaccugacuc

SEQ ID NO: 3805671 - RNA, 14 nt, Human
cuuccaagagccug

SEQ ID NO: 3805672 - RNA, 16 nt, Human
cuuccaagcaaaggug

SEQ ID NO: 3805673 - RNA, 15 nt, Human
cuuccaagguggucu

SEQ ID NO: 3805674 - RNA, 16 nt, Human
cuuccaagguggucug

SEQ ID NO: 3805675 - RNA, 18 nt, Human
cuuccaagguggucugcu

SEQ ID NO: 3805676 - RNA, 20 nt, Human
cuuccaagguggucugcucg

SEQ ID NO: 3805677 - RNA, 16 nt, Human
cuuccaauuaaugcuu

SEQ ID NO: 3805678 - RNA, 17 nt, Human
cuuccaauuaaugcuuu

SEQ ID NO: 3805679 - RNA, 14 nt, Human
cuuccacaagagcc

SEQ ID NO: 3805680 - RNA, 21 nt, Human
cuuccacaagagcccaggccu

SEQ ID NO: 3805681 - RNA, 16 nt, Human
cuuccacauguuacug

SEQ ID NO: 3805682 - RNA, 13 nt, Human
cuuccaccacaga

SEQ ID NO: 3805683 - RNA, 13 nt, Human
cuuccaccagccu

SEQ ID NO: 3805684 - RNA, 15 nt, Human
cuuccaccagccugc

SEQ ID NO: 3805685 - RNA, 21 nt, Human
cuuccaccagccugcacuacu

SEQ ID NO: 3805686 - RNA, 17 nt, Human
cuuccaccauuguccua

SEQ ID NO: 3805687 - RNA, 13 nt, Human
cuuccacccaggg

SEQ ID NO: 3805688 - RNA, 12 nt, Human
cuuccacccagu

SEQ ID NO: 3805689 - RNA, 14 nt, Human
cuuccaccucccuc

SEQ ID NO: 3805690 - RNA, 15 nt, Human
cuuccaccucccucc

SEQ ID NO: 3805691 - RNA, 15 nt, Human
cuuccaccugcucug

SEQ ID NO: 3805692 - RNA, 20 nt, Human
cuuccacgcugucuccagac

SEQ ID NO: 3805693 - RNA, 18 nt, Human
cuuccacugagggcaguc

SEQ ID NO: 3805694 - RNA, 13 nt, Human
cuuccacugccuc

SEQ ID NO: 3805695 - RNA, 14 nt, Human
cuuccacugccucu

SEQ ID NO: 3805696 - RNA, 19 nt, Human
cuuccacugccucugccuu

SEQ ID NO: 3805697 - RNA, 15 nt, Human
cuucuacugcuucua

SEQ ID NO: 3805698 - RNA, 17 nt, Human
cuucuagaaccaggcaa

SEQ ID NO: 3805699 - RNA, 23 nt, Human
cuucuagaauuauaagucacaaa

SEQ ID NO: 3805700 - RNA, 9 nt, Human
cuucuagag

SEQ ID NO: 3805701 - RNA, 13 nt, Human
cuucuagaguuca

SEQ ID NO: 3805702 - RNA, 14 nt, Human
cuucuagaguucag

SEQ ID NO: 3805703 - RNA, 22 nt, Human
cuucuaggauagcuaacuguaa

SEQ ID NO: 3805704 - RNA, 15 nt, Human
cuucuaguuucccac

SEQ ID NO: 3805705 - RNA, 16 nt, Human
cuucuaguuucccaca

SEQ ID NO: 3805706 - RNA, 18 nt, Human
cuucuauacccacccaga

SEQ ID NO: 3805707 - RNA, 16 nt, Human
cuucuauagcaucacu

SEQ ID NO: 3805708 - RNA, 14 nt, Human
cuucuauauaauuc

SEQ ID NO: 3805709 - RNA, 13 nt, Human
cuucuaugaccca

SEQ ID NO: 3805710 - RNA, 18 nt, Human
cuucuauguaggaaaaaa

SEQ ID NO: 3805711 - RNA, 13 nt, Human
cuucuauucuagc

SEQ ID NO: 3805712 - RNA, 13 nt, Human
cuucuauugccuc

SEQ ID NO: 3805713 - RNA, 16 nt, Human
cuucuauuuauuuauu

SEQ ID NO: 3805714 - RNA, 23 nt, Human
cuucuauuuggggcuugaugacu

SEQ ID NO: 3805715 - RNA, 14 nt, Human
cuucuauuuuguaa

SEQ ID NO: 3805716 - RNA, 16 nt, Human
cuucucaaaagaacuu

SEQ ID NO: 3805717 - RNA, 23 nt, Human
cuucucaaguucuaagauucuaa

SEQ ID NO: 3805718 - RNA, 23 nt, Human
cuucucacagcacaugcuggcca

SEQ ID NO: 3805719 - RNA, 13 nt, Human
cuucucaccagcu

SEQ ID NO: 3805720 - RNA, 14 nt, Human
cuucucaccagcug

SEQ ID NO: 3805721 - RNA, 15 nt, Human
cuucucaccagcugc

SEQ ID NO: 3805722 - RNA, 21 nt, Human
cuucucacugccaugccagcu

SEQ ID NO: 3805723 - RNA, 13 nt, Human
cuucucacuuuuu

SEQ ID NO: 3805724 - RNA, 16 nt, Human
cuucucagaaggcaaa

SEQ ID NO: 3805725 - RNA, 14 nt, Human
cuucucagauuucu

SEQ ID NO: 3805726 - RNA, 14 nt, Human
cuucucagcuccca

SEQ ID NO: 3805727 - RNA, 20 nt, Human
cuucucaggacacaggccug

SEQ ID NO: 3805728 - RNA, 22 nt, Human
cuucucaggcaugaacauguac

SEQ ID NO: 3805729 - RNA, 15 nt, Human
cuucucaggcucugc

SEQ ID NO: 3805730 - RNA, 15 nt, Human
cuucucauagcauua

SEQ ID NO: 3805731 - RNA, 22 nt, Human
cuucucauagcauuaacuaauc

SEQ ID NO: 3805732 - RNA, 14 nt, Human
cuucucaucacaca

SEQ ID NO: 3805733 - RNA, 13 nt, Human
cuucucaucacuc

SEQ ID NO: 3805734 - RNA, 16 nt, Human
cuucucauccugcagg

SEQ ID NO: 3805735 - RNA, 17 nt, Human
cuucucauccugcaggc

SEQ ID NO: 3805736 - RNA, 17 nt, Human
cuucucaucuugacaga

SEQ ID NO: 3805737 - RNA, 16 nt, Human
cuucucaucuugugaa

SEQ ID NO: 3805738 - RNA, 14 nt, Human
cuucucaugaucca

SEQ ID NO: 3805739 - RNA, 21 nt, Human
cuucucauuucaccccucccu

SEQ ID NO: 3805740 - RNA, 17 nt, Human
cuucuccacccugcucu

SEQ ID NO: 3805741 - RNA, 18 nt, Human
cuucuccacccugcucuc

SEQ ID NO: 3805742 - RNA, 20 nt, Human
ccagggcaucuugcuggcua

SEQ ID NO: 3805743 - RNA, 21 nt, Human
ccagggcaucuugcuggcuac

SEQ ID NO: 3805744 - RNA, 14 nt, Human
ccagggccacgcuc

SEQ ID NO: 3805745 - RNA, 13 nt, Human
ccagggccacgug

SEQ ID NO: 3805746 - RNA, 21 nt, Human
ccagggccacucugccucugc

SEQ ID NO: 3805747 - RNA, 12 nt, Human
ccagggccaggg

SEQ ID NO: 3805748 - RNA, 15 nt, Human
ccagggccagggguc

SEQ ID NO: 3805749 - RNA, 14 nt, Human
ccagggcccagagc

SEQ ID NO: 3805750 - RNA, 17 nt, Human
ccagggcccagagccca

SEQ ID NO: 3805751 - RNA, 19 nt, Human
ccagggcccagagcccagc

SEQ ID NO: 3805752 - RNA, 21 nt, Human
ccagggcccagagcccagcuc

SEQ ID NO: 3805753 - RNA, 17 nt, Human
ccagggcccccaucuca

SEQ ID NO: 3805754 - RNA, 22 nt, Human
ccagggccccucacccugccuu

SEQ ID NO: 3805755 - RNA, 15 nt, Human
ccagggccccucucc

SEQ ID NO: 3805756 - RNA, 24 nt, Human
ccagggccccucuccccagggaag

SEQ ID NO: 3805757 - RNA, 17 nt, Human
ccagggccuggaagaca

SEQ ID NO: 3805758 - RNA, 19 nt, Human
ccagggccuggaagacaga

SEQ ID NO: 3805759 - RNA, 12 nt, Human
ccagggccuuuu

SEQ ID NO: 3805760 - RNA, 12 nt, Human
ccagggcucagc

SEQ ID NO: 3805761 - RNA, 14 nt, Human
ccagggcucagccu

SEQ ID NO: 3805762 - RNA, 15 nt, Human
ccagggcucagccug

SEQ ID NO: 3805763 - RNA, 20 nt, Human
ccagggcucagccugguggg

SEQ ID NO: 3805764 - RNA, 19 nt, Human
ccagggcuccagccccucu

SEQ ID NO: 3805765 - RNA, 12 nt, Human
ccagggcuccug

SEQ ID NO: 3805766 - RNA, 14 nt, Human
ccagggcuccugca

SEQ ID NO: 3805767 - RNA, 23 nt, Human
ccagggcugcccugagaagcugc

SEQ ID NO: 3805768 - RNA, 20 nt, Human
ccagggcugcuagacggagg

SEQ ID NO: 3805769 - RNA, 17 nt, Human
ccagggcuggacugagg

SEQ ID NO: 3805770 - RNA, 13 nt, Human
ccagggcuggaga

SEQ ID NO: 3805771 - RNA, 21 nt, Human
ccagggcugggaggaaggacu

SEQ ID NO: 3805772 - RNA, 22 nt, Human
ccagggcuguaacugccaggcu

SEQ ID NO: 3805773 - RNA, 22 nt, Human
ccagggcuuaccuguacacuga

SEQ ID NO: 3805774 - RNA, 21 nt, Human
ccaggggaaaaucagccugcu

SEQ ID NO: 3805775 - RNA, 13 nt, Human
ccaggggaaccug

SEQ ID NO: 3805776 - RNA, 17 nt, Human
ccaggggaccuccuggg

SEQ ID NO: 3805777 - RNA, 21 nt, Human
ccaggggagagggucuggaga

SEQ ID NO: 3805778 - RNA, 20 nt, Human
ccaggggagcagaggggcag

SEQ ID NO: 3805779 - RNA, 21 nt, Human
ccaggggaggccugaggcuuc

SEQ ID NO: 3805780 - RNA, 18 nt, Human
ccaggggaguugugucug

SEQ ID NO: 3805781 - RNA, 19 nt, Human
ccaggggcagccccaggcc

SEQ ID NO: 3805782 - RNA, 15 nt, Human
ccaggggcaggcaca

SEQ ID NO: 3805783 - RNA, 19 nt, Human
ccaggggcccaaggcggcc

SEQ ID NO: 3805784 - RNA, 19 nt, Human
ccaggggccccuccagcuu

SEQ ID NO: 3805785 - RNA, 16 nt, Human
ccaggggccuuugggu

SEQ ID NO: 3805786 - RNA, 16 nt, Human
ccaggggcucccuccg

SEQ ID NO: 3805787 - RNA, 21 nt, Human
ccaggggcugcuuccuccugg

SEQ ID NO: 3805788 - RNA, 19 nt, Human
ccaggggcuggcuucagga

SEQ ID NO: 3805789 - RNA, 18 nt, Human
ccagggggacuagccccu

SEQ ID NO: 3805790 - RNA, 20 nt, Human
ccagggggacuagccccugu

SEQ ID NO: 3805791 - RNA, 23 nt, Human
ccagggggacuagccccugugga

SEQ ID NO: 3805792 - RNA, 22 nt, Human
ccagggggccagucccugaggc

SEQ ID NO: 3805793 - RNA, 13 nt, Human
ccagggggcuucc

SEQ ID NO: 3805794 - RNA, 20 nt, Human
ccaggggggugaggagcugg

SEQ ID NO: 3805795 - RNA, 18 nt, Human
ccagggggucucacccau

SEQ ID NO: 3805796 - RNA, 18 nt, Human
ccaggggucccagccacc

SEQ ID NO: 3805797 - RNA, 19 nt, Human
ccaggggucucccuggagu

SEQ ID NO: 3805798 - RNA, 13 nt, Human
ccaggggugcccc

SEQ ID NO: 3805799 - RNA, 15 nt, Human
ccaggggugcccccu

SEQ ID NO: 3805800 - RNA, 18 nt, Human
ccaggggugcccccuccu

SEQ ID NO: 3805801 - RNA, 20 nt, Human
ccaggggugcccccuccucu

SEQ ID NO: 3805802 - RNA, 13 nt, Human
ccaggggugggac

SEQ ID NO: 3805803 - RNA, 19 nt, Human
ccaggggugggacacccug

SEQ ID NO: 3805804 - RNA, 20 nt, Human
ccaggggugggacacccugu

SEQ ID NO: 3805805 - RNA, 14 nt, Human
ccaggguagcccgc

SEQ ID NO: 3805806 - RNA, 17 nt, Human
ccaggguaugaagagug

SEQ ID NO: 3805807 - RNA, 19 nt, Human
ccagggucagaaacaggac

SEQ ID NO: 3805808 - RNA, 16 nt, Human
ccagggucccucugug

SEQ ID NO: 3805809 - RNA, 16 nt, Human
ccaggguccugggagg

SEQ ID NO: 3805810 - RNA, 23 nt, Human
ccaggguccugggaggagagaca

SEQ ID NO: 3805811 - RNA, 13 nt, Human
ccagggucuccag

SEQ ID NO: 3805812 - RNA, 17 nt, Human
ccagggucuccagaaag

SEQ ID NO: 3805813 - RNA, 16 nt, Human
ccagggucucucccuc

SEQ ID NO: 3805814 - RNA, 18 nt, Human
ccagggucucucccucag

SEQ ID NO: 3805815 - RNA, 22 nt, Human
ccagggucugugugaauguggg

SEQ ID NO: 3805816 - RNA, 23 nt, Human
ccagggucuucccuaccucaggc

SEQ ID NO: 3805817 - RNA, 14 nt, Human
ccagggugagagcu

SEQ ID NO: 3805818 - RNA, 17 nt, Human
ccagggugagagcugcu

SEQ ID NO: 3805819 - RNA, 22 nt, Human
ccagggugcccagaacuucccu

SEQ ID NO: 3805820 - RNA, 22 nt, Human
ccaggguggacuuagaaagcag

SEQ ID NO: 3805821 - RNA, 18 nt, Human
ccaggguggccacaccuc

SEQ ID NO: 3805822 - RNA, 19 nt, Human
ccaggguguggcccugcca

SEQ ID NO: 3805823 - RNA, 19 nt, Human
cuauacugcauacuuuuua

SEQ ID NO: 3805824 - RNA, 13 nt, Human
cuauacugccucu

SEQ ID NO: 3805825 - RNA, 23 nt, Human
cuauacugcuuggagcugagcaa

SEQ ID NO: 3805826 - RNA, 14 nt, Human
cuauacuugaacaa

SEQ ID NO: 3805827 - RNA, 16 nt, Human
cuauacuugaacaaaa

SEQ ID NO: 3805828 - RNA, 20 nt, Human
cuauacuugaacaaaagggu

SEQ ID NO: 3805829 - RNA, 19 nt, Human
cuauacuugcuuuguguuc

SEQ ID NO: 3805830 - RNA, 14 nt, Human
cuauagaaaguguu

SEQ ID NO: 3805831 - RNA, 16 nt, Human
cuauagaaaguguucu

SEQ ID NO: 3805832 - RNA, 17 nt, Human
cuauagaaaguguucug

SEQ ID NO: 3805833 - RNA, 12 nt, Human
cuauagacucua

SEQ ID NO: 3805834 - RNA, 21 nt, Human
cuauagacuggaaaaaaugag

SEQ ID NO: 3805835 - RNA, 14 nt, Human
cuauagaugucuuu

SEQ ID NO: 3805836 - RNA, 17 nt, Human
cuauagcaaaguaguac

SEQ ID NO: 3805837 - RNA, 15 nt, Human
cuauagcaucacuua

SEQ ID NO: 3805838 - RNA, 15 nt, Human
cuauagcccaggucc

SEQ ID NO: 3805839 - RNA, 18 nt, Human
cuauagccuaggugacag

SEQ ID NO: 3805840 - RNA, 19 nt, Human
cuauagccuaggugacaga

SEQ ID NO: 3805841 - RNA, 20 nt, Human
cuauagccuaggugacagag

SEQ ID NO: 3805842 - RNA, 18 nt, Human
cuauagccuggggugggg

SEQ ID NO: 3805843 - RNA, 22 nt, Human
cuauaguauuugauucaaaaua

SEQ ID NO: 3805844 - RNA, 23 nt, Human
cuauaguauuugauucaaaauau

SEQ ID NO: 3805845 - RNA, 13 nt, Human
cuauagucccagc

SEQ ID NO: 3805846 - RNA, 15 nt, Human
cuauagucccagcua

SEQ ID NO: 3805847 - RNA, 16 nt, Human
cuauauaauuuauuuc

SEQ ID NO: 3805848 - RNA, 20 nt, Human
cuauauaauuuauuuccacu

SEQ ID NO: 3805849 - RNA, 11 nt, Human
cuauauacaug

SEQ ID NO: 3805850 - RNA, 13 nt, Human
cuauauacaugug

SEQ ID NO: 3805851 - RNA, 22 nt, Human
cuauauacauguguguauauau

SEQ ID NO: 3805852 - RNA, 17 nt, Human
cuauauagaaugcugca

SEQ ID NO: 3805853 - RNA, 23 nt, Human
cuauauaggcaucacauuuuugu

SEQ ID NO: 3805854 - RNA, 22 nt, Human
cuauauauaaaacggugcugug

SEQ ID NO: 3805855 - RNA, 16 nt, Human
cuauauauaauucugu

SEQ ID NO: 3805856 - RNA, 17 nt, Human
cuauauauaauucugua

SEQ ID NO: 3805857 - RNA, 18 nt, Human
cuauauauaauucuguac

SEQ ID NO: 3805858 - RNA, 13 nt, Human
cuauauauauaaa

SEQ ID NO: 3805859 - RNA, 14 nt, Human
cuauauauauaaau

SEQ ID NO: 3805860 - RNA, 17 nt, Human
cuauauauauaaaugua

SEQ ID NO: 3805861 - RNA, 18 nt, Human
cuauauaugugaugaucu

SEQ ID NO: 3805862 - RNA, 17 nt, Human
cuauauauguguaugua

SEQ ID NO: 3805863 - RNA, 14 nt, Human
cuauauccauguac

SEQ ID NO: 3805864 - RNA, 15 nt, Human
cuauauccugugacu

SEQ ID NO: 3805865 - RNA, 14 nt, Human
cuauaucuauauau

SEQ ID NO: 3805866 - RNA, 18 nt, Human
cuauaucuguuuuacugc

SEQ ID NO: 3805867 - RNA, 16 nt, Human
cuauaugaauuuaaau

SEQ ID NO: 3805868 - RNA, 18 nt, Human
cuauaugagaagaauagc

SEQ ID NO: 3805869 - RNA, 16 nt, Human
cuauaugauuuauagu

SEQ ID NO: 3805870 - RNA, 16 nt, Human
cuauauggaauugcuu

SEQ ID NO: 3805871 - RNA, 14 nt, Human
cuauauguacuugu

SEQ ID NO: 3805872 - RNA, 18 nt, Human
cuauaugugaauccucuu

SEQ ID NO: 3805873 - RNA, 17 nt, Human
cuauauuagaucaaaua

SEQ ID NO: 3805874 - RNA, 20 nt, Human
cuauauucuggccagacucg

SEQ ID NO: 3805875 - RNA, 14 nt, Human
cuauauuguacaca

SEQ ID NO: 3805876 - RNA, 19 nt, Human
cuauauuguuugcuaagca

SEQ ID NO: 3805877 - RNA, 22 nt, Human
cuauauuguuuucaguguacau

SEQ ID NO: 3805878 - RNA, 16 nt, Human
cuauauuuaacaagau

SEQ ID NO: 3805879 - RNA, 21 nt, Human
cuauauuuaaguauucaagaa

SEQ ID NO: 3805880 - RNA, 12 nt, Human
cuauauuuacag

SEQ ID NO: 3805881 - RNA, 20 nt, Human
cuaucaaacugaagccagaa

SEQ ID NO: 3805882 - RNA, 17 nt, Human
cuaucaaccccagacac

SEQ ID NO: 3805883 - RNA, 20 nt, Human
cuaucaagaggcugagacag

SEQ ID NO: 3805884 - RNA, 23 nt, Human
cuaucaagaggcugagacaggag

SEQ ID NO: 3805885 - RNA, 20 nt, Human
cuaucaaguauuauaccuuu

SEQ ID NO: 3805886 - RNA, 19 nt, Human
cuaucaccuccccuccuug

SEQ ID NO: 3805887 - RNA, 15 nt, Human
cuaucagccugucuc

SEQ ID NO: 3805888 - RNA, 12 nt, Human
cuaucagugugc

SEQ ID NO: 3805889 - RNA, 16 nt, Human
cuaucagugugccccc

SEQ ID NO: 3805890 - RNA, 22 nt, Human
cuaucauacuacugaaacagau

SEQ ID NO: 3805891 - RNA, 14 nt, Human
cuaucauggugaaa

SEQ ID NO: 3805892 - RNA, 22 nt, Human
cuaucauggugaaaagcuccau

SEQ ID NO: 3805893 - RNA, 14 nt, Human
cuaucauuaaaguu

SEQ ID NO: 3805894 - RNA, 15 nt, Human
cuaucauuaaaguuc

SEQ ID NO: 3805895 - RNA, 15 nt, Human
cuaucauuuaauaau

SEQ ID NO: 3805896 - RNA, 21 nt, Human
cuaucauuuaauaauauacuu

SEQ ID NO: 3805897 - RNA, 12 nt, Human
cuaucauuuauu

SEQ ID NO: 3805898 - RNA, 23 nt, Human
cuaucauuuauuggauggguggg

SEQ ID NO: 3805899 - RNA, 18 nt, Human
cuaucauuuuuguacagu

SEQ ID NO: 3805900 - RNA, 18 nt, Human
cuauccaaacauguauuu

SEQ ID NO: 3805901 - RNA, 17 nt, Human
cuauccacagagagucc

SEQ ID NO: 3805902 - RNA, 17 nt, Human
cuauccacccagcccau

SEQ ID NO: 3805903 - RNA, 18 nt, Human
cuauccaugcaccaaacu

SEQ ID NO: 3805904 - RNA, 14 nt, Human
cuaucccaucccau

SEQ ID NO: 3805905 - RNA, 20 nt, Human
cuauccccaucucccugccu

SEQ ID NO: 3805906 - RNA, 18 nt, Human
cuaucccuaggcacuuaa

SEQ ID NO: 3805907 - RNA, 14 nt, Human
cuauccgcugccag

SEQ ID NO: 3805908 - RNA, 15 nt, Human
cuauccguguugcag

SEQ ID NO: 3805909 - RNA, 11 nt, Human
cuauccucauc

SEQ ID NO: 3805910 - RNA, 12 nt, Human
cuauccucugua

SEQ ID NO: 3805911 - RNA, 19 nt, Human
cuauccugaaaauucugua

SEQ ID NO: 3805912 - RNA, 11 nt, Human
cuauccuggcc

SEQ ID NO: 3805913 - RNA, 19 nt, Human
cuauccuggcuuugcccaa

SEQ ID NO: 3805914 - RNA, 17 nt, Human
cuauccugggcuuuugu

SEQ ID NO: 3805915 - RNA, 13 nt, Human
cuauccuucguga

SEQ ID NO: 3805916 - RNA, 17 nt, Human
cuauccuuggcaccaaa

SEQ ID NO: 3805917 - RNA, 17 nt, Human
cuaucguaaaauuaaga

SEQ ID NO: 3805918 - RNA, 14 nt, Human
cuaucuaaauguug

SEQ ID NO: 3805919 - RNA, 13 nt, Human
cuaucuaaugaca

SEQ ID NO: 3805920 - RNA, 14 nt, Human
cuaucuauuugagg

SEQ ID NO: 3805921 - RNA, 18 nt, Human
cuaucucacagcacacuc

SEQ ID NO: 3805922 - RNA, 12 nt, Human
cuaucucaucua

SEQ ID NO: 3805923 - RNA, 18 nt, Human
cuaucucauuuccaagca

SEQ ID NO: 3805924 - RNA, 15 nt, Human
cuaucucccccagcc

SEQ ID NO: 3805925 - RNA, 18 nt, Human
cuaucucccccagcccca

SEQ ID NO: 3805926 - RNA, 17 nt, Human
cuaucucccugccuccu

SEQ ID NO: 3805927 - RNA, 18 nt, Human
cuaucucccugccuccug

SEQ ID NO: 3805928 - RNA, 17 nt, Human
cuaucucgugggagagc

SEQ ID NO: 3805929 - RNA, 19 nt, Human
cuaucuggaggccuuccag

SEQ ID NO: 3805930 - RNA, 19 nt, Human
cuaucugggcuuccuggag

SEQ ID NO: 3805931 - RNA, 23 nt, Human
cuaucugggcuuccuggagcaga

SEQ ID NO: 3805932 - RNA, 21 nt, Human
cuaucugguauuaaaugccaa

SEQ ID NO: 3805933 - RNA, 22 nt, Human
cuaucuggucaaccuccuggac

SEQ ID NO: 3805934 - RNA, 17 nt, Human
cuaucuguauucccaaa

SEQ ID NO: 3805935 - RNA, 16 nt, Human
cuaucugucugguggc

SEQ ID NO: 3805936 - RNA, 21 nt, Human
cuaucugucugguggccccgu

SEQ ID NO: 3805937 - RNA, 16 nt, Human
cuaucuguuuacagug

SEQ ID NO: 3805938 - RNA, 17 nt, Human
cuaucuguuuacagugu

SEQ ID NO: 3805939 - RNA, 23 nt, Human
cuaucuuaauuuugguuguauuc

SEQ ID NO: 3805940 - RNA, 18 nt, Human
cuaucuuacuauuucaca

SEQ ID NO: 3805941 - RNA, 20 nt, Human
cuaucuuaucucagauauuu

SEQ ID NO: 3805942 - RNA, 20 nt, Human
cuaucuucauguaaauugac

SEQ ID NO: 3805943 - RNA, 14 nt, Human
cuaucuuccaaaug

SEQ ID NO: 3805944 - RNA, 18 nt, Human
cuaucuugcucuguaauc

SEQ ID NO: 3805945 - RNA, 21 nt, Human
cuaucuuggagagcuggggac

SEQ ID NO: 3805946 - RNA, 17 nt, Human
cuaucuuguuccaaggc

SEQ ID NO: 3805947 - RNA, 18 nt, Human
cuaugaaaccuuuuuccu

SEQ ID NO: 3805948 - RNA, 13 nt, Human
cuaugaaauauua

SEQ ID NO: 3805949 - RNA, 18 nt, Human
cuaugaaauauuauguua

SEQ ID NO: 3805950 - RNA, 17 nt, Human
cuaugaacuucucucag

SEQ ID NO: 3805951 - RNA, 19 nt, Human
cuaugaaguaaagaacugc

SEQ ID NO: 3805952 - RNA, 18 nt, Human
cuaugaaguauauaaugg

SEQ ID NO: 3805953 - RNA, 23 nt, Human
cuaugaaugggcaaaacugaauu

SEQ ID NO: 3805954 - RNA, 17 nt, Human
cuaugaauucuaaguga

SEQ ID NO: 3805955 - RNA, 21 nt, Human
cuaugacauaaaaacaacuuu

SEQ ID NO: 3805956 - RNA, 21 nt, Human
cuaugaccucgcccuccacaa

SEQ ID NO: 3805957 - RNA, 16 nt, Human
cuaugacuuaacauag

SEQ ID NO: 3805958 - RNA, 23 nt, Human
cuaugacuugggcacccccagcc

SEQ ID NO: 3805959 - RNA, 11 nt, Human
cuaugagaaaa

SEQ ID NO: 3805960 - RNA, 16 nt, Human
cuaugagaaaagaggc

SEQ ID NO: 3805961 - RNA, 21 nt, Human
cuaugagaauugggauuacau

SEQ ID NO: 3805962 - RNA, 17 nt, Human
cuaugagggccuugagu

SEQ ID NO: 3805963 - RNA, 20 nt, Human
cuaugauaugguaaaaguua

SEQ ID NO: 3805964 - RNA, 23 nt, Human
cuaugauauuuucugugccugaa

SEQ ID NO: 3805965 - RNA, 13 nt, Human
cuaugauguauac

SEQ ID NO: 3805966 - RNA, 14 nt, Human
cuaugauguauacu

SEQ ID NO: 3805967 - RNA, 16 nt, Human
cuaugauguauacugc

SEQ ID NO: 3805968 - RNA, 20 nt, Human
cuaugauuuaauuugaaaua

SEQ ID NO: 3805969 - RNA, 14 nt, Human
cuaugcaaaaagcu

SEQ ID NO: 3805970 - RNA, 20 nt, Human
cuaugcaauauaucuaaauu

SEQ ID NO: 3805971 - RNA, 12 nt, Human
cuaugcacauau

SEQ ID NO: 3805972 - RNA, 20 nt, Human
cuaugcagagguccacaaca

SEQ ID NO: 3805973 - RNA, 13 nt, Human
cucagaacccagg

SEQ ID NO: 3805974 - RNA, 17 nt, Human
cucagaacuugcugcug

SEQ ID NO: 3805975 - RNA, 23 nt, Human
cucagaacuugcugcugucuugu

SEQ ID NO: 3805976 - RNA, 13 nt, Human
cucagaagaaaga

SEQ ID NO: 3805977 - RNA, 13 nt, Human
cucagaagacacu

SEQ ID NO: 3805978 - RNA, 17 nt, Human
cucagaagacacugaug

SEQ ID NO: 3805979 - RNA, 20 nt, Human
cucagaagacacugaugggc

SEQ ID NO: 3805980 - RNA, 15 nt, Human
cucagaagccugagg

SEQ ID NO: 3805981 - RNA, 18 nt, Human
cucagaagccugaggcug

SEQ ID NO: 3805982 - RNA, 13 nt, Human
cucagaagccugg

SEQ ID NO: 3805983 - RNA, 15 nt, Human
cucagaagccugggg

SEQ ID NO: 3805984 - RNA, 20 nt, Human
cucagaaggcaaaugacuuu

SEQ ID NO: 3805985 - RNA, 21 nt, Human
cucagaagggagcuagccaga

SEQ ID NO: 3805986 - RNA, 14 nt, Human
cucagaagggaggc

SEQ ID NO: 3805987 - RNA, 22 nt, Human
cucagaagugcaucuggagaga

SEQ ID NO: 3805988 - RNA, 17 nt, Human
cucagaauaaggcaggc

SEQ ID NO: 3805989 - RNA, 19 nt, Human
cucagaauaaggcaggcau

SEQ ID NO: 3805990 - RNA, 22 nt, Human
cucagacaggaaagggaaggcc

SEQ ID NO: 3805991 - RNA, 16 nt, Human
cucagaccagcucuuc

SEQ ID NO: 3805992 - RNA, 14 nt, Human
cucagacccccacu

SEQ ID NO: 3805993 - RNA, 16 nt, Human
cucagacccccacucu

SEQ ID NO: 3805994 - RNA, 15 nt, Human
cucagacccuuucuu

SEQ ID NO: 3805995 - RNA, 16 nt, Human
cucagaccgucuuccu

SEQ ID NO: 3805996 - RNA, 14 nt, Human
cucagacuccauuu

SEQ ID NO: 3805997 - RNA, 18 nt, Human
cucagacucuaagaaaga

SEQ ID NO: 3805998 - RNA, 15 nt, Human
cucagacugcaccca

SEQ ID NO: 3805999 - RNA, 17 nt, Human
cucagacugcacccagg

SEQ ID NO: 3806000 - RNA, 13 nt, Human
cucagacugcuca

SEQ ID NO: 3806001 - RNA, 13 nt, Human
cucagacuguaua

SEQ ID NO: 3806002 - RNA, 16 nt, Human
cucagacuuuuguaca

SEQ ID NO: 3806003 - RNA, 23 nt, Human
cucagagaaaaaugcuccccaca

SEQ ID NO: 3806004 - RNA, 13 nt, Human
cucagagacaugc

SEQ ID NO: 3806005 - RNA, 13 nt, Human
cucagagaccagg

SEQ ID NO: 3806006 - RNA, 15 nt, Human
cucagagccaccccu

SEQ ID NO: 3806007 - RNA, 15 nt, Human
cucagagccagucuu

SEQ ID NO: 3806008 - RNA, 18 nt, Human
cucagagcuacuugggcc

SEQ ID NO: 3806009 - RNA, 19 nt, Human
cucagagcuacuugggcca

SEQ ID NO: 3806010 - RNA, 21 nt, Human
cucagaggccccaauacccca

SEQ ID NO: 3806011 - RNA, 19 nt, Human
cucagaggcgcacugugac

SEQ ID NO: 3806012 - RNA, 17 nt, Human
cucagagggggacugcu

SEQ ID NO: 3806013 - RNA, 18 nt, Human
cucagagggggacugcug

SEQ ID NO: 3806014 - RNA, 18 nt, Human
cucagaggguuguucucc

SEQ ID NO: 3806015 - RNA, 21 nt, Human
cucagaggguuguucuccuag

SEQ ID NO: 3806016 - RNA, 19 nt, Human
cucagagguagggcugcca

SEQ ID NO: 3806017 - RNA, 16 nt, Human
cucagaguauggagcu

SEQ ID NO: 3806018 - RNA, 18 nt, Human
cucagaguccaggcccca

SEQ ID NO: 3806019 - RNA, 21 nt, Human
cucagauaagguaaaaugcca

SEQ ID NO: 3806020 - RNA, 22 nt, Human
cucagauaagguaaaaugccau

SEQ ID NO: 3806021 - RNA, 16 nt, Human
cucagauagaaugaca

SEQ ID NO: 3806022 - RNA, 17 nt, Human
cucagaucacuacugca

SEQ ID NO: 3806023 - RNA, 14 nt, Human
cucagauccaggga

SEQ ID NO: 3806024 - RNA, 15 nt, Human
cucagaucugucuga

SEQ ID NO: 3806025 - RNA, 15 nt, Human
cucagaucuucugug

SEQ ID NO: 3806026 - RNA, 19 nt, Human
cucagaugcucaaaguugu

SEQ ID NO: 3806027 - RNA, 21 nt, Human
cucagaugcucaaaguuguuu

SEQ ID NO: 3806028 - RNA, 21 nt, Human
cucagauggaaccgcaggaag

SEQ ID NO: 3806029 - RNA, 22 nt, Human
cucagauggaaccgcaggaagc

SEQ ID NO: 3806030 - RNA, 23 nt, Human
cucagauggaaccgcaggaagcu

SEQ ID NO: 3806031 - RNA, 13 nt, Human
ccaggugccuugg

SEQ ID NO: 3806032 - RNA, 14 nt, Human
ccaggugccuugga

SEQ ID NO: 3806033 - RNA, 20 nt, Human
ccaggugccuuucaaauuua

SEQ ID NO: 3806034 - RNA, 21 nt, Human
ccaggugccuuucaaauuuag

SEQ ID NO: 3806035 - RNA, 19 nt, Human
ccaggugcuaggaacacuc

SEQ ID NO: 3806036 - RNA, 21 nt, Human
ccagguggccacuccagaccc

SEQ ID NO: 3806037 - RNA, 19 nt, Human
ccagguggcugacccaguc

SEQ ID NO: 3806038 - RNA, 20 nt, Human
ccagguggcugacccagucc

SEQ ID NO: 3806039 - RNA, 23 nt, Human
ccagguggcugacccagucccug

SEQ ID NO: 3806040 - RNA, 13 nt, Human
ccaggugggagcg

SEQ ID NO: 3806041 - RNA, 19 nt, Human
ccaggugggcgggcagcac

SEQ ID NO: 3806042 - RNA, 20 nt, Human
ccagguggggugaggcagug

SEQ ID NO: 3806043 - RNA, 22 nt, Human
ccaggugggucccggcucugug

SEQ ID NO: 3806044 - RNA, 16 nt, Human
ccaggugugcacgugg

SEQ ID NO: 3806045 - RNA, 22 nt, Human
ccagguguguccaccugggcau

SEQ ID NO: 3806046 - RNA, 17 nt, Human
ccagguguuacuguaau

SEQ ID NO: 3806047 - RNA, 13 nt, Human
ccagguguuuaua

SEQ ID NO: 3806048 - RNA, 15 nt, Human
ccagguucaacccac

SEQ ID NO: 3806049 - RNA, 22 nt, Human
ccagguucaagcgauucuccug

SEQ ID NO: 3806050 - RNA, 15 nt, Human
ccagguucagcuugu

SEQ ID NO: 3806051 - RNA, 14 nt, Human
ccagguuccgaaga

SEQ ID NO: 3806052 - RNA, 24 nt, Human
ccagguucuccguuagcuccugug

SEQ ID NO: 3806053 - RNA, 21 nt, Human
ccagguucugguuagcucagc

SEQ ID NO: 3806054 - RNA, 22 nt, Human
ccagguucugguuagcucagcc

SEQ ID NO: 3806055 - RNA, 16 nt, Human
ccagguuggcucugcc

SEQ ID NO: 3806056 - RNA, 24 nt, Human
ccagguuggcucugccaguccugu

SEQ ID NO: 3806057 - RNA, 19 nt, Human
ccagguuuaaguagauuuc

SEQ ID NO: 3806058 - RNA, 22 nt, Human
ccagguuuaaguagauuucaug

SEQ ID NO: 3806059 - RNA, 16 nt, Human
ccagguuuagacagua

SEQ ID NO: 3806060 - RNA, 16 nt, Human
ccagguuucuaugugu

SEQ ID NO: 3806061 - RNA, 20 nt, Human
ccagguuuucugggugucca

SEQ ID NO: 3806062 - RNA, 18 nt, Human
ccagguuuugcacucuug

SEQ ID NO: 3806063 - RNA, 23 nt, Human
ccagguuuugcacucuuguuucu

SEQ ID NO: 3806064 - RNA, 15 nt, Human
ccagguuuuucaauu

SEQ ID NO: 3806065 - RNA, 16 nt, Human
ccagguuuuucaauua

SEQ ID NO: 3806066 - RNA, 17 nt, Human
ccagguuuuucaauuaa

SEQ ID NO: 3806067 - RNA, 20 nt, Human
ccagguuuuucaauuaaacg

SEQ ID NO: 3806068 - RNA, 20 nt, Human
ccaguaaaaaaaaaaaaugg

SEQ ID NO: 3806069 - RNA, 13 nt, Human
ccaguaaaauugc

SEQ ID NO: 3806070 - RNA, 17 nt, Human
ccaguaaaauugccaua

SEQ ID NO: 3806071 - RNA, 17 nt, Human
ccaguaaacagaggagu

SEQ ID NO: 3806072 - RNA, 20 nt, Human
ccaguaaaugggggugcauu

SEQ ID NO: 3806073 - RNA, 16 nt, Human
ccaguaacaggcucaa

SEQ ID NO: 3806074 - RNA, 14 nt, Human
ccaguaagaucacu

SEQ ID NO: 3806075 - RNA, 15 nt, Human
ccaguaagaucacug

SEQ ID NO: 3806076 - RNA, 21 nt, Human
ccaguaagaucacuguuuaga

SEQ ID NO: 3806077 - RNA, 18 nt, Human
ccaguaccuccugucucu

SEQ ID NO: 3806078 - RNA, 20 nt, Human
ccaguaccuccugucucugg

SEQ ID NO: 3806079 - RNA, 22 nt, Human
ccaguaccuccugucucuggcc

SEQ ID NO: 3806080 - RNA, 14 nt, Human
ccaguaccuugcuu

SEQ ID NO: 3806081 - RNA, 16 nt, Human
ccaguacgugcuaaca

SEQ ID NO: 3806082 - RNA, 18 nt, Human
ccaguauaaaauuacagu

SEQ ID NO: 3806083 - RNA, 21 nt, Human
ccaguauaaaauuacagugga

SEQ ID NO: 3806084 - RNA, 15 nt, Human
ccaguaucucuucag

SEQ ID NO: 3806085 - RNA, 13 nt, Human
ccaguaucuugaa

SEQ ID NO: 3806086 - RNA, 19 nt, Human
ccaguaucuugaagacuuu

SEQ ID NO: 3806087 - RNA, 22 nt, Human
ccaguaucuugaagacuuuucu

SEQ ID NO: 3806088 - RNA, 15 nt, Human
ccaguaugagcccua

SEQ ID NO: 3806089 - RNA, 12 nt, Human
ccaguauucuug

SEQ ID NO: 3806090 - RNA, 22 nt, Human
ccaguauuguacaaaguauuaa

SEQ ID NO: 3806091 - RNA, 17 nt, Human
ccaguauuuaacuucug

SEQ ID NO: 3806092 - RNA, 22 nt, Human
ccaguauuuaacuucugaggaa

SEQ ID NO: 3806093 - RNA, 14 nt, Human
ccaguauuuuuaaa

SEQ ID NO: 3806094 - RNA, 19 nt, Human
ccaguauuuuugcugcuuc

SEQ ID NO: 3806095 - RNA, 13 nt, Human
ccagucacaugac

SEQ ID NO: 3806096 - RNA, 21 nt, Human
ccagucacaugaccugaucac

SEQ ID NO: 3806097 - RNA, 17 nt, Human
ccagucaccccggccac

SEQ ID NO: 3806098 - RNA, 20 nt, Human
ccagucaccccggccaccug

SEQ ID NO: 3806099 - RNA, 12 nt, Human
ccagucagccuc

SEQ ID NO: 3806100 - RNA, 17 nt, Human
ccagucagccucucucc

SEQ ID NO: 3806101 - RNA, 19 nt, Human
ccagucagccucucuccca

SEQ ID NO: 3806102 - RNA, 20 nt, Human
ccagucagccucucucccag

SEQ ID NO: 3806103 - RNA, 14 nt, Human
ccagucaggcccag

SEQ ID NO: 3806104 - RNA, 14 nt, Human
ccagucaggcucuc

SEQ ID NO: 3806105 - RNA, 21 nt, Human
ccagucaucagcuauucaguu

SEQ ID NO: 3806106 - RNA, 18 nt, Human
ccaguccaaauguccucc

SEQ ID NO: 3806107 - RNA, 18 nt, Human
ccaguccacccugccugc

SEQ ID NO: 3806108 - RNA, 19 nt, Human
ccaguccaggcugccgugg

SEQ ID NO: 3806109 - RNA, 15 nt, Human
ccagucccagagcag

SEQ ID NO: 3806110 - RNA, 15 nt, Human
ccagucccagcagcc

SEQ ID NO: 3806111 - RNA, 18 nt, Human
ccagucccagcagccagc

SEQ ID NO: 3806112 - RNA, 14 nt, Human
ccagucccaggggc

SEQ ID NO: 3806113 - RNA, 21 nt, Human
ccaguccccaccccugccccc

SEQ ID NO: 3806114 - RNA, 22 nt, Human
ccaguccccaccccugccccca

SEQ ID NO: 3806115 - RNA, 17 nt, Human
ccaguccccccacccuc

SEQ ID NO: 3806116 - RNA, 18 nt, Human
ccagucccccuauccuug

SEQ ID NO: 3806117 - RNA, 14 nt, Human
ccagucccccugcc

SEQ ID NO: 3806118 - RNA, 17 nt, Human
ccaguccccgugccccg

SEQ ID NO: 3806119 - RNA, 15 nt, Human
ccagucccuggggga

SEQ ID NO: 3806120 - RNA, 19 nt, Human
ccagucccugggggaagcc

SEQ ID NO: 3806121 - RNA, 18 nt, Human
ccaguccuagcugcacag

SEQ ID NO: 3806122 - RNA, 21 nt, Human
ccaguccuaucugggcuuccu

SEQ ID NO: 3806123 - RNA, 17 nt, Human
ccaguccugccuggcca

SEQ ID NO: 3806124 - RNA, 18 nt, Human
ccaguccugccuggccag

SEQ ID NO: 3806125 - RNA, 19 nt, Human
ccaguccugccuggccagg

SEQ ID NO: 3806126 - RNA, 22 nt, Human
ccaguccugccuggccaggcag

SEQ ID NO: 3806127 - RNA, 11 nt, Human
ccaguccugcu

SEQ ID NO: 3806128 - RNA, 15 nt, Human
ccaguccugcuaccu

SEQ ID NO: 3806129 - RNA, 21 nt, Human
ccaguccugcuaccucccuug

SEQ ID NO: 3806130 - RNA, 18 nt, Human
ccagucgcgcugccugug

SEQ ID NO: 3806131 - RNA, 14 nt, Human
ccagucuaaaaaua

SEQ ID NO: 3806132 - RNA, 17 nt, Human
cucagcucggcucagcu

SEQ ID NO: 3806133 - RNA, 15 nt, Human
cucagcucggggagc

SEQ ID NO: 3806134 - RNA, 23 nt, Human
cucagcucugacauucugauucg

SEQ ID NO: 3806135 - RNA, 18 nt, Human
cucagcucuggcucacag

SEQ ID NO: 3806136 - RNA, 14 nt, Human
cucagcucugggcc

SEQ ID NO: 3806137 - RNA, 23 nt, Human
cucagcucugggccauucuccac

SEQ ID NO: 3806138 - RNA, 16 nt, Human
cucagcucuucugacu

SEQ ID NO: 3806139 - RNA, 17 nt, Human
cucagcucuuggcucca

SEQ ID NO: 3806140 - RNA, 18 nt, Human
cucagcucuuggcuccac

SEQ ID NO: 3806141 - RNA, 20 nt, Human
cucagcucuuggcuccacug

SEQ ID NO: 3806142 - RNA, 23 nt, Human
cucagcugaaugccuccuguggg

SEQ ID NO: 3806143 - RNA, 12 nt, Human
cucagcugcuuc

SEQ ID NO: 3806144 - RNA, 13 nt, Human
cucagcugcuucu

SEQ ID NO: 3806145 - RNA, 17 nt, Human
cucagcugcuucuccca

SEQ ID NO: 3806146 - RNA, 18 nt, Human
cucagcugucuguggcuu

SEQ ID NO: 3806147 - RNA, 14 nt, Human
cucagcuuaucucu

SEQ ID NO: 3806148 - RNA, 12 nt, Human
cucagcuuugag

SEQ ID NO: 3806149 - RNA, 16 nt, Human
cucagcuuugagaagc

SEQ ID NO: 3806150 - RNA, 23 nt, Human
cucaggaaacgagacuuuccauu

SEQ ID NO: 3806151 - RNA, 11 nt, Human
cucaggaaaga

SEQ ID NO: 3806152 - RNA, 22 nt, Human
cucaggaaaucaaauaugcaaa

SEQ ID NO: 3806153 - RNA, 21 nt, Human
cucaggaaaugcugacccaug

SEQ ID NO: 3806154 - RNA, 16 nt, Human
cucaggaaugggcugu

SEQ ID NO: 3806155 - RNA, 15 nt, Human
cucaggacacaggcc

SEQ ID NO: 3806156 - RNA, 19 nt, Human
cucaggacacaggccugug

SEQ ID NO: 3806157 - RNA, 16 nt, Human
cucaggacagaugcca

SEQ ID NO: 3806158 - RNA, 19 nt, Human
cucaggacagaugccacac

SEQ ID NO: 3806159 - RNA, 20 nt, Human
cucaggaccaaagcuuucau

SEQ ID NO: 3806160 - RNA, 22 nt, Human
cucaggaccaaagcuuucaugu

SEQ ID NO: 3806161 - RNA, 14 nt, Human
cucaggaccaggca

SEQ ID NO: 3806162 - RNA, 20 nt, Human
cucaggacccucgcuggccc

SEQ ID NO: 3806163 - RNA, 21 nt, Human
cucaggacccucgcuggcccc

SEQ ID NO: 3806164 - RNA, 22 nt, Human
cucaggacccucgcuggccccc

SEQ ID NO: 3806165 - RNA, 21 nt, Human
cucaggacucagaagccucug

SEQ ID NO: 3806166 - RNA, 17 nt, Human
cucaggacugcaacagg

SEQ ID NO: 3806167 - RNA, 14 nt, Human
cucaggacugcgac

SEQ ID NO: 3806168 - RNA, 15 nt, Human
cucaggagcacaggc

SEQ ID NO: 3806169 - RNA, 22 nt, Human
cucaggagcacaggcagcugga

SEQ ID NO: 3806170 - RNA, 12 nt, Human
cucaggagcccu

SEQ ID NO: 3806171 - RNA, 14 nt, Human
cucaggagcccugg

SEQ ID NO: 3806172 - RNA, 15 nt, Human
cucaggagcccuggg

SEQ ID NO: 3806173 - RNA, 17 nt, Human
cucaggagcccugggag

SEQ ID NO: 3806174 - RNA, 21 nt, Human
cucaggagcccugggaggcuc

SEQ ID NO: 3806175 - RNA, 17 nt, Human
aaauauauauguugauu

SEQ ID NO: 3806176 - RNA, 17 nt, Human
aaauauaucuuauaaag

SEQ ID NO: 3806177 - RNA, 18 nt, Human
aaauauaugcuaagucuu

SEQ ID NO: 3806178 - RNA, 15 nt, Human
aaauauauguaugua

SEQ ID NO: 3806179 - RNA, 14 nt, Human
aaauauauguauuu

SEQ ID NO: 3806180 - RNA, 19 nt, Human
aaauauauuacuuaacugu

SEQ ID NO: 3806181 - RNA, 22 nt, Human
aaauauauuguuaaucucuguu

SEQ ID NO: 3806182 - RNA, 12 nt, Human
aaauauauuuaa

SEQ ID NO: 3806183 - RNA, 15 nt, Human
aaauauauuuaauga

SEQ ID NO: 3806184 - RNA, 22 nt, Human
aaauauauuuuaagacgaaaca

SEQ ID NO: 3806185 - RNA, 23 nt, Human
aaauauauuuuaccauacauuua

SEQ ID NO: 3806186 - RNA, 13 nt, Human
aaauaucaaauua

SEQ ID NO: 3806187 - RNA, 16 nt, Human
aaauaucaaauuaauu

SEQ ID NO: 3806188 - RNA, 23 nt, Human
cucagagaauuucuaccauuuca

SEQ ID NO: 3806189 - RNA, 22 nt, Human
cucagagacacuguugauaaaa

SEQ ID NO: 3806190 - RNA, 16 nt, Human
cucagagacaugcaga

SEQ ID NO: 3806191 - RNA, 19 nt, Human
cucagagacaugcagagau

SEQ ID NO: 3806192 - RNA, 15 nt, Human
cucagagagcaccau

SEQ ID NO: 3806193 - RNA, 15 nt, Human
cucagagagggcagg

SEQ ID NO: 3806194 - RNA, 23 nt, Human
cucagagagggcaggcaugaagu

SEQ ID NO: 3806195 - RNA, 14 nt, Human
cucagagagggugg

SEQ ID NO: 3806196 - RNA, 23 nt, Human
cucagagagggugggagugggcc

SEQ ID NO: 3806197 - RNA, 19 nt, Human
cucagagauauugugagga

SEQ ID NO: 3806198 - RNA, 12 nt, Human
cucagagccagu

SEQ ID NO: 3806199 - RNA, 16 nt, Human
cucagaggcuguucuu

SEQ ID NO: 3806200 - RNA, 13 nt, Human
cucagagggggac

SEQ ID NO: 3806201 - RNA, 23 nt, Human
cucagagguuuaccuagagaaca

SEQ ID NO: 3806202 - RNA, 14 nt, Human
cucagaguccaggc

SEQ ID NO: 3806203 - RNA, 18 nt, Human
cucagagucggaacggag

SEQ ID NO: 3806204 - RNA, 13 nt, Human
cucagagugcaag

SEQ ID NO: 3806205 - RNA, 21 nt, Human
cucagaguggugggggaaggc

SEQ ID NO: 3806206 - RNA, 18 nt, Human
cucagaguucuauacugu

SEQ ID NO: 3806207 - RNA, 17 nt, Human
cucagauauuuauauuu

SEQ ID NO: 3806208 - RNA, 17 nt, Human
cucagaucaguguacca

SEQ ID NO: 3806209 - RNA, 17 nt, Human
cucagauccagggacag

SEQ ID NO: 3806210 - RNA, 20 nt, Human
cucagauccagggacagagg

SEQ ID NO: 3806211 - RNA, 19 nt, Human
cucagauccuuguuucaaa

SEQ ID NO: 3806212 - RNA, 16 nt, Human
cucagaucuucugugg

SEQ ID NO: 3806213 - RNA, 16 nt, Human
cucagauggaaccgca

SEQ ID NO: 3806214 - RNA, 20 nt, Human
cucagauggaaccgcaggaa

SEQ ID NO: 3806215 - RNA, 14 nt, Human
cucagauggcagcu

SEQ ID NO: 3806216 - RNA, 20 nt, Human
cucagauggcagcuuuuaaa

SEQ ID NO: 3806217 - RNA, 16 nt, Human
cucagauguuaaaaua

SEQ ID NO: 3806218 - RNA, 19 nt, Human
cucagauguuaaaauaaau

SEQ ID NO: 3806219 - RNA, 23 nt, Human
cucagauguuaaaauaaaugguu

SEQ ID NO: 3806220 - RNA, 22 nt, Human
cucagauuuuauuauguaaauc

SEQ ID NO: 3806221 - RNA, 16 nt, Human
cucagcaaggccaccu

SEQ ID NO: 3806222 - RNA, 17 nt, Human
cucagcaaggccaccuc

SEQ ID NO: 3806223 - RNA, 16 nt, Human
cucagcaaggggcucu

SEQ ID NO: 3806224 - RNA, 13 nt, Human
cucagcaccacuc

SEQ ID NO: 3806225 - RNA, 12 nt, Human
cucagcaccccu

SEQ ID NO: 3806226 - RNA, 16 nt, Human
cucagcaccccuucca

SEQ ID NO: 3806227 - RNA, 16 nt, Human
cucagcacugccugcu

SEQ ID NO: 3806228 - RNA, 17 nt, Human
cucagcacugccugcuc

SEQ ID NO: 3806229 - RNA, 14 nt, Human
cucagcagcccucc

SEQ ID NO: 3806230 - RNA, 18 nt, Human
cucagcagcccuccucac

SEQ ID NO: 3806231 - RNA, 22 nt, Human
cucagcagccgccuuaagcuga

SEQ ID NO: 3806232 - RNA, 16 nt, Human
cucagcaggggagggu

SEQ ID NO: 3806233 - RNA, 17 nt, Human
cucagcagugagagcag

SEQ ID NO: 3806234 - RNA, 16 nt, Human
cucagcauaccugcug

SEQ ID NO: 3806235 - RNA, 19 nt, Human
cucagcauauuuguauagu

SEQ ID NO: 3806236 - RNA, 23 nt, Human
cucagcauauuuguauaguugcu

SEQ ID NO: 3806237 - RNA, 15 nt, Human
cucagcauccuggca

SEQ ID NO: 3806238 - RNA, 16 nt, Human
cucagcauccuggcac

SEQ ID NO: 3806239 - RNA, 13 nt, Human
cucagcaugcauc

SEQ ID NO: 3806240 - RNA, 15 nt, Human
cucagcauuaccucu

SEQ ID NO: 3806241 - RNA, 19 nt, Human
cucagcauuaccucuuugg

SEQ ID NO: 3806242 - RNA, 22 nt, Human
cucagcauuaccucuuuggaaa

SEQ ID NO: 3806243 - RNA, 20 nt, Human
cucagccaaccuuacuuaca

SEQ ID NO: 3806244 - RNA, 13 nt, Human
cucagccaagcac

SEQ ID NO: 3806245 - RNA, 15 nt, Human
cucagccaagcacag

SEQ ID NO: 3806246 - RNA, 18 nt, Human
cucagccaagcacagugg

SEQ ID NO: 3806247 - RNA, 12 nt, Human
cucagccaagcu

SEQ ID NO: 3806248 - RNA, 15 nt, Human
cucagccacccugag

SEQ ID NO: 3806249 - RNA, 16 nt, Human
cucagccacccugagu

SEQ ID NO: 3806250 - RNA, 21 nt, Human
cucagccacccugaguugcuu

SEQ ID NO: 3806251 - RNA, 11 nt, Human
cucagccagca

SEQ ID NO: 3806252 - RNA, 13 nt, Human
cucagccagcacu

SEQ ID NO: 3806253 - RNA, 14 nt, Human
cucagccagccucg

SEQ ID NO: 3806254 - RNA, 21 nt, Human
cucagccaugaggaguugcug

SEQ ID NO: 3806255 - RNA, 16 nt, Human
cucagcccaccccccu

SEQ ID NO: 3806256 - RNA, 17 nt, Human
cucagccccaccccagg

SEQ ID NO: 3806257 - RNA, 15 nt, Human
cucagccccagccca

SEQ ID NO: 3806258 - RNA, 18 nt, Human
cucagcccccugcuucag

SEQ ID NO: 3806259 - RNA, 14 nt, Human
cucagccccuagga

SEQ ID NO: 3806260 - RNA, 15 nt, Human
cucagccccuaggag

SEQ ID NO: 3806261 - RNA, 23 nt, Human
cucagccccuaggaguauauuuc

SEQ ID NO: 3806262 - RNA, 18 nt, Human
cucagccccucuugcccc

SEQ ID NO: 3806263 - RNA, 22 nt, Human
cucagccccugauccugugaag

SEQ ID NO: 3806264 - RNA, 19 nt, Human
cucagcccucccugccccu

SEQ ID NO: 3806265 - RNA, 20 nt, Human
cucagcccucccugccccuc

SEQ ID NO: 3806266 - RNA, 14 nt, Human
cucagcccugaccc

SEQ ID NO: 3806267 - RNA, 13 nt, Human
cucagcccugacu

SEQ ID NO: 3806268 - RNA, 17 nt, Human
cucagcccugaggacag

SEQ ID NO: 3806269 - RNA, 16 nt, Human
cucagcccugcaccau

SEQ ID NO: 3806270 - RNA, 13 nt, Human
cucagcccuggag

SEQ ID NO: 3806271 - RNA, 15 nt, Human
cucagcccuggaggu

SEQ ID NO: 3806272 - RNA, 12 nt, Human
cucagcccuggg

SEQ ID NO: 3806273 - RNA, 14 nt, Human
cucagcccugggcc

SEQ ID NO: 3806274 - RNA, 23 nt, Human
cucagccggcguggcaaauauaa

SEQ ID NO: 3806275 - RNA, 14 nt, Human
cucagccucccaaa

SEQ ID NO: 3806276 - RNA, 16 nt, Human
cucagccucccaaagu

SEQ ID NO: 3806277 - RNA, 13 nt, Human
cucagccucccag

SEQ ID NO: 3806278 - RNA, 20 nt, Human
cucagccucccagagugcug

SEQ ID NO: 3806279 - RNA, 23 nt, Human
cucagccucccgaauagcuggga

SEQ ID NO: 3806280 - RNA, 20 nt, Human
cucagccuccggaguagcug

SEQ ID NO: 3806281 - RNA, 18 nt, Human
cucagccuccucaucugg

SEQ ID NO: 3806282 - RNA, 23 nt, Human
cucagccuccuguguagcuggga

SEQ ID NO: 3806283 - RNA, 17 nt, Human
cucagccucugaauaug

SEQ ID NO: 3806284 - RNA, 16 nt, Human
cucagccugaacccca

SEQ ID NO: 3806285 - RNA, 15 nt, Human
cucagccuggccaga

SEQ ID NO: 3806286 - RNA, 19 nt, Human
cucagccuggccagacaca

SEQ ID NO: 3806287 - RNA, 20 nt, Human
cucagccuggccagacacag

SEQ ID NO: 3806288 - RNA, 16 nt, Human
cucagccugggcgcug

SEQ ID NO: 3806289 - RNA, 18 nt, Human
cucagccuggugggccuc

SEQ ID NO: 3806290 - RNA, 20 nt, Human
cucagccuggugggccuccu

SEQ ID NO: 3806291 - RNA, 13 nt, Human
cucagccugugcu

SEQ ID NO: 3806292 - RNA, 14 nt, Human
cucagccugugcug

SEQ ID NO: 3806293 - RNA, 16 nt, Human
cucagccugugcugcc

SEQ ID NO: 3806294 - RNA, 15 nt, Human
cucagccuucagaca

SEQ ID NO: 3806295 - RNA, 11 nt, Human
cucagccuugg

SEQ ID NO: 3806296 - RNA, 14 nt, Human
cucagcgaaugaau

SEQ ID NO: 3806297 - RNA, 14 nt, Human
cucagcggggacag

SEQ ID NO: 3806298 - RNA, 19 nt, Human
cucagcuacccacuauccu

SEQ ID NO: 3806299 - RNA, 20 nt, Human
cucagcucacuacaaccucc

SEQ ID NO: 3806300 - RNA, 14 nt, Human
cucagcucacugca

SEQ ID NO: 3806301 - RNA, 15 nt, Human
cucagcucacugcaa

SEQ ID NO: 3806302 - RNA, 21 nt, Human
cucagcucaucuucacugcac

SEQ ID NO: 3806303 - RNA, 18 nt, Human
cucagcucccacaagccu

SEQ ID NO: 3806304 - RNA, 21 nt, Human
cucagcucccauuucuacucu

SEQ ID NO: 3806305 - RNA, 19 nt, Human
cucagcuccccagaguccu

SEQ ID NO: 3806306 - RNA, 15 nt, Human
cucagcucccccugu

SEQ ID NO: 3806307 - RNA, 18 nt, Human
cucagcucccccuguccc

SEQ ID NO: 3806308 - RNA, 19 nt, Human
cucagcucccccugucccc

SEQ ID NO: 3806309 - RNA, 18 nt, Human
cucagcucggggagccuu

SEQ ID NO: 3806310 - RNA, 19 nt, Human
cucagcucggggagccuua

SEQ ID NO: 3806311 - RNA, 14 nt, Human
cucagcucuggcuc

SEQ ID NO: 3806312 - RNA, 17 nt, Human
cucagcucuggcucaca

SEQ ID NO: 3806313 - RNA, 19 nt, Human
cucagcucuggcucacaga

SEQ ID NO: 3806314 - RNA, 13 nt, Human
cucagcucuggga

SEQ ID NO: 3806315 - RNA, 14 nt, Human
cucagcucugggag

SEQ ID NO: 3806316 - RNA, 16 nt, Human
cucagcucugggagag

SEQ ID NO: 3806317 - RNA, 22 nt, Human
cucagcucugggagaggauuuu

SEQ ID NO: 3806318 - RNA, 14 nt, Human
cucagcugccucac

SEQ ID NO: 3806319 - RNA, 21 nt, Human
cucagcugcuucucccacuug

SEQ ID NO: 3806320 - RNA, 17 nt, Human
ccauucugccugcccag

SEQ ID NO: 3806321 - RNA, 19 nt, Human
ccauucugccugcccaggc

SEQ ID NO: 3806322 - RNA, 20 nt, Human
ccauucugccugcccaggcc

SEQ ID NO: 3806323 - RNA, 12 nt, Human
ccauucuggaag

SEQ ID NO: 3806324 - RNA, 15 nt, Human
ccauucuggaaguga

SEQ ID NO: 3806325 - RNA, 19 nt, Human
ccauucuggaagugacuuu

SEQ ID NO: 3806326 - RNA, 22 nt, Human
ccauucuggauuuugucaagca

SEQ ID NO: 3806327 - RNA, 16 nt, Human
ccauucuuggcccagg

SEQ ID NO: 3806328 - RNA, 20 nt, Human
ccauucuuuauucuuuuacu

SEQ ID NO: 3806329 - RNA, 20 nt, Human
ccauucuuucccaacaccuc

SEQ ID NO: 3806330 - RNA, 22 nt, Human
ccauucuuugcuugaacacagu

SEQ ID NO: 3806331 - RNA, 17 nt, Human
ccauugaaggcuuaaac

SEQ ID NO: 3806332 - RNA, 15 nt, Human
ccauugacauguaca

SEQ ID NO: 3806333 - RNA, 18 nt, Human
ccauugaucauaaacuga

SEQ ID NO: 3806334 - RNA, 13 nt, Human
ccauugcacccag

SEQ ID NO: 3806335 - RNA, 16 nt, Human
ccauugccaccaggag

SEQ ID NO: 3806336 - RNA, 17 nt, Human
ccauugccaccaggaga

SEQ ID NO: 3806337 - RNA, 14 nt, Human
ccauugcugcuccu

SEQ ID NO: 3806338 - RNA, 15 nt, Human
ccauuggaucucauu

SEQ ID NO: 3806339 - RNA, 13 nt, Human
ccauugguguugu

SEQ ID NO: 3806340 - RNA, 17 nt, Human
ccauugucccucugccc

SEQ ID NO: 3806341 - RNA, 15 nt, Human
ccauugucucagagc

SEQ ID NO: 3806342 - RNA, 15 nt, Human
ccauugucuuguucu

SEQ ID NO: 3806343 - RNA, 12 nt, Human
ccauugucuuua

SEQ ID NO: 3806344 - RNA, 20 nt, Human
ccauugucuuuauaugaaca

SEQ ID NO: 3806345 - RNA, 22 nt, Human
ccauugucuuuauaugaacaua

SEQ ID NO: 3806346 - RNA, 12 nt, Human
ccauugugcauu

SEQ ID NO: 3806347 - RNA, 20 nt, Human
ccauuguggcuccuaucugu

SEQ ID NO: 3806348 - RNA, 18 nt, Human
cuccccacagcgucccug

SEQ ID NO: 3806349 - RNA, 20 nt, Human
cuccccacagcgucccuggc

SEQ ID NO: 3806350 - RNA, 17 nt, Human
cuccccacccuccuggc

SEQ ID NO: 3806351 - RNA, 23 nt, Human
cuccccacccuccuggccucaga

SEQ ID NO: 3806352 - RNA, 16 nt, Human
cuccccaccuccaggc

SEQ ID NO: 3806353 - RNA, 23 nt, Human
cuccccaccuucccucucccggc

SEQ ID NO: 3806354 - RNA, 20 nt, Human
cuccccacgucagcugggac

SEQ ID NO: 3806355 - RNA, 12 nt, Human
cuccccacucua

SEQ ID NO: 3806356 - RNA, 13 nt, Human
cuccccacucuag

SEQ ID NO: 3806357 - RNA, 17 nt, Human
cuccccacucugcucug

SEQ ID NO: 3806358 - RNA, 20 nt, Human
cuccccacucugcucugaug

SEQ ID NO: 3806359 - RNA, 11 nt, Human
cuccccagaau

SEQ ID NO: 3806360 - RNA, 20 nt, Human
cuccccagaguuccccaugc

SEQ ID NO: 3806361 - RNA, 12 nt, Human
cuccccagcaag

SEQ ID NO: 3806362 - RNA, 21 nt, Human
cuccccagcaagugagagcug

SEQ ID NO: 3806363 - RNA, 22 nt, Human
cuccccagcaagugagagcugg

SEQ ID NO: 3806364 - RNA, 15 nt, Human
cuccccagcaggugg

SEQ ID NO: 3806365 - RNA, 19 nt, Human
cuccccagcauuccagccc

SEQ ID NO: 3806366 - RNA, 15 nt, Human
cuccccagccagccu

SEQ ID NO: 3806367 - RNA, 20 nt, Human
cuccccagccagccuggcug

SEQ ID NO: 3806368 - RNA, 15 nt, Human
cuccccagcccagag

SEQ ID NO: 3806369 - RNA, 17 nt, Human
cuccccagcccagagac

SEQ ID NO: 3806370 - RNA, 15 nt, Human
cuccccagcccaggg

SEQ ID NO: 3806371 - RNA, 13 nt, Human
cuccccagccccu

SEQ ID NO: 3806372 - RNA, 15 nt, Human
cuccccagccccuag

SEQ ID NO: 3806373 - RNA, 16 nt, Human
cuccccagcccuggcu

SEQ ID NO: 3806374 - RNA, 21 nt, Human
cuccccagccugcgccugcug

SEQ ID NO: 3806375 - RNA, 14 nt, Human
cuccccagccuggg

SEQ ID NO: 3806376 - RNA, 16 nt, Human
cuccccagccugggcc

SEQ ID NO: 3806377 - RNA, 15 nt, Human
cuccccagcucccag

SEQ ID NO: 3806378 - RNA, 12 nt, Human
cuccccaggcca

SEQ ID NO: 3806379 - RNA, 21 nt, Human
cuccccaggccaggccaccag

SEQ ID NO: 3806380 - RNA, 21 nt, Human
cuccccaggccguggcugccc

SEQ ID NO: 3806381 - RNA, 21 nt, Human
cuccccaggggagagggucug

SEQ ID NO: 3806382 - RNA, 18 nt, Human
cuccccagguccagcucu

SEQ ID NO: 3806383 - RNA, 20 nt, Human
cuccccagguccagcucugg

SEQ ID NO: 3806384 - RNA, 22 nt, Human
cuccccaguacaccccaccucu

SEQ ID NO: 3806385 - RNA, 11 nt, Human
cuccccagugu

SEQ ID NO: 3806386 - RNA, 15 nt, Human
cuccccaucccaugu

SEQ ID NO: 3806387 - RNA, 21 nt, Human
cuccccaucgccagcugauga

SEQ ID NO: 3806388 - RNA, 23 nt, Human
cuccccaucgccagcugaugacu

SEQ ID NO: 3806389 - RNA, 15 nt, Human
cuccccaugccacgu

SEQ ID NO: 3806390 - RNA, 23 nt, Human
cuccccaugugccugcaccagga

SEQ ID NO: 3806391 - RNA, 18 nt, Human
cuccccauguguccuggu

SEQ ID NO: 3806392 - RNA, 18 nt, Human
cuccccauuucccaucug

SEQ ID NO: 3806393 - RNA, 20 nt, Human
cuccccauuucccaucugca

SEQ ID NO: 3806394 - RNA, 22 nt, Human
cuccccauuucccaucugcacc

SEQ ID NO: 3806395 - RNA, 16 nt, Human
cucccccaccccugcu

SEQ ID NO: 3806396 - RNA, 19 nt, Human
cucccccaccguugucuca

SEQ ID NO: 3806397 - RNA, 22 nt, Human
cucccccaccguugucucaugc

SEQ ID NO: 3806398 - RNA, 19 nt, Human
cucccccacuuucuuucuu

SEQ ID NO: 3806399 - RNA, 12 nt, Human
cucccccagcaa

SEQ ID NO: 3806400 - RNA, 22 nt, Human
cucccccagcaaagcccccaga

SEQ ID NO: 3806401 - RNA, 22 nt, Human
cucccccagccaugccagcugg

SEQ ID NO: 3806402 - RNA, 22 nt, Human
cucccccagccccauccucugu

SEQ ID NO: 3806403 - RNA, 20 nt, Human
cucccccaggggcugucccg

SEQ ID NO: 3806404 - RNA, 19 nt, Human
cucccccaucucccacccu

SEQ ID NO: 3806405 - RNA, 14 nt, Human
cuccccccacugca

SEQ ID NO: 3806406 - RNA, 18 nt, Human
cucccccccaugcacugu

SEQ ID NO: 3806407 - RNA, 20 nt, Human
cucccccccaugcacuguga

SEQ ID NO: 3806408 - RNA, 21 nt, Human
cucccccccaugcacugugaa

SEQ ID NO: 3806409 - RNA, 15 nt, Human
cucccccggcucuac

SEQ ID NO: 3806410 - RNA, 17 nt, Human
cucccccguccuggagg

SEQ ID NO: 3806411 - RNA, 16 nt, Human
cucccccuagccauuu

SEQ ID NO: 3806412 - RNA, 22 nt, Human
cucccccuaguuugugagaaac

SEQ ID NO: 3806413 - RNA, 14 nt, Human
cucccccuccuucc

SEQ ID NO: 3806414 - RNA, 12 nt, Human
cucccccugucc

SEQ ID NO: 3806415 - RNA, 13 nt, Human
cucccccuucucc

SEQ ID NO: 3806416 - RNA, 14 nt, Human
cucccccuucuccc

SEQ ID NO: 3806417 - RNA, 14 nt, Human
cuccccgccuguuc

SEQ ID NO: 3806418 - RNA, 16 nt, Human
cuccccgcuaaggaag

SEQ ID NO: 3806419 - RNA, 19 nt, Human
cuccccggcacccucuggc

SEQ ID NO: 3806420 - RNA, 20 nt, Human
cuccccggcacccucuggcc

SEQ ID NO: 3806421 - RNA, 14 nt, Human
cuccccggcccuac

SEQ ID NO: 3806422 - RNA, 23 nt, Human
cuccccuaaagccucaaaacaaa

SEQ ID NO: 3806423 - RNA, 15 nt, Human
cuccccuaccacugu

SEQ ID NO: 3806424 - RNA, 23 nt, Human
cuccccuauccacccagcccauu

SEQ ID NO: 3806425 - RNA, 10 nt, Human
cuccccucaa

SEQ ID NO: 3806426 - RNA, 16 nt, Human
cuccccucacagccuc

SEQ ID NO: 3806427 - RNA, 17 nt, Human
cuccccucacagccucu

SEQ ID NO: 3806428 - RNA, 12 nt, Human
cuccccucagcc

SEQ ID NO: 3806429 - RNA, 15 nt, Human
cuccccuccaaccug

SEQ ID NO: 3806430 - RNA, 14 nt, Human
cuccccuccauccc

SEQ ID NO: 3806431 - RNA, 16 nt, Human
cuccccuccaucccug

SEQ ID NO: 3806432 - RNA, 15 nt, Human
cuccccuccccaacu

SEQ ID NO: 3806433 - RNA, 15 nt, Human
cuccccuccccugcu

SEQ ID NO: 3806434 - RNA, 11 nt, Human
cuccccuccuc

SEQ ID NO: 3806435 - RNA, 12 nt, Human
cuccccuccucc

SEQ ID NO: 3806436 - RNA, 16 nt, Human
cuccccuccucucccc

SEQ ID NO: 3806437 - RNA, 17 nt, Human
cuccccuccucuccccu

SEQ ID NO: 3806438 - RNA, 19 nt, Human
cuccccuccuugccuccug

SEQ ID NO: 3806439 - RNA, 17 nt, Human
cuccccucucuugcacc

SEQ ID NO: 3806440 - RNA, 22 nt, Human
cuccccucugaaaguuguacau

SEQ ID NO: 3806441 - RNA, 23 nt, Human
cuccccucugaaaguuguacaug

SEQ ID NO: 3806442 - RNA, 13 nt, Human
cuccccucugcug

SEQ ID NO: 3806443 - RNA, 15 nt, Human
cuccccucugcuggc

SEQ ID NO: 3806444 - RNA, 18 nt, Human
cuccccucuuauguaccu

SEQ ID NO: 3806445 - RNA, 14 nt, Human
cuccccucuuccuc

SEQ ID NO: 3806446 - RNA, 17 nt, Human
cuccccucuuccucuug

SEQ ID NO: 3806447 - RNA, 16 nt, Human
cuccccugaccuguga

SEQ ID NO: 3806448 - RNA, 12 nt, Human
cuccccugcacu

SEQ ID NO: 3806449 - RNA, 15 nt, Human
cuccccugcacugua

SEQ ID NO: 3806450 - RNA, 19 nt, Human
cuccccugcacuguaaaau

SEQ ID NO: 3806451 - RNA, 15 nt, Human
cuccccugcagcccu

SEQ ID NO: 3806452 - RNA, 13 nt, Human
cuccccugccacc

SEQ ID NO: 3806453 - RNA, 23 nt, Human
cuccccugccaccaggccaccuc

SEQ ID NO: 3806454 - RNA, 16 nt, Human
cuccccugccagggca

SEQ ID NO: 3806455 - RNA, 22 nt, Human
cuccccugcccccaggacuggg

SEQ ID NO: 3806456 - RNA, 15 nt, Human
cuccccugcccccug

SEQ ID NO: 3806457 - RNA, 19 nt, Human
cuccccugcccccugcagg

SEQ ID NO: 3806458 - RNA, 20 nt, Human
cuccccugcccccugcagga

SEQ ID NO: 3806459 - RNA, 15 nt, Human
cuccccugcccugcu

SEQ ID NO: 3806460 - RNA, 15 nt, Human
cuccccugccuugcu

SEQ ID NO: 3806461 - RNA, 13 nt, Human
cuccccugcugca

SEQ ID NO: 3806462 - RNA, 12 nt, Human
cuccccugcugg

SEQ ID NO: 3806463 - RNA, 21 nt, Human
cuccccugcuggguguggcgc

SEQ ID NO: 3806464 - RNA, 19 nt, Human
cuccccugugcaguccugg

SEQ ID NO: 3806465 - RNA, 13 nt, Human
cccaacuccugga

SEQ ID NO: 3806466 - RNA, 15 nt, Human
cccaacuccuggaag

SEQ ID NO: 3806467 - RNA, 17 nt, Human
cccaacuccuggaagcu

SEQ ID NO: 3806468 - RNA, 16 nt, Human
cccaacuccuuccagc

SEQ ID NO: 3806469 - RNA, 20 nt, Human
cccaacucgggcucccgggu

SEQ ID NO: 3806470 - RNA, 11 nt, Human
cccaacugucu

SEQ ID NO: 3806471 - RNA, 15 nt, Human
cccaacugucuuuuu

SEQ ID NO: 3806472 - RNA, 17 nt, Human
cccaacugugagcaagg

SEQ ID NO: 3806473 - RNA, 16 nt, Human
cccaacuguguagcau

SEQ ID NO: 3806474 - RNA, 17 nt, Human
cccaacuucaucuggaa

SEQ ID NO: 3806475 - RNA, 22 nt, Human
cccaagaacagcaggcccaccu

SEQ ID NO: 3806476 - RNA, 23 nt, Human
cccaagaacagcaggcccaccua

SEQ ID NO: 3806477 - RNA, 16 nt, Human
cccaagaaggcugggg

SEQ ID NO: 3806478 - RNA, 19 nt, Human
cccaagacagaugccccag

SEQ ID NO: 3806479 - RNA, 21 nt, Human
cccaagacagaugccccagag

SEQ ID NO: 3806480 - RNA, 18 nt, Human
cccaagaccucagggcac

SEQ ID NO: 3806481 - RNA, 16 nt, Human
cccaagacucccauga

SEQ ID NO: 3806482 - RNA, 24 nt, Human
cccaagagaacucgcgcucaguaa

SEQ ID NO: 3806483 - RNA, 23 nt, Human
cccaagagcuacguauuuaauag

SEQ ID NO: 3806484 - RNA, 18 nt, Human
cccaagcccgacuugcug

SEQ ID NO: 3806485 - RNA, 22 nt, Human
cccaagccuucgggcgucugug

SEQ ID NO: 3806486 - RNA, 18 nt, Human
cccaagcgcccuggcccc

SEQ ID NO: 3806487 - RNA, 20 nt, Human
cccaagcgcccuggccccca

SEQ ID NO: 3806488 - RNA, 16 nt, Human
cccaagcggugucucu

SEQ ID NO: 3806489 - RNA, 13 nt, Human
cccaagcuccucc

SEQ ID NO: 3806490 - RNA, 14 nt, Human
cccaagcucugcuc

SEQ ID NO: 3806491 - RNA, 17 nt, Human
cccaagcucugcuccuc

SEQ ID NO: 3806492 - RNA, 11 nt, Human
cccaagcugga

SEQ ID NO: 3806493 - RNA, 16 nt, Human
cccaagcuggcugggg

SEQ ID NO: 3806494 - RNA, 21 nt, Human
cccaagcugggccccagccca

SEQ ID NO: 3806495 - RNA, 14 nt, Human
cccaagcuuggcag

SEQ ID NO: 3806496 - RNA, 17 nt, Human
cccaaggaaaacugcau

SEQ ID NO: 3806497 - RNA, 21 nt, Human
cccaaggacugagggacucug

SEQ ID NO: 3806498 - RNA, 14 nt, Human
cccaaggagcacag

SEQ ID NO: 3806499 - RNA, 14 nt, Human
cccaaggaggaaaa

SEQ ID NO: 3806500 - RNA, 17 nt, Human
cccaaggcucugagcaa

SEQ ID NO: 3806501 - RNA, 20 nt, Human
cccaaggcugcgucuggagg

SEQ ID NO: 3806502 - RNA, 21 nt, Human
cccaaggcugcgucuggaggg

SEQ ID NO: 3806503 - RNA, 17 nt, Human
cccaagggaaagaaaag

SEQ ID NO: 3806504 - RNA, 12 nt, Human
cccaagggccug

SEQ ID NO: 3806505 - RNA, 17 nt, Human
cccaagggccuggccug

SEQ ID NO: 3806506 - RNA, 21 nt, Human
cccaaggggcagucuggaggg

SEQ ID NO: 3806507 - RNA, 17 nt, Human
cccaagguaccauccua

SEQ ID NO: 3806508 - RNA, 12 nt, Human
cucccuaccuca

SEQ ID NO: 3806509 - RNA, 16 nt, Human
cucccuaccucaaccu

SEQ ID NO: 3806510 - RNA, 16 nt, Human
cucccuacuuucuuag

SEQ ID NO: 3806511 - RNA, 21 nt, Human
cucccuagugacccggaggcc

SEQ ID NO: 3806512 - RNA, 22 nt, Human
cucccuagugacccggaggcca

SEQ ID NO: 3806513 - RNA, 17 nt, Human
cucccuaguuccuucau

SEQ ID NO: 3806514 - RNA, 20 nt, Human
cucccuauaaugcuggagcg

SEQ ID NO: 3806515 - RNA, 18 nt, Human
cucccuaucccucacaca

SEQ ID NO: 3806516 - RNA, 19 nt, Human
cucccuauuuuuuuucugu

SEQ ID NO: 3806517 - RNA, 21 nt, Human
cucccuauuuuuuuucuguua

SEQ ID NO: 3806518 - RNA, 13 nt, Human
cucccucaaccuc

SEQ ID NO: 3806519 - RNA, 17 nt, Human
cucccucaaccucaucc

SEQ ID NO: 3806520 - RNA, 14 nt, Human
cucccucagccccu

SEQ ID NO: 3806521 - RNA, 13 nt, Human
cucccuccacccc

SEQ ID NO: 3806522 - RNA, 16 nt, Human
cucccuccaccccagg

SEQ ID NO: 3806523 - RNA, 17 nt, Human
cucccuccaccccagga

SEQ ID NO: 3806524 - RNA, 15 nt, Human
cucccuccaccuccc

SEQ ID NO: 3806525 - RNA, 21 nt, Human
cucccuccaccucccugcaau

SEQ ID NO: 3806526 - RNA, 20 nt, Human
cucccucccagagcaccugc

SEQ ID NO: 3806527 - RNA, 14 nt, Human
cucccucccagcuc

SEQ ID NO: 3806528 - RNA, 16 nt, Human
cucccucccagcucca

SEQ ID NO: 3806529 - RNA, 13 nt, Human
cucccucccagga

SEQ ID NO: 3806530 - RNA, 17 nt, Human
cucccucccaggacucu

SEQ ID NO: 3806531 - RNA, 20 nt, Human
cucccuccccgucucauucc

SEQ ID NO: 3806532 - RNA, 14 nt, Human
cucccuccccugcc

SEQ ID NO: 3806533 - RNA, 18 nt, Human
cucccuccccugccauuu

SEQ ID NO: 3806534 - RNA, 15 nt, Human
cucccuccccugccc

SEQ ID NO: 3806535 - RNA, 16 nt, Human
cucccuccccugcccu

SEQ ID NO: 3806536 - RNA, 21 nt, Human
cucccuccccugcccuggucc

SEQ ID NO: 3806537 - RNA, 16 nt, Human
cucccucccucuuucc

SEQ ID NO: 3806538 - RNA, 21 nt, Human
cucccuccgauccuuccuccc

SEQ ID NO: 3806539 - RNA, 18 nt, Human
cucccuccgcccccaggu

SEQ ID NO: 3806540 - RNA, 20 nt, Human
cucccuccgcccccagguag

SEQ ID NO: 3806541 - RNA, 14 nt, Human
cucccuccucaccu

SEQ ID NO: 3806542 - RNA, 18 nt, Human
cucccuccucaccucugg

SEQ ID NO: 3806543 - RNA, 21 nt, Human
cucccuccucaccucuggacu

SEQ ID NO: 3806544 - RNA, 14 nt, Human
cucccuccucugcc

SEQ ID NO: 3806545 - RNA, 17 nt, Human
cucccuccugccgacuc

SEQ ID NO: 3806546 - RNA, 19 nt, Human
cucccuccugccgacuccu

SEQ ID NO: 3806547 - RNA, 17 nt, Human
cucccucgucgagcugg

SEQ ID NO: 3806548 - RNA, 13 nt, Human
cucccucuacugg

SEQ ID NO: 3806549 - RNA, 19 nt, Human
cucccucuacugggagccu

SEQ ID NO: 3806550 - RNA, 19 nt, Human
cucccucuaggcucugccu

SEQ ID NO: 3806551 - RNA, 21 nt, Human
cucccucuaggcucugccuuc

SEQ ID NO: 3806552 - RNA, 14 nt, Human
cucccucucacugu

SEQ ID NO: 3806553 - RNA, 15 nt, Human
cucccucucacuguc

SEQ ID NO: 3806554 - RNA, 21 nt, Human
cucccucucacugucugagag

SEQ ID NO: 3806555 - RNA, 17 nt, Human
cucccucucaggaucca

SEQ ID NO: 3806556 - RNA, 16 nt, Human
cucccucuccagcagg

SEQ ID NO: 3806557 - RNA, 21 nt, Human
cucccucuccagcaggcccau

SEQ ID NO: 3806558 - RNA, 13 nt, Human
cucccucucccug

SEQ ID NO: 3806559 - RNA, 14 nt, Human
cucccucuccugcc

SEQ ID NO: 3806560 - RNA, 15 nt, Human
cucccucucucuucu

SEQ ID NO: 3806561 - RNA, 17 nt, Human
cucccucucucuucugc

SEQ ID NO: 3806562 - RNA, 21 nt, Human
cucccucucucuucugcucca

SEQ ID NO: 3806563 - RNA, 22 nt, Human
cucccucucucuucugcuccac

SEQ ID NO: 3806564 - RNA, 21 nt, Human
cucccucugaccugcaggcca

SEQ ID NO: 3806565 - RNA, 16 nt, Human
cucccucugaggcugu

SEQ ID NO: 3806566 - RNA, 18 nt, Human
cucccucugauuuuucau

SEQ ID NO: 3806567 - RNA, 11 nt, Human
cucccucugga

SEQ ID NO: 3806568 - RNA, 13 nt, Human
cucccucuggauc

SEQ ID NO: 3806569 - RNA, 15 nt, Human
cucccucugguccca

SEQ ID NO: 3806570 - RNA, 18 nt, Human
cucccucuguccaccagc

SEQ ID NO: 3806571 - RNA, 14 nt, Human
cucccucuucucaa

SEQ ID NO: 3806572 - RNA, 15 nt, Human
cucccucuucucaag

SEQ ID NO: 3806573 - RNA, 15 nt, Human
cucccucuuucccuc

SEQ ID NO: 3806574 - RNA, 23 nt, Human
cucccugaaaauguuuuucugcc

SEQ ID NO: 3806575 - RNA, 14 nt, Human
cucccugaagccag

SEQ ID NO: 3806576 - RNA, 15 nt, Human
cucccugaagccagc

SEQ ID NO: 3806577 - RNA, 16 nt, Human
cucccugaagccagcc

SEQ ID NO: 3806578 - RNA, 16 nt, Human
cucccugacccgucua

SEQ ID NO: 3806579 - RNA, 16 nt, Human
cucccugacccuguau

SEQ ID NO: 3806580 - RNA, 17 nt, Human
cucccugacccuguaua

SEQ ID NO: 3806581 - RNA, 24 nt, Human
cucccugacugggggcagacaugg

SEQ ID NO: 3806582 - RNA, 14 nt, Human
cucccugacuuuuc

SEQ ID NO: 3806583 - RNA, 12 nt, Human
cucccugaugua

SEQ ID NO: 3806584 - RNA, 20 nt, Human
cucccugcagaggggcugag

SEQ ID NO: 3806585 - RNA, 14 nt, Human
cucccugccagagg

SEQ ID NO: 3806586 - RNA, 16 nt, Human
cucccugccagcaccc

SEQ ID NO: 3806587 - RNA, 18 nt, Human
cucccugccccucccuuc

SEQ ID NO: 3806588 - RNA, 10 nt, Human
cucccugccg

SEQ ID NO: 3806589 - RNA, 15 nt, Human
cucccugccgccuca

SEQ ID NO: 3806590 - RNA, 14 nt, Human
cucccugccuccag

SEQ ID NO: 3806591 - RNA, 16 nt, Human
cucccugccuccagga

SEQ ID NO: 3806592 - RNA, 16 nt, Human
cucccugccuggcccc

SEQ ID NO: 3806593 - RNA, 14 nt, Human
cucccugcugcucc

SEQ ID NO: 3806594 - RNA, 16 nt, Human
cucccugcuguccccu

SEQ ID NO: 3806595 - RNA, 12 nt, Human
cucccuggagcc

SEQ ID NO: 3806596 - RNA, 19 nt, Human
cucccuggagccagacucu

SEQ ID NO: 3806597 - RNA, 22 nt, Human
cucccuggagugcaguuuccaa

SEQ ID NO: 3806598 - RNA, 22 nt, Human
cucccuggaguguggcugagga

SEQ ID NO: 3806599 - RNA, 23 nt, Human
cucccuggaucagaacaggagcu

SEQ ID NO: 3806600 - RNA, 20 nt, Human
cucccuggaucuaccuggag

SEQ ID NO: 3806601 - RNA, 21 nt, Human
cucccuggaucuaccuggagg

SEQ ID NO: 3806602 - RNA, 12 nt, Human
cucccuggauga

SEQ ID NO: 3806603 - RNA, 19 nt, Human
cucccuggauuuuuaccag

SEQ ID NO: 3806604 - RNA, 24 nt, Human
cucccuggauuuuuaccagucuca

SEQ ID NO: 3806605 - RNA, 13 nt, Human
cucccuggccugu

SEQ ID NO: 3806606 - RNA, 21 nt, Human
cucccuggccuguucuguuuu

SEQ ID NO: 3806607 - RNA, 16 nt, Human
cucccuggcucccucc

SEQ ID NO: 3806608 - RNA, 20 nt, Human
cucccuggcucucagaaggu

SEQ ID NO: 3806609 - RNA, 17 nt, Human
cucccuggcugcccugg

SEQ ID NO: 3806610 - RNA, 15 nt, Human
cucgggaggcugaga

SEQ ID NO: 3806611 - RNA, 20 nt, Human
cucgggauuaguacacacuu

SEQ ID NO: 3806612 - RNA, 14 nt, Human
cucgggcccaccug

SEQ ID NO: 3806613 - RNA, 18 nt, Human
cucgggcccaccuggcca

SEQ ID NO: 3806614 - RNA, 19 nt, Human
cucgggcccaccuggccac

SEQ ID NO: 3806615 - RNA, 21 nt, Human
cucgggcccaccuggccaccu

SEQ ID NO: 3806616 - RNA, 16 nt, Human
cucgggcccaggccau

SEQ ID NO: 3806617 - RNA, 23 nt, Human
cucgggcccaggccaucuuccag

SEQ ID NO: 3806618 - RNA, 24 nt, Human
cucgggcccaggccaucuuccagg

SEQ ID NO: 3806619 - RNA, 15 nt, Human
cucgggcuccugugc

SEQ ID NO: 3806620 - RNA, 17 nt, Human
cucgggcuccugugccc

SEQ ID NO: 3806621 - RNA, 14 nt, Human
cucggggagccuua

SEQ ID NO: 3806622 - RNA, 17 nt, Human
cucggguuucucugugg

SEQ ID NO: 3806623 - RNA, 13 nt, Human
cucggugucccca

SEQ ID NO: 3806624 - RNA, 15 nt, Human
cucgguguccccacc

SEQ ID NO: 3806625 - RNA, 20 nt, Human
cucgguguccccaccaucug

SEQ ID NO: 3806626 - RNA, 23 nt, Human
cucgguguggagaagcggcuggc

SEQ ID NO: 3806627 - RNA, 21 nt, Human
cucgguucaaggucacuguuu

SEQ ID NO: 3806628 - RNA, 15 nt, Human
cucgguugaaaccug

SEQ ID NO: 3806629 - RNA, 14 nt, Human
cucguagccaucuc

SEQ ID NO: 3806630 - RNA, 16 nt, Human
cucguauagaagucuu

SEQ ID NO: 3806631 - RNA, 16 nt, Human
cucguccucccccugc

SEQ ID NO: 3806632 - RNA, 20 nt, Human
cucguccucccccugccagu

SEQ ID NO: 3806633 - RNA, 20 nt, Human
cucgucggggggacagcucc

SEQ ID NO: 3806634 - RNA, 20 nt, Human
cucgugagucauuuaaaugu

SEQ ID NO: 3806635 - RNA, 12 nt, Human
cucguggacacc

SEQ ID NO: 3806636 - RNA, 15 nt, Human
cucguggacaccugc

SEQ ID NO: 3806637 - RNA, 16 nt, Human
cucguggacaccugcc

SEQ ID NO: 3806638 - RNA, 17 nt, Human
cucguggacaccugccc

SEQ ID NO: 3806639 - RNA, 19 nt, Human
cucguggacaccugcccug

SEQ ID NO: 3806640 - RNA, 16 nt, Human
cucguggccagcccgg

SEQ ID NO: 3806641 - RNA, 21 nt, Human
cucgugguaggacuguagaaa

SEQ ID NO: 3806642 - RNA, 15 nt, Human
cucguguauccuggg

SEQ ID NO: 3806643 - RNA, 16 nt, Human
cucguguauccugggg

SEQ ID NO: 3806644 - RNA, 18 nt, Human
cucguguauccuggggcu

SEQ ID NO: 3806645 - RNA, 20 nt, Human
cucguguauccuggggcucc

SEQ ID NO: 3806646 - RNA, 14 nt, Human
cucguguguuucua

SEQ ID NO: 3806647 - RNA, 14 nt, Human
cucguuaauuugua

SEQ ID NO: 3806648 - RNA, 22 nt, Human
cucguuagggaagagaaacagg

SEQ ID NO: 3806649 - RNA, 14 nt, Human
cucguucucccugg

SEQ ID NO: 3806650 - RNA, 20 nt, Human
cucguugacuggcugugugu

SEQ ID NO: 3806651 - RNA, 19 nt, Human
cucguuucaaaaacacagu

SEQ ID NO: 3806652 - RNA, 13 nt, Human
cucguuuguguuc

SEQ ID NO: 3806653 - RNA, 23 nt, Human
cucuaaaagcguuggauguagca

SEQ ID NO: 3806654 - RNA, 18 nt, Human
cucuaaaagguucaggga

SEQ ID NO: 3806655 - RNA, 19 nt, Human
cucuaaaauauuuaugaag

SEQ ID NO: 3806656 - RNA, 15 nt, Human
cucuaaagaccaaac

SEQ ID NO: 3806657 - RNA, 19 nt, Human
cucuaaagaccaaacuuca

SEQ ID NO: 3806658 - RNA, 14 nt, Human
cucuaaagagcauc

SEQ ID NO: 3806659 - RNA, 19 nt, Human
cucuaaauucuuuauuucu

SEQ ID NO: 3806660 - RNA, 13 nt, Human
cucuaacagcacc

SEQ ID NO: 3806661 - RNA, 14 nt, Human
cucuaacagcccuc

SEQ ID NO: 3806662 - RNA, 15 nt, Human
cucuaacaguggaca

SEQ ID NO: 3806663 - RNA, 16 nt, Human
cucuaaccccaggccc

SEQ ID NO: 3806664 - RNA, 17 nt, Human
cucuaaccccaggcccc

SEQ ID NO: 3806665 - RNA, 15 nt, Human
cucuaacccuaggca

SEQ ID NO: 3806666 - RNA, 14 nt, Human
cucuaaccuccuuu

SEQ ID NO: 3806667 - RNA, 15 nt, Human
cucuaacgccugagc

SEQ ID NO: 3806668 - RNA, 16 nt, Human
cucuaacgccugagcc

SEQ ID NO: 3806669 - RNA, 20 nt, Human
cucuaacgccugagcccagg

SEQ ID NO: 3806670 - RNA, 21 nt, Human
cucuaacuuauuuuauuucca

SEQ ID NO: 3806671 - RNA, 14 nt, Human
cucuaagaaagaac

SEQ ID NO: 3806672 - RNA, 12 nt, Human
cucuaagauguu

SEQ ID NO: 3806673 - RNA, 17 nt, Human
cucuaagauguuauauu

SEQ ID NO: 3806674 - RNA, 18 nt, Human
cucuaagauguuauauuu

SEQ ID NO: 3806675 - RNA, 23 nt, Human
cucuaagauguuauauuuuucuu

SEQ ID NO: 3806676 - RNA, 13 nt, Human
cucuaagccacuc

SEQ ID NO: 3806677 - RNA, 19 nt, Human
cucuaagccacucuuccaa

SEQ ID NO: 3806678 - RNA, 16 nt, Human
cucuaagucauguaug

SEQ ID NO: 3806679 - RNA, 17 nt, Human
cucuaagucauguaugu

SEQ ID NO: 3806680 - RNA, 20 nt, Human
cucuaaguuccacugagcuc

SEQ ID NO: 3806681 - RNA, 13 nt, Human
cucuaauaauaaa

SEQ ID NO: 3806682 - RNA, 14 nt, Human
cucuaauaauaaau

SEQ ID NO: 3806683 - RNA, 16 nt, Human
cucuaauaauaaauag

SEQ ID NO: 3806684 - RNA, 18 nt, Human
cucuaauaauaaauaguu

SEQ ID NO: 3806685 - RNA, 17 nt, Human
cucuaaucgaaagaaaa

SEQ ID NO: 3806686 - RNA, 18 nt, Human
cucuaauguuugcauaua

SEQ ID NO: 3806687 - RNA, 16 nt, Human
cucuaauucacagugc

SEQ ID NO: 3806688 - RNA, 22 nt, Human
cucuaauuggaagaaauuccug

SEQ ID NO: 3806689 - RNA, 16 nt, Human
cucuaauuuauuuugu

SEQ ID NO: 3806690 - RNA, 16 nt, Human
cucuacaaacucccac

SEQ ID NO: 3806691 - RNA, 16 nt, Human
cucuacaacugagucc

SEQ ID NO: 3806692 - RNA, 23 nt, Human
cucuacaacugaguccuuaaaca

SEQ ID NO: 3806693 - RNA, 17 nt, Human
cucuacagagcuucccu

SEQ ID NO: 3806694 - RNA, 22 nt, Human
cucuacagagcuucccugacuc

SEQ ID NO: 3806695 - RNA, 23 nt, Human
cucuacagagcuucccugacuca

SEQ ID NO: 3806696 - RNA, 12 nt, Human
cucuacauauuu

SEQ ID NO: 3806697 - RNA, 17 nt, Human
cucuacaucuucugccu

SEQ ID NO: 3806698 - RNA, 20 nt, Human
cucuaccaagcuauccuggc

SEQ ID NO: 3806699 - RNA, 18 nt, Human
cucuaccagacuguguau

SEQ ID NO: 3806700 - RNA, 20 nt, Human
cucuaccagauaacugagga

SEQ ID NO: 3806701 - RNA, 22 nt, Human
cucuaccagugcaggcuggcca

SEQ ID NO: 3806702 - RNA, 22 nt, Human
cucuaccauuugcagaguccug

SEQ ID NO: 3806703 - RNA, 14 nt, Human
cucuacccaaaccc

SEQ ID NO: 3806704 - RNA, 12 nt, Human
cucuacccagcc

SEQ ID NO: 3806705 - RNA, 19 nt, Human
cucuacccauauuacagau

SEQ ID NO: 3806706 - RNA, 14 nt, Human
cucuaccccaauuu

SEQ ID NO: 3806707 - RNA, 14 nt, Human
cucuacccucccac

SEQ ID NO: 3806708 - RNA, 16 nt, Human
cucuacccucccaccc

SEQ ID NO: 3806709 - RNA, 18 nt, Human
cucuacccucccaccccc

SEQ ID NO: 3806710 - RNA, 14 nt, Human
cucuaccuucuccc

SEQ ID NO: 3806711 - RNA, 15 nt, Human
cucuaccuucucccc

SEQ ID NO: 3806712 - RNA, 15 nt, Human
cucuacuaaaaagaa

SEQ ID NO: 3806713 - RNA, 19 nt, Human
cucuacuaaaaauacagaa

SEQ ID NO: 3806714 - RNA, 20 nt, Human
cucuacuaaugccucuucau

SEQ ID NO: 3806715 - RNA, 15 nt, Human
cccagcugcuugugu

SEQ ID NO: 3806716 - RNA, 20 nt, Human
cccagcuggcccgugacaga

SEQ ID NO: 3806717 - RNA, 14 nt, Human
cccagcugggaggc

SEQ ID NO: 3806718 - RNA, 17 nt, Human
cccagcugggaggcaag

SEQ ID NO: 3806719 - RNA, 22 nt, Human
cccagcugggaggcaagagggg

SEQ ID NO: 3806720 - RNA, 13 nt, Human
cccagcugggcuc

SEQ ID NO: 3806721 - RNA, 19 nt, Human
cccagcugggcucugccac

SEQ ID NO: 3806722 - RNA, 16 nt, Human
cccagcugucuguguc

SEQ ID NO: 3806723 - RNA, 17 nt, Human
cccagcugugagccuug

SEQ ID NO: 3806724 - RNA, 21 nt, Human
cccagcugugcucuggacagg

SEQ ID NO: 3806725 - RNA, 23 nt, Human
cccagcugugcucuggacaggca

SEQ ID NO: 3806726 - RNA, 13 nt, Human
cccagcuuccagc

SEQ ID NO: 3806727 - RNA, 16 nt, Human
cccagcuuccagcagg

SEQ ID NO: 3806728 - RNA, 16 nt, Human
cccagcuucucagcuc

SEQ ID NO: 3806729 - RNA, 20 nt, Human
cccagcuugggcccagcugg

SEQ ID NO: 3806730 - RNA, 22 nt, Human
cccagcuugggcccagcugggc

SEQ ID NO: 3806731 - RNA, 18 nt, Human
cccagcuuugcccaacac

SEQ ID NO: 3806732 - RNA, 22 nt, Human
cccagcuuugcccaacaccagc

SEQ ID NO: 3806733 - RNA, 19 nt, Human
cccaggaaaggcuccagga

SEQ ID NO: 3806734 - RNA, 23 nt, Human
cccaggaaaggcuccaggagcag

SEQ ID NO: 3806735 - RNA, 21 nt, Human
cccaggaagcccaggagggca

SEQ ID NO: 3806736 - RNA, 22 nt, Human
cccaggaagucucaucugggga

SEQ ID NO: 3806737 - RNA, 22 nt, Human
cccaggaauuugaagcugcagu

SEQ ID NO: 3806738 - RNA, 20 nt, Human
cccaggacaccacacccagc

SEQ ID NO: 3806739 - RNA, 17 nt, Human
cccaggaccacaggcuc

SEQ ID NO: 3806740 - RNA, 22 nt, Human
cccaggaccacaggcucaggca

SEQ ID NO: 3806741 - RNA, 23 nt, Human
cccaggaccagaagcucccccag

SEQ ID NO: 3806742 - RNA, 13 nt, Human
cccaggaccagcu

SEQ ID NO: 3806743 - RNA, 15 nt, Human
cccaggaccagcuca

SEQ ID NO: 3806744 - RNA, 16 nt, Human
cccaggaccagcuggg

SEQ ID NO: 3806745 - RNA, 17 nt, Human
cccaggaccagcugggg

SEQ ID NO: 3806746 - RNA, 21 nt, Human
cccaggaccagcuggggcgug

SEQ ID NO: 3806747 - RNA, 11 nt, Human
cccaggacccu

SEQ ID NO: 3806748 - RNA, 23 nt, Human
cccaggacccuggacccagccag

SEQ ID NO: 3806749 - RNA, 13 nt, Human
cccaggacgccac

SEQ ID NO: 3806750 - RNA, 13 nt, Human
cccaggacugggc

SEQ ID NO: 3806751 - RNA, 14 nt, Human
cccaggacugggcc

SEQ ID NO: 3806752 - RNA, 16 nt, Human
cccaggagagagaaag

SEQ ID NO: 3806753 - RNA, 14 nt, Human
cccaggagagccag

SEQ ID NO: 3806754 - RNA, 15 nt, Human
cccaggagagccagc

SEQ ID NO: 3806755 - RNA, 18 nt, Human
cucuaguaguuaaaaaaa

SEQ ID NO: 3806756 - RNA, 20 nt, Human
cucuagugaauguaggcugg

SEQ ID NO: 3806757 - RNA, 18 nt, Human
cucuagugcccuccacag

SEQ ID NO: 3806758 - RNA, 16 nt, Human
cucuagugccuucuaa

SEQ ID NO: 3806759 - RNA, 13 nt, Human
cucuagugcugug

SEQ ID NO: 3806760 - RNA, 13 nt, Human
cucuagugggaca

SEQ ID NO: 3806761 - RNA, 20 nt, Human
cucuagugggacagcccaga

SEQ ID NO: 3806762 - RNA, 22 nt, Human
cucuagugggacagcccagagc

SEQ ID NO: 3806763 - RNA, 21 nt, Human
cucuaguuuuuucuuccuuuu

SEQ ID NO: 3806764 - RNA, 15 nt, Human
cucuauaaaaaauau

SEQ ID NO: 3806765 - RNA, 21 nt, Human
cucuaucauuuaauaauauac

SEQ ID NO: 3806766 - RNA, 16 nt, Human
cucuauccugggcuuu

SEQ ID NO: 3806767 - RNA, 15 nt, Human
cucuaucugggccug

SEQ ID NO: 3806768 - RNA, 17 nt, Human
cucuaucugggccuggg

SEQ ID NO: 3806769 - RNA, 20 nt, Human
cucuaucugggccugggcua

SEQ ID NO: 3806770 - RNA, 15 nt, Human
cucuaucuugcucug

SEQ ID NO: 3806771 - RNA, 16 nt, Human
cucuaugagucuagau

SEQ ID NO: 3806772 - RNA, 16 nt, Human
cucuaugcuuuccaaa

SEQ ID NO: 3806773 - RNA, 21 nt, Human
cucuauggguaucaaacagcu

SEQ ID NO: 3806774 - RNA, 18 nt, Human
cucuauuaagauuuccaa

SEQ ID NO: 3806775 - RNA, 20 nt, Human
cucuauuccccacccucccc

SEQ ID NO: 3806776 - RNA, 23 nt, Human
cucuauucgccacacaguauuuu

SEQ ID NO: 3806777 - RNA, 21 nt, Human
cucuauuguagcauuucuuga

SEQ ID NO: 3806778 - RNA, 17 nt, Human
cucuauuuaaauucuuu

SEQ ID NO: 3806779 - RNA, 15 nt, Human
cucuauuuaauauuu

SEQ ID NO: 3806780 - RNA, 16 nt, Human
cucuauuuaauauuua

SEQ ID NO: 3806781 - RNA, 14 nt, Human
cucuauuuagcaug

SEQ ID NO: 3806782 - RNA, 16 nt, Human
cucuauuuauguuugc

SEQ ID NO: 3806783 - RNA, 13 nt, Human
cucuauuucugga

SEQ ID NO: 3806784 - RNA, 22 nt, Human
cucucaaaucuuuuagucauua

SEQ ID NO: 3806785 - RNA, 14 nt, Human
cucucaacaccaug

SEQ ID NO: 3806786 - RNA, 15 nt, Human
cucucaauaugcuua

SEQ ID NO: 3806787 - RNA, 16 nt, Human
cucucaauaugcuuac

SEQ ID NO: 3806788 - RNA, 19 nt, Human
cucucaauauucaauaaag

SEQ ID NO: 3806789 - RNA, 21 nt, Human
cucucaauauucaauaaagcu

SEQ ID NO: 3806790 - RNA, 14 nt, Human
cucucaauuuuugg

SEQ ID NO: 3806791 - RNA, 12 nt, Human
cucucacacaca

SEQ ID NO: 3806792 - RNA, 20 nt, Human
cucucacagacaggaccccu

SEQ ID NO: 3806793 - RNA, 22 nt, Human
cucucacauguuuagaguugca

SEQ ID NO: 3806794 - RNA, 13 nt, Human
cucucacauuacu

SEQ ID NO: 3806795 - RNA, 14 nt, Human
cucucacauuacug

SEQ ID NO: 3806796 - RNA, 16 nt, Human
cucucaccauuuggau

SEQ ID NO: 3806797 - RNA, 23 nt, Human
cucucaccuugguuccuggggca

SEQ ID NO: 3806798 - RNA, 22 nt, Human
cucucacuccccagccugggcc

SEQ ID NO: 3806799 - RNA, 23 nt, Human
cucucacuccccagccugggccc

SEQ ID NO: 3806800 - RNA, 14 nt, Human
cucucacugugucc

SEQ ID NO: 3806801 - RNA, 16 nt, Human
cucucagaagguauuc

SEQ ID NO: 3806802 - RNA, 19 nt, Human
cucucagaccgucuuccuc

SEQ ID NO: 3806803 - RNA, 21 nt, Human
cucucagagcuacuugggcca

SEQ ID NO: 3806804 - RNA, 19 nt, Human
cucucagauuguaccauug

SEQ ID NO: 3806805 - RNA, 22 nt, Human
cucucagccccugauccuguga

SEQ ID NO: 3806806 - RNA, 21 nt, Human
cucucaggaaaugcugaccca

SEQ ID NO: 3806807 - RNA, 17 nt, Human
cucucaggaccaaagcu

SEQ ID NO: 3806808 - RNA, 15 nt, Human
cucucaggagcacag

SEQ ID NO: 3806809 - RNA, 16 nt, Human
cucucaggagcacagg

SEQ ID NO: 3806810 - RNA, 21 nt, Human
cucucaggagcacaggcagcu

SEQ ID NO: 3806811 - RNA, 14 nt, Human
cucucaggaucaag

SEQ ID NO: 3806812 - RNA, 13 nt, Human
cucucaggaucca

SEQ ID NO: 3806813 - RNA, 18 nt, Human
cucucaggcaugccugug

SEQ ID NO: 3806814 - RNA, 20 nt, Human
cucucaggcaugccugugug

SEQ ID NO: 3806815 - RNA, 19 nt, Human
cucucaggcauggaugaau

SEQ ID NO: 3806816 - RNA, 22 nt, Human
cucucaggccaaacucaccugc

SEQ ID NO: 3806817 - RNA, 19 nt, Human
cucucaggccagcugcuug

SEQ ID NO: 3806818 - RNA, 23 nt, Human
cucucaggccagcugcuugggcu

SEQ ID NO: 3806819 - RNA, 18 nt, Human
cucucaggugaaaggaaa

SEQ ID NO: 3806820 - RNA, 13 nt, Human
cucucagucucug

SEQ ID NO: 3806821 - RNA, 15 nt, Human
cucucagucucugag

SEQ ID NO: 3806822 - RNA, 16 nt, Human
cucucagucucugagc

SEQ ID NO: 3806823 - RNA, 17 nt, Human
cucucagucucugagca

SEQ ID NO: 3806824 - RNA, 12 nt, Human
cucucaguguuu

SEQ ID NO: 3806825 - RNA, 18 nt, Human
cucucaguuaaaauguga

SEQ ID NO: 3806826 - RNA, 15 nt, Human
cucucaguugcagcc

SEQ ID NO: 3806827 - RNA, 17 nt, Human
cucucaucaacugaaug

SEQ ID NO: 3806828 - RNA, 18 nt, Human
cucucaucaacugaauga

SEQ ID NO: 3806829 - RNA, 20 nt, Human
cucucaucacuuuucucuga

SEQ ID NO: 3806830 - RNA, 15 nt, Human
cucucaucugaggca

SEQ ID NO: 3806831 - RNA, 21 nt, Human
cucucaugcugccccugccuu

SEQ ID NO: 3806832 - RNA, 16 nt, Human
cucucauuccccaggu

SEQ ID NO: 3806833 - RNA, 15 nt, Human
cucuccaagggcuuc

SEQ ID NO: 3806834 - RNA, 17 nt, Human
cucuccaagggcuucug

SEQ ID NO: 3806835 - RNA, 22 nt, Human
cucuccaagugccagagguggg

SEQ ID NO: 3806836 - RNA, 12 nt, Human
cucuccaccuca

SEQ ID NO: 3806837 - RNA, 13 nt, Human
cucuccaccucag

SEQ ID NO: 3806838 - RNA, 17 nt, Human
cucuccaccucagccuu

SEQ ID NO: 3806839 - RNA, 21 nt, Human
cucuccacucaugugacucuu

SEQ ID NO: 3806840 - RNA, 14 nt, Human
cucuccacugccuu

SEQ ID NO: 3806841 - RNA, 16 nt, Human
cucuccacugccuucg

SEQ ID NO: 3806842 - RNA, 21 nt, Human
cucuccagaaagcucaucuca

SEQ ID NO: 3806843 - RNA, 20 nt, Human
cucuccagauguuuccagac

SEQ ID NO: 3806844 - RNA, 12 nt, Human
cucuccagcccc

SEQ ID NO: 3806845 - RNA, 14 nt, Human
cucuccagccccug

SEQ ID NO: 3806846 - RNA, 18 nt, Human
cucuccagccucagcucu

SEQ ID NO: 3806847 - RNA, 15 nt, Human
cucuccagcuccaag

SEQ ID NO: 3806848 - RNA, 15 nt, Human
cucuccagcugacua

SEQ ID NO: 3806849 - RNA, 10 nt, Human
cucuccaggg

SEQ ID NO: 3806850 - RNA, 18 nt, Human
cucuccagucuuccaccu

SEQ ID NO: 3806851 - RNA, 17 nt, Human
cucuccaguuugcaccu

SEQ ID NO: 3806852 - RNA, 20 nt, Human
cucuccaguuugcaccuguc

SEQ ID NO: 3806853 - RNA, 12 nt, Human
cucuccauucug

SEQ ID NO: 3806854 - RNA, 21 nt, Human
cucuccauucugcuccuuccc

SEQ ID NO: 3806855 - RNA, 16 nt, Human
cucucccacccucuuc

SEQ ID NO: 3806856 - RNA, 19 nt, Human
cucucccacccucuuccua

SEQ ID NO: 3806857 - RNA, 19 nt, Human
cucucccaggccccaugac

SEQ ID NO: 3806858 - RNA, 21 nt, Human
cucucccaggccccaugaccu

SEQ ID NO: 3806859 - RNA, 13 nt, Human
cucucccaggggc

SEQ ID NO: 3806860 - RNA, 21 nt, Human
cucucccagucuacccagaga

SEQ ID NO: 3806861 - RNA, 18 nt, Human
cucucccaucccccugcc

SEQ ID NO: 3806862 - RNA, 16 nt, Human
cucucccauggagccc

SEQ ID NO: 3806863 - RNA, 18 nt, Human
cucucccauugucccucu

SEQ ID NO: 3806864 - RNA, 19 nt, Human
cucucccauugucccucug

SEQ ID NO: 3806865 - RNA, 20 nt, Human
cucuccccaauauccucgcu

SEQ ID NO: 3806866 - RNA, 13 nt, Human
cucuccccacacu

SEQ ID NO: 3806867 - RNA, 19 nt, Human
cucuccccaccccuacccc

SEQ ID NO: 3806868 - RNA, 22 nt, Human
cucuccccaccccuaccccugg

SEQ ID NO: 3806869 - RNA, 18 nt, Human
cucuccccacgagggcug

SEQ ID NO: 3806870 - RNA, 13 nt, Human
cucuccccagcaa

SEQ ID NO: 3806871 - RNA, 14 nt, Human
cucuccccagcaag

SEQ ID NO: 3806872 - RNA, 18 nt, Human
cucuccccagcccagaga

SEQ ID NO: 3806873 - RNA, 19 nt, Human
cucuccccagcccagagac

SEQ ID NO: 3806874 - RNA, 20 nt, Human
cucuccccagggaagcagca

SEQ ID NO: 3806875 - RNA, 16 nt, Human
cucccggguccuuggc

SEQ ID NO: 3806876 - RNA, 21 nt, Human
cucccggugcccaagaauaga

SEQ ID NO: 3806877 - RNA, 16 nt, Human
cucccgguucuuccag

SEQ ID NO: 3806878 - RNA, 21 nt, Human
cucccgguucuuccagugguu

SEQ ID NO: 3806879 - RNA, 17 nt, Human
cucccuaagccagccug

SEQ ID NO: 3806880 - RNA, 21 nt, Human
cucccuaaggcaugugugaaa

SEQ ID NO: 3806881 - RNA, 20 nt, Human
cucccuaccucaaccuguaa

SEQ ID NO: 3806882 - RNA, 21 nt, Human
cucccuaccucaaccuguaaa

SEQ ID NO: 3806883 - RNA, 14 nt, Human
cucccuagcuccuc

SEQ ID NO: 3806884 - RNA, 16 nt, Human
cucccuauaaugcugg

SEQ ID NO: 3806885 - RNA, 21 nt, Human
cucccuauacugcuuggagcu

SEQ ID NO: 3806886 - RNA, 23 nt, Human
cucccuaucuaacccucccaugg

SEQ ID NO: 3806887 - RNA, 19 nt, Human
cucccuauuaaccuagaga

SEQ ID NO: 3806888 - RNA, 22 nt, Human
cucccuauuuuuuuucuguuau

SEQ ID NO: 3806889 - RNA, 22 nt, Human
cucccucaagccagacucugcc

SEQ ID NO: 3806890 - RNA, 13 nt, Human
cucccucacccug

SEQ ID NO: 3806891 - RNA, 16 nt, Human
cucccucacucucagg

SEQ ID NO: 3806892 - RNA, 17 nt, Human
cucccucacucucagga

SEQ ID NO: 3806893 - RNA, 18 nt, Human
cucccucacucucaggaa

SEQ ID NO: 3806894 - RNA, 15 nt, Human
cucccucagccccuc

SEQ ID NO: 3806895 - RNA, 18 nt, Human
cucccucagucuggcccu

SEQ ID NO: 3806896 - RNA, 23 nt, Human
cucccucagugcccucauuuuau

SEQ ID NO: 3806897 - RNA, 12 nt, Human
cucccuccaccc

SEQ ID NO: 3806898 - RNA, 14 nt, Human
cucccuccacccca

SEQ ID NO: 3806899 - RNA, 15 nt, Human
cucgcuccccacucu

SEQ ID NO: 3806900 - RNA, 18 nt, Human
cucgcugaugcugggcug

SEQ ID NO: 3806901 - RNA, 21 nt, Human
cucgcugaugcugggcugggu

SEQ ID NO: 3806902 - RNA, 23 nt, Human
cucgcugaugcugggcugggugc

SEQ ID NO: 3806903 - RNA, 16 nt, Human
cucgcugccagcucug

SEQ ID NO: 3806904 - RNA, 19 nt, Human
cucgcugccagcucuguau

SEQ ID NO: 3806905 - RNA, 15 nt, Human
cucgcuggacucuca

SEQ ID NO: 3806906 - RNA, 19 nt, Human
cucgcuggacucucagucu

SEQ ID NO: 3806907 - RNA, 21 nt, Human
cucgcuggcccccacuggcug

SEQ ID NO: 3806908 - RNA, 22 nt, Human
cucgcuggcccccacuggcugu

SEQ ID NO: 3806909 - RNA, 12 nt, Human
cucgcuguugcu

SEQ ID NO: 3806910 - RNA, 16 nt, Human
cucgcuguugcugaau

SEQ ID NO: 3806911 - RNA, 19 nt, Human
cucgcuucccccauagcca

SEQ ID NO: 3806912 - RNA, 13 nt, Human
cucgcuucucugu

SEQ ID NO: 3806913 - RNA, 14 nt, Human
cucgcuucucugug

SEQ ID NO: 3806914 - RNA, 11 nt, Human
cucgcuuguaa

SEQ ID NO: 3806915 - RNA, 12 nt, Human
cucgcuuguaaa

SEQ ID NO: 3806916 - RNA, 14 nt, Human
cucgcuugugcaga

SEQ ID NO: 3806917 - RNA, 20 nt, Human
cucggaaccgcucaccuaga

SEQ ID NO: 3806918 - RNA, 21 nt, Human
cucggaaccgcucaccuagag

SEQ ID NO: 3806919 - RNA, 23 nt, Human
cucggaaccugugagcugcacca

SEQ ID NO: 3806920 - RNA, 16 nt, Human
cucggaaggcuggcug

SEQ ID NO: 3806921 - RNA, 19 nt, Human
cucggaccccacuccggcc

SEQ ID NO: 3806922 - RNA, 19 nt, Human
cucggacuuagcugggaga

SEQ ID NO: 3806923 - RNA, 18 nt, Human
cucggagcaucccggagg

SEQ ID NO: 3806924 - RNA, 22 nt, Human
cucggagcaucccggaggaaau

SEQ ID NO: 3806925 - RNA, 13 nt, Human
cucugcuccacca

SEQ ID NO: 3806926 - RNA, 18 nt, Human
cucugcuccaccacaucc

SEQ ID NO: 3806927 - RNA, 19 nt, Human
cucugcuccaccacauccu

SEQ ID NO: 3806928 - RNA, 18 nt, Human
cucugcuccucuccccag

SEQ ID NO: 3806929 - RNA, 20 nt, Human
cucugcuccucuccccagca

SEQ ID NO: 3806930 - RNA, 13 nt, Human
cucugcucgccuu

SEQ ID NO: 3806931 - RNA, 16 nt, Human
cucugcucgccuuagc

SEQ ID NO: 3806932 - RNA, 15 nt, Human
cucugcucugaggcu

SEQ ID NO: 3806933 - RNA, 15 nt, Human
cucugcucugaugca

SEQ ID NO: 3806934 - RNA, 13 nt, Human
cucugcucugccc

SEQ ID NO: 3806935 - RNA, 14 nt, Human
cucugcucugcccu

SEQ ID NO: 3806936 - RNA, 18 nt, Human
cucugcugacagacacag

SEQ ID NO: 3806937 - RNA, 21 nt, Human
cucugcugacagacacaggcc

SEQ ID NO: 3806938 - RNA, 17 nt, Human
cucugcugaccugcuga

SEQ ID NO: 3806939 - RNA, 17 nt, Human
cucugcugaggguccag

SEQ ID NO: 3806940 - RNA, 21 nt, Human
cucugcugaugacccccccag

SEQ ID NO: 3806941 - RNA, 13 nt, Human
cucugcugccaug

SEQ ID NO: 3806942 - RNA, 13 nt, Human
cucugcugccgcc

SEQ ID NO: 3806943 - RNA, 16 nt, Human
cucugcugcuggcugg

SEQ ID NO: 3806944 - RNA, 21 nt, Human
cucugcugcugucccuccccc

SEQ ID NO: 3806945 - RNA, 18 nt, Human
cucugcuggacguccagg

SEQ ID NO: 3806946 - RNA, 21 nt, Human
cucugcuggccuggccggcaa

SEQ ID NO: 3806947 - RNA, 17 nt, Human
cucugcuggucuucaau

SEQ ID NO: 3806948 - RNA, 22 nt, Human
cucugcugugggcacaggucag

SEQ ID NO: 3806949 - RNA, 15 nt, Human
cucugcuucagcuug

SEQ ID NO: 3806950 - RNA, 12 nt, Human
cucugcuucucu

SEQ ID NO: 3806951 - RNA, 14 nt, Human
cucugcuucucuga

SEQ ID NO: 3806952 - RNA, 15 nt, Human
cucugcuucucugac

SEQ ID NO: 3806953 - RNA, 17 nt, Human
cucugcuugagucaggu

SEQ ID NO: 3806954 - RNA, 20 nt, Human
cucugcuugccaucccuccc

SEQ ID NO: 3806955 - RNA, 23 nt, Human
cucugcuugccgaaacuggaagu

SEQ ID NO: 3806956 - RNA, 18 nt, Human
cucugcuugccuggagac

SEQ ID NO: 3806957 - RNA, 15 nt, Human
cucugcuuuggaaau

SEQ ID NO: 3806958 - RNA, 21 nt, Human
cucuggaaaaugugacccaga

SEQ ID NO: 3806959 - RNA, 13 nt, Human
cucuggaaagcaa

SEQ ID NO: 3806960 - RNA, 21 nt, Human
cucuggaaaggggggagcugg

SEQ ID NO: 3806961 - RNA, 18 nt, Human
cucuggaagcccuggaga

SEQ ID NO: 3806962 - RNA, 15 nt, Human
cucuggacaggcaug

SEQ ID NO: 3806963 - RNA, 12 nt, Human
cucuggaccugc

SEQ ID NO: 3806964 - RNA, 13 nt, Human
cucuggaccugcc

SEQ ID NO: 3806965 - RNA, 15 nt, Human
cucuggacggcaggc

SEQ ID NO: 3806966 - RNA, 14 nt, Human
cucuggacuggcua

SEQ ID NO: 3806967 - RNA, 15 nt, Human
cucuggacuggcuag

SEQ ID NO: 3806968 - RNA, 13 nt, Human
cucuggacuuucu

SEQ ID NO: 3806969 - RNA, 21 nt, Human
cucuggacuuucucuaauaau

SEQ ID NO: 3806970 - RNA, 19 nt, Human
cucuggagacagccccaga

SEQ ID NO: 3806971 - RNA, 12 nt, Human
cucuggagccca

SEQ ID NO: 3806972 - RNA, 15 nt, Human
cucuggaguggccac

SEQ ID NO: 3806973 - RNA, 22 nt, Human
cucuggaucuguuccuuggcag

SEQ ID NO: 3806974 - RNA, 20 nt, Human
cucuggauuauauuaugaag

SEQ ID NO: 3806975 - RNA, 18 nt, Human
cucuggauugugggaauu

SEQ ID NO: 3806976 - RNA, 11 nt, Human
cucuggcagcc

SEQ ID NO: 3806977 - RNA, 14 nt, Human
cucuggcagccaca

SEQ ID NO: 3806978 - RNA, 22 nt, Human
cucuggcagccacacuucucag

SEQ ID NO: 3806979 - RNA, 16 nt, Human
cucuggcagcucagag

SEQ ID NO: 3806980 - RNA, 17 nt, Human
cucuggcagcucagaga

SEQ ID NO: 3806981 - RNA, 23 nt, Human
cucuggcagcucagagagggugg

SEQ ID NO: 3806982 - RNA, 18 nt, Human
cucuggcauuagaauuau

SEQ ID NO: 3806983 - RNA, 19 nt, Human
cucuggcauuagaauuauu

SEQ ID NO: 3806984 - RNA, 15 nt, Human
cucuggccccaaggg

SEQ ID NO: 3806985 - RNA, 16 nt, Human
cucuggcccuggcccu

SEQ ID NO: 3806986 - RNA, 16 nt, Human
cucuggccucccaccc

SEQ ID NO: 3806987 - RNA, 19 nt, Human
cucuggccuucggccucca

SEQ ID NO: 3806988 - RNA, 16 nt, Human
cucuggcgacaguuuu

SEQ ID NO: 3806989 - RNA, 19 nt, Human
cucuggcuagaggccagcc

SEQ ID NO: 3806990 - RNA, 20 nt, Human
cucuggcuagaggccagccc

SEQ ID NO: 3806991 - RNA, 18 nt, Human
cucuggcucacagacugg

SEQ ID NO: 3806992 - RNA, 16 nt, Human
cucuggcucucauggg

SEQ ID NO: 3806993 - RNA, 16 nt, Human
cucuggcugaacccug

SEQ ID NO: 3806994 - RNA, 19 nt, Human
cucuggcugaacccugugc

SEQ ID NO: 3806995 - RNA, 20 nt, Human
cucuggcugaacccugugcu

SEQ ID NO: 3806996 - RNA, 15 nt, Human
cucuggcuggggagc

SEQ ID NO: 3806997 - RNA, 14 nt, Human
cucuggcuuccagg

SEQ ID NO: 3806998 - RNA, 17 nt, Human
cucuggcuuccagguau

SEQ ID NO: 3806999 - RNA, 22 nt, Human
cucuggcuuggccacagccagg

SEQ ID NO: 3807000 - RNA, 14 nt, Human
cucuggcuuggccu

SEQ ID NO: 3807001 - RNA, 17 nt, Human
cucuggcuuggccuauc

SEQ ID NO: 3807002 - RNA, 19 nt, Human
cucugggaaauaagagaga

SEQ ID NO: 3807003 - RNA, 23 nt, Human
cucugggaaaugagaaggcagcc

SEQ ID NO: 3807004 - RNA, 19 nt, Human
cucugggaaccucccagag

SEQ ID NO: 3807005 - RNA, 18 nt, Human
cucugggagaaaaucauc

SEQ ID NO: 3807006 - RNA, 20 nt, Human
cucugggagaaaaucaucaa

SEQ ID NO: 3807007 - RNA, 21 nt, Human
cucugggagaaaaucaucaag

SEQ ID NO: 3807008 - RNA, 16 nt, Human
cucugggauccugggg

SEQ ID NO: 3807009 - RNA, 19 nt, Human
cucugggcacacucugcca

SEQ ID NO: 3807010 - RNA, 23 nt, Human
cucugggcaggaccucagagucc

SEQ ID NO: 3807011 - RNA, 18 nt, Human
cucugggcuauggacaca

SEQ ID NO: 3807012 - RNA, 17 nt, Human
cucugggcugccaugug

SEQ ID NO: 3807013 - RNA, 22 nt, Human
cucugggcuggaugagcuccca

SEQ ID NO: 3807014 - RNA, 11 nt, Human
cucugggcugu

SEQ ID NO: 3807015 - RNA, 10 nt, Human
cucugggcuu

SEQ ID NO: 3807016 - RNA, 22 nt, Human
cucugggcuuugauuccaucuc

SEQ ID NO: 3807017 - RNA, 23 nt, Human
cucugggcuuugauuccaucucc

SEQ ID NO: 3807018 - RNA, 15 nt, Human
cucuggggcuguguu

SEQ ID NO: 3807019 - RNA, 21 nt, Human
cucuggggcuguugaagucac

SEQ ID NO: 3807020 - RNA, 21 nt, Human
cucugggggcugaggagcagc

SEQ ID NO: 3807021 - RNA, 21 nt, Human
cucugggggguggccaggccg

SEQ ID NO: 3807022 - RNA, 18 nt, Human
cucuggggugcugccuga

SEQ ID NO: 3807023 - RNA, 15 nt, Human
cucugguaaccucuu

SEQ ID NO: 3807024 - RNA, 17 nt, Human
cucugguagacacagga

SEQ ID NO: 3807025 - RNA, 19 nt, Human
cucugguaucuaauucuuu

SEQ ID NO: 3807026 - RNA, 21 nt, Human
cucugguaucuaauucuuuaa

SEQ ID NO: 3807027 - RNA, 14 nt, Human
cucugguccauaga

SEQ ID NO: 3807028 - RNA, 18 nt, Human
cucugguccauagagagc

SEQ ID NO: 3807029 - RNA, 22 nt, Human
cucuggucuccucuuuguuuug

SEQ ID NO: 3807030 - RNA, 21 nt, Human
cucuggugagucuuggcggca

SEQ ID NO: 3807031 - RNA, 14 nt, Human
cucuggugccucca

SEQ ID NO: 3807032 - RNA, 16 nt, Human
cucuggugcugcagua

SEQ ID NO: 3807033 - RNA, 15 nt, Human
cucugguuaucuaau

SEQ ID NO: 3807034 - RNA, 14 nt, Human
cucugguuccuccc

SEQ ID NO: 3807035 - RNA, 21 nt, Human
cucuguaaaugaaaaaaccca

SEQ ID NO: 3807036 - RNA, 15 nt, Human
cucuguaacaucacu

SEQ ID NO: 3807037 - RNA, 19 nt, Human
cucuguaauugaauauuau

SEQ ID NO: 3807038 - RNA, 14 nt, Human
cucuguaauugcaa

SEQ ID NO: 3807039 - RNA, 13 nt, Human
cucuguacagagc

SEQ ID NO: 3807040 - RNA, 17 nt, Human
cucuguacagagcccac

SEQ ID NO: 3807041 - RNA, 19 nt, Human
cucuguaccccaugaccuu

SEQ ID NO: 3807042 - RNA, 18 nt, Human
cucuguagggaacucugg

SEQ ID NO: 3807043 - RNA, 13 nt, Human
cucuguauaaaca

SEQ ID NO: 3807044 - RNA, 14 nt, Human
cucuacagaggcca

SEQ ID NO: 3807045 - RNA, 19 nt, Human
cucuacagaggccaugggc

SEQ ID NO: 3807046 - RNA, 20 nt, Human
cucuacagugccaacuccuc

SEQ ID NO: 3807047 - RNA, 18 nt, Human
cucuacaucuucugccuu

SEQ ID NO: 3807048 - RNA, 21 nt, Human
cucuaccagauaacugaggag

SEQ ID NO: 3807049 - RNA, 23 nt, Human
cucuaccagauaacugaggaggg

SEQ ID NO: 3807050 - RNA, 17 nt, Human
cucuaccagugcaggcu

SEQ ID NO: 3807051 - RNA, 23 nt, Human
cucuaccagugcaggcuggccag

SEQ ID NO: 3807052 - RNA, 20 nt, Human
cucuaccauuugcagagucc

SEQ ID NO: 3807053 - RNA, 17 nt, Human
cucuacccagcccaucu

SEQ ID NO: 3807054 - RNA, 18 nt, Human
cucuacccagcccaucuu

SEQ ID NO: 3807055 - RNA, 19 nt, Human
cucuacccagcccaucuug

SEQ ID NO: 3807056 - RNA, 20 nt, Human
cucuacccagcccaucuugc

SEQ ID NO: 3807057 - RNA, 13 nt, Human
cucuacccagggc

SEQ ID NO: 3807058 - RNA, 22 nt, Human
cucuacccaucuuaaaaacaac

SEQ ID NO: 3807059 - RNA, 15 nt, Human
cucuacccucccacc

SEQ ID NO: 3807060 - RNA, 22 nt, Human
cucuacccugcauggcugagcu

SEQ ID NO: 3807061 - RNA, 20 nt, Human
cucuaccucauaucaguuug

SEQ ID NO: 3807062 - RNA, 18 nt, Human
cucuaccuucuccccagc

SEQ ID NO: 3807063 - RNA, 20 nt, Human
cucuacguggcaaauuaacu

SEQ ID NO: 3807064 - RNA, 18 nt, Human
cucuacuaaaaauacaaa

SEQ ID NO: 3807065 - RNA, 22 nt, Human
cucuacuaaaaauacaaaaauu

SEQ ID NO: 3807066 - RNA, 14 nt, Human
cucuacucugcuuu

SEQ ID NO: 3807067 - RNA, 16 nt, Human
cucuacucuuacuucc

SEQ ID NO: 3807068 - RNA, 12 nt, Human
cucuacugggaa

SEQ ID NO: 3807069 - RNA, 13 nt, Human
cucuacugggaag

SEQ ID NO: 3807070 - RNA, 16 nt, Human
cucuacugggaaggcu

SEQ ID NO: 3807071 - RNA, 14 nt, Human
cucuacuguguaau

SEQ ID NO: 3807072 - RNA, 17 nt, Human
cucuacuuaauccaaug

SEQ ID NO: 3807073 - RNA, 15 nt, Human
cucuagaagccaagg

SEQ ID NO: 3807074 - RNA, 22 nt, Human
cucuagaagccaagggaaaggg

SEQ ID NO: 3807075 - RNA, 12 nt, Human
cucuagaaucug

SEQ ID NO: 3807076 - RNA, 20 nt, Human
cucuagaauuuuaagugcuu

SEQ ID NO: 3807077 - RNA, 23 nt, Human
cucuagaauuuuaagugcuuugu

SEQ ID NO: 3807078 - RNA, 17 nt, Human
cucuagacaacccugca

SEQ ID NO: 3807079 - RNA, 21 nt, Human
cucuagacaagauauuguaca

SEQ ID NO: 3807080 - RNA, 15 nt, Human
cucuagagccuucag

SEQ ID NO: 3807081 - RNA, 22 nt, Human
cucuagagccuucagccuuaau

SEQ ID NO: 3807082 - RNA, 21 nt, Human
cucuagaguagagguauaauu

SEQ ID NO: 3807083 - RNA, 16 nt, Human
cucuagaguccaaggu

SEQ ID NO: 3807084 - RNA, 20 nt, Human
cucuagauuuuguuuugcuu

SEQ ID NO: 3807085 - RNA, 19 nt, Human
cucuagccaaaugguuuaa

SEQ ID NO: 3807086 - RNA, 17 nt, Human
cucuagcucucuaggcc

SEQ ID NO: 3807087 - RNA, 15 nt, Human
cucuagcugaauuga

SEQ ID NO: 3807088 - RNA, 13 nt, Human
cucuagcuggugg

SEQ ID NO: 3807089 - RNA, 16 nt, Human
cucuagcugugggggu

SEQ ID NO: 3807090 - RNA, 18 nt, Human
cccccuguacacaacuca

SEQ ID NO: 3807091 - RNA, 15 nt, Human
cccccuguccccuca

SEQ ID NO: 3807092 - RNA, 18 nt, Human
cccccuguccccucagcu

SEQ ID NO: 3807093 - RNA, 19 nt, Human
cccccuguccccucagcuc

SEQ ID NO: 3807094 - RNA, 12 nt, Human
cccccuguccuc

SEQ ID NO: 3807095 - RNA, 23 nt, Human
cccccugucucucagggccaggc

SEQ ID NO: 3807096 - RNA, 12 nt, Human
cccccugugcag

SEQ ID NO: 3807097 - RNA, 20 nt, Human
cccccuguggaugcugcugc

SEQ ID NO: 3807098 - RNA, 16 nt, Human
cccccuuaaauuuaau

SEQ ID NO: 3807099 - RNA, 15 nt, Human
cccccuucagugccc

SEQ ID NO: 3807100 - RNA, 23 nt, Human
cccccuucagugcccaccaacau

SEQ ID NO: 3807101 - RNA, 11 nt, Human
cccccuuccac

SEQ ID NO: 3807102 - RNA, 14 nt, Human
cccccuuccaugga

SEQ ID NO: 3807103 - RNA, 15 nt, Human
cccccuucucccaca

SEQ ID NO: 3807104 - RNA, 17 nt, Human
cccccuucucccacacu

SEQ ID NO: 3807105 - RNA, 21 nt, Human
cccccuucucugcccauuccc

SEQ ID NO: 3807106 - RNA, 23 nt, Human
cccccuucugggcaucuguucug

SEQ ID NO: 3807107 - RNA, 14 nt, Human
cccccuugaguggg

SEQ ID NO: 3807108 - RNA, 15 nt, Human
cccccuugccacccc

SEQ ID NO: 3807109 - RNA, 17 nt, Human
cccccuuucacaggcag

SEQ ID NO: 3807110 - RNA, 22 nt, Human
cccccuuucacaggcagccagu

SEQ ID NO: 3807111 - RNA, 17 nt, Human
cccccuuucagaugucu

SEQ ID NO: 3807112 - RNA, 17 nt, Human
cccccuuugugcugugg

SEQ ID NO: 3807113 - RNA, 18 nt, Human
cccccuuugugcuguggg

SEQ ID NO: 3807114 - RNA, 23 nt, Human
ccccgacccuugccgucuaccug

SEQ ID NO: 3807115 - RNA, 18 nt, Human
ccccgacgccacagccca

SEQ ID NO: 3807116 - RNA, 14 nt, Human
ccccgacuccagcc

SEQ ID NO: 3807117 - RNA, 14 nt, Human
ccccgagcccuacu

SEQ ID NO: 3807118 - RNA, 12 nt, Human
ccccgagcuggg

SEQ ID NO: 3807119 - RNA, 23 nt, Human
ccccgaggccuucucugaaggac

SEQ ID NO: 3807120 - RNA, 21 nt, Human
ccccgagggaugaugccacac

SEQ ID NO: 3807121 - RNA, 13 nt, Human
ccccgcagaccuc

SEQ ID NO: 3807122 - RNA, 12 nt, Human
ccccgcccaggc

SEQ ID NO: 3807123 - RNA, 13 nt, Human
ccccgccccacau

SEQ ID NO: 3807124 - RNA, 13 nt, Human
ccccgcccccugc

SEQ ID NO: 3807125 - RNA, 13 nt, Human
ccccgccccgccc

SEQ ID NO: 3807126 - RNA, 16 nt, Human
ccccgccccgccccac

SEQ ID NO: 3807127 - RNA, 17 nt, Human
ccccgcccucuuccuga

SEQ ID NO: 3807128 - RNA, 14 nt, Human
ccccgccuguuccc

SEQ ID NO: 3807129 - RNA, 13 nt, Human
ccccgcuggagga

SEQ ID NO: 3807130 - RNA, 14 nt, Human
ccccgcuucugccu

SEQ ID NO: 3807131 - RNA, 15 nt, Human
ccccggagggcugcg

SEQ ID NO: 3807132 - RNA, 15 nt, Human
ccccggaucagagca

SEQ ID NO: 3807133 - RNA, 14 nt, Human
ccccggcagacgcc

SEQ ID NO: 3807134 - RNA, 13 nt, Human
ccccggcagcagc

SEQ ID NO: 3807135 - RNA, 13 nt, Human
ccccggcaggccc

SEQ ID NO: 3807136 - RNA, 18 nt, Human
ccccggcaggcccugcag

SEQ ID NO: 3807137 - RNA, 21 nt, Human
ccccggcaggcccugcagugu

SEQ ID NO: 3807138 - RNA, 13 nt, Human
ccccggccaccuc

SEQ ID NO: 3807139 - RNA, 14 nt, Human
ccccggccaccugc

SEQ ID NO: 3807140 - RNA, 17 nt, Human
ccccggccccagccaga

SEQ ID NO: 3807141 - RNA, 18 nt, Human
ccccggccccagccagag

SEQ ID NO: 3807142 - RNA, 13 nt, Human
ccccggcccuacc

SEQ ID NO: 3807143 - RNA, 18 nt, Human
ccccggcccuaccagcgc

SEQ ID NO: 3807144 - RNA, 12 nt, Human
ccccggcccugg

SEQ ID NO: 3807145 - RNA, 15 nt, Human
ccccggcggcgccgg

SEQ ID NO: 3807146 - RNA, 16 nt, Human
ccccgggcucucugcu

SEQ ID NO: 3807147 - RNA, 17 nt, Human
ccccgggcucucugcug

SEQ ID NO: 3807148 - RNA, 21 nt, Human
ccccggggcguuucuuugccg

SEQ ID NO: 3807149 - RNA, 22 nt, Human
ccccggggugaguccauucucc

SEQ ID NO: 3807150 - RNA, 18 nt, Human
ccccggguuuggcgggcc

SEQ ID NO: 3807151 - RNA, 19 nt, Human
ccccggguuuggcgggcca

SEQ ID NO: 3807152 - RNA, 24 nt, Human
ccccggucccuugagaccucagcc

SEQ ID NO: 3807153 - RNA, 16 nt, Human
ccccgucacagccuca

SEQ ID NO: 3807154 - RNA, 23 nt, Human
ccccguccuggagguuccccagc

SEQ ID NO: 3807155 - RNA, 14 nt, Human
ccccgucucuacua

SEQ ID NO: 3807156 - RNA, 21 nt, Human
ccccgucugggguucagcccc

SEQ ID NO: 3807157 - RNA, 22 nt, Human
ccccgucugggguucagccccu

SEQ ID NO: 3807158 - RNA, 14 nt, Human
ccccgucuguggcu

SEQ ID NO: 3807159 - RNA, 20 nt, Human
ccccguggccaucccuguga

SEQ ID NO: 3807160 - RNA, 22 nt, Human
ccccguggccaucccugugagg

SEQ ID NO: 3807161 - RNA, 17 nt, Human
ccccgugggccauggca

SEQ ID NO: 3807162 - RNA, 14 nt, Human
ccccguuucuggug

SEQ ID NO: 3807163 - RNA, 18 nt, Human
ccccuaagagagcaccug

SEQ ID NO: 3807164 - RNA, 15 nt, Human
ccccuaccacugucu

SEQ ID NO: 3807165 - RNA, 22 nt, Human
ccccuacccccuccucucugcc

SEQ ID NO: 3807166 - RNA, 15 nt, Human
ccccuacgcgccuug

SEQ ID NO: 3807167 - RNA, 19 nt, Human
ccccuagaaacccaagcuc

SEQ ID NO: 3807168 - RNA, 19 nt, Human
ccccuagccauuuuuacug

SEQ ID NO: 3807169 - RNA, 18 nt, Human
ccccuagcccaggagaga

SEQ ID NO: 3807170 - RNA, 20 nt, Human
ccccuagcccaggagagaga

SEQ ID NO: 3807171 - RNA, 23 nt, Human
ccccuagcuuuauauauggacau

SEQ ID NO: 3807172 - RNA, 18 nt, Human
ccccuaguaagugccuuc

SEQ ID NO: 3807173 - RNA, 14 nt, Human
ccccuauccaccca

SEQ ID NO: 3807174 - RNA, 17 nt, Human
ccccuauccacccagcc

SEQ ID NO: 3807175 - RNA, 20 nt, Human
ccccuauccuuggcaccaaa

SEQ ID NO: 3807176 - RNA, 19 nt, Human
ccccuauggaauuuauaau

SEQ ID NO: 3807177 - RNA, 18 nt, Human
ccccucaaaucguccagc

SEQ ID NO: 3807178 - RNA, 11 nt, Human
ccccucaaccc

SEQ ID NO: 3807179 - RNA, 19 nt, Human
ccccucaaccuccugugga

SEQ ID NO: 3807180 - RNA, 13 nt, Human
ccccucacagccu

SEQ ID NO: 3807181 - RNA, 20 nt, Human
ccccucacaguauugcucac

SEQ ID NO: 3807182 - RNA, 13 nt, Human
ccccucaccccuc

SEQ ID NO: 3807183 - RNA, 13 nt, Human
ccccucaccuacu

SEQ ID NO: 3807184 - RNA, 12 nt, Human
ccccucaccucc

SEQ ID NO: 3807185 - RNA, 14 nt, Human
ccccucaccuccuc

SEQ ID NO: 3807186 - RNA, 14 nt, Human
ccccucaccuugca

SEQ ID NO: 3807187 - RNA, 14 nt, Human
ccccucacucuggc

SEQ ID NO: 3807188 - RNA, 23 nt, Human
ccccucagccucuccccugccug

SEQ ID NO: 3807189 - RNA, 17 nt, Human
ccuucucuuccaggcag

SEQ ID NO: 3807190 - RNA, 20 nt, Human
ccuucugaaaaaguauccug

SEQ ID NO: 3807191 - RNA, 20 nt, Human
ccuucugacccaugcugccc

SEQ ID NO: 3807192 - RNA, 15 nt, Human
ccuucugagcuccug

SEQ ID NO: 3807193 - RNA, 17 nt, Human
ccuucugagcuccuguc

SEQ ID NO: 3807194 - RNA, 15 nt, Human
ccuucugaugaaaug

SEQ ID NO: 3807195 - RNA, 21 nt, Human
ccuucugaugaaauguuaaca

SEQ ID NO: 3807196 - RNA, 23 nt, Human
ccuucugcacauaaacucuuuua

SEQ ID NO: 3807197 - RNA, 17 nt, Human
ccuucugccuuugaugu

SEQ ID NO: 3807198 - RNA, 19 nt, Human
ccuucuggaaacugugaag

SEQ ID NO: 3807199 - RNA, 12 nt, Human
ccuucugggcau

SEQ ID NO: 3807200 - RNA, 16 nt, Human
ccuucuguaguuuuau

SEQ ID NO: 3807201 - RNA, 20 nt, Human
ccuucuguccuacucugugu

SEQ ID NO: 3807202 - RNA, 15 nt, Human
ccuucuguccuggug

SEQ ID NO: 3807203 - RNA, 16 nt, Human
ccuucuguccuggugu

SEQ ID NO: 3807204 - RNA, 18 nt, Human
ccuucuguccugguguca

SEQ ID NO: 3807205 - RNA, 19 nt, Human
ccuucuguccuggugucac

SEQ ID NO: 3807206 - RNA, 16 nt, Human
ccuucugugcccagcu

SEQ ID NO: 3807207 - RNA, 21 nt, Human
ccuucuguggcucacagaacc

SEQ ID NO: 3807208 - RNA, 17 nt, Human
ccuucuuauucucacuc

SEQ ID NO: 3807209 - RNA, 20 nt, Human
ccuucuuauucucacuccac

SEQ ID NO: 3807210 - RNA, 22 nt, Human
ccuucuuauucucacuccacca

SEQ ID NO: 3807211 - RNA, 20 nt, Human
ccuucuucauguucaauuau

SEQ ID NO: 3807212 - RNA, 22 nt, Human
ccuucuucggggaacuccugga

SEQ ID NO: 3807213 - RNA, 21 nt, Human
ccuucuucuuuuugcuguugu

SEQ ID NO: 3807214 - RNA, 16 nt, Human
ccuucuugcugcccug

SEQ ID NO: 3807215 - RNA, 12 nt, Human
ccuucuuguagu

SEQ ID NO: 3807216 - RNA, 13 nt, Human
ccuucuuuccucu

SEQ ID NO: 3807217 - RNA, 17 nt, Human
ccuucuuuccucuuccc

SEQ ID NO: 3807218 - RNA, 16 nt, Human
ccuucuuugcccuuua

SEQ ID NO: 3807219 - RNA, 19 nt, Human
ccuucuuuucucauguguu

SEQ ID NO: 3807220 - RNA, 21 nt, Human
ccuucuuuuucuggacucugg

SEQ ID NO: 3807221 - RNA, 19 nt, Human
ccuugaaaacacuguucuc

SEQ ID NO: 3807222 - RNA, 21 nt, Human
ccuugaaaauaagaauagaaa

SEQ ID NO: 3807223 - RNA, 18 nt, Human
ccuugaaacuuugggaaa

SEQ ID NO: 3807224 - RNA, 21 nt, Human
ccuugaaagucaugaacacau

SEQ ID NO: 3807225 - RNA, 15 nt, Human
ccuugaaccacuucc

SEQ ID NO: 3807226 - RNA, 15 nt, Human
ccuugaaccugugag

SEQ ID NO: 3807227 - RNA, 18 nt, Human
ccuugaaccugugaguaa

SEQ ID NO: 3807228 - RNA, 18 nt, Human
ccuugaagaaccucucac

SEQ ID NO: 3807229 - RNA, 11 nt, Human
ccuugaagccg

SEQ ID NO: 3807230 - RNA, 18 nt, Human
ccuugaaggacuaauaga

SEQ ID NO: 3807231 - RNA, 17 nt, Human
ccuugaagucacccggc

SEQ ID NO: 3807232 - RNA, 14 nt, Human
ccuugaaugcugcc

SEQ ID NO: 3807233 - RNA, 16 nt, Human
ccuugaaugcugccag

SEQ ID NO: 3807234 - RNA, 20 nt, Human
ccuugaaugcugccagugug

SEQ ID NO: 3807235 - RNA, 15 nt, Human
ccuugacaacuggca

SEQ ID NO: 3807236 - RNA, 16 nt, Human
ccuugacaacuggcag

SEQ ID NO: 3807237 - RNA, 21 nt, Human
ccuugacaacuggcaggcagg

SEQ ID NO: 3807238 - RNA, 14 nt, Human
ccuugacacauuac

SEQ ID NO: 3807239 - RNA, 17 nt, Human
ccuugacagggcacacc

SEQ ID NO: 3807240 - RNA, 18 nt, Human
ccuugacagggcacaccg

SEQ ID NO: 3807241 - RNA, 12 nt, Human
ccuugaccagca

SEQ ID NO: 3807242 - RNA, 21 nt, Human
ccuugaccagcagaucccagc

SEQ ID NO: 3807243 - RNA, 23 nt, Human
ccuugaccauucuccaccugcca

SEQ ID NO: 3807244 - RNA, 14 nt, Human
ccuugaccuuugua

SEQ ID NO: 3807245 - RNA, 21 nt, Human
ccuugacuggaccugguggcu

SEQ ID NO: 3807246 - RNA, 14 nt, Human
ccuugagacagcuu

SEQ ID NO: 3807247 - RNA, 14 nt, Human
ccuugagaccucag

SEQ ID NO: 3807248 - RNA, 18 nt, Human
ccuugagagaccaggcaa

SEQ ID NO: 3807249 - RNA, 20 nt, Human
ccuugagagaccaggcaaag

SEQ ID NO: 3807250 - RNA, 21 nt, Human
ccuugagaguaucaggucucc

SEQ ID NO: 3807251 - RNA, 20 nt, Human
ccuugagcccuccccaggaa

SEQ ID NO: 3807252 - RNA, 13 nt, Human
cauucuuggccca

SEQ ID NO: 3807253 - RNA, 16 nt, Human
cauucuuggcccagga

SEQ ID NO: 3807254 - RNA, 16 nt, Human
cauucuugguuggcug

SEQ ID NO: 3807255 - RNA, 23 nt, Human
cauucuuguuuucuuucuuuaaa

SEQ ID NO: 3807256 - RNA, 18 nt, Human
cauucuuuaucuugacau

SEQ ID NO: 3807257 - RNA, 17 nt, Human
cauucuuucugauaacu

SEQ ID NO: 3807258 - RNA, 12 nt, Human
cauucuuugcuu

SEQ ID NO: 3807259 - RNA, 19 nt, Human
cauucuuugcuugaacaca

SEQ ID NO: 3807260 - RNA, 21 nt, Human
cauucuuugcuugaacacagu

SEQ ID NO: 3807261 - RNA, 18 nt, Human
cauucuuuuaaaagacaa

SEQ ID NO: 3807262 - RNA, 19 nt, Human
cauucuuuuaaaagacaag

SEQ ID NO: 3807263 - RNA, 17 nt, Human
cauucuuuuaacuucuu

SEQ ID NO: 3807264 - RNA, 14 nt, Human
cauucuuuuguaau

SEQ ID NO: 3807265 - RNA, 13 nt, Human
cauucuuuuugaa

SEQ ID NO: 3807266 - RNA, 16 nt, Human
cauugaaaagagcuga

SEQ ID NO: 3807267 - RNA, 16 nt, Human
cauugaaaauguaagu

SEQ ID NO: 3807268 - RNA, 16 nt, Human
cauugaaagagaacca

SEQ ID NO: 3807269 - RNA, 18 nt, Human
cauugaaauucugagaaa

SEQ ID NO: 3807270 - RNA, 18 nt, Human
cauugaacacaaacugua

SEQ ID NO: 3807271 - RNA, 22 nt, Human
cauugaagaauguuagaguaau

SEQ ID NO: 3807272 - RNA, 20 nt, Human
cauugaagccgacucuggcc

SEQ ID NO: 3807273 - RNA, 13 nt, Human
cauugaaggcuua

SEQ ID NO: 3807274 - RNA, 19 nt, Human
cauugaaguaaugaauuuu

SEQ ID NO: 3807275 - RNA, 16 nt, Human
cauugaagucagaugu

SEQ ID NO: 3807276 - RNA, 16 nt, Human
cauugacauguacaga

SEQ ID NO: 3807277 - RNA, 17 nt, Human
cauugacauguacagag

SEQ ID NO: 3807278 - RNA, 12 nt, Human
cauugacauuau

SEQ ID NO: 3807279 - RNA, 15 nt, Human
cauugacauuauaga

SEQ ID NO: 3807280 - RNA, 16 nt, Human
cauugaccaagaacug

SEQ ID NO: 3807281 - RNA, 22 nt, Human
cauugaccgcgacuaauuucaa

SEQ ID NO: 3807282 - RNA, 19 nt, Human
cauugacuaucaaacugaa

SEQ ID NO: 3807283 - RNA, 23 nt, Human
cauugacugguuuacaggcccug

SEQ ID NO: 3807284 - RNA, 18 nt, Human
cauugacuuuuauaaagc

SEQ ID NO: 3807285 - RNA, 23 nt, Human
cauugagaacugcauauguuucg

SEQ ID NO: 3807286 - RNA, 18 nt, Human
cauugagaccgugaagau

SEQ ID NO: 3807287 - RNA, 18 nt, Human
cauugagcugauauaaau

SEQ ID NO: 3807288 - RNA, 19 nt, Human
cauugagcugauauaaauu

SEQ ID NO: 3807289 - RNA, 20 nt, Human
cauugagcugauauaaauuc

SEQ ID NO: 3807290 - RNA, 15 nt, Human
cauugagcugugcaa

SEQ ID NO: 3807291 - RNA, 19 nt, Human
cauugagcuugcaugcuug

SEQ ID NO: 3807292 - RNA, 16 nt, Human
cauugaggaagagucu

SEQ ID NO: 3807293 - RNA, 20 nt, Human
cauugauacaaucauagcau

SEQ ID NO: 3807294 - RNA, 17 nt, Human
cauugauaugaaaaaua

SEQ ID NO: 3807295 - RNA, 22 nt, Human
cauugauaugaaaaauaugaua

SEQ ID NO: 3807296 - RNA, 16 nt, Human
cauugauauuugugca

SEQ ID NO: 3807297 - RNA, 17 nt, Human
cauugaucauaaacuga

SEQ ID NO: 3807298 - RNA, 17 nt, Human
cauugauugucagcuac

SEQ ID NO: 3807299 - RNA, 17 nt, Human
cauugauuuccuguguc

SEQ ID NO: 3807300 - RNA, 21 nt, Human
cauugcaacaaaauacauucu

SEQ ID NO: 3807301 - RNA, 12 nt, Human
cauugcacccag

SEQ ID NO: 3807302 - RNA, 14 nt, Human
cauugcacccagcc

SEQ ID NO: 3807303 - RNA, 17 nt, Human
cauugcacuccagccug

SEQ ID NO: 3807304 - RNA, 15 nt, Human
cauugcacucuagcc

SEQ ID NO: 3807305 - RNA, 18 nt, Human
cauugcacucuagccugg

SEQ ID NO: 3807306 - RNA, 20 nt, Human
cauugcaguuuaagagcaga

SEQ ID NO: 3807307 - RNA, 21 nt, Human
cauugcaugccgggugcagca

SEQ ID NO: 3807308 - RNA, 12 nt, Human
cauugcauucua

SEQ ID NO: 3807309 - RNA, 18 nt, Human
cauugcauucuauugccu

SEQ ID NO: 3807310 - RNA, 19 nt, Human
cauugcauucuauugccuu

SEQ ID NO: 3807311 - RNA, 20 nt, Human
cauugccaccaggagaacca

SEQ ID NO: 3807312 - RNA, 14 nt, Human
cauugccagugucu

SEQ ID NO: 3807313 - RNA, 15 nt, Human
cauugccagugucuu

SEQ ID NO: 3807314 - RNA, 16 nt, Human
cauugccagugucuuu

SEQ ID NO: 3807315 - RNA, 18 nt, Human
cauugccagugucuuucu

SEQ ID NO: 3807316 - RNA, 19 nt, Human
cauugccagugucuuucuu

SEQ ID NO: 3807317 - RNA, 17 nt, Human
cauugccauucccugcc

SEQ ID NO: 3807318 - RNA, 18 nt, Human
cauugcccagucuuucau

SEQ ID NO: 3807319 - RNA, 20 nt, Human
cauugcccagucuuucaugu

SEQ ID NO: 3807320 - RNA, 18 nt, Human
cauugcccccagggcacu

SEQ ID NO: 3807321 - RNA, 16 nt, Human
cauugccuagcucuuu

SEQ ID NO: 3807322 - RNA, 18 nt, Human
cauugccucggcuggcuc

SEQ ID NO: 3807323 - RNA, 21 nt, Human
cauugccugauuuguuccuuc

SEQ ID NO: 3807324 - RNA, 17 nt, Human
cauugccuuaacuggag

SEQ ID NO: 3807325 - RNA, 23 nt, Human
cauugcguuugaccuuuuaugua

SEQ ID NO: 3807326 - RNA, 14 nt, Human
cauugcugagccuc

SEQ ID NO: 3807327 - RNA, 18 nt, Human
cauugcugagccucugcu

SEQ ID NO: 3807328 - RNA, 23 nt, Human
cauugcugcuccuuagcugccaa

SEQ ID NO: 3807329 - RNA, 16 nt, Human
cauugcuggacucuga

SEQ ID NO: 3807330 - RNA, 19 nt, Human
cauugcuggucuuguaaga

SEQ ID NO: 3807331 - RNA, 15 nt, Human
cauugcugguucuau

SEQ ID NO: 3807332 - RNA, 21 nt, Human
cauugcugguucuauuuaaug

SEQ ID NO: 3807333 - RNA, 14 nt, Human
cgccccagccucug

SEQ ID NO: 3807334 - RNA, 20 nt, Human
cgccccccacacuucccugg

SEQ ID NO: 3807335 - RNA, 17 nt, Human
cgccccccccuccccau

SEQ ID NO: 3807336 - RNA, 14 nt, Human
cgccccccucccag

SEQ ID NO: 3807337 - RNA, 23 nt, Human
cgcccccggguuuggcgggccaa

SEQ ID NO: 3807338 - RNA, 17 nt, Human
cgcccccuccgcccugc

SEQ ID NO: 3807339 - RNA, 14 nt, Human
cgcccccugcccuc

SEQ ID NO: 3807340 - RNA, 14 nt, Human
cgcccgcccacugu

SEQ ID NO: 3807341 - RNA, 15 nt, Human
cgcccgccccugcag

SEQ ID NO: 3807342 - RNA, 16 nt, Human
cgcccgccccugcagc

SEQ ID NO: 3807343 - RNA, 18 nt, Human
cgcccgccccugcagcac

SEQ ID NO: 3807344 - RNA, 14 nt, Human
cgcccgcugggcug

SEQ ID NO: 3807345 - RNA, 18 nt, Human
cgcccgggcccagaggag

SEQ ID NO: 3807346 - RNA, 15 nt, Human
cgcccguccugccug

SEQ ID NO: 3807347 - RNA, 18 nt, Human
cgcccucauuacggcucc

SEQ ID NO: 3807348 - RNA, 20 nt, Human
cgcccuccccuccccugcug

SEQ ID NO: 3807349 - RNA, 14 nt, Human
cgcccucuuccuga

SEQ ID NO: 3807350 - RNA, 12 nt, Human
cgcccugcagac

SEQ ID NO: 3807351 - RNA, 15 nt, Human
cgcccugcuccuccc

SEQ ID NO: 3807352 - RNA, 14 nt, Human
cgcccuggcaggca

SEQ ID NO: 3807353 - RNA, 17 nt, Human
cgcccuggcccccacau

SEQ ID NO: 3807354 - RNA, 22 nt, Human
cgcccugggcucgucuuugcag

SEQ ID NO: 3807355 - RNA, 20 nt, Human
cgcccuuacuucuugcccug

SEQ ID NO: 3807356 - RNA, 21 nt, Human
cgcccuuagucccccaacucu

SEQ ID NO: 3807357 - RNA, 13 nt, Human
cgcccuuccucuc

SEQ ID NO: 3807358 - RNA, 17 nt, Human
cgcccuuccucuccacc

SEQ ID NO: 3807359 - RNA, 16 nt, Human
cgcccuuuccuccuca

SEQ ID NO: 3807360 - RNA, 18 nt, Human
cgccgagucugucucugu

SEQ ID NO: 3807361 - RNA, 20 nt, Human
cgccgcaaaccacacuggac

SEQ ID NO: 3807362 - RNA, 21 nt, Human
cgccgcaaaccacacuggacu

SEQ ID NO: 3807363 - RNA, 13 nt, Human
cgccgccaccgcg

SEQ ID NO: 3807364 - RNA, 17 nt, Human
cgccgcuuuucuccucu

SEQ ID NO: 3807365 - RNA, 18 nt, Human
cgccggcgggcgggccgg

SEQ ID NO: 3807366 - RNA, 16 nt, Human
cgccgucuccauggca

SEQ ID NO: 3807367 - RNA, 19 nt, Human
cgccgugaguucucagggc

SEQ ID NO: 3807368 - RNA, 16 nt, Human
cgccgugcugggcagc

SEQ ID NO: 3807369 - RNA, 20 nt, Human
cgccuaaggucacagcuagu

SEQ ID NO: 3807370 - RNA, 14 nt, Human
cgccuacaggagug

SEQ ID NO: 3807371 - RNA, 17 nt, Human
cgccucaggaaugggcu

SEQ ID NO: 3807372 - RNA, 19 nt, Human
cgccucaggaaugggcugu

SEQ ID NO: 3807373 - RNA, 14 nt, Human
cgccucccacuggg

SEQ ID NO: 3807374 - RNA, 16 nt, Human
cgccucccacuggggu

SEQ ID NO: 3807375 - RNA, 18 nt, Human
cgccuccccaccuccagg

SEQ ID NO: 3807376 - RNA, 20 nt, Human
cgccucccuccaccccagga

SEQ ID NO: 3807377 - RNA, 19 nt, Human
cgccuccgggacccccagg

SEQ ID NO: 3807378 - RNA, 14 nt, Human
cgccucgcccaccg

SEQ ID NO: 3807379 - RNA, 17 nt, Human
cgccucggaucagcuga

SEQ ID NO: 3807380 - RNA, 13 nt, Human
cgccucucccguc

SEQ ID NO: 3807381 - RNA, 15 nt, Human
cgccucucccgucag

SEQ ID NO: 3807382 - RNA, 21 nt, Human
cgccucucccgucagggccca

SEQ ID NO: 3807383 - RNA, 19 nt, Human
cgccucuucuucuucagaa

SEQ ID NO: 3807384 - RNA, 15 nt, Human
cgccugagcccaggg

SEQ ID NO: 3807385 - RNA, 17 nt, Human
cgccugagcccagggag

SEQ ID NO: 3807386 - RNA, 18 nt, Human
cgccugagcccagggagg

SEQ ID NO: 3807387 - RNA, 20 nt, Human
cgccugaggaacccuuacag

SEQ ID NO: 3807388 - RNA, 17 nt, Human
cgccugaggcaauuaga

SEQ ID NO: 3807389 - RNA, 17 nt, Human
cgccugcauguaaacac

SEQ ID NO: 3807390 - RNA, 14 nt, Human
cgccugccaguccu

SEQ ID NO: 3807391 - RNA, 13 nt, Human
cgccugcccaccu

SEQ ID NO: 3807392 - RNA, 18 nt, Human
cgccugcccaccugccug

SEQ ID NO: 3807393 - RNA, 16 nt, Human
cgccugccccucccag

SEQ ID NO: 3807394 - RNA, 20 nt, Human
cgccugcccucauggccccu

SEQ ID NO: 3807395 - RNA, 15 nt, Human
cgccugcugcaugcc

SEQ ID NO: 3807396 - RNA, 12 nt, Human
cgccuggagccc

SEQ ID NO: 3807397 - RNA, 23 nt, Human
cgccuggauuucugguucugaug

SEQ ID NO: 3807398 - RNA, 15 nt, Human
cgccuggccaggagc

SEQ ID NO: 3807399 - RNA, 16 nt, Human
cgccuggccaggagca

SEQ ID NO: 3807400 - RNA, 12 nt, Human
cgccuggccucc

SEQ ID NO: 3807401 - RNA, 14 nt, Human
cgccuggccuccag

SEQ ID NO: 3807402 - RNA, 12 nt, Human
cgccuggccuga

SEQ ID NO: 3807403 - RNA, 19 nt, Human
cgccuggcugcagccugcg

SEQ ID NO: 3807404 - RNA, 16 nt, Human
cgccuguaaucccagc

SEQ ID NO: 3807405 - RNA, 18 nt, Human
cgccuguaaucccagcag

SEQ ID NO: 3807406 - RNA, 17 nt, Human
cgccuguaguccuagcc

SEQ ID NO: 3807407 - RNA, 13 nt, Human
cgccuguccucac

SEQ ID NO: 3807408 - RNA, 12 nt, Human
cgccuguccugc

SEQ ID NO: 3807409 - RNA, 16 nt, Human
cgccugugaugcuggg

SEQ ID NO: 3807410 - RNA, 18 nt, Human
cgccuguggagcucagcc

SEQ ID NO: 3807411 - RNA, 13 nt, Human
cgccuguuccccc

SEQ ID NO: 3807412 - RNA, 19 nt, Human
cgccuguucccccgccgcu

SEQ ID NO: 3807413 - RNA, 22 nt, Human
cgccuuagcacuaccacuccug

SEQ ID NO: 3807414 - RNA, 21 nt, Human
cgccuuagcauguuugcugaa

SEQ ID NO: 3807415 - RNA, 23 nt, Human
cgccuuagguacuuauuccagau

SEQ ID NO: 3807416 - RNA, 14 nt, Human
cgccuucccuccug

SEQ ID NO: 3807417 - RNA, 19 nt, Human
cgccuucucccccccgggg

SEQ ID NO: 3807418 - RNA, 15 nt, Human
cgccuugcccagccu

SEQ ID NO: 3807419 - RNA, 19 nt, Human
cauuguguugacauuaaga

SEQ ID NO: 3807420 - RNA, 21 nt, Human
cauuguuauauaaucauuauu

SEQ ID NO: 3807421 - RNA, 15 nt, Human
cauuguuauuuauac

SEQ ID NO: 3807422 - RNA, 14 nt, Human
cauuguuauuuuca

SEQ ID NO: 3807423 - RNA, 15 nt, Human
cauuguuauuuucag

SEQ ID NO: 3807424 - RNA, 15 nt, Human
cauuguucaaaagga

SEQ ID NO: 3807425 - RNA, 17 nt, Human
cauuguucaccuuugua

SEQ ID NO: 3807426 - RNA, 18 nt, Human
cauuguucaccuuuguag

SEQ ID NO: 3807427 - RNA, 19 nt, Human
cauuguucuuauucuggca

SEQ ID NO: 3807428 - RNA, 21 nt, Human
cauuguugagguggucugaau

SEQ ID NO: 3807429 - RNA, 17 nt, Human
cauuguugcucccugug

SEQ ID NO: 3807430 - RNA, 18 nt, Human
cauuguuggccaaagcca

SEQ ID NO: 3807431 - RNA, 18 nt, Human
cauuguuuagaaagaaua

SEQ ID NO: 3807432 - RNA, 17 nt, Human
cauuguuuauuaacaaa

SEQ ID NO: 3807433 - RNA, 22 nt, Human
cauuguuugcuuauuguuccaa

SEQ ID NO: 3807434 - RNA, 15 nt, Human
cauuguuuggcauug

SEQ ID NO: 3807435 - RNA, 13 nt, Human
cauuguuuuaaaa

SEQ ID NO: 3807436 - RNA, 18 nt, Human
cauuguuuugaauauuac

SEQ ID NO: 3807437 - RNA, 16 nt, Human
cauuguuuugccaaca

SEQ ID NO: 3807438 - RNA, 17 nt, Human
cauuguuuuucugauau

SEQ ID NO: 3807439 - RNA, 12 nt, Human
cauuuaaaaaaa

SEQ ID NO: 3807440 - RNA, 21 nt, Human
cauuuaaaaaaaaaauuuguu

SEQ ID NO: 3807441 - RNA, 20 nt, Human
cauuuaaaacauuaaaauau

SEQ ID NO: 3807442 - RNA, 15 nt, Human
cauuuaaaagauaca

SEQ ID NO: 3807443 - RNA, 13 nt, Human
cauuuaaaauaua

SEQ ID NO: 3807444 - RNA, 14 nt, Human
cauuuaaaaugauu

SEQ ID NO: 3807445 - RNA, 16 nt, Human
cauuuaaaaugauuag

SEQ ID NO: 3807446 - RNA, 18 nt, Human
cauuuaaaaugauuagaa

SEQ ID NO: 3807447 - RNA, 16 nt, Human
cauuuaaaauugcuau

SEQ ID NO: 3807448 - RNA, 19 nt, Human
cauuuaaaauugcuauguu

SEQ ID NO: 3807449 - RNA, 20 nt, Human
cauuuaaaauugcuauguua

SEQ ID NO: 3807450 - RNA, 16 nt, Human
cauuuaaacagauguc

SEQ ID NO: 3807451 - RNA, 19 nt, Human
cauuuaaacagauguccau

SEQ ID NO: 3807452 - RNA, 12 nt, Human
cauuuaaagcau

SEQ ID NO: 3807453 - RNA, 15 nt, Human
cauuuaaaguauuuu

SEQ ID NO: 3807454 - RNA, 21 nt, Human
cauuuaaauguguacaaugua

SEQ ID NO: 3807455 - RNA, 23 nt, Human
cauuuaaauuuuacccuuuagac

SEQ ID NO: 3807456 - RNA, 23 nt, Human
cauuuaagagacagucaccccag

SEQ ID NO: 3807457 - RNA, 20 nt, Human
cauuuaagcuguggucaagg

SEQ ID NO: 3807458 - RNA, 22 nt, Human
cauuuaagggaaaaauauauau

SEQ ID NO: 3807459 - RNA, 22 nt, Human
cauuuaauaauauacuugugga

SEQ ID NO: 3807460 - RNA, 17 nt, Human
cauuuaauaauuauaug

SEQ ID NO: 3807461 - RNA, 23 nt, Human
cauuuaauaauuauaugcuauuu

SEQ ID NO: 3807462 - RNA, 13 nt, Human
cauuuaauagacu

SEQ ID NO: 3807463 - RNA, 14 nt, Human
cauuuaauugagaa

SEQ ID NO: 3807464 - RNA, 20 nt, Human
cauuuaccagcaacuugaac

SEQ ID NO: 3807465 - RNA, 15 nt, Human
cauuuacuaaacaua

SEQ ID NO: 3807466 - RNA, 20 nt, Human
cauuuacuaaacauaugauu

SEQ ID NO: 3807467 - RNA, 21 nt, Human
cauuuacuaaacauaugauuu

SEQ ID NO: 3807468 - RNA, 22 nt, Human
cauuuacugcauucuucugauc

SEQ ID NO: 3807469 - RNA, 12 nt, Human
cauuuacugugg

SEQ ID NO: 3807470 - RNA, 17 nt, Human
cauuuacuuaagacuua

SEQ ID NO: 3807471 - RNA, 17 nt, Human
cauuuacuuuguguuca

SEQ ID NO: 3807472 - RNA, 19 nt, Human
cauuuagaauggugauuuu

SEQ ID NO: 3807473 - RNA, 23 nt, Human
cauuuagagaacuguggccguua

SEQ ID NO: 3807474 - RNA, 18 nt, Human
cauuuagccaccaucuuu

SEQ ID NO: 3807475 - RNA, 18 nt, Human
cauuuagccuguccuguc

SEQ ID NO: 3807476 - RNA, 14 nt, Human
cauuuagcuggcca

SEQ ID NO: 3807477 - RNA, 21 nt, Human
cauuuagggaguauucuaaua

SEQ ID NO: 3807478 - RNA, 13 nt, Human
cgaggcccugcau

SEQ ID NO: 3807479 - RNA, 17 nt, Human
cgaggccuaccccgcag

SEQ ID NO: 3807480 - RNA, 18 nt, Human
cgaggccuucucugaagg

SEQ ID NO: 3807481 - RNA, 20 nt, Human
cgaggcugagaaucagacug

SEQ ID NO: 3807482 - RNA, 22 nt, Human
cgaggcugcccacuauggucau

SEQ ID NO: 3807483 - RNA, 15 nt, Human
cgaggcuggagcugg

SEQ ID NO: 3807484 - RNA, 13 nt, Human
cgagggaugaugc

SEQ ID NO: 3807485 - RNA, 17 nt, Human
cgagggauguggagcac

SEQ ID NO: 3807486 - RNA, 12 nt, Human
cgagggcaggga

SEQ ID NO: 3807487 - RNA, 21 nt, Human
cgagggcagggaccacacccu

SEQ ID NO: 3807488 - RNA, 14 nt, Human
cgagggcuggcugg

SEQ ID NO: 3807489 - RNA, 15 nt, Human
cgagggcuggcuggc

SEQ ID NO: 3807490 - RNA, 19 nt, Human
cgagggcuggcuggccuca

SEQ ID NO: 3807491 - RNA, 23 nt, Human
cgagggcuggcuggccucaccca

SEQ ID NO: 3807492 - RNA, 17 nt, Human
cgagggggcugcuccca

SEQ ID NO: 3807493 - RNA, 18 nt, Human
cgagggggcugcucccac

SEQ ID NO: 3807494 - RNA, 18 nt, Human
cgaggggugucuugggca

SEQ ID NO: 3807495 - RNA, 20 nt, Human
cgaggguugauuaaggcagu

SEQ ID NO: 3807496 - RNA, 22 nt, Human
cgagguggaucacagaggcuuc

SEQ ID NO: 3807497 - RNA, 23 nt, Human
cgagguggaucacagaggcuucu

SEQ ID NO: 3807498 - RNA, 20 nt, Human
cgagguggcugccuggagcc

SEQ ID NO: 3807499 - RNA, 21 nt, Human
cgagguuucucaaagaaauuu

SEQ ID NO: 3807500 - RNA, 12 nt, Human
cgaguacugugg

SEQ ID NO: 3807501 - RNA, 16 nt, Human
cgaguacugugggcaa

SEQ ID NO: 3807502 - RNA, 22 nt, Human
cgaguagaaaaugugacccucc

SEQ ID NO: 3807503 - RNA, 19 nt, Human
cgaguagcugagauuauag

SEQ ID NO: 3807504 - RNA, 13 nt, Human
cgaguagcuggga

SEQ ID NO: 3807505 - RNA, 14 nt, Human
cgaguagcugggac

SEQ ID NO: 3807506 - RNA, 20 nt, Human
cgagucaaaacucaaaugcu

SEQ ID NO: 3807507 - RNA, 14 nt, Human
cgagucaccuucca

SEQ ID NO: 3807508 - RNA, 15 nt, Human
cgagucacugccucu

SEQ ID NO: 3807509 - RNA, 18 nt, Human
cgagucauucguucugug

SEQ ID NO: 3807510 - RNA, 15 nt, Human
cgaguccaagcuggg

SEQ ID NO: 3807511 - RNA, 21 nt, Human
cgagucucuucuccacuggau

SEQ ID NO: 3807512 - RNA, 14 nt, Human
cgagugccaggacu

SEQ ID NO: 3807513 - RNA, 20 nt, Human
cgagugccgcaucucacagc

SEQ ID NO: 3807514 - RNA, 14 nt, Human
cgaguggagucugc

SEQ ID NO: 3807515 - RNA, 22 nt, Human
cgaguggauagaugcccugcua

SEQ ID NO: 3807516 - RNA, 23 nt, Human
cgaguggauagaugcccugcuag

SEQ ID NO: 3807517 - RNA, 19 nt, Human
cgagugugugcaugugugu

SEQ ID NO: 3807518 - RNA, 21 nt, Human
cgaguguguuucauccuuccc

SEQ ID NO: 3807519 - RNA, 17 nt, Human
cgaguuacagacaaagc

SEQ ID NO: 3807520 - RNA, 18 nt, Human
cgaguuacagacaaagcg

SEQ ID NO: 3807521 - RNA, 19 nt, Human
cgaguucggcucugggugg

SEQ ID NO: 3807522 - RNA, 14 nt, Human
cgaguuuccccaga

SEQ ID NO: 3807523 - RNA, 16 nt, Human
cgaguuuggucccugg

SEQ ID NO: 3807524 - RNA, 21 nt, Human
cgauacaccgggccuggagaa

SEQ ID NO: 3807525 - RNA, 23 nt, Human
cgauacugcgacuuucugccugg

SEQ ID NO: 3807526 - RNA, 12 nt, Human
cgauagagucuc

SEQ ID NO: 3807527 - RNA, 16 nt, Human
cgauaguuuacugaga

SEQ ID NO: 3807528 - RNA, 15 nt, Human
cgauauacucuagau

SEQ ID NO: 3807529 - RNA, 18 nt, Human
cgauaucagaauuugugu

SEQ ID NO: 3807530 - RNA, 16 nt, Human
cgauauuuuuaaagau

SEQ ID NO: 3807531 - RNA, 18 nt, Human
cgaucacaaaugacuuua

SEQ ID NO: 3807532 - RNA, 23 nt, Human
cgaucacaacgugcauugugcuu

SEQ ID NO: 3807533 - RNA, 17 nt, Human
cgaucaggcacagguca

SEQ ID NO: 3807534 - RNA, 20 nt, Human
cgaucauggcucacugcagc

SEQ ID NO: 3807535 - RNA, 14 nt, Human
cgaucccacacagg

SEQ ID NO: 3807536 - RNA, 14 nt, Human
cgauccuccccugg

SEQ ID NO: 3807537 - RNA, 18 nt, Human
cgauccugccacccugua

SEQ ID NO: 3807538 - RNA, 15 nt, Human
cgauccuucaaaguc

SEQ ID NO: 3807539 - RNA, 16 nt, Human
cgaucucauucaguau

SEQ ID NO: 3807540 - RNA, 14 nt, Human
cgaucucccaccuu

SEQ ID NO: 3807541 - RNA, 15 nt, Human
cgaucucggcucagu

SEQ ID NO: 3807542 - RNA, 15 nt, Human
cgaucucuccuggcc

SEQ ID NO: 3807543 - RNA, 16 nt, Human
cgaucucuccuggccu

SEQ ID NO: 3807544 - RNA, 18 nt, Human
cgaucuguaccugagagg

SEQ ID NO: 3807545 - RNA, 20 nt, Human
cgaucuugguucacugcaac

SEQ ID NO: 3807546 - RNA, 14 nt, Human
cgaugaaggcugcc

SEQ ID NO: 3807547 - RNA, 17 nt, Human
cgaugauucaggugcag

SEQ ID NO: 3807548 - RNA, 23 nt, Human
cgaugcagacagggggccagaac

SEQ ID NO: 3807549 - RNA, 13 nt, Human
cgaugcccagaga

SEQ ID NO: 3807550 - RNA, 18 nt, Human
cgaugcugcuuuccccug

SEQ ID NO: 3807551 - RNA, 14 nt, Human
cgaugcuuuaccaa

SEQ ID NO: 3807552 - RNA, 22 nt, Human
cgaugcuuuaccaaacagcaaa

SEQ ID NO: 3807553 - RNA, 18 nt, Human
cgauggauauauguuuuu

SEQ ID NO: 3807554 - RNA, 21 nt, Human
cgaugggcccaauucuuacaa

SEQ ID NO: 3807555 - RNA, 18 nt, Human
cgaugggggaugcuucau

SEQ ID NO: 3807556 - RNA, 19 nt, Human
cgaugggggaugcuucaug

SEQ ID NO: 3807557 - RNA, 13 nt, Human
cgauguaaauuau

SEQ ID NO: 3807558 - RNA, 15 nt, Human
cgauguggaacugcu

SEQ ID NO: 3807559 - RNA, 13 nt, Human
cgauguggcccug

SEQ ID NO: 3807560 - RNA, 21 nt, Human
cgauucacccuguccaaacug

SEQ ID NO: 3807561 - RNA, 22 nt, Human
cgauucaccugagcaggaccuc

SEQ ID NO: 3807562 - RNA, 23 nt, Human
cgauucaucucucagaagggagg

SEQ ID NO: 3807563 - RNA, 23 nt, Human
cgauucccucucccaggccccau

SEQ ID NO: 3807564 - RNA, 12 nt, Human
cgauuccuucuc

SEQ ID NO: 3807565 - RNA, 11 nt, Human
cgauucuggau

SEQ ID NO: 3807566 - RNA, 18 nt, Human
cgauuuaauucucuugaa

SEQ ID NO: 3807567 - RNA, 13 nt, Human
cgauuucuguaaa

SEQ ID NO: 3807568 - RNA, 14 nt, Human
cgauuuuauuacug

SEQ ID NO: 3807569 - RNA, 16 nt, Human
cgauuuuauuacuggc

SEQ ID NO: 3807570 - RNA, 19 nt, Human
cgauuuuauuacuggcgug

SEQ ID NO: 3807571 - RNA, 23 nt, Human
cgauuuuguaucugcaggcagac

SEQ ID NO: 3807572 - RNA, 18 nt, Human
cgcaaaccacacuggacu

SEQ ID NO: 3807573 - RNA, 16 nt, Human
cgcaaagagagauuuu

SEQ ID NO: 3807574 - RNA, 13 nt, Human
cgcaacccgugcc

SEQ ID NO: 3807575 - RNA, 22 nt, Human
cgcaagcaccauccccuccggc

SEQ ID NO: 3807576 - RNA, 14 nt, Human
cgcaagggccugau

SEQ ID NO: 3807577 - RNA, 14 nt, Human
cgcaaguucccagu

SEQ ID NO: 3807578 - RNA, 13 nt, Human
cgcacacacacaa

SEQ ID NO: 3807579 - RNA, 14 nt, Human
cgcacacacacaca

SEQ ID NO: 3807580 - RNA, 22 nt, Human
cgcacacacacacacacacauc

SEQ ID NO: 3807581 - RNA, 16 nt, Human
cgcacacacacacaua

SEQ ID NO: 3807582 - RNA, 18 nt, Human
cgcacacacacacauaca

SEQ ID NO: 3807583 - RNA, 13 nt, Human
cgcacagucucuc

SEQ ID NO: 3807584 - RNA, 15 nt, Human
cgcacagucucucuc

SEQ ID NO: 3807585 - RNA, 18 nt, Human
cgcacauauacacacaca

SEQ ID NO: 3807586 - RNA, 14 nt, Human
cgcaccauucugac

SEQ ID NO: 3807587 - RNA, 15 nt, Human
cgcaccauucugacu

SEQ ID NO: 3807588 - RNA, 19 nt, Human
cgcacccccacccuuuggg

SEQ ID NO: 3807589 - RNA, 21 nt, Human
cgcaccccccuguucuaaggg

SEQ ID NO: 3807590 - RNA, 16 nt, Human
cgcacccuccccuccc

SEQ ID NO: 3807591 - RNA, 21 nt, Human
cgcaccggagugucuggaauu

SEQ ID NO: 3807592 - RNA, 13 nt, Human
cgcaccuaaagca

SEQ ID NO: 3807593 - RNA, 20 nt, Human
cgcaccuaaagcagccagcc

SEQ ID NO: 3807594 - RNA, 12 nt, Human
cgcaccucccau

SEQ ID NO: 3807595 - RNA, 17 nt, Human
cgcaccugcccccuggu

SEQ ID NO: 3807596 - RNA, 15 nt, Human
cgcaccugccucagg

SEQ ID NO: 3807597 - RNA, 11 nt, Human
cgcacgcacac

SEQ ID NO: 3807598 - RNA, 16 nt, Human
cgcacgcacacacaca

SEQ ID NO: 3807599 - RNA, 16 nt, Human
cgcacggcagccacag

SEQ ID NO: 3807600 - RNA, 18 nt, Human
cgcacucacccaugugcc

SEQ ID NO: 3807601 - RNA, 17 nt, Human
cgcacuccaugagcacc

SEQ ID NO: 3807602 - RNA, 13 nt, Human
cgcacugggcuug

SEQ ID NO: 3807603 - RNA, 17 nt, Human
cgcacugggcuugggga

SEQ ID NO: 3807604 - RNA, 22 nt, Human
cgcacuucagaauuccauaucu

SEQ ID NO: 3807605 - RNA, 13 nt, Human
cgcagaagcccug

SEQ ID NO: 3807606 - RNA, 22 nt, Human
cgcagacacacccacagaagga

SEQ ID NO: 3807607 - RNA, 16 nt, Human
cgcagacaggaccagg

SEQ ID NO: 3807608 - RNA, 18 nt, Human
cgcagaccuccccagccc

SEQ ID NO: 3807609 - RNA, 21 nt, Human
cgcagagaagugacgguuccu

SEQ ID NO: 3807610 - RNA, 12 nt, Human
cgcagagaggcc

SEQ ID NO: 3807611 - RNA, 13 nt, Human
cgcagagcgcgcc

SEQ ID NO: 3807612 - RNA, 21 nt, Human
cgcagagcgcgccccuagccg

SEQ ID NO: 3807613 - RNA, 18 nt, Human
cgcagagcuuuucagauu

SEQ ID NO: 3807614 - RNA, 17 nt, Human
cgcagaugugcagcaga

SEQ ID NO: 3807615 - RNA, 18 nt, Human
cgcagaugugcagcagau

SEQ ID NO: 3807616 - RNA, 12 nt, Human
cgcagccaggac

SEQ ID NO: 3807617 - RNA, 20 nt, Human
cgcagcccuagagccugccu

SEQ ID NO: 3807618 - RNA, 14 nt, Human
cgcagcccugcaga

SEQ ID NO: 3807619 - RNA, 13 nt, Human
cgcagcccugcuu

SEQ ID NO: 3807620 - RNA, 20 nt, Human
cgggcucagggaccacagca

SEQ ID NO: 3807621 - RNA, 13 nt, Human
cgggcuccagcca

SEQ ID NO: 3807622 - RNA, 14 nt, Human
cgggcuccagccau

SEQ ID NO: 3807623 - RNA, 14 nt, Human
ccaagguucugggu

SEQ ID NO: 3807624 - RNA, 21 nt, Human
ccaagguuuaaacuucucuga

SEQ ID NO: 3807625 - RNA, 17 nt, Human
ccaaguaaauagcaaca

SEQ ID NO: 3807626 - RNA, 14 nt, Human
ccaaguacacugag

SEQ ID NO: 3807627 - RNA, 22 nt, Human
ccaaguagaaucucaguugauu

SEQ ID NO: 3807628 - RNA, 20 nt, Human
ccaagucagcuuugccuucc

SEQ ID NO: 3807629 - RNA, 18 nt, Human
ccaaguccagguccuggu

SEQ ID NO: 3807630 - RNA, 22 nt, Human
ccaaguccaggucgggcucagc

SEQ ID NO: 3807631 - RNA, 23 nt, Human
ccaagucccaccgguugcuucug

SEQ ID NO: 3807632 - RNA, 12 nt, Human
ccaagucccugu

SEQ ID NO: 3807633 - RNA, 13 nt, Human
ccaagucccuguu

SEQ ID NO: 3807634 - RNA, 19 nt, Human
ccaagugcaggcuggcacc

SEQ ID NO: 3807635 - RNA, 12 nt, Human
cguauuuuaaaa

SEQ ID NO: 3807636 - RNA, 17 nt, Human
cgucaacgugcauuuua

SEQ ID NO: 3807637 - RNA, 15 nt, Human
cgucaacguuguacu

SEQ ID NO: 3807638 - RNA, 17 nt, Human
cgucaacguuguacugu

SEQ ID NO: 3807639 - RNA, 16 nt, Human
cgucaacucauauuuu

SEQ ID NO: 3807640 - RNA, 21 nt, Human
cgucaccccuguuucuggcac

SEQ ID NO: 3807641 - RNA, 15 nt, Human
cgucagccuccagcc

SEQ ID NO: 3807642 - RNA, 17 nt, Human
cgucagucuuuuucugu

SEQ ID NO: 3807643 - RNA, 17 nt, Human
cgucauaacuagaacug

SEQ ID NO: 3807644 - RNA, 20 nt, Human
cgucaucauuuuuccuuccc

SEQ ID NO: 3807645 - RNA, 17 nt, Human
cgucaucuaguuuuaaa

SEQ ID NO: 3807646 - RNA, 21 nt, Human
cgucaugaggagauucugccu

SEQ ID NO: 3807647 - RNA, 20 nt, Human
cgucaugcacaguauuugua

SEQ ID NO: 3807648 - RNA, 15 nt, Human
cgucaugcuuguguu

SEQ ID NO: 3807649 - RNA, 19 nt, Human
cgucauggcuuaauguuua

SEQ ID NO: 3807650 - RNA, 20 nt, Human
cgucauggcuuaauguuuau

SEQ ID NO: 3807651 - RNA, 19 nt, Human
cgucauuacagggcacagg

SEQ ID NO: 3807652 - RNA, 15 nt, Human
cguccacagcuuccu

SEQ ID NO: 3807653 - RNA, 16 nt, Human
cguccacggcucuagg

SEQ ID NO: 3807654 - RNA, 13 nt, Human
cguccaucucccu

SEQ ID NO: 3807655 - RNA, 14 nt, Human
cgucccccucuggc

SEQ ID NO: 3807656 - RNA, 21 nt, Human
cgucccccucuggcuccagcu

SEQ ID NO: 3807657 - RNA, 10 nt, Human
cguccccucc

SEQ ID NO: 3807658 - RNA, 11 nt, Human
cguccccuguc

SEQ ID NO: 3807659 - RNA, 16 nt, Human
cgucccuagcagugaa

SEQ ID NO: 3807660 - RNA, 13 nt, Human
cgucccugcccau

SEQ ID NO: 3807661 - RNA, 19 nt, Human
cguccgcccugcuccuccc

SEQ ID NO: 3807662 - RNA, 21 nt, Human
cguccguggguugcuaacuga

SEQ ID NO: 3807663 - RNA, 23 nt, Human
cguccguggguugcuaacugaac

SEQ ID NO: 3807664 - RNA, 14 nt, Human
cguccucaccccug

SEQ ID NO: 3807665 - RNA, 15 nt, Human
cguccucccccugcc

SEQ ID NO: 3807666 - RNA, 20 nt, Human
cguccugccaccuggggcag

SEQ ID NO: 3807667 - RNA, 15 nt, Human
cguccuuacuccugu

SEQ ID NO: 3807668 - RNA, 16 nt, Human
cgucgaggggcucuca

SEQ ID NO: 3807669 - RNA, 18 nt, Human
cgucuaaccacagcuccu

SEQ ID NO: 3807670 - RNA, 14 nt, Human
cgucuacagcuccc

SEQ ID NO: 3807671 - RNA, 14 nt, Human
cgucuaccugaggg

SEQ ID NO: 3807672 - RNA, 22 nt, Human
cgucuagcuaugcuguaucugu

SEQ ID NO: 3807673 - RNA, 11 nt, Human
cgucucagugu

SEQ ID NO: 3807674 - RNA, 20 nt, Human
cgucuccaggggcugcuucc

SEQ ID NO: 3807675 - RNA, 19 nt, Human
cgucucccccaacagcugg

SEQ ID NO: 3807676 - RNA, 20 nt, Human
cgucucccccaacagcugga

SEQ ID NO: 3807677 - RNA, 21 nt, Human
cgucucccccguguuccccuc

SEQ ID NO: 3807678 - RNA, 16 nt, Human
cgucucggccuucaca

SEQ ID NO: 3807679 - RNA, 16 nt, Human
cgucucuacuaaaaau

SEQ ID NO: 3807680 - RNA, 22 nt, Human
cgucucucccucccuuugaaau

SEQ ID NO: 3807681 - RNA, 23 nt, Human
cgucucuggagcggaauuuaccu

SEQ ID NO: 3807682 - RNA, 22 nt, Human
cgucugacaggcaaugcuggcu

SEQ ID NO: 3807683 - RNA, 16 nt, Human
cgucugacccucucca

SEQ ID NO: 3807684 - RNA, 23 nt, Human
cgucuggaggggccccugcuucu

SEQ ID NO: 3807685 - RNA, 21 nt, Human
cgucugggagaaauugacaga

SEQ ID NO: 3807686 - RNA, 22 nt, Human
cgucugggagaaauugacagau

SEQ ID NO: 3807687 - RNA, 20 nt, Human
cgucuguccaucugcccgcc

SEQ ID NO: 3807688 - RNA, 18 nt, Human
cgucugucuucacagcuc

SEQ ID NO: 3807689 - RNA, 21 nt, Human
cgucuguggcuuucagccucu

SEQ ID NO: 3807690 - RNA, 23 nt, Human
cgucugugugugaccccuccugg

SEQ ID NO: 3807691 - RNA, 17 nt, Human
cgucuguuuauaaacau

SEQ ID NO: 3807692 - RNA, 23 nt, Human
cgucuuagaaguggaccaggaca

SEQ ID NO: 3807693 - RNA, 21 nt, Human
cgucuuagcagugauuuuuau

SEQ ID NO: 3807694 - RNA, 21 nt, Human
cgucuuccgccccugccugcc

SEQ ID NO: 3807695 - RNA, 19 nt, Human
cgucuugcuugggaagggg

SEQ ID NO: 3807696 - RNA, 16 nt, Human
cgucuugguguaauuu

SEQ ID NO: 3807697 - RNA, 18 nt, Human
cgucuuuuccuguuuccu

SEQ ID NO: 3807698 - RNA, 16 nt, Human
cgugaaaacggagcug

SEQ ID NO: 3807699 - RNA, 15 nt, Human
cgugaaacacaccag

SEQ ID NO: 3807700 - RNA, 16 nt, Human
cgugaaacacaccagg

SEQ ID NO: 3807701 - RNA, 13 nt, Human
cgugaaacccugu

SEQ ID NO: 3807702 - RNA, 16 nt, Human
cgugaaagcagaugag

SEQ ID NO: 3807703 - RNA, 17 nt, Human
cgugaaagugcauuuuu

SEQ ID NO: 3807704 - RNA, 19 nt, Human
cgugaaagugcauuuuugu

SEQ ID NO: 3807705 - RNA, 22 nt, Human
cgugaacaggugggugucugcg

SEQ ID NO: 3807706 - RNA, 19 nt, Human
cgugaacccaggaggcgga

SEQ ID NO: 3807707 - RNA, 12 nt, Human
cgugaacugugc

SEQ ID NO: 3807708 - RNA, 22 nt, Human
cgugaagauacuuuguauuguc

SEQ ID NO: 3807709 - RNA, 13 nt, Human
cgugaagggauuu

SEQ ID NO: 3807710 - RNA, 15 nt, Human
cgugacaacacuugu

SEQ ID NO: 3807711 - RNA, 17 nt, Human
cgugacaauaaaacauu

SEQ ID NO: 3807712 - RNA, 16 nt, Human
cgugacacucuccuug

SEQ ID NO: 3807713 - RNA, 18 nt, Human
cgugacacucuccuugca

SEQ ID NO: 3807714 - RNA, 22 nt, Human
cgugacacucuccuugcaguuc

SEQ ID NO: 3807715 - RNA, 17 nt, Human
cgugacagacuccugag

SEQ ID NO: 3807716 - RNA, 18 nt, Human
cgugacagacuccugagg

SEQ ID NO: 3807717 - RNA, 17 nt, Human
cgugacagugccuggga

SEQ ID NO: 3807718 - RNA, 18 nt, Human
cgugacauccccacccuu

SEQ ID NO: 3807719 - RNA, 23 nt, Human
cgugacccaaaaaagucaagaac

SEQ ID NO: 3807720 - RNA, 15 nt, Human
cgugacccgaccugg

SEQ ID NO: 3807721 - RNA, 18 nt, Human
cgugacccgaccuggccg

SEQ ID NO: 3807722 - RNA, 22 nt, Human
cgugaccugcuaggccagagcc

SEQ ID NO: 3807723 - RNA, 16 nt, Human
cgugaccuggucaggg

SEQ ID NO: 3807724 - RNA, 14 nt, Human
cgugacgcugaaua

SEQ ID NO: 3807725 - RNA, 19 nt, Human
cgugacgcugaauaaaugu

SEQ ID NO: 3807726 - RNA, 20 nt, Human
cgugacugccccaacuccug

SEQ ID NO: 3807727 - RNA, 21 nt, Human
cgugagacgccaccauuccug

SEQ ID NO: 3807728 - RNA, 23 nt, Human
cgugagagugucuucacggcagg

SEQ ID NO: 3807729 - RNA, 20 nt, Human
cgugagcauguuuggaaggg

SEQ ID NO: 3807730 - RNA, 23 nt, Human
cgugagccaccgugccuggccac

SEQ ID NO: 3807731 - RNA, 20 nt, Human
cgugagccacugcaccgggc

SEQ ID NO: 3807732 - RNA, 21 nt, Human
cgugagccagguaaugaggga

SEQ ID NO: 3807733 - RNA, 13 nt, Human
cgugagccccauc

SEQ ID NO: 3807734 - RNA, 14 nt, Human
cgugagccccaucu

SEQ ID NO: 3807735 - RNA, 19 nt, Human
cgugagcgacaaagaugau

SEQ ID NO: 3807736 - RNA, 16 nt, Human
cgugagcgccugugca

SEQ ID NO: 3807737 - RNA, 21 nt, Human
cgugagcgccugugcacacac

SEQ ID NO: 3807738 - RNA, 22 nt, Human
cgugagcuuaaaauacaagacu

SEQ ID NO: 3807739 - RNA, 16 nt, Human
cgugagucauuuaaau

SEQ ID NO: 3807740 - RNA, 17 nt, Human
cgugaguccuggcaugg

SEQ ID NO: 3807741 - RNA, 19 nt, Human
cgugaguccuggcauggga

SEQ ID NO: 3807742 - RNA, 14 nt, Human
cgugaguucucagg

SEQ ID NO: 3807743 - RNA, 18 nt, Human
cgugaucaaagccacacu

SEQ ID NO: 3807744 - RNA, 22 nt, Human
cgugaucaaagccacacucugg

SEQ ID NO: 3807745 - RNA, 18 nt, Human
cgugauccacccaccucg

SEQ ID NO: 3807746 - RNA, 24 nt, Human
cgugauccacccgccucagccucc

SEQ ID NO: 3807747 - RNA, 22 nt, Human
cgugaucucggcucacugcaac

SEQ ID NO: 3807748 - RNA, 17 nt, Human
cgugaugccucccuguu

SEQ ID NO: 3807749 - RNA, 13 nt, Human
cgugcaacugaca

SEQ ID NO: 3807750 - RNA, 14 nt, Human
cgugcacacaccag

SEQ ID NO: 3807751 - RNA, 16 nt, Human
cgugcacacaccagag

SEQ ID NO: 3807752 - RNA, 17 nt, Human
cgugcacguggagagcu

SEQ ID NO: 3807753 - RNA, 20 nt, Human
cgugcacguggagagcuggu

SEQ ID NO: 3807754 - RNA, 21 nt, Human
cgugcacguggagagcuggug

SEQ ID NO: 3807755 - RNA, 22 nt, Human
cgugcaguggugcgaucugggu

SEQ ID NO: 3807756 - RNA, 17 nt, Human
cgugcaucccugagaca

SEQ ID NO: 3807757 - RNA, 21 nt, Human
cgugcauuagcacagauuuua

SEQ ID NO: 3807758 - RNA, 20 nt, Human
cgugccaaagucucccuucu

SEQ ID NO: 3807759 - RNA, 15 nt, Human
cgugccaaguccagg

SEQ ID NO: 3807760 - RNA, 21 nt, Human
cgugccaaguccagguccugg

SEQ ID NO: 3807761 - RNA, 15 nt, Human
cgugccaccccgagg

SEQ ID NO: 3807762 - RNA, 20 nt, Human
cgugcccaguggcugcuccu

SEQ ID NO: 3807763 - RNA, 17 nt, Human
cgugccccgccuccccg

SEQ ID NO: 3807764 - RNA, 14 nt, Human
cgugcccggggcag

SEQ ID NO: 3807765 - RNA, 15 nt, Human
cgugccguggcacca

SEQ ID NO: 3807766 - RNA, 19 nt, Human
ccacggacguuuccaucag

SEQ ID NO: 3807767 - RNA, 21 nt, Human
ccacggagccacuccucugac

SEQ ID NO: 3807768 - RNA, 19 nt, Human
ccacggcaccugggcccug

SEQ ID NO: 3807769 - RNA, 12 nt, Human
ccacggccaggc

SEQ ID NO: 3807770 - RNA, 16 nt, Human
ccacggccaggccaga

SEQ ID NO: 3807771 - RNA, 15 nt, Human
ccacggccgcuccag

SEQ ID NO: 3807772 - RNA, 16 nt, Human
ccacggccgcuccagg

SEQ ID NO: 3807773 - RNA, 18 nt, Human
ccacggccgcuccagggg

SEQ ID NO: 3807774 - RNA, 17 nt, Human
ccacggcuaagaggcug

SEQ ID NO: 3807775 - RNA, 21 nt, Human
ccacggcuaagaggcugcuga

SEQ ID NO: 3807776 - RNA, 20 nt, Human
ccacgggacaucacagggug

SEQ ID NO: 3807777 - RNA, 17 nt, Human
ccacggggacucagccc

SEQ ID NO: 3807778 - RNA, 16 nt, Human
ccacguacugcagccu

SEQ ID NO: 3807779 - RNA, 17 nt, Human
ccacguacugcagccuc

SEQ ID NO: 3807780 - RNA, 15 nt, Human
ccacguauuccccuu

SEQ ID NO: 3807781 - RNA, 20 nt, Human
ccacguauuccccuucccac

SEQ ID NO: 3807782 - RNA, 21 nt, Human
ccacgucagcugggacacccc

SEQ ID NO: 3807783 - RNA, 22 nt, Human
ccacgucccccuggggcuucuc

SEQ ID NO: 3807784 - RNA, 18 nt, Human
ccacguggcugcgugccc

SEQ ID NO: 3807785 - RNA, 20 nt, Human
ccacguuccuuacugcagaa

SEQ ID NO: 3807786 - RNA, 16 nt, Human
ccacguucucacaccc

SEQ ID NO: 3807787 - RNA, 17 nt, Human
ccacguucucacaccca

SEQ ID NO: 3807788 - RNA, 19 nt, Human
ccacguucucacacccacc

SEQ ID NO: 3807789 - RNA, 21 nt, Human
ccacguuggagaagcccgugu

SEQ ID NO: 3807790 - RNA, 13 nt, Human
ccacguuucuaaa

SEQ ID NO: 3807791 - RNA, 20 nt, Human
ccacuaagaaccccucugcu

SEQ ID NO: 3807792 - RNA, 21 nt, Human
ccacuaagcagaggaggggcc

SEQ ID NO: 3807793 - RNA, 18 nt, Human
ccacuacacuccagccug

SEQ ID NO: 3807794 - RNA, 19 nt, Human
ccacuacacuccagccuga

SEQ ID NO: 3807795 - RNA, 14 nt, Human
ccacuacauucugu

SEQ ID NO: 3807796 - RNA, 16 nt, Human
ccacuacauucuguua

SEQ ID NO: 3807797 - RNA, 23 nt, Human
ccacuacggaauaguuggcuagg

SEQ ID NO: 3807798 - RNA, 21 nt, Human
ccacuagaacucuccaucuua

SEQ ID NO: 3807799 - RNA, 15 nt, Human
ccacuagacccacug

SEQ ID NO: 3807800 - RNA, 17 nt, Human
ccacuagacccacugga

SEQ ID NO: 3807801 - RNA, 14 nt, Human
ccacuagugcaaau

SEQ ID NO: 3807802 - RNA, 18 nt, Human
ccacuaugacagaggauu

SEQ ID NO: 3807803 - RNA, 16 nt, Human
ccacucaaaggccaga

SEQ ID NO: 3807804 - RNA, 14 nt, Human
ccacucacaacagc

SEQ ID NO: 3807805 - RNA, 13 nt, Human
ccacucacacagc

SEQ ID NO: 3807806 - RNA, 15 nt, Human
ccacucacacagcca

SEQ ID NO: 3807807 - RNA, 22 nt, Human
ccacucacacagccaggugccu

SEQ ID NO: 3807808 - RNA, 23 nt, Human
ccacucacacagccaggugccuu

SEQ ID NO: 3807809 - RNA, 15 nt, Human
ccacucagccccuag

SEQ ID NO: 3807810 - RNA, 15 nt, Human
ccacucagcuccgug

SEQ ID NO: 3807811 - RNA, 15 nt, Human
ccacucagcuguccu

SEQ ID NO: 3807812 - RNA, 13 nt, Human
ccacucagcuucc

SEQ ID NO: 3807813 - RNA, 13 nt, Human
ccacucaggccaa

SEQ ID NO: 3807814 - RNA, 11 nt, Human
ccacucagguc

SEQ ID NO: 3807815 - RNA, 16 nt, Human
ccacucaggucuguuu

SEQ ID NO: 3807816 - RNA, 13 nt, Human
ccacucauuucau

SEQ ID NO: 3807817 - RNA, 19 nt, Human
ccacuccagaccccuggcu

SEQ ID NO: 3807818 - RNA, 21 nt, Human
ccacuccagaccccuggcuuu

SEQ ID NO: 3807819 - RNA, 13 nt, Human
ccacuccaucugg

SEQ ID NO: 3807820 - RNA, 16 nt, Human
ccacuccaucugguag

SEQ ID NO: 3807821 - RNA, 13 nt, Human
ccacuccauuccc

SEQ ID NO: 3807822 - RNA, 14 nt, Human
ccacuccauuccca

SEQ ID NO: 3807823 - RNA, 11 nt, Human
ccacucccacu

SEQ ID NO: 3807824 - RNA, 17 nt, Human
ccacucccacuucccug

SEQ ID NO: 3807825 - RNA, 23 nt, Human
ccacucccacuucccugacacug

SEQ ID NO: 3807826 - RNA, 14 nt, Human
ccacucccagugcu

SEQ ID NO: 3807827 - RNA, 19 nt, Human
ccacuccccagccagccug

SEQ ID NO: 3807828 - RNA, 22 nt, Human
ccacuccccagccagccuggcu

SEQ ID NO: 3807829 - RNA, 15 nt, Human
ccacuccccggcaug

SEQ ID NO: 3807830 - RNA, 12 nt, Human
ccacucccucac

SEQ ID NO: 3807831 - RNA, 13 nt, Human
ccacucccucaca

SEQ ID NO: 3807832 - RNA, 15 nt, Human
ccacucccugcaacc

SEQ ID NO: 3807833 - RNA, 17 nt, Human
ccacucccugcaaccug

SEQ ID NO: 3807834 - RNA, 17 nt, Human
ccacuccgagagguggg

SEQ ID NO: 3807835 - RNA, 23 nt, Human
ccacuccgagaggugggccaguc

SEQ ID NO: 3807836 - RNA, 20 nt, Human
ccacuccggcccuccagagc

SEQ ID NO: 3807837 - RNA, 21 nt, Human
ccacuccggcccuccagagcc

SEQ ID NO: 3807838 - RNA, 16 nt, Human
ccacuccuccaaagga

SEQ ID NO: 3807839 - RNA, 14 nt, Human
ccacuccuccuagc

SEQ ID NO: 3807840 - RNA, 22 nt, Human
ccacuccucugcugaccugcug

SEQ ID NO: 3807841 - RNA, 12 nt, Human
ccacuccuuccu

SEQ ID NO: 3807842 - RNA, 13 nt, Human
ccacuccuuccug

SEQ ID NO: 3807843 - RNA, 16 nt, Human
ccacuccuuccugccc

SEQ ID NO: 3807844 - RNA, 16 nt, Human
ccacucgcuuccccca

SEQ ID NO: 3807845 - RNA, 22 nt, Human
cuaaucugugcuguuucaaagu

SEQ ID NO: 3807846 - RNA, 21 nt, Human
cuaaucuuauucauuuucucu

SEQ ID NO: 3807847 - RNA, 19 nt, Human
cuaaugaaugcauaaaaug

SEQ ID NO: 3807848 - RNA, 22 nt, Human
cuaaugaguuucuuuuauaaaa

SEQ ID NO: 3807849 - RNA, 22 nt, Human
cuaaugauggcccauucuacuu

SEQ ID NO: 3807850 - RNA, 13 nt, Human
cuaaugauguuuu

SEQ ID NO: 3807851 - RNA, 23 nt, Human
cuaaugcgcaggcuggcccugcc

SEQ ID NO: 3807852 - RNA, 18 nt, Human
cuaaugcuccuuguuccu

SEQ ID NO: 3807853 - RNA, 17 nt, Human
cuaauggaaaaugauuu

SEQ ID NO: 3807854 - RNA, 21 nt, Human
cuaauggaaaaugauuuuacu

SEQ ID NO: 3807855 - RNA, 16 nt, Human
cuaauggcaugagaaa

SEQ ID NO: 3807856 - RNA, 13 nt, Human
cuaaugggacacu

SEQ ID NO: 3807857 - RNA, 14 nt, Human
cuaauguacugcau

SEQ ID NO: 3807858 - RNA, 19 nt, Human
cuaauguauuuuauuguaa

SEQ ID NO: 3807859 - RNA, 22 nt, Human
cuaauguauuuuauuguaacag

SEQ ID NO: 3807860 - RNA, 15 nt, Human
cuaaugucuucauaa

SEQ ID NO: 3807861 - RNA, 17 nt, Human
cuaaugucuucauaaag

SEQ ID NO: 3807862 - RNA, 19 nt, Human
cuaaugucuucauuucauu

SEQ ID NO: 3807863 - RNA, 22 nt, Human
cuaaugucuucauuucauugua

SEQ ID NO: 3807864 - RNA, 18 nt, Human
cuaauguugcuggaucag

SEQ ID NO: 3807865 - RNA, 18 nt, Human
cuaauguuuaagcagaau

SEQ ID NO: 3807866 - RNA, 22 nt, Human
cuaauguuuaagcagaauugga

SEQ ID NO: 3807867 - RNA, 18 nt, Human
cuaauguuuaugagccag

SEQ ID NO: 3807868 - RNA, 17 nt, Human
cuaauguuugcauauaa

SEQ ID NO: 3807869 - RNA, 18 nt, Human
cuaauguuugcauauaag

SEQ ID NO: 3807870 - RNA, 15 nt, Human
cuaauuaaaaaguua

SEQ ID NO: 3807871 - RNA, 17 nt, Human
cuaauuaacugaaacau

SEQ ID NO: 3807872 - RNA, 15 nt, Human
cuaauuaauauauua

SEQ ID NO: 3807873 - RNA, 15 nt, Human
cuaauuaauuucagu

SEQ ID NO: 3807874 - RNA, 14 nt, Human
cuaauuagagcaga

SEQ ID NO: 3807875 - RNA, 19 nt, Human
cuaauuaggguacauuuau

SEQ ID NO: 3807876 - RNA, 22 nt, Human
cuaauuauacccccugcaaagc

SEQ ID NO: 3807877 - RNA, 15 nt, Human
cuaauuauguagcuc

SEQ ID NO: 3807878 - RNA, 18 nt, Human
cuaauuauguagcucuuu

SEQ ID NO: 3807879 - RNA, 18 nt, Human
cuaauuauuuaauugucc

SEQ ID NO: 3807880 - RNA, 13 nt, Human
cuaauucauuuau

SEQ ID NO: 3807881 - RNA, 15 nt, Human
cuaauuccacagcug

SEQ ID NO: 3807882 - RNA, 16 nt, Human
cuaauucccagagugu

SEQ ID NO: 3807883 - RNA, 16 nt, Human
cuaauucgaugaaggc

SEQ ID NO: 3807884 - RNA, 11 nt, Human
cuaauucuaac

SEQ ID NO: 3807885 - RNA, 18 nt, Human
cuaauucuaaccagagca

SEQ ID NO: 3807886 - RNA, 15 nt, Human
cuaauucuaugccug

SEQ ID NO: 3807887 - RNA, 18 nt, Human
cuaauucuuccuuuguaa

SEQ ID NO: 3807888 - RNA, 18 nt, Human
cuaauucuucuguccuga

SEQ ID NO: 3807889 - RNA, 15 nt, Human
cuaauucuuugcaaa

SEQ ID NO: 3807890 - RNA, 18 nt, Human
cuaauucuuugcaaaaau

SEQ ID NO: 3807891 - RNA, 20 nt, Human
cuaauugacuuuagaaagcu

SEQ ID NO: 3807892 - RNA, 19 nt, Human
cuaauugcaucucaaaauu

SEQ ID NO: 3807893 - RNA, 13 nt, Human
cuaauugccaugu

SEQ ID NO: 3807894 - RNA, 22 nt, Human
cuaauugcugugugucccaggc

SEQ ID NO: 3807895 - RNA, 12 nt, Human
cuaauugcuuau

SEQ ID NO: 3807896 - RNA, 18 nt, Human
cuaauugcuuauuuauug

SEQ ID NO: 3807897 - RNA, 19 nt, Human
cuaauuggaagaaauuccu

SEQ ID NO: 3807898 - RNA, 22 nt, Human
cuaauuggaagaaauuccugua

SEQ ID NO: 3807899 - RNA, 22 nt, Human
cuaauuggcaugaaggugucau

SEQ ID NO: 3807900 - RNA, 21 nt, Human
cuaauugguacuuuuaaaaac

SEQ ID NO: 3807901 - RNA, 18 nt, Human
cuaauuguauaacagguu

SEQ ID NO: 3807902 - RNA, 15 nt, Human
cuaauuuaaagagac

SEQ ID NO: 3807903 - RNA, 12 nt, Human
cuaauuuauaaa

SEQ ID NO: 3807904 - RNA, 13 nt, Human
cuaauuuauaaaa

SEQ ID NO: 3807905 - RNA, 15 nt, Human
cuaauuucccuucuu

SEQ ID NO: 3807906 - RNA, 14 nt, Human
cuaauuucuccucc

SEQ ID NO: 3807907 - RNA, 19 nt, Human
cuaauuucuccucccuucc

SEQ ID NO: 3807908 - RNA, 20 nt, Human
cuaauuucuccucccuuccu

SEQ ID NO: 3807909 - RNA, 16 nt, Human
cuaauuugaggcucag

SEQ ID NO: 3807910 - RNA, 12 nt, Human
cuaauuugcauu

SEQ ID NO: 3807911 - RNA, 13 nt, Human
ccacugccucugc

SEQ ID NO: 3807912 - RNA, 21 nt, Human
ccacugccucugccuuagagg

SEQ ID NO: 3807913 - RNA, 16 nt, Human
ccacugccucuuccuc

SEQ ID NO: 3807914 - RNA, 13 nt, Human
ccacugccugccc

SEQ ID NO: 3807915 - RNA, 14 nt, Human
ccacugccugccca

SEQ ID NO: 3807916 - RNA, 21 nt, Human
ccacugccuucgauacaccgg

SEQ ID NO: 3807917 - RNA, 15 nt, Human
ccacugccuucgcuu

SEQ ID NO: 3807918 - RNA, 16 nt, Human
ccacugccuucgcuuc

SEQ ID NO: 3807919 - RNA, 22 nt, Human
ccacugccuucgcuucuugccu

SEQ ID NO: 3807920 - RNA, 14 nt, Human
ccacugccuuugac

SEQ ID NO: 3807921 - RNA, 16 nt, Human
ccacugcuccguggag

SEQ ID NO: 3807922 - RNA, 22 nt, Human
ccacugcugauauuuucucuag

SEQ ID NO: 3807923 - RNA, 16 nt, Human
ccacugcugcuucucc

SEQ ID NO: 3807924 - RNA, 19 nt, Human
ccacugcugcuucuccaug

SEQ ID NO: 3807925 - RNA, 16 nt, Human
ccacuggacuugagcu

SEQ ID NO: 3807926 - RNA, 22 nt, Human
ccacuggacuugagcuuggcag

SEQ ID NO: 3807927 - RNA, 11 nt, Human
ccacuggccac

SEQ ID NO: 3807928 - RNA, 11 nt, Human
ccacuggccau

SEQ ID NO: 3807929 - RNA, 11 nt, Human
ccacuggcucc

SEQ ID NO: 3807930 - RNA, 14 nt, Human
ccacuggcuguggg

SEQ ID NO: 3807931 - RNA, 16 nt, Human
ccacuggcugugggcu

SEQ ID NO: 3807932 - RNA, 17 nt, Human
ccacuggcugugggcuc

SEQ ID NO: 3807933 - RNA, 22 nt, Human
ccacuggcugugggcucccuuc

SEQ ID NO: 3807934 - RNA, 18 nt, Human
ccacugggaccaacccug

SEQ ID NO: 3807935 - RNA, 11 nt, Human
ccacuggggaa

SEQ ID NO: 3807936 - RNA, 19 nt, Human
ccacugggguccagggagc

SEQ ID NO: 3807937 - RNA, 23 nt, Human
ccacuggugacaugucuuuucuu

SEQ ID NO: 3807938 - RNA, 16 nt, Human
ccacugguuccuucuu

SEQ ID NO: 3807939 - RNA, 18 nt, Human
ccacuguaaaaugaaauu

SEQ ID NO: 3807940 - RNA, 17 nt, Human
ccacuguacuugcucuu

SEQ ID NO: 3807941 - RNA, 21 nt, Human
ccacuguaugauuuauaaaca

SEQ ID NO: 3807942 - RNA, 17 nt, Human
ccacugucacccuccac

SEQ ID NO: 3807943 - RNA, 22 nt, Human
ccacugucacuguuucucugcu

SEQ ID NO: 3807944 - RNA, 23 nt, Human
ccacugucacuguuucucugcug

SEQ ID NO: 3807945 - RNA, 15 nt, Human
ccacuguccugggcg

SEQ ID NO: 3807946 - RNA, 22 nt, Human
ccacuguccugggcgcccugga

SEQ ID NO: 3807947 - RNA, 20 nt, Human
ccacugugcaggugcuauug

SEQ ID NO: 3807948 - RNA, 19 nt, Human
ccacugugccaugugccag

SEQ ID NO: 3807949 - RNA, 14 nt, Human
ccacugugccucag

SEQ ID NO: 3807950 - RNA, 19 nt, Human
ccacugugcguggggcucc

SEQ ID NO: 3807951 - RNA, 20 nt, Human
ccacugugcuccagccuggg

SEQ ID NO: 3807952 - RNA, 15 nt, Human
ccacugugcuuucag

SEQ ID NO: 3807953 - RNA, 16 nt, Human
ccacuguguuccuucc

SEQ ID NO: 3807954 - RNA, 14 nt, Human
ccacuguuuauuca

SEQ ID NO: 3807955 - RNA, 21 nt, Human
ccacuguuucucuugagcugg

SEQ ID NO: 3807956 - RNA, 17 nt, Human
ccacuguuucuugcuug

SEQ ID NO: 3807957 - RNA, 16 nt, Human
ccacuuaaaaaauguc

SEQ ID NO: 3807958 - RNA, 18 nt, Human
ccacuuacauauauuuuu

SEQ ID NO: 3807959 - RNA, 20 nt, Human
ccacuuacauauauuuuuaa

SEQ ID NO: 3807960 - RNA, 12 nt, Human
ccacuuaccuag

SEQ ID NO: 3807961 - RNA, 21 nt, Human
ccacuuaccuucaauaaagua

SEQ ID NO: 3807962 - RNA, 19 nt, Human
ccacuuagaaauugcauuu

SEQ ID NO: 3807963 - RNA, 21 nt, Human
ccacuuagaaauugcauuucc

SEQ ID NO: 3807964 - RNA, 16 nt, Human
ccacuuaggcuuugua

SEQ ID NO: 3807965 - RNA, 16 nt, Human
ccacuuauagccucug

SEQ ID NO: 3807966 - RNA, 17 nt, Human
ccacuuaucccucucca

SEQ ID NO: 3807967 - RNA, 13 nt, Human
ccacuucacugcg

SEQ ID NO: 3807968 - RNA, 14 nt, Human
ccacuucagcugac

SEQ ID NO: 3807969 - RNA, 18 nt, Human
ccacuuccaggggaaccu

SEQ ID NO: 3807970 - RNA, 14 nt, Human
ccacuucccaggua

SEQ ID NO: 3807971 - RNA, 13 nt, Human
ccacuuccccucc

SEQ ID NO: 3807972 - RNA, 14 nt, Human
ccacuuccccuccu

SEQ ID NO: 3807973 - RNA, 12 nt, Human
ccacuucccuca

SEQ ID NO: 3807974 - RNA, 20 nt, Human
ccacuucggccaggucacac

SEQ ID NO: 3807975 - RNA, 10 nt, Human
ccacuucugg

SEQ ID NO: 3807976 - RNA, 13 nt, Human
ccacuucugucca

SEQ ID NO: 3807977 - RNA, 13 nt, Human
ccacuucuuccuu

SEQ ID NO: 3807978 - RNA, 22 nt, Human
ccacuucuuccuuucucuuucu

SEQ ID NO: 3807979 - RNA, 23 nt, Human
ccacuucuuccuuucucuuucuc

SEQ ID NO: 3807980 - RNA, 13 nt, Human
ccacuugaggccu

SEQ ID NO: 3807981 - RNA, 14 nt, Human
ccacuugaggccug

SEQ ID NO: 3807982 - RNA, 18 nt, Human
ccacuugaggccugaucu

SEQ ID NO: 3807983 - RNA, 20 nt, Human
ccacuugaggccugaucugc

SEQ ID NO: 3807984 - RNA, 19 nt, Human
ccacuugccucuuccuuga

SEQ ID NO: 3807985 - RNA, 12 nt, Human
ccacuuggcauu

SEQ ID NO: 3807986 - RNA, 16 nt, Human
ccacuugggucuuccc

SEQ ID NO: 3807987 - RNA, 17 nt, Human
ccacuugggucuucccu

SEQ ID NO: 3807988 - RNA, 20 nt, Human
ccacuuggucugugagaugc

SEQ ID NO: 3807989 - RNA, 19 nt, Human
ccacuugucccacuaucug

SEQ ID NO: 3807990 - RNA, 20 nt, Human
ccacuuuaaaauaucuacau

SEQ ID NO: 3807991 - RNA, 12 nt, Human
ccacuuucagcu

SEQ ID NO: 3807992 - RNA, 20 nt, Human
ccacuuuccaagucacugca

SEQ ID NO: 3807993 - RNA, 23 nt, Human
ccacuuuccuuuucuauuccuuc

SEQ ID NO: 3807994 - RNA, 16 nt, Human
ccacuuucuuucuuuc

SEQ ID NO: 3807995 - RNA, 23 nt, Human
ccacuuugcacgacgcccucucc

SEQ ID NO: 3807996 - RNA, 17 nt, Human
ccacuuuggccuccguu

SEQ ID NO: 3807997 - RNA, 21 nt, Human
ccacuuugguacauggccagu

SEQ ID NO: 3807998 - RNA, 18 nt, Human
ccacuuuggucccgugca

SEQ ID NO: 3807999 - RNA, 22 nt, Human
ccacuuuguuucguggggaggu

SEQ ID NO: 3808000 - RNA, 17 nt, Human
ccacuuuuccaguauuu

SEQ ID NO: 3808001 - RNA, 15 nt, Human
ccacuuuuguucuug

SEQ ID NO: 3808002 - RNA, 12 nt, Human
ccacuuuuuaac

SEQ ID NO: 3808003 - RNA, 19 nt, Human
ccagaaaaaaaaaaacuua

SEQ ID NO: 3808004 - RNA, 13 nt, Human
ccagaaaacaaaa

SEQ ID NO: 3808005 - RNA, 15 nt, Human
ccagaaaaggacaga

SEQ ID NO: 3808006 - RNA, 12 nt, Human
ccagaaagaaaa

SEQ ID NO: 3808007 - RNA, 17 nt, Human
ccagaaaggauauuuaa

SEQ ID NO: 3808008 - RNA, 20 nt, Human
ccagaaaggauauuuaagaa

SEQ ID NO: 3808009 - RNA, 15 nt, Human
ccagaaaguaaaggu

SEQ ID NO: 3808010 - RNA, 17 nt, Human
ccagaacaacaacuauc

SEQ ID NO: 3808011 - RNA, 20 nt, Human
cgugacgucuggguggcccu

SEQ ID NO: 3808012 - RNA, 15 nt, Human
cgugacucacccaag

SEQ ID NO: 3808013 - RNA, 21 nt, Human
cgugacugccccaacuccugg

SEQ ID NO: 3808014 - RNA, 23 nt, Human
cgugacuguauuauacaugggua

SEQ ID NO: 3808015 - RNA, 12 nt, Human
cgugagaagcau

SEQ ID NO: 3808016 - RNA, 23 nt, Human
cgugagacgccaccauuccugga

SEQ ID NO: 3808017 - RNA, 20 nt, Human
cgugagcaggaaggccuggg

SEQ ID NO: 3808018 - RNA, 14 nt, Human
cgugagccaccgcg

SEQ ID NO: 3808019 - RNA, 15 nt, Human
cgugagccacugcac

SEQ ID NO: 3808020 - RNA, 22 nt, Human
cgugagccacugcaccgggcca

SEQ ID NO: 3808021 - RNA, 15 nt, Human
cgugagcucuuguga

SEQ ID NO: 3808022 - RNA, 14 nt, Human
cgugagcugagcag

SEQ ID NO: 3808023 - RNA, 17 nt, Human
cgugagcugagcaggcc

SEQ ID NO: 3808024 - RNA, 20 nt, Human
cgugagcugagcaggccaca

SEQ ID NO: 3808025 - RNA, 19 nt, Human
cgugaggaugucacucaga

SEQ ID NO: 3808026 - RNA, 16 nt, Human
cgugaggccagagaca

SEQ ID NO: 3808027 - RNA, 17 nt, Human
cgugaggccagagacac

SEQ ID NO: 3808028 - RNA, 15 nt, Human
cgugaggcccguggg

SEQ ID NO: 3808029 - RNA, 18 nt, Human
cgugaggcccguggggcc

SEQ ID NO: 3808030 - RNA, 15 nt, Human
cgugaggucccagga

SEQ ID NO: 3808031 - RNA, 15 nt, Human
cgugagugcagaccc

SEQ ID NO: 3808032 - RNA, 15 nt, Human
cgugaguucucaggg

SEQ ID NO: 3808033 - RNA, 18 nt, Human
cgugaguucucagggcuc

SEQ ID NO: 3808034 - RNA, 21 nt, Human
cgugaucaaagccacacucug

SEQ ID NO: 3808035 - RNA, 23 nt, Human
cgugaucaaguugaggggcuucc

SEQ ID NO: 3808036 - RNA, 13 nt, Human
cgugaucuuggcu

SEQ ID NO: 3808037 - RNA, 16 nt, Human
cgugcaacugacacuc

SEQ ID NO: 3808038 - RNA, 20 nt, Human
cgugcaauuuguuugugcuu

SEQ ID NO: 3808039 - RNA, 20 nt, Human
cgugcacacaccagagccca

SEQ ID NO: 3808040 - RNA, 15 nt, Human
cgugcaccuguacuc

SEQ ID NO: 3808041 - RNA, 18 nt, Human
cgugcacgcacacugucu

SEQ ID NO: 3808042 - RNA, 22 nt, Human
cgugcacguggagagcuggugc

SEQ ID NO: 3808043 - RNA, 17 nt, Human
cgugcagacuggagggg

SEQ ID NO: 3808044 - RNA, 14 nt, Human
cgugcagcauauga

SEQ ID NO: 3808045 - RNA, 17 nt, Human
cgugcagggacaaagag

SEQ ID NO: 3808046 - RNA, 22 nt, Human
cgugcauuggaagaccccaccc

SEQ ID NO: 3808047 - RNA, 20 nt, Human
cgugccaaguccagguccug

SEQ ID NO: 3808048 - RNA, 19 nt, Human
cgugccaccccgagggcug

SEQ ID NO: 3808049 - RNA, 21 nt, Human
cgugccagucaagaagaaaaa

SEQ ID NO: 3808050 - RNA, 17 nt, Human
cgugccagucgcgcugc

SEQ ID NO: 3808051 - RNA, 19 nt, Human
cgugcccaggggcccacag

SEQ ID NO: 3808052 - RNA, 16 nt, Human
cgugcccaguggcugc

SEQ ID NO: 3808053 - RNA, 18 nt, Human
cgugccccugcugcuguc

SEQ ID NO: 3808054 - RNA, 22 nt, Human
cgugccgugugagugugacagg

SEQ ID NO: 3808055 - RNA, 19 nt, Human
cgugccguuacucuccaac

SEQ ID NO: 3808056 - RNA, 15 nt, Human
cuauacaacuggaca

SEQ ID NO: 3808057 - RNA, 14 nt, Human
cuauacaucucucc

SEQ ID NO: 3808058 - RNA, 23 nt, Human
ccagcaggccggaucgguacugu

SEQ ID NO: 3808059 - RNA, 13 nt, Human
ccagcaggcucuc

SEQ ID NO: 3808060 - RNA, 15 nt, Human
ccagcaggcucucag

SEQ ID NO: 3808061 - RNA, 16 nt, Human
ccagcaggcucucagg

SEQ ID NO: 3808062 - RNA, 17 nt, Human
ccagcaggcucucaggc

SEQ ID NO: 3808063 - RNA, 20 nt, Human
ccagcaggcucucaggccag

SEQ ID NO: 3808064 - RNA, 14 nt, Human
ccagcagucacuuc

SEQ ID NO: 3808065 - RNA, 17 nt, Human
ccagcagucucugccuu

SEQ ID NO: 3808066 - RNA, 23 nt, Human
ccagcagucucugccuugccuuu

SEQ ID NO: 3808067 - RNA, 13 nt, Human
ccagcaguucaga

SEQ ID NO: 3808068 - RNA, 20 nt, Human
ccagcaguucagagcugccc

SEQ ID NO: 3808069 - RNA, 23 nt, Human
ccagcaguucagagcugcccucu

SEQ ID NO: 3808070 - RNA, 15 nt, Human
ccagcaguucuguua

SEQ ID NO: 3808071 - RNA, 22 nt, Human
ccagcaguuuucaagucaaauu

SEQ ID NO: 3808072 - RNA, 18 nt, Human
ccagcaucaccugccugu

SEQ ID NO: 3808073 - RNA, 15 nt, Human
ccagcaucccuugac

SEQ ID NO: 3808074 - RNA, 19 nt, Human
ccagcauccuuuucugcag

SEQ ID NO: 3808075 - RNA, 21 nt, Human
ccagcauccuuuucugcagag

SEQ ID NO: 3808076 - RNA, 12 nt, Human
ccagcaucuggg

SEQ ID NO: 3808077 - RNA, 15 nt, Human
ccagcaucugggccu

SEQ ID NO: 3808078 - RNA, 20 nt, Human
ccagcaugacauaacagugc

SEQ ID NO: 3808079 - RNA, 21 nt, Human
ccagcaugacauaacagugca

SEQ ID NO: 3808080 - RNA, 18 nt, Human
ccagcaugcaccacgggc

SEQ ID NO: 3808081 - RNA, 20 nt, Human
ccagcauuccagccccucug

SEQ ID NO: 3808082 - RNA, 15 nt, Human
ccagcauucccaggu

SEQ ID NO: 3808083 - RNA, 14 nt, Human
ccagcauuccuuuu

SEQ ID NO: 3808084 - RNA, 16 nt, Human
ccagcauucucaggca

SEQ ID NO: 3808085 - RNA, 13 nt, Human
ccagcauugcugg

SEQ ID NO: 3808086 - RNA, 17 nt, Human
ccagcauugcugguucu

SEQ ID NO: 3808087 - RNA, 16 nt, Human
ccagcauuuagcuggc

SEQ ID NO: 3808088 - RNA, 18 nt, Human
ccagcauuuuacugauuc

SEQ ID NO: 3808089 - RNA, 20 nt, Human
ccagccaaacacacagaagg

SEQ ID NO: 3808090 - RNA, 15 nt, Human
ccagccaaagccucc

SEQ ID NO: 3808091 - RNA, 18 nt, Human
ccagccaaagccuccucc

SEQ ID NO: 3808092 - RNA, 13 nt, Human
ccagccaaccccu

SEQ ID NO: 3808093 - RNA, 14 nt, Human
ccagccaagcucug

SEQ ID NO: 3808094 - RNA, 20 nt, Human
ccagccaagcucugcagucc

SEQ ID NO: 3808095 - RNA, 21 nt, Human
ccagccacucuaccagugcag

SEQ ID NO: 3808096 - RNA, 13 nt, Human
ccagccagauccu

SEQ ID NO: 3808097 - RNA, 21 nt, Human
ccagccagauggacuccagcc

SEQ ID NO: 3808098 - RNA, 22 nt, Human
ccagccagcaaugauguccaga

SEQ ID NO: 3808099 - RNA, 22 nt, Human
ccagccagcagcagcccaagcu

SEQ ID NO: 3808100 - RNA, 13 nt, Human
ccagccagccacu

SEQ ID NO: 3808101 - RNA, 15 nt, Human
ccagccagccacucu

SEQ ID NO: 3808102 - RNA, 16 nt, Human
ccagccagccacucua

SEQ ID NO: 3808103 - RNA, 16 nt, Human
ccagccagccuggcug

SEQ ID NO: 3808104 - RNA, 12 nt, Human
ccagccagcgcc

SEQ ID NO: 3808105 - RNA, 14 nt, Human
ccagccagcgccuc

SEQ ID NO: 3808106 - RNA, 15 nt, Human
ccagccagcgccucc

SEQ ID NO: 3808107 - RNA, 16 nt, Human
ccagccagcgccuccc

SEQ ID NO: 3808108 - RNA, 22 nt, Human
ccagccagcgucggucugugcc

SEQ ID NO: 3808109 - RNA, 20 nt, Human
ccagccaggcccagccgacc

SEQ ID NO: 3808110 - RNA, 21 nt, Human
ccagccaggcccagccgaccc

SEQ ID NO: 3808111 - RNA, 22 nt, Human
ccagccaggcccagccgacccc

SEQ ID NO: 3808112 - RNA, 17 nt, Human
ccagccaggcgggcuca

SEQ ID NO: 3808113 - RNA, 15 nt, Human
ccagccagggcucaa

SEQ ID NO: 3808114 - RNA, 13 nt, Human
ccagccagggcug

SEQ ID NO: 3808115 - RNA, 19 nt, Human
ccagccagugaccugagga

SEQ ID NO: 3808116 - RNA, 22 nt, Human
ccagccagugaccugaggaagc

SEQ ID NO: 3808117 - RNA, 16 nt, Human
ccagccaucaaaaugc

SEQ ID NO: 3808118 - RNA, 18 nt, Human
ccagccaucugcccaggg

SEQ ID NO: 3808119 - RNA, 21 nt, Human
ccagccaucugcccaggggug

SEQ ID NO: 3808120 - RNA, 16 nt, Human
ccagccaugccagcug

SEQ ID NO: 3808121 - RNA, 18 nt, Human
ccagccaugccagcuggc

SEQ ID NO: 3808122 - RNA, 19 nt, Human
ccagccauuaccauggaga

SEQ ID NO: 3808123 - RNA, 21 nt, Human
ccagcccaaaggggacaggcc

SEQ ID NO: 3808124 - RNA, 15 nt, Human
ccagcccaauccagg

SEQ ID NO: 3808125 - RNA, 15 nt, Human
ccagcccaccccaug

SEQ ID NO: 3808126 - RNA, 14 nt, Human
ccagcccacccucc

SEQ ID NO: 3808127 - RNA, 21 nt, Human
ccagcccacgcugacuacagg

SEQ ID NO: 3808128 - RNA, 17 nt, Human
ccagcccacuucugcca

SEQ ID NO: 3808129 - RNA, 16 nt, Human
ccagcccagaggccga

SEQ ID NO: 3808130 - RNA, 15 nt, Human
ccagcccagauguuu

SEQ ID NO: 3808131 - RNA, 15 nt, Human
ccagcccagcccagc

SEQ ID NO: 3808132 - RNA, 18 nt, Human
ccagcccagcugcucugc

SEQ ID NO: 3808133 - RNA, 22 nt, Human
ccagcccagcugcucugcccag

SEQ ID NO: 3808134 - RNA, 13 nt, Human
ccagcccagcugg

SEQ ID NO: 3808135 - RNA, 14 nt, Human
ccagcccagggcuc

SEQ ID NO: 3808136 - RNA, 15 nt, Human
ccagcccagggcucc

SEQ ID NO: 3808137 - RNA, 17 nt, Human
ccagcccagggcuccug

SEQ ID NO: 3808138 - RNA, 14 nt, Human
ccagcccagggugg

SEQ ID NO: 3808139 - RNA, 16 nt, Human
ccagcccaucucggag

SEQ ID NO: 3808140 - RNA, 17 nt, Human
ccagcccaucucggagc

SEQ ID NO: 3808141 - RNA, 19 nt, Human
ccagcccaucuugccucca

SEQ ID NO: 3808142 - RNA, 19 nt, Human
ccagcccauggcccugugc

SEQ ID NO: 3808143 - RNA, 19 nt, Human
ccagcccauucucucuccu

SEQ ID NO: 3808144 - RNA, 21 nt, Human
ccagcccauucucucuccugu

SEQ ID NO: 3808145 - RNA, 23 nt, Human
ccagccccaaaacucuccucugc

SEQ ID NO: 3808146 - RNA, 13 nt, Human
ccagccccacagc

SEQ ID NO: 3808147 - RNA, 22 nt, Human
ccagccccacagcccacguccu

SEQ ID NO: 3808148 - RNA, 15 nt, Human
ccagccccacccagg

SEQ ID NO: 3808149 - RNA, 16 nt, Human
ccagccccacccagga

SEQ ID NO: 3808150 - RNA, 19 nt, Human
ccagccccacuccucugcu

SEQ ID NO: 3808151 - RNA, 18 nt, Human
ccagccccacugccagca

SEQ ID NO: 3808152 - RNA, 23 nt, Human
ccagccccacugccagcagcagc

SEQ ID NO: 3808153 - RNA, 16 nt, Human
ccagccccaucaggac

SEQ ID NO: 3808154 - RNA, 13 nt, Human
ccagcccccacag

SEQ ID NO: 3808155 - RNA, 15 nt, Human
ccagcccccuccugg

SEQ ID NO: 3808156 - RNA, 22 nt, Human
ccagcccccugaccacucagag

SEQ ID NO: 3808157 - RNA, 15 nt, Human
ccagcccccuuuggg

SEQ ID NO: 3808158 - RNA, 19 nt, Human
ccagccccgacuccagcca

SEQ ID NO: 3808159 - RNA, 13 nt, Human
ccagccccuagcc

SEQ ID NO: 3808160 - RNA, 17 nt, Human
ccagccccuagcccagg

SEQ ID NO: 3808161 - RNA, 22 nt, Human
ccagccccuagcccaggagaga

SEQ ID NO: 3808162 - RNA, 13 nt, Human
ccagccccuccca

SEQ ID NO: 3808163 - RNA, 14 nt, Human
ccagccccucccac

SEQ ID NO: 3808164 - RNA, 17 nt, Human
ccagccccucuucccca

SEQ ID NO: 3808165 - RNA, 18 nt, Human
ccagccccucuuggagaa

SEQ ID NO: 3808166 - RNA, 21 nt, Human
ccagccccucuuggagaaguc

SEQ ID NO: 3808167 - RNA, 18 nt, Human
ccagccccuggaugcagc

SEQ ID NO: 3808168 - RNA, 23 nt, Human
ccagccccuggccccaggaccug

SEQ ID NO: 3808169 - RNA, 13 nt, Human
ccagccccugucc

SEQ ID NO: 3808170 - RNA, 18 nt, Human
ccagccccuuagacagag

SEQ ID NO: 3808171 - RNA, 16 nt, Human
ccagccccuucucaga

SEQ ID NO: 3808172 - RNA, 23 nt, Human
ccagccccuucugacccaugcug

SEQ ID NO: 3808173 - RNA, 24 nt, Human
ccagccccuucugacccaugcugc

SEQ ID NO: 3808174 - RNA, 14 nt, Human
ccagccccuuucca

SEQ ID NO: 3808175 - RNA, 17 nt, Human
ccagccccuuuccaaaa

SEQ ID NO: 3808176 - RNA, 13 nt, Human
ccagcccggccug

SEQ ID NO: 3808177 - RNA, 17 nt, Human
ccagcccggccugcucc

SEQ ID NO: 3808178 - RNA, 14 nt, Human
ccagcccgggagcc

SEQ ID NO: 3808179 - RNA, 20 nt, Human
ccagcccgggagccuaggac

SEQ ID NO: 3808180 - RNA, 22 nt, Human
ccagcccgggagccuaggacca

SEQ ID NO: 3808181 - RNA, 15 nt, Human
ccagcccuauggaug

SEQ ID NO: 3808182 - RNA, 20 nt, Human
ccagcccuccccauggagcc

SEQ ID NO: 3808183 - RNA, 21 nt, Human
ccagcccuccccauggagcca

SEQ ID NO: 3808184 - RNA, 13 nt, Human
ccagcccucccug

SEQ ID NO: 3808185 - RNA, 14 nt, Human
ccagcccucccugu

SEQ ID NO: 3808186 - RNA, 17 nt, Human
ccagcccucccuguccu

SEQ ID NO: 3808187 - RNA, 18 nt, Human
ccagcccucccuguccuc

SEQ ID NO: 3808188 - RNA, 21 nt, Human
ccagcccucccuguccuccuc

SEQ ID NO: 3808189 - RNA, 22 nt, Human
ccagcccucccuguccuccucg

SEQ ID NO: 3808190 - RNA, 21 nt, Human
ccagcccuccuuaucaaagga

SEQ ID NO: 3808191 - RNA, 22 nt, Human
ccagcccuccuuaucaaaggac

SEQ ID NO: 3808192 - RNA, 18 nt, Human
ccagcccugaguuccuag

SEQ ID NO: 3808193 - RNA, 15 nt, Human
ccagcccugccugga

SEQ ID NO: 3808194 - RNA, 16 nt, Human
ccagcccugccuggag

SEQ ID NO: 3808195 - RNA, 17 nt, Human
ccagcccugccuggagg

SEQ ID NO: 3808196 - RNA, 21 nt, Human
ccagcccugccuggaggaccu

SEQ ID NO: 3808197 - RNA, 12 nt, Human
ccagcccugcug

SEQ ID NO: 3808198 - RNA, 18 nt, Human
ccagcccugcuggccgcc

SEQ ID NO: 3808199 - RNA, 16 nt, Human
ccagcccugcugggga

SEQ ID NO: 3808200 - RNA, 19 nt, Human
ccagcuauuuuuacuagaa

SEQ ID NO: 3808201 - RNA, 12 nt, Human
ccagcucacccc

SEQ ID NO: 3808202 - RNA, 17 nt, Human
ccagcucaccccccaca

SEQ ID NO: 3808203 - RNA, 19 nt, Human
ccagcucaccccccacacu

SEQ ID NO: 3808204 - RNA, 23 nt, Human
ccagcucaccccccacacucacu

SEQ ID NO: 3808205 - RNA, 15 nt, Human
ccagcucacgucaca

SEQ ID NO: 3808206 - RNA, 21 nt, Human
ccagcucagaacccagggcuc

SEQ ID NO: 3808207 - RNA, 12 nt, Human
ccagcucagcac

SEQ ID NO: 3808208 - RNA, 15 nt, Human
ccagcucagcaguga

SEQ ID NO: 3808209 - RNA, 19 nt, Human
ccagcucaggacagaugcc

SEQ ID NO: 3808210 - RNA, 23 nt, Human
ccagcucaggacagaugccacac

SEQ ID NO: 3808211 - RNA, 11 nt, Human
ccagcucaggg

SEQ ID NO: 3808212 - RNA, 15 nt, Human
ccagcucagucccau

SEQ ID NO: 3808213 - RNA, 18 nt, Human
ccagcucagucuucccua

SEQ ID NO: 3808214 - RNA, 12 nt, Human
ccagcucauuca

SEQ ID NO: 3808215 - RNA, 12 nt, Human
ccagcuccaggg

SEQ ID NO: 3808216 - RNA, 17 nt, Human
ccagcucccccgggagg

SEQ ID NO: 3808217 - RNA, 21 nt, Human
ccagcucccccgggaggggcc

SEQ ID NO: 3808218 - RNA, 16 nt, Human
ccagcucccccucccu

SEQ ID NO: 3808219 - RNA, 19 nt, Human
ccagcucccugugccccca

SEQ ID NO: 3808220 - RNA, 19 nt, Human
ccagcuccgcgccaggaug

SEQ ID NO: 3808221 - RNA, 20 nt, Human
ccagcuccggccuguccucc

SEQ ID NO: 3808222 - RNA, 18 nt, Human
cuacacccuuuuccagcu

SEQ ID NO: 3808223 - RNA, 13 nt, Human
cuacaccuaacuc

SEQ ID NO: 3808224 - RNA, 15 nt, Human
cuacaccuugccuug

SEQ ID NO: 3808225 - RNA, 17 nt, Human
cuacacuccagccugag

SEQ ID NO: 3808226 - RNA, 18 nt, Human
cuacacuccagccugagc

SEQ ID NO: 3808227 - RNA, 17 nt, Human
cuacacuccagugagac

SEQ ID NO: 3808228 - RNA, 14 nt, Human
cuacacucuccugg

SEQ ID NO: 3808229 - RNA, 16 nt, Human
cuacacugacacuggu

SEQ ID NO: 3808230 - RNA, 13 nt, Human
cuacacugaggag

SEQ ID NO: 3808231 - RNA, 22 nt, Human
cuacagaaaaacaaugguaaca

SEQ ID NO: 3808232 - RNA, 17 nt, Human
cuacagaaaaaccuugg

SEQ ID NO: 3808233 - RNA, 17 nt, Human
cuacagaaaagaaacuc

SEQ ID NO: 3808234 - RNA, 18 nt, Human
cuacagaaaagaaacucu

SEQ ID NO: 3808235 - RNA, 19 nt, Human
cuacagaacuucagaaaga

SEQ ID NO: 3808236 - RNA, 16 nt, Human
cuacagacuucuccag

SEQ ID NO: 3808237 - RNA, 21 nt, Human
cuacagacuucuccagaccca

SEQ ID NO: 3808238 - RNA, 12 nt, Human
cuacagagaaac

SEQ ID NO: 3808239 - RNA, 15 nt, Human
cuacagagaaaccag

SEQ ID NO: 3808240 - RNA, 16 nt, Human
cuacagagaaaccagc

SEQ ID NO: 3808241 - RNA, 22 nt, Human
cuacagagaaaccagcuuccuu

SEQ ID NO: 3808242 - RNA, 11 nt, Human
cuacagagaag

SEQ ID NO: 3808243 - RNA, 14 nt, Human
cuacagagaagccu

SEQ ID NO: 3808244 - RNA, 16 nt, Human
cuacagagaagccuuc

SEQ ID NO: 3808245 - RNA, 22 nt, Human
cuacagagaagccuucaagcuc

SEQ ID NO: 3808246 - RNA, 23 nt, Human
cuacagagaagccuucaagcucu

SEQ ID NO: 3808247 - RNA, 23 nt, Human
cuacagagccgagcaauauuuau

SEQ ID NO: 3808248 - RNA, 17 nt, Human
cuacagagcuucccuga

SEQ ID NO: 3808249 - RNA, 18 nt, Human
cuacagaggccaugggcc

SEQ ID NO: 3808250 - RNA, 16 nt, Human
cuacagcaaauuuaua

SEQ ID NO: 3808251 - RNA, 22 nt, Human
cuacagcaaauuuauaauuuua

SEQ ID NO: 3808252 - RNA, 21 nt, Human
cuacagcacuacuggguguca

SEQ ID NO: 3808253 - RNA, 14 nt, Human
cuacagccucagaa

SEQ ID NO: 3808254 - RNA, 22 nt, Human
cuacagcuaaucagcauucuca

SEQ ID NO: 3808255 - RNA, 18 nt, Human
cuacagcuggggugcagg

SEQ ID NO: 3808256 - RNA, 22 nt, Human
cuacagcuugaccgugaggcca

SEQ ID NO: 3808257 - RNA, 23 nt, Human
cuacagcuugaccgugaggccag

SEQ ID NO: 3808258 - RNA, 11 nt, Human
cuacagcuuuc

SEQ ID NO: 3808259 - RNA, 22 nt, Human
cuacagcuuugugacuguauau

SEQ ID NO: 3808260 - RNA, 22 nt, Human
cuacaggcacacgccaccucgc

SEQ ID NO: 3808261 - RNA, 15 nt, Human
cuacaggcacccacc

SEQ ID NO: 3808262 - RNA, 18 nt, Human
cuacaggcagucucucuc

SEQ ID NO: 3808263 - RNA, 22 nt, Human
cuacagggcgagacucugucuc

SEQ ID NO: 3808264 - RNA, 22 nt, Human
cuacaggggaagguggccucug

SEQ ID NO: 3808265 - RNA, 15 nt, Human
cuacagggggucugg

SEQ ID NO: 3808266 - RNA, 17 nt, Human
cuacagggggucuggcu

SEQ ID NO: 3808267 - RNA, 19 nt, Human
cuacagggggucuggcugg

SEQ ID NO: 3808268 - RNA, 14 nt, Human
cuacaggugugagu

SEQ ID NO: 3808269 - RNA, 17 nt, Human
cuacagguuacaacaga

SEQ ID NO: 3808270 - RNA, 18 nt, Human
cuacagucaagauagaaa

SEQ ID NO: 3808271 - RNA, 14 nt, Human
cuacagucaggaaa

SEQ ID NO: 3808272 - RNA, 21 nt, Human
cuacagucaggaaaggaauca

SEQ ID NO: 3808273 - RNA, 15 nt, Human
cuacaguccucccau

SEQ ID NO: 3808274 - RNA, 18 nt, Human
cuacagugccaacuccuc

SEQ ID NO: 3808275 - RNA, 14 nt, Human
cuacagugguuuua

SEQ ID NO: 3808276 - RNA, 13 nt, Human
cuacaguugaaaa

SEQ ID NO: 3808277 - RNA, 19 nt, Human
cuacaguugaaaaacagcu

SEQ ID NO: 3808278 - RNA, 21 nt, Human
cuacaguuggaaauccaucca

SEQ ID NO: 3808279 - RNA, 18 nt, Human
cuacaguuuuaacugugg

SEQ ID NO: 3808280 - RNA, 19 nt, Human
cuacaguuuuaacugugga

SEQ ID NO: 3808281 - RNA, 12 nt, Human
cuacauaaauug

SEQ ID NO: 3808282 - RNA, 13 nt, Human
cuacauaaauugg

SEQ ID NO: 3808283 - RNA, 15 nt, Human
cuacauaauuuaguu

SEQ ID NO: 3808284 - RNA, 18 nt, Human
cuacauaucccuuccaga

SEQ ID NO: 3808285 - RNA, 18 nt, Human
cuacaugacgacaaagcu

SEQ ID NO: 3808286 - RNA, 17 nt, Human
cuacaugagaacaaaca

SEQ ID NO: 3808287 - RNA, 15 nt, Human
cuacaugagguacug

SEQ ID NO: 3808288 - RNA, 22 nt, Human
cuacaugcaaggcacuguacua

SEQ ID NO: 3808289 - RNA, 17 nt, Human
cuacaugcuuugugaac

SEQ ID NO: 3808290 - RNA, 18 nt, Human
cuacauggaguauauguc

SEQ ID NO: 3808291 - RNA, 22 nt, Human
cuacauggggucuggguggggg

SEQ ID NO: 3808292 - RNA, 21 nt, Human
cuacauguauugcacauugua

SEQ ID NO: 3808293 - RNA, 18 nt, Human
cuacauuagguugugaau

SEQ ID NO: 3808294 - RNA, 12 nt, Human
cuacauucauuu

SEQ ID NO: 3808295 - RNA, 14 nt, Human
cuacauucuguuaa

SEQ ID NO: 3808296 - RNA, 16 nt, Human
cuacauuuuuucauca

SEQ ID NO: 3808297 - RNA, 14 nt, Human
cuaccaacuggaag

SEQ ID NO: 3808298 - RNA, 15 nt, Human
cuaccaacuggaagc

SEQ ID NO: 3808299 - RNA, 14 nt, Human
cuaccaacuuucaa

SEQ ID NO: 3808300 - RNA, 19 nt, Human
cuaccaagcuauccuggcu

SEQ ID NO: 3808301 - RNA, 18 nt, Human
cuaccaauagauucccca

SEQ ID NO: 3808302 - RNA, 13 nt, Human
cuaccaaugcaug

SEQ ID NO: 3808303 - RNA, 14 nt, Human
cuaccacagugucu

SEQ ID NO: 3808304 - RNA, 14 nt, Human
cuaccaccccuucc

SEQ ID NO: 3808305 - RNA, 16 nt, Human
cuaccaccccuuccug

SEQ ID NO: 3808306 - RNA, 22 nt, Human
cuaccaccccuuccugucccac

SEQ ID NO: 3808307 - RNA, 14 nt, Human
cuaccacuccugcc

SEQ ID NO: 3808308 - RNA, 18 nt, Human
cuaccacugucuucuuca

SEQ ID NO: 3808309 - RNA, 16 nt, Human
cuaccagacuguguau

SEQ ID NO: 3808310 - RNA, 17 nt, Human
cuaccagcgcccgcugg

SEQ ID NO: 3808311 - RNA, 21 nt, Human
cuaccagcguauauauaagaa

SEQ ID NO: 3808312 - RNA, 19 nt, Human
cuaccaguauuuagaagcc

SEQ ID NO: 3808313 - RNA, 16 nt, Human
cuaccaucagggacag

SEQ ID NO: 3808314 - RNA, 11 nt, Human
cuaccaucucc

SEQ ID NO: 3808315 - RNA, 13 nt, Human
cuaccauucagug

SEQ ID NO: 3808316 - RNA, 20 nt, Human
cuaccauuugcagaguccug

SEQ ID NO: 3808317 - RNA, 13 nt, Human
cuacccacccucc

SEQ ID NO: 3808318 - RNA, 22 nt, Human
cuacccacccuccuuucaccac

SEQ ID NO: 3808319 - RNA, 15 nt, Human
cuacccacuauccuu

SEQ ID NO: 3808320 - RNA, 19 nt, Human
cuacccacuauccuucgug

SEQ ID NO: 3808321 - RNA, 14 nt, Human
cuacccacuucuaa

SEQ ID NO: 3808322 - RNA, 21 nt, Human
cuacccagagaagccccuucc

SEQ ID NO: 3808323 - RNA, 18 nt, Human
cuacccagcgagcccugg

SEQ ID NO: 3808324 - RNA, 19 nt, Human
cuacccaggaggcugaggu

SEQ ID NO: 3808325 - RNA, 19 nt, Human
cuacccagggccugcagga

SEQ ID NO: 3808326 - RNA, 13 nt, Human
cuacccauccccg

SEQ ID NO: 3808327 - RNA, 19 nt, Human
cuaccccauggugcuagga

SEQ ID NO: 3808328 - RNA, 18 nt, Human
cuacccccagcugugcuu

SEQ ID NO: 3808329 - RNA, 19 nt, Human
cuacccccaggguugaggg

SEQ ID NO: 3808330 - RNA, 15 nt, Human
cuacccccuccucuc

SEQ ID NO: 3808331 - RNA, 15 nt, Human
cuaccccucccagcu

SEQ ID NO: 3808332 - RNA, 18 nt, Human
cuaccccucccagcugac

SEQ ID NO: 3808333 - RNA, 16 nt, Human
cuaccccuugauuuuc

SEQ ID NO: 3808334 - RNA, 20 nt, Human
cuacccgacauaagucgagg

SEQ ID NO: 3808335 - RNA, 16 nt, Human
cuacccuaaccaaguu

SEQ ID NO: 3808336 - RNA, 14 nt, Human
cuacccucccaccc

SEQ ID NO: 3808337 - RNA, 13 nt, Human
cuacccucccugc

SEQ ID NO: 3808338 - RNA, 17 nt, Human
cuacccuccugcacugu

SEQ ID NO: 3808339 - RNA, 20 nt, Human
cuacccucgggcccaccugg

SEQ ID NO: 3808340 - RNA, 14 nt, Human
cuacccucuagaga

SEQ ID NO: 3808341 - RNA, 18 nt, Human
cuacccugagcugaggca

SEQ ID NO: 3808342 - RNA, 13 nt, Human
cuacccuuaauua

SEQ ID NO: 3808343 - RNA, 18 nt, Human
cuacccuuuuucuccagc

SEQ ID NO: 3808344 - RNA, 18 nt, Human
cuaccgaaugugucuuua

SEQ ID NO: 3808345 - RNA, 14 nt, Human
gaaggcuggcauga

SEQ ID NO: 3808346 - RNA, 13 nt, Human
gaaggcuggcugg

SEQ ID NO: 3808347 - RNA, 22 nt, Human
gaaggcuggguucugauccuag

SEQ ID NO: 3808348 - RNA, 17 nt, Human
gaaggcuuguugugcuu

SEQ ID NO: 3808349 - RNA, 23 nt, Human
gaaggcuuucagggccuccagcc

SEQ ID NO: 3808350 - RNA, 19 nt, Human
gaagggaaaauauccaucc

SEQ ID NO: 3808351 - RNA, 15 nt, Human
gaagggaagaaaagg

SEQ ID NO: 3808352 - RNA, 22 nt, Human
gaagggaauaagguacaagaag

SEQ ID NO: 3808353 - RNA, 13 nt, Human
gaagggacauauu

SEQ ID NO: 3808354 - RNA, 22 nt, Human
gaagggaccaaggcaaggcagg

SEQ ID NO: 3808355 - RNA, 18 nt, Human
gaagggaccuugaagggu

SEQ ID NO: 3808356 - RNA, 20 nt, Human
gaagggaccuugaaggguaa

SEQ ID NO: 3808357 - RNA, 21 nt, Human
gaagggacuaggagcacugua

SEQ ID NO: 3808358 - RNA, 21 nt, Human
gaagggagaaggaucuagaau

SEQ ID NO: 3808359 - RNA, 15 nt, Human
gaagggagcagcaca

SEQ ID NO: 3808360 - RNA, 15 nt, Human
gaagggagccaaggg

SEQ ID NO: 3808361 - RNA, 16 nt, Human
gaagggagccaaggga

SEQ ID NO: 3808362 - RNA, 20 nt, Human
gaagggagccaagggaugga

SEQ ID NO: 3808363 - RNA, 14 nt, Human
gaagggagggcaga

SEQ ID NO: 3808364 - RNA, 20 nt, Human
gaagggagggcagagcuggu

SEQ ID NO: 3808365 - RNA, 23 nt, Human
gaagggagggcagagcuggugcg

SEQ ID NO: 3808366 - RNA, 19 nt, Human
gaagggccaguccugccug

SEQ ID NO: 3808367 - RNA, 20 nt, Human
gaagggccaguccugccugg

SEQ ID NO: 3808368 - RNA, 22 nt, Human
gaagggccaguccugccuggcc

SEQ ID NO: 3808369 - RNA, 18 nt, Human
gaagggccagucugggcu

SEQ ID NO: 3808370 - RNA, 20 nt, Human
gaagggccagucugggcugc

SEQ ID NO: 3808371 - RNA, 13 nt, Human
gaagggcccagga

SEQ ID NO: 3808372 - RNA, 21 nt, Human
gaagggcccuucacugccuuu

SEQ ID NO: 3808373 - RNA, 22 nt, Human
gaagggcugcaugauguuugcc

SEQ ID NO: 3808374 - RNA, 13 nt, Human
gaauauggacaua

SEQ ID NO: 3808375 - RNA, 17 nt, Human
gaauaugggagaaauag

SEQ ID NO: 3808376 - RNA, 18 nt, Human
gaauaugggagaaauagu

SEQ ID NO: 3808377 - RNA, 15 nt, Human
gaauauguauguaua

SEQ ID NO: 3808378 - RNA, 12 nt, Human
gaauaugucugc

SEQ ID NO: 3808379 - RNA, 14 nt, Human
gaauauguuucaaa

SEQ ID NO: 3808380 - RNA, 13 nt, Human
gaauauuauauuu

SEQ ID NO: 3808381 - RNA, 24 nt, Human
gaauauuauauuuggaugcagagu

SEQ ID NO: 3808382 - RNA, 18 nt, Human
gaauauugcaaaauacau

SEQ ID NO: 3808383 - RNA, 21 nt, Human
gaauauugcaaaauacaugaa

SEQ ID NO: 3808384 - RNA, 22 nt, Human
gaauauugcugauggugcaaug

SEQ ID NO: 3808385 - RNA, 23 nt, Human
gaauauuguauuguuagauguuu

SEQ ID NO: 3808386 - RNA, 23 nt, Human
gaauauuguguuccuuuuuauga

SEQ ID NO: 3808387 - RNA, 18 nt, Human
gaauauuuauauuucacu

SEQ ID NO: 3808388 - RNA, 19 nt, Human
gaauauuuauauuucacua

SEQ ID NO: 3808389 - RNA, 11 nt, Human
gaauauuugaa

SEQ ID NO: 3808390 - RNA, 16 nt, Human
gaauauuugaaucuug

SEQ ID NO: 3808391 - RNA, 22 nt, Human
gaauauuugaaucuugucucaa

SEQ ID NO: 3808392 - RNA, 17 nt, Human
gaauauuugaauguaug

SEQ ID NO: 3808393 - RNA, 19 nt, Human
gaauauuugguuuuccugu

SEQ ID NO: 3808394 - RNA, 15 nt, Human
gaauauuuuauucaa

SEQ ID NO: 3808395 - RNA, 18 nt, Human
gaauauuuuauucaaggu

SEQ ID NO: 3808396 - RNA, 19 nt, Human
gaauauuuuuauauuuccu

SEQ ID NO: 3808397 - RNA, 22 nt, Human
gaauauuuuuauauuuccuuua

SEQ ID NO: 3808398 - RNA, 15 nt, Human
gaaucaaaaauugaa

SEQ ID NO: 3808399 - RNA, 19 nt, Human
gaaucaaagcaaugcauuu

SEQ ID NO: 3808400 - RNA, 17 nt, Human
gaaucaaauaaaaauuc

SEQ ID NO: 3808401 - RNA, 17 nt, Human
gaaucaacauuucucaa

SEQ ID NO: 3808402 - RNA, 18 nt, Human
gaaucaagagcugcccuc

SEQ ID NO: 3808403 - RNA, 19 nt, Human
gaaucaagagcugcccucc

SEQ ID NO: 3808404 - RNA, 22 nt, Human
gaaucaagcuagaaggccacau

SEQ ID NO: 3808405 - RNA, 19 nt, Human
gaaucaagggucaggccuu

SEQ ID NO: 3808406 - RNA, 11 nt, Human
gaaucaauaau

SEQ ID NO: 3808407 - RNA, 12 nt, Human
gaaucacaggcu

SEQ ID NO: 3808408 - RNA, 18 nt, Human
gaaucaccuaauuaauuu

SEQ ID NO: 3808409 - RNA, 21 nt, Human
gaaucacguuagaggaaaaau

SEQ ID NO: 3808410 - RNA, 20 nt, Human
gaaucacuguuuagaacaca

SEQ ID NO: 3808411 - RNA, 15 nt, Human
gaaucacuguuuuua

SEQ ID NO: 3808412 - RNA, 13 nt, Human
gaaucagaaacag

SEQ ID NO: 3808413 - RNA, 22 nt, Human
gaaucagaagauagucuuggaa

SEQ ID NO: 3808414 - RNA, 18 nt, Human
gaaucagccuacaggccu

SEQ ID NO: 3808415 - RNA, 21 nt, Human
gaaucaggaauauuuuccaaa

SEQ ID NO: 3808416 - RNA, 21 nt, Human
gaaucaguauaaacaaaguua

SEQ ID NO: 3808417 - RNA, 15 nt, Human
gaaucaugagccugc

SEQ ID NO: 3808418 - RNA, 18 nt, Human
gaaucaugagccugcugg

SEQ ID NO: 3808419 - RNA, 13 nt, Human
gaaucauguagua

SEQ ID NO: 3808420 - RNA, 17 nt, Human
gaaucaugucaggccug

SEQ ID NO: 3808421 - RNA, 20 nt, Human
gaaucaugucaggccugugu

SEQ ID NO: 3808422 - RNA, 15 nt, Human
gaaucauguuucuuu

SEQ ID NO: 3808423 - RNA, 16 nt, Human
gaaucauuauuuauua

SEQ ID NO: 3808424 - RNA, 18 nt, Human
gaaucauucagaaauguu

SEQ ID NO: 3808425 - RNA, 12 nt, Human
gaaucauugcuu

SEQ ID NO: 3808426 - RNA, 20 nt, Human
gaaucauuguaaacauuagu

SEQ ID NO: 3808427 - RNA, 16 nt, Human
gaauccaaaagaaaaa

SEQ ID NO: 3808428 - RNA, 13 nt, Human
gaauccaaacuug

SEQ ID NO: 3808429 - RNA, 15 nt, Human
gaauccaagauuggu

SEQ ID NO: 3808430 - RNA, 17 nt, Human
gaauccaagccuccaca

SEQ ID NO: 3808431 - RNA, 15 nt, Human
gaauccaagcucccu

SEQ ID NO: 3808432 - RNA, 17 nt, Human
gaauccacauuucuaaa

SEQ ID NO: 3808433 - RNA, 18 nt, Human
gaauccacauuucuaaaa

SEQ ID NO: 3808434 - RNA, 15 nt, Human
gaauccacccauccu

SEQ ID NO: 3808435 - RNA, 23 nt, Human
gaauccacguauuccccuuccca

SEQ ID NO: 3808436 - RNA, 17 nt, Human
gaaucccaaauuugauu

SEQ ID NO: 3808437 - RNA, 15 nt, Human
gaaucccaagaccca

SEQ ID NO: 3808438 - RNA, 19 nt, Human
gaaucccagcccccugacc

SEQ ID NO: 3808439 - RNA, 13 nt, Human
gaaucccagccgg

SEQ ID NO: 3808440 - RNA, 19 nt, Human
gaauccccaacaugcacug

SEQ ID NO: 3808441 - RNA, 17 nt, Human
gaaucccccuugccacc

SEQ ID NO: 3808442 - RNA, 17 nt, Human
gaauccccucccuguca

SEQ ID NO: 3808443 - RNA, 20 nt, Human
gaaucccuagacuuuaggcu

SEQ ID NO: 3808444 - RNA, 17 nt, Human
gaaucccuguguuaauu

SEQ ID NO: 3808445 - RNA, 16 nt, Human
gaaucccuuaacaguu

SEQ ID NO: 3808446 - RNA, 19 nt, Human
gaaucccuuaacaguugua

SEQ ID NO: 3808447 - RNA, 21 nt, Human
gaaucccuuaacaguuguauu

SEQ ID NO: 3808448 - RNA, 19 nt, Human
gaauccgggcuccccuuuc

SEQ ID NO: 3808449 - RNA, 23 nt, Human
gaauccuacacaccuaagggaca

SEQ ID NO: 3808450 - RNA, 15 nt, Human
gaauccuagggccug

SEQ ID NO: 3808451 - RNA, 12 nt, Human
gaauccuggcag

SEQ ID NO: 3808452 - RNA, 13 nt, Human
gaauccuggcagc

SEQ ID NO: 3808453 - RNA, 16 nt, Human
gaauccuggcagccca

SEQ ID NO: 3808454 - RNA, 22 nt, Human
gaauccugucgauuagacugga

SEQ ID NO: 3808455 - RNA, 16 nt, Human
gaauccuuccauucca

SEQ ID NO: 3808456 - RNA, 14 nt, Human
gaauccuuugccug

SEQ ID NO: 3808457 - RNA, 13 nt, Human
gaauccuuuugua

SEQ ID NO: 3808458 - RNA, 19 nt, Human
gaaucgaggaaccagagcc

SEQ ID NO: 3808459 - RNA, 14 nt, Human
gaaucgcuucucuu

SEQ ID NO: 3808460 - RNA, 12 nt, Human
gaaucuaccaac

SEQ ID NO: 3808461 - RNA, 16 nt, Human
gaaucuacccaaagga

SEQ ID NO: 3808462 - RNA, 17 nt, Human
gaaucuacccaaaggau

SEQ ID NO: 3808463 - RNA, 18 nt, Human
gaaucuacccccagaucc

SEQ ID NO: 3808464 - RNA, 14 nt, Human
gaaucuacuuaacc

SEQ ID NO: 3808465 - RNA, 16 nt, Human
gaaucuagaagaaaug

SEQ ID NO: 3808466 - RNA, 17 nt, Human
gaaucuagaagaaauga

SEQ ID NO: 3808467 - RNA, 18 nt, Human
gaaucuagggagggggaa

SEQ ID NO: 3808468 - RNA, 15 nt, Human
gaaucuaugccaaag

SEQ ID NO: 3808469 - RNA, 13 nt, Human
gaaucuauuuaag

SEQ ID NO: 3808470 - RNA, 17 nt, Human
gaaucuauuuucuaugu

SEQ ID NO: 3808471 - RNA, 21 nt, Human
gaaucuauuuucuauguacua

SEQ ID NO: 3808472 - RNA, 16 nt, Human
gaaucucaaauaacua

SEQ ID NO: 3808473 - RNA, 21 nt, Human
gaaucucaacaugucuccuac

SEQ ID NO: 3808474 - RNA, 18 nt, Human
gaaucucauaauuuauac

SEQ ID NO: 3808475 - RNA, 18 nt, Human
gaaucucuuuuugcuuuc

SEQ ID NO: 3808476 - RNA, 17 nt, Human
gaaucugauuuuuauga

SEQ ID NO: 3808477 - RNA, 15 nt, Human
gaaucugcaauucaa

SEQ ID NO: 3808478 - RNA, 13 nt, Human
gaaucugcucacu

SEQ ID NO: 3808479 - RNA, 12 nt, Human
gaaucuggagac

SEQ ID NO: 3808480 - RNA, 18 nt, Human
gaaucuggagaccaggga

SEQ ID NO: 3808481 - RNA, 22 nt, Human
gaaucuggagaccagggagccu

SEQ ID NO: 3808482 - RNA, 18 nt, Human
gaaucuguaugauucuau

SEQ ID NO: 3808483 - RNA, 23 nt, Human
gaaucugucucccaguuaugaau

SEQ ID NO: 3808484 - RNA, 20 nt, Human
gaaucuuguuuugaaaauaa

SEQ ID NO: 3808485 - RNA, 19 nt, Human
gaaucuuuaaaagaugcuu

SEQ ID NO: 3808486 - RNA, 19 nt, Human
gaaucuuuauugagaaaga

SEQ ID NO: 3808487 - RNA, 20 nt, Human
gaaucuuuccaauaaaccag

SEQ ID NO: 3808488 - RNA, 19 nt, Human
gaaucuuuguaccaaaauu

SEQ ID NO: 3808489 - RNA, 20 nt, Human
gaaugaaaaaugaaagauga

SEQ ID NO: 3808490 - RNA, 15 nt, Human
gaaugaaaaauuuaa

SEQ ID NO: 3808491 - RNA, 12 nt, Human
gaaugaaaauaa

SEQ ID NO: 3808492 - RNA, 16 nt, Human
gaaugaaaauuguaug

SEQ ID NO: 3808493 - RNA, 12 nt, Human
gaaugaaagagu

SEQ ID NO: 3808494 - RNA, 14 nt, Human
gaaugaaagaguaa

SEQ ID NO: 3808495 - RNA, 15 nt, Human
gaaugaaagcuguuc

SEQ ID NO: 3808496 - RNA, 14 nt, Human
gaaugaaagggccc

SEQ ID NO: 3808497 - RNA, 19 nt, Human
gaaugaaagggcccagaga

SEQ ID NO: 3808498 - RNA, 21 nt, Human
gaaugaaagggcccagagagg

SEQ ID NO: 3808499 - RNA, 21 nt, Human
gaaugaaagucuugugacuag

SEQ ID NO: 3808500 - RNA, 23 nt, Human
gaaugaaauccugcuucagugua

SEQ ID NO: 3808501 - RNA, 20 nt, Human
gaaugaacacucuuuugcuu

SEQ ID NO: 3808502 - RNA, 23 nt, Human
gaaugaaccacaucuugcucugc

SEQ ID NO: 3808503 - RNA, 17 nt, Human
gaaugaaccuucuggcc

SEQ ID NO: 3808504 - RNA, 21 nt, Human
gaaugaagauaccaucagcaa

SEQ ID NO: 3808505 - RNA, 17 nt, Human
gaaugaagauacugaaa

SEQ ID NO: 3808506 - RNA, 18 nt, Human
gaaugaaugcuguauaug

SEQ ID NO: 3808507 - RNA, 12 nt, Human
gaaugaauuuca

SEQ ID NO: 3808508 - RNA, 16 nt, Human
gaaugaccuuguaaug

SEQ ID NO: 3808509 - RNA, 16 nt, Human
gaaugagacuggcuug

SEQ ID NO: 3808510 - RNA, 20 nt, Human
gaaugagagacacacugaag

SEQ ID NO: 3808511 - RNA, 14 nt, Human
gaaugagaguguga

SEQ ID NO: 3808512 - RNA, 12 nt, Human
gaaugagcccag

SEQ ID NO: 3808513 - RNA, 16 nt, Human
gaaugagcccagagaa

SEQ ID NO: 3808514 - RNA, 11 nt, Human
gaaugagccuc

SEQ ID NO: 3808515 - RNA, 23 nt, Human
gaaugaggaaaauucuuaaaagg

SEQ ID NO: 3808516 - RNA, 23 nt, Human
gaaugaggaauaauaaguuaaac

SEQ ID NO: 3808517 - RNA, 18 nt, Human
gaaugaggcuugcugaga

SEQ ID NO: 3808518 - RNA, 17 nt, Human
gaaugagggggcucagu

SEQ ID NO: 3808519 - RNA, 14 nt, Human
gaaugaggucccag

SEQ ID NO: 3808520 - RNA, 18 nt, Human
gaaugaggucccaggcag

SEQ ID NO: 3808521 - RNA, 19 nt, Human
gaaugaggucccaggcaga

SEQ ID NO: 3808522 - RNA, 14 nt, Human
gaaugagugugcau

SEQ ID NO: 3808523 - RNA, 16 nt, Human
gaaugaguuucuuaga

SEQ ID NO: 3808524 - RNA, 18 nt, Human
gaaugaguuucuuagacu

SEQ ID NO: 3808525 - RNA, 23 nt, Human
gaaugaugcucaaaaucuuucca

SEQ ID NO: 3808526 - RNA, 21 nt, Human
gaaugaugguuuccaauuuca

SEQ ID NO: 3808527 - RNA, 18 nt, Human
gaaugauuuuucuuuaca

SEQ ID NO: 3808528 - RNA, 19 nt, Human
gaaugcaaccaagucacac

SEQ ID NO: 3808529 - RNA, 20 nt, Human
gaaugcacaaacagaggccg

SEQ ID NO: 3808530 - RNA, 21 nt, Human
gaaugcacaaacagaggccgc

SEQ ID NO: 3808531 - RNA, 18 nt, Human
gaaugcacaagaauggau

SEQ ID NO: 3808532 - RNA, 21 nt, Human
gaaugcacaagaauggaucac

SEQ ID NO: 3808533 - RNA, 17 nt, Human
gaaugcacagauauacu

SEQ ID NO: 3808534 - RNA, 21 nt, Human
gaaugcaccauacucaugcau

SEQ ID NO: 3808535 - RNA, 12 nt, Human
gaaugcauugau

SEQ ID NO: 3808536 - RNA, 21 nt, Human
gaaugcauugauauugugaac

SEQ ID NO: 3808537 - RNA, 20 nt, Human
gaaugccagugugcugaugg

SEQ ID NO: 3808538 - RNA, 23 nt, Human
gaaugccauagucaaagagaguu

SEQ ID NO: 3808539 - RNA, 17 nt, Human
gaaugcccacaggcaaa

SEQ ID NO: 3808540 - RNA, 14 nt, Human
gaaugcccucaggg

SEQ ID NO: 3808541 - RNA, 18 nt, Human
gaaugccgcgauggguca

SEQ ID NO: 3808542 - RNA, 13 nt, Human
gaaugccuccucc

SEQ ID NO: 3808543 - RNA, 14 nt, Human
gaaugccuccugug

SEQ ID NO: 3808544 - RNA, 16 nt, Human
gaaugccugagugccu

SEQ ID NO: 3808545 - RNA, 16 nt, Human
gaaugcuaacaguuca

SEQ ID NO: 3808546 - RNA, 22 nt, Human
gaaugcucaaguuuuucagaaa

SEQ ID NO: 3808547 - RNA, 13 nt, Human
gaaugcugaaacc

SEQ ID NO: 3808548 - RNA, 15 nt, Human
gaaugcugaaaccaa

SEQ ID NO: 3808549 - RNA, 21 nt, Human
gaaugcugcaggacuugagaa

SEQ ID NO: 3808550 - RNA, 14 nt, Human
gaaugcugggacuc

SEQ ID NO: 3808551 - RNA, 19 nt, Human
gaaugcugggacucagccu

SEQ ID NO: 3808552 - RNA, 13 nt, Human
gaaugcuguacau

SEQ ID NO: 3808553 - RNA, 21 nt, Human
gaaugcuuaaagaauucaaau

SEQ ID NO: 3808554 - RNA, 12 nt, Human
gaaugcuucuca

SEQ ID NO: 3808555 - RNA, 18 nt, Human
gaaugcuucugacuucau

SEQ ID NO: 3808556 - RNA, 16 nt, Human
gaaugcuugaaaaaug

SEQ ID NO: 3808557 - RNA, 19 nt, Human
gaaugcuuggaauaucugc

SEQ ID NO: 3808558 - RNA, 13 nt, Human
gaaugcuuuagga

SEQ ID NO: 3808559 - RNA, 18 nt, Human
gaauggaagguggagaag

SEQ ID NO: 3808560 - RNA, 15 nt, Human
gaauggacauuucua

SEQ ID NO: 3808561 - RNA, 15 nt, Human
gaauggaggggcaga

SEQ ID NO: 3808562 - RNA, 20 nt, Human
gaauggauuggauuauuuaa

SEQ ID NO: 3808563 - RNA, 18 nt, Human
gaauggcaauguuuugcu

SEQ ID NO: 3808564 - RNA, 17 nt, Human
gaauggcacagcccaaa

SEQ ID NO: 3808565 - RNA, 22 nt, Human
gaauggcacagcccaaagaagg

SEQ ID NO: 3808566 - RNA, 13 nt, Human
gaauggcagcugc

SEQ ID NO: 3808567 - RNA, 16 nt, Human
gaauggcagcugccac

SEQ ID NO: 3808568 - RNA, 18 nt, Human
gaauggccuccucccuua

SEQ ID NO: 3808569 - RNA, 21 nt, Human
gaauggccugccuugaagcca

SEQ ID NO: 3808570 - RNA, 17 nt, Human
gaauggcuauguuuuua

SEQ ID NO: 3808571 - RNA, 17 nt, Human
gaauggcuuuguauaga

SEQ ID NO: 3808572 - RNA, 13 nt, Human
gaaugggaaaaga

SEQ ID NO: 3808573 - RNA, 17 nt, Human
gaaugggaucaugaaag

SEQ ID NO: 3808574 - RNA, 17 nt, Human
gaaugggcuguuuuugg

SEQ ID NO: 3808575 - RNA, 20 nt, Human
gaaugguacaugucuuccau

SEQ ID NO: 3808576 - RNA, 13 nt, Human
gaaugguagucua

SEQ ID NO: 3808577 - RNA, 13 nt, Human
gaaugguccaggg

SEQ ID NO: 3808578 - RNA, 21 nt, Human
gaauggugugggagagggaug

SEQ ID NO: 3808579 - RNA, 17 nt, Human
gaaugguuauaaaagug

SEQ ID NO: 3808580 - RNA, 19 nt, Human
gaaugguuccaugccugag

SEQ ID NO: 3808581 - RNA, 22 nt, Human
gaaugguuccaugccugagggu

SEQ ID NO: 3808582 - RNA, 22 nt, Human
gaauguaaaagaacuuacugau

SEQ ID NO: 3808583 - RNA, 13 nt, Human
gaauguaaauguc

SEQ ID NO: 3808584 - RNA, 15 nt, Human
gaauguaacugcuga

SEQ ID NO: 3808585 - RNA, 18 nt, Human
gaauguaacugcugaaaa

SEQ ID NO: 3808586 - RNA, 18 nt, Human
gaauguaagaacuacaaa

SEQ ID NO: 3808587 - RNA, 14 nt, Human
gaauguacguccag

SEQ ID NO: 3808588 - RNA, 14 nt, Human
gaauguacucuguu

SEQ ID NO: 3808589 - RNA, 22 nt, Human
gaauguaggcuggcuuucagag

SEQ ID NO: 3808590 - RNA, 17 nt, Human
gaauguauaguauuuga

SEQ ID NO: 3808591 - RNA, 19 nt, Human
gaauguauaguauuugaaa

SEQ ID NO: 3808592 - RNA, 16 nt, Human
gaauguaucaggaaau

SEQ ID NO: 3808593 - RNA, 17 nt, Human
gaauguaucaggaaaua

SEQ ID NO: 3808594 - RNA, 14 nt, Human
gaauguaucuguga

SEQ ID NO: 3808595 - RNA, 17 nt, Human
gaauguaucugugaagu

SEQ ID NO: 3808596 - RNA, 11 nt, Human
gaauguaugua

SEQ ID NO: 3808597 - RNA, 17 nt, Human
gaauguauguaaugugu

SEQ ID NO: 3808598 - RNA, 16 nt, Human
gaauguauuauucugc

SEQ ID NO: 3808599 - RNA, 17 nt, Human
gaauguauuauucugca

SEQ ID NO: 3808600 - RNA, 18 nt, Human
gaauguauuauucugcag

SEQ ID NO: 3808601 - RNA, 15 nt, Human
gaauguauuguaccu

SEQ ID NO: 3808602 - RNA, 16 nt, Human
gaauguauuuauuugg

SEQ ID NO: 3808603 - RNA, 19 nt, Human
gaaugucagauuccuuucc

SEQ ID NO: 3808604 - RNA, 21 nt, Human
gaaugucaguuguuauuuauu

SEQ ID NO: 3808605 - RNA, 16 nt, Human
gaaugucuuuugaaua

SEQ ID NO: 3808606 - RNA, 14 nt, Human
gaaugugaaagcac

SEQ ID NO: 3808607 - RNA, 14 nt, Human
gaaugugaagccuu

SEQ ID NO: 3808608 - RNA, 15 nt, Human
gaaugugaagccuuc

SEQ ID NO: 3808609 - RNA, 20 nt, Human
gaaugugaagccuuccccuu

SEQ ID NO: 3808610 - RNA, 19 nt, Human
gaaugugauuuuaaagagu

SEQ ID NO: 3808611 - RNA, 21 nt, Human
gaaugugggcacuggcccagg

SEQ ID NO: 3808612 - RNA, 13 nt, Human
gaauguguuucaa

SEQ ID NO: 3808613 - RNA, 18 nt, Human
gaauguguuucaaacugu

SEQ ID NO: 3808614 - RNA, 21 nt, Human
gaauguguuucacaguuugaa

SEQ ID NO: 3808615 - RNA, 16 nt, Human
gaauguuaaagucagu

SEQ ID NO: 3808616 - RNA, 18 nt, Human
gaauguuaaauaaauugu

SEQ ID NO: 3808617 - RNA, 23 nt, Human
gaauguuaauuuuuugguacaaa

SEQ ID NO: 3808618 - RNA, 14 nt, Human
gaauguuagagcac

SEQ ID NO: 3808619 - RNA, 23 nt, Human
gaauguuagaguaaugaaaugga

SEQ ID NO: 3808620 - RNA, 19 nt, Human
gaauguucugacauuaaca

SEQ ID NO: 3808621 - RNA, 20 nt, Human
gaauguucugacauuaacag

SEQ ID NO: 3808622 - RNA, 18 nt, Human
gaauguugguuuacuuuc

SEQ ID NO: 3808623 - RNA, 15 nt, Human
gaauguuucauuugc

SEQ ID NO: 3808624 - RNA, 23 nt, Human
gaauguuucuuaacuauaaauau

SEQ ID NO: 3808625 - RNA, 15 nt, Human
gaauguuugccucug

SEQ ID NO: 3808626 - RNA, 16 nt, Human
gaauguuuuaaauucu

SEQ ID NO: 3808627 - RNA, 14 nt, Human
gaauguuuuucuaa

SEQ ID NO: 3808628 - RNA, 14 nt, Human
gaauuaaaaaagca

SEQ ID NO: 3808629 - RNA, 12 nt, Human
gaauuaaaacuu

SEQ ID NO: 3808630 - RNA, 19 nt, Human
gaauuaaaacuucuuaaau

SEQ ID NO: 3808631 - RNA, 22 nt, Human
gaauuaaaacuucuuaaauauc

SEQ ID NO: 3808632 - RNA, 11 nt, Human
gaauuaaaagu

SEQ ID NO: 3808633 - RNA, 12 nt, Human
gaauuaaauaaa

SEQ ID NO: 3808634 - RNA, 20 nt, Human
gaauuaaauaaacccuuccu

SEQ ID NO: 3808635 - RNA, 21 nt, Human
gaauuaaauuaggaauaaaua

SEQ ID NO: 3808636 - RNA, 15 nt, Human
gaauuaacacaugau

SEQ ID NO: 3808637 - RNA, 15 nt, Human
gaauuaaccuggugc

SEQ ID NO: 3808638 - RNA, 17 nt, Human
gaauuaagauacaaauu

SEQ ID NO: 3808639 - RNA, 15 nt, Human
gaauuaauagcuuuu

SEQ ID NO: 3808640 - RNA, 21 nt, Human
gaauuaauaucccuacaugua

SEQ ID NO: 3808641 - RNA, 22 nt, Human
gaauuaccuuagauuagcucug

SEQ ID NO: 3808642 - RNA, 15 nt, Human
gaauuacgugcucug

SEQ ID NO: 3808643 - RNA, 14 nt, Human
gaauuacuaacuuc

SEQ ID NO: 3808644 - RNA, 13 nt, Human
gaauuauaacugu

SEQ ID NO: 3808645 - RNA, 18 nt, Human
gaauuauaauuaguuccu

SEQ ID NO: 3808646 - RNA, 15 nt, Human
gaauuaucagcaaag

SEQ ID NO: 3808647 - RNA, 16 nt, Human
gaauuaucagcaaaga

SEQ ID NO: 3808648 - RNA, 17 nt, Human
gaauuaucagcaaagaa

SEQ ID NO: 3808649 - RNA, 20 nt, Human
gaauuaucuugguugaaaau

SEQ ID NO: 3808650 - RNA, 14 nt, Human
gaauuaugaaacuu

SEQ ID NO: 3808651 - RNA, 19 nt, Human
gaauuauuacaguguuuau

SEQ ID NO: 3808652 - RNA, 12 nt, Human
gaauuauugaca

SEQ ID NO: 3808653 - RNA, 14 nt, Human
gaauuauugacacu

SEQ ID NO: 3808654 - RNA, 21 nt, Human
gaauuauuucugucacaguaa

SEQ ID NO: 3808655 - RNA, 18 nt, Human
gaauuauuuuaaaagaua

SEQ ID NO: 3808656 - RNA, 18 nt, Human
gaauucaaacuggggccu

SEQ ID NO: 3808657 - RNA, 22 nt, Human
gaauucaaacuggggccuccag

SEQ ID NO: 3808658 - RNA, 23 nt, Human
gaauucaaacuggggccuccaga

SEQ ID NO: 3808659 - RNA, 19 nt, Human
gaauucaccacagacuuua

SEQ ID NO: 3808660 - RNA, 16 nt, Human
gaauucagauuuuaaa

SEQ ID NO: 3808661 - RNA, 14 nt, Human
gaauucagcugccc

SEQ ID NO: 3808662 - RNA, 20 nt, Human
gaauucauucacucaacaaa

SEQ ID NO: 3808663 - RNA, 21 nt, Human
gaauucauucuggucucucua

SEQ ID NO: 3808664 - RNA, 15 nt, Human
gaauuccaaagcaaa

SEQ ID NO: 3808665 - RNA, 12 nt, Human
gaauuccaagga

SEQ ID NO: 3808666 - RNA, 16 nt, Human
gaauuccaaggaguuc

SEQ ID NO: 3808667 - RNA, 17 nt, Human
gaauuccauuugaggau

SEQ ID NO: 3808668 - RNA, 20 nt, Human
gaauucccucacucgucucc

SEQ ID NO: 3808669 - RNA, 21 nt, Human
gaauucccucacucgucuccc

SEQ ID NO: 3808670 - RNA, 18 nt, Human
gaauuccuaacuuuucaa

SEQ ID NO: 3808671 - RNA, 14 nt, Human
gaauucuagugcug

SEQ ID NO: 3808672 - RNA, 15 nt, Human
gaauucuauuugcug

SEQ ID NO: 3808673 - RNA, 17 nt, Human
gaauucucuaguuugau

SEQ ID NO: 3808674 - RNA, 20 nt, Human
cuaugugauuuuaacucugu

SEQ ID NO: 3808675 - RNA, 22 nt, Human
cuaugugauuuuaacucugucu

SEQ ID NO: 3808676 - RNA, 19 nt, Human
cuauguggaaguggggcgg

SEQ ID NO: 3808677 - RNA, 19 nt, Human
cuauguggauuuuuuccua

SEQ ID NO: 3808678 - RNA, 14 nt, Human
cuaugugugugcuu

SEQ ID NO: 3808679 - RNA, 14 nt, Human
cuauguguuuuucu

SEQ ID NO: 3808680 - RNA, 22 nt, Human
cuauguguuuuucucauauuug

SEQ ID NO: 3808681 - RNA, 21 nt, Human
cuauguuaauauuuuaggugu

SEQ ID NO: 3808682 - RNA, 16 nt, Human
cuauguuacuauuuuc

SEQ ID NO: 3808683 - RNA, 18 nt, Human
cuauguuacuauuuucua

SEQ ID NO: 3808684 - RNA, 22 nt, Human
cuauguuacuauuuucuacaau

SEQ ID NO: 3808685 - RNA, 16 nt, Human
cuauguugcccaggca

SEQ ID NO: 3808686 - RNA, 22 nt, Human
cuauguugcccaggcaggucuu

SEQ ID NO: 3808687 - RNA, 18 nt, Human
cuauguugugguccauca

SEQ ID NO: 3808688 - RNA, 20 nt, Human
cuauguuuacaaauggacau

SEQ ID NO: 3808689 - RNA, 11 nt, Human
cuauguuuacu

SEQ ID NO: 3808690 - RNA, 14 nt, Human
cuauguuucaucuu

SEQ ID NO: 3808691 - RNA, 13 nt, Human
cuauguuuuacca

SEQ ID NO: 3808692 - RNA, 22 nt, Human
cuauguuuuuguucaaagccag

SEQ ID NO: 3808693 - RNA, 13 nt, Human
cuauuaaaacuca

SEQ ID NO: 3808694 - RNA, 14 nt, Human
cuauuaaaagacuc

SEQ ID NO: 3808695 - RNA, 15 nt, Human
cuauuaaaagacuca

SEQ ID NO: 3808696 - RNA, 21 nt, Human
cuauuaaacaugcuguacaua

SEQ ID NO: 3808697 - RNA, 15 nt, Human
cuauuaaaggaauaa

SEQ ID NO: 3808698 - RNA, 21 nt, Human
cuauuaaagugcuaagguucu

SEQ ID NO: 3808699 - RNA, 23 nt, Human
cuauuaaagugcuaagguucuaa

SEQ ID NO: 3808700 - RNA, 22 nt, Human
cuauuaaauaguuauauaauuc

SEQ ID NO: 3808701 - RNA, 20 nt, Human
cuauuaacaauuaauugucu

SEQ ID NO: 3808702 - RNA, 23 nt, Human
cuauuaagauuuccaagugccaa

SEQ ID NO: 3808703 - RNA, 16 nt, Human
cuauuaagcaguaaaa

SEQ ID NO: 3808704 - RNA, 20 nt, Human
cuauuaagcaguaaaaacug

SEQ ID NO: 3808705 - RNA, 21 nt, Human
cuauuaagcaguaaaaacugu

SEQ ID NO: 3808706 - RNA, 21 nt, Human
cuauuaaggugauauauuuaa

SEQ ID NO: 3808707 - RNA, 14 nt, Human
cuauuaauauaugu

SEQ ID NO: 3808708 - RNA, 12 nt, Human
cuauuaauauuu

SEQ ID NO: 3808709 - RNA, 13 nt, Human
cuauuaauauuug

SEQ ID NO: 3808710 - RNA, 17 nt, Human
cuauuacauuuucagug

SEQ ID NO: 3808711 - RNA, 18 nt, Human
cuauuacgaaguucaaga

SEQ ID NO: 3808712 - RNA, 23 nt, Human
cuauuacgaaguucaagaucaaa

SEQ ID NO: 3808713 - RNA, 23 nt, Human
cuauuacugucugguuuuaacaa

SEQ ID NO: 3808714 - RNA, 14 nt, Human
cuauuaguguuaua

SEQ ID NO: 3808715 - RNA, 18 nt, Human
cuauuaguguuauaugaa

SEQ ID NO: 3808716 - RNA, 21 nt, Human
cuauuauaauuuaaugcaugu

SEQ ID NO: 3808717 - RNA, 18 nt, Human
cuauuauagccacauccc

SEQ ID NO: 3808718 - RNA, 19 nt, Human
cuauuaucugucagcugca

SEQ ID NO: 3808719 - RNA, 15 nt, Human
cuauuauggaaaacu

SEQ ID NO: 3808720 - RNA, 18 nt, Human
cuauuauggaaaacugug

SEQ ID NO: 3808721 - RNA, 22 nt, Human
cuauucaagguggccaaauuau

SEQ ID NO: 3808722 - RNA, 13 nt, Human
cuauucagacaag

SEQ ID NO: 3808723 - RNA, 23 nt, Human
cuauucaguaauaacucuacccu

SEQ ID NO: 3808724 - RNA, 19 nt, Human
cuauucaguggcgagaaau

SEQ ID NO: 3808725 - RNA, 18 nt, Human
cuauucaguucccagaau

SEQ ID NO: 3808726 - RNA, 21 nt, Human
cuauucaguucccagaaucaa

SEQ ID NO: 3808727 - RNA, 11 nt, Human
cuauucaguug

SEQ ID NO: 3808728 - RNA, 12 nt, Human
cuauuccaauaa

SEQ ID NO: 3808729 - RNA, 23 nt, Human
cuauuccagcucauucauuuuau

SEQ ID NO: 3808730 - RNA, 23 nt, Human
cuauuccccacccuccccuuccc

SEQ ID NO: 3808731 - RNA, 17 nt, Human
cuauuccgagcccuuag

SEQ ID NO: 3808732 - RNA, 17 nt, Human
cuauuccuguaaugaaa

SEQ ID NO: 3808733 - RNA, 12 nt, Human
cuauuccuuucc

SEQ ID NO: 3808734 - RNA, 16 nt, Human
cuauuccuuucccuuc

SEQ ID NO: 3808735 - RNA, 17 nt, Human
cuauucgaaugaaaaga

SEQ ID NO: 3808736 - RNA, 21 nt, Human
cuauucgccacacaguauuuu

SEQ ID NO: 3808737 - RNA, 23 nt, Human
cuauucuagccugcauugagcuu

SEQ ID NO: 3808738 - RNA, 21 nt, Human
cuauucucuccaaaaaugcac

SEQ ID NO: 3808739 - RNA, 14 nt, Human
cuauucucuccuca

SEQ ID NO: 3808740 - RNA, 12 nt, Human
cuauucucucuu

SEQ ID NO: 3808741 - RNA, 14 nt, Human
cuauucugucccua

SEQ ID NO: 3808742 - RNA, 20 nt, Human
cuauucuugauguaaaaucu

SEQ ID NO: 3808743 - RNA, 17 nt, Human
cuauugacaagucauuu

SEQ ID NO: 3808744 - RNA, 14 nt, Human
cuauugacaauaaa

SEQ ID NO: 3808745 - RNA, 18 nt, Human
cuauugacaauaaaauau

SEQ ID NO: 3808746 - RNA, 22 nt, Human
cuauugacaucagcaucaccua

SEQ ID NO: 3808747 - RNA, 16 nt, Human
cuauugacuucaauga

SEQ ID NO: 3808748 - RNA, 18 nt, Human
cuauugauacucuuucua

SEQ ID NO: 3808749 - RNA, 21 nt, Human
cuauugauauaaauaaaacau

SEQ ID NO: 3808750 - RNA, 17 nt, Human
cuauugauguacagucu

SEQ ID NO: 3808751 - RNA, 21 nt, Human
cuauugcaaagguuccaacug

SEQ ID NO: 3808752 - RNA, 20 nt, Human
cuauugcagcaauuaaaaau

SEQ ID NO: 3808753 - RNA, 17 nt, Human
cuauugcagcugggaga

SEQ ID NO: 3808754 - RNA, 17 nt, Human
cuauugccucugagagc

SEQ ID NO: 3808755 - RNA, 13 nt, Human
cuauuguaaauau

SEQ ID NO: 3808756 - RNA, 20 nt, Human
cuauuguaagauaaaaaagc

SEQ ID NO: 3808757 - RNA, 16 nt, Human
cuauuguagcauuucu

SEQ ID NO: 3808758 - RNA, 13 nt, Human
cuauugugauuug

SEQ ID NO: 3808759 - RNA, 18 nt, Human
cuauugugauuugacugu

SEQ ID NO: 3808760 - RNA, 22 nt, Human
cuauuguuuauucuuuuuaaag

SEQ ID NO: 3808761 - RNA, 21 nt, Human
cuauuguuucuuuaagaaagu

SEQ ID NO: 3808762 - RNA, 15 nt, Human
cuauuuaaaaaagag

SEQ ID NO: 3808763 - RNA, 15 nt, Human
cuauuuaaauucuuu

SEQ ID NO: 3808764 - RNA, 15 nt, Human
cuauuuaacuugagg

SEQ ID NO: 3808765 - RNA, 14 nt, Human
cuauuuaagaugug

SEQ ID NO: 3808766 - RNA, 12 nt, Human
cuauuuaauuuu

SEQ ID NO: 3808767 - RNA, 13 nt, Human
cuauuuagcauga

SEQ ID NO: 3808768 - RNA, 18 nt, Human
cuauuuagcaugacaagc

SEQ ID NO: 3808769 - RNA, 17 nt, Human
cuauuuaguuuuuguaa

SEQ ID NO: 3808770 - RNA, 16 nt, Human
cuauuuaucuguguuu

SEQ ID NO: 3808771 - RNA, 20 nt, Human
cuauuuaugccuugaugauu

SEQ ID NO: 3808772 - RNA, 22 nt, Human
cuauuuaugugauccuuuugga

SEQ ID NO: 3808773 - RNA, 22 nt, Human
cuauuuauuaaguucucaaugu

SEQ ID NO: 3808774 - RNA, 21 nt, Human
cuauuuauuaauauuuaacau

SEQ ID NO: 3808775 - RNA, 19 nt, Human
cuauuuauugacucugggu

SEQ ID NO: 3808776 - RNA, 14 nt, Human
cuauuuauuuacaa

SEQ ID NO: 3808777 - RNA, 15 nt, Human
cuauuuauuuacaaa

SEQ ID NO: 3808778 - RNA, 15 nt, Human
cuauuuauuuacuga

SEQ ID NO: 3808779 - RNA, 18 nt, Human
cuauuuauuuacugagcu

SEQ ID NO: 3808780 - RNA, 16 nt, Human
cuauuuauuuuccuaa

SEQ ID NO: 3808781 - RNA, 19 nt, Human
cuauuuauuuuccuaaaga

SEQ ID NO: 3808782 - RNA, 14 nt, Human
cuauuuauuuuuac

SEQ ID NO: 3808783 - RNA, 14 nt, Human
cuauuucacuggag

SEQ ID NO: 3808784 - RNA, 16 nt, Human
cuauuucagugccaau

SEQ ID NO: 3808785 - RNA, 22 nt, Human
cuauuuccccaggggaaaauga

SEQ ID NO: 3808786 - RNA, 18 nt, Human
cuauuucccccuuucuuc

SEQ ID NO: 3808787 - RNA, 21 nt, Human
cuauuucccccuuucuuccuc

SEQ ID NO: 3808788 - RNA, 16 nt, Human
cuauuucuauauuuuc

SEQ ID NO: 3808789 - RNA, 18 nt, Human
cuauuucuauauuuucau

SEQ ID NO: 3808790 - RNA, 15 nt, Human
cuauuucuccuccau

SEQ ID NO: 3808791 - RNA, 16 nt, Human
cuauuucuccuccaug

SEQ ID NO: 3808792 - RNA, 22 nt, Human
cuauuucugggucuuuugcuac

SEQ ID NO: 3808793 - RNA, 11 nt, Human
cuauuucuuga

SEQ ID NO: 3808794 - RNA, 19 nt, Human
cuauuugaaaugaauuccu

SEQ ID NO: 3808795 - RNA, 22 nt, Human
cuauuugccaugggcuucacug

SEQ ID NO: 3808796 - RNA, 18 nt, Human
cuauuugcuuauuuaaua

SEQ ID NO: 3808797 - RNA, 22 nt, Human
cuauuuguauauauacauaaca

SEQ ID NO: 3808798 - RNA, 22 nt, Human
cuauuuguugaugcuuguguca

SEQ ID NO: 3808799 - RNA, 23 nt, Human
cuauuuguuuucuucuguauguu

SEQ ID NO: 3808800 - RNA, 14 nt, Human
cuauuuuaaaauaa

SEQ ID NO: 3808801 - RNA, 22 nt, Human
cuauuuuaaaauaaauuaguug

SEQ ID NO: 3808802 - RNA, 15 nt, Human
cuauuuuacugucuu

SEQ ID NO: 3808803 - RNA, 17 nt, Human
cuauuuuacugucuuaa

SEQ ID NO: 3808804 - RNA, 21 nt, Human
cuauuuuacugucuuaauuaa

SEQ ID NO: 3808805 - RNA, 12 nt, Human
cuauuuucagaa

SEQ ID NO: 3808806 - RNA, 14 nt, Human
cuauuuucagaauc

SEQ ID NO: 3808807 - RNA, 15 nt, Human
cuauuuucagaaucu

SEQ ID NO: 3808808 - RNA, 22 nt, Human
cuauuuucagaugugaaccauu

SEQ ID NO: 3808809 - RNA, 21 nt, Human
cuauuuuccaggcuucugcug

SEQ ID NO: 3808810 - RNA, 16 nt, Human
cuauuuucucugauac

SEQ ID NO: 3808811 - RNA, 17 nt, Human
cuauuuucucugauacu

SEQ ID NO: 3808812 - RNA, 18 nt, Human
cuauuuugaaaaauuccu

SEQ ID NO: 3808813 - RNA, 12 nt, Human
cuauuuugaagu

SEQ ID NO: 3808814 - RNA, 15 nt, Human
cuauuuugaugcagc

SEQ ID NO: 3808815 - RNA, 19 nt, Human
cuauuuuguaaacucaaaa

SEQ ID NO: 3808816 - RNA, 14 nt, Human
cuauuuuuaaauaa

SEQ ID NO: 3808817 - RNA, 23 nt, Human
cuauuuuuaaauaauuuccuaca

SEQ ID NO: 3808818 - RNA, 20 nt, Human
cuauuuuuacuaaucuuucu

SEQ ID NO: 3808819 - RNA, 14 nt, Human
cuauuuuucagaau

SEQ ID NO: 3808820 - RNA, 17 nt, Human
cuauuuuucauccuaaa

SEQ ID NO: 3808821 - RNA, 12 nt, Human
cuauuuuucuaa

SEQ ID NO: 3808822 - RNA, 20 nt, Human
cuauuuuucuaacuacaaag

SEQ ID NO: 3808823 - RNA, 21 nt, Human
gaagggcuuggacucaagcaa

SEQ ID NO: 3808824 - RNA, 23 nt, Human
gaaggggcccugguccuuccagg

SEQ ID NO: 3808825 - RNA, 20 nt, Human
gaagggggccaugaggccuc

SEQ ID NO: 3808826 - RNA, 22 nt, Human
gaagggggccaugaggccucag

SEQ ID NO: 3808827 - RNA, 16 nt, Human
gaagggggcugggaca

SEQ ID NO: 3808828 - RNA, 23 nt, Human
gaagggggguugcaguggagagg

SEQ ID NO: 3808829 - RNA, 17 nt, Human
gaagggggucaaagcaa

SEQ ID NO: 3808830 - RNA, 17 nt, Human
gaagggguuggauugca

SEQ ID NO: 3808831 - RNA, 17 nt, Human
gaaggguaaacaauaua

SEQ ID NO: 3808832 - RNA, 14 nt, Human
gaaggguccuuccc

SEQ ID NO: 3808833 - RNA, 21 nt, Human
gaaggguuuguggcugggggc

SEQ ID NO: 3808834 - RNA, 20 nt, Human
gaagguacugucaugggcua

SEQ ID NO: 3808835 - RNA, 16 nt, Human
gaagguagaauguuuu

SEQ ID NO: 3808836 - RNA, 18 nt, Human
gaaggucggaggcuuggg

SEQ ID NO: 3808837 - RNA, 21 nt, Human
gaaggugaggagcuugaaacc

SEQ ID NO: 3808838 - RNA, 17 nt, Human
gaaggugauaagggaaa

SEQ ID NO: 3808839 - RNA, 17 nt, Human
gaaggugcuggaggugg

SEQ ID NO: 3808840 - RNA, 22 nt, Human
gaaggugucuggacauucagaa

SEQ ID NO: 3808841 - RNA, 22 nt, Human
gaagguuggugaauuucacaag

SEQ ID NO: 3808842 - RNA, 20 nt, Human
gaagguuuacaauuuacaaa

SEQ ID NO: 3808843 - RNA, 16 nt, Human
gaagguuuguauauug

SEQ ID NO: 3808844 - RNA, 13 nt, Human
gaagguuuuaagu

SEQ ID NO: 3808845 - RNA, 14 nt, Human
gaagguuuuugaua

SEQ ID NO: 3808846 - RNA, 19 nt, Human
gaaguaaaagcaaaaaaga

SEQ ID NO: 3808847 - RNA, 15 nt, Human
gaaguaaagaacugc

SEQ ID NO: 3808848 - RNA, 14 nt, Human
gaaguaacuacagu

SEQ ID NO: 3808849 - RNA, 18 nt, Human
gaaguaacuggugauaua

SEQ ID NO: 3808850 - RNA, 19 nt, Human
gaaguaauaugcacacauu

SEQ ID NO: 3808851 - RNA, 22 nt, Human
gaaguaauaugcacacauuuuu

SEQ ID NO: 3808852 - RNA, 16 nt, Human
gaaguacaugaauaca

SEQ ID NO: 3808853 - RNA, 13 nt, Human
gaaguaccagacu

SEQ ID NO: 3808854 - RNA, 19 nt, Human
gaaguacuugccagaaguu

SEQ ID NO: 3808855 - RNA, 13 nt, Human
gaaguaggaagua

SEQ ID NO: 3808856 - RNA, 23 nt, Human
gaaguaggaagugaaaauaggua

SEQ ID NO: 3808857 - RNA, 18 nt, Human
gaaguagggguggcccga

SEQ ID NO: 3808858 - RNA, 23 nt, Human
gaaguagugucuggaucaguaaa

SEQ ID NO: 3808859 - RNA, 18 nt, Human
gaaguaguuaucauguua

SEQ ID NO: 3808860 - RNA, 15 nt, Human
gaaguaguucuguuu

SEQ ID NO: 3808861 - RNA, 14 nt, Human
gaaguauaaagaau

SEQ ID NO: 3808862 - RNA, 14 nt, Human
gaaguauaccugau

SEQ ID NO: 3808863 - RNA, 12 nt, Human
gaaguaugggaa

SEQ ID NO: 3808864 - RNA, 20 nt, Human
gaaguauuauaaauuauguu

SEQ ID NO: 3808865 - RNA, 19 nt, Human
gaaguauuuuuagaauaag

SEQ ID NO: 3808866 - RNA, 21 nt, Human
gaaguauuuuuucaguauuau

SEQ ID NO: 3808867 - RNA, 16 nt, Human
gaagucaaagcaagga

SEQ ID NO: 3808868 - RNA, 16 nt, Human
gaagucaagcucaaca

SEQ ID NO: 3808869 - RNA, 13 nt, Human
gaagucacacagu

SEQ ID NO: 3808870 - RNA, 13 nt, Human
gaagucacagggc

SEQ ID NO: 3808871 - RNA, 18 nt, Human
gaagucacucaauuguuu

SEQ ID NO: 3808872 - RNA, 20 nt, Human
gaagucacucaauuguuuuu

SEQ ID NO: 3808873 - RNA, 13 nt, Human
gaagucagagagg

SEQ ID NO: 3808874 - RNA, 22 nt, Human
gaagucagaucugccuaaggac

SEQ ID NO: 3808875 - RNA, 23 nt, Human
gaagucagaucugccuaaggacu

SEQ ID NO: 3808876 - RNA, 12 nt, Human
gaagucauaugu

SEQ ID NO: 3808877 - RNA, 15 nt, Human
gaagucaucuugcua

SEQ ID NO: 3808878 - RNA, 14 nt, Human
gaaguccaaugugg

SEQ ID NO: 3808879 - RNA, 17 nt, Human
gaaguccccaggcccca

SEQ ID NO: 3808880 - RNA, 18 nt, Human
gaaguccccucuccucca

SEQ ID NO: 3808881 - RNA, 23 nt, Human
gaaguccccucuccuccacauuu

SEQ ID NO: 3808882 - RNA, 18 nt, Human
gaaguccuauggaaaccc

SEQ ID NO: 3808883 - RNA, 24 nt, Human
gaagucguccuuacuccuguggga

SEQ ID NO: 3808884 - RNA, 20 nt, Human
gaagucuaggagcugggagg

SEQ ID NO: 3808885 - RNA, 13 nt, Human
gaagucucagcua

SEQ ID NO: 3808886 - RNA, 18 nt, Human
gaagucucaucuggggag

SEQ ID NO: 3808887 - RNA, 15 nt, Human
gaagucucuuuucuu

SEQ ID NO: 3808888 - RNA, 23 nt, Human
gaagucucuuuuuuuggcccagg

SEQ ID NO: 3808889 - RNA, 11 nt, Human
gaagucugaaa

SEQ ID NO: 3808890 - RNA, 17 nt, Human
gaagucuucuauuuauu

SEQ ID NO: 3808891 - RNA, 11 nt, Human
gaagucuugua

SEQ ID NO: 3808892 - RNA, 12 nt, Human
gaagucuuguau

SEQ ID NO: 3808893 - RNA, 17 nt, Human
gaagucuuucaagaaug

SEQ ID NO: 3808894 - RNA, 18 nt, Human
gaagugacaaggccccag

SEQ ID NO: 3808895 - RNA, 21 nt, Human
gaagugacaaggccccagaga

SEQ ID NO: 3808896 - RNA, 24 nt, Human
gaagugacaaggccccagagacuc

SEQ ID NO: 3808897 - RNA, 12 nt, Human
gaagugacaggg

SEQ ID NO: 3808898 - RNA, 21 nt, Human
gaagugacagggaagcuacag

SEQ ID NO: 3808899 - RNA, 22 nt, Human
gaagugacagggaagcuacagg

SEQ ID NO: 3808900 - RNA, 16 nt, Human
gaagugaccaaggagg

SEQ ID NO: 3808901 - RNA, 22 nt, Human
gaagugacgguuccuacacagg

SEQ ID NO: 3808902 - RNA, 15 nt, Human
gaagugacuuuggcu

SEQ ID NO: 3808903 - RNA, 22 nt, Human
gaagugauacuauccaguuacu

SEQ ID NO: 3808904 - RNA, 18 nt, Human
gaagugcaaauuugauac

SEQ ID NO: 3808905 - RNA, 17 nt, Human
gaagugcagaacugcag

SEQ ID NO: 3808906 - RNA, 20 nt, Human
gaagugcagaacugcaguca

SEQ ID NO: 3808907 - RNA, 14 nt, Human
gaagugcauuucug

SEQ ID NO: 3808908 - RNA, 16 nt, Human
gaagugcccccucccc

SEQ ID NO: 3808909 - RNA, 15 nt, Human
gaagugccccugcug

SEQ ID NO: 3808910 - RNA, 18 nt, Human
gaagugccccugcugccu

SEQ ID NO: 3808911 - RNA, 23 nt, Human
gaagugccccugcugccucccca

SEQ ID NO: 3808912 - RNA, 20 nt, Human
gaagugcuccccucugaaag

SEQ ID NO: 3808913 - RNA, 12 nt, Human
gaaguggaaugg

SEQ ID NO: 3808914 - RNA, 17 nt, Human
gaaguggacuggccccu

SEQ ID NO: 3808915 - RNA, 18 nt, Human
gaagugggccaggacagg

SEQ ID NO: 3808916 - RNA, 14 nt, Human
gaagugguccaucu

SEQ ID NO: 3808917 - RNA, 15 nt, Human
gaaguguaacagcug

SEQ ID NO: 3808918 - RNA, 20 nt, Human
gaaguguccgagaacuaaag

SEQ ID NO: 3808919 - RNA, 13 nt, Human
gaaguguggggau

SEQ ID NO: 3808920 - RNA, 18 nt, Human
gaagugugggucugugug

SEQ ID NO: 3808921 - RNA, 20 nt, Human
gaaguuaaaagcacaaagga

SEQ ID NO: 3808922 - RNA, 21 nt, Human
gaaguuaaagggaagaaaaca

SEQ ID NO: 3808923 - RNA, 23 nt, Human
gaaguuacacagaaaugcugcug

SEQ ID NO: 3808924 - RNA, 18 nt, Human
gaaguuacuguuauagag

SEQ ID NO: 3808925 - RNA, 20 nt, Human
gaaguuacuuuauguuuguc

SEQ ID NO: 3808926 - RNA, 20 nt, Human
gaaguuacuuucuuaaugug

SEQ ID NO: 3808927 - RNA, 13 nt, Human
gaaguuagaauuc

SEQ ID NO: 3808928 - RNA, 18 nt, Human
gaaguuagccuuuaucua

SEQ ID NO: 3808929 - RNA, 22 nt, Human
gaaguuagguucuuaaaagugc

SEQ ID NO: 3808930 - RNA, 15 nt, Human
gaaguuaguuuguau

SEQ ID NO: 3808931 - RNA, 20 nt, Human
gaaguuauguguaugugagu

SEQ ID NO: 3808932 - RNA, 14 nt, Human
gaaguuauuuucca

SEQ ID NO: 3808933 - RNA, 23 nt, Human
gaaguucauaccuaaguacugua

SEQ ID NO: 3808934 - RNA, 16 nt, Human
gaaguucuauuuauuu

SEQ ID NO: 3808935 - RNA, 23 nt, Human
gaaguugacuuauaguacaugau

SEQ ID NO: 3808936 - RNA, 17 nt, Human
gaaguugcagugagcug

SEQ ID NO: 3808937 - RNA, 23 nt, Human
gaaguuggacagcaaaaccauug

SEQ ID NO: 3808938 - RNA, 21 nt, Human
gaaguuguuacuaacuaaacu

SEQ ID NO: 3808939 - RNA, 22 nt, Human
gaaguuguuacuaacuaaacuc

SEQ ID NO: 3808940 - RNA, 18 nt, Human
gaaguuuaauugacuuau

SEQ ID NO: 3808941 - RNA, 17 nt, Human
gaaguuuacauuguaaa

SEQ ID NO: 3808942 - RNA, 21 nt, Human
gaaguuuacauuuuuauuuau

SEQ ID NO: 3808943 - RNA, 22 nt, Human
gaaguuuacauuuuuauuuaug

SEQ ID NO: 3808944 - RNA, 14 nt, Human
gaaguuucacauga

SEQ ID NO: 3808945 - RNA, 14 nt, Human
gaaguuucauuuau

SEQ ID NO: 3808946 - RNA, 21 nt, Human
gaaguuucauuuaugauacaa

SEQ ID NO: 3808947 - RNA, 21 nt, Human
gaaguuucugccgcagcccug

SEQ ID NO: 3808948 - RNA, 15 nt, Human
gaaguuugauaaaua

SEQ ID NO: 3808949 - RNA, 16 nt, Human
gaaguuuguccauuug

SEQ ID NO: 3808950 - RNA, 13 nt, Human
gaaguuuuacauu

SEQ ID NO: 3808951 - RNA, 12 nt, Human
gaaguuuuccua

SEQ ID NO: 3808952 - RNA, 14 nt, Human
gaaguuuuuguacu

SEQ ID NO: 3808953 - RNA, 16 nt, Human
gaauaaaaauuccaga

SEQ ID NO: 3808954 - RNA, 21 nt, Human
gaauaaaaggcuugaagcugu

SEQ ID NO: 3808955 - RNA, 12 nt, Human
gaauaaaagugc

SEQ ID NO: 3808956 - RNA, 23 nt, Human
gaauaaaauacuauuuuuacugc

SEQ ID NO: 3808957 - RNA, 20 nt, Human
gaauaaaauccuaagacaca

SEQ ID NO: 3808958 - RNA, 22 nt, Human
gaauaaaauuguaaaauuguau

SEQ ID NO: 3808959 - RNA, 16 nt, Human
gaauaaacuagauuac

SEQ ID NO: 3808960 - RNA, 14 nt, Human
gaauaaacuucagc

SEQ ID NO: 3808961 - RNA, 15 nt, Human
gaauaaagaauacuu

SEQ ID NO: 3808962 - RNA, 17 nt, Human
gaauaaagaauacuuga

SEQ ID NO: 3808963 - RNA, 19 nt, Human
gaauaaagaauacuugaac

SEQ ID NO: 3808964 - RNA, 12 nt, Human
gaauaaagcaau

SEQ ID NO: 3808965 - RNA, 13 nt, Human
gaauaaagcaauu

SEQ ID NO: 3808966 - RNA, 21 nt, Human
gaauaaagcaauuuuccuuga

SEQ ID NO: 3808967 - RNA, 17 nt, Human
gaauaaagccugcuuuu

SEQ ID NO: 3808968 - RNA, 14 nt, Human
gaauaaaggcagcu

SEQ ID NO: 3808969 - RNA, 16 nt, Human
gaauaaaggcaguuuu

SEQ ID NO: 3808970 - RNA, 19 nt, Human
gaauaaaggcaguuuucua

SEQ ID NO: 3808971 - RNA, 14 nt, Human
gaauaaaguugaag

SEQ ID NO: 3808972 - RNA, 15 nt, Human
gaauucugauugauu

SEQ ID NO: 3808973 - RNA, 19 nt, Human
gaauucugcuaccucacug

SEQ ID NO: 3808974 - RNA, 14 nt, Human
gaauucuguucauu

SEQ ID NO: 3808975 - RNA, 18 nt, Human
gaauucuuacauguuuuc

SEQ ID NO: 3808976 - RNA, 21 nt, Human
gaauucuuaugcuuauaauau

SEQ ID NO: 3808977 - RNA, 23 nt, Human
gaauucuugaaggaaaaugauac

SEQ ID NO: 3808978 - RNA, 19 nt, Human
gaauucuuuaaaauuacaa

SEQ ID NO: 3808979 - RNA, 14 nt, Human
gaauugaaaaacca

SEQ ID NO: 3808980 - RNA, 22 nt, Human
gaauugaaaaguuuuuguuugg

SEQ ID NO: 3808981 - RNA, 13 nt, Human
gaauugaaacacu

SEQ ID NO: 3808982 - RNA, 15 nt, Human
gaauugaacccagga

SEQ ID NO: 3808983 - RNA, 22 nt, Human
gaauugaaucgcugcgauacug

SEQ ID NO: 3808984 - RNA, 16 nt, Human
gaauugacccacaaga

SEQ ID NO: 3808985 - RNA, 16 nt, Human
gaauugagcugcagaa

SEQ ID NO: 3808986 - RNA, 15 nt, Human
gaauugaguguuuaa

SEQ ID NO: 3808987 - RNA, 20 nt, Human
gaauugauuucccuucuucu

SEQ ID NO: 3808988 - RNA, 23 nt, Human
gaauugauuuugaggagugguuu

SEQ ID NO: 3808989 - RNA, 14 nt, Human
gaauugcagaguac

SEQ ID NO: 3808990 - RNA, 16 nt, Human
gaauugccugcagaga

SEQ ID NO: 3808991 - RNA, 16 nt, Human
gaauuggagcucgugg

SEQ ID NO: 3808992 - RNA, 12 nt, Human
gaauuguacaga

SEQ ID NO: 3808993 - RNA, 14 nt, Human
gaauuguccccagu

SEQ ID NO: 3808994 - RNA, 12 nt, Human
gaauugugcaaa

SEQ ID NO: 3808995 - RNA, 16 nt, Human
gaauugugcucaaaau

SEQ ID NO: 3808996 - RNA, 15 nt, Human
gaauuguguuuauaa

SEQ ID NO: 3808997 - RNA, 22 nt, Human
gaauuguugacaaauguaaaca

SEQ ID NO: 3808998 - RNA, 22 nt, Human
gaauuguugagauacuuuacua

SEQ ID NO: 3808999 - RNA, 9 nt, Human
gaauuguuu

SEQ ID NO: 3809000 - RNA, 20 nt, Human
gaauuguuuucuuuaaagau

SEQ ID NO: 3809001 - RNA, 20 nt, Human
gaauuuaaauauaauucugu

SEQ ID NO: 3809002 - RNA, 22 nt, Human
gaauuuaaauauaauucuguaa

SEQ ID NO: 3809003 - RNA, 23 nt, Human
gaauuuaaauauaauucuguaaa

SEQ ID NO: 3809004 - RNA, 18 nt, Human
gaauuuaacaaugcgaau

SEQ ID NO: 3809005 - RNA, 22 nt, Human
gaauuuaagccucaaauuugaa

SEQ ID NO: 3809006 - RNA, 16 nt, Human
gaauuuaauaaucugu

SEQ ID NO: 3809007 - RNA, 16 nt, Human
gaauuuagguuuuuau

SEQ ID NO: 3809008 - RNA, 17 nt, Human
gaauuuaguauuaucaa

SEQ ID NO: 3809009 - RNA, 18 nt, Human
gaauuuaguauuaucaaa

SEQ ID NO: 3809010 - RNA, 13 nt, Human
gaauuuauaauuc

SEQ ID NO: 3809011 - RNA, 18 nt, Human
gaauuuauaauucaguau

SEQ ID NO: 3809012 - RNA, 20 nt, Human
gaauuuaucacacuucugug

SEQ ID NO: 3809013 - RNA, 13 nt, Human
gaauuuauucaau

SEQ ID NO: 3809014 - RNA, 23 nt, Human
gaauuuauucaauuccucuggga

SEQ ID NO: 3809015 - RNA, 20 nt, Human
gaauuuauuggcuuuucuga

SEQ ID NO: 3809016 - RNA, 21 nt, Human
gaauuuauuggcuuuucugau

SEQ ID NO: 3809017 - RNA, 17 nt, Human
gaauuucaccuguaaac

SEQ ID NO: 3809018 - RNA, 21 nt, Human
gaauuucaccuguaaaccuga

SEQ ID NO: 3809019 - RNA, 16 nt, Human
gaauuucacugucuuu

SEQ ID NO: 3809020 - RNA, 16 nt, Human
gaauuucccaggaccc

SEQ ID NO: 3809021 - RNA, 17 nt, Human
gaauuucccaggacccu

SEQ ID NO: 3809022 - RNA, 14 nt, Human
gaauuucccucucu

SEQ ID NO: 3809023 - RNA, 21 nt, Human
gaauuuccucuauugauguac

SEQ ID NO: 3809024 - RNA, 13 nt, Human
gaauuucucuaca

SEQ ID NO: 3809025 - RNA, 15 nt, Human
gaauuucuuaacuuc

SEQ ID NO: 3809026 - RNA, 21 nt, Human
gaauuucuucaacucccugcc

SEQ ID NO: 3809027 - RNA, 12 nt, Human
gaauuucuuggu

SEQ ID NO: 3809028 - RNA, 21 nt, Human
gaauuucuugguaagaagccg

SEQ ID NO: 3809029 - RNA, 22 nt, Human
gaauuucuuuugccguuauuaa

SEQ ID NO: 3809030 - RNA, 16 nt, Human
gaauuugaaucucaau

SEQ ID NO: 3809031 - RNA, 17 nt, Human
gaauuugaaugaaaaau

SEQ ID NO: 3809032 - RNA, 20 nt, Human
gaauuugauaugugaacagu

SEQ ID NO: 3809033 - RNA, 14 nt, Human
gaauuugcaaagua

SEQ ID NO: 3809034 - RNA, 17 nt, Human
gaauuugcaaaguacug

SEQ ID NO: 3809035 - RNA, 18 nt, Human
gaauuugcaaaguacugu

SEQ ID NO: 3809036 - RNA, 14 nt, Human
gaauuugcccuggg

SEQ ID NO: 3809037 - RNA, 23 nt, Human
gaauuugcccugggaaaccccuu

SEQ ID NO: 3809038 - RNA, 14 nt, Human
gaauuugccugcug

SEQ ID NO: 3809039 - RNA, 13 nt, Human
gaauuuggaaauc

SEQ ID NO: 3809040 - RNA, 14 nt, Human
gaauuuggaaaucc

SEQ ID NO: 3809041 - RNA, 20 nt, Human
gaauuugggacccugcuuua

SEQ ID NO: 3809042 - RNA, 21 nt, Human
gaauuugggacccugcuuuag

SEQ ID NO: 3809043 - RNA, 18 nt, Human
gaauuuggggcuuccaag

SEQ ID NO: 3809044 - RNA, 20 nt, Human
gaauuuguaaugucuugagc

SEQ ID NO: 3809045 - RNA, 20 nt, Human
gaauuugugaagguggaaau

SEQ ID NO: 3809046 - RNA, 13 nt, Human
gaauuuuaaagua

SEQ ID NO: 3809047 - RNA, 13 nt, Human
gaauuuuaagccu

SEQ ID NO: 3809048 - RNA, 14 nt, Human
gaauuuuaggaacu

SEQ ID NO: 3809049 - RNA, 19 nt, Human
gaauuuuaggaacuucaga

SEQ ID NO: 3809050 - RNA, 22 nt, Human
gaauuuuauacuuucccuaccc

SEQ ID NO: 3809051 - RNA, 14 nt, Human
gaauuuucagaccc

SEQ ID NO: 3809052 - RNA, 23 nt, Human
gaauuuucagaccccagcggcug

SEQ ID NO: 3809053 - RNA, 11 nt, Human
gaauuuucauu

SEQ ID NO: 3809054 - RNA, 12 nt, Human
gaauuuucauuu

SEQ ID NO: 3809055 - RNA, 13 nt, Human
gaauuuucauuuu

SEQ ID NO: 3809056 - RNA, 15 nt, Human
gaauuuucuaaaagc

SEQ ID NO: 3809057 - RNA, 21 nt, Human
gaauuuugcaaagauuuaauc

SEQ ID NO: 3809058 - RNA, 13 nt, Human
gaauuuuguguua

SEQ ID NO: 3809059 - RNA, 19 nt, Human
gaauuuuguuuucuugauu

SEQ ID NO: 3809060 - RNA, 15 nt, Human
gaauuuuuaugugug

SEQ ID NO: 3809061 - RNA, 16 nt, Human
gaauuuuucauugaua

SEQ ID NO: 3809062 - RNA, 14 nt, Human
gaauuuuucucuaa

SEQ ID NO: 3809063 - RNA, 16 nt, Human
gaauuuuugcaauaau

SEQ ID NO: 3809064 - RNA, 20 nt, Human
gaauuuuugcaauaaugcag

SEQ ID NO: 3809065 - RNA, 23 nt, Human
gaauuuuugcuugacuucaguua

SEQ ID NO: 3809066 - RNA, 18 nt, Human
gaauuuuuuauucuugug

SEQ ID NO: 3809067 - RNA, 22 nt, Human
gaauuuuuuauucuugugaaua

SEQ ID NO: 3809068 - RNA, 16 nt, Human
gaauuuuuuucaucuu

SEQ ID NO: 3809069 - RNA, 13 nt, Human
gaauuuuuuugua

SEQ ID NO: 3809070 - RNA, 14 nt, Human
gaauuuuuuuguaa

SEQ ID NO: 3809071 - RNA, 20 nt, Human
gaauuuuuuuuaacauuccu

SEQ ID NO: 3809072 - RNA, 23 nt, Human
gaauuuuuuuuguuguuucagug

SEQ ID NO: 3809073 - RNA, 22 nt, Human
gaauuuuuuuuuccuagcccuc

SEQ ID NO: 3809074 - RNA, 18 nt, Human
gacaaaaacagccucaca

SEQ ID NO: 3809075 - RNA, 20 nt, Human
gacaaaaacagccucacaga

SEQ ID NO: 3809076 - RNA, 16 nt, Human
gacaaaaaguauauua

SEQ ID NO: 3809077 - RNA, 18 nt, Human
gacaaaaaguauauuaaa

SEQ ID NO: 3809078 - RNA, 13 nt, Human
gacaaaaauacuc

SEQ ID NO: 3809079 - RNA, 21 nt, Human
gacaaaaauacucuaauucua

SEQ ID NO: 3809080 - RNA, 21 nt, Human
gacaaaaaugaacugaaguuu

SEQ ID NO: 3809081 - RNA, 15 nt, Human
gacaaaacuagagac

SEQ ID NO: 3809082 - RNA, 21 nt, Human
gacaaaacuucuugucagaca

SEQ ID NO: 3809083 - RNA, 17 nt, Human
gacaaaagucugucuuu

SEQ ID NO: 3809084 - RNA, 15 nt, Human
gacaaaauggaauac

SEQ ID NO: 3809085 - RNA, 17 nt, Human
gacaaaauggauacaua

SEQ ID NO: 3809086 - RNA, 13 nt, Human
gacaaaauguuuu

SEQ ID NO: 3809087 - RNA, 16 nt, Human
gacaaacaccucccag

SEQ ID NO: 3809088 - RNA, 14 nt, Human
gacaaacagcucag

SEQ ID NO: 3809089 - RNA, 19 nt, Human
gacaaacugcauauguacu

SEQ ID NO: 3809090 - RNA, 13 nt, Human
gacaaagaaccuu

SEQ ID NO: 3809091 - RNA, 21 nt, Human
gacaaagaauuccaaagcaaa

SEQ ID NO: 3809092 - RNA, 20 nt, Human
gacaaagccaaacucugcca

SEQ ID NO: 3809093 - RNA, 18 nt, Human
gacaaagcugcuaaaucu

SEQ ID NO: 3809094 - RNA, 23 nt, Human
gacaaagcuuggaagagccugca

SEQ ID NO: 3809095 - RNA, 14 nt, Human
gacaaaggagccug

SEQ ID NO: 3809096 - RNA, 15 nt, Human
gacaaaggagccugu

SEQ ID NO: 3809097 - RNA, 17 nt, Human
gacaaagucuccagccc

SEQ ID NO: 3809098 - RNA, 17 nt, Human
gacaaagugccaaagaa

SEQ ID NO: 3809099 - RNA, 17 nt, Human
gacaaauacucaugugu

SEQ ID NO: 3809100 - RNA, 18 nt, Human
gacaaauacucaugugua

SEQ ID NO: 3809101 - RNA, 20 nt, Human
gacaaauacucauguguaug

SEQ ID NO: 3809102 - RNA, 17 nt, Human
gacaaauaguaggcaag

SEQ ID NO: 3809103 - RNA, 21 nt, Human
gacaaauaguaggcaagaugg

SEQ ID NO: 3809104 - RNA, 19 nt, Human
gacaaaucaacagaagcau

SEQ ID NO: 3809105 - RNA, 21 nt, Human
gacaaaucaacagaagcauuu

SEQ ID NO: 3809106 - RNA, 23 nt, Human
gacaaaucaacagaagcauuugu

SEQ ID NO: 3809107 - RNA, 17 nt, Human
gacaaaucaagcuucag

SEQ ID NO: 3809108 - RNA, 20 nt, Human
gacaaaucaaguuuccaagc

SEQ ID NO: 3809109 - RNA, 16 nt, Human
gacaaaucacauauuu

SEQ ID NO: 3809110 - RNA, 18 nt, Human
gacaaaucacauauuuua

SEQ ID NO: 3809111 - RNA, 15 nt, Human
gacaaaucugucugc

SEQ ID NO: 3809112 - RNA, 14 nt, Human
gacaaaucugugua

SEQ ID NO: 3809113 - RNA, 16 nt, Human
gacaaauguaaacauu

SEQ ID NO: 3809114 - RNA, 11 nt, Human
gacaaauguga

SEQ ID NO: 3809115 - RNA, 16 nt, Human
gacaaauugcacagaa

SEQ ID NO: 3809116 - RNA, 19 nt, Human
gacaacacugggaaacaga

SEQ ID NO: 3809117 - RNA, 22 nt, Human
gacaacagaagucaugaagccc

SEQ ID NO: 3809118 - RNA, 11 nt, Human
gacaacaucug

SEQ ID NO: 3809119 - RNA, 17 nt, Human
gacaaccacuggucugu

SEQ ID NO: 3809120 - RNA, 18 nt, Human
gacaaccauuaaagucag

SEQ ID NO: 3809121 - RNA, 20 nt, Human
gacaacccugcaaaggacug

SEQ ID NO: 3809122 - RNA, 22 nt, Human
cuauuuuuggcagucugaauuu

SEQ ID NO: 3809123 - RNA, 13 nt, Human
cuauuuuuguaaa

SEQ ID NO: 3809124 - RNA, 21 nt, Human
cuauuuuuguaaacuggaauu

SEQ ID NO: 3809125 - RNA, 19 nt, Human
cuauuuuuguaaaguuucc

SEQ ID NO: 3809126 - RNA, 15 nt, Human
cuauuuuuguuuuua

SEQ ID NO: 3809127 - RNA, 18 nt, Human
cuauuuuuuauuuuacuu

SEQ ID NO: 3809128 - RNA, 20 nt, Human
cuauuuuuuuaaaaucacua

SEQ ID NO: 3809129 - RNA, 20 nt, Human
cuauuuuuuuucuguuauau

SEQ ID NO: 3809130 - RNA, 20 nt, Human
cucaaaaauacaaaauaaaa

SEQ ID NO: 3809131 - RNA, 13 nt, Human
cucaaaacaaagg

SEQ ID NO: 3809132 - RNA, 19 nt, Human
cucaaaacccaucugggcu

SEQ ID NO: 3809133 - RNA, 22 nt, Human
cucaaaacccaucugggcuccu

SEQ ID NO: 3809134 - RNA, 16 nt, Human
cucaaaacuuaacaua

SEQ ID NO: 3809135 - RNA, 14 nt, Human
cucaaaagcauuua

SEQ ID NO: 3809136 - RNA, 18 nt, Human
cucaaaauaaagaaguau

SEQ ID NO: 3809137 - RNA, 13 nt, Human
cucaaaauauuug

SEQ ID NO: 3809138 - RNA, 12 nt, Human
cucaaaaugaca

SEQ ID NO: 3809139 - RNA, 16 nt, Human
cucaaaaugacagcca

SEQ ID NO: 3809140 - RNA, 13 nt, Human
cucaaaauuagau

SEQ ID NO: 3809141 - RNA, 15 nt, Human
cucaaacaaugacaa

SEQ ID NO: 3809142 - RNA, 14 nt, Human
cucaaacacagaga

SEQ ID NO: 3809143 - RNA, 21 nt, Human
cucaaacacaguuacacuugu

SEQ ID NO: 3809144 - RNA, 14 nt, Human
cucaaacacugcag

SEQ ID NO: 3809145 - RNA, 19 nt, Human
cucaaaccaaaucacugaa

SEQ ID NO: 3809146 - RNA, 20 nt, Human
cucaaaccuccaaaagcccu

SEQ ID NO: 3809147 - RNA, 13 nt, Human
cucaaaccuccuc

SEQ ID NO: 3809148 - RNA, 14 nt, Human
cucaaaccuccucu

SEQ ID NO: 3809149 - RNA, 15 nt, Human
cucaaaccuguuuaa

SEQ ID NO: 3809150 - RNA, 13 nt, Human
cucaaacguggcu

SEQ ID NO: 3809151 - RNA, 15 nt, Human
cucaaacguggcuuu

SEQ ID NO: 3809152 - RNA, 20 nt, Human
cucaaacuaaaagacauuug

SEQ ID NO: 3809153 - RNA, 21 nt, Human
cucaaacuaacaggcuuagug

SEQ ID NO: 3809154 - RNA, 17 nt, Human
cucaaacuccauucucc

SEQ ID NO: 3809155 - RNA, 19 nt, Human
cucaaacuccugaccucag

SEQ ID NO: 3809156 - RNA, 22 nt, Human
cucaaacugaggaauuucaccu

SEQ ID NO: 3809157 - RNA, 13 nt, Human
cucaaagaaagug

SEQ ID NO: 3809158 - RNA, 23 nt, Human
cucaaagaaaucuacuauauccc

SEQ ID NO: 3809159 - RNA, 19 nt, Human
cucaaagccccauuaacug

SEQ ID NO: 3809160 - RNA, 15 nt, Human
cucaaagucugcaac

SEQ ID NO: 3809161 - RNA, 15 nt, Human
cucaaaguuugacag

SEQ ID NO: 3809162 - RNA, 14 nt, Human
cucaaaguuuugaa

SEQ ID NO: 3809163 - RNA, 21 nt, Human
cucaaaguuuugaaaagcuau

SEQ ID NO: 3809164 - RNA, 21 nt, Human
cucaaauaaaaagugcuuuug

SEQ ID NO: 3809165 - RNA, 15 nt, Human
cucaaauacacauuu

SEQ ID NO: 3809166 - RNA, 16 nt, Human
cucaaauacacauuug

SEQ ID NO: 3809167 - RNA, 17 nt, Human
cucaaauacacauuugc

SEQ ID NO: 3809168 - RNA, 21 nt, Human
cucaaauaggcuauuaaaaaa

SEQ ID NO: 3809169 - RNA, 16 nt, Human
cucaaauccaggaccc

SEQ ID NO: 3809170 - RNA, 22 nt, Human
cucaaauccaggacccugccag

SEQ ID NO: 3809171 - RNA, 19 nt, Human
cucaaaucguccagcgacc

SEQ ID NO: 3809172 - RNA, 13 nt, Human
cucaaaucuauuc

SEQ ID NO: 3809173 - RNA, 16 nt, Human
cucaaaucuauucaga

SEQ ID NO: 3809174 - RNA, 15 nt, Human
cucaaaucugaggga

SEQ ID NO: 3809175 - RNA, 16 nt, Human
cucaaaugaguaacau

SEQ ID NO: 3809176 - RNA, 22 nt, Human
cucaaaugcggggugggggcag

SEQ ID NO: 3809177 - RNA, 22 nt, Human
cucaaaugcucagaccagcucu

SEQ ID NO: 3809178 - RNA, 17 nt, Human
cucaaauggggccagau

SEQ ID NO: 3809179 - RNA, 13 nt, Human
cucaaauguucua

SEQ ID NO: 3809180 - RNA, 19 nt, Human
cucaaauguucuaaguuuc

SEQ ID NO: 3809181 - RNA, 24 nt, Human
cucaaauguucuaaguuucuaaga

SEQ ID NO: 3809182 - RNA, 17 nt, Human
cucaaauugucagcaau

SEQ ID NO: 3809183 - RNA, 21 nt, Human
cucaaauuuuuugacuuuuuu

SEQ ID NO: 3809184 - RNA, 20 nt, Human
cucaacaaaagugcuuugga

SEQ ID NO: 3809185 - RNA, 14 nt, Human
cucaacacccaguu

SEQ ID NO: 3809186 - RNA, 22 nt, Human
cucaaccaaugccaaaaaaaga

SEQ ID NO: 3809187 - RNA, 22 nt, Human
cucaaccccaccauaugaauug

SEQ ID NO: 3809188 - RNA, 19 nt, Human
cucaaccccuccccuccau

SEQ ID NO: 3809189 - RNA, 16 nt, Human
cucaacccucccucag

SEQ ID NO: 3809190 - RNA, 18 nt, Human
cucaacccucccucagcc

SEQ ID NO: 3809191 - RNA, 19 nt, Human
cucaacccucccucagccc

SEQ ID NO: 3809192 - RNA, 12 nt, Human
cucaaccucauc

SEQ ID NO: 3809193 - RNA, 13 nt, Human
cucaaccucaucc

SEQ ID NO: 3809194 - RNA, 14 nt, Human
cucaaccuccugug

SEQ ID NO: 3809195 - RNA, 12 nt, Human
cucaaccucuuc

SEQ ID NO: 3809196 - RNA, 18 nt, Human
cucaaccuguaaauuauu

SEQ ID NO: 3809197 - RNA, 13 nt, Human
cucaaccugugau

SEQ ID NO: 3809198 - RNA, 18 nt, Human
cucaacguugcuccccau

SEQ ID NO: 3809199 - RNA, 15 nt, Human
cucaacuaaauccaa

SEQ ID NO: 3809200 - RNA, 17 nt, Human
cucaacucaccuaaugu

SEQ ID NO: 3809201 - RNA, 14 nt, Human
cucaacuccuccca

SEQ ID NO: 3809202 - RNA, 15 nt, Human
cucaacuccucccau

SEQ ID NO: 3809203 - RNA, 19 nt, Human
cucaacucugcugaggguc

SEQ ID NO: 3809204 - RNA, 17 nt, Human
cucaacuggguccagaa

SEQ ID NO: 3809205 - RNA, 17 nt, Human
cucaacuuucuguugga

SEQ ID NO: 3809206 - RNA, 19 nt, Human
cucaagaagaagaggggca

SEQ ID NO: 3809207 - RNA, 20 nt, Human
cucaagaagaagaggggcau

SEQ ID NO: 3809208 - RNA, 19 nt, Human
cucaagaagacauggagac

SEQ ID NO: 3809209 - RNA, 22 nt, Human
cucaagaagacauggagacucc

SEQ ID NO: 3809210 - RNA, 14 nt, Human
cucaagaagcaggc

SEQ ID NO: 3809211 - RNA, 15 nt, Human
cucaagaagcaggcu

SEQ ID NO: 3809212 - RNA, 18 nt, Human
cucaagaccaaauggaaa

SEQ ID NO: 3809213 - RNA, 21 nt, Human
cucaagaccaaauggaaacag

SEQ ID NO: 3809214 - RNA, 14 nt, Human
cucaagacuuccag

SEQ ID NO: 3809215 - RNA, 15 nt, Human
cucaagagaucccaa

SEQ ID NO: 3809216 - RNA, 17 nt, Human
cucaagaggcugaggca

SEQ ID NO: 3809217 - RNA, 17 nt, Human
cucaagagggcacuggu

SEQ ID NO: 3809218 - RNA, 19 nt, Human
cucaagagggcacuggugg

SEQ ID NO: 3809219 - RNA, 17 nt, Human
cucaagaucaaugaaau

SEQ ID NO: 3809220 - RNA, 15 nt, Human
cucaagaugggggca

SEQ ID NO: 3809221 - RNA, 13 nt, Human
cucaagauuccca

SEQ ID NO: 3809222 - RNA, 18 nt, Human
cucaagcaauccuccuga

SEQ ID NO: 3809223 - RNA, 21 nt, Human
cucaagcaauccuccugagug

SEQ ID NO: 3809224 - RNA, 21 nt, Human
cucaagccaagcagccaagcu

SEQ ID NO: 3809225 - RNA, 22 nt, Human
cucaagcccugcagucacagcu

SEQ ID NO: 3809226 - RNA, 16 nt, Human
cucaaggacaaagucu

SEQ ID NO: 3809227 - RNA, 17 nt, Human
cucaaggacaaagucuc

SEQ ID NO: 3809228 - RNA, 20 nt, Human
cucaaggacaaagucuccag

SEQ ID NO: 3809229 - RNA, 15 nt, Human
cucaaggccucccac

SEQ ID NO: 3809230 - RNA, 19 nt, Human
cucaaggccucccacagug

SEQ ID NO: 3809231 - RNA, 17 nt, Human
cucaaggcggugcuuga

SEQ ID NO: 3809232 - RNA, 23 nt, Human
cucaaggcggugcuugauagaaa

SEQ ID NO: 3809233 - RNA, 20 nt, Human
cucaaggggccauccugucc

SEQ ID NO: 3809234 - RNA, 14 nt, Human
cucaagguuuuagg

SEQ ID NO: 3809235 - RNA, 20 nt, Human
cucaagucacucccaagccc

SEQ ID NO: 3809236 - RNA, 22 nt, Human
cucaaguccccgucugccuggc

SEQ ID NO: 3809237 - RNA, 16 nt, Human
cucaagucuucccuga

SEQ ID NO: 3809238 - RNA, 16 nt, Human
cucaagucuuucucuu

SEQ ID NO: 3809239 - RNA, 17 nt, Human
cucaagugauucuccug

SEQ ID NO: 3809240 - RNA, 22 nt, Human
cucaagugggaacgacugggca

SEQ ID NO: 3809241 - RNA, 22 nt, Human
cucaagugucucaguccaccug

SEQ ID NO: 3809242 - RNA, 19 nt, Human
cucaaguucaaggaccaac

SEQ ID NO: 3809243 - RNA, 18 nt, Human
cucaaguuuaugucucag

SEQ ID NO: 3809244 - RNA, 13 nt, Human
cucaauaaaauca

SEQ ID NO: 3809245 - RNA, 23 nt, Human
cucaauaaaaucauguacauuuc

SEQ ID NO: 3809246 - RNA, 20 nt, Human
cucaauaaaauuauagcucu

SEQ ID NO: 3809247 - RNA, 17 nt, Human
cucaauaaacauuucau

SEQ ID NO: 3809248 - RNA, 21 nt, Human
cucaauaaacauuucauuucc

SEQ ID NO: 3809249 - RNA, 13 nt, Human
cucaauaaagauu

SEQ ID NO: 3809250 - RNA, 14 nt, Human
cucaauaagccuug

SEQ ID NO: 3809251 - RNA, 16 nt, Human
cucaauagaucuccag

SEQ ID NO: 3809252 - RNA, 21 nt, Human
cucaauaggaccaggauccag

SEQ ID NO: 3809253 - RNA, 16 nt, Human
cucaauaguaaaagau

SEQ ID NO: 3809254 - RNA, 11 nt, Human
cucaauauuuu

SEQ ID NO: 3809255 - RNA, 18 nt, Human
cucaauauuuuccaugaa

SEQ ID NO: 3809256 - RNA, 14 nt, Human
cucaauccauguuc

SEQ ID NO: 3809257 - RNA, 13 nt, Human
cucaaugaaaaau

SEQ ID NO: 3809258 - RNA, 22 nt, Human
cucaaugaaaaauagugucuuu

SEQ ID NO: 3809259 - RNA, 19 nt, Human
cucaaugaaccauaaauuc

SEQ ID NO: 3809260 - RNA, 20 nt, Human
cucaaugaaccauaaauuca

SEQ ID NO: 3809261 - RNA, 15 nt, Human
cucaaugagcauguu

SEQ ID NO: 3809262 - RNA, 16 nt, Human
cucaaugagcucuucc

SEQ ID NO: 3809263 - RNA, 13 nt, Human
cucaaugcucaua

SEQ ID NO: 3809264 - RNA, 15 nt, Human
cucaaugcucauaac

SEQ ID NO: 3809265 - RNA, 21 nt, Human
cucaaugugugccgagcccuu

SEQ ID NO: 3809266 - RNA, 19 nt, Human
cucaauguuacuaucugcu

SEQ ID NO: 3809267 - RNA, 14 nt, Human
cucaauucuucccu

SEQ ID NO: 3809268 - RNA, 19 nt, Human
cucaauucuucccuaucuu

SEQ ID NO: 3809269 - RNA, 13 nt, Human
cucaauuguuuuu

SEQ ID NO: 3809270 - RNA, 15 nt, Human
cucaauuguuuuugu

SEQ ID NO: 3809271 - RNA, 12 nt, Human
cucaauuucaau

SEQ ID NO: 3809272 - RNA, 21 nt, Human
gaauaaauaugccucuccuuu

SEQ ID NO: 3809273 - RNA, 11 nt, Human
gaauaaauguc

SEQ ID NO: 3809274 - RNA, 14 nt, Human
gaauaaaugucacu

SEQ ID NO: 3809275 - RNA, 16 nt, Human
gaauaaaugucacuuu

SEQ ID NO: 3809276 - RNA, 14 nt, Human
gaauaaaugucuuu

SEQ ID NO: 3809277 - RNA, 20 nt, Human
gaauaaauuguacagccggc

SEQ ID NO: 3809278 - RNA, 18 nt, Human
gaauaacauguaauuaag

SEQ ID NO: 3809279 - RNA, 22 nt, Human
gaauaaccacuuaaaaaauguc

SEQ ID NO: 3809280 - RNA, 23 nt, Human
gaauaagaaaacaaucacacuca

SEQ ID NO: 3809281 - RNA, 23 nt, Human
gaauaagcucuaguucuuaacaa

SEQ ID NO: 3809282 - RNA, 20 nt, Human
gaauaagguacaagaagcau

SEQ ID NO: 3809283 - RNA, 23 nt, Human
gaauaagguacaagaagcauuuu

SEQ ID NO: 3809284 - RNA, 12 nt, Human
gaauaauagaag

SEQ ID NO: 3809285 - RNA, 21 nt, Human
gaauaaucacgcuuuccugaa

SEQ ID NO: 3809286 - RNA, 22 nt, Human
gaauaauccuaaacauaugaau

SEQ ID NO: 3809287 - RNA, 13 nt, Human
gaauaaugggcuu

SEQ ID NO: 3809288 - RNA, 20 nt, Human
gaauaaugugggaagaaaca

SEQ ID NO: 3809289 - RNA, 18 nt, Human
gaauaauuauuuauuuaa

SEQ ID NO: 3809290 - RNA, 21 nt, Human
gaauaauugcuuuuucacagu

SEQ ID NO: 3809291 - RNA, 14 nt, Human
gaauacagaaagau

SEQ ID NO: 3809292 - RNA, 21 nt, Human
gaauacagcagcaagaaaaaa

SEQ ID NO: 3809293 - RNA, 20 nt, Human
gaauacaguguuauuuucuu

SEQ ID NO: 3809294 - RNA, 22 nt, Human
gaauaccacaucaaauaagaaa

SEQ ID NO: 3809295 - RNA, 23 nt, Human
gaauaccacucuguaauugcaaa

SEQ ID NO: 3809296 - RNA, 21 nt, Human
gaauaccauuaaaacugcuuu

SEQ ID NO: 3809297 - RNA, 22 nt, Human
gaauaccauuaaaacugcuuuu

SEQ ID NO: 3809298 - RNA, 12 nt, Human
gaauacccuuuu

SEQ ID NO: 3809299 - RNA, 15 nt, Human
gaauaccuguccccc

SEQ ID NO: 3809300 - RNA, 20 nt, Human
gaauacuacuuaugaaaugu

SEQ ID NO: 3809301 - RNA, 13 nt, Human
gaauacugaacau

SEQ ID NO: 3809302 - RNA, 13 nt, Human
gaauacugcuaca

SEQ ID NO: 3809303 - RNA, 18 nt, Human
gaauacuguuaaaggaaa

SEQ ID NO: 3809304 - RNA, 20 nt, Human
gaauacuguuaaaggaaaaa

SEQ ID NO: 3809305 - RNA, 17 nt, Human
gaauacuuugaaugugu

SEQ ID NO: 3809306 - RNA, 19 nt, Human
gaauacuuuugcccuuuga

SEQ ID NO: 3809307 - RNA, 15 nt, Human
gaauagaaagaaagu

SEQ ID NO: 3809308 - RNA, 16 nt, Human
gaauagaaagaaaguc

SEQ ID NO: 3809309 - RNA, 17 nt, Human
gaauagaagcuaagguu

SEQ ID NO: 3809310 - RNA, 16 nt, Human
gaauagauaugaaagc

SEQ ID NO: 3809311 - RNA, 18 nt, Human
gaauagcaucuguacaaa

SEQ ID NO: 3809312 - RNA, 21 nt, Human
gaauaggacuuguuuuuguuu

SEQ ID NO: 3809313 - RNA, 16 nt, Human
gaauaggcacuuuaaa

SEQ ID NO: 3809314 - RNA, 16 nt, Human
gaauaggcgaucacaa

SEQ ID NO: 3809315 - RNA, 22 nt, Human
gaauaggcgaucacaacgugca

SEQ ID NO: 3809316 - RNA, 21 nt, Human
gaauagggcccaugggaggga

SEQ ID NO: 3809317 - RNA, 18 nt, Human
gaauaguauccuccaggu

SEQ ID NO: 3809318 - RNA, 19 nt, Human
gaauaguauccuccagguu

SEQ ID NO: 3809319 - RNA, 14 nt, Human
gaauaguauugugu

SEQ ID NO: 3809320 - RNA, 16 nt, Human
gaauaguugagcccca

SEQ ID NO: 3809321 - RNA, 21 nt, Human
gaauaguuggucaucuagcaa

SEQ ID NO: 3809322 - RNA, 13 nt, Human
gaauauaaaaaau

SEQ ID NO: 3809323 - RNA, 21 nt, Human
gaauauaaacacuauauggca

SEQ ID NO: 3809324 - RNA, 16 nt, Human
gaauauaauacuguau

SEQ ID NO: 3809325 - RNA, 12 nt, Human
gaauauaaugga

SEQ ID NO: 3809326 - RNA, 20 nt, Human
gaauauaauuguuuuaucug

SEQ ID NO: 3809327 - RNA, 20 nt, Human
gaauauacucauuagaauua

SEQ ID NO: 3809328 - RNA, 23 nt, Human
gaauauaggucucuucucccaga

SEQ ID NO: 3809329 - RNA, 11 nt, Human
gaauauauuau

SEQ ID NO: 3809330 - RNA, 12 nt, Human
gaauauauuaua

SEQ ID NO: 3809331 - RNA, 16 nt, Human
gaauauauuuauuuaa

SEQ ID NO: 3809332 - RNA, 19 nt, Human
gaauaucaauagauauuua

SEQ ID NO: 3809333 - RNA, 17 nt, Human
gaauauccccucccagu

SEQ ID NO: 3809334 - RNA, 22 nt, Human
gaauauccccucccagucaccu

SEQ ID NO: 3809335 - RNA, 17 nt, Human
gaauaucuauuaauaua

SEQ ID NO: 3809336 - RNA, 14 nt, Human
gaauaugaaacaua

SEQ ID NO: 3809337 - RNA, 17 nt, Human
gaauaugaaacauagau

SEQ ID NO: 3809338 - RNA, 20 nt, Human
gaauaugaaagucuuauuaa

SEQ ID NO: 3809339 - RNA, 15 nt, Human
gaauaugacggaaga

SEQ ID NO: 3809340 - RNA, 18 nt, Human
gaauaugauuaguaaaga

SEQ ID NO: 3809341 - RNA, 19 nt, Human
gaauaugauuaguaaagaa

SEQ ID NO: 3809342 - RNA, 19 nt, Human
gaauauguuuccuuguuua

SEQ ID NO: 3809343 - RNA, 21 nt, Human
gaauauuagcuuuacuguuug

SEQ ID NO: 3809344 - RNA, 19 nt, Human
gaauauuauauuuggaugc

SEQ ID NO: 3809345 - RNA, 15 nt, Human
gaauauucaggacuu

SEQ ID NO: 3809346 - RNA, 16 nt, Human
gaauauucauauugga

SEQ ID NO: 3809347 - RNA, 20 nt, Human
gaauauugagcaauauguca

SEQ ID NO: 3809348 - RNA, 20 nt, Human
gaauauugcugauggugcaa

SEQ ID NO: 3809349 - RNA, 21 nt, Human
gaauauuguuccuaaguucuu

SEQ ID NO: 3809350 - RNA, 15 nt, Human
gaauauuguuucuuu

SEQ ID NO: 3809351 - RNA, 10 nt, Human
gaauauuuau

SEQ ID NO: 3809352 - RNA, 16 nt, Human
gaauauuuauaacagc

SEQ ID NO: 3809353 - RNA, 15 nt, Human
gaauauuuauuaccu

SEQ ID NO: 3809354 - RNA, 12 nt, Human
gaauauuugaau

SEQ ID NO: 3809355 - RNA, 14 nt, Human
gaauauuugaaucu

SEQ ID NO: 3809356 - RNA, 22 nt, Human
gaauauuuguuauguagauaac

SEQ ID NO: 3809357 - RNA, 18 nt, Human
gaauauuuuaaguauugc

SEQ ID NO: 3809358 - RNA, 14 nt, Human
gaauauuuuaucuu

SEQ ID NO: 3809359 - RNA, 16 nt, Human
gaauauuuuauucaag

SEQ ID NO: 3809360 - RNA, 22 nt, Human
gaauauuuuuugaggcuaaaga

SEQ ID NO: 3809361 - RNA, 21 nt, Human
gaaucaaaaauugaagagaga

SEQ ID NO: 3809362 - RNA, 14 nt, Human
gaaucaaaagugcc

SEQ ID NO: 3809363 - RNA, 23 nt, Human
gaaucaaaagugccucaagagga

SEQ ID NO: 3809364 - RNA, 14 nt, Human
gaaucaaacauuuu

SEQ ID NO: 3809365 - RNA, 14 nt, Human
gaaucaagagcugc

SEQ ID NO: 3809366 - RNA, 20 nt, Human
gaaucaagaugucagacugg

SEQ ID NO: 3809367 - RNA, 21 nt, Human
gaaucaagaugucagacuggc

SEQ ID NO: 3809368 - RNA, 21 nt, Human
gaaucaauaauauauuuucug

SEQ ID NO: 3809369 - RNA, 22 nt, Human
gaaucacaggcugggcugggca

SEQ ID NO: 3809370 - RNA, 19 nt, Human
gaaucaccuaauuaauuuc

SEQ ID NO: 3809371 - RNA, 22 nt, Human
gaaucagacccuaccccaccac

SEQ ID NO: 3809372 - RNA, 17 nt, Human
gaaucagaguagaaaua

SEQ ID NO: 3809373 - RNA, 13 nt, Human
gaaucagcacaga

SEQ ID NO: 3809374 - RNA, 12 nt, Human
gaaucagcuucu

SEQ ID NO: 3809375 - RNA, 20 nt, Human
gaaucaguauugggagccgg

SEQ ID NO: 3809376 - RNA, 22 nt, Human
gaaucaguuuccaauuauuuga

SEQ ID NO: 3809377 - RNA, 19 nt, Human
gaaucauacuuagcaaagu

SEQ ID NO: 3809378 - RNA, 20 nt, Human
gaaucaugagccugcuggaa

SEQ ID NO: 3809379 - RNA, 13 nt, Human
gaaucauuauuua

SEQ ID NO: 3809380 - RNA, 17 nt, Human
gaaucauucucgauuua

SEQ ID NO: 3809381 - RNA, 14 nt, Human
gaaucauugcuuau

SEQ ID NO: 3809382 - RNA, 13 nt, Human
gaaucauuuagca

SEQ ID NO: 3809383 - RNA, 24 nt, Human
gaaucauuuagcauguuguugaaa

SEQ ID NO: 3809384 - RNA, 14 nt, Human
gaaucauuuguuca

SEQ ID NO: 3809385 - RNA, 23 nt, Human
gaaucauuuguucaaagcuguug

SEQ ID NO: 3809386 - RNA, 17 nt, Human
gaauccaaaagaaaaac

SEQ ID NO: 3809387 - RNA, 20 nt, Human
gaauccaagccuccacagcg

SEQ ID NO: 3809388 - RNA, 17 nt, Human
gaauccaagcucccugc

SEQ ID NO: 3809389 - RNA, 18 nt, Human
gaauccaagcucccugcc

SEQ ID NO: 3809390 - RNA, 20 nt, Human
gaauccaagcucccugcccc

SEQ ID NO: 3809391 - RNA, 17 nt, Human
gaauccaagugaacacu

SEQ ID NO: 3809392 - RNA, 24 nt, Human
gaauccacccauccuaccaaugca

SEQ ID NO: 3809393 - RNA, 19 nt, Human
gaaucccaaauuugauuga

SEQ ID NO: 3809394 - RNA, 18 nt, Human
gaaucccacccacaugug

SEQ ID NO: 3809395 - RNA, 22 nt, Human
gaaucccacccacaugugacac

SEQ ID NO: 3809396 - RNA, 17 nt, Human
gaaucccacuguaugau

SEQ ID NO: 3809397 - RNA, 22 nt, Human
gaaucccagcccccugaccacu

SEQ ID NO: 3809398 - RNA, 23 nt, Human
gaaucccccuugccaccccaccc

SEQ ID NO: 3809399 - RNA, 14 nt, Human
gaaucccuguucau

SEQ ID NO: 3809400 - RNA, 18 nt, Human
gaaucccuguucauugua

SEQ ID NO: 3809401 - RNA, 10 nt, Human
gaauccuccu

SEQ ID NO: 3809402 - RNA, 16 nt, Human
gaaucgcuccugcagc

SEQ ID NO: 3809403 - RNA, 20 nt, Human
gaaucgcuccugcagcccca

SEQ ID NO: 3809404 - RNA, 15 nt, Human
gaaucuacuaauucc

SEQ ID NO: 3809405 - RNA, 14 nt, Human
gaaucuagaagaaa

SEQ ID NO: 3809406 - RNA, 19 nt, Human
gaaucuagaagaaaugaaa

SEQ ID NO: 3809407 - RNA, 17 nt, Human
gaaucuagccagugaac

SEQ ID NO: 3809408 - RNA, 13 nt, Human
gaaucuauauuua

SEQ ID NO: 3809409 - RNA, 21 nt, Human
gaaucuaucugcuuaugcagu

SEQ ID NO: 3809410 - RNA, 19 nt, Human
gaaucuaugccaaagauca

SEQ ID NO: 3809411 - RNA, 22 nt, Human
gaaucuaugccaaagaucacuu

SEQ ID NO: 3809412 - RNA, 15 nt, Human
gaaucuauuuaagua

SEQ ID NO: 3809413 - RNA, 18 nt, Human
gaaucuauuuaucuucau

SEQ ID NO: 3809414 - RNA, 19 nt, Human
gaaucuauuuucuauguac

SEQ ID NO: 3809415 - RNA, 14 nt, Human
gaaucucugugccu

SEQ ID NO: 3809416 - RNA, 15 nt, Human
gaaucucugugccuu

SEQ ID NO: 3809417 - RNA, 21 nt, Human
gaaucugcaauucaaaaguuc

SEQ ID NO: 3809418 - RNA, 16 nt, Human
gaaucugcucacuuua

SEQ ID NO: 3809419 - RNA, 21 nt, Human
gaaucuggaccccaucuguga

SEQ ID NO: 3809420 - RNA, 14 nt, Human
gacaacgaggaagc

SEQ ID NO: 3809421 - RNA, 16 nt, Human
gacaacgaggaagccc

SEQ ID NO: 3809422 - RNA, 22 nt, Human
gacaacugcucccaccuccuga

SEQ ID NO: 3809423 - RNA, 15 nt, Human
gacaacuggcaggca

SEQ ID NO: 3809424 - RNA, 18 nt, Human
gacaacuggcaggcaggc

SEQ ID NO: 3809425 - RNA, 12 nt, Human
gacaacugugac

SEQ ID NO: 3809426 - RNA, 18 nt, Human
gacaacuuugccagcuuu

SEQ ID NO: 3809427 - RNA, 15 nt, Human
gacaagaaaaucagg

SEQ ID NO: 3809428 - RNA, 15 nt, Human
gacaagacccccagc

SEQ ID NO: 3809429 - RNA, 24 nt, Human
gacaagacuucgggaaggugucug

SEQ ID NO: 3809430 - RNA, 14 nt, Human
gacaagagauggga

SEQ ID NO: 3809431 - RNA, 18 nt, Human
gacaagagaugggaauga

SEQ ID NO: 3809432 - RNA, 21 nt, Human
gacaagcauggucccacaucc

SEQ ID NO: 3809433 - RNA, 15 nt, Human
gacaagcucacagac

SEQ ID NO: 3809434 - RNA, 20 nt, Human
gacaaggaccgucuccugcg

SEQ ID NO: 3809435 - RNA, 21 nt, Human
gacaaggauugcuacuguccu

SEQ ID NO: 3809436 - RNA, 14 nt, Human
gacaaggccccaga

SEQ ID NO: 3809437 - RNA, 16 nt, Human
gacaaggccccagaga

SEQ ID NO: 3809438 - RNA, 13 nt, Human
gacaagggcugac

SEQ ID NO: 3809439 - RNA, 21 nt, Human
gacaagggcugaccugccucu

SEQ ID NO: 3809440 - RNA, 14 nt, Human
gacaagguagcccu

SEQ ID NO: 3809441 - RNA, 23 nt, Human
gacaagguagcccuggccagagg

SEQ ID NO: 3809442 - RNA, 20 nt, Human
gacaaguggacucagggcag

SEQ ID NO: 3809443 - RNA, 14 nt, Human
gacaauaaaacauu

SEQ ID NO: 3809444 - RNA, 19 nt, Human
gacaauaaagcuuguugac

SEQ ID NO: 3809445 - RNA, 19 nt, Human
gacaauaugugagugccuu

SEQ ID NO: 3809446 - RNA, 21 nt, Human
gacaauaugugccaaucaaua

SEQ ID NO: 3809447 - RNA, 19 nt, Human
gacaaucaguccccuccca

SEQ ID NO: 3809448 - RNA, 19 nt, Human
gacaaucaugaaauaugca

SEQ ID NO: 3809449 - RNA, 20 nt, Human
gacaaucaugaaauaugcau

SEQ ID NO: 3809450 - RNA, 20 nt, Human
gacaaucauuguuuugaaua

SEQ ID NO: 3809451 - RNA, 16 nt, Human
gacaaugacccagugg

SEQ ID NO: 3809452 - RNA, 18 nt, Human
gacaaugcaaaccaucau

SEQ ID NO: 3809453 - RNA, 22 nt, Human
gacaaugcaccuagcugugcaa

SEQ ID NO: 3809454 - RNA, 16 nt, Human
gacaaugcagaugcca

SEQ ID NO: 3809455 - RNA, 19 nt, Human
gacaaugcagaugccagag

SEQ ID NO: 3809456 - RNA, 14 nt, Human
gacaauggaccgga

SEQ ID NO: 3809457 - RNA, 19 nt, Human
gacaaugugaaaagaaaaa

SEQ ID NO: 3809458 - RNA, 17 nt, Human
gacaauguuguaguguc

SEQ ID NO: 3809459 - RNA, 18 nt, Human
gacaauguuguagugucc

SEQ ID NO: 3809460 - RNA, 13 nt, Human
gacaauguuuaca

SEQ ID NO: 3809461 - RNA, 21 nt, Human
gacaauuccuagauaaaaaga

SEQ ID NO: 3809462 - RNA, 15 nt, Human
gacaauugucuuuuu

SEQ ID NO: 3809463 - RNA, 22 nt, Human
gacaauuuauauuuaauaaaau

SEQ ID NO: 3809464 - RNA, 19 nt, Human
gacaauuuauuauggcaca

SEQ ID NO: 3809465 - RNA, 16 nt, Human
gacacaaaaaguagau

SEQ ID NO: 3809466 - RNA, 14 nt, Human
gacacaaaccugcc

SEQ ID NO: 3809467 - RNA, 14 nt, Human
gacacaaaggaagu

SEQ ID NO: 3809468 - RNA, 16 nt, Human
gacacaagccuucggc

SEQ ID NO: 3809469 - RNA, 13 nt, Human
gacacacaaagca

SEQ ID NO: 3809470 - RNA, 14 nt, Human
gacacacacacgca

SEQ ID NO: 3809471 - RNA, 19 nt, Human
gacacacacacgcacgcac

SEQ ID NO: 3809472 - RNA, 20 nt, Human
gacacacacacgcacgcaca

SEQ ID NO: 3809473 - RNA, 14 nt, Human
gacacacagcucug

SEQ ID NO: 3809474 - RNA, 15 nt, Human
gacacacagcucugu

SEQ ID NO: 3809475 - RNA, 21 nt, Human
gacacacagcucuguccuggg

SEQ ID NO: 3809476 - RNA, 12 nt, Human
gacacacaugaa

SEQ ID NO: 3809477 - RNA, 18 nt, Human
gacacacuaaccaagcug

SEQ ID NO: 3809478 - RNA, 19 nt, Human
gacacacuaaccaagcuga

SEQ ID NO: 3809479 - RNA, 19 nt, Human
gacacacuacaccacacac

SEQ ID NO: 3809480 - RNA, 22 nt, Human
gacacacuaucauaguuaacau

SEQ ID NO: 3809481 - RNA, 16 nt, Human
gacacacugaagaagc

SEQ ID NO: 3809482 - RNA, 16 nt, Human
gacacagaaaauguug

SEQ ID NO: 3809483 - RNA, 18 nt, Human
gacacagaaaauguugag

SEQ ID NO: 3809484 - RNA, 19 nt, Human
gacacagaaaauguugaga

SEQ ID NO: 3809485 - RNA, 12 nt, Human
gacacagauaau

SEQ ID NO: 3809486 - RNA, 15 nt, Human
gacacagaugaaaca

SEQ ID NO: 3809487 - RNA, 15 nt, Human
gacacagauuggcca

SEQ ID NO: 3809488 - RNA, 18 nt, Human
gacacagcagcuucacca

SEQ ID NO: 3809489 - RNA, 19 nt, Human
gacacagcagcuucaccag

SEQ ID NO: 3809490 - RNA, 21 nt, Human
gacacagcagcuucaccagag

SEQ ID NO: 3809491 - RNA, 12 nt, Human
gacacagcucuu

SEQ ID NO: 3809492 - RNA, 14 nt, Human
gacacagcucuucu

SEQ ID NO: 3809493 - RNA, 19 nt, Human
gacacagcucuucuccagg

SEQ ID NO: 3809494 - RNA, 21 nt, Human
gacacaggauagauaacucuu

SEQ ID NO: 3809495 - RNA, 17 nt, Human
gacacaggaugaaggca

SEQ ID NO: 3809496 - RNA, 15 nt, Human
gacacaggcccggcu

SEQ ID NO: 3809497 - RNA, 18 nt, Human
gacacaggcccggcucca

SEQ ID NO: 3809498 - RNA, 19 nt, Human
gacacaggcccggcuccag

SEQ ID NO: 3809499 - RNA, 16 nt, Human
gacaacagacuucuga

SEQ ID NO: 3809500 - RNA, 14 nt, Human
gacaacauguuuaa

SEQ ID NO: 3809501 - RNA, 14 nt, Human
gacaacauuguaag

SEQ ID NO: 3809502 - RNA, 17 nt, Human
gacaaccaccgcucccc

SEQ ID NO: 3809503 - RNA, 23 nt, Human
gacaaccaccgcuccccagccca

SEQ ID NO: 3809504 - RNA, 19 nt, Human
gacaaccacuggucuguag

SEQ ID NO: 3809505 - RNA, 19 nt, Human
gacaaccauauuuagcagu

SEQ ID NO: 3809506 - RNA, 16 nt, Human
gacaaccauuaaaguc

SEQ ID NO: 3809507 - RNA, 13 nt, Human
gacaacccugcaa

SEQ ID NO: 3809508 - RNA, 18 nt, Human
gacaaccgaugcuccagc

SEQ ID NO: 3809509 - RNA, 20 nt, Human
gacaaccgaugcuccagcca

SEQ ID NO: 3809510 - RNA, 22 nt, Human
gacaaccuuggcuuggcccugg

SEQ ID NO: 3809511 - RNA, 15 nt, Human
gacaacgaggaagcc

SEQ ID NO: 3809512 - RNA, 15 nt, Human
gacaacuacagaaaa

SEQ ID NO: 3809513 - RNA, 19 nt, Human
gacaacugcucccaccucc

SEQ ID NO: 3809514 - RNA, 21 nt, Human
gacaacugcucccaccuccug

SEQ ID NO: 3809515 - RNA, 13 nt, Human
gacaacuggcagg

SEQ ID NO: 3809516 - RNA, 21 nt, Human
gacaacuucuaauugccaugu

SEQ ID NO: 3809517 - RNA, 13 nt, Human
gacaagaaaauca

SEQ ID NO: 3809518 - RNA, 16 nt, Human
gacaagacccccagca

SEQ ID NO: 3809519 - RNA, 16 nt, Human
gacaagacuucaguau

SEQ ID NO: 3809520 - RNA, 20 nt, Human
gacaagagaugggaaugagg

SEQ ID NO: 3809521 - RNA, 22 nt, Human
gacaagagccugaucucuuccu

SEQ ID NO: 3809522 - RNA, 18 nt, Human
gacaagauauuguacaua

SEQ ID NO: 3809523 - RNA, 15 nt, Human
gacaagcacagucag

SEQ ID NO: 3809524 - RNA, 16 nt, Human
gacaagccccaggcag

SEQ ID NO: 3809525 - RNA, 20 nt, Human
gacaaggaaaaaauaacaau

SEQ ID NO: 3809526 - RNA, 21 nt, Human
gacaaggaugaucuaggaaga

SEQ ID NO: 3809527 - RNA, 18 nt, Human
gacaaggauugcuacugu

SEQ ID NO: 3809528 - RNA, 19 nt, Human
gacaaggauugcuacuguc

SEQ ID NO: 3809529 - RNA, 20 nt, Human
gacaaggccccagagacuca

SEQ ID NO: 3809530 - RNA, 23 nt, Human
gacaaggccccagagacucagag

SEQ ID NO: 3809531 - RNA, 12 nt, Human
gacaagggcuga

SEQ ID NO: 3809532 - RNA, 16 nt, Human
gacaaggugcaggcag

SEQ ID NO: 3809533 - RNA, 15 nt, Human
gacaaguaauuucag

SEQ ID NO: 3809534 - RNA, 20 nt, Human
gacaagugcugaacagugga

SEQ ID NO: 3809535 - RNA, 14 nt, Human
gacaaguuccaugg

SEQ ID NO: 3809536 - RNA, 15 nt, Human
gacaauaaaauauua

SEQ ID NO: 3809537 - RNA, 22 nt, Human
gacaauaaacccucagagccuc

SEQ ID NO: 3809538 - RNA, 15 nt, Human
gacaauaaucucacu

SEQ ID NO: 3809539 - RNA, 19 nt, Human
gacaauaauucuggagaua

SEQ ID NO: 3809540 - RNA, 13 nt, Human
gacaauaauuuca

SEQ ID NO: 3809541 - RNA, 19 nt, Human
gacaauacuguaugucguc

SEQ ID NO: 3809542 - RNA, 18 nt, Human
gacaaucaguccccuccc

SEQ ID NO: 3809543 - RNA, 21 nt, Human
gacaaucaugaaauaugcauc

SEQ ID NO: 3809544 - RNA, 14 nt, Human
gacaaucaugugug

SEQ ID NO: 3809545 - RNA, 15 nt, Human
gacaaucaugugugu

SEQ ID NO: 3809546 - RNA, 17 nt, Human
gacaaugacuuacugua

SEQ ID NO: 3809547 - RNA, 14 nt, Human
gacaaugucugaac

SEQ ID NO: 3809548 - RNA, 19 nt, Human
gacaaugucugcagcccug

SEQ ID NO: 3809549 - RNA, 12 nt, Human
gacaaugugaaa

SEQ ID NO: 3809550 - RNA, 19 nt, Human
gacaauguuguaguguccc

SEQ ID NO: 3809551 - RNA, 22 nt, Human
gacaauuagauaaauguccauu

SEQ ID NO: 3809552 - RNA, 16 nt, Human
gacaauucaugaacuu

SEQ ID NO: 3809553 - RNA, 22 nt, Human
gacaauucuuuauacaacagug

SEQ ID NO: 3809554 - RNA, 22 nt, Human
gacaauugagguaaguuuuuug

SEQ ID NO: 3809555 - RNA, 21 nt, Human
gacaauuguuuuaaucugaaa

SEQ ID NO: 3809556 - RNA, 13 nt, Human
gacaauuuauuau

SEQ ID NO: 3809557 - RNA, 20 nt, Human
gacaauuucaaaaaaauaaa

SEQ ID NO: 3809558 - RNA, 16 nt, Human
gacaauuugauacaua

SEQ ID NO: 3809559 - RNA, 17 nt, Human
gacaauuugauacauaa

SEQ ID NO: 3809560 - RNA, 18 nt, Human
gacaauuugauacauaau

SEQ ID NO: 3809561 - RNA, 22 nt, Human
gacaauuugauacauaauaaaa

SEQ ID NO: 3809562 - RNA, 21 nt, Human
gacacaaaacuccgcccccag

SEQ ID NO: 3809563 - RNA, 15 nt, Human
gacacaaacacacac

SEQ ID NO: 3809564 - RNA, 17 nt, Human
gacacaaaccugccugg

SEQ ID NO: 3809565 - RNA, 20 nt, Human
gacacaaaccugccuggguu

SEQ ID NO: 3809566 - RNA, 15 nt, Human
gacacaaacugccaa

SEQ ID NO: 3809567 - RNA, 13 nt, Human
gacacaaaugcau

SEQ ID NO: 3809568 - RNA, 14 nt, Human
gacacaacaacucc

SEQ ID NO: 3809569 - RNA, 12 nt, Human
gacacacacacg

SEQ ID NO: 3809570 - RNA, 13 nt, Human
gacacacacacgc

SEQ ID NO: 3809571 - RNA, 15 nt, Human
gacacacacacgcac

SEQ ID NO: 3809572 - RNA, 21 nt, Human
gacacacacacgcacgcacac

SEQ ID NO: 3809573 - RNA, 17 nt, Human
gacacacacagacuauu

SEQ ID NO: 3809574 - RNA, 13 nt, Human
gacacacacagcu

SEQ ID NO: 3809575 - RNA, 13 nt, Human
gacacacagcucu

SEQ ID NO: 3809576 - RNA, 17 nt, Human
gacacacagcucugucc

SEQ ID NO: 3809577 - RNA, 21 nt, Human
gacacacuacaccacacacaa

SEQ ID NO: 3809578 - RNA, 13 nt, Human
gacacacugaaga

SEQ ID NO: 3809579 - RNA, 11 nt, Human
gacacagaaaa

SEQ ID NO: 3809580 - RNA, 21 nt, Human
gacacagaaaauguugagaau

SEQ ID NO: 3809581 - RNA, 15 nt, Human
gacacagaacacaga

SEQ ID NO: 3809582 - RNA, 21 nt, Human
gacacagcucuucuccaggcu

SEQ ID NO: 3809583 - RNA, 17 nt, Human
gacacaggcccucccug

SEQ ID NO: 3809584 - RNA, 15 nt, Human
gacacaggccugugu

SEQ ID NO: 3809585 - RNA, 23 nt, Human
gacacagggugacggugacaaag

SEQ ID NO: 3809586 - RNA, 15 nt, Human
gacacauguccaaga

SEQ ID NO: 3809587 - RNA, 20 nt, Human
gacacauucaacccuggaga

SEQ ID NO: 3809588 - RNA, 21 nt, Human
gacacauucaacccuggagag

SEQ ID NO: 3809589 - RNA, 23 nt, Human
gacacauuuuuuaggaaauguuu

SEQ ID NO: 3809590 - RNA, 15 nt, Human
gacaccaaagccacc

SEQ ID NO: 3809591 - RNA, 14 nt, Human
gacaccacacccag

SEQ ID NO: 3809592 - RNA, 18 nt, Human
gacaccacacccagccuc

SEQ ID NO: 3809593 - RNA, 20 nt, Human
gacaccacacccagccucag

SEQ ID NO: 3809594 - RNA, 14 nt, Human
gacaccagagcaga

SEQ ID NO: 3809595 - RNA, 22 nt, Human
gacaccagagcagaugcagaga

SEQ ID NO: 3809596 - RNA, 17 nt, Human
gacaccagccaggcucu

SEQ ID NO: 3809597 - RNA, 22 nt, Human
gacaccagccuuucucccaggc

SEQ ID NO: 3809598 - RNA, 12 nt, Human
gacacccagaaa

SEQ ID NO: 3809599 - RNA, 19 nt, Human
gacacccauguuucucugg

SEQ ID NO: 3809600 - RNA, 14 nt, Human
gacaccccacuuag

SEQ ID NO: 3809601 - RNA, 17 nt, Human
gacaccccuuauccagg

SEQ ID NO: 3809602 - RNA, 19 nt, Human
gacaccccuuauccaggac

SEQ ID NO: 3809603 - RNA, 21 nt, Human
gacaccccuuauccaggacuc

SEQ ID NO: 3809604 - RNA, 13 nt, Human
gacacccugugau

SEQ ID NO: 3809605 - RNA, 22 nt, Human
gacacccugugauggggcccug

SEQ ID NO: 3809606 - RNA, 23 nt, Human
gacacccuucucccacucuccua

SEQ ID NO: 3809607 - RNA, 15 nt, Human
gacaccuaacucuuc

SEQ ID NO: 3809608 - RNA, 16 nt, Human
gacaccuaacucuucu

SEQ ID NO: 3809609 - RNA, 21 nt, Human
gacauuccuucucccaucucu

SEQ ID NO: 3809610 - RNA, 22 nt, Human
gacauucugaaugcuucuaagu

SEQ ID NO: 3809611 - RNA, 14 nt, Human
gacauucugccagg

SEQ ID NO: 3809612 - RNA, 11 nt, Human
gacauucuguc

SEQ ID NO: 3809613 - RNA, 24 nt, Human
gacauucuuguaaggcuuugauua

SEQ ID NO: 3809614 - RNA, 14 nt, Human
gacauugaaaucua

SEQ ID NO: 3809615 - RNA, 22 nt, Human
gacauugacuauuuuuguuuuu

SEQ ID NO: 3809616 - RNA, 15 nt, Human
gacauugaggaccuc

SEQ ID NO: 3809617 - RNA, 23 nt, Human
gacauugcggacagccacggcca

SEQ ID NO: 3809618 - RNA, 14 nt, Human
gacauugucaauaa

SEQ ID NO: 3809619 - RNA, 12 nt, Human
gacauugucucc

SEQ ID NO: 3809620 - RNA, 21 nt, Human
gacauugucuccuauauauuu

SEQ ID NO: 3809621 - RNA, 19 nt, Human
gacauuguuggccaaagcc

SEQ ID NO: 3809622 - RNA, 14 nt, Human
gacauuguuuugcc

SEQ ID NO: 3809623 - RNA, 13 nt, Human
gacauuuaauuua

SEQ ID NO: 3809624 - RNA, 18 nt, Human
gacauuuauacucuuuuu

SEQ ID NO: 3809625 - RNA, 20 nt, Human
gacauuucucuuacugcaaa

SEQ ID NO: 3809626 - RNA, 21 nt, Human
gacauuucuuuucuuuuuaca

SEQ ID NO: 3809627 - RNA, 16 nt, Human
gacauuuggagagggg

SEQ ID NO: 3809628 - RNA, 16 nt, Human
gacauuugucauuuuc

SEQ ID NO: 3809629 - RNA, 17 nt, Human
gacauuugucauuuuca

SEQ ID NO: 3809630 - RNA, 16 nt, Human
gacauuuuaacaagaa

SEQ ID NO: 3809631 - RNA, 20 nt, Human
gacauuuuaacaagaagaug

SEQ ID NO: 3809632 - RNA, 22 nt, Human
gacauuuuaacaagaagaugaa

SEQ ID NO: 3809633 - RNA, 13 nt, Human
gacauuuuacauu

SEQ ID NO: 3809634 - RNA, 14 nt, Human
gacauuuuacauua

SEQ ID NO: 3809635 - RNA, 20 nt, Human
gacauuuuaugucuuucuug

SEQ ID NO: 3809636 - RNA, 20 nt, Human
gacauuuucuuucaugggca

SEQ ID NO: 3809637 - RNA, 17 nt, Human
gacauuuugccaaaauu

SEQ ID NO: 3809638 - RNA, 14 nt, Human
gaccaaaaaaauaa

SEQ ID NO: 3809639 - RNA, 17 nt, Human
gaccaaaaugacaauga

SEQ ID NO: 3809640 - RNA, 17 nt, Human
gaccaaaccuagccccu

SEQ ID NO: 3809641 - RNA, 21 nt, Human
gaccaaagggagucugccagg

SEQ ID NO: 3809642 - RNA, 13 nt, Human
gaccaaauggaaa

SEQ ID NO: 3809643 - RNA, 23 nt, Human
gaccaaauuccuuggcaugccuu

SEQ ID NO: 3809644 - RNA, 18 nt, Human
gaccaacaagggcagugg

SEQ ID NO: 3809645 - RNA, 17 nt, Human
gaccaacauggagaaac

SEQ ID NO: 3809646 - RNA, 21 nt, Human
gaccaacauggagaaacccug

SEQ ID NO: 3809647 - RNA, 17 nt, Human
gaccaacccuguuuccu

SEQ ID NO: 3809648 - RNA, 13 nt, Human
gaccaaccugacc

SEQ ID NO: 3809649 - RNA, 20 nt, Human
gaccaacguuacucagggcu

SEQ ID NO: 3809650 - RNA, 17 nt, Human
gaccaacuagacauucu

SEQ ID NO: 3809651 - RNA, 18 nt, Human
gaccaacuagacauucug

SEQ ID NO: 3809652 - RNA, 18 nt, Human
gaccaacuguguuguauu

SEQ ID NO: 3809653 - RNA, 21 nt, Human
gaccaacuguguuguauuaac

SEQ ID NO: 3809654 - RNA, 15 nt, Human
gaccaagaacugcau

SEQ ID NO: 3809655 - RNA, 18 nt, Human
gaccaagagagaaagaag

SEQ ID NO: 3809656 - RNA, 13 nt, Human
gaccaaggacccc

SEQ ID NO: 3809657 - RNA, 16 nt, Human
gaccaaggaccccuca

SEQ ID NO: 3809658 - RNA, 19 nt, Human
gaccaaggaccccucaccu

SEQ ID NO: 3809659 - RNA, 16 nt, Human
gaccaaggagaugaag

SEQ ID NO: 3809660 - RNA, 23 nt, Human
gaccaaggcaaggcaggugccuc

SEQ ID NO: 3809661 - RNA, 18 nt, Human
gaccaaggggugggccac

SEQ ID NO: 3809662 - RNA, 18 nt, Human
gaccaagguuccagcuca

SEQ ID NO: 3809663 - RNA, 17 nt, Human
gaccaaguauaaacuuu

SEQ ID NO: 3809664 - RNA, 12 nt, Human
gaccaauaaaga

SEQ ID NO: 3809665 - RNA, 13 nt, Human
gaccaauugugcu

SEQ ID NO: 3809666 - RNA, 15 nt, Human
gaccaauugugcugc

SEQ ID NO: 3809667 - RNA, 18 nt, Human
gaccacaaaacuuuucua

SEQ ID NO: 3809668 - RNA, 14 nt, Human
gaccacaacaugag

SEQ ID NO: 3809669 - RNA, 14 nt, Human
gaccacacuccagc

SEQ ID NO: 3809670 - RNA, 22 nt, Human
gaccacacuuccuguccagaga

SEQ ID NO: 3809671 - RNA, 11 nt, Human
gaccacagcaa

SEQ ID NO: 3809672 - RNA, 15 nt, Human
gaccacagcacagcc

SEQ ID NO: 3809673 - RNA, 19 nt, Human
gaccacaggugcccgccac

SEQ ID NO: 3809674 - RNA, 13 nt, Human
gaccaccaagccu

SEQ ID NO: 3809675 - RNA, 22 nt, Human
gaccaccaagccuugauuggug

SEQ ID NO: 3809676 - RNA, 19 nt, Human
gaccaccagggcaucucug

SEQ ID NO: 3809677 - RNA, 23 nt, Human
gaccaccagggcaucucugggcu

SEQ ID NO: 3809678 - RNA, 19 nt, Human
gaccaccccgccugcccuc

SEQ ID NO: 3809679 - RNA, 14 nt, Human
gaccaccccugccu

SEQ ID NO: 3809680 - RNA, 14 nt, Human
gaccacccucacug

SEQ ID NO: 3809681 - RNA, 15 nt, Human
gaccacccugagccg

SEQ ID NO: 3809682 - RNA, 16 nt, Human
gaccaccucucaauau

SEQ ID NO: 3809683 - RNA, 17 nt, Human
gaccacgcccguccugc

SEQ ID NO: 3809684 - RNA, 13 nt, Human
gaccacggcucga

SEQ ID NO: 3809685 - RNA, 21 nt, Human
gaccacucagagacaugcaga

SEQ ID NO: 3809686 - RNA, 14 nt, Human
gaccacucagcccc

SEQ ID NO: 3809687 - RNA, 16 nt, Human
gaccacucagccccua

SEQ ID NO: 3809688 - RNA, 19 nt, Human
gaccacucagccccuagga

SEQ ID NO: 3809689 - RNA, 18 nt, Human
gaccacugcagaagacag

SEQ ID NO: 3809690 - RNA, 19 nt, Human
gaccacuguuucuugcuug

SEQ ID NO: 3809691 - RNA, 20 nt, Human
gaccacuguuucuugcuugu

SEQ ID NO: 3809692 - RNA, 22 nt, Human
gaccacuuccaggggaaccugc

SEQ ID NO: 3809693 - RNA, 16 nt, Human
gaccacuugaggccug

SEQ ID NO: 3809694 - RNA, 17 nt, Human
gaccacuugaggccuga

SEQ ID NO: 3809695 - RNA, 16 nt, Human
gaccagaagccaaaga

SEQ ID NO: 3809696 - RNA, 20 nt, Human
gaccagaagcucccccagca

SEQ ID NO: 3809697 - RNA, 23 nt, Human
gaccagacaccuugacagggcac

SEQ ID NO: 3809698 - RNA, 21 nt, Human
gaccagagccccacacggagg

SEQ ID NO: 3809699 - RNA, 14 nt, Human
gaccagagcugcca

SEQ ID NO: 3809700 - RNA, 15 nt, Human
gaccagagcugccac

SEQ ID NO: 3809701 - RNA, 17 nt, Human
gaccagagcugccaccu

SEQ ID NO: 3809702 - RNA, 20 nt, Human
gaccagcaccaucucuccuc

SEQ ID NO: 3809703 - RNA, 14 nt, Human
gaccagcagcgccu

SEQ ID NO: 3809704 - RNA, 19 nt, Human
gaccagcauccuuaaguau

SEQ ID NO: 3809705 - RNA, 18 nt, Human
gaccagccagcagcagcc

SEQ ID NO: 3809706 - RNA, 12 nt, Human
gaccagcccacg

SEQ ID NO: 3809707 - RNA, 16 nt, Human
gaccagcccacgcuga

SEQ ID NO: 3809708 - RNA, 18 nt, Human
gaccagccgugagcaugu

SEQ ID NO: 3809709 - RNA, 22 nt, Human
gaccagccgugagcauguuugg

SEQ ID NO: 3809710 - RNA, 22 nt, Human
gaccagccuccaugcugccucc

SEQ ID NO: 3809711 - RNA, 22 nt, Human
gaccagccucccugucggccug

SEQ ID NO: 3809712 - RNA, 17 nt, Human
gaccagccugggcagca

SEQ ID NO: 3809713 - RNA, 18 nt, Human
gaccagcucccccucccu

SEQ ID NO: 3809714 - RNA, 21 nt, Human
gaccagcucccccucccuccc

SEQ ID NO: 3809715 - RNA, 15 nt, Human
gaccagcugcuccga

SEQ ID NO: 3809716 - RNA, 19 nt, Human
gaccagcugcuccgaggac

SEQ ID NO: 3809717 - RNA, 23 nt, Human
gaccagcuggggcguggggaggg

SEQ ID NO: 3809718 - RNA, 22 nt, Human
gaccaggacuauagcccagguc

SEQ ID NO: 3809719 - RNA, 10 nt, Human
gaccaggagu

SEQ ID NO: 3809720 - RNA, 18 nt, Human
gaccaggagugggugggg

SEQ ID NO: 3809721 - RNA, 13 nt, Human
gaccaggauccag

SEQ ID NO: 3809722 - RNA, 23 nt, Human
gaccaggcauccuccacaauagc

SEQ ID NO: 3809723 - RNA, 19 nt, Human
gaccaggccauucugccgc

SEQ ID NO: 3809724 - RNA, 15 nt, Human
gaccaggcuguagga

SEQ ID NO: 3809725 - RNA, 15 nt, Human
gaccaggcugugucc

SEQ ID NO: 3809726 - RNA, 16 nt, Human
gaccaggcuuggccuu

SEQ ID NO: 3809727 - RNA, 22 nt, Human
gaccagggagccuuugguucug

SEQ ID NO: 3809728 - RNA, 22 nt, Human
gaccaggggugauuucagagag

SEQ ID NO: 3809729 - RNA, 23 nt, Human
gaccaggggugauuucagagagg

SEQ ID NO: 3809730 - RNA, 23 nt, Human
gaccaguugaauaaaagugcaca

SEQ ID NO: 3809731 - RNA, 19 nt, Human
gaccauaacagccaacagg

SEQ ID NO: 3809732 - RNA, 23 nt, Human
gaccaucauuucaccugcugcuu

SEQ ID NO: 3809733 - RNA, 23 nt, Human
gaccauccacucuacccucccac

SEQ ID NO: 3809734 - RNA, 12 nt, Human
gaccaucccuga

SEQ ID NO: 3809735 - RNA, 17 nt, Human
gaccaucccugaaggcc

SEQ ID NO: 3809736 - RNA, 20 nt, Human
gaccaucccugaaggccccg

SEQ ID NO: 3809737 - RNA, 22 nt, Human
gaccaucccugaaggccccgcc

SEQ ID NO: 3809738 - RNA, 13 nt, Human
gaccauccuggcu

SEQ ID NO: 3809739 - RNA, 19 nt, Human
gaccaucuggaauugguuu

SEQ ID NO: 3809740 - RNA, 20 nt, Human
gaccaugcugucuggcacag

SEQ ID NO: 3809741 - RNA, 21 nt, Human
gaccauggacacuacacccag

SEQ ID NO: 3809742 - RNA, 22 nt, Human
gaccauggaguggcagcccagc

SEQ ID NO: 3809743 - RNA, 12 nt, Human
gaccauguggcc

SEQ ID NO: 3809744 - RNA, 12 nt, Human
gaccauguguca

SEQ ID NO: 3809745 - RNA, 16 nt, Human
gaccauucuccaccug

SEQ ID NO: 3809746 - RNA, 17 nt, Human
gaccauuggggcuccca

SEQ ID NO: 3809747 - RNA, 20 nt, Human
gaccauuggggcucccagcc

SEQ ID NO: 3809748 - RNA, 16 nt, Human
gaccauugucucagag

SEQ ID NO: 3809749 - RNA, 17 nt, Human
gaccauuuaacaugcaa

SEQ ID NO: 3809750 - RNA, 14 nt, Human
gaccauuuuccugc

SEQ ID NO: 3809751 - RNA, 19 nt, Human
gaccauuuuccugcauugg

SEQ ID NO: 3809752 - RNA, 19 nt, Human
gaccauuuuuuaauuuacu

SEQ ID NO: 3809753 - RNA, 23 nt, Human
gaccauuuuuuaauuuacuuguu

SEQ ID NO: 3809754 - RNA, 18 nt, Human
gacccaaaaggcagaagc

SEQ ID NO: 3809755 - RNA, 13 nt, Human
gacccaaagacca

SEQ ID NO: 3809756 - RNA, 16 nt, Human
gacccaaggaaaacug

SEQ ID NO: 3809757 - RNA, 15 nt, Human
gacccacaagaaaug

SEQ ID NO: 3809758 - RNA, 16 nt, Human
gacaccuaggcuaggg

SEQ ID NO: 3809759 - RNA, 13 nt, Human
gacaccucuuuuu

SEQ ID NO: 3809760 - RNA, 15 nt, Human
gacaccugcaccucc

SEQ ID NO: 3809761 - RNA, 10 nt, Human
gacaccugcc

SEQ ID NO: 3809762 - RNA, 11 nt, Human
gacaccugccc

SEQ ID NO: 3809763 - RNA, 14 nt, Human
gacaccugcccugc

SEQ ID NO: 3809764 - RNA, 22 nt, Human
gacaccugcccugcccugccac

SEQ ID NO: 3809765 - RNA, 17 nt, Human
gacaccuugacagggca

SEQ ID NO: 3809766 - RNA, 20 nt, Human
gacaccuugacagggcacac

SEQ ID NO: 3809767 - RNA, 17 nt, Human
gacacgaauauugcuga

SEQ ID NO: 3809768 - RNA, 22 nt, Human
gacacgaauauugcugauggug

SEQ ID NO: 3809769 - RNA, 23 nt, Human
gacacgcgccccccucccagagg

SEQ ID NO: 3809770 - RNA, 21 nt, Human
gacacgggccuguccacaggc

SEQ ID NO: 3809771 - RNA, 22 nt, Human
gacacgggccuguccacaggcu

SEQ ID NO: 3809772 - RNA, 18 nt, Human
gacacggguggggaaagg

SEQ ID NO: 3809773 - RNA, 14 nt, Human
gacacguccacccc

SEQ ID NO: 3809774 - RNA, 15 nt, Human
gacacguccacccca

SEQ ID NO: 3809775 - RNA, 18 nt, Human
gacacgugggcuccccuc

SEQ ID NO: 3809776 - RNA, 15 nt, Human
gacacuaaccacgcu

SEQ ID NO: 3809777 - RNA, 20 nt, Human
gacacuaaccacgcuggacc

SEQ ID NO: 3809778 - RNA, 21 nt, Human
gacacuaaccacgcuggaccu

SEQ ID NO: 3809779 - RNA, 20 nt, Human
gacacuaaguuauaguauau

SEQ ID NO: 3809780 - RNA, 15 nt, Human
gacacuacacccagc

SEQ ID NO: 3809781 - RNA, 19 nt, Human
gacacuacacccagcaaua

SEQ ID NO: 3809782 - RNA, 16 nt, Human
gacacuagaagauuuu

SEQ ID NO: 3809783 - RNA, 13 nt, Human
gacacuauaucug

SEQ ID NO: 3809784 - RNA, 13 nt, Human
gacacucagaccu

SEQ ID NO: 3809785 - RNA, 14 nt, Human
gacacuccagugcc

SEQ ID NO: 3809786 - RNA, 16 nt, Human
gacacucccacccagu

SEQ ID NO: 3809787 - RNA, 16 nt, Human
gacacuccccgaaguc

SEQ ID NO: 3809788 - RNA, 21 nt, Human
gacacucccuugggcucccug

SEQ ID NO: 3809789 - RNA, 15 nt, Human
gacacucucuggaag

SEQ ID NO: 3809790 - RNA, 12 nt, Human
gacacucugcuc

SEQ ID NO: 3809791 - RNA, 16 nt, Human
gacacucugcucugcc

SEQ ID NO: 3809792 - RNA, 13 nt, Human
gacacugaugggc

SEQ ID NO: 3809793 - RNA, 16 nt, Human
gacacugcggggcuug

SEQ ID NO: 3809794 - RNA, 20 nt, Human
gacacugcggggcuuggcug

SEQ ID NO: 3809795 - RNA, 20 nt, Human
gacacugcucuaacagcccu

SEQ ID NO: 3809796 - RNA, 17 nt, Human
gacacugggaggccagu

SEQ ID NO: 3809797 - RNA, 14 nt, Human
gacacuggugggga

SEQ ID NO: 3809798 - RNA, 12 nt, Human
gacacuguacaa

SEQ ID NO: 3809799 - RNA, 13 nt, Human
gacacuguacaag

SEQ ID NO: 3809800 - RNA, 23 nt, Human
gacacugugcccagcccggaccu

SEQ ID NO: 3809801 - RNA, 17 nt, Human
gacacuuaauucuguuc

SEQ ID NO: 3809802 - RNA, 23 nt, Human
gacacuuauccacgagagcgcag

SEQ ID NO: 3809803 - RNA, 17 nt, Human
gacacuucagagagcug

SEQ ID NO: 3809804 - RNA, 20 nt, Human
gacacuucagagagcuggua

SEQ ID NO: 3809805 - RNA, 23 nt, Human
gacacuucagagagcugguaguu

SEQ ID NO: 3809806 - RNA, 12 nt, Human
gacacuuccugc

SEQ ID NO: 3809807 - RNA, 14 nt, Human
gacacuugucccca

SEQ ID NO: 3809808 - RNA, 19 nt, Human
gacacuuugaaauguguuu

SEQ ID NO: 3809809 - RNA, 19 nt, Human
gacacuuuuuugaguggau

SEQ ID NO: 3809810 - RNA, 12 nt, Human
gacagaaagcag

SEQ ID NO: 3809811 - RNA, 20 nt, Human
gacagaaagcagaacaguga

SEQ ID NO: 3809812 - RNA, 21 nt, Human
gacagaaagcagaacagugau

SEQ ID NO: 3809813 - RNA, 13 nt, Human
gacagaagaaggc

SEQ ID NO: 3809814 - RNA, 16 nt, Human
gacagaaggaccagcc

SEQ ID NO: 3809815 - RNA, 14 nt, Human
gacagaaggcuccu

SEQ ID NO: 3809816 - RNA, 16 nt, Human
gacagaaggcuccugc

SEQ ID NO: 3809817 - RNA, 15 nt, Human
gacagaagucuccuc

SEQ ID NO: 3809818 - RNA, 22 nt, Human
gacagaaguuugcacuaucuuu

SEQ ID NO: 3809819 - RNA, 21 nt, Human
gacagaauuuuuuuuguuguu

SEQ ID NO: 3809820 - RNA, 15 nt, Human
gacagacacaggccc

SEQ ID NO: 3809821 - RNA, 16 nt, Human
gacagacacaggcccg

SEQ ID NO: 3809822 - RNA, 17 nt, Human
gacagacacaggcccgg

SEQ ID NO: 3809823 - RNA, 22 nt, Human
gacagacacaggcccggcucca

SEQ ID NO: 3809824 - RNA, 15 nt, Human
gacagacaggcucuu

SEQ ID NO: 3809825 - RNA, 21 nt, Human
gacagacaggcucuuagcagc

SEQ ID NO: 3809826 - RNA, 18 nt, Human
gacagacaucucugcacc

SEQ ID NO: 3809827 - RNA, 18 nt, Human
gacagagacaccugcacc

SEQ ID NO: 3809828 - RNA, 20 nt, Human
gacagagacccucugccacc

SEQ ID NO: 3809829 - RNA, 15 nt, Human
gacagagaccuccug

SEQ ID NO: 3809830 - RNA, 21 nt, Human
gacagagcaagugagacccug

SEQ ID NO: 3809831 - RNA, 15 nt, Human
gacagagccaggaga

SEQ ID NO: 3809832 - RNA, 21 nt, Human
gacagagccccacccucagau

SEQ ID NO: 3809833 - RNA, 15 nt, Human
gacagagccugcccc

SEQ ID NO: 3809834 - RNA, 16 nt, Human
gacagagccugcccca

SEQ ID NO: 3809835 - RNA, 12 nt, Human
gacagaggaggg

SEQ ID NO: 3809836 - RNA, 12 nt, Human
gacagaggcagc

SEQ ID NO: 3809837 - RNA, 13 nt, Human
gacagaggcccuc

SEQ ID NO: 3809838 - RNA, 17 nt, Human
gacagaggggacucugg

SEQ ID NO: 3809839 - RNA, 18 nt, Human
gacagagggucacagugu

SEQ ID NO: 3809840 - RNA, 13 nt, Human
gacagagucuggg

SEQ ID NO: 3809841 - RNA, 21 nt, Human
gacagaguucacuauaaaugg

SEQ ID NO: 3809842 - RNA, 16 nt, Human
gacagaguugauuuuu

SEQ ID NO: 3809843 - RNA, 17 nt, Human
gacagauaccuccaacc

SEQ ID NO: 3809844 - RNA, 22 nt, Human
gacagauaccuccaacccugcc

SEQ ID NO: 3809845 - RNA, 15 nt, Human
gacagaucauagauu

SEQ ID NO: 3809846 - RNA, 21 nt, Human
gacagaucauagauuucugau

SEQ ID NO: 3809847 - RNA, 23 nt, Human
gacagaucauagauuucugauuu

SEQ ID NO: 3809848 - RNA, 23 nt, Human
gacagaucucugcuuuggaaauc

SEQ ID NO: 3809849 - RNA, 19 nt, Human
gacagaugaaugccgugga

SEQ ID NO: 3809850 - RNA, 18 nt, Human
gacagaugccccagagcu

SEQ ID NO: 3809851 - RNA, 17 nt, Human
gacagaugucagccgag

SEQ ID NO: 3809852 - RNA, 18 nt, Human
gacagaugucagccgagc

SEQ ID NO: 3809853 - RNA, 16 nt, Human
gacagcaaaaccauug

SEQ ID NO: 3809854 - RNA, 21 nt, Human
gacagcaaaaccauugcuuca

SEQ ID NO: 3809855 - RNA, 14 nt, Human
gacagcagcucagg

SEQ ID NO: 3809856 - RNA, 18 nt, Human
gacagcagcucaggcaca

SEQ ID NO: 3809857 - RNA, 12 nt, Human
gacagcaggcag

SEQ ID NO: 3809858 - RNA, 19 nt, Human
gacagcagucuuaugcuuc

SEQ ID NO: 3809859 - RNA, 19 nt, Human
gacagcaugugcccuccug

SEQ ID NO: 3809860 - RNA, 21 nt, Human
gacagcaugugcccuccugag

SEQ ID NO: 3809861 - RNA, 17 nt, Human
gacagcccacugagaag

SEQ ID NO: 3809862 - RNA, 23 nt, Human
gacagcccaggauacuggcacag

SEQ ID NO: 3809863 - RNA, 14 nt, Human
gacagccccacccu

SEQ ID NO: 3809864 - RNA, 19 nt, Human
gacagccccagagcagggu

SEQ ID NO: 3809865 - RNA, 24 nt, Human
gacagcccgauccuccccuggacu

SEQ ID NO: 3809866 - RNA, 22 nt, Human
gacagcccgggcucugccuccc

SEQ ID NO: 3809867 - RNA, 15 nt, Human
gacagccgccuggag

SEQ ID NO: 3809868 - RNA, 12 nt, Human
gacagccuggca

SEQ ID NO: 3809869 - RNA, 19 nt, Human
gacagccuggcacagggca

SEQ ID NO: 3809870 - RNA, 11 nt, Human
gacagccugua

SEQ ID NO: 3809871 - RNA, 22 nt, Human
gacagccuguggcggugccugg

SEQ ID NO: 3809872 - RNA, 18 nt, Human
gacagcgcacagcugcuc

SEQ ID NO: 3809873 - RNA, 14 nt, Human
gacagcuccuucug

SEQ ID NO: 3809874 - RNA, 15 nt, Human
gacagcuccuucugu

SEQ ID NO: 3809875 - RNA, 18 nt, Human
gacagcuccuucuguccu

SEQ ID NO: 3809876 - RNA, 15 nt, Human
gacagcucugccugu

SEQ ID NO: 3809877 - RNA, 20 nt, Human
gacagcucuuuuugugaagu

SEQ ID NO: 3809878 - RNA, 14 nt, Human
gacagcugccuggg

SEQ ID NO: 3809879 - RNA, 21 nt, Human
gacagcugccugggaucccuc

SEQ ID NO: 3809880 - RNA, 14 nt, Human
gacagcugucccug

SEQ ID NO: 3809881 - RNA, 17 nt, Human
gacagcugucccuguca

SEQ ID NO: 3809882 - RNA, 13 nt, Human
gacagcugugccu

SEQ ID NO: 3809883 - RNA, 15 nt, Human
gacagcugugccucg

SEQ ID NO: 3809884 - RNA, 17 nt, Human
gacagcugugccucgcu

SEQ ID NO: 3809885 - RNA, 21 nt, Human
gacagcuucucauccugcagg

SEQ ID NO: 3809886 - RNA, 22 nt, Human
gacagcuugagccgggccccug

SEQ ID NO: 3809887 - RNA, 12 nt, Human
gacaggaaaggg

SEQ ID NO: 3809888 - RNA, 23 nt, Human
gacaggacagugcuucagccuga

SEQ ID NO: 3809889 - RNA, 15 nt, Human
gacaggaccagggau

SEQ ID NO: 3809890 - RNA, 15 nt, Human
gacaggaccccagcu

SEQ ID NO: 3809891 - RNA, 20 nt, Human
gacaggaccccagcucugcg

SEQ ID NO: 3809892 - RNA, 14 nt, Human
gacaggaccccugc

SEQ ID NO: 3809893 - RNA, 21 nt, Human
gacaggacgcugaccguggag

SEQ ID NO: 3809894 - RNA, 22 nt, Human
gacaggacgcugaccguggagc

SEQ ID NO: 3809895 - RNA, 22 nt, Human
gacaggacuaacacucagaagc

SEQ ID NO: 3809896 - RNA, 11 nt, Human
gacaggagaaa

SEQ ID NO: 3809897 - RNA, 18 nt, Human
gacaggagaccuggcacu

SEQ ID NO: 3809898 - RNA, 21 nt, Human
gacaggagaccuggcacugga

SEQ ID NO: 3809899 - RNA, 22 nt, Human
gacaggagagauuauuuacaag

SEQ ID NO: 3809900 - RNA, 22 nt, Human
gacaggagaugcugugccccug

SEQ ID NO: 3809901 - RNA, 15 nt, Human
gacaggauccaggcc

SEQ ID NO: 3809902 - RNA, 16 nt, Human
gacaggaugggggcug

SEQ ID NO: 3809903 - RNA, 23 nt, Human
gacaggaugggggcuggccucug

SEQ ID NO: 3809904 - RNA, 20 nt, Human
gacaggauguguuugcuuuc

SEQ ID NO: 3809905 - RNA, 17 nt, Human
gacaggcaagcaccucc

SEQ ID NO: 3809906 - RNA, 14 nt, Human
gacaggcaaugcug

SEQ ID NO: 3809907 - RNA, 17 nt, Human
gacaggcaaugcuggcu

SEQ ID NO: 3809908 - RNA, 21 nt, Human
cucagcaccccuuccaugugg

SEQ ID NO: 3809909 - RNA, 18 nt, Human
cucagcacugccugcucc

SEQ ID NO: 3809910 - RNA, 16 nt, Human
cucagcacuuggcccu

SEQ ID NO: 3809911 - RNA, 17 nt, Human
cucagcacuuggcccuu

SEQ ID NO: 3809912 - RNA, 18 nt, Human
cucagcacuuggcccuuc

SEQ ID NO: 3809913 - RNA, 13 nt, Human
cucagcagcccuc

SEQ ID NO: 3809914 - RNA, 19 nt, Human
cucagcagcgaccaccccu

SEQ ID NO: 3809915 - RNA, 20 nt, Human
cucagcagcugguaaucuug

SEQ ID NO: 3809916 - RNA, 17 nt, Human
cucagcauccuggcacc

SEQ ID NO: 3809917 - RNA, 18 nt, Human
cucagcauccuggcaccc

SEQ ID NO: 3809918 - RNA, 22 nt, Human
cucagcauccuggcacccggcc

SEQ ID NO: 3809919 - RNA, 16 nt, Human
cucagcaugcauccuu

SEQ ID NO: 3809920 - RNA, 20 nt, Human
cucagcauuaccucuuugga

SEQ ID NO: 3809921 - RNA, 22 nt, Human
cucagccaaccuuacuuacagc

SEQ ID NO: 3809922 - RNA, 17 nt, Human
cucagccaagcacagug

SEQ ID NO: 3809923 - RNA, 14 nt, Human
cucagccaagcuug

SEQ ID NO: 3809924 - RNA, 17 nt, Human
cucagccacccugaguu

SEQ ID NO: 3809925 - RNA, 12 nt, Human
cucagccagaga

SEQ ID NO: 3809926 - RNA, 14 nt, Human
cucagccagagaag

SEQ ID NO: 3809927 - RNA, 15 nt, Human
cucagccaugaggag

SEQ ID NO: 3809928 - RNA, 19 nt, Human
cucagccccaccccagggc

SEQ ID NO: 3809929 - RNA, 21 nt, Human
cucagccccaccccagggcag

SEQ ID NO: 3809930 - RNA, 11 nt, Human
cucagccccag

SEQ ID NO: 3809931 - RNA, 16 nt, Human
cucagccccagcccag

SEQ ID NO: 3809932 - RNA, 23 nt, Human
cucagccccagcccagcccagcu

SEQ ID NO: 3809933 - RNA, 16 nt, Human
cucagccccgagcugu

SEQ ID NO: 3809934 - RNA, 19 nt, Human
cucagccccgagcuguccc

SEQ ID NO: 3809935 - RNA, 17 nt, Human
cucagccccgcguggaa

SEQ ID NO: 3809936 - RNA, 11 nt, Human
cucagccccua

SEQ ID NO: 3809937 - RNA, 12 nt, Human
cucagccccuag

SEQ ID NO: 3809938 - RNA, 13 nt, Human
cucagccccucuu

SEQ ID NO: 3809939 - RNA, 23 nt, Human
cucagccccugauccugugaagu

SEQ ID NO: 3809940 - RNA, 17 nt, Human
cucagcccucacacacc

SEQ ID NO: 3809941 - RNA, 14 nt, Human
cucagcccucccug

SEQ ID NO: 3809942 - RNA, 19 nt, Human
cucagcccugacuggugcu

SEQ ID NO: 3809943 - RNA, 14 nt, Human
cucagcccugaggu

SEQ ID NO: 3809944 - RNA, 15 nt, Human
cucagcccugcacca

SEQ ID NO: 3809945 - RNA, 11 nt, Human
cucagcccugg

SEQ ID NO: 3809946 - RNA, 22 nt, Human
cucagcccuggaggugccagca

SEQ ID NO: 3809947 - RNA, 19 nt, Human
cucagcccugggccccacc

SEQ ID NO: 3809948 - RNA, 21 nt, Human
cucagcccugggccccaccac

SEQ ID NO: 3809949 - RNA, 17 nt, Human
cucagccucccaaagug

SEQ ID NO: 3809950 - RNA, 22 nt, Human
cucagccuccuguguagcuggg

SEQ ID NO: 3809951 - RNA, 14 nt, Human
cucagccugcugcc

SEQ ID NO: 3809952 - RNA, 15 nt, Human
cucagccugcugccc

SEQ ID NO: 3809953 - RNA, 14 nt, Human
cucagccuggccag

SEQ ID NO: 3809954 - RNA, 12 nt, Human
cucagccugggc

SEQ ID NO: 3809955 - RNA, 14 nt, Human
cucagccugggcgc

SEQ ID NO: 3809956 - RNA, 16 nt, Human
cucagccuggugggcc

SEQ ID NO: 3809957 - RNA, 19 nt, Human
cucagccuggugggccucc

SEQ ID NO: 3809958 - RNA, 18 nt, Human
cucagccuuacauuugug

SEQ ID NO: 3809959 - RNA, 22 nt, Human
cucagccuuccccuugcccagg

SEQ ID NO: 3809960 - RNA, 23 nt, Human
cucagccuuccccuugcccaggg

SEQ ID NO: 3809961 - RNA, 15 nt, Human
cucagccuugccaga

SEQ ID NO: 3809962 - RNA, 16 nt, Human
cucagccuugccagag

SEQ ID NO: 3809963 - RNA, 18 nt, Human
cucagccuugccagagau

SEQ ID NO: 3809964 - RNA, 20 nt, Human
cucagccuugccagagaucc

SEQ ID NO: 3809965 - RNA, 21 nt, Human
cucagccuugccagagaucca

SEQ ID NO: 3809966 - RNA, 22 nt, Human
cucagccuugccagagauccaa

SEQ ID NO: 3809967 - RNA, 20 nt, Human
cucagcggcgaccgcccucc

SEQ ID NO: 3809968 - RNA, 20 nt, Human
cucagcggggacagcuccuu

SEQ ID NO: 3809969 - RNA, 21 nt, Human
cucagcggggacagcuccuuc

SEQ ID NO: 3809970 - RNA, 15 nt, Human
cucagcuaagcucac

SEQ ID NO: 3809971 - RNA, 14 nt, Human
cucagcucaaugca

SEQ ID NO: 3809972 - RNA, 14 nt, Human
cucagcucauccau

SEQ ID NO: 3809973 - RNA, 22 nt, Human
cucagcuccagacguaggggag

SEQ ID NO: 3809974 - RNA, 19 nt, Human
cucagcuccagguggcucu

SEQ ID NO: 3809975 - RNA, 20 nt, Human
cucagcuccagguggcucug

SEQ ID NO: 3809976 - RNA, 10 nt, Human
cucagcuccc

SEQ ID NO: 3809977 - RNA, 16 nt, Human
cucagcucccauuucu

SEQ ID NO: 3809978 - RNA, 11 nt, Human
cucagcucccc

SEQ ID NO: 3809979 - RNA, 16 nt, Human
cucagcuccccagagu

SEQ ID NO: 3809980 - RNA, 20 nt, Human
cucagcucccccuguccccu

SEQ ID NO: 3809981 - RNA, 13 nt, Human
cucagcucggcuc

SEQ ID NO: 3809982 - RNA, 14 nt, Human
cucagcucggcuca

SEQ ID NO: 3809983 - RNA, 18 nt, Human
cucagcucggcucagcuc

SEQ ID NO: 3809984 - RNA, 15 nt, Human
cucagcucuggcuca

SEQ ID NO: 3809985 - RNA, 15 nt, Human
cucagcucugggaga

SEQ ID NO: 3809986 - RNA, 18 nt, Human
cucagcucugggagagga

SEQ ID NO: 3809987 - RNA, 12 nt, Human
cucagcugccuc

SEQ ID NO: 3809988 - RNA, 18 nt, Human
cucagcugccucacuucc

SEQ ID NO: 3809989 - RNA, 19 nt, Human
cucagcugucaaggcucag

SEQ ID NO: 3809990 - RNA, 17 nt, Human
cucagcuguccugcagc

SEQ ID NO: 3809991 - RNA, 18 nt, Human
cucagcuguccugcagca

SEQ ID NO: 3809992 - RNA, 17 nt, Human
cucagcuuccccaacac

SEQ ID NO: 3809993 - RNA, 19 nt, Human
cucagcuuccccaguagcu

SEQ ID NO: 3809994 - RNA, 14 nt, Human
cucagcuuccuacc

SEQ ID NO: 3809995 - RNA, 17 nt, Human
cucagcuuuuugucuuu

SEQ ID NO: 3809996 - RNA, 21 nt, Human
cucagcuuuuugucuuuucug

SEQ ID NO: 3809997 - RNA, 22 nt, Human
cucaggaaacgagacuuuccau

SEQ ID NO: 3809998 - RNA, 21 nt, Human
cucaggaaagaauagaaagaa

SEQ ID NO: 3809999 - RNA, 15 nt, Human
cucaggaaaugcuga

SEQ ID NO: 3810000 - RNA, 20 nt, Human
cucaggaaaugcugacccau

SEQ ID NO: 3810001 - RNA, 17 nt, Human
cucaggaaccgaggcag

SEQ ID NO: 3810002 - RNA, 12 nt, Human
cucaggaagaac

SEQ ID NO: 3810003 - RNA, 14 nt, Human
cucaggaagaacac

SEQ ID NO: 3810004 - RNA, 19 nt, Human
cucaggaagcccccaaguu

SEQ ID NO: 3810005 - RNA, 20 nt, Human
cucaggacacaggccugugu

SEQ ID NO: 3810006 - RNA, 21 nt, Human
cucaggacacaggccugugua

SEQ ID NO: 3810007 - RNA, 18 nt, Human
cucaggacagaugccaca

SEQ ID NO: 3810008 - RNA, 14 nt, Human
cucaggacccucgc

SEQ ID NO: 3810009 - RNA, 17 nt, Human
cucaggacccucgcugg

SEQ ID NO: 3810010 - RNA, 19 nt, Human
cucaggacccucgcuggcc

SEQ ID NO: 3810011 - RNA, 12 nt, Human
cucaggaccuag

SEQ ID NO: 3810012 - RNA, 16 nt, Human
cucaggacucagaagc

SEQ ID NO: 3810013 - RNA, 17 nt, Human
cucaggacuccagccca

SEQ ID NO: 3810014 - RNA, 12 nt, Human
cucaggagcaca

SEQ ID NO: 3810015 - RNA, 14 nt, Human
cucaggagcacagg

SEQ ID NO: 3810016 - RNA, 12 nt, Human
cucaggagccau

SEQ ID NO: 3810017 - RNA, 13 nt, Human
cucaggagcccug

SEQ ID NO: 3810018 - RNA, 22 nt, Human
cucaggagcccugggaggcucu

SEQ ID NO: 3810019 - RNA, 13 nt, Human
cucaggaggcuga

SEQ ID NO: 3810020 - RNA, 17 nt, Human
cucaggaggcugaggca

SEQ ID NO: 3810021 - RNA, 19 nt, Human
cucaggaggcugaggcaga

SEQ ID NO: 3810022 - RNA, 23 nt, Human
cucaggaggcugaggcagaagaa

SEQ ID NO: 3810023 - RNA, 22 nt, Human
cucaggaggcugaggcaggagg

SEQ ID NO: 3810024 - RNA, 18 nt, Human
cucaggauccaagcuaag

SEQ ID NO: 3810025 - RNA, 20 nt, Human
cucaggauccaagcuaagca

SEQ ID NO: 3810026 - RNA, 22 nt, Human
cucaggaugcccagggccacuc

SEQ ID NO: 3810027 - RNA, 14 nt, Human
cucaggcacacagc

SEQ ID NO: 3810028 - RNA, 14 nt, Human
cucaggcaccaguc

SEQ ID NO: 3810029 - RNA, 15 nt, Human
cucaggcaggggccu

SEQ ID NO: 3810030 - RNA, 21 nt, Human
cucaggcauaggccugggugc

SEQ ID NO: 3810031 - RNA, 22 nt, Human
cucaggcauaggccugggugcu

SEQ ID NO: 3810032 - RNA, 18 nt, Human
cucaggcaucauuccacc

SEQ ID NO: 3810033 - RNA, 15 nt, Human
cucaggcaugccugu

SEQ ID NO: 3810034 - RNA, 20 nt, Human
cucaggccaagaaacgucuu

SEQ ID NO: 3810035 - RNA, 22 nt, Human
cucaggccaccugcccccuucu

SEQ ID NO: 3810036 - RNA, 23 nt, Human
cucaggccaccugcccccuucuc

SEQ ID NO: 3810037 - RNA, 16 nt, Human
cucaggccagagccaa

SEQ ID NO: 3810038 - RNA, 17 nt, Human
cucaggccagagccaag

SEQ ID NO: 3810039 - RNA, 13 nt, Human
cucaggccagcug

SEQ ID NO: 3810040 - RNA, 14 nt, Human
cucaggccagcugc

SEQ ID NO: 3810041 - RNA, 17 nt, Human
cucaggccagcugcuug

SEQ ID NO: 3810042 - RNA, 21 nt, Human
cucaggccagcugcuugggcu

SEQ ID NO: 3810043 - RNA, 16 nt, Human
cucaggcccaaagccu

SEQ ID NO: 3810044 - RNA, 23 nt, Human
cucaggccgaaggaggagucagg

SEQ ID NO: 3810045 - RNA, 21 nt, Human
cucaggccggcagccccagcc

SEQ ID NO: 3810046 - RNA, 22 nt, Human
cucaggccggcagccccagccu

SEQ ID NO: 3810047 - RNA, 23 nt, Human
cucaggccuauaaccccagcucc

SEQ ID NO: 3810048 - RNA, 18 nt, Human
cucaggccucugugccgc

SEQ ID NO: 3810049 - RNA, 20 nt, Human
cucaggccugacucucagca

SEQ ID NO: 3810050 - RNA, 20 nt, Human
cucaggccugggggcugggc

SEQ ID NO: 3810051 - RNA, 21 nt, Human
cucaggcgggacagugcugca

SEQ ID NO: 3810052 - RNA, 17 nt, Human
cucaggcucugcccugc

SEQ ID NO: 3810053 - RNA, 18 nt, Human
cucaggcugcagcuggac

SEQ ID NO: 3810054 - RNA, 19 nt, Human
cucaggcugcagcuggaca

SEQ ID NO: 3810055 - RNA, 21 nt, Human
cucaggcugcagcuggacaga

SEQ ID NO: 3810056 - RNA, 23 nt, Human
cucaggcugcagcuggacagagg

SEQ ID NO: 3810057 - RNA, 22 nt, Human
gacccacaagaaaugaaagcag

SEQ ID NO: 3810058 - RNA, 23 nt, Human
gacccacagacugguuuugcaac

SEQ ID NO: 3810059 - RNA, 14 nt, Human
gacccacagccucu

SEQ ID NO: 3810060 - RNA, 14 nt, Human
gacccacaugccau

SEQ ID NO: 3810061 - RNA, 23 nt, Human
gacccacaugccauuuguacuga

SEQ ID NO: 3810062 - RNA, 12 nt, Human
gacccaccccug

SEQ ID NO: 3810063 - RNA, 14 nt, Human
gacccaccccugug

SEQ ID NO: 3810064 - RNA, 20 nt, Human
gacccacgaaacugcccugg

SEQ ID NO: 3810065 - RNA, 19 nt, Human
gacccacuggacucaccuc

SEQ ID NO: 3810066 - RNA, 23 nt, Human
gacccacuucacacacaggcaac

SEQ ID NO: 3810067 - RNA, 21 nt, Human
gacccacuucucaucacacac

SEQ ID NO: 3810068 - RNA, 23 nt, Human
gacccacuucucaucacacacau

SEQ ID NO: 3810069 - RNA, 14 nt, Human
gacccagacccagu

SEQ ID NO: 3810070 - RNA, 20 nt, Human
gacccagauccucacaacca

SEQ ID NO: 3810071 - RNA, 17 nt, Human
gacccagcacugcccaa

SEQ ID NO: 3810072 - RNA, 22 nt, Human
gacccagccaggcccagccgac

SEQ ID NO: 3810073 - RNA, 22 nt, Human
gacccagccccuugagaaaccu

SEQ ID NO: 3810074 - RNA, 17 nt, Human
gacccagcccucauccc

SEQ ID NO: 3810075 - RNA, 11 nt, Human
gacccaggcac

SEQ ID NO: 3810076 - RNA, 19 nt, Human
gacccaggccgcagcucuu

SEQ ID NO: 3810077 - RNA, 12 nt, Human
gacccaggcucc

SEQ ID NO: 3810078 - RNA, 23 nt, Human
gacccaggcuccgcccuuagucc

SEQ ID NO: 3810079 - RNA, 13 nt, Human
gacccaggcuggg

SEQ ID NO: 3810080 - RNA, 20 nt, Human
gacccagggaacagccacuc

SEQ ID NO: 3810081 - RNA, 16 nt, Human
gacccaggguucccgc

SEQ ID NO: 3810082 - RNA, 16 nt, Human
gacccagucccugggg

SEQ ID NO: 3810083 - RNA, 22 nt, Human
gacccaguggcagggcacaggg

SEQ ID NO: 3810084 - RNA, 23 nt, Human
gacccaguggcagggcacagggc

SEQ ID NO: 3810085 - RNA, 14 nt, Human
gacccaugcugccc

SEQ ID NO: 3810086 - RNA, 15 nt, Human
gacccauuccuuccc

SEQ ID NO: 3810087 - RNA, 20 nt, Human
gacccauucuacacagagca

SEQ ID NO: 3810088 - RNA, 15 nt, Human
gaccccaccagccuc

SEQ ID NO: 3810089 - RNA, 12 nt, Human
gaccccagcugg

SEQ ID NO: 3810090 - RNA, 13 nt, Human
gaccccagcuggg

SEQ ID NO: 3810091 - RNA, 18 nt, Human
gaccccagcugugagccu

SEQ ID NO: 3810092 - RNA, 15 nt, Human
gaccccaggcccacu

SEQ ID NO: 3810093 - RNA, 17 nt, Human
gaccccaggcccacuca

SEQ ID NO: 3810094 - RNA, 13 nt, Human
gaccccagggcac

SEQ ID NO: 3810095 - RNA, 16 nt, Human
gaccccagggcacagg

SEQ ID NO: 3810096 - RNA, 19 nt, Human
gaccccagggcacaggagc

SEQ ID NO: 3810097 - RNA, 18 nt, Human
gaccccaucugcccagga

SEQ ID NO: 3810098 - RNA, 12 nt, Human
gacccccaacca

SEQ ID NO: 3810099 - RNA, 13 nt, Human
gacccccacaccu

SEQ ID NO: 3810100 - RNA, 13 nt, Human
gacccccaccccu

SEQ ID NO: 3810101 - RNA, 19 nt, Human
gacccccaccccuucccca

SEQ ID NO: 3810102 - RNA, 18 nt, Human
gacccccacucucauucc

SEQ ID NO: 3810103 - RNA, 20 nt, Human
gaccccccaccaccagccgg

SEQ ID NO: 3810104 - RNA, 15 nt, Human
gacccccccagcuuc

SEQ ID NO: 3810105 - RNA, 11 nt, Human
gacccccgccc

SEQ ID NO: 3810106 - RNA, 12 nt, Human
gacccccuggag

SEQ ID NO: 3810107 - RNA, 14 nt, Human
gacccccuuccccu

SEQ ID NO: 3810108 - RNA, 14 nt, Human
gaccccuaguuccc

SEQ ID NO: 3810109 - RNA, 21 nt, Human
gaccccuaugaaguaaagaac

SEQ ID NO: 3810110 - RNA, 14 nt, Human
gaccccuccaugug

SEQ ID NO: 3810111 - RNA, 18 nt, Human
gaccccuccaugugggcu

SEQ ID NO: 3810112 - RNA, 21 nt, Human
gaccccuccaugugggcuagu

SEQ ID NO: 3810113 - RNA, 19 nt, Human
gaccccuccucacuggcca

SEQ ID NO: 3810114 - RNA, 16 nt, Human
gaccccuccucccuuu

SEQ ID NO: 3810115 - RNA, 19 nt, Human
gaccccuccuggggccagg

SEQ ID NO: 3810116 - RNA, 20 nt, Human
gaccccuccuggggccaggc

SEQ ID NO: 3810117 - RNA, 22 nt, Human
gaccccuccuggggccaggccg

SEQ ID NO: 3810118 - RNA, 16 nt, Human
gaccccugagcuugca

SEQ ID NO: 3810119 - RNA, 19 nt, Human
gaccccugagcuugcagag

SEQ ID NO: 3810120 - RNA, 20 nt, Human
gaccccugcaguuccccugg

SEQ ID NO: 3810121 - RNA, 23 nt, Human
gaccccugcccagaucagccaga

SEQ ID NO: 3810122 - RNA, 23 nt, Human
gaccccugcucaguaaagcacuu

SEQ ID NO: 3810123 - RNA, 12 nt, Human
gaccccuggcug

SEQ ID NO: 3810124 - RNA, 12 nt, Human
gaccccugucuu

SEQ ID NO: 3810125 - RNA, 20 nt, Human
gaccccuuuucagcuucugc

SEQ ID NO: 3810126 - RNA, 16 nt, Human
gacccgcucuggacca

SEQ ID NO: 3810127 - RNA, 21 nt, Human
gacccggagcuaacacuggcc

SEQ ID NO: 3810128 - RNA, 22 nt, Human
gacccggagcuaacacuggccc

SEQ ID NO: 3810129 - RNA, 17 nt, Human
gacccggaggggccugg

SEQ ID NO: 3810130 - RNA, 19 nt, Human
gacccggaggggccuggca

SEQ ID NO: 3810131 - RNA, 20 nt, Human
gacccggcacccccugcagc

SEQ ID NO: 3810132 - RNA, 21 nt, Human
gacccggcacccccugcagcu

SEQ ID NO: 3810133 - RNA, 14 nt, Human
gacccguccauuug

SEQ ID NO: 3810134 - RNA, 14 nt, Human
gacccgucuccagc

SEQ ID NO: 3810135 - RNA, 15 nt, Human
gacccgucuccagcu

SEQ ID NO: 3810136 - RNA, 23 nt, Human
gacccguucaugggggagggggc

SEQ ID NO: 3810137 - RNA, 17 nt, Human
gacccuaaaucugagga

SEQ ID NO: 3810138 - RNA, 16 nt, Human
gacccuaaaucuugac

SEQ ID NO: 3810139 - RNA, 14 nt, Human
gacccuaccccacc

SEQ ID NO: 3810140 - RNA, 17 nt, Human
gacccuacuuccugcac

SEQ ID NO: 3810141 - RNA, 16 nt, Human
gacccuauugcugcuu

SEQ ID NO: 3810142 - RNA, 23 nt, Human
gacccucaugcugccaauauccu

SEQ ID NO: 3810143 - RNA, 11 nt, Human
gacccuccaaa

SEQ ID NO: 3810144 - RNA, 15 nt, Human
gacccuccaaggcca

SEQ ID NO: 3810145 - RNA, 19 nt, Human
gacccuccuccucccccag

SEQ ID NO: 3810146 - RNA, 15 nt, Human
gacccuccuguugca

SEQ ID NO: 3810147 - RNA, 18 nt, Human
gacccuccuguugcaccc

SEQ ID NO: 3810148 - RNA, 18 nt, Human
gacccucguggccuuccc

SEQ ID NO: 3810149 - RNA, 14 nt, Human
gacccucuaaccuc

SEQ ID NO: 3810150 - RNA, 11 nt, Human
gacccucucaa

SEQ ID NO: 3810151 - RNA, 21 nt, Human
gacccucucaaacuaacaggc

SEQ ID NO: 3810152 - RNA, 20 nt, Human
gacccucugacccuagcucu

SEQ ID NO: 3810153 - RNA, 14 nt, Human
gacccucugccacc

SEQ ID NO: 3810154 - RNA, 16 nt, Human
gacccucugccaccag

SEQ ID NO: 3810155 - RNA, 14 nt, Human
gacccucugggaac

SEQ ID NO: 3810156 - RNA, 21 nt, Human
gacccucugggaaccucccag

SEQ ID NO: 3810157 - RNA, 13 nt, Human
gacccugaaaugu

SEQ ID NO: 3810158 - RNA, 16 nt, Human
gacccugaaggggcca

SEQ ID NO: 3810159 - RNA, 20 nt, Human
gacccugagcugaccagccg

SEQ ID NO: 3810160 - RNA, 11 nt, Human
gacccugaggc

SEQ ID NO: 3810161 - RNA, 22 nt, Human
gacccugcaaacagaacagggu

SEQ ID NO: 3810162 - RNA, 16 nt, Human
gacccugcacccuccu

SEQ ID NO: 3810163 - RNA, 16 nt, Human
gacccugccaggcaca

SEQ ID NO: 3810164 - RNA, 17 nt, Human
gacccugccaggcacag

SEQ ID NO: 3810165 - RNA, 19 nt, Human
gacccugccaggcacaggc

SEQ ID NO: 3810166 - RNA, 20 nt, Human
gacccugccaggcacaggca

SEQ ID NO: 3810167 - RNA, 21 nt, Human
gacccugccaggcacaggcag

SEQ ID NO: 3810168 - RNA, 22 nt, Human
gacccugccaggcacaggcagg

SEQ ID NO: 3810169 - RNA, 22 nt, Human
gacccugcccugugggccccca

SEQ ID NO: 3810170 - RNA, 13 nt, Human
gacccugccucuc

SEQ ID NO: 3810171 - RNA, 20 nt, Human
gacccugcgaaggggcccug

SEQ ID NO: 3810172 - RNA, 21 nt, Human
gacccugcgaaggggcccugg

SEQ ID NO: 3810173 - RNA, 16 nt, Human
gacccugcuuuagagc

SEQ ID NO: 3810174 - RNA, 13 nt, Human
gacccuggcuccu

SEQ ID NO: 3810175 - RNA, 23 nt, Human
gacccuggcuccuugugccagag

SEQ ID NO: 3810176 - RNA, 19 nt, Human
gacccugggugggcucugu

SEQ ID NO: 3810177 - RNA, 21 nt, Human
gacccugggugggcucugugc

SEQ ID NO: 3810178 - RNA, 17 nt, Human
gacccuguauauagccc

SEQ ID NO: 3810179 - RNA, 12 nt, Human
gacccugucuca

SEQ ID NO: 3810180 - RNA, 23 nt, Human
gacccugucucaaaaaaagaaaa

SEQ ID NO: 3810181 - RNA, 21 nt, Human
gacccugugacauggugccug

SEQ ID NO: 3810182 - RNA, 22 nt, Human
gacccugugacauggugccuga

SEQ ID NO: 3810183 - RNA, 14 nt, Human
gacccuguggaagc

SEQ ID NO: 3810184 - RNA, 16 nt, Human
gacccuguugcuaagc

SEQ ID NO: 3810185 - RNA, 21 nt, Human
gacccuucccaaucagcacug

SEQ ID NO: 3810186 - RNA, 19 nt, Human
gacccuucccuugagcccu

SEQ ID NO: 3810187 - RNA, 21 nt, Human
gacccuugacaccugcugaga

SEQ ID NO: 3810188 - RNA, 19 nt, Human
gacccuugccgucuaccug

SEQ ID NO: 3810189 - RNA, 15 nt, Human
gacccuugugguccc

SEQ ID NO: 3810190 - RNA, 19 nt, Human
gacccuuguggucccaccc

SEQ ID NO: 3810191 - RNA, 18 nt, Human
gaccgaggagggagaguc

SEQ ID NO: 3810192 - RNA, 16 nt, Human
gaccgccagauggggc

SEQ ID NO: 3810193 - RNA, 20 nt, Human
gaccgccagauggggccucu

SEQ ID NO: 3810194 - RNA, 14 nt, Human
gaccgcccccuccu

SEQ ID NO: 3810195 - RNA, 17 nt, Human
gaccgcccuuuuccccu

SEQ ID NO: 3810196 - RNA, 20 nt, Human
gaccgcuuguggggacccag

SEQ ID NO: 3810197 - RNA, 18 nt, Human
gaccggccugccaggagg

SEQ ID NO: 3810198 - RNA, 15 nt, Human
gaccggcggcucgga

SEQ ID NO: 3810199 - RNA, 15 nt, Human
gaccgguacagaaag

SEQ ID NO: 3810200 - RNA, 19 nt, Human
gaccgugaagauacuuugu

SEQ ID NO: 3810201 - RNA, 15 nt, Human
gaccgugaggccaga

SEQ ID NO: 3810202 - RNA, 18 nt, Human
gaccgugggcggggccuu

SEQ ID NO: 3810203 - RNA, 16 nt, Human
gaccuaaauggccuca

SEQ ID NO: 3810204 - RNA, 15 nt, Human
gaccuaaugcuccuu

SEQ ID NO: 3810205 - RNA, 13 nt, Human
gaccuaccucagg

SEQ ID NO: 3810206 - RNA, 13 nt, Human
gaccuacucucau

SEQ ID NO: 3810207 - RNA, 24 nt, Human
gacaggcaaugcuggcuguuggcu

SEQ ID NO: 3810208 - RNA, 20 nt, Human
gacaggcauguucucugagg

SEQ ID NO: 3810209 - RNA, 21 nt, Human
gacaggcauguucucugagga

SEQ ID NO: 3810210 - RNA, 11 nt, Human
gacaggcccaa

SEQ ID NO: 3810211 - RNA, 14 nt, Human
gacaggcccaagag

SEQ ID NO: 3810212 - RNA, 16 nt, Human
gacaggcccaagagau

SEQ ID NO: 3810213 - RNA, 21 nt, Human
gacaggcccaagagaugaaga

SEQ ID NO: 3810214 - RNA, 22 nt, Human
gacaggcccaagagaugaagag

SEQ ID NO: 3810215 - RNA, 13 nt, Human
gacaggcccuggc

SEQ ID NO: 3810216 - RNA, 19 nt, Human
gacaggccucaccucuacc

SEQ ID NO: 3810217 - RNA, 20 nt, Human
gacaggccucaccucuaccc

SEQ ID NO: 3810218 - RNA, 15 nt, Human
gacaggccugaagau

SEQ ID NO: 3810219 - RNA, 19 nt, Human
gacaggccugaagauauua

SEQ ID NO: 3810220 - RNA, 16 nt, Human
gacaggcgaaagaaaa

SEQ ID NO: 3810221 - RNA, 15 nt, Human
gacaggcgagagagg

SEQ ID NO: 3810222 - RNA, 21 nt, Human
gacaggcgagagaggagccag

SEQ ID NO: 3810223 - RNA, 17 nt, Human
gacagggaggacgcucu

SEQ ID NO: 3810224 - RNA, 18 nt, Human
gacagggaggacgcucuc

SEQ ID NO: 3810225 - RNA, 16 nt, Human
gacagggaggugaccc

SEQ ID NO: 3810226 - RNA, 14 nt, Human
gacagggaugagca

SEQ ID NO: 3810227 - RNA, 21 nt, Human
gacagggaugagcauggagcu

SEQ ID NO: 3810228 - RNA, 20 nt, Human
gacagggcauggccaggugg

SEQ ID NO: 3810229 - RNA, 22 nt, Human
gacagggcauggccagguggcc

SEQ ID NO: 3810230 - RNA, 14 nt, Human
gacagggccagugg

SEQ ID NO: 3810231 - RNA, 16 nt, Human
gacagggccagugggg

SEQ ID NO: 3810232 - RNA, 18 nt, Human
gacagggcggggguggcg

SEQ ID NO: 3810233 - RNA, 20 nt, Human
gacagggcuggcccagcccu

SEQ ID NO: 3810234 - RNA, 22 nt, Human
gacagggcuggcccagcccugc

SEQ ID NO: 3810235 - RNA, 20 nt, Human
gacaggggcaggaggaaggg

SEQ ID NO: 3810236 - RNA, 17 nt, Human
gacagggggccagaaca

SEQ ID NO: 3810237 - RNA, 12 nt, Human
gacaggguuuca

SEQ ID NO: 3810238 - RNA, 17 nt, Human
gacaggguuucaccaug

SEQ ID NO: 3810239 - RNA, 22 nt, Human
gacaggguuuugccauguuggc

SEQ ID NO: 3810240 - RNA, 14 nt, Human
gacaggucugggag

SEQ ID NO: 3810241 - RNA, 16 nt, Human
gacagguuagcugcuc

SEQ ID NO: 3810242 - RNA, 17 nt, Human
gacaguaucacugucuu

SEQ ID NO: 3810243 - RNA, 21 nt, Human
gacaguaucacugucuuuccu

SEQ ID NO: 3810244 - RNA, 21 nt, Human
gacaguaugagucaaugugca

SEQ ID NO: 3810245 - RNA, 17 nt, Human
gacagucaaggaguggc

SEQ ID NO: 3810246 - RNA, 14 nt, Human
gacagucaccccag

SEQ ID NO: 3810247 - RNA, 17 nt, Human
gacagucaccucaugga

SEQ ID NO: 3810248 - RNA, 18 nt, Human
gacagucaccucauggaa

SEQ ID NO: 3810249 - RNA, 16 nt, Human
gacaguccagccugga

SEQ ID NO: 3810250 - RNA, 19 nt, Human
gacaguccagccuggagau

SEQ ID NO: 3810251 - RNA, 12 nt, Human
gacagucccugc

SEQ ID NO: 3810252 - RNA, 20 nt, Human
gacagucccugccaauggac

SEQ ID NO: 3810253 - RNA, 16 nt, Human
gacaguccucuccacc

SEQ ID NO: 3810254 - RNA, 17 nt, Human
gacaguccucuccaccu

SEQ ID NO: 3810255 - RNA, 23 nt, Human
gacaguccugggagaaccucagg

SEQ ID NO: 3810256 - RNA, 23 nt, Human
gacagucucaccauuuccccagg

SEQ ID NO: 3810257 - RNA, 13 nt, Human
gacagucuugugc

SEQ ID NO: 3810258 - RNA, 14 nt, Human
gacagugaaagaaa

SEQ ID NO: 3810259 - RNA, 16 nt, Human
gacagugaauauucaa

SEQ ID NO: 3810260 - RNA, 17 nt, Human
gacagugccugggaaug

SEQ ID NO: 3810261 - RNA, 22 nt, Human
gacagugcugcagcucccuggc

SEQ ID NO: 3810262 - RNA, 13 nt, Human
gacaguggcagga

SEQ ID NO: 3810263 - RNA, 15 nt, Human
gacaguggcaggaca

SEQ ID NO: 3810264 - RNA, 23 nt, Human
gacaguguugaaaauguucagaa

SEQ ID NO: 3810265 - RNA, 22 nt, Human
gacaguuaagagaaaugagcuu

SEQ ID NO: 3810266 - RNA, 21 nt, Human
gacaguuauacugucgguuuu

SEQ ID NO: 3810267 - RNA, 19 nt, Human
gacaguucacacccugcaa

SEQ ID NO: 3810268 - RNA, 21 nt, Human
gacaguuccagaagugugacu

SEQ ID NO: 3810269 - RNA, 15 nt, Human
gacaguucugaagaa

SEQ ID NO: 3810270 - RNA, 18 nt, Human
gacaguugggugagaaca

SEQ ID NO: 3810271 - RNA, 18 nt, Human
gacaguugucuagagaua

SEQ ID NO: 3810272 - RNA, 23 nt, Human
gacaguuuaucaugaagccugug

SEQ ID NO: 3810273 - RNA, 16 nt, Human
gacaguuuauuuguug

SEQ ID NO: 3810274 - RNA, 20 nt, Human
gacaguuucuuagcuuuuua

SEQ ID NO: 3810275 - RNA, 20 nt, Human
gacaguuuguaaauguuauu

SEQ ID NO: 3810276 - RNA, 20 nt, Human
gacaguuuuccauaaagaag

SEQ ID NO: 3810277 - RNA, 17 nt, Human
gacauaaaaacaacuuu

SEQ ID NO: 3810278 - RNA, 11 nt, Human
gacauaaagcc

SEQ ID NO: 3810279 - RNA, 15 nt, Human
gacauaacagugcag

SEQ ID NO: 3810280 - RNA, 23 nt, Human
gacauaacguuuuuccuuuaaaa

SEQ ID NO: 3810281 - RNA, 19 nt, Human
gacauaacugacuuaguuc

SEQ ID NO: 3810282 - RNA, 12 nt, Human
gacauacgaaac

SEQ ID NO: 3810283 - RNA, 17 nt, Human
gacauacgaaacacaaa

SEQ ID NO: 3810284 - RNA, 16 nt, Human
gacauacgcuuuuaau

SEQ ID NO: 3810285 - RNA, 15 nt, Human
gacauacuaaccagc

SEQ ID NO: 3810286 - RNA, 23 nt, Human
gacauacuaaccagcagaaaugc

SEQ ID NO: 3810287 - RNA, 14 nt, Human
gacauacuugaagg

SEQ ID NO: 3810288 - RNA, 17 nt, Human
gacauacuugaagggcc

SEQ ID NO: 3810289 - RNA, 18 nt, Human
gacauacuugaagggcca

SEQ ID NO: 3810290 - RNA, 20 nt, Human
gacauagaauuaacacauga

SEQ ID NO: 3810291 - RNA, 20 nt, Human
gacauagagagggagaagaa

SEQ ID NO: 3810292 - RNA, 22 nt, Human
gacauagagagggagaagaagu

SEQ ID NO: 3810293 - RNA, 21 nt, Human
gacauagcauccaaguggcau

SEQ ID NO: 3810294 - RNA, 13 nt, Human
gacauauucauuu

SEQ ID NO: 3810295 - RNA, 12 nt, Human
gacauauuuaau

SEQ ID NO: 3810296 - RNA, 19 nt, Human
gacaucaaacucaaugcuu

SEQ ID NO: 3810297 - RNA, 16 nt, Human
gacaucaacugcauca

SEQ ID NO: 3810298 - RNA, 16 nt, Human
gacaucacuuguacaa

SEQ ID NO: 3810299 - RNA, 12 nt, Human
gacaucagccag

SEQ ID NO: 3810300 - RNA, 15 nt, Human
gacauccaagcuucc

SEQ ID NO: 3810301 - RNA, 13 nt, Human
gacauccagcaga

SEQ ID NO: 3810302 - RNA, 16 nt, Human
gacauccauaaagaag

SEQ ID NO: 3810303 - RNA, 17 nt, Human
gacauccccugcuggcc

SEQ ID NO: 3810304 - RNA, 18 nt, Human
gacauccccugcuggccg

SEQ ID NO: 3810305 - RNA, 15 nt, Human
gacauccuccuccca

SEQ ID NO: 3810306 - RNA, 18 nt, Human
gacauccuccucccaccc

SEQ ID NO: 3810307 - RNA, 23 nt, Human
gacauccucuucugcuuaggaga

SEQ ID NO: 3810308 - RNA, 21 nt, Human
gacauccuguauaagcacuga

SEQ ID NO: 3810309 - RNA, 24 nt, Human
gacauccugucaucugagaaugaa

SEQ ID NO: 3810310 - RNA, 20 nt, Human
gacaucucaggggccagagg

SEQ ID NO: 3810311 - RNA, 17 nt, Human
gacaucucugcacccug

SEQ ID NO: 3810312 - RNA, 14 nt, Human
gacaucuggaaucu

SEQ ID NO: 3810313 - RNA, 19 nt, Human
gacaucuggaaucuggaga

SEQ ID NO: 3810314 - RNA, 16 nt, Human
gacaucuuaguauuug

SEQ ID NO: 3810315 - RNA, 19 nt, Human
gacaucuuaguauuugcau

SEQ ID NO: 3810316 - RNA, 22 nt, Human
gacaucuuaguauuugcauauu

SEQ ID NO: 3810317 - RNA, 22 nt, Human
gacaugaagccacgggugccag

SEQ ID NO: 3810318 - RNA, 16 nt, Human
gacaugaagcuguugu

SEQ ID NO: 3810319 - RNA, 14 nt, Human
gacaugaauaugau

SEQ ID NO: 3810320 - RNA, 21 nt, Human
gacaugaauuuuagcuuuugu

SEQ ID NO: 3810321 - RNA, 19 nt, Human
gacaugagugcgugcucag

SEQ ID NO: 3810322 - RNA, 21 nt, Human
gacaugauggagcgcaccugc

SEQ ID NO: 3810323 - RNA, 16 nt, Human
gacaugauuccuuccu

SEQ ID NO: 3810324 - RNA, 19 nt, Human
gacaugauuuccuugaaug

SEQ ID NO: 3810325 - RNA, 20 nt, Human
gacaugauuuccuugaaugu

SEQ ID NO: 3810326 - RNA, 19 nt, Human
gacaugcaauaaaauuuaa

SEQ ID NO: 3810327 - RNA, 15 nt, Human
gacaugcacugaccc

SEQ ID NO: 3810328 - RNA, 20 nt, Human
gacaugcacugacccuucca

SEQ ID NO: 3810329 - RNA, 18 nt, Human
gacaugccuauaugagaa

SEQ ID NO: 3810330 - RNA, 22 nt, Human
gacaugccuauaugagaagaau

SEQ ID NO: 3810331 - RNA, 18 nt, Human
gacaugcgggcugggcag

SEQ ID NO: 3810332 - RNA, 21 nt, Human
gacaugcgggcugggcagcug

SEQ ID NO: 3810333 - RNA, 18 nt, Human
gacaugcgguagccagca

SEQ ID NO: 3810334 - RNA, 16 nt, Human
gacauggacccggagc

SEQ ID NO: 3810335 - RNA, 14 nt, Human
gacauggagguucu

SEQ ID NO: 3810336 - RNA, 23 nt, Human
gacauggcucccccuccaccugc

SEQ ID NO: 3810337 - RNA, 19 nt, Human
gacauggcuccggccucug

SEQ ID NO: 3810338 - RNA, 20 nt, Human
gacauggcuccggccucugc

SEQ ID NO: 3810339 - RNA, 23 nt, Human
gacauggcucuggacucuaaaga

SEQ ID NO: 3810340 - RNA, 20 nt, Human
gacauggcuuucagaaaacg

SEQ ID NO: 3810341 - RNA, 17 nt, Human
gacaugggacauuugcu

SEQ ID NO: 3810342 - RNA, 22 nt, Human
gacaugggacauuugcucaugg

SEQ ID NO: 3810343 - RNA, 16 nt, Human
gacauggggaggaagg

SEQ ID NO: 3810344 - RNA, 21 nt, Human
gacaugggucgcccaugagag

SEQ ID NO: 3810345 - RNA, 23 nt, Human
gacaugggucgcccaugagagcg

SEQ ID NO: 3810346 - RNA, 18 nt, Human
gacauggugccugagagg

SEQ ID NO: 3810347 - RNA, 12 nt, Human
gacauggugggg

SEQ ID NO: 3810348 - RNA, 15 nt, Human
gacaugucuguucua

SEQ ID NO: 3810349 - RNA, 17 nt, Human
gacaugucuguucuaca

SEQ ID NO: 3810350 - RNA, 12 nt, Human
gacaugugacau

SEQ ID NO: 3810351 - RNA, 16 nt, Human
gacaugugacauuuau

SEQ ID NO: 3810352 - RNA, 20 nt, Human
gacaugugacauuuauauau

SEQ ID NO: 3810353 - RNA, 16 nt, Human
gacauguggugggaca

SEQ ID NO: 3810354 - RNA, 15 nt, Human
gacauguuauauauu

SEQ ID NO: 3810355 - RNA, 14 nt, Human
cucaggcugccuga

SEQ ID NO: 3810356 - RNA, 14 nt, Human
cucaggcugcugga

SEQ ID NO: 3810357 - RNA, 17 nt, Human
cucaggcugcuggagga

SEQ ID NO: 3810358 - RNA, 21 nt, Human
cucagggaagcccagcuccag

SEQ ID NO: 3810359 - RNA, 23 nt, Human
cucagggacagagacaccugcac

SEQ ID NO: 3810360 - RNA, 18 nt, Human
cucagggacagagccaug

SEQ ID NO: 3810361 - RNA, 17 nt, Human
cucagggaccacagcaa

SEQ ID NO: 3810362 - RNA, 18 nt, Human
cucagggaccacagcaag

SEQ ID NO: 3810363 - RNA, 16 nt, Human
cucagggaccauggcu

SEQ ID NO: 3810364 - RNA, 17 nt, Human
cucagggaccauggcuu

SEQ ID NO: 3810365 - RNA, 23 nt, Human
cucagggacucaucuuucccucc

SEQ ID NO: 3810366 - RNA, 21 nt, Human
cucagggagcagggaaggccu

SEQ ID NO: 3810367 - RNA, 22 nt, Human
cucagggagcagggaaggccug

SEQ ID NO: 3810368 - RNA, 23 nt, Human
cucagggagcagggaaggccuga

SEQ ID NO: 3810369 - RNA, 22 nt, Human
cucagggauggccguuggccac

SEQ ID NO: 3810370 - RNA, 14 nt, Human
cucagggcaaagcc

SEQ ID NO: 3810371 - RNA, 15 nt, Human
cucagggcaaagcca

SEQ ID NO: 3810372 - RNA, 17 nt, Human
cucagggcaaagccagg

SEQ ID NO: 3810373 - RNA, 14 nt, Human
cucagggcagccuc

SEQ ID NO: 3810374 - RNA, 19 nt, Human
cucagggcagccugccugg

SEQ ID NO: 3810375 - RNA, 20 nt, Human
cucagggcagccugccugga

SEQ ID NO: 3810376 - RNA, 14 nt, Human
cucagggccaggcc

SEQ ID NO: 3810377 - RNA, 15 nt, Human
cucagggccaugcug

SEQ ID NO: 3810378 - RNA, 14 nt, Human
cucagggccccagc

SEQ ID NO: 3810379 - RNA, 19 nt, Human
cucagggccuggcucaggu

SEQ ID NO: 3810380 - RNA, 22 nt, Human
cucagggcuaaacgggcauugc

SEQ ID NO: 3810381 - RNA, 16 nt, Human
cucagggcuccuccca

SEQ ID NO: 3810382 - RNA, 16 nt, Human
cucagggcuccugccu

SEQ ID NO: 3810383 - RNA, 23 nt, Human
cucagggcuccugccuucugucc

SEQ ID NO: 3810384 - RNA, 14 nt, Human
cucagggcuccugg

SEQ ID NO: 3810385 - RNA, 15 nt, Human
cucagggcuccuggg

SEQ ID NO: 3810386 - RNA, 22 nt, Human
cucagggcuccuugugggccug

SEQ ID NO: 3810387 - RNA, 19 nt, Human
cucaggggaaaacuguuac

SEQ ID NO: 3810388 - RNA, 13 nt, Human
cucaggggccaga

SEQ ID NO: 3810389 - RNA, 17 nt, Human
cucaggggccagaggaa

SEQ ID NO: 3810390 - RNA, 18 nt, Human
cucaggggccagaggaac

SEQ ID NO: 3810391 - RNA, 19 nt, Human
cucaggggcccuggagcag

SEQ ID NO: 3810392 - RNA, 15 nt, Human
cucaggggcuguuug

SEQ ID NO: 3810393 - RNA, 23 nt, Human
cucagggggcgccugugguucug

SEQ ID NO: 3810394 - RNA, 19 nt, Human
cucaggggucacugaggcc

SEQ ID NO: 3810395 - RNA, 16 nt, Human
cucaggggugugccug

SEQ ID NO: 3810396 - RNA, 12 nt, Human
cucagggucccu

SEQ ID NO: 3810397 - RNA, 15 nt, Human
cucagggucccuggu

SEQ ID NO: 3810398 - RNA, 18 nt, Human
cucagggucccugguggc

SEQ ID NO: 3810399 - RNA, 22 nt, Human
cucagggucccugguggcagcu

SEQ ID NO: 3810400 - RNA, 16 nt, Human
cucagggucucugcug

SEQ ID NO: 3810401 - RNA, 15 nt, Human
cucaggguggucucu

SEQ ID NO: 3810402 - RNA, 16 nt, Human
cucaggguggucucuu

SEQ ID NO: 3810403 - RNA, 22 nt, Human
cucagguaaucgaccugccucg

SEQ ID NO: 3810404 - RNA, 18 nt, Human
cucagguacagagaagga

SEQ ID NO: 3810405 - RNA, 19 nt, Human
cucagguacagagaaggaa

SEQ ID NO: 3810406 - RNA, 17 nt, Human
cucagguagaagguuga

SEQ ID NO: 3810407 - RNA, 23 nt, Human
cucaggucccaggcuccuaugca

SEQ ID NO: 3810408 - RNA, 15 nt, Human
cucaggucuguuuuc

SEQ ID NO: 3810409 - RNA, 13 nt, Human
cucaggugaccaa

SEQ ID NO: 3810410 - RNA, 16 nt, Human
cucaggugagaagcag

SEQ ID NO: 3810411 - RNA, 13 nt, Human
cucaggugcuggg

SEQ ID NO: 3810412 - RNA, 19 nt, Human
cucagguggccaugccuca

SEQ ID NO: 3810413 - RNA, 20 nt, Human
cucagguggccaugccucag

SEQ ID NO: 3810414 - RNA, 21 nt, Human
cucagguggccaugccucagc

SEQ ID NO: 3810415 - RNA, 19 nt, Human
cucagguggggucacucug

SEQ ID NO: 3810416 - RNA, 22 nt, Human
cucagguggggucacucuggca

SEQ ID NO: 3810417 - RNA, 14 nt, Human
cucagguguugcca

SEQ ID NO: 3810418 - RNA, 15 nt, Human
cucagguguugccaa

SEQ ID NO: 3810419 - RNA, 22 nt, Human
cucagguguuuuuuaugaagug

SEQ ID NO: 3810420 - RNA, 12 nt, Human
cucagguuccua

SEQ ID NO: 3810421 - RNA, 21 nt, Human
cucagguugcugguugcugug

SEQ ID NO: 3810422 - RNA, 12 nt, Human
cucaguaaacgg

SEQ ID NO: 3810423 - RNA, 16 nt, Human
cucaguaaagcacuug

SEQ ID NO: 3810424 - RNA, 21 nt, Human
cucaguaagacgacaaggaaa

SEQ ID NO: 3810425 - RNA, 21 nt, Human
cucaguaaguaucuggaggaa

SEQ ID NO: 3810426 - RNA, 13 nt, Human
cucaguaauuugu

SEQ ID NO: 3810427 - RNA, 12 nt, Human
cucaguacuuug

SEQ ID NO: 3810428 - RNA, 20 nt, Human
cucaguacuuuggaggcccc

SEQ ID NO: 3810429 - RNA, 13 nt, Human
cucaguagucccu

SEQ ID NO: 3810430 - RNA, 13 nt, Human
cucagucauaauc

SEQ ID NO: 3810431 - RNA, 16 nt, Human
cucagucaugcauaaa

SEQ ID NO: 3810432 - RNA, 22 nt, Human
cucagucaugcauaaauaugca

SEQ ID NO: 3810433 - RNA, 17 nt, Human
cucaguccauagcagag

SEQ ID NO: 3810434 - RNA, 23 nt, Human
cucaguccauuuauauaugaaaa

SEQ ID NO: 3810435 - RNA, 17 nt, Human
cucagucccccaacaga

SEQ ID NO: 3810436 - RNA, 16 nt, Human
cucagucucaggagca

SEQ ID NO: 3810437 - RNA, 13 nt, Human
cucagucucccuc

SEQ ID NO: 3810438 - RNA, 17 nt, Human
cucagucucccucccuu

SEQ ID NO: 3810439 - RNA, 13 nt, Human
cucagucucccuu

SEQ ID NO: 3810440 - RNA, 13 nt, Human
cucagucucugag

SEQ ID NO: 3810441 - RNA, 20 nt, Human
cucagucucugagcagugaa

SEQ ID NO: 3810442 - RNA, 18 nt, Human
cucagucuggcccuuccu

SEQ ID NO: 3810443 - RNA, 20 nt, Human
cucagucuucccuagggcug

SEQ ID NO: 3810444 - RNA, 18 nt, Human
cucagugaagaauacuuc

SEQ ID NO: 3810445 - RNA, 14 nt, Human
cucagugaagacua

SEQ ID NO: 3810446 - RNA, 16 nt, Human
cucagugcaaccucug

SEQ ID NO: 3810447 - RNA, 11 nt, Human
cucagugcaga

SEQ ID NO: 3810448 - RNA, 14 nt, Human
cucagugcauuugu

SEQ ID NO: 3810449 - RNA, 19 nt, Human
cucagugccaacuguggcu

SEQ ID NO: 3810450 - RNA, 21 nt, Human
cucagugccaacuguggcugg

SEQ ID NO: 3810451 - RNA, 20 nt, Human
cucaguggacuuuccacccc

SEQ ID NO: 3810452 - RNA, 22 nt, Human
cucaguggguuaacaucaguuu

SEQ ID NO: 3810453 - RNA, 12 nt, Human
cucaguguuuug

SEQ ID NO: 3810454 - RNA, 22 nt, Human
cucaguguuuuggacuccaucu

SEQ ID NO: 3810455 - RNA, 15 nt, Human
cucaguucccuuggc

SEQ ID NO: 3810456 - RNA, 16 nt, Human
cucaguucccuuggcc

SEQ ID NO: 3810457 - RNA, 15 nt, Human
cucaguucuagucuc

SEQ ID NO: 3810458 - RNA, 21 nt, Human
cucaguucuagucucucuggg

SEQ ID NO: 3810459 - RNA, 15 nt, Human
cucaguugauuuucu

SEQ ID NO: 3810460 - RNA, 18 nt, Human
cucaguugauuuucugga

SEQ ID NO: 3810461 - RNA, 13 nt, Human
cucaguuggaaau

SEQ ID NO: 3810462 - RNA, 15 nt, Human
cucaguugugcagcu

SEQ ID NO: 3810463 - RNA, 17 nt, Human
cucaguuuaauccuucu

SEQ ID NO: 3810464 - RNA, 13 nt, Human
cucaguuucccua

SEQ ID NO: 3810465 - RNA, 13 nt, Human
cucaguuugucag

SEQ ID NO: 3810466 - RNA, 17 nt, Human
cucaguuuuaucauuuu

SEQ ID NO: 3810467 - RNA, 12 nt, Human
cucaguuuuucu

SEQ ID NO: 3810468 - RNA, 16 nt, Human
cucauaaauuuacuuu

SEQ ID NO: 3810469 - RNA, 21 nt, Human
cucauaacggaucagaaauac

SEQ ID NO: 3810470 - RNA, 15 nt, Human
cucauaacucauugu

SEQ ID NO: 3810471 - RNA, 17 nt, Human
cucauacacucguauga

SEQ ID NO: 3810472 - RNA, 16 nt, Human
cucauacccaccccca

SEQ ID NO: 3810473 - RNA, 18 nt, Human
cucauaccuuuaaaggaa

SEQ ID NO: 3810474 - RNA, 14 nt, Human
cucauacguccacc

SEQ ID NO: 3810475 - RNA, 15 nt, Human
cucauacguccacca

SEQ ID NO: 3810476 - RNA, 14 nt, Human
cucauacucaccuc

SEQ ID NO: 3810477 - RNA, 22 nt, Human
cucauacucaccucaccccacu

SEQ ID NO: 3810478 - RNA, 13 nt, Human
cucauacugugcu

SEQ ID NO: 3810479 - RNA, 12 nt, Human
cucauagcauua

SEQ ID NO: 3810480 - RNA, 23 nt, Human
cucauaggaaaaguacauuuaau

SEQ ID NO: 3810481 - RNA, 14 nt, Human
cucauagggaagac

SEQ ID NO: 3810482 - RNA, 19 nt, Human
cucauaguaugguggcugg

SEQ ID NO: 3810483 - RNA, 21 nt, Human
cucauaguaugguggcugggu

SEQ ID NO: 3810484 - RNA, 20 nt, Human
cucauauaauuauauguugu

SEQ ID NO: 3810485 - RNA, 21 nt, Human
cucauauccaguauuguuccu

SEQ ID NO: 3810486 - RNA, 19 nt, Human
cucauauggcccaguguca

SEQ ID NO: 3810487 - RNA, 12 nt, Human
cucauauuuaaa

SEQ ID NO: 3810488 - RNA, 12 nt, Human
cucauauuuugu

SEQ ID NO: 3810489 - RNA, 13 nt, Human
cucauauuuugua

SEQ ID NO: 3810490 - RNA, 18 nt, Human
cucaucaacaaagaaaua

SEQ ID NO: 3810491 - RNA, 14 nt, Human
cucaucaacugaau

SEQ ID NO: 3810492 - RNA, 21 nt, Human
cucaucaaucaaauaaguauu

SEQ ID NO: 3810493 - RNA, 13 nt, Human
cucaucacacaca

SEQ ID NO: 3810494 - RNA, 16 nt, Human
cucaucacacacaugg

SEQ ID NO: 3810495 - RNA, 17 nt, Human
cucaucacacacaugga

SEQ ID NO: 3810496 - RNA, 21 nt, Human
cucaucaccaacgucugugcc

SEQ ID NO: 3810497 - RNA, 14 nt, Human
cucaucacuccccu

SEQ ID NO: 3810498 - RNA, 12 nt, Human
cucaucacugug

SEQ ID NO: 3810499 - RNA, 15 nt, Human
cucaucacuguggcu

SEQ ID NO: 3810500 - RNA, 21 nt, Human
cucaucacuguggcugucugg

SEQ ID NO: 3810501 - RNA, 12 nt, Human
cucaucaggaug

SEQ ID NO: 3810502 - RNA, 24 nt, Human
cucaucaguguccucuugcucaaa

SEQ ID NO: 3810503 - RNA, 14 nt, Human
cucaucauaaaaua

SEQ ID NO: 3810504 - RNA, 17 nt, Human
cucaucaugucuauugu

SEQ ID NO: 3810505 - RNA, 17 nt, Human
cucaucauucucugucu

SEQ ID NO: 3810506 - RNA, 16 nt, Human
gacauguucccuucuc

SEQ ID NO: 3810507 - RNA, 14 nt, Human
gacauguuuugaua

SEQ ID NO: 3810508 - RNA, 16 nt, Human
gacauguuuugauaaa

SEQ ID NO: 3810509 - RNA, 23 nt, Human
gacauguuuugauaaaguaguaa

SEQ ID NO: 3810510 - RNA, 14 nt, Human
gacauguuuuuguu

SEQ ID NO: 3810511 - RNA, 13 nt, Human
gacauuaaauaau

SEQ ID NO: 3810512 - RNA, 14 nt, Human
gacauuaacaguuu

SEQ ID NO: 3810513 - RNA, 14 nt, Human
gacauuaacucauu

SEQ ID NO: 3810514 - RNA, 23 nt, Human
gacauuaguaacauaauaaauua

SEQ ID NO: 3810515 - RNA, 14 nt, Human
gacauuauagacau

SEQ ID NO: 3810516 - RNA, 20 nt, Human
gacauuauagacauugagga

SEQ ID NO: 3810517 - RNA, 21 nt, Human
gacauuaugugugcaugugug

SEQ ID NO: 3810518 - RNA, 22 nt, Human
gacauuaugugugcaugugugu

SEQ ID NO: 3810519 - RNA, 23 nt, Human
gacauuaugugugcaugugugua

SEQ ID NO: 3810520 - RNA, 17 nt, Human
gacauucaccugcccca

SEQ ID NO: 3810521 - RNA, 18 nt, Human
gacauucaccugccccaa

SEQ ID NO: 3810522 - RNA, 20 nt, Human
gacauuccuaaacuaucuuu

SEQ ID NO: 3810523 - RNA, 16 nt, Human
gacauuccugggcaca

SEQ ID NO: 3810524 - RNA, 12 nt, Human
gacauucugaau

SEQ ID NO: 3810525 - RNA, 21 nt, Human
gacauucuuguaaggcuuuga

SEQ ID NO: 3810526 - RNA, 21 nt, Human
gacauugaaaucuaggaaaau

SEQ ID NO: 3810527 - RNA, 18 nt, Human
gacauugauuugauuuuu

SEQ ID NO: 3810528 - RNA, 21 nt, Human
gacauugcguuugaccuuuua

SEQ ID NO: 3810529 - RNA, 12 nt, Human
gacauugucaau

SEQ ID NO: 3810530 - RNA, 17 nt, Human
gacauugucagcaaauu

SEQ ID NO: 3810531 - RNA, 13 nt, Human
gacauugucuccc

SEQ ID NO: 3810532 - RNA, 20 nt, Human
gacauugucucccgcccccc

SEQ ID NO: 3810533 - RNA, 22 nt, Human
gacauuguuggcagcauaaagg

SEQ ID NO: 3810534 - RNA, 22 nt, Human
gacauuguuuugccaacauugc

SEQ ID NO: 3810535 - RNA, 14 nt, Human
gacauuuaauuuag

SEQ ID NO: 3810536 - RNA, 18 nt, Human
gacauuuaccuuuuugaa

SEQ ID NO: 3810537 - RNA, 16 nt, Human
gacauuucuuugugcu

SEQ ID NO: 3810538 - RNA, 22 nt, Human
gacauuucuuuucuuuuuacau

SEQ ID NO: 3810539 - RNA, 23 nt, Human
gacauuucuuuucuuuuuacaua

SEQ ID NO: 3810540 - RNA, 12 nt, Human
gacauuugucau

SEQ ID NO: 3810541 - RNA, 19 nt, Human
gacauuugucauuuucauu

SEQ ID NO: 3810542 - RNA, 13 nt, Human
gacauuuguuugg

SEQ ID NO: 3810543 - RNA, 15 nt, Human
gacauuuuaacaaga

SEQ ID NO: 3810544 - RNA, 15 nt, Human
gacauuuuacauuaa

SEQ ID NO: 3810545 - RNA, 21 nt, Human
gacauuuuacauuaaauuuuu

SEQ ID NO: 3810546 - RNA, 15 nt, Human
gacauuuuuucaguc

SEQ ID NO: 3810547 - RNA, 17 nt, Human
gaccaaaaaaauaaggu

SEQ ID NO: 3810548 - RNA, 13 nt, Human
gaccaaaaaccag

SEQ ID NO: 3810549 - RNA, 14 nt, Human
gaccaaaaguuaca

SEQ ID NO: 3810550 - RNA, 19 nt, Human
gaccaaaaguuacauguuu

SEQ ID NO: 3810551 - RNA, 13 nt, Human
gaccaaaccuagc

SEQ ID NO: 3810552 - RNA, 18 nt, Human
gaccaaacuucacucugg

SEQ ID NO: 3810553 - RNA, 16 nt, Human
gaccaacauggagaaa

SEQ ID NO: 3810554 - RNA, 18 nt, Human
gaccaacccuguuuccug

SEQ ID NO: 3810555 - RNA, 13 nt, Human
gaccaacugggcc

SEQ ID NO: 3810556 - RNA, 19 nt, Human
gaccaacugggcccaagac

SEQ ID NO: 3810557 - RNA, 13 nt, Human
gaccaacuguguu

SEQ ID NO: 3810558 - RNA, 15 nt, Human
gaccaacuguguugu

SEQ ID NO: 3810559 - RNA, 12 nt, Human
gaccaagaacug

SEQ ID NO: 3810560 - RNA, 13 nt, Human
gaccaagaacugc

SEQ ID NO: 3810561 - RNA, 14 nt, Human
gaccaagcaggaag

SEQ ID NO: 3810562 - RNA, 20 nt, Human
gaccaagcaggaagcucaga

SEQ ID NO: 3810563 - RNA, 20 nt, Human
gaccaagcaucuuggggggg

SEQ ID NO: 3810564 - RNA, 18 nt, Human
gaccaaggcucugaaaua

SEQ ID NO: 3810565 - RNA, 18 nt, Human
gaccaauauucaaaugcg

SEQ ID NO: 3810566 - RNA, 17 nt, Human
gaccaauauuguacagu

SEQ ID NO: 3810567 - RNA, 10 nt, Human
gaccaaucag

SEQ ID NO: 3810568 - RNA, 16 nt, Human
gaccaauuauugauau

SEQ ID NO: 3810569 - RNA, 18 nt, Human
gaccaauuauugauauau

SEQ ID NO: 3810570 - RNA, 20 nt, Human
gaccaauuauugauauauau

SEQ ID NO: 3810571 - RNA, 18 nt, Human
gaccaauugugcugccau

SEQ ID NO: 3810572 - RNA, 16 nt, Human
gaccacacccuguacu

SEQ ID NO: 3810573 - RNA, 18 nt, Human
gaccacacuuccugucca

SEQ ID NO: 3810574 - RNA, 23 nt, Human
gaccacacuuccuguccagagag

SEQ ID NO: 3810575 - RNA, 12 nt, Human
gaccacagcaca

SEQ ID NO: 3810576 - RNA, 13 nt, Human
gaccacaggcuca

SEQ ID NO: 3810577 - RNA, 17 nt, Human
gaccacaucuuuaucug

SEQ ID NO: 3810578 - RNA, 14 nt, Human
gaccaccaagccuu

SEQ ID NO: 3810579 - RNA, 16 nt, Human
gaccaccaccucagag

SEQ ID NO: 3810580 - RNA, 12 nt, Human
gaccaccagagg

SEQ ID NO: 3810581 - RNA, 19 nt, Human
gaccaccccugccuccacc

SEQ ID NO: 3810582 - RNA, 17 nt, Human
gaccacccuccccucuc

SEQ ID NO: 3810583 - RNA, 19 nt, Human
gaccaccgccccuggccgc

SEQ ID NO: 3810584 - RNA, 20 nt, Human
gaccacggacguuuccauca

SEQ ID NO: 3810585 - RNA, 22 nt, Human
gaccacggacguuuccaucagg

SEQ ID NO: 3810586 - RNA, 19 nt, Human
gaccacgucuauuucauca

SEQ ID NO: 3810587 - RNA, 17 nt, Human
gaccacgugcuaccccc

SEQ ID NO: 3810588 - RNA, 14 nt, Human
gaccacucagagac

SEQ ID NO: 3810589 - RNA, 12 nt, Human
gaccacucagcc

SEQ ID NO: 3810590 - RNA, 13 nt, Human
gaccacucagccc

SEQ ID NO: 3810591 - RNA, 12 nt, Human
gaccacugcaug

SEQ ID NO: 3810592 - RNA, 14 nt, Human
gaccacuguuauca

SEQ ID NO: 3810593 - RNA, 23 nt, Human
gaccacuuccaggggaaccugcc

SEQ ID NO: 3810594 - RNA, 16 nt, Human
gaccagaaaucaaaaa

SEQ ID NO: 3810595 - RNA, 21 nt, Human
gaccagaaaucaaaaagggaa

SEQ ID NO: 3810596 - RNA, 19 nt, Human
gaccagaagggaaacaguc

SEQ ID NO: 3810597 - RNA, 17 nt, Human
gaccagacaagcuguug

SEQ ID NO: 3810598 - RNA, 22 nt, Human
gaccagacaccuugacagggca

SEQ ID NO: 3810599 - RNA, 21 nt, Human
gaccagagcugccaccugccu

SEQ ID NO: 3810600 - RNA, 19 nt, Human
gaccagaggagccuuuuua

SEQ ID NO: 3810601 - RNA, 21 nt, Human
gaccagaggagccuuuuuaaa

SEQ ID NO: 3810602 - RNA, 13 nt, Human
gaccagcaaauac

SEQ ID NO: 3810603 - RNA, 21 nt, Human
gaccagcaccaucucuccucc

SEQ ID NO: 3810604 - RNA, 23 nt, Human
gaccagcagacagagccaggaga

SEQ ID NO: 3810605 - RNA, 18 nt, Human
gaccagcagaucccagcu

SEQ ID NO: 3810606 - RNA, 12 nt, Human
gaccagcagccc

SEQ ID NO: 3810607 - RNA, 16 nt, Human
gaccagcagcgccuuu

SEQ ID NO: 3810608 - RNA, 17 nt, Human
gaccagcaggcuggccu

SEQ ID NO: 3810609 - RNA, 23 nt, Human
gaccagccagggaaagacuggca

SEQ ID NO: 3810610 - RNA, 11 nt, Human
gaccagcccac

SEQ ID NO: 3810611 - RNA, 14 nt, Human
gaccagccucccug

SEQ ID NO: 3810612 - RNA, 13 nt, Human
gaccagccuggcc

SEQ ID NO: 3810613 - RNA, 14 nt, Human
gaccagccuggccc

SEQ ID NO: 3810614 - RNA, 16 nt, Human
gaccagccuggcccac

SEQ ID NO: 3810615 - RNA, 12 nt, Human
gaccagcucagg

SEQ ID NO: 3810616 - RNA, 14 nt, Human
gaccagcucaggac

SEQ ID NO: 3810617 - RNA, 20 nt, Human
gaccagcugcuccgaggacc

SEQ ID NO: 3810618 - RNA, 23 nt, Human
gaccagcugcuccgaggacccag

SEQ ID NO: 3810619 - RNA, 22 nt, Human
gaccagcuuuucccaaaagccc

SEQ ID NO: 3810620 - RNA, 16 nt, Human
gaccaggacaggacca

SEQ ID NO: 3810621 - RNA, 19 nt, Human
gaccaggacucccuccuca

SEQ ID NO: 3810622 - RNA, 21 nt, Human
gaccaggacucccuccucacc

SEQ ID NO: 3810623 - RNA, 17 nt, Human
gaccaggauccagccuc

SEQ ID NO: 3810624 - RNA, 21 nt, Human
gaccagggccgaggaggugcc

SEQ ID NO: 3810625 - RNA, 11 nt, Human
gaccagggcuc

SEQ ID NO: 3810626 - RNA, 18 nt, Human
gaccagggcuccagcccc

SEQ ID NO: 3810627 - RNA, 21 nt, Human
gaccagggcuccagccccucu

SEQ ID NO: 3810628 - RNA, 18 nt, Human
gaccagggcuggggcagc

SEQ ID NO: 3810629 - RNA, 19 nt, Human
gaccagggcuggggcagcc

SEQ ID NO: 3810630 - RNA, 22 nt, Human
gaccagggcuggggcagccucu

SEQ ID NO: 3810631 - RNA, 20 nt, Human
gaccaggguuggcaccuucc

SEQ ID NO: 3810632 - RNA, 22 nt, Human
gaccaggucuuggagcugagcc

SEQ ID NO: 3810633 - RNA, 21 nt, Human
gaccagguuauuuuaaaaaga

SEQ ID NO: 3810634 - RNA, 15 nt, Human
gaccaguaauuguga

SEQ ID NO: 3810635 - RNA, 19 nt, Human
gaccagugagcgcuugggc

SEQ ID NO: 3810636 - RNA, 19 nt, Human
gaccaguugcagucacucu

SEQ ID NO: 3810637 - RNA, 22 nt, Human
gaccaguugcagucacucuagu

SEQ ID NO: 3810638 - RNA, 15 nt, Human
gaccaguugggagca

SEQ ID NO: 3810639 - RNA, 19 nt, Human
gaccaguuuaaccugaugc

SEQ ID NO: 3810640 - RNA, 15 nt, Human
gaccauaauguuaca

SEQ ID NO: 3810641 - RNA, 14 nt, Human
gaccaucccugaag

SEQ ID NO: 3810642 - RNA, 18 nt, Human
gaccaucccugaaggccc

SEQ ID NO: 3810643 - RNA, 19 nt, Human
gaccaucccugaaggcccc

SEQ ID NO: 3810644 - RNA, 14 nt, Human
gaccauccuggcua

SEQ ID NO: 3810645 - RNA, 16 nt, Human
gaccaucugauuaaaa

SEQ ID NO: 3810646 - RNA, 15 nt, Human
gaccaugcugucugg

SEQ ID NO: 3810647 - RNA, 22 nt, Human
gaccaugcugucuggcacagcc

SEQ ID NO: 3810648 - RNA, 23 nt, Human
gaccaugcugucuggcacagccu

SEQ ID NO: 3810649 - RNA, 18 nt, Human
gaccauggaguggcagcc

SEQ ID NO: 3810650 - RNA, 20 nt, Human
gaccauggaguggcagccca

SEQ ID NO: 3810651 - RNA, 22 nt, Human
gaccaugguuaagaguccaaga

SEQ ID NO: 3810652 - RNA, 13 nt, Human
gaccaugugucac

SEQ ID NO: 3810653 - RNA, 19 nt, Human
gaccauucuccaccugcca

SEQ ID NO: 3810654 - RNA, 20 nt, Human
gaccauucuccaccugccag

SEQ ID NO: 3810655 - RNA, 18 nt, Human
gacuauauuguacacacc

SEQ ID NO: 3810656 - RNA, 22 nt, Human
gacuauauuugggccugcucca

SEQ ID NO: 3810657 - RNA, 18 nt, Human
gacuaucaaacugaagcc

SEQ ID NO: 3810658 - RNA, 13 nt, Human
gacuaucagccca

SEQ ID NO: 3810659 - RNA, 22 nt, Human
gacuaucccaacagucauguuu

SEQ ID NO: 3810660 - RNA, 20 nt, Human
gacuaugcguggcuggaacc

SEQ ID NO: 3810661 - RNA, 18 nt, Human
gacuaugcuuuucucaaa

SEQ ID NO: 3810662 - RNA, 16 nt, Human
gacuauggagccuggc

SEQ ID NO: 3810663 - RNA, 20 nt, Human
gacuauuauguuguuagaga

SEQ ID NO: 3810664 - RNA, 22 nt, Human
gacuauucuugauguaaaaucu

SEQ ID NO: 3810665 - RNA, 22 nt, Human
gacuauuugcuuauuuaauaaa

SEQ ID NO: 3810666 - RNA, 22 nt, Human
gacucaaaacccaucugggcuc

SEQ ID NO: 3810667 - RNA, 23 nt, Human
gacucaaaacccaucugggcucc

SEQ ID NO: 3810668 - RNA, 19 nt, Human
gacucaaaucuccaguauu

SEQ ID NO: 3810669 - RNA, 15 nt, Human
gacucaaauguucua

SEQ ID NO: 3810670 - RNA, 20 nt, Human
gacucaagaagugaagaaug

SEQ ID NO: 3810671 - RNA, 12 nt, Human
gacucaagauuc

SEQ ID NO: 3810672 - RNA, 17 nt, Human
gacucaagauucccagg

SEQ ID NO: 3810673 - RNA, 22 nt, Human
gacucaagauucccaggaguuc

SEQ ID NO: 3810674 - RNA, 17 nt, Human
gacucaaguccuuaccu

SEQ ID NO: 3810675 - RNA, 17 nt, Human
gacucaauaaaaucaug

SEQ ID NO: 3810676 - RNA, 17 nt, Human
gacucaaugcacugaca

SEQ ID NO: 3810677 - RNA, 19 nt, Human
gacucacaaccugaaccua

SEQ ID NO: 3810678 - RNA, 17 nt, Human
gacucacaagaagacca

SEQ ID NO: 3810679 - RNA, 21 nt, Human
gacucacaagaagaccagacu

SEQ ID NO: 3810680 - RNA, 23 nt, Human
gacucacaccugaacugaacacc

SEQ ID NO: 3810681 - RNA, 13 nt, Human
gacucaccucugc

SEQ ID NO: 3810682 - RNA, 14 nt, Human
gacucaccucugcc

SEQ ID NO: 3810683 - RNA, 18 nt, Human
gacucaccucugccucaa

SEQ ID NO: 3810684 - RNA, 21 nt, Human
gacucacuggcagccccagca

SEQ ID NO: 3810685 - RNA, 22 nt, Human
gacucacuggcagccccagcac

SEQ ID NO: 3810686 - RNA, 23 nt, Human
gacucacuggcagccccagcacc

SEQ ID NO: 3810687 - RNA, 16 nt, Human
gacucagaaacuccau

SEQ ID NO: 3810688 - RNA, 17 nt, Human
gacucagaaagccaaca

SEQ ID NO: 3810689 - RNA, 17 nt, Human
gacucagacaggaaagg

SEQ ID NO: 3810690 - RNA, 11 nt, Human
gacucagagaa

SEQ ID NO: 3810691 - RNA, 15 nt, Human
gacucagcccugagg

SEQ ID NO: 3810692 - RNA, 16 nt, Human
gacucagcccugaggu

SEQ ID NO: 3810693 - RNA, 14 nt, Human
gacucagccuucag

SEQ ID NO: 3810694 - RNA, 20 nt, Human
gacucagccuucagacagag

SEQ ID NO: 3810695 - RNA, 16 nt, Human
cuccagcuuuccugua

SEQ ID NO: 3810696 - RNA, 18 nt, Human
cuccaggaaccacaccac

SEQ ID NO: 3810697 - RNA, 15 nt, Human
cuccaggaaggggcu

SEQ ID NO: 3810698 - RNA, 14 nt, Human
cuccaggagaggag

SEQ ID NO: 3810699 - RNA, 16 nt, Human
cuccaggagcagccac

SEQ ID NO: 3810700 - RNA, 17 nt, Human
cuccaggagcuucuugu

SEQ ID NO: 3810701 - RNA, 17 nt, Human
cuccaggcaccaucucc

SEQ ID NO: 3810702 - RNA, 13 nt, Human
cuccaggcaggcu

SEQ ID NO: 3810703 - RNA, 12 nt, Human
cuccaggccaaa

SEQ ID NO: 3810704 - RNA, 19 nt, Human
cuccaggcccaaggcuccc

SEQ ID NO: 3810705 - RNA, 14 nt, Human
cuccaggcccgucu

SEQ ID NO: 3810706 - RNA, 15 nt, Human
cuccaggcccgucug

SEQ ID NO: 3810707 - RNA, 18 nt, Human
cuccaggcccgucugucc

SEQ ID NO: 3810708 - RNA, 20 nt, Human
cuccaggcccgucuguccau

SEQ ID NO: 3810709 - RNA, 19 nt, Human
cuccaggccugccucccac

SEQ ID NO: 3810710 - RNA, 22 nt, Human
cuccaggccugccucccacuuc

SEQ ID NO: 3810711 - RNA, 18 nt, Human
cuccaggcgccggcgggc

SEQ ID NO: 3810712 - RNA, 16 nt, Human
cuccagggaauccaag

SEQ ID NO: 3810713 - RNA, 20 nt, Human
cuccagggaauccaagccuc

SEQ ID NO: 3810714 - RNA, 21 nt, Human
cuccagggaauccaagccucc

SEQ ID NO: 3810715 - RNA, 20 nt, Human
cuccagggacacacagccua

SEQ ID NO: 3810716 - RNA, 14 nt, Human
cuccagggacagca

SEQ ID NO: 3810717 - RNA, 18 nt, Human
cuccagggaguccccucc

SEQ ID NO: 3810718 - RNA, 11 nt, Human
cuccagggcca

SEQ ID NO: 3810719 - RNA, 16 nt, Human
cuccagggccacgugc

SEQ ID NO: 3810720 - RNA, 18 nt, Human
cuccagggccacgugcca

SEQ ID NO: 3810721 - RNA, 14 nt, Human
cuccagggcuggac

SEQ ID NO: 3810722 - RNA, 17 nt, Human
cuccagggcuggacuga

SEQ ID NO: 3810723 - RNA, 21 nt, Human
cuccaggggcugcuuccuccu

SEQ ID NO: 3810724 - RNA, 15 nt, Human
cuccagggguggcug

SEQ ID NO: 3810725 - RNA, 17 nt, Human
cuccagggguuuacagu

SEQ ID NO: 3810726 - RNA, 19 nt, Human
cuccaggguggcagcaaca

SEQ ID NO: 3810727 - RNA, 16 nt, Human
cuccagggugugugcu

SEQ ID NO: 3810728 - RNA, 18 nt, Human
cuccagguaccuugaccu

SEQ ID NO: 3810729 - RNA, 16 nt, Human
cuccaggucucacggg

SEQ ID NO: 3810730 - RNA, 18 nt, Human
cuccaggucucacgggca

SEQ ID NO: 3810731 - RNA, 20 nt, Human
cuccaggugcacaagcucca

SEQ ID NO: 3810732 - RNA, 16 nt, Human
cuccaggugcagaggu

SEQ ID NO: 3810733 - RNA, 18 nt, Human
cuccaggugcagagguac

SEQ ID NO: 3810734 - RNA, 17 nt, Human
cuccagguuuuucaauu

SEQ ID NO: 3810735 - RNA, 21 nt, Human
cuccagguuuuucaauuaaac

SEQ ID NO: 3810736 - RNA, 16 nt, Human
cuccagucaggaggca

SEQ ID NO: 3810737 - RNA, 22 nt, Human
cuccagucauuauguuaauauu

SEQ ID NO: 3810738 - RNA, 15 nt, Human
cuccaguccccagaa

SEQ ID NO: 3810739 - RNA, 17 nt, Human
cuccaguccccagaacu

SEQ ID NO: 3810740 - RNA, 22 nt, Human
cuccagucccccuauccuuggc

SEQ ID NO: 3810741 - RNA, 17 nt, Human
cuccaguccugcucucu

SEQ ID NO: 3810742 - RNA, 23 nt, Human
cuccaguccugcucucuacccag

SEQ ID NO: 3810743 - RNA, 15 nt, Human
cuccagucugcugcc

SEQ ID NO: 3810744 - RNA, 17 nt, Human
cuccagucugcugcccu

SEQ ID NO: 3810745 - RNA, 20 nt, Human
cuccagucugcugcccucca

SEQ ID NO: 3810746 - RNA, 20 nt, Human
cuccaguggggcaagauuuu

SEQ ID NO: 3810747 - RNA, 21 nt, Human
cuccaguguacauaguguaau

SEQ ID NO: 3810748 - RNA, 13 nt, Human
cuccaguguccug

SEQ ID NO: 3810749 - RNA, 14 nt, Human
cuccaguguccuga

SEQ ID NO: 3810750 - RNA, 17 nt, Human
cuccaguguccugagcu

SEQ ID NO: 3810751 - RNA, 19 nt, Human
cuccaguguccugagcuca

SEQ ID NO: 3810752 - RNA, 21 nt, Human
cuccaguguccugagcucagc

SEQ ID NO: 3810753 - RNA, 22 nt, Human
cuccaguguccugagcucagcg

SEQ ID NO: 3810754 - RNA, 18 nt, Human
cuccaguuugcaccuguc

SEQ ID NO: 3810755 - RNA, 21 nt, Human
cuccaguuugcaccugucccc

SEQ ID NO: 3810756 - RNA, 17 nt, Human
cuccaguuuucaguuga

SEQ ID NO: 3810757 - RNA, 18 nt, Human
cuccauaguuuggcauuu

SEQ ID NO: 3810758 - RNA, 19 nt, Human
cuccaucaguuagagcuga

SEQ ID NO: 3810759 - RNA, 12 nt, Human
cuccauccaagg

SEQ ID NO: 3810760 - RNA, 18 nt, Human
cuccauccaaggccaggu

SEQ ID NO: 3810761 - RNA, 17 nt, Human
cuccaucccaacagcca

SEQ ID NO: 3810762 - RNA, 23 nt, Human
cuccaucccccuuuacccucuuu

SEQ ID NO: 3810763 - RNA, 12 nt, Human
cuccaucccucu

SEQ ID NO: 3810764 - RNA, 13 nt, Human
cuccaucccuggc

SEQ ID NO: 3810765 - RNA, 19 nt, Human
cuccaucccuggcccccuc

SEQ ID NO: 3810766 - RNA, 20 nt, Human
cuccauccuacccccugugc

SEQ ID NO: 3810767 - RNA, 16 nt, Human
cuccauccuccuccuu

SEQ ID NO: 3810768 - RNA, 12 nt, Human
cuccauccugag

SEQ ID NO: 3810769 - RNA, 21 nt, Human
cuccauccuuucugccucuca

SEQ ID NO: 3810770 - RNA, 16 nt, Human
cuccaucuccacucca

SEQ ID NO: 3810771 - RNA, 20 nt, Human
cuccaucucucauccuccag

SEQ ID NO: 3810772 - RNA, 21 nt, Human
cuccaucucucauccuccagu

SEQ ID NO: 3810773 - RNA, 12 nt, Human
cuccaucucucu

SEQ ID NO: 3810774 - RNA, 13 nt, Human
cuccaucucucug

SEQ ID NO: 3810775 - RNA, 14 nt, Human
cuccaucugguaga

SEQ ID NO: 3810776 - RNA, 15 nt, Human
cuccaucugguagaa

SEQ ID NO: 3810777 - RNA, 23 nt, Human
cuccaucugguagaagggaaagc

SEQ ID NO: 3810778 - RNA, 12 nt, Human
cuccaucuguuu

SEQ ID NO: 3810779 - RNA, 17 nt, Human
cuccaucuucagcuucu

SEQ ID NO: 3810780 - RNA, 15 nt, Human
cuccaugcugccucc

SEQ ID NO: 3810781 - RNA, 14 nt, Human
cuccauggcaucuu

SEQ ID NO: 3810782 - RNA, 16 nt, Human
cuccauggcccugcca

SEQ ID NO: 3810783 - RNA, 18 nt, Human
cuccauggcuuccuccuc

SEQ ID NO: 3810784 - RNA, 21 nt, Human
cuccauggcuuccuccucccu

SEQ ID NO: 3810785 - RNA, 17 nt, Human
cuccauggugccucugg

SEQ ID NO: 3810786 - RNA, 14 nt, Human
cuccaugugggcua

SEQ ID NO: 3810787 - RNA, 20 nt, Human
cuccauuaaagucugaauca

SEQ ID NO: 3810788 - RNA, 22 nt, Human
cuccauuaggauuugccccuuc

SEQ ID NO: 3810789 - RNA, 18 nt, Human
cuccauucaauuucaggc

SEQ ID NO: 3810790 - RNA, 17 nt, Human
cuccauuccuggagccc

SEQ ID NO: 3810791 - RNA, 19 nt, Human
cuccauuccuggagcccga

SEQ ID NO: 3810792 - RNA, 20 nt, Human
cuccauuccuggagcccgag

SEQ ID NO: 3810793 - RNA, 14 nt, Human
cuccauucugacca

SEQ ID NO: 3810794 - RNA, 20 nt, Human
cuccauucugaccauuucag

SEQ ID NO: 3810795 - RNA, 15 nt, Human
cuccauucugcuccu

SEQ ID NO: 3810796 - RNA, 16 nt, Human
cuccauuguuuugccu

SEQ ID NO: 3810797 - RNA, 22 nt, Human
cuccauuugagaaaauaaagcu

SEQ ID NO: 3810798 - RNA, 17 nt, Human
cuccauuugcucuucag

SEQ ID NO: 3810799 - RNA, 20 nt, Human
cucccaaacgcccuuuccuc

SEQ ID NO: 3810800 - RNA, 14 nt, Human
cucccaaagagcug

SEQ ID NO: 3810801 - RNA, 20 nt, Human
cucccaaagugcugagauua

SEQ ID NO: 3810802 - RNA, 22 nt, Human
cucccaaagugcugagauuaca

SEQ ID NO: 3810803 - RNA, 22 nt, Human
cucccaaagugcugggauuaca

SEQ ID NO: 3810804 - RNA, 23 nt, Human
cucccaaagugcugggauuacag

SEQ ID NO: 3810805 - RNA, 15 nt, Human
cucccaacucacccc

SEQ ID NO: 3810806 - RNA, 17 nt, Human
cucccaacucaccccag

SEQ ID NO: 3810807 - RNA, 18 nt, Human
cucccaacucaccccagc

SEQ ID NO: 3810808 - RNA, 22 nt, Human
cucccaacucaccccagcccca

SEQ ID NO: 3810809 - RNA, 22 nt, Human
cucccaagacuucauugucccu

SEQ ID NO: 3810810 - RNA, 16 nt, Human
cucccaagcuggcugg

SEQ ID NO: 3810811 - RNA, 16 nt, Human
cucccaaggagaacaa

SEQ ID NO: 3810812 - RNA, 22 nt, Human
cucccaaggcugcgucuggagg

SEQ ID NO: 3810813 - RNA, 14 nt, Human
cucccaagggaugg

SEQ ID NO: 3810814 - RNA, 18 nt, Human
cucccaaggggccugagc

SEQ ID NO: 3810815 - RNA, 13 nt, Human
cucccaaguggug

SEQ ID NO: 3810816 - RNA, 18 nt, Human
cucccaaguggugccuaa

SEQ ID NO: 3810817 - RNA, 20 nt, Human
cucccaaguuuuaggacaaa

SEQ ID NO: 3810818 - RNA, 15 nt, Human
cucccacaagccuga

SEQ ID NO: 3810819 - RNA, 23 nt, Human
cucccacaagccugagggaaagg

SEQ ID NO: 3810820 - RNA, 21 nt, Human
cucccacacccaaagcugagc

SEQ ID NO: 3810821 - RNA, 13 nt, Human
cucccacagagac

SEQ ID NO: 3810822 - RNA, 20 nt, Human
cucccacaggcccuuccucu

SEQ ID NO: 3810823 - RNA, 20 nt, Human
cucccacagucccaucugcu

SEQ ID NO: 3810824 - RNA, 14 nt, Human
cucccacagugacu

SEQ ID NO: 3810825 - RNA, 22 nt, Human
cucccacagugacucgggcucc

SEQ ID NO: 3810826 - RNA, 14 nt, Human
cucccaccacagca

SEQ ID NO: 3810827 - RNA, 14 nt, Human
cucccacccaccgc

SEQ ID NO: 3810828 - RNA, 13 nt, Human
cucccaccccacc

SEQ ID NO: 3810829 - RNA, 19 nt, Human
cucccaccccacccccuuc

SEQ ID NO: 3810830 - RNA, 23 nt, Human
cucccaccccacccccuucagug

SEQ ID NO: 3810831 - RNA, 15 nt, Human
cucccacccccagcc

SEQ ID NO: 3810832 - RNA, 20 nt, Human
cucccacccccaucucuccc

SEQ ID NO: 3810833 - RNA, 18 nt, Human
cucccacccccuucucug

SEQ ID NO: 3810834 - RNA, 19 nt, Human
cucccacccggcugcagag

SEQ ID NO: 3810835 - RNA, 12 nt, Human
cucccacccucu

SEQ ID NO: 3810836 - RNA, 20 nt, Human
cucccacccucuuccuacug

SEQ ID NO: 3810837 - RNA, 20 nt, Human
cucccacccuguaccucauc

SEQ ID NO: 3810838 - RNA, 17 nt, Human
cucccaccucagccucc

SEQ ID NO: 3810839 - RNA, 15 nt, Human
cucccaccuccaguc

SEQ ID NO: 3810840 - RNA, 23 nt, Human
cucccaccucccccucccccuuc

SEQ ID NO: 3810841 - RNA, 18 nt, Human
cucccaccuccccuuggg

SEQ ID NO: 3810842 - RNA, 12 nt, Human
cucccaccucug

SEQ ID NO: 3810843 - RNA, 15 nt, Human
cucccaccucuguga

SEQ ID NO: 3810844 - RNA, 14 nt, Human
gacuggaauuuuua

SEQ ID NO: 3810845 - RNA, 13 nt, Human
gacuggacagcuu

SEQ ID NO: 3810846 - RNA, 14 nt, Human
gacuggacagcuug

SEQ ID NO: 3810847 - RNA, 18 nt, Human
gacuggaccugguggcua

SEQ ID NO: 3810848 - RNA, 20 nt, Human
gacuggaggaccacacucaa

SEQ ID NO: 3810849 - RNA, 20 nt, Human
gacuggaggccccuggagcc

SEQ ID NO: 3810850 - RNA, 22 nt, Human
gacuggcauacuauguggaugu

SEQ ID NO: 3810851 - RNA, 24 nt, Human
gacuggcauacuauguggauguga

SEQ ID NO: 3810852 - RNA, 23 nt, Human
gacuggccaagguuuggggaaga

SEQ ID NO: 3810853 - RNA, 15 nt, Human
gacuggccagggcca

SEQ ID NO: 3810854 - RNA, 14 nt, Human
gacuggccccuggg

SEQ ID NO: 3810855 - RNA, 14 nt, Human
gacuggccugagga

SEQ ID NO: 3810856 - RNA, 16 nt, Human
gacuggcuggcugcag

SEQ ID NO: 3810857 - RNA, 17 nt, Human
gacuggcuggcugcagu

SEQ ID NO: 3810858 - RNA, 21 nt, Human
gacuggcuguccuuuccagug

SEQ ID NO: 3810859 - RNA, 19 nt, Human
gacuggcuuugucccacag

SEQ ID NO: 3810860 - RNA, 20 nt, Human
gacuggcuuugucccacagc

SEQ ID NO: 3810861 - RNA, 20 nt, Human
gacuggcuuuuauuaaugca

SEQ ID NO: 3810862 - RNA, 23 nt, Human
gacuggcuuuuauuaaugcacuu

SEQ ID NO: 3810863 - RNA, 20 nt, Human
gacugggaagauaggcucug

SEQ ID NO: 3810864 - RNA, 18 nt, Human
gacugggagcccccagcc

SEQ ID NO: 3810865 - RNA, 23 nt, Human
gacugggagcccccagccuguca

SEQ ID NO: 3810866 - RNA, 16 nt, Human
gacugggccaggggag

SEQ ID NO: 3810867 - RNA, 17 nt, Human
gacuggggaugugggag

SEQ ID NO: 3810868 - RNA, 21 nt, Human
gacuggguaggaaagaggaag

SEQ ID NO: 3810869 - RNA, 14 nt, Human
gacuggugagcaga

SEQ ID NO: 3810870 - RNA, 18 nt, Human
gacuggugcuaaugucaa

SEQ ID NO: 3810871 - RNA, 22 nt, Human
gacugguguuaucaccgugggc

SEQ ID NO: 3810872 - RNA, 17 nt, Human
gacuguaaacacagaca

SEQ ID NO: 3810873 - RNA, 20 nt, Human
gacuguaaguugggcuugcu

SEQ ID NO: 3810874 - RNA, 21 nt, Human
gacuguaaguugggcuugcua

SEQ ID NO: 3810875 - RNA, 18 nt, Human
gacuguacacacuuuauu

SEQ ID NO: 3810876 - RNA, 18 nt, Human
gacuguacuccucccagg

SEQ ID NO: 3810877 - RNA, 20 nt, Human
gacuguacuccucccaggcg

SEQ ID NO: 3810878 - RNA, 13 nt, Human
gacuguagaagaa

SEQ ID NO: 3810879 - RNA, 13 nt, Human
gacuguagggagg

SEQ ID NO: 3810880 - RNA, 14 nt, Human
gacuguaucugugu

SEQ ID NO: 3810881 - RNA, 16 nt, Human
gacuguauuugugacu

SEQ ID NO: 3810882 - RNA, 17 nt, Human
gacuguauuugugacua

SEQ ID NO: 3810883 - RNA, 19 nt, Human
gacuguauuugugacuaau

SEQ ID NO: 3810884 - RNA, 20 nt, Human
gacuguauuugugacuaauu

SEQ ID NO: 3810885 - RNA, 22 nt, Human
gacuguauuugugacuaauugu

SEQ ID NO: 3810886 - RNA, 16 nt, Human
gacuguccucuccccu

SEQ ID NO: 3810887 - RNA, 20 nt, Human
gacuguccucuccccuccag

SEQ ID NO: 3810888 - RNA, 22 nt, Human
gacugucucaagagggcacugg

SEQ ID NO: 3810889 - RNA, 18 nt, Human
gacugucuccauggcccu

SEQ ID NO: 3810890 - RNA, 15 nt, Human
gacugucuggggagc

SEQ ID NO: 3810891 - RNA, 20 nt, Human
gacugugacaggcagcagag

SEQ ID NO: 3810892 - RNA, 19 nt, Human
gacugugaugccacacaga

SEQ ID NO: 3810893 - RNA, 17 nt, Human
gacuguggcacuugccu

SEQ ID NO: 3810894 - RNA, 13 nt, Human
gacuguggugacu

SEQ ID NO: 3810895 - RNA, 14 nt, Human
gacuguggugacuu

SEQ ID NO: 3810896 - RNA, 16 nt, Human
gacugugugcucagga

SEQ ID NO: 3810897 - RNA, 20 nt, Human
gacugugugcucaggagccc

SEQ ID NO: 3810898 - RNA, 17 nt, Human
gacugugugugcccucu

SEQ ID NO: 3810899 - RNA, 18 nt, Human
gacugugugugcccucug

SEQ ID NO: 3810900 - RNA, 22 nt, Human
gacuguguguugccacaggaca

SEQ ID NO: 3810901 - RNA, 18 nt, Human
gacuguucaagagcacac

SEQ ID NO: 3810902 - RNA, 19 nt, Human
gacuguucaagagcacacu

SEQ ID NO: 3810903 - RNA, 14 nt, Human
gacuguuccugucu

SEQ ID NO: 3810904 - RNA, 20 nt, Human
gacuguuguuaucuguuuga

SEQ ID NO: 3810905 - RNA, 13 nt, Human
gacuguuuggaaa

SEQ ID NO: 3810906 - RNA, 20 nt, Human
gacuguuuuuuccugagcuu

SEQ ID NO: 3810907 - RNA, 23 nt, Human
gacuuaaagggcccaaugaauua

SEQ ID NO: 3810908 - RNA, 14 nt, Human
gacuuaacggcucc

SEQ ID NO: 3810909 - RNA, 16 nt, Human
gacuuaacuccuucca

SEQ ID NO: 3810910 - RNA, 20 nt, Human
gacuuaacugcauuuuuaga

SEQ ID NO: 3810911 - RNA, 20 nt, Human
gacuuaagcaaaagaaaaag

SEQ ID NO: 3810912 - RNA, 19 nt, Human
gacuuaagcacacuugaca

SEQ ID NO: 3810913 - RNA, 19 nt, Human
gacuuaagugugcaaaaua

SEQ ID NO: 3810914 - RNA, 23 nt, Human
gacuuaaugagacuuuaaaagca

SEQ ID NO: 3810915 - RNA, 12 nt, Human
gacuuacucuaa

SEQ ID NO: 3810916 - RNA, 15 nt, Human
gacuuacucuaagau

SEQ ID NO: 3810917 - RNA, 16 nt, Human
gacuuagaaagcaggg

SEQ ID NO: 3810918 - RNA, 20 nt, Human
gacuuagaaucccuguguua

SEQ ID NO: 3810919 - RNA, 23 nt, Human
gacuuagaaucccuguguuaauu

SEQ ID NO: 3810920 - RNA, 15 nt, Human
gacuuauuacaauuu

SEQ ID NO: 3810921 - RNA, 16 nt, Human
gacuuauuuauauaaa

SEQ ID NO: 3810922 - RNA, 14 nt, Human
gacuucacacugca

SEQ ID NO: 3810923 - RNA, 17 nt, Human
gacuucacauaagcuca

SEQ ID NO: 3810924 - RNA, 14 nt, Human
gacuucacuuauua

SEQ ID NO: 3810925 - RNA, 12 nt, Human
gacuucagauug

SEQ ID NO: 3810926 - RNA, 14 nt, Human
gacuucagcucugu

SEQ ID NO: 3810927 - RNA, 14 nt, Human
gacuucagggcagg

SEQ ID NO: 3810928 - RNA, 22 nt, Human
gacuucagggcagggcucugau

SEQ ID NO: 3810929 - RNA, 19 nt, Human
gacuucaggggcugcccgc

SEQ ID NO: 3810930 - RNA, 20 nt, Human
gacuucaggggcugcccgcu

SEQ ID NO: 3810931 - RNA, 21 nt, Human
gacuucaggggcugcccgcuc

SEQ ID NO: 3810932 - RNA, 17 nt, Human
gacuucaguauguuguc

SEQ ID NO: 3810933 - RNA, 21 nt, Human
gacuucauagauuuccuuccc

SEQ ID NO: 3810934 - RNA, 20 nt, Human
gacuucaucccucuggggcu

SEQ ID NO: 3810935 - RNA, 15 nt, Human
gacuuccaugccuua

SEQ ID NO: 3810936 - RNA, 18 nt, Human
gacuucccacggcuccuc

SEQ ID NO: 3810937 - RNA, 18 nt, Human
gacuucccagcuaggaag

SEQ ID NO: 3810938 - RNA, 21 nt, Human
gacuucccuaacacuuacccc

SEQ ID NO: 3810939 - RNA, 22 nt, Human
gacuuccugauugguuucucuu

SEQ ID NO: 3810940 - RNA, 14 nt, Human
gacuuccuuacuaa

SEQ ID NO: 3810941 - RNA, 14 nt, Human
gacuucggaccgcu

SEQ ID NO: 3810942 - RNA, 16 nt, Human
gacuucuaaguaaaac

SEQ ID NO: 3810943 - RNA, 17 nt, Human
gacuucuaaguaaaacc

SEQ ID NO: 3810944 - RNA, 24 nt, Human
gacuucuaaguaaaaccacagcag

SEQ ID NO: 3810945 - RNA, 14 nt, Human
gacuucucuuugcc

SEQ ID NO: 3810946 - RNA, 18 nt, Human
gacuucucuuugccucaa

SEQ ID NO: 3810947 - RNA, 13 nt, Human
gacuucugagauc

SEQ ID NO: 3810948 - RNA, 15 nt, Human
gacuucugccuggag

SEQ ID NO: 3810949 - RNA, 17 nt, Human
gacuucugccuggagac

SEQ ID NO: 3810950 - RNA, 17 nt, Human
gacuucugcuuuccaca

SEQ ID NO: 3810951 - RNA, 14 nt, Human
gacuucuguuuuca

SEQ ID NO: 3810952 - RNA, 17 nt, Human
gacuucuguuuucaauc

SEQ ID NO: 3810953 - RNA, 16 nt, Human
gacuucuuuaauuuug

SEQ ID NO: 3810954 - RNA, 17 nt, Human
gacuucuuuaauuuugg

SEQ ID NO: 3810955 - RNA, 18 nt, Human
gacuucuuuaauuuugga

SEQ ID NO: 3810956 - RNA, 21 nt, Human
gacuucuuuaauuuuggaauu

SEQ ID NO: 3810957 - RNA, 22 nt, Human
gacuucuuucaaauugagagaa

SEQ ID NO: 3810958 - RNA, 12 nt, Human
gacuucuuuuca

SEQ ID NO: 3810959 - RNA, 15 nt, Human
gacuucuuuucacau

SEQ ID NO: 3810960 - RNA, 21 nt, Human
gacuucuuuucacauucuuau

SEQ ID NO: 3810961 - RNA, 22 nt, Human
gacuugaaaagagacaggcagg

SEQ ID NO: 3810962 - RNA, 16 nt, Human
gacuugaaagaaaggg

SEQ ID NO: 3810963 - RNA, 21 nt, Human
gacuugaaagcauccaugugu

SEQ ID NO: 3810964 - RNA, 11 nt, Human
gacuugaaguu

SEQ ID NO: 3810965 - RNA, 19 nt, Human
gacuugaauuuucccacug

SEQ ID NO: 3810966 - RNA, 13 nt, Human
gacuugaccccga

SEQ ID NO: 3810967 - RNA, 23 nt, Human
gacuugagaaacaaauaauuugu

SEQ ID NO: 3810968 - RNA, 19 nt, Human
gacuugaggauuuugagua

SEQ ID NO: 3810969 - RNA, 18 nt, Human
gacuugcaauuucuaccu

SEQ ID NO: 3810970 - RNA, 16 nt, Human
gacuuggaagcuccgc

SEQ ID NO: 3810971 - RNA, 19 nt, Human
gacuuggcaacagaagcag

SEQ ID NO: 3810972 - RNA, 15 nt, Human
gacuuggccccugcc

SEQ ID NO: 3810973 - RNA, 15 nt, Human
gacuuggccucucuc

SEQ ID NO: 3810974 - RNA, 21 nt, Human
gacuugggcacccccagccug

SEQ ID NO: 3810975 - RNA, 19 nt, Human
gacuuggucaccagcuccu

SEQ ID NO: 3810976 - RNA, 17 nt, Human
gacuugguugguagggu

SEQ ID NO: 3810977 - RNA, 19 nt, Human
gacuuguagggaugccuuu

SEQ ID NO: 3810978 - RNA, 23 nt, Human
gacuuguauagcaugaaauaaaa

SEQ ID NO: 3810979 - RNA, 18 nt, Human
gacuuguauauucuauuu

SEQ ID NO: 3810980 - RNA, 18 nt, Human
gacuuguauauuuguaca

SEQ ID NO: 3810981 - RNA, 18 nt, Human
gacuugugcacaggcaga

SEQ ID NO: 3810982 - RNA, 23 nt, Human
gacuuguuggcguaggcuacaga

SEQ ID NO: 3810983 - RNA, 21 nt, Human
gacuuuacacucggcuuugga

SEQ ID NO: 3810984 - RNA, 18 nt, Human
gacuuuagaaauaaaugu

SEQ ID NO: 3810985 - RNA, 11 nt, Human
gacuuuauaaa

SEQ ID NO: 3810986 - RNA, 17 nt, Human
gacuuuauguaguuuuu

SEQ ID NO: 3810987 - RNA, 11 nt, Human
gacuuuauuag

SEQ ID NO: 3810988 - RNA, 15 nt, Human
gacuuuauuauuuau

SEQ ID NO: 3810989 - RNA, 17 nt, Human
gacuuucaguaaacaua

SEQ ID NO: 3810990 - RNA, 13 nt, Human
gacuuuccacccc

SEQ ID NO: 3810991 - RNA, 15 nt, Human
gacuuuccacccccu

SEQ ID NO: 3810992 - RNA, 16 nt, Human
gacuuuccuaaauguu

SEQ ID NO: 3810993 - RNA, 18 nt, Human
gacucagcuccccagagu

SEQ ID NO: 3810994 - RNA, 15 nt, Human
gacucaggagccugu

SEQ ID NO: 3810995 - RNA, 16 nt, Human
gacucaggagccugug

SEQ ID NO: 3810996 - RNA, 18 nt, Human
gacucaggaugcccaggg

SEQ ID NO: 3810997 - RNA, 23 nt, Human
gacucaggaugcccagggccacu

SEQ ID NO: 3810998 - RNA, 23 nt, Human
gacucagggcagcgccaggcuga

SEQ ID NO: 3810999 - RNA, 19 nt, Human
gacucagggccaugccugc

SEQ ID NO: 3811000 - RNA, 20 nt, Human
gacucagggccaugccugcc

SEQ ID NO: 3811001 - RNA, 21 nt, Human
gacucagggccaugccugccc

SEQ ID NO: 3811002 - RNA, 22 nt, Human
gacucagggccaugccugcccc

SEQ ID NO: 3811003 - RNA, 20 nt, Human
gacucagggccccagcacua

SEQ ID NO: 3811004 - RNA, 15 nt, Human
gacucaguggggagg

SEQ ID NO: 3811005 - RNA, 19 nt, Human
gacucaucuuucccuccuu

SEQ ID NO: 3811006 - RNA, 22 nt, Human
gacucaucuuucccuccuuggu

SEQ ID NO: 3811007 - RNA, 15 nt, Human
gacucaugaggaggg

SEQ ID NO: 3811008 - RNA, 18 nt, Human
gacucaugaggaggggcc

SEQ ID NO: 3811009 - RNA, 19 nt, Human
gacucaugguguguuacac

SEQ ID NO: 3811010 - RNA, 14 nt, Human
gacucauucuucug

SEQ ID NO: 3811011 - RNA, 18 nt, Human
gacuccaaagaaauguaa

SEQ ID NO: 3811012 - RNA, 19 nt, Human
gacuccacgauccugccac

SEQ ID NO: 3811013 - RNA, 11 nt, Human
gacuccagaaa

SEQ ID NO: 3811014 - RNA, 16 nt, Human
gacuccagccagcgcc

SEQ ID NO: 3811015 - RNA, 21 nt, Human
gacuccagccagcgccucccu

SEQ ID NO: 3811016 - RNA, 22 nt, Human
gacuccagccagcgccucccuc

SEQ ID NO: 3811017 - RNA, 16 nt, Human
gacuccaggagaggag

SEQ ID NO: 3811018 - RNA, 20 nt, Human
gacuccaguggggcaagauu

SEQ ID NO: 3811019 - RNA, 17 nt, Human
gacucccaugaagccuu

SEQ ID NO: 3811020 - RNA, 21 nt, Human
gacucccaugaagccuuuuga

SEQ ID NO: 3811021 - RNA, 18 nt, Human
gacucccaugagggagau

SEQ ID NO: 3811022 - RNA, 12 nt, Human
gacucccuccuc

SEQ ID NO: 3811023 - RNA, 13 nt, Human
gacucccuccuca

SEQ ID NO: 3811024 - RNA, 16 nt, Human
gacucccuccucaccu

SEQ ID NO: 3811025 - RNA, 22 nt, Human
gacucccuuaaaauagaaauaa

SEQ ID NO: 3811026 - RNA, 14 nt, Human
gacuccggcccucc

SEQ ID NO: 3811027 - RNA, 22 nt, Human
gacuccggcccuccuacccugc

SEQ ID NO: 3811028 - RNA, 17 nt, Human
gacuccggcugugcugg

SEQ ID NO: 3811029 - RNA, 17 nt, Human
gacuccuaccugcccug

SEQ ID NO: 3811030 - RNA, 15 nt, Human
gacuccuagcugucc

SEQ ID NO: 3811031 - RNA, 19 nt, Human
gacuccuaggcaggacaug

SEQ ID NO: 3811032 - RNA, 23 nt, Human
gacuccuaggcaggacaugcuga

SEQ ID NO: 3811033 - RNA, 20 nt, Human
gacuccuccccacccuccug

SEQ ID NO: 3811034 - RNA, 22 nt, Human
gacuccuccccacccuccuggc

SEQ ID NO: 3811035 - RNA, 13 nt, Human
gacuccuccuuuu

SEQ ID NO: 3811036 - RNA, 17 nt, Human
gacuccuccuuuuucca

SEQ ID NO: 3811037 - RNA, 11 nt, Human
gacuccucugu

SEQ ID NO: 3811038 - RNA, 18 nt, Human
gacuccugaggacagcug

SEQ ID NO: 3811039 - RNA, 13 nt, Human
gacuccugcaggc

SEQ ID NO: 3811040 - RNA, 19 nt, Human
gacuccugcaggcagccag

SEQ ID NO: 3811041 - RNA, 21 nt, Human
gacuccugcaggcagccaggc

SEQ ID NO: 3811042 - RNA, 13 nt, Human
gacuccugcccug

SEQ ID NO: 3811043 - RNA, 17 nt, Human
gacuccuggguugagcu

SEQ ID NO: 3811044 - RNA, 16 nt, Human
gacucgacucugugcc

SEQ ID NO: 3811045 - RNA, 16 nt, Human
gacucgagaacuuuca

SEQ ID NO: 3811046 - RNA, 17 nt, Human
gacucgcgacaaugcaa

SEQ ID NO: 3811047 - RNA, 16 nt, Human
gacucggaaucuauuu

SEQ ID NO: 3811048 - RNA, 20 nt, Human
gacucgggcuccugugcccu

SEQ ID NO: 3811049 - RNA, 14 nt, Human
gacucggggguggg

SEQ ID NO: 3811050 - RNA, 16 nt, Human
gacucgggggugggga

SEQ ID NO: 3811051 - RNA, 13 nt, Human
gacucgguuucuc

SEQ ID NO: 3811052 - RNA, 14 nt, Human
gacucuaaagacca

SEQ ID NO: 3811053 - RNA, 16 nt, Human
gacucuaaagaccaaa

SEQ ID NO: 3811054 - RNA, 17 nt, Human
gacucuaaagaccaaac

SEQ ID NO: 3811055 - RNA, 21 nt, Human
gacucuaaauucuuuauuucu

SEQ ID NO: 3811056 - RNA, 14 nt, Human
gacucuaagaaaga

SEQ ID NO: 3811057 - RNA, 18 nt, Human
gacucuacaugcuuguug

SEQ ID NO: 3811058 - RNA, 20 nt, Human
gacucuaccagacuguguau

SEQ ID NO: 3811059 - RNA, 18 nt, Human
gacucuagaguccaaggu

SEQ ID NO: 3811060 - RNA, 19 nt, Human
gacucuaguacugugaauc

SEQ ID NO: 3811061 - RNA, 14 nt, Human
gacucuauucuuua

SEQ ID NO: 3811062 - RNA, 21 nt, Human
gacucucagcccagaagaaaa

SEQ ID NO: 3811063 - RNA, 12 nt, Human
gacucuccaggg

SEQ ID NO: 3811064 - RNA, 24 nt, Human
gacucuccagggguccuaggccuc

SEQ ID NO: 3811065 - RNA, 15 nt, Human
gacucucugugaccu

SEQ ID NO: 3811066 - RNA, 19 nt, Human
gacucucugugaccugccc

SEQ ID NO: 3811067 - RNA, 19 nt, Human
gacucugaaauaucccggg

SEQ ID NO: 3811068 - RNA, 15 nt, Human
gacucugaaaucuga

SEQ ID NO: 3811069 - RNA, 15 nt, Human
gacucugaagccucu

SEQ ID NO: 3811070 - RNA, 17 nt, Human
gacucugaagccucugg

SEQ ID NO: 3811071 - RNA, 21 nt, Human
gacucugaaucuuuuucagaa

SEQ ID NO: 3811072 - RNA, 17 nt, Human
gacucugagcgggaggc

SEQ ID NO: 3811073 - RNA, 19 nt, Human
gacucugagcgggaggcag

SEQ ID NO: 3811074 - RNA, 20 nt, Human
gacucugagcgggaggcaga

SEQ ID NO: 3811075 - RNA, 22 nt, Human
gacucugagcgggaggcagagu

SEQ ID NO: 3811076 - RNA, 12 nt, Human
gacucugcacau

SEQ ID NO: 3811077 - RNA, 13 nt, Human
gacucugcagccu

SEQ ID NO: 3811078 - RNA, 14 nt, Human
gacucugcagccuc

SEQ ID NO: 3811079 - RNA, 15 nt, Human
gacucugcagccuca

SEQ ID NO: 3811080 - RNA, 12 nt, Human
gacucugccccc

SEQ ID NO: 3811081 - RNA, 15 nt, Human
gacucugcccccugc

SEQ ID NO: 3811082 - RNA, 16 nt, Human
gacucugcccccugcu

SEQ ID NO: 3811083 - RNA, 22 nt, Human
gacucugcccccugcuggcucu

SEQ ID NO: 3811084 - RNA, 16 nt, Human
gacucugccuccucuu

SEQ ID NO: 3811085 - RNA, 16 nt, Human
gacucugcucuugcau

SEQ ID NO: 3811086 - RNA, 22 nt, Human
gacucuggacuuucucuaauaa

SEQ ID NO: 3811087 - RNA, 16 nt, Human
gacucuggcaaagcuu

SEQ ID NO: 3811088 - RNA, 12 nt, Human
gacucuggcccu

SEQ ID NO: 3811089 - RNA, 14 nt, Human
gacucuggcccugg

SEQ ID NO: 3811090 - RNA, 17 nt, Human
gacucuggcccuggccc

SEQ ID NO: 3811091 - RNA, 15 nt, Human
gacucuggccuccac

SEQ ID NO: 3811092 - RNA, 20 nt, Human
gacucugggcuauggacaca

SEQ ID NO: 3811093 - RNA, 17 nt, Human
gacucuguaacaucacu

SEQ ID NO: 3811094 - RNA, 22 nt, Human
gacucugucaauuucccugacu

SEQ ID NO: 3811095 - RNA, 12 nt, Human
gacucugucuca

SEQ ID NO: 3811096 - RNA, 14 nt, Human
gacucugugcuggc

SEQ ID NO: 3811097 - RNA, 14 nt, Human
gacucuuaagaaga

SEQ ID NO: 3811098 - RNA, 15 nt, Human
gacucuuacuuuuua

SEQ ID NO: 3811099 - RNA, 15 nt, Human
gacucuucaaaaacu

SEQ ID NO: 3811100 - RNA, 17 nt, Human
gacucuucugagcaccu

SEQ ID NO: 3811101 - RNA, 14 nt, Human
gacucuugggaggg

SEQ ID NO: 3811102 - RNA, 9 nt, Human
gacucuugu

SEQ ID NO: 3811103 - RNA, 20 nt, Human
gacucuuuagcaaaaaaaac

SEQ ID NO: 3811104 - RNA, 16 nt, Human
gacucuuuaugcuugc

SEQ ID NO: 3811105 - RNA, 20 nt, Human
gacugaaaaccucuccucau

SEQ ID NO: 3811106 - RNA, 15 nt, Human
gacugaaaguagggg

SEQ ID NO: 3811107 - RNA, 16 nt, Human
gacugaagccugcagg

SEQ ID NO: 3811108 - RNA, 21 nt, Human
gacugacagcaugugcccucc

SEQ ID NO: 3811109 - RNA, 23 nt, Human
gacugacagcaugugcccuccug

SEQ ID NO: 3811110 - RNA, 14 nt, Human
gacugaccagcagc

SEQ ID NO: 3811111 - RNA, 15 nt, Human
gacugaccagcagcu

SEQ ID NO: 3811112 - RNA, 16 nt, Human
gacugacccugaucag

SEQ ID NO: 3811113 - RNA, 19 nt, Human
gacugaccugguccacagg

SEQ ID NO: 3811114 - RNA, 20 nt, Human
gacugaccugguccacaggg

SEQ ID NO: 3811115 - RNA, 22 nt, Human
gacugaccugguccacagggca

SEQ ID NO: 3811116 - RNA, 21 nt, Human
gacugaccuuguaaaagacag

SEQ ID NO: 3811117 - RNA, 21 nt, Human
gacugacuuguuugucuucca

SEQ ID NO: 3811118 - RNA, 21 nt, Human
gacugagcaagacccugucuc

SEQ ID NO: 3811119 - RNA, 16 nt, Human
gacugagcacccucug

SEQ ID NO: 3811120 - RNA, 19 nt, Human
gacugagcagacuggugag

SEQ ID NO: 3811121 - RNA, 17 nt, Human
gacugagccagucccag

SEQ ID NO: 3811122 - RNA, 22 nt, Human
gacugagccccgcagaccuccc

SEQ ID NO: 3811123 - RNA, 12 nt, Human
gacugaggacaa

SEQ ID NO: 3811124 - RNA, 23 nt, Human
gacugaggccugagcgcuccugc

SEQ ID NO: 3811125 - RNA, 15 nt, Human
gacugagggacucug

SEQ ID NO: 3811126 - RNA, 21 nt, Human
gacugagggacucugaagccu

SEQ ID NO: 3811127 - RNA, 16 nt, Human
gacugaggggagggga

SEQ ID NO: 3811128 - RNA, 18 nt, Human
gacugagggggccuggau

SEQ ID NO: 3811129 - RNA, 21 nt, Human
gacugaguaagaaaugcugcc

SEQ ID NO: 3811130 - RNA, 18 nt, Human
gacugaguacguugugca

SEQ ID NO: 3811131 - RNA, 22 nt, Human
gacugagugggaagcccauccu

SEQ ID NO: 3811132 - RNA, 21 nt, Human
gacugauguuaggcugggccc

SEQ ID NO: 3811133 - RNA, 16 nt, Human
gacugauuucagagug

SEQ ID NO: 3811134 - RNA, 17 nt, Human
gacugcaagugagcaaa

SEQ ID NO: 3811135 - RNA, 19 nt, Human
gacugcaccauugcugcuc

SEQ ID NO: 3811136 - RNA, 14 nt, Human
gacugcacccagga

SEQ ID NO: 3811137 - RNA, 17 nt, Human
gacugcacccaggaggg

SEQ ID NO: 3811138 - RNA, 18 nt, Human
gacugcacccaggagggg

SEQ ID NO: 3811139 - RNA, 22 nt, Human
gacugcagguuggaccccagag

SEQ ID NO: 3811140 - RNA, 24 nt, Human
gacugcauuauauuuauuacugua

SEQ ID NO: 3811141 - RNA, 19 nt, Human
gacugccaagacugcugug

SEQ ID NO: 3811142 - RNA, 13 nt, Human
cucccaccuggcu

SEQ ID NO: 3811143 - RNA, 21 nt, Human
cucccacucuccuaggcauuc

SEQ ID NO: 3811144 - RNA, 19 nt, Human
cucccacuucccugacacu

SEQ ID NO: 3811145 - RNA, 15 nt, Human
cucccacuucugcca

SEQ ID NO: 3811146 - RNA, 16 nt, Human
cucccacuucugccag

SEQ ID NO: 3811147 - RNA, 22 nt, Human
cucccacuuggccaagcaggga

SEQ ID NO: 3811148 - RNA, 20 nt, Human
cucccacuuugcuguuccuu

SEQ ID NO: 3811149 - RNA, 16 nt, Human
cucccagaacacacuc

SEQ ID NO: 3811150 - RNA, 24 nt, Human
cucccagaacacacuccaucagcu

SEQ ID NO: 3811151 - RNA, 13 nt, Human
cucccagaauccc

SEQ ID NO: 3811152 - RNA, 16 nt, Human
cucccagaaucccagc

SEQ ID NO: 3811153 - RNA, 19 nt, Human
cucccagaaucccagccgg

SEQ ID NO: 3811154 - RNA, 21 nt, Human
cucccagaaucccagccggcc

SEQ ID NO: 3811155 - RNA, 17 nt, Human
cucccagaccugccucu

SEQ ID NO: 3811156 - RNA, 20 nt, Human
cucccagaccugccucuucc

SEQ ID NO: 3811157 - RNA, 15 nt, Human
cucccagaggagcca

SEQ ID NO: 3811158 - RNA, 19 nt, Human
cucccagaggagccaccag

SEQ ID NO: 3811159 - RNA, 21 nt, Human
cucccagaggagccaccaguu

SEQ ID NO: 3811160 - RNA, 12 nt, Human
cucccagaggcg

SEQ ID NO: 3811161 - RNA, 16 nt, Human
cucccagagguccagc

SEQ ID NO: 3811162 - RNA, 17 nt, Human
cucccagagguccagcc

SEQ ID NO: 3811163 - RNA, 20 nt, Human
cucccagagguccagcccau

SEQ ID NO: 3811164 - RNA, 19 nt, Human
cucccagcaucgcacucug

SEQ ID NO: 3811165 - RNA, 11 nt, Human
cucccagccuc

SEQ ID NO: 3811166 - RNA, 11 nt, Human
cucccagccug

SEQ ID NO: 3811167 - RNA, 21 nt, Human
cucccagcugacaguccucuc

SEQ ID NO: 3811168 - RNA, 11 nt, Human
cucccaggaac

SEQ ID NO: 3811169 - RNA, 12 nt, Human
cucccaggacac

SEQ ID NO: 3811170 - RNA, 21 nt, Human
cucccaggacucugaccccag

SEQ ID NO: 3811171 - RNA, 19 nt, Human
cucccaggagacaguucaa

SEQ ID NO: 3811172 - RNA, 18 nt, Human
cucccaggagccugccca

SEQ ID NO: 3811173 - RNA, 16 nt, Human
cucccaggcacugucu

SEQ ID NO: 3811174 - RNA, 17 nt, Human
cucccaggcauucccca

SEQ ID NO: 3811175 - RNA, 16 nt, Human
cucccaggccccauga

SEQ ID NO: 3811176 - RNA, 19 nt, Human
cucccaggccccaugaccu

SEQ ID NO: 3811177 - RNA, 14 nt, Human
cucccaggcgcccc

SEQ ID NO: 3811178 - RNA, 12 nt, Human
cucccaggcucu

SEQ ID NO: 3811179 - RNA, 22 nt, Human
cucccagggagcaagggcaggg

SEQ ID NO: 3811180 - RNA, 16 nt, Human
cucccagggccagggc

SEQ ID NO: 3811181 - RNA, 17 nt, Human
cucccagggccagggcc

SEQ ID NO: 3811182 - RNA, 14 nt, Human
cucccagggccaug

SEQ ID NO: 3811183 - RNA, 23 nt, Human
cucccagggccuuaaaagccauc

SEQ ID NO: 3811184 - RNA, 19 nt, Human
cucccaggggcucccuccg

SEQ ID NO: 3811185 - RNA, 21 nt, Human
cucccaggggucucccuggcu

SEQ ID NO: 3811186 - RNA, 12 nt, Human
cucccaggguuu

SEQ ID NO: 3811187 - RNA, 15 nt, Human
cucccaggguuuuaa

SEQ ID NO: 3811188 - RNA, 16 nt, Human
cucccaggguuuuaac

SEQ ID NO: 3811189 - RNA, 21 nt, Human
cucccaggguuuuaacuuugu

SEQ ID NO: 3811190 - RNA, 19 nt, Human
cucccagguaccagcugcg

SEQ ID NO: 3811191 - RNA, 21 nt, Human
cucccagguaccagcugcgcu

SEQ ID NO: 3811192 - RNA, 22 nt, Human
cucccagguaccagcugcgcuu

SEQ ID NO: 3811193 - RNA, 16 nt, Human
cucccaguaccuccug

SEQ ID NO: 3811194 - RNA, 22 nt, Human
cucccagucaccuuguggcaag

SEQ ID NO: 3811195 - RNA, 19 nt, Human
cucccagucuacccagaga

SEQ ID NO: 3811196 - RNA, 12 nt, Human
cucccagugucu

SEQ ID NO: 3811197 - RNA, 21 nt, Human
cucccagugucuuccuguggg

SEQ ID NO: 3811198 - RNA, 16 nt, Human
cucccaucacuucccu

SEQ ID NO: 3811199 - RNA, 23 nt, Human
cucccaucaugcccggucccacc

SEQ ID NO: 3811200 - RNA, 21 nt, Human
cucccaucauuacccuucccu

SEQ ID NO: 3811201 - RNA, 14 nt, Human
cucccauccagggc

SEQ ID NO: 3811202 - RNA, 15 nt, Human
cucccauccagggcc

SEQ ID NO: 3811203 - RNA, 12 nt, Human
cucccauccccc

SEQ ID NO: 3811204 - RNA, 14 nt, Human
cucccaucccccug

SEQ ID NO: 3811205 - RNA, 18 nt, Human
cucccaucccccugcccu

SEQ ID NO: 3811206 - RNA, 13 nt, Human
cucccauccccug

SEQ ID NO: 3811207 - RNA, 15 nt, Human
cucccauccccugga

SEQ ID NO: 3811208 - RNA, 23 nt, Human
cucccauccccuggacugggagg

SEQ ID NO: 3811209 - RNA, 15 nt, Human
cucccaucucacaca

SEQ ID NO: 3811210 - RNA, 18 nt, Human
cucccaucucacacauga

SEQ ID NO: 3811211 - RNA, 13 nt, Human
cucccaucuggga

SEQ ID NO: 3811212 - RNA, 15 nt, Human
cucccaucugggagu

SEQ ID NO: 3811213 - RNA, 11 nt, Human
cucccaucugu

SEQ ID NO: 3811214 - RNA, 17 nt, Human
cucccaucuuaacucuu

SEQ ID NO: 3811215 - RNA, 18 nt, Human
cucccaucuuaacucuuu

SEQ ID NO: 3811216 - RNA, 20 nt, Human
cucccaugagggagaugcca

SEQ ID NO: 3811217 - RNA, 22 nt, Human
cucccaugagggagaugccaug

SEQ ID NO: 3811218 - RNA, 20 nt, Human
cucccauggcuuaaugcuuc

SEQ ID NO: 3811219 - RNA, 14 nt, Human
cucccauguaugga

SEQ ID NO: 3811220 - RNA, 16 nt, Human
cucccauuccugaaga

SEQ ID NO: 3811221 - RNA, 17 nt, Human
cucccauugucccucug

SEQ ID NO: 3811222 - RNA, 14 nt, Human
cucccauuuccuga

SEQ ID NO: 3811223 - RNA, 16 nt, Human
cucccauuuuggaauu

SEQ ID NO: 3811224 - RNA, 12 nt, Human
cuccccaaaaac

SEQ ID NO: 3811225 - RNA, 19 nt, Human
cuccccaaaggcuuugccc

SEQ ID NO: 3811226 - RNA, 12 nt, Human
cuccccaacccu

SEQ ID NO: 3811227 - RNA, 19 nt, Human
cuccccaacccugccccug

SEQ ID NO: 3811228 - RNA, 17 nt, Human
cuccccaaggcccccug

SEQ ID NO: 3811229 - RNA, 21 nt, Human
cuccccaaggcccccugccug

SEQ ID NO: 3811230 - RNA, 18 nt, Human
cuccccaaugagacuugc

SEQ ID NO: 3811231 - RNA, 23 nt, Human
cuccccaaugagacuugccuucc

SEQ ID NO: 3811232 - RNA, 11 nt, Human
cuccccacagc

SEQ ID NO: 3811233 - RNA, 19 nt, Human
cuccccacagcgucccugg

SEQ ID NO: 3811234 - RNA, 12 nt, Human
cuccccaccccu

SEQ ID NO: 3811235 - RNA, 21 nt, Human
cuccccaccuucaauuccugg

SEQ ID NO: 3811236 - RNA, 20 nt, Human
cuccccacggccgcuccagg

SEQ ID NO: 3811237 - RNA, 21 nt, Human
cuccccacggccgcuccaggg

SEQ ID NO: 3811238 - RNA, 22 nt, Human
cuccccacggccgcuccagggg

SEQ ID NO: 3811239 - RNA, 23 nt, Human
cuccccacggggccucgggaccu

SEQ ID NO: 3811240 - RNA, 14 nt, Human
cuccccacucugcu

SEQ ID NO: 3811241 - RNA, 15 nt, Human
cuccccagagcacug

SEQ ID NO: 3811242 - RNA, 16 nt, Human
cuccccagagcacugg

SEQ ID NO: 3811243 - RNA, 17 nt, Human
cuccccagagcacuggg

SEQ ID NO: 3811244 - RNA, 23 nt, Human
cuccccagcauuccagccccucu

SEQ ID NO: 3811245 - RNA, 16 nt, Human
cuccccagccagccug

SEQ ID NO: 3811246 - RNA, 17 nt, Human
cuccccagccagccugg

SEQ ID NO: 3811247 - RNA, 18 nt, Human
cuccccagccagccuggc

SEQ ID NO: 3811248 - RNA, 14 nt, Human
cuccccagcccaga

SEQ ID NO: 3811249 - RNA, 18 nt, Human
cuccccagcccagagaca

SEQ ID NO: 3811250 - RNA, 16 nt, Human
cuccccagcccagggu

SEQ ID NO: 3811251 - RNA, 22 nt, Human
cuccccagcccaggguuccccc

SEQ ID NO: 3811252 - RNA, 20 nt, Human
cuccccagccccaucccaaa

SEQ ID NO: 3811253 - RNA, 17 nt, Human
cuccccagccccuagcc

SEQ ID NO: 3811254 - RNA, 19 nt, Human
cuccccagccccuagccca

SEQ ID NO: 3811255 - RNA, 13 nt, Human
cuccccagccugg

SEQ ID NO: 3811256 - RNA, 12 nt, Human
cuccccagcuca

SEQ ID NO: 3811257 - RNA, 14 nt, Human
cuccccagcuccca

SEQ ID NO: 3811258 - RNA, 18 nt, Human
cuccccaggaauuuggga

SEQ ID NO: 3811259 - RNA, 15 nt, Human
cuccccaggccaggc

SEQ ID NO: 3811260 - RNA, 18 nt, Human
cuccccagggaagcagca

SEQ ID NO: 3811261 - RNA, 22 nt, Human
cuccccagggaagcagcagccu

SEQ ID NO: 3811262 - RNA, 16 nt, Human
cuccccagguccagcu

SEQ ID NO: 3811263 - RNA, 17 nt, Human
cuccccagguccagcuc

SEQ ID NO: 3811264 - RNA, 16 nt, Human
cuccccaguguauguc

SEQ ID NO: 3811265 - RNA, 11 nt, Human
cuccccaguuc

SEQ ID NO: 3811266 - RNA, 15 nt, Human
cuccccaugcaggug

SEQ ID NO: 3811267 - RNA, 14 nt, Human
cuccccaugugucc

SEQ ID NO: 3811268 - RNA, 21 nt, Human
cuccccauguguccugguucc

SEQ ID NO: 3811269 - RNA, 21 nt, Human
cuccccauuucccaucugcac

SEQ ID NO: 3811270 - RNA, 21 nt, Human
cucccccaacccccaccccac

SEQ ID NO: 3811271 - RNA, 14 nt, Human
cucccccacccccu

SEQ ID NO: 3811272 - RNA, 13 nt, Human
cucccccacuuuc

SEQ ID NO: 3811273 - RNA, 15 nt, Human
cucccccagccccau

SEQ ID NO: 3811274 - RNA, 11 nt, Human
cucccccaucc

SEQ ID NO: 3811275 - RNA, 17 nt, Human
cucccccauccuccccu

SEQ ID NO: 3811276 - RNA, 13 nt, Human
cucccccaucucu

SEQ ID NO: 3811277 - RNA, 15 nt, Human
cuccccccacugcag

SEQ ID NO: 3811278 - RNA, 17 nt, Human
cuccccccccccuccaa

SEQ ID NO: 3811279 - RNA, 19 nt, Human
cucccccccggggcugggu

SEQ ID NO: 3811280 - RNA, 21 nt, Human
cucccccccggggcuggguug

SEQ ID NO: 3811281 - RNA, 17 nt, Human
cucccccgggaggggcc

SEQ ID NO: 3811282 - RNA, 22 nt, Human
cucccccgggaggggcccgcuu

SEQ ID NO: 3811283 - RNA, 21 nt, Human
cucccccguguuccccucuug

SEQ ID NO: 3811284 - RNA, 21 nt, Human
cucccccuaaaccccuguccc

SEQ ID NO: 3811285 - RNA, 20 nt, Human
cucccccuccuucccagcug

SEQ ID NO: 3811286 - RNA, 18 nt, Human
cucccccugccagugccu

SEQ ID NO: 3811287 - RNA, 12 nt, Human
cucccccugggc

SEQ ID NO: 3811288 - RNA, 13 nt, Human
cucccccuguccc

SEQ ID NO: 3811289 - RNA, 16 nt, Human
cucccccuuaccccac

SEQ ID NO: 3811290 - RNA, 17 nt, Human
cuccccgccuguucccc

SEQ ID NO: 3811291 - RNA, 18 nt, Human
cuccccgccuguuccccc

SEQ ID NO: 3811292 - RNA, 16 nt, Human
gacugccaagccaugg

SEQ ID NO: 3811293 - RNA, 14 nt, Human
gacugccacaagga

SEQ ID NO: 3811294 - RNA, 12 nt, Human
gacugccaccuc

SEQ ID NO: 3811295 - RNA, 13 nt, Human
gacugccaccucc

SEQ ID NO: 3811296 - RNA, 13 nt, Human
gacugccagcucu

SEQ ID NO: 3811297 - RNA, 19 nt, Human
gacugccagcucuuccuag

SEQ ID NO: 3811298 - RNA, 21 nt, Human
gacugccccgugcagacugga

SEQ ID NO: 3811299 - RNA, 16 nt, Human
gacugcccggcacaga

SEQ ID NO: 3811300 - RNA, 23 nt, Human
gacugccgaccgaggcuggagcu

SEQ ID NO: 3811301 - RNA, 14 nt, Human
gacugccucugcca

SEQ ID NO: 3811302 - RNA, 20 nt, Human
gacugcgaucuucagagcag

SEQ ID NO: 3811303 - RNA, 15 nt, Human
gacugcggaggaagg

SEQ ID NO: 3811304 - RNA, 23 nt, Human
gacugcggaggaaggaggaccca

SEQ ID NO: 3811305 - RNA, 14 nt, Human
gacugcguucugca

SEQ ID NO: 3811306 - RNA, 14 nt, Human
gacugcuaaauaaa

SEQ ID NO: 3811307 - RNA, 17 nt, Human
gacugcuaaauaaaauu

SEQ ID NO: 3811308 - RNA, 18 nt, Human
gacugcuaaauaaaauuu

SEQ ID NO: 3811309 - RNA, 15 nt, Human
gacugcuagggagug

SEQ ID NO: 3811310 - RNA, 20 nt, Human
gacugcuaguguucugucua

SEQ ID NO: 3811311 - RNA, 19 nt, Human
gacugcucagaacuugcug

SEQ ID NO: 3811312 - RNA, 21 nt, Human
gacugcuccccagcccuggcu

SEQ ID NO: 3811313 - RNA, 14 nt, Human
gacugcuccugagc

SEQ ID NO: 3811314 - RNA, 20 nt, Human
gacugcugggagguuaaaaa

SEQ ID NO: 3811315 - RNA, 12 nt, Human
gacugcuguggc

SEQ ID NO: 3811316 - RNA, 18 nt, Human
gacugcuguggccaggag

SEQ ID NO: 3811317 - RNA, 12 nt, Human
gacugcuuccca

SEQ ID NO: 3811318 - RNA, 13 nt, Human
gacugcuucccau

SEQ ID NO: 3811319 - RNA, 22 nt, Human
gacugcuucccauccuacccuc

SEQ ID NO: 3811320 - RNA, 12 nt, Human
gacugcuugccc

SEQ ID NO: 3811321 - RNA, 13 nt, Human
gacugcuugcccu

SEQ ID NO: 3811322 - RNA, 17 nt, Human
gacugcuugcccuaagc

SEQ ID NO: 3811323 - RNA, 15 nt, Human
gacuggaacacuaga

SEQ ID NO: 3811324 - RNA, 17 nt, Human
gacuggaaccagggaga

SEQ ID NO: 3811325 - RNA, 21 nt, Human
gacuggaagcuaauuugcauu

SEQ ID NO: 3811326 - RNA, 14 nt, Human
gacuggaaggacca

SEQ ID NO: 3811327 - RNA, 13 nt, Human
gacuggaaguuca

SEQ ID NO: 3811328 - RNA, 12 nt, Human
gacuggaauuuu

SEQ ID NO: 3811329 - RNA, 15 nt, Human
gacuggaauuuuuau

SEQ ID NO: 3811330 - RNA, 23 nt, Human
gacuggaggccccuggagccaga

SEQ ID NO: 3811331 - RNA, 22 nt, Human
gacuggauaguccgucucugcu

SEQ ID NO: 3811332 - RNA, 17 nt, Human
gacuggauguaccacca

SEQ ID NO: 3811333 - RNA, 16 nt, Human
gacuggcaagaaaaga

SEQ ID NO: 3811334 - RNA, 12 nt, Human
gacuggccaggg

SEQ ID NO: 3811335 - RNA, 18 nt, Human
gacuggccugaggagcag

SEQ ID NO: 3811336 - RNA, 20 nt, Human
gacuggcuagaguccucacu

SEQ ID NO: 3811337 - RNA, 10 nt, Human
gacuggcuuu

SEQ ID NO: 3811338 - RNA, 19 nt, Human
gacugggagcccccagccu

SEQ ID NO: 3811339 - RNA, 20 nt, Human
gacugggagcccccagccug

SEQ ID NO: 3811340 - RNA, 21 nt, Human
gacugggagcccccagccugu

SEQ ID NO: 3811341 - RNA, 18 nt, Human
gacugggagccgcagcag

SEQ ID NO: 3811342 - RNA, 14 nt, Human
gacugggcccugcc

SEQ ID NO: 3811343 - RNA, 17 nt, Human
gacugggcccugccucu

SEQ ID NO: 3811344 - RNA, 14 nt, Human
gacugggcugaggg

SEQ ID NO: 3811345 - RNA, 18 nt, Human
gacuggggaugugggagg

SEQ ID NO: 3811346 - RNA, 14 nt, Human
gacuggggcagggu

SEQ ID NO: 3811347 - RNA, 14 nt, Human
gacugggggccaga

SEQ ID NO: 3811348 - RNA, 14 nt, Human
gacuggguuucuag

SEQ ID NO: 3811349 - RNA, 16 nt, Human
gacugguaaguaacug

SEQ ID NO: 3811350 - RNA, 15 nt, Human
gacugguccugugug

SEQ ID NO: 3811351 - RNA, 12 nt, Human
gacuggugacug

SEQ ID NO: 3811352 - RNA, 10 nt, Human
gacuggugcc

SEQ ID NO: 3811353 - RNA, 22 nt, Human
gacuggugcuauaggcuggaga

SEQ ID NO: 3811354 - RNA, 23 nt, Human
gacuggugcuauaggcuggagaa

SEQ ID NO: 3811355 - RNA, 17 nt, Human
gacugguuuacaggccc

SEQ ID NO: 3811356 - RNA, 19 nt, Human
gacugguuuacaggcccug

SEQ ID NO: 3811357 - RNA, 18 nt, Human
gacuguaaacacagacag

SEQ ID NO: 3811358 - RNA, 13 nt, Human
gacuguaaguugg

SEQ ID NO: 3811359 - RNA, 23 nt, Human
gacuguacacacuuuauuuacuu

SEQ ID NO: 3811360 - RNA, 16 nt, Human
gacuguacuccuccca

SEQ ID NO: 3811361 - RNA, 20 nt, Human
gacuguagauauguauucuu

SEQ ID NO: 3811362 - RNA, 20 nt, Human
gacuguagauugcuucugua

SEQ ID NO: 3811363 - RNA, 22 nt, Human
gacuguagggagggcggcaggg

SEQ ID NO: 3811364 - RNA, 23 nt, Human
gacuguagggagggcggcagggg

SEQ ID NO: 3811365 - RNA, 16 nt, Human
gacuguaucuguguag

SEQ ID NO: 3811366 - RNA, 19 nt, Human
gacuguaucuguguagacu

SEQ ID NO: 3811367 - RNA, 22 nt, Human
gacuguauuauacauggguagc

SEQ ID NO: 3811368 - RNA, 14 nt, Human
gacuguauuuguga

SEQ ID NO: 3811369 - RNA, 23 nt, Human
gacuguauuugugacuaauugua

SEQ ID NO: 3811370 - RNA, 23 nt, Human
gacuguccucuccccuccagccu

SEQ ID NO: 3811371 - RNA, 17 nt, Human
gacugugacaggcagca

SEQ ID NO: 3811372 - RNA, 19 nt, Human
gacugugacaggcagcaga

SEQ ID NO: 3811373 - RNA, 13 nt, Human
gacugugaugcca

SEQ ID NO: 3811374 - RNA, 14 nt, Human
gacuguggcugcua

SEQ ID NO: 3811375 - RNA, 15 nt, Human
gacuguggcugcuag

SEQ ID NO: 3811376 - RNA, 22 nt, Human
gacuguguauucuaguuuuguc

SEQ ID NO: 3811377 - RNA, 14 nt, Human
gacugugugcucag

SEQ ID NO: 3811378 - RNA, 22 nt, Human
gacugugugcucaggagcccug

SEQ ID NO: 3811379 - RNA, 21 nt, Human
gacugugugugcccucugggc

SEQ ID NO: 3811380 - RNA, 21 nt, Human
gacuguugggguggguauaaa

SEQ ID NO: 3811381 - RNA, 13 nt, Human
gacuguugucccu

SEQ ID NO: 3811382 - RNA, 16 nt, Human
gacuguugucccugca

SEQ ID NO: 3811383 - RNA, 20 nt, Human
gacuguugucccugcacucu

SEQ ID NO: 3811384 - RNA, 13 nt, Human
gacuguuucaaac

SEQ ID NO: 3811385 - RNA, 16 nt, Human
gacuguuuucucuuga

SEQ ID NO: 3811386 - RNA, 21 nt, Human
gacuuaacauagccaaaaugu

SEQ ID NO: 3811387 - RNA, 16 nt, Human
gacuuaauagaaacau

SEQ ID NO: 3811388 - RNA, 23 nt, Human
gacuuaaugugauuacugcucua

SEQ ID NO: 3811389 - RNA, 18 nt, Human
gacuuacagcaaauccuu

SEQ ID NO: 3811390 - RNA, 14 nt, Human
gacuuacaugauuc

SEQ ID NO: 3811391 - RNA, 15 nt, Human
gacuuacaugauuca

SEQ ID NO: 3811392 - RNA, 12 nt, Human
gacuuacuguac

SEQ ID NO: 3811393 - RNA, 15 nt, Human
gacuuacuguacaug

SEQ ID NO: 3811394 - RNA, 23 nt, Human
gacuuacuguacaugaaaacaca

SEQ ID NO: 3811395 - RNA, 12 nt, Human
gacuuagaaucc

SEQ ID NO: 3811396 - RNA, 21 nt, Human
gacuuagaaucccuguguuaa

SEQ ID NO: 3811397 - RNA, 16 nt, Human
gacuuagggcaccagg

SEQ ID NO: 3811398 - RNA, 17 nt, Human
gacuuaguauauuuucu

SEQ ID NO: 3811399 - RNA, 22 nt, Human
gacuuaguugcguuacacccuu

SEQ ID NO: 3811400 - RNA, 16 nt, Human
gacuuauaguacauga

SEQ ID NO: 3811401 - RNA, 17 nt, Human
gacuuauaguacaugau

SEQ ID NO: 3811402 - RNA, 13 nt, Human
gacuuaugggccc

SEQ ID NO: 3811403 - RNA, 15 nt, Human
gacuuauuuucucug

SEQ ID NO: 3811404 - RNA, 12 nt, Human
gacuucaaagca

SEQ ID NO: 3811405 - RNA, 17 nt, Human
gacuucaaagcaagcug

SEQ ID NO: 3811406 - RNA, 16 nt, Human
gacuucacacugcaag

SEQ ID NO: 3811407 - RNA, 21 nt, Human
gacuucacauaagcucagaau

SEQ ID NO: 3811408 - RNA, 22 nt, Human
gacuucagggagucagcuguuu

SEQ ID NO: 3811409 - RNA, 17 nt, Human
gacuucaggggcugccc

SEQ ID NO: 3811410 - RNA, 13 nt, Human
gacuucaguaugu

SEQ ID NO: 3811411 - RNA, 20 nt, Human
gacuucaguauguugucaaa

SEQ ID NO: 3811412 - RNA, 24 nt, Human
gacuucaucucccaccuagcagca

SEQ ID NO: 3811413 - RNA, 15 nt, Human
gacuucauuuuuccu

SEQ ID NO: 3811414 - RNA, 16 nt, Human
gacuuccaaagaaugu

SEQ ID NO: 3811415 - RNA, 15 nt, Human
gacuucccaacugca

SEQ ID NO: 3811416 - RNA, 19 nt, Human
gacuucccacucuagggca

SEQ ID NO: 3811417 - RNA, 13 nt, Human
gacuucccagcuu

SEQ ID NO: 3811418 - RNA, 17 nt, Human
gacuuccccaauaucuu

SEQ ID NO: 3811419 - RNA, 20 nt, Human
gacuuccccaauaucuugcu

SEQ ID NO: 3811420 - RNA, 19 nt, Human
gacuuccucgccucuccca

SEQ ID NO: 3811421 - RNA, 21 nt, Human
gacuuccuguccagcuccaac

SEQ ID NO: 3811422 - RNA, 15 nt, Human
gacuuccuugagaca

SEQ ID NO: 3811423 - RNA, 16 nt, Human
gacuuccuugagacac

SEQ ID NO: 3811424 - RNA, 20 nt, Human
gacuuccuugagacacggag

SEQ ID NO: 3811425 - RNA, 14 nt, Human
gacuuccuugcucu

SEQ ID NO: 3811426 - RNA, 18 nt, Human
gacuuccuugcucucccu

SEQ ID NO: 3811427 - RNA, 16 nt, Human
gacuucgacucaggau

SEQ ID NO: 3811428 - RNA, 18 nt, Human
gacuucgacugugaccug

SEQ ID NO: 3811429 - RNA, 19 nt, Human
gacuucuaaguaaaaccac

SEQ ID NO: 3811430 - RNA, 15 nt, Human
gacuucuaccugccc

SEQ ID NO: 3811431 - RNA, 17 nt, Human
gacuucuauuuuaaaga

SEQ ID NO: 3811432 - RNA, 22 nt, Human
gacuucuccaggucucacgggc

SEQ ID NO: 3811433 - RNA, 14 nt, Human
gacuucugcuggca

SEQ ID NO: 3811434 - RNA, 20 nt, Human
gacuucugucuucacaacag

SEQ ID NO: 3811435 - RNA, 16 nt, Human
gacuucuguuuucaau

SEQ ID NO: 3811436 - RNA, 23 nt, Human
gacuucuguuuucaaucucguau

SEQ ID NO: 3811437 - RNA, 21 nt, Human
gacuugaaaagagacaggcag

SEQ ID NO: 3811438 - RNA, 13 nt, Human
gacuugaaagaaa

SEQ ID NO: 3811439 - RNA, 14 nt, Human
gacuugaaagcauc

SEQ ID NO: 3811440 - RNA, 23 nt, Human
gacuugaggauuuugaguaucuc

SEQ ID NO: 3811441 - RNA, 18 nt, Human
gacuugcaugaagagaag

SEQ ID NO: 3811442 - RNA, 20 nt, Human
gacuuucucuaauaauaaau

SEQ ID NO: 3811443 - RNA, 12 nt, Human
gacuuucugccu

SEQ ID NO: 3811444 - RNA, 14 nt, Human
gacuuucugccugg

SEQ ID NO: 3811445 - RNA, 16 nt, Human
gacuuucugccuggag

SEQ ID NO: 3811446 - RNA, 18 nt, Human
gacuuucugccuggagug

SEQ ID NO: 3811447 - RNA, 13 nt, Human
gacuuucuguugg

SEQ ID NO: 3811448 - RNA, 23 nt, Human
gacuuucuuuuuguagcuggggc

SEQ ID NO: 3811449 - RNA, 22 nt, Human
gacuuucuuuuuugauauagaa

SEQ ID NO: 3811450 - RNA, 22 nt, Human
gacuuugaugucagcaguugcu

SEQ ID NO: 3811451 - RNA, 14 nt, Human
gacuuugcuccuca

SEQ ID NO: 3811452 - RNA, 14 nt, Human
gacuuuggaaagac

SEQ ID NO: 3811453 - RNA, 20 nt, Human
acggcucuguccccagccug

SEQ ID NO: 3811454 - RNA, 11 nt, Human
acggcugggca

SEQ ID NO: 3811455 - RNA, 18 nt, Human
acgggaacaugcccccug

SEQ ID NO: 3811456 - RNA, 15 nt, Human
acgggaagcaaccuc

SEQ ID NO: 3811457 - RNA, 17 nt, Human
acgggaaguuuagagag

SEQ ID NO: 3811458 - RNA, 13 nt, Human
acgggaccgggcc

SEQ ID NO: 3811459 - RNA, 17 nt, Human
acgggcagccuggcucc

SEQ ID NO: 3811460 - RNA, 22 nt, Human
acgggcagccuggcucccagga

SEQ ID NO: 3811461 - RNA, 17 nt, Human
acgggccuguccacagg

SEQ ID NO: 3811462 - RNA, 14 nt, Human
acgggcugcccugc

SEQ ID NO: 3811463 - RNA, 23 nt, Human
acgggcuuguugcuguugauguu

SEQ ID NO: 3811464 - RNA, 12 nt, Human
acggggagaaaa

SEQ ID NO: 3811465 - RNA, 21 nt, Human
acggggccgacauugucuccc

SEQ ID NO: 3811466 - RNA, 14 nt, Human
acggggccggccag

SEQ ID NO: 3811467 - RNA, 15 nt, Human
acggggggccccagu

SEQ ID NO: 3811468 - RNA, 16 nt, Human
acggggggccccaguc

SEQ ID NO: 3811469 - RNA, 18 nt, Human
acgggugggcggcuggag

SEQ ID NO: 3811470 - RNA, 16 nt, Human
acggucagguuuaaca

SEQ ID NO: 3811471 - RNA, 23 nt, Human
acggucagguuuaacauuugccu

SEQ ID NO: 3811472 - RNA, 16 nt, Human
acggugaauggcuuug

SEQ ID NO: 3811473 - RNA, 20 nt, Human
acggugaauggcuuuguaua

SEQ ID NO: 3811474 - RNA, 18 nt, Human
acggugcuccaggcaggc

SEQ ID NO: 3811475 - RNA, 20 nt, Human
acggugggccuugcugggga

SEQ ID NO: 3811476 - RNA, 17 nt, Human
acggugucuuguucugu

SEQ ID NO: 3811477 - RNA, 20 nt, Human
acggugucuuguucugucac

SEQ ID NO: 3811478 - RNA, 16 nt, Human
acgguucaccagccuc

SEQ ID NO: 3811479 - RNA, 21 nt, Human
acgguucaguuucuucugcgc

SEQ ID NO: 3811480 - RNA, 10 nt, Human
acgguuccua

SEQ ID NO: 3811481 - RNA, 14 nt, Human
acgguuuccaggga

SEQ ID NO: 3811482 - RNA, 17 nt, Human
acgguuuccagggaggg

SEQ ID NO: 3811483 - RNA, 17 nt, Human
acgguuugaagccugga

SEQ ID NO: 3811484 - RNA, 12 nt, Human
acguaaagaacu

SEQ ID NO: 3811485 - RNA, 15 nt, Human
acguaaagaacuuuu

SEQ ID NO: 3811486 - RNA, 17 nt, Human
acguaaagcuagaaaug

SEQ ID NO: 3811487 - RNA, 16 nt, Human
acguaaaguacuugua

SEQ ID NO: 3811488 - RNA, 13 nt, Human
acguaagcacugu

SEQ ID NO: 3811489 - RNA, 15 nt, Human
acguaagcacuguuu

SEQ ID NO: 3811490 - RNA, 24 nt, Human
acguacaaguaguucuguauuuga

SEQ ID NO: 3811491 - RNA, 12 nt, Human
acguacacauuu

SEQ ID NO: 3811492 - RNA, 14 nt, Human
acguacacauuuua

SEQ ID NO: 3811493 - RNA, 14 nt, Human
acguacucugguua

SEQ ID NO: 3811494 - RNA, 22 nt, Human
acguauaaaagccuguuuaaga

SEQ ID NO: 3811495 - RNA, 16 nt, Human
acguauugguccagcu

SEQ ID NO: 3811496 - RNA, 19 nt, Human
acucuuucuauuguuucuu

SEQ ID NO: 3811497 - RNA, 17 nt, Human
acucuuucugagugccu

SEQ ID NO: 3811498 - RNA, 21 nt, Human
acucuuucugagugccuucug

SEQ ID NO: 3811499 - RNA, 22 nt, Human
acucuuucugagugccuucugu

SEQ ID NO: 3811500 - RNA, 14 nt, Human
acucuuucuguaua

SEQ ID NO: 3811501 - RNA, 18 nt, Human
acucuuugagaaacaaca

SEQ ID NO: 3811502 - RNA, 22 nt, Human
acucuuugagauagaagaacug

SEQ ID NO: 3811503 - RNA, 14 nt, Human
acucuuuggucguu

SEQ ID NO: 3811504 - RNA, 14 nt, Human
acucuuugguggcu

SEQ ID NO: 3811505 - RNA, 13 nt, Human
acucuuuuuguac

SEQ ID NO: 3811506 - RNA, 16 nt, Human
acucuuuuuguaccug

SEQ ID NO: 3811507 - RNA, 13 nt, Human
acugaaaaaauau

SEQ ID NO: 3811508 - RNA, 14 nt, Human
acugaaaaaauaua

SEQ ID NO: 3811509 - RNA, 18 nt, Human
acugaaaacaucuggaag

SEQ ID NO: 3811510 - RNA, 14 nt, Human
acucauacaucugg

SEQ ID NO: 3811511 - RNA, 18 nt, Human
acucauagacacugaucu

SEQ ID NO: 3811512 - RNA, 18 nt, Human
acucauauaauuauaugu

SEQ ID NO: 3811513 - RNA, 19 nt, Human
acucauauaauuauauguu

SEQ ID NO: 3811514 - RNA, 14 nt, Human
acucaucauaaaau

SEQ ID NO: 3811515 - RNA, 21 nt, Human
acucaucuagguaaauuacag

SEQ ID NO: 3811516 - RNA, 23 nt, Human
acucaucuagguaaauuacaguu

SEQ ID NO: 3811517 - RNA, 19 nt, Human
acucaucuuacuguaccug

SEQ ID NO: 3811518 - RNA, 18 nt, Human
acucaucuuagugccuga

SEQ ID NO: 3811519 - RNA, 19 nt, Human
acucaucuuauaugggaaa

SEQ ID NO: 3811520 - RNA, 16 nt, Human
acucaucuuucccucc

SEQ ID NO: 3811521 - RNA, 21 nt, Human
acucaugaucuugugacauau

SEQ ID NO: 3811522 - RNA, 18 nt, Human
acucauggccuugucuaa

SEQ ID NO: 3811523 - RNA, 22 nt, Human
acucauggugaggcuuaacaau

SEQ ID NO: 3811524 - RNA, 13 nt, Human
acucauguguaug

SEQ ID NO: 3811525 - RNA, 15 nt, Human
acucauguuauuuuu

SEQ ID NO: 3811526 - RNA, 23 nt, Human
acucauuagaauuaccauuuguu

SEQ ID NO: 3811527 - RNA, 13 nt, Human
acucauuagacug

SEQ ID NO: 3811528 - RNA, 13 nt, Human
acucauucaaaag

SEQ ID NO: 3811529 - RNA, 23 nt, Human
acucauucagggauagcacugag

SEQ ID NO: 3811530 - RNA, 14 nt, Human
acucauugaaaugu

SEQ ID NO: 3811531 - RNA, 19 nt, Human
acucauugaaaugucacgu

SEQ ID NO: 3811532 - RNA, 14 nt, Human
acucauugaccuga

SEQ ID NO: 3811533 - RNA, 15 nt, Human
acucauugaccugag

SEQ ID NO: 3811534 - RNA, 16 nt, Human
acucauugaccugagg

SEQ ID NO: 3811535 - RNA, 21 nt, Human
acucauugcugagccucugcu

SEQ ID NO: 3811536 - RNA, 12 nt, Human
acucauuucauc

SEQ ID NO: 3811537 - RNA, 13 nt, Human
acucauuucaucu

SEQ ID NO: 3811538 - RNA, 15 nt, Human
acucauuucaucuca

SEQ ID NO: 3811539 - RNA, 17 nt, Human
acucauuucaucucauu

SEQ ID NO: 3811540 - RNA, 17 nt, Human
acucauuucuaaaagaa

SEQ ID NO: 3811541 - RNA, 21 nt, Human
acucauuucuaaaagaauauu

SEQ ID NO: 3811542 - RNA, 22 nt, Human
acucauuuguuaaaauuaucaa

SEQ ID NO: 3811543 - RNA, 19 nt, Human
acucauuuuaaugauuguu

SEQ ID NO: 3811544 - RNA, 21 nt, Human
acucauuuucuauaacagaua

SEQ ID NO: 3811545 - RNA, 12 nt, Human
acucauuuugcu

SEQ ID NO: 3811546 - RNA, 23 nt, Human
acucauuuuucaugauaaugaac

SEQ ID NO: 3811547 - RNA, 18 nt, Human
acuccaaaacccaugugg

SEQ ID NO: 3811548 - RNA, 13 nt, Human
acuccaaaauguu

SEQ ID NO: 3811549 - RNA, 21 nt, Human
acuccaaaccuccuguuagcu

SEQ ID NO: 3811550 - RNA, 21 nt, Human
acuccaaacugacucuuaaga

SEQ ID NO: 3811551 - RNA, 18 nt, Human
acuccaaagaaauguaag

SEQ ID NO: 3811552 - RNA, 16 nt, Human
acuccaacauccacuc

SEQ ID NO: 3811553 - RNA, 17 nt, Human
acuccaagcccagccca

SEQ ID NO: 3811554 - RNA, 12 nt, Human
acuccacacugc

SEQ ID NO: 3811555 - RNA, 21 nt, Human
acuccacacugcacaauaacu

SEQ ID NO: 3811556 - RNA, 15 nt, Human
acuccacaucugccu

SEQ ID NO: 3811557 - RNA, 14 nt, Human
acuccaccaagccu

SEQ ID NO: 3811558 - RNA, 19 nt, Human
acuccaccagauagcagag

SEQ ID NO: 3811559 - RNA, 13 nt, Human
acuccaccuuccc

SEQ ID NO: 3811560 - RNA, 18 nt, Human
acuccacgauccugccac

SEQ ID NO: 3811561 - RNA, 19 nt, Human
acuccacgauccugccacc

SEQ ID NO: 3811562 - RNA, 15 nt, Human
acuccagaauuuccc

SEQ ID NO: 3811563 - RNA, 13 nt, Human
acuccagaccccu

SEQ ID NO: 3811564 - RNA, 19 nt, Human
acuccagaccccuggcuuu

SEQ ID NO: 3811565 - RNA, 13 nt, Human
acuccagaucugc

SEQ ID NO: 3811566 - RNA, 12 nt, Human
acuccagcccau

SEQ ID NO: 3811567 - RNA, 20 nt, Human
acuccagccugagcaacaga

SEQ ID NO: 3811568 - RNA, 12 nt, Human
acuccagccugg

SEQ ID NO: 3811569 - RNA, 19 nt, Human
acuccagccuggcgacaga

SEQ ID NO: 3811570 - RNA, 13 nt, Human
acuccagccuggg

SEQ ID NO: 3811571 - RNA, 18 nt, Human
acuccagccugggcaaca

SEQ ID NO: 3811572 - RNA, 23 nt, Human
acuccagccugggcaacagagca

SEQ ID NO: 3811573 - RNA, 20 nt, Human
acuccagccugggcgacaga

SEQ ID NO: 3811574 - RNA, 13 nt, Human
acuccaggagagg

SEQ ID NO: 3811575 - RNA, 23 nt, Human
acuccaguagcgagagacggcac

SEQ ID NO: 3811576 - RNA, 19 nt, Human
acuccauagaccuuuucau

SEQ ID NO: 3811577 - RNA, 21 nt, Human
acuccaucucucauccuccag

SEQ ID NO: 3811578 - RNA, 13 nt, Human
acuccaugagcac

SEQ ID NO: 3811579 - RNA, 21 nt, Human
acuccaugcuuagucacugcc

SEQ ID NO: 3811580 - RNA, 12 nt, Human
acuccauucucc

SEQ ID NO: 3811581 - RNA, 13 nt, Human
acucccaaagagc

SEQ ID NO: 3811582 - RNA, 18 nt, Human
acucccaaagagcugccu

SEQ ID NO: 3811583 - RNA, 17 nt, Human
acucccaagaacagcag

SEQ ID NO: 3811584 - RNA, 21 nt, Human
acucccaagacccgagcuggg

SEQ ID NO: 3811585 - RNA, 14 nt, Human
acucccaaguaugg

SEQ ID NO: 3811586 - RNA, 16 nt, Human
acucccacacccaaga

SEQ ID NO: 3811587 - RNA, 20 nt, Human
acucccacccagucucugcu

SEQ ID NO: 3811588 - RNA, 22 nt, Human
acucccacccagucucugcucc

SEQ ID NO: 3811589 - RNA, 16 nt, Human
acucccaccugacaca

SEQ ID NO: 3811590 - RNA, 20 nt, Human
acucccacuucccugacacu

SEQ ID NO: 3811591 - RNA, 20 nt, Human
acucccagcaucgcacucug

SEQ ID NO: 3811592 - RNA, 13 nt, Human
acucccaggcagc

SEQ ID NO: 3811593 - RNA, 15 nt, Human
acucccaguccccag

SEQ ID NO: 3811594 - RNA, 13 nt, Human
acucccaugaagc

SEQ ID NO: 3811595 - RNA, 20 nt, Human
acucccaugaagccuuuuga

SEQ ID NO: 3811596 - RNA, 23 nt, Human
acucccaugagggagaugccaug

SEQ ID NO: 3811597 - RNA, 19 nt, Human
acuccccaggccaggccac

SEQ ID NO: 3811598 - RNA, 13 nt, Human
acuccccugcugg

SEQ ID NO: 3811599 - RNA, 23 nt, Human
acuccccuguuucaaucacuguc

SEQ ID NO: 3811600 - RNA, 15 nt, Human
acuccccuugagcug

SEQ ID NO: 3811601 - RNA, 19 nt, Human
acucccggcacuccaugcu

SEQ ID NO: 3811602 - RNA, 22 nt, Human
acucccguguaggaaccugcac

SEQ ID NO: 3811603 - RNA, 16 nt, Human
acucccuccagcacaa

SEQ ID NO: 3811604 - RNA, 22 nt, Human
acucccuccucaccucuggacu

SEQ ID NO: 3811605 - RNA, 21 nt, Human
acucccucgucgagcuggaug

SEQ ID NO: 3811606 - RNA, 13 nt, Human
acucccucucagg

SEQ ID NO: 3811607 - RNA, 21 nt, Human
acucccucucaggauccaagc

SEQ ID NO: 3811608 - RNA, 14 nt, Human
acucccugcagaug

SEQ ID NO: 3811609 - RNA, 18 nt, Human
acucccugccccccagcc

SEQ ID NO: 3811610 - RNA, 18 nt, Human
acucccuggcucucagaa

SEQ ID NO: 3811611 - RNA, 20 nt, Human
acucccuucuaccugccacu

SEQ ID NO: 3811612 - RNA, 22 nt, Human
acucccuucuaccugccacuca

SEQ ID NO: 3811613 - RNA, 16 nt, Human
acucccuugcuggccc

SEQ ID NO: 3811614 - RNA, 14 nt, Human
acucccuugggcuc

SEQ ID NO: 3811615 - RNA, 22 nt, Human
acucccuugguggcaagagccc

SEQ ID NO: 3811616 - RNA, 13 nt, Human
acucccuuucaac

SEQ ID NO: 3811617 - RNA, 16 nt, Human
acuccgagugaacugg

SEQ ID NO: 3811618 - RNA, 21 nt, Human
acuccgcccccagccuaugag

SEQ ID NO: 3811619 - RNA, 14 nt, Human
acuccgcuggaggu

SEQ ID NO: 3811620 - RNA, 22 nt, Human
acuccgcuggagguggggccug

SEQ ID NO: 3811621 - RNA, 23 nt, Human
acuccggauugcguuccuccccg

SEQ ID NO: 3811622 - RNA, 13 nt, Human
acuccggcccucc

SEQ ID NO: 3811623 - RNA, 19 nt, Human
acuccggcccuccagagcc

SEQ ID NO: 3811624 - RNA, 17 nt, Human
acuccggcugugcuggg

SEQ ID NO: 3811625 - RNA, 22 nt, Human
acuccggguuugagauggacac

SEQ ID NO: 3811626 - RNA, 16 nt, Human
acuccggugugccugc

SEQ ID NO: 3811627 - RNA, 21 nt, Human
acuccggugugccugcagccc

SEQ ID NO: 3811628 - RNA, 20 nt, Human
acuccuacaagauuuagaaa

SEQ ID NO: 3811629 - RNA, 17 nt, Human
acuccuacaccuaacuc

SEQ ID NO: 3811630 - RNA, 18 nt, Human
acuccuacaccuaacuca

SEQ ID NO: 3811631 - RNA, 16 nt, Human
acuccuaccucagccu

SEQ ID NO: 3811632 - RNA, 17 nt, Human
acuccuaccucagccua

SEQ ID NO: 3811633 - RNA, 18 nt, Human
acuccuaggcaggacaug

SEQ ID NO: 3811634 - RNA, 22 nt, Human
acuccuaguagggguaccacug

SEQ ID NO: 3811635 - RNA, 16 nt, Human
acuccuaugaucugag

SEQ ID NO: 3811636 - RNA, 20 nt, Human
acuccucaaaagcaaaugag

SEQ ID NO: 3811637 - RNA, 20 nt, Human
acuccucacacuuacuguaa

SEQ ID NO: 3811638 - RNA, 12 nt, Human
acuccucccagg

SEQ ID NO: 3811639 - RNA, 12 nt, Human
acuccucccucc

SEQ ID NO: 3811640 - RNA, 18 nt, Human
acucugaaauaucccggg

SEQ ID NO: 3811641 - RNA, 14 nt, Human
acucugaaaucuga

SEQ ID NO: 3811642 - RNA, 17 nt, Human
acucugaaaucugaaga

SEQ ID NO: 3811643 - RNA, 16 nt, Human
acucugaaaugaagau

SEQ ID NO: 3811644 - RNA, 14 nt, Human
acucugaagccucu

SEQ ID NO: 3811645 - RNA, 15 nt, Human
acucugaagccucug

SEQ ID NO: 3811646 - RNA, 20 nt, Human
acucugaagggcaucaugca

SEQ ID NO: 3811647 - RNA, 20 nt, Human
acucugaauaagcacuuuuu

SEQ ID NO: 3811648 - RNA, 17 nt, Human
acucugaauuuaucuuu

SEQ ID NO: 3811649 - RNA, 23 nt, Human
acucugacaacagacuucugaaa

SEQ ID NO: 3811650 - RNA, 14 nt, Human
acucugacaagggc

SEQ ID NO: 3811651 - RNA, 21 nt, Human
acucugacaagggcugaccug

SEQ ID NO: 3811652 - RNA, 23 nt, Human
acucugaggcucuuucugggcca

SEQ ID NO: 3811653 - RNA, 16 nt, Human
acucugaguuuaccau

SEQ ID NO: 3811654 - RNA, 21 nt, Human
acucugaguuuaccauuugua

SEQ ID NO: 3811655 - RNA, 23 nt, Human
acucugaugguucuucaccuccu

SEQ ID NO: 3811656 - RNA, 12 nt, Human
acucugauguaa

SEQ ID NO: 3811657 - RNA, 17 nt, Human
acucugcacaugucuug

SEQ ID NO: 3811658 - RNA, 14 nt, Human
acucugcacuacuc

SEQ ID NO: 3811659 - RNA, 24 nt, Human
acucugcagacugcuaguguucug

SEQ ID NO: 3811660 - RNA, 15 nt, Human
acucugcagccucag

SEQ ID NO: 3811661 - RNA, 15 nt, Human
acucugcauccagag

SEQ ID NO: 3811662 - RNA, 14 nt, Human
acucugcauguaga

SEQ ID NO: 3811663 - RNA, 20 nt, Human
acucugcauguagaggcuug

SEQ ID NO: 3811664 - RNA, 14 nt, Human
acucugccagcaaa

SEQ ID NO: 3811665 - RNA, 16 nt, Human
acucugccagcaaaga

SEQ ID NO: 3811666 - RNA, 13 nt, Human
acucugccagcca

SEQ ID NO: 3811667 - RNA, 12 nt, Human
acucugcccccu

SEQ ID NO: 3811668 - RNA, 15 nt, Human
acucugcccccugcu

SEQ ID NO: 3811669 - RNA, 17 nt, Human
acucugcccucuagagc

SEQ ID NO: 3811670 - RNA, 14 nt, Human
acucugccucugcc

SEQ ID NO: 3811671 - RNA, 16 nt, Human
acucugccugcccuuu

SEQ ID NO: 3811672 - RNA, 16 nt, Human
acucugccugcuuaca

SEQ ID NO: 3811673 - RNA, 15 nt, Human
acucugcucugaugc

SEQ ID NO: 3811674 - RNA, 14 nt, Human
acucugcucugccc

SEQ ID NO: 3811675 - RNA, 16 nt, Human
acauguuaaaccaugg

SEQ ID NO: 3811676 - RNA, 17 nt, Human
acauguuacugaccagc

SEQ ID NO: 3811677 - RNA, 21 nt, Human
acauguuacuggauaaauugu

SEQ ID NO: 3811678 - RNA, 22 nt, Human
acauguuacuggauaaauuguu

SEQ ID NO: 3811679 - RNA, 14 nt, Human
acauguuauauauu

SEQ ID NO: 3811680 - RNA, 15 nt, Human
acauguuauauauuu

SEQ ID NO: 3811681 - RNA, 14 nt, Human
acauguuauuugua

SEQ ID NO: 3811682 - RNA, 20 nt, Human
acauguugggaaacuuggcu

SEQ ID NO: 3811683 - RNA, 14 nt, Human
acauguuguaaauu

SEQ ID NO: 3811684 - RNA, 20 nt, Human
acauguuguaagcacugacu

SEQ ID NO: 3811685 - RNA, 13 nt, Human
acauguuuauaaa

SEQ ID NO: 3811686 - RNA, 23 nt, Human
acauguuuccagcauucccaggu

SEQ ID NO: 3811687 - RNA, 11 nt, Human
acauguuuccu

SEQ ID NO: 3811688 - RNA, 11 nt, Human
acauguuuuca

SEQ ID NO: 3811689 - RNA, 12 nt, Human
acauguuuucaa

SEQ ID NO: 3811690 - RNA, 16 nt, Human
acauguuuucaaaugg

SEQ ID NO: 3811691 - RNA, 13 nt, Human
acauguuuugaua

SEQ ID NO: 3811692 - RNA, 15 nt, Human
acauguuuugauaaa

SEQ ID NO: 3811693 - RNA, 17 nt, Human
acauguuuugauaaagu

SEQ ID NO: 3811694 - RNA, 22 nt, Human
acauguuuugauaaaguaguaa

SEQ ID NO: 3811695 - RNA, 19 nt, Human
acauguuuuuauacaaaau

SEQ ID NO: 3811696 - RNA, 19 nt, Human
acauguuuuucuucucccu

SEQ ID NO: 3811697 - RNA, 21 nt, Human
acauguuuuucuucucccuca

SEQ ID NO: 3811698 - RNA, 23 nt, Human
acauuaaaaaaaaucaucauuau

SEQ ID NO: 3811699 - RNA, 15 nt, Human
acauuaaaacaauau

SEQ ID NO: 3811700 - RNA, 12 nt, Human
acauuaaacaca

SEQ ID NO: 3811701 - RNA, 11 nt, Human
acauuaaagaa

SEQ ID NO: 3811702 - RNA, 12 nt, Human
acauuaaagcag

SEQ ID NO: 3811703 - RNA, 14 nt, Human
acauuaaagcaguc

SEQ ID NO: 3811704 - RNA, 21 nt, Human
acauuaaaggcauaaaugacu

SEQ ID NO: 3811705 - RNA, 13 nt, Human
acauuaaagguac

SEQ ID NO: 3811706 - RNA, 17 nt, Human
acauuaaaucuaugaag

SEQ ID NO: 3811707 - RNA, 21 nt, Human
acauuaaaugacucuucccuc

SEQ ID NO: 3811708 - RNA, 13 nt, Human
acauuaaaugucu

SEQ ID NO: 3811709 - RNA, 14 nt, Human
acauuaaaugucuu

SEQ ID NO: 3811710 - RNA, 14 nt, Human
acauuaacaaauaa

SEQ ID NO: 3811711 - RNA, 15 nt, Human
acauuaacaaauaaa

SEQ ID NO: 3811712 - RNA, 13 nt, Human
acauuaacucauu

SEQ ID NO: 3811713 - RNA, 15 nt, Human
acauuaacucauuag

SEQ ID NO: 3811714 - RNA, 22 nt, Human
acauuaacucauuagacuggaa

SEQ ID NO: 3811715 - RNA, 16 nt, Human
acauuaagaaaaucau

SEQ ID NO: 3811716 - RNA, 16 nt, Human
acauuaagcaucacaa

SEQ ID NO: 3811717 - RNA, 19 nt, Human
acauuaauagcagccuuuc

SEQ ID NO: 3811718 - RNA, 22 nt, Human
acauuaauccacauguuucaga

SEQ ID NO: 3811719 - RNA, 20 nt, Human
acauuaauggucuaaaaaua

SEQ ID NO: 3811720 - RNA, 21 nt, Human
acauuaauguuaauucagcac

SEQ ID NO: 3811721 - RNA, 17 nt, Human
acauuaauguugauuuc

SEQ ID NO: 3811722 - RNA, 18 nt, Human
acauuaauguugauuucu

SEQ ID NO: 3811723 - RNA, 19 nt, Human
acauuacucugccucugua

SEQ ID NO: 3811724 - RNA, 20 nt, Human
acauuacugaaaacuucauu

SEQ ID NO: 3811725 - RNA, 13 nt, Human
acauuagaacuuc

SEQ ID NO: 3811726 - RNA, 21 nt, Human
acauuagaagacaauugacaa

SEQ ID NO: 3811727 - RNA, 22 nt, Human
acauuagcaguuugcuuuguau

SEQ ID NO: 3811728 - RNA, 19 nt, Human
acauuaggcauugagacuu

SEQ ID NO: 3811729 - RNA, 16 nt, Human
acauuagguugugaau

SEQ ID NO: 3811730 - RNA, 14 nt, Human
acauuauaaacgcu

SEQ ID NO: 3811731 - RNA, 20 nt, Human
acauuauaaaugucucuuua

SEQ ID NO: 3811732 - RNA, 18 nt, Human
acauuauauugcaaugaa

SEQ ID NO: 3811733 - RNA, 18 nt, Human
acauuaucgggagcagug

SEQ ID NO: 3811734 - RNA, 22 nt, Human
acauuaucgggagcagugucuu

SEQ ID NO: 3811735 - RNA, 19 nt, Human
acauuaugugguuuuagau

SEQ ID NO: 3811736 - RNA, 21 nt, Human
acauuaugugguuuuagauuu

SEQ ID NO: 3811737 - RNA, 23 nt, Human
acauuaugugugcauguguguau

SEQ ID NO: 3811738 - RNA, 15 nt, Human
acauuauugcuuauu

SEQ ID NO: 3811739 - RNA, 14 nt, Human
acauuauuuauaug

SEQ ID NO: 3811740 - RNA, 16 nt, Human
acauuauuuauucagc

SEQ ID NO: 3811741 - RNA, 23 nt, Human
acauucaagauuaaacugaguga

SEQ ID NO: 3811742 - RNA, 23 nt, Human
acauucaauaagcaucaaacucu

SEQ ID NO: 3811743 - RNA, 13 nt, Human
acauucaccugcc

SEQ ID NO: 3811744 - RNA, 20 nt, Human
acauucaccugccccaacuc

SEQ ID NO: 3811745 - RNA, 22 nt, Human
acauucagcugagguucauuac

SEQ ID NO: 3811746 - RNA, 22 nt, Human
acauuccaacucguauagcaug

SEQ ID NO: 3811747 - RNA, 11 nt, Human
acauuccaaga

SEQ ID NO: 3811748 - RNA, 13 nt, Human
acauuccauccuu

SEQ ID NO: 3811749 - RNA, 19 nt, Human
acauucccaagguuacuua

SEQ ID NO: 3811750 - RNA, 14 nt, Human
acauuccuaaaaug

SEQ ID NO: 3811751 - RNA, 17 nt, Human
acauuccucaugaaugu

SEQ ID NO: 3811752 - RNA, 15 nt, Human
acauuccugaacagg

SEQ ID NO: 3811753 - RNA, 18 nt, Human
acauuccuugccugcaca

SEQ ID NO: 3811754 - RNA, 14 nt, Human
acauuccuugcuga

SEQ ID NO: 3811755 - RNA, 16 nt, Human
acauucgaucucauuc

SEQ ID NO: 3811756 - RNA, 17 nt, Human
acauucggcucccugga

SEQ ID NO: 3811757 - RNA, 20 nt, Human
acauucggcucccuggagcc

SEQ ID NO: 3811758 - RNA, 22 nt, Human
acauucuagaugcaagucucuu

SEQ ID NO: 3811759 - RNA, 18 nt, Human
acauucuauuucaacuuc

SEQ ID NO: 3811760 - RNA, 14 nt, Human
acauucucaguuuu

SEQ ID NO: 3811761 - RNA, 14 nt, Human
acauucucuaauaa

SEQ ID NO: 3811762 - RNA, 11 nt, Human
acauucugaau

SEQ ID NO: 3811763 - RNA, 18 nt, Human
acauucugaaugcuucua

SEQ ID NO: 3811764 - RNA, 20 nt, Human
acauucugacaucuuaguau

SEQ ID NO: 3811765 - RNA, 16 nt, Human
acauucugauuuggaa

SEQ ID NO: 3811766 - RNA, 19 nt, Human
acauucugauuuggaaaaa

SEQ ID NO: 3811767 - RNA, 12 nt, Human
acauucugcuuu

SEQ ID NO: 3811768 - RNA, 17 nt, Human
acauucuggucucgucu

SEQ ID NO: 3811769 - RNA, 18 nt, Human
acauucuggucucgucuu

SEQ ID NO: 3811770 - RNA, 22 nt, Human
acauucuggucucgucuuccgu

SEQ ID NO: 3811771 - RNA, 23 nt, Human
acauucugucgccuuagcauguu

SEQ ID NO: 3811772 - RNA, 14 nt, Human
acauucuuauaaau

SEQ ID NO: 3811773 - RNA, 22 nt, Human
acauucuuauaaauaugaagcu

SEQ ID NO: 3811774 - RNA, 21 nt, Human
acauucuuuuaacuucuuucu

SEQ ID NO: 3811775 - RNA, 23 nt, Human
acauucuuuuugcucuaaaauau

SEQ ID NO: 3811776 - RNA, 17 nt, Human
acauugaaaucuaggaa

SEQ ID NO: 3811777 - RNA, 20 nt, Human
acauugaaaucuaggaaaau

SEQ ID NO: 3811778 - RNA, 19 nt, Human
acauugaaguaaugaauuu

SEQ ID NO: 3811779 - RNA, 20 nt, Human
acauugaaguaaugaauuuu

SEQ ID NO: 3811780 - RNA, 14 nt, Human
acauugaauuagaa

SEQ ID NO: 3811781 - RNA, 17 nt, Human
acauugacgauuccuuc

SEQ ID NO: 3811782 - RNA, 20 nt, Human
acauugacgauuccuucucu

SEQ ID NO: 3811783 - RNA, 17 nt, Human
acauugacuauuuuugu

SEQ ID NO: 3811784 - RNA, 20 nt, Human
acauugagcugauauaaauu

SEQ ID NO: 3811785 - RNA, 14 nt, Human
acucuuuuuagggc

SEQ ID NO: 3811786 - RNA, 20 nt, Human
acucuuuuuagggccaggca

SEQ ID NO: 3811787 - RNA, 20 nt, Human
acucuuuuuguaccugguga

SEQ ID NO: 3811788 - RNA, 18 nt, Human
acucuuuuuguuuuuugu

SEQ ID NO: 3811789 - RNA, 16 nt, Human
acugaaaacaucugga

SEQ ID NO: 3811790 - RNA, 17 nt, Human
acugaaaacaucuggaa

SEQ ID NO: 3811791 - RNA, 15 nt, Human
acugaaaaccucucc

SEQ ID NO: 3811792 - RNA, 17 nt, Human
acugaaaaccucuccuc

SEQ ID NO: 3811793 - RNA, 14 nt, Human
acugaaaagaagga

SEQ ID NO: 3811794 - RNA, 15 nt, Human
acugaaaagagagca

SEQ ID NO: 3811795 - RNA, 23 nt, Human
acugaaaagagagcagagaauau

SEQ ID NO: 3811796 - RNA, 15 nt, Human
acugaaaaucuaaua

SEQ ID NO: 3811797 - RNA, 16 nt, Human
acugaaaaucuaauau

SEQ ID NO: 3811798 - RNA, 23 nt, Human
acugaaaaucuaauauuaaaaau

SEQ ID NO: 3811799 - RNA, 17 nt, Human
acugaaaauuauuuaaa

SEQ ID NO: 3811800 - RNA, 13 nt, Human
acugaaacagauu

SEQ ID NO: 3811801 - RNA, 20 nt, Human
acugaaagccuuagggaagc

SEQ ID NO: 3811802 - RNA, 13 nt, Human
acugaaagugguu

SEQ ID NO: 3811803 - RNA, 14 nt, Human
acugaaaucuguca

SEQ ID NO: 3811804 - RNA, 18 nt, Human
acugaaaugccuuacuuu

SEQ ID NO: 3811805 - RNA, 22 nt, Human
acugaaaugccuuacuuuguau

SEQ ID NO: 3811806 - RNA, 20 nt, Human
acugaacaccauugaaggcu

SEQ ID NO: 3811807 - RNA, 21 nt, Human
acugaacaccauugaaggcuu

SEQ ID NO: 3811808 - RNA, 15 nt, Human
acugaacaguaacau

SEQ ID NO: 3811809 - RNA, 19 nt, Human
acugaacauguacacuggu

SEQ ID NO: 3811810 - RNA, 13 nt, Human
acugaacauucca

SEQ ID NO: 3811811 - RNA, 19 nt, Human
acugaaccacuuguagauu

SEQ ID NO: 3811812 - RNA, 20 nt, Human
acugaaccacuuguagauuu

SEQ ID NO: 3811813 - RNA, 18 nt, Human
acugaaccggcuuuacca

SEQ ID NO: 3811814 - RNA, 22 nt, Human
acugaacuguguguaauuguuc

SEQ ID NO: 3811815 - RNA, 21 nt, Human
acugaacuuugcugagccugu

SEQ ID NO: 3811816 - RNA, 22 nt, Human
acugaagaagcaccaaucauga

SEQ ID NO: 3811817 - RNA, 12 nt, Human
acugaagagaca

SEQ ID NO: 3811818 - RNA, 16 nt, Human
acugaagauagaagaa

SEQ ID NO: 3811819 - RNA, 13 nt, Human
acugaagcagccu

SEQ ID NO: 3811820 - RNA, 14 nt, Human
acugaagcagccuc

SEQ ID NO: 3811821 - RNA, 12 nt, Human
acugaagccugc

SEQ ID NO: 3811822 - RNA, 13 nt, Human
acugaagcuuuuu

SEQ ID NO: 3811823 - RNA, 14 nt, Human
acugaagcuuuuua

SEQ ID NO: 3811824 - RNA, 20 nt, Human
acugaaggaaaaacacaagc

SEQ ID NO: 3811825 - RNA, 23 nt, Human
acugaaggcagcauguauaguug

SEQ ID NO: 3811826 - RNA, 13 nt, Human
acugaaggccacu

SEQ ID NO: 3811827 - RNA, 14 nt, Human
acugaaggcuuuca

SEQ ID NO: 3811828 - RNA, 15 nt, Human
acugaagucaguucu

SEQ ID NO: 3811829 - RNA, 23 nt, Human
acugaagucuuacuacagaaaug

SEQ ID NO: 3811830 - RNA, 17 nt, Human
acugaagugcuuagugu

SEQ ID NO: 3811831 - RNA, 21 nt, Human
acugaaguucugccucugaug

SEQ ID NO: 3811832 - RNA, 15 nt, Human
acugaaguuucacau

SEQ ID NO: 3811833 - RNA, 12 nt, Human
acugaaguuuga

SEQ ID NO: 3811834 - RNA, 15 nt, Human
acugaaguuugauaa

SEQ ID NO: 3811835 - RNA, 19 nt, Human
acugaaguuugauaaauag

SEQ ID NO: 3811836 - RNA, 15 nt, Human
acugcucuccuccac

SEQ ID NO: 3811837 - RNA, 19 nt, Human
acugcucuugggcaauauu

SEQ ID NO: 3811838 - RNA, 22 nt, Human
acugcucuugggcaauauucuc

SEQ ID NO: 3811839 - RNA, 15 nt, Human
acugcucuuguuucu

SEQ ID NO: 3811840 - RNA, 18 nt, Human
acugcugagauacauaca

SEQ ID NO: 3811841 - RNA, 20 nt, Human
acugcugagauacauacaga

SEQ ID NO: 3811842 - RNA, 22 nt, Human
acugcugagauacauacagaau

SEQ ID NO: 3811843 - RNA, 19 nt, Human
acugcugccccaaaggaag

SEQ ID NO: 3811844 - RNA, 22 nt, Human
acugcuggagaggccccagccg

SEQ ID NO: 3811845 - RNA, 14 nt, Human
acugcuggcugccu

SEQ ID NO: 3811846 - RNA, 15 nt, Human
acugcuggcugccuu

SEQ ID NO: 3811847 - RNA, 13 nt, Human
acugcugggacug

SEQ ID NO: 3811848 - RNA, 19 nt, Human
acugcugggacuggccagg

SEQ ID NO: 3811849 - RNA, 23 nt, Human
acugcugugaacaagugaacaca

SEQ ID NO: 3811850 - RNA, 23 nt, Human
acugcugugaacccuggggccug

SEQ ID NO: 3811851 - RNA, 15 nt, Human
acugcuguggccagg

SEQ ID NO: 3811852 - RNA, 19 nt, Human
acugcuguggccaggaggu

SEQ ID NO: 3811853 - RNA, 13 nt, Human
acugcuuaauuca

SEQ ID NO: 3811854 - RNA, 20 nt, Human
acugcuuaccuacuuucuuc

SEQ ID NO: 3811855 - RNA, 21 nt, Human
acugcuuaccuacuuucuuca

SEQ ID NO: 3811856 - RNA, 17 nt, Human
acugcuuacuuaugcca

SEQ ID NO: 3811857 - RNA, 22 nt, Human
acugcuucaaucucaauugcuu

SEQ ID NO: 3811858 - RNA, 21 nt, Human
acugcuuccagugaggcucug

SEQ ID NO: 3811859 - RNA, 22 nt, Human
acugcuuccagugaggcucugc

SEQ ID NO: 3811860 - RNA, 21 nt, Human
acugcuucccuuacuuugcug

SEQ ID NO: 3811861 - RNA, 21 nt, Human
acugcuuccuauaauuuugau

SEQ ID NO: 3811862 - RNA, 16 nt, Human
acugcuucuaccaacu

SEQ ID NO: 3811863 - RNA, 20 nt, Human
acugcuucuaccaacuggaa

SEQ ID NO: 3811864 - RNA, 14 nt, Human
acugcuugaggaaa

SEQ ID NO: 3811865 - RNA, 16 nt, Human
acugcuuguguuuuua

SEQ ID NO: 3811866 - RNA, 16 nt, Human
acugcuuucuguucca

SEQ ID NO: 3811867 - RNA, 14 nt, Human
acugcuuugagaaa

SEQ ID NO: 3811868 - RNA, 20 nt, Human
acugcuuuuaacuucugaua

SEQ ID NO: 3811869 - RNA, 14 nt, Human
acugcuuuuggccu

SEQ ID NO: 3811870 - RNA, 15 nt, Human
acugcuuuuggucug

SEQ ID NO: 3811871 - RNA, 18 nt, Human
acugcuuuuuuuuuucca

SEQ ID NO: 3811872 - RNA, 21 nt, Human
acugcuuuuuuuuuuccagca

SEQ ID NO: 3811873 - RNA, 20 nt, Human
acuggaaaacagaacacuua

SEQ ID NO: 3811874 - RNA, 21 nt, Human
acuggaaaggggagagccugc

SEQ ID NO: 3811875 - RNA, 22 nt, Human
acuggaaaggggagagccugcu

SEQ ID NO: 3811876 - RNA, 19 nt, Human
acuggaacacucuauaaca

SEQ ID NO: 3811877 - RNA, 14 nt, Human
acuggaacccuuuu

SEQ ID NO: 3811878 - RNA, 22 nt, Human
acuggaacccuuuuaaaguuga

SEQ ID NO: 3811879 - RNA, 12 nt, Human
acuggaacucuc

SEQ ID NO: 3811880 - RNA, 19 nt, Human
acuggaagcauguaggaga

SEQ ID NO: 3811881 - RNA, 21 nt, Human
acuggaagcauguaggagaau

SEQ ID NO: 3811882 - RNA, 21 nt, Human
acuggaaguucauaccuaagu

SEQ ID NO: 3811883 - RNA, 13 nt, Human
acuggaaguuuug

SEQ ID NO: 3811884 - RNA, 16 nt, Human
acuggaaguuuugcau

SEQ ID NO: 3811885 - RNA, 17 nt, Human
acuggaaguuuugcauu

SEQ ID NO: 3811886 - RNA, 18 nt, Human
acuggaauuuuuauuaug

SEQ ID NO: 3811887 - RNA, 18 nt, Human
acuggacauaacauuuuc

SEQ ID NO: 3811888 - RNA, 15 nt, Human
acuggacccuguugc

SEQ ID NO: 3811889 - RNA, 19 nt, Human
acuggacuccggcccuccu

SEQ ID NO: 3811890 - RNA, 18 nt, Human
acuggagacaaugcagau

SEQ ID NO: 3811891 - RNA, 14 nt, Human
acuggagagcaaca

SEQ ID NO: 3811892 - RNA, 13 nt, Human
acuggagcaccag

SEQ ID NO: 3811893 - RNA, 18 nt, Human
acuggagcaucugacuca

SEQ ID NO: 3811894 - RNA, 14 nt, Human
acuggagcccagga

SEQ ID NO: 3811895 - RNA, 16 nt, Human
acuggagcccaggagu

SEQ ID NO: 3811896 - RNA, 11 nt, Human
acuggagcccc

SEQ ID NO: 3811897 - RNA, 17 nt, Human
acuggaggagagaagaa

SEQ ID NO: 3811898 - RNA, 20 nt, Human
acuggaggagagaagaauga

SEQ ID NO: 3811899 - RNA, 13 nt, Human
acuggaggccagg

SEQ ID NO: 3811900 - RNA, 21 nt, Human
acuggaggccccuggagccag

SEQ ID NO: 3811901 - RNA, 21 nt, Human
acuggaggggacgcugguaga

SEQ ID NO: 3811902 - RNA, 20 nt, Human
acuggaggucacauucagga

SEQ ID NO: 3811903 - RNA, 19 nt, Human
acuggagguugaagccaag

SEQ ID NO: 3811904 - RNA, 17 nt, Human
acuggaguggagcauug

SEQ ID NO: 3811905 - RNA, 16 nt, Human
acuggagugugcgugg

SEQ ID NO: 3811906 - RNA, 17 nt, Human
acuggagugugcguggu

SEQ ID NO: 3811907 - RNA, 17 nt, Human
acuggaguuacauuaau

SEQ ID NO: 3811908 - RNA, 15 nt, Human
acuggaguucuaugc

SEQ ID NO: 3811909 - RNA, 14 nt, Human
acuggauaaauugu

SEQ ID NO: 3811910 - RNA, 18 nt, Human
acuggauacugcccgggg

SEQ ID NO: 3811911 - RNA, 18 nt, Human
acuggaucucuuaagaca

SEQ ID NO: 3811912 - RNA, 15 nt, Human
acuggauuauucagg

SEQ ID NO: 3811913 - RNA, 13 nt, Human
acuggauuguacu

SEQ ID NO: 3811914 - RNA, 13 nt, Human
acuggcaaacuuc

SEQ ID NO: 3811915 - RNA, 23 nt, Human
acuggcaaugguaguuucugugg

SEQ ID NO: 3811916 - RNA, 14 nt, Human
acuggcacagaggu

SEQ ID NO: 3811917 - RNA, 16 nt, Human
acuggcacugaauuaa

SEQ ID NO: 3811918 - RNA, 14 nt, Human
acuggcagacugug

SEQ ID NO: 3811919 - RNA, 18 nt, Human
acuggcagggauaacaaa

SEQ ID NO: 3811920 - RNA, 16 nt, Human
acuggcauaguuucau

SEQ ID NO: 3811921 - RNA, 17 nt, Human
acuggcauaguuucaua

SEQ ID NO: 3811922 - RNA, 21 nt, Human
acuggcauggauauaguuuua

SEQ ID NO: 3811923 - RNA, 23 nt, Human
acuggcauggauauaguuuuacu

SEQ ID NO: 3811924 - RNA, 17 nt, Human
acuggcauugucccugu

SEQ ID NO: 3811925 - RNA, 23 nt, Human
acuggcauuuuauagacacccug

SEQ ID NO: 3811926 - RNA, 14 nt, Human
acuggccaagcuga

SEQ ID NO: 3811927 - RNA, 18 nt, Human
acuggccaagcugaggug

SEQ ID NO: 3811928 - RNA, 16 nt, Human
acuggccacaguuguu

SEQ ID NO: 3811929 - RNA, 12 nt, Human
accaguugccuu

SEQ ID NO: 3811930 - RNA, 14 nt, Human
accaguugcugcuu

SEQ ID NO: 3811931 - RNA, 15 nt, Human
accaguugggagcac

SEQ ID NO: 3811932 - RNA, 20 nt, Human
accaguugggagcacuggag

SEQ ID NO: 3811933 - RNA, 21 nt, Human
accaguugggagcacuggagu

SEQ ID NO: 3811934 - RNA, 19 nt, Human
accaguuuaaccugaugca

SEQ ID NO: 3811935 - RNA, 24 nt, Human
accaguuuuuggauaaagaauacu

SEQ ID NO: 3811936 - RNA, 14 nt, Human
accauaaauucaac

SEQ ID NO: 3811937 - RNA, 16 nt, Human
accauaagcuacugcc

SEQ ID NO: 3811938 - RNA, 22 nt, Human
accauaagguuucguuucugua

SEQ ID NO: 3811939 - RNA, 22 nt, Human
accauaauguacugauuucagu

SEQ ID NO: 3811940 - RNA, 15 nt, Human
accauaauguuacau

SEQ ID NO: 3811941 - RNA, 15 nt, Human
accauaccuuccuuc

SEQ ID NO: 3811942 - RNA, 17 nt, Human
accauaccuuccuuccc

SEQ ID NO: 3811943 - RNA, 17 nt, Human
accauacucauuucuaa

SEQ ID NO: 3811944 - RNA, 19 nt, Human
accauacucauuucuaaaa

SEQ ID NO: 3811945 - RNA, 18 nt, Human
accauagcgcugcucuua

SEQ ID NO: 3811946 - RNA, 19 nt, Human
accauaguguucauugaua

SEQ ID NO: 3811947 - RNA, 23 nt, Human
accauauacuguucuucauuuua

SEQ ID NO: 3811948 - RNA, 13 nt, Human
accauaugauacu

SEQ ID NO: 3811949 - RNA, 19 nt, Human
accauauucagugcugugg

SEQ ID NO: 3811950 - RNA, 22 nt, Human
accauauugugcuucacaguag

SEQ ID NO: 3811951 - RNA, 17 nt, Human
accaucaaguugugcca

SEQ ID NO: 3811952 - RNA, 13 nt, Human
accaucaauccug

SEQ ID NO: 3811953 - RNA, 13 nt, Human
accaucacugagu

SEQ ID NO: 3811954 - RNA, 23 nt, Human
accaucagaaacacccucacacu

SEQ ID NO: 3811955 - RNA, 15 nt, Human
accaucagggacagg

SEQ ID NO: 3811956 - RNA, 12 nt, Human
accaucauccua

SEQ ID NO: 3811957 - RNA, 16 nt, Human
accaucaugucuggcu

SEQ ID NO: 3811958 - RNA, 15 nt, Human
accaucauugaaauc

SEQ ID NO: 3811959 - RNA, 22 nt, Human
accauccacucuacccucccac

SEQ ID NO: 3811960 - RNA, 15 nt, Human
accaucccuuuuuga

SEQ ID NO: 3811961 - RNA, 18 nt, Human
accaucccuuuuugaagu

SEQ ID NO: 3811962 - RNA, 17 nt, Human
accauccgccagggccc

SEQ ID NO: 3811963 - RNA, 16 nt, Human
accauccuauuuaacu

SEQ ID NO: 3811964 - RNA, 17 nt, Human
accauccugcagccucc

SEQ ID NO: 3811965 - RNA, 12 nt, Human
accauccuggcu

SEQ ID NO: 3811966 - RNA, 22 nt, Human
accauccuggcuaacaugguga

SEQ ID NO: 3811967 - RNA, 14 nt, Human
accauccuggcugc

SEQ ID NO: 3811968 - RNA, 17 nt, Human
accaucgcuggccccuu

SEQ ID NO: 3811969 - RNA, 19 nt, Human
accaucgucuucuuggcca

SEQ ID NO: 3811970 - RNA, 13 nt, Human
accaucuaauagc

SEQ ID NO: 3811971 - RNA, 16 nt, Human
accaucucaggccacc

SEQ ID NO: 3811972 - RNA, 21 nt, Human
accaucucaggccaccugccc

SEQ ID NO: 3811973 - RNA, 15 nt, Human
accaucucuccaacu

SEQ ID NO: 3811974 - RNA, 15 nt, Human
accaucugcugucuu

SEQ ID NO: 3811975 - RNA, 14 nt, Human
accaucugcuuuua

SEQ ID NO: 3811976 - RNA, 13 nt, Human
accaucuggccug

SEQ ID NO: 3811977 - RNA, 17 nt, Human
accaucuggccuggccu

SEQ ID NO: 3811978 - RNA, 14 nt, Human
accaugaaacaaag

SEQ ID NO: 3811979 - RNA, 19 nt, Human
accaugaaagacuucucua

SEQ ID NO: 3811980 - RNA, 18 nt, Human
accaugaacagaaaacau

SEQ ID NO: 3811981 - RNA, 15 nt, Human
accaugaagacagga

SEQ ID NO: 3811982 - RNA, 18 nt, Human
accaugagaagagggccu

SEQ ID NO: 3811983 - RNA, 18 nt, Human
accaugagcaauucuccu

SEQ ID NO: 3811984 - RNA, 19 nt, Human
accaugaguggcauggcca

SEQ ID NO: 3811985 - RNA, 18 nt, Human
accaugauggccaggcug

SEQ ID NO: 3811986 - RNA, 14 nt, Human
accaugauuccuuu

SEQ ID NO: 3811987 - RNA, 15 nt, Human
accaugauuccuuua

SEQ ID NO: 3811988 - RNA, 14 nt, Human
accaugcagagcgc

SEQ ID NO: 3811989 - RNA, 18 nt, Human
accaugcauuuuaccauc

SEQ ID NO: 3811990 - RNA, 19 nt, Human
accaugccaggcuaauuuu

SEQ ID NO: 3811991 - RNA, 20 nt, Human
accaugcccggcuaauuuuu

SEQ ID NO: 3811992 - RNA, 20 nt, Human
accaugccucacuaauuuuu

SEQ ID NO: 3811993 - RNA, 22 nt, Human
accaugcgacacugggaggcca

SEQ ID NO: 3811994 - RNA, 19 nt, Human
accaugcucaucugcuggu

SEQ ID NO: 3811995 - RNA, 18 nt, Human
accaugcugcuggggaag

SEQ ID NO: 3811996 - RNA, 22 nt, Human
accaugcugcuggggaagacag

SEQ ID NO: 3811997 - RNA, 23 nt, Human
accaugcugcuggggaagacagu

SEQ ID NO: 3811998 - RNA, 20 nt, Human
accaugcugucuggcacagc

SEQ ID NO: 3811999 - RNA, 21 nt, Human
accaugcugucuggcacagcc

SEQ ID NO: 3812000 - RNA, 23 nt, Human
accauggacacuacacccagcaa

SEQ ID NO: 3812001 - RNA, 24 nt, Human
accauggacacuacacccagcaau

SEQ ID NO: 3812002 - RNA, 16 nt, Human
accauggaguggcagc

SEQ ID NO: 3812003 - RNA, 21 nt, Human
accauggaguggcagcccagc

SEQ ID NO: 3812004 - RNA, 17 nt, Human
accaugggauaaaugcc

SEQ ID NO: 3812005 - RNA, 18 nt, Human
accaugggauaaaugcca

SEQ ID NO: 3812006 - RNA, 21 nt, Human
accaugguuaagaguccaaga

SEQ ID NO: 3812007 - RNA, 15 nt, Human
accauguaaaacaaa

SEQ ID NO: 3812008 - RNA, 20 nt, Human
accauguaaaacaaaaaaca

SEQ ID NO: 3812009 - RNA, 18 nt, Human
accaugucagcaaaaagc

SEQ ID NO: 3812010 - RNA, 19 nt, Human
accaugucagcaaaaagca

SEQ ID NO: 3812011 - RNA, 21 nt, Human
accaugucagcaaaaagcaaa

SEQ ID NO: 3812012 - RNA, 12 nt, Human
accaugucauuu

SEQ ID NO: 3812013 - RNA, 18 nt, Human
accaugucauuucagaag

SEQ ID NO: 3812014 - RNA, 16 nt, Human
accaugucuuucucuc

SEQ ID NO: 3812015 - RNA, 19 nt, Human
accaugugucacuugugcu

SEQ ID NO: 3812016 - RNA, 21 nt, Human
accaugugucacuugugcuuu

SEQ ID NO: 3812017 - RNA, 18 nt, Human
accauguuggccaggcug

SEQ ID NO: 3812018 - RNA, 23 nt, Human
accauguuggccaggcuugucuc

SEQ ID NO: 3812019 - RNA, 20 nt, Human
accauguuugagcucagacc

SEQ ID NO: 3812020 - RNA, 16 nt, Human
accauuaaaacugcuu

SEQ ID NO: 3812021 - RNA, 17 nt, Human
accauuaaaacugcuuu

SEQ ID NO: 3812022 - RNA, 13 nt, Human
accauuaaaguca

SEQ ID NO: 3812023 - RNA, 19 nt, Human
accauuauaaccuuaauuu

SEQ ID NO: 3812024 - RNA, 18 nt, Human
accauuaugaagaagaga

SEQ ID NO: 3812025 - RNA, 17 nt, Human
accauuauuaucaagua

SEQ ID NO: 3812026 - RNA, 21 nt, Human
accauucagugauuacuguca

SEQ ID NO: 3812027 - RNA, 21 nt, Human
accauucugacucgguuucuc

SEQ ID NO: 3812028 - RNA, 13 nt, Human
accauugaaggcu

SEQ ID NO: 3812029 - RNA, 22 nt, Human
accauugacacauccgccuuuu

SEQ ID NO: 3812030 - RNA, 22 nt, Human
accauugagaccgugaagauac

SEQ ID NO: 3812031 - RNA, 18 nt, Human
accauugauuuaauguaa

SEQ ID NO: 3812032 - RNA, 15 nt, Human
accauugcuucacua

SEQ ID NO: 3812033 - RNA, 15 nt, Human
accauugucucagag

SEQ ID NO: 3812034 - RNA, 13 nt, Human
accauugugcauu

SEQ ID NO: 3812035 - RNA, 14 nt, Human
accauuuaaaaaca

SEQ ID NO: 3812036 - RNA, 16 nt, Human
accauuuaaaaacagg

SEQ ID NO: 3812037 - RNA, 23 nt, Human
accauuuaaaaacaggcagcuca

SEQ ID NO: 3812038 - RNA, 11 nt, Human
accauuuauaa

SEQ ID NO: 3812039 - RNA, 21 nt, Human
accauuuauacaaauuagaaa

SEQ ID NO: 3812040 - RNA, 23 nt, Human
accauuuauacaaauuagaaaau

SEQ ID NO: 3812041 - RNA, 13 nt, Human
accauuuaucuug

SEQ ID NO: 3812042 - RNA, 15 nt, Human
acuugacccugagcu

SEQ ID NO: 3812043 - RNA, 17 nt, Human
acuugacuuuuaaggcu

SEQ ID NO: 3812044 - RNA, 21 nt, Human
acuugagaacuuuccauuuug

SEQ ID NO: 3812045 - RNA, 21 nt, Human
acuugagaccuaaucucugua

SEQ ID NO: 3812046 - RNA, 19 nt, Human
acuugagcccagagugaac

SEQ ID NO: 3812047 - RNA, 23 nt, Human
acuugagcuuuaaaaaucauugu

SEQ ID NO: 3812048 - RNA, 11 nt, Human
acuugaggaca

SEQ ID NO: 3812049 - RNA, 13 nt, Human
acuugaggccuga

SEQ ID NO: 3812050 - RNA, 19 nt, Human
acuugagggcccagagcag

SEQ ID NO: 3812051 - RNA, 20 nt, Human
acuugagggcccagagcagg

SEQ ID NO: 3812052 - RNA, 17 nt, Human
acuugaggguaauaaac

SEQ ID NO: 3812053 - RNA, 18 nt, Human
acuugaggguaauaaacu

SEQ ID NO: 3812054 - RNA, 22 nt, Human
acuugagguggccuccuugcuu

SEQ ID NO: 3812055 - RNA, 22 nt, Human
acuugaguggagguuuauaguu

SEQ ID NO: 3812056 - RNA, 22 nt, Human
acuugaguguaauguuuguuac

SEQ ID NO: 3812057 - RNA, 21 nt, Human
acuugaguuuuauuuauuuua

SEQ ID NO: 3812058 - RNA, 18 nt, Human
acuugauccauuucuaau

SEQ ID NO: 3812059 - RNA, 19 nt, Human
acuugauccauuucuaauu

SEQ ID NO: 3812060 - RNA, 13 nt, Human
acuugaugcaugu

SEQ ID NO: 3812061 - RNA, 22 nt, Human
acuugauggcuaacuuacaaag

SEQ ID NO: 3812062 - RNA, 16 nt, Human
acuugauggcugcgaa

SEQ ID NO: 3812063 - RNA, 23 nt, Human
acuugauggucagacacaaacaa

SEQ ID NO: 3812064 - RNA, 16 nt, Human
acuugaugugccauuu

SEQ ID NO: 3812065 - RNA, 18 nt, Human
acuugaugugccauuuua

SEQ ID NO: 3812066 - RNA, 20 nt, Human
acuugaugugccauuuuaaa

SEQ ID NO: 3812067 - RNA, 14 nt, Human
acuugauuaagauu

SEQ ID NO: 3812068 - RNA, 16 nt, Human
acuugauuaagauuuu

SEQ ID NO: 3812069 - RNA, 21 nt, Human
acuugauuaagauuuuacaaa

SEQ ID NO: 3812070 - RNA, 13 nt, Human
acuugcaaaauca

SEQ ID NO: 3812071 - RNA, 16 nt, Human
acuugcaaaaucaguu

SEQ ID NO: 3812072 - RNA, 21 nt, Human
acuugcaaccgucuguuaugc

SEQ ID NO: 3812073 - RNA, 21 nt, Human
acccaaggaaaacugcaugga

SEQ ID NO: 3812074 - RNA, 13 nt, Human
acccaaggacuga

SEQ ID NO: 3812075 - RNA, 16 nt, Human
acccaaggagcacagg

SEQ ID NO: 3812076 - RNA, 22 nt, Human
acccaaggagcacaggucccac

SEQ ID NO: 3812077 - RNA, 23 nt, Human
acccaaggggauuuuuaugucug

SEQ ID NO: 3812078 - RNA, 18 nt, Human
acccaagguaccauccua

SEQ ID NO: 3812079 - RNA, 14 nt, Human
acccacaaaaaugu

SEQ ID NO: 3812080 - RNA, 15 nt, Human
acccacaagaaauga

SEQ ID NO: 3812081 - RNA, 16 nt, Human
acccacaccucugcca

SEQ ID NO: 3812082 - RNA, 17 nt, Human
acccacaccucugccag

SEQ ID NO: 3812083 - RNA, 22 nt, Human
acccacacucagauccuccuca

SEQ ID NO: 3812084 - RNA, 19 nt, Human
acccacacugcaacaggaa

SEQ ID NO: 3812085 - RNA, 13 nt, Human
acccacagaaaga

SEQ ID NO: 3812086 - RNA, 13 nt, Human
acccacagccucu

SEQ ID NO: 3812087 - RNA, 18 nt, Human
acccacaggcccacagua

SEQ ID NO: 3812088 - RNA, 23 nt, Human
acccacaugccauuuguacugac

SEQ ID NO: 3812089 - RNA, 18 nt, Human
acccaccaacccucaggg

SEQ ID NO: 3812090 - RNA, 19 nt, Human
acccaccaacccucagggc

SEQ ID NO: 3812091 - RNA, 16 nt, Human
acccaccaguugaauu

SEQ ID NO: 3812092 - RNA, 17 nt, Human
acccaccccaccugcag

SEQ ID NO: 3812093 - RNA, 15 nt, Human
acccacccuccuuuc

SEQ ID NO: 3812094 - RNA, 15 nt, Human
acccaccgcccuugc

SEQ ID NO: 3812095 - RNA, 18 nt, Human
acccaccgggccacuccu

SEQ ID NO: 3812096 - RNA, 17 nt, Human
acccaccguccgcccug

SEQ ID NO: 3812097 - RNA, 13 nt, Human
acccaccuagaac

SEQ ID NO: 3812098 - RNA, 14 nt, Human
acccaccucacccc

SEQ ID NO: 3812099 - RNA, 13 nt, Human
acccaccugagcu

SEQ ID NO: 3812100 - RNA, 11 nt, Human
acccaccugcu

SEQ ID NO: 3812101 - RNA, 21 nt, Human
acccaccugcuagugugaauu

SEQ ID NO: 3812102 - RNA, 23 nt, Human
acccaccuuguuggagccugcag

SEQ ID NO: 3812103 - RNA, 17 nt, Human
acccacgauuuucucca

SEQ ID NO: 3812104 - RNA, 18 nt, Human
acccacgauuuucuccag

SEQ ID NO: 3812105 - RNA, 18 nt, Human
acccacuauccuucguga

SEQ ID NO: 3812106 - RNA, 15 nt, Human
acccacucaucagaa

SEQ ID NO: 3812107 - RNA, 14 nt, Human
acccacugcucugg

SEQ ID NO: 3812108 - RNA, 22 nt, Human
acccacugguuccuucuuccug

SEQ ID NO: 3812109 - RNA, 17 nt, Human
acccacuucucaucaca

SEQ ID NO: 3812110 - RNA, 20 nt, Human
acccacuucucaucacacac

SEQ ID NO: 3812111 - RNA, 13 nt, Human
acccacuucugca

SEQ ID NO: 3812112 - RNA, 22 nt, Human
acccacuugucacugacacaaa

SEQ ID NO: 3812113 - RNA, 23 nt, Human
acccacuugucacugacacaaag

SEQ ID NO: 3812114 - RNA, 19 nt, Human
acccagaaugagacaucca

SEQ ID NO: 3812115 - RNA, 20 nt, Human
acccagaaugagacauccag

SEQ ID NO: 3812116 - RNA, 15 nt, Human
acccagacagcuccc

SEQ ID NO: 3812117 - RNA, 20 nt, Human
acccagacauaaaggaaaag

SEQ ID NO: 3812118 - RNA, 14 nt, Human
acccagacccagug

SEQ ID NO: 3812119 - RNA, 21 nt, Human
acccagacggcuccacuagga

SEQ ID NO: 3812120 - RNA, 18 nt, Human
acccagagaauauauaca

SEQ ID NO: 3812121 - RNA, 19 nt, Human
acccagaguuuuuauguag

SEQ ID NO: 3812122 - RNA, 20 nt, Human
acccagauuuugcuguauau

SEQ ID NO: 3812123 - RNA, 14 nt, Human
acccagcaauagag

SEQ ID NO: 3812124 - RNA, 13 nt, Human
acccagccaggcc

SEQ ID NO: 3812125 - RNA, 14 nt, Human
acccagccaggccc

SEQ ID NO: 3812126 - RNA, 18 nt, Human
acccagccaggcccagcc

SEQ ID NO: 3812127 - RNA, 18 nt, Human
acccagccaucugcccag

SEQ ID NO: 3812128 - RNA, 21 nt, Human
acccagccaucugcccagggg

SEQ ID NO: 3812129 - RNA, 15 nt, Human
acccagcccacuucu

SEQ ID NO: 3812130 - RNA, 18 nt, Human
acccagcccacuucugcc

SEQ ID NO: 3812131 - RNA, 14 nt, Human
acccagcccaucuu

SEQ ID NO: 3812132 - RNA, 17 nt, Human
acccagccccuugagaa

SEQ ID NO: 3812133 - RNA, 20 nt, Human
acccagccccuugagaaacc

SEQ ID NO: 3812134 - RNA, 21 nt, Human
acccagccccuugagaaaccu

SEQ ID NO: 3812135 - RNA, 15 nt, Human
acccagcccucaucc

SEQ ID NO: 3812136 - RNA, 19 nt, Human
acccagcccuggucucagc

SEQ ID NO: 3812137 - RNA, 12 nt, Human
acccagccucag

SEQ ID NO: 3812138 - RNA, 15 nt, Human
acccagccuguuuua

SEQ ID NO: 3812139 - RNA, 13 nt, Human
acccagcucuggu

SEQ ID NO: 3812140 - RNA, 14 nt, Human
acccaggacaggau

SEQ ID NO: 3812141 - RNA, 17 nt, Human
acccaggacaggaucca

SEQ ID NO: 3812142 - RNA, 15 nt, Human
acccaggacuccucc

SEQ ID NO: 3812143 - RNA, 23 nt, Human
acccaggacuuauuuaaacucug

SEQ ID NO: 3812144 - RNA, 22 nt, Human
acccaggagcauccaccuccuu

SEQ ID NO: 3812145 - RNA, 23 nt, Human
acccaggagcauccaccuccuuc

SEQ ID NO: 3812146 - RNA, 13 nt, Human
acccaggagcccc

SEQ ID NO: 3812147 - RNA, 15 nt, Human
acccaggagccccga

SEQ ID NO: 3812148 - RNA, 23 nt, Human
acccaggaggcagagguugcagu

SEQ ID NO: 3812149 - RNA, 14 nt, Human
acccaggaucccca

SEQ ID NO: 3812150 - RNA, 15 nt, Human
acccaggcaccugca

SEQ ID NO: 3812151 - RNA, 17 nt, Human
acccaggccuauguuga

SEQ ID NO: 3812152 - RNA, 16 nt, Human
acccaggcuccgcccu

SEQ ID NO: 3812153 - RNA, 20 nt, Human
acccaggcuccgcccuuagu

SEQ ID NO: 3812154 - RNA, 23 nt, Human
acccaggcuccgcccuuaguccc

SEQ ID NO: 3812155 - RNA, 18 nt, Human
acccaggcuggagugcag

SEQ ID NO: 3812156 - RNA, 22 nt, Human
acccaggcugggcaaggaggcc

SEQ ID NO: 3812157 - RNA, 22 nt, Human
acccagggaacagccacucccc

SEQ ID NO: 3812158 - RNA, 12 nt, Human
acccagggccug

SEQ ID NO: 3812159 - RNA, 15 nt, Human
acccagggccugcag

SEQ ID NO: 3812160 - RNA, 18 nt, Human
acccagggcucugcccca

SEQ ID NO: 3812161 - RNA, 20 nt, Human
acccagggcucugccccagu

SEQ ID NO: 3812162 - RNA, 15 nt, Human
acccaggggcagccc

SEQ ID NO: 3812163 - RNA, 15 nt, Human
acccaggguggagug

SEQ ID NO: 3812164 - RNA, 21 nt, Human
acccaggguucccgcggggcu

SEQ ID NO: 3812165 - RNA, 14 nt, Human
acccagguccccuc

SEQ ID NO: 3812166 - RNA, 11 nt, Human
acccaggugcu

SEQ ID NO: 3812167 - RNA, 23 nt, Human
acccaggugcuaggaacacuccu

SEQ ID NO: 3812168 - RNA, 17 nt, Human
acccagguuaagaaaau

SEQ ID NO: 3812169 - RNA, 20 nt, Human
acccagguuuugcacucuug

SEQ ID NO: 3812170 - RNA, 17 nt, Human
acccaguaacucaucug

SEQ ID NO: 3812171 - RNA, 18 nt, Human
acccaguaacucaucugu

SEQ ID NO: 3812172 - RNA, 18 nt, Human
acccagucaccucugucu

SEQ ID NO: 3812173 - RNA, 16 nt, Human
acccaguccacaaaau

SEQ ID NO: 3812174 - RNA, 14 nt, Human
acccagucccuggg

SEQ ID NO: 3812175 - RNA, 15 nt, Human
acccagucccugggg

SEQ ID NO: 3812176 - RNA, 13 nt, Human
acccagucgcccu

SEQ ID NO: 3812177 - RNA, 14 nt, Human
acccagugagcacu

SEQ ID NO: 3812178 - RNA, 17 nt, Human
acccagugcagaaugua

SEQ ID NO: 3812179 - RNA, 15 nt, Human
acccagugcccccac

SEQ ID NO: 3812180 - RNA, 14 nt, Human
acccagugcccucu

SEQ ID NO: 3812181 - RNA, 15 nt, Human
acccagugcccucuc

SEQ ID NO: 3812182 - RNA, 14 nt, Human
acccagugcugaau

SEQ ID NO: 3812183 - RNA, 14 nt, Human
acccaguggcaggg

SEQ ID NO: 3812184 - RNA, 17 nt, Human
acccaguggcagggcac

SEQ ID NO: 3812185 - RNA, 19 nt, Human
acccaguggcagggcacag

SEQ ID NO: 3812186 - RNA, 22 nt, Human
acccaguggcagggcacagggc

SEQ ID NO: 3812187 - RNA, 22 nt, Human
acccaguuucuaaacuggagac

SEQ ID NO: 3812188 - RNA, 23 nt, Human
acccaguuucuaaacuggagacu

SEQ ID NO: 3812189 - RNA, 17 nt, Human
acccauagaucuucuga

SEQ ID NO: 3812190 - RNA, 14 nt, Human
acccauaggaaauc

SEQ ID NO: 3812191 - RNA, 14 nt, Human
acccauaggcccac

SEQ ID NO: 3812192 - RNA, 17 nt, Human
acccauaggcccacaca

SEQ ID NO: 3812193 - RNA, 18 nt, Human
acccauaggcccacacac

SEQ ID NO: 3812194 - RNA, 19 nt, Human
acccauaggcccacacaca

SEQ ID NO: 3812195 - RNA, 20 nt, Human
acccauauccccucuccccc

SEQ ID NO: 3812196 - RNA, 16 nt, Human
acccauauuguaaaac

SEQ ID NO: 3812197 - RNA, 14 nt, Human
acccaucagaagga

SEQ ID NO: 3812198 - RNA, 19 nt, Human
acccaucagaaggagaagg

SEQ ID NO: 3812199 - RNA, 20 nt, Human
acccauccaccguccccucc

SEQ ID NO: 3812200 - RNA, 19 nt, Human
acccaucgguguccauuua

SEQ ID NO: 3812201 - RNA, 13 nt, Human
acuuuacccauuu

SEQ ID NO: 3812202 - RNA, 15 nt, Human
acuuuaccucucugu

SEQ ID NO: 3812203 - RNA, 22 nt, Human
acuuuaccucucugucaugugc

SEQ ID NO: 3812204 - RNA, 18 nt, Human
acuuuaccuuuuuuauac

SEQ ID NO: 3812205 - RNA, 15 nt, Human
acuuuacgcccaucu

SEQ ID NO: 3812206 - RNA, 15 nt, Human
acuuuacuaagauga

SEQ ID NO: 3812207 - RNA, 18 nt, Human
acuuuagaaagcugacau

SEQ ID NO: 3812208 - RNA, 15 nt, Human
acuuuagaaugagag

SEQ ID NO: 3812209 - RNA, 19 nt, Human
acuuuagaguagcaugaga

SEQ ID NO: 3812210 - RNA, 21 nt, Human
acuuuagaguagcaugagaga

SEQ ID NO: 3812211 - RNA, 14 nt, Human
acuuuagaugcuga

SEQ ID NO: 3812212 - RNA, 22 nt, Human
acuuuagcugcauccuccaaga

SEQ ID NO: 3812213 - RNA, 17 nt, Human
acuuuaggcuuucagcu

SEQ ID NO: 3812214 - RNA, 20 nt, Human
acuuuagguuuuuuuaauga

SEQ ID NO: 3812215 - RNA, 12 nt, Human
acuuuauacauu

SEQ ID NO: 3812216 - RNA, 22 nt, Human
acuuuauacauuaguaaauguc

SEQ ID NO: 3812217 - RNA, 19 nt, Human
acuuuauacccagaaaguu

SEQ ID NO: 3812218 - RNA, 20 nt, Human
acuuguuuuuguaaagaaaa

SEQ ID NO: 3812219 - RNA, 12 nt, Human
acuuuaaagcgu

SEQ ID NO: 3812220 - RNA, 16 nt, Human
acuuuaacauaagcua

SEQ ID NO: 3812221 - RNA, 12 nt, Human
acuuuaagagag

SEQ ID NO: 3812222 - RNA, 14 nt, Human
acuuuaagagagaa

SEQ ID NO: 3812223 - RNA, 16 nt, Human
acuuuaagagagaaau

SEQ ID NO: 3812224 - RNA, 23 nt, Human
acuuuaagagagaaaucugaaaa

SEQ ID NO: 3812225 - RNA, 14 nt, Human
acuuuaagaggaca

SEQ ID NO: 3812226 - RNA, 19 nt, Human
acuuuaagcagcucuugcu

SEQ ID NO: 3812227 - RNA, 23 nt, Human
acuuuaagcagcucuugcuaauc

SEQ ID NO: 3812228 - RNA, 13 nt, Human
acuuuaauaugua

SEQ ID NO: 3812229 - RNA, 22 nt, Human
acuuuaauauguauuuuaugua

SEQ ID NO: 3812230 - RNA, 20 nt, Human
acuuuaauuaccaaccuguu

SEQ ID NO: 3812231 - RNA, 22 nt, Human
acuuuaauuuauguaacuugaa

SEQ ID NO: 3812232 - RNA, 15 nt, Human
acuuuacacucggcu

SEQ ID NO: 3812233 - RNA, 14 nt, Human
acuuuacagaaaug

SEQ ID NO: 3812234 - RNA, 19 nt, Human
acuuuacagaaauggacug

SEQ ID NO: 3812235 - RNA, 15 nt, Human
acuuuaccaccccca

SEQ ID NO: 3812236 - RNA, 12 nt, Human
acuuuaccuuuu

SEQ ID NO: 3812237 - RNA, 22 nt, Human
acuuuaccuuuuuuauacauaa

SEQ ID NO: 3812238 - RNA, 23 nt, Human
acuuuaccuuuuuuauacauaaa

SEQ ID NO: 3812239 - RNA, 19 nt, Human
acuuuacugccugaauaaa

SEQ ID NO: 3812240 - RNA, 20 nt, Human
acuuuagaagugcauuucug

SEQ ID NO: 3812241 - RNA, 17 nt, Human
acuuuagaauaugccuu

SEQ ID NO: 3812242 - RNA, 13 nt, Human
acuuuagaugcug

SEQ ID NO: 3812243 - RNA, 20 nt, Human
acuuuagcagaaucaaaaug

SEQ ID NO: 3812244 - RNA, 18 nt, Human
acuuuaggcuuucagcuu

SEQ ID NO: 3812245 - RNA, 23 nt, Human
acuuuagggcuguaaaaugcaug

SEQ ID NO: 3812246 - RNA, 22 nt, Human
acuuuaggguaaaaauugccau

SEQ ID NO: 3812247 - RNA, 16 nt, Human
acuuuagucugcaaaa

SEQ ID NO: 3812248 - RNA, 17 nt, Human
acuuuagugcuacagaa

SEQ ID NO: 3812249 - RNA, 16 nt, Human
acuuuauaacuaacau

SEQ ID NO: 3812250 - RNA, 22 nt, Human
acuuuauaagucauuguauguu

SEQ ID NO: 3812251 - RNA, 21 nt, Human
acccuccuguaaaugguguac

SEQ ID NO: 3812252 - RNA, 13 nt, Human
acccuccugucuu

SEQ ID NO: 3812253 - RNA, 11 nt, Human
acccuccuucc

SEQ ID NO: 3812254 - RNA, 13 nt, Human
acccuccuuccca

SEQ ID NO: 3812255 - RNA, 21 nt, Human
acccucgaagcgcgccacucg

SEQ ID NO: 3812256 - RNA, 14 nt, Human
acccucgaggcgga

SEQ ID NO: 3812257 - RNA, 18 nt, Human
acccucgaggcggaucuu

SEQ ID NO: 3812258 - RNA, 19 nt, Human
acccucgaggcggaucuuu

SEQ ID NO: 3812259 - RNA, 13 nt, Human
acccucgccggac

SEQ ID NO: 3812260 - RNA, 12 nt, Human
acccucgcuggc

SEQ ID NO: 3812261 - RNA, 15 nt, Human
acccucgcuggcccc

SEQ ID NO: 3812262 - RNA, 20 nt, Human
acccucgcuggcccccacug

SEQ ID NO: 3812263 - RNA, 13 nt, Human
acccucgggccca

SEQ ID NO: 3812264 - RNA, 14 nt, Human
acccucgggcccac

SEQ ID NO: 3812265 - RNA, 17 nt, Human
acccucgggcccaccug

SEQ ID NO: 3812266 - RNA, 18 nt, Human
acccucgggcccaccugg

SEQ ID NO: 3812267 - RNA, 19 nt, Human
acccucgggcccaccuggc

SEQ ID NO: 3812268 - RNA, 21 nt, Human
acccucgggcccaccuggcca

SEQ ID NO: 3812269 - RNA, 22 nt, Human
acccucgggcccaccuggccac

SEQ ID NO: 3812270 - RNA, 20 nt, Human
acccucggggauguguccug

SEQ ID NO: 3812271 - RNA, 22 nt, Human
acccucguggacaccugcccug

SEQ ID NO: 3812272 - RNA, 15 nt, Human
acccucuaaccucgc

SEQ ID NO: 3812273 - RNA, 15 nt, Human
acccucucagcucca

SEQ ID NO: 3812274 - RNA, 14 nt, Human
acccucuccacccc

SEQ ID NO: 3812275 - RNA, 14 nt, Human
acccucucccagga

SEQ ID NO: 3812276 - RNA, 19 nt, Human
acccucugaaugguccagg

SEQ ID NO: 3812277 - RNA, 23 nt, Human
acccucuggagggguguggcucc

SEQ ID NO: 3812278 - RNA, 19 nt, Human
acccucugggaaccuccca

SEQ ID NO: 3812279 - RNA, 22 nt, Human
acccucugggaaccucccagag

SEQ ID NO: 3812280 - RNA, 12 nt, Human
acccucuguacc

SEQ ID NO: 3812281 - RNA, 20 nt, Human
acccucuguuccuucccugu

SEQ ID NO: 3812282 - RNA, 15 nt, Human
acccucuuccuacug

SEQ ID NO: 3812283 - RNA, 16 nt, Human
acccucuuccuacugg

SEQ ID NO: 3812284 - RNA, 16 nt, Human
acccucuuccugugau

SEQ ID NO: 3812285 - RNA, 19 nt, Human
acccucuuccugugaucca

SEQ ID NO: 3812286 - RNA, 15 nt, Human
acccucuuugcugca

SEQ ID NO: 3812287 - RNA, 14 nt, Human
acccugaaagcccu

SEQ ID NO: 3812288 - RNA, 16 nt, Human
acccugaaagcccuga

SEQ ID NO: 3812289 - RNA, 18 nt, Human
acccugaaagcccugagc

SEQ ID NO: 3812290 - RNA, 16 nt, Human
acccugaccuggcccc

SEQ ID NO: 3812291 - RNA, 17 nt, Human
acccugagccccuuccu

SEQ ID NO: 3812292 - RNA, 22 nt, Human
acccugagcugaccagccguga

SEQ ID NO: 3812293 - RNA, 13 nt, Human
acccugaggaguc

SEQ ID NO: 3812294 - RNA, 14 nt, Human
acccugaggagucu

SEQ ID NO: 3812295 - RNA, 15 nt, Human
acccugaggcccaga

SEQ ID NO: 3812296 - RNA, 17 nt, Human
acccugaggcccagagg

SEQ ID NO: 3812297 - RNA, 21 nt, Human
acccugaggcccagagggccu

SEQ ID NO: 3812298 - RNA, 11 nt, Human
acccugagggc

SEQ ID NO: 3812299 - RNA, 20 nt, Human
acccugaggucagggagugc

SEQ ID NO: 3812300 - RNA, 20 nt, Human
acccugauuuaggagaagcc

SEQ ID NO: 3812301 - RNA, 23 nt, Human
acccugauuuaggagaagccagg

SEQ ID NO: 3812302 - RNA, 19 nt, Human
acccugcaaacagaacagg

SEQ ID NO: 3812303 - RNA, 17 nt, Human
acccugcaaggcccaca

SEQ ID NO: 3812304 - RNA, 23 nt, Human
acccugcaaggcccacaggaggc

SEQ ID NO: 3812305 - RNA, 22 nt, Human
acccugcauggcugagcugccc

SEQ ID NO: 3812306 - RNA, 22 nt, Human
acccugccaggcacaggcaggg

SEQ ID NO: 3812307 - RNA, 23 nt, Human
acccugccauggaacuguuuccu

SEQ ID NO: 3812308 - RNA, 10 nt, Human
acccugcccc

SEQ ID NO: 3812309 - RNA, 15 nt, Human
acccugccccugccc

SEQ ID NO: 3812310 - RNA, 11 nt, Human
acccugcccug

SEQ ID NO: 3812311 - RNA, 15 nt, Human
acccugcccuguggg

SEQ ID NO: 3812312 - RNA, 17 nt, Human
acccugcccugugggcc

SEQ ID NO: 3812313 - RNA, 20 nt, Human
acccugcccuugacaucugg

SEQ ID NO: 3812314 - RNA, 11 nt, Human
acccugccucc

SEQ ID NO: 3812315 - RNA, 23 nt, Human
acccugccucccuugacuuugcu

SEQ ID NO: 3812316 - RNA, 14 nt, Human
acccugccuuaucu

SEQ ID NO: 3812317 - RNA, 22 nt, Human
acccugcgcccaguccuuccac

SEQ ID NO: 3812318 - RNA, 15 nt, Human
acccugcguggggac

SEQ ID NO: 3812319 - RNA, 16 nt, Human
acccugcguggggaca

SEQ ID NO: 3812320 - RNA, 14 nt, Human
acccugcugagucu

SEQ ID NO: 3812321 - RNA, 14 nt, Human
acccugcugccuuc

SEQ ID NO: 3812322 - RNA, 19 nt, Human
acccugcugcuggugcaca

SEQ ID NO: 3812323 - RNA, 17 nt, Human
acccugcuuggcccagg

SEQ ID NO: 3812324 - RNA, 18 nt, Human
acccugcuuggcccaggg

SEQ ID NO: 3812325 - RNA, 19 nt, Human
acccugcuuuagagcuagg

SEQ ID NO: 3812326 - RNA, 23 nt, Human
acccuggaaauggacugguuuga

SEQ ID NO: 3812327 - RNA, 17 nt, Human
acccuggaccagugguc

SEQ ID NO: 3812328 - RNA, 13 nt, Human
acccuggagccca

SEQ ID NO: 3812329 - RNA, 15 nt, Human
acccuggccccucuc

SEQ ID NO: 3812330 - RNA, 22 nt, Human
acccuggccgaguccaagcugg

SEQ ID NO: 3812331 - RNA, 12 nt, Human
acccugggaagg

SEQ ID NO: 3812332 - RNA, 14 nt, Human
acccugggagacag

SEQ ID NO: 3812333 - RNA, 15 nt, Human
acccugggcccuggg

SEQ ID NO: 3812334 - RNA, 17 nt, Human
acccugggcccugggcu

SEQ ID NO: 3812335 - RNA, 22 nt, Human
acccugggccuggcagcucagc

SEQ ID NO: 3812336 - RNA, 19 nt, Human
acccugggcucugggagca

SEQ ID NO: 3812337 - RNA, 19 nt, Human
acccugggcucugugggcu

SEQ ID NO: 3812338 - RNA, 18 nt, Human
acccuggggccuggaccu

SEQ ID NO: 3812339 - RNA, 21 nt, Human
acccuggggcuggcuuuucug

SEQ ID NO: 3812340 - RNA, 16 nt, Human
acccugggggcacagg

SEQ ID NO: 3812341 - RNA, 20 nt, Human
acccugggugggcucugugc

SEQ ID NO: 3812342 - RNA, 20 nt, Human
acccuggguguccccgcugc

SEQ ID NO: 3812343 - RNA, 19 nt, Human
acccuggugguugcuguuu

SEQ ID NO: 3812344 - RNA, 23 nt, Human
acccuguaaaauggagguggaaa

SEQ ID NO: 3812345 - RNA, 19 nt, Human
acccuguacauauguaaac

SEQ ID NO: 3812346 - RNA, 15 nt, Human
acccuguauauagcc

SEQ ID NO: 3812347 - RNA, 15 nt, Human
acccugucaaacauu

SEQ ID NO: 3812348 - RNA, 19 nt, Human
acccuguccaaacugccua

SEQ ID NO: 3812349 - RNA, 19 nt, Human
acccugucccccagcucug

SEQ ID NO: 3812350 - RNA, 11 nt, Human
acccugucucu

SEQ ID NO: 3812351 - RNA, 21 nt, Human
acccugucucuuaaagaaaaa

SEQ ID NO: 3812352 - RNA, 23 nt, Human
acccugucuguagagggcccugg

SEQ ID NO: 3812353 - RNA, 16 nt, Human
acccugugauggggcc

SEQ ID NO: 3812354 - RNA, 19 nt, Human
acccugugauggggcccug

SEQ ID NO: 3812355 - RNA, 14 nt, Human
acccugugcuggug

SEQ ID NO: 3812356 - RNA, 15 nt, Human
acccuguggcccugg

SEQ ID NO: 3812357 - RNA, 13 nt, Human
acccuguuccugc

SEQ ID NO: 3812358 - RNA, 14 nt, Human
acccuguuccugcu

SEQ ID NO: 3812359 - RNA, 16 nt, Human
acccuguuccugcugc

SEQ ID NO: 3812360 - RNA, 17 nt, Human
acccuguuccugcugcu

SEQ ID NO: 3812361 - RNA, 14 nt, Human
acccuguugcuaag

SEQ ID NO: 3812362 - RNA, 15 nt, Human
acccuguugcuaagc

SEQ ID NO: 3812363 - RNA, 17 nt, Human
acuuugggaggccaagg

SEQ ID NO: 3812364 - RNA, 19 nt, Human
acuuugggauucuuuccau

SEQ ID NO: 3812365 - RNA, 22 nt, Human
acuuugguaccagauaacuuuu

SEQ ID NO: 3812366 - RNA, 23 nt, Human
acuuugguagcugggaaagcaua

SEQ ID NO: 3812367 - RNA, 22 nt, Human
acuuuggugcgggcacaauaaa

SEQ ID NO: 3812368 - RNA, 18 nt, Human
acuuugguuucugucugu

SEQ ID NO: 3812369 - RNA, 13 nt, Human
acuuuguaaauag

SEQ ID NO: 3812370 - RNA, 14 nt, Human
acuuuguaaauucu

SEQ ID NO: 3812371 - RNA, 16 nt, Human
acuuuguaaauucuga

SEQ ID NO: 3812372 - RNA, 19 nt, Human
acuuuguaaauucugauuu

SEQ ID NO: 3812373 - RNA, 23 nt, Human
acuuuguaaauucugauuucuuu

SEQ ID NO: 3812374 - RNA, 17 nt, Human
acuuuguacauuuggga

SEQ ID NO: 3812375 - RNA, 12 nt, Human
acuuuguagugu

SEQ ID NO: 3812376 - RNA, 14 nt, Human
acuuuguauacaag

SEQ ID NO: 3812377 - RNA, 14 nt, Human
acuuuguauacuuu

SEQ ID NO: 3812378 - RNA, 21 nt, Human
acuuuguauacuuuaaauaau

SEQ ID NO: 3812379 - RNA, 14 nt, Human
acuuuguaugauau

SEQ ID NO: 3812380 - RNA, 15 nt, Human
acuuuguaugauauu

SEQ ID NO: 3812381 - RNA, 16 nt, Human
acuuuguaugauauuc

SEQ ID NO: 3812382 - RNA, 14 nt, Human
acuuuguauuuuga

SEQ ID NO: 3812383 - RNA, 18 nt, Human
acuuuguggaccaauuau

SEQ ID NO: 3812384 - RNA, 21 nt, Human
acuuuguggaccaauuauuga

SEQ ID NO: 3812385 - RNA, 21 nt, Human
acuuuguggaugucuuccuug

SEQ ID NO: 3812386 - RNA, 16 nt, Human
acuuuguguucaccuu

SEQ ID NO: 3812387 - RNA, 18 nt, Human
acuuuguguucaccuugu

SEQ ID NO: 3812388 - RNA, 22 nt, Human
acuuuguuaggccaaagacaaa

SEQ ID NO: 3812389 - RNA, 21 nt, Human
acuuuguuaguuucuccaagc

SEQ ID NO: 3812390 - RNA, 17 nt, Human
acuuuguucuggcucuu

SEQ ID NO: 3812391 - RNA, 23 nt, Human
acuuuguucuggcucuuccaggc

SEQ ID NO: 3812392 - RNA, 19 nt, Human
acuuuguucuuuaggagau

SEQ ID NO: 3812393 - RNA, 20 nt, Human
acuuuguugcaagaugugaa

SEQ ID NO: 3812394 - RNA, 14 nt, Human
acuuuguuuuauuu

SEQ ID NO: 3812395 - RNA, 15 nt, Human
acuuuuaaacaguga

SEQ ID NO: 3812396 - RNA, 14 nt, Human
acuuuuaaacugug

SEQ ID NO: 3812397 - RNA, 20 nt, Human
acuuuuaaccaaacaauuau

SEQ ID NO: 3812398 - RNA, 13 nt, Human
acuuuuaagacuu

SEQ ID NO: 3812399 - RNA, 20 nt, Human
acuuuuaaggauaaaucaua

SEQ ID NO: 3812400 - RNA, 13 nt, Human
acuuuuaauucau

SEQ ID NO: 3812401 - RNA, 21 nt, Human
acuuuuacaaguaacaaaaau

SEQ ID NO: 3812402 - RNA, 15 nt, Human
acuuuuacucugccu

SEQ ID NO: 3812403 - RNA, 21 nt, Human
acuuuuacucugccuacagaa

SEQ ID NO: 3812404 - RNA, 22 nt, Human
acuuuuagaugugguuaauuuu

SEQ ID NO: 3812405 - RNA, 15 nt, Human
acuuuuauaaacuuu

SEQ ID NO: 3812406 - RNA, 21 nt, Human
acuuuuauaaacuuuaccuuu

SEQ ID NO: 3812407 - RNA, 14 nt, Human
acuuuuauaaagca

SEQ ID NO: 3812408 - RNA, 23 nt, Human
acuuuuauacucuuucuguauau

SEQ ID NO: 3812409 - RNA, 23 nt, Human
acuuuuaugauacuugaaaauua

SEQ ID NO: 3812410 - RNA, 19 nt, Human
acccuuugugugcucucca

SEQ ID NO: 3812411 - RNA, 17 nt, Human
acccuuuguuucuuguu

SEQ ID NO: 3812412 - RNA, 11 nt, Human
acccuuuucau

SEQ ID NO: 3812413 - RNA, 17 nt, Human
acccuuuuccuuugugg

SEQ ID NO: 3812414 - RNA, 23 nt, Human
acccuuuuggcccccgagcuggg

SEQ ID NO: 3812415 - RNA, 19 nt, Human
acccuuuuggguuucugcc

SEQ ID NO: 3812416 - RNA, 14 nt, Human
acccuuuugucugc

SEQ ID NO: 3812417 - RNA, 19 nt, Human
accgaaaaacuaaaaauaa

SEQ ID NO: 3812418 - RNA, 21 nt, Human
accgaaaacguggcugcuuca

SEQ ID NO: 3812419 - RNA, 17 nt, Human
accgaaacagcgcuggg

SEQ ID NO: 3812420 - RNA, 18 nt, Human
accgaagcccagaggguc

SEQ ID NO: 3812421 - RNA, 12 nt, Human
accgaauaaaug

SEQ ID NO: 3812422 - RNA, 15 nt, Human
accgaauaaauguuu

SEQ ID NO: 3812423 - RNA, 18 nt, Human
accgacgcgucuccuguu

SEQ ID NO: 3812424 - RNA, 22 nt, Human
accgacggccagccgcugcgcu

SEQ ID NO: 3812425 - RNA, 18 nt, Human
accgacguugccaucaaa

SEQ ID NO: 3812426 - RNA, 22 nt, Human
accgacuagacacacaaagcag

SEQ ID NO: 3812427 - RNA, 18 nt, Human
accgagcgcuuucuggaa

SEQ ID NO: 3812428 - RNA, 20 nt, Human
accgagcgcuuucuggaaaa

SEQ ID NO: 3812429 - RNA, 23 nt, Human
accgaggagggagagucucccag

SEQ ID NO: 3812430 - RNA, 17 nt, Human
accgaggcuggagcugg

SEQ ID NO: 3812431 - RNA, 18 nt, Human
accgaggcuggagcuggc

SEQ ID NO: 3812432 - RNA, 17 nt, Human
accgaggggcucaggaa

SEQ ID NO: 3812433 - RNA, 19 nt, Human
accgagggggcugcuccca

SEQ ID NO: 3812434 - RNA, 20 nt, Human
accgagggggcugcucccac

SEQ ID NO: 3812435 - RNA, 13 nt, Human
accgaugcuccag

SEQ ID NO: 3812436 - RNA, 13 nt, Human
accgaugcuuuac

SEQ ID NO: 3812437 - RNA, 22 nt, Human
accgaugguggguggggcugca

SEQ ID NO: 3812438 - RNA, 16 nt, Human
accgauucuuuggagu

SEQ ID NO: 3812439 - RNA, 17 nt, Human
accgcacaugcacacac

SEQ ID NO: 3812440 - RNA, 20 nt, Human
accgcagaagccuccccagc

SEQ ID NO: 3812441 - RNA, 23 nt, Human
accgcagaagccuccccagcuca

SEQ ID NO: 3812442 - RNA, 12 nt, Human
accgcagaagga

SEQ ID NO: 3812443 - RNA, 14 nt, Human
accgcagacaggac

SEQ ID NO: 3812444 - RNA, 16 nt, Human
accgccagcucuguuc

SEQ ID NO: 3812445 - RNA, 20 nt, Human
accgcccagcggcuugccug

SEQ ID NO: 3812446 - RNA, 11 nt, Human
accgcccauca

SEQ ID NO: 3812447 - RNA, 20 nt, Human
accgccccaaaguaaaagaa

SEQ ID NO: 3812448 - RNA, 11 nt, Human
accgcccccuc

SEQ ID NO: 3812449 - RNA, 12 nt, Human
accgcccccucc

SEQ ID NO: 3812450 - RNA, 14 nt, Human
accgcccccuccuc

SEQ ID NO: 3812451 - RNA, 19 nt, Human
accgcccccuccucuagcu

SEQ ID NO: 3812452 - RNA, 15 nt, Human
accgcccgucugugu

SEQ ID NO: 3812453 - RNA, 21 nt, Human
accgccgacuuuguacccccc

SEQ ID NO: 3812454 - RNA, 19 nt, Human
accgccuaguuuacuguuu

SEQ ID NO: 3812455 - RNA, 14 nt, Human
accgccucuucccg

SEQ ID NO: 3812456 - RNA, 12 nt, Human
accgccuucucu

SEQ ID NO: 3812457 - RNA, 22 nt, Human
accgccuugcccagccuggaug

SEQ ID NO: 3812458 - RNA, 17 nt, Human
accgcgacuaauuucaa

SEQ ID NO: 3812459 - RNA, 20 nt, Human
accgcgacuaauuucaaaau

SEQ ID NO: 3812460 - RNA, 18 nt, Human
accgcgucuacccuggga

SEQ ID NO: 3812461 - RNA, 14 nt, Human
accgcuacaccacu

SEQ ID NO: 3812462 - RNA, 15 nt, Human
accgcucaccuagag

SEQ ID NO: 3812463 - RNA, 18 nt, Human
accgcucaccuagagcca

SEQ ID NO: 3812464 - RNA, 14 nt, Human
accgcuccccagcc

SEQ ID NO: 3812465 - RNA, 18 nt, Human
accgcuccccagcccagg

SEQ ID NO: 3812466 - RNA, 20 nt, Human
accgcucucuuuucuguacu

SEQ ID NO: 3812467 - RNA, 19 nt, Human
accgcugccuaaguggcug

SEQ ID NO: 3812468 - RNA, 15 nt, Human
accgcuucccuccug

SEQ ID NO: 3812469 - RNA, 14 nt, Human
accgcuuuggccug

SEQ ID NO: 3812470 - RNA, 14 nt, Human
accggaagcuccug

SEQ ID NO: 3812471 - RNA, 16 nt, Human
accggaccagccuggc

SEQ ID NO: 3812472 - RNA, 18 nt, Human
accggaccagccuggccc

SEQ ID NO: 3812473 - RNA, 19 nt, Human
accggagaguggggguggg

SEQ ID NO: 3812474 - RNA, 12 nt, Human
accggcaggugc

SEQ ID NO: 3812475 - RNA, 13 nt, Human
accggccugccag

SEQ ID NO: 3812476 - RNA, 23 nt, Human
accggcggaccccagccauccag

SEQ ID NO: 3812477 - RNA, 14 nt, Human
accggcuggccugg

SEQ ID NO: 3812478 - RNA, 15 nt, Human
accggcuggccuggc

SEQ ID NO: 3812479 - RNA, 17 nt, Human
accggcuggccuggccc

SEQ ID NO: 3812480 - RNA, 20 nt, Human
accgggccacagagaaagua

SEQ ID NO: 3812481 - RNA, 19 nt, Human
accgggccacuccuuccug

SEQ ID NO: 3812482 - RNA, 22 nt, Human
accgggccaguaucuauauaug

SEQ ID NO: 3812483 - RNA, 23 nt, Human
accgggcugggagcucugcagag

SEQ ID NO: 3812484 - RNA, 13 nt, Human
accggggccuggg

SEQ ID NO: 3812485 - RNA, 19 nt, Human
accggggccugggcaggag

SEQ ID NO: 3812486 - RNA, 21 nt, Human
accgggucuugauucagucac

SEQ ID NO: 3812487 - RNA, 23 nt, Human
accgggucuugauucagucacau

SEQ ID NO: 3812488 - RNA, 13 nt, Human
accgguacagaaa

SEQ ID NO: 3812489 - RNA, 14 nt, Human
accgguccagcugg

SEQ ID NO: 3812490 - RNA, 16 nt, Human
accgguccagcuggcc

SEQ ID NO: 3812491 - RNA, 21 nt, Human
accguccucaccccuguccuc

SEQ ID NO: 3812492 - RNA, 15 nt, Human
accguccucuuuuuc

SEQ ID NO: 3812493 - RNA, 14 nt, Human
accgugaagauacu

SEQ ID NO: 3812494 - RNA, 18 nt, Human
accgugaagauacuuugu

SEQ ID NO: 3812495 - RNA, 19 nt, Human
accgugaagauacuuugua

SEQ ID NO: 3812496 - RNA, 21 nt, Human
accgugaagauacuuuguauu

SEQ ID NO: 3812497 - RNA, 20 nt, Human
accgugagcaggaaggccug

SEQ ID NO: 3812498 - RNA, 21 nt, Human
accgugagcaggaaggccugg

SEQ ID NO: 3812499 - RNA, 18 nt, Human
accgugaggccagagaca

SEQ ID NO: 3812500 - RNA, 19 nt, Human
accgugccuggccacgccc

SEQ ID NO: 3812501 - RNA, 19 nt, Human
accguggcccugcccucuc

SEQ ID NO: 3812502 - RNA, 21 nt, Human
accguggcccugcccucuccu

SEQ ID NO: 3812503 - RNA, 19 nt, Human
accguggcccuuccuggac

SEQ ID NO: 3812504 - RNA, 19 nt, Human
accgugggcggggccuugc

SEQ ID NO: 3812505 - RNA, 16 nt, Human
accgugggcucccuga

SEQ ID NO: 3812506 - RNA, 14 nt, Human
accgugucaagcug

SEQ ID NO: 3812507 - RNA, 13 nt, Human
agacaauuugcac

SEQ ID NO: 3812508 - RNA, 18 nt, Human
agacacaacaacuccuag

SEQ ID NO: 3812509 - RNA, 14 nt, Human
agacacaacuauuu

SEQ ID NO: 3812510 - RNA, 20 nt, Human
agacacaacuauuuuuccaa

SEQ ID NO: 3812511 - RNA, 14 nt, Human
agacacacaaagca

SEQ ID NO: 3812512 - RNA, 10 nt, Human
agacacacac

SEQ ID NO: 3812513 - RNA, 11 nt, Human
agacacacaca

SEQ ID NO: 3812514 - RNA, 12 nt, Human
agacacacacac

SEQ ID NO: 3812515 - RNA, 13 nt, Human
agacacacacaca

SEQ ID NO: 3812516 - RNA, 18 nt, Human
agacacacacacgcacgc

SEQ ID NO: 3812517 - RNA, 21 nt, Human
agacacacacacgcacgcaca

SEQ ID NO: 3812518 - RNA, 23 nt, Human
agacacacacacgcacgcacaca

SEQ ID NO: 3812519 - RNA, 16 nt, Human
agacacacugaagaag

SEQ ID NO: 3812520 - RNA, 13 nt, Human
agacacacuuguc

SEQ ID NO: 3812521 - RNA, 14 nt, Human
agacacagaacaca

SEQ ID NO: 3812522 - RNA, 18 nt, Human
agacacagaagaggcugg

SEQ ID NO: 3812523 - RNA, 15 nt, Human
agacacagauaauaa

SEQ ID NO: 3812524 - RNA, 12 nt, Human
agacacagaugu

SEQ ID NO: 3812525 - RNA, 13 nt, Human
agacacagauguu

SEQ ID NO: 3812526 - RNA, 13 nt, Human
agacacaggcccg

SEQ ID NO: 3812527 - RNA, 19 nt, Human
agacacaggcccggcucca

SEQ ID NO: 3812528 - RNA, 23 nt, Human
agacacaggcccggcuccaggcu

SEQ ID NO: 3812529 - RNA, 15 nt, Human
agacacagggacuug

SEQ ID NO: 3812530 - RNA, 15 nt, Human
agacacagggcaucc

SEQ ID NO: 3812531 - RNA, 21 nt, Human
agacacagggcauccaacuga

SEQ ID NO: 3812532 - RNA, 16 nt, Human
agacacauaugagggg

SEQ ID NO: 3812533 - RNA, 12 nt, Human
agacacaugaag

SEQ ID NO: 3812534 - RNA, 23 nt, Human
agacacaugaagguaaauaaaaa

SEQ ID NO: 3812535 - RNA, 20 nt, Human
agacacauguccaagaagcc

SEQ ID NO: 3812536 - RNA, 13 nt, Human
agacacauuuaag

SEQ ID NO: 3812537 - RNA, 13 nt, Human
agacaccagagca

SEQ ID NO: 3812538 - RNA, 14 nt, Human
agacaccagccacu

SEQ ID NO: 3812539 - RNA, 19 nt, Human
agacacccucaaccucuuc

SEQ ID NO: 3812540 - RNA, 17 nt, Human
agacacccuuggagcuc

SEQ ID NO: 3812541 - RNA, 22 nt, Human
agacaccgccacauggcuuccu

SEQ ID NO: 3812542 - RNA, 17 nt, Human
agacaccguucauucag

SEQ ID NO: 3812543 - RNA, 14 nt, Human
agacaccugcaccu

SEQ ID NO: 3812544 - RNA, 21 nt, Human
agacacgcacggcagccacag

SEQ ID NO: 3812545 - RNA, 16 nt, Human
agacacgcucuucuau

SEQ ID NO: 3812546 - RNA, 15 nt, Human
agacacggaucugag

SEQ ID NO: 3812547 - RNA, 20 nt, Human
agacacuaacgaaauaucaa

SEQ ID NO: 3812548 - RNA, 16 nt, Human
agacacucaaauauga

SEQ ID NO: 3812549 - RNA, 17 nt, Human
agacacucugcucugcc

SEQ ID NO: 3812550 - RNA, 19 nt, Human
agacacugaccauccacuc

SEQ ID NO: 3812551 - RNA, 20 nt, Human
agacacugccacacaggguc

SEQ ID NO: 3812552 - RNA, 11 nt, Human
agacacugccu

SEQ ID NO: 3812553 - RNA, 12 nt, Human
agacacugccug

SEQ ID NO: 3812554 - RNA, 15 nt, Human
agacacugccugggc

SEQ ID NO: 3812555 - RNA, 18 nt, Human
agacacuggcugccagcu

SEQ ID NO: 3812556 - RNA, 20 nt, Human
agacacuguuuacaagaaaa

SEQ ID NO: 3812557 - RNA, 22 nt, Human
agacacuguuuacaagaaaaaa

SEQ ID NO: 3812558 - RNA, 20 nt, Human
agacacuuccgucacauccc

SEQ ID NO: 3812559 - RNA, 12 nt, Human
agacagaacacc

SEQ ID NO: 3812560 - RNA, 14 nt, Human
agacagaacaccua

SEQ ID NO: 3812561 - RNA, 18 nt, Human
agacagaaccuuguuauu

SEQ ID NO: 3812562 - RNA, 14 nt, Human
agacagaacuugaa

SEQ ID NO: 3812563 - RNA, 12 nt, Human
agacagaagaaa

SEQ ID NO: 3812564 - RNA, 16 nt, Human
agacagaagcaggcug

SEQ ID NO: 3812565 - RNA, 19 nt, Human
agacagaagcaggcuggag

SEQ ID NO: 3812566 - RNA, 20 nt, Human
agacagaagcaggcuggagg

SEQ ID NO: 3812567 - RNA, 18 nt, Human
agacagaagcugaagugc

SEQ ID NO: 3812568 - RNA, 16 nt, Human
agacagaagucuccuc

SEQ ID NO: 3812569 - RNA, 17 nt, Human
agacagaagucuccuca

SEQ ID NO: 3812570 - RNA, 18 nt, Human
agacagaaucucgcucug

SEQ ID NO: 3812571 - RNA, 15 nt, Human
agacagaauguaucu

SEQ ID NO: 3812572 - RNA, 18 nt, Human
agacagaauguaucugug

SEQ ID NO: 3812573 - RNA, 16 nt, Human
agacagacacacacac

SEQ ID NO: 3812574 - RNA, 14 nt, Human
agacagacuagaag

SEQ ID NO: 3812575 - RNA, 15 nt, Human
agacagacuugagaa

SEQ ID NO: 3812576 - RNA, 15 nt, Human
agacagagacaagua

SEQ ID NO: 3812577 - RNA, 13 nt, Human
agacagagaccug

SEQ ID NO: 3812578 - RNA, 15 nt, Human
agacagagaggacug

SEQ ID NO: 3812579 - RNA, 19 nt, Human
agacagagccaggagaagc

SEQ ID NO: 3812580 - RNA, 19 nt, Human
agacagagcgacagagcag

SEQ ID NO: 3812581 - RNA, 12 nt, Human
agacagagcugg

SEQ ID NO: 3812582 - RNA, 16 nt, Human
agacagaggcccucaa

SEQ ID NO: 3812583 - RNA, 18 nt, Human
agacagaggcccucaagu

SEQ ID NO: 3812584 - RNA, 19 nt, Human
agacagagggucacagugu

SEQ ID NO: 3812585 - RNA, 11 nt, Human
agacagagucu

SEQ ID NO: 3812586 - RNA, 23 nt, Human
agacagagucucacuguugccca

SEQ ID NO: 3812587 - RNA, 23 nt, Human
agacagagucuuccucugucucc

SEQ ID NO: 3812588 - RNA, 22 nt, Human
agacagauaccuccaacccugc

SEQ ID NO: 3812589 - RNA, 15 nt, Human
agacagauacuccuc

SEQ ID NO: 3812590 - RNA, 21 nt, Human
agacagauacuccuccaaggu

SEQ ID NO: 3812591 - RNA, 22 nt, Human
agacagauacuccuccaagguu

SEQ ID NO: 3812592 - RNA, 20 nt, Human
agacagaucuggaaugugaa

SEQ ID NO: 3812593 - RNA, 15 nt, Human
agacagaugccccag

SEQ ID NO: 3812594 - RNA, 15 nt, Human
agacagcauuugugu

SEQ ID NO: 3812595 - RNA, 18 nt, Human
agacagccacauugggca

SEQ ID NO: 3812596 - RNA, 12 nt, Human
agacagccccag

SEQ ID NO: 3812597 - RNA, 15 nt, Human
agacagccccagagc

SEQ ID NO: 3812598 - RNA, 17 nt, Human
agacagcccgggcucug

SEQ ID NO: 3812599 - RNA, 18 nt, Human
agacagcccgggcucugc

SEQ ID NO: 3812600 - RNA, 21 nt, Human
agacagcccgggcucugccuc

SEQ ID NO: 3812601 - RNA, 23 nt, Human
agacagcccgggcucugccuccc

SEQ ID NO: 3812602 - RNA, 20 nt, Human
agacagccuguaucuugggg

SEQ ID NO: 3812603 - RNA, 17 nt, Human
agacagcuccacccugg

SEQ ID NO: 3812604 - RNA, 19 nt, Human
agacagcucccucugccug

SEQ ID NO: 3812605 - RNA, 20 nt, Human
agacagcucccucugccuga

SEQ ID NO: 3812606 - RNA, 11 nt, Human
agacagcucuu

SEQ ID NO: 3812607 - RNA, 19 nt, Human
agacagcugauacuucauu

SEQ ID NO: 3812608 - RNA, 20 nt, Human
agacagcugauacuucauuu

SEQ ID NO: 3812609 - RNA, 22 nt, Human
agacagcuucucauccugcagg

SEQ ID NO: 3812610 - RNA, 23 nt, Human
agacagcuucucauccugcaggc

SEQ ID NO: 3812611 - RNA, 18 nt, Human
agacaggaaaauccucug

SEQ ID NO: 3812612 - RNA, 20 nt, Human
agacaggaaaauccucuggc

SEQ ID NO: 3812613 - RNA, 21 nt, Human
agacaggaaaauccucuggcu

SEQ ID NO: 3812614 - RNA, 19 nt, Human
agacaggaaaguucagagu

SEQ ID NO: 3812615 - RNA, 15 nt, Human
agacaggaccccugc

SEQ ID NO: 3812616 - RNA, 14 nt, Human
agacaggagaaaug

SEQ ID NO: 3812617 - RNA, 23 nt, Human
accugcccugcccugccaccugu

SEQ ID NO: 3812618 - RNA, 14 nt, Human
accugcccugccug

SEQ ID NO: 3812619 - RNA, 15 nt, Human
accugcccuggaaca

SEQ ID NO: 3812620 - RNA, 13 nt, Human
accugccucagga

SEQ ID NO: 3812621 - RNA, 21 nt, Human
accugccucccuucaugcaug

SEQ ID NO: 3812622 - RNA, 13 nt, Human
accugccuccugc

SEQ ID NO: 3812623 - RNA, 21 nt, Human
accugccugacauuuggagug

SEQ ID NO: 3812624 - RNA, 17 nt, Human
accugccugcgucuucc

SEQ ID NO: 3812625 - RNA, 20 nt, Human
accugccugcgucuuccgcc

SEQ ID NO: 3812626 - RNA, 10 nt, Human
accugccugg

SEQ ID NO: 3812627 - RNA, 13 nt, Human
accugccuggccg

SEQ ID NO: 3812628 - RNA, 15 nt, Human
accugccuggccggc

SEQ ID NO: 3812629 - RNA, 17 nt, Human
accugccuggccggcca

SEQ ID NO: 3812630 - RNA, 13 nt, Human
accugccuggguu

SEQ ID NO: 3812631 - RNA, 16 nt, Human
accugcggcccaaucc

SEQ ID NO: 3812632 - RNA, 16 nt, Human
accugcggcugcugug

SEQ ID NO: 3812633 - RNA, 21 nt, Human
accugcuagacacauuuuuaa

SEQ ID NO: 3812634 - RNA, 22 nt, Human
accugcuaggccagagcccacu

SEQ ID NO: 3812635 - RNA, 17 nt, Human
accugcucagcccugca

SEQ ID NO: 3812636 - RNA, 18 nt, Human
accugcuccgcugcuccu

SEQ ID NO: 3812637 - RNA, 17 nt, Human
accugcucuccucuugc

SEQ ID NO: 3812638 - RNA, 16 nt, Human
accugcucucuuguaa

SEQ ID NO: 3812639 - RNA, 19 nt, Human
accugcugagagacccaag

SEQ ID NO: 3812640 - RNA, 22 nt, Human
accugcugagagacccaaggag

SEQ ID NO: 3812641 - RNA, 13 nt, Human
accugcugagcuc

SEQ ID NO: 3812642 - RNA, 17 nt, Human
accugcugagcucugag

SEQ ID NO: 3812643 - RNA, 19 nt, Human
accugcugagcucugagag

SEQ ID NO: 3812644 - RNA, 23 nt, Human
accugcugagcucugagaggccc

SEQ ID NO: 3812645 - RNA, 20 nt, Human
accugcugagggaccagcca

SEQ ID NO: 3812646 - RNA, 13 nt, Human
accugcugcuucu

SEQ ID NO: 3812647 - RNA, 21 nt, Human
accugcugugauacgaugcuu

SEQ ID NO: 3812648 - RNA, 13 nt, Human
accugcuuuuuga

SEQ ID NO: 3812649 - RNA, 23 nt, Human
accuggaagaacaggccucucca

SEQ ID NO: 3812650 - RNA, 19 nt, Human
accuggaaggcccagcacc

SEQ ID NO: 3812651 - RNA, 21 nt, Human
accuggaagggcuagaaccug

SEQ ID NO: 3812652 - RNA, 18 nt, Human
agacaguuucuuagcuuu

SEQ ID NO: 3812653 - RNA, 20 nt, Human
agacaguuucuuagcuuuuu

SEQ ID NO: 3812654 - RNA, 22 nt, Human
agacaguuucuuagcuuuuuaa

SEQ ID NO: 3812655 - RNA, 11 nt, Human
agacaguuugu

SEQ ID NO: 3812656 - RNA, 17 nt, Human
agacaguuuguaaaugu

SEQ ID NO: 3812657 - RNA, 17 nt, Human
agacauaacguuuuucc

SEQ ID NO: 3812658 - RNA, 20 nt, Human
agacauaacguuuuuccuuu

SEQ ID NO: 3812659 - RNA, 15 nt, Human
agacauacccucccu

SEQ ID NO: 3812660 - RNA, 16 nt, Human
agacauacuugaaggg

SEQ ID NO: 3812661 - RNA, 20 nt, Human
agacauacuugaagggccag

SEQ ID NO: 3812662 - RNA, 23 nt, Human
agacauacuugaagggccagagc

SEQ ID NO: 3812663 - RNA, 13 nt, Human
agacauaucucua

SEQ ID NO: 3812664 - RNA, 14 nt, Human
agacauauuuaacu

SEQ ID NO: 3812665 - RNA, 14 nt, Human
agacaucagcccuu

SEQ ID NO: 3812666 - RNA, 16 nt, Human
agacaucagcccuugg

SEQ ID NO: 3812667 - RNA, 22 nt, Human
agacauccaaauuuuuuuuuaa

SEQ ID NO: 3812668 - RNA, 15 nt, Human
agacauccauaaaga

SEQ ID NO: 3812669 - RNA, 14 nt, Human
agacaucucugcac

SEQ ID NO: 3812670 - RNA, 17 nt, Human
agacaugaauaugauua

SEQ ID NO: 3812671 - RNA, 17 nt, Human
agacaugaaugcacacu

SEQ ID NO: 3812672 - RNA, 19 nt, Human
agacaugcagccuaaggcu

SEQ ID NO: 3812673 - RNA, 15 nt, Human
agacaugcugacuuu

SEQ ID NO: 3812674 - RNA, 18 nt, Human
agacauggagacuccugc

SEQ ID NO: 3812675 - RNA, 16 nt, Human
agacauggagguucua

SEQ ID NO: 3812676 - RNA, 19 nt, Human
agacauggggaggaaggac

SEQ ID NO: 3812677 - RNA, 17 nt, Human
agacauguaauuugugu

SEQ ID NO: 3812678 - RNA, 21 nt, Human
agacauguaauuuguguaaau

SEQ ID NO: 3812679 - RNA, 18 nt, Human
agacaugucuguucuaca

SEQ ID NO: 3812680 - RNA, 15 nt, Human
agacaugugacauuu

SEQ ID NO: 3812681 - RNA, 17 nt, Human
agacauguuuuagacaa

SEQ ID NO: 3812682 - RNA, 19 nt, Human
agacauguuuuagacaaau

SEQ ID NO: 3812683 - RNA, 16 nt, Human
agacauuccaaaacga

SEQ ID NO: 3812684 - RNA, 14 nt, Human
agacauucugccag

SEQ ID NO: 3812685 - RNA, 15 nt, Human
agacauucugccagg

SEQ ID NO: 3812686 - RNA, 12 nt, Human
agacauugcacc

SEQ ID NO: 3812687 - RNA, 22 nt, Human
agacauugggucuauuccagcu

SEQ ID NO: 3812688 - RNA, 17 nt, Human
agacauugucagcaaau

SEQ ID NO: 3812689 - RNA, 23 nt, Human
agacauuuauacucuuuuuucau

SEQ ID NO: 3812690 - RNA, 18 nt, Human
agaccaacguuacucagg

SEQ ID NO: 3812691 - RNA, 11 nt, Human
agaccaaggaa

SEQ ID NO: 3812692 - RNA, 12 nt, Human
agaccaaggaac

SEQ ID NO: 3812693 - RNA, 14 nt, Human
agaccaaggcggga

SEQ ID NO: 3812694 - RNA, 11 nt, Human
agaccaauaaa

SEQ ID NO: 3812695 - RNA, 22 nt, Human
agaccaauuuuuugugugugaa

SEQ ID NO: 3812696 - RNA, 14 nt, Human
agaccacaaauagu

SEQ ID NO: 3812697 - RNA, 21 nt, Human
agaccacaaauagugcucgcu

SEQ ID NO: 3812698 - RNA, 13 nt, Human
agaccaccaagcc

SEQ ID NO: 3812699 - RNA, 16 nt, Human
agaccaccaccucaga

SEQ ID NO: 3812700 - RNA, 17 nt, Human
agaccacccauaucaug

SEQ ID NO: 3812701 - RNA, 18 nt, Human
agaccacccauaucaugc

SEQ ID NO: 3812702 - RNA, 17 nt, Human
agaccaccucucaauau

SEQ ID NO: 3812703 - RNA, 21 nt, Human
agaccacgcccguccugccug

SEQ ID NO: 3812704 - RNA, 24 nt, Human
agaccacgcccguccugccugugg

SEQ ID NO: 3812705 - RNA, 14 nt, Human
agaccacguuucua

SEQ ID NO: 3812706 - RNA, 15 nt, Human
agaccacguuucuaa

SEQ ID NO: 3812707 - RNA, 12 nt, Human
agaccagaaauu

SEQ ID NO: 3812708 - RNA, 14 nt, Human
agaccagacugugg

SEQ ID NO: 3812709 - RNA, 16 nt, Human
agaccagacuguggag

SEQ ID NO: 3812710 - RNA, 22 nt, Human
agaccagacuguggagaaauaa

SEQ ID NO: 3812711 - RNA, 12 nt, Human
agaccagagcuc

SEQ ID NO: 3812712 - RNA, 19 nt, Human
agaccagagcucuggagcc

SEQ ID NO: 3812713 - RNA, 13 nt, Human
agaccagccuggc

SEQ ID NO: 3812714 - RNA, 12 nt, Human
agaccagcucuu

SEQ ID NO: 3812715 - RNA, 16 nt, Human
agaccaggcaaagcaa

SEQ ID NO: 3812716 - RNA, 15 nt, Human
agaccagggagccuu

SEQ ID NO: 3812717 - RNA, 14 nt, Human
agaccagucuggcc

SEQ ID NO: 3812718 - RNA, 16 nt, Human
agaccagugcuuagca

SEQ ID NO: 3812719 - RNA, 13 nt, Human
agaccaguuggga

SEQ ID NO: 3812720 - RNA, 14 nt, Human
agaccaucccugaa

SEQ ID NO: 3812721 - RNA, 21 nt, Human
agaccauccuggccaacauga

SEQ ID NO: 3812722 - RNA, 17 nt, Human
agaccaugcagagcgcc

SEQ ID NO: 3812723 - RNA, 23 nt, Human
agaccauggacacuacacccagc

SEQ ID NO: 3812724 - RNA, 23 nt, Human
agaccauuggggcucccagccag

SEQ ID NO: 3812725 - RNA, 16 nt, Human
agaccauuuaacaugc

SEQ ID NO: 3812726 - RNA, 18 nt, Human
agaccauuuaacaugcaa

SEQ ID NO: 3812727 - RNA, 17 nt, Human
agacccaaaaggcagaa

SEQ ID NO: 3812728 - RNA, 16 nt, Human
agacccaccccaccug

SEQ ID NO: 3812729 - RNA, 19 nt, Human
agacccaccccaccugcag

SEQ ID NO: 3812730 - RNA, 11 nt, Human
agacccaggac

SEQ ID NO: 3812731 - RNA, 13 nt, Human
agacccaggacuc

SEQ ID NO: 3812732 - RNA, 14 nt, Human
agacccaggacucc

SEQ ID NO: 3812733 - RNA, 19 nt, Human
agaccccaagaggaaguuc

SEQ ID NO: 3812734 - RNA, 20 nt, Human
agaccccacccaagcuuggc

SEQ ID NO: 3812735 - RNA, 17 nt, Human
agaccccaccuccuugg

SEQ ID NO: 3812736 - RNA, 14 nt, Human
agacccccacaccu

SEQ ID NO: 3812737 - RNA, 11 nt, Human
agacccccacc

SEQ ID NO: 3812738 - RNA, 14 nt, Human
agacccccaccccu

SEQ ID NO: 3812739 - RNA, 16 nt, Human
agacccccaccccuuc

SEQ ID NO: 3812740 - RNA, 19 nt, Human
agacccccaccccuucccc

SEQ ID NO: 3812741 - RNA, 20 nt, Human
agacccccaccccuucccca

SEQ ID NO: 3812742 - RNA, 14 nt, Human
agacccccuggaga

SEQ ID NO: 3812743 - RNA, 21 nt, Human
agaccccggcuuccuuuccca

SEQ ID NO: 3812744 - RNA, 19 nt, Human
agaccccucuggccaggau

SEQ ID NO: 3812745 - RNA, 14 nt, Human
agaccccuggccuc

SEQ ID NO: 3812746 - RNA, 14 nt, Human
agaccccuggcuuu

SEQ ID NO: 3812747 - RNA, 15 nt, Human
agaccccuggcuuuu

SEQ ID NO: 3812748 - RNA, 14 nt, Human
agaccccugucucc

SEQ ID NO: 3812749 - RNA, 17 nt, Human
agacccuaaaucugagg

SEQ ID NO: 3812750 - RNA, 19 nt, Human
agacccuaagccuccuuuu

SEQ ID NO: 3812751 - RNA, 19 nt, Human
agacccucaugcugccaau

SEQ ID NO: 3812752 - RNA, 15 nt, Human
agacccucugccacc

SEQ ID NO: 3812753 - RNA, 14 nt, Human
agacccucuugccc

SEQ ID NO: 3812754 - RNA, 20 nt, Human
agacccugcaaacagaacag

SEQ ID NO: 3812755 - RNA, 21 nt, Human
agacccugcaaacagaacagg

SEQ ID NO: 3812756 - RNA, 22 nt, Human
agacccugcaaacagaacaggg

SEQ ID NO: 3812757 - RNA, 21 nt, Human
agacccugcccugugggcccc

SEQ ID NO: 3812758 - RNA, 14 nt, Human
agacccuggaggcc

SEQ ID NO: 3812759 - RNA, 18 nt, Human
agacccuggugccuggcu

SEQ ID NO: 3812760 - RNA, 19 nt, Human
agacccuggugccuggcuc

SEQ ID NO: 3812761 - RNA, 22 nt, Human
agacccuuauugcuguccugga

SEQ ID NO: 3812762 - RNA, 18 nt, Human
agacccuugacaccugcu

SEQ ID NO: 3812763 - RNA, 15 nt, Human
agacccuuguggucc

SEQ ID NO: 3812764 - RNA, 19 nt, Human
agacccuuuuggguuucug

SEQ ID NO: 3812765 - RNA, 14 nt, Human
agaccgcucucuuu

SEQ ID NO: 3812766 - RNA, 19 nt, Human
agaccggccugccaggagg

SEQ ID NO: 3812767 - RNA, 17 nt, Human
agaccgggcccuggguu

SEQ ID NO: 3812768 - RNA, 18 nt, Human
agaccgucgggggcugag

SEQ ID NO: 3812769 - RNA, 13 nt, Human
agaccgucuuccu

SEQ ID NO: 3812770 - RNA, 15 nt, Human
agaccgucuuccucc

SEQ ID NO: 3812771 - RNA, 19 nt, Human
agaccgugaagauacuuug

SEQ ID NO: 3812772 - RNA, 20 nt, Human
agaccguuauaaagugugcc

SEQ ID NO: 3812773 - RNA, 21 nt, Human
agaccguuuaccuagaagaag

SEQ ID NO: 3812774 - RNA, 19 nt, Human
agaccuaaucucuguaaag

SEQ ID NO: 3812775 - RNA, 19 nt, Human
agaccuacagggggucugg

SEQ ID NO: 3812776 - RNA, 15 nt, Human
agaccuaccucaggu

SEQ ID NO: 3812777 - RNA, 23 nt, Human
agaccuaccucagguugcugguu

SEQ ID NO: 3812778 - RNA, 16 nt, Human
agaaugagggccaaga

SEQ ID NO: 3812779 - RNA, 14 nt, Human
agaaugagugaauc

SEQ ID NO: 3812780 - RNA, 14 nt, Human
agaaugaugcacau

SEQ ID NO: 3812781 - RNA, 17 nt, Human
agaaugauuaugaauua

SEQ ID NO: 3812782 - RNA, 15 nt, Human
agaaugcaaccaagu

SEQ ID NO: 3812783 - RNA, 22 nt, Human
agaaugcacaaacagaggccgc

SEQ ID NO: 3812784 - RNA, 19 nt, Human
agaaugcacaagaauggau

SEQ ID NO: 3812785 - RNA, 16 nt, Human
agaaugcacagauaua

SEQ ID NO: 3812786 - RNA, 17 nt, Human
agaaugcacagauauac

SEQ ID NO: 3812787 - RNA, 22 nt, Human
agaaugcacagauauacuuugu

SEQ ID NO: 3812788 - RNA, 23 nt, Human
agaaugcaguacuaacauuuauu

SEQ ID NO: 3812789 - RNA, 12 nt, Human
agaaugcauuga

SEQ ID NO: 3812790 - RNA, 20 nt, Human
agaaugcauugauauuguga

SEQ ID NO: 3812791 - RNA, 21 nt, Human
agaaugcauugauauugugaa

SEQ ID NO: 3812792 - RNA, 11 nt, Human
agaaugcugaa

SEQ ID NO: 3812793 - RNA, 22 nt, Human
agaaugcugcaggacuugagaa

SEQ ID NO: 3812794 - RNA, 18 nt, Human
agaaugcugguuuuccua

SEQ ID NO: 3812795 - RNA, 14 nt, Human
agaaugcuuaauca

SEQ ID NO: 3812796 - RNA, 13 nt, Human
agaauggaaaaga

SEQ ID NO: 3812797 - RNA, 18 nt, Human
agaauggaagagagaaag

SEQ ID NO: 3812798 - RNA, 13 nt, Human
agacaaugucugc

SEQ ID NO: 3812799 - RNA, 20 nt, Human
agacaaugugaaaagaaaaa

SEQ ID NO: 3812800 - RNA, 22 nt, Human
agacaauucuuuauacaacagu

SEQ ID NO: 3812801 - RNA, 17 nt, Human
agacaauuugauacaua

SEQ ID NO: 3812802 - RNA, 18 nt, Human
agacaauuugauacauaa

SEQ ID NO: 3812803 - RNA, 23 nt, Human
agacaauuugauacauaauaaaa

SEQ ID NO: 3812804 - RNA, 12 nt, Human
agacacaaaugc

SEQ ID NO: 3812805 - RNA, 19 nt, Human
agacacaacaacuccuagg

SEQ ID NO: 3812806 - RNA, 19 nt, Human
agacacaacuauuuuucca

SEQ ID NO: 3812807 - RNA, 13 nt, Human
agacacaagccuu

SEQ ID NO: 3812808 - RNA, 14 nt, Human
agacacacacacgc

SEQ ID NO: 3812809 - RNA, 20 nt, Human
agacacacacacgcacgcac

SEQ ID NO: 3812810 - RNA, 12 nt, Human
agacacacauga

SEQ ID NO: 3812811 - RNA, 14 nt, Human
agacacaccugagg

SEQ ID NO: 3812812 - RNA, 17 nt, Human
agacacagaagaggcug

SEQ ID NO: 3812813 - RNA, 12 nt, Human
agacacagacug

SEQ ID NO: 3812814 - RNA, 17 nt, Human
agacacaggauagauaa

SEQ ID NO: 3812815 - RNA, 23 nt, Human
agacacaggauagauaacucuuu

SEQ ID NO: 3812816 - RNA, 13 nt, Human
agacacaggauga

SEQ ID NO: 3812817 - RNA, 16 nt, Human
agacacaggcccggcu

SEQ ID NO: 3812818 - RNA, 13 nt, Human
agacacaggcccu

SEQ ID NO: 3812819 - RNA, 13 nt, Human
agacacaggggac

SEQ ID NO: 3812820 - RNA, 16 nt, Human
agacacauacucauuu

SEQ ID NO: 3812821 - RNA, 20 nt, Human
agacacaugaagguaaauaa

SEQ ID NO: 3812822 - RNA, 21 nt, Human
agacacaugaagguaaauaaa

SEQ ID NO: 3812823 - RNA, 22 nt, Human
agacacauguccaagaagccca

SEQ ID NO: 3812824 - RNA, 18 nt, Human
agacacauuaucuucugg

SEQ ID NO: 3812825 - RNA, 14 nt, Human
agacacauuuaagg

SEQ ID NO: 3812826 - RNA, 20 nt, Human
agacacauuuuuuaggaaau

SEQ ID NO: 3812827 - RNA, 12 nt, Human
agacaccaaagu

SEQ ID NO: 3812828 - RNA, 17 nt, Human
agacaccaaaguucuaa

SEQ ID NO: 3812829 - RNA, 18 nt, Human
agacaccaaaguucuaau

SEQ ID NO: 3812830 - RNA, 15 nt, Human
agacaccagagcaga

SEQ ID NO: 3812831 - RNA, 13 nt, Human
agacacccaggac

SEQ ID NO: 3812832 - RNA, 14 nt, Human
agacacccaggacu

SEQ ID NO: 3812833 - RNA, 21 nt, Human
agacacccucaaccucuucug

SEQ ID NO: 3812834 - RNA, 19 nt, Human
agacaccguucauucaggc

SEQ ID NO: 3812835 - RNA, 14 nt, Human
agacaccucagagc

SEQ ID NO: 3812836 - RNA, 16 nt, Human
agacaccucagagccc

SEQ ID NO: 3812837 - RNA, 21 nt, Human
agacaccugcaccucccccca

SEQ ID NO: 3812838 - RNA, 14 nt, Human
agacaccugguugc

SEQ ID NO: 3812839 - RNA, 21 nt, Human
agacaccuucauuuugagggg

SEQ ID NO: 3812840 - RNA, 18 nt, Human
agacaccuugacagggca

SEQ ID NO: 3812841 - RNA, 19 nt, Human
agacaccuugacagggcac

SEQ ID NO: 3812842 - RNA, 22 nt, Human
agacacgcacggcagccacagc

SEQ ID NO: 3812843 - RNA, 20 nt, Human
agacacggaucugagaaucu

SEQ ID NO: 3812844 - RNA, 20 nt, Human
agacacuccccgaagucuuu

SEQ ID NO: 3812845 - RNA, 16 nt, Human
agacacucugcucugc

SEQ ID NO: 3812846 - RNA, 16 nt, Human
agacacucuggcuggu

SEQ ID NO: 3812847 - RNA, 22 nt, Human
agacacugaaauauacacacag

SEQ ID NO: 3812848 - RNA, 18 nt, Human
agacacugaucuggcugc

SEQ ID NO: 3812849 - RNA, 13 nt, Human
agacacugccugg

SEQ ID NO: 3812850 - RNA, 14 nt, Human
agacacugccuggg

SEQ ID NO: 3812851 - RNA, 15 nt, Human
agacacuggccccuc

SEQ ID NO: 3812852 - RNA, 16 nt, Human
agacacuggccccuca

SEQ ID NO: 3812853 - RNA, 19 nt, Human
agacacuguugauaaaaac

SEQ ID NO: 3812854 - RNA, 18 nt, Human
agacacuguuuacaagaa

SEQ ID NO: 3812855 - RNA, 13 nt, Human
agacacuuccguc

SEQ ID NO: 3812856 - RNA, 15 nt, Human
agacacuugauacuu

SEQ ID NO: 3812857 - RNA, 13 nt, Human
agacacuuuggaa

SEQ ID NO: 3812858 - RNA, 15 nt, Human
agacacuuuggaagu

SEQ ID NO: 3812859 - RNA, 12 nt, Human
agacagaaaaaa

SEQ ID NO: 3812860 - RNA, 15 nt, Human
agacagaaccacagg

SEQ ID NO: 3812861 - RNA, 17 nt, Human
agacagaacuugaaugu

SEQ ID NO: 3812862 - RNA, 14 nt, Human
agacagaagaaaca

SEQ ID NO: 3812863 - RNA, 17 nt, Human
agacagaagaaacaagg

SEQ ID NO: 3812864 - RNA, 15 nt, Human
agacagaagcaggcu

SEQ ID NO: 3812865 - RNA, 22 nt, Human
agacagaaucucgcucugucgc

SEQ ID NO: 3812866 - RNA, 17 nt, Human
agacagaauguaucugu

SEQ ID NO: 3812867 - RNA, 20 nt, Human
agacagaauguaucugugaa

SEQ ID NO: 3812868 - RNA, 15 nt, Human
agacagacacacaca

SEQ ID NO: 3812869 - RNA, 17 nt, Human
agacagacccugaaaag

SEQ ID NO: 3812870 - RNA, 18 nt, Human
agacagagaauaugucug

SEQ ID NO: 3812871 - RNA, 14 nt, Human
agacagagacaagu

SEQ ID NO: 3812872 - RNA, 17 nt, Human
agacagagacaaguaau

SEQ ID NO: 3812873 - RNA, 22 nt, Human
agacagagacccucugccacca

SEQ ID NO: 3812874 - RNA, 13 nt, Human
agacagagccagg

SEQ ID NO: 3812875 - RNA, 14 nt, Human
agacagagccagga

SEQ ID NO: 3812876 - RNA, 21 nt, Human
agacagagccaggagaagcuc

SEQ ID NO: 3812877 - RNA, 16 nt, Human
agacagagccucgcuc

SEQ ID NO: 3812878 - RNA, 20 nt, Human
agacagagucuuacucuguu

SEQ ID NO: 3812879 - RNA, 20 nt, Human
agacagagucuuccucuguc

SEQ ID NO: 3812880 - RNA, 16 nt, Human
agacagauaccuccaa

SEQ ID NO: 3812881 - RNA, 16 nt, Human
agacagaugccccaga

SEQ ID NO: 3812882 - RNA, 16 nt, Human
agacagcagcucaggc

SEQ ID NO: 3812883 - RNA, 16 nt, Human
agacagcauguguuaa

SEQ ID NO: 3812884 - RNA, 22 nt, Human
agacagccaacuauggccugug

SEQ ID NO: 3812885 - RNA, 17 nt, Human
agacagccccagagcag

SEQ ID NO: 3812886 - RNA, 19 nt, Human
agacagccccagagcaggg

SEQ ID NO: 3812887 - RNA, 20 nt, Human
agacagccccagagcagggu

SEQ ID NO: 3812888 - RNA, 22 nt, Human
agacagcccgauccuccccugg

SEQ ID NO: 3812889 - RNA, 15 nt, Human
agacagcccgggcuc

SEQ ID NO: 3812890 - RNA, 21 nt, Human
agacagcuccacccuggccga

SEQ ID NO: 3812891 - RNA, 15 nt, Human
agacagcucccucug

SEQ ID NO: 3812892 - RNA, 14 nt, Human
agacagcuuuucuc

SEQ ID NO: 3812893 - RNA, 15 nt, Human
agacagcuuuucuca

SEQ ID NO: 3812894 - RNA, 18 nt, Human
agacagcuuuucucaacu

SEQ ID NO: 3812895 - RNA, 19 nt, Human
agacagcuuuucucaacug

SEQ ID NO: 3812896 - RNA, 18 nt, Human
agacaggaaagggaaggc

SEQ ID NO: 3812897 - RNA, 21 nt, Human
agacaggacagugcuucagcc

SEQ ID NO: 3812898 - RNA, 14 nt, Human
agacaggaccccug

SEQ ID NO: 3812899 - RNA, 16 nt, Human
agacaggaccuaggau

SEQ ID NO: 3812900 - RNA, 18 nt, Human
agacaggaccugacuauu

SEQ ID NO: 3812901 - RNA, 18 nt, Human
agacaggagaagaaagaa

SEQ ID NO: 3812902 - RNA, 21 nt, Human
agacaggagaagaaagaacua

SEQ ID NO: 3812903 - RNA, 23 nt, Human
agacaggagggcaagggccaugc

SEQ ID NO: 3812904 - RNA, 20 nt, Human
agacaggcaggugaucugcu

SEQ ID NO: 3812905 - RNA, 15 nt, Human
agacaggcccaagag

SEQ ID NO: 3812906 - RNA, 16 nt, Human
agacaggcccaagaga

SEQ ID NO: 3812907 - RNA, 15 nt, Human
agacaggcuggaaga

SEQ ID NO: 3812908 - RNA, 15 nt, Human
agacaggguccugcu

SEQ ID NO: 3812909 - RNA, 16 nt, Human
agacaggguccugcua

SEQ ID NO: 3812910 - RNA, 23 nt, Human
agacaggguuuggcugugucuaa

SEQ ID NO: 3812911 - RNA, 15 nt, Human
agacagguccugauu

SEQ ID NO: 3812912 - RNA, 18 nt, Human
agacaggugcgaaaggau

SEQ ID NO: 3812913 - RNA, 13 nt, Human
agacaguaaguau

SEQ ID NO: 3812914 - RNA, 18 nt, Human
agacaguauauuuauagu

SEQ ID NO: 3812915 - RNA, 20 nt, Human
agacagucaaggaguggcuu

SEQ ID NO: 3812916 - RNA, 15 nt, Human
agacagucacaaauu

SEQ ID NO: 3812917 - RNA, 17 nt, Human
agacagucaccccagga

SEQ ID NO: 3812918 - RNA, 15 nt, Human
agacaguccagccug

SEQ ID NO: 3812919 - RNA, 17 nt, Human
agacaguccagccugga

SEQ ID NO: 3812920 - RNA, 14 nt, Human
agacagucccugcc

SEQ ID NO: 3812921 - RNA, 16 nt, Human
agacagucccugccaa

SEQ ID NO: 3812922 - RNA, 18 nt, Human
agacagugaucuccauau

SEQ ID NO: 3812923 - RNA, 16 nt, Human
agacagugcacaugaa

SEQ ID NO: 3812924 - RNA, 23 nt, Human
agacaguguauguagaagcauga

SEQ ID NO: 3812925 - RNA, 15 nt, Human
agacaguucaagaaa

SEQ ID NO: 3812926 - RNA, 13 nt, Human
agacaguuuguaa

SEQ ID NO: 3812927 - RNA, 15 nt, Human
agacaguuuguaaau

SEQ ID NO: 3812928 - RNA, 18 nt, Human
agacaguuuguaaauguu

SEQ ID NO: 3812929 - RNA, 16 nt, Human
agacaguuuugagaac

SEQ ID NO: 3812930 - RNA, 16 nt, Human
agacauaaaggaaaag

SEQ ID NO: 3812931 - RNA, 16 nt, Human
agacauacgaaacaca

SEQ ID NO: 3812932 - RNA, 14 nt, Human
agacauacuugaag

SEQ ID NO: 3812933 - RNA, 21 nt, Human
agacauacuugaagggccaga

SEQ ID NO: 3812934 - RNA, 15 nt, Human
agacauauuuaacug

SEQ ID NO: 3812935 - RNA, 18 nt, Human
agacaucaacagauaaau

SEQ ID NO: 3812936 - RNA, 20 nt, Human
agacauccaaacuaaaagga

SEQ ID NO: 3812937 - RNA, 18 nt, Human
agacauccauaaagaagc

SEQ ID NO: 3812938 - RNA, 19 nt, Human
agacaucugagguuuuauu

SEQ ID NO: 3812939 - RNA, 13 nt, Human
agacaucuuucuc

SEQ ID NO: 3812940 - RNA, 16 nt, Human
agaccuacuguucuaa

SEQ ID NO: 3812941 - RNA, 17 nt, Human
agaccuacuguucuaaa

SEQ ID NO: 3812942 - RNA, 20 nt, Human
agaccuacuguucuaaagcu

SEQ ID NO: 3812943 - RNA, 19 nt, Human
agaccuagggaggaccuua

SEQ ID NO: 3812944 - RNA, 18 nt, Human
acuagccuuuggcucugg

SEQ ID NO: 3812945 - RNA, 23 nt, Human
acuagcuagaagugggccaggac

SEQ ID NO: 3812946 - RNA, 11 nt, Human
acuagcucuug

SEQ ID NO: 3812947 - RNA, 20 nt, Human
acuagcuuacaugagaacag

SEQ ID NO: 3812948 - RNA, 18 nt, Human
acuaggagaaccaaaucu

SEQ ID NO: 3812949 - RNA, 23 nt, Human
acuaggccuugcggcuccucagg

SEQ ID NO: 3812950 - RNA, 12 nt, Human
acuaggcugggu

SEQ ID NO: 3812951 - RNA, 13 nt, Human
acuaggcugggug

SEQ ID NO: 3812952 - RNA, 21 nt, Human
acuagggaagaaagcagaaca

SEQ ID NO: 3812953 - RNA, 15 nt, Human
acuagggagccaugu

SEQ ID NO: 3812954 - RNA, 19 nt, Human
acuagggagccauuugaga

SEQ ID NO: 3812955 - RNA, 20 nt, Human
acuagggaucccucaucugu

SEQ ID NO: 3812956 - RNA, 16 nt, Human
acuagggauucaggcu

SEQ ID NO: 3812957 - RNA, 16 nt, Human
acuagggccaagccca

SEQ ID NO: 3812958 - RNA, 16 nt, Human
acuaggguccugggga

SEQ ID NO: 3812959 - RNA, 14 nt, Human
acuagguaacuuca

SEQ ID NO: 3812960 - RNA, 16 nt, Human
acuaguacaaauuaua

SEQ ID NO: 3812961 - RNA, 22 nt, Human
acuaguacuguguacuguauag

SEQ ID NO: 3812962 - RNA, 14 nt, Human
acuaguaguucucu

SEQ ID NO: 3812963 - RNA, 15 nt, Human
acuagucugugugcu

SEQ ID NO: 3812964 - RNA, 23 nt, Human
acuagugacaagcuccuggucuu

SEQ ID NO: 3812965 - RNA, 14 nt, Human
acuagugacagcuu

SEQ ID NO: 3812966 - RNA, 15 nt, Human
acuagugacagcuug

SEQ ID NO: 3812967 - RNA, 23 nt, Human
acuaguguacauuucuauaaaua

SEQ ID NO: 3812968 - RNA, 16 nt, Human
acuaguguuuuuuaga

SEQ ID NO: 3812969 - RNA, 13 nt, Human
acuaguuacacau

SEQ ID NO: 3812970 - RNA, 22 nt, Human
acuaguuacacaucuucaacag

SEQ ID NO: 3812971 - RNA, 17 nt, Human
acuaguugugaccuuag

SEQ ID NO: 3812972 - RNA, 17 nt, Human
acuaguuuuaguuuucu

SEQ ID NO: 3812973 - RNA, 17 nt, Human
acuaguuuugugccagc

SEQ ID NO: 3812974 - RNA, 23 nt, Human
acuaguuuuuagaaaagaaagca

SEQ ID NO: 3812975 - RNA, 14 nt, Human
acuaguuuuuccua

SEQ ID NO: 3812976 - RNA, 12 nt, Human
acuauaaagaga

SEQ ID NO: 3812977 - RNA, 19 nt, Human
acuauaacauagaauugca

SEQ ID NO: 3812978 - RNA, 17 nt, Human
acuauaacauauguaca

SEQ ID NO: 3812979 - RNA, 13 nt, Human
acuauaagaacuu

SEQ ID NO: 3812980 - RNA, 19 nt, Human
acuauaagaacuuugagcu

SEQ ID NO: 3812981 - RNA, 12 nt, Human
acuauaauguaa

SEQ ID NO: 3812982 - RNA, 19 nt, Human
acuauaaugugaaauguaa

SEQ ID NO: 3812983 - RNA, 21 nt, Human
acuauaaugugaaauguaacu

SEQ ID NO: 3812984 - RNA, 16 nt, Human
acuauacuugaacaaa

SEQ ID NO: 3812985 - RNA, 17 nt, Human
acuauacuugaacaaaa

SEQ ID NO: 3812986 - RNA, 22 nt, Human
acuauagccuaggugacagagu

SEQ ID NO: 3812987 - RNA, 22 nt, Human
acuauaggcaugcgccaccaug

SEQ ID NO: 3812988 - RNA, 21 nt, Human
acuauaguccagcuuuguucu

SEQ ID NO: 3812989 - RNA, 13 nt, Human
acuauauacaugu

SEQ ID NO: 3812990 - RNA, 12 nt, Human
agagauuucaag

SEQ ID NO: 3812991 - RNA, 14 nt, Human
agagauuuggggcu

SEQ ID NO: 3812992 - RNA, 21 nt, Human
agagauuuggggcuaaagacu

SEQ ID NO: 3812993 - RNA, 14 nt, Human
agagauuugucuaa

SEQ ID NO: 3812994 - RNA, 15 nt, Human
agagauuuucaacau

SEQ ID NO: 3812995 - RNA, 21 nt, Human
agagauuuucaacauuucaaa

SEQ ID NO: 3812996 - RNA, 13 nt, Human
agagauuuuucau

SEQ ID NO: 3812997 - RNA, 23 nt, Human
agagauuuuuuuguuguuuguuu

SEQ ID NO: 3812998 - RNA, 20 nt, Human
agagauuuuuuuuuaaagaa

SEQ ID NO: 3812999 - RNA, 16 nt, Human
agagcaaagggccagg

SEQ ID NO: 3813000 - RNA, 19 nt, Human
agagcaaagggccaggaag

SEQ ID NO: 3813001 - RNA, 18 nt, Human
agagcaaccccuggaccc

SEQ ID NO: 3813002 - RNA, 21 nt, Human
agagcaaccccuggaccccag

SEQ ID NO: 3813003 - RNA, 23 nt, Human
agagcaaccccuggaccccagcc

SEQ ID NO: 3813004 - RNA, 19 nt, Human
agagcaagacgcugugcug

SEQ ID NO: 3813005 - RNA, 16 nt, Human
agagcaagagagcagc

SEQ ID NO: 3813006 - RNA, 17 nt, Human
agagcaagcuuuuuuau

SEQ ID NO: 3813007 - RNA, 23 nt, Human
agagcaaggaagguaaaaaguua

SEQ ID NO: 3813008 - RNA, 16 nt, Human
agagcaagucugcagg

SEQ ID NO: 3813009 - RNA, 16 nt, Human
agagcacaaacauuuu

SEQ ID NO: 3813010 - RNA, 17 nt, Human
agagcacaaacauuuuu

SEQ ID NO: 3813011 - RNA, 20 nt, Human
agagcacacuuggcccaagu

SEQ ID NO: 3813012 - RNA, 16 nt, Human
agagcacagcccuccc

SEQ ID NO: 3813013 - RNA, 17 nt, Human
agagcaccccucucugc

SEQ ID NO: 3813014 - RNA, 23 nt, Human
agagcaccuuagacagucccugc

SEQ ID NO: 3813015 - RNA, 20 nt, Human
agagcaccuuccucacuucc

SEQ ID NO: 3813016 - RNA, 21 nt, Human
agagcacgccuguacuagagc

SEQ ID NO: 3813017 - RNA, 15 nt, Human
agagcacugccacca

SEQ ID NO: 3813018 - RNA, 18 nt, Human
agagcacugccaccagua

SEQ ID NO: 3813019 - RNA, 21 nt, Human
agagcacuuaagagaauauuu

SEQ ID NO: 3813020 - RNA, 17 nt, Human
agagcagagaccauccc

SEQ ID NO: 3813021 - RNA, 14 nt, Human
agagcagaggcagc

SEQ ID NO: 3813022 - RNA, 12 nt, Human
agagcagagguc

SEQ ID NO: 3813023 - RNA, 14 nt, Human
agagcagaugcaga

SEQ ID NO: 3813024 - RNA, 23 nt, Human
agagcagcaccuccucagccuga

SEQ ID NO: 3813025 - RNA, 19 nt, Human
agagcagcagugaaaacaa

SEQ ID NO: 3813026 - RNA, 16 nt, Human
agagcagccuguggca

SEQ ID NO: 3813027 - RNA, 23 nt, Human
agagcagcggggcgaagcccagg

SEQ ID NO: 3813028 - RNA, 23 nt, Human
agagcagcuucugccacuuccca

SEQ ID NO: 3813029 - RNA, 13 nt, Human
agagcaggacucc

SEQ ID NO: 3813030 - RNA, 21 nt, Human
agagcaggacuccaggcccaa

SEQ ID NO: 3813031 - RNA, 17 nt, Human
agagcaggacugauguc

SEQ ID NO: 3813032 - RNA, 22 nt, Human
agagcaggacugaugucuccua

SEQ ID NO: 3813033 - RNA, 15 nt, Human
agagcaggaggcccc

SEQ ID NO: 3813034 - RNA, 22 nt, Human
agagcaggaggccccuggccca

SEQ ID NO: 3813035 - RNA, 19 nt, Human
agagcaggcacauggagga

SEQ ID NO: 3813036 - RNA, 15 nt, Human
agagcagugcuuuug

SEQ ID NO: 3813037 - RNA, 19 nt, Human
agagcaguugagaggacac

SEQ ID NO: 3813038 - RNA, 23 nt, Human
agagcaguuucuguccugcuggu

SEQ ID NO: 3813039 - RNA, 21 nt, Human
agagcaguuugguuucuagca

SEQ ID NO: 3813040 - RNA, 20 nt, Human
agagcauaauuuaaaaauau

SEQ ID NO: 3813041 - RNA, 19 nt, Human
agagcaucaggccuagagg

SEQ ID NO: 3813042 - RNA, 16 nt, Human
agagcaucggccuagg

SEQ ID NO: 3813043 - RNA, 14 nt, Human
agagcaugaaauuu

SEQ ID NO: 3813044 - RNA, 22 nt, Human
agagcauuacgugagccaggua

SEQ ID NO: 3813045 - RNA, 18 nt, Human
agagcauuccagucaggc

SEQ ID NO: 3813046 - RNA, 19 nt, Human
agagcauuccagucaggcu

SEQ ID NO: 3813047 - RNA, 12 nt, Human
agagccacacau

SEQ ID NO: 3813048 - RNA, 13 nt, Human
agagccacacaug

SEQ ID NO: 3813049 - RNA, 14 nt, Human
agagccacacaugg

SEQ ID NO: 3813050 - RNA, 11 nt, Human
agagccacagu

SEQ ID NO: 3813051 - RNA, 16 nt, Human
agagccagagaaguga

SEQ ID NO: 3813052 - RNA, 21 nt, Human
agagccagagaagugacaggg

SEQ ID NO: 3813053 - RNA, 16 nt, Human
agagccagcccucccu

SEQ ID NO: 3813054 - RNA, 21 nt, Human
agagccagcuaaggggugggg

SEQ ID NO: 3813055 - RNA, 12 nt, Human
agagccagcuug

SEQ ID NO: 3813056 - RNA, 12 nt, Human
agagccaggaga

SEQ ID NO: 3813057 - RNA, 22 nt, Human
agagccaggagaagcucagcug

SEQ ID NO: 3813058 - RNA, 15 nt, Human
agagccauacauaaa

SEQ ID NO: 3813059 - RNA, 18 nt, Human
agagccauacauaaaaga

SEQ ID NO: 3813060 - RNA, 19 nt, Human
agagccauacauaaaagaa

SEQ ID NO: 3813061 - RNA, 13 nt, Human
agagcccacgccc

SEQ ID NO: 3813062 - RNA, 22 nt, Human
agagcccagagguaacagaaca

SEQ ID NO: 3813063 - RNA, 22 nt, Human
agagcccagaguccccccacuc

SEQ ID NO: 3813064 - RNA, 12 nt, Human
agagcccagcuc

SEQ ID NO: 3813065 - RNA, 14 nt, Human
agagcccagcucca

SEQ ID NO: 3813066 - RNA, 15 nt, Human
agagcccaggccucc

SEQ ID NO: 3813067 - RNA, 20 nt, Human
agagcccaggcucggccugc

SEQ ID NO: 3813068 - RNA, 15 nt, Human
agagccccacacgga

SEQ ID NO: 3813069 - RNA, 13 nt, Human
agagccccacucu

SEQ ID NO: 3813070 - RNA, 22 nt, Human
agagccccgcaaaacccacuga

SEQ ID NO: 3813071 - RNA, 22 nt, Human
agagcccgaggaggugucucag

SEQ ID NO: 3813072 - RNA, 17 nt, Human
agagcccgggagcugcu

SEQ ID NO: 3813073 - RNA, 14 nt, Human
agagcccugaggcc

SEQ ID NO: 3813074 - RNA, 15 nt, Human
agagcccugggaccg

SEQ ID NO: 3813075 - RNA, 17 nt, Human
agagcccugggaccgcu

SEQ ID NO: 3813076 - RNA, 19 nt, Human
agagcccugucaguagagu

SEQ ID NO: 3813077 - RNA, 16 nt, Human
agagccgggaagcgau

SEQ ID NO: 3813078 - RNA, 19 nt, Human
agagccguaaaaacugaag

SEQ ID NO: 3813079 - RNA, 17 nt, Human
agagccgugaugccucc

SEQ ID NO: 3813080 - RNA, 21 nt, Human
agagccucccaaggagaacaa

SEQ ID NO: 3813081 - RNA, 20 nt, Human
agagccuccuuucuggcuuu

SEQ ID NO: 3813082 - RNA, 11 nt, Human
agagccugagg

SEQ ID NO: 3813083 - RNA, 19 nt, Human
agagccugaucucuuccug

SEQ ID NO: 3813084 - RNA, 16 nt, Human
agagccugcaggaucu

SEQ ID NO: 3813085 - RNA, 17 nt, Human
agagccugcaggaucuc

SEQ ID NO: 3813086 - RNA, 18 nt, Human
agagccugcaggugcugc

SEQ ID NO: 3813087 - RNA, 19 nt, Human
agagccugccccagcgcug

SEQ ID NO: 3813088 - RNA, 22 nt, Human
acucaaagcaugggauuauuag

SEQ ID NO: 3813089 - RNA, 14 nt, Human
acucaaaggccaga

SEQ ID NO: 3813090 - RNA, 20 nt, Human
acucaaaguuucagagacca

SEQ ID NO: 3813091 - RNA, 19 nt, Human
acucaaauacacauuugcu

SEQ ID NO: 3813092 - RNA, 23 nt, Human
acucaaauaugaguacaaaugcc

SEQ ID NO: 3813093 - RNA, 16 nt, Human
acucaaaugaguaaca

SEQ ID NO: 3813094 - RNA, 21 nt, Human
acucaaaugcucagaccagcu

SEQ ID NO: 3813095 - RNA, 12 nt, Human
acucaaaugcuu

SEQ ID NO: 3813096 - RNA, 19 nt, Human
acucaaaugcuuggcuucu

SEQ ID NO: 3813097 - RNA, 22 nt, Human
acucaaaugcuuggcuucucau

SEQ ID NO: 3813098 - RNA, 17 nt, Human
acucaaauggggccaga

SEQ ID NO: 3813099 - RNA, 22 nt, Human
acucaaauggggccagauccag

SEQ ID NO: 3813100 - RNA, 23 nt, Human
acucaaauggggccagauccagc

SEQ ID NO: 3813101 - RNA, 20 nt, Human
acucaaaugugaguguuuuu

SEQ ID NO: 3813102 - RNA, 22 nt, Human
acucaaauguucuaaguuucua

SEQ ID NO: 3813103 - RNA, 16 nt, Human
acucaacaugagucaa

SEQ ID NO: 3813104 - RNA, 21 nt, Human
acucaaccaaaugguacaaaa

SEQ ID NO: 3813105 - RNA, 23 nt, Human
acucaaccuuaagaccuacuguu

SEQ ID NO: 3813106 - RNA, 13 nt, Human
acucaagaagcag

SEQ ID NO: 3813107 - RNA, 23 nt, Human
acucaagaagugaagaaugcaca

SEQ ID NO: 3813108 - RNA, 12 nt, Human
acucaagcacug

SEQ ID NO: 3813109 - RNA, 14 nt, Human
acucaagccaagca

SEQ ID NO: 3813110 - RNA, 21 nt, Human
acucaagcggguggcucuggg

SEQ ID NO: 3813111 - RNA, 17 nt, Human
acucaaggacuuugcag

SEQ ID NO: 3813112 - RNA, 19 nt, Human
acucaagguucccagagau

SEQ ID NO: 3813113 - RNA, 16 nt, Human
acucaaguagcauuua

SEQ ID NO: 3813114 - RNA, 22 nt, Human
acucaagugucucaguccaccu

SEQ ID NO: 3813115 - RNA, 23 nt, Human
acucaagugucucaguccaccug

SEQ ID NO: 3813116 - RNA, 18 nt, Human
acucaaguugucucuuua

SEQ ID NO: 3813117 - RNA, 15 nt, Human
acucaauaaaaucau

SEQ ID NO: 3813118 - RNA, 18 nt, Human
acucaauauuuuccauga

SEQ ID NO: 3813119 - RNA, 21 nt, Human
acucaauauuuuccaugaaaa

SEQ ID NO: 3813120 - RNA, 23 nt, Human
acucaaucuccccuugcacuaaa

SEQ ID NO: 3813121 - RNA, 21 nt, Human
acucaaugcuuuauuuguaaa

SEQ ID NO: 3813122 - RNA, 23 nt, Human
acucaaugcuuuauuuguaaauu

SEQ ID NO: 3813123 - RNA, 16 nt, Human
acucaauuucucccca

SEQ ID NO: 3813124 - RNA, 17 nt, Human
acucaauuucuccccag

SEQ ID NO: 3813125 - RNA, 13 nt, Human
acucacaaaugau

SEQ ID NO: 3813126 - RNA, 17 nt, Human
acucacaacagcugccu

SEQ ID NO: 3813127 - RNA, 14 nt, Human
acucacaagaagac

SEQ ID NO: 3813128 - RNA, 18 nt, Human
acucacaagaagaccaga

SEQ ID NO: 3813129 - RNA, 21 nt, Human
acucacaagaagaccagacug

SEQ ID NO: 3813130 - RNA, 22 nt, Human
acucacacaggacccccuuccc

SEQ ID NO: 3813131 - RNA, 21 nt, Human
acucacaccugaacugaacac

SEQ ID NO: 3813132 - RNA, 14 nt, Human
acucacagaccugg

SEQ ID NO: 3813133 - RNA, 17 nt, Human
acucacagagucaaggc

SEQ ID NO: 3813134 - RNA, 19 nt, Human
acucacagagucaaggccu

SEQ ID NO: 3813135 - RNA, 22 nt, Human
acucacagagucaaggccugcu

SEQ ID NO: 3813136 - RNA, 18 nt, Human
acucacagccagcgaacu

SEQ ID NO: 3813137 - RNA, 22 nt, Human
acucacagccagcgaacugaca

SEQ ID NO: 3813138 - RNA, 23 nt, Human
acucacagguuggaagagaauca

SEQ ID NO: 3813139 - RNA, 16 nt, Human
acucacagugcuuuua

SEQ ID NO: 3813140 - RNA, 14 nt, Human
acucacaucuuuuu

SEQ ID NO: 3813141 - RNA, 13 nt, Human
acucacaugacac

SEQ ID NO: 3813142 - RNA, 18 nt, Human
acucacaugcuggacagg

SEQ ID NO: 3813143 - RNA, 19 nt, Human
acucacauggcuauguuuu

SEQ ID NO: 3813144 - RNA, 17 nt, Human
acucacauuagagaaca

SEQ ID NO: 3813145 - RNA, 20 nt, Human
acucacauuuauucugcuca

SEQ ID NO: 3813146 - RNA, 23 nt, Human
acucaccagccccacugccagca

SEQ ID NO: 3813147 - RNA, 11 nt, Human
agagcugggug

SEQ ID NO: 3813148 - RNA, 19 nt, Human
agagcugggugucaagagg

SEQ ID NO: 3813149 - RNA, 21 nt, Human
agagcugguaguuaguagcau

SEQ ID NO: 3813150 - RNA, 15 nt, Human
agagcuggugcccgg

SEQ ID NO: 3813151 - RNA, 16 nt, Human
agagcuggugcccgga

SEQ ID NO: 3813152 - RNA, 12 nt, Human
agagcuggugcg

SEQ ID NO: 3813153 - RNA, 17 nt, Human
agagcuguauuaagcca

SEQ ID NO: 3813154 - RNA, 19 nt, Human
agagcuguauuaagccacu

SEQ ID NO: 3813155 - RNA, 22 nt, Human
agagcuguucaacaucacugaa

SEQ ID NO: 3813156 - RNA, 13 nt, Human
agagcuuagaaac

SEQ ID NO: 3813157 - RNA, 18 nt, Human
agagcuuagggucucagg

SEQ ID NO: 3813158 - RNA, 12 nt, Human
agagcuucccug

SEQ ID NO: 3813159 - RNA, 19 nt, Human
agagcuucuguugcugccu

SEQ ID NO: 3813160 - RNA, 22 nt, Human
agagcuucuuccaggugcccag

SEQ ID NO: 3813161 - RNA, 13 nt, Human
agagcuuggacug

SEQ ID NO: 3813162 - RNA, 12 nt, Human
agagcuuucuuu

SEQ ID NO: 3813163 - RNA, 16 nt, Human
agagcuuucuuucaca

SEQ ID NO: 3813164 - RNA, 14 nt, Human
agagcuuuucagau

SEQ ID NO: 3813165 - RNA, 17 nt, Human
agaggaaaaugaauaau

SEQ ID NO: 3813166 - RNA, 20 nt, Human
agaggaaauauugcuggggu

SEQ ID NO: 3813167 - RNA, 11 nt, Human
agaggaaauca

SEQ ID NO: 3813168 - RNA, 14 nt, Human
agaggaaaucugua

SEQ ID NO: 3813169 - RNA, 21 nt, Human
agaggaaaucuguaacaggua

SEQ ID NO: 3813170 - RNA, 19 nt, Human
agaggaacuccuuggccua

SEQ ID NO: 3813171 - RNA, 21 nt, Human
agaggaacuccuuggccuagc

SEQ ID NO: 3813172 - RNA, 15 nt, Human
agaggaaggggccag

SEQ ID NO: 3813173 - RNA, 18 nt, Human
agaggaaggggccagagg

SEQ ID NO: 3813174 - RNA, 23 nt, Human
agaggaaggggccagaggcucgu

SEQ ID NO: 3813175 - RNA, 24 nt, Human
agaggaaucagacuucacacugca

SEQ ID NO: 3813176 - RNA, 21 nt, Human
agaggaauccuggcagcccag

SEQ ID NO: 3813177 - RNA, 15 nt, Human
agaggaaugaaaaaa

SEQ ID NO: 3813178 - RNA, 17 nt, Human
agaggaaugaaaaaagc

SEQ ID NO: 3813179 - RNA, 18 nt, Human
agaggaaugaaaaaagcu

SEQ ID NO: 3813180 - RNA, 12 nt, Human
agaggaccagca

SEQ ID NO: 3813181 - RNA, 14 nt, Human
agaggacgugggcg

SEQ ID NO: 3813182 - RNA, 22 nt, Human
agaggacuguagggagggcggc

SEQ ID NO: 3813183 - RNA, 14 nt, Human
agaggacuuuucuu

SEQ ID NO: 3813184 - RNA, 21 nt, Human
agaggacuuuucuuuguggcu

SEQ ID NO: 3813185 - RNA, 23 nt, Human
agaggacuuuucuuuguggcuuc

SEQ ID NO: 3813186 - RNA, 14 nt, Human
agaggagaaacaca

SEQ ID NO: 3813187 - RNA, 11 nt, Human
agaggagagag

SEQ ID NO: 3813188 - RNA, 17 nt, Human
agaggagagaggcagag

SEQ ID NO: 3813189 - RNA, 15 nt, Human
agaggagagccagag

SEQ ID NO: 3813190 - RNA, 13 nt, Human
agaggagaggggc

SEQ ID NO: 3813191 - RNA, 17 nt, Human
agaggagccaccaguuc

SEQ ID NO: 3813192 - RNA, 13 nt, Human
agaggagcccugc

SEQ ID NO: 3813193 - RNA, 15 nt, Human
agaggagcccugccu

SEQ ID NO: 3813194 - RNA, 22 nt, Human
agaggagccuuuuuaaaacaca

SEQ ID NO: 3813195 - RNA, 23 nt, Human
agaggagggcagcagaagggggu

SEQ ID NO: 3813196 - RNA, 21 nt, Human
agaggagggcgugacucaccc

SEQ ID NO: 3813197 - RNA, 14 nt, Human
agaggaggggccgc

SEQ ID NO: 3813198 - RNA, 14 nt, Human
agaggagugcuugu

SEQ ID NO: 3813199 - RNA, 15 nt, Human
agaggaguucaauga

SEQ ID NO: 3813200 - RNA, 18 nt, Human
agaggauaauuagcaucu

SEQ ID NO: 3813201 - RNA, 16 nt, Human
agaggauggccagugu

SEQ ID NO: 3813202 - RNA, 21 nt, Human
agaggauggucuuacagcagg

SEQ ID NO: 3813203 - RNA, 22 nt, Human
agaggauuagguuccauccuuu

SEQ ID NO: 3813204 - RNA, 18 nt, Human
agaggauuuuuuucugag

SEQ ID NO: 3813205 - RNA, 21 nt, Human
agaggauuuuuuucugagcga

SEQ ID NO: 3813206 - RNA, 24 nt, Human
agaggcaccacuaaaagaucgcag

SEQ ID NO: 3813207 - RNA, 11 nt, Human
agaggcaccag

SEQ ID NO: 3813208 - RNA, 13 nt, Human
agaggcaccagga

SEQ ID NO: 3813209 - RNA, 18 nt, Human
agaggcaccugucccaga

SEQ ID NO: 3813210 - RNA, 14 nt, Human
agaggcagagaaag

SEQ ID NO: 3813211 - RNA, 17 nt, Human
agaggcagagaaagaag

SEQ ID NO: 3813212 - RNA, 21 nt, Human
agaggcagagaaagaagagac

SEQ ID NO: 3813213 - RNA, 22 nt, Human
agaggcagagaaagaagagaca

SEQ ID NO: 3813214 - RNA, 12 nt, Human
agaggcagagag

SEQ ID NO: 3813215 - RNA, 15 nt, Human
agaggcagagagcgg

SEQ ID NO: 3813216 - RNA, 23 nt, Human
agaggcagagagcggucucaggc

SEQ ID NO: 3813217 - RNA, 13 nt, Human
agaggcagcccag

SEQ ID NO: 3813218 - RNA, 19 nt, Human
agaggcagcccaggaaguc

SEQ ID NO: 3813219 - RNA, 19 nt, Human
agaggcagccccauucugc

SEQ ID NO: 3813220 - RNA, 16 nt, Human
agaggcagcccgcaca

SEQ ID NO: 3813221 - RNA, 13 nt, Human
agaggcagggucu

SEQ ID NO: 3813222 - RNA, 18 nt, Human
agaggcaguugcccagcc

SEQ ID NO: 3813223 - RNA, 22 nt, Human
agaggcaguugcccagccucuu

SEQ ID NO: 3813224 - RNA, 21 nt, Human
agaggcaugggcuugcugugg

SEQ ID NO: 3813225 - RNA, 14 nt, Human
agaggcauuucccc

SEQ ID NO: 3813226 - RNA, 19 nt, Human
agaggccaacacugugggu

SEQ ID NO: 3813227 - RNA, 13 nt, Human
agaggccaaugcc

SEQ ID NO: 3813228 - RNA, 18 nt, Human
agaggccacauuacuaga

SEQ ID NO: 3813229 - RNA, 17 nt, Human
agaggccagccccaccc

SEQ ID NO: 3813230 - RNA, 18 nt, Human
agaggccagccccaccca

SEQ ID NO: 3813231 - RNA, 17 nt, Human
agauccccguuccugac

SEQ ID NO: 3813232 - RNA, 14 nt, Human
agauccccugagcc

SEQ ID NO: 3813233 - RNA, 15 nt, Human
agaucccgccucuuc

SEQ ID NO: 3813234 - RNA, 22 nt, Human
agaucccgccucuucuucuuca

SEQ ID NO: 3813235 - RNA, 22 nt, Human
agauccuaaaacaaaagcucau

SEQ ID NO: 3813236 - RNA, 14 nt, Human
agauccuaagaugu

SEQ ID NO: 3813237 - RNA, 21 nt, Human
agauccuaagggucgaaagcu

SEQ ID NO: 3813238 - RNA, 15 nt, Human
agauccuaccccuga

SEQ ID NO: 3813239 - RNA, 13 nt, Human
agauccuccucau

SEQ ID NO: 3813240 - RNA, 12 nt, Human
agauccuccugc

SEQ ID NO: 3813241 - RNA, 16 nt, Human
agauccucucuggggc

SEQ ID NO: 3813242 - RNA, 17 nt, Human
agauccugcgggugggg

SEQ ID NO: 3813243 - RNA, 18 nt, Human
agauccugcggguggggc

SEQ ID NO: 3813244 - RNA, 21 nt, Human
agauccugucuuuaaggaaaa

SEQ ID NO: 3813245 - RNA, 13 nt, Human
agauccugugagg

SEQ ID NO: 3813246 - RNA, 15 nt, Human
agauccugugaggag

SEQ ID NO: 3813247 - RNA, 15 nt, Human
agauccuuccuuuug

SEQ ID NO: 3813248 - RNA, 18 nt, Human
agauccuuguuucaaaca

SEQ ID NO: 3813249 - RNA, 20 nt, Human
agaucgagaccauccuggcu

SEQ ID NO: 3813250 - RNA, 21 nt, Human
agaucgagaccauccuggcua

SEQ ID NO: 3813251 - RNA, 14 nt, Human
agaucgcaguuugc

SEQ ID NO: 3813252 - RNA, 15 nt, Human
agaucgcaguuugcc

SEQ ID NO: 3813253 - RNA, 15 nt, Human
agaucgcgccacugc

SEQ ID NO: 3813254 - RNA, 20 nt, Human
agaucgcgccacugcacucc

SEQ ID NO: 3813255 - RNA, 18 nt, Human
agaucgguuaacaaauaa

SEQ ID NO: 3813256 - RNA, 16 nt, Human
agaucguuaguaucua

SEQ ID NO: 3813257 - RNA, 13 nt, Human
agaucuaaaaaua

SEQ ID NO: 3813258 - RNA, 11 nt, Human
agaucuaaaua

SEQ ID NO: 3813259 - RNA, 13 nt, Human
agaucucaggucc

SEQ ID NO: 3813260 - RNA, 18 nt, Human
agaucuccuggcaaaggc

SEQ ID NO: 3813261 - RNA, 22 nt, Human
agaucucgguuugccaaaauuc

SEQ ID NO: 3813262 - RNA, 14 nt, Human
agaucucuuucuaa

SEQ ID NO: 3813263 - RNA, 23 nt, Human
agaucugacaugauuccuuccug

SEQ ID NO: 3813264 - RNA, 21 nt, Human
agaucugcagggggugugucu

SEQ ID NO: 3813265 - RNA, 13 nt, Human
agaucuggaaccu

SEQ ID NO: 3813266 - RNA, 14 nt, Human
agaucuggaaccuc

SEQ ID NO: 3813267 - RNA, 16 nt, Human
agaucuggaaugugaa

SEQ ID NO: 3813268 - RNA, 18 nt, Human
agaucuguccucagccuu

SEQ ID NO: 3813269 - RNA, 13 nt, Human
agaucugugcccc

SEQ ID NO: 3813270 - RNA, 16 nt, Human
agaucugugccccaug

SEQ ID NO: 3813271 - RNA, 14 nt, Human
agaucuguuuugaa

SEQ ID NO: 3813272 - RNA, 23 nt, Human
agaucuguuuugugguuuggaau

SEQ ID NO: 3813273 - RNA, 13 nt, Human
agaucuuaaauuu

SEQ ID NO: 3813274 - RNA, 14 nt, Human
agaucuuaaauuuu

SEQ ID NO: 3813275 - RNA, 16 nt, Human
agaucuuaaauuuugu

SEQ ID NO: 3813276 - RNA, 13 nt, Human
agaucuuaauaua

SEQ ID NO: 3813277 - RNA, 15 nt, Human
agaucuuaauauaaa

SEQ ID NO: 3813278 - RNA, 19 nt, Human
agaucuuaauauaaauuca

SEQ ID NO: 3813279 - RNA, 17 nt, Human
agaucuucugaaaugaa

SEQ ID NO: 3813280 - RNA, 12 nt, Human
agaucuuucaga

SEQ ID NO: 3813281 - RNA, 16 nt, Human
agaucuuucagaaaua

SEQ ID NO: 3813282 - RNA, 19 nt, Human
agaucuuucagaaauauaa

SEQ ID NO: 3813283 - RNA, 20 nt, Human
agaucuuucagaaauauaac

SEQ ID NO: 3813284 - RNA, 13 nt, Human
agaucuuucagga

SEQ ID NO: 3813285 - RNA, 16 nt, Human
agaucuuucuccuuga

SEQ ID NO: 3813286 - RNA, 20 nt, Human
agaugaaaaagcauguacag

SEQ ID NO: 3813287 - RNA, 14 nt, Human
agaugaaacacaaa

SEQ ID NO: 3813288 - RNA, 23 nt, Human
agaugaaagcagggaauuucuau

SEQ ID NO: 3813289 - RNA, 20 nt, Human
agaugaaaucuuacagcugg

SEQ ID NO: 3813290 - RNA, 15 nt, Human
agaugaaauuccauu

SEQ ID NO: 3813291 - RNA, 21 nt, Human
agaugaacucugaacuuugga

SEQ ID NO: 3813292 - RNA, 21 nt, Human
agaugaacucuuucuggccug

SEQ ID NO: 3813293 - RNA, 17 nt, Human
agaugaagagugagagg

SEQ ID NO: 3813294 - RNA, 19 nt, Human
agaugaagagugagagggc

SEQ ID NO: 3813295 - RNA, 17 nt, Human
agaugaagcaaacacau

SEQ ID NO: 3813296 - RNA, 11 nt, Human
agaugaauaaa

SEQ ID NO: 3813297 - RNA, 16 nt, Human
agaugaauacaaacaa

SEQ ID NO: 3813298 - RNA, 18 nt, Human
agaugaaucaaugggaaa

SEQ ID NO: 3813299 - RNA, 11 nt, Human
agaugaauguc

SEQ ID NO: 3813300 - RNA, 11 nt, Human
agaugacaaaa

SEQ ID NO: 3813301 - RNA, 12 nt, Human
agaugacaaccu

SEQ ID NO: 3813302 - RNA, 14 nt, Human
agaugaccccuccc

SEQ ID NO: 3813303 - RNA, 23 nt, Human
agaugaccccugcccagaucagc

SEQ ID NO: 3813304 - RNA, 15 nt, Human
agaugaccucauuaa

SEQ ID NO: 3813305 - RNA, 14 nt, Human
agaugacugagucc

SEQ ID NO: 3813306 - RNA, 17 nt, Human
agaugagaauucagcug

SEQ ID NO: 3813307 - RNA, 20 nt, Human
agaugagcuuucuuuuuaaa

SEQ ID NO: 3813308 - RNA, 18 nt, Human
agaugaggaguaaaauuc

SEQ ID NO: 3813309 - RNA, 20 nt, Human
agaugaggaguaaaauucag

SEQ ID NO: 3813310 - RNA, 13 nt, Human
agaugaggccaga

SEQ ID NO: 3813311 - RNA, 19 nt, Human
agaugagggaugggccugg

SEQ ID NO: 3813312 - RNA, 20 nt, Human
agaugagggaugggccuggc

SEQ ID NO: 3813313 - RNA, 22 nt, Human
agaugaguuaucuaagaauaca

SEQ ID NO: 3813314 - RNA, 16 nt, Human
agaugauacauccaaa

SEQ ID NO: 3813315 - RNA, 20 nt, Human
agaugauacauccaaagcag

SEQ ID NO: 3813316 - RNA, 13 nt, Human
agaugaucauuug

SEQ ID NO: 3813317 - RNA, 18 nt, Human
agaugaugagaauuucua

SEQ ID NO: 3813318 - RNA, 20 nt, Human
agaugaugagaauuucuaaa

SEQ ID NO: 3813319 - RNA, 16 nt, Human
agaugauggaugccaa

SEQ ID NO: 3813320 - RNA, 18 nt, Human
agaugauuaaauaagauu

SEQ ID NO: 3813321 - RNA, 19 nt, Human
agaugauuaaauaagauuc

SEQ ID NO: 3813322 - RNA, 21 nt, Human
agaugauuaaauaagauucua

SEQ ID NO: 3813323 - RNA, 21 nt, Human
agaugauucuggcugaaaaag

SEQ ID NO: 3813324 - RNA, 16 nt, Human
agaugauuuccccccu

SEQ ID NO: 3813325 - RNA, 22 nt, Human
agaugauuuccccccuccgccu

SEQ ID NO: 3813326 - RNA, 15 nt, Human
agaugauuuuuugaa

SEQ ID NO: 3813327 - RNA, 17 nt, Human
agaugauuuuuugaaag

SEQ ID NO: 3813328 - RNA, 20 nt, Human
agaugcaaagaggcaagagg

SEQ ID NO: 3813329 - RNA, 13 nt, Human
agaugcaagauau

SEQ ID NO: 3813330 - RNA, 16 nt, Human
agaugcaagucucuug

SEQ ID NO: 3813331 - RNA, 20 nt, Human
agaugcaaugacucaggaca

SEQ ID NO: 3813332 - RNA, 20 nt, Human
agaugcaccaccaagccaag

SEQ ID NO: 3813333 - RNA, 21 nt, Human
agaugcaccaccaagccaagg

SEQ ID NO: 3813334 - RNA, 22 nt, Human
agaugcacuuugcuuuaauaua

SEQ ID NO: 3813335 - RNA, 15 nt, Human
agaugcagagagcca

SEQ ID NO: 3813336 - RNA, 21 nt, Human
agaugcagcaaaaugugaaug

SEQ ID NO: 3813337 - RNA, 13 nt, Human
agaugcagccggu

SEQ ID NO: 3813338 - RNA, 14 nt, Human
agaugcagcucuuc

SEQ ID NO: 3813339 - RNA, 13 nt, Human
agaugcagcugga

SEQ ID NO: 3813340 - RNA, 13 nt, Human
agaugcagggcag

SEQ ID NO: 3813341 - RNA, 15 nt, Human
agaugcagugccagg

SEQ ID NO: 3813342 - RNA, 18 nt, Human
agaugcaguucugaagaa

SEQ ID NO: 3813343 - RNA, 19 nt, Human
agaugcaguucugaagaag

SEQ ID NO: 3813344 - RNA, 20 nt, Human
agaugcaguucugaagaaga

SEQ ID NO: 3813345 - RNA, 21 nt, Human
agaugcaguucugaagaagau

SEQ ID NO: 3813346 - RNA, 15 nt, Human
agaugccacccuagc

SEQ ID NO: 3813347 - RNA, 12 nt, Human
agaugccagagc

SEQ ID NO: 3813348 - RNA, 19 nt, Human
agaugccauccucuuucuc

SEQ ID NO: 3813349 - RNA, 18 nt, Human
agaucaaaagguuaauaa

SEQ ID NO: 3813350 - RNA, 12 nt, Human
agaucaaagaug

SEQ ID NO: 3813351 - RNA, 13 nt, Human
agaucaaagauga

SEQ ID NO: 3813352 - RNA, 13 nt, Human
agaucaaauacuu

SEQ ID NO: 3813353 - RNA, 15 nt, Human
agaucaaauacuuua

SEQ ID NO: 3813354 - RNA, 19 nt, Human
agaucaaccccuucgcucc

SEQ ID NO: 3813355 - RNA, 16 nt, Human
agaucaacgccucacu

SEQ ID NO: 3813356 - RNA, 15 nt, Human
agaucaacucauguu

SEQ ID NO: 3813357 - RNA, 16 nt, Human
agaucaaggagaggag

SEQ ID NO: 3813358 - RNA, 20 nt, Human
agaucacauaacagaaugca

SEQ ID NO: 3813359 - RNA, 15 nt, Human
agaucaccagaauaa

SEQ ID NO: 3813360 - RNA, 22 nt, Human
agaucacgccacugcacuccag

SEQ ID NO: 3813361 - RNA, 15 nt, Human
agaucacgcuccccg

SEQ ID NO: 3813362 - RNA, 23 nt, Human
agaucacgcuccccgccuguucc

SEQ ID NO: 3813363 - RNA, 18 nt, Human
agaucacguuccuucccc

SEQ ID NO: 3813364 - RNA, 22 nt, Human
agaucacugcaaccucugccuc

SEQ ID NO: 3813365 - RNA, 19 nt, Human
agaucacuuucucaguuuu

SEQ ID NO: 3813366 - RNA, 23 nt, Human
agaucacuuucucaguuuucaua

SEQ ID NO: 3813367 - RNA, 14 nt, Human
agaucacuuugcuc

SEQ ID NO: 3813368 - RNA, 18 nt, Human
agaucagaugcuccaaga

SEQ ID NO: 3813369 - RNA, 14 nt, Human
agaucagccagaag

SEQ ID NO: 3813370 - RNA, 15 nt, Human
agaucagccugggca

SEQ ID NO: 3813371 - RNA, 13 nt, Human
agaucaguaaaga

SEQ ID NO: 3813372 - RNA, 21 nt, Human
agaucaguguaccauuugccu

SEQ ID NO: 3813373 - RNA, 18 nt, Human
agaucauagauuucugau

SEQ ID NO: 3813374 - RNA, 21 nt, Human
agaucauagauuucugauuuu

SEQ ID NO: 3813375 - RNA, 23 nt, Human
agaucauagauuucugauuuuau

SEQ ID NO: 3813376 - RNA, 16 nt, Human
agaucauaguuuuauu

SEQ ID NO: 3813377 - RNA, 22 nt, Human
agaugcuuuucugucucugccu

SEQ ID NO: 3813378 - RNA, 22 nt, Human
agauggaaaauucauuuuuuaa

SEQ ID NO: 3813379 - RNA, 22 nt, Human
agauggaacccuuuuggccccc

SEQ ID NO: 3813380 - RNA, 17 nt, Human
agauggaaccgcaggaa

SEQ ID NO: 3813381 - RNA, 21 nt, Human
agauggaaccgcaggaagcug

SEQ ID NO: 3813382 - RNA, 16 nt, Human
agauggaagcuuccag

SEQ ID NO: 3813383 - RNA, 15 nt, Human
agauggaaugcugug

SEQ ID NO: 3813384 - RNA, 23 nt, Human
agauggacaguucacacccugca

SEQ ID NO: 3813385 - RNA, 17 nt, Human
agauggaguucuugugc

SEQ ID NO: 3813386 - RNA, 16 nt, Human
agauggaguuucuaag

SEQ ID NO: 3813387 - RNA, 17 nt, Human
agauggaguuucuaagg

SEQ ID NO: 3813388 - RNA, 18 nt, Human
agauggaguuucuaaggu

SEQ ID NO: 3813389 - RNA, 17 nt, Human
agauggauaugaccagu

SEQ ID NO: 3813390 - RNA, 15 nt, Human
agauggauucucaga

SEQ ID NO: 3813391 - RNA, 18 nt, Human
agauggauucucagauau

SEQ ID NO: 3813392 - RNA, 20 nt, Human
agauggauuugccugugcca

SEQ ID NO: 3813393 - RNA, 16 nt, Human
agauggcaaaugacca

SEQ ID NO: 3813394 - RNA, 21 nt, Human
agauggcagcuuuuaaaagau

SEQ ID NO: 3813395 - RNA, 14 nt, Human
agauggcagucacu

SEQ ID NO: 3813396 - RNA, 15 nt, Human
agauggcccauccug

SEQ ID NO: 3813397 - RNA, 15 nt, Human
agauggccuuugcuu

SEQ ID NO: 3813398 - RNA, 23 nt, Human
agauggccuuugcuuaugaauau

SEQ ID NO: 3813399 - RNA, 13 nt, Human
agauggcucccag

SEQ ID NO: 3813400 - RNA, 14 nt, Human
agauggcucccagg

SEQ ID NO: 3813401 - RNA, 14 nt, Human
agauggcuccucuc

SEQ ID NO: 3813402 - RNA, 15 nt, Human
agauggcuccucuca

SEQ ID NO: 3813403 - RNA, 18 nt, Human
agaugggaaugaagcuug

SEQ ID NO: 3813404 - RNA, 23 nt, Human
agaugggaaugaagcuuguguau

SEQ ID NO: 3813405 - RNA, 16 nt, Human
agaugggacaggauca

SEQ ID NO: 3813406 - RNA, 21 nt, Human
agaugggagaaucacuugaac

SEQ ID NO: 3813407 - RNA, 13 nt, Human
agaugggagcucc

SEQ ID NO: 3813408 - RNA, 19 nt, Human
agaugggaggaaagagagc

SEQ ID NO: 3813409 - RNA, 16 nt, Human
agaugggcaucuuuug

SEQ ID NO: 3813410 - RNA, 17 nt, Human
agaugggcuucccaagg

SEQ ID NO: 3813411 - RNA, 20 nt, Human
agauggggauaaaaugacua

SEQ ID NO: 3813412 - RNA, 21 nt, Human
agaugggggaaagcaaagcac

SEQ ID NO: 3813413 - RNA, 23 nt, Human
agaugggggaaagcaaagcacag

SEQ ID NO: 3813414 - RNA, 24 nt, Human
agaugggggaaagcaaagcacaga

SEQ ID NO: 3813415 - RNA, 18 nt, Human
agaugggggccucuuuca

SEQ ID NO: 3813416 - RNA, 19 nt, Human
agaugggucuggcugagcu

SEQ ID NO: 3813417 - RNA, 21 nt, Human
agaugggucuggcugagcuga

SEQ ID NO: 3813418 - RNA, 22 nt, Human
agaugggucuggcugagcugaa

SEQ ID NO: 3813419 - RNA, 23 nt, Human
agaugggucuggcugagcugaac

SEQ ID NO: 3813420 - RNA, 17 nt, Human
agaugggugaaggcugg

SEQ ID NO: 3813421 - RNA, 13 nt, Human
agaugggugggga

SEQ ID NO: 3813422 - RNA, 22 nt, Human
agaugguacaaccuuuauucuu

SEQ ID NO: 3813423 - RNA, 19 nt, Human
agauggucauauuuaaaca

SEQ ID NO: 3813424 - RNA, 15 nt, Human
agauggugaaauuua

SEQ ID NO: 3813425 - RNA, 22 nt, Human
agauggugaagcauucucccca

SEQ ID NO: 3813426 - RNA, 14 nt, Human
agauggugcugaga

SEQ ID NO: 3813427 - RNA, 21 nt, Human
agaugguguggguguccugcc

SEQ ID NO: 3813428 - RNA, 17 nt, Human
agaugguuaaacauuuu

SEQ ID NO: 3813429 - RNA, 18 nt, Human
agaugguuacacuguuag

SEQ ID NO: 3813430 - RNA, 13 nt, Human
agauguaaaaaga

SEQ ID NO: 3813431 - RNA, 19 nt, Human
agauguaaaguuauucuug

SEQ ID NO: 3813432 - RNA, 21 nt, Human
agauguaagagcuuuacaaaa

SEQ ID NO: 3813433 - RNA, 19 nt, Human
agauguaauuuuguguaag

SEQ ID NO: 3813434 - RNA, 15 nt, Human
agauguacuauaaca

SEQ ID NO: 3813435 - RNA, 14 nt, Human
agauguagaggaga

SEQ ID NO: 3813436 - RNA, 18 nt, Human
agauguagauuuauuuca

SEQ ID NO: 3813437 - RNA, 15 nt, Human
agauguaggagggac

SEQ ID NO: 3813438 - RNA, 20 nt, Human
agauguaugcacacacauau

SEQ ID NO: 3813439 - RNA, 22 nt, Human
agauguauguacuucaugcugu

SEQ ID NO: 3813440 - RNA, 15 nt, Human
agaugucagacuggc

SEQ ID NO: 3813441 - RNA, 15 nt, Human
agaugucaucagagc

SEQ ID NO: 3813442 - RNA, 22 nt, Human
agaugucaucagagcuccucug

SEQ ID NO: 3813443 - RNA, 20 nt, Human
agaugucccuuucuuggcca

SEQ ID NO: 3813444 - RNA, 12 nt, Human
agaugucuauuc

SEQ ID NO: 3813445 - RNA, 15 nt, Human
agaugucuucguaca

SEQ ID NO: 3813446 - RNA, 19 nt, Human
agaugucuucugccuguua

SEQ ID NO: 3813447 - RNA, 13 nt, Human
agaugucuuuagg

SEQ ID NO: 3813448 - RNA, 15 nt, Human
agaugucuuuaggca

SEQ ID NO: 3813449 - RNA, 17 nt, Human
agaugugaacacaucag

SEQ ID NO: 3813450 - RNA, 11 nt, Human
agaugugaauu

SEQ ID NO: 3813451 - RNA, 14 nt, Human
agaugugaauuauu

SEQ ID NO: 3813452 - RNA, 16 nt, Human
agaugugaauuauuga

SEQ ID NO: 3813453 - RNA, 18 nt, Human
agaugugaauuauugaca

SEQ ID NO: 3813454 - RNA, 22 nt, Human
agaugugaauuauugacacuga

SEQ ID NO: 3813455 - RNA, 16 nt, Human
agaugugauauucuaa

SEQ ID NO: 3813456 - RNA, 17 nt, Human
agaugugauauucuaag

SEQ ID NO: 3813457 - RNA, 23 nt, Human
agaugugaugcuugauauuuucu

SEQ ID NO: 3813458 - RNA, 18 nt, Human
agaugugcaaaugcaagc

SEQ ID NO: 3813459 - RNA, 21 nt, Human
agaugugcacccaugggcucu

SEQ ID NO: 3813460 - RNA, 14 nt, Human
agaugugcagcaga

SEQ ID NO: 3813461 - RNA, 17 nt, Human
agaugugcagcagauug

SEQ ID NO: 3813462 - RNA, 21 nt, Human
agauguggccuuccauuuaua

SEQ ID NO: 3813463 - RNA, 20 nt, Human
agaugugggccaccauugca

SEQ ID NO: 3813464 - RNA, 20 nt, Human
agaugugguuaauuuugcau

SEQ ID NO: 3813465 - RNA, 17 nt, Human
agauguguaauuuuucu

SEQ ID NO: 3813466 - RNA, 16 nt, Human
agaugugucuauggcu

SEQ ID NO: 3813467 - RNA, 19 nt, Human
agauguguguugauacugu

SEQ ID NO: 3813468 - RNA, 20 nt, Human
agauguguguugauacuguu

SEQ ID NO: 3813469 - RNA, 15 nt, Human
agauguguucacaau

SEQ ID NO: 3813470 - RNA, 17 nt, Human
agauguuauauuuuucu

SEQ ID NO: 3813471 - RNA, 19 nt, Human
agauguuauauuuuucuua

SEQ ID NO: 3813472 - RNA, 15 nt, Human
agauguucacccaac

SEQ ID NO: 3813473 - RNA, 18 nt, Human
agauguucagucauuuuu

SEQ ID NO: 3813474 - RNA, 17 nt, Human
agauguucuaagucuuu

SEQ ID NO: 3813475 - RNA, 15 nt, Human
agauguucucuauca

SEQ ID NO: 3813476 - RNA, 18 nt, Human
agauguucucuaucauuu

SEQ ID NO: 3813477 - RNA, 21 nt, Human
agauguucucuaucauuuaau

SEQ ID NO: 3813478 - RNA, 20 nt, Human
agauguucucucccaggggc

SEQ ID NO: 3813479 - RNA, 15 nt, Human
agauguugaauucuu

SEQ ID NO: 3813480 - RNA, 14 nt, Human
agauguugccaugu

SEQ ID NO: 3813481 - RNA, 16 nt, Human
agauguuuaaaacacc

SEQ ID NO: 3813482 - RNA, 21 nt, Human
agauguuuauucuucuagagu

SEQ ID NO: 3813483 - RNA, 16 nt, Human
agauguuuauuucagg

SEQ ID NO: 3813484 - RNA, 21 nt, Human
agauguuuugguagauuaaau

SEQ ID NO: 3813485 - RNA, 23 nt, Human
agauguuuuggucaaguaguuug

SEQ ID NO: 3813486 - RNA, 18 nt, Human
agauguuuuuaaaaguuu

SEQ ID NO: 3813487 - RNA, 20 nt, Human
agauguuuuuaaaaguuuca

SEQ ID NO: 3813488 - RNA, 22 nt, Human
agauguuuuuaaaaguuucaau

SEQ ID NO: 3813489 - RNA, 14 nt, Human
agauuaaacagaug

SEQ ID NO: 3813490 - RNA, 17 nt, Human
agauuaaacagaugaug

SEQ ID NO: 3813491 - RNA, 12 nt, Human
agauuaaauaua

SEQ ID NO: 3813492 - RNA, 16 nt, Human
agauuaaauauagauu

SEQ ID NO: 3813493 - RNA, 13 nt, Human
agauuaagaaaua

SEQ ID NO: 3813494 - RNA, 20 nt, Human
agauuaauacucuauuuuua

SEQ ID NO: 3813495 - RNA, 15 nt, Human
agauuaauggcacug

SEQ ID NO: 3813496 - RNA, 15 nt, Human
agauuaauuccuuuc

SEQ ID NO: 3813497 - RNA, 14 nt, Human
agauuaccuccuga

SEQ ID NO: 3813498 - RNA, 13 nt, Human
agauuagaaaaau

SEQ ID NO: 3813499 - RNA, 23 nt, Human
agauuagaauucuguauagauua

SEQ ID NO: 3813500 - RNA, 15 nt, Human
agauuagaucuuuua

SEQ ID NO: 3813501 - RNA, 17 nt, Human
agauuagcucuggacca

SEQ ID NO: 3813502 - RNA, 18 nt, Human
agauuauaacuugucuaa

SEQ ID NO: 3813503 - RNA, 16 nt, Human
agauuauagauucuaa

SEQ ID NO: 3813504 - RNA, 20 nt, Human
agauuauaggcaccuaccac

SEQ ID NO: 3813505 - RNA, 23 nt, Human
agauuauauauauuuuuuucuga

SEQ ID NO: 3813506 - RNA, 18 nt, Human
agauuauaucaaaguauu

SEQ ID NO: 3813507 - RNA, 15 nt, Human
agauuaucuauuugu

SEQ ID NO: 3813508 - RNA, 22 nt, Human
acucuguccugaaggccugagg

SEQ ID NO: 3813509 - RNA, 19 nt, Human
acucugucucaaaaaaaca

SEQ ID NO: 3813510 - RNA, 15 nt, Human
acucugucucagucc

SEQ ID NO: 3813511 - RNA, 18 nt, Human
acucugucuucaccugau

SEQ ID NO: 3813512 - RNA, 17 nt, Human
acucugugccagagccu

SEQ ID NO: 3813513 - RNA, 18 nt, Human
acucugugccagagccug

SEQ ID NO: 3813514 - RNA, 21 nt, Human
acucugugccagagccugggg

SEQ ID NO: 3813515 - RNA, 12 nt, Human
acucugugccca

SEQ ID NO: 3813516 - RNA, 18 nt, Human
acucugugcccaugggca

SEQ ID NO: 3813517 - RNA, 24 nt, Human
acucugugcccaugggcacugcug

SEQ ID NO: 3813518 - RNA, 16 nt, Human
acucugugucugagug

SEQ ID NO: 3813519 - RNA, 22 nt, Human
acucugugucugaguggcuuca

SEQ ID NO: 3813520 - RNA, 15 nt, Human
acucuguuauuuaga

SEQ ID NO: 3813521 - RNA, 15 nt, Human
agauucaaagguucu

SEQ ID NO: 3813522 - RNA, 22 nt, Human
agauucaaugccccugaauuua

SEQ ID NO: 3813523 - RNA, 17 nt, Human
agauucaauuuucuuua

SEQ ID NO: 3813524 - RNA, 22 nt, Human
agauucacaccugacucugaaa

SEQ ID NO: 3813525 - RNA, 20 nt, Human
agauucaccuaagagauucu

SEQ ID NO: 3813526 - RNA, 20 nt, Human
agauucaccuguaaaacuuu

SEQ ID NO: 3813527 - RNA, 15 nt, Human
agauucacuuugaca

SEQ ID NO: 3813528 - RNA, 17 nt, Human
agauucacuuugacacu

SEQ ID NO: 3813529 - RNA, 14 nt, Human
agauucaggcauuu

SEQ ID NO: 3813530 - RNA, 20 nt, Human
agauucagguauguugccuu

SEQ ID NO: 3813531 - RNA, 18 nt, Human
agauucagucuugccuua

SEQ ID NO: 3813532 - RNA, 18 nt, Human
agauucaugauuuauaaa

SEQ ID NO: 3813533 - RNA, 21 nt, Human
agauucauuauuuuuccacuu

SEQ ID NO: 3813534 - RNA, 15 nt, Human
agauucauuuucuag

SEQ ID NO: 3813535 - RNA, 16 nt, Human
agauucauuuucuaga

SEQ ID NO: 3813536 - RNA, 22 nt, Human
agauuccauugguccaagauuc

SEQ ID NO: 3813537 - RNA, 12 nt, Human
agauucccagag

SEQ ID NO: 3813538 - RNA, 14 nt, Human
agauucccagagac

SEQ ID NO: 3813539 - RNA, 13 nt, Human
agauucccagagc

SEQ ID NO: 3813540 - RNA, 19 nt, Human
agauucccaggaguucugc

SEQ ID NO: 3813541 - RNA, 19 nt, Human
agauuccccauugccuccu

SEQ ID NO: 3813542 - RNA, 15 nt, Human
agauuccccuguguc

SEQ ID NO: 3813543 - RNA, 24 nt, Human
agauuccggauccuaagcaucuaa

SEQ ID NO: 3813544 - RNA, 14 nt, Human
agauuccuuucccu

SEQ ID NO: 3813545 - RNA, 16 nt, Human
agauuccuuucccuuu

SEQ ID NO: 3813546 - RNA, 17 nt, Human
agauuccuuuucuuguu

SEQ ID NO: 3813547 - RNA, 11 nt, Human
agauucuaaag

SEQ ID NO: 3813548 - RNA, 14 nt, Human
agauucuaaagauu

SEQ ID NO: 3813549 - RNA, 14 nt, Human
agauucuaaugaug

SEQ ID NO: 3813550 - RNA, 19 nt, Human
agauucuacauauucuuua

SEQ ID NO: 3813551 - RNA, 11 nt, Human
agauucuagau

SEQ ID NO: 3813552 - RNA, 14 nt, Human
agauucuagaugau

SEQ ID NO: 3813553 - RNA, 15 nt, Human
agauucuauaguucu

SEQ ID NO: 3813554 - RNA, 16 nt, Human
agauucuauaguucua

SEQ ID NO: 3813555 - RNA, 18 nt, Human
agauucuauaguucuaga

SEQ ID NO: 3813556 - RNA, 21 nt, Human
agauucuauaguucuagacau

SEQ ID NO: 3813557 - RNA, 18 nt, Human
agauucuauguuaauauu

SEQ ID NO: 3813558 - RNA, 19 nt, Human
agauucucauaacuugaga

SEQ ID NO: 3813559 - RNA, 20 nt, Human
agauucucauaacuugagac

SEQ ID NO: 3813560 - RNA, 19 nt, Human
agauucucugugucuaaga

SEQ ID NO: 3813561 - RNA, 24 nt, Human
agauucugauuugccacugauauu

SEQ ID NO: 3813562 - RNA, 23 nt, Human
agauucuucccauucuccauuug

SEQ ID NO: 3813563 - RNA, 13 nt, Human
agauucuucugug

SEQ ID NO: 3813564 - RNA, 22 nt, Human
agauucuuguauuuauuacaac

SEQ ID NO: 3813565 - RNA, 21 nt, Human
agauucuuucaguucuuugga

SEQ ID NO: 3813566 - RNA, 12 nt, Human
agauucuuuccc

SEQ ID NO: 3813567 - RNA, 15 nt, Human
agauucuuuccugag

SEQ ID NO: 3813568 - RNA, 18 nt, Human
agauucuuuccugaggcu

SEQ ID NO: 3813569 - RNA, 20 nt, Human
agauucuuuuaaauuagaaa

SEQ ID NO: 3813570 - RNA, 15 nt, Human
agauucuuuuucuga

SEQ ID NO: 3813571 - RNA, 20 nt, Human
agauugaaccugaauauugc

SEQ ID NO: 3813572 - RNA, 23 nt, Human
agauugaccuggauggggcaggc

SEQ ID NO: 3813573 - RNA, 17 nt, Human
agauugacgacaagugc

SEQ ID NO: 3813574 - RNA, 12 nt, Human
agauugagaaau

SEQ ID NO: 3813575 - RNA, 14 nt, Human
agauugagaaaugu

SEQ ID NO: 3813576 - RNA, 17 nt, Human
agauugagaaaugugua

SEQ ID NO: 3813577 - RNA, 19 nt, Human
agauugagaaggagagaaa

SEQ ID NO: 3813578 - RNA, 22 nt, Human
agauugagaaguuuuguacaga

SEQ ID NO: 3813579 - RNA, 18 nt, Human
agauugaguaagauuuac

SEQ ID NO: 3813580 - RNA, 15 nt, Human
agauugauuguauug

SEQ ID NO: 3813581 - RNA, 17 nt, Human
agauugcaacaggcugg

SEQ ID NO: 3813582 - RNA, 19 nt, Human
agauugcaacaggcugggc

SEQ ID NO: 3813583 - RNA, 13 nt, Human
agauugcauguga

SEQ ID NO: 3813584 - RNA, 16 nt, Human
agauugcaugugacuc

SEQ ID NO: 3813585 - RNA, 22 nt, Human
agauugcaugugacucugaagc

SEQ ID NO: 3813586 - RNA, 19 nt, Human
agauugcuaauugcuguug

SEQ ID NO: 3813587 - RNA, 14 nt, Human
agauugcugaaauu

SEQ ID NO: 3813588 - RNA, 16 nt, Human
agauugcuuaaaauag

SEQ ID NO: 3813589 - RNA, 12 nt, Human
agauugcuucuc

SEQ ID NO: 3813590 - RNA, 14 nt, Human
agauuggaaggaga

SEQ ID NO: 3813591 - RNA, 15 nt, Human
agauuggaaggagac

SEQ ID NO: 3813592 - RNA, 20 nt, Human
agauuggaaggagacacaga

SEQ ID NO: 3813593 - RNA, 23 nt, Human
agauuggaaggagacacagaugu

SEQ ID NO: 3813594 - RNA, 22 nt, Human
agauuggaucaaguauuacuaa

SEQ ID NO: 3813595 - RNA, 15 nt, Human
agauuggauuuuaug

SEQ ID NO: 3813596 - RNA, 17 nt, Human
agauuggauuuuauguu

SEQ ID NO: 3813597 - RNA, 23 nt, Human
agauuggcauggcuuuauuuguu

SEQ ID NO: 3813598 - RNA, 22 nt, Human
agauuggcucacacugagaaug

SEQ ID NO: 3813599 - RNA, 23 nt, Human
agauuggcucacacugagaaugu

SEQ ID NO: 3813600 - RNA, 12 nt, Human
agauugggucua

SEQ ID NO: 3813601 - RNA, 14 nt, Human
agauugguguuuuu

SEQ ID NO: 3813602 - RNA, 13 nt, Human
agauuguccuuuu

SEQ ID NO: 3813603 - RNA, 14 nt, Human
agauugugaauaau

SEQ ID NO: 3813604 - RNA, 20 nt, Human
agauugugaucccuugagau

SEQ ID NO: 3813605 - RNA, 21 nt, Human
agauugugccccugcacucca

SEQ ID NO: 3813606 - RNA, 16 nt, Human
agauuguggaauguug

SEQ ID NO: 3813607 - RNA, 21 nt, Human
agauuguguaacaauuuuaau

SEQ ID NO: 3813608 - RNA, 14 nt, Human
agauuguuaaaaua

SEQ ID NO: 3813609 - RNA, 15 nt, Human
agauuguuauuaaau

SEQ ID NO: 3813610 - RNA, 16 nt, Human
agauuguuauuaaaug

SEQ ID NO: 3813611 - RNA, 22 nt, Human
agauuguuguuugccauacuuu

SEQ ID NO: 3813612 - RNA, 14 nt, Human
agauuguuuaucua

SEQ ID NO: 3813613 - RNA, 16 nt, Human
agauuguuuaucuaga

SEQ ID NO: 3813614 - RNA, 18 nt, Human
agauuguuuaucuagaug

SEQ ID NO: 3813615 - RNA, 21 nt, Human
agauuguuuaucuagauguaa

SEQ ID NO: 3813616 - RNA, 19 nt, Human
agauuguuuccucuuccaa

SEQ ID NO: 3813617 - RNA, 11 nt, Human
agauuuaagca

SEQ ID NO: 3813618 - RNA, 23 nt, Human
agauuuaauauaaaguuuuauau

SEQ ID NO: 3813619 - RNA, 13 nt, Human
agauuuaauuugc

SEQ ID NO: 3813620 - RNA, 18 nt, Human
agauuuagugaaagcuag

SEQ ID NO: 3813621 - RNA, 15 nt, Human
agauuuauauaaaug

SEQ ID NO: 3813622 - RNA, 17 nt, Human
agauuuauauaaaugua

SEQ ID NO: 3813623 - RNA, 13 nt, Human
agauuuaucaaau

SEQ ID NO: 3813624 - RNA, 15 nt, Human
agauuuaucaaauca

SEQ ID NO: 3813625 - RNA, 17 nt, Human
agauuuauuaaagaaaa

SEQ ID NO: 3813626 - RNA, 18 nt, Human
agauuuauuaaagaaaaa

SEQ ID NO: 3813627 - RNA, 17 nt, Human
agauuuauuccuuuguu

SEQ ID NO: 3813628 - RNA, 13 nt, Human
agauuucacucuc

SEQ ID NO: 3813629 - RNA, 14 nt, Human
agauuucacucucc

SEQ ID NO: 3813630 - RNA, 15 nt, Human
agauuucagucuuuu

SEQ ID NO: 3813631 - RNA, 12 nt, Human
agauuucauagu

SEQ ID NO: 3813632 - RNA, 18 nt, Human
agauuucauaguucagaa

SEQ ID NO: 3813633 - RNA, 15 nt, Human
agauuucaucugcuc

SEQ ID NO: 3813634 - RNA, 21 nt, Human
agauuucaucugcucuccuuc

SEQ ID NO: 3813635 - RNA, 23 nt, Human
agauuucaucugcucuccuuccu

SEQ ID NO: 3813636 - RNA, 18 nt, Human
agauuuccauauaaauau

SEQ ID NO: 3813637 - RNA, 15 nt, Human
agauuucuaaauaaa

SEQ ID NO: 3813638 - RNA, 22 nt, Human
agauuucucagaagucuuucag

SEQ ID NO: 3813639 - RNA, 16 nt, Human
agauuucucauugacu

SEQ ID NO: 3813640 - RNA, 18 nt, Human
agauuucugauuuuaugu

SEQ ID NO: 3813641 - RNA, 19 nt, Human
agauuucugauuuuaugua

SEQ ID NO: 3813642 - RNA, 22 nt, Human
agauuucugauuuuauguaaaa

SEQ ID NO: 3813643 - RNA, 11 nt, Human
agauuucuguu

SEQ ID NO: 3813644 - RNA, 15 nt, Human
agauuugaccuccuc

SEQ ID NO: 3813645 - RNA, 18 nt, Human
agauuugccauagaguac

SEQ ID NO: 3813646 - RNA, 14 nt, Human
agauuugcccauuu

SEQ ID NO: 3813647 - RNA, 16 nt, Human
agauuugcccauuuac

SEQ ID NO: 3813648 - RNA, 12 nt, Human
agauuuggaaua

SEQ ID NO: 3813649 - RNA, 17 nt, Human
agauuuggcuugacaaa

SEQ ID NO: 3813650 - RNA, 14 nt, Human
agauuugggcugga

SEQ ID NO: 3813651 - RNA, 20 nt, Human
agauuuggugaauuugaauc

SEQ ID NO: 3813652 - RNA, 21 nt, Human
agauuuguacuacaguucuuu

SEQ ID NO: 3813653 - RNA, 15 nt, Human
agauuugucuaauug

SEQ ID NO: 3813654 - RNA, 22 nt, Human
agauuugugaacucagccaagc

SEQ ID NO: 3813655 - RNA, 12 nt, Human
agauuuuaaaga

SEQ ID NO: 3813656 - RNA, 19 nt, Human
agauuuuaaucaaguugaa

SEQ ID NO: 3813657 - RNA, 16 nt, Human
agauuuuacaugaagu

SEQ ID NO: 3813658 - RNA, 19 nt, Human
agauuuuacaugaaguauu

SEQ ID NO: 3813659 - RNA, 19 nt, Human
agauuuuaggaaaugaaug

SEQ ID NO: 3813660 - RNA, 20 nt, Human
agauuuuaggaaaugaaugu

SEQ ID NO: 3813661 - RNA, 15 nt, Human
agauuuuaguuuuau

SEQ ID NO: 3813662 - RNA, 20 nt, Human
agauuuuaguuuuauuuucu

SEQ ID NO: 3813663 - RNA, 23 nt, Human
agauuuuaguuuuauuuucuaaa

SEQ ID NO: 3813664 - RNA, 16 nt, Human
agauuuuauuauguaa

SEQ ID NO: 3813665 - RNA, 20 nt, Human
agauuuuauuauguaaaucc

SEQ ID NO: 3813666 - RNA, 22 nt, Human
agcaguggcugguccagggcua

SEQ ID NO: 3813667 - RNA, 14 nt, Human
agcagugggccugg

SEQ ID NO: 3813668 - RNA, 18 nt, Human
agcagugggccuggccag

SEQ ID NO: 3813669 - RNA, 22 nt, Human
agcagugggucaugaugcucuu

SEQ ID NO: 3813670 - RNA, 15 nt, Human
agcagugucaucaga

SEQ ID NO: 3813671 - RNA, 20 nt, Human
agcagugucaucagaagaua

SEQ ID NO: 3813672 - RNA, 16 nt, Human
agcagugucuuccaua

SEQ ID NO: 3813673 - RNA, 19 nt, Human
agcagugugaaguacaaua

SEQ ID NO: 3813674 - RNA, 15 nt, Human
agcagugugaggcca

SEQ ID NO: 3813675 - RNA, 17 nt, Human
agcaguguuagcuuagu

SEQ ID NO: 3813676 - RNA, 18 nt, Human
agcaguucagagcugccc

SEQ ID NO: 3813677 - RNA, 13 nt, Human
agcaguucugcaa

SEQ ID NO: 3813678 - RNA, 23 nt, Human
agcaguugaaaagacuccaaaga

SEQ ID NO: 3813679 - RNA, 17 nt, Human
agcaguugcugguaaaa

SEQ ID NO: 3813680 - RNA, 20 nt, Human
agcaguugcugguaaaauga

SEQ ID NO: 3813681 - RNA, 21 nt, Human
agcaguugcugguaaaaugaa

SEQ ID NO: 3813682 - RNA, 21 nt, Human
agcaguuucaauaaaguuuga

SEQ ID NO: 3813683 - RNA, 14 nt, Human
agcaguuucaggua

SEQ ID NO: 3813684 - RNA, 13 nt, Human
agcauaaaaacau

SEQ ID NO: 3813685 - RNA, 21 nt, Human
agcauaaaaacauuuuaaaaa

SEQ ID NO: 3813686 - RNA, 18 nt, Human
agcauaaguauacaguuc

SEQ ID NO: 3813687 - RNA, 17 nt, Human
agcauaaguuucuggga

SEQ ID NO: 3813688 - RNA, 23 nt, Human
agcauaaguuucugggaccucag

SEQ ID NO: 3813689 - RNA, 21 nt, Human
agcauaauugaaaguucugaa

SEQ ID NO: 3813690 - RNA, 17 nt, Human
agcauaauuuaaaaaua

SEQ ID NO: 3813691 - RNA, 18 nt, Human
agcauaauuuaaaaauau

SEQ ID NO: 3813692 - RNA, 20 nt, Human
agcauaauuuaaaaauauau

SEQ ID NO: 3813693 - RNA, 12 nt, Human
agcauacaacuu

SEQ ID NO: 3813694 - RNA, 19 nt, Human
agcauaccaacacgagcag

SEQ ID NO: 3813695 - RNA, 22 nt, Human
agcauaccaacacgagcaggcu

SEQ ID NO: 3813696 - RNA, 19 nt, Human
agcauaccuuuauugugau

SEQ ID NO: 3813697 - RNA, 18 nt, Human
agcauacguacacauuuu

SEQ ID NO: 3813698 - RNA, 14 nt, Human
agcauacuuuguaa

SEQ ID NO: 3813699 - RNA, 20 nt, Human
agcauagaaaccacuagaaa

SEQ ID NO: 3813700 - RNA, 16 nt, Human
agcauagcuuauuauu

SEQ ID NO: 3813701 - RNA, 14 nt, Human
agcauauaaaaugg

SEQ ID NO: 3813702 - RNA, 16 nt, Human
agcauaucugccuuua

SEQ ID NO: 3813703 - RNA, 20 nt, Human
agcauaucugccuuuauugu

SEQ ID NO: 3813704 - RNA, 22 nt, Human
agcauaucugccuuuauugugu

SEQ ID NO: 3813705 - RNA, 19 nt, Human
agcauaugacaaauguuuc

SEQ ID NO: 3813706 - RNA, 20 nt, Human
agcauaugacaaauguuucu

SEQ ID NO: 3813707 - RNA, 21 nt, Human
agcauaugacaaauguuucua

SEQ ID NO: 3813708 - RNA, 16 nt, Human
agcauaugaguuucau

SEQ ID NO: 3813709 - RNA, 20 nt, Human
agcauauggguuagauguug

SEQ ID NO: 3813710 - RNA, 14 nt, Human
agcauauucaggaa

SEQ ID NO: 3813711 - RNA, 16 nt, Human
agcauauucaggaagc

SEQ ID NO: 3813712 - RNA, 19 nt, Human
agcauauucaggaagcuca

SEQ ID NO: 3813713 - RNA, 17 nt, Human
agcaucaaaauauuuca

SEQ ID NO: 3813714 - RNA, 14 nt, Human
agcaucaaacucuu

SEQ ID NO: 3813715 - RNA, 15 nt, Human
agcaucacaaaugau

SEQ ID NO: 3813716 - RNA, 18 nt, Human
acuggaaaacagaacacu

SEQ ID NO: 3813717 - RNA, 20 nt, Human
acuggaaaggggagagccug

SEQ ID NO: 3813718 - RNA, 16 nt, Human
acuggaacacuagaca

SEQ ID NO: 3813719 - RNA, 16 nt, Human
acuggaaccagggaga

SEQ ID NO: 3813720 - RNA, 13 nt, Human
acuggaacccuuu

SEQ ID NO: 3813721 - RNA, 18 nt, Human
acuggaacggugaaggug

SEQ ID NO: 3813722 - RNA, 21 nt, Human
acuggaacggugaaggugaca

SEQ ID NO: 3813723 - RNA, 18 nt, Human
acuggaacuugaacugau

SEQ ID NO: 3813724 - RNA, 16 nt, Human
acuggaagcacagcuu

SEQ ID NO: 3813725 - RNA, 20 nt, Human
acuggaagcuaauuugcauu

SEQ ID NO: 3813726 - RNA, 20 nt, Human
acuggaaguucauaccuaag

SEQ ID NO: 3813727 - RNA, 23 nt, Human
acuggaauaagaagcaaauaaau

SEQ ID NO: 3813728 - RNA, 21 nt, Human
acuggaaucagcucaggacug

SEQ ID NO: 3813729 - RNA, 16 nt, Human
acuggaauccuuucag

SEQ ID NO: 3813730 - RNA, 17 nt, Human
acuggaauccuuucagc

SEQ ID NO: 3813731 - RNA, 14 nt, Human
acuggaauuuuuau

SEQ ID NO: 3813732 - RNA, 19 nt, Human
acuggaauuuuuauuaugc

SEQ ID NO: 3813733 - RNA, 21 nt, Human
acuggaauuuuuauuaugcau

SEQ ID NO: 3813734 - RNA, 23 nt, Human
acuggaauuuuuauuaugcauaa

SEQ ID NO: 3813735 - RNA, 14 nt, Human
acuggacaaagaau

SEQ ID NO: 3813736 - RNA, 12 nt, Human
acuggacagcuu

SEQ ID NO: 3813737 - RNA, 18 nt, Human
acuggacagucacugcca

SEQ ID NO: 3813738 - RNA, 21 nt, Human
acuggaccacugggcaaugau

SEQ ID NO: 3813739 - RNA, 13 nt, Human
acuggaccccagc

SEQ ID NO: 3813740 - RNA, 16 nt, Human
acuggacccuguugcu

SEQ ID NO: 3813741 - RNA, 20 nt, Human
acuggacccuguugcuaagc

SEQ ID NO: 3813742 - RNA, 14 nt, Human
acuggacucaggau

SEQ ID NO: 3813743 - RNA, 16 nt, Human
acuggacuccggcccu

SEQ ID NO: 3813744 - RNA, 22 nt, Human
acuggacucuucaaaaacuguu

SEQ ID NO: 3813745 - RNA, 13 nt, Human
acuggagacugug

SEQ ID NO: 3813746 - RNA, 15 nt, Human
acuggagccaugggc

SEQ ID NO: 3813747 - RNA, 12 nt, Human
acuggagcccag

SEQ ID NO: 3813748 - RNA, 13 nt, Human
acuggagcccagg

SEQ ID NO: 3813749 - RNA, 18 nt, Human
acuggaggaccacacuca

SEQ ID NO: 3813750 - RNA, 18 nt, Human
acuggaggagagaagaau

SEQ ID NO: 3813751 - RNA, 15 nt, Human
acuggaggagcuggg

SEQ ID NO: 3813752 - RNA, 18 nt, Human
acuggaggccccuggagc

SEQ ID NO: 3813753 - RNA, 22 nt, Human
acuggaggccccuggagccaga

SEQ ID NO: 3813754 - RNA, 22 nt, Human
acuggaggggacgcugguagag

SEQ ID NO: 3813755 - RNA, 16 nt, Human
acuggagguugaagcc

SEQ ID NO: 3813756 - RNA, 17 nt, Human
acuggagguugaagcca

SEQ ID NO: 3813757 - RNA, 13 nt, Human
acuggagugcagg

SEQ ID NO: 3813758 - RNA, 18 nt, Human
acuggagugcagggagga

SEQ ID NO: 3813759 - RNA, 22 nt, Human
acuggagugugcgugguggucc

SEQ ID NO: 3813760 - RNA, 15 nt, Human
acuggaguuacauua

SEQ ID NO: 3813761 - RNA, 13 nt, Human
acuggaguucuau

SEQ ID NO: 3813762 - RNA, 18 nt, Human
acuggauaaauuguuuag

SEQ ID NO: 3813763 - RNA, 19 nt, Human
acuggauaaauuguuuagu

SEQ ID NO: 3813764 - RNA, 17 nt, Human
acuggaugcagaaacag

SEQ ID NO: 3813765 - RNA, 15 nt, Human
acuggauuaaacuua

SEQ ID NO: 3813766 - RNA, 14 nt, Human
acuggauucuuauu

SEQ ID NO: 3813767 - RNA, 16 nt, Human
acuggauuguacuuug

SEQ ID NO: 3813768 - RNA, 12 nt, Human
acuggcaaaagg

SEQ ID NO: 3813769 - RNA, 23 nt, Human
acuggcaaaauaguucugcaggu

SEQ ID NO: 3813770 - RNA, 17 nt, Human
acuggcaaacagggccu

SEQ ID NO: 3813771 - RNA, 19 nt, Human
acuggcaaacagggccucu

SEQ ID NO: 3813772 - RNA, 20 nt, Human
acuggcaaacagggccucug

SEQ ID NO: 3813773 - RNA, 15 nt, Human
acuggcaaagcagaa

SEQ ID NO: 3813774 - RNA, 14 nt, Human
acuggcaagaaaag

SEQ ID NO: 3813775 - RNA, 19 nt, Human
acuggcacaguuuucugag

SEQ ID NO: 3813776 - RNA, 20 nt, Human
acuggcacaguuuucugaga

SEQ ID NO: 3813777 - RNA, 21 nt, Human
acuggcacaguuuucugagaa

SEQ ID NO: 3813778 - RNA, 14 nt, Human
acuggcagcaucuu

SEQ ID NO: 3813779 - RNA, 22 nt, Human
acuggcaguuuuccauugguuu

SEQ ID NO: 3813780 - RNA, 10 nt, Human
acuggcaugc

SEQ ID NO: 3813781 - RNA, 21 nt, Human
acuggcauugucccugugccu

SEQ ID NO: 3813782 - RNA, 13 nt, Human
acuggcauuuuau

SEQ ID NO: 3813783 - RNA, 19 nt, Human
acuggccaccaggcuggcg

SEQ ID NO: 3813784 - RNA, 23 nt, Human
acuggccaccaggcuggcgcagc

SEQ ID NO: 3813785 - RNA, 15 nt, Human
acuggccauggccug

SEQ ID NO: 3813786 - RNA, 22 nt, Human
acuggccauuugccaauuuucc

SEQ ID NO: 3813787 - RNA, 21 nt, Human
acuggccccuacuuuguggca

SEQ ID NO: 3813788 - RNA, 21 nt, Human
acuggccccuagaaucagccu

SEQ ID NO: 3813789 - RNA, 12 nt, Human
acuggccccugg

SEQ ID NO: 3813790 - RNA, 14 nt, Human
acuggccccugggu

SEQ ID NO: 3813791 - RNA, 17 nt, Human
acuggccccugggucag

SEQ ID NO: 3813792 - RNA, 15 nt, Human
acuggcccucuucuu

SEQ ID NO: 3813793 - RNA, 15 nt, Human
acuggccucaaagca

SEQ ID NO: 3813794 - RNA, 13 nt, Human
acuggccugacuu

SEQ ID NO: 3813795 - RNA, 14 nt, Human
acuggccugaggag

SEQ ID NO: 3813796 - RNA, 16 nt, Human
acuggccugaggagca

SEQ ID NO: 3813797 - RNA, 19 nt, Human
acuggccugaggagcagca

SEQ ID NO: 3813798 - RNA, 15 nt, Human
acuggcggggggccc

SEQ ID NO: 3813799 - RNA, 23 nt, Human
acuggcguagaaguuuuuguacu

SEQ ID NO: 3813800 - RNA, 16 nt, Human
acuggcuccucugugg

SEQ ID NO: 3813801 - RNA, 19 nt, Human
acuggcuccucuguggugu

SEQ ID NO: 3813802 - RNA, 15 nt, Human
acuggcucuccaagu

SEQ ID NO: 3813803 - RNA, 21 nt, Human
acuggcucuccaagugccaga

SEQ ID NO: 3813804 - RNA, 22 nt, Human
acuggcugcaaaggguaucagg

SEQ ID NO: 3813805 - RNA, 20 nt, Human
acuggcugccagcuauuuuu

SEQ ID NO: 3813806 - RNA, 16 nt, Human
acuggcuggcugcagu

SEQ ID NO: 3813807 - RNA, 17 nt, Human
acuggcuggcugcagug

SEQ ID NO: 3813808 - RNA, 12 nt, Human
acuggcugguga

SEQ ID NO: 3813809 - RNA, 17 nt, Human
acuggcugucaguauga

SEQ ID NO: 3813810 - RNA, 22 nt, Human
agcagguuaaauguuuuguaaa

SEQ ID NO: 3813811 - RNA, 13 nt, Human
agcagguuagaga

SEQ ID NO: 3813812 - RNA, 18 nt, Human
agcagguucccaagcuca

SEQ ID NO: 3813813 - RNA, 14 nt, Human
agcagguucuuguu

SEQ ID NO: 3813814 - RNA, 21 nt, Human
agcagguugaggggcuccugg

SEQ ID NO: 3813815 - RNA, 15 nt, Human
agcaguaaaaacugu

SEQ ID NO: 3813816 - RNA, 19 nt, Human
agcaguaaauuugcuagca

SEQ ID NO: 3813817 - RNA, 15 nt, Human
agcaguacaauaaaa

SEQ ID NO: 3813818 - RNA, 11 nt, Human
agcaguacaug

SEQ ID NO: 3813819 - RNA, 15 nt, Human
agcaguacaugggaa

SEQ ID NO: 3813820 - RNA, 13 nt, Human
agcaguagacauu

SEQ ID NO: 3813821 - RNA, 20 nt, Human
agcaguagacauuuuaacaa

SEQ ID NO: 3813822 - RNA, 22 nt, Human
agcaguagacauuuuaacaaga

SEQ ID NO: 3813823 - RNA, 15 nt, Human
agcaguccaugcaug

SEQ ID NO: 3813824 - RNA, 15 nt, Human
agcaguccccuuccc

SEQ ID NO: 3813825 - RNA, 15 nt, Human
agcagucccugagac

SEQ ID NO: 3813826 - RNA, 22 nt, Human
agcaguccugccucagccuccg

SEQ ID NO: 3813827 - RNA, 15 nt, Human
agcaguccuuggccu

SEQ ID NO: 3813828 - RNA, 16 nt, Human
agcaguccuuggccug

SEQ ID NO: 3813829 - RNA, 22 nt, Human
agcaguccuuggccugcuaagg

SEQ ID NO: 3813830 - RNA, 14 nt, Human
agcagucucugccu

SEQ ID NO: 3813831 - RNA, 16 nt, Human
agcagucucugccuug

SEQ ID NO: 3813832 - RNA, 17 nt, Human
agcagucucugccuugc

SEQ ID NO: 3813833 - RNA, 15 nt, Human
agcagucugccugga

SEQ ID NO: 3813834 - RNA, 19 nt, Human
agcagucuuaugcuuccag

SEQ ID NO: 3813835 - RNA, 22 nt, Human
agcagucuuaugcuuccagaaa

SEQ ID NO: 3813836 - RNA, 20 nt, Human
agcagugaaugauucagugu

SEQ ID NO: 3813837 - RNA, 21 nt, Human
agcagugaaugauucaguguu

SEQ ID NO: 3813838 - RNA, 22 nt, Human
agcagugaaugauucaguguua

SEQ ID NO: 3813839 - RNA, 23 nt, Human
agcagugaguuacagcgagaggc

SEQ ID NO: 3813840 - RNA, 19 nt, Human
agcagugauugucuuaaua

SEQ ID NO: 3813841 - RNA, 13 nt, Human
agcagugcaugcu

SEQ ID NO: 3813842 - RNA, 16 nt, Human
agcagugcaugcuguc

SEQ ID NO: 3813843 - RNA, 18 nt, Human
agcagugcaugcuguccc

SEQ ID NO: 3813844 - RNA, 19 nt, Human
agcagugcaugcugucccu

SEQ ID NO: 3813845 - RNA, 12 nt, Human
agcagugcccag

SEQ ID NO: 3813846 - RNA, 20 nt, Human
agcagugcccagguggcugu

SEQ ID NO: 3813847 - RNA, 20 nt, Human
agcagugccuuccauaauua

SEQ ID NO: 3813848 - RNA, 15 nt, Human
agcaguggacaccag

SEQ ID NO: 3813849 - RNA, 19 nt, Human
agcaguggccuuauugcau

SEQ ID NO: 3813850 - RNA, 19 nt, Human
agcaguggcugguccaggg

SEQ ID NO: 3813851 - RNA, 15 nt, Human
agcagugucuuccau

SEQ ID NO: 3813852 - RNA, 15 nt, Human
agcagugugucuccu

SEQ ID NO: 3813853 - RNA, 17 nt, Human
agcagugugucuccugc

SEQ ID NO: 3813854 - RNA, 21 nt, Human
agcagugugucuccugcaugc

SEQ ID NO: 3813855 - RNA, 22 nt, Human
agcagugugucuccugcaugca

SEQ ID NO: 3813856 - RNA, 21 nt, Human
agcaguguuccccaucugggu

SEQ ID NO: 3813857 - RNA, 15 nt, Human
agcaguuaacuuuaa

SEQ ID NO: 3813858 - RNA, 21 nt, Human
agcaguuacaaaaaccuuccc

SEQ ID NO: 3813859 - RNA, 21 nt, Human
agcaguuaugugaccucacgu

SEQ ID NO: 3813860 - RNA, 22 nt, Human
agcaguucaauaauccaugaaa

SEQ ID NO: 3813861 - RNA, 15 nt, Human
agcaguucagagcug

SEQ ID NO: 3813862 - RNA, 16 nt, Human
agcaguucagagcugc

SEQ ID NO: 3813863 - RNA, 17 nt, Human
agcaguucugcagagga

SEQ ID NO: 3813864 - RNA, 20 nt, Human
agcaguugagacaagaaaau

SEQ ID NO: 3813865 - RNA, 22 nt, Human
agcaguugagacaagaaaauaa

SEQ ID NO: 3813866 - RNA, 16 nt, Human
agcaguugcugguaaa

SEQ ID NO: 3813867 - RNA, 23 nt, Human
agcaguugcugguaaaaugaaga

SEQ ID NO: 3813868 - RNA, 20 nt, Human
agcaguuucuguccugcugg

SEQ ID NO: 3813869 - RNA, 23 nt, Human
agcaguuugguuucuagcaugaa

SEQ ID NO: 3813870 - RNA, 13 nt, Human
agcaguuuucaag

SEQ ID NO: 3813871 - RNA, 18 nt, Human
agcaguuuucaagucaaa

SEQ ID NO: 3813872 - RNA, 22 nt, Human
agcaguuuucaagucaaauuaa

SEQ ID NO: 3813873 - RNA, 23 nt, Human
agcauaaaaauuagccaagugug

SEQ ID NO: 3813874 - RNA, 14 nt, Human
agcauaaagaauuu

SEQ ID NO: 3813875 - RNA, 21 nt, Human
acugguguuaucaccgugggc

SEQ ID NO: 3813876 - RNA, 14 nt, Human
acugguuauuuaaa

SEQ ID NO: 3813877 - RNA, 18 nt, Human
acugguuccauggccucu

SEQ ID NO: 3813878 - RNA, 16 nt, Human
acugguuccuucuucc

SEQ ID NO: 3813879 - RNA, 14 nt, Human
acugguucucaaug

SEQ ID NO: 3813880 - RNA, 17 nt, Human
acugguugcauggaaau

SEQ ID NO: 3813881 - RNA, 22 nt, Human
acugguuggcucccgcggugcc

SEQ ID NO: 3813882 - RNA, 20 nt, Human
acugguuguugccaaacagc

SEQ ID NO: 3813883 - RNA, 17 nt, Human
acugguuuacaggcccu

SEQ ID NO: 3813884 - RNA, 14 nt, Human
acugguuuucugcc

SEQ ID NO: 3813885 - RNA, 19 nt, Human
acugguuuucugccaauga

SEQ ID NO: 3813886 - RNA, 13 nt, Human
acuguaaaaugca

SEQ ID NO: 3813887 - RNA, 16 nt, Human
acuguaaaauguggga

SEQ ID NO: 3813888 - RNA, 22 nt, Human
acuguaaaaugugggauuaugg

SEQ ID NO: 3813889 - RNA, 16 nt, Human
acuguaaacacagaca

SEQ ID NO: 3813890 - RNA, 16 nt, Human
acuguaaagaaagaga

SEQ ID NO: 3813891 - RNA, 18 nt, Human
acuguaaagaaagagaga

SEQ ID NO: 3813892 - RNA, 21 nt, Human
acuguaaagaaagagagaaaa

SEQ ID NO: 3813893 - RNA, 13 nt, Human
acuguaaagaugu

SEQ ID NO: 3813894 - RNA, 11 nt, Human
acuguaaauca

SEQ ID NO: 3813895 - RNA, 17 nt, Human
acuguaacauauucugu

SEQ ID NO: 3813896 - RNA, 22 nt, Human
acuguaacugugucaugauuca

SEQ ID NO: 3813897 - RNA, 20 nt, Human
acuguaagaaaauaucacuu

SEQ ID NO: 3813898 - RNA, 19 nt, Human
acuguaagaauaauuuaua

SEQ ID NO: 3813899 - RNA, 20 nt, Human
acuguaagaauaauuuauag

SEQ ID NO: 3813900 - RNA, 13 nt, Human
acuguaagacauu

SEQ ID NO: 3813901 - RNA, 16 nt, Human
acuguaaggcaaucau

SEQ ID NO: 3813902 - RNA, 16 nt, Human
acuguaauaauaccuc

SEQ ID NO: 3813903 - RNA, 17 nt, Human
acuguaauaauaccuca

SEQ ID NO: 3813904 - RNA, 19 nt, Human
acuguaauaauaccucaau

SEQ ID NO: 3813905 - RNA, 19 nt, Human
acuguaauuugugauacaa

SEQ ID NO: 3813906 - RNA, 17 nt, Human
acuguacaaaaaaaucu

SEQ ID NO: 3813907 - RNA, 13 nt, Human
acuguacaaagua

SEQ ID NO: 3813908 - RNA, 11 nt, Human
acuguacaaua

SEQ ID NO: 3813909 - RNA, 18 nt, Human
acuguacaauaaaaacau

SEQ ID NO: 3813910 - RNA, 22 nt, Human
acuguacacacuuuauuuacuu

SEQ ID NO: 3813911 - RNA, 18 nt, Human
acuguacagacagaaaaa

SEQ ID NO: 3813912 - RNA, 21 nt, Human
acuguacagauugcugcuucu

SEQ ID NO: 3813913 - RNA, 14 nt, Human
acuguacagcuggc

SEQ ID NO: 3813914 - RNA, 18 nt, Human
acuguacagcuggcucua

SEQ ID NO: 3813915 - RNA, 12 nt, Human
acuguacagugu

SEQ ID NO: 3813916 - RNA, 15 nt, Human
acuguacagugucuu

SEQ ID NO: 3813917 - RNA, 20 nt, Human
acuguacaugaaaacacauu

SEQ ID NO: 3813918 - RNA, 23 nt, Human
acuguacaugaaaacacauuuuu

SEQ ID NO: 3813919 - RNA, 14 nt, Human
acuguacauuuaaa

SEQ ID NO: 3813920 - RNA, 16 nt, Human
acuguacauuuaaaau

SEQ ID NO: 3813921 - RNA, 22 nt, Human
acuguacauuuaaaauugcuau

SEQ ID NO: 3813922 - RNA, 12 nt, Human
acuguacuaauu

SEQ ID NO: 3813923 - RNA, 18 nt, Human
acuguacuaauucuuaca

SEQ ID NO: 3813924 - RNA, 17 nt, Human
acuguacuagucugugu

SEQ ID NO: 3813925 - RNA, 13 nt, Human
acuguacuccucc

SEQ ID NO: 3813926 - RNA, 18 nt, Human
acuguacuuaauaaauuc

SEQ ID NO: 3813927 - RNA, 13 nt, Human
acuguacuucacu

SEQ ID NO: 3813928 - RNA, 15 nt, Human
acuguacuugcucuu

SEQ ID NO: 3813929 - RNA, 23 nt, Human
acuguacuuugauucacauguuu

SEQ ID NO: 3813930 - RNA, 18 nt, Human
acuguagaaugauuucau

SEQ ID NO: 3813931 - RNA, 13 nt, Human
acuguagaugaug

SEQ ID NO: 3813932 - RNA, 15 nt, Human
acuguagauugcuuc

SEQ ID NO: 3813933 - RNA, 19 nt, Human
acuguagcucuaaaaucug

SEQ ID NO: 3813934 - RNA, 19 nt, Human
acuguagcuuuuaggaaua

SEQ ID NO: 3813935 - RNA, 19 nt, Human
acuguaguaaauaaugcuu

SEQ ID NO: 3813936 - RNA, 16 nt, Human
acuguagucucaggac

SEQ ID NO: 3813937 - RNA, 15 nt, Human
acuguaguucuaaga

SEQ ID NO: 3813938 - RNA, 16 nt, Human
acuguaguucuaagac

SEQ ID NO: 3813939 - RNA, 21 nt, Human
acuguaguuuuucuucaacau

SEQ ID NO: 3813940 - RNA, 12 nt, Human
acuguauaaaua

SEQ ID NO: 3813941 - RNA, 14 nt, Human
acuguauaaauagg

SEQ ID NO: 3813942 - RNA, 15 nt, Human
acuguauaaauagga

SEQ ID NO: 3813943 - RNA, 17 nt, Human
acuguauaaauaggaga

SEQ ID NO: 3813944 - RNA, 22 nt, Human
acuguauaaauaggagaggaug

SEQ ID NO: 3813945 - RNA, 21 nt, Human
acuguauaccccgugaagcau

SEQ ID NO: 3813946 - RNA, 21 nt, Human
acuguauagacaguuuguaaa

SEQ ID NO: 3813947 - RNA, 17 nt, Human
acuguauauuuguauga

SEQ ID NO: 3813948 - RNA, 16 nt, Human
acuguaucaugacaaa

SEQ ID NO: 3813949 - RNA, 20 nt, Human
acuguaucaugacaaagacu

SEQ ID NO: 3813950 - RNA, 22 nt, Human
acuguaucuaggcaacauagua

SEQ ID NO: 3813951 - RNA, 23 nt, Human
acuguaucuaggcaacauaguau

SEQ ID NO: 3813952 - RNA, 22 nt, Human
acuguaucucuaauacagugug

SEQ ID NO: 3813953 - RNA, 13 nt, Human
acuguaucugugu

SEQ ID NO: 3813954 - RNA, 14 nt, Human
agcccacguccugu

SEQ ID NO: 3813955 - RNA, 21 nt, Human
agcccacguccugucagugcc

SEQ ID NO: 3813956 - RNA, 22 nt, Human
agcccacguucucucugccugu

SEQ ID NO: 3813957 - RNA, 16 nt, Human
agcccacuccaucugg

SEQ ID NO: 3813958 - RNA, 21 nt, Human
agcccacuccaucugguagaa

SEQ ID NO: 3813959 - RNA, 14 nt, Human
agcccacucugcuc

SEQ ID NO: 3813960 - RNA, 20 nt, Human
agcccacugcccacccccuc

SEQ ID NO: 3813961 - RNA, 12 nt, Human
agcccacuggau

SEQ ID NO: 3813962 - RNA, 20 nt, Human
agcccacuggaucagaaaga

SEQ ID NO: 3813963 - RNA, 16 nt, Human
agcccacuguacuugc

SEQ ID NO: 3813964 - RNA, 14 nt, Human
agcccacuguccug

SEQ ID NO: 3813965 - RNA, 15 nt, Human
agcccacuguccugg

SEQ ID NO: 3813966 - RNA, 18 nt, Human
agcccacuguccugggcc

SEQ ID NO: 3813967 - RNA, 19 nt, Human
agcccacuguccugggccu

SEQ ID NO: 3813968 - RNA, 14 nt, Human
agcccagagaacag

SEQ ID NO: 3813969 - RNA, 21 nt, Human
agcccagagacauacuugaag

SEQ ID NO: 3813970 - RNA, 20 nt, Human
agcccagagacuuuguagau

SEQ ID NO: 3813971 - RNA, 21 nt, Human
agcccagagccuggcugccca

SEQ ID NO: 3813972 - RNA, 20 nt, Human
agcccagaguccccccacuc

SEQ ID NO: 3813973 - RNA, 18 nt, Human
agcccagaucagcuccua

SEQ ID NO: 3813974 - RNA, 22 nt, Human
agcccagauguuuuacgucugg

SEQ ID NO: 3813975 - RNA, 13 nt, Human
agcccagccacgu

SEQ ID NO: 3813976 - RNA, 12 nt, Human
agcccagccagc

SEQ ID NO: 3813977 - RNA, 14 nt, Human
agcccagcccagcu

SEQ ID NO: 3813978 - RNA, 16 nt, Human
agcccagcccagcugg

SEQ ID NO: 3813979 - RNA, 16 nt, Human
agcccagccccacucc

SEQ ID NO: 3813980 - RNA, 19 nt, Human
agcccagccccacuccucu

SEQ ID NO: 3813981 - RNA, 13 nt, Human
agcccagcuccag

SEQ ID NO: 3813982 - RNA, 15 nt, Human
agcccagcuggguca

SEQ ID NO: 3813983 - RNA, 16 nt, Human
agcccagcugguggga

SEQ ID NO: 3813984 - RNA, 23 nt, Human
agcccagcuugaaaccuucacuu

SEQ ID NO: 3813985 - RNA, 23 nt, Human
agcccagcuuggcccuuuccuuc

SEQ ID NO: 3813986 - RNA, 20 nt, Human
agcccaggaaaggcuccagg

SEQ ID NO: 3813987 - RNA, 24 nt, Human
agcccaggaaaggcuccaggagca

SEQ ID NO: 3813988 - RNA, 21 nt, Human
agcccaggaagucucaucugg

SEQ ID NO: 3813989 - RNA, 13 nt, Human
agcccaggagaga

SEQ ID NO: 3813990 - RNA, 16 nt, Human
agcccaggagccucac

SEQ ID NO: 3813991 - RNA, 17 nt, Human
agcccaggagccucacu

SEQ ID NO: 3813992 - RNA, 18 nt, Human
agcccaggagcuccccuc

SEQ ID NO: 3813993 - RNA, 12 nt, Human
agcccaggagga

SEQ ID NO: 3813994 - RNA, 20 nt, Human
agcccaggagggagcagagg

SEQ ID NO: 3813995 - RNA, 11 nt, Human
agcccaggagu

SEQ ID NO: 3813996 - RNA, 19 nt, Human
agcccaggauacuggcaca

SEQ ID NO: 3813997 - RNA, 12 nt, Human
agcccaggccac

SEQ ID NO: 3813998 - RNA, 21 nt, Human
agcccaggccaggacucugca

SEQ ID NO: 3813999 - RNA, 13 nt, Human
agcccaggccccu

SEQ ID NO: 3814000 - RNA, 21 nt, Human
agcccaggcgggagcgguggc

SEQ ID NO: 3814001 - RNA, 19 nt, Human
agcccagggagcggaaagc

SEQ ID NO: 3814002 - RNA, 16 nt, Human
agcccagggaggccga

SEQ ID NO: 3814003 - RNA, 23 nt, Human
agcccagggcaucuugcuggcua

SEQ ID NO: 3814004 - RNA, 14 nt, Human
agcccagggcuccu

SEQ ID NO: 3814005 - RNA, 16 nt, Human
agcccagggcuccugc

SEQ ID NO: 3814006 - RNA, 16 nt, Human
agcccaggguuccccc

SEQ ID NO: 3814007 - RNA, 17 nt, Human
agcccaggguuccccca

SEQ ID NO: 3814008 - RNA, 21 nt, Human
agcccaggguucccccagccc

SEQ ID NO: 3814009 - RNA, 22 nt, Human
agcccaggugccagccugaggc

SEQ ID NO: 3814010 - RNA, 18 nt, Human
agcccaguagaccuuguu

SEQ ID NO: 3814011 - RNA, 18 nt, Human
agcccaguucagcuuggg

SEQ ID NO: 3814012 - RNA, 14 nt, Human
agcccauaaccagu

SEQ ID NO: 3814013 - RNA, 15 nt, Human
agcccauacucagcc

SEQ ID NO: 3814014 - RNA, 18 nt, Human
agcccauacucagccugc

SEQ ID NO: 3814015 - RNA, 14 nt, Human
agcccauaugcuac

SEQ ID NO: 3814016 - RNA, 21 nt, Human
agcccauaugcuaccaccagc

SEQ ID NO: 3814017 - RNA, 22 nt, Human
agcccauccauaguaacugaca

SEQ ID NO: 3814018 - RNA, 21 nt, Human
agcccauccauuaggccagca

SEQ ID NO: 3814019 - RNA, 15 nt, Human
agcccaucccugccu

SEQ ID NO: 3814020 - RNA, 18 nt, Human
agcccaucccugccuggu

SEQ ID NO: 3814021 - RNA, 17 nt, Human
agcccauccugaccagc

SEQ ID NO: 3814022 - RNA, 17 nt, Human
agcccauggacuucaca

SEQ ID NO: 3814023 - RNA, 21 nt, Human
agcccauggagauugaccugg

SEQ ID NO: 3814024 - RNA, 22 nt, Human
agcccauggagauugaccugga

SEQ ID NO: 3814025 - RNA, 16 nt, Human
agcccauguucugccc

SEQ ID NO: 3814026 - RNA, 17 nt, Human
agcccauguucugcccc

SEQ ID NO: 3814027 - RNA, 22 nt, Human
agcccauguucugcccccagcc

SEQ ID NO: 3814028 - RNA, 14 nt, Human
agcccauucauucc

SEQ ID NO: 3814029 - RNA, 16 nt, Human
agcccauucucucucc

SEQ ID NO: 3814030 - RNA, 17 nt, Human
agcccauucucucuccu

SEQ ID NO: 3814031 - RNA, 18 nt, Human
agcccauucucucuccug

SEQ ID NO: 3814032 - RNA, 19 nt, Human
agcccauucucucuccugu

SEQ ID NO: 3814033 - RNA, 17 nt, Human
agcccauuuggagggcc

SEQ ID NO: 3814034 - RNA, 19 nt, Human
agcccauuuggagggccug

SEQ ID NO: 3814035 - RNA, 21 nt, Human
agccccaaaacucuccucugc

SEQ ID NO: 3814036 - RNA, 22 nt, Human
agccccaaaacucuccucugcu

SEQ ID NO: 3814037 - RNA, 19 nt, Human
agccccaaguccugaagag

SEQ ID NO: 3814038 - RNA, 12 nt, Human
agccccacacag

SEQ ID NO: 3814039 - RNA, 11 nt, Human
agccccacagc

SEQ ID NO: 3814040 - RNA, 15 nt, Human
agccccacagcccac

SEQ ID NO: 3814041 - RNA, 18 nt, Human
agccccacagcccacguc

SEQ ID NO: 3814042 - RNA, 20 nt, Human
agccccacagcccacguccu

SEQ ID NO: 3814043 - RNA, 13 nt, Human
agccccacccagg

SEQ ID NO: 3814044 - RNA, 20 nt, Human
agccccacccaggagggagg

SEQ ID NO: 3814045 - RNA, 18 nt, Human
agccccaccccagggcag

SEQ ID NO: 3814046 - RNA, 16 nt, Human
agccccacucucagag

SEQ ID NO: 3814047 - RNA, 21 nt, Human
agccccacucucagaggcccc

SEQ ID NO: 3814048 - RNA, 12 nt, Human
agccccacugcc

SEQ ID NO: 3814049 - RNA, 15 nt, Human
agccccacugccagc

SEQ ID NO: 3814050 - RNA, 16 nt, Human
agccccacugccagca

SEQ ID NO: 3814051 - RNA, 17 nt, Human
agccccacuuaccgcgu

SEQ ID NO: 3814052 - RNA, 16 nt, Human
agccccagagcagggu

SEQ ID NO: 3814053 - RNA, 13 nt, Human
agccccagcacca

SEQ ID NO: 3814054 - RNA, 12 nt, Human
agccccagcacu

SEQ ID NO: 3814055 - RNA, 13 nt, Human
agccccaggcagg

SEQ ID NO: 3814056 - RNA, 16 nt, Human
agccccaggcaggcug

SEQ ID NO: 3814057 - RNA, 12 nt, Human
agccccaggccu

SEQ ID NO: 3814058 - RNA, 10 nt, Human
agccccaggg

SEQ ID NO: 3814059 - RNA, 23 nt, Human
agccccagggucuucccuaccuc

SEQ ID NO: 3814060 - RNA, 18 nt, Human
agccccagggugcccaga

SEQ ID NO: 3814061 - RNA, 17 nt, Human
agccccaucagcuccag

SEQ ID NO: 3814062 - RNA, 20 nt, Human
agccccaucccaaacccuuc

SEQ ID NO: 3814063 - RNA, 13 nt, Human
agccccaucuguc

SEQ ID NO: 3814064 - RNA, 16 nt, Human
agccccaucugugcau

SEQ ID NO: 3814065 - RNA, 23 nt, Human
agccccaucugugcauucuccug

SEQ ID NO: 3814066 - RNA, 20 nt, Human
agccccaugcuggagccugu

SEQ ID NO: 3814067 - RNA, 18 nt, Human
agccccauucugccugcc

SEQ ID NO: 3814068 - RNA, 21 nt, Human
agccccauucugccugcccag

SEQ ID NO: 3814069 - RNA, 19 nt, Human
agcccccacccacuucccu

SEQ ID NO: 3814070 - RNA, 14 nt, Human
agcccccagccugu

SEQ ID NO: 3814071 - RNA, 16 nt, Human
agcccccagccuguca

SEQ ID NO: 3814072 - RNA, 12 nt, Human
agcccccaggaa

SEQ ID NO: 3814073 - RNA, 13 nt, Human
agcccccaggaag

SEQ ID NO: 3814074 - RNA, 18 nt, Human
agcccccaggcugcugga

SEQ ID NO: 3814075 - RNA, 18 nt, Human
agcccccccaacacugug

SEQ ID NO: 3814076 - RNA, 22 nt, Human
agcccccccaacacugugcccu

SEQ ID NO: 3814077 - RNA, 11 nt, Human
agcccccucac

SEQ ID NO: 3814078 - RNA, 21 nt, Human
agccgccaugcuccuggccca

SEQ ID NO: 3814079 - RNA, 18 nt, Human
agccgccauugccaccag

SEQ ID NO: 3814080 - RNA, 16 nt, Human
agccgccuuccuugac

SEQ ID NO: 3814081 - RNA, 17 nt, Human
agccgccuuccuugacc

SEQ ID NO: 3814082 - RNA, 14 nt, Human
agccgcuccugucu

SEQ ID NO: 3814083 - RNA, 17 nt, Human
agccgcuccugucugcc

SEQ ID NO: 3814084 - RNA, 19 nt, Human
agccgcuccugucugccag

SEQ ID NO: 3814085 - RNA, 17 nt, Human
agccgcugcccggcgcc

SEQ ID NO: 3814086 - RNA, 18 nt, Human
agccgcugcccggcgccc

SEQ ID NO: 3814087 - RNA, 22 nt, Human
agccgcugcccggcgcccucug

SEQ ID NO: 3814088 - RNA, 16 nt, Human
agccgcugugagcccc

SEQ ID NO: 3814089 - RNA, 22 nt, Human
agccgcugugagccccuggucc

SEQ ID NO: 3814090 - RNA, 20 nt, Human
agccgcuuggcgaugccagc

SEQ ID NO: 3814091 - RNA, 23 nt, Human
agccggacuuucggaguuggggg

SEQ ID NO: 3814092 - RNA, 18 nt, Human
agccggccaauggaaacc

SEQ ID NO: 3814093 - RNA, 23 nt, Human
agccggccucucuggccucccac

SEQ ID NO: 3814094 - RNA, 21 nt, Human
agccggcguggcaaauauaaa

SEQ ID NO: 3814095 - RNA, 20 nt, Human
agccgggaaagaagagccgg

SEQ ID NO: 3814096 - RNA, 23 nt, Human
agccgggaacagacaacagaagu

SEQ ID NO: 3814097 - RNA, 16 nt, Human
agccgggccccugggc

SEQ ID NO: 3814098 - RNA, 19 nt, Human
agccgggccuggggcuccu

SEQ ID NO: 3814099 - RNA, 22 nt, Human
agccgggcgugguggcgggcac

SEQ ID NO: 3814100 - RNA, 21 nt, Human
agccggggaguuucuuuccug

SEQ ID NO: 3814101 - RNA, 16 nt, Human
agccgggucugccucu

SEQ ID NO: 3814102 - RNA, 21 nt, Human
agccgggucugccucuucugg

SEQ ID NO: 3814103 - RNA, 16 nt, Human
agccgguaacuguccu

SEQ ID NO: 3814104 - RNA, 13 nt, Human
agccgguuccugu

SEQ ID NO: 3814105 - RNA, 14 nt, Human
agccgguuccuguc

SEQ ID NO: 3814106 - RNA, 14 nt, Human
agccgucaccccug

SEQ ID NO: 3814107 - RNA, 19 nt, Human
agccgucagccaaauguaa

SEQ ID NO: 3814108 - RNA, 20 nt, Human
agccgucagccaaauguaau

SEQ ID NO: 3814109 - RNA, 13 nt, Human
agccgugagcaug

SEQ ID NO: 3814110 - RNA, 18 nt, Human
agccgugaugcucaggcu

SEQ ID NO: 3814111 - RNA, 20 nt, Human
agccgugaugcucaggcuug

SEQ ID NO: 3814112 - RNA, 16 nt, Human
agccgugcccugcccc

SEQ ID NO: 3814113 - RNA, 16 nt, Human
agccgugccuucagcu

SEQ ID NO: 3814114 - RNA, 17 nt, Human
agccgugccuucagcuc

SEQ ID NO: 3814115 - RNA, 18 nt, Human
agccgugcucgccccagc

SEQ ID NO: 3814116 - RNA, 14 nt, Human
agccguggcuuccc

SEQ ID NO: 3814117 - RNA, 15 nt, Human
agccguggucccuga

SEQ ID NO: 3814118 - RNA, 16 nt, Human
agccgugguccuuugg

SEQ ID NO: 3814119 - RNA, 13 nt, Human
agccuaaaaauaa

SEQ ID NO: 3814120 - RNA, 14 nt, Human
agccuaaaaauaaa

SEQ ID NO: 3814121 - RNA, 18 nt, Human
agccuaaaaauaaagcac

SEQ ID NO: 3814122 - RNA, 16 nt, Human
agccuaaagauuuuga

SEQ ID NO: 3814123 - RNA, 22 nt, Human
agccuaaaugccuuagaaaugu

SEQ ID NO: 3814124 - RNA, 17 nt, Human
agccuaagauauacuug

SEQ ID NO: 3814125 - RNA, 15 nt, Human
agccuaaucccuggg

SEQ ID NO: 3814126 - RNA, 14 nt, Human
agccuacaggccuc

SEQ ID NO: 3814127 - RNA, 17 nt, Human
agccuaccugcucucca

SEQ ID NO: 3814128 - RNA, 14 nt, Human
agccuaccuguaug

SEQ ID NO: 3814129 - RNA, 16 nt, Human
agccuacgcugaagau

SEQ ID NO: 3814130 - RNA, 14 nt, Human
agccuacucuccuu

SEQ ID NO: 3814131 - RNA, 18 nt, Human
agccuagauaugaauaua

SEQ ID NO: 3814132 - RNA, 19 nt, Human
agccuagauaugaauauau

SEQ ID NO: 3814133 - RNA, 15 nt, Human
agccuagauguuuua

SEQ ID NO: 3814134 - RNA, 16 nt, Human
agccuagauguuuuau

SEQ ID NO: 3814135 - RNA, 17 nt, Human
agccuagcacagcagcu

SEQ ID NO: 3814136 - RNA, 17 nt, Human
agccuagccgaccucag

SEQ ID NO: 3814137 - RNA, 20 nt, Human
agccuaggaccacucagccc

SEQ ID NO: 3814138 - RNA, 14 nt, Human
agccuaggccaggu

SEQ ID NO: 3814139 - RNA, 22 nt, Human
agccuaggccuaguccugcgaa

SEQ ID NO: 3814140 - RNA, 20 nt, Human
agccuaggggucagggacca

SEQ ID NO: 3814141 - RNA, 23 nt, Human
agccuagugaaggcuucucucug

SEQ ID NO: 3814142 - RNA, 18 nt, Human
agccuaguggcuuguccu

SEQ ID NO: 3814143 - RNA, 19 nt, Human
agccuaguggcuuguccuc

SEQ ID NO: 3814144 - RNA, 22 nt, Human
agccuaguucauccaauccuca

SEQ ID NO: 3814145 - RNA, 17 nt, Human
agccuaugagcauccug

SEQ ID NO: 3814146 - RNA, 14 nt, Human
agccuauggcagaa

SEQ ID NO: 3814147 - RNA, 15 nt, Human
agccuauuuaccugc

SEQ ID NO: 3814148 - RNA, 18 nt, Human
agccucaaauccaggacc

SEQ ID NO: 3814149 - RNA, 19 nt, Human
agccucaaauccaggaccc

SEQ ID NO: 3814150 - RNA, 14 nt, Human
agccucaaaugcag

SEQ ID NO: 3814151 - RNA, 20 nt, Human
agccucaaccuccugggcua

SEQ ID NO: 3814152 - RNA, 21 nt, Human
agccucaagguuuuagguucu

SEQ ID NO: 3814153 - RNA, 18 nt, Human
agccucaauaagccuugu

SEQ ID NO: 3814154 - RNA, 23 nt, Human
agccucacgcuccuuucugaucu

SEQ ID NO: 3814155 - RNA, 16 nt, Human
agccucacuugaaugu

SEQ ID NO: 3814156 - RNA, 13 nt, Human
agccucagacugg

SEQ ID NO: 3814157 - RNA, 22 nt, Human
agccucagaugauuuccccccu

SEQ ID NO: 3814158 - RNA, 16 nt, Human
agccucagauuccuuc

SEQ ID NO: 3814159 - RNA, 17 nt, Human
agccucagcccccugcu

SEQ ID NO: 3814160 - RNA, 16 nt, Human
agccucagcuacccac

SEQ ID NO: 3814161 - RNA, 16 nt, Human
agccucaggacuggga

SEQ ID NO: 3814162 - RNA, 18 nt, Human
agccucaggacugggagc

SEQ ID NO: 3814163 - RNA, 20 nt, Human
agccucaggggucugagcuc

SEQ ID NO: 3814164 - RNA, 17 nt, Human
agccucaguccuccccu

SEQ ID NO: 3814165 - RNA, 13 nt, Human
agccucagucucc

SEQ ID NO: 3814166 - RNA, 22 nt, Human
agccucagucucccucccuugg

SEQ ID NO: 3814167 - RNA, 19 nt, Human
agccucauauuuaaagaca

SEQ ID NO: 3814168 - RNA, 15 nt, Human
agccucaucaucaga

SEQ ID NO: 3814169 - RNA, 14 nt, Human
agccucauccgagg

SEQ ID NO: 3814170 - RNA, 19 nt, Human
agccucauccgaggcaggg

SEQ ID NO: 3814171 - RNA, 13 nt, Human
agccuccacagcg

SEQ ID NO: 3814172 - RNA, 15 nt, Human
agccuccacagcgag

SEQ ID NO: 3814173 - RNA, 23 nt, Human
agccuccacagcgagggcagcug

SEQ ID NO: 3814174 - RNA, 22 nt, Human
agccuccaccccacaacccaaa

SEQ ID NO: 3814175 - RNA, 20 nt, Human
agccuccacugccucuggaa

SEQ ID NO: 3814176 - RNA, 12 nt, Human
agccuccagccu

SEQ ID NO: 3814177 - RNA, 16 nt, Human
agccuccagccucugu

SEQ ID NO: 3814178 - RNA, 18 nt, Human
agccuccagccucuguuc

SEQ ID NO: 3814179 - RNA, 16 nt, Human
agccuccaguccaagg

SEQ ID NO: 3814180 - RNA, 20 nt, Human
agccuccaugcugccuccag

SEQ ID NO: 3814181 - RNA, 21 nt, Human
agccuccauuuaguucuuugu

SEQ ID NO: 3814182 - RNA, 16 nt, Human
agccucccaaggagaa

SEQ ID NO: 3814183 - RNA, 22 nt, Human
agccucccacgacugcccggca

SEQ ID NO: 3814184 - RNA, 18 nt, Human
agccucccauccagggcc

SEQ ID NO: 3814185 - RNA, 18 nt, Human
agccuccccugccagggc

SEQ ID NO: 3814186 - RNA, 22 nt, Human
agccucccgaauagcugggacu

SEQ ID NO: 3814187 - RNA, 13 nt, Human
agccucccuccgc

SEQ ID NO: 3814188 - RNA, 11 nt, Human
agccucccuga

SEQ ID NO: 3814189 - RNA, 17 nt, Human
agccucccugaagacca

SEQ ID NO: 3814190 - RNA, 14 nt, Human
agccucccugaagc

SEQ ID NO: 3814191 - RNA, 16 nt, Human
agccucccugaagccu

SEQ ID NO: 3814192 - RNA, 23 nt, Human
agccucccugccucaggccucug

SEQ ID NO: 3814193 - RNA, 17 nt, Human
agccuccgagagggaga

SEQ ID NO: 3814194 - RNA, 17 nt, Human
agccuccgcuucccugg

SEQ ID NO: 3814195 - RNA, 18 nt, Human
agccuccgcuucccuggu

SEQ ID NO: 3814196 - RNA, 15 nt, Human
agccuccggaagcug

SEQ ID NO: 3814197 - RNA, 23 nt, Human
agccuccggaguagcugggacca

SEQ ID NO: 3814198 - RNA, 18 nt, Human
agccuccguauuucagac

SEQ ID NO: 3814199 - RNA, 20 nt, Human
agccuccucaucccguguuc

SEQ ID NO: 3814200 - RNA, 13 nt, Human
agccuccuccuga

SEQ ID NO: 3814201 - RNA, 13 nt, Human
agccuccucucuc

SEQ ID NO: 3814202 - RNA, 12 nt, Human
agccuccucugu

SEQ ID NO: 3814203 - RNA, 15 nt, Human
agccuccucugucug

SEQ ID NO: 3814204 - RNA, 19 nt, Human
agccuccugaguagcugga

SEQ ID NO: 3814205 - RNA, 18 nt, Human
agccuccugcccaguccc

SEQ ID NO: 3814206 - RNA, 13 nt, Human
agccuccugcccu

SEQ ID NO: 3814207 - RNA, 16 nt, Human
agccucgaggugccuu

SEQ ID NO: 3814208 - RNA, 18 nt, Human
agccucgaggugccuucu

SEQ ID NO: 3814209 - RNA, 18 nt, Human
agccucgcaacccgugcc

SEQ ID NO: 3814210 - RNA, 21 nt, Human
agccucgcaacccgugccaag

SEQ ID NO: 3814211 - RNA, 20 nt, Human
agccucgcaggccucccugc

SEQ ID NO: 3814212 - RNA, 16 nt, Human
agccucgccccuggca

SEQ ID NO: 3814213 - RNA, 20 nt, Human
agccucgccccuggcagaga

SEQ ID NO: 3814214 - RNA, 14 nt, Human
agccucucaucccc

SEQ ID NO: 3814215 - RNA, 14 nt, Human
agccucuccaggaa

SEQ ID NO: 3814216 - RNA, 23 nt, Human
agccucuccaggaaugccuccuc

SEQ ID NO: 3814217 - RNA, 13 nt, Human
agccucuccccug

SEQ ID NO: 3814218 - RNA, 14 nt, Human
agccucuccccugc

SEQ ID NO: 3814219 - RNA, 19 nt, Human
agccucuccccugccugcc

SEQ ID NO: 3814220 - RNA, 13 nt, Human
agccucuccugua

SEQ ID NO: 3814221 - RNA, 17 nt, Human
agccucucuuccuaucc

SEQ ID NO: 3814222 - RNA, 21 nt, Human
agccucugacuuaagcugccu

SEQ ID NO: 3814223 - RNA, 18 nt, Human
agccucugagccccuggg

SEQ ID NO: 3814224 - RNA, 18 nt, Human
agccucugcccaggcacu

SEQ ID NO: 3814225 - RNA, 13 nt, Human
agccucugcuccc

SEQ ID NO: 3814226 - RNA, 15 nt, Human
agccucugcucccca

SEQ ID NO: 3814227 - RNA, 14 nt, Human
agccucugcugcca

SEQ ID NO: 3814228 - RNA, 18 nt, Human
acuuccaaacuaauuuuu

SEQ ID NO: 3814229 - RNA, 18 nt, Human
acuuccaaagaaaguucu

SEQ ID NO: 3814230 - RNA, 16 nt, Human
acuuccacaggguccc

SEQ ID NO: 3814231 - RNA, 16 nt, Human
acuuccaccagccugc

SEQ ID NO: 3814232 - RNA, 20 nt, Human
acuuccaggggaaccugcca

SEQ ID NO: 3814233 - RNA, 20 nt, Human
acuuccagguguuacuguaa

SEQ ID NO: 3814234 - RNA, 17 nt, Human
acuuccauaaucuggac

SEQ ID NO: 3814235 - RNA, 16 nt, Human
acuuccauacagcucu

SEQ ID NO: 3814236 - RNA, 17 nt, Human
acuuccauacagcucua

SEQ ID NO: 3814237 - RNA, 12 nt, Human
acuuccauagug

SEQ ID NO: 3814238 - RNA, 14 nt, Human
acuuccaugccuua

SEQ ID NO: 3814239 - RNA, 20 nt, Human
acuuccaugccuuaaaccua

SEQ ID NO: 3814240 - RNA, 14 nt, Human
acuucccacccugc

SEQ ID NO: 3814241 - RNA, 19 nt, Human
acuucccacccugccccuc

SEQ ID NO: 3814242 - RNA, 20 nt, Human
acuucccacucuagggcagu

SEQ ID NO: 3814243 - RNA, 18 nt, Human
acuugagggcccagagca

SEQ ID NO: 3814244 - RNA, 15 nt, Human
acuugaggguaauaa

SEQ ID NO: 3814245 - RNA, 15 nt, Human
acuugagguggccuc

SEQ ID NO: 3814246 - RNA, 21 nt, Human
acuugaguaaaauacucuuuu

SEQ ID NO: 3814247 - RNA, 20 nt, Human
acuugauagcaaacacuggg

SEQ ID NO: 3814248 - RNA, 20 nt, Human
acuugaucauuuuuaccauu

SEQ ID NO: 3814249 - RNA, 17 nt, Human
acuugauccauuucuaa

SEQ ID NO: 3814250 - RNA, 21 nt, Human
acuugaugaguguaacaagaa

SEQ ID NO: 3814251 - RNA, 19 nt, Human
acuugaugugccauuuuaa

SEQ ID NO: 3814252 - RNA, 17 nt, Human
acuugauuaagauuuua

SEQ ID NO: 3814253 - RNA, 19 nt, Human
acuugauuaagauuuuaca

SEQ ID NO: 3814254 - RNA, 17 nt, Human
acuugcaaaaaggguca

SEQ ID NO: 3814255 - RNA, 13 nt, Human
acuugcaccucug

SEQ ID NO: 3814256 - RNA, 12 nt, Human
acuugcaugaag

SEQ ID NO: 3814257 - RNA, 21 nt, Human
acuugcaugaagagaagcaau

SEQ ID NO: 3814258 - RNA, 17 nt, Human
acuugcauuuuugcagg

SEQ ID NO: 3814259 - RNA, 19 nt, Human
acuugcauuuuugcaggag

SEQ ID NO: 3814260 - RNA, 14 nt, Human
acuugccaaauuua

SEQ ID NO: 3814261 - RNA, 19 nt, Human
acuugccaaauuuagauuu

SEQ ID NO: 3814262 - RNA, 21 nt, Human
acuugccauuccaaaauauua

SEQ ID NO: 3814263 - RNA, 12 nt, Human
acuugcccugcu

SEQ ID NO: 3814264 - RNA, 22 nt, Human
acuugccgcgucgcccucccag

SEQ ID NO: 3814265 - RNA, 13 nt, Human
acuugccucuuuu

SEQ ID NO: 3814266 - RNA, 22 nt, Human
acuugccucuuuuaccugcugc

SEQ ID NO: 3814267 - RNA, 12 nt, Human
acuugccugggu

SEQ ID NO: 3814268 - RNA, 14 nt, Human
acuugccuggguca

SEQ ID NO: 3814269 - RNA, 17 nt, Human
acuugcucuugaugccu

SEQ ID NO: 3814270 - RNA, 21 nt, Human
acuugcugaaucggaaucucu

SEQ ID NO: 3814271 - RNA, 13 nt, Human
acuugcugcuguc

SEQ ID NO: 3814272 - RNA, 19 nt, Human
acuugcugucccuuggaac

SEQ ID NO: 3814273 - RNA, 18 nt, Human
acuugcuguuuuguucug

SEQ ID NO: 3814274 - RNA, 16 nt, Human
acuugcuuaaauguga

SEQ ID NO: 3814275 - RNA, 23 nt, Human
acuugcuuaaauuucuuauguga

SEQ ID NO: 3814276 - RNA, 19 nt, Human
acuugcuuaucaacuuccu

SEQ ID NO: 3814277 - RNA, 21 nt, Human
acuugcuuaucaacuuccuaa

SEQ ID NO: 3814278 - RNA, 21 nt, Human
acuugcuuuaccuuuucaggg

SEQ ID NO: 3814279 - RNA, 22 nt, Human
acuugcuuuaccuuuucagggc

SEQ ID NO: 3814280 - RNA, 21 nt, Human
acuuggaaaaauccagaaaga

SEQ ID NO: 3814281 - RNA, 22 nt, Human
acuuggaaaaauccagaaagaa

SEQ ID NO: 3814282 - RNA, 16 nt, Human
acuuggaaauauuaaa

SEQ ID NO: 3814283 - RNA, 16 nt, Human
acuuggaauuuguaac

SEQ ID NO: 3814284 - RNA, 21 nt, Human
acuuggaauuuguaaccucag

SEQ ID NO: 3814285 - RNA, 21 nt, Human
acuuggaugaguuuugggaag

SEQ ID NO: 3814286 - RNA, 15 nt, Human
acuuggauucucuaa

SEQ ID NO: 3814287 - RNA, 20 nt, Human
acuuggauuuaguuucagua

SEQ ID NO: 3814288 - RNA, 15 nt, Human
acuuggcaacagaag

SEQ ID NO: 3814289 - RNA, 18 nt, Human
acuuggcaucagcuggcg

SEQ ID NO: 3814290 - RNA, 10 nt, Human
acuuggccaa

SEQ ID NO: 3814291 - RNA, 15 nt, Human
acuuggccucacccu

SEQ ID NO: 3814292 - RNA, 17 nt, Human
acuuggcuacacaggga

SEQ ID NO: 3814293 - RNA, 20 nt, Human
acuuggcucgaaucucugug

SEQ ID NO: 3814294 - RNA, 22 nt, Human
acuuggcucgaaucucugugcc

SEQ ID NO: 3814295 - RNA, 13 nt, Human
acuuggcuuucau

SEQ ID NO: 3814296 - RNA, 20 nt, Human
acuugggcacccccagccug

SEQ ID NO: 3814297 - RNA, 21 nt, Human
acuugggcacccccagccugg

SEQ ID NO: 3814298 - RNA, 20 nt, Human
acuuggggagauggaguucu

SEQ ID NO: 3814299 - RNA, 16 nt, Human
acuugggggcucagca

SEQ ID NO: 3814300 - RNA, 20 nt, Human
acuugggggcucagcaaggc

SEQ ID NO: 3814301 - RNA, 15 nt, Human
acuuggggggcugag

SEQ ID NO: 3814302 - RNA, 19 nt, Human
acuugguccaacugcaacu

SEQ ID NO: 3814303 - RNA, 15 nt, Human
acuuggucugugaga

SEQ ID NO: 3814304 - RNA, 14 nt, Human
acuugguuauacau

SEQ ID NO: 3814305 - RNA, 15 nt, Human
acuugguuauacaug

SEQ ID NO: 3814306 - RNA, 20 nt, Human
acuugguuauacaugacacu

SEQ ID NO: 3814307 - RNA, 15 nt, Human
acuugguucugcuuc

SEQ ID NO: 3814308 - RNA, 12 nt, Human
acuugguuugug

SEQ ID NO: 3814309 - RNA, 16 nt, Human
acuugguuuuuaaaaa

SEQ ID NO: 3814310 - RNA, 14 nt, Human
acuuguaaauacac

SEQ ID NO: 3814311 - RNA, 16 nt, Human
acuuguaaauacacca

SEQ ID NO: 3814312 - RNA, 13 nt, Human
acuuguaaauaua

SEQ ID NO: 3814313 - RNA, 14 nt, Human
acuuguaaaugcug

SEQ ID NO: 3814314 - RNA, 17 nt, Human
acuuguaauauuuuuau

SEQ ID NO: 3814315 - RNA, 15 nt, Human
acuuguaauuaugga

SEQ ID NO: 3814316 - RNA, 16 nt, Human
acuuguaauuauggag

SEQ ID NO: 3814317 - RNA, 14 nt, Human
acuuguagcuguaa

SEQ ID NO: 3814318 - RNA, 23 nt, Human
acuuguaggauaagugaaaugga

SEQ ID NO: 3814319 - RNA, 22 nt, Human
acuuguauauucuauuuuacaa

SEQ ID NO: 3814320 - RNA, 14 nt, Human
acuuguauauuugu

SEQ ID NO: 3814321 - RNA, 15 nt, Human
acuuguauauuugua

SEQ ID NO: 3814322 - RNA, 16 nt, Human
acuuguauauuuguac

SEQ ID NO: 3814323 - RNA, 17 nt, Human
acuuguauauuuguaca

SEQ ID NO: 3814324 - RNA, 14 nt, Human
acuuguaugaaaga

SEQ ID NO: 3814325 - RNA, 14 nt, Human
acuuguauuaugug

SEQ ID NO: 3814326 - RNA, 18 nt, Human
acuuguauuauguguguu

SEQ ID NO: 3814327 - RNA, 19 nt, Human
acuuguauuauguguguuu

SEQ ID NO: 3814328 - RNA, 18 nt, Human
acuugucaaagaagguuu

SEQ ID NO: 3814329 - RNA, 20 nt, Human
acuugucaagccugugcaaa

SEQ ID NO: 3814330 - RNA, 16 nt, Human
acuugucaauaaaauc

SEQ ID NO: 3814331 - RNA, 24 nt, Human
acuugucauuguuauauaaucauu

SEQ ID NO: 3814332 - RNA, 17 nt, Human
acuuguccuagcacaga

SEQ ID NO: 3814333 - RNA, 20 nt, Human
acuuguccuuagccuggacc

SEQ ID NO: 3814334 - RNA, 15 nt, Human
acuugucuaaauaag

SEQ ID NO: 3814335 - RNA, 19 nt, Human
acuugucuaaauaaguuug

SEQ ID NO: 3814336 - RNA, 16 nt, Human
acuugucuauuaccug

SEQ ID NO: 3814337 - RNA, 15 nt, Human
acuugucucauuuua

SEQ ID NO: 3814338 - RNA, 17 nt, Human
acuugucucauuuuaau

SEQ ID NO: 3814339 - RNA, 12 nt, Human
acuugucuuaaa

SEQ ID NO: 3814340 - RNA, 15 nt, Human
acuugucuuuuucug

SEQ ID NO: 3814341 - RNA, 20 nt, Human
acuugugaaacacagcuguu

SEQ ID NO: 3814342 - RNA, 16 nt, Human
acuugugauuauuuau

SEQ ID NO: 3814343 - RNA, 17 nt, Human
acuugugcacaggcaga

SEQ ID NO: 3814344 - RNA, 13 nt, Human
acuugugccaaca

SEQ ID NO: 3814345 - RNA, 14 nt, Human
acuuguggacacag

SEQ ID NO: 3814346 - RNA, 17 nt, Human
acuuguggacacagcuc

SEQ ID NO: 3814347 - RNA, 18 nt, Human
acuuguggacacagcucu

SEQ ID NO: 3814348 - RNA, 17 nt, Human
acuugugguuuucaaau

SEQ ID NO: 3814349 - RNA, 21 nt, Human
acuuguguaaauacaauuuug

SEQ ID NO: 3814350 - RNA, 22 nt, Human
acuuguguaaauacaauuuugu

SEQ ID NO: 3814351 - RNA, 22 nt, Human
acuugugucccuaauguguuua

SEQ ID NO: 3814352 - RNA, 16 nt, Human
acuugugucucugugc

SEQ ID NO: 3814353 - RNA, 11 nt, Human
acuugugucug

SEQ ID NO: 3814354 - RNA, 23 nt, Human
acuugugugugggcugugagugu

SEQ ID NO: 3814355 - RNA, 16 nt, Human
acuuguuagaaaugca

SEQ ID NO: 3814356 - RNA, 14 nt, Human
acuuguuagaucua

SEQ ID NO: 3814357 - RNA, 15 nt, Human
acuuguuauugugaa

SEQ ID NO: 3814358 - RNA, 19 nt, Human
acuuguucuuccaaagcag

SEQ ID NO: 3814359 - RNA, 16 nt, Human
acuuguugccuauaag

SEQ ID NO: 3814360 - RNA, 21 nt, Human
acuuguugccuauaagccaaa

SEQ ID NO: 3814361 - RNA, 16 nt, Human
acuuguuguuuaaugu

SEQ ID NO: 3814362 - RNA, 16 nt, Human
acuuguuugucuucca

SEQ ID NO: 3814363 - RNA, 17 nt, Human
acuuguuugucuuccau

SEQ ID NO: 3814364 - RNA, 17 nt, Human
acuuguuuuaugcucag

SEQ ID NO: 3814365 - RNA, 13 nt, Human
acuuguuuuggau

SEQ ID NO: 3814366 - RNA, 16 nt, Human
acuuguuuuggaugcc

SEQ ID NO: 3814367 - RNA, 15 nt, Human
acuuguuuuuguaaa

SEQ ID NO: 3814368 - RNA, 23 nt, Human
acuuguuuuuguuuuuguuuugu

SEQ ID NO: 3814369 - RNA, 14 nt, Human
acuuuaaaaaauau

SEQ ID NO: 3814370 - RNA, 21 nt, Human
acuuuaaaaaauauuuauuaa

SEQ ID NO: 3814371 - RNA, 14 nt, Human
acuuuaaaaauuua

SEQ ID NO: 3814372 - RNA, 19 nt, Human
acuuuaaaaauuuacuaca

SEQ ID NO: 3814373 - RNA, 12 nt, Human
acuuuaaaacac

SEQ ID NO: 3814374 - RNA, 16 nt, Human
acuuuaaaaggagcca

SEQ ID NO: 3814375 - RNA, 11 nt, Human
acuuuaaacua

SEQ ID NO: 3814376 - RNA, 12 nt, Human
acuuuaaaggaa

SEQ ID NO: 3814377 - RNA, 23 nt, Human
acuuuaacauaagcuauuuuucu

SEQ ID NO: 3814378 - RNA, 21 nt, Human
acuuuaacuuaguuuugcaua

SEQ ID NO: 3814379 - RNA, 22 nt, Human
acuuuaacuuaguuuugcauag

SEQ ID NO: 3814380 - RNA, 20 nt, Human
acuuuaacuucuguuuuacc

SEQ ID NO: 3814381 - RNA, 17 nt, Human
acuuuaagacugagcac

SEQ ID NO: 3814382 - RNA, 17 nt, Human
acuuuaagagagaaauc

SEQ ID NO: 3814383 - RNA, 14 nt, Human
acuuuaagcacuac

SEQ ID NO: 3814384 - RNA, 15 nt, Human
acuuuaagcacuaca

SEQ ID NO: 3814385 - RNA, 16 nt, Human
acuuuaagcacuacau

SEQ ID NO: 3814386 - RNA, 18 nt, Human
acuuuaaguuucaggaua

SEQ ID NO: 3814387 - RNA, 19 nt, Human
acuuuaauucucaugugau

SEQ ID NO: 3814388 - RNA, 18 nt, Human
agaaagccccacccaggc

SEQ ID NO: 3814389 - RNA, 19 nt, Human
agaaagccugggugacauu

SEQ ID NO: 3814390 - RNA, 19 nt, Human
agaaagccuguuccccuca

SEQ ID NO: 3814391 - RNA, 22 nt, Human
agaaagccuguuccccucacug

SEQ ID NO: 3814392 - RNA, 13 nt, Human
agaaagccuucuu

SEQ ID NO: 3814393 - RNA, 13 nt, Human
agaaagcugacuu

SEQ ID NO: 3814394 - RNA, 17 nt, Human
agaaagcugacuuggcu

SEQ ID NO: 3814395 - RNA, 22 nt, Human
agaaagcugacuuggcuggugu

SEQ ID NO: 3814396 - RNA, 16 nt, Human
agaaagcugguaaacu

SEQ ID NO: 3814397 - RNA, 20 nt, Human
agaaagcugguaaacuauuu

SEQ ID NO: 3814398 - RNA, 18 nt, Human
agaaaggaaaaacaaacu

SEQ ID NO: 3814399 - RNA, 14 nt, Human
agaaaggaacauuu

SEQ ID NO: 3814400 - RNA, 18 nt, Human
agaaaggaagcauuguaa

SEQ ID NO: 3814401 - RNA, 19 nt, Human
agaaaggaagcauuguaaa

SEQ ID NO: 3814402 - RNA, 14 nt, Human
agaaaggacucugg

SEQ ID NO: 3814403 - RNA, 16 nt, Human
agaaaggauauuuaag

SEQ ID NO: 3814404 - RNA, 21 nt, Human
agaaaggauauuuaagaaaau

SEQ ID NO: 3814405 - RNA, 17 nt, Human
agaaaggccugcacaca

SEQ ID NO: 3814406 - RNA, 17 nt, Human
agaaaggccuuuaaaau

SEQ ID NO: 3814407 - RNA, 13 nt, Human
agaaagggagggc

SEQ ID NO: 3814408 - RNA, 15 nt, Human
agaaagggagggcuc

SEQ ID NO: 3814409 - RNA, 22 nt, Human
agaaagggcccugggccugccu

SEQ ID NO: 3814410 - RNA, 14 nt, Human
agaaaggggagccc

SEQ ID NO: 3814411 - RNA, 17 nt, Human
agaaaggggagcccacu

SEQ ID NO: 3814412 - RNA, 19 nt, Human
agaaaggguucuguaaaau

SEQ ID NO: 3814413 - RNA, 20 nt, Human
agaaagguggacuggaaggg

SEQ ID NO: 3814414 - RNA, 16 nt, Human
agaaagguuaguauca

SEQ ID NO: 3814415 - RNA, 21 nt, Human
agaaagguuuugagcaugggu

SEQ ID NO: 3814416 - RNA, 20 nt, Human
agaaagucauuccuucuuuu

SEQ ID NO: 3814417 - RNA, 20 nt, Human
agaaagucgaauuaauagcu

SEQ ID NO: 3814418 - RNA, 22 nt, Human
agaaagucuaucuaaugacaug

SEQ ID NO: 3814419 - RNA, 15 nt, Human
agaaagugaagcaaa

SEQ ID NO: 3814420 - RNA, 23 nt, Human
agaaagugaagcaaaucagaaac

SEQ ID NO: 3814421 - RNA, 21 nt, Human
agaaagugaauaaaaauuaag

SEQ ID NO: 3814422 - RNA, 16 nt, Human
agaaagugagcagugu

SEQ ID NO: 3814423 - RNA, 15 nt, Human
agaaagugauuucua

SEQ ID NO: 3814424 - RNA, 19 nt, Human
agaaagugccugacacacu

SEQ ID NO: 3814425 - RNA, 17 nt, Human
agaaagugccuuucagg

SEQ ID NO: 3814426 - RNA, 22 nt, Human
agaaagugccuuucaggaucua

SEQ ID NO: 3814427 - RNA, 19 nt, Human
agaaaguggaaaacaagga

SEQ ID NO: 3814428 - RNA, 23 nt, Human
agaaaguggaaaacaaggaaguc

SEQ ID NO: 3814429 - RNA, 21 nt, Human
agaaaguggccaugccacccu

SEQ ID NO: 3814430 - RNA, 16 nt, Human
agaaagugggagguca

SEQ ID NO: 3814431 - RNA, 22 nt, Human
agaaagugggaggucaggaaac

SEQ ID NO: 3814432 - RNA, 20 nt, Human
agaaaguggucuuaagaaau

SEQ ID NO: 3814433 - RNA, 21 nt, Human
agaaaguggucuuaagaaaug

SEQ ID NO: 3814434 - RNA, 21 nt, Human
agaaaguggugcucaguugua

SEQ ID NO: 3814435 - RNA, 17 nt, Human
agaaaguguauuuggaa

SEQ ID NO: 3814436 - RNA, 16 nt, Human
agaaagugugagcaaa

SEQ ID NO: 3814437 - RNA, 23 nt, Human
agaaagugugcuuuaugcugaaa

SEQ ID NO: 3814438 - RNA, 23 nt, Human
agaaaguguucuguuacaaaaug

SEQ ID NO: 3814439 - RNA, 23 nt, Human
agccuguggcaguaaagagaaac

SEQ ID NO: 3814440 - RNA, 24 nt, Human
agccuguggcaguaaagagaaacu

SEQ ID NO: 3814441 - RNA, 17 nt, Human
agccuguggcggugccu

SEQ ID NO: 3814442 - RNA, 19 nt, Human
agccuguggcggugccugg

SEQ ID NO: 3814443 - RNA, 20 nt, Human
agccuguggcggugccuggg

SEQ ID NO: 3814444 - RNA, 18 nt, Human
agccuguggcuguggaga

SEQ ID NO: 3814445 - RNA, 22 nt, Human
agccuguggcuguggagacaau

SEQ ID NO: 3814446 - RNA, 13 nt, Human
agccuguguaaca

SEQ ID NO: 3814447 - RNA, 23 nt, Human
agccugugucuuuaaaugcugcu

SEQ ID NO: 3814448 - RNA, 19 nt, Human
agccuguucauggcagaug

SEQ ID NO: 3814449 - RNA, 22 nt, Human
agccuguuccccucacuggaug

SEQ ID NO: 3814450 - RNA, 14 nt, Human
agccuguuggaccc

SEQ ID NO: 3814451 - RNA, 14 nt, Human
agccuguuucuucc

SEQ ID NO: 3814452 - RNA, 23 nt, Human
agccuguuucuuccuguuaaugu

SEQ ID NO: 3814453 - RNA, 19 nt, Human
agccuuaaaacaucauucc

SEQ ID NO: 3814454 - RNA, 16 nt, Human
agccuuaagcugcagg

SEQ ID NO: 3814455 - RNA, 12 nt, Human
agccuuaauuuu

SEQ ID NO: 3814456 - RNA, 14 nt, Human
agccuuacauuugu

SEQ ID NO: 3814457 - RNA, 15 nt, Human
agccuuacauuugug

SEQ ID NO: 3814458 - RNA, 20 nt, Human
agccuuagcucucccaacuc

SEQ ID NO: 3814459 - RNA, 22 nt, Human
agccuuagggaagcuggccuga

SEQ ID NO: 3814460 - RNA, 19 nt, Human
agccuuaucaagugucuuc

SEQ ID NO: 3814461 - RNA, 17 nt, Human
agccuuauccucugauc

SEQ ID NO: 3814462 - RNA, 16 nt, Human
agccuucaagcucuga

SEQ ID NO: 3814463 - RNA, 20 nt, Human
agccuucaagcucugaggga

SEQ ID NO: 3814464 - RNA, 16 nt, Human
agccuucagccuuaau

SEQ ID NO: 3814465 - RNA, 11 nt, Human
agccuuccagg

SEQ ID NO: 3814466 - RNA, 17 nt, Human
agccuuccagggguggg

SEQ ID NO: 3814467 - RNA, 19 nt, Human
agccuucccccucccaggg

SEQ ID NO: 3814468 - RNA, 16 nt, Human
agccuuccccuacccc

SEQ ID NO: 3814469 - RNA, 22 nt, Human
agccuuccccuugcccagggcu

SEQ ID NO: 3814470 - RNA, 21 nt, Human
agccuuccuccacauccuuuc

SEQ ID NO: 3814471 - RNA, 17 nt, Human
agccuuccucugcagcu

SEQ ID NO: 3814472 - RNA, 18 nt, Human
agccuuccucugcagcug

SEQ ID NO: 3814473 - RNA, 18 nt, Human
agccuucucagaagcaca

SEQ ID NO: 3814474 - RNA, 14 nt, Human
agccuucucuguuc

SEQ ID NO: 3814475 - RNA, 15 nt, Human
agccuucucuguuca

SEQ ID NO: 3814476 - RNA, 21 nt, Human
agccuucucuguucauuuccu

SEQ ID NO: 3814477 - RNA, 23 nt, Human
agccuucucuguucauuuccuca

SEQ ID NO: 3814478 - RNA, 18 nt, Human
agccuucuuccaucccag

SEQ ID NO: 3814479 - RNA, 23 nt, Human
agccuucuuugcuugccucucug

SEQ ID NO: 3814480 - RNA, 18 nt, Human
agccuugaacucugggcu

SEQ ID NO: 3814481 - RNA, 16 nt, Human
agccuugaacuuugac

SEQ ID NO: 3814482 - RNA, 23 nt, Human
agccuugaacuuugaccucugca

SEQ ID NO: 3814483 - RNA, 19 nt, Human
agccuugagcccuggcugu

SEQ ID NO: 3814484 - RNA, 20 nt, Human
agccuugauugguguugcca

SEQ ID NO: 3814485 - RNA, 19 nt, Human
agccuugccagagauccaa

SEQ ID NO: 3814486 - RNA, 21 nt, Human
agccuugcccggauucuggga

SEQ ID NO: 3814487 - RNA, 21 nt, Human
agccuugccuaaauuuaaugc

SEQ ID NO: 3814488 - RNA, 22 nt, Human
agccuuggauaaugcuguugcc

SEQ ID NO: 3814489 - RNA, 23 nt, Human
agccuugggaacaugcgugugac

SEQ ID NO: 3814490 - RNA, 20 nt, Human
agccuugguucaucaguguu

SEQ ID NO: 3814491 - RNA, 16 nt, Human
agccuuguaauucuaa

SEQ ID NO: 3814492 - RNA, 15 nt, Human
agccuugucccccuc

SEQ ID NO: 3814493 - RNA, 23 nt, Human
agccuugugaucacuuucugaaa

SEQ ID NO: 3814494 - RNA, 16 nt, Human
agccuugugucuacag

SEQ ID NO: 3814495 - RNA, 23 nt, Human
agccuuuaauggacuuauuucuu

SEQ ID NO: 3814496 - RNA, 20 nt, Human
agccuuuacuguuugauaua

SEQ ID NO: 3814497 - RNA, 16 nt, Human
agccuuucauuuugcu

SEQ ID NO: 3814498 - RNA, 17 nt, Human
agccuuucauuuugcuu

SEQ ID NO: 3814499 - RNA, 21 nt, Human
agccuuugaauaaaaaugcac

SEQ ID NO: 3814500 - RNA, 15 nt, Human
agccuuuggaaacag

SEQ ID NO: 3814501 - RNA, 20 nt, Human
agccuuuggaugaccagaac

SEQ ID NO: 3814502 - RNA, 23 nt, Human
agccuuuggcucuggagacagcc

SEQ ID NO: 3814503 - RNA, 18 nt, Human
agccuuugguucuggcca

SEQ ID NO: 3814504 - RNA, 24 nt, Human
agccuuuguuccccacuggagcag

SEQ ID NO: 3814505 - RNA, 19 nt, Human
agccuuuguugaacuguua

SEQ ID NO: 3814506 - RNA, 17 nt, Human
agccuuuuauacugauu

SEQ ID NO: 3814507 - RNA, 16 nt, Human
agccuuuuuaaaacac

SEQ ID NO: 3814508 - RNA, 17 nt, Human
agccuuuuuaaaacaca

SEQ ID NO: 3814509 - RNA, 14 nt, Human
agccuuuuugaaag

SEQ ID NO: 3814510 - RNA, 21 nt, Human
agccuuuuuguauaaaauaga

SEQ ID NO: 3814511 - RNA, 16 nt, Human
agccuuuuuuccccag

SEQ ID NO: 3814512 - RNA, 20 nt, Human
agccuuuuuuccccagacuu

SEQ ID NO: 3814513 - RNA, 23 nt, Human
agcgaaaaaaucagguggcuuuu

SEQ ID NO: 3814514 - RNA, 15 nt, Human
agcgaacaaccacag

SEQ ID NO: 3814515 - RNA, 17 nt, Human
agcgaaguagcuugcuc

SEQ ID NO: 3814516 - RNA, 14 nt, Human
agcgacaaagauga

SEQ ID NO: 3814517 - RNA, 15 nt, Human
agcgacaaagaugau

SEQ ID NO: 3814518 - RNA, 21 nt, Human
agcgacauagcccaucccugc

SEQ ID NO: 3814519 - RNA, 17 nt, Human
agcgacaucucugacuu

SEQ ID NO: 3814520 - RNA, 21 nt, Human
agcgaccaccccugccuccac

SEQ ID NO: 3814521 - RNA, 22 nt, Human
agcgaccuuccucauccacccc

SEQ ID NO: 3814522 - RNA, 15 nt, Human
agcgagcauccccca

SEQ ID NO: 3814523 - RNA, 15 nt, Human
agcgaggaggcucca

SEQ ID NO: 3814524 - RNA, 19 nt, Human
agcgaggaggcuccagagg

SEQ ID NO: 3814525 - RNA, 17 nt, Human
agcgaggcucuaaccac

SEQ ID NO: 3814526 - RNA, 15 nt, Human
agcgagggcagcugc

SEQ ID NO: 3814527 - RNA, 15 nt, Human
agcgagggcgugucu

SEQ ID NO: 3814528 - RNA, 19 nt, Human
agcgaggucaacagagaag

SEQ ID NO: 3814529 - RNA, 23 nt, Human
agcgaggucaacagagaaggcag

SEQ ID NO: 3814530 - RNA, 17 nt, Human
agcugcucugcccagag

SEQ ID NO: 3814531 - RNA, 20 nt, Human
agcugcucugcccagagcug

SEQ ID NO: 3814532 - RNA, 14 nt, Human
agcugcucugugac

SEQ ID NO: 3814533 - RNA, 14 nt, Human
agcugcugacagug

SEQ ID NO: 3814534 - RNA, 20 nt, Human
agcugcugaccaauugugcu

SEQ ID NO: 3814535 - RNA, 20 nt, Human
agcugcugagauccuggacu

SEQ ID NO: 3814536 - RNA, 13 nt, Human
agcugcugagccg

SEQ ID NO: 3814537 - RNA, 14 nt, Human
agcugcuggcuugc

SEQ ID NO: 3814538 - RNA, 14 nt, Human
agcugcuuccagug

SEQ ID NO: 3814539 - RNA, 22 nt, Human
agcugcuucucccacuuggcca

SEQ ID NO: 3814540 - RNA, 22 nt, Human
agcugcuuggaccucgugcuuu

SEQ ID NO: 3814541 - RNA, 21 nt, Human
agcugcuugggcuucauccuc

SEQ ID NO: 3814542 - RNA, 21 nt, Human
agcugcuugugucccuccugg

SEQ ID NO: 3814543 - RNA, 20 nt, Human
agcugcuuucuguugucauu

SEQ ID NO: 3814544 - RNA, 14 nt, Human
agcugcuuucuucu

SEQ ID NO: 3814545 - RNA, 17 nt, Human
agcugcuuuuuuugaaa

SEQ ID NO: 3814546 - RNA, 22 nt, Human
agcugcuuuuuuugaaacuuug

SEQ ID NO: 3814547 - RNA, 18 nt, Human
agcuggaauuuuuuauuc

SEQ ID NO: 3814548 - RNA, 12 nt, Human
agcuggacagag

SEQ ID NO: 3814549 - RNA, 17 nt, Human
agcuggacagaggggac

SEQ ID NO: 3814550 - RNA, 14 nt, Human
agcuggacccugac

SEQ ID NO: 3814551 - RNA, 15 nt, Human
agcuggacuacccac

SEQ ID NO: 3814552 - RNA, 21 nt, Human
agcuggagaggagcccugccu

SEQ ID NO: 3814553 - RNA, 22 nt, Human
agcuggagaggagcccugccuc

SEQ ID NO: 3814554 - RNA, 19 nt, Human
agcuggagaugaggccaga

SEQ ID NO: 3814555 - RNA, 20 nt, Human
agcuggagaugaggccagac

SEQ ID NO: 3814556 - RNA, 21 nt, Human
agcuggagaugaggccagacc

SEQ ID NO: 3814557 - RNA, 15 nt, Human
agcuggagccuggug

SEQ ID NO: 3814558 - RNA, 22 nt, Human
agcuggaggacuagaaccugga

SEQ ID NO: 3814559 - RNA, 22 nt, Human
agcuggaggcaggggcuuccug

SEQ ID NO: 3814560 - RNA, 14 nt, Human
agcuggagugcagu

SEQ ID NO: 3814561 - RNA, 14 nt, Human
agcuggaugagaau

SEQ ID NO: 3814562 - RNA, 19 nt, Human
agcuggcaaagguggcucu

SEQ ID NO: 3814563 - RNA, 19 nt, Human
agcuggccccgccgccugg

SEQ ID NO: 3814564 - RNA, 18 nt, Human
agcuggcccgugacagac

SEQ ID NO: 3814565 - RNA, 21 nt, Human
agcuggccgaggguccuggcu

SEQ ID NO: 3814566 - RNA, 22 nt, Human
agcuggccgcgccaaauaaugu

SEQ ID NO: 3814567 - RNA, 16 nt, Human
agcuggccucucacug

SEQ ID NO: 3814568 - RNA, 12 nt, Human
agcuggccugag

SEQ ID NO: 3814569 - RNA, 21 nt, Human
agcuggccugagaggggaagc

SEQ ID NO: 3814570 - RNA, 15 nt, Human
agcuggccuggacag

SEQ ID NO: 3814571 - RNA, 22 nt, Human
agcuggcggcuggggucccagc

SEQ ID NO: 3814572 - RNA, 23 nt, Human
agcuggcggcuggggucccagca

SEQ ID NO: 3814573 - RNA, 16 nt, Human
agcuggcuccagccug

SEQ ID NO: 3814574 - RNA, 17 nt, Human
agcuggcuccagccugg

SEQ ID NO: 3814575 - RNA, 18 nt, Human
agcuggcuccagccugga

SEQ ID NO: 3814576 - RNA, 20 nt, Human
agcuggcucugagcgccucc

SEQ ID NO: 3814577 - RNA, 23 nt, Human
agcuggcucugagcgccuccauc

SEQ ID NO: 3814578 - RNA, 15 nt, Human
agcuggcuggggugg

SEQ ID NO: 3814579 - RNA, 15 nt, Human
agcugggaccaguac

SEQ ID NO: 3814580 - RNA, 19 nt, Human
agcugggacuacaggcacc

SEQ ID NO: 3814581 - RNA, 20 nt, Human
agcugggacuacaggcaccc

SEQ ID NO: 3814582 - RNA, 16 nt, Human
agcugggacuacaggu

SEQ ID NO: 3814583 - RNA, 13 nt, Human
agcugggagaagg

SEQ ID NO: 3814584 - RNA, 13 nt, Human
agcugggaggaaa

SEQ ID NO: 3814585 - RNA, 18 nt, Human
agcugggaggaaaagaaa

SEQ ID NO: 3814586 - RNA, 19 nt, Human
agcugggaggcaagagggg

SEQ ID NO: 3814587 - RNA, 19 nt, Human
agcugggaggcauggcccu

SEQ ID NO: 3814588 - RNA, 21 nt, Human
agcugggaggcauggcccugg

SEQ ID NO: 3814589 - RNA, 16 nt, Human
agcugggaucugacug

SEQ ID NO: 3814590 - RNA, 16 nt, Human
agcugggauuuuaaac

SEQ ID NO: 3814591 - RNA, 14 nt, Human
agcugggcagguug

SEQ ID NO: 3814592 - RNA, 17 nt, Human
agcugggcaugguacca

SEQ ID NO: 3814593 - RNA, 20 nt, Human
agcugggcccaacccugucu

SEQ ID NO: 3814594 - RNA, 15 nt, Human
agcugggccccagcc

SEQ ID NO: 3814595 - RNA, 17 nt, Human
agcugggccccagccca

SEQ ID NO: 3814596 - RNA, 18 nt, Human
agcggccccucccacaca

SEQ ID NO: 3814597 - RNA, 11 nt, Human
agcggccggcc

SEQ ID NO: 3814598 - RNA, 22 nt, Human
agcggccggccagccccuggcc

SEQ ID NO: 3814599 - RNA, 19 nt, Human
agcggcucaagcccaggag

SEQ ID NO: 3814600 - RNA, 14 nt, Human
agcgggaccugugg

SEQ ID NO: 3814601 - RNA, 23 nt, Human
agcgggcagguucugccugcuuu

SEQ ID NO: 3814602 - RNA, 13 nt, Human
agcgggcgccugu

SEQ ID NO: 3814603 - RNA, 16 nt, Human
agcggggacagcuccu

SEQ ID NO: 3814604 - RNA, 22 nt, Human
agcggggacagcuccuucuguc

SEQ ID NO: 3814605 - RNA, 13 nt, Human
agcggggggaggg

SEQ ID NO: 3814606 - RNA, 16 nt, Human
agcgggguaugaagag

SEQ ID NO: 3814607 - RNA, 21 nt, Human
agcgguggcccugucccuccc

SEQ ID NO: 3814608 - RNA, 14 nt, Human
agcgguugccagga

SEQ ID NO: 3814609 - RNA, 16 nt, Human
agcguaaaauggugaa

SEQ ID NO: 3814610 - RNA, 14 nt, Human
agcguagccucucc

SEQ ID NO: 3814611 - RNA, 19 nt, Human
agcgucagcugcucccugg

SEQ ID NO: 3814612 - RNA, 21 nt, Human
agcgucagcugcucccuggca

SEQ ID NO: 3814613 - RNA, 21 nt, Human
agcgucaggguuggugugcug

SEQ ID NO: 3814614 - RNA, 14 nt, Human
agcgucccuggcgc

SEQ ID NO: 3814615 - RNA, 15 nt, Human
agcgucccuggcgca

SEQ ID NO: 3814616 - RNA, 15 nt, Human
agcgucggucugugc

SEQ ID NO: 3814617 - RNA, 16 nt, Human
agcgucggucugugcc

SEQ ID NO: 3814618 - RNA, 22 nt, Human
agcgugaaggccgagaagcaag

SEQ ID NO: 3814619 - RNA, 23 nt, Human
agcgugaaggccgagaagcaaga

SEQ ID NO: 3814620 - RNA, 16 nt, Human
agcgugagccacugca

SEQ ID NO: 3814621 - RNA, 19 nt, Human
agcgugagccacugcaccg

SEQ ID NO: 3814622 - RNA, 16 nt, Human
agcgugagcugagcag

SEQ ID NO: 3814623 - RNA, 20 nt, Human
agcgugagcuuaaaauacaa

SEQ ID NO: 3814624 - RNA, 19 nt, Human
agcgugcaccaucccuuuu

SEQ ID NO: 3814625 - RNA, 15 nt, Human
agcgugcauaaguua

SEQ ID NO: 3814626 - RNA, 19 nt, Human
agcgugcuccagccuggcu

SEQ ID NO: 3814627 - RNA, 14 nt, Human
agcguggaggggua

SEQ ID NO: 3814628 - RNA, 22 nt, Human
agcguggcgcaguggcccugag

SEQ ID NO: 3814629 - RNA, 11 nt, Human
agcguucuugu

SEQ ID NO: 3814630 - RNA, 19 nt, Human
agcguuggaauuaaaacaa

SEQ ID NO: 3814631 - RNA, 20 nt, Human
agcguuggaauuaaaacaau

SEQ ID NO: 3814632 - RNA, 13 nt, Human
agcguuuugcaag

SEQ ID NO: 3814633 - RNA, 18 nt, Human
agcguuuuguugagcaug

SEQ ID NO: 3814634 - RNA, 12 nt, Human
agcuaaaauaaa

SEQ ID NO: 3814635 - RNA, 15 nt, Human
agcuaaaaugauuuu

SEQ ID NO: 3814636 - RNA, 20 nt, Human
agcuaaaaugauuuuaucug

SEQ ID NO: 3814637 - RNA, 17 nt, Human
agcuaaaccaaggacug

SEQ ID NO: 3814638 - RNA, 17 nt, Human
agcuaaacggauuccaa

SEQ ID NO: 3814639 - RNA, 18 nt, Human
agcuaaacggauuccaaa

SEQ ID NO: 3814640 - RNA, 16 nt, Human
agcuaaagcccaaccu

SEQ ID NO: 3814641 - RNA, 17 nt, Human
agcuaacacacagcucc

SEQ ID NO: 3814642 - RNA, 19 nt, Human
agcuaacacacagcuccca

SEQ ID NO: 3814643 - RNA, 19 nt, Human
agcuaacacuggccccuag

SEQ ID NO: 3814644 - RNA, 19 nt, Human
agcuaacagggaaggcagg

SEQ ID NO: 3814645 - RNA, 23 nt, Human
agcuaacagggaaggcaggcagg

SEQ ID NO: 3814646 - RNA, 19 nt, Human
agcuaacauggaaguacua

SEQ ID NO: 3814647 - RNA, 23 nt, Human
agcuaacauuuuaaauaaaagaa

SEQ ID NO: 3814648 - RNA, 23 nt, Human
agcuaaccaguuaccacacaucu

SEQ ID NO: 3814649 - RNA, 15 nt, Human
agcuaagaaauaaaa

SEQ ID NO: 3814650 - RNA, 17 nt, Human
agcuaagaaccuggaac

SEQ ID NO: 3814651 - RNA, 18 nt, Human
agcuaagcuaggaaugaa

SEQ ID NO: 3814652 - RNA, 23 nt, Human
agcuaagcucacguccugagaaa

SEQ ID NO: 3814653 - RNA, 17 nt, Human
agcuaagggaagacauu

SEQ ID NO: 3814654 - RNA, 21 nt, Human
agcuaagggugggugcucaga

SEQ ID NO: 3814655 - RNA, 16 nt, Human
agcuaauaaaauauca

SEQ ID NO: 3814656 - RNA, 19 nt, Human
agcuaauaaaauaucauuc

SEQ ID NO: 3814657 - RNA, 15 nt, Human
agcuaauaauguuaa

SEQ ID NO: 3814658 - RNA, 21 nt, Human
agcuaaucagcauucucacuc

SEQ ID NO: 3814659 - RNA, 13 nt, Human
agcuaaucuguag

SEQ ID NO: 3814660 - RNA, 19 nt, Human
agcuaaucuguagggcugg

SEQ ID NO: 3814661 - RNA, 23 nt, Human
agcuaaucuguagggcuggaccu

SEQ ID NO: 3814662 - RNA, 15 nt, Human
agcuaaugggacacu

SEQ ID NO: 3814663 - RNA, 23 nt, Human
agcuaauguaauaacugugaagu

SEQ ID NO: 3814664 - RNA, 21 nt, Human
agcuaauucuacucacagugc

SEQ ID NO: 3814665 - RNA, 19 nt, Human
agcuaauugggaguccagg

SEQ ID NO: 3814666 - RNA, 13 nt, Human
agcuaauuuacug

SEQ ID NO: 3814667 - RNA, 20 nt, Human
agcuaauuugcauuaaauuc

SEQ ID NO: 3814668 - RNA, 13 nt, Human
agcuacaaaugca

SEQ ID NO: 3814669 - RNA, 19 nt, Human
agcuacagagaaaccagcu

SEQ ID NO: 3814670 - RNA, 20 nt, Human
agcuacagagaaaccagcuu

SEQ ID NO: 3814671 - RNA, 13 nt, Human
agcuacagguuac

SEQ ID NO: 3814672 - RNA, 14 nt, Human
agcuacagguuaca

SEQ ID NO: 3814673 - RNA, 20 nt, Human
agcuacagguuacaacagau

SEQ ID NO: 3814674 - RNA, 18 nt, Human
agcugugugcucuccaag

SEQ ID NO: 3814675 - RNA, 14 nt, Human
agcuguguggcagu

SEQ ID NO: 3814676 - RNA, 12 nt, Human
agcuguuaaacu

SEQ ID NO: 3814677 - RNA, 19 nt, Human
agcuguuaccauucacaau

SEQ ID NO: 3814678 - RNA, 19 nt, Human
agcuguuauuucuauuuuu

SEQ ID NO: 3814679 - RNA, 13 nt, Human
agcuguucagcug

SEQ ID NO: 3814680 - RNA, 14 nt, Human
agcuguucagcugg

SEQ ID NO: 3814681 - RNA, 18 nt, Human
agcuguuccuguucagua

SEQ ID NO: 3814682 - RNA, 14 nt, Human
agcuguugaccagg

SEQ ID NO: 3814683 - RNA, 16 nt, Human
agcuguugaccaggca

SEQ ID NO: 3814684 - RNA, 18 nt, Human
agcuguugaccaggcacc

SEQ ID NO: 3814685 - RNA, 23 nt, Human
agcuguugacucuaguacuguga

SEQ ID NO: 3814686 - RNA, 13 nt, Human
agcuguugccuca

SEQ ID NO: 3814687 - RNA, 22 nt, Human
agcuguuggccucugcaaagga

SEQ ID NO: 3814688 - RNA, 15 nt, Human
agcuguuguacauuu

SEQ ID NO: 3814689 - RNA, 16 nt, Human
agcuguuguacauuua

SEQ ID NO: 3814690 - RNA, 17 nt, Human
agcuguugucucuucuc

SEQ ID NO: 3814691 - RNA, 18 nt, Human
agcuguuuauagagaaug

SEQ ID NO: 3814692 - RNA, 16 nt, Human
agcuguuuaugcauag

SEQ ID NO: 3814693 - RNA, 18 nt, Human
agcuguuuauggccucag

SEQ ID NO: 3814694 - RNA, 20 nt, Human
agcuguuuauggccucagcu

SEQ ID NO: 3814695 - RNA, 21 nt, Human
agcuguuuauggccucagcug

SEQ ID NO: 3814696 - RNA, 12 nt, Human
agcuguuuaugu

SEQ ID NO: 3814697 - RNA, 13 nt, Human
agcuguuuauguu

SEQ ID NO: 3814698 - RNA, 18 nt, Human
agcuguuuauguuuuuau

SEQ ID NO: 3814699 - RNA, 23 nt, Human
agcuguuugguuuuaaaauacug

SEQ ID NO: 3814700 - RNA, 18 nt, Human
agcuguuuucccugaccu

SEQ ID NO: 3814701 - RNA, 13 nt, Human
agcuuaacagugu

SEQ ID NO: 3814702 - RNA, 14 nt, Human
agcuuaagaaaaaa

SEQ ID NO: 3814703 - RNA, 19 nt, Human
agcuuaagggucauauguu

SEQ ID NO: 3814704 - RNA, 17 nt, Human
agcuuacaagccagcug

SEQ ID NO: 3814705 - RNA, 14 nt, Human
agcuuacaugagaa

SEQ ID NO: 3814706 - RNA, 13 nt, Human
agcuuaccugaca

SEQ ID NO: 3814707 - RNA, 13 nt, Human
agcuuacguaguu

SEQ ID NO: 3814708 - RNA, 15 nt, Human
agcuuagaccucagc

SEQ ID NO: 3814709 - RNA, 19 nt, Human
agcuuagaccucagccugu

SEQ ID NO: 3814710 - RNA, 16 nt, Human
agcuuagauuucauag

SEQ ID NO: 3814711 - RNA, 14 nt, Human
agcuuagcaggaga

SEQ ID NO: 3814712 - RNA, 21 nt, Human
agcuuagcuuuagaaacagug

SEQ ID NO: 3814713 - RNA, 13 nt, Human
agcuuaggcaggg

SEQ ID NO: 3814714 - RNA, 16 nt, Human
agcuuagggcccugga

SEQ ID NO: 3814715 - RNA, 17 nt, Human
agcuuagggcccuggag

SEQ ID NO: 3814716 - RNA, 19 nt, Human
agcuuagggcccuggaggc

SEQ ID NO: 3814717 - RNA, 17 nt, Human
agcuuagggucucaggg

SEQ ID NO: 3814718 - RNA, 17 nt, Human
agcuuagugaaauuacu

SEQ ID NO: 3814719 - RNA, 15 nt, Human
agcuuauaaugggcu

SEQ ID NO: 3814720 - RNA, 18 nt, Human
agcuuauacgaaauaauu

SEQ ID NO: 3814721 - RNA, 20 nt, Human
agcuuauacgaaauaauugu

SEQ ID NO: 3814722 - RNA, 21 nt, Human
agcuuauacgaaauaauuguu

SEQ ID NO: 3814723 - RNA, 15 nt, Human
agcuuaucaauuugu

SEQ ID NO: 3814724 - RNA, 15 nt, Human
agcuuaucaugcugu

SEQ ID NO: 3814725 - RNA, 14 nt, Human
agcuuaucucuuuu

SEQ ID NO: 3814726 - RNA, 17 nt, Human
agcuuaucucuuuuaua

SEQ ID NO: 3814727 - RNA, 22 nt, Human
agcuuaucucuuuuauauuugu

SEQ ID NO: 3814728 - RNA, 14 nt, Human
agcuuauuaaugcu

SEQ ID NO: 3814729 - RNA, 20 nt, Human
agcuuauuuuggagagauag

SEQ ID NO: 3814730 - RNA, 12 nt, Human
agcuucaaagcu

SEQ ID NO: 3814731 - RNA, 16 nt, Human
agcuucaagucugugc

SEQ ID NO: 3814732 - RNA, 18 nt, Human
agcuucaccccaauccca

SEQ ID NO: 3814733 - RNA, 14 nt, Human
agcuucacuucuga

SEQ ID NO: 3814734 - RNA, 17 nt, Human
agcuucagccaggagcu

SEQ ID NO: 3814735 - RNA, 20 nt, Human
agcuucagccaggagcuggg

SEQ ID NO: 3814736 - RNA, 18 nt, Human
agcuucagcuagcuuuua

SEQ ID NO: 3814737 - RNA, 23 nt, Human
agcuucaggaaccucgaguacug

SEQ ID NO: 3814738 - RNA, 11 nt, Human
agcuucagguu

SEQ ID NO: 3814739 - RNA, 22 nt, Human
agcuucaguaaguuaucuuuga

SEQ ID NO: 3814740 - RNA, 19 nt, Human
agcuucagucauuaaauua

SEQ ID NO: 3814741 - RNA, 17 nt, Human
agcuucagugcugccga

SEQ ID NO: 3814742 - RNA, 17 nt, Human
agcuucauauaccagca

SEQ ID NO: 3814743 - RNA, 21 nt, Human
agcuucaugccuuuguaaguu

SEQ ID NO: 3814744 - RNA, 19 nt, Human
agcuucauuuccugugucu

SEQ ID NO: 3814745 - RNA, 13 nt, Human
agcuucauuugug

SEQ ID NO: 3814746 - RNA, 22 nt, Human
agcuuccaaggggcaaauuuuu

SEQ ID NO: 3814747 - RNA, 17 nt, Human
agcuuccaauuuuccuu

SEQ ID NO: 3814748 - RNA, 13 nt, Human
agcuuccagcagg

SEQ ID NO: 3814749 - RNA, 19 nt, Human
agcuuccagcaggagggac

SEQ ID NO: 3814750 - RNA, 23 nt, Human
agcuuccauuccaagccugacca

SEQ ID NO: 3814751 - RNA, 22 nt, Human
agcuuccccaacacgcaggagc

SEQ ID NO: 3814752 - RNA, 12 nt, Human
agcuucccuccc

SEQ ID NO: 3814753 - RNA, 15 nt, Human
agcuucccucccugc

SEQ ID NO: 3814754 - RNA, 16 nt, Human
agcuucccucccugcu

SEQ ID NO: 3814755 - RNA, 20 nt, Human
agaagagcuguucacagcca

SEQ ID NO: 3814756 - RNA, 15 nt, Human
agaagagucuauugu

SEQ ID NO: 3814757 - RNA, 16 nt, Human
agaagaguugaggaac

SEQ ID NO: 3814758 - RNA, 22 nt, Human
agaagaguugaggaacuguaca

SEQ ID NO: 3814759 - RNA, 23 nt, Human
agaagaguugaggaacuguacag

SEQ ID NO: 3814760 - RNA, 22 nt, Human
agaagauaauuguugaaauuuu

SEQ ID NO: 3814761 - RNA, 23 nt, Human
agaagaucacgcuccccgccugu

SEQ ID NO: 3814762 - RNA, 13 nt, Human
agaagauccccuc

SEQ ID NO: 3814763 - RNA, 17 nt, Human
agaagauccuaaaacaa

SEQ ID NO: 3814764 - RNA, 13 nt, Human
agaagaucuuugg

SEQ ID NO: 3814765 - RNA, 22 nt, Human
agaagaugaaaauggaaguggc

SEQ ID NO: 3814766 - RNA, 18 nt, Human
agaagaugaaugagcaaa

SEQ ID NO: 3814767 - RNA, 23 nt, Human
agaagaugcuccagcaacacagc

SEQ ID NO: 3814768 - RNA, 23 nt, Human
agaagauguugaagaauacaguu

SEQ ID NO: 3814769 - RNA, 21 nt, Human
agaagcaaccucaguaauuua

SEQ ID NO: 3814770 - RNA, 16 nt, Human
agaagcacagaauauu

SEQ ID NO: 3814771 - RNA, 13 nt, Human
agaagcagagaga

SEQ ID NO: 3814772 - RNA, 16 nt, Human
agaagcagaggaagga

SEQ ID NO: 3814773 - RNA, 23 nt, Human
agaagcagugagccgcaucuucu

SEQ ID NO: 3814774 - RNA, 18 nt, Human
agaagcauuaacuucucu

SEQ ID NO: 3814775 - RNA, 21 nt, Human
agaagcauuaacuucucugga

SEQ ID NO: 3814776 - RNA, 14 nt, Human
agaagcauuccuuc

SEQ ID NO: 3814777 - RNA, 23 nt, Human
agaagcauuccuucuuugauaau

SEQ ID NO: 3814778 - RNA, 16 nt, Human
agaagcauuuguauuu

SEQ ID NO: 3814779 - RNA, 23 nt, Human
agaagcauuuguauuuuguguga

SEQ ID NO: 3814780 - RNA, 19 nt, Human
agaagcauuuuguaaguug

SEQ ID NO: 3814781 - RNA, 17 nt, Human
agaagccaaaagauugg

SEQ ID NO: 3814782 - RNA, 18 nt, Human
agaagccaacuaugauua

SEQ ID NO: 3814783 - RNA, 16 nt, Human
agaagccaagggaaag

SEQ ID NO: 3814784 - RNA, 16 nt, Human
agaagccacaggccug

SEQ ID NO: 3814785 - RNA, 18 nt, Human
agaagccacccaaagcag

SEQ ID NO: 3814786 - RNA, 20 nt, Human
agaagccagcuuguuuacau

SEQ ID NO: 3814787 - RNA, 16 nt, Human
agaagccaucaccuca

SEQ ID NO: 3814788 - RNA, 13 nt, Human
agaagcccagaau

SEQ ID NO: 3814789 - RNA, 12 nt, Human
agaagcccccag

SEQ ID NO: 3814790 - RNA, 24 nt, Human
agaagcccccagcuaagaaccugg

SEQ ID NO: 3814791 - RNA, 20 nt, Human
agaagccccuuccccauggg

SEQ ID NO: 3814792 - RNA, 17 nt, Human
agaagcccggcuccugg

SEQ ID NO: 3814793 - RNA, 16 nt, Human
agaagccgggaacaga

SEQ ID NO: 3814794 - RNA, 14 nt, Human
agaagccgugggug

SEQ ID NO: 3814795 - RNA, 16 nt, Human
agaagccucuggcuag

SEQ ID NO: 3814796 - RNA, 23 nt, Human
agaagccucuggcuagaggccag

SEQ ID NO: 3814797 - RNA, 17 nt, Human
agaagccugaggcuggg

SEQ ID NO: 3814798 - RNA, 11 nt, Human
agaagccugca

SEQ ID NO: 3814799 - RNA, 18 nt, Human
agaagccugggggccugg

SEQ ID NO: 3814800 - RNA, 18 nt, Human
agaagccuguaacacucc

SEQ ID NO: 3814801 - RNA, 15 nt, Human
agaagccuucaagcu

SEQ ID NO: 3814802 - RNA, 18 nt, Human
agaagccuucaagcucug

SEQ ID NO: 3814803 - RNA, 19 nt, Human
agaagccuucaagcucuga

SEQ ID NO: 3814804 - RNA, 20 nt, Human
agaagccuucaagcucugag

SEQ ID NO: 3814805 - RNA, 23 nt, Human
agaagccuucaagcucugaggga

SEQ ID NO: 3814806 - RNA, 18 nt, Human
agaagccuucagcuccag

SEQ ID NO: 3814807 - RNA, 19 nt, Human
agaagccuuugggaagggg

SEQ ID NO: 3814808 - RNA, 20 nt, Human
agaagcuauaaauuccucuu

SEQ ID NO: 3814809 - RNA, 18 nt, Human
agaagcucagcugcauuc

SEQ ID NO: 3814810 - RNA, 16 nt, Human
agaagcucccaggaac

SEQ ID NO: 3814811 - RNA, 15 nt, Human
agaagcucccccagc

SEQ ID NO: 3814812 - RNA, 19 nt, Human
agaagcucugaagaacucu

SEQ ID NO: 3814813 - RNA, 21 nt, Human
agaagcugaagugcauccaaa

SEQ ID NO: 3814814 - RNA, 11 nt, Human
agaagcugcag

SEQ ID NO: 3814815 - RNA, 13 nt, Human
agaagcugcaggc

SEQ ID NO: 3814816 - RNA, 15 nt, Human
agaagcugcaggcuu

SEQ ID NO: 3814817 - RNA, 21 nt, Human
agaagcugccaggugagaaac

SEQ ID NO: 3814818 - RNA, 23 nt, Human
agaagcugccaggugagaaacug

SEQ ID NO: 3814819 - RNA, 16 nt, Human
aggaauauuuuccaaa

SEQ ID NO: 3814820 - RNA, 20 nt, Human
aggaauauuuuccaaagagu

SEQ ID NO: 3814821 - RNA, 17 nt, Human
aggaaucaagagcugcc

SEQ ID NO: 3814822 - RNA, 15 nt, Human
aggaaucacucuugu

SEQ ID NO: 3814823 - RNA, 15 nt, Human
aggaaucagacuuca

SEQ ID NO: 3814824 - RNA, 22 nt, Human
aggaaucagcaagaagauccua

SEQ ID NO: 3814825 - RNA, 20 nt, Human
aggaaucaucaggaacguuu

SEQ ID NO: 3814826 - RNA, 22 nt, Human
aggaaucaugucaggccugugu

SEQ ID NO: 3814827 - RNA, 16 nt, Human
aggaauccacucccag

SEQ ID NO: 3814828 - RNA, 17 nt, Human
aggaauccacucccagg

SEQ ID NO: 3814829 - RNA, 17 nt, Human
aggaauccagacccggc

SEQ ID NO: 3814830 - RNA, 20 nt, Human
aggaauccagacccggcugc

SEQ ID NO: 3814831 - RNA, 15 nt, Human
aggaauccaugaaga

SEQ ID NO: 3814832 - RNA, 16 nt, Human
aggaauccuggcagcc

SEQ ID NO: 3814833 - RNA, 20 nt, Human
aggaauccuggcagcccaga

SEQ ID NO: 3814834 - RNA, 19 nt, Human
aggaaucugugggucuggg

SEQ ID NO: 3814835 - RNA, 16 nt, Human
aggaaucuuuaaaaga

SEQ ID NO: 3814836 - RNA, 22 nt, Human
aggaaucuuuaaaagaugcuuu

SEQ ID NO: 3814837 - RNA, 13 nt, Human
aggaaugaagaua

SEQ ID NO: 3814838 - RNA, 19 nt, Human
aggaaugaagauaccauca

SEQ ID NO: 3814839 - RNA, 15 nt, Human
aggaaugcuccccca

SEQ ID NO: 3814840 - RNA, 20 nt, Human
aggaaugcucccccauccuc

SEQ ID NO: 3814841 - RNA, 16 nt, Human
aggaaugcuuggaaua

SEQ ID NO: 3814842 - RNA, 20 nt, Human
aggaaugcuuggaauaucug

SEQ ID NO: 3814843 - RNA, 24 nt, Human
aggaaugcuuggaauaucugcugu

SEQ ID NO: 3814844 - RNA, 12 nt, Human
aggaauggacag

SEQ ID NO: 3814845 - RNA, 20 nt, Human
aggaauggacagacagagga

SEQ ID NO: 3814846 - RNA, 16 nt, Human
aggaauggacauuucu

SEQ ID NO: 3814847 - RNA, 13 nt, Human
aggaaugggcugu

SEQ ID NO: 3814848 - RNA, 20 nt, Human
aggaaugggggccucuucaa

SEQ ID NO: 3814849 - RNA, 16 nt, Human
aggaauguguggccug

SEQ ID NO: 3814850 - RNA, 14 nt, Human
aggaauguuaaagu

SEQ ID NO: 3814851 - RNA, 22 nt, Human
aggaauguuaaagucaguggga

SEQ ID NO: 3814852 - RNA, 23 nt, Human
aggaauuaaguuagggaauggca

SEQ ID NO: 3814853 - RNA, 23 nt, Human
aggaauucccagcccaaagcugu

SEQ ID NO: 3814854 - RNA, 14 nt, Human
aggaauucuguaua

SEQ ID NO: 3814855 - RNA, 22 nt, Human
aggaauugacccacaagaaaug

SEQ ID NO: 3814856 - RNA, 12 nt, Human
aggaauugacuu

SEQ ID NO: 3814857 - RNA, 11 nt, Human
aggaauuuaaa

SEQ ID NO: 3814858 - RNA, 14 nt, Human
aggaauuuauaccu

SEQ ID NO: 3814859 - RNA, 15 nt, Human
aggaauuuauaccuc

SEQ ID NO: 3814860 - RNA, 18 nt, Human
aggaauuucccaggaccc

SEQ ID NO: 3814861 - RNA, 19 nt, Human
aggaauuugaagcugcagu

SEQ ID NO: 3814862 - RNA, 13 nt, Human
aggaauuugggac

SEQ ID NO: 3814863 - RNA, 20 nt, Human
aggaauuugggacccugcuu

SEQ ID NO: 3814864 - RNA, 20 nt, Human
aggaauuuuauuuuuuucug

SEQ ID NO: 3814865 - RNA, 14 nt, Human
aggaauuuucuuug

SEQ ID NO: 3814866 - RNA, 16 nt, Human
aggaauuuucuuugug

SEQ ID NO: 3814867 - RNA, 18 nt, Human
aggacaaaaaugaacuga

SEQ ID NO: 3814868 - RNA, 14 nt, Human
aggacaaaacuucu

SEQ ID NO: 3814869 - RNA, 17 nt, Human
aggacaaaacuucuugu

SEQ ID NO: 3814870 - RNA, 23 nt, Human
aggacaaaacuucuugucagaca

SEQ ID NO: 3814871 - RNA, 18 nt, Human
aggacaaagucuccagcc

SEQ ID NO: 3814872 - RNA, 18 nt, Human
aggacaaagugccaaaga

SEQ ID NO: 3814873 - RNA, 21 nt, Human
aggacaaagugccaaagaaag

SEQ ID NO: 3814874 - RNA, 16 nt, Human
aggacaaauugagaca

SEQ ID NO: 3814875 - RNA, 14 nt, Human
aggacaaccauucc

SEQ ID NO: 3814876 - RNA, 14 nt, Human
aggacaacgaggaa

SEQ ID NO: 3814877 - RNA, 18 nt, Human
aggacaacgaggaagccc

SEQ ID NO: 3814878 - RNA, 13 nt, Human
aggacaagcaugg

SEQ ID NO: 3814879 - RNA, 19 nt, Human
aggacaaggugcaggcagg

SEQ ID NO: 3814880 - RNA, 17 nt, Human
aggacaaucaguccccu

SEQ ID NO: 3814881 - RNA, 21 nt, Human
aggacaaucaguccccuccca

SEQ ID NO: 3814882 - RNA, 14 nt, Human
aggacaauuucaaa

SEQ ID NO: 3814883 - RNA, 11 nt, Human
aggacacaggc

SEQ ID NO: 3814884 - RNA, 14 nt, Human
aggacacaggccug

SEQ ID NO: 3814885 - RNA, 15 nt, Human
aggacacaguuccug

SEQ ID NO: 3814886 - RNA, 16 nt, Human
aggacacaguuccugg

SEQ ID NO: 3814887 - RNA, 21 nt, Human
aggacacaguuccugggaaca

SEQ ID NO: 3814888 - RNA, 12 nt, Human
aggacacauguc

SEQ ID NO: 3814889 - RNA, 15 nt, Human
aggacaccacaccca

SEQ ID NO: 3814890 - RNA, 20 nt, Human
aggacaccacacccagccuc

SEQ ID NO: 3814891 - RNA, 22 nt, Human
aggacaccuguacuggagagca

SEQ ID NO: 3814892 - RNA, 16 nt, Human
aggacacuuccugccu

SEQ ID NO: 3814893 - RNA, 17 nt, Human
aggacagccccuccucc

SEQ ID NO: 3814894 - RNA, 16 nt, Human
aggacagccgccugga

SEQ ID NO: 3814895 - RNA, 23 nt, Human
aggacagccuguggcggugccug

SEQ ID NO: 3814896 - RNA, 15 nt, Human
aggacagcuguccuc

SEQ ID NO: 3814897 - RNA, 22 nt, Human
aggacaggaaaguggcaccugu

SEQ ID NO: 3814898 - RNA, 18 nt, Human
aggacaggaccagauuuu

SEQ ID NO: 3814899 - RNA, 17 nt, Human
aggacaggcagaaagag

SEQ ID NO: 3814900 - RNA, 14 nt, Human
aggacaggcaggug

SEQ ID NO: 3814901 - RNA, 20 nt, Human
aggacaggcgggaggaggug

SEQ ID NO: 3814902 - RNA, 12 nt, Human
aggacaggcugc

SEQ ID NO: 3814903 - RNA, 12 nt, Human
aggacaguauuu

SEQ ID NO: 3814904 - RNA, 19 nt, Human
aggacaguauuugugggga

SEQ ID NO: 3814905 - RNA, 20 nt, Human
aggacauaaauuagaggucu

SEQ ID NO: 3814906 - RNA, 13 nt, Human
aggacauaauggg

SEQ ID NO: 3814907 - RNA, 22 nt, Human
aggacauagagguauauuggaa

SEQ ID NO: 3814908 - RNA, 12 nt, Human
aggacaucagca

SEQ ID NO: 3814909 - RNA, 20 nt, Human
aggacauccccccgccaaaa

SEQ ID NO: 3814910 - RNA, 17 nt, Human
aggacaugaugcuuuua

SEQ ID NO: 3814911 - RNA, 20 nt, Human
aggacaugcgguagccagca

SEQ ID NO: 3814912 - RNA, 14 nt, Human
aggacauggcuucu

SEQ ID NO: 3814913 - RNA, 16 nt, Human
aggacauguucccuuc

SEQ ID NO: 3814914 - RNA, 16 nt, Human
aggacauuccaagaca

SEQ ID NO: 3814915 - RNA, 17 nt, Human
aggacauuccaagacag

SEQ ID NO: 3814916 - RNA, 23 nt, Human
aggaccaauaaaauuucuaagag

SEQ ID NO: 3814917 - RNA, 19 nt, Human
aggaccacaggugugagcc

SEQ ID NO: 3814918 - RNA, 18 nt, Human
aggaccacucagccccua

SEQ ID NO: 3814919 - RNA, 19 nt, Human
aggaccacucagccccuag

SEQ ID NO: 3814920 - RNA, 12 nt, Human
aggaccacuccu

SEQ ID NO: 3814921 - RNA, 16 nt, Human
aggaccacuccuguac

SEQ ID NO: 3814922 - RNA, 18 nt, Human
aggaccagcacacucccg

SEQ ID NO: 3814923 - RNA, 12 nt, Human
aggaccagcuca

SEQ ID NO: 3814924 - RNA, 13 nt, Human
aggaccagcucag

SEQ ID NO: 3814925 - RNA, 14 nt, Human
aggaccagcucagg

SEQ ID NO: 3814926 - RNA, 18 nt, Human
aggaccagcucaggacag

SEQ ID NO: 3814927 - RNA, 12 nt, Human
aggaccaggacu

SEQ ID NO: 3814928 - RNA, 22 nt, Human
aggaccaggacuauagcccagg

SEQ ID NO: 3814929 - RNA, 18 nt, Human
aggaccagggcagggcca

SEQ ID NO: 3814930 - RNA, 18 nt, Human
aggacccaagcagagaag

SEQ ID NO: 3814931 - RNA, 23 nt, Human
aggacccacuuccugaucccuca

SEQ ID NO: 3814932 - RNA, 12 nt, Human
aggacccagacc

SEQ ID NO: 3814933 - RNA, 13 nt, Human
aggacccagaccc

SEQ ID NO: 3814934 - RNA, 18 nt, Human
aggacccagacccagugg

SEQ ID NO: 3814935 - RNA, 13 nt, Human
aggacccagagga

SEQ ID NO: 3814936 - RNA, 18 nt, Human
aggacccaggacaggauc

SEQ ID NO: 3814937 - RNA, 12 nt, Human
aggacccagggc

SEQ ID NO: 3814938 - RNA, 15 nt, Human
aggacccagggcucu

SEQ ID NO: 3814939 - RNA, 17 nt, Human
aggacccggaggggccu

SEQ ID NO: 3814940 - RNA, 20 nt, Human
aggacccggaggggccuggc

SEQ ID NO: 3814941 - RNA, 16 nt, Human
aggacccgucuccagc

SEQ ID NO: 3814942 - RNA, 18 nt, Human
aggacccuaacacaguau

SEQ ID NO: 3814943 - RNA, 19 nt, Human
aggacccucgcuggccccc

SEQ ID NO: 3814944 - RNA, 19 nt, Human
aggacccugccaggcacag

SEQ ID NO: 3814945 - RNA, 14 nt, Human
aggacccuggaccu

SEQ ID NO: 3814946 - RNA, 19 nt, Human
aggaccguggcccugcccu

SEQ ID NO: 3814947 - RNA, 20 nt, Human
aggaccucaggugagaagca

SEQ ID NO: 3814948 - RNA, 23 nt, Human
aggaccucauccaaacaauuuaa

SEQ ID NO: 3814949 - RNA, 21 nt, Human
aggaccuccaagccacugagc

SEQ ID NO: 3814950 - RNA, 19 nt, Human
aggaccuccucuucccccu

SEQ ID NO: 3814951 - RNA, 22 nt, Human
aggaccugacccuacucccuug

SEQ ID NO: 3814952 - RNA, 16 nt, Human
aggaccugagaccuga

SEQ ID NO: 3814953 - RNA, 14 nt, Human
aggaccugagccug

SEQ ID NO: 3814954 - RNA, 16 nt, Human
aggaccugagccugcc

SEQ ID NO: 3814955 - RNA, 18 nt, Human
aggaccugagccugccga

SEQ ID NO: 3814956 - RNA, 12 nt, Human
aggaccugcccc

SEQ ID NO: 3814957 - RNA, 17 nt, Human
aggaccuggcugccaua

SEQ ID NO: 3814958 - RNA, 19 nt, Human
agcuucauggcagaaggca

SEQ ID NO: 3814959 - RNA, 16 nt, Human
agcuucauguggcuuc

SEQ ID NO: 3814960 - RNA, 21 nt, Human
agcuucauucuccuuguuguu

SEQ ID NO: 3814961 - RNA, 19 nt, Human
agcuucauuugugucaaug

SEQ ID NO: 3814962 - RNA, 20 nt, Human
agcuucauuugugucaaugg

SEQ ID NO: 3814963 - RNA, 20 nt, Human
agcuuccaaggggcaaauuu

SEQ ID NO: 3814964 - RNA, 18 nt, Human
aggagcccaggccaggac

SEQ ID NO: 3814965 - RNA, 22 nt, Human
aggagcccauuuggagggccug

SEQ ID NO: 3814966 - RNA, 17 nt, Human
aggagccccaucugucu

SEQ ID NO: 3814967 - RNA, 15 nt, Human
aggagccccauuccu

SEQ ID NO: 3814968 - RNA, 18 nt, Human
aggagccccauuccuggg

SEQ ID NO: 3814969 - RNA, 17 nt, Human
aggagccccgaggccuu

SEQ ID NO: 3814970 - RNA, 22 nt, Human
aggagccccgaggccuucucug

SEQ ID NO: 3814971 - RNA, 13 nt, Human
aggagcccugccu

SEQ ID NO: 3814972 - RNA, 14 nt, Human
aggagccucacugg

SEQ ID NO: 3814973 - RNA, 13 nt, Human
aggagccugcaac

SEQ ID NO: 3814974 - RNA, 21 nt, Human
agcuuuuuaauuguuguuucu

SEQ ID NO: 3814975 - RNA, 22 nt, Human
agcuuuuuauuccuccugcuca

SEQ ID NO: 3814976 - RNA, 17 nt, Human
agcuuuuuccuccugga

SEQ ID NO: 3814977 - RNA, 15 nt, Human
agcuuuuugaaaacc

SEQ ID NO: 3814978 - RNA, 13 nt, Human
agcuuuuuggaau

SEQ ID NO: 3814979 - RNA, 13 nt, Human
agcuuuuugucuu

SEQ ID NO: 3814980 - RNA, 22 nt, Human
agcuuuuuuauuuuuuauacag

SEQ ID NO: 3814981 - RNA, 20 nt, Human
agcuuuuuucucugauacag

SEQ ID NO: 3814982 - RNA, 16 nt, Human
aggaaaaaaacuuuua

SEQ ID NO: 3814983 - RNA, 22 nt, Human
aggaaaaaaaucguccagggag

SEQ ID NO: 3814984 - RNA, 14 nt, Human
aggaaaaacagguc

SEQ ID NO: 3814985 - RNA, 14 nt, Human
aggaaaaagaaaau

SEQ ID NO: 3814986 - RNA, 22 nt, Human
aggaaaaagcaaguucgucugu

SEQ ID NO: 3814987 - RNA, 18 nt, Human
aggaaaaagcacaagaag

SEQ ID NO: 3814988 - RNA, 18 nt, Human
aggaaaaagcuccaugug

SEQ ID NO: 3814989 - RNA, 14 nt, Human
aggaaaaauaugug

SEQ ID NO: 3814990 - RNA, 14 nt, Human
aggaaaaauauuua

SEQ ID NO: 3814991 - RNA, 19 nt, Human
aggaaaaauguguaauuuu

SEQ ID NO: 3814992 - RNA, 13 nt, Human
aggaaaacuaccu

SEQ ID NO: 3814993 - RNA, 14 nt, Human
aggaaaacugcaug

SEQ ID NO: 3814994 - RNA, 16 nt, Human
aggaaaagcaaauuga

SEQ ID NO: 3814995 - RNA, 20 nt, Human
aggaaaagcggacaucagcu

SEQ ID NO: 3814996 - RNA, 17 nt, Human
aggaaaagguugaauaa

SEQ ID NO: 3814997 - RNA, 22 nt, Human
aggaaaagguugaauaauauau

SEQ ID NO: 3814998 - RNA, 21 nt, Human
aggaaaaguuuaauauuaaag

SEQ ID NO: 3814999 - RNA, 23 nt, Human
aggaaaaguuuaauauuaaagcc

SEQ ID NO: 3815000 - RNA, 14 nt, Human
aggaaaauaaugua

SEQ ID NO: 3815001 - RNA, 22 nt, Human
aggaaaauaauguaauuguaau

SEQ ID NO: 3815002 - RNA, 22 nt, Human
aggaaaauauuuugaucuucaa

SEQ ID NO: 3815003 - RNA, 14 nt, Human
aggaaaaugaauaa

SEQ ID NO: 3815004 - RNA, 15 nt, Human
aggaaaaugaucuga

SEQ ID NO: 3815005 - RNA, 21 nt, Human
aggaaaauuauucuauaauuu

SEQ ID NO: 3815006 - RNA, 13 nt, Human
aggaaaccaacac

SEQ ID NO: 3815007 - RNA, 15 nt, Human
aggaaacccagcucu

SEQ ID NO: 3815008 - RNA, 17 nt, Human
aggaaacccagcucugg

SEQ ID NO: 3815009 - RNA, 23 nt, Human
aggaaaccgaguagaaaauguga

SEQ ID NO: 3815010 - RNA, 16 nt, Human
aggaaaccuuuucuug

SEQ ID NO: 3815011 - RNA, 17 nt, Human
aggaaaccuuuucuugu

SEQ ID NO: 3815012 - RNA, 20 nt, Human
aggaaacgagacuuuccauu

SEQ ID NO: 3815013 - RNA, 16 nt, Human
aggaaacgcuaccucu

SEQ ID NO: 3815014 - RNA, 20 nt, Human
aggaaacucaccugcuggcc

SEQ ID NO: 3815015 - RNA, 19 nt, Human
aggaaacuccacaucugcc

SEQ ID NO: 3815016 - RNA, 13 nt, Human
aggaaacucuuau

SEQ ID NO: 3815017 - RNA, 18 nt, Human
aggaaacucuuaucucag

SEQ ID NO: 3815018 - RNA, 15 nt, Human
aggaaacuuuuaacu

SEQ ID NO: 3815019 - RNA, 19 nt, Human
aggaaagagaacuuccaga

SEQ ID NO: 3815020 - RNA, 19 nt, Human
aggaaagcaaaggagauug

SEQ ID NO: 3815021 - RNA, 23 nt, Human
aggaaagcaaaucaguuugguug

SEQ ID NO: 3815022 - RNA, 18 nt, Human
aggaaagcaauaaaugaa

SEQ ID NO: 3815023 - RNA, 19 nt, Human
aggaaagccccagcacuaa

SEQ ID NO: 3815024 - RNA, 24 nt, Human
aggaaagcgccuccaacccuagca

SEQ ID NO: 3815025 - RNA, 21 nt, Human
aggaaagcuugaguaaaauaa

SEQ ID NO: 3815026 - RNA, 17 nt, Human
aggaaaggccagcuggc

SEQ ID NO: 3815027 - RNA, 22 nt, Human
aggaaaggccagcuggcagcag

SEQ ID NO: 3815028 - RNA, 15 nt, Human
aggaaaggcuccagg

SEQ ID NO: 3815029 - RNA, 22 nt, Human
aggaaagggaggaguggaggug

SEQ ID NO: 3815030 - RNA, 19 nt, Human
aggaaagggggucccagug

SEQ ID NO: 3815031 - RNA, 18 nt, Human
aggaaagugauaugcauu

SEQ ID NO: 3815032 - RNA, 20 nt, Human
aggaaauaaaaaagucucua

SEQ ID NO: 3815033 - RNA, 22 nt, Human
aggaaauaaaaaagucucuauu

SEQ ID NO: 3815034 - RNA, 19 nt, Human
aggaaauaaaaccuuucaa

SEQ ID NO: 3815035 - RNA, 16 nt, Human
aggaaauaagaaaaau

SEQ ID NO: 3815036 - RNA, 20 nt, Human
aggaaauauauaugugugug

SEQ ID NO: 3815037 - RNA, 16 nt, Human
aggaaauauugcuggg

SEQ ID NO: 3815038 - RNA, 19 nt, Human
aggaaaucaaauaugcaaa

SEQ ID NO: 3815039 - RNA, 21 nt, Human
aggaaaucaaauaugcaaagc

SEQ ID NO: 3815040 - RNA, 22 nt, Human
aggaaaucaaauaugcaaagca

SEQ ID NO: 3815041 - RNA, 14 nt, Human
aggaaauccagggu

SEQ ID NO: 3815042 - RNA, 14 nt, Human
aggaaaucccuuca

SEQ ID NO: 3815043 - RNA, 18 nt, Human
aggaaaucccuucauacu

SEQ ID NO: 3815044 - RNA, 14 nt, Human
aggaaaucucaccc

SEQ ID NO: 3815045 - RNA, 15 nt, Human
aggaaaugaaugugu

SEQ ID NO: 3815046 - RNA, 18 nt, Human
aggaaauggaauacugaa

SEQ ID NO: 3815047 - RNA, 23 nt, Human
aggaaauguuuuuaauaaaagaa

SEQ ID NO: 3815048 - RNA, 16 nt, Human
aggaaauucuccacug

SEQ ID NO: 3815049 - RNA, 22 nt, Human
aggaaauucuuucccagucugu

SEQ ID NO: 3815050 - RNA, 16 nt, Human
aggaacaaaaaaacca

SEQ ID NO: 3815051 - RNA, 15 nt, Human
aggaacaaaucuucc

SEQ ID NO: 3815052 - RNA, 17 nt, Human
aggaacaaaucuuccug

SEQ ID NO: 3815053 - RNA, 20 nt, Human
aggaacaaggcaaggcuguc

SEQ ID NO: 3815054 - RNA, 13 nt, Human
aggaacagaagga

SEQ ID NO: 3815055 - RNA, 17 nt, Human
aggaacauuuaggggca

SEQ ID NO: 3815056 - RNA, 15 nt, Human
aggaaccacaccaca

SEQ ID NO: 3815057 - RNA, 16 nt, Human
aggaaccauaaucaau

SEQ ID NO: 3815058 - RNA, 19 nt, Human
aggaacccuuacaguagga

SEQ ID NO: 3815059 - RNA, 20 nt, Human
aggaaccgugguaugucugc

SEQ ID NO: 3815060 - RNA, 23 nt, Human
aggaaccgugguaugucugccau

SEQ ID NO: 3815061 - RNA, 13 nt, Human
aggaaccuggacc

SEQ ID NO: 3815062 - RNA, 20 nt, Human
aggaaccuuccuuccugcuu

SEQ ID NO: 3815063 - RNA, 22 nt, Human
aggaacguaaucguguccccua

SEQ ID NO: 3815064 - RNA, 15 nt, Human
aggaacuacugagga

SEQ ID NO: 3815065 - RNA, 14 nt, Human
aggaacuccuuggc

SEQ ID NO: 3815066 - RNA, 18 nt, Human
aggaacuguccagagagc

SEQ ID NO: 3815067 - RNA, 19 nt, Human
aggaacuguccagagagca

SEQ ID NO: 3815068 - RNA, 16 nt, Human
aggaagaaaaaucagu

SEQ ID NO: 3815069 - RNA, 22 nt, Human
aggaagaacggggcucuucuca

SEQ ID NO: 3815070 - RNA, 18 nt, Human
aggaagaagcuuaggcag

SEQ ID NO: 3815071 - RNA, 17 nt, Human
aggaagaauagggccca

SEQ ID NO: 3815072 - RNA, 15 nt, Human
aggaagaauuuuaaa

SEQ ID NO: 3815073 - RNA, 13 nt, Human
aggaagacuuugg

SEQ ID NO: 3815074 - RNA, 14 nt, Human
aggaagagaaaaaa

SEQ ID NO: 3815075 - RNA, 16 nt, Human
aggaagagaaggagca

SEQ ID NO: 3815076 - RNA, 14 nt, Human
aggaagagacacuc

SEQ ID NO: 3815077 - RNA, 18 nt, Human
aggaagaucacuuugcuc

SEQ ID NO: 3815078 - RNA, 21 nt, Human
aggaagaucacuuugcucuga

SEQ ID NO: 3815079 - RNA, 17 nt, Human
aggaagaucccccagaa

SEQ ID NO: 3815080 - RNA, 20 nt, Human
aggaagaucucugcagggcc

SEQ ID NO: 3815081 - RNA, 15 nt, Human
aggaagaugaaagag

SEQ ID NO: 3815082 - RNA, 17 nt, Human
aggaagaugaaagagga

SEQ ID NO: 3815083 - RNA, 18 nt, Human
aggaagaugggggcaaga

SEQ ID NO: 3815084 - RNA, 20 nt, Human
aggaagaugggggcaagaag

SEQ ID NO: 3815085 - RNA, 22 nt, Human
aggaagaugggggcaagaagau

SEQ ID NO: 3815086 - RNA, 17 nt, Human
aggaagauuacucagua

SEQ ID NO: 3815087 - RNA, 19 nt, Human
aggaagcaaauagaagaga

SEQ ID NO: 3815088 - RNA, 13 nt, Human
aggaagcaacgaa

SEQ ID NO: 3815089 - RNA, 19 nt, Human
aggaagcaacgaagggaaa

SEQ ID NO: 3815090 - RNA, 11 nt, Human
aggaagcacau

SEQ ID NO: 3815091 - RNA, 11 nt, Human
aggaagcagaa

SEQ ID NO: 3815092 - RNA, 14 nt, Human
aggaagcagaauaa

SEQ ID NO: 3815093 - RNA, 17 nt, Human
aggaagcagaauaaagc

SEQ ID NO: 3815094 - RNA, 14 nt, Human
aggaagcagccaag

SEQ ID NO: 3815095 - RNA, 16 nt, Human
aggaagcaugagugcu

SEQ ID NO: 3815096 - RNA, 18 nt, Human
aggaagcauucagagagc

SEQ ID NO: 3815097 - RNA, 19 nt, Human
aggaagcauucagagagca

SEQ ID NO: 3815098 - RNA, 15 nt, Human
aggaagcauuguaaa

SEQ ID NO: 3815099 - RNA, 17 nt, Human
aggaagcauuguaaaau

SEQ ID NO: 3815100 - RNA, 21 nt, Human
aggaagcauuguaaaauaauu

SEQ ID NO: 3815101 - RNA, 22 nt, Human
aggaagcauuguaaaauaauuc

SEQ ID NO: 3815102 - RNA, 15 nt, Human
aggaagccacagcug

SEQ ID NO: 3815103 - RNA, 23 nt, Human
aggaagccagcaggcucucaggc

SEQ ID NO: 3815104 - RNA, 20 nt, Human
aggaagccgcuggggccagu

SEQ ID NO: 3815105 - RNA, 19 nt, Human
aggaagccggggaagagau

SEQ ID NO: 3815106 - RNA, 21 nt, Human
aggaagccgugcccugccccc

SEQ ID NO: 3815107 - RNA, 13 nt, Human
aggaagccucaga

SEQ ID NO: 3815108 - RNA, 19 nt, Human
aggaggccacgugaugugg

SEQ ID NO: 3815109 - RNA, 12 nt, Human
aggaggccucca

SEQ ID NO: 3815110 - RNA, 15 nt, Human
aggaggccuccaucu

SEQ ID NO: 3815111 - RNA, 20 nt, Human
aggaggcgcccuuggcuucu

SEQ ID NO: 3815112 - RNA, 21 nt, Human
aggaggcuaugcucaggggcc

SEQ ID NO: 3815113 - RNA, 17 nt, Human
aggaggcuccaggcagc

SEQ ID NO: 3815114 - RNA, 12 nt, Human
aggaggcuggag

SEQ ID NO: 3815115 - RNA, 13 nt, Human
aggaggcuggcag

SEQ ID NO: 3815116 - RNA, 19 nt, Human
aggagggacaaaggagccu

SEQ ID NO: 3815117 - RNA, 20 nt, Human
aggagggacaaaggagccug

SEQ ID NO: 3815118 - RNA, 16 nt, Human
aggagggagacacugg

SEQ ID NO: 3815119 - RNA, 23 nt, Human
aggagggagacacuggccccuca

SEQ ID NO: 3815120 - RNA, 20 nt, Human
aggagggagagucucccagg

SEQ ID NO: 3815121 - RNA, 19 nt, Human
aggagggaugcugccugag

SEQ ID NO: 3815122 - RNA, 20 nt, Human
aggagggcaagggccaugcu

SEQ ID NO: 3815123 - RNA, 13 nt, Human
aggagggcaggca

SEQ ID NO: 3815124 - RNA, 17 nt, Human
aggaggggaaaaaaaug

SEQ ID NO: 3815125 - RNA, 16 nt, Human
aggaggggaacacugc

SEQ ID NO: 3815126 - RNA, 12 nt, Human
aggaggggaaga

SEQ ID NO: 3815127 - RNA, 15 nt, Human
aggaggggaagaggc

SEQ ID NO: 3815128 - RNA, 14 nt, Human
aggaggggaagcug

SEQ ID NO: 3815129 - RNA, 19 nt, Human
aggaggggaagcugcagcu

SEQ ID NO: 3815130 - RNA, 14 nt, Human
aggaggggagggua

SEQ ID NO: 3815131 - RNA, 19 nt, Human
aggaggggccccccugccc

SEQ ID NO: 3815132 - RNA, 21 nt, Human
aggaggggggagggaagggag

SEQ ID NO: 3815133 - RNA, 21 nt, Human
aggagggggucguggagagcu

SEQ ID NO: 3815134 - RNA, 19 nt, Human
aggaggguacagcugggcu

SEQ ID NO: 3815135 - RNA, 16 nt, Human
aggaggguguaaugga

SEQ ID NO: 3815136 - RNA, 18 nt, Human
aggagguccuuaggccuc

SEQ ID NO: 3815137 - RNA, 16 nt, Human
aggaggugccaacagu

SEQ ID NO: 3815138 - RNA, 14 nt, Human
aggaggugccacug

SEQ ID NO: 3815139 - RNA, 20 nt, Human
aggagguggagguugcagug

SEQ ID NO: 3815140 - RNA, 21 nt, Human
aggaggugucucaggcugccu

SEQ ID NO: 3815141 - RNA, 14 nt, Human
aggagguugggagg

SEQ ID NO: 3815142 - RNA, 22 nt, Human
aggagguugggaggggguuggg

SEQ ID NO: 3815143 - RNA, 14 nt, Human
aggaguaaaauuca

SEQ ID NO: 3815144 - RNA, 21 nt, Human
aggaguaaucuguguacaaag

SEQ ID NO: 3815145 - RNA, 13 nt, Human
aggaguagcugag

SEQ ID NO: 3815146 - RNA, 16 nt, Human
aggaguagcugagcuc

SEQ ID NO: 3815147 - RNA, 14 nt, Human
aggagucacugaga

SEQ ID NO: 3815148 - RNA, 21 nt, Human
aggagucccugccaucauguu

SEQ ID NO: 3815149 - RNA, 15 nt, Human
aggagucugaggucc

SEQ ID NO: 3815150 - RNA, 22 nt, Human
aggagugaaaccuuuagggcag

SEQ ID NO: 3815151 - RNA, 17 nt, Human
aggagugagaggggaca

SEQ ID NO: 3815152 - RNA, 21 nt, Human
aggagugaucgucagaugugu

SEQ ID NO: 3815153 - RNA, 20 nt, Human
aggagugggugacaagagcc

SEQ ID NO: 3815154 - RNA, 21 nt, Human
aggagugggugacaagagccu

SEQ ID NO: 3815155 - RNA, 23 nt, Human
aggagugggugacaagagccuga

SEQ ID NO: 3815156 - RNA, 18 nt, Human
aggaguggguugauuuca

SEQ ID NO: 3815157 - RNA, 14 nt, Human
aggaguggugcaga

SEQ ID NO: 3815158 - RNA, 14 nt, Human
aggaguguccucuu

SEQ ID NO: 3815159 - RNA, 16 nt, Human
aggagugugagaauca

SEQ ID NO: 3815160 - RNA, 20 nt, Human
aggagugugugacauuccag

SEQ ID NO: 3815161 - RNA, 22 nt, Human
aggaguuaguggauuacugcca

SEQ ID NO: 3815162 - RNA, 17 nt, Human
aggaguuauuuguaaug

SEQ ID NO: 3815163 - RNA, 21 nt, Human
aggaguucaagaccagccugg

SEQ ID NO: 3815164 - RNA, 14 nt, Human
aggaguucaaugau

SEQ ID NO: 3815165 - RNA, 20 nt, Human
aggaguuccuugaucuguau

SEQ ID NO: 3815166 - RNA, 14 nt, Human
aggaguugcuguuu

SEQ ID NO: 3815167 - RNA, 21 nt, Human
aggaguugcuguuuguuugac

SEQ ID NO: 3815168 - RNA, 19 nt, Human
aggaguuucguuuucaaaa

SEQ ID NO: 3815169 - RNA, 20 nt, Human
aggccaaaggaagcacaugc

SEQ ID NO: 3815170 - RNA, 23 nt, Human
aggccaacacuguggguguguga

SEQ ID NO: 3815171 - RNA, 21 nt, Human
aggccaagaaacgucuucuaa

SEQ ID NO: 3815172 - RNA, 18 nt, Human
aggccaagaauauugcaa

SEQ ID NO: 3815173 - RNA, 18 nt, Human
aggccaagagcagaggca

SEQ ID NO: 3815174 - RNA, 20 nt, Human
aggccaagagcagaggcagc

SEQ ID NO: 3815175 - RNA, 14 nt, Human
aggccaagagguuu

SEQ ID NO: 3815176 - RNA, 16 nt, Human
aggccaagaguggccc

SEQ ID NO: 3815177 - RNA, 21 nt, Human
aggccaagaguggccccaccu

SEQ ID NO: 3815178 - RNA, 20 nt, Human
aggccaagguguccuacaga

SEQ ID NO: 3815179 - RNA, 18 nt, Human
aggccaagucaggcccuu

SEQ ID NO: 3815180 - RNA, 21 nt, Human
aggccaagugcaggcuggcac

SEQ ID NO: 3815181 - RNA, 16 nt, Human
aggccacaagacccuu

SEQ ID NO: 3815182 - RNA, 16 nt, Human
aggccacaugaguccc

SEQ ID NO: 3815183 - RNA, 19 nt, Human
aggccacaugagucccagu

SEQ ID NO: 3815184 - RNA, 23 nt, Human
aggccacauggggcugggcagcu

SEQ ID NO: 3815185 - RNA, 21 nt, Human
aggccacaugucaccguggac

SEQ ID NO: 3815186 - RNA, 24 nt, Human
aggccacauuacuagaguuggcau

SEQ ID NO: 3815187 - RNA, 22 nt, Human
aggccacccugugcagaaggga

SEQ ID NO: 3815188 - RNA, 16 nt, Human
aggccaccuccagaaa

SEQ ID NO: 3815189 - RNA, 21 nt, Human
aggccaccuccuaaaaggccc

SEQ ID NO: 3815190 - RNA, 19 nt, Human
aggccaccucuccaagggc

SEQ ID NO: 3815191 - RNA, 14 nt, Human
aggccaccucuucc

SEQ ID NO: 3815192 - RNA, 23 nt, Human
aggccaccucuuccuggccggug

SEQ ID NO: 3815193 - RNA, 12 nt, Human
aggccaccugca

SEQ ID NO: 3815194 - RNA, 13 nt, Human
aggccaccugccc

SEQ ID NO: 3815195 - RNA, 15 nt, Human
aggccaccugccccc

SEQ ID NO: 3815196 - RNA, 18 nt, Human
aggccaccugcccccuuc

SEQ ID NO: 3815197 - RNA, 21 nt, Human
aggccaccuggcucucaccuc

SEQ ID NO: 3815198 - RNA, 13 nt, Human
aggccacggcagc

SEQ ID NO: 3815199 - RNA, 19 nt, Human
aggccacuccuccaaagga

SEQ ID NO: 3815200 - RNA, 13 nt, Human
aggccacugaaga

SEQ ID NO: 3815201 - RNA, 14 nt, Human
aggccacugaagag

SEQ ID NO: 3815202 - RNA, 17 nt, Human
aggccacugaagaggag

SEQ ID NO: 3815203 - RNA, 18 nt, Human
aggccacugaagaggagg

SEQ ID NO: 3815204 - RNA, 20 nt, Human
aggccacugaagaggaggag

SEQ ID NO: 3815205 - RNA, 20 nt, Human
aggccacuguguuccuuccg

SEQ ID NO: 3815206 - RNA, 14 nt, Human
aggccagaccugca

SEQ ID NO: 3815207 - RNA, 13 nt, Human
aggccagagacac

SEQ ID NO: 3815208 - RNA, 18 nt, Human
aggccagagacacaagcc

SEQ ID NO: 3815209 - RNA, 14 nt, Human
aggccagagccaag

SEQ ID NO: 3815210 - RNA, 22 nt, Human
aggccagaggcccccagcccag

SEQ ID NO: 3815211 - RNA, 14 nt, Human
aggccagagggagu

SEQ ID NO: 3815212 - RNA, 20 nt, Human
aggccagaguggccuggcca

SEQ ID NO: 3815213 - RNA, 22 nt, Human
aggccagaguggccuggccagg

SEQ ID NO: 3815214 - RNA, 22 nt, Human
aggccagcaagguggaguggau

SEQ ID NO: 3815215 - RNA, 24 nt, Human
aggccagcaagguggaguggaugc

SEQ ID NO: 3815216 - RNA, 22 nt, Human
aggccagcacucgcuagcagug

SEQ ID NO: 3815217 - RNA, 15 nt, Human
aggccagccccaccc

SEQ ID NO: 3815218 - RNA, 17 nt, Human
aggccagccccacccag

SEQ ID NO: 3815219 - RNA, 18 nt, Human
aggccagccccacccagg

SEQ ID NO: 3815220 - RNA, 10 nt, Human
aggccagccu

SEQ ID NO: 3815221 - RNA, 13 nt, Human
aggccagccuccg

SEQ ID NO: 3815222 - RNA, 12 nt, Human
aggccagccugg

SEQ ID NO: 3815223 - RNA, 15 nt, Human
aggccagccuugacc

SEQ ID NO: 3815224 - RNA, 18 nt, Human
aggccagcuggcagcaga

SEQ ID NO: 3815225 - RNA, 15 nt, Human
aggccaggacucugc

SEQ ID NO: 3815226 - RNA, 11 nt, Human
aggccaggagu

SEQ ID NO: 3815227 - RNA, 21 nt, Human
aggccaggaguuugagaccag

SEQ ID NO: 3815228 - RNA, 11 nt, Human
aggccaggcau

SEQ ID NO: 3815229 - RNA, 14 nt, Human
aggccaggccacca

SEQ ID NO: 3815230 - RNA, 17 nt, Human
aggccaggccaccagga

SEQ ID NO: 3815231 - RNA, 19 nt, Human
aggccaggccaccaggaug

SEQ ID NO: 3815232 - RNA, 14 nt, Human
aggccaggcccucu

SEQ ID NO: 3815233 - RNA, 16 nt, Human
aggccaggcccucugc

SEQ ID NO: 3815234 - RNA, 17 nt, Human
aggccaggcuccuuccu

SEQ ID NO: 3815235 - RNA, 22 nt, Human
aggccaggcuccuuccugucuu

SEQ ID NO: 3815236 - RNA, 13 nt, Human
aggccagggcaga

SEQ ID NO: 3815237 - RNA, 15 nt, Human
aggccagguccagag

SEQ ID NO: 3815238 - RNA, 12 nt, Human
aggccaggugca

SEQ ID NO: 3815239 - RNA, 18 nt, Human
aggccaggugcaaccagg

SEQ ID NO: 3815240 - RNA, 14 nt, Human
aggccaggugcagu

SEQ ID NO: 3815241 - RNA, 15 nt, Human
aggccauauuuccau

SEQ ID NO: 3815242 - RNA, 16 nt, Human
aggccaucuggagagc

SEQ ID NO: 3815243 - RNA, 20 nt, Human
aggccaucuggagagcccag

SEQ ID NO: 3815244 - RNA, 19 nt, Human
aggccauggacucuguccu

SEQ ID NO: 3815245 - RNA, 20 nt, Human
aggccauggacucuguccug

SEQ ID NO: 3815246 - RNA, 22 nt, Human
aggccauggacucuguccugaa

SEQ ID NO: 3815247 - RNA, 21 nt, Human
aggccauggagagcuggagcc

SEQ ID NO: 3815248 - RNA, 22 nt, Human
aggccaugggacagggaggacg

SEQ ID NO: 3815249 - RNA, 23 nt, Human
aggccaugggcacuguggguaga

SEQ ID NO: 3815250 - RNA, 18 nt, Human
aggccaugggccuccugu

SEQ ID NO: 3815251 - RNA, 14 nt, Human
aggccaugugcaua

SEQ ID NO: 3815252 - RNA, 15 nt, Human
agagcgacagagcag

SEQ ID NO: 3815253 - RNA, 16 nt, Human
agagcgacagagcagu

SEQ ID NO: 3815254 - RNA, 12 nt, Human
agagcgaggcug

SEQ ID NO: 3815255 - RNA, 13 nt, Human
agagcgcagcccg

SEQ ID NO: 3815256 - RNA, 13 nt, Human
agagcgccccucc

SEQ ID NO: 3815257 - RNA, 21 nt, Human
agagcgccugccccucccaga

SEQ ID NO: 3815258 - RNA, 15 nt, Human
agagcgcgccccuag

SEQ ID NO: 3815259 - RNA, 14 nt, Human
agagcggucucagg

SEQ ID NO: 3815260 - RNA, 21 nt, Human
agagcgugcuccagccuggcu

SEQ ID NO: 3815261 - RNA, 21 nt, Human
agagcuacuugggccauagcu

SEQ ID NO: 3815262 - RNA, 18 nt, Human
agagcuagaaccuggaga

SEQ ID NO: 3815263 - RNA, 22 nt, Human
agagcuagaaccuggagggcua

SEQ ID NO: 3815264 - RNA, 16 nt, Human
agagcuagcgcugccg

SEQ ID NO: 3815265 - RNA, 13 nt, Human
agagcuaggagca

SEQ ID NO: 3815266 - RNA, 21 nt, Human
agagcuaggagcaaagccugu

SEQ ID NO: 3815267 - RNA, 23 nt, Human
agagcuauuuaauggccggcugg

SEQ ID NO: 3815268 - RNA, 17 nt, Human
agagcucaagggacaag

SEQ ID NO: 3815269 - RNA, 12 nt, Human
agagcuccuccc

SEQ ID NO: 3815270 - RNA, 17 nt, Human
agagcuccucccucuca

SEQ ID NO: 3815271 - RNA, 23 nt, Human
agagcuccucuguccugcuucug

SEQ ID NO: 3815272 - RNA, 14 nt, Human
agagcucucucuac

SEQ ID NO: 3815273 - RNA, 14 nt, Human
agagcucuggagcc

SEQ ID NO: 3815274 - RNA, 22 nt, Human
agagcucuggagccaccugucc

SEQ ID NO: 3815275 - RNA, 22 nt, Human
agagcucuggugauaaggacau

SEQ ID NO: 3815276 - RNA, 20 nt, Human
agagcugacacaaaccugcc

SEQ ID NO: 3815277 - RNA, 22 nt, Human
agagcugacacaaaccugccug

SEQ ID NO: 3815278 - RNA, 23 nt, Human
agagcugacacaaaccugccugg

SEQ ID NO: 3815279 - RNA, 15 nt, Human
agagcugagugagcu

SEQ ID NO: 3815280 - RNA, 13 nt, Human
agagcugauccag

SEQ ID NO: 3815281 - RNA, 20 nt, Human
agagcugauggagaaggaag

SEQ ID NO: 3815282 - RNA, 13 nt, Human
agagcugcccucc

SEQ ID NO: 3815283 - RNA, 20 nt, Human
agagcugcccuccuugucca

SEQ ID NO: 3815284 - RNA, 18 nt, Human
agagcugcccucuccugg

SEQ ID NO: 3815285 - RNA, 22 nt, Human
agagcugcccucuccugggcag

SEQ ID NO: 3815286 - RNA, 21 nt, Human
agagcugccuaagaggcaaug

SEQ ID NO: 3815287 - RNA, 14 nt, Human
agagcugcucugga

SEQ ID NO: 3815288 - RNA, 22 nt, Human
agagcugcucuggaaaauguga

SEQ ID NO: 3815289 - RNA, 17 nt, Human
agagcugcuuccccguc

SEQ ID NO: 3815290 - RNA, 17 nt, Human
agagcuggaccaguggu

SEQ ID NO: 3815291 - RNA, 23 nt, Human
agagcuggagaugaggccagacc

SEQ ID NO: 3815292 - RNA, 15 nt, Human
agagcuggagccugg

SEQ ID NO: 3815293 - RNA, 17 nt, Human
agagcuggagccuggug

SEQ ID NO: 3815294 - RNA, 18 nt, Human
agagcuggagccuggugc

SEQ ID NO: 3815295 - RNA, 15 nt, Human
agagcuggcucugag

SEQ ID NO: 3815296 - RNA, 16 nt, Human
agagcuggcucugagc

SEQ ID NO: 3815297 - RNA, 21 nt, Human
agagcuggggcugagggaugg

SEQ ID NO: 3815298 - RNA, 12 nt, Human
agagcuggguga

SEQ ID NO: 3815299 - RNA, 16 nt, Human
agagcugggugagugg

SEQ ID NO: 3815300 - RNA, 11 nt, Human
agagcuggugc

SEQ ID NO: 3815301 - RNA, 17 nt, Human
agagcuggugcggcugg

SEQ ID NO: 3815302 - RNA, 17 nt, Human
agagcuggugucugauu

SEQ ID NO: 3815303 - RNA, 16 nt, Human
agagcugguugggaag

SEQ ID NO: 3815304 - RNA, 16 nt, Human
agagcugugcaucagc

SEQ ID NO: 3815305 - RNA, 18 nt, Human
agagcuguucacagccag

SEQ ID NO: 3815306 - RNA, 21 nt, Human
agagcuguucacagccagacu

SEQ ID NO: 3815307 - RNA, 20 nt, Human
agagcuguucccaaauuuuc

SEQ ID NO: 3815308 - RNA, 19 nt, Human
agagcuguuuauggccuca

SEQ ID NO: 3815309 - RNA, 20 nt, Human
agagcuguuuauggccucag

SEQ ID NO: 3815310 - RNA, 21 nt, Human
agagcuguuuauggccucagc

SEQ ID NO: 3815311 - RNA, 18 nt, Human
agagcuuagaaacuggaa

SEQ ID NO: 3815312 - RNA, 15 nt, Human
agagcuuagccugga

SEQ ID NO: 3815313 - RNA, 16 nt, Human
agagcuucccugacuc

SEQ ID NO: 3815314 - RNA, 17 nt, Human
agagcuucccugacuca

SEQ ID NO: 3815315 - RNA, 21 nt, Human
agagcuucuguugcugccuca

SEQ ID NO: 3815316 - RNA, 22 nt, Human
agagcuucuguugcugccucau

SEQ ID NO: 3815317 - RNA, 15 nt, Human
agagcuucuuccagg

SEQ ID NO: 3815318 - RNA, 17 nt, Human
agagcuugaugccagua

SEQ ID NO: 3815319 - RNA, 23 nt, Human
agagcuuggacuggaugcauguu

SEQ ID NO: 3815320 - RNA, 15 nt, Human
agagcuuuacaaaaa

SEQ ID NO: 3815321 - RNA, 17 nt, Human
agagcuuuacaaaaaga

SEQ ID NO: 3815322 - RNA, 22 nt, Human
agagcuuucuguccuuuuggca

SEQ ID NO: 3815323 - RNA, 21 nt, Human
aggaguuugagaccaaccugg

SEQ ID NO: 3815324 - RNA, 19 nt, Human
aggaguuugaggcugcagc

SEQ ID NO: 3815325 - RNA, 24 nt, Human
aggaguuugaggcugcagcgagcu

SEQ ID NO: 3815326 - RNA, 16 nt, Human
aggaguuuggccagaa

SEQ ID NO: 3815327 - RNA, 21 nt, Human
aggauaaacuuuuagaaacuu

SEQ ID NO: 3815328 - RNA, 15 nt, Human
aggauacaggcugga

SEQ ID NO: 3815329 - RNA, 18 nt, Human
aggauacgacaguacacu

SEQ ID NO: 3815330 - RNA, 13 nt, Human
aggauacucuguc

SEQ ID NO: 3815331 - RNA, 16 nt, Human
aggauacucugucaga

SEQ ID NO: 3815332 - RNA, 13 nt, Human
aggauacugcugc

SEQ ID NO: 3815333 - RNA, 22 nt, Human
aggauacuguaacacuuuacaa

SEQ ID NO: 3815334 - RNA, 15 nt, Human
aggauacuuauuuaa

SEQ ID NO: 3815335 - RNA, 19 nt, Human
aggauagaugcuggcccag

SEQ ID NO: 3815336 - RNA, 16 nt, Human
aggauaggaguucacu

SEQ ID NO: 3815337 - RNA, 21 nt, Human
aggauaggaguucacuucauc

SEQ ID NO: 3815338 - RNA, 19 nt, Human
aggauauccuuaucagagc

SEQ ID NO: 3815339 - RNA, 21 nt, Human
aggauauccuuaucagagcua

SEQ ID NO: 3815340 - RNA, 14 nt, Human
aggauaugccugcu

SEQ ID NO: 3815341 - RNA, 23 nt, Human
aggauauguucacaccuagcguc

SEQ ID NO: 3815342 - RNA, 19 nt, Human
aggauauuuaagaaaauac

SEQ ID NO: 3815343 - RNA, 13 nt, Human
aggaucagccagg

SEQ ID NO: 3815344 - RNA, 13 nt, Human
aggaucaguuuuu

SEQ ID NO: 3815345 - RNA, 15 nt, Human
aggaucaugguguaa

SEQ ID NO: 3815346 - RNA, 15 nt, Human
aggauccagccucac

SEQ ID NO: 3815347 - RNA, 11 nt, Human
aggauccaggc

SEQ ID NO: 3815348 - RNA, 16 nt, Human
aggauccccuccaagc

SEQ ID NO: 3815349 - RNA, 18 nt, Human
aggauccccuccaagccu

SEQ ID NO: 3815350 - RNA, 16 nt, Human
aggaucccucucugga

SEQ ID NO: 3815351 - RNA, 17 nt, Human
aggaucccucucuggau

SEQ ID NO: 3815352 - RNA, 14 nt, Human
aggauccggaaaga

SEQ ID NO: 3815353 - RNA, 16 nt, Human
aggaucuaaggcuguu

SEQ ID NO: 3815354 - RNA, 22 nt, Human
aggaucuagaauguguuuucug

SEQ ID NO: 3815355 - RNA, 14 nt, Human
aggaucuagagggg

SEQ ID NO: 3815356 - RNA, 17 nt, Human
aggaucucuaaagagca

SEQ ID NO: 3815357 - RNA, 15 nt, Human
aggaucucucaggag

SEQ ID NO: 3815358 - RNA, 19 nt, Human
aggaucucucaggagcaca

SEQ ID NO: 3815359 - RNA, 21 nt, Human
aggaucucucaggagcacagg

SEQ ID NO: 3815360 - RNA, 23 nt, Human
aggaucuguuuuuaaaaaucaua

SEQ ID NO: 3815361 - RNA, 22 nt, Human
aggaucuuucacccacagaaag

SEQ ID NO: 3815362 - RNA, 23 nt, Human
aggaucuuucacccacagaaaga

SEQ ID NO: 3815363 - RNA, 20 nt, Human
aggaucuuuguggccaagga

SEQ ID NO: 3815364 - RNA, 13 nt, Human
aggaucuuuugaa

SEQ ID NO: 3815365 - RNA, 20 nt, Human
aggaugaaugaggucccagg

SEQ ID NO: 3815366 - RNA, 20 nt, Human
aggaugacgguauuaugcuu

SEQ ID NO: 3815367 - RNA, 15 nt, Human
aggaugagagcccag

SEQ ID NO: 3815368 - RNA, 17 nt, Human
aggaugagagcccagag

SEQ ID NO: 3815369 - RNA, 13 nt, Human
aggaugagcugga

SEQ ID NO: 3815370 - RNA, 21 nt, Human
aggaugaggccgcuagaggcc

SEQ ID NO: 3815371 - RNA, 23 nt, Human
aggaugaggccgcuagaggccug

SEQ ID NO: 3815372 - RNA, 23 nt, Human
aggaugaucuaggaagacuuugg

SEQ ID NO: 3815373 - RNA, 24 nt, Human
aggaugaugccaguuacuugcuuu

SEQ ID NO: 3815374 - RNA, 17 nt, Human
aggaugccccguccccc

SEQ ID NO: 3815375 - RNA, 14 nt, Human
aggaugcucaguug

SEQ ID NO: 3815376 - RNA, 21 nt, Human
aggaugcucaguugcuaaaca

SEQ ID NO: 3815377 - RNA, 13 nt, Human
aggaugcugggug

SEQ ID NO: 3815378 - RNA, 14 nt, Human
aggaugcugggugg

SEQ ID NO: 3815379 - RNA, 18 nt, Human
aggaugcuuguacauaau

SEQ ID NO: 3815380 - RNA, 13 nt, Human
aggauggagagag

SEQ ID NO: 3815381 - RNA, 16 nt, Human
aggauggagagagggg

SEQ ID NO: 3815382 - RNA, 22 nt, Human
aggauggcaggacgugggcugg

SEQ ID NO: 3815383 - RNA, 18 nt, Human
aggauggccagugucugu

SEQ ID NO: 3815384 - RNA, 20 nt, Human
aggauggccagugucugucc

SEQ ID NO: 3815385 - RNA, 17 nt, Human
aggaugggcuucugugc

SEQ ID NO: 3815386 - RNA, 19 nt, Human
aggauggucuuacagcagg

SEQ ID NO: 3815387 - RNA, 15 nt, Human
aggaugguguuacug

SEQ ID NO: 3815388 - RNA, 20 nt, Human
aggauguaaacagugccugc

SEQ ID NO: 3815389 - RNA, 22 nt, Human
aggauguaaacagugccugcug

SEQ ID NO: 3815390 - RNA, 19 nt, Human
aggauguaaagaucaauaa

SEQ ID NO: 3815391 - RNA, 14 nt, Human
aggauguagcuuuu

SEQ ID NO: 3815392 - RNA, 16 nt, Human
aggauguagcuuuuca

SEQ ID NO: 3815393 - RNA, 19 nt, Human
aggauguagcuuuucaccu

SEQ ID NO: 3815394 - RNA, 17 nt, Human
aggaugucacagggcca

SEQ ID NO: 3815395 - RNA, 19 nt, Human
aggaugucacucagaugga

SEQ ID NO: 3815396 - RNA, 21 nt, Human
aggccucuuggaccucugcuc

SEQ ID NO: 3815397 - RNA, 22 nt, Human
aggccucuuggaccucugcucu

SEQ ID NO: 3815398 - RNA, 19 nt, Human
aggccucuuguaaagacug

SEQ ID NO: 3815399 - RNA, 21 nt, Human
aggccugaaagaggcugaggc

SEQ ID NO: 3815400 - RNA, 18 nt, Human
aggccugaaaggagcccu

SEQ ID NO: 3815401 - RNA, 21 nt, Human
aggccugaagccagcugcccu

SEQ ID NO: 3815402 - RNA, 20 nt, Human
aggccugaauccaaaagaaa

SEQ ID NO: 3815403 - RNA, 16 nt, Human
aggccugacucucagc

SEQ ID NO: 3815404 - RNA, 19 nt, Human
aggccugacugccaagcca

SEQ ID NO: 3815405 - RNA, 19 nt, Human
aggccugacuucugcuggc

SEQ ID NO: 3815406 - RNA, 15 nt, Human
aggccugagacccag

SEQ ID NO: 3815407 - RNA, 16 nt, Human
aggccugagacccagg

SEQ ID NO: 3815408 - RNA, 18 nt, Human
aggccugagacccaggac

SEQ ID NO: 3815409 - RNA, 16 nt, Human
aggccugagauuucau

SEQ ID NO: 3815410 - RNA, 20 nt, Human
aggccugagauuucaucugc

SEQ ID NO: 3815411 - RNA, 14 nt, Human
aggccugaggauga

SEQ ID NO: 3815412 - RNA, 13 nt, Human
aggccugcacaca

SEQ ID NO: 3815413 - RNA, 24 nt, Human
aggccugcacacaagcccacagca

SEQ ID NO: 3815414 - RNA, 19 nt, Human
aggccugccuccagggcug

SEQ ID NO: 3815415 - RNA, 18 nt, Human
aggccugccucccacuuc

SEQ ID NO: 3815416 - RNA, 19 nt, Human
aggccugcgacccuggggg

SEQ ID NO: 3815417 - RNA, 12 nt, Human
aggccugcuccc

SEQ ID NO: 3815418 - RNA, 18 nt, Human
aggccuggacuuuccugc

SEQ ID NO: 3815419 - RNA, 19 nt, Human
aggccuggacuuuccugca

SEQ ID NO: 3815420 - RNA, 16 nt, Human
aggccuggcacagugu

SEQ ID NO: 3815421 - RNA, 18 nt, Human
aggccuggcacagugucu

SEQ ID NO: 3815422 - RNA, 12 nt, Human
aggccuggccag

SEQ ID NO: 3815423 - RNA, 17 nt, Human
aggccuggccuuggaga

SEQ ID NO: 3815424 - RNA, 19 nt, Human
aggccugggccgcugccac

SEQ ID NO: 3815425 - RNA, 21 nt, Human
aggccugggccgcugccacgu

SEQ ID NO: 3815426 - RNA, 18 nt, Human
aggccugggggcugggca

SEQ ID NO: 3815427 - RNA, 20 nt, Human
aggccuggggugacccggca

SEQ ID NO: 3815428 - RNA, 21 nt, Human
aggccuggggugacccggcac

SEQ ID NO: 3815429 - RNA, 16 nt, Human
aggccugggucugugu

SEQ ID NO: 3815430 - RNA, 19 nt, Human
aggccugggucugugucuc

SEQ ID NO: 3815431 - RNA, 12 nt, Human
aggccugggugc

SEQ ID NO: 3815432 - RNA, 16 nt, Human
aggccugggugcuggc

SEQ ID NO: 3815433 - RNA, 12 nt, Human
aggccugggugg

SEQ ID NO: 3815434 - RNA, 16 nt, Human
aggccugucccuggcc

SEQ ID NO: 3815435 - RNA, 22 nt, Human
aggccuguccugaccugucuca

SEQ ID NO: 3815436 - RNA, 22 nt, Human
aggccugucugugaccugcauc

SEQ ID NO: 3815437 - RNA, 21 nt, Human
aggccuguguagcugugaccu

SEQ ID NO: 3815438 - RNA, 12 nt, Human
aggccugugugu

SEQ ID NO: 3815439 - RNA, 19 nt, Human
aggccuuaucuccaagacc

SEQ ID NO: 3815440 - RNA, 18 nt, Human
aggccuuaugaggguccu

SEQ ID NO: 3815441 - RNA, 17 nt, Human
aggccuuccccuggcac

SEQ ID NO: 3815442 - RNA, 18 nt, Human
aggccuuccucucuccag

SEQ ID NO: 3815443 - RNA, 15 nt, Human
aggccuugcgcuguu

SEQ ID NO: 3815444 - RNA, 23 nt, Human
aggccuugcggcuccucagggac

SEQ ID NO: 3815445 - RNA, 19 nt, Human
aggccuugggcucugcuga

SEQ ID NO: 3815446 - RNA, 21 nt, Human
aggccuuuagauauuauucau

SEQ ID NO: 3815447 - RNA, 23 nt, Human
aggccuuuaguuauaaaggaauc

SEQ ID NO: 3815448 - RNA, 14 nt, Human
aggccuuucccuaa

SEQ ID NO: 3815449 - RNA, 16 nt, Human
aggccuuuuaacauuu

SEQ ID NO: 3815450 - RNA, 18 nt, Human
aggcgaagcguuguccuc

SEQ ID NO: 3815451 - RNA, 18 nt, Human
aggcgagaagggcugcuu

SEQ ID NO: 3815452 - RNA, 14 nt, Human
aggcgagugccagg

SEQ ID NO: 3815453 - RNA, 17 nt, Human
aggcgagugccaggacu

SEQ ID NO: 3815454 - RNA, 20 nt, Human
aggcgaucacaacgugcauu

SEQ ID NO: 3815455 - RNA, 21 nt, Human
aggcgcacuuuccuccuggca

SEQ ID NO: 3815456 - RNA, 23 nt, Human
aggcgcacuuuccuccuggcaga

SEQ ID NO: 3815457 - RNA, 14 nt, Human
aggcgccggcgggc

SEQ ID NO: 3815458 - RNA, 23 nt, Human
aggcgccucaacucugcugaggg

SEQ ID NO: 3815459 - RNA, 23 nt, Human
aggcgcuaacuugcuuaaaugug

SEQ ID NO: 3815460 - RNA, 15 nt, Human
aggcgcuagcacagc

SEQ ID NO: 3815461 - RNA, 20 nt, Human
aggcggagaguacagugagc

SEQ ID NO: 3815462 - RNA, 23 nt, Human
aggcggcacuccaaccuaaccug

SEQ ID NO: 3815463 - RNA, 20 nt, Human
aggcgggaggaggugugagg

SEQ ID NO: 3815464 - RNA, 13 nt, Human
aggcgggccagcc

SEQ ID NO: 3815465 - RNA, 15 nt, Human
aggcgggccagccag

SEQ ID NO: 3815466 - RNA, 14 nt, Human
aggcggggcuugcc

SEQ ID NO: 3815467 - RNA, 15 nt, Human
aggcggggcuugccu

SEQ ID NO: 3815468 - RNA, 19 nt, Human
aggcggggcuugccuucug

SEQ ID NO: 3815469 - RNA, 10 nt, Human
aggcggugag

SEQ ID NO: 3815470 - RNA, 19 nt, Human
aggcggugcacucacuccu

SEQ ID NO: 3815471 - RNA, 21 nt, Human
aggcggugggcacccacccug

SEQ ID NO: 3815472 - RNA, 17 nt, Human
aggcgucccgcaccugu

SEQ ID NO: 3815473 - RNA, 21 nt, Human
aggcguccgcgcgccagcaca

SEQ ID NO: 3815474 - RNA, 18 nt, Human
aggcgugagccaccaugc

SEQ ID NO: 3815475 - RNA, 17 nt, Human
aggcgugagccaccucg

SEQ ID NO: 3815476 - RNA, 18 nt, Human
aggcgugagccaccucgc

SEQ ID NO: 3815477 - RNA, 17 nt, Human
aggcguggagcugccug

SEQ ID NO: 3815478 - RNA, 18 nt, Human
aggcguucuucgaggugg

SEQ ID NO: 3815479 - RNA, 13 nt, Human
aggcuaaaauguu

SEQ ID NO: 3815480 - RNA, 18 nt, Human
aggcuaaaauguuuucag

SEQ ID NO: 3815481 - RNA, 19 nt, Human
aggcaccagaagaacagua

SEQ ID NO: 3815482 - RNA, 11 nt, Human
aggcaccagga

SEQ ID NO: 3815483 - RNA, 14 nt, Human
aggcaccaggaagc

SEQ ID NO: 3815484 - RNA, 15 nt, Human
aggcaccaggaagcc

SEQ ID NO: 3815485 - RNA, 15 nt, Human
aggcaccagucccug

SEQ ID NO: 3815486 - RNA, 20 nt, Human
aggcacccaccaucaugucu

SEQ ID NO: 3815487 - RNA, 20 nt, Human
aggcacccccuggagagaag

SEQ ID NO: 3815488 - RNA, 20 nt, Human
aggcacccuucuuuccucuu

SEQ ID NO: 3815489 - RNA, 16 nt, Human
aggcaccgagaauguu

SEQ ID NO: 3815490 - RNA, 22 nt, Human
aggcaccucacagaaaugagau

SEQ ID NO: 3815491 - RNA, 14 nt, Human
aggcaccugcauuu

SEQ ID NO: 3815492 - RNA, 19 nt, Human
aggcaccuuaguggcuuuu

SEQ ID NO: 3815493 - RNA, 20 nt, Human
aggcacgaacccaccugcug

SEQ ID NO: 3815494 - RNA, 21 nt, Human
aggcacgaacccaccugcuga

SEQ ID NO: 3815495 - RNA, 19 nt, Human
aggcacucauggguaauaa

SEQ ID NO: 3815496 - RNA, 16 nt, Human
aggcacucuguuauuu

SEQ ID NO: 3815497 - RNA, 19 nt, Human
aggcacucuguuauuuaga

SEQ ID NO: 3815498 - RNA, 20 nt, Human
aggcacucuguuauuuagac

SEQ ID NO: 3815499 - RNA, 22 nt, Human
aggcacugcccugguggcccuc

SEQ ID NO: 3815500 - RNA, 13 nt, Human
aggcacugggcau

SEQ ID NO: 3815501 - RNA, 14 nt, Human
aggcacugggcucc

SEQ ID NO: 3815502 - RNA, 19 nt, Human
aggcacuguaguucuaaga

SEQ ID NO: 3815503 - RNA, 16 nt, Human
aggcacuucugccuga

SEQ ID NO: 3815504 - RNA, 17 nt, Human
aggcacuuggcagccuu

SEQ ID NO: 3815505 - RNA, 22 nt, Human
aggcacuuuggggguuugaggg

SEQ ID NO: 3815506 - RNA, 16 nt, Human
aggcagaaaauugcac

SEQ ID NO: 3815507 - RNA, 13 nt, Human
aggcagaaagagu

SEQ ID NO: 3815508 - RNA, 14 nt, Human
aggcagaaagcaaa

SEQ ID NO: 3815509 - RNA, 19 nt, Human
aggcagaaagcaaaauuau

SEQ ID NO: 3815510 - RNA, 19 nt, Human
aggcagaaagcagaggcug

SEQ ID NO: 3815511 - RNA, 22 nt, Human
aggcagaagaauugaacccagg

SEQ ID NO: 3815512 - RNA, 21 nt, Human
aggcagacacagggacuugaa

SEQ ID NO: 3815513 - RNA, 20 nt, Human
aggcagacacggaucugaga

SEQ ID NO: 3815514 - RNA, 15 nt, Human
aggcagacagcaggc

SEQ ID NO: 3815515 - RNA, 22 nt, Human
aggcagacagcaggcagcgcca

SEQ ID NO: 3815516 - RNA, 20 nt, Human
aggcagacucuuuaugcuug

SEQ ID NO: 3815517 - RNA, 22 nt, Human
aggcagacucuuuaugcuugca

SEQ ID NO: 3815518 - RNA, 22 nt, Human
aggcagacuucccugaauguau

SEQ ID NO: 3815519 - RNA, 13 nt, Human
aggcagagaaaga

SEQ ID NO: 3815520 - RNA, 19 nt, Human
aggcagagaaagaagagac

SEQ ID NO: 3815521 - RNA, 22 nt, Human
aggcagagaaagaagagacagg

SEQ ID NO: 3815522 - RNA, 14 nt, Human
aggcagagaaucau

SEQ ID NO: 3815523 - RNA, 22 nt, Human
aggcagagaaucauacuuagca

SEQ ID NO: 3815524 - RNA, 11 nt, Human
aggcagagagc

SEQ ID NO: 3815525 - RNA, 13 nt, Human
aggcagaggacag

SEQ ID NO: 3815526 - RNA, 18 nt, Human
aggcagagggccuuugcu

SEQ ID NO: 3815527 - RNA, 20 nt, Human
aggcagagguugcagugagc

SEQ ID NO: 3815528 - RNA, 21 nt, Human
aggcagagugccccaccugcc

SEQ ID NO: 3815529 - RNA, 22 nt, Human
aggcagagugccccaccugcca

SEQ ID NO: 3815530 - RNA, 24 nt, Human
aggcagagugccccaccugccacu

SEQ ID NO: 3815531 - RNA, 15 nt, Human
aggcagauccaggac

SEQ ID NO: 3815532 - RNA, 23 nt, Human
aggcagaucugugccccaugccu

SEQ ID NO: 3815533 - RNA, 16 nt, Human
aggcagauucaauuuu

SEQ ID NO: 3815534 - RNA, 16 nt, Human
aggcagauuugagguu

SEQ ID NO: 3815535 - RNA, 20 nt, Human
aggcagauuuuacagagcgc

SEQ ID NO: 3815536 - RNA, 18 nt, Human
aggcagcacgugcacaaa

SEQ ID NO: 3815537 - RNA, 21 nt, Human
aggcagcauguauaguugcuu

SEQ ID NO: 3815538 - RNA, 12 nt, Human
aggcagcauuua

SEQ ID NO: 3815539 - RNA, 20 nt, Human
agaucaaaaaggcuuauaaa

SEQ ID NO: 3815540 - RNA, 16 nt, Human
agaucaaauggaaagg

SEQ ID NO: 3815541 - RNA, 14 nt, Human
agaucaaauuucac

SEQ ID NO: 3815542 - RNA, 14 nt, Human
agaucaaccccuuc

SEQ ID NO: 3815543 - RNA, 14 nt, Human
agaucaauuuguaa

SEQ ID NO: 3815544 - RNA, 21 nt, Human
agaucaccaguguguggcuuu

SEQ ID NO: 3815545 - RNA, 14 nt, Human
agaucacgccacug

SEQ ID NO: 3815546 - RNA, 18 nt, Human
agaucacgccacugcacu

SEQ ID NO: 3815547 - RNA, 16 nt, Human
agaucacgcuccccgc

SEQ ID NO: 3815548 - RNA, 22 nt, Human
agaucacgcuccccgccuguuc

SEQ ID NO: 3815549 - RNA, 15 nt, Human
agaucacuacugcag

SEQ ID NO: 3815550 - RNA, 14 nt, Human
agaucacugccaca

SEQ ID NO: 3815551 - RNA, 16 nt, Human
agaucacuguuuagau

SEQ ID NO: 3815552 - RNA, 17 nt, Human
agaucacuuugcucuga

SEQ ID NO: 3815553 - RNA, 17 nt, Human
agaucagagcagcagug

SEQ ID NO: 3815554 - RNA, 20 nt, Human
agaucagcaaaccggggccu

SEQ ID NO: 3815555 - RNA, 12 nt, Human
agaucagccaga

SEQ ID NO: 3815556 - RNA, 13 nt, Human
agaucaggaagag

SEQ ID NO: 3815557 - RNA, 17 nt, Human
agaucaggaagagaagg

SEQ ID NO: 3815558 - RNA, 13 nt, Human
agaucauaaggcu

SEQ ID NO: 3815559 - RNA, 16 nt, Human
agaucauaaggcuuca

SEQ ID NO: 3815560 - RNA, 17 nt, Human
agaucauaguuuuauuu

SEQ ID NO: 3815561 - RNA, 16 nt, Human
agaucauauacgugaa

SEQ ID NO: 3815562 - RNA, 15 nt, Human
agaucauccuuucca

SEQ ID NO: 3815563 - RNA, 16 nt, Human
agaucauccuuuccag

SEQ ID NO: 3815564 - RNA, 12 nt, Human
agaucaugaaga

SEQ ID NO: 3815565 - RNA, 19 nt, Human
agaucauggaacacaaaca

SEQ ID NO: 3815566 - RNA, 14 nt, Human
agaucauggcaucc

SEQ ID NO: 3815567 - RNA, 16 nt, Human
agaucauucaguguuu

SEQ ID NO: 3815568 - RNA, 12 nt, Human
agaucauuguga

SEQ ID NO: 3815569 - RNA, 23 nt, Human
agauccaaaagaagcccccagcu

SEQ ID NO: 3815570 - RNA, 18 nt, Human
agauccacacacagagga

SEQ ID NO: 3815571 - RNA, 14 nt, Human
agauccaggagcuc

SEQ ID NO: 3815572 - RNA, 16 nt, Human
agauccagggacugaa

SEQ ID NO: 3815573 - RNA, 18 nt, Human
agauccauuuccauugcu

SEQ ID NO: 3815574 - RNA, 22 nt, Human
agaucccaaguagaaucucagu

SEQ ID NO: 3815575 - RNA, 13 nt, Human
agauccuaaaaca

SEQ ID NO: 3815576 - RNA, 23 nt, Human
agauccuaagggucgaaagcucu

SEQ ID NO: 3815577 - RNA, 22 nt, Human
agauccuaccccaauuccuugu

SEQ ID NO: 3815578 - RNA, 18 nt, Human
agauccuagauccuaagg

SEQ ID NO: 3815579 - RNA, 13 nt, Human
agauccucucugg

SEQ ID NO: 3815580 - RNA, 21 nt, Human
agauccugaucuuaagaggcu

SEQ ID NO: 3815581 - RNA, 23 nt, Human
agauccugugaggagccccaucu

SEQ ID NO: 3815582 - RNA, 15 nt, Human
agauccuuguuucaa

SEQ ID NO: 3815583 - RNA, 20 nt, Human
agauccuuguuucaaacaca

SEQ ID NO: 3815584 - RNA, 20 nt, Human
agauccuuuaaauccuucca

SEQ ID NO: 3815585 - RNA, 16 nt, Human
agaucgagaccauccu

SEQ ID NO: 3815586 - RNA, 16 nt, Human
agaucgcaucauugca

SEQ ID NO: 3815587 - RNA, 15 nt, Human
agaucggggccagag

SEQ ID NO: 3815588 - RNA, 19 nt, Human
agaucggggccagaggcag

SEQ ID NO: 3815589 - RNA, 15 nt, Human
agaucgguuaacaaa

SEQ ID NO: 3815590 - RNA, 17 nt, Human
agaucgguuaacaaaua

SEQ ID NO: 3815591 - RNA, 20 nt, Human
agaucuaaaaauaacuguaa

SEQ ID NO: 3815592 - RNA, 19 nt, Human
agaucuaaauaaaaugcua

SEQ ID NO: 3815593 - RNA, 19 nt, Human
agaucuaggugaggauuga

SEQ ID NO: 3815594 - RNA, 14 nt, Human
agaucuccaaagcu

SEQ ID NO: 3815595 - RNA, 21 nt, Human
agaucuccaaagcuuuccugg

SEQ ID NO: 3815596 - RNA, 22 nt, Human
agaucuccaaagcuuuccugga

SEQ ID NO: 3815597 - RNA, 23 nt, Human
agaucugauuuguaacccacuga

SEQ ID NO: 3815598 - RNA, 15 nt, Human
agaucugcaccgccg

SEQ ID NO: 3815599 - RNA, 19 nt, Human
agaucuggaaccucagccu

SEQ ID NO: 3815600 - RNA, 14 nt, Human
agaucuguccucag

SEQ ID NO: 3815601 - RNA, 17 nt, Human
agaucuguccucagccu

SEQ ID NO: 3815602 - RNA, 19 nt, Human
agaucuguccucagccuug

SEQ ID NO: 3815603 - RNA, 18 nt, Human
agaucuguuuugaaggca

SEQ ID NO: 3815604 - RNA, 21 nt, Human
agaucuguuuugaaggcaaaa

SEQ ID NO: 3815605 - RNA, 15 nt, Human
agaucuuagauucuc

SEQ ID NO: 3815606 - RNA, 15 nt, Human
agaucuucugaaaug

SEQ ID NO: 3815607 - RNA, 14 nt, Human
agaucuucuguggg

SEQ ID NO: 3815608 - RNA, 17 nt, Human
agaucuuucagaaauau

SEQ ID NO: 3815609 - RNA, 21 nt, Human
agaucuuucaggaaagacgga

SEQ ID NO: 3815610 - RNA, 19 nt, Human
agaugaaaaagcauguaca

SEQ ID NO: 3815611 - RNA, 17 nt, Human
agaugaaacacaaacaa

SEQ ID NO: 3815612 - RNA, 14 nt, Human
agaugaaagagcag

SEQ ID NO: 3815613 - RNA, 13 nt, Human
agaugaaagagga

SEQ ID NO: 3815614 - RNA, 17 nt, Human
agaugaaagaggagguu

SEQ ID NO: 3815615 - RNA, 22 nt, Human
agaugaaagcagggaauuucua

SEQ ID NO: 3815616 - RNA, 21 nt, Human
agaugaaauaaagacccaggg

SEQ ID NO: 3815617 - RNA, 23 nt, Human
agaugaaaucuuacagcugggug

SEQ ID NO: 3815618 - RNA, 19 nt, Human
agaugaacucugaacuuug

SEQ ID NO: 3815619 - RNA, 22 nt, Human
agaugaacucugaacuuuggag

SEQ ID NO: 3815620 - RNA, 20 nt, Human
agaugaagagugagagggca

SEQ ID NO: 3815621 - RNA, 14 nt, Human
agaugaaggucugu

SEQ ID NO: 3815622 - RNA, 15 nt, Human
agaugaaguuuuaca

SEQ ID NO: 3815623 - RNA, 19 nt, Human
agaugaaguuuuacauugu

SEQ ID NO: 3815624 - RNA, 13 nt, Human
agaugaaucaaug

SEQ ID NO: 3815625 - RNA, 15 nt, Human
agaugacauugcuaa

SEQ ID NO: 3815626 - RNA, 22 nt, Human
agaugacauugcuaagaugcuc

SEQ ID NO: 3815627 - RNA, 14 nt, Human
agaugacugagggu

SEQ ID NO: 3815628 - RNA, 14 nt, Human
agaugacuugaggc

SEQ ID NO: 3815629 - RNA, 16 nt, Human
agaugagaacaaagcu

SEQ ID NO: 3815630 - RNA, 18 nt, Human
agaugagaacaaagcugu

SEQ ID NO: 3815631 - RNA, 21 nt, Human
agaugagaacagauaaagauu

SEQ ID NO: 3815632 - RNA, 14 nt, Human
agaugagcacuucu

SEQ ID NO: 3815633 - RNA, 21 nt, Human
agaugagcccagcccuguucu

SEQ ID NO: 3815634 - RNA, 14 nt, Human
agaugaggccagac

SEQ ID NO: 3815635 - RNA, 22 nt, Human
agaugaggccagaccauggaca

SEQ ID NO: 3815636 - RNA, 21 nt, Human
agaugaguaaaggaguaagaa

SEQ ID NO: 3815637 - RNA, 14 nt, Human
agaugagugagcau

SEQ ID NO: 3815638 - RNA, 16 nt, Human
agaugauaaagagaca

SEQ ID NO: 3815639 - RNA, 18 nt, Human
agaugauaaagagacagu

SEQ ID NO: 3815640 - RNA, 22 nt, Human
agaugaucaguggacagucugc

SEQ ID NO: 3815641 - RNA, 13 nt, Human
agaugauccauga

SEQ ID NO: 3815642 - RNA, 18 nt, Human
agaugaugaaaauauuua

SEQ ID NO: 3815643 - RNA, 19 nt, Human
agaugaugaugaucuuuaa

SEQ ID NO: 3815644 - RNA, 17 nt, Human
agaugaugggggagggg

SEQ ID NO: 3815645 - RNA, 12 nt, Human
agaugauguauu

SEQ ID NO: 3815646 - RNA, 14 nt, Human
agaugauuaaaaug

SEQ ID NO: 3815647 - RNA, 20 nt, Human
agaugauuaaauaagauucu

SEQ ID NO: 3815648 - RNA, 19 nt, Human
agaugauuuaaaagggaag

SEQ ID NO: 3815649 - RNA, 20 nt, Human
agaugauuucaguucuagga

SEQ ID NO: 3815650 - RNA, 23 nt, Human
agaugauuucaguucuaggaaaa

SEQ ID NO: 3815651 - RNA, 20 nt, Human
agaugauuuuuugaaaguua

SEQ ID NO: 3815652 - RNA, 14 nt, Human
agaugcaaagaggc

SEQ ID NO: 3815653 - RNA, 15 nt, Human
agaugcaaagaggca

SEQ ID NO: 3815654 - RNA, 17 nt, Human
agaugcaaggaccagga

SEQ ID NO: 3815655 - RNA, 18 nt, Human
agaugcaaggaccaggac

SEQ ID NO: 3815656 - RNA, 15 nt, Human
agaugcaagucucuu

SEQ ID NO: 3815657 - RNA, 14 nt, Human
agaugcaauuguuu

SEQ ID NO: 3815658 - RNA, 18 nt, Human
agaugcaccaccaagcca

SEQ ID NO: 3815659 - RNA, 15 nt, Human
agaugcacuuugcuu

SEQ ID NO: 3815660 - RNA, 12 nt, Human
agaugcagagag

SEQ ID NO: 3815661 - RNA, 14 nt, Human
agaugcagagagcc

SEQ ID NO: 3815662 - RNA, 14 nt, Human
agaugcagcaaaau

SEQ ID NO: 3815663 - RNA, 16 nt, Human
agaugcagcucuuccu

SEQ ID NO: 3815664 - RNA, 17 nt, Human
agaugcagcucuuccug

SEQ ID NO: 3815665 - RNA, 18 nt, Human
agaugcagcucuuccugg

SEQ ID NO: 3815666 - RNA, 12 nt, Human
agaugcagcugg

SEQ ID NO: 3815667 - RNA, 15 nt, Human
agaugcagcuggaaa

SEQ ID NO: 3815668 - RNA, 16 nt, Human
agaugcagggcaguca

SEQ ID NO: 3815669 - RNA, 15 nt, Human
agaugcaguuuggag

SEQ ID NO: 3815670 - RNA, 22 nt, Human
agaugcauucuugguuggcugg

SEQ ID NO: 3815671 - RNA, 20 nt, Human
agaugcauuuggguccagga

SEQ ID NO: 3815672 - RNA, 22 nt, Human
agaugcauuuggguccaggagg

SEQ ID NO: 3815673 - RNA, 17 nt, Human
agaugccacuucuaaga

SEQ ID NO: 3815674 - RNA, 20 nt, Human
agaugccacuucuaagaaaa

SEQ ID NO: 3815675 - RNA, 16 nt, Human
agaugccaucuguguc

SEQ ID NO: 3815676 - RNA, 22 nt, Human
agaugcccagagggcccaggca

SEQ ID NO: 3815677 - RNA, 12 nt, Human
agaugccccaga

SEQ ID NO: 3815678 - RNA, 16 nt, Human
agaugccgcauuugga

SEQ ID NO: 3815679 - RNA, 17 nt, Human
agaugccuccaccgcug

SEQ ID NO: 3815680 - RNA, 22 nt, Human
agggauggaaaaggaagacuag

SEQ ID NO: 3815681 - RNA, 15 nt, Human
agggauggacaucuu

SEQ ID NO: 3815682 - RNA, 16 nt, Human
agggauggauuccaac

SEQ ID NO: 3815683 - RNA, 17 nt, Human
agggauggauuccaacc

SEQ ID NO: 3815684 - RNA, 14 nt, Human
agggccuggcucag

SEQ ID NO: 3815685 - RNA, 16 nt, Human
agggccugggccuggc

SEQ ID NO: 3815686 - RNA, 20 nt, Human
agggccugggccuggcuccc

SEQ ID NO: 3815687 - RNA, 16 nt, Human
agggccuggggccuga

SEQ ID NO: 3815688 - RNA, 22 nt, Human
agggccuggggccugagagaau

SEQ ID NO: 3815689 - RNA, 21 nt, Human
agggccuggucccugggagga

SEQ ID NO: 3815690 - RNA, 18 nt, Human
agggccugugggagccug

SEQ ID NO: 3815691 - RNA, 23 nt, Human
agggccuuaaaagccaucaugua

SEQ ID NO: 3815692 - RNA, 12 nt, Human
agggccuugcua

SEQ ID NO: 3815693 - RNA, 21 nt, Human
agggccuuggaaauuccugua

SEQ ID NO: 3815694 - RNA, 13 nt, Human
agggcgaggggag

SEQ ID NO: 3815695 - RNA, 14 nt, Human
agggcgcaggccgu

SEQ ID NO: 3815696 - RNA, 13 nt, Human
agggcggcacuca

SEQ ID NO: 3815697 - RNA, 15 nt, Human
agggcggcaggggcc

SEQ ID NO: 3815698 - RNA, 20 nt, Human
agggcgggcagagggcugga

SEQ ID NO: 3815699 - RNA, 13 nt, Human
agggcuaagagcu

SEQ ID NO: 3815700 - RNA, 21 nt, Human
agggcuaagagcuagcgcugc

SEQ ID NO: 3815701 - RNA, 15 nt, Human
agggcuacccugagc

SEQ ID NO: 3815702 - RNA, 17 nt, Human
agggcuacccugagcug

SEQ ID NO: 3815703 - RNA, 18 nt, Human
agggcuacccugagcuga

SEQ ID NO: 3815704 - RNA, 20 nt, Human
agggcuacccugagcugagg

SEQ ID NO: 3815705 - RNA, 21 nt, Human
agggcuacccugagcugaggc

SEQ ID NO: 3815706 - RNA, 21 nt, Human
agggcuacugcagcuuuacau

SEQ ID NO: 3815707 - RNA, 17 nt, Human
agggcuagaaccuagaa

SEQ ID NO: 3815708 - RNA, 19 nt, Human
agggcuagaaccuggagaa

SEQ ID NO: 3815709 - RNA, 20 nt, Human
agggcuagaaccuggagagc

SEQ ID NO: 3815710 - RNA, 22 nt, Human
agggcuagaaccuggagggcug

SEQ ID NO: 3815711 - RNA, 21 nt, Human
agggcuagaaccuggaggggc

SEQ ID NO: 3815712 - RNA, 20 nt, Human
agggcuagaaucuggagagc

SEQ ID NO: 3815713 - RNA, 24 nt, Human
agggcuagugacuugugucccaug

SEQ ID NO: 3815714 - RNA, 19 nt, Human
agggcuauagcucaggacc

SEQ ID NO: 3815715 - RNA, 14 nt, Human
agggcucaacacug

SEQ ID NO: 3815716 - RNA, 24 nt, Human
agggcucaaucucugggggcugag

SEQ ID NO: 3815717 - RNA, 13 nt, Human
agggcucacucag

SEQ ID NO: 3815718 - RNA, 13 nt, Human
agggcucagccug

SEQ ID NO: 3815719 - RNA, 22 nt, Human
agggcucagcggggacagcucc

SEQ ID NO: 3815720 - RNA, 20 nt, Human
agggcuccagacacaugucc

SEQ ID NO: 3815721 - RNA, 22 nt, Human
agggcucccaggggucucccug

SEQ ID NO: 3815722 - RNA, 13 nt, Human
agggcuccuccca

SEQ ID NO: 3815723 - RNA, 15 nt, Human
agggcuccucccagc

SEQ ID NO: 3815724 - RNA, 14 nt, Human
agggcuccugcagg

SEQ ID NO: 3815725 - RNA, 14 nt, Human
agggcuccugccuu

SEQ ID NO: 3815726 - RNA, 12 nt, Human
agggcuccuggg

SEQ ID NO: 3815727 - RNA, 21 nt, Human
agggcuccuugugggccuggg

SEQ ID NO: 3815728 - RNA, 18 nt, Human
agggcucgaggggugggc

SEQ ID NO: 3815729 - RNA, 20 nt, Human
agggcucgaggggugggcug

SEQ ID NO: 3815730 - RNA, 16 nt, Human
agggcucuccuggcuu

SEQ ID NO: 3815731 - RNA, 14 nt, Human
agggcucugaccag

SEQ ID NO: 3815732 - RNA, 13 nt, Human
agggcucugaggc

SEQ ID NO: 3815733 - RNA, 17 nt, Human
agggcucugauauucca

SEQ ID NO: 3815734 - RNA, 15 nt, Human
agggcucuuuagcca

SEQ ID NO: 3815735 - RNA, 16 nt, Human
agggcugagcugggga

SEQ ID NO: 3815736 - RNA, 15 nt, Human
agggcugcaugaugu

SEQ ID NO: 3815737 - RNA, 22 nt, Human
agggcugcaugauguuugccca

SEQ ID NO: 3815738 - RNA, 21 nt, Human
agggcugccccuaaucucugu

SEQ ID NO: 3815739 - RNA, 13 nt, Human
agggcugcccuga

SEQ ID NO: 3815740 - RNA, 21 nt, Human
agggcugcggcguacaggcug

SEQ ID NO: 3815741 - RNA, 23 nt, Human
agggcugcugggggcaacuggcc

SEQ ID NO: 3815742 - RNA, 20 nt, Human
agggcugcuucccugaagcu

SEQ ID NO: 3815743 - RNA, 22 nt, Human
agggcuggaaucuggagagcua

SEQ ID NO: 3815744 - RNA, 13 nt, Human
agggcuggaccua

SEQ ID NO: 3815745 - RNA, 16 nt, Human
agggcuggacugaggc

SEQ ID NO: 3815746 - RNA, 18 nt, Human
agggcuggacugaggccu

SEQ ID NO: 3815747 - RNA, 15 nt, Human
agggcuggaggccca

SEQ ID NO: 3815748 - RNA, 21 nt, Human
agggcuggaggcccaggcugg

SEQ ID NO: 3815749 - RNA, 13 nt, Human
agggcuggcccag

SEQ ID NO: 3815750 - RNA, 20 nt, Human
agggcuggcccagcccugcu

SEQ ID NO: 3815751 - RNA, 23 nt, Human
agggcuggcccagcccugcuggc

SEQ ID NO: 3815752 - RNA, 14 nt, Human
agggcuggccccag

SEQ ID NO: 3815753 - RNA, 19 nt, Human
agggcuggccccagggcac

SEQ ID NO: 3815754 - RNA, 12 nt, Human
agggcugggagg

SEQ ID NO: 3815755 - RNA, 22 nt, Human
agggcugggcaaggaaaaagaa

SEQ ID NO: 3815756 - RNA, 11 nt, Human
agggcugggug

SEQ ID NO: 3815757 - RNA, 18 nt, Human
agggcuguaacugccagg

SEQ ID NO: 3815758 - RNA, 20 nt, Human
agggcugucaucugugcacu

SEQ ID NO: 3815759 - RNA, 22 nt, Human
agggcugugcuugaaggcccug

SEQ ID NO: 3815760 - RNA, 15 nt, Human
agggcuuacggcccu

SEQ ID NO: 3815761 - RNA, 15 nt, Human
agggcuuacuauuuc

SEQ ID NO: 3815762 - RNA, 14 nt, Human
agggcuucugcacc

SEQ ID NO: 3815763 - RNA, 15 nt, Human
agggcuucugcaccc

SEQ ID NO: 3815764 - RNA, 17 nt, Human
agggcuucugcacccuc

SEQ ID NO: 3815765 - RNA, 19 nt, Human
agggcuucugcacccucca

SEQ ID NO: 3815766 - RNA, 22 nt, Human
agggcuucugcacccuccaccc

SEQ ID NO: 3815767 - RNA, 15 nt, Human
agggcuuguaguucu

SEQ ID NO: 3815768 - RNA, 17 nt, Human
agggcuuguaguucuuu

SEQ ID NO: 3815769 - RNA, 19 nt, Human
agggcuuguaguucuuuaa

SEQ ID NO: 3815770 - RNA, 17 nt, Human
agggcuuuaaaauucuc

SEQ ID NO: 3815771 - RNA, 17 nt, Human
aggggaaaaaaauguug

SEQ ID NO: 3815772 - RNA, 13 nt, Human
aggggaaaagagg

SEQ ID NO: 3815773 - RNA, 22 nt, Human
aggggaaaaucagccugcucca

SEQ ID NO: 3815774 - RNA, 20 nt, Human
aggggaaaccaguguagccu

SEQ ID NO: 3815775 - RNA, 21 nt, Human
aggggaaaccaguguagccuu

SEQ ID NO: 3815776 - RNA, 18 nt, Human
aggggaagaguguacugg

SEQ ID NO: 3815777 - RNA, 12 nt, Human
aggggaagcugc

SEQ ID NO: 3815778 - RNA, 13 nt, Human
aggggaagcugca

SEQ ID NO: 3815779 - RNA, 14 nt, Human
aggggaagcugcag

SEQ ID NO: 3815780 - RNA, 21 nt, Human
aggggaauaaacuguugaguc

SEQ ID NO: 3815781 - RNA, 23 nt, Human
aggggaauauuuuauucaaggua

SEQ ID NO: 3815782 - RNA, 20 nt, Human
aggggaaucuggagguagcc

SEQ ID NO: 3815783 - RNA, 17 nt, Human
aggggaaugagggggcu

SEQ ID NO: 3815784 - RNA, 20 nt, Human
aggggaaugagggggcucag

SEQ ID NO: 3815785 - RNA, 16 nt, Human
aggggaauugaggaca

SEQ ID NO: 3815786 - RNA, 22 nt, Human
aggggacaagggauuugaggug

SEQ ID NO: 3815787 - RNA, 18 nt, Human
aggggacaggccucaccu

SEQ ID NO: 3815788 - RNA, 19 nt, Human
aggggacaggccucaccuc

SEQ ID NO: 3815789 - RNA, 12 nt, Human
aggggaccagga

SEQ ID NO: 3815790 - RNA, 18 nt, Human
aggggacccccgcccccu

SEQ ID NO: 3815791 - RNA, 19 nt, Human
aggggacccccgcccccug

SEQ ID NO: 3815792 - RNA, 14 nt, Human
aggggacucagccc

SEQ ID NO: 3815793 - RNA, 22 nt, Human
aggggacucagcccugagguga

SEQ ID NO: 3815794 - RNA, 16 nt, Human
aggggagacagagcaa

SEQ ID NO: 3815795 - RNA, 19 nt, Human
aggggagaccucagaagua

SEQ ID NO: 3815796 - RNA, 21 nt, Human
aggggagaccucagaaguaaa

SEQ ID NO: 3815797 - RNA, 22 nt, Human
aggggagagccugcuggcaccc

SEQ ID NO: 3815798 - RNA, 13 nt, Human
aggggagccagga

SEQ ID NO: 3815799 - RNA, 12 nt, Human
aggggagcccac

SEQ ID NO: 3815800 - RNA, 13 nt, Human
aggggagcccacu

SEQ ID NO: 3815801 - RNA, 17 nt, Human
aggggaggaccucuggg

SEQ ID NO: 3815802 - RNA, 16 nt, Human
aggggaggccaucugg

SEQ ID NO: 3815803 - RNA, 15 nt, Human
aggggaggccuucca

SEQ ID NO: 3815804 - RNA, 17 nt, Human
aggggaggggcuccuuu

SEQ ID NO: 3815805 - RNA, 17 nt, Human
aggggagggggcaaagg

SEQ ID NO: 3815806 - RNA, 18 nt, Human
aggggagggucagccagg

SEQ ID NO: 3815807 - RNA, 16 nt, Human
aggggagucaccuucc

SEQ ID NO: 3815808 - RNA, 17 nt, Human
aggggauauaggagagg

SEQ ID NO: 3815809 - RNA, 19 nt, Human
aggggaucuggaagggcca

SEQ ID NO: 3815810 - RNA, 14 nt, Human
aggggaugggaggu

SEQ ID NO: 3815811 - RNA, 19 nt, Human
aggggauguauccaugggg

SEQ ID NO: 3815812 - RNA, 22 nt, Human
aggggauguauccaugggggca

SEQ ID NO: 3815813 - RNA, 17 nt, Human
aggggaugugugugugc

SEQ ID NO: 3815814 - RNA, 19 nt, Human
aggggcaacgaagaaaaaa

SEQ ID NO: 3815815 - RNA, 15 nt, Human
aggggcacagggucu

SEQ ID NO: 3815816 - RNA, 19 nt, Human
aggggcacuucauugagag

SEQ ID NO: 3815817 - RNA, 16 nt, Human
aggggcagagccagga

SEQ ID NO: 3815818 - RNA, 15 nt, Human
aggggcagaggaggc

SEQ ID NO: 3815819 - RNA, 15 nt, Human
aggggcagauggaaa

SEQ ID NO: 3815820 - RNA, 12 nt, Human
aggggcagcccc

SEQ ID NO: 3815821 - RNA, 16 nt, Human
aggggcagcccuugcu

SEQ ID NO: 3815822 - RNA, 14 nt, Human
aggggcagcuucua

SEQ ID NO: 3815823 - RNA, 12 nt, Human
aggggcaggagc

SEQ ID NO: 3815824 - RNA, 14 nt, Human
aggggcaggcacag

SEQ ID NO: 3815825 - RNA, 23 nt, Human
aggggcagguaaacuccuguccu

SEQ ID NO: 3815826 - RNA, 15 nt, Human
aggggcagucuggag

SEQ ID NO: 3815827 - RNA, 16 nt, Human
aggggcagucuggagg

SEQ ID NO: 3815828 - RNA, 17 nt, Human
aggggcagucuggaggg

SEQ ID NO: 3815829 - RNA, 10 nt, Human
agggaaaagg

SEQ ID NO: 3815830 - RNA, 17 nt, Human
agggaaaaugcagcagg

SEQ ID NO: 3815831 - RNA, 22 nt, Human
agggaaaaugcagcagggaugc

SEQ ID NO: 3815832 - RNA, 18 nt, Human
agggaaaauuauuugcau

SEQ ID NO: 3815833 - RNA, 15 nt, Human
agggaaacuaagauu

SEQ ID NO: 3815834 - RNA, 19 nt, Human
agggaaacuaagauucuuu

SEQ ID NO: 3815835 - RNA, 16 nt, Human
agggaaacuauugucc

SEQ ID NO: 3815836 - RNA, 14 nt, Human
agggaaacugccag

SEQ ID NO: 3815837 - RNA, 19 nt, Human
agggaaacugccagcaacg

SEQ ID NO: 3815838 - RNA, 21 nt, Human
agggaaacugccagcaacgca

SEQ ID NO: 3815839 - RNA, 12 nt, Human
agggaaagacug

SEQ ID NO: 3815840 - RNA, 19 nt, Human
agaugcgcagccccaucug

SEQ ID NO: 3815841 - RNA, 23 nt, Human
agaugcgcagccccaucugugca

SEQ ID NO: 3815842 - RNA, 23 nt, Human
agaugcgcauucuaaccuggagg

SEQ ID NO: 3815843 - RNA, 23 nt, Human
agaugcgucccaagauguugauu

SEQ ID NO: 3815844 - RNA, 22 nt, Human
agaugcuagaacucccuuucaa

SEQ ID NO: 3815845 - RNA, 21 nt, Human
agaugcuagcgcguugccugu

SEQ ID NO: 3815846 - RNA, 15 nt, Human
agaugcucaaaguug

SEQ ID NO: 3815847 - RNA, 15 nt, Human
agaugcuccaagauu

SEQ ID NO: 3815848 - RNA, 20 nt, Human
agaugcuccaagauucuaga

SEQ ID NO: 3815849 - RNA, 22 nt, Human
agaugcuccaagauucuagaug

SEQ ID NO: 3815850 - RNA, 23 nt, Human
agaugcuccaagauucuagauga

SEQ ID NO: 3815851 - RNA, 15 nt, Human
agaugcuccuugggc

SEQ ID NO: 3815852 - RNA, 18 nt, Human
agaugcucuaucuugcuc

SEQ ID NO: 3815853 - RNA, 15 nt, Human
agaugcucuucugug

SEQ ID NO: 3815854 - RNA, 18 nt, Human
agaugcugaaacaggaga

SEQ ID NO: 3815855 - RNA, 20 nt, Human
agaugcugauggagccuucc

SEQ ID NO: 3815856 - RNA, 13 nt, Human
agaugcugauguu

SEQ ID NO: 3815857 - RNA, 19 nt, Human
agaugcugauguucagugu

SEQ ID NO: 3815858 - RNA, 19 nt, Human
agaugcugcagagucacaa

SEQ ID NO: 3815859 - RNA, 13 nt, Human
agaugcuggagaa

SEQ ID NO: 3815860 - RNA, 22 nt, Human
agaugcuggagaagagaggaga

SEQ ID NO: 3815861 - RNA, 16 nt, Human
agaugcuggcccaggg

SEQ ID NO: 3815862 - RNA, 17 nt, Human
agaugcuggcccagggc

SEQ ID NO: 3815863 - RNA, 18 nt, Human
agaugcuggcccagggcc

SEQ ID NO: 3815864 - RNA, 20 nt, Human
agaugcuggcccagggccca

SEQ ID NO: 3815865 - RNA, 21 nt, Human
agaugcuggcccagggcccag

SEQ ID NO: 3815866 - RNA, 22 nt, Human
agaugcuggcccagggcccaga

SEQ ID NO: 3815867 - RNA, 19 nt, Human
agaugcuggcuugggcagc

SEQ ID NO: 3815868 - RNA, 18 nt, Human
agaugcuggguuggugca

SEQ ID NO: 3815869 - RNA, 15 nt, Human
agaugcugugccccu

SEQ ID NO: 3815870 - RNA, 15 nt, Human
agaugcuucucacug

SEQ ID NO: 3815871 - RNA, 16 nt, Human
agaugcuucucacugc

SEQ ID NO: 3815872 - RNA, 17 nt, Human
agaugcuuuucugucuc

SEQ ID NO: 3815873 - RNA, 20 nt, Human
agauggaaccgcaggaagcu

SEQ ID NO: 3815874 - RNA, 22 nt, Human
agauggaaguugcagugagcug

SEQ ID NO: 3815875 - RNA, 18 nt, Human
agauggaaugcuguguua

SEQ ID NO: 3815876 - RNA, 19 nt, Human
agauggaguucuugugcca

SEQ ID NO: 3815877 - RNA, 15 nt, Human
agauggaguuucuaa

SEQ ID NO: 3815878 - RNA, 11 nt, Human
agauggauucu

SEQ ID NO: 3815879 - RNA, 13 nt, Human
agauggauucucc

SEQ ID NO: 3815880 - RNA, 18 nt, Human
agauggauugguguaaaa

SEQ ID NO: 3815881 - RNA, 22 nt, Human
agauggcaagagggugacagcu

SEQ ID NO: 3815882 - RNA, 14 nt, Human
agauggcagcuuuu

SEQ ID NO: 3815883 - RNA, 19 nt, Human
agauggcauccugugaagu

SEQ ID NO: 3815884 - RNA, 19 nt, Human
agauggcccagcuccccaa

SEQ ID NO: 3815885 - RNA, 14 nt, Human
agauggccuuugcu

SEQ ID NO: 3815886 - RNA, 16 nt, Human
agauggcucagagggg

SEQ ID NO: 3815887 - RNA, 21 nt, Human
agauggcucagagggggacug

SEQ ID NO: 3815888 - RNA, 13 nt, Human
agaugggaaugag

SEQ ID NO: 3815889 - RNA, 16 nt, Human
agaugggacaauuaga

SEQ ID NO: 3815890 - RNA, 15 nt, Human
agaugggacugggag

SEQ ID NO: 3815891 - RNA, 22 nt, Human
agaugggaggggaaaggggaga

SEQ ID NO: 3815892 - RNA, 22 nt, Human
agaugggcauaugugucagugg

SEQ ID NO: 3815893 - RNA, 20 nt, Human
agaugggcaucuuuuguauu

SEQ ID NO: 3815894 - RNA, 22 nt, Human
agaugggcuucccaagggcugc

SEQ ID NO: 3815895 - RNA, 19 nt, Human
agaugggcuuguuuucuug

SEQ ID NO: 3815896 - RNA, 14 nt, Human
agauggggccucug

SEQ ID NO: 3815897 - RNA, 18 nt, Human
agaugggggaaagcacag

SEQ ID NO: 3815898 - RNA, 17 nt, Human
agaugggggcaagaaga

SEQ ID NO: 3815899 - RNA, 18 nt, Human
agaugggggcaagaagau

SEQ ID NO: 3815900 - RNA, 16 nt, Human
agaugggggcagggcu

SEQ ID NO: 3815901 - RNA, 17 nt, Human
agaugggggcagggcug

SEQ ID NO: 3815902 - RNA, 16 nt, Human
agauggggucuguaaa

SEQ ID NO: 3815903 - RNA, 22 nt, Human
agaugggugcuuggaggaagga

SEQ ID NO: 3815904 - RNA, 20 nt, Human
agauggugaagcauucuccc

SEQ ID NO: 3815905 - RNA, 17 nt, Human
agauggugcugagaagc

SEQ ID NO: 3815906 - RNA, 16 nt, Human
agaugguuacacuguu

SEQ ID NO: 3815907 - RNA, 14 nt, Human
agaugguugccaag

SEQ ID NO: 3815908 - RNA, 22 nt, Human
agaugguuuuauaaucugauuu

SEQ ID NO: 3815909 - RNA, 14 nt, Human
agauguaauguuuu

SEQ ID NO: 3815910 - RNA, 17 nt, Human
agauguaauguuuucuu

SEQ ID NO: 3815911 - RNA, 13 nt, Human
agauguaauuuug

SEQ ID NO: 3815912 - RNA, 16 nt, Human
agauguaccuggugga

SEQ ID NO: 3815913 - RNA, 22 nt, Human
agauguacuauaacauagaauu

SEQ ID NO: 3815914 - RNA, 19 nt, Human
agauguagaggagaaacug

SEQ ID NO: 3815915 - RNA, 21 nt, Human
agauguagccccucuccugga

SEQ ID NO: 3815916 - RNA, 14 nt, Human
agauguaggaggga

SEQ ID NO: 3815917 - RNA, 16 nt, Human
agauguaggagggacu

SEQ ID NO: 3815918 - RNA, 14 nt, Human
agauguaguauuuu

SEQ ID NO: 3815919 - RNA, 12 nt, Human
agauguauccuu

SEQ ID NO: 3815920 - RNA, 18 nt, Human
agaugucagacuggcugg

SEQ ID NO: 3815921 - RNA, 12 nt, Human
agaugucccuug

SEQ ID NO: 3815922 - RNA, 22 nt, Human
agaugucccuugaugcacagag

SEQ ID NO: 3815923 - RNA, 24 nt, Human
agaugucccuugaugcacagagaa

SEQ ID NO: 3815924 - RNA, 21 nt, Human
agaugucccuuucuuggccag

SEQ ID NO: 3815925 - RNA, 22 nt, Human
agaugucucuggcgugugggua

SEQ ID NO: 3815926 - RNA, 15 nt, Human
agaugucugucucug

SEQ ID NO: 3815927 - RNA, 11 nt, Human
agaugucuguu

SEQ ID NO: 3815928 - RNA, 13 nt, Human
agaugucuucgua

SEQ ID NO: 3815929 - RNA, 20 nt, Human
agaugucuucguacaguucu

SEQ ID NO: 3815930 - RNA, 16 nt, Human
agaugucuucugccug

SEQ ID NO: 3815931 - RNA, 17 nt, Human
agaugucuucugccugu

SEQ ID NO: 3815932 - RNA, 14 nt, Human
agaugucuuggaac

SEQ ID NO: 3815933 - RNA, 18 nt, Human
agaugucuuggaacauug

SEQ ID NO: 3815934 - RNA, 23 nt, Human
agaugucuuuaggcagcagcuuu

SEQ ID NO: 3815935 - RNA, 22 nt, Human
agaugucuuuucccauuuaucu

SEQ ID NO: 3815936 - RNA, 22 nt, Human
agaugugaacacaucagcuugc

SEQ ID NO: 3815937 - RNA, 23 nt, Human
agaugugaauuauugacacugaa

SEQ ID NO: 3815938 - RNA, 20 nt, Human
agaugugauauucuaagacu

SEQ ID NO: 3815939 - RNA, 21 nt, Human
agaugugauuaaagcuaagga

SEQ ID NO: 3815940 - RNA, 12 nt, Human
agaugugauuua

SEQ ID NO: 3815941 - RNA, 16 nt, Human
agaugugcaaaugcaa

SEQ ID NO: 3815942 - RNA, 15 nt, Human
agaugugcacccaug

SEQ ID NO: 3815943 - RNA, 15 nt, Human
agaugugcugacaag

SEQ ID NO: 3815944 - RNA, 14 nt, Human
agaugugcugcuuu

SEQ ID NO: 3815945 - RNA, 16 nt, Human
agaugugcugcuuuga

SEQ ID NO: 3815946 - RNA, 13 nt, Human
agauguggagcca

SEQ ID NO: 3815947 - RNA, 16 nt, Human
agauguguaauuuuuc

SEQ ID NO: 3815948 - RNA, 22 nt, Human
agauguguaucaguguuuaugu

SEQ ID NO: 3815949 - RNA, 17 nt, Human
agaugugucuucaauuu

SEQ ID NO: 3815950 - RNA, 19 nt, Human
agauguguggacuguggca

SEQ ID NO: 3815951 - RNA, 17 nt, Human
agauguguguugauacu

SEQ ID NO: 3815952 - RNA, 21 nt, Human
agauguguguugauacuguug

SEQ ID NO: 3815953 - RNA, 24 nt, Human
agauguguguugauacuguugcac

SEQ ID NO: 3815954 - RNA, 16 nt, Human
agauguguucuuauuu

SEQ ID NO: 3815955 - RNA, 12 nt, Human
agauguuaaaaa

SEQ ID NO: 3815956 - RNA, 15 nt, Human
agauguuaaaauaaa

SEQ ID NO: 3815957 - RNA, 17 nt, Human
agauguuaaaauaaaug

SEQ ID NO: 3815958 - RNA, 18 nt, Human
agauguuaaaauaaaugg

SEQ ID NO: 3815959 - RNA, 15 nt, Human
agauguuagacucau

SEQ ID NO: 3815960 - RNA, 15 nt, Human
agauguuagauauuu

SEQ ID NO: 3815961 - RNA, 17 nt, Human
agauguucagucauuuu

SEQ ID NO: 3815962 - RNA, 20 nt, Human
agauguucuaagucuuucca

SEQ ID NO: 3815963 - RNA, 23 nt, Human
agauguugaauucuuuugccaag

SEQ ID NO: 3815964 - RNA, 14 nt, Human
agauguuuaaaaca

SEQ ID NO: 3815965 - RNA, 18 nt, Human
agauguuuauucuucuag

SEQ ID NO: 3815966 - RNA, 14 nt, Human
agauguuucacacc

SEQ ID NO: 3815967 - RNA, 23 nt, Human
agauguuucacaccggaagguuu

SEQ ID NO: 3815968 - RNA, 14 nt, Human
agauguuucacgaa

SEQ ID NO: 3815969 - RNA, 14 nt, Human
agauguuuccagac

SEQ ID NO: 3815970 - RNA, 23 nt, Human
agauguuuccagacuuccuugag

SEQ ID NO: 3815971 - RNA, 18 nt, Human
agauguuucuuuuguaug

SEQ ID NO: 3815972 - RNA, 21 nt, Human
agauguuucuuuuguauguaa

SEQ ID NO: 3815973 - RNA, 20 nt, Human
agauuucucauuugccaaua

SEQ ID NO: 3815974 - RNA, 14 nt, Human
agauuucugaggaa

SEQ ID NO: 3815975 - RNA, 14 nt, Human
agauuucuguucag

SEQ ID NO: 3815976 - RNA, 19 nt, Human
agauuucuugaguuuuguu

SEQ ID NO: 3815977 - RNA, 17 nt, Human
agauuugaacucuucaa

SEQ ID NO: 3815978 - RNA, 20 nt, Human
agauuugaagacaaaaauac

SEQ ID NO: 3815979 - RNA, 16 nt, Human
agauuugaaggucugc

SEQ ID NO: 3815980 - RNA, 12 nt, Human
agauuugaccua

SEQ ID NO: 3815981 - RNA, 19 nt, Human
agauuugaccuccucccug

SEQ ID NO: 3815982 - RNA, 22 nt, Human
agauuugaccuccucccuguua

SEQ ID NO: 3815983 - RNA, 12 nt, Human
agauuugcacaa

SEQ ID NO: 3815984 - RNA, 14 nt, Human
agauuugcacaaaa

SEQ ID NO: 3815985 - RNA, 17 nt, Human
agauuugcacaaaaaga

SEQ ID NO: 3815986 - RNA, 19 nt, Human
agauuugccauagaguaca

SEQ ID NO: 3815987 - RNA, 21 nt, Human
agauuugccauagaguacacu

SEQ ID NO: 3815988 - RNA, 13 nt, Human
agauuuggaagcu

SEQ ID NO: 3815989 - RNA, 21 nt, Human
agauuuggugaauuugaaucu

SEQ ID NO: 3815990 - RNA, 22 nt, Human
agauuuguaggaaggucucauu

SEQ ID NO: 3815991 - RNA, 23 nt, Human
agauuuguaggaaggucucauuc

SEQ ID NO: 3815992 - RNA, 11 nt, Human
agauuugugaa

SEQ ID NO: 3815993 - RNA, 15 nt, Human
agauuugugaacuca

SEQ ID NO: 3815994 - RNA, 19 nt, Human
agauuugugaacucagcca

SEQ ID NO: 3815995 - RNA, 21 nt, Human
agauuugugaacucagccaag

SEQ ID NO: 3815996 - RNA, 14 nt, Human
agauuuguuuugug

SEQ ID NO: 3815997 - RNA, 15 nt, Human
agauuuguuuuuaaa

SEQ ID NO: 3815998 - RNA, 21 nt, Human
agauuuguuuuuaaacuguac

SEQ ID NO: 3815999 - RNA, 22 nt, Human
agggaaaggcucugaaagccag

SEQ ID NO: 3816000 - RNA, 15 nt, Human
agggaaaggggugcu

SEQ ID NO: 3816001 - RNA, 23 nt, Human
agggaaauagaaaaacccugccc

SEQ ID NO: 3816002 - RNA, 14 nt, Human
agggaaaugaaaga

SEQ ID NO: 3816003 - RNA, 19 nt, Human
agggaacagacaggagaaa

SEQ ID NO: 3816004 - RNA, 20 nt, Human
agggaacagacaggagaaau

SEQ ID NO: 3816005 - RNA, 15 nt, Human
agggaacagggcgga

SEQ ID NO: 3816006 - RNA, 14 nt, Human
agggaacagugagg

SEQ ID NO: 3816007 - RNA, 14 nt, Human
agggaacucugggg

SEQ ID NO: 3816008 - RNA, 13 nt, Human
agggaacugggga

SEQ ID NO: 3816009 - RNA, 15 nt, Human
agggaagaacuauug

SEQ ID NO: 3816010 - RNA, 16 nt, Human
agggaagacauuucuu

SEQ ID NO: 3816011 - RNA, 14 nt, Human
agggaagagaaaca

SEQ ID NO: 3816012 - RNA, 14 nt, Human
agggaagagugcau

SEQ ID NO: 3816013 - RNA, 19 nt, Human
agggaagaguggaggugga

SEQ ID NO: 3816014 - RNA, 19 nt, Human
agggaagauaaguuggaaa

SEQ ID NO: 3816015 - RNA, 21 nt, Human
agggaagauaaguuggaaaca

SEQ ID NO: 3816016 - RNA, 17 nt, Human
agggaagcagcagccuc

SEQ ID NO: 3816017 - RNA, 18 nt, Human
agggaagcagcagccucg

SEQ ID NO: 3816018 - RNA, 13 nt, Human
agggaagcccagc

SEQ ID NO: 3816019 - RNA, 16 nt, Human
agggaagcuacagguu

SEQ ID NO: 3816020 - RNA, 13 nt, Human
agggaagcuggcc

SEQ ID NO: 3816021 - RNA, 18 nt, Human
agggaaggaacucuggcu

SEQ ID NO: 3816022 - RNA, 23 nt, Human
agggaaggaacucuggcuuccag

SEQ ID NO: 3816023 - RNA, 15 nt, Human
agggaaggaucccau

SEQ ID NO: 3816024 - RNA, 16 nt, Human
agggaaggauuuagga

SEQ ID NO: 3816025 - RNA, 14 nt, Human
agggaaggcaggca

SEQ ID NO: 3816026 - RNA, 16 nt, Human
agggaaggccccacag

SEQ ID NO: 3816027 - RNA, 12 nt, Human
agggaaggccug

SEQ ID NO: 3816028 - RNA, 16 nt, Human
agggaagggagccaag

SEQ ID NO: 3816029 - RNA, 13 nt, Human
agggaagggccug

SEQ ID NO: 3816030 - RNA, 22 nt, Human
agggaaggggacaaggacuagg

SEQ ID NO: 3816031 - RNA, 22 nt, Human
agggaaguaacaguaacgcagg

SEQ ID NO: 3816032 - RNA, 19 nt, Human
agggaauccaagccuccac

SEQ ID NO: 3816033 - RNA, 20 nt, Human
agggaauccccgaaggugcu

SEQ ID NO: 3816034 - RNA, 15 nt, Human
agggaauccuccucc

SEQ ID NO: 3816035 - RNA, 16 nt, Human
agggaauccuccucca

SEQ ID NO: 3816036 - RNA, 18 nt, Human
agggaauccuccuccagg

SEQ ID NO: 3816037 - RNA, 15 nt, Human
agggaauggcacagc

SEQ ID NO: 3816038 - RNA, 14 nt, Human
agggacaaaggagc

SEQ ID NO: 3816039 - RNA, 16 nt, Human
agggacaaaggagccu

SEQ ID NO: 3816040 - RNA, 20 nt, Human
agggacaaaggagccuguga

SEQ ID NO: 3816041 - RNA, 21 nt, Human
agggacaaaggagccugugaa

SEQ ID NO: 3816042 - RNA, 14 nt, Human
agggacaccagcca

SEQ ID NO: 3816043 - RNA, 21 nt, Human
agggacaccagccaggcucug

SEQ ID NO: 3816044 - RNA, 14 nt, Human
agggacaccuggga

SEQ ID NO: 3816045 - RNA, 21 nt, Human
agggacaccugggagaaaucu

SEQ ID NO: 3816046 - RNA, 10 nt, Human
agggacagag

SEQ ID NO: 3816047 - RNA, 20 nt, Human
agggacagaggccccagccu

SEQ ID NO: 3816048 - RNA, 23 nt, Human
agggacagaggggguggccuccc

SEQ ID NO: 3816049 - RNA, 20 nt, Human
agggacagcccacugagaag

SEQ ID NO: 3816050 - RNA, 13 nt, Human
agggacaggaccc

SEQ ID NO: 3816051 - RNA, 18 nt, Human
agggacaggaccccagcu

SEQ ID NO: 3816052 - RNA, 21 nt, Human
agggaccaaggaccccucacc

SEQ ID NO: 3816053 - RNA, 17 nt, Human
agggaccaaggcaaggc

SEQ ID NO: 3816054 - RNA, 18 nt, Human
agggaccacacccuguac

SEQ ID NO: 3816055 - RNA, 14 nt, Human
agggaccagccaag

SEQ ID NO: 3816056 - RNA, 13 nt, Human
agggacccagcua

SEQ ID NO: 3816057 - RNA, 17 nt, Human
agggacccuuugggggu

SEQ ID NO: 3816058 - RNA, 22 nt, Human
agggaccggcggaccccagcca

SEQ ID NO: 3816059 - RNA, 16 nt, Human
agggaccuggggaagc

SEQ ID NO: 3816060 - RNA, 15 nt, Human
agggaccuugaaggg

SEQ ID NO: 3816061 - RNA, 21 nt, Human
agggacgaagaagagccacag

SEQ ID NO: 3816062 - RNA, 22 nt, Human
agggacgcggcucccggggcag

SEQ ID NO: 3816063 - RNA, 17 nt, Human
agggacgcuacccggga

SEQ ID NO: 3816064 - RNA, 21 nt, Human
agggacgcuacccgggaaggg

SEQ ID NO: 3816065 - RNA, 20 nt, Human
agggacuaugaaugggcaaa

SEQ ID NO: 3816066 - RNA, 21 nt, Human
agggacucaucuuucccuccu

SEQ ID NO: 3816067 - RNA, 20 nt, Human
agggacucugaagccucugg

SEQ ID NO: 3816068 - RNA, 22 nt, Human
agggacucugaagccucuggga

SEQ ID NO: 3816069 - RNA, 14 nt, Human
agggacugaagcca

SEQ ID NO: 3816070 - RNA, 13 nt, Human
agggacugagaaa

SEQ ID NO: 3816071 - RNA, 15 nt, Human
agggacugccucugc

SEQ ID NO: 3816072 - RNA, 17 nt, Human
agggacugccucugcca

SEQ ID NO: 3816073 - RNA, 18 nt, Human
agggacugccucugccac

SEQ ID NO: 3816074 - RNA, 18 nt, Human
agggacuggaaccaggga

SEQ ID NO: 3816075 - RNA, 20 nt, Human
agggacuguaaacacagaca

SEQ ID NO: 3816076 - RNA, 16 nt, Human
agggacugucgcugcu

SEQ ID NO: 3816077 - RNA, 17 nt, Human
agggacuuaaaaaacuu

SEQ ID NO: 3816078 - RNA, 23 nt, Human
agggacuucugucuucacaacag

SEQ ID NO: 3816079 - RNA, 13 nt, Human
agggagaaauguu

SEQ ID NO: 3816080 - RNA, 15 nt, Human
agggagaagaaguca

SEQ ID NO: 3816081 - RNA, 21 nt, Human
agggagaagacuauauuguac

SEQ ID NO: 3816082 - RNA, 12 nt, Human
agggagacagag

SEQ ID NO: 3816083 - RNA, 19 nt, Human
agggagacccguccauuug

SEQ ID NO: 3816084 - RNA, 22 nt, Human
agggagagagagagagagagga

SEQ ID NO: 3816085 - RNA, 23 nt, Human
agggagagagagagagagaggac

SEQ ID NO: 3816086 - RNA, 13 nt, Human
agggagagcccag

SEQ ID NO: 3816087 - RNA, 18 nt, Human
agggagagcccaggagcu

SEQ ID NO: 3816088 - RNA, 19 nt, Human
agggagagcccaggagcuc

SEQ ID NO: 3816089 - RNA, 21 nt, Human
agggagagcccaggagcuccc

SEQ ID NO: 3816090 - RNA, 13 nt, Human
agggagagggggc

SEQ ID NO: 3816091 - RNA, 16 nt, Human
agggagagguggagca

SEQ ID NO: 3816092 - RNA, 19 nt, Human
agggagagucauauuuuga

SEQ ID NO: 3816093 - RNA, 19 nt, Human
agggagagucucccaggga

SEQ ID NO: 3816094 - RNA, 22 nt, Human
agggagagucucccagggagca

SEQ ID NO: 3816095 - RNA, 22 nt, Human
agggagauauuuaaguauaaaa

SEQ ID NO: 3816096 - RNA, 13 nt, Human
agggagcacuggg

SEQ ID NO: 3816097 - RNA, 20 nt, Human
agggagcagagaaggccagg

SEQ ID NO: 3816098 - RNA, 20 nt, Human
agggagcauagaaggcaggu

SEQ ID NO: 3816099 - RNA, 20 nt, Human
agggagccaagggauggaca

SEQ ID NO: 3816100 - RNA, 21 nt, Human
agggagccaagggauggacau

SEQ ID NO: 3816101 - RNA, 16 nt, Human
agggagccauguuuca

SEQ ID NO: 3816102 - RNA, 15 nt, Human
agggagccauuugag

SEQ ID NO: 3816103 - RNA, 17 nt, Human
agggagccccuuugaug

SEQ ID NO: 3816104 - RNA, 22 nt, Human
agggagcggccggccagccccu

SEQ ID NO: 3816105 - RNA, 16 nt, Human
agggagcuagccagag

SEQ ID NO: 3816106 - RNA, 23 nt, Human
agggagcuagccagaggacugug

SEQ ID NO: 3816107 - RNA, 15 nt, Human
agggagcuggcucca

SEQ ID NO: 3816108 - RNA, 16 nt, Human
agggagcuggcuccag

SEQ ID NO: 3816109 - RNA, 14 nt, Human
agggagcugggccc

SEQ ID NO: 3816110 - RNA, 21 nt, Human
agggaggaagaagcuuaggca

SEQ ID NO: 3816111 - RNA, 21 nt, Human
agggaggaaucgaggaaccag

SEQ ID NO: 3816112 - RNA, 22 nt, Human
agggaggaaucgaggaaccaga

SEQ ID NO: 3816113 - RNA, 23 nt, Human
agggaggacgcucucuggccuuc

SEQ ID NO: 3816114 - RNA, 17 nt, Human
agggaggaggccaccuc

SEQ ID NO: 3816115 - RNA, 19 nt, Human
agggaggaggccaccucuc

SEQ ID NO: 3816116 - RNA, 14 nt, Human
agggaggaguggag

SEQ ID NO: 3816117 - RNA, 10 nt, Human
agggggccac

SEQ ID NO: 3816118 - RNA, 15 nt, Human
agggggccaggugca

SEQ ID NO: 3816119 - RNA, 23 nt, Human
agggggccccuuugcugacccuc

SEQ ID NO: 3816120 - RNA, 17 nt, Human
agggggccuggaugccc

SEQ ID NO: 3816121 - RNA, 19 nt, Human
agggggcugcugcugggcu

SEQ ID NO: 3816122 - RNA, 13 nt, Human
agggggcugggac

SEQ ID NO: 3816123 - RNA, 17 nt, Human
agggggcuggugggugc

SEQ ID NO: 3816124 - RNA, 16 nt, Human
agggggcuugaagcca

SEQ ID NO: 3816125 - RNA, 17 nt, Human
aggggggaagaucaggu

SEQ ID NO: 3816126 - RNA, 23 nt, Human
aggggggcacaugcugagucucc

SEQ ID NO: 3816127 - RNA, 17 nt, Human
aggggggcugccuggcc

SEQ ID NO: 3816128 - RNA, 23 nt, Human
agggggggguauuucaauuaccu

SEQ ID NO: 3816129 - RNA, 13 nt, Human
aggggguaaggcc

SEQ ID NO: 3816130 - RNA, 16 nt, Human
aggggguccacccagc

SEQ ID NO: 3816131 - RNA, 20 nt, Human
agggggucccagugggaggg

SEQ ID NO: 3816132 - RNA, 15 nt, Human
aggggguccguggaa

SEQ ID NO: 3816133 - RNA, 16 nt, Human
agggggucuggcuggu

SEQ ID NO: 3816134 - RNA, 17 nt, Human
agggggucuggcuggug

SEQ ID NO: 3816135 - RNA, 23 nt, Human
agggggugauuagagggaggaga

SEQ ID NO: 3816136 - RNA, 12 nt, Human
aggggguuacaa

SEQ ID NO: 3816137 - RNA, 20 nt, Human
aggggguuugcuggggaacu

SEQ ID NO: 3816138 - RNA, 22 nt, Human
agggguacauuucccugugcug

SEQ ID NO: 3816139 - RNA, 16 nt, Human
agggguaggggcuggg

SEQ ID NO: 3816140 - RNA, 19 nt, Human
agggguaggggcugggaac

SEQ ID NO: 3816141 - RNA, 13 nt, Human
aggggucaggcuc

SEQ ID NO: 3816142 - RNA, 16 nt, Human
aggggucaggcuccau

SEQ ID NO: 3816143 - RNA, 21 nt, Human
aggggucgacuucgggcuggc

SEQ ID NO: 3816144 - RNA, 15 nt, Human
aggggucucccugga

SEQ ID NO: 3816145 - RNA, 16 nt, Human
aggggucucccuggag

SEQ ID NO: 3816146 - RNA, 19 nt, Human
aggggucucccuggagugc

SEQ ID NO: 3816147 - RNA, 16 nt, Human
aggggucucccuggcu

SEQ ID NO: 3816148 - RNA, 18 nt, Human
aggggucucccuggcucc

SEQ ID NO: 3816149 - RNA, 11 nt, Human
aggggugcccc

SEQ ID NO: 3816150 - RNA, 13 nt, Human
aggggugcccccu

SEQ ID NO: 3816151 - RNA, 20 nt, Human
aggggugcccccuccucucc

SEQ ID NO: 3816152 - RNA, 17 nt, Human
agggguggagacugcuu

SEQ ID NO: 3816153 - RNA, 20 nt, Human
agggguggagacugcuuccc

SEQ ID NO: 3816154 - RNA, 13 nt, Human
aggggugguccug

SEQ ID NO: 3816155 - RNA, 15 nt, Human
aggggugguccugac

SEQ ID NO: 3816156 - RNA, 14 nt, Human
aggggugucuuggg

SEQ ID NO: 3816157 - RNA, 22 nt, Human
aggggugucuugggcagagcug

SEQ ID NO: 3816158 - RNA, 15 nt, Human
agggguuagagcagg

SEQ ID NO: 3816159 - RNA, 23 nt, Human
agggguucccuugagggcugcag

SEQ ID NO: 3816160 - RNA, 14 nt, Human
agggguuccucaaa

SEQ ID NO: 3816161 - RNA, 14 nt, Human
agggguuccucccc

SEQ ID NO: 3816162 - RNA, 15 nt, Human
agggguuccuccccu

SEQ ID NO: 3816163 - RNA, 17 nt, Human
agggguuccuccccucc

SEQ ID NO: 3816164 - RNA, 21 nt, Human
agggguuccuccccuccagcu

SEQ ID NO: 3816165 - RNA, 22 nt, Human
agggguuccuccccuccagcuc

SEQ ID NO: 3816166 - RNA, 20 nt, Human
agggguucgagaccagucug

SEQ ID NO: 3816167 - RNA, 18 nt, Human
agggguugcagugagcgg

SEQ ID NO: 3816168 - RNA, 11 nt, Human
agggguuuaca

SEQ ID NO: 3816169 - RNA, 21 nt, Human
agggguuuucgaagcucagcc

SEQ ID NO: 3816170 - RNA, 21 nt, Human
agggguuuucuugauaauuuu

SEQ ID NO: 3816171 - RNA, 15 nt, Human
aggguaaauuauuca

SEQ ID NO: 3816172 - RNA, 18 nt, Human
aggguaacuaacuaaaac

SEQ ID NO: 3816173 - RNA, 22 nt, Human
aggguaauaaacuuagaauaaa

SEQ ID NO: 3816174 - RNA, 14 nt, Human
aggguacagcuggg

SEQ ID NO: 3816175 - RNA, 18 nt, Human
aggguacauggugcuggg

SEQ ID NO: 3816176 - RNA, 18 nt, Human
aggguacauuuauaauug

SEQ ID NO: 3816177 - RNA, 15 nt, Human
aggguacuaaauuua

SEQ ID NO: 3816178 - RNA, 17 nt, Human
aggguacuaaauuuaaa

SEQ ID NO: 3816179 - RNA, 19 nt, Human
aggguacuaaggaaucuuu

SEQ ID NO: 3816180 - RNA, 23 nt, Human
aggguagaauucuggcugguaga

SEQ ID NO: 3816181 - RNA, 23 nt, Human
aggguagcccgccugccaguccu

SEQ ID NO: 3816182 - RNA, 13 nt, Human
aggguaggcagga

SEQ ID NO: 3816183 - RNA, 17 nt, Human
aggguauauuuuccuau

SEQ ID NO: 3816184 - RNA, 19 nt, Human
aggguaucaggugcugcca

SEQ ID NO: 3816185 - RNA, 21 nt, Human
aggguaucaggugcugccauc

SEQ ID NO: 3816186 - RNA, 15 nt, Human
aggguaucuggugac

SEQ ID NO: 3816187 - RNA, 21 nt, Human
aggguaucuggugacuuuccu

SEQ ID NO: 3816188 - RNA, 13 nt, Human
aggguauuccaga

SEQ ID NO: 3816189 - RNA, 14 nt, Human
agggucaaugcuau

SEQ ID NO: 3816190 - RNA, 15 nt, Human
agggucagaaacagg

SEQ ID NO: 3816191 - RNA, 19 nt, Human
agggucagaaacaggaccg

SEQ ID NO: 3816192 - RNA, 21 nt, Human
agggucagacgccugaggaac

SEQ ID NO: 3816193 - RNA, 15 nt, Human
agggucagccagggc

SEQ ID NO: 3816194 - RNA, 23 nt, Human
agggucagccagggccugcgagg

SEQ ID NO: 3816195 - RNA, 22 nt, Human
agggucauaucacucaggcccu

SEQ ID NO: 3816196 - RNA, 18 nt, Human
aggguccagaaggagaca

SEQ ID NO: 3816197 - RNA, 11 nt, Human
aguaacuguuu

SEQ ID NO: 3816198 - RNA, 17 nt, Human
aguaacuguuuuuuaag

SEQ ID NO: 3816199 - RNA, 19 nt, Human
aguaacuucuuauggaauu

SEQ ID NO: 3816200 - RNA, 18 nt, Human
aguaacuugguuauacau

SEQ ID NO: 3816201 - RNA, 19 nt, Human
aguaacuugguuauacaug

SEQ ID NO: 3816202 - RNA, 22 nt, Human
aguaacuugguuauacaugaca

SEQ ID NO: 3816203 - RNA, 15 nt, Human
aguaacuugucuuaa

SEQ ID NO: 3816204 - RNA, 14 nt, Human
aguaacuuuaugug

SEQ ID NO: 3816205 - RNA, 16 nt, Human
aguaagaaaauauuuu

SEQ ID NO: 3816206 - RNA, 20 nt, Human
aguaagaaagugaagcaaau

SEQ ID NO: 3816207 - RNA, 17 nt, Human
aguaagaaauuucaggu

SEQ ID NO: 3816208 - RNA, 14 nt, Human
aguaagaagacaug

SEQ ID NO: 3816209 - RNA, 16 nt, Human
aguaagaccggaagcu

SEQ ID NO: 3816210 - RNA, 11 nt, Human
aguaagagacu

SEQ ID NO: 3816211 - RNA, 19 nt, Human
aguaagagcuggugucuga

SEQ ID NO: 3816212 - RNA, 20 nt, Human
aguaagaucacuguuuagau

SEQ ID NO: 3816213 - RNA, 21 nt, Human
aguaagaucacuguuuagauu

SEQ ID NO: 3816214 - RNA, 20 nt, Human
aguaagccgugauuuucauu

SEQ ID NO: 3816215 - RNA, 21 nt, Human
aguaagcggcucaagcccagg

SEQ ID NO: 3816216 - RNA, 18 nt, Human
aguaaggaaugauauugc

SEQ ID NO: 3816217 - RNA, 23 nt, Human
aguaaggaauuuuauuuuuuucu

SEQ ID NO: 3816218 - RNA, 15 nt, Human
aguaagggaagcaga

SEQ ID NO: 3816219 - RNA, 22 nt, Human
aguaagggcacugacggacuca

SEQ ID NO: 3816220 - RNA, 14 nt, Human
aguaaggugcaguu

SEQ ID NO: 3816221 - RNA, 19 nt, Human
aguaaggugcuuggaguuu

SEQ ID NO: 3816222 - RNA, 19 nt, Human
aguaaguaccacucaggcc

SEQ ID NO: 3816223 - RNA, 19 nt, Human
aguaaguuaauguauauaa

SEQ ID NO: 3816224 - RNA, 13 nt, Human
aguaauaaaacau

SEQ ID NO: 3816225 - RNA, 15 nt, Human
aguaauaaaauucaa

SEQ ID NO: 3816226 - RNA, 16 nt, Human
aguaauaaacuguguu

SEQ ID NO: 3816227 - RNA, 17 nt, Human
aguaauaaacuguguuu

SEQ ID NO: 3816228 - RNA, 16 nt, Human
aguaauaaaugaaugu

SEQ ID NO: 3816229 - RNA, 21 nt, Human
aguaauaccucuaauaguaua

SEQ ID NO: 3816230 - RNA, 22 nt, Human
aguaauaccucuaauaguauaa

SEQ ID NO: 3816231 - RNA, 11 nt, Human
aguaauauaau

SEQ ID NO: 3816232 - RNA, 20 nt, Human
aguaauauaauacacaaaau

SEQ ID NO: 3816233 - RNA, 16 nt, Human
aguaauauauuuaaag

SEQ ID NO: 3816234 - RNA, 13 nt, Human
aguaauauuuauu

SEQ ID NO: 3816235 - RNA, 19 nt, Human
aguaauauuuauuaaauuu

SEQ ID NO: 3816236 - RNA, 22 nt, Human
aguaauauuuauuaaauuuuuu

SEQ ID NO: 3816237 - RNA, 14 nt, Human
aguaauccaccugc

SEQ ID NO: 3816238 - RNA, 19 nt, Human
aguaaucugaucguucuuu

SEQ ID NO: 3816239 - RNA, 23 nt, Human
aguaaucugcauuauuggaauau

SEQ ID NO: 3816240 - RNA, 14 nt, Human
aguaaucuguacau

SEQ ID NO: 3816241 - RNA, 18 nt, Human
aguaaucuguacauuuug

SEQ ID NO: 3816242 - RNA, 21 nt, Human
aguaaucuguacauuuuguug

SEQ ID NO: 3816243 - RNA, 12 nt, Human
aguaaugaauuu

SEQ ID NO: 3816244 - RNA, 20 nt, Human
aguaaugcuacgugugauuu

SEQ ID NO: 3816245 - RNA, 21 nt, Human
aguaaugcuacgugugauuuu

SEQ ID NO: 3816246 - RNA, 21 nt, Human
aguaauggguuucauauuucu

SEQ ID NO: 3816247 - RNA, 18 nt, Human
aguaaugguguagaacac

SEQ ID NO: 3816248 - RNA, 23 nt, Human
aguaaugucauaaagugagaaaa

SEQ ID NO: 3816249 - RNA, 23 nt, Human
aguaauguggaagaaaaugguuu

SEQ ID NO: 3816250 - RNA, 20 nt, Human
aguaauuaucgggaacagug

SEQ ID NO: 3816251 - RNA, 15 nt, Human
aguaauuaugcacua

SEQ ID NO: 3816252 - RNA, 19 nt, Human
aguaauuaugcacuaaaua

SEQ ID NO: 3816253 - RNA, 18 nt, Human
aguaauugcauuugcuuu

SEQ ID NO: 3816254 - RNA, 22 nt, Human
aguaauugcauuugcuuuugua

SEQ ID NO: 3816255 - RNA, 23 nt, Human
aguaauugguuaucaugggaaag

SEQ ID NO: 3816256 - RNA, 21 nt, Human
aguaauuguguuuacauuuua

SEQ ID NO: 3816257 - RNA, 16 nt, Human
aguaauuguuccagag

SEQ ID NO: 3816258 - RNA, 13 nt, Human
aguaauuuauugu

SEQ ID NO: 3816259 - RNA, 22 nt, Human
aguaauuuauuguuuuuccuug

SEQ ID NO: 3816260 - RNA, 23 nt, Human
aguaauuuauuguuuuuccuugu

SEQ ID NO: 3816261 - RNA, 21 nt, Human
agggugucugcccccuccuga

SEQ ID NO: 3816262 - RNA, 15 nt, Human
agggugugcccucac

SEQ ID NO: 3816263 - RNA, 18 nt, Human
aggguguggcccugccau

SEQ ID NO: 3816264 - RNA, 22 nt, Human
aggguguggcccugccaucuuc

SEQ ID NO: 3816265 - RNA, 22 nt, Human
aggguguggggccaugccuccu

SEQ ID NO: 3816266 - RNA, 12 nt, Human
agggugugugcu

SEQ ID NO: 3816267 - RNA, 13 nt, Human
aggguuaagaaaa

SEQ ID NO: 3816268 - RNA, 16 nt, Human
aggguuaaggccugaa

SEQ ID NO: 3816269 - RNA, 13 nt, Human
aggguuagggagg

SEQ ID NO: 3816270 - RNA, 15 nt, Human
aggguuagggagggg

SEQ ID NO: 3816271 - RNA, 17 nt, Human
aggguucccccagcccu

SEQ ID NO: 3816272 - RNA, 19 nt, Human
aggguucccccagcccugu

SEQ ID NO: 3816273 - RNA, 17 nt, Human
aggguucuccucucccc

SEQ ID NO: 3816274 - RNA, 20 nt, Human
aggguucuccucuccccucu

SEQ ID NO: 3816275 - RNA, 15 nt, Human
aggguugauuaaggc

SEQ ID NO: 3816276 - RNA, 15 nt, Human
aggguugcuggagcc

SEQ ID NO: 3816277 - RNA, 14 nt, Human
aggguuggagcagu

SEQ ID NO: 3816278 - RNA, 17 nt, Human
aggguuggcaccuuccc

SEQ ID NO: 3816279 - RNA, 17 nt, Human
aggguugggcugguguc

SEQ ID NO: 3816280 - RNA, 17 nt, Human
aggguuggggaggggcg

SEQ ID NO: 3816281 - RNA, 20 nt, Human
aggguugguccucuugccuc

SEQ ID NO: 3816282 - RNA, 22 nt, Human
aggguuuaauccccaguaaaau

SEQ ID NO: 3816283 - RNA, 22 nt, Human
aggguuucccuacugaagcccu

SEQ ID NO: 3816284 - RNA, 17 nt, Human
aggguuucgagaagcug

SEQ ID NO: 3816285 - RNA, 22 nt, Human
aggguuugagagagcagccagg

SEQ ID NO: 3816286 - RNA, 15 nt, Human
aggguuugugacagg

SEQ ID NO: 3816287 - RNA, 16 nt, Human
aggguuuuaacuuugu

SEQ ID NO: 3816288 - RNA, 16 nt, Human
aggguuuuaauguaga

SEQ ID NO: 3816289 - RNA, 17 nt, Human
aggguuuuaucucuguc

SEQ ID NO: 3816290 - RNA, 18 nt, Human
aggguuuuccacccugga

SEQ ID NO: 3816291 - RNA, 12 nt, Human
agguaaaaaguu

SEQ ID NO: 3816292 - RNA, 13 nt, Human
agguaaaacaaaa

SEQ ID NO: 3816293 - RNA, 17 nt, Human
agguaaaagugugagca

SEQ ID NO: 3816294 - RNA, 14 nt, Human
agguaaaaugccau

SEQ ID NO: 3816295 - RNA, 15 nt, Human
agguaaaaugccaug

SEQ ID NO: 3816296 - RNA, 17 nt, Human
agguaaaauguauuuuu

SEQ ID NO: 3816297 - RNA, 19 nt, Human
agguaaaauguauuuuucu

SEQ ID NO: 3816298 - RNA, 13 nt, Human
agguaaaauucua

SEQ ID NO: 3816299 - RNA, 16 nt, Human
agguaaaauucuaaau

SEQ ID NO: 3816300 - RNA, 13 nt, Human
agguaaacaguuc

SEQ ID NO: 3816301 - RNA, 19 nt, Human
agguaaagggcaaauaaug

SEQ ID NO: 3816302 - RNA, 18 nt, Human
agguaaaucagacuauga

SEQ ID NO: 3816303 - RNA, 15 nt, Human
agguaacagaacagc

SEQ ID NO: 3816304 - RNA, 22 nt, Human
agguaacagaacagcuucaggu

SEQ ID NO: 3816305 - RNA, 16 nt, Human
agguaacaggcagaua

SEQ ID NO: 3816306 - RNA, 18 nt, Human
agguaacuaacugcauac

SEQ ID NO: 3816307 - RNA, 22 nt, Human
agguaagaaguuuuaaaaagcc

SEQ ID NO: 3816308 - RNA, 18 nt, Human
agguaauauaaaaagcuu

SEQ ID NO: 3816309 - RNA, 21 nt, Human
agguaauccaagauauuuuaa

SEQ ID NO: 3816310 - RNA, 18 nt, Human
agguaaucgaccugccuc

SEQ ID NO: 3816311 - RNA, 17 nt, Human
agguaaugagggacugg

SEQ ID NO: 3816312 - RNA, 16 nt, Human
agguaaugugaauaaa

SEQ ID NO: 3816313 - RNA, 16 nt, Human
agguaauuucuugugc

SEQ ID NO: 3816314 - RNA, 16 nt, Human
agguacacagcucuag

SEQ ID NO: 3816315 - RNA, 17 nt, Human
agguacacuugugaaua

SEQ ID NO: 3816316 - RNA, 11 nt, Human
agguacagggu

SEQ ID NO: 3816317 - RNA, 19 nt, Human
agguacaggguuuuuaccu

SEQ ID NO: 3816318 - RNA, 13 nt, Human
agguaccagcugc

SEQ ID NO: 3816319 - RNA, 12 nt, Human
agguacccuggg

SEQ ID NO: 3816320 - RNA, 13 nt, Human
agguacccugggu

SEQ ID NO: 3816321 - RNA, 20 nt, Human
agguacccuggguguccccg

SEQ ID NO: 3816322 - RNA, 21 nt, Human
agguaccuugaccuuuguaca

SEQ ID NO: 3816323 - RNA, 13 nt, Human
agguacucuccug

SEQ ID NO: 3816324 - RNA, 23 nt, Human
agguacuucaaauccuugaagau

SEQ ID NO: 3816325 - RNA, 11 nt, Human
agguacuuuug

SEQ ID NO: 3816326 - RNA, 16 nt, Human
agguacuuuuggaauc

SEQ ID NO: 3816327 - RNA, 17 nt, Human
agguacuuuuggaaucu

SEQ ID NO: 3816328 - RNA, 14 nt, Human
agguagaaaaaggg

SEQ ID NO: 3816329 - RNA, 16 nt, Human
agguagaaaaaggguc

SEQ ID NO: 3816330 - RNA, 18 nt, Human
agguagaaaaagggucaa

SEQ ID NO: 3816331 - RNA, 12 nt, Human
agguagaaacuu

SEQ ID NO: 3816332 - RNA, 15 nt, Human
agguagaacgccagg

SEQ ID NO: 3816333 - RNA, 17 nt, Human
agguagaaugaccuugu

SEQ ID NO: 3816334 - RNA, 18 nt, Human
agguagaaugaccuugua

SEQ ID NO: 3816335 - RNA, 14 nt, Human
agguagaauguaaa

SEQ ID NO: 3816336 - RNA, 21 nt, Human
agguagaguuugaaggaggug

SEQ ID NO: 3816337 - RNA, 23 nt, Human
agguagaguuugaaggaggugag

SEQ ID NO: 3816338 - RNA, 18 nt, Human
agguagcccccucuuccc

SEQ ID NO: 3816339 - RNA, 23 nt, Human
agguagcugcagauaaguggccu

SEQ ID NO: 3816340 - RNA, 14 nt, Human
agguagcugccccu

SEQ ID NO: 3816341 - RNA, 23 nt, Human
agguagcuuugagguggaagagg

SEQ ID NO: 3816342 - RNA, 20 nt, Human
agguaggaauauuauauuug

SEQ ID NO: 3816343 - RNA, 19 nt, Human
agguaggagaauugcuuga

SEQ ID NO: 3816344 - RNA, 17 nt, Human
agguaguucaagaaaug

SEQ ID NO: 3816345 - RNA, 19 nt, Human
agguaguucaagaaaugaa

SEQ ID NO: 3816346 - RNA, 19 nt, Human
agguauaaguggugugugu

SEQ ID NO: 3816347 - RNA, 20 nt, Human
agguauaaguggugugugua

SEQ ID NO: 3816348 - RNA, 15 nt, Human
agguauaauugugug

SEQ ID NO: 3816349 - RNA, 19 nt, Human
agguauaucauucuaaaga

SEQ ID NO: 3816350 - RNA, 19 nt, Human
agguauaucuagguuuaug

SEQ ID NO: 3816351 - RNA, 21 nt, Human
agguaucauuuucugcauuua

SEQ ID NO: 3816352 - RNA, 13 nt, Human
agguaucuccagg

SEQ ID NO: 3816353 - RNA, 13 nt, Human
agguaugaauaag

SEQ ID NO: 3816354 - RNA, 23 nt, Human
agguaugaccuucuaggaagcuc

SEQ ID NO: 3816355 - RNA, 22 nt, Human
agguauggaaggguuuguggcu

SEQ ID NO: 3816356 - RNA, 19 nt, Human
aguagaacagauaaucagu

SEQ ID NO: 3816357 - RNA, 18 nt, Human
aguagaacuuuguauagu

SEQ ID NO: 3816358 - RNA, 21 nt, Human
aguagaacuuuguauaguuau

SEQ ID NO: 3816359 - RNA, 16 nt, Human
aguagaaggucggagg

SEQ ID NO: 3816360 - RNA, 19 nt, Human
aguagaagucucuuccagu

SEQ ID NO: 3816361 - RNA, 14 nt, Human
aguagaaucucagu

SEQ ID NO: 3816362 - RNA, 21 nt, Human
aguagaaucucaguugauuuu

SEQ ID NO: 3816363 - RNA, 13 nt, Human
aguagaauguagu

SEQ ID NO: 3816364 - RNA, 22 nt, Human
aguagacauuuuaacaagaaga

SEQ ID NO: 3816365 - RNA, 13 nt, Human
aguagaccccugg

SEQ ID NO: 3816366 - RNA, 15 nt, Human
aguagacuacuguuc

SEQ ID NO: 3816367 - RNA, 13 nt, Human
aguagagacaggg

SEQ ID NO: 3816368 - RNA, 12 nt, Human
aguagagccagc

SEQ ID NO: 3816369 - RNA, 14 nt, Human
aguagagguacacu

SEQ ID NO: 3816370 - RNA, 21 nt, Human
aguagagguacacuugugaau

SEQ ID NO: 3816371 - RNA, 22 nt, Human
aguagagguacacuugugaaua

SEQ ID NO: 3816372 - RNA, 17 nt, Human
aguagagguauaauugu

SEQ ID NO: 3816373 - RNA, 14 nt, Human
aguagagucaucuc

SEQ ID NO: 3816374 - RNA, 23 nt, Human
aguagagucaucuccaucagcug

SEQ ID NO: 3816375 - RNA, 14 nt, Human
aguagauaagcaga

SEQ ID NO: 3816376 - RNA, 18 nt, Human
aguagauaauuucagggu

SEQ ID NO: 3816377 - RNA, 19 nt, Human
aguagauaauuucagggug

SEQ ID NO: 3816378 - RNA, 15 nt, Human
aguagauauuacuuu

SEQ ID NO: 3816379 - RNA, 17 nt, Human
aguagauauuacuuuau

SEQ ID NO: 3816380 - RNA, 15 nt, Human
aguagaucuauauua

SEQ ID NO: 3816381 - RNA, 16 nt, Human
aguagauggugaaauu

SEQ ID NO: 3816382 - RNA, 21 nt, Human
aguagauggugaaauuuauua

SEQ ID NO: 3816383 - RNA, 18 nt, Human
aguagauguggccuuuga

SEQ ID NO: 3816384 - RNA, 17 nt, Human
aguagauuaaaaauuau

SEQ ID NO: 3816385 - RNA, 18 nt, Human
aguagauuaaaaauuaua

SEQ ID NO: 3816386 - RNA, 19 nt, Human
aguagauuaaaaauuauag

SEQ ID NO: 3816387 - RNA, 13 nt, Human
aguagauuucaug

SEQ ID NO: 3816388 - RNA, 20 nt, Human
aguagcaaaugagacagcag

SEQ ID NO: 3816389 - RNA, 16 nt, Human
aguagcaaguucuaga

SEQ ID NO: 3816390 - RNA, 14 nt, Human
aguagcagugauug

SEQ ID NO: 3816391 - RNA, 22 nt, Human
aguagcauuuacugugucuuug

SEQ ID NO: 3816392 - RNA, 23 nt, Human
aguagccccaacccaaaccugga

SEQ ID NO: 3816393 - RNA, 16 nt, Human
aguagccgagagccug

SEQ ID NO: 3816394 - RNA, 22 nt, Human
aguagccucuccuguauuuaac

SEQ ID NO: 3816395 - RNA, 21 nt, Human
aguagcgcuauaguuacuguc

SEQ ID NO: 3816396 - RNA, 19 nt, Human
aguagcguuuuuuaaaugu

SEQ ID NO: 3816397 - RNA, 22 nt, Human
aguagcguuuuuuaaauguaua

SEQ ID NO: 3816398 - RNA, 14 nt, Human
aguagcucugccuu

SEQ ID NO: 3816399 - RNA, 13 nt, Human
aguagcugagcuc

SEQ ID NO: 3816400 - RNA, 17 nt, Human
aguagcuggauuacagg

SEQ ID NO: 3816401 - RNA, 13 nt, Human
aguagcugggacu

SEQ ID NO: 3816402 - RNA, 22 nt, Human
aguagcugggacuacaggcacc

SEQ ID NO: 3816403 - RNA, 18 nt, Human
aguagcugggauuuuaaa

SEQ ID NO: 3816404 - RNA, 21 nt, Human
aguagcugggauuuuaaacua

SEQ ID NO: 3816405 - RNA, 22 nt, Human
aguagcugggauuuuaaacuag

SEQ ID NO: 3816406 - RNA, 14 nt, Human
aguagaauugcauu

SEQ ID NO: 3816407 - RNA, 15 nt, Human
aguagaauugcauug

SEQ ID NO: 3816408 - RNA, 19 nt, Human
aguagacaaucauuguuuu

SEQ ID NO: 3816409 - RNA, 18 nt, Human
aguagacacauuuaagga

SEQ ID NO: 3816410 - RNA, 23 nt, Human
aguagacauuuuaacaagaagau

SEQ ID NO: 3816411 - RNA, 20 nt, Human
aguagaccuuguuacuucug

SEQ ID NO: 3816412 - RNA, 23 nt, Human
aguagaccuuguuacuucugagg

SEQ ID NO: 3816413 - RNA, 14 nt, Human
aguagacuccaaca

SEQ ID NO: 3816414 - RNA, 19 nt, Human
aguagagauggggaaagaa

SEQ ID NO: 3816415 - RNA, 15 nt, Human
aguagagccagcuug

SEQ ID NO: 3816416 - RNA, 20 nt, Human
aguagagguacacuugugaa

SEQ ID NO: 3816417 - RNA, 19 nt, Human
aguagauaggccaugggca

SEQ ID NO: 3816418 - RNA, 23 nt, Human
aguagaucuauauuagaucaaau

SEQ ID NO: 3816419 - RNA, 21 nt, Human
aguagaugcauuuggguccag

SEQ ID NO: 3816420 - RNA, 21 nt, Human
aguagaugcgcagccccaucu

SEQ ID NO: 3816421 - RNA, 17 nt, Human
aguagauggugaaauuu

SEQ ID NO: 3816422 - RNA, 18 nt, Human
aguagauuagaucuuuua

SEQ ID NO: 3816423 - RNA, 15 nt, Human
aguagauuuuccaaa

SEQ ID NO: 3816424 - RNA, 13 nt, Human
aguagauuuucuu

SEQ ID NO: 3816425 - RNA, 21 nt, Human
aguagauuuucuuuaaaagaa

SEQ ID NO: 3816426 - RNA, 20 nt, Human
aguagcaaguucuagagaag

SEQ ID NO: 3816427 - RNA, 23 nt, Human
aguagcacaaguuauuuaaaucu

SEQ ID NO: 3816428 - RNA, 15 nt, Human
aguagcacaggcuga

SEQ ID NO: 3816429 - RNA, 16 nt, Human
aguagcacaggcugag

SEQ ID NO: 3816430 - RNA, 14 nt, Human
aguagcauuuacug

SEQ ID NO: 3816431 - RNA, 13 nt, Human
aguagcauuucau

SEQ ID NO: 3816432 - RNA, 22 nt, Human
aguagccaggguguggcccugc

SEQ ID NO: 3816433 - RNA, 22 nt, Human
aguagccccaacccaaaccugg

SEQ ID NO: 3816434 - RNA, 16 nt, Human
aguagcccuuucugug

SEQ ID NO: 3816435 - RNA, 19 nt, Human
aguagccgagagccugcuc

SEQ ID NO: 3816436 - RNA, 19 nt, Human
aguagcgguaccaaugcag

SEQ ID NO: 3816437 - RNA, 18 nt, Human
aguagcguuuuuuaaaug

SEQ ID NO: 3816438 - RNA, 22 nt, Human
aguagcucugccuuugcucugg

SEQ ID NO: 3816439 - RNA, 16 nt, Human
aguagcugaaaugcaa

SEQ ID NO: 3816440 - RNA, 11 nt, Human
aguagcugagc

SEQ ID NO: 3816441 - RNA, 23 nt, Human
aguagcugagcucacaaggcagc

SEQ ID NO: 3816442 - RNA, 14 nt, Human
aguagcugggacua

SEQ ID NO: 3816443 - RNA, 16 nt, Human
aguagcuugcucccug

SEQ ID NO: 3816444 - RNA, 23 nt, Human
aguagcuugcucccuguguccac

SEQ ID NO: 3816445 - RNA, 15 nt, Human
aguaggcaagauggc

SEQ ID NO: 3816446 - RNA, 22 nt, Human
aguaggcauuuuuaccaucacu

SEQ ID NO: 3816447 - RNA, 23 nt, Human
aguaggggaggagcacaguuugu

SEQ ID NO: 3816448 - RNA, 20 nt, Human
aguagggguaccacugaauc

SEQ ID NO: 3816449 - RNA, 18 nt, Human
aguaguaccaaaugcuuu

SEQ ID NO: 3816450 - RNA, 23 nt, Human
aguaguacuucuucuguaauauu

SEQ ID NO: 3816451 - RNA, 13 nt, Human
aguagucagacug

SEQ ID NO: 3816452 - RNA, 21 nt, Human
aguagucccugcacagugacu

SEQ ID NO: 3816453 - RNA, 14 nt, Human
aguaguccugugaa

SEQ ID NO: 3816454 - RNA, 21 nt, Human
aguagucucugugaggccuua

SEQ ID NO: 3816455 - RNA, 18 nt, Human
aguagugaagacuccaga

SEQ ID NO: 3816456 - RNA, 18 nt, Human
aguagugccuuuacuuca

SEQ ID NO: 3816457 - RNA, 17 nt, Human
aguaguguuacauguau

SEQ ID NO: 3816458 - RNA, 23 nt, Human
aguaguuaaaaaaaaaaaaagga

SEQ ID NO: 3816459 - RNA, 14 nt, Human
aguaguuaauucug

SEQ ID NO: 3816460 - RNA, 18 nt, Human
aguaguuauauaauuguu

SEQ ID NO: 3816461 - RNA, 17 nt, Human
aguaguuaucauguuag

SEQ ID NO: 3816462 - RNA, 13 nt, Human
aguaguucuguau

SEQ ID NO: 3816463 - RNA, 21 nt, Human
aguaguucuguauuugaaagu

SEQ ID NO: 3816464 - RNA, 17 nt, Human
aguaguuuguauaacuu

SEQ ID NO: 3816465 - RNA, 21 nt, Human
aguaguuuuuacagcuguguu

SEQ ID NO: 3816466 - RNA, 18 nt, Human
aguauaaaugguugucug

SEQ ID NO: 3816467 - RNA, 17 nt, Human
aguauaaauuuguguaa

SEQ ID NO: 3816468 - RNA, 18 nt, Human
aguauaauguuuauuaaa

SEQ ID NO: 3816469 - RNA, 15 nt, Human
aguauacaaacauuu

SEQ ID NO: 3816470 - RNA, 15 nt, Human
aguauacaagauaag

SEQ ID NO: 3816471 - RNA, 16 nt, Human
aguauacaauauauaa

SEQ ID NO: 3816472 - RNA, 19 nt, Human
aguauacaauauauaaaaa

SEQ ID NO: 3816473 - RNA, 15 nt, Human
aguauaccugauuuu

SEQ ID NO: 3816474 - RNA, 16 nt, Human
aguauagagagaaguu

SEQ ID NO: 3816475 - RNA, 17 nt, Human
aguauaucauguaaaga

SEQ ID NO: 3816476 - RNA, 15 nt, Human
aguauaucucaguuu

SEQ ID NO: 3816477 - RNA, 16 nt, Human
aguauaucuggacaag

SEQ ID NO: 3816478 - RNA, 17 nt, Human
aguauauuaaaaauggu

SEQ ID NO: 3816479 - RNA, 19 nt, Human
aguauauuaaaaaugguaa

SEQ ID NO: 3816480 - RNA, 21 nt, Human
aguauauugauaaccuugaaa

SEQ ID NO: 3816481 - RNA, 22 nt, Human
aguauauugauccagaaagaaa

SEQ ID NO: 3816482 - RNA, 14 nt, Human
aguauauuguugaa

SEQ ID NO: 3816483 - RNA, 20 nt, Human
aguauauuguugaagagaca

SEQ ID NO: 3816484 - RNA, 15 nt, Human
aguauauuuaaacuc

SEQ ID NO: 3816485 - RNA, 11 nt, Human
aguauauuuau

SEQ ID NO: 3816486 - RNA, 16 nt, Human
aguauauuuauauaau

SEQ ID NO: 3816487 - RNA, 20 nt, Human
aguauauuuauauaauuaug

SEQ ID NO: 3816488 - RNA, 22 nt, Human
aguauauuucuucguucuuuuu

SEQ ID NO: 3816489 - RNA, 13 nt, Human
aguauauuuucuu

SEQ ID NO: 3816490 - RNA, 18 nt, Human
aguauauuuucuuuuccu

SEQ ID NO: 3816491 - RNA, 19 nt, Human
aguauauuuucuuuuccuc

SEQ ID NO: 3816492 - RNA, 15 nt, Human
aguaucaaauauuag

SEQ ID NO: 3816493 - RNA, 21 nt, Human
aguaucaaauauuagauguga

SEQ ID NO: 3816494 - RNA, 22 nt, Human
aguaucaaauauuagaugugau

SEQ ID NO: 3816495 - RNA, 17 nt, Human
aguaucacugucuuucc

SEQ ID NO: 3816496 - RNA, 15 nt, Human
aguaucaggucuccc

SEQ ID NO: 3816497 - RNA, 13 nt, Human
aguaucaguguuu

SEQ ID NO: 3816498 - RNA, 18 nt, Human
aguaucaguguuuuaaau

SEQ ID NO: 3816499 - RNA, 22 nt, Human
aguaucaguguuuuaaauucug

SEQ ID NO: 3816500 - RNA, 12 nt, Human
aguaucccacau

SEQ ID NO: 3816501 - RNA, 14 nt, Human
aguauccuccaggu

SEQ ID NO: 3816502 - RNA, 16 nt, Human
aguaucggcacuguac

SEQ ID NO: 3816503 - RNA, 17 nt, Human
aguaucuauauaugugu

SEQ ID NO: 3816504 - RNA, 18 nt, Human
aguaucuauauaugugua

SEQ ID NO: 3816505 - RNA, 22 nt, Human
aguaucuauauauguguaugua

SEQ ID NO: 3816506 - RNA, 10 nt, Human
aguaucucau

SEQ ID NO: 3816507 - RNA, 21 nt, Human
aguaucucaucaacaaagaaa

SEQ ID NO: 3816508 - RNA, 18 nt, Human
aguaucuguaucucucuc

SEQ ID NO: 3816509 - RNA, 14 nt, Human
aguaucugugaacu

SEQ ID NO: 3816510 - RNA, 11 nt, Human
aguaucuugaa

SEQ ID NO: 3816511 - RNA, 16 nt, Human
aguaugaaauuauaua

SEQ ID NO: 3816512 - RNA, 16 nt, Human
aguaugaauaaagaca

SEQ ID NO: 3816513 - RNA, 18 nt, Human
aguaugaaucuaugccaa

SEQ ID NO: 3816514 - RNA, 22 nt, Human
aguaugacgcugauacauaacu

SEQ ID NO: 3816515 - RNA, 21 nt, Human
aguaugaggcauuuguuugaa

SEQ ID NO: 3816516 - RNA, 18 nt, Human
aguaugcacuauauacau

SEQ ID NO: 3816517 - RNA, 19 nt, Human
aguauggagcucagagagg

SEQ ID NO: 3816518 - RNA, 15 nt, Human
aguauggaugggugg

SEQ ID NO: 3816519 - RNA, 17 nt, Human
aguaugggacuggccuc

SEQ ID NO: 3816520 - RNA, 19 nt, Human
aguaugguacauuuuucaa

SEQ ID NO: 3816521 - RNA, 22 nt, Human
aguauggugagagaagccugug

SEQ ID NO: 3816522 - RNA, 14 nt, Human
aguaugguggcugg

SEQ ID NO: 3816523 - RNA, 16 nt, Human
aguauguaaaguaugu

SEQ ID NO: 3816524 - RNA, 21 nt, Human
aguauguaaaguauguaaaca

SEQ ID NO: 3816525 - RNA, 18 nt, Human
aguauguauauuaaaaaa

SEQ ID NO: 3816526 - RNA, 20 nt, Human
aguauguauauuaaaaaaga

SEQ ID NO: 3816527 - RNA, 22 nt, Human
aguauguauauuaaaaaagaga

SEQ ID NO: 3816528 - RNA, 23 nt, Human
aguauguauauuaaaaaagagac

SEQ ID NO: 3816529 - RNA, 13 nt, Human
aguauguauuauu

SEQ ID NO: 3816530 - RNA, 21 nt, Human
aguaugugccaggaaacucuu

SEQ ID NO: 3816531 - RNA, 15 nt, Human
aguauguggaagugu

SEQ ID NO: 3816532 - RNA, 21 nt, Human
aguaugugguuuuguaauuug

SEQ ID NO: 3816533 - RNA, 18 nt, Human
aguauguguuugugugug

SEQ ID NO: 3816534 - RNA, 19 nt, Human
aguauguguuugugugugu

SEQ ID NO: 3816535 - RNA, 19 nt, Human
aguauguuaagcucuuuau

SEQ ID NO: 3816536 - RNA, 18 nt, Human
aguauguuagugcaaauu

SEQ ID NO: 3816537 - RNA, 21 nt, Human
aguauguuagugcaaauuguc

SEQ ID NO: 3816538 - RNA, 14 nt, Human
aguauguugucaaa

SEQ ID NO: 3816539 - RNA, 15 nt, Human
aguauguugucaaag

SEQ ID NO: 3816540 - RNA, 18 nt, Human
aguauguugucaaagaga

SEQ ID NO: 3816541 - RNA, 14 nt, Human
aguauguuuuacac

SEQ ID NO: 3816542 - RNA, 19 nt, Human
aguauguuuuagcaugugu

SEQ ID NO: 3816543 - RNA, 12 nt, Human
aguauuaagcau

SEQ ID NO: 3816544 - RNA, 14 nt, Human
aguauuaagcauau

SEQ ID NO: 3816545 - RNA, 15 nt, Human
aguauuacuucugcu

SEQ ID NO: 3816546 - RNA, 18 nt, Human
aguauuacuucugcuaca

SEQ ID NO: 3816547 - RNA, 13 nt, Human
aguauuauaaaca

SEQ ID NO: 3816548 - RNA, 19 nt, Human
aguauuauaaauuauguuu

SEQ ID NO: 3816549 - RNA, 20 nt, Human
aguauuauaggccaaacugg

SEQ ID NO: 3816550 - RNA, 22 nt, Human
agugagaugagggaugggccug

SEQ ID NO: 3816551 - RNA, 23 nt, Human
agugagaugagggaugggccugg

SEQ ID NO: 3816552 - RNA, 12 nt, Human
agugagaugcau

SEQ ID NO: 3816553 - RNA, 18 nt, Human
agugagcaaaccugcccc

SEQ ID NO: 3816554 - RNA, 16 nt, Human
agugagcacucccaag

SEQ ID NO: 3816555 - RNA, 19 nt, Human
agugagcagccuggagccc

SEQ ID NO: 3816556 - RNA, 19 nt, Human
agugagcccagauugugcc

SEQ ID NO: 3816557 - RNA, 21 nt, Human
agugagcccagauugugccac

SEQ ID NO: 3816558 - RNA, 16 nt, Human
agugagccgagauugu

SEQ ID NO: 3816559 - RNA, 19 nt, Human
agugagccgcaucuucucc

SEQ ID NO: 3816560 - RNA, 20 nt, Human
agugagccgcaucuucucca

SEQ ID NO: 3816561 - RNA, 24 nt, Human
agugagccgcaucuucuccaucug

SEQ ID NO: 3816562 - RNA, 22 nt, Human
agugagcggugcuguccucagg

SEQ ID NO: 3816563 - RNA, 20 nt, Human
agugaggaaaucaaagugcu

SEQ ID NO: 3816564 - RNA, 20 nt, Human
agugaggaaggcaggaagag

SEQ ID NO: 3816565 - RNA, 17 nt, Human
agugaggaauggcagug

SEQ ID NO: 3816566 - RNA, 19 nt, Human
agccauguuuaagauuuaa

SEQ ID NO: 3816567 - RNA, 13 nt, Human
agccauguuuauu

SEQ ID NO: 3816568 - RNA, 16 nt, Human
agccauguuuauuaca

SEQ ID NO: 3816569 - RNA, 17 nt, Human
agccauguuuauuacag

SEQ ID NO: 3816570 - RNA, 21 nt, Human
agccauuaaaugaauauuuug

SEQ ID NO: 3816571 - RNA, 17 nt, Human
agccauucugacucaua

SEQ ID NO: 3816572 - RNA, 20 nt, Human
agccauugcacccagcccag

SEQ ID NO: 3816573 - RNA, 12 nt, Human
agccauugucuu

SEQ ID NO: 3816574 - RNA, 12 nt, Human
agccauuugaga

SEQ ID NO: 3816575 - RNA, 14 nt, Human
agccauuuguccca

SEQ ID NO: 3816576 - RNA, 22 nt, Human
agccauuuguuggggcaguggu

SEQ ID NO: 3816577 - RNA, 17 nt, Human
agccauuuugugaaugg

SEQ ID NO: 3816578 - RNA, 19 nt, Human
agccauuuuucaaagcaau

SEQ ID NO: 3816579 - RNA, 21 nt, Human
agcccaaaggggacaggccuc

SEQ ID NO: 3816580 - RNA, 15 nt, Human
agcccaaccucuucc

SEQ ID NO: 3816581 - RNA, 16 nt, Human
agcccaagcuucccuc

SEQ ID NO: 3816582 - RNA, 16 nt, Human
agcccaagggaucugg

SEQ ID NO: 3816583 - RNA, 22 nt, Human
agcccaagggaucugguccuac

SEQ ID NO: 3816584 - RNA, 10 nt, Human
agcccaaguc

SEQ ID NO: 3816585 - RNA, 15 nt, Human
agcccaauauuauaa

SEQ ID NO: 3816586 - RNA, 20 nt, Human
agcccaauauuauaauuuuu

SEQ ID NO: 3816587 - RNA, 15 nt, Human
agcccacacuugaga

SEQ ID NO: 3816588 - RNA, 17 nt, Human
agcccacacuugagagg

SEQ ID NO: 3816589 - RNA, 23 nt, Human
agcccacagcacagcucccugcc

SEQ ID NO: 3816590 - RNA, 19 nt, Human
agcccacagguguccccag

SEQ ID NO: 3816591 - RNA, 16 nt, Human
agcccacaguauauuu

SEQ ID NO: 3816592 - RNA, 19 nt, Human
agcccacaguauauuuuau

SEQ ID NO: 3816593 - RNA, 20 nt, Human
agcccacaguauauuuuauu

SEQ ID NO: 3816594 - RNA, 15 nt, Human
agcccaccccucaac

SEQ ID NO: 3816595 - RNA, 13 nt, Human
agcccaccccucu

SEQ ID NO: 3816596 - RNA, 13 nt, Human
agcccacccuccu

SEQ ID NO: 3816597 - RNA, 19 nt, Human
agcccacgcccccacuggu

SEQ ID NO: 3816598 - RNA, 18 nt, Human
agcccacgcucacccccu

SEQ ID NO: 3816599 - RNA, 23 nt, Human
agcccacgcugacuacagggccg

SEQ ID NO: 3816600 - RNA, 21 nt, Human
agcccacggcuaagaggcugc

SEQ ID NO: 3816601 - RNA, 19 nt, Human
agcccacguccugucagug

SEQ ID NO: 3816602 - RNA, 20 nt, Human
agcccacuguccugggccug

SEQ ID NO: 3816603 - RNA, 22 nt, Human
agcccacuucugccauauucug

SEQ ID NO: 3816604 - RNA, 12 nt, Human
agcccagaagaa

SEQ ID NO: 3816605 - RNA, 12 nt, Human
agcccagacaaa

SEQ ID NO: 3816606 - RNA, 15 nt, Human
agcccagacacagaa

SEQ ID NO: 3816607 - RNA, 10 nt, Human
agcccagaga

SEQ ID NO: 3816608 - RNA, 15 nt, Human
agcccagagaacagc

SEQ ID NO: 3816609 - RNA, 22 nt, Human
agcccagagacauacuugaagg

SEQ ID NO: 3816610 - RNA, 14 nt, Human
agcccagagccugg

SEQ ID NO: 3816611 - RNA, 15 nt, Human
agcccagaggagggc

SEQ ID NO: 3816612 - RNA, 21 nt, Human
agcccagagggucugggggca

SEQ ID NO: 3816613 - RNA, 15 nt, Human
agcccagagguaaca

SEQ ID NO: 3816614 - RNA, 20 nt, Human
agcccagagguaacagaaca

SEQ ID NO: 3816615 - RNA, 16 nt, Human
agcccagaucagcucc

SEQ ID NO: 3816616 - RNA, 17 nt, Human
agcccagaucagcuccu

SEQ ID NO: 3816617 - RNA, 21 nt, Human
agcccagcacugcuugaggaa

SEQ ID NO: 3816618 - RNA, 15 nt, Human
agcccagcagggccu

SEQ ID NO: 3816619 - RNA, 20 nt, Human
agcccagcagggccucaaag

SEQ ID NO: 3816620 - RNA, 11 nt, Human
agcccagccac

SEQ ID NO: 3816621 - RNA, 15 nt, Human
agcccagccacggac

SEQ ID NO: 3816622 - RNA, 23 nt, Human
agcccagccauuaccauggagac

SEQ ID NO: 3816623 - RNA, 17 nt, Human
agcccagcccagcugcu

SEQ ID NO: 3816624 - RNA, 12 nt, Human
agcccagccccu

SEQ ID NO: 3816625 - RNA, 17 nt, Human
agcccagccccuacugc

SEQ ID NO: 3816626 - RNA, 13 nt, Human
agcccagcccucc

SEQ ID NO: 3816627 - RNA, 15 nt, Human
agcccagcccuguuc

SEQ ID NO: 3816628 - RNA, 16 nt, Human
agcccagcccuguucu

SEQ ID NO: 3816629 - RNA, 17 nt, Human
agcccagcccuguucug

SEQ ID NO: 3816630 - RNA, 12 nt, Human
agcccagcucca

SEQ ID NO: 3816631 - RNA, 17 nt, Human
agcccagcuccagggcc

SEQ ID NO: 3816632 - RNA, 14 nt, Human
agcccagcugcucu

SEQ ID NO: 3816633 - RNA, 16 nt, Human
agcccagcugcucugc

SEQ ID NO: 3816634 - RNA, 20 nt, Human
agcccagcugcucugcccag

SEQ ID NO: 3816635 - RNA, 21 nt, Human
agcccagcugcucugcccaga

SEQ ID NO: 3816636 - RNA, 13 nt, Human
agcccagcuggug

SEQ ID NO: 3816637 - RNA, 20 nt, Human
agcccagcuggugggaagcg

SEQ ID NO: 3816638 - RNA, 21 nt, Human
agcccagcuuggcccuuuccu

SEQ ID NO: 3816639 - RNA, 22 nt, Human
agcccaggaaaggcuccaggag

SEQ ID NO: 3816640 - RNA, 16 nt, Human
agcccaggagagagaa

SEQ ID NO: 3816641 - RNA, 18 nt, Human
agcccaggagagagaaag

SEQ ID NO: 3816642 - RNA, 22 nt, Human
agcccaggagagagaaagccag

SEQ ID NO: 3816643 - RNA, 12 nt, Human
agcccaggagcu

SEQ ID NO: 3816644 - RNA, 19 nt, Human
agcccaggagcuccccucc

SEQ ID NO: 3816645 - RNA, 22 nt, Human
agcccaggagggcauccauacc

SEQ ID NO: 3816646 - RNA, 21 nt, Human
agcccaggauacuggcacaga

SEQ ID NO: 3816647 - RNA, 18 nt, Human
agcccaggauauauuuua

SEQ ID NO: 3816648 - RNA, 13 nt, Human
agcccaggccagg

SEQ ID NO: 3816649 - RNA, 19 nt, Human
agcccaggccaggacucug

SEQ ID NO: 3816650 - RNA, 20 nt, Human
agcccaggccaggacucugc

SEQ ID NO: 3816651 - RNA, 22 nt, Human
agcccaggccaggacucugcag

SEQ ID NO: 3816652 - RNA, 23 nt, Human
agcccaggccaggacucugcagc

SEQ ID NO: 3816653 - RNA, 12 nt, Human
agcccaggccuc

SEQ ID NO: 3816654 - RNA, 21 nt, Human
agcccaggccuccuacagcuu

SEQ ID NO: 3816655 - RNA, 13 nt, Human
agcccaggcugga

SEQ ID NO: 3816656 - RNA, 13 nt, Human
agcccaggggccg

SEQ ID NO: 3816657 - RNA, 19 nt, Human
agcccaggguucccccagc

SEQ ID NO: 3816658 - RNA, 23 nt, Human
agcccagguccucugauacccag

SEQ ID NO: 3816659 - RNA, 17 nt, Human
agcccaggugccagccu

SEQ ID NO: 3816660 - RNA, 19 nt, Human
agcccauacucagccugcu

SEQ ID NO: 3816661 - RNA, 20 nt, Human
agcccauacucagccugcug

SEQ ID NO: 3816662 - RNA, 13 nt, Human
agcccaucaauua

SEQ ID NO: 3816663 - RNA, 19 nt, Human
agcccauccauaguaacug

SEQ ID NO: 3816664 - RNA, 17 nt, Human
agcccaucccugccugg

SEQ ID NO: 3816665 - RNA, 20 nt, Human
agcccaucccugccugguca

SEQ ID NO: 3816666 - RNA, 14 nt, Human
agcccauccugacc

SEQ ID NO: 3816667 - RNA, 15 nt, Human
agcccauccugacca

SEQ ID NO: 3816668 - RNA, 16 nt, Human
agcccauccugaccag

SEQ ID NO: 3816669 - RNA, 23 nt, Human
agcccauccugaccagcugcucc

SEQ ID NO: 3816670 - RNA, 16 nt, Human
agcccaugcccaccug

SEQ ID NO: 3816671 - RNA, 20 nt, Human
agcccaugcccaccugccca

SEQ ID NO: 3816672 - RNA, 17 nt, Human
agcccauggagauugac

SEQ ID NO: 3816673 - RNA, 18 nt, Human
agcccauggcacucuaug

SEQ ID NO: 3816674 - RNA, 16 nt, Human
agcccauggcccugug

SEQ ID NO: 3816675 - RNA, 19 nt, Human
agcccauguucugccccca

SEQ ID NO: 3816676 - RNA, 23 nt, Human
agcccauguucugcccccagccc

SEQ ID NO: 3816677 - RNA, 17 nt, Human
agcccauucauuccauu

SEQ ID NO: 3816678 - RNA, 20 nt, Human
agcccauucucucuccuguc

SEQ ID NO: 3816679 - RNA, 19 nt, Human
agcccauuguggccuaaga

SEQ ID NO: 3816680 - RNA, 13 nt, Human
agcccauuucaau

SEQ ID NO: 3816681 - RNA, 14 nt, Human
agcccauuucucca

SEQ ID NO: 3816682 - RNA, 15 nt, Human
agcccauuucuccag

SEQ ID NO: 3816683 - RNA, 22 nt, Human
agcccauuugggcagagaggcu

SEQ ID NO: 3816684 - RNA, 16 nt, Human
agccccaaaacucucc

SEQ ID NO: 3816685 - RNA, 20 nt, Human
agccccaacccaaaccugga

SEQ ID NO: 3816686 - RNA, 21 nt, Human
agccccaacccaaaccuggag

SEQ ID NO: 3816687 - RNA, 23 nt, Human
agccccaacccaaaccuggagau

SEQ ID NO: 3816688 - RNA, 18 nt, Human
agccccaagaaggcuggg

SEQ ID NO: 3816689 - RNA, 15 nt, Human
agccccaaguccuga

SEQ ID NO: 3816690 - RNA, 12 nt, Human
agccccacagcc

SEQ ID NO: 3816691 - RNA, 13 nt, Human
agccccacagccc

SEQ ID NO: 3816692 - RNA, 15 nt, Human
agccccacccaggag

SEQ ID NO: 3816693 - RNA, 22 nt, Human
agccccaccccagggcagccag

SEQ ID NO: 3816694 - RNA, 21 nt, Human
agugcccucucccacccucuu

SEQ ID NO: 3816695 - RNA, 23 nt, Human
agugcccucucccacccucuucc

SEQ ID NO: 3816696 - RNA, 15 nt, Human
agugcccucuccccu

SEQ ID NO: 3816697 - RNA, 20 nt, Human
agugcccuuccugcugcgca

SEQ ID NO: 3816698 - RNA, 17 nt, Human
agugccgcaaauuguac

SEQ ID NO: 3816699 - RNA, 16 nt, Human
agugccgcaucucaca

SEQ ID NO: 3816700 - RNA, 23 nt, Human
agugccgcaucucacagcuaugc

SEQ ID NO: 3816701 - RNA, 16 nt, Human
agugccgccgccucgc

SEQ ID NO: 3816702 - RNA, 20 nt, Human
agugccucucccugcugcuc

SEQ ID NO: 3816703 - RNA, 22 nt, Human
agugccuggauccccucugucu

SEQ ID NO: 3816704 - RNA, 23 nt, Human
agugccuggauccccucugucua

SEQ ID NO: 3816705 - RNA, 17 nt, Human
agugccugggaauguau

SEQ ID NO: 3816706 - RNA, 18 nt, Human
agugccuuacacaauggu

SEQ ID NO: 3816707 - RNA, 20 nt, Human
agugccuuaccuccugccca

SEQ ID NO: 3816708 - RNA, 21 nt, Human
agugccuuaccuccugcccag

SEQ ID NO: 3816709 - RNA, 10 nt, Human
agugccuuau

SEQ ID NO: 3816710 - RNA, 14 nt, Human
agugccuuauggaa

SEQ ID NO: 3816711 - RNA, 18 nt, Human
agugccuucaauaaaugg

SEQ ID NO: 3816712 - RNA, 13 nt, Human
agugccuuccaua

SEQ ID NO: 3816713 - RNA, 15 nt, Human
agugccuuccauaau

SEQ ID NO: 3816714 - RNA, 13 nt, Human
agugccuuucagg

SEQ ID NO: 3816715 - RNA, 19 nt, Human
agugccuuucaggaucuau

SEQ ID NO: 3816716 - RNA, 21 nt, Human
agugccuuucaggaucuauuu

SEQ ID NO: 3816717 - RNA, 22 nt, Human
agugccuuuugcagaagagggu

SEQ ID NO: 3816718 - RNA, 13 nt, Human
agugcgugaaugu

SEQ ID NO: 3816719 - RNA, 17 nt, Human
agugcguggcccaccag

SEQ ID NO: 3816720 - RNA, 22 nt, Human
agugcguguguagaguuaagaa

SEQ ID NO: 3816721 - RNA, 14 nt, Human
agugcuaaaaaugg

SEQ ID NO: 3816722 - RNA, 16 nt, Human
agugcuaacaugaaga

SEQ ID NO: 3816723 - RNA, 19 nt, Human
agugcuaacaugaagaccu

SEQ ID NO: 3816724 - RNA, 22 nt, Human
agugcuaacaugaagaccuuuu

SEQ ID NO: 3816725 - RNA, 15 nt, Human
agugcuaagguucua

SEQ ID NO: 3816726 - RNA, 17 nt, Human
agccccaugcuggagcc

SEQ ID NO: 3816727 - RNA, 18 nt, Human
agccccaugcuggagccu

SEQ ID NO: 3816728 - RNA, 13 nt, Human
agccccauucugc

SEQ ID NO: 3816729 - RNA, 19 nt, Human
agccccauucugccugccc

SEQ ID NO: 3816730 - RNA, 23 nt, Human
agccccauucugccugcccaggc

SEQ ID NO: 3816731 - RNA, 17 nt, Human
agcccccacccuguucc

SEQ ID NO: 3816732 - RNA, 13 nt, Human
agcccccagagcc

SEQ ID NO: 3816733 - RNA, 14 nt, Human
agcccccagagccc

SEQ ID NO: 3816734 - RNA, 15 nt, Human
agcccccagccccuc

SEQ ID NO: 3816735 - RNA, 17 nt, Human
agcccccagccccuccc

SEQ ID NO: 3816736 - RNA, 15 nt, Human
agcccccagccuguc

SEQ ID NO: 3816737 - RNA, 22 nt, Human
agcccccagcuaagaaccugga

SEQ ID NO: 3816738 - RNA, 17 nt, Human
agcccccagcucccacc

SEQ ID NO: 3816739 - RNA, 22 nt, Human
agcccccagcucccaccucccc

SEQ ID NO: 3816740 - RNA, 21 nt, Human
agcccccagcuuccagcagga

SEQ ID NO: 3816741 - RNA, 22 nt, Human
agcccccagcuuccagcaggag

SEQ ID NO: 3816742 - RNA, 19 nt, Human
agcccccccaacacugugc

SEQ ID NO: 3816743 - RNA, 21 nt, Human
agcccccccaacacugugccc

SEQ ID NO: 3816744 - RNA, 23 nt, Human
agcccccccaacacugugcccug

SEQ ID NO: 3816745 - RNA, 15 nt, Human
agcccccccuuccac

SEQ ID NO: 3816746 - RNA, 22 nt, Human
agcccccgccccgccccacauu

SEQ ID NO: 3816747 - RNA, 23 nt, Human
agcccccgccccgccccacauuc

SEQ ID NO: 3816748 - RNA, 19 nt, Human
agcccccuaagagagcacc

SEQ ID NO: 3816749 - RNA, 22 nt, Human
agcccccucacaguauugcuca

SEQ ID NO: 3816750 - RNA, 23 nt, Human
agcccccucacaguauugcucac

SEQ ID NO: 3816751 - RNA, 21 nt, Human
agcccccuccuggugccaccu

SEQ ID NO: 3816752 - RNA, 15 nt, Human
agcccccucuucccu

SEQ ID NO: 3816753 - RNA, 22 nt, Human
agcccccugaccacucagagac

SEQ ID NO: 3816754 - RNA, 19 nt, Human
agcccccuggccucugugc

SEQ ID NO: 3816755 - RNA, 18 nt, Human
agcccccuggucuuugag

SEQ ID NO: 3816756 - RNA, 21 nt, Human
agcccccuuugggcccaggga

SEQ ID NO: 3816757 - RNA, 16 nt, Human
agccccgagcuguccc

SEQ ID NO: 3816758 - RNA, 16 nt, Human
agccccgaggccuucu

SEQ ID NO: 3816759 - RNA, 18 nt, Human
agccccgcagaccucccc

SEQ ID NO: 3816760 - RNA, 14 nt, Human
agccccgcccucuu

SEQ ID NO: 3816761 - RNA, 17 nt, Human
agccccgcccucuuccu

SEQ ID NO: 3816762 - RNA, 23 nt, Human
agccccgcgaccauguggccaca

SEQ ID NO: 3816763 - RNA, 18 nt, Human
agccccgcgccuccuucc

SEQ ID NO: 3816764 - RNA, 23 nt, Human
agccccgcguggaacucgugucu

SEQ ID NO: 3816765 - RNA, 14 nt, Human
agccccggcccugg

SEQ ID NO: 3816766 - RNA, 16 nt, Human
agccccggcccugggc

SEQ ID NO: 3816767 - RNA, 16 nt, Human
agccccuacugcugug

SEQ ID NO: 3816768 - RNA, 16 nt, Human
agccccuagaaaccca

SEQ ID NO: 3816769 - RNA, 12 nt, Human
agccccuagccc

SEQ ID NO: 3816770 - RNA, 18 nt, Human
agccccuagcccaggaga

SEQ ID NO: 3816771 - RNA, 21 nt, Human
agccccuagcccaggagagag

SEQ ID NO: 3816772 - RNA, 22 nt, Human
agccccuagcccaggagagaga

SEQ ID NO: 3816773 - RNA, 11 nt, Human
agccccuagga

SEQ ID NO: 3816774 - RNA, 10 nt, Human
agccccuccc

SEQ ID NO: 3816775 - RNA, 16 nt, Human
agccccucccaccaca

SEQ ID NO: 3816776 - RNA, 18 nt, Human
agccccucccaccacagc

SEQ ID NO: 3816777 - RNA, 23 nt, Human
agccccuccuccagccccugucc

SEQ ID NO: 3816778 - RNA, 13 nt, Human
agccccuccucug

SEQ ID NO: 3816779 - RNA, 15 nt, Human
agccccuccucugcc

SEQ ID NO: 3816780 - RNA, 17 nt, Human
agccccuccucugccac

SEQ ID NO: 3816781 - RNA, 22 nt, Human
agccccuccucugccaccuccc

SEQ ID NO: 3816782 - RNA, 20 nt, Human
agccccucuggucgcuccug

SEQ ID NO: 3816783 - RNA, 10 nt, Human
agccccucuu

SEQ ID NO: 3816784 - RNA, 12 nt, Human
agccccucuucc

SEQ ID NO: 3816785 - RNA, 13 nt, Human
agccccucuuccc

SEQ ID NO: 3816786 - RNA, 17 nt, Human
agccccucuuccccaau

SEQ ID NO: 3816787 - RNA, 17 nt, Human
agccccucuugcccccc

SEQ ID NO: 3816788 - RNA, 21 nt, Human
agccccucuugccccccaccc

SEQ ID NO: 3816789 - RNA, 22 nt, Human
agccccucuugccccccacccc

SEQ ID NO: 3816790 - RNA, 15 nt, Human
agccccucuuggaga

SEQ ID NO: 3816791 - RNA, 20 nt, Human
agccccucuuggagaagucu

SEQ ID NO: 3816792 - RNA, 13 nt, Human
agccccugcccca

SEQ ID NO: 3816793 - RNA, 23 nt, Human
agccccugccccagcccaagucc

SEQ ID NO: 3816794 - RNA, 17 nt, Human
agccccuggaugcagcc

SEQ ID NO: 3816795 - RNA, 19 nt, Human
agccccuggaugcagccuc

SEQ ID NO: 3816796 - RNA, 18 nt, Human
agccccuguauggcacug

SEQ ID NO: 3816797 - RNA, 12 nt, Human
agccccuguccc

SEQ ID NO: 3816798 - RNA, 13 nt, Human
agccccuguccca

SEQ ID NO: 3816799 - RNA, 23 nt, Human
agccccugucuagagagggaggc

SEQ ID NO: 3816800 - RNA, 15 nt, Human
agccccuguggagac

SEQ ID NO: 3816801 - RNA, 18 nt, Human
agccccuguggagacugg

SEQ ID NO: 3816802 - RNA, 16 nt, Human
agccccuuagacagag

SEQ ID NO: 3816803 - RNA, 17 nt, Human
agccccuuccccauggg

SEQ ID NO: 3816804 - RNA, 23 nt, Human
agccccuuccuugcucugcaccc

SEQ ID NO: 3816805 - RNA, 19 nt, Human
agccccuucucagaaucua

SEQ ID NO: 3816806 - RNA, 14 nt, Human
agccccuucugacc

SEQ ID NO: 3816807 - RNA, 19 nt, Human
agccccuucugacccaugc

SEQ ID NO: 3816808 - RNA, 20 nt, Human
agccccuucugacccaugcu

SEQ ID NO: 3816809 - RNA, 22 nt, Human
agccccuucugcucagcucugg

SEQ ID NO: 3816810 - RNA, 12 nt, Human
agccccuuucca

SEQ ID NO: 3816811 - RNA, 14 nt, Human
agccccuuucccuu

SEQ ID NO: 3816812 - RNA, 21 nt, Human
agccccuuucccuuguagcuc

SEQ ID NO: 3816813 - RNA, 22 nt, Human
agccccuuuuucauauguugcu

SEQ ID NO: 3816814 - RNA, 16 nt, Human
agcccgcacccccacc

SEQ ID NO: 3816815 - RNA, 18 nt, Human
agcccgcacccccacccu

SEQ ID NO: 3816816 - RNA, 20 nt, Human
agcccgcaucagcugcucag

SEQ ID NO: 3816817 - RNA, 12 nt, Human
agcccgcaugca

SEQ ID NO: 3816818 - RNA, 16 nt, Human
agcccgcaugcagcag

SEQ ID NO: 3816819 - RNA, 17 nt, Human
agcccgcaugcagcagc

SEQ ID NO: 3816820 - RNA, 13 nt, Human
agcccgccugaca

SEQ ID NO: 3816821 - RNA, 12 nt, Human
agcccgccugcc

SEQ ID NO: 3816822 - RNA, 15 nt, Human
agcccgccugccagu

SEQ ID NO: 3816823 - RNA, 21 nt, Human
agcccgcuaggcucgccuucc

SEQ ID NO: 3816824 - RNA, 19 nt, Human
agcccgcugaguggacugg

SEQ ID NO: 3816825 - RNA, 19 nt, Human
agcccggccugcucccagc

SEQ ID NO: 3816826 - RNA, 22 nt, Human
agcccggccugcucccagcagc

SEQ ID NO: 3816827 - RNA, 20 nt, Human
agcccggcgccaccauccug

SEQ ID NO: 3816828 - RNA, 12 nt, Human
agcccggcuccu

SEQ ID NO: 3816829 - RNA, 16 nt, Human
agcccgggagccuagg

SEQ ID NO: 3816830 - RNA, 18 nt, Human
agcccgggagccuaggac

SEQ ID NO: 3816831 - RNA, 16 nt, Human
agcccgggcucugccu

SEQ ID NO: 3816832 - RNA, 19 nt, Human
agcccgggcugccugggcu

SEQ ID NO: 3816833 - RNA, 21 nt, Human
agcccgggcugccugggcugu

SEQ ID NO: 3816834 - RNA, 21 nt, Human
agcccgguaagagcaaaagaa

SEQ ID NO: 3816835 - RNA, 18 nt, Human
agcccguguggccccuuc

SEQ ID NO: 3816836 - RNA, 15 nt, Human
agcccuaaacaucau

SEQ ID NO: 3816837 - RNA, 21 nt, Human
agcccuaaacaucauucuuga

SEQ ID NO: 3816838 - RNA, 17 nt, Human
agccugugccucuggga

SEQ ID NO: 3816839 - RNA, 13 nt, Human
agccuguggcccu

SEQ ID NO: 3816840 - RNA, 14 nt, Human
agccuguggcccug

SEQ ID NO: 3816841 - RNA, 22 nt, Human
agccuguggcggugccugggug

SEQ ID NO: 3816842 - RNA, 11 nt, Human
agccuguggcu

SEQ ID NO: 3816843 - RNA, 14 nt, Human
agccuguggcugug

SEQ ID NO: 3816844 - RNA, 23 nt, Human
agccuguggcuguggagacaaug

SEQ ID NO: 3816845 - RNA, 18 nt, Human
agccuguguaacagcucc

SEQ ID NO: 3816846 - RNA, 11 nt, Human
agccuguguca

SEQ ID NO: 3816847 - RNA, 16 nt, Human
agccugugucuuuaaa

SEQ ID NO: 3816848 - RNA, 16 nt, Human
agccuguucauggcag

SEQ ID NO: 3816849 - RNA, 18 nt, Human
agccuguucauggcagau

SEQ ID NO: 3816850 - RNA, 20 nt, Human
agccuguuccccucacugga

SEQ ID NO: 3816851 - RNA, 13 nt, Human
agccuguuuaaga

SEQ ID NO: 3816852 - RNA, 22 nt, Human
agccuuaaaacaucauuccuuu

SEQ ID NO: 3816853 - RNA, 14 nt, Human
agccuuaagcugca

SEQ ID NO: 3816854 - RNA, 18 nt, Human
agccuuaaucagguccuc

SEQ ID NO: 3816855 - RNA, 20 nt, Human
agccuuaauuuuuuuuucau

SEQ ID NO: 3816856 - RNA, 20 nt, Human
agccuuagaagucacacagu

SEQ ID NO: 3816857 - RNA, 22 nt, Human
agccuuagaagucacacaguau

SEQ ID NO: 3816858 - RNA, 20 nt, Human
agccuuagggaagcuggccu

SEQ ID NO: 3816859 - RNA, 18 nt, Human
agccuuaucaagugucuu

SEQ ID NO: 3816860 - RNA, 14 nt, Human
agccuuauccucug

SEQ ID NO: 3816861 - RNA, 15 nt, Human
agccuuauccucuga

SEQ ID NO: 3816862 - RNA, 18 nt, Human
agccuuauccucugaucu

SEQ ID NO: 3816863 - RNA, 15 nt, Human
agccuucaagcucug

SEQ ID NO: 3816864 - RNA, 23 nt, Human
agccuucagucuugaauuucuaa

SEQ ID NO: 3816865 - RNA, 16 nt, Human
agccuuccacacucac

SEQ ID NO: 3816866 - RNA, 20 nt, Human
agccuuccccuugcccaggg

SEQ ID NO: 3816867 - RNA, 19 nt, Human
agccuuccuccacauccuu

SEQ ID NO: 3816868 - RNA, 23 nt, Human
agccuuccuccacauccuuucua

SEQ ID NO: 3816869 - RNA, 14 nt, Human
agccuuccucugca

SEQ ID NO: 3816870 - RNA, 22 nt, Human
agccuuccucugcagcugaccu

SEQ ID NO: 3816871 - RNA, 20 nt, Human
agccuucucccuagcuccuc

SEQ ID NO: 3816872 - RNA, 19 nt, Human
agccuucucuguucauuuc

SEQ ID NO: 3816873 - RNA, 22 nt, Human
agccuucucuguucauuuccuc

SEQ ID NO: 3816874 - RNA, 13 nt, Human
agccuucugagcu

SEQ ID NO: 3816875 - RNA, 20 nt, Human
agccuucugaggacauucca

SEQ ID NO: 3816876 - RNA, 22 nt, Human
agccuucuuccaucccaggaca

SEQ ID NO: 3816877 - RNA, 14 nt, Human
agccuugaacucug

SEQ ID NO: 3816878 - RNA, 15 nt, Human
agccuugaacuuuga

SEQ ID NO: 3816879 - RNA, 23 nt, Human
agccuugaccauucuccaccugc

SEQ ID NO: 3816880 - RNA, 21 nt, Human
agccuugauucccuuguuauu

SEQ ID NO: 3816881 - RNA, 19 nt, Human
agccuugauugguguugcc

SEQ ID NO: 3816882 - RNA, 20 nt, Human
agccuuggauaaugcuguug

SEQ ID NO: 3816883 - RNA, 17 nt, Human
agccuuggccucagagg

SEQ ID NO: 3816884 - RNA, 16 nt, Human
agccuugggaccccug

SEQ ID NO: 3816885 - RNA, 16 nt, Human
agccuuggggauucuu

SEQ ID NO: 3816886 - RNA, 17 nt, Human
agccuugguguccaccu

SEQ ID NO: 3816887 - RNA, 21 nt, Human
agccuugguguccaccuggcc

SEQ ID NO: 3816888 - RNA, 22 nt, Human
agccuugugaugucauacagag

SEQ ID NO: 3816889 - RNA, 23 nt, Human
agccuugugaugucauacagaga

SEQ ID NO: 3816890 - RNA, 13 nt, Human
agccuuguguaua

SEQ ID NO: 3816891 - RNA, 14 nt, Human
agccuuguguauau

SEQ ID NO: 3816892 - RNA, 22 nt, Human
agccuuguguauauuuguauau

SEQ ID NO: 3816893 - RNA, 24 nt, Human
agccuuguguauauuuguauauua

SEQ ID NO: 3816894 - RNA, 20 nt, Human
agccuugugucuacagagaa

SEQ ID NO: 3816895 - RNA, 13 nt, Human
agccuuuaaugca

SEQ ID NO: 3816896 - RNA, 15 nt, Human
agccuuuaaugcauc

SEQ ID NO: 3816897 - RNA, 19 nt, Human
agccuuuaguaucaguguu

SEQ ID NO: 3816898 - RNA, 13 nt, Human
agccuuucauuuu

SEQ ID NO: 3816899 - RNA, 20 nt, Human
agccuuucauuuugcuuuaa

SEQ ID NO: 3816900 - RNA, 23 nt, Human
agccuuuccauaaggaauguagc

SEQ ID NO: 3816901 - RNA, 16 nt, Human
agccuuucucccaggc

SEQ ID NO: 3816902 - RNA, 15 nt, Human
agccuuucucucuuu

SEQ ID NO: 3816903 - RNA, 15 nt, Human
agccuuucuuuucuu

SEQ ID NO: 3816904 - RNA, 18 nt, Human
agccuuuggaugaccaga

SEQ ID NO: 3816905 - RNA, 17 nt, Human
agccuuuggccuuggcu

SEQ ID NO: 3816906 - RNA, 16 nt, Human
agccuuuggcucugga

SEQ ID NO: 3816907 - RNA, 17 nt, Human
agccuuuggcucuggag

SEQ ID NO: 3816908 - RNA, 14 nt, Human
agccuuuguucccc

SEQ ID NO: 3816909 - RNA, 20 nt, Human
agccuuuguuccccacugga

SEQ ID NO: 3816910 - RNA, 22 nt, Human
agccuuuguuccccacuggagc

SEQ ID NO: 3816911 - RNA, 15 nt, Human
agccuuuguugaacu

SEQ ID NO: 3816912 - RNA, 21 nt, Human
agccuuuguugaacuguuaga

SEQ ID NO: 3816913 - RNA, 17 nt, Human
agccuuuucacccuucu

SEQ ID NO: 3816914 - RNA, 23 nt, Human
agccuuuucccucuuuggcuccc

SEQ ID NO: 3816915 - RNA, 13 nt, Human
agccuuuugaaag

SEQ ID NO: 3816916 - RNA, 18 nt, Human
agccuuuuuaaaacacau

SEQ ID NO: 3816917 - RNA, 22 nt, Human
agccuuuuuaaaacacauguuu

SEQ ID NO: 3816918 - RNA, 16 nt, Human
agccuuuuucuaggcc

SEQ ID NO: 3816919 - RNA, 18 nt, Human
agccuuuuuguuucaaug

SEQ ID NO: 3816920 - RNA, 17 nt, Human
agccuuuuuuccccaga

SEQ ID NO: 3816921 - RNA, 21 nt, Human
agccuuuuuuccccagacuug

SEQ ID NO: 3816922 - RNA, 23 nt, Human
agccuuuuuuccccagacuuguu

SEQ ID NO: 3816923 - RNA, 18 nt, Human
agcgaaccaauauuugua

SEQ ID NO: 3816924 - RNA, 13 nt, Human
agcgacagagcag

SEQ ID NO: 3816925 - RNA, 15 nt, Human
aguucugaagaagau

SEQ ID NO: 3816926 - RNA, 16 nt, Human
aguucugaagaagaug

SEQ ID NO: 3816927 - RNA, 16 nt, Human
aguucugcaaauagaa

SEQ ID NO: 3816928 - RNA, 12 nt, Human
aguucugcaggu

SEQ ID NO: 3816929 - RNA, 12 nt, Human
aguucugccagg

SEQ ID NO: 3816930 - RNA, 13 nt, Human
aguucugccagga

SEQ ID NO: 3816931 - RNA, 14 nt, Human
aguucugcuccucu

SEQ ID NO: 3816932 - RNA, 15 nt, Human
aguucugcuccucuc

SEQ ID NO: 3816933 - RNA, 19 nt, Human
aguucugcuccucuccagg

SEQ ID NO: 3816934 - RNA, 21 nt, Human
aguucugcuccucuccaggca

SEQ ID NO: 3816935 - RNA, 16 nt, Human
aguucugcucugguug

SEQ ID NO: 3816936 - RNA, 14 nt, Human
aguucugguuccua

SEQ ID NO: 3816937 - RNA, 13 nt, Human
aguucuguagaaa

SEQ ID NO: 3816938 - RNA, 18 nt, Human
aguucuguagaaaugguu

SEQ ID NO: 3816939 - RNA, 15 nt, Human
aguucuguauuugaa

SEQ ID NO: 3816940 - RNA, 17 nt, Human
aguucuguauuugaaag

SEQ ID NO: 3816941 - RNA, 18 nt, Human
aguucuguauuugaaagu

SEQ ID NO: 3816942 - RNA, 11 nt, Human
aguucugugac

SEQ ID NO: 3816943 - RNA, 19 nt, Human
aguucugugacuaggaaaa

SEQ ID NO: 3816944 - RNA, 13 nt, Human
aguucuguguauu

SEQ ID NO: 3816945 - RNA, 21 nt, Human
aguucuguguauuuaauugua

SEQ ID NO: 3816946 - RNA, 18 nt, Human
aguucuguguauuuucag

SEQ ID NO: 3816947 - RNA, 13 nt, Human
aguucuguguuua

SEQ ID NO: 3816948 - RNA, 19 nt, Human
aguucuguguuuaauuucu

SEQ ID NO: 3816949 - RNA, 16 nt, Human
aguucuuaguugcugu

SEQ ID NO: 3816950 - RNA, 14 nt, Human
aguucuuccuguaa

SEQ ID NO: 3816951 - RNA, 15 nt, Human
aguucuucgacuguu

SEQ ID NO: 3816952 - RNA, 19 nt, Human
aguucuucgacuguuguua

SEQ ID NO: 3816953 - RNA, 20 nt, Human
aguucuucgggaagagagga

SEQ ID NO: 3816954 - RNA, 13 nt, Human
aguucuucuccaa

SEQ ID NO: 3816955 - RNA, 22 nt, Human
aguucuugccuuggcugcaguu

SEQ ID NO: 3816956 - RNA, 13 nt, Human
aguucuugugcca

SEQ ID NO: 3816957 - RNA, 14 nt, Human
aguucuugugccau

SEQ ID NO: 3816958 - RNA, 17 nt, Human
aguucuuugggccagac

SEQ ID NO: 3816959 - RNA, 21 nt, Human
aguucuuugggccagacaugc

SEQ ID NO: 3816960 - RNA, 19 nt, Human
aguucuuuguucauagccc

SEQ ID NO: 3816961 - RNA, 19 nt, Human
aguucuuuuugaaguauuu

SEQ ID NO: 3816962 - RNA, 14 nt, Human
aguugaaaagacuc

SEQ ID NO: 3816963 - RNA, 19 nt, Human
aguugaaaagacuccaaag

SEQ ID NO: 3816964 - RNA, 21 nt, Human
aguugaaaagacuccaaagaa

SEQ ID NO: 3816965 - RNA, 18 nt, Human
aguugaaaauaaagugua

SEQ ID NO: 3816966 - RNA, 19 nt, Human
aguugaaaauaaaguguau

SEQ ID NO: 3816967 - RNA, 13 nt, Human
aguugaacugaua

SEQ ID NO: 3816968 - RNA, 16 nt, Human
aguugaagacagagcu

SEQ ID NO: 3816969 - RNA, 15 nt, Human
aguugaagucaugcu

SEQ ID NO: 3816970 - RNA, 17 nt, Human
aguugaaguuaguggaa

SEQ ID NO: 3816971 - RNA, 17 nt, Human
aguugaauacuugaacc

SEQ ID NO: 3816972 - RNA, 21 nt, Human
aguugaaugacaacagaagcu

SEQ ID NO: 3816973 - RNA, 20 nt, Human
aguugaauggccugccuuga

SEQ ID NO: 3816974 - RNA, 20 nt, Human
aguugaauuuauuggcuuuu

SEQ ID NO: 3816975 - RNA, 17 nt, Human
aguugacaugagauuua

SEQ ID NO: 3816976 - RNA, 19 nt, Human
aguugagccagcagacauu

SEQ ID NO: 3816977 - RNA, 21 nt, Human
aguugagccagcagacauugu

SEQ ID NO: 3816978 - RNA, 16 nt, Human
aguugagccccaaguc

SEQ ID NO: 3816979 - RNA, 17 nt, Human
aguugaggaguuuccua

SEQ ID NO: 3816980 - RNA, 19 nt, Human
aguugaguauauuauaaua

SEQ ID NO: 3816981 - RNA, 20 nt, Human
aguugagucgucaucacuuu

SEQ ID NO: 3816982 - RNA, 17 nt, Human
agcgcuaucuucacaua

SEQ ID NO: 3816983 - RNA, 17 nt, Human
agcgcuccugccgcaga

SEQ ID NO: 3816984 - RNA, 21 nt, Human
agcgcuccugccgcagagcug

SEQ ID NO: 3816985 - RNA, 12 nt, Human
agcgcucugccu

SEQ ID NO: 3816986 - RNA, 16 nt, Human
agcgcuggccgggacc

SEQ ID NO: 3816987 - RNA, 16 nt, Human
agcgcugucaggauug

SEQ ID NO: 3816988 - RNA, 21 nt, Human
agcgcugucaggauugcgaga

SEQ ID NO: 3816989 - RNA, 17 nt, Human
agcgcuuucuggaaaag

SEQ ID NO: 3816990 - RNA, 21 nt, Human
agcgcuuugggaggccgaggc

SEQ ID NO: 3816991 - RNA, 23 nt, Human
agcggaaagcagcucaaaggcac

SEQ ID NO: 3816992 - RNA, 17 nt, Human
agcggaacaaggaguca

SEQ ID NO: 3816993 - RNA, 22 nt, Human
agcggaacaaggagucagacau

SEQ ID NO: 3816994 - RNA, 20 nt, Human
agcggacuccuccuuucucc

SEQ ID NO: 3816995 - RNA, 14 nt, Human
agcggaggugugga

SEQ ID NO: 3816996 - RNA, 23 nt, Human
agcggagguugcagggagccgag

SEQ ID NO: 3816997 - RNA, 22 nt, Human
agcggagguugcagugagcuga

SEQ ID NO: 3816998 - RNA, 13 nt, Human
agcggauuuccag

SEQ ID NO: 3816999 - RNA, 13 nt, Human
agcggcaucaggc

SEQ ID NO: 3817000 - RNA, 13 nt, Human
agcggccccuccc

SEQ ID NO: 3817001 - RNA, 20 nt, Human
agcggccccuugacucuggg

SEQ ID NO: 3817002 - RNA, 17 nt, Human
agcggcccuaagggagu

SEQ ID NO: 3817003 - RNA, 14 nt, Human
agcggcccugucau

SEQ ID NO: 3817004 - RNA, 18 nt, Human
agcggccggccagccccu

SEQ ID NO: 3817005 - RNA, 18 nt, Human
agcggcucaagcccagga

SEQ ID NO: 3817006 - RNA, 16 nt, Human
agcggcugagucauga

SEQ ID NO: 3817007 - RNA, 17 nt, Human
agcggcuggacuuggag

SEQ ID NO: 3817008 - RNA, 21 nt, Human
agcggcuggacuuggagguag

SEQ ID NO: 3817009 - RNA, 20 nt, Human
agcggcuugccugccugcuc

SEQ ID NO: 3817010 - RNA, 14 nt, Human
agcgggaaaaggag

SEQ ID NO: 3817011 - RNA, 15 nt, Human
agcgggaccuguggc

SEQ ID NO: 3817012 - RNA, 16 nt, Human
agcgggaccuguggcu

SEQ ID NO: 3817013 - RNA, 17 nt, Human
agcgggagccucccugc

SEQ ID NO: 3817014 - RNA, 12 nt, Human
agcgggaggcag

SEQ ID NO: 3817015 - RNA, 17 nt, Human
agcggggacagcuccuu

SEQ ID NO: 3817016 - RNA, 19 nt, Human
agcggggacagcuccuucu

SEQ ID NO: 3817017 - RNA, 20 nt, Human
agcgggggaggcccgcagag

SEQ ID NO: 3817018 - RNA, 21 nt, Human
agcgggggaggguaggcagga

SEQ ID NO: 3817019 - RNA, 16 nt, Human
agcgggggccagggaa

SEQ ID NO: 3817020 - RNA, 18 nt, Human
agcgggggccuaaaaaaa

SEQ ID NO: 3817021 - RNA, 21 nt, Human
agcgguaccaaugcagaacuc

SEQ ID NO: 3817022 - RNA, 14 nt, Human
agcgguuuggggag

SEQ ID NO: 3817023 - RNA, 20 nt, Human
agcguagugcagcagggcag

SEQ ID NO: 3817024 - RNA, 21 nt, Human
agcguauauauaagaaagaca

SEQ ID NO: 3817025 - RNA, 16 nt, Human
agcguauggcuuuauu

SEQ ID NO: 3817026 - RNA, 16 nt, Human
agcgucccuagcagug

SEQ ID NO: 3817027 - RNA, 18 nt, Human
agcgucccuagcagugaa

SEQ ID NO: 3817028 - RNA, 16 nt, Human
agcguccuccucugug

SEQ ID NO: 3817029 - RNA, 18 nt, Human
agcgucuuucuuuuuugg

SEQ ID NO: 3817030 - RNA, 13 nt, Human
agcgugagccacu

SEQ ID NO: 3817031 - RNA, 17 nt, Human
agcgugagccacugcac

SEQ ID NO: 3817032 - RNA, 15 nt, Human
agcgugagcugagca

SEQ ID NO: 3817033 - RNA, 12 nt, Human
agcgugagcuua

SEQ ID NO: 3817034 - RNA, 15 nt, Human
agcguggacaggugu

SEQ ID NO: 3817035 - RNA, 20 nt, Human
agcguggagggguaggggcu

SEQ ID NO: 3817036 - RNA, 23 nt, Human
agcgugucuguauuuauguguga

SEQ ID NO: 3817037 - RNA, 16 nt, Human
agcguuggauguagca

SEQ ID NO: 3817038 - RNA, 14 nt, Human
agcguuuuuuaaau

SEQ ID NO: 3817039 - RNA, 18 nt, Human
agcguuuuuuaaauguau

SEQ ID NO: 3817040 - RNA, 19 nt, Human
agcuaaaauaaagaaauag

SEQ ID NO: 3817041 - RNA, 21 nt, Human
agcuaaagaggcugaaagagg

SEQ ID NO: 3817042 - RNA, 18 nt, Human
agcuaaauuacaauuguc

SEQ ID NO: 3817043 - RNA, 18 nt, Human
agcuaacacuggccccua

SEQ ID NO: 3817044 - RNA, 13 nt, Human
agcuaacagggaa

SEQ ID NO: 3817045 - RNA, 21 nt, Human
agcuaacagggaaggcaggca

SEQ ID NO: 3817046 - RNA, 20 nt, Human
agcuaacauggaaguacuau

SEQ ID NO: 3817047 - RNA, 17 nt, Human
agcuaacauuuuaaaua

SEQ ID NO: 3817048 - RNA, 18 nt, Human
agcuaacauuuuaaauaa

SEQ ID NO: 3817049 - RNA, 20 nt, Human
agcuaacauuuuaaauaaaa

SEQ ID NO: 3817050 - RNA, 23 nt, Human
agcuaacccccuucuacugagcc

SEQ ID NO: 3817051 - RNA, 22 nt, Human
agcuaaccuuauccugcauugu

SEQ ID NO: 3817052 - RNA, 15 nt, Human
agcuaacuguaaauc

SEQ ID NO: 3817053 - RNA, 14 nt, Human
agcuaagaaaagau

SEQ ID NO: 3817054 - RNA, 13 nt, Human
agcuaagaaauaa

SEQ ID NO: 3817055 - RNA, 19 nt, Human
agcuaagaaauaaaacugu

SEQ ID NO: 3817056 - RNA, 16 nt, Human
agcuaagaaccuggaa

SEQ ID NO: 3817057 - RNA, 16 nt, Human
agcuaaggacauuucc

SEQ ID NO: 3817058 - RNA, 18 nt, Human
agcuaagggaagacauuu

SEQ ID NO: 3817059 - RNA, 20 nt, Human
agcuaagggaagacauuucu

SEQ ID NO: 3817060 - RNA, 16 nt, Human
agcuaagggugggugc

SEQ ID NO: 3817061 - RNA, 22 nt, Human
agcuaagggugggugcucagaa

SEQ ID NO: 3817062 - RNA, 18 nt, Human
agcuaauaaaaagcuuuu

SEQ ID NO: 3817063 - RNA, 23 nt, Human
agcuaauaaaaagcuuuugucua

SEQ ID NO: 3817064 - RNA, 17 nt, Human
agcuaauaaaauaucau

SEQ ID NO: 3817065 - RNA, 18 nt, Human
agcuaauaaaauaucauu

SEQ ID NO: 3817066 - RNA, 20 nt, Human
agcuaauaaaauaucauuca

SEQ ID NO: 3817067 - RNA, 21 nt, Human
agcuaauaaaauaucauucag

SEQ ID NO: 3817068 - RNA, 16 nt, Human
agcuaauaacugaucu

SEQ ID NO: 3817069 - RNA, 12 nt, Human
agcuaauaauga

SEQ ID NO: 3817070 - RNA, 16 nt, Human
agcuaauaauucuuca

SEQ ID NO: 3817071 - RNA, 22 nt, Human
agcuaauaauucuucaccuaag

SEQ ID NO: 3817072 - RNA, 17 nt, Human
agcuaaucuguagggcu

SEQ ID NO: 3817073 - RNA, 16 nt, Human
agcuaauggaaaauga

SEQ ID NO: 3817074 - RNA, 13 nt, Human
agcuaaugggaca

SEQ ID NO: 3817075 - RNA, 14 nt, Human
agcuaaugggacac

SEQ ID NO: 3817076 - RNA, 15 nt, Human
agcuaauuauuuuaa

SEQ ID NO: 3817077 - RNA, 16 nt, Human
agcuaauuauuuuaau

SEQ ID NO: 3817078 - RNA, 18 nt, Human
agcuaauuauuuuaauua

SEQ ID NO: 3817079 - RNA, 15 nt, Human
agcuaauugggaguc

SEQ ID NO: 3817080 - RNA, 22 nt, Human
agcuaauuugcauuaaauucac

SEQ ID NO: 3817081 - RNA, 20 nt, Human
agcuacaacagccucacuug

SEQ ID NO: 3817082 - RNA, 22 nt, Human
agcuacaccuuucuccuuugua

SEQ ID NO: 3817083 - RNA, 15 nt, Human
agcuacagagaaacc

SEQ ID NO: 3817084 - RNA, 23 nt, Human
agcuacagagaaaccagcuuccu

SEQ ID NO: 3817085 - RNA, 17 nt, Human
agugcaguuauuugcuu

SEQ ID NO: 3817086 - RNA, 23 nt, Human
agugcauagcuacuaaaaucagu

SEQ ID NO: 3817087 - RNA, 22 nt, Human
agugcauaguuguagacaaagu

SEQ ID NO: 3817088 - RNA, 17 nt, Human
agugcaucucagcccac

SEQ ID NO: 3817089 - RNA, 18 nt, Human
agugcaucuuugccucuc

SEQ ID NO: 3817090 - RNA, 16 nt, Human
agugcaugcugucccu

SEQ ID NO: 3817091 - RNA, 21 nt, Human
agugcauuucugaauagaaau

SEQ ID NO: 3817092 - RNA, 22 nt, Human
agugcauuucugaauagaaaug

SEQ ID NO: 3817093 - RNA, 17 nt, Human
agugcauuuucccagau

SEQ ID NO: 3817094 - RNA, 14 nt, Human
agugcauuuuugua

SEQ ID NO: 3817095 - RNA, 20 nt, Human
agugcauuuuuguaaaugug

SEQ ID NO: 3817096 - RNA, 13 nt, Human
agugccaacugug

SEQ ID NO: 3817097 - RNA, 15 nt, Human
agugccaaguuuguu

SEQ ID NO: 3817098 - RNA, 21 nt, Human
agugccacugcccgagcuggu

SEQ ID NO: 3817099 - RNA, 17 nt, Human
agugccacuuaauguau

SEQ ID NO: 3817100 - RNA, 20 nt, Human
agugccagaggugggcaggu

SEQ ID NO: 3817101 - RNA, 18 nt, Human
agugccagcaccugccca

SEQ ID NO: 3817102 - RNA, 24 nt, Human
agugccaggacuccccaggccagg

SEQ ID NO: 3817103 - RNA, 18 nt, Human
agugccaggauggaauga

SEQ ID NO: 3817104 - RNA, 15 nt, Human
agugccauguaaauc

SEQ ID NO: 3817105 - RNA, 16 nt, Human
agugccauugucuuua

SEQ ID NO: 3817106 - RNA, 14 nt, Human
agugcccaacuguu

SEQ ID NO: 3817107 - RNA, 17 nt, Human
agugcccaacuguuaua

SEQ ID NO: 3817108 - RNA, 16 nt, Human
agugcccaccaacauc

SEQ ID NO: 3817109 - RNA, 16 nt, Human
agugcccacccuggga

SEQ ID NO: 3817110 - RNA, 22 nt, Human
agugcccacccugggagacaga

SEQ ID NO: 3817111 - RNA, 16 nt, Human
agugccccaccugcca

SEQ ID NO: 3817112 - RNA, 23 nt, Human
agugccccaccugccacuaggcu

SEQ ID NO: 3817113 - RNA, 14 nt, Human
agugcccccacuga

SEQ ID NO: 3817114 - RNA, 16 nt, Human
agugcccccacugacc

SEQ ID NO: 3817115 - RNA, 18 nt, Human
agugcccccacugaccag

SEQ ID NO: 3817116 - RNA, 21 nt, Human
agugccccgucuacagcuccc

SEQ ID NO: 3817117 - RNA, 11 nt, Human
agugccccugc

SEQ ID NO: 3817118 - RNA, 13 nt, Human
agugccccugcug

SEQ ID NO: 3817119 - RNA, 19 nt, Human
agugccccugcugccuccc

SEQ ID NO: 3817120 - RNA, 21 nt, Human
agugccccugcugccucccca

SEQ ID NO: 3817121 - RNA, 22 nt, Human
agugccccugcugccuccccaa

SEQ ID NO: 3817122 - RNA, 16 nt, Human
agugcccuccacagcc

SEQ ID NO: 3817123 - RNA, 17 nt, Human
agugcccuccacagccg

SEQ ID NO: 3817124 - RNA, 13 nt, Human
agugcccucuccc

SEQ ID NO: 3817125 - RNA, 15 nt, Human
agugcccucucccac

SEQ ID NO: 3817126 - RNA, 13 nt, Human
agcuacuuuguuu

SEQ ID NO: 3817127 - RNA, 16 nt, Human
agcuagaacccggcag

SEQ ID NO: 3817128 - RNA, 15 nt, Human
agcuagaacccucug

SEQ ID NO: 3817129 - RNA, 16 nt, Human
agcuagaaccuggaga

SEQ ID NO: 3817130 - RNA, 19 nt, Human
agcuagaacuuugaaggac

SEQ ID NO: 3817131 - RNA, 15 nt, Human
agcuagaagugggcc

SEQ ID NO: 3817132 - RNA, 19 nt, Human
agcuagaagugggccagga

SEQ ID NO: 3817133 - RNA, 21 nt, Human
agcuagaagugggccaggaca

SEQ ID NO: 3817134 - RNA, 22 nt, Human
agcuagaauucccucucucuga

SEQ ID NO: 3817135 - RNA, 16 nt, Human
agcuagaauuugauau

SEQ ID NO: 3817136 - RNA, 15 nt, Human
agcuagagaaauucu

SEQ ID NO: 3817137 - RNA, 15 nt, Human
agcuagagcuucaag

SEQ ID NO: 3817138 - RNA, 17 nt, Human
agcuagaugcuuuccua

SEQ ID NO: 3817139 - RNA, 17 nt, Human
agcuagccagaggacug

SEQ ID NO: 3817140 - RNA, 18 nt, Human
agcuagcgcugccgcacc

SEQ ID NO: 3817141 - RNA, 15 nt, Human
agcuagcucaacuag

SEQ ID NO: 3817142 - RNA, 16 nt, Human
agcuagcucaacuagu

SEQ ID NO: 3817143 - RNA, 16 nt, Human
agcuagcuccccuccu

SEQ ID NO: 3817144 - RNA, 20 nt, Human
agcuagcuccccuccucucc

SEQ ID NO: 3817145 - RNA, 23 nt, Human
agcuagcuccccuccucuccccu

SEQ ID NO: 3817146 - RNA, 17 nt, Human
agcuagcugcagagcca

SEQ ID NO: 3817147 - RNA, 20 nt, Human
agcuaggaaaagaaaucuau

SEQ ID NO: 3817148 - RNA, 21 nt, Human
agcuaggaacaaaucuuccug

SEQ ID NO: 3817149 - RNA, 18 nt, Human
agcuaggaagagcaggac

SEQ ID NO: 3817150 - RNA, 21 nt, Human
agcuaggaagagcaggacucc

SEQ ID NO: 3817151 - RNA, 13 nt, Human
agcuaggaaugaa

SEQ ID NO: 3817152 - RNA, 15 nt, Human
agcuaggagcaaagc

SEQ ID NO: 3817153 - RNA, 16 nt, Human
agcuaggagcaaagcc

SEQ ID NO: 3817154 - RNA, 18 nt, Human
agcuaggagcaaagccug

SEQ ID NO: 3817155 - RNA, 23 nt, Human
agcuaggauuugaacacuuggug

SEQ ID NO: 3817156 - RNA, 12 nt, Human
agcuaggcaggg

SEQ ID NO: 3817157 - RNA, 14 nt, Human
agcuaggccuggcc

SEQ ID NO: 3817158 - RNA, 15 nt, Human
agcuaggccuggcca

SEQ ID NO: 3817159 - RNA, 21 nt, Human
agcuaggugcuaauuaauaaa

SEQ ID NO: 3817160 - RNA, 18 nt, Human
agcuaguccuagugaacc

SEQ ID NO: 3817161 - RNA, 23 nt, Human
agcuagucuuuugcuuuugccca

SEQ ID NO: 3817162 - RNA, 18 nt, Human
agcuagugacccacaugc

SEQ ID NO: 3817163 - RNA, 21 nt, Human
agcuagugacccacaugccau

SEQ ID NO: 3817164 - RNA, 21 nt, Human
agcuaguguaccuccucucag

SEQ ID NO: 3817165 - RNA, 17 nt, Human
agcuaguucguagcuuu

SEQ ID NO: 3817166 - RNA, 16 nt, Human
agcuaguugaauacuu

SEQ ID NO: 3817167 - RNA, 24 nt, Human
agcuaguugaauacuugaaccaua

SEQ ID NO: 3817168 - RNA, 22 nt, Human
agcuaguuuuauucuugguuuu

SEQ ID NO: 3817169 - RNA, 22 nt, Human
agcuauauccauguacuguagu

SEQ ID NO: 3817170 - RNA, 17 nt, Human
agcuauaucuauauaua

SEQ ID NO: 3817171 - RNA, 18 nt, Human
agcuauauuuaaguauuc

SEQ ID NO: 3817172 - RNA, 15 nt, Human
agcuaucaagaggcu

SEQ ID NO: 3817173 - RNA, 17 nt, Human
agcuaucaagugugcuu

SEQ ID NO: 3817174 - RNA, 22 nt, Human
agcuaucaagugugcuuuagcu

SEQ ID NO: 3817175 - RNA, 16 nt, Human
agcuaucuucauguaa

SEQ ID NO: 3817176 - RNA, 13 nt, Human
agcuaugaagaaa

SEQ ID NO: 3817177 - RNA, 17 nt, Human
agcuaugcuguaucugu

SEQ ID NO: 3817178 - RNA, 22 nt, Human
agcuaugcuguaucugugcuuu

SEQ ID NO: 3817179 - RNA, 18 nt, Human
agcuaugggagccccagg

SEQ ID NO: 3817180 - RNA, 22 nt, Human
agcuaugggagccccagggucu

SEQ ID NO: 3817181 - RNA, 17 nt, Human
agcuauggugagaugca

SEQ ID NO: 3817182 - RNA, 18 nt, Human
agcuauguuauauugaaa

SEQ ID NO: 3817183 - RNA, 20 nt, Human
agcuauuacuggaucucuua

SEQ ID NO: 3817184 - RNA, 21 nt, Human
agcuauuacugucugguuuua

SEQ ID NO: 3817185 - RNA, 18 nt, Human
agcuauuagccaggauca

SEQ ID NO: 3817186 - RNA, 20 nt, Human
agcuauuagccaggaucaug

SEQ ID NO: 3817187 - RNA, 22 nt, Human
agcuauuagccaggaucauggu

SEQ ID NO: 3817188 - RNA, 13 nt, Human
agcuauuccuuuc

SEQ ID NO: 3817189 - RNA, 19 nt, Human
agcuauuccuuucccuucc

SEQ ID NO: 3817190 - RNA, 20 nt, Human
agcuauuccuuucccuuccu

SEQ ID NO: 3817191 - RNA, 17 nt, Human
agcuauugccaaccagu

SEQ ID NO: 3817192 - RNA, 17 nt, Human
agcuauuuaugggcccc

SEQ ID NO: 3817193 - RNA, 15 nt, Human
agcuauuuuucuaac

SEQ ID NO: 3817194 - RNA, 17 nt, Human
agcuauuuuucuaacua

SEQ ID NO: 3817195 - RNA, 17 nt, Human
agcucaaauaaaaauaa

SEQ ID NO: 3817196 - RNA, 23 nt, Human
agcucaaaugaaauguaugcauu

SEQ ID NO: 3817197 - RNA, 23 nt, Human
agcucaacuagugggguuuccug

SEQ ID NO: 3817198 - RNA, 22 nt, Human
agcucaacucucuuauugccuc

SEQ ID NO: 3817199 - RNA, 15 nt, Human
agcucaacuuucugu

SEQ ID NO: 3817200 - RNA, 19 nt, Human
agcucaacuuucuguugga

SEQ ID NO: 3817201 - RNA, 13 nt, Human
agcucaaugagca

SEQ ID NO: 3817202 - RNA, 14 nt, Human
agcucaauggacug

SEQ ID NO: 3817203 - RNA, 20 nt, Human
agcucacaaggcagcaaggc

SEQ ID NO: 3817204 - RNA, 20 nt, Human
agcucaccagccccagugcc

SEQ ID NO: 3817205 - RNA, 21 nt, Human
agcucaccagccccagugccc

SEQ ID NO: 3817206 - RNA, 15 nt, Human
agcucaccccccaca

SEQ ID NO: 3817207 - RNA, 18 nt, Human
agcucaccuguugcuuac

SEQ ID NO: 3817208 - RNA, 19 nt, Human
agcucaccuguugcuuaca

SEQ ID NO: 3817209 - RNA, 13 nt, Human
agcucacgucaca

SEQ ID NO: 3817210 - RNA, 21 nt, Human
agcucacguccugagaaagcu

SEQ ID NO: 3817211 - RNA, 19 nt, Human
agcucacuccccaaccccc

SEQ ID NO: 3817212 - RNA, 15 nt, Human
agcucagaaccacag

SEQ ID NO: 3817213 - RNA, 17 nt, Human
agcucagaacccagggc

SEQ ID NO: 3817214 - RNA, 15 nt, Human
agcucagaaggcucu

SEQ ID NO: 3817215 - RNA, 16 nt, Human
agcucagaaggcucuu

SEQ ID NO: 3817216 - RNA, 17 nt, Human
agcucagagagggcagg

SEQ ID NO: 3817217 - RNA, 18 nt, Human
agcucagagaggguggga

SEQ ID NO: 3817218 - RNA, 19 nt, Human
agcucagaggcgcacugug

SEQ ID NO: 3817219 - RNA, 22 nt, Human
agcucagaggcgcacugugacc

SEQ ID NO: 3817220 - RNA, 16 nt, Human
agcucagcccaccccc

SEQ ID NO: 3817221 - RNA, 20 nt, Human
agcucagcccaccccccuca

SEQ ID NO: 3817222 - RNA, 17 nt, Human
agcucagccccagccca

SEQ ID NO: 3817223 - RNA, 20 nt, Human
agcucagccccagcccagcc

SEQ ID NO: 3817224 - RNA, 23 nt, Human
agcucagccccgagcuguccccg

SEQ ID NO: 3817225 - RNA, 12 nt, Human
agcucagcgcca

SEQ ID NO: 3817226 - RNA, 15 nt, Human
agcucagcuuuuugu

SEQ ID NO: 3817227 - RNA, 20 nt, Human
agcucagcuuuuugucuuuu

SEQ ID NO: 3817228 - RNA, 21 nt, Human
agcucaggaaccgaggcaggg

SEQ ID NO: 3817229 - RNA, 17 nt, Human
agcucaggaggcuugga

SEQ ID NO: 3817230 - RNA, 16 nt, Human
agcucagggccuggcu

SEQ ID NO: 3817231 - RNA, 17 nt, Human
agcucaggugucccugc

SEQ ID NO: 3817232 - RNA, 20 nt, Human
agcucaggugucccugcacu

SEQ ID NO: 3817233 - RNA, 21 nt, Human
agcucaggugucccugcacuu

SEQ ID NO: 3817234 - RNA, 22 nt, Human
agcucaggugucccugcacuug

SEQ ID NO: 3817235 - RNA, 23 nt, Human
agcucaguucuagucucucuggg

SEQ ID NO: 3817236 - RNA, 19 nt, Human
agcucaguuuauccaaggu

SEQ ID NO: 3817237 - RNA, 15 nt, Human
agcucaguuuucaac

SEQ ID NO: 3817238 - RNA, 16 nt, Human
agcucaucugcaaaag

SEQ ID NO: 3817239 - RNA, 16 nt, Human
agcucauuaaacuuuu

SEQ ID NO: 3817240 - RNA, 14 nt, Human
agcucauucauuuu

SEQ ID NO: 3817241 - RNA, 20 nt, Human
agcucauucuccuuguguua

SEQ ID NO: 3817242 - RNA, 12 nt, Human
agcucauuucac

SEQ ID NO: 3817243 - RNA, 15 nt, Human
aguggauagaugccc

SEQ ID NO: 3817244 - RNA, 16 nt, Human
aguggaucacaaagug

SEQ ID NO: 3817245 - RNA, 16 nt, Human
aguggaugcugggucc

SEQ ID NO: 3817246 - RNA, 14 nt, Human
aguggauugcauuu

SEQ ID NO: 3817247 - RNA, 19 nt, Human
aguggauugcucaucucag

SEQ ID NO: 3817248 - RNA, 14 nt, Human
aguggauuguuuau

SEQ ID NO: 3817249 - RNA, 20 nt, Human
aguggcagcccagccagcgu

SEQ ID NO: 3817250 - RNA, 16 nt, Human
aguggcaggacaggaa

SEQ ID NO: 3817251 - RNA, 17 nt, Human
aguggcaggacaggaaa

SEQ ID NO: 3817252 - RNA, 13 nt, Human
aguggcagggcac

SEQ ID NO: 3817253 - RNA, 16 nt, Human
aguggcagggcacagg

SEQ ID NO: 3817254 - RNA, 11 nt, Human
aguggcagggg

SEQ ID NO: 3817255 - RNA, 15 nt, Human
aguggcauggcucca

SEQ ID NO: 3817256 - RNA, 18 nt, Human
aguggcauggcuccaguc

SEQ ID NO: 3817257 - RNA, 21 nt, Human
aguggccaagagaugcagugc

SEQ ID NO: 3817258 - RNA, 14 nt, Human
aguggccacuaagc

SEQ ID NO: 3817259 - RNA, 14 nt, Human
aguggccagaccag

SEQ ID NO: 3817260 - RNA, 22 nt, Human
aguggccagaccagagcucugg

SEQ ID NO: 3817261 - RNA, 12 nt, Human
aguggccccacc

SEQ ID NO: 3817262 - RNA, 14 nt, Human
aguggccccaccug

SEQ ID NO: 3817263 - RNA, 16 nt, Human
aguggccccaccuggc

SEQ ID NO: 3817264 - RNA, 18 nt, Human
aguggccccaccuggccc

SEQ ID NO: 3817265 - RNA, 19 nt, Human
aguggccccuuaggccagu

SEQ ID NO: 3817266 - RNA, 21 nt, Human
aguggccuacaaaucaguaau

SEQ ID NO: 3817267 - RNA, 21 nt, Human
aguggccucaacccucccuca

SEQ ID NO: 3817268 - RNA, 22 nt, Human
aguggccucaacccucccucag

SEQ ID NO: 3817269 - RNA, 14 nt, Human
aguggccucuuugu

SEQ ID NO: 3817270 - RNA, 23 nt, Human
aguuuaaccaaaaagaccagacu

SEQ ID NO: 3817271 - RNA, 15 nt, Human
aguuuaauauuaaag

SEQ ID NO: 3817272 - RNA, 20 nt, Human
aguuuaauauuaaagccaug

SEQ ID NO: 3817273 - RNA, 23 nt, Human
aguuuacaaguguauaucagaaa

SEQ ID NO: 3817274 - RNA, 23 nt, Human
aguuuacagcucugacuuuacac

SEQ ID NO: 3817275 - RNA, 18 nt, Human
aguuuacaguaaauaaau

SEQ ID NO: 3817276 - RNA, 22 nt, Human
aguuuacaguaaauaaauuguu

SEQ ID NO: 3817277 - RNA, 14 nt, Human
aguuuaccauuugu

SEQ ID NO: 3817278 - RNA, 17 nt, Human
aguuuaccauuuguaau

SEQ ID NO: 3817279 - RNA, 19 nt, Human
aguuuaccauuuguaauaa

SEQ ID NO: 3817280 - RNA, 17 nt, Human
aguuuacccaugaagau

SEQ ID NO: 3817281 - RNA, 18 nt, Human
aguuuaccuggcuuauuu

SEQ ID NO: 3817282 - RNA, 12 nt, Human
aguuuagaacag

SEQ ID NO: 3817283 - RNA, 17 nt, Human
aguuuagaacagguuuu

SEQ ID NO: 3817284 - RNA, 19 nt, Human
aguuuagaggaaaaaaaug

SEQ ID NO: 3817285 - RNA, 18 nt, Human
aguuuagcccugaacauu

SEQ ID NO: 3817286 - RNA, 22 nt, Human
aguuuagcccugaacauuucau

SEQ ID NO: 3817287 - RNA, 14 nt, Human
aguuuagcucugag

SEQ ID NO: 3817288 - RNA, 15 nt, Human
aguuuagcuggaaaa

SEQ ID NO: 3817289 - RNA, 16 nt, Human
aguuuaggauaaaaua

SEQ ID NO: 3817290 - RNA, 23 nt, Human
aguuuagggaacaauuuggcaau

SEQ ID NO: 3817291 - RNA, 12 nt, Human
aguuuagggugg

SEQ ID NO: 3817292 - RNA, 14 nt, Human
aguuuagugcaucu

SEQ ID NO: 3817293 - RNA, 14 nt, Human
aguuuauacaguuu

SEQ ID NO: 3817294 - RNA, 14 nt, Human
aguuuaucaugaag

SEQ ID NO: 3817295 - RNA, 16 nt, Human
aguuuaucaugaagcc

SEQ ID NO: 3817296 - RNA, 14 nt, Human
aguuuaucauucaa

SEQ ID NO: 3817297 - RNA, 15 nt, Human
aguuuaucauucaag

SEQ ID NO: 3817298 - RNA, 17 nt, Human
aguuuaucauucaagug

SEQ ID NO: 3817299 - RNA, 23 nt, Human
aguuuaucgaccaguuugaaucu

SEQ ID NO: 3817300 - RNA, 18 nt, Human
aguuuaugcagugcugcu

SEQ ID NO: 3817301 - RNA, 16 nt, Human
aguuuauguuuugguc

SEQ ID NO: 3817302 - RNA, 22 nt, Human
aguuuauuccagagcugccagu

SEQ ID NO: 3817303 - RNA, 22 nt, Human
auaauacuauauuuauacugua

SEQ ID NO: 3817304 - RNA, 19 nt, Human
auaauacuugcuuuggaaa

SEQ ID NO: 3817305 - RNA, 15 nt, Human
auaauacuuuguaua

SEQ ID NO: 3817306 - RNA, 18 nt, Human
auaauagauugugaauaa

SEQ ID NO: 3817307 - RNA, 19 nt, Human
auaauagucaccugcuguu

SEQ ID NO: 3817308 - RNA, 14 nt, Human
auaauaguuuuuuc

SEQ ID NO: 3817309 - RNA, 18 nt, Human
auaauauaccaaugcuuu

SEQ ID NO: 3817310 - RNA, 10 nt, Human
auaauauaua

SEQ ID NO: 3817311 - RNA, 15 nt, Human
auaauauauauauau

SEQ ID NO: 3817312 - RNA, 15 nt, Human
auaauauauuuucug

SEQ ID NO: 3817313 - RNA, 20 nt, Human
auaauauccaggucaacaga

SEQ ID NO: 3817314 - RNA, 22 nt, Human
auaauaucuuugugauaauuua

SEQ ID NO: 3817315 - RNA, 13 nt, Human
auaauaugauuuu

SEQ ID NO: 3817316 - RNA, 17 nt, Human
auaauauggcuaugcuu

SEQ ID NO: 3817317 - RNA, 19 nt, Human
auaauauguuuccuucccu

SEQ ID NO: 3817318 - RNA, 12 nt, Human
auaauauugaaa

SEQ ID NO: 3817319 - RNA, 16 nt, Human
auaauauugaaaauug

SEQ ID NO: 3817320 - RNA, 14 nt, Human
auaauauuguuugg

SEQ ID NO: 3817321 - RNA, 17 nt, Human
auaaucaaauacauuuu

SEQ ID NO: 3817322 - RNA, 20 nt, Human
auaaucaagagccuuaaaac

SEQ ID NO: 3817323 - RNA, 22 nt, Human
auaaucaagagccuuaaaacau

SEQ ID NO: 3817324 - RNA, 18 nt, Human
auaaucacaacccuucag

SEQ ID NO: 3817325 - RNA, 13 nt, Human
auaaucagccucu

SEQ ID NO: 3817326 - RNA, 16 nt, Human
auaaucagccucuuaa

SEQ ID NO: 3817327 - RNA, 22 nt, Human
auaaucauuauuacuuuugcug

SEQ ID NO: 3817328 - RNA, 17 nt, Human
auaauccaguaaaauaa

SEQ ID NO: 3817329 - RNA, 21 nt, Human
auaaucccuggaugauauuuu

SEQ ID NO: 3817330 - RNA, 18 nt, Human
auaauccuaaacauauga

SEQ ID NO: 3817331 - RNA, 19 nt, Human
auaauccuugauaauauau

SEQ ID NO: 3817332 - RNA, 22 nt, Human
auaaucggcccacagcucccac

SEQ ID NO: 3817333 - RNA, 14 nt, Human
auaaucuauuucua

SEQ ID NO: 3817334 - RNA, 14 nt, Human
auaaucuguacaau

SEQ ID NO: 3817335 - RNA, 13 nt, Human
auaaucugucaaa

SEQ ID NO: 3817336 - RNA, 19 nt, Human
auaaucugucaaaacacug

SEQ ID NO: 3817337 - RNA, 17 nt, Human
auaaugaacagaacaua

SEQ ID NO: 3817338 - RNA, 14 nt, Human
auaaugaauaaauc

SEQ ID NO: 3817339 - RNA, 15 nt, Human
auaaugaaugaaaca

SEQ ID NO: 3817340 - RNA, 17 nt, Human
auaaugaauggacucaa

SEQ ID NO: 3817341 - RNA, 19 nt, Human
auaaugagcuauuaaaacu

SEQ ID NO: 3817342 - RNA, 17 nt, Human
auaaugaggaguuuaug

SEQ ID NO: 3817343 - RNA, 22 nt, Human
auaaugaggaugauuauuuuca

SEQ ID NO: 3817344 - RNA, 15 nt, Human
auaaugauaaaacac

SEQ ID NO: 3817345 - RNA, 19 nt, Human
auaaugaucgaaaaaauaa

SEQ ID NO: 3817346 - RNA, 22 nt, Human
auaaugaugaugggaauugugu

SEQ ID NO: 3817347 - RNA, 14 nt, Human
auaaugcaaagaau

SEQ ID NO: 3817348 - RNA, 11 nt, Human
auaaugcagua

SEQ ID NO: 3817349 - RNA, 15 nt, Human
auaaugcaguauggu

SEQ ID NO: 3817350 - RNA, 18 nt, Human
auaaugcaguaugguaca

SEQ ID NO: 3817351 - RNA, 18 nt, Human
auaaugccggugagaaua

SEQ ID NO: 3817352 - RNA, 15 nt, Human
auaaugcgugcauac

SEQ ID NO: 3817353 - RNA, 17 nt, Human
auaaugcuaauuuaaag

SEQ ID NO: 3817354 - RNA, 15 nt, Human
auaaugcuacugucu

SEQ ID NO: 3817355 - RNA, 18 nt, Human
auaaugcuguugccucau

SEQ ID NO: 3817356 - RNA, 13 nt, Human
auaauggaaaaaa

SEQ ID NO: 3817357 - RNA, 22 nt, Human
auaauggaaaaaaaaaaaagag

SEQ ID NO: 3817358 - RNA, 22 nt, Human
auaauggaaaaugccaugaauu

SEQ ID NO: 3817359 - RNA, 18 nt, Human
auaauggaagagaaaucu

SEQ ID NO: 3817360 - RNA, 21 nt, Human
auaaugggccacugaaaucug

SEQ ID NO: 3817361 - RNA, 22 nt, Human
auaaugggccacugaaaucugu

SEQ ID NO: 3817362 - RNA, 18 nt, Human
auaaugggcuuagagcag

SEQ ID NO: 3817363 - RNA, 19 nt, Human
auaaugguaccagauaaaa

SEQ ID NO: 3817364 - RNA, 22 nt, Human
auaauggucccauccaggcagu

SEQ ID NO: 3817365 - RNA, 14 nt, Human
auaaugguugacug

SEQ ID NO: 3817366 - RNA, 14 nt, Human
auaauguaagcucu

SEQ ID NO: 3817367 - RNA, 15 nt, Human
auaauguaauuguaa

SEQ ID NO: 3817368 - RNA, 17 nt, Human
auaauguaauuguaauu

SEQ ID NO: 3817369 - RNA, 19 nt, Human
auaauguacugauuucagu

SEQ ID NO: 3817370 - RNA, 20 nt, Human
auaauguacugauuucagua

SEQ ID NO: 3817371 - RNA, 19 nt, Human
auaauguauucauauuugu

SEQ ID NO: 3817372 - RNA, 17 nt, Human
auaauguccauaugcua

SEQ ID NO: 3817373 - RNA, 15 nt, Human
auaaugucccuucac

SEQ ID NO: 3817374 - RNA, 11 nt, Human
auaaugucucu

SEQ ID NO: 3817375 - RNA, 10 nt, Human
auaaugucuu

SEQ ID NO: 3817376 - RNA, 17 nt, Human
auaaugucuuguuaaua

SEQ ID NO: 3817377 - RNA, 13 nt, Human
auaaugugaaaau

SEQ ID NO: 3817378 - RNA, 16 nt, Human
auaaugugaaaauggu

SEQ ID NO: 3817379 - RNA, 18 nt, Human
auaaugugaaacuggauu

SEQ ID NO: 3817380 - RNA, 21 nt, Human
auaaugugaaacuggauuaaa

SEQ ID NO: 3817381 - RNA, 18 nt, Human
auaauguguaguucaugu

SEQ ID NO: 3817382 - RNA, 23 nt, Human
auaauguguaguucauguaaaua

SEQ ID NO: 3817383 - RNA, 14 nt, Human
auaauguguguaug

SEQ ID NO: 3817384 - RNA, 18 nt, Human
auaauguguguaugugua

SEQ ID NO: 3817385 - RNA, 19 nt, Human
auaauguguguauguguau

SEQ ID NO: 3817386 - RNA, 12 nt, Human
auaauguuaaca

SEQ ID NO: 3817387 - RNA, 20 nt, Human
auaauguuaaccaaggaaau

SEQ ID NO: 3817388 - RNA, 21 nt, Human
auaauguugugguuuguugcc

SEQ ID NO: 3817389 - RNA, 14 nt, Human
auaauguuguuauu

SEQ ID NO: 3817390 - RNA, 19 nt, Human
auaauguuguuauuuaaag

SEQ ID NO: 3817391 - RNA, 22 nt, Human
auaauguuuaauauugagaaag

SEQ ID NO: 3817392 - RNA, 17 nt, Human
auaauguuuauuaaaug

SEQ ID NO: 3817393 - RNA, 23 nt, Human
auaauguuucaaacauauauaac

SEQ ID NO: 3817394 - RNA, 17 nt, Human
auaauguuuuuaauauu

SEQ ID NO: 3817395 - RNA, 12 nt, Human
auaauuaaagug

SEQ ID NO: 3817396 - RNA, 20 nt, Human
auaauuaaauuuugaguucu

SEQ ID NO: 3817397 - RNA, 21 nt, Human
auaauuaaccaagguagaaug

SEQ ID NO: 3817398 - RNA, 22 nt, Human
auaauuacagugccuaaaauaa

SEQ ID NO: 3817399 - RNA, 21 nt, Human
auaauuagauccauuaauuua

SEQ ID NO: 3817400 - RNA, 16 nt, Human
auaauuagguuaacau

SEQ ID NO: 3817401 - RNA, 19 nt, Human
auaauuauauaacuguauu

SEQ ID NO: 3817402 - RNA, 21 nt, Human
auaauuaucggaagcagugcc

SEQ ID NO: 3817403 - RNA, 14 nt, Human
auaauuaugacagu

SEQ ID NO: 3817404 - RNA, 18 nt, Human
auaauuaugacaguuaua

SEQ ID NO: 3817405 - RNA, 21 nt, Human
auaauuauuuauuuaauaaca

SEQ ID NO: 3817406 - RNA, 18 nt, Human
auaauucaauuuuaaaga

SEQ ID NO: 3817407 - RNA, 23 nt, Human
auaauucacauuguauucagagu

SEQ ID NO: 3817408 - RNA, 17 nt, Human
auaauucaguauguuuu

SEQ ID NO: 3817409 - RNA, 13 nt, Human
auaauucauauuc

SEQ ID NO: 3817410 - RNA, 12 nt, Human
auaauucccuau

SEQ ID NO: 3817411 - RNA, 17 nt, Human
auaauucccuaucuuuu

SEQ ID NO: 3817412 - RNA, 19 nt, Human
auaauucccuaucuuuuag

SEQ ID NO: 3817413 - RNA, 19 nt, Human
auaauuccuacagcacuac

SEQ ID NO: 3817414 - RNA, 20 nt, Human
aguuuguagguaaaauguau

SEQ ID NO: 3817415 - RNA, 17 nt, Human
aguuuguauaacuucuu

SEQ ID NO: 3817416 - RNA, 21 nt, Human
aguuuguauagaguucauccc

SEQ ID NO: 3817417 - RNA, 14 nt, Human
aguuugucagacuu

SEQ ID NO: 3817418 - RNA, 21 nt, Human
aguuugucgcucaugugugca

SEQ ID NO: 3817419 - RNA, 14 nt, Human
aguuuguguguugu

SEQ ID NO: 3817420 - RNA, 19 nt, Human
aguuuguguguugucuuga

SEQ ID NO: 3817421 - RNA, 22 nt, Human
aguuuguuaguaugaggcauuu

SEQ ID NO: 3817422 - RNA, 14 nt, Human
aguuuguuuacaca

SEQ ID NO: 3817423 - RNA, 22 nt, Human
aguuuguuucuuugaauuuuca

SEQ ID NO: 3817424 - RNA, 23 nt, Human
aguuuuaaaaaaauaaaacauuu

SEQ ID NO: 3817425 - RNA, 22 nt, Human
aguuuuaaaaagccaguuuggg

SEQ ID NO: 3817426 - RNA, 23 nt, Human
aguuuuaaacucauuuuugccau

SEQ ID NO: 3817427 - RNA, 11 nt, Human
aguuuuaaagu

SEQ ID NO: 3817428 - RNA, 18 nt, Human
aguuuuaacuagaauuua

SEQ ID NO: 3817429 - RNA, 15 nt, Human
aguuuuacaguguuu

SEQ ID NO: 3817430 - RNA, 23 nt, Human
aguuuuacugucuauuaauauuc

SEQ ID NO: 3817431 - RNA, 19 nt, Human
aguuuuacuuuuaaacugu

SEQ ID NO: 3817432 - RNA, 18 nt, Human
aguuuuaggguacaugug

SEQ ID NO: 3817433 - RNA, 21 nt, Human
aguuuuaguugcagaaacauu

SEQ ID NO: 3817434 - RNA, 24 nt, Human
aguuuuauaauccuuaaaucuuaa

SEQ ID NO: 3817435 - RNA, 14 nt, Human
aguuuuauauauua

SEQ ID NO: 3817436 - RNA, 16 nt, Human
aguuuuauauauuaua

SEQ ID NO: 3817437 - RNA, 21 nt, Human
aguuuuauauauuauauggaa

SEQ ID NO: 3817438 - RNA, 14 nt, Human
aguuuuauaugcuu

SEQ ID NO: 3817439 - RNA, 15 nt, Human
aguuuuauaugcuuu

SEQ ID NO: 3817440 - RNA, 16 nt, Human
aguuuuauaugcuuua

SEQ ID NO: 3817441 - RNA, 17 nt, Human
aguuuuauaugcuuuau

SEQ ID NO: 3817442 - RNA, 14 nt, Human
aguuuuaucauuuu

SEQ ID NO: 3817443 - RNA, 14 nt, Human
aguuuuaugcucuu

SEQ ID NO: 3817444 - RNA, 21 nt, Human
aguuuuaugcucuuuuuuacu

SEQ ID NO: 3817445 - RNA, 24 nt, Human
aguuuuaugcucuuuuuuacucau

SEQ ID NO: 3817446 - RNA, 23 nt, Human
aguuuuauuaauaaacauucuau

SEQ ID NO: 3817447 - RNA, 18 nt, Human
aguuuuauuuauauuuau

SEQ ID NO: 3817448 - RNA, 23 nt, Human
aguuuuauuuauauuuauugacu

SEQ ID NO: 3817449 - RNA, 13 nt, Human
aguuuuauuuucu

SEQ ID NO: 3817450 - RNA, 21 nt, Human
aguuuucaagucaaauuaaua

SEQ ID NO: 3817451 - RNA, 16 nt, Human
aguuuucagaaccucu

SEQ ID NO: 3817452 - RNA, 21 nt, Human
aguuuucagaaccucuucccc

SEQ ID NO: 3817453 - RNA, 22 nt, Human
aguuuucagaaccucuucccca

SEQ ID NO: 3817454 - RNA, 17 nt, Human
aguuuucaguuuguaua

SEQ ID NO: 3817455 - RNA, 14 nt, Human
aguuuucaugugcu

SEQ ID NO: 3817456 - RNA, 15 nt, Human
aguuuucauuaaauc

SEQ ID NO: 3817457 - RNA, 21 nt, Human
aguuuuccaugaaaacguuuu

SEQ ID NO: 3817458 - RNA, 22 nt, Human
aguuuuccauggcaggaaggcu

SEQ ID NO: 3817459 - RNA, 21 nt, Human
aguuuuccauggucacagaga

SEQ ID NO: 3817460 - RNA, 16 nt, Human
aguuuucccugaaguu

SEQ ID NO: 3817461 - RNA, 18 nt, Human
aguuuucccuugaggaaa

SEQ ID NO: 3817462 - RNA, 23 nt, Human
auaauuuccauuuacuuaagacu

SEQ ID NO: 3817463 - RNA, 18 nt, Human
auaauuucccaauuagga

SEQ ID NO: 3817464 - RNA, 21 nt, Human
auaauuucccaauuaggaagu

SEQ ID NO: 3817465 - RNA, 13 nt, Human
auaauuucgagau

SEQ ID NO: 3817466 - RNA, 22 nt, Human
auaauuuguacauauguaaaau

SEQ ID NO: 3817467 - RNA, 15 nt, Human
auaauuuuaagaaau

SEQ ID NO: 3817468 - RNA, 21 nt, Human
auaauuuuaagaaaucaaaga

SEQ ID NO: 3817469 - RNA, 21 nt, Human
auaauuuuagugucauuucca

SEQ ID NO: 3817470 - RNA, 13 nt, Human
auaauuuuaugaa

SEQ ID NO: 3817471 - RNA, 12 nt, Human
auaauuuuguaa

SEQ ID NO: 3817472 - RNA, 13 nt, Human
auaauuuuguaau

SEQ ID NO: 3817473 - RNA, 23 nt, Human
auaauuuuuaaaguauauauuua

SEQ ID NO: 3817474 - RNA, 14 nt, Human
auaauuuuuauaug

SEQ ID NO: 3817475 - RNA, 16 nt, Human
auaauuuuuauauuug

SEQ ID NO: 3817476 - RNA, 19 nt, Human
auaauuuuuauauuugaaa

SEQ ID NO: 3817477 - RNA, 22 nt, Human
auaauuuuuuuuaaaauagaaa

SEQ ID NO: 3817478 - RNA, 22 nt, Human
auacaaaaaaaaaaaaaaauua

SEQ ID NO: 3817479 - RNA, 15 nt, Human
auacaaaagcaugug

SEQ ID NO: 3817480 - RNA, 22 nt, Human
auacaaacaauggaaacugaau

SEQ ID NO: 3817481 - RNA, 14 nt, Human
auacaaauauauug

SEQ ID NO: 3817482 - RNA, 20 nt, Human
auacaaauggauuuugggag

SEQ ID NO: 3817483 - RNA, 16 nt, Human
auacaaauuaaaaaga

SEQ ID NO: 3817484 - RNA, 14 nt, Human
auacaaauuagaaa

SEQ ID NO: 3817485 - RNA, 15 nt, Human
auacaaauuagaaaa

SEQ ID NO: 3817486 - RNA, 19 nt, Human
auacaacaaaggcaaguua

SEQ ID NO: 3817487 - RNA, 12 nt, Human
auacaacagugc

SEQ ID NO: 3817488 - RNA, 16 nt, Human
auacaacagugcuaaa

SEQ ID NO: 3817489 - RNA, 21 nt, Human
auacaacagugcuaaaaaugg

SEQ ID NO: 3817490 - RNA, 16 nt, Human
auacaaccucccucuu

SEQ ID NO: 3817491 - RNA, 18 nt, Human
auacaaccucccucuugu

SEQ ID NO: 3817492 - RNA, 21 nt, Human
auacaaccucccucuuguuuu

SEQ ID NO: 3817493 - RNA, 16 nt, Human
auacaacuuaaauaau

SEQ ID NO: 3817494 - RNA, 12 nt, Human
auacaagacugc

SEQ ID NO: 3817495 - RNA, 12 nt, Human
auacaagauaag

SEQ ID NO: 3817496 - RNA, 17 nt, Human
auacaagauugaaaauc

SEQ ID NO: 3817497 - RNA, 22 nt, Human
auacaagccauucuaaggaaau

SEQ ID NO: 3817498 - RNA, 12 nt, Human
auacaagguaua

SEQ ID NO: 3817499 - RNA, 17 nt, Human
auacaaguucuauuuaa

SEQ ID NO: 3817500 - RNA, 15 nt, Human
auacaaguuuucaua

SEQ ID NO: 3817501 - RNA, 20 nt, Human
auacaauaaacuauuggaaa

SEQ ID NO: 3817502 - RNA, 17 nt, Human
auacaauaaauugcuaa

SEQ ID NO: 3817503 - RNA, 14 nt, Human
auacaauaacauaa

SEQ ID NO: 3817504 - RNA, 18 nt, Human
auacaauaauggaaaaaa

SEQ ID NO: 3817505 - RNA, 13 nt, Human
auacaauauauaa

SEQ ID NO: 3817506 - RNA, 20 nt, Human
auacaauauauaaaaauaua

SEQ ID NO: 3817507 - RNA, 12 nt, Human
auacaaucagcu

SEQ ID NO: 3817508 - RNA, 14 nt, Human
auacaaucagcugc

SEQ ID NO: 3817509 - RNA, 15 nt, Human
auacaaucagcugcu

SEQ ID NO: 3817510 - RNA, 16 nt, Human
auacaaucagcugcuu

SEQ ID NO: 3817511 - RNA, 17 nt, Human
auacaaugaacacuuau

SEQ ID NO: 3817512 - RNA, 16 nt, Human
auacaaugacaaguau

SEQ ID NO: 3817513 - RNA, 23 nt, Human
auacaaugcugugcccuaaagug

SEQ ID NO: 3817514 - RNA, 20 nt, Human
auacaauguauuuauuuaaa

SEQ ID NO: 3817515 - RNA, 17 nt, Human
auacaauuuuuuuuauu

SEQ ID NO: 3817516 - RNA, 18 nt, Human
auacacaaaaucaaauaa

SEQ ID NO: 3817517 - RNA, 11 nt, Human
auacacaaauu

SEQ ID NO: 3817518 - RNA, 15 nt, Human
auacacaaguaaaca

SEQ ID NO: 3817519 - RNA, 19 nt, Human
auacacacacaaagagagu

SEQ ID NO: 3817520 - RNA, 15 nt, Human
auacacacacacaca

SEQ ID NO: 3817521 - RNA, 16 nt, Human
auacacacacacacac

SEQ ID NO: 3817522 - RNA, 11 nt, Human
auacacacgcu

SEQ ID NO: 3817523 - RNA, 15 nt, Human
auacacacgcugccu

SEQ ID NO: 3817524 - RNA, 14 nt, Human
auacacauauaccu

SEQ ID NO: 3817525 - RNA, 20 nt, Human
auacaccacuacauucuguu

SEQ ID NO: 3817526 - RNA, 23 nt, Human
auacacccccucuucugagcaca

SEQ ID NO: 3817527 - RNA, 19 nt, Human
auacacgaauagacaucaa

SEQ ID NO: 3817528 - RNA, 19 nt, Human
auacacuaaccaaaucucu

SEQ ID NO: 3817529 - RNA, 21 nt, Human
auacacugaaguuaacagaga

SEQ ID NO: 3817530 - RNA, 17 nt, Human
auacacuguguaaauac

SEQ ID NO: 3817531 - RNA, 22 nt, Human
auacacuuacacuuuaugcaca

SEQ ID NO: 3817532 - RNA, 22 nt, Human
auacacuuauuggaacucugcu

SEQ ID NO: 3817533 - RNA, 15 nt, Human
auacacuuguauaaa

SEQ ID NO: 3817534 - RNA, 22 nt, Human
auacacuuguauaaauguauau

SEQ ID NO: 3817535 - RNA, 14 nt, Human
auacagagaaguca

SEQ ID NO: 3817536 - RNA, 14 nt, Human
auacagauaacauu

SEQ ID NO: 3817537 - RNA, 23 nt, Human
auacagauagauauaugcucugc

SEQ ID NO: 3817538 - RNA, 13 nt, Human
auacagauauauu

SEQ ID NO: 3817539 - RNA, 14 nt, Human
auacagaugaaaau

SEQ ID NO: 3817540 - RNA, 15 nt, Human
auacagaugaaaauu

SEQ ID NO: 3817541 - RNA, 20 nt, Human
auacagaugaaaauuugaga

SEQ ID NO: 3817542 - RNA, 16 nt, Human
auacagauuuugauag

SEQ ID NO: 3817543 - RNA, 14 nt, Human
auacagcagcaaga

SEQ ID NO: 3817544 - RNA, 15 nt, Human
auacagcagcaagaa

SEQ ID NO: 3817545 - RNA, 15 nt, Human
auacagcaguagaca

SEQ ID NO: 3817546 - RNA, 17 nt, Human
auacagcaguagacauu

SEQ ID NO: 3817547 - RNA, 19 nt, Human
auacagcuuucugaccuuc

SEQ ID NO: 3817548 - RNA, 14 nt, Human
auacaggaaaagcu

SEQ ID NO: 3817549 - RNA, 21 nt, Human
auacaggauuugaacucagau

SEQ ID NO: 3817550 - RNA, 16 nt, Human
auacaggggaauauuu

SEQ ID NO: 3817551 - RNA, 19 nt, Human
auacaggggaauauuuuau

SEQ ID NO: 3817552 - RNA, 18 nt, Human
auacaguaacuuuaugug

SEQ ID NO: 3817553 - RNA, 19 nt, Human
auacaguaacuuuaugugu

SEQ ID NO: 3817554 - RNA, 20 nt, Human
auacaguaacuuuaugugua

SEQ ID NO: 3817555 - RNA, 18 nt, Human
auacaguauaaaaauaga

SEQ ID NO: 3817556 - RNA, 15 nt, Human
auacaguauucugua

SEQ ID NO: 3817557 - RNA, 15 nt, Human
auacagucaacaagc

SEQ ID NO: 3817558 - RNA, 12 nt, Human
auagugacuuuu

SEQ ID NO: 3817559 - RNA, 17 nt, Human
auagugacuuuucaagu

SEQ ID NO: 3817560 - RNA, 21 nt, Human
auagugacuuuucaaguauuu

SEQ ID NO: 3817561 - RNA, 13 nt, Human
auagugcaauaua

SEQ ID NO: 3817562 - RNA, 17 nt, Human
auagugcacaaaaugaa

SEQ ID NO: 3817563 - RNA, 22 nt, Human
auagugcauuguuucugugggc

SEQ ID NO: 3817564 - RNA, 22 nt, Human
auagugcuaacaugaagaccuu

SEQ ID NO: 3817565 - RNA, 14 nt, Human
auagugcuauauau

SEQ ID NO: 3817566 - RNA, 20 nt, Human
auagugcuauauauauaaau

SEQ ID NO: 3817567 - RNA, 22 nt, Human
auagugcuauauauauaaauau

SEQ ID NO: 3817568 - RNA, 15 nt, Human
auaguggaaaaacac

SEQ ID NO: 3817569 - RNA, 21 nt, Human
auaguggccagaccagagcuc

SEQ ID NO: 3817570 - RNA, 22 nt, Human
auagugggcccuccgacagccc

SEQ ID NO: 3817571 - RNA, 14 nt, Human
auaguguaaaauaa

SEQ ID NO: 3817572 - RNA, 14 nt, Human
auaguguaacuugc

SEQ ID NO: 3817573 - RNA, 14 nt, Human
auagugugaaauau

SEQ ID NO: 3817574 - RNA, 15 nt, Human
auagugugaaauaua

SEQ ID NO: 3817575 - RNA, 13 nt, Human
auaguguguucug

SEQ ID NO: 3817576 - RNA, 14 nt, Human
auaguguguucuga

SEQ ID NO: 3817577 - RNA, 21 nt, Human
auaguguguucugauuagaaa

SEQ ID NO: 3817578 - RNA, 12 nt, Human
auaguguuaauc

SEQ ID NO: 3817579 - RNA, 18 nt, Human
auaguguuaaucaauuua

SEQ ID NO: 3817580 - RNA, 15 nt, Human
auaguuaacacacua

SEQ ID NO: 3817581 - RNA, 22 nt, Human
auaguuaagcgugcauaaguua

SEQ ID NO: 3817582 - RNA, 14 nt, Human
auaguuaauauagu

SEQ ID NO: 3817583 - RNA, 13 nt, Human
auaguuacuguaa

SEQ ID NO: 3817584 - RNA, 20 nt, Human
auaguuacuguguaaacuca

SEQ ID NO: 3817585 - RNA, 20 nt, Human
auaguuacuguguaauuagu

SEQ ID NO: 3817586 - RNA, 15 nt, Human
auaguuagaaccugg

SEQ ID NO: 3817587 - RNA, 15 nt, Human
auaguucaaggaacu

SEQ ID NO: 3817588 - RNA, 14 nt, Human
auaguucacccccu

SEQ ID NO: 3817589 - RNA, 18 nt, Human
auaguucuagugcagcug

SEQ ID NO: 3817590 - RNA, 21 nt, Human
auaguugaaccuauuucucuu

SEQ ID NO: 3817591 - RNA, 23 nt, Human
auaguugagccagcagacauugu

SEQ ID NO: 3817592 - RNA, 16 nt, Human
auaguuggucaucuag

SEQ ID NO: 3817593 - RNA, 20 nt, Human
auaguuguaccgcaauguga

SEQ ID NO: 3817594 - RNA, 17 nt, Human
auaguuguggacauuua

SEQ ID NO: 3817595 - RNA, 13 nt, Human
auaguuuaaaaca

SEQ ID NO: 3817596 - RNA, 17 nt, Human
auaguuuaccugaauaa

SEQ ID NO: 3817597 - RNA, 22 nt, Human
auaguuuacuauuuuacuucua

SEQ ID NO: 3817598 - RNA, 14 nt, Human
auaguuuauugaca

SEQ ID NO: 3817599 - RNA, 14 nt, Human
auaguuucagauau

SEQ ID NO: 3817600 - RNA, 19 nt, Human
auaguuuggauauguaaaa

SEQ ID NO: 3817601 - RNA, 12 nt, Human
auaguuuggcau

SEQ ID NO: 3817602 - RNA, 17 nt, Human
auaguuuuaaacucauu

SEQ ID NO: 3817603 - RNA, 24 nt, Human
auaguuuuauuuauauuuauugac

SEQ ID NO: 3817604 - RNA, 13 nt, Human
auaguuuucaucc

SEQ ID NO: 3817605 - RNA, 22 nt, Human
auaguuuucauccauaacugaa

SEQ ID NO: 3817606 - RNA, 14 nt, Human
auauaaaaacaaaa

SEQ ID NO: 3817607 - RNA, 23 nt, Human
auauaaaaaccccaaacuguuga

SEQ ID NO: 3817608 - RNA, 17 nt, Human
auauaaaaagaaaagau

SEQ ID NO: 3817609 - RNA, 14 nt, Human
auauaaaaauauau

SEQ ID NO: 3817610 - RNA, 17 nt, Human
auauaaaacaaauaaaa

SEQ ID NO: 3817611 - RNA, 22 nt, Human
auauaaaacugcguuaaaggcu

SEQ ID NO: 3817612 - RNA, 22 nt, Human
auauaaaacuguacuucacugu

SEQ ID NO: 3817613 - RNA, 21 nt, Human
auauaaaaggcaaauguguac

SEQ ID NO: 3817614 - RNA, 23 nt, Human
auauaaaaggcaaauguguacau

SEQ ID NO: 3817615 - RNA, 16 nt, Human
auauaaaauaaauaua

SEQ ID NO: 3817616 - RNA, 14 nt, Human
auauaaaauaguug

SEQ ID NO: 3817617 - RNA, 13 nt, Human
auauaaaauauuu

SEQ ID NO: 3817618 - RNA, 12 nt, Human
auauaaaaugcc

SEQ ID NO: 3817619 - RNA, 15 nt, Human
auauaaaaugccaag

SEQ ID NO: 3817620 - RNA, 13 nt, Human
auauaaaaugugc

SEQ ID NO: 3817621 - RNA, 19 nt, Human
auauaaaccuaaaaaagau

SEQ ID NO: 3817622 - RNA, 18 nt, Human
auauaaagaauauauaua

SEQ ID NO: 3817623 - RNA, 18 nt, Human
auauaaagaccuauaaau

SEQ ID NO: 3817624 - RNA, 20 nt, Human
auauaaagacguuuuauaag

SEQ ID NO: 3817625 - RNA, 22 nt, Human
auauaaagacguuuuauaagca

SEQ ID NO: 3817626 - RNA, 18 nt, Human
auauaaagagaaaauuga

SEQ ID NO: 3817627 - RNA, 19 nt, Human
auauaaagagaaaauugaa

SEQ ID NO: 3817628 - RNA, 20 nt, Human
auauaaagggggagggaaau

SEQ ID NO: 3817629 - RNA, 21 nt, Human
auauaaagggggagggaaaua

SEQ ID NO: 3817630 - RNA, 14 nt, Human
auauaaaguauaga

SEQ ID NO: 3817631 - RNA, 24 nt, Human
auauaaaguaucaucaguguagaa

SEQ ID NO: 3817632 - RNA, 15 nt, Human
auauaaauaaaacau

SEQ ID NO: 3817633 - RNA, 14 nt, Human
auauaaauaaauau

SEQ ID NO: 3817634 - RNA, 15 nt, Human
auauaaauaaauaua

SEQ ID NO: 3817635 - RNA, 22 nt, Human
auauaaauaaauauauauaucc

SEQ ID NO: 3817636 - RNA, 11 nt, Human
auauaaauaua

SEQ ID NO: 3817637 - RNA, 15 nt, Human
auauaaauauauaua

SEQ ID NO: 3817638 - RNA, 20 nt, Human
auauaaauauauauaaauau

SEQ ID NO: 3817639 - RNA, 21 nt, Human
auauaaauauauauaaauaua

SEQ ID NO: 3817640 - RNA, 23 nt, Human
auauaaauauauauauauauaaa

SEQ ID NO: 3817641 - RNA, 18 nt, Human
auauaaaugcaaauaaca

SEQ ID NO: 3817642 - RNA, 22 nt, Human
auauaaaugcaauauuaaugcc

SEQ ID NO: 3817643 - RNA, 23 nt, Human
auauaaauggcugguuuuuagaa

SEQ ID NO: 3817644 - RNA, 14 nt, Human
auauaaaugugugu

SEQ ID NO: 3817645 - RNA, 22 nt, Human
auauaaauucacuuucauuuuu

SEQ ID NO: 3817646 - RNA, 15 nt, Human
auauaaauucugugg

SEQ ID NO: 3817647 - RNA, 13 nt, Human
auauaacauauau

SEQ ID NO: 3817648 - RNA, 18 nt, Human
auauaacaugaaaugaua

SEQ ID NO: 3817649 - RNA, 20 nt, Human
auauaacaugaaaugauaga

SEQ ID NO: 3817650 - RNA, 16 nt, Human
auauaacuuauauugu

SEQ ID NO: 3817651 - RNA, 21 nt, Human
auauaacuuauauuguaagaa

SEQ ID NO: 3817652 - RNA, 22 nt, Human
auauaacuuauauuguaagaaa

SEQ ID NO: 3817653 - RNA, 14 nt, Human
auauaacuuuagaa

SEQ ID NO: 3817654 - RNA, 18 nt, Human
auauaagaaagacaucuu

SEQ ID NO: 3817655 - RNA, 14 nt, Human
auauaagauuuucu

SEQ ID NO: 3817656 - RNA, 12 nt, Human
auauaagcuuuu

SEQ ID NO: 3817657 - RNA, 14 nt, Human
auauaagggaagua

SEQ ID NO: 3817658 - RNA, 13 nt, Human
auauaagguuuuu

SEQ ID NO: 3817659 - RNA, 17 nt, Human
auauaaguauucuaaau

SEQ ID NO: 3817660 - RNA, 13 nt, Human
auauaagugcugu

SEQ ID NO: 3817661 - RNA, 14 nt, Human
auauaaguguacau

SEQ ID NO: 3817662 - RNA, 13 nt, Human
aggaaagucauug

SEQ ID NO: 3817663 - RNA, 19 nt, Human
aggaaagucauuggcuuua

SEQ ID NO: 3817664 - RNA, 22 nt, Human
aggaaagucauuggcuuuaucc

SEQ ID NO: 3817665 - RNA, 22 nt, Human
aggaaaguggcaccugucugcu

SEQ ID NO: 3817666 - RNA, 22 nt, Human
aggaaaguucagaguuuucugg

SEQ ID NO: 3817667 - RNA, 20 nt, Human
aggaaaguuucuuugaaaau

SEQ ID NO: 3817668 - RNA, 17 nt, Human
aggaaauaaaaccuuuc

SEQ ID NO: 3817669 - RNA, 22 nt, Human
aggaaauaaaaccuuucaaauu

SEQ ID NO: 3817670 - RNA, 20 nt, Human
aggaaauaagaaaaaucaug

SEQ ID NO: 3817671 - RNA, 15 nt, Human
aggaaauauacuuuu

SEQ ID NO: 3817672 - RNA, 18 nt, Human
aggaaauauuuauuuuaa

SEQ ID NO: 3817673 - RNA, 15 nt, Human
aggaaaucaccgaaa

SEQ ID NO: 3817674 - RNA, 19 nt, Human
aggaaaucaccgaaaacgu

SEQ ID NO: 3817675 - RNA, 16 nt, Human
aggaaaucucacccca

SEQ ID NO: 3817676 - RNA, 13 nt, Human
aggaaaugaaugu

SEQ ID NO: 3817677 - RNA, 14 nt, Human
aggaaaugaaugug

SEQ ID NO: 3817678 - RNA, 23 nt, Human
aggaaaugguauccagaauggaa

SEQ ID NO: 3817679 - RNA, 23 nt, Human
aggaaaugugguagccucacuuu

SEQ ID NO: 3817680 - RNA, 22 nt, Human
aggaaauguuuuuaauaaaaga

SEQ ID NO: 3817681 - RNA, 23 nt, Human
aggaaauugagauuagagggagg

SEQ ID NO: 3817682 - RNA, 14 nt, Human
aggaaauuugcagc

SEQ ID NO: 3817683 - RNA, 15 nt, Human
aggaacaaaaaaacc

SEQ ID NO: 3817684 - RNA, 18 nt, Human
aggaacaaaaaaaccaca

SEQ ID NO: 3817685 - RNA, 13 nt, Human
aggaacaaacagg

SEQ ID NO: 3817686 - RNA, 14 nt, Human
aggaacaaacaggg

SEQ ID NO: 3817687 - RNA, 14 nt, Human
aggaacaaaucuuc

SEQ ID NO: 3817688 - RNA, 16 nt, Human
aggaacaaaucuuccu

SEQ ID NO: 3817689 - RNA, 12 nt, Human
aggaacaaggca

SEQ ID NO: 3817690 - RNA, 19 nt, Human
aggaacaaggcaaggcugu

SEQ ID NO: 3817691 - RNA, 17 nt, Human
aggaacaaucggcugca

SEQ ID NO: 3817692 - RNA, 12 nt, Human
aggaacacuccu

SEQ ID NO: 3817693 - RNA, 15 nt, Human
aggaacacuccuuca

SEQ ID NO: 3817694 - RNA, 16 nt, Human
aggaacauaugaaaau

SEQ ID NO: 3817695 - RNA, 15 nt, Human
aggaaccaaagcgaa

SEQ ID NO: 3817696 - RNA, 21 nt, Human
aggaaccaacaaucuuccugu

SEQ ID NO: 3817697 - RNA, 17 nt, Human
aggaaccacaccacauc

SEQ ID NO: 3817698 - RNA, 16 nt, Human
aggaaccgaggcaggg

SEQ ID NO: 3817699 - RNA, 19 nt, Human
aggaaccuccuccacacca

SEQ ID NO: 3817700 - RNA, 16 nt, Human
aggaaccucgaguacu

SEQ ID NO: 3817701 - RNA, 18 nt, Human
aggaaccucugauuuauu

SEQ ID NO: 3817702 - RNA, 22 nt, Human
aggaaccucugauuuauuuugu

SEQ ID NO: 3817703 - RNA, 22 nt, Human
auacacacacacacacagccac

SEQ ID NO: 3817704 - RNA, 14 nt, Human
auacacacauaugu

SEQ ID NO: 3817705 - RNA, 16 nt, Human
auacacacgcugccuu

SEQ ID NO: 3817706 - RNA, 10 nt, Human
auacacauaa

SEQ ID NO: 3817707 - RNA, 12 nt, Human
auacacauaauu

SEQ ID NO: 3817708 - RNA, 22 nt, Human
auacacauaauuaaagugucca

SEQ ID NO: 3817709 - RNA, 23 nt, Human
auacacauaauuaaaguguccau

SEQ ID NO: 3817710 - RNA, 22 nt, Human
auacacauuugcuacuguugua

SEQ ID NO: 3817711 - RNA, 16 nt, Human
auacaccaauugauuu

SEQ ID NO: 3817712 - RNA, 15 nt, Human
auacaccacuacauu

SEQ ID NO: 3817713 - RNA, 17 nt, Human
auacaccacuacauucu

SEQ ID NO: 3817714 - RNA, 18 nt, Human
auacaccacuacauucug

SEQ ID NO: 3817715 - RNA, 24 nt, Human
auacacccaagaugggcaucuuuu

SEQ ID NO: 3817716 - RNA, 14 nt, Human
auacaccgggccug

SEQ ID NO: 3817717 - RNA, 21 nt, Human
auacaccucaacuaaauccaa

SEQ ID NO: 3817718 - RNA, 15 nt, Human
auacacgaaagagag

SEQ ID NO: 3817719 - RNA, 20 nt, Human
auacacgaauagacaucaaa

SEQ ID NO: 3817720 - RNA, 18 nt, Human
auacacuguguaaauacc

SEQ ID NO: 3817721 - RNA, 16 nt, Human
auacacuugcccugcu

SEQ ID NO: 3817722 - RNA, 21 nt, Human
auacacuuggaguuugcauuc

SEQ ID NO: 3817723 - RNA, 22 nt, Human
auacacuuggggagauuugcca

SEQ ID NO: 3817724 - RNA, 15 nt, Human
auacacuuuguugca

SEQ ID NO: 3817725 - RNA, 21 nt, Human
auacacuuuguugcaagaugu

SEQ ID NO: 3817726 - RNA, 23 nt, Human
auacacuuuguugcaagauguga

SEQ ID NO: 3817727 - RNA, 23 nt, Human
auacacuuuuucucuuuccauga

SEQ ID NO: 3817728 - RNA, 14 nt, Human
auacagaacucuuu

SEQ ID NO: 3817729 - RNA, 16 nt, Human
auacagaacucuuuca

SEQ ID NO: 3817730 - RNA, 18 nt, Human
auacagaaucuuguuuug

SEQ ID NO: 3817731 - RNA, 20 nt, Human
auacagaauuacuguaacug

SEQ ID NO: 3817732 - RNA, 12 nt, Human
auacagacacua

SEQ ID NO: 3817733 - RNA, 15 nt, Human
auacagacacuaagu

SEQ ID NO: 3817734 - RNA, 18 nt, Human
auacagacacuaaguuau

SEQ ID NO: 3817735 - RNA, 18 nt, Human
auacagaccgaacuguug

SEQ ID NO: 3817736 - RNA, 15 nt, Human
auacagagaagucac

SEQ ID NO: 3817737 - RNA, 16 nt, Human
auacagaggcaacugc

SEQ ID NO: 3817738 - RNA, 18 nt, Human
auacagauaaaugauuca

SEQ ID NO: 3817739 - RNA, 15 nt, Human
auacagauaacauua

SEQ ID NO: 3817740 - RNA, 14 nt, Human
auacagauauauuu

SEQ ID NO: 3817741 - RNA, 17 nt, Human
auacagaucaucuugga

SEQ ID NO: 3817742 - RNA, 14 nt, Human
auacagauuuugau

SEQ ID NO: 3817743 - RNA, 18 nt, Human
auacagauuuugauagca

SEQ ID NO: 3817744 - RNA, 23 nt, Human
auacagcaaaccuaauugcacaa

SEQ ID NO: 3817745 - RNA, 16 nt, Human
auacagcaacaauuua

SEQ ID NO: 3817746 - RNA, 22 nt, Human
auacagcagagcuagguggaaa

SEQ ID NO: 3817747 - RNA, 17 nt, Human
auacagcagcaagaaaa

SEQ ID NO: 3817748 - RNA, 19 nt, Human
auacagcagcaagaaaaaa

SEQ ID NO: 3817749 - RNA, 20 nt, Human
auacagcccucccccagcag

SEQ ID NO: 3817750 - RNA, 12 nt, Human
auacagcuguau

SEQ ID NO: 3817751 - RNA, 20 nt, Human
auacaggaaaagcugcugac

SEQ ID NO: 3817752 - RNA, 17 nt, Human
auacaggagauucucuu

SEQ ID NO: 3817753 - RNA, 18 nt, Human
auacagggaugguguuca

SEQ ID NO: 3817754 - RNA, 21 nt, Human
auacagggcaugcauuuugca

SEQ ID NO: 3817755 - RNA, 20 nt, Human
auacaggggaauauuuuauu

SEQ ID NO: 3817756 - RNA, 19 nt, Human
auacaguacaggcagcaca

SEQ ID NO: 3817757 - RNA, 16 nt, Human
auacaguacagugguu

SEQ ID NO: 3817758 - RNA, 10 nt, Human
auacaguagu

SEQ ID NO: 3817759 - RNA, 17 nt, Human
auacaguagugagaaga

SEQ ID NO: 3817760 - RNA, 17 nt, Human
auacagucuuccacaaa

SEQ ID NO: 3817761 - RNA, 18 nt, Human
auacagucuuccacaaag

SEQ ID NO: 3817762 - RNA, 21 nt, Human
auacagucuuccacaaagaaa

SEQ ID NO: 3817763 - RNA, 19 nt, Human
auacagucuuccauuugca

SEQ ID NO: 3817764 - RNA, 15 nt, Human
auacaguguuauuuu

SEQ ID NO: 3817765 - RNA, 15 nt, Human
auacaguuauaaaau

SEQ ID NO: 3817766 - RNA, 18 nt, Human
auacaguuauaaaauuaa

SEQ ID NO: 3817767 - RNA, 19 nt, Human
auacaguucaauaaacuua

SEQ ID NO: 3817768 - RNA, 21 nt, Human
auacaguucugcucugguugu

SEQ ID NO: 3817769 - RNA, 16 nt, Human
auacaguuguuggccu

SEQ ID NO: 3817770 - RNA, 16 nt, Human
auacaguuuuaaagaa

SEQ ID NO: 3817771 - RNA, 13 nt, Human
auacaguuuuaug

SEQ ID NO: 3817772 - RNA, 14 nt, Human
auacaguuuuaugc

SEQ ID NO: 3817773 - RNA, 21 nt, Human
auacaguuuuccuaaauguau

SEQ ID NO: 3817774 - RNA, 14 nt, Human
auacauaaaagaaa

SEQ ID NO: 3817775 - RNA, 16 nt, Human
auacauaaaagaaaua

SEQ ID NO: 3817776 - RNA, 18 nt, Human
auacauaaaagaaauaaa

SEQ ID NO: 3817777 - RNA, 20 nt, Human
auacauaaacaagaccacgu

SEQ ID NO: 3817778 - RNA, 14 nt, Human
auacauaaagacua

SEQ ID NO: 3817779 - RNA, 12 nt, Human
auacauaacagg

SEQ ID NO: 3817780 - RNA, 15 nt, Human
auacauaacuaaauu

SEQ ID NO: 3817781 - RNA, 13 nt, Human
auacauaauaaaa

SEQ ID NO: 3817782 - RNA, 14 nt, Human
auacauacacuugu

SEQ ID NO: 3817783 - RNA, 22 nt, Human
auacauacggucagguuuaaca

SEQ ID NO: 3817784 - RNA, 20 nt, Human
auacauacuuacaugugugu

SEQ ID NO: 3817785 - RNA, 15 nt, Human
auacauagugaaaau

SEQ ID NO: 3817786 - RNA, 16 nt, Human
auacauagugaaaauu

SEQ ID NO: 3817787 - RNA, 18 nt, Human
auacauagugaaaauugu

SEQ ID NO: 3817788 - RNA, 13 nt, Human
auacauauauaua

SEQ ID NO: 3817789 - RNA, 20 nt, Human
auacauauauauauauaaca

SEQ ID NO: 3817790 - RNA, 21 nt, Human
auacauaucgcugacuucaug

SEQ ID NO: 3817791 - RNA, 17 nt, Human
auacauaucuuuauuaa

SEQ ID NO: 3817792 - RNA, 20 nt, Human
auacauaucuuuauuaauca

SEQ ID NO: 3817793 - RNA, 19 nt, Human
auacauauuuuuguagcac

SEQ ID NO: 3817794 - RNA, 15 nt, Human
auacaucacugcuug

SEQ ID NO: 3817795 - RNA, 19 nt, Human
auacaucacugcuugauga

SEQ ID NO: 3817796 - RNA, 14 nt, Human
auacauccugggua

SEQ ID NO: 3817797 - RNA, 22 nt, Human
auacaugaagaauagaaacaag

SEQ ID NO: 3817798 - RNA, 13 nt, Human
auacaugaagcuu

SEQ ID NO: 3817799 - RNA, 14 nt, Human
auacaugacacuga

SEQ ID NO: 3817800 - RNA, 19 nt, Human
auacaugacacugaaaugc

SEQ ID NO: 3817801 - RNA, 16 nt, Human
auacaugaugauuuca

SEQ ID NO: 3817802 - RNA, 13 nt, Human
auacaugcauaua

SEQ ID NO: 3817803 - RNA, 21 nt, Human
auacaugcauauaaugaauaa

SEQ ID NO: 3817804 - RNA, 10 nt, Human
auacaugcca

SEQ ID NO: 3817805 - RNA, 21 nt, Human
auacaugccacaucaaaccuu

SEQ ID NO: 3817806 - RNA, 22 nt, Human
auacaugcuaagagaaguagaa

SEQ ID NO: 3817807 - RNA, 15 nt, Human
auacaugcucuuaga

SEQ ID NO: 3817808 - RNA, 14 nt, Human
auacaugguuguga

SEQ ID NO: 3817809 - RNA, 22 nt, Human
auacauguuuauguaaacaaau

SEQ ID NO: 3817810 - RNA, 14 nt, Human
auacauuaguaaau

SEQ ID NO: 3817811 - RNA, 17 nt, Human
auacauuaguaaauguc

SEQ ID NO: 3817812 - RNA, 19 nt, Human
auacauuaguaaaugucuu

SEQ ID NO: 3817813 - RNA, 23 nt, Human
auacauuaguaaaugucuuugua

SEQ ID NO: 3817814 - RNA, 15 nt, Human
auacauuauauuucu

SEQ ID NO: 3817815 - RNA, 16 nt, Human
auacauucaaauuugu

SEQ ID NO: 3817816 - RNA, 17 nt, Human
auacauucuguaauaca

SEQ ID NO: 3817817 - RNA, 15 nt, Human
auacauugaauuaga

SEQ ID NO: 3817818 - RNA, 16 nt, Human
auacauugucucuaaa

SEQ ID NO: 3817819 - RNA, 16 nt, Human
auacauuuaaaacauu

SEQ ID NO: 3817820 - RNA, 14 nt, Human
auacauuuaaaacu

SEQ ID NO: 3817821 - RNA, 15 nt, Human
auacauuuauaaugu

SEQ ID NO: 3817822 - RNA, 21 nt, Human
auacauuucuccuuugauaaa

SEQ ID NO: 3817823 - RNA, 16 nt, Human
auacauuugauaaagu

SEQ ID NO: 3817824 - RNA, 16 nt, Human
auacauuuuguaccaa

SEQ ID NO: 3817825 - RNA, 15 nt, Human
auaccaaaauguugc

SEQ ID NO: 3817826 - RNA, 20 nt, Human
auaccaaaauuauuucagaa

SEQ ID NO: 3817827 - RNA, 16 nt, Human
aggaauagaagcaaau

SEQ ID NO: 3817828 - RNA, 15 nt, Human
aggaauauuuuccaa

SEQ ID NO: 3817829 - RNA, 17 nt, Human
aggaaucaaaaauugaa

SEQ ID NO: 3817830 - RNA, 20 nt, Human
aggaaucaagagcugcccuc

SEQ ID NO: 3817831 - RNA, 23 nt, Human
aggaaucaugucaggccugugug

SEQ ID NO: 3817832 - RNA, 17 nt, Human
aggaaucauucagaaau

SEQ ID NO: 3817833 - RNA, 19 nt, Human
aggaauccuggcagcccag

SEQ ID NO: 3817834 - RNA, 20 nt, Human
aggaaucgaggaaccagagc

SEQ ID NO: 3817835 - RNA, 15 nt, Human
aggaaugauauugcu

SEQ ID NO: 3817836 - RNA, 19 nt, Human
aggaaugcacauggaauau

SEQ ID NO: 3817837 - RNA, 13 nt, Human
aggaaugcuaaca

SEQ ID NO: 3817838 - RNA, 20 nt, Human
aggaaugcuaacaguucacu

SEQ ID NO: 3817839 - RNA, 13 nt, Human
aggaaugcucccc

SEQ ID NO: 3817840 - RNA, 14 nt, Human
aggaauggaagucc

SEQ ID NO: 3817841 - RNA, 23 nt, Human
aggaauggagccugcacggugaa

SEQ ID NO: 3817842 - RNA, 22 nt, Human
aggaauggaggccauauuucca

SEQ ID NO: 3817843 - RNA, 18 nt, Human
aggaauggaggcucuaau

SEQ ID NO: 3817844 - RNA, 20 nt, Human
aggaauggaggcucuaauug

SEQ ID NO: 3817845 - RNA, 21 nt, Human
aggaauuaccaagaauauccu

SEQ ID NO: 3817846 - RNA, 15 nt, Human
aggaauucuguauag

SEQ ID NO: 3817847 - RNA, 16 nt, Human
aggaauucuguauaga

SEQ ID NO: 3817848 - RNA, 17 nt, Human
auauaugccuuuuuccu

SEQ ID NO: 3817849 - RNA, 13 nt, Human
auauauguacagu

SEQ ID NO: 3817850 - RNA, 14 nt, Human
auauauguacaguu

SEQ ID NO: 3817851 - RNA, 15 nt, Human
auauauguauauaca

SEQ ID NO: 3817852 - RNA, 12 nt, Human
auauauguaugu

SEQ ID NO: 3817853 - RNA, 19 nt, Human
auauauguauuauuuauaa

SEQ ID NO: 3817854 - RNA, 18 nt, Human
auauauguguauauauac

SEQ ID NO: 3817855 - RNA, 21 nt, Human
auauauguguauauauacaua

SEQ ID NO: 3817856 - RNA, 19 nt, Human
auauauguguguguauguu

SEQ ID NO: 3817857 - RNA, 20 nt, Human
auauauguguguuuaaauaa

SEQ ID NO: 3817858 - RNA, 13 nt, Human
auauauguguuuu

SEQ ID NO: 3817859 - RNA, 15 nt, Human
auauauguguuuuuc

SEQ ID NO: 3817860 - RNA, 20 nt, Human
auauauguugauuucuugua

SEQ ID NO: 3817861 - RNA, 20 nt, Human
auauauguuuaccuuuuaau

SEQ ID NO: 3817862 - RNA, 13 nt, Human
auauauguuuuaa

SEQ ID NO: 3817863 - RNA, 17 nt, Human
auauauguuuuugaagg

SEQ ID NO: 3817864 - RNA, 16 nt, Human
auauauuaaaaauaua

SEQ ID NO: 3817865 - RNA, 22 nt, Human
auauauuaaaaauauaaaacug

SEQ ID NO: 3817866 - RNA, 16 nt, Human
auauauuaaaauucca

SEQ ID NO: 3817867 - RNA, 17 nt, Human
auauauuacaagggaua

SEQ ID NO: 3817868 - RNA, 19 nt, Human
auauauuauacuuguaauu

SEQ ID NO: 3817869 - RNA, 16 nt, Human
auauauuauauggaaa

SEQ ID NO: 3817870 - RNA, 15 nt, Human
auauauuaucuuuuc

SEQ ID NO: 3817871 - RNA, 16 nt, Human
auauauuaucuuuuca

SEQ ID NO: 3817872 - RNA, 18 nt, Human
auauauucagccuggcuu

SEQ ID NO: 3817873 - RNA, 12 nt, Human
auauauucucuu

SEQ ID NO: 3817874 - RNA, 14 nt, Human
auauauucucuuug

SEQ ID NO: 3817875 - RNA, 22 nt, Human
auauauucuggcugauaaaaga

SEQ ID NO: 3817876 - RNA, 17 nt, Human
auauauugaacuuuugu

SEQ ID NO: 3817877 - RNA, 13 nt, Human
auauauugaauua

SEQ ID NO: 3817878 - RNA, 12 nt, Human
auauauugcugc

SEQ ID NO: 3817879 - RNA, 21 nt, Human
auauauuggguuccauucuca

SEQ ID NO: 3817880 - RNA, 21 nt, Human
auauauugguaacauccuuuc

SEQ ID NO: 3817881 - RNA, 16 nt, Human
auauauuuaaaaauaa

SEQ ID NO: 3817882 - RNA, 13 nt, Human
auauauuuauaac

SEQ ID NO: 3817883 - RNA, 14 nt, Human
auauauuuauaacu

SEQ ID NO: 3817884 - RNA, 23 nt, Human
auauauuuauaacucaucauaaa

SEQ ID NO: 3817885 - RNA, 16 nt, Human
aucaaacauuuucugg

SEQ ID NO: 3817886 - RNA, 15 nt, Human
aucaaacauuuugaa

SEQ ID NO: 3817887 - RNA, 22 nt, Human
aucaaacccggcgguccccucc

SEQ ID NO: 3817888 - RNA, 17 nt, Human
aucaaacccuagccuug

SEQ ID NO: 3817889 - RNA, 14 nt, Human
aucaaacugaagcc

SEQ ID NO: 3817890 - RNA, 12 nt, Human
aucaaagcaaug

SEQ ID NO: 3817891 - RNA, 17 nt, Human
aucaaagcaaugcauuu

SEQ ID NO: 3817892 - RNA, 23 nt, Human
aucaaagcacuuggacucuugcu

SEQ ID NO: 3817893 - RNA, 14 nt, Human
aucaaagccacacu

SEQ ID NO: 3817894 - RNA, 16 nt, Human
aucaaaguagcaaaug

SEQ ID NO: 3817895 - RNA, 19 nt, Human
aucaaagucauuaaagaca

SEQ ID NO: 3817896 - RNA, 16 nt, Human
aucaaaguucugcuuu

SEQ ID NO: 3817897 - RNA, 23 nt, Human
aucaaaguucugcuuucucccca

SEQ ID NO: 3817898 - RNA, 19 nt, Human
aucaaauaaaaauucuaga

SEQ ID NO: 3817899 - RNA, 20 nt, Human
aucaaauaaguauuuauaau

SEQ ID NO: 3817900 - RNA, 17 nt, Human
aucaaauaauaccuuag

SEQ ID NO: 3817901 - RNA, 20 nt, Human
aucaaauaauaccuuagaag

SEQ ID NO: 3817902 - RNA, 13 nt, Human
aucaaauacauuu

SEQ ID NO: 3817903 - RNA, 14 nt, Human
aucaaauacauuua

SEQ ID NO: 3817904 - RNA, 20 nt, Human
aucaaauacuuuaaaggaaa

SEQ ID NO: 3817905 - RNA, 21 nt, Human
aucaaauacuuuaaaggaaaa

SEQ ID NO: 3817906 - RNA, 14 nt, Human
aucaaauauauuca

SEQ ID NO: 3817907 - RNA, 14 nt, Human
aucaaauaugcaaa

SEQ ID NO: 3817908 - RNA, 16 nt, Human
aucaaauaugcaaagc

SEQ ID NO: 3817909 - RNA, 15 nt, Human
aucaaauauuagaug

SEQ ID NO: 3817910 - RNA, 17 nt, Human
aucaaauggaagacaca

SEQ ID NO: 3817911 - RNA, 18 nt, Human
aucaaauguaacuuacug

SEQ ID NO: 3817912 - RNA, 15 nt, Human
aucaacaaagaaaua

SEQ ID NO: 3817913 - RNA, 16 nt, Human
aucaacacacauuuua

SEQ ID NO: 3817914 - RNA, 17 nt, Human
aucaacagaagcauuug

SEQ ID NO: 3817915 - RNA, 13 nt, Human
aucaacaucuuuu

SEQ ID NO: 3817916 - RNA, 14 nt, Human
aucaacauuucuca

SEQ ID NO: 3817917 - RNA, 13 nt, Human
aucaacugaauga

SEQ ID NO: 3817918 - RNA, 14 nt, Human
aucaacuuuaauca

SEQ ID NO: 3817919 - RNA, 16 nt, Human
aucaacuuuuuauugc

SEQ ID NO: 3817920 - RNA, 19 nt, Human
aucaacuuuuuauugccuu

SEQ ID NO: 3817921 - RNA, 20 nt, Human
aucaacuuuuuauugccuuc

SEQ ID NO: 3817922 - RNA, 21 nt, Human
aucaacuuuuuauugccuucu

SEQ ID NO: 3817923 - RNA, 17 nt, Human
aucaagaagacuuuagg

SEQ ID NO: 3817924 - RNA, 21 nt, Human
aucaagaagacuuuaggaaug

SEQ ID NO: 3817925 - RNA, 14 nt, Human
aucaagaagggcug

SEQ ID NO: 3817926 - RNA, 16 nt, Human
aucaagaagggcugca

SEQ ID NO: 3817927 - RNA, 13 nt, Human
aucaagagacuga

SEQ ID NO: 3817928 - RNA, 16 nt, Human
aucaagagcugcccuc

SEQ ID NO: 3817929 - RNA, 16 nt, Human
aucaagaggcugagac

SEQ ID NO: 3817930 - RNA, 21 nt, Human
aucaagaguugugacaacuuc

SEQ ID NO: 3817931 - RNA, 15 nt, Human
aucaagauaaaggac

SEQ ID NO: 3817932 - RNA, 17 nt, Human
aucaagauaaaggacag

SEQ ID NO: 3817933 - RNA, 18 nt, Human
aucaagaugucagacugg

SEQ ID NO: 3817934 - RNA, 21 nt, Human
aucaagccauguauaaaugug

SEQ ID NO: 3817935 - RNA, 16 nt, Human
aucaagcuagaaggcc

SEQ ID NO: 3817936 - RNA, 20 nt, Human
aucaagcuagaaggccacau

SEQ ID NO: 3817937 - RNA, 16 nt, Human
aucaaggcacugccug

SEQ ID NO: 3817938 - RNA, 22 nt, Human
aucaaggccuuauuggaaagca

SEQ ID NO: 3817939 - RNA, 23 nt, Human
aucaagggaauguaacugcugaa

SEQ ID NO: 3817940 - RNA, 16 nt, Human
aucaaggguacacugc

SEQ ID NO: 3817941 - RNA, 14 nt, Human
aucaaggucguuuu

SEQ ID NO: 3817942 - RNA, 14 nt, Human
aucaaguaauacaa

SEQ ID NO: 3817943 - RNA, 16 nt, Human
aucaaguaauacaaac

SEQ ID NO: 3817944 - RNA, 17 nt, Human
aucaaguaauacaaacu

SEQ ID NO: 3817945 - RNA, 18 nt, Human
aucaaguagacuacuguu

SEQ ID NO: 3817946 - RNA, 17 nt, Human
aucaaguauagaaaauc

SEQ ID NO: 3817947 - RNA, 12 nt, Human
aucaaguauuac

SEQ ID NO: 3817948 - RNA, 21 nt, Human
aucaaguauuacuaaauugac

SEQ ID NO: 3817949 - RNA, 14 nt, Human
aucaaguauuauac

SEQ ID NO: 3817950 - RNA, 20 nt, Human
aucaaguauuugggaaguga

SEQ ID NO: 3817951 - RNA, 21 nt, Human
aucaaguauuugggaagugaa

SEQ ID NO: 3817952 - RNA, 17 nt, Human
aucaagucaaucauuuc

SEQ ID NO: 3817953 - RNA, 18 nt, Human
aucaagucaaucauuucu

SEQ ID NO: 3817954 - RNA, 12 nt, Human
aucaagucaccg

SEQ ID NO: 3817955 - RNA, 14 nt, Human
aucaaguuauuuuu

SEQ ID NO: 3817956 - RNA, 20 nt, Human
aucaaguuuccaagcaaaug

SEQ ID NO: 3817957 - RNA, 17 nt, Human
aucaauaaaaaauuaug

SEQ ID NO: 3817958 - RNA, 18 nt, Human
aucaauaaaaaauuauga

SEQ ID NO: 3817959 - RNA, 16 nt, Human
aucaauaaaaugugau

SEQ ID NO: 3817960 - RNA, 22 nt, Human
aucaauaacagccgcuccagag

SEQ ID NO: 3817961 - RNA, 18 nt, Human
aucaauaauauauuuucu

SEQ ID NO: 3817962 - RNA, 21 nt, Human
aucaauaauauauuuucuguu

SEQ ID NO: 3817963 - RNA, 23 nt, Human
aucaauaugcagaauggcauuug

SEQ ID NO: 3817964 - RNA, 20 nt, Human
aucaauauugucauuccugu

SEQ ID NO: 3817965 - RNA, 13 nt, Human
aucaaucaaaccc

SEQ ID NO: 3817966 - RNA, 15 nt, Human
aucaaucaaauaagu

SEQ ID NO: 3817967 - RNA, 19 nt, Human
aucaaucaaauaaguauuu

SEQ ID NO: 3817968 - RNA, 14 nt, Human
aucaaucacagcuu

SEQ ID NO: 3817969 - RNA, 19 nt, Human
aucaaucaucugugugaaa

SEQ ID NO: 3817970 - RNA, 22 nt, Human
aucaaucaucugugugaaaaug

SEQ ID NO: 3817971 - RNA, 19 nt, Human
aucaaucauuguacaguuu

SEQ ID NO: 3817972 - RNA, 23 nt, Human
aucaauccugugugguuuagugu

SEQ ID NO: 3817973 - RNA, 16 nt, Human
aucaauccuuguucag

SEQ ID NO: 3817974 - RNA, 21 nt, Human
aucaaucuguaaaacuaagaa

SEQ ID NO: 3817975 - RNA, 17 nt, Human
aucaaucuugcauguaa

SEQ ID NO: 3817976 - RNA, 18 nt, Human
aucaaucuugcauguaac

SEQ ID NO: 3817977 - RNA, 15 nt, Human
aucaaucuuuagaaa

SEQ ID NO: 3817978 - RNA, 14 nt, Human
aucaaugaguaaca

SEQ ID NO: 3817979 - RNA, 21 nt, Human
aucaauggcgcagugccucug

SEQ ID NO: 3817980 - RNA, 23 nt, Human
aucaauggcgcagugccucuggu

SEQ ID NO: 3817981 - RNA, 22 nt, Human
aucaaugugucuuucuaagaaa

SEQ ID NO: 3817982 - RNA, 22 nt, Human
aucaauguucacgcaacuugaa

SEQ ID NO: 3817983 - RNA, 19 nt, Human
aucaauguuucuucuaggu

SEQ ID NO: 3817984 - RNA, 15 nt, Human
aucaauuaaauguag

SEQ ID NO: 3817985 - RNA, 20 nt, Human
aucaauuaacugaguagcuc

SEQ ID NO: 3817986 - RNA, 15 nt, Human
aucaauuaauuuuuu

SEQ ID NO: 3817987 - RNA, 22 nt, Human
aucaauuaauuuuuuuauuguu

SEQ ID NO: 3817988 - RNA, 18 nt, Human
aucaauuauaguuucuga

SEQ ID NO: 3817989 - RNA, 15 nt, Human
aucaauuuaaaccca

SEQ ID NO: 3817990 - RNA, 17 nt, Human
aucaauuuaaacccauu

SEQ ID NO: 3817991 - RNA, 14 nt, Human
aucaauuugucauu

SEQ ID NO: 3817992 - RNA, 18 nt, Human
aucaauuugucauuuuga

SEQ ID NO: 3817993 - RNA, 23 nt, Human
aucagaugacuagaaagugaaua

SEQ ID NO: 3817994 - RNA, 21 nt, Human
aucagaugcuccaagauucua

SEQ ID NO: 3817995 - RNA, 23 nt, Human
aucagaugcuccaagauucuaga

SEQ ID NO: 3817996 - RNA, 21 nt, Human
aucagauggaaauauuuugau

SEQ ID NO: 3817997 - RNA, 22 nt, Human
aucagauggaaauauuuugaua

SEQ ID NO: 3817998 - RNA, 23 nt, Human
aucagauggaaauauuuugauaa

SEQ ID NO: 3817999 - RNA, 21 nt, Human
aucagauugcaugugacucug

SEQ ID NO: 3818000 - RNA, 13 nt, Human
aucagauugcuuu

SEQ ID NO: 3818001 - RNA, 19 nt, Human
aucagauugcuuuugugca

SEQ ID NO: 3818002 - RNA, 13 nt, Human
aucagcaaaaaag

SEQ ID NO: 3818003 - RNA, 13 nt, Human
aucagcaaagaaa

SEQ ID NO: 3818004 - RNA, 23 nt, Human
aucagcaacaaccagcaucccuu

SEQ ID NO: 3818005 - RNA, 22 nt, Human
aucagcacagauaaaaagugga

SEQ ID NO: 3818006 - RNA, 20 nt, Human
aucagcacgauuucuguuua

SEQ ID NO: 3818007 - RNA, 23 nt, Human
aucagcacgauuucuguuuagau

SEQ ID NO: 3818008 - RNA, 12 nt, Human
aucagcacugaa

SEQ ID NO: 3818009 - RNA, 18 nt, Human
aucagcaucugugauggg

SEQ ID NO: 3818010 - RNA, 15 nt, Human
aucagcaugaaaaug

SEQ ID NO: 3818011 - RNA, 15 nt, Human
aucagccaauuaugu

SEQ ID NO: 3818012 - RNA, 18 nt, Human
aucagccaauuauguuaa

SEQ ID NO: 3818013 - RNA, 23 nt, Human
aucagcccugcccuucagcaucc

SEQ ID NO: 3818014 - RNA, 20 nt, Human
aucagccuaggggucaggga

SEQ ID NO: 3818015 - RNA, 11 nt, Human
aucagccucuu

SEQ ID NO: 3818016 - RNA, 15 nt, Human
aucagccucuuaaag

SEQ ID NO: 3818017 - RNA, 20 nt, Human
aucagccugcuccagcuguu

SEQ ID NO: 3818018 - RNA, 19 nt, Human
aucagccugucucuuccau

SEQ ID NO: 3818019 - RNA, 21 nt, Human
aucagccugucucuuccauau

SEQ ID NO: 3818020 - RNA, 23 nt, Human
aucagcgccggccuccagaacuu

SEQ ID NO: 3818021 - RNA, 21 nt, Human
aucagcuagcaaaagaaguaa

SEQ ID NO: 3818022 - RNA, 18 nt, Human
aucagcuccacuuucagu

SEQ ID NO: 3818023 - RNA, 13 nt, Human
aucagcuccuucc

SEQ ID NO: 3818024 - RNA, 17 nt, Human
aucagcuccuuccugga

SEQ ID NO: 3818025 - RNA, 12 nt, Human
aucagcugcuac

SEQ ID NO: 3818026 - RNA, 23 nt, Human
aucagcugcuacuacuccuguag

SEQ ID NO: 3818027 - RNA, 17 nt, Human
aucagcugcugaaacaa

SEQ ID NO: 3818028 - RNA, 21 nt, Human
aucagcugcugaaacaacaaa

SEQ ID NO: 3818029 - RNA, 23 nt, Human
aucagcugcugaaacaacaaaua

SEQ ID NO: 3818030 - RNA, 19 nt, Human
aucagcugcuuuguuaccu

SEQ ID NO: 3818031 - RNA, 21 nt, Human
aucagcuucuauccuugacuu

SEQ ID NO: 3818032 - RNA, 22 nt, Human
aucagcuugcccuguuaaaaga

SEQ ID NO: 3818033 - RNA, 19 nt, Human
aucaggaauauuuuccaaa

SEQ ID NO: 3818034 - RNA, 22 nt, Human
aucaggaauauuuuccaaagag

SEQ ID NO: 3818035 - RNA, 12 nt, Human
aucaggaugaac

SEQ ID NO: 3818036 - RNA, 17 nt, Human
aucaggcacaggucagg

SEQ ID NO: 3818037 - RNA, 18 nt, Human
aucaggccuaaucucaua

SEQ ID NO: 3818038 - RNA, 14 nt, Human
aucaggccuagagg

SEQ ID NO: 3818039 - RNA, 15 nt, Human
aucaggcuauguaug

SEQ ID NO: 3818040 - RNA, 16 nt, Human
aucaggcucugccuca

SEQ ID NO: 3818041 - RNA, 13 nt, Human
aucaggcugaggu

SEQ ID NO: 3818042 - RNA, 14 nt, Human
aucaggcuuucuua

SEQ ID NO: 3818043 - RNA, 22 nt, Human
aucaggcuuucuuaaagugaga

SEQ ID NO: 3818044 - RNA, 22 nt, Human
aucaggcuuucuuuuuuuucuu

SEQ ID NO: 3818045 - RNA, 16 nt, Human
aucaggcuuuuguuuc

SEQ ID NO: 3818046 - RNA, 18 nt, Human
aucagggaccaccagagg

SEQ ID NO: 3818047 - RNA, 23 nt, Human
aucagggaggaaaguuucuuuga

SEQ ID NO: 3818048 - RNA, 11 nt, Human
aucagggccug

SEQ ID NO: 3818049 - RNA, 20 nt, Human
auaugauuuaaaacauguaa

SEQ ID NO: 3818050 - RNA, 20 nt, Human
auaugauuuaaaucagccgu

SEQ ID NO: 3818051 - RNA, 12 nt, Human
auaugauuuaua

SEQ ID NO: 3818052 - RNA, 14 nt, Human
auaugauuuauagu

SEQ ID NO: 3818053 - RNA, 18 nt, Human
auaugauuucacuagaaa

SEQ ID NO: 3818054 - RNA, 19 nt, Human
auaugauuuuauuugacaa

SEQ ID NO: 3818055 - RNA, 18 nt, Human
auaugauuuuuuaaaaga

SEQ ID NO: 3818056 - RNA, 18 nt, Human
auaugcaaacauaacaaa

SEQ ID NO: 3818057 - RNA, 21 nt, Human
auaugcaaacauaacaaaauc

SEQ ID NO: 3818058 - RNA, 14 nt, Human
auaugcaaagcacu

SEQ ID NO: 3818059 - RNA, 15 nt, Human
auaugcaaagcacug

SEQ ID NO: 3818060 - RNA, 15 nt, Human
auaugcacacauuuu

SEQ ID NO: 3818061 - RNA, 22 nt, Human
auaugcacacauuuuuuaaaug

SEQ ID NO: 3818062 - RNA, 21 nt, Human
auaugcaccuugugucuguac

SEQ ID NO: 3818063 - RNA, 18 nt, Human
auaugcauauauauaugu

SEQ ID NO: 3818064 - RNA, 19 nt, Human
auaugccucuccuuuguau

SEQ ID NO: 3818065 - RNA, 22 nt, Human
auaugccucuccuuuguauauu

SEQ ID NO: 3818066 - RNA, 14 nt, Human
auaugccugcucuu

SEQ ID NO: 3818067 - RNA, 21 nt, Human
auaugccuguaauucagugua

SEQ ID NO: 3818068 - RNA, 17 nt, Human
auaugcuaccaccagcu

SEQ ID NO: 3818069 - RNA, 15 nt, Human
auaugcuauuucuau

SEQ ID NO: 3818070 - RNA, 19 nt, Human
auaugcuauuucuauauuu

SEQ ID NO: 3818071 - RNA, 22 nt, Human
auaugcuauuucuauauuuuca

SEQ ID NO: 3818072 - RNA, 20 nt, Human
auaugcucugcauguuacau

SEQ ID NO: 3818073 - RNA, 18 nt, Human
auaugcugccaaauuuug

SEQ ID NO: 3818074 - RNA, 22 nt, Human
auaugcugccaaauuuuggcca

SEQ ID NO: 3818075 - RNA, 18 nt, Human
auaugcuuaaaauaagca

SEQ ID NO: 3818076 - RNA, 15 nt, Human
auaugcuuaguaaug

SEQ ID NO: 3818077 - RNA, 16 nt, Human
auaugcuuauacacuu

SEQ ID NO: 3818078 - RNA, 23 nt, Human
auauggaaauauauauuauacuu

SEQ ID NO: 3818079 - RNA, 15 nt, Human
auauggaauuuugca

SEQ ID NO: 3818080 - RNA, 15 nt, Human
auauggacucugcac

SEQ ID NO: 3818081 - RNA, 23 nt, Human
auauggauguuacucucuugcac

SEQ ID NO: 3818082 - RNA, 19 nt, Human
auauggcaagaaagcuggu

SEQ ID NO: 3818083 - RNA, 15 nt, Human
auauggcagaagaca

SEQ ID NO: 3818084 - RNA, 16 nt, Human
auauggcagaguugua

SEQ ID NO: 3818085 - RNA, 17 nt, Human
auauggcagaguuguaa

SEQ ID NO: 3818086 - RNA, 16 nt, Human
auauggcauuugcaga

SEQ ID NO: 3818087 - RNA, 15 nt, Human
auaugggacauuuuu

SEQ ID NO: 3818088 - RNA, 15 nt, Human
auaugggagaaauag

SEQ ID NO: 3818089 - RNA, 18 nt, Human
auauggggggccaacacc

SEQ ID NO: 3818090 - RNA, 20 nt, Human
auauggguuuauaauuuucu

SEQ ID NO: 3818091 - RNA, 15 nt, Human
auauggucuaauguu

SEQ ID NO: 3818092 - RNA, 17 nt, Human
auauggucuaauguuua

SEQ ID NO: 3818093 - RNA, 12 nt, Human
auauguaaaaca

SEQ ID NO: 3818094 - RNA, 18 nt, Human
auauguaaaacauuuauu

SEQ ID NO: 3818095 - RNA, 12 nt, Human
auauguaaaaua

SEQ ID NO: 3818096 - RNA, 20 nt, Human
auauguaaacauaaguguac

SEQ ID NO: 3818097 - RNA, 16 nt, Human
auauguaacaagccac

SEQ ID NO: 3818098 - RNA, 12 nt, Human
auauguacauuu

SEQ ID NO: 3818099 - RNA, 15 nt, Human
auauguacauuucua

SEQ ID NO: 3818100 - RNA, 19 nt, Human
auauguaccauguacauga

SEQ ID NO: 3818101 - RNA, 23 nt, Human
auauguaccuaacgaaguauccu

SEQ ID NO: 3818102 - RNA, 19 nt, Human
auauguacuugucaaagaa

SEQ ID NO: 3818103 - RNA, 16 nt, Human
auauguagaaggcaca

SEQ ID NO: 3818104 - RNA, 16 nt, Human
auauguagacuauaua

SEQ ID NO: 3818105 - RNA, 18 nt, Human
auauguagacuauauaca

SEQ ID NO: 3818106 - RNA, 21 nt, Human
auauguagacuauauacaugu

SEQ ID NO: 3818107 - RNA, 16 nt, Human
auauguagauguaugc

SEQ ID NO: 3818108 - RNA, 15 nt, Human
auauguauaacuuua

SEQ ID NO: 3818109 - RNA, 16 nt, Human
auauguauaacuuuaa

SEQ ID NO: 3818110 - RNA, 18 nt, Human
auauguauauuuuuuuaa

SEQ ID NO: 3818111 - RNA, 23 nt, Human
auauguauggguaggguaaauca

SEQ ID NO: 3818112 - RNA, 15 nt, Human
auauguaugugugua

SEQ ID NO: 3818113 - RNA, 16 nt, Human
auauguauguguguau

SEQ ID NO: 3818114 - RNA, 14 nt, Human
auauguauguguuu

SEQ ID NO: 3818115 - RNA, 18 nt, Human
auauguauguguuuagaa

SEQ ID NO: 3818116 - RNA, 23 nt, Human
auauguauuaauaaauagagcaa

SEQ ID NO: 3818117 - RNA, 16 nt, Human
auauguauuauuuaua

SEQ ID NO: 3818118 - RNA, 18 nt, Human
auauguauucuuuucuca

SEQ ID NO: 3818119 - RNA, 20 nt, Human
auauguauucuuuucucagu

SEQ ID NO: 3818120 - RNA, 14 nt, Human
auauguauuguaaa

SEQ ID NO: 3818121 - RNA, 21 nt, Human
auaugucucgcuagugauguu

SEQ ID NO: 3818122 - RNA, 16 nt, Human
auaugugaacauuuau

SEQ ID NO: 3818123 - RNA, 15 nt, Human
auaugugaucugucu

SEQ ID NO: 3818124 - RNA, 18 nt, Human
auaugugccacauuuucu

SEQ ID NO: 3818125 - RNA, 19 nt, Human
auaugugcuggaauucuaa

SEQ ID NO: 3818126 - RNA, 15 nt, Human
auauguggaguucau

SEQ ID NO: 3818127 - RNA, 16 nt, Human
auauguggaguucauc

SEQ ID NO: 3818128 - RNA, 13 nt, Human
auauguguauaua

SEQ ID NO: 3818129 - RNA, 22 nt, Human
auauguguaugcacaguaaaaa

SEQ ID NO: 3818130 - RNA, 12 nt, Human
auauguguaugu

SEQ ID NO: 3818131 - RNA, 22 nt, Human
auauguguauguacguuuguau

SEQ ID NO: 3818132 - RNA, 14 nt, Human
auauguguugaaaa

SEQ ID NO: 3818133 - RNA, 18 nt, Human
auauguguugaaaaccaa

SEQ ID NO: 3818134 - RNA, 20 nt, Human
auauguguugaaaaccaaaa

SEQ ID NO: 3818135 - RNA, 16 nt, Human
auauguucaacuggag

SEQ ID NO: 3818136 - RNA, 20 nt, Human
auccuuuccucauuaaauua

SEQ ID NO: 3818137 - RNA, 15 nt, Human
auccuuucuaaacaa

SEQ ID NO: 3818138 - RNA, 15 nt, Human
auccuuucugccgac

SEQ ID NO: 3818139 - RNA, 16 nt, Human
auccuuucugccgacc

SEQ ID NO: 3818140 - RNA, 15 nt, Human
auccuuugcagggca

SEQ ID NO: 3818141 - RNA, 20 nt, Human
auccuuugcagggcagcccc

SEQ ID NO: 3818142 - RNA, 19 nt, Human
auccuuuguuuucugacua

SEQ ID NO: 3818143 - RNA, 16 nt, Human
auccuuuuauguuauu

SEQ ID NO: 3818144 - RNA, 18 nt, Human
auccuuuuauguuauuua

SEQ ID NO: 3818145 - RNA, 16 nt, Human
auccuuuucuccuauc

SEQ ID NO: 3818146 - RNA, 12 nt, Human
auccuuuucugu

SEQ ID NO: 3818147 - RNA, 15 nt, Human
auccuuuucuucuau

SEQ ID NO: 3818148 - RNA, 16 nt, Human
auccuuuucuucuaug

SEQ ID NO: 3818149 - RNA, 18 nt, Human
auccuuuucuucuaugua

SEQ ID NO: 3818150 - RNA, 11 nt, Human
auccuuuugua

SEQ ID NO: 3818151 - RNA, 16 nt, Human
auccuuuuuuaaaagu

SEQ ID NO: 3818152 - RNA, 22 nt, Human
auccuuuuuuaaaaguaaaugu

SEQ ID NO: 3818153 - RNA, 17 nt, Human
aucgaaaauucauuuca

SEQ ID NO: 3818154 - RNA, 19 nt, Human
aucgaaauaacaauguuaa

SEQ ID NO: 3818155 - RNA, 22 nt, Human
aucgaaauaacaauguuaagga

SEQ ID NO: 3818156 - RNA, 17 nt, Human
aucgacuuguucuugau

SEQ ID NO: 3818157 - RNA, 22 nt, Human
aucgcaucauugcacucuagcc

SEQ ID NO: 3818158 - RNA, 14 nt, Human
aucgcauugcauac

SEQ ID NO: 3818159 - RNA, 16 nt, Human
aucgccacaaacucua

SEQ ID NO: 3818160 - RNA, 20 nt, Human
aucgccagaggugcuucacc

SEQ ID NO: 3818161 - RNA, 19 nt, Human
aucgccagcugaugacuca

SEQ ID NO: 3818162 - RNA, 23 nt, Human
aucgccagcugaugacucaagau

SEQ ID NO: 3818163 - RNA, 20 nt, Human
aucgcggcggagcuggcccc

SEQ ID NO: 3818164 - RNA, 16 nt, Human
aucgcucguguguucu

SEQ ID NO: 3818165 - RNA, 14 nt, Human
aucgcuggccccuu

SEQ ID NO: 3818166 - RNA, 14 nt, Human
aucggaagcagugc

SEQ ID NO: 3818167 - RNA, 22 nt, Human
aucggaagcagugccuuccaua

SEQ ID NO: 3818168 - RNA, 16 nt, Human
aucggagccuccucuc

SEQ ID NO: 3818169 - RNA, 21 nt, Human
aucggaggcuugucagagcug

SEQ ID NO: 3818170 - RNA, 21 nt, Human
aucggaucuggggcucuggga

SEQ ID NO: 3818171 - RNA, 21 nt, Human
aucggccaucaagggaagaac

SEQ ID NO: 3818172 - RNA, 20 nt, Human
aucggcccacagcucccacc

SEQ ID NO: 3818173 - RNA, 17 nt, Human
aucgggaacaguguuuc

SEQ ID NO: 3818174 - RNA, 18 nt, Human
aucgggagcagugucuuc

SEQ ID NO: 3818175 - RNA, 17 nt, Human
aucggggcacugcaggg

SEQ ID NO: 3818176 - RNA, 14 nt, Human
aucgguccugucuc

SEQ ID NO: 3818177 - RNA, 19 nt, Human
aucggugaaacuaacagau

SEQ ID NO: 3818178 - RNA, 21 nt, Human
aucggugaaacuaacagauaa

SEQ ID NO: 3818179 - RNA, 15 nt, Human
aucgguguccauuua

SEQ ID NO: 3818180 - RNA, 17 nt, Human
aucgguguccauuuaua

SEQ ID NO: 3818181 - RNA, 23 nt, Human
aucgguguccauuuauagaauaa

SEQ ID NO: 3818182 - RNA, 16 nt, Human
aucguaauguacagau

SEQ ID NO: 3818183 - RNA, 18 nt, Human
aucguauagcuguauuga

SEQ ID NO: 3818184 - RNA, 22 nt, Human
aucguauagcuguauugaauca

SEQ ID NO: 3818185 - RNA, 19 nt, Human
aucguccagcgaccuuccu

SEQ ID NO: 3818186 - RNA, 20 nt, Human
aucguccccucccccacccc

SEQ ID NO: 3818187 - RNA, 15 nt, Human
aucgugaagaagccu

SEQ ID NO: 3818188 - RNA, 14 nt, Human
aucgugcuacugca

SEQ ID NO: 3818189 - RNA, 15 nt, Human
aucguuccaguuccc

SEQ ID NO: 3818190 - RNA, 18 nt, Human
aucguucucucuuugcau

SEQ ID NO: 3818191 - RNA, 16 nt, Human
aucguucuuucuagcu

SEQ ID NO: 3818192 - RNA, 17 nt, Human
aucguuuucuuaaagug

SEQ ID NO: 3818193 - RNA, 19 nt, Human
aucuaaaagaaaugucuau

SEQ ID NO: 3818194 - RNA, 17 nt, Human
aucuaaaguguguuguu

SEQ ID NO: 3818195 - RNA, 20 nt, Human
aucuaaaguguguuguugcu

SEQ ID NO: 3818196 - RNA, 23 nt, Human
aucuaaaguguguuguugcuuua

SEQ ID NO: 3818197 - RNA, 13 nt, Human
aucuaaaguuaua

SEQ ID NO: 3818198 - RNA, 14 nt, Human
aucuaaaguuauau

SEQ ID NO: 3818199 - RNA, 17 nt, Human
aucuaaaguuauauuuc

SEQ ID NO: 3818200 - RNA, 18 nt, Human
aucuaaaguuauauuuca

SEQ ID NO: 3818201 - RNA, 20 nt, Human
aucuaaaucuauuuauuaau

SEQ ID NO: 3818202 - RNA, 16 nt, Human
aucuaaaucuguccaa

SEQ ID NO: 3818203 - RNA, 13 nt, Human
aucuaaauggaac

SEQ ID NO: 3818204 - RNA, 19 nt, Human
aucuaacauuauuacuuuu

SEQ ID NO: 3818205 - RNA, 15 nt, Human
aucuaacccucccau

SEQ ID NO: 3818206 - RNA, 22 nt, Human
aucuaacccucccauggcaccu

SEQ ID NO: 3818207 - RNA, 12 nt, Human
aucuaagaauaa

SEQ ID NO: 3818208 - RNA, 18 nt, Human
aucuaagcagcauuucug

SEQ ID NO: 3818209 - RNA, 21 nt, Human
aucuaagcccaugggacaaau

SEQ ID NO: 3818210 - RNA, 17 nt, Human
aucuaagccuuuccaua

SEQ ID NO: 3818211 - RNA, 18 nt, Human
aucuaagccuuuccauaa

SEQ ID NO: 3818212 - RNA, 16 nt, Human
aucuaagcugcagcuu

SEQ ID NO: 3818213 - RNA, 17 nt, Human
aucuaagugauauaaau

SEQ ID NO: 3818214 - RNA, 18 nt, Human
aucuaaguuaauuuaaag

SEQ ID NO: 3818215 - RNA, 13 nt, Human
aucuaaguuauaa

SEQ ID NO: 3818216 - RNA, 19 nt, Human
aucuaaguuauaagacucu

SEQ ID NO: 3818217 - RNA, 15 nt, Human
aucuaauaccucugu

SEQ ID NO: 3818218 - RNA, 19 nt, Human
aucuaauaccucugugugc

SEQ ID NO: 3818219 - RNA, 22 nt, Human
aucuaauagcggguuacuuuca

SEQ ID NO: 3818220 - RNA, 15 nt, Human
aucuaauauauauga

SEQ ID NO: 3818221 - RNA, 17 nt, Human
aucuaauauauaugaau

SEQ ID NO: 3818222 - RNA, 23 nt, Human
aucuaauauggccacaguagucu

SEQ ID NO: 3818223 - RNA, 23 nt, Human
aucuaauauguaacaagccaccc

SEQ ID NO: 3818224 - RNA, 14 nt, Human
aucuaauauuaaaa

SEQ ID NO: 3818225 - RNA, 18 nt, Human
aucuaaugacauucaaua

SEQ ID NO: 3818226 - RNA, 16 nt, Human
aucuaauuauuuugca

SEQ ID NO: 3818227 - RNA, 13 nt, Human
aucuaauucuuua

SEQ ID NO: 3818228 - RNA, 14 nt, Human
aucuaauucuuuaa

SEQ ID NO: 3818229 - RNA, 15 nt, Human
aucuaauuuauaaaa

SEQ ID NO: 3818230 - RNA, 19 nt, Human
aucuaauuuauaaaaaggu

SEQ ID NO: 3818231 - RNA, 15 nt, Human
aucuaauuucugaaa

SEQ ID NO: 3818232 - RNA, 19 nt, Human
aucuacaaucucuuuuugu

SEQ ID NO: 3818233 - RNA, 17 nt, Human
aucuacaucuuuuuuca

SEQ ID NO: 3818234 - RNA, 16 nt, Human
aucuaccaacuuucaa

SEQ ID NO: 3818235 - RNA, 18 nt, Human
aucuaccaacuuucaaga

SEQ ID NO: 3818236 - RNA, 19 nt, Human
aucuaccaacuuucaagaa

SEQ ID NO: 3818237 - RNA, 21 nt, Human
aucuacccaagggcagaaagu

SEQ ID NO: 3818238 - RNA, 21 nt, Human
aucuaccccagacuagaugua

SEQ ID NO: 3818239 - RNA, 21 nt, Human
aucuaccucacuauucaagua

SEQ ID NO: 3818240 - RNA, 13 nt, Human
aucuaccuggagg

SEQ ID NO: 3818241 - RNA, 12 nt, Human
aucuacugcauu

SEQ ID NO: 3818242 - RNA, 20 nt, Human
aucuacuucuguaauugugu

SEQ ID NO: 3818243 - RNA, 19 nt, Human
aucuacuuuuacucauaag

SEQ ID NO: 3818244 - RNA, 12 nt, Human
aucuagaagacu

SEQ ID NO: 3818245 - RNA, 20 nt, Human
aucuagagcuugaugccagu

SEQ ID NO: 3818246 - RNA, 21 nt, Human
aucuagaucuuugugccaaac

SEQ ID NO: 3818247 - RNA, 13 nt, Human
aucuagauguaaa

SEQ ID NO: 3818248 - RNA, 19 nt, Human
aucuagauuauggagcuuu

SEQ ID NO: 3818249 - RNA, 14 nt, Human
aucuagcaaauguu

SEQ ID NO: 3818250 - RNA, 18 nt, Human
aucuagcaaauguuaugc

SEQ ID NO: 3818251 - RNA, 12 nt, Human
aucuagccagcc

SEQ ID NO: 3818252 - RNA, 20 nt, Human
aucuaggaaaauauuuugau

SEQ ID NO: 3818253 - RNA, 22 nt, Human
aucuaggaagacuuuggaaaga

SEQ ID NO: 3818254 - RNA, 17 nt, Human
aucuaggggagccuuga

SEQ ID NO: 3818255 - RNA, 14 nt, Human
aucuagguuuaacu

SEQ ID NO: 3818256 - RNA, 19 nt, Human
aucuagguuuaacucagau

SEQ ID NO: 3818257 - RNA, 22 nt, Human
aucuagguuuaacucagaucac

SEQ ID NO: 3818258 - RNA, 22 nt, Human
aucuagguuuaugacaguaauu

SEQ ID NO: 3818259 - RNA, 22 nt, Human
aucuaguaagacguaaggggaa

SEQ ID NO: 3818260 - RNA, 14 nt, Human
aucuaguaauauau

SEQ ID NO: 3818261 - RNA, 16 nt, Human
aucuaguaauauauuu

SEQ ID NO: 3818262 - RNA, 19 nt, Human
aucuaguaauauauuuaaa

SEQ ID NO: 3818263 - RNA, 22 nt, Human
aucuaguaauauauuuaaaggg

SEQ ID NO: 3818264 - RNA, 16 nt, Human
aucuaguaugaaauua

SEQ ID NO: 3818265 - RNA, 14 nt, Human
aucuagugcagcug

SEQ ID NO: 3818266 - RNA, 22 nt, Human
aucuagugcagcugauuuuaac

SEQ ID NO: 3818267 - RNA, 12 nt, Human
aucuaguguuug

SEQ ID NO: 3818268 - RNA, 17 nt, Human
aucuaguuccccuguuu

SEQ ID NO: 3818269 - RNA, 12 nt, Human
aucuauaaaaua

SEQ ID NO: 3818270 - RNA, 13 nt, Human
aucuauaaagaag

SEQ ID NO: 3818271 - RNA, 16 nt, Human
aucuauaauuuaccua

SEQ ID NO: 3818272 - RNA, 16 nt, Human
aucuauacauaucuuu

SEQ ID NO: 3818273 - RNA, 17 nt, Human
aucuauagaaagcuaua

SEQ ID NO: 3818274 - RNA, 13 nt, Human
aucuauagaaagu

SEQ ID NO: 3818275 - RNA, 16 nt, Human
aucuauagaaaguguu

SEQ ID NO: 3818276 - RNA, 23 nt, Human
aucuauagaaaguguucuguuac

SEQ ID NO: 3818277 - RNA, 14 nt, Human
aucuauauaaaaua

SEQ ID NO: 3818278 - RNA, 13 nt, Human
aucuauauauaau

SEQ ID NO: 3818279 - RNA, 20 nt, Human
aucuauauauaauucuguac

SEQ ID NO: 3818280 - RNA, 17 nt, Human
aucuauauuuuacauaa

SEQ ID NO: 3818281 - RNA, 18 nt, Human
aucucuguuauguacugu

SEQ ID NO: 3818282 - RNA, 20 nt, Human
aucucuuaagacagcaugug

SEQ ID NO: 3818283 - RNA, 23 nt, Human
aucucuuaagacagcauguguua

SEQ ID NO: 3818284 - RNA, 16 nt, Human
aucucuuagcuccccu

SEQ ID NO: 3818285 - RNA, 22 nt, Human
aucucuuccuacccaaccacuc

SEQ ID NO: 3818286 - RNA, 12 nt, Human
aucucuuccuug

SEQ ID NO: 3818287 - RNA, 19 nt, Human
aucucuucuggguuccuuc

SEQ ID NO: 3818288 - RNA, 22 nt, Human
aucucuucuuaauguacauagu

SEQ ID NO: 3818289 - RNA, 20 nt, Human
aucucuucuuuuggcuucca

SEQ ID NO: 3818290 - RNA, 15 nt, Human
aucucuugagccugg

SEQ ID NO: 3818291 - RNA, 15 nt, Human
aucucuugaggccag

SEQ ID NO: 3818292 - RNA, 19 nt, Human
aucucuuucacauuguuug

SEQ ID NO: 3818293 - RNA, 21 nt, Human
aucucuuugaauuuucugugu

SEQ ID NO: 3818294 - RNA, 22 nt, Human
aucucuuuguucuaaagaugga

SEQ ID NO: 3818295 - RNA, 11 nt, Human
aucucuuuuau

SEQ ID NO: 3818296 - RNA, 12 nt, Human
aucucuuuuaua

SEQ ID NO: 3818297 - RNA, 22 nt, Human
aucucuuuugaauccaugcuug

SEQ ID NO: 3818298 - RNA, 15 nt, Human
aucucuuuuuguuug

SEQ ID NO: 3818299 - RNA, 16 nt, Human
aucucuuuuuguuugc

SEQ ID NO: 3818300 - RNA, 20 nt, Human
aucugaaaauguauguguaa

SEQ ID NO: 3818301 - RNA, 15 nt, Human
aucugaagauuguuu

SEQ ID NO: 3818302 - RNA, 20 nt, Human
aucugaagauuguuuaucua

SEQ ID NO: 3818303 - RNA, 23 nt, Human
aucugaagcuucacucacuguca

SEQ ID NO: 3818304 - RNA, 22 nt, Human
aucugaauaccucuuugaaaga

SEQ ID NO: 3818305 - RNA, 20 nt, Human
aucugacaucucugcaaucu

SEQ ID NO: 3818306 - RNA, 20 nt, Human
aucugacaugauuccuuccu

SEQ ID NO: 3818307 - RNA, 16 nt, Human
aucugaccagcagcgc

SEQ ID NO: 3818308 - RNA, 13 nt, Human
aucugacccagug

SEQ ID NO: 3818309 - RNA, 18 nt, Human
aucugacccagugccccc

SEQ ID NO: 3818310 - RNA, 21 nt, Human
aucugacccagugcccccacu

SEQ ID NO: 3818311 - RNA, 18 nt, Human
aucugacucacaagaaga

SEQ ID NO: 3818312 - RNA, 22 nt, Human
aucugagaaaagcuuugaaccc

SEQ ID NO: 3818313 - RNA, 21 nt, Human
aucugagaaacaaugacuaau

SEQ ID NO: 3818314 - RNA, 22 nt, Human
aucugagagaggcuaaaauguu

SEQ ID NO: 3818315 - RNA, 19 nt, Human
aucugagcagguugcucca

SEQ ID NO: 3818316 - RNA, 19 nt, Human
aucugagcucuuugcacua

SEQ ID NO: 3818317 - RNA, 16 nt, Human
aucugagcugagccag

SEQ ID NO: 3818318 - RNA, 19 nt, Human
aucugagcugagccaggcu

SEQ ID NO: 3818319 - RNA, 16 nt, Human
aucugaggaauucugu

SEQ ID NO: 3818320 - RNA, 20 nt, Human
aucugaggaauucuguauag

SEQ ID NO: 3818321 - RNA, 18 nt, Human
aucugaggaugaccagaa

SEQ ID NO: 3818322 - RNA, 21 nt, Human
aucugagggaaauguuuugua

SEQ ID NO: 3818323 - RNA, 16 nt, Human
aucugagggaggaggc

SEQ ID NO: 3818324 - RNA, 22 nt, Human
aucugagggaggaggccaccuc

SEQ ID NO: 3818325 - RNA, 23 nt, Human
aucugagggaggaggccaccucu

SEQ ID NO: 3818326 - RNA, 13 nt, Human
aucugaguccugg

SEQ ID NO: 3818327 - RNA, 16 nt, Human
aucugaguugccaaga

SEQ ID NO: 3818328 - RNA, 18 nt, Human
aucugaguugccaagaca

SEQ ID NO: 3818329 - RNA, 20 nt, Human
aucugaguugccaagacaaa

SEQ ID NO: 3818330 - RNA, 23 nt, Human
aucugaguugccaagacaaauca

SEQ ID NO: 3818331 - RNA, 12 nt, Human
aucugauagggu

SEQ ID NO: 3818332 - RNA, 22 nt, Human
aucugauaggguuugugacagg

SEQ ID NO: 3818333 - RNA, 19 nt, Human
aucugaucagaacaaaugu

SEQ ID NO: 3818334 - RNA, 18 nt, Human
aucugaucguucuuucua

SEQ ID NO: 3818335 - RNA, 20 nt, Human
aucugaucguucuuucuagc

SEQ ID NO: 3818336 - RNA, 18 nt, Human
aucugaugcaagcaagaa

SEQ ID NO: 3818337 - RNA, 14 nt, Human
aucugauggcuucu

SEQ ID NO: 3818338 - RNA, 17 nt, Human
aucugauugugauguga

SEQ ID NO: 3818339 - RNA, 22 nt, Human
aucugauuguugucaggccaua

SEQ ID NO: 3818340 - RNA, 13 nt, Human
aucugauuugcau

SEQ ID NO: 3818341 - RNA, 19 nt, Human
aucugauuugcauauucau

SEQ ID NO: 3818342 - RNA, 21 nt, Human
aucugcaauucaaaaguucca

SEQ ID NO: 3818343 - RNA, 15 nt, Human
aucugcaccccccug

SEQ ID NO: 3818344 - RNA, 17 nt, Human
aucugcaccccccuggg

SEQ ID NO: 3818345 - RNA, 21 nt, Human
aucugcaccccccugggcuga

SEQ ID NO: 3818346 - RNA, 22 nt, Human
aucugcaccccuucucuccucc

SEQ ID NO: 3818347 - RNA, 20 nt, Human
aucugcacccuucuuuucuc

SEQ ID NO: 3818348 - RNA, 22 nt, Human
aucugcacccuucuuuucucau

SEQ ID NO: 3818349 - RNA, 11 nt, Human
aucugcagaag

SEQ ID NO: 3818350 - RNA, 14 nt, Human
aucugcagaaggaa

SEQ ID NO: 3818351 - RNA, 20 nt, Human
aucugcagaaggaaaaaugu

SEQ ID NO: 3818352 - RNA, 16 nt, Human
aucugcaggcagacac

SEQ ID NO: 3818353 - RNA, 17 nt, Human
aucugcaggcagacacg

SEQ ID NO: 3818354 - RNA, 13 nt, Human
aucugcagucacu

SEQ ID NO: 3818355 - RNA, 17 nt, Human
aucugcauugcccaguc

SEQ ID NO: 3818356 - RNA, 23 nt, Human
aucugcccaccucagccucccaa

SEQ ID NO: 3818357 - RNA, 19 nt, Human
aucugcccaggggugcccc

SEQ ID NO: 3818358 - RNA, 21 nt, Human
aucugcccaggggugcccccu

SEQ ID NO: 3818359 - RNA, 22 nt, Human
aucugcccaggggugcccccuc

SEQ ID NO: 3818360 - RNA, 23 nt, Human
aucugcccaggggugcccccucc

SEQ ID NO: 3818361 - RNA, 18 nt, Human
aucugccccacagucucc

SEQ ID NO: 3818362 - RNA, 12 nt, Human
aucugccccucc

SEQ ID NO: 3818363 - RNA, 23 nt, Human
aucugcccgccugcccaccugcc

SEQ ID NO: 3818364 - RNA, 15 nt, Human
aucugccuaaggacu

SEQ ID NO: 3818365 - RNA, 21 nt, Human
aucugccuaaggacuucuuua

SEQ ID NO: 3818366 - RNA, 22 nt, Human
aucugccuaaggacuucuuuaa

SEQ ID NO: 3818367 - RNA, 15 nt, Human
aucugccucucuugu

SEQ ID NO: 3818368 - RNA, 17 nt, Human
aucugccuuaaaaccaa

SEQ ID NO: 3818369 - RNA, 16 nt, Human
aucugccuuuauugug

SEQ ID NO: 3818370 - RNA, 19 nt, Human
aucugccuuuauuguguuu

SEQ ID NO: 3818371 - RNA, 15 nt, Human
aucugcgaucaucgu

SEQ ID NO: 3818372 - RNA, 22 nt, Human
aucugcggaucucagcuuugag

SEQ ID NO: 3818373 - RNA, 21 nt, Human
aucugcgggggcagugcucac

SEQ ID NO: 3818374 - RNA, 17 nt, Human
aucugcgugacaauaaa

SEQ ID NO: 3818375 - RNA, 15 nt, Human
aucugcgugugugca

SEQ ID NO: 3818376 - RNA, 13 nt, Human
aucugcuaugcuu

SEQ ID NO: 3818377 - RNA, 16 nt, Human
aucugcuaugcuugaa

SEQ ID NO: 3818378 - RNA, 18 nt, Human
aucugcucacuuuaaacc

SEQ ID NO: 3818379 - RNA, 16 nt, Human
aucugcucagcccugg

SEQ ID NO: 3818380 - RNA, 17 nt, Human
aucugcugcagagcagu

SEQ ID NO: 3818381 - RNA, 17 nt, Human
aucugcuguccagacag

SEQ ID NO: 3818382 - RNA, 21 nt, Human
aucugcuguccagacagccug

SEQ ID NO: 3818383 - RNA, 13 nt, Human
aucugcugucuuu

SEQ ID NO: 3818384 - RNA, 21 nt, Human
aucugcugucuuuucuuugcc

SEQ ID NO: 3818385 - RNA, 22 nt, Human
aucugcugucuuuucuuugcca

SEQ ID NO: 3818386 - RNA, 15 nt, Human
aucugcuuaugcagu

SEQ ID NO: 3818387 - RNA, 12 nt, Human
aucugcuucagu

SEQ ID NO: 3818388 - RNA, 15 nt, Human
aucuggaacccagac

SEQ ID NO: 3818389 - RNA, 18 nt, Human
aucuggaacccagacuca

SEQ ID NO: 3818390 - RNA, 19 nt, Human
aucuggaacccagacucag

SEQ ID NO: 3818391 - RNA, 16 nt, Human
aucuggaaccucagcc

SEQ ID NO: 3818392 - RNA, 17 nt, Human
aucuggaaccucagccu

SEQ ID NO: 3818393 - RNA, 18 nt, Human
aucuggaaccucagccug

SEQ ID NO: 3818394 - RNA, 20 nt, Human
aucuggaaccucagccuggc

SEQ ID NO: 3818395 - RNA, 22 nt, Human
aucuggaaccucagccuggcca

SEQ ID NO: 3818396 - RNA, 21 nt, Human
aucuggaagagcuaggcaggg

SEQ ID NO: 3818397 - RNA, 21 nt, Human
aucuggaagccaaaauguagg

SEQ ID NO: 3818398 - RNA, 21 nt, Human
aucuggaagggccaaggucug

SEQ ID NO: 3818399 - RNA, 21 nt, Human
aucuggaccccaucugugaau

SEQ ID NO: 3818400 - RNA, 22 nt, Human
aucuggagaccagggagccuuu

SEQ ID NO: 3818401 - RNA, 14 nt, Human
aucuggagagaaca

SEQ ID NO: 3818402 - RNA, 20 nt, Human
aucuggagagcuagaaccug

SEQ ID NO: 3818403 - RNA, 22 nt, Human
aucuggaggccuuccagcugcu

SEQ ID NO: 3818404 - RNA, 18 nt, Human
aucuggaguucucaaaga

SEQ ID NO: 3818405 - RNA, 15 nt, Human
aucuggauucaaauu

SEQ ID NO: 3818406 - RNA, 15 nt, Human
aucuggauuccagag

SEQ ID NO: 3818407 - RNA, 21 nt, Human
aucuggcccucgacacucacc

SEQ ID NO: 3818408 - RNA, 19 nt, Human
aucuggccuaaaaucuugg

SEQ ID NO: 3818409 - RNA, 21 nt, Human
aucuggccuaaaaucuuggaa

SEQ ID NO: 3818410 - RNA, 21 nt, Human
aggccccacugaugcuguucu

SEQ ID NO: 3818411 - RNA, 17 nt, Human
aggccccacuggggaaa

SEQ ID NO: 3818412 - RNA, 14 nt, Human
aggccccagagacu

SEQ ID NO: 3818413 - RNA, 15 nt, Human
aggccccaggaagcc

SEQ ID NO: 3818414 - RNA, 17 nt, Human
aggccccaugaccucca

SEQ ID NO: 3818415 - RNA, 15 nt, Human
aggcccccaccacac

SEQ ID NO: 3818416 - RNA, 17 nt, Human
aggcccccaccacacau

SEQ ID NO: 3818417 - RNA, 22 nt, Human
aggcccccaccacacaucccag

SEQ ID NO: 3818418 - RNA, 18 nt, Human
aggcccccacuugccucu

SEQ ID NO: 3818419 - RNA, 18 nt, Human
aggcccccaucauccucu

SEQ ID NO: 3818420 - RNA, 19 nt, Human
aggcccccgccuuggccug

SEQ ID NO: 3818421 - RNA, 21 nt, Human
aggcccccucucaggagccau

SEQ ID NO: 3818422 - RNA, 18 nt, Human
aggcccccugccugcccu

SEQ ID NO: 3818423 - RNA, 17 nt, Human
agggagggcucugaggc

SEQ ID NO: 3818424 - RNA, 12 nt, Human
agggaggggacu

SEQ ID NO: 3818425 - RNA, 23 nt, Human
agggaggggccggcccugugugc

SEQ ID NO: 3818426 - RNA, 20 nt, Human
agggaggucacuggaaaggg

SEQ ID NO: 3818427 - RNA, 17 nt, Human
agggaggugaccccagg

SEQ ID NO: 3818428 - RNA, 23 nt, Human
agggagguguuuaaagagagguu

SEQ ID NO: 3818429 - RNA, 14 nt, Human
agggaguccccucc

SEQ ID NO: 3818430 - RNA, 16 nt, Human
agggaguccccucccc

SEQ ID NO: 3818431 - RNA, 22 nt, Human
agggaguccccuccccggcccu

SEQ ID NO: 3818432 - RNA, 13 nt, Human
agggagucugcca

SEQ ID NO: 3818433 - RNA, 15 nt, Human
agggagucugccagg

SEQ ID NO: 3818434 - RNA, 17 nt, Human
agggagugacagaggca

SEQ ID NO: 3818435 - RNA, 19 nt, Human
agggagugacagaggcagc

SEQ ID NO: 3818436 - RNA, 17 nt, Human
agggagugcuggcucac

SEQ ID NO: 3818437 - RNA, 20 nt, Human
agggagugcuggcucacagu

SEQ ID NO: 3818438 - RNA, 23 nt, Human
agggagugcuggcucacaguaca

SEQ ID NO: 3818439 - RNA, 24 nt, Human
agggagugcuggcucacaguacag

SEQ ID NO: 3818440 - RNA, 17 nt, Human
agggaguguacucccag

SEQ ID NO: 3818441 - RNA, 18 nt, Human
agggaguguacucccagg

SEQ ID NO: 3818442 - RNA, 20 nt, Human
agggaguuacugaagucuua

SEQ ID NO: 3818443 - RNA, 23 nt, Human
agggauaaagaaaaaaauacuau

SEQ ID NO: 3818444 - RNA, 15 nt, Human
agggauaagguaccu

SEQ ID NO: 3818445 - RNA, 16 nt, Human
agggauacccauccca

SEQ ID NO: 3818446 - RNA, 22 nt, Human
agggauacgagcggaguccccu

SEQ ID NO: 3818447 - RNA, 13 nt, Human
agggauagagggg

SEQ ID NO: 3818448 - RNA, 17 nt, Human
agggauagcacugagca

SEQ ID NO: 3818449 - RNA, 22 nt, Human
agggauagcacugagcaaagca

SEQ ID NO: 3818450 - RNA, 18 nt, Human
agggauauauaagaugga

SEQ ID NO: 3818451 - RNA, 21 nt, Human
agggaucaaccagcuaagaaa

SEQ ID NO: 3818452 - RNA, 13 nt, Human
agggaucacaggg

SEQ ID NO: 3818453 - RNA, 15 nt, Human
agggaucacagggcc

SEQ ID NO: 3818454 - RNA, 19 nt, Human
agggaucaucaugcagcuc

SEQ ID NO: 3818455 - RNA, 15 nt, Human
agggaucccucaucu

SEQ ID NO: 3818456 - RNA, 19 nt, Human
agggaucccucaucugucc

SEQ ID NO: 3818457 - RNA, 22 nt, Human
agggaucuugcauucccagugg

SEQ ID NO: 3818458 - RNA, 22 nt, Human
agggaugacuaaaauauuuauu

SEQ ID NO: 3818459 - RNA, 20 nt, Human
agggaugagcauggagcugg

SEQ ID NO: 3818460 - RNA, 21 nt, Human
agggaugagcauggagcuggc

SEQ ID NO: 3818461 - RNA, 16 nt, Human
agggaugaggugcugg

SEQ ID NO: 3818462 - RNA, 18 nt, Human
agggaugccaucuguggg

SEQ ID NO: 3818463 - RNA, 17 nt, Human
agggaugcccuggaggu

SEQ ID NO: 3818464 - RNA, 20 nt, Human
agggaugcccuggagguggc

SEQ ID NO: 3818465 - RNA, 19 nt, Human
agggaugcugccugaguca

SEQ ID NO: 3818466 - RNA, 17 nt, Human
agggauggacaucuugu

SEQ ID NO: 3818467 - RNA, 13 nt, Human
agggauggacuga

SEQ ID NO: 3818468 - RNA, 17 nt, Human
agggauggacugaugcu

SEQ ID NO: 3818469 - RNA, 17 nt, Human
aucuaccaacuuucaag

SEQ ID NO: 3818470 - RNA, 15 nt, Human
aucuacccaaaggau

SEQ ID NO: 3818471 - RNA, 22 nt, Human
aucuaccccagacuagauguag

SEQ ID NO: 3818472 - RNA, 19 nt, Human
aucuaccuggagggaagag

SEQ ID NO: 3818473 - RNA, 22 nt, Human
aucuaccuuccagucaggauga

SEQ ID NO: 3818474 - RNA, 15 nt, Human
aucuaccuucuguag

SEQ ID NO: 3818475 - RNA, 15 nt, Human
aucuacuaauuccac

SEQ ID NO: 3818476 - RNA, 16 nt, Human
aucuacucagaaauuu

SEQ ID NO: 3818477 - RNA, 10 nt, Human
aucuacugca

SEQ ID NO: 3818478 - RNA, 13 nt, Human
aucuacugcauuu

SEQ ID NO: 3818479 - RNA, 21 nt, Human
aucuagaacacaggcaaaauc

SEQ ID NO: 3818480 - RNA, 16 nt, Human
aucuagaagaaaugaa

SEQ ID NO: 3818481 - RNA, 18 nt, Human
aucuagaagaaaugaaau

SEQ ID NO: 3818482 - RNA, 21 nt, Human
aucuagaagagucuauugucu

SEQ ID NO: 3818483 - RNA, 21 nt, Human
aucuagaauguguuuucugaa

SEQ ID NO: 3818484 - RNA, 19 nt, Human
aucuagaggcuuccuucau

SEQ ID NO: 3818485 - RNA, 15 nt, Human
aucuagcaaucacaa

SEQ ID NO: 3818486 - RNA, 17 nt, Human
aucuaggaaaauauuuu

SEQ ID NO: 3818487 - RNA, 19 nt, Human
aucuaggaaaauauuuuga

SEQ ID NO: 3818488 - RNA, 14 nt, Human
aucuaggaaaauua

SEQ ID NO: 3818489 - RNA, 17 nt, Human
aucuaggaagacuuugg

SEQ ID NO: 3818490 - RNA, 19 nt, Human
aucuaggaagacuuuggaa

SEQ ID NO: 3818491 - RNA, 23 nt, Human
aucuaggaagacuuuggaaagag

SEQ ID NO: 3818492 - RNA, 14 nt, Human
aucuaggagaggag

SEQ ID NO: 3818493 - RNA, 19 nt, Human
aucuaggauuuuaagggaa

SEQ ID NO: 3818494 - RNA, 14 nt, Human
aucuaggcaugaag

SEQ ID NO: 3818495 - RNA, 20 nt, Human
aucuaggcaugaagagcaaa

SEQ ID NO: 3818496 - RNA, 16 nt, Human
aucuagguaauuuuua

SEQ ID NO: 3818497 - RNA, 21 nt, Human
aucuagguggaguugaaagag

SEQ ID NO: 3818498 - RNA, 16 nt, Human
aucuagguuuaacuca

SEQ ID NO: 3818499 - RNA, 18 nt, Human
aucuagguuuaacucaga

SEQ ID NO: 3818500 - RNA, 21 nt, Human
aucuagguuuaugacaguaau

SEQ ID NO: 3818501 - RNA, 23 nt, Human
aucuagguuuaugacaguaauug

SEQ ID NO: 3818502 - RNA, 12 nt, Human
aucuaguaguug

SEQ ID NO: 3818503 - RNA, 21 nt, Human
aucuaguaguuguucugaaau

SEQ ID NO: 3818504 - RNA, 18 nt, Human
aucuaguaugaaauuaua

SEQ ID NO: 3818505 - RNA, 19 nt, Human
aucuagugcagcugauuuu

SEQ ID NO: 3818506 - RNA, 19 nt, Human
aucuaguuccccuguuuau

SEQ ID NO: 3818507 - RNA, 22 nt, Human
aucuaguuccccuguuuauuca

SEQ ID NO: 3818508 - RNA, 23 nt, Human
aucuaguuccccuguuuauucau

SEQ ID NO: 3818509 - RNA, 22 nt, Human
aucuaguuuacagaaaaaucuu

SEQ ID NO: 3818510 - RNA, 14 nt, Human
aucuauaaaauaga

SEQ ID NO: 3818511 - RNA, 15 nt, Human
aucuauaaacuauaa

SEQ ID NO: 3818512 - RNA, 23 nt, Human
aucuauaaggugcucucuuucug

SEQ ID NO: 3818513 - RNA, 11 nt, Human
aucuauaauuu

SEQ ID NO: 3818514 - RNA, 16 nt, Human
aucuauagaaagcuau

SEQ ID NO: 3818515 - RNA, 21 nt, Human
aucuauaguugauauguuuua

SEQ ID NO: 3818516 - RNA, 16 nt, Human
aucuauauaaaauaac

SEQ ID NO: 3818517 - RNA, 14 nt, Human
aucuauauauaauu

SEQ ID NO: 3818518 - RNA, 15 nt, Human
aucuauauauaauuc

SEQ ID NO: 3818519 - RNA, 19 nt, Human
aucuauauauaauucugua

SEQ ID NO: 3818520 - RNA, 15 nt, Human
aucuauauaugugua

SEQ ID NO: 3818521 - RNA, 16 nt, Human
aucuauauauguguau

SEQ ID NO: 3818522 - RNA, 18 nt, Human
aucuauauauguguaugu

SEQ ID NO: 3818523 - RNA, 19 nt, Human
aucuauauauguguaugua

SEQ ID NO: 3818524 - RNA, 14 nt, Human
aucuauauuuuaca

SEQ ID NO: 3818525 - RNA, 22 nt, Human
aucuaucaauagucaagaaaaa

SEQ ID NO: 3818526 - RNA, 19 nt, Human
aucuaucucaucuaucuca

SEQ ID NO: 3818527 - RNA, 19 nt, Human
aucuaucuggugauuucua

SEQ ID NO: 3818528 - RNA, 22 nt, Human
aucuaucuuaauacuaaggaac

SEQ ID NO: 3818529 - RNA, 16 nt, Human
aucuaugcauuuucug

SEQ ID NO: 3818530 - RNA, 19 nt, Human
aucuaugccaaagaucacu

SEQ ID NO: 3818531 - RNA, 23 nt, Human
aucuaugggagagugucaaccag

SEQ ID NO: 3818532 - RNA, 16 nt, Human
aucuauguuucaucuu

SEQ ID NO: 3818533 - RNA, 15 nt, Human
aucuauuaauauaug

SEQ ID NO: 3818534 - RNA, 18 nt, Human
aucuauuauacuguauua

SEQ ID NO: 3818535 - RNA, 15 nt, Human
aucuauucagacaag

SEQ ID NO: 3818536 - RNA, 23 nt, Human
aucuauucucuccaaaaaugcac

SEQ ID NO: 3818537 - RNA, 17 nt, Human
aucuauucugagaaaac

SEQ ID NO: 3818538 - RNA, 17 nt, Human
aucuauugggauuuucu

SEQ ID NO: 3818539 - RNA, 17 nt, Human
aucuauuggguucauua

SEQ ID NO: 3818540 - RNA, 19 nt, Human
aucuauuggguucauuauu

SEQ ID NO: 3818541 - RNA, 22 nt, Human
aucuauuggguucauuauugga

SEQ ID NO: 3818542 - RNA, 12 nt, Human
aucuauuguaag

SEQ ID NO: 3818543 - RNA, 13 nt, Human
aucuauuguaaga

SEQ ID NO: 3818544 - RNA, 17 nt, Human
aucuauuguaagauaaa

SEQ ID NO: 3818545 - RNA, 21 nt, Human
aucuauuguaagauaaaaaag

SEQ ID NO: 3818546 - RNA, 15 nt, Human
aucuauuuauuaaua

SEQ ID NO: 3818547 - RNA, 19 nt, Human
aucuauuuauuaauauuua

SEQ ID NO: 3818548 - RNA, 12 nt, Human
aucuauuugagg

SEQ ID NO: 3818549 - RNA, 12 nt, Human
aucuauuuguau

SEQ ID NO: 3818550 - RNA, 22 nt, Human
aucuauuuguauauauacauaa

SEQ ID NO: 3818551 - RNA, 16 nt, Human
aucuauuuucuaugua

SEQ ID NO: 3818552 - RNA, 18 nt, Human
aucuauuuugaugcagca

SEQ ID NO: 3818553 - RNA, 21 nt, Human
aucuauuuuuggagguuuauu

SEQ ID NO: 3818554 - RNA, 19 nt, Human
aucuauuuuuggcagucug

SEQ ID NO: 3818555 - RNA, 23 nt, Human
aucucaaauaacuaaaagguaug

SEQ ID NO: 3818556 - RNA, 20 nt, Human
aucucaaauaggcuauuaaa

SEQ ID NO: 3818557 - RNA, 20 nt, Human
aucucaacaggccucagggc

SEQ ID NO: 3818558 - RNA, 22 nt, Human
aucucaacaggccucagggcuc

SEQ ID NO: 3818559 - RNA, 22 nt, Human
aucucaagaugggggcagggcu

SEQ ID NO: 3818560 - RNA, 13 nt, Human
aucucaauauuuc

SEQ ID NO: 3818561 - RNA, 15 nt, Human
aucucacacaugagc

SEQ ID NO: 3818562 - RNA, 23 nt, Human
aucucacacaugagcaucaggcc

SEQ ID NO: 3818563 - RNA, 11 nt, Human
aucucacacuc

SEQ ID NO: 3818564 - RNA, 15 nt, Human
aucucacagcacacu

SEQ ID NO: 3818565 - RNA, 12 nt, Human
aucucacagcua

SEQ ID NO: 3818566 - RNA, 19 nt, Human
agggccaaaagcuucccuc

SEQ ID NO: 3818567 - RNA, 21 nt, Human
agggccaacccuucuccucuu

SEQ ID NO: 3818568 - RNA, 18 nt, Human
agggccacacuauuacca

SEQ ID NO: 3818569 - RNA, 23 nt, Human
agggccaccuacaauacaucuga

SEQ ID NO: 3818570 - RNA, 14 nt, Human
agggccacucugcc

SEQ ID NO: 3818571 - RNA, 16 nt, Human
agggccagaucuguua

SEQ ID NO: 3818572 - RNA, 18 nt, Human
agggccagccucuagagc

SEQ ID NO: 3818573 - RNA, 16 nt, Human
agggccaggagaugga

SEQ ID NO: 3818574 - RNA, 13 nt, Human
agggccaggcagg

SEQ ID NO: 3818575 - RNA, 20 nt, Human
agggccaggggucucccugg

SEQ ID NO: 3818576 - RNA, 13 nt, Human
agggccaguccug

SEQ ID NO: 3818577 - RNA, 17 nt, Human
agggccaguggggccug

SEQ ID NO: 3818578 - RNA, 19 nt, Human
agggccaguggggccugug

SEQ ID NO: 3818579 - RNA, 20 nt, Human
agggccaguggggccugugg

SEQ ID NO: 3818580 - RNA, 19 nt, Human
agggccaugcugaagggac

SEQ ID NO: 3818581 - RNA, 16 nt, Human
agggcccaagucccug

SEQ ID NO: 3818582 - RNA, 22 nt, Human
agggcccaagucccuguuuucu

SEQ ID NO: 3818583 - RNA, 15 nt, Human
agggcccacuuguau

SEQ ID NO: 3818584 - RNA, 12 nt, Human
agggcccagaga

SEQ ID NO: 3818585 - RNA, 13 nt, Human
agggcccagagag

SEQ ID NO: 3818586 - RNA, 18 nt, Human
agggcccagagagggugg

SEQ ID NO: 3818587 - RNA, 15 nt, Human
agggcccagagcagg

SEQ ID NO: 3818588 - RNA, 14 nt, Human
agggcccagagccc

SEQ ID NO: 3818589 - RNA, 15 nt, Human
agggcccagagccca

SEQ ID NO: 3818590 - RNA, 16 nt, Human
agggcccagagcccag

SEQ ID NO: 3818591 - RNA, 18 nt, Human
agggcccagagcccagcu

SEQ ID NO: 3818592 - RNA, 15 nt, Human
agggcccagaggcug

SEQ ID NO: 3818593 - RNA, 14 nt, Human
agggccccagcacu

SEQ ID NO: 3818594 - RNA, 17 nt, Human
agggccccucugcccag

SEQ ID NO: 3818595 - RNA, 20 nt, Human
agggccccucugcccagcuu

SEQ ID NO: 3818596 - RNA, 23 nt, Human
agggccccucugcccagcuuggg

SEQ ID NO: 3818597 - RNA, 19 nt, Human
agggcccugagcugagggc

SEQ ID NO: 3818598 - RNA, 12 nt, Human
agggcccugcag

SEQ ID NO: 3818599 - RNA, 13 nt, Human
agggcccuggagg

SEQ ID NO: 3818600 - RNA, 15 nt, Human
agggcccuggaggcg

SEQ ID NO: 3818601 - RNA, 16 nt, Human
agggcccugggccugc

SEQ ID NO: 3818602 - RNA, 18 nt, Human
agggcccugggccugccu

SEQ ID NO: 3818603 - RNA, 17 nt, Human
agggcccuuuuucaaua

SEQ ID NO: 3818604 - RNA, 20 nt, Human
agggccgaggaggugccugg

SEQ ID NO: 3818605 - RNA, 15 nt, Human
agggccgagugagag

SEQ ID NO: 3818606 - RNA, 20 nt, Human
agggccgccagggagaccug

SEQ ID NO: 3818607 - RNA, 16 nt, Human
agggccgggcagaggg

SEQ ID NO: 3818608 - RNA, 21 nt, Human
agggccggggaacuggccaag

SEQ ID NO: 3818609 - RNA, 19 nt, Human
agggccguaccccacccuc

SEQ ID NO: 3818610 - RNA, 20 nt, Human
agggccguaccccacccuca

SEQ ID NO: 3818611 - RNA, 19 nt, Human
agggccuagcugcuacaaa

SEQ ID NO: 3818612 - RNA, 23 nt, Human
agggccugcaggaccugccugua

SEQ ID NO: 3818613 - RNA, 17 nt, Human
agggccugcgagggcag

SEQ ID NO: 3818614 - RNA, 18 nt, Human
agggccugcuggaggccu

SEQ ID NO: 3818615 - RNA, 13 nt, Human
agggccuggccca

SEQ ID NO: 3818616 - RNA, 16 nt, Human
agggccuggccugagc

SEQ ID NO: 3818617 - RNA, 13 nt, Human
agggccuggcuca

SEQ ID NO: 3818618 - RNA, 18 nt, Human
agggccuggcucaggugg

SEQ ID NO: 3818619 - RNA, 15 nt, Human
agggccuggggccug

SEQ ID NO: 3818620 - RNA, 19 nt, Human
agggccuggggccugagag

SEQ ID NO: 3818621 - RNA, 22 nt, Human
agggccuggguuuucauguuuu

SEQ ID NO: 3818622 - RNA, 19 nt, Human
agggccugugggagccugc

SEQ ID NO: 3818623 - RNA, 16 nt, Human
agggccuuaaaagcca

SEQ ID NO: 3818624 - RNA, 14 nt, Human
agggccuugcccag

SEQ ID NO: 3818625 - RNA, 15 nt, Human
agggccuugcccaga

SEQ ID NO: 3818626 - RNA, 15 nt, Human
agggccuuuucuggc

SEQ ID NO: 3818627 - RNA, 20 nt, Human
agggccuuuucuggcaccgc

SEQ ID NO: 3818628 - RNA, 13 nt, Human
agggcggcagggg

SEQ ID NO: 3818629 - RNA, 16 nt, Human
agggcggcaggggccu

SEQ ID NO: 3818630 - RNA, 18 nt, Human
agggcggcaggggccugg

SEQ ID NO: 3818631 - RNA, 19 nt, Human
agggcggcaggggccugga

SEQ ID NO: 3818632 - RNA, 18 nt, Human
agggcgggcagagggcug

SEQ ID NO: 3818633 - RNA, 19 nt, Human
agggcgggcagagggcugg

SEQ ID NO: 3818634 - RNA, 15 nt, Human
aucugcaggcagaca

SEQ ID NO: 3818635 - RNA, 20 nt, Human
aucugcagggggugugucug

SEQ ID NO: 3818636 - RNA, 14 nt, Human
aucugcauucccag

SEQ ID NO: 3818637 - RNA, 20 nt, Human
aucugcauugcccagucuuu

SEQ ID NO: 3818638 - RNA, 22 nt, Human
aucugcauuuucaccccacccu

SEQ ID NO: 3818639 - RNA, 14 nt, Human
aucugcccaacugu

SEQ ID NO: 3818640 - RNA, 12 nt, Human
aucugcccagga

SEQ ID NO: 3818641 - RNA, 13 nt, Human
aucugcccaggac

SEQ ID NO: 3818642 - RNA, 15 nt, Human
aucugcccaggggug

SEQ ID NO: 3818643 - RNA, 15 nt, Human
aucugccccuccccc

SEQ ID NO: 3818644 - RNA, 16 nt, Human
aucugccccucccugc

SEQ ID NO: 3818645 - RNA, 20 nt, Human
aucugcccgccugcccaccu

SEQ ID NO: 3818646 - RNA, 21 nt, Human
aucugcccgccugcccaccug

SEQ ID NO: 3818647 - RNA, 14 nt, Human
aucugccuaaggac

SEQ ID NO: 3818648 - RNA, 17 nt, Human
aucugccuaaggacuuc

SEQ ID NO: 3818649 - RNA, 21 nt, Human
aucugccuuaaaaccaaagag

SEQ ID NO: 3818650 - RNA, 22 nt, Human
aucugccuuuauuguguuuguc

SEQ ID NO: 3818651 - RNA, 16 nt, Human
aucugcgugacaauaa

SEQ ID NO: 3818652 - RNA, 21 nt, Human
aucugcgugacaauaaaacau

SEQ ID NO: 3818653 - RNA, 23 nt, Human
aucugcgugacaauaaaacauua

SEQ ID NO: 3818654 - RNA, 18 nt, Human
aucugcuaccaaaacagu

SEQ ID NO: 3818655 - RNA, 14 nt, Human
aucugcucagcagc

SEQ ID NO: 3818656 - RNA, 15 nt, Human
aucugcucagcagcu

SEQ ID NO: 3818657 - RNA, 14 nt, Human
aucugcucagcccu

SEQ ID NO: 3818658 - RNA, 13 nt, Human
aucugcuccuccc

SEQ ID NO: 3818659 - RNA, 14 nt, Human
aucugcucuccuuc

SEQ ID NO: 3818660 - RNA, 17 nt, Human
aucugcucuccuuccug

SEQ ID NO: 3818661 - RNA, 21 nt, Human
aucugcucuccuuccuggagc

SEQ ID NO: 3818662 - RNA, 16 nt, Human
aucugcugcagagcag

SEQ ID NO: 3818663 - RNA, 15 nt, Human
aucugcuguauaugg

SEQ ID NO: 3818664 - RNA, 18 nt, Human
aucugcuguccagacagc

SEQ ID NO: 3818665 - RNA, 23 nt, Human
aucugcuguccagacagccugua

SEQ ID NO: 3818666 - RNA, 12 nt, Human
aucugcugucuu

SEQ ID NO: 3818667 - RNA, 21 nt, Human
aucugcuuaggaguuuaggga

SEQ ID NO: 3818668 - RNA, 21 nt, Human
aucugcuuaguagagcuuuuu

SEQ ID NO: 3818669 - RNA, 14 nt, Human
aucugcuucagugg

SEQ ID NO: 3818670 - RNA, 14 nt, Human
aucugcuuuuauua

SEQ ID NO: 3818671 - RNA, 22 nt, Human
aucugcuuuuuaaagaaugcuc

SEQ ID NO: 3818672 - RNA, 23 nt, Human
aucuggaaaccucuacauauuua

SEQ ID NO: 3818673 - RNA, 11 nt, Human
aucuggaaccc

SEQ ID NO: 3818674 - RNA, 14 nt, Human
aucuggaacccaga

SEQ ID NO: 3818675 - RNA, 17 nt, Human
aucuggaacccagacuc

SEQ ID NO: 3818676 - RNA, 23 nt, Human
aucuggaacccagacucagacau

SEQ ID NO: 3818677 - RNA, 11 nt, Human
aucuggaaccu

SEQ ID NO: 3818678 - RNA, 14 nt, Human
aucuggaagaaaaa

SEQ ID NO: 3818679 - RNA, 21 nt, Human
aucuggaaucuggagaccagg

SEQ ID NO: 3818680 - RNA, 18 nt, Human
aucuggacuccucugucc

SEQ ID NO: 3818681 - RNA, 19 nt, Human
aucuggacuccucugucca

SEQ ID NO: 3818682 - RNA, 22 nt, Human
aucuggacuccucuguccaggc

SEQ ID NO: 3818683 - RNA, 20 nt, Human
aucuggagaccagggagccu

SEQ ID NO: 3818684 - RNA, 16 nt, Human
aucuggagagaacagg

SEQ ID NO: 3818685 - RNA, 19 nt, Human
aucuggaggccuuccagcu

SEQ ID NO: 3818686 - RNA, 21 nt, Human
aucuggauaggagccugcugg

SEQ ID NO: 3818687 - RNA, 17 nt, Human
aucuggcaacaucuuua

SEQ ID NO: 3818688 - RNA, 21 nt, Human
aucuggccccagguagaaacu

SEQ ID NO: 3818689 - RNA, 17 nt, Human
aucuggccuaaaaucuu

SEQ ID NO: 3818690 - RNA, 20 nt, Human
aucuggccuaaaaucuugga

SEQ ID NO: 3818691 - RNA, 12 nt, Human
aucuggccuggc

SEQ ID NO: 3818692 - RNA, 16 nt, Human
aucuggccuggccugg

SEQ ID NO: 3818693 - RNA, 16 nt, Human
aucuggcugccuuugc

SEQ ID NO: 3818694 - RNA, 18 nt, Human
aucuggcuuauuuuaaug

SEQ ID NO: 3818695 - RNA, 22 nt, Human
aucuggcuuauuuuaaugugau

SEQ ID NO: 3818696 - RNA, 11 nt, Human
aucugggaaag

SEQ ID NO: 3818697 - RNA, 17 nt, Human
aucugggacccuuuccu

SEQ ID NO: 3818698 - RNA, 20 nt, Human
aucugggacccuuuccuucc

SEQ ID NO: 3818699 - RNA, 23 nt, Human
aucugggacccuuuccuuccuuc

SEQ ID NO: 3818700 - RNA, 22 nt, Human
aucugggauucccaccaagguc

SEQ ID NO: 3818701 - RNA, 18 nt, Human
aucugggcauagaugcag

SEQ ID NO: 3818702 - RNA, 17 nt, Human
aucugggccagaauuuc

SEQ ID NO: 3818703 - RNA, 13 nt, Human
aucugggccuggg

SEQ ID NO: 3818704 - RNA, 19 nt, Human
aucugggccuuggccugga

SEQ ID NO: 3818705 - RNA, 21 nt, Human
aucugggccuuggccuggagc

SEQ ID NO: 3818706 - RNA, 17 nt, Human
aucugggcugugggcaa

SEQ ID NO: 3818707 - RNA, 13 nt, Human
aucugggcuuccu

SEQ ID NO: 3818708 - RNA, 14 nt, Human
aucugggcuuccug

SEQ ID NO: 3818709 - RNA, 16 nt, Human
aucugggcuuccugga

SEQ ID NO: 3818710 - RNA, 15 nt, Human
aucugggggagugga

SEQ ID NO: 3818711 - RNA, 21 nt, Human
agguccagcccuggcugaagg

SEQ ID NO: 3818712 - RNA, 23 nt, Human
agguccagcccuggcugaaggac

SEQ ID NO: 3818713 - RNA, 16 nt, Human
agguccagcucuggag

SEQ ID NO: 3818714 - RNA, 12 nt, Human
aggucccaaggc

SEQ ID NO: 3818715 - RNA, 17 nt, Human
aggucccaccuccagcc

SEQ ID NO: 3818716 - RNA, 18 nt, Human
aggucccaccuccagccc

SEQ ID NO: 3818717 - RNA, 19 nt, Human
aggucccaccuccagcccg

SEQ ID NO: 3818718 - RNA, 14 nt, Human
aggucccaggcaga

SEQ ID NO: 3818719 - RNA, 15 nt, Human
aggucccccugcagc

SEQ ID NO: 3818720 - RNA, 16 nt, Human
aggucccccugcagcu

SEQ ID NO: 3818721 - RNA, 12 nt, Human
aggucccuaaua

SEQ ID NO: 3818722 - RNA, 13 nt, Human
aggucccuaauaa

SEQ ID NO: 3818723 - RNA, 19 nt, Human
agguccgguguucuaagau

SEQ ID NO: 3818724 - RNA, 16 nt, Human
agguccucagaaagug

SEQ ID NO: 3818725 - RNA, 17 nt, Human
agguccuccccucucuu

SEQ ID NO: 3818726 - RNA, 21 nt, Human
agguccucuacuuaaugagau

SEQ ID NO: 3818727 - RNA, 19 nt, Human
agguccucugucagucaca

SEQ ID NO: 3818728 - RNA, 23 nt, Human
agguccucugucagucacagcca

SEQ ID NO: 3818729 - RNA, 21 nt, Human
agguccugaaaguaacucaua

SEQ ID NO: 3818730 - RNA, 12 nt, Human
agguccugagca

SEQ ID NO: 3818731 - RNA, 13 nt, Human
agguccugagcac

SEQ ID NO: 3818732 - RNA, 15 nt, Human
agguccugagcacug

SEQ ID NO: 3818733 - RNA, 20 nt, Human
agguccugagcacugccagg

SEQ ID NO: 3818734 - RNA, 19 nt, Human
agguccugggggccugacc

SEQ ID NO: 3818735 - RNA, 14 nt, Human
agguccuggugggg

SEQ ID NO: 3818736 - RNA, 19 nt, Human
agguccugguggggcagcu

SEQ ID NO: 3818737 - RNA, 14 nt, Human
aggucgggcucagc

SEQ ID NO: 3818738 - RNA, 22 nt, Human
aggucuauuuggauuauucuuu

SEQ ID NO: 3818739 - RNA, 19 nt, Human
aggucucagaaucuuuccu

SEQ ID NO: 3818740 - RNA, 20 nt, Human
aggucucauagguugagcaa

SEQ ID NO: 3818741 - RNA, 23 nt, Human
aggucucccgggaagccacccuc

SEQ ID NO: 3818742 - RNA, 13 nt, Human
aggucuccuccac

SEQ ID NO: 3818743 - RNA, 11 nt, Human
aggucuccucu

SEQ ID NO: 3818744 - RNA, 19 nt, Human
aggucucgcugaugcuggg

SEQ ID NO: 3818745 - RNA, 22 nt, Human
aggucucgcugaugcugggcug

SEQ ID NO: 3818746 - RNA, 16 nt, Human
aggucucucuuuggac

SEQ ID NO: 3818747 - RNA, 23 nt, Human
aggucucucuuuggacucucccc

SEQ ID NO: 3818748 - RNA, 12 nt, Human
aggucucuuccc

SEQ ID NO: 3818749 - RNA, 15 nt, Human
aggucucuugaggga

SEQ ID NO: 3818750 - RNA, 23 nt, Human
aggucugaaauuuuucuucuuga

SEQ ID NO: 3818751 - RNA, 23 nt, Human
aggucugagccacagcagcauuu

SEQ ID NO: 3818752 - RNA, 23 nt, Human
aggucugaguuguuaccccaagc

SEQ ID NO: 3818753 - RNA, 14 nt, Human
aggucugcucggcc

SEQ ID NO: 3818754 - RNA, 22 nt, Human
aggucugggagaggcagagugc

SEQ ID NO: 3818755 - RNA, 16 nt, Human
aggucuguuugcuguu

SEQ ID NO: 3818756 - RNA, 20 nt, Human
aggucuucaucgaaucuacu

SEQ ID NO: 3818757 - RNA, 21 nt, Human
aggucuucaucgaaucuacua

SEQ ID NO: 3818758 - RNA, 19 nt, Human
aggucuucuuaauauguuc

SEQ ID NO: 3818759 - RNA, 17 nt, Human
aggucuugaacuccugg

SEQ ID NO: 3818760 - RNA, 11 nt, Human
aggucuugcua

SEQ ID NO: 3818761 - RNA, 15 nt, Human
aggucuugcucuccu

SEQ ID NO: 3818762 - RNA, 19 nt, Human
aggucuuggaacuugccug

SEQ ID NO: 3818763 - RNA, 21 nt, Human
aggucuuggagcugagccucu

SEQ ID NO: 3818764 - RNA, 18 nt, Human
aggucuuggugccucugc

SEQ ID NO: 3818765 - RNA, 18 nt, Human
aggucuuucaguacuuuu

SEQ ID NO: 3818766 - RNA, 23 nt, Human
aggucuuuguaagaacuaaagaa

SEQ ID NO: 3818767 - RNA, 19 nt, Human
aggucuuuugacaugugga

SEQ ID NO: 3818768 - RNA, 20 nt, Human
aggugaaacuccagaugcca

SEQ ID NO: 3818769 - RNA, 22 nt, Human
aggugaaacuccagaugccaca

SEQ ID NO: 3818770 - RNA, 14 nt, Human
aggugaaagggagc

SEQ ID NO: 3818771 - RNA, 16 nt, Human
aggugaaggaauauau

SEQ ID NO: 3818772 - RNA, 13 nt, Human
aggugaaggaggc

SEQ ID NO: 3818773 - RNA, 19 nt, Human
aggugaaggaggcuccagg

SEQ ID NO: 3818774 - RNA, 23 nt, Human
aggugaaggaggcuccaggcagc

SEQ ID NO: 3818775 - RNA, 19 nt, Human
aggugaauagccauauuug

SEQ ID NO: 3818776 - RNA, 21 nt, Human
aggugaauagccauauuugua

SEQ ID NO: 3818777 - RNA, 22 nt, Human
aggugaauagccauauuuguaa

SEQ ID NO: 3818778 - RNA, 15 nt, Human
aggugacacuauagu

SEQ ID NO: 3818779 - RNA, 18 nt, Human
aggugacagaaggaccag

SEQ ID NO: 3818780 - RNA, 13 nt, Human
aggugacagagug

SEQ ID NO: 3818781 - RNA, 20 nt, Human
aggugacaugugaaaccuuu

SEQ ID NO: 3818782 - RNA, 22 nt, Human
aggugaccaaaauccccuucuc

SEQ ID NO: 3818783 - RNA, 14 nt, Human
aggugaccccaggg

SEQ ID NO: 3818784 - RNA, 15 nt, Human
aggugaccccagggc

SEQ ID NO: 3818785 - RNA, 16 nt, Human
aggugaccccagggca

SEQ ID NO: 3818786 - RNA, 18 nt, Human
aggugaccccagggcaca

SEQ ID NO: 3818787 - RNA, 14 nt, Human
aggugacugucugg

SEQ ID NO: 3818788 - RNA, 17 nt, Human
aggugacugucugggga

SEQ ID NO: 3818789 - RNA, 18 nt, Human
aggugacugucuggggag

SEQ ID NO: 3818790 - RNA, 13 nt, Human
aggugagaaaaaa

SEQ ID NO: 3818791 - RNA, 23 nt, Human
aggugagaagcagaggaaggaga

SEQ ID NO: 3818792 - RNA, 14 nt, Human
aggugagaccaccu

SEQ ID NO: 3818793 - RNA, 22 nt, Human
aggugagcaaccaguuggcuag

SEQ ID NO: 3818794 - RNA, 22 nt, Human
aggugagcacggccaacaaagc

SEQ ID NO: 3818795 - RNA, 20 nt, Human
aggugagcccauggcccucc

SEQ ID NO: 3818796 - RNA, 14 nt, Human
aggugaggccuguc

SEQ ID NO: 3818797 - RNA, 20 nt, Human
aggugaggccugucugugac

SEQ ID NO: 3818798 - RNA, 17 nt, Human
aggugaggucagcacau

SEQ ID NO: 3818799 - RNA, 21 nt, Human
aggugauaagggaaaagauaa

SEQ ID NO: 3818800 - RNA, 21 nt, Human
aggugauccacccaccucagc

SEQ ID NO: 3818801 - RNA, 18 nt, Human
aggugauccauguaacug

SEQ ID NO: 3818802 - RNA, 16 nt, Human
aggugaugaagacagc

SEQ ID NO: 3818803 - RNA, 21 nt, Human
aggugcaacagacuugaaugc

SEQ ID NO: 3818804 - RNA, 15 nt, Human
aggugcaauuucaag

SEQ ID NO: 3818805 - RNA, 18 nt, Human
aggugcaauuucaagguu

SEQ ID NO: 3818806 - RNA, 15 nt, Human
aggugcacaagcucc

SEQ ID NO: 3818807 - RNA, 18 nt, Human
aggugcacaagcuccaag

SEQ ID NO: 3818808 - RNA, 17 nt, Human
aggugcagagugcccag

SEQ ID NO: 3818809 - RNA, 14 nt, Human
aggugcagccagag

SEQ ID NO: 3818810 - RNA, 13 nt, Human
aggugcaggcagg

SEQ ID NO: 3818811 - RNA, 16 nt, Human
aggugccagcaaagcc

SEQ ID NO: 3818812 - RNA, 18 nt, Human
aggugcccagaaugaggc

SEQ ID NO: 3818813 - RNA, 12 nt, Human
aggugcccagga

SEQ ID NO: 3818814 - RNA, 15 nt, Human
aggugcccaggagaa

SEQ ID NO: 3818815 - RNA, 17 nt, Human
aggugcccaucccugga

SEQ ID NO: 3818816 - RNA, 17 nt, Human
aggugccccucucucca

SEQ ID NO: 3818817 - RNA, 15 nt, Human
aggugcccgccacca

SEQ ID NO: 3818818 - RNA, 18 nt, Human
aggugccucaagagaagg

SEQ ID NO: 3818819 - RNA, 15 nt, Human
aggugccuccaggug

SEQ ID NO: 3818820 - RNA, 17 nt, Human
aggugccugugaggcag

SEQ ID NO: 3818821 - RNA, 19 nt, Human
aggugccugugaggcaggg

SEQ ID NO: 3818822 - RNA, 20 nt, Human
aggugccugugaggcagggg

SEQ ID NO: 3818823 - RNA, 21 nt, Human
aggugccugugaggcaggggc

SEQ ID NO: 3818824 - RNA, 13 nt, Human
aggugccuucuuc

SEQ ID NO: 3818825 - RNA, 17 nt, Human
aggugccuucuucaggg

SEQ ID NO: 3818826 - RNA, 21 nt, Human
aggugccuucuucagggccug

SEQ ID NO: 3818827 - RNA, 18 nt, Human
aggugccuuucaaauuua

SEQ ID NO: 3818828 - RNA, 23 nt, Human
aggugcuaaauggucgcccagga

SEQ ID NO: 3818829 - RNA, 16 nt, Human
aggugcuacaaaaaca

SEQ ID NO: 3818830 - RNA, 22 nt, Human
aggugcuacaaaaacacagcaa

SEQ ID NO: 3818831 - RNA, 20 nt, Human
aggugcuacacccuuuucca

SEQ ID NO: 3818832 - RNA, 22 nt, Human
aggugcuaggaacacuccuuca

SEQ ID NO: 3818833 - RNA, 17 nt, Human
aggugcuauuguuacuc

SEQ ID NO: 3818834 - RNA, 21 nt, Human
aggugcugagcaaagggaaca

SEQ ID NO: 3818835 - RNA, 17 nt, Human
aggugcugccauccagg

SEQ ID NO: 3818836 - RNA, 21 nt, Human
aggugcugcuacccucccugc

SEQ ID NO: 3818837 - RNA, 23 nt, Human
aggugcugcuacccucccugcug

SEQ ID NO: 3818838 - RNA, 16 nt, Human
aggugcuggagcacug

SEQ ID NO: 3818839 - RNA, 23 nt, Human
aggugcuggaggugggagcagga

SEQ ID NO: 3818840 - RNA, 19 nt, Human
aggugcuguugucauugcu

SEQ ID NO: 3818841 - RNA, 23 nt, Human
aggugcuuauucucaaagcagga

SEQ ID NO: 3818842 - RNA, 21 nt, Human
aggugcuucaggauaccauau

SEQ ID NO: 3818843 - RNA, 18 nt, Human
augagucuguuguguguc

SEQ ID NO: 3818844 - RNA, 17 nt, Human
augagugaauaaauguc

SEQ ID NO: 3818845 - RNA, 13 nt, Human
augagugagaaua

SEQ ID NO: 3818846 - RNA, 17 nt, Human
augagugcgugcucagu

SEQ ID NO: 3818847 - RNA, 19 nt, Human
augagugcguggugcgagu

SEQ ID NO: 3818848 - RNA, 22 nt, Human
augagugcguggugcgagugcg

SEQ ID NO: 3818849 - RNA, 15 nt, Human
augaguggaaaaagc

SEQ ID NO: 3818850 - RNA, 20 nt, Human
augaguguaacaagaaagga

SEQ ID NO: 3818851 - RNA, 13 nt, Human
augagugugaagg

SEQ ID NO: 3818852 - RNA, 12 nt, Human
augagugugcau

SEQ ID NO: 3818853 - RNA, 22 nt, Human
augaguuguuuucagacucaga

SEQ ID NO: 3818854 - RNA, 22 nt, Human
auggaaacaaaguggaaggaaa

SEQ ID NO: 3818855 - RNA, 22 nt, Human
auggaaacccauaggcccacac

SEQ ID NO: 3818856 - RNA, 13 nt, Human
auggaaacgguga

SEQ ID NO: 3818857 - RNA, 16 nt, Human
auggaaacugaaugcu

SEQ ID NO: 3818858 - RNA, 15 nt, Human
auggaaaggagagga

SEQ ID NO: 3818859 - RNA, 16 nt, Human
auggaaaguaacucau

SEQ ID NO: 3818860 - RNA, 19 nt, Human
auggaaaugggcagagcag

SEQ ID NO: 3818861 - RNA, 20 nt, Human
auggaaauucccuucaucug

SEQ ID NO: 3818862 - RNA, 17 nt, Human
auggaaauuuaaagcag

SEQ ID NO: 3818863 - RNA, 14 nt, Human
auggaacacucuga

SEQ ID NO: 3818864 - RNA, 15 nt, Human
auggaacaggcucag

SEQ ID NO: 3818865 - RNA, 17 nt, Human
auggaaccaggcuugga

SEQ ID NO: 3818866 - RNA, 23 nt, Human
auggaacccuuuuggcccccgag

SEQ ID NO: 3818867 - RNA, 13 nt, Human
auggaaccuccuu

SEQ ID NO: 3818868 - RNA, 16 nt, Human
auggaacgcguugaaa

SEQ ID NO: 3818869 - RNA, 17 nt, Human
auggaacgcguugaaau

SEQ ID NO: 3818870 - RNA, 19 nt, Human
auggaacgcguugaaauug

SEQ ID NO: 3818871 - RNA, 22 nt, Human
auggaacucauuccugccuguc

SEQ ID NO: 3818872 - RNA, 12 nt, Human
auggaagaaagu

SEQ ID NO: 3818873 - RNA, 14 nt, Human
auggaagaaaguaa

SEQ ID NO: 3818874 - RNA, 14 nt, Human
auggaagacacauu

SEQ ID NO: 3818875 - RNA, 15 nt, Human
auggaagacagcucu

SEQ ID NO: 3818876 - RNA, 18 nt, Human
auggaagacagcucuuau

SEQ ID NO: 3818877 - RNA, 12 nt, Human
auggaagagaaa

SEQ ID NO: 3818878 - RNA, 13 nt, Human
auggaagagaaau

SEQ ID NO: 3818879 - RNA, 14 nt, Human
auggaagagaaauc

SEQ ID NO: 3818880 - RNA, 20 nt, Human
auggaagaggaaaaggcugg

SEQ ID NO: 3818881 - RNA, 14 nt, Human
auggaagccaacac

SEQ ID NO: 3818882 - RNA, 15 nt, Human
auggaagcuuccagu

SEQ ID NO: 3818883 - RNA, 14 nt, Human
auggaaggggcuga

SEQ ID NO: 3818884 - RNA, 22 nt, Human
auggaagguuuguauauuguca

SEQ ID NO: 3818885 - RNA, 21 nt, Human
auggaaguacuauaauuuacc

SEQ ID NO: 3818886 - RNA, 17 nt, Human
auggaauacaguguuau

SEQ ID NO: 3818887 - RNA, 21 nt, Human
auggaaucccacuguaugauu

SEQ ID NO: 3818888 - RNA, 14 nt, Human
auggaaugaggguu

SEQ ID NO: 3818889 - RNA, 15 nt, Human
auggaaugcuugaaa

SEQ ID NO: 3818890 - RNA, 16 nt, Human
auggaaugcuugaaaa

SEQ ID NO: 3818891 - RNA, 20 nt, Human
auggaaugcuugaaaaaugu

SEQ ID NO: 3818892 - RNA, 17 nt, Human
auggaauucacaaagua

SEQ ID NO: 3818893 - RNA, 13 nt, Human
auggaauugauuu

SEQ ID NO: 3818894 - RNA, 17 nt, Human
auggaauugauuugcau

SEQ ID NO: 3818895 - RNA, 17 nt, Human
auggaauugcuuaccaa

SEQ ID NO: 3818896 - RNA, 13 nt, Human
auggaauuucaua

SEQ ID NO: 3818897 - RNA, 17 nt, Human
auggaauuuguaaguuu

SEQ ID NO: 3818898 - RNA, 21 nt, Human
auggaauuuguaaguuuaugu

SEQ ID NO: 3818899 - RNA, 17 nt, Human
auggaauuuugcaaaga

SEQ ID NO: 3818900 - RNA, 19 nt, Human
auggaauuuugcaaagauu

SEQ ID NO: 3818901 - RNA, 16 nt, Human
auggaauuuuuuugua

SEQ ID NO: 3818902 - RNA, 18 nt, Human
auggaauuuuuuuguacg

SEQ ID NO: 3818903 - RNA, 23 nt, Human
auggacaccccuuauccaggacu

SEQ ID NO: 3818904 - RNA, 16 nt, Human
auggacacuacaccca

SEQ ID NO: 3818905 - RNA, 17 nt, Human
auggacacuacacccag

SEQ ID NO: 3818906 - RNA, 18 nt, Human
auggacacuacacccagc

SEQ ID NO: 3818907 - RNA, 11 nt, Human
auggacacucc

SEQ ID NO: 3818908 - RNA, 15 nt, Human
auggacacuccaggg

SEQ ID NO: 3818909 - RNA, 19 nt, Human
auggacacuccagugccag

SEQ ID NO: 3818910 - RNA, 15 nt, Human
auggacacuuugaaa

SEQ ID NO: 3818911 - RNA, 23 nt, Human
auggacacuuugaaauguguuuc

SEQ ID NO: 3818912 - RNA, 20 nt, Human
auggacagaagaaggcagca

SEQ ID NO: 3818913 - RNA, 16 nt, Human
auggacagauuaauau

SEQ ID NO: 3818914 - RNA, 18 nt, Human
auggacaguucacacccu

SEQ ID NO: 3818915 - RNA, 19 nt, Human
auggacaguucacacccug

SEQ ID NO: 3818916 - RNA, 19 nt, Human
auggacaucuugucauuuu

SEQ ID NO: 3818917 - RNA, 18 nt, Human
auggacauuuagaagaaa

SEQ ID NO: 3818918 - RNA, 22 nt, Human
auggaccacuguuucuugcuug

SEQ ID NO: 3818919 - RNA, 16 nt, Human
auggaccggagagugg

SEQ ID NO: 3818920 - RNA, 15 nt, Human
auggaccuaacauuc

SEQ ID NO: 3818921 - RNA, 14 nt, Human
auggaccugucacg

SEQ ID NO: 3818922 - RNA, 22 nt, Human
auggacggugcuccaggcaggc

SEQ ID NO: 3818923 - RNA, 17 nt, Human
auggacuaucugucugg

SEQ ID NO: 3818924 - RNA, 22 nt, Human
auggacuaucugucugguggcc

SEQ ID NO: 3818925 - RNA, 21 nt, Human
auggacuccagccugccuggc

SEQ ID NO: 3818926 - RNA, 19 nt, Human
auggacuccuguuguugaa

SEQ ID NO: 3818927 - RNA, 14 nt, Human
auggacucuacacu

SEQ ID NO: 3818928 - RNA, 16 nt, Human
auggacucuacacugu

SEQ ID NO: 3818929 - RNA, 13 nt, Human
auggacucugucc

SEQ ID NO: 3818930 - RNA, 14 nt, Human
auggacucuguccu

SEQ ID NO: 3818931 - RNA, 16 nt, Human
auggacucuguccuga

SEQ ID NO: 3818932 - RNA, 16 nt, Human
auggacuuguauauuu

SEQ ID NO: 3818933 - RNA, 18 nt, Human
auggacuuuggaagcagg

SEQ ID NO: 3818934 - RNA, 13 nt, Human
auggagaaagcug

SEQ ID NO: 3818935 - RNA, 14 nt, Human
auggagaagcugca

SEQ ID NO: 3818936 - RNA, 17 nt, Human
auggagaauugcugaag

SEQ ID NO: 3818937 - RNA, 20 nt, Human
auggagacuccaugagaagc

SEQ ID NO: 3818938 - RNA, 13 nt, Human
auggagagaaaac

SEQ ID NO: 3818939 - RNA, 18 nt, Human
auggagagaaaacagacc

SEQ ID NO: 3818940 - RNA, 13 nt, Human
auggagagagggg

SEQ ID NO: 3818941 - RNA, 17 nt, Human
auggagagaggggaaua

SEQ ID NO: 3818942 - RNA, 15 nt, Human
auggagagcccuggg

SEQ ID NO: 3818943 - RNA, 18 nt, Human
auggagagcccugggacc

SEQ ID NO: 3818944 - RNA, 13 nt, Human
auggagagcugga

SEQ ID NO: 3818945 - RNA, 17 nt, Human
auggagauugaccugga

SEQ ID NO: 3818946 - RNA, 13 nt, Human
auggagcaagaga

SEQ ID NO: 3818947 - RNA, 19 nt, Human
auggagcaguacaugggaa

SEQ ID NO: 3818948 - RNA, 18 nt, Human
auggagcaucaagccacu

SEQ ID NO: 3818949 - RNA, 11 nt, Human
auggagccagc

SEQ ID NO: 3818950 - RNA, 12 nt, Human
auggagccccag

SEQ ID NO: 3818951 - RNA, 21 nt, Human
auggagccuggcacaggacug

SEQ ID NO: 3818952 - RNA, 22 nt, Human
auggagccuggcacaggacuga

SEQ ID NO: 3818953 - RNA, 23 nt, Human
auggagcgcaccugcccccuggu

SEQ ID NO: 3818954 - RNA, 18 nt, Human
auggagcuauuuuaaacc

SEQ ID NO: 3818955 - RNA, 14 nt, Human
auggagcugggcua

SEQ ID NO: 3818956 - RNA, 22 nt, Human
auggaggaaaaccaagccgugg

SEQ ID NO: 3818957 - RNA, 18 nt, Human
auggaggaagaacugaaa

SEQ ID NO: 3818958 - RNA, 11 nt, Human
auggaggagaa

SEQ ID NO: 3818959 - RNA, 14 nt, Human
auggaggaggaggc

SEQ ID NO: 3818960 - RNA, 16 nt, Human
auggaggauggagaga

SEQ ID NO: 3818961 - RNA, 14 nt, Human
auggaggggcagag

SEQ ID NO: 3818962 - RNA, 19 nt, Human
auggaggggcagagccagg

SEQ ID NO: 3818963 - RNA, 18 nt, Human
auggaggggugguccuga

SEQ ID NO: 3818964 - RNA, 17 nt, Human
auggaguagaccccugg

SEQ ID NO: 3818965 - RNA, 17 nt, Human
auggagugcaccaaaga

SEQ ID NO: 3818966 - RNA, 19 nt, Human
auggagugcaccaaagaga

SEQ ID NO: 3818967 - RNA, 20 nt, Human
auggagugcaccaaagagaa

SEQ ID NO: 3818968 - RNA, 12 nt, Human
auggagugcugu

SEQ ID NO: 3818969 - RNA, 13 nt, Human
auggagugcuguu

SEQ ID NO: 3818970 - RNA, 19 nt, Human
auggaguggcaauauagaa

SEQ ID NO: 3818971 - RNA, 21 nt, Human
auggaguguguauuguuccca

SEQ ID NO: 3818972 - RNA, 15 nt, Human
auggaguucuugugc

SEQ ID NO: 3818973 - RNA, 16 nt, Human
auggaguuucuaaggu

SEQ ID NO: 3818974 - RNA, 21 nt, Human
auggauaaugccggugagaau

SEQ ID NO: 3818975 - RNA, 13 nt, Human
auggauacauaaa

SEQ ID NO: 3818976 - RNA, 19 nt, Human
auggauacuacaucuuuaa

SEQ ID NO: 3818977 - RNA, 16 nt, Human
auggauagagaagaaa

SEQ ID NO: 3818978 - RNA, 16 nt, Human
auggauagaguauuga

SEQ ID NO: 3818979 - RNA, 17 nt, Human
auggauaggcacaggaa

SEQ ID NO: 3818980 - RNA, 22 nt, Human
auggauauaguuuuacuuuuaa

SEQ ID NO: 3818981 - RNA, 14 nt, Human
auggaucagaucug

SEQ ID NO: 3818982 - RNA, 22 nt, Human
auggauccacuggcuggacaaa

SEQ ID NO: 3818983 - RNA, 16 nt, Human
auggaugaacugaaag

SEQ ID NO: 3818984 - RNA, 20 nt, Human
auggaugaaucucccacucc

SEQ ID NO: 3818985 - RNA, 21 nt, Human
auggaugaaucucccacucca

SEQ ID NO: 3818986 - RNA, 22 nt, Human
auggaugaaucucccacuccag

SEQ ID NO: 3818987 - RNA, 21 nt, Human
auggaugauucagaaauugga

SEQ ID NO: 3818988 - RNA, 13 nt, Human
auggaugcaaagu

SEQ ID NO: 3818989 - RNA, 17 nt, Human
auggauguccccagcag

SEQ ID NO: 3818990 - RNA, 12 nt, Human
auggauguuacu

SEQ ID NO: 3818991 - RNA, 16 nt, Human
auggauucuauuuauu

SEQ ID NO: 3818992 - RNA, 17 nt, Human
auggauucucagauauu

SEQ ID NO: 3818993 - RNA, 19 nt, Human
auggauucuccacucaguu

SEQ ID NO: 3818994 - RNA, 20 nt, Human
auggauugauaauugcauuc

SEQ ID NO: 3818995 - RNA, 15 nt, Human
auggauuggauuauu

SEQ ID NO: 3818996 - RNA, 16 nt, Human
auggauuguuaauuuc

SEQ ID NO: 3818997 - RNA, 17 nt, Human
auggauuucagaagccu

SEQ ID NO: 3818998 - RNA, 18 nt, Human
auggauuuccagccaaag

SEQ ID NO: 3818999 - RNA, 23 nt, Human
aggugcuucuaguucugccagga

SEQ ID NO: 3819000 - RNA, 19 nt, Human
auggacaggcuggcuccag

SEQ ID NO: 3819001 - RNA, 15 nt, Human
auggacauccuguau

SEQ ID NO: 3819002 - RNA, 12 nt, Human
auggacaucuug

SEQ ID NO: 3819003 - RNA, 20 nt, Human
auggacaucuugucauuuuu

SEQ ID NO: 3819004 - RNA, 19 nt, Human
auggacaugaucuucuuua

SEQ ID NO: 3819005 - RNA, 14 nt, Human
auggacaugguggc

SEQ ID NO: 3819006 - RNA, 15 nt, Human
auggaccacuguuuc

SEQ ID NO: 3819007 - RNA, 16 nt, Human
auggaccacuguuucu

SEQ ID NO: 3819008 - RNA, 13 nt, Human
auggacccaaugc

SEQ ID NO: 3819009 - RNA, 12 nt, Human
auggaccuaaca

SEQ ID NO: 3819010 - RNA, 17 nt, Human
auggacggugcuccagg

SEQ ID NO: 3819011 - RNA, 20 nt, Human
auggacggugcuccaggcag

SEQ ID NO: 3819012 - RNA, 19 nt, Human
auggacguguuaugacucc

SEQ ID NO: 3819013 - RNA, 23 nt, Human
auggacguguuaugacuccagaa

SEQ ID NO: 3819014 - RNA, 19 nt, Human
auggacuaacuugucuuug

SEQ ID NO: 3819015 - RNA, 15 nt, Human
auggacucuguccug

SEQ ID NO: 3819016 - RNA, 14 nt, Human
auggacugcucagg

SEQ ID NO: 3819017 - RNA, 18 nt, Human
auggacuuauuucuucaa

SEQ ID NO: 3819018 - RNA, 19 nt, Human
auggacuuauuucuucaaa

SEQ ID NO: 3819019 - RNA, 20 nt, Human
auggacuuauuucuucaaau

SEQ ID NO: 3819020 - RNA, 22 nt, Human
auggacuuguauauuuguacaa

SEQ ID NO: 3819021 - RNA, 15 nt, Human
auggagaaagcugac

SEQ ID NO: 3819022 - RNA, 12 nt, Human
auggagaaggaa

SEQ ID NO: 3819023 - RNA, 18 nt, Human
auggagacuccugcccug

SEQ ID NO: 3819024 - RNA, 16 nt, Human
auggagagcccuggga

SEQ ID NO: 3819025 - RNA, 20 nt, Human
auggagagcuagaacccggc

SEQ ID NO: 3819026 - RNA, 23 nt, Human
auggagagcuggagccuggugcc

SEQ ID NO: 3819027 - RNA, 23 nt, Human
auggagauagccccacaggaggu

SEQ ID NO: 3819028 - RNA, 20 nt, Human
auggagauucaguuuucauu

SEQ ID NO: 3819029 - RNA, 12 nt, Human
auggagcccagg

SEQ ID NO: 3819030 - RNA, 18 nt, Human
auggagccugcacgguga

SEQ ID NO: 3819031 - RNA, 22 nt, Human
auggagccugcacggugaaugg

SEQ ID NO: 3819032 - RNA, 23 nt, Human
auggagccuggcacaggacugau

SEQ ID NO: 3819033 - RNA, 14 nt, Human
auggagcucagaga

SEQ ID NO: 3819034 - RNA, 13 nt, Human
auggagcuggccg

SEQ ID NO: 3819035 - RNA, 13 nt, Human
auggaggaauaug

SEQ ID NO: 3819036 - RNA, 22 nt, Human
auggaggaccacgucuauuuca

SEQ ID NO: 3819037 - RNA, 17 nt, Human
auggaggacuccaggca

SEQ ID NO: 3819038 - RNA, 21 nt, Human
auggaggacuccaggcagcag

SEQ ID NO: 3819039 - RNA, 13 nt, Human
auggaggagaaga

SEQ ID NO: 3819040 - RNA, 17 nt, Human
auggaggagaguguuua

SEQ ID NO: 3819041 - RNA, 15 nt, Human
auggaggaggaggca

SEQ ID NO: 3819042 - RNA, 19 nt, Human
auggaggaucucuaaagag

SEQ ID NO: 3819043 - RNA, 21 nt, Human
auggaggaucucuaaagagca

SEQ ID NO: 3819044 - RNA, 18 nt, Human
auggaggauggagagagg

SEQ ID NO: 3819045 - RNA, 15 nt, Human
auggaggccuguccu

SEQ ID NO: 3819046 - RNA, 18 nt, Human
auggaggcuauguggagu

SEQ ID NO: 3819047 - RNA, 22 nt, Human
auggaggggugguccugacuca

SEQ ID NO: 3819048 - RNA, 13 nt, Human
auggagguucuaa

SEQ ID NO: 3819049 - RNA, 15 nt, Human
auggagguucuaagg

SEQ ID NO: 3819050 - RNA, 22 nt, Human
auggaguagaccccuggcuggu

SEQ ID NO: 3819051 - RNA, 21 nt, Human
auggaguagagguacuagaau

SEQ ID NO: 3819052 - RNA, 22 nt, Human
auggaguagagguacuagaaug

SEQ ID NO: 3819053 - RNA, 13 nt, Human
auguaguaacacu

SEQ ID NO: 3819054 - RNA, 15 nt, Human
auguaguaacacuaa

SEQ ID NO: 3819055 - RNA, 19 nt, Human
auguaguauaaagaaaagu

SEQ ID NO: 3819056 - RNA, 14 nt, Human
auguaguaucuaua

SEQ ID NO: 3819057 - RNA, 12 nt, Human
auguaguauuuu

SEQ ID NO: 3819058 - RNA, 23 nt, Human
auguaguauuuuuuguauaauug

SEQ ID NO: 3819059 - RNA, 21 nt, Human
auguagucagaauuagcugcu

SEQ ID NO: 3819060 - RNA, 16 nt, Human
auguagugccucuuuc

SEQ ID NO: 3819061 - RNA, 22 nt, Human
auguagugugggaggcuccugu

SEQ ID NO: 3819062 - RNA, 18 nt, Human
auguaguucugcuccaga

SEQ ID NO: 3819063 - RNA, 17 nt, Human
auguaguugauguaucc

SEQ ID NO: 3819064 - RNA, 22 nt, Human
auguaguugauguauccaacaa

SEQ ID NO: 3819065 - RNA, 23 nt, Human
auguaguuugaggaaauuugcag

SEQ ID NO: 3819066 - RNA, 21 nt, Human
auguaguuuuuauauguugua

SEQ ID NO: 3819067 - RNA, 17 nt, Human
auguauaaaauaaauau

SEQ ID NO: 3819068 - RNA, 21 nt, Human
auguauaaacuuuagaguaga

SEQ ID NO: 3819069 - RNA, 14 nt, Human
auguauaaauguga

SEQ ID NO: 3819070 - RNA, 23 nt, Human
auguauaacuaggagcuuugacu

SEQ ID NO: 3819071 - RNA, 14 nt, Human
auguauacaugugc

SEQ ID NO: 3819072 - RNA, 15 nt, Human
auguauaguaaauca

SEQ ID NO: 3819073 - RNA, 16 nt, Human
auguauaguaaaucac

SEQ ID NO: 3819074 - RNA, 14 nt, Human
auguauaguauuug

SEQ ID NO: 3819075 - RNA, 17 nt, Human
auguauaguauuugaaa

SEQ ID NO: 3819076 - RNA, 18 nt, Human
auguauaguauuugaaaa

SEQ ID NO: 3819077 - RNA, 15 nt, Human
auguauaguugcuuu

SEQ ID NO: 3819078 - RNA, 14 nt, Human
auguauauaaaaau

SEQ ID NO: 3819079 - RNA, 17 nt, Human
auguauauaaacaugcu

SEQ ID NO: 3819080 - RNA, 15 nt, Human
auguauauacacaua

SEQ ID NO: 3819081 - RNA, 16 nt, Human
auguauauacacauau

SEQ ID NO: 3819082 - RNA, 20 nt, Human
auguauauacccacacacau

SEQ ID NO: 3819083 - RNA, 22 nt, Human
auguauaugaacuuaacaugcu

SEQ ID NO: 3819084 - RNA, 16 nt, Human
auguauauguguucau

SEQ ID NO: 3819085 - RNA, 16 nt, Human
auguauauuaaaaaag

SEQ ID NO: 3819086 - RNA, 17 nt, Human
auguauauuaaaaaaga

SEQ ID NO: 3819087 - RNA, 22 nt, Human
auguauauuaaaaaagagacau

SEQ ID NO: 3819088 - RNA, 15 nt, Human
auguauauuccuuug

SEQ ID NO: 3819089 - RNA, 21 nt, Human
auguauauuuuuuuaauuuaa

SEQ ID NO: 3819090 - RNA, 17 nt, Human
auguaucaaauacauuu

SEQ ID NO: 3819091 - RNA, 12 nt, Human
auguaucaauga

SEQ ID NO: 3819092 - RNA, 17 nt, Human
auguaucauaauuacca

SEQ ID NO: 3819093 - RNA, 16 nt, Human
auguaucauagaaaug

SEQ ID NO: 3819094 - RNA, 15 nt, Human
auguauccaguacau

SEQ ID NO: 3819095 - RNA, 17 nt, Human
auguauccaguacauuu

SEQ ID NO: 3819096 - RNA, 17 nt, Human
auguaugaauacagcag

SEQ ID NO: 3819097 - RNA, 19 nt, Human
auguaugaggaauuucugu

SEQ ID NO: 3819098 - RNA, 16 nt, Human
auguaugcacacacau

SEQ ID NO: 3819099 - RNA, 15 nt, Human
auguaugcauguugu

SEQ ID NO: 3819100 - RNA, 15 nt, Human
auguaugcuucauac

SEQ ID NO: 3819101 - RNA, 22 nt, Human
auguauggaaucccacuguaug

SEQ ID NO: 3819102 - RNA, 19 nt, Human
auguauggguaggguaaau

SEQ ID NO: 3819103 - RNA, 12 nt, Human
auguauggugca

SEQ ID NO: 3819104 - RNA, 20 nt, Human
auguaugugcacugucacuu

SEQ ID NO: 3819105 - RNA, 17 nt, Human
auguauguguaauaaau

SEQ ID NO: 3819106 - RNA, 16 nt, Human
auguauguguuuagaa

SEQ ID NO: 3819107 - RNA, 17 nt, Human
auguauguguuuagaau

SEQ ID NO: 3819108 - RNA, 13 nt, Human
auguauguuacca

SEQ ID NO: 3819109 - RNA, 12 nt, Human
auguauguuuac

SEQ ID NO: 3819110 - RNA, 14 nt, Human
auguauguuuacau

SEQ ID NO: 3819111 - RNA, 16 nt, Human
auguauguuuacauau

SEQ ID NO: 3819112 - RNA, 21 nt, Human
auguauuaaauuacauuugua

SEQ ID NO: 3819113 - RNA, 14 nt, Human
auguauuauucugc

SEQ ID NO: 3819114 - RNA, 17 nt, Human
auguauuauucugcagc

SEQ ID NO: 3819115 - RNA, 15 nt, Human
auguauuauuuauaa

SEQ ID NO: 3819116 - RNA, 20 nt, Human
auguauucuagcuaauguaa

SEQ ID NO: 3819117 - RNA, 14 nt, Human
auguauugagauau

SEQ ID NO: 3819118 - RNA, 16 nt, Human
auguauugcacauugu

SEQ ID NO: 3819119 - RNA, 22 nt, Human
auguauugcacauuguaaaaag

SEQ ID NO: 3819120 - RNA, 11 nt, Human
auguauuguaa

SEQ ID NO: 3819121 - RNA, 22 nt, Human
auguauugugcaauguguauaa

SEQ ID NO: 3819122 - RNA, 24 nt, Human
auguauugugcaauguguauaaac

SEQ ID NO: 3819123 - RNA, 23 nt, Human
auguauuguuugggauccuauug

SEQ ID NO: 3819124 - RNA, 14 nt, Human
auguauuuauauuu

SEQ ID NO: 3819125 - RNA, 18 nt, Human
auguauuuauuuaaaaga

SEQ ID NO: 3819126 - RNA, 12 nt, Human
auguauuuguuc

SEQ ID NO: 3819127 - RNA, 14 nt, Human
auguauuuguucau

SEQ ID NO: 3819128 - RNA, 16 nt, Human
auguauuuuauguuau

SEQ ID NO: 3819129 - RNA, 16 nt, Human
auguauuuuauuguaa

SEQ ID NO: 3819130 - RNA, 20 nt, Human
auguauuuuauuguaacaga

SEQ ID NO: 3819131 - RNA, 16 nt, Human
auguauuuugugaguu

SEQ ID NO: 3819132 - RNA, 23 nt, Human
auguauuuugugaguuuguuucu

SEQ ID NO: 3819133 - RNA, 17 nt, Human
auguauuuuugucaauu

SEQ ID NO: 3819134 - RNA, 20 nt, Human
augucaaaaguagaacuuug

SEQ ID NO: 3819135 - RNA, 23 nt, Human
augucaaccagguccagaugugc

SEQ ID NO: 3819136 - RNA, 17 nt, Human
augucaacugaccuaaa

SEQ ID NO: 3819137 - RNA, 19 nt, Human
augucaacuucuggcuccu

SEQ ID NO: 3819138 - RNA, 18 nt, Human
augucaagauucagcuag

SEQ ID NO: 3819139 - RNA, 21 nt, Human
augucaagggcagcuuugcuc

SEQ ID NO: 3819140 - RNA, 16 nt, Human
augucaaguaccaaaa

SEQ ID NO: 3819141 - RNA, 16 nt, Human
augucaaucagccuag

SEQ ID NO: 3819142 - RNA, 16 nt, Human
augucaauuucugugu

SEQ ID NO: 3819143 - RNA, 13 nt, Human
augucacaggcag

SEQ ID NO: 3819144 - RNA, 19 nt, Human
augucacaggcagguccag

SEQ ID NO: 3819145 - RNA, 17 nt, Human
augugaacuuuauuaaa

SEQ ID NO: 3819146 - RNA, 14 nt, Human
augugaagaugcau

SEQ ID NO: 3819147 - RNA, 21 nt, Human
augugaagaugcauuguaguu

SEQ ID NO: 3819148 - RNA, 23 nt, Human
augugaagaugcauuguaguuua

SEQ ID NO: 3819149 - RNA, 12 nt, Human
augugaagccaa

SEQ ID NO: 3819150 - RNA, 20 nt, Human
augugaaggaccuucacucu

SEQ ID NO: 3819151 - RNA, 23 nt, Human
augugaagggaaggaagaggaag

SEQ ID NO: 3819152 - RNA, 15 nt, Human
augugaaucagaccc

SEQ ID NO: 3819153 - RNA, 16 nt, Human
augugaaucagacccu

SEQ ID NO: 3819154 - RNA, 13 nt, Human
augugaauuacua

SEQ ID NO: 3819155 - RNA, 14 nt, Human
augugaauuacuaa

SEQ ID NO: 3819156 - RNA, 17 nt, Human
augugaauuacuaacuu

SEQ ID NO: 3819157 - RNA, 18 nt, Human
augugaauuacuaacuuc

SEQ ID NO: 3819158 - RNA, 20 nt, Human
augugaauuacuaacuucua

SEQ ID NO: 3819159 - RNA, 14 nt, Human
augugaauuauuga

SEQ ID NO: 3819160 - RNA, 16 nt, Human
augugaauuauugaca

SEQ ID NO: 3819161 - RNA, 10 nt, Human
augugaauuu

SEQ ID NO: 3819162 - RNA, 11 nt, Human
augugaauuuu

SEQ ID NO: 3819163 - RNA, 13 nt, Human
augugaauuuuua

SEQ ID NO: 3819164 - RNA, 21 nt, Human
augugaauuuuuaagcugcaa

SEQ ID NO: 3819165 - RNA, 17 nt, Human
augugaauuuuuauugu

SEQ ID NO: 3819166 - RNA, 16 nt, Human
augugacaauaauauu

SEQ ID NO: 3819167 - RNA, 18 nt, Human
augugacaauuuuguaca

SEQ ID NO: 3819168 - RNA, 20 nt, Human
augugacaauuuuguacaaa

SEQ ID NO: 3819169 - RNA, 11 nt, Human
augugacacau

SEQ ID NO: 3819170 - RNA, 15 nt, Human
augugacauuaacaa

SEQ ID NO: 3819171 - RNA, 19 nt, Human
augugacauuuauauauug

SEQ ID NO: 3819172 - RNA, 19 nt, Human
augugacauuugucauuuu

SEQ ID NO: 3819173 - RNA, 18 nt, Human
augugacauuuuacauua

SEQ ID NO: 3819174 - RNA, 20 nt, Human
augugacccagauccucaca

SEQ ID NO: 3819175 - RNA, 15 nt, Human
augugacucuggcuu

SEQ ID NO: 3819176 - RNA, 22 nt, Human
augugacucuggcuuggccuau

SEQ ID NO: 3819177 - RNA, 16 nt, Human
augugacucuuuccaa

SEQ ID NO: 3819178 - RNA, 23 nt, Human
augugacuugcaucguggagaca

SEQ ID NO: 3819179 - RNA, 18 nt, Human
augugacuuugcaucagc

SEQ ID NO: 3819180 - RNA, 15 nt, Human
augugagaagccagc

SEQ ID NO: 3819181 - RNA, 14 nt, Human
augugagacugguu

SEQ ID NO: 3819182 - RNA, 14 nt, Human
augugagagaaagu

SEQ ID NO: 3819183 - RNA, 16 nt, Human
augugagagguuugac

SEQ ID NO: 3819184 - RNA, 15 nt, Human
augugagcugcugcc

SEQ ID NO: 3819185 - RNA, 16 nt, Human
augugagcugcugcca

SEQ ID NO: 3819186 - RNA, 19 nt, Human
augugagcugcugccauga

SEQ ID NO: 3819187 - RNA, 19 nt, Human
augugaggggucccuagca

SEQ ID NO: 3819188 - RNA, 14 nt, Human
augugaguauucuc

SEQ ID NO: 3819189 - RNA, 18 nt, Human
augugagugccuuuugca

SEQ ID NO: 3819190 - RNA, 22 nt, Human
augugagugccuuuugcagaag

SEQ ID NO: 3819191 - RNA, 15 nt, Human
augugagugguugaa

SEQ ID NO: 3819192 - RNA, 19 nt, Human
augugagugguugaauaug

SEQ ID NO: 3819193 - RNA, 22 nt, Human
augugaguguguguuugugcug

SEQ ID NO: 3819194 - RNA, 20 nt, Human
augugaguuuggucuggacu

SEQ ID NO: 3819195 - RNA, 21 nt, Human
augugaguuuggucuggacug

SEQ ID NO: 3819196 - RNA, 18 nt, Human
augugauaaggaaaucaa

SEQ ID NO: 3819197 - RNA, 18 nt, Human
augugauauaaacagcuu

SEQ ID NO: 3819198 - RNA, 13 nt, Human
augugauauauaa

SEQ ID NO: 3819199 - RNA, 19 nt, Human
augugauauauaaguguac

SEQ ID NO: 3819200 - RNA, 21 nt, Human
augugauauauaaguguacau

SEQ ID NO: 3819201 - RNA, 15 nt, Human
augugauauucuaag

SEQ ID NO: 3819202 - RNA, 18 nt, Human
augugauauucuaagacu

SEQ ID NO: 3819203 - RNA, 23 nt, Human
augugaucagcuuucaaagcauu

SEQ ID NO: 3819204 - RNA, 15 nt, Human
augugaugagaggaa

SEQ ID NO: 3819205 - RNA, 19 nt, Human
augugaugagaggaaauca

SEQ ID NO: 3819206 - RNA, 16 nt, Human
augugaugauguaauu

SEQ ID NO: 3819207 - RNA, 14 nt, Human
augugaugcuggaa

SEQ ID NO: 3819208 - RNA, 14 nt, Human
augugauguucuaa

SEQ ID NO: 3819209 - RNA, 19 nt, Human
augugauguucuaaggcuc

SEQ ID NO: 3819210 - RNA, 15 nt, Human
augugauuguggaau

SEQ ID NO: 3819211 - RNA, 18 nt, Human
augugauuuaauaguguu

SEQ ID NO: 3819212 - RNA, 14 nt, Human
augugauuuuaacu

SEQ ID NO: 3819213 - RNA, 20 nt, Human
augugauuuuaacucugucu

SEQ ID NO: 3819214 - RNA, 15 nt, Human
augugcaaaaauuuu

SEQ ID NO: 3819215 - RNA, 16 nt, Human
augugcaaaaauuuuu

SEQ ID NO: 3819216 - RNA, 14 nt, Human
augugcaaaacagc

SEQ ID NO: 3819217 - RNA, 18 nt, Human
augugcaaaaccuuuuac

SEQ ID NO: 3819218 - RNA, 21 nt, Human
augugcaaaaccuuuuacugg

SEQ ID NO: 3819219 - RNA, 22 nt, Human
agucaugauguuuuuaaaaucu

SEQ ID NO: 3819220 - RNA, 20 nt, Human
agucaugcaaaggcugggac

SEQ ID NO: 3819221 - RNA, 14 nt, Human
agucaugcauaaau

SEQ ID NO: 3819222 - RNA, 16 nt, Human
agucaugcauaaauau

SEQ ID NO: 3819223 - RNA, 17 nt, Human
agucaugcauaaauaug

SEQ ID NO: 3819224 - RNA, 19 nt, Human
agucaugcguuuaaucaca

SEQ ID NO: 3819225 - RNA, 18 nt, Human
agucauggagaaccaccu

SEQ ID NO: 3819226 - RNA, 12 nt, Human
agucauggcugu

SEQ ID NO: 3819227 - RNA, 16 nt, Human
agucauguaaauacug

SEQ ID NO: 3819228 - RNA, 17 nt, Human
agucauguauguuucuc

SEQ ID NO: 3819229 - RNA, 12 nt, Human
agucaugugacc

SEQ ID NO: 3819230 - RNA, 19 nt, Human
agucauguuccuucaagau

SEQ ID NO: 3819231 - RNA, 14 nt, Human
agucauguuuaucu

SEQ ID NO: 3819232 - RNA, 22 nt, Human
agucauguuuuaaauguacagu

SEQ ID NO: 3819233 - RNA, 14 nt, Human
agucauuaaacugg

SEQ ID NO: 3819234 - RNA, 23 nt, Human
agucauuaaagacaggagacaaa

SEQ ID NO: 3819235 - RNA, 15 nt, Human
agucauuagacuccu

SEQ ID NO: 3819236 - RNA, 19 nt, Human
agucauuagacuccuccuc

SEQ ID NO: 3819237 - RNA, 21 nt, Human
agucauuauagaucccccaga

SEQ ID NO: 3819238 - RNA, 18 nt, Human
agucauuauccuugcuau

SEQ ID NO: 3819239 - RNA, 22 nt, Human
agucauuaugagaggcaaugau

SEQ ID NO: 3819240 - RNA, 18 nt, Human
agucauuauguuaauauu

SEQ ID NO: 3819241 - RNA, 13 nt, Human
agucauucagcag

SEQ ID NO: 3819242 - RNA, 13 nt, Human
agucauugcugua

SEQ ID NO: 3819243 - RNA, 14 nt, Human
agucauuggcuuua

SEQ ID NO: 3819244 - RNA, 18 nt, Human
agucauuggcuuuauccu

SEQ ID NO: 3819245 - RNA, 16 nt, Human
agucauuguaauguug

SEQ ID NO: 3819246 - RNA, 18 nt, Human
agucauuguauguuauua

SEQ ID NO: 3819247 - RNA, 22 nt, Human
agucauuuaacugaagauguug

SEQ ID NO: 3819248 - RNA, 13 nt, Human
agucauuuacuaa

SEQ ID NO: 3819249 - RNA, 14 nt, Human
agucauuuacuaaa

SEQ ID NO: 3819250 - RNA, 17 nt, Human
agucauuuacuaaacau

SEQ ID NO: 3819251 - RNA, 23 nt, Human
agucauuuacuaaacauaugauu

SEQ ID NO: 3819252 - RNA, 15 nt, Human
agucauuuauuuuaa

SEQ ID NO: 3819253 - RNA, 20 nt, Human
agucauuuauuuuaaaaaau

SEQ ID NO: 3819254 - RNA, 22 nt, Human
agucauuuauuuuaaaaaauga

SEQ ID NO: 3819255 - RNA, 15 nt, Human
agucauuucugauuu

SEQ ID NO: 3819256 - RNA, 15 nt, Human
agucauuugugaauu

SEQ ID NO: 3819257 - RNA, 19 nt, Human
agucauuuuaacuuuauca

SEQ ID NO: 3819258 - RNA, 13 nt, Human
agucauuuucaag

SEQ ID NO: 3819259 - RNA, 21 nt, Human
agucauuuuguguugaagagc

SEQ ID NO: 3819260 - RNA, 21 nt, Human
agucauuuuuacaauguaauu

SEQ ID NO: 3819261 - RNA, 19 nt, Human
aguccaaauguccuccaga

SEQ ID NO: 3819262 - RNA, 19 nt, Human
aguccaagaggguccuuua

SEQ ID NO: 3819263 - RNA, 21 nt, Human
aguccaagcauuuagauguau

SEQ ID NO: 3819264 - RNA, 16 nt, Human
aguccaagcugggaga

SEQ ID NO: 3819265 - RNA, 21 nt, Human
aguccaaggaaaccacagcug

SEQ ID NO: 3819266 - RNA, 23 nt, Human
aguccaaggaaaccacagcugcu

SEQ ID NO: 3819267 - RNA, 13 nt, Human
aguccaagguuua

SEQ ID NO: 3819268 - RNA, 14 nt, Human
aguccaauuuuaau

SEQ ID NO: 3819269 - RNA, 17 nt, Human
aguccaauuuuaauuua

SEQ ID NO: 3819270 - RNA, 21 nt, Human
aguccaauuuuaauuuaguaa

SEQ ID NO: 3819271 - RNA, 14 nt, Human
aguccacccugccu

SEQ ID NO: 3819272 - RNA, 12 nt, Human
aguccaccugag

SEQ ID NO: 3819273 - RNA, 17 nt, Human
aguccaccugagcugcc

SEQ ID NO: 3819274 - RNA, 16 nt, Human
aguccacucccagugc

SEQ ID NO: 3819275 - RNA, 14 nt, Human
aguccacuuuguuu

SEQ ID NO: 3819276 - RNA, 13 nt, Human
aguccaggaacaa

SEQ ID NO: 3819277 - RNA, 23 nt, Human
aguccaggacaggagaugcugug

SEQ ID NO: 3819278 - RNA, 12 nt, Human
aguccaggcccc

SEQ ID NO: 3819279 - RNA, 14 nt, Human
aguccaggcugccg

SEQ ID NO: 3819280 - RNA, 17 nt, Human
aguccaggcugccgugg

SEQ ID NO: 3819281 - RNA, 13 nt, Human
aguccagguccug

SEQ ID NO: 3819282 - RNA, 21 nt, Human
aguccaguccuaucugggcuu

SEQ ID NO: 3819283 - RNA, 12 nt, Human
aguccauuuaua

SEQ ID NO: 3819284 - RNA, 17 nt, Human
aguccauuuauauauga

SEQ ID NO: 3819285 - RNA, 19 nt, Human
aguccauuuauauaugaaa

SEQ ID NO: 3819286 - RNA, 22 nt, Human
aguccauuuauauaugaaaacu

SEQ ID NO: 3819287 - RNA, 21 nt, Human
agucccaaggaaagccccagc

SEQ ID NO: 3819288 - RNA, 20 nt, Human
agucccaccgguugcuucug

SEQ ID NO: 3819289 - RNA, 23 nt, Human
agucccaccgguugcuucuggga

SEQ ID NO: 3819290 - RNA, 17 nt, Human
agugaggccacugaaga

SEQ ID NO: 3819291 - RNA, 15 nt, Human
agugaggcccaggga

SEQ ID NO: 3819292 - RNA, 14 nt, Human
agugaggcucugcc

SEQ ID NO: 3819293 - RNA, 19 nt, Human
agugaggcucugcccuugg

SEQ ID NO: 3819294 - RNA, 16 nt, Human
agugagggagauccca

SEQ ID NO: 3819295 - RNA, 14 nt, Human
agugagggauuauc

SEQ ID NO: 3819296 - RNA, 18 nt, Human
agugaggggaaaccaggg

SEQ ID NO: 3819297 - RNA, 22 nt, Human
agugagggguaaaagcugaucu

SEQ ID NO: 3819298 - RNA, 23 nt, Human
agugagggucagagaggagucag

SEQ ID NO: 3819299 - RNA, 22 nt, Human
agugaggguuucugagcugcuc

SEQ ID NO: 3819300 - RNA, 18 nt, Human
agugagguccugggggcc

SEQ ID NO: 3819301 - RNA, 17 nt, Human
agugaguaauuuuggau

SEQ ID NO: 3819302 - RNA, 22 nt, Human
agugaguacaugcacacucaug

SEQ ID NO: 3819303 - RNA, 13 nt, Human
agugagucucucu

SEQ ID NO: 3819304 - RNA, 16 nt, Human
agugagucucuucaga

SEQ ID NO: 3819305 - RNA, 16 nt, Human
agugagugagccuggc

SEQ ID NO: 3819306 - RNA, 21 nt, Human
agugaguguggcuccccucua

SEQ ID NO: 3819307 - RNA, 21 nt, Human
agugaguugauagcacagacc

SEQ ID NO: 3819308 - RNA, 22 nt, Human
agugaguugauagcacagaccc

SEQ ID NO: 3819309 - RNA, 18 nt, Human
agugaguuguugcccugg

SEQ ID NO: 3819310 - RNA, 19 nt, Human
agugaguuguugcccuggg

SEQ ID NO: 3819311 - RNA, 20 nt, Human
agugaguuguugcccugggu

SEQ ID NO: 3819312 - RNA, 15 nt, Human
agugaguuuuuuagu

SEQ ID NO: 3819313 - RNA, 23 nt, Human
agugauacaacuucaagugcaug

SEQ ID NO: 3819314 - RNA, 21 nt, Human
agugauagucuuuugcuuuug

SEQ ID NO: 3819315 - RNA, 19 nt, Human
agugauauggcagaagaca

SEQ ID NO: 3819316 - RNA, 21 nt, Human
agugauauggcagaagacacc

SEQ ID NO: 3819317 - RNA, 24 nt, Human
agugauauggcagaagacaccaga

SEQ ID NO: 3819318 - RNA, 12 nt, Human
agugauauucuu

SEQ ID NO: 3819319 - RNA, 13 nt, Human
agugauauuucuc

SEQ ID NO: 3819320 - RNA, 16 nt, Human
agugauauuucucuag

SEQ ID NO: 3819321 - RNA, 15 nt, Human
agugaucacagcagc

SEQ ID NO: 3819322 - RNA, 15 nt, Human
agugauccucccacc

SEQ ID NO: 3819323 - RNA, 22 nt, Human
agugaucuacaugaggaacugu

SEQ ID NO: 3819324 - RNA, 21 nt, Human
agugaucuccauauguuacac

SEQ ID NO: 3819325 - RNA, 17 nt, Human
agugaucugcccgccuc

SEQ ID NO: 3819326 - RNA, 17 nt, Human
agugaugggcuuucucu

SEQ ID NO: 3819327 - RNA, 23 nt, Human
agugauguuuuuaugauaucccu

SEQ ID NO: 3819328 - RNA, 21 nt, Human
agugauuaaggucucucuuug

SEQ ID NO: 3819329 - RNA, 22 nt, Human
agugauuaaggucucucuuugg

SEQ ID NO: 3819330 - RNA, 14 nt, Human
agugauucuccugc

SEQ ID NO: 3819331 - RNA, 15 nt, Human
agugauucuccugcc

SEQ ID NO: 3819332 - RNA, 17 nt, Human
agugauucuccugccuc

SEQ ID NO: 3819333 - RNA, 22 nt, Human
agugauucuccugccucagccu

SEQ ID NO: 3819334 - RNA, 24 nt, Human
agugauucuccugccucagccucc

SEQ ID NO: 3819335 - RNA, 20 nt, Human
agugauuuucaagucugugu

SEQ ID NO: 3819336 - RNA, 22 nt, Human
agugauuuuuauccaaucuugu

SEQ ID NO: 3819337 - RNA, 16 nt, Human
agugauuuuuaugcca

SEQ ID NO: 3819338 - RNA, 20 nt, Human
agugauuuuuaugccaccug

SEQ ID NO: 3819339 - RNA, 23 nt, Human
agugcaaaaggcuugcagaacuu

SEQ ID NO: 3819340 - RNA, 18 nt, Human
agugcaaacuucagaguu

SEQ ID NO: 3819341 - RNA, 18 nt, Human
agugcaaaucauagcugg

SEQ ID NO: 3819342 - RNA, 14 nt, Human
agugcaaauuguca

SEQ ID NO: 3819343 - RNA, 22 nt, Human
agugcaaauugucacaggacag

SEQ ID NO: 3819344 - RNA, 13 nt, Human
agugcaacacugg

SEQ ID NO: 3819345 - RNA, 21 nt, Human
agugcaacacuggucugcugu

SEQ ID NO: 3819346 - RNA, 16 nt, Human
agugcaaccacacacc

SEQ ID NO: 3819347 - RNA, 22 nt, Human
agugcaauaaaucugacccagu

SEQ ID NO: 3819348 - RNA, 18 nt, Human
agugcaaugacacagucu

SEQ ID NO: 3819349 - RNA, 23 nt, Human
agugcaauggcgugaucucggcu

SEQ ID NO: 3819350 - RNA, 22 nt, Human
agugcaaugguauaaauuucaa

SEQ ID NO: 3819351 - RNA, 13 nt, Human
agugcacaugaac

SEQ ID NO: 3819352 - RNA, 13 nt, Human
agugcaccaaaga

SEQ ID NO: 3819353 - RNA, 20 nt, Human
agugcaccugggacagggag

SEQ ID NO: 3819354 - RNA, 14 nt, Human
agugcacuaaugug

SEQ ID NO: 3819355 - RNA, 17 nt, Human
agugcacuaauguguaa

SEQ ID NO: 3819356 - RNA, 20 nt, Human
agugcacuugcuggaagacg

SEQ ID NO: 3819357 - RNA, 13 nt, Human
agugcagaaugua

SEQ ID NO: 3819358 - RNA, 20 nt, Human
agugcagaauguaagugggc

SEQ ID NO: 3819359 - RNA, 21 nt, Human
agugcagagccuucucagaag

SEQ ID NO: 3819360 - RNA, 15 nt, Human
agugcagcaaccaga

SEQ ID NO: 3819361 - RNA, 19 nt, Human
agugcagcaaccagagcac

SEQ ID NO: 3819362 - RNA, 20 nt, Human
agugcagcaaccagagcacu

SEQ ID NO: 3819363 - RNA, 22 nt, Human
agugcagcaaccagagcacugu

SEQ ID NO: 3819364 - RNA, 13 nt, Human
agugcagccaagu

SEQ ID NO: 3819365 - RNA, 22 nt, Human
agugcagccaaguagccucucc

SEQ ID NO: 3819366 - RNA, 16 nt, Human
agugcagcugaaauug

SEQ ID NO: 3819367 - RNA, 17 nt, Human
agugcagcugauuuuaa

SEQ ID NO: 3819368 - RNA, 13 nt, Human
agugcaggcccac

SEQ ID NO: 3819369 - RNA, 15 nt, Human
agugcaggcccaccc

SEQ ID NO: 3819370 - RNA, 18 nt, Human
agugcaggcccacccugc

SEQ ID NO: 3819371 - RNA, 11 nt, Human
agugcaggcug

SEQ ID NO: 3819372 - RNA, 15 nt, Human
agugcaggcuggcca

SEQ ID NO: 3819373 - RNA, 21 nt, Human
agugcaggcuggccagccgcu

SEQ ID NO: 3819374 - RNA, 16 nt, Human
agugcagggcaaaaua

SEQ ID NO: 3819375 - RNA, 17 nt, Human
agugcagugagccgaga

SEQ ID NO: 3819376 - RNA, 19 nt, Human
agugcaguggcacaaucuu

SEQ ID NO: 3819377 - RNA, 23 nt, Human
agugcaguggcgugaucucagcu

SEQ ID NO: 3819378 - RNA, 20 nt, Human
agugcauauuccuuucuauc

SEQ ID NO: 3819379 - RNA, 14 nt, Human
agugcauccaaagg

SEQ ID NO: 3819380 - RNA, 21 nt, Human
agugcauccaaaggugcucag

SEQ ID NO: 3819381 - RNA, 13 nt, Human
agugcaucuacuu

SEQ ID NO: 3819382 - RNA, 14 nt, Human
agugcaucucagcc

SEQ ID NO: 3819383 - RNA, 15 nt, Human
agugcaucucagccc

SEQ ID NO: 3819384 - RNA, 19 nt, Human
agugcaucuggagagaaca

SEQ ID NO: 3819385 - RNA, 17 nt, Human
agugcaugcucucugca

SEQ ID NO: 3819386 - RNA, 20 nt, Human
agugcaugcucucugcagcc

SEQ ID NO: 3819387 - RNA, 14 nt, Human
agugcaugcugucc

SEQ ID NO: 3819388 - RNA, 17 nt, Human
agugcaugguggccaga

SEQ ID NO: 3819389 - RNA, 18 nt, Human
agugcauguacuaucuua

SEQ ID NO: 3819390 - RNA, 21 nt, Human
agugcauuguuucugugggcg

SEQ ID NO: 3819391 - RNA, 22 nt, Human
agugcauuuaugagcucuucau

SEQ ID NO: 3819392 - RNA, 15 nt, Human
agugcauuucugaau

SEQ ID NO: 3819393 - RNA, 14 nt, Human
agugccaaaaacaa

SEQ ID NO: 3819394 - RNA, 21 nt, Human
agugccaacaauccuagugcu

SEQ ID NO: 3819395 - RNA, 16 nt, Human
agugccaacuccucac

SEQ ID NO: 3819396 - RNA, 14 nt, Human
agugccaagcacag

SEQ ID NO: 3819397 - RNA, 12 nt, Human
agugccaaggac

SEQ ID NO: 3819398 - RNA, 13 nt, Human
agugccaaggacc

SEQ ID NO: 3819399 - RNA, 20 nt, Human
agugccacugcccgagcugg

SEQ ID NO: 3819400 - RNA, 22 nt, Human
agugccacugcccgagcuggug

SEQ ID NO: 3819401 - RNA, 20 nt, Human
agugccacuuaauguauguu

SEQ ID NO: 3819402 - RNA, 16 nt, Human
agugccagaggugggc

SEQ ID NO: 3819403 - RNA, 22 nt, Human
agugccagaggugggcaggugg

SEQ ID NO: 3819404 - RNA, 13 nt, Human
agugccaggacuc

SEQ ID NO: 3819405 - RNA, 17 nt, Human
agugccauugucuuuau

SEQ ID NO: 3819406 - RNA, 15 nt, Human
agugcccaacuguua

SEQ ID NO: 3819407 - RNA, 14 nt, Human
agugcccacaggau

SEQ ID NO: 3819408 - RNA, 20 nt, Human
agugcccacccugggagaca

SEQ ID NO: 3819409 - RNA, 23 nt, Human
agugcccacccugggagacagac

SEQ ID NO: 3819410 - RNA, 23 nt, Human
agugcccagaacuggacucagga

SEQ ID NO: 3819411 - RNA, 17 nt, Human
agugcccauuccucacc

SEQ ID NO: 3819412 - RNA, 15 nt, Human
agugccccaccugcc

SEQ ID NO: 3819413 - RNA, 23 nt, Human
agugccccgucuacagcuccccc

SEQ ID NO: 3819414 - RNA, 21 nt, Human
agugcccuccacagccgcagc

SEQ ID NO: 3819415 - RNA, 13 nt, Human
agugcccuccagc

SEQ ID NO: 3819416 - RNA, 18 nt, Human
agugcccuccagccccgc

SEQ ID NO: 3819417 - RNA, 12 nt, Human
agugcccucucc

SEQ ID NO: 3819418 - RNA, 16 nt, Human
agugcccugagccagg

SEQ ID NO: 3819419 - RNA, 21 nt, Human
agugcccugagccagggucuc

SEQ ID NO: 3819420 - RNA, 23 nt, Human
agugcccugagccagggucucca

SEQ ID NO: 3819421 - RNA, 23 nt, Human
agugcccuggggcugaucucagg

SEQ ID NO: 3819422 - RNA, 18 nt, Human
agugccgcaucucacagc

SEQ ID NO: 3819423 - RNA, 23 nt, Human
augugauauauaaguguacauau

SEQ ID NO: 3819424 - RNA, 16 nt, Human
augugaucugucuugu

SEQ ID NO: 3819425 - RNA, 19 nt, Human
augugaugaauacuguauu

SEQ ID NO: 3819426 - RNA, 15 nt, Human
augugauguucuaag

SEQ ID NO: 3819427 - RNA, 15 nt, Human
augugauuacaaggc

SEQ ID NO: 3819428 - RNA, 20 nt, Human
augugauuccuuugaagagg

SEQ ID NO: 3819429 - RNA, 16 nt, Human
augugauuuaauagug

SEQ ID NO: 3819430 - RNA, 20 nt, Human
augugauuuaauaguguuaa

SEQ ID NO: 3819431 - RNA, 21 nt, Human
augugauuuaauaguguuaau

SEQ ID NO: 3819432 - RNA, 16 nt, Human
augugauuuuaacucu

SEQ ID NO: 3819433 - RNA, 16 nt, Human
auguuuaugagccaga

SEQ ID NO: 3819434 - RNA, 12 nt, Human
auguuuauguaa

SEQ ID NO: 3819435 - RNA, 21 nt, Human
auguuuauguaaacaaaucuu

SEQ ID NO: 3819436 - RNA, 19 nt, Human
auguuuauuaaaugcuuca

SEQ ID NO: 3819437 - RNA, 12 nt, Human
auguuuauuaca

SEQ ID NO: 3819438 - RNA, 19 nt, Human
agugccgcaucucacagcu

SEQ ID NO: 3819439 - RNA, 19 nt, Human
agugccuaaaauaagaaua

SEQ ID NO: 3819440 - RNA, 21 nt, Human
agugccucaagaggaaugaaa

SEQ ID NO: 3819441 - RNA, 23 nt, Human
agugccucucccugcugcuccua

SEQ ID NO: 3819442 - RNA, 18 nt, Human
agugccucuuucauccac

SEQ ID NO: 3819443 - RNA, 18 nt, Human
agugccugacacacuaac

SEQ ID NO: 3819444 - RNA, 15 nt, Human
agugccuuacacaau

SEQ ID NO: 3819445 - RNA, 16 nt, Human
agugccuuaccuccug

SEQ ID NO: 3819446 - RNA, 22 nt, Human
agugccuuaccuccugcccagg

SEQ ID NO: 3819447 - RNA, 13 nt, Human
agugccuuaugga

SEQ ID NO: 3819448 - RNA, 18 nt, Human
agugccuuauggaacacu

SEQ ID NO: 3819449 - RNA, 15 nt, Human
agugccuucuguggg

SEQ ID NO: 3819450 - RNA, 17 nt, Human
agugccuucugugggga

SEQ ID NO: 3819451 - RNA, 22 nt, Human
agugccuuggggaauuuccucu

SEQ ID NO: 3819452 - RNA, 17 nt, Human
agugccuuucaggaucu

SEQ ID NO: 3819453 - RNA, 21 nt, Human
agugccuuugcagcucagaac

SEQ ID NO: 3819454 - RNA, 17 nt, Human
agugcgaguauguguuu

SEQ ID NO: 3819455 - RNA, 17 nt, Human
agugcgauucuggauaa

SEQ ID NO: 3819456 - RNA, 17 nt, Human
agugcgugaauguaugu

SEQ ID NO: 3819457 - RNA, 13 nt, Human
agugcguggccca

SEQ ID NO: 3819458 - RNA, 18 nt, Human
agugcguguguagaguua

SEQ ID NO: 3819459 - RNA, 16 nt, Human
agugcuaaaaauggga

SEQ ID NO: 3819460 - RNA, 17 nt, Human
agugcuaacaugaagac

SEQ ID NO: 3819461 - RNA, 13 nt, Human
agugcuaagguuc

SEQ ID NO: 3819462 - RNA, 18 nt, Human
agugcuaagguucuaagg

SEQ ID NO: 3819463 - RNA, 14 nt, Human
agugcuaaguguga

SEQ ID NO: 3819464 - RNA, 18 nt, Human
agugcuaagugugaacug

SEQ ID NO: 3819465 - RNA, 22 nt, Human
agugcuaagugugaacuggacc

SEQ ID NO: 3819466 - RNA, 15 nt, Human
agugcuaauuuugaa

SEQ ID NO: 3819467 - RNA, 18 nt, Human
agugcuaauuuugaaaaa

SEQ ID NO: 3819468 - RNA, 20 nt, Human
agugcuaauuuugaaaaacu

SEQ ID NO: 3819469 - RNA, 22 nt, Human
agugcuauauauauaaauauuu

SEQ ID NO: 3819470 - RNA, 15 nt, Human
agugcuaugaagaca

SEQ ID NO: 3819471 - RNA, 19 nt, Human
agugcuauuacgaaguuca

SEQ ID NO: 3819472 - RNA, 16 nt, Human
agugcucaaggccagc

SEQ ID NO: 3819473 - RNA, 17 nt, Human
agugcucacccacacca

SEQ ID NO: 3819474 - RNA, 18 nt, Human
agugcuccccucugaaag

SEQ ID NO: 3819475 - RNA, 17 nt, Human
agugcucccucacaugu

SEQ ID NO: 3819476 - RNA, 17 nt, Human
agugcucgcuguugcug

SEQ ID NO: 3819477 - RNA, 11 nt, Human
agugcucugau

SEQ ID NO: 3819478 - RNA, 21 nt, Human
agugcucugaucccucuacag

SEQ ID NO: 3819479 - RNA, 14 nt, Human
agugcucuuuucuc

SEQ ID NO: 3819480 - RNA, 12 nt, Human
agugcugaagcu

SEQ ID NO: 3819481 - RNA, 15 nt, Human
agugcugaagcuuau

SEQ ID NO: 3819482 - RNA, 23 nt, Human
agugcugaagcuuauuaaugcua

SEQ ID NO: 3819483 - RNA, 12 nt, Human
agugcugcauuu

SEQ ID NO: 3819484 - RNA, 16 nt, Human
agugcugcauuuaaaa

SEQ ID NO: 3819485 - RNA, 17 nt, Human
agugcugcauuuaaaag

SEQ ID NO: 3819486 - RNA, 19 nt, Human
agugcugcauuuaaaagau

SEQ ID NO: 3819487 - RNA, 20 nt, Human
agugcugcauuuaaaagaua

SEQ ID NO: 3819488 - RNA, 21 nt, Human
agugcugccuguccccaugcu

SEQ ID NO: 3819489 - RNA, 22 nt, Human
agugcuggagucuccugaggac

SEQ ID NO: 3819490 - RNA, 20 nt, Human
agugcuggcauuacaggugu

SEQ ID NO: 3819491 - RNA, 14 nt, Human
agugcuggcucaca

SEQ ID NO: 3819492 - RNA, 17 nt, Human
agugcuggcucacagua

SEQ ID NO: 3819493 - RNA, 18 nt, Human
agugcuggcucacaguac

SEQ ID NO: 3819494 - RNA, 20 nt, Human
agugcuggcucacaguacag

SEQ ID NO: 3819495 - RNA, 12 nt, Human
agugcuguaaaa

SEQ ID NO: 3819496 - RNA, 17 nt, Human
agugcuguauaaaauca

SEQ ID NO: 3819497 - RNA, 19 nt, Human
agugcugucugaucugugc

SEQ ID NO: 3819498 - RNA, 13 nt, Human
agugcugugaaaa

SEQ ID NO: 3819499 - RNA, 16 nt, Human
agugcugugaaaaaaa

SEQ ID NO: 3819500 - RNA, 12 nt, Human
agugcugugcug

SEQ ID NO: 3819501 - RNA, 14 nt, Human
agugcuguggccug

SEQ ID NO: 3819502 - RNA, 16 nt, Human
agugcuguggccuggg

SEQ ID NO: 3819503 - RNA, 17 nt, Human
agugcuguggccugggc

SEQ ID NO: 3819504 - RNA, 18 nt, Human
agugcuguggccugggca

SEQ ID NO: 3819505 - RNA, 16 nt, Human
agugcuguuuuguuau

SEQ ID NO: 3819506 - RNA, 19 nt, Human
agugcuguuuuguuauaua

SEQ ID NO: 3819507 - RNA, 14 nt, Human
agugcuucagccug

SEQ ID NO: 3819508 - RNA, 16 nt, Human
agugcuuccaaggaug

SEQ ID NO: 3819509 - RNA, 16 nt, Human
agugcuuccaaggcag

SEQ ID NO: 3819510 - RNA, 17 nt, Human
agugcuugcuuuucaug

SEQ ID NO: 3819511 - RNA, 22 nt, Human
agugcuugcuuuucaugcaaac

SEQ ID NO: 3819512 - RNA, 22 nt, Human
agugcuuggaacauacuguuca

SEQ ID NO: 3819513 - RNA, 19 nt, Human
agugcuuguccccuaagag

SEQ ID NO: 3819514 - RNA, 13 nt, Human
agugcuuucuugu

SEQ ID NO: 3819515 - RNA, 14 nt, Human
agugcuuugagaga

SEQ ID NO: 3819516 - RNA, 13 nt, Human
agugcuuuguaau

SEQ ID NO: 3819517 - RNA, 19 nt, Human
agugcuuuuaagugaaaau

SEQ ID NO: 3819518 - RNA, 18 nt, Human
agugcuuuuggcggggag

SEQ ID NO: 3819519 - RNA, 14 nt, Human
aguggaaaaacaca

SEQ ID NO: 3819520 - RNA, 11 nt, Human
aguggaaaaag

SEQ ID NO: 3819521 - RNA, 21 nt, Human
aguggaaaauaggcuuuuuaa

SEQ ID NO: 3819522 - RNA, 22 nt, Human
aguggaaagacagcuucucauc

SEQ ID NO: 3819523 - RNA, 22 nt, Human
aguggaaccguugccaaccgag

SEQ ID NO: 3819524 - RNA, 13 nt, Human
aguggaaggaaag

SEQ ID NO: 3819525 - RNA, 14 nt, Human
aguggaauaagaca

SEQ ID NO: 3819526 - RNA, 19 nt, Human
aguggaauaguauccucca

SEQ ID NO: 3819527 - RNA, 17 nt, Human
aguggaauuucuuguuu

SEQ ID NO: 3819528 - RNA, 20 nt, Human
aguggacaccaggagucccu

SEQ ID NO: 3819529 - RNA, 22 nt, Human
aguggacaccaggagucccugg

SEQ ID NO: 3819530 - RNA, 13 nt, Human
aguggacaggagu

SEQ ID NO: 3819531 - RNA, 20 nt, Human
aguggacauuguuggcagca

SEQ ID NO: 3819532 - RNA, 13 nt, Human
aguggaccaggac

SEQ ID NO: 3819533 - RNA, 14 nt, Human
aguggaccaggaca

SEQ ID NO: 3819534 - RNA, 17 nt, Human
aguggacccugaaaugu

SEQ ID NO: 3819535 - RNA, 18 nt, Human
aguggacccugaaaugug

SEQ ID NO: 3819536 - RNA, 19 nt, Human
aguggaccuuaggccuucc

SEQ ID NO: 3819537 - RNA, 23 nt, Human
aguggaccuuaggccuuccucuc

SEQ ID NO: 3819538 - RNA, 18 nt, Human
aguggaccuugagaccac

SEQ ID NO: 3819539 - RNA, 15 nt, Human
aguggacuggccccu

SEQ ID NO: 3819540 - RNA, 16 nt, Human
aguggacuggccccug

SEQ ID NO: 3819541 - RNA, 17 nt, Human
aguggacuggccccugg

SEQ ID NO: 3819542 - RNA, 18 nt, Human
aguggacuggccccuggg

SEQ ID NO: 3819543 - RNA, 17 nt, Human
aguggacuuuccacccc

SEQ ID NO: 3819544 - RNA, 18 nt, Human
aguggacuuuccaccccc

SEQ ID NO: 3819545 - RNA, 22 nt, Human
aguggacuuuccacccccuccc

SEQ ID NO: 3819546 - RNA, 14 nt, Human
aguggaggcacuuu

SEQ ID NO: 3819547 - RNA, 15 nt, Human
aguggaguuacugaa

SEQ ID NO: 3819548 - RNA, 21 nt, Human
aguggauagaugcccugcuag

SEQ ID NO: 3819549 - RNA, 15 nt, Human
aguggaucacaaagu

SEQ ID NO: 3819550 - RNA, 14 nt, Human
aguggaucuccaag

SEQ ID NO: 3819551 - RNA, 13 nt, Human
aguggaugauguu

SEQ ID NO: 3819552 - RNA, 15 nt, Human
aguggaugccacagc

SEQ ID NO: 3819553 - RNA, 21 nt, Human
aguggcaagaccaaaaugaca

SEQ ID NO: 3819554 - RNA, 17 nt, Human
aguggcaauauagaaac

SEQ ID NO: 3819555 - RNA, 18 nt, Human
aguggcaccgccucccca

SEQ ID NO: 3819556 - RNA, 16 nt, Human
aguggcaccugucugc

SEQ ID NO: 3819557 - RNA, 17 nt, Human
aguggcaccugucugcu

SEQ ID NO: 3819558 - RNA, 13 nt, Human
aguggcagcccag

SEQ ID NO: 3819559 - RNA, 11 nt, Human
aguggcagcug

SEQ ID NO: 3819560 - RNA, 14 nt, Human
aguggcagcugcuu

SEQ ID NO: 3819561 - RNA, 20 nt, Human
aguggcaggcagaggcccag

SEQ ID NO: 3819562 - RNA, 14 nt, Human
aguggcagggcuca

SEQ ID NO: 3819563 - RNA, 18 nt, Human
aguggcaggggacaggag

SEQ ID NO: 3819564 - RNA, 20 nt, Human
aguggcaucaucucagcuca

SEQ ID NO: 3819565 - RNA, 18 nt, Human
aguggcauuggcagcagg

SEQ ID NO: 3819566 - RNA, 18 nt, Human
aguggccaagaagcagug

SEQ ID NO: 3819567 - RNA, 19 nt, Human
aguggccacuaagcagagg

SEQ ID NO: 3819568 - RNA, 19 nt, Human
aguggccagaccagagcuc

SEQ ID NO: 3819569 - RNA, 21 nt, Human
aguggcccaacaggggcucca

SEQ ID NO: 3819570 - RNA, 19 nt, Human
aguggcccauggcauuuua

SEQ ID NO: 3819571 - RNA, 16 nt, Human
aguggcccccacagaa

SEQ ID NO: 3819572 - RNA, 20 nt, Human
aguggccucaacccucccuc

SEQ ID NO: 3819573 - RNA, 22 nt, Human
aguggccuccgucacuaccugg

SEQ ID NO: 3819574 - RNA, 14 nt, Human
aguggccuggccag

SEQ ID NO: 3819575 - RNA, 19 nt, Human
aguggccuggccaggagcu

SEQ ID NO: 3819576 - RNA, 17 nt, Human
aguggccuggcuccgcu

SEQ ID NO: 3819577 - RNA, 18 nt, Human
aguggcgaaaucccugcu

SEQ ID NO: 3819578 - RNA, 23 nt, Human
aguugaauugaggggauuaauau

SEQ ID NO: 3819579 - RNA, 13 nt, Human
aguugaauuuauu

SEQ ID NO: 3819580 - RNA, 17 nt, Human
aguugaauuuauuggcu

SEQ ID NO: 3819581 - RNA, 19 nt, Human
aguugaauuuauuggcuuu

SEQ ID NO: 3819582 - RNA, 18 nt, Human
aguugaauuuuuuuuaac

SEQ ID NO: 3819583 - RNA, 22 nt, Human
aguugacaaaaagcucuuacac

SEQ ID NO: 3819584 - RNA, 15 nt, Human
aguugacuuauagua

SEQ ID NO: 3819585 - RNA, 17 nt, Human
aguugacuuauaguaca

SEQ ID NO: 3819586 - RNA, 18 nt, Human
aguugacuuauaguacau

SEQ ID NO: 3819587 - RNA, 21 nt, Human
aguugacuuauaguacaugau

SEQ ID NO: 3819588 - RNA, 22 nt, Human
aguugacuugacagaacacugu

SEQ ID NO: 3819589 - RNA, 17 nt, Human
aguugagacaagaaaau

SEQ ID NO: 3819590 - RNA, 18 nt, Human
aguugagauaguuuucau

SEQ ID NO: 3819591 - RNA, 15 nt, Human
aguugagcuaugacu

SEQ ID NO: 3819592 - RNA, 18 nt, Human
aguugagcuaugacuuaa

SEQ ID NO: 3819593 - RNA, 15 nt, Human
aguugaggacuucuu

SEQ ID NO: 3819594 - RNA, 15 nt, Human
aguugaggaguuucc

SEQ ID NO: 3819595 - RNA, 16 nt, Human
aguugaggaguuuccu

SEQ ID NO: 3819596 - RNA, 16 nt, Human
aguugaggccaggagu

SEQ ID NO: 3819597 - RNA, 23 nt, Human
aguugaguauauuauaauagauu

SEQ ID NO: 3819598 - RNA, 17 nt, Human
aguugagugauagagcu

SEQ ID NO: 3819599 - RNA, 17 nt, Human
aguugauaaagauuuuu

SEQ ID NO: 3819600 - RNA, 14 nt, Human
aguugauagcacag

SEQ ID NO: 3819601 - RNA, 22 nt, Human
aguugauauguuuuauuucauu

SEQ ID NO: 3819602 - RNA, 21 nt, Human
aguugaucgccuuucccaggu

SEQ ID NO: 3819603 - RNA, 23 nt, Human
aguugaucuggaacccagacuca

SEQ ID NO: 3819604 - RNA, 15 nt, Human
aguugauguugcauu

SEQ ID NO: 3819605 - RNA, 14 nt, Human
aguugauucagcuc

SEQ ID NO: 3819606 - RNA, 18 nt, Human
aguugauucagcucugca

SEQ ID NO: 3819607 - RNA, 18 nt, Human
aguugauuuaguguuuuu

SEQ ID NO: 3819608 - RNA, 23 nt, Human
aguugauuuuacaauugaaauga

SEQ ID NO: 3819609 - RNA, 20 nt, Human
aguugcaaggcaaauguuua

SEQ ID NO: 3819610 - RNA, 13 nt, Human
aguugcaauaaua

SEQ ID NO: 3819611 - RNA, 14 nt, Human
aguugcaauaauac

SEQ ID NO: 3819612 - RNA, 22 nt, Human
aguugcaauaauacuucucaaa

SEQ ID NO: 3819613 - RNA, 19 nt, Human
aguugcaaucguaauguac

SEQ ID NO: 3819614 - RNA, 18 nt, Human
aguugcaauugaauuaaa

SEQ ID NO: 3819615 - RNA, 11 nt, Human
aguugcacagc

SEQ ID NO: 3819616 - RNA, 15 nt, Human
aguugcacggcugcu

SEQ ID NO: 3819617 - RNA, 20 nt, Human
aguugcacggcugcugaggc

SEQ ID NO: 3819618 - RNA, 23 nt, Human
aguugcacuuauugaccauuuuu

SEQ ID NO: 3819619 - RNA, 20 nt, Human
aguugcacuuggccucugga

SEQ ID NO: 3819620 - RNA, 11 nt, Human
aguugcagaaa

SEQ ID NO: 3819621 - RNA, 16 nt, Human
aguugcagauucauuu

SEQ ID NO: 3819622 - RNA, 17 nt, Human
aguugcagcuguuuugu

SEQ ID NO: 3819623 - RNA, 22 nt, Human
aguugcagcuguuuuguugaca

SEQ ID NO: 3819624 - RNA, 17 nt, Human
aguugcauagcaguaua

SEQ ID NO: 3819625 - RNA, 18 nt, Human
aguugcauguaguaacac

SEQ ID NO: 3819626 - RNA, 14 nt, Human
aguugcauuuuaac

SEQ ID NO: 3819627 - RNA, 16 nt, Human
aguugccaagacaaau

SEQ ID NO: 3819628 - RNA, 20 nt, Human
aguugccaccaccucugugg

SEQ ID NO: 3819629 - RNA, 21 nt, Human
aguugccaccaccucuguggc

SEQ ID NO: 3819630 - RNA, 14 nt, Human
aguugcccagccuc

SEQ ID NO: 3819631 - RNA, 17 nt, Human
aguugccccgucucugu

SEQ ID NO: 3819632 - RNA, 18 nt, Human
aguugccccgucucuguu

SEQ ID NO: 3819633 - RNA, 22 nt, Human
aguugccgcauauuauaucaga

SEQ ID NO: 3819634 - RNA, 13 nt, Human
aguugccuuuuau

SEQ ID NO: 3819635 - RNA, 19 nt, Human
aguugcuauuuuuguaaag

SEQ ID NO: 3819636 - RNA, 15 nt, Human
aguugcucaaaaaga

SEQ ID NO: 3819637 - RNA, 14 nt, Human
aguugcucuaugcu

SEQ ID NO: 3819638 - RNA, 17 nt, Human
aguugcugcaaaccuga

SEQ ID NO: 3819639 - RNA, 23 nt, Human
aguugcugcuucaauuuauaccu

SEQ ID NO: 3819640 - RNA, 19 nt, Human
aguugcuugucuucuggua

SEQ ID NO: 3819641 - RNA, 13 nt, Human
aguuggaaacacu

SEQ ID NO: 3819642 - RNA, 19 nt, Human
aguuggaaacacuaaaugu

SEQ ID NO: 3819643 - RNA, 16 nt, Human
auucaaaaguuccaag

SEQ ID NO: 3819644 - RNA, 18 nt, Human
auucaaaauaggguauau

SEQ ID NO: 3819645 - RNA, 12 nt, Human
auucaaaauauu

SEQ ID NO: 3819646 - RNA, 18 nt, Human
auucaaacagucucagga

SEQ ID NO: 3819647 - RNA, 19 nt, Human
auucaaacagucucaggaa

SEQ ID NO: 3819648 - RNA, 20 nt, Human
auucaaacagucucaggaaa

SEQ ID NO: 3819649 - RNA, 14 nt, Human
auucaaagaaucac

SEQ ID NO: 3819650 - RNA, 14 nt, Human
auucaaagagaaaa

SEQ ID NO: 3819651 - RNA, 19 nt, Human
auucaaagcaccaaaauaa

SEQ ID NO: 3819652 - RNA, 12 nt, Human
auucaaagcaug

SEQ ID NO: 3819653 - RNA, 17 nt, Human
auucaaagguucuaggu

SEQ ID NO: 3819654 - RNA, 21 nt, Human
auucaaaguugccuaaaucca

SEQ ID NO: 3819655 - RNA, 22 nt, Human
auucaaaguugccuaaauccau

SEQ ID NO: 3819656 - RNA, 20 nt, Human
auucaaaugggugauauccu

SEQ ID NO: 3819657 - RNA, 13 nt, Human
auucaacaaacau

SEQ ID NO: 3819658 - RNA, 22 nt, Human
auucaacacucccuucccauga

SEQ ID NO: 3819659 - RNA, 18 nt, Human
auucaacagguuuuccug

SEQ ID NO: 3819660 - RNA, 19 nt, Human
auucaaccacuguaaaaug

SEQ ID NO: 3819661 - RNA, 19 nt, Human
auucaaccauggacuuuau

SEQ ID NO: 3819662 - RNA, 21 nt, Human
auucaacuuuccaaauaaaag

SEQ ID NO: 3819663 - RNA, 22 nt, Human
auucaagaaaacaacuucaaua

SEQ ID NO: 3819664 - RNA, 16 nt, Human
auucaagaaagccagu

SEQ ID NO: 3819665 - RNA, 12 nt, Human
auucaagauucc

SEQ ID NO: 3819666 - RNA, 21 nt, Human
auucaagccauuccaaaguuc

SEQ ID NO: 3819667 - RNA, 17 nt, Human
auucaaggaauuucuua

SEQ ID NO: 3819668 - RNA, 18 nt, Human
auucaaggaauuucuuaa

SEQ ID NO: 3819669 - RNA, 20 nt, Human
auucaaggaauuucuuaacu

SEQ ID NO: 3819670 - RNA, 17 nt, Human
auucaagguaaaauucu

SEQ ID NO: 3819671 - RNA, 15 nt, Human
auucaagguggccaa

SEQ ID NO: 3819672 - RNA, 12 nt, Human
auucaaguauua

SEQ ID NO: 3819673 - RNA, 16 nt, Human
auucaaguguacagug

SEQ ID NO: 3819674 - RNA, 12 nt, Human
auucaauaaaaa

SEQ ID NO: 3819675 - RNA, 18 nt, Human
auucaauaaaaaaaagaa

SEQ ID NO: 3819676 - RNA, 22 nt, Human
auucaauaaaaaaaagaaauga

SEQ ID NO: 3819677 - RNA, 17 nt, Human
auucaauaaaguauuua

SEQ ID NO: 3819678 - RNA, 18 nt, Human
auucaauaaaguauuuaa

SEQ ID NO: 3819679 - RNA, 20 nt, Human
auucaauaaaguauuuaauu

SEQ ID NO: 3819680 - RNA, 17 nt, Human
auucaauaguaauauaa

SEQ ID NO: 3819681 - RNA, 21 nt, Human
auucaauaguaauauaauaca

SEQ ID NO: 3819682 - RNA, 19 nt, Human
auucaauauugacauuugu

SEQ ID NO: 3819683 - RNA, 21 nt, Human
auucaauauugacauuuguag

SEQ ID NO: 3819684 - RNA, 22 nt, Human
auucaaucgacuggguuuaugu

SEQ ID NO: 3819685 - RNA, 15 nt, Human
auucaaucuguaaac

SEQ ID NO: 3819686 - RNA, 17 nt, Human
auucaaucuguaaacug

SEQ ID NO: 3819687 - RNA, 22 nt, Human
auucaaucuguaaacuguguau

SEQ ID NO: 3819688 - RNA, 20 nt, Human
auucaaugccccugaauuua

SEQ ID NO: 3819689 - RNA, 12 nt, Human
auucaauuaaag

SEQ ID NO: 3819690 - RNA, 18 nt, Human
auucaauuaaagaaauaa

SEQ ID NO: 3819691 - RNA, 21 nt, Human
auucaauuguaaauugaauca

SEQ ID NO: 3819692 - RNA, 22 nt, Human
auucaauuguaaauugaaucag

SEQ ID NO: 3819693 - RNA, 21 nt, Human
auucaauuugauguggugaaa

SEQ ID NO: 3819694 - RNA, 15 nt, Human
auucacaaaaauuga

SEQ ID NO: 3819695 - RNA, 14 nt, Human
auucacaaacuuuu

SEQ ID NO: 3819696 - RNA, 22 nt, Human
auucacaaacuuuuauacucuu

SEQ ID NO: 3819697 - RNA, 21 nt, Human
auucacaaaguaauuuggaaa

SEQ ID NO: 3819698 - RNA, 13 nt, Human
auucacaagcugc

SEQ ID NO: 3819699 - RNA, 19 nt, Human
auucacaaguuaagauucu

SEQ ID NO: 3819700 - RNA, 14 nt, Human
auucacaccccacc

SEQ ID NO: 3819701 - RNA, 17 nt, Human
auucacaucuaaccuca

SEQ ID NO: 3819702 - RNA, 15 nt, Human
auucacauguuuuca

SEQ ID NO: 3819703 - RNA, 21 nt, Human
auucacauguuuucaaaugga

SEQ ID NO: 3819704 - RNA, 20 nt, Human
auucacauuguauucagagu

SEQ ID NO: 3819705 - RNA, 15 nt, Human
auucacauuuagaaa

SEQ ID NO: 3819706 - RNA, 21 nt, Human
auucaccaaaauagucuucuc

SEQ ID NO: 3819707 - RNA, 22 nt, Human
auucacccccuuuccuggacac

SEQ ID NO: 3819708 - RNA, 21 nt, Human
auucaccuaagagauucugau

SEQ ID NO: 3819709 - RNA, 23 nt, Human
auucaccuaagagauucugauuu

SEQ ID NO: 3819710 - RNA, 21 nt, Human
auucaccuccuaaaacaacag

SEQ ID NO: 3819711 - RNA, 19 nt, Human
auucaccuguaaaacuuua

SEQ ID NO: 3819712 - RNA, 13 nt, Human
auucaccuucagu

SEQ ID NO: 3819713 - RNA, 20 nt, Human
auucacggagauaugaagag

SEQ ID NO: 3819714 - RNA, 21 nt, Human
auucacucaagcacugauauc

SEQ ID NO: 3819715 - RNA, 19 nt, Human
auucacucuuccagaaucc

SEQ ID NO: 3819716 - RNA, 12 nt, Human
auucacugauuu

SEQ ID NO: 3819717 - RNA, 14 nt, Human
auucacugggccaa

SEQ ID NO: 3819718 - RNA, 16 nt, Human
auucacuucacugugc

SEQ ID NO: 3819719 - RNA, 18 nt, Human
auucacuucacugugcug

SEQ ID NO: 3819720 - RNA, 18 nt, Human
auucacuuucauuuuuga

SEQ ID NO: 3819721 - RNA, 12 nt, Human
aguuuaaaaaaa

SEQ ID NO: 3819722 - RNA, 14 nt, Human
aguuuaaaaaaauu

SEQ ID NO: 3819723 - RNA, 15 nt, Human
aguuuaaaaaaauug

SEQ ID NO: 3819724 - RNA, 16 nt, Human
aguuuaaaaaucaacu

SEQ ID NO: 3819725 - RNA, 18 nt, Human
aguuuaaaaaucaacuuu

SEQ ID NO: 3819726 - RNA, 20 nt, Human
aguuuaaaaaucaacuuuuu

SEQ ID NO: 3819727 - RNA, 17 nt, Human
aguuuaaaacaguauuu

SEQ ID NO: 3819728 - RNA, 22 nt, Human
aguuuaaaaguucuuaguuaua

SEQ ID NO: 3819729 - RNA, 15 nt, Human
aguuuaaaaucauca

SEQ ID NO: 3819730 - RNA, 12 nt, Human
aguuuaaagcaa

SEQ ID NO: 3819731 - RNA, 20 nt, Human
aguuuaaauauuaagcauga

SEQ ID NO: 3819732 - RNA, 20 nt, Human
aguuuaaauuguaauaggcg

SEQ ID NO: 3819733 - RNA, 14 nt, Human
aguuuaaccauaug

SEQ ID NO: 3819734 - RNA, 17 nt, Human
aguuuaagaccagccug

SEQ ID NO: 3819735 - RNA, 22 nt, Human
aguuuaauccuucuaguuuccc

SEQ ID NO: 3819736 - RNA, 20 nt, Human
aguuuaauggugccuucauu

SEQ ID NO: 3819737 - RNA, 18 nt, Human
aguuuaauugacuuauuu

SEQ ID NO: 3819738 - RNA, 15 nt, Human
aguuuacaaguguau

SEQ ID NO: 3819739 - RNA, 16 nt, Human
aguuuacaaguguaua

SEQ ID NO: 3819740 - RNA, 19 nt, Human
aguuuacaaguguauauca

SEQ ID NO: 3819741 - RNA, 20 nt, Human
aguuuacaguaaauaaauug

SEQ ID NO: 3819742 - RNA, 14 nt, Human
aguuuacauuuuua

SEQ ID NO: 3819743 - RNA, 20 nt, Human
aguuuaccaguugccuuuua

SEQ ID NO: 3819744 - RNA, 12 nt, Human
aguuuaccaucu

SEQ ID NO: 3819745 - RNA, 18 nt, Human
aguuuaccauuuguaaua

SEQ ID NO: 3819746 - RNA, 21 nt, Human
aguuuaccauuuguaauaaag

SEQ ID NO: 3819747 - RNA, 22 nt, Human
aguuuaccauuuguaauaaagu

SEQ ID NO: 3819748 - RNA, 16 nt, Human
aguuuacccgguuucu

SEQ ID NO: 3819749 - RNA, 14 nt, Human
aguuuacuauuuua

SEQ ID NO: 3819750 - RNA, 16 nt, Human
aguuuacuauuuuacu

SEQ ID NO: 3819751 - RNA, 21 nt, Human
aguuuagaggaaaaaaaugac

SEQ ID NO: 3819752 - RNA, 21 nt, Human
aguuuagauuucaagaaaaaa

SEQ ID NO: 3819753 - RNA, 17 nt, Human
aguuuaguaaggcugug

SEQ ID NO: 3819754 - RNA, 17 nt, Human
aguuuagugcaucuuug

SEQ ID NO: 3819755 - RNA, 20 nt, Human
aguuuagugugauaaaggca

SEQ ID NO: 3819756 - RNA, 22 nt, Human
aguuuauacaguuuuaaagaau

SEQ ID NO: 3819757 - RNA, 16 nt, Human
aguuuauauuuaacuc

SEQ ID NO: 3819758 - RNA, 18 nt, Human
aguuuaucaguaaauaac

SEQ ID NO: 3819759 - RNA, 17 nt, Human
aguuuaucaugaagccu

SEQ ID NO: 3819760 - RNA, 21 nt, Human
aguuuaugucuaaagagcuuu

SEQ ID NO: 3819761 - RNA, 22 nt, Human
aguuuauuuccaaauaaaauga

SEQ ID NO: 3819762 - RNA, 19 nt, Human
aguuuauuuguugagagug

SEQ ID NO: 3819763 - RNA, 16 nt, Human
aguuuauuuuaaaaca

SEQ ID NO: 3819764 - RNA, 15 nt, Human
aguuucaaaaacugu

SEQ ID NO: 3819765 - RNA, 18 nt, Human
aguuucaaaaaucugaag

SEQ ID NO: 3819766 - RNA, 23 nt, Human
aguuucaaaaaucugaagauugu

SEQ ID NO: 3819767 - RNA, 19 nt, Human
aguuucaaacuuacuauuu

SEQ ID NO: 3819768 - RNA, 15 nt, Human
aguuucaaguuuuaa

SEQ ID NO: 3819769 - RNA, 20 nt, Human
aguuucaaguuuuaaaguuc

SEQ ID NO: 3819770 - RNA, 17 nt, Human
aguuucaauaaaguuug

SEQ ID NO: 3819771 - RNA, 14 nt, Human
aguuucaaugugau

SEQ ID NO: 3819772 - RNA, 15 nt, Human
aguuucaaugugauu

SEQ ID NO: 3819773 - RNA, 17 nt, Human
aguuucaauucagugcu

SEQ ID NO: 3819774 - RNA, 14 nt, Human
aguuucaauuuguu

SEQ ID NO: 3819775 - RNA, 22 nt, Human
aguuucacagaaaauaaggcac

SEQ ID NO: 3819776 - RNA, 15 nt, Human
aguuucacugacuua

SEQ ID NO: 3819777 - RNA, 17 nt, Human
aguuucacugccauaua

SEQ ID NO: 3819778 - RNA, 21 nt, Human
aguuucagcuuaaaauaaaca

SEQ ID NO: 3819779 - RNA, 22 nt, Human
aguuucagcuuaaaauaaacag

SEQ ID NO: 3819780 - RNA, 16 nt, Human
aguuucaggugacaug

SEQ ID NO: 3819781 - RNA, 17 nt, Human
aguuucaggugacaugu

SEQ ID NO: 3819782 - RNA, 20 nt, Human
aguuucaguagauugcagaa

SEQ ID NO: 3819783 - RNA, 22 nt, Human
aguuucaguauuagaugcacuu

SEQ ID NO: 3819784 - RNA, 19 nt, Human
aguuucaguuuguuggaaa

SEQ ID NO: 3819785 - RNA, 18 nt, Human
aguuucauguacaagaug

SEQ ID NO: 3819786 - RNA, 17 nt, Human
aguuucauucuccugcc

SEQ ID NO: 3819787 - RNA, 21 nt, Human
aguuucauuuaugauacaaaa

SEQ ID NO: 3819788 - RNA, 20 nt, Human
aguuuccaagcaaauguuac

SEQ ID NO: 3819789 - RNA, 17 nt, Human
aguuuccgugcguggca

SEQ ID NO: 3819790 - RNA, 22 nt, Human
aguuuccguuuccagguguuua

SEQ ID NO: 3819791 - RNA, 17 nt, Human
aguuuccuaaaaguuca

SEQ ID NO: 3819792 - RNA, 12 nt, Human
aguuuccugaaa

SEQ ID NO: 3819793 - RNA, 19 nt, Human
aguuuccuuccagcccaga

SEQ ID NO: 3819794 - RNA, 17 nt, Human
aguuuccuuggcuggug

SEQ ID NO: 3819795 - RNA, 20 nt, Human
aguuucuaaaauugaguucu

SEQ ID NO: 3819796 - RNA, 14 nt, Human
auucaugccuggcu

SEQ ID NO: 3819797 - RNA, 12 nt, Human
auucauguaaac

SEQ ID NO: 3819798 - RNA, 13 nt, Human
auucauguuucuu

SEQ ID NO: 3819799 - RNA, 14 nt, Human
auucauuacagcuu

SEQ ID NO: 3819800 - RNA, 15 nt, Human
auucauuagucaugu

SEQ ID NO: 3819801 - RNA, 20 nt, Human
auucauucucauaauuccua

SEQ ID NO: 3819802 - RNA, 19 nt, Human
auucauucugugaucauuu

SEQ ID NO: 3819803 - RNA, 15 nt, Human
auucauugaagucag

SEQ ID NO: 3819804 - RNA, 20 nt, Human
auucauugaagucagaugug

SEQ ID NO: 3819805 - RNA, 22 nt, Human
auucauugugguuauuuuuaua

SEQ ID NO: 3819806 - RNA, 19 nt, Human
auucauuuauaagaagaga

SEQ ID NO: 3819807 - RNA, 13 nt, Human
auucauuucacug

SEQ ID NO: 3819808 - RNA, 15 nt, Human
auucauuucacugua

SEQ ID NO: 3819809 - RNA, 13 nt, Human
auucauuuccugc

SEQ ID NO: 3819810 - RNA, 14 nt, Human
auucauuuccugcc

SEQ ID NO: 3819811 - RNA, 12 nt, Human
auucauuucuaa

SEQ ID NO: 3819812 - RNA, 19 nt, Human
auucauuugaguuauuuua

SEQ ID NO: 3819813 - RNA, 14 nt, Human
auucauuuuauauu

SEQ ID NO: 3819814 - RNA, 22 nt, Human
auucauuuucuagauacaauaa

SEQ ID NO: 3819815 - RNA, 16 nt, Human
auucauuuucucuuua

SEQ ID NO: 3819816 - RNA, 13 nt, Human
auucauuuuuaau

SEQ ID NO: 3819817 - RNA, 16 nt, Human
auuccaaaaagcacau

SEQ ID NO: 3819818 - RNA, 12 nt, Human
auuccaaaauau

SEQ ID NO: 3819819 - RNA, 13 nt, Human
auuccaaaauauu

SEQ ID NO: 3819820 - RNA, 14 nt, Human
auuccaaaccaaau

SEQ ID NO: 3819821 - RNA, 21 nt, Human
auuccaaaccaaauuuuaauu

SEQ ID NO: 3819822 - RNA, 13 nt, Human
auuccaaauucau

SEQ ID NO: 3819823 - RNA, 16 nt, Human
auuccaacacugauuu

SEQ ID NO: 3819824 - RNA, 14 nt, Human
auuccaacaguuua

SEQ ID NO: 3819825 - RNA, 18 nt, Human
auuccaacaguuuaauga

SEQ ID NO: 3819826 - RNA, 19 nt, Human
auuccaacaguuuaaugaa

SEQ ID NO: 3819827 - RNA, 16 nt, Human
auuccaaccccaacuc

SEQ ID NO: 3819828 - RNA, 11 nt, Human
auuccaaccuu

SEQ ID NO: 3819829 - RNA, 13 nt, Human
auuccaagacagu

SEQ ID NO: 3819830 - RNA, 13 nt, Human
auuccaagcuucc

SEQ ID NO: 3819831 - RNA, 23 nt, Human
auuccaagucagaaacuguuucu

SEQ ID NO: 3819832 - RNA, 17 nt, Human
auuccaauaugaugacu

SEQ ID NO: 3819833 - RNA, 14 nt, Human
auuccaccuuaaau

SEQ ID NO: 3819834 - RNA, 22 nt, Human
auuccaccuuaaauuaaacaau

SEQ ID NO: 3819835 - RNA, 18 nt, Human
auuccacugcguugucca

SEQ ID NO: 3819836 - RNA, 19 nt, Human
auuccagaagaagagaagc

SEQ ID NO: 3819837 - RNA, 16 nt, Human
auuccagaauaucugg

SEQ ID NO: 3819838 - RNA, 14 nt, Human
auuccagaaugcug

SEQ ID NO: 3819839 - RNA, 19 nt, Human
auuccagaaugcuguacau

SEQ ID NO: 3819840 - RNA, 23 nt, Human
auuccagaaugcuguacaucuau

SEQ ID NO: 3819841 - RNA, 17 nt, Human
auuccagaccugaagaa

SEQ ID NO: 3819842 - RNA, 18 nt, Human
auuccagagacaucagca

SEQ ID NO: 3819843 - RNA, 21 nt, Human
auuccagagaguggcuccucc

SEQ ID NO: 3819844 - RNA, 12 nt, Human
auuccagaggaa

SEQ ID NO: 3819845 - RNA, 20 nt, Human
auuccagcacuucaggaggc

SEQ ID NO: 3819846 - RNA, 17 nt, Human
auuccagccccucuggu

SEQ ID NO: 3819847 - RNA, 13 nt, Human
auuccagcucauu

SEQ ID NO: 3819848 - RNA, 15 nt, Human
auuccagcuccuccg

SEQ ID NO: 3819849 - RNA, 23 nt, Human
auuccaguuuguuuauuacuuau

SEQ ID NO: 3819850 - RNA, 20 nt, Human
auuccauaauuccauaugcu

SEQ ID NO: 3819851 - RNA, 19 nt, Human
auuccauaguauauuaaaa

SEQ ID NO: 3819852 - RNA, 23 nt, Human
auuccauaguauauuaaaaaugg

SEQ ID NO: 3819853 - RNA, 22 nt, Human
auuccauaucuugcgaauccaa

SEQ ID NO: 3819854 - RNA, 23 nt, Human
auuccauauuagaaaacuuuguu

SEQ ID NO: 3819855 - RNA, 17 nt, Human
auuccauauucauguaa

SEQ ID NO: 3819856 - RNA, 18 nt, Human
auuccauauucauguaaa

SEQ ID NO: 3819857 - RNA, 11 nt, Human
auuccaucucc

SEQ ID NO: 3819858 - RNA, 12 nt, Human
auuccaucuccu

SEQ ID NO: 3819859 - RNA, 15 nt, Human
auuccaugaaucgcu

SEQ ID NO: 3819860 - RNA, 21 nt, Human
auuccaugaaucgcuucucuu

SEQ ID NO: 3819861 - RNA, 18 nt, Human
auuccaugaauguaucag

SEQ ID NO: 3819862 - RNA, 15 nt, Human
auuccaugaauguuc

SEQ ID NO: 3819863 - RNA, 12 nt, Human
auuccaugcuaa

SEQ ID NO: 3819864 - RNA, 22 nt, Human
auuccaugcuaagcaagcuaac

SEQ ID NO: 3819865 - RNA, 21 nt, Human
auuccauucuggaagugacuu

SEQ ID NO: 3819866 - RNA, 13 nt, Human
auucuaggcaucc

SEQ ID NO: 3819867 - RNA, 20 nt, Human
auucuaggcaucccagggga

SEQ ID NO: 3819868 - RNA, 22 nt, Human
auucuaguacuagaaacugaag

SEQ ID NO: 3819869 - RNA, 17 nt, Human
auucuagugcugcugaa

SEQ ID NO: 3819870 - RNA, 17 nt, Human
auucuaguuuugucaaa

SEQ ID NO: 3819871 - RNA, 13 nt, Human
auucuauaaaacu

SEQ ID NO: 3819872 - RNA, 14 nt, Human
auucuauaaaacuc

SEQ ID NO: 3819873 - RNA, 18 nt, Human
auucuauaaguuuuaugu

SEQ ID NO: 3819874 - RNA, 17 nt, Human
auucuauaguucuagac

SEQ ID NO: 3819875 - RNA, 13 nt, Human
auucuauaugaau

SEQ ID NO: 3819876 - RNA, 14 nt, Human
auucuauaugaauu

SEQ ID NO: 3819877 - RNA, 23 nt, Human
auucuaugugucaucaauagugu

SEQ ID NO: 3819878 - RNA, 22 nt, Human
auucuauuuauauguacaugag

SEQ ID NO: 3819879 - RNA, 15 nt, Human
auucuauuugcuggg

SEQ ID NO: 3819880 - RNA, 13 nt, Human
auucuauuuuaca

SEQ ID NO: 3819881 - RNA, 21 nt, Human
auucucaaccuaccaccccuu

SEQ ID NO: 3819882 - RNA, 23 nt, Human
auucucaagccgcaucccagacu

SEQ ID NO: 3819883 - RNA, 15 nt, Human
auucucaccagcugu

SEQ ID NO: 3819884 - RNA, 13 nt, Human
auucucaccagga

SEQ ID NO: 3819885 - RNA, 15 nt, Human
auucucagcagagug

SEQ ID NO: 3819886 - RNA, 17 nt, Human
auucucagcagagugcu

SEQ ID NO: 3819887 - RNA, 13 nt, Human
auucucaggcacc

SEQ ID NO: 3819888 - RNA, 17 nt, Human
auucucagggucucugc

SEQ ID NO: 3819889 - RNA, 19 nt, Human
auucucagugccaacugug

SEQ ID NO: 3819890 - RNA, 22 nt, Human
auucucagugccaacuguggcu

SEQ ID NO: 3819891 - RNA, 18 nt, Human
auucucaguuuuucuuaa

SEQ ID NO: 3819892 - RNA, 14 nt, Human
auucucaugccuca

SEQ ID NO: 3819893 - RNA, 15 nt, Human
auucucaugugaucc

SEQ ID NO: 3819894 - RNA, 18 nt, Human
auucucauugcagaauaa

SEQ ID NO: 3819895 - RNA, 11 nt, Human
auucucauugg

SEQ ID NO: 3819896 - RNA, 22 nt, Human
auucucauuggaaauuuagcau

SEQ ID NO: 3819897 - RNA, 23 nt, Human
auucucauuggaaauuuagcauu

SEQ ID NO: 3819898 - RNA, 17 nt, Human
auucucauuugucacac

SEQ ID NO: 3819899 - RNA, 14 nt, Human
auucuccacagcaa

SEQ ID NO: 3819900 - RNA, 15 nt, Human
auucuccaccugcca

SEQ ID NO: 3819901 - RNA, 19 nt, Human
auucuccaccugccaggga

SEQ ID NO: 3819902 - RNA, 20 nt, Human
auucuccaccugccagggac

SEQ ID NO: 3819903 - RNA, 21 nt, Human
auucuccagggguuuacagug

SEQ ID NO: 3819904 - RNA, 14 nt, Human
auucuccauuuguu

SEQ ID NO: 3819905 - RNA, 18 nt, Human
auucuccauuuguuaucu

SEQ ID NO: 3819906 - RNA, 19 nt, Human
auucuccauuuguuaucug

SEQ ID NO: 3819907 - RNA, 20 nt, Human
auucucccagguaccagcug

SEQ ID NO: 3819908 - RNA, 24 nt, Human
auucucccagguaccagcugcgcu

SEQ ID NO: 3819909 - RNA, 17 nt, Human
auucucccgggacucug

SEQ ID NO: 3819910 - RNA, 21 nt, Human
auucuccuaucaccugucuug

SEQ ID NO: 3819911 - RNA, 12 nt, Human
auucuccuccuc

SEQ ID NO: 3819912 - RNA, 13 nt, Human
auucuccugccuu

SEQ ID NO: 3819913 - RNA, 14 nt, Human
auucuccugugcua

SEQ ID NO: 3819914 - RNA, 22 nt, Human
auucuccuucagcccucacccc

SEQ ID NO: 3819915 - RNA, 18 nt, Human
auucuccuuguguuacua

SEQ ID NO: 3819916 - RNA, 18 nt, Human
auucuccuuguuguuggu

SEQ ID NO: 3819917 - RNA, 17 nt, Human
auucucgcuucccugaa

SEQ ID NO: 3819918 - RNA, 17 nt, Human
auucucuauuugaauua

SEQ ID NO: 3819919 - RNA, 21 nt, Human
auucucuccauuucacuggcu

SEQ ID NO: 3819920 - RNA, 19 nt, Human
auucucuccuguaccucuu

SEQ ID NO: 3819921 - RNA, 15 nt, Human
auucucucuccugua

SEQ ID NO: 3819922 - RNA, 17 nt, Human
auucucugagcugugca

SEQ ID NO: 3819923 - RNA, 18 nt, Human
auucucugagcugugcag

SEQ ID NO: 3819924 - RNA, 17 nt, Human
auucucuggcuguaagg

SEQ ID NO: 3819925 - RNA, 19 nt, Human
auucucuggcuguaaggcu

SEQ ID NO: 3819926 - RNA, 20 nt, Human
auucucuggcuguaaggcuc

SEQ ID NO: 3819927 - RNA, 14 nt, Human
auucucuguacaua

SEQ ID NO: 3819928 - RNA, 12 nt, Human
auucucugucuc

SEQ ID NO: 3819929 - RNA, 16 nt, Human
auucucugucucaucc

SEQ ID NO: 3819930 - RNA, 17 nt, Human
auucucugucucaucca

SEQ ID NO: 3819931 - RNA, 17 nt, Human
auucucugugucuaaga

SEQ ID NO: 3819932 - RNA, 18 nt, Human
auucucugugucuaagau

SEQ ID NO: 3819933 - RNA, 20 nt, Human
auucucugugucuaagauuc

SEQ ID NO: 3819934 - RNA, 14 nt, Human
auucucuuauccaa

SEQ ID NO: 3819935 - RNA, 15 nt, Human
auucucuugccucag

SEQ ID NO: 3819936 - RNA, 17 nt, Human
auucucuuggcuggcuu

SEQ ID NO: 3819937 - RNA, 20 nt, Human
auucucuuguauaagauccu

SEQ ID NO: 3819938 - RNA, 16 nt, Human
auucucuuuuaucugu

SEQ ID NO: 3819939 - RNA, 17 nt, Human
auucucuuuuaucuguu

SEQ ID NO: 3819940 - RNA, 15 nt, Human
auucugaaggagccc

SEQ ID NO: 3819941 - RNA, 12 nt, Human
auucugaaguua

SEQ ID NO: 3819942 - RNA, 14 nt, Human
auucugaaguuaua

SEQ ID NO: 3819943 - RNA, 13 nt, Human
auucugaauauuu

SEQ ID NO: 3819944 - RNA, 15 nt, Human
auucugaaugcuucu

SEQ ID NO: 3819945 - RNA, 15 nt, Human
auucugaauuugcaa

SEQ ID NO: 3819946 - RNA, 18 nt, Human
auucugaauuugcaaagu

SEQ ID NO: 3819947 - RNA, 19 nt, Human
auucugaauuugcaaagua

SEQ ID NO: 3819948 - RNA, 23 nt, Human
auucugaauuugcaaaguacugu

SEQ ID NO: 3819949 - RNA, 15 nt, Human
auucugagaaaacaa

SEQ ID NO: 3819950 - RNA, 19 nt, Human
auucugagacaugugucaa

SEQ ID NO: 3819951 - RNA, 13 nt, Human
auucugagagcug

SEQ ID NO: 3819952 - RNA, 19 nt, Human
auucugagaugacuauuca

SEQ ID NO: 3819953 - RNA, 17 nt, Human
auucugaggcccugccc

SEQ ID NO: 3819954 - RNA, 16 nt, Human
auucugauguacucua

SEQ ID NO: 3819955 - RNA, 18 nt, Human
auucugauguacucuaaa

SEQ ID NO: 3819956 - RNA, 23 nt, Human
auucugauguacucuaaauacug

SEQ ID NO: 3819957 - RNA, 15 nt, Human
auucugauuacacaa

SEQ ID NO: 3819958 - RNA, 14 nt, Human
auucugauuucuuu

SEQ ID NO: 3819959 - RNA, 19 nt, Human
auucugauuuggaaaaaga

SEQ ID NO: 3819960 - RNA, 19 nt, Human
auucugcaagcacaucugc

SEQ ID NO: 3819961 - RNA, 22 nt, Human
auucugcaagcacaucugcauu

SEQ ID NO: 3819962 - RNA, 13 nt, Human
auucugcagcaug

SEQ ID NO: 3819963 - RNA, 18 nt, Human
auucacaagacccaaaag

SEQ ID NO: 3819964 - RNA, 14 nt, Human
auucacaagcugcc

SEQ ID NO: 3819965 - RNA, 15 nt, Human
auucacaagcugccu

SEQ ID NO: 3819966 - RNA, 14 nt, Human
auucacaauagaaa

SEQ ID NO: 3819967 - RNA, 16 nt, Human
auucacaccccaccug

SEQ ID NO: 3819968 - RNA, 15 nt, Human
auucacaccugacuc

SEQ ID NO: 3819969 - RNA, 20 nt, Human
auucacagugcucuuuucuc

SEQ ID NO: 3819970 - RNA, 23 nt, Human
auucacaguucuuugggccagac

SEQ ID NO: 3819971 - RNA, 18 nt, Human
auucacaucgcagauucu

SEQ ID NO: 3819972 - RNA, 15 nt, Human
auucacaucucauuu

SEQ ID NO: 3819973 - RNA, 18 nt, Human
auucacauguuuucaaau

SEQ ID NO: 3819974 - RNA, 19 nt, Human
auucacauguuuucaaaug

SEQ ID NO: 3819975 - RNA, 13 nt, Human
auucacauuguau

SEQ ID NO: 3819976 - RNA, 14 nt, Human
auucacauuuagaa

SEQ ID NO: 3819977 - RNA, 19 nt, Human
auucaccauguaaaacaaa

SEQ ID NO: 3819978 - RNA, 21 nt, Human
auucaccauguaaaacaaaaa

SEQ ID NO: 3819979 - RNA, 22 nt, Human
auucaccauguaaaacaaaaaa

SEQ ID NO: 3819980 - RNA, 19 nt, Human
auucacccagacagcuccc

SEQ ID NO: 3819981 - RNA, 16 nt, Human
auucacccccaaacag

SEQ ID NO: 3819982 - RNA, 17 nt, Human
auucaccuaagagauuc

SEQ ID NO: 3819983 - RNA, 14 nt, Human
auucaccuguaaaa

SEQ ID NO: 3819984 - RNA, 14 nt, Human
auucacuauuggcu

SEQ ID NO: 3819985 - RNA, 17 nt, Human
auucacucaagcacuga

SEQ ID NO: 3819986 - RNA, 21 nt, Human
auucacucugaguguuuuaug

SEQ ID NO: 3819987 - RNA, 17 nt, Human
auucacugauuugacau

SEQ ID NO: 3819988 - RNA, 20 nt, Human
auucacuucacugugcuguu

SEQ ID NO: 3819989 - RNA, 23 nt, Human
auucacuucacugugcuguuguu

SEQ ID NO: 3819990 - RNA, 15 nt, Human
auucacuuucauuuu

SEQ ID NO: 3819991 - RNA, 12 nt, Human
auucagaaaaaa

SEQ ID NO: 3819992 - RNA, 13 nt, Human
auucagaaauguu

SEQ ID NO: 3819993 - RNA, 13 nt, Human
auucagaaauugg

SEQ ID NO: 3819994 - RNA, 19 nt, Human
auucagaacaccaagacuu

SEQ ID NO: 3819995 - RNA, 14 nt, Human
auucagaagaaaaa

SEQ ID NO: 3819996 - RNA, 17 nt, Human
auucagaagaaaaagaa

SEQ ID NO: 3819997 - RNA, 18 nt, Human
auucagaaggaucuucau

SEQ ID NO: 3819998 - RNA, 15 nt, Human
auucagaauauucau

SEQ ID NO: 3819999 - RNA, 13 nt, Human
auucagacaaaau

SEQ ID NO: 3820000 - RNA, 14 nt, Human
auucagacaaaaug

SEQ ID NO: 3820001 - RNA, 13 nt, Human
auucagacagaug

SEQ ID NO: 3820002 - RNA, 11 nt, Human
auucagacagc

SEQ ID NO: 3820003 - RNA, 15 nt, Human
auucagacagcugcc

SEQ ID NO: 3820004 - RNA, 16 nt, Human
auucagacagcugccu

SEQ ID NO: 3820005 - RNA, 18 nt, Human
auucagacagcugccugg

SEQ ID NO: 3820006 - RNA, 14 nt, Human
auucagacaggcaa

SEQ ID NO: 3820007 - RNA, 15 nt, Human
auucagacaucugag

SEQ ID NO: 3820008 - RNA, 18 nt, Human
auucagagaaaggcaagg

SEQ ID NO: 3820009 - RNA, 14 nt, Human
auucagagagcagc

SEQ ID NO: 3820010 - RNA, 17 nt, Human
auucagaguugaugguu

SEQ ID NO: 3820011 - RNA, 18 nt, Human
auucagauaugauucaaa

SEQ ID NO: 3820012 - RNA, 19 nt, Human
auaauguuuauuaaaugcu

SEQ ID NO: 3820013 - RNA, 18 nt, Human
auaauguuucaaacauau

SEQ ID NO: 3820014 - RNA, 14 nt, Human
auaauguuugcuau

SEQ ID NO: 3820015 - RNA, 13 nt, Human
auaauuaaagugu

SEQ ID NO: 3820016 - RNA, 19 nt, Human
auaauuaacacuuaagguu

SEQ ID NO: 3820017 - RNA, 22 nt, Human
auaauuagauccauuaauuuaa

SEQ ID NO: 3820018 - RNA, 16 nt, Human
auaauuauaauauacu

SEQ ID NO: 3820019 - RNA, 15 nt, Human
auaauuauauaacug

SEQ ID NO: 3820020 - RNA, 17 nt, Human
auaauuauauaacugua

SEQ ID NO: 3820021 - RNA, 17 nt, Human
auaauuauaugcuauuu

SEQ ID NO: 3820022 - RNA, 21 nt, Human
auaauuauaugcuauuucuau

SEQ ID NO: 3820023 - RNA, 15 nt, Human
auucuguacugauuu

SEQ ID NO: 3820024 - RNA, 17 nt, Human
auucuguagauucugug

SEQ ID NO: 3820025 - RNA, 20 nt, Human
auucuguaucuuucauccuu

SEQ ID NO: 3820026 - RNA, 17 nt, Human
auucugucauagaaagu

SEQ ID NO: 3820027 - RNA, 18 nt, Human
auucugucauagaaagug

SEQ ID NO: 3820028 - RNA, 18 nt, Human
auucugucgccuuagcau

SEQ ID NO: 3820029 - RNA, 21 nt, Human
auucuguguguuuucauaaua

SEQ ID NO: 3820030 - RNA, 20 nt, Human
auucuguuaaaaucuauucu

SEQ ID NO: 3820031 - RNA, 19 nt, Human
auucuguuggccaguguga

SEQ ID NO: 3820032 - RNA, 19 nt, Human
auucuguuuuuaaugcuau

SEQ ID NO: 3820033 - RNA, 23 nt, Human
auucuuaaaaggcccauagcagc

SEQ ID NO: 3820034 - RNA, 20 nt, Human
auucuuaaaauauauuucag

SEQ ID NO: 3820035 - RNA, 13 nt, Human
auucuuaaaguug

SEQ ID NO: 3820036 - RNA, 15 nt, Human
auucuuaaaguugaa

SEQ ID NO: 3820037 - RNA, 15 nt, Human
auucuuaaccaugga

SEQ ID NO: 3820038 - RNA, 22 nt, Human
auucuuaagggaacuuccacau

SEQ ID NO: 3820039 - RNA, 19 nt, Human
auucuuacacugccuguau

SEQ ID NO: 3820040 - RNA, 17 nt, Human
auucuuacauguuuucu

SEQ ID NO: 3820041 - RNA, 22 nt, Human
auucuuacuaaaaaguauaaaa

SEQ ID NO: 3820042 - RNA, 17 nt, Human
auucuuagccuguggca

SEQ ID NO: 3820043 - RNA, 14 nt, Human
auucuuauaaauau

SEQ ID NO: 3820044 - RNA, 10 nt, Human
auucuucaaa

SEQ ID NO: 3820045 - RNA, 20 nt, Human
auucuucaguugguuguguc

SEQ ID NO: 3820046 - RNA, 14 nt, Human
auucuuccaucuga

SEQ ID NO: 3820047 - RNA, 15 nt, Human
auucuuccaucugau

SEQ ID NO: 3820048 - RNA, 22 nt, Human
auucuucccauucuccauuugu

SEQ ID NO: 3820049 - RNA, 21 nt, Human
auucuucccuaucuuugccac

SEQ ID NO: 3820050 - RNA, 12 nt, Human
auucuuccuagu

SEQ ID NO: 3820051 - RNA, 17 nt, Human
auucuuccuaguuuucu

SEQ ID NO: 3820052 - RNA, 15 nt, Human
auucuucucuguugu

SEQ ID NO: 3820053 - RNA, 12 nt, Human
auucuucugauc

SEQ ID NO: 3820054 - RNA, 15 nt, Human
auucuucugaucacu

SEQ ID NO: 3820055 - RNA, 14 nt, Human
auucuucugcuuca

SEQ ID NO: 3820056 - RNA, 22 nt, Human
auucuucuguacgucugacagg

SEQ ID NO: 3820057 - RNA, 22 nt, Human
auucuucuuccaacguggccca

SEQ ID NO: 3820058 - RNA, 16 nt, Human
auucuugaaagcugug

SEQ ID NO: 3820059 - RNA, 21 nt, Human
auucuugaucaguaguuugca

SEQ ID NO: 3820060 - RNA, 22 nt, Human
auucuugaucaguaguuugcau

SEQ ID NO: 3820061 - RNA, 10 nt, Human
auucuugaug

SEQ ID NO: 3820062 - RNA, 21 nt, Human
auucuugaugaaaagcuuugu

SEQ ID NO: 3820063 - RNA, 12 nt, Human
auucuugaugua

SEQ ID NO: 3820064 - RNA, 17 nt, Human
auucuugauguaaaauc

SEQ ID NO: 3820065 - RNA, 14 nt, Human
auucuugcaaagua

SEQ ID NO: 3820066 - RNA, 17 nt, Human
auucuugccaaauauaa

SEQ ID NO: 3820067 - RNA, 17 nt, Human
auucuugguugaggaaa

SEQ ID NO: 3820068 - RNA, 20 nt, Human
auucuugguuggcuggccuu

SEQ ID NO: 3820069 - RNA, 18 nt, Human
auucuuguaaggcuuuga

SEQ ID NO: 3820070 - RNA, 12 nt, Human
auucuuguauau

SEQ ID NO: 3820071 - RNA, 18 nt, Human
auucuugucacaauaaau

SEQ ID NO: 3820072 - RNA, 13 nt, Human
auucuugugaaua

SEQ ID NO: 3820073 - RNA, 19 nt, Human
auucuugugaauauguaca

SEQ ID NO: 3820074 - RNA, 21 nt, Human
auucuuguugcuguacaaaag

SEQ ID NO: 3820075 - RNA, 22 nt, Human
auucuuguugcuguacaaaagc

SEQ ID NO: 3820076 - RNA, 23 nt, Human
auucuuguuuucuuucuuuaaau

SEQ ID NO: 3820077 - RNA, 15 nt, Human
auucuuguuuugcuu

SEQ ID NO: 3820078 - RNA, 17 nt, Human
auucuuuaaauuucauc

SEQ ID NO: 3820079 - RNA, 15 nt, Human
auucuuuagagaaga

SEQ ID NO: 3820080 - RNA, 19 nt, Human
auucuuucaauaacgaagu

SEQ ID NO: 3820081 - RNA, 19 nt, Human
auucuuucaauacagauau

SEQ ID NO: 3820082 - RNA, 17 nt, Human
auucuuucaguucuuug

SEQ ID NO: 3820083 - RNA, 17 nt, Human
auucuuuccauuaugau

SEQ ID NO: 3820084 - RNA, 21 nt, Human
auucuuuccauuaugauucuu

SEQ ID NO: 3820085 - RNA, 22 nt, Human
auucuuuccauuaugauucuuu

SEQ ID NO: 3820086 - RNA, 13 nt, Human
auucuuucccaac

SEQ ID NO: 3820087 - RNA, 19 nt, Human
auucuuucccaacaccucu

SEQ ID NO: 3820088 - RNA, 21 nt, Human
auucuuucccaauucacaucu

SEQ ID NO: 3820089 - RNA, 19 nt, Human
auucuuucccagucugucg

SEQ ID NO: 3820090 - RNA, 20 nt, Human
auucuuucccagucugucga

SEQ ID NO: 3820091 - RNA, 15 nt, Human
auucuuucccaguga

SEQ ID NO: 3820092 - RNA, 13 nt, Human
auucuuuccugag

SEQ ID NO: 3820093 - RNA, 15 nt, Human
auucuuucugauaac

SEQ ID NO: 3820094 - RNA, 15 nt, Human
auucuuucuguauug

SEQ ID NO: 3820095 - RNA, 13 nt, Human
auucuuugauguu

SEQ ID NO: 3820096 - RNA, 14 nt, Human
auucuuugauguua

SEQ ID NO: 3820097 - RNA, 16 nt, Human
auucuuugauguuaac

SEQ ID NO: 3820098 - RNA, 23 nt, Human
auucuuugcuugaacacaguauu

SEQ ID NO: 3820099 - RNA, 22 nt, Human
auucuuuuaaaagacaagacuu

SEQ ID NO: 3820100 - RNA, 18 nt, Human
auucuuuucugaaguugu

SEQ ID NO: 3820101 - RNA, 13 nt, Human
auucuuuuguaau

SEQ ID NO: 3820102 - RNA, 16 nt, Human
auucuuuuguaauuua

SEQ ID NO: 3820103 - RNA, 16 nt, Human
auucuuuuucuuuuuu

SEQ ID NO: 3820104 - RNA, 22 nt, Human
auucuuuuuuauuaaucacugu

SEQ ID NO: 3820105 - RNA, 18 nt, Human
auucuuuuuuucucuaga

SEQ ID NO: 3820106 - RNA, 13 nt, Human
auugaaaaaaaua

SEQ ID NO: 3820107 - RNA, 14 nt, Human
auugaaaaaaauug

SEQ ID NO: 3820108 - RNA, 20 nt, Human
auugaaaagaaguagugucu

SEQ ID NO: 3820109 - RNA, 15 nt, Human
auugaaaaggaagau

SEQ ID NO: 3820110 - RNA, 20 nt, Human
auugaaaaguuuuuguuugg

SEQ ID NO: 3820111 - RNA, 15 nt, Human
auugaaaaucuugug

SEQ ID NO: 3820112 - RNA, 20 nt, Human
auugaaaauguaaguaaaug

SEQ ID NO: 3820113 - RNA, 12 nt, Human
auugaaacacuu

SEQ ID NO: 3820114 - RNA, 13 nt, Human
auugaaagaaugu

SEQ ID NO: 3820115 - RNA, 17 nt, Human
auugaaaucuaggaaaa

SEQ ID NO: 3820116 - RNA, 16 nt, Human
auugaaauuguacaua

SEQ ID NO: 3820117 - RNA, 16 nt, Human
auugaaauuuauacac

SEQ ID NO: 3820118 - RNA, 15 nt, Human
auugaacucuuugaa

SEQ ID NO: 3820119 - RNA, 19 nt, Human
auugaacuuacuguagccu

SEQ ID NO: 3820120 - RNA, 14 nt, Human
auugaacuuuugua

SEQ ID NO: 3820121 - RNA, 19 nt, Human
auugaacuuuuguacugaa

SEQ ID NO: 3820122 - RNA, 20 nt, Human
auugaacuuuuguacugaau

SEQ ID NO: 3820123 - RNA, 23 nt, Human
auugaacuuuuguacugaauuuu

SEQ ID NO: 3820124 - RNA, 17 nt, Human
auugaagaaacagauac

SEQ ID NO: 3820125 - RNA, 22 nt, Human
auugaagacaauuugauacaua

SEQ ID NO: 3820126 - RNA, 13 nt, Human
auugaagcagagu

SEQ ID NO: 3820127 - RNA, 15 nt, Human
auugaagcagagugg

SEQ ID NO: 3820128 - RNA, 17 nt, Human
auugaaggaagccaaau

SEQ ID NO: 3820129 - RNA, 21 nt, Human
auugaaggaagccaaauuuau

SEQ ID NO: 3820130 - RNA, 17 nt, Human
auugaaggaugcugucu

SEQ ID NO: 3820131 - RNA, 12 nt, Human
auugaaggccug

SEQ ID NO: 3820132 - RNA, 20 nt, Human
auugaaggugauaagggaaa

SEQ ID NO: 3820133 - RNA, 17 nt, Human
auugaagguuuuugaua

SEQ ID NO: 3820134 - RNA, 18 nt, Human
auugaagguuuuugauag

SEQ ID NO: 3820135 - RNA, 20 nt, Human
auugaagguuuuugauagca

SEQ ID NO: 3820136 - RNA, 15 nt, Human
auugaaguaaaaugu

SEQ ID NO: 3820137 - RNA, 20 nt, Human
auugaagucaauuacucuau

SEQ ID NO: 3820138 - RNA, 16 nt, Human
auugaagucagaugug

SEQ ID NO: 3820139 - RNA, 22 nt, Human
auugaaguguauaauauaaaaa

SEQ ID NO: 3820140 - RNA, 20 nt, Human
auugaaguuucaaguuuuaa

SEQ ID NO: 3820141 - RNA, 15 nt, Human
auugaauacuuacau

SEQ ID NO: 3820142 - RNA, 14 nt, Human
auugaauacuuuga

SEQ ID NO: 3820143 - RNA, 20 nt, Human
auugaaucaguauaaacaaa

SEQ ID NO: 3820144 - RNA, 13 nt, Human
auugaaucaugua

SEQ ID NO: 3820145 - RNA, 10 nt, Human
auugaaucua

SEQ ID NO: 3820146 - RNA, 14 nt, Human
auugaaucuauuua

SEQ ID NO: 3820147 - RNA, 17 nt, Human
auugaauucauuucacu

SEQ ID NO: 3820148 - RNA, 20 nt, Human
auugaauucuugguugagga

SEQ ID NO: 3820149 - RNA, 22 nt, Human
auugaauucuugguugaggaaa

SEQ ID NO: 3820150 - RNA, 15 nt, Human
auugaauuuaacaau

SEQ ID NO: 3820151 - RNA, 17 nt, Human
auugaauuuuuccuaug

SEQ ID NO: 3820152 - RNA, 13 nt, Human
auugacaaaaugu

SEQ ID NO: 3820153 - RNA, 14 nt, Human
auugacaaaauguu

SEQ ID NO: 3820154 - RNA, 15 nt, Human
auugacaaaauguua

SEQ ID NO: 3820155 - RNA, 19 nt, Human
auugacaaaauguuauuuc

SEQ ID NO: 3820156 - RNA, 15 nt, Human
auugacaaaucugug

SEQ ID NO: 3820157 - RNA, 13 nt, Human
auuuaaaugauuu

SEQ ID NO: 3820158 - RNA, 19 nt, Human
auuuaaauguaaagacaaa

SEQ ID NO: 3820159 - RNA, 24 nt, Human
auuuaaauguguacaauguacaca

SEQ ID NO: 3820160 - RNA, 14 nt, Human
auuuaaauucuuuu

SEQ ID NO: 3820161 - RNA, 17 nt, Human
auuuaaauuuaaagaua

SEQ ID NO: 3820162 - RNA, 18 nt, Human
auuuaaauuuaaagauau

SEQ ID NO: 3820163 - RNA, 17 nt, Human
auuuaaauuuuuuuccu

SEQ ID NO: 3820164 - RNA, 13 nt, Human
auuuaacaagauc

SEQ ID NO: 3820165 - RNA, 21 nt, Human
auuuaacaaugcgaaugguag

SEQ ID NO: 3820166 - RNA, 12 nt, Human
auuuaacagaaa

SEQ ID NO: 3820167 - RNA, 19 nt, Human
auuuaacagaaauguacag

SEQ ID NO: 3820168 - RNA, 14 nt, Human
auuuaacagaaauu

SEQ ID NO: 3820169 - RNA, 17 nt, Human
auuuaacagggagggga

SEQ ID NO: 3820170 - RNA, 22 nt, Human
auuuaacagggucucuagugcu

SEQ ID NO: 3820171 - RNA, 16 nt, Human
auuuaacagucauuua

SEQ ID NO: 3820172 - RNA, 17 nt, Human
auuuaacagucauuuaa

SEQ ID NO: 3820173 - RNA, 18 nt, Human
auuuaacagucauuuaaa

SEQ ID NO: 3820174 - RNA, 18 nt, Human
auuuaaccccccuguaca

SEQ ID NO: 3820175 - RNA, 21 nt, Human
auuuaaccccccuguacacaa

SEQ ID NO: 3820176 - RNA, 23 nt, Human
auuuaacuacccuuaauuacuua

SEQ ID NO: 3820177 - RNA, 13 nt, Human
auuuaacucucuu

SEQ ID NO: 3820178 - RNA, 13 nt, Human
auuuaacugccuu

SEQ ID NO: 3820179 - RNA, 21 nt, Human
auuuaacuuaacauucuguaa

SEQ ID NO: 3820180 - RNA, 13 nt, Human
auuuaacuugagc

SEQ ID NO: 3820181 - RNA, 18 nt, Human
auuuaacuugaggguaau

SEQ ID NO: 3820182 - RNA, 20 nt, Human
auuuaacuugaggguaauaa

SEQ ID NO: 3820183 - RNA, 17 nt, Human
auuuaagaaaauacaau

SEQ ID NO: 3820184 - RNA, 22 nt, Human
auuuaagaauugccagucuuuu

SEQ ID NO: 3820185 - RNA, 15 nt, Human
auuuaagacacugaa

SEQ ID NO: 3820186 - RNA, 15 nt, Human
auuuaagauaguuuu

SEQ ID NO: 3820187 - RNA, 14 nt, Human
auuuaagaugugaa

SEQ ID NO: 3820188 - RNA, 13 nt, Human
auuuaagcaaaua

SEQ ID NO: 3820189 - RNA, 16 nt, Human
auuuaagcaaauacuu

SEQ ID NO: 3820190 - RNA, 15 nt, Human
auuuaagcacaaacu

SEQ ID NO: 3820191 - RNA, 15 nt, Human
auuuaagccucaaau

SEQ ID NO: 3820192 - RNA, 19 nt, Human
auuuaaggagauguaagag

SEQ ID NO: 3820193 - RNA, 12 nt, Human
auuuaagguauu

SEQ ID NO: 3820194 - RNA, 16 nt, Human
auuuaaguaacuuuaa

SEQ ID NO: 3820195 - RNA, 18 nt, Human
auuuaaguauucaagaaa

SEQ ID NO: 3820196 - RNA, 14 nt, Human
auuuaagugcgugu

SEQ ID NO: 3820197 - RNA, 19 nt, Human
auuuaagugcguguguaga

SEQ ID NO: 3820198 - RNA, 20 nt, Human
auuuaagugcguguguagag

SEQ ID NO: 3820199 - RNA, 20 nt, Human
auuuaaguuucaaacuuacu

SEQ ID NO: 3820200 - RNA, 21 nt, Human
auuuaauaaaauaauucuaaa

SEQ ID NO: 3820201 - RNA, 11 nt, Human
auuuaauaaag

SEQ ID NO: 3820202 - RNA, 14 nt, Human
auuuaauaacauua

SEQ ID NO: 3820203 - RNA, 15 nt, Human
auuuaauaacauuac

SEQ ID NO: 3820204 - RNA, 13 nt, Human
auuuaauaauaua

SEQ ID NO: 3820205 - RNA, 15 nt, Human
auuuaauaauauacu

SEQ ID NO: 3820206 - RNA, 15 nt, Human
auuuaauaaucugua

SEQ ID NO: 3820207 - RNA, 18 nt, Human
auuuaauaauuauaugcu

SEQ ID NO: 3820208 - RNA, 19 nt, Human
auuuaauaguguuaaucaa

SEQ ID NO: 3820209 - RNA, 20 nt, Human
auuuaauaguguuaaucaau

SEQ ID NO: 3820210 - RNA, 21 nt, Human
auuuaauaguguuaaucaauu

SEQ ID NO: 3820211 - RNA, 23 nt, Human
auuuaauaguguuaaucaauuua

SEQ ID NO: 3820212 - RNA, 16 nt, Human
auuuaauaugcaaagu

SEQ ID NO: 3820213 - RNA, 21 nt, Human
auuuaauauggauuuguuaca

SEQ ID NO: 3820214 - RNA, 17 nt, Human
auuuaauauuacagaua

SEQ ID NO: 3820215 - RNA, 14 nt, Human
auuuaauauuuacu

SEQ ID NO: 3820216 - RNA, 18 nt, Human
auuuaaucuuuuuuaugu

SEQ ID NO: 3820217 - RNA, 14 nt, Human
auuuaaugaaagac

SEQ ID NO: 3820218 - RNA, 15 nt, Human
auuuaaugaaagacu

SEQ ID NO: 3820219 - RNA, 13 nt, Human
auuuaaugcauua

SEQ ID NO: 3820220 - RNA, 18 nt, Human
auuuaaugcauuaaaccu

SEQ ID NO: 3820221 - RNA, 19 nt, Human
auuuaaugcauuaaaccug

SEQ ID NO: 3820222 - RNA, 22 nt, Human
auuuaauggaaguguauuuauu

SEQ ID NO: 3820223 - RNA, 14 nt, Human
auuuaauguagcca

SEQ ID NO: 3820224 - RNA, 16 nt, Human
auuuaaugugaguuug

SEQ ID NO: 3820225 - RNA, 14 nt, Human
auuuaauguugaac

SEQ ID NO: 3820226 - RNA, 15 nt, Human
auuuaauguugaaca

SEQ ID NO: 3820227 - RNA, 12 nt, Human
auuuaauguuuu

SEQ ID NO: 3820228 - RNA, 14 nt, Human
auuuaauguuuuca

SEQ ID NO: 3820229 - RNA, 18 nt, Human
auuuaauuagugcuaagu

SEQ ID NO: 3820230 - RNA, 13 nt, Human
auuuaauucucuu

SEQ ID NO: 3820231 - RNA, 14 nt, Human
auuuaauuguaaac

SEQ ID NO: 3820232 - RNA, 15 nt, Human
auuuaauuguaaacu

SEQ ID NO: 3820233 - RNA, 13 nt, Human
auuuaauuuccag

SEQ ID NO: 3820234 - RNA, 18 nt, Human
auuuaauuugauaucaca

SEQ ID NO: 3820235 - RNA, 16 nt, Human
auuuaauuuugacacu

SEQ ID NO: 3820236 - RNA, 19 nt, Human
auuuaauuuuuuugagaca

SEQ ID NO: 3820237 - RNA, 16 nt, Human
auuuacaaagugugua

SEQ ID NO: 3820238 - RNA, 19 nt, Human
auuuacaaaguguguauua

SEQ ID NO: 3820239 - RNA, 20 nt, Human
auuuacaaaguguguauuaa

SEQ ID NO: 3820240 - RNA, 16 nt, Human
auuuacaaaugggaaa

SEQ ID NO: 3820241 - RNA, 20 nt, Human
auuuacaacacuuuaauggg

SEQ ID NO: 3820242 - RNA, 19 nt, Human
auuuacaagacaacauugu

SEQ ID NO: 3820243 - RNA, 17 nt, Human
auuuacaauguauuaag

SEQ ID NO: 3820244 - RNA, 16 nt, Human
auuuacaggaacuuca

SEQ ID NO: 3820245 - RNA, 18 nt, Human
auuuacaguccuucaaaa

SEQ ID NO: 3820246 - RNA, 22 nt, Human
auuuacagugaaaauguaagcu

SEQ ID NO: 3820247 - RNA, 23 nt, Human
auuuacagugaaaauguaagcug

SEQ ID NO: 3820248 - RNA, 19 nt, Human
auuuacauguuuuaaagaa

SEQ ID NO: 3820249 - RNA, 15 nt, Human
auuuaccacagcagc

SEQ ID NO: 3820250 - RNA, 21 nt, Human
auuuaccacagcagcugaaca

SEQ ID NO: 3820251 - RNA, 15 nt, Human
auuuaccacuugugu

SEQ ID NO: 3820252 - RNA, 19 nt, Human
auuuaccagggauguagau

SEQ ID NO: 3820253 - RNA, 19 nt, Human
auuuacccaacucuguaca

SEQ ID NO: 3820254 - RNA, 19 nt, Human
auuuacccagaaugucaga

SEQ ID NO: 3820255 - RNA, 18 nt, Human
auuuaccuaagauuacaa

SEQ ID NO: 3820256 - RNA, 11 nt, Human
auuuaccucag

SEQ ID NO: 3820257 - RNA, 14 nt, Human
auuuaccucagccu

SEQ ID NO: 3820258 - RNA, 16 nt, Human
auuuaccucagccugg

SEQ ID NO: 3820259 - RNA, 13 nt, Human
auuuaccugcagg

SEQ ID NO: 3820260 - RNA, 17 nt, Human
auuuacgcuuugauuca

SEQ ID NO: 3820261 - RNA, 17 nt, Human
auuuacggaacucaaau

SEQ ID NO: 3820262 - RNA, 15 nt, Human
auuuacuaaaaugga

SEQ ID NO: 3820263 - RNA, 19 nt, Human
auuuacuaaaauggacugu

SEQ ID NO: 3820264 - RNA, 16 nt, Human
auuuacuaaacauaug

SEQ ID NO: 3820265 - RNA, 21 nt, Human
auuuacuaagccacaagaaau

SEQ ID NO: 3820266 - RNA, 14 nt, Human
auuuacuacaguuu

SEQ ID NO: 3820267 - RNA, 14 nt, Human
auuuacuauauaua

SEQ ID NO: 3820268 - RNA, 13 nt, Human
auuuacugagcuu

SEQ ID NO: 3820269 - RNA, 17 nt, Human
auuuacugcauucuucu

SEQ ID NO: 3820270 - RNA, 21 nt, Human
auuuacugcuagucuuaagaa

SEQ ID NO: 3820271 - RNA, 20 nt, Human
auuuacuggacauaacauuu

SEQ ID NO: 3820272 - RNA, 20 nt, Human
auuuacuucuuauacauuug

SEQ ID NO: 3820273 - RNA, 16 nt, Human
auuuacuuguuuugga

SEQ ID NO: 3820274 - RNA, 23 nt, Human
auuuacuuguuuuggauggcuug

SEQ ID NO: 3820275 - RNA, 15 nt, Human
auuuacuuuaaacua

SEQ ID NO: 3820276 - RNA, 22 nt, Human
auuuagaaaaagaacaugcagu

SEQ ID NO: 3820277 - RNA, 23 nt, Human
auuuagaaaaagaacaugcaguu

SEQ ID NO: 3820278 - RNA, 13 nt, Human
auuuagaaaacuu

SEQ ID NO: 3820279 - RNA, 14 nt, Human
auuuagaaaacuuu

SEQ ID NO: 3820280 - RNA, 22 nt, Human
auuuagaaaauagagcuuuuaa

SEQ ID NO: 3820281 - RNA, 13 nt, Human
auuuagaagccaa

SEQ ID NO: 3820282 - RNA, 21 nt, Human
auuuagaagccaacuaugauu

SEQ ID NO: 3820283 - RNA, 22 nt, Human
auuuagaagccaacuaugauua

SEQ ID NO: 3820284 - RNA, 17 nt, Human
auuuagaauggugauuu

SEQ ID NO: 3820285 - RNA, 16 nt, Human
auuuagacaagagaug

SEQ ID NO: 3820286 - RNA, 19 nt, Human
auuuagaccccauacaagu

SEQ ID NO: 3820287 - RNA, 13 nt, Human
auuuagauaugca

SEQ ID NO: 3820288 - RNA, 17 nt, Human
auuuagaugauaaagag

SEQ ID NO: 3820289 - RNA, 15 nt, Human
auuuagauuguaaac

SEQ ID NO: 3820290 - RNA, 18 nt, Human
auuuagauuguuaaaaua

SEQ ID NO: 3820291 - RNA, 14 nt, Human
auuuagauuugugu

SEQ ID NO: 3820292 - RNA, 16 nt, Human
auuuagccuguccugu

SEQ ID NO: 3820293 - RNA, 22 nt, Human
auuuagccuguccugucaucau

SEQ ID NO: 3820294 - RNA, 21 nt, Human
auuuagcuaaacggauuccaa

SEQ ID NO: 3820295 - RNA, 19 nt, Human
auuuagcuguaucaaacua

SEQ ID NO: 3820296 - RNA, 16 nt, Human
auuuaggaaguugacu

SEQ ID NO: 3820297 - RNA, 14 nt, Human
auuuaggagaagcc

SEQ ID NO: 3820298 - RNA, 17 nt, Human
auuuaggagaagccagg

SEQ ID NO: 3820299 - RNA, 21 nt, Human
auuuaggagugugugacauuc

SEQ ID NO: 3820300 - RNA, 21 nt, Human
auuuagggaaagguaguguau

SEQ ID NO: 3820301 - RNA, 18 nt, Human
auuuagggaacugcuuga

SEQ ID NO: 3820302 - RNA, 11 nt, Human
auuuggagacu

SEQ ID NO: 3820303 - RNA, 14 nt, Human
auuuggagagaaau

SEQ ID NO: 3820304 - RNA, 18 nt, Human
auuuggagagaaauauuu

SEQ ID NO: 3820305 - RNA, 20 nt, Human
auuuggagcacaaaauucaa

SEQ ID NO: 3820306 - RNA, 21 nt, Human
auuuggaguguuccccuucca

SEQ ID NO: 3820307 - RNA, 17 nt, Human
auuuggauaucuguuag

SEQ ID NO: 3820308 - RNA, 19 nt, Human
auuuggauuauucuuucuc

SEQ ID NO: 3820309 - RNA, 18 nt, Human
auuuggauuuaaaagccu

SEQ ID NO: 3820310 - RNA, 19 nt, Human
auuuggcaaugccaucauc

SEQ ID NO: 3820311 - RNA, 14 nt, Human
auuuggcaucccug

SEQ ID NO: 3820312 - RNA, 20 nt, Human
auuuggcaucccugggccuu

SEQ ID NO: 3820313 - RNA, 17 nt, Human
auuuggcuucuguuguc

SEQ ID NO: 3820314 - RNA, 17 nt, Human
auuugggagggaaaagg

SEQ ID NO: 3820315 - RNA, 22 nt, Human
auuugggccugcuccagaccug

SEQ ID NO: 3820316 - RNA, 20 nt, Human
auuugggcugaauguaugua

SEQ ID NO: 3820317 - RNA, 21 nt, Human
auuugggcugaauguauguaa

SEQ ID NO: 3820318 - RNA, 21 nt, Human
auuugggcuuggaccagaucu

SEQ ID NO: 3820319 - RNA, 19 nt, Human
auuuggggacagauucagu

SEQ ID NO: 3820320 - RNA, 22 nt, Human
auuuggggauucagauuucucu

SEQ ID NO: 3820321 - RNA, 14 nt, Human
auuuggguccagga

SEQ ID NO: 3820322 - RNA, 21 nt, Human
auuugguaaauuaguauuuau

SEQ ID NO: 3820323 - RNA, 12 nt, Human
auuugguacuuu

SEQ ID NO: 3820324 - RNA, 23 nt, Human
auuugguacuuuugagugugugu

SEQ ID NO: 3820325 - RNA, 15 nt, Human
auuugguauccuuau

SEQ ID NO: 3820326 - RNA, 14 nt, Human
auuuggucucuauu

SEQ ID NO: 3820327 - RNA, 18 nt, Human
auuuggugguuucagaaa

SEQ ID NO: 3820328 - RNA, 22 nt, Human
auuugguuuggccaucucugga

SEQ ID NO: 3820329 - RNA, 22 nt, Human
auuugguuuucacauuggaaac

SEQ ID NO: 3820330 - RNA, 16 nt, Human
auuugguuuuccugua

SEQ ID NO: 3820331 - RNA, 22 nt, Human
auuuguaaaguugguuggauaa

SEQ ID NO: 3820332 - RNA, 16 nt, Human
auuuguaaaucugcca

SEQ ID NO: 3820333 - RNA, 17 nt, Human
auuuguaaaucugccac

SEQ ID NO: 3820334 - RNA, 18 nt, Human
auuuguaaauuuauguga

SEQ ID NO: 3820335 - RNA, 17 nt, Human
auuuguaaccucagcuc

SEQ ID NO: 3820336 - RNA, 19 nt, Human
auuuguaaccucagcucug

SEQ ID NO: 3820337 - RNA, 16 nt, Human
auuuguaaggcuuguu

SEQ ID NO: 3820338 - RNA, 15 nt, Human
auuuguaaguuucag

SEQ ID NO: 3820339 - RNA, 21 nt, Human
auuuguaaguuucaggugaca

SEQ ID NO: 3820340 - RNA, 14 nt, Human
auuuguaauaaagu

SEQ ID NO: 3820341 - RNA, 19 nt, Human
auuuguaaugucuugagcu

SEQ ID NO: 3820342 - RNA, 20 nt, Human
auuuguaaugucuugagcuc

SEQ ID NO: 3820343 - RNA, 23 nt, Human
auuuguaauuaaaagcaaaucau

SEQ ID NO: 3820344 - RNA, 21 nt, Human
auuuguacagauucuuuauua

SEQ ID NO: 3820345 - RNA, 21 nt, Human
auuuguacauaguuauuuauu

SEQ ID NO: 3820346 - RNA, 19 nt, Human
auuuguacauauguaaaau

SEQ ID NO: 3820347 - RNA, 22 nt, Human
auuuguacuauuuaacugacua

SEQ ID NO: 3820348 - RNA, 18 nt, Human
auuuguacuuucuguuaa

SEQ ID NO: 3820349 - RNA, 19 nt, Human
auuuguacuuucuguuaaa

SEQ ID NO: 3820350 - RNA, 23 nt, Human
auuuguaggaaggucucauucuu

SEQ ID NO: 3820351 - RNA, 14 nt, Human
auuuguaggagaaa

SEQ ID NO: 3820352 - RNA, 19 nt, Human
auuuguaguggaaacauuu

SEQ ID NO: 3820353 - RNA, 18 nt, Human
auuuguauaaaauaauuu

SEQ ID NO: 3820354 - RNA, 16 nt, Human
auuuguauaguugcuu

SEQ ID NO: 3820355 - RNA, 18 nt, Human
auuuguauaguugcuugc

SEQ ID NO: 3820356 - RNA, 21 nt, Human
auuuguauaguugcuugccug

SEQ ID NO: 3820357 - RNA, 16 nt, Human
auuuguauauauacau

SEQ ID NO: 3820358 - RNA, 20 nt, Human
auuuguaucucugaagcaug

SEQ ID NO: 3820359 - RNA, 14 nt, Human
auuuguaucugaag

SEQ ID NO: 3820360 - RNA, 17 nt, Human
auuuguaucugaaggag

SEQ ID NO: 3820361 - RNA, 16 nt, Human
auuuguauguugugaa

SEQ ID NO: 3820362 - RNA, 20 nt, Human
auuuguauuaauuuguaaga

SEQ ID NO: 3820363 - RNA, 17 nt, Human
auuuguauuuauucuuu

SEQ ID NO: 3820364 - RNA, 17 nt, Human
auuuguauuuuguguga

SEQ ID NO: 3820365 - RNA, 15 nt, Human
auuugucaacaaagu

SEQ ID NO: 3820366 - RNA, 14 nt, Human
auuugucaaugaca

SEQ ID NO: 3820367 - RNA, 16 nt, Human
auuugucacugcuuca

SEQ ID NO: 3820368 - RNA, 22 nt, Human
auuugucaguguagaucaacuc

SEQ ID NO: 3820369 - RNA, 15 nt, Human
auuugucauuuugaa

SEQ ID NO: 3820370 - RNA, 16 nt, Human
auuugucauuuugaag

SEQ ID NO: 3820371 - RNA, 21 nt, Human
auuugucauuuugaagcuaau

SEQ ID NO: 3820372 - RNA, 15 nt, Human
auuugucuuucagga

SEQ ID NO: 3820373 - RNA, 23 nt, Human
auuugucuuuuuguuguaaaaca

SEQ ID NO: 3820374 - RNA, 21 nt, Human
auuugugaacucagccaagca

SEQ ID NO: 3820375 - RNA, 21 nt, Human
auuugugaagguggaaauaaa

SEQ ID NO: 3820376 - RNA, 16 nt, Human
auuugugacuaauugu

SEQ ID NO: 3820377 - RNA, 18 nt, Human
auuugugacuaauuguau

SEQ ID NO: 3820378 - RNA, 20 nt, Human
auuugugauacaaugcugug

SEQ ID NO: 3820379 - RNA, 22 nt, Human
auuuguggggagggauuugggg

SEQ ID NO: 3820380 - RNA, 17 nt, Human
auuuguguaauaaagug

SEQ ID NO: 3820381 - RNA, 21 nt, Human
auuuguguaauagaaaacuga

SEQ ID NO: 3820382 - RNA, 21 nt, Human
auuugugucacaaagaauuua

SEQ ID NO: 3820383 - RNA, 16 nt, Human
auuguugagcuauugc

SEQ ID NO: 3820384 - RNA, 21 nt, Human
auuguugaugggcacuugaga

SEQ ID NO: 3820385 - RNA, 20 nt, Human
auuguugcauagguuagaua

SEQ ID NO: 3820386 - RNA, 14 nt, Human
auuguugcucccug

SEQ ID NO: 3820387 - RNA, 18 nt, Human
auuguuggcacauccuau

SEQ ID NO: 3820388 - RNA, 22 nt, Human
auuguuguccgguuuacuuuaa

SEQ ID NO: 3820389 - RNA, 15 nt, Human
auuguuguccuuuuc

SEQ ID NO: 3820390 - RNA, 17 nt, Human
auuguuguccuuuucau

SEQ ID NO: 3820391 - RNA, 18 nt, Human
auuguuguccuuuucaua

SEQ ID NO: 3820392 - RNA, 19 nt, Human
auuguuguucuguuaacug

SEQ ID NO: 3820393 - RNA, 17 nt, Human
auuguuguuuuuuuaau

SEQ ID NO: 3820394 - RNA, 14 nt, Human
auuguuuaaaaugu

SEQ ID NO: 3820395 - RNA, 21 nt, Human
auuguuuaaguguuguaaaua

SEQ ID NO: 3820396 - RNA, 13 nt, Human
auuguuuagauuu

SEQ ID NO: 3820397 - RNA, 16 nt, Human
auuguuuagauuuugu

SEQ ID NO: 3820398 - RNA, 16 nt, Human
auuguuuaguggaaaa

SEQ ID NO: 3820399 - RNA, 21 nt, Human
auuguuuaucuagauguaaau

SEQ ID NO: 3820400 - RNA, 15 nt, Human
auuguuucuauacaa

SEQ ID NO: 3820401 - RNA, 17 nt, Human
auuguuucucaaaucuu

SEQ ID NO: 3820402 - RNA, 21 nt, Human
auuguuucuuuaucaccuggc

SEQ ID NO: 3820403 - RNA, 21 nt, Human
auuguuucuuucaauaucccc

SEQ ID NO: 3820404 - RNA, 12 nt, Human
auuguuugaacc

SEQ ID NO: 3820405 - RNA, 13 nt, Human
auuguuugcuuau

SEQ ID NO: 3820406 - RNA, 21 nt, Human
auuguuuggggaugagaaagg

SEQ ID NO: 3820407 - RNA, 18 nt, Human
auuguuugguaaauguuu

SEQ ID NO: 3820408 - RNA, 20 nt, Human
auuguuugucugucuucaua

SEQ ID NO: 3820409 - RNA, 22 nt, Human
auuguuuuaaaaagaaacaaga

SEQ ID NO: 3820410 - RNA, 23 nt, Human
auuguuuuaaaaagaaacaagau

SEQ ID NO: 3820411 - RNA, 17 nt, Human
auuguuuuaaucugaaa

SEQ ID NO: 3820412 - RNA, 15 nt, Human
auuguuuuagagacu

SEQ ID NO: 3820413 - RNA, 19 nt, Human
auuguuuuaucugaauuuu

SEQ ID NO: 3820414 - RNA, 14 nt, Human
auuguuuugaauau

SEQ ID NO: 3820415 - RNA, 20 nt, Human
auuguuuuucugauauguuu

SEQ ID NO: 3820416 - RNA, 23 nt, Human
auuguuuuuuaucuuuucuacag

SEQ ID NO: 3820417 - RNA, 21 nt, Human
auuuaaaaaaaucacaaaaau

SEQ ID NO: 3820418 - RNA, 15 nt, Human
auuuaaaaaauaacu

SEQ ID NO: 3820419 - RNA, 22 nt, Human
auuuaaaaacaggcagcucaua

SEQ ID NO: 3820420 - RNA, 15 nt, Human
auuuaaaaacuggaa

SEQ ID NO: 3820421 - RNA, 16 nt, Human
auuuaaaaagcccaac

SEQ ID NO: 3820422 - RNA, 19 nt, Human
auuuaaaaagcccaaccuc

SEQ ID NO: 3820423 - RNA, 16 nt, Human
auuuaaaaauaagaaa

SEQ ID NO: 3820424 - RNA, 22 nt, Human
auuuaaaaauaagucaacagua

SEQ ID NO: 3820425 - RNA, 23 nt, Human
auuuaaaaauaagucaacaguaa

SEQ ID NO: 3820426 - RNA, 15 nt, Human
auuuaaaaauagaaa

SEQ ID NO: 3820427 - RNA, 15 nt, Human
auuuaaaaaugucuu

SEQ ID NO: 3820428 - RNA, 18 nt, Human
auuuaaaaaugucuugcu

SEQ ID NO: 3820429 - RNA, 17 nt, Human
auuuaaaacagacacug

SEQ ID NO: 3820430 - RNA, 20 nt, Human
auuuaaaacauuaaaauaua

SEQ ID NO: 3820431 - RNA, 13 nt, Human
auuuaaaacuguu

SEQ ID NO: 3820432 - RNA, 11 nt, Human
auuuaaaacuu

SEQ ID NO: 3820433 - RNA, 15 nt, Human
auuuaaaagacacug

SEQ ID NO: 3820434 - RNA, 13 nt, Human
auuuaaaagauuc

SEQ ID NO: 3820435 - RNA, 23 nt, Human
auuuaaaaggauggcaaguugca

SEQ ID NO: 3820436 - RNA, 16 nt, Human
auuuaaaauaauuaua

SEQ ID NO: 3820437 - RNA, 21 nt, Human
auuuaaaauagcaaaagaaga

SEQ ID NO: 3820438 - RNA, 23 nt, Human
auuuaaaauagcaaaagaagaag

SEQ ID NO: 3820439 - RNA, 13 nt, Human
auuuaaaaugauu

SEQ ID NO: 3820440 - RNA, 12 nt, Human
auuuaaaaugua

SEQ ID NO: 3820441 - RNA, 15 nt, Human
auuuaaaauugugau

SEQ ID NO: 3820442 - RNA, 19 nt, Human
auuuaaaauugugaugugu

SEQ ID NO: 3820443 - RNA, 17 nt, Human
auuuaaacacauuaaag

SEQ ID NO: 3820444 - RNA, 14 nt, Human
auuuaaacagcagu

SEQ ID NO: 3820445 - RNA, 22 nt, Human
auuuagagaugaauuaaauuua

SEQ ID NO: 3820446 - RNA, 16 nt, Human
auuuagagaugcugua

SEQ ID NO: 3820447 - RNA, 17 nt, Human
auuuagauugaaaacuu

SEQ ID NO: 3820448 - RNA, 15 nt, Human
auuuagcauguuguu

SEQ ID NO: 3820449 - RNA, 13 nt, Human
auuuagcauugua

SEQ ID NO: 3820450 - RNA, 19 nt, Human
auuuagcauuguagugcuu

SEQ ID NO: 3820451 - RNA, 20 nt, Human
auuuagcauuguagugcuuu

SEQ ID NO: 3820452 - RNA, 22 nt, Human
auuuagcauuguagugcuuuga

SEQ ID NO: 3820453 - RNA, 14 nt, Human
auuuagccuguccu

SEQ ID NO: 3820454 - RNA, 22 nt, Human
auuuagcuaaacggauuccaaa

SEQ ID NO: 3820455 - RNA, 23 nt, Human
auuuagcuaaacggauuccaaag

SEQ ID NO: 3820456 - RNA, 16 nt, Human
auuuagggaacugcuu

SEQ ID NO: 3820457 - RNA, 15 nt, Human
auuuagggcaaggag

SEQ ID NO: 3820458 - RNA, 20 nt, Human
auuuaggguacuaaauuuaa

SEQ ID NO: 3820459 - RNA, 18 nt, Human
auuuagguuuuuauuagu

SEQ ID NO: 3820460 - RNA, 14 nt, Human
auuuaguaaauguu

SEQ ID NO: 3820461 - RNA, 16 nt, Human
auuuaguauuaucaaa

SEQ ID NO: 3820462 - RNA, 21 nt, Human
auuuaguauugaauacuuaca

SEQ ID NO: 3820463 - RNA, 14 nt, Human
auuuagucauguga

SEQ ID NO: 3820464 - RNA, 21 nt, Human
auuuagucucuuuauuccuag

SEQ ID NO: 3820465 - RNA, 21 nt, Human
auuuagugaucaaauugugca

SEQ ID NO: 3820466 - RNA, 22 nt, Human
auuuaguguuuuuuuauuucua

SEQ ID NO: 3820467 - RNA, 18 nt, Human
auuuaguuguuguagaga

SEQ ID NO: 3820468 - RNA, 23 nt, Human
auuuaguuucaguagauugcaga

SEQ ID NO: 3820469 - RNA, 22 nt, Human
auuuaguuugauuauucagugu

SEQ ID NO: 3820470 - RNA, 20 nt, Human
auuuaguuuuuguaauuuau

SEQ ID NO: 3820471 - RNA, 16 nt, Human
auuuaguuuuuguucu

SEQ ID NO: 3820472 - RNA, 16 nt, Human
auuuauaaaaaggugu

SEQ ID NO: 3820473 - RNA, 14 nt, Human
auuuauaaaacuuc

SEQ ID NO: 3820474 - RNA, 21 nt, Human
auuuauaaaacuucucaagau

SEQ ID NO: 3820475 - RNA, 15 nt, Human
auuuauaaaauuaga

SEQ ID NO: 3820476 - RNA, 21 nt, Human
auuuauaaaauuagaaagcaa

SEQ ID NO: 3820477 - RNA, 17 nt, Human
auuuauaaaugcuauuu

SEQ ID NO: 3820478 - RNA, 14 nt, Human
auuuauaacucauc

SEQ ID NO: 3820479 - RNA, 18 nt, Human
auuuauaacucaucauaa

SEQ ID NO: 3820480 - RNA, 22 nt, Human
auuuauaacucaucauaaaaua

SEQ ID NO: 3820481 - RNA, 23 nt, Human
auuuauaacucaucauaaaauaa

SEQ ID NO: 3820482 - RNA, 19 nt, Human
auuuauaagaaaaauguga

SEQ ID NO: 3820483 - RNA, 14 nt, Human
auuuauaagcagau

SEQ ID NO: 3820484 - RNA, 22 nt, Human
auuuauaagcagauuuaacaau

SEQ ID NO: 3820485 - RNA, 16 nt, Human
auuuauaaggaaauuu

SEQ ID NO: 3820486 - RNA, 16 nt, Human
auuuauaagguuuuaa

SEQ ID NO: 3820487 - RNA, 15 nt, Human
auuuauaaucacuuu

SEQ ID NO: 3820488 - RNA, 16 nt, Human
auuuauaauguuagua

SEQ ID NO: 3820489 - RNA, 17 nt, Human
auuuauaauucaguaug

SEQ ID NO: 3820490 - RNA, 19 nt, Human
auuuauaauucaguauguu

SEQ ID NO: 3820491 - RNA, 14 nt, Human
auuuauaauuccua

SEQ ID NO: 3820492 - RNA, 19 nt, Human
auuuauaauuuuaagauuc

SEQ ID NO: 3820493 - RNA, 18 nt, Human
auuuauacaaauuagaaa

SEQ ID NO: 3820494 - RNA, 13 nt, Human
auuuauacaagau

SEQ ID NO: 3820495 - RNA, 13 nt, Human
auuuauaccucaa

SEQ ID NO: 3820496 - RNA, 18 nt, Human
auuuauaccucaaacuau

SEQ ID NO: 3820497 - RNA, 18 nt, Human
auuuauaguuuauacagu

SEQ ID NO: 3820498 - RNA, 16 nt, Human
auuuauaguuuguaca

SEQ ID NO: 3820499 - RNA, 12 nt, Human
auuuauauaaau

SEQ ID NO: 3820500 - RNA, 18 nt, Human
auuuauauaaauguaaaa

SEQ ID NO: 3820501 - RNA, 14 nt, Human
auuuauauaauuau

SEQ ID NO: 3820502 - RNA, 19 nt, Human
auuuauauacaaccugcuu

SEQ ID NO: 3820503 - RNA, 14 nt, Human
auuuauauaugaaa

SEQ ID NO: 3820504 - RNA, 17 nt, Human
auuuauauaugaaaacu

SEQ ID NO: 3820505 - RNA, 20 nt, Human
auuuauauaugaaaacuaua

SEQ ID NO: 3820506 - RNA, 17 nt, Human
auuuauauauuuauaac

SEQ ID NO: 3820507 - RNA, 18 nt, Human
auuuauauauuuauaacu

SEQ ID NO: 3820508 - RNA, 11 nt, Human
auuuauaugaa

SEQ ID NO: 3820509 - RNA, 20 nt, Human
auuuauauggggaauauauu

SEQ ID NO: 3820510 - RNA, 15 nt, Human
auuuauauguacaug

SEQ ID NO: 3820511 - RNA, 22 nt, Human
auuuauauguauccaguacauu

SEQ ID NO: 3820512 - RNA, 14 nt, Human
auuuauauguaugu

SEQ ID NO: 3820513 - RNA, 17 nt, Human
auuuauauguauguguu

SEQ ID NO: 3820514 - RNA, 18 nt, Human
auuuauauguauguguuu

SEQ ID NO: 3820515 - RNA, 21 nt, Human
auuuauauugauaagaucuuu

SEQ ID NO: 3820516 - RNA, 15 nt, Human
auuuauauuuauuga

SEQ ID NO: 3820517 - RNA, 19 nt, Human
auuuauauuuuuaaaauau

SEQ ID NO: 3820518 - RNA, 14 nt, Human
auuuaucaaagcau

SEQ ID NO: 3820519 - RNA, 17 nt, Human
auuuaucaaaucaguca

SEQ ID NO: 3820520 - RNA, 19 nt, Human
auuuaucacacaaagcaga

SEQ ID NO: 3820521 - RNA, 15 nt, Human
auuuaucagauugcu

SEQ ID NO: 3820522 - RNA, 17 nt, Human
auuuaucagugacagag

SEQ ID NO: 3820523 - RNA, 17 nt, Human
auuuauccaaaaugugu

SEQ ID NO: 3820524 - RNA, 18 nt, Human
auuuauccaaaaugugua

SEQ ID NO: 3820525 - RNA, 19 nt, Human
auuuauccaaaauguguau

SEQ ID NO: 3820526 - RNA, 21 nt, Human
auuuauccacaggaaaguguu

SEQ ID NO: 3820527 - RNA, 20 nt, Human
auuuauccagaaaacuguga

SEQ ID NO: 3820528 - RNA, 16 nt, Human
auuuauccauuuguaa

SEQ ID NO: 3820529 - RNA, 16 nt, Human
auuuauccucuguuga

SEQ ID NO: 3820530 - RNA, 18 nt, Human
auuuauccugaaauuuca

SEQ ID NO: 3820531 - RNA, 19 nt, Human
auuuauccugaaauuucag

SEQ ID NO: 3820532 - RNA, 17 nt, Human
auuuaucgcagaccuuu

SEQ ID NO: 3820533 - RNA, 19 nt, Human
auuuaucgcugggaaauga

SEQ ID NO: 3820534 - RNA, 21 nt, Human
auuuaucgcugggaaaugaga

SEQ ID NO: 3820535 - RNA, 15 nt, Human
auuuaucuaaauaug

SEQ ID NO: 3820536 - RNA, 18 nt, Human
auuuaucuauuguaagau

SEQ ID NO: 3820537 - RNA, 14 nt, Human
auuuaucucuauuu

SEQ ID NO: 3820538 - RNA, 16 nt, Human
auuuaucucuauuuaa

SEQ ID NO: 3820539 - RNA, 19 nt, Human
auuuaucucuauuuaauau

SEQ ID NO: 3820540 - RNA, 22 nt, Human
auuuaucucuauuuaauauuua

SEQ ID NO: 3820541 - RNA, 16 nt, Human
auuuaucugugcaaau

SEQ ID NO: 3820542 - RNA, 12 nt, Human
auuuaucuugaa

SEQ ID NO: 3820543 - RNA, 23 nt, Human
auuuaucuugaaggaaaaauuca

SEQ ID NO: 3820544 - RNA, 16 nt, Human
auuuaucuuugauaac

SEQ ID NO: 3820545 - RNA, 21 nt, Human
auuuaugaaaguauuaaaaug

SEQ ID NO: 3820546 - RNA, 21 nt, Human
auuuuacuuuaaaaggagcca

SEQ ID NO: 3820547 - RNA, 17 nt, Human
auuuuacuuuuuccugg

SEQ ID NO: 3820548 - RNA, 13 nt, Human
auuuuagaaauau

SEQ ID NO: 3820549 - RNA, 19 nt, Human
auuuuagaagacucuacca

SEQ ID NO: 3820550 - RNA, 21 nt, Human
auuuuagcaguucugcaaaua

SEQ ID NO: 3820551 - RNA, 18 nt, Human
auuuuagccuucucuguu

SEQ ID NO: 3820552 - RNA, 21 nt, Human
auuuuagccuucucuguucau

SEQ ID NO: 3820553 - RNA, 19 nt, Human
auuuuagcuaggauuugaa

SEQ ID NO: 3820554 - RNA, 16 nt, Human
auuuuaggaaaugaau

SEQ ID NO: 3820555 - RNA, 18 nt, Human
auuuuaggaacuucagag

SEQ ID NO: 3820556 - RNA, 15 nt, Human
auuuuaggcaaguuu

SEQ ID NO: 3820557 - RNA, 17 nt, Human
auuuuaggcagggauuu

SEQ ID NO: 3820558 - RNA, 21 nt, Human
auuuuaggcagggauuugagg

SEQ ID NO: 3820559 - RNA, 22 nt, Human
auuuuaguauauuuauauaauu

SEQ ID NO: 3820560 - RNA, 15 nt, Human
auuuuagucacuuuu

SEQ ID NO: 3820561 - RNA, 20 nt, Human
auuuuaguggacccugaaau

SEQ ID NO: 3820562 - RNA, 21 nt, Human
auuuuaguggacccugaaaug

SEQ ID NO: 3820563 - RNA, 22 nt, Human
auuuuaguggacccugaaaugu

SEQ ID NO: 3820564 - RNA, 23 nt, Human
auuuuaguggacccugaaaugug

SEQ ID NO: 3820565 - RNA, 14 nt, Human
auuuuaguuucugu

SEQ ID NO: 3820566 - RNA, 22 nt, Human
auuuuaguuuugugcuuaguua

SEQ ID NO: 3820567 - RNA, 13 nt, Human
auuuuauaaaauu

SEQ ID NO: 3820568 - RNA, 17 nt, Human
auuuuauaaaucgcuuu

SEQ ID NO: 3820569 - RNA, 23 nt, Human
auuuuauaaaucgcuuuugauaa

SEQ ID NO: 3820570 - RNA, 14 nt, Human
auuuuauaauucug

SEQ ID NO: 3820571 - RNA, 19 nt, Human
auuuuauagcucaguuuau

SEQ ID NO: 3820572 - RNA, 22 nt, Human
auuuuauagcucaguuuaucca

SEQ ID NO: 3820573 - RNA, 19 nt, Human
auuuuauaggaaaaaauaa

SEQ ID NO: 3820574 - RNA, 15 nt, Human
auuuuauauaaagua

SEQ ID NO: 3820575 - RNA, 19 nt, Human
auuuuauauaauaaaguau

SEQ ID NO: 3820576 - RNA, 22 nt, Human
auuuuauauaauaaaguauucc

SEQ ID NO: 3820577 - RNA, 16 nt, Human
auuuuauaucuuguag

SEQ ID NO: 3820578 - RNA, 20 nt, Human
auuuuauauuagaaguguua

SEQ ID NO: 3820579 - RNA, 22 nt, Human
auuuuauauugaaaaaaauaau

SEQ ID NO: 3820580 - RNA, 20 nt, Human
auuuuaucccucaccuguag

SEQ ID NO: 3820581 - RNA, 15 nt, Human
auuuuaucucuuauu

SEQ ID NO: 3820582 - RNA, 22 nt, Human
auuuuaucuuugauucuccuuc

SEQ ID NO: 3820583 - RNA, 20 nt, Human
auuuuaugagaaauguaaug

SEQ ID NO: 3820584 - RNA, 18 nt, Human
auuuuaugaucaguguug

SEQ ID NO: 3820585 - RNA, 16 nt, Human
auuuuaugcaaauauu

SEQ ID NO: 3820586 - RNA, 20 nt, Human
auuuuaugccuuuuauuucu

SEQ ID NO: 3820587 - RNA, 14 nt, Human
auuuuaugguuaug

SEQ ID NO: 3820588 - RNA, 20 nt, Human
auauaauuuuuuagagagcu

SEQ ID NO: 3820589 - RNA, 23 nt, Human
auauaauuuuuuuauguuuuguu

SEQ ID NO: 3820590 - RNA, 21 nt, Human
auauacaaccugcuugggugg

SEQ ID NO: 3820591 - RNA, 18 nt, Human
auauacaauaacauaauu

SEQ ID NO: 3820592 - RNA, 13 nt, Human
auauacaauaaug

SEQ ID NO: 3820593 - RNA, 16 nt, Human
auauacaauaauggaa

SEQ ID NO: 3820594 - RNA, 17 nt, Human
auauacaauaauggaaa

SEQ ID NO: 3820595 - RNA, 21 nt, Human
auauacacacacaaagagagu

SEQ ID NO: 3820596 - RNA, 15 nt, Human
auauacacacacaca

SEQ ID NO: 3820597 - RNA, 21 nt, Human
auauacacgaauagacaucaa

SEQ ID NO: 3820598 - RNA, 13 nt, Human
auauacagaugaa

SEQ ID NO: 3820599 - RNA, 16 nt, Human
auauacagaugaaaau

SEQ ID NO: 3820600 - RNA, 22 nt, Human
auauacaguaacuuuaugugua

SEQ ID NO: 3820601 - RNA, 17 nt, Human
auauacaguauagauuu

SEQ ID NO: 3820602 - RNA, 12 nt, Human
auauacauacac

SEQ ID NO: 3820603 - RNA, 14 nt, Human
auauacauauguag

SEQ ID NO: 3820604 - RNA, 22 nt, Human
auauacauguguguauauaugu

SEQ ID NO: 3820605 - RNA, 23 nt, Human
auauacauguguguauauaugug

SEQ ID NO: 3820606 - RNA, 18 nt, Human
auauacauucaaacuuaa

SEQ ID NO: 3820607 - RNA, 12 nt, Human
auauaccaaagc

SEQ ID NO: 3820608 - RNA, 19 nt, Human
auauaccaaauuaaaaaaa

SEQ ID NO: 3820609 - RNA, 14 nt, Human
auauaccauuuauc

SEQ ID NO: 3820610 - RNA, 14 nt, Human
auauaccuauaaug

SEQ ID NO: 3820611 - RNA, 22 nt, Human
auauacuauuaaaaagguuuac

SEQ ID NO: 3820612 - RNA, 15 nt, Human
auauacucauuagaa

SEQ ID NO: 3820613 - RNA, 18 nt, Human
auauacuguaaagaaaga

SEQ ID NO: 3820614 - RNA, 22 nt, Human
auauacuguaaagaaagagaga

SEQ ID NO: 3820615 - RNA, 13 nt, Human
auauacugugugc

SEQ ID NO: 3820616 - RNA, 19 nt, Human
auauacuuguuguuuaaug

SEQ ID NO: 3820617 - RNA, 18 nt, Human
auauacuuguuuuuguaa

SEQ ID NO: 3820618 - RNA, 20 nt, Human
auauacuuguuuuuguaaag

SEQ ID NO: 3820619 - RNA, 21 nt, Human
auauacuuguuuuuguaaaga

SEQ ID NO: 3820620 - RNA, 21 nt, Human
auauacuuuguggaccaauua

SEQ ID NO: 3820621 - RNA, 20 nt, Human
auauacuuuuuuuucuuuaa

SEQ ID NO: 3820622 - RNA, 14 nt, Human
auauagaaauauau

SEQ ID NO: 3820623 - RNA, 15 nt, Human
auauagaaugcugca

SEQ ID NO: 3820624 - RNA, 20 nt, Human
auauagacaguccuuaaaaa

SEQ ID NO: 3820625 - RNA, 14 nt, Human
auauagaucacaua

SEQ ID NO: 3820626 - RNA, 15 nt, Human
auauagauuagaaaa

SEQ ID NO: 3820627 - RNA, 21 nt, Human
auauagcaaaacuuuuaaacu

SEQ ID NO: 3820628 - RNA, 17 nt, Human
auauagcagcaaaaaua

SEQ ID NO: 3820629 - RNA, 21 nt, Human
auauagcguucccaacaacau

SEQ ID NO: 3820630 - RNA, 16 nt, Human
auauagcuggcaagaa

SEQ ID NO: 3820631 - RNA, 15 nt, Human
auauaggaauuaaga

SEQ ID NO: 3820632 - RNA, 14 nt, Human
auauaggacauuga

SEQ ID NO: 3820633 - RNA, 13 nt, Human
auauaggcuauuu

SEQ ID NO: 3820634 - RNA, 18 nt, Human
auauaggugauguuugcu

SEQ ID NO: 3820635 - RNA, 17 nt, Human
auauaguaccuuugcuc

SEQ ID NO: 3820636 - RNA, 22 nt, Human
auauaguuagcuaauaaaaagc

SEQ ID NO: 3820637 - RNA, 13 nt, Human
auauaguuuuacu

SEQ ID NO: 3820638 - RNA, 15 nt, Human
auauauaaaaauaua

SEQ ID NO: 3820639 - RNA, 17 nt, Human
auauauaaaacggugcu

SEQ ID NO: 3820640 - RNA, 13 nt, Human
auauauaaaauaa

SEQ ID NO: 3820641 - RNA, 16 nt, Human
auauauaaaauaaaua

SEQ ID NO: 3820642 - RNA, 16 nt, Human
auauauaaagaauaua

SEQ ID NO: 3820643 - RNA, 13 nt, Human
auauauaaaguau

SEQ ID NO: 3820644 - RNA, 10 nt, Human
auauauaaau

SEQ ID NO: 3820645 - RNA, 12 nt, Human
auauauaaaugu

SEQ ID NO: 3820646 - RNA, 13 nt, Human
auauauaaaugua

SEQ ID NO: 3820647 - RNA, 18 nt, Human
auauauaacaaugcugua

SEQ ID NO: 3820648 - RNA, 17 nt, Human
auauauaacagauacau

SEQ ID NO: 3820649 - RNA, 18 nt, Human
auauauaacagauacauu

SEQ ID NO: 3820650 - RNA, 22 nt, Human
auauauaagaaagacaucuuuc

SEQ ID NO: 3820651 - RNA, 22 nt, Human
auauauaagauggaagcuucca

SEQ ID NO: 3820652 - RNA, 17 nt, Human
auauauaauguugccag

SEQ ID NO: 3820653 - RNA, 15 nt, Human
auauauaauucugua

SEQ ID NO: 3820654 - RNA, 14 nt, Human
auauauacacacac

SEQ ID NO: 3820655 - RNA, 21 nt, Human
auauauacacacacaaagaga

SEQ ID NO: 3820656 - RNA, 18 nt, Human
auauauacaguaacuuua

SEQ ID NO: 3820657 - RNA, 20 nt, Human
auauauacaguaacuuuaug

SEQ ID NO: 3820658 - RNA, 11 nt, Human
auauauacaua

SEQ ID NO: 3820659 - RNA, 16 nt, Human
auauauacauacacuu

SEQ ID NO: 3820660 - RNA, 22 nt, Human
auauauacauagcaugacauuu

SEQ ID NO: 3820661 - RNA, 12 nt, Human
auauauacuugu

SEQ ID NO: 3820662 - RNA, 13 nt, Human
auauauagaaucu

SEQ ID NO: 3820663 - RNA, 16 nt, Human
auauauagcauuuaug

SEQ ID NO: 3820664 - RNA, 12 nt, Human
auauauauaaac

SEQ ID NO: 3820665 - RNA, 13 nt, Human
auauauauaaacc

SEQ ID NO: 3820666 - RNA, 12 nt, Human
auauauauaaau

SEQ ID NO: 3820667 - RNA, 16 nt, Human
auauauauaaauguau

SEQ ID NO: 3820668 - RNA, 11 nt, Human
auauauauaau

SEQ ID NO: 3820669 - RNA, 14 nt, Human
auauauauacauau

SEQ ID NO: 3820670 - RNA, 16 nt, Human
auauauauacauaugu

SEQ ID NO: 3820671 - RNA, 11 nt, Human
auauauauaua

SEQ ID NO: 3820672 - RNA, 13 nt, Human
auauauauauaaa

SEQ ID NO: 3820673 - RNA, 15 nt, Human
auauauauauauaca

SEQ ID NO: 3820674 - RNA, 16 nt, Human
auauauauaucaguuu

SEQ ID NO: 3820675 - RNA, 16 nt, Human
auauauauaucuguau

SEQ ID NO: 3820676 - RNA, 15 nt, Human
auauauauauguaca

SEQ ID NO: 3820677 - RNA, 15 nt, Human
auauauaucaguuug

SEQ ID NO: 3820678 - RNA, 21 nt, Human
auauauaucuauauauauaau

SEQ ID NO: 3820679 - RNA, 21 nt, Human
auauauaucuaucuauuugag

SEQ ID NO: 3820680 - RNA, 16 nt, Human
auauauaugccaugau

SEQ ID NO: 3820681 - RNA, 15 nt, Human
auauauauguacagu

SEQ ID NO: 3820682 - RNA, 12 nt, Human
auauauauuaua

SEQ ID NO: 3820683 - RNA, 17 nt, Human
auauauauuauaaauau

SEQ ID NO: 3820684 - RNA, 20 nt, Human
auauauauuaucuuuucaua

SEQ ID NO: 3820685 - RNA, 21 nt, Human
auauauauuuuuuucugaaau

SEQ ID NO: 3820686 - RNA, 21 nt, Human
auauaucacccagacauaaag

SEQ ID NO: 3820687 - RNA, 18 nt, Human
auauauccacacauuugu

SEQ ID NO: 3820688 - RNA, 20 nt, Human
auauaucccugauaaauauu

SEQ ID NO: 3820689 - RNA, 22 nt, Human
auauaucccugauaaauauuca

SEQ ID NO: 3820690 - RNA, 21 nt, Human
auauauccuuuucuucuaugu

SEQ ID NO: 3820691 - RNA, 21 nt, Human
auauaucguucauuguaaaaa

SEQ ID NO: 3820692 - RNA, 19 nt, Human
auauaucuaaauugaauaa

SEQ ID NO: 3820693 - RNA, 20 nt, Human
auauaucuaucuauuugagg

SEQ ID NO: 3820694 - RNA, 16 nt, Human
auauaucucaaauugu

SEQ ID NO: 3820695 - RNA, 17 nt, Human
auauaucucuauuugag

SEQ ID NO: 3820696 - RNA, 19 nt, Human
auauaucugcuguccagac

SEQ ID NO: 3820697 - RNA, 19 nt, Human
auauaugaaaacuaaguuc

SEQ ID NO: 3820698 - RNA, 17 nt, Human
auauaugaaaacuauac

SEQ ID NO: 3820699 - RNA, 20 nt, Human
auauaugaaaacuauacaac

SEQ ID NO: 3820700 - RNA, 12 nt, Human
auauaugaauaa

SEQ ID NO: 3820701 - RNA, 15 nt, Human
auuuaugaagaaaau

SEQ ID NO: 3820702 - RNA, 19 nt, Human
auuuaugaagaaaauacuu

SEQ ID NO: 3820703 - RNA, 13 nt, Human
auuuaugaaguuu

SEQ ID NO: 3820704 - RNA, 14 nt, Human
auuuaugaauauaa

SEQ ID NO: 3820705 - RNA, 17 nt, Human
auuuaugagcucuucau

SEQ ID NO: 3820706 - RNA, 15 nt, Human
auuuaugauuuaaua

SEQ ID NO: 3820707 - RNA, 17 nt, Human
auuuaugcacauucacg

SEQ ID NO: 3820708 - RNA, 20 nt, Human
auuuaugccucuguauuuaa

SEQ ID NO: 3820709 - RNA, 21 nt, Human
auuuaugccuugaugauuuaa

SEQ ID NO: 3820710 - RNA, 12 nt, Human
auuuauggagga

SEQ ID NO: 3820711 - RNA, 13 nt, Human
auuuaugggcccc

SEQ ID NO: 3820712 - RNA, 18 nt, Human
auuuaugggccccuggca

SEQ ID NO: 3820713 - RNA, 15 nt, Human
auuuaugguuguuaa

SEQ ID NO: 3820714 - RNA, 23 nt, Human
auuuaugguuguuaaaaauguca

SEQ ID NO: 3820715 - RNA, 12 nt, Human
auuuauguaaac

SEQ ID NO: 3820716 - RNA, 18 nt, Human
auuuauguaaugaaguaa

SEQ ID NO: 3820717 - RNA, 19 nt, Human
auuuauguaaugaaguaaa

SEQ ID NO: 3820718 - RNA, 20 nt, Human
auuuauguagaugugcauuu

SEQ ID NO: 3820719 - RNA, 14 nt, Human
auuuauguauugug

SEQ ID NO: 3820720 - RNA, 18 nt, Human
auuuauguauugugcaau

SEQ ID NO: 3820721 - RNA, 16 nt, Human
auuuauguguauaugg

SEQ ID NO: 3820722 - RNA, 19 nt, Human
auuuaugugugaggagcug

SEQ ID NO: 3820723 - RNA, 22 nt, Human
auuuauguuugcacuugugauu

SEQ ID NO: 3820724 - RNA, 19 nt, Human
auuuauuaaaaugauugua

SEQ ID NO: 3820725 - RNA, 22 nt, Human
auuuauuaaacagauuuuuaca

SEQ ID NO: 3820726 - RNA, 15 nt, Human
auuuauuaaagaaaa

SEQ ID NO: 3820727 - RNA, 20 nt, Human
auuuauuaaagaaaaaaaug

SEQ ID NO: 3820728 - RNA, 22 nt, Human
auuuauuaaagaaaaaaaugua

SEQ ID NO: 3820729 - RNA, 13 nt, Human
auuuauuaaauaa

SEQ ID NO: 3820730 - RNA, 16 nt, Human
auuuauuaaauaaaau

SEQ ID NO: 3820731 - RNA, 22 nt, Human
auuuauuaaaugcccagccccu

SEQ ID NO: 3820732 - RNA, 14 nt, Human
auuuauuaaauuuu

SEQ ID NO: 3820733 - RNA, 24 nt, Human
auuuauuaaauuuuuuuguaugaa

SEQ ID NO: 3820734 - RNA, 14 nt, Human
auuuuaaaaaugaa

SEQ ID NO: 3820735 - RNA, 17 nt, Human
auuuuaaaaaugaaauu

SEQ ID NO: 3820736 - RNA, 22 nt, Human
auuuuaaaagaaugauuaugaa

SEQ ID NO: 3820737 - RNA, 19 nt, Human
auuuuaaaauaaauuaguu

SEQ ID NO: 3820738 - RNA, 18 nt, Human
auuuuaaaauagcguucu

SEQ ID NO: 3820739 - RNA, 22 nt, Human
auuuuaaaauagcguucuugua

SEQ ID NO: 3820740 - RNA, 13 nt, Human
auuuuaaaaucag

SEQ ID NO: 3820741 - RNA, 13 nt, Human
auuuuaaaauuug

SEQ ID NO: 3820742 - RNA, 14 nt, Human
auuuuaaaauuugu

SEQ ID NO: 3820743 - RNA, 17 nt, Human
auuuuaaaauuuuaucu

SEQ ID NO: 3820744 - RNA, 18 nt, Human
auuuuaaaauuuuaucuc

SEQ ID NO: 3820745 - RNA, 22 nt, Human
auuuuaaacaaagguugagaug

SEQ ID NO: 3820746 - RNA, 23 nt, Human
auuuuaaacacauuaggaaaagu

SEQ ID NO: 3820747 - RNA, 21 nt, Human
auuuuaaacauauccaaguuu

SEQ ID NO: 3820748 - RNA, 21 nt, Human
auuuuaaaccauaaaaagcug

SEQ ID NO: 3820749 - RNA, 17 nt, Human
auuuuaaacuagaugac

SEQ ID NO: 3820750 - RNA, 13 nt, Human
auuuuaaagaauu

SEQ ID NO: 3820751 - RNA, 14 nt, Human
auuuuaaagacaug

SEQ ID NO: 3820752 - RNA, 17 nt, Human
auuuuaaaguaugcauu

SEQ ID NO: 3820753 - RNA, 13 nt, Human
auuuuaaaguuag

SEQ ID NO: 3820754 - RNA, 21 nt, Human
auuuuaaaguuaguaucuuuu

SEQ ID NO: 3820755 - RNA, 20 nt, Human
auuuuaaauaaaagugauca

SEQ ID NO: 3820756 - RNA, 23 nt, Human
caaacccccuccuuacgcuuugu

SEQ ID NO: 3820757 - RNA, 15 nt, Human
caaacccuagccuug

SEQ ID NO: 3820758 - RNA, 18 nt, Human
caaacccuagccuugcuu

SEQ ID NO: 3820759 - RNA, 21 nt, Human
caaacccuagguucccggucc

SEQ ID NO: 3820760 - RNA, 13 nt, Human
caaacccugucaa

SEQ ID NO: 3820761 - RNA, 20 nt, Human
caaacccuucagugccaaaa

SEQ ID NO: 3820762 - RNA, 17 nt, Human
caaaccuaccaaaaugg

SEQ ID NO: 3820763 - RNA, 12 nt, Human
caaaccucuguu

SEQ ID NO: 3820764 - RNA, 13 nt, Human
caaaccucuguuc

SEQ ID NO: 3820765 - RNA, 19 nt, Human
caaaccucuguucagugua

SEQ ID NO: 3820766 - RNA, 19 nt, Human
caaaccugcaagggcuccc

SEQ ID NO: 3820767 - RNA, 21 nt, Human
caaaccugcaagggcucccca

SEQ ID NO: 3820768 - RNA, 13 nt, Human
caaaccugcccca

SEQ ID NO: 3820769 - RNA, 16 nt, Human
caaaccugccccaucc

SEQ ID NO: 3820770 - RNA, 12 nt, Human
caaaccuggaga

SEQ ID NO: 3820771 - RNA, 21 nt, Human
caaaccuguuuaaauauuuca

SEQ ID NO: 3820772 - RNA, 15 nt, Human
caaaccuuaucucca

SEQ ID NO: 3820773 - RNA, 12 nt, Human
caaaccuucaca

SEQ ID NO: 3820774 - RNA, 19 nt, Human
caaaccuuucuauaauuuu

SEQ ID NO: 3820775 - RNA, 17 nt, Human
caaacgccuagauugcu

SEQ ID NO: 3820776 - RNA, 17 nt, Human
caaacgccuccccugcc

SEQ ID NO: 3820777 - RNA, 15 nt, Human
caaacgcugccugcc

SEQ ID NO: 3820778 - RNA, 18 nt, Human
caaacgcugccugcccac

SEQ ID NO: 3820779 - RNA, 16 nt, Human
caaacuaaaggugcac

SEQ ID NO: 3820780 - RNA, 20 nt, Human
caaacuaaggugcuaaaucu

SEQ ID NO: 3820781 - RNA, 21 nt, Human
caaacuacugaaugaagcagu

SEQ ID NO: 3820782 - RNA, 20 nt, Human
caaacuacuuugcugcuaau

SEQ ID NO: 3820783 - RNA, 20 nt, Human
caaacuaggggacaaagcaa

SEQ ID NO: 3820784 - RNA, 18 nt, Human
caaacuauuucuuauaua

SEQ ID NO: 3820785 - RNA, 19 nt, Human
caaacuccugaccucaggc

SEQ ID NO: 3820786 - RNA, 18 nt, Human
caaacucuaucggagaac

SEQ ID NO: 3820787 - RNA, 16 nt, Human
caaacucugccagcca

SEQ ID NO: 3820788 - RNA, 15 nt, Human
caaacucuuaaaacc

SEQ ID NO: 3820789 - RNA, 20 nt, Human
caaacucuugaccucaggug

SEQ ID NO: 3820790 - RNA, 19 nt, Human
caaacucuuuggucguuuu

SEQ ID NO: 3820791 - RNA, 15 nt, Human
caaacugaagccaga

SEQ ID NO: 3820792 - RNA, 17 nt, Human
caaacugacucaacagu

SEQ ID NO: 3820793 - RNA, 17 nt, Human
caaacugaggaauuuca

SEQ ID NO: 3820794 - RNA, 22 nt, Human
caaacugaggaauuucaccugu

SEQ ID NO: 3820795 - RNA, 18 nt, Human
caaacugcacaugauuuc

SEQ ID NO: 3820796 - RNA, 21 nt, Human
caaacugcacaugauuucaca

SEQ ID NO: 3820797 - RNA, 22 nt, Human
caaacugcacaugauuucacaa

SEQ ID NO: 3820798 - RNA, 19 nt, Human
caaacugcaugcccagaga

SEQ ID NO: 3820799 - RNA, 20 nt, Human
caaacugcaugcccagagac

SEQ ID NO: 3820800 - RNA, 19 nt, Human
caaacugccuuggcuucag

SEQ ID NO: 3820801 - RNA, 20 nt, Human
caaacuggaaugagcagcuu

SEQ ID NO: 3820802 - RNA, 19 nt, Human
caaacuggcaaacuucaga

SEQ ID NO: 3820803 - RNA, 20 nt, Human
caaacuggccgcgggggcag

SEQ ID NO: 3820804 - RNA, 19 nt, Human
caaacuggggccuccagaa

SEQ ID NO: 3820805 - RNA, 17 nt, Human
caaacugguuauuuaaa

SEQ ID NO: 3820806 - RNA, 21 nt, Human
caaacuguaaaaaaugugugu

SEQ ID NO: 3820807 - RNA, 21 nt, Human
caaacuguaaauaaaaagaaa

SEQ ID NO: 3820808 - RNA, 20 nt, Human
caaacuguguaacugcccaa

SEQ ID NO: 3820809 - RNA, 20 nt, Human
caaacuguucaagaaauaau

SEQ ID NO: 3820810 - RNA, 13 nt, Human
caaacuuacuauu

SEQ ID NO: 3820811 - RNA, 17 nt, Human
caaacuucacucugggc

SEQ ID NO: 3820812 - RNA, 15 nt, Human
caaacuucagacuga

SEQ ID NO: 3820813 - RNA, 22 nt, Human
caaacuuggaauuuguaaccuc

SEQ ID NO: 3820814 - RNA, 22 nt, Human
caaacuuuauugacaagugauu

SEQ ID NO: 3820815 - RNA, 19 nt, Human
caaacuuuucaaggcuuau

SEQ ID NO: 3820816 - RNA, 16 nt, Human
caaagaaaaugaaaug

SEQ ID NO: 3820817 - RNA, 13 nt, Human
caaagaaacccaa

SEQ ID NO: 3820818 - RNA, 16 nt, Human
caaagaaaugaacauu

SEQ ID NO: 3820819 - RNA, 19 nt, Human
caaagaaaugaacauucca

SEQ ID NO: 3820820 - RNA, 18 nt, Human
caaagaaauuuccacuca

SEQ ID NO: 3820821 - RNA, 17 nt, Human
caaagaaccaaagaaga

SEQ ID NO: 3820822 - RNA, 11 nt, Human
caaagaagaaa

SEQ ID NO: 3820823 - RNA, 20 nt, Human
caaagaagacauguuuuaga

SEQ ID NO: 3820824 - RNA, 17 nt, Human
caaagaaggaauucuag

SEQ ID NO: 3820825 - RNA, 21 nt, Human
caaagaaggcauuugcagggu

SEQ ID NO: 3820826 - RNA, 15 nt, Human
caaagaauaagaaaa

SEQ ID NO: 3820827 - RNA, 19 nt, Human
caaagaaucccuagacuuu

SEQ ID NO: 3820828 - RNA, 20 nt, Human
caaagaaucccuagacuuua

SEQ ID NO: 3820829 - RNA, 23 nt, Human
caaagaaucccuagacuuuaggc

SEQ ID NO: 3820830 - RNA, 15 nt, Human
caaagaaugccuuga

SEQ ID NO: 3820831 - RNA, 15 nt, Human
caaagaauguuuaua

SEQ ID NO: 3820832 - RNA, 17 nt, Human
caaagaauuccaaagca

SEQ ID NO: 3820833 - RNA, 14 nt, Human
caaagacaaauagu

SEQ ID NO: 3820834 - RNA, 14 nt, Human
caaagacccuggcu

SEQ ID NO: 3820835 - RNA, 18 nt, Human
caaagaccuuguguguau

SEQ ID NO: 3820836 - RNA, 17 nt, Human
caaagacgaccuuuacc

SEQ ID NO: 3820837 - RNA, 22 nt, Human
caaagacuuaagcccagugcac

SEQ ID NO: 3820838 - RNA, 21 nt, Human
caaagagaaaaagaaaugcaa

SEQ ID NO: 3820839 - RNA, 16 nt, Human
caaagagaaugccauu

SEQ ID NO: 3820840 - RNA, 18 nt, Human
caaagagaaugcccuucu

SEQ ID NO: 3820841 - RNA, 14 nt, Human
caaagagaguuuuu

SEQ ID NO: 3820842 - RNA, 17 nt, Human
caaagagcacaaacauu

SEQ ID NO: 3820843 - RNA, 16 nt, Human
caaagagccuggagaa

SEQ ID NO: 3820844 - RNA, 18 nt, Human
caaagagccuggagaagc

SEQ ID NO: 3820845 - RNA, 22 nt, Human
caaagaggacucgcuuguaaau

SEQ ID NO: 3820846 - RNA, 14 nt, Human
caaagaggcaagag

SEQ ID NO: 3820847 - RNA, 15 nt, Human
caaagaggcaagagg

SEQ ID NO: 3820848 - RNA, 23 nt, Human
caaagaggcaguugcccagccuc

SEQ ID NO: 3820849 - RNA, 22 nt, Human
caaagaggcugaggcuggcaca

SEQ ID NO: 3820850 - RNA, 12 nt, Human
caaagaggcugc

SEQ ID NO: 3820851 - RNA, 16 nt, Human
caaagaggcugccccu

SEQ ID NO: 3820852 - RNA, 21 nt, Human
caaagaggcugccccucucac

SEQ ID NO: 3820853 - RNA, 23 nt, Human
caaagaggcugccccucucacca

SEQ ID NO: 3820854 - RNA, 18 nt, Human
caaagagggcuuccucua

SEQ ID NO: 3820855 - RNA, 13 nt, Human
caaagagguauuu

SEQ ID NO: 3820856 - RNA, 16 nt, Human
caaagagguauuuauc

SEQ ID NO: 3820857 - RNA, 18 nt, Human
caaagaggugacugggcc

SEQ ID NO: 3820858 - RNA, 22 nt, Human
caaagagugggcugcaucuggg

SEQ ID NO: 3820859 - RNA, 17 nt, Human
caaagaguguagaucag

SEQ ID NO: 3820860 - RNA, 15 nt, Human
caaagaguucaagaa

SEQ ID NO: 3820861 - RNA, 18 nt, Human
caaagaguuugaugaggc

SEQ ID NO: 3820862 - RNA, 16 nt, Human
caaagauaaucucuca

SEQ ID NO: 3820863 - RNA, 20 nt, Human
caaagauaaucucucagcuu

SEQ ID NO: 3820864 - RNA, 19 nt, Human
caaagauagacagguccug

SEQ ID NO: 3820865 - RNA, 22 nt, Human
caaagauagacagguccugauu

SEQ ID NO: 3820866 - RNA, 12 nt, Human
caaagauaucuu

SEQ ID NO: 3820867 - RNA, 14 nt, Human
caaagauaucuuuu

SEQ ID NO: 3820868 - RNA, 20 nt, Human
caaagauauuuugcuuugug

SEQ ID NO: 3820869 - RNA, 18 nt, Human
caaagaucaaaauaaaaa

SEQ ID NO: 3820870 - RNA, 12 nt, Human
caaagaucacuu

SEQ ID NO: 3820871 - RNA, 20 nt, Human
caaagaucuguccucagccu

SEQ ID NO: 3820872 - RNA, 18 nt, Human
caaagaugaaugaagcaa

SEQ ID NO: 3820873 - RNA, 19 nt, Human
caaagaugaccauaaccac

SEQ ID NO: 3820874 - RNA, 22 nt, Human
caaagaugggugaaggcuggca

SEQ ID NO: 3820875 - RNA, 16 nt, Human
caaagauguuugucag

SEQ ID NO: 3820876 - RNA, 22 nt, Human
caaagauguuugucagauauga

SEQ ID NO: 3820877 - RNA, 17 nt, Human
caaagauucaaaauuga

SEQ ID NO: 3820878 - RNA, 16 nt, Human
caaagugccaaagaaa

SEQ ID NO: 3820879 - RNA, 16 nt, Human
caaagugcugagauua

SEQ ID NO: 3820880 - RNA, 13 nt, Human
caaagugcuggga

SEQ ID NO: 3820881 - RNA, 19 nt, Human
caaagugcugggauuacaa

SEQ ID NO: 3820882 - RNA, 23 nt, Human
caaagugcugggauuacaggugu

SEQ ID NO: 3820883 - RNA, 16 nt, Human
caaaguggaaggaaag

SEQ ID NO: 3820884 - RNA, 18 nt, Human
caaagugguauagaaaug

SEQ ID NO: 3820885 - RNA, 22 nt, Human
caaaguguauuuuauaaaauua

SEQ ID NO: 3820886 - RNA, 13 nt, Human
caaaguguguauu

SEQ ID NO: 3820887 - RNA, 15 nt, Human
caaaguguuuucucu

SEQ ID NO: 3820888 - RNA, 17 nt, Human
caaaguguuuuguacca

SEQ ID NO: 3820889 - RNA, 19 nt, Human
caaaguguuuuguaccagu

SEQ ID NO: 3820890 - RNA, 23 nt, Human
caaaguguuuuguaccagugaau

SEQ ID NO: 3820891 - RNA, 15 nt, Human
caaaguuaacagauu

SEQ ID NO: 3820892 - RNA, 16 nt, Human
caaaguuacuagguaa

SEQ ID NO: 3820893 - RNA, 14 nt, Human
caaaguucaacuug

SEQ ID NO: 3820894 - RNA, 21 nt, Human
caaaguucuaauaauuucuaa

SEQ ID NO: 3820895 - RNA, 23 nt, Human
caaaguucuaauaauuucuaaug

SEQ ID NO: 3820896 - RNA, 17 nt, Human
caaaguucucuguggca

SEQ ID NO: 3820897 - RNA, 14 nt, Human
caaaguugccuaaa

SEQ ID NO: 3820898 - RNA, 19 nt, Human
caaaguugccuaaauccau

SEQ ID NO: 3820899 - RNA, 15 nt, Human
caaaguuguuguaac

SEQ ID NO: 3820900 - RNA, 12 nt, Human
caaaguuucaau

SEQ ID NO: 3820901 - RNA, 17 nt, Human
caaaguuucagaguaua

SEQ ID NO: 3820902 - RNA, 18 nt, Human
caaaguuucagaguauau

SEQ ID NO: 3820903 - RNA, 22 nt, Human
caaaguuuccuaaucagaaauu

SEQ ID NO: 3820904 - RNA, 16 nt, Human
caaaguuugacaggaa

SEQ ID NO: 3820905 - RNA, 19 nt, Human
caaaguuugacaggaaccu

SEQ ID NO: 3820906 - RNA, 20 nt, Human
caaaguuugacaggaaccuu

SEQ ID NO: 3820907 - RNA, 14 nt, Human
caaaguuuuaucaa

SEQ ID NO: 3820908 - RNA, 19 nt, Human
caaaguuuugaaaagcuau

SEQ ID NO: 3820909 - RNA, 22 nt, Human
caaaguuuuguuguacuuaaau

SEQ ID NO: 3820910 - RNA, 23 nt, Human
caaauaaaauaaaaauaaaaaca

SEQ ID NO: 3820911 - RNA, 14 nt, Human
caaauaaacacugu

SEQ ID NO: 3820912 - RNA, 18 nt, Human
caaauaaacucuaaacau

SEQ ID NO: 3820913 - RNA, 19 nt, Human
caaauaaaguaguaaaaga

SEQ ID NO: 3820914 - RNA, 15 nt, Human
caaauaacuucaguc

SEQ ID NO: 3820915 - RNA, 14 nt, Human
caaauaagaaauuu

SEQ ID NO: 3820916 - RNA, 18 nt, Human
caaauaaguguauuuuga

SEQ ID NO: 3820917 - RNA, 19 nt, Human
caaauaaguguauuuugaa

SEQ ID NO: 3820918 - RNA, 17 nt, Human
auuuucagaaucugaau

SEQ ID NO: 3820919 - RNA, 23 nt, Human
auuuucagagccggcccgccucu

SEQ ID NO: 3820920 - RNA, 17 nt, Human
auuuucagauuugcaca

SEQ ID NO: 3820921 - RNA, 20 nt, Human
auuuucagauuugcacaaaa

SEQ ID NO: 3820922 - RNA, 19 nt, Human
auuuucagcaaacucuuuu

SEQ ID NO: 3820923 - RNA, 19 nt, Human
auuuucagcauuaagcugu

SEQ ID NO: 3820924 - RNA, 22 nt, Human
auuuucaguaauguuauuuucu

SEQ ID NO: 3820925 - RNA, 21 nt, Human
auuuucaguagggcuacaaaa

SEQ ID NO: 3820926 - RNA, 19 nt, Human
auuuucaguauaauuuaac

SEQ ID NO: 3820927 - RNA, 12 nt, Human
auuuucaguauu

SEQ ID NO: 3820928 - RNA, 22 nt, Human
auuuucaguuauuauauuuaca

SEQ ID NO: 3820929 - RNA, 20 nt, Human
auuuucauaaguauuucaaa

SEQ ID NO: 3820930 - RNA, 22 nt, Human
auuuucauaaguauuucaaauu

SEQ ID NO: 3820931 - RNA, 14 nt, Human
auuuucaugaaaau

SEQ ID NO: 3820932 - RNA, 17 nt, Human
auuuucaugaaaauacc

SEQ ID NO: 3820933 - RNA, 21 nt, Human
auuuucaugaaaauaccauuu

SEQ ID NO: 3820934 - RNA, 20 nt, Human
auuuucaugacuuuuccaug

SEQ ID NO: 3820935 - RNA, 14 nt, Human
auuuucauuagcaa

SEQ ID NO: 3820936 - RNA, 15 nt, Human
auuuucauuagcaaa

SEQ ID NO: 3820937 - RNA, 16 nt, Human
auuuucauuagcaaaa

SEQ ID NO: 3820938 - RNA, 17 nt, Human
auuuucauuagcaaaaa

SEQ ID NO: 3820939 - RNA, 22 nt, Human
auuuucauuagcaaaaaaaguu

SEQ ID NO: 3820940 - RNA, 15 nt, Human
auuuucauuauuccu

SEQ ID NO: 3820941 - RNA, 14 nt, Human
auuuucauuguaaa

SEQ ID NO: 3820942 - RNA, 17 nt, Human
auuuucauuuuacaguu

SEQ ID NO: 3820943 - RNA, 21 nt, Human
auuuuccacaagauucccaga

SEQ ID NO: 3820944 - RNA, 21 nt, Human
auuuuccauuuuuauuucaaa

SEQ ID NO: 3820945 - RNA, 22 nt, Human
auuuucccacucauucugaauu

SEQ ID NO: 3820946 - RNA, 20 nt, Human
auuuuccccccacucucccc

SEQ ID NO: 3820947 - RNA, 22 nt, Human
auuuuccccccacucuccccac

SEQ ID NO: 3820948 - RNA, 16 nt, Human
auuuuccuacaggcag

SEQ ID NO: 3820949 - RNA, 13 nt, Human
auuuuccucccca

SEQ ID NO: 3820950 - RNA, 15 nt, Human
auuuuccucugcuuu

SEQ ID NO: 3820951 - RNA, 16 nt, Human
auuuuccugccaggca

SEQ ID NO: 3820952 - RNA, 19 nt, Human
auuuuccuguccucuuuca

SEQ ID NO: 3820953 - RNA, 13 nt, Human
auuuuccuugaag

SEQ ID NO: 3820954 - RNA, 23 nt, Human
auuuuccuuuaauaugaaauuuu

SEQ ID NO: 3820955 - RNA, 13 nt, Human
auuuuccuuuuuu

SEQ ID NO: 3820956 - RNA, 20 nt, Human
auuuuccuuuuuuauacaca

SEQ ID NO: 3820957 - RNA, 17 nt, Human
auuuucguaugaaaaug

SEQ ID NO: 3820958 - RNA, 15 nt, Human
auuuucuaaaagcuu

SEQ ID NO: 3820959 - RNA, 16 nt, Human
auuuucuaaaguacug

SEQ ID NO: 3820960 - RNA, 14 nt, Human
auuuucuacaagua

SEQ ID NO: 3820961 - RNA, 16 nt, Human
auuuucuacguuucuu

SEQ ID NO: 3820962 - RNA, 16 nt, Human
auuuucuacucuuuuu

SEQ ID NO: 3820963 - RNA, 16 nt, Human
auuuucuagacuuucu

SEQ ID NO: 3820964 - RNA, 14 nt, Human
auuuucuagauaca

SEQ ID NO: 3820965 - RNA, 18 nt, Human
auuuucuauaauuuaaau

SEQ ID NO: 3820966 - RNA, 15 nt, Human
auuuucuauguacua

SEQ ID NO: 3820967 - RNA, 21 nt, Human
auuuucuauguacuaguacug

SEQ ID NO: 3820968 - RNA, 22 nt, Human
auuuucuauguacuaguacugu

SEQ ID NO: 3820969 - RNA, 23 nt, Human
auuuucuauguacuaguacugug

SEQ ID NO: 3820970 - RNA, 16 nt, Human
auuuucuauuguuacu

SEQ ID NO: 3820971 - RNA, 20 nt, Human
auuuucuauuguuacucugg

SEQ ID NO: 3820972 - RNA, 17 nt, Human
auuuucucaaaagcauu

SEQ ID NO: 3820973 - RNA, 23 nt, Human
auuuucucaaaagcauuuaucau

SEQ ID NO: 3820974 - RNA, 15 nt, Human
auuuucucccaggaa

SEQ ID NO: 3820975 - RNA, 23 nt, Human
auuuucucccuggauuuuuacca

SEQ ID NO: 3820976 - RNA, 17 nt, Human
auuuucucucaggugaa

SEQ ID NO: 3820977 - RNA, 19 nt, Human
auuuucucugauacuuuuu

SEQ ID NO: 3820978 - RNA, 17 nt, Human
auuuucucuguacuuuu

SEQ ID NO: 3820979 - RNA, 14 nt, Human
auuuucucuuagaa

SEQ ID NO: 3820980 - RNA, 15 nt, Human
auuuucugaaacuaa

SEQ ID NO: 3820981 - RNA, 20 nt, Human
auuuucugaaacuaaugaaa

SEQ ID NO: 3820982 - RNA, 12 nt, Human
auuuucugaaag

SEQ ID NO: 3820983 - RNA, 18 nt, Human
auuuucugaaaguuaccc

SEQ ID NO: 3820984 - RNA, 15 nt, Human
auuuucugcaucucc

SEQ ID NO: 3820985 - RNA, 18 nt, Human
auuuucuggaauacauga

SEQ ID NO: 3820986 - RNA, 22 nt, Human
auuuucuggaauacaugaaaua

SEQ ID NO: 3820987 - RNA, 22 nt, Human
auuuucuggauuccccaucuca

SEQ ID NO: 3820988 - RNA, 23 nt, Human
auuuucuggggcuccucacauag

SEQ ID NO: 3820989 - RNA, 16 nt, Human
auuuucugguaaaaag

SEQ ID NO: 3820990 - RNA, 21 nt, Human
auuuucugguagauagaaaua

SEQ ID NO: 3820991 - RNA, 17 nt, Human
auuuucugguucuaaca

SEQ ID NO: 3820992 - RNA, 13 nt, Human
auuuucugucaga

SEQ ID NO: 3820993 - RNA, 14 nt, Human
auuuucugucagau

SEQ ID NO: 3820994 - RNA, 22 nt, Human
auuuucugucagaugagaacaa

SEQ ID NO: 3820995 - RNA, 11 nt, Human
auuuucugugg

SEQ ID NO: 3820996 - RNA, 13 nt, Human
auuuucugugugu

SEQ ID NO: 3820997 - RNA, 16 nt, Human
auuuucuguguguucc

SEQ ID NO: 3820998 - RNA, 18 nt, Human
auuuucuguguguuccug

SEQ ID NO: 3820999 - RNA, 20 nt, Human
auuuucuguguguuccuggc

SEQ ID NO: 3821000 - RNA, 17 nt, Human
auuuucuuaaccaguug

SEQ ID NO: 3821001 - RNA, 19 nt, Human
auuuucuugaugacuggaa

SEQ ID NO: 3821002 - RNA, 15 nt, Human
auuuucuuuaaaaga

SEQ ID NO: 3821003 - RNA, 22 nt, Human
auuuucuuuaaccagucugaag

SEQ ID NO: 3821004 - RNA, 15 nt, Human
auuuucuuuaaugcu

SEQ ID NO: 3821005 - RNA, 15 nt, Human
auuuucuuugaaauu

SEQ ID NO: 3821006 - RNA, 23 nt, Human
auuuucuuuguguagcuuugcuc

SEQ ID NO: 3821007 - RNA, 13 nt, Human
auuuucuuuucuu

SEQ ID NO: 3821008 - RNA, 20 nt, Human
auuuucuuuucuuucaacuu

SEQ ID NO: 3821009 - RNA, 16 nt, Human
auuuucuuuuguaaau

SEQ ID NO: 3821010 - RNA, 17 nt, Human
auuuucuuuuguaaaug

SEQ ID NO: 3821011 - RNA, 19 nt, Human
auuuucuuuuguaaauguu

SEQ ID NO: 3821012 - RNA, 22 nt, Human
auuuucuuuuuauuuuuuaauu

SEQ ID NO: 3821013 - RNA, 13 nt, Human
auuuugaaaaacu

SEQ ID NO: 3821014 - RNA, 15 nt, Human
auuuugaaaaacugc

SEQ ID NO: 3821015 - RNA, 18 nt, Human
auuuugaaaaauuccuau

SEQ ID NO: 3821016 - RNA, 22 nt, Human
auuuugaaaaauuccuauugug

SEQ ID NO: 3821017 - RNA, 18 nt, Human
auuuugaaaacuacauuu

SEQ ID NO: 3821018 - RNA, 22 nt, Human
auuuugaaaacuacauuuuaac

SEQ ID NO: 3821019 - RNA, 13 nt, Human
auuuugaaaagcu

SEQ ID NO: 3821020 - RNA, 18 nt, Human
auuuugaaaagcuucuua

SEQ ID NO: 3821021 - RNA, 12 nt, Human
auuuugaaaagu

SEQ ID NO: 3821022 - RNA, 15 nt, Human
caacuauuuuuccaa

SEQ ID NO: 3821023 - RNA, 15 nt, Human
caacucaccccagcc

SEQ ID NO: 3821024 - RNA, 16 nt, Human
caacucaccccagccc

SEQ ID NO: 3821025 - RNA, 16 nt, Human
caacucacuccuuuua

SEQ ID NO: 3821026 - RNA, 17 nt, Human
caacucacuccuuuuaa

SEQ ID NO: 3821027 - RNA, 20 nt, Human
caacucacuccuuuuaaaga

SEQ ID NO: 3821028 - RNA, 21 nt, Human
caacucacuccuuuuaaagaa

SEQ ID NO: 3821029 - RNA, 12 nt, Human
caacucauucca

SEQ ID NO: 3821030 - RNA, 15 nt, Human
caacucauuccagau

SEQ ID NO: 3821031 - RNA, 13 nt, Human
caacuccaaaacc

SEQ ID NO: 3821032 - RNA, 18 nt, Human
caacuccaacauccacuc

SEQ ID NO: 3821033 - RNA, 20 nt, Human
caacuccagcaacuucuucu

SEQ ID NO: 3821034 - RNA, 22 nt, Human
caacuccaguacuggagcuucu

SEQ ID NO: 3821035 - RNA, 20 nt, Human
caacucccugccccccagcc

SEQ ID NO: 3821036 - RNA, 19 nt, Human
caacuccuagggccacuga

SEQ ID NO: 3821037 - RNA, 12 nt, Human
caacuccuccca

SEQ ID NO: 3821038 - RNA, 21 nt, Human
caacuccucgacaucacuguu

SEQ ID NO: 3821039 - RNA, 18 nt, Human
caacucuccccugaccug

SEQ ID NO: 3821040 - RNA, 24 nt, Human
caacucuccccugaccugugagcc

SEQ ID NO: 3821041 - RNA, 16 nt, Human
caacucucuuauugcc

SEQ ID NO: 3821042 - RNA, 21 nt, Human
caacucucuuauugccucacu

SEQ ID NO: 3821043 - RNA, 22 nt, Human
caacucucuuauugccucacuu

SEQ ID NO: 3821044 - RNA, 21 nt, Human
caacucugaaggguaauuaua

SEQ ID NO: 3821045 - RNA, 15 nt, Human
caacucugcugaggg

SEQ ID NO: 3821046 - RNA, 16 nt, Human
caacucugcugagggu

SEQ ID NO: 3821047 - RNA, 13 nt, Human
caacucugucccc

SEQ ID NO: 3821048 - RNA, 14 nt, Human
caacucuuugagaa

SEQ ID NO: 3821049 - RNA, 18 nt, Human
caacucuuuguuauuuga

SEQ ID NO: 3821050 - RNA, 14 nt, Human
caacugaaaguguu

SEQ ID NO: 3821051 - RNA, 22 nt, Human
caacugaaggcuaaaaagcaac

SEQ ID NO: 3821052 - RNA, 13 nt, Human
caacugacacagg

SEQ ID NO: 3821053 - RNA, 16 nt, Human
caacugacacaggaaa

SEQ ID NO: 3821054 - RNA, 17 nt, Human
caacugacacucccacc

SEQ ID NO: 3821055 - RNA, 15 nt, Human
caacugaccagccuc

SEQ ID NO: 3821056 - RNA, 17 nt, Human
caacugaggcagacagc

SEQ ID NO: 3821057 - RNA, 22 nt, Human
caacugaggcagacagcagcuc

SEQ ID NO: 3821058 - RNA, 17 nt, Human
caacugcaucaagaugu

SEQ ID NO: 3821059 - RNA, 20 nt, Human
caacugcaucaagaugugac

SEQ ID NO: 3821060 - RNA, 23 nt, Human
caacugcaucaagaugugacaug

SEQ ID NO: 3821061 - RNA, 16 nt, Human
caacugcauuggcuuu

SEQ ID NO: 3821062 - RNA, 22 nt, Human
caacugccuacuccaaaauguu

SEQ ID NO: 3821063 - RNA, 15 nt, Human
caacugcucccaccu

SEQ ID NO: 3821064 - RNA, 17 nt, Human
caacugcucccaccucc

SEQ ID NO: 3821065 - RNA, 12 nt, Human
caacugcugcuu

SEQ ID NO: 3821066 - RNA, 21 nt, Human
caacuggcccucuucuuacuu

SEQ ID NO: 3821067 - RNA, 13 nt, Human
caacugggcccaa

SEQ ID NO: 3821068 - RNA, 15 nt, Human
caacuguauauauuc

SEQ ID NO: 3821069 - RNA, 12 nt, Human
caacugugacug

SEQ ID NO: 3821070 - RNA, 13 nt, Human
caacuguggcugg

SEQ ID NO: 3821071 - RNA, 22 nt, Human
caacugugugauuaaaagguau

SEQ ID NO: 3821072 - RNA, 16 nt, Human
caacuguguucauuag

SEQ ID NO: 3821073 - RNA, 21 nt, Human
caacuguguuguauuaacaaa

SEQ ID NO: 3821074 - RNA, 22 nt, Human
caacuguguuguauuaacaaaa

SEQ ID NO: 3821075 - RNA, 19 nt, Human
caacuguuaugaaauaaag

SEQ ID NO: 3821076 - RNA, 15 nt, Human
caacuuaaaaagucu

SEQ ID NO: 3821077 - RNA, 19 nt, Human
caacuuaaaaagucugcau

SEQ ID NO: 3821078 - RNA, 15 nt, Human
caacuuaacaugaaa

SEQ ID NO: 3821079 - RNA, 16 nt, Human
caacuuaacaugggcu

SEQ ID NO: 3821080 - RNA, 21 nt, Human
caacuuaauguucugaauaau

SEQ ID NO: 3821081 - RNA, 18 nt, Human
caacuuagaucuccagga

SEQ ID NO: 3821082 - RNA, 14 nt, Human
caacuucaguccug

SEQ ID NO: 3821083 - RNA, 17 nt, Human
caacuucuacuucugcc

SEQ ID NO: 3821084 - RNA, 23 nt, Human
caacuucuccauccuuucugccu

SEQ ID NO: 3821085 - RNA, 14 nt, Human
caacuucuucagag

SEQ ID NO: 3821086 - RNA, 20 nt, Human
caacuucuuuuuauuuucuu

SEQ ID NO: 3821087 - RNA, 21 nt, Human
caacuugagauguaugaaggc

SEQ ID NO: 3821088 - RNA, 19 nt, Human
caacuugagcauguuacug

SEQ ID NO: 3821089 - RNA, 16 nt, Human
caacuugagggcccag

SEQ ID NO: 3821090 - RNA, 16 nt, Human
caacuugccuuugaag

SEQ ID NO: 3821091 - RNA, 17 nt, Human
caacuuggcuuucccgg

SEQ ID NO: 3821092 - RNA, 17 nt, Human
caacuugguucugcuuc

SEQ ID NO: 3821093 - RNA, 19 nt, Human
caacuugguucugcuucaa

SEQ ID NO: 3821094 - RNA, 13 nt, Human
caacuuguccuag

SEQ ID NO: 3821095 - RNA, 18 nt, Human
caacuuuaagcagcucuu

SEQ ID NO: 3821096 - RNA, 21 nt, Human
caacuuuaagcagcucuugcu

SEQ ID NO: 3821097 - RNA, 12 nt, Human
caacuuuacugu

SEQ ID NO: 3821098 - RNA, 12 nt, Human
caacuuuauacc

SEQ ID NO: 3821099 - RNA, 24 nt, Human
caacuuucacuauaaugugaaaug

SEQ ID NO: 3821100 - RNA, 12 nt, Human
caacuuucugua

SEQ ID NO: 3821101 - RNA, 17 nt, Human
caacuuugaauaaagaa

SEQ ID NO: 3821102 - RNA, 19 nt, Human
caacuuuguaaaaaucuuu

SEQ ID NO: 3821103 - RNA, 16 nt, Human
caacuuuuuauugccu

SEQ ID NO: 3821104 - RNA, 23 nt, Human
caacuuuuuauugccuucucacc

SEQ ID NO: 3821105 - RNA, 19 nt, Human
caacuuuuucccucacuaa

SEQ ID NO: 3821106 - RNA, 17 nt, Human
caacuuuuuuuucuuuu

SEQ ID NO: 3821107 - RNA, 16 nt, Human
caacuuuuuuuuuccc

SEQ ID NO: 3821108 - RNA, 17 nt, Human
caagaaaaaaaaaugcc

SEQ ID NO: 3821109 - RNA, 18 nt, Human
caagaaaaaaaaaugcca

SEQ ID NO: 3821110 - RNA, 15 nt, Human
caagaaaaaauaaau

SEQ ID NO: 3821111 - RNA, 17 nt, Human
caagaaaaaauaaaugg

SEQ ID NO: 3821112 - RNA, 18 nt, Human
caagaaaaauaaagaaaa

SEQ ID NO: 3821113 - RNA, 19 nt, Human
caagaaaaauaaagaaaag

SEQ ID NO: 3821114 - RNA, 17 nt, Human
caaaauguuggucauuu

SEQ ID NO: 3821115 - RNA, 18 nt, Human
caaaauguuggucauuuu

SEQ ID NO: 3821116 - RNA, 16 nt, Human
caaaauuaagguguuu

SEQ ID NO: 3821117 - RNA, 21 nt, Human
caaaauuagauccuaagaugu

SEQ ID NO: 3821118 - RNA, 20 nt, Human
caaaauuagccaguaauccu

SEQ ID NO: 3821119 - RNA, 22 nt, Human
caaaauuagccaguaauccugu

SEQ ID NO: 3821120 - RNA, 16 nt, Human
caaaauuauuucagaa

SEQ ID NO: 3821121 - RNA, 17 nt, Human
caaaauuauuucagaaa

SEQ ID NO: 3821122 - RNA, 13 nt, Human
caaaauuauuugu

SEQ ID NO: 3821123 - RNA, 15 nt, Human
caaaauucauuucua

SEQ ID NO: 3821124 - RNA, 18 nt, Human
caaaauucauuucuaauu

SEQ ID NO: 3821125 - RNA, 11 nt, Human
caaaauuccca

SEQ ID NO: 3821126 - RNA, 23 nt, Human
caaaauucgaccugauuuacagu

SEQ ID NO: 3821127 - RNA, 16 nt, Human
caaaauucuaaaugua

SEQ ID NO: 3821128 - RNA, 20 nt, Human
caaaauucuuauuuuuccua

SEQ ID NO: 3821129 - RNA, 17 nt, Human
caaaauugacauugcuu

SEQ ID NO: 3821130 - RNA, 15 nt, Human
caaaauugauguguu

SEQ ID NO: 3821131 - RNA, 16 nt, Human
caaaauugauguguuu

SEQ ID NO: 3821132 - RNA, 22 nt, Human
caaaauuguuuugagcuuucca

SEQ ID NO: 3821133 - RNA, 23 nt, Human
caaaauuguuuugagcuuuccau

SEQ ID NO: 3821134 - RNA, 22 nt, Human
caaaauuuauuuuauaagaaaa

SEQ ID NO: 3821135 - RNA, 14 nt, Human
caaaauuuccagua

SEQ ID NO: 3821136 - RNA, 15 nt, Human
caaaauuuccaguac

SEQ ID NO: 3821137 - RNA, 18 nt, Human
caaaauuuccaguaccuu

SEQ ID NO: 3821138 - RNA, 11 nt, Human
caaaauuuguu

SEQ ID NO: 3821139 - RNA, 16 nt, Human
caaaauuuuaaaaaag

SEQ ID NO: 3821140 - RNA, 20 nt, Human
caaaauuuuaguccaaauaa

SEQ ID NO: 3821141 - RNA, 21 nt, Human
caaaauuuuauagcucaguuu

SEQ ID NO: 3821142 - RNA, 14 nt, Human
caaaauuuuauuuu

SEQ ID NO: 3821143 - RNA, 17 nt, Human
caaaauuuucucauuuu

SEQ ID NO: 3821144 - RNA, 21 nt, Human
caaaauuuuuucucuaggaaa

SEQ ID NO: 3821145 - RNA, 20 nt, Human
caaacaaaaagguucucagg

SEQ ID NO: 3821146 - RNA, 13 nt, Human
caaacaaagccag

SEQ ID NO: 3821147 - RNA, 14 nt, Human
caaacaaauaugca

SEQ ID NO: 3821148 - RNA, 18 nt, Human
caaacaacagaaagucau

SEQ ID NO: 3821149 - RNA, 21 nt, Human
caaacaaggggcuguuacaua

SEQ ID NO: 3821150 - RNA, 15 nt, Human
caaacaauaccugaa

SEQ ID NO: 3821151 - RNA, 20 nt, Human
caaacaaucucuuaaauugg

SEQ ID NO: 3821152 - RNA, 19 nt, Human
caaacaauggaaacugaau

SEQ ID NO: 3821153 - RNA, 23 nt, Human
caaacacaaggucauggccacac

SEQ ID NO: 3821154 - RNA, 15 nt, Human
caaacacauacagga

SEQ ID NO: 3821155 - RNA, 23 nt, Human
caaacacauuaagccuuccacac

SEQ ID NO: 3821156 - RNA, 18 nt, Human
caaacaccaacauaaaaa

SEQ ID NO: 3821157 - RNA, 22 nt, Human
caaacaccuucuuauuauauau

SEQ ID NO: 3821158 - RNA, 21 nt, Human
caaacacuugugacuuuugcu

SEQ ID NO: 3821159 - RNA, 16 nt, Human
caaacagaacaggguc

SEQ ID NO: 3821160 - RNA, 15 nt, Human
caaacagaggccgcc

SEQ ID NO: 3821161 - RNA, 16 nt, Human
caaacagaugcucuga

SEQ ID NO: 3821162 - RNA, 17 nt, Human
caaacagcaaaccaaga

SEQ ID NO: 3821163 - RNA, 19 nt, Human
caaacagcaaaccaagaga

SEQ ID NO: 3821164 - RNA, 15 nt, Human
caaacaggaacaauc

SEQ ID NO: 3821165 - RNA, 14 nt, Human
caaacagggccucu

SEQ ID NO: 3821166 - RNA, 19 nt, Human
caagaauagcauuguaaaa

SEQ ID NO: 3821167 - RNA, 18 nt, Human
caagaauauugcaaaaua

SEQ ID NO: 3821168 - RNA, 21 nt, Human
caagaauauugcaaaauacau

SEQ ID NO: 3821169 - RNA, 15 nt, Human
caagaaucagagaag

SEQ ID NO: 3821170 - RNA, 23 nt, Human
caagaaucagucuauccacagag

SEQ ID NO: 3821171 - RNA, 21 nt, Human
caagaauccacauuucuaaaa

SEQ ID NO: 3821172 - RNA, 21 nt, Human
caagaaugaagguuuuuguaa

SEQ ID NO: 3821173 - RNA, 22 nt, Human
caagaaugaagguuuuuguaaa

SEQ ID NO: 3821174 - RNA, 22 nt, Human
caagaaugcauugauauuguga

SEQ ID NO: 3821175 - RNA, 13 nt, Human
caagaaugcugaa

SEQ ID NO: 3821176 - RNA, 14 nt, Human
caagaauggaucac

SEQ ID NO: 3821177 - RNA, 22 nt, Human
caagaauggaucacaagaugga

SEQ ID NO: 3821178 - RNA, 11 nt, Human
caagaauguac

SEQ ID NO: 3821179 - RNA, 13 nt, Human
caagacaaaucaa

SEQ ID NO: 3821180 - RNA, 18 nt, Human
caagacaaaucaacagaa

SEQ ID NO: 3821181 - RNA, 13 nt, Human
caagacacugugg

SEQ ID NO: 3821182 - RNA, 21 nt, Human
caagacagaugccccagagcu

SEQ ID NO: 3821183 - RNA, 13 nt, Human
caagacauuguca

SEQ ID NO: 3821184 - RNA, 11 nt, Human
caagaccaaaa

SEQ ID NO: 3821185 - RNA, 14 nt, Human
caagaccacguuuc

SEQ ID NO: 3821186 - RNA, 19 nt, Human
caagacccaaaaggcagaa

SEQ ID NO: 3821187 - RNA, 23 nt, Human
caagaccccaagaggaaguucag

SEQ ID NO: 3821188 - RNA, 16 nt, Human
caagacccccagcacu

SEQ ID NO: 3821189 - RNA, 14 nt, Human
caagacccugucuc

SEQ ID NO: 3821190 - RNA, 22 nt, Human
caagacccuuguggucccaccc

SEQ ID NO: 3821191 - RNA, 21 nt, Human
caagacccuuuuggguuucug

SEQ ID NO: 3821192 - RNA, 16 nt, Human
caagaccgaucggcgg

SEQ ID NO: 3821193 - RNA, 16 nt, Human
caagaccucagggcac

SEQ ID NO: 3821194 - RNA, 14 nt, Human
caagaccugacuca

SEQ ID NO: 3821195 - RNA, 14 nt, Human
caagaccuucuccu

SEQ ID NO: 3821196 - RNA, 16 nt, Human
caagacgcugugcugc

SEQ ID NO: 3821197 - RNA, 17 nt, Human
caagacgcugugcugcc

SEQ ID NO: 3821198 - RNA, 18 nt, Human
caagacgcugugcugccc

SEQ ID NO: 3821199 - RNA, 19 nt, Human
caagacgcugugcugcccu

SEQ ID NO: 3821200 - RNA, 15 nt, Human
caagacucugucuca

SEQ ID NO: 3821201 - RNA, 22 nt, Human
caagacucuuuaugaucuggcc

SEQ ID NO: 3821202 - RNA, 16 nt, Human
caagacugacgccagg

SEQ ID NO: 3821203 - RNA, 12 nt, Human
caagacugcugu

SEQ ID NO: 3821204 - RNA, 21 nt, Human
caagacugcuguggccaggag

SEQ ID NO: 3821205 - RNA, 14 nt, Human
caagacuguugcuc

SEQ ID NO: 3821206 - RNA, 16 nt, Human
caagacuucaguaugu

SEQ ID NO: 3821207 - RNA, 21 nt, Human
caagacuucaguauguuguca

SEQ ID NO: 3821208 - RNA, 21 nt, Human
caagacuugguguccuuuccc

SEQ ID NO: 3821209 - RNA, 16 nt, Human
caagagaaacuuccua

SEQ ID NO: 3821210 - RNA, 22 nt, Human
caagagaaaggccugcacacaa

SEQ ID NO: 3821211 - RNA, 14 nt, Human
caagagaagcauuc

SEQ ID NO: 3821212 - RNA, 18 nt, Human
caagagaagcauucucau

SEQ ID NO: 3821213 - RNA, 22 nt, Human
caagagaagcauucucauugga

SEQ ID NO: 3821214 - RNA, 15 nt, Human
caagagacugaguca

SEQ ID NO: 3821215 - RNA, 17 nt, Human
caagagagaaagaagua

SEQ ID NO: 3821216 - RNA, 12 nt, Human
caagagagaacc

SEQ ID NO: 3821217 - RNA, 15 nt, Human
caagagagcagcaag

SEQ ID NO: 3821218 - RNA, 13 nt, Human
caagagaggauga

SEQ ID NO: 3821219 - RNA, 13 nt, Human
caagagauaacug

SEQ ID NO: 3821220 - RNA, 23 nt, Human
caagagaugaagagugagagggc

SEQ ID NO: 3821221 - RNA, 19 nt, Human
caagagauugcuaauugcu

SEQ ID NO: 3821222 - RNA, 15 nt, Human
caagagauuuaauua

SEQ ID NO: 3821223 - RNA, 14 nt, Human
caagagcaaaguag

SEQ ID NO: 3821224 - RNA, 15 nt, Human
caagagcagaggcag

SEQ ID NO: 3821225 - RNA, 16 nt, Human
caagagcagaggcagc

SEQ ID NO: 3821226 - RNA, 15 nt, Human
caagagcagccugug

SEQ ID NO: 3821227 - RNA, 19 nt, Human
caagagcaucaugccucug

SEQ ID NO: 3821228 - RNA, 22 nt, Human
caagagcaucaugccucugagg

SEQ ID NO: 3821229 - RNA, 23 nt, Human
caagagcaucaugccucugaggc

SEQ ID NO: 3821230 - RNA, 17 nt, Human
caagagcccaggccucc

SEQ ID NO: 3821231 - RNA, 11 nt, Human
caagagccuga

SEQ ID NO: 3821232 - RNA, 23 nt, Human
caagagccugagagugaggugga

SEQ ID NO: 3821233 - RNA, 16 nt, Human
caagagccuuaaaaca

SEQ ID NO: 3821234 - RNA, 18 nt, Human
caagagcgaaacuccguc

SEQ ID NO: 3821235 - RNA, 22 nt, Human
caagagcuacguauuuaauagc

SEQ ID NO: 3821236 - RNA, 22 nt, Human
caagaggaauaagaauggagca

SEQ ID NO: 3821237 - RNA, 14 nt, Human
caagaggagaucca

SEQ ID NO: 3821238 - RNA, 14 nt, Human
caagaggcaaagga

SEQ ID NO: 3821239 - RNA, 17 nt, Human
caagaggcugagacagg

SEQ ID NO: 3821240 - RNA, 15 nt, Human
caagaggcugaggca

SEQ ID NO: 3821241 - RNA, 11 nt, Human
caagaggcugg

SEQ ID NO: 3821242 - RNA, 20 nt, Human
caagaggcuguucccaccag

SEQ ID NO: 3821243 - RNA, 16 nt, Human
caagagggaauccccg

SEQ ID NO: 3821244 - RNA, 18 nt, Human
caagagggcacugguggc

SEQ ID NO: 3821245 - RNA, 20 nt, Human
caagagggcacugguggccc

SEQ ID NO: 3821246 - RNA, 17 nt, Human
caagaggggguggaggg

SEQ ID NO: 3821247 - RNA, 16 nt, Human
caagagggguggagac

SEQ ID NO: 3821248 - RNA, 12 nt, Human
caagagggucug

SEQ ID NO: 3821249 - RNA, 15 nt, Human
caagaggugggaggg

SEQ ID NO: 3821250 - RNA, 16 nt, Human
caagaggugggagggc

SEQ ID NO: 3821251 - RNA, 20 nt, Human
caagagguuuggcuccugcc

SEQ ID NO: 3821252 - RNA, 16 nt, Human
caagagugauucuugc

SEQ ID NO: 3821253 - RNA, 14 nt, Human
caagaguggcccca

SEQ ID NO: 3821254 - RNA, 20 nt, Human
caagaguggccccaccuggc

SEQ ID NO: 3821255 - RNA, 18 nt, Human
caagaguuuucuuccuug

SEQ ID NO: 3821256 - RNA, 15 nt, Human
caagauaacugagaa

SEQ ID NO: 3821257 - RNA, 17 nt, Human
caagauagauuuggaau

SEQ ID NO: 3821258 - RNA, 15 nt, Human
caagauaggaccuug

SEQ ID NO: 3821259 - RNA, 16 nt, Human
caagauauuguacaua

SEQ ID NO: 3821260 - RNA, 17 nt, Human
caagauauuguacauaa

SEQ ID NO: 3821261 - RNA, 23 nt, Human
caagauauuuuaaaaucugucac

SEQ ID NO: 3821262 - RNA, 16 nt, Human
caagaucaaaaaggcu

SEQ ID NO: 3821263 - RNA, 21 nt, Human
caagaucaaaaaggcuuauaa

SEQ ID NO: 3821264 - RNA, 22 nt, Human
caagauccugucuuuaaggaaa

SEQ ID NO: 3821265 - RNA, 16 nt, Human
caagaucgcgccacug

SEQ ID NO: 3821266 - RNA, 13 nt, Human
caagaucuuucag

SEQ ID NO: 3821267 - RNA, 14 nt, Human
caagaucuuucagg

SEQ ID NO: 3821268 - RNA, 15 nt, Human
caagaugacuggggu

SEQ ID NO: 3821269 - RNA, 22 nt, Human
caagaugcuggaugucugccaa

SEQ ID NO: 3821270 - RNA, 16 nt, Human
caagauggaaaggauu

SEQ ID NO: 3821271 - RNA, 23 nt, Human
caagauggcacagggcaugaaau

SEQ ID NO: 3821272 - RNA, 16 nt, Human
caagaugggcaucuuu

SEQ ID NO: 3821273 - RNA, 14 nt, Human
caaacuguaauaca

SEQ ID NO: 3821274 - RNA, 22 nt, Human
caaacugugaagcauuuacaga

SEQ ID NO: 3821275 - RNA, 15 nt, Human
caaacuguguaacug

SEQ ID NO: 3821276 - RNA, 17 nt, Human
caaacuuaagaaacacu

SEQ ID NO: 3821277 - RNA, 19 nt, Human
caaacuuaagaaacacuga

SEQ ID NO: 3821278 - RNA, 18 nt, Human
caaacuuacuauuuugac

SEQ ID NO: 3821279 - RNA, 23 nt, Human
caaacuuccagugcaacacugaa

SEQ ID NO: 3821280 - RNA, 17 nt, Human
caaacuuggauuuuuga

SEQ ID NO: 3821281 - RNA, 23 nt, Human
caaacuuggguagaguuuacagc

SEQ ID NO: 3821282 - RNA, 23 nt, Human
caaacuuuagguuuuuuuaauga

SEQ ID NO: 3821283 - RNA, 12 nt, Human
caaacuuugcau

SEQ ID NO: 3821284 - RNA, 20 nt, Human
caaacuuugcaucucaguau

SEQ ID NO: 3821285 - RNA, 18 nt, Human
caaacuuuuauacucuuu

SEQ ID NO: 3821286 - RNA, 21 nt, Human
caaacuuuucaaggcuuauau

SEQ ID NO: 3821287 - RNA, 21 nt, Human
caaagaaaaaaaaaaaagcca

SEQ ID NO: 3821288 - RNA, 18 nt, Human
caaagaaaaugaaaugca

SEQ ID NO: 3821289 - RNA, 16 nt, Human
caaagaaacaaagaug

SEQ ID NO: 3821290 - RNA, 12 nt, Human
caaagaaauauu

SEQ ID NO: 3821291 - RNA, 20 nt, Human
caaagaaauccggagaagcu

SEQ ID NO: 3821292 - RNA, 14 nt, Human
caaagaaaugaaca

SEQ ID NO: 3821293 - RNA, 17 nt, Human
caaagaaaugaacauuc

SEQ ID NO: 3821294 - RNA, 20 nt, Human
caaagaaaugaacauuccaa

SEQ ID NO: 3821295 - RNA, 12 nt, Human
caaagaaauuau

SEQ ID NO: 3821296 - RNA, 15 nt, Human
caaagaaauuaugug

SEQ ID NO: 3821297 - RNA, 12 nt, Human
caaagaaauuuc

SEQ ID NO: 3821298 - RNA, 21 nt, Human
caaagaacauguagaaaacaa

SEQ ID NO: 3821299 - RNA, 16 nt, Human
caaagaagacauguuu

SEQ ID NO: 3821300 - RNA, 19 nt, Human
caaagaaggaaaaggcagg

SEQ ID NO: 3821301 - RNA, 23 nt, Human
caaagaaugaauuucaacgccug

SEQ ID NO: 3821302 - RNA, 14 nt, Human
caaagaaugccuug

SEQ ID NO: 3821303 - RNA, 19 nt, Human
caaagaauuccaaagcaaa

SEQ ID NO: 3821304 - RNA, 20 nt, Human
caaagacaaauucuguuucu

SEQ ID NO: 3821305 - RNA, 14 nt, Human
caaagacagaagcc

SEQ ID NO: 3821306 - RNA, 18 nt, Human
caaagaccaaauuccuug

SEQ ID NO: 3821307 - RNA, 21 nt, Human
caaagaccacacauuugugua

SEQ ID NO: 3821308 - RNA, 23 nt, Human
caaagaccuuguguguaugugua

SEQ ID NO: 3821309 - RNA, 19 nt, Human
caaagacuuaguauauuuu

SEQ ID NO: 3821310 - RNA, 20 nt, Human
caaagacuuaguauauuuuc

SEQ ID NO: 3821311 - RNA, 12 nt, Human
caacuguauaua

SEQ ID NO: 3821312 - RNA, 13 nt, Human
caacuguauauau

SEQ ID NO: 3821313 - RNA, 18 nt, Human
caacugucuauuucugcu

SEQ ID NO: 3821314 - RNA, 21 nt, Human
caacugucucgaugcaaugaa

SEQ ID NO: 3821315 - RNA, 20 nt, Human
caacugucucucuucucaga

SEQ ID NO: 3821316 - RNA, 12 nt, Human
caacugugugau

SEQ ID NO: 3821317 - RNA, 19 nt, Human
caacuguugauugcaggaa

SEQ ID NO: 3821318 - RNA, 15 nt, Human
caacuuaacaugggc

SEQ ID NO: 3821319 - RNA, 22 nt, Human
caacuuaauacucaaaugagua

SEQ ID NO: 3821320 - RNA, 15 nt, Human
caacuuaauguucug

SEQ ID NO: 3821321 - RNA, 14 nt, Human
caacuuacuacuga

SEQ ID NO: 3821322 - RNA, 19 nt, Human
caacuuagucaauaagaaa

SEQ ID NO: 3821323 - RNA, 11 nt, Human
caacuuauuaa

SEQ ID NO: 3821324 - RNA, 16 nt, Human
caacuucaagugcaug

SEQ ID NO: 3821325 - RNA, 22 nt, Human
caacuucaagugcaugcucucu

SEQ ID NO: 3821326 - RNA, 18 nt, Human
caacuucagcaguaccua

SEQ ID NO: 3821327 - RNA, 19 nt, Human
aucucaaauucucaaccua

SEQ ID NO: 3821328 - RNA, 17 nt, Human
aucucaaauuguaauua

SEQ ID NO: 3821329 - RNA, 19 nt, Human
aucucaaauuguaauuaau

SEQ ID NO: 3821330 - RNA, 15 nt, Human
aucucaacaggccuc

SEQ ID NO: 3821331 - RNA, 18 nt, Human
aucucaaggaaucuuuaa

SEQ ID NO: 3821332 - RNA, 13 nt, Human
aucucaauccugc

SEQ ID NO: 3821333 - RNA, 18 nt, Human
aucucaaugaagccagcu

SEQ ID NO: 3821334 - RNA, 14 nt, Human
aucucaauucuucc

SEQ ID NO: 3821335 - RNA, 13 nt, Human
aucucaccccauc

SEQ ID NO: 3821336 - RNA, 16 nt, Human
aucucaccccauccca

SEQ ID NO: 3821337 - RNA, 12 nt, Human
aucucacucugc

SEQ ID NO: 3821338 - RNA, 18 nt, Human
aucucacuugugccaaca

SEQ ID NO: 3821339 - RNA, 16 nt, Human
aucucagaaagugccu

SEQ ID NO: 3821340 - RNA, 18 nt, Human
aucucagaaagugccuga

SEQ ID NO: 3821341 - RNA, 17 nt, Human
aucucagauauuugcac

SEQ ID NO: 3821342 - RNA, 19 nt, Human
aucucagaucacugcaacc

SEQ ID NO: 3821343 - RNA, 18 nt, Human
aucucagauguuaaaaua

SEQ ID NO: 3821344 - RNA, 11 nt, Human
aucucagccca

SEQ ID NO: 3821345 - RNA, 17 nt, Human
aucucagcccugcaacu

SEQ ID NO: 3821346 - RNA, 13 nt, Human
aucucagcucacu

SEQ ID NO: 3821347 - RNA, 17 nt, Human
aucucaggccaccugcc

SEQ ID NO: 3821348 - RNA, 20 nt, Human
aucucaggccaccugccccc

SEQ ID NO: 3821349 - RNA, 14 nt, Human
aucucaggccagag

SEQ ID NO: 3821350 - RNA, 17 nt, Human
aucucaggccagagcca

SEQ ID NO: 3821351 - RNA, 18 nt, Human
aucucagggaagcccagc

SEQ ID NO: 3821352 - RNA, 23 nt, Human
aucucagggaagcccagcuccag

SEQ ID NO: 3821353 - RNA, 16 nt, Human
aucucagggccugguc

SEQ ID NO: 3821354 - RNA, 20 nt, Human
aucucaggggcuguuugagg

SEQ ID NO: 3821355 - RNA, 14 nt, Human
aucucaguccucaa

SEQ ID NO: 3821356 - RNA, 14 nt, Human
aucucagugaagaa

SEQ ID NO: 3821357 - RNA, 17 nt, Human
aucucagugaagaauac

SEQ ID NO: 3821358 - RNA, 20 nt, Human
aucucagugaagaauacuuc

SEQ ID NO: 3821359 - RNA, 14 nt, Human
aucucagugcuuuc

SEQ ID NO: 3821360 - RNA, 15 nt, Human
aucucagugcuuucc

SEQ ID NO: 3821361 - RNA, 15 nt, Human
aucucauaccucuga

SEQ ID NO: 3821362 - RNA, 17 nt, Human
aucucauagguugccaa

SEQ ID NO: 3821363 - RNA, 23 nt, Human
aucucauagguugccaauaauac

SEQ ID NO: 3821364 - RNA, 16 nt, Human
aucucaucaacaaaga

SEQ ID NO: 3821365 - RNA, 19 nt, Human
aucucaucaugucuauugu

SEQ ID NO: 3821366 - RNA, 15 nt, Human
aucucaucuaucuca

SEQ ID NO: 3821367 - RNA, 23 nt, Human
aucucaugccccuggcugggacg

SEQ ID NO: 3821368 - RNA, 22 nt, Human
aucucauggagaagcagaaaua

SEQ ID NO: 3821369 - RNA, 24 nt, Human
aucucauggagaagcagaaauaca

SEQ ID NO: 3821370 - RNA, 16 nt, Human
aucucauguaucaucu

SEQ ID NO: 3821371 - RNA, 16 nt, Human
aucucauugcuuacaa

SEQ ID NO: 3821372 - RNA, 17 nt, Human
aucucauugcuuacaag

SEQ ID NO: 3821373 - RNA, 15 nt, Human
aucucauuggacccu

SEQ ID NO: 3821374 - RNA, 19 nt, Human
aucucauuggacccuucca

SEQ ID NO: 3821375 - RNA, 20 nt, Human
aucuccaaaauaaaacuuuu

SEQ ID NO: 3821376 - RNA, 14 nt, Human
aucuccaagaaugc

SEQ ID NO: 3821377 - RNA, 15 nt, Human
aucuccaagcagcuu

SEQ ID NO: 3821378 - RNA, 17 nt, Human
aucuccaagcagcuuag

SEQ ID NO: 3821379 - RNA, 16 nt, Human
aucuccaaggaccagg

SEQ ID NO: 3821380 - RNA, 15 nt, Human
aucuccacccccagc

SEQ ID NO: 3821381 - RNA, 22 nt, Human
aucuccacccccagcugcuugu

SEQ ID NO: 3821382 - RNA, 12 nt, Human
aucuccaggauu

SEQ ID NO: 3821383 - RNA, 20 nt, Human
aucuccaggauugaagagca

SEQ ID NO: 3821384 - RNA, 16 nt, Human
aucuccauaaacauga

SEQ ID NO: 3821385 - RNA, 17 nt, Human
aucuccauggcuuccuc

SEQ ID NO: 3821386 - RNA, 18 nt, Human
aucucccaccuagcagca

SEQ ID NO: 3821387 - RNA, 17 nt, Human
aucucccauuuuggaau

SEQ ID NO: 3821388 - RNA, 14 nt, Human
aucuccccacucua

SEQ ID NO: 3821389 - RNA, 13 nt, Human
aucucccccagcc

SEQ ID NO: 3821390 - RNA, 22 nt, Human
aucucccucgaacccacacugc

SEQ ID NO: 3821391 - RNA, 14 nt, Human
aucucccugccucc

SEQ ID NO: 3821392 - RNA, 19 nt, Human
aucucccugccuccugccg

SEQ ID NO: 3821393 - RNA, 20 nt, Human
aucucccugccuggccccca

SEQ ID NO: 3821394 - RNA, 21 nt, Human
aucucccuggugcuuaugcuc

SEQ ID NO: 3821395 - RNA, 20 nt, Human
aucuccgucaacucauauuu

SEQ ID NO: 3821396 - RNA, 17 nt, Human
aucuccuagggcuaugg

SEQ ID NO: 3821397 - RNA, 17 nt, Human
aucuccuauaaucuguc

SEQ ID NO: 3821398 - RNA, 18 nt, Human
aucuccuauuuuuuuaaa

SEQ ID NO: 3821399 - RNA, 20 nt, Human
aucuccuauuuuuuuaaaau

SEQ ID NO: 3821400 - RNA, 19 nt, Human
aucuccucaaguccccaag

SEQ ID NO: 3821401 - RNA, 16 nt, Human
aucuccugccuuccuc

SEQ ID NO: 3821402 - RNA, 16 nt, Human
aucuccuugucuuuuu

SEQ ID NO: 3821403 - RNA, 15 nt, Human
aucuccuuucaggga

SEQ ID NO: 3821404 - RNA, 18 nt, Human
aucuccuuuguauucugu

SEQ ID NO: 3821405 - RNA, 20 nt, Human
aucucgccaccccuccuucc

SEQ ID NO: 3821406 - RNA, 21 nt, Human
aucucgccaccccuccuuccu

SEQ ID NO: 3821407 - RNA, 19 nt, Human
aucucggagcaucccggag

SEQ ID NO: 3821408 - RNA, 14 nt, Human
aucucggcucacug

SEQ ID NO: 3821409 - RNA, 16 nt, Human
aucucggcucacugca

SEQ ID NO: 3821410 - RNA, 15 nt, Human
aucucguauagaagu

SEQ ID NO: 3821411 - RNA, 13 nt, Human
aucucguuucaaa

SEQ ID NO: 3821412 - RNA, 14 nt, Human
aucucguuucaaaa

SEQ ID NO: 3821413 - RNA, 22 nt, Human
aucucguuuuucuucuuaagac

SEQ ID NO: 3821414 - RNA, 15 nt, Human
aucucuaauauggca

SEQ ID NO: 3821415 - RNA, 17 nt, Human
aucucuaccuucucccc

SEQ ID NO: 3821416 - RNA, 21 nt, Human
aucucuacgcaaaaaauaacu

SEQ ID NO: 3821417 - RNA, 20 nt, Human
aucucuacuaaaaauacaaa

SEQ ID NO: 3821418 - RNA, 13 nt, Human
aucucuauacugc

SEQ ID NO: 3821419 - RNA, 21 nt, Human
aucucuauauaaaaacaaaaa

SEQ ID NO: 3821420 - RNA, 17 nt, Human
aucucuauuauuggaaa

SEQ ID NO: 3821421 - RNA, 17 nt, Human
aucucuauuccccaccc

SEQ ID NO: 3821422 - RNA, 14 nt, Human
aucucuauuuaaua

SEQ ID NO: 3821423 - RNA, 16 nt, Human
aucucuauuuaauauu

SEQ ID NO: 3821424 - RNA, 19 nt, Human
aucucuauuuaauauuuau

SEQ ID NO: 3821425 - RNA, 14 nt, Human
aucucucaaaacuu

SEQ ID NO: 3821426 - RNA, 16 nt, Human
aucucucaaaucuguu

SEQ ID NO: 3821427 - RNA, 13 nt, Human
aucucucaggagc

SEQ ID NO: 3821428 - RNA, 16 nt, Human
aucucucaggagcaca

SEQ ID NO: 3821429 - RNA, 23 nt, Human
aucucucaggagcacaggcagcu

SEQ ID NO: 3821430 - RNA, 17 nt, Human
aucucucauccuccagu

SEQ ID NO: 3821431 - RNA, 14 nt, Human
aucucuccacugug

SEQ ID NO: 3821432 - RNA, 19 nt, Human
aucucuccacuuucagcug

SEQ ID NO: 3821433 - RNA, 14 nt, Human
aucucucccucccc

SEQ ID NO: 3821434 - RNA, 20 nt, Human
aucucuccuccaagacacug

SEQ ID NO: 3821435 - RNA, 14 nt, Human
aucucucgugauug

SEQ ID NO: 3821436 - RNA, 16 nt, Human
aucucucugcagcugc

SEQ ID NO: 3821437 - RNA, 19 nt, Human
aucucucugcagcugccgg

SEQ ID NO: 3821438 - RNA, 14 nt, Human
aucucucugcccaa

SEQ ID NO: 3821439 - RNA, 12 nt, Human
aucucucuggcc

SEQ ID NO: 3821440 - RNA, 16 nt, Human
aucucugaacuucagc

SEQ ID NO: 3821441 - RNA, 17 nt, Human
aucucugaacuucagcu

SEQ ID NO: 3821442 - RNA, 16 nt, Human
aucucugaagcauguu

SEQ ID NO: 3821443 - RNA, 18 nt, Human
aucucugaagccacaaau

SEQ ID NO: 3821444 - RNA, 19 nt, Human
aucucugaagccacaaaua

SEQ ID NO: 3821445 - RNA, 20 nt, Human
aucucugaguucuguguauu

SEQ ID NO: 3821446 - RNA, 23 nt, Human
aucucugcacccuggggccugga

SEQ ID NO: 3821447 - RNA, 22 nt, Human
aucucugggcuggaugagcucc

SEQ ID NO: 3821448 - RNA, 13 nt, Human
aucucuguaaagc

SEQ ID NO: 3821449 - RNA, 18 nt, Human
aucucuguaaagcuaaaa

SEQ ID NO: 3821450 - RNA, 17 nt, Human
aucucugucccauuccc

SEQ ID NO: 3821451 - RNA, 22 nt, Human
aucucugucccauucccuggga

SEQ ID NO: 3821452 - RNA, 14 nt, Human
aucucugugccuuc

SEQ ID NO: 3821453 - RNA, 20 nt, Human
aucucuguuauguacuguac

SEQ ID NO: 3821454 - RNA, 18 nt, Human
aucucuuagcuccccucc

SEQ ID NO: 3821455 - RNA, 23 nt, Human
aucucuuagcuccccuccaaccu

SEQ ID NO: 3821456 - RNA, 17 nt, Human
caauggaaaccucacgc

SEQ ID NO: 3821457 - RNA, 16 nt, Human
caauggaaacugaaug

SEQ ID NO: 3821458 - RNA, 17 nt, Human
caauggaagauuugccc

SEQ ID NO: 3821459 - RNA, 19 nt, Human
caauggacaagcaguggau

SEQ ID NO: 3821460 - RNA, 20 nt, Human
caauggagacugucucaaga

SEQ ID NO: 3821461 - RNA, 19 nt, Human
caauggauuugaugcuguu

SEQ ID NO: 3821462 - RNA, 19 nt, Human
caauggcgcagugccucug

SEQ ID NO: 3821463 - RNA, 20 nt, Human
caauggcgcagugccucugg

SEQ ID NO: 3821464 - RNA, 23 nt, Human
caauggcuaauucccagagugug

SEQ ID NO: 3821465 - RNA, 19 nt, Human
caauggcuaccuaaaaaga

SEQ ID NO: 3821466 - RNA, 18 nt, Human
caauggcuuacuccagga

SEQ ID NO: 3821467 - RNA, 23 nt, Human
caaugggagcugaggccacacuc

SEQ ID NO: 3821468 - RNA, 17 nt, Human
caaugggcacugggaug

SEQ ID NO: 3821469 - RNA, 23 nt, Human
caauggguuuuucccuguacagu

SEQ ID NO: 3821470 - RNA, 15 nt, Human
caaugguaauuauaa

SEQ ID NO: 3821471 - RNA, 17 nt, Human
caaugguaguuucugug

SEQ ID NO: 3821472 - RNA, 23 nt, Human
caaugguguuuuucuuguaaaug

SEQ ID NO: 3821473 - RNA, 13 nt, Human
caaugguuugcaa

SEQ ID NO: 3821474 - RNA, 17 nt, Human
caaugguuuuuaaauuu

SEQ ID NO: 3821475 - RNA, 14 nt, Human
caauguaaauauuu

SEQ ID NO: 3821476 - RNA, 19 nt, Human
caauguaaauauuuuaaag

SEQ ID NO: 3821477 - RNA, 12 nt, Human
caauguaauuau

SEQ ID NO: 3821478 - RNA, 14 nt, Human
caauguaauuauuu

SEQ ID NO: 3821479 - RNA, 17 nt, Human
caauguacccaccgggc

SEQ ID NO: 3821480 - RNA, 19 nt, Human
caauguagaggggaaaaga

SEQ ID NO: 3821481 - RNA, 14 nt, Human
caaugucacuuaaa

SEQ ID NO: 3821482 - RNA, 16 nt, Human
caaugucaggaacaga

SEQ ID NO: 3821483 - RNA, 21 nt, Human
caaugucaggaacagaaggau

SEQ ID NO: 3821484 - RNA, 16 nt, Human
caaugucugagugaac

SEQ ID NO: 3821485 - RNA, 20 nt, Human
caaugucugagugaaccugu

SEQ ID NO: 3821486 - RNA, 13 nt, Human
caaugucugcagc

SEQ ID NO: 3821487 - RNA, 17 nt, Human
caaugucugcagcccug

SEQ ID NO: 3821488 - RNA, 13 nt, Human
caaugucuggaga

SEQ ID NO: 3821489 - RNA, 23 nt, Human
caaugucuugaugcaugcacugu

SEQ ID NO: 3821490 - RNA, 19 nt, Human
caaugugaaaagaaaaaug

SEQ ID NO: 3821491 - RNA, 15 nt, Human
caaugugaacuuuau

SEQ ID NO: 3821492 - RNA, 20 nt, Human
caagagcugcccuccuuguc

SEQ ID NO: 3821493 - RNA, 17 nt, Human
caagagcuuaacagugu

SEQ ID NO: 3821494 - RNA, 12 nt, Human
caagaggaauga

SEQ ID NO: 3821495 - RNA, 14 nt, Human
caagaggagccccc

SEQ ID NO: 3821496 - RNA, 16 nt, Human
caagaggcuccugucc

SEQ ID NO: 3821497 - RNA, 14 nt, Human
caagaggcugcagc

SEQ ID NO: 3821498 - RNA, 12 nt, Human
caagaggcuggu

SEQ ID NO: 3821499 - RNA, 13 nt, Human
caagaggcugguu

SEQ ID NO: 3821500 - RNA, 19 nt, Human
caagagggacgccuggggg

SEQ ID NO: 3821501 - RNA, 14 nt, Human
caagagggcacugg

SEQ ID NO: 3821502 - RNA, 17 nt, Human
caagagggcacuggugg

SEQ ID NO: 3821503 - RNA, 19 nt, Human
caagagggcacugguggcc

SEQ ID NO: 3821504 - RNA, 14 nt, Human
caagagggggugga

SEQ ID NO: 3821505 - RNA, 15 nt, Human
caagaggggguggag

SEQ ID NO: 3821506 - RNA, 18 nt, Human
caagaggggguggagggg

SEQ ID NO: 3821507 - RNA, 19 nt, Human
caagagguuuggcuccugc

SEQ ID NO: 3821508 - RNA, 19 nt, Human
caagaguaguuauauaauu

SEQ ID NO: 3821509 - RNA, 19 nt, Human
caagagugaauucccucac

SEQ ID NO: 3821510 - RNA, 17 nt, Human
caagaguggccccaccu

SEQ ID NO: 3821511 - RNA, 18 nt, Human
caagaguggccccaccug

SEQ ID NO: 3821512 - RNA, 21 nt, Human
caagaguggccccaccuggcc

SEQ ID NO: 3821513 - RNA, 23 nt, Human
caagaguggccccaccuggcccu

SEQ ID NO: 3821514 - RNA, 14 nt, Human
caagauaaacauua

SEQ ID NO: 3821515 - RNA, 15 nt, Human
caagauaaacauuau

SEQ ID NO: 3821516 - RNA, 16 nt, Human
caagauaacugagaau

SEQ ID NO: 3821517 - RNA, 16 nt, Human
caagauaccuaaaaga

SEQ ID NO: 3821518 - RNA, 12 nt, Human
caagauagaaag

SEQ ID NO: 3821519 - RNA, 19 nt, Human
caagauauuguacauaaaa

SEQ ID NO: 3821520 - RNA, 17 nt, Human
caagaucaaaaaggcuu

SEQ ID NO: 3821521 - RNA, 13 nt, Human
caagaucccauuu

SEQ ID NO: 3821522 - RNA, 19 nt, Human
caagauccugucuuuaagg

SEQ ID NO: 3821523 - RNA, 12 nt, Human
caagaucuuuca

SEQ ID NO: 3821524 - RNA, 20 nt, Human
caagaugaaauuccauuugu

SEQ ID NO: 3821525 - RNA, 20 nt, Human
caagaugccaucuguguccu

SEQ ID NO: 3821526 - RNA, 16 nt, Human
caagauggcacagggc

SEQ ID NO: 3821527 - RNA, 15 nt, Human
caagauggcccaucc

SEQ ID NO: 3821528 - RNA, 18 nt, Human
caagaugggggcagggcu

SEQ ID NO: 3821529 - RNA, 19 nt, Human
caagauguccuccuuguuc

SEQ ID NO: 3821530 - RNA, 21 nt, Human
caagauguccuccuuguucua

SEQ ID NO: 3821531 - RNA, 12 nt, Human
caagaugugaau

SEQ ID NO: 3821532 - RNA, 13 nt, Human
caagaugugaauu

SEQ ID NO: 3821533 - RNA, 14 nt, Human
caagaugugaauua

SEQ ID NO: 3821534 - RNA, 18 nt, Human
caagaugugaauuauuga

SEQ ID NO: 3821535 - RNA, 23 nt, Human
caagaugugaauuauugacacug

SEQ ID NO: 3821536 - RNA, 12 nt, Human
caagauuagaag

SEQ ID NO: 3821537 - RNA, 20 nt, Human
caagauuagaagcugaaaac

SEQ ID NO: 3821538 - RNA, 17 nt, Human
caagauucacaccugac

SEQ ID NO: 3821539 - RNA, 13 nt, Human
caagauucccaga

SEQ ID NO: 3821540 - RNA, 16 nt, Human
caagauucccagagac

SEQ ID NO: 3821541 - RNA, 14 nt, Human
caagauucccagga

SEQ ID NO: 3821542 - RNA, 19 nt, Human
caagauuccggauccuaag

SEQ ID NO: 3821543 - RNA, 22 nt, Human
caagauuccggauccuaagcau

SEQ ID NO: 3821544 - RNA, 17 nt, Human
caagauugagcucucug

SEQ ID NO: 3821545 - RNA, 23 nt, Human
caagauugagcucucugcccuug

SEQ ID NO: 3821546 - RNA, 21 nt, Human
caagauugcuuaaaauagcaa

SEQ ID NO: 3821547 - RNA, 21 nt, Human
caagauugguguuuuuuucua

SEQ ID NO: 3821548 - RNA, 20 nt, Human
caagauugugucccauuccc

SEQ ID NO: 3821549 - RNA, 18 nt, Human
caagauuuuaaagacaug

SEQ ID NO: 3821550 - RNA, 19 nt, Human
caagauuuuccuuuuuuau

SEQ ID NO: 3821551 - RNA, 21 nt, Human
caagauuuuccuuuuuuauac

SEQ ID NO: 3821552 - RNA, 17 nt, Human
caagauuuucuacuuuu

SEQ ID NO: 3821553 - RNA, 14 nt, Human
caagcaaauguuac

SEQ ID NO: 3821554 - RNA, 18 nt, Human
caagcaacacagaggaau

SEQ ID NO: 3821555 - RNA, 19 nt, Human
caagcaaccuggguccaaa

SEQ ID NO: 3821556 - RNA, 14 nt, Human
caagcaagacugag

SEQ ID NO: 3821557 - RNA, 14 nt, Human
caagcaaguauuag

SEQ ID NO: 3821558 - RNA, 14 nt, Human
caagcaauccuccc

SEQ ID NO: 3821559 - RNA, 17 nt, Human
caagcacagugccugca

SEQ ID NO: 3821560 - RNA, 16 nt, Human
caagcacagugguggc

SEQ ID NO: 3821561 - RNA, 20 nt, Human
caagcacagugguggcaggg

SEQ ID NO: 3821562 - RNA, 21 nt, Human
caagcacagugguggcagggc

SEQ ID NO: 3821563 - RNA, 18 nt, Human
caagcaccuagccucgcu

SEQ ID NO: 3821564 - RNA, 15 nt, Human
caagcaccuccugcc

SEQ ID NO: 3821565 - RNA, 12 nt, Human
caagcacugugc

SEQ ID NO: 3821566 - RNA, 11 nt, Human
caagcagagga

SEQ ID NO: 3821567 - RNA, 14 nt, Human
caagcagaggacca

SEQ ID NO: 3821568 - RNA, 19 nt, Human
caagcagauacugcugugu

SEQ ID NO: 3821569 - RNA, 12 nt, Human
caagcagauucg

SEQ ID NO: 3821570 - RNA, 12 nt, Human
caagcagccaag

SEQ ID NO: 3821571 - RNA, 14 nt, Human
caagcagccaagcu

SEQ ID NO: 3821572 - RNA, 21 nt, Human
caagcagccugagcaacucuu

SEQ ID NO: 3821573 - RNA, 18 nt, Human
caagcagcuuagaguugg

SEQ ID NO: 3821574 - RNA, 12 nt, Human
caagcaggaagc

SEQ ID NO: 3821575 - RNA, 13 nt, Human
caagcaggaagcu

SEQ ID NO: 3821576 - RNA, 15 nt, Human
caagcaggaagcuca

SEQ ID NO: 3821577 - RNA, 16 nt, Human
caagcaggaagcucag

SEQ ID NO: 3821578 - RNA, 17 nt, Human
caagcaggaagcucaga

SEQ ID NO: 3821579 - RNA, 21 nt, Human
caagcaggaagcucagacugg

SEQ ID NO: 3821580 - RNA, 12 nt, Human
caagcagggagg

SEQ ID NO: 3821581 - RNA, 15 nt, Human
caagcagguuagaga

SEQ ID NO: 3821582 - RNA, 16 nt, Human
caagcaguagacaagc

SEQ ID NO: 3821583 - RNA, 16 nt, Human
caagcagucgugccug

SEQ ID NO: 3821584 - RNA, 21 nt, Human
caagcagucgugccugugucc

SEQ ID NO: 3821585 - RNA, 17 nt, Human
caagcauauaaaauuuu

SEQ ID NO: 3821586 - RNA, 17 nt, Human
caagcaucuccugagga

SEQ ID NO: 3821587 - RNA, 22 nt, Human
caagcauggucccacaucccug

SEQ ID NO: 3821588 - RNA, 17 nt, Human
caagcauucagaagaaa

SEQ ID NO: 3821589 - RNA, 14 nt, Human
caagcauucugucu

SEQ ID NO: 3821590 - RNA, 19 nt, Human
caagcauuuagauguauag

SEQ ID NO: 3821591 - RNA, 23 nt, Human
caagccaaaguggcauguuuugu

SEQ ID NO: 3821592 - RNA, 14 nt, Human
caagccaagcagcc

SEQ ID NO: 3821593 - RNA, 15 nt, Human
caagccaauccccuc

SEQ ID NO: 3821594 - RNA, 19 nt, Human
caagccacaagucuuccag

SEQ ID NO: 3821595 - RNA, 20 nt, Human
caagccacaagucuuccaga

SEQ ID NO: 3821596 - RNA, 15 nt, Human
caagccagaggcugg

SEQ ID NO: 3821597 - RNA, 12 nt, Human
caagccagcaag

SEQ ID NO: 3821598 - RNA, 22 nt, Human
caagccagcgggaauggcagcu

SEQ ID NO: 3821599 - RNA, 17 nt, Human
caagccauguauaaaug

SEQ ID NO: 3821600 - RNA, 17 nt, Human
caagcccagcacugcuu

SEQ ID NO: 3821601 - RNA, 14 nt, Human
caagcccaggaggg

SEQ ID NO: 3821602 - RNA, 19 nt, Human
caauauuuuccaugaaaau

SEQ ID NO: 3821603 - RNA, 22 nt, Human
caauauuuuccaugaaaaugca

SEQ ID NO: 3821604 - RNA, 20 nt, Human
caauauuuucuuuaaugcuu

SEQ ID NO: 3821605 - RNA, 23 nt, Human
caauauuuuuauaucaugcaaaa

SEQ ID NO: 3821606 - RNA, 18 nt, Human
caaucaaaggaaaauagu

SEQ ID NO: 3821607 - RNA, 17 nt, Human
caaucaaauaaguauuu

SEQ ID NO: 3821608 - RNA, 23 nt, Human
caaucaaauaaguauuuauaaua

SEQ ID NO: 3821609 - RNA, 12 nt, Human
caaucaacacua

SEQ ID NO: 3821610 - RNA, 17 nt, Human
caaucaagauaaaggac

SEQ ID NO: 3821611 - RNA, 18 nt, Human
caaucaagguuauaauuu

SEQ ID NO: 3821612 - RNA, 21 nt, Human
caaucaauaacagccgcucca

SEQ ID NO: 3821613 - RNA, 18 nt, Human
caaucagcuccuuccugg

SEQ ID NO: 3821614 - RNA, 16 nt, Human
caaucaguauaauucu

SEQ ID NO: 3821615 - RNA, 19 nt, Human
caaucaguauguauucuuu

SEQ ID NO: 3821616 - RNA, 16 nt, Human
caaucaguccccuccc

SEQ ID NO: 3821617 - RNA, 13 nt, Human
caaucauauguga

SEQ ID NO: 3821618 - RNA, 15 nt, Human
caaucauaugugauc

SEQ ID NO: 3821619 - RNA, 17 nt, Human
caaucauaugugaucug

SEQ ID NO: 3821620 - RNA, 15 nt, Human
caaucaucuguguga

SEQ ID NO: 3821621 - RNA, 13 nt, Human
caaucaugucagu

SEQ ID NO: 3821622 - RNA, 15 nt, Human
caaucauuguacagu

SEQ ID NO: 3821623 - RNA, 21 nt, Human
caaucauuguacaguuuguuu

SEQ ID NO: 3821624 - RNA, 23 nt, Human
caaucauuguacaguuuguuuac

SEQ ID NO: 3821625 - RNA, 14 nt, Human
caaucauuucucac

SEQ ID NO: 3821626 - RNA, 18 nt, Human
caauccagauggugggau

SEQ ID NO: 3821627 - RNA, 16 nt, Human
caauccagguacgcac

SEQ ID NO: 3821628 - RNA, 20 nt, Human
caauccaguggacuucgcag

SEQ ID NO: 3821629 - RNA, 17 nt, Human
caauccauguaagguau

SEQ ID NO: 3821630 - RNA, 21 nt, Human
caauccauguuaguuuuuacu

SEQ ID NO: 3821631 - RNA, 18 nt, Human
caaucccaaaagucacca

SEQ ID NO: 3821632 - RNA, 16 nt, Human
caaucccaccaacccu

SEQ ID NO: 3821633 - RNA, 22 nt, Human
caaucccaccaacccucagagc

SEQ ID NO: 3821634 - RNA, 14 nt, Human
caauccccuccuug

SEQ ID NO: 3821635 - RNA, 20 nt, Human
caaucccuuuauuacccccu

SEQ ID NO: 3821636 - RNA, 14 nt, Human
caauccucacuggg

SEQ ID NO: 3821637 - RNA, 18 nt, Human
caauccucacuggguggg

SEQ ID NO: 3821638 - RNA, 22 nt, Human
caauccucccacuucagccucc

SEQ ID NO: 3821639 - RNA, 15 nt, Human
caauccucccagaaa

SEQ ID NO: 3821640 - RNA, 19 nt, Human
caauccuggcucuguggcu

SEQ ID NO: 3821641 - RNA, 18 nt, Human
caauccugugggugaaga

SEQ ID NO: 3821642 - RNA, 22 nt, Human
caauccugugugguuuagugua

SEQ ID NO: 3821643 - RNA, 14 nt, Human
caauccuuacaaau

SEQ ID NO: 3821644 - RNA, 20 nt, Human
caauccuuacaaaugauugc

SEQ ID NO: 3821645 - RNA, 20 nt, Human
caaucuauuaauagcugccu

SEQ ID NO: 3821646 - RNA, 22 nt, Human
caaucuauuaauagcugccuua

SEQ ID NO: 3821647 - RNA, 13 nt, Human
caaucuauuauuu

SEQ ID NO: 3821648 - RNA, 20 nt, Human
caaucucaaauucucaaccu

SEQ ID NO: 3821649 - RNA, 14 nt, Human
caaucucaaggaau

SEQ ID NO: 3821650 - RNA, 20 nt, Human
caaucucaaggaaucuuuaa

SEQ ID NO: 3821651 - RNA, 17 nt, Human
caaucucccgcugcugc

SEQ ID NO: 3821652 - RNA, 18 nt, Human
caaucucggcucacugca

SEQ ID NO: 3821653 - RNA, 22 nt, Human
caaucucguauagaagucuuca

SEQ ID NO: 3821654 - RNA, 22 nt, Human
caaucucuucauuauucucugc

SEQ ID NO: 3821655 - RNA, 17 nt, Human
caaucucuuuuuguuug

SEQ ID NO: 3821656 - RNA, 20 nt, Human
caaucugaagauacaugucu

SEQ ID NO: 3821657 - RNA, 16 nt, Human
caaucuggauucauau

SEQ ID NO: 3821658 - RNA, 20 nt, Human
caaucuggauucauauuuaa

SEQ ID NO: 3821659 - RNA, 18 nt, Human
caaucuguaaaacuaaga

SEQ ID NO: 3821660 - RNA, 15 nt, Human
caaucuguaaacugu

SEQ ID NO: 3821661 - RNA, 14 nt, Human
caaucuuacuuugu

SEQ ID NO: 3821662 - RNA, 16 nt, Human
caaucuuacuuuguaa

SEQ ID NO: 3821663 - RNA, 19 nt, Human
caaucuuacuuuguaaauu

SEQ ID NO: 3821664 - RNA, 23 nt, Human
caaucuuacuuuguaaauucuga

SEQ ID NO: 3821665 - RNA, 15 nt, Human
caaucuucaauccuu

SEQ ID NO: 3821666 - RNA, 12 nt, Human
caaucuuguuuc

SEQ ID NO: 3821667 - RNA, 16 nt, Human
caaucuuugaaagacu

SEQ ID NO: 3821668 - RNA, 19 nt, Human
caaugaaaacucuuugcug

SEQ ID NO: 3821669 - RNA, 18 nt, Human
caaugaaagguacuauau

SEQ ID NO: 3821670 - RNA, 19 nt, Human
caaugaaauauugcuguau

SEQ ID NO: 3821671 - RNA, 19 nt, Human
caaugaaaugaauuaaagu

SEQ ID NO: 3821672 - RNA, 21 nt, Human
caaugaaaugcucuccuuucc

SEQ ID NO: 3821673 - RNA, 17 nt, Human
caaugaaccauaaauuc

SEQ ID NO: 3821674 - RNA, 23 nt, Human
caaugaauuuuauaaucugcagc

SEQ ID NO: 3821675 - RNA, 14 nt, Human
caaugacaaagcag

SEQ ID NO: 3821676 - RNA, 15 nt, Human
caaugacaaagcaga

SEQ ID NO: 3821677 - RNA, 14 nt, Human
caaugacacagucu

SEQ ID NO: 3821678 - RNA, 19 nt, Human
caaugacacagucuuggcu

SEQ ID NO: 3821679 - RNA, 19 nt, Human
caaugacaucucaggggcc

SEQ ID NO: 3821680 - RNA, 12 nt, Human
caaugacaugaa

SEQ ID NO: 3821681 - RNA, 20 nt, Human
caaugacaugaauuuuagcu

SEQ ID NO: 3821682 - RNA, 13 nt, Human
caaugaccuuuca

SEQ ID NO: 3821683 - RNA, 14 nt, Human
caaugaccuuucaa

SEQ ID NO: 3821684 - RNA, 15 nt, Human
caaugaccuuucaau

SEQ ID NO: 3821685 - RNA, 16 nt, Human
caaugaccuuucaaua

SEQ ID NO: 3821686 - RNA, 14 nt, Human
caaugacuaauucu

SEQ ID NO: 3821687 - RNA, 21 nt, Human
caaugacuaauucuugcauau

SEQ ID NO: 3821688 - RNA, 17 nt, Human
caaugacuuacuguaca

SEQ ID NO: 3821689 - RNA, 19 nt, Human
caaugagagcauaauuuaa

SEQ ID NO: 3821690 - RNA, 16 nt, Human
caaugagcuuucugaa

SEQ ID NO: 3821691 - RNA, 23 nt, Human
caaugagcuuucugaacagcugg

SEQ ID NO: 3821692 - RNA, 18 nt, Human
caaugaggucugaaaugg

SEQ ID NO: 3821693 - RNA, 20 nt, Human
caaugauauauggauaaugc

SEQ ID NO: 3821694 - RNA, 14 nt, Human
caaugaucuagguu

SEQ ID NO: 3821695 - RNA, 17 nt, Human
caaugaucuagguuuaa

SEQ ID NO: 3821696 - RNA, 20 nt, Human
caaugaucuagguuuaacuc

SEQ ID NO: 3821697 - RNA, 14 nt, Human
augaagaaaauacu

SEQ ID NO: 3821698 - RNA, 17 nt, Human
augaagaaaauacuuaa

SEQ ID NO: 3821699 - RNA, 20 nt, Human
augaagaaaauacuuaaaug

SEQ ID NO: 3821700 - RNA, 21 nt, Human
augaagaaguugauaugccuu

SEQ ID NO: 3821701 - RNA, 14 nt, Human
augaagaauagaaa

SEQ ID NO: 3821702 - RNA, 16 nt, Human
augaagaauagaaaca

SEQ ID NO: 3821703 - RNA, 13 nt, Human
augaagaauuuaa

SEQ ID NO: 3821704 - RNA, 14 nt, Human
augaagacaaaaca

SEQ ID NO: 3821705 - RNA, 16 nt, Human
augaagacaggacagu

SEQ ID NO: 3821706 - RNA, 21 nt, Human
augaagacaggacagugcuuc

SEQ ID NO: 3821707 - RNA, 21 nt, Human
augaagacuguuaaaugaaac

SEQ ID NO: 3821708 - RNA, 22 nt, Human
augaagacuguuaaaugaaacc

SEQ ID NO: 3821709 - RNA, 16 nt, Human
augaagagauuuuuca

SEQ ID NO: 3821710 - RNA, 11 nt, Human
augaagaggag

SEQ ID NO: 3821711 - RNA, 22 nt, Human
augaagauauuugcuuuaauaa

SEQ ID NO: 3821712 - RNA, 21 nt, Human
augaagaugucuaauaguuau

SEQ ID NO: 3821713 - RNA, 22 nt, Human
augaagauguuucaaaaaaucu

SEQ ID NO: 3821714 - RNA, 19 nt, Human
augaagauucuccugugcu

SEQ ID NO: 3821715 - RNA, 14 nt, Human
augaagcaaugcuu

SEQ ID NO: 3821716 - RNA, 15 nt, Human
augaagcaaugcuuc

SEQ ID NO: 3821717 - RNA, 15 nt, Human
augaagcagcuuuaa

SEQ ID NO: 3821718 - RNA, 13 nt, Human
augaagcaguauu

SEQ ID NO: 3821719 - RNA, 17 nt, Human
augaagccacagcccag

SEQ ID NO: 3821720 - RNA, 12 nt, Human
augaagccagcu

SEQ ID NO: 3821721 - RNA, 15 nt, Human
augaagcccaaguga

SEQ ID NO: 3821722 - RNA, 16 nt, Human
augaagcccaauaaac

SEQ ID NO: 3821723 - RNA, 23 nt, Human
augaagccgaccuuagauuuagu

SEQ ID NO: 3821724 - RNA, 20 nt, Human
augaagccuccuuagaaaaa

SEQ ID NO: 3821725 - RNA, 11 nt, Human
augaagccuuu

SEQ ID NO: 3821726 - RNA, 23 nt, Human
augaagcucaccuguugcuuaca

SEQ ID NO: 3821727 - RNA, 15 nt, Human
augaagcuuguguau

SEQ ID NO: 3821728 - RNA, 21 nt, Human
augaaggagaggcaacaucca

SEQ ID NO: 3821729 - RNA, 17 nt, Human
augaaggcuuuuggucu

SEQ ID NO: 3821730 - RNA, 15 nt, Human
augaagggcccgaga

SEQ ID NO: 3821731 - RNA, 17 nt, Human
augaagguuuuuguaaa

SEQ ID NO: 3821732 - RNA, 21 nt, Human
augaagguuuuuguaaagauu

SEQ ID NO: 3821733 - RNA, 21 nt, Human
augaaguaaagaacugcacau

SEQ ID NO: 3821734 - RNA, 14 nt, Human
augaaguaauaugc

SEQ ID NO: 3821735 - RNA, 21 nt, Human
augaaguacucauacauguua

SEQ ID NO: 3821736 - RNA, 17 nt, Human
augaaguaucuaaaagu

SEQ ID NO: 3821737 - RNA, 20 nt, Human
augaaguccaagcauuuaga

SEQ ID NO: 3821738 - RNA, 23 nt, Human
augaaguccaagcauuuagaugu

SEQ ID NO: 3821739 - RNA, 18 nt, Human
augaagucguugugaggg

SEQ ID NO: 3821740 - RNA, 14 nt, Human
augaagucucugaa

SEQ ID NO: 3821741 - RNA, 20 nt, Human
augaagugcgugaauguaug

SEQ ID NO: 3821742 - RNA, 18 nt, Human
augaaguguuagauagaa

SEQ ID NO: 3821743 - RNA, 17 nt, Human
augaaguuacuuucuua

SEQ ID NO: 3821744 - RNA, 16 nt, Human
augaaguugaaaauca

SEQ ID NO: 3821745 - RNA, 14 nt, Human
augaaguuuauaca

SEQ ID NO: 3821746 - RNA, 11 nt, Human
augagaaacug

SEQ ID NO: 3821747 - RNA, 14 nt, Human
augagaaagccuuc

SEQ ID NO: 3821748 - RNA, 15 nt, Human
augagaaauacaaaa

SEQ ID NO: 3821749 - RNA, 22 nt, Human
augagaaauacaaaaauacuca

SEQ ID NO: 3821750 - RNA, 15 nt, Human
augagaaaucuaaaa

SEQ ID NO: 3821751 - RNA, 18 nt, Human
augagaaaucuaaaaaac

SEQ ID NO: 3821752 - RNA, 14 nt, Human
augagaacaaagcu

SEQ ID NO: 3821753 - RNA, 16 nt, Human
augagaacaaagcugu

SEQ ID NO: 3821754 - RNA, 13 nt, Human
augagaacagacu

SEQ ID NO: 3821755 - RNA, 17 nt, Human
augagaacagauaaaga

SEQ ID NO: 3821756 - RNA, 22 nt, Human
augagaacagauaaagauugug

SEQ ID NO: 3821757 - RNA, 23 nt, Human
augagaagaaaauggaaccaggc

SEQ ID NO: 3821758 - RNA, 15 nt, Human
augagaagagggccu

SEQ ID NO: 3821759 - RNA, 16 nt, Human
augagaagagggccug

SEQ ID NO: 3821760 - RNA, 16 nt, Human
augagaaggaacuucc

SEQ ID NO: 3821761 - RNA, 22 nt, Human
augagaaguugauauagaacag

SEQ ID NO: 3821762 - RNA, 19 nt, Human
augagaauucagcugcccc

SEQ ID NO: 3821763 - RNA, 18 nt, Human
augagacaggaccuagga

SEQ ID NO: 3821764 - RNA, 18 nt, Human
augagaccacuguuauca

SEQ ID NO: 3821765 - RNA, 17 nt, Human
augagacucuagggucc

SEQ ID NO: 3821766 - RNA, 17 nt, Human
augagagacacacugaa

SEQ ID NO: 3821767 - RNA, 16 nt, Human
augagagcauaauuua

SEQ ID NO: 3821768 - RNA, 14 nt, Human
augagagcccagag

SEQ ID NO: 3821769 - RNA, 18 nt, Human
augagagcccagagguaa

SEQ ID NO: 3821770 - RNA, 14 nt, Human
augagaggaaauca

SEQ ID NO: 3821771 - RNA, 15 nt, Human
augagaggaaaucac

SEQ ID NO: 3821772 - RNA, 18 nt, Human
augagagggcaguguuuc

SEQ ID NO: 3821773 - RNA, 20 nt, Human
augagaguuuuggaugcagu

SEQ ID NO: 3821774 - RNA, 21 nt, Human
augagaguuuuggaugcagug

SEQ ID NO: 3821775 - RNA, 15 nt, Human
augagauagaagaug

SEQ ID NO: 3821776 - RNA, 18 nt, Human
augagaucaggcucugcc

SEQ ID NO: 3821777 - RNA, 23 nt, Human
augagaucuaagccuuuccauaa

SEQ ID NO: 3821778 - RNA, 14 nt, Human
augagaugcuggcu

SEQ ID NO: 3821779 - RNA, 15 nt, Human
augagaugcuggcuu

SEQ ID NO: 3821780 - RNA, 14 nt, Human
augagaugugugga

SEQ ID NO: 3821781 - RNA, 13 nt, Human
augagauugaauu

SEQ ID NO: 3821782 - RNA, 16 nt, Human
augagauuuuuaaaaa

SEQ ID NO: 3821783 - RNA, 20 nt, Human
augagauuuuuaaaaaauau

SEQ ID NO: 3821784 - RNA, 16 nt, Human
augagcaucaggccag

SEQ ID NO: 3821785 - RNA, 17 nt, Human
augagcaucaggccagg

SEQ ID NO: 3821786 - RNA, 18 nt, Human
augagcaucaggccaggc

SEQ ID NO: 3821787 - RNA, 20 nt, Human
augagcaucaggccaggccc

SEQ ID NO: 3821788 - RNA, 22 nt, Human
augagcaucaggccaggcccuc

SEQ ID NO: 3821789 - RNA, 15 nt, Human
augagcaucccagga

SEQ ID NO: 3821790 - RNA, 16 nt, Human
augagcauccugagcc

SEQ ID NO: 3821791 - RNA, 20 nt, Human
augagcauccugagccccgc

SEQ ID NO: 3821792 - RNA, 14 nt, Human
augagcauguuuag

SEQ ID NO: 3821793 - RNA, 23 nt, Human
augagcauuggauacagcaguag

SEQ ID NO: 3821794 - RNA, 18 nt, Human
augagccaccgcgcccag

SEQ ID NO: 3821795 - RNA, 11 nt, Human
augagccagac

SEQ ID NO: 3821796 - RNA, 14 nt, Human
augagcccagagaa

SEQ ID NO: 3821797 - RNA, 14 nt, Human
augagcccuaaaaa

SEQ ID NO: 3821798 - RNA, 15 nt, Human
augagccgcccaagg

SEQ ID NO: 3821799 - RNA, 16 nt, Human
augagccuacgcugaa

SEQ ID NO: 3821800 - RNA, 16 nt, Human
augagccucagcaucc

SEQ ID NO: 3821801 - RNA, 18 nt, Human
augagccucagcauccug

SEQ ID NO: 3821802 - RNA, 12 nt, Human
augagccugcug

SEQ ID NO: 3821803 - RNA, 20 nt, Human
augagccugcuggaagccca

SEQ ID NO: 3821804 - RNA, 14 nt, Human
augagccuggcaag

SEQ ID NO: 3821805 - RNA, 20 nt, Human
augagcuauuuccauuccag

SEQ ID NO: 3821806 - RNA, 23 nt, Human
augagcuauuuccauuccagaau

SEQ ID NO: 3821807 - RNA, 14 nt, Human
augagcuccagacc

SEQ ID NO: 3821808 - RNA, 15 nt, Human
augagcuccagaccc

SEQ ID NO: 3821809 - RNA, 17 nt, Human
augagcuccagaccccc

SEQ ID NO: 3821810 - RNA, 20 nt, Human
augagcucccacaagccuga

SEQ ID NO: 3821811 - RNA, 14 nt, Human
augagcuccucuuc

SEQ ID NO: 3821812 - RNA, 21 nt, Human
augagcucgcauuugucaaug

SEQ ID NO: 3821813 - RNA, 15 nt, Human
augagcucuacccag

SEQ ID NO: 3821814 - RNA, 18 nt, Human
augagcucuacccagggc

SEQ ID NO: 3821815 - RNA, 19 nt, Human
augagcucuacccagggcc

SEQ ID NO: 3821816 - RNA, 19 nt, Human
augagcucugaaaucuucc

SEQ ID NO: 3821817 - RNA, 16 nt, Human
augagcucuucauguu

SEQ ID NO: 3821818 - RNA, 12 nt, Human
augagcugaggg

SEQ ID NO: 3821819 - RNA, 17 nt, Human
augagcugaucugcgga

SEQ ID NO: 3821820 - RNA, 22 nt, Human
augagcugugcacaaaguggca

SEQ ID NO: 3821821 - RNA, 14 nt, Human
augagcuuaagaaa

SEQ ID NO: 3821822 - RNA, 15 nt, Human
augagcuugauuaaa

SEQ ID NO: 3821823 - RNA, 18 nt, Human
augagcuuuauguaauaa

SEQ ID NO: 3821824 - RNA, 22 nt, Human
augagcuuuauguaauaaugug

SEQ ID NO: 3821825 - RNA, 14 nt, Human
augagcuuucugaa

SEQ ID NO: 3821826 - RNA, 23 nt, Human
augagcuuucugaacagcuggug

SEQ ID NO: 3821827 - RNA, 19 nt, Human
augaggaaaauucuuaaaa

SEQ ID NO: 3821828 - RNA, 16 nt, Human
augaggaacuguagau

SEQ ID NO: 3821829 - RNA, 15 nt, Human
augaggaauguauau

SEQ ID NO: 3821830 - RNA, 18 nt, Human
augaggagagaaaauaua

SEQ ID NO: 3821831 - RNA, 19 nt, Human
augaggagagaaaauauau

SEQ ID NO: 3821832 - RNA, 21 nt, Human
augaggaggaugucccugggc

SEQ ID NO: 3821833 - RNA, 15 nt, Human
augaggaggggaggg

SEQ ID NO: 3821834 - RNA, 19 nt, Human
augaggagugaacauuugg

SEQ ID NO: 3821835 - RNA, 20 nt, Human
augaggaugcagagucagca

SEQ ID NO: 3821836 - RNA, 18 nt, Human
augaggcaaccugauugu

SEQ ID NO: 3821837 - RNA, 13 nt, Human
augaggcauuugu

SEQ ID NO: 3821838 - RNA, 21 nt, Human
augaggcauuuguuugaacug

SEQ ID NO: 3821839 - RNA, 12 nt, Human
augaggccagac

SEQ ID NO: 3821840 - RNA, 21 nt, Human
augaggccauggacucugucc

SEQ ID NO: 3821841 - RNA, 18 nt, Human
augaggccucaguggacu

SEQ ID NO: 3821842 - RNA, 22 nt, Human
augaggccucuuggaccucugc

SEQ ID NO: 3821843 - RNA, 16 nt, Human
augagggagaugccau

SEQ ID NO: 3821844 - RNA, 17 nt, Human
augagggaugggccugg

SEQ ID NO: 3821845 - RNA, 18 nt, Human
augagggcagcagccagc

SEQ ID NO: 3821846 - RNA, 19 nt, Human
augagggcagcagccagcc

SEQ ID NO: 3821847 - RNA, 23 nt, Human
augagggcagcagccagcccugc

SEQ ID NO: 3821848 - RNA, 11 nt, Human
augaggggaga

SEQ ID NO: 3821849 - RNA, 14 nt, Human
augaggggagagga

SEQ ID NO: 3821850 - RNA, 14 nt, Human
augagggggcucag

SEQ ID NO: 3821851 - RNA, 15 nt, Human
augagguacugagag

SEQ ID NO: 3821852 - RNA, 15 nt, Human
augaggucccaggca

SEQ ID NO: 3821853 - RNA, 17 nt, Human
augaggucccaggcaga

SEQ ID NO: 3821854 - RNA, 18 nt, Human
augaggucccaggcagag

SEQ ID NO: 3821855 - RNA, 13 nt, Human
augaggucuguuu

SEQ ID NO: 3821856 - RNA, 17 nt, Human
augaggugcugggaggg

SEQ ID NO: 3821857 - RNA, 19 nt, Human
augaggugcugggagggau

SEQ ID NO: 3821858 - RNA, 22 nt, Human
augagguucaacuguugauugc

SEQ ID NO: 3821859 - RNA, 18 nt, Human
augagguugcuuacuaag

SEQ ID NO: 3821860 - RNA, 17 nt, Human
augaguaacauuugcug

SEQ ID NO: 3821861 - RNA, 14 nt, Human
augaguacaaaugc

SEQ ID NO: 3821862 - RNA, 13 nt, Human
caauuccucuggg

SEQ ID NO: 3821863 - RNA, 13 nt, Human
caauuccugggcc

SEQ ID NO: 3821864 - RNA, 16 nt, Human
caauucgauauccgga

SEQ ID NO: 3821865 - RNA, 16 nt, Human
caauucuagucauaua

SEQ ID NO: 3821866 - RNA, 23 nt, Human
caauucucauuugucacacacuu

SEQ ID NO: 3821867 - RNA, 19 nt, Human
caauucucccgggacucug

SEQ ID NO: 3821868 - RNA, 20 nt, Human
caauucucccgggacucugc

SEQ ID NO: 3821869 - RNA, 13 nt, Human
caauucuccugcc

SEQ ID NO: 3821870 - RNA, 15 nt, Human
caauucuccugccuc

SEQ ID NO: 3821871 - RNA, 16 nt, Human
caauucuccugccuca

SEQ ID NO: 3821872 - RNA, 17 nt, Human
caauucuccugccucag

SEQ ID NO: 3821873 - RNA, 17 nt, Human
caauucuccugccuuug

SEQ ID NO: 3821874 - RNA, 17 nt, Human
caauucuucccuaucuu

SEQ ID NO: 3821875 - RNA, 21 nt, Human
caauucuucccuaucuuugcc

SEQ ID NO: 3821876 - RNA, 16 nt, Human
caauucuuuauacaac

SEQ ID NO: 3821877 - RNA, 19 nt, Human
caauucuuuauacaacagu

SEQ ID NO: 3821878 - RNA, 15 nt, Human
caauugaaguaaacu

SEQ ID NO: 3821879 - RNA, 19 nt, Human
caauugacugucacuguuc

SEQ ID NO: 3821880 - RNA, 21 nt, Human
caauugcacgcggagugaguu

SEQ ID NO: 3821881 - RNA, 23 nt, Human
caauugcacgcggagugaguuuu

SEQ ID NO: 3821882 - RNA, 15 nt, Human
caauugcaucuccca

SEQ ID NO: 3821883 - RNA, 17 nt, Human
caauugcaucucccaga

SEQ ID NO: 3821884 - RNA, 22 nt, Human
caauugcuuugucauauagcug

SEQ ID NO: 3821885 - RNA, 17 nt, Human
caauugggagcugccaa

SEQ ID NO: 3821886 - RNA, 16 nt, Human
caauugguuaaucuuu

SEQ ID NO: 3821887 - RNA, 16 nt, Human
caauugucacuuuuua

SEQ ID NO: 3821888 - RNA, 13 nt, Human
caauugucuuuuu

SEQ ID NO: 3821889 - RNA, 22 nt, Human
caauugugaaaaaauuuacuuu

SEQ ID NO: 3821890 - RNA, 15 nt, Human
caauugugcugccau

SEQ ID NO: 3821891 - RNA, 19 nt, Human
cacagggcagcugggccca

SEQ ID NO: 3821892 - RNA, 23 nt, Human
cacagggcaugccccggccaccu

SEQ ID NO: 3821893 - RNA, 19 nt, Human
cacagggccccagaaggca

SEQ ID NO: 3821894 - RNA, 21 nt, Human
cacagggccuuuggcaggugc

SEQ ID NO: 3821895 - RNA, 13 nt, Human
cacagggcuaaga

SEQ ID NO: 3821896 - RNA, 19 nt, Human
cacaggggaaaagaggagu

SEQ ID NO: 3821897 - RNA, 15 nt, Human
cacagggucccacag

SEQ ID NO: 3821898 - RNA, 18 nt, Human
cacagggucccacagcca

SEQ ID NO: 3821899 - RNA, 14 nt, Human
cacagggucugcac

SEQ ID NO: 3821900 - RNA, 15 nt, Human
cacagggucugcucu

SEQ ID NO: 3821901 - RNA, 17 nt, Human
cacagggucugcucuuu

SEQ ID NO: 3821902 - RNA, 14 nt, Human
cacagggugggccu

SEQ ID NO: 3821903 - RNA, 16 nt, Human
cacagggugggccucg

SEQ ID NO: 3821904 - RNA, 21 nt, Human
cacaggguucaaaaugucugu

SEQ ID NO: 3821905 - RNA, 22 nt, Human
cacaggguugggcccagaucug

SEQ ID NO: 3821906 - RNA, 23 nt, Human
cacaggguugggcccagaucugg

SEQ ID NO: 3821907 - RNA, 23 nt, Human
cacaggucaggggugacacagac

SEQ ID NO: 3821908 - RNA, 15 nt, Human
cacaggucuuuccua

SEQ ID NO: 3821909 - RNA, 19 nt, Human
cacaggugcaacagacuug

SEQ ID NO: 3821910 - RNA, 15 nt, Human
cacaggugcccgcca

SEQ ID NO: 3821911 - RNA, 20 nt, Human
cacagguggugucacugucc

SEQ ID NO: 3821912 - RNA, 21 nt, Human
cacagguggugucacuguccc

SEQ ID NO: 3821913 - RNA, 16 nt, Human
cacaggugugguguaa

SEQ ID NO: 3821914 - RNA, 21 nt, Human
cacagguuggaagagaaucac

SEQ ID NO: 3821915 - RNA, 14 nt, Human
cacaguaaaaauaa

SEQ ID NO: 3821916 - RNA, 21 nt, Human
cacaguaaaaauggaaacuau

SEQ ID NO: 3821917 - RNA, 18 nt, Human
augcuaagagaaguagaa

SEQ ID NO: 3821918 - RNA, 22 nt, Human
augcuaagagaaguagaaauca

SEQ ID NO: 3821919 - RNA, 21 nt, Human
augcuaagcaagcuaaccuua

SEQ ID NO: 3821920 - RNA, 21 nt, Human
augcuaauauaaguuucuuug

SEQ ID NO: 3821921 - RNA, 17 nt, Human
augcuaauauuaaaagu

SEQ ID NO: 3821922 - RNA, 17 nt, Human
augcuaaucuugugaaa

SEQ ID NO: 3821923 - RNA, 17 nt, Human
augcuaauuuaaagaga

SEQ ID NO: 3821924 - RNA, 17 nt, Human
augcuacacacugcaug

SEQ ID NO: 3821925 - RNA, 16 nt, Human
augcuaccaccagcug

SEQ ID NO: 3821926 - RNA, 14 nt, Human
augcuacgugugau

SEQ ID NO: 3821927 - RNA, 15 nt, Human
augcuacgugugauu

SEQ ID NO: 3821928 - RNA, 19 nt, Human
augcuacgugugauuuuuc

SEQ ID NO: 3821929 - RNA, 22 nt, Human
augcuacgugugauuuuucugg

SEQ ID NO: 3821930 - RNA, 23 nt, Human
augcuacugucucacugaaacau

SEQ ID NO: 3821931 - RNA, 17 nt, Human
augcuagcgcguugccu

SEQ ID NO: 3821932 - RNA, 19 nt, Human
augcuagcgcguugccugu

SEQ ID NO: 3821933 - RNA, 21 nt, Human
augcuaggaugcggaaauccc

SEQ ID NO: 3821934 - RNA, 19 nt, Human
augcuauaacuauguugau

SEQ ID NO: 3821935 - RNA, 14 nt, Human
augcuauugacaau

SEQ ID NO: 3821936 - RNA, 15 nt, Human
augcuauugacaaua

SEQ ID NO: 3821937 - RNA, 17 nt, Human
augcuauugacaauaaa

SEQ ID NO: 3821938 - RNA, 18 nt, Human
augcuauugacaauaaaa

SEQ ID NO: 3821939 - RNA, 20 nt, Human
augcuauuucuauauuuuca

SEQ ID NO: 3821940 - RNA, 21 nt, Human
augcuauuucuauauuuucau

SEQ ID NO: 3821941 - RNA, 13 nt, Human
augcuauuugaac

SEQ ID NO: 3821942 - RNA, 21 nt, Human
augcuauuugcaauuccugcu

SEQ ID NO: 3821943 - RNA, 15 nt, Human
augcucaaagaaauc

SEQ ID NO: 3821944 - RNA, 16 nt, Human
augcucaaguuuuuca

SEQ ID NO: 3821945 - RNA, 17 nt, Human
augcucagaccagcucu

SEQ ID NO: 3821946 - RNA, 18 nt, Human
augcucagcccugacugg

SEQ ID NO: 3821947 - RNA, 13 nt, Human
augcucaggcuac

SEQ ID NO: 3821948 - RNA, 12 nt, Human
augcucaggggc

SEQ ID NO: 3821949 - RNA, 18 nt, Human
augcucagguacagagaa

SEQ ID NO: 3821950 - RNA, 16 nt, Human
augcucauaacggauc

SEQ ID NO: 3821951 - RNA, 19 nt, Human
augcuccaagauucuagau

SEQ ID NO: 3821952 - RNA, 20 nt, Human
augcuccaagauucuagaug

SEQ ID NO: 3821953 - RNA, 17 nt, Human
augcuccagccaacccc

SEQ ID NO: 3821954 - RNA, 18 nt, Human
augcuccagccaaccccu

SEQ ID NO: 3821955 - RNA, 21 nt, Human
augcuccagccaaccccugug

SEQ ID NO: 3821956 - RNA, 13 nt, Human
augcuccagucaa

SEQ ID NO: 3821957 - RNA, 12 nt, Human
augcuccccaca

SEQ ID NO: 3821958 - RNA, 23 nt, Human
augcucccccauccuccccuucc

SEQ ID NO: 3821959 - RNA, 19 nt, Human
augcucccuccccugcccu

SEQ ID NO: 3821960 - RNA, 13 nt, Human
augcuccucuucc

SEQ ID NO: 3821961 - RNA, 14 nt, Human
augcuccucuuccc

SEQ ID NO: 3821962 - RNA, 16 nt, Human
augcuccucuucccca

SEQ ID NO: 3821963 - RNA, 14 nt, Human
augcuccuggccca

SEQ ID NO: 3821964 - RNA, 19 nt, Human
augcuccuggcccacugca

SEQ ID NO: 3821965 - RNA, 22 nt, Human
augcucucacuguuuguuuuua

SEQ ID NO: 3821966 - RNA, 19 nt, Human
augcucuccaaaccacuuu

SEQ ID NO: 3821967 - RNA, 19 nt, Human
augcucucucaaauuguca

SEQ ID NO: 3821968 - RNA, 16 nt, Human
augcucuuaauugcca

SEQ ID NO: 3821969 - RNA, 19 nt, Human
augcucuuaauugccaccu

SEQ ID NO: 3821970 - RNA, 15 nt, Human
augcucuuauuucau

SEQ ID NO: 3821971 - RNA, 17 nt, Human
augcucuuauuucauca

SEQ ID NO: 3821972 - RNA, 15 nt, Human
augcucuucugugga

SEQ ID NO: 3821973 - RNA, 21 nt, Human
augcucuugaccuuguagaga

SEQ ID NO: 3821974 - RNA, 12 nt, Human
augcucuuuccc

SEQ ID NO: 3821975 - RNA, 21 nt, Human
augcucuuucccacccagccu

SEQ ID NO: 3821976 - RNA, 23 nt, Human
augcucuuucccacccagccugg

SEQ ID NO: 3821977 - RNA, 18 nt, Human
augcucuuuuuuacucau

SEQ ID NO: 3821978 - RNA, 22 nt, Human
augcucuuuuuuacucauugaa

SEQ ID NO: 3821979 - RNA, 23 nt, Human
augcucuuuuuuacucauugaaa

SEQ ID NO: 3821980 - RNA, 12 nt, Human
augcugaaaaug

SEQ ID NO: 3821981 - RNA, 22 nt, Human
augcugaaaauugccuuucugu

SEQ ID NO: 3821982 - RNA, 19 nt, Human
augcugacauucaccugcc

SEQ ID NO: 3821983 - RNA, 20 nt, Human
augcugacauucaccugccc

SEQ ID NO: 3821984 - RNA, 19 nt, Human
augcugacccaugggcagg

SEQ ID NO: 3821985 - RNA, 19 nt, Human
augcugacuguacuccucc

SEQ ID NO: 3821986 - RNA, 20 nt, Human
augcugacuguacuccuccc

SEQ ID NO: 3821987 - RNA, 21 nt, Human
augcugagauuacagguguga

SEQ ID NO: 3821988 - RNA, 17 nt, Human
augcugaggguguuucu

SEQ ID NO: 3821989 - RNA, 14 nt, Human
augcugagucuccc

SEQ ID NO: 3821990 - RNA, 14 nt, Human
augcugaucaucgc

SEQ ID NO: 3821991 - RNA, 17 nt, Human
augcugaugaaucacug

SEQ ID NO: 3821992 - RNA, 19 nt, Human
augcugaugaaucacuguu

SEQ ID NO: 3821993 - RNA, 21 nt, Human
augcugaugaaucacuguuuu

SEQ ID NO: 3821994 - RNA, 16 nt, Human
augcugauguccucac

SEQ ID NO: 3821995 - RNA, 12 nt, Human
augcugauguuc

SEQ ID NO: 3821996 - RNA, 15 nt, Human
augcugauguucagu

SEQ ID NO: 3821997 - RNA, 20 nt, Human
augcugauguucaguguaau

SEQ ID NO: 3821998 - RNA, 15 nt, Human
augcugcaacaaaau

SEQ ID NO: 3821999 - RNA, 19 nt, Human
augcugcacagauggauuu

SEQ ID NO: 3822000 - RNA, 23 nt, Human
augcugcauuuuaauuuuaacca

SEQ ID NO: 3822001 - RNA, 17 nt, Human
augcugccaauauccua

SEQ ID NO: 3822002 - RNA, 19 nt, Human
augcugccaauauccuaau

SEQ ID NO: 3822003 - RNA, 21 nt, Human
augcugccaauauccuaauaa

SEQ ID NO: 3822004 - RNA, 23 nt, Human
augcugccaauauccuaauaaaa

SEQ ID NO: 3822005 - RNA, 15 nt, Human
augcugccuccagaa

SEQ ID NO: 3822006 - RNA, 23 nt, Human
augcugccuucccaugaaucugu

SEQ ID NO: 3822007 - RNA, 18 nt, Human
augcugccuuuucuuuaa

SEQ ID NO: 3822008 - RNA, 18 nt, Human
augcugcgcccuucccca

SEQ ID NO: 3822009 - RNA, 19 nt, Human
augcugcuaauucaaagcu

SEQ ID NO: 3822010 - RNA, 13 nt, Human
augcugcuacuua

SEQ ID NO: 3822011 - RNA, 15 nt, Human
augcugcugccccug

SEQ ID NO: 3822012 - RNA, 12 nt, Human
augcugcuggcc

SEQ ID NO: 3822013 - RNA, 12 nt, Human
augcugcuuuaa

SEQ ID NO: 3822014 - RNA, 17 nt, Human
augcugcuuuccccugu

SEQ ID NO: 3822015 - RNA, 18 nt, Human
augcugcuuuccccugug

SEQ ID NO: 3822016 - RNA, 23 nt, Human
augcugcuuuccccuguggggau

SEQ ID NO: 3822017 - RNA, 11 nt, Human
augcugcuuuu

SEQ ID NO: 3822018 - RNA, 18 nt, Human
augcugcuuuuauaucug

SEQ ID NO: 3822019 - RNA, 17 nt, Human
augcuggaaccugcaaa

SEQ ID NO: 3822020 - RNA, 16 nt, Human
augcuggacuggaggc

SEQ ID NO: 3822021 - RNA, 12 nt, Human
augcuggagaag

SEQ ID NO: 3822022 - RNA, 15 nt, Human
augcuggagaagaga

SEQ ID NO: 3822023 - RNA, 15 nt, Human
augcuggagagguua

SEQ ID NO: 3822024 - RNA, 13 nt, Human
augcuggagccug

SEQ ID NO: 3822025 - RNA, 14 nt, Human
augcuggagccugu

SEQ ID NO: 3822026 - RNA, 16 nt, Human
augcuggagccugugu

SEQ ID NO: 3822027 - RNA, 11 nt, Human
augcuggagcg

SEQ ID NO: 3822028 - RNA, 17 nt, Human
augcuggaugucugcca

SEQ ID NO: 3822029 - RNA, 22 nt, Human
augcuggaugucugccaauuuu

SEQ ID NO: 3822030 - RNA, 14 nt, Human
augcuggccagccu

SEQ ID NO: 3822031 - RNA, 17 nt, Human
augcuggccagccuggg

SEQ ID NO: 3822032 - RNA, 21 nt, Human
augcuggcccagggcccagag

SEQ ID NO: 3822033 - RNA, 23 nt, Human
augcuggcccagggcccagagcc

SEQ ID NO: 3822034 - RNA, 20 nt, Human
augcuggccuugccacacuc

SEQ ID NO: 3822035 - RNA, 15 nt, Human
caccugauguguaca

SEQ ID NO: 3822036 - RNA, 16 nt, Human
caccugauucaacuaa

SEQ ID NO: 3822037 - RNA, 17 nt, Human
caccugauucaacuaaa

SEQ ID NO: 3822038 - RNA, 21 nt, Human
caccugauucaacuaaaaaaa

SEQ ID NO: 3822039 - RNA, 17 nt, Human
caccugcaccucccccc

SEQ ID NO: 3822040 - RNA, 16 nt, Human
caccugcacuaacaga

SEQ ID NO: 3822041 - RNA, 23 nt, Human
caccugcacuuaaggcacucugu

SEQ ID NO: 3822042 - RNA, 16 nt, Human
caccugcagccucccu

SEQ ID NO: 3822043 - RNA, 14 nt, Human
caccugcagcuccc

SEQ ID NO: 3822044 - RNA, 15 nt, Human
caccugcagcucccu

SEQ ID NO: 3822045 - RNA, 14 nt, Human
caccugcaggucac

SEQ ID NO: 3822046 - RNA, 22 nt, Human
caccugcauccguaguucccug

SEQ ID NO: 3822047 - RNA, 15 nt, Human
caccugcauucuucc

SEQ ID NO: 3822048 - RNA, 20 nt, Human
caccugccacccugggccug

SEQ ID NO: 3822049 - RNA, 18 nt, Human
caccugccacuaggcugg

SEQ ID NO: 3822050 - RNA, 16 nt, Human
caccugccagggacag

SEQ ID NO: 3822051 - RNA, 17 nt, Human
caccugccauuugcacc

SEQ ID NO: 3822052 - RNA, 18 nt, Human
caccugcccaaccugcuc

SEQ ID NO: 3822053 - RNA, 22 nt, Human
caccugcccaucacaggguugg

SEQ ID NO: 3822054 - RNA, 16 nt, Human
caccugccccaacucu

SEQ ID NO: 3822055 - RNA, 14 nt, Human
caccugcccccugg

SEQ ID NO: 3822056 - RNA, 13 nt, Human
caccugcccccuu

SEQ ID NO: 3822057 - RNA, 21 nt, Human
caccugcccccuucucccaca

SEQ ID NO: 3822058 - RNA, 15 nt, Human
caccugccccucaac

SEQ ID NO: 3822059 - RNA, 14 nt, Human
caccugcccugccc

SEQ ID NO: 3822060 - RNA, 21 nt, Human
caccugcccugcccugccacc

SEQ ID NO: 3822061 - RNA, 23 nt, Human
caccugccgaccucguccucccc

SEQ ID NO: 3822062 - RNA, 14 nt, Human
caccugccuccucg

SEQ ID NO: 3822063 - RNA, 16 nt, Human
caccugccugcgucuu

SEQ ID NO: 3822064 - RNA, 21 nt, Human
caccugccugcgucuuccgcc

SEQ ID NO: 3822065 - RNA, 11 nt, Human
caccugccugg

SEQ ID NO: 3822066 - RNA, 12 nt, Human
caccugccuggc

SEQ ID NO: 3822067 - RNA, 13 nt, Human
caccugccuggcc

SEQ ID NO: 3822068 - RNA, 16 nt, Human
caccugccuggccggc

SEQ ID NO: 3822069 - RNA, 20 nt, Human
caccugccuggccggccagc

SEQ ID NO: 3822070 - RNA, 21 nt, Human
caccugccuggccggccagcc

SEQ ID NO: 3822071 - RNA, 18 nt, Human
caccugccuguuaggaga

SEQ ID NO: 3822072 - RNA, 19 nt, Human
caccugccuguugggccag

SEQ ID NO: 3822073 - RNA, 17 nt, Human
caccugcggugcuaucu

SEQ ID NO: 3822074 - RNA, 13 nt, Human
caccugcucccag

SEQ ID NO: 3822075 - RNA, 14 nt, Human
caccugcucccagg

SEQ ID NO: 3822076 - RNA, 23 nt, Human
caccugcugagaaaacaugccuc

SEQ ID NO: 3822077 - RNA, 19 nt, Human
augcuuaaagaauucaaau

SEQ ID NO: 3822078 - RNA, 20 nt, Human
augcuuaaagaauucaaauu

SEQ ID NO: 3822079 - RNA, 20 nt, Human
augcuuaacauacccgccua

SEQ ID NO: 3822080 - RNA, 19 nt, Human
augcuuacggccaucucuu

SEQ ID NO: 3822081 - RNA, 15 nt, Human
augcuuagucccuca

SEQ ID NO: 3822082 - RNA, 19 nt, Human
augcuuauguuagaaauaa

SEQ ID NO: 3822083 - RNA, 22 nt, Human
augcuuauuccaugacugcuug

SEQ ID NO: 3822084 - RNA, 16 nt, Human
augcuuauuuuaaaau

SEQ ID NO: 3822085 - RNA, 20 nt, Human
augcuucaaaguccacauua

SEQ ID NO: 3822086 - RNA, 12 nt, Human
augcuucauaca

SEQ ID NO: 3822087 - RNA, 19 nt, Human
augcuucauacagggaugg

SEQ ID NO: 3822088 - RNA, 23 nt, Human
augcuucauacagggaugguguu

SEQ ID NO: 3822089 - RNA, 19 nt, Human
augcuucaucauucccucu

SEQ ID NO: 3822090 - RNA, 21 nt, Human
augcuucaugaaaauccuacc

SEQ ID NO: 3822091 - RNA, 17 nt, Human
augcuucauucaauauu

SEQ ID NO: 3822092 - RNA, 16 nt, Human
augcuucauuuguaug

SEQ ID NO: 3822093 - RNA, 14 nt, Human
augcuuccagaaac

SEQ ID NO: 3822094 - RNA, 15 nt, Human
augcuuccuagaagu

SEQ ID NO: 3822095 - RNA, 15 nt, Human
augcuuccucccagc

SEQ ID NO: 3822096 - RNA, 15 nt, Human
augcuucuaaguaaa

SEQ ID NO: 3822097 - RNA, 16 nt, Human
augcuucuagaguuuu

SEQ ID NO: 3822098 - RNA, 13 nt, Human
augcuucucacug

SEQ ID NO: 3822099 - RNA, 19 nt, Human
augcuucucaucuugugaa

SEQ ID NO: 3822100 - RNA, 21 nt, Human
augcuucucaucuugugaaau

SEQ ID NO: 3822101 - RNA, 17 nt, Human
augcuucugacuucaua

SEQ ID NO: 3822102 - RNA, 21 nt, Human
augcuucuguuuuauaauuuu

SEQ ID NO: 3822103 - RNA, 20 nt, Human
augcuucuucagagacuccu

SEQ ID NO: 3822104 - RNA, 15 nt, Human
augcuucuuccuuac

SEQ ID NO: 3822105 - RNA, 15 nt, Human
augcuucuucucagg

SEQ ID NO: 3822106 - RNA, 12 nt, Human
augcuucuuuaa

SEQ ID NO: 3822107 - RNA, 14 nt, Human
augcuucuuuaaaa

SEQ ID NO: 3822108 - RNA, 17 nt, Human
augcuugcauaagagcu

SEQ ID NO: 3822109 - RNA, 16 nt, Human
augcuugccuagggcc

SEQ ID NO: 3822110 - RNA, 20 nt, Human
augcuugccuagggccuggu

SEQ ID NO: 3822111 - RNA, 21 nt, Human
augcuugccuagggccugguc

SEQ ID NO: 3822112 - RNA, 18 nt, Human
augcuugcggcaaaagga

SEQ ID NO: 3822113 - RNA, 16 nt, Human
augcuugcugcugauu

SEQ ID NO: 3822114 - RNA, 20 nt, Human
augcuuggaauaucugcugu

SEQ ID NO: 3822115 - RNA, 21 nt, Human
augcuuggaauaucugcugua

SEQ ID NO: 3822116 - RNA, 15 nt, Human
augcuuggcuucuca

SEQ ID NO: 3822117 - RNA, 18 nt, Human
augcuuguaacaagaaaa

SEQ ID NO: 3822118 - RNA, 16 nt, Human
augcuuguacauaaug

SEQ ID NO: 3822119 - RNA, 19 nt, Human
augcuuuaccaaacagcaa

SEQ ID NO: 3822120 - RNA, 14 nt, Human
augcuuuagcuuau

SEQ ID NO: 3822121 - RNA, 18 nt, Human
augcuuuaggauguacag

SEQ ID NO: 3822122 - RNA, 21 nt, Human
augcuuuaggauguacaguua

SEQ ID NO: 3822123 - RNA, 14 nt, Human
augcuuuauuugua

SEQ ID NO: 3822124 - RNA, 15 nt, Human
augcuuuauuuguaa

SEQ ID NO: 3822125 - RNA, 19 nt, Human
augcuuuauuuguaaauuu

SEQ ID NO: 3822126 - RNA, 15 nt, Human
augcuuuccaaaacc

SEQ ID NO: 3822127 - RNA, 23 nt, Human
augcuuuccauauuuuuuuccuu

SEQ ID NO: 3822128 - RNA, 14 nt, Human
augcuuuccuucuu

SEQ ID NO: 3822129 - RNA, 17 nt, Human
augcuuugaaacagaaa

SEQ ID NO: 3822130 - RNA, 18 nt, Human
augcuuugcuuugucugg

SEQ ID NO: 3822131 - RNA, 15 nt, Human
augcuuugugaacaa

SEQ ID NO: 3822132 - RNA, 16 nt, Human
augcuuugugugauug

SEQ ID NO: 3822133 - RNA, 22 nt, Human
augcuuuuugaauguuauuugu

SEQ ID NO: 3822134 - RNA, 21 nt, Human
auggaaaaaccauuugaagug

SEQ ID NO: 3822135 - RNA, 22 nt, Human
auggaaaaaugccaucaaauga

SEQ ID NO: 3822136 - RNA, 17 nt, Human
auggaaaacuuaguuug

SEQ ID NO: 3822137 - RNA, 12 nt, Human
auggaaaaggaa

SEQ ID NO: 3822138 - RNA, 14 nt, Human
auggaaaaggaaga

SEQ ID NO: 3822139 - RNA, 20 nt, Human
auggaaaaggaagacuagag

SEQ ID NO: 3822140 - RNA, 17 nt, Human
auggaaaaucagcugcu

SEQ ID NO: 3822141 - RNA, 20 nt, Human
auggaaaaugccaugaauua

SEQ ID NO: 3822142 - RNA, 22 nt, Human
auggaaacaagaugaaauucca

SEQ ID NO: 3822143 - RNA, 20 nt, Human
auggaaacagaggaccagca

SEQ ID NO: 3822144 - RNA, 13 nt, Human
auggaaaccucac

SEQ ID NO: 3822145 - RNA, 16 nt, Human
auggaaaccugaaaaa

SEQ ID NO: 3822146 - RNA, 13 nt, Human
auggaaacugaau

SEQ ID NO: 3822147 - RNA, 15 nt, Human
auggaaacugaaugc

SEQ ID NO: 3822148 - RNA, 11 nt, Human
auggaaagaau

SEQ ID NO: 3822149 - RNA, 19 nt, Human
auggaaagcuucagugcug

SEQ ID NO: 3822150 - RNA, 19 nt, Human
auggaaaggagaggaaaga

SEQ ID NO: 3822151 - RNA, 23 nt, Human
auggaaaggagccuaggccaggu

SEQ ID NO: 3822152 - RNA, 15 nt, Human
auggaaauauauauu

SEQ ID NO: 3822153 - RNA, 15 nt, Human
auggaaauauuaugc

SEQ ID NO: 3822154 - RNA, 17 nt, Human
auggaaauauuaugcaa

SEQ ID NO: 3822155 - RNA, 22 nt, Human
auggaaauauuaugcaaauucc

SEQ ID NO: 3822156 - RNA, 15 nt, Human
auggaaauuuaaagc

SEQ ID NO: 3822157 - RNA, 16 nt, Human
auggaaauuuugcuau

SEQ ID NO: 3822158 - RNA, 18 nt, Human
auggaacacaaacacauu

SEQ ID NO: 3822159 - RNA, 18 nt, Human
auggaacacucugagacu

SEQ ID NO: 3822160 - RNA, 19 nt, Human
auggaaccgcaggaagcug

SEQ ID NO: 3822161 - RNA, 20 nt, Human
auggaaccgcaggaagcugc

SEQ ID NO: 3822162 - RNA, 14 nt, Human
auggaaccuccuuu

SEQ ID NO: 3822163 - RNA, 21 nt, Human
auggaaccuccuuucucuucu

SEQ ID NO: 3822164 - RNA, 15 nt, Human
auggaacgcguugaa

SEQ ID NO: 3822165 - RNA, 18 nt, Human
auggaacgcguugaaauu

SEQ ID NO: 3822166 - RNA, 22 nt, Human
auggaacucagcugucuguggc

SEQ ID NO: 3822167 - RNA, 21 nt, Human
auggaacucuagggauaguca

SEQ ID NO: 3822168 - RNA, 18 nt, Human
auggaacuucuaauauau

SEQ ID NO: 3822169 - RNA, 13 nt, Human
auggaagaaagua

SEQ ID NO: 3822170 - RNA, 13 nt, Human
auggaagacacau

SEQ ID NO: 3822171 - RNA, 15 nt, Human
auggaagagaaaucu

SEQ ID NO: 3822172 - RNA, 22 nt, Human
auggaagcuuccaguccaaucu

SEQ ID NO: 3822173 - RNA, 16 nt, Human
auggaaggguuugugg

SEQ ID NO: 3822174 - RNA, 17 nt, Human
auggaaguaaagccuca

SEQ ID NO: 3822175 - RNA, 14 nt, Human
auggaauaacaugu

SEQ ID NO: 3822176 - RNA, 16 nt, Human
auggaauaacucugug

SEQ ID NO: 3822177 - RNA, 16 nt, Human
auggaaugcuguguua

SEQ ID NO: 3822178 - RNA, 21 nt, Human
auggaaugcuguguuaaauaa

SEQ ID NO: 3822179 - RNA, 18 nt, Human
auggaauggacauccugu

SEQ ID NO: 3822180 - RNA, 15 nt, Human
caccuugugucugua

SEQ ID NO: 3822181 - RNA, 14 nt, Human
caccuuuaaagugu

SEQ ID NO: 3822182 - RNA, 15 nt, Human
caccuuuagguucuu

SEQ ID NO: 3822183 - RNA, 15 nt, Human
caccuuuauuaaaau

SEQ ID NO: 3822184 - RNA, 14 nt, Human
caccuuuauucugg

SEQ ID NO: 3822185 - RNA, 22 nt, Human
caccuuucagauaacuguuauu

SEQ ID NO: 3822186 - RNA, 14 nt, Human
caccuuucagccca

SEQ ID NO: 3822187 - RNA, 22 nt, Human
caccuuucauaaucuuugcuuu

SEQ ID NO: 3822188 - RNA, 19 nt, Human
caccuuucccaucuuccaa

SEQ ID NO: 3822189 - RNA, 12 nt, Human
caccuuucuagu

SEQ ID NO: 3822190 - RNA, 13 nt, Human
caccuuucuaguu

SEQ ID NO: 3822191 - RNA, 17 nt, Human
caccuuuguccccaccg

SEQ ID NO: 3822192 - RNA, 13 nt, Human
caccuuuguguau

SEQ ID NO: 3822193 - RNA, 17 nt, Human
caccuuuguguauuuuu

SEQ ID NO: 3822194 - RNA, 21 nt, Human
caccuuuguguauuuuucaau

SEQ ID NO: 3822195 - RNA, 21 nt, Human
caccuuuguuuagaacacugg

SEQ ID NO: 3822196 - RNA, 11 nt, Human
caccuuuuaaa

SEQ ID NO: 3822197 - RNA, 19 nt, Human
caccuuuuucauacaaggc

SEQ ID NO: 3822198 - RNA, 21 nt, Human
caccuuuuucauacaaggccc

SEQ ID NO: 3822199 - RNA, 17 nt, Human
caccuuuuuucaacagu

SEQ ID NO: 3822200 - RNA, 12 nt, Human
cacgaaacuugu

SEQ ID NO: 3822201 - RNA, 14 nt, Human
cacgaaacuuguua

SEQ ID NO: 3822202 - RNA, 21 nt, Human
cacgaaacuuguuauugugaa

SEQ ID NO: 3822203 - RNA, 22 nt, Human
cacgaaacuuguuauugugaau

SEQ ID NO: 3822204 - RNA, 13 nt, Human
cacgaaagagaga

SEQ ID NO: 3822205 - RNA, 11 nt, Human
cacgaaagcac

SEQ ID NO: 3822206 - RNA, 14 nt, Human
cacgaaagcacaca

SEQ ID NO: 3822207 - RNA, 17 nt, Human
cacgaaauguuauuuuu

SEQ ID NO: 3822208 - RNA, 18 nt, Human
cacgaacccaccugcuga

SEQ ID NO: 3822209 - RNA, 19 nt, Human
cacgaacuuuagcugcauc

SEQ ID NO: 3822210 - RNA, 15 nt, Human
cacgaaguguugcau

SEQ ID NO: 3822211 - RNA, 16 nt, Human
cacgaaguguugcaug

SEQ ID NO: 3822212 - RNA, 18 nt, Human
cacgaaguguugcaugga

SEQ ID NO: 3822213 - RNA, 19 nt, Human
cacgaauauugcugauggu

SEQ ID NO: 3822214 - RNA, 22 nt, Human
cacgaauauugcugauggugca

SEQ ID NO: 3822215 - RNA, 22 nt, Human
cacgaauuugcuggggaaucuc

SEQ ID NO: 3822216 - RNA, 14 nt, Human
cacgacaguggaug

SEQ ID NO: 3822217 - RNA, 15 nt, Human
cacgaccgccccagu

SEQ ID NO: 3822218 - RNA, 17 nt, Human
cacgacugcccggcagg

SEQ ID NO: 3822219 - RNA, 16 nt, Human
cacgacuggccagggc

SEQ ID NO: 3822220 - RNA, 17 nt, Human
cacgacuggccagggcc

SEQ ID NO: 3822221 - RNA, 18 nt, Human
cacgagagcgcagcaucc

SEQ ID NO: 3822222 - RNA, 22 nt, Human
cacgagcaggcuacugucagcu

SEQ ID NO: 3822223 - RNA, 11 nt, Human
cacgagggcug

SEQ ID NO: 3822224 - RNA, 15 nt, Human
cacgaggucaggaga

SEQ ID NO: 3822225 - RNA, 20 nt, Human
cacgauaaauaaucggccca

SEQ ID NO: 3822226 - RNA, 15 nt, Human
cacgaugaaaaacuu

SEQ ID NO: 3822227 - RNA, 15 nt, Human
cacgauguggcccug

SEQ ID NO: 3822228 - RNA, 22 nt, Human
cacgauguggcccuggccugcu

SEQ ID NO: 3822229 - RNA, 12 nt, Human
cacgauuucugu

SEQ ID NO: 3822230 - RNA, 17 nt, Human
cacgauuuucuccagcu

SEQ ID NO: 3822231 - RNA, 19 nt, Human
cacgauuuucuccagcuca

SEQ ID NO: 3822232 - RNA, 15 nt, Human
cacgcaacuugaaau

SEQ ID NO: 3822233 - RNA, 13 nt, Human
cacgcacacacac

SEQ ID NO: 3822234 - RNA, 15 nt, Human
cacgcacacacacac

SEQ ID NO: 3822235 - RNA, 20 nt, Human
cacgcacacacacacacagg

SEQ ID NO: 3822236 - RNA, 18 nt, Human
cacgcacauauacacaca

SEQ ID NO: 3822237 - RNA, 13 nt, Human
cacgcaccugggu

SEQ ID NO: 3822238 - RNA, 21 nt, Human
caccaggcugagguccugauc

SEQ ID NO: 3822239 - RNA, 21 nt, Human
caccaggcugcucagggcugg

SEQ ID NO: 3822240 - RNA, 23 nt, Human
caccaggcuggcgcagccaaggc

SEQ ID NO: 3822241 - RNA, 16 nt, Human
caccagggcaucucug

SEQ ID NO: 3822242 - RNA, 19 nt, Human
caccagggcaucucugggc

SEQ ID NO: 3822243 - RNA, 23 nt, Human
caccagggcaucucugggcugga

SEQ ID NO: 3822244 - RNA, 16 nt, Human
caccagggccaaaagc

SEQ ID NO: 3822245 - RNA, 12 nt, Human
caccaggggcag

SEQ ID NO: 3822246 - RNA, 17 nt, Human
caccaggggcaggcaca

SEQ ID NO: 3822247 - RNA, 21 nt, Human
caccaggggcaggcacagcac

SEQ ID NO: 3822248 - RNA, 20 nt, Human
caccagguagaacgccaggg

SEQ ID NO: 3822249 - RNA, 19 nt, Human
caccaggugccuuucaaau

SEQ ID NO: 3822250 - RNA, 15 nt, Human
caccagucacugucc

SEQ ID NO: 3822251 - RNA, 17 nt, Human
caccagucacugucccu

SEQ ID NO: 3822252 - RNA, 16 nt, Human
caccagucauuuuuca

SEQ ID NO: 3822253 - RNA, 22 nt, Human
caccagugaaugaaagucuugu

SEQ ID NO: 3822254 - RNA, 21 nt, Human
caccagugacuuuuucuaaga

SEQ ID NO: 3822255 - RNA, 12 nt, Human
caccagugccuc

SEQ ID NO: 3822256 - RNA, 17 nt, Human
caccagugccucucccu

SEQ ID NO: 3822257 - RNA, 16 nt, Human
caccaguguccccucc

SEQ ID NO: 3822258 - RNA, 18 nt, Human
caccaguguccccuccac

SEQ ID NO: 3822259 - RNA, 18 nt, Human
caccaguuccuuucaaug

SEQ ID NO: 3822260 - RNA, 17 nt, Human
caccauagguagaaugu

SEQ ID NO: 3822261 - RNA, 13 nt, Human
caccauaugaauu

SEQ ID NO: 3822262 - RNA, 21 nt, Human
caccauauuaccacagacaua

SEQ ID NO: 3822263 - RNA, 15 nt, Human
caccaucacagcuug

SEQ ID NO: 3822264 - RNA, 16 nt, Human
caccaucacagcuugu

SEQ ID NO: 3822265 - RNA, 21 nt, Human
caccaucacagcuuguuuugg

SEQ ID NO: 3822266 - RNA, 17 nt, Human
caccaucaugucuggcu

SEQ ID NO: 3822267 - RNA, 15 nt, Human
caccaucccuuuuug

SEQ ID NO: 3822268 - RNA, 16 nt, Human
caccaucccuuuuuga

SEQ ID NO: 3822269 - RNA, 21 nt, Human
caccaucccuuuuugaagugu

SEQ ID NO: 3822270 - RNA, 17 nt, Human
caccaucgcuggccccu

SEQ ID NO: 3822271 - RNA, 14 nt, Human
caccaucucaggcc

SEQ ID NO: 3822272 - RNA, 20 nt, Human
caccaucucaggccaccugc

SEQ ID NO: 3822273 - RNA, 12 nt, Human
caccaucuuuua

SEQ ID NO: 3822274 - RNA, 22 nt, Human
caccaugagggaagaauaaaga

SEQ ID NO: 3822275 - RNA, 19 nt, Human
caccaugauuccuuuaaca

SEQ ID NO: 3822276 - RNA, 21 nt, Human
caccaugcagugccccuagcu

SEQ ID NO: 3822277 - RNA, 19 nt, Human
caccaugcugcuggggaag

SEQ ID NO: 3822278 - RNA, 22 nt, Human
caccaugcugcuggggaagaca

SEQ ID NO: 3822279 - RNA, 14 nt, Human
caccaugcuuccag

SEQ ID NO: 3822280 - RNA, 19 nt, Human
caccauguaaaacaaaaaa

SEQ ID NO: 3822281 - RNA, 18 nt, Human
caccauguacauagcuug

SEQ ID NO: 3822282 - RNA, 18 nt, Human
caccauguuugagcucag

SEQ ID NO: 3822283 - RNA, 22 nt, Human
caccauguuugagcucagaccc

SEQ ID NO: 3822284 - RNA, 23 nt, Human
caccauguuugagcucagacccc

SEQ ID NO: 3822285 - RNA, 17 nt, Human
caccauuauaaugaauu

SEQ ID NO: 3822286 - RNA, 22 nt, Human
caccauucaggaaccuggacca

SEQ ID NO: 3822287 - RNA, 13 nt, Human
caccauucagguc

SEQ ID NO: 3822288 - RNA, 13 nt, Human
caccauuccugga

SEQ ID NO: 3822289 - RNA, 20 nt, Human
caccauucguacauaauacu

SEQ ID NO: 3822290 - RNA, 14 nt, Human
caccauucugacuc

SEQ ID NO: 3822291 - RNA, 17 nt, Human
caccauuuaaaaacagg

SEQ ID NO: 3822292 - RNA, 18 nt, Human
caccauuuccccagggca

SEQ ID NO: 3822293 - RNA, 19 nt, Human
caccauuuccccagggcac

SEQ ID NO: 3822294 - RNA, 17 nt, Human
caccauuuggcaaugcc

SEQ ID NO: 3822295 - RNA, 18 nt, Human
caccauuuggcaucccug

SEQ ID NO: 3822296 - RNA, 22 nt, Human
caccauuuggcaucccugggcc

SEQ ID NO: 3822297 - RNA, 17 nt, Human
cacccaaagcauggacu

SEQ ID NO: 3822298 - RNA, 18 nt, Human
cacccaaagcauggacua

SEQ ID NO: 3822299 - RNA, 19 nt, Human
cacccaaagcugagccugc

SEQ ID NO: 3822300 - RNA, 23 nt, Human
cacccaacccuaucuccugacag

SEQ ID NO: 3822301 - RNA, 16 nt, Human
cacccaagcaaggcca

SEQ ID NO: 3822302 - RNA, 13 nt, Human
cacccaagcuugg

SEQ ID NO: 3822303 - RNA, 15 nt, Human
cacccaagcuuggca

SEQ ID NO: 3822304 - RNA, 17 nt, Human
cacccaagcuuggcagc

SEQ ID NO: 3822305 - RNA, 19 nt, Human
cacccaagcuuggcagccg

SEQ ID NO: 3822306 - RNA, 21 nt, Human
cacccaagcuuggcagccgag

SEQ ID NO: 3822307 - RNA, 15 nt, Human
cacccaagggccugg

SEQ ID NO: 3822308 - RNA, 17 nt, Human
cacccaagggccuggcc

SEQ ID NO: 3822309 - RNA, 18 nt, Human
cacccaagggccuggccu

SEQ ID NO: 3822310 - RNA, 23 nt, Human
cacccaauaaacauuaagauuga

SEQ ID NO: 3822311 - RNA, 16 nt, Human
cacccaauucaaaaca

SEQ ID NO: 3822312 - RNA, 15 nt, Human
cacccacacacucgc

SEQ ID NO: 3822313 - RNA, 15 nt, Human
cacccacaggcaugu

SEQ ID NO: 3822314 - RNA, 21 nt, Human
cacccacaugugacacauaug

SEQ ID NO: 3822315 - RNA, 16 nt, Human
cacccaccaacccuca

SEQ ID NO: 3822316 - RNA, 17 nt, Human
cacccaccaacccucag

SEQ ID NO: 3822317 - RNA, 22 nt, Human
cacccaccaguugaauuucauc

SEQ ID NO: 3822318 - RNA, 16 nt, Human
cacccaccccugcaca

SEQ ID NO: 3822319 - RNA, 12 nt, Human
cacccaccucag

SEQ ID NO: 3822320 - RNA, 13 nt, Human
cacccaccucagc

SEQ ID NO: 3822321 - RNA, 14 nt, Human
cacccaccucagcc

SEQ ID NO: 3822322 - RNA, 14 nt, Human
cacccaccucccug

SEQ ID NO: 3822323 - RNA, 15 nt, Human
cacccaccucccugc

SEQ ID NO: 3822324 - RNA, 21 nt, Human
cacccaccucccugccuccag

SEQ ID NO: 3822325 - RNA, 21 nt, Human
aaaagagagcagagaauauaa

SEQ ID NO: 3822326 - RNA, 16 nt, Human
aaaagagauauuuuaa

SEQ ID NO: 3822327 - RNA, 14 nt, Human
aaaagagauuucaa

SEQ ID NO: 3822328 - RNA, 16 nt, Human
aaaagagauuucaaga

SEQ ID NO: 3822329 - RNA, 15 nt, Human
aaaagaggggcuggg

SEQ ID NO: 3822330 - RNA, 21 nt, Human
aaaagagguuuuucuuaaaua

SEQ ID NO: 3822331 - RNA, 17 nt, Human
aaaagauaaacacaaga

SEQ ID NO: 3822332 - RNA, 19 nt, Human
aaaagauaaacacaagauu

SEQ ID NO: 3822333 - RNA, 12 nt, Human
aaaagauaaaga

SEQ ID NO: 3822334 - RNA, 17 nt, Human
aaaagauaaagaugauc

SEQ ID NO: 3822335 - RNA, 17 nt, Human
aaaagauaaauauuaua

SEQ ID NO: 3822336 - RNA, 14 nt, Human
aaaagauacauuug

SEQ ID NO: 3822337 - RNA, 16 nt, Human
aaaagauacauuugua

SEQ ID NO: 3822338 - RNA, 17 nt, Human
aaaagauaccuuaaaau

SEQ ID NO: 3822339 - RNA, 20 nt, Human
aaaagauacgacuuuauuuu

SEQ ID NO: 3822340 - RNA, 18 nt, Human
aaaagauauaagugcugu

SEQ ID NO: 3822341 - RNA, 11 nt, Human
aaaagauauau

SEQ ID NO: 3822342 - RNA, 23 nt, Human
aaaagaucuguuuugaaggcaaa

SEQ ID NO: 3822343 - RNA, 15 nt, Human
aaaagaugcaaugua

SEQ ID NO: 3822344 - RNA, 18 nt, Human
aaaagaugcacuuugcuu

SEQ ID NO: 3822345 - RNA, 13 nt, Human
aaaagaugcuucu

SEQ ID NO: 3822346 - RNA, 13 nt, Human
aaaagaugcuuuu

SEQ ID NO: 3822347 - RNA, 14 nt, Human
aaaagauguagauu

SEQ ID NO: 3822348 - RNA, 13 nt, Human
aaaagauuagcaa

SEQ ID NO: 3822349 - RNA, 13 nt, Human
aaaagauucauuu

SEQ ID NO: 3822350 - RNA, 12 nt, Human
aaaagauucuuc

SEQ ID NO: 3822351 - RNA, 21 nt, Human
aaaagauugaaguauuuugcu

SEQ ID NO: 3822352 - RNA, 14 nt, Human
aaaagauugcugaa

SEQ ID NO: 3822353 - RNA, 16 nt, Human
aaaagcaaaaaagaaa

SEQ ID NO: 3822354 - RNA, 12 nt, Human
aaaagcaaaauc

SEQ ID NO: 3822355 - RNA, 14 nt, Human
aaaagcaaaugaga

SEQ ID NO: 3822356 - RNA, 14 nt, Human
aaaagcacaagaag

SEQ ID NO: 3822357 - RNA, 13 nt, Human
aaaagcagacauu

SEQ ID NO: 3822358 - RNA, 14 nt, Human
aaaagcagacauuu

SEQ ID NO: 3822359 - RNA, 14 nt, Human
aaaagcagcuacca

SEQ ID NO: 3822360 - RNA, 17 nt, Human
aaaagcagcucuccccu

SEQ ID NO: 3822361 - RNA, 14 nt, Human
aaaagcauguacag

SEQ ID NO: 3822362 - RNA, 19 nt, Human
aaaagcauguacaguguuc

SEQ ID NO: 3822363 - RNA, 14 nt, Human
aaaagcauuuugua

SEQ ID NO: 3822364 - RNA, 15 nt, Human
aaaagcauuuuguaa

SEQ ID NO: 3822365 - RNA, 21 nt, Human
aaaagccaaggugucauuuau

SEQ ID NO: 3822366 - RNA, 20 nt, Human
aaaagccaucauguaaauua

SEQ ID NO: 3822367 - RNA, 17 nt, Human
aaaagccauguuuaaga

SEQ ID NO: 3822368 - RNA, 20 nt, Human
aaaagcccaaccucuuccuc

SEQ ID NO: 3822369 - RNA, 21 nt, Human
aaaagcccuagacuggugcua

SEQ ID NO: 3822370 - RNA, 21 nt, Human
aaaagccucaacuagucauuu

SEQ ID NO: 3822371 - RNA, 20 nt, Human
aaaagcgacccauucagaga

SEQ ID NO: 3822372 - RNA, 17 nt, Human
aaaagcgugagcuuaaa

SEQ ID NO: 3822373 - RNA, 21 nt, Human
aaaagcgugagcuuaaaauac

SEQ ID NO: 3822374 - RNA, 18 nt, Human
aaaagcucauauuuugua

SEQ ID NO: 3822375 - RNA, 17 nt, Human
aaaagcucauuucaugc

SEQ ID NO: 3822376 - RNA, 14 nt, Human
aaaagcucuuuuaa

SEQ ID NO: 3822377 - RNA, 21 nt, Human
aaaagcuuagcuuuagaaaca

SEQ ID NO: 3822378 - RNA, 17 nt, Human
aaaagcuucccucccug

SEQ ID NO: 3822379 - RNA, 13 nt, Human
aaaagcuucuuaa

SEQ ID NO: 3822380 - RNA, 13 nt, Human
aaaagcuuuguuu

SEQ ID NO: 3822381 - RNA, 14 nt, Human
aaaagcuuuuuauu

SEQ ID NO: 3822382 - RNA, 15 nt, Human
aaaaggaaaaagcuc

SEQ ID NO: 3822383 - RNA, 16 nt, Human
aaaaggaaaagaaaaa

SEQ ID NO: 3822384 - RNA, 23 nt, Human
aaaaggaaaagaaaaaaaaaaga

SEQ ID NO: 3822385 - RNA, 13 nt, Human
aaaaggaaagaaa

SEQ ID NO: 3822386 - RNA, 14 nt, Human
aaaaggaacugcag

SEQ ID NO: 3822387 - RNA, 13 nt, Human
aaaaggaagacua

SEQ ID NO: 3822388 - RNA, 14 nt, Human
aaaaggaagacuag

SEQ ID NO: 3822389 - RNA, 15 nt, Human
aaaaggaagacuaga

SEQ ID NO: 3822390 - RNA, 21 nt, Human
aaaaggaagguaguucaagaa

SEQ ID NO: 3822391 - RNA, 17 nt, Human
aaaaggacaucagcaaa

SEQ ID NO: 3822392 - RNA, 19 nt, Human
aaaaggacaucagcaaaca

SEQ ID NO: 3822393 - RNA, 15 nt, Human
aaaaggaguauacaa

SEQ ID NO: 3822394 - RNA, 15 nt, Human
aaaaggauacauaau

SEQ ID NO: 3822395 - RNA, 17 nt, Human
aaaaggauaguauuuuu

SEQ ID NO: 3822396 - RNA, 22 nt, Human
aaaaggauaguauuuuuaucca

SEQ ID NO: 3822397 - RNA, 19 nt, Human
aaaaggaugcacagaguug

SEQ ID NO: 3822398 - RNA, 14 nt, Human
aaaaggcauuguuu

SEQ ID NO: 3822399 - RNA, 15 nt, Human
aaaaggccaaaccuc

SEQ ID NO: 3822400 - RNA, 18 nt, Human
aaaaggccaguggaaauu

SEQ ID NO: 3822401 - RNA, 15 nt, Human
aaaaggccucuugua

SEQ ID NO: 3822402 - RNA, 23 nt, Human
aaaaggccucuuguaaagacugg

SEQ ID NO: 3822403 - RNA, 12 nt, Human
aaaaggccuggg

SEQ ID NO: 3822404 - RNA, 14 nt, Human
aaaaggccuggggu

SEQ ID NO: 3822405 - RNA, 17 nt, Human
aaaaggcuuauaaaaca

SEQ ID NO: 3822406 - RNA, 19 nt, Human
aaaaggcuuauaaaacaga

SEQ ID NO: 3822407 - RNA, 16 nt, Human
aaaagggaagaaacug

SEQ ID NO: 3822408 - RNA, 19 nt, Human
aaaagggaaguugugccuu

SEQ ID NO: 3822409 - RNA, 16 nt, Human
aaaagggacugagaaa

SEQ ID NO: 3822410 - RNA, 14 nt, Human
aaaagggaggggga

SEQ ID NO: 3822411 - RNA, 18 nt, Human
aaaagggauuacccaagc

SEQ ID NO: 3822412 - RNA, 23 nt, Human
aaaagggcagggcaucuccugug

SEQ ID NO: 3822413 - RNA, 10 nt, Human
aaaaggguca

SEQ ID NO: 3822414 - RNA, 22 nt, Human
aaaagguagcuuaccugacaca

SEQ ID NO: 3822415 - RNA, 18 nt, Human
aaaaggugauaaaaucau

SEQ ID NO: 3822416 - RNA, 20 nt, Human
aaaaggugccugugaggcag

SEQ ID NO: 3822417 - RNA, 13 nt, Human
aaaagguugaaua

SEQ ID NO: 3822418 - RNA, 15 nt, Human
aaaagguugaauaau

SEQ ID NO: 3822419 - RNA, 18 nt, Human
aaaagguuuacagaauuu

SEQ ID NO: 3822420 - RNA, 17 nt, Human
aaaagguuuuauuuugu

SEQ ID NO: 3822421 - RNA, 23 nt, Human
aaaaguaaguaccacucaggcca

SEQ ID NO: 3822422 - RNA, 21 nt, Human
aaaaguacauauuuauuuucu

SEQ ID NO: 3822423 - RNA, 13 nt, Human
aaaaguacauuua

SEQ ID NO: 3822424 - RNA, 15 nt, Human
aaaaguagaacuuug

SEQ ID NO: 3822425 - RNA, 17 nt, Human
aaaaguagaacuuugua

SEQ ID NO: 3822426 - RNA, 20 nt, Human
aaaaguagaacuuuguauag

SEQ ID NO: 3822427 - RNA, 19 nt, Human
aaaaguauguuagugcaaa

SEQ ID NO: 3822428 - RNA, 14 nt, Human
aaaaguauuauuuu

SEQ ID NO: 3822429 - RNA, 12 nt, Human
aaaaguauuuug

SEQ ID NO: 3822430 - RNA, 13 nt, Human
aaaaguauuuuga

SEQ ID NO: 3822431 - RNA, 19 nt, Human
aaaaguauuuugaaguuua

SEQ ID NO: 3822432 - RNA, 19 nt, Human
aaaagucacaauguucuuu

SEQ ID NO: 3822433 - RNA, 14 nt, Human
aaaagucagagaca

SEQ ID NO: 3822434 - RNA, 22 nt, Human
aaaaguccaauuuuaauuuagu

SEQ ID NO: 3822435 - RNA, 23 nt, Human
aaaagucucuauuuaaauucuuu

SEQ ID NO: 3822436 - RNA, 12 nt, Human
aaaagucugauu

SEQ ID NO: 3822437 - RNA, 22 nt, Human
aaaagucugauugguuuuaauu

SEQ ID NO: 3822438 - RNA, 14 nt, Human
aaaagucugucuuu

SEQ ID NO: 3822439 - RNA, 19 nt, Human
aaaagucuuaggugaacaa

SEQ ID NO: 3822440 - RNA, 23 nt, Human
aaaagucuucacucucugaagau

SEQ ID NO: 3822441 - RNA, 13 nt, Human
aaaagugaaauaa

SEQ ID NO: 3822442 - RNA, 20 nt, Human
aaaagugaaugaaagauuaa

SEQ ID NO: 3822443 - RNA, 15 nt, Human
aaaagugacacagca

SEQ ID NO: 3822444 - RNA, 20 nt, Human
aaaagugccauuaacaaaug

SEQ ID NO: 3822445 - RNA, 14 nt, Human
cacugccaggccag

SEQ ID NO: 3822446 - RNA, 18 nt, Human
cacugccaggccagccuc

SEQ ID NO: 3822447 - RNA, 17 nt, Human
cacugccauaaaacauu

SEQ ID NO: 3822448 - RNA, 16 nt, Human
cacugccaucuuaguu

SEQ ID NO: 3822449 - RNA, 22 nt, Human
cacugccaucuuaguuuggauu

SEQ ID NO: 3822450 - RNA, 17 nt, Human
cacugccauggaggcac

SEQ ID NO: 3822451 - RNA, 14 nt, Human
cacugcccaccccc

SEQ ID NO: 3822452 - RNA, 18 nt, Human
cacugcccauggacaggc

SEQ ID NO: 3822453 - RNA, 16 nt, Human
cacugccccaggcugc

SEQ ID NO: 3822454 - RNA, 17 nt, Human
cacugcccgagcuggug

SEQ ID NO: 3822455 - RNA, 18 nt, Human
cacugcccgagcuggugc

SEQ ID NO: 3822456 - RNA, 19 nt, Human
cacugcccgagcuggugca

SEQ ID NO: 3822457 - RNA, 15 nt, Human
cacugcccgcacacc

SEQ ID NO: 3822458 - RNA, 19 nt, Human
cacugcccgcacacccuca

SEQ ID NO: 3822459 - RNA, 15 nt, Human
cacugccucagguuc

SEQ ID NO: 3822460 - RNA, 23 nt, Human
cacugccuccccaaggcccccug

SEQ ID NO: 3822461 - RNA, 14 nt, Human
cacugccucucaca

SEQ ID NO: 3822462 - RNA, 16 nt, Human
cacugccucucacagc

SEQ ID NO: 3822463 - RNA, 16 nt, Human
cacugccucucccucu

SEQ ID NO: 3822464 - RNA, 18 nt, Human
cacugccucucccuggcc

SEQ ID NO: 3822465 - RNA, 20 nt, Human
cacugccucucccuggcccu

SEQ ID NO: 3822466 - RNA, 13 nt, Human
cacugccucugcc

SEQ ID NO: 3822467 - RNA, 23 nt, Human
cacugccucugccuuagaggagc

SEQ ID NO: 3822468 - RNA, 22 nt, Human
cacugccugauggaccugucac

SEQ ID NO: 3822469 - RNA, 14 nt, Human
cacugccugcccac

SEQ ID NO: 3822470 - RNA, 20 nt, Human
cacugccugccuuaagugag

SEQ ID NO: 3822471 - RNA, 17 nt, Human
cacuacacuccagccug

SEQ ID NO: 3822472 - RNA, 19 nt, Human
cacuacacuccagccugag

SEQ ID NO: 3822473 - RNA, 19 nt, Human
cacuacauaaacugacuuu

SEQ ID NO: 3822474 - RNA, 15 nt, Human
cacuacaugcagccc

SEQ ID NO: 3822475 - RNA, 20 nt, Human
cacuacaugugguuuauaga

SEQ ID NO: 3822476 - RNA, 21 nt, Human
cacuaccacgccaagcuaauu

SEQ ID NO: 3822477 - RNA, 23 nt, Human
cacuaccagcguauauauaagaa

SEQ ID NO: 3822478 - RNA, 22 nt, Human
cacuacccaucgguguccauuu

SEQ ID NO: 3822479 - RNA, 20 nt, Human
cacuaccgaaugugucuuua

SEQ ID NO: 3822480 - RNA, 18 nt, Human
cacuaccuccucagggau

SEQ ID NO: 3822481 - RNA, 13 nt, Human
cacuaccuggcug

SEQ ID NO: 3822482 - RNA, 12 nt, Human
cacuacugcagu

SEQ ID NO: 3822483 - RNA, 14 nt, Human
cacuacuggguguc

SEQ ID NO: 3822484 - RNA, 16 nt, Human
cacuacugggugucau

SEQ ID NO: 3822485 - RNA, 22 nt, Human
cacuacugggugucauuucauu

SEQ ID NO: 3822486 - RNA, 19 nt, Human
cacuagaauggauaaaaua

SEQ ID NO: 3822487 - RNA, 14 nt, Human
cacuagacaagcca

SEQ ID NO: 3822488 - RNA, 16 nt, Human
cacuagacccacugga

SEQ ID NO: 3822489 - RNA, 16 nt, Human
cacuagccagacacuc

SEQ ID NO: 3822490 - RNA, 16 nt, Human
cacuagcccaaugaaa

SEQ ID NO: 3822491 - RNA, 23 nt, Human
cacuagcccaaugaaaugaauua

SEQ ID NO: 3822492 - RNA, 19 nt, Human
cacuagccucaggggucug

SEQ ID NO: 3822493 - RNA, 21 nt, Human
cacuagccucuccaggaaugc

SEQ ID NO: 3822494 - RNA, 22 nt, Human
cacuagcucuuguugagccgug

SEQ ID NO: 3822495 - RNA, 15 nt, Human
cacuaggcugggugc

SEQ ID NO: 3822496 - RNA, 22 nt, Human
cacuaggcugggugcccacagc

SEQ ID NO: 3822497 - RNA, 14 nt, Human
cacuaggcuucugg

SEQ ID NO: 3822498 - RNA, 21 nt, Human
cacuagggcagggacaggaua

SEQ ID NO: 3822499 - RNA, 21 nt, Human
cacuaggggauauaggagagg

SEQ ID NO: 3822500 - RNA, 15 nt, Human
cacuagucugugugc

SEQ ID NO: 3822501 - RNA, 17 nt, Human
cacuaguuuugugccag

SEQ ID NO: 3822502 - RNA, 12 nt, Human
cacuauaaaugg

SEQ ID NO: 3822503 - RNA, 17 nt, Human
cacuauaaugugaaaug

SEQ ID NO: 3822504 - RNA, 19 nt, Human
cacuauaucuguauauaaa

SEQ ID NO: 3822505 - RNA, 16 nt, Human
cacuauccaugcacca

SEQ ID NO: 3822506 - RNA, 18 nt, Human
cacuauccaugcaccaaa

SEQ ID NO: 3822507 - RNA, 17 nt, Human
cacuaugaagcuaccuc

SEQ ID NO: 3822508 - RNA, 14 nt, Human
cacuaugaaucuau

SEQ ID NO: 3822509 - RNA, 12 nt, Human
cacuaugcauuu

SEQ ID NO: 3822510 - RNA, 14 nt, Human
cacuaugcauuuua

SEQ ID NO: 3822511 - RNA, 15 nt, Human
cacuaugcauuuuaa

SEQ ID NO: 3822512 - RNA, 22 nt, Human
cacuauggugccaauggaaccu

SEQ ID NO: 3822513 - RNA, 16 nt, Human
cacuauguugcccagg

SEQ ID NO: 3822514 - RNA, 22 nt, Human
cacuauuuauuuacaaauguuu

SEQ ID NO: 3822515 - RNA, 14 nt, Human
cacuauuuuaugca

SEQ ID NO: 3822516 - RNA, 14 nt, Human
cacuauuuucagaa

SEQ ID NO: 3822517 - RNA, 17 nt, Human
cacuauuuucagaaucu

SEQ ID NO: 3822518 - RNA, 22 nt, Human
cacuauuuuuauuuauauuuuu

SEQ ID NO: 3822519 - RNA, 18 nt, Human
cacucaaaagcugggcag

SEQ ID NO: 3822520 - RNA, 14 nt, Human
cacucaagaagcag

SEQ ID NO: 3822521 - RNA, 14 nt, Human
cacucaagaccaaa

SEQ ID NO: 3822522 - RNA, 22 nt, Human
cacucaagaccaaauggaaaca

SEQ ID NO: 3822523 - RNA, 15 nt, Human
cacucaagcacugau

SEQ ID NO: 3822524 - RNA, 12 nt, Human
cacucaagccaa

SEQ ID NO: 3822525 - RNA, 18 nt, Human
cacucaagccaagcagcc

SEQ ID NO: 3822526 - RNA, 13 nt, Human
cacucaagcuugg

SEQ ID NO: 3822527 - RNA, 14 nt, Human
cacucaaucucuga

SEQ ID NO: 3822528 - RNA, 23 nt, Human
cacucacacagccaggugccuug

SEQ ID NO: 3822529 - RNA, 21 nt, Human
cacucacacaggacccccuuc

SEQ ID NO: 3822530 - RNA, 16 nt, Human
cacucacagaccugga

SEQ ID NO: 3822531 - RNA, 18 nt, Human
cacucacagagucaaggc

SEQ ID NO: 3822532 - RNA, 13 nt, Human
cacucacaugaca

SEQ ID NO: 3822533 - RNA, 17 nt, Human
cacucaccgaagccacu

SEQ ID NO: 3822534 - RNA, 16 nt, Human
cacucacuaggccccc

SEQ ID NO: 3822535 - RNA, 22 nt, Human
cacucacuaggcccccacuugc

SEQ ID NO: 3822536 - RNA, 14 nt, Human
cacucacuccugag

SEQ ID NO: 3822537 - RNA, 21 nt, Human
cacucagaaaagacgcaccag

SEQ ID NO: 3822538 - RNA, 15 nt, Human
cacucagaagccugg

SEQ ID NO: 3822539 - RNA, 17 nt, Human
cacucagaagccugggg

SEQ ID NO: 3822540 - RNA, 15 nt, Human
cacucagagacaugc

SEQ ID NO: 3822541 - RNA, 22 nt, Human
cacucagcacaaggccaucugg

SEQ ID NO: 3822542 - RNA, 14 nt, Human
cacucagcaccccc

SEQ ID NO: 3822543 - RNA, 13 nt, Human
cacucagccccua

SEQ ID NO: 3822544 - RNA, 16 nt, Human
cacucagccccuagga

SEQ ID NO: 3822545 - RNA, 17 nt, Human
cacucagccccuaggag

SEQ ID NO: 3822546 - RNA, 13 nt, Human
cacucagcuguuc

SEQ ID NO: 3822547 - RNA, 19 nt, Human
cacucagcuuccuacccac

SEQ ID NO: 3822548 - RNA, 20 nt, Human
cacucaggaggcugaggcag

SEQ ID NO: 3822549 - RNA, 12 nt, Human
cacucaggcugg

SEQ ID NO: 3822550 - RNA, 14 nt, Human
cacucaggcuggag

SEQ ID NO: 3822551 - RNA, 20 nt, Human
cacucaucaauggggccagu

SEQ ID NO: 3822552 - RNA, 17 nt, Human
cacucaugcauuguccu

SEQ ID NO: 3822553 - RNA, 19 nt, Human
cacucaugcauuguccucu

SEQ ID NO: 3822554 - RNA, 12 nt, Human
cacucaugcuga

SEQ ID NO: 3822555 - RNA, 15 nt, Human
cacucaugcugaaag

SEQ ID NO: 3822556 - RNA, 22 nt, Human
cacucaugugacucuuuccaac

SEQ ID NO: 3822557 - RNA, 21 nt, Human
cacucauugcugagccucugc

SEQ ID NO: 3822558 - RNA, 16 nt, Human
cacucauuucaucuca

SEQ ID NO: 3822559 - RNA, 18 nt, Human
cacucauuucaucucauu

SEQ ID NO: 3822560 - RNA, 19 nt, Human
cacucauuucaucucauuu

SEQ ID NO: 3822561 - RNA, 22 nt, Human
cacucauuuucuauaacagaua

SEQ ID NO: 3822562 - RNA, 15 nt, Human
cacuccaagcccagc

SEQ ID NO: 3822563 - RNA, 15 nt, Human
cacuccaauuaagga

SEQ ID NO: 3822564 - RNA, 17 nt, Human
cacuccaauuaaggauu

SEQ ID NO: 3822565 - RNA, 22 nt, Human
cacuccaauuaaggauuuuaug

SEQ ID NO: 3822566 - RNA, 11 nt, Human
cacuccaccac

SEQ ID NO: 3822567 - RNA, 15 nt, Human
cacuccacccuccac

SEQ ID NO: 3822568 - RNA, 17 nt, Human
cacuccacccuccaccu

SEQ ID NO: 3822569 - RNA, 21 nt, Human
cacuccacccuccaccuucca

SEQ ID NO: 3822570 - RNA, 12 nt, Human
cacuccagccug

SEQ ID NO: 3822571 - RNA, 21 nt, Human
cacuccagccugggcgacaga

SEQ ID NO: 3822572 - RNA, 11 nt, Human
cacuccagcug

SEQ ID NO: 3822573 - RNA, 13 nt, Human
cacuccagugcca

SEQ ID NO: 3822574 - RNA, 21 nt, Human
cacuccaugcuuagucacugc

SEQ ID NO: 3822575 - RNA, 23 nt, Human
cacuccaugcuuagucacugccu

SEQ ID NO: 3822576 - RNA, 13 nt, Human
cacuccauuccca

SEQ ID NO: 3822577 - RNA, 13 nt, Human
cacucccaagucu

SEQ ID NO: 3822578 - RNA, 22 nt, Human
cacucccaccugacacaccagg

SEQ ID NO: 3822579 - RNA, 23 nt, Human
cacucccaccugacacaccaggc

SEQ ID NO: 3822580 - RNA, 13 nt, Human
cacucccacuucc

SEQ ID NO: 3822581 - RNA, 14 nt, Human
cacucccaggcagc

SEQ ID NO: 3822582 - RNA, 15 nt, Human
cacuccccaaccccc

SEQ ID NO: 3822583 - RNA, 14 nt, Human
cacuccccacaucc

SEQ ID NO: 3822584 - RNA, 15 nt, Human
cacuccccaccuuca

SEQ ID NO: 3822585 - RNA, 21 nt, Human
cacuccccagccagccuggcu

SEQ ID NO: 3822586 - RNA, 19 nt, Human
cacuccccagccugggccc

SEQ ID NO: 3822587 - RNA, 19 nt, Human
cacuccccgaagucuuuug

SEQ ID NO: 3822588 - RNA, 14 nt, Human
cacuccccugcugg

SEQ ID NO: 3822589 - RNA, 19 nt, Human
cacucccgagacggcacug

SEQ ID NO: 3822590 - RNA, 16 nt, Human
cacucccguuuucggu

SEQ ID NO: 3822591 - RNA, 15 nt, Human
cacucccuccagcac

SEQ ID NO: 3822592 - RNA, 16 nt, Human
cacucccugcaaccug

SEQ ID NO: 3822593 - RNA, 19 nt, Human
cacucccuucccauaagcu

SEQ ID NO: 3822594 - RNA, 15 nt, Human
cacucccuucuccuu

SEQ ID NO: 3822595 - RNA, 13 nt, Human
cacucccuugggc

SEQ ID NO: 3822596 - RNA, 21 nt, Human
cacucccuugguggcaagagc

SEQ ID NO: 3822597 - RNA, 17 nt, Human
cacuccggcccuccaga

SEQ ID NO: 3822598 - RNA, 21 nt, Human
cacuccggcccuccagagccc

SEQ ID NO: 3822599 - RNA, 20 nt, Human
cacuccggugugccugcagc

SEQ ID NO: 3822600 - RNA, 22 nt, Human
cacuccggugugccugcagccc

SEQ ID NO: 3822601 - RNA, 22 nt, Human
cacuccuagagaacgcagcccu

SEQ ID NO: 3822602 - RNA, 13 nt, Human
cacuccucagggc

SEQ ID NO: 3822603 - RNA, 12 nt, Human
cacuccucccuc

SEQ ID NO: 3822604 - RNA, 18 nt, Human
cacuccucugcugaccug

SEQ ID NO: 3822605 - RNA, 14 nt, Human
cacuccugagaccc

SEQ ID NO: 3822606 - RNA, 23 nt, Human
cacuccugagaccccuggccucc

SEQ ID NO: 3822607 - RNA, 14 nt, Human
cacuccugccaagg

SEQ ID NO: 3822608 - RNA, 14 nt, Human
cacuccugcucugc

SEQ ID NO: 3822609 - RNA, 15 nt, Human
cacuccugcucugcu

SEQ ID NO: 3822610 - RNA, 16 nt, Human
cacuccugcucugcuc

SEQ ID NO: 3822611 - RNA, 21 nt, Human
cacuccuucacagaugggugc

SEQ ID NO: 3822612 - RNA, 12 nt, Human
cacuccuuccug

SEQ ID NO: 3822613 - RNA, 14 nt, Human
cacuccuuccugcc

SEQ ID NO: 3822614 - RNA, 15 nt, Human
cacuccuuccugcca

SEQ ID NO: 3822615 - RNA, 21 nt, Human
cacuccuuccugccccaacuc

SEQ ID NO: 3822616 - RNA, 16 nt, Human
aaaauagagcuuuuaa

SEQ ID NO: 3822617 - RNA, 20 nt, Human
aaaauagaguguaguuuaca

SEQ ID NO: 3822618 - RNA, 12 nt, Human
aaaauagccugc

SEQ ID NO: 3822619 - RNA, 16 nt, Human
aaaauagcguucuugu

SEQ ID NO: 3822620 - RNA, 20 nt, Human
aaaauagcuaaauaccucaa

SEQ ID NO: 3822621 - RNA, 13 nt, Human
aaaauagcuugua

SEQ ID NO: 3822622 - RNA, 21 nt, Human
aaaauagcuuguauaguguaa

SEQ ID NO: 3822623 - RNA, 12 nt, Human
aaaauaggcagg

SEQ ID NO: 3822624 - RNA, 17 nt, Human
aaaauaggcuuuuuaau

SEQ ID NO: 3822625 - RNA, 19 nt, Human
aaaauaguaaaugcuuugu

SEQ ID NO: 3822626 - RNA, 18 nt, Human
aaaauaguggugugauuu

SEQ ID NO: 3822627 - RNA, 13 nt, Human
aaaauaguuuauu

SEQ ID NO: 3822628 - RNA, 14 nt, Human
aaaauaguuuauuu

SEQ ID NO: 3822629 - RNA, 20 nt, Human
aaaauaguuuggauauguaa

SEQ ID NO: 3822630 - RNA, 10 nt, Human
aaaauauaaa

SEQ ID NO: 3822631 - RNA, 14 nt, Human
aaaauauaaaauua

SEQ ID NO: 3822632 - RNA, 18 nt, Human
aaaauauaaagcaucuaa

SEQ ID NO: 3822633 - RNA, 22 nt, Human
aaaauauaauuguuuuuuaucu

SEQ ID NO: 3822634 - RNA, 11 nt, Human
aaaauauacau

SEQ ID NO: 3822635 - RNA, 11 nt, Human
aaaauauacug

SEQ ID NO: 3822636 - RNA, 16 nt, Human
aaaauauacuguaaag

SEQ ID NO: 3822637 - RNA, 17 nt, Human
aaaauauacuguaaaga

SEQ ID NO: 3822638 - RNA, 13 nt, Human
aaaauauagcuaa

SEQ ID NO: 3822639 - RNA, 21 nt, Human
aaaauauagcuguacaaauau

SEQ ID NO: 3822640 - RNA, 14 nt, Human
aaaauauauacuaa

SEQ ID NO: 3822641 - RNA, 13 nt, Human
aaaauauauauag

SEQ ID NO: 3822642 - RNA, 19 nt, Human
aaaauauauauagugcuau

SEQ ID NO: 3822643 - RNA, 17 nt, Human
aaaauaucuuuugaccu

SEQ ID NO: 3822644 - RNA, 13 nt, Human
aaaauauguauua

SEQ ID NO: 3822645 - RNA, 14 nt, Human
aaaauauguauuaa

SEQ ID NO: 3822646 - RNA, 17 nt, Human
aaaauauuaucuuugua

SEQ ID NO: 3822647 - RNA, 14 nt, Human
aaaauauuaugugu

SEQ ID NO: 3822648 - RNA, 15 nt, Human
aaaauauuauguguu

SEQ ID NO: 3822649 - RNA, 14 nt, Human
aaaauauucucuau

SEQ ID NO: 3822650 - RNA, 21 nt, Human
aaaauauugagcagaauucau

SEQ ID NO: 3822651 - RNA, 11 nt, Human
aaaauauuguu

SEQ ID NO: 3822652 - RNA, 23 nt, Human
aaaauauuguuucugcauucauu

SEQ ID NO: 3822653 - RNA, 12 nt, Human
aaaauauuuaaa

SEQ ID NO: 3822654 - RNA, 20 nt, Human
aaaauauuuaaaaaugucuu

SEQ ID NO: 3822655 - RNA, 14 nt, Human
aaaauauuuaaagg

SEQ ID NO: 3822656 - RNA, 11 nt, Human
aaaauauuuau

SEQ ID NO: 3822657 - RNA, 17 nt, Human
aaaauauuuaugaagaa

SEQ ID NO: 3822658 - RNA, 14 nt, Human
aaaauauuuggaau

SEQ ID NO: 3822659 - RNA, 15 nt, Human
aaaauauuuguacau

SEQ ID NO: 3822660 - RNA, 14 nt, Human
aaaauauuuucugu

SEQ ID NO: 3822661 - RNA, 21 nt, Human
aaaauauuuucuguguguucc

SEQ ID NO: 3822662 - RNA, 12 nt, Human
aaaauauuuuga

SEQ ID NO: 3822663 - RNA, 17 nt, Human
aaaauauuuugaucuuc

SEQ ID NO: 3822664 - RNA, 18 nt, Human
aaaauauuuugucuaaaa

SEQ ID NO: 3822665 - RNA, 20 nt, Human
aaaauauuuugucuaaaaug

SEQ ID NO: 3822666 - RNA, 15 nt, Human
aaaaucaaaacaaaa

SEQ ID NO: 3822667 - RNA, 14 nt, Human
aaaaucaaaacaag

SEQ ID NO: 3822668 - RNA, 12 nt, Human
aaaaucaacuuu

SEQ ID NO: 3822669 - RNA, 13 nt, Human
cagaccaccccgc

SEQ ID NO: 3822670 - RNA, 15 nt, Human
cagaccaccccgccu

SEQ ID NO: 3822671 - RNA, 22 nt, Human
cagaccacgcccguccugccug

SEQ ID NO: 3822672 - RNA, 13 nt, Human
cagaccagagcuc

SEQ ID NO: 3822673 - RNA, 16 nt, Human
cagaccauaauguuac

SEQ ID NO: 3822674 - RNA, 21 nt, Human
cagaccauggacacuacaccc

SEQ ID NO: 3822675 - RNA, 22 nt, Human
cagaccauggacacuacaccca

SEQ ID NO: 3822676 - RNA, 19 nt, Human
cagaccauuggggcuccca

SEQ ID NO: 3822677 - RNA, 20 nt, Human
cagaccauuggggcucccag

SEQ ID NO: 3822678 - RNA, 23 nt, Human
cagaccauuggggcucccagcca

SEQ ID NO: 3822679 - RNA, 21 nt, Human
cagacccccaccccuucccca

SEQ ID NO: 3822680 - RNA, 14 nt, Human
cagacccccacucu

SEQ ID NO: 3822681 - RNA, 17 nt, Human
cagacccccagcaaccc

SEQ ID NO: 3822682 - RNA, 15 nt, Human
cagacccccuggaga

SEQ ID NO: 3822683 - RNA, 13 nt, Human
cagaccccucugg

SEQ ID NO: 3822684 - RNA, 18 nt, Human
cagaccccucuggccagg

SEQ ID NO: 3822685 - RNA, 23 nt, Human
cagaccccuggcuuuucacugcu

SEQ ID NO: 3822686 - RNA, 12 nt, Human
cagacccggcug

SEQ ID NO: 3822687 - RNA, 15 nt, Human
cagacccuaccccac

SEQ ID NO: 3822688 - RNA, 16 nt, Human
cagacccuaccccacc

SEQ ID NO: 3822689 - RNA, 12 nt, Human
cagacccugccc

SEQ ID NO: 3822690 - RNA, 14 nt, Human
cagacccugcccug

SEQ ID NO: 3822691 - RNA, 11 nt, Human
cagacccugga

SEQ ID NO: 3822692 - RNA, 22 nt, Human
cagacccuggaggccccaaccc

SEQ ID NO: 3822693 - RNA, 21 nt, Human
cagaccgaacuguuguauaaa

SEQ ID NO: 3822694 - RNA, 16 nt, Human
cagaccuaaugcuccu

SEQ ID NO: 3822695 - RNA, 17 nt, Human
cagaccuaaugcuccuu

SEQ ID NO: 3822696 - RNA, 15 nt, Human
cagaccuccccagcc

SEQ ID NO: 3822697 - RNA, 22 nt, Human
cagaccuccccagccccuagcc

SEQ ID NO: 3822698 - RNA, 23 nt, Human
cagaccuccccagccccuagccc

SEQ ID NO: 3822699 - RNA, 13 nt, Human
cagaccucuggau

SEQ ID NO: 3822700 - RNA, 17 nt, Human
cagaccugauccuggag

SEQ ID NO: 3822701 - RNA, 20 nt, Human
cagaccugcuuuuugaaaug

SEQ ID NO: 3822702 - RNA, 18 nt, Human
cagaccuggagccccugg

SEQ ID NO: 3822703 - RNA, 20 nt, Human
cagaccuggagccccugggu

SEQ ID NO: 3822704 - RNA, 21 nt, Human
cagaccuucuaggacgccacc

SEQ ID NO: 3822705 - RNA, 19 nt, Human
cagaccuuguucacacucu

SEQ ID NO: 3822706 - RNA, 15 nt, Human
cagaccuuugaggau

SEQ ID NO: 3822707 - RNA, 20 nt, Human
cagaccuuuuaacuccucaa

SEQ ID NO: 3822708 - RNA, 15 nt, Human
cagacgccuggcugc

SEQ ID NO: 3822709 - RNA, 23 nt, Human
cagacgccuggcugcugaucgcc

SEQ ID NO: 3822710 - RNA, 15 nt, Human
cagacgccuuacugg

SEQ ID NO: 3822711 - RNA, 22 nt, Human
cagacgcucauucagcaucuga

SEQ ID NO: 3822712 - RNA, 17 nt, Human
cagacgcugcugucaca

SEQ ID NO: 3822713 - RNA, 22 nt, Human
cagacggaaggguaaacaauau

SEQ ID NO: 3822714 - RNA, 15 nt, Human
cagacuaagccagca

SEQ ID NO: 3822715 - RNA, 22 nt, Human
cagacuaagccagcaccggacc

SEQ ID NO: 3822716 - RNA, 14 nt, Human
cagacuagauguag

SEQ ID NO: 3822717 - RNA, 15 nt, Human
cagacuagauguagu

SEQ ID NO: 3822718 - RNA, 19 nt, Human
cagacuagauguaguauuu

SEQ ID NO: 3822719 - RNA, 20 nt, Human
cagacuagauguaguauuuu

SEQ ID NO: 3822720 - RNA, 22 nt, Human
cagacuaguuuaguuaaaugag

SEQ ID NO: 3822721 - RNA, 15 nt, Human
cagacuauuuuuaga

SEQ ID NO: 3822722 - RNA, 20 nt, Human
cagacuauuuuuagauuuuc

SEQ ID NO: 3822723 - RNA, 14 nt, Human
cagacucaauaaaa

SEQ ID NO: 3822724 - RNA, 13 nt, Human
cagacucagagcu

SEQ ID NO: 3822725 - RNA, 15 nt, Human
cagacucagagcucu

SEQ ID NO: 3822726 - RNA, 18 nt, Human
cagacucagagcucucuc

SEQ ID NO: 3822727 - RNA, 23 nt, Human
cagacucagagcucucucuacag

SEQ ID NO: 3822728 - RNA, 14 nt, Human
cagacucagcucug

SEQ ID NO: 3822729 - RNA, 17 nt, Human
cagacucaguuugucag

SEQ ID NO: 3822730 - RNA, 20 nt, Human
cagacucauacagaaggugg

SEQ ID NO: 3822731 - RNA, 16 nt, Human
cagacucauauuacug

SEQ ID NO: 3822732 - RNA, 18 nt, Human
cagacucauccugaacag

SEQ ID NO: 3822733 - RNA, 20 nt, Human
cagacucauccugaacagca

SEQ ID NO: 3822734 - RNA, 14 nt, Human
cagacucccauucc

SEQ ID NO: 3822735 - RNA, 20 nt, Human
cagacucccauuccugaaga

SEQ ID NO: 3822736 - RNA, 20 nt, Human
cagacuccugaggacagcug

SEQ ID NO: 3822737 - RNA, 21 nt, Human
cagacuccugugcaacuuucc

SEQ ID NO: 3822738 - RNA, 18 nt, Human
cagacuccuucaacaauu

SEQ ID NO: 3822739 - RNA, 18 nt, Human
cagacucuaagaaagaac

SEQ ID NO: 3822740 - RNA, 21 nt, Human
cagacucucagcccagaagaa

SEQ ID NO: 3822741 - RNA, 13 nt, Human
cagacugaccuug

SEQ ID NO: 3822742 - RNA, 17 nt, Human
cagacugaucaggaccu

SEQ ID NO: 3822743 - RNA, 15 nt, Human
cagacugcacccagg

SEQ ID NO: 3822744 - RNA, 17 nt, Human
cagacugcacccaggag

SEQ ID NO: 3822745 - RNA, 15 nt, Human
cagacugcagguugg

SEQ ID NO: 3822746 - RNA, 22 nt, Human
cagacugcuaguguucugucua

SEQ ID NO: 3822747 - RNA, 23 nt, Human
cagacugcugggacuggccaggu

SEQ ID NO: 3822748 - RNA, 14 nt, Human
cagacugcuuccaa

SEQ ID NO: 3822749 - RNA, 14 nt, Human
cagacugcuuuaaa

SEQ ID NO: 3822750 - RNA, 14 nt, Human
cagacuggaagcac

SEQ ID NO: 3822751 - RNA, 18 nt, Human
cagacuggaagcacagcu

SEQ ID NO: 3822752 - RNA, 20 nt, Human
cagacuggaagcacagcuuc

SEQ ID NO: 3822753 - RNA, 21 nt, Human
cagacuggaagcacagcuuca

SEQ ID NO: 3822754 - RNA, 11 nt, Human
cagacuggagg

SEQ ID NO: 3822755 - RNA, 16 nt, Human
cagacuggcuggcugc

SEQ ID NO: 3822756 - RNA, 21 nt, Human
cagacuggggcauccugugcc

SEQ ID NO: 3822757 - RNA, 18 nt, Human
cagacuggguuucuagcc

SEQ ID NO: 3822758 - RNA, 15 nt, Human
cagacuggugagcag

SEQ ID NO: 3822759 - RNA, 12 nt, Human
cagacuguguaa

SEQ ID NO: 3822760 - RNA, 14 nt, Human
cagacuguguaaaa

SEQ ID NO: 3822761 - RNA, 21 nt, Human
cagacuguguaaaaagagagc

SEQ ID NO: 3822762 - RNA, 16 nt, Human
cagagcaagcuuuuuu

SEQ ID NO: 3822763 - RNA, 19 nt, Human
cagagcaagcuuuuuuauu

SEQ ID NO: 3822764 - RNA, 20 nt, Human
cagagcaagcuuuuuuauuu

SEQ ID NO: 3822765 - RNA, 18 nt, Human
cagagcacagcagccccu

SEQ ID NO: 3822766 - RNA, 19 nt, Human
cagagcaccugcugucugg

SEQ ID NO: 3822767 - RNA, 19 nt, Human
cagagcaccuuagacaguc

SEQ ID NO: 3822768 - RNA, 21 nt, Human
cagagcaccuuagacaguccc

SEQ ID NO: 3822769 - RNA, 15 nt, Human
cagagcacugcucca

SEQ ID NO: 3822770 - RNA, 20 nt, Human
cagagcacuggguugcaggg

SEQ ID NO: 3822771 - RNA, 13 nt, Human
cagagcacuguau

SEQ ID NO: 3822772 - RNA, 15 nt, Human
cagagcagagaccau

SEQ ID NO: 3822773 - RNA, 17 nt, Human
cagagcagagaccaucc

SEQ ID NO: 3822774 - RNA, 20 nt, Human
cagagcagaugcagagagcc

SEQ ID NO: 3822775 - RNA, 14 nt, Human
cagagcaggaccuc

SEQ ID NO: 3822776 - RNA, 16 nt, Human
cagagcaggaccuccc

SEQ ID NO: 3822777 - RNA, 18 nt, Human
cagagcaggaccucccuu

SEQ ID NO: 3822778 - RNA, 13 nt, Human
cagagcaggcaau

SEQ ID NO: 3822779 - RNA, 14 nt, Human
cagagcaggggcag

SEQ ID NO: 3822780 - RNA, 19 nt, Human
cagagcaguugagaggaca

SEQ ID NO: 3822781 - RNA, 18 nt, Human
cagagcauuacgugagcc

SEQ ID NO: 3822782 - RNA, 21 nt, Human
cagagcauuacgugagccagg

SEQ ID NO: 3822783 - RNA, 17 nt, Human
cagagcauuccagucag

SEQ ID NO: 3822784 - RNA, 21 nt, Human
cagagcauuccagucaggcuc

SEQ ID NO: 3822785 - RNA, 13 nt, Human
cagagccacacau

SEQ ID NO: 3822786 - RNA, 17 nt, Human
cagagccacacaugggc

SEQ ID NO: 3822787 - RNA, 15 nt, Human
cagagccaggaagau

SEQ ID NO: 3822788 - RNA, 17 nt, Human
cagagccaggaagaucc

SEQ ID NO: 3822789 - RNA, 17 nt, Human
cagagccaggagaagcu

SEQ ID NO: 3822790 - RNA, 23 nt, Human
cagagccaggagaagcucagcug

SEQ ID NO: 3822791 - RNA, 23 nt, Human
cagagccaggggggugaggagcu

SEQ ID NO: 3822792 - RNA, 17 nt, Human
cagagccaugcugggaa

SEQ ID NO: 3822793 - RNA, 14 nt, Human
cagagccauggacu

SEQ ID NO: 3822794 - RNA, 20 nt, Human
cagagccaugucuucucccu

SEQ ID NO: 3822795 - RNA, 17 nt, Human
cagagcccacgccccca

SEQ ID NO: 3822796 - RNA, 19 nt, Human
cagagcccacgcccccacu

SEQ ID NO: 3822797 - RNA, 20 nt, Human
cagagcccacgcccccacug

SEQ ID NO: 3822798 - RNA, 13 nt, Human
cagagcccacucc

SEQ ID NO: 3822799 - RNA, 13 nt, Human
cagagcccagcuc

SEQ ID NO: 3822800 - RNA, 17 nt, Human
cagagcccaggcucggc

SEQ ID NO: 3822801 - RNA, 20 nt, Human
cagagccccacacggaggca

SEQ ID NO: 3822802 - RNA, 23 nt, Human
cagagccccacacggaggcaucu

SEQ ID NO: 3822803 - RNA, 22 nt, Human
cagagccccacagccccaucug

SEQ ID NO: 3822804 - RNA, 14 nt, Human
cagagcccccagga

SEQ ID NO: 3822805 - RNA, 16 nt, Human
cagagccccuccucca

SEQ ID NO: 3822806 - RNA, 15 nt, Human
cagagcccugcuccc

SEQ ID NO: 3822807 - RNA, 17 nt, Human
cagagcccugcucccuc

SEQ ID NO: 3822808 - RNA, 23 nt, Human
cagagcccugugaggcugggucc

SEQ ID NO: 3822809 - RNA, 18 nt, Human
cagagccggcccgccucu

SEQ ID NO: 3822810 - RNA, 22 nt, Human
cagagccggggugggguggcug

SEQ ID NO: 3822811 - RNA, 20 nt, Human
cagagccgugguccuuuggg

SEQ ID NO: 3822812 - RNA, 19 nt, Human
cagagccucccaaggagaa

SEQ ID NO: 3822813 - RNA, 16 nt, Human
cagagccucgcucugu

SEQ ID NO: 3822814 - RNA, 17 nt, Human
cagagccugccccagcg

SEQ ID NO: 3822815 - RNA, 16 nt, Human
cagagccuggggcucu

SEQ ID NO: 3822816 - RNA, 20 nt, Human
cagagccuuuggaugaccag

SEQ ID NO: 3822817 - RNA, 19 nt, Human
cagagcgccccucccuagu

SEQ ID NO: 3822818 - RNA, 22 nt, Human
cagagcgccgugaguucucagg

SEQ ID NO: 3822819 - RNA, 21 nt, Human
cagagcuaagggugggugcuc

SEQ ID NO: 3822820 - RNA, 17 nt, Human
cagagcuacacagggga

SEQ ID NO: 3822821 - RNA, 22 nt, Human
cagagcuacacaggggaaaaga

SEQ ID NO: 3822822 - RNA, 20 nt, Human
cagagcucuccagcuccaag

SEQ ID NO: 3822823 - RNA, 12 nt, Human
cagagcucucuc

SEQ ID NO: 3822824 - RNA, 17 nt, Human
cagagcucucucuacag

SEQ ID NO: 3822825 - RNA, 19 nt, Human
cagagcucuggagccaccu

SEQ ID NO: 3822826 - RNA, 19 nt, Human
cagagcugacacaggauga

SEQ ID NO: 3822827 - RNA, 13 nt, Human
cagagcugcccuc

SEQ ID NO: 3822828 - RNA, 18 nt, Human
cagagcugcccucuccug

SEQ ID NO: 3822829 - RNA, 19 nt, Human
cagagcugcccucuccugg

SEQ ID NO: 3822830 - RNA, 21 nt, Human
cagagcugcccucuccugggc

SEQ ID NO: 3822831 - RNA, 23 nt, Human
cagagcugcccucuccugggcag

SEQ ID NO: 3822832 - RNA, 16 nt, Human
cagagcugcgggcugg

SEQ ID NO: 3822833 - RNA, 16 nt, Human
cagagcugcuuccccg

SEQ ID NO: 3822834 - RNA, 16 nt, Human
cagagcuggaccagug

SEQ ID NO: 3822835 - RNA, 21 nt, Human
cagagcuggagaugaggccag

SEQ ID NO: 3822836 - RNA, 23 nt, Human
cagagcuggagaugaggccagac

SEQ ID NO: 3822837 - RNA, 18 nt, Human
cacuuaccuagauuuaca

SEQ ID NO: 3822838 - RNA, 15 nt, Human
cacuuacuguuucug

SEQ ID NO: 3822839 - RNA, 17 nt, Human
cacuuagcgaacccuuu

SEQ ID NO: 3822840 - RNA, 17 nt, Human
cacuuaucugaucagaa

SEQ ID NO: 3822841 - RNA, 20 nt, Human
cacuuauuccccauucuucc

SEQ ID NO: 3822842 - RNA, 17 nt, Human
cacuuauuucauaaaca

SEQ ID NO: 3822843 - RNA, 13 nt, Human
cacuucaaaacaa

SEQ ID NO: 3822844 - RNA, 19 nt, Human
cacuucacgcccuuggcca

SEQ ID NO: 3822845 - RNA, 21 nt, Human
cacuucacugcgaagacccuc

SEQ ID NO: 3822846 - RNA, 18 nt, Human
cacuucagagagcuggua

SEQ ID NO: 3822847 - RNA, 21 nt, Human
cacuucagcugacuuuucugu

SEQ ID NO: 3822848 - RNA, 18 nt, Human
cacuucaggucaggaguu

SEQ ID NO: 3822849 - RNA, 13 nt, Human
cacuucaucuucu

SEQ ID NO: 3822850 - RNA, 15 nt, Human
cacuucauguaaagu

SEQ ID NO: 3822851 - RNA, 13 nt, Human
cacuucauugaaa

SEQ ID NO: 3822852 - RNA, 22 nt, Human
cacuucauugagaguuuugucu

SEQ ID NO: 3822853 - RNA, 15 nt, Human
cacuuccaccagccu

SEQ ID NO: 3822854 - RNA, 17 nt, Human
cacuuccaccagccugc

SEQ ID NO: 3822855 - RNA, 18 nt, Human
cacuuccaccagccugca

SEQ ID NO: 3822856 - RNA, 19 nt, Human
cacuuccaccagccugcac

SEQ ID NO: 3822857 - RNA, 14 nt, Human
cacuuccaggggaa

SEQ ID NO: 3822858 - RNA, 17 nt, Human
cacuuccaggggaaccu

SEQ ID NO: 3822859 - RNA, 20 nt, Human
cacuuccaggggaaccugcc

SEQ ID NO: 3822860 - RNA, 18 nt, Human
cacuuccauacagcucua

SEQ ID NO: 3822861 - RNA, 16 nt, Human
cacuucccacccugcc

SEQ ID NO: 3822862 - RNA, 23 nt, Human
cacuucccagguaagcaggagga

SEQ ID NO: 3822863 - RNA, 16 nt, Human
cacuucccucuguuuc

SEQ ID NO: 3822864 - RNA, 17 nt, Human
cacuucccucuguuucu

SEQ ID NO: 3822865 - RNA, 11 nt, Human
cacuucccugg

SEQ ID NO: 3822866 - RNA, 12 nt, Human
cacuucccuggc

SEQ ID NO: 3822867 - RNA, 19 nt, Human
cacuucccuggcggcccca

SEQ ID NO: 3822868 - RNA, 12 nt, Human
cacuuccugccu

SEQ ID NO: 3822869 - RNA, 18 nt, Human
cacuuccuguccagagag

SEQ ID NO: 3822870 - RNA, 17 nt, Human
cacuuccuguuuuauaa

SEQ ID NO: 3822871 - RNA, 23 nt, Human
cacuucgcaccggagugucugga

SEQ ID NO: 3822872 - RNA, 21 nt, Human
cacuucgcgugcccucgcugc

SEQ ID NO: 3822873 - RNA, 17 nt, Human
cacuucggccagagcug

SEQ ID NO: 3822874 - RNA, 17 nt, Human
cacuucuaaaugaagug

SEQ ID NO: 3822875 - RNA, 20 nt, Human
cacuucuaaguugaguauau

SEQ ID NO: 3822876 - RNA, 13 nt, Human
cacuucucaggac

SEQ ID NO: 3822877 - RNA, 14 nt, Human
cacuucucaggaca

SEQ ID NO: 3822878 - RNA, 21 nt, Human
cacuucucaggacacaggccu

SEQ ID NO: 3822879 - RNA, 23 nt, Human
cacuucucaggacacaggccugu

SEQ ID NO: 3822880 - RNA, 17 nt, Human
cacuucucaucacacac

SEQ ID NO: 3822881 - RNA, 17 nt, Human
cacuucugacagccuca

SEQ ID NO: 3822882 - RNA, 19 nt, Human
cacuucugaccacacuucc

SEQ ID NO: 3822883 - RNA, 17 nt, Human
cacuucugacucuuccc

SEQ ID NO: 3822884 - RNA, 13 nt, Human
cacuucugccaga

SEQ ID NO: 3822885 - RNA, 17 nt, Human
cacuucugccagauguc

SEQ ID NO: 3822886 - RNA, 18 nt, Human
cacuucugggcuucaucu

SEQ ID NO: 3822887 - RNA, 19 nt, Human
cacuucuggguggggcagu

SEQ ID NO: 3822888 - RNA, 14 nt, Human
cacuucuguccaua

SEQ ID NO: 3822889 - RNA, 16 nt, Human
cacuucuguccuguga

SEQ ID NO: 3822890 - RNA, 18 nt, Human
cacuucuguccugugagg

SEQ ID NO: 3822891 - RNA, 20 nt, Human
cacuucugugagacccccac

SEQ ID NO: 3822892 - RNA, 13 nt, Human
cacuucuuccuuu

SEQ ID NO: 3822893 - RNA, 16 nt, Human
cacuucuucuguccaa

SEQ ID NO: 3822894 - RNA, 13 nt, Human
cacuucuuucccu

SEQ ID NO: 3822895 - RNA, 15 nt, Human
cacuucuuucccuuc

SEQ ID NO: 3822896 - RNA, 19 nt, Human
cacuucuuucccuuccucc

SEQ ID NO: 3822897 - RNA, 15 nt, Human
cacuucuuuuauaac

SEQ ID NO: 3822898 - RNA, 17 nt, Human
cacuugaacaaaaucug

SEQ ID NO: 3822899 - RNA, 18 nt, Human
cacuugaacaaaaucugu

SEQ ID NO: 3822900 - RNA, 17 nt, Human
cacuugagaauuacccu

SEQ ID NO: 3822901 - RNA, 14 nt, Human
cacuugaggccuga

SEQ ID NO: 3822902 - RNA, 17 nt, Human
cacuugaggccugaucu

SEQ ID NO: 3822903 - RNA, 22 nt, Human
cacuugaggucaggaguuccua

SEQ ID NO: 3822904 - RNA, 19 nt, Human
cacuugaugacccccaacc

SEQ ID NO: 3822905 - RNA, 16 nt, Human
cacuugaugugccauu

SEQ ID NO: 3822906 - RNA, 10 nt, Human
auucauuuaa

SEQ ID NO: 3822907 - RNA, 13 nt, Human
auucauuuaaaau

SEQ ID NO: 3822908 - RNA, 14 nt, Human
auucauuuaaguca

SEQ ID NO: 3822909 - RNA, 22 nt, Human
auucauuucaaagggagagaga

SEQ ID NO: 3822910 - RNA, 19 nt, Human
auucauuucacuguagcuc

SEQ ID NO: 3822911 - RNA, 18 nt, Human
auucauuuuaacaucuga

SEQ ID NO: 3822912 - RNA, 13 nt, Human
auucauuuucuag

SEQ ID NO: 3822913 - RNA, 14 nt, Human
auucauuuucuaga

SEQ ID NO: 3822914 - RNA, 15 nt, Human
auucauuuucuagau

SEQ ID NO: 3822915 - RNA, 15 nt, Human
auucauuuucucuaa

SEQ ID NO: 3822916 - RNA, 14 nt, Human
auuccaaaauauua

SEQ ID NO: 3822917 - RNA, 18 nt, Human
auuccaaaccaaauuuua

SEQ ID NO: 3822918 - RNA, 20 nt, Human
auuccaaagcaaaaccagaa

SEQ ID NO: 3822919 - RNA, 21 nt, Human
auuccaaagcuuuauuaccag

SEQ ID NO: 3822920 - RNA, 19 nt, Human
auuccaaagucucuaauuc

SEQ ID NO: 3822921 - RNA, 15 nt, Human
auuccaacaaagggu

SEQ ID NO: 3822922 - RNA, 18 nt, Human
auuccaacaaaggguuuu

SEQ ID NO: 3822923 - RNA, 19 nt, Human
auuccaacaaaggguuuua

SEQ ID NO: 3822924 - RNA, 15 nt, Human
auuccaacagugagu

SEQ ID NO: 3822925 - RNA, 15 nt, Human
auuccaaccccaacu

SEQ ID NO: 3822926 - RNA, 17 nt, Human
auuccaaccccaacucc

SEQ ID NO: 3822927 - RNA, 16 nt, Human
auuccaagacucuaga

SEQ ID NO: 3822928 - RNA, 17 nt, Human
auuccaagacucuagag

SEQ ID NO: 3822929 - RNA, 18 nt, Human
auuccaagacucuagagu

SEQ ID NO: 3822930 - RNA, 14 nt, Human
auuccaagucucca

SEQ ID NO: 3822931 - RNA, 17 nt, Human
auuccaagugauugaaa

SEQ ID NO: 3822932 - RNA, 15 nt, Human
auuccaauauuucug

SEQ ID NO: 3822933 - RNA, 12 nt, Human
auuccacagcug

SEQ ID NO: 3822934 - RNA, 12 nt, Human
auuccacaucua

SEQ ID NO: 3822935 - RNA, 18 nt, Human
auuccacuacaccuggcu

SEQ ID NO: 3822936 - RNA, 16 nt, Human
auuccagaaaggauau

SEQ ID NO: 3822937 - RNA, 21 nt, Human
auuccagaagaagagaagcug

SEQ ID NO: 3822938 - RNA, 22 nt, Human
auuccagaagaagagaagcugc

SEQ ID NO: 3822939 - RNA, 23 nt, Human
auuccagaagaagagaagcugcu

SEQ ID NO: 3822940 - RNA, 18 nt, Human
auuccagaccugaagaau

SEQ ID NO: 3822941 - RNA, 19 nt, Human
auuccagagaguggcuccu

SEQ ID NO: 3822942 - RNA, 19 nt, Human
auuccagagcguguaguga

SEQ ID NO: 3822943 - RNA, 14 nt, Human
auuccagaucccag

SEQ ID NO: 3822944 - RNA, 19 nt, Human
auuccagaucuuucagaaa

SEQ ID NO: 3822945 - RNA, 21 nt, Human
auuccagaucuuucagaaaua

SEQ ID NO: 3822946 - RNA, 17 nt, Human
auuccagccaucaccuu

SEQ ID NO: 3822947 - RNA, 21 nt, Human
auuccagcucauucauuuuau

SEQ ID NO: 3822948 - RNA, 13 nt, Human
auuccagcugucc

SEQ ID NO: 3822949 - RNA, 16 nt, Human
auuccagguuuaagua

SEQ ID NO: 3822950 - RNA, 16 nt, Human
auuccauauauccuuu

SEQ ID NO: 3822951 - RNA, 23 nt, Human
auuccauaucuugcgaauccaag

SEQ ID NO: 3822952 - RNA, 21 nt, Human
auuccauauuagaaaacuuug

SEQ ID NO: 3822953 - RNA, 14 nt, Human
auuccauccauaua

SEQ ID NO: 3822954 - RNA, 18 nt, Human
auuccaugaaucgcuucu

SEQ ID NO: 3822955 - RNA, 17 nt, Human
auuccaugaauguauca

SEQ ID NO: 3822956 - RNA, 14 nt, Human
auuccaugacugcu

SEQ ID NO: 3822957 - RNA, 17 nt, Human
auuccaugcuaagcaag

SEQ ID NO: 3822958 - RNA, 18 nt, Human
auuccauuuaucuuucua

SEQ ID NO: 3822959 - RNA, 22 nt, Human
auucccaacugaguguuauuug

SEQ ID NO: 3822960 - RNA, 16 nt, Human
auucccaagaaaugcu

SEQ ID NO: 3822961 - RNA, 15 nt, Human
auucccaagcucugc

SEQ ID NO: 3822962 - RNA, 12 nt, Human
auucccagagac

SEQ ID NO: 3822963 - RNA, 16 nt, Human
auucccagagacagga

SEQ ID NO: 3822964 - RNA, 21 nt, Human
auucccaggaguucugcucau

SEQ ID NO: 3822965 - RNA, 22 nt, Human
auucccagggaagugcucugau

SEQ ID NO: 3822966 - RNA, 14 nt, Human
auucccauugaaaa

SEQ ID NO: 3822967 - RNA, 15 nt, Human
auucccauuuugcaa

SEQ ID NO: 3822968 - RNA, 18 nt, Human
auucccauuuugcaaaau

SEQ ID NO: 3822969 - RNA, 22 nt, Human
auuccccacccugaaagcccug

SEQ ID NO: 3822970 - RNA, 20 nt, Human
auuccccagauugcaacagg

SEQ ID NO: 3822971 - RNA, 21 nt, Human
auuccccagguggcugaccca

SEQ ID NO: 3822972 - RNA, 17 nt, Human
auuccccauugccuccu

SEQ ID NO: 3822973 - RNA, 13 nt, Human
auuccccucugcu

SEQ ID NO: 3822974 - RNA, 15 nt, Human
auucccgcaguggga

SEQ ID NO: 3822975 - RNA, 18 nt, Human
auucccguuuugucacuu

SEQ ID NO: 3822976 - RNA, 21 nt, Human
auucccguuuugucacuuuuu

SEQ ID NO: 3822977 - RNA, 23 nt, Human
auucccguuuugucacuuuuucu

SEQ ID NO: 3822978 - RNA, 17 nt, Human
auucccucacucgucuc

SEQ ID NO: 3822979 - RNA, 20 nt, Human
auucccucacucgucucccc

SEQ ID NO: 3822980 - RNA, 18 nt, Human
auucccucgucuuuccca

SEQ ID NO: 3822981 - RNA, 17 nt, Human
auucccugauuuaauau

SEQ ID NO: 3822982 - RNA, 14 nt, Human
auucccuggaccag

SEQ ID NO: 3822983 - RNA, 23 nt, Human
auucccuucgacagcauuuuccu

SEQ ID NO: 3822984 - RNA, 16 nt, Human
auucccuuguuauuca

SEQ ID NO: 3822985 - RNA, 21 nt, Human
auuccgacaaccgaugcucca

SEQ ID NO: 3822986 - RNA, 19 nt, Human
auuccggauccuaagcauc

SEQ ID NO: 3822987 - RNA, 23 nt, Human
auuccguagccagcugcucccca

SEQ ID NO: 3822988 - RNA, 18 nt, Human
auuccuacaauauauauu

SEQ ID NO: 3822989 - RNA, 16 nt, Human
auuccuacagcacuac

SEQ ID NO: 3822990 - RNA, 19 nt, Human
auuccuagauaaaaagaug

SEQ ID NO: 3822991 - RNA, 21 nt, Human
auuccuagauaaaaagauggc

SEQ ID NO: 3822992 - RNA, 14 nt, Human
auuccuaguuggug

SEQ ID NO: 3822993 - RNA, 16 nt, Human
auuccuaguuggugag

SEQ ID NO: 3822994 - RNA, 21 nt, Human
auuccuauacgcagcgugcuu

SEQ ID NO: 3822995 - RNA, 20 nt, Human
auuccuauauccugugacug

SEQ ID NO: 3822996 - RNA, 19 nt, Human
auuccuauugugauuugac

SEQ ID NO: 3822997 - RNA, 19 nt, Human
auuccucauccucagaugc

SEQ ID NO: 3822998 - RNA, 21 nt, Human
auuccucauccucagaugcuc

SEQ ID NO: 3822999 - RNA, 16 nt, Human
auuccucaugaaugua

SEQ ID NO: 3823000 - RNA, 23 nt, Human
auuccucaugaauguaaauuugu

SEQ ID NO: 3823001 - RNA, 15 nt, Human
auuccuccaccugcc

SEQ ID NO: 3823002 - RNA, 15 nt, Human
auuccuccugcucau

SEQ ID NO: 3823003 - RNA, 20 nt, Human
auuccuccugcucauauugu

SEQ ID NO: 3823004 - RNA, 16 nt, Human
auuccucuuugcuuug

SEQ ID NO: 3823005 - RNA, 16 nt, Human
auuccugaagaaccag

SEQ ID NO: 3823006 - RNA, 19 nt, Human
auuccugaaugaaauauca

SEQ ID NO: 3823007 - RNA, 14 nt, Human
auuccugacccagg

SEQ ID NO: 3823008 - RNA, 22 nt, Human
auuccugacccaggccgcagcu

SEQ ID NO: 3823009 - RNA, 23 nt, Human
auuccuggagcccgaggcaccag

SEQ ID NO: 3823010 - RNA, 13 nt, Human
auuccugggcaca

SEQ ID NO: 3823011 - RNA, 18 nt, Human
auuccugguacccagcca

SEQ ID NO: 3823012 - RNA, 20 nt, Human
auuccugguacccagccauc

SEQ ID NO: 3823013 - RNA, 21 nt, Human
auuccuguacugugucucaug

SEQ ID NO: 3823014 - RNA, 22 nt, Human
auuccuguggauguaaagugau

SEQ ID NO: 3823015 - RNA, 20 nt, Human
auuccuuagcuuagaccuca

SEQ ID NO: 3823016 - RNA, 23 nt, Human
auuccuuagcuuagaccucagcc

SEQ ID NO: 3823017 - RNA, 24 nt, Human
auuccuuagcuuagaccucagccu

SEQ ID NO: 3823018 - RNA, 18 nt, Human
auuccuuccuguucugaa

SEQ ID NO: 3823019 - RNA, 22 nt, Human
auuccuucucugaacacaggca

SEQ ID NO: 3823020 - RNA, 14 nt, Human
auuccuucuggccu

SEQ ID NO: 3823021 - RNA, 17 nt, Human
auuccuucuuugauaau

SEQ ID NO: 3823022 - RNA, 13 nt, Human
auuccuugauaau

SEQ ID NO: 3823023 - RNA, 12 nt, Human
auuccuuucccu

SEQ ID NO: 3823024 - RNA, 14 nt, Human
auuccuuucccuuc

SEQ ID NO: 3823025 - RNA, 19 nt, Human
auuccuuucccuuccucuu

SEQ ID NO: 3823026 - RNA, 14 nt, Human
auuccuuucccuuu

SEQ ID NO: 3823027 - RNA, 15 nt, Human
auuccuuucccuuua

SEQ ID NO: 3823028 - RNA, 17 nt, Human
auuccuuucucauccca

SEQ ID NO: 3823029 - RNA, 18 nt, Human
auuccuuugaagaggaaa

SEQ ID NO: 3823030 - RNA, 23 nt, Human
auuccuuugucuucaaacuguga

SEQ ID NO: 3823031 - RNA, 22 nt, Human
auuccuuuguuacuucucuaau

SEQ ID NO: 3823032 - RNA, 20 nt, Human
auuccuuuucuuguuuauca

SEQ ID NO: 3823033 - RNA, 18 nt, Human
auuccuuuuguguacagu

SEQ ID NO: 3823034 - RNA, 15 nt, Human
auuccuuuuuauuua

SEQ ID NO: 3823035 - RNA, 20 nt, Human
auuccuuuuuauuuauaugu

SEQ ID NO: 3823036 - RNA, 21 nt, Human
auuccuuuuuauuuauaugua

SEQ ID NO: 3823037 - RNA, 14 nt, Human
auucgagcuauauu

SEQ ID NO: 3823038 - RNA, 15 nt, Human
auucgagcuauauuu

SEQ ID NO: 3823039 - RNA, 17 nt, Human
auucgccacacaguauu

SEQ ID NO: 3823040 - RNA, 19 nt, Human
auucgccacacaguauuuu

SEQ ID NO: 3823041 - RNA, 14 nt, Human
auucgcuugagaaa

SEQ ID NO: 3823042 - RNA, 21 nt, Human
auucggaacuguccuuuccuu

SEQ ID NO: 3823043 - RNA, 15 nt, Human
auucgggccccaccu

SEQ ID NO: 3823044 - RNA, 17 nt, Human
auucgggccccaccugc

SEQ ID NO: 3823045 - RNA, 23 nt, Human
cagacuccuucaacaauucuaaa

SEQ ID NO: 3823046 - RNA, 22 nt, Human
cagacucgauucauauugaaua

SEQ ID NO: 3823047 - RNA, 17 nt, Human
cagacucuaagaaagaa

SEQ ID NO: 3823048 - RNA, 20 nt, Human
cagacucuacagaggccaug

SEQ ID NO: 3823049 - RNA, 23 nt, Human
cagacucuacagaggccaugggc

SEQ ID NO: 3823050 - RNA, 16 nt, Human
auucugggaauguaua

SEQ ID NO: 3823051 - RNA, 17 nt, Human
auucugggaauguauag

SEQ ID NO: 3823052 - RNA, 15 nt, Human
auucuggucucucua

SEQ ID NO: 3823053 - RNA, 12 nt, Human
auucuguaaaug

SEQ ID NO: 3823054 - RNA, 12 nt, Human
auucuguacaua

SEQ ID NO: 3823055 - RNA, 19 nt, Human
auucuguacauagccuaua

SEQ ID NO: 3823056 - RNA, 20 nt, Human
auucuguacauagccuauau

SEQ ID NO: 3823057 - RNA, 21 nt, Human
auucuguacugauuuuuguaa

SEQ ID NO: 3823058 - RNA, 15 nt, Human
auucuguagauucug

SEQ ID NO: 3823059 - RNA, 18 nt, Human
cagcauugauauuugugc

SEQ ID NO: 3823060 - RNA, 22 nt, Human
cagcauugauauuugugcauuu

SEQ ID NO: 3823061 - RNA, 18 nt, Human
cagcauuuagcuggccac

SEQ ID NO: 3823062 - RNA, 22 nt, Human
cagcauuuagcuggccacaugg

SEQ ID NO: 3823063 - RNA, 21 nt, Human
cagcauuuccacaccaagcag

SEQ ID NO: 3823064 - RNA, 15 nt, Human
cagcauuucugaagu

SEQ ID NO: 3823065 - RNA, 11 nt, Human
cagcauuugau

SEQ ID NO: 3823066 - RNA, 12 nt, Human
cagcauuugaua

SEQ ID NO: 3823067 - RNA, 14 nt, Human
cagcauuugauaau

SEQ ID NO: 3823068 - RNA, 17 nt, Human
cagcauuugauaaugau

SEQ ID NO: 3823069 - RNA, 22 nt, Human
cagcauuuguguguuacaaugu

SEQ ID NO: 3823070 - RNA, 23 nt, Human
cagcauuuuccucugcuuugaaa

SEQ ID NO: 3823071 - RNA, 19 nt, Human
cagccaaacccaugaggca

SEQ ID NO: 3823072 - RNA, 17 nt, Human
cagccaaagauaaucuc

SEQ ID NO: 3823073 - RNA, 20 nt, Human
cagccaaagauaaucucuca

SEQ ID NO: 3823074 - RNA, 18 nt, Human
cagccaaagccuccucca

SEQ ID NO: 3823075 - RNA, 22 nt, Human
cagccaaauguaauugaauaaa

SEQ ID NO: 3823076 - RNA, 14 nt, Human
cagccaaauuuaaa

SEQ ID NO: 3823077 - RNA, 23 nt, Human
cagccaacagcuacaacagccuc

SEQ ID NO: 3823078 - RNA, 23 nt, Human
cagccaacagguggcaggaccag

SEQ ID NO: 3823079 - RNA, 14 nt, Human
cagccaacuagccc

SEQ ID NO: 3823080 - RNA, 20 nt, Human
cagccaacuagccccugggg

SEQ ID NO: 3823081 - RNA, 18 nt, Human
cagccaacuauggccugu

SEQ ID NO: 3823082 - RNA, 19 nt, Human
cagccaagcacaguggugg

SEQ ID NO: 3823083 - RNA, 14 nt, Human
cagccaaguuuuau

SEQ ID NO: 3823084 - RNA, 15 nt, Human
cagccaauauuuaaa

SEQ ID NO: 3823085 - RNA, 11 nt, Human
cagccacacac

SEQ ID NO: 3823086 - RNA, 14 nt, Human
cagccacacacaca

SEQ ID NO: 3823087 - RNA, 15 nt, Human
cagccacacacacag

SEQ ID NO: 3823088 - RNA, 14 nt, Human
cagccacacuucuc

SEQ ID NO: 3823089 - RNA, 16 nt, Human
cagccacacuucucag

SEQ ID NO: 3823090 - RNA, 17 nt, Human
cagccacacuucucagg

SEQ ID NO: 3823091 - RNA, 14 nt, Human
cagccacacuugaa

SEQ ID NO: 3823092 - RNA, 23 nt, Human
cagccacaguuuccucaucuguc

SEQ ID NO: 3823093 - RNA, 17 nt, Human
cagccacauuccugaug

SEQ ID NO: 3823094 - RNA, 15 nt, Human
cagccaccccaugcu

SEQ ID NO: 3823095 - RNA, 18 nt, Human
cagccaccccaugcuggc

SEQ ID NO: 3823096 - RNA, 19 nt, Human
cagccaccccaugcuggcc

SEQ ID NO: 3823097 - RNA, 17 nt, Human
cagccaccccgggcucu

SEQ ID NO: 3823098 - RNA, 20 nt, Human
cagccacccugaggagucug

SEQ ID NO: 3823099 - RNA, 21 nt, Human
cagccacccugaggagucuga

SEQ ID NO: 3823100 - RNA, 20 nt, Human
cagccacggacgcuggcucc

SEQ ID NO: 3823101 - RNA, 20 nt, Human
cagccacuccccagccagcc

SEQ ID NO: 3823102 - RNA, 16 nt, Human
cagccacuccccggca

SEQ ID NO: 3823103 - RNA, 21 nt, Human
cagccacucgggaggcugaga

SEQ ID NO: 3823104 - RNA, 16 nt, Human
cagccacuuaggacaa

SEQ ID NO: 3823105 - RNA, 22 nt, Human
cagccagaaccccgagcccuac

SEQ ID NO: 3823106 - RNA, 12 nt, Human
cagccagaacuc

SEQ ID NO: 3823107 - RNA, 16 nt, Human
cagccagaccagcagg

SEQ ID NO: 3823108 - RNA, 15 nt, Human
cagccagacuggcac

SEQ ID NO: 3823109 - RNA, 15 nt, Human
cagccagaguuccug

SEQ ID NO: 3823110 - RNA, 19 nt, Human
cagccagaguuccugcgga

SEQ ID NO: 3823111 - RNA, 23 nt, Human
cagccagcaaugauguccagaag

SEQ ID NO: 3823112 - RNA, 14 nt, Human
cagccagcaccugg

SEQ ID NO: 3823113 - RNA, 16 nt, Human
cagccagcaccuggca

SEQ ID NO: 3823114 - RNA, 12 nt, Human
cagccagcagcc

SEQ ID NO: 3823115 - RNA, 23 nt, Human
cagccagcaguucagagcugccc

SEQ ID NO: 3823116 - RNA, 11 nt, Human
cagccagccca

SEQ ID NO: 3823117 - RNA, 15 nt, Human
cagccagcccagccc

SEQ ID NO: 3823118 - RNA, 17 nt, Human
cagccagcccugccugg

SEQ ID NO: 3823119 - RNA, 20 nt, Human
cagccagcccugccuggagg

SEQ ID NO: 3823120 - RNA, 14 nt, Human
cagccagccgugag

SEQ ID NO: 3823121 - RNA, 11 nt, Human
cagccagccuc

SEQ ID NO: 3823122 - RNA, 23 nt, Human
cagccagccucgcccauccccuu

SEQ ID NO: 3823123 - RNA, 14 nt, Human
cagccagccuggcu

SEQ ID NO: 3823124 - RNA, 15 nt, Human
cagccagccuggcug

SEQ ID NO: 3823125 - RNA, 18 nt, Human
cagccagcgccucccucc

SEQ ID NO: 3823126 - RNA, 21 nt, Human
cagccagcgccucccuccacc

SEQ ID NO: 3823127 - RNA, 23 nt, Human
cagccagcgucggucugugcccc

SEQ ID NO: 3823128 - RNA, 12 nt, Human
cagccagcucuc

SEQ ID NO: 3823129 - RNA, 16 nt, Human
cagccaggacaccggg

SEQ ID NO: 3823130 - RNA, 22 nt, Human
cagccaggaccauaccgggucu

SEQ ID NO: 3823131 - RNA, 11 nt, Human
cagccaggagc

SEQ ID NO: 3823132 - RNA, 22 nt, Human
cagccaggagcugggcagaagg

SEQ ID NO: 3823133 - RNA, 18 nt, Human
cagccaggagcugucacc

SEQ ID NO: 3823134 - RNA, 18 nt, Human
cagccaggccacuggccc

SEQ ID NO: 3823135 - RNA, 13 nt, Human
cagccaggcccag

SEQ ID NO: 3823136 - RNA, 17 nt, Human
cagccaggcccagccga

SEQ ID NO: 3823137 - RNA, 21 nt, Human
cagccaggcccagccgacccc

SEQ ID NO: 3823138 - RNA, 15 nt, Human
cagccaggccccagg

SEQ ID NO: 3823139 - RNA, 13 nt, Human
cagccaggcgggc

SEQ ID NO: 3823140 - RNA, 19 nt, Human
cagccaggcgggcucaagg

SEQ ID NO: 3823141 - RNA, 16 nt, Human
cagccaggcucugugc

SEQ ID NO: 3823142 - RNA, 22 nt, Human
cagccaggcucugugcugaccc

SEQ ID NO: 3823143 - RNA, 23 nt, Human
cagccaggcucugugcugacccu

SEQ ID NO: 3823144 - RNA, 14 nt, Human
cagccagggagagc

SEQ ID NO: 3823145 - RNA, 24 nt, Human
cagccagggagagcccaggagcuc

SEQ ID NO: 3823146 - RNA, 20 nt, Human
cagccagggaggacaagcag

SEQ ID NO: 3823147 - RNA, 16 nt, Human
cagccagggccugcga

SEQ ID NO: 3823148 - RNA, 15 nt, Human
cagccagggcugcua

SEQ ID NO: 3823149 - RNA, 16 nt, Human
cagccaggugccuugg

SEQ ID NO: 3823150 - RNA, 22 nt, Human
cagccaguaaaugggggugcau

SEQ ID NO: 3823151 - RNA, 22 nt, Human
cagccagucccguuucauuuag

SEQ ID NO: 3823152 - RNA, 18 nt, Human
cagccagugagaugaggg

SEQ ID NO: 3823153 - RNA, 17 nt, Human
cagccagugcccugagc

SEQ ID NO: 3823154 - RNA, 18 nt, Human
cagccagugcccugagcc

SEQ ID NO: 3823155 - RNA, 21 nt, Human
cagccagugcccugagccagg

SEQ ID NO: 3823156 - RNA, 18 nt, Human
cagccauaggcccuuuca

SEQ ID NO: 3823157 - RNA, 20 nt, Human
cagccauaggcccuuucagu

SEQ ID NO: 3823158 - RNA, 16 nt, Human
cagccaucaaaaugcu

SEQ ID NO: 3823159 - RNA, 17 nt, Human
cagccaucaaaaugcuu

SEQ ID NO: 3823160 - RNA, 20 nt, Human
cagccaugccagcuggccuu

SEQ ID NO: 3823161 - RNA, 14 nt, Human
cagccauguacaga

SEQ ID NO: 3823162 - RNA, 17 nt, Human
cagccaugugcugcgug

SEQ ID NO: 3823163 - RNA, 21 nt, Human
cagccaugugcugcgugccug

SEQ ID NO: 3823164 - RNA, 16 nt, Human
cagccauuaccaugga

SEQ ID NO: 3823165 - RNA, 15 nt, Human
cagccauugcaccca

SEQ ID NO: 3823166 - RNA, 19 nt, Human
cagccauuggcuauuuaaa

SEQ ID NO: 3823167 - RNA, 21 nt, Human
cagcccaaaggggacaggccu

SEQ ID NO: 3823168 - RNA, 10 nt, Human
cagcccaagu

SEQ ID NO: 3823169 - RNA, 22 nt, Human
cagcccaauccagguacgcaca

SEQ ID NO: 3823170 - RNA, 17 nt, Human
cagcccaaucugccaga

SEQ ID NO: 3823171 - RNA, 17 nt, Human
cagcccaccccauggcc

SEQ ID NO: 3823172 - RNA, 18 nt, Human
cagcccacccuccugucu

SEQ ID NO: 3823173 - RNA, 22 nt, Human
cagcccacccuccugucuuccc

SEQ ID NO: 3823174 - RNA, 15 nt, Human
cagcccacguccugu

SEQ ID NO: 3823175 - RNA, 15 nt, Human
cagcccacuggauca

SEQ ID NO: 3823176 - RNA, 15 nt, Human
cagcccacuucugcc

SEQ ID NO: 3823177 - RNA, 11 nt, Human
cagcccagaga

SEQ ID NO: 3823178 - RNA, 21 nt, Human
cagcccagagacauacuugaa

SEQ ID NO: 3823179 - RNA, 13 nt, Human
cagcccagcccag

SEQ ID NO: 3823180 - RNA, 14 nt, Human
cagcccagcccagc

SEQ ID NO: 3823181 - RNA, 13 nt, Human
cagcccagcugcu

SEQ ID NO: 3823182 - RNA, 23 nt, Human
cagcccagcugcucugcccagag

SEQ ID NO: 3823183 - RNA, 20 nt, Human
cagcccaggaagucucaucu

SEQ ID NO: 3823184 - RNA, 12 nt, Human
cagcccagggac

SEQ ID NO: 3823185 - RNA, 18 nt, Human
cagcccagggcuccugca

SEQ ID NO: 3823186 - RNA, 11 nt, Human
cagcccagggu

SEQ ID NO: 3823187 - RNA, 12 nt, Human
cagcccauccau

SEQ ID NO: 3823188 - RNA, 18 nt, Human
cagcccauccauuaggcc

SEQ ID NO: 3823189 - RNA, 18 nt, Human
cagcccauggcccugugc

SEQ ID NO: 3823190 - RNA, 18 nt, Human
cagcccauucucucuccu

SEQ ID NO: 3823191 - RNA, 12 nt, Human
cagcccauuucu

SEQ ID NO: 3823192 - RNA, 16 nt, Human
cagcccauuucuccag

SEQ ID NO: 3823193 - RNA, 20 nt, Human
cagcccauuucuccagaacc

SEQ ID NO: 3823194 - RNA, 17 nt, Human
cagcccauuugggcaga

SEQ ID NO: 3823195 - RNA, 22 nt, Human
cagcacagccucuuagaugcag

SEQ ID NO: 3823196 - RNA, 17 nt, Human
cagcacagcucccugcc

SEQ ID NO: 3823197 - RNA, 22 nt, Human
cagcacagcuuagauuucauag

SEQ ID NO: 3823198 - RNA, 13 nt, Human
cagcacagcuuga

SEQ ID NO: 3823199 - RNA, 17 nt, Human
cagcacagcuugaccug

SEQ ID NO: 3823200 - RNA, 18 nt, Human
cagcacagggauccgacu

SEQ ID NO: 3823201 - RNA, 11 nt, Human
cagcaccaaau

SEQ ID NO: 3823202 - RNA, 13 nt, Human
cagcaccaccagg

SEQ ID NO: 3823203 - RNA, 14 nt, Human
cagcaccacucaag

SEQ ID NO: 3823204 - RNA, 21 nt, Human
cagcaccauccgccagggccc

SEQ ID NO: 3823205 - RNA, 16 nt, Human
cagcaccccugucucu

SEQ ID NO: 3823206 - RNA, 17 nt, Human
cagcacccuauaaauca

SEQ ID NO: 3823207 - RNA, 15 nt, Human
cagcaccgaggggcc

SEQ ID NO: 3823208 - RNA, 18 nt, Human
cagcaccgaggggccuuu

SEQ ID NO: 3823209 - RNA, 19 nt, Human
cagcaccggaccagccugg

SEQ ID NO: 3823210 - RNA, 22 nt, Human
cagcaccggaccagccuggccc

SEQ ID NO: 3823211 - RNA, 15 nt, Human
cagcaccucagccug

SEQ ID NO: 3823212 - RNA, 16 nt, Human
cagcaccuccaggccu

SEQ ID NO: 3823213 - RNA, 14 nt, Human
cagcaccuccucag

SEQ ID NO: 3823214 - RNA, 17 nt, Human
cagcaccuccucagccu

SEQ ID NO: 3823215 - RNA, 12 nt, Human
cagcaccuggca

SEQ ID NO: 3823216 - RNA, 13 nt, Human
cagcaccugucuc

SEQ ID NO: 3823217 - RNA, 16 nt, Human
cagcaccuugugccug

SEQ ID NO: 3823218 - RNA, 19 nt, Human
cagcaccuugugccugggg

SEQ ID NO: 3823219 - RNA, 15 nt, Human
cagcacgauuucugu

SEQ ID NO: 3823220 - RNA, 14 nt, Human
cagcacuaaacuug

SEQ ID NO: 3823221 - RNA, 19 nt, Human
cagcacuaaagcaguggac

SEQ ID NO: 3823222 - RNA, 14 nt, Human
cagcacuacucugu

SEQ ID NO: 3823223 - RNA, 15 nt, Human
cagcacuacugggug

SEQ ID NO: 3823224 - RNA, 19 nt, Human
cagcacuacugggugucau

SEQ ID NO: 3823225 - RNA, 20 nt, Human
cagcacuacugggugucauu

SEQ ID NO: 3823226 - RNA, 20 nt, Human
cagcacuaugcuuuccuucu

SEQ ID NO: 3823227 - RNA, 17 nt, Human
cagcacucacacaggac

SEQ ID NO: 3823228 - RNA, 22 nt, Human
cagcacucgcuagcaguggcag

SEQ ID NO: 3823229 - RNA, 17 nt, Human
cagcacugaggaagaac

SEQ ID NO: 3823230 - RNA, 13 nt, Human
cagcacugcccaa

SEQ ID NO: 3823231 - RNA, 16 nt, Human
cagcacugcuugagga

SEQ ID NO: 3823232 - RNA, 23 nt, Human
cagcacuggcucucuccaggauc

SEQ ID NO: 3823233 - RNA, 12 nt, Human
cagcacuguccc

SEQ ID NO: 3823234 - RNA, 18 nt, Human
cagcacugucccuugccu

SEQ ID NO: 3823235 - RNA, 20 nt, Human
cagcacugucccuugccuca

SEQ ID NO: 3823236 - RNA, 16 nt, Human
cagcacuuggcccuuc

SEQ ID NO: 3823237 - RNA, 21 nt, Human
cagcacuugucucauuuuaau

SEQ ID NO: 3823238 - RNA, 16 nt, Human
cagcacuuugggaggc

SEQ ID NO: 3823239 - RNA, 18 nt, Human
cagcacuuugggaggcug

SEQ ID NO: 3823240 - RNA, 22 nt, Human
cagcacuuugggaggcugaggu

SEQ ID NO: 3823241 - RNA, 22 nt, Human
cagcagaaaugccuuacccuca

SEQ ID NO: 3823242 - RNA, 15 nt, Human
cagcagaagacaaaa

SEQ ID NO: 3823243 - RNA, 12 nt, Human
cagcagacagag

SEQ ID NO: 3823244 - RNA, 14 nt, Human
cagcagacagagcc

SEQ ID NO: 3823245 - RNA, 13 nt, Human
cagcagacauugu

SEQ ID NO: 3823246 - RNA, 16 nt, Human
cagcagacauugucag

SEQ ID NO: 3823247 - RNA, 14 nt, Human
cagcagacuaugaa

SEQ ID NO: 3823248 - RNA, 18 nt, Human
cagcagagacuugggaca

SEQ ID NO: 3823249 - RNA, 19 nt, Human
cagcagagacuugggacau

SEQ ID NO: 3823250 - RNA, 13 nt, Human
cagcagagcaccu

SEQ ID NO: 3823251 - RNA, 9 nt, Human
cagcagagu

SEQ ID NO: 3823252 - RNA, 13 nt, Human
cagcagagugugg

SEQ ID NO: 3823253 - RNA, 16 nt, Human
cagcagaucccagcuc

SEQ ID NO: 3823254 - RNA, 18 nt, Human
cagcagaucccagcucac

SEQ ID NO: 3823255 - RNA, 14 nt, Human
cagcagauuauuca

SEQ ID NO: 3823256 - RNA, 14 nt, Human
cagcagauuggaag

SEQ ID NO: 3823257 - RNA, 18 nt, Human
cagcagauuggaaggaga

SEQ ID NO: 3823258 - RNA, 20 nt, Human
cagcagauuggaaggagaca

SEQ ID NO: 3823259 - RNA, 11 nt, Human
cagcagcaaga

SEQ ID NO: 3823260 - RNA, 13 nt, Human
cagcagcaagaaa

SEQ ID NO: 3823261 - RNA, 20 nt, Human
cagcagcaagaaaaaaaaau

SEQ ID NO: 3823262 - RNA, 16 nt, Human
cagcagcagcagguga

SEQ ID NO: 3823263 - RNA, 15 nt, Human
cagcagcagcccaag

SEQ ID NO: 3823264 - RNA, 13 nt, Human
cagcagcagcccu

SEQ ID NO: 3823265 - RNA, 15 nt, Human
cagcagcagcccugc

SEQ ID NO: 3823266 - RNA, 11 nt, Human
cagcagccagc

SEQ ID NO: 3823267 - RNA, 13 nt, Human
cagcagccagcca

SEQ ID NO: 3823268 - RNA, 19 nt, Human
cagcagccagcccugccug

SEQ ID NO: 3823269 - RNA, 20 nt, Human
cagcagccagcucucagcca

SEQ ID NO: 3823270 - RNA, 13 nt, Human
cagcagcccaagc

SEQ ID NO: 3823271 - RNA, 12 nt, Human
cagcagccccca

SEQ ID NO: 3823272 - RNA, 20 nt, Human
cagcagcccccagcucccac

SEQ ID NO: 3823273 - RNA, 13 nt, Human
cagcagccccugc

SEQ ID NO: 3823274 - RNA, 24 nt, Human
cagcagcccuaaggaucucucagg

SEQ ID NO: 3823275 - RNA, 14 nt, Human
cagcagcccuccuc

SEQ ID NO: 3823276 - RNA, 15 nt, Human
cagcagcccuccuca

SEQ ID NO: 3823277 - RNA, 17 nt, Human
cagcagcccuccucacc

SEQ ID NO: 3823278 - RNA, 18 nt, Human
cagcuggacccugaccag

SEQ ID NO: 3823279 - RNA, 23 nt, Human
cagcuggacccugaccagcuccc

SEQ ID NO: 3823280 - RNA, 17 nt, Human
cagcuggacucugcauc

SEQ ID NO: 3823281 - RNA, 14 nt, Human
cagcuggaggcagg

SEQ ID NO: 3823282 - RNA, 23 nt, Human
cagcuggaggcaggggcuuccug

SEQ ID NO: 3823283 - RNA, 13 nt, Human
cagcuggccugga

SEQ ID NO: 3823284 - RNA, 22 nt, Human
cagcuggcucuacuuccccaug

SEQ ID NO: 3823285 - RNA, 12 nt, Human
cagcugggagaa

SEQ ID NO: 3823286 - RNA, 12 nt, Human
cagcugggaggc

SEQ ID NO: 3823287 - RNA, 13 nt, Human
cagcugggaggca

SEQ ID NO: 3823288 - RNA, 22 nt, Human
cagcugggaggcaagaggggug

SEQ ID NO: 3823289 - RNA, 15 nt, Human
cagcugggcccaacc

SEQ ID NO: 3823290 - RNA, 14 nt, Human
cagcugggcucugc

SEQ ID NO: 3823291 - RNA, 18 nt, Human
cagcugggcucugccacc

SEQ ID NO: 3823292 - RNA, 18 nt, Human
cagcuggggccaggcugg

SEQ ID NO: 3823293 - RNA, 19 nt, Human
cagcuggggccaggcuggg

SEQ ID NO: 3823294 - RNA, 18 nt, Human
cagcuggggcguggggag

SEQ ID NO: 3823295 - RNA, 20 nt, Human
cagcuggggcguggggaggg

SEQ ID NO: 3823296 - RNA, 14 nt, Human
cagcuggggugcag

SEQ ID NO: 3823297 - RNA, 15 nt, Human
cagcuggggugcagg

SEQ ID NO: 3823298 - RNA, 18 nt, Human
cagcuggggugcagggau

SEQ ID NO: 3823299 - RNA, 19 nt, Human
cagcuggggugcagggaug

SEQ ID NO: 3823300 - RNA, 23 nt, Human
cagcugggguggggaccucaggc

SEQ ID NO: 3823301 - RNA, 16 nt, Human
cagcugggucaggcag

SEQ ID NO: 3823302 - RNA, 22 nt, Human
cagcuggguggcacugccaugc

SEQ ID NO: 3823303 - RNA, 19 nt, Human
cagcuggugcccugcuuuc

SEQ ID NO: 3823304 - RNA, 20 nt, Human
cagcuggugcccugcuuuca

SEQ ID NO: 3823305 - RNA, 21 nt, Human
cagcuggugcccugcuuucag

SEQ ID NO: 3823306 - RNA, 22 nt, Human
cagcugguguagcuacagagaa

SEQ ID NO: 3823307 - RNA, 14 nt, Human
cagcuguauagcug

SEQ ID NO: 3823308 - RNA, 18 nt, Human
cagcuguaugauucccag

SEQ ID NO: 3823309 - RNA, 19 nt, Human
cagcuguaugauucccagc

SEQ ID NO: 3823310 - RNA, 15 nt, Human
cagcuguccccccac

SEQ ID NO: 3823311 - RNA, 16 nt, Human
cagcuguccccccacu

SEQ ID NO: 3823312 - RNA, 12 nt, Human
cagcugucccug

SEQ ID NO: 3823313 - RNA, 14 nt, Human
cagcugucccuguc

SEQ ID NO: 3823314 - RNA, 15 nt, Human
cagcugucccuguca

SEQ ID NO: 3823315 - RNA, 24 nt, Human
cagcugucccuugcuugccugcag

SEQ ID NO: 3823316 - RNA, 17 nt, Human
cagcuguccucccucca

SEQ ID NO: 3823317 - RNA, 18 nt, Human
cagcuguccucccuccac

SEQ ID NO: 3823318 - RNA, 22 nt, Human
cagcuguccugcagcaaacacu

SEQ ID NO: 3823319 - RNA, 18 nt, Human
cagcugucuuuuggagga

SEQ ID NO: 3823320 - RNA, 11 nt, Human
cagcugugccu

SEQ ID NO: 3823321 - RNA, 20 nt, Human
cagcugugccucgcucccca

SEQ ID NO: 3823322 - RNA, 24 nt, Human
cagcugugcucuggacaggcaugu

SEQ ID NO: 3823323 - RNA, 11 nt, Human
cagcugugcuu

SEQ ID NO: 3823324 - RNA, 23 nt, Human
cagcuguguccggcccaguuuug

SEQ ID NO: 3823325 - RNA, 19 nt, Human
cagcuguucagauuggaca

SEQ ID NO: 3823326 - RNA, 20 nt, Human
cagcuguucagauuggacau

SEQ ID NO: 3823327 - RNA, 19 nt, Human
cagcuguucagcugguuga

SEQ ID NO: 3823328 - RNA, 23 nt, Human
cagcuguugagccccuccuaguu

SEQ ID NO: 3823329 - RNA, 14 nt, Human
cagcuguugucucu

SEQ ID NO: 3823330 - RNA, 17 nt, Human
cagcuguugucucuucu

SEQ ID NO: 3823331 - RNA, 21 nt, Human
cagcuguugucucuucuccuu

SEQ ID NO: 3823332 - RNA, 24 nt, Human
cagcuguuucuagaguuccuacca

SEQ ID NO: 3823333 - RNA, 16 nt, Human
cagcuuagauuucaua

SEQ ID NO: 3823334 - RNA, 16 nt, Human
cagcuuagggcccugg

SEQ ID NO: 3823335 - RNA, 20 nt, Human
cagcuuagggcccuggaggc

SEQ ID NO: 3823336 - RNA, 18 nt, Human
cagcuuauaaugggcucu

SEQ ID NO: 3823337 - RNA, 13 nt, Human
cagcuuauacgaa

SEQ ID NO: 3823338 - RNA, 19 nt, Human
cagcuuauacgaaauaauu

SEQ ID NO: 3823339 - RNA, 15 nt, Human
cagcuuaucucuuuu

SEQ ID NO: 3823340 - RNA, 19 nt, Human
cagcuuaucucuuuuauau

SEQ ID NO: 3823341 - RNA, 23 nt, Human
caggccccgcuuguccagcgccu

SEQ ID NO: 3823342 - RNA, 14 nt, Human
caggccccucccuc

SEQ ID NO: 3823343 - RNA, 17 nt, Human
caggccccucccucucc

SEQ ID NO: 3823344 - RNA, 22 nt, Human
caggccccuggaggcugccucc

SEQ ID NO: 3823345 - RNA, 13 nt, Human
caggcccggcucc

SEQ ID NO: 3823346 - RNA, 14 nt, Human
caggcccggcucca

SEQ ID NO: 3823347 - RNA, 15 nt, Human
caggcccggcuccag

SEQ ID NO: 3823348 - RNA, 21 nt, Human
caggcccggcuccaggcuccu

SEQ ID NO: 3823349 - RNA, 15 nt, Human
caggcccgucugucc

SEQ ID NO: 3823350 - RNA, 21 nt, Human
caggcccgucuguccaucugc

SEQ ID NO: 3823351 - RNA, 22 nt, Human
caggcccgucuguccaucugcc

SEQ ID NO: 3823352 - RNA, 22 nt, Human
caggcccucccuguuccccaga

SEQ ID NO: 3823353 - RNA, 16 nt, Human
caggcccuccucuccc

SEQ ID NO: 3823354 - RNA, 13 nt, Human
caggcccucugcc

SEQ ID NO: 3823355 - RNA, 19 nt, Human
caggcccucugcccacucc

SEQ ID NO: 3823356 - RNA, 16 nt, Human
caggcccugcaguguu

SEQ ID NO: 3823357 - RNA, 15 nt, Human
caggcccugcuccug

SEQ ID NO: 3823358 - RNA, 15 nt, Human
caggcccuggaacuc

SEQ ID NO: 3823359 - RNA, 20 nt, Human
caggcccuggccuccccugc

SEQ ID NO: 3823360 - RNA, 22 nt, Human
caggcccuggccuccccugcca

SEQ ID NO: 3823361 - RNA, 20 nt, Human
caggcccuggcuaagaccca

SEQ ID NO: 3823362 - RNA, 22 nt, Human
caggcccuggcugagggcagcu

SEQ ID NO: 3823363 - RNA, 18 nt, Human
caggcccuuccucuccac

SEQ ID NO: 3823364 - RNA, 20 nt, Human
caggcccuuccucuccacug

SEQ ID NO: 3823365 - RNA, 21 nt, Human
caggcccuuccucuccacugc

SEQ ID NO: 3823366 - RNA, 20 nt, Human
caggcccuuugaagccucag

SEQ ID NO: 3823367 - RNA, 21 nt, Human
caggcccuuugaagccucagc

SEQ ID NO: 3823368 - RNA, 22 nt, Human
caggcccuuugaagccucagcu

SEQ ID NO: 3823369 - RNA, 20 nt, Human
caggccgccccagccucuga

SEQ ID NO: 3823370 - RNA, 23 nt, Human
caggccgccccagccucugagcc

SEQ ID NO: 3823371 - RNA, 18 nt, Human
caggccgcgcccuuuccc

SEQ ID NO: 3823372 - RNA, 13 nt, Human
caggccggcagcc

SEQ ID NO: 3823373 - RNA, 14 nt, Human
caggccggccagcc

SEQ ID NO: 3823374 - RNA, 14 nt, Human
caggccgggcagag

SEQ ID NO: 3823375 - RNA, 19 nt, Human
caggccgggccuguacagu

SEQ ID NO: 3823376 - RNA, 18 nt, Human
caggccguccucccgggc

SEQ ID NO: 3823377 - RNA, 22 nt, Human
caggccguccucccgggcccuc

SEQ ID NO: 3823378 - RNA, 13 nt, Human
caggccuauuuca

SEQ ID NO: 3823379 - RNA, 16 nt, Human
caggccuauuucauca

SEQ ID NO: 3823380 - RNA, 12 nt, Human
caggccucaccu

SEQ ID NO: 3823381 - RNA, 22 nt, Human
caggccucaccucuacccaaac

SEQ ID NO: 3823382 - RNA, 17 nt, Human
caggccucagggcuccu

SEQ ID NO: 3823383 - RNA, 16 nt, Human
caggccucccucucuc

SEQ ID NO: 3823384 - RNA, 18 nt, Human
caggccucccucucucuu

SEQ ID NO: 3823385 - RNA, 19 nt, Human
caggccucccucucucuuc

SEQ ID NO: 3823386 - RNA, 18 nt, Human
caggccucccugccagua

SEQ ID NO: 3823387 - RNA, 12 nt, Human
caggccuccuac

SEQ ID NO: 3823388 - RNA, 17 nt, Human
caggccucuccauuugc

SEQ ID NO: 3823389 - RNA, 12 nt, Human
caggccucugug

SEQ ID NO: 3823390 - RNA, 15 nt, Human
caggccugaaagagg

SEQ ID NO: 3823391 - RNA, 20 nt, Human
caggccugaaagaggcugag

SEQ ID NO: 3823392 - RNA, 23 nt, Human
caggccugaaagaggcugaggcc

SEQ ID NO: 3823393 - RNA, 15 nt, Human
caggccugacucuca

SEQ ID NO: 3823394 - RNA, 18 nt, Human
caggccugagauuucauc

SEQ ID NO: 3823395 - RNA, 14 nt, Human
caggccugccagac

SEQ ID NO: 3823396 - RNA, 12 nt, Human
caggccugccuc

SEQ ID NO: 3823397 - RNA, 13 nt, Human
caggccugccucc

SEQ ID NO: 3823398 - RNA, 14 nt, Human
caggccugccuccc

SEQ ID NO: 3823399 - RNA, 15 nt, Human
caggccugccuccca

SEQ ID NO: 3823400 - RNA, 15 nt, Human
caggccuggccuugg

SEQ ID NO: 3823401 - RNA, 14 nt, Human
caggccugggucug

SEQ ID NO: 3823402 - RNA, 20 nt, Human
caggccugggucugugucuc

SEQ ID NO: 3823403 - RNA, 17 nt, Human
caggccuuaucuccaag

SEQ ID NO: 3823404 - RNA, 22 nt, Human
caggccuuaucuccaagaccag

SEQ ID NO: 3823405 - RNA, 16 nt, Human
caggccuuugagcuca

SEQ ID NO: 3823406 - RNA, 22 nt, Human
caggcgcaagggaggcccagcg

SEQ ID NO: 3823407 - RNA, 17 nt, Human
caggcgccggcgggcgg

SEQ ID NO: 3823408 - RNA, 15 nt, Human
caggcgcugugcuau

SEQ ID NO: 3823409 - RNA, 19 nt, Human
caggcgggacagugcugca

SEQ ID NO: 3823410 - RNA, 17 nt, Human
caggcggugggcaccca

SEQ ID NO: 3823411 - RNA, 21 nt, Human
caggcggugggcacccacccu

SEQ ID NO: 3823412 - RNA, 22 nt, Human
caggcguagaucaccagaauaa

SEQ ID NO: 3823413 - RNA, 22 nt, Human
caggcuaauuuuuuuguauuuu

SEQ ID NO: 3823414 - RNA, 20 nt, Human
caggcuacacugacacuggu

SEQ ID NO: 3823415 - RNA, 14 nt, Human
caggcuacugucag

SEQ ID NO: 3823416 - RNA, 21 nt, Human
caggcuauguauaaaauacau

SEQ ID NO: 3823417 - RNA, 16 nt, Human
caggcucacugccagg

SEQ ID NO: 3823418 - RNA, 11 nt, Human
caggcucagag

SEQ ID NO: 3823419 - RNA, 15 nt, Human
caggcucagagggug

SEQ ID NO: 3823420 - RNA, 14 nt, Human
caggcucaggcagg

SEQ ID NO: 3823421 - RNA, 19 nt, Human
caggcucaggcaggggccu

SEQ ID NO: 3823422 - RNA, 21 nt, Human
caggcucaggcaggggccucc

SEQ ID NO: 3823423 - RNA, 23 nt, Human
caggcucccaggagccugcccag

SEQ ID NO: 3823424 - RNA, 16 nt, Human
caggcucccagggaca

SEQ ID NO: 3823425 - RNA, 22 nt, Human
caggcucccagggacaccuggg

SEQ ID NO: 3823426 - RNA, 12 nt, Human
caggcuccgccc

SEQ ID NO: 3823427 - RNA, 16 nt, Human
caggcuccgcccuuag

SEQ ID NO: 3823428 - RNA, 22 nt, Human
caggcuccgcccuuaguccccc

SEQ ID NO: 3823429 - RNA, 16 nt, Human
caggcuccugccacca

SEQ ID NO: 3823430 - RNA, 15 nt, Human
caggcuccugugaua

SEQ ID NO: 3823431 - RNA, 13 nt, Human
caggcuccuuccu

SEQ ID NO: 3823432 - RNA, 18 nt, Human
caggcuccuuccugucuu

SEQ ID NO: 3823433 - RNA, 15 nt, Human
caggcucggccugcc

SEQ ID NO: 3823434 - RNA, 20 nt, Human
caggcucggccugcccccac

SEQ ID NO: 3823435 - RNA, 23 nt, Human
caggcucggccugcccccacccc

SEQ ID NO: 3823436 - RNA, 21 nt, Human
caggcucguggacugaguggg

SEQ ID NO: 3823437 - RNA, 19 nt, Human
caggcucucaggccagcug

SEQ ID NO: 3823438 - RNA, 15 nt, Human
caggcucucugggcu

SEQ ID NO: 3823439 - RNA, 14 nt, Human
caggcucugcccug

SEQ ID NO: 3823440 - RNA, 21 nt, Human
caggcucugcccugcccuagc

SEQ ID NO: 3823441 - RNA, 18 nt, Human
caggcucugugcugaccc

SEQ ID NO: 3823442 - RNA, 12 nt, Human
caggcucuuagc

SEQ ID NO: 3823443 - RNA, 18 nt, Human
caggcucuuagcagcuuc

SEQ ID NO: 3823444 - RNA, 18 nt, Human
caggcucuucuccuuuca

SEQ ID NO: 3823445 - RNA, 19 nt, Human
caggcugacguuccgggca

SEQ ID NO: 3823446 - RNA, 22 nt, Human
caggcugagguccugaucagcu

SEQ ID NO: 3823447 - RNA, 17 nt, Human
caggcugagugcaggcc

SEQ ID NO: 3823448 - RNA, 18 nt, Human
caggcugagugcaggccc

SEQ ID NO: 3823449 - RNA, 19 nt, Human
caggcugagugcaggccca

SEQ ID NO: 3823450 - RNA, 16 nt, Human
caggcugauuucuagg

SEQ ID NO: 3823451 - RNA, 17 nt, Human
caggcugauuucuaggu

SEQ ID NO: 3823452 - RNA, 19 nt, Human
caggcugcagcuggacaga

SEQ ID NO: 3823453 - RNA, 20 nt, Human
caggcugcagcuggacagag

SEQ ID NO: 3823454 - RNA, 18 nt, Human
caggcugcauagaaggag

SEQ ID NO: 3823455 - RNA, 22 nt, Human
caggcugcauagaaggaggaga

SEQ ID NO: 3823456 - RNA, 21 nt, Human
caggcugccaaggccagagug

SEQ ID NO: 3823457 - RNA, 17 nt, Human
caggcugccagugccug

SEQ ID NO: 3823458 - RNA, 20 nt, Human
caggcugccagugccugggu

SEQ ID NO: 3823459 - RNA, 16 nt, Human
caggcugccucccuug

SEQ ID NO: 3823460 - RNA, 21 nt, Human
caggcugccugagcaccuccc

SEQ ID NO: 3823461 - RNA, 14 nt, Human
caggcugccugagu

SEQ ID NO: 3823462 - RNA, 16 nt, Human
caggcugcggccccuc

SEQ ID NO: 3823463 - RNA, 20 nt, Human
caggcugcggccccuccccc

SEQ ID NO: 3823464 - RNA, 18 nt, Human
caggcugcucagggcugg

SEQ ID NO: 3823465 - RNA, 20 nt, Human
caggcugcucuugaacuccu

SEQ ID NO: 3823466 - RNA, 12 nt, Human
caggcugcugga

SEQ ID NO: 3823467 - RNA, 14 nt, Human
caggcugcuggagg

SEQ ID NO: 3823468 - RNA, 13 nt, Human
caggcugcuggcg

SEQ ID NO: 3823469 - RNA, 21 nt, Human
caggcugcuggcgccucugca

SEQ ID NO: 3823470 - RNA, 22 nt, Human
caggcugcuggcgccucugcaa

SEQ ID NO: 3823471 - RNA, 23 nt, Human
caggcugcuggggccucagacga

SEQ ID NO: 3823472 - RNA, 14 nt, Human
caggcuggacgugg

SEQ ID NO: 3823473 - RNA, 16 nt, Human
caggcuggaguuauug

SEQ ID NO: 3823474 - RNA, 21 nt, Human
caggcuggcaccgccuucucu

SEQ ID NO: 3823475 - RNA, 13 nt, Human
caggcuggcagcu

SEQ ID NO: 3823476 - RNA, 15 nt, Human
caggcuggcagcucu

SEQ ID NO: 3823477 - RNA, 18 nt, Human
caggcuggcagcucucca

SEQ ID NO: 3823478 - RNA, 14 nt, Human
caggcuggccagcc

SEQ ID NO: 3823479 - RNA, 17 nt, Human
caggcuggccagcccca

SEQ ID NO: 3823480 - RNA, 23 nt, Human
caggcuggccagccccacagccc

SEQ ID NO: 3823481 - RNA, 15 nt, Human
caggcuggccagccg

SEQ ID NO: 3823482 - RNA, 12 nt, Human
caggcuggcccu

SEQ ID NO: 3823483 - RNA, 15 nt, Human
caggcuggcccugcc

SEQ ID NO: 3823484 - RNA, 21 nt, Human
caggcuggccuggggucaggc

SEQ ID NO: 3823485 - RNA, 16 nt, Human
auuuguuugugcuucu

SEQ ID NO: 3823486 - RNA, 18 nt, Human
auuuguuugugcuucuaa

SEQ ID NO: 3823487 - RNA, 22 nt, Human
auuuguuuguuuguuuuauuca

SEQ ID NO: 3823488 - RNA, 16 nt, Human
auuuguuuuggauaua

SEQ ID NO: 3823489 - RNA, 17 nt, Human
auuuguuuuuaaacugu

SEQ ID NO: 3823490 - RNA, 18 nt, Human
auuuguuuuuaaacugua

SEQ ID NO: 3823491 - RNA, 21 nt, Human
auuuguuuuuaaacuguacag

SEQ ID NO: 3823492 - RNA, 22 nt, Human
auuuguuuuuguauuuuuaaug

SEQ ID NO: 3823493 - RNA, 12 nt, Human
auuuuaaaaaag

SEQ ID NO: 3823494 - RNA, 13 nt, Human
auuuuaaaaaagg

SEQ ID NO: 3823495 - RNA, 19 nt, Human
auuuuaaaaaaugaaaaua

SEQ ID NO: 3823496 - RNA, 23 nt, Human
auuuuaaaaaaugaaaauaagug

SEQ ID NO: 3823497 - RNA, 17 nt, Human
auuuuaaaaaaugguca

SEQ ID NO: 3823498 - RNA, 14 nt, Human
auuuuaaaaagucu

SEQ ID NO: 3823499 - RNA, 18 nt, Human
auuuuaaaaauacauauc

SEQ ID NO: 3823500 - RNA, 13 nt, Human
auuuuaaaaauga

SEQ ID NO: 3823501 - RNA, 14 nt, Human
auuuuaaaauaaac

SEQ ID NO: 3823502 - RNA, 23 nt, Human
auuuuaaaauagcguucuuguaa

SEQ ID NO: 3823503 - RNA, 20 nt, Human
auuuuaaaaucuccuaaaug

SEQ ID NO: 3823504 - RNA, 12 nt, Human
auuuuaaaaugu

SEQ ID NO: 3823505 - RNA, 13 nt, Human
auuuuaaaaugua

SEQ ID NO: 3823506 - RNA, 15 nt, Human
auuuuaaaauguaca

SEQ ID NO: 3823507 - RNA, 13 nt, Human
auuuuaaaauuuc

SEQ ID NO: 3823508 - RNA, 15 nt, Human
auuuuaaaauuuguu

SEQ ID NO: 3823509 - RNA, 19 nt, Human
cagggcaucuugcuggcua

SEQ ID NO: 3823510 - RNA, 19 nt, Human
cagggcaugcauuuugcag

SEQ ID NO: 3823511 - RNA, 20 nt, Human
cagggcauggccagguggcc

SEQ ID NO: 3823512 - RNA, 20 nt, Human
cagggccaaacgcugagcca

SEQ ID NO: 3823513 - RNA, 18 nt, Human
cagggccaacccuucucc

SEQ ID NO: 3823514 - RNA, 17 nt, Human
cagggccacgcuccagc

SEQ ID NO: 3823515 - RNA, 18 nt, Human
cagggccacgcuccagcu

SEQ ID NO: 3823516 - RNA, 20 nt, Human
cagggccacgugccaggccc

SEQ ID NO: 3823517 - RNA, 21 nt, Human
cagggccacgugccaggcccg

SEQ ID NO: 3823518 - RNA, 19 nt, Human
cagggccagaaguagcuuu

SEQ ID NO: 3823519 - RNA, 22 nt, Human
cagggccagaugagcagaagcu

SEQ ID NO: 3823520 - RNA, 12 nt, Human
cagggccaggac

SEQ ID NO: 3823521 - RNA, 13 nt, Human
cagggccaggacu

SEQ ID NO: 3823522 - RNA, 12 nt, Human
cagggccagggc

SEQ ID NO: 3823523 - RNA, 13 nt, Human
cagggccagggcc

SEQ ID NO: 3823524 - RNA, 18 nt, Human
cagggccagggcccugca

SEQ ID NO: 3823525 - RNA, 21 nt, Human
cagggccaguggggccugugg

SEQ ID NO: 3823526 - RNA, 23 nt, Human
cagggccaugcugaggccugggc

SEQ ID NO: 3823527 - RNA, 16 nt, Human
cagggccauggcucag

SEQ ID NO: 3823528 - RNA, 17 nt, Human
cagggccauggcucagg

SEQ ID NO: 3823529 - RNA, 21 nt, Human
cagggccaugucagacacaga

SEQ ID NO: 3823530 - RNA, 14 nt, Human
cagggcccacaccc

SEQ ID NO: 3823531 - RNA, 17 nt, Human
cagggcccacacccccu

SEQ ID NO: 3823532 - RNA, 16 nt, Human
cagggcccagagccca

SEQ ID NO: 3823533 - RNA, 13 nt, Human
cagggcccagagg

SEQ ID NO: 3823534 - RNA, 16 nt, Human
cagggcccagaggcug

SEQ ID NO: 3823535 - RNA, 15 nt, Human
cagggccccagaagg

SEQ ID NO: 3823536 - RNA, 17 nt, Human
cagggccccagaaggca

SEQ ID NO: 3823537 - RNA, 21 nt, Human
cagggccccagaaggcaggga

SEQ ID NO: 3823538 - RNA, 18 nt, Human
cagggccccucacccugc

SEQ ID NO: 3823539 - RNA, 22 nt, Human
cagggccccucacccugccuua

SEQ ID NO: 3823540 - RNA, 15 nt, Human
cagggccccucuccc

SEQ ID NO: 3823541 - RNA, 23 nt, Human
cagggccgaccagaggagccuuu

SEQ ID NO: 3823542 - RNA, 14 nt, Human
cagggccgccaggg

SEQ ID NO: 3823543 - RNA, 22 nt, Human
cagggccgccagggagaccugg

SEQ ID NO: 3823544 - RNA, 21 nt, Human
cagggccgcccgggcccagag

SEQ ID NO: 3823545 - RNA, 22 nt, Human
cagggccgcccgggcccagagg

SEQ ID NO: 3823546 - RNA, 12 nt, Human
cagggccgggga

SEQ ID NO: 3823547 - RNA, 22 nt, Human
cagggccggggaacuggccaag

SEQ ID NO: 3823548 - RNA, 19 nt, Human
cagggccuagcugcuacaa

SEQ ID NO: 3823549 - RNA, 22 nt, Human
cagggccuagcugcuacaaaga

SEQ ID NO: 3823550 - RNA, 23 nt, Human
cagggccuagcugcuacaaagaa

SEQ ID NO: 3823551 - RNA, 16 nt, Human
cagggccucacacggu

SEQ ID NO: 3823552 - RNA, 13 nt, Human
cagggccucugcg

SEQ ID NO: 3823553 - RNA, 21 nt, Human
cagggccucugcggagcacac

SEQ ID NO: 3823554 - RNA, 18 nt, Human
cagggccugagccuggcc

SEQ ID NO: 3823555 - RNA, 20 nt, Human
cagggccugagccuggccag

SEQ ID NO: 3823556 - RNA, 21 nt, Human
cagggccugagccuggccagc

SEQ ID NO: 3823557 - RNA, 13 nt, Human
cagggccuggccc

SEQ ID NO: 3823558 - RNA, 12 nt, Human
cagggccugggg

SEQ ID NO: 3823559 - RNA, 14 nt, Human
cagggccuggggcc

SEQ ID NO: 3823560 - RNA, 19 nt, Human
cagggccuggggccugaga

SEQ ID NO: 3823561 - RNA, 20 nt, Human
cagggccuggggccugagag

SEQ ID NO: 3823562 - RNA, 23 nt, Human
cagggccuggggccugagagaau

SEQ ID NO: 3823563 - RNA, 18 nt, Human
cagggccugguugaagaa

SEQ ID NO: 3823564 - RNA, 14 nt, Human
cagggccugucuca

SEQ ID NO: 3823565 - RNA, 16 nt, Human
cagggccuugcccaga

SEQ ID NO: 3823566 - RNA, 17 nt, Human
cagggccuugcccagag

SEQ ID NO: 3823567 - RNA, 18 nt, Human
cagggccuugcccagaga

SEQ ID NO: 3823568 - RNA, 19 nt, Human
cagggccuugcccagagau

SEQ ID NO: 3823569 - RNA, 21 nt, Human
cagggcgggcagagggcugga

SEQ ID NO: 3823570 - RNA, 22 nt, Human
cagggcuacccugagcugaggc

SEQ ID NO: 3823571 - RNA, 18 nt, Human
cagggcuagugacuugug

SEQ ID NO: 3823572 - RNA, 19 nt, Human
cagggcuauagcucaggac

SEQ ID NO: 3823573 - RNA, 16 nt, Human
cagggcucagccuggu

SEQ ID NO: 3823574 - RNA, 19 nt, Human
cagggcucagccugguggg

SEQ ID NO: 3823575 - RNA, 20 nt, Human
cagggcucagcggggacagc

SEQ ID NO: 3823576 - RNA, 13 nt, Human
cagggcucaggau

SEQ ID NO: 3823577 - RNA, 22 nt, Human
cagggcuccagccccucuugga

SEQ ID NO: 3823578 - RNA, 18 nt, Human
cagggcucccacagagac

SEQ ID NO: 3823579 - RNA, 21 nt, Human
cagggcucccaggggucuccc

SEQ ID NO: 3823580 - RNA, 18 nt, Human
cagggcuccucccagcuu

SEQ ID NO: 3823581 - RNA, 19 nt, Human
cagggcuccucccagcuug

SEQ ID NO: 3823582 - RNA, 20 nt, Human
cagggcuccugccuucuguc

SEQ ID NO: 3823583 - RNA, 23 nt, Human
cagggcuccugccuucuguccug

SEQ ID NO: 3823584 - RNA, 13 nt, Human
cagggcuccuggg

SEQ ID NO: 3823585 - RNA, 21 nt, Human
cagggcuccuugugggccugg

SEQ ID NO: 3823586 - RNA, 23 nt, Human
cagggcuccuugugggccugggc

SEQ ID NO: 3823587 - RNA, 15 nt, Human
cagggcucuccuggc

SEQ ID NO: 3823588 - RNA, 20 nt, Human
cagggcucucuuuccuucuu

SEQ ID NO: 3823589 - RNA, 22 nt, Human
cagggcucucuuuccuucuugc

SEQ ID NO: 3823590 - RNA, 17 nt, Human
cagggcucugccccagu

SEQ ID NO: 3823591 - RNA, 16 nt, Human
cagggcugcccugaga

SEQ ID NO: 3823592 - RNA, 23 nt, Human
cagggcugcccugagaagcugcu

SEQ ID NO: 3823593 - RNA, 21 nt, Human
cagggcuggacugaggccuga

SEQ ID NO: 3823594 - RNA, 23 nt, Human
cagggcuggacugaggccugagc

SEQ ID NO: 3823595 - RNA, 13 nt, Human
cagggcuggagaa

SEQ ID NO: 3823596 - RNA, 17 nt, Human
cagggcuggcccagccc

SEQ ID NO: 3823597 - RNA, 19 nt, Human
cagggcuggccccagggca

SEQ ID NO: 3823598 - RNA, 13 nt, Human
cagggcugggagg

SEQ ID NO: 3823599 - RNA, 19 nt, Human
cagggcugggaggaaggac

SEQ ID NO: 3823600 - RNA, 13 nt, Human
cagggcugugcac

SEQ ID NO: 3823601 - RNA, 19 nt, Human
cagggcugugcuugaaggc

SEQ ID NO: 3823602 - RNA, 23 nt, Human
cagggcugugcuugaaggcccug

SEQ ID NO: 3823603 - RNA, 23 nt, Human
cagggcuuaccuguacacugacu

SEQ ID NO: 3823604 - RNA, 18 nt, Human
cagggcuuacggcccugg

SEQ ID NO: 3823605 - RNA, 23 nt, Human
cagggcuuacggcccuggccuug

SEQ ID NO: 3823606 - RNA, 22 nt, Human
cagggcuuuacuccguaacaga

SEQ ID NO: 3823607 - RNA, 14 nt, Human
caggggaaaagagg

SEQ ID NO: 3823608 - RNA, 20 nt, Human
caggggaaaaucagccugcu

SEQ ID NO: 3823609 - RNA, 23 nt, Human
caggggaaagaugagcuuuucua

SEQ ID NO: 3823610 - RNA, 17 nt, Human
caggggaacacugggga

SEQ ID NO: 3823611 - RNA, 16 nt, Human
caggggaaccugccau

SEQ ID NO: 3823612 - RNA, 17 nt, Human
caggggaccacaccucc

SEQ ID NO: 3823613 - RNA, 20 nt, Human
caggggacucagcccugagg

SEQ ID NO: 3823614 - RNA, 23 nt, Human
caggggacucagcccugagguga

SEQ ID NO: 3823615 - RNA, 16 nt, Human
caggggagauccuugu

SEQ ID NO: 3823616 - RNA, 20 nt, Human
caggggagcagaggggcaga

SEQ ID NO: 3823617 - RNA, 12 nt, Human
caggggagcccu

SEQ ID NO: 3823618 - RNA, 21 nt, Human
caggggaggccaucuggagag

SEQ ID NO: 3823619 - RNA, 18 nt, Human
caggggagggucagccag

SEQ ID NO: 3823620 - RNA, 22 nt, Human
caggggagggucagccagggcc

SEQ ID NO: 3823621 - RNA, 14 nt, Human
caggggauugaagc

SEQ ID NO: 3823622 - RNA, 18 nt, Human
caggggcaaacaccugcu

SEQ ID NO: 3823623 - RNA, 14 nt, Human
caggggcagcccca

SEQ ID NO: 3823624 - RNA, 18 nt, Human
caggggcagccccaggcc

SEQ ID NO: 3823625 - RNA, 14 nt, Human
caggggcaggcaca

SEQ ID NO: 3823626 - RNA, 22 nt, Human
caggggcaggcacagcacaggg

SEQ ID NO: 3823627 - RNA, 22 nt, Human
caggggcccaaggcggccccuc

SEQ ID NO: 3823628 - RNA, 20 nt, Human
caggaugaugacuauggaaa

SEQ ID NO: 3823629 - RNA, 22 nt, Human
caggaugaugacuauggaaaga

SEQ ID NO: 3823630 - RNA, 17 nt, Human
caggaugauuguacaga

SEQ ID NO: 3823631 - RNA, 17 nt, Human
caggaugcccagggcca

SEQ ID NO: 3823632 - RNA, 15 nt, Human
caggaugcuuugguu

SEQ ID NO: 3823633 - RNA, 23 nt, Human
caggauggcccuucccacuggag

SEQ ID NO: 3823634 - RNA, 17 nt, Human
caggauggccuggccag

SEQ ID NO: 3823635 - RNA, 14 nt, Human
caggauggcgcagg

SEQ ID NO: 3823636 - RNA, 21 nt, Human
caggaugggggcuggccucug

SEQ ID NO: 3823637 - RNA, 23 nt, Human
caggaugggguauggauucuaaa

SEQ ID NO: 3823638 - RNA, 18 nt, Human
caggauggucuccaucuc

SEQ ID NO: 3823639 - RNA, 16 nt, Human
caggauuccucuuuuc

SEQ ID NO: 3823640 - RNA, 19 nt, Human
caggauucucaccagcugu

SEQ ID NO: 3823641 - RNA, 21 nt, Human
caggauucuuccucccucccu

SEQ ID NO: 3823642 - RNA, 13 nt, Human
caggauugcgaga

SEQ ID NO: 3823643 - RNA, 15 nt, Human
caggauuggggaaga

SEQ ID NO: 3823644 - RNA, 18 nt, Human
caggauuuaaaaacugga

SEQ ID NO: 3823645 - RNA, 16 nt, Human
caggauuugcacagaa

SEQ ID NO: 3823646 - RNA, 19 nt, Human
caggauuuguucucugucc

SEQ ID NO: 3823647 - RNA, 20 nt, Human
caggauuuguucucugucca

SEQ ID NO: 3823648 - RNA, 18 nt, Human
caggcaaaauccuugcuu

SEQ ID NO: 3823649 - RNA, 16 nt, Human
caggcaaagcaaguga

SEQ ID NO: 3823650 - RNA, 18 nt, Human
caggcaacugaggcagac

SEQ ID NO: 3823651 - RNA, 22 nt, Human
caggcaacugaggcagacagca

SEQ ID NO: 3823652 - RNA, 17 nt, Human
caggcaacuucaguccu

SEQ ID NO: 3823653 - RNA, 21 nt, Human
caggcaagcaccuccugccuc

SEQ ID NO: 3823654 - RNA, 14 nt, Human
caggcaaugcuggc

SEQ ID NO: 3823655 - RNA, 17 nt, Human
caggcaaugcuggcugu

SEQ ID NO: 3823656 - RNA, 19 nt, Human
caggcaaugcuggcuguug

SEQ ID NO: 3823657 - RNA, 21 nt, Human
caggcaaugcuggcuguuggc

SEQ ID NO: 3823658 - RNA, 15 nt, Human
caggcaauggccuaa

SEQ ID NO: 3823659 - RNA, 14 nt, Human
caggcacacacugu

SEQ ID NO: 3823660 - RNA, 23 nt, Human
caggcacacacugugcuuucuau

SEQ ID NO: 3823661 - RNA, 14 nt, Human
caggcacacagcua

SEQ ID NO: 3823662 - RNA, 20 nt, Human
caggcacacagcuacucucc

SEQ ID NO: 3823663 - RNA, 23 nt, Human
caggcacacagcuacucucccca

SEQ ID NO: 3823664 - RNA, 19 nt, Human
caggcacacgccaccucgc

SEQ ID NO: 3823665 - RNA, 15 nt, Human
caggcacacuucuuc

SEQ ID NO: 3823666 - RNA, 16 nt, Human
caggcacagcacaggg

SEQ ID NO: 3823667 - RNA, 13 nt, Human
caggcacaggaug

SEQ ID NO: 3823668 - RNA, 12 nt, Human
caggcacaggca

SEQ ID NO: 3823669 - RNA, 16 nt, Human
caggcacaggcagggc

SEQ ID NO: 3823670 - RNA, 17 nt, Human
caggcacaggcagggca

SEQ ID NO: 3823671 - RNA, 15 nt, Human
caggcacaggucagg

SEQ ID NO: 3823672 - RNA, 15 nt, Human
caggcaccaaaagaa

SEQ ID NO: 3823673 - RNA, 18 nt, Human
caggcaccagucccuguc

SEQ ID NO: 3823674 - RNA, 22 nt, Human
caggcacccaccaucaugucug

SEQ ID NO: 3823675 - RNA, 15 nt, Human
caggcacccccugga

SEQ ID NO: 3823676 - RNA, 16 nt, Human
caggcacccuucuuuc

SEQ ID NO: 3823677 - RNA, 16 nt, Human
caggcaccgagaaugu

SEQ ID NO: 3823678 - RNA, 17 nt, Human
caggcaccgagaauguu

SEQ ID NO: 3823679 - RNA, 16 nt, Human
caggcacuagccuuug

SEQ ID NO: 3823680 - RNA, 20 nt, Human
caggcacucaaugcagccag

SEQ ID NO: 3823681 - RNA, 22 nt, Human
caggcacugagauaccagcgag

SEQ ID NO: 3823682 - RNA, 23 nt, Human
caggcacugagauaccagcgagg

SEQ ID NO: 3823683 - RNA, 14 nt, Human
caggcacugcaaac

SEQ ID NO: 3823684 - RNA, 13 nt, Human
caggcacugcccu

SEQ ID NO: 3823685 - RNA, 16 nt, Human
caggcacugcugccca

SEQ ID NO: 3823686 - RNA, 16 nt, Human
caggcacugggcauga

SEQ ID NO: 3823687 - RNA, 17 nt, Human
caggcacugggcaugag

SEQ ID NO: 3823688 - RNA, 20 nt, Human
caggcacuuggcagccuugu

SEQ ID NO: 3823689 - RNA, 15 nt, Human
caggcagaaagaguu

SEQ ID NO: 3823690 - RNA, 11 nt, Human
caggcagacac

SEQ ID NO: 3823691 - RNA, 12 nt, Human
caggcagacacg

SEQ ID NO: 3823692 - RNA, 21 nt, Human
caggcagacuacacaggauga

SEQ ID NO: 3823693 - RNA, 14 nt, Human
caggcagagaauca

SEQ ID NO: 3823694 - RNA, 16 nt, Human
caggcagaucaccuga

SEQ ID NO: 3823695 - RNA, 15 nt, Human
caggcagauccagga

SEQ ID NO: 3823696 - RNA, 13 nt, Human
caggcagaucugu

SEQ ID NO: 3823697 - RNA, 15 nt, Human
caggcagcacagaga

SEQ ID NO: 3823698 - RNA, 12 nt, Human
caggcagcagag

SEQ ID NO: 3823699 - RNA, 23 nt, Human
caggcagcagagacuugggacau

SEQ ID NO: 3823700 - RNA, 15 nt, Human
caggcagccaggcca

SEQ ID NO: 3823701 - RNA, 12 nt, Human
caggcagccagu

SEQ ID NO: 3823702 - RNA, 20 nt, Human
caggcagccagugcccugag

SEQ ID NO: 3823703 - RNA, 24 nt, Human
caggcagccagugcccugagccag

SEQ ID NO: 3823704 - RNA, 17 nt, Human
caggcagccucugucag

SEQ ID NO: 3823705 - RNA, 18 nt, Human
caggcagcgauggucuca

SEQ ID NO: 3823706 - RNA, 13 nt, Human
caggcagcgccaa

SEQ ID NO: 3823707 - RNA, 19 nt, Human
caggcagcgccaagugcgu

SEQ ID NO: 3823708 - RNA, 20 nt, Human
caggcagcgccaagugcgug

SEQ ID NO: 3823709 - RNA, 17 nt, Human
caggcagcggggagggg

SEQ ID NO: 3823710 - RNA, 16 nt, Human
caaaacaaaacaacau

SEQ ID NO: 3823711 - RNA, 22 nt, Human
caaaacaaagcaauucuuucaa

SEQ ID NO: 3823712 - RNA, 22 nt, Human
caaaacaaaggccuaauucuau

SEQ ID NO: 3823713 - RNA, 23 nt, Human
caaaacacacgcgcgcacacaca

SEQ ID NO: 3823714 - RNA, 12 nt, Human
caaaacacugug

SEQ ID NO: 3823715 - RNA, 16 nt, Human
caaaacacuguggaac

SEQ ID NO: 3823716 - RNA, 19 nt, Human
caaaacagagaugugauaa

SEQ ID NO: 3823717 - RNA, 13 nt, Human
caaaacagauugu

SEQ ID NO: 3823718 - RNA, 18 nt, Human
caaaacagauuguuugca

SEQ ID NO: 3823719 - RNA, 18 nt, Human
caaaacagcguuuaagac

SEQ ID NO: 3823720 - RNA, 21 nt, Human
caaaacaguauugacuuguau

SEQ ID NO: 3823721 - RNA, 22 nt, Human
caaaacaugucuccuauccugg

SEQ ID NO: 3823722 - RNA, 15 nt, Human
caaaacauuccguuu

SEQ ID NO: 3823723 - RNA, 23 nt, Human
caaaaccaaaaguuauuaaaauu

SEQ ID NO: 3823724 - RNA, 21 nt, Human
caaaaccacagcccugucagu

SEQ ID NO: 3823725 - RNA, 15 nt, Human
caaaaccauugcuuc

SEQ ID NO: 3823726 - RNA, 16 nt, Human
caaaaccauugcuuca

SEQ ID NO: 3823727 - RNA, 17 nt, Human
caaaaccauugcuucac

SEQ ID NO: 3823728 - RNA, 14 nt, Human
caaaacccagcugc

SEQ ID NO: 3823729 - RNA, 19 nt, Human
caaaaccccccagauauca

SEQ ID NO: 3823730 - RNA, 19 nt, Human
caaaacgcauggagugugu

SEQ ID NO: 3823731 - RNA, 23 nt, Human
caaaacgcauggaguguguauug

SEQ ID NO: 3823732 - RNA, 13 nt, Human
caaaacggggcag

SEQ ID NO: 3823733 - RNA, 14 nt, Human
caaaacgucuuauu

SEQ ID NO: 3823734 - RNA, 20 nt, Human
caaaacucaaaugcuuggcu

SEQ ID NO: 3823735 - RNA, 21 nt, Human
caaaacucauuuccuauguaa

SEQ ID NO: 3823736 - RNA, 21 nt, Human
caaaacuccugccccuguucu

SEQ ID NO: 3823737 - RNA, 15 nt, Human
caaaacucuccucug

SEQ ID NO: 3823738 - RNA, 21 nt, Human
caaaacucuccucugcugcug

SEQ ID NO: 3823739 - RNA, 23 nt, Human
caaaacucuccucugcugcuggc

SEQ ID NO: 3823740 - RNA, 15 nt, Human
caaaacugcauuuca

SEQ ID NO: 3823741 - RNA, 22 nt, Human
caaaacugccucaggaggcagg

SEQ ID NO: 3823742 - RNA, 12 nt, Human
caaaacugcucc

SEQ ID NO: 3823743 - RNA, 23 nt, Human
caaaacuucagacauagaauuaa

SEQ ID NO: 3823744 - RNA, 17 nt, Human
caaaacuucuugucaga

SEQ ID NO: 3823745 - RNA, 19 nt, Human
caaaacuucuugucagaca

SEQ ID NO: 3823746 - RNA, 17 nt, Human
caaaacuuuaaaccugu

SEQ ID NO: 3823747 - RNA, 12 nt, Human
caaaagaaaaac

SEQ ID NO: 3823748 - RNA, 18 nt, Human
caaaagaagcccccagcu

SEQ ID NO: 3823749 - RNA, 19 nt, Human
caaaagaagcccccagcua

SEQ ID NO: 3823750 - RNA, 12 nt, Human
caaaagaaguaa

SEQ ID NO: 3823751 - RNA, 22 nt, Human
caaaagacaauucuuuauacaa

SEQ ID NO: 3823752 - RNA, 16 nt, Human
caaaagacauguugua

SEQ ID NO: 3823753 - RNA, 12 nt, Human
caaaagagaaaa

SEQ ID NO: 3823754 - RNA, 19 nt, Human
caaaagagaaaaaaaauua

SEQ ID NO: 3823755 - RNA, 19 nt, Human
caaaagaguguaaaauauu

SEQ ID NO: 3823756 - RNA, 13 nt, Human
caaaagauaauau

SEQ ID NO: 3823757 - RNA, 20 nt, Human
caaaagaugcucuucugugg

SEQ ID NO: 3823758 - RNA, 21 nt, Human
caaaagauguauccuuccaau

SEQ ID NO: 3823759 - RNA, 19 nt, Human
caaaagauugcugaaauuu

SEQ ID NO: 3823760 - RNA, 23 nt, Human
caaaagcaagacuguugcucaaa

SEQ ID NO: 3823761 - RNA, 14 nt, Human
caaaagcacccuug

SEQ ID NO: 3823762 - RNA, 13 nt, Human
caaaagccuugug

SEQ ID NO: 3823763 - RNA, 14 nt, Human
caaaagccuugugu

SEQ ID NO: 3823764 - RNA, 20 nt, Human
caaaagcuucccucccugcu

SEQ ID NO: 3823765 - RNA, 15 nt, Human
caaaaggaaaaagcu

SEQ ID NO: 3823766 - RNA, 22 nt, Human
caaaaggaucuuuguggccaag

SEQ ID NO: 3823767 - RNA, 24 nt, Human
caaaaggaucuuuguggccaagga

SEQ ID NO: 3823768 - RNA, 18 nt, Human
caaaaggcuccauauaua

SEQ ID NO: 3823769 - RNA, 19 nt, Human
caaaagggccaaagaacca

SEQ ID NO: 3823770 - RNA, 20 nt, Human
caaaagggccaaagaaccaa

SEQ ID NO: 3823771 - RNA, 13 nt, Human
caaaagggucaga

SEQ ID NO: 3823772 - RNA, 17 nt, Human
cagugaaguugcugcuu

SEQ ID NO: 3823773 - RNA, 20 nt, Human
cagugaaugauucaguguua

SEQ ID NO: 3823774 - RNA, 16 nt, Human
cagugaauuuuugcaa

SEQ ID NO: 3823775 - RNA, 19 nt, Human
cagugaauuuuugcaauaa

SEQ ID NO: 3823776 - RNA, 14 nt, Human
cagugacaaaccau

SEQ ID NO: 3823777 - RNA, 23 nt, Human
cagugacacgucucgccaagcag

SEQ ID NO: 3823778 - RNA, 16 nt, Human
cagugacagaguucac

SEQ ID NO: 3823779 - RNA, 16 nt, Human
cagugaccugaggaag

SEQ ID NO: 3823780 - RNA, 16 nt, Human
cagugacgugcaccug

SEQ ID NO: 3823781 - RNA, 18 nt, Human
cagugacgugcaccugua

SEQ ID NO: 3823782 - RNA, 18 nt, Human
cagugacucgggcuccug

SEQ ID NO: 3823783 - RNA, 20 nt, Human
cagugacucgggcuccugug

SEQ ID NO: 3823784 - RNA, 17 nt, Human
cagugacuucugagauc

SEQ ID NO: 3823785 - RNA, 14 nt, Human
cagugagaaaaagc

SEQ ID NO: 3823786 - RNA, 13 nt, Human
cagugagagcaga

SEQ ID NO: 3823787 - RNA, 19 nt, Human
cagugagauuacagaggaa

SEQ ID NO: 3823788 - RNA, 16 nt, Human
cagugagcacucccaa

SEQ ID NO: 3823789 - RNA, 19 nt, Human
cagugagcagccuggagcc

SEQ ID NO: 3823790 - RNA, 13 nt, Human
cagugagccaaga

SEQ ID NO: 3823791 - RNA, 19 nt, Human
cagugagccgcaucuucuc

SEQ ID NO: 3823792 - RNA, 12 nt, Human
cagugagccuga

SEQ ID NO: 3823793 - RNA, 13 nt, Human
cagugagcugugu

SEQ ID NO: 3823794 - RNA, 13 nt, Human
cagugaggcccag

SEQ ID NO: 3823795 - RNA, 16 nt, Human
cagugaggcccaggga

SEQ ID NO: 3823796 - RNA, 12 nt, Human
cagugaggcucu

SEQ ID NO: 3823797 - RNA, 13 nt, Human
cagugaggcucug

SEQ ID NO: 3823798 - RNA, 17 nt, Human
cagugaggcucugcccu

SEQ ID NO: 3823799 - RNA, 20 nt, Human
cagugaggcucugcccuugg

SEQ ID NO: 3823800 - RNA, 21 nt, Human
cagugaggcucugcccuuggu

SEQ ID NO: 3823801 - RNA, 21 nt, Human
cagugagggagggcugucauc

SEQ ID NO: 3823802 - RNA, 15 nt, Human
cagugagguccuggg

SEQ ID NO: 3823803 - RNA, 20 nt, Human
cagugagguccugggggccu

SEQ ID NO: 3823804 - RNA, 20 nt, Human
cagugagucgaggacaggga

SEQ ID NO: 3823805 - RNA, 22 nt, Human
cagugagucgaggacagggagg

SEQ ID NO: 3823806 - RNA, 23 nt, Human
cagugagucgaggacagggaggu

SEQ ID NO: 3823807 - RNA, 18 nt, Human
cagugagucucuggggca

SEQ ID NO: 3823808 - RNA, 15 nt, Human
cagugagucucuuca

SEQ ID NO: 3823809 - RNA, 18 nt, Human
cagugagucucuucagaa

SEQ ID NO: 3823810 - RNA, 14 nt, Human
cagugagugagccu

SEQ ID NO: 3823811 - RNA, 19 nt, Human
cagugagugagccuggcuc

SEQ ID NO: 3823812 - RNA, 15 nt, Human
cagugauauggcaga

SEQ ID NO: 3823813 - RNA, 12 nt, Human
cagugauauucu

SEQ ID NO: 3823814 - RNA, 13 nt, Human
cagugaucuccau

SEQ ID NO: 3823815 - RNA, 17 nt, Human
cagugaugggagaguag

SEQ ID NO: 3823816 - RNA, 20 nt, Human
cagugauuaaggucucucuu

SEQ ID NO: 3823817 - RNA, 23 nt, Human
cagugauuaaggucucucuuugg

SEQ ID NO: 3823818 - RNA, 16 nt, Human
cagugauugucuuaau

SEQ ID NO: 3823819 - RNA, 15 nt, Human
cagugauuuuuaucc

SEQ ID NO: 3823820 - RNA, 16 nt, Human
cagugauuuuuaucca

SEQ ID NO: 3823821 - RNA, 20 nt, Human
cagugcaaaugucagauaca

SEQ ID NO: 3823822 - RNA, 15 nt, Human
cagugcaacacugaa

SEQ ID NO: 3823823 - RNA, 17 nt, Human
cagugcaacagcacugg

SEQ ID NO: 3823824 - RNA, 14 nt, Human
cagugcaaccucug

SEQ ID NO: 3823825 - RNA, 19 nt, Human
cagugcaaccucugcuucc

SEQ ID NO: 3823826 - RNA, 21 nt, Human
cagugcaaccucugcuuccca

SEQ ID NO: 3823827 - RNA, 12 nt, Human
cagugcacauga

SEQ ID NO: 3823828 - RNA, 14 nt, Human
cagugcagauggag

SEQ ID NO: 3823829 - RNA, 22 nt, Human
cagugcagcaaccagagcacug

SEQ ID NO: 3823830 - RNA, 16 nt, Human
cagugcagcccgugug

SEQ ID NO: 3823831 - RNA, 22 nt, Human
cagugcagcccguguggccccu

SEQ ID NO: 3823832 - RNA, 18 nt, Human
cagugcaggcuggccagc

SEQ ID NO: 3823833 - RNA, 14 nt, Human
cagugcauauuccu

SEQ ID NO: 3823834 - RNA, 15 nt, Human
cagugcaucucagcc

SEQ ID NO: 3823835 - RNA, 16 nt, Human
cagugcaucucagccc

SEQ ID NO: 3823836 - RNA, 14 nt, Human
cagugcaugcuguc

SEQ ID NO: 3823837 - RNA, 17 nt, Human
cagugcaugguggccag

SEQ ID NO: 3823838 - RNA, 11 nt, Human
cagugccaacu

SEQ ID NO: 3823839 - RNA, 17 nt, Human
cagugccaacuccucac

SEQ ID NO: 3823840 - RNA, 23 nt, Human
cagugccaaggaccuccucuucc

SEQ ID NO: 3823841 - RNA, 14 nt, Human
cagugccagcaaug

SEQ ID NO: 3823842 - RNA, 20 nt, Human
cagugccauguaaaucccca

SEQ ID NO: 3823843 - RNA, 14 nt, Human
cagugccauugucu

SEQ ID NO: 3823844 - RNA, 15 nt, Human
cagugccauugucuu

SEQ ID NO: 3823845 - RNA, 19 nt, Human
cagugccauugucuuuaua

SEQ ID NO: 3823846 - RNA, 21 nt, Human
cagugccauugucuuuauaug

SEQ ID NO: 3823847 - RNA, 22 nt, Human
cagugccauugucuuuauauga

SEQ ID NO: 3823848 - RNA, 15 nt, Human
cagugcccacaggau

SEQ ID NO: 3823849 - RNA, 18 nt, Human
cagugcccacaggaucag

SEQ ID NO: 3823850 - RNA, 21 nt, Human
cagugcccacaggaucagucu

SEQ ID NO: 3823851 - RNA, 21 nt, Human
cagugcccaccaacaucccau

SEQ ID NO: 3823852 - RNA, 19 nt, Human
cagugcccauuccucaccu

SEQ ID NO: 3823853 - RNA, 12 nt, Human
cagugcccccac

SEQ ID NO: 3823854 - RNA, 20 nt, Human
cagugcccccacugaccaga

SEQ ID NO: 3823855 - RNA, 22 nt, Human
cagugcccccacugaccagaac

SEQ ID NO: 3823856 - RNA, 22 nt, Human
cagugccccgucuacagcuccc

SEQ ID NO: 3823857 - RNA, 19 nt, Human
cagugcccucauuuuaugu

SEQ ID NO: 3823858 - RNA, 18 nt, Human
cagugcccuccagccccg

SEQ ID NO: 3823859 - RNA, 15 nt, Human
cagugcccuccagga

SEQ ID NO: 3823860 - RNA, 14 nt, Human
cagugcccugagcc

SEQ ID NO: 3823861 - RNA, 15 nt, Human
cagugcccugauccc

SEQ ID NO: 3823862 - RNA, 24 nt, Human
cagugcccuggggcugaucucagg

SEQ ID NO: 3823863 - RNA, 22 nt, Human
cagugccgccgccucgcccacc

SEQ ID NO: 3823864 - RNA, 18 nt, Human
caggcagcuggaugagac

SEQ ID NO: 3823865 - RNA, 22 nt, Human
caggcagcugucacugcugcuu

SEQ ID NO: 3823866 - RNA, 20 nt, Human
caggcagcuuuaaccauuaa

SEQ ID NO: 3823867 - RNA, 18 nt, Human
caggcaggcucccaggga

SEQ ID NO: 3823868 - RNA, 12 nt, Human
caggcagggcag

SEQ ID NO: 3823869 - RNA, 18 nt, Human
caggcagggcaggaccag

SEQ ID NO: 3823870 - RNA, 13 nt, Human
caggcagggcucu

SEQ ID NO: 3823871 - RNA, 20 nt, Human
caggcagggcucuccuggcu

SEQ ID NO: 3823872 - RNA, 16 nt, Human
caggcaggggcccugc

SEQ ID NO: 3823873 - RNA, 21 nt, Human
caggcaggggcccugcagcuc

SEQ ID NO: 3823874 - RNA, 16 nt, Human
caggcaggggccucca

SEQ ID NO: 3823875 - RNA, 18 nt, Human
caggcaggggccuccaug

SEQ ID NO: 3823876 - RNA, 12 nt, Human
caggcaggggug

SEQ ID NO: 3823877 - RNA, 13 nt, Human
caggcaggggugg

SEQ ID NO: 3823878 - RNA, 14 nt, Human
caggcauagaggcu

SEQ ID NO: 3823879 - RNA, 18 nt, Human
caggcauagaggcuucuc

SEQ ID NO: 3823880 - RNA, 19 nt, Human
caggcauagaggcuucucc

SEQ ID NO: 3823881 - RNA, 17 nt, Human
caggcauaggccugggu

SEQ ID NO: 3823882 - RNA, 18 nt, Human
caggcauaggccugggug

SEQ ID NO: 3823883 - RNA, 22 nt, Human
caggcaucauuccaccauggcu

SEQ ID NO: 3823884 - RNA, 24 nt, Human
caggcaugcuggcucccagggcca

SEQ ID NO: 3823885 - RNA, 16 nt, Human
caggcaugggccacca

SEQ ID NO: 3823886 - RNA, 22 nt, Human
caggcaugucccaugugagcug

SEQ ID NO: 3823887 - RNA, 15 nt, Human
caggcauguucucug

SEQ ID NO: 3823888 - RNA, 19 nt, Human
caggcauguucucugagga

SEQ ID NO: 3823889 - RNA, 20 nt, Human
caggcauguucucugaggac

SEQ ID NO: 3823890 - RNA, 21 nt, Human
caggcauuccccaggaggcca

SEQ ID NO: 3823891 - RNA, 21 nt, Human
caggcauugccucggcuggcu

SEQ ID NO: 3823892 - RNA, 22 nt, Human
caggcauugccucggcuggcuc

SEQ ID NO: 3823893 - RNA, 16 nt, Human
caggcauuuccugggu

SEQ ID NO: 3823894 - RNA, 17 nt, Human
caggcauuuccugggug

SEQ ID NO: 3823895 - RNA, 18 nt, Human
caggcauuugacugaaga

SEQ ID NO: 3823896 - RNA, 21 nt, Human
caggcauuugacugaagaugc

SEQ ID NO: 3823897 - RNA, 18 nt, Human
caggccaaacucaccugc

SEQ ID NO: 3823898 - RNA, 23 nt, Human
caggccaaacucaccugccccuc

SEQ ID NO: 3823899 - RNA, 22 nt, Human
caggccaaaggggaccuggaag

SEQ ID NO: 3823900 - RNA, 19 nt, Human
caggccaaagugccgguga

SEQ ID NO: 3823901 - RNA, 21 nt, Human
caggccaagagcagaggcagc

SEQ ID NO: 3823902 - RNA, 15 nt, Human
caggccaaggucuga

SEQ ID NO: 3823903 - RNA, 19 nt, Human
caggccaaggucugagcca

SEQ ID NO: 3823904 - RNA, 23 nt, Human
caggccacauggggcugggcagc

SEQ ID NO: 3823905 - RNA, 23 nt, Human
caggccaccauauucagugcugu

SEQ ID NO: 3823906 - RNA, 11 nt, Human
caggccaccuc

SEQ ID NO: 3823907 - RNA, 18 nt, Human
caggccaccuccagaaac

SEQ ID NO: 3823908 - RNA, 17 nt, Human
caggccaccugcccccu

SEQ ID NO: 3823909 - RNA, 18 nt, Human
caggccaccugcccccuu

SEQ ID NO: 3823910 - RNA, 21 nt, Human
caggccaccuggcucucaccu

SEQ ID NO: 3823911 - RNA, 22 nt, Human
caggccaccuggcucucaccuc

SEQ ID NO: 3823912 - RNA, 16 nt, Human
caggccacggcagccu

SEQ ID NO: 3823913 - RNA, 17 nt, Human
caggccacggcagccua

SEQ ID NO: 3823914 - RNA, 19 nt, Human
caggccagagggagugaca

SEQ ID NO: 3823915 - RNA, 21 nt, Human
caggccagagggagugacaga

SEQ ID NO: 3823916 - RNA, 15 nt, Human
cauaggucacuggcu

SEQ ID NO: 3823917 - RNA, 16 nt, Human
cauaggucacuggcuc

SEQ ID NO: 3823918 - RNA, 17 nt, Human
cauaggucacuggcucu

SEQ ID NO: 3823919 - RNA, 17 nt, Human
cagggccaggccucucc

SEQ ID NO: 3823920 - RNA, 15 nt, Human
cagggccagggcccu

SEQ ID NO: 3823921 - RNA, 19 nt, Human
cagggccagggcccugcag

SEQ ID NO: 3823922 - RNA, 16 nt, Human
cagggccagugcaguu

SEQ ID NO: 3823923 - RNA, 16 nt, Human
cagggccaugccugcc

SEQ ID NO: 3823924 - RNA, 14 nt, Human
cagggccaugcuga

SEQ ID NO: 3823925 - RNA, 22 nt, Human
cagggccauggcucaggguggu

SEQ ID NO: 3823926 - RNA, 17 nt, Human
cagggcccaagucccug

SEQ ID NO: 3823927 - RNA, 18 nt, Human
cagggcccaagucccugu

SEQ ID NO: 3823928 - RNA, 12 nt, Human
cagggcccagag

SEQ ID NO: 3823929 - RNA, 15 nt, Human
cagggcccagagccc

SEQ ID NO: 3823930 - RNA, 21 nt, Human
cagggcccagagcccagcucc

SEQ ID NO: 3823931 - RNA, 22 nt, Human
cagggcccagagcccagcucca

SEQ ID NO: 3823932 - RNA, 16 nt, Human
cagggccccagcacua

SEQ ID NO: 3823933 - RNA, 21 nt, Human
cagggcccccagcgagagucc

SEQ ID NO: 3823934 - RNA, 15 nt, Human
cagggcccccaucuc

SEQ ID NO: 3823935 - RNA, 19 nt, Human
cagggcccgggaagcaaau

SEQ ID NO: 3823936 - RNA, 15 nt, Human
cagggcccugagcuc

SEQ ID NO: 3823937 - RNA, 21 nt, Human
cagggcccugagcucggugga

SEQ ID NO: 3823938 - RNA, 18 nt, Human
cagggcccugcagagggg

SEQ ID NO: 3823939 - RNA, 14 nt, Human
cagggccgaccaga

SEQ ID NO: 3823940 - RNA, 19 nt, Human
cagggccgauggggcaguc

SEQ ID NO: 3823941 - RNA, 19 nt, Human
cagggccgcccgggcccag

SEQ ID NO: 3823942 - RNA, 20 nt, Human
cagggccgcccgggcccaga

SEQ ID NO: 3823943 - RNA, 20 nt, Human
cagggccggggaacuggcca

SEQ ID NO: 3823944 - RNA, 21 nt, Human
cagggccuagcugcuacaaag

SEQ ID NO: 3823945 - RNA, 23 nt, Human
cagggccuccagcccucucacug

SEQ ID NO: 3823946 - RNA, 17 nt, Human
cagggccucugcggagc

SEQ ID NO: 3823947 - RNA, 19 nt, Human
cagggccugagccuggcca

SEQ ID NO: 3823948 - RNA, 22 nt, Human
cagggccugagccuggccagcc

SEQ ID NO: 3823949 - RNA, 13 nt, Human
cagggccugcgag

SEQ ID NO: 3823950 - RNA, 11 nt, Human
cagggccuggc

SEQ ID NO: 3823951 - RNA, 15 nt, Human
cagggccuggcccau

SEQ ID NO: 3823952 - RNA, 13 nt, Human
cagggccuggcuc

SEQ ID NO: 3823953 - RNA, 19 nt, Human
cagggccuggcucaggugg

SEQ ID NO: 3823954 - RNA, 15 nt, Human
cagggccuggggccu

SEQ ID NO: 3823955 - RNA, 22 nt, Human
cagggccuggggccugagagaa

SEQ ID NO: 3823956 - RNA, 15 nt, Human
cagggccuugcccag

SEQ ID NO: 3823957 - RNA, 20 nt, Human
cagggcgagacucugucuca

SEQ ID NO: 3823958 - RNA, 16 nt, Human
cagggcgggcagaggg

SEQ ID NO: 3823959 - RNA, 17 nt, Human
cagggcgggcagagggc

SEQ ID NO: 3823960 - RNA, 22 nt, Human
cagggcgggcagagggcuggag

SEQ ID NO: 3823961 - RNA, 17 nt, Human
cagggcuacccuccccc

SEQ ID NO: 3823962 - RNA, 16 nt, Human
cagggcuacccugagc

SEQ ID NO: 3823963 - RNA, 18 nt, Human
cagggcuacccugagcug

SEQ ID NO: 3823964 - RNA, 14 nt, Human
cagggcucagccug

SEQ ID NO: 3823965 - RNA, 15 nt, Human
cagggcucagccugg

SEQ ID NO: 3823966 - RNA, 21 nt, Human
cagggcucagcggggacagcu

SEQ ID NO: 3823967 - RNA, 23 nt, Human
cagggcucagcggggacagcucc

SEQ ID NO: 3823968 - RNA, 13 nt, Human
cagggcuccagcc

SEQ ID NO: 3823969 - RNA, 15 nt, Human
cagggcucccacaga

SEQ ID NO: 3823970 - RNA, 13 nt, Human
cagggcuccuccc

SEQ ID NO: 3823971 - RNA, 16 nt, Human
cagggcuccucccagc

SEQ ID NO: 3823972 - RNA, 11 nt, Human
cagggcuccug

SEQ ID NO: 3823973 - RNA, 12 nt, Human
cagggcuccugc

SEQ ID NO: 3823974 - RNA, 14 nt, Human
cagggcuccugcac

SEQ ID NO: 3823975 - RNA, 19 nt, Human
cagggcucuccuggcuucc

SEQ ID NO: 3823976 - RNA, 19 nt, Human
cagggcucugccccagagg

SEQ ID NO: 3823977 - RNA, 20 nt, Human
cagggcucugccccagaggc

SEQ ID NO: 3823978 - RNA, 15 nt, Human
cagggcucuguaagu

SEQ ID NO: 3823979 - RNA, 18 nt, Human
cagggcugaggccucuca

SEQ ID NO: 3823980 - RNA, 15 nt, Human
cagggcugcccugag

SEQ ID NO: 3823981 - RNA, 18 nt, Human
cagggcugcuagacggag

SEQ ID NO: 3823982 - RNA, 23 nt, Human
cagggcugcugggggcaacuggc

SEQ ID NO: 3823983 - RNA, 20 nt, Human
cagggcuggacugaggccug

SEQ ID NO: 3823984 - RNA, 22 nt, Human
cagggcuggacugaggccugag

SEQ ID NO: 3823985 - RNA, 19 nt, Human
cagggcuggcccagcccug

SEQ ID NO: 3823986 - RNA, 13 nt, Human
cagggcuggcucc

SEQ ID NO: 3823987 - RNA, 18 nt, Human
cagggcuggcuccugauc

SEQ ID NO: 3823988 - RNA, 18 nt, Human
cagggcuuaccuguacac

SEQ ID NO: 3823989 - RNA, 19 nt, Human
cagggcuuaccuguacacu

SEQ ID NO: 3823990 - RNA, 21 nt, Human
cagggcuuaccuguacacuga

SEQ ID NO: 3823991 - RNA, 16 nt, Human
cagggcuuacggcccu

SEQ ID NO: 3823992 - RNA, 14 nt, Human
cagggcuuuaaaau

SEQ ID NO: 3823993 - RNA, 19 nt, Human
caggggaaaaucagccugc

SEQ ID NO: 3823994 - RNA, 18 nt, Human
caggggaaagaugagcuu

SEQ ID NO: 3823995 - RNA, 17 nt, Human
caggggaauauuuuauu

SEQ ID NO: 3823996 - RNA, 19 nt, Human
caggggaauauuuuauuca

SEQ ID NO: 3823997 - RNA, 23 nt, Human
caggggaauauuuuauucaaggu

SEQ ID NO: 3823998 - RNA, 16 nt, Human
caggggacaggauggu

SEQ ID NO: 3823999 - RNA, 16 nt, Human
caggggaccuccuggg

SEQ ID NO: 3824000 - RNA, 18 nt, Human
caggggacucagcccuga

SEQ ID NO: 3824001 - RNA, 13 nt, Human
caggggagcccuc

SEQ ID NO: 3824002 - RNA, 20 nt, Human
caggggagggucagccaggg

SEQ ID NO: 3824003 - RNA, 18 nt, Human
caggggagucccgucagg

SEQ ID NO: 3824004 - RNA, 16 nt, Human
caggggauggcguggu

SEQ ID NO: 3824005 - RNA, 17 nt, Human
caggggauugaagcccu

SEQ ID NO: 3824006 - RNA, 20 nt, Human
caggggauugaagcccucca

SEQ ID NO: 3824007 - RNA, 12 nt, Human
caggggcagcuc

SEQ ID NO: 3824008 - RNA, 16 nt, Human
caggggcaggcacagc

SEQ ID NO: 3824009 - RNA, 17 nt, Human
caggggcaggcacagca

SEQ ID NO: 3824010 - RNA, 20 nt, Human
caggggcauguauuggccug

SEQ ID NO: 3824011 - RNA, 21 nt, Human
caggggcauguauuggccugg

SEQ ID NO: 3824012 - RNA, 20 nt, Human
caggggcccaaggcggcccc

SEQ ID NO: 3824013 - RNA, 15 nt, Human
caggggccccuccag

SEQ ID NO: 3824014 - RNA, 17 nt, Human
caggggccccuccagcu

SEQ ID NO: 3824015 - RNA, 18 nt, Human
caggggccccuccagcuu

SEQ ID NO: 3824016 - RNA, 17 nt, Human
caggggcccuggagcag

SEQ ID NO: 3824017 - RNA, 23 nt, Human
caggggccuggagauccuccugc

SEQ ID NO: 3824018 - RNA, 15 nt, Human
caggggcguggaggg

SEQ ID NO: 3824019 - RNA, 18 nt, Human
caggggcuacaagaggga

SEQ ID NO: 3824020 - RNA, 17 nt, Human
caggggcuccaugccag

SEQ ID NO: 3824021 - RNA, 18 nt, Human
caggggcuccaugccagc

SEQ ID NO: 3824022 - RNA, 21 nt, Human
caggggcucccuccgccccca

SEQ ID NO: 3824023 - RNA, 16 nt, Human
caggggcucuggagag

SEQ ID NO: 3824024 - RNA, 17 nt, Human
caggggcucuggagaga

SEQ ID NO: 3824025 - RNA, 20 nt, Human
caggggcucuggagagaaac

SEQ ID NO: 3824026 - RNA, 16 nt, Human
caggggcugcccgcuc

SEQ ID NO: 3824027 - RNA, 18 nt, Human
caggggcugcccgcuccc

SEQ ID NO: 3824028 - RNA, 20 nt, Human
caggggcugcccgcucccag

SEQ ID NO: 3824029 - RNA, 16 nt, Human
caggggcugcuuccuc

SEQ ID NO: 3824030 - RNA, 20 nt, Human
caggggcugcuuccuccugg

SEQ ID NO: 3824031 - RNA, 22 nt, Human
caggggcugcuuccuccuggaa

SEQ ID NO: 3824032 - RNA, 17 nt, Human
caggggcuggcuucagg

SEQ ID NO: 3824033 - RNA, 15 nt, Human
caggggcuguuugag

SEQ ID NO: 3824034 - RNA, 17 nt, Human
caggggcuuccuggugc

SEQ ID NO: 3824035 - RNA, 13 nt, Human
caggggcuugacu

SEQ ID NO: 3824036 - RNA, 14 nt, Human
cagggggaagaagc

SEQ ID NO: 3824037 - RNA, 11 nt, Human
cagggggaagg

SEQ ID NO: 3824038 - RNA, 18 nt, Human
cagggggacuagccccug

SEQ ID NO: 3824039 - RNA, 11 nt, Human
cagggggccag

SEQ ID NO: 3824040 - RNA, 13 nt, Human
cagggggcugcug

SEQ ID NO: 3824041 - RNA, 19 nt, Human
cagggggguugugaggccu

SEQ ID NO: 3824042 - RNA, 16 nt, Human
cagggggucuggcugg

SEQ ID NO: 3824043 - RNA, 18 nt, Human
cagggggucuggcuggug

SEQ ID NO: 3824044 - RNA, 16 nt, Human
cagggggugugucugc

SEQ ID NO: 3824045 - RNA, 23 nt, Human
caggggucacugaggccugagac

SEQ ID NO: 3824046 - RNA, 13 nt, Human
caggggucucccu

SEQ ID NO: 3824047 - RNA, 17 nt, Human
caggggucucccuggag

SEQ ID NO: 3824048 - RNA, 16 nt, Human
caggggucucccuggc

SEQ ID NO: 3824049 - RNA, 17 nt, Human
caggggucucccuggcu

SEQ ID NO: 3824050 - RNA, 19 nt, Human
caggggucucccuggcucc

SEQ ID NO: 3824051 - RNA, 20 nt, Human
caggggucucccuggcuccc

SEQ ID NO: 3824052 - RNA, 22 nt, Human
caggggucucccuggcucccuc

SEQ ID NO: 3824053 - RNA, 15 nt, Human
caggggugacacaga

SEQ ID NO: 3824054 - RNA, 15 nt, Human
caggggugcccccuc

SEQ ID NO: 3824055 - RNA, 17 nt, Human
caggggugcccccuccu

SEQ ID NO: 3824056 - RNA, 23 nt, Human
caggggugcccccuccucuccca

SEQ ID NO: 3824057 - RNA, 22 nt, Human
cagggguggaggagagccuggu

SEQ ID NO: 3824058 - RNA, 22 nt, Human
cagggguggcugccucauuuag

SEQ ID NO: 3824059 - RNA, 21 nt, Human
cagggguucgagaccagucug

SEQ ID NO: 3824060 - RNA, 17 nt, Human
caucaguguuaaaaaau

SEQ ID NO: 3824061 - RNA, 20 nt, Human
caucaguuagagcugacaca

SEQ ID NO: 3824062 - RNA, 15 nt, Human
caucaguuauucauu

SEQ ID NO: 3824063 - RNA, 19 nt, Human
caucaguuuuguuuacuca

SEQ ID NO: 3824064 - RNA, 17 nt, Human
caucauaggaagggacc

SEQ ID NO: 3824065 - RNA, 15 nt, Human
caucaucagggccug

SEQ ID NO: 3824066 - RNA, 16 nt, Human
caucauccagaugugg

SEQ ID NO: 3824067 - RNA, 18 nt, Human
caucaucuguagauacua

SEQ ID NO: 3824068 - RNA, 20 nt, Human
caucaugaggaaagcaguug

SEQ ID NO: 3824069 - RNA, 12 nt, Human
caucaugcagcu

SEQ ID NO: 3824070 - RNA, 18 nt, Human
caucaugccucugaggcc

SEQ ID NO: 3824071 - RNA, 22 nt, Human
caucaugccucugaggccagcc

SEQ ID NO: 3824072 - RNA, 23 nt, Human
caucaugccucugaggccagccu

SEQ ID NO: 3824073 - RNA, 21 nt, Human
caucauggauucauuacagcu

SEQ ID NO: 3824074 - RNA, 21 nt, Human
caucauggggggagcacccug

SEQ ID NO: 3824075 - RNA, 20 nt, Human
caucauguaaauuaccagua

SEQ ID NO: 3824076 - RNA, 10 nt, Human
caucauguca

SEQ ID NO: 3824077 - RNA, 15 nt, Human
caucaugucuauugu

SEQ ID NO: 3824078 - RNA, 13 nt, Human
caucaugucuggc

SEQ ID NO: 3824079 - RNA, 14 nt, Human
caucaugucuggcu

SEQ ID NO: 3824080 - RNA, 15 nt, Human
caucaugucuggcua

SEQ ID NO: 3824081 - RNA, 17 nt, Human
caucauuacccuucccu

SEQ ID NO: 3824082 - RNA, 20 nt, Human
caucauuacccuucccugca

SEQ ID NO: 3824083 - RNA, 18 nt, Human
caggguauggacuaucug

SEQ ID NO: 3824084 - RNA, 20 nt, Human
caggguauuccagagugggg

SEQ ID NO: 3824085 - RNA, 21 nt, Human
caggguauuccagagugggga

SEQ ID NO: 3824086 - RNA, 16 nt, Human
caggguauugcuugcc

SEQ ID NO: 3824087 - RNA, 20 nt, Human
cagggucacugaaggccugg

SEQ ID NO: 3824088 - RNA, 10 nt, Human
cagggucaga

SEQ ID NO: 3824089 - RNA, 14 nt, Human
cagggucaggagag

SEQ ID NO: 3824090 - RNA, 18 nt, Human
cagggucauguuugcagg

SEQ ID NO: 3824091 - RNA, 21 nt, Human
caggguccaacauagagccgg

SEQ ID NO: 3824092 - RNA, 22 nt, Human
caggguccacaggaagugaaga

SEQ ID NO: 3824093 - RNA, 18 nt, Human
cagggucccacagccacg

SEQ ID NO: 3824094 - RNA, 21 nt, Human
cagggucccauuucucacuga

SEQ ID NO: 3824095 - RNA, 16 nt, Human
cagggucccucugugu

SEQ ID NO: 3824096 - RNA, 15 nt, Human
cagggucccugcugu

SEQ ID NO: 3824097 - RNA, 12 nt, Human
cagggucccugg

SEQ ID NO: 3824098 - RNA, 14 nt, Human
caggguccuuuuga

SEQ ID NO: 3824099 - RNA, 22 nt, Human
caggguccuuuugacacugcuc

SEQ ID NO: 3824100 - RNA, 23 nt, Human
cagggucucacuauguugcccag

SEQ ID NO: 3824101 - RNA, 23 nt, Human
cagggucucacucugucgcccag

SEQ ID NO: 3824102 - RNA, 21 nt, Human
cagggucucuaccauccccug

SEQ ID NO: 3824103 - RNA, 19 nt, Human
cagggucucuagugcugug

SEQ ID NO: 3824104 - RNA, 20 nt, Human
cagggucucuagugcuguga

SEQ ID NO: 3824105 - RNA, 21 nt, Human
cagggucucuagugcugugaa

SEQ ID NO: 3824106 - RNA, 16 nt, Human
cagggucucucccuca

SEQ ID NO: 3824107 - RNA, 20 nt, Human
cagggucucucccucaggug

SEQ ID NO: 3824108 - RNA, 16 nt, Human
cagggucucugcugcc

SEQ ID NO: 3824109 - RNA, 19 nt, Human
cagggucucugcugccgcc

SEQ ID NO: 3824110 - RNA, 20 nt, Human
cagggucugcucuuucucug

SEQ ID NO: 3824111 - RNA, 21 nt, Human
cagggucugcucuuucucugc

SEQ ID NO: 3824112 - RNA, 19 nt, Human
cagggucugugugaaugug

SEQ ID NO: 3824113 - RNA, 20 nt, Human
cagggucugugugaaugugg

SEQ ID NO: 3824114 - RNA, 17 nt, Human
cagggucuucccuaccu

SEQ ID NO: 3824115 - RNA, 21 nt, Human
cagggucuucccuaccucagg

SEQ ID NO: 3824116 - RNA, 15 nt, Human
cagggucuuuucauc

SEQ ID NO: 3824117 - RNA, 22 nt, Human
cagggucuuuucaucugggaaa

SEQ ID NO: 3824118 - RNA, 23 nt, Human
cagggucuuuucaucugggaaag

SEQ ID NO: 3824119 - RNA, 14 nt, Human
cagggugaggaugg

SEQ ID NO: 3824120 - RNA, 13 nt, Human
cagggugcagagg

SEQ ID NO: 3824121 - RNA, 20 nt, Human
cagggugcaguaucaugccc

SEQ ID NO: 3824122 - RNA, 13 nt, Human
cagggugcugugg

SEQ ID NO: 3824123 - RNA, 12 nt, Human
caggguggcagc

SEQ ID NO: 3824124 - RNA, 14 nt, Human
caggguggccacac

SEQ ID NO: 3824125 - RNA, 17 nt, Human
cagggugggauggagga

SEQ ID NO: 3824126 - RNA, 18 nt, Human
cagggugggauggaggag

SEQ ID NO: 3824127 - RNA, 16 nt, Human
cagggugucugccccc

SEQ ID NO: 3824128 - RNA, 12 nt, Human
cagggugugucu

SEQ ID NO: 3824129 - RNA, 23 nt, Human
caggguguugggauacugcaggg

SEQ ID NO: 3824130 - RNA, 15 nt, Human
caggguuaagaagac

SEQ ID NO: 3824131 - RNA, 18 nt, Human
caggguucaaaaugucug

SEQ ID NO: 3824132 - RNA, 18 nt, Human
caggguucccccagcccu

SEQ ID NO: 3824133 - RNA, 21 nt, Human
caggguucccccagcccugug

SEQ ID NO: 3824134 - RNA, 22 nt, Human
caggguucccccagcccugugg

SEQ ID NO: 3824135 - RNA, 23 nt, Human
caggguucucccucccaccuuaa

SEQ ID NO: 3824136 - RNA, 15 nt, Human
caggguucuccucuc

SEQ ID NO: 3824137 - RNA, 23 nt, Human
caggguucucuuagcaacucaga

SEQ ID NO: 3824138 - RNA, 19 nt, Human
caggguugaccccagagga

SEQ ID NO: 3824139 - RNA, 12 nt, Human
caggguuggccc

SEQ ID NO: 3824140 - RNA, 16 nt, Human
caggguuggccccugc

SEQ ID NO: 3824141 - RNA, 14 nt, Human
caggguugggccca

SEQ ID NO: 3824142 - RNA, 16 nt, Human
caggguugggcccaga

SEQ ID NO: 3824143 - RNA, 17 nt, Human
caggguuucgagaagcu

SEQ ID NO: 3824144 - RNA, 21 nt, Human
caggguuuggcugugucuaaa

SEQ ID NO: 3824145 - RNA, 17 nt, Human
caggguuuuaucucugu

SEQ ID NO: 3824146 - RNA, 19 nt, Human
caggguuuuaucucugucu

SEQ ID NO: 3824147 - RNA, 15 nt, Human
cagguaaacuccugu

SEQ ID NO: 3824148 - RNA, 19 nt, Human
cagguaaagggcaaauaau

SEQ ID NO: 3824149 - RNA, 21 nt, Human
cagguaacaggcagauacagg

SEQ ID NO: 3824150 - RNA, 15 nt, Human
cagguaaugagggac

SEQ ID NO: 3824151 - RNA, 22 nt, Human
cagguaaugagggacuggaacc

SEQ ID NO: 3824152 - RNA, 19 nt, Human
cagguaaugugaauaaauu

SEQ ID NO: 3824153 - RNA, 16 nt, Human
cagguacagagaagga

SEQ ID NO: 3824154 - RNA, 14 nt, Human
cagguaccagcugc

SEQ ID NO: 3824155 - RNA, 16 nt, Human
cagguaccagcugcgc

SEQ ID NO: 3824156 - RNA, 17 nt, Human
cagguaccagcugcgcu

SEQ ID NO: 3824157 - RNA, 14 nt, Human
cagguaccaguucu

SEQ ID NO: 3824158 - RNA, 14 nt, Human
cagguacgcacaga

SEQ ID NO: 3824159 - RNA, 16 nt, Human
cagguacgcacagaca

SEQ ID NO: 3824160 - RNA, 17 nt, Human
cagguagaacgccaggg

SEQ ID NO: 3824161 - RNA, 19 nt, Human
cagguagaacgccagggac

SEQ ID NO: 3824162 - RNA, 22 nt, Human
cagguagaagguugacacaguu

SEQ ID NO: 3824163 - RNA, 20 nt, Human
cagguagaauuaucuaauuu

SEQ ID NO: 3824164 - RNA, 18 nt, Human
cagguagaccugucuccu

SEQ ID NO: 3824165 - RNA, 15 nt, Human
cagguagccugcugg

SEQ ID NO: 3824166 - RNA, 18 nt, Human
cagguagcugaaagggga

SEQ ID NO: 3824167 - RNA, 15 nt, Human
cagguagcugccccu

SEQ ID NO: 3824168 - RNA, 21 nt, Human
cagguagcugccccuggcucu

SEQ ID NO: 3824169 - RNA, 15 nt, Human
cagguaggaauauua

SEQ ID NO: 3824170 - RNA, 23 nt, Human
cagguaggaauauuauauuugga

SEQ ID NO: 3824171 - RNA, 23 nt, Human
cagguaguugcaauugaauuaaa

SEQ ID NO: 3824172 - RNA, 15 nt, Human
cagguauaccucacu

SEQ ID NO: 3824173 - RNA, 16 nt, Human
cagguauaccucacuu

SEQ ID NO: 3824174 - RNA, 15 nt, Human
cagguauauacuuug

SEQ ID NO: 3824175 - RNA, 22 nt, Human
cagguaucuccaggauugaaga

SEQ ID NO: 3824176 - RNA, 23 nt, Human
cagguauggaaggguuuguggcu

SEQ ID NO: 3824177 - RNA, 14 nt, Human
cagguauggcucug

SEQ ID NO: 3824178 - RNA, 14 nt, Human
cagguauguugccu

SEQ ID NO: 3824179 - RNA, 15 nt, Human
cagguauguugccuu

SEQ ID NO: 3824180 - RNA, 16 nt, Human
cagguauguugccuuu

SEQ ID NO: 3824181 - RNA, 18 nt, Human
cagguauuuuauaauucu

SEQ ID NO: 3824182 - RNA, 19 nt, Human
cagguauuuuauaauucug

SEQ ID NO: 3824183 - RNA, 23 nt, Human
cagguauuuuauaauucugggaa

SEQ ID NO: 3824184 - RNA, 11 nt, Human
cagguauuuug

SEQ ID NO: 3824185 - RNA, 17 nt, Human
caggucaacagaaugaa

SEQ ID NO: 3824186 - RNA, 21 nt, Human
caggucaacagaaugaaaaau

SEQ ID NO: 3824187 - RNA, 22 nt, Human
caggucaauacaguacaggcag

SEQ ID NO: 3824188 - RNA, 16 nt, Human
caggucagggugagga

SEQ ID NO: 3824189 - RNA, 20 nt, Human
caggucauauuaauauauuu

SEQ ID NO: 3824190 - RNA, 21 nt, Human
cagguccaaugagcuuucuga

SEQ ID NO: 3824191 - RNA, 13 nt, Human
cagguccagcucu

SEQ ID NO: 3824192 - RNA, 14 nt, Human
cagguccagcucug

SEQ ID NO: 3824193 - RNA, 17 nt, Human
caggucccaccuccagc

SEQ ID NO: 3824194 - RNA, 19 nt, Human
caggucccaccuccagccc

SEQ ID NO: 3824195 - RNA, 14 nt, Human
caggucccccugca

SEQ ID NO: 3824196 - RNA, 15 nt, Human
caggucccccugcag

SEQ ID NO: 3824197 - RNA, 18 nt, Human
caggucccccugcagcua

SEQ ID NO: 3824198 - RNA, 12 nt, Human
caggucccuaau

SEQ ID NO: 3824199 - RNA, 16 nt, Human
caggucccuaauaaag

SEQ ID NO: 3824200 - RNA, 18 nt, Human
caggucccuaauaaagcu

SEQ ID NO: 3824201 - RNA, 19 nt, Human
caggucccuaauaaagcug

SEQ ID NO: 3824202 - RNA, 16 nt, Human
caggucccuccccuuc

SEQ ID NO: 3824203 - RNA, 14 nt, Human
cagguccucccugc

SEQ ID NO: 3824204 - RNA, 15 nt, Human
caugcucagcccuga

SEQ ID NO: 3824205 - RNA, 20 nt, Human
caugcucagcccugacuggu

SEQ ID NO: 3824206 - RNA, 16 nt, Human
caugcuccccugugcc

SEQ ID NO: 3824207 - RNA, 18 nt, Human
caugcuccccugugccag

SEQ ID NO: 3824208 - RNA, 19 nt, Human
caugcuccccugugccagc

SEQ ID NO: 3824209 - RNA, 16 nt, Human
caugcuccucuucccc

SEQ ID NO: 3824210 - RNA, 22 nt, Human
caugcuccuuaauggcgccaug

SEQ ID NO: 3824211 - RNA, 12 nt, Human
caugcuccuuac

SEQ ID NO: 3824212 - RNA, 20 nt, Human
caugcucuccaaaccacuuu

SEQ ID NO: 3824213 - RNA, 14 nt, Human
caugcucucugcag

SEQ ID NO: 3824214 - RNA, 23 nt, Human
caugcucucugcagccagcccag

SEQ ID NO: 3824215 - RNA, 21 nt, Human
caugcucugagaagaggagcc

SEQ ID NO: 3824216 - RNA, 22 nt, Human
caugcucugagaagaggagccc

SEQ ID NO: 3824217 - RNA, 17 nt, Human
caugcucuuagaaaauu

SEQ ID NO: 3824218 - RNA, 21 nt, Human
caugcucuugaccuuguagag

SEQ ID NO: 3824219 - RNA, 17 nt, Human
caugcugaggccugggc

SEQ ID NO: 3824220 - RNA, 15 nt, Human
caugcugagucuccc

SEQ ID NO: 3824221 - RNA, 17 nt, Human
caugcugccaauauccu

SEQ ID NO: 3824222 - RNA, 14 nt, Human
caugcugcccugug

SEQ ID NO: 3824223 - RNA, 22 nt, Human
caugcugccuuauucagggaag

SEQ ID NO: 3824224 - RNA, 14 nt, Human
caugcugcugggga

SEQ ID NO: 3824225 - RNA, 16 nt, Human
caugcugcuggggaag

SEQ ID NO: 3824226 - RNA, 17 nt, Human
caugcugcuggggaaga

SEQ ID NO: 3824227 - RNA, 21 nt, Human
caugcugcuggggaagacagu

SEQ ID NO: 3824228 - RNA, 23 nt, Human
caugcuggaaccugcaaaaaaua

SEQ ID NO: 3824229 - RNA, 18 nt, Human
caugcuggacaggucugg

SEQ ID NO: 3824230 - RNA, 22 nt, Human
caugcuggacaggucugggaga

SEQ ID NO: 3824231 - RNA, 15 nt, Human
caugcuggagccugu

SEQ ID NO: 3824232 - RNA, 16 nt, Human
caugcuggagccugug

SEQ ID NO: 3824233 - RNA, 19 nt, Human
caugcuggagccuguguaa

SEQ ID NO: 3824234 - RNA, 22 nt, Human
caugcuggaggugacaucucuu

SEQ ID NO: 3824235 - RNA, 16 nt, Human
caugcuggccagccug

SEQ ID NO: 3824236 - RNA, 23 nt, Human
caugcugggaagacgccugagcu

SEQ ID NO: 3824237 - RNA, 19 nt, Human
caugcugggauuuccaacu

SEQ ID NO: 3824238 - RNA, 18 nt, Human
caugcuggguucugcaca

SEQ ID NO: 3824239 - RNA, 23 nt, Human
caugcugucuacacuaagagaga

SEQ ID NO: 3824240 - RNA, 21 nt, Human
caugcugucuggcacagccug

SEQ ID NO: 3824241 - RNA, 13 nt, Human
caugcuguguaag

SEQ ID NO: 3824242 - RNA, 19 nt, Human
caugcuguguaagcugugu

SEQ ID NO: 3824243 - RNA, 14 nt, Human
caugcugugugacu

SEQ ID NO: 3824244 - RNA, 17 nt, Human
caugcugugugacucaa

SEQ ID NO: 3824245 - RNA, 21 nt, Human
caugcugugugacucaaacca

SEQ ID NO: 3824246 - RNA, 22 nt, Human
caugcugugugacucaaaccaa

SEQ ID NO: 3824247 - RNA, 15 nt, Human
caugcuuagucacug

SEQ ID NO: 3824248 - RNA, 21 nt, Human
caugcuuauuccaugacugcu

SEQ ID NO: 3824249 - RNA, 16 nt, Human
caugcuucacaauguu

SEQ ID NO: 3824250 - RNA, 19 nt, Human
caugcuucaugaaaauccu

SEQ ID NO: 3824251 - RNA, 20 nt, Human
caugcuucucaucuugugaa

SEQ ID NO: 3824252 - RNA, 14 nt, Human
caugcuucuucuca

SEQ ID NO: 3824253 - RNA, 14 nt, Human
caugcuuuaaagug

SEQ ID NO: 3824254 - RNA, 15 nt, Human
caugcuuuaaagugu

SEQ ID NO: 3824255 - RNA, 19 nt, Human
caugcuuuaaaguguaaua

SEQ ID NO: 3824256 - RNA, 23 nt, Human
caugcuuuaaaguguaauaauau

SEQ ID NO: 3824257 - RNA, 16 nt, Human
cauggaaaaacuuccu

SEQ ID NO: 3824258 - RNA, 16 nt, Human
cauggaaaaaugccau

SEQ ID NO: 3824259 - RNA, 21 nt, Human
cauggaaaaaugccaucaaau

SEQ ID NO: 3824260 - RNA, 17 nt, Human
cauggaaaccugaaaaa

SEQ ID NO: 3824261 - RNA, 18 nt, Human
cauggaaaccugaaaaaa

SEQ ID NO: 3824262 - RNA, 14 nt, Human
cauggaaauauuau

SEQ ID NO: 3824263 - RNA, 16 nt, Human
cauggaaauauuaugc

SEQ ID NO: 3824264 - RNA, 21 nt, Human
cauggaaaucagccaaguuuu

SEQ ID NO: 3824265 - RNA, 15 nt, Human
cauggaaauuuaaag

SEQ ID NO: 3824266 - RNA, 16 nt, Human
cauggaaauuuaaagc

SEQ ID NO: 3824267 - RNA, 17 nt, Human
cauggaaauuuaaagca

SEQ ID NO: 3824268 - RNA, 13 nt, Human
cauggaacacaaa

SEQ ID NO: 3824269 - RNA, 23 nt, Human
cauggaacgcguugaaauuguaa

SEQ ID NO: 3824270 - RNA, 16 nt, Human
cauggaacucauuccu

SEQ ID NO: 3824271 - RNA, 20 nt, Human
cauggaaguacuauaauuua

SEQ ID NO: 3824272 - RNA, 14 nt, Human
cauggaaugagggu

SEQ ID NO: 3824273 - RNA, 21 nt, Human
cauggaaugcuugaaaaaugu

SEQ ID NO: 3824274 - RNA, 18 nt, Human
cauggaauggacauccug

SEQ ID NO: 3824275 - RNA, 21 nt, Human
cauggaaugguuauaaaagug

SEQ ID NO: 3824276 - RNA, 22 nt, Human
cauggaaugguuauaaaaguga

SEQ ID NO: 3824277 - RNA, 16 nt, Human
cauggaauuuguaagu

SEQ ID NO: 3824278 - RNA, 23 nt, Human
cauggacaauggaccggagagug

SEQ ID NO: 3824279 - RNA, 18 nt, Human
cauggacacuacacccag

SEQ ID NO: 3824280 - RNA, 20 nt, Human
cauggacacuacacccagca

SEQ ID NO: 3824281 - RNA, 22 nt, Human
cauggacacuacacccagcaau

SEQ ID NO: 3824282 - RNA, 14 nt, Human
cauggacacuccag

SEQ ID NO: 3824283 - RNA, 15 nt, Human
cauggacagaagaag

SEQ ID NO: 3824284 - RNA, 15 nt, Human
cauggacaggcuggc

SEQ ID NO: 3824285 - RNA, 18 nt, Human
cauggacauuuagaagaa

SEQ ID NO: 3824286 - RNA, 21 nt, Human
cauggaccacuguuucuugcu

SEQ ID NO: 3824287 - RNA, 18 nt, Human
cagugauauggcagaaga

SEQ ID NO: 3824288 - RNA, 23 nt, Human
cagugauauggcagaagacacca

SEQ ID NO: 3824289 - RNA, 22 nt, Human
cagugauauucuuuguuaauuu

SEQ ID NO: 3824290 - RNA, 17 nt, Human
cagugaucaaaguccga

SEQ ID NO: 3824291 - RNA, 17 nt, Human
cagugauuaccagggac

SEQ ID NO: 3824292 - RNA, 22 nt, Human
cagugauuaccagggacugagg

SEQ ID NO: 3824293 - RNA, 19 nt, Human
cagugauucgagcuauauu

SEQ ID NO: 3824294 - RNA, 20 nt, Human
cagugauugucuuaauauug

SEQ ID NO: 3824295 - RNA, 19 nt, Human
cagugauuuuuuucuugua

SEQ ID NO: 3824296 - RNA, 13 nt, Human
cagugcaaaugca

SEQ ID NO: 3824297 - RNA, 18 nt, Human
cagugcaaaugcaugcuu

SEQ ID NO: 3824298 - RNA, 15 nt, Human
cagugcaaaugucag

SEQ ID NO: 3824299 - RNA, 16 nt, Human
cagugcaaccucugcu

SEQ ID NO: 3824300 - RNA, 22 nt, Human
cagugcaagagacucuggccuc

SEQ ID NO: 3824301 - RNA, 22 nt, Human
cagugcaaugguauaaauuuca

SEQ ID NO: 3824302 - RNA, 12 nt, Human
cagugcagaaug

SEQ ID NO: 3824303 - RNA, 14 nt, Human
cagugcagaaugua

SEQ ID NO: 3824304 - RNA, 22 nt, Human
cagugcagaauguaagugggcc

SEQ ID NO: 3824305 - RNA, 14 nt, Human
cagugcaggcuggc

SEQ ID NO: 3824306 - RNA, 16 nt, Human
cagugcaggcuggcca

SEQ ID NO: 3824307 - RNA, 17 nt, Human
cagugcaggcuggccag

SEQ ID NO: 3824308 - RNA, 19 nt, Human
cagugcaggcuggccagcc

SEQ ID NO: 3824309 - RNA, 20 nt, Human
cagugcaggcuggccagccg

SEQ ID NO: 3824310 - RNA, 22 nt, Human
cagugcauaguuguagacaaag

SEQ ID NO: 3824311 - RNA, 12 nt, Human
cagugcaucuca

SEQ ID NO: 3824312 - RNA, 18 nt, Human
cagugcaucucagcccac

SEQ ID NO: 3824313 - RNA, 13 nt, Human
cagugcaugcugu

SEQ ID NO: 3824314 - RNA, 14 nt, Human
cagugcaugguggc

SEQ ID NO: 3824315 - RNA, 21 nt, Human
cagugcaugguggccagaggu

SEQ ID NO: 3824316 - RNA, 10 nt, Human
cagugccaac

SEQ ID NO: 3824317 - RNA, 18 nt, Human
cagugccaacuguggcug

SEQ ID NO: 3824318 - RNA, 19 nt, Human
cagugccaagcacagugcc

SEQ ID NO: 3824319 - RNA, 12 nt, Human
cagugccaagga

SEQ ID NO: 3824320 - RNA, 15 nt, Human
cagugccagcaauga

SEQ ID NO: 3824321 - RNA, 17 nt, Human
cagugccagcaaugaca

SEQ ID NO: 3824322 - RNA, 12 nt, Human
cagugcccacag

SEQ ID NO: 3824323 - RNA, 17 nt, Human
cagugcccacaggauca

SEQ ID NO: 3824324 - RNA, 15 nt, Human
cagugcccagguggc

SEQ ID NO: 3824325 - RNA, 14 nt, Human
cagugcccauuccu

SEQ ID NO: 3824326 - RNA, 15 nt, Human
cagugcccccacuga

SEQ ID NO: 3824327 - RNA, 17 nt, Human
cagugcccccacugacc

SEQ ID NO: 3824328 - RNA, 23 nt, Human
cagugcccccacugaccagaacu

SEQ ID NO: 3824329 - RNA, 14 nt, Human
cagugccccuagcu

SEQ ID NO: 3824330 - RNA, 16 nt, Human
cagugcccuccagccc

SEQ ID NO: 3824331 - RNA, 22 nt, Human
cagugcccucuccccucagccu

SEQ ID NO: 3824332 - RNA, 14 nt, Human
cagugcccuggggc

SEQ ID NO: 3824333 - RNA, 15 nt, Human
cagugccgagaagga

SEQ ID NO: 3824334 - RNA, 18 nt, Human
cagugccgagaaggaagc

SEQ ID NO: 3824335 - RNA, 20 nt, Human
cagugccgccgccucgccca

SEQ ID NO: 3824336 - RNA, 19 nt, Human
cagugccuaaaauaagaau

SEQ ID NO: 3824337 - RNA, 20 nt, Human
cagugccucucccugcugcu

SEQ ID NO: 3824338 - RNA, 10 nt, Human
cagugccugc

SEQ ID NO: 3824339 - RNA, 11 nt, Human
cagugccugcu

SEQ ID NO: 3824340 - RNA, 21 nt, Human
cagugccuuaccuccugccca

SEQ ID NO: 3824341 - RNA, 22 nt, Human
cagugccuuaccuccugcccag

SEQ ID NO: 3824342 - RNA, 23 nt, Human
cagugccuuaccuccugcccagg

SEQ ID NO: 3824343 - RNA, 13 nt, Human
cagugccuuaugg

SEQ ID NO: 3824344 - RNA, 15 nt, Human
cagugccuuauggaa

SEQ ID NO: 3824345 - RNA, 17 nt, Human
cagugccuuauggaaca

SEQ ID NO: 3824346 - RNA, 18 nt, Human
cagugccuucaauaaaug

SEQ ID NO: 3824347 - RNA, 16 nt, Human
cagugccuuccauaau

SEQ ID NO: 3824348 - RNA, 15 nt, Human
caagccuggucagcc

SEQ ID NO: 3824349 - RNA, 21 nt, Human
caagccuguaaucccagcuac

SEQ ID NO: 3824350 - RNA, 14 nt, Human
caagccuugauugg

SEQ ID NO: 3824351 - RNA, 17 nt, Human
caagcgaggucaacaga

SEQ ID NO: 3824352 - RNA, 15 nt, Human
caagcgauucucuug

SEQ ID NO: 3824353 - RNA, 18 nt, Human
caagcgauucuucugcuu

SEQ ID NO: 3824354 - RNA, 22 nt, Human
caagcgauucuucugcuucagc

SEQ ID NO: 3824355 - RNA, 20 nt, Human
caagcgauuuuccugcuuca

SEQ ID NO: 3824356 - RNA, 16 nt, Human
caagcgcauccaaucu

SEQ ID NO: 3824357 - RNA, 14 nt, Human
caagcgcccuggcc

SEQ ID NO: 3824358 - RNA, 19 nt, Human
caagcgcccuggcccccac

SEQ ID NO: 3824359 - RNA, 23 nt, Human
caagcgcccuggcccccacaugg

SEQ ID NO: 3824360 - RNA, 13 nt, Human
caagcgccuggag

SEQ ID NO: 3824361 - RNA, 18 nt, Human
caagcggguggcucuggg

SEQ ID NO: 3824362 - RNA, 16 nt, Human
caagcggugucucucc

SEQ ID NO: 3824363 - RNA, 18 nt, Human
caagcgugagccacugca

SEQ ID NO: 3824364 - RNA, 14 nt, Human
caagcuaagcacug

SEQ ID NO: 3824365 - RNA, 16 nt, Human
caagcuaauaaaauau

SEQ ID NO: 3824366 - RNA, 22 nt, Human
caagcuaauaaaauaucauuca

SEQ ID NO: 3824367 - RNA, 17 nt, Human
caagcuaggugcuaauu

SEQ ID NO: 3824368 - RNA, 18 nt, Human
caagcuauuccuuucccu

SEQ ID NO: 3824369 - RNA, 19 nt, Human
caagcuauuccuuucccuu

SEQ ID NO: 3824370 - RNA, 20 nt, Human
caagcuauuccuuucccuuc

SEQ ID NO: 3824371 - RNA, 16 nt, Human
caagcucaaagcgugg

SEQ ID NO: 3824372 - RNA, 19 nt, Human
caagcucacaguuccucgc

SEQ ID NO: 3824373 - RNA, 15 nt, Human
caagcucagaaggcu

SEQ ID NO: 3824374 - RNA, 18 nt, Human
caagcucaggaccaggca

SEQ ID NO: 3824375 - RNA, 12 nt, Human
caagcuccaagc

SEQ ID NO: 3824376 - RNA, 13 nt, Human
caagcuccaagcc

SEQ ID NO: 3824377 - RNA, 14 nt, Human
caagcuccaagccc

SEQ ID NO: 3824378 - RNA, 16 nt, Human
caagcuccgcaggacu

SEQ ID NO: 3824379 - RNA, 17 nt, Human
caagcuccgcaggacuu

SEQ ID NO: 3824380 - RNA, 20 nt, Human
caagcuccgccucccggguu

SEQ ID NO: 3824381 - RNA, 16 nt, Human
caagcuccuccucccu

SEQ ID NO: 3824382 - RNA, 17 nt, Human
caagcuccuccucccug

SEQ ID NO: 3824383 - RNA, 17 nt, Human
caagcucuagugggaag

SEQ ID NO: 3824384 - RNA, 14 nt, Human
caagcucugaggga

SEQ ID NO: 3824385 - RNA, 23 nt, Human
caagcucugagggaaagggcccu

SEQ ID NO: 3824386 - RNA, 13 nt, Human
caagcucuuccuu

SEQ ID NO: 3824387 - RNA, 14 nt, Human
caagcugaaauuuu

SEQ ID NO: 3824388 - RNA, 23 nt, Human
caagcugaguuuccuaugggaac

SEQ ID NO: 3824389 - RNA, 19 nt, Human
caagcugauuaaaugacac

SEQ ID NO: 3824390 - RNA, 19 nt, Human
caagcugccucccugucca

SEQ ID NO: 3824391 - RNA, 16 nt, Human
caagcugcucugagcc

SEQ ID NO: 3824392 - RNA, 12 nt, Human
caagcuggaagc

SEQ ID NO: 3824393 - RNA, 11 nt, Human
caagcuggccu

SEQ ID NO: 3824394 - RNA, 22 nt, Human
caagcuggcugggguggccugu

SEQ ID NO: 3824395 - RNA, 22 nt, Human
caagcuggucccacucagucca

SEQ ID NO: 3824396 - RNA, 22 nt, Human
caagcugguggcucugugugcu

SEQ ID NO: 3824397 - RNA, 17 nt, Human
caagcuguccagagaaa

SEQ ID NO: 3824398 - RNA, 14 nt, Human
caagcugugagaca

SEQ ID NO: 3824399 - RNA, 22 nt, Human
caagcugugagacagugggaaa

SEQ ID NO: 3824400 - RNA, 18 nt, Human
caagcugugccacccugg

SEQ ID NO: 3824401 - RNA, 20 nt, Human
caagcugugccacccugggc

SEQ ID NO: 3824402 - RNA, 17 nt, Human
caagcuguugaccaggc

SEQ ID NO: 3824403 - RNA, 14 nt, Human
caagcuguuuucuu

SEQ ID NO: 3824404 - RNA, 20 nt, Human
caagcuuaauggcugauaau

SEQ ID NO: 3824405 - RNA, 19 nt, Human
caagcuucccuccaucccc

SEQ ID NO: 3824406 - RNA, 24 nt, Human
caagcuucugagacgucaugagga

SEQ ID NO: 3824407 - RNA, 13 nt, Human
caagcuucuuuua

SEQ ID NO: 3824408 - RNA, 16 nt, Human
caagcuuggcagccga

SEQ ID NO: 3824409 - RNA, 17 nt, Human
caagcuuguccaacccg

SEQ ID NO: 3824410 - RNA, 13 nt, Human
caagcuuuaaauu

SEQ ID NO: 3824411 - RNA, 21 nt, Human
caagcuuuuacaacagugcug

SEQ ID NO: 3824412 - RNA, 13 nt, Human
caagcuuuuuuau

SEQ ID NO: 3824413 - RNA, 12 nt, Human
caaggaaaaaga

SEQ ID NO: 3824414 - RNA, 17 nt, Human
caaggaaaaagaaaaua

SEQ ID NO: 3824415 - RNA, 17 nt, Human
caaggaaagccccagca

SEQ ID NO: 3824416 - RNA, 15 nt, Human
caaggaaaggcaaau

SEQ ID NO: 3824417 - RNA, 19 nt, Human
caaggaaaggggagaaggg

SEQ ID NO: 3824418 - RNA, 22 nt, Human
caaggaaagggggucccagugg

SEQ ID NO: 3824419 - RNA, 16 nt, Human
caaggaacaaaaaaac

SEQ ID NO: 3824420 - RNA, 18 nt, Human
caaggaacuugaaaaaua

SEQ ID NO: 3824421 - RNA, 17 nt, Human
caaggaagauauacaug

SEQ ID NO: 3824422 - RNA, 12 nt, Human
caaggaaggaaa

SEQ ID NO: 3824423 - RNA, 17 nt, Human
caaggaaggaaagaaag

SEQ ID NO: 3824424 - RNA, 17 nt, Human
caaggaagggauguauu

SEQ ID NO: 3824425 - RNA, 18 nt, Human
caaggaagggauguauuu

SEQ ID NO: 3824426 - RNA, 16 nt, Human
caaggaauuucuuaac

SEQ ID NO: 3824427 - RNA, 21 nt, Human
caaggaauuucuuaacuucuu

SEQ ID NO: 3824428 - RNA, 22 nt, Human
caaggacacgcgccccccuccc

SEQ ID NO: 3824429 - RNA, 21 nt, Human
caaggacagaaggcuccugcc

SEQ ID NO: 3824430 - RNA, 20 nt, Human
caaggaccaacaagggcagu

SEQ ID NO: 3824431 - RNA, 23 nt, Human
caaggaccaacaagggcagugga

SEQ ID NO: 3824432 - RNA, 15 nt, Human
caaggaccccucacc

SEQ ID NO: 3824433 - RNA, 19 nt, Human
caaggaccuccucuucccc

SEQ ID NO: 3824434 - RNA, 15 nt, Human
caaggacgcuucaca

SEQ ID NO: 3824435 - RNA, 19 nt, Human
caaggacuaggguccuggg

SEQ ID NO: 3824436 - RNA, 13 nt, Human
caaggacugagca

SEQ ID NO: 3824437 - RNA, 20 nt, Human
caaggacugagcacccucug

SEQ ID NO: 3824438 - RNA, 19 nt, Human
caaggacuuccuguccagc

SEQ ID NO: 3824439 - RNA, 21 nt, Human
caaggacuuccuguccagcuc

SEQ ID NO: 3824440 - RNA, 22 nt, Human
caaggacuuccuguccagcucc

SEQ ID NO: 3824441 - RNA, 18 nt, Human
caaggacuugaaagcauc

SEQ ID NO: 3824442 - RNA, 15 nt, Human
caaggacuuugcagc

SEQ ID NO: 3824443 - RNA, 16 nt, Human
caaggacuuugcagcc

SEQ ID NO: 3824444 - RNA, 15 nt, Human
caaggagaggaggca

SEQ ID NO: 3824445 - RNA, 23 nt, Human
caaggagaugaagcaaacacauu

SEQ ID NO: 3824446 - RNA, 14 nt, Human
caaggagccaaaca

SEQ ID NO: 3824447 - RNA, 14 nt, Human
caaggagcugagaa

SEQ ID NO: 3824448 - RNA, 18 nt, Human
caaggagcugagaauaga

SEQ ID NO: 3824449 - RNA, 20 nt, Human
caaggagcugagaauagaag

SEQ ID NO: 3824450 - RNA, 13 nt, Human
caaggagcugcua

SEQ ID NO: 3824451 - RNA, 14 nt, Human
caaggaggcuggcu

SEQ ID NO: 3824452 - RNA, 20 nt, Human
caaggagggcacaggugucu

SEQ ID NO: 3824453 - RNA, 18 nt, Human
caaggagucacugagacc

SEQ ID NO: 3824454 - RNA, 23 nt, Human
caaggaguuccaugaagaccaca

SEQ ID NO: 3824455 - RNA, 16 nt, Human
caaggauagaugcugg

SEQ ID NO: 3824456 - RNA, 23 nt, Human
caaggauagaugcuggcccaggg

SEQ ID NO: 3824457 - RNA, 13 nt, Human
caaggauccugag

SEQ ID NO: 3824458 - RNA, 15 nt, Human
caaggauccugagcc

SEQ ID NO: 3824459 - RNA, 19 nt, Human
caaggauccugagccagau

SEQ ID NO: 3824460 - RNA, 19 nt, Human
caaggaugccccguccccc

SEQ ID NO: 3824461 - RNA, 16 nt, Human
caaggcaaggcaggug

SEQ ID NO: 3824462 - RNA, 18 nt, Human
caaggcaaggcaggugcc

SEQ ID NO: 3824463 - RNA, 14 nt, Human
caaggcaaggcugu

SEQ ID NO: 3824464 - RNA, 13 nt, Human
caaggcaaggggu

SEQ ID NO: 3824465 - RNA, 15 nt, Human
caaggcacucuagau

SEQ ID NO: 3824466 - RNA, 16 nt, Human
caaggcacucuagauu

SEQ ID NO: 3824467 - RNA, 17 nt, Human
caaggcacucuagauuc

SEQ ID NO: 3824468 - RNA, 13 nt, Human
caaggcacugccu

SEQ ID NO: 3824469 - RNA, 16 nt, Human
caaggcacugccugau

SEQ ID NO: 3824470 - RNA, 15 nt, Human
caaggcacugucacu

SEQ ID NO: 3824471 - RNA, 24 nt, Human
caaggcacuucauguaaaguguca

SEQ ID NO: 3824472 - RNA, 13 nt, Human
caaggcagaggcc

SEQ ID NO: 3824473 - RNA, 15 nt, Human
caaggcagaggccug

SEQ ID NO: 3824474 - RNA, 20 nt, Human
caaggcagaggccugggcug

SEQ ID NO: 3824475 - RNA, 12 nt, Human
caaggcagccgu

SEQ ID NO: 3824476 - RNA, 16 nt, Human
caaggcaggugccucc

SEQ ID NO: 3824477 - RNA, 15 nt, Human
caaggccaaaggaag

SEQ ID NO: 3824478 - RNA, 17 nt, Human
caaggccaaaggaagca

SEQ ID NO: 3824479 - RNA, 19 nt, Human
caaggccaaaggaagcaca

SEQ ID NO: 3824480 - RNA, 12 nt, Human
caaggccaccuc

SEQ ID NO: 3824481 - RNA, 14 nt, Human
caaggccaccucuu

SEQ ID NO: 3824482 - RNA, 17 nt, Human
caaggccagaguggccu

SEQ ID NO: 3824483 - RNA, 19 nt, Human
caaggccagaguggccugg

SEQ ID NO: 3824484 - RNA, 15 nt, Human
caaggccagggacag

SEQ ID NO: 3824485 - RNA, 14 nt, Human
caaggccaucuggg

SEQ ID NO: 3824486 - RNA, 17 nt, Human
caaggccaucugggcuc

SEQ ID NO: 3824487 - RNA, 15 nt, Human
caaggcccacaggag

SEQ ID NO: 3824488 - RNA, 14 nt, Human
caaggccccagaga

SEQ ID NO: 3824489 - RNA, 15 nt, Human
caaggcccccugccu

SEQ ID NO: 3824490 - RNA, 13 nt, Human
caaggcccugcug

SEQ ID NO: 3824491 - RNA, 22 nt, Human
caaggcccugcugcccaaucuc

SEQ ID NO: 3824492 - RNA, 16 nt, Human
caaggccgaagcucug

SEQ ID NO: 3824493 - RNA, 12 nt, Human
caagucauggcu

SEQ ID NO: 3824494 - RNA, 17 nt, Human
caagucauguaaauacu

SEQ ID NO: 3824495 - RNA, 19 nt, Human
caagucauguaaauacugu

SEQ ID NO: 3824496 - RNA, 13 nt, Human
caagucaugugca

SEQ ID NO: 3824497 - RNA, 15 nt, Human
caaguccaaauguuu

SEQ ID NO: 3824498 - RNA, 21 nt, Human
caaguccagauuuacacuggg

SEQ ID NO: 3824499 - RNA, 22 nt, Human
caaguccagauuuacacuggga

SEQ ID NO: 3824500 - RNA, 13 nt, Human
caaguccaggucc

SEQ ID NO: 3824501 - RNA, 24 nt, Human
caaguccagguccugguggggcag

SEQ ID NO: 3824502 - RNA, 23 nt, Human
caagucccaccgguugcuucugg

SEQ ID NO: 3824503 - RNA, 17 nt, Human
caagucccagcgcggcu

SEQ ID NO: 3824504 - RNA, 14 nt, Human
caaguccccaagau

SEQ ID NO: 3824505 - RNA, 17 nt, Human
caagucccccaagaccu

SEQ ID NO: 3824506 - RNA, 19 nt, Human
caagucccuguuuucugag

SEQ ID NO: 3824507 - RNA, 20 nt, Human
caagucccuguuuucugagc

SEQ ID NO: 3824508 - RNA, 22 nt, Human
caagucccuguuuucugagccc

SEQ ID NO: 3824509 - RNA, 23 nt, Human
caagucccuguuuucugagcccg

SEQ ID NO: 3824510 - RNA, 14 nt, Human
caaguccugaagag

SEQ ID NO: 3824511 - RNA, 20 nt, Human
caaguccugaagaggcgggc

SEQ ID NO: 3824512 - RNA, 23 nt, Human
caaguccuuaccucuuccggaga

SEQ ID NO: 3824513 - RNA, 16 nt, Human
caaguccuuuuguaaa

SEQ ID NO: 3824514 - RNA, 17 nt, Human
caaguccuuuuguaaag

SEQ ID NO: 3824515 - RNA, 18 nt, Human
caaguccuuuuguaaagu

SEQ ID NO: 3824516 - RNA, 17 nt, Human
caagucgaugaacuauu

SEQ ID NO: 3824517 - RNA, 16 nt, Human
caagucggaacagcag

SEQ ID NO: 3824518 - RNA, 17 nt, Human
caagucuccuuccccuu

SEQ ID NO: 3824519 - RNA, 22 nt, Human
caagucucugcuggcccagcca

SEQ ID NO: 3824520 - RNA, 23 nt, Human
caagucucugcuggcccagccaa

SEQ ID NO: 3824521 - RNA, 23 nt, Human
caagucugugccuggagcuccug

SEQ ID NO: 3824522 - RNA, 13 nt, Human
caagucuguguuc

SEQ ID NO: 3824523 - RNA, 20 nt, Human
caagucuguuuacugcaagg

SEQ ID NO: 3824524 - RNA, 14 nt, Human
caagucuucccuga

SEQ ID NO: 3824525 - RNA, 17 nt, Human
caagucuuucucuuucc

SEQ ID NO: 3824526 - RNA, 20 nt, Human
caagucuuucucuuucccug

SEQ ID NO: 3824527 - RNA, 23 nt, Human
caagugaaaaaggaggaagagaa

SEQ ID NO: 3824528 - RNA, 22 nt, Human
caagugaaauaacaaaauggac

SEQ ID NO: 3824529 - RNA, 19 nt, Human
caagugaacacuagccaga

SEQ ID NO: 3824530 - RNA, 21 nt, Human
caagugaccuauaccuguguu

SEQ ID NO: 3824531 - RNA, 18 nt, Human
caagugacuguaucugug

SEQ ID NO: 3824532 - RNA, 16 nt, Human
caagugagcaaaccug

SEQ ID NO: 3824533 - RNA, 20 nt, Human
caagugagcaaaccugcccc

SEQ ID NO: 3824534 - RNA, 21 nt, Human
caagugagcaaaccugcccca

SEQ ID NO: 3824535 - RNA, 19 nt, Human
caagugaucugcccaccuc

SEQ ID NO: 3824536 - RNA, 21 nt, Human
caagugauucucaugccucag

SEQ ID NO: 3824537 - RNA, 22 nt, Human
caagugauucucaugccucagc

SEQ ID NO: 3824538 - RNA, 19 nt, Human
caagugauugggacagagg

SEQ ID NO: 3824539 - RNA, 14 nt, Human
caagugcacggggc

SEQ ID NO: 3824540 - RNA, 20 nt, Human
caagugcacuuucuaauguu

SEQ ID NO: 3824541 - RNA, 17 nt, Human
caagugcaugcucucug

SEQ ID NO: 3824542 - RNA, 14 nt, Human
caagugccagaggu

SEQ ID NO: 3824543 - RNA, 16 nt, Human
caagugccagaggugg

SEQ ID NO: 3824544 - RNA, 19 nt, Human
caagugccagaggugggca

SEQ ID NO: 3824545 - RNA, 20 nt, Human
caagugccagaggugggcag

SEQ ID NO: 3824546 - RNA, 13 nt, Human
caagugccuuaau

SEQ ID NO: 3824547 - RNA, 14 nt, Human
caagugcugaacag

SEQ ID NO: 3824548 - RNA, 13 nt, Human
caagugcuggagu

SEQ ID NO: 3824549 - RNA, 21 nt, Human
caagugcuggcaccaccaggc

SEQ ID NO: 3824550 - RNA, 22 nt, Human
caaguggaccuuaggccuuccu

SEQ ID NO: 3824551 - RNA, 19 nt, Human
caaguggaccuugagacca

SEQ ID NO: 3824552 - RNA, 16 nt, Human
caaguggacucagggc

SEQ ID NO: 3824553 - RNA, 23 nt, Human
caaguggcaaagcuguucuuccu

SEQ ID NO: 3824554 - RNA, 17 nt, Human
caaguggcauaaagcau

SEQ ID NO: 3824555 - RNA, 18 nt, Human
caaguggcauaaagcaua

SEQ ID NO: 3824556 - RNA, 19 nt, Human
caaguggcaugugcuguga

SEQ ID NO: 3824557 - RNA, 13 nt, Human
caagugggggcag

SEQ ID NO: 3824558 - RNA, 17 nt, Human
caaguggggugcuggga

SEQ ID NO: 3824559 - RNA, 19 nt, Human
caagugguuuccacaugcu

SEQ ID NO: 3824560 - RNA, 21 nt, Human
caaguguaaaauauuuugaau

SEQ ID NO: 3824561 - RNA, 18 nt, Human
caaguguaaugaauaccu

SEQ ID NO: 3824562 - RNA, 22 nt, Human
caaguguaugcacgugugcaca

SEQ ID NO: 3824563 - RNA, 20 nt, Human
caagugucucaguccaccug

SEQ ID NO: 3824564 - RNA, 19 nt, Human
caagugugaacaaaagaug

SEQ ID NO: 3824565 - RNA, 14 nt, Human
caagugugaauacu

SEQ ID NO: 3824566 - RNA, 16 nt, Human
caagugugaauacugc

SEQ ID NO: 3824567 - RNA, 15 nt, Human
caagugugcauauug

SEQ ID NO: 3824568 - RNA, 16 nt, Human
caagugugcuaaaaau

SEQ ID NO: 3824569 - RNA, 21 nt, Human
caagugugggccacuguggug

SEQ ID NO: 3824570 - RNA, 18 nt, Human
caagugugggggguccuu

SEQ ID NO: 3824571 - RNA, 22 nt, Human
caagugugguagggacuuaaaa

SEQ ID NO: 3824572 - RNA, 19 nt, Human
caagugugugcacaugugu

SEQ ID NO: 3824573 - RNA, 21 nt, Human
caagugugugcacaugugugc

SEQ ID NO: 3824574 - RNA, 16 nt, Human
caagugugugcaugug

SEQ ID NO: 3824575 - RNA, 19 nt, Human
caaguguuguuuuuuaagu

SEQ ID NO: 3824576 - RNA, 14 nt, Human
caaguuaaauaaau

SEQ ID NO: 3824577 - RNA, 13 nt, Human
caaguuaaaugua

SEQ ID NO: 3824578 - RNA, 20 nt, Human
caaguuacagcugugacaau

SEQ ID NO: 3824579 - RNA, 14 nt, Human
caaguuagcucagg

SEQ ID NO: 3824580 - RNA, 19 nt, Human
caaguuagcucaggaggcu

SEQ ID NO: 3824581 - RNA, 16 nt, Human
caaguuaguucaaucu

SEQ ID NO: 3824582 - RNA, 19 nt, Human
caaguuauugacaaacucu

SEQ ID NO: 3824583 - RNA, 20 nt, Human
caaguuauuguacagcuguu

SEQ ID NO: 3824584 - RNA, 19 nt, Human
caaguucccaguuggagcu

SEQ ID NO: 3824585 - RNA, 21 nt, Human
caaguuccucuagugcccucc

SEQ ID NO: 3824586 - RNA, 15 nt, Human
caaguucgucuguug

SEQ ID NO: 3824587 - RNA, 12 nt, Human
caaguucuaaga

SEQ ID NO: 3824588 - RNA, 17 nt, Human
caaguucuaagauucua

SEQ ID NO: 3824589 - RNA, 18 nt, Human
caaguucuaagauucuaa

SEQ ID NO: 3824590 - RNA, 18 nt, Human
caaguucuagagaagagg

SEQ ID NO: 3824591 - RNA, 21 nt, Human
caaguucuagagaagaggcug

SEQ ID NO: 3824592 - RNA, 19 nt, Human
caaguugaagacuuuguuu

SEQ ID NO: 3824593 - RNA, 19 nt, Human
caaguugagcuaugacuua

SEQ ID NO: 3824594 - RNA, 15 nt, Human
caaguugcgacggag

SEQ ID NO: 3824595 - RNA, 20 nt, Human
caaguugcgacggagagaaa

SEQ ID NO: 3824596 - RNA, 14 nt, Human
caaguuggacuggg

SEQ ID NO: 3824597 - RNA, 13 nt, Human
caaguugugcuug

SEQ ID NO: 3824598 - RNA, 20 nt, Human
caaguuguggugcugacaaa

SEQ ID NO: 3824599 - RNA, 19 nt, Human
caaguuguucgggccaagg

SEQ ID NO: 3824600 - RNA, 20 nt, Human
caaguuuacucaacccucuc

SEQ ID NO: 3824601 - RNA, 14 nt, Human
caaguuuauauaua

SEQ ID NO: 3824602 - RNA, 17 nt, Human
caaguuuccaagcaaau

SEQ ID NO: 3824603 - RNA, 14 nt, Human
caaguuuuaaaguu

SEQ ID NO: 3824604 - RNA, 22 nt, Human
caaguuuuaggacaaacagcuc

SEQ ID NO: 3824605 - RNA, 17 nt, Human
caaguuuuccauauuuu

SEQ ID NO: 3824606 - RNA, 13 nt, Human
caguucugcuccu

SEQ ID NO: 3824607 - RNA, 15 nt, Human
caguucugcuccucu

SEQ ID NO: 3824608 - RNA, 16 nt, Human
caguucugcuccucuc

SEQ ID NO: 3824609 - RNA, 17 nt, Human
caguucugcuccucucc

SEQ ID NO: 3824610 - RNA, 21 nt, Human
caguucuggauggugugccuu

SEQ ID NO: 3824611 - RNA, 20 nt, Human
caguucugggugcucccuac

SEQ ID NO: 3824612 - RNA, 23 nt, Human
caguucugugaucugggucucua

SEQ ID NO: 3824613 - RNA, 20 nt, Human
caguucugugguuucauguu

SEQ ID NO: 3824614 - RNA, 19 nt, Human
caguucuucgacuguuguu

SEQ ID NO: 3824615 - RNA, 17 nt, Human
caguucuucgggaagag

SEQ ID NO: 3824616 - RNA, 23 nt, Human
caguucuucgggaagagaggagu

SEQ ID NO: 3824617 - RNA, 16 nt, Human
caguucuugugugguu

SEQ ID NO: 3824618 - RNA, 17 nt, Human
caguucuuugggccaga

SEQ ID NO: 3824619 - RNA, 21 nt, Human
caguucuuugggccagacaug

SEQ ID NO: 3824620 - RNA, 22 nt, Human
caguucuuugggccagacaugc

SEQ ID NO: 3824621 - RNA, 18 nt, Human
caguugaaaagacuccaa

SEQ ID NO: 3824622 - RNA, 23 nt, Human
caguugaaaagacuccaaagaaa

SEQ ID NO: 3824623 - RNA, 20 nt, Human
caguugaaugacaacagaag

SEQ ID NO: 3824624 - RNA, 18 nt, Human
caguugagacaagaaaau

SEQ ID NO: 3824625 - RNA, 17 nt, Human
caguugcaauaauacuu

SEQ ID NO: 3824626 - RNA, 12 nt, Human
caguugcacagc

SEQ ID NO: 3824627 - RNA, 18 nt, Human
caguugcacagcaucuca

SEQ ID NO: 3824628 - RNA, 21 nt, Human
caguugcacagcaucucagcu

SEQ ID NO: 3824629 - RNA, 22 nt, Human
caguugcacagcaucucagcuc

SEQ ID NO: 3824630 - RNA, 19 nt, Human
caguugcacuucuaagacu

SEQ ID NO: 3824631 - RNA, 14 nt, Human
caguugcagucacu

SEQ ID NO: 3824632 - RNA, 19 nt, Human
caguugcauguaguaacac

SEQ ID NO: 3824633 - RNA, 23 nt, Human
caguugccagucaccccggccac

SEQ ID NO: 3824634 - RNA, 17 nt, Human
caguugcccagccucuu

SEQ ID NO: 3824635 - RNA, 19 nt, Human
cacacacauacacacauau

SEQ ID NO: 3824636 - RNA, 13 nt, Human
cacacacaugcac

SEQ ID NO: 3824637 - RNA, 14 nt, Human
cacacacaugcaca

SEQ ID NO: 3824638 - RNA, 18 nt, Human
cacacacaugcuucccuu

SEQ ID NO: 3824639 - RNA, 14 nt, Human
cacacaccuagcca

SEQ ID NO: 3824640 - RNA, 15 nt, Human
cacacaccuguaguc

SEQ ID NO: 3824641 - RNA, 20 nt, Human
cacacaccuguagucccagc

SEQ ID NO: 3824642 - RNA, 17 nt, Human
cacacacgcacgcacac

SEQ ID NO: 3824643 - RNA, 20 nt, Human
cacacacgcgcgcgcacaca

SEQ ID NO: 3824644 - RNA, 14 nt, Human
cacacacugaugcu

SEQ ID NO: 3824645 - RNA, 22 nt, Human
cacacacugugcuuucuauugu

SEQ ID NO: 3824646 - RNA, 11 nt, Human
cacacagaaaa

SEQ ID NO: 3824647 - RNA, 12 nt, Human
cacacagaaaau

SEQ ID NO: 3824648 - RNA, 18 nt, Human
cacacagaaaauauacug

SEQ ID NO: 3824649 - RNA, 19 nt, Human
cacacagaaaauauacugu

SEQ ID NO: 3824650 - RNA, 22 nt, Human
cacacagaaaauauacuguaaa

SEQ ID NO: 3824651 - RNA, 23 nt, Human
cacacagaaaauauacuguaaag

SEQ ID NO: 3824652 - RNA, 12 nt, Human
cacacagaaaua

SEQ ID NO: 3824653 - RNA, 18 nt, Human
cacacagaaauauauaua

SEQ ID NO: 3824654 - RNA, 14 nt, Human
cacacagaccacca

SEQ ID NO: 3824655 - RNA, 22 nt, Human
cacacagaccccucgcaacugu

SEQ ID NO: 3824656 - RNA, 22 nt, Human
cacacagacuguugucccugca

SEQ ID NO: 3824657 - RNA, 18 nt, Human
cacacagaggaagagcag

SEQ ID NO: 3824658 - RNA, 22 nt, Human
cacacagaggaagagcaggcac

SEQ ID NO: 3824659 - RNA, 16 nt, Human
cacacagauacacaca

SEQ ID NO: 3824660 - RNA, 17 nt, Human
cacacagauacacacac

SEQ ID NO: 3824661 - RNA, 13 nt, Human
cacacagccacac

SEQ ID NO: 3824662 - RNA, 14 nt, Human
cacacagccacaca

SEQ ID NO: 3824663 - RNA, 23 nt, Human
cauucguuguguuuuuuaagaua

SEQ ID NO: 3824664 - RNA, 19 nt, Human
cauucuaaugauggcccau

SEQ ID NO: 3824665 - RNA, 22 nt, Human
cauucuaaugauggcccauucu

SEQ ID NO: 3824666 - RNA, 19 nt, Human
cauucuacacagagcagga

SEQ ID NO: 3824667 - RNA, 22 nt, Human
cauucuacacagagcaggacug

SEQ ID NO: 3824668 - RNA, 15 nt, Human
cauucuacugaaaag

SEQ ID NO: 3824669 - RNA, 21 nt, Human
cauucuagaugcaagucucuu

SEQ ID NO: 3824670 - RNA, 18 nt, Human
cauucuaucaagcccagg

SEQ ID NO: 3824671 - RNA, 23 nt, Human
cauucuaucaagcccaggugcca

SEQ ID NO: 3824672 - RNA, 18 nt, Human
cauucuauugccuucuuu

SEQ ID NO: 3824673 - RNA, 20 nt, Human
cauucuauugccuucuuuga

SEQ ID NO: 3824674 - RNA, 21 nt, Human
cauucuauugccuucuuugaa

SEQ ID NO: 3824675 - RNA, 16 nt, Human
cauucucaagcccugc

SEQ ID NO: 3824676 - RNA, 17 nt, Human
cauucucaagcccugca

SEQ ID NO: 3824677 - RNA, 20 nt, Human
cauucucacaggucccaaau

SEQ ID NO: 3824678 - RNA, 14 nt, Human
cauucucaggcacc

SEQ ID NO: 3824679 - RNA, 15 nt, Human
cauucucaggcacca

SEQ ID NO: 3824680 - RNA, 20 nt, Human
cauucucaguuuuucuuaau

SEQ ID NO: 3824681 - RNA, 17 nt, Human
cauucucauaauuccua

SEQ ID NO: 3824682 - RNA, 14 nt, Human
cauucucaucugca

SEQ ID NO: 3824683 - RNA, 21 nt, Human
cauucucaucugcacccuucu

SEQ ID NO: 3824684 - RNA, 15 nt, Human
cauucucauggagaa

SEQ ID NO: 3824685 - RNA, 16 nt, Human
cauucucauggagaag

SEQ ID NO: 3824686 - RNA, 13 nt, Human
cauucucauugca

SEQ ID NO: 3824687 - RNA, 19 nt, Human
cauucucauugcagaauaa

SEQ ID NO: 3824688 - RNA, 19 nt, Human
cauucuccaccugccaggg

SEQ ID NO: 3824689 - RNA, 22 nt, Human
cauucuccagggguuuacagug

SEQ ID NO: 3824690 - RNA, 12 nt, Human
cauucuccauuu

SEQ ID NO: 3824691 - RNA, 21 nt, Human
cauucucccagguaccagcug

SEQ ID NO: 3824692 - RNA, 12 nt, Human
cauucuccccag

SEQ ID NO: 3824693 - RNA, 15 nt, Human
cauucuccccagugu

SEQ ID NO: 3824694 - RNA, 15 nt, Human
cauucuccugccugu

SEQ ID NO: 3824695 - RNA, 20 nt, Human
cauucucuaauauccacuug

SEQ ID NO: 3824696 - RNA, 12 nt, Human
cauucucucucc

SEQ ID NO: 3824697 - RNA, 12 nt, Human
cauucucugaag

SEQ ID NO: 3824698 - RNA, 19 nt, Human
cauucucugucucauccau

SEQ ID NO: 3824699 - RNA, 13 nt, Human
cauucucuuuuaa

SEQ ID NO: 3824700 - RNA, 14 nt, Human
cauucucuuuuaau

SEQ ID NO: 3824701 - RNA, 12 nt, Human
cauucugaauua

SEQ ID NO: 3824702 - RNA, 21 nt, Human
cauucugaauuaauuaauuug

SEQ ID NO: 3824703 - RNA, 16 nt, Human
cauucugacucgguuu

SEQ ID NO: 3824704 - RNA, 19 nt, Human
cauucugacucgguuucuc

SEQ ID NO: 3824705 - RNA, 15 nt, Human
cauucugagaccaaa

SEQ ID NO: 3824706 - RNA, 16 nt, Human
cauucugcccuguggg

SEQ ID NO: 3824707 - RNA, 18 nt, Human
cauucugcccugugggac

SEQ ID NO: 3824708 - RNA, 20 nt, Human
cauucugcccugugggaccc

SEQ ID NO: 3824709 - RNA, 18 nt, Human
cauucugccgcccccucc

SEQ ID NO: 3824710 - RNA, 18 nt, Human
cauucugccucucuagga

SEQ ID NO: 3824711 - RNA, 16 nt, Human
cauucugccugcccag

SEQ ID NO: 3824712 - RNA, 19 nt, Human
cauucugccugcccaggcc

SEQ ID NO: 3824713 - RNA, 20 nt, Human
cauucugccugcccaggccc

SEQ ID NO: 3824714 - RNA, 14 nt, Human
cauucugcuccuuc

SEQ ID NO: 3824715 - RNA, 17 nt, Human
cauucuggcaguuuuga

SEQ ID NO: 3824716 - RNA, 19 nt, Human
cauucuggcaguuuugaca

SEQ ID NO: 3824717 - RNA, 20 nt, Human
cauucuggcaguuuugacau

SEQ ID NO: 3824718 - RNA, 20 nt, Human
cauucuggggaaacaacauu

SEQ ID NO: 3824719 - RNA, 21 nt, Human
cauucuggucaagggcuguca

SEQ ID NO: 3824720 - RNA, 18 nt, Human
cauucuggucucgucuuc

SEQ ID NO: 3824721 - RNA, 16 nt, Human
cauucuggucucucua

SEQ ID NO: 3824722 - RNA, 11 nt, Human
cauucuguccu

SEQ ID NO: 3824723 - RNA, 15 nt, Human
cauucugucuugaag

SEQ ID NO: 3824724 - RNA, 19 nt, Human
cauucuuacuaaaaaguau

SEQ ID NO: 3824725 - RNA, 21 nt, Human
cauucuuacuuacuaaaauau

SEQ ID NO: 3824726 - RNA, 22 nt, Human
cauucuuacuuacuaaaauaua

SEQ ID NO: 3824727 - RNA, 21 nt, Human
cauucuuagccuguggcagua

SEQ ID NO: 3824728 - RNA, 17 nt, Human
cauucuuagcucuuaau

SEQ ID NO: 3824729 - RNA, 12 nt, Human
cauucuucaaga

SEQ ID NO: 3824730 - RNA, 14 nt, Human
cauucuucccuuau

SEQ ID NO: 3824731 - RNA, 13 nt, Human
cauucuuccuagu

SEQ ID NO: 3824732 - RNA, 21 nt, Human
cauucuuccuaguuuucuccu

SEQ ID NO: 3824733 - RNA, 18 nt, Human
cauucuucucuguugucg

SEQ ID NO: 3824734 - RNA, 19 nt, Human
cauucuucugagcacuguu

SEQ ID NO: 3824735 - RNA, 17 nt, Human
cauucuugaaagcugug

SEQ ID NO: 3824736 - RNA, 12 nt, Human
cauucuuggcuu

SEQ ID NO: 3824737 - RNA, 21 nt, Human
cauucuugguuggcuggccuu

SEQ ID NO: 3824738 - RNA, 22 nt, Human
cauucuuguaaggcuuugauua

SEQ ID NO: 3824739 - RNA, 13 nt, Human
cauucuuucccag

SEQ ID NO: 3824740 - RNA, 13 nt, Human
cauucuuugcagg

SEQ ID NO: 3824741 - RNA, 19 nt, Human
cauucuuuuugcucuaaaa

SEQ ID NO: 3824742 - RNA, 23 nt, Human
cauucuuuuugcucuaaaauauu

SEQ ID NO: 3824743 - RNA, 15 nt, Human
cauugaaaagagcug

SEQ ID NO: 3824744 - RNA, 17 nt, Human
cauugaaaauaggagag

SEQ ID NO: 3824745 - RNA, 22 nt, Human
cauugaaaauguaaguaaaugu

SEQ ID NO: 3824746 - RNA, 22 nt, Human
cauugaaaauuauuaaucagaa

SEQ ID NO: 3824747 - RNA, 22 nt, Human
cauugaaagagaaccaguuuca

SEQ ID NO: 3824748 - RNA, 19 nt, Human
cauugaaaucuuuuugcuu

SEQ ID NO: 3824749 - RNA, 21 nt, Human
cauugaaaugagcaccuccau

SEQ ID NO: 3824750 - RNA, 14 nt, Human
cauugaaaugucac

SEQ ID NO: 3824751 - RNA, 14 nt, Human
cauugaacacaaac

SEQ ID NO: 3824752 - RNA, 15 nt, Human
cauugaacacaaacu

SEQ ID NO: 3824753 - RNA, 16 nt, Human
cauugaacacaaacug

SEQ ID NO: 3824754 - RNA, 22 nt, Human
cauugaacacaaacuguaaaua

SEQ ID NO: 3824755 - RNA, 17 nt, Human
cauugaagccgacucug

SEQ ID NO: 3824756 - RNA, 21 nt, Human
cauugaagccgacucuggccc

SEQ ID NO: 3824757 - RNA, 23 nt, Human
cauugaagccgacucuggcccug

SEQ ID NO: 3824758 - RNA, 14 nt, Human
cauugaaggcuuaa

SEQ ID NO: 3824759 - RNA, 15 nt, Human
cauugaaucuguaug

SEQ ID NO: 3824760 - RNA, 18 nt, Human
cauugacaaaucugugua

SEQ ID NO: 3824761 - RNA, 14 nt, Human
cauugacauguaca

SEQ ID NO: 3824762 - RNA, 21 nt, Human
cauugacauguacagagaacu

SEQ ID NO: 3824763 - RNA, 22 nt, Human
cauugacauguacagagaacua

SEQ ID NO: 3824764 - RNA, 17 nt, Human
cauugaccaagaacugc

SEQ ID NO: 3824765 - RNA, 18 nt, Human
cauugaccaagaacugca

SEQ ID NO: 3824766 - RNA, 20 nt, Human
cauugaccaagaacugcaug

SEQ ID NO: 3824767 - RNA, 21 nt, Human
cauugaccgcgacuaauuuca

SEQ ID NO: 3824768 - RNA, 21 nt, Human
cauugaccuauuuccagaaau

SEQ ID NO: 3824769 - RNA, 13 nt, Human
cauugaccugagg

SEQ ID NO: 3824770 - RNA, 14 nt, Human
cauugaccugaggc

SEQ ID NO: 3824771 - RNA, 22 nt, Human
cauugaccugaggcccuucucu

SEQ ID NO: 3824772 - RNA, 19 nt, Human
cauugacgauuccuucucu

SEQ ID NO: 3824773 - RNA, 22 nt, Human
cauugacuauuuuuguuuuuau

SEQ ID NO: 3824774 - RNA, 16 nt, Human
cauugacuuuccccac

SEQ ID NO: 3824775 - RNA, 21 nt, Human
cauugacuuuccccaccagau

SEQ ID NO: 3824776 - RNA, 18 nt, Human
cauugagaacugcauaug

SEQ ID NO: 3824777 - RNA, 19 nt, Human
cauugagaacugcauaugu

SEQ ID NO: 3824778 - RNA, 21 nt, Human
cauugagcugauauaaauucu

SEQ ID NO: 3824779 - RNA, 23 nt, Human
cauccauuucaucuauuucugag

SEQ ID NO: 3824780 - RNA, 18 nt, Human
caucccaaccaggcaccu

SEQ ID NO: 3824781 - RNA, 20 nt, Human
caucccaaccaggcaccucu

SEQ ID NO: 3824782 - RNA, 19 nt, Human
caucccacgcacuccauga

SEQ ID NO: 3824783 - RNA, 20 nt, Human
caucccagcaccugccuccu

SEQ ID NO: 3824784 - RNA, 13 nt, Human
caucccagcccaa

SEQ ID NO: 3824785 - RNA, 17 nt, Human
caucccagccccaauga

SEQ ID NO: 3824786 - RNA, 20 nt, Human
caucccagccccaauuuucu

SEQ ID NO: 3824787 - RNA, 20 nt, Human
caucccaggaugcugggugg

SEQ ID NO: 3824788 - RNA, 12 nt, Human
caucccaucauc

SEQ ID NO: 3824789 - RNA, 15 nt, Human
caucccaucccaucc

SEQ ID NO: 3824790 - RNA, 18 nt, Human
caucccaucccaucccgc

SEQ ID NO: 3824791 - RNA, 19 nt, Human
caucccaucuaagcugcag

SEQ ID NO: 3824792 - RNA, 17 nt, Human
caucccaugaacacacu

SEQ ID NO: 3824793 - RNA, 18 nt, Human
caucccaugagacccugg

SEQ ID NO: 3824794 - RNA, 17 nt, Human
caucccauguaacagaa

SEQ ID NO: 3824795 - RNA, 13 nt, Human
caucccauuccag

SEQ ID NO: 3824796 - RNA, 22 nt, Human
caucccauuccaggcagccucu

SEQ ID NO: 3824797 - RNA, 15 nt, Human
caucccauugcccug

SEQ ID NO: 3824798 - RNA, 16 nt, Human
cauccccacccuugga

SEQ ID NO: 3824799 - RNA, 14 nt, Human
cauccccacucacg

SEQ ID NO: 3824800 - RNA, 21 nt, Human
cauccccaggggucccagcca

SEQ ID NO: 3824801 - RNA, 13 nt, Human
cauccccccucac

SEQ ID NO: 3824802 - RNA, 13 nt, Human
caucccccugccc

SEQ ID NO: 3824803 - RNA, 19 nt, Human
caucccccugcccucgugg

SEQ ID NO: 3824804 - RNA, 19 nt, Human
cauccccuggacugggagg

SEQ ID NO: 3824805 - RNA, 22 nt, Human
cauccccuuacccuuagaaucc

SEQ ID NO: 3824806 - RNA, 19 nt, Human
cauccccuugaacucuuca

SEQ ID NO: 3824807 - RNA, 23 nt, Human
caucccgacauggacccggagcu

SEQ ID NO: 3824808 - RNA, 17 nt, Human
caucccgagcaccucca

SEQ ID NO: 3824809 - RNA, 18 nt, Human
caucccggaggaaaucug

SEQ ID NO: 3824810 - RNA, 19 nt, Human
caucccggaggaaaucugc

SEQ ID NO: 3824811 - RNA, 12 nt, Human
caucccuacccc

SEQ ID NO: 3824812 - RNA, 22 nt, Human
caucccuacccccuaagagcca

SEQ ID NO: 3824813 - RNA, 20 nt, Human
caucccucacccauccuaga

SEQ ID NO: 3824814 - RNA, 13 nt, Human
caucccuccccag

SEQ ID NO: 3824815 - RNA, 14 nt, Human
caucccuccccagu

SEQ ID NO: 3824816 - RNA, 20 nt, Human
caucccucccuccaccuccc

SEQ ID NO: 3824817 - RNA, 16 nt, Human
cacacagccacacaca

SEQ ID NO: 3824818 - RNA, 17 nt, Human
cacacagccacacacac

SEQ ID NO: 3824819 - RNA, 21 nt, Human
cacacagccacacacacagaa

SEQ ID NO: 3824820 - RNA, 21 nt, Human
cacacagccaggugccuugga

SEQ ID NO: 3824821 - RNA, 16 nt, Human
cacacagcucuguccu

SEQ ID NO: 3824822 - RNA, 18 nt, Human
cacacagcugggcugugg

SEQ ID NO: 3824823 - RNA, 19 nt, Human
cacacaggacccccuuccc

SEQ ID NO: 3824824 - RNA, 20 nt, Human
cacacaggacccccuucccc

SEQ ID NO: 3824825 - RNA, 10 nt, Human
cacacaggca

SEQ ID NO: 3824826 - RNA, 13 nt, Human
cacacaggcaacu

SEQ ID NO: 3824827 - RNA, 16 nt, Human
cacacaggcaacugag

SEQ ID NO: 3824828 - RNA, 12 nt, Human
cacacagggcag

SEQ ID NO: 3824829 - RNA, 14 nt, Human
cacacagguguuga

SEQ ID NO: 3824830 - RNA, 21 nt, Human
cacacaguauuaagugacagu

SEQ ID NO: 3824831 - RNA, 13 nt, Human
cacacaguauuuu

SEQ ID NO: 3824832 - RNA, 14 nt, Human
cacacaguauuuuu

SEQ ID NO: 3824833 - RNA, 21 nt, Human
cacacagugagucgaggacag

SEQ ID NO: 3824834 - RNA, 14 nt, Human
cacacauacacaca

SEQ ID NO: 3824835 - RNA, 23 nt, Human
cacacauagauuaauggcacuga

SEQ ID NO: 3824836 - RNA, 21 nt, Human
cacacauauaaacaucacaca

SEQ ID NO: 3824837 - RNA, 13 nt, Human
cacacaucaggag

SEQ ID NO: 3824838 - RNA, 22 nt, Human
cacacaucaucuguaagcuguu

SEQ ID NO: 3824839 - RNA, 14 nt, Human
cacacauccacccc

SEQ ID NO: 3824840 - RNA, 20 nt, Human
cacacaugagcaucaggcca

SEQ ID NO: 3824841 - RNA, 21 nt, Human
cacacaugagcaucaggccag

SEQ ID NO: 3824842 - RNA, 15 nt, Human
cacacaugcaaggga

SEQ ID NO: 3824843 - RNA, 14 nt, Human
cacacaugcacaca

SEQ ID NO: 3824844 - RNA, 16 nt, Human
cacacaugcauacaca

SEQ ID NO: 3824845 - RNA, 16 nt, Human
cacacauuucacuguc

SEQ ID NO: 3824846 - RNA, 19 nt, Human
cacacauuucacugucugu

SEQ ID NO: 3824847 - RNA, 20 nt, Human
cacaccaagcugugccaccc

SEQ ID NO: 3824848 - RNA, 13 nt, Human
cacaccagagaac

SEQ ID NO: 3824849 - RNA, 12 nt, Human
cacaccagagcc

SEQ ID NO: 3824850 - RNA, 13 nt, Human
cacaccagagccc

SEQ ID NO: 3824851 - RNA, 21 nt, Human
cacaccagagcccaccuuggc

SEQ ID NO: 3824852 - RNA, 13 nt, Human
cacaccaggcugu

SEQ ID NO: 3824853 - RNA, 14 nt, Human
cacaccaggcugug

SEQ ID NO: 3824854 - RNA, 19 nt, Human
cacaccagggccagccucu

SEQ ID NO: 3824855 - RNA, 21 nt, Human
cacaccauaagcuacugccau

SEQ ID NO: 3824856 - RNA, 21 nt, Human
cacacccaccguccgcccugc

SEQ ID NO: 3824857 - RNA, 22 nt, Human
cacacccaccguccgcccugcu

SEQ ID NO: 3824858 - RNA, 16 nt, Human
cacacccacucagcuc

SEQ ID NO: 3824859 - RNA, 12 nt, Human
cacacccagccu

SEQ ID NO: 3824860 - RNA, 15 nt, Human
cacacccagccucag

SEQ ID NO: 3824861 - RNA, 18 nt, Human
cacacccagccucagucc

SEQ ID NO: 3824862 - RNA, 12 nt, Human
cacaccccaccu

SEQ ID NO: 3824863 - RNA, 12 nt, Human
cacaccccacuc

SEQ ID NO: 3824864 - RNA, 17 nt, Human
cacaccccacucccaca

SEQ ID NO: 3824865 - RNA, 18 nt, Human
cacacccucacucugcca

SEQ ID NO: 3824866 - RNA, 20 nt, Human
cacacccucacucugccagg

SEQ ID NO: 3824867 - RNA, 21 nt, Human
cacacccucccccgccacucc

SEQ ID NO: 3824868 - RNA, 21 nt, Human
cacacccugaggucagggagu

SEQ ID NO: 3824869 - RNA, 12 nt, Human
cacacccugcaa

SEQ ID NO: 3824870 - RNA, 16 nt, Human
cacacccugcaaggcc

SEQ ID NO: 3824871 - RNA, 21 nt, Human
cacacccuguacuguucugug

SEQ ID NO: 3824872 - RNA, 14 nt, Human
cacaccucacucuu

SEQ ID NO: 3824873 - RNA, 13 nt, Human
cacaccucaguuc

SEQ ID NO: 3824874 - RNA, 10 nt, Human
cacaccuccu

SEQ ID NO: 3824875 - RNA, 19 nt, Human
cacaccuccucccacugcc

SEQ ID NO: 3824876 - RNA, 12 nt, Human
cacaccucugcc

SEQ ID NO: 3824877 - RNA, 13 nt, Human
cacaccucugcca

SEQ ID NO: 3824878 - RNA, 17 nt, Human
cacaccuguaaucccag

SEQ ID NO: 3824879 - RNA, 20 nt, Human
cacaccuguaaucccagcac

SEQ ID NO: 3824880 - RNA, 16 nt, Human
cacaccuguaauucca

SEQ ID NO: 3824881 - RNA, 16 nt, Human
cacacgcacacacaca

SEQ ID NO: 3824882 - RNA, 21 nt, Human
cacacgcacauauacacacac

SEQ ID NO: 3824883 - RNA, 22 nt, Human
cacacgcuccucccucugaggc

SEQ ID NO: 3824884 - RNA, 16 nt, Human
cacacgcugcucugcc

SEQ ID NO: 3824885 - RNA, 17 nt, Human
cacacgcugcucugccc

SEQ ID NO: 3824886 - RNA, 22 nt, Human
cacacggacacucaaaagcugg

SEQ ID NO: 3824887 - RNA, 19 nt, Human
cacacgguuugaagccugg

SEQ ID NO: 3824888 - RNA, 24 nt, Human
cacacgucugacccucuccacccc

SEQ ID NO: 3824889 - RNA, 19 nt, Human
cacacuaaccaagcugagu

SEQ ID NO: 3824890 - RNA, 19 nt, Human
cacacuacaccacacacaa

SEQ ID NO: 3824891 - RNA, 20 nt, Human
cacacuacaccacacacaac

SEQ ID NO: 3824892 - RNA, 19 nt, Human
cacacuaucauaguuaaca

SEQ ID NO: 3824893 - RNA, 18 nt, Human
cacacucacuccugagac

SEQ ID NO: 3824894 - RNA, 20 nt, Human
cacacucagauccuccucau

SEQ ID NO: 3824895 - RNA, 14 nt, Human
cacacuccaucagc

SEQ ID NO: 3824896 - RNA, 17 nt, Human
cacacuccaucagcuua

SEQ ID NO: 3824897 - RNA, 22 nt, Human
cacacucuccaucacccucuuc

SEQ ID NO: 3824898 - RNA, 17 nt, Human
cacacugcaacaggaac

SEQ ID NO: 3824899 - RNA, 19 nt, Human
cacacugcaagagccuugg

SEQ ID NO: 3824900 - RNA, 13 nt, Human
cacacuggacucc

SEQ ID NO: 3824901 - RNA, 12 nt, Human
cacacuggcuca

SEQ ID NO: 3824902 - RNA, 15 nt, Human
cacacuggcucaccc

SEQ ID NO: 3824903 - RNA, 16 nt, Human
cacacuggcucaccca

SEQ ID NO: 3824904 - RNA, 19 nt, Human
cacacugggacuugcaaaa

SEQ ID NO: 3824905 - RNA, 22 nt, Human
cacacugggugguggccugguc

SEQ ID NO: 3824906 - RNA, 19 nt, Human
cacacugguacuuagaguu

SEQ ID NO: 3824907 - RNA, 22 nt, Human
cacacugguacuuagaguuucu

SEQ ID NO: 3824908 - RNA, 15 nt, Human
cacacugguucucaa

SEQ ID NO: 3824909 - RNA, 18 nt, Human
cacacugucaugcuucau

SEQ ID NO: 3824910 - RNA, 20 nt, Human
cacacugucaugcuucauca

SEQ ID NO: 3824911 - RNA, 21 nt, Human
cacacugucaugcuucaucau

SEQ ID NO: 3824912 - RNA, 22 nt, Human
cacacugucaugcuucaucauu

SEQ ID NO: 3824913 - RNA, 17 nt, Human
cacacugugacacacua

SEQ ID NO: 3824914 - RNA, 19 nt, Human
cacacugugacacacuaca

SEQ ID NO: 3824915 - RNA, 12 nt, Human
cacacuuagcug

SEQ ID NO: 3824916 - RNA, 17 nt, Human
cacacuucaggcucuuc

SEQ ID NO: 3824917 - RNA, 18 nt, Human
cacacuucaggcucuucu

SEQ ID NO: 3824918 - RNA, 18 nt, Human
cacacuuccaccagccug

SEQ ID NO: 3824919 - RNA, 19 nt, Human
cacacuuccaccagccugc

SEQ ID NO: 3824920 - RNA, 14 nt, Human
cacacuuccagaca

SEQ ID NO: 3824921 - RNA, 12 nt, Human
cacacuucccug

SEQ ID NO: 3824922 - RNA, 14 nt, Human
cacacuucccuggc

SEQ ID NO: 3824923 - RNA, 13 nt, Human
cacacuuccuguc

SEQ ID NO: 3824924 - RNA, 15 nt, Human
ccaacccuucccuga

SEQ ID NO: 3824925 - RNA, 11 nt, Human
ccaacccuucu

SEQ ID NO: 3824926 - RNA, 13 nt, Human
ccaacccuucucc

SEQ ID NO: 3824927 - RNA, 16 nt, Human
ccaaccgacaggcccu

SEQ ID NO: 3824928 - RNA, 22 nt, Human
ccaaccucagggcucccagggg

SEQ ID NO: 3824929 - RNA, 17 nt, Human
ccaaccucuuccuccug

SEQ ID NO: 3824930 - RNA, 12 nt, Human
ccaaccugacca

SEQ ID NO: 3824931 - RNA, 22 nt, Human
ccaaccugaccaacauggagaa

SEQ ID NO: 3824932 - RNA, 18 nt, Human
ccaaccugcaaagaucug

SEQ ID NO: 3824933 - RNA, 19 nt, Human
ccaaccugcaaagaucugu

SEQ ID NO: 3824934 - RNA, 15 nt, Human
ccaaccugcucuccu

SEQ ID NO: 3824935 - RNA, 16 nt, Human
ccaaccugcucuccuc

SEQ ID NO: 3824936 - RNA, 20 nt, Human
ccaaccugcucuccucuucu

SEQ ID NO: 3824937 - RNA, 12 nt, Human
ccaaccugcuga

SEQ ID NO: 3824938 - RNA, 14 nt, Human
ccaaccuggacaac

SEQ ID NO: 3824939 - RNA, 17 nt, Human
ccaaccuggggagccag

SEQ ID NO: 3824940 - RNA, 16 nt, Human
ccaaccuguaauaaau

SEQ ID NO: 3824941 - RNA, 18 nt, Human
ccaaccuguaauaaauau

SEQ ID NO: 3824942 - RNA, 20 nt, Human
ccaaccuguaauaaauauga

SEQ ID NO: 3824943 - RNA, 19 nt, Human
ccaaccuuacuuacagcau

SEQ ID NO: 3824944 - RNA, 12 nt, Human
ccaaccuuccca

SEQ ID NO: 3824945 - RNA, 18 nt, Human
ccaaccuuucccucaccc

SEQ ID NO: 3824946 - RNA, 20 nt, Human
ccaaccuuucccucaccccc

SEQ ID NO: 3824947 - RNA, 14 nt, Human
ccaacgaaaagcac

SEQ ID NO: 3824948 - RNA, 15 nt, Human
ccaacgcacaggaaa

SEQ ID NO: 3824949 - RNA, 15 nt, Human
ccaacgcuccaaagu

SEQ ID NO: 3824950 - RNA, 16 nt, Human
ccaacguggggcagca

SEQ ID NO: 3824951 - RNA, 21 nt, Human
ccaacguuuggaagauccugu

SEQ ID NO: 3824952 - RNA, 22 nt, Human
ccaacuacaaccaagcucucug

SEQ ID NO: 3824953 - RNA, 22 nt, Human
ccaacuacuguguuaugcaaaa

SEQ ID NO: 3824954 - RNA, 14 nt, Human
ccaacuaugauuau

SEQ ID NO: 3824955 - RNA, 14 nt, Human
ccaacuauggccug

SEQ ID NO: 3824956 - RNA, 18 nt, Human
ccaacucaccccagcccc

SEQ ID NO: 3824957 - RNA, 18 nt, Human
ccaacuccaacauccacu

SEQ ID NO: 3824958 - RNA, 13 nt, Human
ccaacuccagcaa

SEQ ID NO: 3824959 - RNA, 14 nt, Human
ccaacuccagcaac

SEQ ID NO: 3824960 - RNA, 11 nt, Human
ccaacuccagu

SEQ ID NO: 3824961 - RNA, 21 nt, Human
ccaacuccaguacuggagcuu

SEQ ID NO: 3824962 - RNA, 19 nt, Human
ccaacuccuaguucuagaa

SEQ ID NO: 3824963 - RNA, 15 nt, Human
ccaacuccuuccagc

SEQ ID NO: 3824964 - RNA, 19 nt, Human
ccaacucgggcucccgggu

SEQ ID NO: 3824965 - RNA, 22 nt, Human
ccaacucugagcccauguucug

SEQ ID NO: 3824966 - RNA, 14 nt, Human
ccaacugcugcccc

SEQ ID NO: 3824967 - RNA, 15 nt, Human
ccaacugcugcccca

SEQ ID NO: 3824968 - RNA, 13 nt, Human
ccaacugcugcuu

SEQ ID NO: 3824969 - RNA, 17 nt, Human
ccaacuggaagcacaga

SEQ ID NO: 3824970 - RNA, 17 nt, Human
ccaacugggcccaagac

SEQ ID NO: 3824971 - RNA, 13 nt, Human
ccaacugugagca

SEQ ID NO: 3824972 - RNA, 14 nt, Human
ccaacuguggcugg

SEQ ID NO: 3824973 - RNA, 16 nt, Human
ccaacuguggcugguc

SEQ ID NO: 3824974 - RNA, 15 nt, Human
ccaacuguguagcau

SEQ ID NO: 3824975 - RNA, 18 nt, Human
ccaacuguguucauuaga

SEQ ID NO: 3824976 - RNA, 23 nt, Human
ccaacuguucagcuguccucccu

SEQ ID NO: 3824977 - RNA, 21 nt, Human
ccaacuucauuugaugcuaaa

SEQ ID NO: 3824978 - RNA, 19 nt, Human
ccaacuucucuugcuuucu

SEQ ID NO: 3824979 - RNA, 19 nt, Human
ccaacuucuucagagcuga

SEQ ID NO: 3824980 - RNA, 10 nt, Human
ccaacuugag

SEQ ID NO: 3824981 - RNA, 21 nt, Human
ccaacuugagggcccagagca

SEQ ID NO: 3824982 - RNA, 17 nt, Human
ccaacuuggcugcagga

SEQ ID NO: 3824983 - RNA, 13 nt, Human
ccaacuuggcuuu

SEQ ID NO: 3824984 - RNA, 21 nt, Human
ccaacuugguucugcuucaau

SEQ ID NO: 3824985 - RNA, 19 nt, Human
ccaacuuucaagaacuugu

SEQ ID NO: 3824986 - RNA, 13 nt, Human
ccaacuuucugua

SEQ ID NO: 3824987 - RNA, 18 nt, Human
ccaagaaacugagaccaa

SEQ ID NO: 3824988 - RNA, 13 nt, Human
ccaagaaagcagg

SEQ ID NO: 3824989 - RNA, 21 nt, Human
ccaagaaagcucacuguagcu

SEQ ID NO: 3824990 - RNA, 18 nt, Human
ccaagaacagcaggccca

SEQ ID NO: 3824991 - RNA, 18 nt, Human
ccaagaacugaaaacaua

SEQ ID NO: 3824992 - RNA, 15 nt, Human
ccaagaacugcaugg

SEQ ID NO: 3824993 - RNA, 12 nt, Human
ccaagaagggcu

SEQ ID NO: 3824994 - RNA, 19 nt, Human
ccaagaauagaugcugacu

SEQ ID NO: 3824995 - RNA, 22 nt, Human
ccaagaauagcaucuguacaaa

SEQ ID NO: 3824996 - RNA, 15 nt, Human
ccaagaauauugcaa

SEQ ID NO: 3824997 - RNA, 21 nt, Human
ccaagaauauugcaaaauaca

SEQ ID NO: 3824998 - RNA, 19 nt, Human
ccaagaauccacauuucua

SEQ ID NO: 3824999 - RNA, 11 nt, Human
ccaagaaucuu

SEQ ID NO: 3825000 - RNA, 12 nt, Human
ccaagaaugcaa

SEQ ID NO: 3825001 - RNA, 14 nt, Human
ccaagaaugcugaa

SEQ ID NO: 3825002 - RNA, 15 nt, Human
ccaagaaugcugaaa

SEQ ID NO: 3825003 - RNA, 13 nt, Human
ccaagacaaauca

SEQ ID NO: 3825004 - RNA, 18 nt, Human
ccaagacaaaucaacaga

SEQ ID NO: 3825005 - RNA, 18 nt, Human
ccaagacagaugccccag

SEQ ID NO: 3825006 - RNA, 19 nt, Human
ccaagacagaugccccaga

SEQ ID NO: 3825007 - RNA, 23 nt, Human
ccaagacaugucuguucuacaua

SEQ ID NO: 3825008 - RNA, 16 nt, Human
ccaagacuccagcccu

SEQ ID NO: 3825009 - RNA, 15 nt, Human
ccaagacucccauga

SEQ ID NO: 3825010 - RNA, 19 nt, Human
ccaagacucccaugaggga

SEQ ID NO: 3825011 - RNA, 15 nt, Human
ccaagacucuagagu

SEQ ID NO: 3825012 - RNA, 23 nt, Human
ccaagacugcuguggccaggagg

SEQ ID NO: 3825013 - RNA, 21 nt, Human
ccaagacuugguguccuuucc

SEQ ID NO: 3825014 - RNA, 23 nt, Human
ccaagagaaaggccugcacacaa

SEQ ID NO: 3825015 - RNA, 20 nt, Human
ccaagagaaggggaagcacu

SEQ ID NO: 3825016 - RNA, 20 nt, Human
ccaagagacaugcugacuuu

SEQ ID NO: 3825017 - RNA, 14 nt, Human
ccaagagagaaaga

SEQ ID NO: 3825018 - RNA, 15 nt, Human
ccaagagagaaagaa

SEQ ID NO: 3825019 - RNA, 20 nt, Human
ccaagagagggccaugcaau

SEQ ID NO: 3825020 - RNA, 21 nt, Human
ccaagagauugcuaauugcug

SEQ ID NO: 3825021 - RNA, 20 nt, Human
ccaagagcaaggaagguaaa

SEQ ID NO: 3825022 - RNA, 16 nt, Human
ccaagagcaucaugcc

SEQ ID NO: 3825023 - RNA, 21 nt, Human
ccaagagcaucaugccucuga

SEQ ID NO: 3825024 - RNA, 21 nt, Human
caugccucccccuagccauuu

SEQ ID NO: 3825025 - RNA, 15 nt, Human
caugccucucucagg

SEQ ID NO: 3825026 - RNA, 17 nt, Human
caugccucucucaggcc

SEQ ID NO: 3825027 - RNA, 13 nt, Human
caugccucugagg

SEQ ID NO: 3825028 - RNA, 22 nt, Human
caugccucugauaugggacuga

SEQ ID NO: 3825029 - RNA, 23 nt, Human
caugccucugauaugggacugag

SEQ ID NO: 3825030 - RNA, 20 nt, Human
caugccugccccccucaucu

SEQ ID NO: 3825031 - RNA, 17 nt, Human
caugccugcuuuagaau

SEQ ID NO: 3825032 - RNA, 17 nt, Human
caugccuggacaaaccc

SEQ ID NO: 3825033 - RNA, 13 nt, Human
caugccuggaugg

SEQ ID NO: 3825034 - RNA, 23 nt, Human
caugccuggauggggcugcaccg

SEQ ID NO: 3825035 - RNA, 14 nt, Human
caugccuggcuucg

SEQ ID NO: 3825036 - RNA, 18 nt, Human
caugccuguccagccugg

SEQ ID NO: 3825037 - RNA, 13 nt, Human
caugccuguggcu

SEQ ID NO: 3825038 - RNA, 15 nt, Human
caugccuguggcugc

SEQ ID NO: 3825039 - RNA, 16 nt, Human
caugccuguggcugcg

SEQ ID NO: 3825040 - RNA, 19 nt, Human
caugccuguggcugcgcuu

SEQ ID NO: 3825041 - RNA, 16 nt, Human
caugccuuuguaaguu

SEQ ID NO: 3825042 - RNA, 22 nt, Human
caugcgacacugggaggccagu

SEQ ID NO: 3825043 - RNA, 21 nt, Human
caugcgcccccuccgcccugc

SEQ ID NO: 3825044 - RNA, 14 nt, Human
caugcgcucagggc

SEQ ID NO: 3825045 - RNA, 22 nt, Human
caugcgcucagggccaugcuga

SEQ ID NO: 3825046 - RNA, 16 nt, Human
caugcggcccagcccg

SEQ ID NO: 3825047 - RNA, 16 nt, Human
caugcggcccaggaug

SEQ ID NO: 3825048 - RNA, 21 nt, Human
caugcgggcugggcagcuguu

SEQ ID NO: 3825049 - RNA, 14 nt, Human
caugcgguagccag

SEQ ID NO: 3825050 - RNA, 17 nt, Human
caugcgguagccagcac

SEQ ID NO: 3825051 - RNA, 21 nt, Human
caugcgguagccagcacacag

SEQ ID NO: 3825052 - RNA, 17 nt, Human
caugcuaacaaagacaa

SEQ ID NO: 3825053 - RNA, 22 nt, Human
caugcuaauauaaguuucuuug

SEQ ID NO: 3825054 - RNA, 14 nt, Human
caugcuaggaugcg

SEQ ID NO: 3825055 - RNA, 19 nt, Human
caugcucaucugcuggucc

SEQ ID NO: 3825056 - RNA, 22 nt, Human
caugcuccagauuagagccugu

SEQ ID NO: 3825057 - RNA, 14 nt, Human
caugcuccucacug

SEQ ID NO: 3825058 - RNA, 15 nt, Human
caugcuccucacugc

SEQ ID NO: 3825059 - RNA, 19 nt, Human
caugcuccucacugcccgc

SEQ ID NO: 3825060 - RNA, 14 nt, Human
caugcuccucuucc

SEQ ID NO: 3825061 - RNA, 17 nt, Human
caugcuccucuucccca

SEQ ID NO: 3825062 - RNA, 18 nt, Human
caugcuccucuuccccag

SEQ ID NO: 3825063 - RNA, 13 nt, Human
caugcuccuggcc

SEQ ID NO: 3825064 - RNA, 16 nt, Human
caugcuccuggcccac

SEQ ID NO: 3825065 - RNA, 20 nt, Human
caugcuccuggcccacugca

SEQ ID NO: 3825066 - RNA, 19 nt, Human
caugcucucugcagccagc

SEQ ID NO: 3825067 - RNA, 20 nt, Human
caugcucucugcagccagcc

SEQ ID NO: 3825068 - RNA, 15 nt, Human
caugcugaagccaaa

SEQ ID NO: 3825069 - RNA, 16 nt, Human
caugggaaggugggcg

SEQ ID NO: 3825070 - RNA, 14 nt, Human
caugggaaugaaug

SEQ ID NO: 3825071 - RNA, 18 nt, Human
caugggaaugaaugucag

SEQ ID NO: 3825072 - RNA, 17 nt, Human
caugggaccacaacuau

SEQ ID NO: 3825073 - RNA, 15 nt, Human
caugggagcagucca

SEQ ID NO: 3825074 - RNA, 14 nt, Human
caugggagggggcu

SEQ ID NO: 3825075 - RNA, 21 nt, Human
caugggaggugaaaggggcac

SEQ ID NO: 3825076 - RNA, 22 nt, Human
caugggauacaaccucccucuu

SEQ ID NO: 3825077 - RNA, 19 nt, Human
caugggcacaaagggccca

SEQ ID NO: 3825078 - RNA, 21 nt, Human
caugggcacaaagggcccaga

SEQ ID NO: 3825079 - RNA, 14 nt, Human
caugggcacugcug

SEQ ID NO: 3825080 - RNA, 15 nt, Human
caugggcacugcugg

SEQ ID NO: 3825081 - RNA, 19 nt, Human
caugggcacugcugggugg

SEQ ID NO: 3825082 - RNA, 23 nt, Human
caugggcacugcuggguggccca

SEQ ID NO: 3825083 - RNA, 15 nt, Human
caugggcagagccca

SEQ ID NO: 3825084 - RNA, 14 nt, Human
caugggcaggagac

SEQ ID NO: 3825085 - RNA, 17 nt, Human
caugggccagccccucc

SEQ ID NO: 3825086 - RNA, 20 nt, Human
caugggcccaggccucacca

SEQ ID NO: 3825087 - RNA, 24 nt, Human
caugggccuggccaccucucuccu

SEQ ID NO: 3825088 - RNA, 12 nt, Human
caugggcuucac

SEQ ID NO: 3825089 - RNA, 20 nt, Human
caugggcuucacuguauaaa

SEQ ID NO: 3825090 - RNA, 20 nt, Human
cauggggagggauucugguu

SEQ ID NO: 3825091 - RNA, 19 nt, Human
cauggggcugauuguauuu

SEQ ID NO: 3825092 - RNA, 13 nt, Human
caugggggagggg

SEQ ID NO: 3825093 - RNA, 21 nt, Human
caugggggagggggcagaagu

SEQ ID NO: 3825094 - RNA, 21 nt, Human
cauggggggagcacccugagg

SEQ ID NO: 3825095 - RNA, 13 nt, Human
cauggggugggcc

SEQ ID NO: 3825096 - RNA, 22 nt, Human
caugggguuggcugggcccaga

SEQ ID NO: 3825097 - RNA, 22 nt, Human
cauggguagcuucugaccucag

SEQ ID NO: 3825098 - RNA, 15 nt, Human
caugggucgcccaug

SEQ ID NO: 3825099 - RNA, 15 nt, Human
cauggguuaugugua

SEQ ID NO: 3825100 - RNA, 16 nt, Human
cauggguuuuguaggu

SEQ ID NO: 3825101 - RNA, 13 nt, Human
caugguaauuuau

SEQ ID NO: 3825102 - RNA, 19 nt, Human
caugguacccccuucuggg

SEQ ID NO: 3825103 - RNA, 21 nt, Human
caugguacccccuucugggca

SEQ ID NO: 3825104 - RNA, 16 nt, Human
cauggucacacacuga

SEQ ID NO: 3825105 - RNA, 19 nt, Human
cauggucccacaucccugg

SEQ ID NO: 3825106 - RNA, 22 nt, Human
cauggucccacaucccugggcc

SEQ ID NO: 3825107 - RNA, 16 nt, Human
caugguccccaagacc

SEQ ID NO: 3825108 - RNA, 18 nt, Human
caugguccccauggcaug

SEQ ID NO: 3825109 - RNA, 14 nt, Human
cauggucccugccu

SEQ ID NO: 3825110 - RNA, 19 nt, Human
cauggucggaaaacaugcu

SEQ ID NO: 3825111 - RNA, 13 nt, Human
cauggucugcccu

SEQ ID NO: 3825112 - RNA, 11 nt, Human
cauggugaaaa

SEQ ID NO: 3825113 - RNA, 15 nt, Human
cauggugaaaagcuc

SEQ ID NO: 3825114 - RNA, 18 nt, Human
cauggugaaaauguacug

SEQ ID NO: 3825115 - RNA, 23 nt, Human
cauggugaagugcuuggaacaua

SEQ ID NO: 3825116 - RNA, 16 nt, Human
cauggugccccaggac

SEQ ID NO: 3825117 - RNA, 17 nt, Human
cauggugccccaggacc

SEQ ID NO: 3825118 - RNA, 18 nt, Human
cauggugccccaggacca

SEQ ID NO: 3825119 - RNA, 19 nt, Human
cauggugccccaggaccag

SEQ ID NO: 3825120 - RNA, 20 nt, Human
cauggugccccaggaccagc

SEQ ID NO: 3825121 - RNA, 15 nt, Human
cauggugccucugga

SEQ ID NO: 3825122 - RNA, 16 nt, Human
cauggugccucuggag

SEQ ID NO: 3825123 - RNA, 13 nt, Human
cauggugccugag

SEQ ID NO: 3825124 - RNA, 18 nt, Human
caugguggcaugcaccug

SEQ ID NO: 3825125 - RNA, 13 nt, Human
caugguggccaga

SEQ ID NO: 3825126 - RNA, 18 nt, Human
caugguggcgcaagccug

SEQ ID NO: 3825127 - RNA, 18 nt, Human
caugguggggucuccuca

SEQ ID NO: 3825128 - RNA, 19 nt, Human
cauggugguugggacccag

SEQ ID NO: 3825129 - RNA, 22 nt, Human
cauggugguugggacccagugg

SEQ ID NO: 3825130 - RNA, 19 nt, Human
caugguguaauaagacaua

SEQ ID NO: 3825131 - RNA, 12 nt, Human
cauggugucugg

SEQ ID NO: 3825132 - RNA, 23 nt, Human
cauggugugaaagucagaugccc

SEQ ID NO: 3825133 - RNA, 18 nt, Human
cauggugugaucgucuga

SEQ ID NO: 3825134 - RNA, 19 nt, Human
caugguuaagguaaaguaa

SEQ ID NO: 3825135 - RNA, 16 nt, Human
caugguugagaaauga

SEQ ID NO: 3825136 - RNA, 19 nt, Human
caugguuuaaaagaaaaaa

SEQ ID NO: 3825137 - RNA, 20 nt, Human
caugguuuaaaagaaaaaau

SEQ ID NO: 3825138 - RNA, 15 nt, Human
caugguuucagcacu

SEQ ID NO: 3825139 - RNA, 14 nt, Human
cauguaaaacaaaa

SEQ ID NO: 3825140 - RNA, 17 nt, Human
cauguaaaacagaaaaa

SEQ ID NO: 3825141 - RNA, 16 nt, Human
cauguaaaagagucau

SEQ ID NO: 3825142 - RNA, 22 nt, Human
cauguaaacacgccugcaaacg

SEQ ID NO: 3825143 - RNA, 16 nt, Human
cauguaaagaaauguc

SEQ ID NO: 3825144 - RNA, 21 nt, Human
cauguaaagcaguauuaaaau

SEQ ID NO: 3825145 - RNA, 14 nt, Human
cauguaaauaaaua

SEQ ID NO: 3825146 - RNA, 18 nt, Human
cauguaaauaccagacug

SEQ ID NO: 3825147 - RNA, 22 nt, Human
cauguaaauaccagacugcagg

SEQ ID NO: 3825148 - RNA, 18 nt, Human
cauguaaauguaaacuca

SEQ ID NO: 3825149 - RNA, 17 nt, Human
cauguaaauugacugua

SEQ ID NO: 3825150 - RNA, 13 nt, Human
cauguaacagaaa

SEQ ID NO: 3825151 - RNA, 17 nt, Human
cauguaaccggcauguu

SEQ ID NO: 3825152 - RNA, 16 nt, Human
cauguaacuauagacu

SEQ ID NO: 3825153 - RNA, 14 nt, Human
cauguaacugccua

SEQ ID NO: 3825154 - RNA, 23 nt, Human
cauguaauauaaagauguuaaaa

SEQ ID NO: 3825155 - RNA, 14 nt, Human
cauguaaucaguuu

SEQ ID NO: 3825156 - RNA, 19 nt, Human
cauguaauguuaauguuau

SEQ ID NO: 3825157 - RNA, 19 nt, Human
cauguaauuuuauuuuaaa

SEQ ID NO: 3825158 - RNA, 21 nt, Human
cauguacaaaaucgauuggcu

SEQ ID NO: 3825159 - RNA, 19 nt, Human
cauguacaguguucuguuu

SEQ ID NO: 3825160 - RNA, 22 nt, Human
cauguacaguguucuguuuaau

SEQ ID NO: 3825161 - RNA, 20 nt, Human
cauguacaugaagaagcuaa

SEQ ID NO: 3825162 - RNA, 14 nt, Human
cauguacauuugga

SEQ ID NO: 3825163 - RNA, 19 nt, Human
cauguaccauuugcauggc

SEQ ID NO: 3825164 - RNA, 13 nt, Human
cauguaccucccc

SEQ ID NO: 3825165 - RNA, 17 nt, Human
cauguaccuccccugcc

SEQ ID NO: 3825166 - RNA, 21 nt, Human
cauguaccuccccugccuugc

SEQ ID NO: 3825167 - RNA, 19 nt, Human
cauguacugagccuuguaa

SEQ ID NO: 3825168 - RNA, 22 nt, Human
cauguacugagccuuguaauuc

SEQ ID NO: 3825169 - RNA, 17 nt, Human
cauguacugcauuauuu

SEQ ID NO: 3825170 - RNA, 13 nt, Human
cauguacuguagu

SEQ ID NO: 3825171 - RNA, 14 nt, Human
cauguacuguaguu

SEQ ID NO: 3825172 - RNA, 21 nt, Human
cauguacuuguuugcaagcag

SEQ ID NO: 3825173 - RNA, 15 nt, Human
cauguagaagcugca

SEQ ID NO: 3825174 - RNA, 19 nt, Human
cauguagaagcugcaucuu

SEQ ID NO: 3825175 - RNA, 13 nt, Human
cauguagagaaaa

SEQ ID NO: 3825176 - RNA, 13 nt, Human
cauguagcccccu

SEQ ID NO: 3825177 - RNA, 18 nt, Human
cauguaggaaguaggaag

SEQ ID NO: 3825178 - RNA, 22 nt, Human
cauguaguaacacuaauauauu

SEQ ID NO: 3825179 - RNA, 17 nt, Human
cauguaguaucaaauau

SEQ ID NO: 3825180 - RNA, 18 nt, Human
cauguaguaucaaauauu

SEQ ID NO: 3825181 - RNA, 22 nt, Human
cauguaguaucaaauauuagau

SEQ ID NO: 3825182 - RNA, 23 nt, Human
ccaagagcaucaugccucugagg

SEQ ID NO: 3825183 - RNA, 22 nt, Human
ccaagagcugaggcaauucuaa

SEQ ID NO: 3825184 - RNA, 21 nt, Human
ccaagaggaaguucagaucuu

SEQ ID NO: 3825185 - RNA, 23 nt, Human
ccaagaggcugguuuuggcaucu

SEQ ID NO: 3825186 - RNA, 21 nt, Human
ccaagaggcuguucccaccag

SEQ ID NO: 3825187 - RNA, 21 nt, Human
ccaagagguuuggcuccugcc

SEQ ID NO: 3825188 - RNA, 15 nt, Human
ccaagagucuaaaga

SEQ ID NO: 3825189 - RNA, 16 nt, Human
ccaagagucuaaagau

SEQ ID NO: 3825190 - RNA, 16 nt, Human
ccaagaguggccccac

SEQ ID NO: 3825191 - RNA, 19 nt, Human
ccaagaguggccccaccug

SEQ ID NO: 3825192 - RNA, 21 nt, Human
ccaagaguggccccaccuggc

SEQ ID NO: 3825193 - RNA, 21 nt, Human
ccaagauaggaccuugggcca

SEQ ID NO: 3825194 - RNA, 22 nt, Human
ccaagauauuuuuaucccaaga

SEQ ID NO: 3825195 - RNA, 16 nt, Human
ccaagauucuagauga

SEQ ID NO: 3825196 - RNA, 22 nt, Human
ccaagauuuuccucuugugauu

SEQ ID NO: 3825197 - RNA, 20 nt, Human
ccaagcaaaggugaagagac

SEQ ID NO: 3825198 - RNA, 17 nt, Human
ccaagcacagcagccug

SEQ ID NO: 3825199 - RNA, 18 nt, Human
ccaagcacagcagccugg

SEQ ID NO: 3825200 - RNA, 16 nt, Human
ccaagcacaguggugg

SEQ ID NO: 3825201 - RNA, 23 nt, Human
ccaagcacagugguggcagggcc

SEQ ID NO: 3825202 - RNA, 20 nt, Human
ccaagcaccugggauuacaa

SEQ ID NO: 3825203 - RNA, 21 nt, Human
ccaagcacugugcucagggcu

SEQ ID NO: 3825204 - RNA, 18 nt, Human
ccaagcacuucuuuuucu

SEQ ID NO: 3825205 - RNA, 19 nt, Human
ccaagcacuuucaguccaa

SEQ ID NO: 3825206 - RNA, 12 nt, Human
ccaagcagccaa

SEQ ID NO: 3825207 - RNA, 18 nt, Human
ccaagcagccaagcuccu

SEQ ID NO: 3825208 - RNA, 13 nt, Human
ccaagcaggaagc

SEQ ID NO: 3825209 - RNA, 14 nt, Human
ccaagcaggaagcu

SEQ ID NO: 3825210 - RNA, 17 nt, Human
ccaagcaggaagcucag

SEQ ID NO: 3825211 - RNA, 18 nt, Human
ccaagcaggaagcucaga

SEQ ID NO: 3825212 - RNA, 11 nt, Human
cauuucagaaa

SEQ ID NO: 3825213 - RNA, 21 nt, Human
cauuucagaaguuaguuugua

SEQ ID NO: 3825214 - RNA, 22 nt, Human
cauuucagaguucuuuuugaag

SEQ ID NO: 3825215 - RNA, 22 nt, Human
cauuucaggagcagccucagaa

SEQ ID NO: 3825216 - RNA, 20 nt, Human
cauuucauauucuuucaauu

SEQ ID NO: 3825217 - RNA, 16 nt, Human
cauuucaucauuguuu

SEQ ID NO: 3825218 - RNA, 19 nt, Human
cauuucaucauuguuucug

SEQ ID NO: 3825219 - RNA, 21 nt, Human
cauuucaucauuguuucugca

SEQ ID NO: 3825220 - RNA, 17 nt, Human
cauuucauccuuucacu

SEQ ID NO: 3825221 - RNA, 21 nt, Human
cauuucaucuaccauuuucug

SEQ ID NO: 3825222 - RNA, 16 nt, Human
cauuucaucuauuucu

SEQ ID NO: 3825223 - RNA, 17 nt, Human
cauuucaucuauuucug

SEQ ID NO: 3825224 - RNA, 18 nt, Human
cauuucaucuauuucuga

SEQ ID NO: 3825225 - RNA, 15 nt, Human
cauuucaucucauuu

SEQ ID NO: 3825226 - RNA, 22 nt, Human
cauuucaugcucugcaaaagga

SEQ ID NO: 3825227 - RNA, 12 nt, Human
cauuucauucca

SEQ ID NO: 3825228 - RNA, 19 nt, Human
cauuucauuccauugccua

SEQ ID NO: 3825229 - RNA, 15 nt, Human
cauuucauuccuaac

SEQ ID NO: 3825230 - RNA, 18 nt, Human
cauuucauuccuaacaca

SEQ ID NO: 3825231 - RNA, 21 nt, Human
cauuucauuccuaacacagca

SEQ ID NO: 3825232 - RNA, 20 nt, Human
cauuucauuguaugaugugu

SEQ ID NO: 3825233 - RNA, 14 nt, Human
cauuucauuuccua

SEQ ID NO: 3825234 - RNA, 12 nt, Human
cauuuccaugua

SEQ ID NO: 3825235 - RNA, 17 nt, Human
cauuuccauguaugcau

SEQ ID NO: 3825236 - RNA, 18 nt, Human
cauuucccaacacaaaga

SEQ ID NO: 3825237 - RNA, 17 nt, Human
ccaccaccucccucacc

SEQ ID NO: 3825238 - RNA, 14 nt, Human
ccaccaccucugug

SEQ ID NO: 3825239 - RNA, 19 nt, Human
ccaccacgauguggcccug

SEQ ID NO: 3825240 - RNA, 20 nt, Human
ccaccacgauguggcccugg

SEQ ID NO: 3825241 - RNA, 21 nt, Human
ccaccacgauguggcccuggc

SEQ ID NO: 3825242 - RNA, 23 nt, Human
ccaccacuggccaccaggcuggc

SEQ ID NO: 3825243 - RNA, 13 nt, Human
ccaccagaagccc

SEQ ID NO: 3825244 - RNA, 16 nt, Human
ccaccagaagcccaga

SEQ ID NO: 3825245 - RNA, 20 nt, Human
ccaccagagaccguccucac

SEQ ID NO: 3825246 - RNA, 22 nt, Human
ccaccagagaccguccucaccc

SEQ ID NO: 3825247 - RNA, 13 nt, Human
ccaccagaugcug

SEQ ID NO: 3825248 - RNA, 18 nt, Human
ccaccagcaucaccugcc

SEQ ID NO: 3825249 - RNA, 15 nt, Human
ccaccagcugugucc

SEQ ID NO: 3825250 - RNA, 19 nt, Human
ccaccaggccaccucccca

SEQ ID NO: 3825251 - RNA, 12 nt, Human
ccaccaggcugg

SEQ ID NO: 3825252 - RNA, 21 nt, Human
ccaccaggcuggcgcagccaa

SEQ ID NO: 3825253 - RNA, 20 nt, Human
ccaccagggcaucucugggc

SEQ ID NO: 3825254 - RNA, 21 nt, Human
ccaccagggcaucucugggcu

SEQ ID NO: 3825255 - RNA, 23 nt, Human
ccaccaggucucccgggaagcca

SEQ ID NO: 3825256 - RNA, 19 nt, Human
ccaccaggugccuuucaaa

SEQ ID NO: 3825257 - RNA, 24 nt, Human
ccaccagugccucucccugcugcu

SEQ ID NO: 3825258 - RNA, 19 nt, Human
ccaccauaugaauuguaca

SEQ ID NO: 3825259 - RNA, 22 nt, Human
ccaccauauucagugcuguggc

SEQ ID NO: 3825260 - RNA, 16 nt, Human
ccaccaucaagccacc

SEQ ID NO: 3825261 - RNA, 18 nt, Human
ccaccaucaugucuggcu

SEQ ID NO: 3825262 - RNA, 19 nt, Human
ccaccaucaugucuggcua

SEQ ID NO: 3825263 - RNA, 11 nt, Human
ccaccaucugc

SEQ ID NO: 3825264 - RNA, 18 nt, Human
ccaccaucugcugucuuu

SEQ ID NO: 3825265 - RNA, 16 nt, Human
ccaccaugccaggcua

SEQ ID NO: 3825266 - RNA, 22 nt, Human
ccaccaugcccagcucagaggg

SEQ ID NO: 3825267 - RNA, 16 nt, Human
ccaccauggccagcca

SEQ ID NO: 3825268 - RNA, 21 nt, Human
ccaccauggccagccaacuuu

SEQ ID NO: 3825269 - RNA, 16 nt, Human
ccaccauuuggcaucc

SEQ ID NO: 3825270 - RNA, 21 nt, Human
ccacccaacccuaucuccuga

SEQ ID NO: 3825271 - RNA, 21 nt, Human
ccacccaagcuuggcagccga

SEQ ID NO: 3825272 - RNA, 17 nt, Human
ccacccaagggccuggc

SEQ ID NO: 3825273 - RNA, 15 nt, Human
ccacccaaugcugau

SEQ ID NO: 3825274 - RNA, 13 nt, Human
ccacccaccucag

SEQ ID NO: 3825275 - RNA, 17 nt, Human
ccacccaccucccugcc

SEQ ID NO: 3825276 - RNA, 19 nt, Human
ccacccaccucccugccuc

SEQ ID NO: 3825277 - RNA, 22 nt, Human
ccacccagaaugagacauccag

SEQ ID NO: 3825278 - RNA, 11 nt, Human
ccacccagccc

SEQ ID NO: 3825279 - RNA, 22 nt, Human
ccacccagcccauucucucucc

SEQ ID NO: 3825280 - RNA, 12 nt, Human
ccacccaggcca

SEQ ID NO: 3825281 - RNA, 14 nt, Human
ccacccaggccagg

SEQ ID NO: 3825282 - RNA, 23 nt, Human
ccacccaggggcagccccaggcc

SEQ ID NO: 3825283 - RNA, 13 nt, Human
ccaccccaagaga

SEQ ID NO: 3825284 - RNA, 17 nt, Human
ccaccccaauccuccca

SEQ ID NO: 3825285 - RNA, 15 nt, Human
ccaccccacacacgc

SEQ ID NO: 3825286 - RNA, 14 nt, Human
ccaccccacccccu

SEQ ID NO: 3825287 - RNA, 16 nt, Human
ccaccccaccugcagg

SEQ ID NO: 3825288 - RNA, 12 nt, Human
ccaccccagccu

SEQ ID NO: 3825289 - RNA, 14 nt, Human
ccaccccagccuaa

SEQ ID NO: 3825290 - RNA, 12 nt, Human
ccaccccaggac

SEQ ID NO: 3825291 - RNA, 14 nt, Human
ccaccccagggcag

SEQ ID NO: 3825292 - RNA, 19 nt, Human
ccaccccagggcagccagg

SEQ ID NO: 3825293 - RNA, 22 nt, Human
ccaccccagugcacccacucug

SEQ ID NO: 3825294 - RNA, 16 nt, Human
ccaccccauucccgca

SEQ ID NO: 3825295 - RNA, 18 nt, Human
ccaccccauuuucugugg

SEQ ID NO: 3825296 - RNA, 21 nt, Human
ccacccccaccaagggcgcaa

SEQ ID NO: 3825297 - RNA, 13 nt, Human
ccacccccagccc

SEQ ID NO: 3825298 - RNA, 15 nt, Human
ccacccccagcugcu

SEQ ID NO: 3825299 - RNA, 18 nt, Human
ccacccccaggaccccug

SEQ ID NO: 3825300 - RNA, 18 nt, Human
ccaccccccacucugugc

SEQ ID NO: 3825301 - RNA, 13 nt, Human
ccaccccccaggc

SEQ ID NO: 3825302 - RNA, 12 nt, Human
ccacccccuagg

SEQ ID NO: 3825303 - RNA, 12 nt, Human
ccacccccucaa

SEQ ID NO: 3825304 - RNA, 17 nt, Human
ccacccccuccccaggg

SEQ ID NO: 3825305 - RNA, 12 nt, Human
ccacccccuuca

SEQ ID NO: 3825306 - RNA, 17 nt, Human
ccacccccuucagugcc

SEQ ID NO: 3825307 - RNA, 18 nt, Human
ccacccccuucucugcuc

SEQ ID NO: 3825308 - RNA, 15 nt, Human
ccaccccgcucugca

SEQ ID NO: 3825309 - RNA, 19 nt, Human
ccaccccggcccccugccc

SEQ ID NO: 3825310 - RNA, 20 nt, Human
ccaccccgggcucucugcug

SEQ ID NO: 3825311 - RNA, 13 nt, Human
ccaccccuacccc

SEQ ID NO: 3825312 - RNA, 13 nt, Human
ccaccccuccaga

SEQ ID NO: 3825313 - RNA, 14 nt, Human
ccaccccucccucu

SEQ ID NO: 3825314 - RNA, 16 nt, Human
ccaccccuccuuccuu

SEQ ID NO: 3825315 - RNA, 22 nt, Human
ccaccccuggaagagcccaguc

SEQ ID NO: 3825316 - RNA, 14 nt, Human
ccaccccugugcuc

SEQ ID NO: 3825317 - RNA, 13 nt, Human
ccaccccuuagau

SEQ ID NO: 3825318 - RNA, 16 nt, Human
ccacccgaugcugcuu

SEQ ID NO: 3825319 - RNA, 15 nt, Human
ccacccguggagaug

SEQ ID NO: 3825320 - RNA, 22 nt, Human
ccacccuaccuguucagugucc

SEQ ID NO: 3825321 - RNA, 17 nt, Human
ccacccucacuggcucu

SEQ ID NO: 3825322 - RNA, 19 nt, Human
ccacccucacuggcucucc

SEQ ID NO: 3825323 - RNA, 21 nt, Human
ccacccuccccucucuugcac

SEQ ID NO: 3825324 - RNA, 19 nt, Human
ccacccuccugucuuccca

SEQ ID NO: 3825325 - RNA, 23 nt, Human
ccacccuccugucuucccagggu

SEQ ID NO: 3825326 - RNA, 19 nt, Human
ccacccucggggauguguc

SEQ ID NO: 3825327 - RNA, 20 nt, Human
ccacccucggggaugugucc

SEQ ID NO: 3825328 - RNA, 18 nt, Human
ccacccucguggacaccu

SEQ ID NO: 3825329 - RNA, 19 nt, Human
ccacccucguggacaccug

SEQ ID NO: 3825330 - RNA, 20 nt, Human
ccacccucguggacaccugc

SEQ ID NO: 3825331 - RNA, 20 nt, Human
ccacccucugagcuuugcau

SEQ ID NO: 3825332 - RNA, 15 nt, Human
ccacccugagccggc

SEQ ID NO: 3825333 - RNA, 15 nt, Human
ccacccugaggaguc

SEQ ID NO: 3825334 - RNA, 21 nt, Human
ccacccugaggagucugaggu

SEQ ID NO: 3825335 - RNA, 20 nt, Human
ccacccugcucauccacucu

SEQ ID NO: 3825336 - RNA, 13 nt, Human
ccacccugcucuc

SEQ ID NO: 3825337 - RNA, 15 nt, Human
ccacccugcugccuu

SEQ ID NO: 3825338 - RNA, 15 nt, Human
ccacccugcugcugg

SEQ ID NO: 3825339 - RNA, 19 nt, Human
ccacccugcuuggcccagg

SEQ ID NO: 3825340 - RNA, 13 nt, Human
ccacccugggccc

SEQ ID NO: 3825341 - RNA, 13 nt, Human
ccacccugggcuc

SEQ ID NO: 3825342 - RNA, 15 nt, Human
ccacccugggcucug

SEQ ID NO: 3825343 - RNA, 23 nt, Human
ccacccugggcucugugggcugc

SEQ ID NO: 3825344 - RNA, 21 nt, Human
ccacccuguaccucaucccau

SEQ ID NO: 3825345 - RNA, 18 nt, Human
ccacccugucccccagcu

SEQ ID NO: 3825346 - RNA, 21 nt, Human
ccacccugucccccagcucug

SEQ ID NO: 3825347 - RNA, 22 nt, Human
ccacccugucccccagcucugg

SEQ ID NO: 3825348 - RNA, 17 nt, Human
ccacccuguuccugcug

SEQ ID NO: 3825349 - RNA, 14 nt, Human
ccacccuuccccuc

SEQ ID NO: 3825350 - RNA, 20 nt, Human
ccacccuuggaggcugucuu

SEQ ID NO: 3825351 - RNA, 23 nt, Human
ccacccuuuggggggggcccgcc

SEQ ID NO: 3825352 - RNA, 16 nt, Human
ccaccgcagaaggaag

SEQ ID NO: 3825353 - RNA, 14 nt, Human
ccaccgcagacagg

SEQ ID NO: 3825354 - RNA, 13 nt, Human
ccaccgccauggc

SEQ ID NO: 3825355 - RNA, 17 nt, Human
ccaccgccauggcuucc

SEQ ID NO: 3825356 - RNA, 18 nt, Human
ccaccgccauggcuucca

SEQ ID NO: 3825357 - RNA, 15 nt, Human
cauuuguauuuugug

SEQ ID NO: 3825358 - RNA, 17 nt, Human
cauuuguauuuugugug

SEQ ID NO: 3825359 - RNA, 18 nt, Human
cauuuguauuuuguguga

SEQ ID NO: 3825360 - RNA, 12 nt, Human
cauuugucauuu

SEQ ID NO: 3825361 - RNA, 12 nt, Human
cauuugucccaa

SEQ ID NO: 3825362 - RNA, 13 nt, Human
cauuugucccaag

SEQ ID NO: 3825363 - RNA, 12 nt, Human
cauuugugauau

SEQ ID NO: 3825364 - RNA, 22 nt, Human
cauuugugauauauguauuaau

SEQ ID NO: 3825365 - RNA, 18 nt, Human
cauuuguggcagucccuu

SEQ ID NO: 3825366 - RNA, 17 nt, Human
cauuuguggguuuuuau

SEQ ID NO: 3825367 - RNA, 15 nt, Human
cauuuguuaaaauua

SEQ ID NO: 3825368 - RNA, 15 nt, Human
cauuuguuauucuua

SEQ ID NO: 3825369 - RNA, 14 nt, Human
cauuuguucacuga

SEQ ID NO: 3825370 - RNA, 13 nt, Human
cauuuguucauau

SEQ ID NO: 3825371 - RNA, 14 nt, Human
cauuuguucauauu

SEQ ID NO: 3825372 - RNA, 19 nt, Human
cauuuguucauauuaagaa

SEQ ID NO: 3825373 - RNA, 20 nt, Human
cauuuguucauauuaagaau

SEQ ID NO: 3825374 - RNA, 19 nt, Human
cauuuguugccagauuuca

SEQ ID NO: 3825375 - RNA, 20 nt, Human
cauuuguuuauguaauuuca

SEQ ID NO: 3825376 - RNA, 13 nt, Human
cauuuuaaaaaca

SEQ ID NO: 3825377 - RNA, 18 nt, Human
cauuuuaaaaaugaaauu

SEQ ID NO: 3825378 - RNA, 22 nt, Human
cauuuuaaacaaaauagaaagu

SEQ ID NO: 3825379 - RNA, 18 nt, Human
cauuuuaaaguuaaacau

SEQ ID NO: 3825380 - RNA, 17 nt, Human
cauuuuaaaguuaguau

SEQ ID NO: 3825381 - RNA, 16 nt, Human
cauuuuaaauaaaaga

SEQ ID NO: 3825382 - RNA, 17 nt, Human
cauuuuaaauaaaagaa

SEQ ID NO: 3825383 - RNA, 17 nt, Human
cauuuuaaauggacaga

SEQ ID NO: 3825384 - RNA, 16 nt, Human
cauuuuaacaucugag

SEQ ID NO: 3825385 - RNA, 14 nt, Human
cauuuuaauucauc

SEQ ID NO: 3825386 - RNA, 19 nt, Human
cauuuuaauuuuaaccaaa

SEQ ID NO: 3825387 - RNA, 19 nt, Human
cauuuuacacacuguacac

SEQ ID NO: 3825388 - RNA, 22 nt, Human
cauuuuaccaucacacauguuc

SEQ ID NO: 3825389 - RNA, 20 nt, Human
cauuuuacccacacacagau

SEQ ID NO: 3825390 - RNA, 23 nt, Human
cauuuuaccuuugacaaagguaa

SEQ ID NO: 3825391 - RNA, 16 nt, Human
cauuuuacuguacaga

SEQ ID NO: 3825392 - RNA, 22 nt, Human
cauuuuacuuuuuccuggcuca

SEQ ID NO: 3825393 - RNA, 20 nt, Human
cauuuuagaagacucuacca

SEQ ID NO: 3825394 - RNA, 17 nt, Human
cauuuuagacaguaagu

SEQ ID NO: 3825395 - RNA, 19 nt, Human
cauuuuagacaguaaguau

SEQ ID NO: 3825396 - RNA, 16 nt, Human
cauuuuagcuaauuua

SEQ ID NO: 3825397 - RNA, 19 nt, Human
cauuuuagggguagcauuu

SEQ ID NO: 3825398 - RNA, 15 nt, Human
cauuuuagucacuuu

SEQ ID NO: 3825399 - RNA, 14 nt, Human
cauuuuaguucuuu

SEQ ID NO: 3825400 - RNA, 14 nt, Human
cauuuuauauguca

SEQ ID NO: 3825401 - RNA, 19 nt, Human
cauuuuauaugucaaagca

SEQ ID NO: 3825402 - RNA, 18 nt, Human
caccuguaaagugccuua

SEQ ID NO: 3825403 - RNA, 14 nt, Human
caccuguaagaaac

SEQ ID NO: 3825404 - RNA, 17 nt, Human
caccuguaaucccagca

SEQ ID NO: 3825405 - RNA, 20 nt, Human
caccuguaauuccagcacuu

SEQ ID NO: 3825406 - RNA, 11 nt, Human
caccuguacag

SEQ ID NO: 3825407 - RNA, 18 nt, Human
caccuguacaguggaacc

SEQ ID NO: 3825408 - RNA, 16 nt, Human
caccuguacucaggag

SEQ ID NO: 3825409 - RNA, 15 nt, Human
caccuguacucuucc

SEQ ID NO: 3825410 - RNA, 16 nt, Human
caccuguagucccagc

SEQ ID NO: 3825411 - RNA, 17 nt, Human
caccuguagucccagcu

SEQ ID NO: 3825412 - RNA, 18 nt, Human
caccuguagucccagcua

SEQ ID NO: 3825413 - RNA, 22 nt, Human
caccuguagucccagcuacuug

SEQ ID NO: 3825414 - RNA, 16 nt, Human
caccugucccaccuca

SEQ ID NO: 3825415 - RNA, 15 nt, Human
caccugucgcccagu

SEQ ID NO: 3825416 - RNA, 18 nt, Human
caccugucgcccagugcc

SEQ ID NO: 3825417 - RNA, 18 nt, Human
caccugucucagccuccc

SEQ ID NO: 3825418 - RNA, 11 nt, Human
caccugucugc

SEQ ID NO: 3825419 - RNA, 15 nt, Human
caccugucugcucca

SEQ ID NO: 3825420 - RNA, 20 nt, Human
caccugucugcuccagcucu

SEQ ID NO: 3825421 - RNA, 21 nt, Human
caccugucugcuccagcucug

SEQ ID NO: 3825422 - RNA, 11 nt, Human
caccugucugu

SEQ ID NO: 3825423 - RNA, 20 nt, Human
caccugucuugccuuuuuca

SEQ ID NO: 3825424 - RNA, 23 nt, Human
caccugugcagcgaagcuuagcg

SEQ ID NO: 3825425 - RNA, 20 nt, Human
caccuguugcuuacaauuuu

SEQ ID NO: 3825426 - RNA, 20 nt, Human
caccuguuuuuaagcuguuu

SEQ ID NO: 3825427 - RNA, 14 nt, Human
caccuuaaauuaaa

SEQ ID NO: 3825428 - RNA, 15 nt, Human
caccuuaaauuaaac

SEQ ID NO: 3825429 - RNA, 22 nt, Human
caccuuaaauuaaacaauuuau

SEQ ID NO: 3825430 - RNA, 14 nt, Human
caccuuaauaugcu

SEQ ID NO: 3825431 - RNA, 19 nt, Human
caccuuagacagucccugc

SEQ ID NO: 3825432 - RNA, 14 nt, Human
caccuuagaccacc

SEQ ID NO: 3825433 - RNA, 19 nt, Human
caccuuagaccaccaagcc

SEQ ID NO: 3825434 - RNA, 22 nt, Human
caccuuagccugcccuccuuuc

SEQ ID NO: 3825435 - RNA, 14 nt, Human
caccuuaggcaggg

SEQ ID NO: 3825436 - RNA, 15 nt, Human
caccuuauauuuacg

SEQ ID NO: 3825437 - RNA, 17 nt, Human
caccuucaauuccuggg

SEQ ID NO: 3825438 - RNA, 18 nt, Human
caccuucaauuccugggc

SEQ ID NO: 3825439 - RNA, 20 nt, Human
caccuucagaggcugaggug

SEQ ID NO: 3825440 - RNA, 23 nt, Human
caccuucaguaacccccacugga

SEQ ID NO: 3825441 - RNA, 16 nt, Human
caccuucauuuugagg

SEQ ID NO: 3825442 - RNA, 14 nt, Human
caccuuccagcucc

SEQ ID NO: 3825443 - RNA, 18 nt, Human
caccuucccacuuuccca

SEQ ID NO: 3825444 - RNA, 15 nt, Human
caccuucccagcucu

SEQ ID NO: 3825445 - RNA, 17 nt, Human
caccuucccagcucucc

SEQ ID NO: 3825446 - RNA, 19 nt, Human
caccuucccagcucucccu

SEQ ID NO: 3825447 - RNA, 22 nt, Human
caccuucccagcucucccucug

SEQ ID NO: 3825448 - RNA, 13 nt, Human
caccuucccaugc

SEQ ID NO: 3825449 - RNA, 19 nt, Human
caccuucccccucccccag

SEQ ID NO: 3825450 - RNA, 18 nt, Human
caccuucccuugccacuu

SEQ ID NO: 3825451 - RNA, 12 nt, Human
caccuucugagu

SEQ ID NO: 3825452 - RNA, 18 nt, Human
caccuugaacaccacgcu

SEQ ID NO: 3825453 - RNA, 13 nt, Human
caccuugacaggg

SEQ ID NO: 3825454 - RNA, 13 nt, Human
caccuuggcucaa

SEQ ID NO: 3825455 - RNA, 19 nt, Human
caccuugggaugaugccuc

SEQ ID NO: 3825456 - RNA, 20 nt, Human
caccuugggaugaugccuca

SEQ ID NO: 3825457 - RNA, 18 nt, Human
caccuuggggcuugacuu

SEQ ID NO: 3825458 - RNA, 20 nt, Human
caccuuggggcuugacuuuu

SEQ ID NO: 3825459 - RNA, 22 nt, Human
caccuugguuccuggggcaucc

SEQ ID NO: 3825460 - RNA, 15 nt, Human
caccuugugccuggg

SEQ ID NO: 3825461 - RNA, 21 nt, Human
caccuugugucuguacacgug

SEQ ID NO: 3825462 - RNA, 14 nt, Human
caccuuuacuuuag

SEQ ID NO: 3825463 - RNA, 14 nt, Human
caccuuuagguucu

SEQ ID NO: 3825464 - RNA, 12 nt, Human
caccuuuauuaa

SEQ ID NO: 3825465 - RNA, 17 nt, Human
caccuuuauuaaaaucu

SEQ ID NO: 3825466 - RNA, 21 nt, Human
caccuuucagauaacuguuau

SEQ ID NO: 3825467 - RNA, 14 nt, Human
caccuuucccaucu

SEQ ID NO: 3825468 - RNA, 15 nt, Human
caccuuucccuaaag

SEQ ID NO: 3825469 - RNA, 20 nt, Human
caccuuucccuaaagacccu

SEQ ID NO: 3825470 - RNA, 19 nt, Human
caccuuuccucaaauguug

SEQ ID NO: 3825471 - RNA, 17 nt, Human
caccuuucuaguugaaa

SEQ ID NO: 3825472 - RNA, 16 nt, Human
caccuuucuccuuugu

SEQ ID NO: 3825473 - RNA, 15 nt, Human
caccuuugcaggcau

SEQ ID NO: 3825474 - RNA, 20 nt, Human
caccuuuguagcacucaggc

SEQ ID NO: 3825475 - RNA, 21 nt, Human
caccuuuguagcacucaggcu

SEQ ID NO: 3825476 - RNA, 19 nt, Human
caccuuuguuucuccccca

SEQ ID NO: 3825477 - RNA, 20 nt, Human
caccuuuucagcgauguaug

SEQ ID NO: 3825478 - RNA, 20 nt, Human
caccuuuugggaauguuuua

SEQ ID NO: 3825479 - RNA, 22 nt, Human
cacgaaagagagagaaacaaac

SEQ ID NO: 3825480 - RNA, 13 nt, Human
cacgaaauguuau

SEQ ID NO: 3825481 - RNA, 16 nt, Human
cacgaaauguuauuuu

SEQ ID NO: 3825482 - RNA, 22 nt, Human
cacgaacccaccugcugagaga

SEQ ID NO: 3825483 - RNA, 16 nt, Human
cacgaauauugcugau

SEQ ID NO: 3825484 - RNA, 17 nt, Human
cacgaauuucugugccc

SEQ ID NO: 3825485 - RNA, 18 nt, Human
cacgaauuugcuggggaa

SEQ ID NO: 3825486 - RNA, 14 nt, Human
cacgaccggggcca

SEQ ID NO: 3825487 - RNA, 15 nt, Human
cacgacgcugcagag

SEQ ID NO: 3825488 - RNA, 17 nt, Human
cacgacuucuguuucac

SEQ ID NO: 3825489 - RNA, 15 nt, Human
cacgagagcgcagca

SEQ ID NO: 3825490 - RNA, 23 nt, Human
cacgagcagacacccuuggagcu

SEQ ID NO: 3825491 - RNA, 13 nt, Human
cacgagggcuggc

SEQ ID NO: 3825492 - RNA, 17 nt, Human
cacgagggcuggcuggc

SEQ ID NO: 3825493 - RNA, 19 nt, Human
cacgauccugccacccugu

SEQ ID NO: 3825494 - RNA, 12 nt, Human
cacgaugaaaaa

SEQ ID NO: 3825495 - RNA, 16 nt, Human
cacgauguggcccugg

SEQ ID NO: 3825496 - RNA, 18 nt, Human
cacgauguggcccuggcc

SEQ ID NO: 3825497 - RNA, 14 nt, Human
cacgauuucuguuu

SEQ ID NO: 3825498 - RNA, 16 nt, Human
cacgauuucuguuuag

SEQ ID NO: 3825499 - RNA, 23 nt, Human
cacgauuuucuccagcucagaac

SEQ ID NO: 3825500 - RNA, 13 nt, Human
cacgcaacuugaa

SEQ ID NO: 3825501 - RNA, 12 nt, Human
cacgcacacaca

SEQ ID NO: 3825502 - RNA, 17 nt, Human
ccaaggagucacugaga

SEQ ID NO: 3825503 - RNA, 19 nt, Human
ccaaggagucacugagacc

SEQ ID NO: 3825504 - RNA, 13 nt, Human
ccaaggcaaggca

SEQ ID NO: 3825505 - RNA, 15 nt, Human
ccaaggcagaggccu

SEQ ID NO: 3825506 - RNA, 20 nt, Human
ccaaggcagaggccugggcu

SEQ ID NO: 3825507 - RNA, 20 nt, Human
ccaaggcauaucaugcuuug

SEQ ID NO: 3825508 - RNA, 21 nt, Human
ccaaggccaaaggaagcacau

SEQ ID NO: 3825509 - RNA, 18 nt, Human
ccaaggccagaguggccu

SEQ ID NO: 3825510 - RNA, 16 nt, Human
ccaaggccaggccuug

SEQ ID NO: 3825511 - RNA, 16 nt, Human
ccaaggccagggacag

SEQ ID NO: 3825512 - RNA, 20 nt, Human
ccaaggcccccugccugccc

SEQ ID NO: 3825513 - RNA, 16 nt, Human
ccaaggcggccccucc

SEQ ID NO: 3825514 - RNA, 17 nt, Human
ccaaggcugcgucugga

SEQ ID NO: 3825515 - RNA, 18 nt, Human
ccaaggcugcgucuggag

SEQ ID NO: 3825516 - RNA, 19 nt, Human
ccaaggcugcgucuggagg

SEQ ID NO: 3825517 - RNA, 17 nt, Human
ccaagggaaaggggugc

SEQ ID NO: 3825518 - RNA, 19 nt, Human
ccaagggaaccuguguccg

SEQ ID NO: 3825519 - RNA, 18 nt, Human
ccaagggaggcugcugcu

SEQ ID NO: 3825520 - RNA, 22 nt, Human
ccaagggaggcugcugcugcuc

SEQ ID NO: 3825521 - RNA, 13 nt, Human
ccaagggaucugg

SEQ ID NO: 3825522 - RNA, 19 nt, Human
ccaagggaugaaagagaag

SEQ ID NO: 3825523 - RNA, 19 nt, Human
ccaagggcauaaauuauug

SEQ ID NO: 3825524 - RNA, 13 nt, Human
ccaagggcccaaa

SEQ ID NO: 3825525 - RNA, 19 nt, Human
ccaagggccuggccugagc

SEQ ID NO: 3825526 - RNA, 13 nt, Human
ccaagggcugccg

SEQ ID NO: 3825527 - RNA, 21 nt, Human
ccaagggcuucugcacccucc

SEQ ID NO: 3825528 - RNA, 22 nt, Human
ccaagggcuucugcacccucca

SEQ ID NO: 3825529 - RNA, 22 nt, Human
ccaaggggaauguuugccucug

SEQ ID NO: 3825530 - RNA, 20 nt, Human
ccaaggggagucaccuuccc

SEQ ID NO: 3825531 - RNA, 21 nt, Human
ccaaggggcaaauuuuuauuu

SEQ ID NO: 3825532 - RNA, 15 nt, Human
ccaaggggcagucug

SEQ ID NO: 3825533 - RNA, 20 nt, Human
ccaaggggcagucuggaggg

SEQ ID NO: 3825534 - RNA, 22 nt, Human
ccaaggggccugagcaguccuu

SEQ ID NO: 3825535 - RNA, 18 nt, Human
ccaaggggugggccacag

SEQ ID NO: 3825536 - RNA, 23 nt, Human
ccaaggguucagagacucagggc

SEQ ID NO: 3825537 - RNA, 20 nt, Human
ccaagguagaaugaccuugu

SEQ ID NO: 3825538 - RNA, 15 nt, Human
ccaaggucugagcca

SEQ ID NO: 3825539 - RNA, 16 nt, Human
ccaagguggcacggug

SEQ ID NO: 3825540 - RNA, 17 nt, Human
ccaaggugggcugagcc

SEQ ID NO: 3825541 - RNA, 18 nt, Human
ccaagguguccuacagaa

SEQ ID NO: 3825542 - RNA, 22 nt, Human
ccaagguuggagcccagggcau

SEQ ID NO: 3825543 - RNA, 20 nt, Human
ccaagguuuaaacuucucug

SEQ ID NO: 3825544 - RNA, 20 nt, Human
ccaagguuuaaagagucuag

SEQ ID NO: 3825545 - RNA, 23 nt, Human
ccaagguuuaaagagucuagauu

SEQ ID NO: 3825546 - RNA, 19 nt, Human
ccaagguuuuauaaggcug

SEQ ID NO: 3825547 - RNA, 20 nt, Human
ccaagguuuuauaaggcuga

SEQ ID NO: 3825548 - RNA, 21 nt, Human
ccaaguaagaggcuggaguug

SEQ ID NO: 3825549 - RNA, 20 nt, Human
ccaaguagucugcucacagu

SEQ ID NO: 3825550 - RNA, 17 nt, Human
ccaaguccagguccugg

SEQ ID NO: 3825551 - RNA, 15 nt, Human
ccaagucccuguuuu

SEQ ID NO: 3825552 - RNA, 13 nt, Human
ccaaguccgcaga

SEQ ID NO: 3825553 - RNA, 19 nt, Human
ccaaguccugaagaggcgg

SEQ ID NO: 3825554 - RNA, 20 nt, Human
ccaaguccugaagaggcggg

SEQ ID NO: 3825555 - RNA, 14 nt, Human
ccaagugcaggcug

SEQ ID NO: 3825556 - RNA, 15 nt, Human
ccaagugccagaggu

SEQ ID NO: 3825557 - RNA, 23 nt, Human
ccaagugccagaggugggcaggu

SEQ ID NO: 3825558 - RNA, 18 nt, Human
ccaaguggagccugacag

SEQ ID NO: 3825559 - RNA, 15 nt, Human
ccaaguggcagagcu

SEQ ID NO: 3825560 - RNA, 19 nt, Human
ccaaguggcagagcuugga

SEQ ID NO: 3825561 - RNA, 12 nt, Human
ccaaguggcucc

SEQ ID NO: 3825562 - RNA, 13 nt, Human
ccaaguggcuccc

SEQ ID NO: 3825563 - RNA, 18 nt, Human
ccaagugggggcagaggg

SEQ ID NO: 3825564 - RNA, 14 nt, Human
ccaagugugaacaa

SEQ ID NO: 3825565 - RNA, 19 nt, Human
ccaagugugcauauuguac

SEQ ID NO: 3825566 - RNA, 22 nt, Human
ccaagugugcauauuguacacu

SEQ ID NO: 3825567 - RNA, 12 nt, Human
ccaagugugcua

SEQ ID NO: 3825568 - RNA, 12 nt, Human
ccaagugugugu

SEQ ID NO: 3825569 - RNA, 13 nt, Human
ccaagugugugug

SEQ ID NO: 3825570 - RNA, 14 nt, Human
ccaagugugugugc

SEQ ID NO: 3825571 - RNA, 14 nt, Human
ccaaguuauauaaa

SEQ ID NO: 3825572 - RNA, 13 nt, Human
ccaaguuccucua

SEQ ID NO: 3825573 - RNA, 15 nt, Human
ccaaguucucaccuc

SEQ ID NO: 3825574 - RNA, 22 nt, Human
ccaaguugauuuaguguuuuua

SEQ ID NO: 3825575 - RNA, 17 nt, Human
ccaaguuuacucaaccc

SEQ ID NO: 3825576 - RNA, 21 nt, Human
ccaaguuuacucaacccucuc

SEQ ID NO: 3825577 - RNA, 17 nt, Human
ccaaguuuccauagcaa

SEQ ID NO: 3825578 - RNA, 20 nt, Human
ccaaguuuccauagcaacag

SEQ ID NO: 3825579 - RNA, 17 nt, Human
ccaaguuuugugaaauu

SEQ ID NO: 3825580 - RNA, 23 nt, Human
ccaauaaaagcaauuccaaccuu

SEQ ID NO: 3825581 - RNA, 13 nt, Human
ccaauaaacagga

SEQ ID NO: 3825582 - RNA, 13 nt, Human
ccaauaaaccagg

SEQ ID NO: 3825583 - RNA, 14 nt, Human
ccaauaaaccaggu

SEQ ID NO: 3825584 - RNA, 22 nt, Human
ccaauaaaugugaaauucuguc

SEQ ID NO: 3825585 - RNA, 22 nt, Human
ccaauaauaaaugcccucuucu

SEQ ID NO: 3825586 - RNA, 21 nt, Human
ccaauagcacuuucauugcca

SEQ ID NO: 3825587 - RNA, 14 nt, Human
ccaauagcugccca

SEQ ID NO: 3825588 - RNA, 18 nt, Human
ccaauagggcugagcucu

SEQ ID NO: 3825589 - RNA, 12 nt, Human
ccaauauccuaa

SEQ ID NO: 3825590 - RNA, 14 nt, Human
ccaauauccuaaua

SEQ ID NO: 3825591 - RNA, 16 nt, Human
ccaauauccuaauaaa

SEQ ID NO: 3825592 - RNA, 18 nt, Human
ccaauauccuaauaaaaa

SEQ ID NO: 3825593 - RNA, 15 nt, Human
ccaauauguauugua

SEQ ID NO: 3825594 - RNA, 22 nt, Human
ccaauauguauuguaaacaugu

SEQ ID NO: 3825595 - RNA, 15 nt, Human
ccaauauuaaaucug

SEQ ID NO: 3825596 - RNA, 18 nt, Human
ccaauauuaaaucugcug

SEQ ID NO: 3825597 - RNA, 12 nt, Human
ccaauauuauaa

SEQ ID NO: 3825598 - RNA, 16 nt, Human
ccaauauuguacaguu

SEQ ID NO: 3825599 - RNA, 14 nt, Human
ccaauauuuguaga

SEQ ID NO: 3825600 - RNA, 20 nt, Human
ccaauauuuucuuuaaugcu

SEQ ID NO: 3825601 - RNA, 17 nt, Human
ccaaucaagauaaagga

SEQ ID NO: 3825602 - RNA, 14 nt, Human
ccaaucagcacuga

SEQ ID NO: 3825603 - RNA, 18 nt, Human
ccaaucccagcuaccuca

SEQ ID NO: 3825604 - RNA, 17 nt, Human
ccaauccccuccuuggg

SEQ ID NO: 3825605 - RNA, 13 nt, Human
ccaauccuauguu

SEQ ID NO: 3825606 - RNA, 14 nt, Human
ccaauccuauguuu

SEQ ID NO: 3825607 - RNA, 16 nt, Human
ccaauccucccagaaa

SEQ ID NO: 3825608 - RNA, 17 nt, Human
ccagccuggccaacaug

SEQ ID NO: 3825609 - RNA, 23 nt, Human
ccagccuggccacgcagccagga

SEQ ID NO: 3825610 - RNA, 14 nt, Human
ccagccuggcccag

SEQ ID NO: 3825611 - RNA, 14 nt, Human
ccagccuggccucc

SEQ ID NO: 3825612 - RNA, 21 nt, Human
ccagccuggccuccugccucu

SEQ ID NO: 3825613 - RNA, 23 nt, Human
ccagccuggcucccacaggcagc

SEQ ID NO: 3825614 - RNA, 18 nt, Human
ccagccuggcuucuggag

SEQ ID NO: 3825615 - RNA, 21 nt, Human
ccagccuggcuucuggagccc

SEQ ID NO: 3825616 - RNA, 16 nt, Human
ccagccugggaggcac

SEQ ID NO: 3825617 - RNA, 23 nt, Human
ccagccugggaggcacagcaaac

SEQ ID NO: 3825618 - RNA, 23 nt, Human
ccagccugggcagccaggcugcc

SEQ ID NO: 3825619 - RNA, 14 nt, Human
ccagccugggccca

SEQ ID NO: 3825620 - RNA, 22 nt, Human
ccagccugggcccaucucccug

SEQ ID NO: 3825621 - RNA, 20 nt, Human
ccagccuggggccuggcagg

SEQ ID NO: 3825622 - RNA, 15 nt, Human
ccagccuuccucugc

SEQ ID NO: 3825623 - RNA, 18 nt, Human
ccagccuucuuccauccc

SEQ ID NO: 3825624 - RNA, 20 nt, Human
ccagccuugaccauucucca

SEQ ID NO: 3825625 - RNA, 22 nt, Human
ccagccuugaccauucuccacc

SEQ ID NO: 3825626 - RNA, 19 nt, Human
ccagccuuucucccaggcc

SEQ ID NO: 3825627 - RNA, 19 nt, Human
ccagccuuuggccuuggcu

SEQ ID NO: 3825628 - RNA, 16 nt, Human
ccagcgagcccuggug

SEQ ID NO: 3825629 - RNA, 13 nt, Human
ccagcgagcgccc

SEQ ID NO: 3825630 - RNA, 20 nt, Human
ccagcgagcgcccagcuccu

SEQ ID NO: 3825631 - RNA, 17 nt, Human
ccagcgagggcgugucu

SEQ ID NO: 3825632 - RNA, 18 nt, Human
ccagcgaucucuccacug

SEQ ID NO: 3825633 - RNA, 19 nt, Human
ccagcgaucucuccacugu

SEQ ID NO: 3825634 - RNA, 18 nt, Human
ccagcgauucccucuccc

SEQ ID NO: 3825635 - RNA, 19 nt, Human
ccagcgauucccucuccca

SEQ ID NO: 3825636 - RNA, 21 nt, Human
ccagcgauucccucucccagg

SEQ ID NO: 3825637 - RNA, 22 nt, Human
ccagcgauucccucucccaggc

SEQ ID NO: 3825638 - RNA, 16 nt, Human
ccagcgcccgcugggc

SEQ ID NO: 3825639 - RNA, 18 nt, Human
ccagcgcccgcugggcug

SEQ ID NO: 3825640 - RNA, 18 nt, Human
ccagcgccucccuccacc

SEQ ID NO: 3825641 - RNA, 19 nt, Human
ccagcgccucccuccaccc

SEQ ID NO: 3825642 - RNA, 21 nt, Human
ccagcgcggacauccccugcu

SEQ ID NO: 3825643 - RNA, 15 nt, Human
ccagcgcucugccuc

SEQ ID NO: 3825644 - RNA, 14 nt, Human
ccagcgcugagugg

SEQ ID NO: 3825645 - RNA, 13 nt, Human
ccagcggacacac

SEQ ID NO: 3825646 - RNA, 20 nt, Human
ccacaggcucaggcaggggc

SEQ ID NO: 3825647 - RNA, 18 nt, Human
ccacaggcuuagggacag

SEQ ID NO: 3825648 - RNA, 19 nt, Human
ccacaggcuuagggacagg

SEQ ID NO: 3825649 - RNA, 16 nt, Human
ccacagggaacccugc

SEQ ID NO: 3825650 - RNA, 19 nt, Human
ccacagggcaccugccacc

SEQ ID NO: 3825651 - RNA, 20 nt, Human
ccacagggucccacagccac

SEQ ID NO: 3825652 - RNA, 14 nt, Human
ccacaggucuagac

SEQ ID NO: 3825653 - RNA, 14 nt, Human
ccacaggugugagc

SEQ ID NO: 3825654 - RNA, 16 nt, Human
ccacaguaaguuccua

SEQ ID NO: 3825655 - RNA, 19 nt, Human
ccacaguagaacugucugu

SEQ ID NO: 3825656 - RNA, 20 nt, Human
ccacaguagaacugucugug

SEQ ID NO: 3825657 - RNA, 19 nt, Human
ccacagucucccccacccu

SEQ ID NO: 3825658 - RNA, 23 nt, Human
ccacagugacucgggcuccugug

SEQ ID NO: 3825659 - RNA, 19 nt, Human
ccacagugucaggcacugg

SEQ ID NO: 3825660 - RNA, 23 nt, Human
ccacaguguuggcgagaggaggg

SEQ ID NO: 3825661 - RNA, 22 nt, Human
ccacaguucaguggcagggcuc

SEQ ID NO: 3825662 - RNA, 16 nt, Human
ccacaguugccaccac

SEQ ID NO: 3825663 - RNA, 20 nt, Human
ccacaguugccaccaccucu

SEQ ID NO: 3825664 - RNA, 14 nt, Human
ccacaguugcucua

SEQ ID NO: 3825665 - RNA, 14 nt, Human
ccacaucaaagagg

SEQ ID NO: 3825666 - RNA, 22 nt, Human
ccacaucaauauugucauuccu

SEQ ID NO: 3825667 - RNA, 18 nt, Human
ccacauccaacuccagca

SEQ ID NO: 3825668 - RNA, 20 nt, Human
ccacauccacacacgcagga

SEQ ID NO: 3825669 - RNA, 22 nt, Human
ccacauccacacacgcaggaac

SEQ ID NO: 3825670 - RNA, 23 nt, Human
ccacauccccgcuggcugggggc

SEQ ID NO: 3825671 - RNA, 16 nt, Human
ccacaucccugggccu

SEQ ID NO: 3825672 - RNA, 17 nt, Human
ccacaucccuuugaaac

SEQ ID NO: 3825673 - RNA, 20 nt, Human
ccacauccuccguccagccg

SEQ ID NO: 3825674 - RNA, 22 nt, Human
ccacaucuaagccugaaggggc

SEQ ID NO: 3825675 - RNA, 23 nt, Human
ccacaucuaagccugaaggggcg

SEQ ID NO: 3825676 - RNA, 13 nt, Human
ccacaucugccuu

SEQ ID NO: 3825677 - RNA, 14 nt, Human
ccacaucugccuua

SEQ ID NO: 3825678 - RNA, 23 nt, Human
ccacaucuugaucugcucagccc

SEQ ID NO: 3825679 - RNA, 19 nt, Human
ccacaucuugcucugcuga

SEQ ID NO: 3825680 - RNA, 20 nt, Human
ccacaucuugcucugcugac

SEQ ID NO: 3825681 - RNA, 14 nt, Human
ccacaugaaaccua

SEQ ID NO: 3825682 - RNA, 19 nt, Human
ccacaugagucccaguggg

SEQ ID NO: 3825683 - RNA, 23 nt, Human
ccacaugagucccagugggaggc

SEQ ID NO: 3825684 - RNA, 14 nt, Human
ccacaugccccauc

SEQ ID NO: 3825685 - RNA, 17 nt, Human
ccacaugcggagaacaa

SEQ ID NO: 3825686 - RNA, 17 nt, Human
ccacauggcacagagau

SEQ ID NO: 3825687 - RNA, 18 nt, Human
ccacauggcggagaguuu

SEQ ID NO: 3825688 - RNA, 18 nt, Human
ccacaugggagcagucca

SEQ ID NO: 3825689 - RNA, 20 nt, Human
ccacauguacagacauacau

SEQ ID NO: 3825690 - RNA, 16 nt, Human
ccacauuccugaugcu

SEQ ID NO: 3825691 - RNA, 22 nt, Human
ccacauugggcagcgcccuucc

SEQ ID NO: 3825692 - RNA, 17 nt, Human
ccacauuuagucucuuu

SEQ ID NO: 3825693 - RNA, 20 nt, Human
ccacauuuagucucuuuauu

SEQ ID NO: 3825694 - RNA, 23 nt, Human
ccacauuuagucucuuuauuccu

SEQ ID NO: 3825695 - RNA, 14 nt, Human
ccacauuucuaaaa

SEQ ID NO: 3825696 - RNA, 13 nt, Human
ccacauuuggaau

SEQ ID NO: 3825697 - RNA, 12 nt, Human
ccaccaaagcug

SEQ ID NO: 3825698 - RNA, 14 nt, Human
ccaccaaagcugcc

SEQ ID NO: 3825699 - RNA, 19 nt, Human
ccaccaaagcugcccacug

SEQ ID NO: 3825700 - RNA, 14 nt, Human
ccaccaacauacuc

SEQ ID NO: 3825701 - RNA, 21 nt, Human
ccaccaacauacucccaucug

SEQ ID NO: 3825702 - RNA, 15 nt, Human
ccaccaacaucccau

SEQ ID NO: 3825703 - RNA, 12 nt, Human
ccaccaacccau

SEQ ID NO: 3825704 - RNA, 15 nt, Human
ccaccaacccucaga

SEQ ID NO: 3825705 - RNA, 15 nt, Human
ccaccaacucuugca

SEQ ID NO: 3825706 - RNA, 15 nt, Human
ccaccaacuggcccu

SEQ ID NO: 3825707 - RNA, 14 nt, Human
ccaccaagccuuga

SEQ ID NO: 3825708 - RNA, 11 nt, Human
ccaccaagguc

SEQ ID NO: 3825709 - RNA, 15 nt, Human
ccaccacacauccca

SEQ ID NO: 3825710 - RNA, 20 nt, Human
ccaccacacaucccagccca

SEQ ID NO: 3825711 - RNA, 14 nt, Human
ccaccacacccagc

SEQ ID NO: 3825712 - RNA, 16 nt, Human
ccaccacacccagccc

SEQ ID NO: 3825713 - RNA, 15 nt, Human
ccaccacagccagca

SEQ ID NO: 3825714 - RNA, 17 nt, Human
ccaccaccaauugccaa

SEQ ID NO: 3825715 - RNA, 14 nt, Human
ccaccaccccagcu

SEQ ID NO: 3825716 - RNA, 20 nt, Human
ccaccaccccccacucugug

SEQ ID NO: 3825717 - RNA, 24 nt, Human
ccaccaccccccacucugugccug

SEQ ID NO: 3825718 - RNA, 13 nt, Human
ccaccaccccuac

SEQ ID NO: 3825719 - RNA, 17 nt, Human
ccaccacuaggacucug

SEQ ID NO: 3825720 - RNA, 19 nt, Human
ccaccacuggccaccaggc

SEQ ID NO: 3825721 - RNA, 15 nt, Human
ccaccagaagcccag

SEQ ID NO: 3825722 - RNA, 23 nt, Human
ccaccagacugacaaauguguau

SEQ ID NO: 3825723 - RNA, 16 nt, Human
ccaccagcucugccgu

SEQ ID NO: 3825724 - RNA, 14 nt, Human
ccaccagcuguguc

SEQ ID NO: 3825725 - RNA, 16 nt, Human
ccaccaggaaccucuu

SEQ ID NO: 3825726 - RNA, 13 nt, Human
ccaccaggagaac

SEQ ID NO: 3825727 - RNA, 14 nt, Human
ccaccaggagaacc

SEQ ID NO: 3825728 - RNA, 13 nt, Human
ccaccaggccacc

SEQ ID NO: 3825729 - RNA, 20 nt, Human
ccaccaggcugcucagggcu

SEQ ID NO: 3825730 - RNA, 19 nt, Human
ccaccaggcuggcgcagcc

SEQ ID NO: 3825731 - RNA, 23 nt, Human
ccaccaggcuggcgcagccaagg

SEQ ID NO: 3825732 - RNA, 13 nt, Human
ccaccaggucucc

SEQ ID NO: 3825733 - RNA, 17 nt, Human
ccaccaggucucccggg

SEQ ID NO: 3825734 - RNA, 13 nt, Human
ccaccagugccuc

SEQ ID NO: 3825735 - RNA, 14 nt, Human
ccaccagugccucu

SEQ ID NO: 3825736 - RNA, 15 nt, Human
ccaccagugccucuc

SEQ ID NO: 3825737 - RNA, 20 nt, Human
ccaccagugccucucccugc

SEQ ID NO: 3825738 - RNA, 12 nt, Human
ccaccaguucuc

SEQ ID NO: 3825739 - RNA, 18 nt, Human
ccaccauauucagugcug

SEQ ID NO: 3825740 - RNA, 13 nt, Human
ccaccaucaagcc

SEQ ID NO: 3825741 - RNA, 15 nt, Human
ccaccaucaagccac

SEQ ID NO: 3825742 - RNA, 15 nt, Human
ccaccauccugcagc

SEQ ID NO: 3825743 - RNA, 13 nt, Human
ccaccaucugcug

SEQ ID NO: 3825744 - RNA, 16 nt, Human
ccaccauggccagcua

SEQ ID NO: 3825745 - RNA, 23 nt, Human
ccaccauggcuaaggcaccagcc

SEQ ID NO: 3825746 - RNA, 19 nt, Human
ccaccaugggguccuacca

SEQ ID NO: 3825747 - RNA, 14 nt, Human
ccaccaugucugcc

SEQ ID NO: 3825748 - RNA, 14 nt, Human
ccaccauuccugga

SEQ ID NO: 3825749 - RNA, 15 nt, Human
ccaccauuccuggaa

SEQ ID NO: 3825750 - RNA, 22 nt, Human
ccaccauuuggcaucccugggc

SEQ ID NO: 3825751 - RNA, 16 nt, Human
ccacccaaagcagugg

SEQ ID NO: 3825752 - RNA, 17 nt, Human
ccacccaagcaggaggc

SEQ ID NO: 3825753 - RNA, 14 nt, Human
ccacccaagcuugg

SEQ ID NO: 3825754 - RNA, 15 nt, Human
ccacccaagcuuggc

SEQ ID NO: 3825755 - RNA, 16 nt, Human
ccacccaagcuuggca

SEQ ID NO: 3825756 - RNA, 20 nt, Human
ccacccaagggccuggccug

SEQ ID NO: 3825757 - RNA, 16 nt, Human
ccacccaccucagccu

SEQ ID NO: 3825758 - RNA, 15 nt, Human
ccacccacuucccug

SEQ ID NO: 3825759 - RNA, 17 nt, Human
ccacccagaggcagcag

SEQ ID NO: 3825760 - RNA, 12 nt, Human
ccacccagccca

SEQ ID NO: 3825761 - RNA, 21 nt, Human
ccacccaggagccccgaggcc

SEQ ID NO: 3825762 - RNA, 23 nt, Human
ccacccaggagccccgaggccuu

SEQ ID NO: 3825763 - RNA, 14 nt, Human
ccacccaucgcugu

SEQ ID NO: 3825764 - RNA, 17 nt, Human
ccaccccaagagaacuc

SEQ ID NO: 3825765 - RNA, 17 nt, Human
ccaccccacccccuuca

SEQ ID NO: 3825766 - RNA, 19 nt, Human
ccaccccagaaauggugaa

SEQ ID NO: 3825767 - RNA, 18 nt, Human
ccaccccagcugcucccc

SEQ ID NO: 3825768 - RNA, 18 nt, Human
ccaccccagggcagccag

SEQ ID NO: 3825769 - RNA, 12 nt, Human
ccaccccaugcu

SEQ ID NO: 3825770 - RNA, 13 nt, Human
ccaccccauggcc

SEQ ID NO: 3825771 - RNA, 13 nt, Human
ccagcuuuucaaa

SEQ ID NO: 3825772 - RNA, 16 nt, Human
ccagcuuuuccucccu

SEQ ID NO: 3825773 - RNA, 14 nt, Human
ccaggaaaaagaac

SEQ ID NO: 3825774 - RNA, 19 nt, Human
ccaggaaacuccacaucug

SEQ ID NO: 3825775 - RNA, 21 nt, Human
ccaggaaacuccacaucugcc

SEQ ID NO: 3825776 - RNA, 23 nt, Human
ccaggaaacucugcauucuagua

SEQ ID NO: 3825777 - RNA, 15 nt, Human
ccaggaaacucuugc

SEQ ID NO: 3825778 - RNA, 19 nt, Human
ccaggaaaggauuuuauaa

SEQ ID NO: 3825779 - RNA, 17 nt, Human
ccaggaaaggcuccagg

SEQ ID NO: 3825780 - RNA, 22 nt, Human
ccaggaaaggcuccaggagcag

SEQ ID NO: 3825781 - RNA, 13 nt, Human
ccaggaacaagcu

SEQ ID NO: 3825782 - RNA, 21 nt, Human
ccaggaacaaucgauggccuu

SEQ ID NO: 3825783 - RNA, 22 nt, Human
ccaggaacacccgacuccucaa

SEQ ID NO: 3825784 - RNA, 18 nt, Human
ccaggaacagcaaaugca

SEQ ID NO: 3825785 - RNA, 24 nt, Human
ccaggaaccacaccacaucuaagc

SEQ ID NO: 3825786 - RNA, 14 nt, Human
ccaggaaccuccuc

SEQ ID NO: 3825787 - RNA, 17 nt, Human
ccaggaagaucccccag

SEQ ID NO: 3825788 - RNA, 18 nt, Human
ccaggaagaucccccaga

SEQ ID NO: 3825789 - RNA, 10 nt, Human
ccaggaagcc

SEQ ID NO: 3825790 - RNA, 14 nt, Human
ccaggaagccagca

SEQ ID NO: 3825791 - RNA, 16 nt, Human
ccaguuaauuuuucca

SEQ ID NO: 3825792 - RNA, 13 nt, Human
ccaguucacccug

SEQ ID NO: 3825793 - RNA, 14 nt, Human
ccaguucaggaguc

SEQ ID NO: 3825794 - RNA, 17 nt, Human
ccaguucaguaccugga

SEQ ID NO: 3825795 - RNA, 21 nt, Human
ccaguucaguaccuggaggag

SEQ ID NO: 3825796 - RNA, 23 nt, Human
ccaguucaguaccuggaggagga

SEQ ID NO: 3825797 - RNA, 15 nt, Human
ccaguuccucuuuug

SEQ ID NO: 3825798 - RNA, 23 nt, Human
ccaguuccuuucaaugguuugca

SEQ ID NO: 3825799 - RNA, 19 nt, Human
ccaguucgccuggagcccu

SEQ ID NO: 3825800 - RNA, 15 nt, Human
ccaguucugcuccuc

SEQ ID NO: 3825801 - RNA, 17 nt, Human
ccaguucugcuccucuc

SEQ ID NO: 3825802 - RNA, 20 nt, Human
ccaguucugcuccucuccag

SEQ ID NO: 3825803 - RNA, 21 nt, Human
ccaguucugcuccucuccagg

SEQ ID NO: 3825804 - RNA, 19 nt, Human
ccaguucuucgacuguugu

SEQ ID NO: 3825805 - RNA, 17 nt, Human
ccaguugaauaaaagug

SEQ ID NO: 3825806 - RNA, 18 nt, Human
ccaguugaauaaaagugc

SEQ ID NO: 3825807 - RNA, 20 nt, Human
ccaguugcacuuggccucug

SEQ ID NO: 3825808 - RNA, 17 nt, Human
ccaguugggagcacugg

SEQ ID NO: 3825809 - RNA, 17 nt, Human
ccaguuggguggaugcc

SEQ ID NO: 3825810 - RNA, 20 nt, Human
ccaguuggguggaugccugg

SEQ ID NO: 3825811 - RNA, 13 nt, Human
ccaguuggucccc

SEQ ID NO: 3825812 - RNA, 20 nt, Human
ccaguuggucccccuuccau

SEQ ID NO: 3825813 - RNA, 12 nt, Human
ccaguuguccuc

SEQ ID NO: 3825814 - RNA, 13 nt, Human
ccaguuguccucc

SEQ ID NO: 3825815 - RNA, 15 nt, Human
ccaguuguccuccuu

SEQ ID NO: 3825816 - RNA, 16 nt, Human
ccaguuguccuccuuc

SEQ ID NO: 3825817 - RNA, 10 nt, Human
ccaguugugg

SEQ ID NO: 3825818 - RNA, 17 nt, Human
ccaguuuaaccugaugc

SEQ ID NO: 3825819 - RNA, 21 nt, Human
ccaguuucuaaacuggagacu

SEQ ID NO: 3825820 - RNA, 14 nt, Human
ccaguuucugccuc

SEQ ID NO: 3825821 - RNA, 15 nt, Human
ccaguuucugccucu

SEQ ID NO: 3825822 - RNA, 14 nt, Human
ccaguuugcagaaa

SEQ ID NO: 3825823 - RNA, 16 nt, Human
ccaguuuuguuuggac

SEQ ID NO: 3825824 - RNA, 14 nt, Human
ccaguuuuuauuaa

SEQ ID NO: 3825825 - RNA, 12 nt, Human
ccauaaaacauu

SEQ ID NO: 3825826 - RNA, 20 nt, Human
aaagaugguaucauauauuu

SEQ ID NO: 3825827 - RNA, 23 nt, Human
aaagaugguguggguguccugcc

SEQ ID NO: 3825828 - RNA, 15 nt, Human
aaagauucauuuuua

SEQ ID NO: 3825829 - RNA, 20 nt, Human
aaagauucauuuuuaaucau

SEQ ID NO: 3825830 - RNA, 12 nt, Human
aaagauucuaua

SEQ ID NO: 3825831 - RNA, 18 nt, Human
aaagauucuauaguucua

SEQ ID NO: 3825832 - RNA, 22 nt, Human
aaagauucugaccuuaaaugca

SEQ ID NO: 3825833 - RNA, 17 nt, Human
aaagauucuuuuucuga

SEQ ID NO: 3825834 - RNA, 17 nt, Human
aaagauugcugaaaaag

SEQ ID NO: 3825835 - RNA, 15 nt, Human
aaagauuguauugcu

SEQ ID NO: 3825836 - RNA, 17 nt, Human
aaagauuuaagcacaaa

SEQ ID NO: 3825837 - RNA, 15 nt, Human
aaagauuuucagaaa

SEQ ID NO: 3825838 - RNA, 21 nt, Human
aaagauuuucagaaaauauua

SEQ ID NO: 3825839 - RNA, 13 nt, Human
aaagauuuuuuaa

SEQ ID NO: 3825840 - RNA, 21 nt, Human
aaagauuuuuuaauaauuuag

SEQ ID NO: 3825841 - RNA, 19 nt, Human
aaagauuuuuuuuaaucua

SEQ ID NO: 3825842 - RNA, 16 nt, Human
aaagcaaaaaagaaaa

SEQ ID NO: 3825843 - RNA, 16 nt, Human
aaagcaaaaagugaug

SEQ ID NO: 3825844 - RNA, 13 nt, Human
aaagcaaaaaugc

SEQ ID NO: 3825845 - RNA, 19 nt, Human
aaagcaaaaaugcuaauau

SEQ ID NO: 3825846 - RNA, 14 nt, Human
aaagcaaaacaaaa

SEQ ID NO: 3825847 - RNA, 13 nt, Human
aaagcaaaaggca

SEQ ID NO: 3825848 - RNA, 18 nt, Human
aaagcaaaauaaaaacua

SEQ ID NO: 3825849 - RNA, 23 nt, Human
aaagcaaacuuaagaaacacuga

SEQ ID NO: 3825850 - RNA, 17 nt, Human
aaagcaaagcacagaga

SEQ ID NO: 3825851 - RNA, 13 nt, Human
aaagcaaaggaga

SEQ ID NO: 3825852 - RNA, 15 nt, Human
aaagcaacaaagaaa

SEQ ID NO: 3825853 - RNA, 19 nt, Human
aaagcaacugucuauuucu

SEQ ID NO: 3825854 - RNA, 21 nt, Human
aaagcaacuguuaugaaauaa

SEQ ID NO: 3825855 - RNA, 20 nt, Human
aaagcaagcauucagaagaa

SEQ ID NO: 3825856 - RNA, 22 nt, Human
aaagcaagcauucagaagaaaa

SEQ ID NO: 3825857 - RNA, 22 nt, Human
aaagcaauaauggucccaucca

SEQ ID NO: 3825858 - RNA, 23 nt, Human
aaagcaauaauggucccauccag

SEQ ID NO: 3825859 - RNA, 16 nt, Human
aaagcaauagaaacaa

SEQ ID NO: 3825860 - RNA, 12 nt, Human
aaagcaauauug

SEQ ID NO: 3825861 - RNA, 13 nt, Human
aaagcaaugcauu

SEQ ID NO: 3825862 - RNA, 15 nt, Human
aaagcaauuccaacc

SEQ ID NO: 3825863 - RNA, 15 nt, Human
aaagcaauuuuccuu

SEQ ID NO: 3825864 - RNA, 14 nt, Human
aaagcacaguguua

SEQ ID NO: 3825865 - RNA, 17 nt, Human
aaagcaccaaaauaaga

SEQ ID NO: 3825866 - RNA, 18 nt, Human
aaagcaccaaaauaagaa

SEQ ID NO: 3825867 - RNA, 12 nt, Human
aaagcaccugcc

SEQ ID NO: 3825868 - RNA, 19 nt, Human
aaagcacgaaauguuauuu

SEQ ID NO: 3825869 - RNA, 17 nt, Human
aaagcacgacaguggau

SEQ ID NO: 3825870 - RNA, 22 nt, Human
aaagcacuagagaaugcacaga

SEQ ID NO: 3825871 - RNA, 22 nt, Human
aaagcacuccucccugauguac

SEQ ID NO: 3825872 - RNA, 19 nt, Human
aaagcacuuggacucuugc

SEQ ID NO: 3825873 - RNA, 15 nt, Human
aaagcagagauuuuc

SEQ ID NO: 3825874 - RNA, 23 nt, Human
aaagcagaggcuggccucagacu

SEQ ID NO: 3825875 - RNA, 12 nt, Human
aaagcagccacg

SEQ ID NO: 3825876 - RNA, 18 nt, Human
aaagcagcccuuggccag

SEQ ID NO: 3825877 - RNA, 22 nt, Human
aaagcagcguuucuaugacaca

SEQ ID NO: 3825878 - RNA, 18 nt, Human
aaagcagcucaaaggcac

SEQ ID NO: 3825879 - RNA, 15 nt, Human
aaagcagcucucccc

SEQ ID NO: 3825880 - RNA, 17 nt, Human
aaagcagggaauuucua

SEQ ID NO: 3825881 - RNA, 20 nt, Human
aaagcaggggaguaugcaaa

SEQ ID NO: 3825882 - RNA, 21 nt, Human
aaagcaggggaguaugcaaaa

SEQ ID NO: 3825883 - RNA, 21 nt, Human
aaagcaggggcuacaagaggg

SEQ ID NO: 3825884 - RNA, 15 nt, Human
aaagcagguucuugu

SEQ ID NO: 3825885 - RNA, 16 nt, Human
aaagcagguucuuguu

SEQ ID NO: 3825886 - RNA, 21 nt, Human
aaagcagguugauaaaucauu

SEQ ID NO: 3825887 - RNA, 17 nt, Human
aaagcaguaacugacaa

SEQ ID NO: 3825888 - RNA, 16 nt, Human
aaagcaguauuuuucu

SEQ ID NO: 3825889 - RNA, 16 nt, Human
aaagcagugcaugcug

SEQ ID NO: 3825890 - RNA, 17 nt, Human
aaagcagugcaugcugu

SEQ ID NO: 3825891 - RNA, 16 nt, Human
aaagcauaaaaacauu

SEQ ID NO: 3825892 - RNA, 22 nt, Human
aaagcauaaagcucaaaugaaa

SEQ ID NO: 3825893 - RNA, 17 nt, Human
aaagcauacaugcaaaa

SEQ ID NO: 3825894 - RNA, 15 nt, Human
aaagcaucccucacc

SEQ ID NO: 3825895 - RNA, 13 nt, Human
aaagcaugaaugg

SEQ ID NO: 3825896 - RNA, 14 nt, Human
aaagcaugaauggu

SEQ ID NO: 3825897 - RNA, 17 nt, Human
aaagcaugccaauuucu

SEQ ID NO: 3825898 - RNA, 12 nt, Human
aaagcauguaca

SEQ ID NO: 3825899 - RNA, 16 nt, Human
aaagcauguuuugcau

SEQ ID NO: 3825900 - RNA, 22 nt, Human
aaagcauuaauuuuuuuucauu

SEQ ID NO: 3825901 - RNA, 18 nt, Human
aaagcauuccaacaaagg

SEQ ID NO: 3825902 - RNA, 14 nt, Human
aaagcauugcuguu

SEQ ID NO: 3825903 - RNA, 17 nt, Human
aaagcauugcuuuuauu

SEQ ID NO: 3825904 - RNA, 21 nt, Human
aaagcauugcuuuuauuuuga

SEQ ID NO: 3825905 - RNA, 23 nt, Human
aaagcauuuaaccccccuguaca

SEQ ID NO: 3825906 - RNA, 15 nt, Human
aaagcauuugaaugc

SEQ ID NO: 3825907 - RNA, 23 nt, Human
aaagcauuugaaugcauuuuguu

SEQ ID NO: 3825908 - RNA, 21 nt, Human
aaagcauuuuguaauaauaaa

SEQ ID NO: 3825909 - RNA, 13 nt, Human
aaagcauuuuuca

SEQ ID NO: 3825910 - RNA, 15 nt, Human
aaagccaaacauaua

SEQ ID NO: 3825911 - RNA, 15 nt, Human
aaagccaaagcuagg

SEQ ID NO: 3825912 - RNA, 20 nt, Human
aaagccaaaucaaaauaugu

SEQ ID NO: 3825913 - RNA, 23 nt, Human
aaagccaaggagucacugagacc

SEQ ID NO: 3825914 - RNA, 12 nt, Human
aaagccacccca

SEQ ID NO: 3825915 - RNA, 18 nt, Human
aaagccacguuccuuacu

SEQ ID NO: 3825916 - RNA, 19 nt, Human
aaagccagcugccgaccag

SEQ ID NO: 3825917 - RNA, 19 nt, Human
aaagccagggucucucccu

SEQ ID NO: 3825918 - RNA, 22 nt, Human
aaagccagggucucucccucag

SEQ ID NO: 3825919 - RNA, 13 nt, Human
aaagccagucuua

SEQ ID NO: 3825920 - RNA, 16 nt, Human
aaagccagugacucca

SEQ ID NO: 3825921 - RNA, 17 nt, Human
aaagccagugacuccag

SEQ ID NO: 3825922 - RNA, 16 nt, Human
aaagccaucauguaaa

SEQ ID NO: 3825923 - RNA, 14 nt, Human
aaagccauguuuaa

SEQ ID NO: 3825924 - RNA, 18 nt, Human
aaagccauguuuaagauu

SEQ ID NO: 3825925 - RNA, 17 nt, Human
aaagccauguuuauuac

SEQ ID NO: 3825926 - RNA, 17 nt, Human
aaagccauucugauuau

SEQ ID NO: 3825927 - RNA, 18 nt, Human
aaagcccaaagugguaua

SEQ ID NO: 3825928 - RNA, 15 nt, Human
aaagcccaaccucuu

SEQ ID NO: 3825929 - RNA, 20 nt, Human
aaagcccaaccucuuccucc

SEQ ID NO: 3825930 - RNA, 22 nt, Human
aaagcccaaccucuuccuccug

SEQ ID NO: 3825931 - RNA, 13 nt, Human
aaagcccaggagc

SEQ ID NO: 3825932 - RNA, 15 nt, Human
aaagccccaugcugg

SEQ ID NO: 3825933 - RNA, 18 nt, Human
aaagccccaugcuggagc

SEQ ID NO: 3825934 - RNA, 20 nt, Human
aaagccccaugcuggagccu

SEQ ID NO: 3825935 - RNA, 21 nt, Human
aaagcccccagagcccaggcu

SEQ ID NO: 3825936 - RNA, 16 nt, Human
cagaagaauauucagg

SEQ ID NO: 3825937 - RNA, 19 nt, Human
cagaagaauauucaggacu

SEQ ID NO: 3825938 - RNA, 19 nt, Human
cagaagacacugcaaaggc

SEQ ID NO: 3825939 - RNA, 20 nt, Human
cagaagaguugugcacgcag

SEQ ID NO: 3825940 - RNA, 18 nt, Human
cagaagaugaacagacug

SEQ ID NO: 3825941 - RNA, 20 nt, Human
cagaagcaacccaaauguuc

SEQ ID NO: 3825942 - RNA, 22 nt, Human
cagaagcaagggggugauguag

SEQ ID NO: 3825943 - RNA, 14 nt, Human
cagaagcagcucuu

SEQ ID NO: 3825944 - RNA, 15 nt, Human
cagaagcauuuguau

SEQ ID NO: 3825945 - RNA, 23 nt, Human
cagaagccaaucuacaaucucuu

SEQ ID NO: 3825946 - RNA, 16 nt, Human
cagaagccaggagcaa

SEQ ID NO: 3825947 - RNA, 17 nt, Human
cagaagccaggagcaaa

SEQ ID NO: 3825948 - RNA, 15 nt, Human
cagaagccucuggcu

SEQ ID NO: 3825949 - RNA, 16 nt, Human
cagaagccucuggguc

SEQ ID NO: 3825950 - RNA, 15 nt, Human
cagaagccugaggcu

SEQ ID NO: 3825951 - RNA, 12 nt, Human
cagaagccuggg

SEQ ID NO: 3825952 - RNA, 20 nt, Human
cagaagccugggggccuggc

SEQ ID NO: 3825953 - RNA, 21 nt, Human
cagaagccugggggccuggcu

SEQ ID NO: 3825954 - RNA, 24 nt, Human
cagaagccugggggccuggcuggc

SEQ ID NO: 3825955 - RNA, 17 nt, Human
cagaagcucccccagca

SEQ ID NO: 3825956 - RNA, 16 nt, Human
cagaagcuucugccca

SEQ ID NO: 3825957 - RNA, 17 nt, Human
cagaaggaaaaaugugu

SEQ ID NO: 3825958 - RNA, 20 nt, Human
cagaaggaaaaauguguaau

SEQ ID NO: 3825959 - RNA, 16 nt, Human
cagaaggaagacuuca

SEQ ID NO: 3825960 - RNA, 17 nt, Human
cagaaggaagacuucau

SEQ ID NO: 3825961 - RNA, 20 nt, Human
cagaaggaaggcagggagga

SEQ ID NO: 3825962 - RNA, 21 nt, Human
cagaaggaagggcauccuucu

SEQ ID NO: 3825963 - RNA, 14 nt, Human
cagaaggagaagga

SEQ ID NO: 3825964 - RNA, 18 nt, Human
cagaaggagaaggaagga

SEQ ID NO: 3825965 - RNA, 22 nt, Human
cagaaggagacaggcagagcug

SEQ ID NO: 3825966 - RNA, 14 nt, Human
cagaaggaggagga

SEQ ID NO: 3825967 - RNA, 20 nt, Human
cagaaggauuuuuuaaaguu

SEQ ID NO: 3825968 - RNA, 18 nt, Human
cagaaggcaaacccauca

SEQ ID NO: 3825969 - RNA, 18 nt, Human
cagaaggcaaaugacuuu

SEQ ID NO: 3825970 - RNA, 23 nt, Human
cagaaggcauaucagucucugag

SEQ ID NO: 3825971 - RNA, 14 nt, Human
cagaaggccaagaa

SEQ ID NO: 3825972 - RNA, 18 nt, Human
cagaaggccaagaaucaa

SEQ ID NO: 3825973 - RNA, 19 nt, Human
cagaaggcuccugccccca

SEQ ID NO: 3825974 - RNA, 17 nt, Human
cagaaggcucuucugac

SEQ ID NO: 3825975 - RNA, 13 nt, Human
cagaagggaaaca

SEQ ID NO: 3825976 - RNA, 14 nt, Human
cagaagggaaacag

SEQ ID NO: 3825977 - RNA, 19 nt, Human
cagaagggacuucacgaag

SEQ ID NO: 3825978 - RNA, 12 nt, Human
cagaagggagca

SEQ ID NO: 3825979 - RNA, 20 nt, Human
cagaagggagcuagccagag

SEQ ID NO: 3825980 - RNA, 21 nt, Human
cagaagggagcuggcuccagc

SEQ ID NO: 3825981 - RNA, 15 nt, Human
cagaagggaggcugg

SEQ ID NO: 3825982 - RNA, 15 nt, Human
cagaagggagggcag

SEQ ID NO: 3825983 - RNA, 22 nt, Human
cagaagggagggcagagcuggu

SEQ ID NO: 3825984 - RNA, 17 nt, Human
cagaaggggacugccac

SEQ ID NO: 3825985 - RNA, 21 nt, Human
cagaaggggacugccaccucc

SEQ ID NO: 3825986 - RNA, 23 nt, Human
cagaaggggacugccaccucccc

SEQ ID NO: 3825987 - RNA, 15 nt, Human
cagaaggggagggga

SEQ ID NO: 3825988 - RNA, 16 nt, Human
cagaagggggccauga

SEQ ID NO: 3825989 - RNA, 21 nt, Human
cagaaggggguggugucucca

SEQ ID NO: 3825990 - RNA, 14 nt, Human
ccaucucaggccag

SEQ ID NO: 3825991 - RNA, 18 nt, Human
ccaucuccaagaaugcug

SEQ ID NO: 3825992 - RNA, 18 nt, Human
ccaucuccacccccagcu

SEQ ID NO: 3825993 - RNA, 15 nt, Human
ccaucucccacccug

SEQ ID NO: 3825994 - RNA, 16 nt, Human
ccaucucccacccugu

SEQ ID NO: 3825995 - RNA, 15 nt, Human
ccaucuccccucagc

SEQ ID NO: 3825996 - RNA, 16 nt, Human
ccaucuccccucagcu

SEQ ID NO: 3825997 - RNA, 14 nt, Human
ccaucucccugccu

SEQ ID NO: 3825998 - RNA, 12 nt, Human
ccaucucccugg

SEQ ID NO: 3825999 - RNA, 16 nt, Human
ccaucucccuggugcu

SEQ ID NO: 3826000 - RNA, 17 nt, Human
ccaucucccuggugcuu

SEQ ID NO: 3826001 - RNA, 19 nt, Human
ccaucucccuggugcuuau

SEQ ID NO: 3826002 - RNA, 20 nt, Human
ccaucucccuggugcuuaug

SEQ ID NO: 3826003 - RNA, 23 nt, Human
ccaucuccuauaaucugucaaaa

SEQ ID NO: 3826004 - RNA, 16 nt, Human
ccaucuccuugucuuu

SEQ ID NO: 3826005 - RNA, 16 nt, Human
ccaucuccuuucaggg

SEQ ID NO: 3826006 - RNA, 18 nt, Human
ccaucucugauuuucaaa

SEQ ID NO: 3826007 - RNA, 23 nt, Human
ccaucucugauuuucaaagcuuu

SEQ ID NO: 3826008 - RNA, 14 nt, Human
ccaucucugcucca

SEQ ID NO: 3826009 - RNA, 18 nt, Human
ccaucucuggaugccuga

SEQ ID NO: 3826010 - RNA, 17 nt, Human
ccaucugaaagugguac

SEQ ID NO: 3826011 - RNA, 12 nt, Human
ccaucugcaccc

SEQ ID NO: 3826012 - RNA, 20 nt, Human
ccaucugcaccccccugggc

SEQ ID NO: 3826013 - RNA, 14 nt, Human
ccaucugcaccccu

SEQ ID NO: 3826014 - RNA, 22 nt, Human
ccaucugcaccccuucucuccu

SEQ ID NO: 3826015 - RNA, 15 nt, Human
ccaucugcccaggac

SEQ ID NO: 3826016 - RNA, 16 nt, Human
ccaucugcccaggacg

SEQ ID NO: 3826017 - RNA, 17 nt, Human
ccaucugcccaggggug

SEQ ID NO: 3826018 - RNA, 16 nt, Human
ccaucugccccacagu

SEQ ID NO: 3826019 - RNA, 20 nt, Human
ccaucugcccgccugcccac

SEQ ID NO: 3826020 - RNA, 23 nt, Human
ccaucugcccgccugcccaccug

SEQ ID NO: 3826021 - RNA, 20 nt, Human
ccaucugcgugacaauaaaa

SEQ ID NO: 3826022 - RNA, 23 nt, Human
ccaucugcgugacaauaaaacau

SEQ ID NO: 3826023 - RNA, 14 nt, Human
ccaucugcuccugg

SEQ ID NO: 3826024 - RNA, 12 nt, Human
ccaucuggagag

SEQ ID NO: 3826025 - RNA, 16 nt, Human
ccaucuggcagggugg

SEQ ID NO: 3826026 - RNA, 13 nt, Human
ccaucuggccugg

SEQ ID NO: 3826027 - RNA, 18 nt, Human
ccaucuggccuggccugg

SEQ ID NO: 3826028 - RNA, 22 nt, Human
ccaucugggcuccuaaccuucc

SEQ ID NO: 3826029 - RNA, 22 nt, Human
ccaucuggguccuugcaccccu

SEQ ID NO: 3826030 - RNA, 16 nt, Human
ccaucuggucauuugg

SEQ ID NO: 3826031 - RNA, 16 nt, Human
ccaucugguuuucucu

SEQ ID NO: 3826032 - RNA, 16 nt, Human
ccaucuguacuugguc

SEQ ID NO: 3826033 - RNA, 14 nt, Human
ccaucugucccugc

SEQ ID NO: 3826034 - RNA, 15 nt, Human
ccaucugucugccaa

SEQ ID NO: 3826035 - RNA, 13 nt, Human
ccaucugugcauu

SEQ ID NO: 3826036 - RNA, 14 nt, Human
ccaucugugcauuc

SEQ ID NO: 3826037 - RNA, 13 nt, Human
ccaucuucccagc

SEQ ID NO: 3826038 - RNA, 18 nt, Human
ccaucuucgggaccagga

SEQ ID NO: 3826039 - RNA, 20 nt, Human
ccaucuucgggaccaggauu

SEQ ID NO: 3826040 - RNA, 21 nt, Human
ccaucuugcccgcucaggcug

SEQ ID NO: 3826041 - RNA, 20 nt, Human
ccaucuugcuucccuaaucu

SEQ ID NO: 3826042 - RNA, 13 nt, Human
ccaucuugguaaa

SEQ ID NO: 3826043 - RNA, 17 nt, Human
ccaucuugguaaauuuc

SEQ ID NO: 3826044 - RNA, 17 nt, Human
ccaucuuuacucccaag

SEQ ID NO: 3826045 - RNA, 14 nt, Human
ccaucuuucuuugg

SEQ ID NO: 3826046 - RNA, 10 nt, Human
ccaugaaaga

SEQ ID NO: 3826047 - RNA, 22 nt, Human
ccaugaacacacuguguccugg

SEQ ID NO: 3826048 - RNA, 16 nt, Human
ccaugaacagaaaaca

SEQ ID NO: 3826049 - RNA, 15 nt, Human
ccaugaaccaagacc

SEQ ID NO: 3826050 - RNA, 18 nt, Human
ccaugaacuggaggccag

SEQ ID NO: 3826051 - RNA, 13 nt, Human
ccaugaagacagg

SEQ ID NO: 3826052 - RNA, 15 nt, Human
ccaugaagacaggau

SEQ ID NO: 3826053 - RNA, 14 nt, Human
ccaugaagauguag

SEQ ID NO: 3826054 - RNA, 19 nt, Human
ccaugaagccacagcccag

SEQ ID NO: 3826055 - RNA, 12 nt, Human
ccaugaagccuu

SEQ ID NO: 3826056 - RNA, 14 nt, Human
ccaugaagccuuuu

SEQ ID NO: 3826057 - RNA, 16 nt, Human
ccaugaagccuuuuga

SEQ ID NO: 3826058 - RNA, 18 nt, Human
ccaugaagggacccuuug

SEQ ID NO: 3826059 - RNA, 16 nt, Human
ccaugaaucaaagaca

SEQ ID NO: 3826060 - RNA, 17 nt, Human
ccaugaaucaaagacau

SEQ ID NO: 3826061 - RNA, 19 nt, Human
ccaugaauguaucaggaaa

SEQ ID NO: 3826062 - RNA, 20 nt, Human
ccaugacaggccugaagaua

SEQ ID NO: 3826063 - RNA, 23 nt, Human
ccaugaccagaagggaaacaguc

SEQ ID NO: 3826064 - RNA, 14 nt, Human
ccaugaccauacug

SEQ ID NO: 3826065 - RNA, 19 nt, Human
ccaugacccaccccugugc

SEQ ID NO: 3826066 - RNA, 14 nt, Human
ccaugacccaggcu

SEQ ID NO: 3826067 - RNA, 17 nt, Human
ccaugacccaggcuggg

SEQ ID NO: 3826068 - RNA, 15 nt, Human
ccaugacccugccuc

SEQ ID NO: 3826069 - RNA, 16 nt, Human
ccaugacccugccucu

SEQ ID NO: 3826070 - RNA, 19 nt, Human
ccaugacccugccucuccc

SEQ ID NO: 3826071 - RNA, 22 nt, Human
ccaugaccuccagcuuuccugu

SEQ ID NO: 3826072 - RNA, 17 nt, Human
ccaugacugcauuuuac

SEQ ID NO: 3826073 - RNA, 15 nt, Human
ccaugagacccuggu

SEQ ID NO: 3826074 - RNA, 23 nt, Human
ccaugagacccuggugccuggcu

SEQ ID NO: 3826075 - RNA, 15 nt, Human
ccaugagagcgcagc

SEQ ID NO: 3826076 - RNA, 21 nt, Human
ccaugagccucagcauccugg

SEQ ID NO: 3826077 - RNA, 13 nt, Human
ccaugagcuccag

SEQ ID NO: 3826078 - RNA, 12 nt, Human
ccaugagcuccu

SEQ ID NO: 3826079 - RNA, 17 nt, Human
ccaugaggaaggaacag

SEQ ID NO: 3826080 - RNA, 19 nt, Human
ccaugagggagaugccaug

SEQ ID NO: 3826081 - RNA, 16 nt, Human
ccaugugagcugcugc

SEQ ID NO: 3826082 - RNA, 15 nt, Human
ccaugugccucuuug

SEQ ID NO: 3826083 - RNA, 16 nt, Human
ccaugugccucuuugu

SEQ ID NO: 3826084 - RNA, 24 nt, Human
ccauguggaaggcaagccaggcuc

SEQ ID NO: 3826085 - RNA, 17 nt, Human
ccauguggugaugaugu

SEQ ID NO: 3826086 - RNA, 19 nt, Human
ccaugugucacuugugcuu

SEQ ID NO: 3826087 - RNA, 14 nt, Human
ccauguguccuggu

SEQ ID NO: 3826088 - RNA, 19 nt, Human
ccaugugugugcaagugug

SEQ ID NO: 3826089 - RNA, 23 nt, Human
ccauguucuauuucagugccaau

SEQ ID NO: 3826090 - RNA, 16 nt, Human
ccauguucugccccca

SEQ ID NO: 3826091 - RNA, 15 nt, Human
ccauguucugucccu

SEQ ID NO: 3826092 - RNA, 13 nt, Human
ccauguugccccu

SEQ ID NO: 3826093 - RNA, 13 nt, Human
ccauguuggccag

SEQ ID NO: 3826094 - RNA, 15 nt, Human
ccauguuggccaggc

SEQ ID NO: 3826095 - RNA, 18 nt, Human
ccauguuggccaggcugg

SEQ ID NO: 3826096 - RNA, 23 nt, Human
ccauguuggccaggcuggucuca

SEQ ID NO: 3826097 - RNA, 22 nt, Human
ccauguugguugcacuuuguag

SEQ ID NO: 3826098 - RNA, 18 nt, Human
ccauguuguaaugcugca

SEQ ID NO: 3826099 - RNA, 22 nt, Human
ccauguuguaaugcugcacuuc

SEQ ID NO: 3826100 - RNA, 22 nt, Human
ccauguugugccucccugguga

SEQ ID NO: 3826101 - RNA, 14 nt, Human
ccauguuuaagauu

SEQ ID NO: 3826102 - RNA, 17 nt, Human
ccauguuuaagauuuaa

SEQ ID NO: 3826103 - RNA, 14 nt, Human
ccauguuucucugg

SEQ ID NO: 3826104 - RNA, 16 nt, Human
ccauguuugagcucag

SEQ ID NO: 3826105 - RNA, 17 nt, Human
ccauguuugagcucaga

SEQ ID NO: 3826106 - RNA, 13 nt, Human
ccauguuuguaaa

SEQ ID NO: 3826107 - RNA, 18 nt, Human
ccauguuuuguuuacggu

SEQ ID NO: 3826108 - RNA, 15 nt, Human
ccauuaaaacugaag

SEQ ID NO: 3826109 - RNA, 21 nt, Human
ccauuaaaacugaagucugaa

SEQ ID NO: 3826110 - RNA, 23 nt, Human
ccauuaaaacugaagucugaaau

SEQ ID NO: 3826111 - RNA, 16 nt, Human
ccauuaaaacugcuuu

SEQ ID NO: 3826112 - RNA, 18 nt, Human
ccauuaaaauaugcacua

SEQ ID NO: 3826113 - RNA, 12 nt, Human
ccauuaaagaau

SEQ ID NO: 3826114 - RNA, 14 nt, Human
ccauuaaagaauau

SEQ ID NO: 3826115 - RNA, 18 nt, Human
ccauuaaagaauaugaaa

SEQ ID NO: 3826116 - RNA, 15 nt, Human
ccauuaaaguucuca

SEQ ID NO: 3826117 - RNA, 19 nt, Human
ccauuaaaugaauauuuug

SEQ ID NO: 3826118 - RNA, 20 nt, Human
ccauuaaggggaagaaugaa

SEQ ID NO: 3826119 - RNA, 20 nt, Human
ccauuaaguaaacaauaaaa

SEQ ID NO: 3826120 - RNA, 14 nt, Human
ccauuaccaaaaua

SEQ ID NO: 3826121 - RNA, 17 nt, Human
ccauuagccagauuugu

SEQ ID NO: 3826122 - RNA, 19 nt, Human
ccauuagcuuucaauuccg

SEQ ID NO: 3826123 - RNA, 13 nt, Human
ccauuaggccagc

SEQ ID NO: 3826124 - RNA, 14 nt, Human
ccauuaggccagca

SEQ ID NO: 3826125 - RNA, 20 nt, Human
ccauuaggccagcaacgcuu

SEQ ID NO: 3826126 - RNA, 14 nt, Human
ccauuaucaugugu

SEQ ID NO: 3826127 - RNA, 21 nt, Human
ccauuaucccugaaucccccu

SEQ ID NO: 3826128 - RNA, 11 nt, Human
ccauuauucaa

SEQ ID NO: 3826129 - RNA, 17 nt, Human
ccauuauucaaaguugc

SEQ ID NO: 3826130 - RNA, 14 nt, Human
ccauuauuuucugu

SEQ ID NO: 3826131 - RNA, 17 nt, Human
ccauuauuuucugucag

SEQ ID NO: 3826132 - RNA, 18 nt, Human
ccauuauuuuuaggaugu

SEQ ID NO: 3826133 - RNA, 17 nt, Human
ccauucacucuuccaga

SEQ ID NO: 3826134 - RNA, 15 nt, Human
ccauucaggaaccug

SEQ ID NO: 3826135 - RNA, 17 nt, Human
ccauucaggaaccugga

SEQ ID NO: 3826136 - RNA, 21 nt, Human
ccauucaggaaccuggaccaa

SEQ ID NO: 3826137 - RNA, 20 nt, Human
ccauucagugauuacuguca

SEQ ID NO: 3826138 - RNA, 15 nt, Human
ccauuccaaaauauu

SEQ ID NO: 3826139 - RNA, 21 nt, Human
ccauuccaaaauauuaugccc

SEQ ID NO: 3826140 - RNA, 20 nt, Human
ccauuccaggcagccucugu

SEQ ID NO: 3826141 - RNA, 21 nt, Human
ccauuccaggcagccucuguc

SEQ ID NO: 3826142 - RNA, 17 nt, Human
ccauuccauuuaucuuu

SEQ ID NO: 3826143 - RNA, 16 nt, Human
ccauuccccagccucu

SEQ ID NO: 3826144 - RNA, 18 nt, Human
ccauuccccagccucucu

SEQ ID NO: 3826145 - RNA, 12 nt, Human
ccauucccuggg

SEQ ID NO: 3826146 - RNA, 16 nt, Human
ccauuccugaagaacc

SEQ ID NO: 3826147 - RNA, 16 nt, Human
ccauuccuggagcccg

SEQ ID NO: 3826148 - RNA, 17 nt, Human
ccauuccugguacccag

SEQ ID NO: 3826149 - RNA, 13 nt, Human
ccauuccuuccca

SEQ ID NO: 3826150 - RNA, 15 nt, Human
ccauucgugaaaaca

SEQ ID NO: 3826151 - RNA, 14 nt, Human
ccauucuacacaga

SEQ ID NO: 3826152 - RNA, 21 nt, Human
ccagcagucaauuaacaauaa

SEQ ID NO: 3826153 - RNA, 19 nt, Human
ccagcaguucagagcugcc

SEQ ID NO: 3826154 - RNA, 22 nt, Human
ccagcaguugaaugacaacaga

SEQ ID NO: 3826155 - RNA, 23 nt, Human
ccagcauaauacuugcuuuggaa

SEQ ID NO: 3826156 - RNA, 14 nt, Human
ccagcaucaccugc

SEQ ID NO: 3826157 - RNA, 14 nt, Human
ccagcaucacuccc

SEQ ID NO: 3826158 - RNA, 21 nt, Human
ccagcaucccuugaccaggcc

SEQ ID NO: 3826159 - RNA, 18 nt, Human
ccagcaucgcacucuggc

SEQ ID NO: 3826160 - RNA, 14 nt, Human
ccagcaucugggcc

SEQ ID NO: 3826161 - RNA, 16 nt, Human
ccagcauuccagcccc

SEQ ID NO: 3826162 - RNA, 18 nt, Human
ccagcauuccagccccuc

SEQ ID NO: 3826163 - RNA, 19 nt, Human
ccagcauuccagccccucu

SEQ ID NO: 3826164 - RNA, 17 nt, Human
ccagcauucccagguag

SEQ ID NO: 3826165 - RNA, 21 nt, Human
ccagcauucccagguaggcca

SEQ ID NO: 3826166 - RNA, 14 nt, Human
ccagcauucucagg

SEQ ID NO: 3826167 - RNA, 20 nt, Human
ccagcauucucaggcaccag

SEQ ID NO: 3826168 - RNA, 19 nt, Human
ccagcauuuagcuggccac

SEQ ID NO: 3826169 - RNA, 16 nt, Human
ccagcauuucccuucc

SEQ ID NO: 3826170 - RNA, 14 nt, Human
ccagcauuugggua

SEQ ID NO: 3826171 - RNA, 16 nt, Human
ccagccaaacacacag

SEQ ID NO: 3826172 - RNA, 21 nt, Human
ccagccaaacacacagaaggg

SEQ ID NO: 3826173 - RNA, 19 nt, Human
ccagccaaccccuguggag

SEQ ID NO: 3826174 - RNA, 22 nt, Human
ccagccaccccgggcucucugc

SEQ ID NO: 3826175 - RNA, 16 nt, Human
ccagccacuccccagc

SEQ ID NO: 3826176 - RNA, 22 nt, Human
ccagccacuccccagccagccu

SEQ ID NO: 3826177 - RNA, 15 nt, Human
ccagccacucuacca

SEQ ID NO: 3826178 - RNA, 22 nt, Human
ccagccagaacguggcucugcu

SEQ ID NO: 3826179 - RNA, 20 nt, Human
ccagccagaggcaucugagg

SEQ ID NO: 3826180 - RNA, 16 nt, Human
ccagccagcagcagcc

SEQ ID NO: 3826181 - RNA, 19 nt, Human
ccagccagcagcagcccaa

SEQ ID NO: 3826182 - RNA, 19 nt, Human
ccagccagcagccagcucu

SEQ ID NO: 3826183 - RNA, 11 nt, Human
ccagccagcca

SEQ ID NO: 3826184 - RNA, 21 nt, Human
ccagccaggcagguccacaga

SEQ ID NO: 3826185 - RNA, 14 nt, Human
ccagccaggcccag

SEQ ID NO: 3826186 - RNA, 16 nt, Human
ccagccaggcccagcc

SEQ ID NO: 3826187 - RNA, 14 nt, Human
ccagccaggcucug

SEQ ID NO: 3826188 - RNA, 15 nt, Human
ccagccaggcucugu

SEQ ID NO: 3826189 - RNA, 15 nt, Human
ccagccagggcugcu

SEQ ID NO: 3826190 - RNA, 18 nt, Human
ccagccaucaaaaugcuu

SEQ ID NO: 3826191 - RNA, 18 nt, Human
ccagccaucaagagacug

SEQ ID NO: 3826192 - RNA, 15 nt, Human
ccagccaucugccca

SEQ ID NO: 3826193 - RNA, 17 nt, Human
ccagccaucugcccagg

SEQ ID NO: 3826194 - RNA, 14 nt, Human
ccagccaugccagc

SEQ ID NO: 3826195 - RNA, 17 nt, Human
ccagccaugucugcauu

SEQ ID NO: 3826196 - RNA, 18 nt, Human
ccagccaugucugcauuu

SEQ ID NO: 3826197 - RNA, 21 nt, Human
ccagccauuaccauggagaca

SEQ ID NO: 3826198 - RNA, 12 nt, Human
ccagcccaaagg

SEQ ID NO: 3826199 - RNA, 13 nt, Human
ccagcccaagucc

SEQ ID NO: 3826200 - RNA, 14 nt, Human
ccagcccaagucca

SEQ ID NO: 3826201 - RNA, 12 nt, Human
ccagcccaaucc

SEQ ID NO: 3826202 - RNA, 12 nt, Human
ccagcccacauu

SEQ ID NO: 3826203 - RNA, 18 nt, Human
ccagcccaccccauggcc

SEQ ID NO: 3826204 - RNA, 13 nt, Human
ccagcccaccccc

SEQ ID NO: 3826205 - RNA, 18 nt, Human
ccagcccacccccggcag

SEQ ID NO: 3826206 - RNA, 21 nt, Human
ccagcccacccccggcagcag

SEQ ID NO: 3826207 - RNA, 13 nt, Human
ccagcccacccuc

SEQ ID NO: 3826208 - RNA, 13 nt, Human
ccagcccagagac

SEQ ID NO: 3826209 - RNA, 22 nt, Human
ccagcccagagacauacuugaa

SEQ ID NO: 3826210 - RNA, 23 nt, Human
ccagcccagagacauacuugaag

SEQ ID NO: 3826211 - RNA, 13 nt, Human
ccagcccagaggc

SEQ ID NO: 3826212 - RNA, 17 nt, Human
ccagcccagauugucuu

SEQ ID NO: 3826213 - RNA, 18 nt, Human
ccagcccagcccagcugg

SEQ ID NO: 3826214 - RNA, 16 nt, Human
ccagcccagcugcucu

SEQ ID NO: 3826215 - RNA, 13 nt, Human
ccagcccagggcu

SEQ ID NO: 3826216 - RNA, 21 nt, Human
ccagcccagggcuccugcacu

SEQ ID NO: 3826217 - RNA, 12 nt, Human
ccagcccagggu

SEQ ID NO: 3826218 - RNA, 22 nt, Human
ccagcccauccauuaggccagc

SEQ ID NO: 3826219 - RNA, 20 nt, Human
ccagcccaucucggagcauc

SEQ ID NO: 3826220 - RNA, 18 nt, Human
ccagcccaucuugccucc

SEQ ID NO: 3826221 - RNA, 17 nt, Human
ccagcccauucucucuc

SEQ ID NO: 3826222 - RNA, 17 nt, Human
ccagcccauuugggcag

SEQ ID NO: 3826223 - RNA, 22 nt, Human
ccagcccauuugggcagagagg

SEQ ID NO: 3826224 - RNA, 19 nt, Human
ccagccccaaaacucuccu

SEQ ID NO: 3826225 - RNA, 15 nt, Human
ccagccccacacagc

SEQ ID NO: 3826226 - RNA, 20 nt, Human
ccaggcuguaucccaugagc

SEQ ID NO: 3826227 - RNA, 15 nt, Human
ccaggcugugcagcg

SEQ ID NO: 3826228 - RNA, 21 nt, Human
ccaggcuuagucacugagaca

SEQ ID NO: 3826229 - RNA, 18 nt, Human
ccaggcuucugcuggggc

SEQ ID NO: 3826230 - RNA, 17 nt, Human
ccaggcuugccugcagg

SEQ ID NO: 3826231 - RNA, 18 nt, Human
ccaggcuugccugcaggc

SEQ ID NO: 3826232 - RNA, 14 nt, Human
ccagggaagcagca

SEQ ID NO: 3826233 - RNA, 18 nt, Human
ccagggaagcagcagccu

SEQ ID NO: 3826234 - RNA, 18 nt, Human
ccagggaagugcucugau

SEQ ID NO: 3826235 - RNA, 21 nt, Human
ccagggacacacagccuagca

SEQ ID NO: 3826236 - RNA, 21 nt, Human
ccagggacaccagccaggcuc

SEQ ID NO: 3826237 - RNA, 23 nt, Human
ccagggacaccagccaggcucug

SEQ ID NO: 3826238 - RNA, 22 nt, Human
ccagggacagaggccccagccu

SEQ ID NO: 3826239 - RNA, 14 nt, Human
ccagggacagaggg

SEQ ID NO: 3826240 - RNA, 23 nt, Human
ccagggacagaggggguggccuc

SEQ ID NO: 3826241 - RNA, 19 nt, Human
ccagggacagauccagcag

SEQ ID NO: 3826242 - RNA, 14 nt, Human
ccagggaccggcgg

SEQ ID NO: 3826243 - RNA, 13 nt, Human
ccagggagaagcu

SEQ ID NO: 3826244 - RNA, 15 nt, Human
ccagggagaagcucc

SEQ ID NO: 3826245 - RNA, 22 nt, Human
ccagggagaccuggacacaggc

SEQ ID NO: 3826246 - RNA, 14 nt, Human
ccagggagagccca

SEQ ID NO: 3826247 - RNA, 18 nt, Human
ccagggagagcccaggag

SEQ ID NO: 3826248 - RNA, 20 nt, Human
ccagggagagcccaggagcu

SEQ ID NO: 3826249 - RNA, 22 nt, Human
ccagggagagggggcugguggg

SEQ ID NO: 3826250 - RNA, 18 nt, Human
ccagggagccuuugguuc

SEQ ID NO: 3826251 - RNA, 18 nt, Human
ccagggagcggaaagcag

SEQ ID NO: 3826252 - RNA, 20 nt, Human
ccagggagcggaaagcagcu

SEQ ID NO: 3826253 - RNA, 23 nt, Human
ccagggagcggaaagcagcucaa

SEQ ID NO: 3826254 - RNA, 13 nt, Human
ccagggagcugca

SEQ ID NO: 3826255 - RNA, 14 nt, Human
ccagggaggggccg

SEQ ID NO: 3826256 - RNA, 21 nt, Human
ccagggaugauucaagccauu

SEQ ID NO: 3826257 - RNA, 17 nt, Human
ccagggauggggccaca

SEQ ID NO: 3826258 - RNA, 19 nt, Human
ccagggauggggccacagc

SEQ ID NO: 3826259 - RNA, 21 nt, Human
ccagggauggggccacagcca

SEQ ID NO: 3826260 - RNA, 22 nt, Human
ccagggauggggccacagccag

SEQ ID NO: 3826261 - RNA, 22 nt, Human
ccagggcaagcuccgcaggacu

SEQ ID NO: 3826262 - RNA, 15 nt, Human
ccagggcacaggagc

SEQ ID NO: 3826263 - RNA, 17 nt, Human
ccagggcacaggagcua

SEQ ID NO: 3826264 - RNA, 22 nt, Human
ccagggcacaggagcuaccugu

SEQ ID NO: 3826265 - RNA, 15 nt, Human
ccagggcaccaagcc

SEQ ID NO: 3826266 - RNA, 20 nt, Human
ccagggcagccagggagagc

SEQ ID NO: 3826267 - RNA, 17 nt, Human
ccagggcagugcuagug

SEQ ID NO: 3826268 - RNA, 22 nt, Human
ccagggcagugcuagugagcug

SEQ ID NO: 3826269 - RNA, 23 nt, Human
ccagggcagugcuagugagcugg

SEQ ID NO: 3826270 - RNA, 15 nt, Human
ccagggcaucucugg

SEQ ID NO: 3826271 - RNA, 16 nt, Human
ccagggcaucucuggg

SEQ ID NO: 3826272 - RNA, 13 nt, Human
ccagggccaaaag

SEQ ID NO: 3826273 - RNA, 16 nt, Human
ccagggccacgcucca

SEQ ID NO: 3826274 - RNA, 21 nt, Human
ccagggccacgugccaggccc

SEQ ID NO: 3826275 - RNA, 22 nt, Human
ccagggccacgugccaggcccg

SEQ ID NO: 3826276 - RNA, 15 nt, Human
ccagggccagccucu

SEQ ID NO: 3826277 - RNA, 16 nt, Human
ccagggccagggcccu

SEQ ID NO: 3826278 - RNA, 17 nt, Human
ccagggccagggcccug

SEQ ID NO: 3826279 - RNA, 18 nt, Human
ccagggccaugaacuuug

SEQ ID NO: 3826280 - RNA, 16 nt, Human
ccagggccaugucaga

SEQ ID NO: 3826281 - RNA, 16 nt, Human
ccagggcccagagccc

SEQ ID NO: 3826282 - RNA, 22 nt, Human
ccagggcccagagcccagcucc

SEQ ID NO: 3826283 - RNA, 17 nt, Human
ccagggcccaggcaaau

SEQ ID NO: 3826284 - RNA, 15 nt, Human
ccagggcccugagcu

SEQ ID NO: 3826285 - RNA, 14 nt, Human
ccagggcccugcag

SEQ ID NO: 3826286 - RNA, 17 nt, Human
ccagggccugagccugg

SEQ ID NO: 3826287 - RNA, 19 nt, Human
ccagggccugagccuggcc

SEQ ID NO: 3826288 - RNA, 23 nt, Human
ccagggccugcaggaccugccug

SEQ ID NO: 3826289 - RNA, 13 nt, Human
ccagggccugcga

SEQ ID NO: 3826290 - RNA, 14 nt, Human
ccagggccugcgag

SEQ ID NO: 3826291 - RNA, 20 nt, Human
ccagggccuggaagacagag

SEQ ID NO: 3826292 - RNA, 20 nt, Human
ccagggccuuuucuggcacc

SEQ ID NO: 3826293 - RNA, 16 nt, Human
ccagggcuagugacuu

SEQ ID NO: 3826294 - RNA, 13 nt, Human
ccagggcucagcc

SEQ ID NO: 3826295 - RNA, 16 nt, Human
ccagggcucagccugg

SEQ ID NO: 3826296 - RNA, 14 nt, Human
ccagggcuccagcc

SEQ ID NO: 3826297 - RNA, 17 nt, Human
ccagggcuccagccccu

SEQ ID NO: 3826298 - RNA, 13 nt, Human
ccagggcuccugc

SEQ ID NO: 3826299 - RNA, 20 nt, Human
ccagggcuccugcacuuacu

SEQ ID NO: 3826300 - RNA, 17 nt, Human
ccagggcucugccccag

SEQ ID NO: 3826301 - RNA, 19 nt, Human
ccagggcucugccccaguc

SEQ ID NO: 3826302 - RNA, 16 nt, Human
ccagggcugcccugag

SEQ ID NO: 3826303 - RNA, 19 nt, Human
ccagggcugcccugagaag

SEQ ID NO: 3826304 - RNA, 15 nt, Human
ccagggcugggagga

SEQ ID NO: 3826305 - RNA, 19 nt, Human
ccagggcugggaggaagga

SEQ ID NO: 3826306 - RNA, 22 nt, Human
ccagggcuggggcagccucugg

SEQ ID NO: 3826307 - RNA, 19 nt, Human
ccagggcuguaacugccag

SEQ ID NO: 3826308 - RNA, 21 nt, Human
ccagggcuuaccuguacacug

SEQ ID NO: 3826309 - RNA, 16 nt, Human
ccaggggaaccugcca

SEQ ID NO: 3826310 - RNA, 17 nt, Human
ccaggggaaccugccau

SEQ ID NO: 3826311 - RNA, 18 nt, Human
ccaggggaccacaccucc

SEQ ID NO: 3826312 - RNA, 18 nt, Human
ccaggggagagggucugg

SEQ ID NO: 3826313 - RNA, 20 nt, Human
ccaggggagagggucuggag

SEQ ID NO: 3826314 - RNA, 15 nt, Human
ccaggggagcagagg

SEQ ID NO: 3826315 - RNA, 16 nt, Human
ccaggggaguuguguc

SEQ ID NO: 3826316 - RNA, 23 nt, Human
ccaggggcagccccaggccaaag

SEQ ID NO: 3826317 - RNA, 18 nt, Human
ccaggggcaggcacagca

SEQ ID NO: 3826318 - RNA, 21 nt, Human
ccaggggcauguauuggccug

SEQ ID NO: 3826319 - RNA, 22 nt, Human
ccaggggcauguauuggccugg

SEQ ID NO: 3826320 - RNA, 23 nt, Human
ccaggggcauguauuggccugga

SEQ ID NO: 3826321 - RNA, 15 nt, Human
ccaggggccaugaau

SEQ ID NO: 3826322 - RNA, 19 nt, Human
ccaggggcccacagggaac

SEQ ID NO: 3826323 - RNA, 14 nt, Human
ccaggggccccucc

SEQ ID NO: 3826324 - RNA, 17 nt, Human
ccaggggccccuccagc

SEQ ID NO: 3826325 - RNA, 18 nt, Human
ccaggggccccuccagcu

SEQ ID NO: 3826326 - RNA, 20 nt, Human
ccaggggccccuccagcuug

SEQ ID NO: 3826327 - RNA, 23 nt, Human
ccaggggccuuugggugcuguuu

SEQ ID NO: 3826328 - RNA, 22 nt, Human
ccaggggcucccuccgccccca

SEQ ID NO: 3826329 - RNA, 20 nt, Human
ccaggggcugcuuccuccug

SEQ ID NO: 3826330 - RNA, 22 nt, Human
ccaggggcugcuuccuccugga

SEQ ID NO: 3826331 - RNA, 23 nt, Human
ccagggggccagucccugaggca

SEQ ID NO: 3826332 - RNA, 23 nt, Human
ccagggggcuuccugaggggaga

SEQ ID NO: 3826333 - RNA, 23 nt, Human
ccaggggggacaauaugugccaa

SEQ ID NO: 3826334 - RNA, 17 nt, Human
ccaggggggugaggagc

SEQ ID NO: 3826335 - RNA, 14 nt, Human
ccaggggucccagc

SEQ ID NO: 3826336 - RNA, 17 nt, Human
ccaggggucccagccac

SEQ ID NO: 3826337 - RNA, 21 nt, Human
ccaggggucucccuggcuccc

SEQ ID NO: 3826338 - RNA, 20 nt, Human
ccaggggugauuucagagag

SEQ ID NO: 3826339 - RNA, 21 nt, Human
ccaggggugauuucagagagg

SEQ ID NO: 3826340 - RNA, 16 nt, Human
ccaggggugcccccuc

SEQ ID NO: 3826341 - RNA, 17 nt, Human
ccaggggugcccccucc

SEQ ID NO: 3826342 - RNA, 19 nt, Human
ccaggggugcccccuccuc

SEQ ID NO: 3826343 - RNA, 14 nt, Human
ccaggggugggaca

SEQ ID NO: 3826344 - RNA, 23 nt, Human
ccaggggugggacacccugugau

SEQ ID NO: 3826345 - RNA, 13 nt, Human
ccagggguuucuc

SEQ ID NO: 3826346 - RNA, 22 nt, Human
ccaggguagcccgccugccagu

SEQ ID NO: 3826347 - RNA, 21 nt, Human
ccagggucacugaaggccugg

SEQ ID NO: 3826348 - RNA, 10 nt, Human
ccagggucag

SEQ ID NO: 3826349 - RNA, 17 nt, Human
ccagggucagaaacagg

SEQ ID NO: 3826350 - RNA, 18 nt, Human
ccagggucagaaacagga

SEQ ID NO: 3826351 - RNA, 14 nt, Human
ccaggguccuggga

SEQ ID NO: 3826352 - RNA, 14 nt, Human
ccagggucuucccu

SEQ ID NO: 3826353 - RNA, 15 nt, Human
ccagggugagagcug

SEQ ID NO: 3826354 - RNA, 12 nt, Human
cagagagaagcc

SEQ ID NO: 3826355 - RNA, 9 nt, Human
cagagagag

SEQ ID NO: 3826356 - RNA, 19 nt, Human
cagagagagaagugccccu

SEQ ID NO: 3826357 - RNA, 23 nt, Human
cagagagagaagugccccugcug

SEQ ID NO: 3826358 - RNA, 24 nt, Human
cagagagagaagugccccugcugc

SEQ ID NO: 3826359 - RNA, 19 nt, Human
cagagagagauacucuggg

SEQ ID NO: 3826360 - RNA, 22 nt, Human
cagagagaggggagaagccugg

SEQ ID NO: 3826361 - RNA, 17 nt, Human
cagagagcagugcuuuu

SEQ ID NO: 3826362 - RNA, 18 nt, Human
cagagagccauuuuguga

SEQ ID NO: 3826363 - RNA, 19 nt, Human
cagagagccauuuugugaa

SEQ ID NO: 3826364 - RNA, 19 nt, Human
cagagagccuggugcugcu

SEQ ID NO: 3826365 - RNA, 12 nt, Human
cagagagcuggu

SEQ ID NO: 3826366 - RNA, 13 nt, Human
cagagagcuggua

SEQ ID NO: 3826367 - RNA, 19 nt, Human
cagagagcugguaguuagu

SEQ ID NO: 3826368 - RNA, 20 nt, Human
cagagagcuuagccuggagc

SEQ ID NO: 3826369 - RNA, 16 nt, Human
ccagugcacuugcugg

SEQ ID NO: 3826370 - RNA, 20 nt, Human
ccagugcacuugcuggaaga

SEQ ID NO: 3826371 - RNA, 16 nt, Human
ccagugcaggcuggcc

SEQ ID NO: 3826372 - RNA, 18 nt, Human
ccagugcaggcuggccag

SEQ ID NO: 3826373 - RNA, 19 nt, Human
ccagugcaggcuggccagc

SEQ ID NO: 3826374 - RNA, 18 nt, Human
ccagugcaugguggccag

SEQ ID NO: 3826375 - RNA, 12 nt, Human
ccagugccaagg

SEQ ID NO: 3826376 - RNA, 13 nt, Human
ccagugccaagga

SEQ ID NO: 3826377 - RNA, 16 nt, Human
ccagugccaaggaccu

SEQ ID NO: 3826378 - RNA, 23 nt, Human
ccagugcccacaggaucagucug

SEQ ID NO: 3826379 - RNA, 16 nt, Human
ccagugcccccacuga

SEQ ID NO: 3826380 - RNA, 14 nt, Human
ccagugcccugagc

SEQ ID NO: 3826381 - RNA, 15 nt, Human
ccagugcccugagcc

SEQ ID NO: 3826382 - RNA, 17 nt, Human
ccagugcccugagccag

SEQ ID NO: 3826383 - RNA, 21 nt, Human
ccagugcccugagccaggguc

SEQ ID NO: 3826384 - RNA, 17 nt, Human
ccagugcccugauccca

SEQ ID NO: 3826385 - RNA, 11 nt, Human
ccagugccucu

SEQ ID NO: 3826386 - RNA, 16 nt, Human
ccagugccucucccug

SEQ ID NO: 3826387 - RNA, 19 nt, Human
ccagugccucucccugcug

SEQ ID NO: 3826388 - RNA, 21 nt, Human
ccagugccucucccugcugcu

SEQ ID NO: 3826389 - RNA, 19 nt, Human
ccagugccuuaccuccugc

SEQ ID NO: 3826390 - RNA, 14 nt, Human
ccagugcggcaggu

SEQ ID NO: 3826391 - RNA, 15 nt, Human
ccagugcggcagguu

SEQ ID NO: 3826392 - RNA, 12 nt, Human
ccagugcugaau

SEQ ID NO: 3826393 - RNA, 21 nt, Human
ccagugcuguccaugcuucuc

SEQ ID NO: 3826394 - RNA, 14 nt, Human
ccaguggauuccca

SEQ ID NO: 3826395 - RNA, 13 nt, Human
ccaguggcagggc

SEQ ID NO: 3826396 - RNA, 14 nt, Human
ccaguggcagggca

SEQ ID NO: 3826397 - RNA, 17 nt, Human
ccaguggccacucagcu

SEQ ID NO: 3826398 - RNA, 16 nt, Human
ccaguggccucaaccc

SEQ ID NO: 3826399 - RNA, 23 nt, Human
ccaguggccucaacccucccuca

SEQ ID NO: 3826400 - RNA, 15 nt, Human
ccaguggccuggcuc

SEQ ID NO: 3826401 - RNA, 19 nt, Human
ccaguggcugcugcccagg

SEQ ID NO: 3826402 - RNA, 15 nt, Human
ccagugggaggggca

SEQ ID NO: 3826403 - RNA, 16 nt, Human
ccagugggaggggcag

SEQ ID NO: 3826404 - RNA, 20 nt, Human
ccagugggaggugagaccac

SEQ ID NO: 3826405 - RNA, 23 nt, Human
ccagugggaggugagaccaccuc

SEQ ID NO: 3826406 - RNA, 17 nt, Human
ccaguggggccugugga

SEQ ID NO: 3826407 - RNA, 16 nt, Human
ccaguguaauccccca

SEQ ID NO: 3826408 - RNA, 20 nt, Human
ccaguguaaucccccaggag

SEQ ID NO: 3826409 - RNA, 12 nt, Human
ccaguguacaua

SEQ ID NO: 3826410 - RNA, 15 nt, Human
ccaguguagccuugc

SEQ ID NO: 3826411 - RNA, 17 nt, Human
ccaguguccuccccuca

SEQ ID NO: 3826412 - RNA, 19 nt, Human
ccaguguccugagcucagc

SEQ ID NO: 3826413 - RNA, 22 nt, Human
ccaguguccugagcucagcgug

SEQ ID NO: 3826414 - RNA, 14 nt, Human
ccagugucuuccug

SEQ ID NO: 3826415 - RNA, 15 nt, Human
ccagugucuuucuuu

SEQ ID NO: 3826416 - RNA, 19 nt, Human
ccagugugcugaugggcgu

SEQ ID NO: 3826417 - RNA, 20 nt, Human
ccagugugggcuugaccagg

SEQ ID NO: 3826418 - RNA, 22 nt, Human
ccagugugggguucugcuggga

SEQ ID NO: 3826419 - RNA, 18 nt, Human
ccaguguguggcuuucag

SEQ ID NO: 3826420 - RNA, 21 nt, Human
ccaguguguggcuuucagagc

SEQ ID NO: 3826421 - RNA, 20 nt, Human
ccaguguuagggaagggccu

SEQ ID NO: 3826422 - RNA, 18 nt, Human
ccaguguucuaugaacaa

SEQ ID NO: 3826423 - RNA, 23 nt, Human
ccaguguuguuuguaaauaagag

SEQ ID NO: 3826424 - RNA, 19 nt, Human
ccaguguuuuaggagcaug

SEQ ID NO: 3826425 - RNA, 13 nt, Human
ccaguuaaggacc

SEQ ID NO: 3826426 - RNA, 19 nt, Human
ccaguuaaucuugcuuucu

SEQ ID NO: 3826427 - RNA, 17 nt, Human
ccaguuagccucugcag

SEQ ID NO: 3826428 - RNA, 21 nt, Human
ccaguuauggcuauaggugcu

SEQ ID NO: 3826429 - RNA, 20 nt, Human
ccaguuauuuuccgcccuca

SEQ ID NO: 3826430 - RNA, 22 nt, Human
ccaguuccuuucaaugguuugc

SEQ ID NO: 3826431 - RNA, 16 nt, Human
ccaguucugcuccucu

SEQ ID NO: 3826432 - RNA, 18 nt, Human
ccaguugaucaaugaaua

SEQ ID NO: 3826433 - RNA, 18 nt, Human
ccaguugcacucagguga

SEQ ID NO: 3826434 - RNA, 19 nt, Human
ccaguugcagucacucuag

SEQ ID NO: 3826435 - RNA, 19 nt, Human
ccaguuggagcuccagccu

SEQ ID NO: 3826436 - RNA, 22 nt, Human
ccaguuggagcuccagccugac

SEQ ID NO: 3826437 - RNA, 15 nt, Human
ccaguuggaguuuuu

SEQ ID NO: 3826438 - RNA, 23 nt, Human
ccaguuggaguuuuuuguaccaa

SEQ ID NO: 3826439 - RNA, 18 nt, Human
ccaguugggagcacugga

SEQ ID NO: 3826440 - RNA, 20 nt, Human
ccaguugggagcacuggagu

SEQ ID NO: 3826441 - RNA, 18 nt, Human
ccaguuggucccccuucc

SEQ ID NO: 3826442 - RNA, 23 nt, Human
ccaguuggucccccuuccaugga

SEQ ID NO: 3826443 - RNA, 18 nt, Human
ccaguuguauauuauucu

SEQ ID NO: 3826444 - RNA, 21 nt, Human
ccaguugucccgauuguaacu

SEQ ID NO: 3826445 - RNA, 22 nt, Human
ccaguugucccgauuguaacuc

SEQ ID NO: 3826446 - RNA, 21 nt, Human
ccaguuguuagauuaagaaau

SEQ ID NO: 3826447 - RNA, 18 nt, Human
ccaguuuaaccugaugca

SEQ ID NO: 3826448 - RNA, 17 nt, Human
ccaguuucuaaacugga

SEQ ID NO: 3826449 - RNA, 19 nt, Human
ccaguuuuguuuggaccaa

SEQ ID NO: 3826450 - RNA, 20 nt, Human
ccauaaaacauuaagaaaau

SEQ ID NO: 3826451 - RNA, 19 nt, Human
ccauaaagaagauguuuaa

SEQ ID NO: 3826452 - RNA, 17 nt, Human
ccauaaauccaguucua

SEQ ID NO: 3826453 - RNA, 17 nt, Human
ccauaagcuacugccau

SEQ ID NO: 3826454 - RNA, 21 nt, Human
ccauaagcuacugccauccug

SEQ ID NO: 3826455 - RNA, 22 nt, Human
ccauaagguuucguuucuguau

SEQ ID NO: 3826456 - RNA, 21 nt, Human
ccauaaucuggacuccucugu

SEQ ID NO: 3826457 - RNA, 21 nt, Human
ccauaaugcuacugucucacu

SEQ ID NO: 3826458 - RNA, 21 nt, Human
ccauaauuuucuucaugcaau

SEQ ID NO: 3826459 - RNA, 18 nt, Human
ccauacacacgcugccuu

SEQ ID NO: 3826460 - RNA, 20 nt, Human
ccauacacacgcugccuucg

SEQ ID NO: 3826461 - RNA, 17 nt, Human
ccauacacuuuguugca

SEQ ID NO: 3826462 - RNA, 14 nt, Human
ccauaccagcucgc

SEQ ID NO: 3826463 - RNA, 23 nt, Human
ccauaccuuccuucccugggcug

SEQ ID NO: 3826464 - RNA, 17 nt, Human
ccauacucugucucccu

SEQ ID NO: 3826465 - RNA, 21 nt, Human
ccauacuggccucgccuggcc

SEQ ID NO: 3826466 - RNA, 18 nt, Human
ccauagaaacaugacacu

SEQ ID NO: 3826467 - RNA, 20 nt, Human
ccauagaaacaugacacuga

SEQ ID NO: 3826468 - RNA, 16 nt, Human
ccauagaguacacugc

SEQ ID NO: 3826469 - RNA, 14 nt, Human
ccauagcaacagga

SEQ ID NO: 3826470 - RNA, 21 nt, Human
ccauagcaagauugcuuaaaa

SEQ ID NO: 3826471 - RNA, 15 nt, Human
ccauagcuccugcuc

SEQ ID NO: 3826472 - RNA, 18 nt, Human
ccauagcugcugcccuag

SEQ ID NO: 3826473 - RNA, 14 nt, Human
ccauaggcccacac

SEQ ID NO: 3826474 - RNA, 20 nt, Human
ccauaggcccacacacaggu

SEQ ID NO: 3826475 - RNA, 23 nt, Human
ccauaggcccacacacagguggu

SEQ ID NO: 3826476 - RNA, 12 nt, Human
ccauaggcccuu

SEQ ID NO: 3826477 - RNA, 14 nt, Human
ccauaggcccuuuc

SEQ ID NO: 3826478 - RNA, 15 nt, Human
ccauaguaccauuua

SEQ ID NO: 3826479 - RNA, 15 nt, Human
ccauaguauauuaaa

SEQ ID NO: 3826480 - RNA, 15 nt, Human
ccauagucuuaacug

SEQ ID NO: 3826481 - RNA, 18 nt, Human
ccauaguuacuguaaaau

SEQ ID NO: 3826482 - RNA, 15 nt, Human
ccauauaaguuugaa

SEQ ID NO: 3826483 - RNA, 13 nt, Human
ccauauagaaagc

SEQ ID NO: 3826484 - RNA, 14 nt, Human
ccauauauauauau

SEQ ID NO: 3826485 - RNA, 19 nt, Human
ccauauccauagugacuuu

SEQ ID NO: 3826486 - RNA, 23 nt, Human
ccauaucuugcgaauccaagcuc

SEQ ID NO: 3826487 - RNA, 12 nt, Human
ccauaugaauug

SEQ ID NO: 3826488 - RNA, 16 nt, Human
ccauaugcagaaauag

SEQ ID NO: 3826489 - RNA, 21 nt, Human
ccauaugccuuggggaggaca

SEQ ID NO: 3826490 - RNA, 22 nt, Human
ccauaugccuuggggaggacaa

SEQ ID NO: 3826491 - RNA, 21 nt, Human
ccauaugcuaccaccagcugu

SEQ ID NO: 3826492 - RNA, 12 nt, Human
ccauaugcuguu

SEQ ID NO: 3826493 - RNA, 14 nt, Human
ccauauguuacacu

SEQ ID NO: 3826494 - RNA, 22 nt, Human
ccauauuaaguaagucucaagg

SEQ ID NO: 3826495 - RNA, 19 nt, Human
ccauauuagaaaacuuugu

SEQ ID NO: 3826496 - RNA, 22 nt, Human
ccauauucagugcuguggccug

SEQ ID NO: 3826497 - RNA, 18 nt, Human
ccauauugcacaugucuu

SEQ ID NO: 3826498 - RNA, 14 nt, Human
ccauauuggccagu

SEQ ID NO: 3826499 - RNA, 16 nt, Human
ccauauuuaccucagc

SEQ ID NO: 3826500 - RNA, 20 nt, Human
ccauauuuaccucagccugg

SEQ ID NO: 3826501 - RNA, 14 nt, Human
ccauauuuagcagu

SEQ ID NO: 3826502 - RNA, 12 nt, Human
ccauauuuauuc

SEQ ID NO: 3826503 - RNA, 16 nt, Human
ccauauuuguaaaaug

SEQ ID NO: 3826504 - RNA, 20 nt, Human
ccauauuuguaaaaugacaa

SEQ ID NO: 3826505 - RNA, 11 nt, Human
ccauauuuuca

SEQ ID NO: 3826506 - RNA, 16 nt, Human
ccaucaaaaugcuuuu

SEQ ID NO: 3826507 - RNA, 19 nt, Human
ccaucaaauugaucugcag

SEQ ID NO: 3826508 - RNA, 17 nt, Human
ccaucaacaaaaauugu

SEQ ID NO: 3826509 - RNA, 13 nt, Human
ccaucaaccucug

SEQ ID NO: 3826510 - RNA, 13 nt, Human
ccaucaagccacc

SEQ ID NO: 3826511 - RNA, 18 nt, Human
ccaucaaggguacacugc

SEQ ID NO: 3826512 - RNA, 19 nt, Human
ccaucaauaaaaaauuaug

SEQ ID NO: 3826513 - RNA, 20 nt, Human
cagcauucuugucacaauaa

SEQ ID NO: 3826514 - RNA, 19 nt, Human
cagcauugauauuugugca

SEQ ID NO: 3826515 - RNA, 17 nt, Human
cagcauugcugguucua

SEQ ID NO: 3826516 - RNA, 16 nt, Human
cagcauugcuuucuga

SEQ ID NO: 3826517 - RNA, 12 nt, Human
cagcauuucaag

SEQ ID NO: 3826518 - RNA, 12 nt, Human
cagcauuucacu

SEQ ID NO: 3826519 - RNA, 15 nt, Human
cagcauuugauaaug

SEQ ID NO: 3826520 - RNA, 22 nt, Human
cagcauuugauaaugauaaaac

SEQ ID NO: 3826521 - RNA, 16 nt, Human
cagcauuugaucuguu

SEQ ID NO: 3826522 - RNA, 18 nt, Human
cagcauuuuacugauuca

SEQ ID NO: 3826523 - RNA, 18 nt, Human
cagcauuuuuauuucaga

SEQ ID NO: 3826524 - RNA, 23 nt, Human
cagccaaacacacagaaggggac

SEQ ID NO: 3826525 - RNA, 16 nt, Human
cagccaaacccaugag

SEQ ID NO: 3826526 - RNA, 15 nt, Human
cagccaaagccuccu

SEQ ID NO: 3826527 - RNA, 16 nt, Human
cagccaaagccuccuc

SEQ ID NO: 3826528 - RNA, 22 nt, Human
cagccaaauuuaaaacuguugg

SEQ ID NO: 3826529 - RNA, 19 nt, Human
cagccaacacgcaccugcc

SEQ ID NO: 3826530 - RNA, 20 nt, Human
cagccaacacgcaccugccu

SEQ ID NO: 3826531 - RNA, 22 nt, Human
cagccaacacgcaccugccuca

SEQ ID NO: 3826532 - RNA, 23 nt, Human
cagccaacacgcaccugccucag

SEQ ID NO: 3826533 - RNA, 18 nt, Human
cagccaacagcuacaaca

SEQ ID NO: 3826534 - RNA, 12 nt, Human
cagccaaccccu

SEQ ID NO: 3826535 - RNA, 14 nt, Human
cagccaaccccugu

SEQ ID NO: 3826536 - RNA, 18 nt, Human
cagccaaccccuguggag

SEQ ID NO: 3826537 - RNA, 21 nt, Human
cagccaaccccuguggagccc

SEQ ID NO: 3826538 - RNA, 16 nt, Human
cagccaacuagccccu

SEQ ID NO: 3826539 - RNA, 18 nt, Human
cagccaacuagccccugg

SEQ ID NO: 3826540 - RNA, 19 nt, Human
cagccaacuagccccuggg

SEQ ID NO: 3826541 - RNA, 22 nt, Human
cagccaacuagccccuggggug

SEQ ID NO: 3826542 - RNA, 13 nt, Human
cagccaacucauu

SEQ ID NO: 3826543 - RNA, 16 nt, Human
cagccaagauuuuccu

SEQ ID NO: 3826544 - RNA, 20 nt, Human
cagccaagauuuuccucuug

SEQ ID NO: 3826545 - RNA, 11 nt, Human
cagccaagcac

SEQ ID NO: 3826546 - RNA, 17 nt, Human
cagccaagcacaguggu

SEQ ID NO: 3826547 - RNA, 23 nt, Human
cagccaagcacagugguggcagg

SEQ ID NO: 3826548 - RNA, 22 nt, Human
cagccaagucgguuaguggaag

SEQ ID NO: 3826549 - RNA, 20 nt, Human
cagccaagugccaaaugcuc

SEQ ID NO: 3826550 - RNA, 17 nt, Human
cagccaauuauguuaaa

SEQ ID NO: 3826551 - RNA, 17 nt, Human
cagccacacacacagaa

SEQ ID NO: 3826552 - RNA, 18 nt, Human
cagccacacacacagaaa

SEQ ID NO: 3826553 - RNA, 20 nt, Human
cagccacacacacagaaaau

SEQ ID NO: 3826554 - RNA, 12 nt, Human
cagccacacugu

SEQ ID NO: 3826555 - RNA, 18 nt, Human
cagccacacuucucagga

SEQ ID NO: 3826556 - RNA, 15 nt, Human
cagccacauuccuga

SEQ ID NO: 3826557 - RNA, 12 nt, Human
cagccaccagcg

SEQ ID NO: 3826558 - RNA, 22 nt, Human
cagccaccccgggcucucugcu

SEQ ID NO: 3826559 - RNA, 14 nt, Human
cagccacccugagg

SEQ ID NO: 3826560 - RNA, 19 nt, Human
cagccacccugaggagucu

SEQ ID NO: 3826561 - RNA, 22 nt, Human
cagccacccugaggagucugag

SEQ ID NO: 3826562 - RNA, 16 nt, Human
cagccacccugaguug

SEQ ID NO: 3826563 - RNA, 14 nt, Human
cagccacggccagg

SEQ ID NO: 3826564 - RNA, 15 nt, Human
cagccacggccaggc

SEQ ID NO: 3826565 - RNA, 17 nt, Human
cagccacggccaggcca

SEQ ID NO: 3826566 - RNA, 21 nt, Human
cagccacggccaggccagagg

SEQ ID NO: 3826567 - RNA, 22 nt, Human
cagccacggccaggccagaggg

SEQ ID NO: 3826568 - RNA, 23 nt, Human
cagccacggccaggccagaggga

SEQ ID NO: 3826569 - RNA, 23 nt, Human
cagccacucgggaggcugagaca

SEQ ID NO: 3826570 - RNA, 10 nt, Human
cagccacucu

SEQ ID NO: 3826571 - RNA, 21 nt, Human
cagccacuucggccaggucac

SEQ ID NO: 3826572 - RNA, 22 nt, Human
ccauuugaauuuuuuagugacu

SEQ ID NO: 3826573 - RNA, 17 nt, Human
ccauuugauuuuucuaa

SEQ ID NO: 3826574 - RNA, 12 nt, Human
ccauuugcauuu

SEQ ID NO: 3826575 - RNA, 13 nt, Human
ccauuugcuccuu

SEQ ID NO: 3826576 - RNA, 20 nt, Human
ccauuuguaaaacuccggau

SEQ ID NO: 3826577 - RNA, 12 nt, Human
ccauuuguaaua

SEQ ID NO: 3826578 - RNA, 18 nt, Human
ccauuuguaauaaaguau

SEQ ID NO: 3826579 - RNA, 20 nt, Human
ccauuuguaauaaaguauau

SEQ ID NO: 3826580 - RNA, 20 nt, Human
ccauuuguaauuaaauuaug

SEQ ID NO: 3826581 - RNA, 13 nt, Human
ccauuugucccaa

SEQ ID NO: 3826582 - RNA, 17 nt, Human
ccauuugucccaagugc

SEQ ID NO: 3826583 - RNA, 18 nt, Human
ccauuugucucuacuuuu

SEQ ID NO: 3826584 - RNA, 14 nt, Human
ccauuugugccaga

SEQ ID NO: 3826585 - RNA, 16 nt, Human
ccauuugugccagagg

SEQ ID NO: 3826586 - RNA, 21 nt, Human
ccauuuguguacacagucagc

SEQ ID NO: 3826587 - RNA, 14 nt, Human
ccauuuguguuuau

SEQ ID NO: 3826588 - RNA, 17 nt, Human
ccauuuguuaauaucac

SEQ ID NO: 3826589 - RNA, 12 nt, Human
ccauuuguuuau

SEQ ID NO: 3826590 - RNA, 16 nt, Human
ccauuuuaagucccug

SEQ ID NO: 3826591 - RNA, 18 nt, Human
ccauuuuagucacuuuuu

SEQ ID NO: 3826592 - RNA, 22 nt, Human
ccauuuuauaaagugcuugugu

SEQ ID NO: 3826593 - RNA, 11 nt, Human
ccauuuuccug

SEQ ID NO: 3826594 - RNA, 13 nt, Human
ccauuuuccugca

SEQ ID NO: 3826595 - RNA, 16 nt, Human
ccauuuugcccuucca

SEQ ID NO: 3826596 - RNA, 19 nt, Human
ccauuuugcccuuccauag

SEQ ID NO: 3826597 - RNA, 20 nt, Human
ccauuuugcugucccuuuuc

SEQ ID NO: 3826598 - RNA, 22 nt, Human
ccauuuugggguacccacugcu

SEQ ID NO: 3826599 - RNA, 18 nt, Human
ccauuuuggugucuuucu

SEQ ID NO: 3826600 - RNA, 21 nt, Human
ccauuuuguauuuuacuaaua

SEQ ID NO: 3826601 - RNA, 14 nt, Human
ccauuuugugaagc

SEQ ID NO: 3826602 - RNA, 15 nt, Human
ccauuuugugaagcc

SEQ ID NO: 3826603 - RNA, 13 nt, Human
ccauuuugugaau

SEQ ID NO: 3826604 - RNA, 14 nt, Human
ccauuuuuacaagu

SEQ ID NO: 3826605 - RNA, 11 nt, Human
ccauuuuuccu

SEQ ID NO: 3826606 - RNA, 14 nt, Human
cccaaaacaaaguc

SEQ ID NO: 3826607 - RNA, 15 nt, Human
cccaaaaccacagcc

SEQ ID NO: 3826608 - RNA, 16 nt, Human
cccaaaacucuccucu

SEQ ID NO: 3826609 - RNA, 13 nt, Human
cccaaaaggcaga

SEQ ID NO: 3826610 - RNA, 18 nt, Human
cccaaaaggcagaagcaa

SEQ ID NO: 3826611 - RNA, 20 nt, Human
cccaaacaaauaugcaaaag

SEQ ID NO: 3826612 - RNA, 21 nt, Human
cccaaacaccuuccagcuccu

SEQ ID NO: 3826613 - RNA, 17 nt, Human
cccaaaccaccagaagc

SEQ ID NO: 3826614 - RNA, 18 nt, Human
cccaaaccaccagaagcc

SEQ ID NO: 3826615 - RNA, 13 nt, Human
cccaaaccuggag

SEQ ID NO: 3826616 - RNA, 16 nt, Human
cccaaacgcccuuucc

SEQ ID NO: 3826617 - RNA, 12 nt, Human
cccaaacuguga

SEQ ID NO: 3826618 - RNA, 23 nt, Human
cccaaacuguugauuauuagcca

SEQ ID NO: 3826619 - RNA, 21 nt, Human
cccaaagaauguuuauagcaa

SEQ ID NO: 3826620 - RNA, 18 nt, Human
cccaaagagccuggagaa

SEQ ID NO: 3826621 - RNA, 16 nt, Human
cccaaagagcugccua

SEQ ID NO: 3826622 - RNA, 17 nt, Human
cccaaagauagacaggu

SEQ ID NO: 3826623 - RNA, 21 nt, Human
cccaaagauagacagguccug

SEQ ID NO: 3826624 - RNA, 19 nt, Human
cccaaagcagcccuucccc

SEQ ID NO: 3826625 - RNA, 17 nt, Human
cccaaagcuuuccugcc

SEQ ID NO: 3826626 - RNA, 20 nt, Human
cccaaagcuuuccugcccca

SEQ ID NO: 3826627 - RNA, 17 nt, Human
cccaaaggaaaaagcac

SEQ ID NO: 3826628 - RNA, 21 nt, Human
cccaaaggaagcuuucucugc

SEQ ID NO: 3826629 - RNA, 15 nt, Human
cccaaaggacgcacu

SEQ ID NO: 3826630 - RNA, 23 nt, Human
cccaaaggauacuguaacacuuu

SEQ ID NO: 3826631 - RNA, 19 nt, Human
cccaaaggcuuugcccugc

SEQ ID NO: 3826632 - RNA, 20 nt, Human
cccaaaggggacaggccuca

SEQ ID NO: 3826633 - RNA, 22 nt, Human
cccaaaggggacaggccucacc

SEQ ID NO: 3826634 - RNA, 13 nt, Human
cccaaagggugug

SEQ ID NO: 3826635 - RNA, 13 nt, Human
cccaaagugcugg

SEQ ID NO: 3826636 - RNA, 10 nt, Human
cccaaagugg

SEQ ID NO: 3826637 - RNA, 23 nt, Human
cccaaaguuguuguaaccugcug

SEQ ID NO: 3826638 - RNA, 21 nt, Human
cccaaauaacuucaguccugc

SEQ ID NO: 3826639 - RNA, 16 nt, Human
cccaaaucaauacacu

SEQ ID NO: 3826640 - RNA, 14 nt, Human
cccaaaucugccua

SEQ ID NO: 3826641 - RNA, 19 nt, Human
cccaaaugugugcccagcu

SEQ ID NO: 3826642 - RNA, 19 nt, Human
cccaaauuaucaagcuaau

SEQ ID NO: 3826643 - RNA, 21 nt, Human
cccaaauugucaccugcuucu

SEQ ID NO: 3826644 - RNA, 17 nt, Human
cccaacaaaccauccag

SEQ ID NO: 3826645 - RNA, 13 nt, Human
cccaacaccucuu

SEQ ID NO: 3826646 - RNA, 18 nt, Human
cccaacacgcaggagcac

SEQ ID NO: 3826647 - RNA, 14 nt, Human
cccaacacugccag

SEQ ID NO: 3826648 - RNA, 13 nt, Human
cccaacacugugc

SEQ ID NO: 3826649 - RNA, 18 nt, Human
cccaacacugugcccugg

SEQ ID NO: 3826650 - RNA, 21 nt, Human
cccaacacugugcccuggugg

SEQ ID NO: 3826651 - RNA, 22 nt, Human
cccaacacugugcccuggugga

SEQ ID NO: 3826652 - RNA, 23 nt, Human
cccaacagcgacauagcccaucc

SEQ ID NO: 3826653 - RNA, 19 nt, Human
cccaacaggaggacaauuc

SEQ ID NO: 3826654 - RNA, 13 nt, Human
cccaacaguguga

SEQ ID NO: 3826655 - RNA, 14 nt, Human
cccaacccccaccc

SEQ ID NO: 3826656 - RNA, 13 nt, Human
cccaacccccagc

SEQ ID NO: 3826657 - RNA, 15 nt, Human
cccaacccccagcac

SEQ ID NO: 3826658 - RNA, 18 nt, Human
cccccuuucacaggcagc

SEQ ID NO: 3826659 - RNA, 12 nt, Human
cccccuuuccug

SEQ ID NO: 3826660 - RNA, 16 nt, Human
cccccuuugggcccag

SEQ ID NO: 3826661 - RNA, 18 nt, Human
cccccuuugggcccaggg

SEQ ID NO: 3826662 - RNA, 14 nt, Human
ccccgacgccacag

SEQ ID NO: 3826663 - RNA, 13 nt, Human
ccccgacuccagc

SEQ ID NO: 3826664 - RNA, 15 nt, Human
ccccgacuccagcca

SEQ ID NO: 3826665 - RNA, 16 nt, Human
ccccgacuccagccag

SEQ ID NO: 3826666 - RNA, 18 nt, Human
ccccgacuccagccagcg

SEQ ID NO: 3826667 - RNA, 13 nt, Human
ccccgacuggggc

SEQ ID NO: 3826668 - RNA, 16 nt, Human
ccccgacuucauccca

SEQ ID NO: 3826669 - RNA, 14 nt, Human
ccccgacuuuuguu

SEQ ID NO: 3826670 - RNA, 19 nt, Human
ccccgagggaugaugccac

SEQ ID NO: 3826671 - RNA, 20 nt, Human
ccccgagggaugaugccaca

SEQ ID NO: 3826672 - RNA, 19 nt, Human
ccccgagggcugagccugg

SEQ ID NO: 3826673 - RNA, 21 nt, Human
ccccgagggcugagccugguc

SEQ ID NO: 3826674 - RNA, 16 nt, Human
ccccgcaaaacccacu

SEQ ID NO: 3826675 - RNA, 23 nt, Human
ccccgcagaccuccccagccccu

SEQ ID NO: 3826676 - RNA, 17 nt, Human
ccccgcauccccugccu

SEQ ID NO: 3826677 - RNA, 17 nt, Human
ccccgcccagcugcacc

SEQ ID NO: 3826678 - RNA, 16 nt, Human
ccccgcccaggcuggc

SEQ ID NO: 3826679 - RNA, 14 nt, Human
ccccgcccaggcuu

SEQ ID NO: 3826680 - RNA, 16 nt, Human
ccccgccccacauucc

SEQ ID NO: 3826681 - RNA, 18 nt, Human
ccccgcccccugcccucc

SEQ ID NO: 3826682 - RNA, 17 nt, Human
ccccgccuggccaggag

SEQ ID NO: 3826683 - RNA, 16 nt, Human
ccccgcuaaggaagau

SEQ ID NO: 3826684 - RNA, 16 nt, Human
ccccgcucaugggccc

SEQ ID NO: 3826685 - RNA, 23 nt, Human
ccccgcucaugggccccucugac

SEQ ID NO: 3826686 - RNA, 13 nt, Human
ccccgcucugcau

SEQ ID NO: 3826687 - RNA, 14 nt, Human
ccccgcucugcaug

SEQ ID NO: 3826688 - RNA, 23 nt, Human
ccccgcucugcaugcggcccagc

SEQ ID NO: 3826689 - RNA, 22 nt, Human
ccccgcuggaggaugugggcag

SEQ ID NO: 3826690 - RNA, 23 nt, Human
ccccgcuggaggaugugggcagc

SEQ ID NO: 3826691 - RNA, 22 nt, Human
ccccgcuguaagcuccuuugug

SEQ ID NO: 3826692 - RNA, 19 nt, Human
ccccgcuuguccagcgccu

SEQ ID NO: 3826693 - RNA, 21 nt, Human
ccccggcaugagacucagugc

SEQ ID NO: 3826694 - RNA, 23 nt, Human
ccccggcaugagacucagugcag

SEQ ID NO: 3826695 - RNA, 14 nt, Human
ccccggccaccucu

SEQ ID NO: 3826696 - RNA, 18 nt, Human
ccccggccaccugcggug

SEQ ID NO: 3826697 - RNA, 21 nt, Human
ccccggcccugggcucggagg

SEQ ID NO: 3826698 - RNA, 14 nt, Human
ccccggccucagca

SEQ ID NO: 3826699 - RNA, 15 nt, Human
ccccgggcucucugc

SEQ ID NO: 3826700 - RNA, 18 nt, Human
ccccgggcucucugcugu

SEQ ID NO: 3826701 - RNA, 17 nt, Human
ccccggggacccuguga

SEQ ID NO: 3826702 - RNA, 15 nt, Human
ccccggggcuggguu

SEQ ID NO: 3826703 - RNA, 23 nt, Human
ccccggguuuggcgggccaagga

SEQ ID NO: 3826704 - RNA, 16 nt, Human
ccccggucccuugaga

SEQ ID NO: 3826705 - RNA, 18 nt, Human
ccccgguggcggccccag

SEQ ID NO: 3826706 - RNA, 13 nt, Human
ccccgucucaggu

SEQ ID NO: 3826707 - RNA, 20 nt, Human
ccccgucugggguucagccc

SEQ ID NO: 3826708 - RNA, 13 nt, Human
ccccguggggcag

SEQ ID NO: 3826709 - RNA, 17 nt, Human
ccccguguuccccucuu

SEQ ID NO: 3826710 - RNA, 21 nt, Human
ccccuaaaagcacuccugcuu

SEQ ID NO: 3826711 - RNA, 17 nt, Human
ccccuaaaccccugucc

SEQ ID NO: 3826712 - RNA, 23 nt, Human
ccccuaaugacaucaccacaguu

SEQ ID NO: 3826713 - RNA, 20 nt, Human
ccccuaccacugucuucuuc

SEQ ID NO: 3826714 - RNA, 22 nt, Human
ccccuaccccacaccaggccgu

SEQ ID NO: 3826715 - RNA, 18 nt, Human
ccccuacgcgccuugucu

SEQ ID NO: 3826716 - RNA, 16 nt, Human
ccccuagaaacccaag

SEQ ID NO: 3826717 - RNA, 14 nt, Human
ccccuagaguccca

SEQ ID NO: 3826718 - RNA, 12 nt, Human
ccccuagcccag

SEQ ID NO: 3826719 - RNA, 19 nt, Human
ccccuagccgguuccuguc

SEQ ID NO: 3826720 - RNA, 15 nt, Human
ccccuagccugccuc

SEQ ID NO: 3826721 - RNA, 19 nt, Human
ccccuaguaagugccuucc

SEQ ID NO: 3826722 - RNA, 20 nt, Human
ccccuaguaagugccuucca

SEQ ID NO: 3826723 - RNA, 21 nt, Human
ccccucaaaccuccucuucug

SEQ ID NO: 3826724 - RNA, 15 nt, Human
ccccucaacaccucu

SEQ ID NO: 3826725 - RNA, 23 nt, Human
ccccucaaggacaaagucuccag

SEQ ID NO: 3826726 - RNA, 17 nt, Human
ccccucacagccucuga

SEQ ID NO: 3826727 - RNA, 16 nt, Human
ccccucaccaggggca

SEQ ID NO: 3826728 - RNA, 17 nt, Human
ccccucaccaggggcag

SEQ ID NO: 3826729 - RNA, 13 nt, Human
ccccucacccugc

SEQ ID NO: 3826730 - RNA, 15 nt, Human
ccccucaccugggca

SEQ ID NO: 3826731 - RNA, 13 nt, Human
ccccucaccuugc

SEQ ID NO: 3826732 - RNA, 15 nt, Human
ccccucaccuugcaa

SEQ ID NO: 3826733 - RNA, 12 nt, Human
ccccucagcucc

SEQ ID NO: 3826734 - RNA, 18 nt, Human
ccccucagcucggcucag

SEQ ID NO: 3826735 - RNA, 22 nt, Human
ccccucagggucccugguggca

SEQ ID NO: 3826736 - RNA, 23 nt, Human
cccaagguuuaaacuucucugaa

SEQ ID NO: 3826737 - RNA, 23 nt, Human
cccaaguagcugggauuacaggu

SEQ ID NO: 3826738 - RNA, 20 nt, Human
cccaaguccaaauguuuaca

SEQ ID NO: 3826739 - RNA, 21 nt, Human
cccaaguccaggucgggcuca

SEQ ID NO: 3826740 - RNA, 23 nt, Human
cccaagucccuguuuucugagcc

SEQ ID NO: 3826741 - RNA, 13 nt, Human
cccaaguccugaa

SEQ ID NO: 3826742 - RNA, 23 nt, Human
cccaaguccugaagaggcgggcc

SEQ ID NO: 3826743 - RNA, 13 nt, Human
cccaagugagucu

SEQ ID NO: 3826744 - RNA, 19 nt, Human
cccaagugcacuuucuaau

SEQ ID NO: 3826745 - RNA, 16 nt, Human
cccaaguggcagagcu

SEQ ID NO: 3826746 - RNA, 23 nt, Human
cccaagugggggcagagggcaga

SEQ ID NO: 3826747 - RNA, 15 nt, Human
cccaaguuggggguc

SEQ ID NO: 3826748 - RNA, 21 nt, Human
cccaaguuuccauagcaacag

SEQ ID NO: 3826749 - RNA, 22 nt, Human
cccaaguuuuaggacaaacagc

SEQ ID NO: 3826750 - RNA, 23 nt, Human
cccaaguuuuaggacaaacagcu

SEQ ID NO: 3826751 - RNA, 19 nt, Human
cccaaguuuugugaaauuu

SEQ ID NO: 3826752 - RNA, 21 nt, Human
cccaaguuuugugaaauuuuu

SEQ ID NO: 3826753 - RNA, 16 nt, Human
cccaauaccccaugga

SEQ ID NO: 3826754 - RNA, 17 nt, Human
cccaauaccccauggac

SEQ ID NO: 3826755 - RNA, 17 nt, Human
cccaaucagcacugaaa

SEQ ID NO: 3826756 - RNA, 14 nt, Human
cccaauccagugga

SEQ ID NO: 3826757 - RNA, 23 nt, Human
cccaaucccagcuaccucaacca

SEQ ID NO: 3826758 - RNA, 14 nt, Human
cccaaucuccaucu

SEQ ID NO: 3826759 - RNA, 12 nt, Human
cccaaugaauua

SEQ ID NO: 3826760 - RNA, 17 nt, Human
cccaaugagacuugccu

SEQ ID NO: 3826761 - RNA, 18 nt, Human
cccaaugagacuugccuu

SEQ ID NO: 3826762 - RNA, 23 nt, Human
cccaaugcacuuuguucuggcuc

SEQ ID NO: 3826763 - RNA, 16 nt, Human
cccaauguaggagcug

SEQ ID NO: 3826764 - RNA, 15 nt, Human
cccaauuaggaagug

SEQ ID NO: 3826765 - RNA, 21 nt, Human
cccaauucuuacaaacaugug

SEQ ID NO: 3826766 - RNA, 15 nt, Human
cccaauugagaaaaa

SEQ ID NO: 3826767 - RNA, 14 nt, Human
cccaauugcuggag

SEQ ID NO: 3826768 - RNA, 14 nt, Human
cccaauuggaggaa

SEQ ID NO: 3826769 - RNA, 13 nt, Human
cccacaaaaaugu

SEQ ID NO: 3826770 - RNA, 19 nt, Human
cccacaacccaaaagguuu

SEQ ID NO: 3826771 - RNA, 20 nt, Human
cccacaagaaaugaaagcag

SEQ ID NO: 3826772 - RNA, 10 nt, Human
cccacacaca

SEQ ID NO: 3826773 - RNA, 12 nt, Human
cccacacacagg

SEQ ID NO: 3826774 - RNA, 14 nt, Human
cccacacacgccag

SEQ ID NO: 3826775 - RNA, 16 nt, Human
cccacacccaaagcug

SEQ ID NO: 3826776 - RNA, 22 nt, Human
cccacaccucaguucccuuggc

SEQ ID NO: 3826777 - RNA, 24 nt, Human
cccacaccuccacaguucaguggc

SEQ ID NO: 3826778 - RNA, 17 nt, Human
cccacaccuccucucac

SEQ ID NO: 3826779 - RNA, 16 nt, Human
cccacaccucugccag

SEQ ID NO: 3826780 - RNA, 15 nt, Human
cccacaccuggcccu

SEQ ID NO: 3826781 - RNA, 16 nt, Human
cccacaccuggcccug

SEQ ID NO: 3826782 - RNA, 14 nt, Human
cccacacuaaccug

SEQ ID NO: 3826783 - RNA, 14 nt, Human
cccacacucacucc

SEQ ID NO: 3826784 - RNA, 16 nt, Human
cccacacuucccuggc

SEQ ID NO: 3826785 - RNA, 17 nt, Human
cccacacuuguuccagc

SEQ ID NO: 3826786 - RNA, 19 nt, Human
cccacacuuguuccagcuc

SEQ ID NO: 3826787 - RNA, 21 nt, Human
cccacagaaagacugagcuca

SEQ ID NO: 3826788 - RNA, 23 nt, Human
cccacagacucaaaugcucagac

SEQ ID NO: 3826789 - RNA, 19 nt, Human
cccacagcacagcucccug

SEQ ID NO: 3826790 - RNA, 17 nt, Human
cccacagccucugccug

SEQ ID NO: 3826791 - RNA, 18 nt, Human
cccacagccucugccugu

SEQ ID NO: 3826792 - RNA, 19 nt, Human
cccacagcgcuggccggga

SEQ ID NO: 3826793 - RNA, 22 nt, Human
cccacaggaagccugcaguccu

SEQ ID NO: 3826794 - RNA, 19 nt, Human
cccacaggacauuucucua

SEQ ID NO: 3826795 - RNA, 22 nt, Human
cccacaggaggcaagcaagcuc

SEQ ID NO: 3826796 - RNA, 13 nt, Human
cccacaggaucag

SEQ ID NO: 3826797 - RNA, 17 nt, Human
cccacaggaucagucug

SEQ ID NO: 3826798 - RNA, 13 nt, Human
cccacaggcagcu

SEQ ID NO: 3826799 - RNA, 14 nt, Human
cccacaggcagcuu

SEQ ID NO: 3826800 - RNA, 21 nt, Human
cccacagucuccggccucucc

SEQ ID NO: 3826801 - RNA, 19 nt, Human
cccacagugucaggcacug

SEQ ID NO: 3826802 - RNA, 19 nt, Human
cccuccuugcucugcaggc

SEQ ID NO: 3826803 - RNA, 12 nt, Human
cccucgaggcgg

SEQ ID NO: 3826804 - RNA, 23 nt, Human
cccucgaggcggaucuuuggaca

SEQ ID NO: 3826805 - RNA, 13 nt, Human
cccucgcccccgc

SEQ ID NO: 3826806 - RNA, 12 nt, Human
cccucgccugug

SEQ ID NO: 3826807 - RNA, 14 nt, Human
cccucgcugcuucu

SEQ ID NO: 3826808 - RNA, 15 nt, Human
cccucgcugcuucug

SEQ ID NO: 3826809 - RNA, 23 nt, Human
cccucgcuuggacggcugggcac

SEQ ID NO: 3826810 - RNA, 18 nt, Human
cccucggaguucuucuug

SEQ ID NO: 3826811 - RNA, 18 nt, Human
cccucgggcccaccuggc

SEQ ID NO: 3826812 - RNA, 17 nt, Human
cccucgggcgagucacu

SEQ ID NO: 3826813 - RNA, 14 nt, Human
cccucguggccagc

SEQ ID NO: 3826814 - RNA, 16 nt, Human
cccucguggccagccc

SEQ ID NO: 3826815 - RNA, 15 nt, Human
cccucguggccuucc

SEQ ID NO: 3826816 - RNA, 13 nt, Human
cccucucaccaaa

SEQ ID NO: 3826817 - RNA, 21 nt, Human
cccucucagagcuacuugggc

SEQ ID NO: 3826818 - RNA, 18 nt, Human
cccucucagcccucacac

SEQ ID NO: 3826819 - RNA, 13 nt, Human
cccucucagcucc

SEQ ID NO: 3826820 - RNA, 14 nt, Human
cccucucagcucca

SEQ ID NO: 3826821 - RNA, 18 nt, Human
cccucuccauaaccccac

SEQ ID NO: 3826822 - RNA, 20 nt, Human
cccucucccaaaaaacuacu

SEQ ID NO: 3826823 - RNA, 11 nt, Human
cccucucccac

SEQ ID NO: 3826824 - RNA, 13 nt, Human
cccucucccaccc

SEQ ID NO: 3826825 - RNA, 17 nt, Human
cccucucccacccucuu

SEQ ID NO: 3826826 - RNA, 18 nt, Human
cccucuccccaccccuac

SEQ ID NO: 3826827 - RNA, 21 nt, Human
cccucuccccccccccuccaa

SEQ ID NO: 3826828 - RNA, 18 nt, Human
cccucuccccugcccccu

SEQ ID NO: 3826829 - RNA, 22 nt, Human
cccucuccccugcccccugcag

SEQ ID NO: 3826830 - RNA, 14 nt, Human
cccucucccugcau

SEQ ID NO: 3826831 - RNA, 16 nt, Human
cccucucccugcaugg

SEQ ID NO: 3826832 - RNA, 17 nt, Human
cccucucccugcauggc

SEQ ID NO: 3826833 - RNA, 22 nt, Human
cccucucccuugggcucugaug

SEQ ID NO: 3826834 - RNA, 11 nt, Human
cccucuccugc

SEQ ID NO: 3826835 - RNA, 13 nt, Human
cccucuccugccu

SEQ ID NO: 3826836 - RNA, 14 nt, Human
cccucuccugggca

SEQ ID NO: 3826837 - RNA, 20 nt, Human
cccucuccugggcagcugcc

SEQ ID NO: 3826838 - RNA, 22 nt, Human
cccucuccugggcagcugccuc

SEQ ID NO: 3826839 - RNA, 17 nt, Human
cccucuccuuccugugu

SEQ ID NO: 3826840 - RNA, 17 nt, Human
cccucucucuucugcuc

SEQ ID NO: 3826841 - RNA, 19 nt, Human
cccucucucuucugcucca

SEQ ID NO: 3826842 - RNA, 22 nt, Human
cccucucucuucugcuccaccc

SEQ ID NO: 3826843 - RNA, 18 nt, Human
cccucucugaaggaggcc

SEQ ID NO: 3826844 - RNA, 16 nt, Human
cccucucugcucugcg

SEQ ID NO: 3826845 - RNA, 13 nt, Human
cccucucuggaga

SEQ ID NO: 3826846 - RNA, 13 nt, Human
cccucucugggcc

SEQ ID NO: 3826847 - RNA, 13 nt, Human
cccucucuugcac

SEQ ID NO: 3826848 - RNA, 13 nt, Human
cccucugaaauac

SEQ ID NO: 3826849 - RNA, 22 nt, Human
cccucugaaugguccaggguug

SEQ ID NO: 3826850 - RNA, 16 nt, Human
cccucugaccugcacu

SEQ ID NO: 3826851 - RNA, 20 nt, Human
cccucugagaauuccaagga

SEQ ID NO: 3826852 - RNA, 12 nt, Human
cccucugccacc

SEQ ID NO: 3826853 - RNA, 13 nt, Human
cccucugccacca

SEQ ID NO: 3826854 - RNA, 19 nt, Human
cccucugcccagcuugggc

SEQ ID NO: 3826855 - RNA, 23 nt, Human
cccucugcccagcuugggcccag

SEQ ID NO: 3826856 - RNA, 18 nt, Human
cccucugccccauccucc

SEQ ID NO: 3826857 - RNA, 23 nt, Human
cccucugccugucccucucaggc

SEQ ID NO: 3826858 - RNA, 15 nt, Human
cccucugcucagcca

SEQ ID NO: 3826859 - RNA, 23 nt, Human
cccucugcuggccgggcacagcu

SEQ ID NO: 3826860 - RNA, 21 nt, Human
cccucuggagggguguggcuc

SEQ ID NO: 3826861 - RNA, 18 nt, Human
cccucuggaguggccacu

SEQ ID NO: 3826862 - RNA, 13 nt, Human
cccucuggcccug

SEQ ID NO: 3826863 - RNA, 14 nt, Human
cccucuggcccugc

SEQ ID NO: 3826864 - RNA, 16 nt, Human
cccucuggcuccagcu

SEQ ID NO: 3826865 - RNA, 12 nt, Human
cccucugggaac

SEQ ID NO: 3826866 - RNA, 20 nt, Human
cccucugggaaccucccaga

SEQ ID NO: 3826867 - RNA, 11 nt, Human
cccucugggcu

SEQ ID NO: 3826868 - RNA, 16 nt, Human
cccucugggcucugag

SEQ ID NO: 3826869 - RNA, 18 nt, Human
cccucuggucgcuccugc

SEQ ID NO: 3826870 - RNA, 19 nt, Human
cccucuggucgcuccugcc

SEQ ID NO: 3826871 - RNA, 15 nt, Human
cccucuguccugacu

SEQ ID NO: 3826872 - RNA, 18 nt, Human
cccucuguuccuucccug

SEQ ID NO: 3826873 - RNA, 20 nt, Human
cccucuguuucucuuuccuu

SEQ ID NO: 3826874 - RNA, 18 nt, Human
cccucuuauguaccucuu

SEQ ID NO: 3826875 - RNA, 19 nt, Human
cccucuuccuacuggucuc

SEQ ID NO: 3826876 - RNA, 13 nt, Human
cccucuuccucuu

SEQ ID NO: 3826877 - RNA, 18 nt, Human
cccucuuccucuugaccc

SEQ ID NO: 3826878 - RNA, 15 nt, Human
cccucuuccugugau

SEQ ID NO: 3826879 - RNA, 15 nt, Human
cccucuucucaagug

SEQ ID NO: 3826880 - RNA, 13 nt, Human
cccucuugcccau

SEQ ID NO: 3826881 - RNA, 16 nt, Human
cccucuugccccccac

SEQ ID NO: 3826882 - RNA, 15 nt, Human
cccucuuggagaagu

SEQ ID NO: 3826883 - RNA, 18 nt, Human
cccucuuggucuucccag

SEQ ID NO: 3826884 - RNA, 15 nt, Human
cccucuugucucccc

SEQ ID NO: 3826885 - RNA, 18 nt, Human
cccucuugucuccccugu

SEQ ID NO: 3826886 - RNA, 12 nt, Human
cccucuuucccu

SEQ ID NO: 3826887 - RNA, 19 nt, Human
cccucuuucucuuucuucc

SEQ ID NO: 3826888 - RNA, 21 nt, Human
cccucuuucucuuucuuccuu

SEQ ID NO: 3826889 - RNA, 15 nt, Human
cccucuuugcugcag

SEQ ID NO: 3826890 - RNA, 13 nt, Human
cccucuuuucuua

SEQ ID NO: 3826891 - RNA, 23 nt, Human
cccucuuuucuuacuccuccucu

SEQ ID NO: 3826892 - RNA, 21 nt, Human
cccucuuuuguuaaauaauau

SEQ ID NO: 3826893 - RNA, 14 nt, Human
cccugaaaacccag

SEQ ID NO: 3826894 - RNA, 15 nt, Human
cccugaaaacccaga

SEQ ID NO: 3826895 - RNA, 17 nt, Human
cccugaaaacccagaga

SEQ ID NO: 3826896 - RNA, 24 nt, Human
cccugaaaauguuuuucugccagg

SEQ ID NO: 3826897 - RNA, 19 nt, Human
cccugaaacacgaaacuug

SEQ ID NO: 3826898 - RNA, 21 nt, Human
cccugaaaccuaguacugccc

SEQ ID NO: 3826899 - RNA, 14 nt, Human
cccugaaacuuauu

SEQ ID NO: 3826900 - RNA, 22 nt, Human
cccugaaacuuauuuuuuucug

SEQ ID NO: 3826901 - RNA, 23 nt, Human
cccugaaacuuauuuuuuucuga

SEQ ID NO: 3826902 - RNA, 16 nt, Human
cccugaaagcccugag

SEQ ID NO: 3826903 - RNA, 17 nt, Human
cccugaagcugugcgga

SEQ ID NO: 3826904 - RNA, 23 nt, Human
cccugaaggaacauuccuuaguc

SEQ ID NO: 3826905 - RNA, 13 nt, Human
cccugaaggcccc

SEQ ID NO: 3826906 - RNA, 22 nt, Human
cccugaaggccccgcccaggcu

SEQ ID NO: 3826907 - RNA, 20 nt, Human
cccugaaucccccuugccac

SEQ ID NO: 3826908 - RNA, 21 nt, Human
cccugaaucccccuugccacc

SEQ ID NO: 3826909 - RNA, 23 nt, Human
cccugaaucccccuugccacccc

SEQ ID NO: 3826910 - RNA, 14 nt, Human
cccugacaacacuc

SEQ ID NO: 3826911 - RNA, 16 nt, Human
cccugacaacacucau

SEQ ID NO: 3826912 - RNA, 20 nt, Human
cccugacacugcggggcuug

SEQ ID NO: 3826913 - RNA, 13 nt, Human
cccugacagggcc

SEQ ID NO: 3826914 - RNA, 14 nt, Human
cccugaccacucag

SEQ ID NO: 3826915 - RNA, 15 nt, Human
cccugaccacucaga

SEQ ID NO: 3826916 - RNA, 15 nt, Human
cccugacccugugga

SEQ ID NO: 3826917 - RNA, 14 nt, Human
cccugaccucccag

SEQ ID NO: 3826918 - RNA, 17 nt, Human
cccugaccucccagccc

SEQ ID NO: 3826919 - RNA, 21 nt, Human
cccugaccucccagcccuaug

SEQ ID NO: 3826920 - RNA, 19 nt, Human
cccugaccuggcccccuca

SEQ ID NO: 3826921 - RNA, 16 nt, Human
cccugaccugugagcc

SEQ ID NO: 3826922 - RNA, 20 nt, Human
cccugaccugugagcccagc

SEQ ID NO: 3826923 - RNA, 21 nt, Human
cccugacucauucugaaggag

SEQ ID NO: 3826924 - RNA, 13 nt, Human
cccugacugggag

SEQ ID NO: 3826925 - RNA, 14 nt, Human
cccugacuuuucug

SEQ ID NO: 3826926 - RNA, 16 nt, Human
cccugagacaaaugga

SEQ ID NO: 3826927 - RNA, 17 nt, Human
cccugagacaaauggag

SEQ ID NO: 3826928 - RNA, 18 nt, Human
cccugagcaaugucugug

SEQ ID NO: 3826929 - RNA, 21 nt, Human
cccugagccagggucuccaga

SEQ ID NO: 3826930 - RNA, 13 nt, Human
cccugagcccacu

SEQ ID NO: 3826931 - RNA, 16 nt, Human
cccugagcccacugug

SEQ ID NO: 3826932 - RNA, 18 nt, Human
cccugagccccagggugc

SEQ ID NO: 3826933 - RNA, 12 nt, Human
cccugagccccu

SEQ ID NO: 3826934 - RNA, 19 nt, Human
cccugagcgaguggagucu

SEQ ID NO: 3826935 - RNA, 22 nt, Human
cccugagcucgguggacccagg

SEQ ID NO: 3826936 - RNA, 13 nt, Human
cccugagcugagg

SEQ ID NO: 3826937 - RNA, 14 nt, Human
cccugagcugaggc

SEQ ID NO: 3826938 - RNA, 14 nt, Human
cccugaggagccag

SEQ ID NO: 3826939 - RNA, 18 nt, Human
cccugaggagucugaggu

SEQ ID NO: 3826940 - RNA, 22 nt, Human
cccugaggaugggucagagcua

SEQ ID NO: 3826941 - RNA, 16 nt, Human
cccaugaaucaaagac

SEQ ID NO: 3826942 - RNA, 14 nt, Human
cccaugacccaccc

SEQ ID NO: 3826943 - RNA, 16 nt, Human
cccaugacccaccccu

SEQ ID NO: 3826944 - RNA, 14 nt, Human
cccaugaccuccag

SEQ ID NO: 3826945 - RNA, 21 nt, Human
cccaugagacccuggugccug

SEQ ID NO: 3826946 - RNA, 16 nt, Human
cccaugcaagcagagg

SEQ ID NO: 3826947 - RNA, 17 nt, Human
cccaugcaagcagagga

SEQ ID NO: 3826948 - RNA, 17 nt, Human
ccccaggggaaaaugaa

SEQ ID NO: 3826949 - RNA, 18 nt, Human
ccccaggggaaaaugaag

SEQ ID NO: 3826950 - RNA, 22 nt, Human
ccccaggggucccagccacccc

SEQ ID NO: 3826951 - RNA, 18 nt, Human
ccccaggguccugggagg

SEQ ID NO: 3826952 - RNA, 20 nt, Human
ccccaggguccugggaggag

SEQ ID NO: 3826953 - RNA, 20 nt, Human
ccccagguaggggccccucu

SEQ ID NO: 3826954 - RNA, 20 nt, Human
ccccaggucuuccaaguaca

SEQ ID NO: 3826955 - RNA, 21 nt, Human
ccccagguggcugacccaguc

SEQ ID NO: 3826956 - RNA, 20 nt, Human
cccugaggcagguccccaga

SEQ ID NO: 3826957 - RNA, 14 nt, Human
cccugaggcccaga

SEQ ID NO: 3826958 - RNA, 15 nt, Human
cccugaggcccagag

SEQ ID NO: 3826959 - RNA, 20 nt, Human
cccugaggcccagagggccu

SEQ ID NO: 3826960 - RNA, 12 nt, Human
cccugaggccua

SEQ ID NO: 3826961 - RNA, 17 nt, Human
cccugaggggucccuga

SEQ ID NO: 3826962 - RNA, 18 nt, Human
cccugaggucagggagug

SEQ ID NO: 3826963 - RNA, 18 nt, Human
cccugaggugaaagggag

SEQ ID NO: 3826964 - RNA, 15 nt, Human
cccugagucugggca

SEQ ID NO: 3826965 - RNA, 20 nt, Human
cccugaucaagucaccggag

SEQ ID NO: 3826966 - RNA, 16 nt, Human
cccugaucccauuuuc

SEQ ID NO: 3826967 - RNA, 15 nt, Human
cccugaucccuucca

SEQ ID NO: 3826968 - RNA, 15 nt, Human
cccugauccugugaa

SEQ ID NO: 3826969 - RNA, 22 nt, Human
cccugaucugacauccccacuc

SEQ ID NO: 3826970 - RNA, 20 nt, Human
cccugauguguccucaggga

SEQ ID NO: 3826971 - RNA, 18 nt, Human
cccugauugaccugcucc

SEQ ID NO: 3826972 - RNA, 23 nt, Human
cccugauugaccugcuccgcugc

SEQ ID NO: 3826973 - RNA, 16 nt, Human
cccugauuucuugcuu

SEQ ID NO: 3826974 - RNA, 19 nt, Human
cccugcaaaaugagacccu

SEQ ID NO: 3826975 - RNA, 13 nt, Human
cccugcaaacaga

SEQ ID NO: 3826976 - RNA, 17 nt, Human
cccugcaaagcccagcu

SEQ ID NO: 3826977 - RNA, 19 nt, Human
cccugcaaagcccagcuug

SEQ ID NO: 3826978 - RNA, 14 nt, Human
cccugcaaggccca

SEQ ID NO: 3826979 - RNA, 15 nt, Human
cccugcaaggcccac

SEQ ID NO: 3826980 - RNA, 17 nt, Human
cccugcaaggcccacag

SEQ ID NO: 3826981 - RNA, 18 nt, Human
cccugcaaggcccacagg

SEQ ID NO: 3826982 - RNA, 23 nt, Human
cccugcacaaagcccuuccaugu

SEQ ID NO: 3826983 - RNA, 15 nt, Human
cccugcacagcaggc

SEQ ID NO: 3826984 - RNA, 22 nt, Human
cccugcacagugacuucugaga

SEQ ID NO: 3826985 - RNA, 13 nt, Human
cccugcacccucc

SEQ ID NO: 3826986 - RNA, 14 nt, Human
cccugcacccuccu

SEQ ID NO: 3826987 - RNA, 15 nt, Human
cccugcacgucaugg

SEQ ID NO: 3826988 - RNA, 20 nt, Human
cccugcacuaaagccagccu

SEQ ID NO: 3826989 - RNA, 22 nt, Human
cccugcacuggaguccagucuc

SEQ ID NO: 3826990 - RNA, 13 nt, Human
cccugcacugucc

SEQ ID NO: 3826991 - RNA, 15 nt, Human
cccugcacuguccug

SEQ ID NO: 3826992 - RNA, 16 nt, Human
cccugcacuguccugc

SEQ ID NO: 3826993 - RNA, 18 nt, Human
cccugcacuguccugcuc

SEQ ID NO: 3826994 - RNA, 22 nt, Human
cccugcacuguccugcuccaca

SEQ ID NO: 3826995 - RNA, 23 nt, Human
cccugcacuguccugcuccacag

SEQ ID NO: 3826996 - RNA, 12 nt, Human
cccugcacuugc

SEQ ID NO: 3826997 - RNA, 16 nt, Human
cccugcagacccugcc

SEQ ID NO: 3826998 - RNA, 12 nt, Human
cccugcagaggg

SEQ ID NO: 3826999 - RNA, 20 nt, Human
cccugcagaugccacccuag

SEQ ID NO: 3827000 - RNA, 14 nt, Human
cccugcagccagcu

SEQ ID NO: 3827001 - RNA, 15 nt, Human
cccugcagcccuggc

SEQ ID NO: 3827002 - RNA, 17 nt, Human
cccugcagcuaguccua

SEQ ID NO: 3827003 - RNA, 17 nt, Human
cccugcaggaaggagcu

SEQ ID NO: 3827004 - RNA, 18 nt, Human
cccugcaggaaggagcug

SEQ ID NO: 3827005 - RNA, 19 nt, Human
cccugcaggaaggagcugc

SEQ ID NO: 3827006 - RNA, 20 nt, Human
cccugcaggaaggagcugcc

SEQ ID NO: 3827007 - RNA, 18 nt, Human
cccugcaggcugagugca

SEQ ID NO: 3827008 - RNA, 20 nt, Human
cccugcaguguucgcuuggc

SEQ ID NO: 3827009 - RNA, 21 nt, Human
cccugcaguuccccuggaagc

SEQ ID NO: 3827010 - RNA, 16 nt, Human
cccugcaucugaccag

SEQ ID NO: 3827011 - RNA, 16 nt, Human
cccugcauggcugagc

SEQ ID NO: 3827012 - RNA, 14 nt, Human
cccugcaugggcca

SEQ ID NO: 3827013 - RNA, 21 nt, Human
cccugcauucuuucuguauug

SEQ ID NO: 3827014 - RNA, 21 nt, Human
cccugcauuggaacuggaggc

SEQ ID NO: 3827015 - RNA, 14 nt, Human
cccugccacccugg

SEQ ID NO: 3827016 - RNA, 14 nt, Human
cccugccaccuccu

SEQ ID NO: 3827017 - RNA, 20 nt, Human
cccugccaccuccugccuca

SEQ ID NO: 3827018 - RNA, 13 nt, Human
cccugccaccugu

SEQ ID NO: 3827019 - RNA, 20 nt, Human
cccugccacucacuaggccc

SEQ ID NO: 3827020 - RNA, 13 nt, Human
cccugccagaccc

SEQ ID NO: 3827021 - RNA, 16 nt, Human
cccugccagaggggaa

SEQ ID NO: 3827022 - RNA, 14 nt, Human
cccugccagcaccc

SEQ ID NO: 3827023 - RNA, 18 nt, Human
cccugccaggcacaggca

SEQ ID NO: 3827024 - RNA, 21 nt, Human
cccugccaggcacaggcaggg

SEQ ID NO: 3827025 - RNA, 23 nt, Human
cccugccaggcacaggcagggca

SEQ ID NO: 3827026 - RNA, 18 nt, Human
cccugcccaggccggcca

SEQ ID NO: 3827027 - RNA, 13 nt, Human
cccugcccaugcu

SEQ ID NO: 3827028 - RNA, 13 nt, Human
cccugccccaaau

SEQ ID NO: 3827029 - RNA, 19 nt, Human
cccugccccacaccuccuc

SEQ ID NO: 3827030 - RNA, 17 nt, Human
cccugccccagcccaag

SEQ ID NO: 3827031 - RNA, 20 nt, Human
cccugccccagcccaagucc

SEQ ID NO: 3827032 - RNA, 16 nt, Human
cccugcccccacuucc

SEQ ID NO: 3827033 - RNA, 17 nt, Human
cccugcccccacuuccu

SEQ ID NO: 3827034 - RNA, 18 nt, Human
cccugcccccagccccgg

SEQ ID NO: 3827035 - RNA, 18 nt, Human
cccugcccccugcaggaa

SEQ ID NO: 3827036 - RNA, 15 nt, Human
cccugccccgucacc

SEQ ID NO: 3827037 - RNA, 17 nt, Human
cccugccccucccuuca

SEQ ID NO: 3827038 - RNA, 13 nt, Human
cccugccccugcc

SEQ ID NO: 3827039 - RNA, 18 nt, Human
cccugccccugccccguc

SEQ ID NO: 3827040 - RNA, 16 nt, Human
cccugcccguguacau

SEQ ID NO: 3827041 - RNA, 13 nt, Human
cccugcccucauc

SEQ ID NO: 3827042 - RNA, 13 nt, Human
cccugcccucgug

SEQ ID NO: 3827043 - RNA, 16 nt, Human
cccugcccucguggcc

SEQ ID NO: 3827044 - RNA, 18 nt, Human
cccugcccucguggccag

SEQ ID NO: 3827045 - RNA, 19 nt, Human
cccugcccucguggccagc

SEQ ID NO: 3827046 - RNA, 21 nt, Human
cccugcccucguggccagccc

SEQ ID NO: 3827047 - RNA, 22 nt, Human
cccugcccucguggccagcccg

SEQ ID NO: 3827048 - RNA, 15 nt, Human
cccugcccugccacc

SEQ ID NO: 3827049 - RNA, 13 nt, Human
cccugcccugcug

SEQ ID NO: 3827050 - RNA, 11 nt, Human
cccugcccugg

SEQ ID NO: 3827051 - RNA, 12 nt, Human
cccugcccuggu

SEQ ID NO: 3827052 - RNA, 14 nt, Human
cccugcccuggucc

SEQ ID NO: 3827053 - RNA, 22 nt, Human
cccugcccugguuuccugcccu

SEQ ID NO: 3827054 - RNA, 23 nt, Human
cccugcccugguuuccugcccug

SEQ ID NO: 3827055 - RNA, 12 nt, Human
cccugcccugug

SEQ ID NO: 3827056 - RNA, 14 nt, Human
cccugcccuguggg

SEQ ID NO: 3827057 - RNA, 16 nt, Human
cccugcccugugggcc

SEQ ID NO: 3827058 - RNA, 21 nt, Human
cccugcccugugggcccccaa

SEQ ID NO: 3827059 - RNA, 23 nt, Human
cccugcccuuguuuggggcagga

SEQ ID NO: 3827060 - RNA, 13 nt, Human
cccugccgccuca

SEQ ID NO: 3827061 - RNA, 13 nt, Human
cccugccggccgg

SEQ ID NO: 3827062 - RNA, 16 nt, Human
cccugccgucaccacc

SEQ ID NO: 3827063 - RNA, 19 nt, Human
cccugccgucaccaccacc

SEQ ID NO: 3827064 - RNA, 14 nt, Human
cccugccuccaccc

SEQ ID NO: 3827065 - RNA, 15 nt, Human
cccugccuccacccu

SEQ ID NO: 3827066 - RNA, 16 nt, Human
cccugccuccacccuc

SEQ ID NO: 3827067 - RNA, 21 nt, Human
cccugccuccacccucugagc

SEQ ID NO: 3827068 - RNA, 22 nt, Human
cccugccuccacccucugagcu

SEQ ID NO: 3827069 - RNA, 23 nt, Human
cccugccuccuuugugaggaagc

SEQ ID NO: 3827070 - RNA, 14 nt, Human
cccugccucuccca

SEQ ID NO: 3827071 - RNA, 15 nt, Human
cccugccucucccag

SEQ ID NO: 3827072 - RNA, 14 nt, Human
cccugccucucugc

SEQ ID NO: 3827073 - RNA, 21 nt, Human
cccugccugagggccccucug

SEQ ID NO: 3827074 - RNA, 13 nt, Human
cccugccugccau

SEQ ID NO: 3827075 - RNA, 14 nt, Human
cccugccugccaug

SEQ ID NO: 3827076 - RNA, 18 nt, Human
cccugccuggaccagccu

SEQ ID NO: 3827077 - RNA, 12 nt, Human
cccugccuggag

SEQ ID NO: 3827078 - RNA, 15 nt, Human
cccugccuggaggac

SEQ ID NO: 3827079 - RNA, 24 nt, Human
cccugccuggaggaccugagccug

SEQ ID NO: 3827080 - RNA, 13 nt, Human
cccugccuggccc

SEQ ID NO: 3827081 - RNA, 17 nt, Human
cccugccuggcccccaa

SEQ ID NO: 3827082 - RNA, 19 nt, Human
cccugcgaaggggcccugg

SEQ ID NO: 3827083 - RNA, 20 nt, Human
cccugcgaaggggcccuggu

SEQ ID NO: 3827084 - RNA, 14 nt, Human
cccugcgccuuucc

SEQ ID NO: 3827085 - RNA, 19 nt, Human
cccugcgggucacaggagg

SEQ ID NO: 3827086 - RNA, 22 nt, Human
cccugcgggugaacaaagcagc

SEQ ID NO: 3827087 - RNA, 22 nt, Human
cccugcuacugccaaccucgcu

SEQ ID NO: 3827088 - RNA, 16 nt, Human
cccugcucaguaaagc

SEQ ID NO: 3827089 - RNA, 12 nt, Human
cccugcucccuc

SEQ ID NO: 3827090 - RNA, 23 nt, Human
cccugcucccuccgggucuuccu

SEQ ID NO: 3827091 - RNA, 19 nt, Human
cccugcucccucucccccu

SEQ ID NO: 3827092 - RNA, 15 nt, Human
cccugcuccucccug

SEQ ID NO: 3827093 - RNA, 17 nt, Human
cccuuucccaccccaac

SEQ ID NO: 3827094 - RNA, 23 nt, Human
cccuuuccccgacgcccacccaa

SEQ ID NO: 3827095 - RNA, 13 nt, Human
cccuuuccuucca

SEQ ID NO: 3827096 - RNA, 15 nt, Human
cccuuuccuuccauc

SEQ ID NO: 3827097 - RNA, 18 nt, Human
cccuuuccuuccaucccu

SEQ ID NO: 3827098 - RNA, 18 nt, Human
cccuuuccuuccuucccu

SEQ ID NO: 3827099 - RNA, 21 nt, Human
cccuuuccuuccuucccuggc

SEQ ID NO: 3827100 - RNA, 18 nt, Human
cccuuucggauccaggga

SEQ ID NO: 3827101 - RNA, 18 nt, Human
cccuuucuacuuccaaga

SEQ ID NO: 3827102 - RNA, 17 nt, Human
cccuuucuagaccaaua

SEQ ID NO: 3827103 - RNA, 14 nt, Human
cccuuucuggcucu

SEQ ID NO: 3827104 - RNA, 17 nt, Human
cccuuucuucuccccca

SEQ ID NO: 3827105 - RNA, 17 nt, Human
cccuuucuugacaaaac

SEQ ID NO: 3827106 - RNA, 21 nt, Human
cccuuugaagccucagcuacc

SEQ ID NO: 3827107 - RNA, 16 nt, Human
cccuuugaccuuguuu

SEQ ID NO: 3827108 - RNA, 20 nt, Human
cccuuugacgccaucccagc

SEQ ID NO: 3827109 - RNA, 12 nt, Human
cccuuugagugc

SEQ ID NO: 3827110 - RNA, 14 nt, Human
cccuuugagugcag

SEQ ID NO: 3827111 - RNA, 17 nt, Human
cccuuugcccagaaaga

SEQ ID NO: 3827112 - RNA, 23 nt, Human
cccuuuggagaugcugagggugu

SEQ ID NO: 3827113 - RNA, 20 nt, Human
cccuuugggaggcugaggcg

SEQ ID NO: 3827114 - RNA, 15 nt, Human
cccuuugggcccagg

SEQ ID NO: 3827115 - RNA, 18 nt, Human
cccuuugggcccagggac

SEQ ID NO: 3827116 - RNA, 13 nt, Human
cccuuugggcccu

SEQ ID NO: 3827117 - RNA, 20 nt, Human
cccuuugggcccugcaugua

SEQ ID NO: 3827118 - RNA, 17 nt, Human
cccuuuguccuccugcu

SEQ ID NO: 3827119 - RNA, 23 nt, Human
cccuuugugugcucuccauucug

SEQ ID NO: 3827120 - RNA, 19 nt, Human
cccuuuguuucuuguuuau

SEQ ID NO: 3827121 - RNA, 13 nt, Human
cccuuuuauacua

SEQ ID NO: 3827122 - RNA, 12 nt, Human
cccuuuuccccu

SEQ ID NO: 3827123 - RNA, 13 nt, Human
cccuuuuccccua

SEQ ID NO: 3827124 - RNA, 17 nt, Human
cccuuuugcauucuccc

SEQ ID NO: 3827125 - RNA, 20 nt, Human
cccuuuuguugagccaggcc

SEQ ID NO: 3827126 - RNA, 17 nt, Human
cccuuuuucaauaacug

SEQ ID NO: 3827127 - RNA, 15 nt, Human
cccuuuuugaagugu

SEQ ID NO: 3827128 - RNA, 15 nt, Human
cccuuuuuuccuuuc

SEQ ID NO: 3827129 - RNA, 21 nt, Human
cccuuuuuucugccuccuuua

SEQ ID NO: 3827130 - RNA, 17 nt, Human
cccuuuuuuggcugcug

SEQ ID NO: 3827131 - RNA, 22 nt, Human
ccgaaaaauccucuuccucuga

SEQ ID NO: 3827132 - RNA, 22 nt, Human
ccgaaaggucaccucacucagc

SEQ ID NO: 3827133 - RNA, 23 nt, Human
ccgaaauaucuauguuuuaccaa

SEQ ID NO: 3827134 - RNA, 16 nt, Human
ccgaaccuccucugug

SEQ ID NO: 3827135 - RNA, 18 nt, Human
ccgaacugggcauauuuc

SEQ ID NO: 3827136 - RNA, 19 nt, Human
ccgaagaaggguccuuccc

SEQ ID NO: 3827137 - RNA, 17 nt, Human
ccgaagcccaggggccg

SEQ ID NO: 3827138 - RNA, 16 nt, Human
ccgaagcucuggcuga

SEQ ID NO: 3827139 - RNA, 13 nt, Human
ccgaagucuuuug

SEQ ID NO: 3827140 - RNA, 11 nt, Human
ccgaauaaaug

SEQ ID NO: 3827141 - RNA, 13 nt, Human
ccgaaugugucuu

SEQ ID NO: 3827142 - RNA, 15 nt, Human
ccgacaaccgaugcu

SEQ ID NO: 3827143 - RNA, 17 nt, Human
ccgacacgcucccuccc

SEQ ID NO: 3827144 - RNA, 14 nt, Human
ccgacagccuggca

SEQ ID NO: 3827145 - RNA, 14 nt, Human
ccgacaggcccugg

SEQ ID NO: 3827146 - RNA, 15 nt, Human
ccgacaggcccuggc

SEQ ID NO: 3827147 - RNA, 14 nt, Human
ccgacauugucucc

SEQ ID NO: 3827148 - RNA, 15 nt, Human
ccgacauugucuccc

SEQ ID NO: 3827149 - RNA, 15 nt, Human
ccgaccaccugccca

SEQ ID NO: 3827150 - RNA, 18 nt, Human
ccgaccagaggagccuuu

SEQ ID NO: 3827151 - RNA, 16 nt, Human
ccgacccucugggaac

SEQ ID NO: 3827152 - RNA, 17 nt, Human
ccgacccucugggaacc

SEQ ID NO: 3827153 - RNA, 18 nt, Human
ccgacccucugggaaccu

SEQ ID NO: 3827154 - RNA, 16 nt, Human
ccgacccuugccgucu

SEQ ID NO: 3827155 - RNA, 21 nt, Human
ccgaccgaggcuggagcuggc

SEQ ID NO: 3827156 - RNA, 23 nt, Human
ccgaccucguccucccccugcca

SEQ ID NO: 3827157 - RNA, 16 nt, Human
ccgaccuuagauuuag

SEQ ID NO: 3827158 - RNA, 14 nt, Human
ccgacuagacacac

SEQ ID NO: 3827159 - RNA, 20 nt, Human
ccgacuagacacacaaagca

SEQ ID NO: 3827160 - RNA, 16 nt, Human
ccgacuccagccagcg

SEQ ID NO: 3827161 - RNA, 19 nt, Human
ccgacucuggcccuggccc

SEQ ID NO: 3827162 - RNA, 23 nt, Human
ccgacugcacagcggccccugca

SEQ ID NO: 3827163 - RNA, 14 nt, Human
ccgacugcuuugga

SEQ ID NO: 3827164 - RNA, 23 nt, Human
ccgacuugaauuuucccacugca

SEQ ID NO: 3827165 - RNA, 16 nt, Human
ccgacuugcuguuuug

SEQ ID NO: 3827166 - RNA, 22 nt, Human
ccgacuuuguaccccccaaccc

SEQ ID NO: 3827167 - RNA, 22 nt, Human
ccgacuuuuguuuaccagagaa

SEQ ID NO: 3827168 - RNA, 13 nt, Human
ccgagaagcaaga

SEQ ID NO: 3827169 - RNA, 15 nt, Human
cccucccacccaccg

SEQ ID NO: 3827170 - RNA, 16 nt, Human
cccucccacccccagc

SEQ ID NO: 3827171 - RNA, 17 nt, Human
cccucccacccccagcc

SEQ ID NO: 3827172 - RNA, 17 nt, Human
cccucccaccucuguga

SEQ ID NO: 3827173 - RNA, 13 nt, Human
cccucccagcuga

SEQ ID NO: 3827174 - RNA, 20 nt, Human
cccucccaggacucugaccc

SEQ ID NO: 3827175 - RNA, 13 nt, Human
cccucccauuagg

SEQ ID NO: 3827176 - RNA, 22 nt, Human
cccuccccaugcaggugguguc

SEQ ID NO: 3827177 - RNA, 18 nt, Human
cccucccccccaugcacu

SEQ ID NO: 3827178 - RNA, 13 nt, Human
cccucccccugcc

SEQ ID NO: 3827179 - RNA, 13 nt, Human
cccucccccuucu

SEQ ID NO: 3827180 - RNA, 12 nt, Human
cccucccccuug

SEQ ID NO: 3827181 - RNA, 13 nt, Human
cccucccccuugu

SEQ ID NO: 3827182 - RNA, 21 nt, Human
cccuccccggcacccucuggc

SEQ ID NO: 3827183 - RNA, 14 nt, Human
cccuccccucucuu

SEQ ID NO: 3827184 - RNA, 15 nt, Human
cccuccccucucuug

SEQ ID NO: 3827185 - RNA, 13 nt, Human
cccuccccugccc

SEQ ID NO: 3827186 - RNA, 14 nt, Human
cccuccccugcugc

SEQ ID NO: 3827187 - RNA, 14 nt, Human
cccuccccuucucu

SEQ ID NO: 3827188 - RNA, 17 nt, Human
cccucccggcccugccu

SEQ ID NO: 3827189 - RNA, 22 nt, Human
cccucccgucuacucauucccc

SEQ ID NO: 3827190 - RNA, 15 nt, Human
cccucccuaccucaa

SEQ ID NO: 3827191 - RNA, 13 nt, Human
cccucccuccucu

SEQ ID NO: 3827192 - RNA, 14 nt, Human
cccucccugccccu

SEQ ID NO: 3827193 - RNA, 13 nt, Human
cccucccuggagu

SEQ ID NO: 3827194 - RNA, 15 nt, Human
cccucccuggccugu

SEQ ID NO: 3827195 - RNA, 16 nt, Human
cccucccuggcuccca

SEQ ID NO: 3827196 - RNA, 19 nt, Human
cccucccuggcucccauga

SEQ ID NO: 3827197 - RNA, 16 nt, Human
cccucccuggguucag

SEQ ID NO: 3827198 - RNA, 13 nt, Human
cccucccuguccu

SEQ ID NO: 3827199 - RNA, 20 nt, Human
cccucccuguuccccagaga

SEQ ID NO: 3827200 - RNA, 17 nt, Human
cccucccuucucccugg

SEQ ID NO: 3827201 - RNA, 21 nt, Human
cccucccuuggaaaccugccc

SEQ ID NO: 3827202 - RNA, 22 nt, Human
cccucccuuggaaaccugcccu

SEQ ID NO: 3827203 - RNA, 23 nt, Human
cccucccuuggaaaccugcccug

SEQ ID NO: 3827204 - RNA, 13 nt, Human
cccucccuuucuc

SEQ ID NO: 3827205 - RNA, 14 nt, Human
cccuccgcccugcc

SEQ ID NO: 3827206 - RNA, 13 nt, Human
cccuccgccuuca

SEQ ID NO: 3827207 - RNA, 18 nt, Human
cccuccgcggcgggcccu

SEQ ID NO: 3827208 - RNA, 21 nt, Human
cccuccgcggcgggcccugcc

SEQ ID NO: 3827209 - RNA, 19 nt, Human
cccuccggacuggugcccu

SEQ ID NO: 3827210 - RNA, 23 nt, Human
cccuccguggcaucaccuuaggc

SEQ ID NO: 3827211 - RNA, 20 nt, Human
cccuccuaccccucccagcu

SEQ ID NO: 3827212 - RNA, 22 nt, Human
cccuccuaccccucccagcuga

SEQ ID NO: 3827213 - RNA, 20 nt, Human
cccuccuaucaccuccccuc

SEQ ID NO: 3827214 - RNA, 21 nt, Human
cccuccuaucaccuccccucc

SEQ ID NO: 3827215 - RNA, 13 nt, Human
cccuccucacccc

SEQ ID NO: 3827216 - RNA, 12 nt, Human
cccuccucacug

SEQ ID NO: 3827217 - RNA, 15 nt, Human
cccuccucacuggcc

SEQ ID NO: 3827218 - RNA, 16 nt, Human
cccuccucacuggcca

SEQ ID NO: 3827219 - RNA, 21 nt, Human
cccuccucacuggccaucccu

SEQ ID NO: 3827220 - RNA, 15 nt, Human
cccuccuccaggccu

SEQ ID NO: 3827221 - RNA, 20 nt, Human
cccuccucccaugucacugc

SEQ ID NO: 3827222 - RNA, 23 nt, Human
cccuccucccuuuuuccuugucc

SEQ ID NO: 3827223 - RNA, 11 nt, Human
cccuccuccug

SEQ ID NO: 3827224 - RNA, 19 nt, Human
cccuccucuagcugugggg

SEQ ID NO: 3827225 - RNA, 14 nt, Human
cccuccucucccau

SEQ ID NO: 3827226 - RNA, 16 nt, Human
cccuccucucugcccu

SEQ ID NO: 3827227 - RNA, 13 nt, Human
cccuccucugaaa

SEQ ID NO: 3827228 - RNA, 12 nt, Human
cccuccucugcc

SEQ ID NO: 3827229 - RNA, 13 nt, Human
cccuccucugcca

SEQ ID NO: 3827230 - RNA, 23 nt, Human
cccuccugaaccgcacagcucag

SEQ ID NO: 3827231 - RNA, 18 nt, Human
cccuccugccgacuccug

SEQ ID NO: 3827232 - RNA, 19 nt, Human
cccuccugccgacuccugg

SEQ ID NO: 3827233 - RNA, 20 nt, Human
cccuccugccgacuccuggg

SEQ ID NO: 3827234 - RNA, 13 nt, Human
cccuccuggggcc

SEQ ID NO: 3827235 - RNA, 10 nt, Human
cccuccuggu

SEQ ID NO: 3827236 - RNA, 22 nt, Human
cccuccuggugucaccccagag

SEQ ID NO: 3827237 - RNA, 13 nt, Human
cccuccuguaaau

SEQ ID NO: 3827238 - RNA, 13 nt, Human
cccuccuguugca

SEQ ID NO: 3827239 - RNA, 21 nt, Human
ccuacucuucucucugcucug

SEQ ID NO: 3827240 - RNA, 16 nt, Human
ccuacugcccaggcac

SEQ ID NO: 3827241 - RNA, 16 nt, Human
ccuacuggucucucua

SEQ ID NO: 3827242 - RNA, 22 nt, Human
ccuacuguucuaaagcucugac

SEQ ID NO: 3827243 - RNA, 21 nt, Human
ccuacuuccccuuccuaauuc

SEQ ID NO: 3827244 - RNA, 13 nt, Human
ccuacuuccugug

SEQ ID NO: 3827245 - RNA, 17 nt, Human
ccuacuuuuaaagaauu

SEQ ID NO: 3827246 - RNA, 16 nt, Human
ccuacuuuuccuuccc

SEQ ID NO: 3827247 - RNA, 20 nt, Human
ccuagaaacaacacuguagu

SEQ ID NO: 3827248 - RNA, 17 nt, Human
ccuagaaacccaagcuc

SEQ ID NO: 3827249 - RNA, 13 nt, Human
ccuagaagggcua

SEQ ID NO: 3827250 - RNA, 22 nt, Human
ccuagaagggcuagaaccugga

SEQ ID NO: 3827251 - RNA, 18 nt, Human
ccuagaauguuucauuug

SEQ ID NO: 3827252 - RNA, 21 nt, Human
ccuagacucuguaacaucacu

SEQ ID NO: 3827253 - RNA, 20 nt, Human
ccuagacucugucuaccugg

SEQ ID NO: 3827254 - RNA, 12 nt, Human
ccuagacuuuag

SEQ ID NO: 3827255 - RNA, 23 nt, Human
ccuagacuuuaggcuuucagcuu

SEQ ID NO: 3827256 - RNA, 21 nt, Human
ccuagagagugugauguucac

SEQ ID NO: 3827257 - RNA, 16 nt, Human
ccuagagccagaccaa

SEQ ID NO: 3827258 - RNA, 17 nt, Human
ccuagaggcccuuugcu

SEQ ID NO: 3827259 - RNA, 12 nt, Human
ccuagaggccug

SEQ ID NO: 3827260 - RNA, 15 nt, Human
ccuagagggaggggc

SEQ ID NO: 3827261 - RNA, 18 nt, Human
ccuagagggaggggccua

SEQ ID NO: 3827262 - RNA, 18 nt, Human
ccuagaguagaguggagg

SEQ ID NO: 3827263 - RNA, 14 nt, Human
ccuagauaugaaua

SEQ ID NO: 3827264 - RNA, 17 nt, Human
ccuagauccacacacag

SEQ ID NO: 3827265 - RNA, 19 nt, Human
ccuagauccacacacagag

SEQ ID NO: 3827266 - RNA, 21 nt, Human
ccuagauguauaacuaggagc

SEQ ID NO: 3827267 - RNA, 15 nt, Human
ccuagcaagcuggcc

SEQ ID NO: 3827268 - RNA, 13 nt, Human
ccuagcaauucca

SEQ ID NO: 3827269 - RNA, 17 nt, Human
ccuagcacacacuuuug

SEQ ID NO: 3827270 - RNA, 16 nt, Human
ccuagcacagcagcuu

SEQ ID NO: 3827271 - RNA, 16 nt, Human
ccuagcacaugcuuca

SEQ ID NO: 3827272 - RNA, 12 nt, Human
ccuagcagagag

SEQ ID NO: 3827273 - RNA, 20 nt, Human
ccuagcagcaccguucugug

SEQ ID NO: 3827274 - RNA, 21 nt, Human
ccuagcagcaccguucugugc

SEQ ID NO: 3827275 - RNA, 15 nt, Human
ccuagcagcccaccc

SEQ ID NO: 3827276 - RNA, 17 nt, Human
ccuagcagcccacccug

SEQ ID NO: 3827277 - RNA, 15 nt, Human
ccuagccauuccugg

SEQ ID NO: 3827278 - RNA, 23 nt, Human
ccuagcccagcgcucugccucac

SEQ ID NO: 3827279 - RNA, 13 nt, Human
ccuagcccaggag

SEQ ID NO: 3827280 - RNA, 17 nt, Human
ccuagcccaggagagag

SEQ ID NO: 3827281 - RNA, 20 nt, Human
ccuagcccucucacauuuau

SEQ ID NO: 3827282 - RNA, 20 nt, Human
ccuagccgaccucagccuuc

SEQ ID NO: 3827283 - RNA, 20 nt, Human
ccuagccgguuccugucccu

SEQ ID NO: 3827284 - RNA, 19 nt, Human
ccuagccuuagaagucaca

SEQ ID NO: 3827285 - RNA, 10 nt, Human
ccuagccuug

SEQ ID NO: 3827286 - RNA, 15 nt, Human
ccuagccuugcuugu

SEQ ID NO: 3827287 - RNA, 19 nt, Human
ccuagcgaucucuccuggc

SEQ ID NO: 3827288 - RNA, 21 nt, Human
ccuagcgaucucuccuggccu

SEQ ID NO: 3827289 - RNA, 22 nt, Human
ccuagcgaucucuccuggccua

SEQ ID NO: 3827290 - RNA, 20 nt, Human
ccuagcgggauggggcuccc

SEQ ID NO: 3827291 - RNA, 14 nt, Human
ccuagcugaauguu

SEQ ID NO: 3827292 - RNA, 19 nt, Human
ccuagcugaauguuuuucu

SEQ ID NO: 3827293 - RNA, 21 nt, Human
ccuagcugcacagggcagcug

SEQ ID NO: 3827294 - RNA, 23 nt, Human
ccuagcugcacagggcagcuggg

SEQ ID NO: 3827295 - RNA, 15 nt, Human
ccuagcugcuacaaa

SEQ ID NO: 3827296 - RNA, 17 nt, Human
ccuagcugcuacaaaga

SEQ ID NO: 3827297 - RNA, 19 nt, Human
ccuagcuggagaggagccc

SEQ ID NO: 3827298 - RNA, 22 nt, Human
ccuagcuggagaggagcccugc

SEQ ID NO: 3827299 - RNA, 13 nt, Human
ccuagcuggcucu

SEQ ID NO: 3827300 - RNA, 21 nt, Human
ccuagcugugaccucuccccu

SEQ ID NO: 3827301 - RNA, 16 nt, Human
ccuagcugugugaaua

SEQ ID NO: 3827302 - RNA, 15 nt, Human
ccuagcuuagagccu

SEQ ID NO: 3827303 - RNA, 21 nt, Human
ccuagcuugggaggcuucccc

SEQ ID NO: 3827304 - RNA, 17 nt, Human
ccuagcuuuagacccug

SEQ ID NO: 3827305 - RNA, 20 nt, Human
ccuagcuuuagacccugggu

SEQ ID NO: 3827306 - RNA, 22 nt, Human
ccuagcuuuagacccugggugg

SEQ ID NO: 3827307 - RNA, 21 nt, Human
ccuagcuuuauauauggacau

SEQ ID NO: 3827308 - RNA, 22 nt, Human
ccuagcuuuauauauggacaug

SEQ ID NO: 3827309 - RNA, 23 nt, Human
ccuagcuuuauauauggacaugg

SEQ ID NO: 3827310 - RNA, 16 nt, Human
ccuaggaaacucacac

SEQ ID NO: 3827311 - RNA, 22 nt, Human
ccuaggaagccucagauuccuu

SEQ ID NO: 3827312 - RNA, 23 nt, Human
ccuaggacauguucccuucuccu

SEQ ID NO: 3827313 - RNA, 16 nt, Human
ccuaggaccacucagc

SEQ ID NO: 3827314 - RNA, 18 nt, Human
ccuaggaccacucagccc

SEQ ID NO: 3827315 - RNA, 19 nt, Human
ccuaggaccacucagcccc

SEQ ID NO: 3827316 - RNA, 19 nt, Human
ccuaggacccgucuccagc

SEQ ID NO: 3827317 - RNA, 21 nt, Human
ccuaggacccgucuccagcug

SEQ ID NO: 3827318 - RNA, 22 nt, Human
ccuaggacccgucuccagcugc

SEQ ID NO: 3827319 - RNA, 12 nt, Human
ccuaggagacca

SEQ ID NO: 3827320 - RNA, 17 nt, Human
ccuaggagauaucugag

SEQ ID NO: 3827321 - RNA, 23 nt, Human
ccuaggcaggacaugcugaagcc

SEQ ID NO: 3827322 - RNA, 23 nt, Human
ccuaggccacaccaucuccuuuc

SEQ ID NO: 3827323 - RNA, 14 nt, Human
ccuaggccacuccu

SEQ ID NO: 3827324 - RNA, 16 nt, Human
ccuaggccacuccucc

SEQ ID NO: 3827325 - RNA, 17 nt, Human
ccuaggccacuccucca

SEQ ID NO: 3827326 - RNA, 19 nt, Human
ccuaggccacuccuccaaa

SEQ ID NO: 3827327 - RNA, 11 nt, Human
ccuaggccagg

SEQ ID NO: 3827328 - RNA, 12 nt, Human
ccuaggccaggu

SEQ ID NO: 3827329 - RNA, 14 nt, Human
ccuaggccucagcc

SEQ ID NO: 3827330 - RNA, 14 nt, Human
ccuaggcucaugga

SEQ ID NO: 3827331 - RNA, 18 nt, Human
ccuaggcuccaccccauc

SEQ ID NO: 3827332 - RNA, 14 nt, Human
ccuaggcuggaagg

SEQ ID NO: 3827333 - RNA, 14 nt, Human
ccuagggaaaaguu

SEQ ID NO: 3827334 - RNA, 22 nt, Human
ccuagggaagggugguggagcc

SEQ ID NO: 3827335 - RNA, 23 nt, Human
ccuagggaggcauggucugcccu

SEQ ID NO: 3827336 - RNA, 22 nt, Human
ccuagggcauuguaucugucuu

SEQ ID NO: 3827337 - RNA, 12 nt, Human
ccuagggccccc

SEQ ID NO: 3827338 - RNA, 16 nt, Human
ccuagggccuggucca

SEQ ID NO: 3827339 - RNA, 14 nt, Human
ccuagggcugggug

SEQ ID NO: 3827340 - RNA, 13 nt, Human
ccuaggggaauga

SEQ ID NO: 3827341 - RNA, 23 nt, Human
ccuagguagcccccucuucccug

SEQ ID NO: 3827342 - RNA, 18 nt, Human
ccuaggugacagagugag

SEQ ID NO: 3827343 - RNA, 16 nt, Human
ccuagguucccggucc

SEQ ID NO: 3827344 - RNA, 20 nt, Human
ccuagguucccuguucuucc

SEQ ID NO: 3827345 - RNA, 18 nt, Human
ccuaguaagugccuucca

SEQ ID NO: 3827346 - RNA, 19 nt, Human
ccuaguaagugccuuccau

SEQ ID NO: 3827347 - RNA, 14 nt, Human
ccuagucagccaca

SEQ ID NO: 3827348 - RNA, 16 nt, Human
ccuagucagccacaug

SEQ ID NO: 3827349 - RNA, 15 nt, Human
ccuagucccuucccc

SEQ ID NO: 3827350 - RNA, 21 nt, Human
ccuagucccuuccccucccug

SEQ ID NO: 3827351 - RNA, 19 nt, Human
ccuagugaaacuuuucuag

SEQ ID NO: 3827352 - RNA, 22 nt, Human
ccuagugaaggcuucucucugu

SEQ ID NO: 3827353 - RNA, 13 nt, Human
ccuaguuccacca

SEQ ID NO: 3827354 - RNA, 21 nt, Human
ccuaguuccaccaucaagcca

SEQ ID NO: 3827355 - RNA, 17 nt, Human
ccuaguucccucugcuc

SEQ ID NO: 3827356 - RNA, 21 nt, Human
ccuaguucccucugcucagcc

SEQ ID NO: 3827357 - RNA, 18 nt, Human
ccuaguucuagaaaaaca

SEQ ID NO: 3827358 - RNA, 18 nt, Human
ccuaguucuguagaaaug

SEQ ID NO: 3827359 - RNA, 19 nt, Human
ccuaguucuguagaaaugg

SEQ ID NO: 3827360 - RNA, 13 nt, Human
ccuaguucuucau

SEQ ID NO: 3827361 - RNA, 23 nt, Human
ccuaguuggugagaaaccuguau

SEQ ID NO: 3827362 - RNA, 14 nt, Human
ccuaguuucccuga

SEQ ID NO: 3827363 - RNA, 16 nt, Human
ccuaguuuccucuccu

SEQ ID NO: 3827364 - RNA, 20 nt, Human
ccuaguuugggaggagcaga

SEQ ID NO: 3827365 - RNA, 17 nt, Human
ccuaguuugugagaaac

SEQ ID NO: 3827366 - RNA, 16 nt, Human
ccuaguuuucuccucc

SEQ ID NO: 3827367 - RNA, 17 nt, Human
ccuauaaaguaaagcua

SEQ ID NO: 3827368 - RNA, 20 nt, Human
ccuauaacacugugaagagc

SEQ ID NO: 3827369 - RNA, 17 nt, Human
ccuauaacuugaugcau

SEQ ID NO: 3827370 - RNA, 18 nt, Human
ccuauaauccuugauaau

SEQ ID NO: 3827371 - RNA, 14 nt, Human
ccuauaaucuguca

SEQ ID NO: 3827372 - RNA, 15 nt, Human
ccuauaaugugugua

SEQ ID NO: 3827373 - RNA, 17 nt, Human
ccuauaauguguguaug

SEQ ID NO: 3827374 - RNA, 20 nt, Human
cccuucagcccccagccccu

SEQ ID NO: 3827375 - RNA, 17 nt, Human
cccuucaguacccucuc

SEQ ID NO: 3827376 - RNA, 16 nt, Human
cccuucaugcauggaa

SEQ ID NO: 3827377 - RNA, 18 nt, Human
cccuuccaaauaauaaag

SEQ ID NO: 3827378 - RNA, 12 nt, Human
cccuuccacugc

SEQ ID NO: 3827379 - RNA, 13 nt, Human
cccuuccacugcc

SEQ ID NO: 3827380 - RNA, 13 nt, Human
cccuuccagauca

SEQ ID NO: 3827381 - RNA, 23 nt, Human
cccuuccaggccaucagaggccu

SEQ ID NO: 3827382 - RNA, 18 nt, Human
cccuuccaguuuauucca

SEQ ID NO: 3827383 - RNA, 17 nt, Human
ccucacuggcucuccug

SEQ ID NO: 3827384 - RNA, 12 nt, Human
ccucacugggug

SEQ ID NO: 3827385 - RNA, 21 nt, Human
ccucacuuggucugccaggcc

SEQ ID NO: 3827386 - RNA, 23 nt, Human
ccucacuuggucugccaggcccc

SEQ ID NO: 3827387 - RNA, 23 nt, Human
ccucagaacaaagugagacaguc

SEQ ID NO: 3827388 - RNA, 21 nt, Human
ccucagaacccuuggcuugcc

SEQ ID NO: 3827389 - RNA, 23 nt, Human
cccuuuuuacuccccuugagcug

SEQ ID NO: 3827390 - RNA, 16 nt, Human
cccuuuuuuguccccc

SEQ ID NO: 3827391 - RNA, 17 nt, Human
cccuuuuuuguccccca

SEQ ID NO: 3827392 - RNA, 18 nt, Human
cccuuuuuugucccccaa

SEQ ID NO: 3827393 - RNA, 19 nt, Human
cccuuuuuugucccccaac

SEQ ID NO: 3827394 - RNA, 21 nt, Human
cccuuuuuuuccuuuuucuga

SEQ ID NO: 3827395 - RNA, 17 nt, Human
ccgaaaacguggcugcu

SEQ ID NO: 3827396 - RNA, 24 nt, Human
ccgaaacaggcuacucuccucggc

SEQ ID NO: 3827397 - RNA, 17 nt, Human
ccgaaaccaaagaagaa

SEQ ID NO: 3827398 - RNA, 19 nt, Human
ccgaaagggacuuggaagc

SEQ ID NO: 3827399 - RNA, 23 nt, Human
ccgaaaggucaccucacucagca

SEQ ID NO: 3827400 - RNA, 15 nt, Human
ccgaaccuccucugu

SEQ ID NO: 3827401 - RNA, 17 nt, Human
ccgaacuguuguauaaa

SEQ ID NO: 3827402 - RNA, 18 nt, Human
ccgaagaaggguccuucc

SEQ ID NO: 3827403 - RNA, 15 nt, Human
ccgaagcccaggggc

SEQ ID NO: 3827404 - RNA, 21 nt, Human
ccgaagcucuggcugaacccu

SEQ ID NO: 3827405 - RNA, 21 nt, Human
ccgaaguggacuggccccugg

SEQ ID NO: 3827406 - RNA, 17 nt, Human
ccgaauagcugggacua

SEQ ID NO: 3827407 - RNA, 20 nt, Human
ccgaaugugcagguuuguua

SEQ ID NO: 3827408 - RNA, 15 nt, Human
ccgaaugugucuuua

SEQ ID NO: 3827409 - RNA, 20 nt, Human
ccgacaaccgaugcuccagc

SEQ ID NO: 3827410 - RNA, 13 nt, Human
ccgacaagcacag

SEQ ID NO: 3827411 - RNA, 15 nt, Human
ccgacagccuggcac

SEQ ID NO: 3827412 - RNA, 22 nt, Human
ccgacagccuggcacagggcag

SEQ ID NO: 3827413 - RNA, 17 nt, Human
ccgacagcuuuccagua

SEQ ID NO: 3827414 - RNA, 16 nt, Human
ccgaccacaccagagc

SEQ ID NO: 3827415 - RNA, 17 nt, Human
ccgaccacuuccagggg

SEQ ID NO: 3827416 - RNA, 13 nt, Human
ccgaccagacacc

SEQ ID NO: 3827417 - RNA, 17 nt, Human
ccgaccagacaccuuga

SEQ ID NO: 3827418 - RNA, 17 nt, Human
ccgaccagaggagccuu

SEQ ID NO: 3827419 - RNA, 16 nt, Human
ccgaccccaagaguuu

SEQ ID NO: 3827420 - RNA, 13 nt, Human
ccgaccucguccu

SEQ ID NO: 3827421 - RNA, 22 nt, Human
ccgaccucguccucccccugcc

SEQ ID NO: 3827422 - RNA, 22 nt, Human
ccgaccugaggacauggcuucu

SEQ ID NO: 3827423 - RNA, 13 nt, Human
ccgaccuggccgc

SEQ ID NO: 3827424 - RNA, 13 nt, Human
ccgacgcccaccc

SEQ ID NO: 3827425 - RNA, 16 nt, Human
ccgacgcgucuccugu

SEQ ID NO: 3827426 - RNA, 14 nt, Human
ccgacggagccggg

SEQ ID NO: 3827427 - RNA, 14 nt, Human
ccgacgucauguau

SEQ ID NO: 3827428 - RNA, 20 nt, Human
ccgacucacaccacuagccu

SEQ ID NO: 3827429 - RNA, 13 nt, Human
ccgacuccagcca

SEQ ID NO: 3827430 - RNA, 14 nt, Human
ccgacucuggcccu

SEQ ID NO: 3827431 - RNA, 15 nt, Human
ccgacuggggcaggg

SEQ ID NO: 3827432 - RNA, 21 nt, Human
ccgacuugaauuuucccacug

SEQ ID NO: 3827433 - RNA, 23 nt, Human
ccgacuugcuguuuuguucugug

SEQ ID NO: 3827434 - RNA, 13 nt, Human
ccgagagccugcu

SEQ ID NO: 3827435 - RNA, 20 nt, Human
ccgagaguagccgagagccu

SEQ ID NO: 3827436 - RNA, 21 nt, Human
ccgagaguagccgagagccug

SEQ ID NO: 3827437 - RNA, 22 nt, Human
ccgagaguagccgagagccugc

SEQ ID NO: 3827438 - RNA, 19 nt, Human
ccgagaucaguauuuaacu

SEQ ID NO: 3827439 - RNA, 19 nt, Human
ccgagauugcaccacugca

SEQ ID NO: 3827440 - RNA, 16 nt, Human
ccgagcaaccguggcc

SEQ ID NO: 3827441 - RNA, 18 nt, Human
ccgagcaaccguggcccu

SEQ ID NO: 3827442 - RNA, 23 nt, Human
ccgagcaaccguggcccuuccug

SEQ ID NO: 3827443 - RNA, 22 nt, Human
ccgagcaauauuuauggaugca

SEQ ID NO: 3827444 - RNA, 16 nt, Human
ccgagcagcugagcag

SEQ ID NO: 3827445 - RNA, 20 nt, Human
ccgagcagcugagcagggcc

SEQ ID NO: 3827446 - RNA, 16 nt, Human
ccgagccgggccuggg

SEQ ID NO: 3827447 - RNA, 16 nt, Human
ccgagcuccucuucca

SEQ ID NO: 3827448 - RNA, 16 nt, Human
ccgagcugggggccau

SEQ ID NO: 3827449 - RNA, 20 nt, Human
ccgagcuggugcauuacaga

SEQ ID NO: 3827450 - RNA, 19 nt, Human
ccgagcuuugaaaauucag

SEQ ID NO: 3827451 - RNA, 16 nt, Human
ccgaggacccagaccc

SEQ ID NO: 3827452 - RNA, 13 nt, Human
ccgaggacccagg

SEQ ID NO: 3827453 - RNA, 15 nt, Human
ccgaggaggugccug

SEQ ID NO: 3827454 - RNA, 23 nt, Human
ccgaggaggugucucaggcugcc

SEQ ID NO: 3827455 - RNA, 15 nt, Human
ccgaggcagggaagg

SEQ ID NO: 3827456 - RNA, 11 nt, Human
ccgaggcccug

SEQ ID NO: 3827457 - RNA, 12 nt, Human
ccgaggcccugc

SEQ ID NO: 3827458 - RNA, 14 nt, Human
ccgaggccuucucu

SEQ ID NO: 3827459 - RNA, 20 nt, Human
ccgaggcggguggaucacga

SEQ ID NO: 3827460 - RNA, 22 nt, Human
ccgagggaggggaagcuucugu

SEQ ID NO: 3827461 - RNA, 23 nt, Human
ccgagggaggggaagcuucuguc

SEQ ID NO: 3827462 - RNA, 19 nt, Human
ccgagggaugaugccacac

SEQ ID NO: 3827463 - RNA, 20 nt, Human
ccgagggaugaugccacacc

SEQ ID NO: 3827464 - RNA, 16 nt, Human
ccgagggcugagccug

SEQ ID NO: 3827465 - RNA, 13 nt, Human
ccgaggggcggga

SEQ ID NO: 3827466 - RNA, 23 nt, Human
ccgaggggcgggacccaggcacc

SEQ ID NO: 3827467 - RNA, 18 nt, Human
ccgaggggcucaggaaaa

SEQ ID NO: 3827468 - RNA, 23 nt, Human
ccgaggguccuggcuccugaggg

SEQ ID NO: 3827469 - RNA, 17 nt, Human
ccgaggugguuuuaaag

SEQ ID NO: 3827470 - RNA, 17 nt, Human
ccgaguagaaaauguga

SEQ ID NO: 3827471 - RNA, 20 nt, Human
ccgagucauucguucugugg

SEQ ID NO: 3827472 - RNA, 13 nt, Human
ccgagucugggac

SEQ ID NO: 3827473 - RNA, 14 nt, Human
ccgagucugggaca

SEQ ID NO: 3827474 - RNA, 17 nt, Human
ccgagugaacuggucuu

SEQ ID NO: 3827475 - RNA, 23 nt, Human
ccgaguguguuucauccuuccca

SEQ ID NO: 3827476 - RNA, 17 nt, Human
ccgauaucagaauuugu

SEQ ID NO: 3827477 - RNA, 15 nt, Human
ccgaucgccagcaaa

SEQ ID NO: 3827478 - RNA, 17 nt, Human
ccgaugcaaacauugga

SEQ ID NO: 3827479 - RNA, 20 nt, Human
ccgaugcaaacauuggaaga

SEQ ID NO: 3827480 - RNA, 22 nt, Human
ccgaugcuccagccaaccccug

SEQ ID NO: 3827481 - RNA, 11 nt, Human
ccgaugcugcu

SEQ ID NO: 3827482 - RNA, 23 nt, Human
ccgaugcugcuuuccccuguggg

SEQ ID NO: 3827483 - RNA, 20 nt, Human
ccgaugguggguggggcugc

SEQ ID NO: 3827484 - RNA, 16 nt, Human
ccgauucaccugagca

SEQ ID NO: 3827485 - RNA, 21 nt, Human
ccgauucaucucucagaaggg

SEQ ID NO: 3827486 - RNA, 13 nt, Human
ccgauuguaacuc

SEQ ID NO: 3827487 - RNA, 16 nt, Human
ccgauuguaacucaaa

SEQ ID NO: 3827488 - RNA, 14 nt, Human
ccgauuucuguaaa

SEQ ID NO: 3827489 - RNA, 17 nt, Human
ccgcaaaacccacugac

SEQ ID NO: 3827490 - RNA, 15 nt, Human
ccgcaaaccacacug

SEQ ID NO: 3827491 - RNA, 15 nt, Human
ccgcaauacaggaac

SEQ ID NO: 3827492 - RNA, 20 nt, Human
ccgcacacccucacucugcc

SEQ ID NO: 3827493 - RNA, 23 nt, Human
ccgcacacccucacucugccagg

SEQ ID NO: 3827494 - RNA, 13 nt, Human
ccgcacagcagcc

SEQ ID NO: 3827495 - RNA, 15 nt, Human
ccgcacagcagccug

SEQ ID NO: 3827496 - RNA, 22 nt, Human
ccgcacagcagccugcuuccca

SEQ ID NO: 3827497 - RNA, 12 nt, Human
ccgcacagcuca

SEQ ID NO: 3827498 - RNA, 13 nt, Human
ccgcacagcucag

SEQ ID NO: 3827499 - RNA, 13 nt, Human
ccgcaccccagag

SEQ ID NO: 3827500 - RNA, 16 nt, Human
ccgcacccccacccuu

SEQ ID NO: 3827501 - RNA, 14 nt, Human
ccgcacuaggggau

SEQ ID NO: 3827502 - RNA, 14 nt, Human
ccgcacucacccau

SEQ ID NO: 3827503 - RNA, 23 nt, Human
ccgcacugggcuuggggaccaga

SEQ ID NO: 3827504 - RNA, 14 nt, Human
ccgcagaagcccug

SEQ ID NO: 3827505 - RNA, 16 nt, Human
ccgcagaagccucccc

SEQ ID NO: 3827506 - RNA, 18 nt, Human
ccgcagaaggaaggcagg

SEQ ID NO: 3827507 - RNA, 14 nt, Human
ccgcagaccucugg

SEQ ID NO: 3827508 - RNA, 23 nt, Human
ccgcagagaagugacgguuccua

SEQ ID NO: 3827509 - RNA, 21 nt, Human
ccgcagagcgcgccccuagcc

SEQ ID NO: 3827510 - RNA, 22 nt, Human
ccgcagagcgcgccccuagccg

SEQ ID NO: 3827511 - RNA, 14 nt, Human
ccgcagcagcuccc

SEQ ID NO: 3827512 - RNA, 14 nt, Human
ccgcagcucuugcc

SEQ ID NO: 3827513 - RNA, 22 nt, Human
ccgcaggcagacuacacaggau

SEQ ID NO: 3827514 - RNA, 22 nt, Human
ccgcagucgucgcacagucucu

SEQ ID NO: 3827515 - RNA, 17 nt, Human
ccgcagugggagcaaac

SEQ ID NO: 3827516 - RNA, 22 nt, Human
ccgcagugugcacuaaggggcc

SEQ ID NO: 3827517 - RNA, 17 nt, Human
ccgcaguuccugucccu

SEQ ID NO: 3827518 - RNA, 18 nt, Human
ccgcauccccugccucca

SEQ ID NO: 3827519 - RNA, 22 nt, Human
ccgcauccccugccuccauccu

SEQ ID NO: 3827520 - RNA, 14 nt, Human
ccgcaucucacagc

SEQ ID NO: 3827521 - RNA, 15 nt, Human
ccgcaucuucuccau

SEQ ID NO: 3827522 - RNA, 19 nt, Human
ccgcaucuucuccaucugg

SEQ ID NO: 3827523 - RNA, 12 nt, Human
ccgcaugccccc

SEQ ID NO: 3827524 - RNA, 17 nt, Human
ccgccaaggcuggggga

SEQ ID NO: 3827525 - RNA, 14 nt, Human
ccgccacaucccuc

SEQ ID NO: 3827526 - RNA, 19 nt, Human
ccgccagauggggccucug

SEQ ID NO: 3827527 - RNA, 16 nt, Human
ccuagauaugaauaua

SEQ ID NO: 3827528 - RNA, 23 nt, Human
ccuagauggcagucacugaauuc

SEQ ID NO: 3827529 - RNA, 20 nt, Human
ccuagauguauaacuaggag

SEQ ID NO: 3827530 - RNA, 16 nt, Human
ccuagauucagggaaa

SEQ ID NO: 3827531 - RNA, 16 nt, Human
ccuagauuuaauauaa

SEQ ID NO: 3827532 - RNA, 17 nt, Human
ccuagcaagcuggccuc

SEQ ID NO: 3827533 - RNA, 15 nt, Human
ccuagcacagcagcu

SEQ ID NO: 3827534 - RNA, 17 nt, Human
ccuagcacuuugggagg

SEQ ID NO: 3827535 - RNA, 12 nt, Human
ccuagcagcacc

SEQ ID NO: 3827536 - RNA, 20 nt, Human
ccuagcagcccacccugcug

SEQ ID NO: 3827537 - RNA, 13 nt, Human
ccuagcagugaac

SEQ ID NO: 3827538 - RNA, 16 nt, Human
ccuagccauuccuggu

SEQ ID NO: 3827539 - RNA, 21 nt, Human
ccuagccauuccugguaccca

SEQ ID NO: 3827540 - RNA, 13 nt, Human
ccuagccauucug

SEQ ID NO: 3827541 - RNA, 13 nt, Human
ccuagcccacccu

SEQ ID NO: 3827542 - RNA, 14 nt, Human
ccuagcccacccug

SEQ ID NO: 3827543 - RNA, 16 nt, Human
ccuagcccacccugcu

SEQ ID NO: 3827544 - RNA, 17 nt, Human
ccuagcccagcgcucug

SEQ ID NO: 3827545 - RNA, 19 nt, Human
ccuagcccaggagagagaa

SEQ ID NO: 3827546 - RNA, 21 nt, Human
ccuagccccuuagcccccacc

SEQ ID NO: 3827547 - RNA, 16 nt, Human
ccuagcccucucccuc

SEQ ID NO: 3827548 - RNA, 16 nt, Human
ccuagccgaccucagc

SEQ ID NO: 3827549 - RNA, 22 nt, Human
ccuagccgguuccugucccugc

SEQ ID NO: 3827550 - RNA, 20 nt, Human
ccuagccugugccucuggga

SEQ ID NO: 3827551 - RNA, 17 nt, Human
ccuagccuguuucuucc

SEQ ID NO: 3827552 - RNA, 17 nt, Human
ccuagccuugcacuuuc

SEQ ID NO: 3827553 - RNA, 14 nt, Human
ccuagccuugcuug

SEQ ID NO: 3827554 - RNA, 21 nt, Human
ccuagcgcuaucucccugccu

SEQ ID NO: 3827555 - RNA, 15 nt, Human
ccuagcuaauuauuu

SEQ ID NO: 3827556 - RNA, 22 nt, Human
ccuagcugaauguuuuucuaaa

SEQ ID NO: 3827557 - RNA, 19 nt, Human
ccuagcugcacagggcagc

SEQ ID NO: 3827558 - RNA, 14 nt, Human
ccuagcugcuacaa

SEQ ID NO: 3827559 - RNA, 13 nt, Human
ccuagcuguccuu

SEQ ID NO: 3827560 - RNA, 18 nt, Human
ccuagcuguccuuuuucc

SEQ ID NO: 3827561 - RNA, 19 nt, Human
ccuagcuguccuuuuuccu

SEQ ID NO: 3827562 - RNA, 11 nt, Human
ccuagcugugu

SEQ ID NO: 3827563 - RNA, 21 nt, Human
ccuagcuuuagacccugggug

SEQ ID NO: 3827564 - RNA, 17 nt, Human
ccuaggaauucccagcc

SEQ ID NO: 3827565 - RNA, 21 nt, Human
ccuaggaccacucagccccua

SEQ ID NO: 3827566 - RNA, 20 nt, Human
ccuaggagauaucugaggga

SEQ ID NO: 3827567 - RNA, 15 nt, Human
ccuaggaggguccuc

SEQ ID NO: 3827568 - RNA, 16 nt, Human
ccuaggaguauauuuc

SEQ ID NO: 3827569 - RNA, 20 nt, Human
ccuaggauucacaccccacc

SEQ ID NO: 3827570 - RNA, 22 nt, Human
ccuaggauucacaccccaccug

SEQ ID NO: 3827571 - RNA, 23 nt, Human
ccuaggauucacaccccaccugc

SEQ ID NO: 3827572 - RNA, 14 nt, Human
ccuaggauucuaaa

SEQ ID NO: 3827573 - RNA, 13 nt, Human
ccuaggcaggaca

SEQ ID NO: 3827574 - RNA, 18 nt, Human
ccuaggcaggacaugcug

SEQ ID NO: 3827575 - RNA, 22 nt, Human
ccuaggcaguaggccggugugc

SEQ ID NO: 3827576 - RNA, 15 nt, Human
ccuaggccugggcag

SEQ ID NO: 3827577 - RNA, 23 nt, Human
ccuaggccugggcaguggauggc

SEQ ID NO: 3827578 - RNA, 11 nt, Human
ccuaggcugca

SEQ ID NO: 3827579 - RNA, 19 nt, Human
ccuaggcuggaaggaggaa

SEQ ID NO: 3827580 - RNA, 20 nt, Human
ccuagggauguucuggcccu

SEQ ID NO: 3827581 - RNA, 15 nt, Human
ccuagggcugggugu

SEQ ID NO: 3827582 - RNA, 23 nt, Human
ccuaggggaaugagggggcucag

SEQ ID NO: 3827583 - RNA, 18 nt, Human
ccuaggggacacuucccu

SEQ ID NO: 3827584 - RNA, 18 nt, Human
ccuaggggucagggacca

SEQ ID NO: 3827585 - RNA, 20 nt, Human
ccuagguagcccccucuucc

SEQ ID NO: 3827586 - RNA, 22 nt, Human
ccuagguauaauucacauugua

SEQ ID NO: 3827587 - RNA, 13 nt, Human
ccuaggugacaga

SEQ ID NO: 3827588 - RNA, 19 nt, Human
ccuagguucccggucccga

SEQ ID NO: 3827589 - RNA, 18 nt, Human
ccuagguucccuguucuu

SEQ ID NO: 3827590 - RNA, 21 nt, Human
ccuagguucccuguucuuccu

SEQ ID NO: 3827591 - RNA, 22 nt, Human
ccuagguucccuguucuuccuc

SEQ ID NO: 3827592 - RNA, 16 nt, Human
ccuaguaagugccuuc

SEQ ID NO: 3827593 - RNA, 13 nt, Human
ccuaguacugccc

SEQ ID NO: 3827594 - RNA, 16 nt, Human
ccuaguccagugaccu

SEQ ID NO: 3827595 - RNA, 13 nt, Human
ccuagucccuucc

SEQ ID NO: 3827596 - RNA, 19 nt, Human
caguccuuggccugcuaag

SEQ ID NO: 3827597 - RNA, 21 nt, Human
caguccuuuguaaacaguguu

SEQ ID NO: 3827598 - RNA, 21 nt, Human
caguccuuuuacuacagcuau

SEQ ID NO: 3827599 - RNA, 22 nt, Human
cagucgccuuucagcaggcagc

SEQ ID NO: 3827600 - RNA, 14 nt, Human
cagucgcgcugccu

SEQ ID NO: 3827601 - RNA, 19 nt, Human
cagucgggggaacugaggc

SEQ ID NO: 3827602 - RNA, 19 nt, Human
cagucgggggcuggccuag

SEQ ID NO: 3827603 - RNA, 13 nt, Human
cagucgucgcaca

SEQ ID NO: 3827604 - RNA, 21 nt, Human
cagucgugguugggaacacag

SEQ ID NO: 3827605 - RNA, 19 nt, Human
cagucuaaaaugcuucagu

SEQ ID NO: 3827606 - RNA, 13 nt, Human
cagucuaauuuuu

SEQ ID NO: 3827607 - RNA, 17 nt, Human
cagucuaauuuuuauuc

SEQ ID NO: 3827608 - RNA, 18 nt, Human
cagucuaauuuuuauuca

SEQ ID NO: 3827609 - RNA, 21 nt, Human
cagucuacccaccucagccuc

SEQ ID NO: 3827610 - RNA, 19 nt, Human
cagucuacccagagaagcc

SEQ ID NO: 3827611 - RNA, 15 nt, Human
cagucuauccacaga

SEQ ID NO: 3827612 - RNA, 22 nt, Human
cagucuauccacagagaguccc

SEQ ID NO: 3827613 - RNA, 23 nt, Human
cagucucaaaaauacaaaauaaa

SEQ ID NO: 3827614 - RNA, 20 nt, Human
cagucucacauuucucaaca

SEQ ID NO: 3827615 - RNA, 23 nt, Human
cagucucacugugggaaggccag

SEQ ID NO: 3827616 - RNA, 19 nt, Human
cagucucagaaugucauuu

SEQ ID NO: 3827617 - RNA, 15 nt, Human
cagucucaggaaauc

SEQ ID NO: 3827618 - RNA, 14 nt, Human
cagucucaggagca

SEQ ID NO: 3827619 - RNA, 18 nt, Human
cagucucccuucucccau

SEQ ID NO: 3827620 - RNA, 20 nt, Human
cagucuccggccucuccagc

SEQ ID NO: 3827621 - RNA, 21 nt, Human
cagucuccggccucuccagcc

SEQ ID NO: 3827622 - RNA, 13 nt, Human
cagucuccucuuu

SEQ ID NO: 3827623 - RNA, 16 nt, Human
cagucuccucuuuaaa

SEQ ID NO: 3827624 - RNA, 22 nt, Human
cagucuccucuuuaaaacaaaa

SEQ ID NO: 3827625 - RNA, 15 nt, Human
cagucucggguggcu

SEQ ID NO: 3827626 - RNA, 22 nt, Human
cagucucggguggcuagucaga

SEQ ID NO: 3827627 - RNA, 20 nt, Human
cagucucuauaccaauaaag

SEQ ID NO: 3827628 - RNA, 15 nt, Human
cagucucucucuucc

SEQ ID NO: 3827629 - RNA, 17 nt, Human
cagucucucuuaaaguu

SEQ ID NO: 3827630 - RNA, 18 nt, Human
cagucucucuuaaaguug

SEQ ID NO: 3827631 - RNA, 16 nt, Human
cagucucugagggcuu

SEQ ID NO: 3827632 - RNA, 20 nt, Human
cagucucugagggcuuccuu

SEQ ID NO: 3827633 - RNA, 18 nt, Human
cagucucugccuugccuu

SEQ ID NO: 3827634 - RNA, 19 nt, Human
cagucucugccuugccuuu

SEQ ID NO: 3827635 - RNA, 19 nt, Human
cagucucuuuaaucuucag

SEQ ID NO: 3827636 - RNA, 22 nt, Human
cagucucuuuaaucuucaguuu

SEQ ID NO: 3827637 - RNA, 18 nt, Human
cagucugaaugcugccac

SEQ ID NO: 3827638 - RNA, 20 nt, Human
cagucugaaugcugccacaa

SEQ ID NO: 3827639 - RNA, 17 nt, Human
cagucugagagaggcca

SEQ ID NO: 3827640 - RNA, 22 nt, Human
cagucugaucgugacgcugaau

SEQ ID NO: 3827641 - RNA, 15 nt, Human
cagucugaucuguga

SEQ ID NO: 3827642 - RNA, 22 nt, Human
cagucugaugagaacucugagc

SEQ ID NO: 3827643 - RNA, 20 nt, Human
cagucugauucccaagcucu

SEQ ID NO: 3827644 - RNA, 22 nt, Human
cagucugauucccaagcucugc

SEQ ID NO: 3827645 - RNA, 13 nt, Human
cagucugcugccc

SEQ ID NO: 3827646 - RNA, 18 nt, Human
cagucugcugcccuccau

SEQ ID NO: 3827647 - RNA, 18 nt, Human
cagucuggaaugcagugg

SEQ ID NO: 3827648 - RNA, 12 nt, Human
cagucuggaggg

SEQ ID NO: 3827649 - RNA, 20 nt, Human
cagucuggcugagcccugcu

SEQ ID NO: 3827650 - RNA, 21 nt, Human
cagucugucuucuguauauaa

SEQ ID NO: 3827651 - RNA, 11 nt, Human
cagucuuccac

SEQ ID NO: 3827652 - RNA, 16 nt, Human
cagucuuccacaaaga

SEQ ID NO: 3827653 - RNA, 20 nt, Human
cagucuuccacaaagaaaau

SEQ ID NO: 3827654 - RNA, 21 nt, Human
cagucuuccacaaagaaaauu

SEQ ID NO: 3827655 - RNA, 17 nt, Human
cagucuuccaccuggaa

SEQ ID NO: 3827656 - RNA, 18 nt, Human
cagucuuccauuugcaag

SEQ ID NO: 3827657 - RNA, 22 nt, Human
cagucuucccuagggcugggug

SEQ ID NO: 3827658 - RNA, 17 nt, Human
cagucuuccugacacuu

SEQ ID NO: 3827659 - RNA, 21 nt, Human
cagucuuccugacacuuuaau

SEQ ID NO: 3827660 - RNA, 18 nt, Human
cagucuugacgaguguga

SEQ ID NO: 3827661 - RNA, 14 nt, Human
cagucuugcagcag

SEQ ID NO: 3827662 - RNA, 19 nt, Human
cagucuugccuuacacaaa

SEQ ID NO: 3827663 - RNA, 13 nt, Human
cagucuugugcuu

SEQ ID NO: 3827664 - RNA, 18 nt, Human
cagucuuuaaaggcccag

SEQ ID NO: 3827665 - RNA, 23 nt, Human
cagucuuuaaaggcccagccccu

SEQ ID NO: 3827666 - RNA, 22 nt, Human
cagucuuuaaucugagaggcca

SEQ ID NO: 3827667 - RNA, 14 nt, Human
cagucuuuuguccu

SEQ ID NO: 3827668 - RNA, 20 nt, Human
cagucuuuuucuguuguaac

SEQ ID NO: 3827669 - RNA, 22 nt, Human
cagucuuuuuggugaggguaac

SEQ ID NO: 3827670 - RNA, 17 nt, Human
caguggcagggcacagg

SEQ ID NO: 3827671 - RNA, 20 nt, Human
caguggcagggcacagggcc

SEQ ID NO: 3827672 - RNA, 21 nt, Human
caguggcaucaucucagcuca

SEQ ID NO: 3827673 - RNA, 19 nt, Human
caguggcauggcuccaguc

SEQ ID NO: 3827674 - RNA, 14 nt, Human
caguggccuacaaa

SEQ ID NO: 3827675 - RNA, 22 nt, Human
caguggccuacaaaucaguaau

SEQ ID NO: 3827676 - RNA, 20 nt, Human
caguggccucaacccucccu

SEQ ID NO: 3827677 - RNA, 13 nt, Human
caguggccuggcu

SEQ ID NO: 3827678 - RNA, 23 nt, Human
caguggccuggcuccgcugugug

SEQ ID NO: 3827679 - RNA, 18 nt, Human
caguggccuuccccagca

SEQ ID NO: 3827680 - RNA, 22 nt, Human
caguggcgaaaucccugcucac

SEQ ID NO: 3827681 - RNA, 17 nt, Human
caguggcugcugcccag

SEQ ID NO: 3827682 - RNA, 18 nt, Human
caguggcugcugcccagg

SEQ ID NO: 3827683 - RNA, 18 nt, Human
caguggcuggaucuguga

SEQ ID NO: 3827684 - RNA, 20 nt, Human
caguggcuggaucugugagg

SEQ ID NO: 3827685 - RNA, 19 nt, Human
cagugggaacgugacugcc

SEQ ID NO: 3827686 - RNA, 17 nt, Human
cagugggaacucugaca

SEQ ID NO: 3827687 - RNA, 22 nt, Human
cagugggaacucugacaagggc

SEQ ID NO: 3827688 - RNA, 14 nt, Human
cagugggagaaaac

SEQ ID NO: 3827689 - RNA, 17 nt, Human
cagugggagauguuaga

SEQ ID NO: 3827690 - RNA, 23 nt, Human
cagugggagcugccuguucagcu

SEQ ID NO: 3827691 - RNA, 13 nt, Human
cagugggaggcgc

SEQ ID NO: 3827692 - RNA, 15 nt, Human
cagugggaggggcag

SEQ ID NO: 3827693 - RNA, 16 nt, Human
cagugggaggggcagg

SEQ ID NO: 3827694 - RNA, 21 nt, Human
cagugggccuggccagcaggu

SEQ ID NO: 3827695 - RNA, 14 nt, Human
caguggggccugug

SEQ ID NO: 3827696 - RNA, 16 nt, Human
caguggggccugugga

SEQ ID NO: 3827697 - RNA, 16 nt, Human
caguggggcucucuga

SEQ ID NO: 3827698 - RNA, 21 nt, Human
caguggggcucucugaguccu

SEQ ID NO: 3827699 - RNA, 13 nt, Human
caguggggcuggg

SEQ ID NO: 3827700 - RNA, 14 nt, Human
caguggggcugggg

SEQ ID NO: 3827701 - RNA, 20 nt, Human
cagugggucccacuuccccu

SEQ ID NO: 3827702 - RNA, 22 nt, Human
cagugggucccacuuccccucc

SEQ ID NO: 3827703 - RNA, 14 nt, Human
caguggguuaacau

SEQ ID NO: 3827704 - RNA, 15 nt, Human
cagugguaaaaaggc

SEQ ID NO: 3827705 - RNA, 13 nt, Human
cagugguaagcua

SEQ ID NO: 3827706 - RNA, 15 nt, Human
cagugguaagcucug

SEQ ID NO: 3827707 - RNA, 20 nt, Human
cagugguccacaucccggga

SEQ ID NO: 3827708 - RNA, 13 nt, Human
caguggucucaca

SEQ ID NO: 3827709 - RNA, 19 nt, Human
caguggugcgaucucggcu

SEQ ID NO: 3827710 - RNA, 20 nt, Human
caguggugcgaucuggguuc

SEQ ID NO: 3827711 - RNA, 22 nt, Human
cagugguggcaacauucauugc

SEQ ID NO: 3827712 - RNA, 22 nt, Human
caguggugguuuucuguucuuu

SEQ ID NO: 3827713 - RNA, 15 nt, Human
cagugguuuuauacu

SEQ ID NO: 3827714 - RNA, 15 nt, Human
caguguaauccccca

SEQ ID NO: 3827715 - RNA, 15 nt, Human
caguguaauuucuuu

SEQ ID NO: 3827716 - RNA, 15 nt, Human
caguguacagucuug

SEQ ID NO: 3827717 - RNA, 20 nt, Human
caguguacauggaauaacau

SEQ ID NO: 3827718 - RNA, 18 nt, Human
caguguaccauuaaaaua

SEQ ID NO: 3827719 - RNA, 21 nt, Human
caguguaccauuaaaauaugc

SEQ ID NO: 3827720 - RNA, 16 nt, Human
caguguacccccgccc

SEQ ID NO: 3827721 - RNA, 16 nt, Human
caguguagauuuuaua

SEQ ID NO: 3827722 - RNA, 16 nt, Human
caguguaguuaauuua

SEQ ID NO: 3827723 - RNA, 23 nt, Human
caguguauuuguauuuuuuugca

SEQ ID NO: 3827724 - RNA, 17 nt, Human
cagugucaaauaaacac

SEQ ID NO: 3827725 - RNA, 20 nt, Human
cagugucaaguugugcuugu

SEQ ID NO: 3827726 - RNA, 13 nt, Human
cagugucaggcac

SEQ ID NO: 3827727 - RNA, 16 nt, Human
cagugucauuucucau

SEQ ID NO: 3827728 - RNA, 12 nt, Human
cagugucauuug

SEQ ID NO: 3827729 - RNA, 17 nt, Human
cagugucauuugcucug

SEQ ID NO: 3827730 - RNA, 22 nt, Human
caguguccauggacucagaaac

SEQ ID NO: 3827731 - RNA, 16 nt, Human
caguguccccuccacu

SEQ ID NO: 3827732 - RNA, 20 nt, Human
caguguccccuccacuguca

SEQ ID NO: 3827733 - RNA, 21 nt, Human
caguguccccuccacugucac

SEQ ID NO: 3827734 - RNA, 19 nt, Human
caguguccuccccucaagg

SEQ ID NO: 3827735 - RNA, 13 nt, Human
caguguccugagc

SEQ ID NO: 3827736 - RNA, 15 nt, Human
caguguccugagcuc

SEQ ID NO: 3827737 - RNA, 20 nt, Human
caguguccuuggcaggcuga

SEQ ID NO: 3827738 - RNA, 16 nt, Human
cagugucucacacugg

SEQ ID NO: 3827739 - RNA, 18 nt, Human
cagugucuggcugcagag

SEQ ID NO: 3827740 - RNA, 13 nt, Human
cagugucugggcu

SEQ ID NO: 3827741 - RNA, 14 nt, Human
cagugucugggcug

SEQ ID NO: 3827742 - RNA, 22 nt, Human
cagugucuguaucggagacagu

SEQ ID NO: 3827743 - RNA, 24 nt, Human
cagugucuguaucggagacaguga

SEQ ID NO: 3827744 - RNA, 13 nt, Human
cagugucuguccc

SEQ ID NO: 3827745 - RNA, 14 nt, Human
cagugucugucccg

SEQ ID NO: 3827746 - RNA, 16 nt, Human
cagugucugucccggg

SEQ ID NO: 3827747 - RNA, 15 nt, Human
cagugucuuccauaa

SEQ ID NO: 3827748 - RNA, 20 nt, Human
cagugucuuccauaauguau

SEQ ID NO: 3827749 - RNA, 13 nt, Human
cagugucuuccug

SEQ ID NO: 3827750 - RNA, 19 nt, Human
cagugucuuuuuuuguaua

SEQ ID NO: 3827751 - RNA, 21 nt, Human
cagugugaaguacaauaauuc

SEQ ID NO: 3827752 - RNA, 17 nt, Human
cagugugaaguuagaau

SEQ ID NO: 3827753 - RNA, 16 nt, Human
cagugugaggccaggg

SEQ ID NO: 3827754 - RNA, 19 nt, Human
cagugugaucccaagugcc

SEQ ID NO: 3827755 - RNA, 22 nt, Human
cagugugaucccaagugccagu

SEQ ID NO: 3827756 - RNA, 22 nt, Human
cagugugcacgagugggaagga

SEQ ID NO: 3827757 - RNA, 15 nt, Human
cagugugcacuaagg

SEQ ID NO: 3827758 - RNA, 20 nt, Human
cagugugccccccauccugg

SEQ ID NO: 3827759 - RNA, 20 nt, Human
caguguggaggccacuguuu

SEQ ID NO: 3827760 - RNA, 19 nt, Human
caguguggccucuucugag

SEQ ID NO: 3827761 - RNA, 22 nt, Human
ccucaagguuuuagguucuaaa

SEQ ID NO: 3827762 - RNA, 20 nt, Human
ccucaagugauucuccugcc

SEQ ID NO: 3827763 - RNA, 23 nt, Human
ccucaagugauucuccugccuca

SEQ ID NO: 3827764 - RNA, 18 nt, Human
ccucaauaaacauuucau

SEQ ID NO: 3827765 - RNA, 16 nt, Human
ccucaauaagccuugu

SEQ ID NO: 3827766 - RNA, 18 nt, Human
ccucaauaagccuugucg

SEQ ID NO: 3827767 - RNA, 20 nt, Human
ccucaauucccccuggccac

SEQ ID NO: 3827768 - RNA, 12 nt, Human
ccucaauuucaa

SEQ ID NO: 3827769 - RNA, 17 nt, Human
ccucaauuuucacugug

SEQ ID NO: 3827770 - RNA, 21 nt, Human
ccucacaaguggguaccccca

SEQ ID NO: 3827771 - RNA, 22 nt, Human
ccucacacacagacucauauua

SEQ ID NO: 3827772 - RNA, 23 nt, Human
ccucacacacccugaggucaggg

SEQ ID NO: 3827773 - RNA, 11 nt, Human
ccucacacagc

SEQ ID NO: 3827774 - RNA, 14 nt, Human
ccucacacucaccc

SEQ ID NO: 3827775 - RNA, 15 nt, Human
ccucacacuccuuua

SEQ ID NO: 3827776 - RNA, 15 nt, Human
ccucacagcacagag

SEQ ID NO: 3827777 - RNA, 19 nt, Human
ccucacagcacagagaaga

SEQ ID NO: 3827778 - RNA, 12 nt, Human
ccucacagccuc

SEQ ID NO: 3827779 - RNA, 15 nt, Human
ccucacagccucuga

SEQ ID NO: 3827780 - RNA, 22 nt, Human
ccucacagccucugaccccucc

SEQ ID NO: 3827781 - RNA, 13 nt, Human
ccucacagugaac

SEQ ID NO: 3827782 - RNA, 19 nt, Human
ccucacagugacccuuccc

SEQ ID NO: 3827783 - RNA, 24 nt, Human
ccucacagugacccuucccaauca

SEQ ID NO: 3827784 - RNA, 16 nt, Human
ccucacaucuuucaca

SEQ ID NO: 3827785 - RNA, 18 nt, Human
ccucaccagcccuggcaa

SEQ ID NO: 3827786 - RNA, 19 nt, Human
ccucaccaggggcaggcac

SEQ ID NO: 3827787 - RNA, 16 nt, Human
ccucaccaugaugggg

SEQ ID NO: 3827788 - RNA, 21 nt, Human
ccucacccaccccugcacagu

SEQ ID NO: 3827789 - RNA, 21 nt, Human
ccucacccacccuuuuuuaaa

SEQ ID NO: 3827790 - RNA, 23 nt, Human
ccucacccacuuuggccuccguu

SEQ ID NO: 3827791 - RNA, 17 nt, Human
ccucacccccagcuuug

SEQ ID NO: 3827792 - RNA, 19 nt, Human
ccucaccccgaggcccugc

SEQ ID NO: 3827793 - RNA, 16 nt, Human
ccucaccccgucuggg

SEQ ID NO: 3827794 - RNA, 13 nt, Human
ccucaccccugcc

SEQ ID NO: 3827795 - RNA, 20 nt, Human
ccucaccccugguucucauc

SEQ ID NO: 3827796 - RNA, 21 nt, Human
ccucaccccugguucucaucu

SEQ ID NO: 3827797 - RNA, 15 nt, Human
ccucaccccuguccu

SEQ ID NO: 3827798 - RNA, 11 nt, Human
ccucacccugc

SEQ ID NO: 3827799 - RNA, 22 nt, Human
ccucacccugccuuaucuugca

SEQ ID NO: 3827800 - RNA, 18 nt, Human
ccucaccgagugggggca

SEQ ID NO: 3827801 - RNA, 15 nt, Human
ccucaccgcuucccu

SEQ ID NO: 3827802 - RNA, 17 nt, Human
ccucaccgcuucccucc

SEQ ID NO: 3827803 - RNA, 15 nt, Human
ccucaccucaugccc

SEQ ID NO: 3827804 - RNA, 16 nt, Human
ccucaccucaugccca

SEQ ID NO: 3827805 - RNA, 13 nt, Human
ccucaccucuacc

SEQ ID NO: 3827806 - RNA, 17 nt, Human
ccucaccucugccauuu

SEQ ID NO: 3827807 - RNA, 15 nt, Human
ccucaccuguagcag

SEQ ID NO: 3827808 - RNA, 21 nt, Human
ccucaccuugcaacacacaga

SEQ ID NO: 3827809 - RNA, 22 nt, Human
ccucaccuugcaacacacagac

SEQ ID NO: 3827810 - RNA, 19 nt, Human
ccucaccuuuucccgggga

SEQ ID NO: 3827811 - RNA, 14 nt, Human
ccucacuaauuuuu

SEQ ID NO: 3827812 - RNA, 21 nt, Human
ccucacuaggcuucugguuga

SEQ ID NO: 3827813 - RNA, 21 nt, Human
ccucacuaucccggcugcccu

SEQ ID NO: 3827814 - RNA, 17 nt, Human
aaauaauuguuguucug

SEQ ID NO: 3827815 - RNA, 13 nt, Human
aaauaauuuaacu

SEQ ID NO: 3827816 - RNA, 13 nt, Human
ccucgcugcuucu

SEQ ID NO: 3827817 - RNA, 17 nt, Human
ccucgcuggacucucag

SEQ ID NO: 3827818 - RNA, 12 nt, Human
ccucgcuggccc

SEQ ID NO: 3827819 - RNA, 13 nt, Human
ccucgcuggcccc

SEQ ID NO: 3827820 - RNA, 15 nt, Human
ccucgcuggccccca

SEQ ID NO: 3827821 - RNA, 18 nt, Human
ccucgcuggcccccacug

SEQ ID NO: 3827822 - RNA, 20 nt, Human
ccucgcuggcccccacuggc

SEQ ID NO: 3827823 - RNA, 22 nt, Human
ccucgcuggcccccacuggcug

SEQ ID NO: 3827824 - RNA, 21 nt, Human
ccucggaaccgcucaccuaga

SEQ ID NO: 3827825 - RNA, 19 nt, Human
ccucggacuuagcugggag

SEQ ID NO: 3827826 - RNA, 13 nt, Human
ccucggagccuca

SEQ ID NO: 3827827 - RNA, 20 nt, Human
ccucggaucagcugagccuu

SEQ ID NO: 3827828 - RNA, 22 nt, Human
ccucggccucccaaagugcugg

SEQ ID NO: 3827829 - RNA, 16 nt, Human
ccucggccuggcuccu

SEQ ID NO: 3827830 - RNA, 13 nt, Human
ccucggcuccugc

SEQ ID NO: 3827831 - RNA, 14 nt, Human
ccucggcuccugcu

SEQ ID NO: 3827832 - RNA, 15 nt, Human
ccucggcuccuggac

SEQ ID NO: 3827833 - RNA, 14 nt, Human
ccucggcuggcucc

SEQ ID NO: 3827834 - RNA, 15 nt, Human
ccucggcuggcuccc

SEQ ID NO: 3827835 - RNA, 20 nt, Human
ccucggcuuuucucagcugg

SEQ ID NO: 3827836 - RNA, 17 nt, Human
ccucgggaaccucacuc

SEQ ID NO: 3827837 - RNA, 21 nt, Human
ccucgggaaccucacucuugc

SEQ ID NO: 3827838 - RNA, 15 nt, Human
ccucgggcccaccug

SEQ ID NO: 3827839 - RNA, 17 nt, Human
ccucgggcccaccuggc

SEQ ID NO: 3827840 - RNA, 21 nt, Human
ccucgggcccaccuggccacc

SEQ ID NO: 3827841 - RNA, 14 nt, Human
ccucgggcccagcc

SEQ ID NO: 3827842 - RNA, 15 nt, Human
ccucgggcccagccc

SEQ ID NO: 3827843 - RNA, 22 nt, Human
ccucgggcgagucacugccucu

SEQ ID NO: 3827844 - RNA, 16 nt, Human
ccucggggaugugucc

SEQ ID NO: 3827845 - RNA, 16 nt, Human
ccucggugccuuccuc

SEQ ID NO: 3827846 - RNA, 16 nt, Human
ccucguccucccccug

SEQ ID NO: 3827847 - RNA, 17 nt, Human
ccucguccucccccugc

SEQ ID NO: 3827848 - RNA, 20 nt, Human
ccucguccucccccugccag

SEQ ID NO: 3827849 - RNA, 18 nt, Human
ccucgugaaagugcauuu

SEQ ID NO: 3827850 - RNA, 12 nt, Human
ccucgugccagu

SEQ ID NO: 3827851 - RNA, 18 nt, Human
ccucguggacaccugccc

SEQ ID NO: 3827852 - RNA, 20 nt, Human
ccucguggacaccugcccug

SEQ ID NO: 3827853 - RNA, 22 nt, Human
ccucguggccagcccggcuggu

SEQ ID NO: 3827854 - RNA, 18 nt, Human
ccucguggccuuccccag

SEQ ID NO: 3827855 - RNA, 15 nt, Human
ccucgugguccccaa

SEQ ID NO: 3827856 - RNA, 18 nt, Human
ccucgugguccccaacag

SEQ ID NO: 3827857 - RNA, 22 nt, Human
ccucguuagggaagagaaacag

SEQ ID NO: 3827858 - RNA, 14 nt, Human
ccucguuuguguuc

SEQ ID NO: 3827859 - RNA, 16 nt, Human
ccucuaacagcaccaa

SEQ ID NO: 3827860 - RNA, 17 nt, Human
ccucuaacaggggcugg

SEQ ID NO: 3827861 - RNA, 23 nt, Human
ccucuaacaggggcuggugggca

SEQ ID NO: 3827862 - RNA, 13 nt, Human
ccucuaaccccag

SEQ ID NO: 3827863 - RNA, 18 nt, Human
ccucuaaccccaggcccc

SEQ ID NO: 3827864 - RNA, 17 nt, Human
ccucuaacuuggcucac

SEQ ID NO: 3827865 - RNA, 14 nt, Human
ccucuaagccacuc

SEQ ID NO: 3827866 - RNA, 19 nt, Human
ccucuaagguugggcaggg

SEQ ID NO: 3827867 - RNA, 22 nt, Human
ccucuaaugcucacgcucccaa

SEQ ID NO: 3827868 - RNA, 20 nt, Human
ccucuacagagcuucccuga

SEQ ID NO: 3827869 - RNA, 21 nt, Human
ccucuacagagcuucccugac

SEQ ID NO: 3827870 - RNA, 21 nt, Human
ccucuacauggacucagagaa

SEQ ID NO: 3827871 - RNA, 14 nt, Human
ccucuaccaagcug

SEQ ID NO: 3827872 - RNA, 14 nt, Human
ccucuacccaaacc

SEQ ID NO: 3827873 - RNA, 14 nt, Human
ccucuacugggaag

SEQ ID NO: 3827874 - RNA, 14 nt, Human
ccucuacuuuccag

SEQ ID NO: 3827875 - RNA, 16 nt, Human
ccucuagaagccaagg

SEQ ID NO: 3827876 - RNA, 14 nt, Human
ccucuagaggcaag

SEQ ID NO: 3827877 - RNA, 13 nt, Human
ccucuagcccugc

SEQ ID NO: 3827878 - RNA, 17 nt, Human
ccucuagcccugcccgg

SEQ ID NO: 3827879 - RNA, 18 nt, Human
ccucuagcccugcccgga

SEQ ID NO: 3827880 - RNA, 15 nt, Human
ccucuagguccccau

SEQ ID NO: 3827881 - RNA, 13 nt, Human
ccucuagugcccu

SEQ ID NO: 3827882 - RNA, 15 nt, Human
ccucuagugcccucc

SEQ ID NO: 3827883 - RNA, 18 nt, Human
ccucuauacaucucuccc

SEQ ID NO: 3827884 - RNA, 19 nt, Human
ccucuauacaucucucccc

SEQ ID NO: 3827885 - RNA, 20 nt, Human
ccucuauacaucucucccca

SEQ ID NO: 3827886 - RNA, 16 nt, Human
ccucuauauuugcucu

SEQ ID NO: 3827887 - RNA, 17 nt, Human
ccucucaccuguacucu

SEQ ID NO: 3827888 - RNA, 16 nt, Human
ccucucacuaaacuuu

SEQ ID NO: 3827889 - RNA, 12 nt, Human
ccucucacugcc

SEQ ID NO: 3827890 - RNA, 13 nt, Human
ccucucacugucu

SEQ ID NO: 3827891 - RNA, 14 nt, Human
ccucucacugucug

SEQ ID NO: 3827892 - RNA, 14 nt, Human
ccucucacuguguc

SEQ ID NO: 3827893 - RNA, 15 nt, Human
ccucucagagcuacu

SEQ ID NO: 3827894 - RNA, 11 nt, Human
ccucucagccc

SEQ ID NO: 3827895 - RNA, 15 nt, Human
ccucucaggagccau

SEQ ID NO: 3827896 - RNA, 18 nt, Human
ccucucagugcccuccag

SEQ ID NO: 3827897 - RNA, 18 nt, Human
ccucucauuccagaggaa

SEQ ID NO: 3827898 - RNA, 18 nt, Human
ccucucauuuagccuguc

SEQ ID NO: 3827899 - RNA, 20 nt, Human
ccucucauuuagccuguccu

SEQ ID NO: 3827900 - RNA, 14 nt, Human
ccucuccagccuca

SEQ ID NO: 3827901 - RNA, 16 nt, Human
ccucuccagccucagc

SEQ ID NO: 3827902 - RNA, 11 nt, Human
ccucuccaggc

SEQ ID NO: 3827903 - RNA, 14 nt, Human
ccucuccaggcacc

SEQ ID NO: 3827904 - RNA, 17 nt, Human
ccucuccaggcacccuu

SEQ ID NO: 3827905 - RNA, 19 nt, Human
ccucuccaguuugcaccug

SEQ ID NO: 3827906 - RNA, 22 nt, Human
ccucuccauaaccccacccuug

SEQ ID NO: 3827907 - RNA, 15 nt, Human
ccucuccauccugcu

SEQ ID NO: 3827908 - RNA, 16 nt, Human
ccucucccacccucuu

SEQ ID NO: 3827909 - RNA, 13 nt, Human
ccucucccaggcc

SEQ ID NO: 3827910 - RNA, 16 nt, Human
ccucucccaggcccca

SEQ ID NO: 3827911 - RNA, 12 nt, Human
ccucucccaggg

SEQ ID NO: 3827912 - RNA, 12 nt, Human
ccucucccauca

SEQ ID NO: 3827913 - RNA, 13 nt, Human
ccucucccauccc

SEQ ID NO: 3827914 - RNA, 14 nt, Human
ccucucccaucccc

SEQ ID NO: 3827915 - RNA, 15 nt, Human
ccucucccauccccc

SEQ ID NO: 3827916 - RNA, 16 nt, Human
ccucucccaucccccu

SEQ ID NO: 3827917 - RNA, 20 nt, Human
ccucucccaucccccugccc

SEQ ID NO: 3827918 - RNA, 22 nt, Human
ccucucccaucccccugcccuc

SEQ ID NO: 3827919 - RNA, 14 nt, Human
ccucuccccacccc

SEQ ID NO: 3827920 - RNA, 17 nt, Human
ccucuccccagcccaga

SEQ ID NO: 3827921 - RNA, 22 nt, Human
ccucuccccagggaagcagcag

SEQ ID NO: 3827922 - RNA, 19 nt, Human
ccucuccccccccccucca

SEQ ID NO: 3827923 - RNA, 12 nt, Human
ccucucccccuu

SEQ ID NO: 3827924 - RNA, 18 nt, Human
ccucuccccgcaguguuu

SEQ ID NO: 3827925 - RNA, 18 nt, Human
ccucuccccuaccacugu

SEQ ID NO: 3827926 - RNA, 18 nt, Human
ccucuccccucagccucu

SEQ ID NO: 3827927 - RNA, 16 nt, Human
ccucuccccuccagcc

SEQ ID NO: 3827928 - RNA, 20 nt, Human
ccucuccccugcccccugca

SEQ ID NO: 3827929 - RNA, 15 nt, Human
ccucuccccugccug

SEQ ID NO: 3827930 - RNA, 18 nt, Human
ccucuccccugccugccc

SEQ ID NO: 3827931 - RNA, 22 nt, Human
ccucucccgccagacuguuaga

SEQ ID NO: 3827932 - RNA, 19 nt, Human
ccucucccgucagggccca

SEQ ID NO: 3827933 - RNA, 23 nt, Human
ccucucccgucagggcccaaguc

SEQ ID NO: 3827934 - RNA, 12 nt, Human
ccucucccugac

SEQ ID NO: 3827935 - RNA, 15 nt, Human
ccucucccugacccu

SEQ ID NO: 3827936 - RNA, 21 nt, Human
ccucucccugacccuguauau

SEQ ID NO: 3827937 - RNA, 14 nt, Human
ccucucccugcaug

SEQ ID NO: 3827938 - RNA, 14 nt, Human
ccucucccugcugc

SEQ ID NO: 3827939 - RNA, 15 nt, Human
ccucucccugcugcu

SEQ ID NO: 3827940 - RNA, 13 nt, Human
ccucucccuguug

SEQ ID NO: 3827941 - RNA, 10 nt, Human
ccucucccuu

SEQ ID NO: 3827942 - RNA, 17 nt, Human
ccucucccuuacccugg

SEQ ID NO: 3827943 - RNA, 19 nt, Human
ccucucccuugggcucuga

SEQ ID NO: 3827944 - RNA, 22 nt, Human
ccucucccuugggcucugauga

SEQ ID NO: 3827945 - RNA, 15 nt, Human
ccucuccgccccuga

SEQ ID NO: 3827946 - RNA, 14 nt, Human
ccucuccuccacau

SEQ ID NO: 3827947 - RNA, 15 nt, Human
ccucuccugccuacu

SEQ ID NO: 3827948 - RNA, 17 nt, Human
ccucuccugccuacuca

SEQ ID NO: 3827949 - RNA, 14 nt, Human
ccucuccuggagga

SEQ ID NO: 3827950 - RNA, 12 nt, Human
ccucuccugggc

SEQ ID NO: 3827951 - RNA, 15 nt, Human
ccucuccugggcagc

SEQ ID NO: 3827952 - RNA, 16 nt, Human
ccucuccugggcagcu

SEQ ID NO: 3827953 - RNA, 17 nt, Human
ccucuccugggcagcug

SEQ ID NO: 3827954 - RNA, 18 nt, Human
ccucuccugggcagcugc

SEQ ID NO: 3827955 - RNA, 23 nt, Human
ccucuccuucaugacagccucca

SEQ ID NO: 3827956 - RNA, 14 nt, Human
ccucuccuuccuug

SEQ ID NO: 3827957 - RNA, 14 nt, Human
ccucuccuuugaaa

SEQ ID NO: 3827958 - RNA, 14 nt, Human
ccucuccuuuguuc

SEQ ID NO: 3827959 - RNA, 22 nt, Human
ccucucguaagauuuccuucuu

SEQ ID NO: 3827960 - RNA, 13 nt, Human
ccucucuaaccuc

SEQ ID NO: 3827961 - RNA, 20 nt, Human
caucagaagccuauuguaaa

SEQ ID NO: 3827962 - RNA, 14 nt, Human
caucagaaggagaa

SEQ ID NO: 3827963 - RNA, 14 nt, Human
caucagaaguggua

SEQ ID NO: 3827964 - RNA, 19 nt, Human
caucagacugugaacccca

SEQ ID NO: 3827965 - RNA, 11 nt, Human
caucagcaaac

SEQ ID NO: 3827966 - RNA, 18 nt, Human
caucagcacgauuucugu

SEQ ID NO: 3827967 - RNA, 13 nt, Human
caucagcauaccu

SEQ ID NO: 3827968 - RNA, 18 nt, Human
caucagcauaccuuuauu

SEQ ID NO: 3827969 - RNA, 20 nt, Human
caucagcauaccuuuauugu

SEQ ID NO: 3827970 - RNA, 14 nt, Human
caucagccagcugc

SEQ ID NO: 3827971 - RNA, 15 nt, Human
caucagccagcugcc

SEQ ID NO: 3827972 - RNA, 20 nt, Human
caucagcccaaucccugauc

SEQ ID NO: 3827973 - RNA, 20 nt, Human
caucagcuaaacaccacguc

SEQ ID NO: 3827974 - RNA, 19 nt, Human
caucagcugcucagauccc

SEQ ID NO: 3827975 - RNA, 15 nt, Human
caucaggacccugga

SEQ ID NO: 3827976 - RNA, 18 nt, Human
caucaggacccuggaccu

SEQ ID NO: 3827977 - RNA, 19 nt, Human
caucaggagaaaaagccuc

SEQ ID NO: 3827978 - RNA, 13 nt, Human
caucaggccaggc

SEQ ID NO: 3827979 - RNA, 12 nt, Human
caucagggacag

SEQ ID NO: 3827980 - RNA, 11 nt, Human
caucagggccu

SEQ ID NO: 3827981 - RNA, 13 nt, Human
caucagggccugg

SEQ ID NO: 3827982 - RNA, 15 nt, Human
caucagggccugggg

SEQ ID NO: 3827983 - RNA, 21 nt, Human
caucagggccuggggccugag

SEQ ID NO: 3827984 - RNA, 12 nt, Human
ccucucucucug

SEQ ID NO: 3827985 - RNA, 14 nt, Human
ccucucucugacuc

SEQ ID NO: 3827986 - RNA, 20 nt, Human
ccucucucuucugcuccacc

SEQ ID NO: 3827987 - RNA, 16 nt, Human
ccucucugcagguccc

SEQ ID NO: 3827988 - RNA, 19 nt, Human
ccucucugcaggucccuaa

SEQ ID NO: 3827989 - RNA, 20 nt, Human
ccucucugcaggucccuaau

SEQ ID NO: 3827990 - RNA, 23 nt, Human
ccucucugcaggucccuaauaaa

SEQ ID NO: 3827991 - RNA, 12 nt, Human
ccucucugcucu

SEQ ID NO: 3827992 - RNA, 15 nt, Human
ccucucuggccuccc

SEQ ID NO: 3827993 - RNA, 16 nt, Human
ccucucuggccuccca

SEQ ID NO: 3827994 - RNA, 19 nt, Human
ccucucuggccucccaccc

SEQ ID NO: 3827995 - RNA, 22 nt, Human
ccucucuggccucccacccgau

SEQ ID NO: 3827996 - RNA, 12 nt, Human
ccucucuguccc

SEQ ID NO: 3827997 - RNA, 13 nt, Human
ccucucugucccu

SEQ ID NO: 3827998 - RNA, 10 nt, Human
ccucucuguu

SEQ ID NO: 3827999 - RNA, 20 nt, Human
ccucucuuauagaauauuua

SEQ ID NO: 3828000 - RNA, 14 nt, Human
ccucucuuccuauc

SEQ ID NO: 3828001 - RNA, 16 nt, Human
ccucucuuccuauccc

SEQ ID NO: 3828002 - RNA, 11 nt, Human
ccucucuugca

SEQ ID NO: 3828003 - RNA, 13 nt, Human
ccucucuugcacc

SEQ ID NO: 3828004 - RNA, 18 nt, Human
ccucucuugcacccgccu

SEQ ID NO: 3828005 - RNA, 21 nt, Human
ccucucuugcacccgccucuc

SEQ ID NO: 3828006 - RNA, 19 nt, Human
ccucucuugguuuccuucc

SEQ ID NO: 3828007 - RNA, 21 nt, Human
ccucucuuuguucucagcucc

SEQ ID NO: 3828008 - RNA, 12 nt, Human
ccucugaaacag

SEQ ID NO: 3828009 - RNA, 13 nt, Human
ccucugaaacagc

SEQ ID NO: 3828010 - RNA, 16 nt, Human
ccucugaaacagcugc

SEQ ID NO: 3828011 - RNA, 17 nt, Human
ccucugaaacagcugcc

SEQ ID NO: 3828012 - RNA, 12 nt, Human
ccucugaaauac

SEQ ID NO: 3828013 - RNA, 13 nt, Human
ccucugacacaca

SEQ ID NO: 3828014 - RNA, 18 nt, Human
ccucugacacacagcucu

SEQ ID NO: 3828015 - RNA, 20 nt, Human
ccucugacacacagcucugu

SEQ ID NO: 3828016 - RNA, 18 nt, Human
ccucugacagcagcaucu

SEQ ID NO: 3828017 - RNA, 19 nt, Human
ccucugacagcagcaucuc

SEQ ID NO: 3828018 - RNA, 13 nt, Human
ccucugaccaaca

SEQ ID NO: 3828019 - RNA, 20 nt, Human
ccucugaccaacaggcuguu

SEQ ID NO: 3828020 - RNA, 18 nt, Human
ccucugaccccugccugu

SEQ ID NO: 3828021 - RNA, 22 nt, Human
ccucugacccuagcucuuuccu

SEQ ID NO: 3828022 - RNA, 17 nt, Human
ccucugaccugcacugg

SEQ ID NO: 3828023 - RNA, 19 nt, Human
ccucugaccugcaggccaa

SEQ ID NO: 3828024 - RNA, 19 nt, Human
ccucugacguccaccuccu

SEQ ID NO: 3828025 - RNA, 16 nt, Human
ccucugacucagggcu

SEQ ID NO: 3828026 - RNA, 16 nt, Human
ccucugacuuggggac

SEQ ID NO: 3828027 - RNA, 19 nt, Human
ccucugagaauuccaagga

SEQ ID NO: 3828028 - RNA, 14 nt, Human
ccucugagcuuugc

SEQ ID NO: 3828029 - RNA, 19 nt, Human
ccucugaggccagccuggc

SEQ ID NO: 3828030 - RNA, 21 nt, Human
ccucugaggccagccuggccu

SEQ ID NO: 3828031 - RNA, 11 nt, Human
ccucugaggcu

SEQ ID NO: 3828032 - RNA, 22 nt, Human
ccucugagggaaagcccagaaa

SEQ ID NO: 3828033 - RNA, 15 nt, Human
ccucugauacccaga

SEQ ID NO: 3828034 - RNA, 15 nt, Human
ccucugauaccucaa

SEQ ID NO: 3828035 - RNA, 17 nt, Human
ccucugauguauuuugu

SEQ ID NO: 3828036 - RNA, 15 nt, Human
ccucugcacaagcug

SEQ ID NO: 3828037 - RNA, 16 nt, Human
ccucugcacaagcugc

SEQ ID NO: 3828038 - RNA, 17 nt, Human
ccucugcacccagaaca

SEQ ID NO: 3828039 - RNA, 19 nt, Human
ccucugcaccuuugcacgu

SEQ ID NO: 3828040 - RNA, 21 nt, Human
ccucugcacuacugacaugug

SEQ ID NO: 3828041 - RNA, 18 nt, Human
ccucugcacuccccugcu

SEQ ID NO: 3828042 - RNA, 22 nt, Human
ccucugcacuccccugcugggu

SEQ ID NO: 3828043 - RNA, 12 nt, Human
ccucugcagcug

SEQ ID NO: 3828044 - RNA, 15 nt, Human
ccucugcagcugacc

SEQ ID NO: 3828045 - RNA, 16 nt, Human
ccucugcagcugaccu

SEQ ID NO: 3828046 - RNA, 16 nt, Human
ccucugcagucucuau

SEQ ID NO: 3828047 - RNA, 16 nt, Human
ccucugcauaaauauu

SEQ ID NO: 3828048 - RNA, 12 nt, Human
ccucugccaccu

SEQ ID NO: 3828049 - RNA, 15 nt, Human
ccucugccaccuccc

SEQ ID NO: 3828050 - RNA, 11 nt, Human
ccucugccaga

SEQ ID NO: 3828051 - RNA, 18 nt, Human
ccucugcccagcuugggc

SEQ ID NO: 3828052 - RNA, 22 nt, Human
ccucugcccaggcacugcuagg

SEQ ID NO: 3828053 - RNA, 19 nt, Human
ccucugccccauccuccag

SEQ ID NO: 3828054 - RNA, 11 nt, Human
ccucugcccug

SEQ ID NO: 3828055 - RNA, 12 nt, Human
ccucugcccugc

SEQ ID NO: 3828056 - RNA, 14 nt, Human
ccucugcccugcgg

SEQ ID NO: 3828057 - RNA, 19 nt, Human
ccucugcccuuccugcagg

SEQ ID NO: 3828058 - RNA, 13 nt, Human
ccucugccucaau

SEQ ID NO: 3828059 - RNA, 11 nt, Human
ccucugccuga

SEQ ID NO: 3828060 - RNA, 20 nt, Human
ccucugccugaagucacaca

SEQ ID NO: 3828061 - RNA, 21 nt, Human
ccucugccugaagucacacag

SEQ ID NO: 3828062 - RNA, 17 nt, Human
ccucugccugcauucug

SEQ ID NO: 3828063 - RNA, 19 nt, Human
ccucugccugucccucuca

SEQ ID NO: 3828064 - RNA, 19 nt, Human
ccucugccugucuccccca

SEQ ID NO: 3828065 - RNA, 20 nt, Human
ccucugccuuagaggagccc

SEQ ID NO: 3828066 - RNA, 18 nt, Human
ccucugcggaccccagcu

SEQ ID NO: 3828067 - RNA, 15 nt, Human
ccucugcuaaauuga

SEQ ID NO: 3828068 - RNA, 13 nt, Human
ccucugcucaccg

SEQ ID NO: 3828069 - RNA, 20 nt, Human
ccucugcucaccgcccauca

SEQ ID NO: 3828070 - RNA, 21 nt, Human
ccucugcucaccgcccaucag

SEQ ID NO: 3828071 - RNA, 12 nt, Human
ccucugcucagc

SEQ ID NO: 3828072 - RNA, 13 nt, Human
ccucugcucagcc

SEQ ID NO: 3828073 - RNA, 18 nt, Human
ccucugcuccuggagccu

SEQ ID NO: 3828074 - RNA, 20 nt, Human
ccucugcucugaggcuucca

SEQ ID NO: 3828075 - RNA, 22 nt, Human
ccucugcucugaggcuuccaga

SEQ ID NO: 3828076 - RNA, 20 nt, Human
ccucugcugaagacuugccc

SEQ ID NO: 3828077 - RNA, 18 nt, Human
ccucugcugaccugcuga

SEQ ID NO: 3828078 - RNA, 15 nt, Human
ccucugcugauccuc

SEQ ID NO: 3828079 - RNA, 13 nt, Human
ccucugcugcugg

SEQ ID NO: 3828080 - RNA, 18 nt, Human
ccucugcugcuggcuggu

SEQ ID NO: 3828081 - RNA, 20 nt, Human
ccucugcugcugucccuccc

SEQ ID NO: 3828082 - RNA, 21 nt, Human
ccucugcuggcacauuucccc

SEQ ID NO: 3828083 - RNA, 13 nt, Human
ccucugcuuccca

SEQ ID NO: 3828084 - RNA, 15 nt, Human
ccucugcuucccagg

SEQ ID NO: 3828085 - RNA, 17 nt, Human
ccucugcuugccauccc

SEQ ID NO: 3828086 - RNA, 18 nt, Human
ccucuggacuggcuagag

SEQ ID NO: 3828087 - RNA, 14 nt, Human
ccucuggagccagc

SEQ ID NO: 3828088 - RNA, 16 nt, Human
ccucuggaggccucug

SEQ ID NO: 3828089 - RNA, 16 nt, Human
ccucuggauggcacca

SEQ ID NO: 3828090 - RNA, 18 nt, Human
ccucuggauugugggaau

SEQ ID NO: 3828091 - RNA, 17 nt, Human
ccucuggcccugccuuc

SEQ ID NO: 3828092 - RNA, 17 nt, Human
ccucuggccgccuaggc

SEQ ID NO: 3828093 - RNA, 16 nt, Human
ccucuggcuccagcug

SEQ ID NO: 3828094 - RNA, 22 nt, Human
ccucuggcuggcuaacuggaag

SEQ ID NO: 3828095 - RNA, 18 nt, Human
ccucuggcuuggccacag

SEQ ID NO: 3828096 - RNA, 23 nt, Human
ccucuggcuuggccacagccagg

SEQ ID NO: 3828097 - RNA, 12 nt, Human
ccucugggaacc

SEQ ID NO: 3828098 - RNA, 14 nt, Human
ccucugggaaccuc

SEQ ID NO: 3828099 - RNA, 17 nt, Human
ccucugggaaccuccca

SEQ ID NO: 3828100 - RNA, 11 nt, Human
ccucugggccc

SEQ ID NO: 3828101 - RNA, 15 nt, Human
ccucugggccuccuc

SEQ ID NO: 3828102 - RNA, 14 nt, Human
ccucugggcucuga

SEQ ID NO: 3828103 - RNA, 16 nt, Human
ccucugggcucugagu

SEQ ID NO: 3828104 - RNA, 11 nt, Human
ccucugggcuu

SEQ ID NO: 3828105 - RNA, 19 nt, Human
ccucugggggguggccagg

SEQ ID NO: 3828106 - RNA, 17 nt, Human
ccucugggucagugguc

SEQ ID NO: 3828107 - RNA, 16 nt, Human
ccucugguagacacag

SEQ ID NO: 3828108 - RNA, 19 nt, Human
ccugccuggaccagccucu

SEQ ID NO: 3828109 - RNA, 13 nt, Human
ccugccuggagga

SEQ ID NO: 3828110 - RNA, 20 nt, Human
ccugccuggaggaccugagc

SEQ ID NO: 3828111 - RNA, 14 nt, Human
ccugccuggcaggc

SEQ ID NO: 3828112 - RNA, 11 nt, Human
ccugccuggcc

SEQ ID NO: 3828113 - RNA, 12 nt, Human
ccugccuggcca

SEQ ID NO: 3828114 - RNA, 12 nt, Human
ccugccuggccc

SEQ ID NO: 3828115 - RNA, 14 nt, Human
ccugccuggccggc

SEQ ID NO: 3828116 - RNA, 16 nt, Human
ccugccuggccggcca

SEQ ID NO: 3828117 - RNA, 18 nt, Human
ccugccuggccggccagc

SEQ ID NO: 3828118 - RNA, 23 nt, Human
ccugccuggccggccagccagcc

SEQ ID NO: 3828119 - RNA, 14 nt, Human
ccugccuggucucc

SEQ ID NO: 3828120 - RNA, 13 nt, Human
ccugccugucucc

SEQ ID NO: 3828121 - RNA, 15 nt, Human
ccugccugucuccuu

SEQ ID NO: 3828122 - RNA, 13 nt, Human
ccugccugucugu

SEQ ID NO: 3828123 - RNA, 14 nt, Human
ccugccuguggcca

SEQ ID NO: 3828124 - RNA, 18 nt, Human
ccugccuguugggccagg

SEQ ID NO: 3828125 - RNA, 17 nt, Human
ccugccuuaggccuacc

SEQ ID NO: 3828126 - RNA, 22 nt, Human
ccugccuuccuccugggcccuc

SEQ ID NO: 3828127 - RNA, 15 nt, Human
ccugccuucuguccu

SEQ ID NO: 3828128 - RNA, 19 nt, Human
ccugccuugaaaaagacau

SEQ ID NO: 3828129 - RNA, 16 nt, Human
ccugccuugaagccac

SEQ ID NO: 3828130 - RNA, 18 nt, Human
ccugccuuugggagcagg

SEQ ID NO: 3828131 - RNA, 11 nt, Human
ccugccuuuua

SEQ ID NO: 3828132 - RNA, 15 nt, Human
ccugcgaaggggccc

SEQ ID NO: 3828133 - RNA, 17 nt, Human
ccugcgaaggggcccug

SEQ ID NO: 3828134 - RNA, 14 nt, Human
ccugcgacccuggg

SEQ ID NO: 3828135 - RNA, 20 nt, Human
ccugcgccaccgcccagaga

SEQ ID NO: 3828136 - RNA, 16 nt, Human
ccugcgccaguccugc

SEQ ID NO: 3828137 - RNA, 22 nt, Human
ccugcgcccaccccgcucugca

SEQ ID NO: 3828138 - RNA, 18 nt, Human
ccugcgcccaguccuucc

SEQ ID NO: 3828139 - RNA, 20 nt, Human
ccugcgcccaguccuuccac

SEQ ID NO: 3828140 - RNA, 15 nt, Human
ccugcgccugcugca

SEQ ID NO: 3828141 - RNA, 18 nt, Human
ccugcgccugcugcaugc

SEQ ID NO: 3828142 - RNA, 23 nt, Human
caucagggccuggggccugagag

SEQ ID NO: 3828143 - RNA, 17 nt, Human
caucagggggaagaagc

SEQ ID NO: 3828144 - RNA, 12 nt, Human
caucagugccaa

SEQ ID NO: 3828145 - RNA, 15 nt, Human
caucagugccccguc

SEQ ID NO: 3828146 - RNA, 18 nt, Human
caucaguggcauggcucc

SEQ ID NO: 3828147 - RNA, 15 nt, Human
caucaguguuaaaaa

SEQ ID NO: 3828148 - RNA, 22 nt, Human
caucaguguuaaaaaauuuuug

SEQ ID NO: 3828149 - RNA, 15 nt, Human
caucaguuagagcug

SEQ ID NO: 3828150 - RNA, 18 nt, Human
caucaguuagagcugaca

SEQ ID NO: 3828151 - RNA, 19 nt, Human
caucaguuccuuugugugu

SEQ ID NO: 3828152 - RNA, 13 nt, Human
caucauaaaauaa

SEQ ID NO: 3828153 - RNA, 22 nt, Human
caucauaaaauaaaguauauau

SEQ ID NO: 3828154 - RNA, 13 nt, Human
caucauagaaacu

SEQ ID NO: 3828155 - RNA, 22 nt, Human
caucauaggaagggaccaaggc

SEQ ID NO: 3828156 - RNA, 14 nt, Human
caucauauuauaca

SEQ ID NO: 3828157 - RNA, 13 nt, Human
caucaucaaggca

SEQ ID NO: 3828158 - RNA, 21 nt, Human
caucaucaaggcacugccuga

SEQ ID NO: 3828159 - RNA, 12 nt, Human
caucaucagagc

SEQ ID NO: 3828160 - RNA, 16 nt, Human
caucaucagggccugg

SEQ ID NO: 3828161 - RNA, 17 nt, Human
caucaucaguggagcca

SEQ ID NO: 3828162 - RNA, 17 nt, Human
caucauccagauguggc

SEQ ID NO: 3828163 - RNA, 11 nt, Human
caucaucccuu

SEQ ID NO: 3828164 - RNA, 13 nt, Human
caucauccucugg

SEQ ID NO: 3828165 - RNA, 15 nt, Human
caucauccucuggcu

SEQ ID NO: 3828166 - RNA, 15 nt, Human
caucaucucagcuca

SEQ ID NO: 3828167 - RNA, 13 nt, Human
caucaucuccugc

SEQ ID NO: 3828168 - RNA, 20 nt, Human
caucaucuccugccuuccuc

SEQ ID NO: 3828169 - RNA, 21 nt, Human
caucaucuccugccuuccucc

SEQ ID NO: 3828170 - RNA, 14 nt, Human
caucaugaguucug

SEQ ID NO: 3828171 - RNA, 22 nt, Human
caucaugcuggaaccugcaaaa

SEQ ID NO: 3828172 - RNA, 21 nt, Human
caucaugcuuacaaaaaagaa

SEQ ID NO: 3828173 - RNA, 21 nt, Human
caucauguccccaaaccugca

SEQ ID NO: 3828174 - RNA, 15 nt, Human
caucauuaaauuuuu

SEQ ID NO: 3828175 - RNA, 14 nt, Human
caucauuagaacaa

SEQ ID NO: 3828176 - RNA, 19 nt, Human
caucauuauuuauguauug

SEQ ID NO: 3828177 - RNA, 21 nt, Human
caucauuauuugcagagacag

SEQ ID NO: 3828178 - RNA, 16 nt, Human
caucauucacuucacu

SEQ ID NO: 3828179 - RNA, 20 nt, Human
caucauucccucucaucuca

SEQ ID NO: 3828180 - RNA, 20 nt, Human
caucauuccuuuuuauuuau

SEQ ID NO: 3828181 - RNA, 22 nt, Human
caucauuccuuuuuauuuauau

SEQ ID NO: 3828182 - RNA, 17 nt, Human
caucauucucugucuca

SEQ ID NO: 3828183 - RNA, 14 nt, Human
caucauugaaaucu

SEQ ID NO: 3828184 - RNA, 13 nt, Human
caucauugcagau

SEQ ID NO: 3828185 - RNA, 13 nt, Human
caucauuguauau

SEQ ID NO: 3828186 - RNA, 17 nt, Human
caucauuguuucugcau

SEQ ID NO: 3828187 - RNA, 20 nt, Human
caucauuucuuuuugggaga

SEQ ID NO: 3828188 - RNA, 20 nt, Human
caucauuuuccauauccugg

SEQ ID NO: 3828189 - RNA, 17 nt, Human
caucauuuuuguaucua

SEQ ID NO: 3828190 - RNA, 23 nt, Human
cauccaaaaucuugaucaguuaa

SEQ ID NO: 3828191 - RNA, 17 nt, Human
cauccaaagcagacagc

SEQ ID NO: 3828192 - RNA, 18 nt, Human
cauccaaagcagacagcu

SEQ ID NO: 3828193 - RNA, 18 nt, Human
cauccaaauaagaaaccu

SEQ ID NO: 3828194 - RNA, 16 nt, Human
cauccaaccccccacc

SEQ ID NO: 3828195 - RNA, 16 nt, Human
cauccaaccuucccaa

SEQ ID NO: 3828196 - RNA, 14 nt, Human
cauccaacuccagc

SEQ ID NO: 3828197 - RNA, 18 nt, Human
cauccaacuccagcaacu

SEQ ID NO: 3828198 - RNA, 15 nt, Human
cauccaacuccagga

SEQ ID NO: 3828199 - RNA, 14 nt, Human
cauccaacuuaugu

SEQ ID NO: 3828200 - RNA, 22 nt, Human
cauccaaggagaaacagagaca

SEQ ID NO: 3828201 - RNA, 23 nt, Human
cauccaaggagaaacagagacag

SEQ ID NO: 3828202 - RNA, 20 nt, Human
cauccaaggcacugucacua

SEQ ID NO: 3828203 - RNA, 21 nt, Human
cauccaaggccagguucuccg

SEQ ID NO: 3828204 - RNA, 21 nt, Human
cauccaauaggaaugcuaaca

SEQ ID NO: 3828205 - RNA, 16 nt, Human
cauccaauccucacug

SEQ ID NO: 3828206 - RNA, 18 nt, Human
cauccaauccucacuggg

SEQ ID NO: 3828207 - RNA, 20 nt, Human
cauccacauacccugaccug

SEQ ID NO: 3828208 - RNA, 17 nt, Human
cauccacauuguuuuaa

SEQ ID NO: 3828209 - RNA, 18 nt, Human
cauccaccgcugcuccac

SEQ ID NO: 3828210 - RNA, 12 nt, Human
cauccaccuccu

SEQ ID NO: 3828211 - RNA, 13 nt, Human
cauccaccuccuu

SEQ ID NO: 3828212 - RNA, 20 nt, Human
cauccacuagugcaaaucau

SEQ ID NO: 3828213 - RNA, 21 nt, Human
cauccacuagugcaaaucaua

SEQ ID NO: 3828214 - RNA, 17 nt, Human
cauccacucuacccucc

SEQ ID NO: 3828215 - RNA, 16 nt, Human
cauccagacaucauga

SEQ ID NO: 3828216 - RNA, 16 nt, Human
cauccagauguggcua

SEQ ID NO: 3828217 - RNA, 12 nt, Human
cauccagcaaga

SEQ ID NO: 3828218 - RNA, 15 nt, Human
cauccagcagucucu

SEQ ID NO: 3828219 - RNA, 19 nt, Human
cauccagcagucucugccu

SEQ ID NO: 3828220 - RNA, 14 nt, Human
cauccagucuauuc

SEQ ID NO: 3828221 - RNA, 22 nt, Human
cauccagugucucacagcccug

SEQ ID NO: 3828222 - RNA, 18 nt, Human
cauccauaguaacugaca

SEQ ID NO: 3828223 - RNA, 19 nt, Human
cauccauaguaacugacau

SEQ ID NO: 3828224 - RNA, 16 nt, Human
cauccauaguaguaug

SEQ ID NO: 3828225 - RNA, 13 nt, Human
cauccaucaucau

SEQ ID NO: 3828226 - RNA, 23 nt, Human
cauccaugccucagaagugcauc

SEQ ID NO: 3828227 - RNA, 15 nt, Human
cauccauggccagca

SEQ ID NO: 3828228 - RNA, 18 nt, Human
cauccauggccagcagca

SEQ ID NO: 3828229 - RNA, 22 nt, Human
cauccauggccagcagcaccug

SEQ ID NO: 3828230 - RNA, 22 nt, Human
cauccauggccgggcuuggugg

SEQ ID NO: 3828231 - RNA, 19 nt, Human
cauccauggggucucucac

SEQ ID NO: 3828232 - RNA, 18 nt, Human
cauccauguccuaugugu

SEQ ID NO: 3828233 - RNA, 20 nt, Human
cauccauguccuauguguga

SEQ ID NO: 3828234 - RNA, 18 nt, Human
cauccauguguggacuca

SEQ ID NO: 3828235 - RNA, 14 nt, Human
cauccauuccucag

SEQ ID NO: 3828236 - RNA, 19 nt, Human
cauccauuccucagggaca

SEQ ID NO: 3828237 - RNA, 21 nt, Human
cauccauucucacagguccca

SEQ ID NO: 3828238 - RNA, 17 nt, Human
caucccaaccagugcca

SEQ ID NO: 3828239 - RNA, 20 nt, Human
caucccaaccagugccaagg

SEQ ID NO: 3828240 - RNA, 13 nt, Human
caucccaacuguc

SEQ ID NO: 3828241 - RNA, 14 nt, Human
caucccacacccug

SEQ ID NO: 3828242 - RNA, 14 nt, Human
caucccagccccaa

SEQ ID NO: 3828243 - RNA, 13 nt, Human
caucccaggggac

SEQ ID NO: 3828244 - RNA, 14 nt, Human
caucccaggggacc

SEQ ID NO: 3828245 - RNA, 23 nt, Human
caucccaguggccucaacccucc

SEQ ID NO: 3828246 - RNA, 19 nt, Human
caucccauaugccugggca

SEQ ID NO: 3828247 - RNA, 12 nt, Human
caucccauccca

SEQ ID NO: 3828248 - RNA, 21 nt, Human
caucccaucuaagcugcagcu

SEQ ID NO: 3828249 - RNA, 12 nt, Human
caucccaugcug

SEQ ID NO: 3828250 - RNA, 15 nt, Human
caucccauguauuua

SEQ ID NO: 3828251 - RNA, 13 nt, Human
caucccauugccc

SEQ ID NO: 3828252 - RNA, 17 nt, Human
caucccauugcccuggu

SEQ ID NO: 3828253 - RNA, 21 nt, Human
cauccccaaaacaaagucuuu

SEQ ID NO: 3828254 - RNA, 15 nt, Human
caugaagccuuuuga

SEQ ID NO: 3828255 - RNA, 14 nt, Human
caugaagguaaaua

SEQ ID NO: 3828256 - RNA, 16 nt, Human
caugaagguaaauaaa

SEQ ID NO: 3828257 - RNA, 18 nt, Human
caugaagguuucugaaaa

SEQ ID NO: 3828258 - RNA, 23 nt, Human
caugaaguaauaugcacacauuu

SEQ ID NO: 3828259 - RNA, 18 nt, Human
caugaaguuuccuuggcu

SEQ ID NO: 3828260 - RNA, 22 nt, Human
caugaaguuuccuuggcuggug

SEQ ID NO: 3828261 - RNA, 21 nt, Human
caugaaucccacccacaugug

SEQ ID NO: 3828262 - RNA, 18 nt, Human
caugaaucgcuucucuuu

SEQ ID NO: 3828263 - RNA, 19 nt, Human
caugaaucugcacaucugu

SEQ ID NO: 3828264 - RNA, 13 nt, Human
caugaaugcuuuu

SEQ ID NO: 3828265 - RNA, 16 nt, Human
caugaauguaaauuug

SEQ ID NO: 3828266 - RNA, 20 nt, Human
caugaauucuuaugcuuaua

SEQ ID NO: 3828267 - RNA, 14 nt, Human
caugaauuugugaa

SEQ ID NO: 3828268 - RNA, 15 nt, Human
caugaauuuuaaaau

SEQ ID NO: 3828269 - RNA, 14 nt, Human
caugaauuuuaaag

SEQ ID NO: 3828270 - RNA, 15 nt, Human
caugaauuuuaaagu

SEQ ID NO: 3828271 - RNA, 16 nt, Human
caugaauuuuaaagua

SEQ ID NO: 3828272 - RNA, 17 nt, Human
caugaauuuuaaaguau

SEQ ID NO: 3828273 - RNA, 21 nt, Human
caugaauuuuaaaguaugcau

SEQ ID NO: 3828274 - RNA, 20 nt, Human
caugaauuuuagcuuuugug

SEQ ID NO: 3828275 - RNA, 21 nt, Human
caugaauuuuuuucaucuucu

SEQ ID NO: 3828276 - RNA, 14 nt, Human
caugacaagcccca

SEQ ID NO: 3828277 - RNA, 16 nt, Human
caugacaagccccagg

SEQ ID NO: 3828278 - RNA, 22 nt, Human
caugacacagcuuuaucaccag

SEQ ID NO: 3828279 - RNA, 23 nt, Human
caugacacagcuuuaucaccaga

SEQ ID NO: 3828280 - RNA, 23 nt, Human
caugacacccgugagcgccugug

SEQ ID NO: 3828281 - RNA, 17 nt, Human
caugacacgaauauugc

SEQ ID NO: 3828282 - RNA, 21 nt, Human
caugacacgaauauugcugau

SEQ ID NO: 3828283 - RNA, 12 nt, Human
caugacacugac

SEQ ID NO: 3828284 - RNA, 14 nt, Human
caugacagccucca

SEQ ID NO: 3828285 - RNA, 18 nt, Human
caugacaggccugaagau

SEQ ID NO: 3828286 - RNA, 12 nt, Human
caugacauguua

SEQ ID NO: 3828287 - RNA, 16 nt, Human
caugacauguuauaua

SEQ ID NO: 3828288 - RNA, 17 nt, Human
caugacauguuauauau

SEQ ID NO: 3828289 - RNA, 20 nt, Human
caugacauuuaccagcaacu

SEQ ID NO: 3828290 - RNA, 12 nt, Human
caugacccaccc

SEQ ID NO: 3828291 - RNA, 14 nt, Human
caugacccaccccu

SEQ ID NO: 3828292 - RNA, 16 nt, Human
caugacccaccccugu

SEQ ID NO: 3828293 - RNA, 18 nt, Human
caugacccaccccugugc

SEQ ID NO: 3828294 - RNA, 19 nt, Human
caugacccaccccugugcu

SEQ ID NO: 3828295 - RNA, 16 nt, Human
caugacccaggcuggg

SEQ ID NO: 3828296 - RNA, 17 nt, Human
caugacccaggcugggc

SEQ ID NO: 3828297 - RNA, 18 nt, Human
caugaccuaguuuuccau

SEQ ID NO: 3828298 - RNA, 13 nt, Human
caugaccuccagc

SEQ ID NO: 3828299 - RNA, 20 nt, Human
caugaccuccagcuuuccug

SEQ ID NO: 3828300 - RNA, 23 nt, Human
caugaccugaucacuagccuguc

SEQ ID NO: 3828301 - RNA, 18 nt, Human
caugaccugugaccagca

SEQ ID NO: 3828302 - RNA, 21 nt, Human
caugaccuuacauuuccuggg

SEQ ID NO: 3828303 - RNA, 18 nt, Human
caugaccuuauccuuccu

SEQ ID NO: 3828304 - RNA, 19 nt, Human
caugacgacaaagcugcua

SEQ ID NO: 3828305 - RNA, 20 nt, Human
caugacgcaaagagagauuu

SEQ ID NO: 3828306 - RNA, 23 nt, Human
caugacucguauaugucucaggu

SEQ ID NO: 3828307 - RNA, 16 nt, Human
caugacugcauuuuac

SEQ ID NO: 3828308 - RNA, 18 nt, Human
caugacugcuugcccuaa

SEQ ID NO: 3828309 - RNA, 21 nt, Human
caugacugcuugcccuaagca

SEQ ID NO: 3828310 - RNA, 15 nt, Human
caugagaacagacug

SEQ ID NO: 3828311 - RNA, 20 nt, Human
caugagaacagacuggccug

SEQ ID NO: 3828312 - RNA, 22 nt, Human
caugagaagagggccuguggga

SEQ ID NO: 3828313 - RNA, 22 nt, Human
caugagaauguuuuagcacagc

SEQ ID NO: 3828314 - RNA, 23 nt, Human
caugagacccuggugccuggcuc

SEQ ID NO: 3828315 - RNA, 18 nt, Human
caugagacuauguaaaaa

SEQ ID NO: 3828316 - RNA, 23 nt, Human
caugagagaauuguaucauuuga

SEQ ID NO: 3828317 - RNA, 20 nt, Human
caugagaggaggcagcagga

SEQ ID NO: 3828318 - RNA, 21 nt, Human
caugagcaucaggccaggccc

SEQ ID NO: 3828319 - RNA, 22 nt, Human
caugagcaucaggccaggcccu

SEQ ID NO: 3828320 - RNA, 19 nt, Human
caugagccgcccaaggccu

SEQ ID NO: 3828321 - RNA, 22 nt, Human
caugagccgcccaaggccuucc

SEQ ID NO: 3828322 - RNA, 21 nt, Human
caugagccucagcauccuggc

SEQ ID NO: 3828323 - RNA, 14 nt, Human
caugagccugcugg

SEQ ID NO: 3828324 - RNA, 20 nt, Human
caugagccugcuggaagccc

SEQ ID NO: 3828325 - RNA, 19 nt, Human
caugagcuacgccugccuc

SEQ ID NO: 3828326 - RNA, 20 nt, Human
caugagcuacgccugccucc

SEQ ID NO: 3828327 - RNA, 22 nt, Human
caugagcuauuuccauuccaga

SEQ ID NO: 3828328 - RNA, 23 nt, Human
caugagcuauuuccauuccagaa

SEQ ID NO: 3828329 - RNA, 23 nt, Human
caugagcuccuuaaggcucuuuu

SEQ ID NO: 3828330 - RNA, 17 nt, Human
caugaggaacaaggcaa

SEQ ID NO: 3828331 - RNA, 21 nt, Human
caugaggaacaaggcaaggcu

SEQ ID NO: 3828332 - RNA, 22 nt, Human
caugaggaacuguagaugaugu

SEQ ID NO: 3828333 - RNA, 15 nt, Human
caugaggaaggaaca

SEQ ID NO: 3828334 - RNA, 23 nt, Human
caugaggaggggccccccugccc

SEQ ID NO: 3828335 - RNA, 20 nt, Human
caugaggagggugggggagg

SEQ ID NO: 3828336 - RNA, 23 nt, Human
caugaggcaaugucaggaacaga

SEQ ID NO: 3828337 - RNA, 13 nt, Human
caugaggggagag

SEQ ID NO: 3828338 - RNA, 14 nt, Human
caugaggggagagg

SEQ ID NO: 3828339 - RNA, 15 nt, Human
caugaggggagagga

SEQ ID NO: 3828340 - RNA, 18 nt, Human
caugaggggagaggagac

SEQ ID NO: 3828341 - RNA, 20 nt, Human
caugaggggcccgagcagaa

SEQ ID NO: 3828342 - RNA, 15 nt, Human
caugagggguuccuc

SEQ ID NO: 3828343 - RNA, 18 nt, Human
caugagggguuccucccc

SEQ ID NO: 3828344 - RNA, 15 nt, Human
caugagguucucucu

SEQ ID NO: 3828345 - RNA, 21 nt, Human
caugaguaaaauagauuuuau

SEQ ID NO: 3828346 - RNA, 13 nt, Human
ccugccuggagcg

SEQ ID NO: 3828347 - RNA, 17 nt, Human
ccugccuggaggaccug

SEQ ID NO: 3828348 - RNA, 14 nt, Human
ccugccuggccagg

SEQ ID NO: 3828349 - RNA, 22 nt, Human
ccugccuggccaggcagaucug

SEQ ID NO: 3828350 - RNA, 13 nt, Human
ccugccuggcccc

SEQ ID NO: 3828351 - RNA, 15 nt, Human
ccugccuggccccca

SEQ ID NO: 3828352 - RNA, 17 nt, Human
ccugccuggcccccugu

SEQ ID NO: 3828353 - RNA, 12 nt, Human
ccugccuggccg

SEQ ID NO: 3828354 - RNA, 16 nt, Human
ccugccuguagcccac

SEQ ID NO: 3828355 - RNA, 14 nt, Human
ccugccugucuccu

SEQ ID NO: 3828356 - RNA, 13 nt, Human
ccugccugucugc

SEQ ID NO: 3828357 - RNA, 14 nt, Human
ccugccugucugcc

SEQ ID NO: 3828358 - RNA, 15 nt, Human
ccugccugucugccc

SEQ ID NO: 3828359 - RNA, 17 nt, Human
ccugccugucugucucu

SEQ ID NO: 3828360 - RNA, 18 nt, Human
ccugccugucugucucuc

SEQ ID NO: 3828361 - RNA, 12 nt, Human
ccugccuguggc

SEQ ID NO: 3828362 - RNA, 19 nt, Human
ccugccuguugggccagga

SEQ ID NO: 3828363 - RNA, 14 nt, Human
ccugccuuaaguga

SEQ ID NO: 3828364 - RNA, 20 nt, Human
ccugccuuagagccaggcac

SEQ ID NO: 3828365 - RNA, 21 nt, Human
ccugccuuagagccaggcaca

SEQ ID NO: 3828366 - RNA, 16 nt, Human
ccugccuuaucuugca

SEQ ID NO: 3828367 - RNA, 16 nt, Human
ccugccuuccuccugg

SEQ ID NO: 3828368 - RNA, 14 nt, Human
ccugccuucguuaa

SEQ ID NO: 3828369 - RNA, 16 nt, Human
ccugccuucuguccug

SEQ ID NO: 3828370 - RNA, 18 nt, Human
ccugccuucuucggggaa

SEQ ID NO: 3828371 - RNA, 17 nt, Human
ccugccuugaagccacu

SEQ ID NO: 3828372 - RNA, 21 nt, Human
ccugccuugaagccacugaag

SEQ ID NO: 3828373 - RNA, 19 nt, Human
ccugccuuggccucccaag

SEQ ID NO: 3828374 - RNA, 16 nt, Human
ccugccuuuccaucca

SEQ ID NO: 3828375 - RNA, 20 nt, Human
ccugccuuuuaguuccugug

SEQ ID NO: 3828376 - RNA, 20 nt, Human
ccugcgaaggggcccugguc

SEQ ID NO: 3828377 - RNA, 15 nt, Human
ccugcgacccugggg

SEQ ID NO: 3828378 - RNA, 16 nt, Human
ccugcgacccuggggg

SEQ ID NO: 3828379 - RNA, 13 nt, Human
ccugcgagggcag

SEQ ID NO: 3828380 - RNA, 18 nt, Human
ccugcgauuuugccugug

SEQ ID NO: 3828381 - RNA, 19 nt, Human
ccugcgcccaccccgcucu

SEQ ID NO: 3828382 - RNA, 21 nt, Human
ccugcgcccaccccgcucugc

SEQ ID NO: 3828383 - RNA, 22 nt, Human
ccugcgcccaguccuuccaccu

SEQ ID NO: 3828384 - RNA, 13 nt, Human
ccugcgccugcug

SEQ ID NO: 3828385 - RNA, 15 nt, Human
ccugcgccugugaug

SEQ ID NO: 3828386 - RNA, 14 nt, Human
ccugcgcgcaugug

SEQ ID NO: 3828387 - RNA, 16 nt, Human
ccugcggagugaagag

SEQ ID NO: 3828388 - RNA, 17 nt, Human
ccugcggccugcuggag

SEQ ID NO: 3828389 - RNA, 20 nt, Human
ccugcggcugcugugugccu

SEQ ID NO: 3828390 - RNA, 22 nt, Human
ccugcgggcugccccgcuuugc

SEQ ID NO: 3828391 - RNA, 24 nt, Human
ccugcgggugaacaaagcagccac

SEQ ID NO: 3828392 - RNA, 15 nt, Human
ccugcguccuccuca

SEQ ID NO: 3828393 - RNA, 16 nt, Human
ccugcguccuccucac

SEQ ID NO: 3828394 - RNA, 18 nt, Human
ccugcguccuccucaccu

SEQ ID NO: 3828395 - RNA, 20 nt, Human
ccugcguccuccucaccuca

SEQ ID NO: 3828396 - RNA, 23 nt, Human
ccugcgucucauacucaccucac

SEQ ID NO: 3828397 - RNA, 11 nt, Human
ccuguggcucu

SEQ ID NO: 3828398 - RNA, 13 nt, Human
ccuguggcugucg

SEQ ID NO: 3828399 - RNA, 13 nt, Human
ccuguggcugugg

SEQ ID NO: 3828400 - RNA, 13 nt, Human
ccugugggagccu

SEQ ID NO: 3828401 - RNA, 15 nt, Human
ccugugggagccucg

SEQ ID NO: 3828402 - RNA, 18 nt, Human
ccuguggggaucucaggg

SEQ ID NO: 3828403 - RNA, 20 nt, Human
ccuguggggaucucaggggc

SEQ ID NO: 3828404 - RNA, 23 nt, Human
ccugugggggaagagcacagccc

SEQ ID NO: 3828405 - RNA, 22 nt, Human
ccugugggggguaaucccugcu

SEQ ID NO: 3828406 - RNA, 23 nt, Human
ccuguggggucaacccuucugga

SEQ ID NO: 3828407 - RNA, 17 nt, Human
ccuguggguguagccag

SEQ ID NO: 3828408 - RNA, 18 nt, Human
ccuguggguguagccagg

SEQ ID NO: 3828409 - RNA, 15 nt, Human
ccugugguucugaga

SEQ ID NO: 3828410 - RNA, 17 nt, Human
ccuguguaacagcuccu

SEQ ID NO: 3828411 - RNA, 18 nt, Human
ccuguguaacagcuccuu

SEQ ID NO: 3828412 - RNA, 14 nt, Human
ccuguguacugugu

SEQ ID NO: 3828413 - RNA, 13 nt, Human
ccuguguagcugu

SEQ ID NO: 3828414 - RNA, 14 nt, Human
ccuguguagcugug

SEQ ID NO: 3828415 - RNA, 21 nt, Human
ccuguguagcugugaccugcu

SEQ ID NO: 3828416 - RNA, 17 nt, Human
ccuguguauacagcccu

SEQ ID NO: 3828417 - RNA, 17 nt, Human
ccuguguccaccugugg

SEQ ID NO: 3828418 - RNA, 18 nt, Human
ccuguguccaccuguggg

SEQ ID NO: 3828419 - RNA, 13 nt, Human
ccuguguccaugc

SEQ ID NO: 3828420 - RNA, 11 nt, Human
ccuguguccca

SEQ ID NO: 3828421 - RNA, 13 nt, Human
ccuguguccugaa

SEQ ID NO: 3828422 - RNA, 20 nt, Human
ccugugucugcgaaguccua

SEQ ID NO: 3828423 - RNA, 22 nt, Human
ccugugugauugacagcuuugc

SEQ ID NO: 3828424 - RNA, 13 nt, Human
ccugugugcaggu

SEQ ID NO: 3828425 - RNA, 14 nt, Human
ccuguguggacagg

SEQ ID NO: 3828426 - RNA, 12 nt, Human
ccuguguggaga

SEQ ID NO: 3828427 - RNA, 19 nt, Human
ccugugugguuuaguguaa

SEQ ID NO: 3828428 - RNA, 21 nt, Human
ccugugugguuuaguguaaaa

SEQ ID NO: 3828429 - RNA, 18 nt, Human
ccuguguguacucugucc

SEQ ID NO: 3828430 - RNA, 20 nt, Human
ccuguguguacucuguccag

SEQ ID NO: 3828431 - RNA, 21 nt, Human
ccugugugugcgccuacagga

SEQ ID NO: 3828432 - RNA, 16 nt, Human
ccuguguguuaagcuc

SEQ ID NO: 3828433 - RNA, 17 nt, Human
ccuguguguuaagcucu

SEQ ID NO: 3828434 - RNA, 14 nt, Human
ccuguguuaauuua

SEQ ID NO: 3828435 - RNA, 20 nt, Human
ccuguguucuuccuggccgc

SEQ ID NO: 3828436 - RNA, 14 nt, Human
ccuguguuucuugc

SEQ ID NO: 3828437 - RNA, 21 nt, Human
ccuguuaaaagaugaaaauau

SEQ ID NO: 3828438 - RNA, 17 nt, Human
ccuguuaccuacuuuga

SEQ ID NO: 3828439 - RNA, 23 nt, Human
ccuguuacuugaaauaccaguga

SEQ ID NO: 3828440 - RNA, 16 nt, Human
ccuguuagcagacagg

SEQ ID NO: 3828441 - RNA, 18 nt, Human
ccuguuagcuguuauuuc

SEQ ID NO: 3828442 - RNA, 19 nt, Human
ccuguuaggagaagcugca

SEQ ID NO: 3828443 - RNA, 14 nt, Human
ccuguucagcucca

SEQ ID NO: 3828444 - RNA, 20 nt, Human
ccuguucagcuccagcucac

SEQ ID NO: 3828445 - RNA, 21 nt, Human
ccuguucagcuccagcucacc

SEQ ID NO: 3828446 - RNA, 23 nt, Human
ccuguucagcuccagcucaccag

SEQ ID NO: 3828447 - RNA, 15 nt, Human
ccuguucaguuacag

SEQ ID NO: 3828448 - RNA, 17 nt, Human
ccuguucaguuacagaa

SEQ ID NO: 3828449 - RNA, 20 nt, Human
ccuguucaguuacagaaagu

SEQ ID NO: 3828450 - RNA, 16 nt, Human
ccuguucauuguaagc

SEQ ID NO: 3828451 - RNA, 18 nt, Human
ccuguucccaugagauga

SEQ ID NO: 3828452 - RNA, 15 nt, Human
ccuguuccccagaga

SEQ ID NO: 3828453 - RNA, 22 nt, Human
ccuguuccccucacuggaugaa

SEQ ID NO: 3828454 - RNA, 14 nt, Human
ccuguuccugcugc

SEQ ID NO: 3828455 - RNA, 14 nt, Human
ccuguuccuggagg

SEQ ID NO: 3828456 - RNA, 12 nt, Human
ccuguucuaagg

SEQ ID NO: 3828457 - RNA, 16 nt, Human
ccuguucugcuuuccu

SEQ ID NO: 3828458 - RNA, 19 nt, Human
ccuguucugggugcagcug

SEQ ID NO: 3828459 - RNA, 14 nt, Human
ccuguucuuccucc

SEQ ID NO: 3828460 - RNA, 16 nt, Human
ccuguucuuccuccag

SEQ ID NO: 3828461 - RNA, 20 nt, Human
ccuguucuuccuccagcugc

SEQ ID NO: 3828462 - RNA, 12 nt, Human
ccuguugaaaag

SEQ ID NO: 3828463 - RNA, 23 nt, Human
ccuguugaauuuuguucucuggg

SEQ ID NO: 3828464 - RNA, 17 nt, Human
ccuguugacacaggucu

SEQ ID NO: 3828465 - RNA, 22 nt, Human
ccuguugacacaggucuuuccu

SEQ ID NO: 3828466 - RNA, 17 nt, Human
ccuguugagcaucacag

SEQ ID NO: 3828467 - RNA, 14 nt, Human
ccuguugcacccag

SEQ ID NO: 3828468 - RNA, 22 nt, Human
ccuguugcacccagcccugguc

SEQ ID NO: 3828469 - RNA, 12 nt, Human
ccuguugcuaag

SEQ ID NO: 3828470 - RNA, 14 nt, Human
ccuguugcuaagcc

SEQ ID NO: 3828471 - RNA, 22 nt, Human
ccuguugcuguguuuaauuuga

SEQ ID NO: 3828472 - RNA, 16 nt, Human
ccuguugcuuacaauu

SEQ ID NO: 3828473 - RNA, 12 nt, Human
ccuguugggaga

SEQ ID NO: 3828474 - RNA, 15 nt, Human
ccuguugugccacag

SEQ ID NO: 3828475 - RNA, 12 nt, Human
ccuguuuaagag

SEQ ID NO: 3828476 - RNA, 14 nt, Human
ccuguuuaauauuu

SEQ ID NO: 3828477 - RNA, 19 nt, Human
ccuguuuauucccaucuuu

SEQ ID NO: 3828478 - RNA, 17 nt, Human
ccuguuucccaggccca

SEQ ID NO: 3828479 - RNA, 13 nt, Human
ccuguuucucugc

SEQ ID NO: 3828480 - RNA, 16 nt, Human
ccuguuucugaaaaga

SEQ ID NO: 3828481 - RNA, 13 nt, Human
ccuguuucuuccu

SEQ ID NO: 3828482 - RNA, 21 nt, Human
ccuguuuggccucucuauccu

SEQ ID NO: 3828483 - RNA, 23 nt, Human
ccuguuugggaagagcuuagaaa

SEQ ID NO: 3828484 - RNA, 14 nt, Human
ccuguuuguuucug

SEQ ID NO: 3828485 - RNA, 20 nt, Human
ccuguuuuagaagguucucu

SEQ ID NO: 3828486 - RNA, 17 nt, Human
ccuguuuuguuggaagg

SEQ ID NO: 3828487 - RNA, 16 nt, Human
ccuguuuuuuuuucau

SEQ ID NO: 3828488 - RNA, 15 nt, Human
ccuuaaaaccaaaga

SEQ ID NO: 3828489 - RNA, 16 nt, Human
ccuuaaaaccaaagag

SEQ ID NO: 3828490 - RNA, 17 nt, Human
ccuuaaaaccaaagagg

SEQ ID NO: 3828491 - RNA, 14 nt, Human
ccuuaaaagccauc

SEQ ID NO: 3828492 - RNA, 15 nt, Human
ccuuaaaauuugaaa

SEQ ID NO: 3828493 - RNA, 17 nt, Human
ccuuaaaauuugaaaca

SEQ ID NO: 3828494 - RNA, 17 nt, Human
ccuuaaagaguguggca

SEQ ID NO: 3828495 - RNA, 12 nt, Human
ccuuaaaggaag

SEQ ID NO: 3828496 - RNA, 22 nt, Human
ccuuaaagucaguaacuuaccc

SEQ ID NO: 3828497 - RNA, 21 nt, Human
ccuuaaauuaaacaauuuauu

SEQ ID NO: 3828498 - RNA, 13 nt, Human
ccuuaaauuuaau

SEQ ID NO: 3828499 - RNA, 17 nt, Human
ccuuaacaguuguauuu

SEQ ID NO: 3828500 - RNA, 13 nt, Human
ccuuaacccaagg

SEQ ID NO: 3828501 - RNA, 17 nt, Human
ccuuaacccaaggagca

SEQ ID NO: 3828502 - RNA, 14 nt, Human
ccuuaacuggagcc

SEQ ID NO: 3828503 - RNA, 17 nt, Human
ccuuaacuggagcccca

SEQ ID NO: 3828504 - RNA, 22 nt, Human
ccuuaagaccuacuguucuaaa

SEQ ID NO: 3828505 - RNA, 23 nt, Human
ccuuaagaccuacuguucuaaag

SEQ ID NO: 3828506 - RNA, 20 nt, Human
ccuuaaggacaaaaaugaac

SEQ ID NO: 3828507 - RNA, 16 nt, Human
ccuuaaguaucagaaa

SEQ ID NO: 3828508 - RNA, 11 nt, Human
ccuuaauauuu

SEQ ID NO: 3828509 - RNA, 12 nt, Human
ccuuaauauuuc

SEQ ID NO: 3828510 - RNA, 15 nt, Human
ccuuaauuacuuaaa

SEQ ID NO: 3828511 - RNA, 16 nt, Human
ccuuaauuuauuauua

SEQ ID NO: 3828512 - RNA, 18 nt, Human
ccuuaauuuccuuuuuga

SEQ ID NO: 3828513 - RNA, 22 nt, Human
caugaguagauaauuucagggu

SEQ ID NO: 3828514 - RNA, 12 nt, Human
caugagucccag

SEQ ID NO: 3828515 - RNA, 18 nt, Human
caugagucccagugggag

SEQ ID NO: 3828516 - RNA, 19 nt, Human
caugagucccagugggagg

SEQ ID NO: 3828517 - RNA, 21 nt, Human
caugaguccuugaaaauauuu

SEQ ID NO: 3828518 - RNA, 18 nt, Human
caugaguuacugugcauu

SEQ ID NO: 3828519 - RNA, 15 nt, Human
caugaguucugcuga

SEQ ID NO: 3828520 - RNA, 19 nt, Human
caugaguuggcugggaaua

SEQ ID NO: 3828521 - RNA, 23 nt, Human
caugaguuggggucuggcagccu

SEQ ID NO: 3828522 - RNA, 22 nt, Human
caugaguuugcccugguuucac

SEQ ID NO: 3828523 - RNA, 16 nt, Human
caugauaauucagcag

SEQ ID NO: 3828524 - RNA, 17 nt, Human
caugauacucauuucuu

SEQ ID NO: 3828525 - RNA, 20 nt, Human
caugauauuuuguuuuuccc

SEQ ID NO: 3828526 - RNA, 21 nt, Human
caugauauuuuguuuuucccc

SEQ ID NO: 3828527 - RNA, 17 nt, Human
caugaucacuuaucagu

SEQ ID NO: 3828528 - RNA, 20 nt, Human
caugauccaagcaagacuga

SEQ ID NO: 3828529 - RNA, 13 nt, Human
caugaucucccug

SEQ ID NO: 3828530 - RNA, 19 nt, Human
caugaucucccugccgccu

SEQ ID NO: 3828531 - RNA, 21 nt, Human
caugaucucccugccgccuca

SEQ ID NO: 3828532 - RNA, 15 nt, Human
caugaucucggcuua

SEQ ID NO: 3828533 - RNA, 14 nt, Human
caugaugauaguug

SEQ ID NO: 3828534 - RNA, 19 nt, Human
caugaugauaguugaaugu

SEQ ID NO: 3828535 - RNA, 16 nt, Human
caugaugauuucagaa

SEQ ID NO: 3828536 - RNA, 20 nt, Human
caugaugccucugucuucug

SEQ ID NO: 3828537 - RNA, 15 nt, Human
caugaugcgggccag

SEQ ID NO: 3828538 - RNA, 14 nt, Human
caugaugcuagcca

SEQ ID NO: 3828539 - RNA, 17 nt, Human
caugaugcucuuuccca

SEQ ID NO: 3828540 - RNA, 16 nt, Human
caugaugcugggauuu

SEQ ID NO: 3828541 - RNA, 19 nt, Human
caugauggagcgcaccugc

SEQ ID NO: 3828542 - RNA, 19 nt, Human
caugauggcaacagaucug

SEQ ID NO: 3828543 - RNA, 19 nt, Human
ccuguggggauuucuccca

SEQ ID NO: 3828544 - RNA, 23 nt, Human
ccuguggguguagccagguaugg

SEQ ID NO: 3828545 - RNA, 16 nt, Human
ccugugguuaacaucu

SEQ ID NO: 3828546 - RNA, 21 nt, Human
ccugugguuuccaaggagcug

SEQ ID NO: 3828547 - RNA, 16 nt, Human
ccuguguaacagcucc

SEQ ID NO: 3828548 - RNA, 22 nt, Human
ccuguguaacagcuccuuggga

SEQ ID NO: 3828549 - RNA, 21 nt, Human
ccuguguaaucauuucuuggg

SEQ ID NO: 3828550 - RNA, 12 nt, Human
ccuguguacagg

SEQ ID NO: 3828551 - RNA, 17 nt, Human
ccuguguagcugugacc

SEQ ID NO: 3828552 - RNA, 20 nt, Human
ccuguguagcugugaccugc

SEQ ID NO: 3828553 - RNA, 15 nt, Human
ccugugucaauccag

SEQ ID NO: 3828554 - RNA, 16 nt, Human
ccugugucaauccaga

SEQ ID NO: 3828555 - RNA, 19 nt, Human
ccuguguccaccugugggu

SEQ ID NO: 3828556 - RNA, 18 nt, Human
ccugugucccaugaccca

SEQ ID NO: 3828557 - RNA, 20 nt, Human
ccugugucccaugacccacc

SEQ ID NO: 3828558 - RNA, 23 nt, Human
ccugugucccaugacccaccccu

SEQ ID NO: 3828559 - RNA, 17 nt, Human
ccugugucuugcaaugg

SEQ ID NO: 3828560 - RNA, 19 nt, Human
ccugugucuugcaauggca

SEQ ID NO: 3828561 - RNA, 22 nt, Human
ccugugucuugcaauggcagcc

SEQ ID NO: 3828562 - RNA, 22 nt, Human
ccugugucuuuaaaugcugcuu

SEQ ID NO: 3828563 - RNA, 14 nt, Human
ccugugugauugac

SEQ ID NO: 3828564 - RNA, 19 nt, Human
ccugugugauugacagcuu

SEQ ID NO: 3828565 - RNA, 12 nt, Human
ccugugugcagg

SEQ ID NO: 3828566 - RNA, 17 nt, Human
ccuguguggacaggacu

SEQ ID NO: 3828567 - RNA, 15 nt, Human
ccuuggccuggagca

SEQ ID NO: 3828568 - RNA, 13 nt, Human
ccuuggccugggc

SEQ ID NO: 3828569 - RNA, 22 nt, Human
ccuuggcucaaguccucuuuuc

SEQ ID NO: 3828570 - RNA, 18 nt, Human
ccuuggcucaauccucua

SEQ ID NO: 3828571 - RNA, 22 nt, Human
ccuuggcucaauccucuaagcu

SEQ ID NO: 3828572 - RNA, 12 nt, Human
ccuuggcucaga

SEQ ID NO: 3828573 - RNA, 12 nt, Human
ccuuggcugcag

SEQ ID NO: 3828574 - RNA, 21 nt, Human
ccuuggcuguuggcagugagu

SEQ ID NO: 3828575 - RNA, 13 nt, Human
ccuuggcuugccc

SEQ ID NO: 3828576 - RNA, 15 nt, Human
ccuuggcuugcccac

SEQ ID NO: 3828577 - RNA, 22 nt, Human
ccuuggcuuggcccuggcagcc

SEQ ID NO: 3828578 - RNA, 16 nt, Human
ccuugggaggaagcag

SEQ ID NO: 3828579 - RNA, 23 nt, Human
ccuugggaggaagcagaauaaag

SEQ ID NO: 3828580 - RNA, 22 nt, Human
ccuugggccagaaguaccagac

SEQ ID NO: 3828581 - RNA, 18 nt, Human
ccuugggcggcugagagc

SEQ ID NO: 3828582 - RNA, 15 nt, Human
ccuugggcucugaug

SEQ ID NO: 3828583 - RNA, 15 nt, Human
ccuugggcucugcug

SEQ ID NO: 3828584 - RNA, 16 nt, Human
ccuugggcucugcuga

SEQ ID NO: 3828585 - RNA, 15 nt, Human
ccuugggcugcuccu

SEQ ID NO: 3828586 - RNA, 17 nt, Human
ccuugggcugcuccuca

SEQ ID NO: 3828587 - RNA, 19 nt, Human
ccuuggggacaaccuuggc

SEQ ID NO: 3828588 - RNA, 22 nt, Human
ccuuggggaggacaaaacuucu

SEQ ID NO: 3828589 - RNA, 15 nt, Human
ccuugggggcuccca

SEQ ID NO: 3828590 - RNA, 11 nt, Human
ccuuggggguc

SEQ ID NO: 3828591 - RNA, 22 nt, Human
ccuuggggguccuccuccaggg

SEQ ID NO: 3828592 - RNA, 22 nt, Human
ccuuggggucagguugacagga

SEQ ID NO: 3828593 - RNA, 20 nt, Human
ccuuggguuagaccuacagg

SEQ ID NO: 3828594 - RNA, 20 nt, Human
ccuuggugauuccgcaguga

SEQ ID NO: 3828595 - RNA, 18 nt, Human
ccuugguguccaccuggc

SEQ ID NO: 3828596 - RNA, 20 nt, Human
ccuugguguccaccuggccc

SEQ ID NO: 3828597 - RNA, 21 nt, Human
ccuugguguccaccuggcccc

SEQ ID NO: 3828598 - RNA, 17 nt, Human
ccuugguucccuugugu

SEQ ID NO: 3828599 - RNA, 13 nt, Human
ccuugguuccuaa

SEQ ID NO: 3828600 - RNA, 13 nt, Human
ccuugguuggaag

SEQ ID NO: 3828601 - RNA, 21 nt, Human
ccuuguaauguaacugcucuu

SEQ ID NO: 3828602 - RNA, 16 nt, Human
ccuuguaauucuaaau

SEQ ID NO: 3828603 - RNA, 20 nt, Human
ccuuguauccccugcaggcu

SEQ ID NO: 3828604 - RNA, 16 nt, Human
ccuuguauuuaaauau

SEQ ID NO: 3828605 - RNA, 15 nt, Human
ccuugucacgccaga

SEQ ID NO: 3828606 - RNA, 18 nt, Human
ccuugucacgccagacuu

SEQ ID NO: 3828607 - RNA, 16 nt, Human
ccuugucacugguaga

SEQ ID NO: 3828608 - RNA, 14 nt, Human
ccuuguccccacac

SEQ ID NO: 3828609 - RNA, 19 nt, Human
ccuuguccccacacuccua

SEQ ID NO: 3828610 - RNA, 14 nt, Human
ccuuguccccugcc

SEQ ID NO: 3828611 - RNA, 12 nt, Human
ccuugucucugg

SEQ ID NO: 3828612 - RNA, 23 nt, Human
ccuugugaugucauacagagaag

SEQ ID NO: 3828613 - RNA, 12 nt, Human
ccuugugccaga

SEQ ID NO: 3828614 - RNA, 14 nt, Human
ccuugugccugggg

SEQ ID NO: 3828615 - RNA, 13 nt, Human
ccuugugcugggg

SEQ ID NO: 3828616 - RNA, 13 nt, Human
ccuuguggcagag

SEQ ID NO: 3828617 - RNA, 22 nt, Human
ccuuguggccugggccuccuca

SEQ ID NO: 3828618 - RNA, 20 nt, Human
ccuugugggugugagcagca

SEQ ID NO: 3828619 - RNA, 11 nt, Human
ccuuguggucc

SEQ ID NO: 3828620 - RNA, 19 nt, Human
ccuuguggucccaccccac

SEQ ID NO: 3828621 - RNA, 23 nt, Human
ccuugugucuacagagaaccugg

SEQ ID NO: 3828622 - RNA, 20 nt, Human
ccuuguguuuuguuuugauu

SEQ ID NO: 3828623 - RNA, 21 nt, Human
ccuuguuccuagaguagagug

SEQ ID NO: 3828624 - RNA, 21 nt, Human
ccuuguucugauaaugaaaau

SEQ ID NO: 3828625 - RNA, 20 nt, Human
ccuuguucuuuggaaauaca

SEQ ID NO: 3828626 - RNA, 22 nt, Human
ccuuguuugauuuuagcugcag

SEQ ID NO: 3828627 - RNA, 20 nt, Human
ccuuguuuugaaaaccuaaa

SEQ ID NO: 3828628 - RNA, 15 nt, Human
ccuuuaaaaaagaaa

SEQ ID NO: 3828629 - RNA, 12 nt, Human
ccuuuaaaauuu

SEQ ID NO: 3828630 - RNA, 21 nt, Human
ccuuuaaaauuuuuuuagaaa

SEQ ID NO: 3828631 - RNA, 18 nt, Human
ccuuuaaaguaugaaucu

SEQ ID NO: 3828632 - RNA, 20 nt, Human
ccuuuaaucagguccugcuc

SEQ ID NO: 3828633 - RNA, 19 nt, Human
ccuuuaauuaagacugaaa

SEQ ID NO: 3828634 - RNA, 16 nt, Human
ccuuuacaaaagaaau

SEQ ID NO: 3828635 - RNA, 19 nt, Human
ccuuuacacucaggcuuuc

SEQ ID NO: 3828636 - RNA, 22 nt, Human
ccuuuacccucuuugcugcaga

SEQ ID NO: 3828637 - RNA, 14 nt, Human
ccuuuacggacacc

SEQ ID NO: 3828638 - RNA, 19 nt, Human
ccuuuacggacacccccuc

SEQ ID NO: 3828639 - RNA, 18 nt, Human
ccuuuacuugucuuucug

SEQ ID NO: 3828640 - RNA, 19 nt, Human
ccuuuagauagcagccugg

SEQ ID NO: 3828641 - RNA, 16 nt, Human
ccuuuagaucucugaa

SEQ ID NO: 3828642 - RNA, 17 nt, Human
ccuuuagaucucugaag

SEQ ID NO: 3828643 - RNA, 20 nt, Human
ccuuuagcacguuuaaaguu

SEQ ID NO: 3828644 - RNA, 19 nt, Human
ccuuuagccaaacccuugu

SEQ ID NO: 3828645 - RNA, 19 nt, Human
ccuuuaggguucugccucu

SEQ ID NO: 3828646 - RNA, 18 nt, Human
ccuuuaguaccugaaaag

SEQ ID NO: 3828647 - RNA, 18 nt, Human
ccuuuagugguggccauu

SEQ ID NO: 3828648 - RNA, 19 nt, Human
ccuuuauauuuagugaacu

SEQ ID NO: 3828649 - RNA, 14 nt, Human
ccuuuaugugaauu

SEQ ID NO: 3828650 - RNA, 17 nt, Human
ccuuuaugugaauuuuu

SEQ ID NO: 3828651 - RNA, 23 nt, Human
ccuuuauguggaaaacagaacau

SEQ ID NO: 3828652 - RNA, 23 nt, Human
ccuuuauuacccccuccuucaga

SEQ ID NO: 3828653 - RNA, 19 nt, Human
ccuuuauuuccacugugca

SEQ ID NO: 3828654 - RNA, 23 nt, Human
ccuuuauuuguuaauaguuccug

SEQ ID NO: 3828655 - RNA, 14 nt, Human
ccuuucaaauuuag

SEQ ID NO: 3828656 - RNA, 16 nt, Human
ccuuucaaauuuagaa

SEQ ID NO: 3828657 - RNA, 17 nt, Human
ccuuucaauaggaaaaa

SEQ ID NO: 3828658 - RNA, 18 nt, Human
ccuuucaauaggaaaaac

SEQ ID NO: 3828659 - RNA, 21 nt, Human
ccuuucacaaaauuuuauucc

SEQ ID NO: 3828660 - RNA, 15 nt, Human
ccuuucacaaccuuc

SEQ ID NO: 3828661 - RNA, 21 nt, Human
ccuuucacagagcagagucug

SEQ ID NO: 3828662 - RNA, 14 nt, Human
ccuuucacaggcag

SEQ ID NO: 3828663 - RNA, 22 nt, Human
ccuuucacuucuuucccuuccu

SEQ ID NO: 3828664 - RNA, 17 nt, Human
ccuuucagaugucuucu

SEQ ID NO: 3828665 - RNA, 19 nt, Human
ccuuucagaugucuucugc

SEQ ID NO: 3828666 - RNA, 21 nt, Human
ccuuucagaugucuucugccu

SEQ ID NO: 3828667 - RNA, 22 nt, Human
ccuuucagaugucuucugccug

SEQ ID NO: 3828668 - RNA, 22 nt, Human
ccuuucagcccacgucacgugu

SEQ ID NO: 3828669 - RNA, 18 nt, Human
ccuuucauuuacuguggc

SEQ ID NO: 3828670 - RNA, 19 nt, Human
ccuuucauuuacuguggcu

SEQ ID NO: 3828671 - RNA, 15 nt, Human
ccuuuccaaaauuuu

SEQ ID NO: 3828672 - RNA, 20 nt, Human
ccuuuccaguggccuggcuc

SEQ ID NO: 3828673 - RNA, 11 nt, Human
ccuuuccauaa

SEQ ID NO: 3828674 - RNA, 18 nt, Human
ccuuuccauccauggcca

SEQ ID NO: 3828675 - RNA, 12 nt, Human
ccuuuccccagc

SEQ ID NO: 3828676 - RNA, 22 nt, Human
ccuuuccccagcaucacucccc

SEQ ID NO: 3828677 - RNA, 13 nt, Human
ccuuuccccagcc

SEQ ID NO: 3828678 - RNA, 15 nt, Human
ccuuuccccuuccuu

SEQ ID NO: 3828679 - RNA, 16 nt, Human
ccuuuccccuuccuuu

SEQ ID NO: 3828680 - RNA, 14 nt, Human
ccuuucccgggcug

SEQ ID NO: 3828681 - RNA, 18 nt, Human
ccuuucccgggcugucca

SEQ ID NO: 3828682 - RNA, 20 nt, Human
ccuuucccuccacuccuucc

SEQ ID NO: 3828683 - RNA, 14 nt, Human
ccuuucccucgcua

SEQ ID NO: 3828684 - RNA, 12 nt, Human
ccuuucccuucu

SEQ ID NO: 3828685 - RNA, 13 nt, Human
ccuuucccuuggu

SEQ ID NO: 3828686 - RNA, 20 nt, Human
ccuuucccuuguagcuccuc

SEQ ID NO: 3828687 - RNA, 14 nt, Human
cauuaguuuugaag

SEQ ID NO: 3828688 - RNA, 15 nt, Human
cauuaguuuugaaga

SEQ ID NO: 3828689 - RNA, 13 nt, Human
cauuauaaacgug

SEQ ID NO: 3828690 - RNA, 14 nt, Human
cauuauaaugaauu

SEQ ID NO: 3828691 - RNA, 19 nt, Human
cauuauagauuuucauguu

SEQ ID NO: 3828692 - RNA, 20 nt, Human
cauuauauagcaguaaaaaa

SEQ ID NO: 3828693 - RNA, 13 nt, Human
cauuauauugcaa

SEQ ID NO: 3828694 - RNA, 16 nt, Human
cauuauauugcaauga

SEQ ID NO: 3828695 - RNA, 19 nt, Human
cauuaucacuuuaaagccc

SEQ ID NO: 3828696 - RNA, 16 nt, Human
cauuaucauguguaau

SEQ ID NO: 3828697 - RNA, 14 nt, Human
cauuaucccugaau

SEQ ID NO: 3828698 - RNA, 22 nt, Human
cauuaucgccuuuugacagcug

SEQ ID NO: 3828699 - RNA, 16 nt, Human
cauuaucgggagcagu

SEQ ID NO: 3828700 - RNA, 23 nt, Human
cauuaucuagauacuguaucaug

SEQ ID NO: 3828701 - RNA, 22 nt, Human
cauuaucuugucacuguaguuu

SEQ ID NO: 3828702 - RNA, 23 nt, Human
cauuaugaugugggucaaggaau

SEQ ID NO: 3828703 - RNA, 19 nt, Human
cauuauguccacuguguau

SEQ ID NO: 3828704 - RNA, 21 nt, Human
cauuaugugguuuuagauuuu

SEQ ID NO: 3828705 - RNA, 11 nt, Human
cauuaugugug

SEQ ID NO: 3828706 - RNA, 13 nt, Human
cauuaugugugca

SEQ ID NO: 3828707 - RNA, 17 nt, Human
cauuaugugugcaugug

SEQ ID NO: 3828708 - RNA, 20 nt, Human
cauuaugugugcaugugugu

SEQ ID NO: 3828709 - RNA, 21 nt, Human
cauuaugugugcaugugugua

SEQ ID NO: 3828710 - RNA, 22 nt, Human
cauuaugugugcauguguguau

SEQ ID NO: 3828711 - RNA, 23 nt, Human
cauuaugugugcauguguguaua

SEQ ID NO: 3828712 - RNA, 21 nt, Human
cauuauuaaguaacuuauuua

SEQ ID NO: 3828713 - RNA, 23 nt, Human
cauuauuacuuuugcuguaaugu

SEQ ID NO: 3828714 - RNA, 18 nt, Human
cauuauucaaaguugccu

SEQ ID NO: 3828715 - RNA, 22 nt, Human
cauuauucaaaguugccuaaau

SEQ ID NO: 3828716 - RNA, 20 nt, Human
cauuauucauuuagugaguu

SEQ ID NO: 3828717 - RNA, 12 nt, Human
cauuauucucuu

SEQ ID NO: 3828718 - RNA, 16 nt, Human
cauuauugcuuauugc

SEQ ID NO: 3828719 - RNA, 12 nt, Human
cauuauuggaau

SEQ ID NO: 3828720 - RNA, 23 nt, Human
cauuauuggaauuaaccuggugc

SEQ ID NO: 3828721 - RNA, 16 nt, Human
cauuauuuauguauug

SEQ ID NO: 3828722 - RNA, 18 nt, Human
cauuauuuauuaaauuuu

SEQ ID NO: 3828723 - RNA, 20 nt, Human
cauuauuucuaguccaaaau

SEQ ID NO: 3828724 - RNA, 14 nt, Human
cauuauuugagaag

SEQ ID NO: 3828725 - RNA, 22 nt, Human
cauuauuugagaagcugcucaa

SEQ ID NO: 3828726 - RNA, 19 nt, Human
cauuauuugcauguuaccu

SEQ ID NO: 3828727 - RNA, 14 nt, Human
cauuauuugucaaa

SEQ ID NO: 3828728 - RNA, 15 nt, Human
cauuauuugucaaau

SEQ ID NO: 3828729 - RNA, 14 nt, Human
cauuauuuucuguc

SEQ ID NO: 3828730 - RNA, 16 nt, Human
cauuauuuucugucag

SEQ ID NO: 3828731 - RNA, 13 nt, Human
ccuuauccucccu

SEQ ID NO: 3828732 - RNA, 18 nt, Human
ccuuauccucugaucucc

SEQ ID NO: 3828733 - RNA, 16 nt, Human
ccuuaucgaaacucau

SEQ ID NO: 3828734 - RNA, 15 nt, Human
ccuuaucuagcugca

SEQ ID NO: 3828735 - RNA, 15 nt, Human
ccuuaucugugcuca

SEQ ID NO: 3828736 - RNA, 19 nt, Human
ccuuaugacuugcuacuuu

SEQ ID NO: 3828737 - RNA, 16 nt, Human
ccuuauggaacacucu

SEQ ID NO: 3828738 - RNA, 22 nt, Human
ccuuauggaacacucugagacu

SEQ ID NO: 3828739 - RNA, 15 nt, Human
ccuuauuguaccucu

SEQ ID NO: 3828740 - RNA, 16 nt, Human
ccuuauuguaccucuc

SEQ ID NO: 3828741 - RNA, 14 nt, Human
ccuuauuuucaaga

SEQ ID NO: 3828742 - RNA, 18 nt, Human
ccuuauuuucaagaaacu

SEQ ID NO: 3828743 - RNA, 20 nt, Human
ccuucaaaacuauagcuugc

SEQ ID NO: 3828744 - RNA, 15 nt, Human
ccuucaaagcaaaug

SEQ ID NO: 3828745 - RNA, 13 nt, Human
ccuucaaagcuga

SEQ ID NO: 3828746 - RNA, 22 nt, Human
ccuucaaagucucaaugaaaua

SEQ ID NO: 3828747 - RNA, 14 nt, Human
ccuucaacccgaga

SEQ ID NO: 3828748 - RNA, 17 nt, Human
ccuucaacguuucuuca

SEQ ID NO: 3828749 - RNA, 19 nt, Human
ccuucaacguuucuucacu

SEQ ID NO: 3828750 - RNA, 24 nt, Human
ccuucaacugaaaagacucagugu

SEQ ID NO: 3828751 - RNA, 18 nt, Human
ccuucaagaccuucacca

SEQ ID NO: 3828752 - RNA, 22 nt, Human
ccuucaagaccuucaccaaaca

SEQ ID NO: 3828753 - RNA, 23 nt, Human
ccuucaagccagcaacacagagc

SEQ ID NO: 3828754 - RNA, 15 nt, Human
ccuucaagcucugag

SEQ ID NO: 3828755 - RNA, 18 nt, Human
ccuucaagcucugaggga

SEQ ID NO: 3828756 - RNA, 15 nt, Human
ccuucaagcugcuuu

SEQ ID NO: 3828757 - RNA, 17 nt, Human
ccuucaaguuagcucag

SEQ ID NO: 3828758 - RNA, 16 nt, Human
ccuucaauuccugggc

SEQ ID NO: 3828759 - RNA, 17 nt, Human
ccuucacagaugggugc

SEQ ID NO: 3828760 - RNA, 12 nt, Human
ccuucacagugu

SEQ ID NO: 3828761 - RNA, 18 nt, Human
ccuucacauuuuuuaugg

SEQ ID NO: 3828762 - RNA, 18 nt, Human
ccuucaccuuugucccca

SEQ ID NO: 3828763 - RNA, 21 nt, Human
ccuucaccuuuguccccaccg

SEQ ID NO: 3828764 - RNA, 14 nt, Human
ccuucacugccuuu

SEQ ID NO: 3828765 - RNA, 18 nt, Human
ccuucacugccuuugcuc

SEQ ID NO: 3828766 - RNA, 18 nt, Human
ccuucagaaccauccaua

SEQ ID NO: 3828767 - RNA, 20 nt, Human
ccuucagacacccucaaccu

SEQ ID NO: 3828768 - RNA, 21 nt, Human
ccuucagacuuugcuucccau

SEQ ID NO: 3828769 - RNA, 16 nt, Human
ccuucagagagcagug

SEQ ID NO: 3828770 - RNA, 19 nt, Human
ccuucagagagcagugcuu

SEQ ID NO: 3828771 - RNA, 22 nt, Human
ccuucagagagcagugcuuuug

SEQ ID NO: 3828772 - RNA, 16 nt, Human
ccuucagauggaaacu

SEQ ID NO: 3828773 - RNA, 21 nt, Human
ccuucagcauccucaguuccu

SEQ ID NO: 3828774 - RNA, 13 nt, Human
ccuucagccccca

SEQ ID NO: 3828775 - RNA, 18 nt, Human
ccuucagcccccagcccc

SEQ ID NO: 3828776 - RNA, 14 nt, Human
ccuucagcccucac

SEQ ID NO: 3828777 - RNA, 13 nt, Human
ccuucagccuuaa

SEQ ID NO: 3828778 - RNA, 18 nt, Human
ccuucagggugaugccag

SEQ ID NO: 3828779 - RNA, 16 nt, Human
ccuucaguaaccccca

SEQ ID NO: 3828780 - RNA, 19 nt, Human
ccuucaguacccucucagc

SEQ ID NO: 3828781 - RNA, 10 nt, Human
ccuucagugc

SEQ ID NO: 3828782 - RNA, 14 nt, Human
ccuucagugccaaa

SEQ ID NO: 3828783 - RNA, 19 nt, Human
ccuucauacuugaacguuu

SEQ ID NO: 3828784 - RNA, 20 nt, Human
ccuucauacuugaacguuuu

SEQ ID NO: 3828785 - RNA, 21 nt, Human
ccuucaucaugaguucugcug

SEQ ID NO: 3828786 - RNA, 22 nt, Human
ccuucaucaugaguucugcuga

SEQ ID NO: 3828787 - RNA, 20 nt, Human
ccuucaucuggauuccagag

SEQ ID NO: 3828788 - RNA, 21 nt, Human
ccuucauuaccuuuuuugaua

SEQ ID NO: 3828789 - RNA, 20 nt, Human
ccuucauugccuuaacugga

SEQ ID NO: 3828790 - RNA, 19 nt, Human
ccuucauuuggcauucccc

SEQ ID NO: 3828791 - RNA, 17 nt, Human
ccuuccaaaaauuauua

SEQ ID NO: 3828792 - RNA, 20 nt, Human
ccuuccaaauaauaaagucu

SEQ ID NO: 3828793 - RNA, 17 nt, Human
ccuuccaacugcugccc

SEQ ID NO: 3828794 - RNA, 17 nt, Human
ccuuccaaugucuggag

SEQ ID NO: 3828795 - RNA, 21 nt, Human
ccuuccaaugucuggagacca

SEQ ID NO: 3828796 - RNA, 13 nt, Human
ccuuccacccagg

SEQ ID NO: 3828797 - RNA, 15 nt, Human
ccuuccacccagggg

SEQ ID NO: 3828798 - RNA, 16 nt, Human
ccuuccaccucccucc

SEQ ID NO: 3828799 - RNA, 17 nt, Human
ccuuccaccucugggag

SEQ ID NO: 3828800 - RNA, 16 nt, Human
ccuuccaccugcucug

SEQ ID NO: 3828801 - RNA, 19 nt, Human
ccuuccacgcugucuccag

SEQ ID NO: 3828802 - RNA, 20 nt, Human
ccuuccacgcugucuccaga

SEQ ID NO: 3828803 - RNA, 20 nt, Human
ccuuccacggauccauguag

SEQ ID NO: 3828804 - RNA, 21 nt, Human
ccuuccacggauccauguagc

SEQ ID NO: 3828805 - RNA, 22 nt, Human
ccuuccagacauacgaaacaca

SEQ ID NO: 3828806 - RNA, 13 nt, Human
ccuuccagcccag

SEQ ID NO: 3828807 - RNA, 13 nt, Human
ccuuccagcuccu

SEQ ID NO: 3828808 - RNA, 17 nt, Human
ccuuccagcuccuguaa

SEQ ID NO: 3828809 - RNA, 12 nt, Human
ccuuccagcugc

SEQ ID NO: 3828810 - RNA, 15 nt, Human
ccuuccagcugcugu

SEQ ID NO: 3828811 - RNA, 13 nt, Human
ccuuccaggcccc

SEQ ID NO: 3828812 - RNA, 12 nt, Human
ccuuccauaauu

SEQ ID NO: 3828813 - RNA, 23 nt, Human
ccuuccauagccuaaucccuggg

SEQ ID NO: 3828814 - RNA, 15 nt, Human
ccuuccaucccagag

SEQ ID NO: 3828815 - RNA, 19 nt, Human
ccuuccaucccuacccccu

SEQ ID NO: 3828816 - RNA, 23 nt, Human
ccuuccaugucgccucugcauuc

SEQ ID NO: 3828817 - RNA, 19 nt, Human
ccuuccaugucggccucua

SEQ ID NO: 3828818 - RNA, 20 nt, Human
ccuuccaugucggccucuaa

SEQ ID NO: 3828819 - RNA, 21 nt, Human
ccuucccaaaggacuccaccc

SEQ ID NO: 3828820 - RNA, 20 nt, Human
ccuucccaaguaagaggcug

SEQ ID NO: 3828821 - RNA, 21 nt, Human
ccuucccaaguaagaggcugg

SEQ ID NO: 3828822 - RNA, 14 nt, Human
ccuucccaccucuc

SEQ ID NO: 3828823 - RNA, 18 nt, Human
ccuucccacucuucucau

SEQ ID NO: 3828824 - RNA, 13 nt, Human
ccuucccagcugc

SEQ ID NO: 3828825 - RNA, 21 nt, Human
ccuucccaugacccaggcugg

SEQ ID NO: 3828826 - RNA, 13 nt, Human
ccuucccauggag

SEQ ID NO: 3828827 - RNA, 12 nt, Human
ccuuccccacug

SEQ ID NO: 3828828 - RNA, 20 nt, Human
ccuuccccacugccugccca

SEQ ID NO: 3828829 - RNA, 15 nt, Human
ccuuccccagccucu

SEQ ID NO: 3828830 - RNA, 21 nt, Human
ccuuccccaugcuuccuugcc

SEQ ID NO: 3828831 - RNA, 23 nt, Human
cauuuggaguguuccccuuccac

SEQ ID NO: 3828832 - RNA, 23 nt, Human
cauuuggauuggggucccucuaa

SEQ ID NO: 3828833 - RNA, 20 nt, Human
cauuuggcaaugccaucauc

SEQ ID NO: 3828834 - RNA, 15 nt, Human
cauuuggguccagga

SEQ ID NO: 3828835 - RNA, 23 nt, Human
cauuugggugguaagagaauguu

SEQ ID NO: 3828836 - RNA, 13 nt, Human
cauuuggugcuug

SEQ ID NO: 3828837 - RNA, 16 nt, Human
cauuugguucauuaau

SEQ ID NO: 3828838 - RNA, 16 nt, Human
cauuugguuggcacua

SEQ ID NO: 3828839 - RNA, 15 nt, Human
cauuuguaaauauua

SEQ ID NO: 3828840 - RNA, 20 nt, Human
cauuuguauaaaauaauuuu

SEQ ID NO: 3828841 - RNA, 19 nt, Human
cauuuguaugucaaagcuu

SEQ ID NO: 3828842 - RNA, 15 nt, Human
cauuuguauguugug

SEQ ID NO: 3828843 - RNA, 23 nt, Human
cauuuguauguugugaagauguu

SEQ ID NO: 3828844 - RNA, 14 nt, Human
cauuuguauuuugu

SEQ ID NO: 3828845 - RNA, 17 nt, Human
cauuugucacacacuuu

SEQ ID NO: 3828846 - RNA, 14 nt, Human
cauuugucauuuuc

SEQ ID NO: 3828847 - RNA, 14 nt, Human
cauuugucccaagu

SEQ ID NO: 3828848 - RNA, 19 nt, Human
cauuugucccaagugccaa

SEQ ID NO: 3828849 - RNA, 22 nt, Human
cauuugucuauucuccagcuga

SEQ ID NO: 3828850 - RNA, 11 nt, Human
cauuugugagg

SEQ ID NO: 3828851 - RNA, 19 nt, Human
cauuugugauauauguauu

SEQ ID NO: 3828852 - RNA, 15 nt, Human
cauuugugccagagg

SEQ ID NO: 3828853 - RNA, 16 nt, Human
cauuugugccagagga

SEQ ID NO: 3828854 - RNA, 22 nt, Human
cauuuguggugauauagaauua

SEQ ID NO: 3828855 - RNA, 13 nt, Human
cauuugugugugu

SEQ ID NO: 3828856 - RNA, 22 nt, Human
cauuuguuaaaauuaucaauau

SEQ ID NO: 3828857 - RNA, 13 nt, Human
cauuuguuaauau

SEQ ID NO: 3828858 - RNA, 19 nt, Human
cauuuguuauucuuaagac

SEQ ID NO: 3828859 - RNA, 20 nt, Human
cauuuguugugaugucuuuu

SEQ ID NO: 3828860 - RNA, 19 nt, Human
cauuuguuuauguaauuuc

SEQ ID NO: 3828861 - RNA, 21 nt, Human
cauuuguuucuuucucugagg

SEQ ID NO: 3828862 - RNA, 20 nt, Human
cauuuguuugaacugauaaa

SEQ ID NO: 3828863 - RNA, 18 nt, Human
cauuuguuugguuauagu

SEQ ID NO: 3828864 - RNA, 19 nt, Human
cauuuguuuuguuuacaga

SEQ ID NO: 3828865 - RNA, 16 nt, Human
cauuuguuuuucucac

SEQ ID NO: 3828866 - RNA, 21 nt, Human
cauuuuaaaaacauagaaaaa

SEQ ID NO: 3828867 - RNA, 12 nt, Human
cauuuuaaacaa

SEQ ID NO: 3828868 - RNA, 17 nt, Human
cauuuuaaacaaaauag

SEQ ID NO: 3828869 - RNA, 23 nt, Human
cauuuuaaacaaaauagaaaguu

SEQ ID NO: 3828870 - RNA, 12 nt, Human
cauuuuaaaugg

SEQ ID NO: 3828871 - RNA, 13 nt, Human
cauuuuaacaaga

SEQ ID NO: 3828872 - RNA, 14 nt, Human
cauuuuaacaagaa

SEQ ID NO: 3828873 - RNA, 15 nt, Human
cauuuuaacaagaag

SEQ ID NO: 3828874 - RNA, 16 nt, Human
cauuuuaacaagaaga

SEQ ID NO: 3828875 - RNA, 17 nt, Human
cauuuuaacaagaagau

SEQ ID NO: 3828876 - RNA, 18 nt, Human
cauuuuaacccuauuuua

SEQ ID NO: 3828877 - RNA, 16 nt, Human
cauuuuaacuuuauca

SEQ ID NO: 3828878 - RNA, 22 nt, Human
cauuuuaaggaaaacuaccugu

SEQ ID NO: 3828879 - RNA, 13 nt, Human
cauuuuaauguaa

SEQ ID NO: 3828880 - RNA, 17 nt, Human
cauuuuaauuauuauuc

SEQ ID NO: 3828881 - RNA, 18 nt, Human
cauuuuaauuuuaaagug

SEQ ID NO: 3828882 - RNA, 17 nt, Human
cauuuuacuuuuuccug

SEQ ID NO: 3828883 - RNA, 20 nt, Human
cauuuuacuuuuuccuggcu

SEQ ID NO: 3828884 - RNA, 14 nt, Human
cauuuuaggaaagg

SEQ ID NO: 3828885 - RNA, 16 nt, Human
cauuuuagucacuuuu

SEQ ID NO: 3828886 - RNA, 13 nt, Human
cauuuuauaaauc

SEQ ID NO: 3828887 - RNA, 19 nt, Human
cauuuuauauugaaaaaaa

SEQ ID NO: 3828888 - RNA, 22 nt, Human
cauuuuauuaagcuuuuuggaa

SEQ ID NO: 3828889 - RNA, 23 nt, Human
cauuuuauuaagcuuuuuggaau

SEQ ID NO: 3828890 - RNA, 17 nt, Human
cauuuucaccccacccu

SEQ ID NO: 3828891 - RNA, 15 nt, Human
cauuuucauuagcaa

SEQ ID NO: 3828892 - RNA, 17 nt, Human
cauuuucauuagcaaaa

SEQ ID NO: 3828893 - RNA, 21 nt, Human
cauuuuccauauccuggugcc

SEQ ID NO: 3828894 - RNA, 21 nt, Human
cauuuucccccacuacugcag

SEQ ID NO: 3828895 - RNA, 14 nt, Human
cauuuuccccccac

SEQ ID NO: 3828896 - RNA, 15 nt, Human
cauuuuccccccacu

SEQ ID NO: 3828897 - RNA, 22 nt, Human
cauuuuccccccacucucccca

SEQ ID NO: 3828898 - RNA, 18 nt, Human
cauuuuccuacaggcagu

SEQ ID NO: 3828899 - RNA, 22 nt, Human
cauuuuccuacaggcagucucu

SEQ ID NO: 3828900 - RNA, 18 nt, Human
cauuuucuauaacagaua

SEQ ID NO: 3828901 - RNA, 17 nt, Human
cauuuucucccuggauu

SEQ ID NO: 3828902 - RNA, 12 nt, Human
cauuuucucuaa

SEQ ID NO: 3828903 - RNA, 14 nt, Human
cauuuucucuuaga

SEQ ID NO: 3828904 - RNA, 15 nt, Human
cauuuucucuuagaa

SEQ ID NO: 3828905 - RNA, 16 nt, Human
cauuuucugcaucucc

SEQ ID NO: 3828906 - RNA, 22 nt, Human
cauuuucuggccaguguuuaaa

SEQ ID NO: 3828907 - RNA, 18 nt, Human
cauuuucuuuucacuucg

SEQ ID NO: 3828908 - RNA, 19 nt, Human
cauuuugaaagucuguccu

SEQ ID NO: 3828909 - RNA, 21 nt, Human
cauuuugaaagucuguccuug

SEQ ID NO: 3828910 - RNA, 23 nt, Human
cauuuugaaucacaugaauuauu

SEQ ID NO: 3828911 - RNA, 17 nt, Human
cauuuugagugacucga

SEQ ID NO: 3828912 - RNA, 20 nt, Human
cauuuugagugacucgaggg

SEQ ID NO: 3828913 - RNA, 12 nt, Human
cauuuugcaaaa

SEQ ID NO: 3828914 - RNA, 13 nt, Human
cauuuugcauuca

SEQ ID NO: 3828915 - RNA, 20 nt, Human
cauuuugccaaaauuauuaa

SEQ ID NO: 3828916 - RNA, 21 nt, Human
cauuuugcuaaaugugaauga

SEQ ID NO: 3828917 - RNA, 15 nt, Human
cauuuugcuauugua

SEQ ID NO: 3828918 - RNA, 12 nt, Human
cauuuugcuuua

SEQ ID NO: 3828919 - RNA, 18 nt, Human
cauuuuggaaguuuucag

SEQ ID NO: 3828920 - RNA, 22 nt, Human
cauuuugguaagagacagaaug

SEQ ID NO: 3828921 - RNA, 15 nt, Human
cauuuuggugagaaa

SEQ ID NO: 3828922 - RNA, 20 nt, Human
cauuuuguauaauuguaucg

SEQ ID NO: 3828923 - RNA, 15 nt, Human
cauuuugugaagccc

SEQ ID NO: 3828924 - RNA, 13 nt, Human
cauuuugugaaug

SEQ ID NO: 3828925 - RNA, 18 nt, Human
cauuuuguguugaagagc

SEQ ID NO: 3828926 - RNA, 21 nt, Human
cauuuuguguugaagagcagc

SEQ ID NO: 3828927 - RNA, 15 nt, Human
cauuuuguucuuaca

SEQ ID NO: 3828928 - RNA, 18 nt, Human
cauuuuguucuuacacau

SEQ ID NO: 3828929 - RNA, 21 nt, Human
cauuuuguucuuacacauaca

SEQ ID NO: 3828930 - RNA, 14 nt, Human
cauuuuguuguaaa

SEQ ID NO: 3828931 - RNA, 20 nt, Human
cauuuuguuguaaaaagaaa

SEQ ID NO: 3828932 - RNA, 23 nt, Human
cauuuuguuguaaaaagaaaaac

SEQ ID NO: 3828933 - RNA, 22 nt, Human
cauuuuguuugguauuguauuu

SEQ ID NO: 3828934 - RNA, 13 nt, Human
cauuuuuaaaugu

SEQ ID NO: 3828935 - RNA, 15 nt, Human
ccuuugcagggcagc

SEQ ID NO: 3828936 - RNA, 17 nt, Human
ccuuugcagggcagccc

SEQ ID NO: 3828937 - RNA, 18 nt, Human
ccuuugcagggcagcccc

SEQ ID NO: 3828938 - RNA, 16 nt, Human
ccuuugcccagaaaga

SEQ ID NO: 3828939 - RNA, 16 nt, Human
ccuuugcgccugugac

SEQ ID NO: 3828940 - RNA, 23 nt, Human
ccuuugcgcuccuggcccagccu

SEQ ID NO: 3828941 - RNA, 14 nt, Human
ccuuugcucuugca

SEQ ID NO: 3828942 - RNA, 13 nt, Human
ccuuugcucuuuc

SEQ ID NO: 3828943 - RNA, 14 nt, Human
ccuuugcugacccu

SEQ ID NO: 3828944 - RNA, 21 nt, Human
ccuuugcugacccuccccaaa

SEQ ID NO: 3828945 - RNA, 16 nt, Human
ccuuugcugcauggca

SEQ ID NO: 3828946 - RNA, 21 nt, Human
ccuuuggaaagcucugaccac

SEQ ID NO: 3828947 - RNA, 15 nt, Human
ccuuuggcagaguuc

SEQ ID NO: 3828948 - RNA, 19 nt, Human
ccuuuggcaggugcagccc

SEQ ID NO: 3828949 - RNA, 15 nt, Human
ccuuuggccauucca

SEQ ID NO: 3828950 - RNA, 12 nt, Human
ccuuuggcucug

SEQ ID NO: 3828951 - RNA, 15 nt, Human
ccuuuggcucuggag

SEQ ID NO: 3828952 - RNA, 14 nt, Human
ccuuugggagcagg

SEQ ID NO: 3828953 - RNA, 19 nt, Human
ccuuugggaggcugaggcg

SEQ ID NO: 3828954 - RNA, 22 nt, Human
ccuuugggcuucagcugccagu

SEQ ID NO: 3828955 - RNA, 11 nt, Human
ccuuugggggu

SEQ ID NO: 3828956 - RNA, 21 nt, Human
ccuuugggugcuguuuugcca

SEQ ID NO: 3828957 - RNA, 16 nt, Human
ccuuugguuuuuuucu

SEQ ID NO: 3828958 - RNA, 12 nt, Human
ccuuuguaaguu

SEQ ID NO: 3828959 - RNA, 16 nt, Human
ccuuuguacagcccag

SEQ ID NO: 3828960 - RNA, 17 nt, Human
ccuuuguacagcccaga

SEQ ID NO: 3828961 - RNA, 20 nt, Human
ccuuuguauucucuccugua

SEQ ID NO: 3828962 - RNA, 14 nt, Human
ccuuuguauucugu

SEQ ID NO: 3828963 - RNA, 19 nt, Human
ccuuugucaucauuguaua

SEQ ID NO: 3828964 - RNA, 16 nt, Human
ccuuuguccccaccgc

SEQ ID NO: 3828965 - RNA, 22 nt, Human
ccuuuguccccaccgcagacag

SEQ ID NO: 3828966 - RNA, 23 nt, Human
ccuuuguccccaccgcagacagg

SEQ ID NO: 3828967 - RNA, 13 nt, Human
ccuuuguccuccu

SEQ ID NO: 3828968 - RNA, 14 nt, Human
ccuuugucuuguca

SEQ ID NO: 3828969 - RNA, 16 nt, Human
ccuuugugagucaaua

SEQ ID NO: 3828970 - RNA, 14 nt, Human
ccuuugugcccuau

SEQ ID NO: 3828971 - RNA, 12 nt, Human
ccuuugugcugu

SEQ ID NO: 3828972 - RNA, 20 nt, Human
ccuuugugugcucuccauuc

SEQ ID NO: 3828973 - RNA, 15 nt, Human
ccuuuguucccggcu

SEQ ID NO: 3828974 - RNA, 13 nt, Human
ccuuuguucuggg

SEQ ID NO: 3828975 - RNA, 15 nt, Human
ccuuuguucuggggg

SEQ ID NO: 3828976 - RNA, 16 nt, Human
ccaaauugugcuucuc

SEQ ID NO: 3828977 - RNA, 18 nt, Human
ccaaauuuaagacucucg

SEQ ID NO: 3828978 - RNA, 14 nt, Human
ccaaauuuaucaaa

SEQ ID NO: 3828979 - RNA, 23 nt, Human
ccaaauuucauaccuaucaucuu

SEQ ID NO: 3828980 - RNA, 23 nt, Human
ccaaauuuuaauuuuugcuuuua

SEQ ID NO: 3828981 - RNA, 21 nt, Human
ccaaauuuuggccaaaguguu

SEQ ID NO: 3828982 - RNA, 12 nt, Human
ccaacaaaccau

SEQ ID NO: 3828983 - RNA, 19 nt, Human
ccaacaaagaacacuaacu

SEQ ID NO: 3828984 - RNA, 13 nt, Human
ccaacaaagcugu

SEQ ID NO: 3828985 - RNA, 21 nt, Human
ccaacaaaggguuuuaaugua

SEQ ID NO: 3828986 - RNA, 22 nt, Human
ccaacaaaggguuuuaauguag

SEQ ID NO: 3828987 - RNA, 21 nt, Human
ccaacaagaagggacugagag

SEQ ID NO: 3828988 - RNA, 15 nt, Human
ccaacaagaaugcau

SEQ ID NO: 3828989 - RNA, 16 nt, Human
ccaacaagaaugcauu

SEQ ID NO: 3828990 - RNA, 14 nt, Human
ccaacaagcagcug

SEQ ID NO: 3828991 - RNA, 18 nt, Human
ccaacaagccagaaucag

SEQ ID NO: 3828992 - RNA, 15 nt, Human
ccaacaagggcagug

SEQ ID NO: 3828993 - RNA, 15 nt, Human
ccaacaccacagaaa

SEQ ID NO: 3828994 - RNA, 17 nt, Human
ccaacaccacagacaca

SEQ ID NO: 3828995 - RNA, 18 nt, Human
ccaacaccacagacacac

SEQ ID NO: 3828996 - RNA, 13 nt, Human
ccaacaccagccc

SEQ ID NO: 3828997 - RNA, 15 nt, Human
ccaacaccagccccu

SEQ ID NO: 3828998 - RNA, 18 nt, Human
ccaacaccaucacagcuu

SEQ ID NO: 3828999 - RNA, 21 nt, Human
ccaacaccaucacagcuuguu

SEQ ID NO: 3829000 - RNA, 20 nt, Human
ccaacacccugucuaaaaaa

SEQ ID NO: 3829001 - RNA, 14 nt, Human
ccaacacgagcagg

SEQ ID NO: 3829002 - RNA, 17 nt, Human
ccaacacgcaccugccu

SEQ ID NO: 3829003 - RNA, 20 nt, Human
ccaacacgcaccugccucag

SEQ ID NO: 3829004 - RNA, 13 nt, Human
ccaacacgcagga

SEQ ID NO: 3829005 - RNA, 13 nt, Human
ccaacacugccag

SEQ ID NO: 3829006 - RNA, 16 nt, Human
ccaacacugccagcau

SEQ ID NO: 3829007 - RNA, 23 nt, Human
ccaacagcgacauagcccauccc

SEQ ID NO: 3829008 - RNA, 18 nt, Human
ccaacagcuacaacagcc

SEQ ID NO: 3829009 - RNA, 18 nt, Human
ccaacagcuggacccuga

SEQ ID NO: 3829010 - RNA, 20 nt, Human
ccaacaggaggacaauucau

SEQ ID NO: 3829011 - RNA, 17 nt, Human
ccaacaggggcuccaug

SEQ ID NO: 3829012 - RNA, 20 nt, Human
ccaacagguagcauagcucu

SEQ ID NO: 3829013 - RNA, 19 nt, Human
ccaacagguggcaggacca

SEQ ID NO: 3829014 - RNA, 16 nt, Human
ccaacagugugaaguu

SEQ ID NO: 3829015 - RNA, 19 nt, Human
ccaacauacucccaucugu

SEQ ID NO: 3829016 - RNA, 21 nt, Human
ccaacauacucccaucuguga

SEQ ID NO: 3829017 - RNA, 22 nt, Human
ccaacauacucccaucugugaa

SEQ ID NO: 3829018 - RNA, 13 nt, Human
ccaacauauaaaa

SEQ ID NO: 3829019 - RNA, 13 nt, Human
ccaacaucaacau

SEQ ID NO: 3829020 - RNA, 13 nt, Human
ccaacauccacuc

SEQ ID NO: 3829021 - RNA, 14 nt, Human
ccaacauccacucu

SEQ ID NO: 3829022 - RNA, 17 nt, Human
ccaacauccacucucuc

SEQ ID NO: 3829023 - RNA, 18 nt, Human
ccaacaucuacaaaacau

SEQ ID NO: 3829024 - RNA, 22 nt, Human
ccaacauggagaaacccugucu

SEQ ID NO: 3829025 - RNA, 23 nt, Human
ccaaccaacuugguucugcuuca

SEQ ID NO: 3829026 - RNA, 20 nt, Human
ccaaccaaguggcucccaca

SEQ ID NO: 3829027 - RNA, 17 nt, Human
ccaaccagugccaagga

SEQ ID NO: 3829028 - RNA, 13 nt, Human
ccaaccauuuccu

SEQ ID NO: 3829029 - RNA, 17 nt, Human
ccaaccauuuccucaga

SEQ ID NO: 3829030 - RNA, 17 nt, Human
ccaacccaaaccuggag

SEQ ID NO: 3829031 - RNA, 12 nt, Human
ccaacccagccg

SEQ ID NO: 3829032 - RNA, 21 nt, Human
ccaacccagccgcugcccggc

SEQ ID NO: 3829033 - RNA, 14 nt, Human
ccaaccccaacucc

SEQ ID NO: 3829034 - RNA, 13 nt, Human
ccaacccccaccc

SEQ ID NO: 3829035 - RNA, 17 nt, Human
ccaaccccucgcccagu

SEQ ID NO: 3829036 - RNA, 18 nt, Human
ccaaccccucgcccaguc

SEQ ID NO: 3829037 - RNA, 18 nt, Human
ccaaccccugaggaagau

SEQ ID NO: 3829038 - RNA, 22 nt, Human
ccaacccuagguucccuguucu

SEQ ID NO: 3829039 - RNA, 23 nt, Human
ccaacccuaucuccugacagaag

SEQ ID NO: 3829040 - RNA, 14 nt, Human
ccaacccucagggc

SEQ ID NO: 3829041 - RNA, 15 nt, Human
ccaacccugccccug

SEQ ID NO: 3829042 - RNA, 16 nt, Human
ccaacccugccccugc

SEQ ID NO: 3829043 - RNA, 17 nt, Human
ccaacccuggcuugggg

SEQ ID NO: 3829044 - RNA, 13 nt, Human
ccaacccugucug

SEQ ID NO: 3829045 - RNA, 14 nt, Human
ccaacccugucugu

SEQ ID NO: 3829046 - RNA, 16 nt, Human
ccaacccuguuuccug

SEQ ID NO: 3829047 - RNA, 14 nt, Human
ccaacccuucuuca

SEQ ID NO: 3829048 - RNA, 13 nt, Human
ccaaccgacaggc

SEQ ID NO: 3829049 - RNA, 16 nt, Human
ccaaccgugucugucu

SEQ ID NO: 3829050 - RNA, 18 nt, Human
ccaaccuaaccccuuucc

SEQ ID NO: 3829051 - RNA, 14 nt, Human
ccaaccuaaccugu

SEQ ID NO: 3829052 - RNA, 17 nt, Human
ccaaccuaaccuguguc

SEQ ID NO: 3829053 - RNA, 21 nt, Human
ccaaccuauuuugaaguacca

SEQ ID NO: 3829054 - RNA, 11 nt, Human
ccaaccucagc

SEQ ID NO: 3829055 - RNA, 14 nt, Human
ccaaccucagggcu

SEQ ID NO: 3829056 - RNA, 13 nt, Human
ccaaccucuggag

SEQ ID NO: 3829057 - RNA, 14 nt, Human
ccaaccucuggagc

SEQ ID NO: 3829058 - RNA, 15 nt, Human
ccaaccucuuccucc

SEQ ID NO: 3829059 - RNA, 17 nt, Human
ccaaccugcucuccucu

SEQ ID NO: 3829060 - RNA, 18 nt, Human
ccaaccugcucuccucuu

SEQ ID NO: 3829061 - RNA, 14 nt, Human
ccaaccuggggggc

SEQ ID NO: 3829062 - RNA, 21 nt, Human
ccaacggagagcgccugcccc

SEQ ID NO: 3829063 - RNA, 15 nt, Human
ccaacggccccagcu

SEQ ID NO: 3829064 - RNA, 20 nt, Human
ccaacggcccugcagccagc

SEQ ID NO: 3829065 - RNA, 13 nt, Human
ccaacgucugugc

SEQ ID NO: 3829066 - RNA, 16 nt, Human
ccaacgucugugccau

SEQ ID NO: 3829067 - RNA, 15 nt, Human
ccaacguggggcagc

SEQ ID NO: 3829068 - RNA, 19 nt, Human
ccaacuaaugccuuacucu

SEQ ID NO: 3829069 - RNA, 16 nt, Human
ccaacuacaaccaagc

SEQ ID NO: 3829070 - RNA, 17 nt, Human
ccaacuacuaucucaga

SEQ ID NO: 3829071 - RNA, 17 nt, Human
ccaacuagacauucugu

SEQ ID NO: 3829072 - RNA, 16 nt, Human
ccaacuauuuauugac

SEQ ID NO: 3829073 - RNA, 16 nt, Human
ccaacucaccccagcc

SEQ ID NO: 3829074 - RNA, 16 nt, Human
ccaacuccaacaucca

SEQ ID NO: 3829075 - RNA, 21 nt, Human
ccaacuccagaaagugacaag

SEQ ID NO: 3829076 - RNA, 12 nt, Human
ccaacuccagga

SEQ ID NO: 3829077 - RNA, 22 nt, Human
ccaacuccgugugguaagcaac

SEQ ID NO: 3829078 - RNA, 20 nt, Human
ccaacuccugauucauguug

SEQ ID NO: 3829079 - RNA, 22 nt, Human
ccaacuccuggaagcugugucc

SEQ ID NO: 3829080 - RNA, 12 nt, Human
ccaacuccuucc

SEQ ID NO: 3829081 - RNA, 14 nt, Human
ccaacuccuuccag

SEQ ID NO: 3829082 - RNA, 15 nt, Human
ccaacucgggcuccc

SEQ ID NO: 3829083 - RNA, 14 nt, Human
ccaacucuagcugg

SEQ ID NO: 3829084 - RNA, 14 nt, Human
ccaacucugagccc

SEQ ID NO: 3829085 - RNA, 16 nt, Human
ccaacucugagcccau

SEQ ID NO: 3829086 - RNA, 12 nt, Human
ccaacugaaggc

SEQ ID NO: 3829087 - RNA, 12 nt, Human
ccaacugcugcu

SEQ ID NO: 3829088 - RNA, 16 nt, Human
ccaacuggaagcacag

SEQ ID NO: 3829089 - RNA, 16 nt, Human
ccaacugggcccaaga

SEQ ID NO: 3829090 - RNA, 20 nt, Human
ccaacuguguuguauuaaca

SEQ ID NO: 3829091 - RNA, 20 nt, Human
ccaacuucucuugcuuucua

SEQ ID NO: 3829092 - RNA, 13 nt, Human
ccaacuugccuuu

SEQ ID NO: 3829093 - RNA, 17 nt, Human
ccaacuuguaaauacac

SEQ ID NO: 3829094 - RNA, 23 nt, Human
ccaacuuguauuaaagacagagg

SEQ ID NO: 3829095 - RNA, 22 nt, Human
ccaacuuuguggaugucuuccu

SEQ ID NO: 3829096 - RNA, 14 nt, Human
ccaacuuuucuauu

SEQ ID NO: 3829097 - RNA, 22 nt, Human
ccaagaaagaugaauacauuuu

SEQ ID NO: 3829098 - RNA, 22 nt, Human
ccaagaaagauguauauaggug

SEQ ID NO: 3829099 - RNA, 18 nt, Human
ccaagaaaggaaaccuuu

SEQ ID NO: 3829100 - RNA, 13 nt, Human
ccaagaacugaaa

SEQ ID NO: 3829101 - RNA, 17 nt, Human
ccaagaacugaaaacau

SEQ ID NO: 3829102 - RNA, 21 nt, Human
ccaagaacugaaaacauaaaa

SEQ ID NO: 3829103 - RNA, 14 nt, Human
ccaagaagcccagg

SEQ ID NO: 3829104 - RNA, 20 nt, Human
ccaagaagcccaggaaaggc

SEQ ID NO: 3829105 - RNA, 14 nt, Human
ccaagaaggcuggg

SEQ ID NO: 3829106 - RNA, 13 nt, Human
ccaagaagggcua

SEQ ID NO: 3829107 - RNA, 22 nt, Human
ccaagaagggcuagaaccugga

SEQ ID NO: 3829108 - RNA, 14 nt, Human
cggcccgccucucc

SEQ ID NO: 3829109 - RNA, 16 nt, Human
cggcccguggcuguug

SEQ ID NO: 3829110 - RNA, 12 nt, Human
cggcccuaaggg

SEQ ID NO: 3829111 - RNA, 20 nt, Human
cggcccuaccagcgcccgcu

SEQ ID NO: 3829112 - RNA, 18 nt, Human
cggcccuagcccagcgcu

SEQ ID NO: 3829113 - RNA, 16 nt, Human
cggcccuccagagccc

SEQ ID NO: 3829114 - RNA, 22 nt, Human
cggcccuccuacccugcgccca

SEQ ID NO: 3829115 - RNA, 12 nt, Human
cggcccuggggc

SEQ ID NO: 3829116 - RNA, 15 nt, Human
cggcccugugugcag

SEQ ID NO: 3829117 - RNA, 13 nt, Human
cggccgcauuccc

SEQ ID NO: 3829118 - RNA, 13 nt, Human
cggccgcuccagg

SEQ ID NO: 3829119 - RNA, 14 nt, Human
cggccgcuccaggg

SEQ ID NO: 3829120 - RNA, 16 nt, Human
cggccggccagccccu

SEQ ID NO: 3829121 - RNA, 12 nt, Human
cggccuccaucc

SEQ ID NO: 3829122 - RNA, 17 nt, Human
ccacauuggaagagcag

SEQ ID NO: 3829123 - RNA, 14 nt, Human
ccacauuguuuuaa

SEQ ID NO: 3829124 - RNA, 16 nt, Human
ccacauuguuuuaaaa

SEQ ID NO: 3829125 - RNA, 19 nt, Human
ccacauuuagucucuuuau

SEQ ID NO: 3829126 - RNA, 22 nt, Human
ccacauuuggaauacuuuuugu

SEQ ID NO: 3829127 - RNA, 23 nt, Human
ccacauuugguucuaagaaaccc

SEQ ID NO: 3829128 - RNA, 17 nt, Human
ccacauuugugccgaca

SEQ ID NO: 3829129 - RNA, 16 nt, Human
ccacauuuuauauuua

SEQ ID NO: 3829130 - RNA, 16 nt, Human
ccacauuuucagccaa

SEQ ID NO: 3829131 - RNA, 13 nt, Human
ccaccaaagcugc

SEQ ID NO: 3829132 - RNA, 21 nt, Human
ccaccaaagcugcccacuguu

SEQ ID NO: 3829133 - RNA, 21 nt, Human
ccaccaacccaucagaaggag

SEQ ID NO: 3829134 - RNA, 14 nt, Human
ccaccaacucuugc

SEQ ID NO: 3829135 - RNA, 16 nt, Human
ccaccaacuggcccuc

SEQ ID NO: 3829136 - RNA, 21 nt, Human
ccaccaagccuggucagccca

SEQ ID NO: 3829137 - RNA, 22 nt, Human
ccaccaagccuggucagcccaa

SEQ ID NO: 3829138 - RNA, 13 nt, Human
ccaccaagccuug

SEQ ID NO: 3829139 - RNA, 17 nt, Human
ccaccacacccagccca

SEQ ID NO: 3829140 - RNA, 15 nt, Human
ccaccacaccuggcu

SEQ ID NO: 3829141 - RNA, 20 nt, Human
ccaccacaguccccagagug

SEQ ID NO: 3829142 - RNA, 15 nt, Human
ccaccaccacuggcc

SEQ ID NO: 3829143 - RNA, 16 nt, Human
ccaccaccacuggcca

SEQ ID NO: 3829144 - RNA, 12 nt, Human
ccaccaccuagg

SEQ ID NO: 3829145 - RNA, 18 nt, Human
ccaccaccuaggccacuc

SEQ ID NO: 3829146 - RNA, 15 nt, Human
ccaccaccucugugg

SEQ ID NO: 3829147 - RNA, 15 nt, Human
ccaccacgcccggcu

SEQ ID NO: 3829148 - RNA, 19 nt, Human
ccaccacggccacuggcca

SEQ ID NO: 3829149 - RNA, 20 nt, Human
ccaccacuaggacucugagg

SEQ ID NO: 3829150 - RNA, 13 nt, Human
ccaccacuauaaa

SEQ ID NO: 3829151 - RNA, 15 nt, Human
ccaccacuggccacc

SEQ ID NO: 3829152 - RNA, 21 nt, Human
ccaccacuggccaccaggcug

SEQ ID NO: 3829153 - RNA, 14 nt, Human
ccaccagaagccca

SEQ ID NO: 3829154 - RNA, 21 nt, Human
ccaccagagaccguccucacc

SEQ ID NO: 3829155 - RNA, 12 nt, Human
ccaccagagcug

SEQ ID NO: 3829156 - RNA, 18 nt, Human
ccaccagauagcagaggg

SEQ ID NO: 3829157 - RNA, 12 nt, Human
ccaccagaugcu

SEQ ID NO: 3829158 - RNA, 11 nt, Human
ccaccagccug

SEQ ID NO: 3829159 - RNA, 14 nt, Human
ccaccagccugcac

SEQ ID NO: 3829160 - RNA, 14 nt, Human
ccaccaggaaccuc

SEQ ID NO: 3829161 - RNA, 14 nt, Human
ccaccaggaucagc

SEQ ID NO: 3829162 - RNA, 18 nt, Human
ccaccaggaucccagggg

SEQ ID NO: 3829163 - RNA, 21 nt, Human
ccaccaggccaccuccccagc

SEQ ID NO: 3829164 - RNA, 22 nt, Human
ccaccaggcugcucagggcugg

SEQ ID NO: 3829165 - RNA, 20 nt, Human
ccaccaggcuggcgcagcca

SEQ ID NO: 3829166 - RNA, 18 nt, Human
ccaccaggucucccggga

SEQ ID NO: 3829167 - RNA, 14 nt, Human
ccaccagucacugu

SEQ ID NO: 3829168 - RNA, 14 nt, Human
ccaccagucauuuu

SEQ ID NO: 3829169 - RNA, 18 nt, Human
ccaccagucugacuguuu

SEQ ID NO: 3829170 - RNA, 15 nt, Human
cuaaauuuaaugcug

SEQ ID NO: 3829171 - RNA, 16 nt, Human
cuaaauuuaaugcugc

SEQ ID NO: 3829172 - RNA, 16 nt, Human
cuaaauuuauuaaaua

SEQ ID NO: 3829173 - RNA, 17 nt, Human
cuaaauuuauuaaauaa

SEQ ID NO: 3829174 - RNA, 19 nt, Human
cuaaauuugauacuuauau

SEQ ID NO: 3829175 - RNA, 20 nt, Human
cuaaauuuggggacagauuc

SEQ ID NO: 3829176 - RNA, 23 nt, Human
cuaaauuuggggacagauucagu

SEQ ID NO: 3829177 - RNA, 16 nt, Human
cuaaauuuuccugucc

SEQ ID NO: 3829178 - RNA, 22 nt, Human
cuaacaagucauagguuaauau

SEQ ID NO: 3829179 - RNA, 22 nt, Human
cuaacaaucagcuccuuccugg

SEQ ID NO: 3829180 - RNA, 15 nt, Human
cuaacaaugacauuu

SEQ ID NO: 3829181 - RNA, 13 nt, Human
cuaacacaaggac

SEQ ID NO: 3829182 - RNA, 17 nt, Human
cuaacacacacagaaaa

SEQ ID NO: 3829183 - RNA, 17 nt, Human
cuaacacagcaugugua

SEQ ID NO: 3829184 - RNA, 15 nt, Human
cuaacaccagacaga

SEQ ID NO: 3829185 - RNA, 23 nt, Human
cuaacacggugcucauuuuuucu

SEQ ID NO: 3829186 - RNA, 18 nt, Human
cuaacacgugaugugaua

SEQ ID NO: 3829187 - RNA, 16 nt, Human
cuaacacuauuuuaug

SEQ ID NO: 3829188 - RNA, 22 nt, Human
cuaacacucagaagccuggggg

SEQ ID NO: 3829189 - RNA, 23 nt, Human
cuaacacucagaagccugggggc

SEQ ID NO: 3829190 - RNA, 17 nt, Human
cuaacacuggccccuag

SEQ ID NO: 3829191 - RNA, 17 nt, Human
cuaacagauaagcaaga

SEQ ID NO: 3829192 - RNA, 18 nt, Human
cuaacagauaagcaagag

SEQ ID NO: 3829193 - RNA, 20 nt, Human
cuaacagcaacacaaagcuu

SEQ ID NO: 3829194 - RNA, 21 nt, Human
cuaacagcaguuucagguaga

SEQ ID NO: 3829195 - RNA, 21 nt, Human
cuaacagcccuccucugcacu

SEQ ID NO: 3829196 - RNA, 22 nt, Human
cuaacagcccuccucugcacuc

SEQ ID NO: 3829197 - RNA, 17 nt, Human
cuaacagggaaggcagg

SEQ ID NO: 3829198 - RNA, 21 nt, Human
cuaacagggaaggcaggcagg

SEQ ID NO: 3829199 - RNA, 20 nt, Human
cuaacagugaaguuuuacug

SEQ ID NO: 3829200 - RNA, 19 nt, Human
cuaacaguucacuugcagu

SEQ ID NO: 3829201 - RNA, 16 nt, Human
cuaacaugaagaccuu

SEQ ID NO: 3829202 - RNA, 15 nt, Human
cuaacauggaaguac

SEQ ID NO: 3829203 - RNA, 12 nt, Human
cuaacauuauau

SEQ ID NO: 3829204 - RNA, 16 nt, Human
cuaacauuauauugca

SEQ ID NO: 3829205 - RNA, 14 nt, Human
cuaaccaaaugcau

SEQ ID NO: 3829206 - RNA, 14 nt, Human
cuaaccacagcucc

SEQ ID NO: 3829207 - RNA, 15 nt, Human
cuaaccacagcuccu

SEQ ID NO: 3829208 - RNA, 21 nt, Human
cuaaccacgucugucuucaca

SEQ ID NO: 3829209 - RNA, 18 nt, Human
cuaaccagagcaagcuuu

SEQ ID NO: 3829210 - RNA, 18 nt, Human
cuaaccauguguuauguu

SEQ ID NO: 3829211 - RNA, 19 nt, Human
cuaacccagguauccaaaa

SEQ ID NO: 3829212 - RNA, 18 nt, Human
cuaaccccaacgcacagg

SEQ ID NO: 3829213 - RNA, 16 nt, Human
cuaaccccaggccccg

SEQ ID NO: 3829214 - RNA, 16 nt, Human
cuaaccccgggcgggu

SEQ ID NO: 3829215 - RNA, 19 nt, Human
cuaaccccuuccagaucac

SEQ ID NO: 3829216 - RNA, 14 nt, Human
cuaaccccuuuccu

SEQ ID NO: 3829217 - RNA, 14 nt, Human
cuaaccuaagcaaa

SEQ ID NO: 3829218 - RNA, 22 nt, Human
cuaaccuaagcaaaaccacuga

SEQ ID NO: 3829219 - RNA, 22 nt, Human
cuaaccucaagugauccuccca

SEQ ID NO: 3829220 - RNA, 12 nt, Human
cuaaccucaucu

SEQ ID NO: 3829221 - RNA, 12 nt, Human
cuaaccuccuuu

SEQ ID NO: 3829222 - RNA, 13 nt, Human
cuaaccuccuuua

SEQ ID NO: 3829223 - RNA, 17 nt, Human
cuaaccucgggccugcu

SEQ ID NO: 3829224 - RNA, 19 nt, Human
cuaaccucuuuucugcauc

SEQ ID NO: 3829225 - RNA, 12 nt, Human
cuaaccugccga

SEQ ID NO: 3829226 - RNA, 14 nt, Human
cuaaccugugucug

SEQ ID NO: 3829227 - RNA, 16 nt, Human
cuaaccuugaaugcug

SEQ ID NO: 3829228 - RNA, 21 nt, Human
cuaaccuugaaugcugccagu

SEQ ID NO: 3829229 - RNA, 20 nt, Human
cuaaccuugccugguacagu

SEQ ID NO: 3829230 - RNA, 21 nt, Human
cuaaccuuuacaugaggacuc

SEQ ID NO: 3829231 - RNA, 17 nt, Human
cuaacgccugagcccag

SEQ ID NO: 3829232 - RNA, 18 nt, Human
cuaacgccugagcccagg

SEQ ID NO: 3829233 - RNA, 22 nt, Human
cuaacggucuguucuguuucaa

SEQ ID NO: 3829234 - RNA, 19 nt, Human
cuaacuaaacucucuuugg

SEQ ID NO: 3829235 - RNA, 19 nt, Human
cuaacuacaaagguuuaaa

SEQ ID NO: 3829236 - RNA, 21 nt, Human
cuaacuagacaccaaaguucu

SEQ ID NO: 3829237 - RNA, 20 nt, Human
cuaacuagagcagcccugga

SEQ ID NO: 3829238 - RNA, 16 nt, Human
cuaacucaaauacaca

SEQ ID NO: 3829239 - RNA, 21 nt, Human
cuaacucaccagccccacugc

SEQ ID NO: 3829240 - RNA, 19 nt, Human
cuaacucagaaacaucagu

SEQ ID NO: 3829241 - RNA, 17 nt, Human
cuaacucagaauuauuu

SEQ ID NO: 3829242 - RNA, 16 nt, Human
cuaacucugauguaaa

SEQ ID NO: 3829243 - RNA, 17 nt, Human
cuaacugaacuuugaag

SEQ ID NO: 3829244 - RNA, 14 nt, Human
cuaacuguaaauca

SEQ ID NO: 3829245 - RNA, 17 nt, Human
cuaacuguaaaucaugu

SEQ ID NO: 3829246 - RNA, 18 nt, Human
cuaacuuaagaaauaaau

SEQ ID NO: 3829247 - RNA, 16 nt, Human
cuaacuucaccauauu

SEQ ID NO: 3829248 - RNA, 16 nt, Human
cuaacuucuaaaacug

SEQ ID NO: 3829249 - RNA, 17 nt, Human
cuaacuucuaaaacugu

SEQ ID NO: 3829250 - RNA, 17 nt, Human
cuaacuugcuuaaaugu

SEQ ID NO: 3829251 - RNA, 19 nt, Human
cuaacuugcuuaaauguga

SEQ ID NO: 3829252 - RNA, 13 nt, Human
cuaacuuggguua

SEQ ID NO: 3829253 - RNA, 22 nt, Human
cuaagaaaagauacgacuuuau

SEQ ID NO: 3829254 - RNA, 17 nt, Human
cuaagaaaagccuaauc

SEQ ID NO: 3829255 - RNA, 14 nt, Human
cuaagaaacauugg

SEQ ID NO: 3829256 - RNA, 18 nt, Human
cuaagaaacauuggaagc

SEQ ID NO: 3829257 - RNA, 19 nt, Human
cuaagaaacauuuauauug

SEQ ID NO: 3829258 - RNA, 17 nt, Human
cuaagaaacuuuuguaa

SEQ ID NO: 3829259 - RNA, 18 nt, Human
cuaagaaacuuuuguaaa

SEQ ID NO: 3829260 - RNA, 19 nt, Human
cuaagaaauaucugugaaa

SEQ ID NO: 3829261 - RNA, 16 nt, Human
cuaagaaauaugugag

SEQ ID NO: 3829262 - RNA, 21 nt, Human
cuaagaaauaugugagauuuu

SEQ ID NO: 3829263 - RNA, 16 nt, Human
cuaagaaauugaauac

SEQ ID NO: 3829264 - RNA, 16 nt, Human
cuaagaaccuggaacu

SEQ ID NO: 3829265 - RNA, 14 nt, Human
cuaagaagcuucua

SEQ ID NO: 3829266 - RNA, 17 nt, Human
cuaagaagcuucuaaua

SEQ ID NO: 3829267 - RNA, 20 nt, Human
cuacucaaguagcauuuacu

SEQ ID NO: 3829268 - RNA, 13 nt, Human
cuacucacacagg

SEQ ID NO: 3829269 - RNA, 14 nt, Human
cuacucacacaggc

SEQ ID NO: 3829270 - RNA, 22 nt, Human
cuacucacacaggcauuuccug

SEQ ID NO: 3829271 - RNA, 18 nt, Human
cuacucacagucucuuua

SEQ ID NO: 3829272 - RNA, 23 nt, Human
cuacucaccuugaacaccacgcu

SEQ ID NO: 3829273 - RNA, 16 nt, Human
cuacucacucaaguuc

SEQ ID NO: 3829274 - RNA, 22 nt, Human
cuacucacucaaguucaaggac

SEQ ID NO: 3829275 - RNA, 13 nt, Human
cuacucagaagcc

SEQ ID NO: 3829276 - RNA, 17 nt, Human
cuacucagaagccugag

SEQ ID NO: 3829277 - RNA, 19 nt, Human
cuacucagaagccugaggc

SEQ ID NO: 3829278 - RNA, 16 nt, Human
cuacucagcagcccuc

SEQ ID NO: 3829279 - RNA, 16 nt, Human
cuacucaggaggcuga

SEQ ID NO: 3829280 - RNA, 20 nt, Human
cuacucauacuuaagcaaaa

SEQ ID NO: 3829281 - RNA, 16 nt, Human
cuacucauuccccggg

SEQ ID NO: 3829282 - RNA, 16 nt, Human
cuacuccggagacagg

SEQ ID NO: 3829283 - RNA, 15 nt, Human
cuacuccuaccucag

SEQ ID NO: 3829284 - RNA, 16 nt, Human
cuacuccuaccucagc

SEQ ID NO: 3829285 - RNA, 12 nt, Human
cuacuccugacu

SEQ ID NO: 3829286 - RNA, 16 nt, Human
cuacuccugucuucug

SEQ ID NO: 3829287 - RNA, 15 nt, Human
cuacucgaguuacag

SEQ ID NO: 3829288 - RNA, 19 nt, Human
cuacucgaguuacagacaa

SEQ ID NO: 3829289 - RNA, 20 nt, Human
cuacucgcuugcuagaagua

SEQ ID NO: 3829290 - RNA, 17 nt, Human
cuacucgggaggcugag

SEQ ID NO: 3829291 - RNA, 21 nt, Human
cuacucucacacugguucuca

SEQ ID NO: 3829292 - RNA, 23 nt, Human
cuacucuccccacgagggcuggc

SEQ ID NO: 3829293 - RNA, 22 nt, Human
cuacucuggagguuuguuuaga

SEQ ID NO: 3829294 - RNA, 18 nt, Human
cuacucugugccagagcc

SEQ ID NO: 3829295 - RNA, 16 nt, Human
cuacucuguuccuuca

SEQ ID NO: 3829296 - RNA, 22 nt, Human
cuacucuguuccuucacauccu

SEQ ID NO: 3829297 - RNA, 21 nt, Human
cuacucuuaaguuucucagcu

SEQ ID NO: 3829298 - RNA, 11 nt, Human
cuacucuucuc

SEQ ID NO: 3829299 - RNA, 17 nt, Human
cuacucuucucucugcu

SEQ ID NO: 3829300 - RNA, 18 nt, Human
cuacucuucucucugcuc

SEQ ID NO: 3829301 - RNA, 19 nt, Human
cuacucuucucucugcucu

SEQ ID NO: 3829302 - RNA, 12 nt, Human
cuacucuuugau

SEQ ID NO: 3829303 - RNA, 14 nt, Human
cuacucuuugauuu

SEQ ID NO: 3829304 - RNA, 20 nt, Human
cuacugaaacagauuucaua

SEQ ID NO: 3829305 - RNA, 19 nt, Human
cuacugacauaucuacacu

SEQ ID NO: 3829306 - RNA, 22 nt, Human
cuacugacggaguccuguguuu

SEQ ID NO: 3829307 - RNA, 17 nt, Human
cuacugacuuucucagc

SEQ ID NO: 3829308 - RNA, 20 nt, Human
cuacugaggauauggacacu

SEQ ID NO: 3829309 - RNA, 14 nt, Human
cuacugauuccgca

SEQ ID NO: 3829310 - RNA, 16 nt, Human
cuacugauuuccuuug

SEQ ID NO: 3829311 - RNA, 14 nt, Human
cuacugcaccauuu

SEQ ID NO: 3829312 - RNA, 18 nt, Human
cuacugcacuccagccug

SEQ ID NO: 3829313 - RNA, 21 nt, Human
cuacugcacuccagccugggg

SEQ ID NO: 3829314 - RNA, 13 nt, Human
cuacugcagcacc

SEQ ID NO: 3829315 - RNA, 19 nt, Human
cuacugcagcaccuccagg

SEQ ID NO: 3829316 - RNA, 22 nt, Human
cuacugcagcaccuccaggccu

SEQ ID NO: 3829317 - RNA, 17 nt, Human
cuacugcagcuuuacau

SEQ ID NO: 3829318 - RNA, 16 nt, Human
cuacugcauuuaggga

SEQ ID NO: 3829319 - RNA, 17 nt, Human
cuacugcauuuagggag

SEQ ID NO: 3829320 - RNA, 19 nt, Human
cuacugccaaccucgcucc

SEQ ID NO: 3829321 - RNA, 16 nt, Human
cuacugccauccuggc

SEQ ID NO: 3829322 - RNA, 18 nt, Human
cuacugccauccuggccc

SEQ ID NO: 3829323 - RNA, 19 nt, Human
cuacugccauccuggccca

SEQ ID NO: 3829324 - RNA, 20 nt, Human
cuacugccauccuggcccag

SEQ ID NO: 3829325 - RNA, 22 nt, Human
cuacugccauccuggcccaggg

SEQ ID NO: 3829326 - RNA, 11 nt, Human
cuacugccuuu

SEQ ID NO: 3829327 - RNA, 15 nt, Human
cuacugccuuuagaa

SEQ ID NO: 3829328 - RNA, 16 nt, Human
cuacugccuuuagaaa

SEQ ID NO: 3829329 - RNA, 20 nt, Human
cuacugcugugaacccuggg

SEQ ID NO: 3829330 - RNA, 12 nt, Human
cuacugcuucua

SEQ ID NO: 3829331 - RNA, 22 nt, Human
cuacugcuucuaccaacuggaa

SEQ ID NO: 3829332 - RNA, 21 nt, Human
cuacuggcagcugauacguuu

SEQ ID NO: 3829333 - RNA, 22 nt, Human
cuacuggggaaacuggccaugg

SEQ ID NO: 3829334 - RNA, 14 nt, Human
cuacugggugucau

SEQ ID NO: 3829335 - RNA, 22 nt, Human
cuacuguaauaaagaugauugu

SEQ ID NO: 3829336 - RNA, 16 nt, Human
cuacuguaauuuguga

SEQ ID NO: 3829337 - RNA, 17 nt, Human
cuacuguaauuugugau

SEQ ID NO: 3829338 - RNA, 13 nt, Human
cuacuguacauaa

SEQ ID NO: 3829339 - RNA, 20 nt, Human
cuacuguacauaaacaauga

SEQ ID NO: 3829340 - RNA, 17 nt, Human
cuacugucaaaugaugu

SEQ ID NO: 3829341 - RNA, 20 nt, Human
cuacuguccuacccacccuc

SEQ ID NO: 3829342 - RNA, 22 nt, Human
cuacugucuuuggaaaaauguu

SEQ ID NO: 3829343 - RNA, 14 nt, Human
cuacuguggaaaaa

SEQ ID NO: 3829344 - RNA, 20 nt, Human
cuacuguggaaaaauauuua

SEQ ID NO: 3829345 - RNA, 19 nt, Human
cuacugugugugugaauga

SEQ ID NO: 3829346 - RNA, 16 nt, Human
cuacuguguuaugcaa

SEQ ID NO: 3829347 - RNA, 12 nt, Human
cuacuguguucc

SEQ ID NO: 3829348 - RNA, 13 nt, Human
cuacuguguuccu

SEQ ID NO: 3829349 - RNA, 19 nt, Human
cuacuguguuccuggcaau

SEQ ID NO: 3829350 - RNA, 12 nt, Human
cuacuguucuaa

SEQ ID NO: 3829351 - RNA, 18 nt, Human
cuacuguucuaaagcucu

SEQ ID NO: 3829352 - RNA, 22 nt, Human
cuacuguucuaaagcucugaca

SEQ ID NO: 3829353 - RNA, 15 nt, Human
cuacuuaauuccuuu

SEQ ID NO: 3829354 - RNA, 17 nt, Human
cuacuuacccagguggg

SEQ ID NO: 3829355 - RNA, 22 nt, Human
cuacuuagcaugucccuaccga

SEQ ID NO: 3829356 - RNA, 22 nt, Human
cuacuuauuguagcauccugga

SEQ ID NO: 3829357 - RNA, 19 nt, Human
cuacuucaggaacaccccc

SEQ ID NO: 3829358 - RNA, 23 nt, Human
cuacuuccccauggcccugagcg

SEQ ID NO: 3829359 - RNA, 15 nt, Human
cuacuuccugcacug

SEQ ID NO: 3829360 - RNA, 19 nt, Human
cuacuucucucuguauuuu

SEQ ID NO: 3829361 - RNA, 22 nt, Human
cuacuucuuugcuuugcccagc

SEQ ID NO: 3829362 - RNA, 18 nt, Human
cuacuugauuuuauugua

SEQ ID NO: 3829363 - RNA, 19 nt, Human
cuacuugcucuggaccugc

SEQ ID NO: 3829364 - RNA, 18 nt, Human
cuacuugggaggcugaga

SEQ ID NO: 3829365 - RNA, 15 nt, Human
cuacuugguuugugu

SEQ ID NO: 3829366 - RNA, 21 nt, Human
cuacuuuaauaaaugguuauu

SEQ ID NO: 3829367 - RNA, 18 nt, Human
cuacuuuauaacuaacau

SEQ ID NO: 3829368 - RNA, 19 nt, Human
cuacuuuauaacuaacaug

SEQ ID NO: 3829369 - RNA, 18 nt, Human
cuacuuugacuuuuugca

SEQ ID NO: 3829370 - RNA, 20 nt, Human
cuacuuugacuuuuugcauu

SEQ ID NO: 3829371 - RNA, 20 nt, Human
cuacuuuguuaggauuuuca

SEQ ID NO: 3829372 - RNA, 18 nt, Human
cuacuuuugcaugaaaau

SEQ ID NO: 3829373 - RNA, 14 nt, Human
cuagaaaaacaggc

SEQ ID NO: 3829374 - RNA, 15 nt, Human
cuagaaaaacaggca

SEQ ID NO: 3829375 - RNA, 16 nt, Human
cuagaaaacauuuuuu

SEQ ID NO: 3829376 - RNA, 14 nt, Human
cuagaaacaacacu

SEQ ID NO: 3829377 - RNA, 18 nt, Human
cuagaaacaacacuguag

SEQ ID NO: 3829378 - RNA, 16 nt, Human
cuagaaacagaucuug

SEQ ID NO: 3829379 - RNA, 23 nt, Human
cguguguggguggauauaaauau

SEQ ID NO: 3829380 - RNA, 11 nt, Human
cgugugugugu

SEQ ID NO: 3829381 - RNA, 16 nt, Human
cguguguguugucuga

SEQ ID NO: 3829382 - RNA, 21 nt, Human
cguguguuuuucuauuaaaag

SEQ ID NO: 3829383 - RNA, 23 nt, Human
cguguguuuuucuauuaaaagac

SEQ ID NO: 3829384 - RNA, 19 nt, Human
cguguuaugacuccagaau

SEQ ID NO: 3829385 - RNA, 21 nt, Human
cguguuauuuuaaucucagaa

SEQ ID NO: 3829386 - RNA, 19 nt, Human
cguguuccccucuugucuc

SEQ ID NO: 3829387 - RNA, 20 nt, Human
cguguuccccucuugucucc

SEQ ID NO: 3829388 - RNA, 22 nt, Human
cguguugccuugaaccacuucc

SEQ ID NO: 3829389 - RNA, 17 nt, Human
cguguuugucucuucug

SEQ ID NO: 3829390 - RNA, 21 nt, Human
cguguuuuauuccuguauguu

SEQ ID NO: 3829391 - RNA, 14 nt, Human
cguuaaaaacagau

SEQ ID NO: 3829392 - RNA, 19 nt, Human
cguuaacuguguauguaca

SEQ ID NO: 3829393 - RNA, 19 nt, Human
cguuacucagggcuccucc

SEQ ID NO: 3829394 - RNA, 16 nt, Human
cguuagaccgcucucu

SEQ ID NO: 3829395 - RNA, 13 nt, Human
cguuagcuccugu

SEQ ID NO: 3829396 - RNA, 17 nt, Human
cguuagcuccuguggcc

SEQ ID NO: 3829397 - RNA, 13 nt, Human
cguuagcuuuuuc

SEQ ID NO: 3829398 - RNA, 11 nt, Human
cguuauauuaa

SEQ ID NO: 3829399 - RNA, 14 nt, Human
cguuauuauaauug

SEQ ID NO: 3829400 - RNA, 19 nt, Human
cguucaacuuuuccuuuga

SEQ ID NO: 3829401 - RNA, 20 nt, Human
cguucaccccuccacccuug

SEQ ID NO: 3829402 - RNA, 13 nt, Human
cguucacuccaau

SEQ ID NO: 3829403 - RNA, 21 nt, Human
cguucaugggggagggggcag

SEQ ID NO: 3829404 - RNA, 11 nt, Human
cguucauuugu

SEQ ID NO: 3829405 - RNA, 12 nt, Human
cguucauuugug

SEQ ID NO: 3829406 - RNA, 19 nt, Human
cguuccacaguugccacca

SEQ ID NO: 3829407 - RNA, 20 nt, Human
cguuccacaguugccaccac

SEQ ID NO: 3829408 - RNA, 17 nt, Human
cguuccuauugucauua

SEQ ID NO: 3829409 - RNA, 22 nt, Human
cguuccugacaucacagcagcc

SEQ ID NO: 3829410 - RNA, 21 nt, Human
cguucgcagagcuuuucagau

SEQ ID NO: 3829411 - RNA, 22 nt, Human
ccagaggcaccucaagaagaag

SEQ ID NO: 3829412 - RNA, 18 nt, Human
ccagaggcccccagccca

SEQ ID NO: 3829413 - RNA, 22 nt, Human
ccagaggcccccagcccagggc

SEQ ID NO: 3829414 - RNA, 11 nt, Human
ccagaggcucg

SEQ ID NO: 3829415 - RNA, 15 nt, Human
ccagaggcuggguuc

SEQ ID NO: 3829416 - RNA, 16 nt, Human
ccagaggcuggguuca

SEQ ID NO: 3829417 - RNA, 16 nt, Human
ccagagggagugacag

SEQ ID NO: 3829418 - RNA, 19 nt, Human
ccagagggagugacagagg

SEQ ID NO: 3829419 - RNA, 21 nt, Human
ccagagggagugacagaggca

SEQ ID NO: 3829420 - RNA, 22 nt, Human
ccagagggagugacagaggcag

SEQ ID NO: 3829421 - RNA, 13 nt, Human
ccagagggcccag

SEQ ID NO: 3829422 - RNA, 15 nt, Human
ccagagggcccaggc

SEQ ID NO: 3829423 - RNA, 23 nt, Human
ccagaggggaaggaggguacagc

SEQ ID NO: 3829424 - RNA, 18 nt, Human
ccagaggggccugccacc

SEQ ID NO: 3829425 - RNA, 17 nt, Human
ccagagggucugggggc

SEQ ID NO: 3829426 - RNA, 18 nt, Human
ccagagggucugggggca

SEQ ID NO: 3829427 - RNA, 18 nt, Human
ccagagguaacagaacag

SEQ ID NO: 3829428 - RNA, 19 nt, Human
ccagagguccagcccaucu

SEQ ID NO: 3829429 - RNA, 14 nt, Human
ccagaggugggcag

SEQ ID NO: 3829430 - RNA, 19 nt, Human
ccagaguccccccacuccc

SEQ ID NO: 3829431 - RNA, 16 nt, Human
ccagagucccugccug

SEQ ID NO: 3829432 - RNA, 16 nt, Human
ccagaguccuuuccaa

SEQ ID NO: 3829433 - RNA, 21 nt, Human
ccagaguccuuuccaaggcuu

SEQ ID NO: 3829434 - RNA, 14 nt, Human
ccagaguggccugg

SEQ ID NO: 3829435 - RNA, 23 nt, Human
ccagaguggccuggccaggagcu

SEQ ID NO: 3829436 - RNA, 18 nt, Human
ccagagugugggaaggga

SEQ ID NO: 3829437 - RNA, 21 nt, Human
ccagagugugggaagggagag

SEQ ID NO: 3829438 - RNA, 17 nt, Human
ccagaguuccugcggag

SEQ ID NO: 3829439 - RNA, 16 nt, Human
ccagauaccagccccu

SEQ ID NO: 3829440 - RNA, 20 nt, Human
ccagauaccagccccuguau

SEQ ID NO: 3829441 - RNA, 21 nt, Human
ccagauacuucccauuuugga

SEQ ID NO: 3829442 - RNA, 18 nt, Human
ccagauaucaucuaccua

SEQ ID NO: 3829443 - RNA, 15 nt, Human
ccagaucacugccac

SEQ ID NO: 3829444 - RNA, 16 nt, Human
ccagaucacugccaca

SEQ ID NO: 3829445 - RNA, 14 nt, Human
ccagauccagccug

SEQ ID NO: 3829446 - RNA, 15 nt, Human
ccagauccagccugg

SEQ ID NO: 3829447 - RNA, 22 nt, Human
ccagaucccaggccccuggagg

SEQ ID NO: 3829448 - RNA, 12 nt, Human
ccagauccuggg

SEQ ID NO: 3829449 - RNA, 19 nt, Human
ccagaucggaucuguugca

SEQ ID NO: 3829450 - RNA, 13 nt, Human
ccagaucuggucc

SEQ ID NO: 3829451 - RNA, 19 nt, Human
ccagaugaugggggagggg

SEQ ID NO: 3829452 - RNA, 18 nt, Human
ccagaugcacaucccugg

SEQ ID NO: 3829453 - RNA, 13 nt, Human
ccagaugcaccag

SEQ ID NO: 3829454 - RNA, 14 nt, Human
ccagaugcaccagc

SEQ ID NO: 3829455 - RNA, 23 nt, Human
ccagaugcaccagcccuuagcag

SEQ ID NO: 3829456 - RNA, 14 nt, Human
ccagaugcagggca

SEQ ID NO: 3829457 - RNA, 23 nt, Human
ccagaugcugauguucaguguaa

SEQ ID NO: 3829458 - RNA, 14 nt, Human
ccagaugcuuuccu

SEQ ID NO: 3829459 - RNA, 17 nt, Human
ccagauggacuccagcc

SEQ ID NO: 3829460 - RNA, 23 nt, Human
ccagauggcccggaugcugcuuc

SEQ ID NO: 3829461 - RNA, 20 nt, Human
ccagaugggggaaagcacag

SEQ ID NO: 3829462 - RNA, 17 nt, Human
ccagauggucauccaga

SEQ ID NO: 3829463 - RNA, 14 nt, Human
ccagauggugggau

SEQ ID NO: 3829464 - RNA, 21 nt, Human
ccagaugugaugcuugauauu

SEQ ID NO: 3829465 - RNA, 13 nt, Human
ccagauguggcua

SEQ ID NO: 3829466 - RNA, 23 nt, Human
ccagauguuuccagacuuccuug

SEQ ID NO: 3829467 - RNA, 19 nt, Human
ccagauguuuuacgucugg

SEQ ID NO: 3829468 - RNA, 21 nt, Human
ccagauguuuuacgucuggga

SEQ ID NO: 3829469 - RNA, 21 nt, Human
ccagauugcaacaggcugggc

SEQ ID NO: 3829470 - RNA, 22 nt, Human
ccagauugcaacaggcugggcu

SEQ ID NO: 3829471 - RNA, 20 nt, Human
ccagauuggcucacacugag

SEQ ID NO: 3829472 - RNA, 22 nt, Human
ccagauuggcucacacugagaa

SEQ ID NO: 3829473 - RNA, 19 nt, Human
ccagauuuacacugggaga

SEQ ID NO: 3829474 - RNA, 21 nt, Human
ccagauuugcuaauuuauccu

SEQ ID NO: 3829475 - RNA, 12 nt, Human
ccagauuugucu

SEQ ID NO: 3829476 - RNA, 15 nt, Human
ccagauuugucuuuu

SEQ ID NO: 3829477 - RNA, 15 nt, Human
ccagauuuugcugua

SEQ ID NO: 3829478 - RNA, 21 nt, Human
ccagcaaagccccaugcugga

SEQ ID NO: 3829479 - RNA, 15 nt, Human
ccagcaaagccccca

SEQ ID NO: 3829480 - RNA, 19 nt, Human
ccagcaaagcccccagagc

SEQ ID NO: 3829481 - RNA, 14 nt, Human
ccagcaacacagcc

SEQ ID NO: 3829482 - RNA, 17 nt, Human
ccagcaacacagccugg

SEQ ID NO: 3829483 - RNA, 20 nt, Human
ccagcaacacagccugggcc

SEQ ID NO: 3829484 - RNA, 15 nt, Human
ccagcaacugaauaa

SEQ ID NO: 3829485 - RNA, 23 nt, Human
ccagcaacuucuucuccaucccu

SEQ ID NO: 3829486 - RNA, 18 nt, Human
ccagcaacuugucuuuuu

SEQ ID NO: 3829487 - RNA, 19 nt, Human
ccagcaagaauaaaaaaga

SEQ ID NO: 3829488 - RNA, 21 nt, Human
ccagcaagaauaaaaaagaaa

SEQ ID NO: 3829489 - RNA, 20 nt, Human
ccagcaagcggggauguccc

SEQ ID NO: 3829490 - RNA, 22 nt, Human
ccagcaagcggggaugucccug

SEQ ID NO: 3829491 - RNA, 21 nt, Human
ccagcaauacagugcucgcca

SEQ ID NO: 3829492 - RNA, 12 nt, Human
ccagcaaugaca

SEQ ID NO: 3829493 - RNA, 18 nt, Human
ccagcaaugauguccaga

SEQ ID NO: 3829494 - RNA, 23 nt, Human
ccagcaauuacaacggagucaaa

SEQ ID NO: 3829495 - RNA, 15 nt, Human
ccagcaauuaugaaa

SEQ ID NO: 3829496 - RNA, 20 nt, Human
ccagcaauucuccugccuca

SEQ ID NO: 3829497 - RNA, 21 nt, Human
ccagcaauucuccugccucag

SEQ ID NO: 3829498 - RNA, 13 nt, Human
ccagcacaaacac

SEQ ID NO: 3829499 - RNA, 13 nt, Human
ccagcacagcuug

SEQ ID NO: 3829500 - RNA, 17 nt, Human
ccagcacagcuugaccu

SEQ ID NO: 3829501 - RNA, 19 nt, Human
ccagcaccaacaccacggu

SEQ ID NO: 3829502 - RNA, 22 nt, Human
ccagcaccauccgccagggccc

SEQ ID NO: 3829503 - RNA, 18 nt, Human
ccagcaccaucucuccuc

SEQ ID NO: 3829504 - RNA, 13 nt, Human
ccagcacccccac

SEQ ID NO: 3829505 - RNA, 15 nt, Human
ccagcacccccacgc

SEQ ID NO: 3829506 - RNA, 16 nt, Human
ccagcacccccacgcc

SEQ ID NO: 3829507 - RNA, 20 nt, Human
ccagcacccccacgcccuca

SEQ ID NO: 3829508 - RNA, 17 nt, Human
ccagcaccugccuccuc

SEQ ID NO: 3829509 - RNA, 15 nt, Human
ccagcaccuggcauc

SEQ ID NO: 3829510 - RNA, 15 nt, Human
ccagcaccuugugcc

SEQ ID NO: 3829511 - RNA, 16 nt, Human
ccagcaccuugugccu

SEQ ID NO: 3829512 - RNA, 18 nt, Human
ccagcaccuugugccugg

SEQ ID NO: 3829513 - RNA, 12 nt, Human
ccagcacuaacg

SEQ ID NO: 3829514 - RNA, 13 nt, Human
ccagcacugagga

SEQ ID NO: 3829515 - RNA, 14 nt, Human
ccagcacugaggaa

SEQ ID NO: 3829516 - RNA, 15 nt, Human
ccagcacugaggaag

SEQ ID NO: 3829517 - RNA, 14 nt, Human
ccagcacugcccaa

SEQ ID NO: 3829518 - RNA, 15 nt, Human
ccagcacugcuugag

SEQ ID NO: 3829519 - RNA, 15 nt, Human
ccagcacugucucag

SEQ ID NO: 3829520 - RNA, 21 nt, Human
ccagcacuuggagaggcugag

SEQ ID NO: 3829521 - RNA, 16 nt, Human
ccagcacuuguccagc

SEQ ID NO: 3829522 - RNA, 21 nt, Human
ccagcacuuugggaggccaag

SEQ ID NO: 3829523 - RNA, 20 nt, Human
ccagcacuuugggaggccga

SEQ ID NO: 3829524 - RNA, 21 nt, Human
ccagcacuuugggaggcugag

SEQ ID NO: 3829525 - RNA, 23 nt, Human
ccagcacuuugggaggcugaggc

SEQ ID NO: 3829526 - RNA, 12 nt, Human
ccagcagaaaug

SEQ ID NO: 3829527 - RNA, 22 nt, Human
ccagcagaaaugccuuacccuc

SEQ ID NO: 3829528 - RNA, 22 nt, Human
ccagcagaagacaaaaagacaa

SEQ ID NO: 3829529 - RNA, 19 nt, Human
ccagcagacagagccagga

SEQ ID NO: 3829530 - RNA, 12 nt, Human
ccagcagacauu

SEQ ID NO: 3829531 - RNA, 13 nt, Human
ccagcagacauug

SEQ ID NO: 3829532 - RNA, 15 nt, Human
ccagcagacauuguc

SEQ ID NO: 3829533 - RNA, 17 nt, Human
ccagcagacauugucag

SEQ ID NO: 3829534 - RNA, 14 nt, Human
ccagcagagcaccu

SEQ ID NO: 3829535 - RNA, 18 nt, Human
ccagcagauuuccagccu

SEQ ID NO: 3829536 - RNA, 14 nt, Human
ccagcagcagcagg

SEQ ID NO: 3829537 - RNA, 15 nt, Human
ccagcagcagcaggu

SEQ ID NO: 3829538 - RNA, 20 nt, Human
ccagcagccagcucucagcc

SEQ ID NO: 3829539 - RNA, 12 nt, Human
ccagcagcccua

SEQ ID NO: 3829540 - RNA, 11 nt, Human
ccagcagccug

SEQ ID NO: 3829541 - RNA, 14 nt, Human
ccagcagccuggac

SEQ ID NO: 3829542 - RNA, 19 nt, Human
ccagcagcgccuuucccaa

SEQ ID NO: 3829543 - RNA, 20 nt, Human
ccagcagcugccaggagcac

SEQ ID NO: 3829544 - RNA, 23 nt, Human
ccagcagcugccaggagcacggc

SEQ ID NO: 3829545 - RNA, 13 nt, Human
ccagcaggaggga

SEQ ID NO: 3829546 - RNA, 16 nt, Human
ccagcaggagggacag

SEQ ID NO: 3829547 - RNA, 14 nt, Human
cuaagaaccccucu

SEQ ID NO: 3829548 - RNA, 14 nt, Human
cuaagaaccuggaa

SEQ ID NO: 3829549 - RNA, 23 nt, Human
cuaagaagaaaauugcugugccu

SEQ ID NO: 3829550 - RNA, 21 nt, Human
cuaagaagcuucuaauaaauu

SEQ ID NO: 3829551 - RNA, 15 nt, Human
cuaagacacaaaugc

SEQ ID NO: 3829552 - RNA, 22 nt, Human
cuaagacuauauauauaaaugu

SEQ ID NO: 3829553 - RNA, 17 nt, Human
cuaagacucaaauguuc

SEQ ID NO: 3829554 - RNA, 19 nt, Human
cuaagacucaaauguucua

SEQ ID NO: 3829555 - RNA, 19 nt, Human
cucaaagguuuggaaggag

SEQ ID NO: 3829556 - RNA, 23 nt, Human
cucaaagguuuggaaggagcaga

SEQ ID NO: 3829557 - RNA, 14 nt, Human
cucaaagucugcaa

SEQ ID NO: 3829558 - RNA, 23 nt, Human
cucaaagugacuauucaguuuuc

SEQ ID NO: 3829559 - RNA, 12 nt, Human
cucaaaguuuug

SEQ ID NO: 3829560 - RNA, 17 nt, Human
cucaaaguuuugaaaag

SEQ ID NO: 3829561 - RNA, 19 nt, Human
cucaaaguuuugaaaagcu

SEQ ID NO: 3829562 - RNA, 23 nt, Human
cucaaaguuuugaaaagcuauua

SEQ ID NO: 3829563 - RNA, 14 nt, Human
cucaaauaaaauaa

SEQ ID NO: 3829564 - RNA, 12 nt, Human
cucaaauaacua

SEQ ID NO: 3829565 - RNA, 14 nt, Human
cucaaauccaggac

SEQ ID NO: 3829566 - RNA, 20 nt, Human
cucaaauccaggacccugcc

SEQ ID NO: 3829567 - RNA, 23 nt, Human
cucaaauccaggacccugccagg

SEQ ID NO: 3829568 - RNA, 13 nt, Human
cucaaaucuguua

SEQ ID NO: 3829569 - RNA, 17 nt, Human
cucaaaugaugggaagu

SEQ ID NO: 3829570 - RNA, 15 nt, Human
cucaaauggggccag

SEQ ID NO: 3829571 - RNA, 16 nt, Human
cucaaauggggccaga

SEQ ID NO: 3829572 - RNA, 19 nt, Human
cucaaauggggccagaucc

SEQ ID NO: 3829573 - RNA, 15 nt, Human
cucaaauguucuaag

SEQ ID NO: 3829574 - RNA, 16 nt, Human
cucaaauguucuaagu

SEQ ID NO: 3829575 - RNA, 17 nt, Human
cucaaauguucuaaguu

SEQ ID NO: 3829576 - RNA, 22 nt, Human
cucaaauguucuaaguuucuaa

SEQ ID NO: 3829577 - RNA, 15 nt, Human
cucaaauuucuaaau

SEQ ID NO: 3829578 - RNA, 12 nt, Human
cucaaauuugga

SEQ ID NO: 3829579 - RNA, 19 nt, Human
cucaacaaagcacaguguu

SEQ ID NO: 3829580 - RNA, 12 nt, Human
cucaacaagaaa

SEQ ID NO: 3829581 - RNA, 19 nt, Human
cucaacaagggagagaccu

SEQ ID NO: 3829582 - RNA, 14 nt, Human
cucaacaauaaaac

SEQ ID NO: 3829583 - RNA, 19 nt, Human
cucaacaccaugauuccuu

SEQ ID NO: 3829584 - RNA, 22 nt, Human
cucaacaccaugauuccuuuaa

SEQ ID NO: 3829585 - RNA, 16 nt, Human
cucaacaggccucagg

SEQ ID NO: 3829586 - RNA, 18 nt, Human
cucaacaggccucagggc

SEQ ID NO: 3829587 - RNA, 18 nt, Human
cucaacaugagucaagag

SEQ ID NO: 3829588 - RNA, 20 nt, Human
cucaacaugagucaagagca

SEQ ID NO: 3829589 - RNA, 22 nt, Human
cucaacaugucuccuacugagg

SEQ ID NO: 3829590 - RNA, 16 nt, Human
cucaacauguuacuga

SEQ ID NO: 3829591 - RNA, 18 nt, Human
cucaaccaccuuucagau

SEQ ID NO: 3829592 - RNA, 21 nt, Human
cucaaccccaccauaugaauu

SEQ ID NO: 3829593 - RNA, 19 nt, Human
cucaacccccauuucuauu

SEQ ID NO: 3829594 - RNA, 21 nt, Human
cucaaccccuccccuccaucc

SEQ ID NO: 3829595 - RNA, 22 nt, Human
cucaacccucccucagccccuc

SEQ ID NO: 3829596 - RNA, 13 nt, Human
cucaacccucuca

SEQ ID NO: 3829597 - RNA, 23 nt, Human
cucaaccuaccaccccuuccugu

SEQ ID NO: 3829598 - RNA, 13 nt, Human
cucaaccuccugg

SEQ ID NO: 3829599 - RNA, 17 nt, Human
cucaaccuccugggcua

SEQ ID NO: 3829600 - RNA, 18 nt, Human
cucaaccucuucuggcuc

SEQ ID NO: 3829601 - RNA, 20 nt, Human
cucaaccucuucuggcucaa

SEQ ID NO: 3829602 - RNA, 21 nt, Human
cuagaauauccuacuucucca

SEQ ID NO: 3829603 - RNA, 20 nt, Human
cuagaaucuggagagcuaga

SEQ ID NO: 3829604 - RNA, 17 nt, Human
cuagaauguuucauuug

SEQ ID NO: 3829605 - RNA, 16 nt, Human
cuagaauucccucucu

SEQ ID NO: 3829606 - RNA, 16 nt, Human
cuagaauucuagugcu

SEQ ID NO: 3829607 - RNA, 18 nt, Human
cuagaauucuagugcugc

SEQ ID NO: 3829608 - RNA, 19 nt, Human
cuagaauucuagugcugcu

SEQ ID NO: 3829609 - RNA, 20 nt, Human
cuagaauucuagugcugcug

SEQ ID NO: 3829610 - RNA, 20 nt, Human
cuagaauucuguauuggaua

SEQ ID NO: 3829611 - RNA, 19 nt, Human
cuagaauugaguguuuaaa

SEQ ID NO: 3829612 - RNA, 22 nt, Human
cuagaauuuauucaauuccucu

SEQ ID NO: 3829613 - RNA, 17 nt, Human
cuagaauuucauuuauu

SEQ ID NO: 3829614 - RNA, 23 nt, Human
cuagacaagauauuguacauaaa

SEQ ID NO: 3829615 - RNA, 16 nt, Human
cuagacaccaaaguuc

SEQ ID NO: 3829616 - RNA, 13 nt, Human
cuagacacugcca

SEQ ID NO: 3829617 - RNA, 13 nt, Human
cuagacauuacca

SEQ ID NO: 3829618 - RNA, 16 nt, Human
cuagacauucugucgc

SEQ ID NO: 3829619 - RNA, 20 nt, Human
cuagaccagcagacagagcc

SEQ ID NO: 3829620 - RNA, 22 nt, Human
cuagaccagcagacagagccag

SEQ ID NO: 3829621 - RNA, 14 nt, Human
cuagacuauaaaug

SEQ ID NO: 3829622 - RNA, 23 nt, Human
cuagacuggugacugauucuuca

SEQ ID NO: 3829623 - RNA, 13 nt, Human
cuagacuggugcu

SEQ ID NO: 3829624 - RNA, 17 nt, Human
cuagacuggugcuaaug

SEQ ID NO: 3829625 - RNA, 16 nt, Human
cuagacuuuaggcuuu

SEQ ID NO: 3829626 - RNA, 16 nt, Human
cuagagaacagguggu

SEQ ID NO: 3829627 - RNA, 17 nt, Human
cuagagaacgcagcccu

SEQ ID NO: 3829628 - RNA, 17 nt, Human
cuagagaagacaggcug

SEQ ID NO: 3829629 - RNA, 14 nt, Human
cuagagaagauaau

SEQ ID NO: 3829630 - RNA, 15 nt, Human
cuagagaagauaauu

SEQ ID NO: 3829631 - RNA, 16 nt, Human
cuagagaagauaauug

SEQ ID NO: 3829632 - RNA, 18 nt, Human
cuagagaagauaauuguu

SEQ ID NO: 3829633 - RNA, 20 nt, Human
cuagagaagauaauuguuga

SEQ ID NO: 3829634 - RNA, 21 nt, Human
cuagagaaguggacuggagga

SEQ ID NO: 3829635 - RNA, 22 nt, Human
cuagagaaguggacuggaggag

SEQ ID NO: 3829636 - RNA, 12 nt, Human
cuagagagggag

SEQ ID NO: 3829637 - RNA, 23 nt, Human
cuagagagggaggcaagcccugu

SEQ ID NO: 3829638 - RNA, 22 nt, Human
cuagagaucugguuuugcuauu

SEQ ID NO: 3829639 - RNA, 18 nt, Human
cuagagcacugccaccag

SEQ ID NO: 3829640 - RNA, 20 nt, Human
cuagagcagacuacagcugg

SEQ ID NO: 3829641 - RNA, 22 nt, Human
cuagagcagcccaaauuuuucu

SEQ ID NO: 3829642 - RNA, 17 nt, Human
cuagagcagcccuggag

SEQ ID NO: 3829643 - RNA, 14 nt, Human
cuagagccagacca

SEQ ID NO: 3829644 - RNA, 15 nt, Human
cuagagcuccucccu

SEQ ID NO: 3829645 - RNA, 19 nt, Human
cuagagcuccucccucuca

SEQ ID NO: 3829646 - RNA, 14 nt, Human
cuagaggcagggag

SEQ ID NO: 3829647 - RNA, 19 nt, Human
cuagaggcagggaggggac

SEQ ID NO: 3829648 - RNA, 22 nt, Human
cuagaggccagccccacccagg

SEQ ID NO: 3829649 - RNA, 12 nt, Human
cuagaggccuga

SEQ ID NO: 3829650 - RNA, 23 nt, Human
cuagaggccugacugccaagcca

SEQ ID NO: 3829651 - RNA, 13 nt, Human
cuagaggccugag

SEQ ID NO: 3829652 - RNA, 16 nt, Human
cuagaggccugaggau

SEQ ID NO: 3829653 - RNA, 19 nt, Human
cuagaggcuuccuucauuu

SEQ ID NO: 3829654 - RNA, 14 nt, Human
cuagagggaccucu

SEQ ID NO: 3829655 - RNA, 19 nt, Human
cuagagggaggggccuagg

SEQ ID NO: 3829656 - RNA, 16 nt, Human
cuagaggguuccugua

SEQ ID NO: 3829657 - RNA, 17 nt, Human
cuagagguucaaagaua

SEQ ID NO: 3829658 - RNA, 16 nt, Human
cuagaguagagguaua

SEQ ID NO: 3829659 - RNA, 20 nt, Human
cuagaguagagguauaauug

SEQ ID NO: 3829660 - RNA, 21 nt, Human
cuagaguagagguauaauugu

SEQ ID NO: 3829661 - RNA, 17 nt, Human
cuagaguagaguggagg

SEQ ID NO: 3829662 - RNA, 20 nt, Human
cuagaguccaagguuuaaag

SEQ ID NO: 3829663 - RNA, 16 nt, Human
cuagagucugaacagc

SEQ ID NO: 3829664 - RNA, 16 nt, Human
cuagagugagggccug

SEQ ID NO: 3829665 - RNA, 19 nt, Human
cuagaguuuagcuggaaaa

SEQ ID NO: 3829666 - RNA, 13 nt, Human
cuagauaaaaaga

SEQ ID NO: 3829667 - RNA, 23 nt, Human
cuagauaaaaagauggccuuugc

SEQ ID NO: 3829668 - RNA, 17 nt, Human
cuagauacaauaaauug

SEQ ID NO: 3829669 - RNA, 23 nt, Human
cuagauacaauaaauugcuaaug

SEQ ID NO: 3829670 - RNA, 22 nt, Human
cuagauaugaauauauggcauu

SEQ ID NO: 3829671 - RNA, 15 nt, Human
cuagaucagaacagg

SEQ ID NO: 3829672 - RNA, 15 nt, Human
cuagaucauaaggcu

SEQ ID NO: 3829673 - RNA, 22 nt, Human
cuagaucauaaggcuucaaaau

SEQ ID NO: 3829674 - RNA, 21 nt, Human
cuagaucauuuguucugggag

SEQ ID NO: 3829675 - RNA, 17 nt, Human
cuagauccacacacaga

SEQ ID NO: 3829676 - RNA, 16 nt, Human
cuagauccuaaggguc

SEQ ID NO: 3829677 - RNA, 20 nt, Human
cuagaugauuuuuugaaagu

SEQ ID NO: 3829678 - RNA, 14 nt, Human
cuagauggcuccuc

SEQ ID NO: 3829679 - RNA, 15 nt, Human
cuagauggcuccucu

SEQ ID NO: 3829680 - RNA, 18 nt, Human
cuagauggcuccucucag

SEQ ID NO: 3829681 - RNA, 15 nt, Human
cuagauggugcugag

SEQ ID NO: 3829682 - RNA, 20 nt, Human
cuagauguaguauuuuuugu

SEQ ID NO: 3829683 - RNA, 13 nt, Human
cuagaugucuuua

SEQ ID NO: 3829684 - RNA, 18 nt, Human
cuagauuauaucaaagua

SEQ ID NO: 3829685 - RNA, 21 nt, Human
cuagauuauaucaaaguauuu

SEQ ID NO: 3829686 - RNA, 12 nt, Human
cuagauucaaag

SEQ ID NO: 3829687 - RNA, 15 nt, Human
cuagauucaaagguu

SEQ ID NO: 3829688 - RNA, 23 nt, Human
cuagauuccauugguccaagauu

SEQ ID NO: 3829689 - RNA, 20 nt, Human
cuagauucuacauauucuuu

SEQ ID NO: 3829690 - RNA, 22 nt, Human
cuagauuggaguggggaagugu

SEQ ID NO: 3829691 - RNA, 12 nt, Human
cuagauuuuguu

SEQ ID NO: 3829692 - RNA, 18 nt, Human
cuagauuuuguuuugcuu

SEQ ID NO: 3829693 - RNA, 21 nt, Human
cuagauuuuguuuugcuuuuu

SEQ ID NO: 3829694 - RNA, 14 nt, Human
cuagcaagcuggcc

SEQ ID NO: 3829695 - RNA, 15 nt, Human
cuagcaagugagaga

SEQ ID NO: 3829696 - RNA, 18 nt, Human
cuagcaagugagagagau

SEQ ID NO: 3829697 - RNA, 22 nt, Human
cuagcaaucacaacacuggcug

SEQ ID NO: 3829698 - RNA, 14 nt, Human
cuagcacagauggc

SEQ ID NO: 3829699 - RNA, 14 nt, Human
cuaggccagagccc

SEQ ID NO: 3829700 - RNA, 15 nt, Human
cuaggccagagccca

SEQ ID NO: 3829701 - RNA, 11 nt, Human
cuaggccaggu

SEQ ID NO: 3829702 - RNA, 22 nt, Human
cuaggccaggugcaaccaggga

SEQ ID NO: 3829703 - RNA, 13 nt, Human
cuaggcccccacu

SEQ ID NO: 3829704 - RNA, 15 nt, Human
cuaggcccccacuug

SEQ ID NO: 3829705 - RNA, 16 nt, Human
cuaggcccccacuugc

SEQ ID NO: 3829706 - RNA, 16 nt, Human
cuaggccucaacuccu

SEQ ID NO: 3829707 - RNA, 21 nt, Human
cuaggccucaacuccucccau

SEQ ID NO: 3829708 - RNA, 15 nt, Human
cuaggccucuccagu

SEQ ID NO: 3829709 - RNA, 19 nt, Human
cuaggccuggcauggcacc

SEQ ID NO: 3829710 - RNA, 15 nt, Human
cuaggccuggccaga

SEQ ID NO: 3829711 - RNA, 14 nt, Human
cuaggccuggggac

SEQ ID NO: 3829712 - RNA, 21 nt, Human
cuaggccuugcggcuccucag

SEQ ID NO: 3829713 - RNA, 15 nt, Human
cuaggcgagugccag

SEQ ID NO: 3829714 - RNA, 17 nt, Human
cuaggcgagugccagga

SEQ ID NO: 3829715 - RNA, 20 nt, Human
cuaggcgagugccaggacuc

SEQ ID NO: 3829716 - RNA, 18 nt, Human
cuaggcuacaauuuucuc

SEQ ID NO: 3829717 - RNA, 15 nt, Human
cuaggcucagagaug

SEQ ID NO: 3829718 - RNA, 13 nt, Human
cuaggcuccaccc

SEQ ID NO: 3829719 - RNA, 12 nt, Human
cuaggcuccuuc

SEQ ID NO: 3829720 - RNA, 21 nt, Human
cuaggcucgccuucccuccug

SEQ ID NO: 3829721 - RNA, 14 nt, Human
cuaggcucugccuu

SEQ ID NO: 3829722 - RNA, 15 nt, Human
cuaggcucugccuuc

SEQ ID NO: 3829723 - RNA, 15 nt, Human
cuaggcucugucugg

SEQ ID NO: 3829724 - RNA, 15 nt, Human
cuaggcuggaaggag

SEQ ID NO: 3829725 - RNA, 16 nt, Human
cuaggcuggaaggagg

SEQ ID NO: 3829726 - RNA, 15 nt, Human
cuaggcuggagccca

SEQ ID NO: 3829727 - RNA, 12 nt, Human
cuaggcugggug

SEQ ID NO: 3829728 - RNA, 19 nt, Human
cuagggaaaaaccagcgug

SEQ ID NO: 3829729 - RNA, 21 nt, Human
cuagggaaaaaccagcgugug

SEQ ID NO: 3829730 - RNA, 14 nt, Human
cuagggaaggccac

SEQ ID NO: 3829731 - RNA, 17 nt, Human
cuagggaaggccaccug

SEQ ID NO: 3829732 - RNA, 19 nt, Human
cuagggaaggccaccugca

SEQ ID NO: 3829733 - RNA, 20 nt, Human
cuagggaaggccaccugcag

SEQ ID NO: 3829734 - RNA, 16 nt, Human
cuagggaccccuccuc

SEQ ID NO: 3829735 - RNA, 20 nt, Human
cuagggaccccuccucccuu

SEQ ID NO: 3829736 - RNA, 14 nt, Human
cuagggagagaccc

SEQ ID NO: 3829737 - RNA, 17 nt, Human
cuagggagccauuugag

SEQ ID NO: 3829738 - RNA, 21 nt, Human
cuagggaggaccuuaucugug

SEQ ID NO: 3829739 - RNA, 23 nt, Human
cuagggaggcauggucugcccuc

SEQ ID NO: 3829740 - RNA, 21 nt, Human
cuagggagggggaaagaagga

SEQ ID NO: 3829741 - RNA, 16 nt, Human
cuagggaguggucuuu

SEQ ID NO: 3829742 - RNA, 23 nt, Human
cuagggaucccucaucugucccu

SEQ ID NO: 3829743 - RNA, 17 nt, Human
cuagggauucaggcugc

SEQ ID NO: 3829744 - RNA, 18 nt, Human
cuagggauucaggcugcu

SEQ ID NO: 3829745 - RNA, 20 nt, Human
cuagggauucaggcugcuug

SEQ ID NO: 3829746 - RNA, 15 nt, Human
cuagggcugggaaac

SEQ ID NO: 3829747 - RNA, 16 nt, Human
cuagggcugggaaaca

SEQ ID NO: 3829748 - RNA, 18 nt, Human
cuaggggaaugagggggc

SEQ ID NO: 3829749 - RNA, 12 nt, Human
cuaggggagcag

SEQ ID NO: 3829750 - RNA, 23 nt, Human
cuagggggagccccuucugcuca

SEQ ID NO: 3829751 - RNA, 17 nt, Human
cuaggguacauggugcu

SEQ ID NO: 3829752 - RNA, 14 nt, Human
cuaggguccugggg

SEQ ID NO: 3829753 - RNA, 13 nt, Human
cuaggguggcccu

SEQ ID NO: 3829754 - RNA, 15 nt, Human
cuaggguggggagag

SEQ ID NO: 3829755 - RNA, 22 nt, Human
cuagguaaauuacaguuccuag

SEQ ID NO: 3829756 - RNA, 15 nt, Human
cuagguaauuuuuac

SEQ ID NO: 3829757 - RNA, 20 nt, Human
cuagguaauuuuuacagaau

SEQ ID NO: 3829758 - RNA, 14 nt, Human
cuagguacuucagg

SEQ ID NO: 3829759 - RNA, 16 nt, Human
cuagguagagucugag

SEQ ID NO: 3829760 - RNA, 19 nt, Human
cuaggucaaggccuguccc

SEQ ID NO: 3829761 - RNA, 20 nt, Human
cuaggucaaggccugucccu

SEQ ID NO: 3829762 - RNA, 19 nt, Human
cuaggucaguacccaccug

SEQ ID NO: 3829763 - RNA, 20 nt, Human
cuaggucaguacccaccuga

SEQ ID NO: 3829764 - RNA, 14 nt, Human
cuaggucauaaaga

SEQ ID NO: 3829765 - RNA, 23 nt, Human
cuaggucucggacuaagccuacc

SEQ ID NO: 3829766 - RNA, 22 nt, Human
cucacccagugcccucuccccu

SEQ ID NO: 3829767 - RNA, 12 nt, Human
cucaccccagcc

SEQ ID NO: 3829768 - RNA, 14 nt, Human
cucaccccagcccc

SEQ ID NO: 3829769 - RNA, 15 nt, Human
cucaccccagcccca

SEQ ID NO: 3829770 - RNA, 17 nt, Human
cucacccccaaggggca

SEQ ID NO: 3829771 - RNA, 21 nt, Human
cucacccccaaggggcagucu

SEQ ID NO: 3829772 - RNA, 16 nt, Human
cucaccccccacacuc

SEQ ID NO: 3829773 - RNA, 14 nt, Human
cucacccccuccca

SEQ ID NO: 3829774 - RNA, 21 nt, Human
cucacccccucccacccccag

SEQ ID NO: 3829775 - RNA, 23 nt, Human
cucacccccucccacccccagcc

SEQ ID NO: 3829776 - RNA, 15 nt, Human
cucacccccuucucc

SEQ ID NO: 3829777 - RNA, 20 nt, Human
cucaccccgaggcccugcau

SEQ ID NO: 3829778 - RNA, 21 nt, Human
cucaccccgaggcccugcaug

SEQ ID NO: 3829779 - RNA, 22 nt, Human
cucaccccgaggcccugcaugg

SEQ ID NO: 3829780 - RNA, 17 nt, Human
cucaccccugguucuca

SEQ ID NO: 3829781 - RNA, 19 nt, Human
cucaccccugguucucauc

SEQ ID NO: 3829782 - RNA, 21 nt, Human
cucaccccuguccucacugcu

SEQ ID NO: 3829783 - RNA, 14 nt, Human
cucacccugagccc

SEQ ID NO: 3829784 - RNA, 14 nt, Human
cucacccugccuua

SEQ ID NO: 3829785 - RNA, 15 nt, Human
cucacccugcuacac

SEQ ID NO: 3829786 - RNA, 15 nt, Human
cucacccuggaggca

SEQ ID NO: 3829787 - RNA, 21 nt, Human
cucaccgcagucgucgcacag

SEQ ID NO: 3829788 - RNA, 16 nt, Human
cucaccgcccaucagg

SEQ ID NO: 3829789 - RNA, 13 nt, Human
cucaccggcucuc

SEQ ID NO: 3829790 - RNA, 21 nt, Human
cucaccggcucucaccuggcc

SEQ ID NO: 3829791 - RNA, 21 nt, Human
cucaccguggcuaagaguguc

SEQ ID NO: 3829792 - RNA, 23 nt, Human
cucaccuaauguuuaugagccag

SEQ ID NO: 3829793 - RNA, 12 nt, Human
cucaccuagagc

SEQ ID NO: 3829794 - RNA, 13 nt, Human
cucaccuagagcc

SEQ ID NO: 3829795 - RNA, 13 nt, Human
cucaccuccugcu

SEQ ID NO: 3829796 - RNA, 14 nt, Human
cucaccuccugcug

SEQ ID NO: 3829797 - RNA, 13 nt, Human
cucaccucuaccc

SEQ ID NO: 3829798 - RNA, 18 nt, Human
cucaccucuacccaaacc

SEQ ID NO: 3829799 - RNA, 13 nt, Human
cucaccucucccu

SEQ ID NO: 3829800 - RNA, 12 nt, Human
cucaccucugcc

SEQ ID NO: 3829801 - RNA, 19 nt, Human
cucaccucugccucaaugu

SEQ ID NO: 3829802 - RNA, 14 nt, Human
cucaccucuggacu

SEQ ID NO: 3829803 - RNA, 15 nt, Human
cucaccucuggacug

SEQ ID NO: 3829804 - RNA, 22 nt, Human
cucaccucuggacuggcuagag

SEQ ID NO: 3829805 - RNA, 17 nt, Human
cucaccugcacuaacag

SEQ ID NO: 3829806 - RNA, 13 nt, Human
cucaccugccccu

SEQ ID NO: 3829807 - RNA, 12 nt, Human
cucaccuggacu

SEQ ID NO: 3829808 - RNA, 17 nt, Human
cucaccuggggcugcug

SEQ ID NO: 3829809 - RNA, 20 nt, Human
cucaccuguugcuuacaauu

SEQ ID NO: 3829810 - RNA, 21 nt, Human
cucaccuguugcuuacaauuu

SEQ ID NO: 3829811 - RNA, 22 nt, Human
cucaccuguugcuuacaauuuu

SEQ ID NO: 3829812 - RNA, 21 nt, Human
cucaccuucugaguacagagu

SEQ ID NO: 3829813 - RNA, 22 nt, Human
cucaccuugaacaccacgcuug

SEQ ID NO: 3829814 - RNA, 22 nt, Human
cucaccuugcaacacacagaca

SEQ ID NO: 3829815 - RNA, 16 nt, Human
cucaccuuggcaccag

SEQ ID NO: 3829816 - RNA, 17 nt, Human
cucaccuuucccaucuu

SEQ ID NO: 3829817 - RNA, 14 nt, Human
cucaccuuuguuuu

SEQ ID NO: 3829818 - RNA, 22 nt, Human
cucaccuuuguuuuuuguugga

SEQ ID NO: 3829819 - RNA, 19 nt, Human
cucacgccuguaaucccag

SEQ ID NO: 3829820 - RNA, 20 nt, Human
cucacgcucccaacacaagg

SEQ ID NO: 3829821 - RNA, 14 nt, Human
cucacgcugggucc

SEQ ID NO: 3829822 - RNA, 13 nt, Human
cucacgcuucaca

SEQ ID NO: 3829823 - RNA, 15 nt, Human
cucacgcuucacagu

SEQ ID NO: 3829824 - RNA, 19 nt, Human
cucacgggcaguagcugug

SEQ ID NO: 3829825 - RNA, 13 nt, Human
cucacuaauuuuu

SEQ ID NO: 3829826 - RNA, 12 nt, Human
cucacuaccucc

SEQ ID NO: 3829827 - RNA, 20 nt, Human
cucacuaccuccucagggau

SEQ ID NO: 3829828 - RNA, 15 nt, Human
cucacuaggccccca

SEQ ID NO: 3829829 - RNA, 22 nt, Human
cucacuaggcccccacuugccu

SEQ ID NO: 3829830 - RNA, 21 nt, Human
cucacuaucccggcugcccuu

SEQ ID NO: 3829831 - RNA, 17 nt, Human
cucacuauccuacccca

SEQ ID NO: 3829832 - RNA, 17 nt, Human
cucacuauggugccaau

SEQ ID NO: 3829833 - RNA, 23 nt, Human
cucacuauggugccaauggaacc

SEQ ID NO: 3829834 - RNA, 16 nt, Human
cucacuauguugccca

SEQ ID NO: 3829835 - RNA, 17 nt, Human
cucacuauguugcccag

SEQ ID NO: 3829836 - RNA, 22 nt, Human
cucacuauguugcccaggcagg

SEQ ID NO: 3829837 - RNA, 23 nt, Human
cucacuauguugcccaggcaggu

SEQ ID NO: 3829838 - RNA, 21 nt, Human
cucacucaaguucaaggacca

SEQ ID NO: 3829839 - RNA, 14 nt, Human
cucacucaccuuca

SEQ ID NO: 3829840 - RNA, 14 nt, Human
cucacucagcacuu

SEQ ID NO: 3829841 - RNA, 16 nt, Human
cucacuccaccaccca

SEQ ID NO: 3829842 - RNA, 20 nt, Human
cucacuccaccacccaaaag

SEQ ID NO: 3829843 - RNA, 18 nt, Human
cucacuccccacauccca

SEQ ID NO: 3829844 - RNA, 16 nt, Human
cucauuggaaauuuag

SEQ ID NO: 3829845 - RNA, 13 nt, Human
cucauuggacccu

SEQ ID NO: 3829846 - RNA, 15 nt, Human
cucauuguaaacaaa

SEQ ID NO: 3829847 - RNA, 22 nt, Human
cucauuuaagggaaaaauauau

SEQ ID NO: 3829848 - RNA, 13 nt, Human
cucauuuaauccu

SEQ ID NO: 3829849 - RNA, 11 nt, Human
cucauuuacug

SEQ ID NO: 3829850 - RNA, 17 nt, Human
cucauuucaccccuccc

SEQ ID NO: 3829851 - RNA, 19 nt, Human
cucauuucaccccucccuu

SEQ ID NO: 3829852 - RNA, 22 nt, Human
cucauuucaccccucccuuucu

SEQ ID NO: 3829853 - RNA, 12 nt, Human
cucauuucagga

SEQ ID NO: 3829854 - RNA, 16 nt, Human
cucauuucaggagcag

SEQ ID NO: 3829855 - RNA, 21 nt, Human
cucauuucaggagcagccuca

SEQ ID NO: 3829856 - RNA, 13 nt, Human
cucauuuccaagc

SEQ ID NO: 3829857 - RNA, 21 nt, Human
cucauuuccaagcaaguauua

SEQ ID NO: 3829858 - RNA, 17 nt, Human
cucauuugggguagcua

SEQ ID NO: 3829859 - RNA, 22 nt, Human
cucauuugguuugauuuucccu

SEQ ID NO: 3829860 - RNA, 21 nt, Human
cucauuugucacacacuuugg

SEQ ID NO: 3829861 - RNA, 15 nt, Human
cucauuuguuuuucu

SEQ ID NO: 3829862 - RNA, 13 nt, Human
cucauuuuaaugu

SEQ ID NO: 3829863 - RNA, 21 nt, Human
cucauuuuaauguaaagauuu

SEQ ID NO: 3829864 - RNA, 23 nt, Human
cucauuuuuauaaugucccuuca

SEQ ID NO: 3829865 - RNA, 23 nt, Human
cucauuuuugccauacaucaguu

SEQ ID NO: 3829866 - RNA, 13 nt, Human
cucauuuuuuaaa

SEQ ID NO: 3829867 - RNA, 18 nt, Human
cucauuuuuuuaauuuau

SEQ ID NO: 3829868 - RNA, 21 nt, Human
cuccaaaaaaaaaaaaaauac

SEQ ID NO: 3829869 - RNA, 16 nt, Human
cuccaaaaaucugccu

SEQ ID NO: 3829870 - RNA, 15 nt, Human
cuccaaaagcacuua

SEQ ID NO: 3829871 - RNA, 16 nt, Human
cuccaaaagcacuuac

SEQ ID NO: 3829872 - RNA, 16 nt, Human
cuccaaaaugugccua

SEQ ID NO: 3829873 - RNA, 13 nt, Human
cuccaaaccacuu

SEQ ID NO: 3829874 - RNA, 22 nt, Human
cuccaaaccacuuuuugcagcu

SEQ ID NO: 3829875 - RNA, 15 nt, Human
cuccaaacccucgag

SEQ ID NO: 3829876 - RNA, 17 nt, Human
cuccaaacccucgaggc

SEQ ID NO: 3829877 - RNA, 21 nt, Human
cuccaaacccucgaggcggau

SEQ ID NO: 3829878 - RNA, 22 nt, Human
cuccaaaccuccuguuagcugu

SEQ ID NO: 3829879 - RNA, 15 nt, Human
cuccaaaccuucaca

SEQ ID NO: 3829880 - RNA, 21 nt, Human
cuccaaaccuucacacacaga

SEQ ID NO: 3829881 - RNA, 18 nt, Human
cuccaaacugaagcagcc

SEQ ID NO: 3829882 - RNA, 22 nt, Human
cuccaaacugaagcagccucuc

SEQ ID NO: 3829883 - RNA, 11 nt, Human
cuccaaagcuu

SEQ ID NO: 3829884 - RNA, 17 nt, Human
cuccaaagucauaauug

SEQ ID NO: 3829885 - RNA, 23 nt, Human
cuccaaagucauaauugcauuga

SEQ ID NO: 3829886 - RNA, 23 nt, Human
cuccaaaucucaaugaagccagc

SEQ ID NO: 3829887 - RNA, 22 nt, Human
cuccaaauggagaagcugcagg

SEQ ID NO: 3829888 - RNA, 20 nt, Human
cuccaacacaaggcuccaag

SEQ ID NO: 3829889 - RNA, 21 nt, Human
cuccaacacaaggcuccaaga

SEQ ID NO: 3829890 - RNA, 16 nt, Human
cuccaacaccaagcac

SEQ ID NO: 3829891 - RNA, 23 nt, Human
cuccaacaccaagcacagcagcc

SEQ ID NO: 3829892 - RNA, 21 nt, Human
cuccaacaccaccucuccaga

SEQ ID NO: 3829893 - RNA, 15 nt, Human
cuccaaccccccagc

SEQ ID NO: 3829894 - RNA, 15 nt, Human
cuccaaccccucgcc

SEQ ID NO: 3829895 - RNA, 18 nt, Human
cuccaacccuagcaaaag

SEQ ID NO: 3829896 - RNA, 12 nt, Human
cuccaacccugc

SEQ ID NO: 3829897 - RNA, 22 nt, Human
cuccaacccugccgucaccacc

SEQ ID NO: 3829898 - RNA, 19 nt, Human
cuccaaccuaaccuguguc

SEQ ID NO: 3829899 - RNA, 16 nt, Human
cuccaacucagaaggg

SEQ ID NO: 3829900 - RNA, 12 nt, Human
cuccaacuccaa

SEQ ID NO: 3829901 - RNA, 15 nt, Human
cuccaagaaugcuga

SEQ ID NO: 3829902 - RNA, 16 nt, Human
cuccaagaaugcugaa

SEQ ID NO: 3829903 - RNA, 14 nt, Human
cuccaagaauuucu

SEQ ID NO: 3829904 - RNA, 16 nt, Human
cuccaagaccuucucc

SEQ ID NO: 3829905 - RNA, 18 nt, Human
cuccaagaccuucuccuu

SEQ ID NO: 3829906 - RNA, 20 nt, Human
cuccaagagcuacauaauuu

SEQ ID NO: 3829907 - RNA, 13 nt, Human
cuccaagauucua

SEQ ID NO: 3829908 - RNA, 15 nt, Human
cuccaagauucuaga

SEQ ID NO: 3829909 - RNA, 17 nt, Human
cuccaagauucuagaug

SEQ ID NO: 3829910 - RNA, 13 nt, Human
cuccaagcagcuu

SEQ ID NO: 3829911 - RNA, 13 nt, Human
cuccaagcaggac

SEQ ID NO: 3829912 - RNA, 13 nt, Human
cuccaagccagcg

SEQ ID NO: 3829913 - RNA, 23 nt, Human
cuccaagcccaguucagcuuggg

SEQ ID NO: 3829914 - RNA, 19 nt, Human
cuccaagcuccaucuccac

SEQ ID NO: 3829915 - RNA, 13 nt, Human
cuccaagcuccca

SEQ ID NO: 3829916 - RNA, 15 nt, Human
cuccaagcucccagg

SEQ ID NO: 3829917 - RNA, 12 nt, Human
cuccaaggacca

SEQ ID NO: 3829918 - RNA, 15 nt, Human
cuccaaggaccaggu

SEQ ID NO: 3829919 - RNA, 19 nt, Human
cuccaaggaggggcuguaa

SEQ ID NO: 3829920 - RNA, 20 nt, Human
cuccaaggaggggcuguaaa

SEQ ID NO: 3829921 - RNA, 19 nt, Human
cuccaagggcuucugcacc

SEQ ID NO: 3829922 - RNA, 20 nt, Human
cuccaagggcuucugcaccc

SEQ ID NO: 3829923 - RNA, 22 nt, Human
cuccaaguccacaguggaacca

SEQ ID NO: 3829924 - RNA, 23 nt, Human
cuccaaguccacaguggaaccag

SEQ ID NO: 3829925 - RNA, 14 nt, Human
cuccaagugccaga

SEQ ID NO: 3829926 - RNA, 16 nt, Human
cuccaagugccagagg

SEQ ID NO: 3829927 - RNA, 15 nt, Human
cuccaauccugcccc

SEQ ID NO: 3829928 - RNA, 19 nt, Human
cuccaaugucugcugagga

SEQ ID NO: 3829929 - RNA, 22 nt, Human
cuccaauuaaggauuuuaugcu

SEQ ID NO: 3829930 - RNA, 19 nt, Human
cuccaauuuuuuuuuccuu

SEQ ID NO: 3829931 - RNA, 15 nt, Human
cuccacacaagggaa

SEQ ID NO: 3829932 - RNA, 21 nt, Human
cuccacacaagggaaggacag

SEQ ID NO: 3829933 - RNA, 21 nt, Human
cuccacacacacaaaaaaaga

SEQ ID NO: 3829934 - RNA, 13 nt, Human
cuccacacccgcg

SEQ ID NO: 3829935 - RNA, 19 nt, Human
cuccacacccgcgccccgc

SEQ ID NO: 3829936 - RNA, 20 nt, Human
cuccacacccucucccagga

SEQ ID NO: 3829937 - RNA, 12 nt, Human
cuccacaccugc

SEQ ID NO: 3829938 - RNA, 14 nt, Human
cuccacacugcaca

SEQ ID NO: 3829939 - RNA, 15 nt, Human
cuccacacugcacaa

SEQ ID NO: 3829940 - RNA, 16 nt, Human
cuccacagcaacccca

SEQ ID NO: 3829941 - RNA, 23 nt, Human
cuccacagccaucccagccuugg

SEQ ID NO: 3829942 - RNA, 13 nt, Human
cuccacagcgagg

SEQ ID NO: 3829943 - RNA, 16 nt, Human
cuccacagcgagggca

SEQ ID NO: 3829944 - RNA, 21 nt, Human
cuccacagcgagggcagcugc

SEQ ID NO: 3829945 - RNA, 12 nt, Human
cuccacagggcc

SEQ ID NO: 3829946 - RNA, 17 nt, Human
cuccacauccuccacgu

SEQ ID NO: 3829947 - RNA, 22 nt, Human
cuccacauccuuucuaaacaag

SEQ ID NO: 3829948 - RNA, 14 nt, Human
cuccacaucugccu

SEQ ID NO: 3829949 - RNA, 23 nt, Human
cuccaccaagccuggucagccca

SEQ ID NO: 3829950 - RNA, 13 nt, Human
cuccaccaccgcc

SEQ ID NO: 3829951 - RNA, 14 nt, Human
cuccaccaccgccc

SEQ ID NO: 3829952 - RNA, 19 nt, Human
cuccaccaccgcccgucug

SEQ ID NO: 3829953 - RNA, 13 nt, Human
cuccaccaggaac

SEQ ID NO: 3829954 - RNA, 14 nt, Human
cuccaccccacuca

SEQ ID NO: 3829955 - RNA, 18 nt, Human
cuccaccccacucacaga

SEQ ID NO: 3829956 - RNA, 13 nt, Human
cuccaccccagga

SEQ ID NO: 3829957 - RNA, 17 nt, Human
cuccacccccagcugcu

SEQ ID NO: 3829958 - RNA, 18 nt, Human
cuccacccccagcugcuu

SEQ ID NO: 3829959 - RNA, 14 nt, Human
cuccacccucugag

SEQ ID NO: 3829960 - RNA, 15 nt, Human
cuccacccuggccga

SEQ ID NO: 3829961 - RNA, 23 nt, Human
cuccacccugucccccagcucug

SEQ ID NO: 3829962 - RNA, 21 nt, Human
cuccacccuuggccugucuca

SEQ ID NO: 3829963 - RNA, 16 nt, Human
cuccaccgccauggcu

SEQ ID NO: 3829964 - RNA, 20 nt, Human
cuccaccgccauggcuucca

SEQ ID NO: 3829965 - RNA, 14 nt, Human
cuccaccgcugccu

SEQ ID NO: 3829966 - RNA, 12 nt, Human
cuccaccuacca

SEQ ID NO: 3829967 - RNA, 16 nt, Human
cuccaccucagccuug

SEQ ID NO: 3829968 - RNA, 18 nt, Human
cuccaccucagccuugga

SEQ ID NO: 3829969 - RNA, 23 nt, Human
cuccaccucccugcaauaaaaug

SEQ ID NO: 3829970 - RNA, 13 nt, Human
cuccaccugccag

SEQ ID NO: 3829971 - RNA, 14 nt, Human
cuccaccugccagg

SEQ ID NO: 3829972 - RNA, 15 nt, Human
cuccaccugccaggg

SEQ ID NO: 3829973 - RNA, 18 nt, Human
cuccaccugcucccaggc

SEQ ID NO: 3829974 - RNA, 12 nt, Human
cuccaccuuccc

SEQ ID NO: 3829975 - RNA, 23 nt, Human
cuccacgauccugccacccugua

SEQ ID NO: 3829976 - RNA, 16 nt, Human
cuccacguucaccccu

SEQ ID NO: 3829977 - RNA, 21 nt, Human
ccauagaugggucuggcugag

SEQ ID NO: 3829978 - RNA, 18 nt, Human
ccauagcaagauugcuua

SEQ ID NO: 3829979 - RNA, 18 nt, Human
ccauaggcccacacacag

SEQ ID NO: 3829980 - RNA, 15 nt, Human
ccauagguagaaugu

SEQ ID NO: 3829981 - RNA, 14 nt, Human
ccauaguaguauga

SEQ ID NO: 3829982 - RNA, 17 nt, Human
ccauaguauauuaaaaa

SEQ ID NO: 3829983 - RNA, 16 nt, Human
ccauagucaaagagag

SEQ ID NO: 3829984 - RNA, 18 nt, Human
ccauagucuuaacugguc

SEQ ID NO: 3829985 - RNA, 14 nt, Human
ccauagugacuuuu

SEQ ID NO: 3829986 - RNA, 19 nt, Human
ccauaguuaaagaagacau

SEQ ID NO: 3829987 - RNA, 16 nt, Human
ccauauaaguuugaag

SEQ ID NO: 3829988 - RNA, 14 nt, Human
ccauauacuuuaaa

SEQ ID NO: 3829989 - RNA, 21 nt, Human
ccauauauaacagauacauuu

SEQ ID NO: 3829990 - RNA, 15 nt, Human
ccauauauccuuuuc

SEQ ID NO: 3829991 - RNA, 21 nt, Human
ccauaucaaaagacacagggg

SEQ ID NO: 3829992 - RNA, 21 nt, Human
ccauaucacacacauugcugu

SEQ ID NO: 3829993 - RNA, 18 nt, Human
ccauauccccucuccccc

SEQ ID NO: 3829994 - RNA, 12 nt, Human
ccauauccuggu

SEQ ID NO: 3829995 - RNA, 14 nt, Human
ccauaucuugcgaa

SEQ ID NO: 3829996 - RNA, 21 nt, Human
ccauaucuugcgaauccaagc

SEQ ID NO: 3829997 - RNA, 15 nt, Human
ccauaugaauaacau

SEQ ID NO: 3829998 - RNA, 14 nt, Human
ccauaugaauugua

SEQ ID NO: 3829999 - RNA, 15 nt, Human
ccauaugaucuguuu

SEQ ID NO: 3830000 - RNA, 13 nt, Human
ccauauggauauu

SEQ ID NO: 3830001 - RNA, 22 nt, Human
ccauauggauuuucuauuguua

SEQ ID NO: 3830002 - RNA, 20 nt, Human
ccauauuaaauuuuuuguug

SEQ ID NO: 3830003 - RNA, 22 nt, Human
ccauauuaaauuuuuuguugac

SEQ ID NO: 3830004 - RNA, 19 nt, Human
ccauauuaccacagacaua

SEQ ID NO: 3830005 - RNA, 20 nt, Human
ccauauuagaaaacuuuguu

SEQ ID NO: 3830006 - RNA, 18 nt, Human
ccauauucuguuggccag

SEQ ID NO: 3830007 - RNA, 19 nt, Human
ccauauucuguuggccagu

SEQ ID NO: 3830008 - RNA, 23 nt, Human
ccauauucuguuggccaguguga

SEQ ID NO: 3830009 - RNA, 22 nt, Human
ccauauuggcauggauuucugu

SEQ ID NO: 3830010 - RNA, 14 nt, Human
ccauauuguaaaac

SEQ ID NO: 3830011 - RNA, 18 nt, Human
ccauauuguaaaacaggu

SEQ ID NO: 3830012 - RNA, 21 nt, Human
ccauauugugcuucacaguag

SEQ ID NO: 3830013 - RNA, 15 nt, Human
ccauauuuaccucag

SEQ ID NO: 3830014 - RNA, 17 nt, Human
ccauauuuaccucagcc

SEQ ID NO: 3830015 - RNA, 21 nt, Human
ccauauuuaccucagccuggg

SEQ ID NO: 3830016 - RNA, 18 nt, Human
ccauauuuacuaccuuau

SEQ ID NO: 3830017 - RNA, 14 nt, Human
ccauauuuggaaga

SEQ ID NO: 3830018 - RNA, 13 nt, Human
ccauauuuguaaa

SEQ ID NO: 3830019 - RNA, 14 nt, Human
ccauauuuguaaaa

SEQ ID NO: 3830020 - RNA, 19 nt, Human
ccauauuuguaaaaugaca

SEQ ID NO: 3830021 - RNA, 16 nt, Human
ccaucaagccaccaac

SEQ ID NO: 3830022 - RNA, 16 nt, Human
ccaucaaguugugcca

SEQ ID NO: 3830023 - RNA, 16 nt, Human
ccaucacaauacagau

SEQ ID NO: 3830024 - RNA, 17 nt, Human
ccaucacaauacagaua

SEQ ID NO: 3830025 - RNA, 15 nt, Human
ccaucacagcuuguu

SEQ ID NO: 3830026 - RNA, 13 nt, Human
ccaucacaggguu

SEQ ID NO: 3830027 - RNA, 13 nt, Human
ccaucaccagaca

SEQ ID NO: 3830028 - RNA, 13 nt, Human
ccaucacccucuu

SEQ ID NO: 3830029 - RNA, 18 nt, Human
ccaucacccucuuccugu

SEQ ID NO: 3830030 - RNA, 16 nt, Human
ccaucaccucagaugg

SEQ ID NO: 3830031 - RNA, 19 nt, Human
ccaucaccuuagaccacca

SEQ ID NO: 3830032 - RNA, 19 nt, Human
ccaucacgcggccgagaca

SEQ ID NO: 3830033 - RNA, 18 nt, Human
ccaucacugcgccacugc

SEQ ID NO: 3830034 - RNA, 18 nt, Human
ccaucagaaacacccuca

SEQ ID NO: 3830035 - RNA, 20 nt, Human
ccaucagaaacacccucaca

SEQ ID NO: 3830036 - RNA, 22 nt, Human
ccaucagaaacacccucacacu

SEQ ID NO: 3830037 - RNA, 12 nt, Human
ccaucagaggcc

SEQ ID NO: 3830038 - RNA, 12 nt, Human
ccaucagcccaa

SEQ ID NO: 3830039 - RNA, 19 nt, Human
ccaucaggguucucuuagc

SEQ ID NO: 3830040 - RNA, 20 nt, Human
ccaucaggguucucuuagca

SEQ ID NO: 3830041 - RNA, 17 nt, Human
ccaucagguuccauccc

SEQ ID NO: 3830042 - RNA, 12 nt, Human
ccaucagugcuc

SEQ ID NO: 3830043 - RNA, 17 nt, Human
ccaucagugcucccuca

SEQ ID NO: 3830044 - RNA, 14 nt, Human
ccaucaucccagcu

SEQ ID NO: 3830045 - RNA, 16 nt, Human
ccaucaugcccggucc

SEQ ID NO: 3830046 - RNA, 16 nt, Human
ccaucaugucuggcua

SEQ ID NO: 3830047 - RNA, 19 nt, Human
ccaucauuacccuucccug

SEQ ID NO: 3830048 - RNA, 12 nt, Human
ccaucauugaaa

SEQ ID NO: 3830049 - RNA, 17 nt, Human
ccauccacaugggagcc

SEQ ID NO: 3830050 - RNA, 16 nt, Human
ccauccacucuacccu

SEQ ID NO: 3830051 - RNA, 19 nt, Human
ccauccacucuacccuccc

SEQ ID NO: 3830052 - RNA, 16 nt, Human
ccauccagcuugccag

SEQ ID NO: 3830053 - RNA, 12 nt, Human
ccauccaggcag

SEQ ID NO: 3830054 - RNA, 13 nt, Human
ccauccaggcagu

SEQ ID NO: 3830055 - RNA, 21 nt, Human
ccauccagggaugccaucugu

SEQ ID NO: 3830056 - RNA, 18 nt, Human
ccauccagugacaaacca

SEQ ID NO: 3830057 - RNA, 17 nt, Human
ccauccauggccagcag

SEQ ID NO: 3830058 - RNA, 23 nt, Human
ccaucccaaacccuucagugcca

SEQ ID NO: 3830059 - RNA, 16 nt, Human
ccaucccacacccugg

SEQ ID NO: 3830060 - RNA, 21 nt, Human
ccaucccagagggugggcuuc

SEQ ID NO: 3830061 - RNA, 14 nt, Human
ccaucccagcccca

SEQ ID NO: 3830062 - RNA, 15 nt, Human
ccaucccagccuugg

SEQ ID NO: 3830063 - RNA, 22 nt, Human
ccaucccaggacaccacaccca

SEQ ID NO: 3830064 - RNA, 21 nt, Human
ccaucccauaugccugggcag

SEQ ID NO: 3830065 - RNA, 13 nt, Human
ccauccccagcga

SEQ ID NO: 3830066 - RNA, 17 nt, Human
ccauccccauccuccag

SEQ ID NO: 3830067 - RNA, 14 nt, Human
ccauccccgcagug

SEQ ID NO: 3830068 - RNA, 17 nt, Human
ccauccccgcagugugc

SEQ ID NO: 3830069 - RNA, 13 nt, Human
ccauccccuggac

SEQ ID NO: 3830070 - RNA, 15 nt, Human
ccauccccuggacug

SEQ ID NO: 3830071 - RNA, 22 nt, Human
ccauccccuguagagugggagc

SEQ ID NO: 3830072 - RNA, 14 nt, Human
ccaucccucccucc

SEQ ID NO: 3830073 - RNA, 15 nt, Human
ccaucccugaaggcc

SEQ ID NO: 3830074 - RNA, 14 nt, Human
ccaucccugccugg

SEQ ID NO: 3830075 - RNA, 23 nt, Human
ccauccgguuugccauguugcca

SEQ ID NO: 3830076 - RNA, 21 nt, Human
ccauccuaaucauccaaugcu

SEQ ID NO: 3830077 - RNA, 20 nt, Human
ccauccuaccaaugcaugca

SEQ ID NO: 3830078 - RNA, 16 nt, Human
ccauccuaggcugaca

SEQ ID NO: 3830079 - RNA, 16 nt, Human
ccauccuccagcaggg

SEQ ID NO: 3830080 - RNA, 13 nt, Human
ccauccuccagcu

SEQ ID NO: 3830081 - RNA, 21 nt, Human
ccauccuccccuucccugcaa

SEQ ID NO: 3830082 - RNA, 14 nt, Human
ccauccuccuggga

SEQ ID NO: 3830083 - RNA, 19 nt, Human
ccauccucuguacagagcc

SEQ ID NO: 3830084 - RNA, 12 nt, Human
ccauccugacca

SEQ ID NO: 3830085 - RNA, 15 nt, Human
ccauccugaggcucc

SEQ ID NO: 3830086 - RNA, 15 nt, Human
ccauccugcagccuc

SEQ ID NO: 3830087 - RNA, 21 nt, Human
ccauccugcagccuccuccug

SEQ ID NO: 3830088 - RNA, 17 nt, Human
ccauccuggcccagggc

SEQ ID NO: 3830089 - RNA, 18 nt, Human
ccauccuggcccagggca

SEQ ID NO: 3830090 - RNA, 19 nt, Human
ccauccugggacggcggca

SEQ ID NO: 3830091 - RNA, 14 nt, Human
ccauccugucccac

SEQ ID NO: 3830092 - RNA, 22 nt, Human
ccauccuguguguuaagcucug

SEQ ID NO: 3830093 - RNA, 16 nt, Human
ccauccuuucugccuc

SEQ ID NO: 3830094 - RNA, 17 nt, Human
ccauccuuucugccucu

SEQ ID NO: 3830095 - RNA, 19 nt, Human
ccaucgccagcugaugacu

SEQ ID NO: 3830096 - RNA, 16 nt, Human
ccaucgguccugucuc

SEQ ID NO: 3830097 - RNA, 18 nt, Human
ccaucgguccugucuccc

SEQ ID NO: 3830098 - RNA, 21 nt, Human
ccaucguugcccccauuucug

SEQ ID NO: 3830099 - RNA, 15 nt, Human
ccaucuaaaaauaua

SEQ ID NO: 3830100 - RNA, 15 nt, Human
ccaucuaaacugccc

SEQ ID NO: 3830101 - RNA, 17 nt, Human
ccaucuaagcugcagcu

SEQ ID NO: 3830102 - RNA, 20 nt, Human
ccaucuaagcugcagcuucc

SEQ ID NO: 3830103 - RNA, 21 nt, Human
ccaucuaagcugcagcuuccu

SEQ ID NO: 3830104 - RNA, 15 nt, Human
ccaucuacccuccga

SEQ ID NO: 3830105 - RNA, 21 nt, Human
ccaucuagacuagcaaucucu

SEQ ID NO: 3830106 - RNA, 17 nt, Human
ccaucuaguacuugaaa

SEQ ID NO: 3830107 - RNA, 14 nt, Human
ccaucucacacaug

SEQ ID NO: 3830108 - RNA, 20 nt, Human
ccaucucaggccaccugccc

SEQ ID NO: 3830109 - RNA, 22 nt, Human
ccaucucaggccaccugccccc

SEQ ID NO: 3830110 - RNA, 20 nt, Human
ccaucucaugaggggagagg

SEQ ID NO: 3830111 - RNA, 21 nt, Human
ccaucucaugccccuggcugg

SEQ ID NO: 3830112 - RNA, 20 nt, Human
ccaucucauguaucaucugg

SEQ ID NO: 3830113 - RNA, 22 nt, Human
ccaucuccaagaaugcugaaac

SEQ ID NO: 3830114 - RNA, 17 nt, Human
ccaucucccacccugua

SEQ ID NO: 3830115 - RNA, 17 nt, Human
ccaucuccccucagcuc

SEQ ID NO: 3830116 - RNA, 22 nt, Human
ccaucuccuauaaucugucaaa

SEQ ID NO: 3830117 - RNA, 21 nt, Human
ccaucucggagcaucccggag

SEQ ID NO: 3830118 - RNA, 23 nt, Human
ccaucucucccuccccugccauu

SEQ ID NO: 3830119 - RNA, 15 nt, Human
ccaucucuccuccuu

SEQ ID NO: 3830120 - RNA, 14 nt, Human
ccaucucucuggcc

SEQ ID NO: 3830121 - RNA, 19 nt, Human
ccaucucugaacuucagcu

SEQ ID NO: 3830122 - RNA, 13 nt, Human
ccaucucugcucc

SEQ ID NO: 3830123 - RNA, 15 nt, Human
ccaucucuggaugcc

SEQ ID NO: 3830124 - RNA, 22 nt, Human
ccaucucuggaugccugauugc

SEQ ID NO: 3830125 - RNA, 21 nt, Human
ccaucucuuccuacccaacca

SEQ ID NO: 3830126 - RNA, 15 nt, Human
ccaucucuuccuuga

SEQ ID NO: 3830127 - RNA, 14 nt, Human
cucacccccagcuu

SEQ ID NO: 3830128 - RNA, 18 nt, Human
cucacccccagcuuugcu

SEQ ID NO: 3830129 - RNA, 22 nt, Human
cucacccccucccacccccagc

SEQ ID NO: 3830130 - RNA, 15 nt, Human
cucacccccuccuuc

SEQ ID NO: 3830131 - RNA, 21 nt, Human
cucacccccucgggucuccuc

SEQ ID NO: 3830132 - RNA, 16 nt, Human
cucacccccuucucca

SEQ ID NO: 3830133 - RNA, 21 nt, Human
cucacccccuucuccauccac

SEQ ID NO: 3830134 - RNA, 20 nt, Human
cucccuggcugcccuggccc

SEQ ID NO: 3830135 - RNA, 13 nt, Human
cucccuggcuucu

SEQ ID NO: 3830136 - RNA, 19 nt, Human
cucccuggcuucugugggg

SEQ ID NO: 3830137 - RNA, 11 nt, Human
cucccuggguu

SEQ ID NO: 3830138 - RNA, 13 nt, Human
cucccuguaacuu

SEQ ID NO: 3830139 - RNA, 15 nt, Human
cucccuguaacuuga

SEQ ID NO: 3830140 - RNA, 21 nt, Human
cucccuguaggaagucauccu

SEQ ID NO: 3830141 - RNA, 22 nt, Human
cucccuguaggguccaaccaga

SEQ ID NO: 3830142 - RNA, 16 nt, Human
cucccuguccuccucg

SEQ ID NO: 3830143 - RNA, 18 nt, Human
cucccuguccuccucgga

SEQ ID NO: 3830144 - RNA, 15 nt, Human
cucccugugccccca

SEQ ID NO: 3830145 - RNA, 24 nt, Human
cucccuguuauuuucaaguagcug

SEQ ID NO: 3830146 - RNA, 18 nt, Human
cucccuguuccccagaga

SEQ ID NO: 3830147 - RNA, 19 nt, Human
cucccuguugaagcucugg

SEQ ID NO: 3830148 - RNA, 21 nt, Human
cucccuguugacgaagucucu

SEQ ID NO: 3830149 - RNA, 12 nt, Human
cucccuguuuga

SEQ ID NO: 3830150 - RNA, 11 nt, Human
cucccuuaccc

SEQ ID NO: 3830151 - RNA, 12 nt, Human
cucccuucaacc

SEQ ID NO: 3830152 - RNA, 18 nt, Human
cucccuucaaccauuccc

SEQ ID NO: 3830153 - RNA, 21 nt, Human
cucccuucaaccauuccccau

SEQ ID NO: 3830154 - RNA, 14 nt, Human
cucccuucccaccu

SEQ ID NO: 3830155 - RNA, 23 nt, Human
cucccuucccaccucucucacuc

SEQ ID NO: 3830156 - RNA, 15 nt, Human
cucccuucccuccuc

SEQ ID NO: 3830157 - RNA, 23 nt, Human
cucccuuccgacccucugggaac

SEQ ID NO: 3830158 - RNA, 13 nt, Human
cucccuuccucuu

SEQ ID NO: 3830159 - RNA, 12 nt, Human
cucccuuccuuu

SEQ ID NO: 3830160 - RNA, 17 nt, Human
cucccuucuaccugcca

SEQ ID NO: 3830161 - RNA, 16 nt, Human
cucccuucucuucaca

SEQ ID NO: 3830162 - RNA, 17 nt, Human
cucccuugaccugcuga

SEQ ID NO: 3830163 - RNA, 22 nt, Human
cucccuugccuuucgaggccug

SEQ ID NO: 3830164 - RNA, 23 nt, Human
cucccuugccuuucgaggccuga

SEQ ID NO: 3830165 - RNA, 12 nt, Human
cucccuugcugg

SEQ ID NO: 3830166 - RNA, 15 nt, Human
cucccuugcuggccc

SEQ ID NO: 3830167 - RNA, 22 nt, Human
cucccuugcuggccccagcccu

SEQ ID NO: 3830168 - RNA, 23 nt, Human
cucccuugcuggccccagcccug

SEQ ID NO: 3830169 - RNA, 18 nt, Human
cucccuuggaaaccugcc

SEQ ID NO: 3830170 - RNA, 20 nt, Human
cucccuuggaaaccugcccu

SEQ ID NO: 3830171 - RNA, 22 nt, Human
cucccuuggaaaccugcccugc

SEQ ID NO: 3830172 - RNA, 20 nt, Human
cucccuuggauuguccccga

SEQ ID NO: 3830173 - RNA, 13 nt, Human
cucccuugggcuc

SEQ ID NO: 3830174 - RNA, 19 nt, Human
cucccuugggcucugauga

SEQ ID NO: 3830175 - RNA, 22 nt, Human
cucccuuggggccuaugcagag

SEQ ID NO: 3830176 - RNA, 17 nt, Human
cucccuuggguucugau

SEQ ID NO: 3830177 - RNA, 12 nt, Human
cucccuuucaac

SEQ ID NO: 3830178 - RNA, 14 nt, Human
cucccuuucccuuc

SEQ ID NO: 3830179 - RNA, 12 nt, Human
cucccuuucucc

SEQ ID NO: 3830180 - RNA, 23 nt, Human
cucccuuucuccccugcccccag

SEQ ID NO: 3830181 - RNA, 16 nt, Human
cucccuuuuuccuugu

SEQ ID NO: 3830182 - RNA, 16 nt, Human
cucagugccaacugug

SEQ ID NO: 3830183 - RNA, 19 nt, Human
cucaguggacuuuccaccc

SEQ ID NO: 3830184 - RNA, 21 nt, Human
cucaguggcuucaucugucaa

SEQ ID NO: 3830185 - RNA, 12 nt, Human
cucaguguauuu

SEQ ID NO: 3830186 - RNA, 17 nt, Human
cucaguguauuuguauu

SEQ ID NO: 3830187 - RNA, 22 nt, Human
cucagugucauuuaugaaaaga

SEQ ID NO: 3830188 - RNA, 20 nt, Human
cucagugucuggcugcagag

SEQ ID NO: 3830189 - RNA, 19 nt, Human
cucaguguugguauauuuu

SEQ ID NO: 3830190 - RNA, 21 nt, Human
cucaguguugguauauuuuau

SEQ ID NO: 3830191 - RNA, 22 nt, Human
cucaguguugguauauuuuaua

SEQ ID NO: 3830192 - RNA, 17 nt, Human
cucaguguuuuggacuc

SEQ ID NO: 3830193 - RNA, 23 nt, Human
cucaguguuuuggacuccaucuc

SEQ ID NO: 3830194 - RNA, 15 nt, Human
cucaguucagaauca

SEQ ID NO: 3830195 - RNA, 18 nt, Human
cucaguucauccauucua

SEQ ID NO: 3830196 - RNA, 19 nt, Human
cucaguucccuuggccuca

SEQ ID NO: 3830197 - RNA, 21 nt, Human
cucaguucccuuggccucaga

SEQ ID NO: 3830198 - RNA, 22 nt, Human
cucaguucccuuggccucagaa

SEQ ID NO: 3830199 - RNA, 20 nt, Human
cucaguuccgauuucccagg

SEQ ID NO: 3830200 - RNA, 21 nt, Human
cucaguuccugcagcagagcc

SEQ ID NO: 3830201 - RNA, 19 nt, Human
cucaguucuagucucucug

SEQ ID NO: 3830202 - RNA, 16 nt, Human
cucaguucucuucacu

SEQ ID NO: 3830203 - RNA, 17 nt, Human
cucaguucuugccacuu

SEQ ID NO: 3830204 - RNA, 16 nt, Human
cucaguugauuuucug

SEQ ID NO: 3830205 - RNA, 20 nt, Human
cucaguugauuuucuggauu

SEQ ID NO: 3830206 - RNA, 13 nt, Human
cucaguugcagcc

SEQ ID NO: 3830207 - RNA, 21 nt, Human
cucaguuggaaauaauaaaag

SEQ ID NO: 3830208 - RNA, 14 nt, Human
cucaguuguagaau

SEQ ID NO: 3830209 - RNA, 18 nt, Human
cucaguuuaauccuucua

SEQ ID NO: 3830210 - RNA, 15 nt, Human
cucaguuucuugcuu

SEQ ID NO: 3830211 - RNA, 15 nt, Human
cucaguuuuuuuccu

SEQ ID NO: 3830212 - RNA, 17 nt, Human
cucauaaaaagcaaaac

SEQ ID NO: 3830213 - RNA, 21 nt, Human
cucauaaaaagccugcaauuu

SEQ ID NO: 3830214 - RNA, 20 nt, Human
cucauaagcuacugaugaga

SEQ ID NO: 3830215 - RNA, 14 nt, Human
cucauaaugugaag

SEQ ID NO: 3830216 - RNA, 12 nt, Human
cucauaauuccu

SEQ ID NO: 3830217 - RNA, 21 nt, Human
cucauaauuccuacagcacua

SEQ ID NO: 3830218 - RNA, 22 nt, Human
cucauaauuuauacaggucaua

SEQ ID NO: 3830219 - RNA, 19 nt, Human
cucauacccacccccaccc

SEQ ID NO: 3830220 - RNA, 17 nt, Human
cucauacccucccuccc

SEQ ID NO: 3830221 - RNA, 14 nt, Human
cucauaccucugac

SEQ ID NO: 3830222 - RNA, 15 nt, Human
cucauaccucugacc

SEQ ID NO: 3830223 - RNA, 21 nt, Human
cucauaccucugaccaacagg

SEQ ID NO: 3830224 - RNA, 17 nt, Human
cucauacguccaccaug

SEQ ID NO: 3830225 - RNA, 18 nt, Human
cucauagacacugaucug

SEQ ID NO: 3830226 - RNA, 15 nt, Human
cucauagcacuuccc

SEQ ID NO: 3830227 - RNA, 13 nt, Human
cucauagcccuca

SEQ ID NO: 3830228 - RNA, 20 nt, Human
cucauaguaugguggcuggg

SEQ ID NO: 3830229 - RNA, 13 nt, Human
cucauauaagaca

SEQ ID NO: 3830230 - RNA, 20 nt, Human
cucauauccccuauuuaaca

SEQ ID NO: 3830231 - RNA, 18 nt, Human
cucauauggcccaguguc

SEQ ID NO: 3830232 - RNA, 20 nt, Human
cucauauggucuaccaguuu

SEQ ID NO: 3830233 - RNA, 15 nt, Human
cucauauuccugcag

SEQ ID NO: 3830234 - RNA, 20 nt, Human
cucauauuccugcagccugg

SEQ ID NO: 3830235 - RNA, 13 nt, Human
cucauauugugau

SEQ ID NO: 3830236 - RNA, 19 nt, Human
cucauauugugauucugcc

SEQ ID NO: 3830237 - RNA, 21 nt, Human
cucauauugugauucugccuu

SEQ ID NO: 3830238 - RNA, 13 nt, Human
cucauauuuaaag

SEQ ID NO: 3830239 - RNA, 16 nt, Human
cucauauuuuguauau

SEQ ID NO: 3830240 - RNA, 15 nt, Human
cucaucaacaaagaa

SEQ ID NO: 3830241 - RNA, 17 nt, Human
cucaucaaucaaauaag

SEQ ID NO: 3830242 - RNA, 15 nt, Human
cucaucacacacaug

SEQ ID NO: 3830243 - RNA, 22 nt, Human
cucaucaccaacgucugugcca

SEQ ID NO: 3830244 - RNA, 20 nt, Human
cucaucaggaugaacccagg

SEQ ID NO: 3830245 - RNA, 15 nt, Human
cucaucauaaaauaa

SEQ ID NO: 3830246 - RNA, 18 nt, Human
cucaucaucaacccuaaa

SEQ ID NO: 3830247 - RNA, 18 nt, Human
cucaucauucucugucuc

SEQ ID NO: 3830248 - RNA, 14 nt, Human
cucaucauuugugg

SEQ ID NO: 3830249 - RNA, 15 nt, Human
cucauccaccccauc

SEQ ID NO: 3830250 - RNA, 16 nt, Human
cucauccaccccaucc

SEQ ID NO: 3830251 - RNA, 19 nt, Human
cucauccaccccaucccuc

SEQ ID NO: 3830252 - RNA, 16 nt, Human
cucauccaucaucaug

SEQ ID NO: 3830253 - RNA, 19 nt, Human
cucauccaucaucaugugu

SEQ ID NO: 3830254 - RNA, 13 nt, Human
cucauccccaggg

SEQ ID NO: 3830255 - RNA, 23 nt, Human
cucauccccaggggucccagcca

SEQ ID NO: 3830256 - RNA, 23 nt, Human
cucauccuccaguaccuugcuuc

SEQ ID NO: 3830257 - RNA, 15 nt, Human
cucauccuccuggaa

SEQ ID NO: 3830258 - RNA, 12 nt, Human
cucauccuccuu

SEQ ID NO: 3830259 - RNA, 13 nt, Human
cucauccuccuuc

SEQ ID NO: 3830260 - RNA, 17 nt, Human
cucaucgccagacaacu

SEQ ID NO: 3830261 - RNA, 21 nt, Human
cucaucuagguaaauuacagu

SEQ ID NO: 3830262 - RNA, 14 nt, Human
cucaucuaucucaa

SEQ ID NO: 3830263 - RNA, 15 nt, Human
cucaucuaugaggaa

SEQ ID NO: 3830264 - RNA, 20 nt, Human
cucaucuaugaggaaagguu

SEQ ID NO: 3830265 - RNA, 17 nt, Human
cucaucucaguccucaa

SEQ ID NO: 3830266 - RNA, 18 nt, Human
cucaucucagugaagaau

SEQ ID NO: 3830267 - RNA, 20 nt, Human
cucaucucuaacagcucagg

SEQ ID NO: 3830268 - RNA, 16 nt, Human
cucaucucucugccca

SEQ ID NO: 3830269 - RNA, 17 nt, Human
cucaucucucugcccaa

SEQ ID NO: 3830270 - RNA, 17 nt, Human
cucaucucuuagcuccc

SEQ ID NO: 3830271 - RNA, 12 nt, Human
cucaucucuucu

SEQ ID NO: 3830272 - RNA, 13 nt, Human
cucaucugaggca

SEQ ID NO: 3830273 - RNA, 20 nt, Human
cucaucugcacccuucuuuu

SEQ ID NO: 3830274 - RNA, 20 nt, Human
cucaucugcugguccguggg

SEQ ID NO: 3830275 - RNA, 17 nt, Human
cucaucuggaguucuca

SEQ ID NO: 3830276 - RNA, 21 nt, Human
cucaucuggaguucucaaaga

SEQ ID NO: 3830277 - RNA, 20 nt, Human
cucaucuggggagcaggcag

SEQ ID NO: 3830278 - RNA, 20 nt, Human
cuccaaggccaggccuuggg

SEQ ID NO: 3830279 - RNA, 22 nt, Human
cuccaagggcuucugcacccuc

SEQ ID NO: 3830280 - RNA, 20 nt, Human
cuccaaggggaaucagaacu

SEQ ID NO: 3830281 - RNA, 15 nt, Human
cuccaagucucagug

SEQ ID NO: 3830282 - RNA, 16 nt, Human
cuccaagucucagugg

SEQ ID NO: 3830283 - RNA, 17 nt, Human
cuccaagucucaguggc

SEQ ID NO: 3830284 - RNA, 21 nt, Human
cuccaagugccagaggugggc

SEQ ID NO: 3830285 - RNA, 22 nt, Human
cuccaagugccagaggugggca

SEQ ID NO: 3830286 - RNA, 17 nt, Human
cuccaauaucagugcuc

SEQ ID NO: 3830287 - RNA, 23 nt, Human
cuccaauuuuuuaagugaaaaua

SEQ ID NO: 3830288 - RNA, 18 nt, Human
cuccaauuuuuuuuuccu

SEQ ID NO: 3830289 - RNA, 17 nt, Human
cuccacaaccucuuccc

SEQ ID NO: 3830290 - RNA, 22 nt, Human
cuccacaaccucuuccccccaa

SEQ ID NO: 3830291 - RNA, 20 nt, Human
cuccacacaagggaaggaca

SEQ ID NO: 3830292 - RNA, 15 nt, Human
cuccacacacacaaa

SEQ ID NO: 3830293 - RNA, 21 nt, Human
cuccacacacagcugggcugu

SEQ ID NO: 3830294 - RNA, 23 nt, Human
cuccacacacagcugggcugugg

SEQ ID NO: 3830295 - RNA, 14 nt, Human
cuccacagccgcag

SEQ ID NO: 3830296 - RNA, 19 nt, Human
cuccacagcgagggcagcu

SEQ ID NO: 3830297 - RNA, 23 nt, Human
cuccacagcgagggcagcugcua

SEQ ID NO: 3830298 - RNA, 17 nt, Human
cuccacaguucaguggc

SEQ ID NO: 3830299 - RNA, 21 nt, Human
cuccacaguucgaccugcggc

SEQ ID NO: 3830300 - RNA, 13 nt, Human
cuccacauuuguu

SEQ ID NO: 3830301 - RNA, 15 nt, Human
cuccacauuuguuuu

SEQ ID NO: 3830302 - RNA, 23 nt, Human
cuccaccaccacuggccaccagg

SEQ ID NO: 3830303 - RNA, 12 nt, Human
cuccaccaccgc

SEQ ID NO: 3830304 - RNA, 20 nt, Human
cuccaccaccgcccgucugu

SEQ ID NO: 3830305 - RNA, 22 nt, Human
cuccaccagcaucaccugccug

SEQ ID NO: 3830306 - RNA, 23 nt, Human
cuccaccagcaucaccugccugu

SEQ ID NO: 3830307 - RNA, 14 nt, Human
cuccaccaggaacc

SEQ ID NO: 3830308 - RNA, 15 nt, Human
cuccaccaggaaccu

SEQ ID NO: 3830309 - RNA, 16 nt, Human
cuccaccagucauuuu

SEQ ID NO: 3830310 - RNA, 16 nt, Human
cuccaccaucgucuuc

SEQ ID NO: 3830311 - RNA, 22 nt, Human
cuccaccaucgucuucuuggcc

SEQ ID NO: 3830312 - RNA, 22 nt, Human
cuccaccccaggacgccacuca

SEQ ID NO: 3830313 - RNA, 13 nt, Human
cuccacccccagc

SEQ ID NO: 3830314 - RNA, 22 nt, Human
cuccaccccccagaaccugucc

SEQ ID NO: 3830315 - RNA, 23 nt, Human
cuccaccccccagaaccuguccu

SEQ ID NO: 3830316 - RNA, 15 nt, Human
cuccacccuccaccu

SEQ ID NO: 3830317 - RNA, 13 nt, Human
cuccacccucuga

SEQ ID NO: 3830318 - RNA, 13 nt, Human
cuccacccugcuc

SEQ ID NO: 3830319 - RNA, 15 nt, Human
cuccacccugucccc

SEQ ID NO: 3830320 - RNA, 12 nt, Human
cuccacccuugg

SEQ ID NO: 3830321 - RNA, 13 nt, Human
cuccacccuuggc

SEQ ID NO: 3830322 - RNA, 14 nt, Human
cuccacccuuggcc

SEQ ID NO: 3830323 - RNA, 19 nt, Human
cuccaccgcugccuaagug

SEQ ID NO: 3830324 - RNA, 15 nt, Human
cuccaccuagacugu

SEQ ID NO: 3830325 - RNA, 15 nt, Human
cuccaccuaguggcu

SEQ ID NO: 3830326 - RNA, 13 nt, Human
cuccaccucagcc

SEQ ID NO: 3830327 - RNA, 15 nt, Human
cuccaccucccugca

SEQ ID NO: 3830328 - RNA, 17 nt, Human
cuccaccucccugcaau

SEQ ID NO: 3830329 - RNA, 12 nt, Human
cuccaccugcca

SEQ ID NO: 3830330 - RNA, 17 nt, Human
cuccaccugccagggac

SEQ ID NO: 3830331 - RNA, 18 nt, Human
cuccaccugccagggaca

SEQ ID NO: 3830332 - RNA, 21 nt, Human
cuccaccugccagggacagag

SEQ ID NO: 3830333 - RNA, 17 nt, Human
cuccaccugcucccagg

SEQ ID NO: 3830334 - RNA, 22 nt, Human
cuccaccugcucccaggccagu

SEQ ID NO: 3830335 - RNA, 13 nt, Human
cuccaccugcucu

SEQ ID NO: 3830336 - RNA, 15 nt, Human
cuccaccuugcgggg

SEQ ID NO: 3830337 - RNA, 20 nt, Human
cuccacguucaccccuccac

SEQ ID NO: 3830338 - RNA, 18 nt, Human
cuccacguucugcucauc

SEQ ID NO: 3830339 - RNA, 20 nt, Human
cuccacguucugcucaucau

SEQ ID NO: 3830340 - RNA, 13 nt, Human
cuccacucccacu

SEQ ID NO: 3830341 - RNA, 12 nt, Human
cuccacuccuuc

SEQ ID NO: 3830342 - RNA, 15 nt, Human
cuccacuccuuccug

SEQ ID NO: 3830343 - RNA, 16 nt, Human
cuccacucucccccac

SEQ ID NO: 3830344 - RNA, 14 nt, Human
cuccacucuccucu

SEQ ID NO: 3830345 - RNA, 21 nt, Human
cuccacucuccucuuccaggc

SEQ ID NO: 3830346 - RNA, 14 nt, Human
cuccacucucuacc

SEQ ID NO: 3830347 - RNA, 16 nt, Human
cccaccuccccuuggg

SEQ ID NO: 3830348 - RNA, 21 nt, Human
cccaccucccucaaccucauc

SEQ ID NO: 3830349 - RNA, 15 nt, Human
cccaccucccugccc

SEQ ID NO: 3830350 - RNA, 17 nt, Human
cccaccucccugcccag

SEQ ID NO: 3830351 - RNA, 15 nt, Human
cccaccuccugacac

SEQ ID NO: 3830352 - RNA, 13 nt, Human
cccaccucucuca

SEQ ID NO: 3830353 - RNA, 14 nt, Human
cccaccucucucac

SEQ ID NO: 3830354 - RNA, 21 nt, Human
cccaccucucucacuccuuga

SEQ ID NO: 3830355 - RNA, 20 nt, Human
cccaccucugugaccucagg

SEQ ID NO: 3830356 - RNA, 15 nt, Human
cccaccugagcuuug

SEQ ID NO: 3830357 - RNA, 14 nt, Human
cccaccugcagggc

SEQ ID NO: 3830358 - RNA, 12 nt, Human
cccaccugccug

SEQ ID NO: 3830359 - RNA, 14 nt, Human
cccaccugccuggc

SEQ ID NO: 3830360 - RNA, 17 nt, Human
cccaccugccuggccgg

SEQ ID NO: 3830361 - RNA, 18 nt, Human
cccaccugccuggccggc

SEQ ID NO: 3830362 - RNA, 20 nt, Human
cccaccugccuggccggcca

SEQ ID NO: 3830363 - RNA, 21 nt, Human
cccaccugccuggccggccag

SEQ ID NO: 3830364 - RNA, 12 nt, Human
cccaccugcgcu

SEQ ID NO: 3830365 - RNA, 19 nt, Human
cccaccugcugagagaccc

SEQ ID NO: 3830366 - RNA, 13 nt, Human
cccaccuggccac

SEQ ID NO: 3830367 - RNA, 15 nt, Human
cccaccuggccaccu

SEQ ID NO: 3830368 - RNA, 12 nt, Human
cccaccuggccc

SEQ ID NO: 3830369 - RNA, 18 nt, Human
cccaccuggcccucucug

SEQ ID NO: 3830370 - RNA, 14 nt, Human
cccaccuggcucug

SEQ ID NO: 3830371 - RNA, 20 nt, Human
cccaccuucaauuccugggc

SEQ ID NO: 3830372 - RNA, 19 nt, Human
cccaccuuggcugcaggga

SEQ ID NO: 3830373 - RNA, 20 nt, Human
cccaccuuggcugcagggag

SEQ ID NO: 3830374 - RNA, 18 nt, Human
cccaccuuguuggagccu

SEQ ID NO: 3830375 - RNA, 19 nt, Human
cccaccuuguuggagccug

SEQ ID NO: 3830376 - RNA, 12 nt, Human
cccaccuuuggu

SEQ ID NO: 3830377 - RNA, 18 nt, Human
cccacgaaacugcccugg

SEQ ID NO: 3830378 - RNA, 14 nt, Human
cccacgagggcugg

SEQ ID NO: 3830379 - RNA, 15 nt, Human
cccacgagggcuggc

SEQ ID NO: 3830380 - RNA, 18 nt, Human
cccacgauuuucuccagc

SEQ ID NO: 3830381 - RNA, 19 nt, Human
cccacgauuuucuccagcu

SEQ ID NO: 3830382 - RNA, 21 nt, Human
cccacgauuuucuccagcuca

SEQ ID NO: 3830383 - RNA, 14 nt, Human
cccacgccacagcc

SEQ ID NO: 3830384 - RNA, 15 nt, Human
cccacgccacagccc

SEQ ID NO: 3830385 - RNA, 17 nt, Human
cccacgccacagcccuu

SEQ ID NO: 3830386 - RNA, 14 nt, Human
cccacgcugacuac

SEQ ID NO: 3830387 - RNA, 19 nt, Human
cccacgcugacuacagggc

SEQ ID NO: 3830388 - RNA, 21 nt, Human
cccacgcugacuacagggccg

SEQ ID NO: 3830389 - RNA, 19 nt, Human
cccacgcuggagugcagug

SEQ ID NO: 3830390 - RNA, 21 nt, Human
cccacgcuggagugcagugag

SEQ ID NO: 3830391 - RNA, 14 nt, Human
cccacggccgcucc

SEQ ID NO: 3830392 - RNA, 21 nt, Human
cccacggccgcuccaggggug

SEQ ID NO: 3830393 - RNA, 15 nt, Human
cccacggcuaagagg

SEQ ID NO: 3830394 - RNA, 18 nt, Human
cccacggcuaagaggcug

SEQ ID NO: 3830395 - RNA, 17 nt, Human
cccacgggaccuggggc

SEQ ID NO: 3830396 - RNA, 17 nt, Human
cccacgucacguguagu

SEQ ID NO: 3830397 - RNA, 19 nt, Human
cccacguccugucagugcc

SEQ ID NO: 3830398 - RNA, 15 nt, Human
cccacguucucacac

SEQ ID NO: 3830399 - RNA, 19 nt, Human
cccacucaagccaagcagc

SEQ ID NO: 3830400 - RNA, 14 nt, Human
cccacucacagaga

SEQ ID NO: 3830401 - RNA, 14 nt, Human
cccacuccaucugg

SEQ ID NO: 3830402 - RNA, 18 nt, Human
cccacuccaucugguaga

SEQ ID NO: 3830403 - RNA, 16 nt, Human
cccacucccaggacca

SEQ ID NO: 3830404 - RNA, 14 nt, Human
cccacuccggcccu

SEQ ID NO: 3830405 - RNA, 21 nt, Human
cccacuccggcccuccagagc

SEQ ID NO: 3830406 - RNA, 23 nt, Human
cccacuccucugcugaccugcug

SEQ ID NO: 3830407 - RNA, 12 nt, Human
cccacucucaga

SEQ ID NO: 3830408 - RNA, 15 nt, Human
cccacucucagaggc

SEQ ID NO: 3830409 - RNA, 12 nt, Human
cccacucugugc

SEQ ID NO: 3830410 - RNA, 16 nt, Human
cccacugacagccucc

SEQ ID NO: 3830411 - RNA, 14 nt, Human
cccacugaccagaa

SEQ ID NO: 3830412 - RNA, 18 nt, Human
cccacugcaauccugucu

SEQ ID NO: 3830413 - RNA, 12 nt, Human
cccacugcaccc

SEQ ID NO: 3830414 - RNA, 16 nt, Human
cccacugcacccccuc

SEQ ID NO: 3830415 - RNA, 19 nt, Human
cccacugcacccccuccug

SEQ ID NO: 3830416 - RNA, 12 nt, Human
cccacugcccac

SEQ ID NO: 3830417 - RNA, 13 nt, Human
cccacugccugcc

SEQ ID NO: 3830418 - RNA, 15 nt, Human
cccacugccugccca

SEQ ID NO: 3830419 - RNA, 12 nt, Human
cccacugcucug

SEQ ID NO: 3830420 - RNA, 12 nt, Human
cccacugcuuuu

SEQ ID NO: 3830421 - RNA, 19 nt, Human
cccacugcuuuuggucugu

SEQ ID NO: 3830422 - RNA, 23 nt, Human
cccacugcuuuuggucuguguga

SEQ ID NO: 3830423 - RNA, 12 nt, Human
cccacuggagca

SEQ ID NO: 3830424 - RNA, 14 nt, Human
cccagucccagcag

SEQ ID NO: 3830425 - RNA, 20 nt, Human
cccaguccccaccccugccc

SEQ ID NO: 3830426 - RNA, 21 nt, Human
cccaguccccaccccugcccc

SEQ ID NO: 3830427 - RNA, 14 nt, Human
cccagucccugggg

SEQ ID NO: 3830428 - RNA, 15 nt, Human
cccaguccugcccgc

SEQ ID NO: 3830429 - RNA, 15 nt, Human
cccaguccuggccug

SEQ ID NO: 3830430 - RNA, 17 nt, Human
cccaguccuggccuggc

SEQ ID NO: 3830431 - RNA, 16 nt, Human
cccagucuacccagag

SEQ ID NO: 3830432 - RNA, 20 nt, Human
cccagucucuggcaguucug

SEQ ID NO: 3830433 - RNA, 12 nt, Human
cccagugacacu

SEQ ID NO: 3830434 - RNA, 22 nt, Human
cccagugacacuucagagagcu

SEQ ID NO: 3830435 - RNA, 19 nt, Human
cccagugagauuacagagg

SEQ ID NO: 3830436 - RNA, 17 nt, Human
cccagugagcauccacg

SEQ ID NO: 3830437 - RNA, 23 nt, Human
cccagugagucucuggggcaggc

SEQ ID NO: 3830438 - RNA, 17 nt, Human
cccagugcaaaugcaug

SEQ ID NO: 3830439 - RNA, 16 nt, Human
cccagugcacuugcug

SEQ ID NO: 3830440 - RNA, 12 nt, Human
cccagugcagaa

SEQ ID NO: 3830441 - RNA, 17 nt, Human
cccagugcagaauguaa

SEQ ID NO: 3830442 - RNA, 18 nt, Human
cccagugcaugguggcca

SEQ ID NO: 3830443 - RNA, 20 nt, Human
cccagugcaugguggccaga

SEQ ID NO: 3830444 - RNA, 22 nt, Human
cccagugccaagcacagugccu

SEQ ID NO: 3830445 - RNA, 14 nt, Human
cccagugcccccac

SEQ ID NO: 3830446 - RNA, 23 nt, Human
cccagugcccuggggcugaucuc

SEQ ID NO: 3830447 - RNA, 18 nt, Human
cccagugccgagaaggaa

SEQ ID NO: 3830448 - RNA, 14 nt, Human
cccaguggcagggc

SEQ ID NO: 3830449 - RNA, 15 nt, Human
cccaguggcagggca

SEQ ID NO: 3830450 - RNA, 17 nt, Human
cccaguggcagggcaca

SEQ ID NO: 3830451 - RNA, 16 nt, Human
cccaguggccacucag

SEQ ID NO: 3830452 - RNA, 17 nt, Human
cccaguggccacucagc

SEQ ID NO: 3830453 - RNA, 12 nt, Human
cccagugggagg

SEQ ID NO: 3830454 - RNA, 19 nt, Human
cccagugggaggggcaggc

SEQ ID NO: 3830455 - RNA, 21 nt, Human
cccagugggaggggcaggcug

SEQ ID NO: 3830456 - RNA, 16 nt, Human
cccagugucuuccugu

SEQ ID NO: 3830457 - RNA, 20 nt, Human
cccagugucuuccugugggg

SEQ ID NO: 3830458 - RNA, 16 nt, Human
cccaguguuuuaggag

SEQ ID NO: 3830459 - RNA, 17 nt, Human
cccaguguuuuaggagc

SEQ ID NO: 3830460 - RNA, 20 nt, Human
cccaguucgccuggagcccu

SEQ ID NO: 3830461 - RNA, 16 nt, Human
cccaguucucuaggga

SEQ ID NO: 3830462 - RNA, 15 nt, Human
cccaguugccaucug

SEQ ID NO: 3830463 - RNA, 17 nt, Human
cccaguugccaucugcg

SEQ ID NO: 3830464 - RNA, 14 nt, Human
cccaguuucugccu

SEQ ID NO: 3830465 - RNA, 16 nt, Human
cccaguuucugccucu

SEQ ID NO: 3830466 - RNA, 22 nt, Human
cccaguuugcagaaaagcaccu

SEQ ID NO: 3830467 - RNA, 23 nt, Human
cccaguuugcagaaaagcaccug

SEQ ID NO: 3830468 - RNA, 19 nt, Human
cccauaauuuucuucaugc

SEQ ID NO: 3830469 - RNA, 23 nt, Human
cccauaauuuuuuuuuuccuuuu

SEQ ID NO: 3830470 - RNA, 16 nt, Human
cccauacucagccugc

SEQ ID NO: 3830471 - RNA, 19 nt, Human
cccauagaaacaugacacu

SEQ ID NO: 3830472 - RNA, 22 nt, Human
cccauagaaacaugacacugac

SEQ ID NO: 3830473 - RNA, 20 nt, Human
cccauagcagccaguucaaa

SEQ ID NO: 3830474 - RNA, 13 nt, Human
cccauagcuucca

SEQ ID NO: 3830475 - RNA, 16 nt, Human
cccauagcuuccauga

SEQ ID NO: 3830476 - RNA, 15 nt, Human
cccauaggcccacac

SEQ ID NO: 3830477 - RNA, 18 nt, Human
cccauaggcccacacaca

SEQ ID NO: 3830478 - RNA, 14 nt, Human
cccauauccugccu

SEQ ID NO: 3830479 - RNA, 19 nt, Human
cccauauuuuacuuggaaa

SEQ ID NO: 3830480 - RNA, 20 nt, Human
cccaucaccuacucacacag

SEQ ID NO: 3830481 - RNA, 22 nt, Human
cccaucaccuacucacacaggc

SEQ ID NO: 3830482 - RNA, 16 nt, Human
cccaucacgccugugc

SEQ ID NO: 3830483 - RNA, 15 nt, Human
cccaucacugcgcca

SEQ ID NO: 3830484 - RNA, 22 nt, Human
cccaucacugcgccacugcucc

SEQ ID NO: 3830485 - RNA, 20 nt, Human
cccaucacuggagcaccagg

SEQ ID NO: 3830486 - RNA, 14 nt, Human
cccaucagaaggag

SEQ ID NO: 3830487 - RNA, 22 nt, Human
cccaucagugcucccucacaug

SEQ ID NO: 3830488 - RNA, 23 nt, Human
cccaucagugcucccucacaugu

SEQ ID NO: 3830489 - RNA, 13 nt, Human
cccaucaguguac

SEQ ID NO: 3830490 - RNA, 21 nt, Human
cccaucaguguacccccgccc

SEQ ID NO: 3830491 - RNA, 14 nt, Human
cccaucaucccagc

SEQ ID NO: 3830492 - RNA, 16 nt, Human
cccaucauccucuggc

SEQ ID NO: 3830493 - RNA, 12 nt, Human
cccaucauucau

SEQ ID NO: 3830494 - RNA, 13 nt, Human
cccauccaggcag

SEQ ID NO: 3830495 - RNA, 19 nt, Human
cccauccauuaggccagca

SEQ ID NO: 3830496 - RNA, 19 nt, Human
cccauccccauccuccagc

SEQ ID NO: 3830497 - RNA, 14 nt, Human
cccauccccccuca

SEQ ID NO: 3830498 - RNA, 16 nt, Human
cccauccccccucacc

SEQ ID NO: 3830499 - RNA, 20 nt, Human
cccauccccccucaccaggg

SEQ ID NO: 3830500 - RNA, 16 nt, Human
cccauccccgcagugu

SEQ ID NO: 3830501 - RNA, 18 nt, Human
cccaucccugccugguca

SEQ ID NO: 3830502 - RNA, 20 nt, Human
cccauccuaccaaugcaugc

SEQ ID NO: 3830503 - RNA, 21 nt, Human
cccauccuaccaaugcaugca

SEQ ID NO: 3830504 - RNA, 12 nt, Human
cccauccuaccc

SEQ ID NO: 3830505 - RNA, 23 nt, Human
cccauccuacccucgggcccacc

SEQ ID NO: 3830506 - RNA, 15 nt, Human
cccauccuccagcuu

SEQ ID NO: 3830507 - RNA, 13 nt, Human
cccauccuccagg

SEQ ID NO: 3830508 - RNA, 22 nt, Human
cccauccuccccuucccugcaa

SEQ ID NO: 3830509 - RNA, 14 nt, Human
cccauccucuguac

SEQ ID NO: 3830510 - RNA, 22 nt, Human
cccauccucuguacagagccca

SEQ ID NO: 3830511 - RNA, 15 nt, Human
cccauccuggcccau

SEQ ID NO: 3830512 - RNA, 17 nt, Human
cccauccuggcccauca

SEQ ID NO: 3830513 - RNA, 19 nt, Human
cccaucgucucggccuuca

SEQ ID NO: 3830514 - RNA, 22 nt, Human
cccaucgucucggccuucacaa

SEQ ID NO: 3830515 - RNA, 16 nt, Human
cccaucuaagcugcag

SEQ ID NO: 3830516 - RNA, 23 nt, Human
cccaucucaggccagagccaagg

SEQ ID NO: 3830517 - RNA, 12 nt, Human
cccaucucccug

SEQ ID NO: 3830518 - RNA, 17 nt, Human
cccaucucccugccugg

SEQ ID NO: 3830519 - RNA, 17 nt, Human
cccaucucccugcuuug

SEQ ID NO: 3830520 - RNA, 20 nt, Human
cccaucucgcucccucccag

SEQ ID NO: 3830521 - RNA, 21 nt, Human
cccaucucgcucccucccagg

SEQ ID NO: 3830522 - RNA, 23 nt, Human
cccaucucgcucccucccaggac

SEQ ID NO: 3830523 - RNA, 13 nt, Human
cccaucucggagc

SEQ ID NO: 3830524 - RNA, 13 nt, Human
cccaucucucccu

SEQ ID NO: 3830525 - RNA, 13 nt, Human
cccaucugcaccc

SEQ ID NO: 3830526 - RNA, 22 nt, Human
cccaucugcaccccccugggcu

SEQ ID NO: 3830527 - RNA, 18 nt, Human
cccaucugcauucccagc

SEQ ID NO: 3830528 - RNA, 13 nt, Human
cccaucugcccag

SEQ ID NO: 3830529 - RNA, 15 nt, Human
cccaucugcccagga

SEQ ID NO: 3830530 - RNA, 16 nt, Human
cccaucugcccaggac

SEQ ID NO: 3830531 - RNA, 20 nt, Human
cccaucugccccacagucuc

SEQ ID NO: 3830532 - RNA, 21 nt, Human
cccaucugcgggggcagugcu

SEQ ID NO: 3830533 - RNA, 22 nt, Human
cccaucugcgggggcagugcuc

SEQ ID NO: 3830534 - RNA, 23 nt, Human
cccaucugggaguccccuuuucu

SEQ ID NO: 3830535 - RNA, 18 nt, Human
cccaucuggguccuugca

SEQ ID NO: 3830536 - RNA, 16 nt, Human
cccaucuggucauuug

SEQ ID NO: 3830537 - RNA, 13 nt, Human
cccaucuucaccc

SEQ ID NO: 3830538 - RNA, 20 nt, Human
cccaugaacacacugugucc

SEQ ID NO: 3830539 - RNA, 19 nt, Human
cccaugaagacaggacagu

SEQ ID NO: 3830540 - RNA, 11 nt, Human
cccaugaagcc

SEQ ID NO: 3830541 - RNA, 17 nt, Human
cccaugaagccuuuuga

SEQ ID NO: 3830542 - RNA, 23 nt, Human
cccaugacaauguuguagugucc

SEQ ID NO: 3830543 - RNA, 23 nt, Human
cccaugacccaccccugugcucc

SEQ ID NO: 3830544 - RNA, 17 nt, Human
cccaugacccaggcugg

SEQ ID NO: 3830545 - RNA, 19 nt, Human
cccaugacccaggcugggc

SEQ ID NO: 3830546 - RNA, 19 nt, Human
cccaugagagcgcagcccg

SEQ ID NO: 3830547 - RNA, 14 nt, Human
cccaugagccucag

SEQ ID NO: 3830548 - RNA, 20 nt, Human
cccaugagggagaugccaug

SEQ ID NO: 3830549 - RNA, 21 nt, Human
cccaugagggagaugccauga

SEQ ID NO: 3830550 - RNA, 16 nt, Human
cccaugauuucaugua

SEQ ID NO: 3830551 - RNA, 17 nt, Human
cccaugauuucauguac

SEQ ID NO: 3830552 - RNA, 16 nt, Human
cccaugcacugugaag

SEQ ID NO: 3830553 - RNA, 17 nt, Human
cccaugccacguuccac

SEQ ID NO: 3830554 - RNA, 20 nt, Human
cucuccccagguccagcucu

SEQ ID NO: 3830555 - RNA, 15 nt, Human
cucuccccaugaugu

SEQ ID NO: 3830556 - RNA, 16 nt, Human
cucuccccaugauguu

SEQ ID NO: 3830557 - RNA, 23 nt, Human
cucuccccccccccuccaauccu

SEQ ID NO: 3830558 - RNA, 22 nt, Human
cucuccccgcaguguuugugug

SEQ ID NO: 3830559 - RNA, 12 nt, Human
cucuccccugcc

SEQ ID NO: 3830560 - RNA, 17 nt, Human
cucuccccugcccugcu

SEQ ID NO: 3830561 - RNA, 18 nt, Human
cucuccccugcccugcug

SEQ ID NO: 3830562 - RNA, 14 nt, Human
cucuccccugccug

SEQ ID NO: 3830563 - RNA, 16 nt, Human
cucuccccugccugcc

SEQ ID NO: 3830564 - RNA, 21 nt, Human
cucuccccuggaacugucucu

SEQ ID NO: 3830565 - RNA, 15 nt, Human
cucucccgucagggc

SEQ ID NO: 3830566 - RNA, 13 nt, Human
cucucccugaccc

SEQ ID NO: 3830567 - RNA, 14 nt, Human
cucucccugcaugg

SEQ ID NO: 3830568 - RNA, 17 nt, Human
ccccaccccugccccca

SEQ ID NO: 3830569 - RNA, 19 nt, Human
cucugacaagggcugaccu

SEQ ID NO: 3830570 - RNA, 16 nt, Human
cucugacacacagcuc

SEQ ID NO: 3830571 - RNA, 17 nt, Human
cucugacacacagcucu

SEQ ID NO: 3830572 - RNA, 18 nt, Human
cucugacacacagcucug

SEQ ID NO: 3830573 - RNA, 18 nt, Human
cucugaccccuccucacu

SEQ ID NO: 3830574 - RNA, 23 nt, Human
cucugaccgaaacagcgcugggu

SEQ ID NO: 3830575 - RNA, 15 nt, Human
cucugaccugcacug

SEQ ID NO: 3830576 - RNA, 16 nt, Human
cucugaccugcaggcc

SEQ ID NO: 3830577 - RNA, 13 nt, Human
cucugacucccaa

SEQ ID NO: 3830578 - RNA, 23 nt, Human
cucugacucccaaagagcugccu

SEQ ID NO: 3830579 - RNA, 13 nt, Human
cucugacuucugc

SEQ ID NO: 3830580 - RNA, 16 nt, Human
cucugagaagcucuga

SEQ ID NO: 3830581 - RNA, 18 nt, Human
cucugagaauuccaagga

SEQ ID NO: 3830582 - RNA, 23 nt, Human
cucugagacucgcgacaaugcaa

SEQ ID NO: 3830583 - RNA, 18 nt, Human
cucugagaggcccuggau

SEQ ID NO: 3830584 - RNA, 13 nt, Human
cucugagagucua

SEQ ID NO: 3830585 - RNA, 16 nt, Human
cucugagagucuagau

SEQ ID NO: 3830586 - RNA, 22 nt, Human
cucugagcccauguucugcccc

SEQ ID NO: 3830587 - RNA, 13 nt, Human
cucugagcgccuc

SEQ ID NO: 3830588 - RNA, 15 nt, Human
cucugagcgggaggc

SEQ ID NO: 3830589 - RNA, 11 nt, Human
cucugagcugu

SEQ ID NO: 3830590 - RNA, 13 nt, Human
cucugagcuguca

SEQ ID NO: 3830591 - RNA, 13 nt, Human
cucugagcuuugc

SEQ ID NO: 3830592 - RNA, 13 nt, Human
cucugaggaagcu

SEQ ID NO: 3830593 - RNA, 16 nt, Human
cucugaggacacuaac

SEQ ID NO: 3830594 - RNA, 16 nt, Human
cucugaggccagccug

SEQ ID NO: 3830595 - RNA, 17 nt, Human
cucugaggccagccugg

SEQ ID NO: 3830596 - RNA, 18 nt, Human
cucugaggccagccuggc

SEQ ID NO: 3830597 - RNA, 21 nt, Human
cucugaggccagccuggccuc

SEQ ID NO: 3830598 - RNA, 12 nt, Human
cucugaggcgcc

SEQ ID NO: 3830599 - RNA, 21 nt, Human
cucugaggcgccccaacccgu

SEQ ID NO: 3830600 - RNA, 19 nt, Human
cucugaggcucuuucuggg

SEQ ID NO: 3830601 - RNA, 19 nt, Human
cucugaggcuuccagagag

SEQ ID NO: 3830602 - RNA, 19 nt, Human
cucugagggaaagcccaga

SEQ ID NO: 3830603 - RNA, 12 nt, Human
cucugagggcuu

SEQ ID NO: 3830604 - RNA, 13 nt, Human
cucugagggcuuc

SEQ ID NO: 3830605 - RNA, 17 nt, Human
cucugagggcuuccuuu

SEQ ID NO: 3830606 - RNA, 21 nt, Human
cucugaggggcuaccaggaaa

SEQ ID NO: 3830607 - RNA, 17 nt, Human
cucugaguaucuccucg

SEQ ID NO: 3830608 - RNA, 15 nt, Human
cucugaguccuggcc

SEQ ID NO: 3830609 - RNA, 18 nt, Human
cucugaguccuggcccaa

SEQ ID NO: 3830610 - RNA, 23 nt, Human
cucugaguuccggcaccaguagc

SEQ ID NO: 3830611 - RNA, 14 nt, Human
cucugauaagagaa

SEQ ID NO: 3830612 - RNA, 14 nt, Human
cucugauacuuuuu

SEQ ID NO: 3830613 - RNA, 15 nt, Human
cucugauaggccaag

SEQ ID NO: 3830614 - RNA, 19 nt, Human
cucugauauuccaugaaug

SEQ ID NO: 3830615 - RNA, 15 nt, Human
cucugaucaaguauu

SEQ ID NO: 3830616 - RNA, 12 nt, Human
cucugaucccuc

SEQ ID NO: 3830617 - RNA, 22 nt, Human
cucugaucccucuacagagcuu

SEQ ID NO: 3830618 - RNA, 15 nt, Human
cucugaucuccaugg

SEQ ID NO: 3830619 - RNA, 18 nt, Human
cucugaugcagcuuauac

SEQ ID NO: 3830620 - RNA, 15 nt, Human
cucugaugcaucaga

SEQ ID NO: 3830621 - RNA, 15 nt, Human
cucugauguaaauga

SEQ ID NO: 3830622 - RNA, 18 nt, Human
cucugauuuauuuuguau

SEQ ID NO: 3830623 - RNA, 20 nt, Human
cucugauuuucaaagcuuuu

SEQ ID NO: 3830624 - RNA, 17 nt, Human
cucugcaaaaggagaga

SEQ ID NO: 3830625 - RNA, 18 nt, Human
cucugcaaaaggagagac

SEQ ID NO: 3830626 - RNA, 20 nt, Human
cucugcaaacugccuucuuc

SEQ ID NO: 3830627 - RNA, 23 nt, Human
cucugcaauuccccucugcugcu

SEQ ID NO: 3830628 - RNA, 16 nt, Human
cucugcacaagcugca

SEQ ID NO: 3830629 - RNA, 20 nt, Human
cucugcacaagcugcacccu

SEQ ID NO: 3830630 - RNA, 14 nt, Human
cucugcacccagaa

SEQ ID NO: 3830631 - RNA, 15 nt, Human
cucugcacccagaac

SEQ ID NO: 3830632 - RNA, 16 nt, Human
cucugcacccagaaca

SEQ ID NO: 3830633 - RNA, 17 nt, Human
cucugcacccagaacag

SEQ ID NO: 3830634 - RNA, 16 nt, Human
cucugcacccccauau

SEQ ID NO: 3830635 - RNA, 15 nt, Human
cucugcacuacuccu

SEQ ID NO: 3830636 - RNA, 20 nt, Human
cucugcacuacugacaugug

SEQ ID NO: 3830637 - RNA, 22 nt, Human
cucugcacuacugacauguggg

SEQ ID NO: 3830638 - RNA, 15 nt, Human
cucugcacuccccug

SEQ ID NO: 3830639 - RNA, 16 nt, Human
cucugcacuccccugc

SEQ ID NO: 3830640 - RNA, 17 nt, Human
cucugcacuccccugcu

SEQ ID NO: 3830641 - RNA, 18 nt, Human
cucugcacuccccugcug

SEQ ID NO: 3830642 - RNA, 20 nt, Human
cucugcacuccccugcuggg

SEQ ID NO: 3830643 - RNA, 18 nt, Human
cucugcagaaacuacuga

SEQ ID NO: 3830644 - RNA, 17 nt, Human
cucugcagacuucccag

SEQ ID NO: 3830645 - RNA, 17 nt, Human
cucugcagccagcccag

SEQ ID NO: 3830646 - RNA, 14 nt, Human
cucugcagccucag

SEQ ID NO: 3830647 - RNA, 11 nt, Human
cucugcagcug

SEQ ID NO: 3830648 - RNA, 12 nt, Human
cucugcagcuga

SEQ ID NO: 3830649 - RNA, 20 nt, Human
cucugcaggaaauggcugug

SEQ ID NO: 3830650 - RNA, 15 nt, Human
cucugcaggcaccuu

SEQ ID NO: 3830651 - RNA, 19 nt, Human
cucugcagggccgccaggg

SEQ ID NO: 3830652 - RNA, 17 nt, Human
cucugcaggucccuaau

SEQ ID NO: 3830653 - RNA, 18 nt, Human
cucugcaggucccuaaua

SEQ ID NO: 3830654 - RNA, 19 nt, Human
cucugcaggucccuaauaa

SEQ ID NO: 3830655 - RNA, 22 nt, Human
cucugcaggucccuaauaaagc

SEQ ID NO: 3830656 - RNA, 18 nt, Human
cucugcauccucuggagc

SEQ ID NO: 3830657 - RNA, 17 nt, Human
cucugcaucuacuccca

SEQ ID NO: 3830658 - RNA, 20 nt, Human
cucugcaugcggcccagccc

SEQ ID NO: 3830659 - RNA, 23 nt, Human
cucugcaugcggcccagcccggc

SEQ ID NO: 3830660 - RNA, 17 nt, Human
cucugcauuuaaaaaaa

SEQ ID NO: 3830661 - RNA, 19 nt, Human
cucugccaaaggaugugau

SEQ ID NO: 3830662 - RNA, 10 nt, Human
cucugccacc

SEQ ID NO: 3830663 - RNA, 11 nt, Human
cucugccacca

SEQ ID NO: 3830664 - RNA, 16 nt, Human
cucugccaccagagac

SEQ ID NO: 3830665 - RNA, 23 nt, Human
cucugccaccagagaccguccuc

SEQ ID NO: 3830666 - RNA, 17 nt, Human
cucugccacccuaccug

SEQ ID NO: 3830667 - RNA, 18 nt, Human
cucugccaccuccccuau

SEQ ID NO: 3830668 - RNA, 15 nt, Human
cucugccagcaaaga

SEQ ID NO: 3830669 - RNA, 13 nt, Human
cucugccaguccu

SEQ ID NO: 3830670 - RNA, 15 nt, Human
cucugccaguccugu

SEQ ID NO: 3830671 - RNA, 17 nt, Human
cucugcccagagcuggg

SEQ ID NO: 3830672 - RNA, 14 nt, Human
cucugcccagcuug

SEQ ID NO: 3830673 - RNA, 15 nt, Human
cucugcccagcuugg

SEQ ID NO: 3830674 - RNA, 17 nt, Human
cucugcccagcuugggc

SEQ ID NO: 3830675 - RNA, 18 nt, Human
cucugcccagcuugggcc

SEQ ID NO: 3830676 - RNA, 14 nt, Human
cucugcccagcuuu

SEQ ID NO: 3830677 - RNA, 16 nt, Human
cucugccccagaggcc

SEQ ID NO: 3830678 - RNA, 13 nt, Human
cucugccccagcu

SEQ ID NO: 3830679 - RNA, 16 nt, Human
cucugccccagcucug

SEQ ID NO: 3830680 - RNA, 17 nt, Human
cucugccccagcucugg

SEQ ID NO: 3830681 - RNA, 19 nt, Human
cucugccccagcucuggcu

SEQ ID NO: 3830682 - RNA, 13 nt, Human
cucugccccaguc

SEQ ID NO: 3830683 - RNA, 19 nt, Human
cucugccccucccccagcc

SEQ ID NO: 3830684 - RNA, 22 nt, Human
cucugcccuaaugcgcaggcug

SEQ ID NO: 3830685 - RNA, 22 nt, Human
cucugcccucauuacugggccu

SEQ ID NO: 3830686 - RNA, 14 nt, Human
cucugcccuccaag

SEQ ID NO: 3830687 - RNA, 16 nt, Human
cucugcccuccaagac

SEQ ID NO: 3830688 - RNA, 20 nt, Human
cucugcccucccuccuuccu

SEQ ID NO: 3830689 - RNA, 21 nt, Human
cucugcccuuguucccuaggg

SEQ ID NO: 3830690 - RNA, 18 nt, Human
cucugccgcaauacagga

SEQ ID NO: 3830691 - RNA, 15 nt, Human
cucugccgcuaccuc

SEQ ID NO: 3830692 - RNA, 21 nt, Human
cucugccgcuaccucccuccc

SEQ ID NO: 3830693 - RNA, 14 nt, Human
cucugccggcucuu

SEQ ID NO: 3830694 - RNA, 14 nt, Human
cucugccucccauc

SEQ ID NO: 3830695 - RNA, 17 nt, Human
cucugccucccaucacc

SEQ ID NO: 3830696 - RNA, 14 nt, Human
cucugccucccuca

SEQ ID NO: 3830697 - RNA, 16 nt, Human
cucugccuccuggguu

SEQ ID NO: 3830698 - RNA, 19 nt, Human
cucugccucugacacacag

SEQ ID NO: 3830699 - RNA, 17 nt, Human
cucugccucugccugca

SEQ ID NO: 3830700 - RNA, 22 nt, Human
cucugccugaagucacacagug

SEQ ID NO: 3830701 - RNA, 16 nt, Human
cucugccugcauucug

SEQ ID NO: 3830702 - RNA, 22 nt, Human
cucugccugcauucugccgugu

SEQ ID NO: 3830703 - RNA, 11 nt, Human
cucugccugcc

SEQ ID NO: 3830704 - RNA, 15 nt, Human
cucugccugccccgc

SEQ ID NO: 3830705 - RNA, 16 nt, Human
cucugccugucccucu

SEQ ID NO: 3830706 - RNA, 18 nt, Human
cucugccugucccucuca

SEQ ID NO: 3830707 - RNA, 20 nt, Human
cucugccuucgaggucagag

SEQ ID NO: 3830708 - RNA, 13 nt, Human
cucugccuugccu

SEQ ID NO: 3830709 - RNA, 15 nt, Human
cucugccuugccuuu

SEQ ID NO: 3830710 - RNA, 23 nt, Human
cucugccuugccuuuagccccuc

SEQ ID NO: 3830711 - RNA, 15 nt, Human
cucugcggaccccag

SEQ ID NO: 3830712 - RNA, 18 nt, Human
cucugcggagcacacugg

SEQ ID NO: 3830713 - RNA, 22 nt, Human
cucugcgucgguccuggugccc

SEQ ID NO: 3830714 - RNA, 22 nt, Human
ccccuguggaugcugcugcccc

SEQ ID NO: 3830715 - RNA, 12 nt, Human
ccccugugggga

SEQ ID NO: 3830716 - RNA, 20 nt, Human
ccccuguuucaaucacuguc

SEQ ID NO: 3830717 - RNA, 14 nt, Human
ccccuuaccacugc

SEQ ID NO: 3830718 - RNA, 13 nt, Human
ccccuuagacaga

SEQ ID NO: 3830719 - RNA, 17 nt, Human
ccccuuagacagaggcc

SEQ ID NO: 3830720 - RNA, 10 nt, Human
ccccuuagau

SEQ ID NO: 3830721 - RNA, 20 nt, Human
ccccuuagccaguuguauau

SEQ ID NO: 3830722 - RNA, 14 nt, Human
ccccuuauccagga

SEQ ID NO: 3830723 - RNA, 15 nt, Human
ccccuuauccucccu

SEQ ID NO: 3830724 - RNA, 14 nt, Human
ccccuucacaaagc

SEQ ID NO: 3830725 - RNA, 17 nt, Human
ccccuuccaaauaauaa

SEQ ID NO: 3830726 - RNA, 14 nt, Human
ccccuuccaugugg

SEQ ID NO: 3830727 - RNA, 15 nt, Human
ccccuuccccacugc

SEQ ID NO: 3830728 - RNA, 20 nt, Human
ccccuuccuaauuccacagc

SEQ ID NO: 3830729 - RNA, 22 nt, Human
ccccuuccuaauuccacagcug

SEQ ID NO: 3830730 - RNA, 14 nt, Human
ccccuuccugggca

SEQ ID NO: 3830731 - RNA, 13 nt, Human
ccccuuccuuuua

SEQ ID NO: 3830732 - RNA, 17 nt, Human
ccccuucgcuccugugu

SEQ ID NO: 3830733 - RNA, 13 nt, Human
ccccuucucccac

SEQ ID NO: 3830734 - RNA, 16 nt, Human
ccccuucucugcucca

SEQ ID NO: 3830735 - RNA, 16 nt, Human
ccccuucugacccaug

SEQ ID NO: 3830736 - RNA, 19 nt, Human
ccccuucugcucagcucug

SEQ ID NO: 3830737 - RNA, 22 nt, Human
ccccuucugggcaucuguucug

SEQ ID NO: 3830738 - RNA, 22 nt, Human
ccccuugaaggagaaucaucag

SEQ ID NO: 3830739 - RNA, 19 nt, Human
ccccuugccagcugcugag

SEQ ID NO: 3830740 - RNA, 21 nt, Human
ccccuugcccagggcucagcc

SEQ ID NO: 3830741 - RNA, 17 nt, Human
ccccuugcccuugcccu

SEQ ID NO: 3830742 - RNA, 21 nt, Human
ccccuugcccuugcccugacc

SEQ ID NO: 3830743 - RNA, 23 nt, Human
ccccuugcccuugcccugaccuc

SEQ ID NO: 3830744 - RNA, 24 nt, Human
ccccuugcccuugcccugaccucc

SEQ ID NO: 3830745 - RNA, 16 nt, Human
ccccuugccugugcca

SEQ ID NO: 3830746 - RNA, 19 nt, Human
ccccuugggcccacaccuc

SEQ ID NO: 3830747 - RNA, 24 nt, Human
ccccuuucagaugucuucugccug

SEQ ID NO: 3830748 - RNA, 10 nt, Human
ccccuuuccu

SEQ ID NO: 3830749 - RNA, 13 nt, Human
ccccuuucuuccu

SEQ ID NO: 3830750 - RNA, 15 nt, Human
ccccuuucuuccuca

SEQ ID NO: 3830751 - RNA, 20 nt, Human
ccccuuugaugauuaauuca

SEQ ID NO: 3830752 - RNA, 15 nt, Human
ccccuuugggcccug

SEQ ID NO: 3830753 - RNA, 18 nt, Human
ccccuuugggcccugcau

SEQ ID NO: 3830754 - RNA, 12 nt, Human
ccccuuugugcu

SEQ ID NO: 3830755 - RNA, 14 nt, Human
ccccuuuucugcau

SEQ ID NO: 3830756 - RNA, 16 nt, Human
ccccuuuucugcauuu

SEQ ID NO: 3830757 - RNA, 23 nt, Human
ccccuuuucuuuucuacccuagc

SEQ ID NO: 3830758 - RNA, 18 nt, Human
ccccuuuuuuuccuuuuu

SEQ ID NO: 3830759 - RNA, 21 nt, Human
cccgaaagaggcacccuucca

SEQ ID NO: 3830760 - RNA, 17 nt, Human
cccgaaaggucaccuca

SEQ ID NO: 3830761 - RNA, 20 nt, Human
cccgaaaggucaccucacuc

SEQ ID NO: 3830762 - RNA, 15 nt, Human
cccgaagggccccca

SEQ ID NO: 3830763 - RNA, 14 nt, Human
cccgaauagcuggg

SEQ ID NO: 3830764 - RNA, 22 nt, Human
cccgaauagcugggacuacagg

SEQ ID NO: 3830765 - RNA, 20 nt, Human
cccgacauggacccggagcu

SEQ ID NO: 3830766 - RNA, 18 nt, Human
cccgacgccacagcccag

SEQ ID NO: 3830767 - RNA, 23 nt, Human
cccgacgccacagcccagccacg

SEQ ID NO: 3830768 - RNA, 15 nt, Human
cccgacuccagccag

SEQ ID NO: 3830769 - RNA, 13 nt, Human
cccgacuugcugu

SEQ ID NO: 3830770 - RNA, 20 nt, Human
cccgagaaaacaaacccagg

SEQ ID NO: 3830771 - RNA, 18 nt, Human
cccgagacggcacugaga

SEQ ID NO: 3830772 - RNA, 16 nt, Human
cccgagcagcugagca

SEQ ID NO: 3830773 - RNA, 13 nt, Human
cccgagccuggcu

SEQ ID NO: 3830774 - RNA, 14 nt, Human
cccgagcugucccc

SEQ ID NO: 3830775 - RNA, 18 nt, Human
cccgaggacccagaccca

SEQ ID NO: 3830776 - RNA, 19 nt, Human
cccgaggccgcgugcguga

SEQ ID NO: 3830777 - RNA, 14 nt, Human
cccgaggcugccca

SEQ ID NO: 3830778 - RNA, 23 nt, Human
cccgagggaggggaagcuucugu

SEQ ID NO: 3830779 - RNA, 22 nt, Human
cccgagggaugaugccacacca

SEQ ID NO: 3830780 - RNA, 19 nt, Human
cccgaggguugauuaaggc

SEQ ID NO: 3830781 - RNA, 19 nt, Human
cucuccccccccccuccaa

SEQ ID NO: 3830782 - RNA, 18 nt, Human
cucuccccucaaagucug

SEQ ID NO: 3830783 - RNA, 13 nt, Human
cucuccccuccag

SEQ ID NO: 3830784 - RNA, 15 nt, Human
cucuccccuccagcc

SEQ ID NO: 3830785 - RNA, 18 nt, Human
cucuccccuccagccuuu

SEQ ID NO: 3830786 - RNA, 17 nt, Human
cucuccccugaccugug

SEQ ID NO: 3830787 - RNA, 17 nt, Human
cucucccgguucuucca

SEQ ID NO: 3830788 - RNA, 19 nt, Human
cucucccgguucuuccagu

SEQ ID NO: 3830789 - RNA, 21 nt, Human
cucucccgucagggcccaagu

SEQ ID NO: 3830790 - RNA, 17 nt, Human
cucucccuccccugcca

SEQ ID NO: 3830791 - RNA, 23 nt, Human
cucucccucuaggcucugccuuc

SEQ ID NO: 3830792 - RNA, 12 nt, Human
cucucccucugg

SEQ ID NO: 3830793 - RNA, 19 nt, Human
cucucccucuggcccugcc

SEQ ID NO: 3830794 - RNA, 16 nt, Human
cucucccucuucucaa

SEQ ID NO: 3830795 - RNA, 13 nt, Human
cucucccugcugc

SEQ ID NO: 3830796 - RNA, 14 nt, Human
cucucccuucccuc

SEQ ID NO: 3830797 - RNA, 16 nt, Human
cucucccuucccuccu

SEQ ID NO: 3830798 - RNA, 18 nt, Human
cucucccuugggcucuga

SEQ ID NO: 3830799 - RNA, 21 nt, Human
cucuccgaccagacaccuuga

SEQ ID NO: 3830800 - RNA, 24 nt, Human
cucuccgacucacaccacuagccu

SEQ ID NO: 3830801 - RNA, 15 nt, Human
cucuccggucucucu

SEQ ID NO: 3830802 - RNA, 17 nt, Human
cucuccuacucggcucu

SEQ ID NO: 3830803 - RNA, 18 nt, Human
cucuccuacucggcucug

SEQ ID NO: 3830804 - RNA, 21 nt, Human
cucuccuagagacagaagcag

SEQ ID NO: 3830805 - RNA, 22 nt, Human
cucuccuaggcauucuggaccu

SEQ ID NO: 3830806 - RNA, 20 nt, Human
cucuccucauguucugcuuu

SEQ ID NO: 3830807 - RNA, 12 nt, Human
cucuccuccaga

SEQ ID NO: 3830808 - RNA, 20 nt, Human
cucuccuccuuuucacaguu

SEQ ID NO: 3830809 - RNA, 15 nt, Human
cucuccucugccuca

SEQ ID NO: 3830810 - RNA, 15 nt, Human
cucuccucugcugcu

SEQ ID NO: 3830811 - RNA, 12 nt, Human
cucuccucuucu

SEQ ID NO: 3830812 - RNA, 15 nt, Human
cucuccucuugccac

SEQ ID NO: 3830813 - RNA, 19 nt, Human
cucuccucuugccacugcc

SEQ ID NO: 3830814 - RNA, 21 nt, Human
cucuccugacuuuuaauguca

SEQ ID NO: 3830815 - RNA, 12 nt, Human
cucuccugccac

SEQ ID NO: 3830816 - RNA, 13 nt, Human
cucuccuggagga

SEQ ID NO: 3830817 - RNA, 20 nt, Human
cucuccuggccuauccgcug

SEQ ID NO: 3830818 - RNA, 15 nt, Human
cucuccugggcagcu

SEQ ID NO: 3830819 - RNA, 20 nt, Human
cucuccugggcagcugccuc

SEQ ID NO: 3830820 - RNA, 23 nt, Human
cucuccugggccccucccuaccu

SEQ ID NO: 3830821 - RNA, 13 nt, Human
cucuccuguaccu

SEQ ID NO: 3830822 - RNA, 12 nt, Human
cucuccugucca

SEQ ID NO: 3830823 - RNA, 21 nt, Human
cucuccuguccaaccuaaccc

SEQ ID NO: 3830824 - RNA, 15 nt, Human
cucuccugucucccu

SEQ ID NO: 3830825 - RNA, 18 nt, Human
cucuccuuaaaugcuucu

SEQ ID NO: 3830826 - RNA, 14 nt, Human
cucuccuuccugug

SEQ ID NO: 3830827 - RNA, 14 nt, Human
cucuccuugagugu

SEQ ID NO: 3830828 - RNA, 16 nt, Human
cucuccuuucuuucua

SEQ ID NO: 3830829 - RNA, 18 nt, Human
cucuccuuuguauauuau

SEQ ID NO: 3830830 - RNA, 22 nt, Human
cucuccuuuguauauuauuucu

SEQ ID NO: 3830831 - RNA, 10 nt, Human
cucuccuuuu

SEQ ID NO: 3830832 - RNA, 11 nt, Human
cucuccuuuuc

SEQ ID NO: 3830833 - RNA, 18 nt, Human
cucuccuuuucuuuuguu

SEQ ID NO: 3830834 - RNA, 19 nt, Human
cucuccuuuucuuuuguua

SEQ ID NO: 3830835 - RNA, 15 nt, Human
cucucgcacaccucu

SEQ ID NO: 3830836 - RNA, 18 nt, Human
cucucgcaccuuuccaaa

SEQ ID NO: 3830837 - RNA, 15 nt, Human
cucucgcaucuuccc

SEQ ID NO: 3830838 - RNA, 16 nt, Human
cucucgcaucuuccca

SEQ ID NO: 3830839 - RNA, 15 nt, Human
cucucgcggccucuu

SEQ ID NO: 3830840 - RNA, 12 nt, Human
cucucggaacug

SEQ ID NO: 3830841 - RNA, 21 nt, Human
cucucggaacugcaugcugcu

SEQ ID NO: 3830842 - RNA, 22 nt, Human
cucucggaaggcuggcugggca

SEQ ID NO: 3830843 - RNA, 19 nt, Human
cucucggaguaucugggaa

SEQ ID NO: 3830844 - RNA, 20 nt, Human
cucucggaguaucugggaac

SEQ ID NO: 3830845 - RNA, 14 nt, Human
cucucggcucccca

SEQ ID NO: 3830846 - RNA, 19 nt, Human
cucucggguugugugucug

SEQ ID NO: 3830847 - RNA, 16 nt, Human
cucucguaacugguuu

SEQ ID NO: 3830848 - RNA, 18 nt, Human
cucucuaaccuccuuuac

SEQ ID NO: 3830849 - RNA, 19 nt, Human
cucucuacagagaggaaau

SEQ ID NO: 3830850 - RNA, 15 nt, Human
cucucuacagugcca

SEQ ID NO: 3830851 - RNA, 17 nt, Human
cucucuacccagcccau

SEQ ID NO: 3830852 - RNA, 22 nt, Human
cucucuacccagcccaucuugc

SEQ ID NO: 3830853 - RNA, 20 nt, Human
cucucuacuccuaccucagc

SEQ ID NO: 3830854 - RNA, 22 nt, Human
cucucuagcacaauuugcacua

SEQ ID NO: 3830855 - RNA, 14 nt, Human
cucucuaggccucu

SEQ ID NO: 3830856 - RNA, 19 nt, Human
cucucuaggccucuccagu

SEQ ID NO: 3830857 - RNA, 20 nt, Human
cucucuauuaccacugaaga

SEQ ID NO: 3830858 - RNA, 14 nt, Human
cucucucacuccuu

SEQ ID NO: 3830859 - RNA, 11 nt, Human
cccggcacccc

SEQ ID NO: 3830860 - RNA, 15 nt, Human
cccggcacccccugc

SEQ ID NO: 3830861 - RNA, 16 nt, Human
cccggcacccccugca

SEQ ID NO: 3830862 - RNA, 18 nt, Human
cccggcacccccugcagc

SEQ ID NO: 3830863 - RNA, 12 nt, Human
cccggcaggccc

SEQ ID NO: 3830864 - RNA, 12 nt, Human
cccggccaccuc

SEQ ID NO: 3830865 - RNA, 12 nt, Human
cccggcccccug

SEQ ID NO: 3830866 - RNA, 18 nt, Human
cccggccccggccccagc

SEQ ID NO: 3830867 - RNA, 15 nt, Human
cccggccccugcugg

SEQ ID NO: 3830868 - RNA, 16 nt, Human
cccggcccugccugcu

SEQ ID NO: 3830869 - RNA, 16 nt, Human
cccggccgccccuccu

SEQ ID NO: 3830870 - RNA, 17 nt, Human
cccggccgcuccaccag

SEQ ID NO: 3830871 - RNA, 17 nt, Human
cccggccugcucccagc

SEQ ID NO: 3830872 - RNA, 21 nt, Human
cccggccugcucccagcagcc

SEQ ID NO: 3830873 - RNA, 14 nt, Human
cccggcgcccucug

SEQ ID NO: 3830874 - RNA, 19 nt, Human
cccggcgcccucuguccug

SEQ ID NO: 3830875 - RNA, 20 nt, Human
cccggcgcccucuguccuga

SEQ ID NO: 3830876 - RNA, 12 nt, Human
cccggcuccagg

SEQ ID NO: 3830877 - RNA, 14 nt, Human
cccggcuccaggcu

SEQ ID NO: 3830878 - RNA, 17 nt, Human
cccggcucccaccgagg

SEQ ID NO: 3830879 - RNA, 15 nt, Human
cccggcuccugguca

SEQ ID NO: 3830880 - RNA, 22 nt, Human
cccggcucugugggugaugggg

SEQ ID NO: 3830881 - RNA, 16 nt, Human
cccggcugcagaggcc

SEQ ID NO: 3830882 - RNA, 12 nt, Human
cccggcugcgga

SEQ ID NO: 3830883 - RNA, 23 nt, Human
cccggcugguuuuguaagaugcu

SEQ ID NO: 3830884 - RNA, 12 nt, Human
cccgggaagcaa

SEQ ID NO: 3830885 - RNA, 21 nt, Human
cccgggaagggggcugggaca

SEQ ID NO: 3830886 - RNA, 14 nt, Human
cccgggagcggagg

SEQ ID NO: 3830887 - RNA, 14 nt, Human
cccgggagcucagg

SEQ ID NO: 3830888 - RNA, 23 nt, Human
cccgggagggcggcacaggucgg

SEQ ID NO: 3830889 - RNA, 21 nt, Human
cccgggcaagacuuuucuuug

SEQ ID NO: 3830890 - RNA, 15 nt, Human
cccgggccagggcug

SEQ ID NO: 3830891 - RNA, 13 nt, Human
cccgggcccagag

SEQ ID NO: 3830892 - RNA, 20 nt, Human
cccgggcccguugaggauga

SEQ ID NO: 3830893 - RNA, 22 nt, Human
cccgggcccguugaggaugagg

SEQ ID NO: 3830894 - RNA, 19 nt, Human
cccgggcgcggccagcccc

SEQ ID NO: 3830895 - RNA, 21 nt, Human
cccgggcucagggaccacagc

SEQ ID NO: 3830896 - RNA, 12 nt, Human
cccgggcucugc

SEQ ID NO: 3830897 - RNA, 15 nt, Human
cccgggcucugccuc

SEQ ID NO: 3830898 - RNA, 21 nt, Human
cccggggacccugugacaugg

SEQ ID NO: 3830899 - RNA, 12 nt, Human
cccggggcagca

SEQ ID NO: 3830900 - RNA, 12 nt, Human
cccggggcagcu

SEQ ID NO: 3830901 - RNA, 14 nt, Human
cccggggcagcugc

SEQ ID NO: 3830902 - RNA, 21 nt, Human
cccggggcagcugccagagaa

SEQ ID NO: 3830903 - RNA, 16 nt, Human
cccggggccagcacuu

SEQ ID NO: 3830904 - RNA, 13 nt, Human
cccggggcccagg

SEQ ID NO: 3830905 - RNA, 14 nt, Human
cccggggcccaggg

SEQ ID NO: 3830906 - RNA, 16 nt, Human
cccggggcccagggca

SEQ ID NO: 3830907 - RNA, 15 nt, Human
cccggggcccagggg

SEQ ID NO: 3830908 - RNA, 19 nt, Human
cccgggggugggggguggg

SEQ ID NO: 3830909 - RNA, 17 nt, Human
cccgggguccuguggca

SEQ ID NO: 3830910 - RNA, 21 nt, Human
cccggggugcccacaggccgc

SEQ ID NO: 3830911 - RNA, 18 nt, Human
cccggguugggucaccag

SEQ ID NO: 3830912 - RNA, 17 nt, Human
cccggucccgaguacag

SEQ ID NO: 3830913 - RNA, 22 nt, Human
cccggucccuugagaccucagc

SEQ ID NO: 3830914 - RNA, 18 nt, Human
cccgguggcggccccagc

SEQ ID NO: 3830915 - RNA, 22 nt, Human
cccgucagggcccaagucccug

SEQ ID NO: 3830916 - RNA, 18 nt, Human
cccguccacggcucuagg

SEQ ID NO: 3830917 - RNA, 14 nt, Human
cccguccugccugu

SEQ ID NO: 3830918 - RNA, 16 nt, Human
cccguccugccugugg

SEQ ID NO: 3830919 - RNA, 16 nt, Human
cccgucucucucccau

SEQ ID NO: 3830920 - RNA, 19 nt, Human
cccgucucucucccaugga

SEQ ID NO: 3830921 - RNA, 17 nt, Human
cccgucuggcccaccag

SEQ ID NO: 3830922 - RNA, 12 nt, Human
cccgucuucagc

SEQ ID NO: 3830923 - RNA, 15 nt, Human
cccgugaccugguca

SEQ ID NO: 3830924 - RNA, 16 nt, Human
cccgugaccuggucag

SEQ ID NO: 3830925 - RNA, 16 nt, Human
cccgugcaaaacaugc

SEQ ID NO: 3830926 - RNA, 22 nt, Human
cccguggccccagccuggccca

SEQ ID NO: 3830927 - RNA, 14 nt, Human
cccgugggcucccg

SEQ ID NO: 3830928 - RNA, 21 nt, Human
cccguggggccggggcuucug

SEQ ID NO: 3830929 - RNA, 14 nt, Human
cccguguggccccu

SEQ ID NO: 3830930 - RNA, 23 nt, Human
cccguguuccccucuugucuccc

SEQ ID NO: 3830931 - RNA, 16 nt, Human
cccguuacagcucccc

SEQ ID NO: 3830932 - RNA, 19 nt, Human
cccguugucucccuggccc

SEQ ID NO: 3830933 - RNA, 20 nt, Human
cccguugucucccuggcccu

SEQ ID NO: 3830934 - RNA, 17 nt, Human
cccuaaaguguauuuuu

SEQ ID NO: 3830935 - RNA, 22 nt, Human
cccuaaaguguauuuuuuuacu

SEQ ID NO: 3830936 - RNA, 15 nt, Human
cccuaaccaaguucc

SEQ ID NO: 3830937 - RNA, 17 nt, Human
cccuaaccccuuccaga

SEQ ID NO: 3830938 - RNA, 21 nt, Human
cccuaaccccuuccagaucac

SEQ ID NO: 3830939 - RNA, 12 nt, Human
cccuaagagacu

SEQ ID NO: 3830940 - RNA, 20 nt, Human
cccuaagcagaaagugccuu

SEQ ID NO: 3830941 - RNA, 21 nt, Human
cccuaagcagaaagugccuuu

SEQ ID NO: 3830942 - RNA, 12 nt, Human
cugaagccucug

SEQ ID NO: 3830943 - RNA, 14 nt, Human
cugaagccucuggg

SEQ ID NO: 3830944 - RNA, 19 nt, Human
cugaagccuuucuuuugga

SEQ ID NO: 3830945 - RNA, 22 nt, Human
cugaagcuaucguaaaauuaag

SEQ ID NO: 3830946 - RNA, 14 nt, Human
cugaagcugccugc

SEQ ID NO: 3830947 - RNA, 15 nt, Human
cugaagcugccugcu

SEQ ID NO: 3830948 - RNA, 16 nt, Human
cugaagcugccugcuu

SEQ ID NO: 3830949 - RNA, 21 nt, Human
cugaagcuuauuaaugcuaag

SEQ ID NO: 3830950 - RNA, 15 nt, Human
cugaagcuugacucc

SEQ ID NO: 3830951 - RNA, 20 nt, Human
cugaagcuugacucccaagu

SEQ ID NO: 3830952 - RNA, 14 nt, Human
cugaagcuuuacca

SEQ ID NO: 3830953 - RNA, 14 nt, Human
cugaaggaaaaaca

SEQ ID NO: 3830954 - RNA, 18 nt, Human
cugaaggaaaaacacaag

SEQ ID NO: 3830955 - RNA, 22 nt, Human
cugaaggaaaaacacaagcaaa

SEQ ID NO: 3830956 - RNA, 22 nt, Human
cugaaggaauaaauugcuccuu

SEQ ID NO: 3830957 - RNA, 20 nt, Human
cugaaggacacuuccugccu

SEQ ID NO: 3830958 - RNA, 19 nt, Human
cugaaggacauugcggaca

SEQ ID NO: 3830959 - RNA, 14 nt, Human
cugaaggacuguga

SEQ ID NO: 3830960 - RNA, 20 nt, Human
cugaaggagauuuuccuucc

SEQ ID NO: 3830961 - RNA, 12 nt, Human
cugaaggagccc

SEQ ID NO: 3830962 - RNA, 21 nt, Human
cugaaggagccccauuccugg

SEQ ID NO: 3830963 - RNA, 17 nt, Human
cugaaggaggccaccuc

SEQ ID NO: 3830964 - RNA, 13 nt, Human
cugaaggccccgc

SEQ ID NO: 3830965 - RNA, 19 nt, Human
cugaaggccugagguuacu

SEQ ID NO: 3830966 - RNA, 13 nt, Human
cugaaggccuggc

SEQ ID NO: 3830967 - RNA, 21 nt, Human
cugaaggccuggcccacagca

SEQ ID NO: 3830968 - RNA, 17 nt, Human
cugaaggcuaaaaagca

SEQ ID NO: 3830969 - RNA, 13 nt, Human
cugaaggcuuuca

SEQ ID NO: 3830970 - RNA, 20 nt, Human
cugaaggcuuucagggccuc

SEQ ID NO: 3830971 - RNA, 14 nt, Human
cugaaggcuuugug

SEQ ID NO: 3830972 - RNA, 11 nt, Human
cugaagggagg

SEQ ID NO: 3830973 - RNA, 18 nt, Human
cugaagggcauucuuucc

SEQ ID NO: 3830974 - RNA, 20 nt, Human
cugaagggguuuucuugaua

SEQ ID NO: 3830975 - RNA, 19 nt, Human
cugaagguaaaauugaaag

SEQ ID NO: 3830976 - RNA, 17 nt, Human
cugaagguuguggccuu

SEQ ID NO: 3830977 - RNA, 16 nt, Human
cugaaguacuaacaca

SEQ ID NO: 3830978 - RNA, 15 nt, Human
cugaagucacacagu

SEQ ID NO: 3830979 - RNA, 19 nt, Human
cugaagucacaucacagga

SEQ ID NO: 3830980 - RNA, 21 nt, Human
cugaagucacaucacaggaca

SEQ ID NO: 3830981 - RNA, 22 nt, Human
cugaagucacaucacaggacac

SEQ ID NO: 3830982 - RNA, 13 nt, Human
cugaagucacugc

SEQ ID NO: 3830983 - RNA, 22 nt, Human
cugaagucacugcacagugcau

SEQ ID NO: 3830984 - RNA, 14 nt, Human
cugaagucagaucu

SEQ ID NO: 3830985 - RNA, 16 nt, Human
cugaagucagaucugc

SEQ ID NO: 3830986 - RNA, 21 nt, Human
cugaagucagaucugccuaag

SEQ ID NO: 3830987 - RNA, 14 nt, Human
cugaagucaguucu

SEQ ID NO: 3830988 - RNA, 14 nt, Human
cugaagucuguauu

SEQ ID NO: 3830989 - RNA, 16 nt, Human
cugaagugcauccaaa

SEQ ID NO: 3830990 - RNA, 17 nt, Human
cugaagugcauccaaag

SEQ ID NO: 3830991 - RNA, 19 nt, Human
cugaagugcauccaaaggu

SEQ ID NO: 3830992 - RNA, 21 nt, Human
cugaaguguuucacgagagcc

SEQ ID NO: 3830993 - RNA, 20 nt, Human
cugaaguuauauuuccuaua

SEQ ID NO: 3830994 - RNA, 17 nt, Human
cugaaguucagcugcau

SEQ ID NO: 3830995 - RNA, 18 nt, Human
cugaaguugcagauguua

SEQ ID NO: 3830996 - RNA, 13 nt, Human
cugaaguuugaua

SEQ ID NO: 3830997 - RNA, 22 nt, Human
cugaaguuugauaaauaguguu

SEQ ID NO: 3830998 - RNA, 13 nt, Human
cugaauaaagcaa

SEQ ID NO: 3830999 - RNA, 18 nt, Human
cugaauaaaguguaacaa

SEQ ID NO: 3831000 - RNA, 12 nt, Human
cugaauaaaugg

SEQ ID NO: 3831001 - RNA, 14 nt, Human
cugaauaaauggua

SEQ ID NO: 3831002 - RNA, 17 nt, Human
cugaauaaaugguagua

SEQ ID NO: 3831003 - RNA, 20 nt, Human
cugaauaacauuuguguggu

SEQ ID NO: 3831004 - RNA, 11 nt, Human
cugaauaauaa

SEQ ID NO: 3831005 - RNA, 23 nt, Human
cugagcccgggcugccugggcug

SEQ ID NO: 3831006 - RNA, 19 nt, Human
cugagcccgguaagagcaa

SEQ ID NO: 3831007 - RNA, 20 nt, Human
cugagcccgguaagagcaaa

SEQ ID NO: 3831008 - RNA, 18 nt, Human
cugagcccuacucccugc

SEQ ID NO: 3831009 - RNA, 21 nt, Human
cugagcccuacucccugcaga

SEQ ID NO: 3831010 - RNA, 14 nt, Human
cugagcccuggcag

SEQ ID NO: 3831011 - RNA, 16 nt, Human
cugagccgcagagaag

SEQ ID NO: 3831012 - RNA, 18 nt, Human
cugagccggccccaggcu

SEQ ID NO: 3831013 - RNA, 23 nt, Human
cugagccggccccaggcucgugg

SEQ ID NO: 3831014 - RNA, 17 nt, Human
cugagccuacagaugaa

SEQ ID NO: 3831015 - RNA, 21 nt, Human
cugagccucucaccuguacuc

SEQ ID NO: 3831016 - RNA, 15 nt, Human
cugagccugcaggga

SEQ ID NO: 3831017 - RNA, 13 nt, Human
cugagccugccga

SEQ ID NO: 3831018 - RNA, 15 nt, Human
cugagccugccgagc

SEQ ID NO: 3831019 - RNA, 19 nt, Human
cugagccugccgagcaacc

SEQ ID NO: 3831020 - RNA, 14 nt, Human
cugagccuggccag

SEQ ID NO: 3831021 - RNA, 15 nt, Human
cugagccuggccagc

SEQ ID NO: 3831022 - RNA, 22 nt, Human
cugagccuggcccauagaaaca

SEQ ID NO: 3831023 - RNA, 14 nt, Human
cugagccuggcugg

SEQ ID NO: 3831024 - RNA, 13 nt, Human
cugagccuucuga

SEQ ID NO: 3831025 - RNA, 15 nt, Human
cugagccuucugagc

SEQ ID NO: 3831026 - RNA, 15 nt, Human
cugagccuuguaauu

SEQ ID NO: 3831027 - RNA, 13 nt, Human
cugagcgccucca

SEQ ID NO: 3831028 - RNA, 22 nt, Human
cugagcgccuccauccaaggcc

SEQ ID NO: 3831029 - RNA, 21 nt, Human
cugagcgccuggauuucuggu

SEQ ID NO: 3831030 - RNA, 22 nt, Human
cugagcgccuggguccagggga

SEQ ID NO: 3831031 - RNA, 14 nt, Human
cugagcgcuccugc

SEQ ID NO: 3831032 - RNA, 13 nt, Human
cugagcgggaggc

SEQ ID NO: 3831033 - RNA, 15 nt, Human
cugagcgggaggcag

SEQ ID NO: 3831034 - RNA, 18 nt, Human
cugagcguccagaaaugg

SEQ ID NO: 3831035 - RNA, 13 nt, Human
cugagcuauuuca

SEQ ID NO: 3831036 - RNA, 17 nt, Human
cugagcucagcguggag

SEQ ID NO: 3831037 - RNA, 17 nt, Human
cugagcuccagcuccuu

SEQ ID NO: 3831038 - RNA, 22 nt, Human
cugagcuccaugugcccccucu

SEQ ID NO: 3831039 - RNA, 16 nt, Human
cugagcuccucugggc

SEQ ID NO: 3831040 - RNA, 17 nt, Human
cugagcuccucugggca

SEQ ID NO: 3831041 - RNA, 20 nt, Human
cugagcuccucugggcagga

SEQ ID NO: 3831042 - RNA, 12 nt, Human
cugagcuccugu

SEQ ID NO: 3831043 - RNA, 17 nt, Human
cugagcuccuguccccu

SEQ ID NO: 3831044 - RNA, 17 nt, Human
cugagcucgguggaccc

SEQ ID NO: 3831045 - RNA, 18 nt, Human
cugagcucgguggaccca

SEQ ID NO: 3831046 - RNA, 15 nt, Human
cugagcucugagagg

SEQ ID NO: 3831047 - RNA, 14 nt, Human
cugagcugagccag

SEQ ID NO: 3831048 - RNA, 18 nt, Human
cugagcugaggcagcagu

SEQ ID NO: 3831049 - RNA, 13 nt, Human
cugagcugccagu

SEQ ID NO: 3831050 - RNA, 14 nt, Human
cugagcugccagug

SEQ ID NO: 3831051 - RNA, 22 nt, Human
cugagcugcccacagcaggcca

SEQ ID NO: 3831052 - RNA, 17 nt, Human
cugagcuggccucucac

SEQ ID NO: 3831053 - RNA, 13 nt, Human
cugagcugugcag

SEQ ID NO: 3831054 - RNA, 20 nt, Human
cugagcuuggaagcuucugg

SEQ ID NO: 3831055 - RNA, 11 nt, Human
cugagcuuuau

SEQ ID NO: 3831056 - RNA, 15 nt, Human
cugagcuuucugcua

SEQ ID NO: 3831057 - RNA, 21 nt, Human
cugagcuuuggacacacacag

SEQ ID NO: 3831058 - RNA, 22 nt, Human
cugagcuuuggacgcacacagc

SEQ ID NO: 3831059 - RNA, 17 nt, Human
cugaggaaaggccagcu

SEQ ID NO: 3831060 - RNA, 21 nt, Human
cugaggaaauugcuuuguauu

SEQ ID NO: 3831061 - RNA, 23 nt, Human
cugaggaagaacggggcucuucu

SEQ ID NO: 3831062 - RNA, 21 nt, Human
cugaggaagacaagugaugcu

SEQ ID NO: 3831063 - RNA, 18 nt, Human
cugaggaagaugggggca

SEQ ID NO: 3831064 - RNA, 20 nt, Human
cugaggaaucaacagggcag

SEQ ID NO: 3831065 - RNA, 23 nt, Human
cugaggaauccagacccggcugc

SEQ ID NO: 3831066 - RNA, 16 nt, Human
cugaggaauuuucuuu

SEQ ID NO: 3831067 - RNA, 11 nt, Human
cugaggacaag

SEQ ID NO: 3831068 - RNA, 23 nt, Human
cugaggacaagagaaaaaagcca

SEQ ID NO: 3831069 - RNA, 17 nt, Human
cugaggacagcuguccu

SEQ ID NO: 3831070 - RNA, 17 nt, Human
cugaggacauuccaaga

SEQ ID NO: 3831071 - RNA, 14 nt, Human
cugaggaccagcca

SEQ ID NO: 3831072 - RNA, 14 nt, Human
cugaggacugauuu

SEQ ID NO: 3831073 - RNA, 22 nt, Human
cugaggacugauuucagaguga

SEQ ID NO: 3831074 - RNA, 23 nt, Human
cugaggagcagcaggagggggga

SEQ ID NO: 3831075 - RNA, 13 nt, Human
cugaggaggggag

SEQ ID NO: 3831076 - RNA, 17 nt, Human
cugaggaucagaguaau

SEQ ID NO: 3831077 - RNA, 18 nt, Human
cugaggaugagcuggaag

SEQ ID NO: 3831078 - RNA, 18 nt, Human
cugaggauuucaagccug

SEQ ID NO: 3831079 - RNA, 13 nt, Human
cugaggcacgagc

SEQ ID NO: 3831080 - RNA, 13 nt, Human
cugaggcagacag

SEQ ID NO: 3831081 - RNA, 15 nt, Human
cugaggcagacagca

SEQ ID NO: 3831082 - RNA, 15 nt, Human
cugaggcagcagugu

SEQ ID NO: 3831083 - RNA, 17 nt, Human
cugaggcagcaguguga

SEQ ID NO: 3831084 - RNA, 22 nt, Human
cugaggcagcagugugaggcca

SEQ ID NO: 3831085 - RNA, 14 nt, Human
cugaggcagguccc

SEQ ID NO: 3831086 - RNA, 24 nt, Human
cugaggccacacucagcacaaggc

SEQ ID NO: 3831087 - RNA, 17 nt, Human
cugaggccacccagagg

SEQ ID NO: 3831088 - RNA, 13 nt, Human
cugaggccagccu

SEQ ID NO: 3831089 - RNA, 17 nt, Human
cugaggccagccuggcc

SEQ ID NO: 3831090 - RNA, 23 nt, Human
cugaggccagccuggccuccugc

SEQ ID NO: 3831091 - RNA, 16 nt, Human
cugaggcccagagggc

SEQ ID NO: 3831092 - RNA, 21 nt, Human
cugaggcccagagggccugca

SEQ ID NO: 3831093 - RNA, 14 nt, Human
cugaggcccuucuc

SEQ ID NO: 3831094 - RNA, 20 nt, Human
cugaggcccuucucuccagc

SEQ ID NO: 3831095 - RNA, 23 nt, Human
cugaggccuaaaaguaaacauua

SEQ ID NO: 3831096 - RNA, 15 nt, Human
cugaggccuagacuc

SEQ ID NO: 3831097 - RNA, 19 nt, Human
cugaggccugagacccagg

SEQ ID NO: 3831098 - RNA, 17 nt, Human
cugaggccugagcgcuc

SEQ ID NO: 3831099 - RNA, 18 nt, Human
cugaggccugagcgcucc

SEQ ID NO: 3831100 - RNA, 19 nt, Human
cugaggccuggacuuuccu

SEQ ID NO: 3831101 - RNA, 15 nt, Human
cugaggccugggccg

SEQ ID NO: 3831102 - RNA, 23 nt, Human
cugaggccugggccgcugccacg

SEQ ID NO: 3831103 - RNA, 18 nt, Human
cugaggcggguggaucac

SEQ ID NO: 3831104 - RNA, 21 nt, Human
cugaggcuccacuuggucugu

SEQ ID NO: 3831105 - RNA, 20 nt, Human
cugaggcuccugugcuacuu

SEQ ID NO: 3831106 - RNA, 15 nt, Human
cugaggcucuuucug

SEQ ID NO: 3831107 - RNA, 18 nt, Human
cugaggcucuuucugggc

SEQ ID NO: 3831108 - RNA, 14 nt, Human
cugaggcuguagga

SEQ ID NO: 3831109 - RNA, 13 nt, Human
cugaggcuguggu

SEQ ID NO: 3831110 - RNA, 17 nt, Human
cugaggcuuuggauuug

SEQ ID NO: 3831111 - RNA, 19 nt, Human
cugagggaaagcccagaaa

SEQ ID NO: 3831112 - RNA, 23 nt, Human
cugagggaaagcccagaaaagga

SEQ ID NO: 3831113 - RNA, 16 nt, Human
cugagggaaagugcau

SEQ ID NO: 3831114 - RNA, 18 nt, Human
cugagggaaauguuuugu

SEQ ID NO: 3831115 - RNA, 12 nt, Human
cugagggaccaa

SEQ ID NO: 3831116 - RNA, 18 nt, Human
cugagggaccaacugggc

SEQ ID NO: 3831117 - RNA, 20 nt, Human
cugagggaccaacugggccc

SEQ ID NO: 3831118 - RNA, 15 nt, Human
cugagggaccagcca

SEQ ID NO: 3831119 - RNA, 14 nt, Human
cugagggacucuga

SEQ ID NO: 3831120 - RNA, 16 nt, Human
cugagggacucugaag

SEQ ID NO: 3831121 - RNA, 21 nt, Human
cugagggacucugaagccucu

SEQ ID NO: 3831122 - RNA, 22 nt, Human
cugagggaggaccuggggcaca

SEQ ID NO: 3831123 - RNA, 16 nt, Human
cugagggaggaggcca

SEQ ID NO: 3831124 - RNA, 23 nt, Human
cugagggcagaaagguucugccc

SEQ ID NO: 3831125 - RNA, 19 nt, Human
cugagggcaguucgcagcc

SEQ ID NO: 3831126 - RNA, 14 nt, Human
cugagggccacacu

SEQ ID NO: 3831127 - RNA, 13 nt, Human
cugagggccccuc

SEQ ID NO: 3831128 - RNA, 15 nt, Human
cugagggccccucug

SEQ ID NO: 3831129 - RNA, 16 nt, Human
cugagggccccucugc

SEQ ID NO: 3831130 - RNA, 17 nt, Human
cugagggccccucugcc

SEQ ID NO: 3831131 - RNA, 16 nt, Human
cugagggcuuccuuug

SEQ ID NO: 3831132 - RNA, 14 nt, Human
cugagggcuuguag

SEQ ID NO: 3831133 - RNA, 14 nt, Human
cugaggggagacag

SEQ ID NO: 3831134 - RNA, 15 nt, Human
cugaggggagacaga

SEQ ID NO: 3831135 - RNA, 17 nt, Human
cugaggggagacagagc

SEQ ID NO: 3831136 - RNA, 18 nt, Human
cugaggggagacagagca

SEQ ID NO: 3831137 - RNA, 22 nt, Human
cugaggggcaacgaagaaaaaa

SEQ ID NO: 3831138 - RNA, 16 nt, Human
cugaggggcagccugc

SEQ ID NO: 3831139 - RNA, 17 nt, Human
cugaggggcagccugcc

SEQ ID NO: 3831140 - RNA, 16 nt, Human
cugaggggcaucugcc

SEQ ID NO: 3831141 - RNA, 14 nt, Human
cugaggggccucuu

SEQ ID NO: 3831142 - RNA, 17 nt, Human
cugaggggcuaccagga

SEQ ID NO: 3831143 - RNA, 20 nt, Human
cugaggggcuaccaggaaag

SEQ ID NO: 3831144 - RNA, 14 nt, Human
cugaggguccagaa

SEQ ID NO: 3831145 - RNA, 17 nt, Human
cugaggguccagaagga

SEQ ID NO: 3831146 - RNA, 18 nt, Human
cugaggguccccaccugg

SEQ ID NO: 3831147 - RNA, 21 nt, Human
cugaggguccccaccugggac

SEQ ID NO: 3831148 - RNA, 20 nt, Human
cugaggguggagacuaagcc

SEQ ID NO: 3831149 - RNA, 16 nt, Human
cugaagaggcgggcca

SEQ ID NO: 3831150 - RNA, 14 nt, Human
cugacucucaaauc

SEQ ID NO: 3831151 - RNA, 15 nt, Human
cugacucugaaaucu

SEQ ID NO: 3831152 - RNA, 14 nt, Human
cugacucugccccc

SEQ ID NO: 3831153 - RNA, 19 nt, Human
cugacucugcccccugcug

SEQ ID NO: 3831154 - RNA, 21 nt, Human
cugacugaaaguagggggcuu

SEQ ID NO: 3831155 - RNA, 14 nt, Human
cugacugcccagca

SEQ ID NO: 3831156 - RNA, 21 nt, Human
cugacugcucagaacuugcug

SEQ ID NO: 3831157 - RNA, 15 nt, Human
cugacugggccaggg

SEQ ID NO: 3831158 - RNA, 21 nt, Human
cugacuguccucuccccucca

SEQ ID NO: 3831159 - RNA, 18 nt, Human
cugacuuaagcaaaagaa

SEQ ID NO: 3831160 - RNA, 12 nt, Human
cugacuuagaau

SEQ ID NO: 3831161 - RNA, 22 nt, Human
cugacuuagaaucccuguguua

SEQ ID NO: 3831162 - RNA, 20 nt, Human
cugacuucaggggcugcccg

SEQ ID NO: 3831163 - RNA, 21 nt, Human
cugacuucaggggcugcccgc

SEQ ID NO: 3831164 - RNA, 22 nt, Human
cugacuucaggggcugcccgcu

SEQ ID NO: 3831165 - RNA, 20 nt, Human
cugacuucauggaauggaca

SEQ ID NO: 3831166 - RNA, 16 nt, Human
cccucuugucuccccu

SEQ ID NO: 3831167 - RNA, 15 nt, Human
cccucuuguuuuguu

SEQ ID NO: 3831168 - RNA, 20 nt, Human
cccucuuguuuuguuugucu

SEQ ID NO: 3831169 - RNA, 22 nt, Human
cccucuuguuuuguuugucucu

SEQ ID NO: 3831170 - RNA, 20 nt, Human
cccucuuucccucccuuccu

SEQ ID NO: 3831171 - RNA, 14 nt, Human
cccucuuucucuuu

SEQ ID NO: 3831172 - RNA, 19 nt, Human
cccucuuuggcuccccugu

SEQ ID NO: 3831173 - RNA, 20 nt, Human
cccucuuuggcuccccugua

SEQ ID NO: 3831174 - RNA, 17 nt, Human
cccugaaaaccucacau

SEQ ID NO: 3831175 - RNA, 23 nt, Human
cccugaaaauguuuuucugccag

SEQ ID NO: 3831176 - RNA, 12 nt, Human
cccugaaacacg

SEQ ID NO: 3831177 - RNA, 13 nt, Human
cccugaaaugugu

SEQ ID NO: 3831178 - RNA, 18 nt, Human
cccugaaccaucccugau

SEQ ID NO: 3831179 - RNA, 11 nt, Human
cccugaagcca

SEQ ID NO: 3831180 - RNA, 14 nt, Human
cccugaagccagcc

SEQ ID NO: 3831181 - RNA, 15 nt, Human
cccugaagccagccu

SEQ ID NO: 3831182 - RNA, 18 nt, Human
cccugaagccagccuucu

SEQ ID NO: 3831183 - RNA, 17 nt, Human
cccugaaggggccauga

SEQ ID NO: 3831184 - RNA, 20 nt, Human
cccugaaugguuccaugccu

SEQ ID NO: 3831185 - RNA, 16 nt, Human
cccugacagggccagu

SEQ ID NO: 3831186 - RNA, 20 nt, Human
cccugacagucccuccucuc

SEQ ID NO: 3831187 - RNA, 17 nt, Human
cccugaccacucagaga

SEQ ID NO: 3831188 - RNA, 19 nt, Human
cccugaccacucagagaca

SEQ ID NO: 3831189 - RNA, 22 nt, Human
cccugaccacucagagacaugc

SEQ ID NO: 3831190 - RNA, 23 nt, Human
cccugaccacucagagacaugca

SEQ ID NO: 3831191 - RNA, 20 nt, Human
cccugaccagcucccccucc

SEQ ID NO: 3831192 - RNA, 19 nt, Human
cccugacccuguggaagca

SEQ ID NO: 3831193 - RNA, 15 nt, Human
cccugaccucacugu

SEQ ID NO: 3831194 - RNA, 15 nt, Human
cccugaccucccagc

SEQ ID NO: 3831195 - RNA, 19 nt, Human
cccugacucauucugaagg

SEQ ID NO: 3831196 - RNA, 14 nt, Human
cccugacuggugcu

SEQ ID NO: 3831197 - RNA, 20 nt, Human
cccugagaagcugcuccagg

SEQ ID NO: 3831198 - RNA, 14 nt, Human
cccugagauccccu

SEQ ID NO: 3831199 - RNA, 17 nt, Human
cccugagauccccugag

SEQ ID NO: 3831200 - RNA, 14 nt, Human
cccugagcccacug

SEQ ID NO: 3831201 - RNA, 17 nt, Human
cccugagccccuuccuu

SEQ ID NO: 3831202 - RNA, 12 nt, Human
cccugagcgccu

SEQ ID NO: 3831203 - RNA, 20 nt, Human
cccugagcuagaacccucug

SEQ ID NO: 3831204 - RNA, 12 nt, Human
cccugagcucgg

SEQ ID NO: 3831205 - RNA, 16 nt, Human
cccugagcugaggcag

SEQ ID NO: 3831206 - RNA, 19 nt, Human
cccugagcugaggcagcag

SEQ ID NO: 3831207 - RNA, 21 nt, Human
cccugagcugaggcagcagug

SEQ ID NO: 3831208 - RNA, 19 nt, Human
cccugaggagccaggccgg

SEQ ID NO: 3831209 - RNA, 13 nt, Human
cccugaggagucu

SEQ ID NO: 3831210 - RNA, 15 nt, Human
cccugaggagucuga

SEQ ID NO: 3831211 - RNA, 18 nt, Human
cccugaggcaggucccca

SEQ ID NO: 3831212 - RNA, 21 nt, Human
cccugaggcagguccccagac

SEQ ID NO: 3831213 - RNA, 13 nt, Human
cccugaggcccag

SEQ ID NO: 3831214 - RNA, 18 nt, Human
cccugaggcccagagggc

SEQ ID NO: 3831215 - RNA, 19 nt, Human
cccugaggcccagagggcc

SEQ ID NO: 3831216 - RNA, 16 nt, Human
cccugaggccuagacu

SEQ ID NO: 3831217 - RNA, 19 nt, Human
cccugaggugugggggcug

SEQ ID NO: 3831218 - RNA, 16 nt, Human
cccugagucaccagga

SEQ ID NO: 3831219 - RNA, 16 nt, Human
cccugagucugggcag

SEQ ID NO: 3831220 - RNA, 19 nt, Human
cccugaguggaucuccaag

SEQ ID NO: 3831221 - RNA, 21 nt, Human
cccugaguggaucuccaagga

SEQ ID NO: 3831222 - RNA, 22 nt, Human
cccugaguggaucuccaaggac

SEQ ID NO: 3831223 - RNA, 20 nt, Human
cccugaguucauccaggccc

SEQ ID NO: 3831224 - RNA, 16 nt, Human
cccugaucccuuccac

SEQ ID NO: 3831225 - RNA, 16 nt, Human
cccugauugaccugcu

SEQ ID NO: 3831226 - RNA, 22 nt, Human
cccugauugaccugcuccgcug

SEQ ID NO: 3831227 - RNA, 15 nt, Human
cccugcaaagcccag

SEQ ID NO: 3831228 - RNA, 16 nt, Human
cccugcaaaggacugu

SEQ ID NO: 3831229 - RNA, 13 nt, Human
cccugcaaccuga

SEQ ID NO: 3831230 - RNA, 16 nt, Human
cccugcaaccugauug

SEQ ID NO: 3831231 - RNA, 16 nt, Human
cccugcaaggcccaca

SEQ ID NO: 3831232 - RNA, 21 nt, Human
cccugcaaggcccacaggagg

SEQ ID NO: 3831233 - RNA, 14 nt, Human
cccugcaauaaaau

SEQ ID NO: 3831234 - RNA, 20 nt, Human
cccugcacagcaggcugcca

SEQ ID NO: 3831235 - RNA, 21 nt, Human
cccugcacagcaggcugccag

SEQ ID NO: 3831236 - RNA, 13 nt, Human
cccugcacaguug

SEQ ID NO: 3831237 - RNA, 23 nt, Human
cccugcaccaugcugcuggggaa

SEQ ID NO: 3831238 - RNA, 16 nt, Human
cccugcacuguaaaau

SEQ ID NO: 3831239 - RNA, 17 nt, Human
cccugcacuguccugcu

SEQ ID NO: 3831240 - RNA, 19 nt, Human
cccugcacuguccugcucc

SEQ ID NO: 3831241 - RNA, 20 nt, Human
cccugcacuguccugcucca

SEQ ID NO: 3831242 - RNA, 21 nt, Human
cccugcacuguccugcuccac

SEQ ID NO: 3831243 - RNA, 23 nt, Human
cccugcagaaccggagagccagc

SEQ ID NO: 3831244 - RNA, 14 nt, Human
cccugcagacccug

SEQ ID NO: 3831245 - RNA, 18 nt, Human
cccugcagagggcacaga

SEQ ID NO: 3831246 - RNA, 20 nt, Human
cccugcagagggcacagaaa

SEQ ID NO: 3831247 - RNA, 14 nt, Human
cccugcagcacgga

SEQ ID NO: 3831248 - RNA, 18 nt, Human
cccugcagcccuggccca

SEQ ID NO: 3831249 - RNA, 19 nt, Human
cccugcagcuuguagccag

SEQ ID NO: 3831250 - RNA, 21 nt, Human
cccugcagcuuguagccagcc

SEQ ID NO: 3831251 - RNA, 23 nt, Human
cccugcaggaaggagcugccugg

SEQ ID NO: 3831252 - RNA, 13 nt, Human
cccugcaguguuc

SEQ ID NO: 3831253 - RNA, 13 nt, Human
cccugcauccccu

SEQ ID NO: 3831254 - RNA, 18 nt, Human
cccugcaucugaccagca

SEQ ID NO: 3831255 - RNA, 21 nt, Human
cccugcaucugaccagcagcg

SEQ ID NO: 3831256 - RNA, 21 nt, Human
cccugcauggcugagcugccc

SEQ ID NO: 3831257 - RNA, 22 nt, Human
cccugcauuggaacuggaggca

SEQ ID NO: 3831258 - RNA, 16 nt, Human
cccugccaaacugaag

SEQ ID NO: 3831259 - RNA, 14 nt, Human
cccugccaccaggc

SEQ ID NO: 3831260 - RNA, 15 nt, Human
cccugccaccaggcc

SEQ ID NO: 3831261 - RNA, 12 nt, Human
cccugccacccu

SEQ ID NO: 3831262 - RNA, 17 nt, Human
cccugccaccucccuga

SEQ ID NO: 3831263 - RNA, 17 nt, Human
cccugccaccuccugcc

SEQ ID NO: 3831264 - RNA, 15 nt, Human
cccugccaccugucu

SEQ ID NO: 3831265 - RNA, 19 nt, Human
cccugccacucacuaggcc

SEQ ID NO: 3831266 - RNA, 21 nt, Human
cccugccagacccccuggaga

SEQ ID NO: 3831267 - RNA, 17 nt, Human
cccugccagcaccccca

SEQ ID NO: 3831268 - RNA, 15 nt, Human
cccugccaggcacag

SEQ ID NO: 3831269 - RNA, 17 nt, Human
cccugccaggcacaggc

SEQ ID NO: 3831270 - RNA, 12 nt, Human
cccugccagggc

SEQ ID NO: 3831271 - RNA, 15 nt, Human
cccugccagugccuu

SEQ ID NO: 3831272 - RNA, 18 nt, Human
cccugccaucuucccagc

SEQ ID NO: 3831273 - RNA, 20 nt, Human
cccugcccacaccuccuggg

SEQ ID NO: 3831274 - RNA, 13 nt, Human
cccugcccaccug

SEQ ID NO: 3831275 - RNA, 14 nt, Human
cccugcccaccugg

SEQ ID NO: 3831276 - RNA, 18 nt, Human
cccugcccaccuggccuc

SEQ ID NO: 3831277 - RNA, 20 nt, Human
cccugcccaccuggccucug

SEQ ID NO: 3831278 - RNA, 22 nt, Human
cccugcccaccuggccucugca

SEQ ID NO: 3831279 - RNA, 20 nt, Human
cccugcccagaucagccaga

SEQ ID NO: 3831280 - RNA, 15 nt, Human
cccugcccaggccgg

SEQ ID NO: 3831281 - RNA, 12 nt, Human
cccugcccaugu

SEQ ID NO: 3831282 - RNA, 16 nt, Human
cccugccccagcaaga

SEQ ID NO: 3831283 - RNA, 19 nt, Human
cccugccccagcccaaguc

SEQ ID NO: 3831284 - RNA, 20 nt, Human
cccugcccccaaauaagaag

SEQ ID NO: 3831285 - RNA, 14 nt, Human
cccugcccccacca

SEQ ID NO: 3831286 - RNA, 16 nt, Human
cccugcccccaggacu

SEQ ID NO: 3831287 - RNA, 17 nt, Human
cccugcccccaggacug

SEQ ID NO: 3831288 - RNA, 22 nt, Human
cccugcccccaggacugggcca

SEQ ID NO: 3831289 - RNA, 12 nt, Human
cccugcccccca

SEQ ID NO: 3831290 - RNA, 14 nt, Human
cccugccccccagc

SEQ ID NO: 3831291 - RNA, 19 nt, Human
cccugccccccagccucug

SEQ ID NO: 3831292 - RNA, 21 nt, Human
cccugccccccagccucuggc

SEQ ID NO: 3831293 - RNA, 15 nt, Human
cccugcccccugcag

SEQ ID NO: 3831294 - RNA, 22 nt, Human
cugcaaccuccgccucuugggu

SEQ ID NO: 3831295 - RNA, 14 nt, Human
cugcaaccugauug

SEQ ID NO: 3831296 - RNA, 23 nt, Human
cugcaacucaaggacuuugcagc

SEQ ID NO: 3831297 - RNA, 18 nt, Human
cugcaacuuguaaaugug

SEQ ID NO: 3831298 - RNA, 19 nt, Human
cugcaacuuuaagcagcuc

SEQ ID NO: 3831299 - RNA, 20 nt, Human
cugcaacuuuaagcagcucu

SEQ ID NO: 3831300 - RNA, 21 nt, Human
cugcaacuuuaagcagcucuu

SEQ ID NO: 3831301 - RNA, 13 nt, Human
cugcaagagccuu

SEQ ID NO: 3831302 - RNA, 19 nt, Human
cugcaagauucugaaacau

SEQ ID NO: 3831303 - RNA, 18 nt, Human
cugcaagcagggcucugc

SEQ ID NO: 3831304 - RNA, 19 nt, Human
cugcaagccgacuacaccu

SEQ ID NO: 3831305 - RNA, 13 nt, Human
cugcaagccugcg

SEQ ID NO: 3831306 - RNA, 14 nt, Human
cugcaagccugcgu

SEQ ID NO: 3831307 - RNA, 13 nt, Human
cugcaagccuguc

SEQ ID NO: 3831308 - RNA, 13 nt, Human
cugcaaggcccac

SEQ ID NO: 3831309 - RNA, 14 nt, Human
cugcaaggcccaca

SEQ ID NO: 3831310 - RNA, 20 nt, Human
cugcaaggcccacaggaggc

SEQ ID NO: 3831311 - RNA, 18 nt, Human
cugcaaggccuuucugug

SEQ ID NO: 3831312 - RNA, 20 nt, Human
cugcaaggccuuucugugug

SEQ ID NO: 3831313 - RNA, 16 nt, Human
cugcaagggcucccca

SEQ ID NO: 3831314 - RNA, 17 nt, Human
cugcaagggcuccccac

SEQ ID NO: 3831315 - RNA, 17 nt, Human
cugcaagguacucuggu

SEQ ID NO: 3831316 - RNA, 18 nt, Human
cugcaagguuuaggcugg

SEQ ID NO: 3831317 - RNA, 16 nt, Human
cugcaagucacaaagg

SEQ ID NO: 3831318 - RNA, 17 nt, Human
cugcaagucacaaagga

SEQ ID NO: 3831319 - RNA, 13 nt, Human
cugcaagucagag

SEQ ID NO: 3831320 - RNA, 19 nt, Human
cugcaaguccuuuuguaaa

SEQ ID NO: 3831321 - RNA, 15 nt, Human
cugacuucuaaguaa

SEQ ID NO: 3831322 - RNA, 11 nt, Human
cugacuucugc

SEQ ID NO: 3831323 - RNA, 19 nt, Human
cugacuucugccuggagac

SEQ ID NO: 3831324 - RNA, 12 nt, Human
cugacuuggcug

SEQ ID NO: 3831325 - RNA, 22 nt, Human
cugacuuggcuggugugguaca

SEQ ID NO: 3831326 - RNA, 20 nt, Human
cugacuuggggagauggagu

SEQ ID NO: 3831327 - RNA, 22 nt, Human
cugacuuggggagauggaguuc

SEQ ID NO: 3831328 - RNA, 13 nt, Human
cugacuuggggga

SEQ ID NO: 3831329 - RNA, 17 nt, Human
cugacuuguuugucuuc

SEQ ID NO: 3831330 - RNA, 22 nt, Human
cugacuuucauuucuugaggua

SEQ ID NO: 3831331 - RNA, 14 nt, Human
cugacuuugcuugc

SEQ ID NO: 3831332 - RNA, 16 nt, Human
cugacuuugcuugcuu

SEQ ID NO: 3831333 - RNA, 12 nt, Human
cugagaaaacaa

SEQ ID NO: 3831334 - RNA, 21 nt, Human
cugagaaaagcuuugaacccu

SEQ ID NO: 3831335 - RNA, 15 nt, Human
cugagaaagacuauu

SEQ ID NO: 3831336 - RNA, 16 nt, Human
cugagaaagcucaaag

SEQ ID NO: 3831337 - RNA, 11 nt, Human
cugagaacacu

SEQ ID NO: 3831338 - RNA, 15 nt, Human
cugagaacacuguga

SEQ ID NO: 3831339 - RNA, 22 nt, Human
cugagaacacugugaaaacauu

SEQ ID NO: 3831340 - RNA, 23 nt, Human
cugagaacccugcguggggacag

SEQ ID NO: 3831341 - RNA, 22 nt, Human
cugagaaccguagaugauuuca

SEQ ID NO: 3831342 - RNA, 13 nt, Human
cugagaaccuggc

SEQ ID NO: 3831343 - RNA, 14 nt, Human
cugagaaccuggcc

SEQ ID NO: 3831344 - RNA, 17 nt, Human
cugagaaccuggccuuc

SEQ ID NO: 3831345 - RNA, 14 nt, Human
cugagaacuccuga

SEQ ID NO: 3831346 - RNA, 15 nt, Human
cugagaacuccugac

SEQ ID NO: 3831347 - RNA, 21 nt, Human
cugagaagaggagcccucauc

SEQ ID NO: 3831348 - RNA, 13 nt, Human
cugagaagcucug

SEQ ID NO: 3831349 - RNA, 18 nt, Human
cugagaagcugcuccagg

SEQ ID NO: 3831350 - RNA, 21 nt, Human
cugagaagcugcuccaggccu

SEQ ID NO: 3831351 - RNA, 23 nt, Human
cugagaagcugcuccaggccugc

SEQ ID NO: 3831352 - RNA, 18 nt, Human
cugagaagucaaacauuu

SEQ ID NO: 3831353 - RNA, 23 nt, Human
cugagaauagaaggaaacuagcu

SEQ ID NO: 3831354 - RNA, 24 nt, Human
cugagaauagaaggaaacuagcuu

SEQ ID NO: 3831355 - RNA, 19 nt, Human
cugagaauguaagaacuac

SEQ ID NO: 3831356 - RNA, 17 nt, Human
cugagacaaucauguac

SEQ ID NO: 3831357 - RNA, 15 nt, Human
cugagacaaugccuu

SEQ ID NO: 3831358 - RNA, 14 nt, Human
cugagacagcccgg

SEQ ID NO: 3831359 - RNA, 16 nt, Human
cugagacagcccgggc

SEQ ID NO: 3831360 - RNA, 17 nt, Human
cugagacagcccgggcu

SEQ ID NO: 3831361 - RNA, 19 nt, Human
cugagacagcccgggcucu

SEQ ID NO: 3831362 - RNA, 20 nt, Human
cugagacagcccgggcucug

SEQ ID NO: 3831363 - RNA, 15 nt, Human
cugagacaggagaau

SEQ ID NO: 3831364 - RNA, 21 nt, Human
cugagaccaaggcuuucucua

SEQ ID NO: 3831365 - RNA, 19 nt, Human
cugagaccaguugggagca

SEQ ID NO: 3831366 - RNA, 16 nt, Human
cugagaccauuuaaca

SEQ ID NO: 3831367 - RNA, 22 nt, Human
cugagaccauuuaacaugcaac

SEQ ID NO: 3831368 - RNA, 17 nt, Human
cugagaccccuggccuc

SEQ ID NO: 3831369 - RNA, 21 nt, Human
cugagaccccuggccuccggc

SEQ ID NO: 3831370 - RNA, 20 nt, Human
cugagaccugacaagcacug

SEQ ID NO: 3831371 - RNA, 20 nt, Human
cugagacucacaggaaggag

SEQ ID NO: 3831372 - RNA, 20 nt, Human
cugagacucagacaggaaag

SEQ ID NO: 3831373 - RNA, 23 nt, Human
cugagacuccggggagcgcccgc

SEQ ID NO: 3831374 - RNA, 17 nt, Human
cugagacucgcgacaau

SEQ ID NO: 3831375 - RNA, 21 nt, Human
cugagacucucuuaggagcag

SEQ ID NO: 3831376 - RNA, 13 nt, Human
cugagagacuuuu

SEQ ID NO: 3831377 - RNA, 12 nt, Human
cugagagccagg

SEQ ID NO: 3831378 - RNA, 21 nt, Human
cugagaggacagagagaaaua

SEQ ID NO: 3831379 - RNA, 13 nt, Human
cugagaggcaggc

SEQ ID NO: 3831380 - RNA, 17 nt, Human
cugagagggcucgaggg

SEQ ID NO: 3831381 - RNA, 19 nt, Human
cugagaguauuuaggcaga

SEQ ID NO: 3831382 - RNA, 22 nt, Human
cugagagucagcucucugcccu

SEQ ID NO: 3831383 - RNA, 17 nt, Human
cugagagucuagauucu

SEQ ID NO: 3831384 - RNA, 14 nt, Human
cugagaguuuaguu

SEQ ID NO: 3831385 - RNA, 16 nt, Human
cugagauaugaacaua

SEQ ID NO: 3831386 - RNA, 21 nt, Human
cugagauaugaacauauuguu

SEQ ID NO: 3831387 - RNA, 17 nt, Human
cugagauccccugagcc

SEQ ID NO: 3831388 - RNA, 13 nt, Human
cugagauccugga

SEQ ID NO: 3831389 - RNA, 21 nt, Human
cugagauccuggacugagggg

SEQ ID NO: 3831390 - RNA, 14 nt, Human
cugagaucgugcca

SEQ ID NO: 3831391 - RNA, 19 nt, Human
cugagaucgugccacugca

SEQ ID NO: 3831392 - RNA, 16 nt, Human
cugagaucucugcagg

SEQ ID NO: 3831393 - RNA, 21 nt, Human
cugagaugagaggggagagcu

SEQ ID NO: 3831394 - RNA, 15 nt, Human
cugagauggaaaagu

SEQ ID NO: 3831395 - RNA, 23 nt, Human
cugagauggaacccuuuuggccc

SEQ ID NO: 3831396 - RNA, 17 nt, Human
cugagauggcccucugg

SEQ ID NO: 3831397 - RNA, 18 nt, Human
cugagauggcccucuggu

SEQ ID NO: 3831398 - RNA, 20 nt, Human
cugagauggcucccaggggc

SEQ ID NO: 3831399 - RNA, 21 nt, Human
cugagauggcucccaggggcu

SEQ ID NO: 3831400 - RNA, 21 nt, Human
cugagaugugaacacaucagc

SEQ ID NO: 3831401 - RNA, 18 nt, Human
cugagauucaauauugaa

SEQ ID NO: 3831402 - RNA, 19 nt, Human
cugagauuuauuaaagaaa

SEQ ID NO: 3831403 - RNA, 18 nt, Human
cugagauuucaucugcuc

SEQ ID NO: 3831404 - RNA, 16 nt, Human
cugagcaacagaguga

SEQ ID NO: 3831405 - RNA, 23 nt, Human
cugagcaacgcuauuccagcugu

SEQ ID NO: 3831406 - RNA, 20 nt, Human
cugagcaacucuugauuauc

SEQ ID NO: 3831407 - RNA, 12 nt, Human
cugagcaagagc

SEQ ID NO: 3831408 - RNA, 16 nt, Human
cugagcaaugucugug

SEQ ID NO: 3831409 - RNA, 17 nt, Human
cugagcaaugucugugc

SEQ ID NO: 3831410 - RNA, 17 nt, Human
cugagcacacuuuagug

SEQ ID NO: 3831411 - RNA, 11 nt, Human
cugagcacaga

SEQ ID NO: 3831412 - RNA, 17 nt, Human
cugagcacccucuggau

SEQ ID NO: 3831413 - RNA, 23 nt, Human
cugagcaccgugucaagcugcuc

SEQ ID NO: 3831414 - RNA, 16 nt, Human
cugagcaccucccagc

SEQ ID NO: 3831415 - RNA, 18 nt, Human
cugagcaccucccagccc

SEQ ID NO: 3831416 - RNA, 21 nt, Human
cugagcaccucccagccccug

SEQ ID NO: 3831417 - RNA, 22 nt, Human
cugagcaccucccagccccugc

SEQ ID NO: 3831418 - RNA, 16 nt, Human
cugagcaccugcuuca

SEQ ID NO: 3831419 - RNA, 13 nt, Human
cugagcacuguuu

SEQ ID NO: 3831420 - RNA, 14 nt, Human
cugagcacuguuuu

SEQ ID NO: 3831421 - RNA, 21 nt, Human
cugagcacuguuuucuagugu

SEQ ID NO: 3831422 - RNA, 13 nt, Human
cugagcaggccac

SEQ ID NO: 3831423 - RNA, 15 nt, Human
cugagcaggccacac

SEQ ID NO: 3831424 - RNA, 23 nt, Human
cugagcagggccggggaacuggc

SEQ ID NO: 3831425 - RNA, 15 nt, Human
cugagcaguccuugg

SEQ ID NO: 3831426 - RNA, 21 nt, Human
cugagcaguccuuggccugcu

SEQ ID NO: 3831427 - RNA, 15 nt, Human
cugagccaaagagaa

SEQ ID NO: 3831428 - RNA, 19 nt, Human
cugagccacagcagcauuu

SEQ ID NO: 3831429 - RNA, 15 nt, Human
cugagccaccugccc

SEQ ID NO: 3831430 - RNA, 18 nt, Human
cugagccagauuucacuc

SEQ ID NO: 3831431 - RNA, 11 nt, Human
cugagccaggc

SEQ ID NO: 3831432 - RNA, 12 nt, Human
cugagccaggcu

SEQ ID NO: 3831433 - RNA, 14 nt, Human
cugagccaggcuag

SEQ ID NO: 3831434 - RNA, 19 nt, Human
cugagccagucccaggggc

SEQ ID NO: 3831435 - RNA, 22 nt, Human
cugagccagugucaggaggaag

SEQ ID NO: 3831436 - RNA, 22 nt, Human
cugagccaguucaguaccugga

SEQ ID NO: 3831437 - RNA, 16 nt, Human
cugagcccagggaggc

SEQ ID NO: 3831438 - RNA, 15 nt, Human
ccgagagccugcucc

SEQ ID NO: 3831439 - RNA, 21 nt, Human
ccgagaggugggccagucugu

SEQ ID NO: 3831440 - RNA, 20 nt, Human
ccgagaguccaucagccucc

SEQ ID NO: 3831441 - RNA, 18 nt, Human
ccgagauagccaaggcca

SEQ ID NO: 3831442 - RNA, 19 nt, Human
ccgagauagccaaggccaa

SEQ ID NO: 3831443 - RNA, 22 nt, Human
ccgagauagccaaggccaaagg

SEQ ID NO: 3831444 - RNA, 21 nt, Human
ccgagaucacgccacugcacu

SEQ ID NO: 3831445 - RNA, 15 nt, Human
ccgagauugcaccac

SEQ ID NO: 3831446 - RNA, 15 nt, Human
ccgagcaaagaucaa

SEQ ID NO: 3831447 - RNA, 21 nt, Human
ccgagcaaagaucaaaauaaa

SEQ ID NO: 3831448 - RNA, 18 nt, Human
ccgagcaaagucuaaagu

SEQ ID NO: 3831449 - RNA, 20 nt, Human
ccgagcaaagucuaaaguuu

SEQ ID NO: 3831450 - RNA, 18 nt, Human
ccgagcagcugagcaggg

SEQ ID NO: 3831451 - RNA, 21 nt, Human
ccgagcagcugagcagggccg

SEQ ID NO: 3831452 - RNA, 17 nt, Human
ccgagcuccucuuccau

SEQ ID NO: 3831453 - RNA, 18 nt, Human
ccgagcuccucuuccaug

SEQ ID NO: 3831454 - RNA, 23 nt, Human
ccgagcucguguauccuggggcu

SEQ ID NO: 3831455 - RNA, 11 nt, Human
ccgagcugggg

SEQ ID NO: 3831456 - RNA, 16 nt, Human
ccgagcuggugcauua

SEQ ID NO: 3831457 - RNA, 13 nt, Human
ccgagcugucccc

SEQ ID NO: 3831458 - RNA, 14 nt, Human
ccgagcuguuuaug

SEQ ID NO: 3831459 - RNA, 21 nt, Human
ccgaggaaacgaaacccacuc

SEQ ID NO: 3831460 - RNA, 14 nt, Human
ccgaggaaacucag

SEQ ID NO: 3831461 - RNA, 15 nt, Human
ccgaggacccagacc

SEQ ID NO: 3831462 - RNA, 17 nt, Human
ccgaggacccagaccca

SEQ ID NO: 3831463 - RNA, 18 nt, Human
ccgaggacccagacccag

SEQ ID NO: 3831464 - RNA, 17 nt, Human
ccgaggacccaggaaag

SEQ ID NO: 3831465 - RNA, 17 nt, Human
ccgaggagggagagucu

SEQ ID NO: 3831466 - RNA, 19 nt, Human
ccgaggcaccaguguccuc

SEQ ID NO: 3831467 - RNA, 14 nt, Human
ccgaggcaggcaga

SEQ ID NO: 3831468 - RNA, 15 nt, Human
ccgaggcaggcagau

SEQ ID NO: 3831469 - RNA, 14 nt, Human
ccgaggcaggguca

SEQ ID NO: 3831470 - RNA, 13 nt, Human
ccgaggcccugca

SEQ ID NO: 3831471 - RNA, 14 nt, Human
ccgaggcccugcau

SEQ ID NO: 3831472 - RNA, 12 nt, Human
ccgaggcugaga

SEQ ID NO: 3831473 - RNA, 14 nt, Human
ccgaggcuggagcu

SEQ ID NO: 3831474 - RNA, 16 nt, Human
ccgagggcgaccccgu

SEQ ID NO: 3831475 - RNA, 13 nt, Human
ccgagggcugagc

SEQ ID NO: 3831476 - RNA, 14 nt, Human
ccgaggggccuuug

SEQ ID NO: 3831477 - RNA, 16 nt, Human
ccgaggggcucaggaa

SEQ ID NO: 3831478 - RNA, 16 nt, Human
ccgagggggcugcucc

SEQ ID NO: 3831479 - RNA, 18 nt, Human
ccgagggggcugcuccca

SEQ ID NO: 3831480 - RNA, 19 nt, Human
ccgagggggcugcucccac

SEQ ID NO: 3831481 - RNA, 16 nt, Human
ccgaggguccuggcuc

SEQ ID NO: 3831482 - RNA, 21 nt, Human
ccgaggguugauuaaggcagu

SEQ ID NO: 3831483 - RNA, 22 nt, Human
ccgaggguugauuaaggcagua

SEQ ID NO: 3831484 - RNA, 16 nt, Human
ccgaguagcugggacu

SEQ ID NO: 3831485 - RNA, 14 nt, Human
ccgagucucuucuc

SEQ ID NO: 3831486 - RNA, 22 nt, Human
ccgagucucuucuccacuggau

SEQ ID NO: 3831487 - RNA, 14 nt, Human
ccgagucugucucu

SEQ ID NO: 3831488 - RNA, 22 nt, Human
ccgaguguguuucauccuuccc

SEQ ID NO: 3831489 - RNA, 20 nt, Human
ccgauccuccccuggacucc

SEQ ID NO: 3831490 - RNA, 14 nt, Human
ccgauccuuccucc

SEQ ID NO: 3831491 - RNA, 16 nt, Human
ccgaugcccagagaca

SEQ ID NO: 3831492 - RNA, 13 nt, Human
ccgaugcugcuuu

SEQ ID NO: 3831493 - RNA, 17 nt, Human
ccgaugcugcuuucccc

SEQ ID NO: 3831494 - RNA, 19 nt, Human
ccgauguuauuagauguua

SEQ ID NO: 3831495 - RNA, 13 nt, Human
ccgauuucuguaa

SEQ ID NO: 3831496 - RNA, 16 nt, Human
ccgauuucuguaaacu

SEQ ID NO: 3831497 - RNA, 12 nt, Human
ccgauuuuucca

SEQ ID NO: 3831498 - RNA, 21 nt, Human
ccgcaaaccacacuggacucc

SEQ ID NO: 3831499 - RNA, 21 nt, Human
ccgcacacccucacucugcca

SEQ ID NO: 3831500 - RNA, 12 nt, Human
ccgcacagcagc

SEQ ID NO: 3831501 - RNA, 14 nt, Human
ccgcacagcagccu

SEQ ID NO: 3831502 - RNA, 14 nt, Human
ccgcacagcucagg

SEQ ID NO: 3831503 - RNA, 16 nt, Human
ccgcacagcucaggag

SEQ ID NO: 3831504 - RNA, 18 nt, Human
ccgcacagcucaggaggc

SEQ ID NO: 3831505 - RNA, 15 nt, Human
ccgcacccccacccu

SEQ ID NO: 3831506 - RNA, 13 nt, Human
ccgcaccccccaa

SEQ ID NO: 3831507 - RNA, 19 nt, Human
ccgcaccuaaagcagccag

SEQ ID NO: 3831508 - RNA, 14 nt, Human
ccgcaccuguacag

SEQ ID NO: 3831509 - RNA, 22 nt, Human
ccgcaccuguacaguggaaccg

SEQ ID NO: 3831510 - RNA, 14 nt, Human
ccgcacugggcuug

SEQ ID NO: 3831511 - RNA, 21 nt, Human
ccgcacuuuccacuucuuccu

SEQ ID NO: 3831512 - RNA, 13 nt, Human
ccgcagaaggaag

SEQ ID NO: 3831513 - RNA, 14 nt, Human
ccgcagacaccuug

SEQ ID NO: 3831514 - RNA, 16 nt, Human
ccgcagacaccuugga

SEQ ID NO: 3831515 - RNA, 13 nt, Human
ccgcagaccuccc

SEQ ID NO: 3831516 - RNA, 15 nt, Human
ccgcagaccucccca

SEQ ID NO: 3831517 - RNA, 16 nt, Human
ccgcagaccuccccag

SEQ ID NO: 3831518 - RNA, 19 nt, Human
ccgcagaccuccccagccc

SEQ ID NO: 3831519 - RNA, 20 nt, Human
ccgcagaccuccccagcccc

SEQ ID NO: 3831520 - RNA, 21 nt, Human
ccgcagcccccacccccaagg

SEQ ID NO: 3831521 - RNA, 20 nt, Human
ccgcagcucuugcccuuccc

SEQ ID NO: 3831522 - RNA, 14 nt, Human
ccgcaggaagcugc

SEQ ID NO: 3831523 - RNA, 15 nt, Human
ccgcaggaagcugcu

SEQ ID NO: 3831524 - RNA, 23 nt, Human
ccgcaggauuugggcucuuggaa

SEQ ID NO: 3831525 - RNA, 23 nt, Human
ccgcagugugcacuaaggggccc

SEQ ID NO: 3831526 - RNA, 13 nt, Human
ccgcauccccugc

SEQ ID NO: 3831527 - RNA, 16 nt, Human
ccgcauccuagucucu

SEQ ID NO: 3831528 - RNA, 22 nt, Human
ccgcaucuucuccaucuggcag

SEQ ID NO: 3831529 - RNA, 14 nt, Human
ccgcaugcagcagc

SEQ ID NO: 3831530 - RNA, 23 nt, Human
cugccaucucaccuccugcuggg

SEQ ID NO: 3831531 - RNA, 22 nt, Human
cugccaucuuaguuuggauucu

SEQ ID NO: 3831532 - RNA, 23 nt, Human
cugccaucuuaguuuggauucuu

SEQ ID NO: 3831533 - RNA, 17 nt, Human
cugccaugcagggccuc

SEQ ID NO: 3831534 - RNA, 14 nt, Human
cugccaugccagcu

SEQ ID NO: 3831535 - RNA, 15 nt, Human
cugccaugccagcuu

SEQ ID NO: 3831536 - RNA, 17 nt, Human
cugccaugccagcuuau

SEQ ID NO: 3831537 - RNA, 19 nt, Human
cugccaugccagcuuaucu

SEQ ID NO: 3831538 - RNA, 22 nt, Human
cugccaugccaggaaccugucc

SEQ ID NO: 3831539 - RNA, 23 nt, Human
cugccaugccaggaaccuguccu

SEQ ID NO: 3831540 - RNA, 21 nt, Human
cugccauggaggcacacagcu

SEQ ID NO: 3831541 - RNA, 23 nt, Human
cugccauggaggcacacagcugc

SEQ ID NO: 3831542 - RNA, 14 nt, Human
cugccauggcgugu

SEQ ID NO: 3831543 - RNA, 23 nt, Human
cugccauguaccuccccugccuu

SEQ ID NO: 3831544 - RNA, 19 nt, Human
cugccauguacuaguuuua

SEQ ID NO: 3831545 - RNA, 22 nt, Human
cugccauguugccccuuucucu

SEQ ID NO: 3831546 - RNA, 15 nt, Human
cugccauuaaagaau

SEQ ID NO: 3831547 - RNA, 17 nt, Human
cugccauuaaagaauau

SEQ ID NO: 3831548 - RNA, 22 nt, Human
cugccauuacagagguauuaaa

SEQ ID NO: 3831549 - RNA, 21 nt, Human
cugccauuauuuucugucaga

SEQ ID NO: 3831550 - RNA, 13 nt, Human
cugccauuuaaaa

SEQ ID NO: 3831551 - RNA, 16 nt, Human
cugccauuucugagau

SEQ ID NO: 3831552 - RNA, 19 nt, Human
cugccauuugcacccuccg

SEQ ID NO: 3831553 - RNA, 17 nt, Human
cugcccaacccuucccu

SEQ ID NO: 3831554 - RNA, 17 nt, Human
cugcccaaccugcucuc

SEQ ID NO: 3831555 - RNA, 19 nt, Human
cugcccaaccugcucuccu

SEQ ID NO: 3831556 - RNA, 21 nt, Human
cugcccaauuuugcagggagc

SEQ ID NO: 3831557 - RNA, 16 nt, Human
cugcccacaccuccug

SEQ ID NO: 3831558 - RNA, 17 nt, Human
cugcccacaccuccugg

SEQ ID NO: 3831559 - RNA, 17 nt, Human
cugcccacauuggaccc

SEQ ID NO: 3831560 - RNA, 19 nt, Human
cugcccacccccucaagcc

SEQ ID NO: 3831561 - RNA, 11 nt, Human
cugcccaccug

SEQ ID NO: 3831562 - RNA, 19 nt, Human
cugcccaccugccuggccg

SEQ ID NO: 3831563 - RNA, 14 nt, Human
cugcccaccuggcc

SEQ ID NO: 3831564 - RNA, 19 nt, Human
cugcccaccuggccucugc

SEQ ID NO: 3831565 - RNA, 22 nt, Human
cugcccaccuggccucugcacu

SEQ ID NO: 3831566 - RNA, 16 nt, Human
cugcccacucccugca

SEQ ID NO: 3831567 - RNA, 13 nt, Human
cugcccacuguuu

SEQ ID NO: 3831568 - RNA, 22 nt, Human
cugcccacuguuucucuugagc

SEQ ID NO: 3831569 - RNA, 21 nt, Human
cugcccagaauucccagcugu

SEQ ID NO: 3831570 - RNA, 21 nt, Human
cugcccagaccccucuggcca

SEQ ID NO: 3831571 - RNA, 18 nt, Human
cugcccagagcuggguga

SEQ ID NO: 3831572 - RNA, 17 nt, Human
cugcccagcccccuggu

SEQ ID NO: 3831573 - RNA, 13 nt, Human
cugcccagcuugg

SEQ ID NO: 3831574 - RNA, 15 nt, Human
cugcccagcuugggc

SEQ ID NO: 3831575 - RNA, 21 nt, Human
cugcccagcuugggcccagcu

SEQ ID NO: 3831576 - RNA, 20 nt, Human
cugcccagcuuuucauugcu

SEQ ID NO: 3831577 - RNA, 23 nt, Human
cugcccaggaccaucuucccgag

SEQ ID NO: 3831578 - RNA, 21 nt, Human
cugcccaggacggggccggcc

SEQ ID NO: 3831579 - RNA, 11 nt, Human
cugcccaggag

SEQ ID NO: 3831580 - RNA, 21 nt, Human
cugcccaggagagccagcccu

SEQ ID NO: 3831581 - RNA, 16 nt, Human
cugcccaggcacugca

SEQ ID NO: 3831582 - RNA, 20 nt, Human
cugcccaggccccugccacc

SEQ ID NO: 3831583 - RNA, 14 nt, Human
ccggcgucagccuc

SEQ ID NO: 3831584 - RNA, 21 nt, Human
ccggcgucagccuccagccuc

SEQ ID NO: 3831585 - RNA, 22 nt, Human
ccggcgucagccuccagccucu

SEQ ID NO: 3831586 - RNA, 15 nt, Human
ccggcuaauuuuugu

SEQ ID NO: 3831587 - RNA, 18 nt, Human
ccggcuaauuuuuguaau

SEQ ID NO: 3831588 - RNA, 16 nt, Human
ccggcuccaggcuccu

SEQ ID NO: 3831589 - RNA, 15 nt, Human
ccggcucccagccuc

SEQ ID NO: 3831590 - RNA, 14 nt, Human
ccggcuccugguca

SEQ ID NO: 3831591 - RNA, 17 nt, Human
ccggcuccuggucaccu

SEQ ID NO: 3831592 - RNA, 16 nt, Human
ccggcuccugugcuuu

SEQ ID NO: 3831593 - RNA, 23 nt, Human
ccggcucgagcaguccugccuca

SEQ ID NO: 3831594 - RNA, 17 nt, Human
ccggcucuacgggggcc

SEQ ID NO: 3831595 - RNA, 12 nt, Human
ccggcucugugg

SEQ ID NO: 3831596 - RNA, 17 nt, Human
ccggcucuuuccuugcu

SEQ ID NO: 3831597 - RNA, 13 nt, Human
ccggcuggccugg

SEQ ID NO: 3831598 - RNA, 17 nt, Human
ccggcugugcucagaga

SEQ ID NO: 3831599 - RNA, 16 nt, Human
ccggcugugcugggag

SEQ ID NO: 3831600 - RNA, 19 nt, Human
ccggcuuuguggcacuggg

SEQ ID NO: 3831601 - RNA, 17 nt, Human
ccgggaaccuccccagc

SEQ ID NO: 3831602 - RNA, 19 nt, Human
ccgggaaccuccccagccu

SEQ ID NO: 3831603 - RNA, 14 nt, Human
ccgggaagcaaaug

SEQ ID NO: 3831604 - RNA, 17 nt, Human
ccgggaagggggcuggg

SEQ ID NO: 3831605 - RNA, 20 nt, Human
ccgggaagggggcugggaca

SEQ ID NO: 3831606 - RNA, 21 nt, Human
ccgggaccacccugagccggc

SEQ ID NO: 3831607 - RNA, 17 nt, Human
ccgggacccccaggaca

SEQ ID NO: 3831608 - RNA, 17 nt, Human
ccgggaccuggugcugc

SEQ ID NO: 3831609 - RNA, 21 nt, Human
ccgggacguggcaccuccucg

SEQ ID NO: 3831610 - RNA, 12 nt, Human
ccgggacuccag

SEQ ID NO: 3831611 - RNA, 12 nt, Human
ccgggagagggg

SEQ ID NO: 3831612 - RNA, 15 nt, Human
ccgggagcugcugcc

SEQ ID NO: 3831613 - RNA, 15 nt, Human
ccgggaggggcccgc

SEQ ID NO: 3831614 - RNA, 13 nt, Human
ccgggcagagcac

SEQ ID NO: 3831615 - RNA, 20 nt, Human
ccgggcagagcacagcgggg

SEQ ID NO: 3831616 - RNA, 12 nt, Human
ccgggcagaggg

SEQ ID NO: 3831617 - RNA, 13 nt, Human
ccgggccacagag

SEQ ID NO: 3831618 - RNA, 18 nt, Human
ccgggccacuccuuccug

SEQ ID NO: 3831619 - RNA, 13 nt, Human
ccgggcccagagg

SEQ ID NO: 3831620 - RNA, 16 nt, Human
ccgggcccagaggagc

SEQ ID NO: 3831621 - RNA, 13 nt, Human
ccgggccccacag

SEQ ID NO: 3831622 - RNA, 13 nt, Human
ccgggcccucccu

SEQ ID NO: 3831623 - RNA, 14 nt, Human
ccgggcgcgguggc

SEQ ID NO: 3831624 - RNA, 20 nt, Human
ccgggcgcgguggcucacgc

SEQ ID NO: 3831625 - RNA, 21 nt, Human
ccgggcucagggaccacagca

SEQ ID NO: 3831626 - RNA, 14 nt, Human
ccgggcucucugcu

SEQ ID NO: 3831627 - RNA, 13 nt, Human
ccgggcucugccu

SEQ ID NO: 3831628 - RNA, 21 nt, Human
ccgggcugccugggcuguugg

SEQ ID NO: 3831629 - RNA, 15 nt, Human
ccggggaaaggcaag

SEQ ID NO: 3831630 - RNA, 15 nt, Human
ccggggaacuggcca

SEQ ID NO: 3831631 - RNA, 18 nt, Human
ccggggaacuggccaagc

SEQ ID NO: 3831632 - RNA, 19 nt, Human
ccggggaacuggccaagcu

SEQ ID NO: 3831633 - RNA, 15 nt, Human
ccggggacagaggcc

SEQ ID NO: 3831634 - RNA, 15 nt, Human
ccggggagcgcccgc

SEQ ID NO: 3831635 - RNA, 20 nt, Human
ccggggccugggcaggaggg

SEQ ID NO: 3831636 - RNA, 19 nt, Human
ccggggccuuaucgggcuc

SEQ ID NO: 3831637 - RNA, 19 nt, Human
ccggggcuggcggcuacuc

SEQ ID NO: 3831638 - RNA, 15 nt, Human
ccggggcuggguugg

SEQ ID NO: 3831639 - RNA, 21 nt, Human
ccgggguccuguggcaggcag

SEQ ID NO: 3831640 - RNA, 23 nt, Human
ccgggguccuguggcaggcagcg

SEQ ID NO: 3831641 - RNA, 20 nt, Human
ccggggugcccacaggccgc

SEQ ID NO: 3831642 - RNA, 18 nt, Human
ccggguccuuggcccccu

SEQ ID NO: 3831643 - RNA, 21 nt, Human
ccgggucuuccuacucuucuc

SEQ ID NO: 3831644 - RNA, 16 nt, Human
ccgggucuugauucag

SEQ ID NO: 3831645 - RNA, 20 nt, Human
ccggguucuagucuccuuug

SEQ ID NO: 3831646 - RNA, 22 nt, Human
ccggguuuggcgggccaaggac

SEQ ID NO: 3831647 - RNA, 15 nt, Human
ccgguaacuguccug

SEQ ID NO: 3831648 - RNA, 19 nt, Human
ccgguaagagcaaaagaau

SEQ ID NO: 3831649 - RNA, 17 nt, Human
ccgguagggaggcagcc

SEQ ID NO: 3831650 - RNA, 19 nt, Human
ccggucaccuagcaagcug

SEQ ID NO: 3831651 - RNA, 21 nt, Human
ccgguccagcuggccuggaca

SEQ ID NO: 3831652 - RNA, 18 nt, Human
ccggucccaccccucccu

SEQ ID NO: 3831653 - RNA, 23 nt, Human
ccggucccaccccucccucuguc

SEQ ID NO: 3831654 - RNA, 20 nt, Human
ccggucccuugagaccucag

SEQ ID NO: 3831655 - RNA, 23 nt, Human
ccggucccuugagaccucagcca

SEQ ID NO: 3831656 - RNA, 22 nt, Human
ccggucgcccuuugcugcaugg

SEQ ID NO: 3831657 - RNA, 23 nt, Human
ccggucgcccuuugcugcauggc

SEQ ID NO: 3831658 - RNA, 21 nt, Human
ccggucgggggggacccucca

SEQ ID NO: 3831659 - RNA, 16 nt, Human
ccggucugcaagucag

SEQ ID NO: 3831660 - RNA, 19 nt, Human
ccggucuuugauccgcagc

SEQ ID NO: 3831661 - RNA, 18 nt, Human
ccggugaccucuagcccu

SEQ ID NO: 3831662 - RNA, 17 nt, Human
ccggugggggggcagag

SEQ ID NO: 3831663 - RNA, 13 nt, Human
ccgguguucuaag

SEQ ID NO: 3831664 - RNA, 14 nt, Human
ccgguugcuucugg

SEQ ID NO: 3831665 - RNA, 16 nt, Human
ccgguugcuucuggga

SEQ ID NO: 3831666 - RNA, 12 nt, Human
ccguaaaaacug

SEQ ID NO: 3831667 - RNA, 19 nt, Human
ccguaauaacacccuuccu

SEQ ID NO: 3831668 - RNA, 12 nt, Human
ccguaauuuaac

SEQ ID NO: 3831669 - RNA, 12 nt, Human
ccguaccccacc

SEQ ID NO: 3831670 - RNA, 13 nt, Human
ccguaccccaccc

SEQ ID NO: 3831671 - RNA, 15 nt, Human
ccguaccccacccuc

SEQ ID NO: 3831672 - RNA, 17 nt, Human
ccguaccccacccucag

SEQ ID NO: 3831673 - RNA, 18 nt, Human
ccguaccccacccucagc

SEQ ID NO: 3831674 - RNA, 23 nt, Human
ccguacgacucuuuuccaaacac

SEQ ID NO: 3831675 - RNA, 16 nt, Human
ccguagguuauuuuca

SEQ ID NO: 3831676 - RNA, 22 nt, Human
ccgucaaaacagauuguuugca

SEQ ID NO: 3831677 - RNA, 14 nt, Human
ccgucaacguugua

SEQ ID NO: 3831678 - RNA, 23 nt, Human
ccgucaagagugaauucccucac

SEQ ID NO: 3831679 - RNA, 12 nt, Human
ccgucacagccu

SEQ ID NO: 3831680 - RNA, 13 nt, Human
ccgucacagccuc

SEQ ID NO: 3831681 - RNA, 13 nt, Human
ccgucacauccca

SEQ ID NO: 3831682 - RNA, 13 nt, Human
ccgucaccaccac

SEQ ID NO: 3831683 - RNA, 15 nt, Human
ccgucaccaccaccc

SEQ ID NO: 3831684 - RNA, 17 nt, Human
ccgucaccaccaccccu

SEQ ID NO: 3831685 - RNA, 21 nt, Human
ccgucaccacgacuggccagg

SEQ ID NO: 3831686 - RNA, 12 nt, Human
ccgucagugcug

SEQ ID NO: 3831687 - RNA, 17 nt, Human
ccgucauguuccucaaa

SEQ ID NO: 3831688 - RNA, 18 nt, Human
ccgucccauauccugccu

SEQ ID NO: 3831689 - RNA, 18 nt, Human
ccguccccuagaguccca

SEQ ID NO: 3831690 - RNA, 17 nt, Human
ccguccccucccaggga

SEQ ID NO: 3831691 - RNA, 11 nt, Human
ccguccucacc

SEQ ID NO: 3831692 - RNA, 16 nt, Human
ccguccucaccccugu

SEQ ID NO: 3831693 - RNA, 23 nt, Human
ccguccucaccccuguccucacu

SEQ ID NO: 3831694 - RNA, 14 nt, Human
ccguccugccugug

SEQ ID NO: 3831695 - RNA, 14 nt, Human
cugcagcuggacag

SEQ ID NO: 3831696 - RNA, 18 nt, Human
cugcagcuggacagaggg

SEQ ID NO: 3831697 - RNA, 23 nt, Human
cugcagcuguuuuaguuaaauuu

SEQ ID NO: 3831698 - RNA, 19 nt, Human
cugcagcuuguagccagcc

SEQ ID NO: 3831699 - RNA, 21 nt, Human
cugcagcuuguagccagccgg

SEQ ID NO: 3831700 - RNA, 15 nt, Human
cugcaggaaggagcu

SEQ ID NO: 3831701 - RNA, 17 nt, Human
cugcaggaaggagcugc

SEQ ID NO: 3831702 - RNA, 21 nt, Human
cugcaggaaggagcugccugg

SEQ ID NO: 3831703 - RNA, 23 nt, Human
cugcaggaaggagcugccuggac

SEQ ID NO: 3831704 - RNA, 15 nt, Human
cugcaggaaucaaaa

SEQ ID NO: 3831705 - RNA, 20 nt, Human
cugcaggaaucaaaaauuga

SEQ ID NO: 3831706 - RNA, 22 nt, Human
cugcaggaaucaaaaauugaag

SEQ ID NO: 3831707 - RNA, 16 nt, Human
cugcaggaccugccug

SEQ ID NO: 3831708 - RNA, 23 nt, Human
cugcaggacuugagaagaccuca

SEQ ID NO: 3831709 - RNA, 20 nt, Human
cugcaggaugauuguacaga

SEQ ID NO: 3831710 - RNA, 20 nt, Human
cugcaggauugauuaugcag

SEQ ID NO: 3831711 - RNA, 12 nt, Human
cugcaggcaccu

SEQ ID NO: 3831712 - RNA, 14 nt, Human
cugcaggcagacac

SEQ ID NO: 3831713 - RNA, 15 nt, Human
cugcaggcagacacg

SEQ ID NO: 3831714 - RNA, 17 nt, Human
cugcaggcagacacgga

SEQ ID NO: 3831715 - RNA, 13 nt, Human
cugcaggcagcca

SEQ ID NO: 3831716 - RNA, 15 nt, Human
cugcaggcagccagg

SEQ ID NO: 3831717 - RNA, 21 nt, Human
cugcaggccaagagcagaggc

SEQ ID NO: 3831718 - RNA, 22 nt, Human
cugcaggccaagagcagaggca

SEQ ID NO: 3831719 - RNA, 24 nt, Human
cugcaggccaagagcagaggcagc

SEQ ID NO: 3831720 - RNA, 23 nt, Human
cugcaggccaggccagcugccuc

SEQ ID NO: 3831721 - RNA, 11 nt, Human
cugcaggcccc

SEQ ID NO: 3831722 - RNA, 14 nt, Human
cugcaggccccgcu

SEQ ID NO: 3831723 - RNA, 14 nt, Human
cugcaggcccuggc

SEQ ID NO: 3831724 - RNA, 16 nt, Human
cugcaggcccuggccu

SEQ ID NO: 3831725 - RNA, 19 nt, Human
cugcaggcccuggccuccc

SEQ ID NO: 3831726 - RNA, 15 nt, Human
cugcaggcugagcca

SEQ ID NO: 3831727 - RNA, 14 nt, Human
cugcaggcugagug

SEQ ID NO: 3831728 - RNA, 20 nt, Human
ccuauuuuugacauggaaau

SEQ ID NO: 3831729 - RNA, 20 nt, Human
ccuauuuuuuuucuguuaua

SEQ ID NO: 3831730 - RNA, 14 nt, Human
ccucaaaacaaagg

SEQ ID NO: 3831731 - RNA, 15 nt, Human
ccucaaaacuggagu

SEQ ID NO: 3831732 - RNA, 17 nt, Human
ccucaaaacuggagucc

SEQ ID NO: 3831733 - RNA, 15 nt, Human
ccucaaaccuccucu

SEQ ID NO: 3831734 - RNA, 14 nt, Human
ccucaaagaaagug

SEQ ID NO: 3831735 - RNA, 20 nt, Human
ccucaaagcuuccauuccac

SEQ ID NO: 3831736 - RNA, 24 nt, Human
ccucaaagcuuggauuaaauacau

SEQ ID NO: 3831737 - RNA, 18 nt, Human
ccucaaauaaaaagugcu

SEQ ID NO: 3831738 - RNA, 14 nt, Human
ccucaaauccagga

SEQ ID NO: 3831739 - RNA, 18 nt, Human
ccucaaauccaggacccu

SEQ ID NO: 3831740 - RNA, 24 nt, Human
ccucaaauccaggacccugccagg

SEQ ID NO: 3831741 - RNA, 19 nt, Human
ccucaaaugacccaaagac

SEQ ID NO: 3831742 - RNA, 14 nt, Human
ccucaaaugagaaa

SEQ ID NO: 3831743 - RNA, 19 nt, Human
ccucaaaugggucuggggg

SEQ ID NO: 3831744 - RNA, 15 nt, Human
ccucaaauuuuuuga

SEQ ID NO: 3831745 - RNA, 17 nt, Human
ccucaaauuuuuugacu

SEQ ID NO: 3831746 - RNA, 17 nt, Human
ccucaacaagggagaga

SEQ ID NO: 3831747 - RNA, 17 nt, Human
ccucaacaguguuuuca

SEQ ID NO: 3831748 - RNA, 23 nt, Human
ccucaacccucccucagccccuc

SEQ ID NO: 3831749 - RNA, 18 nt, Human
cugcccuggcugcugccc

SEQ ID NO: 3831750 - RNA, 11 nt, Human
cugcccuggga

SEQ ID NO: 3831751 - RNA, 22 nt, Human
cugcccugggaggcagugaugg

SEQ ID NO: 3831752 - RNA, 24 nt, Human
cugcccugggauguccacagaugc

SEQ ID NO: 3831753 - RNA, 20 nt, Human
cugcccugguccagggaagc

SEQ ID NO: 3831754 - RNA, 14 nt, Human
cugcccuggugcug

SEQ ID NO: 3831755 - RNA, 19 nt, Human
cugcccuggugcugccaca

SEQ ID NO: 3831756 - RNA, 17 nt, Human
cugcccugguggcccuc

SEQ ID NO: 3831757 - RNA, 21 nt, Human
cugcccugguuuccugcccug

SEQ ID NO: 3831758 - RNA, 13 nt, Human
cugcccuguaccc

SEQ ID NO: 3831759 - RNA, 21 nt, Human
cugcccuguaccccagcacuu

SEQ ID NO: 3831760 - RNA, 24 nt, Human
cugcccugugaguacuacaguccu

SEQ ID NO: 3831761 - RNA, 11 nt, Human
cugcccugugg

SEQ ID NO: 3831762 - RNA, 14 nt, Human
cugcccugugggcc

SEQ ID NO: 3831763 - RNA, 15 nt, Human
cugcccugugggccc

SEQ ID NO: 3831764 - RNA, 18 nt, Human
cugcccugugggccccca

SEQ ID NO: 3831765 - RNA, 13 nt, Human
cugcccuguguac

SEQ ID NO: 3831766 - RNA, 22 nt, Human
cugcccuguguacuucccgggc

SEQ ID NO: 3831767 - RNA, 19 nt, Human
cugcccuguuguguauaga

SEQ ID NO: 3831768 - RNA, 23 nt, Human
cugcccuuaccugccaggaagcc

SEQ ID NO: 3831769 - RNA, 16 nt, Human
cugcccuucaccccag

SEQ ID NO: 3831770 - RNA, 14 nt, Human
cugcccuuccucag

SEQ ID NO: 3831771 - RNA, 15 nt, Human
cugcccuuccucagu

SEQ ID NO: 3831772 - RNA, 15 nt, Human
cugcccuuccugcag

SEQ ID NO: 3831773 - RNA, 14 nt, Human
cugcccuucuuccc

SEQ ID NO: 3831774 - RNA, 18 nt, Human
cugcccuucuuccccuuc

SEQ ID NO: 3831775 - RNA, 13 nt, Human
cugcccuugggcc

SEQ ID NO: 3831776 - RNA, 17 nt, Human
cugcccuugucccacuc

SEQ ID NO: 3831777 - RNA, 12 nt, Human
cugcccuuguuu

SEQ ID NO: 3831778 - RNA, 14 nt, Human
cugcccuuuguccu

SEQ ID NO: 3831779 - RNA, 18 nt, Human
cugcccuuuuuucugccu

SEQ ID NO: 3831780 - RNA, 20 nt, Human
cugccgacacgcucccuccc

SEQ ID NO: 3831781 - RNA, 13 nt, Human
cugccgaccagag

SEQ ID NO: 3831782 - RNA, 15 nt, Human
cugccgaccucgucc

SEQ ID NO: 3831783 - RNA, 17 nt, Human
cugccgaccucguccuc

SEQ ID NO: 3831784 - RNA, 15 nt, Human
cugccgacuccuggg

SEQ ID NO: 3831785 - RNA, 22 nt, Human
cugccgagaguccaucagccuc

SEQ ID NO: 3831786 - RNA, 17 nt, Human
cugccgcaacaguuuuu

SEQ ID NO: 3831787 - RNA, 19 nt, Human
cugccgcaauacaggaacc

SEQ ID NO: 3831788 - RNA, 15 nt, Human
cugccgcaccccaga

SEQ ID NO: 3831789 - RNA, 13 nt, Human
cugccgcagcccu

SEQ ID NO: 3831790 - RNA, 18 nt, Human
cugccgcagcccugcaga

SEQ ID NO: 3831791 - RNA, 22 nt, Human
cugccgcagcccugcagagggc

SEQ ID NO: 3831792 - RNA, 22 nt, Human
cugccgcccgagguggcugccu

SEQ ID NO: 3831793 - RNA, 14 nt, Human
cugccgccucccag

SEQ ID NO: 3831794 - RNA, 15 nt, Human
cugccggagaggaag

SEQ ID NO: 3831795 - RNA, 16 nt, Human
cugccggagaggaaga

SEQ ID NO: 3831796 - RNA, 14 nt, Human
cugccggcgguggc

SEQ ID NO: 3831797 - RNA, 14 nt, Human
cugccggcucuggc

SEQ ID NO: 3831798 - RNA, 14 nt, Human
cugccggcucuuuc

SEQ ID NO: 3831799 - RNA, 15 nt, Human
cugccgggcugaggg

SEQ ID NO: 3831800 - RNA, 17 nt, Human
cugccggggcagccccc

SEQ ID NO: 3831801 - RNA, 23 nt, Human
cugccggguucuagucuccuuug

SEQ ID NO: 3831802 - RNA, 16 nt, Human
cugccgucaccaccac

SEQ ID NO: 3831803 - RNA, 22 nt, Human
cugccgucaccaccaccccuac

SEQ ID NO: 3831804 - RNA, 21 nt, Human
cugccguccccuagaguccca

SEQ ID NO: 3831805 - RNA, 14 nt, Human
cugccgucucugga

SEQ ID NO: 3831806 - RNA, 20 nt, Human
cugccgugcauuagcacaga

SEQ ID NO: 3831807 - RNA, 15 nt, Human
cugccgugccgccug

SEQ ID NO: 3831808 - RNA, 13 nt, Human
cugccguggggcc

SEQ ID NO: 3831809 - RNA, 15 nt, Human
cugccuaagaggcaa

SEQ ID NO: 3831810 - RNA, 14 nt, Human
cugccuaaggacuu

SEQ ID NO: 3831811 - RNA, 15 nt, Human
cugccuaagugcagc

SEQ ID NO: 3831812 - RNA, 15 nt, Human
cugccuaaguggcug

SEQ ID NO: 3831813 - RNA, 15 nt, Human
cugccuaauuacgau

SEQ ID NO: 3831814 - RNA, 23 nt, Human
cugccuaauuacgauaaggaaga

SEQ ID NO: 3831815 - RNA, 23 nt, Human
cugccuacagaacuucagaaaga

SEQ ID NO: 3831816 - RNA, 14 nt, Human
cugccuacucacga

SEQ ID NO: 3831817 - RNA, 15 nt, Human
cugccuagaaacaac

SEQ ID NO: 3831818 - RNA, 20 nt, Human
cugccuagaaacaacacugu

SEQ ID NO: 3831819 - RNA, 21 nt, Human
cugccuagaaacaacacugua

SEQ ID NO: 3831820 - RNA, 23 nt, Human
cugccuagauucagggaaagugg

SEQ ID NO: 3831821 - RNA, 19 nt, Human
cugccuagcaagcuggccu

SEQ ID NO: 3831822 - RNA, 20 nt, Human
cugccuagcaagcuggccuc

SEQ ID NO: 3831823 - RNA, 20 nt, Human
cugccuagcacucacaugcu

SEQ ID NO: 3831824 - RNA, 23 nt, Human
cugccuagcacucacaugcugga

SEQ ID NO: 3831825 - RNA, 17 nt, Human
cugccuagcugccuagc

SEQ ID NO: 3831826 - RNA, 21 nt, Human
cugccuagcugccuagcaagc

SEQ ID NO: 3831827 - RNA, 23 nt, Human
cugccuauuaucugucagcugca

SEQ ID NO: 3831828 - RNA, 22 nt, Human
cugccuauugcagcugggagaa

SEQ ID NO: 3831829 - RNA, 14 nt, Human
cugccucacuuccu

SEQ ID NO: 3831830 - RNA, 15 nt, Human
cugccucagccuccc

SEQ ID NO: 3831831 - RNA, 18 nt, Human
cugccucagccucccgag

SEQ ID NO: 3831832 - RNA, 10 nt, Human
cugccucagg

SEQ ID NO: 3831833 - RNA, 23 nt, Human
cugccucaggaggcaggaccuuc

SEQ ID NO: 3831834 - RNA, 17 nt, Human
cugccucaggccucugu

SEQ ID NO: 3831835 - RNA, 12 nt, Human
cugccucauuua

SEQ ID NO: 3831836 - RNA, 12 nt, Human
cugccuccaccc

SEQ ID NO: 3831837 - RNA, 15 nt, Human
cugccuccacccucu

SEQ ID NO: 3831838 - RNA, 17 nt, Human
cugccuccacccucuga

SEQ ID NO: 3831839 - RNA, 17 nt, Human
cugccuccacucccacu

SEQ ID NO: 3831840 - RNA, 19 nt, Human
cugccuccacucccacuuc

SEQ ID NO: 3831841 - RNA, 22 nt, Human
cugccuccagaauggucuuucu

SEQ ID NO: 3831842 - RNA, 13 nt, Human
cugccuccaggaa

SEQ ID NO: 3831843 - RNA, 15 nt, Human
cugccuccagggcug

SEQ ID NO: 3831844 - RNA, 19 nt, Human
cugccuccagggcuggacu

SEQ ID NO: 3831845 - RNA, 21 nt, Human
cugccucccaacaguggggaa

SEQ ID NO: 3831846 - RNA, 11 nt, Human
cugccucccau

SEQ ID NO: 3831847 - RNA, 16 nt, Human
cugccucccauucuga

SEQ ID NO: 3831848 - RNA, 16 nt, Human
cugccuccccaacccu

SEQ ID NO: 3831849 - RNA, 22 nt, Human
cugccuccccaacccugccccu

SEQ ID NO: 3831850 - RNA, 13 nt, Human
cugccuccccucc

SEQ ID NO: 3831851 - RNA, 18 nt, Human
cugccucccucacccuga

SEQ ID NO: 3831852 - RNA, 19 nt, Human
cugccucccucacccugag

SEQ ID NO: 3831853 - RNA, 20 nt, Human
cugccucccucacccugagc

SEQ ID NO: 3831854 - RNA, 15 nt, Human
cugccucccuucaug

SEQ ID NO: 3831855 - RNA, 11 nt, Human
cugccuccucg

SEQ ID NO: 3831856 - RNA, 15 nt, Human
cugccuccucuucaa

SEQ ID NO: 3831857 - RNA, 18 nt, Human
cugccucgaaacacagaa

SEQ ID NO: 3831858 - RNA, 15 nt, Human
cugccucgaacuggc

SEQ ID NO: 3831859 - RNA, 17 nt, Human
cugccucgaacuggcug

SEQ ID NO: 3831860 - RNA, 18 nt, Human
cugccucgaacuggcugc

SEQ ID NO: 3831861 - RNA, 20 nt, Human
cugccucggauccccuuccu

SEQ ID NO: 3831862 - RNA, 22 nt, Human
cugccucuacugggaaggcuac

SEQ ID NO: 3831863 - RNA, 16 nt, Human
cugccucucacacaca

SEQ ID NO: 3831864 - RNA, 22 nt, Human
cugccucucacagcugaguugu

SEQ ID NO: 3831865 - RNA, 14 nt, Human
cugccucuccaggc

SEQ ID NO: 3831866 - RNA, 14 nt, Human
cugccucucccagg

SEQ ID NO: 3831867 - RNA, 15 nt, Human
cugccucucccaggc

SEQ ID NO: 3831868 - RNA, 19 nt, Human
cugccucucccaggcaggg

SEQ ID NO: 3831869 - RNA, 18 nt, Human
cugccucucccuggcccu

SEQ ID NO: 3831870 - RNA, 19 nt, Human
cugccucucccuggcccuc

SEQ ID NO: 3831871 - RNA, 14 nt, Human
cugccucuccgccc

SEQ ID NO: 3831872 - RNA, 22 nt, Human
cugccucuccgccccugagccc

SEQ ID NO: 3831873 - RNA, 13 nt, Human
cuggagaacuaga

SEQ ID NO: 3831874 - RNA, 14 nt, Human
cuggagaacuagag

SEQ ID NO: 3831875 - RNA, 12 nt, Human
cuggagaagaga

SEQ ID NO: 3831876 - RNA, 14 nt, Human
cuggagaagagagg

SEQ ID NO: 3831877 - RNA, 16 nt, Human
cuggagaagagaggag

SEQ ID NO: 3831878 - RNA, 20 nt, Human
cuggagaagagaggagagga

SEQ ID NO: 3831879 - RNA, 13 nt, Human
cuggagaagcuga

SEQ ID NO: 3831880 - RNA, 15 nt, Human
cuggagaagcugaug

SEQ ID NO: 3831881 - RNA, 19 nt, Human
cuggagaagcugaugcuuu

SEQ ID NO: 3831882 - RNA, 13 nt, Human
cuggagaauaauu

SEQ ID NO: 3831883 - RNA, 17 nt, Human
cuggagaauaauucuuu

SEQ ID NO: 3831884 - RNA, 19 nt, Human
cuggagaauaauucuuuga

SEQ ID NO: 3831885 - RNA, 21 nt, Human
cuggagacaaugcagaugcca

SEQ ID NO: 3831886 - RNA, 11 nt, Human
cuggagacagc

SEQ ID NO: 3831887 - RNA, 13 nt, Human
cuggagacagccc

SEQ ID NO: 3831888 - RNA, 16 nt, Human
cuggagacagccccag

SEQ ID NO: 3831889 - RNA, 17 nt, Human
cuggagacagccccaga

SEQ ID NO: 3831890 - RNA, 18 nt, Human
cuggagaccagggagccu

SEQ ID NO: 3831891 - RNA, 18 nt, Human
cuggagaccaugcagagc

SEQ ID NO: 3831892 - RNA, 23 nt, Human
cuggagacccaccccaccugcag

SEQ ID NO: 3831893 - RNA, 21 nt, Human
cuggagacgggugggcggcug

SEQ ID NO: 3831894 - RNA, 20 nt, Human
cuggagacguggaaccucug

SEQ ID NO: 3831895 - RNA, 22 nt, Human
cuggagacguggaaccucuguc

SEQ ID NO: 3831896 - RNA, 18 nt, Human
cuggagacuccuaggcag

SEQ ID NO: 3831897 - RNA, 19 nt, Human
cuggagacuccuaggcagg

SEQ ID NO: 3831898 - RNA, 20 nt, Human
cuggagacuccuaggcagga

SEQ ID NO: 3831899 - RNA, 14 nt, Human
cuggagagaaacaa

SEQ ID NO: 3831900 - RNA, 14 nt, Human
cuggagagaacagg

SEQ ID NO: 3831901 - RNA, 13 nt, Human
cuggagagcaaca

SEQ ID NO: 3831902 - RNA, 19 nt, Human
cuggagagcuagaaccugg

SEQ ID NO: 3831903 - RNA, 20 nt, Human
cuggagagcuagaaccugga

SEQ ID NO: 3831904 - RNA, 23 nt, Human
cuggagaggagggaugcugccug

SEQ ID NO: 3831905 - RNA, 12 nt, Human
cuggagagguua

SEQ ID NO: 3831906 - RNA, 16 nt, Human
cuggagauacuggugg

SEQ ID NO: 3831907 - RNA, 14 nt, Human
cuggagauccuccu

SEQ ID NO: 3831908 - RNA, 20 nt, Human
cuggagaugaggccagacca

SEQ ID NO: 3831909 - RNA, 19 nt, Human
cuggagcacaaagacccug

SEQ ID NO: 3831910 - RNA, 23 nt, Human
cuggagcacaauaaauggcugua

SEQ ID NO: 3831911 - RNA, 15 nt, Human
cuggagcaccaggca

SEQ ID NO: 3831912 - RNA, 16 nt, Human
cuggagcacugggcuc

SEQ ID NO: 3831913 - RNA, 17 nt, Human
cuggagcacugggcucc

SEQ ID NO: 3831914 - RNA, 19 nt, Human
cuggagcacugggcucccg

SEQ ID NO: 3831915 - RNA, 20 nt, Human
cugccugcaauauuugaauu

SEQ ID NO: 3831916 - RNA, 15 nt, Human
cugccugccagcugc

SEQ ID NO: 3831917 - RNA, 21 nt, Human
cugccugccagcugcacugau

SEQ ID NO: 3831918 - RNA, 12 nt, Human
cugccugccaug

SEQ ID NO: 3831919 - RNA, 22 nt, Human
cugccugccauguaccuccccu

SEQ ID NO: 3831920 - RNA, 16 nt, Human
cugccugcccacacag

SEQ ID NO: 3831921 - RNA, 15 nt, Human
cugccugcccacccg

SEQ ID NO: 3831922 - RNA, 14 nt, Human
cugccugcccaggc

SEQ ID NO: 3831923 - RNA, 15 nt, Human
cugccugcccaggcc

SEQ ID NO: 3831924 - RNA, 16 nt, Human
cugccugcccaggccc

SEQ ID NO: 3831925 - RNA, 21 nt, Human
cugccugccccgcccccaguc

SEQ ID NO: 3831926 - RNA, 22 nt, Human
cugccugccccgcccccagucc

SEQ ID NO: 3831927 - RNA, 18 nt, Human
cugccugcccgcacagca

SEQ ID NO: 3831928 - RNA, 20 nt, Human
cugccugcccgcacagcagc

SEQ ID NO: 3831929 - RNA, 11 nt, Human
cugccugcccu

SEQ ID NO: 3831930 - RNA, 17 nt, Human
cugccugcccuuugucc

SEQ ID NO: 3831931 - RNA, 15 nt, Human
cugccugccugucug

SEQ ID NO: 3831932 - RNA, 18 nt, Human
cugccugccuuaagugag

SEQ ID NO: 3831933 - RNA, 14 nt, Human
cugccugcucccau

SEQ ID NO: 3831934 - RNA, 15 nt, Human
cugccugcucccauc

SEQ ID NO: 3831935 - RNA, 12 nt, Human
cugccugcuugg

SEQ ID NO: 3831936 - RNA, 12 nt, Human
cugccugcuuug

SEQ ID NO: 3831937 - RNA, 20 nt, Human
cugccugcuuuucacugcug

SEQ ID NO: 3831938 - RNA, 11 nt, Human
cugccuggacc

SEQ ID NO: 3831939 - RNA, 12 nt, Human
cugccuggaccc

SEQ ID NO: 3831940 - RNA, 13 nt, Human
cugccuggacccg

SEQ ID NO: 3831941 - RNA, 13 nt, Human
cugccuggagccc

SEQ ID NO: 3831942 - RNA, 16 nt, Human
cugccuggagccccac

SEQ ID NO: 3831943 - RNA, 11 nt, Human
cugccuggagg

SEQ ID NO: 3831944 - RNA, 18 nt, Human
cugccuggaggaccugag

SEQ ID NO: 3831945 - RNA, 19 nt, Human
cugccuggaggaccugagc

SEQ ID NO: 3831946 - RNA, 12 nt, Human
cugccuggcagg

SEQ ID NO: 3831947 - RNA, 17 nt, Human
cugccuggccaggcaga

SEQ ID NO: 3831948 - RNA, 21 nt, Human
cugccuggccaggcagaucug

SEQ ID NO: 3831949 - RNA, 23 nt, Human
cugccuggcccccaaccucaggg

SEQ ID NO: 3831950 - RNA, 18 nt, Human
cugccuggccggccagcc

SEQ ID NO: 3831951 - RNA, 19 nt, Human
cugccuggccggccagcca

SEQ ID NO: 3831952 - RNA, 21 nt, Human
cugccugggaucccucauccu

SEQ ID NO: 3831953 - RNA, 22 nt, Human
cugccugggaucccucauccuc

SEQ ID NO: 3831954 - RNA, 23 nt, Human
cugccugggcugaccccgguggc

SEQ ID NO: 3831955 - RNA, 17 nt, Human
cugccugggcuguuggc

SEQ ID NO: 3831956 - RNA, 18 nt, Human
cugccugggcuguuggca

SEQ ID NO: 3831957 - RNA, 24 nt, Human
cugccugggcuguuggcacucaca

SEQ ID NO: 3831958 - RNA, 19 nt, Human
cugccuggggcgggccccu

SEQ ID NO: 3831959 - RNA, 16 nt, Human
cugccugguccucaca

SEQ ID NO: 3831960 - RNA, 23 nt, Human
cugccugguccucacacucaccc

SEQ ID NO: 3831961 - RNA, 15 nt, Human
cugccuggucuccug

SEQ ID NO: 3831962 - RNA, 21 nt, Human
cugccuggucuccugccccca

SEQ ID NO: 3831963 - RNA, 20 nt, Human
cugccuguagcccacucugc

SEQ ID NO: 3831964 - RNA, 23 nt, Human
cugccuguagcccacucugcucg

SEQ ID NO: 3831965 - RNA, 13 nt, Human
cugccuguaguua

SEQ ID NO: 3831966 - RNA, 19 nt, Human
cugccuguaguuaggaaau

SEQ ID NO: 3831967 - RNA, 15 nt, Human
cugccuguccccaug

SEQ ID NO: 3831968 - RNA, 24 nt, Human
cugccugucccuaccccauggugc

SEQ ID NO: 3831969 - RNA, 13 nt, Human
cugccugucuccu

SEQ ID NO: 3831970 - RNA, 11 nt, Human
cugccugucug

SEQ ID NO: 3831971 - RNA, 12 nt, Human
cugccugucugc

SEQ ID NO: 3831972 - RNA, 13 nt, Human
cugccugucuguc

SEQ ID NO: 3831973 - RNA, 16 nt, Human
cugccugugagccagu

SEQ ID NO: 3831974 - RNA, 12 nt, Human
cugccugugcug

SEQ ID NO: 3831975 - RNA, 23 nt, Human
cugccuguggccaugacccugcc

SEQ ID NO: 3831976 - RNA, 12 nt, Human
cugccuguggcg

SEQ ID NO: 3831977 - RNA, 21 nt, Human
cugccuguuauaacucugcac

SEQ ID NO: 3831978 - RNA, 22 nt, Human
cugccuguuauaacucugcacu

SEQ ID NO: 3831979 - RNA, 18 nt, Human
cugccuguucagcuccag

SEQ ID NO: 3831980 - RNA, 19 nt, Human
cugccuguucccauucuug

SEQ ID NO: 3831981 - RNA, 21 nt, Human
cugccuguugcgugacacucu

SEQ ID NO: 3831982 - RNA, 23 nt, Human
cugccuguugcgugacacucucc

SEQ ID NO: 3831983 - RNA, 19 nt, Human
cugccuguugggccaggag

SEQ ID NO: 3831984 - RNA, 17 nt, Human
cugccuuaaaaccaaag

SEQ ID NO: 3831985 - RNA, 16 nt, Human
cugccuuaagugagga

SEQ ID NO: 3831986 - RNA, 23 nt, Human
cugccuuagaggagcccacggcu

SEQ ID NO: 3831987 - RNA, 14 nt, Human
cugccuuagcuuca

SEQ ID NO: 3831988 - RNA, 15 nt, Human
cugccuuagcuucag

SEQ ID NO: 3831989 - RNA, 19 nt, Human
cugccuuaggccuaccuga

SEQ ID NO: 3831990 - RNA, 16 nt, Human
cugccuuagucucagu

SEQ ID NO: 3831991 - RNA, 20 nt, Human
cugccuuagucucaguuugu

SEQ ID NO: 3831992 - RNA, 17 nt, Human
cugccuuaucuugcacc

SEQ ID NO: 3831993 - RNA, 18 nt, Human
cugccuuauucagggaag

SEQ ID NO: 3831994 - RNA, 20 nt, Human
cugccuuauucagggaagga

SEQ ID NO: 3831995 - RNA, 18 nt, Human
cugccuucccaugaaucu

SEQ ID NO: 3831996 - RNA, 11 nt, Human
cugccuucccu

SEQ ID NO: 3831997 - RNA, 14 nt, Human
cugccuuccuccug

SEQ ID NO: 3831998 - RNA, 15 nt, Human
cugccuuccuccugg

SEQ ID NO: 3831999 - RNA, 20 nt, Human
cugccuucgaggucagagga

SEQ ID NO: 3832000 - RNA, 17 nt, Human
cugccuucgcuucuugc

SEQ ID NO: 3832001 - RNA, 21 nt, Human
cugccuucgcuucuugccucu

SEQ ID NO: 3832002 - RNA, 18 nt, Human
cugccuucgguacccacc

SEQ ID NO: 3832003 - RNA, 20 nt, Human
cugccuucgguacccaccac

SEQ ID NO: 3832004 - RNA, 19 nt, Human
cugccuucguuaacugugu

SEQ ID NO: 3832005 - RNA, 18 nt, Human
cugccuucugacggcccu

SEQ ID NO: 3832006 - RNA, 19 nt, Human
cugccuucugacggcccug

SEQ ID NO: 3832007 - RNA, 20 nt, Human
cugccuucuggauucuuggc

SEQ ID NO: 3832008 - RNA, 12 nt, Human
cugccuucuguc

SEQ ID NO: 3832009 - RNA, 13 nt, Human
cugccuucugucc

SEQ ID NO: 3832010 - RNA, 21 nt, Human
cugccuucuucuuuuugcugu

SEQ ID NO: 3832011 - RNA, 22 nt, Human
cugccuucuucuuuuugcuguu

SEQ ID NO: 3832012 - RNA, 19 nt, Human
cugccuugaaccugugagu

SEQ ID NO: 3832013 - RNA, 18 nt, Human
cugccuugcccacuccug

SEQ ID NO: 3832014 - RNA, 21 nt, Human
cugccuugcuguuggucaugu

SEQ ID NO: 3832015 - RNA, 18 nt, Human
cugccuuggcucagacau

SEQ ID NO: 3832016 - RNA, 20 nt, Human
cugccuuggggucagguuga

SEQ ID NO: 3832017 - RNA, 14 nt, Human
cugccuuguguaca

SEQ ID NO: 3832018 - RNA, 17 nt, Human
ccucgggucuccucacu

SEQ ID NO: 3832019 - RNA, 15 nt, Human
ccucgguacucccau

SEQ ID NO: 3832020 - RNA, 18 nt, Human
ccucgguguggagaagcg

SEQ ID NO: 3832021 - RNA, 13 nt, Human
ccucgugccaguc

SEQ ID NO: 3832022 - RNA, 14 nt, Human
ccucgugccagucg

SEQ ID NO: 3832023 - RNA, 13 nt, Human
ccucgugcuuuaa

SEQ ID NO: 3832024 - RNA, 16 nt, Human
ccucguggacaccugc

SEQ ID NO: 3832025 - RNA, 13 nt, Human
ccucguggccagc

SEQ ID NO: 3832026 - RNA, 15 nt, Human
ccucguggccagccc

SEQ ID NO: 3832027 - RNA, 22 nt, Human
ccucguggccuuccccagccuc

SEQ ID NO: 3832028 - RNA, 19 nt, Human
ccucguuccuuucuccugu

SEQ ID NO: 3832029 - RNA, 15 nt, Human
ccucguucucccugg

SEQ ID NO: 3832030 - RNA, 17 nt, Human
ccucguucucccuggga

SEQ ID NO: 3832031 - RNA, 15 nt, Human
ccucguuuguguucu

SEQ ID NO: 3832032 - RNA, 23 nt, Human
ccucuaaagcaauaaugguccca

SEQ ID NO: 3832033 - RNA, 15 nt, Human
ccucuaaccccaggc

SEQ ID NO: 3832034 - RNA, 21 nt, Human
ccucuaaccccaggccccgag

SEQ ID NO: 3832035 - RNA, 21 nt, Human
ccucuaacuuggcucacacuc

SEQ ID NO: 3832036 - RNA, 15 nt, Human
ccucuaaugcucacg

SEQ ID NO: 3832037 - RNA, 18 nt, Human
ccucuaaugcucacgcuc

SEQ ID NO: 3832038 - RNA, 24 nt, Human
ccucuacagagcuucccugacuca

SEQ ID NO: 3832039 - RNA, 16 nt, Human
ccucuacugggaaggc

SEQ ID NO: 3832040 - RNA, 17 nt, Human
ccucuacugggaaggcu

SEQ ID NO: 3832041 - RNA, 14 nt, Human
ccucuacugggagc

SEQ ID NO: 3832042 - RNA, 20 nt, Human
ccucuacuuaaugagauagu

SEQ ID NO: 3832043 - RNA, 16 nt, Human
ccucuacuuuccaggc

SEQ ID NO: 3832044 - RNA, 18 nt, Human
ccucuagaagccaaggga

SEQ ID NO: 3832045 - RNA, 15 nt, Human
ccucuagagcagacu

SEQ ID NO: 3832046 - RNA, 11 nt, Human
ccucuagcuga

SEQ ID NO: 3832047 - RNA, 22 nt, Human
ccucuagcugugggggugaggg

SEQ ID NO: 3832048 - RNA, 13 nt, Human
ccucuaggcucug

SEQ ID NO: 3832049 - RNA, 12 nt, Human
ccucuagggacc

SEQ ID NO: 3832050 - RNA, 18 nt, Human
ccucuagggaccccuccu

SEQ ID NO: 3832051 - RNA, 19 nt, Human
ccucuagggaccccuccuc

SEQ ID NO: 3832052 - RNA, 20 nt, Human
ccucuagggaccccuccucc

SEQ ID NO: 3832053 - RNA, 14 nt, Human
ccucuagugcccuc

SEQ ID NO: 3832054 - RNA, 15 nt, Human
ccucuauacaucucu

SEQ ID NO: 3832055 - RNA, 16 nt, Human
ccucuauacaucucuc

SEQ ID NO: 3832056 - RNA, 17 nt, Human
ccucuauacaucucucc

SEQ ID NO: 3832057 - RNA, 19 nt, Human
ccucuaugaacuauggacg

SEQ ID NO: 3832058 - RNA, 14 nt, Human
ccucuauugaugua

SEQ ID NO: 3832059 - RNA, 17 nt, Human
ccucuauuuauguuugc

SEQ ID NO: 3832060 - RNA, 15 nt, Human
ccucucaacacccag

SEQ ID NO: 3832061 - RNA, 18 nt, Human
ccucucaauauucaauaa

SEQ ID NO: 3832062 - RNA, 20 nt, Human
ccucucaauauucaauaaag

SEQ ID NO: 3832063 - RNA, 22 nt, Human
ccucucaauauucaauaaagcu

SEQ ID NO: 3832064 - RNA, 14 nt, Human
ccucucacacacau

SEQ ID NO: 3832065 - RNA, 13 nt, Human
ccucucaccucag

SEQ ID NO: 3832066 - RNA, 14 nt, Human
ccucucaccucagc

SEQ ID NO: 3832067 - RNA, 14 nt, Human
ccucucaccucugu

SEQ ID NO: 3832068 - RNA, 14 nt, Human
ccucucacucccca

SEQ ID NO: 3832069 - RNA, 12 nt, Human
ccucucacuguc

SEQ ID NO: 3832070 - RNA, 15 nt, Human
ccucucacugucuga

SEQ ID NO: 3832071 - RNA, 13 nt, Human
ccucucagcccuc

SEQ ID NO: 3832072 - RNA, 14 nt, Human
ccucucagcccuca

SEQ ID NO: 3832073 - RNA, 16 nt, Human
ccucucagcuccaggu

SEQ ID NO: 3832074 - RNA, 18 nt, Human
ccucucaggauccaagcu

SEQ ID NO: 3832075 - RNA, 20 nt, Human
ccucucaggcaugccugugu

SEQ ID NO: 3832076 - RNA, 23 nt, Human
ccucucaggccggcagccccagc

SEQ ID NO: 3832077 - RNA, 14 nt, Human
ccucucagugcccu

SEQ ID NO: 3832078 - RNA, 21 nt, Human
ccucuccaagggcuucugcac

SEQ ID NO: 3832079 - RNA, 22 nt, Human
ccucuccaagggcuucugcacc

SEQ ID NO: 3832080 - RNA, 23 nt, Human
ccucuccaagggcuucugcaccc

SEQ ID NO: 3832081 - RNA, 22 nt, Human
ccucuccaccaucgucuucuug

SEQ ID NO: 3832082 - RNA, 17 nt, Human
ccucuccacccucccag

SEQ ID NO: 3832083 - RNA, 17 nt, Human
ccucuccaccuaguggc

SEQ ID NO: 3832084 - RNA, 18 nt, Human
ccucuccacucaugugac

SEQ ID NO: 3832085 - RNA, 23 nt, Human
ccucuccacucaugugacucuuu

SEQ ID NO: 3832086 - RNA, 22 nt, Human
ccucuccagcaggcccauggga

SEQ ID NO: 3832087 - RNA, 17 nt, Human
ccucuccagccucagcc

SEQ ID NO: 3832088 - RNA, 17 nt, Human
ccucuccaggcauuuag

SEQ ID NO: 3832089 - RNA, 19 nt, Human
ccucuccaucuucagcuuc

SEQ ID NO: 3832090 - RNA, 13 nt, Human
ccucuccauuugc

SEQ ID NO: 3832091 - RNA, 20 nt, Human
ccucuccauuugcucuucag

SEQ ID NO: 3832092 - RNA, 13 nt, Human
ccucucccacccu

SEQ ID NO: 3832093 - RNA, 20 nt, Human
ccucucccacccucuuccua

SEQ ID NO: 3832094 - RNA, 15 nt, Human
ccucucccacgggac

SEQ ID NO: 3832095 - RNA, 11 nt, Human
ccucucccagg

SEQ ID NO: 3832096 - RNA, 14 nt, Human
ccucucccaggcag

SEQ ID NO: 3832097 - RNA, 22 nt, Human
ccucucccaggcaggggcccgc

SEQ ID NO: 3832098 - RNA, 14 nt, Human
ccucucccaggccc

SEQ ID NO: 3832099 - RNA, 17 nt, Human
ccucucccaggccccau

SEQ ID NO: 3832100 - RNA, 23 nt, Human
ccucucccaggccccaugaccuc

SEQ ID NO: 3832101 - RNA, 21 nt, Human
ccucucccaucccccugcccu

SEQ ID NO: 3832102 - RNA, 14 nt, Human
ccucuccccaagac

SEQ ID NO: 3832103 - RNA, 15 nt, Human
ccucuccccaccccu

SEQ ID NO: 3832104 - RNA, 20 nt, Human
ccucuccccagcaagugaga

SEQ ID NO: 3832105 - RNA, 19 nt, Human
ccucuccccagcccagaga

SEQ ID NO: 3832106 - RNA, 21 nt, Human
ccucuccccagcccagagaca

SEQ ID NO: 3832107 - RNA, 23 nt, Human
ccucuccccagguccagcucugg

SEQ ID NO: 3832108 - RNA, 19 nt, Human
ccucuccccauucggugug

SEQ ID NO: 3832109 - RNA, 15 nt, Human
ccucuccccucagcc

SEQ ID NO: 3832110 - RNA, 15 nt, Human
ccucuccccuccagc

SEQ ID NO: 3832111 - RNA, 16 nt, Human
ccucuccccugauuac

SEQ ID NO: 3832112 - RNA, 13 nt, Human
ccucuccccugcc

SEQ ID NO: 3832113 - RNA, 21 nt, Human
ccucuccccugcccccugcag

SEQ ID NO: 3832114 - RNA, 22 nt, Human
ccucucccgucagggcccaagu

SEQ ID NO: 3832115 - RNA, 11 nt, Human
ccucucccuca

SEQ ID NO: 3832116 - RNA, 18 nt, Human
ccucucccuccuccagga

SEQ ID NO: 3832117 - RNA, 23 nt, Human
ccucucccuccuccaggaagccu

SEQ ID NO: 3832118 - RNA, 18 nt, Human
ccucucccucugguccca

SEQ ID NO: 3832119 - RNA, 16 nt, Human
ccucucccugcauggc

SEQ ID NO: 3832120 - RNA, 19 nt, Human
ccucucccugcugcuccua

SEQ ID NO: 3832121 - RNA, 20 nt, Human
cuggaggacuagaaccugga

SEQ ID NO: 3832122 - RNA, 14 nt, Human
cuggaggagagaag

SEQ ID NO: 3832123 - RNA, 17 nt, Human
cuggaggagagaagaau

SEQ ID NO: 3832124 - RNA, 14 nt, Human
cuggaggagcccag

SEQ ID NO: 3832125 - RNA, 16 nt, Human
cuggaggagcccaggc

SEQ ID NO: 3832126 - RNA, 19 nt, Human
cuggaggagcccaggccag

SEQ ID NO: 3832127 - RNA, 21 nt, Human
cuggaggagcccaggccagga

SEQ ID NO: 3832128 - RNA, 17 nt, Human
cuggaggagcugggccc

SEQ ID NO: 3832129 - RNA, 14 nt, Human
cuggaggaggagca

SEQ ID NO: 3832130 - RNA, 16 nt, Human
cuggaggcaccuggug

SEQ ID NO: 3832131 - RNA, 20 nt, Human
cuggaggcagggccuugccc

SEQ ID NO: 3832132 - RNA, 23 nt, Human
cuggaggcagggccuugcccaga

SEQ ID NO: 3832133 - RNA, 18 nt, Human
cuggaggcaggggcuucc

SEQ ID NO: 3832134 - RNA, 20 nt, Human
cuggaggcaggggcuuccug

SEQ ID NO: 3832135 - RNA, 22 nt, Human
cuggaggcaggggcuuccuggu

SEQ ID NO: 3832136 - RNA, 14 nt, Human
cuggaggcccaguu

SEQ ID NO: 3832137 - RNA, 17 nt, Human
cuggaggccccuggagc

SEQ ID NO: 3832138 - RNA, 14 nt, Human
cuggaggccucagg

SEQ ID NO: 3832139 - RNA, 19 nt, Human
cuggaggccucaggugcug

SEQ ID NO: 3832140 - RNA, 13 nt, Human
cuggaggccucug

SEQ ID NO: 3832141 - RNA, 15 nt, Human
cuggaggccucuggg

SEQ ID NO: 3832142 - RNA, 17 nt, Human
cuggaggccucugggcc

SEQ ID NO: 3832143 - RNA, 22 nt, Human
cuggaggccucugggccuccuc

SEQ ID NO: 3832144 - RNA, 16 nt, Human
cuggaggccuuccagc

SEQ ID NO: 3832145 - RNA, 21 nt, Human
cuggaggccuuccagcugcug

SEQ ID NO: 3832146 - RNA, 19 nt, Human
cuggaggcggugcggcagg

SEQ ID NO: 3832147 - RNA, 15 nt, Human
cuggaggcucaaauu

SEQ ID NO: 3832148 - RNA, 16 nt, Human
cuggaggcugccuccc

SEQ ID NO: 3832149 - RNA, 18 nt, Human
cuggaggcugccucccaa

SEQ ID NO: 3832150 - RNA, 17 nt, Human
cuggagggaagagugga

SEQ ID NO: 3832151 - RNA, 22 nt, Human
cuggagggaagaguggaggugg

SEQ ID NO: 3832152 - RNA, 22 nt, Human
cuggagggaaugaaccuggagg

SEQ ID NO: 3832153 - RNA, 20 nt, Human
cuggagggcuagaaccuaga

SEQ ID NO: 3832154 - RNA, 19 nt, Human
cuggagggcuagaaucugg

SEQ ID NO: 3832155 - RNA, 20 nt, Human
cuggagggcuagaaucugga

SEQ ID NO: 3832156 - RNA, 16 nt, Human
cuggaggggacgcugg

SEQ ID NO: 3832157 - RNA, 16 nt, Human
cuggaggggagcucug

SEQ ID NO: 3832158 - RNA, 22 nt, Human
cuggaggggcauggccagcagc

SEQ ID NO: 3832159 - RNA, 23 nt, Human
cuggaggggcauggccagcagcu

SEQ ID NO: 3832160 - RNA, 12 nt, Human
cuggaggggccc

SEQ ID NO: 3832161 - RNA, 17 nt, Human
cuggaggggccccugcu

SEQ ID NO: 3832162 - RNA, 22 nt, Human
cuggagggggaauggcagcagg

SEQ ID NO: 3832163 - RNA, 13 nt, Human
cugggcagaaggc

SEQ ID NO: 3832164 - RNA, 14 nt, Human
cugggcagaaggcc

SEQ ID NO: 3832165 - RNA, 17 nt, Human
cugggcagaaggccaag

SEQ ID NO: 3832166 - RNA, 17 nt, Human
cugggcagcauagcaag

SEQ ID NO: 3832167 - RNA, 15 nt, Human
cugggcagccaggcu

SEQ ID NO: 3832168 - RNA, 22 nt, Human
cugggcagcccgcuaggcucgc

SEQ ID NO: 3832169 - RNA, 20 nt, Human
cugggcagcuaccauuuccc

SEQ ID NO: 3832170 - RNA, 20 nt, Human
cugggcagcugccuccccuc

SEQ ID NO: 3832171 - RNA, 15 nt, Human
cugggcauccucagg

SEQ ID NO: 3832172 - RNA, 22 nt, Human
cugggcaugagggguuccuccc

SEQ ID NO: 3832173 - RNA, 13 nt, Human
cugggcauugcuu

SEQ ID NO: 3832174 - RNA, 16 nt, Human
cugggcauugcuuucc

SEQ ID NO: 3832175 - RNA, 17 nt, Human
cugggcauugcuuucca

SEQ ID NO: 3832176 - RNA, 23 nt, Human
cugggccaauucaauacaaacaa

SEQ ID NO: 3832177 - RNA, 12 nt, Human
cugggccagaau

SEQ ID NO: 3832178 - RNA, 13 nt, Human
cugggccaggguc

SEQ ID NO: 3832179 - RNA, 17 nt, Human
cugggccagggucugug

SEQ ID NO: 3832180 - RNA, 22 nt, Human
cugggccagggucugugugaau

SEQ ID NO: 3832181 - RNA, 17 nt, Human
cugggccauguccaaag

SEQ ID NO: 3832182 - RNA, 22 nt, Human
cugggccauguccaaagaggcu

SEQ ID NO: 3832183 - RNA, 23 nt, Human
cugggccauguccaaagaggcug

SEQ ID NO: 3832184 - RNA, 22 nt, Human
cugggccauucuccacagcaac

SEQ ID NO: 3832185 - RNA, 17 nt, Human
cugggcccaacccuguc

SEQ ID NO: 3832186 - RNA, 15 nt, Human
cugggcccacauccg

SEQ ID NO: 3832187 - RNA, 18 nt, Human
cugggcccacccaagcag

SEQ ID NO: 3832188 - RNA, 23 nt, Human
cugggcccacccaagcaggaggc

SEQ ID NO: 3832189 - RNA, 23 nt, Human
cugggcccagaagguugugauga

SEQ ID NO: 3832190 - RNA, 12 nt, Human
cugggcccagag

SEQ ID NO: 3832191 - RNA, 14 nt, Human
cugggcccaucucc

SEQ ID NO: 3832192 - RNA, 18 nt, Human
cugggcccaucucccugc

SEQ ID NO: 3832193 - RNA, 21 nt, Human
cugggcccaucucccugcuuu

SEQ ID NO: 3832194 - RNA, 13 nt, Human
cugggcccaugaa

SEQ ID NO: 3832195 - RNA, 13 nt, Human
cugggccccagcc

SEQ ID NO: 3832196 - RNA, 19 nt, Human
cugggccccagcccacccu

SEQ ID NO: 3832197 - RNA, 20 nt, Human
cugggccccagcccacccuc

SEQ ID NO: 3832198 - RNA, 21 nt, Human
cugggccccagcccacccucc

SEQ ID NO: 3832199 - RNA, 19 nt, Human
cugggccccaguuguauuu

SEQ ID NO: 3832200 - RNA, 20 nt, Human
cugggccccucaucugcuca

SEQ ID NO: 3832201 - RNA, 21 nt, Human
cugggccccucaucugcucag

SEQ ID NO: 3832202 - RNA, 12 nt, Human
cugggccccugc

SEQ ID NO: 3832203 - RNA, 11 nt, Human
cugggcccucu

SEQ ID NO: 3832204 - RNA, 18 nt, Human
cugggcccucucugcucu

SEQ ID NO: 3832205 - RNA, 22 nt, Human
cugggcccugacauuggagccu

SEQ ID NO: 3832206 - RNA, 13 nt, Human
cugggcccugagu

SEQ ID NO: 3832207 - RNA, 11 nt, Human
cugggcccugg

SEQ ID NO: 3832208 - RNA, 12 nt, Human
cugggcccuggg

SEQ ID NO: 3832209 - RNA, 14 nt, Human
cugggcccugggcu

SEQ ID NO: 3832210 - RNA, 22 nt, Human
cugggcccuggggccuguacug

SEQ ID NO: 3832211 - RNA, 15 nt, Human
cugggccgcugccac

SEQ ID NO: 3832212 - RNA, 19 nt, Human
cugggccuauggagagccc

SEQ ID NO: 3832213 - RNA, 20 nt, Human
cugggccuauggagagcccu

SEQ ID NO: 3832214 - RNA, 16 nt, Human
cugggccuccucuaac

SEQ ID NO: 3832215 - RNA, 24 nt, Human
cugggccuccucuaacaggggcug

SEQ ID NO: 3832216 - RNA, 19 nt, Human
cugggccucggaccccacu

SEQ ID NO: 3832217 - RNA, 20 nt, Human
cugggccugaccaaacagcc

SEQ ID NO: 3832218 - RNA, 13 nt, Human
cugggccugcugc

SEQ ID NO: 3832219 - RNA, 14 nt, Human
cugggccugcugcu

SEQ ID NO: 3832220 - RNA, 18 nt, Human
cugggccuggcagcucag

SEQ ID NO: 3832221 - RNA, 14 nt, Human
cugggccuggcucc

SEQ ID NO: 3832222 - RNA, 23 nt, Human
cugggccuggcucccucacucuc

SEQ ID NO: 3832223 - RNA, 16 nt, Human
cugggccugggcuagg

SEQ ID NO: 3832224 - RNA, 19 nt, Human
cugggccuggucucacccu

SEQ ID NO: 3832225 - RNA, 17 nt, Human
cugggccuguugcccuu

SEQ ID NO: 3832226 - RNA, 16 nt, Human
cugggccuuggccugg

SEQ ID NO: 3832227 - RNA, 17 nt, Human
cugggccuuggccugga

SEQ ID NO: 3832228 - RNA, 15 nt, Human
cugggcgcccuggaa

SEQ ID NO: 3832229 - RNA, 14 nt, Human
cugggcggcugugc

SEQ ID NO: 3832230 - RNA, 20 nt, Human
cugggcuagguagaaaaagg

SEQ ID NO: 3832231 - RNA, 16 nt, Human
cugggcuauggacaca

SEQ ID NO: 3832232 - RNA, 17 nt, Human
cugggcuauggacacag

SEQ ID NO: 3832233 - RNA, 17 nt, Human
cugggcucaagcagucu

SEQ ID NO: 3832234 - RNA, 21 nt, Human
cugggcucccgggccccacag

SEQ ID NO: 3832235 - RNA, 19 nt, Human
cugggcucccguguaucug

SEQ ID NO: 3832236 - RNA, 21 nt, Human
cugggcuccuaaccuuccugu

SEQ ID NO: 3832237 - RNA, 17 nt, Human
cugggcuccuccagggu

SEQ ID NO: 3832238 - RNA, 15 nt, Human
cugggcuccuggacc

SEQ ID NO: 3832239 - RNA, 13 nt, Human
cugggcucggagg

SEQ ID NO: 3832240 - RNA, 15 nt, Human
cugggcucggaggcu

SEQ ID NO: 3832241 - RNA, 18 nt, Human
cugggcucggaggcugcc

SEQ ID NO: 3832242 - RNA, 17 nt, Human
cugggcucuccaccuca

SEQ ID NO: 3832243 - RNA, 20 nt, Human
cugggcucuccaccucagcc

SEQ ID NO: 3832244 - RNA, 19 nt, Human
cugggcucucgcggccucu

SEQ ID NO: 3832245 - RNA, 23 nt, Human
cugggcucugcaauuccccucug

SEQ ID NO: 3832246 - RNA, 13 nt, Human
cugggcucugcca

SEQ ID NO: 3832247 - RNA, 17 nt, Human
cugggcucugccacccu

SEQ ID NO: 3832248 - RNA, 21 nt, Human
cugggcucugccacccuaccu

SEQ ID NO: 3832249 - RNA, 17 nt, Human
cugggcucugccccagc

SEQ ID NO: 3832250 - RNA, 16 nt, Human
cugggcucugggagca

SEQ ID NO: 3832251 - RNA, 12 nt, Human
cugggcucuguc

SEQ ID NO: 3832252 - RNA, 18 nt, Human
cugggcucugugggcugc

SEQ ID NO: 3832253 - RNA, 20 nt, Human
cugggcugacugggccaggg

SEQ ID NO: 3832254 - RNA, 12 nt, Human
cugggcugagcc

SEQ ID NO: 3832255 - RNA, 14 nt, Human
cugggcugagcccc

SEQ ID NO: 3832256 - RNA, 17 nt, Human
cugggcugagccccuac

SEQ ID NO: 3832257 - RNA, 18 nt, Human
cugggcugagggagccug

SEQ ID NO: 3832258 - RNA, 19 nt, Human
cugggcugcuacccagaaa

SEQ ID NO: 3832259 - RNA, 17 nt, Human
cugggcuggaugagcuc

SEQ ID NO: 3832260 - RNA, 19 nt, Human
cugggcuggaugagcuccc

SEQ ID NO: 3832261 - RNA, 12 nt, Human
cugggcugggca

SEQ ID NO: 3832262 - RNA, 18 nt, Human
cugggcuggggccugaug

SEQ ID NO: 3832263 - RNA, 22 nt, Human
cugggcuguaacguggcacugg

SEQ ID NO: 3832264 - RNA, 13 nt, Human
cugggcuguuggc

SEQ ID NO: 3832265 - RNA, 12 nt, Human
cugggcuguugu

SEQ ID NO: 3832266 - RNA, 14 nt, Human
cugggcuguuguuc

SEQ ID NO: 3832267 - RNA, 17 nt, Human
cugggcuucaguggcag

SEQ ID NO: 3832268 - RNA, 19 nt, Human
cugggcuucaguggcagcu

SEQ ID NO: 3832269 - RNA, 22 nt, Human
cugggcuucaguggcagcugcu

SEQ ID NO: 3832270 - RNA, 23 nt, Human
cugggcuucaguggcagcugcuu

SEQ ID NO: 3832271 - RNA, 15 nt, Human
cugggcuucaucugg

SEQ ID NO: 3832272 - RNA, 17 nt, Human
cugggcuuccuggagca

SEQ ID NO: 3832273 - RNA, 22 nt, Human
cugggcuuggggaccagagcug

SEQ ID NO: 3832274 - RNA, 20 nt, Human
cugggcuuuuguuuugcuuu

SEQ ID NO: 3832275 - RNA, 22 nt, Human
cuggggaaacuggccauggccu

SEQ ID NO: 3832276 - RNA, 20 nt, Human
cuggggaaagacacugccug

SEQ ID NO: 3832277 - RNA, 23 nt, Human
cuggggaaagacacugccugggc

SEQ ID NO: 3832278 - RNA, 17 nt, Human
cuggggaaauaacagcu

SEQ ID NO: 3832279 - RNA, 19 nt, Human
cuggggaaauaacagcugu

SEQ ID NO: 3832280 - RNA, 14 nt, Human
cuggggaacauuuc

SEQ ID NO: 3832281 - RNA, 16 nt, Human
cuggggaaccugaccc

SEQ ID NO: 3832282 - RNA, 18 nt, Human
cuggggaacguucucuuu

SEQ ID NO: 3832283 - RNA, 15 nt, Human
cuggggaagacagug

SEQ ID NO: 3832284 - RNA, 17 nt, Human
cuggggaagacaguggc

SEQ ID NO: 3832285 - RNA, 17 nt, Human
cuggggaaggagccagu

SEQ ID NO: 3832286 - RNA, 16 nt, Human
cuggggacagcaaggg

SEQ ID NO: 3832287 - RNA, 12 nt, Human
cuggggacaggu

SEQ ID NO: 3832288 - RNA, 22 nt, Human
cuggggaccugguacccuccug

SEQ ID NO: 3832289 - RNA, 14 nt, Human
cuggccuccugccu

SEQ ID NO: 3832290 - RNA, 15 nt, Human
cuggccuccugccuc

SEQ ID NO: 3832291 - RNA, 14 nt, Human
cuggccucucuagc

SEQ ID NO: 3832292 - RNA, 18 nt, Human
cuggccucucuagcacaa

SEQ ID NO: 3832293 - RNA, 18 nt, Human
cuggccucugcacucccc

SEQ ID NO: 3832294 - RNA, 20 nt, Human
cuggccucugugccuucuuu

SEQ ID NO: 3832295 - RNA, 19 nt, Human
cuggccugagagucagcuc

SEQ ID NO: 3832296 - RNA, 20 nt, Human
cuggccugagagucagcucu

SEQ ID NO: 3832297 - RNA, 12 nt, Human
cuggccugagga

SEQ ID NO: 3832298 - RNA, 19 nt, Human
cuggccugcacggugggcc

SEQ ID NO: 3832299 - RNA, 18 nt, Human
cuggccuggacuguuuuc

SEQ ID NO: 3832300 - RNA, 15 nt, Human
cuggccuggaucucc

SEQ ID NO: 3832301 - RNA, 21 nt, Human
cuggccuggaucuccccacuc

SEQ ID NO: 3832302 - RNA, 22 nt, Human
cuggccuggaucuccccacucu

SEQ ID NO: 3832303 - RNA, 11 nt, Human
cuggccuggcc

SEQ ID NO: 3832304 - RNA, 13 nt, Human
cuggccuggccag

SEQ ID NO: 3832305 - RNA, 17 nt, Human
cuggccuggccagugcc

SEQ ID NO: 3832306 - RNA, 13 nt, Human
cuggccuggcccc

SEQ ID NO: 3832307 - RNA, 17 nt, Human
cuggccuggccccucag

SEQ ID NO: 3832308 - RNA, 17 nt, Human
ccugcccccacuuccug

SEQ ID NO: 3832309 - RNA, 14 nt, Human
ccugcccccaggac

SEQ ID NO: 3832310 - RNA, 17 nt, Human
ccugccccccagccucu

SEQ ID NO: 3832311 - RNA, 19 nt, Human
ccugcccccgcauccccug

SEQ ID NO: 3832312 - RNA, 13 nt, Human
ccugcccccuggu

SEQ ID NO: 3832313 - RNA, 16 nt, Human
ccugcccccuucuccc

SEQ ID NO: 3832314 - RNA, 19 nt, Human
ccugcccccuucucccaca

SEQ ID NO: 3832315 - RNA, 23 nt, Human
ccugcccccuucucccacacugc

SEQ ID NO: 3832316 - RNA, 16 nt, Human
ccugccccgcccagcu

SEQ ID NO: 3832317 - RNA, 18 nt, Human
ccugccccgcccccaguc

SEQ ID NO: 3832318 - RNA, 18 nt, Human
ccugccccggagcuggag

SEQ ID NO: 3832319 - RNA, 14 nt, Human
ccugccccucccag

SEQ ID NO: 3832320 - RNA, 16 nt, Human
ccugccccucccuuca

SEQ ID NO: 3832321 - RNA, 22 nt, Human
ccugccccuccucucccucauc

SEQ ID NO: 3832322 - RNA, 14 nt, Human
ccugccccucuuuc

SEQ ID NO: 3832323 - RNA, 17 nt, Human
ccugccccugagcccau

SEQ ID NO: 3832324 - RNA, 16 nt, Human
ccugccccugcuacug

SEQ ID NO: 3832325 - RNA, 20 nt, Human
ccugcccggauggagcgggg

SEQ ID NO: 3832326 - RNA, 10 nt, Human
ccugcccggg

SEQ ID NO: 3832327 - RNA, 22 nt, Human
ccugcccgggcgcggccagccc

SEQ ID NO: 3832328 - RNA, 20 nt, Human
ccugcccguaaacacgccug

SEQ ID NO: 3832329 - RNA, 21 nt, Human
ccugcccguaaacacgccugc

SEQ ID NO: 3832330 - RNA, 19 nt, Human
ccugcccgucucucuccca

SEQ ID NO: 3832331 - RNA, 15 nt, Human
ccugcccguguacau

SEQ ID NO: 3832332 - RNA, 17 nt, Human
ccugcccguguacauag

SEQ ID NO: 3832333 - RNA, 14 nt, Human
ccugcccguucuug

SEQ ID NO: 3832334 - RNA, 23 nt, Human
ccugcccuacagaggucucugcc

SEQ ID NO: 3832335 - RNA, 19 nt, Human
ccugcccuagagcacacug

SEQ ID NO: 3832336 - RNA, 24 nt, Human
ccugcccuagagcacacuguagca

SEQ ID NO: 3832337 - RNA, 14 nt, Human
ccugcccuagcucc

SEQ ID NO: 3832338 - RNA, 16 nt, Human
ccugcccuagcuccac

SEQ ID NO: 3832339 - RNA, 14 nt, Human
ccugcccucaaggg

SEQ ID NO: 3832340 - RNA, 16 nt, Human
ccugcccuccccagag

SEQ ID NO: 3832341 - RNA, 19 nt, Human
ccugcccuccccagagcac

SEQ ID NO: 3832342 - RNA, 20 nt, Human
ccugcccuccccagagcacu

SEQ ID NO: 3832343 - RNA, 13 nt, Human
ccugcccuccccu

SEQ ID NO: 3832344 - RNA, 11 nt, Human
ccugcccugcc

SEQ ID NO: 3832345 - RNA, 17 nt, Human
ccugcccugccaccugu

SEQ ID NO: 3832346 - RNA, 18 nt, Human
ccugcccugccaccuguc

SEQ ID NO: 3832347 - RNA, 21 nt, Human
ccugcccugccaccugucugu

SEQ ID NO: 3832348 - RNA, 15 nt, Human
ccugcccugccugag

SEQ ID NO: 3832349 - RNA, 13 nt, Human
ccugcccugcugc

SEQ ID NO: 3832350 - RNA, 10 nt, Human
ccugcccugg

SEQ ID NO: 3832351 - RNA, 17 nt, Human
cuguacugauucaauuu

SEQ ID NO: 3832352 - RNA, 20 nt, Human
cuguacugauuuuuguaaga

SEQ ID NO: 3832353 - RNA, 22 nt, Human
cuguacugauuuuuguaagaca

SEQ ID NO: 3832354 - RNA, 13 nt, Human
cuguacugccugc

SEQ ID NO: 3832355 - RNA, 14 nt, Human
cuguacugcucagg

SEQ ID NO: 3832356 - RNA, 15 nt, Human
cuguacuggagagca

SEQ ID NO: 3832357 - RNA, 19 nt, Human
cuguacuguuacugggccc

SEQ ID NO: 3832358 - RNA, 22 nt, Human
cuguacuguuacugggcccuga

SEQ ID NO: 3832359 - RNA, 14 nt, Human
cuguacuucacugu

SEQ ID NO: 3832360 - RNA, 17 nt, Human
cuguacuucacugucag

SEQ ID NO: 3832361 - RNA, 19 nt, Human
cuguacuugcucuugaugc

SEQ ID NO: 3832362 - RNA, 22 nt, Human
cuguacuugcucuugaugccug

SEQ ID NO: 3832363 - RNA, 21 nt, Human
cuguacuuugauucacauguu

SEQ ID NO: 3832364 - RNA, 24 nt, Human
cuguacuuugauucacauguuuuc

SEQ ID NO: 3832365 - RNA, 19 nt, Human
cuguacuuuucccauuugu

SEQ ID NO: 3832366 - RNA, 15 nt, Human
cuguacuuuuuggca

SEQ ID NO: 3832367 - RNA, 23 nt, Human
cuguagaaaaaaaaauucacaug

SEQ ID NO: 3832368 - RNA, 19 nt, Human
cuguagaaaugguuguauu

SEQ ID NO: 3832369 - RNA, 18 nt, Human
cuguagaacucaaccucu

SEQ ID NO: 3832370 - RNA, 15 nt, Human
cuguagacaucuguc

SEQ ID NO: 3832371 - RNA, 17 nt, Human
cuguagacaucuguccu

SEQ ID NO: 3832372 - RNA, 18 nt, Human
cuguagacggcucaguau

SEQ ID NO: 3832373 - RNA, 16 nt, Human
cuguagagggcccugg

SEQ ID NO: 3832374 - RNA, 15 nt, Human
cuguagaguugcuga

SEQ ID NO: 3832375 - RNA, 17 nt, Human
cuguagauaauuaacca

SEQ ID NO: 3832376 - RNA, 20 nt, Human
cuguagauauguauucuuuu

SEQ ID NO: 3832377 - RNA, 19 nt, Human
cuguagauugcuucuguag

SEQ ID NO: 3832378 - RNA, 12 nt, Human
cuguagcaucuu

SEQ ID NO: 3832379 - RNA, 15 nt, Human
cuguagcaucuucug

SEQ ID NO: 3832380 - RNA, 17 nt, Human
cuguagcauuacagugg

SEQ ID NO: 3832381 - RNA, 18 nt, Human
cuguagcauuacaguggg

SEQ ID NO: 3832382 - RNA, 15 nt, Human
cuguagccagcaccu

SEQ ID NO: 3832383 - RNA, 21 nt, Human
cuguagccccagugacagcua

SEQ ID NO: 3832384 - RNA, 21 nt, Human
cuguagccuauuuuuuuagau

SEQ ID NO: 3832385 - RNA, 15 nt, Human
cuguagccucagaug

SEQ ID NO: 3832386 - RNA, 15 nt, Human
cuguagcucuaaaau

SEQ ID NO: 3832387 - RNA, 14 nt, Human
cuguagcugccaug

SEQ ID NO: 3832388 - RNA, 18 nt, Human
cuguagcuuguucccugu

SEQ ID NO: 3832389 - RNA, 18 nt, Human
cuguaggaagguacugua

SEQ ID NO: 3832390 - RNA, 19 nt, Human
cuguaggaagguacuguau

SEQ ID NO: 3832391 - RNA, 21 nt, Human
cuguaggaagguuaauguuca

SEQ ID NO: 3832392 - RNA, 18 nt, Human
cuguaggaguucuauuuu

SEQ ID NO: 3832393 - RNA, 21 nt, Human
cuguagggcuggaccuauguc

SEQ ID NO: 3832394 - RNA, 24 nt, Human
cuguaggguaauuaguaacaugug

SEQ ID NO: 3832395 - RNA, 17 nt, Human
cuguaguaaauaaugcu

SEQ ID NO: 3832396 - RNA, 18 nt, Human
cuguaguagcccuuucug

SEQ ID NO: 3832397 - RNA, 16 nt, Human
cuguagucauuuacua

SEQ ID NO: 3832398 - RNA, 15 nt, Human
cuguagucccagcca

SEQ ID NO: 3832399 - RNA, 23 nt, Human
cuguagucccagccacucgggag

SEQ ID NO: 3832400 - RNA, 14 nt, Human
cuguagucccagcu

SEQ ID NO: 3832401 - RNA, 15 nt, Human
cuguagucccagcua

SEQ ID NO: 3832402 - RNA, 22 nt, Human
cuguaguccuagccacucagga

SEQ ID NO: 3832403 - RNA, 15 nt, Human
cuguagucucaggac

SEQ ID NO: 3832404 - RNA, 14 nt, Human
cuguaguuaggaaa

SEQ ID NO: 3832405 - RNA, 15 nt, Human
cuguaguuaggaaau

SEQ ID NO: 3832406 - RNA, 17 nt, Human
cuguaguuaggaaauaa

SEQ ID NO: 3832407 - RNA, 22 nt, Human
cuguaguuaggaaauaaaaccu

SEQ ID NO: 3832408 - RNA, 12 nt, Human
cuguaguuuuau

SEQ ID NO: 3832409 - RNA, 21 nt, Human
cuguaguuuuaucacauguau

SEQ ID NO: 3832410 - RNA, 22 nt, Human
cuguaguuuuaucacauguaug

SEQ ID NO: 3832411 - RNA, 23 nt, Human
cuguaguuuuaucacauguaugu

SEQ ID NO: 3832412 - RNA, 17 nt, Human
cuguaguuuuauuuuau

SEQ ID NO: 3832413 - RNA, 18 nt, Human
cuguaguuuuauuuuaug

SEQ ID NO: 3832414 - RNA, 11 nt, Human
cuguauaaaau

SEQ ID NO: 3832415 - RNA, 21 nt, Human
cuguauaaacauuaaaugucu

SEQ ID NO: 3832416 - RNA, 21 nt, Human
cuguauaaaggugugcugugu

SEQ ID NO: 3832417 - RNA, 19 nt, Human
cuguauaaauaggagagga

SEQ ID NO: 3832418 - RNA, 15 nt, Human
cuguauaaaugucuu

SEQ ID NO: 3832419 - RNA, 16 nt, Human
cuguauaacccuguua

SEQ ID NO: 3832420 - RNA, 18 nt, Human
cuguauaacccuguuaca

SEQ ID NO: 3832421 - RNA, 19 nt, Human
cuguauaagcacugaaaaa

SEQ ID NO: 3832422 - RNA, 21 nt, Human
cuguauaagcacugaaaaaca

SEQ ID NO: 3832423 - RNA, 14 nt, Human
cuguauaaguaaga

SEQ ID NO: 3832424 - RNA, 17 nt, Human
cuguauaaguaagaaaa

SEQ ID NO: 3832425 - RNA, 13 nt, Human
cuguauacagugc

SEQ ID NO: 3832426 - RNA, 12 nt, Human
cuguauacuuua

SEQ ID NO: 3832427 - RNA, 20 nt, Human
cuguauagacaguuuguaaa

SEQ ID NO: 3832428 - RNA, 15 nt, Human
cuguauagauuagag

SEQ ID NO: 3832429 - RNA, 20 nt, Human
cuguauagcugcuuccagug

SEQ ID NO: 3832430 - RNA, 16 nt, Human
cuguauauaaaggaaa

SEQ ID NO: 3832431 - RNA, 15 nt, Human
cuguauauaaauggg

SEQ ID NO: 3832432 - RNA, 16 nt, Human
cuguauauaaauggga

SEQ ID NO: 3832433 - RNA, 23 nt, Human
cuguauauacaauaacauaauuu

SEQ ID NO: 3832434 - RNA, 14 nt, Human
cuguauauucagga

SEQ ID NO: 3832435 - RNA, 16 nt, Human
cuguauauuuguaaag

SEQ ID NO: 3832436 - RNA, 20 nt, Human
cuguauauuuguaaagcuau

SEQ ID NO: 3832437 - RNA, 21 nt, Human
cuguauauuuguaugauauuu

SEQ ID NO: 3832438 - RNA, 22 nt, Human
cuguauauuugugauagcacuu

SEQ ID NO: 3832439 - RNA, 23 nt, Human
cuguauauuugugauagcacuuu

SEQ ID NO: 3832440 - RNA, 14 nt, Human
cuguaucacucugu

SEQ ID NO: 3832441 - RNA, 16 nt, Human
cuguaucaggacccag

SEQ ID NO: 3832442 - RNA, 20 nt, Human
cuguaucaguggauuuccca

SEQ ID NO: 3832443 - RNA, 15 nt, Human
cuguaucccaugagc

SEQ ID NO: 3832444 - RNA, 16 nt, Human
cuguaucccaugagcc

SEQ ID NO: 3832445 - RNA, 20 nt, Human
cuguaucccaugagccucag

SEQ ID NO: 3832446 - RNA, 21 nt, Human
cuguaucccaugagccucagc

SEQ ID NO: 3832447 - RNA, 17 nt, Human
cuguaucuguagugaga

SEQ ID NO: 3832448 - RNA, 22 nt, Human
cuguaucuugggggacagggcu

SEQ ID NO: 3832449 - RNA, 18 nt, Human
cuguaucuuguuuuucca

SEQ ID NO: 3832450 - RNA, 13 nt, Human
cuguaugaucaaa

SEQ ID NO: 3832451 - RNA, 17 nt, Human
cuguaugaucaaauguu

SEQ ID NO: 3832452 - RNA, 22 nt, Human
cuguggggacuccggcugugcu

SEQ ID NO: 3832453 - RNA, 17 nt, Human
cuguggggaucucaggg

SEQ ID NO: 3832454 - RNA, 19 nt, Human
cuguggggauuucucccag

SEQ ID NO: 3832455 - RNA, 19 nt, Human
cuguggggccuugguuccc

SEQ ID NO: 3832456 - RNA, 19 nt, Human
cugugggggugugcccccu

SEQ ID NO: 3832457 - RNA, 23 nt, Human
cuguggggugugcacaucucugc

SEQ ID NO: 3832458 - RNA, 15 nt, Human
cuguggguaguauga

SEQ ID NO: 3832459 - RNA, 23 nt, Human
cugugguaaaugccacacaccuu

SEQ ID NO: 3832460 - RNA, 23 nt, Human
cugugguaguacuccugcaaaau

SEQ ID NO: 3832461 - RNA, 13 nt, Human
cuguggugacuuu

SEQ ID NO: 3832462 - RNA, 15 nt, Human
cuguggugacuuugg

SEQ ID NO: 3832463 - RNA, 19 nt, Human
cuguggugagguugggcag

SEQ ID NO: 3832464 - RNA, 22 nt, Human
cuguggugcaaaagcagaaaau

SEQ ID NO: 3832465 - RNA, 22 nt, Human
cugugguucugagauggcuccc

SEQ ID NO: 3832466 - RNA, 23 nt, Human
cugugguucugagauggcuccca

SEQ ID NO: 3832467 - RNA, 18 nt, Human
cugugguuggcugggaaa

SEQ ID NO: 3832468 - RNA, 18 nt, Human
cugugguuucauguuagu

SEQ ID NO: 3832469 - RNA, 21 nt, Human
cugugguuuuccccucccugg

SEQ ID NO: 3832470 - RNA, 21 nt, Human
cugugguuuucuuuugccaug

SEQ ID NO: 3832471 - RNA, 17 nt, Human
cuguguaaaaagagagc

SEQ ID NO: 3832472 - RNA, 15 nt, Human
cuguguaaaauguaa

SEQ ID NO: 3832473 - RNA, 11 nt, Human
cuguguaaagu

SEQ ID NO: 3832474 - RNA, 13 nt, Human
cuguguaaaguua

SEQ ID NO: 3832475 - RNA, 14 nt, Human
cuguguaacagcuc

SEQ ID NO: 3832476 - RNA, 22 nt, Human
cuguguaacagcuccuugggag

SEQ ID NO: 3832477 - RNA, 22 nt, Human
cuguguaaccauuuuauaaagu

SEQ ID NO: 3832478 - RNA, 15 nt, Human
cuguguaacugccca

SEQ ID NO: 3832479 - RNA, 13 nt, Human
cuguguaagauuu

SEQ ID NO: 3832480 - RNA, 18 nt, Human
cuguguaauuagugccac

SEQ ID NO: 3832481 - RNA, 23 nt, Human
cuguguacauaacucuguaaaaa

SEQ ID NO: 3832482 - RNA, 22 nt, Human
cuguguacauaacugaaaaugu

SEQ ID NO: 3832483 - RNA, 13 nt, Human
cuguguacugugu

SEQ ID NO: 3832484 - RNA, 16 nt, Human
cuguguacuucccggg

SEQ ID NO: 3832485 - RNA, 18 nt, Human
cuguguagcugugaccug

SEQ ID NO: 3832486 - RNA, 20 nt, Human
cuguguagcugugaccugcu

SEQ ID NO: 3832487 - RNA, 12 nt, Human
cuguguauauuu

SEQ ID NO: 3832488 - RNA, 16 nt, Human
cuguguauauuugauu

SEQ ID NO: 3832489 - RNA, 13 nt, Human
cuguguauguaca

SEQ ID NO: 3832490 - RNA, 19 nt, Human
cuguguauuccaagacaug

SEQ ID NO: 3832491 - RNA, 22 nt, Human
cuguguauuuaauuguaaacug

SEQ ID NO: 3832492 - RNA, 23 nt, Human
cuguguauuuaauuguaaacugu

SEQ ID NO: 3832493 - RNA, 14 nt, Human
cuguguauuugcuu

SEQ ID NO: 3832494 - RNA, 15 nt, Human
cuguguauuugcuuu

SEQ ID NO: 3832495 - RNA, 16 nt, Human
cuguguauuuucaguc

SEQ ID NO: 3832496 - RNA, 19 nt, Human
cuguguauuuuuuaaagcu

SEQ ID NO: 3832497 - RNA, 19 nt, Human
cugugucaauccagauggu

SEQ ID NO: 3832498 - RNA, 15 nt, Human
cugugucacuggcug

SEQ ID NO: 3832499 - RNA, 16 nt, Human
cugugucacuggcugc

SEQ ID NO: 3832500 - RNA, 18 nt, Human
cugugucacuggcugccu

SEQ ID NO: 3832501 - RNA, 17 nt, Human
cugugucagcauagaag

SEQ ID NO: 3832502 - RNA, 19 nt, Human
cugugucagguggggcagc

SEQ ID NO: 3832503 - RNA, 21 nt, Human
cuguguccaaaaccgccagcu

SEQ ID NO: 3832504 - RNA, 22 nt, Human
cuguguccaaaaccgccagcuc

SEQ ID NO: 3832505 - RNA, 14 nt, Human
cuguguccaacucc

SEQ ID NO: 3832506 - RNA, 17 nt, Human
cuguguccaacuccagu

SEQ ID NO: 3832507 - RNA, 15 nt, Human
cugugucccaugacc

SEQ ID NO: 3832508 - RNA, 20 nt, Human
cugugucccaugacccaccc

SEQ ID NO: 3832509 - RNA, 20 nt, Human
cugugucccucucucuggaa

SEQ ID NO: 3832510 - RNA, 17 nt, Human
cuguguccuggugcucu

SEQ ID NO: 3832511 - RNA, 23 nt, Human
cuguguccuggugcucucugcca

SEQ ID NO: 3832512 - RNA, 16 nt, Human
cuguguccuucccugc

SEQ ID NO: 3832513 - RNA, 16 nt, Human
cuguguccuugcaccu

SEQ ID NO: 3832514 - RNA, 11 nt, Human
cugugucuaaa

SEQ ID NO: 3832515 - RNA, 19 nt, Human
cugugucuaagauucuaga

SEQ ID NO: 3832516 - RNA, 15 nt, Human
cugugucugaguggc

SEQ ID NO: 3832517 - RNA, 13 nt, Human
cugugucuguguu

SEQ ID NO: 3832518 - RNA, 14 nt, Human
cugugucuugcaau

SEQ ID NO: 3832519 - RNA, 22 nt, Human
cugugucuugcaauggcagccu

SEQ ID NO: 3832520 - RNA, 20 nt, Human
cugugucuuuaaaugcugcu

SEQ ID NO: 3832521 - RNA, 20 nt, Human
cugugucuuucacagcuccu

SEQ ID NO: 3832522 - RNA, 19 nt, Human
cugugugaauaccugcuca

SEQ ID NO: 3832523 - RNA, 21 nt, Human
cugugugauugacagcuuugc

SEQ ID NO: 3832524 - RNA, 18 nt, Human
cugugugcagucucucuu

SEQ ID NO: 3832525 - RNA, 14 nt, Human
cugugugccuucgc

SEQ ID NO: 3832526 - RNA, 16 nt, Human
cuguguggagagggaa

SEQ ID NO: 3832527 - RNA, 17 nt, Human
cugugugggacuguaca

SEQ ID NO: 3832528 - RNA, 21 nt, Human
cugugugggacuguacacacu

SEQ ID NO: 3832529 - RNA, 22 nt, Human
cuguguggugucgcgccuucuc

SEQ ID NO: 3832530 - RNA, 20 nt, Human
cugugugguuuaguguaaaa

SEQ ID NO: 3832531 - RNA, 14 nt, Human
cugugugucaguuu

SEQ ID NO: 3832532 - RNA, 18 nt, Human
cugugugucccaggcagg

SEQ ID NO: 3832533 - RNA, 20 nt, Human
cugugugucccaggcaggga

SEQ ID NO: 3832534 - RNA, 16 nt, Human
cugugugugaccccuc

SEQ ID NO: 3832535 - RNA, 17 nt, Human
cugugugugaccccucc

SEQ ID NO: 3832536 - RNA, 21 nt, Human
cugugugugaccccuccuggg

SEQ ID NO: 3832537 - RNA, 13 nt, Human
cugugugugcccu

SEQ ID NO: 3832538 - RNA, 20 nt, Human
cugugugugcccucugggcu

SEQ ID NO: 3832539 - RNA, 14 nt, Human
cugugugugcccug

SEQ ID NO: 3832540 - RNA, 15 nt, Human
cugugugugcccugu

SEQ ID NO: 3832541 - RNA, 12 nt, Human
cuguguguguga

SEQ ID NO: 3832542 - RNA, 21 nt, Human
cuguguguguguauguggggg

SEQ ID NO: 3832543 - RNA, 16 nt, Human
cuguguguuaguuccc

SEQ ID NO: 3832544 - RNA, 21 nt, Human
cuguguguuaguucccaacau

SEQ ID NO: 3832545 - RNA, 12 nt, Human
cuguguguuccu

SEQ ID NO: 3832546 - RNA, 13 nt, Human
cuguguguugcca

SEQ ID NO: 3832547 - RNA, 16 nt, Human
cuguguguuuucauaa

SEQ ID NO: 3832548 - RNA, 15 nt, Human
cuguguuaauuuaag

SEQ ID NO: 3832549 - RNA, 21 nt, Human
cuguguuauuauagagcagaa

SEQ ID NO: 3832550 - RNA, 20 nt, Human
cuguguucgacucagccuca

SEQ ID NO: 3832551 - RNA, 22 nt, Human
cuguguucgacucagccucagg

SEQ ID NO: 3832552 - RNA, 22 nt, Human
cuguguucuugccacugcacuc

SEQ ID NO: 3832553 - RNA, 13 nt, Human
cuguguugccaag

SEQ ID NO: 3832554 - RNA, 17 nt, Human
cuguguugccaagcucc

SEQ ID NO: 3832555 - RNA, 21 nt, Human
cuguguugccaagcuccaagc

SEQ ID NO: 3832556 - RNA, 13 nt, Human
cuguguugccaca

SEQ ID NO: 3832557 - RNA, 22 nt, Human
cuguguugccacaguagaacug

SEQ ID NO: 3832558 - RNA, 14 nt, Human
cuguguugccaugu

SEQ ID NO: 3832559 - RNA, 18 nt, Human
cuguguugcgugucgugg

SEQ ID NO: 3832560 - RNA, 15 nt, Human
cugucuaaaguguau

SEQ ID NO: 3832561 - RNA, 16 nt, Human
cugucuaaccugugac

SEQ ID NO: 3832562 - RNA, 17 nt, Human
cugucuaaccugugacc

SEQ ID NO: 3832563 - RNA, 13 nt, Human
cugucuaccaucu

SEQ ID NO: 3832564 - RNA, 17 nt, Human
cugucuagagagggagg

SEQ ID NO: 3832565 - RNA, 23 nt, Human
cugucuagcacuuccuugccagu

SEQ ID NO: 3832566 - RNA, 19 nt, Human
cugucuagucucuccugua

SEQ ID NO: 3832567 - RNA, 18 nt, Human
cugucuauuucugcugaa

SEQ ID NO: 3832568 - RNA, 22 nt, Human
cugucucaaaaaaagaaaaaga

SEQ ID NO: 3832569 - RNA, 20 nt, Human
cugucucaagagggcacugg

SEQ ID NO: 3832570 - RNA, 14 nt, Human
cugucucagacuuu

SEQ ID NO: 3832571 - RNA, 20 nt, Human
cugucucagacuuuuguaca

SEQ ID NO: 3832572 - RNA, 16 nt, Human
cugucucagccuccca

SEQ ID NO: 3832573 - RNA, 13 nt, Human
cugucucagggug

SEQ ID NO: 3832574 - RNA, 12 nt, Human
cugucucaucca

SEQ ID NO: 3832575 - RNA, 15 nt, Human
cugucucauccauca

SEQ ID NO: 3832576 - RNA, 16 nt, Human
cugucucauccaucau

SEQ ID NO: 3832577 - RNA, 13 nt, Human
cugucucaucccc

SEQ ID NO: 3832578 - RNA, 16 nt, Human
cugucucauccccagg

SEQ ID NO: 3832579 - RNA, 19 nt, Human
cugucucauccccaggggu

SEQ ID NO: 3832580 - RNA, 16 nt, Human
cugucucauccuccug

SEQ ID NO: 3832581 - RNA, 18 nt, Human
cugucucauccuccugga

SEQ ID NO: 3832582 - RNA, 22 nt, Human
cugucucauccuccuggaaccu

SEQ ID NO: 3832583 - RNA, 14 nt, Human
cugucuccacugug

SEQ ID NO: 3832584 - RNA, 13 nt, Human
cugucuccagacc

SEQ ID NO: 3832585 - RNA, 19 nt, Human
cugucuccagacccccacc

SEQ ID NO: 3832586 - RNA, 15 nt, Human
cugucuccagcuucc

SEQ ID NO: 3832587 - RNA, 20 nt, Human
cugucuccauggcccugcaa

SEQ ID NO: 3832588 - RNA, 13 nt, Human
cugucuccuagga

SEQ ID NO: 3832589 - RNA, 20 nt, Human
cugucuccuuaacacugagc

SEQ ID NO: 3832590 - RNA, 15 nt, Human
cugucucgagcgccc

SEQ ID NO: 3832591 - RNA, 16 nt, Human
cugucucuaacuuauu

SEQ ID NO: 3832592 - RNA, 18 nt, Human
cugucucuacuaaaaaua

SEQ ID NO: 3832593 - RNA, 15 nt, Human
cugucucuagccacu

SEQ ID NO: 3832594 - RNA, 20 nt, Human
cugucucuagccacuuuggu

SEQ ID NO: 3832595 - RNA, 17 nt, Human
cugucucucaugaaccu

SEQ ID NO: 3832596 - RNA, 13 nt, Human
cugugcagggagg

SEQ ID NO: 3832597 - RNA, 22 nt, Human
cugugcagggaggagguggcag

SEQ ID NO: 3832598 - RNA, 18 nt, Human
cugugcagucacuggagg

SEQ ID NO: 3832599 - RNA, 21 nt, Human
cugugcaucuagccucaagcu

SEQ ID NO: 3832600 - RNA, 14 nt, Human
cugugccagagccu

SEQ ID NO: 3832601 - RNA, 17 nt, Human
cugugccagagccuggg

SEQ ID NO: 3832602 - RNA, 18 nt, Human
cugugccagagccugggg

SEQ ID NO: 3832603 - RNA, 16 nt, Human
cugugccagcccagag

SEQ ID NO: 3832604 - RNA, 22 nt, Human
cugugcccacaucccaggcuuc

SEQ ID NO: 3832605 - RNA, 23 nt, Human
cugugcccacaucccaggcuuca

SEQ ID NO: 3832606 - RNA, 12 nt, Human
cugugcccagcu

SEQ ID NO: 3832607 - RNA, 15 nt, Human
cugugcccaugggca

SEQ ID NO: 3832608 - RNA, 18 nt, Human
cugugcccaugggcacug

SEQ ID NO: 3832609 - RNA, 17 nt, Human
cugugccccaugccugu

SEQ ID NO: 3832610 - RNA, 21 nt, Human
cugugccccuuccgccacugg

SEQ ID NO: 3832611 - RNA, 22 nt, Human
cugugccccuuccgccacuggg

SEQ ID NO: 3832612 - RNA, 17 nt, Human
cugugcccuccugaccc

SEQ ID NO: 3832613 - RNA, 17 nt, Human
cugugcccuuauucagg

SEQ ID NO: 3832614 - RNA, 16 nt, Human
cugugccuccaucagc

SEQ ID NO: 3832615 - RNA, 14 nt, Human
cugugccucccaaa

SEQ ID NO: 3832616 - RNA, 13 nt, Human
cugugccuccuca

SEQ ID NO: 3832617 - RNA, 16 nt, Human
cugugccuccucaccc

SEQ ID NO: 3832618 - RNA, 22 nt, Human
cugugccucgcuccccacucug

SEQ ID NO: 3832619 - RNA, 13 nt, Human
cugugccucggcu

SEQ ID NO: 3832620 - RNA, 22 nt, Human
cugugccucggcuuuucucagc

SEQ ID NO: 3832621 - RNA, 17 nt, Human
cugugccugaccuugag

SEQ ID NO: 3832622 - RNA, 20 nt, Human
cugugccuggagcuccuggg

SEQ ID NO: 3832623 - RNA, 21 nt, Human
cugugccuuugaguuuccuca

SEQ ID NO: 3832624 - RNA, 16 nt, Human
cugugccuuuugccau

SEQ ID NO: 3832625 - RNA, 20 nt, Human
cugugcgcauaggccugcuu

SEQ ID NO: 3832626 - RNA, 14 nt, Human
cugugcgcccaggg

SEQ ID NO: 3832627 - RNA, 17 nt, Human
cugugcgcccagggcug

SEQ ID NO: 3832628 - RNA, 14 nt, Human
cugugcgcugacaa

SEQ ID NO: 3832629 - RNA, 19 nt, Human
cugugcgucuugguguaau

SEQ ID NO: 3832630 - RNA, 14 nt, Human
cugugcgugaaaca

SEQ ID NO: 3832631 - RNA, 22 nt, Human
cugugcguggggcucccgccuc

SEQ ID NO: 3832632 - RNA, 13 nt, Human
cugugcuaugaau

SEQ ID NO: 3832633 - RNA, 15 nt, Human
cugugcucagagacc

SEQ ID NO: 3832634 - RNA, 13 nt, Human
cugugcucagccc

SEQ ID NO: 3832635 - RNA, 17 nt, Human
cugugcucaggacucag

SEQ ID NO: 3832636 - RNA, 18 nt, Human
cugugcucaggacucaga

SEQ ID NO: 3832637 - RNA, 19 nt, Human
cugugcucaggacucagaa

SEQ ID NO: 3832638 - RNA, 22 nt, Human
cugugcucccugguucugauga

SEQ ID NO: 3832639 - RNA, 20 nt, Human
cugugcuccgugccuccacc

SEQ ID NO: 3832640 - RNA, 18 nt, Human
cugugcucuggacaggca

SEQ ID NO: 3832641 - RNA, 19 nt, Human
cugugcucuggacaggcau

SEQ ID NO: 3832642 - RNA, 14 nt, Human
cugugcugaaugcu

SEQ ID NO: 3832643 - RNA, 21 nt, Human
cugugcugacauggcucugga

SEQ ID NO: 3832644 - RNA, 13 nt, Human
cugugcugacccu

SEQ ID NO: 3832645 - RNA, 18 nt, Human
cugugcugacccuccugu

SEQ ID NO: 3832646 - RNA, 22 nt, Human
cugugcugagucugaaggcugg

SEQ ID NO: 3832647 - RNA, 22 nt, Human
cugugcugcccgucuucagccu

SEQ ID NO: 3832648 - RNA, 17 nt, Human
cugugcugcccugaaga

SEQ ID NO: 3832649 - RNA, 18 nt, Human
cugugcugcccugaagaa

SEQ ID NO: 3832650 - RNA, 19 nt, Human
cugugcugcccugcccacc

SEQ ID NO: 3832651 - RNA, 13 nt, Human
cugugcuggccag

SEQ ID NO: 3832652 - RNA, 13 nt, Human
cugugcuggggga

SEQ ID NO: 3832653 - RNA, 23 nt, Human
cugugcugggggaaugagcccag

SEQ ID NO: 3832654 - RNA, 17 nt, Human
cugugcugguguccuga

SEQ ID NO: 3832655 - RNA, 18 nt, Human
cugugcugugugugacgu

SEQ ID NO: 3832656 - RNA, 13 nt, Human
cugugcuguuguu

SEQ ID NO: 3832657 - RNA, 21 nt, Human
cugugcuguuguuaugaugug

SEQ ID NO: 3832658 - RNA, 16 nt, Human
cugugcuuaugguacc

SEQ ID NO: 3832659 - RNA, 17 nt, Human
cugugcuugaaggcccu

SEQ ID NO: 3832660 - RNA, 15 nt, Human
cugugcuuuccagcu

SEQ ID NO: 3832661 - RNA, 14 nt, Human
cugugcuuucccug

SEQ ID NO: 3832662 - RNA, 22 nt, Human
cugugcuuucuauuguacagaa

SEQ ID NO: 3832663 - RNA, 18 nt, Human
cugugcuuugacucaccu

SEQ ID NO: 3832664 - RNA, 21 nt, Human
cugugcuuugacucaccuguu

SEQ ID NO: 3832665 - RNA, 17 nt, Human
cugugcuuuuaaaugca

SEQ ID NO: 3832666 - RNA, 14 nt, Human
cuguggaaaaauau

SEQ ID NO: 3832667 - RNA, 19 nt, Human
cuguggaaaaauauuuaag

SEQ ID NO: 3832668 - RNA, 22 nt, Human
cuguggaaaagaaacacgcacu

SEQ ID NO: 3832669 - RNA, 17 nt, Human
cuguggaaaguguaaag

SEQ ID NO: 3832670 - RNA, 16 nt, Human
cuguggaacccagcag

SEQ ID NO: 3832671 - RNA, 23 nt, Human
cuguggaacccagcaguucuguu

SEQ ID NO: 3832672 - RNA, 19 nt, Human
cuguggaaggcagagaaau

SEQ ID NO: 3832673 - RNA, 14 nt, Human
cuguggaagggacu

SEQ ID NO: 3832674 - RNA, 16 nt, Human
cuguggaagggacuag

SEQ ID NO: 3832675 - RNA, 19 nt, Human
cuguggaaugagugugcau

SEQ ID NO: 3832676 - RNA, 21 nt, Human
cuguggacugaccuuguaaaa

SEQ ID NO: 3832677 - RNA, 22 nt, Human
cuguggacugaccuuguaaaag

SEQ ID NO: 3832678 - RNA, 19 nt, Human
cuguggagacugcuccuga

SEQ ID NO: 3832679 - RNA, 22 nt, Human
cuguggagcccgcacccccacc

SEQ ID NO: 3832680 - RNA, 17 nt, Human
cuguggagcucagcccc

SEQ ID NO: 3832681 - RNA, 15 nt, Human
cuguggaggaaggau

SEQ ID NO: 3832682 - RNA, 16 nt, Human
cuguggaggaaggauu

SEQ ID NO: 3832683 - RNA, 17 nt, Human
cuguggaggaaggauug

SEQ ID NO: 3832684 - RNA, 19 nt, Human
cuguggaggaaggauugua

SEQ ID NO: 3832685 - RNA, 20 nt, Human
cuguggauacccuuacccuu

SEQ ID NO: 3832686 - RNA, 24 nt, Human
cuguggaucaaauccagccugcug

SEQ ID NO: 3832687 - RNA, 14 nt, Human
cuguggaugcugcu

SEQ ID NO: 3832688 - RNA, 16 nt, Human
cuguggaugcugcugc

SEQ ID NO: 3832689 - RNA, 19 nt, Human
cuguggaugcugcugcccc

SEQ ID NO: 3832690 - RNA, 16 nt, Human
cuguggcacuugccug

SEQ ID NO: 3832691 - RNA, 17 nt, Human
cuguggcacuugccugg

SEQ ID NO: 3832692 - RNA, 22 nt, Human
cuguggcagaguuacaguucug

SEQ ID NO: 3832693 - RNA, 23 nt, Human
cuguggcagaguuacaguucugu

SEQ ID NO: 3832694 - RNA, 13 nt, Human
cuguggcaggcag

SEQ ID NO: 3832695 - RNA, 15 nt, Human
cuguggcaguaaaga

SEQ ID NO: 3832696 - RNA, 16 nt, Human
cuguggcauugaaaug

SEQ ID NO: 3832697 - RNA, 18 nt, Human
cuguggccaaguucuuag

SEQ ID NO: 3832698 - RNA, 22 nt, Human
cuguggccagcuuguuauuuau

SEQ ID NO: 3832699 - RNA, 22 nt, Human
cuguggccaugacccugccucu

SEQ ID NO: 3832700 - RNA, 22 nt, Human
cuguggccaugguccccaagac

SEQ ID NO: 3832701 - RNA, 18 nt, Human
cuguggccccacccuggg

SEQ ID NO: 3832702 - RNA, 14 nt, Human
cuguggcccugucc

SEQ ID NO: 3832703 - RNA, 19 nt, Human
cuguggccguuaucuggaa

SEQ ID NO: 3832704 - RNA, 21 nt, Human
cuguggccguuaucuggaagu

SEQ ID NO: 3832705 - RNA, 18 nt, Human
cuguggccuaaccugccg

SEQ ID NO: 3832706 - RNA, 20 nt, Human
cuguggccugugucccauga

SEQ ID NO: 3832707 - RNA, 13 nt, Human
cuguggccuuguu

SEQ ID NO: 3832708 - RNA, 22 nt, Human
cuguggcgagccauuuguccca

SEQ ID NO: 3832709 - RNA, 19 nt, Human
cuguggcgccgucuccagg

SEQ ID NO: 3832710 - RNA, 20 nt, Human
cuguggcgccgucuccaggg

SEQ ID NO: 3832711 - RNA, 15 nt, Human
cuguggcggugccug

SEQ ID NO: 3832712 - RNA, 16 nt, Human
cuguggcuccaggcca

SEQ ID NO: 3832713 - RNA, 14 nt, Human
cuguggcugcgcuu

SEQ ID NO: 3832714 - RNA, 17 nt, Human
cuguggcugcuagcacu

SEQ ID NO: 3832715 - RNA, 12 nt, Human
cuguggcuggug

SEQ ID NO: 3832716 - RNA, 15 nt, Human
cuguggcugucugga

SEQ ID NO: 3832717 - RNA, 14 nt, Human
cugugggaaauggu

SEQ ID NO: 3832718 - RNA, 13 nt, Human
cugugggaaauua

SEQ ID NO: 3832719 - RNA, 20 nt, Human
cugugggaacgagaggggaa

SEQ ID NO: 3832720 - RNA, 21 nt, Human
cugugggaacgagaggggaag

SEQ ID NO: 3832721 - RNA, 15 nt, Human
cugugggaccccagg

SEQ ID NO: 3832722 - RNA, 14 nt, Human
cugugggagccucg

SEQ ID NO: 3832723 - RNA, 15 nt, Human
cugugggagccucgc

SEQ ID NO: 3832724 - RNA, 14 nt, Human
cugugggagccugc

SEQ ID NO: 3832725 - RNA, 18 nt, Human
cugugggcaaaagagugu

SEQ ID NO: 3832726 - RNA, 14 nt, Human
aaauuuuucauauu

SEQ ID NO: 3832727 - RNA, 13 nt, Human
aaauuuuugaaaa

SEQ ID NO: 3832728 - RNA, 15 nt, Human
aaauuuuuggauuga

SEQ ID NO: 3832729 - RNA, 17 nt, Human
aaauuuuuggauugaca

SEQ ID NO: 3832730 - RNA, 21 nt, Human
aaauuuuuggauugacaguaa

SEQ ID NO: 3832731 - RNA, 14 nt, Human
aaauuuuuguaaau

SEQ ID NO: 3832732 - RNA, 16 nt, Human
aaauuuuuuaaaagag

SEQ ID NO: 3832733 - RNA, 18 nt, Human
aaauuuuuuaaaagagac

SEQ ID NO: 3832734 - RNA, 20 nt, Human
aaauuuuuucucuaggaaau

SEQ ID NO: 3832735 - RNA, 13 nt, Human
aaauuuuuugacu

SEQ ID NO: 3832736 - RNA, 11 nt, Human
aaauuuuuugu

SEQ ID NO: 3832737 - RNA, 15 nt, Human
aaauuuuuuguugac

SEQ ID NO: 3832738 - RNA, 23 nt, Human
aaauuuuuuuggucuuuuuguaa

SEQ ID NO: 3832739 - RNA, 16 nt, Human
aaauuuuuuuuacauu

SEQ ID NO: 3832740 - RNA, 13 nt, Human
ccuuccuggacag

SEQ ID NO: 3832741 - RNA, 22 nt, Human
ccuuccuggacagcugugccuc

SEQ ID NO: 3832742 - RNA, 16 nt, Human
ccuuccuggccugaga

SEQ ID NO: 3832743 - RNA, 21 nt, Human
ccuuccugggcacacgcugcu

SEQ ID NO: 3832744 - RNA, 22 nt, Human
ccuuccugggcacacgcugcuc

SEQ ID NO: 3832745 - RNA, 23 nt, Human
ccuuccugggcacacgcugcucu

SEQ ID NO: 3832746 - RNA, 19 nt, Human
ccuuccuggggcaucuggc

SEQ ID NO: 3832747 - RNA, 12 nt, Human
ccuuccuguccg

SEQ ID NO: 3832748 - RNA, 16 nt, Human
ccuuccuguccgcccu

SEQ ID NO: 3832749 - RNA, 17 nt, Human
ccuuccuguucugaacu

SEQ ID NO: 3832750 - RNA, 19 nt, Human
ccuuccuguuuuucacauu

SEQ ID NO: 3832751 - RNA, 13 nt, Human
ccuuccuucccac

SEQ ID NO: 3832752 - RNA, 14 nt, Human
ccuuccuugcuaau

SEQ ID NO: 3832753 - RNA, 12 nt, Human
ccuuccuuucuc

SEQ ID NO: 3832754 - RNA, 16 nt, Human
ccuuccuuucuccagg

SEQ ID NO: 3832755 - RNA, 15 nt, Human
ccuuccuuuucccug

SEQ ID NO: 3832756 - RNA, 17 nt, Human
ccuuccuuuucccugcu

SEQ ID NO: 3832757 - RNA, 15 nt, Human
ccuucgacagcauuu

SEQ ID NO: 3832758 - RNA, 15 nt, Human
ccuucgauacaccgg

SEQ ID NO: 3832759 - RNA, 20 nt, Human
ccuucgauacaccgggccug

SEQ ID NO: 3832760 - RNA, 20 nt, Human
ccuucgcuucuugccucugu

SEQ ID NO: 3832761 - RNA, 23 nt, Human
ccuucgcuucuugccucugugcu

SEQ ID NO: 3832762 - RNA, 19 nt, Human
ccuucggccuccauccuga

SEQ ID NO: 3832763 - RNA, 22 nt, Human
ccuucguaucccgagucuggga

SEQ ID NO: 3832764 - RNA, 16 nt, Human
ccuucgucuuucccau

SEQ ID NO: 3832765 - RNA, 22 nt, Human
ccuucgugaacauccccuccca

SEQ ID NO: 3832766 - RNA, 21 nt, Human
ccuucuacacucuccugggcc

SEQ ID NO: 3832767 - RNA, 14 nt, Human
ccuucuacugagcc

SEQ ID NO: 3832768 - RNA, 14 nt, Human
ccuucuacugcuuc

SEQ ID NO: 3832769 - RNA, 15 nt, Human
ccuucuaguuuccca

SEQ ID NO: 3832770 - RNA, 16 nt, Human
ccuucuaguuucccac

SEQ ID NO: 3832771 - RNA, 19 nt, Human
ccuucuauacccacccaga

SEQ ID NO: 3832772 - RNA, 15 nt, Human
ccuucuauuggucuc

SEQ ID NO: 3832773 - RNA, 15 nt, Human
ccuucuauuuggggc

SEQ ID NO: 3832774 - RNA, 22 nt, Human
ccuucuauuuggggcuugauga

SEQ ID NO: 3832775 - RNA, 11 nt, Human
ccuucucacca

SEQ ID NO: 3832776 - RNA, 12 nt, Human
ccuucucaccag

SEQ ID NO: 3832777 - RNA, 15 nt, Human
ccuucucaccagcug

SEQ ID NO: 3832778 - RNA, 16 nt, Human
ccuucucaccagcugc

SEQ ID NO: 3832779 - RNA, 18 nt, Human
ccuucucaccagcugcaa

SEQ ID NO: 3832780 - RNA, 19 nt, Human
ccuucucaccagcugcaaa

SEQ ID NO: 3832781 - RNA, 22 nt, Human
cuuaaacagggcaucuccagga

SEQ ID NO: 3832782 - RNA, 14 nt, Human
cuuaaaccugggag

SEQ ID NO: 3832783 - RNA, 15 nt, Human
cuuaaacuaaaugug

SEQ ID NO: 3832784 - RNA, 14 nt, Human
cuuaaacuugugaa

SEQ ID NO: 3832785 - RNA, 18 nt, Human
cuuaaagaaaacccaccc

SEQ ID NO: 3832786 - RNA, 22 nt, Human
cuuaaagaaacagcuuucaagu

SEQ ID NO: 3832787 - RNA, 23 nt, Human
cuuaaagaaacagcuuucaagug

SEQ ID NO: 3832788 - RNA, 17 nt, Human
cuuaaagaauucaaauu

SEQ ID NO: 3832789 - RNA, 14 nt, Human
cuuaaagucaguaa

SEQ ID NO: 3832790 - RNA, 13 nt, Human
cuuaaaguugaau

SEQ ID NO: 3832791 - RNA, 20 nt, Human
cuuaaaguugguauuaauaa

SEQ ID NO: 3832792 - RNA, 22 nt, Human
cuuaaaguugguauuaauaaaa

SEQ ID NO: 3832793 - RNA, 13 nt, Human
cuuaaauaagaaa

SEQ ID NO: 3832794 - RNA, 21 nt, Human
cuuaaauaauaaacaguggaa

SEQ ID NO: 3832795 - RNA, 21 nt, Human
cuuaaauaaugcuucagauau

SEQ ID NO: 3832796 - RNA, 13 nt, Human
cuuaaauaaugug

SEQ ID NO: 3832797 - RNA, 14 nt, Human
cuuaaauaauguga

SEQ ID NO: 3832798 - RNA, 15 nt, Human
cuuaaauauaguucc

SEQ ID NO: 3832799 - RNA, 22 nt, Human
cuuaaauauaguuccuaagaag

SEQ ID NO: 3832800 - RNA, 16 nt, Human
cuuaaauaucuuuuau

SEQ ID NO: 3832801 - RNA, 22 nt, Human
cuuaaauaucuuuuauguuuga

SEQ ID NO: 3832802 - RNA, 19 nt, Human
cuuaaaucuuaauguuccu

SEQ ID NO: 3832803 - RNA, 22 nt, Human
cuuaaaugcaaccauuugaaac

SEQ ID NO: 3832804 - RNA, 16 nt, Human
cuuaaaugugaauuac

SEQ ID NO: 3832805 - RNA, 17 nt, Human
cuuaaaugugaauuacu

SEQ ID NO: 3832806 - RNA, 16 nt, Human
cuuaaauguuauguau

SEQ ID NO: 3832807 - RNA, 17 nt, Human
cuuaaauguuauguaua

SEQ ID NO: 3832808 - RNA, 16 nt, Human
cuuaaauguuauuauc

SEQ ID NO: 3832809 - RNA, 19 nt, Human
cuuaaauuaaacaauuuau

SEQ ID NO: 3832810 - RNA, 21 nt, Human
cuuaaauuaaacaauuuauuu

SEQ ID NO: 3832811 - RNA, 22 nt, Human
cuuaaauuccucaacaguguuu

SEQ ID NO: 3832812 - RNA, 12 nt, Human
cuuaaauuuaau

SEQ ID NO: 3832813 - RNA, 16 nt, Human
cuuaaauuuaauacca

SEQ ID NO: 3832814 - RNA, 19 nt, Human
cuuaaauuucuuaugugac

SEQ ID NO: 3832815 - RNA, 22 nt, Human
cuuaaauuucuuaugugacauu

SEQ ID NO: 3832816 - RNA, 21 nt, Human
cuuaaauuugauuuacauaua

SEQ ID NO: 3832817 - RNA, 23 nt, Human
cuuaaauuuuaacuaaauuuuaa

SEQ ID NO: 3832818 - RNA, 18 nt, Human
cuuaaauuuuaauuuauu

SEQ ID NO: 3832819 - RNA, 19 nt, Human
cuuaacaaacccucguuuc

SEQ ID NO: 3832820 - RNA, 23 nt, Human
cuuaacaauuucuguccuucaga

SEQ ID NO: 3832821 - RNA, 20 nt, Human
cuuaacacuaccaauuuccc

SEQ ID NO: 3832822 - RNA, 19 nt, Human
cuuaacagggaacgugauu

SEQ ID NO: 3832823 - RNA, 20 nt, Human
cuuaacauagccaaaaugug

SEQ ID NO: 3832824 - RNA, 15 nt, Human
cuuaacauauuuacu

SEQ ID NO: 3832825 - RNA, 11 nt, Human
cuuaacaugcu

SEQ ID NO: 3832826 - RNA, 22 nt, Human
cuuaacaugcuguguaagcugu

SEQ ID NO: 3832827 - RNA, 16 nt, Human
cuuaacauuccuaaaa

SEQ ID NO: 3832828 - RNA, 19 nt, Human
cuuaacauuccuaaaaugc

SEQ ID NO: 3832829 - RNA, 23 nt, Human
cuuaaccaguuguggugugagua

SEQ ID NO: 3832830 - RNA, 14 nt, Human
cuuaacccaaggag

SEQ ID NO: 3832831 - RNA, 17 nt, Human
cuuaacccaaggagcac

SEQ ID NO: 3832832 - RNA, 15 nt, Human
cuuaacccagugucc

SEQ ID NO: 3832833 - RNA, 16 nt, Human
cuuaaccgcaucagaa

SEQ ID NO: 3832834 - RNA, 16 nt, Human
cuuaacggaccaaagc

SEQ ID NO: 3832835 - RNA, 11 nt, Human
cuuaacuauuc

SEQ ID NO: 3832836 - RNA, 11 nt, Human
cuuaacucuuu

SEQ ID NO: 3832837 - RNA, 21 nt, Human
cuuaacucuuugccuuugcca

SEQ ID NO: 3832838 - RNA, 12 nt, Human
cuuaacugaaau

SEQ ID NO: 3832839 - RNA, 17 nt, Human
cuuaacuguauagcucu

SEQ ID NO: 3832840 - RNA, 11 nt, Human
cuuaagaaaaa

SEQ ID NO: 3832841 - RNA, 12 nt, Human
cuuaagaaauaa

SEQ ID NO: 3832842 - RNA, 15 nt, Human
cuuaagaaauaaauc

SEQ ID NO: 3832843 - RNA, 11 nt, Human
cuuaagaacac

SEQ ID NO: 3832844 - RNA, 18 nt, Human
cuuaagaauuuugagcag

SEQ ID NO: 3832845 - RNA, 15 nt, Human
cuuaagacagcaugu

SEQ ID NO: 3832846 - RNA, 19 nt, Human
cuuaagacagcauguguua

SEQ ID NO: 3832847 - RNA, 23 nt, Human
cuuaagaccuacuguucuaaagc

SEQ ID NO: 3832848 - RNA, 15 nt, Human
cuuaagacuuaauga

SEQ ID NO: 3832849 - RNA, 17 nt, Human
cuuaagacuuaaugaga

SEQ ID NO: 3832850 - RNA, 16 nt, Human
cuuaagagaaauggca

SEQ ID NO: 3832851 - RNA, 23 nt, Human
cuuaagagaauauuuuaaguauu

SEQ ID NO: 3832852 - RNA, 18 nt, Human
cuuaagcagaagcauuaa

SEQ ID NO: 3832853 - RNA, 15 nt, Human
cuuaagcaucuggcu

SEQ ID NO: 3832854 - RNA, 23 nt, Human
cuuaagcaucuggcucuaauuca

SEQ ID NO: 3832855 - RNA, 14 nt, Human
cuuaagccacugcc

SEQ ID NO: 3832856 - RNA, 17 nt, Human
cuuaagccacugccucu

SEQ ID NO: 3832857 - RNA, 20 nt, Human
cuuaagccaucuugguaaau

SEQ ID NO: 3832858 - RNA, 14 nt, Human
cuuaagcccuggcc

SEQ ID NO: 3832859 - RNA, 20 nt, Human
cuuaagccuuuugcucacaa

SEQ ID NO: 3832860 - RNA, 23 nt, Human
cuuaagcuaggauguugcucaga

SEQ ID NO: 3832861 - RNA, 13 nt, Human
cuuaagcugcagg

SEQ ID NO: 3832862 - RNA, 14 nt, Human
cuuaagcugcagga

SEQ ID NO: 3832863 - RNA, 22 nt, Human
cuuaagcugcaggauucucacc

SEQ ID NO: 3832864 - RNA, 15 nt, Human
cuuaaggcucuuuug

SEQ ID NO: 3832865 - RNA, 17 nt, Human
cuuaaggugaggccugu

SEQ ID NO: 3832866 - RNA, 22 nt, Human
cuuaaggugaggccugucugug

SEQ ID NO: 3832867 - RNA, 23 nt, Human
cuuaaggugaggccugucuguga

SEQ ID NO: 3832868 - RNA, 17 nt, Human
cuuaagguguagccaca

SEQ ID NO: 3832869 - RNA, 19 nt, Human
cuuaaguaaucaucuaagu

SEQ ID NO: 3832870 - RNA, 14 nt, Human
cuuaaguaucagaa

SEQ ID NO: 3832871 - RNA, 20 nt, Human
cuuaagucacccuagcccuc

SEQ ID NO: 3832872 - RNA, 18 nt, Human
cuuaagucagaacagcag

SEQ ID NO: 3832873 - RNA, 16 nt, Human
cuuaagugcugcaauu

SEQ ID NO: 3832874 - RNA, 14 nt, Human
cuuaauaaaaauga

SEQ ID NO: 3832875 - RNA, 17 nt, Human
cuuaauaaaaaugacag

SEQ ID NO: 3832876 - RNA, 20 nt, Human
cuuaauaaaaaugacagacu

SEQ ID NO: 3832877 - RNA, 12 nt, Human
cuuaauaaauuc

SEQ ID NO: 3832878 - RNA, 17 nt, Human
cuuaauaaauucagaua

SEQ ID NO: 3832879 - RNA, 15 nt, Human
cuuaauaacugugua

SEQ ID NO: 3832880 - RNA, 19 nt, Human
cuuaauaacuguguacugu

SEQ ID NO: 3832881 - RNA, 20 nt, Human
cuuaauaacuguguacuguu

SEQ ID NO: 3832882 - RNA, 14 nt, Human
cuuaauaaucaaga

SEQ ID NO: 3832883 - RNA, 15 nt, Human
cuuaauaaucaagag

SEQ ID NO: 3832884 - RNA, 21 nt, Human
cuuaauaccugggugauuaca

SEQ ID NO: 3832885 - RNA, 21 nt, Human
cuuauccacgagagcgcagca

SEQ ID NO: 3832886 - RNA, 12 nt, Human
cuuauccaggac

SEQ ID NO: 3832887 - RNA, 13 nt, Human
cuuauccaggacu

SEQ ID NO: 3832888 - RNA, 21 nt, Human
cuuauccauaaaaaaaaauag

SEQ ID NO: 3832889 - RNA, 19 nt, Human
cuuaucccugcccauuuca

SEQ ID NO: 3832890 - RNA, 12 nt, Human
cuuauccucccu

SEQ ID NO: 3832891 - RNA, 16 nt, Human
cuuauccucccuguaa

SEQ ID NO: 3832892 - RNA, 16 nt, Human
cuuauccucugaucuc

SEQ ID NO: 3832893 - RNA, 22 nt, Human
cuuauccuucaucuuuuaaaga

SEQ ID NO: 3832894 - RNA, 21 nt, Human
cuuauccuuccacggacucaa

SEQ ID NO: 3832895 - RNA, 13 nt, Human
cuuauccuuccuc

SEQ ID NO: 3832896 - RNA, 15 nt, Human
cuuaucgaaacucau

SEQ ID NO: 3832897 - RNA, 23 nt, Human
cuuaucuaaucaugaaacucccu

SEQ ID NO: 3832898 - RNA, 18 nt, Human
cuuaucuacuuccaaacu

SEQ ID NO: 3832899 - RNA, 19 nt, Human
cuuaucucagucaugcaua

SEQ ID NO: 3832900 - RNA, 21 nt, Human
cuuaucucagucaugcauaaa

SEQ ID NO: 3832901 - RNA, 13 nt, Human
cuuaucucucugu

SEQ ID NO: 3832902 - RNA, 14 nt, Human
cuuaucucucugug

SEQ ID NO: 3832903 - RNA, 12 nt, Human
cuuaucucuuuu

SEQ ID NO: 3832904 - RNA, 21 nt, Human
cuuaucugagcugagccaggc

SEQ ID NO: 3832905 - RNA, 19 nt, Human
cuuaucugugcgugaaaca

SEQ ID NO: 3832906 - RNA, 16 nt, Human
cuuaucugugcucagg

SEQ ID NO: 3832907 - RNA, 22 nt, Human
cuuaucugugcucaggacucag

SEQ ID NO: 3832908 - RNA, 18 nt, Human
cuuaugaaaagaauuguu

SEQ ID NO: 3832909 - RNA, 18 nt, Human
cuuaugaauauuuauaac

SEQ ID NO: 3832910 - RNA, 22 nt, Human
cuuaugacaucacuuguacaaa

SEQ ID NO: 3832911 - RNA, 14 nt, Human
cuuaugacuaugua

SEQ ID NO: 3832912 - RNA, 15 nt, Human
cuuaugaggagggga

SEQ ID NO: 3832913 - RNA, 23 nt, Human
cuuaugauagcaaauggccucau

SEQ ID NO: 3832914 - RNA, 14 nt, Human
cuuaugccacggga

SEQ ID NO: 3832915 - RNA, 15 nt, Human
cuuaugcucuuaauu

SEQ ID NO: 3832916 - RNA, 15 nt, Human
cuuaugcugauuuau

SEQ ID NO: 3832917 - RNA, 16 nt, Human
cuuauggaacacucug

SEQ ID NO: 3832918 - RNA, 19 nt, Human
cuuauggaauugauuugca

SEQ ID NO: 3832919 - RNA, 21 nt, Human
cuuauggaauugauuugcauu

SEQ ID NO: 3832920 - RNA, 16 nt, Human
cuuauggaugucccca

SEQ ID NO: 3832921 - RNA, 17 nt, Human
cuuauggauguccccag

SEQ ID NO: 3832922 - RNA, 18 nt, Human
cuuauggauucauuuaua

SEQ ID NO: 3832923 - RNA, 14 nt, Human
cuuaugggcugggu

SEQ ID NO: 3832924 - RNA, 21 nt, Human
cuuauggguagggcucugaca

SEQ ID NO: 3832925 - RNA, 21 nt, Human
cuuaugggucccccucagcaa

SEQ ID NO: 3832926 - RNA, 13 nt, Human
cuuaugguaccag

SEQ ID NO: 3832927 - RNA, 18 nt, Human
cuuauguagauauuuggc

SEQ ID NO: 3832928 - RNA, 19 nt, Human
cuuauguagauauuuggcu

SEQ ID NO: 3832929 - RNA, 14 nt, Human
cuuauguugaaaaa

SEQ ID NO: 3832930 - RNA, 13 nt, Human
cuuauuaaaguuu

SEQ ID NO: 3832931 - RNA, 19 nt, Human
cuuauuaaauggaaacuga

SEQ ID NO: 3832932 - RNA, 13 nt, Human
cuuauuacaauuu

SEQ ID NO: 3832933 - RNA, 17 nt, Human
cuuauuagaacaggcaa

SEQ ID NO: 3832934 - RNA, 17 nt, Human
cuuauuagagugucuuu

SEQ ID NO: 3832935 - RNA, 20 nt, Human
cuuauuauguagguaagacu

SEQ ID NO: 3832936 - RNA, 15 nt, Human
cuuauucccuuccug

SEQ ID NO: 3832937 - RNA, 15 nt, Human
cuuauucucaaagca

SEQ ID NO: 3832938 - RNA, 12 nt, Human
cuuauucuguag

SEQ ID NO: 3832939 - RNA, 13 nt, Human
cuuauugaauaua

SEQ ID NO: 3832940 - RNA, 23 nt, Human
cuuauugauauucuaagaaauau

SEQ ID NO: 3832941 - RNA, 18 nt, Human
cuuauugcccacgcugga

SEQ ID NO: 3832942 - RNA, 17 nt, Human
cuuauugcgcugcuacc

SEQ ID NO: 3832943 - RNA, 17 nt, Human
cuuauuggaacucugcu

SEQ ID NO: 3832944 - RNA, 18 nt, Human
cuuauuggcagcucuacu

SEQ ID NO: 3832945 - RNA, 15 nt, Human
cuuauuguaccucuc

SEQ ID NO: 3832946 - RNA, 12 nt, Human
cuuauuguucca

SEQ ID NO: 3832947 - RNA, 19 nt, Human
cuuauuuaaauagaugaca

SEQ ID NO: 3832948 - RNA, 20 nt, Human
cuuauuuaaguaacuuuaaa

SEQ ID NO: 3832949 - RNA, 17 nt, Human
cuuauuuaaugaaagac

SEQ ID NO: 3832950 - RNA, 16 nt, Human
cuucaggcaauucucc

SEQ ID NO: 3832951 - RNA, 23 nt, Human
cuucaggcaauucuccugccuuu

SEQ ID NO: 3832952 - RNA, 21 nt, Human
cuucaggcccccgccuuggcc

SEQ ID NO: 3832953 - RNA, 22 nt, Human
cuucaggcccccgccuuggccu

SEQ ID NO: 3832954 - RNA, 22 nt, Human
cuucaggcucuucuccuuucac

SEQ ID NO: 3832955 - RNA, 17 nt, Human
cuucagggagucagcug

SEQ ID NO: 3832956 - RNA, 20 nt, Human
cuucagggagucagcuguuu

SEQ ID NO: 3832957 - RNA, 15 nt, Human
cuucagggcaggugg

SEQ ID NO: 3832958 - RNA, 15 nt, Human
cuucaggggcugccc

SEQ ID NO: 3832959 - RNA, 19 nt, Human
cuucaggggcugcccgcuc

SEQ ID NO: 3832960 - RNA, 22 nt, Human
cuucaggggcugcccgcuccca

SEQ ID NO: 3832961 - RNA, 14 nt, Human
cuucagggggccag

SEQ ID NO: 3832962 - RNA, 18 nt, Human
cuucaggucaggaguucg

SEQ ID NO: 3832963 - RNA, 18 nt, Human
cuucagguccaggcugug

SEQ ID NO: 3832964 - RNA, 18 nt, Human
cuucagguugguuuaauc

SEQ ID NO: 3832965 - RNA, 19 nt, Human
cuucaguacccucucagcu

SEQ ID NO: 3832966 - RNA, 23 nt, Human
cuucaguacccucucagcuccag

SEQ ID NO: 3832967 - RNA, 14 nt, Human
cuucaguauguugu

SEQ ID NO: 3832968 - RNA, 18 nt, Human
cuucaguauguugucaaa

SEQ ID NO: 3832969 - RNA, 23 nt, Human
cuucaguauguugucaaagagag

SEQ ID NO: 3832970 - RNA, 15 nt, Human
cuucaguccugcucc

SEQ ID NO: 3832971 - RNA, 19 nt, Human
cuucaguccugcuccagaa

SEQ ID NO: 3832972 - RNA, 21 nt, Human
cuucagucucuauaccaauaa

SEQ ID NO: 3832973 - RNA, 14 nt, Human
cuucagugccaaaa

SEQ ID NO: 3832974 - RNA, 15 nt, Human
cuucagugcccacca

SEQ ID NO: 3832975 - RNA, 20 nt, Human
cuucaguguauggaaauaaa

SEQ ID NO: 3832976 - RNA, 17 nt, Human
cuucaguuaagccuuug

SEQ ID NO: 3832977 - RNA, 14 nt, Human
cuucaguugcuugu

SEQ ID NO: 3832978 - RNA, 23 nt, Human
cuucaguugcuugucuucuggua

SEQ ID NO: 3832979 - RNA, 20 nt, Human
cuucaguugguguguuuuug

SEQ ID NO: 3832980 - RNA, 20 nt, Human
cuucaguugguugugucuuu

SEQ ID NO: 3832981 - RNA, 21 nt, Human
cuucaguugguugugucuuuu

SEQ ID NO: 3832982 - RNA, 22 nt, Human
cuucaguugguugugucuuuuu

SEQ ID NO: 3832983 - RNA, 15 nt, Human
cuucaguugucucug

SEQ ID NO: 3832984 - RNA, 23 nt, Human
cuucaguugucucugaugcagcu

SEQ ID NO: 3832985 - RNA, 17 nt, Human
cuucaguuguuuucccg

SEQ ID NO: 3832986 - RNA, 17 nt, Human
cuucaguuugcagagua

SEQ ID NO: 3832987 - RNA, 12 nt, Human
cuucauacaggg

SEQ ID NO: 3832988 - RNA, 13 nt, Human
cuucauacaggga

SEQ ID NO: 3832989 - RNA, 22 nt, Human
cuucauacagggaugguguuca

SEQ ID NO: 3832990 - RNA, 13 nt, Human
cuucauacuugaa

SEQ ID NO: 3832991 - RNA, 16 nt, Human
cuucauagaauacuca

SEQ ID NO: 3832992 - RNA, 18 nt, Human
cuucauagcagauuuuaa

SEQ ID NO: 3832993 - RNA, 18 nt, Human
cuucauaucauccacaca

SEQ ID NO: 3832994 - RNA, 20 nt, Human
cuucauaugaaaggugccau

SEQ ID NO: 3832995 - RNA, 14 nt, Human
cuucauauucagcu

SEQ ID NO: 3832996 - RNA, 16 nt, Human
cuucauccccucagaa

SEQ ID NO: 3832997 - RNA, 14 nt, Human
cuucaucccuuucc

SEQ ID NO: 3832998 - RNA, 20 nt, Human
cuucauccuuagcaacagcc

SEQ ID NO: 3832999 - RNA, 19 nt, Human
cuucaucguggggcucuca

SEQ ID NO: 3833000 - RNA, 18 nt, Human
cuucaucugacuaugaca

SEQ ID NO: 3833001 - RNA, 19 nt, Human
cuucaucugacuaugacau

SEQ ID NO: 3833002 - RNA, 14 nt, Human
cuucaucugcccaa

SEQ ID NO: 3833003 - RNA, 12 nt, Human
cuucaucuggaa

SEQ ID NO: 3833004 - RNA, 14 nt, Human
cuucaucuggaagu

SEQ ID NO: 3833005 - RNA, 23 nt, Human
cuucaucuggcaacaucuuuauc

SEQ ID NO: 3833006 - RNA, 20 nt, Human
cuucaucuggcugccuuugc

SEQ ID NO: 3833007 - RNA, 15 nt, Human
cuucaucuuccugug

SEQ ID NO: 3833008 - RNA, 19 nt, Human
cuucaucuuccuguguccu

SEQ ID NO: 3833009 - RNA, 20 nt, Human
cuucaucuuccuguguccug

SEQ ID NO: 3833010 - RNA, 21 nt, Human
cuucaucuuccuguguccuga

SEQ ID NO: 3833011 - RNA, 15 nt, Human
cuucaucuucucagc

SEQ ID NO: 3833012 - RNA, 19 nt, Human
cuucaugaaaauccuacca

SEQ ID NO: 3833013 - RNA, 17 nt, Human
cuucaugaaaugcuaug

SEQ ID NO: 3833014 - RNA, 12 nt, Human
cuucaugcaaug

SEQ ID NO: 3833015 - RNA, 13 nt, Human
cuucaugcaauga

SEQ ID NO: 3833016 - RNA, 21 nt, Human
cuucaugcauggaaauucccu

SEQ ID NO: 3833017 - RNA, 23 nt, Human
cuucaugcauggaaauucccuuc

SEQ ID NO: 3833018 - RNA, 14 nt, Human
cuucaugccuuugu

SEQ ID NO: 3833019 - RNA, 14 nt, Human
cuucauggaacuca

SEQ ID NO: 3833020 - RNA, 17 nt, Human
cuucauguaaaguguca

SEQ ID NO: 3833021 - RNA, 12 nt, Human
cuucauguaaau

SEQ ID NO: 3833022 - RNA, 16 nt, Human
cuucauguaauuuuau

SEQ ID NO: 3833023 - RNA, 23 nt, Human
cuucaugucaacuucuggcuccu

SEQ ID NO: 3833024 - RNA, 16 nt, Human
cuucaugugucccaga

SEQ ID NO: 3833025 - RNA, 17 nt, Human
cuucaugugucccagaa

SEQ ID NO: 3833026 - RNA, 15 nt, Human
cuucauguucccacu

SEQ ID NO: 3833027 - RNA, 16 nt, Human
cuucauuaauaauaaa

SEQ ID NO: 3833028 - RNA, 20 nt, Human
cuucauuaccuuuuuugaua

SEQ ID NO: 3833029 - RNA, 11 nt, Human
cgagggcuggc

SEQ ID NO: 3833030 - RNA, 17 nt, Human
cgagggcuggcuggccu

SEQ ID NO: 3833031 - RNA, 18 nt, Human
cgaggggaggguggcagg

SEQ ID NO: 3833032 - RNA, 17 nt, Human
cgaggggcgggacccag

SEQ ID NO: 3833033 - RNA, 17 nt, Human
cgaggggcucaggaaaa

SEQ ID NO: 3833034 - RNA, 23 nt, Human
cgagggggcugcucccaccuggc

SEQ ID NO: 3833035 - RNA, 19 nt, Human
cgaggggugucuugggcag

SEQ ID NO: 3833036 - RNA, 14 nt, Human
cgaggguccuggcu

SEQ ID NO: 3833037 - RNA, 20 nt, Human
cgagguagaguuugaaggag

SEQ ID NO: 3833038 - RNA, 15 nt, Human
cgaggucaacagaga

SEQ ID NO: 3833039 - RNA, 21 nt, Human
cgaggucaacagagaaggcag

SEQ ID NO: 3833040 - RNA, 13 nt, Human
cgaggucaggaga

SEQ ID NO: 3833041 - RNA, 22 nt, Human
cgaggucgggcagcacaagugu

SEQ ID NO: 3833042 - RNA, 20 nt, Human
cgagguggaucacagaggcu

SEQ ID NO: 3833043 - RNA, 15 nt, Human
cgagguggcugccug

SEQ ID NO: 3833044 - RNA, 13 nt, Human
cgaguacuguggg

SEQ ID NO: 3833045 - RNA, 16 nt, Human
cgaguagcugggacua

SEQ ID NO: 3833046 - RNA, 21 nt, Human
cgaguauguguuugugugugu

SEQ ID NO: 3833047 - RNA, 14 nt, Human
cgagucaaaguuga

SEQ ID NO: 3833048 - RNA, 16 nt, Human
cgagucaauccccuca

SEQ ID NO: 3833049 - RNA, 20 nt, Human
cgagucaauccccucauuca

SEQ ID NO: 3833050 - RNA, 16 nt, Human
cgagucaccuuccagg

SEQ ID NO: 3833051 - RNA, 13 nt, Human
cgaguccaagcug

SEQ ID NO: 3833052 - RNA, 16 nt, Human
cgagucucuucuccac

SEQ ID NO: 3833053 - RNA, 16 nt, Human
cgagucugggacacaa

SEQ ID NO: 3833054 - RNA, 21 nt, Human
cgagugcuaaguguaggauau

SEQ ID NO: 3833055 - RNA, 17 nt, Human
cgaguggauagaugccc

SEQ ID NO: 3833056 - RNA, 20 nt, Human
cgaguggauuguaggugcaa

SEQ ID NO: 3833057 - RNA, 22 nt, Human
cgaguuguggaaagccucugcu

SEQ ID NO: 3833058 - RNA, 16 nt, Human
cgauaaggaagaaaca

SEQ ID NO: 3833059 - RNA, 23 nt, Human
cgauacccaggaccaagccacag

SEQ ID NO: 3833060 - RNA, 13 nt, Human
cgauauacagaug

SEQ ID NO: 3833061 - RNA, 15 nt, Human
cgauauacagaugaa

SEQ ID NO: 3833062 - RNA, 18 nt, Human
cgauauacagaugaaaau

SEQ ID NO: 3833063 - RNA, 22 nt, Human
cgauauuuuuaaagaucuguaa

SEQ ID NO: 3833064 - RNA, 15 nt, Human
cgaucacaaaugacu

SEQ ID NO: 3833065 - RNA, 17 nt, Human
cgaucacaaaugacuuu

SEQ ID NO: 3833066 - RNA, 21 nt, Human
cgaucacaaaugacuuuauua

SEQ ID NO: 3833067 - RNA, 18 nt, Human
cgaucacaacgugcauug

SEQ ID NO: 3833068 - RNA, 22 nt, Human
cgaucacaacgugcauugugcu

SEQ ID NO: 3833069 - RNA, 18 nt, Human
cgaucaggcacaggucag

SEQ ID NO: 3833070 - RNA, 19 nt, Human
cgaucauggcucacugcag

SEQ ID NO: 3833071 - RNA, 21 nt, Human
cgaucauggcucacugcagcc

SEQ ID NO: 3833072 - RNA, 20 nt, Human
cgauccaccugucucagccu

SEQ ID NO: 3833073 - RNA, 19 nt, Human
cgaucgcggcggagcuggc

SEQ ID NO: 3833074 - RNA, 19 nt, Human
cgaucuggguucacugcaa

SEQ ID NO: 3833075 - RNA, 21 nt, Human
cgaugaauuuggagacucugu

SEQ ID NO: 3833076 - RNA, 23 nt, Human
cgaugaauuuggagacucugugg

SEQ ID NO: 3833077 - RNA, 21 nt, Human
cgaugaugcuuguaacaagaa

SEQ ID NO: 3833078 - RNA, 22 nt, Human
cgaugaugcuuguaacaagaaa

SEQ ID NO: 3833079 - RNA, 19 nt, Human
cgaugcaaacauuggaaga

SEQ ID NO: 3833080 - RNA, 15 nt, Human
cgaugcaaugaacac

SEQ ID NO: 3833081 - RNA, 15 nt, Human
cgaugcagacagggg

SEQ ID NO: 3833082 - RNA, 12 nt, Human
cgaugcccagag

SEQ ID NO: 3833083 - RNA, 14 nt, Human
cgaugcuccagcca

SEQ ID NO: 3833084 - RNA, 22 nt, Human
cgaugcuccagccaaccccugu

SEQ ID NO: 3833085 - RNA, 12 nt, Human
cgaugcugcuuu

SEQ ID NO: 3833086 - RNA, 21 nt, Human
cgaugcuuuaccaaacagcaa

SEQ ID NO: 3833087 - RNA, 22 nt, Human
cgaugggagggauggcccuucc

SEQ ID NO: 3833088 - RNA, 18 nt, Human
cgauguaggcauucugga

SEQ ID NO: 3833089 - RNA, 20 nt, Human
cgauguaugcagcuaucugg

SEQ ID NO: 3833090 - RNA, 23 nt, Human
cgauguggaaaaaugagagaagg

SEQ ID NO: 3833091 - RNA, 20 nt, Human
cgauguggaacugcugccac

SEQ ID NO: 3833092 - RNA, 21 nt, Human
cgauguggaacugcugccacu

SEQ ID NO: 3833093 - RNA, 23 nt, Human
cgauguggaccucuacuuuccag

SEQ ID NO: 3833094 - RNA, 15 nt, Human
cgauguggcccuggc

SEQ ID NO: 3833095 - RNA, 16 nt, Human
cgauguggcccuggcc

SEQ ID NO: 3833096 - RNA, 22 nt, Human
cgauguggcccuggccugcugg

SEQ ID NO: 3833097 - RNA, 17 nt, Human
cgauguggucacagcug

SEQ ID NO: 3833098 - RNA, 18 nt, Human
cgauguggucacagcugu

SEQ ID NO: 3833099 - RNA, 19 nt, Human
cgauguggucacagcugua

SEQ ID NO: 3833100 - RNA, 11 nt, Human
cgauuagacug

SEQ ID NO: 3833101 - RNA, 18 nt, Human
cgauuagacuggacagcu

SEQ ID NO: 3833102 - RNA, 21 nt, Human
cgauucccucucccaggcccc

SEQ ID NO: 3833103 - RNA, 21 nt, Human
cgauucuucugcuucagccuc

SEQ ID NO: 3833104 - RNA, 23 nt, Human
cgauugcaggagucccugccauc

SEQ ID NO: 3833105 - RNA, 13 nt, Human
cgauuggcuuuaa

SEQ ID NO: 3833106 - RNA, 15 nt, Human
cgauuggcuuuaaac

SEQ ID NO: 3833107 - RNA, 12 nt, Human
cgauuguaacuc

SEQ ID NO: 3833108 - RNA, 17 nt, Human
cgauuuucuccagcuca

SEQ ID NO: 3833109 - RNA, 15 nt, Human
cgcaaaccacacugg

SEQ ID NO: 3833110 - RNA, 16 nt, Human
cgcaaaccacacugga

SEQ ID NO: 3833111 - RNA, 19 nt, Human
cgcaaagggcugaaagcca

SEQ ID NO: 3833112 - RNA, 22 nt, Human
cgcaacccgugccaaguccagg

SEQ ID NO: 3833113 - RNA, 20 nt, Human
cgcaagauagauuuggaaua

SEQ ID NO: 3833114 - RNA, 21 nt, Human
cgcaagcaccauccccuccgg

SEQ ID NO: 3833115 - RNA, 14 nt, Human
cgcaagucugcagc

SEQ ID NO: 3833116 - RNA, 21 nt, Human
cgcacaaggcugaccaagaga

SEQ ID NO: 3833117 - RNA, 22 nt, Human
cgcacaauaguaaccuggguaa

SEQ ID NO: 3833118 - RNA, 10 nt, Human
cgcacacaca

SEQ ID NO: 3833119 - RNA, 13 nt, Human
cgcacacacacac

SEQ ID NO: 3833120 - RNA, 20 nt, Human
cgcacacccucacucugcca

SEQ ID NO: 3833121 - RNA, 13 nt, Human
cgcacagagcugg

SEQ ID NO: 3833122 - RNA, 10 nt, Human
cgcacagcag

SEQ ID NO: 3833123 - RNA, 12 nt, Human
cgcacagcagcc

SEQ ID NO: 3833124 - RNA, 13 nt, Human
cgcacagcaguuc

SEQ ID NO: 3833125 - RNA, 19 nt, Human
cgcacagcaugagaggcuc

SEQ ID NO: 3833126 - RNA, 14 nt, Human
cgcaccccagagug

SEQ ID NO: 3833127 - RNA, 14 nt, Human
cgcacccccacccu

SEQ ID NO: 3833128 - RNA, 15 nt, Human
cgcacccccacccuu

SEQ ID NO: 3833129 - RNA, 14 nt, Human
cgcaccccccuguu

SEQ ID NO: 3833130 - RNA, 18 nt, Human
cgcaccccccuguucuaa

SEQ ID NO: 3833131 - RNA, 16 nt, Human
cgcaccuaccaucagg

SEQ ID NO: 3833132 - RNA, 16 nt, Human
cgcaccucccauccua

SEQ ID NO: 3833133 - RNA, 16 nt, Human
cgcaccugcccccugg

SEQ ID NO: 3833134 - RNA, 14 nt, Human
cgcaccugccucag

SEQ ID NO: 3833135 - RNA, 13 nt, Human
cgcaccuguacag

SEQ ID NO: 3833136 - RNA, 22 nt, Human
cgcacuacaugugguuuauaga

SEQ ID NO: 3833137 - RNA, 15 nt, Human
cgcacuuuccacuuc

SEQ ID NO: 3833138 - RNA, 20 nt, Human
cgcacuuuccacuucuuccu

SEQ ID NO: 3833139 - RNA, 23 nt, Human
cgcagaacgaaccuuggccuggg

SEQ ID NO: 3833140 - RNA, 12 nt, Human
cgcagaaggaag

SEQ ID NO: 3833141 - RNA, 14 nt, Human
cgcagacaggacca

SEQ ID NO: 3833142 - RNA, 15 nt, Human
cgcagacaggaccag

SEQ ID NO: 3833143 - RNA, 16 nt, Human
cgcagaccuccccagc

SEQ ID NO: 3833144 - RNA, 22 nt, Human
cgcagagaagugacgguuccua

SEQ ID NO: 3833145 - RNA, 16 nt, Human
cgcagagcuuuucaga

SEQ ID NO: 3833146 - RNA, 16 nt, Human
cgcagcaggaggccag

SEQ ID NO: 3833147 - RNA, 22 nt, Human
cgcagcaggggccagacccugc

SEQ ID NO: 3833148 - RNA, 20 nt, Human
cgcagcauauucaggaagcu

SEQ ID NO: 3833149 - RNA, 12 nt, Human
cgcagccaaggc

SEQ ID NO: 3833150 - RNA, 13 nt, Human
cgcagccaaggcc

SEQ ID NO: 3833151 - RNA, 17 nt, Human
cgcagccacccugagga

SEQ ID NO: 3833152 - RNA, 13 nt, Human
cgcagccaggaca

SEQ ID NO: 3833153 - RNA, 14 nt, Human
cgcagccaggacac

SEQ ID NO: 3833154 - RNA, 17 nt, Human
cgcagcccuagagccug

SEQ ID NO: 3833155 - RNA, 22 nt, Human
cgcagcccuagagccugccugg

SEQ ID NO: 3833156 - RNA, 18 nt, Human
cgcagcccugcagagggc

SEQ ID NO: 3833157 - RNA, 15 nt, Human
cgcagcccugcuuug

SEQ ID NO: 3833158 - RNA, 16 nt, Human
cgcagccucccucuga

SEQ ID NO: 3833159 - RNA, 12 nt, Human
cgcagcugaagu

SEQ ID NO: 3833160 - RNA, 15 nt, Human
cuugaacaccacgcu

SEQ ID NO: 3833161 - RNA, 14 nt, Human
cuugaaccacuucc

SEQ ID NO: 3833162 - RNA, 14 nt, Human
cuugaaccauaaaa

SEQ ID NO: 3833163 - RNA, 15 nt, Human
cuugaacccaggaga

SEQ ID NO: 3833164 - RNA, 19 nt, Human
cuugaaccugggaggugga

SEQ ID NO: 3833165 - RNA, 18 nt, Human
cuugaacguuuucuaauu

SEQ ID NO: 3833166 - RNA, 22 nt, Human
cuugaacguuuucuaauugcuu

SEQ ID NO: 3833167 - RNA, 17 nt, Human
cuugaacuccuggccuc

SEQ ID NO: 3833168 - RNA, 16 nt, Human
cuugaacuggguacuu

SEQ ID NO: 3833169 - RNA, 23 nt, Human
cuugaacuuuccuggaugucuga

SEQ ID NO: 3833170 - RNA, 15 nt, Human
cuugaacuuugaccu

SEQ ID NO: 3833171 - RNA, 17 nt, Human
cuugaacuuugaccucu

SEQ ID NO: 3833172 - RNA, 17 nt, Human
cuugaagaacugcaggc

SEQ ID NO: 3833173 - RNA, 18 nt, Human
cuugaagaacugcaggcc

SEQ ID NO: 3833174 - RNA, 16 nt, Human
cuucuaccugcccuca

SEQ ID NO: 3833175 - RNA, 18 nt, Human
cuucuaccugcccucaag

SEQ ID NO: 3833176 - RNA, 19 nt, Human
cuucuacucacuuuuccca

SEQ ID NO: 3833177 - RNA, 18 nt, Human
cuucuacugagccuucag

SEQ ID NO: 3833178 - RNA, 22 nt, Human
cuucuacuuacacaucuuccac

SEQ ID NO: 3833179 - RNA, 13 nt, Human
cuucuagaaccag

SEQ ID NO: 3833180 - RNA, 13 nt, Human
cuucuagaguuuu

SEQ ID NO: 3833181 - RNA, 21 nt, Human
cuucuaggguuauugcauuug

SEQ ID NO: 3833182 - RNA, 20 nt, Human
cuucuagguggcaaggcugu

SEQ ID NO: 3833183 - RNA, 22 nt, Human
cuucuagguggcaaggcugugc

SEQ ID NO: 3833184 - RNA, 16 nt, Human
cuucuaguucugccag

SEQ ID NO: 3833185 - RNA, 15 nt, Human
cuucuauacccaccc

SEQ ID NO: 3833186 - RNA, 17 nt, Human
cuucuaugaaagacuca

SEQ ID NO: 3833187 - RNA, 23 nt, Human
cuucuauggacugguuguugcca

SEQ ID NO: 3833188 - RNA, 18 nt, Human
cuucuauuagccagucuu

SEQ ID NO: 3833189 - RNA, 16 nt, Human
cuucuauugccucuga

SEQ ID NO: 3833190 - RNA, 13 nt, Human
cuucuauuuuauu

SEQ ID NO: 3833191 - RNA, 15 nt, Human
cuucuauuuuguaaa

SEQ ID NO: 3833192 - RNA, 17 nt, Human
cuucucaagugccuuaa

SEQ ID NO: 3833193 - RNA, 14 nt, Human
cuucucaaguucua

SEQ ID NO: 3833194 - RNA, 16 nt, Human
cuucucaaguucuaag

SEQ ID NO: 3833195 - RNA, 21 nt, Human
cuucucacauggaaugagggu

SEQ ID NO: 3833196 - RNA, 12 nt, Human
cuucucaccagc

SEQ ID NO: 3833197 - RNA, 20 nt, Human
cuucucaccagcugcaaagu

SEQ ID NO: 3833198 - RNA, 16 nt, Human
cuucucacucccuucu

SEQ ID NO: 3833199 - RNA, 13 nt, Human
cuucucagaagca

SEQ ID NO: 3833200 - RNA, 16 nt, Human
cuucucagaagcacag

SEQ ID NO: 3833201 - RNA, 22 nt, Human
cuucucagaagcacagaauauu

SEQ ID NO: 3833202 - RNA, 13 nt, Human
cuucucagaaucu

SEQ ID NO: 3833203 - RNA, 16 nt, Human
cuucucagaguggugg

SEQ ID NO: 3833204 - RNA, 19 nt, Human
cuucucagauuucugagga

SEQ ID NO: 3833205 - RNA, 12 nt, Human
cuucucagccac

SEQ ID NO: 3833206 - RNA, 16 nt, Human
cuucucagccugguac

SEQ ID NO: 3833207 - RNA, 19 nt, Human
cuucucaggacacaggccu

SEQ ID NO: 3833208 - RNA, 23 nt, Human
cuucucaggacacaggccugugu

SEQ ID NO: 3833209 - RNA, 16 nt, Human
cuucucaggcucugcc

SEQ ID NO: 3833210 - RNA, 19 nt, Human
cuucucaggcucugcccug

SEQ ID NO: 3833211 - RNA, 20 nt, Human
cuucucaggcucugcccugc

SEQ ID NO: 3833212 - RNA, 21 nt, Human
cuucucaggcucugcccugcc

SEQ ID NO: 3833213 - RNA, 22 nt, Human
cuucucaggcucugcccugccc

SEQ ID NO: 3833214 - RNA, 13 nt, Human
cuucucauagcau

SEQ ID NO: 3833215 - RNA, 19 nt, Human
cuucucauagguguccagc

SEQ ID NO: 3833216 - RNA, 15 nt, Human
cuucucaucacacac

SEQ ID NO: 3833217 - RNA, 16 nt, Human
cuucucaucacacaca

SEQ ID NO: 3833218 - RNA, 17 nt, Human
cuucucaucacacacau

SEQ ID NO: 3833219 - RNA, 15 nt, Human
cuucucauccugcag

SEQ ID NO: 3833220 - RNA, 12 nt, Human
cuucucaucugu

SEQ ID NO: 3833221 - RNA, 20 nt, Human
cuucucauuccaacagugag

SEQ ID NO: 3833222 - RNA, 21 nt, Human
cuucucauuccaacagugagu

SEQ ID NO: 3833223 - RNA, 18 nt, Human
cuucucauuucaccccuc

SEQ ID NO: 3833224 - RNA, 22 nt, Human
cuucucauuucaccccucccuu

SEQ ID NO: 3833225 - RNA, 22 nt, Human
cuucuccaaaaaucugccuggg

SEQ ID NO: 3833226 - RNA, 14 nt, Human
cuucuccacuggau

SEQ ID NO: 3833227 - RNA, 20 nt, Human
cuucuccaggucucacgggc

SEQ ID NO: 3833228 - RNA, 17 nt, Human
cuucuccauggcccugc

SEQ ID NO: 3833229 - RNA, 12 nt, Human
cuucucccacuc

SEQ ID NO: 3833230 - RNA, 13 nt, Human
cuucucccacucu

SEQ ID NO: 3833231 - RNA, 15 nt, Human
cuucucccacucucc

SEQ ID NO: 3833232 - RNA, 18 nt, Human
cuucucccacuuggccaa

SEQ ID NO: 3833233 - RNA, 20 nt, Human
cuucucccagaaucccagcc

SEQ ID NO: 3833234 - RNA, 23 nt, Human
cuucucccagaaucccagccggc

SEQ ID NO: 3833235 - RNA, 14 nt, Human
cuucucccaggcaa

SEQ ID NO: 3833236 - RNA, 20 nt, Human
cuucucccaggcaaggcugu

SEQ ID NO: 3833237 - RNA, 20 nt, Human
cuucucccaucucuuccuug

SEQ ID NO: 3833238 - RNA, 21 nt, Human
cuucucccccacccccuaggg

SEQ ID NO: 3833239 - RNA, 14 nt, Human
cuucuccccugcac

SEQ ID NO: 3833240 - RNA, 19 nt, Human
cuucuccccuuccauuucu

SEQ ID NO: 3833241 - RNA, 19 nt, Human
cuucucccuagcuccuccc

SEQ ID NO: 3833242 - RNA, 22 nt, Human
cuucucccucauuucaggagca

SEQ ID NO: 3833243 - RNA, 11 nt, Human
cuucucccugg

SEQ ID NO: 3833244 - RNA, 12 nt, Human
cuucucccugga

SEQ ID NO: 3833245 - RNA, 13 nt, Human
cuucucccuggaa

SEQ ID NO: 3833246 - RNA, 16 nt, Human
cuucucccuggaauga

SEQ ID NO: 3833247 - RNA, 13 nt, Human
cuucucccuggau

SEQ ID NO: 3833248 - RNA, 14 nt, Human
cuucuccgccagcc

SEQ ID NO: 3833249 - RNA, 15 nt, Human
cuucuccgccagccu

SEQ ID NO: 3833250 - RNA, 24 nt, Human
cuucuccgccagccuccucuggac

SEQ ID NO: 3833251 - RNA, 13 nt, Human
cuucuccguccuc

SEQ ID NO: 3833252 - RNA, 15 nt, Human
cuucuccuaugugua

SEQ ID NO: 3833253 - RNA, 16 nt, Human
cuucuccucuccuagc

SEQ ID NO: 3833254 - RNA, 15 nt, Human
cuucuccucuuguaa

SEQ ID NO: 3833255 - RNA, 20 nt, Human
cuucuccugaaguucagcca

SEQ ID NO: 3833256 - RNA, 20 nt, Human
cuucuccuuagaaguggaag

SEQ ID NO: 3833257 - RNA, 19 nt, Human
cuucuccuucaccuuuguc

SEQ ID NO: 3833258 - RNA, 22 nt, Human
cuucuccuucaccuuugucccc

SEQ ID NO: 3833259 - RNA, 20 nt, Human
cuucuccuugauaacagcua

SEQ ID NO: 3833260 - RNA, 20 nt, Human
cuucucuaaaugaggggccu

SEQ ID NO: 3833261 - RNA, 23 nt, Human
cuucucuaauucuuccuuuguaa

SEQ ID NO: 3833262 - RNA, 16 nt, Human
cuucucucaccuccua

SEQ ID NO: 3833263 - RNA, 12 nt, Human
cuucucucagac

SEQ ID NO: 3833264 - RNA, 21 nt, Human
cuucucucagaccgucuuccu

SEQ ID NO: 3833265 - RNA, 20 nt, Human
cuucucucagacuuacuuua

SEQ ID NO: 3833266 - RNA, 17 nt, Human
cuucucuccagccccug

SEQ ID NO: 3833267 - RNA, 19 nt, Human
cuucucuccagccccugga

SEQ ID NO: 3833268 - RNA, 18 nt, Human
cuucucuccagcugacua

SEQ ID NO: 3833269 - RNA, 13 nt, Human
cuucucucucacc

SEQ ID NO: 3833270 - RNA, 15 nt, Human
cuucucucucaccag

SEQ ID NO: 3833271 - RNA, 23 nt, Human
cuucucucucucucaaaauuaua

SEQ ID NO: 3833272 - RNA, 12 nt, Human
cuucucugaagg

SEQ ID NO: 3833273 - RNA, 15 nt, Human
cuucucugacuucug

SEQ ID NO: 3833274 - RNA, 17 nt, Human
cuucucugacuucugcc

SEQ ID NO: 3833275 - RNA, 22 nt, Human
cuucucugcuccaccacauccu

SEQ ID NO: 3833276 - RNA, 21 nt, Human
cuucucuggagccaaguccag

SEQ ID NO: 3833277 - RNA, 13 nt, Human
cuucucugugacc

SEQ ID NO: 3833278 - RNA, 16 nt, Human
cuucucuuguuaggua

SEQ ID NO: 3833279 - RNA, 22 nt, Human
cuucugaacuuggcgcugcccc

SEQ ID NO: 3833280 - RNA, 22 nt, Human
cuucugaauaaagcaauuagca

SEQ ID NO: 3833281 - RNA, 18 nt, Human
cuucugaauauuuuaucu

SEQ ID NO: 3833282 - RNA, 14 nt, Human
cuucugacagccuc

SEQ ID NO: 3833283 - RNA, 14 nt, Human
cuucugaccacacu

SEQ ID NO: 3833284 - RNA, 18 nt, Human
cuucugaccacacuuccu

SEQ ID NO: 3833285 - RNA, 23 nt, Human
cuucugaccacacuuccugucca

SEQ ID NO: 3833286 - RNA, 18 nt, Human
cuucugaccacagcauca

SEQ ID NO: 3833287 - RNA, 21 nt, Human
cuucugacccaugcugcccug

SEQ ID NO: 3833288 - RNA, 22 nt, Human
cuucugacccaugcugcccugu

SEQ ID NO: 3833289 - RNA, 14 nt, Human
cuucugaccucagc

SEQ ID NO: 3833290 - RNA, 18 nt, Human
cuucugacggcccugcaa

SEQ ID NO: 3833291 - RNA, 19 nt, Human
cuucugacgugccuuuugc

SEQ ID NO: 3833292 - RNA, 15 nt, Human
cuucugacucuuccc

SEQ ID NO: 3833293 - RNA, 17 nt, Human
cuucugacucuucccca

SEQ ID NO: 3833294 - RNA, 21 nt, Human
cuucugacugcugauucuccc

SEQ ID NO: 3833295 - RNA, 18 nt, Human
cuucugacuuaagugugc

SEQ ID NO: 3833296 - RNA, 22 nt, Human
cuucugagacgucaugaggaga

SEQ ID NO: 3833297 - RNA, 23 nt, Human
cuucugagcuccuguccccugcu

SEQ ID NO: 3833298 - RNA, 20 nt, Human
cuucugaggacauuccaaga

SEQ ID NO: 3833299 - RNA, 16 nt, Human
cuucugcacccuccac

SEQ ID NO: 3833300 - RNA, 19 nt, Human
cuucugcacccuccacccu

SEQ ID NO: 3833301 - RNA, 20 nt, Human
cuucugcacccuccacccug

SEQ ID NO: 3833302 - RNA, 14 nt, Human
cuucugccacuucc

SEQ ID NO: 3833303 - RNA, 18 nt, Human
cuucugccacuucccagg

SEQ ID NO: 3833304 - RNA, 20 nt, Human
cuucugccacuucccaggua

SEQ ID NO: 3833305 - RNA, 23 nt, Human
cuucugcccaauuggaggaaagc

SEQ ID NO: 3833306 - RNA, 22 nt, Human
cuucugcccauccugucuguuc

SEQ ID NO: 3833307 - RNA, 15 nt, Human
cuucugcccccugca

SEQ ID NO: 3833308 - RNA, 16 nt, Human
cuucugcccccugcag

SEQ ID NO: 3833309 - RNA, 19 nt, Human
cuucugccggcccuggggc

SEQ ID NO: 3833310 - RNA, 12 nt, Human
cuucugccugca

SEQ ID NO: 3833311 - RNA, 13 nt, Human
cuucugccuggag

SEQ ID NO: 3833312 - RNA, 19 nt, Human
cuucugccuuagucucagu

SEQ ID NO: 3833313 - RNA, 20 nt, Human
cuucugccuuagucucaguu

SEQ ID NO: 3833314 - RNA, 15 nt, Human
cgcaggaacucccag

SEQ ID NO: 3833315 - RNA, 24 nt, Human
cgcaggaagacccaacacauggga

SEQ ID NO: 3833316 - RNA, 18 nt, Human
cgcaggagcacacccagc

SEQ ID NO: 3833317 - RNA, 23 nt, Human
cgcaggagcacacccagccccca

SEQ ID NO: 3833318 - RNA, 18 nt, Human
cuuguggggacccaggcu

SEQ ID NO: 3833319 - RNA, 17 nt, Human
cuuguggggccugggag

SEQ ID NO: 3833320 - RNA, 18 nt, Human
cuuguggggccugggagg

SEQ ID NO: 3833321 - RNA, 14 nt, Human
cuuguggguccaug

SEQ ID NO: 3833322 - RNA, 15 nt, Human
cuuguggucccaccc

SEQ ID NO: 3833323 - RNA, 23 nt, Human
cuugugguuauaacuuaaugaaa

SEQ ID NO: 3833324 - RNA, 18 nt, Human
cuuguguaauuuauguga

SEQ ID NO: 3833325 - RNA, 15 nt, Human
cuuguguauccauua

SEQ ID NO: 3833326 - RNA, 15 nt, Human
cuugugucucugugc

SEQ ID NO: 3833327 - RNA, 17 nt, Human
cuugugucucugugcuu

SEQ ID NO: 3833328 - RNA, 21 nt, Human
cuugugucucugugcuuuuaa

SEQ ID NO: 3833329 - RNA, 14 nt, Human
cuugugucuguaca

SEQ ID NO: 3833330 - RNA, 15 nt, Human
cuugugucuguacac

SEQ ID NO: 3833331 - RNA, 14 nt, Human
cuugugugcaaaag

SEQ ID NO: 3833332 - RNA, 22 nt, Human
cuuguguguaugcacaugaacu

SEQ ID NO: 3833333 - RNA, 13 nt, Human
cuuguguguuuca

SEQ ID NO: 3833334 - RNA, 15 nt, Human
cuuguguuuuaaaau

SEQ ID NO: 3833335 - RNA, 15 nt, Human
cuuguguuuuugucu

SEQ ID NO: 3833336 - RNA, 16 nt, Human
cuuguuaagauaguua

SEQ ID NO: 3833337 - RNA, 18 nt, Human
cuuguuaaugcuuucuga

SEQ ID NO: 3833338 - RNA, 17 nt, Human
cuuguuacuucugaggu

SEQ ID NO: 3833339 - RNA, 16 nt, Human
cuuguuagaaaacaaa

SEQ ID NO: 3833340 - RNA, 23 nt, Human
cuuguuagaaaacaaaauuuuau

SEQ ID NO: 3833341 - RNA, 16 nt, Human
cuuguuagaucuaguu

SEQ ID NO: 3833342 - RNA, 20 nt, Human
cuuguuauauuaagcagaaa

SEQ ID NO: 3833343 - RNA, 16 nt, Human
cuuguuauucaacagc

SEQ ID NO: 3833344 - RNA, 13 nt, Human
cuuguuauuguga

SEQ ID NO: 3833345 - RNA, 14 nt, Human
cuuguuauugugaa

SEQ ID NO: 3833346 - RNA, 17 nt, Human
cuuguuauugugaauga

SEQ ID NO: 3833347 - RNA, 13 nt, Human
cuuguuauuuaua

SEQ ID NO: 3833348 - RNA, 16 nt, Human
cuuguuccaaggccag

SEQ ID NO: 3833349 - RNA, 21 nt, Human
cuuguuccaaugccacauacu

SEQ ID NO: 3833350 - RNA, 12 nt, Human
cuuguuccuaga

SEQ ID NO: 3833351 - RNA, 21 nt, Human
cuuguucgugggucaucggga

SEQ ID NO: 3833352 - RNA, 21 nt, Human
cuuguucucuaaguuccacug

SEQ ID NO: 3833353 - RNA, 19 nt, Human
cuuguucugagauucaaua

SEQ ID NO: 3833354 - RNA, 13 nt, Human
cuuguucugucac

SEQ ID NO: 3833355 - RNA, 17 nt, Human
cuuguucugucacucag

SEQ ID NO: 3833356 - RNA, 15 nt, Human
cuuguucuguuuugu

SEQ ID NO: 3833357 - RNA, 15 nt, Human
cuuguugaauuuauu

SEQ ID NO: 3833358 - RNA, 18 nt, Human
cuuguugagccgugggca

SEQ ID NO: 3833359 - RNA, 21 nt, Human
cuuguugaggguauguuuuau

SEQ ID NO: 3833360 - RNA, 22 nt, Human
cuuguugaggguauguuuuaua

SEQ ID NO: 3833361 - RNA, 13 nt, Human
cuuguugcuuugu

SEQ ID NO: 3833362 - RNA, 18 nt, Human
cuuguugcuuuguugcac

SEQ ID NO: 3833363 - RNA, 15 nt, Human
cuuguuggagccugc

SEQ ID NO: 3833364 - RNA, 19 nt, Human
cuuguuggagccugcaggg

SEQ ID NO: 3833365 - RNA, 23 nt, Human
cuuguuggcguaggcuacagaga

SEQ ID NO: 3833366 - RNA, 21 nt, Human
cuuguugggauuccugaccca

SEQ ID NO: 3833367 - RNA, 16 nt, Human
cuuguuguaaagcaau

SEQ ID NO: 3833368 - RNA, 15 nt, Human
cuuguuguuuaaugu

SEQ ID NO: 3833369 - RNA, 21 nt, Human
cuuguuguuuguaacaagaaa

SEQ ID NO: 3833370 - RNA, 19 nt, Human
cuuguuuacagcacuacuc

SEQ ID NO: 3833371 - RNA, 17 nt, Human
cuuguuuacaugcuuau

SEQ ID NO: 3833372 - RNA, 13 nt, Human
cuugcucuggacc

SEQ ID NO: 3833373 - RNA, 17 nt, Human
cuugcucuugaugccug

SEQ ID NO: 3833374 - RNA, 18 nt, Human
cuugcucuugaugccugg

SEQ ID NO: 3833375 - RNA, 22 nt, Human
cuugcucuuucuacucugaacu

SEQ ID NO: 3833376 - RNA, 15 nt, Human
cuugcugccuucugg

SEQ ID NO: 3833377 - RNA, 12 nt, Human
cuugcugcuaga

SEQ ID NO: 3833378 - RNA, 18 nt, Human
cuugcugcuagaacuuuu

SEQ ID NO: 3833379 - RNA, 21 nt, Human
cuugcuggccccagcccugcu

SEQ ID NO: 3833380 - RNA, 21 nt, Human
cuugcuggcuacgccucuucu

SEQ ID NO: 3833381 - RNA, 13 nt, Human
cuugcuguaugcu

SEQ ID NO: 3833382 - RNA, 17 nt, Human
cuugcuguccuaggcca

SEQ ID NO: 3833383 - RNA, 14 nt, Human
cuugcugucucugc

SEQ ID NO: 3833384 - RNA, 15 nt, Human
cuugcugucucugcu

SEQ ID NO: 3833385 - RNA, 21 nt, Human
cuugcugucucugcucgcccu

SEQ ID NO: 3833386 - RNA, 19 nt, Human
cuugcuguugacauauuua

SEQ ID NO: 3833387 - RNA, 21 nt, Human
cuugcuguugacauauuuaau

SEQ ID NO: 3833388 - RNA, 13 nt, Human
cuugcuuaaauuu

SEQ ID NO: 3833389 - RNA, 23 nt, Human
cuugcuuaaauuucuuaugugac

SEQ ID NO: 3833390 - RNA, 17 nt, Human
cuugcuucccuaaucua

SEQ ID NO: 3833391 - RNA, 18 nt, Human
cuugcuucuuucuagaaa

SEQ ID NO: 3833392 - RNA, 12 nt, Human
cuugcuugccug

SEQ ID NO: 3833393 - RNA, 17 nt, Human
cuugcuugccugcaggg

SEQ ID NO: 3833394 - RNA, 13 nt, Human
cuugcuugcuuuu

SEQ ID NO: 3833395 - RNA, 16 nt, Human
cuugcuuguaccucug

SEQ ID NO: 3833396 - RNA, 18 nt, Human
cuugcuuucuuuuuuaaa

SEQ ID NO: 3833397 - RNA, 20 nt, Human
cuugcuuugauuuacagcaa

SEQ ID NO: 3833398 - RNA, 17 nt, Human
cuugcuuuguguucuuu

SEQ ID NO: 3833399 - RNA, 19 nt, Human
cuugcuuuguguucuuugu

SEQ ID NO: 3833400 - RNA, 15 nt, Human
cuugcuuuuaaaauc

SEQ ID NO: 3833401 - RNA, 18 nt, Human
cuugcuuuucccucuuuu

SEQ ID NO: 3833402 - RNA, 21 nt, Human
cuugcuuuucccucuuuucuu

SEQ ID NO: 3833403 - RNA, 15 nt, Human
cuuggaaaccugccc

SEQ ID NO: 3833404 - RNA, 21 nt, Human
cuuggaaagaaacaaccguug

SEQ ID NO: 3833405 - RNA, 19 nt, Human
cuuggaaauauuaaaagaa

SEQ ID NO: 3833406 - RNA, 20 nt, Human
cuuggaaaucaaauguaaag

SEQ ID NO: 3833407 - RNA, 16 nt, Human
cuuggaaaugggagac

SEQ ID NO: 3833408 - RNA, 19 nt, Human
cuuggaaauuccuguacug

SEQ ID NO: 3833409 - RNA, 20 nt, Human
cuuggaaauuccuguacugu

SEQ ID NO: 3833410 - RNA, 15 nt, Human
cuuggaagcuucugg

SEQ ID NO: 3833411 - RNA, 22 nt, Human
cuuggaaguacaugaauacaaa

SEQ ID NO: 3833412 - RNA, 18 nt, Human
cuuggaauaucugcugua

SEQ ID NO: 3833413 - RNA, 17 nt, Human
cuuggaauuccauuuga

SEQ ID NO: 3833414 - RNA, 18 nt, Human
cuuggacauuuuaugucu

SEQ ID NO: 3833415 - RNA, 16 nt, Human
cuuggaccucugcucu

SEQ ID NO: 3833416 - RNA, 14 nt, Human
cuuggacuauuaua

SEQ ID NO: 3833417 - RNA, 14 nt, Human
cuuggacucuugcu

SEQ ID NO: 3833418 - RNA, 16 nt, Human
cuuggagagacacagc

SEQ ID NO: 3833419 - RNA, 21 nt, Human
cuuggagccggacuuucggag

SEQ ID NO: 3833420 - RNA, 16 nt, Human
cuuggagccugcagag

SEQ ID NO: 3833421 - RNA, 17 nt, Human
cuuggagcguggacugg

SEQ ID NO: 3833422 - RNA, 14 nt, Human
cuuggagcucugag

SEQ ID NO: 3833423 - RNA, 23 nt, Human
cuuggagcugugaguucucccug

SEQ ID NO: 3833424 - RNA, 15 nt, Human
cuuggaggcugucuu

SEQ ID NO: 3833425 - RNA, 14 nt, Human
cuuggagggaagcc

SEQ ID NO: 3833426 - RNA, 23 nt, Human
cuuggagggcaugaagacagaua

SEQ ID NO: 3833427 - RNA, 19 nt, Human
cuuggagggcccacuugua

SEQ ID NO: 3833428 - RNA, 21 nt, Human
cuuggagggucccaagcuggg

SEQ ID NO: 3833429 - RNA, 24 nt, Human
cuuggaggguugguccucuugccu

SEQ ID NO: 3833430 - RNA, 22 nt, Human
cuuggaguauuggggucugacc

SEQ ID NO: 3833431 - RNA, 23 nt, Human
cuuggauaccuagaccguuauaa

SEQ ID NO: 3833432 - RNA, 18 nt, Human
cuuggauguaccugcccc

SEQ ID NO: 3833433 - RNA, 17 nt, Human
cuuggauucuuuccauu

SEQ ID NO: 3833434 - RNA, 15 nt, Human
cuuggauuguccccg

SEQ ID NO: 3833435 - RNA, 23 nt, Human
cuuggauuguccccgacccuugc

SEQ ID NO: 3833436 - RNA, 16 nt, Human
cuuggcaaaagccuug

SEQ ID NO: 3833437 - RNA, 20 nt, Human
cuuggcaaaagccuugugua

SEQ ID NO: 3833438 - RNA, 21 nt, Human
cuuggcaaaagccuuguguau

SEQ ID NO: 3833439 - RNA, 22 nt, Human
cuuggcaauaaauuuugaaaag

SEQ ID NO: 3833440 - RNA, 23 nt, Human
cuuggcaauaaauuuugaaaagu

SEQ ID NO: 3833441 - RNA, 18 nt, Human
cuuggcaauauuccuuag

SEQ ID NO: 3833442 - RNA, 12 nt, Human
cuuggcaccaaa

SEQ ID NO: 3833443 - RNA, 19 nt, Human
cuuggcaccaaagaugcag

SEQ ID NO: 3833444 - RNA, 16 nt, Human
cuuggcaccagacacc

SEQ ID NO: 3833445 - RNA, 19 nt, Human
cuuggcaccagacacccag

SEQ ID NO: 3833446 - RNA, 18 nt, Human
cuuggcacuuauugaaua

SEQ ID NO: 3833447 - RNA, 20 nt, Human
cuuggcagcaccugucuccu

SEQ ID NO: 3833448 - RNA, 14 nt, Human
cuuggcagccuacu

SEQ ID NO: 3833449 - RNA, 13 nt, Human
cuuggcagccuug

SEQ ID NO: 3833450 - RNA, 22 nt, Human
cuuggcaucacagggcagagcc

SEQ ID NO: 3833451 - RNA, 16 nt, Human
cuuggcaugccuucca

SEQ ID NO: 3833452 - RNA, 14 nt, Human
cuuggcauuccgca

SEQ ID NO: 3833453 - RNA, 22 nt, Human
cuuggcauuccgcaucccuacc

SEQ ID NO: 3833454 - RNA, 18 nt, Human
cuuggccacagccagggg

SEQ ID NO: 3833455 - RNA, 18 nt, Human
cuuggccaguuaucccuu

SEQ ID NO: 3833456 - RNA, 18 nt, Human
cuuggccaugcagaaagc

SEQ ID NO: 3833457 - RNA, 11 nt, Human
cuuggcccagg

SEQ ID NO: 3833458 - RNA, 13 nt, Human
cuuggcccuggca

SEQ ID NO: 3833459 - RNA, 16 nt, Human
cuuggcccuggcagcc

SEQ ID NO: 3833460 - RNA, 15 nt, Human
cuuggcccuuuccuu

SEQ ID NO: 3833461 - RNA, 20 nt, Human
cuuggcccuuuccuuccaga

SEQ ID NO: 3833462 - RNA, 18 nt, Human
cuuguaaauagcucaggu

SEQ ID NO: 3833463 - RNA, 13 nt, Human
cuuguaaauauaa

SEQ ID NO: 3833464 - RNA, 21 nt, Human
cuuguaacuccaccaacccau

SEQ ID NO: 3833465 - RNA, 17 nt, Human
cuuguaauauuuuguau

SEQ ID NO: 3833466 - RNA, 20 nt, Human
cuuguaauauuuuguauuau

SEQ ID NO: 3833467 - RNA, 15 nt, Human
cuuguaauguaacug

SEQ ID NO: 3833468 - RNA, 11 nt, Human
cuuguaauuau

SEQ ID NO: 3833469 - RNA, 14 nt, Human
cuuguaauuaugga

SEQ ID NO: 3833470 - RNA, 23 nt, Human
cuuguaauucuaaaugaauguuu

SEQ ID NO: 3833471 - RNA, 22 nt, Human
cuuguaauuuuacacgcuuuug

SEQ ID NO: 3833472 - RNA, 22 nt, Human
cuuguacauaaugcgugcauac

SEQ ID NO: 3833473 - RNA, 14 nt, Human
cuuguacaugugua

SEQ ID NO: 3833474 - RNA, 20 nt, Human
cuuguacauguguagccugu

SEQ ID NO: 3833475 - RNA, 22 nt, Human
cuuguacccccagguggaaggc

SEQ ID NO: 3833476 - RNA, 18 nt, Human
cuuguaccucuggcugac

SEQ ID NO: 3833477 - RNA, 20 nt, Human
cuuguaccucuggcugacua

SEQ ID NO: 3833478 - RNA, 17 nt, Human
cuuguacuuuauuuucu

SEQ ID NO: 3833479 - RNA, 19 nt, Human
cuuguagaacucacucugg

SEQ ID NO: 3833480 - RNA, 20 nt, Human
cuuguagaacucacucuggg

SEQ ID NO: 3833481 - RNA, 17 nt, Human
cuuguagaauuguuaua

SEQ ID NO: 3833482 - RNA, 14 nt, Human
cuuguagauuugau

SEQ ID NO: 3833483 - RNA, 15 nt, Human
cuuguagauuugauu

SEQ ID NO: 3833484 - RNA, 14 nt, Human
cuuguagccagccg

SEQ ID NO: 3833485 - RNA, 22 nt, Human
cuuguagcgacuaaacuagauu

SEQ ID NO: 3833486 - RNA, 23 nt, Human
cuuguagcuccuccccuggaggg

SEQ ID NO: 3833487 - RNA, 13 nt, Human
cuuguagcuguaa

SEQ ID NO: 3833488 - RNA, 16 nt, Human
cuuguagcuguaaaac

SEQ ID NO: 3833489 - RNA, 13 nt, Human
cuuguaguucuuu

SEQ ID NO: 3833490 - RNA, 20 nt, Human
cuuguaguucuuuaaacugu

SEQ ID NO: 3833491 - RNA, 22 nt, Human
cuuguaguuuagugugguuuuc

SEQ ID NO: 3833492 - RNA, 14 nt, Human
cuuguauaaaugua

SEQ ID NO: 3833493 - RNA, 15 nt, Human
cuuguauaaauguau

SEQ ID NO: 3833494 - RNA, 14 nt, Human
cuuguauaaauuau

SEQ ID NO: 3833495 - RNA, 20 nt, Human
cuuguauauacgcaucuaua

SEQ ID NO: 3833496 - RNA, 15 nt, Human
cuuguauauucuauu

SEQ ID NO: 3833497 - RNA, 19 nt, Human
cuuguauauuuguacaaaa

SEQ ID NO: 3833498 - RNA, 23 nt, Human
cuuguauauuuuaagaaauaaca

SEQ ID NO: 3833499 - RNA, 19 nt, Human
cuuguaucaacacuguuac

SEQ ID NO: 3833500 - RNA, 15 nt, Human
cuuguauccaggccu

SEQ ID NO: 3833501 - RNA, 17 nt, Human
cuuguauccaggccugg

SEQ ID NO: 3833502 - RNA, 18 nt, Human
cuuguauccccugcaggc

SEQ ID NO: 3833503 - RNA, 13 nt, Human
cuuguauuaaacu

SEQ ID NO: 3833504 - RNA, 16 nt, Human
cuuguauuccaagcau

SEQ ID NO: 3833505 - RNA, 18 nt, Human
cuugucaagccugugcaa

SEQ ID NO: 3833506 - RNA, 15 nt, Human
cuugucaauauuuaa

SEQ ID NO: 3833507 - RNA, 23 nt, Human
cuugucacgccagacuucccacg

SEQ ID NO: 3833508 - RNA, 20 nt, Human
cuugucacugacacaaagga

SEQ ID NO: 3833509 - RNA, 23 nt, Human
cuugucacugguagaccaaaaua

SEQ ID NO: 3833510 - RNA, 11 nt, Human
cuugucacuug

SEQ ID NO: 3833511 - RNA, 15 nt, Human
cuugucagacauaaa

SEQ ID NO: 3833512 - RNA, 17 nt, Human
cuugucagacauaaagc

SEQ ID NO: 3833513 - RNA, 19 nt, Human
cuugucagacauaaagcca

SEQ ID NO: 3833514 - RNA, 20 nt, Human
cuugucagacauaaagccau

SEQ ID NO: 3833515 - RNA, 20 nt, Human
cuugucaggaguguguguga

SEQ ID NO: 3833516 - RNA, 13 nt, Human
cuugucaugugua

SEQ ID NO: 3833517 - RNA, 22 nt, Human
cuugucauuguuauauaaucau

SEQ ID NO: 3833518 - RNA, 15 nt, Human
cuugucauuuugguc

SEQ ID NO: 3833519 - RNA, 20 nt, Human
cuuguccaacccgaggcccg

SEQ ID NO: 3833520 - RNA, 13 nt, Human
cuuguccagcuga

SEQ ID NO: 3833521 - RNA, 16 nt, Human
cuugucccacucaagc

SEQ ID NO: 3833522 - RNA, 15 nt, Human
cuugucccagaggcu

SEQ ID NO: 3833523 - RNA, 19 nt, Human
cuugucccagaggcugccc

SEQ ID NO: 3833524 - RNA, 20 nt, Human
cuuguccccacacuccuaca

SEQ ID NO: 3833525 - RNA, 17 nt, Human
cuuguccccugccugug

SEQ ID NO: 3833526 - RNA, 15 nt, Human
cuugucccugcccag

SEQ ID NO: 3833527 - RNA, 17 nt, Human
cuuguccuagcacagau

SEQ ID NO: 3833528 - RNA, 15 nt, Human
cuuguccucagccag

SEQ ID NO: 3833529 - RNA, 14 nt, Human
cuuguccuuucccu

SEQ ID NO: 3833530 - RNA, 23 nt, Human
cuuguccuuuuguaccauggugu

SEQ ID NO: 3833531 - RNA, 20 nt, Human
cuugucggccccaccagugc

SEQ ID NO: 3833532 - RNA, 21 nt, Human
cuugucggccccaccagugcc

SEQ ID NO: 3833533 - RNA, 17 nt, Human
cuugucucaaugcucau

SEQ ID NO: 3833534 - RNA, 18 nt, Human
cuugucucaaugcucaua

SEQ ID NO: 3833535 - RNA, 23 nt, Human
cuugucucaaugcucauaacgga

SEQ ID NO: 3833536 - RNA, 15 nt, Human
cuuuaggcauuaaau

SEQ ID NO: 3833537 - RNA, 23 nt, Human
cuuuaggcauuaaauuuuagcaa

SEQ ID NO: 3833538 - RNA, 17 nt, Human
cuuuaggcuuucagcuu

SEQ ID NO: 3833539 - RNA, 23 nt, Human
cuuuagggacucaauuucucccc

SEQ ID NO: 3833540 - RNA, 16 nt, Human
cuuuagggcagcuugc

SEQ ID NO: 3833541 - RNA, 16 nt, Human
cuuuaggucuuuguaa

SEQ ID NO: 3833542 - RNA, 18 nt, Human
cuuuagguuuuuuuaaug

SEQ ID NO: 3833543 - RNA, 20 nt, Human
cuuuagguuuuuuuaaugau

SEQ ID NO: 3833544 - RNA, 17 nt, Human
cuuuaguaccugaaaag

SEQ ID NO: 3833545 - RNA, 17 nt, Human
cuuuaguaucaguguuu

SEQ ID NO: 3833546 - RNA, 22 nt, Human
cuuuaguaugacgcugauacau

SEQ ID NO: 3833547 - RNA, 15 nt, Human
cuuuaguguauuuau

SEQ ID NO: 3833548 - RNA, 13 nt, Human
cuuuaguuuuugu

SEQ ID NO: 3833549 - RNA, 12 nt, Human
cuuuauaaacuu

SEQ ID NO: 3833550 - RNA, 13 nt, Human
cuuuauaaauaaa

SEQ ID NO: 3833551 - RNA, 20 nt, Human
cuuuauaagucauuguaugu

SEQ ID NO: 3833552 - RNA, 13 nt, Human
cuuuauaauucua

SEQ ID NO: 3833553 - RNA, 14 nt, Human
cuuuauacagcugu

SEQ ID NO: 3833554 - RNA, 21 nt, Human
cuuuauagugcacaaaaugaa

SEQ ID NO: 3833555 - RNA, 23 nt, Human
cuuuauauacaauaauggaaaaa

SEQ ID NO: 3833556 - RNA, 15 nt, Human
cuuuauauauggaca

SEQ ID NO: 3833557 - RNA, 13 nt, Human
cuuuauauuuagu

SEQ ID NO: 3833558 - RNA, 22 nt, Human
cuuuaucaaagggugaaaauua

SEQ ID NO: 3833559 - RNA, 18 nt, Human
cuuuaucacuuuuugaac

SEQ ID NO: 3833560 - RNA, 14 nt, Human
cuuuauccucuuua

SEQ ID NO: 3833561 - RNA, 21 nt, Human
cuuuaucuaauaccucugugu

SEQ ID NO: 3833562 - RNA, 22 nt, Human
cuuuaucuaauaccucugugug

SEQ ID NO: 3833563 - RNA, 21 nt, Human
cuuuaucuaccaacuuucaag

SEQ ID NO: 3833564 - RNA, 20 nt, Human
cuuuaugauaauagauucuc

SEQ ID NO: 3833565 - RNA, 19 nt, Human
cuuuaugccggaugugcuu

SEQ ID NO: 3833566 - RNA, 12 nt, Human
cuuuaugcugaa

SEQ ID NO: 3833567 - RNA, 23 nt, Human
cuuuauggcagacauugugcuag

SEQ ID NO: 3833568 - RNA, 16 nt, Human
cuuuaugguaaagaug

SEQ ID NO: 3833569 - RNA, 22 nt, Human
cuuuaugguccuaaaagcaaaa

SEQ ID NO: 3833570 - RNA, 20 nt, Human
cuuuauguaguuuuuauaug

SEQ ID NO: 3833571 - RNA, 12 nt, Human
cuuuaugucuuu

SEQ ID NO: 3833572 - RNA, 13 nt, Human
cuuuaugugaauu

SEQ ID NO: 3833573 - RNA, 18 nt, Human
cuuuauguggaaaacaga

SEQ ID NO: 3833574 - RNA, 22 nt, Human
cuuuauguugcggugagaacuc

SEQ ID NO: 3833575 - RNA, 20 nt, Human
cuuuauguuuuugaggcuuu

SEQ ID NO: 3833576 - RNA, 18 nt, Human
cuuuauuaaaaucuuaaa

SEQ ID NO: 3833577 - RNA, 21 nt, Human
cuuuauuaaauacaaaacuuc

SEQ ID NO: 3833578 - RNA, 17 nt, Human
cuuuauuaaauguagaa

SEQ ID NO: 3833579 - RNA, 12 nt, Human
cuuuauuauuua

SEQ ID NO: 3833580 - RNA, 23 nt, Human
cuuuauuccagaaugcuguacau

SEQ ID NO: 3833581 - RNA, 18 nt, Human
cuuuauuccuucauuuca

SEQ ID NO: 3833582 - RNA, 20 nt, Human
cuuuauucuggcagaggagg

SEQ ID NO: 3833583 - RNA, 20 nt, Human
cuuuauucuugaaagaagaa

SEQ ID NO: 3833584 - RNA, 21 nt, Human
cuuuauugaaaaaauaaaaaa

SEQ ID NO: 3833585 - RNA, 21 nt, Human
cuuuauugccaaaacccagcu

SEQ ID NO: 3833586 - RNA, 23 nt, Human
cuuuauugccaaaacccagcugc

SEQ ID NO: 3833587 - RNA, 14 nt, Human
cuuuauugcuuuuu

SEQ ID NO: 3833588 - RNA, 18 nt, Human
cuuuauugcuuuuuugua

SEQ ID NO: 3833589 - RNA, 18 nt, Human
cuuuauuggcugagauau

SEQ ID NO: 3833590 - RNA, 23 nt, Human
cuuuauuguguuugucauuagcc

SEQ ID NO: 3833591 - RNA, 22 nt, Human
cuuuauuuacuucguuuugguu

SEQ ID NO: 3833592 - RNA, 12 nt, Human
cuuuauuuccaa

SEQ ID NO: 3833593 - RNA, 14 nt, Human
cuuuauuuguaaau

SEQ ID NO: 3833594 - RNA, 16 nt, Human
cuuuauuuguaaauuu

SEQ ID NO: 3833595 - RNA, 23 nt, Human
cuuuauuuguguucuuuuuuccc

SEQ ID NO: 3833596 - RNA, 20 nt, Human
cuuuauuuuauauaauaaag

SEQ ID NO: 3833597 - RNA, 23 nt, Human
cuuuauuuuauauaauaaaguau

SEQ ID NO: 3833598 - RNA, 21 nt, Human
cuuuauuuucuauaauuuaaa

SEQ ID NO: 3833599 - RNA, 13 nt, Human
cuuuauuuucugg

SEQ ID NO: 3833600 - RNA, 17 nt, Human
cuuuauuuugagaugua

SEQ ID NO: 3833601 - RNA, 19 nt, Human
cuuuauuuugagauguaaa

SEQ ID NO: 3833602 - RNA, 14 nt, Human
cuuuauuuugugua

SEQ ID NO: 3833603 - RNA, 19 nt, Human
cuuuauuuuguguuuagga

SEQ ID NO: 3833604 - RNA, 18 nt, Human
cuuuauuuuuuaaguauu

SEQ ID NO: 3833605 - RNA, 14 nt, Human
cggggaggccaagu

SEQ ID NO: 3833606 - RNA, 19 nt, Human
cggggaggccaagugcagg

SEQ ID NO: 3833607 - RNA, 23 nt, Human
cggggauguguccugacacugca

SEQ ID NO: 3833608 - RNA, 15 nt, Human
cggggcacugcaggg

SEQ ID NO: 3833609 - RNA, 19 nt, Human
cggggcagcccccucacag

SEQ ID NO: 3833610 - RNA, 17 nt, Human
cggggcaucuggccugg

SEQ ID NO: 3833611 - RNA, 16 nt, Human
cggggcaugcuggggc

SEQ ID NO: 3833612 - RNA, 14 nt, Human
cggggccagcuccg

SEQ ID NO: 3833613 - RNA, 21 nt, Human
cggggcccagggcaagcuccg

SEQ ID NO: 3833614 - RNA, 17 nt, Human
cggggccugggcaggag

SEQ ID NO: 3833615 - RNA, 17 nt, Human
cggggcguuucuuugcc

SEQ ID NO: 3833616 - RNA, 15 nt, Human
cggggcucaggaggg

SEQ ID NO: 3833617 - RNA, 10 nt, Human
cggggcuggg

SEQ ID NO: 3833618 - RNA, 13 nt, Human
cggggcugggaag

SEQ ID NO: 3833619 - RNA, 23 nt, Human
cgggggcaggggaggccaucugg

SEQ ID NO: 3833620 - RNA, 16 nt, Human
cgggggcaggugcugg

SEQ ID NO: 3833621 - RNA, 21 nt, Human
cgggggcagucugagagaggc

SEQ ID NO: 3833622 - RNA, 14 nt, Human
cgggggcuggggca

SEQ ID NO: 3833623 - RNA, 13 nt, Human
cggggggaggguu

SEQ ID NO: 3833624 - RNA, 21 nt, Human
cggggguggcggcggccccua

SEQ ID NO: 3833625 - RNA, 19 nt, Human
cggggguuccguguccacc

SEQ ID NO: 3833626 - RNA, 22 nt, Human
cggggguuccguguccaccccc

SEQ ID NO: 3833627 - RNA, 16 nt, Human
cgggguccuguggcag

SEQ ID NO: 3833628 - RNA, 19 nt, Human
cgggguccuguggcaggca

SEQ ID NO: 3833629 - RNA, 22 nt, Human
cggggugagggggggcucccug

SEQ ID NO: 3833630 - RNA, 22 nt, Human
cggggugaguccauucucccag

SEQ ID NO: 3833631 - RNA, 17 nt, Human
cggggugcacaggaggg

SEQ ID NO: 3833632 - RNA, 14 nt, Human
cgggguggccacag

SEQ ID NO: 3833633 - RNA, 19 nt, Human
cggggugucugucuuccuu

SEQ ID NO: 3833634 - RNA, 19 nt, Human
cgggucacaggagggaggg

SEQ ID NO: 3833635 - RNA, 15 nt, Human
cgggucaucuguacc

SEQ ID NO: 3833636 - RNA, 17 nt, Human
cgggucugcucccaagg

SEQ ID NO: 3833637 - RNA, 14 nt, Human
cgggugcagcaucu

SEQ ID NO: 3833638 - RNA, 16 nt, Human
cgggugccagaagcua

SEQ ID NO: 3833639 - RNA, 21 nt, Human
cggguggggaaaggagguggg

SEQ ID NO: 3833640 - RNA, 20 nt, Human
cggguggggcuuggggcuca

SEQ ID NO: 3833641 - RNA, 16 nt, Human
cggguuccgcaggcag

SEQ ID NO: 3833642 - RNA, 16 nt, Human
cggguugugugucugu

SEQ ID NO: 3833643 - RNA, 19 nt, Human
cggguuuggcgggccaagg

SEQ ID NO: 3833644 - RNA, 14 nt, Human
cgguaccaaugcag

SEQ ID NO: 3833645 - RNA, 19 nt, Human
cgguaccaaugcagaacuc

SEQ ID NO: 3833646 - RNA, 15 nt, Human
cgguagccagcacac

SEQ ID NO: 3833647 - RNA, 21 nt, Human
cgguagccagcacacagggca

SEQ ID NO: 3833648 - RNA, 15 nt, Human
cgguagcugugcgug

SEQ ID NO: 3833649 - RNA, 19 nt, Human
cgguagggaggcagccucc

SEQ ID NO: 3833650 - RNA, 18 nt, Human
cgguagguucagccaagg

SEQ ID NO: 3833651 - RNA, 14 nt, Human
cgguauuaugcuuc

SEQ ID NO: 3833652 - RNA, 14 nt, Human
cggucaaggccagc

SEQ ID NO: 3833653 - RNA, 21 nt, Human
cggucagguuuaacauuugcc

SEQ ID NO: 3833654 - RNA, 14 nt, Human
cgguccacccagga

SEQ ID NO: 3833655 - RNA, 16 nt, Human
cgguccacccaggagc

SEQ ID NO: 3833656 - RNA, 11 nt, Human
cgguccagcug

SEQ ID NO: 3833657 - RNA, 14 nt, Human
cgguccagcuggcc

SEQ ID NO: 3833658 - RNA, 15 nt, Human
cgguccagcuggccu

SEQ ID NO: 3833659 - RNA, 14 nt, Human
cggucccacacugg

SEQ ID NO: 3833660 - RNA, 13 nt, Human
cggucccagcucc

SEQ ID NO: 3833661 - RNA, 22 nt, Human
cggucccuugagaccucagcca

SEQ ID NO: 3833662 - RNA, 15 nt, Human
cgguccugucucccc

SEQ ID NO: 3833663 - RNA, 21 nt, Human
cggucuaaagugagcucuaug

SEQ ID NO: 3833664 - RNA, 16 nt, Human
cggucugcaagucaga

SEQ ID NO: 3833665 - RNA, 21 nt, Human
cggucuucaacauccugccag

SEQ ID NO: 3833666 - RNA, 20 nt, Human
cggugaauggcuuuguauag

SEQ ID NO: 3833667 - RNA, 19 nt, Human
cggugaccucuagcccugc

SEQ ID NO: 3833668 - RNA, 17 nt, Human
cggugagcuacaaaugc

SEQ ID NO: 3833669 - RNA, 19 nt, Human
cggugccaugucugcagug

SEQ ID NO: 3833670 - RNA, 20 nt, Human
cggugcccaagccagaggcu

SEQ ID NO: 3833671 - RNA, 23 nt, Human
cggugccuuuauuuccacugugc

SEQ ID NO: 3833672 - RNA, 15 nt, Human
cggugcuccaggcag

SEQ ID NO: 3833673 - RNA, 16 nt, Human
cggugcuccaggcagg

SEQ ID NO: 3833674 - RNA, 16 nt, Human
cggugcuguccucagg

SEQ ID NO: 3833675 - RNA, 15 nt, Human
cgguggaggccaggg

SEQ ID NO: 3833676 - RNA, 17 nt, Human
cgguggcggccccagca

SEQ ID NO: 3833677 - RNA, 22 nt, Human
cgguggcuaaaggucccaaggc

SEQ ID NO: 3833678 - RNA, 21 nt, Human
cgguggcuagucaagcuccuc

SEQ ID NO: 3833679 - RNA, 20 nt, Human
cgguggcucaggccuauaac

SEQ ID NO: 3833680 - RNA, 14 nt, Human
cgguggcugggcag

SEQ ID NO: 3833681 - RNA, 12 nt, Human
cggugggccugg

SEQ ID NO: 3833682 - RNA, 13 nt, Human
cggugggccuugc

SEQ ID NO: 3833683 - RNA, 19 nt, Human
cgguggggguagggggcug

SEQ ID NO: 3833684 - RNA, 15 nt, Human
cgguguccccaccau

SEQ ID NO: 3833685 - RNA, 16 nt, Human
cgguguccccaccauc

SEQ ID NO: 3833686 - RNA, 21 nt, Human
cggugucccccagcagccugg

SEQ ID NO: 3833687 - RNA, 16 nt, Human
cggugugcaccagggu

SEQ ID NO: 3833688 - RNA, 15 nt, Human
cggugugccugcagc

SEQ ID NO: 3833689 - RNA, 20 nt, Human
cggugugggggccccgucuc

SEQ ID NO: 3833690 - RNA, 17 nt, Human
cuugucucagauuuuau

SEQ ID NO: 3833691 - RNA, 18 nt, Human
cuugucucagauuuuauu

SEQ ID NO: 3833692 - RNA, 21 nt, Human
cuugucucagauuuuauuaug

SEQ ID NO: 3833693 - RNA, 20 nt, Human
cuugucucccagcucagggc

SEQ ID NO: 3833694 - RNA, 12 nt, Human
cuugucugagau

SEQ ID NO: 3833695 - RNA, 23 nt, Human
cuugucugauuggcucacccaag

SEQ ID NO: 3833696 - RNA, 13 nt, Human
cuugucuguagau

SEQ ID NO: 3833697 - RNA, 18 nt, Human
cuugucuuaaauaaaaga

SEQ ID NO: 3833698 - RNA, 20 nt, Human
cuugucuuauucccuuccug

SEQ ID NO: 3833699 - RNA, 17 nt, Human
cuugucuuccuauuuca

SEQ ID NO: 3833700 - RNA, 23 nt, Human
cuugucuucugguacuuucuguu

SEQ ID NO: 3833701 - RNA, 14 nt, Human
cuugucuuguucac

SEQ ID NO: 3833702 - RNA, 13 nt, Human
cuugucuuuauuu

SEQ ID NO: 3833703 - RNA, 19 nt, Human
cuugucuuuggacccugag

SEQ ID NO: 3833704 - RNA, 22 nt, Human
cuugucuuuggacccugaggcc

SEQ ID NO: 3833705 - RNA, 15 nt, Human
cuugugaaaauaauu

SEQ ID NO: 3833706 - RNA, 13 nt, Human
cuugugaaaaugu

SEQ ID NO: 3833707 - RNA, 18 nt, Human
cuugugaaaauguguucu

SEQ ID NO: 3833708 - RNA, 16 nt, Human
cuugugaaacacagcu

SEQ ID NO: 3833709 - RNA, 18 nt, Human
cuugugaaacacagcugu

SEQ ID NO: 3833710 - RNA, 19 nt, Human
cuugugaaacacagcuguu

SEQ ID NO: 3833711 - RNA, 20 nt, Human
cuugugaaacacagcuguuc

SEQ ID NO: 3833712 - RNA, 10 nt, Human
cuugugaagg

SEQ ID NO: 3833713 - RNA, 16 nt, Human
cuugugaaggccauga

SEQ ID NO: 3833714 - RNA, 16 nt, Human
cuugugaaugcuucuc

SEQ ID NO: 3833715 - RNA, 20 nt, Human
cuugugacagauuauacaga

SEQ ID NO: 3833716 - RNA, 21 nt, Human
cuugugacauauuaugucuuc

SEQ ID NO: 3833717 - RNA, 15 nt, Human
cuugugacuagugcu

SEQ ID NO: 3833718 - RNA, 18 nt, Human
cuugugacuagugcugaa

SEQ ID NO: 3833719 - RNA, 12 nt, Human
cuugugacuuuu

SEQ ID NO: 3833720 - RNA, 22 nt, Human
cuugugacuuuugcuuuaauuc

SEQ ID NO: 3833721 - RNA, 16 nt, Human
cuugugaggaaaguca

SEQ ID NO: 3833722 - RNA, 19 nt, Human
cuugugaggaaagucauug

SEQ ID NO: 3833723 - RNA, 17 nt, Human
cuugugauuauuuauua

SEQ ID NO: 3833724 - RNA, 22 nt, Human
cuugugauuucuuuaaaagaau

SEQ ID NO: 3833725 - RNA, 15 nt, Human
cuugugcacaggcag

SEQ ID NO: 3833726 - RNA, 16 nt, Human
cuugugcacaggcaga

SEQ ID NO: 3833727 - RNA, 20 nt, Human
cuugugcacccucuauccca

SEQ ID NO: 3833728 - RNA, 15 nt, Human
cuugugcaguguuga

SEQ ID NO: 3833729 - RNA, 11 nt, Human
cuugugccaua

SEQ ID NO: 3833730 - RNA, 17 nt, Human
cuugugcccucccuguc

SEQ ID NO: 3833731 - RNA, 20 nt, Human
cuugugcccucccuguccuu

SEQ ID NO: 3833732 - RNA, 14 nt, Human
cuuguggacacagc

SEQ ID NO: 3833733 - RNA, 16 nt, Human
cuuguggacuaaaaga

SEQ ID NO: 3833734 - RNA, 17 nt, Human
cuuguggacuaaaagau

SEQ ID NO: 3833735 - RNA, 22 nt, Human
cuuguggauguuuuaauuccau

SEQ ID NO: 3833736 - RNA, 13 nt, Human
cuuguggcagagg

SEQ ID NO: 3833737 - RNA, 18 nt, Human
cuuguggcccucucccuu

SEQ ID NO: 3833738 - RNA, 14 nt, Human
cuuguggccuggga

SEQ ID NO: 3833739 - RNA, 22 nt, Human
cuuguggcuccacacacacaaa

SEQ ID NO: 3833740 - RNA, 15 nt, Human
cuuguggcuuugcaa

SEQ ID NO: 3833741 - RNA, 21 nt, Human
cuugugggccugggcuccugg

SEQ ID NO: 3833742 - RNA, 23 nt, Human
cuugugggccugggcuccuggac

SEQ ID NO: 3833743 - RNA, 17 nt, Human
cuuguggggacccaggc

SEQ ID NO: 3833744 - RNA, 20 nt, Human
cuuguggggacccaggcucc

SEQ ID NO: 3833745 - RNA, 12 nt, Human
cuuguggggccu

SEQ ID NO: 3833746 - RNA, 15 nt, Human
cuuguggggccuggg

SEQ ID NO: 3833747 - RNA, 22 nt, Human
cuugugguuauaacuuaaugaa

SEQ ID NO: 3833748 - RNA, 12 nt, Human
cuuguguaaaua

SEQ ID NO: 3833749 - RNA, 16 nt, Human
cuuguguaaauacaau

SEQ ID NO: 3833750 - RNA, 20 nt, Human
cuuuugguguguuggacaga

SEQ ID NO: 3833751 - RNA, 21 nt, Human
cuuuugguuaugaauacuuug

SEQ ID NO: 3833752 - RNA, 12 nt, Human
cuuuuguaaaga

SEQ ID NO: 3833753 - RNA, 15 nt, Human
cuuuuguaaagaaau

SEQ ID NO: 3833754 - RNA, 12 nt, Human
cuuuuguaauaa

SEQ ID NO: 3833755 - RNA, 12 nt, Human
cuuuuguaauuu

SEQ ID NO: 3833756 - RNA, 13 nt, Human
cuuuuguacaucu

SEQ ID NO: 3833757 - RNA, 14 nt, Human
cuuuuguacaucug

SEQ ID NO: 3833758 - RNA, 14 nt, Human
cuuuuguauaguug

SEQ ID NO: 3833759 - RNA, 16 nt, Human
cuuuuguauguaaaug

SEQ ID NO: 3833760 - RNA, 13 nt, Human
cuuuuguauuaag

SEQ ID NO: 3833761 - RNA, 11 nt, Human
cuuuugucuac

SEQ ID NO: 3833762 - RNA, 18 nt, Human
cuuuugucuaugggacuc

SEQ ID NO: 3833763 - RNA, 14 nt, Human
cuuuugugaacuuu

SEQ ID NO: 3833764 - RNA, 21 nt, Human
cuuuugugauggagugcuguu

SEQ ID NO: 3833765 - RNA, 18 nt, Human
cuuuugugccuggcuucu

SEQ ID NO: 3833766 - RNA, 19 nt, Human
cuuuugugggggacuguaa

SEQ ID NO: 3833767 - RNA, 14 nt, Human
cuuuuguguacagu

SEQ ID NO: 3833768 - RNA, 19 nt, Human
cuuuugugugaauugacua

SEQ ID NO: 3833769 - RNA, 15 nt, Human
cuuuuguuaaauaau

SEQ ID NO: 3833770 - RNA, 18 nt, Human
cuuuuguuacucuuggga

SEQ ID NO: 3833771 - RNA, 18 nt, Human
cuuuuguuacuguucuug

SEQ ID NO: 3833772 - RNA, 22 nt, Human
cuuuuguuacuguucuugcugc

SEQ ID NO: 3833773 - RNA, 18 nt, Human
cuuuuguucauuucaucc

SEQ ID NO: 3833774 - RNA, 14 nt, Human
cuuuuguucccauc

SEQ ID NO: 3833775 - RNA, 13 nt, Human
cuuuuguucgcau

SEQ ID NO: 3833776 - RNA, 13 nt, Human
cuuuuguuuauuu

SEQ ID NO: 3833777 - RNA, 15 nt, Human
cuuuuguuuccuuuu

SEQ ID NO: 3833778 - RNA, 20 nt, Human
cuuuuguuuccuuuuuuccc

SEQ ID NO: 3833779 - RNA, 18 nt, Human
cuuuuguuugguaaaugu

SEQ ID NO: 3833780 - RNA, 14 nt, Human
cuuuuguuuugcuu

SEQ ID NO: 3833781 - RNA, 21 nt, Human
cuuuuguuuuuugaaguguug

SEQ ID NO: 3833782 - RNA, 13 nt, Human
cuuuuuaaaaaua

SEQ ID NO: 3833783 - RNA, 19 nt, Human
cuuuuuaaaaauagacacu

SEQ ID NO: 3833784 - RNA, 14 nt, Human
cuuuuuaaagcuua

SEQ ID NO: 3833785 - RNA, 19 nt, Human
cuuuuuaaaguguuucugu

SEQ ID NO: 3833786 - RNA, 18 nt, Human
cuuuuuaaaguucaaacu

SEQ ID NO: 3833787 - RNA, 20 nt, Human
cuuuuuaaauguaaagauau

SEQ ID NO: 3833788 - RNA, 21 nt, Human
cuuuuuaaauguaaagauauu

SEQ ID NO: 3833789 - RNA, 19 nt, Human
cuuuuuaaguaauguggaa

SEQ ID NO: 3833790 - RNA, 14 nt, Human
cuuuuuaauaaaaa

SEQ ID NO: 3833791 - RNA, 20 nt, Human
cuuuuuaauaaaaaggcacc

SEQ ID NO: 3833792 - RNA, 15 nt, Human
cuuuuuaauaugcuu

SEQ ID NO: 3833793 - RNA, 22 nt, Human
cuuuuuaauauugauaugcuua

SEQ ID NO: 3833794 - RNA, 16 nt, Human
cuuuuuaaucaugaau

SEQ ID NO: 3833795 - RNA, 14 nt, Human
cuuuuuaauuguug

SEQ ID NO: 3833796 - RNA, 16 nt, Human
cuuuuuaauuguuguu

SEQ ID NO: 3833797 - RNA, 11 nt, Human
cuuuuuacaua

SEQ ID NO: 3833798 - RNA, 22 nt, Human
cuuuuuacccauuuguucauau

SEQ ID NO: 3833799 - RNA, 15 nt, Human
cuuuuuaccuuucau

SEQ ID NO: 3833800 - RNA, 16 nt, Human
cuuuuuaccuuucaua

SEQ ID NO: 3833801 - RNA, 21 nt, Human
cuuuuuagaugugcugcuuug

SEQ ID NO: 3833802 - RNA, 19 nt, Human
cuuuuuagggccaggcagg

SEQ ID NO: 3833803 - RNA, 16 nt, Human
cuuuuuauaacuuuuu

SEQ ID NO: 3833804 - RNA, 14 nt, Human
cuuuuuauauauau

SEQ ID NO: 3833805 - RNA, 20 nt, Human
cuuuuuauauauauauauaa

SEQ ID NO: 3833806 - RNA, 22 nt, Human
cuuuuuauauucucagcagagu

SEQ ID NO: 3833807 - RNA, 23 nt, Human
cuuuuuaugcuauuucuguauau

SEQ ID NO: 3833808 - RNA, 17 nt, Human
cuuuuuauggccuguga

SEQ ID NO: 3833809 - RNA, 13 nt, Human
cuuuuuauuaaaa

SEQ ID NO: 3833810 - RNA, 13 nt, Human
cuuuuuauugaau

SEQ ID NO: 3833811 - RNA, 15 nt, Human
cuuuuuauugaaucu

SEQ ID NO: 3833812 - RNA, 14 nt, Human
cuuuuuauugccuu

SEQ ID NO: 3833813 - RNA, 15 nt, Human
cuuuuuauugccuuc

SEQ ID NO: 3833814 - RNA, 16 nt, Human
cuuuuuauugccuucu

SEQ ID NO: 3833815 - RNA, 20 nt, Human
cuuuuuauuuauauguacug

SEQ ID NO: 3833816 - RNA, 13 nt, Human
cuuuuucauuauu

SEQ ID NO: 3833817 - RNA, 13 nt, Human
cuuuuucauuuau

SEQ ID NO: 3833818 - RNA, 23 nt, Human
cuuuuucauuuaucuauaauuua

SEQ ID NO: 3833819 - RNA, 17 nt, Human
cuuuuucauuuuccaau

SEQ ID NO: 3833820 - RNA, 17 nt, Human
cuuuuucccaauaaauu

SEQ ID NO: 3833821 - RNA, 12 nt, Human
cuuuuuccuccu

SEQ ID NO: 3833822 - RNA, 13 nt, Human
cuuuuucuaauga

SEQ ID NO: 3833823 - RNA, 21 nt, Human
cuuuuucuccagcugggcucu

SEQ ID NO: 3833824 - RNA, 17 nt, Human
cuuuuucugacuccagu

SEQ ID NO: 3833825 - RNA, 19 nt, Human
cuuuuucugauuagcuuug

SEQ ID NO: 3833826 - RNA, 22 nt, Human
cuuuuucugauuagcuuugugu

SEQ ID NO: 3833827 - RNA, 22 nt, Human
cuuuuucugcacuauaugcaaa

SEQ ID NO: 3833828 - RNA, 22 nt, Human
cuuuuucuggacugaagccugc

SEQ ID NO: 3833829 - RNA, 14 nt, Human
cuuuuucuguugua

SEQ ID NO: 3833830 - RNA, 18 nt, Human
cuuuuucuguuguaacuu

SEQ ID NO: 3833831 - RNA, 15 nt, Human
cuuuuugaaaucagc

SEQ ID NO: 3833832 - RNA, 13 nt, Human
cuuuuugaaauga

SEQ ID NO: 3833833 - RNA, 17 nt, Human
cuuuuugaaaugaaauu

SEQ ID NO: 3833834 - RNA, 23 nt, Human
cuuuuugaaaugaaauuuaaaca

SEQ ID NO: 3833835 - RNA, 19 nt, Human
cuuuuugaauguuauuugu

SEQ ID NO: 3833836 - RNA, 14 nt, Human
cuuuuugacacuga

SEQ ID NO: 3833837 - RNA, 15 nt, Human
cuuuuugacacugaa

SEQ ID NO: 3833838 - RNA, 15 nt, Human
cuuuuugaggcaaaa

SEQ ID NO: 3833839 - RNA, 20 nt, Human
cuuuuugaggcaaaagaagg

SEQ ID NO: 3833840 - RNA, 18 nt, Human
cuuuuugagguggcacuu

SEQ ID NO: 3833841 - RNA, 13 nt, Human
cuuuuugcuuucg

SEQ ID NO: 3833842 - RNA, 11 nt, Human
cuuuuuggaau

SEQ ID NO: 3833843 - RNA, 21 nt, Human
cuuuuuggaggugcuuaagca

SEQ ID NO: 3833844 - RNA, 19 nt, Human
cuuuuugggagagacuugu

SEQ ID NO: 3833845 - RNA, 20 nt, Human
cuuuuugggagagacuuguu

SEQ ID NO: 3833846 - RNA, 15 nt, Human
cuuuuugguggaugu

SEQ ID NO: 3833847 - RNA, 16 nt, Human
cuuuuugguggaugua

SEQ ID NO: 3833848 - RNA, 17 nt, Human
cuuuuugguuugcagau

SEQ ID NO: 3833849 - RNA, 14 nt, Human
cuuuuuguaccugg

SEQ ID NO: 3833850 - RNA, 21 nt, Human
cuuuuuguucugguccuuuuu

SEQ ID NO: 3833851 - RNA, 14 nt, Human
cuuuuuuaaauaaa

SEQ ID NO: 3833852 - RNA, 15 nt, Human
cuuuuuuaaauaaac

SEQ ID NO: 3833853 - RNA, 22 nt, Human
cuuuuuuaaauauuuucuauuu

SEQ ID NO: 3833854 - RNA, 16 nt, Human
cuuuuuuaaauuaaua

SEQ ID NO: 3833855 - RNA, 20 nt, Human
cuuuuuuaaauuuucuucag

SEQ ID NO: 3833856 - RNA, 19 nt, Human
cuuuuuuacucauugaaau

SEQ ID NO: 3833857 - RNA, 23 nt, Human
cuuuuuuacucauugaaauguca

SEQ ID NO: 3833858 - RNA, 14 nt, Human
cuuuuuuauacaca

SEQ ID NO: 3833859 - RNA, 15 nt, Human
cuuuuuuauacacau

SEQ ID NO: 3833860 - RNA, 15 nt, Human
cuuuuuuauaucuug

SEQ ID NO: 3833861 - RNA, 19 nt, Human
cuuuuuuaucaugugaaau

SEQ ID NO: 3833862 - RNA, 18 nt, Human
cuuuuuuaugugccgugu

SEQ ID NO: 3833863 - RNA, 18 nt, Human
cuuuuuuauuuuuuauac

SEQ ID NO: 3833864 - RNA, 12 nt, Human
cuuuuuucaaaa

SEQ ID NO: 3833865 - RNA, 13 nt, Human
cuuuuuucaaaau

SEQ ID NO: 3833866 - RNA, 22 nt, Human
cuuuuuucaaaauccaaaaaga

SEQ ID NO: 3833867 - RNA, 15 nt, Human
cuuuuuucacaaauu

SEQ ID NO: 3833868 - RNA, 21 nt, Human
cuuuuuucacggaaguuuuca

SEQ ID NO: 3833869 - RNA, 12 nt, Human
cuuuuuucccca

SEQ ID NO: 3833870 - RNA, 13 nt, Human
cuuuuuuccuaau

SEQ ID NO: 3833871 - RNA, 14 nt, Human
cuuuuuucuaaagu

SEQ ID NO: 3833872 - RNA, 15 nt, Human
cuuuuuucugccucc

SEQ ID NO: 3833873 - RNA, 16 nt, Human
cuuuuuucugccuccu

SEQ ID NO: 3833874 - RNA, 16 nt, Human
cuuuuuucuuuaagau

SEQ ID NO: 3833875 - RNA, 21 nt, Human
cuuuuuugauaaaguuucuca

SEQ ID NO: 3833876 - RNA, 15 nt, Human
cuuuuuuggcugcug

SEQ ID NO: 3833877 - RNA, 20 nt, Human
cuuuuuuggcugcugaaggc

SEQ ID NO: 3833878 - RNA, 15 nt, Human
cuuuuuuguuuguuu

SEQ ID NO: 3833879 - RNA, 21 nt, Human
cuuuuuuguuuuuucaaaaua

SEQ ID NO: 3833880 - RNA, 22 nt, Human
cuuuuuuguuuuuucaaaauag

SEQ ID NO: 3833881 - RNA, 16 nt, Human
cuuuuuuuccuuuuua

SEQ ID NO: 3833882 - RNA, 22 nt, Human
cuuuuuuucucugcauuuaaaa

SEQ ID NO: 3833883 - RNA, 16 nt, Human
cuuuuuuucuguacca

SEQ ID NO: 3833884 - RNA, 13 nt, Human
cuuuuuuugaaac

SEQ ID NO: 3833885 - RNA, 21 nt, Human
cuuuuuuuguauaguuaacac

SEQ ID NO: 3833886 - RNA, 16 nt, Human
cuuuuuuuguaugugu

SEQ ID NO: 3833887 - RNA, 17 nt, Human
cuuuuuuuguaugugug

SEQ ID NO: 3833888 - RNA, 13 nt, Human
cuuuuuuugugug

SEQ ID NO: 3833889 - RNA, 15 nt, Human
cuuuuuuuucuuuaa

SEQ ID NO: 3833890 - RNA, 13 nt, Human
cuuuuuuuuuaag

SEQ ID NO: 3833891 - RNA, 14 nt, Human
cuuuuuuuuuaagu

SEQ ID NO: 3833892 - RNA, 22 nt, Human
cuuuuuuuuuuaagugaaauuu

SEQ ID NO: 3833893 - RNA, 16 nt, Human
cuuuuuuuuuucuuua

SEQ ID NO: 3833894 - RNA, 18 nt, Human
cuuuuuuuuuucuuuaua

SEQ ID NO: 3833895 - RNA, 21 nt, Human
cuuugaugauuaauucaccuu

SEQ ID NO: 3833896 - RNA, 18 nt, Human
gaaaagacuccaaagaaa

SEQ ID NO: 3833897 - RNA, 21 nt, Human
gaaaagacuccaaagaaaugu

SEQ ID NO: 3833898 - RNA, 14 nt, Human
gaaaagagaagaag

SEQ ID NO: 3833899 - RNA, 15 nt, Human
gaaaagagaagaaga

SEQ ID NO: 3833900 - RNA, 13 nt, Human
gaaaagagacagg

SEQ ID NO: 3833901 - RNA, 13 nt, Human
gaaaagagagaaa

SEQ ID NO: 3833902 - RNA, 18 nt, Human
gaaaagagagcagagaau

SEQ ID NO: 3833903 - RNA, 21 nt, Human
gaaaagagauggccugagaag

SEQ ID NO: 3833904 - RNA, 12 nt, Human
gaaaagaggagu

SEQ ID NO: 3833905 - RNA, 20 nt, Human
gaaaagaggaguuucgaggu

SEQ ID NO: 3833906 - RNA, 13 nt, Human
gaaaagauaaaga

SEQ ID NO: 3833907 - RNA, 19 nt, Human
gaaaagauaaagaccagaa

SEQ ID NO: 3833908 - RNA, 16 nt, Human
gaaaagauacgacuuu

SEQ ID NO: 3833909 - RNA, 22 nt, Human
cuuuguaagaguguagaagcau

SEQ ID NO: 3833910 - RNA, 22 nt, Human
cuuuguaagucaguguugagau

SEQ ID NO: 3833911 - RNA, 21 nt, Human
cuuuguaaucguuaugugugu

SEQ ID NO: 3833912 - RNA, 13 nt, Human
cuuuguaaugaaa

SEQ ID NO: 3833913 - RNA, 15 nt, Human
cuuuguaaugaaaac

SEQ ID NO: 3833914 - RNA, 21 nt, Human
cuuuguaaugucaccaccuuc

SEQ ID NO: 3833915 - RNA, 20 nt, Human
cuuuguaauuauuuuuaaua

SEQ ID NO: 3833916 - RNA, 15 nt, Human
cuuuguacagcccag

SEQ ID NO: 3833917 - RNA, 13 nt, Human
cuuuguagauccu

SEQ ID NO: 3833918 - RNA, 15 nt, Human
cuuuguagcacucag

SEQ ID NO: 3833919 - RNA, 20 nt, Human
cuuuguagcauuuggugcuu

SEQ ID NO: 3833920 - RNA, 14 nt, Human
cuuuguauacuuua

SEQ ID NO: 3833921 - RNA, 12 nt, Human
cuuuguauaguu

SEQ ID NO: 3833922 - RNA, 18 nt, Human
cuuuguauaguuauguaa

SEQ ID NO: 3833923 - RNA, 19 nt, Human
cuuuguaucauucaucuuc

SEQ ID NO: 3833924 - RNA, 15 nt, Human
cuuuguaucuuccau

SEQ ID NO: 3833925 - RNA, 23 nt, Human
cuuuguaucuuccauauuuggaa

SEQ ID NO: 3833926 - RNA, 20 nt, Human
cuuuguaugucauuuccuuc

SEQ ID NO: 3833927 - RNA, 13 nt, Human
cuuuguauucaaa

SEQ ID NO: 3833928 - RNA, 17 nt, Human
cuuuguauucucuccug

SEQ ID NO: 3833929 - RNA, 12 nt, Human
cuuuguauuguc

SEQ ID NO: 3833930 - RNA, 16 nt, Human
cuuuguauuguccuau

SEQ ID NO: 3833931 - RNA, 22 nt, Human
cuuuguauuguccuauuagugu

SEQ ID NO: 3833932 - RNA, 20 nt, Human
cuuuguauuuuuacuuuuaa

SEQ ID NO: 3833933 - RNA, 14 nt, Human
cuuugucagggagu

SEQ ID NO: 3833934 - RNA, 14 nt, Human
cuuugucccacagc

SEQ ID NO: 3833935 - RNA, 15 nt, Human
cuuugucccacagcu

SEQ ID NO: 3833936 - RNA, 18 nt, Human
cuuuguccccaccgcaga

SEQ ID NO: 3833937 - RNA, 17 nt, Human
cuuuguccuccugcugc

SEQ ID NO: 3833938 - RNA, 23 nt, Human
cuuugucuacuucaaaaguuugu

SEQ ID NO: 3833939 - RNA, 15 nt, Human
cuuugucugaaaaau

SEQ ID NO: 3833940 - RNA, 13 nt, Human
cuuugucuuucaa

SEQ ID NO: 3833941 - RNA, 16 nt, Human
cuuugucuuucaaacu

SEQ ID NO: 3833942 - RNA, 23 nt, Human
cuuugugacuguauauaaaggaa

SEQ ID NO: 3833943 - RNA, 19 nt, Human
cuuugugagagugagcugu

SEQ ID NO: 3833944 - RNA, 19 nt, Human
cuuugugaggaagccgcug

SEQ ID NO: 3833945 - RNA, 18 nt, Human
cuuugugauuauuucacu

SEQ ID NO: 3833946 - RNA, 22 nt, Human
cuuugugauucaaucuguaaac

SEQ ID NO: 3833947 - RNA, 18 nt, Human
cuuugugauuuuuguaau

SEQ ID NO: 3833948 - RNA, 13 nt, Human
cuuugugcauucu

SEQ ID NO: 3833949 - RNA, 20 nt, Human
cuuugugcuacaugacgaca

SEQ ID NO: 3833950 - RNA, 15 nt, Human
cuuugugcugggguu

SEQ ID NO: 3833951 - RNA, 22 nt, Human
cuuugugcugggguuaucugaa

SEQ ID NO: 3833952 - RNA, 19 nt, Human
cuuuguggaccaauuauug

SEQ ID NO: 3833953 - RNA, 12 nt, Human
cuuuguggccaa

SEQ ID NO: 3833954 - RNA, 14 nt, Human
cuuuguggccaagg

SEQ ID NO: 3833955 - RNA, 16 nt, Human
cuuuguggccaaggag

SEQ ID NO: 3833956 - RNA, 21 nt, Human
cuuuguggccaaggagcugcu

SEQ ID NO: 3833957 - RNA, 21 nt, Human
cuuuguggggcuuggcgugga

SEQ ID NO: 3833958 - RNA, 17 nt, Human
cuuugugugcucuccau

SEQ ID NO: 3833959 - RNA, 19 nt, Human
cuuuguguucuuuguguca

SEQ ID NO: 3833960 - RNA, 11 nt, Human
cuuuguguugg

SEQ ID NO: 3833961 - RNA, 13 nt, Human
cuuuguguuguaa

SEQ ID NO: 3833962 - RNA, 19 nt, Human
cuuuguguuugguuuacau

SEQ ID NO: 3833963 - RNA, 15 nt, Human
cuuuguuaauuugga

SEQ ID NO: 3833964 - RNA, 15 nt, Human
cuuuguuacaggcac

SEQ ID NO: 3833965 - RNA, 16 nt, Human
cuuuguuaccuuaaaa

SEQ ID NO: 3833966 - RNA, 14 nt, Human
cuuuguuauaccau

SEQ ID NO: 3833967 - RNA, 12 nt, Human
cuuuguucccca

SEQ ID NO: 3833968 - RNA, 18 nt, Human
cuuuguuccccacuggag

SEQ ID NO: 3833969 - RNA, 19 nt, Human
cuuuguuccccacuggagc

SEQ ID NO: 3833970 - RNA, 17 nt, Human
cuuuguucucagcuccc

SEQ ID NO: 3833971 - RNA, 20 nt, Human
cuuuguucucagcucccccu

SEQ ID NO: 3833972 - RNA, 14 nt, Human
cuuuguucugcugu

SEQ ID NO: 3833973 - RNA, 13 nt, Human
cuuuguugaaaga

SEQ ID NO: 3833974 - RNA, 22 nt, Human
cuuuguugaacuguuagaaugu

SEQ ID NO: 3833975 - RNA, 19 nt, Human
cuuuguugcaagaugugaa

SEQ ID NO: 3833976 - RNA, 21 nt, Human
cuuuguugcaagaugugaauu

SEQ ID NO: 3833977 - RNA, 16 nt, Human
cuuuguugcccaggcu

SEQ ID NO: 3833978 - RNA, 17 nt, Human
cuuuguugugugccucu

SEQ ID NO: 3833979 - RNA, 22 nt, Human
cuuuguugugugccucuagcug

SEQ ID NO: 3833980 - RNA, 17 nt, Human
cuuuguuuguguuguug

SEQ ID NO: 3833981 - RNA, 18 nt, Human
cuuuguuuguugucagcu

SEQ ID NO: 3833982 - RNA, 17 nt, Human
cuuuguuuuacugucuu

SEQ ID NO: 3833983 - RNA, 16 nt, Human
cuuuguuuuauuuuca

SEQ ID NO: 3833984 - RNA, 19 nt, Human
cuuuguuuugauguuugug

SEQ ID NO: 3833985 - RNA, 24 nt, Human
cuuuguuuugauguuuguggccuc

SEQ ID NO: 3833986 - RNA, 16 nt, Human
cuuuguuuuuuuuucc

SEQ ID NO: 3833987 - RNA, 18 nt, Human
cuuuuaaaaacauaacau

SEQ ID NO: 3833988 - RNA, 18 nt, Human
cuuuuaaaacacuuccau

SEQ ID NO: 3833989 - RNA, 14 nt, Human
cuuuuaaaacuacu

SEQ ID NO: 3833990 - RNA, 14 nt, Human
cuuuuaaaagacaa

SEQ ID NO: 3833991 - RNA, 16 nt, Human
cuuuuaaaagacaaga

SEQ ID NO: 3833992 - RNA, 15 nt, Human
cuuuuaaaagauuuu

SEQ ID NO: 3833993 - RNA, 15 nt, Human
cuuuuaaacugugua

SEQ ID NO: 3833994 - RNA, 18 nt, Human
cuuuuaaagaauuucuuu

SEQ ID NO: 3833995 - RNA, 13 nt, Human
cuuuuaaaguguu

SEQ ID NO: 3833996 - RNA, 17 nt, Human
cuuuuaaaguguuacuu

SEQ ID NO: 3833997 - RNA, 14 nt, Human
cuuuuaaauccugu

SEQ ID NO: 3833998 - RNA, 14 nt, Human
cuuuuaacauuuug

SEQ ID NO: 3833999 - RNA, 16 nt, Human
cuuuuaaccaaacaau

SEQ ID NO: 3834000 - RNA, 17 nt, Human
cuuuuaaccaucugaua

SEQ ID NO: 3834001 - RNA, 15 nt, Human
cuuuuaacugugcaa

SEQ ID NO: 3834002 - RNA, 22 nt, Human
cuuuuaacuguuguagaagaca

SEQ ID NO: 3834003 - RNA, 14 nt, Human
cuuuuaacuucuuu

SEQ ID NO: 3834004 - RNA, 14 nt, Human
cuuuuaagaaucaa

SEQ ID NO: 3834005 - RNA, 23 nt, Human
cuuuuaaggauaaaucauaaagu

SEQ ID NO: 3834006 - RNA, 14 nt, Human
cuuuuaaucagaca

SEQ ID NO: 3834007 - RNA, 13 nt, Human
cuuuuaaugaaaa

SEQ ID NO: 3834008 - RNA, 18 nt, Human
cuuuuaaugaacaaaugg

SEQ ID NO: 3834009 - RNA, 15 nt, Human
cuuuuaaugcuucau

SEQ ID NO: 3834010 - RNA, 22 nt, Human
cuuuuaauuaaauaaaagcugg

SEQ ID NO: 3834011 - RNA, 15 nt, Human
cuuuuaauuaaaugc

SEQ ID NO: 3834012 - RNA, 19 nt, Human
cuuuuaauuaaugaaauau

SEQ ID NO: 3834013 - RNA, 12 nt, Human
cuuuuaauucau

SEQ ID NO: 3834014 - RNA, 16 nt, Human
cuuuuacccuggcccc

SEQ ID NO: 3834015 - RNA, 21 nt, Human
cuuuuacccuggccccucucc

SEQ ID NO: 3834016 - RNA, 22 nt, Human
cuuuuacccuggccccucuccc

SEQ ID NO: 3834017 - RNA, 23 nt, Human
cuuuuacccuggccccucucccu

SEQ ID NO: 3834018 - RNA, 18 nt, Human
cuuuuaccugcugcuucu

SEQ ID NO: 3834019 - RNA, 20 nt, Human
cuuuuaccugcugcuucucc

SEQ ID NO: 3834020 - RNA, 15 nt, Human
cuuuuacugguugca

SEQ ID NO: 3834021 - RNA, 16 nt, Human
cuuuuacugguugcau

SEQ ID NO: 3834022 - RNA, 11 nt, Human
cuuuuacugug

SEQ ID NO: 3834023 - RNA, 21 nt, Human
cuuuuagaaauacugcaagaa

SEQ ID NO: 3834024 - RNA, 23 nt, Human
cuuuuagaaauacugcaagaaaa

SEQ ID NO: 3834025 - RNA, 16 nt, Human
cuuuuagcaguaaaau

SEQ ID NO: 3834026 - RNA, 21 nt, Human
cuuuuaggaaaaucacuuugu

SEQ ID NO: 3834027 - RNA, 16 nt, Human
cuuuuagggagaguca

SEQ ID NO: 3834028 - RNA, 21 nt, Human
cuuuuaguaaagucaaggaga

SEQ ID NO: 3834029 - RNA, 18 nt, Human
cuuuuaguacccaccuga

SEQ ID NO: 3834030 - RNA, 20 nt, Human
cuuuuaguacccaccugagc

SEQ ID NO: 3834031 - RNA, 18 nt, Human
cuuuuaguuguaucucuu

SEQ ID NO: 3834032 - RNA, 19 nt, Human
cuuuuaguuguaucucuuu

SEQ ID NO: 3834033 - RNA, 22 nt, Human
cuuuuaguuuuaguugcagaaa

SEQ ID NO: 3834034 - RNA, 14 nt, Human
cuuuuaguuuuucu

SEQ ID NO: 3834035 - RNA, 22 nt, Human
cuuuuauaaaaaaaaugaaaug

SEQ ID NO: 3834036 - RNA, 16 nt, Human
cuuuuauaaaccucua

SEQ ID NO: 3834037 - RNA, 18 nt, Human
cuuuuauaaacuuuaccu

SEQ ID NO: 3834038 - RNA, 19 nt, Human
cuuuuauaaacuuuaccuu

SEQ ID NO: 3834039 - RNA, 16 nt, Human
cuuuuauaaauuaaau

SEQ ID NO: 3834040 - RNA, 14 nt, Human
cuuuuauaauaaaa

SEQ ID NO: 3834041 - RNA, 22 nt, Human
gaaaauuacaguccaaaauacu

SEQ ID NO: 3834042 - RNA, 18 nt, Human
gaaaauuagacugugauu

SEQ ID NO: 3834043 - RNA, 13 nt, Human
gaaaauuauuuaa

SEQ ID NO: 3834044 - RNA, 15 nt, Human
gaaaauuauuugcau

SEQ ID NO: 3834045 - RNA, 20 nt, Human
gaaaauucaaaaaguguuua

SEQ ID NO: 3834046 - RNA, 22 nt, Human
gaaaauucaaaaaguguuuauu

SEQ ID NO: 3834047 - RNA, 13 nt, Human
gaaaauucacuau

SEQ ID NO: 3834048 - RNA, 16 nt, Human
gaaaauucauuucaca

SEQ ID NO: 3834049 - RNA, 14 nt, Human
gaaaauucauuuuu

SEQ ID NO: 3834050 - RNA, 18 nt, Human
gaaaauuccagaaaggau

SEQ ID NO: 3834051 - RNA, 18 nt, Human
gaaaauugaauuuaacaa

SEQ ID NO: 3834052 - RNA, 18 nt, Human
gaaaauugccuuucugug

SEQ ID NO: 3834053 - RNA, 15 nt, Human
gaaaauugcugugcc

SEQ ID NO: 3834054 - RNA, 12 nt, Human
gaaaauuguauu

SEQ ID NO: 3834055 - RNA, 21 nt, Human
gaaaauuguuuagugauauua

SEQ ID NO: 3834056 - RNA, 12 nt, Human
gaaaauuugaau

SEQ ID NO: 3834057 - RNA, 14 nt, Human
gaaaauuuuaaaaa

SEQ ID NO: 3834058 - RNA, 20 nt, Human
gaaaauuuuaaaaauacaua

SEQ ID NO: 3834059 - RNA, 21 nt, Human
gaaaauuuuaaaaauacauau

SEQ ID NO: 3834060 - RNA, 19 nt, Human
gaaaauuuuaccagcagaa

SEQ ID NO: 3834061 - RNA, 20 nt, Human
gaaaauuuuaccagcagaag

SEQ ID NO: 3834062 - RNA, 19 nt, Human
gaaacaaaaacacuaaaaa

SEQ ID NO: 3834063 - RNA, 14 nt, Human
gaaacaaagaaggu

SEQ ID NO: 3834064 - RNA, 20 nt, Human
gaaacaaagacaauuuauaa

SEQ ID NO: 3834065 - RNA, 23 nt, Human
gaaacaaagaguucaagaaauaa

SEQ ID NO: 3834066 - RNA, 19 nt, Human
gaaacaaagcuuagcagga

SEQ ID NO: 3834067 - RNA, 22 nt, Human
gaaacaaagcuuagcaggagag

SEQ ID NO: 3834068 - RNA, 19 nt, Human
gaaacaaauaaucacauug

SEQ ID NO: 3834069 - RNA, 16 nt, Human
gaaacaacacuguagu

SEQ ID NO: 3834070 - RNA, 15 nt, Human
gaaacaacagcuuua

SEQ ID NO: 3834071 - RNA, 21 nt, Human
gaaacaacagcuuuaaaagaa

SEQ ID NO: 3834072 - RNA, 14 nt, Human
gaaacaacuuggaa

SEQ ID NO: 3834073 - RNA, 21 nt, Human
gaaacaagucagucauucaga

SEQ ID NO: 3834074 - RNA, 22 nt, Human
gaaacacagcuuacaaucgcaa

SEQ ID NO: 3834075 - RNA, 19 nt, Human
gaaacacauaauuaacacu

SEQ ID NO: 3834076 - RNA, 18 nt, Human
gaaacacccucacacugg

SEQ ID NO: 3834077 - RNA, 22 nt, Human
gaaacacccucacacugggacu

SEQ ID NO: 3834078 - RNA, 16 nt, Human
gaaacacgaaacuugu

SEQ ID NO: 3834079 - RNA, 17 nt, Human
gaaacacgaaacuuguu

SEQ ID NO: 3834080 - RNA, 22 nt, Human
gaaacacgaaacuuguuauugu

SEQ ID NO: 3834081 - RNA, 17 nt, Human
gaaacacuaaauguuaa

SEQ ID NO: 3834082 - RNA, 12 nt, Human
gaaacacugccu

SEQ ID NO: 3834083 - RNA, 16 nt, Human
gaaacacugccuuuuu

SEQ ID NO: 3834084 - RNA, 17 nt, Human
gaaacacugccuuuuua

SEQ ID NO: 3834085 - RNA, 18 nt, Human
gaaacacuggggcuggca

SEQ ID NO: 3834086 - RNA, 22 nt, Human
gaaacacugguuuuaaauauuu

SEQ ID NO: 3834087 - RNA, 13 nt, Human
gaaacacuuuuuu

SEQ ID NO: 3834088 - RNA, 19 nt, Human
gaaacagagacaggcccaa

SEQ ID NO: 3834089 - RNA, 23 nt, Human
gaaacagaggaccagcacacucc

SEQ ID NO: 3834090 - RNA, 20 nt, Human
gaaacagaggagagucccag

SEQ ID NO: 3834091 - RNA, 12 nt, Human
gaaacagaggcu

SEQ ID NO: 3834092 - RNA, 17 nt, Human
gaaacagcaucuccaag

SEQ ID NO: 3834093 - RNA, 18 nt, Human
gaaacagcaucuccaagc

SEQ ID NO: 3834094 - RNA, 17 nt, Human
gaaacagccugugucuu

SEQ ID NO: 3834095 - RNA, 20 nt, Human
gaaacagccugugucuuuaa

SEQ ID NO: 3834096 - RNA, 12 nt, Human
gaaacagcugcc

SEQ ID NO: 3834097 - RNA, 19 nt, Human
gaaacaguugcauguagua

SEQ ID NO: 3834098 - RNA, 23 nt, Human
gaaacaguugcauguaguaacac

SEQ ID NO: 3834099 - RNA, 23 nt, Human
gaaacaguugguaacuuuuguga

SEQ ID NO: 3834100 - RNA, 18 nt, Human
gaaacauaaauaaaauga

SEQ ID NO: 3834101 - RNA, 19 nt, Human
gaaacaucaguuacucuga

SEQ ID NO: 3834102 - RNA, 20 nt, Human
gaaacaucaguuacucugaa

SEQ ID NO: 3834103 - RNA, 16 nt, Human
gaaacaucucaauaaa

SEQ ID NO: 3834104 - RNA, 15 nt, Human
gaaacaugguuuuga

SEQ ID NO: 3834105 - RNA, 21 nt, Human
gaaacauguugccaaaauggu

SEQ ID NO: 3834106 - RNA, 13 nt, Human
gaaacauugcuuu

SEQ ID NO: 3834107 - RNA, 21 nt, Human
gaaacauugcuuuuaaaacua

SEQ ID NO: 3834108 - RNA, 14 nt, Human
gaaacauuggaagc

SEQ ID NO: 3834109 - RNA, 16 nt, Human
gaaaccaaagaagaaa

SEQ ID NO: 3834110 - RNA, 18 nt, Human
gaaaccaaucaagauaaa

SEQ ID NO: 3834111 - RNA, 23 nt, Human
gaaaccaaucaagauaaaggaca

SEQ ID NO: 3834112 - RNA, 17 nt, Human
gaaaccacagcugcugg

SEQ ID NO: 3834113 - RNA, 17 nt, Human
gaaaccagcuuccuuca

SEQ ID NO: 3834114 - RNA, 21 nt, Human
gaaauucccuucaucuggaac

SEQ ID NO: 3834115 - RNA, 17 nt, Human
gaaauucuccuggaggu

SEQ ID NO: 3834116 - RNA, 17 nt, Human
gaaauucugaauuugca

SEQ ID NO: 3834117 - RNA, 15 nt, Human
gaaauucuguuuuua

SEQ ID NO: 3834118 - RNA, 20 nt, Human
gaaauucuuuauacauucua

SEQ ID NO: 3834119 - RNA, 17 nt, Human
gaaauugaaaaguuauu

SEQ ID NO: 3834120 - RNA, 17 nt, Human
gaaauugaaccuuugug

SEQ ID NO: 3834121 - RNA, 13 nt, Human
gaaauugaauacu

SEQ ID NO: 3834122 - RNA, 19 nt, Human
gaaauugaauacuuugaau

SEQ ID NO: 3834123 - RNA, 13 nt, Human
gaaauugacagau

SEQ ID NO: 3834124 - RNA, 16 nt, Human
gaaauugcauacuuug

SEQ ID NO: 3834125 - RNA, 17 nt, Human
gaaauuggaacagaaug

SEQ ID NO: 3834126 - RNA, 16 nt, Human
gaaauuggaagagcac

SEQ ID NO: 3834127 - RNA, 21 nt, Human
gaaauugguaccuugcacaca

SEQ ID NO: 3834128 - RNA, 22 nt, Human
gaaauuguuuaaguguuguaaa

SEQ ID NO: 3834129 - RNA, 13 nt, Human
gaaauuuaaaaga

SEQ ID NO: 3834130 - RNA, 19 nt, Human
gaaauuuaaaagacacugu

SEQ ID NO: 3834131 - RNA, 23 nt, Human
gaaauuuaaacuauaagcaagaa

SEQ ID NO: 3834132 - RNA, 13 nt, Human
gaaauuuaaagca

SEQ ID NO: 3834133 - RNA, 22 nt, Human
gaaauuuaaagcagguucuugu

SEQ ID NO: 3834134 - RNA, 23 nt, Human
gaaauuuaaagcagguucuuguu

SEQ ID NO: 3834135 - RNA, 22 nt, Human
gaaauuuaauauagcuauuuuu

SEQ ID NO: 3834136 - RNA, 16 nt, Human
gaaauuuaauucaugu

SEQ ID NO: 3834137 - RNA, 21 nt, Human
gaaauuuaauucauguuucuu

SEQ ID NO: 3834138 - RNA, 23 nt, Human
gaaauuuaauucauguuucuuaa

SEQ ID NO: 3834139 - RNA, 21 nt, Human
gaaauuuauugaggaaaaaua

SEQ ID NO: 3834140 - RNA, 22 nt, Human
gaaauuuauuuccuaguucugu

SEQ ID NO: 3834141 - RNA, 23 nt, Human
gaaauuuauuuccuaguucugua

SEQ ID NO: 3834142 - RNA, 11 nt, Human
gaaauuucacg

SEQ ID NO: 3834143 - RNA, 16 nt, Human
gaaauuucacgucaua

SEQ ID NO: 3834144 - RNA, 21 nt, Human
gaaauuuccugggagcuuuug

SEQ ID NO: 3834145 - RNA, 16 nt, Human
gaaauuugaauuuugu

SEQ ID NO: 3834146 - RNA, 21 nt, Human
gaaauuugauuucuauucaag

SEQ ID NO: 3834147 - RNA, 14 nt, Human
gaaauuuguuauaa

SEQ ID NO: 3834148 - RNA, 17 nt, Human
gaaauuuguuauaauga

SEQ ID NO: 3834149 - RNA, 14 nt, Human
gaaauuuuaccaag

SEQ ID NO: 3834150 - RNA, 16 nt, Human
gaaauuuuaccaaguu

SEQ ID NO: 3834151 - RNA, 13 nt, Human
gaaauuuugcaaa

SEQ ID NO: 3834152 - RNA, 15 nt, Human
gaaauuuugcaaaua

SEQ ID NO: 3834153 - RNA, 24 nt, Human
gaaauuuugcaaauauaaacaucu

SEQ ID NO: 3834154 - RNA, 12 nt, Human
gaaauuuuguaa

SEQ ID NO: 3834155 - RNA, 13 nt, Human
gaaauuuuguaag

SEQ ID NO: 3834156 - RNA, 19 nt, Human
gaaauuuuguaagaaggca

SEQ ID NO: 3834157 - RNA, 13 nt, Human
gaaauuuuuauca

SEQ ID NO: 3834158 - RNA, 18 nt, Human
gaaauuuuuauuaaauua

SEQ ID NO: 3834159 - RNA, 17 nt, Human
gaaauuuuucuucuuga

SEQ ID NO: 3834160 - RNA, 16 nt, Human
gaaauuuuuguaaauc

SEQ ID NO: 3834161 - RNA, 18 nt, Human
gaacaaaaaaaccacaaa

SEQ ID NO: 3834162 - RNA, 20 nt, Human
gaacaaaaaaaccacaaagg

SEQ ID NO: 3834163 - RNA, 16 nt, Human
gaacaaaaaaaucugc

SEQ ID NO: 3834164 - RNA, 14 nt, Human
gaacaaaaggguca

SEQ ID NO: 3834165 - RNA, 15 nt, Human
gaacaaaaucuguug

SEQ ID NO: 3834166 - RNA, 16 nt, Human
gaacaaagaccaauuu

SEQ ID NO: 3834167 - RNA, 16 nt, Human
gaacaaagcuguuaaa

SEQ ID NO: 3834168 - RNA, 21 nt, Human
gaacaaagcuguuaaacuguu

SEQ ID NO: 3834169 - RNA, 22 nt, Human
gaacaaagcuguuaaacuguua

SEQ ID NO: 3834170 - RNA, 23 nt, Human
gaacaaauuuacagagacagaaa

SEQ ID NO: 3834171 - RNA, 21 nt, Human
gaacaaccucggcuccuggac

SEQ ID NO: 3834172 - RNA, 15 nt, Human
gaacaacuacuguga

SEQ ID NO: 3834173 - RNA, 19 nt, Human
gaacaacuaggcuucagca

SEQ ID NO: 3834174 - RNA, 21 nt, Human
gaacaacuaggcuucagcaua

SEQ ID NO: 3834175 - RNA, 15 nt, Human
gaacaagagaagcau

SEQ ID NO: 3834176 - RNA, 16 nt, Human
gaacaagcaaacccag

SEQ ID NO: 3834177 - RNA, 13 nt, Human
gaacaagccuaaa

SEQ ID NO: 3834178 - RNA, 17 nt, Human
gaacaaggcaaggcugu

SEQ ID NO: 3834179 - RNA, 18 nt, Human
gaacaaggcaaggcuguc

SEQ ID NO: 3834180 - RNA, 22 nt, Human
gaacaagucccuguaauuguug

SEQ ID NO: 3834181 - RNA, 20 nt, Human
gaacaaguugagcuaugacu

SEQ ID NO: 3834182 - RNA, 21 nt, Human
gaacaaguugagcuaugacuu

SEQ ID NO: 3834183 - RNA, 22 nt, Human
gaacaaguugagcuaugacuua

SEQ ID NO: 3834184 - RNA, 16 nt, Human
gaaacuugucacuugc

SEQ ID NO: 3834185 - RNA, 20 nt, Human
gaaacuugucacuugcaugu

SEQ ID NO: 3834186 - RNA, 20 nt, Human
gaaacuuguguaaauacaau

SEQ ID NO: 3834187 - RNA, 13 nt, Human
gaaacuuguuauu

SEQ ID NO: 3834188 - RNA, 15 nt, Human
gaaacuuguuauugu

SEQ ID NO: 3834189 - RNA, 16 nt, Human
gaaacuuguucuucca

SEQ ID NO: 3834190 - RNA, 12 nt, Human
gaaacuuuauac

SEQ ID NO: 3834191 - RNA, 15 nt, Human
gaaacuuuauacauu

SEQ ID NO: 3834192 - RNA, 18 nt, Human
gaaacuuuauacauuagu

SEQ ID NO: 3834193 - RNA, 21 nt, Human
gaaacuuugggaaaacauguu

SEQ ID NO: 3834194 - RNA, 13 nt, Human
gaaacuuugugcu

SEQ ID NO: 3834195 - RNA, 19 nt, Human
gaaacuuuuaacugagaaa

SEQ ID NO: 3834196 - RNA, 12 nt, Human
gaaacuuuuauc

SEQ ID NO: 3834197 - RNA, 14 nt, Human
gaaacuuuucuaga

SEQ ID NO: 3834198 - RNA, 15 nt, Human
gaaacuuuucuagaa

SEQ ID NO: 3834199 - RNA, 15 nt, Human
gaaacuuuuguaaag

SEQ ID NO: 3834200 - RNA, 23 nt, Human
gaaacuuuuguaaagaaauuuac

SEQ ID NO: 3834201 - RNA, 21 nt, Human
gaaagaaaauaccaaggaaca

SEQ ID NO: 3834202 - RNA, 22 nt, Human
gaaagaaacccgacagagggaa

SEQ ID NO: 3834203 - RNA, 15 nt, Human
gaaagaaaucauguu

SEQ ID NO: 3834204 - RNA, 19 nt, Human
gaaagaacauggacuugua

SEQ ID NO: 3834205 - RNA, 16 nt, Human
gaaagaacuaucuuca

SEQ ID NO: 3834206 - RNA, 15 nt, Human
gaaagaauagaaaga

SEQ ID NO: 3834207 - RNA, 13 nt, Human
gaaagaauagaac

SEQ ID NO: 3834208 - RNA, 13 nt, Human
gaaagaauauauu

SEQ ID NO: 3834209 - RNA, 16 nt, Human
gaaagaauauauuuau

SEQ ID NO: 3834210 - RNA, 17 nt, Human
gaaagaauuucauaugc

SEQ ID NO: 3834211 - RNA, 14 nt, Human
gaaagacaacacaa

SEQ ID NO: 3834212 - RNA, 14 nt, Human
gaaagacacugccu

SEQ ID NO: 3834213 - RNA, 16 nt, Human
gaaagacagcuucuca

SEQ ID NO: 3834214 - RNA, 21 nt, Human
gaaagacauccauaaagaagc

SEQ ID NO: 3834215 - RNA, 23 nt, Human
gaaagacauccauaaagaagcaa

SEQ ID NO: 3834216 - RNA, 17 nt, Human
gaaagacgcacuuuggc

SEQ ID NO: 3834217 - RNA, 14 nt, Human
gaaagacuauucaa

SEQ ID NO: 3834218 - RNA, 22 nt, Human
gaaagacuucucuacccaucuu

SEQ ID NO: 3834219 - RNA, 18 nt, Human
gaaagagaaacaguuggu

SEQ ID NO: 3834220 - RNA, 17 nt, Human
gaaagagaacuuccaga

SEQ ID NO: 3834221 - RNA, 12 nt, Human
gaaagagagaaa

SEQ ID NO: 3834222 - RNA, 21 nt, Human
gaaagagagaaaauaaaaagu

SEQ ID NO: 3834223 - RNA, 22 nt, Human
gaaagagagaaaauaaaaaguu

SEQ ID NO: 3834224 - RNA, 11 nt, Human
gaaagagagag

SEQ ID NO: 3834225 - RNA, 21 nt, Human
gaaagagagagaaacaaacuu

SEQ ID NO: 3834226 - RNA, 22 nt, Human
gaaagagagagagagagagaaa

SEQ ID NO: 3834227 - RNA, 13 nt, Human
gaaagagagcagg

SEQ ID NO: 3834228 - RNA, 16 nt, Human
gaaagagcacuuaaga

SEQ ID NO: 3834229 - RNA, 23 nt, Human
gaaagagcacuuaagagaauauu

SEQ ID NO: 3834230 - RNA, 21 nt, Human
gaaagaggaaugaaguacuca

SEQ ID NO: 3834231 - RNA, 16 nt, Human
gaaagaggcaccagga

SEQ ID NO: 3834232 - RNA, 17 nt, Human
gaaagaggcaccaggaa

SEQ ID NO: 3834233 - RNA, 20 nt, Human
gaaagaggcaccaggaagcc

SEQ ID NO: 3834234 - RNA, 18 nt, Human
gaaagaggcacccuucca

SEQ ID NO: 3834235 - RNA, 19 nt, Human
gaaagaggcacccuuccau

SEQ ID NO: 3834236 - RNA, 21 nt, Human
gaaagaggcugaggccuggac

SEQ ID NO: 3834237 - RNA, 22 nt, Human
gaaagaggcugaggccuggacu

SEQ ID NO: 3834238 - RNA, 21 nt, Human
gaaagaguacucuuguuuccu

SEQ ID NO: 3834239 - RNA, 17 nt, Human
gaaagagucuucaacau

SEQ ID NO: 3834240 - RNA, 16 nt, Human
gaaagauaaaauagug

SEQ ID NO: 3834241 - RNA, 17 nt, Human
gaaagauaauucacugu

SEQ ID NO: 3834242 - RNA, 21 nt, Human
gaaagaugcucagguacagag

SEQ ID NO: 3834243 - RNA, 23 nt, Human
gaaagaugcucagguacagagaa

SEQ ID NO: 3834244 - RNA, 22 nt, Human
gaaagauggcugugccucugcc

SEQ ID NO: 3834245 - RNA, 19 nt, Human
gaaagaugguuaaacauuu

SEQ ID NO: 3834246 - RNA, 23 nt, Human
gaaagcaaaaaugcuaauauuaa

SEQ ID NO: 3834247 - RNA, 16 nt, Human
gaaagcaaagcacaga

SEQ ID NO: 3834248 - RNA, 17 nt, Human
gaaagcaacaaagaaau

SEQ ID NO: 3834249 - RNA, 12 nt, Human
gaaagcaacuuu

SEQ ID NO: 3834250 - RNA, 20 nt, Human
gaaagcaagaaucagagaag

SEQ ID NO: 3834251 - RNA, 16 nt, Human
gaaagcacaggagaca

SEQ ID NO: 3834252 - RNA, 18 nt, Human
gaaagcagaggcuggccu

SEQ ID NO: 3834253 - RNA, 22 nt, Human
gaaagcagauaccucacccugc

SEQ ID NO: 3834254 - RNA, 19 nt, Human
gaaagcagcucaaaggcac

SEQ ID NO: 3834255 - RNA, 20 nt, Human
gaaagcagcucaaaggcaca

SEQ ID NO: 3834256 - RNA, 13 nt, Human
gaaagcaggggcu

SEQ ID NO: 3834257 - RNA, 15 nt, Human
gaaagcaguugaaau

SEQ ID NO: 3834258 - RNA, 12 nt, Human
gaaagcauuuga

SEQ ID NO: 3834259 - RNA, 21 nt, Human
gaaagcauuugaaugcauuuu

SEQ ID NO: 3834260 - RNA, 14 nt, Human
gaaagccagucuua

SEQ ID NO: 3834261 - RNA, 17 nt, Human
gaaagccagugacucca

SEQ ID NO: 3834262 - RNA, 20 nt, Human
gaaagcccagaaaaggacag

SEQ ID NO: 3834263 - RNA, 16 nt, Human
gaaagccccacccagg

SEQ ID NO: 3834264 - RNA, 15 nt, Human
gaaagccccagaaau

SEQ ID NO: 3834265 - RNA, 14 nt, Human
gaaagccccagcac

SEQ ID NO: 3834266 - RNA, 21 nt, Human
gaaagcccugagcuuucugcu

SEQ ID NO: 3834267 - RNA, 10 nt, Human
gaaagccuga

SEQ ID NO: 3834268 - RNA, 22 nt, Human
gaaagccuguaagccugcaagc

SEQ ID NO: 3834269 - RNA, 21 nt, Human
gaaagccuguuccccucacug

SEQ ID NO: 3834270 - RNA, 14 nt, Human
gaaagccuucuuuu

SEQ ID NO: 3834271 - RNA, 23 nt, Human
gaaagccuuucauuuugcuuuaa

SEQ ID NO: 3834272 - RNA, 13 nt, Human
gaacauugcaaua

SEQ ID NO: 3834273 - RNA, 17 nt, Human
gaacauugcaauagaaa

SEQ ID NO: 3834274 - RNA, 12 nt, Human
gaacauuggaau

SEQ ID NO: 3834275 - RNA, 21 nt, Human
gaacauuggaauguucucaga

SEQ ID NO: 3834276 - RNA, 10 nt, Human
gaacauugua

SEQ ID NO: 3834277 - RNA, 21 nt, Human
gaacauuuauuuuaugagaaa

SEQ ID NO: 3834278 - RNA, 16 nt, Human
gaacauuucauggugu

SEQ ID NO: 3834279 - RNA, 20 nt, Human
gaacauuucuguaaauacca

SEQ ID NO: 3834280 - RNA, 17 nt, Human
gaaccaaagagacugga

SEQ ID NO: 3834281 - RNA, 23 nt, Human
gaaccaaagcgaauuuuaaaaga

SEQ ID NO: 3834282 - RNA, 24 nt, Human
gaaccaacaaccucaacugccuac

SEQ ID NO: 3834283 - RNA, 15 nt, Human
gaaccaacacuaaca

SEQ ID NO: 3834284 - RNA, 17 nt, Human
gaaccaagcaggagacg

SEQ ID NO: 3834285 - RNA, 20 nt, Human
gaaccaagcaggagacgaca

SEQ ID NO: 3834286 - RNA, 15 nt, Human
gaaccacaagacugc

SEQ ID NO: 3834287 - RNA, 20 nt, Human
gaaccacaucuugcucugcu

SEQ ID NO: 3834288 - RNA, 16 nt, Human
gaaccaccacacccag

SEQ ID NO: 3834289 - RNA, 20 nt, Human
gaaccaccacacccagccca

SEQ ID NO: 3834290 - RNA, 13 nt, Human
gaaccacuuguag

SEQ ID NO: 3834291 - RNA, 14 nt, Human
gaaccacuuguaga

SEQ ID NO: 3834292 - RNA, 15 nt, Human
gaaccacuuguagau

SEQ ID NO: 3834293 - RNA, 13 nt, Human
gaaccacuuucuu

SEQ ID NO: 3834294 - RNA, 20 nt, Human
gaaccacuuucuuauuuuuu

SEQ ID NO: 3834295 - RNA, 16 nt, Human
gaaccagacucuugcc

SEQ ID NO: 3834296 - RNA, 17 nt, Human
gaaccagacucuugccu

SEQ ID NO: 3834297 - RNA, 23 nt, Human
gaaccagagccauggacucuaca

SEQ ID NO: 3834298 - RNA, 21 nt, Human
gaaccaggaaauggaacccca

SEQ ID NO: 3834299 - RNA, 20 nt, Human
gaaccaggcaacuugggaac

SEQ ID NO: 3834300 - RNA, 19 nt, Human
gaaccaguccccccacccu

SEQ ID NO: 3834301 - RNA, 19 nt, Human
gaaccaguuucagguguuu

SEQ ID NO: 3834302 - RNA, 14 nt, Human
gaaccauaaaaugu

SEQ ID NO: 3834303 - RNA, 20 nt, Human
gaaccauaguuacuguaaaa

SEQ ID NO: 3834304 - RNA, 22 nt, Human
gaaccauggucggaaaacaugc

SEQ ID NO: 3834305 - RNA, 16 nt, Human
gaaccauguuuguggc

SEQ ID NO: 3834306 - RNA, 16 nt, Human
gaaccauuaaccagau

SEQ ID NO: 3834307 - RNA, 16 nt, Human
gaacccaaguccaagc

SEQ ID NO: 3834308 - RNA, 15 nt, Human
gaacccaccugcuga

SEQ ID NO: 3834309 - RNA, 16 nt, Human
gaacccagacucagac

SEQ ID NO: 3834310 - RNA, 17 nt, Human
gaacccagcccaccccc

SEQ ID NO: 3834311 - RNA, 11 nt, Human
gaacccaggac

SEQ ID NO: 3834312 - RNA, 13 nt, Human
gaacccaggacaa

SEQ ID NO: 3834313 - RNA, 19 nt, Human
gaacccaggacgcuucuga

SEQ ID NO: 3834314 - RNA, 16 nt, Human
gaacccaggaggugga

SEQ ID NO: 3834315 - RNA, 12 nt, Human
gaacccagggcu

SEQ ID NO: 3834316 - RNA, 13 nt, Human
gaacccagggcuc

SEQ ID NO: 3834317 - RNA, 17 nt, Human
gaaccccccucccaccc

SEQ ID NO: 3834318 - RNA, 19 nt, Human
gaaccccgucgaggggcuc

SEQ ID NO: 3834319 - RNA, 21 nt, Human
gaaccccuacaugaaacagaa

SEQ ID NO: 3834320 - RNA, 14 nt, Human
gaaccccuuuccca

SEQ ID NO: 3834321 - RNA, 16 nt, Human
gaacccgggaggcaga

SEQ ID NO: 3834322 - RNA, 20 nt, Human
gaacccuggggccugacugc

SEQ ID NO: 3834323 - RNA, 13 nt, Human
gaacccugugcug

SEQ ID NO: 3834324 - RNA, 23 nt, Human
gaacccugugcugguguccugac

SEQ ID NO: 3834325 - RNA, 23 nt, Human
gaacccuuaaacaguugcacagc

SEQ ID NO: 3834326 - RNA, 12 nt, Human
gaacccuuggcu

SEQ ID NO: 3834327 - RNA, 18 nt, Human
gaacccuuggcuugccca

SEQ ID NO: 3834328 - RNA, 20 nt, Human
gaacccuuggcuugcccacg

SEQ ID NO: 3834329 - RNA, 24 nt, Human
gaacuuuccacauucagagcuuac

SEQ ID NO: 3834330 - RNA, 15 nt, Human
gaacuuuccauuuug

SEQ ID NO: 3834331 - RNA, 12 nt, Human
gaacuuuccugg

SEQ ID NO: 3834332 - RNA, 20 nt, Human
gaacuuuccuggaugucuga

SEQ ID NO: 3834333 - RNA, 11 nt, Human
gaacuuuggga

SEQ ID NO: 3834334 - RNA, 14 nt, Human
gaacuuugggaagc

SEQ ID NO: 3834335 - RNA, 21 nt, Human
gaacuuuguauaguuauguaa

SEQ ID NO: 3834336 - RNA, 16 nt, Human
gaacuuuuguacugaa

SEQ ID NO: 3834337 - RNA, 20 nt, Human
gaacuuuuguacugaauuuu

SEQ ID NO: 3834338 - RNA, 21 nt, Human
gaacuuuuguacugaauuuuu

SEQ ID NO: 3834339 - RNA, 16 nt, Human
gaacuuuuuuaaauaa

SEQ ID NO: 3834340 - RNA, 23 nt, Human
gaacuuuuuuaaauaaacuuuuu

SEQ ID NO: 3834341 - RNA, 10 nt, Human
gaagaaaaaa

SEQ ID NO: 3834342 - RNA, 19 nt, Human
gaagaaaaaaaaaaauuca

SEQ ID NO: 3834343 - RNA, 18 nt, Human
gaagaaaaaaaauaacac

SEQ ID NO: 3834344 - RNA, 23 nt, Human
gaagaaaaaaaucuucuccagau

SEQ ID NO: 3834345 - RNA, 18 nt, Human
gaagaaaaaauacauuuu

SEQ ID NO: 3834346 - RNA, 17 nt, Human
gaagaaaacacuguuau

SEQ ID NO: 3834347 - RNA, 22 nt, Human
gaagaaaacaucuauucucucc

SEQ ID NO: 3834348 - RNA, 22 nt, Human
gaagaaaacuccuuuagcaggu

SEQ ID NO: 3834349 - RNA, 17 nt, Human
gaagaaaauacuuaaau

SEQ ID NO: 3834350 - RNA, 21 nt, Human
gaagaaaauagaauugacauu

SEQ ID NO: 3834351 - RNA, 17 nt, Human
gaagaaaauugcugugc

SEQ ID NO: 3834352 - RNA, 18 nt, Human
gaagaaacacuuucucuu

SEQ ID NO: 3834353 - RNA, 15 nt, Human
gaagaaacagaucuc

SEQ ID NO: 3834354 - RNA, 14 nt, Human
gaagaaagaagaca

SEQ ID NO: 3834355 - RNA, 17 nt, Human
gaagaaagagaaggagc

SEQ ID NO: 3834356 - RNA, 23 nt, Human
gaagaaagaggugaccccagggc

SEQ ID NO: 3834357 - RNA, 17 nt, Human
gaagaaaggguguuuuu

SEQ ID NO: 3834358 - RNA, 15 nt, Human
gaagaaaguggaaaa

SEQ ID NO: 3834359 - RNA, 14 nt, Human
gaagaaauuccugu

SEQ ID NO: 3834360 - RNA, 15 nt, Human
gaagaaauuccugua

SEQ ID NO: 3834361 - RNA, 13 nt, Human
gaagaacauagaa

SEQ ID NO: 3834362 - RNA, 16 nt, Human
gaagaacauccaagga

SEQ ID NO: 3834363 - RNA, 20 nt, Human
gaagaacauccaaggagaaa

SEQ ID NO: 3834364 - RNA, 22 nt, Human
gaagaacguuuuuuccucagug

SEQ ID NO: 3834365 - RNA, 22 nt, Human
gaagaacuagcauauagccauu

SEQ ID NO: 3834366 - RNA, 19 nt, Human
gaagaacucaccaggguuu

SEQ ID NO: 3834367 - RNA, 17 nt, Human
gaagaacucaugugauu

SEQ ID NO: 3834368 - RNA, 12 nt, Human
gaagaacugaaa

SEQ ID NO: 3834369 - RNA, 16 nt, Human
gaagaacugaaaggcu

SEQ ID NO: 3834370 - RNA, 9 nt, Human
gaagaagaa

SEQ ID NO: 3834371 - RNA, 13 nt, Human
gaagaagaaaaca

SEQ ID NO: 3834372 - RNA, 14 nt, Human
gaagaagaaaagag

SEQ ID NO: 3834373 - RNA, 15 nt, Human
gaagaagaagaaaag

SEQ ID NO: 3834374 - RNA, 17 nt, Human
gaagaagagaagcugcu

SEQ ID NO: 3834375 - RNA, 15 nt, Human
gaagaagagggagag

SEQ ID NO: 3834376 - RNA, 21 nt, Human
gaagaagcaccaaucaugaau

SEQ ID NO: 3834377 - RNA, 15 nt, Human
gaagaagcagagaga

SEQ ID NO: 3834378 - RNA, 14 nt, Human
gaagaagcucucuc

SEQ ID NO: 3834379 - RNA, 16 nt, Human
gaagaagcuuaggcag

SEQ ID NO: 3834380 - RNA, 12 nt, Human
gaagaaggaaau

SEQ ID NO: 3834381 - RNA, 23 nt, Human
gaagaaggaggaaugcuggacug

SEQ ID NO: 3834382 - RNA, 19 nt, Human
gaagaagggagaagaaagg

SEQ ID NO: 3834383 - RNA, 14 nt, Human
gaagaaggugaaua

SEQ ID NO: 3834384 - RNA, 14 nt, Human
gaagaagucagaga

SEQ ID NO: 3834385 - RNA, 13 nt, Human
gaagaauauuguu

SEQ ID NO: 3834386 - RNA, 12 nt, Human
gaagaaugaaag

SEQ ID NO: 3834387 - RNA, 16 nt, Human
gaagaaugaaagcugu

SEQ ID NO: 3834388 - RNA, 14 nt, Human
gaagaaugaagccc

SEQ ID NO: 3834389 - RNA, 20 nt, Human
gaagaaugcacaagaaugga

SEQ ID NO: 3834390 - RNA, 14 nt, Human
gaagaaugcaugcu

SEQ ID NO: 3834391 - RNA, 19 nt, Human
gaagaauguguuucaaacu

SEQ ID NO: 3834392 - RNA, 13 nt, Human
gaagaauuauuuu

SEQ ID NO: 3834393 - RNA, 12 nt, Human
gaagaauuccag

SEQ ID NO: 3834394 - RNA, 12 nt, Human
gaagaauuuuaa

SEQ ID NO: 3834395 - RNA, 14 nt, Human
gaagaauuuuaaaa

SEQ ID NO: 3834396 - RNA, 15 nt, Human
gaagaauuuucagac

SEQ ID NO: 3834397 - RNA, 15 nt, Human
gaagacaaaaauacu

SEQ ID NO: 3834398 - RNA, 16 nt, Human
gaagacaaaaauacuc

SEQ ID NO: 3834399 - RNA, 19 nt, Human
gaagacaaaacauacauuu

SEQ ID NO: 3834400 - RNA, 22 nt, Human
gaagacaaugacuuacuguaca

SEQ ID NO: 3834401 - RNA, 21 nt, Human
gaagacacagacugcgauuug

SEQ ID NO: 3834402 - RNA, 15 nt, Human
gaagacaccagagca

SEQ ID NO: 3834403 - RNA, 16 nt, Human
gaagacaccagagcag

SEQ ID NO: 3834404 - RNA, 21 nt, Human
gaagacaccagagcagaugca

SEQ ID NO: 3834405 - RNA, 16 nt, Human
gaagacacugaugggc

SEQ ID NO: 3834406 - RNA, 17 nt, Human
gaagacagaaguuugca

SEQ ID NO: 3834407 - RNA, 18 nt, Human
gaagacagagaccuccug

SEQ ID NO: 3834408 - RNA, 15 nt, Human
gaagacagagcuaca

SEQ ID NO: 3834409 - RNA, 12 nt, Human
gaagacagcucu

SEQ ID NO: 3834410 - RNA, 15 nt, Human
gaagacaggacagug

SEQ ID NO: 3834411 - RNA, 22 nt, Human
gaagacauggggaggaaggaca

SEQ ID NO: 3834412 - RNA, 18 nt, Human
gaagacauguuuuagaca

SEQ ID NO: 3834413 - RNA, 20 nt, Human
gaagaccacauccacacacg

SEQ ID NO: 3834414 - RNA, 22 nt, Human
gaagaccauguggagacuucau

SEQ ID NO: 3834415 - RNA, 19 nt, Human
gaagaccccugacucauca

SEQ ID NO: 3834416 - RNA, 23 nt, Human
gaagacccucuugcccauccuga

SEQ ID NO: 3834417 - RNA, 13 nt, Human
gaagaccuaacca

SEQ ID NO: 3834418 - RNA, 18 nt, Human
gaagaccuaaccagggcc

SEQ ID NO: 3834419 - RNA, 20 nt, Human
gaagaccucaccuagaaauu

SEQ ID NO: 3834420 - RNA, 17 nt, Human
gaagaccugagaaugua

SEQ ID NO: 3834421 - RNA, 22 nt, Human
gaagaccugcugagggaccagc

SEQ ID NO: 3834422 - RNA, 14 nt, Human
gaagaccuuuuucu

SEQ ID NO: 3834423 - RNA, 23 nt, Human
gaagacuaucuuacuauuucaca

SEQ ID NO: 3834424 - RNA, 16 nt, Human
gaagacucauucuucu

SEQ ID NO: 3834425 - RNA, 17 nt, Human
gaagacugcauuauauu

SEQ ID NO: 3834426 - RNA, 20 nt, Human
gaagacuuacagcaaauccu

SEQ ID NO: 3834427 - RNA, 13 nt, Human
gaagacuucaaaa

SEQ ID NO: 3834428 - RNA, 19 nt, Human
gaagacuucaucccucugg

SEQ ID NO: 3834429 - RNA, 17 nt, Human
gaagacuuuggaaagag

SEQ ID NO: 3834430 - RNA, 20 nt, Human
gaagacuuuucuuucagcca

SEQ ID NO: 3834431 - RNA, 13 nt, Human
gaagagaaacagg

SEQ ID NO: 3834432 - RNA, 12 nt, Human
gaagagaaacca

SEQ ID NO: 3834433 - RNA, 20 nt, Human
gaagagaagcugcugaccaa

SEQ ID NO: 3834434 - RNA, 15 nt, Human
gaagagaaggagcag

SEQ ID NO: 3834435 - RNA, 23 nt, Human
gaagagacagagacaaguaauuu

SEQ ID NO: 3834436 - RNA, 15 nt, Human
gaagagacagcccag

SEQ ID NO: 3834437 - RNA, 16 nt, Human
gaagagacugggaaga

SEQ ID NO: 3834438 - RNA, 22 nt, Human
gaagagagaaggggcgggaaua

SEQ ID NO: 3834439 - RNA, 20 nt, Human
gaagagagccugcaggaucu

SEQ ID NO: 3834440 - RNA, 19 nt, Human
gaagagaggagaggagaga

SEQ ID NO: 3834441 - RNA, 12 nt, Human
gaagagaggagu

SEQ ID NO: 3834442 - RNA, 17 nt, Human
gaagagaggaguucaau

SEQ ID NO: 3834443 - RNA, 18 nt, Human
gaagagaggaguucaaug

SEQ ID NO: 3834444 - RNA, 22 nt, Human
gaagagaggaguucaaugaucu

SEQ ID NO: 3834445 - RNA, 21 nt, Human
gaagagaguccauauuucaau

SEQ ID NO: 3834446 - RNA, 16 nt, Human
gaagagaucaggaaga

SEQ ID NO: 3834447 - RNA, 15 nt, Human
gaagagauuuuucau

SEQ ID NO: 3834448 - RNA, 13 nt, Human
gaagagcaaaaau

SEQ ID NO: 3834449 - RNA, 17 nt, Human
gaagagcaaaaauaucc

SEQ ID NO: 3834450 - RNA, 21 nt, Human
gaagagcaaaaauaucccuuc

SEQ ID NO: 3834451 - RNA, 13 nt, Human
gaagagcacagcc

SEQ ID NO: 3834452 - RNA, 14 nt, Human
gaagagcacagccc

SEQ ID NO: 3834453 - RNA, 20 nt, Human
gaagagcacagcccucccgc

SEQ ID NO: 3834454 - RNA, 23 nt, Human
gaagagcagcaccuccucagccu

SEQ ID NO: 3834455 - RNA, 18 nt, Human
gaagagcaggcacaugga

SEQ ID NO: 3834456 - RNA, 23 nt, Human
gaagagcaggcacauggaggagc

SEQ ID NO: 3834457 - RNA, 12 nt, Human
gaagagccacag

SEQ ID NO: 3834458 - RNA, 16 nt, Human
gaagagcccagucugu

SEQ ID NO: 3834459 - RNA, 15 nt, Human
gaagagccccacucu

SEQ ID NO: 3834460 - RNA, 18 nt, Human
gaagagccugcaggugcu

SEQ ID NO: 3834461 - RNA, 15 nt, Human
gaagagcuggggaga

SEQ ID NO: 3834462 - RNA, 13 nt, Human
gaagagcuguuca

SEQ ID NO: 3834463 - RNA, 15 nt, Human
gaagagcuguucaca

SEQ ID NO: 3834464 - RNA, 10 nt, Human
gaagaggacu

SEQ ID NO: 3834465 - RNA, 16 nt, Human
gaagaggcgggccagc

SEQ ID NO: 3834466 - RNA, 17 nt, Human
gaagaggcgggccagcc

SEQ ID NO: 3834467 - RNA, 16 nt, Human
gaagaggcuggugcug

SEQ ID NO: 3834468 - RNA, 19 nt, Human
gaagagggauaagguaccu

SEQ ID NO: 3834469 - RNA, 14 nt, Human
gaagaggggacagg

SEQ ID NO: 3834470 - RNA, 13 nt, Human
gaagaggggcagc

SEQ ID NO: 3834471 - RNA, 15 nt, Human
gaagaggggcagccc

SEQ ID NO: 3834472 - RNA, 20 nt, Human
gaagaggggugcagaggcug

SEQ ID NO: 3834473 - RNA, 16 nt, Human
gaagaguccucugaau

SEQ ID NO: 3834474 - RNA, 22 nt, Human
gaagaguggcagcuauaggaaa

SEQ ID NO: 3834475 - RNA, 20 nt, Human
gaagccgugcucgccccagc

SEQ ID NO: 3834476 - RNA, 19 nt, Human
gaagccucagauuccuucc

SEQ ID NO: 3834477 - RNA, 21 nt, Human
gaagccucagauuccuuccca

SEQ ID NO: 3834478 - RNA, 16 nt, Human
gaagccuccccagcuc

SEQ ID NO: 3834479 - RNA, 13 nt, Human
gaagccucuggga

SEQ ID NO: 3834480 - RNA, 15 nt, Human
gaagccugcaggagu

SEQ ID NO: 3834481 - RNA, 23 nt, Human
gaagccugcguugguccagagcg

SEQ ID NO: 3834482 - RNA, 13 nt, Human
gaagccuggaaca

SEQ ID NO: 3834483 - RNA, 18 nt, Human
gaagccugggggccuggc

SEQ ID NO: 3834484 - RNA, 22 nt, Human
gaagccugggggccuggcuggc

SEQ ID NO: 3834485 - RNA, 18 nt, Human
gaagccuguggaugauca

SEQ ID NO: 3834486 - RNA, 20 nt, Human
gaagccuguggaugaucaau

SEQ ID NO: 3834487 - RNA, 20 nt, Human
gaagccuguuuuguuggaag

SEQ ID NO: 3834488 - RNA, 17 nt, Human
gaagccuuaccacgcag

SEQ ID NO: 3834489 - RNA, 20 nt, Human
gaaguggacuggccccuggg

SEQ ID NO: 3834490 - RNA, 16 nt, Human
gaaguguaacagcuga

SEQ ID NO: 3834491 - RNA, 18 nt, Human
gaaguguaacagcugagg

SEQ ID NO: 3834492 - RNA, 23 nt, Human
gaaguguaacagcugaggucucu

SEQ ID NO: 3834493 - RNA, 15 nt, Human
gaaguguaggcagac

SEQ ID NO: 3834494 - RNA, 16 nt, Human
gaaguguaggcagaca

SEQ ID NO: 3834495 - RNA, 18 nt, Human
gaaguguaggcagacaca

SEQ ID NO: 3834496 - RNA, 13 nt, Human
gaagugucauguu

SEQ ID NO: 3834497 - RNA, 20 nt, Human
gaagugugauugggaauaaa

SEQ ID NO: 3834498 - RNA, 23 nt, Human
gaagugugauugggaauaaauau

SEQ ID NO: 3834499 - RNA, 21 nt, Human
gaagugugggucugugugugu

SEQ ID NO: 3834500 - RNA, 24 nt, Human
gaagugugggucugugugugugua

SEQ ID NO: 3834501 - RNA, 15 nt, Human
gaaguguguuuccuu

SEQ ID NO: 3834502 - RNA, 22 nt, Human
gaaguguugcauggauguuuua

SEQ ID NO: 3834503 - RNA, 15 nt, Human
gaaguuacugaaugc

SEQ ID NO: 3834504 - RNA, 16 nt, Human
gaaguuacuuucuuaa

SEQ ID NO: 3834505 - RNA, 14 nt, Human
gaaguuagaauucc

SEQ ID NO: 3834506 - RNA, 20 nt, Human
gaaguuagaauuccuucagg

SEQ ID NO: 3834507 - RNA, 11 nt, Human
gaaguuagccu

SEQ ID NO: 3834508 - RNA, 17 nt, Human
gaaguuagcuuuaacuu

SEQ ID NO: 3834509 - RNA, 16 nt, Human
gaaguuaguuuguaua

SEQ ID NO: 3834510 - RNA, 13 nt, Human
gaaguuauauuuc

SEQ ID NO: 3834511 - RNA, 16 nt, Human
gaaguuauguguaugu

SEQ ID NO: 3834512 - RNA, 16 nt, Human
gaaguucuaguguuuu

SEQ ID NO: 3834513 - RNA, 14 nt, Human
gaaguucuuugauu

SEQ ID NO: 3834514 - RNA, 15 nt, Human
gaaguugaaugggca

SEQ ID NO: 3834515 - RNA, 21 nt, Human
gaaguugacuuauaguacaug

SEQ ID NO: 3834516 - RNA, 12 nt, Human
gaaguugcugcu

SEQ ID NO: 3834517 - RNA, 14 nt, Human
gaaguugcugcuuc

SEQ ID NO: 3834518 - RNA, 13 nt, Human
gaaguuggacagc

SEQ ID NO: 3834519 - RNA, 19 nt, Human
gaaguuguggauuucaguu

SEQ ID NO: 3834520 - RNA, 21 nt, Human
gaaguuuaaaacaguauuuau

SEQ ID NO: 3834521 - RNA, 16 nt, Human
gaaguuuacauuguaa

SEQ ID NO: 3834522 - RNA, 17 nt, Human
gaaguuuagcucugaga

SEQ ID NO: 3834523 - RNA, 21 nt, Human
gaaguuucaaguuuuaaaguu

SEQ ID NO: 3834524 - RNA, 15 nt, Human
gaaguuucauuuaug

SEQ ID NO: 3834525 - RNA, 13 nt, Human
gaaguuugaacau

SEQ ID NO: 3834526 - RNA, 13 nt, Human
gaaguuugaaugu

SEQ ID NO: 3834527 - RNA, 17 nt, Human
gaaguuugaauguuaaa

SEQ ID NO: 3834528 - RNA, 16 nt, Human
gaaguuugauaaauag

SEQ ID NO: 3834529 - RNA, 19 nt, Human
gaaguuugauaaauagugu

SEQ ID NO: 3834530 - RNA, 20 nt, Human
gaaguuugauaaauaguguu

SEQ ID NO: 3834531 - RNA, 14 nt, Human
gaaguuuggcugcu

SEQ ID NO: 3834532 - RNA, 21 nt, Human
gaaguuuguccauuuguaaaa

SEQ ID NO: 3834533 - RNA, 13 nt, Human
gaaguuuucagga

SEQ ID NO: 3834534 - RNA, 13 nt, Human
gaaguuuucugua

SEQ ID NO: 3834535 - RNA, 12 nt, Human
gaaguuuugcau

SEQ ID NO: 3834536 - RNA, 15 nt, Human
gaaguuuuguacaga

SEQ ID NO: 3834537 - RNA, 14 nt, Human
gaauaaaaaagaaa

SEQ ID NO: 3834538 - RNA, 16 nt, Human
gaauaaaaacuuugcu

SEQ ID NO: 3834539 - RNA, 13 nt, Human
gaauaaaaauuaa

SEQ ID NO: 3834540 - RNA, 21 nt, Human
gaauaaaauacuauuuuuacu

SEQ ID NO: 3834541 - RNA, 14 nt, Human
gaauaaaauccuaa

SEQ ID NO: 3834542 - RNA, 23 nt, Human
gaauaaaauccuaagacacaaau

SEQ ID NO: 3834543 - RNA, 16 nt, Human
gaauaaacauuuguua

SEQ ID NO: 3834544 - RNA, 12 nt, Human
gaauaaacuaga

SEQ ID NO: 3834545 - RNA, 19 nt, Human
gaauaaacuagauuacauu

SEQ ID NO: 3834546 - RNA, 12 nt, Human
gaauaaacuuca

SEQ ID NO: 3834547 - RNA, 13 nt, Human
gaauaaacuucag

SEQ ID NO: 3834548 - RNA, 13 nt, Human
gaauaaagaauac

SEQ ID NO: 3834549 - RNA, 14 nt, Human
gaauaaagacaccu

SEQ ID NO: 3834550 - RNA, 15 nt, Human
gaauaaagcaauuuu

SEQ ID NO: 3834551 - RNA, 16 nt, Human
gaauaaagcaauuuuc

SEQ ID NO: 3834552 - RNA, 17 nt, Human
gaauaaagcaauuuucc

SEQ ID NO: 3834553 - RNA, 18 nt, Human
gaauaaagcaauuuuccu

SEQ ID NO: 3834554 - RNA, 19 nt, Human
gaauaaagcaauuuuccuu

SEQ ID NO: 3834555 - RNA, 20 nt, Human
gaauaaagcaauuuuccuug

SEQ ID NO: 3834556 - RNA, 22 nt, Human
gaauaaagcaauuuuccuugaa

SEQ ID NO: 3834557 - RNA, 18 nt, Human
gaauaaaggcagcuguug

SEQ ID NO: 3834558 - RNA, 15 nt, Human
gaauaaaggcaguuu

SEQ ID NO: 3834559 - RNA, 13 nt, Human
gaauaaaguucug

SEQ ID NO: 3834560 - RNA, 19 nt, Human
gaauaaauaugccucuccu

SEQ ID NO: 3834561 - RNA, 17 nt, Human
gaauaaauuguacagcc

SEQ ID NO: 3834562 - RNA, 19 nt, Human
gaauaacauguaauuaagu

SEQ ID NO: 3834563 - RNA, 21 nt, Human
gaauaacucuguggcauuauu

SEQ ID NO: 3834564 - RNA, 16 nt, Human
gaauaagaauggagca

SEQ ID NO: 3834565 - RNA, 12 nt, Human
gaauaagaauuu

SEQ ID NO: 3834566 - RNA, 14 nt, Human
gaauaagaauuugc

SEQ ID NO: 3834567 - RNA, 16 nt, Human
gaauaagaauuugcau

SEQ ID NO: 3834568 - RNA, 22 nt, Human
gaauaagagaccuguuuuaaaa

SEQ ID NO: 3834569 - RNA, 16 nt, Human
gaauaagcacuuuuua

SEQ ID NO: 3834570 - RNA, 20 nt, Human
gaauaagccauucugacuca

SEQ ID NO: 3834571 - RNA, 18 nt, Human
gaauaagcucccagggcc

SEQ ID NO: 3834572 - RNA, 13 nt, Human
gaauaaguuauug

SEQ ID NO: 3834573 - RNA, 18 nt, Human
gaauaaguuauugcaguu

SEQ ID NO: 3834574 - RNA, 19 nt, Human
gaauaaguuauugcaguuu

SEQ ID NO: 3834575 - RNA, 14 nt, Human
gaauaauaaaauca

SEQ ID NO: 3834576 - RNA, 22 nt, Human
gaauaauaauuauccagaguuu

SEQ ID NO: 3834577 - RNA, 19 nt, Human
gaauaaucaaauacauuuu

SEQ ID NO: 3834578 - RNA, 19 nt, Human
gaauaaucacgcuuuccug

SEQ ID NO: 3834579 - RNA, 14 nt, Human
gaauaaugaaugga

SEQ ID NO: 3834580 - RNA, 20 nt, Human
gaauaaugguaccagauaaa

SEQ ID NO: 3834581 - RNA, 21 nt, Human
gaauaaugguaccagauaaaa

SEQ ID NO: 3834582 - RNA, 14 nt, Human
gaauaauguaaaau

SEQ ID NO: 3834583 - RNA, 22 nt, Human
gaauaauguaaaauguugaaua

SEQ ID NO: 3834584 - RNA, 17 nt, Human
gaauaaugugggaagaa

SEQ ID NO: 3834585 - RNA, 21 nt, Human
gaauaaugugggaagaaacaa

SEQ ID NO: 3834586 - RNA, 15 nt, Human
gaauaauucuuugau

SEQ ID NO: 3834587 - RNA, 14 nt, Human
gaauaauuucccaa

SEQ ID NO: 3834588 - RNA, 23 nt, Human
gaauaauuucccaauuaggaagu

SEQ ID NO: 3834589 - RNA, 21 nt, Human
gaauacagaggcaacugcauu

SEQ ID NO: 3834590 - RNA, 16 nt, Human
gaauacagcagcaaga

SEQ ID NO: 3834591 - RNA, 16 nt, Human
gaauaccacucuguaa

SEQ ID NO: 3834592 - RNA, 19 nt, Human
gaauaccauuaaaacugcu

SEQ ID NO: 3834593 - RNA, 20 nt, Human
gaauaccauuaaaacugcuu

SEQ ID NO: 3834594 - RNA, 21 nt, Human
gaauaccuuagugcaguuauu

SEQ ID NO: 3834595 - RNA, 17 nt, Human
gaauacugcuugaauaa

SEQ ID NO: 3834596 - RNA, 15 nt, Human
gaauacuugaaccau

SEQ ID NO: 3834597 - RNA, 14 nt, Human
gaauacuuuauaaa

SEQ ID NO: 3834598 - RNA, 16 nt, Human
gaauacuuugaaugug

SEQ ID NO: 3834599 - RNA, 18 nt, Human
gaauacuuugaauguguu

SEQ ID NO: 3834600 - RNA, 12 nt, Human
gaauagaaagaa

SEQ ID NO: 3834601 - RNA, 11 nt, Human
gaauagaagga

SEQ ID NO: 3834602 - RNA, 18 nt, Human
gaauagaaggaaacuagc

SEQ ID NO: 3834603 - RNA, 14 nt, Human
gaauagacaucaaa

SEQ ID NO: 3834604 - RNA, 13 nt, Human
gaauagcaucugu

SEQ ID NO: 3834605 - RNA, 15 nt, Human
gaauagcaugucacu

SEQ ID NO: 3834606 - RNA, 15 nt, Human
gaauagccacauuug

SEQ ID NO: 3834607 - RNA, 18 nt, Human
gaauagccacauuuggaa

SEQ ID NO: 3834608 - RNA, 22 nt, Human
gaauagcuuuaaugauaugcuu

SEQ ID NO: 3834609 - RNA, 20 nt, Human
gaauaguauccuccagguuu

SEQ ID NO: 3834610 - RNA, 21 nt, Human
gaauaguauccuccagguuuu

SEQ ID NO: 3834611 - RNA, 23 nt, Human
gaauaguugaaccuauuucucuu

SEQ ID NO: 3834612 - RNA, 14 nt, Human
gaauauaaacacua

SEQ ID NO: 3834613 - RNA, 14 nt, Human
gaauauaaaugugu

SEQ ID NO: 3834614 - RNA, 13 nt, Human
gaauauaacauga

SEQ ID NO: 3834615 - RNA, 20 nt, Human
gaauauaauauauuugugua

SEQ ID NO: 3834616 - RNA, 22 nt, Human
gaauauacaugaagaauagaaa

SEQ ID NO: 3834617 - RNA, 20 nt, Human
gaauauaggucucuucuccc

SEQ ID NO: 3834618 - RNA, 22 nt, Human
gaauauaggucucuucucccag

SEQ ID NO: 3834619 - RNA, 21 nt, Human
gaauauauaguguauagaagc

SEQ ID NO: 3834620 - RNA, 12 nt, Human
cucaccauucca

SEQ ID NO: 3834621 - RNA, 20 nt, Human
cucaccauuuccccagggca

SEQ ID NO: 3834622 - RNA, 21 nt, Human
cucaccauuuccccagggcac

SEQ ID NO: 3834623 - RNA, 17 nt, Human
cucacccaccccugcac

SEQ ID NO: 3834624 - RNA, 12 nt, Human
cucacccagucc

SEQ ID NO: 3834625 - RNA, 14 nt, Human
cucacccauccuag

SEQ ID NO: 3834626 - RNA, 21 nt, Human
cucacccaugcaagcagagga

SEQ ID NO: 3834627 - RNA, 23 nt, Human
cucaccccagacuccugacuguc

SEQ ID NO: 3834628 - RNA, 12 nt, Human
cucaccccaucc

SEQ ID NO: 3834629 - RNA, 22 nt, Human
cucaccccaucccacacccugg

SEQ ID NO: 3834630 - RNA, 22 nt, Human
cucacccccaaggggcagucug

SEQ ID NO: 3834631 - RNA, 17 nt, Human
cucacccccagcuuugc

SEQ ID NO: 3834632 - RNA, 19 nt, Human
cucaccccccacacucacu

SEQ ID NO: 3834633 - RNA, 20 nt, Human
cucaccccccacacucacuc

SEQ ID NO: 3834634 - RNA, 15 nt, Human
cucacccccucccac

SEQ ID NO: 3834635 - RNA, 14 nt, Human
cucacccccucggg

SEQ ID NO: 3834636 - RNA, 19 nt, Human
cucacccccuucuccaucc

SEQ ID NO: 3834637 - RNA, 20 nt, Human
cucacccccuucuccaucca

SEQ ID NO: 3834638 - RNA, 16 nt, Human
cucaccccgaggcccu

SEQ ID NO: 3834639 - RNA, 17 nt, Human
cucaccccgaggcccug

SEQ ID NO: 3834640 - RNA, 19 nt, Human
cucaccccgaggcccugca

SEQ ID NO: 3834641 - RNA, 15 nt, Human
cucaccccgucuggg

SEQ ID NO: 3834642 - RNA, 20 nt, Human
cucaccccguuacagcuccc

SEQ ID NO: 3834643 - RNA, 15 nt, Human
cucaccccugcccug

SEQ ID NO: 3834644 - RNA, 16 nt, Human
cucaccccugcccugg

SEQ ID NO: 3834645 - RNA, 14 nt, Human
cucaccccugguuc

SEQ ID NO: 3834646 - RNA, 23 nt, Human
cucaccccugguucucaucuuuc

SEQ ID NO: 3834647 - RNA, 13 nt, Human
cucaccccugucc

SEQ ID NO: 3834648 - RNA, 18 nt, Human
cucaccccuguccucacu

SEQ ID NO: 3834649 - RNA, 21 nt, Human
cucacccgccccacucccucc

SEQ ID NO: 3834650 - RNA, 19 nt, Human
cucacccugagccccuucc

SEQ ID NO: 3834651 - RNA, 20 nt, Human
cucacccugagccccuuccu

SEQ ID NO: 3834652 - RNA, 13 nt, Human
cucacccugccuu

SEQ ID NO: 3834653 - RNA, 15 nt, Human
cucacccugccuuau

SEQ ID NO: 3834654 - RNA, 21 nt, Human
cucacccugccuuaucuugca

SEQ ID NO: 3834655 - RNA, 14 nt, Human
cucacccuggggcu

SEQ ID NO: 3834656 - RNA, 14 nt, Human
cucaccgcccauca

SEQ ID NO: 3834657 - RNA, 18 nt, Human
cucaccgcuucccuccug

SEQ ID NO: 3834658 - RNA, 15 nt, Human
cucaccuagagccag

SEQ ID NO: 3834659 - RNA, 17 nt, Human
cucaccuagagccagac

SEQ ID NO: 3834660 - RNA, 15 nt, Human
cucaccuagccugau

SEQ ID NO: 3834661 - RNA, 15 nt, Human
cucaccucaugccca

SEQ ID NO: 3834662 - RNA, 17 nt, Human
cucaccucaugcccacc

SEQ ID NO: 3834663 - RNA, 16 nt, Human
cucaccucuaaaacag

SEQ ID NO: 3834664 - RNA, 19 nt, Human
cucaccucuacccaaaccc

SEQ ID NO: 3834665 - RNA, 16 nt, Human
cucaccucugccucaa

SEQ ID NO: 3834666 - RNA, 18 nt, Human
cucaccucugccucaaug

SEQ ID NO: 3834667 - RNA, 14 nt, Human
cucaccugccccuc

SEQ ID NO: 3834668 - RNA, 19 nt, Human
cucaccugcuggccccuca

SEQ ID NO: 3834669 - RNA, 20 nt, Human
cucaccuggggcugcuggcc

SEQ ID NO: 3834670 - RNA, 21 nt, Human
cucaccuggggugugggaggc

SEQ ID NO: 3834671 - RNA, 17 nt, Human
cucaccuguugcuuaca

SEQ ID NO: 3834672 - RNA, 15 nt, Human
cucaccuuccucauc

SEQ ID NO: 3834673 - RNA, 20 nt, Human
cucaccuugaacaccacgcu

SEQ ID NO: 3834674 - RNA, 18 nt, Human
cucaccuugcaacacaca

SEQ ID NO: 3834675 - RNA, 19 nt, Human
cucaccuugcaacacacag

SEQ ID NO: 3834676 - RNA, 17 nt, Human
cucaccuuggcaccaga

SEQ ID NO: 3834677 - RNA, 19 nt, Human
cucaccuuggcaccagaca

SEQ ID NO: 3834678 - RNA, 21 nt, Human
cucaccuugugcuggggacag

SEQ ID NO: 3834679 - RNA, 20 nt, Human
cucacgaauauuaugcccag

SEQ ID NO: 3834680 - RNA, 15 nt, Human
cucacgcauucucug

SEQ ID NO: 3834681 - RNA, 22 nt, Human
cucacgccuguaaucccagcag

SEQ ID NO: 3834682 - RNA, 21 nt, Human
cucacggccacacagcugccg

SEQ ID NO: 3834683 - RNA, 17 nt, Human
cucacgggcaugggcac

SEQ ID NO: 3834684 - RNA, 14 nt, Human
cucacguccugaga

SEQ ID NO: 3834685 - RNA, 15 nt, Human
cucacguccugagaa

SEQ ID NO: 3834686 - RNA, 22 nt, Human
cucacgucuguaaucccagcgc

SEQ ID NO: 3834687 - RNA, 16 nt, Human
cucacgugagaguguc

SEQ ID NO: 3834688 - RNA, 20 nt, Human
cucacuaaagcaugaaaugu

SEQ ID NO: 3834689 - RNA, 17 nt, Human
cucacuaccuccucagg

SEQ ID NO: 3834690 - RNA, 18 nt, Human
cucacuaccuccucaggg

SEQ ID NO: 3834691 - RNA, 18 nt, Human
cucacuaggcccccacuu

SEQ ID NO: 3834692 - RNA, 17 nt, Human
cucacuauaccaguaua

SEQ ID NO: 3834693 - RNA, 20 nt, Human
cucacuauguugcccaggca

SEQ ID NO: 3834694 - RNA, 21 nt, Human
cucacuauguugcccaggcag

SEQ ID NO: 3834695 - RNA, 20 nt, Human
cucacucagaaguccagagu

SEQ ID NO: 3834696 - RNA, 22 nt, Human
gaaucuggaccccaucugugaa

SEQ ID NO: 3834697 - RNA, 23 nt, Human
gaaucuggaccccaucugugaau

SEQ ID NO: 3834698 - RNA, 17 nt, Human
gaaucuguaugauucua

SEQ ID NO: 3834699 - RNA, 20 nt, Human
gaaucugugggucugggagu

SEQ ID NO: 3834700 - RNA, 14 nt, Human
gaaucuugucucaa

SEQ ID NO: 3834701 - RNA, 16 nt, Human
gaaucuugucucaaug

SEQ ID NO: 3834702 - RNA, 21 nt, Human
gaaucuugucucaaugcucau

SEQ ID NO: 3834703 - RNA, 23 nt, Human
gaaucuuuagagaaguauacaua

SEQ ID NO: 3834704 - RNA, 12 nt, Human
gaaugaaaaaug

SEQ ID NO: 3834705 - RNA, 17 nt, Human
gaaugaaaaaugaaaga

SEQ ID NO: 3834706 - RNA, 19 nt, Human
gaaugaaaaauuuaagcau

SEQ ID NO: 3834707 - RNA, 20 nt, Human
gaaugaaaaauuuaagcauu

SEQ ID NO: 3834708 - RNA, 23 nt, Human
gaaugaaaaauuuaagcauuguu

SEQ ID NO: 3834709 - RNA, 13 nt, Human
gaaugaaaagaca

SEQ ID NO: 3834710 - RNA, 13 nt, Human
gaaugaaaauaac

SEQ ID NO: 3834711 - RNA, 23 nt, Human
gaaugaaaauaacugaauuugga

SEQ ID NO: 3834712 - RNA, 19 nt, Human
gaaugaaacccccacacac

SEQ ID NO: 3834713 - RNA, 20 nt, Human
gaaugaaagucuugugacua

SEQ ID NO: 3834714 - RNA, 23 nt, Human
gaaugaaagucuugugacuagug

SEQ ID NO: 3834715 - RNA, 19 nt, Human
gaaugaaauacuguuugag

SEQ ID NO: 3834716 - RNA, 14 nt, Human
gaaugaaauguaug

SEQ ID NO: 3834717 - RNA, 18 nt, Human
gaaugaacaaccucggcu

SEQ ID NO: 3834718 - RNA, 15 nt, Human
gaaugaaccacugcc

SEQ ID NO: 3834719 - RNA, 15 nt, Human
gaaugaaccuucugg

SEQ ID NO: 3834720 - RNA, 19 nt, Human
gaaugaagauacugaaaua

SEQ ID NO: 3834721 - RNA, 17 nt, Human
gaaugaagcaguauuuu

SEQ ID NO: 3834722 - RNA, 20 nt, Human
gaaugaagcuuguguaucca

SEQ ID NO: 3834723 - RNA, 17 nt, Human
gaaugaaggugucagaa

SEQ ID NO: 3834724 - RNA, 15 nt, Human
gaaugaauggcuaag

SEQ ID NO: 3834725 - RNA, 11 nt, Human
gaaugaauguc

SEQ ID NO: 3834726 - RNA, 14 nt, Human
gaaugaauuaaaua

SEQ ID NO: 3834727 - RNA, 13 nt, Human
gaaugacaaagag

SEQ ID NO: 3834728 - RNA, 21 nt, Human
gaaugaccuuguaauguaacu

SEQ ID NO: 3834729 - RNA, 22 nt, Human
gaaugacuaagaggaaaguaca

SEQ ID NO: 3834730 - RNA, 13 nt, Human
gaaugacucguuu

SEQ ID NO: 3834731 - RNA, 14 nt, Human
gaaugagaaaugga

SEQ ID NO: 3834732 - RNA, 15 nt, Human
gaaugagacauccag

SEQ ID NO: 3834733 - RNA, 14 nt, Human
gaaugagcccagag

SEQ ID NO: 3834734 - RNA, 19 nt, Human
gaaugagcccagagaacag

SEQ ID NO: 3834735 - RNA, 13 nt, Human
gaaugagccucgg

SEQ ID NO: 3834736 - RNA, 16 nt, Human
gaaugagggggcucag

SEQ ID NO: 3834737 - RNA, 21 nt, Human
gaaugaggucccaggcagaga

SEQ ID NO: 3834738 - RNA, 22 nt, Human
gaaugaggucccaggcagagaa

SEQ ID NO: 3834739 - RNA, 15 nt, Human
gaaugaggugggagg

SEQ ID NO: 3834740 - RNA, 22 nt, Human
gaaugaggugggagguggaaga

SEQ ID NO: 3834741 - RNA, 21 nt, Human
gaaugagucuguuguguguca

SEQ ID NO: 3834742 - RNA, 16 nt, Human
gaaugaguugaggcca

SEQ ID NO: 3834743 - RNA, 13 nt, Human
gaaugaucugauu

SEQ ID NO: 3834744 - RNA, 18 nt, Human
gaaugaucuuucuuuccu

SEQ ID NO: 3834745 - RNA, 20 nt, Human
gaaugaugauccuaggcauu

SEQ ID NO: 3834746 - RNA, 15 nt, Human
gaaugauucaguguu

SEQ ID NO: 3834747 - RNA, 19 nt, Human
gaaugauucauguuauauu

SEQ ID NO: 3834748 - RNA, 20 nt, Human
gaaugauucauguuauauuu

SEQ ID NO: 3834749 - RNA, 16 nt, Human
gaaugauuuccaaaga

SEQ ID NO: 3834750 - RNA, 20 nt, Human
gaaugauuuccaaagagaaa

SEQ ID NO: 3834751 - RNA, 14 nt, Human
gaaugauuuuuaga

SEQ ID NO: 3834752 - RNA, 16 nt, Human
gaaugauuuuucuuua

SEQ ID NO: 3834753 - RNA, 20 nt, Human
gaaugcacaagaauggauca

SEQ ID NO: 3834754 - RNA, 20 nt, Human
gaaugcacacuagccucucc

SEQ ID NO: 3834755 - RNA, 22 nt, Human
gaaugcacacuagccucuccag

SEQ ID NO: 3834756 - RNA, 13 nt, Human
gaaugcacucaga

SEQ ID NO: 3834757 - RNA, 11 nt, Human
gaaugcagugg

SEQ ID NO: 3834758 - RNA, 18 nt, Human
gaaugcaugcuuuccaua

SEQ ID NO: 3834759 - RNA, 20 nt, Human
gaaugcauugauauugugaa

SEQ ID NO: 3834760 - RNA, 17 nt, Human
gaaugcccccagcuggc

SEQ ID NO: 3834761 - RNA, 14 nt, Human
gaaugccguggauu

SEQ ID NO: 3834762 - RNA, 22 nt, Human
gaaugccucaaugugaccaggg

SEQ ID NO: 3834763 - RNA, 17 nt, Human
gaaugccuccugugggg

SEQ ID NO: 3834764 - RNA, 17 nt, Human
gacagagacaccugcac

SEQ ID NO: 3834765 - RNA, 21 nt, Human
gacagagacaccugcaccucc

SEQ ID NO: 3834766 - RNA, 18 nt, Human
gacagagaggacgugggc

SEQ ID NO: 3834767 - RNA, 19 nt, Human
gacagagccaugcugggaa

SEQ ID NO: 3834768 - RNA, 17 nt, Human
gacagagcccugugagg

SEQ ID NO: 3834769 - RNA, 21 nt, Human
gacagagccugccccagcgcu

SEQ ID NO: 3834770 - RNA, 17 nt, Human
gacagagcgacagagca

SEQ ID NO: 3834771 - RNA, 15 nt, Human
gacagaggaugagcu

SEQ ID NO: 3834772 - RNA, 16 nt, Human
gacagaggcagcccca

SEQ ID NO: 3834773 - RNA, 18 nt, Human
gacagaggccccagccuc

SEQ ID NO: 3834774 - RNA, 15 nt, Human
gacagaggccugccc

SEQ ID NO: 3834775 - RNA, 16 nt, Human
gacagagggaagaaaa

SEQ ID NO: 3834776 - RNA, 16 nt, Human
gacagaggggacucug

SEQ ID NO: 3834777 - RNA, 20 nt, Human
gacagaggggacucugggcu

SEQ ID NO: 3834778 - RNA, 21 nt, Human
gacagaggggacucugggcua

SEQ ID NO: 3834779 - RNA, 15 nt, Human
gacagaggggguggc

SEQ ID NO: 3834780 - RNA, 19 nt, Human
gacagaggggguggccucc

SEQ ID NO: 3834781 - RNA, 23 nt, Human
gacagaggggguggccucccaac

SEQ ID NO: 3834782 - RNA, 20 nt, Human
gacagagggucacaguguuu

SEQ ID NO: 3834783 - RNA, 16 nt, Human
gacagaguaugaacac

SEQ ID NO: 3834784 - RNA, 16 nt, Human
gacagagugagacucu

SEQ ID NO: 3834785 - RNA, 20 nt, Human
gacagagugagacucugucu

SEQ ID NO: 3834786 - RNA, 22 nt, Human
gacagagugagacucugucuca

SEQ ID NO: 3834787 - RNA, 13 nt, Human
gacagauaacucu

SEQ ID NO: 3834788 - RNA, 14 nt, Human
gacagaucaagcug

SEQ ID NO: 3834789 - RNA, 17 nt, Human
gacagaucaagcuguga

SEQ ID NO: 3834790 - RNA, 20 nt, Human
gacagaucaagcugugagac

SEQ ID NO: 3834791 - RNA, 20 nt, Human
gacagaucauagauuucuga

SEQ ID NO: 3834792 - RNA, 15 nt, Human
gacagauccccguuc

SEQ ID NO: 3834793 - RNA, 21 nt, Human
gacagaucucugcuuuggaaa

SEQ ID NO: 3834794 - RNA, 15 nt, Human
gacagaugaggcuuu

SEQ ID NO: 3834795 - RNA, 19 nt, Human
gacagaugccccagagcug

SEQ ID NO: 3834796 - RNA, 22 nt, Human
gacagcaaaaccauugcuucac

SEQ ID NO: 3834797 - RNA, 20 nt, Human
gacagcagaacugcuauuuu

SEQ ID NO: 3834798 - RNA, 19 nt, Human
gacagcagcaucucuaccu

SEQ ID NO: 3834799 - RNA, 12 nt, Human
gacagcaggugg

SEQ ID NO: 3834800 - RNA, 22 nt, Human
gacagcagucuuaugcuuccag

SEQ ID NO: 3834801 - RNA, 18 nt, Human
gacagcauggugcaugcc

SEQ ID NO: 3834802 - RNA, 13 nt, Human
gacagcaugugcc

SEQ ID NO: 3834803 - RNA, 18 nt, Human
gacagcaugugcccuccu

SEQ ID NO: 3834804 - RNA, 18 nt, Human
gacagccaaaggcuggcg

SEQ ID NO: 3834805 - RNA, 19 nt, Human
gacagccaacuauggccug

SEQ ID NO: 3834806 - RNA, 18 nt, Human
gacagccacggccaggcc

SEQ ID NO: 3834807 - RNA, 19 nt, Human
gacagccacggccaggcca

SEQ ID NO: 3834808 - RNA, 13 nt, Human
gacagccagaacu

SEQ ID NO: 3834809 - RNA, 13 nt, Human
gacagcccagagc

SEQ ID NO: 3834810 - RNA, 15 nt, Human
gacagcccagagccu

SEQ ID NO: 3834811 - RNA, 17 nt, Human
gacagcccagagccugg

SEQ ID NO: 3834812 - RNA, 18 nt, Human
gacagccccagagcaggg

SEQ ID NO: 3834813 - RNA, 20 nt, Human
gacagccccagagcagggug

SEQ ID NO: 3834814 - RNA, 14 nt, Human
gacagcccgggcuc

SEQ ID NO: 3834815 - RNA, 16 nt, Human
gacagcccgggcucug

SEQ ID NO: 3834816 - RNA, 18 nt, Human
gacagcccgggcucugcc

SEQ ID NO: 3834817 - RNA, 21 nt, Human
gacagcccgggcucugccucc

SEQ ID NO: 3834818 - RNA, 23 nt, Human
gacagcccgggcucugccuccca

SEQ ID NO: 3834819 - RNA, 11 nt, Human
gacagccuccc

SEQ ID NO: 3834820 - RNA, 18 nt, Human
gacagccugcagcaggaa

SEQ ID NO: 3834821 - RNA, 13 nt, Human
gacagccuggcac

SEQ ID NO: 3834822 - RNA, 15 nt, Human
gacagcgcacagcug

SEQ ID NO: 3834823 - RNA, 18 nt, Human
gacagcuacacagagcuu

SEQ ID NO: 3834824 - RNA, 11 nt, Human
gacagcuccuu

SEQ ID NO: 3834825 - RNA, 13 nt, Human
gacagcuccuucu

SEQ ID NO: 3834826 - RNA, 19 nt, Human
gacagcuccuucuguccua

SEQ ID NO: 3834827 - RNA, 10 nt, Human
gacagcucuu

SEQ ID NO: 3834828 - RNA, 11 nt, Human
gacagcucuua

SEQ ID NO: 3834829 - RNA, 16 nt, Human
gacagcucuuuuugug

SEQ ID NO: 3834830 - RNA, 15 nt, Human
gacagcugccuggga

SEQ ID NO: 3834831 - RNA, 17 nt, Human
gacagcugccugggauc

SEQ ID NO: 3834832 - RNA, 22 nt, Human
gacagcugucccugucaccaag

SEQ ID NO: 3834833 - RNA, 15 nt, Human
gacagcugugcugua

SEQ ID NO: 3834834 - RNA, 23 nt, Human
gacagcuuagaauuauuugcacu

SEQ ID NO: 3834835 - RNA, 20 nt, Human
gacagcuuguaggggagggg

SEQ ID NO: 3834836 - RNA, 21 nt, Human
gacagcuuguggcaagugaau

SEQ ID NO: 3834837 - RNA, 20 nt, Human
gacagcuuuccccucauuuu

SEQ ID NO: 3834838 - RNA, 15 nt, Human
gacagcuuuucucaa

SEQ ID NO: 3834839 - RNA, 18 nt, Human
gacaggaaaauccucugg

SEQ ID NO: 3834840 - RNA, 14 nt, Human
gacaggacagugcu

SEQ ID NO: 3834841 - RNA, 23 nt, Human
gacaggaccagggauuuccauga

SEQ ID NO: 3834842 - RNA, 14 nt, Human
gacaggaccccagc

SEQ ID NO: 3834843 - RNA, 18 nt, Human
gacaggaccccagcucug

SEQ ID NO: 3834844 - RNA, 19 nt, Human
gacaggaccccagcucugc

SEQ ID NO: 3834845 - RNA, 14 nt, Human
gacaggaccuagga

SEQ ID NO: 3834846 - RNA, 15 nt, Human
gacaggaccugacua

SEQ ID NO: 3834847 - RNA, 13 nt, Human
gacaggacgcuga

SEQ ID NO: 3834848 - RNA, 20 nt, Human
gacaggacgggcuugggcuu

SEQ ID NO: 3834849 - RNA, 19 nt, Human
gacaggacuaacacucaga

SEQ ID NO: 3834850 - RNA, 24 nt, Human
gacaggacuaacacucagaagccu

SEQ ID NO: 3834851 - RNA, 24 nt, Human
gacaggagaaaugcauccauuccu

SEQ ID NO: 3834852 - RNA, 17 nt, Human
gacaggagaugcugugc

SEQ ID NO: 3834853 - RNA, 19 nt, Human
gacaggagaugcugugccc

SEQ ID NO: 3834854 - RNA, 17 nt, Human
gacaggagggcaagggc

SEQ ID NO: 3834855 - RNA, 18 nt, Human
gacaggauguguuugcuu

SEQ ID NO: 3834856 - RNA, 16 nt, Human
gacaggcaaugcuggc

SEQ ID NO: 3834857 - RNA, 19 nt, Human
gacaggcaaugcuggcugu

SEQ ID NO: 3834858 - RNA, 23 nt, Human
gacaggcaaugcuggcuguuggc

SEQ ID NO: 3834859 - RNA, 15 nt, Human
cucacucagcaccac

SEQ ID NO: 3834860 - RNA, 16 nt, Human
cucacucagcaccacu

SEQ ID NO: 3834861 - RNA, 19 nt, Human
cucacucagcacuuggccc

SEQ ID NO: 3834862 - RNA, 22 nt, Human
cucacucagccacccugaguug

SEQ ID NO: 3834863 - RNA, 17 nt, Human
cucacuccaccacccaa

SEQ ID NO: 3834864 - RNA, 19 nt, Human
cucacuccccagccugggc

SEQ ID NO: 3834865 - RNA, 12 nt, Human
cucacuccccau

SEQ ID NO: 3834866 - RNA, 22 nt, Human
cucacuccccuccuuucccaac

SEQ ID NO: 3834867 - RNA, 21 nt, Human
cucacucccuucccauaagcu

SEQ ID NO: 3834868 - RNA, 13 nt, Human
cucacuccuaccu

SEQ ID NO: 3834869 - RNA, 12 nt, Human
cucacuccugag

SEQ ID NO: 3834870 - RNA, 14 nt, Human
cucacuccugagac

SEQ ID NO: 3834871 - RNA, 22 nt, Human
cucacuccugagaccccuggcc

SEQ ID NO: 3834872 - RNA, 11 nt, Human
cucacuccugu

SEQ ID NO: 3834873 - RNA, 15 nt, Human
cucacuccuuuuaaa

SEQ ID NO: 3834874 - RNA, 21 nt, Human
cucacucucaggaaaugcuga

SEQ ID NO: 3834875 - RNA, 12 nt, Human
cucacucugcca

SEQ ID NO: 3834876 - RNA, 18 nt, Human
cucacucugccagggcag

SEQ ID NO: 3834877 - RNA, 21 nt, Human
cucacucugcuaccuugcccc

SEQ ID NO: 3834878 - RNA, 15 nt, Human
cucacucugggcugu

SEQ ID NO: 3834879 - RNA, 22 nt, Human
cucacucugucgcccagucugg

SEQ ID NO: 3834880 - RNA, 21 nt, Human
cucacugaaaacaucuggaag

SEQ ID NO: 3834881 - RNA, 14 nt, Human
cucacugaaaccag

SEQ ID NO: 3834882 - RNA, 15 nt, Human
cucacugaagccugc

SEQ ID NO: 3834883 - RNA, 23 nt, Human
cucacugaagccugcguuggucc

SEQ ID NO: 3834884 - RNA, 22 nt, Human
cucacugagaagauugugaaua

SEQ ID NO: 3834885 - RNA, 22 nt, Human
cucacugauauauuuuccaggg

SEQ ID NO: 3834886 - RNA, 13 nt, Human
cucacugcagccu

SEQ ID NO: 3834887 - RNA, 16 nt, Human
cucacugcagccucaa

SEQ ID NO: 3834888 - RNA, 15 nt, Human
cucacugccaggcca

SEQ ID NO: 3834889 - RNA, 18 nt, Human
cucacugccaggccagcc

SEQ ID NO: 3834890 - RNA, 12 nt, Human
cucacugcccgc

SEQ ID NO: 3834891 - RNA, 20 nt, Human
cucacugcccgcacacccuc

SEQ ID NO: 3834892 - RNA, 13 nt, Human
cucacugccuccc

SEQ ID NO: 3834893 - RNA, 20 nt, Human
cucacugcuaagaauauuug

SEQ ID NO: 3834894 - RNA, 21 nt, Human
cucacugcuaagaauauuuga

SEQ ID NO: 3834895 - RNA, 22 nt, Human
cucacugcuaagaauauuugaa

SEQ ID NO: 3834896 - RNA, 20 nt, Human
cucacugcucaagaagacau

SEQ ID NO: 3834897 - RNA, 19 nt, Human
cucacugcucccugaagcc

SEQ ID NO: 3834898 - RNA, 23 nt, Human
cucacugcucccugaagccagcc

SEQ ID NO: 3834899 - RNA, 16 nt, Human
cucacugcuugaacua

SEQ ID NO: 3834900 - RNA, 19 nt, Human
cucacuggcagccccagca

SEQ ID NO: 3834901 - RNA, 13 nt, Human
cucacuggggccu

SEQ ID NO: 3834902 - RNA, 16 nt, Human
cucacuggggccuaca

SEQ ID NO: 3834903 - RNA, 18 nt, Human
cucacuggggccuacagc

SEQ ID NO: 3834904 - RNA, 22 nt, Human
cucacugggguccuggggccuc

SEQ ID NO: 3834905 - RNA, 23 nt, Human
cucacugugggaaggccagcugc

SEQ ID NO: 3834906 - RNA, 19 nt, Human
cucacugugguaaaugcca

SEQ ID NO: 3834907 - RNA, 20 nt, Human
cucacuguucccucugcucc

SEQ ID NO: 3834908 - RNA, 16 nt, Human
gacccaaaaggcagaa

SEQ ID NO: 3834909 - RNA, 18 nt, Human
gaccuacuguucuaaagc

SEQ ID NO: 3834910 - RNA, 16 nt, Human
gaccuaggcaguaggc

SEQ ID NO: 3834911 - RNA, 21 nt, Human
gaccuagggauguucuggccc

SEQ ID NO: 3834912 - RNA, 23 nt, Human
gaccuauaaaucauuaagacaac

SEQ ID NO: 3834913 - RNA, 15 nt, Human
gaccuaucacuucca

SEQ ID NO: 3834914 - RNA, 13 nt, Human
gaccuauguuugc

SEQ ID NO: 3834915 - RNA, 13 nt, Human
gaccucaaccugu

SEQ ID NO: 3834916 - RNA, 23 nt, Human
gaccucaaguaauccaccugccu

SEQ ID NO: 3834917 - RNA, 21 nt, Human
gaccucaccaagcugcugugg

SEQ ID NO: 3834918 - RNA, 13 nt, Human
gaccucagaagua

SEQ ID NO: 3834919 - RNA, 14 nt, Human
gaccucagagucca

SEQ ID NO: 3834920 - RNA, 11 nt, Human
gaccucagcca

SEQ ID NO: 3834921 - RNA, 20 nt, Human
gaccucagccuuccccuugc

SEQ ID NO: 3834922 - RNA, 14 nt, Human
gaccucaggccugg

SEQ ID NO: 3834923 - RNA, 23 nt, Human
gaccucagguaaucgaccugccu

SEQ ID NO: 3834924 - RNA, 20 nt, Human
gaccucaggugauccaccca

SEQ ID NO: 3834925 - RNA, 21 nt, Human
gaccucaugcaucuccaccug

SEQ ID NO: 3834926 - RNA, 16 nt, Human
gaccuccaagccacug

SEQ ID NO: 3834927 - RNA, 14 nt, Human
gaccuccagcuguu

SEQ ID NO: 3834928 - RNA, 16 nt, Human
gaccuccagcuuuccu

SEQ ID NO: 3834929 - RNA, 15 nt, Human
gaccucccagcccua

SEQ ID NO: 3834930 - RNA, 23 nt, Human
gaccucccagcccuauggaugug

SEQ ID NO: 3834931 - RNA, 13 nt, Human
gaccuccccagcc

SEQ ID NO: 3834932 - RNA, 14 nt, Human
gaccuccccagccc

SEQ ID NO: 3834933 - RNA, 16 nt, Human
gaccuccccugaggcu

SEQ ID NO: 3834934 - RNA, 22 nt, Human
gaccuccggccaggugccuccu

SEQ ID NO: 3834935 - RNA, 12 nt, Human
gaccuccugccu

SEQ ID NO: 3834936 - RNA, 14 nt, Human
gaccuccugccucc

SEQ ID NO: 3834937 - RNA, 17 nt, Human
gaccucguccucccccu

SEQ ID NO: 3834938 - RNA, 18 nt, Human
gaccucuagcccugcccg

SEQ ID NO: 3834939 - RNA, 14 nt, Human
gaccucucccaggg

SEQ ID NO: 3834940 - RNA, 13 nt, Human
gaccucugccuga

SEQ ID NO: 3834941 - RNA, 16 nt, Human
gaccucugcucugagg

SEQ ID NO: 3834942 - RNA, 11 nt, Human
gaccucugggc

SEQ ID NO: 3834943 - RNA, 14 nt, Human
gaccucuguugucc

SEQ ID NO: 3834944 - RNA, 13 nt, Human
gaccucuugcugu

SEQ ID NO: 3834945 - RNA, 15 nt, Human
gaccugaaauuccaa

SEQ ID NO: 3834946 - RNA, 23 nt, Human
gaccugaaauuccaaagucucua

SEQ ID NO: 3834947 - RNA, 13 nt, Human
gaccugaaguuca

SEQ ID NO: 3834948 - RNA, 22 nt, Human
gaccugaaguucaccauuaaaa

SEQ ID NO: 3834949 - RNA, 11 nt, Human
gaccugagccu

SEQ ID NO: 3834950 - RNA, 14 nt, Human
gaccugaggaagcg

SEQ ID NO: 3834951 - RNA, 19 nt, Human
gaccugaggacauggcuuc

SEQ ID NO: 3834952 - RNA, 18 nt, Human
gaccugaggcccuucucu

SEQ ID NO: 3834953 - RNA, 13 nt, Human
gaccugaggcugu

SEQ ID NO: 3834954 - RNA, 14 nt, Human
gaccugaggcugug

SEQ ID NO: 3834955 - RNA, 15 nt, Human
gaccugauccuggag

SEQ ID NO: 3834956 - RNA, 21 nt, Human
gaccugauccuggaggcccag

SEQ ID NO: 3834957 - RNA, 23 nt, Human
gaccugauuucugagcauuuaau

SEQ ID NO: 3834958 - RNA, 20 nt, Human
gaccugcacuggggagcccg

SEQ ID NO: 3834959 - RNA, 13 nt, Human
gaccugcaggcca

SEQ ID NO: 3834960 - RNA, 16 nt, Human
gaccugccaggcaggg

SEQ ID NO: 3834961 - RNA, 17 nt, Human
gaccugccaggcagggg

SEQ ID NO: 3834962 - RNA, 20 nt, Human
gaccugccaggcaggggugg

SEQ ID NO: 3834963 - RNA, 22 nt, Human
gaccugccucccuucaugcaug

SEQ ID NO: 3834964 - RNA, 14 nt, Human
gaccugccuccugc

SEQ ID NO: 3834965 - RNA, 16 nt, Human
gaccugccuccugccu

SEQ ID NO: 3834966 - RNA, 20 nt, Human
gaccugccucucacacacau

SEQ ID NO: 3834967 - RNA, 12 nt, Human
gaccugccugua

SEQ ID NO: 3834968 - RNA, 19 nt, Human
gaccugcuaggccagagcc

SEQ ID NO: 3834969 - RNA, 21 nt, Human
gaccugcuaggccagagccca

SEQ ID NO: 3834970 - RNA, 19 nt, Human
gaccugcuccgcugcuccu

SEQ ID NO: 3834971 - RNA, 20 nt, Human
gaccugcugaaguccggaac

SEQ ID NO: 3834972 - RNA, 11 nt, Human
gaccugcugag

SEQ ID NO: 3834973 - RNA, 14 nt, Human
gaccugcugagcuc

SEQ ID NO: 3834974 - RNA, 22 nt, Human
gaccugcugagcucugagaggc

SEQ ID NO: 3834975 - RNA, 18 nt, Human
gaccugcuuuuugaaaug

SEQ ID NO: 3834976 - RNA, 13 nt, Human
gaccuggagcccc

SEQ ID NO: 3834977 - RNA, 17 nt, Human
gaccuggagccccuggg

SEQ ID NO: 3834978 - RNA, 18 nt, Human
gaccuggagccccugggu

SEQ ID NO: 3834979 - RNA, 17 nt, Human
gaccuggauaacuuagg

SEQ ID NO: 3834980 - RNA, 17 nt, Human
gaccuggcaaggacaca

SEQ ID NO: 3834981 - RNA, 20 nt, Human
gaccuggggcacaguccagg

SEQ ID NO: 3834982 - RNA, 17 nt, Human
gaccugguccacagggc

SEQ ID NO: 3834983 - RNA, 18 nt, Human
gaccugguuaaacaaacc

SEQ ID NO: 3834984 - RNA, 13 nt, Human
gaccugguuuuua

SEQ ID NO: 3834985 - RNA, 21 nt, Human
gaccuguauauuuguaaagcu

SEQ ID NO: 3834986 - RNA, 22 nt, Human
gaccuguauuuaagcaaauacu

SEQ ID NO: 3834987 - RNA, 17 nt, Human
gaccugucaugcccccc

SEQ ID NO: 3834988 - RNA, 15 nt, Human
gaccuguccuccugg

SEQ ID NO: 3834989 - RNA, 23 nt, Human
gaccuguggggauuucucccagc

SEQ ID NO: 3834990 - RNA, 18 nt, Human
gaccuguuagcagacagg

SEQ ID NO: 3834991 - RNA, 21 nt, Human
gaccuuaguguuucugugcau

SEQ ID NO: 3834992 - RNA, 22 nt, Human
gaccuuaucugugcgugaaaca

SEQ ID NO: 3834993 - RNA, 13 nt, Human
gaccuucagcuca

SEQ ID NO: 3834994 - RNA, 18 nt, Human
gaccuucagcucacgcuu

SEQ ID NO: 3834995 - RNA, 17 nt, Human
gaccuuccaagagccug

SEQ ID NO: 3834996 - RNA, 14 nt, Human
gaccuuccucaucc

SEQ ID NO: 3834997 - RNA, 23 nt, Human
gaccuuccucgcagagaggccag

SEQ ID NO: 3834998 - RNA, 17 nt, Human
gaccuuccucuggggcu

SEQ ID NO: 3834999 - RNA, 12 nt, Human
gaccuuccugcc

SEQ ID NO: 3835000 - RNA, 21 nt, Human
gaccuucuccuucaccuuugu

SEQ ID NO: 3835001 - RNA, 17 nt, Human
gaccuugaacuccuggg

SEQ ID NO: 3835002 - RNA, 13 nt, Human
gaccuugggccaa

SEQ ID NO: 3835003 - RNA, 16 nt, Human
gaccuuguaaaagaca

SEQ ID NO: 3835004 - RNA, 15 nt, Human
gaccuuguaauguaa

SEQ ID NO: 3835005 - RNA, 18 nt, Human
gaccuuguagugagccga

SEQ ID NO: 3835006 - RNA, 17 nt, Human
gaccuuguuacuucuga

SEQ ID NO: 3835007 - RNA, 15 nt, Human
gaccuuguucacacu

SEQ ID NO: 3835008 - RNA, 14 nt, Human
gaccuuguugcaug

SEQ ID NO: 3835009 - RNA, 20 nt, Human
gaccuuguugcaugauguau

SEQ ID NO: 3835010 - RNA, 22 nt, Human
gaccuuuagugguggccauuua

SEQ ID NO: 3835011 - RNA, 19 nt, Human
gaccuuucaauaggaaaaa

SEQ ID NO: 3835012 - RNA, 21 nt, Human
gaccuuucaauaggaaaaacu

SEQ ID NO: 3835013 - RNA, 18 nt, Human
gaccuuuccaccacagcc

SEQ ID NO: 3835014 - RNA, 17 nt, Human
gaccuuuugggggaggg

SEQ ID NO: 3835015 - RNA, 17 nt, Human
gaccuuuuucugcacua

SEQ ID NO: 3835016 - RNA, 18 nt, Human
gaccuuuuuuuuuuuucc

SEQ ID NO: 3835017 - RNA, 21 nt, Human
gacgaacauccaaccuuccca

SEQ ID NO: 3835018 - RNA, 21 nt, Human
gacgaacuuccauggcccuca

SEQ ID NO: 3835019 - RNA, 22 nt, Human
gacgacacggucggggcaucug

SEQ ID NO: 3835020 - RNA, 15 nt, Human
gacgacaggcgagag

SEQ ID NO: 3835021 - RNA, 14 nt, Human
gacgaccuuuaccu

SEQ ID NO: 3835022 - RNA, 20 nt, Human
gacgacuguuuucccaacac

SEQ ID NO: 3835023 - RNA, 14 nt, Human
gacgaggcugggcc

SEQ ID NO: 3835024 - RNA, 15 nt, Human
gacgaguugauuucc

SEQ ID NO: 3835025 - RNA, 15 nt, Human
gacgauuccuucucu

SEQ ID NO: 3835026 - RNA, 17 nt, Human
gacgauuccuucucuga

SEQ ID NO: 3835027 - RNA, 18 nt, Human
gacgauuccuucucugaa

SEQ ID NO: 3835028 - RNA, 14 nt, Human
gacgcaccagccca

SEQ ID NO: 3835029 - RNA, 14 nt, Human
gacgcagaccccac

SEQ ID NO: 3835030 - RNA, 19 nt, Human
gacgcagcaggaggccagg

SEQ ID NO: 3835031 - RNA, 15 nt, Human
gacgcauaugaguaa

SEQ ID NO: 3835032 - RNA, 14 nt, Human
gacgccacagccca

SEQ ID NO: 3835033 - RNA, 22 nt, Human
gacgccacagcccagccacgga

SEQ ID NO: 3835034 - RNA, 12 nt, Human
gacgccacccag

SEQ ID NO: 3835035 - RNA, 19 nt, Human
gacgccacucauuucaucu

SEQ ID NO: 3835036 - RNA, 15 nt, Human
gacgccaucccagcc

SEQ ID NO: 3835037 - RNA, 18 nt, Human
gacgcccucuccccaccc

SEQ ID NO: 3835038 - RNA, 21 nt, Human
gacgccggggacagaggccug

SEQ ID NO: 3835039 - RNA, 20 nt, Human
gacgccugcccuccccagag

SEQ ID NO: 3835040 - RNA, 18 nt, Human
gacgcuacccgggaaggg

SEQ ID NO: 3835041 - RNA, 22 nt, Human
gacgcuacccgggaagggggcu

SEQ ID NO: 3835042 - RNA, 23 nt, Human
gacgcuacccgggaagggggcug

SEQ ID NO: 3835043 - RNA, 14 nt, Human
gacgcucucuggcc

SEQ ID NO: 3835044 - RNA, 22 nt, Human
gacgcucugcugugggcacagg

SEQ ID NO: 3835045 - RNA, 13 nt, Human
gacgcugaauaaa

SEQ ID NO: 3835046 - RNA, 17 nt, Human
gacgcugaauaaauguc

SEQ ID NO: 3835047 - RNA, 19 nt, Human
gacgcugauacauaacuaa

SEQ ID NO: 3835048 - RNA, 22 nt, Human
gacgcugauacauaacuaaauu

SEQ ID NO: 3835049 - RNA, 12 nt, Human
gacgcuggcucc

SEQ ID NO: 3835050 - RNA, 20 nt, Human
gacgcugguagagauggagg

SEQ ID NO: 3835051 - RNA, 13 nt, Human
gacgcugugcugc

SEQ ID NO: 3835052 - RNA, 15 nt, Human
gacgcugugcugccc

SEQ ID NO: 3835053 - RNA, 17 nt, Human
gacucagggccccagca

SEQ ID NO: 3835054 - RNA, 18 nt, Human
gacucagggccccagcac

SEQ ID NO: 3835055 - RNA, 17 nt, Human
gacucagggcuccuggg

SEQ ID NO: 3835056 - RNA, 16 nt, Human
gacucaggugggcccu

SEQ ID NO: 3835057 - RNA, 15 nt, Human
gacucagguugucug

SEQ ID NO: 3835058 - RNA, 14 nt, Human
gacucagugcagau

SEQ ID NO: 3835059 - RNA, 14 nt, Human
gacucaucauuugu

SEQ ID NO: 3835060 - RNA, 21 nt, Human
gacucaucuuucccuccuugg

SEQ ID NO: 3835061 - RNA, 13 nt, Human
gacucaugaggag

SEQ ID NO: 3835062 - RNA, 17 nt, Human
gacucauuuuaaaaaau

SEQ ID NO: 3835063 - RNA, 11 nt, Human
gacuccaaaga

SEQ ID NO: 3835064 - RNA, 14 nt, Human
gacuccacccaucc

SEQ ID NO: 3835065 - RNA, 18 nt, Human
gacuccacgauccugcca

SEQ ID NO: 3835066 - RNA, 20 nt, Human
gacuccacgauccugccacc

SEQ ID NO: 3835067 - RNA, 23 nt, Human
gacuccacgauccugccacccug

SEQ ID NO: 3835068 - RNA, 16 nt, Human
gacuccagacucucug

SEQ ID NO: 3835069 - RNA, 16 nt, Human
gacuccagaucugcac

SEQ ID NO: 3835070 - RNA, 13 nt, Human
gacuccagccagc

SEQ ID NO: 3835071 - RNA, 14 nt, Human
gacuccagccagcg

SEQ ID NO: 3835072 - RNA, 20 nt, Human
gacuccagccagcgccuccc

SEQ ID NO: 3835073 - RNA, 15 nt, Human
gacuccaggcagcag

SEQ ID NO: 3835074 - RNA, 11 nt, Human
gacccuguaua

SEQ ID NO: 3835075 - RNA, 19 nt, Human
gacccuguauauagcccag

SEQ ID NO: 3835076 - RNA, 20 nt, Human
gacccugugacauggugccu

SEQ ID NO: 3835077 - RNA, 21 nt, Human
gacccuguugcuaagccccag

SEQ ID NO: 3835078 - RNA, 15 nt, Human
gacccuuauaaaauc

SEQ ID NO: 3835079 - RNA, 21 nt, Human
gacccuuauuacacggaaaac

SEQ ID NO: 3835080 - RNA, 17 nt, Human
gacccuuccagacauac

SEQ ID NO: 3835081 - RNA, 23 nt, Human
gacccuugccgucuaccugaggg

SEQ ID NO: 3835082 - RNA, 20 nt, Human
gacccuuguggucccacccc

SEQ ID NO: 3835083 - RNA, 14 nt, Human
gacccuuuccuucc

SEQ ID NO: 3835084 - RNA, 23 nt, Human
gacccuuuccuuccuucccuggc

SEQ ID NO: 3835085 - RNA, 12 nt, Human
gacccuuuucau

SEQ ID NO: 3835086 - RNA, 16 nt, Human
gaccgcccccuccucu

SEQ ID NO: 3835087 - RNA, 15 nt, Human
gaccgcccccugucu

SEQ ID NO: 3835088 - RNA, 19 nt, Human
gaccgcuacaccacucugg

SEQ ID NO: 3835089 - RNA, 23 nt, Human
gaccgcuacaccacucuggcagc

SEQ ID NO: 3835090 - RNA, 21 nt, Human
gaccgcuuguggggacccagg

SEQ ID NO: 3835091 - RNA, 17 nt, Human
gaccggaagcuccuggu

SEQ ID NO: 3835092 - RNA, 15 nt, Human
gaccggccugccagg

SEQ ID NO: 3835093 - RNA, 17 nt, Human
gaccggccugccaggag

SEQ ID NO: 3835094 - RNA, 19 nt, Human
gaccggcggaccccagcca

SEQ ID NO: 3835095 - RNA, 16 nt, Human
gaccgggcccuggguu

SEQ ID NO: 3835096 - RNA, 14 nt, Human
gaccgugaggccag

SEQ ID NO: 3835097 - RNA, 18 nt, Human
gaccgugaggccagagac

SEQ ID NO: 3835098 - RNA, 13 nt, Human
gaccguggcccug

SEQ ID NO: 3835099 - RNA, 21 nt, Human
gaccgugggcggggccuugcg

SEQ ID NO: 3835100 - RNA, 22 nt, Human
gaccguuauaaagugugccaca

SEQ ID NO: 3835101 - RNA, 20 nt, Human
gaccuaaaauuugcccuccc

SEQ ID NO: 3835102 - RNA, 15 nt, Human
gaccuaaccagggcc

SEQ ID NO: 3835103 - RNA, 18 nt, Human
gaccuaaccagggccaga

SEQ ID NO: 3835104 - RNA, 22 nt, Human
gaccuaaccagggccagaagua

SEQ ID NO: 3835105 - RNA, 14 nt, Human
gaccuaaugcuccu

SEQ ID NO: 3835106 - RNA, 22 nt, Human
gaccuaaugcuccuuguuccua

SEQ ID NO: 3835107 - RNA, 20 nt, Human
gaccuacagggggucuggcu

SEQ ID NO: 3835108 - RNA, 22 nt, Human
gaccuacagggggucuggcugg

SEQ ID NO: 3835109 - RNA, 14 nt, Human
gaccuaccucaggu

SEQ ID NO: 3835110 - RNA, 15 nt, Human
gaccuacuguucuaa

SEQ ID NO: 3835111 - RNA, 20 nt, Human
gaccuaggauaucuucucca

SEQ ID NO: 3835112 - RNA, 17 nt, Human
gaccuagggaggaccuu

SEQ ID NO: 3835113 - RNA, 22 nt, Human
gaccuauguccuaaggacacac

SEQ ID NO: 3835114 - RNA, 23 nt, Human
gaccuauguccuaaggacacacu

SEQ ID NO: 3835115 - RNA, 17 nt, Human
gaccucaccauuuuugu

SEQ ID NO: 3835116 - RNA, 16 nt, Human
gaccucagaaguaaag

SEQ ID NO: 3835117 - RNA, 18 nt, Human
gaccucagaguccaggcc

SEQ ID NO: 3835118 - RNA, 13 nt, Human
gaccucagccuuc

SEQ ID NO: 3835119 - RNA, 13 nt, Human
gaccucaggccug

SEQ ID NO: 3835120 - RNA, 13 nt, Human
gaccucagggcac

SEQ ID NO: 3835121 - RNA, 21 nt, Human
gaccucaguuuuaucauuuuc

SEQ ID NO: 3835122 - RNA, 10 nt, Human
gaccucauca

SEQ ID NO: 3835123 - RNA, 13 nt, Human
gaccucaucagga

SEQ ID NO: 3835124 - RNA, 23 nt, Human
gaccucaucaggaugaacccagg

SEQ ID NO: 3835125 - RNA, 22 nt, Human
gaccucaugcaucuccaccugc

SEQ ID NO: 3835126 - RNA, 19 nt, Human
gaccuccagcuuuccugua

SEQ ID NO: 3835127 - RNA, 21 nt, Human
gaccucccagcccuauggaug

SEQ ID NO: 3835128 - RNA, 12 nt, Human
gaccucccccuc

SEQ ID NO: 3835129 - RNA, 17 nt, Human
gaccucccccuccuucc

SEQ ID NO: 3835130 - RNA, 12 nt, Human
gaccucccuucc

SEQ ID NO: 3835131 - RNA, 20 nt, Human
gaccucccuuccgacccucu

SEQ ID NO: 3835132 - RNA, 17 nt, Human
gaccuccuaacaaguag

SEQ ID NO: 3835133 - RNA, 20 nt, Human
gaccuccucuucccccuucc

SEQ ID NO: 3835134 - RNA, 18 nt, Human
gaccucguccucccccug

SEQ ID NO: 3835135 - RNA, 19 nt, Human
gaccucguccucccccugc

SEQ ID NO: 3835136 - RNA, 21 nt, Human
gaccucguccucccccugcca

SEQ ID NO: 3835137 - RNA, 23 nt, Human
gaccucuauaauugccacugaga

SEQ ID NO: 3835138 - RNA, 12 nt, Human
gaccucucccag

SEQ ID NO: 3835139 - RNA, 22 nt, Human
gaccucuccccuggaacugucu

SEQ ID NO: 3835140 - RNA, 17 nt, Human
gaccucugacagcagca

SEQ ID NO: 3835141 - RNA, 12 nt, Human
gaccucuugcug

SEQ ID NO: 3835142 - RNA, 14 nt, Human
gaccucuugcuguc

SEQ ID NO: 3835143 - RNA, 15 nt, Human
gaccucuugcugucu

SEQ ID NO: 3835144 - RNA, 16 nt, Human
gaccucuugcugucuc

SEQ ID NO: 3835145 - RNA, 17 nt, Human
gaccucuugcugucucu

SEQ ID NO: 3835146 - RNA, 18 nt, Human
gaccucuugcugucucug

SEQ ID NO: 3835147 - RNA, 20 nt, Human
gaccucuugcugucucugcu

SEQ ID NO: 3835148 - RNA, 17 nt, Human
gaccugaaauuccaaag

SEQ ID NO: 3835149 - RNA, 15 nt, Human
gaccugacucaggca

SEQ ID NO: 3835150 - RNA, 15 nt, Human
gaccugagccugccg

SEQ ID NO: 3835151 - RNA, 16 nt, Human
gaccugagccugccga

SEQ ID NO: 3835152 - RNA, 16 nt, Human
gaccugagcuccccac

SEQ ID NO: 3835153 - RNA, 18 nt, Human
gaccugagcuccccacca

SEQ ID NO: 3835154 - RNA, 22 nt, Human
gaccugagcuccccaccacccc

SEQ ID NO: 3835155 - RNA, 22 nt, Human
gaccugaggacauggcuucuga

SEQ ID NO: 3835156 - RNA, 11 nt, Human
gaccugaggcc

SEQ ID NO: 3835157 - RNA, 14 nt, Human
gaccugaggcccuu

SEQ ID NO: 3835158 - RNA, 15 nt, Human
gaccugaggcccuuc

SEQ ID NO: 3835159 - RNA, 14 nt, Human
gaccugaggcuccu

SEQ ID NO: 3835160 - RNA, 18 nt, Human
gaccugaggcuccugugc

SEQ ID NO: 3835161 - RNA, 19 nt, Human
gaccugauuuacaguuuca

SEQ ID NO: 3835162 - RNA, 17 nt, Human
gaccugcagacgcccag

SEQ ID NO: 3835163 - RNA, 20 nt, Human
gaccugcaggccaagagcag

SEQ ID NO: 3835164 - RNA, 18 nt, Human
gaccugccaggcaggggu

SEQ ID NO: 3835165 - RNA, 23 nt, Human
gaccugcccccgcauccccugcc

SEQ ID NO: 3835166 - RNA, 21 nt, Human
gaccugccccgcccagcugca

SEQ ID NO: 3835167 - RNA, 21 nt, Human
gaccugccccuccucucugcc

SEQ ID NO: 3835168 - RNA, 13 nt, Human
gaccugccuccug

SEQ ID NO: 3835169 - RNA, 22 nt, Human
gaccugccuccugccugccccu

SEQ ID NO: 3835170 - RNA, 18 nt, Human
gaccugccugcauaggag

SEQ ID NO: 3835171 - RNA, 20 nt, Human
gaccugcggcugcugugugc

SEQ ID NO: 3835172 - RNA, 17 nt, Human
gaccugcuccgcugcuc

SEQ ID NO: 3835173 - RNA, 18 nt, Human
gaccugcuccgcugcucc

SEQ ID NO: 3835174 - RNA, 19 nt, Human
gaccugcugagcucugaga

SEQ ID NO: 3835175 - RNA, 20 nt, Human
gaccugcugagggaccagcc

SEQ ID NO: 3835176 - RNA, 19 nt, Human
gaccugcuuuuugaaauga

SEQ ID NO: 3835177 - RNA, 14 nt, Human
gaccuggaagaaca

SEQ ID NO: 3835178 - RNA, 20 nt, Human
gaccuggaagaacaggccuc

SEQ ID NO: 3835179 - RNA, 20 nt, Human
gaccuggaagggaggugggc

SEQ ID NO: 3835180 - RNA, 18 nt, Human
gaccuggacacaggccug

SEQ ID NO: 3835181 - RNA, 16 nt, Human
gaccuggagccccugg

SEQ ID NO: 3835182 - RNA, 18 nt, Human
gaccuggcaaggacacag

SEQ ID NO: 3835183 - RNA, 18 nt, Human
gaccuggcacuggaugca

SEQ ID NO: 3835184 - RNA, 18 nt, Human
gaccugggaccuccccug

SEQ ID NO: 3835185 - RNA, 17 nt, Human
gaccugguacccuccug

SEQ ID NO: 3835186 - RNA, 17 nt, Human
gaccuggugcugccucu

SEQ ID NO: 3835187 - RNA, 22 nt, Human
gaccuggugcugccucuaccug

SEQ ID NO: 3835188 - RNA, 17 nt, Human
gaccuguaacuuuugua

SEQ ID NO: 3835189 - RNA, 12 nt, Human
gaccuguaauca

SEQ ID NO: 3835190 - RNA, 16 nt, Human
gaccuguccuccuggu

SEQ ID NO: 3835191 - RNA, 19 nt, Human
gaccuguccuccugguggg

SEQ ID NO: 3835192 - RNA, 15 nt, Human
gaccugugagcccag

SEQ ID NO: 3835193 - RNA, 23 nt, Human
gaccugugagcccagcuggguca

SEQ ID NO: 3835194 - RNA, 22 nt, Human
gaccuguggggauuucucccag

SEQ ID NO: 3835195 - RNA, 14 nt, Human
gaccuguggugcaa

SEQ ID NO: 3835196 - RNA, 19 nt, Human
gaccuguuagcagacaggc

SEQ ID NO: 3835197 - RNA, 19 nt, Human
gagaaaccagcuuccuuca

SEQ ID NO: 3835198 - RNA, 17 nt, Human
gagaaacucuugagauc

SEQ ID NO: 3835199 - RNA, 15 nt, Human
gagaaagaauuuagu

SEQ ID NO: 3835200 - RNA, 18 nt, Human
gagaaagacuauucaaac

SEQ ID NO: 3835201 - RNA, 18 nt, Human
gagaaagagcacuuaaga

SEQ ID NO: 3835202 - RNA, 19 nt, Human
gagaaagaggcaccaggaa

SEQ ID NO: 3835203 - RNA, 20 nt, Human
gagaaagcauauugacuuuu

SEQ ID NO: 3835204 - RNA, 16 nt, Human
gagaaagccaggcagg

SEQ ID NO: 3835205 - RNA, 19 nt, Human
gagaaagcgcagaugcuag

SEQ ID NO: 3835206 - RNA, 14 nt, Human
gagaaagcucaaag

SEQ ID NO: 3835207 - RNA, 13 nt, Human
gagaaagcugacu

SEQ ID NO: 3835208 - RNA, 21 nt, Human
gagaaagcugacuuggcuggu

SEQ ID NO: 3835209 - RNA, 22 nt, Human
gagaaaguacuucuccacccug

SEQ ID NO: 3835210 - RNA, 23 nt, Human
gagaaaucuggcuucuggccagg

SEQ ID NO: 3835211 - RNA, 12 nt, Human
gagaaaugaaaa

SEQ ID NO: 3835212 - RNA, 21 nt, Human
gagaaaugaaaaaauauauau

SEQ ID NO: 3835213 - RNA, 12 nt, Human
gagaaaugagcu

SEQ ID NO: 3835214 - RNA, 11 nt, Human
gagaaauguaa

SEQ ID NO: 3835215 - RNA, 13 nt, Human
gagaaauguaaug

SEQ ID NO: 3835216 - RNA, 11 nt, Human
gagaaauuauu

SEQ ID NO: 3835217 - RNA, 22 nt, Human
gagaaauucuguuaaaaucuau

SEQ ID NO: 3835218 - RNA, 17 nt, Human
gagaacaaacagaucga

SEQ ID NO: 3835219 - RNA, 15 nt, Human
gagaacaaauauuca

SEQ ID NO: 3835220 - RNA, 19 nt, Human
gagaacaagaaagggccag

SEQ ID NO: 3835221 - RNA, 20 nt, Human
gagaacagaucuccaaagcu

SEQ ID NO: 3835222 - RNA, 21 nt, Human
gagaacagaucuccaaagcuu

SEQ ID NO: 3835223 - RNA, 13 nt, Human
gagaacaggacua

SEQ ID NO: 3835224 - RNA, 19 nt, Human
gagaacaugaaucaaaagu

SEQ ID NO: 3835225 - RNA, 21 nt, Human
gagaacccugcguggggacag

SEQ ID NO: 3835226 - RNA, 19 nt, Human
gagaaccuggaguuccuga

SEQ ID NO: 3835227 - RNA, 14 nt, Human
gagaaccuggccuu

SEQ ID NO: 3835228 - RNA, 21 nt, Human
gagaaccuggguugcagacag

SEQ ID NO: 3835229 - RNA, 22 nt, Human
gagaacucgcgcucaguaaacg

SEQ ID NO: 3835230 - RNA, 18 nt, Human
gagaacugaaaagagagc

SEQ ID NO: 3835231 - RNA, 23 nt, Human
gagaacugcauauguuucgcuga

SEQ ID NO: 3835232 - RNA, 16 nt, Human
gagaacuuuauuucca

SEQ ID NO: 3835233 - RNA, 17 nt, Human
gagaacuuuccauuuug

SEQ ID NO: 3835234 - RNA, 11 nt, Human
gagaagaaaau

SEQ ID NO: 3835235 - RNA, 20 nt, Human
gagaagaaaggugaguuuga

SEQ ID NO: 3835236 - RNA, 14 nt, Human
gagaagaagaaaaa

SEQ ID NO: 3835237 - RNA, 11 nt, Human
gagaagaauag

SEQ ID NO: 3835238 - RNA, 14 nt, Human
gagaagaauagccu

SEQ ID NO: 3835239 - RNA, 15 nt, Human
gagaagaauauuguu

SEQ ID NO: 3835240 - RNA, 19 nt, Human
gagaagaauauuguuccua

SEQ ID NO: 3835241 - RNA, 21 nt, Human
gagaagaauuuucagacccca

SEQ ID NO: 3835242 - RNA, 15 nt, Human
gagaagacaaaauua

SEQ ID NO: 3835243 - RNA, 16 nt, Human
gagaagagaaugcaca

SEQ ID NO: 3835244 - RNA, 15 nt, Human
gagaagagaggagag

SEQ ID NO: 3835245 - RNA, 15 nt, Human
gagaagagcgcagug

SEQ ID NO: 3835246 - RNA, 13 nt, Human
gagaagagcuguu

SEQ ID NO: 3835247 - RNA, 12 nt, Human
gagaagaggagc

SEQ ID NO: 3835248 - RNA, 19 nt, Human
gagaagagggccuguggga

SEQ ID NO: 3835249 - RNA, 23 nt, Human
gagaagauucuucccauucucca

SEQ ID NO: 3835250 - RNA, 18 nt, Human
gagaagcagugagccgca

SEQ ID NO: 3835251 - RNA, 19 nt, Human
gagaagcauauagaggcaa

SEQ ID NO: 3835252 - RNA, 15 nt, Human
gagaagccagcuugu

SEQ ID NO: 3835253 - RNA, 23 nt, Human
gagaagccaggaauuucccagga

SEQ ID NO: 3835254 - RNA, 19 nt, Human
gagaagccaucaccucaga

SEQ ID NO: 3835255 - RNA, 20 nt, Human
gagaagccaucaccucagau

SEQ ID NO: 3835256 - RNA, 15 nt, Human
gagaagccauugucu

SEQ ID NO: 3835257 - RNA, 22 nt, Human
gagaagccccuuccccauggga

SEQ ID NO: 3835258 - RNA, 16 nt, Human
gagaagccuucaagcu

SEQ ID NO: 3835259 - RNA, 18 nt, Human
gagaagccuucaagcucu

SEQ ID NO: 3835260 - RNA, 20 nt, Human
gagaagccuucaagcucuga

SEQ ID NO: 3835261 - RNA, 22 nt, Human
gagaagccuucaagcucugagg

SEQ ID NO: 3835262 - RNA, 13 nt, Human
gagaagccuucag

SEQ ID NO: 3835263 - RNA, 14 nt, Human
gagaagccuucagc

SEQ ID NO: 3835264 - RNA, 16 nt, Human
gagaagcggauuucca

SEQ ID NO: 3835265 - RNA, 16 nt, Human
gagaagcggcuggcag

SEQ ID NO: 3835266 - RNA, 19 nt, Human
gagaagcuccucuccccag

SEQ ID NO: 3835267 - RNA, 22 nt, Human
gagaagcuccucuccccagccc

SEQ ID NO: 3835268 - RNA, 13 nt, Human
gagaagcugcagg

SEQ ID NO: 3835269 - RNA, 11 nt, Human
gagaagcugcu

SEQ ID NO: 3835270 - RNA, 12 nt, Human
gagaagcugcuc

SEQ ID NO: 3835271 - RNA, 13 nt, Human
gagaagcugcuca

SEQ ID NO: 3835272 - RNA, 15 nt, Human
gagaagcuggggagg

SEQ ID NO: 3835273 - RNA, 14 nt, Human
gagaaggaaggaga

SEQ ID NO: 3835274 - RNA, 15 nt, Human
gagaaggagagaaag

SEQ ID NO: 3835275 - RNA, 13 nt, Human
gagaaggagcaga

SEQ ID NO: 3835276 - RNA, 12 nt, Human
gagaaggcagcc

SEQ ID NO: 3835277 - RNA, 22 nt, Human
gagaagucucagcuaagcucac

SEQ ID NO: 3835278 - RNA, 21 nt, Human
gagaagucuucuauuuauuua

SEQ ID NO: 3835279 - RNA, 20 nt, Human
gagaagugaaugcugggacu

SEQ ID NO: 3835280 - RNA, 15 nt, Human
gagaagugccccugc

SEQ ID NO: 3835281 - RNA, 16 nt, Human
gagaagugccccugcu

SEQ ID NO: 3835282 - RNA, 20 nt, Human
gagaagugccccugcugccu

SEQ ID NO: 3835283 - RNA, 16 nt, Human
gagaaguuucuggccc

SEQ ID NO: 3835284 - RNA, 17 nt, Human
gagaaguuuuguacaga

SEQ ID NO: 3835285 - RNA, 16 nt, Human
gagaaguuuuguuuuu

SEQ ID NO: 3835286 - RNA, 18 nt, Human
gagaauaagagaaagaaa

SEQ ID NO: 3835287 - RNA, 13 nt, Human
gagaauagaagga

SEQ ID NO: 3835288 - RNA, 16 nt, Human
gagaauagaaggaaac

SEQ ID NO: 3835289 - RNA, 20 nt, Human
gagaauauaacaugaaauga

SEQ ID NO: 3835290 - RNA, 14 nt, Human
gagaauauauacau

SEQ ID NO: 3835291 - RNA, 13 nt, Human
gagaaucacuuga

SEQ ID NO: 3835292 - RNA, 14 nt, Human
gagaaucacuugaa

SEQ ID NO: 3835293 - RNA, 15 nt, Human
gagaaucuauauuua

SEQ ID NO: 3835294 - RNA, 15 nt, Human
gagaaugaaagggcc

SEQ ID NO: 3835295 - RNA, 14 nt, Human
gagaaugagaaaug

SEQ ID NO: 3835296 - RNA, 20 nt, Human
gagaaugagagacacacuga

SEQ ID NO: 3835297 - RNA, 21 nt, Human
gagaaugagagacacacugaa

SEQ ID NO: 3835298 - RNA, 23 nt, Human
gagaaugaguccuugauuucaaa

SEQ ID NO: 3835299 - RNA, 15 nt, Human
gagaaugcacaaaca

SEQ ID NO: 3835300 - RNA, 22 nt, Human
gagaaugcacaaacagaggccg

SEQ ID NO: 3835301 - RNA, 16 nt, Human
gagaaugcacagauau

SEQ ID NO: 3835302 - RNA, 20 nt, Human
gagaaugcccuucuccuuau

SEQ ID NO: 3835303 - RNA, 19 nt, Human
gagaauggaaaccacaacu

SEQ ID NO: 3835304 - RNA, 20 nt, Human
gagaauggugugaacccggg

SEQ ID NO: 3835305 - RNA, 23 nt, Human
gagaauggugugaacccgggagc

SEQ ID NO: 3835306 - RNA, 15 nt, Human
gagaauguaagaacu

SEQ ID NO: 3835307 - RNA, 22 nt, Human
gagaauucuuacauguuuucuu

SEQ ID NO: 3835308 - RNA, 21 nt, Human
gagaauugcugaagggcauuc

SEQ ID NO: 3835309 - RNA, 19 nt, Human
gagaauugggcggcucuga

SEQ ID NO: 3835310 - RNA, 13 nt, Human
gagaauuucuaaa

SEQ ID NO: 3835311 - RNA, 20 nt, Human
gagacaaaaauuaucuauuu

SEQ ID NO: 3835312 - RNA, 18 nt, Human
gagacaaaucuaugccac

SEQ ID NO: 3835313 - RNA, 16 nt, Human
gagacaaauggaggcc

SEQ ID NO: 3835314 - RNA, 17 nt, Human
gagacaagaaaucccug

SEQ ID NO: 3835315 - RNA, 19 nt, Human
gagacaaugucugcagccc

SEQ ID NO: 3835316 - RNA, 15 nt, Human
gagacacaccugagg

SEQ ID NO: 3835317 - RNA, 18 nt, Human
gagacacacugaagaagc

SEQ ID NO: 3835318 - RNA, 16 nt, Human
gagacacagcgucccu

SEQ ID NO: 3835319 - RNA, 12 nt, Human
gagacaccucag

SEQ ID NO: 3835320 - RNA, 13 nt, Human
gagacaccucaga

SEQ ID NO: 3835321 - RNA, 21 nt, Human
gagacaccugcaccucccccc

SEQ ID NO: 3835322 - RNA, 15 nt, Human
gagacacuggccccu

SEQ ID NO: 3835323 - RNA, 16 nt, Human
gagacagaagcaggcu

SEQ ID NO: 3835324 - RNA, 18 nt, Human
gagacagaauguaucugu

SEQ ID NO: 3835325 - RNA, 20 nt, Human
gagacagaauguaucuguga

SEQ ID NO: 3835326 - RNA, 20 nt, Human
gagacagagccucgcucugu

SEQ ID NO: 3835327 - RNA, 20 nt, Human
gagacagagcgacagagcag

SEQ ID NO: 3835328 - RNA, 14 nt, Human
gagacagagcuggu

SEQ ID NO: 3835329 - RNA, 23 nt, Human
gagacagauaccuccaacccugc

SEQ ID NO: 3835330 - RNA, 14 nt, Human
gagacagccccaga

SEQ ID NO: 3835331 - RNA, 15 nt, Human
gagacagccccagag

SEQ ID NO: 3835332 - RNA, 23 nt, Human
gagacagcccgggcucugccucc

SEQ ID NO: 3835333 - RNA, 15 nt, Human
gagacagcucugcau

SEQ ID NO: 3835334 - RNA, 16 nt, Human
gagacagcucugcaua

SEQ ID NO: 3835335 - RNA, 18 nt, Human
gagacagcucugcauacu

SEQ ID NO: 3835336 - RNA, 21 nt, Human
gagacagcugauacuucauuu

SEQ ID NO: 3835337 - RNA, 19 nt, Human
gagacagcuugaucaaagg

SEQ ID NO: 3835338 - RNA, 19 nt, Human
gagacaggaaaauccucug

SEQ ID NO: 3835339 - RNA, 14 nt, Human
gagacaggcagagc

SEQ ID NO: 3835340 - RNA, 14 nt, Human
gagacaggguccug

SEQ ID NO: 3835341 - RNA, 12 nt, Human
gagacaggguuu

SEQ ID NO: 3835342 - RNA, 13 nt, Human
gagagagcuggag

SEQ ID NO: 3835343 - RNA, 20 nt, Human
gagagaggcuaaaauguuuu

SEQ ID NO: 3835344 - RNA, 17 nt, Human
gagagagguugaaaaac

SEQ ID NO: 3835345 - RNA, 18 nt, Human
gagagauauaucugaaaa

SEQ ID NO: 3835346 - RNA, 15 nt, Human
gagagaucaaagaug

SEQ ID NO: 3835347 - RNA, 18 nt, Human
gagagaugggagcuccuc

SEQ ID NO: 3835348 - RNA, 12 nt, Human
gagagaugugug

SEQ ID NO: 3835349 - RNA, 22 nt, Human
gagagauguguguugauacugu

SEQ ID NO: 3835350 - RNA, 17 nt, Human
gagagcaaagugaccug

SEQ ID NO: 3835351 - RNA, 15 nt, Human
gagagcaacauuuua

SEQ ID NO: 3835352 - RNA, 13 nt, Human
gagagcaacucug

SEQ ID NO: 3835353 - RNA, 17 nt, Human
gagagcaacucugagau

SEQ ID NO: 3835354 - RNA, 13 nt, Human
gagagcagagaau

SEQ ID NO: 3835355 - RNA, 14 nt, Human
gagagcagccagga

SEQ ID NO: 3835356 - RNA, 18 nt, Human
gagagcagcuucugccac

SEQ ID NO: 3835357 - RNA, 23 nt, Human
gagagcaggcuggcagcucucca

SEQ ID NO: 3835358 - RNA, 16 nt, Human
gagagcagugcuuuug

SEQ ID NO: 3835359 - RNA, 12 nt, Human
gagagcauaauu

SEQ ID NO: 3835360 - RNA, 14 nt, Human
gagagcaucaggcc

SEQ ID NO: 3835361 - RNA, 19 nt, Human
gagagccagagaagugaca

SEQ ID NO: 3835362 - RNA, 11 nt, Human
gagagccagcc

SEQ ID NO: 3835363 - RNA, 13 nt, Human
gagagccagcccu

SEQ ID NO: 3835364 - RNA, 14 nt, Human
gagagccagcccuc

SEQ ID NO: 3835365 - RNA, 20 nt, Human
gagagccagcccucccuguc

SEQ ID NO: 3835366 - RNA, 14 nt, Human
gagagccauuuugu

SEQ ID NO: 3835367 - RNA, 13 nt, Human
gagagcccagcca

SEQ ID NO: 3835368 - RNA, 14 nt, Human
gagagcccaggagc

SEQ ID NO: 3835369 - RNA, 15 nt, Human
gagagccccagcuga

SEQ ID NO: 3835370 - RNA, 19 nt, Human
gagagcccugaggccuaga

SEQ ID NO: 3835371 - RNA, 14 nt, Human
gagagcccugggac

SEQ ID NO: 3835372 - RNA, 16 nt, Human
gagagcccuucauuug

SEQ ID NO: 3835373 - RNA, 17 nt, Human
gagagccugcaggaucu

SEQ ID NO: 3835374 - RNA, 19 nt, Human
gagagccuggugcugcugc

SEQ ID NO: 3835375 - RNA, 13 nt, Human
gagagccuuccag

SEQ ID NO: 3835376 - RNA, 16 nt, Human
gagagccuuccagggg

SEQ ID NO: 3835377 - RNA, 20 nt, Human
gagagccuuccagggguggg

SEQ ID NO: 3835378 - RNA, 14 nt, Human
gagagcgcagcccg

SEQ ID NO: 3835379 - RNA, 22 nt, Human
gagagcgccugccccucccaga

SEQ ID NO: 3835380 - RNA, 21 nt, Human
gagagcggucucaggcuggug

SEQ ID NO: 3835381 - RNA, 21 nt, Human
gagagcgugcuccagccuggc

SEQ ID NO: 3835382 - RNA, 19 nt, Human
gagagcuagaacccggcag

SEQ ID NO: 3835383 - RNA, 18 nt, Human
gagagcuagaaccuggag

SEQ ID NO: 3835384 - RNA, 19 nt, Human
gagagcuagaaccuggagg

SEQ ID NO: 3835385 - RNA, 15 nt, Human
gagagcuagcagcag

SEQ ID NO: 3835386 - RNA, 22 nt, Human
gagagcuaggagcaaagccugu

SEQ ID NO: 3835387 - RNA, 13 nt, Human
gagagcugggugu

SEQ ID NO: 3835388 - RNA, 18 nt, Human
gagagcuguucccaaauu

SEQ ID NO: 3835389 - RNA, 16 nt, Human
gagagcuuaaugauaa

SEQ ID NO: 3835390 - RNA, 19 nt, Human
gagagcuuagggucucagg

SEQ ID NO: 3835391 - RNA, 22 nt, Human
gagagcuucuguugcugccuca

SEQ ID NO: 3835392 - RNA, 23 nt, Human
gagagcuuucuguccuuuuggca

SEQ ID NO: 3835393 - RNA, 20 nt, Human
gagaggaaauauugcugggg

SEQ ID NO: 3835394 - RNA, 19 nt, Human
gagaggacaauacuggggu

SEQ ID NO: 3835395 - RNA, 16 nt, Human
gagaggacgugggcgg

SEQ ID NO: 3835396 - RNA, 19 nt, Human
gagaggagagaggcagaga

SEQ ID NO: 3835397 - RNA, 19 nt, Human
gagaggagagccagagaag

SEQ ID NO: 3835398 - RNA, 22 nt, Human
gagaggagcgggaccuguggcu

SEQ ID NO: 3835399 - RNA, 13 nt, Human
gagaggaguucaa

SEQ ID NO: 3835400 - RNA, 16 nt, Human
gagaggaguucaauga

SEQ ID NO: 3835401 - RNA, 21 nt, Human
gagaggaugaauguaugugca

SEQ ID NO: 3835402 - RNA, 21 nt, Human
gagaggaugagagcccagagg

SEQ ID NO: 3835403 - RNA, 14 nt, Human
gagaggcaaugauu

SEQ ID NO: 3835404 - RNA, 20 nt, Human
gagaggcaauggcuccuuca

SEQ ID NO: 3835405 - RNA, 22 nt, Human
gagaggcagacuucccugaaug

SEQ ID NO: 3835406 - RNA, 12 nt, Human
gagaggcagaga

SEQ ID NO: 3835407 - RNA, 16 nt, Human
gagaggcagagaaaga

SEQ ID NO: 3835408 - RNA, 12 nt, Human
gagaggcaggca

SEQ ID NO: 3835409 - RNA, 15 nt, Human
gagaggcaggcauag

SEQ ID NO: 3835410 - RNA, 14 nt, Human
gagaggcauccagu

SEQ ID NO: 3835411 - RNA, 13 nt, Human
gagaggcccugga

SEQ ID NO: 3835412 - RNA, 17 nt, Human
gagaggccucgacccac

SEQ ID NO: 3835413 - RNA, 18 nt, Human
gagaggccuuuuggaaug

SEQ ID NO: 3835414 - RNA, 16 nt, Human
gagaggcuaaaauguu

SEQ ID NO: 3835415 - RNA, 20 nt, Human
gagaggcuaaaauguuuuca

SEQ ID NO: 3835416 - RNA, 22 nt, Human
gagaggcuaaaauguuuucagc

SEQ ID NO: 3835417 - RNA, 13 nt, Human
gagaggcuguggu

SEQ ID NO: 3835418 - RNA, 15 nt, Human
gagagggaaugugaa

SEQ ID NO: 3835419 - RNA, 19 nt, Human
gagagggacagcccacuga

SEQ ID NO: 3835420 - RNA, 10 nt, Human
gagagggaga

SEQ ID NO: 3835421 - RNA, 21 nt, Human
gagagggcaugcgcacaaggc

SEQ ID NO: 3835422 - RNA, 19 nt, Human
gagaggggaacagacugga

SEQ ID NO: 3835423 - RNA, 18 nt, Human
gagaggggaagaguguac

SEQ ID NO: 3835424 - RNA, 21 nt, Human
gagaggggacaaaacccaccu

SEQ ID NO: 3835425 - RNA, 22 nt, Human
gagaggggacaaaacccaccuu

SEQ ID NO: 3835426 - RNA, 14 nt, Human
gagaggggaggcca

SEQ ID NO: 3835427 - RNA, 13 nt, Human
gagaggggcacag

SEQ ID NO: 3835428 - RNA, 23 nt, Human
gagagggggccugggacuuccau

SEQ ID NO: 3835429 - RNA, 18 nt, Human
gagagggucuggagaagc

SEQ ID NO: 3835430 - RNA, 19 nt, Human
gagaggucaagcccaggag

SEQ ID NO: 3835431 - RNA, 21 nt, Human
gagaggugccagcaacugaau

SEQ ID NO: 3835432 - RNA, 23 nt, Human
gagaggugggccagucuguggau

SEQ ID NO: 3835433 - RNA, 17 nt, Human
gagagguugucuguggc

SEQ ID NO: 3835434 - RNA, 16 nt, Human
gagaguacagugagcc

SEQ ID NO: 3835435 - RNA, 22 nt, Human
gagagucccacugccucagguu

SEQ ID NO: 3835436 - RNA, 13 nt, Human
gagagucuagauu

SEQ ID NO: 3835437 - RNA, 18 nt, Human
gagagucuggcccuagac

SEQ ID NO: 3835438 - RNA, 17 nt, Human
gagagucuugcagugau

SEQ ID NO: 3835439 - RNA, 12 nt, Human
gagaguggcucc

SEQ ID NO: 3835440 - RNA, 16 nt, Human
gagaguggcuccuccc

SEQ ID NO: 3835441 - RNA, 17 nt, Human
gagaguggcuggggcau

SEQ ID NO: 3835442 - RNA, 16 nt, Human
gagaguuuagcuguaa

SEQ ID NO: 3835443 - RNA, 15 nt, Human
gagauaauaugagaa

SEQ ID NO: 3835444 - RNA, 18 nt, Human
gagauaauuacugccuug

SEQ ID NO: 3835445 - RNA, 19 nt, Human
gagauaauuacugccuuga

SEQ ID NO: 3835446 - RNA, 16 nt, Human
gagauacauacagaau

SEQ ID NO: 3835447 - RNA, 17 nt, Human
gagauaccaagaugcca

SEQ ID NO: 3835448 - RNA, 13 nt, Human
cuccucacugccc

SEQ ID NO: 3835449 - RNA, 15 nt, Human
cuccucacugcccgc

SEQ ID NO: 3835450 - RNA, 14 nt, Human
cuccucacuggcca

SEQ ID NO: 3835451 - RNA, 16 nt, Human
cuccucacuguaucca

SEQ ID NO: 3835452 - RNA, 18 nt, Human
cuccucaggcacacagcu

SEQ ID NO: 3835453 - RNA, 17 nt, Human
cuccucagggacucagg

SEQ ID NO: 3835454 - RNA, 14 nt, Human
cuccucagggaugg

SEQ ID NO: 3835455 - RNA, 23 nt, Human
cuccucaggguugagguccagcc

SEQ ID NO: 3835456 - RNA, 15 nt, Human
cuccucaguucuugc

SEQ ID NO: 3835457 - RNA, 14 nt, Human
cuccucaucucuaa

SEQ ID NO: 3835458 - RNA, 20 nt, Human
cuccucauggcagccuacuc

SEQ ID NO: 3835459 - RNA, 11 nt, Human
cuccucaugua

SEQ ID NO: 3835460 - RNA, 16 nt, Human
cuccuccaccaccgcc

SEQ ID NO: 3835461 - RNA, 13 nt, Human
cuccuccaccgcc

SEQ ID NO: 3835462 - RNA, 16 nt, Human
cuccuccacucucccc

SEQ ID NO: 3835463 - RNA, 13 nt, Human
cuccuccagaguc

SEQ ID NO: 3835464 - RNA, 20 nt, Human
cuccuccagccccuguccca

SEQ ID NO: 3835465 - RNA, 17 nt, Human
cuccuccaggccugccu

SEQ ID NO: 3835466 - RNA, 18 nt, Human
cuccuccaggccugccuc

SEQ ID NO: 3835467 - RNA, 19 nt, Human
cuccuccaggccugccucc

SEQ ID NO: 3835468 - RNA, 23 nt, Human
cuccuccaggccugccucccacu

SEQ ID NO: 3835469 - RNA, 13 nt, Human
cuccuccagggac

SEQ ID NO: 3835470 - RNA, 14 nt, Human
cuccuccagggaca

SEQ ID NO: 3835471 - RNA, 13 nt, Human
cuccuccagggcc

SEQ ID NO: 3835472 - RNA, 22 nt, Human
cuccuccagggccacgugccag

SEQ ID NO: 3835473 - RNA, 17 nt, Human
cuccuccagugugggcu

SEQ ID NO: 3835474 - RNA, 15 nt, Human
cuccuccaugggaga

SEQ ID NO: 3835475 - RNA, 18 nt, Human
cuccuccaugggagaaaa

SEQ ID NO: 3835476 - RNA, 17 nt, Human
cuccucccaggcgcccc

SEQ ID NO: 3835477 - RNA, 11 nt, Human
cuccucccaua

SEQ ID NO: 3835478 - RNA, 15 nt, Human
cuccucccauguuau

SEQ ID NO: 3835479 - RNA, 17 nt, Human
cuccuccccaaaucaau

SEQ ID NO: 3835480 - RNA, 19 nt, Human
cuccuccccaacugugggg

SEQ ID NO: 3835481 - RNA, 18 nt, Human
cuccuccccacccuccug

SEQ ID NO: 3835482 - RNA, 14 nt, Human
cuccuccccuggag

SEQ ID NO: 3835483 - RNA, 14 nt, Human
cuccucccggugcc

SEQ ID NO: 3835484 - RNA, 14 nt, Human
cuccucccucccag

SEQ ID NO: 3835485 - RNA, 14 nt, Human
cuccucccuccugc

SEQ ID NO: 3835486 - RNA, 14 nt, Human
cuccucccucugag

SEQ ID NO: 3835487 - RNA, 14 nt, Human
cuccucccugcauc

SEQ ID NO: 3835488 - RNA, 18 nt, Human
gaggaaccagagccaugg

SEQ ID NO: 3835489 - RNA, 16 nt, Human
gaggaacuguccagag

SEQ ID NO: 3835490 - RNA, 18 nt, Human
gaggaacuguccagagag

SEQ ID NO: 3835491 - RNA, 21 nt, Human
gaggaacuguccagagagcaa

SEQ ID NO: 3835492 - RNA, 23 nt, Human
gaggaacuucagacacaaaaguc

SEQ ID NO: 3835493 - RNA, 19 nt, Human
gaggaagaacggggcucuu

SEQ ID NO: 3835494 - RNA, 20 nt, Human
gaggaagaagcuuaggcagg

SEQ ID NO: 3835495 - RNA, 14 nt, Human
gaggaagcagaaua

SEQ ID NO: 3835496 - RNA, 19 nt, Human
gaggaagcccuaagacguc

SEQ ID NO: 3835497 - RNA, 18 nt, Human
gaggaagccgcuggggcc

SEQ ID NO: 3835498 - RNA, 22 nt, Human
gaggaaggaaacccagcucugg

SEQ ID NO: 3835499 - RNA, 19 nt, Human
gaggaaggaacagcaaugg

SEQ ID NO: 3835500 - RNA, 16 nt, Human
gaggaaggaugcaaag

SEQ ID NO: 3835501 - RNA, 16 nt, Human
gaggaaggauuguaaa

SEQ ID NO: 3835502 - RNA, 16 nt, Human
gaggaaguacaaacua

SEQ ID NO: 3835503 - RNA, 13 nt, Human
gaggaaguucaga

SEQ ID NO: 3835504 - RNA, 17 nt, Human
gaggaauaauuauuuau

SEQ ID NO: 3835505 - RNA, 14 nt, Human
gaggaauccagacc

SEQ ID NO: 3835506 - RNA, 15 nt, Human
gaggaauccuggcag

SEQ ID NO: 3835507 - RNA, 16 nt, Human
gaggaauccuggcagc

SEQ ID NO: 3835508 - RNA, 19 nt, Human
gaggaaucugugggucugg

SEQ ID NO: 3835509 - RNA, 22 nt, Human
gaggaaucugugggucugggag

SEQ ID NO: 3835510 - RNA, 18 nt, Human
gaggaauggacauuucua

SEQ ID NO: 3835511 - RNA, 14 nt, Human
gaggaaagagagca

SEQ ID NO: 3835512 - RNA, 20 nt, Human
gaggaaagagucuucaacau

SEQ ID NO: 3835513 - RNA, 21 nt, Human
gaggaaagagucuucaacaua

SEQ ID NO: 3835514 - RNA, 14 nt, Human
gaggaaaggccagc

SEQ ID NO: 3835515 - RNA, 18 nt, Human
gaggaaagucauuggcuu

SEQ ID NO: 3835516 - RNA, 21 nt, Human
gaggaaauaagaaaaaucaug

SEQ ID NO: 3835517 - RNA, 20 nt, Human
gaggaaaucaaagugcuauu

SEQ ID NO: 3835518 - RNA, 17 nt, Human
gaggaaaucccuucaua

SEQ ID NO: 3835519 - RNA, 19 nt, Human
gaggaacaaucggcugcau

SEQ ID NO: 3835520 - RNA, 15 nt, Human
gaggaaccgaaaggc

SEQ ID NO: 3835521 - RNA, 20 nt, Human
gaggaacuagccaccaacuc

SEQ ID NO: 3835522 - RNA, 16 nt, Human
gaggaacuccuuggcc

SEQ ID NO: 3835523 - RNA, 23 nt, Human
gaggaagaacggggcucuucuca

SEQ ID NO: 3835524 - RNA, 13 nt, Human
gaggaagaauggu

SEQ ID NO: 3835525 - RNA, 17 nt, Human
gaggaagagaaaaaaua

SEQ ID NO: 3835526 - RNA, 13 nt, Human
gaggaagagcagg

SEQ ID NO: 3835527 - RNA, 17 nt, Human
gaggaagagcaggcaca

SEQ ID NO: 3835528 - RNA, 19 nt, Human
gaggaagagugcaaaacau

SEQ ID NO: 3835529 - RNA, 12 nt, Human
gaggaagcagaa

SEQ ID NO: 3835530 - RNA, 13 nt, Human
gaggaagcagaau

SEQ ID NO: 3835531 - RNA, 16 nt, Human
gaggaagcagaauaaa

SEQ ID NO: 3835532 - RNA, 17 nt, Human
gaggaagcagaauaaag

SEQ ID NO: 3835533 - RNA, 13 nt, Human
gaggaagccgcug

SEQ ID NO: 3835534 - RNA, 18 nt, Human
gaggaagccugauuaaag

SEQ ID NO: 3835535 - RNA, 19 nt, Human
gaggaaggaaacccagcuc

SEQ ID NO: 3835536 - RNA, 20 nt, Human
gaggaaggaaacccagcucu

SEQ ID NO: 3835537 - RNA, 21 nt, Human
gaggaaggaaacccagcucug

SEQ ID NO: 3835538 - RNA, 14 nt, Human
gaggaaggagagaa

SEQ ID NO: 3835539 - RNA, 16 nt, Human
gaggaaggagagaagg

SEQ ID NO: 3835540 - RNA, 14 nt, Human
gaggaaggauugua

SEQ ID NO: 3835541 - RNA, 15 nt, Human
gaggaaggauuguaa

SEQ ID NO: 3835542 - RNA, 21 nt, Human
gaggaaggcaagagggggugg

SEQ ID NO: 3835543 - RNA, 16 nt, Human
gaggaaggcaggaaga

SEQ ID NO: 3835544 - RNA, 21 nt, Human
gaggaaggcaugccuggacaa

SEQ ID NO: 3835545 - RNA, 18 nt, Human
gaggaauaauuauuuauu

SEQ ID NO: 3835546 - RNA, 20 nt, Human
gaggaaucaacagggcagca

SEQ ID NO: 3835547 - RNA, 19 nt, Human
gaggaaucacucuugugga

SEQ ID NO: 3835548 - RNA, 17 nt, Human
gaggaauccuggcagcc

SEQ ID NO: 3835549 - RNA, 20 nt, Human
gaggaaucugugggucuggg

SEQ ID NO: 3835550 - RNA, 21 nt, Human
gaggaaucugugggucuggga

SEQ ID NO: 3835551 - RNA, 15 nt, Human
gaggaaugaaaaaag

SEQ ID NO: 3835552 - RNA, 17 nt, Human
gaggaaugcuggacugg

SEQ ID NO: 3835553 - RNA, 18 nt, Human
gaggaaugcuggacugga

SEQ ID NO: 3835554 - RNA, 13 nt, Human
gaggaauguauau

SEQ ID NO: 3835555 - RNA, 14 nt, Human
gaggaauguauaug

SEQ ID NO: 3835556 - RNA, 15 nt, Human
gaggacaaccauucc

SEQ ID NO: 3835557 - RNA, 12 nt, Human
gaggacaauuca

SEQ ID NO: 3835558 - RNA, 20 nt, Human
gaggacaauucaugaacuuc

SEQ ID NO: 3835559 - RNA, 21 nt, Human
gaggacaauucaugaacuucg

SEQ ID NO: 3835560 - RNA, 15 nt, Human
gaggacaauuuccag

SEQ ID NO: 3835561 - RNA, 20 nt, Human
gaggacaccuguacuggaga

SEQ ID NO: 3835562 - RNA, 21 nt, Human
gaggacaccuguacuggagag

SEQ ID NO: 3835563 - RNA, 13 nt, Human
gaggacagcuguc

SEQ ID NO: 3835564 - RNA, 22 nt, Human
gaggacagggaggugaccccag

SEQ ID NO: 3835565 - RNA, 22 nt, Human
gaggacaguauuuguggggagg

SEQ ID NO: 3835566 - RNA, 20 nt, Human
gaggacauaaugggguccug

SEQ ID NO: 3835567 - RNA, 14 nt, Human
gaggaccagggccu

SEQ ID NO: 3835568 - RNA, 16 nt, Human
gaggacccagacccag

SEQ ID NO: 3835569 - RNA, 15 nt, Human
gaggacccaggacag

SEQ ID NO: 3835570 - RNA, 16 nt, Human
gaggaccugacccuac

SEQ ID NO: 3835571 - RNA, 16 nt, Human
gaggaccugagccugc

SEQ ID NO: 3835572 - RNA, 18 nt, Human
gaggaccuguauuuaagc

SEQ ID NO: 3835573 - RNA, 20 nt, Human
gaggaccuguauuuaagcaa

SEQ ID NO: 3835574 - RNA, 19 nt, Human
gaggaccuuaucugugcgu

SEQ ID NO: 3835575 - RNA, 16 nt, Human
gaggacggugcaaccc

SEQ ID NO: 3835576 - RNA, 16 nt, Human
gaggacgugggcggca

SEQ ID NO: 3835577 - RNA, 18 nt, Human
gaggacuagaaccuggag

SEQ ID NO: 3835578 - RNA, 18 nt, Human
gaggacuguauuugugac

SEQ ID NO: 3835579 - RNA, 16 nt, Human
gaggacuugugucucu

SEQ ID NO: 3835580 - RNA, 16 nt, Human
gaggacuuuucuuugu

SEQ ID NO: 3835581 - RNA, 23 nt, Human
gaggacuuuucuuuguggcuucc

SEQ ID NO: 3835582 - RNA, 14 nt, Human
gaggagaaacugga

SEQ ID NO: 3835583 - RNA, 16 nt, Human
gaggagaacuugcugc

SEQ ID NO: 3835584 - RNA, 23 nt, Human
gaggagacggaggggaguagaga

SEQ ID NO: 3835585 - RNA, 11 nt, Human
gaggagagagg

SEQ ID NO: 3835586 - RNA, 12 nt, Human
gaggagagaggc

SEQ ID NO: 3835587 - RNA, 15 nt, Human
gaggagagaggcaga

SEQ ID NO: 3835588 - RNA, 16 nt, Human
gaggagagaggcagag

SEQ ID NO: 3835589 - RNA, 20 nt, Human
gaggagagauagccuguggc

SEQ ID NO: 3835590 - RNA, 13 nt, Human
gaggagagccaga

SEQ ID NO: 3835591 - RNA, 23 nt, Human
gaggagagccagagaagugacag

SEQ ID NO: 3835592 - RNA, 14 nt, Human
gaggagagccuggu

SEQ ID NO: 3835593 - RNA, 13 nt, Human
gaggagaggagag

SEQ ID NO: 3835594 - RNA, 14 nt, Human
gaggagaggagaga

SEQ ID NO: 3835595 - RNA, 16 nt, Human
gaggagaggagagagg

SEQ ID NO: 3835596 - RNA, 17 nt, Human
gaggagaggagagaggc

SEQ ID NO: 3835597 - RNA, 20 nt, Human
gaggagaggggaagggccag

SEQ ID NO: 3835598 - RNA, 17 nt, Human
gaggagaugcuccuugg

SEQ ID NO: 3835599 - RNA, 18 nt, Human
gaggagauucugccuuug

SEQ ID NO: 3835600 - RNA, 16 nt, Human
gaggagcagcaggagg

SEQ ID NO: 3835601 - RNA, 21 nt, Human
gaggagcauguuuuguauaca

SEQ ID NO: 3835602 - RNA, 16 nt, Human
gaggagccaccaguuc

SEQ ID NO: 3835603 - RNA, 18 nt, Human
gaggagccaccaguucuc

SEQ ID NO: 3835604 - RNA, 14 nt, Human
gaggagccagacag

SEQ ID NO: 3835605 - RNA, 21 nt, Human
gaggagcccaggccaggacuc

SEQ ID NO: 3835606 - RNA, 23 nt, Human
gaggagcccccacccuguuccug

SEQ ID NO: 3835607 - RNA, 14 nt, Human
gaggagccuguccu

SEQ ID NO: 3835608 - RNA, 18 nt, Human
gaggagccuguccugccu

SEQ ID NO: 3835609 - RNA, 19 nt, Human
gaggagccuguccugccug

SEQ ID NO: 3835610 - RNA, 13 nt, Human
gaggagcuucugg

SEQ ID NO: 3835611 - RNA, 13 nt, Human
gaggaggaaggca

SEQ ID NO: 3835612 - RNA, 13 nt, Human
gaggaggcagcag

SEQ ID NO: 3835613 - RNA, 15 nt, Human
gaggaggcagcagga

SEQ ID NO: 3835614 - RNA, 16 nt, Human
gaggaggcagcaggac

SEQ ID NO: 3835615 - RNA, 21 nt, Human
gaggaggccugggggcaggga

SEQ ID NO: 3835616 - RNA, 22 nt, Human
gaggaggccuugggcucugcug

SEQ ID NO: 3835617 - RNA, 11 nt, Human
gaggagggaga

SEQ ID NO: 3835618 - RNA, 14 nt, Human
gaggagggcaggca

SEQ ID NO: 3835619 - RNA, 17 nt, Human
gaggagggcggggggca

SEQ ID NO: 3835620 - RNA, 20 nt, Human
gaggagggcgugacucaccc

SEQ ID NO: 3835621 - RNA, 12 nt, Human
gaggaggggagg

SEQ ID NO: 3835622 - RNA, 16 nt, Human
gaggaggggccgcugc

SEQ ID NO: 3835623 - RNA, 18 nt, Human
gaggaggggccgcugcca

SEQ ID NO: 3835624 - RNA, 17 nt, Human
gaggagggugggggagg

SEQ ID NO: 3835625 - RNA, 18 nt, Human
gaggagguggcagcccug

SEQ ID NO: 3835626 - RNA, 20 nt, Human
gaggagguggcagcccugua

SEQ ID NO: 3835627 - RNA, 23 nt, Human
gaggaggugucucaggcugccug

SEQ ID NO: 3835628 - RNA, 15 nt, Human
gaggaggugugagga

SEQ ID NO: 3835629 - RNA, 17 nt, Human
gaggagguuuaggucaa

SEQ ID NO: 3835630 - RNA, 20 nt, Human
gaggagguuuggggucugcc

SEQ ID NO: 3835631 - RNA, 21 nt, Human
gaggaguaacaauacaaaugg

SEQ ID NO: 3835632 - RNA, 22 nt, Human
gaggaguaacaauacaaaugga

SEQ ID NO: 3835633 - RNA, 14 nt, Human
cucuccccuccagc

SEQ ID NO: 3835634 - RNA, 16 nt, Human
cucuccccuccagccu

SEQ ID NO: 3835635 - RNA, 20 nt, Human
cucuccccucuuauguaccu

SEQ ID NO: 3835636 - RNA, 15 nt, Human
cucuccccugaccug

SEQ ID NO: 3835637 - RNA, 19 nt, Human
cucuccccugcccccugca

SEQ ID NO: 3835638 - RNA, 20 nt, Human
cucuccccugcccccugcag

SEQ ID NO: 3835639 - RNA, 22 nt, Human
cucuccccugcccccugcagga

SEQ ID NO: 3835640 - RNA, 16 nt, Human
cucuccccugcccugc

SEQ ID NO: 3835641 - RNA, 23 nt, Human
cucucccggagguugggugggcc

SEQ ID NO: 3835642 - RNA, 17 nt, Human
cucucccgucagggccc

SEQ ID NO: 3835643 - RNA, 22 nt, Human
cucucccucuaggcucugccuu

SEQ ID NO: 3835644 - RNA, 18 nt, Human
cucucccucuggcccugc

SEQ ID NO: 3835645 - RNA, 21 nt, Human
cucucccucuggcccugccuu

SEQ ID NO: 3835646 - RNA, 22 nt, Human
cucucccucuggcccugccuuc

SEQ ID NO: 3835647 - RNA, 12 nt, Human
cucucccugacc

SEQ ID NO: 3835648 - RNA, 20 nt, Human
cucucccugacccuguauau

SEQ ID NO: 3835649 - RNA, 12 nt, Human
cucucccuggcc

SEQ ID NO: 3835650 - RNA, 13 nt, Human
cucucccuggccc

SEQ ID NO: 3835651 - RNA, 13 nt, Human
cucucccuuaccc

SEQ ID NO: 3835652 - RNA, 13 nt, Human
cucucccuucccu

SEQ ID NO: 3835653 - RNA, 13 nt, Human
cucucccuuggau

SEQ ID NO: 3835654 - RNA, 16 nt, Human
cucucccuugggcucu

SEQ ID NO: 3835655 - RNA, 17 nt, Human
cucuccgccccugagcc

SEQ ID NO: 3835656 - RNA, 21 nt, Human
cucuccguuuauuauaaacug

SEQ ID NO: 3835657 - RNA, 14 nt, Human
cucuccucaucucu

SEQ ID NO: 3835658 - RNA, 20 nt, Human
cucuccuccaagacacugug

SEQ ID NO: 3835659 - RNA, 15 nt, Human
cucuccuccagaguc

SEQ ID NO: 3835660 - RNA, 20 nt, Human
cucuccuccccaaggagaca

SEQ ID NO: 3835661 - RNA, 19 nt, Human
cucuccuccugcccaccug

SEQ ID NO: 3835662 - RNA, 18 nt, Human
cucuccucugcugcuggc

SEQ ID NO: 3835663 - RNA, 14 nt, Human
cucuccucuugcca

SEQ ID NO: 3835664 - RNA, 22 nt, Human
cucuccucuugccacugccucu

SEQ ID NO: 3835665 - RNA, 13 nt, Human
cucuccugccaca

SEQ ID NO: 3835666 - RNA, 15 nt, Human
cucuccugccccuug

SEQ ID NO: 3835667 - RNA, 12 nt, Human
cucuccugccua

SEQ ID NO: 3835668 - RNA, 22 nt, Human
cucuccuggccuauccgcugcc

SEQ ID NO: 3835669 - RNA, 13 nt, Human
cucuccuggcuuc

SEQ ID NO: 3835670 - RNA, 17 nt, Human
cucuccuggcuucccau

SEQ ID NO: 3835671 - RNA, 22 nt, Human
cucuccuggcuucccaucccca

SEQ ID NO: 3835672 - RNA, 13 nt, Human
gaggauuuugagu

SEQ ID NO: 3835673 - RNA, 13 nt, Human
gaggcaaaagaag

SEQ ID NO: 3835674 - RNA, 22 nt, Human
gaggcaaugggagcugaggcca

SEQ ID NO: 3835675 - RNA, 23 nt, Human
gaggcaaugucaggaacagaagg

SEQ ID NO: 3835676 - RNA, 20 nt, Human
gaggcacacagcugcagaga

SEQ ID NO: 3835677 - RNA, 24 nt, Human
gaggcacacagcugcagagacaga

SEQ ID NO: 3835678 - RNA, 16 nt, Human
gaggcacagagccaaa

SEQ ID NO: 3835679 - RNA, 17 nt, Human
gaggcacaugucagcaa

SEQ ID NO: 3835680 - RNA, 20 nt, Human
gaggcaccugguggccaugc

SEQ ID NO: 3835681 - RNA, 18 nt, Human
gaggcacugaagugcuua

SEQ ID NO: 3835682 - RNA, 20 nt, Human
gaggcagaaaauugcacaau

SEQ ID NO: 3835683 - RNA, 18 nt, Human
gaggcagaaagcagaggc

SEQ ID NO: 3835684 - RNA, 20 nt, Human
gaggcagaaagcagaggcug

SEQ ID NO: 3835685 - RNA, 23 nt, Human
gaggcagaacccuggugaggaag

SEQ ID NO: 3835686 - RNA, 15 nt, Human
gaggcagacagcagc

SEQ ID NO: 3835687 - RNA, 17 nt, Human
gaggcagagaaagaaga

SEQ ID NO: 3835688 - RNA, 21 nt, Human
gaggcagagaaagaagagaca

SEQ ID NO: 3835689 - RNA, 12 nt, Human
gaggcagagagc

SEQ ID NO: 3835690 - RNA, 22 nt, Human
gaggcagagagcggucucaggc

SEQ ID NO: 3835691 - RNA, 17 nt, Human
gaggcagccacuucggc

SEQ ID NO: 3835692 - RNA, 13 nt, Human
gaggcagcccagg

SEQ ID NO: 3835693 - RNA, 23 nt, Human
gaggcagccccauucugccugcc

SEQ ID NO: 3835694 - RNA, 23 nt, Human
gaggcagcgugaaagcagaugag

SEQ ID NO: 3835695 - RNA, 9 nt, Human
gaggcaggg

SEQ ID NO: 3835696 - RNA, 21 nt, Human
gaggcagggaacauggggagg

SEQ ID NO: 3835697 - RNA, 23 nt, Human
gaggcagggaacauggggaggag

SEQ ID NO: 3835698 - RNA, 14 nt, Human
gaggcagggaaguc

SEQ ID NO: 3835699 - RNA, 15 nt, Human
gaggcagggccuugc

SEQ ID NO: 3835700 - RNA, 18 nt, Human
gaggcagggccuugccca

SEQ ID NO: 3835701 - RNA, 21 nt, Human
gaggcagggccuugcccagag

SEQ ID NO: 3835702 - RNA, 21 nt, Human
gaggcaggggcuuccuggugc

SEQ ID NO: 3835703 - RNA, 23 nt, Human
gaggcaggggcuuccuggugcug

SEQ ID NO: 3835704 - RNA, 14 nt, Human
gaggcagggucuca

SEQ ID NO: 3835705 - RNA, 22 nt, Human
gaggcagggucucacucugucg

SEQ ID NO: 3835706 - RNA, 23 nt, Human
gaggcaguaccugggcaagcugg

SEQ ID NO: 3835707 - RNA, 16 nt, Human
gaggcaguuugaggau

SEQ ID NO: 3835708 - RNA, 17 nt, Human
gaggcaucgcaauguaa

SEQ ID NO: 3835709 - RNA, 20 nt, Human
gaggcaugugaugagaggaa

SEQ ID NO: 3835710 - RNA, 21 nt, Human
gaggcauuuguuugaacugau

SEQ ID NO: 3835711 - RNA, 18 nt, Human
gaggccaacacugugggu

SEQ ID NO: 3835712 - RNA, 22 nt, Human
gaggccaagaauauugcaaaau

SEQ ID NO: 3835713 - RNA, 19 nt, Human
gaggccaagaguggcccca

SEQ ID NO: 3835714 - RNA, 17 nt, Human
gaggccaaggugggagg

SEQ ID NO: 3835715 - RNA, 21 nt, Human
gaggccacacucagcacaagg

SEQ ID NO: 3835716 - RNA, 13 nt, Human
gaggccaccuccu

SEQ ID NO: 3835717 - RNA, 18 nt, Human
gaggccaccucuccaagg

SEQ ID NO: 3835718 - RNA, 16 nt, Human
gaggccacugaagagg

SEQ ID NO: 3835719 - RNA, 19 nt, Human
gaggccacugaagaggagg

SEQ ID NO: 3835720 - RNA, 19 nt, Human
gaggccagagacacaagcc

SEQ ID NO: 3835721 - RNA, 18 nt, Human
gaggccagagagggcgug

SEQ ID NO: 3835722 - RNA, 13 nt, Human
gaggccagcccca

SEQ ID NO: 3835723 - RNA, 20 nt, Human
gaggccagccccacccagga

SEQ ID NO: 3835724 - RNA, 16 nt, Human
gaggccagccuggccu

SEQ ID NO: 3835725 - RNA, 18 nt, Human
gaggccagccuggccucc

SEQ ID NO: 3835726 - RNA, 22 nt, Human
gaggccagccuggccuccugcc

SEQ ID NO: 3835727 - RNA, 13 nt, Human
gaggccagccuug

SEQ ID NO: 3835728 - RNA, 12 nt, Human
gaggccaggagu

SEQ ID NO: 3835729 - RNA, 15 nt, Human
gaggccagggcagag

SEQ ID NO: 3835730 - RNA, 19 nt, Human
gaggccagggcagagugag

SEQ ID NO: 3835731 - RNA, 14 nt, Human
gaggccaggugcag

SEQ ID NO: 3835732 - RNA, 14 nt, Human
gaggccaucuggag

SEQ ID NO: 3835733 - RNA, 22 nt, Human
gaggccaucuggagagcccaga

SEQ ID NO: 3835734 - RNA, 20 nt, Human
gaggccaugggccuccugug

SEQ ID NO: 3835735 - RNA, 23 nt, Human
gaggccauguuccaauaaacagg

SEQ ID NO: 3835736 - RNA, 14 nt, Human
gaggcccagagggc

SEQ ID NO: 3835737 - RNA, 16 nt, Human
gaggcccagagggccu

SEQ ID NO: 3835738 - RNA, 18 nt, Human
gaggcccaggcugccguc

SEQ ID NO: 3835739 - RNA, 12 nt, Human
gaggcccaggga

SEQ ID NO: 3835740 - RNA, 13 nt, Human
gaggcccaguuca

SEQ ID NO: 3835741 - RNA, 18 nt, Human
gaggcccaguucacccug

SEQ ID NO: 3835742 - RNA, 15 nt, Human
gaggccccaacccug

SEQ ID NO: 3835743 - RNA, 15 nt, Human
gaggccccacugaug

SEQ ID NO: 3835744 - RNA, 12 nt, Human
gaggccccagcc

SEQ ID NO: 3835745 - RNA, 13 nt, Human
gaggccccagccu

SEQ ID NO: 3835746 - RNA, 17 nt, Human
gaggcccccagcccagg

SEQ ID NO: 3835747 - RNA, 13 nt, Human
gaggccccuggac

SEQ ID NO: 3835748 - RNA, 15 nt, Human
gaggccccuggccca

SEQ ID NO: 3835749 - RNA, 20 nt, Human
gaggccccuucuagguggca

SEQ ID NO: 3835750 - RNA, 17 nt, Human
gaggccccuucucuccc

SEQ ID NO: 3835751 - RNA, 13 nt, Human
gaggcccggccuc

SEQ ID NO: 3835752 - RNA, 18 nt, Human
gaggcccucgggcccagc

SEQ ID NO: 3835753 - RNA, 20 nt, Human
gaggcccucgggcccagccc

SEQ ID NO: 3835754 - RNA, 21 nt, Human
gaggcccucgggcccagcccc

SEQ ID NO: 3835755 - RNA, 17 nt, Human
gaggcccucuggagugg

SEQ ID NO: 3835756 - RNA, 14 nt, Human
gaggcccugcaugg

SEQ ID NO: 3835757 - RNA, 13 nt, Human
gaggcccuggauc

SEQ ID NO: 3835758 - RNA, 22 nt, Human
gaggcccuggaucagcguggcc

SEQ ID NO: 3835759 - RNA, 23 nt, Human
gaggcccuggaucagcguggccu

SEQ ID NO: 3835760 - RNA, 22 nt, Human
gaggccgcuagaggccugagga

SEQ ID NO: 3835761 - RNA, 19 nt, Human
gaggccgggugcucagggc

SEQ ID NO: 3835762 - RNA, 18 nt, Human
gaggccguugauucacuu

SEQ ID NO: 3835763 - RNA, 15 nt, Human
gaggccuagacucug

SEQ ID NO: 3835764 - RNA, 15 nt, Human
gaggccuaggagggu

SEQ ID NO: 3835765 - RNA, 14 nt, Human
gaggccucaggugc

SEQ ID NO: 3835766 - RNA, 15 nt, Human
gaggccucaggugcu

SEQ ID NO: 3835767 - RNA, 23 nt, Human
gaggccuccuguggccugccagu

SEQ ID NO: 3835768 - RNA, 22 nt, Human
gaggccucucauuccagaggaa

SEQ ID NO: 3835769 - RNA, 22 nt, Human
gaggccugaagccagcugcccu

SEQ ID NO: 3835770 - RNA, 18 nt, Human
gaggccugacugccaagc

SEQ ID NO: 3835771 - RNA, 20 nt, Human
gaggccugacugccaagcca

SEQ ID NO: 3835772 - RNA, 13 nt, Human
gaggccugagacc

SEQ ID NO: 3835773 - RNA, 20 nt, Human
gaggccugagcgcuccugcc

SEQ ID NO: 3835774 - RNA, 21 nt, Human
gaggccugaggaugagcugga

SEQ ID NO: 3835775 - RNA, 22 nt, Human
gaggccugaggaugagcuggaa

SEQ ID NO: 3835776 - RNA, 22 nt, Human
gaggccugaucugcccaucgug

SEQ ID NO: 3835777 - RNA, 14 nt, Human
gagugacuagacgu

SEQ ID NO: 3835778 - RNA, 15 nt, Human
gagugacucaagaag

SEQ ID NO: 3835779 - RNA, 23 nt, Human
gagugacucaagaagugaagaau

SEQ ID NO: 3835780 - RNA, 15 nt, Human
gagugacucgagggu

SEQ ID NO: 3835781 - RNA, 13 nt, Human
gagugacucucca

SEQ ID NO: 3835782 - RNA, 23 nt, Human
gagugagacccagcccucauccc

SEQ ID NO: 3835783 - RNA, 14 nt, Human
gagugagacucugu

SEQ ID NO: 3835784 - RNA, 18 nt, Human
gagugagacucugucuca

SEQ ID NO: 3835785 - RNA, 15 nt, Human
gagugagaggggagg

SEQ ID NO: 3835786 - RNA, 24 nt, Human
gagugagcacuaaggugugcucug

SEQ ID NO: 3835787 - RNA, 15 nt, Human
gagugagcuacagag

SEQ ID NO: 3835788 - RNA, 22 nt, Human
gagugagcuacagagccgagca

SEQ ID NO: 3835789 - RNA, 22 nt, Human
gagugaggaauaguugagcccc

SEQ ID NO: 3835790 - RNA, 18 nt, Human
gagugaggaugucugggc

SEQ ID NO: 3835791 - RNA, 17 nt, Human
gagugaggcaggugaca

SEQ ID NO: 3835792 - RNA, 19 nt, Human
gagugagggguaaaagcug

SEQ ID NO: 3835793 - RNA, 14 nt, Human
gagugaguggcccu

SEQ ID NO: 3835794 - RNA, 19 nt, Human
gagugaguguggcuccccu

SEQ ID NO: 3835795 - RNA, 19 nt, Human
gagugauagucuuuugcuu

SEQ ID NO: 3835796 - RNA, 15 nt, Human
gagugauugcagcuu

SEQ ID NO: 3835797 - RNA, 16 nt, Human
gagugcaacaguagca

SEQ ID NO: 3835798 - RNA, 15 nt, Human
gagugcacagcuguc

SEQ ID NO: 3835799 - RNA, 15 nt, Human
gagugcaccaaagag

SEQ ID NO: 3835800 - RNA, 16 nt, Human
gagugcagccguuuga

SEQ ID NO: 3835801 - RNA, 16 nt, Human
gagugcaggcccaccc

SEQ ID NO: 3835802 - RNA, 14 nt, Human
gagugcaguccuga

SEQ ID NO: 3835803 - RNA, 17 nt, Human
gagugcaguccugauca

SEQ ID NO: 3835804 - RNA, 13 nt, Human
gagugcagugagc

SEQ ID NO: 3835805 - RNA, 14 nt, Human
gagugccaggacuc

SEQ ID NO: 3835806 - RNA, 20 nt, Human
gagugccaggacuccccagg

SEQ ID NO: 3835807 - RNA, 23 nt, Human
gagugccccauucuuuuguaauu

SEQ ID NO: 3835808 - RNA, 15 nt, Human
gagugccuucugugg

SEQ ID NO: 3835809 - RNA, 18 nt, Human
gagugccuuuugcagaag

SEQ ID NO: 3835810 - RNA, 21 nt, Human
gagugcuggcucacaguacag

SEQ ID NO: 3835811 - RNA, 15 nt, Human
gagugcuguuuuguu

SEQ ID NO: 3835812 - RNA, 18 nt, Human
gagugcuugcuuuucaug

SEQ ID NO: 3835813 - RNA, 17 nt, Human
gaguggaggaggccugg

SEQ ID NO: 3835814 - RNA, 20 nt, Human
gaguggagguuuauaguuaa

SEQ ID NO: 3835815 - RNA, 20 nt, Human
gaguggauagaugcccugcu

SEQ ID NO: 3835816 - RNA, 16 nt, Human
gaguggaugccucaga

SEQ ID NO: 3835817 - RNA, 14 nt, Human
gaguggcagcccag

SEQ ID NO: 3835818 - RNA, 16 nt, Human
gaguggcaggggacag

SEQ ID NO: 3835819 - RNA, 17 nt, Human
gaguggccccaccuggc

SEQ ID NO: 3835820 - RNA, 21 nt, Human
gaguggccccaccuggcccuc

SEQ ID NO: 3835821 - RNA, 22 nt, Human
gaguggcccuuucggauccagg

SEQ ID NO: 3835822 - RNA, 15 nt, Human
gaguggcuccucccg

SEQ ID NO: 3835823 - RNA, 19 nt, Human
gaguggcuucacuccugcu

SEQ ID NO: 3835824 - RNA, 20 nt, Human
gaguggcuucacuccugcug

SEQ ID NO: 3835825 - RNA, 20 nt, Human
gaguggggagacaccucaga

SEQ ID NO: 3835826 - RNA, 19 nt, Human
gagugggggagagcaggcu

SEQ ID NO: 3835827 - RNA, 21 nt, Human
gaguggucuuucuggagaggu

SEQ ID NO: 3835828 - RNA, 16 nt, Human
gaguggugcagacaga

SEQ ID NO: 3835829 - RNA, 14 nt, Human
gaguguaacaagaa

SEQ ID NO: 3835830 - RNA, 18 nt, Human
gaguguaacaagaaagga

SEQ ID NO: 3835831 - RNA, 17 nt, Human
gaguguaagugugagua

SEQ ID NO: 3835832 - RNA, 20 nt, Human
gaguguaagugugaguaaga

SEQ ID NO: 3835833 - RNA, 17 nt, Human
gaguguaauguuuguua

SEQ ID NO: 3835834 - RNA, 13 nt, Human
gaguguacaagua

SEQ ID NO: 3835835 - RNA, 15 nt, Human
gaguguacagagugg

SEQ ID NO: 3835836 - RNA, 15 nt, Human
gaguguacucccagg

SEQ ID NO: 3835837 - RNA, 18 nt, Human
gaguguacuuaacuauuc

SEQ ID NO: 3835838 - RNA, 17 nt, Human
gaguguagacuguggcu

SEQ ID NO: 3835839 - RNA, 13 nt, Human
gaguguaugagua

SEQ ID NO: 3835840 - RNA, 21 nt, Human
gaguguauguagggcauaaug

SEQ ID NO: 3835841 - RNA, 17 nt, Human
gagugucaaccagacag

SEQ ID NO: 3835842 - RNA, 19 nt, Human
gaguguccucuucccucuc

SEQ ID NO: 3835843 - RNA, 17 nt, Human
gagugucucugauaaaa

SEQ ID NO: 3835844 - RNA, 19 nt, Human
gagugucuuaauuaaaaga

SEQ ID NO: 3835845 - RNA, 13 nt, Human
gagugucuuucca

SEQ ID NO: 3835846 - RNA, 19 nt, Human
gagugucuuuccacggagc

SEQ ID NO: 3835847 - RNA, 21 nt, Human
gagugucuuuccacggagcca

SEQ ID NO: 3835848 - RNA, 14 nt, Human
gagugugacagggc

SEQ ID NO: 3835849 - RNA, 20 nt, Human
gagugugaccaaaaguuaca

SEQ ID NO: 3835850 - RNA, 18 nt, Human
gagugugauccaguuuuu

SEQ ID NO: 3835851 - RNA, 13 nt, Human
gagugugcaugga

SEQ ID NO: 3835852 - RNA, 15 nt, Human
gagugugcauggagg

SEQ ID NO: 3835853 - RNA, 17 nt, Human
gagugugccugaagucc

SEQ ID NO: 3835854 - RNA, 23 nt, Human
gagugugcugcuguaagaaaucu

SEQ ID NO: 3835855 - RNA, 17 nt, Human
gaguguggaagccggag

SEQ ID NO: 3835856 - RNA, 15 nt, Human
gaguguggacucugg

SEQ ID NO: 3835857 - RNA, 18 nt, Human
gagugugggaagggagag

SEQ ID NO: 3835858 - RNA, 21 nt, Human
gaguguguaauuuaaaauugu

SEQ ID NO: 3835859 - RNA, 17 nt, Human
gaguguguauuguuccc

SEQ ID NO: 3835860 - RNA, 19 nt, Human
gaguguguauuguucccag

SEQ ID NO: 3835861 - RNA, 14 nt, Human
gagugugugugugu

SEQ ID NO: 3835862 - RNA, 15 nt, Human
gaguguuauguauuu

SEQ ID NO: 3835863 - RNA, 19 nt, Human
gaguguuccccuuccacug

SEQ ID NO: 3835864 - RNA, 16 nt, Human
gaguguugaaacggau

SEQ ID NO: 3835865 - RNA, 18 nt, Human
gaguguuucuaauaaacu

SEQ ID NO: 3835866 - RNA, 13 nt, Human
gaguuaaaaugca

SEQ ID NO: 3835867 - RNA, 18 nt, Human
gaguuaacgggugaauaa

SEQ ID NO: 3835868 - RNA, 16 nt, Human
gaguuaagaagcuguu

SEQ ID NO: 3835869 - RNA, 21 nt, Human
gaguuaagaagcuguuguaca

SEQ ID NO: 3835870 - RNA, 21 nt, Human
gaguuaagaccuggcagcucu

SEQ ID NO: 3835871 - RNA, 13 nt, Human
gaguuacagacaa

SEQ ID NO: 3835872 - RNA, 18 nt, Human
gaguuacagcgagaggca

SEQ ID NO: 3835873 - RNA, 15 nt, Human
gaguuacaguucugu

SEQ ID NO: 3835874 - RNA, 17 nt, Human
gaguuacaguucugugg

SEQ ID NO: 3835875 - RNA, 17 nt, Human
gaguuacauuaauguua

SEQ ID NO: 3835876 - RNA, 21 nt, Human
gaguuagaauaauaaauauuu

SEQ ID NO: 3835877 - RNA, 19 nt, Human
cucugucucauccuccugg

SEQ ID NO: 3835878 - RNA, 21 nt, Human
cucugucucauccuccuggaa

SEQ ID NO: 3835879 - RNA, 23 nt, Human
cucugucucaugugugcucuucu

SEQ ID NO: 3835880 - RNA, 18 nt, Human
cucugucucgagcgcccu

SEQ ID NO: 3835881 - RNA, 22 nt, Human
cucugucucgagcgcccugcag

SEQ ID NO: 3835882 - RNA, 17 nt, Human
cucugucuucaccugau

SEQ ID NO: 3835883 - RNA, 23 nt, Human
cucugugaacgauuuagaaagaa

SEQ ID NO: 3835884 - RNA, 18 nt, Human
cucugugaccaaugucuu

SEQ ID NO: 3835885 - RNA, 19 nt, Human
cucugugaccaaugucuug

SEQ ID NO: 3835886 - RNA, 12 nt, Human
cucugugaccca

SEQ ID NO: 3835887 - RNA, 24 nt, Human
cucugugacccacuucucaucaca

SEQ ID NO: 3835888 - RNA, 16 nt, Human
cucugugaccucaggc

SEQ ID NO: 3835889 - RNA, 24 nt, Human
cucugugaccucaggcacuagccu

SEQ ID NO: 3835890 - RNA, 14 nt, Human
cucugugacugaug

SEQ ID NO: 3835891 - RNA, 19 nt, Human
cucugugagaagguuuauu

SEQ ID NO: 3835892 - RNA, 21 nt, Human
cucugugagcaucacaguuuu

SEQ ID NO: 3835893 - RNA, 17 nt, Human
cucugugccagagccug

SEQ ID NO: 3835894 - RNA, 18 nt, Human
cucugugccagagccugg

SEQ ID NO: 3835895 - RNA, 19 nt, Human
cucugugccagagccuggg

SEQ ID NO: 3835896 - RNA, 21 nt, Human
cucugugccagagccuggggc

SEQ ID NO: 3835897 - RNA, 12 nt, Human
cucugugcccau

SEQ ID NO: 3835898 - RNA, 14 nt, Human
cucugugcccaugg

SEQ ID NO: 3835899 - RNA, 23 nt, Human
cucugugcccaugggcacugcug

SEQ ID NO: 3835900 - RNA, 13 nt, Human
cucugugccuucg

SEQ ID NO: 3835901 - RNA, 14 nt, Human
cucugugcugacau

SEQ ID NO: 3835902 - RNA, 12 nt, Human
cucugugcuggc

SEQ ID NO: 3835903 - RNA, 16 nt, Human
cucugugcuggccagc

SEQ ID NO: 3835904 - RNA, 14 nt, Human
cucugugcugugga

SEQ ID NO: 3835905 - RNA, 21 nt, Human
cucugugcuuugacucaccug

SEQ ID NO: 3835906 - RNA, 16 nt, Human
cucuguggcgagccau

SEQ ID NO: 3835907 - RNA, 17 nt, Human
cucugugggugaugggg

SEQ ID NO: 3835908 - RNA, 22 nt, Human
cucugugggugauggggagggg

SEQ ID NO: 3835909 - RNA, 16 nt, Human
cucuguggugucugcc

SEQ ID NO: 3835910 - RNA, 18 nt, Human
cucuguguauuugcuuuu

SEQ ID NO: 3835911 - RNA, 18 nt, Human
cucugugucacuggcugc

SEQ ID NO: 3835912 - RNA, 19 nt, Human
cucugugucagguggggca

SEQ ID NO: 3835913 - RNA, 20 nt, Human
cucuguguugugaaugucau

SEQ ID NO: 3835914 - RNA, 22 nt, Human
cucuguuacacuuuuuggaagu

SEQ ID NO: 3835915 - RNA, 18 nt, Human
cucuguucaaagcugccu

SEQ ID NO: 3835916 - RNA, 21 nt, Human
cucuguucaguaacagggccu

SEQ ID NO: 3835917 - RNA, 15 nt, Human
cucuguucaguguaa

SEQ ID NO: 3835918 - RNA, 18 nt, Human
cucuguucaguguaaaua

SEQ ID NO: 3835919 - RNA, 18 nt, Human
cucuguucauuccuccag

SEQ ID NO: 3835920 - RNA, 19 nt, Human
cucuguucauuccuccagg

SEQ ID NO: 3835921 - RNA, 14 nt, Human
cucuugagggagcu

SEQ ID NO: 3835922 - RNA, 15 nt, Human
cucuugagggagcuu

SEQ ID NO: 3835923 - RNA, 23 nt, Human
cucuugaguuguuuuuguauauu

SEQ ID NO: 3835924 - RNA, 19 nt, Human
cucuugauaccccccucug

SEQ ID NO: 3835925 - RNA, 21 nt, Human
cucuugaugccuggcggggug

SEQ ID NO: 3835926 - RNA, 20 nt, Human
cucuugcaauccacaaucug

SEQ ID NO: 3835927 - RNA, 19 nt, Human
cucuugcacccgccucucc

SEQ ID NO: 3835928 - RNA, 20 nt, Human
cucuugcacccgccucuccc

SEQ ID NO: 3835929 - RNA, 15 nt, Human
cucuugcagagaagc

SEQ ID NO: 3835930 - RNA, 17 nt, Human
cucuugcagagaagccu

SEQ ID NO: 3835931 - RNA, 14 nt, Human
cucuugcaggucuc

SEQ ID NO: 3835932 - RNA, 22 nt, Human
cucuugccaaccuguaauaaau

SEQ ID NO: 3835933 - RNA, 16 nt, Human
cucuugccacugccuc

SEQ ID NO: 3835934 - RNA, 18 nt, Human
cucuugccacugccucuu

SEQ ID NO: 3835935 - RNA, 14 nt, Human
cucuugcccauccu

SEQ ID NO: 3835936 - RNA, 16 nt, Human
cucuugcccauccuga

SEQ ID NO: 3835937 - RNA, 14 nt, Human
cucuugcccuuccc

SEQ ID NO: 3835938 - RNA, 19 nt, Human
cucuugcccuucccugucc

SEQ ID NO: 3835939 - RNA, 20 nt, Human
cucuugccgaggagccaggc

SEQ ID NO: 3835940 - RNA, 18 nt, Human
cucuugccucaaccuccc

SEQ ID NO: 3835941 - RNA, 21 nt, Human
cucuugccucagcuuccccag

SEQ ID NO: 3835942 - RNA, 22 nt, Human
cucuugccucagcuuccccagu

SEQ ID NO: 3835943 - RNA, 21 nt, Human
cucuugcuaaucagugucuca

SEQ ID NO: 3835944 - RNA, 22 nt, Human
cucuugcuaaucagugucucac

SEQ ID NO: 3835945 - RNA, 16 nt, Human
cucuugcuauugaauu

SEQ ID NO: 3835946 - RNA, 13 nt, Human
cucuugcucuuuc

SEQ ID NO: 3835947 - RNA, 12 nt, Human
cucuugcugucu

SEQ ID NO: 3835948 - RNA, 15 nt, Human
cucuugcugucucug

SEQ ID NO: 3835949 - RNA, 12 nt, Human
cucuuggaccuc

SEQ ID NO: 3835950 - RNA, 17 nt, Human
cucuuggaccucugcuc

SEQ ID NO: 3835951 - RNA, 15 nt, Human
cucuuggagaagucu

SEQ ID NO: 3835952 - RNA, 18 nt, Human
cucuuggagaccuuaccc

SEQ ID NO: 3835953 - RNA, 22 nt, Human
cucuuggagccugcagagcugc

SEQ ID NO: 3835954 - RNA, 15 nt, Human
cucuuggagcuguga

SEQ ID NO: 3835955 - RNA, 15 nt, Human
cucuuggcuggaccc

SEQ ID NO: 3835956 - RNA, 20 nt, Human
cucuuggcuggacccagcca

SEQ ID NO: 3835957 - RNA, 19 nt, Human
cucuugggaaauaugucaa

SEQ ID NO: 3835958 - RNA, 15 nt, Human
cucuugggcaauauu

SEQ ID NO: 3835959 - RNA, 16 nt, Human
cucuugggcugagacu

SEQ ID NO: 3835960 - RNA, 17 nt, Human
cucuugggcugagacug

SEQ ID NO: 3835961 - RNA, 23 nt, Human
cucuuggggaguuuagggugggg

SEQ ID NO: 3835962 - RNA, 19 nt, Human
cucuugguccugcugcagu

SEQ ID NO: 3835963 - RNA, 16 nt, Human
cucuuggucuucccag

SEQ ID NO: 3835964 - RNA, 18 nt, Human
cucuuggucuucccaggc

SEQ ID NO: 3835965 - RNA, 14 nt, Human
cucuuguaaagacu

SEQ ID NO: 3835966 - RNA, 15 nt, Human
cucuuguaaagacug

SEQ ID NO: 3835967 - RNA, 17 nt, Human
cucuuguaaauaaagcc

SEQ ID NO: 3835968 - RNA, 17 nt, Human
cucuuguaagauuuuga

SEQ ID NO: 3835969 - RNA, 19 nt, Human
cucuuguaagauuuugaaa

SEQ ID NO: 3835970 - RNA, 20 nt, Human
cucuuguagcccaggcugga

SEQ ID NO: 3835971 - RNA, 21 nt, Human
cucuuguaucccuagugcucc

SEQ ID NO: 3835972 - RNA, 16 nt, Human
cucuugucccacgugu

SEQ ID NO: 3835973 - RNA, 18 nt, Human
cucuugucccacgugucu

SEQ ID NO: 3835974 - RNA, 12 nt, Human
cucuugucuccc

SEQ ID NO: 3835975 - RNA, 14 nt, Human
cucuugucuccccu

SEQ ID NO: 3835976 - RNA, 16 nt, Human
cucuugucuccccugu

SEQ ID NO: 3835977 - RNA, 17 nt, Human
cucuugucuuccuauuu

SEQ ID NO: 3835978 - RNA, 23 nt, Human
cucuugucuuccuauuucagaag

SEQ ID NO: 3835979 - RNA, 20 nt, Human
cucuugugaggaaagucauu

SEQ ID NO: 3835980 - RNA, 17 nt, Human
cucuugugauuucuuua

SEQ ID NO: 3835981 - RNA, 16 nt, Human
cucuuguucuuacuuu

SEQ ID NO: 3835982 - RNA, 11 nt, Human
cucuuguugag

SEQ ID NO: 3835983 - RNA, 13 nt, Human
cucuuguuucucc

SEQ ID NO: 3835984 - RNA, 15 nt, Human
cucuuguuuuguuug

SEQ ID NO: 3835985 - RNA, 18 nt, Human
cucuuguuuuguuugucu

SEQ ID NO: 3835986 - RNA, 20 nt, Human
cucuuguuuuuauuaauuua

SEQ ID NO: 3835987 - RNA, 13 nt, Human
cucuuuaaaaaca

SEQ ID NO: 3835988 - RNA, 12 nt, Human
cucuuuaaaaca

SEQ ID NO: 3835989 - RNA, 14 nt, Human
cucuuuaaaacaaa

SEQ ID NO: 3835990 - RNA, 18 nt, Human
cucuuuaacucaggacuc

SEQ ID NO: 3835991 - RNA, 21 nt, Human
cucuuuaagaguuaguuucuu

SEQ ID NO: 3835992 - RNA, 19 nt, Human
cucuuuaagggcaugccuu

SEQ ID NO: 3835993 - RNA, 22 nt, Human
cucuuuaagggcaugccuugug

SEQ ID NO: 3835994 - RNA, 21 nt, Human
cucuuuaaugucacaggcagg

SEQ ID NO: 3835995 - RNA, 23 nt, Human
cucuuuaaugucacaggcagguc

SEQ ID NO: 3835996 - RNA, 12 nt, Human
cucuuuagccag

SEQ ID NO: 3835997 - RNA, 17 nt, Human
cucuuuaugaucuggcc

SEQ ID NO: 3835998 - RNA, 13 nt, Human
cucuuuauuuucc

SEQ ID NO: 3835999 - RNA, 22 nt, Human
cucuuuccaguggaucauaaga

SEQ ID NO: 3836000 - RNA, 17 nt, Human
cucuuuccaucuacccu

SEQ ID NO: 3836001 - RNA, 18 nt, Human
cucuuuccaugacaucaa

SEQ ID NO: 3836002 - RNA, 18 nt, Human
cucuuucccacccagccu

SEQ ID NO: 3836003 - RNA, 10 nt, Human
cucuuucccu

SEQ ID NO: 3836004 - RNA, 15 nt, Human
cucuuucccuggucc

SEQ ID NO: 3836005 - RNA, 17 nt, Human
cucuuucccuggucccu

SEQ ID NO: 3836006 - RNA, 16 nt, Human
cucuuuccuucuugcc

SEQ ID NO: 3836007 - RNA, 15 nt, Human
cucuuucgucacccu

SEQ ID NO: 3836008 - RNA, 18 nt, Human
cucuuucgucacccuugg

SEQ ID NO: 3836009 - RNA, 16 nt, Human
cucuuucuaaugcuga

SEQ ID NO: 3836010 - RNA, 17 nt, Human
cucuuucuauuguuucu

SEQ ID NO: 3836011 - RNA, 14 nt, Human
cucuuucucucccc

SEQ ID NO: 3836012 - RNA, 14 nt, Human
cucuuucucucuuc

SEQ ID NO: 3836013 - RNA, 17 nt, Human
cucuuucucugccagug

SEQ ID NO: 3836014 - RNA, 13 nt, Human
cucuuucucuuuc

SEQ ID NO: 3836015 - RNA, 18 nt, Human
cucuuucugagugccuuc

SEQ ID NO: 3836016 - RNA, 19 nt, Human
cucuuucugagugccuucu

SEQ ID NO: 3836017 - RNA, 23 nt, Human
cucuuucugagugccuucugugg

SEQ ID NO: 3836018 - RNA, 19 nt, Human
cucuuucugucccuucugu

SEQ ID NO: 3836019 - RNA, 15 nt, Human
cucuuucuucccaug

SEQ ID NO: 3836020 - RNA, 14 nt, Human
cucuuucuuccuuu

SEQ ID NO: 3836021 - RNA, 23 nt, Human
cucuuucuuccuuuacuuucccu

SEQ ID NO: 3836022 - RNA, 18 nt, Human
cucuuucuucucugcugc

SEQ ID NO: 3836023 - RNA, 11 nt, Human
cucuuugaaac

SEQ ID NO: 3836024 - RNA, 22 nt, Human
cucuuugaaauagucuguguga

SEQ ID NO: 3836025 - RNA, 23 nt, Human
cucuuugagauagaagaacugca

SEQ ID NO: 3836026 - RNA, 14 nt, Human
cucuuugauuauuu

SEQ ID NO: 3836027 - RNA, 18 nt, Human
cucuuugauuauuugcau

SEQ ID NO: 3836028 - RNA, 20 nt, Human
cucuuugauuauuugcaugu

SEQ ID NO: 3836029 - RNA, 21 nt, Human
cucuuugauuauuugcauguu

SEQ ID NO: 3836030 - RNA, 12 nt, Human
cucuuugcugca

SEQ ID NO: 3836031 - RNA, 14 nt, Human
cucuuugcuuugcu

SEQ ID NO: 3836032 - RNA, 13 nt, Human
cucuuuggaaaag

SEQ ID NO: 3836033 - RNA, 18 nt, Human
cucuuuggacacucacac

SEQ ID NO: 3836034 - RNA, 21 nt, Human
cucuuugggaauguuugucuc

SEQ ID NO: 3836035 - RNA, 22 nt, Human
cucuuuggucuacacugugcug

SEQ ID NO: 3836036 - RNA, 14 nt, Human
cucuuugucuaaaa

SEQ ID NO: 3836037 - RNA, 21 nt, Human
cucuuugucuaaaacaauaaa

SEQ ID NO: 3836038 - RNA, 18 nt, Human
cucuuuguggggcuuggc

SEQ ID NO: 3836039 - RNA, 17 nt, Human
cucuuuguucucagcuc

SEQ ID NO: 3836040 - RNA, 19 nt, Human
cucuuuguucucagcuccc

SEQ ID NO: 3836041 - RNA, 23 nt, Human
cucuuuuacccuggccccucucc

SEQ ID NO: 3836042 - RNA, 14 nt, Human
gauacaaucagcug

SEQ ID NO: 3836043 - RNA, 13 nt, Human
gauacaaugcugu

SEQ ID NO: 3836044 - RNA, 22 nt, Human
gauacaauguauuuauuuaaaa

SEQ ID NO: 3836045 - RNA, 21 nt, Human
gauacacccaaaguaucagga

SEQ ID NO: 3836046 - RNA, 21 nt, Human
gauacaccgggccuggagaac

SEQ ID NO: 3836047 - RNA, 22 nt, Human
gauacacugaaguuaacagaga

SEQ ID NO: 3836048 - RNA, 19 nt, Human
gauacaggaaaagcugcug

SEQ ID NO: 3836049 - RNA, 23 nt, Human
gauacaggaaaagcugcugacag

SEQ ID NO: 3836050 - RNA, 18 nt, Human
gauacagucaacaagccu

SEQ ID NO: 3836051 - RNA, 19 nt, Human
gauacagucccuaaagaaa

SEQ ID NO: 3836052 - RNA, 19 nt, Human
gauacaguuacucagaauu

SEQ ID NO: 3836053 - RNA, 23 nt, Human
gauacaguuacucagaauucucu

SEQ ID NO: 3836054 - RNA, 19 nt, Human
gauacaguuuucagaaaaa

SEQ ID NO: 3836055 - RNA, 14 nt, Human
gauacauacagaau

SEQ ID NO: 3836056 - RNA, 13 nt, Human
gauacaucacugc

SEQ ID NO: 3836057 - RNA, 14 nt, Human
gauacaucacugcu

SEQ ID NO: 3836058 - RNA, 16 nt, Human
gauacaucacugcuug

SEQ ID NO: 3836059 - RNA, 17 nt, Human
gauacaucacugcuuga

SEQ ID NO: 3836060 - RNA, 21 nt, Human
gauacaucacugcuugaugaa

SEQ ID NO: 3836061 - RNA, 23 nt, Human
gauacauccaaagcagacagcuc

SEQ ID NO: 3836062 - RNA, 17 nt, Human
gauaccagguugaaaga

SEQ ID NO: 3836063 - RNA, 18 nt, Human
gauaccauauacagcuca

SEQ ID NO: 3836064 - RNA, 19 nt, Human
gauaccaugcuguaaggau

SEQ ID NO: 3836065 - RNA, 14 nt, Human
gaugguucuagcau

SEQ ID NO: 3836066 - RNA, 20 nt, Human
gauguaaacagugccugcug

SEQ ID NO: 3836067 - RNA, 21 nt, Human
gauguaaacagugccugcuga

SEQ ID NO: 3836068 - RNA, 14 nt, Human
gauguaaagauguu

SEQ ID NO: 3836069 - RNA, 13 nt, Human
gauguaaaugaag

SEQ ID NO: 3836070 - RNA, 12 nt, Human
gauguaaauuuu

SEQ ID NO: 3836071 - RNA, 17 nt, Human
gauguaaggaugggcau

SEQ ID NO: 3836072 - RNA, 22 nt, Human
gauguaauacuucuugugugua

SEQ ID NO: 3836073 - RNA, 16 nt, Human
gauguacaauuaaaaa

SEQ ID NO: 3836074 - RNA, 18 nt, Human
gauguacagucugucaug

SEQ ID NO: 3836075 - RNA, 15 nt, Human
gauguacauuuccaa

SEQ ID NO: 3836076 - RNA, 22 nt, Human
gauguacauuuccaaauucaca

SEQ ID NO: 3836077 - RNA, 19 nt, Human
gauguaccaugaaacaaag

SEQ ID NO: 3836078 - RNA, 17 nt, Human
gauguagaggagaaacu

SEQ ID NO: 3836079 - RNA, 18 nt, Human
gauguagaggagaaacug

SEQ ID NO: 3836080 - RNA, 17 nt, Human
gauguagauuuauuuca

SEQ ID NO: 3836081 - RNA, 18 nt, Human
gauguagcagaauauuuc

SEQ ID NO: 3836082 - RNA, 20 nt, Human
gauguaggguaaggugccuu

SEQ ID NO: 3836083 - RNA, 13 nt, Human
gauguaguauuuu

SEQ ID NO: 3836084 - RNA, 13 nt, Human
gauguaucugagu

SEQ ID NO: 3836085 - RNA, 21 nt, Human
gauguaugaauacagcagcaa

SEQ ID NO: 3836086 - RNA, 18 nt, Human
gaugucaauuucuguguu

SEQ ID NO: 3836087 - RNA, 13 nt, Human
gaugucacagggc

SEQ ID NO: 3836088 - RNA, 22 nt, Human
gaugucagccgagccgggccug

SEQ ID NO: 3836089 - RNA, 16 nt, Human
gaugucauacagagaa

SEQ ID NO: 3836090 - RNA, 17 nt, Human
gaugucauacagagaag

SEQ ID NO: 3836091 - RNA, 21 nt, Human
gaugucaucccauugucuucu

SEQ ID NO: 3836092 - RNA, 20 nt, Human
gaugucccuuucuuggccag

SEQ ID NO: 3836093 - RNA, 22 nt, Human
cugacagcaugugcccuccuga

SEQ ID NO: 3836094 - RNA, 20 nt, Human
cugacaggcaaugcuggcug

SEQ ID NO: 3836095 - RNA, 16 nt, Human
cugacaguuuuucugu

SEQ ID NO: 3836096 - RNA, 13 nt, Human
cugacaucacagc

SEQ ID NO: 3836097 - RNA, 19 nt, Human
cugacaucagagguaucuu

SEQ ID NO: 3836098 - RNA, 15 nt, Human
cugacaucuugaauc

SEQ ID NO: 3836099 - RNA, 23 nt, Human
cugacaugaagcuguugugugag

SEQ ID NO: 3836100 - RNA, 16 nt, Human
cugacaugauuccuuc

SEQ ID NO: 3836101 - RNA, 20 nt, Human
cugacaugcccucccuucuc

SEQ ID NO: 3836102 - RNA, 13 nt, Human
cugacauggcucu

SEQ ID NO: 3836103 - RNA, 17 nt, Human
cugacauggcucuggac

SEQ ID NO: 3836104 - RNA, 21 nt, Human
cugacauguggggccagguca

SEQ ID NO: 3836105 - RNA, 17 nt, Human
cugacauucaccugccc

SEQ ID NO: 3836106 - RNA, 18 nt, Human
cugacauuccuugcugaa

SEQ ID NO: 3836107 - RNA, 17 nt, Human
cugacauuguuggccaa

SEQ ID NO: 3836108 - RNA, 22 nt, Human
cugacauuguuggccaaagcca

SEQ ID NO: 3836109 - RNA, 14 nt, Human
cugaccaacaggcu

SEQ ID NO: 3836110 - RNA, 15 nt, Human
cugaccaauauugua

SEQ ID NO: 3836111 - RNA, 20 nt, Human
cugaccaauauuguacaguu

SEQ ID NO: 3836112 - RNA, 21 nt, Human
cugaccaauauuguacaguuu

SEQ ID NO: 3836113 - RNA, 15 nt, Human
cugaccacacgcggg

SEQ ID NO: 3836114 - RNA, 20 nt, Human
cugaccacacuuccugucca

SEQ ID NO: 3836115 - RNA, 13 nt, Human
cugaccacccucc

SEQ ID NO: 3836116 - RNA, 22 nt, Human
cugaccacggacguuuccauca

SEQ ID NO: 3836117 - RNA, 13 nt, Human
cugaccacucaga

SEQ ID NO: 3836118 - RNA, 16 nt, Human
cugaccacucagagac

SEQ ID NO: 3836119 - RNA, 17 nt, Human
cugaccacucagagaca

SEQ ID NO: 3836120 - RNA, 18 nt, Human
cugaccacuugaggccug

SEQ ID NO: 3836121 - RNA, 19 nt, Human
cugaccacuugaggccuga

SEQ ID NO: 3836122 - RNA, 15 nt, Human
cugaccagcagcgcc

SEQ ID NO: 3836123 - RNA, 21 nt, Human
cugaccagcagcgccuuuccc

SEQ ID NO: 3836124 - RNA, 17 nt, Human
cugaccagccuccaugc

SEQ ID NO: 3836125 - RNA, 22 nt, Human
cugaccagcucccccucccucc

SEQ ID NO: 3836126 - RNA, 13 nt, Human
cugaccagcugcu

SEQ ID NO: 3836127 - RNA, 22 nt, Human
cugaccauccacucuacccucc

SEQ ID NO: 3836128 - RNA, 14 nt, Human
cugaccaugcauuu

SEQ ID NO: 3836129 - RNA, 11 nt, Human
cugacccacug

SEQ ID NO: 3836130 - RNA, 13 nt, Human
cugacccacugcu

SEQ ID NO: 3836131 - RNA, 21 nt, Human
cugacccaggccgcagcucuu

SEQ ID NO: 3836132 - RNA, 12 nt, Human
cugacccagucc

SEQ ID NO: 3836133 - RNA, 16 nt, Human
cugacccagucccugg

SEQ ID NO: 3836134 - RNA, 18 nt, Human
cugacccagucccugggg

SEQ ID NO: 3836135 - RNA, 12 nt, Human
cugacccagugc

SEQ ID NO: 3836136 - RNA, 23 nt, Human
cugacccagugcccccacugacc

SEQ ID NO: 3836137 - RNA, 14 nt, Human
cugacccaugcugc

SEQ ID NO: 3836138 - RNA, 20 nt, Human
cugacccaugcugcccugug

SEQ ID NO: 3836139 - RNA, 21 nt, Human
cugacccaugcugcccuguga

SEQ ID NO: 3836140 - RNA, 13 nt, Human
cugacccaugggc

SEQ ID NO: 3836141 - RNA, 17 nt, Human
cugacccaugggcagga

SEQ ID NO: 3836142 - RNA, 19 nt, Human
cugacccaugggcaggaga

SEQ ID NO: 3836143 - RNA, 14 nt, Human
cugacccauugcug

SEQ ID NO: 3836144 - RNA, 20 nt, Human
cugaccccaaacaccuucca

SEQ ID NO: 3836145 - RNA, 21 nt, Human
cugaccccagugguauccugu

SEQ ID NO: 3836146 - RNA, 16 nt, Human
cugaccccaucaccua

SEQ ID NO: 3836147 - RNA, 18 nt, Human
cugaccccaucaccuacu

SEQ ID NO: 3836148 - RNA, 19 nt, Human
cugaccccccucaggaccc

SEQ ID NO: 3836149 - RNA, 21 nt, Human
cugaccccucauagcccucac

SEQ ID NO: 3836150 - RNA, 12 nt, Human
cugaccccuccu

SEQ ID NO: 3836151 - RNA, 17 nt, Human
cugaccccuccucacug

SEQ ID NO: 3836152 - RNA, 23 nt, Human
cugacccuccaccgcagaaggaa

SEQ ID NO: 3836153 - RNA, 22 nt, Human
cugacccuccccaaaggcuuug

SEQ ID NO: 3836154 - RNA, 22 nt, Human
cugacccuccuguugcacccag

SEQ ID NO: 3836155 - RNA, 23 nt, Human
cugacccuccuguugcacccagc

SEQ ID NO: 3836156 - RNA, 18 nt, Human
cugacccucuccacccca

SEQ ID NO: 3836157 - RNA, 17 nt, Human
cugacccugcagagaug

SEQ ID NO: 3836158 - RNA, 18 nt, Human
cugacccugcagagaugc

SEQ ID NO: 3836159 - RNA, 17 nt, Human
cugacccugguucucuc

SEQ ID NO: 3836160 - RNA, 13 nt, Human
cugacccuguaua

SEQ ID NO: 3836161 - RNA, 21 nt, Human
cugacccuguauauagcccag

SEQ ID NO: 3836162 - RNA, 20 nt, Human
cugacccuuacagccucuga

SEQ ID NO: 3836163 - RNA, 16 nt, Human
cugacccuuccagaca

SEQ ID NO: 3836164 - RNA, 17 nt, Human
cugacccuuccagacau

SEQ ID NO: 3836165 - RNA, 18 nt, Human
cugaccgaaacagcgcug

SEQ ID NO: 3836166 - RNA, 20 nt, Human
cugaccgaaacagcgcuggg

SEQ ID NO: 3836167 - RNA, 13 nt, Human
cugaccuccacag

SEQ ID NO: 3836168 - RNA, 14 nt, Human
cugaccuccacagc

SEQ ID NO: 3836169 - RNA, 11 nt, Human
cugaccuccca

SEQ ID NO: 3836170 - RNA, 14 nt, Human
cugaccucccagcc

SEQ ID NO: 3836171 - RNA, 17 nt, Human
cugaccucccagcccua

SEQ ID NO: 3836172 - RNA, 22 nt, Human
cugaccucccagcccuauggau

SEQ ID NO: 3836173 - RNA, 14 nt, Human
cugaccucccccuc

SEQ ID NO: 3836174 - RNA, 16 nt, Human
cugaccucccccuccu

SEQ ID NO: 3836175 - RNA, 17 nt, Human
cugaccucccccuccuu

SEQ ID NO: 3836176 - RNA, 18 nt, Human
cugaccucccucuaauuu

SEQ ID NO: 3836177 - RNA, 14 nt, Human
cugaccucuugcug

SEQ ID NO: 3836178 - RNA, 15 nt, Human
cugaccucuugcugu

SEQ ID NO: 3836179 - RNA, 20 nt, Human
cugaccucuugcugucucug

SEQ ID NO: 3836180 - RNA, 22 nt, Human
cugaccucuugcugucucugcu

SEQ ID NO: 3836181 - RNA, 13 nt, Human
cugaccugaggcu

SEQ ID NO: 3836182 - RNA, 21 nt, Human
cugaccugaggcuccugugcu

SEQ ID NO: 3836183 - RNA, 14 nt, Human
cugaccugccucuc

SEQ ID NO: 3836184 - RNA, 14 nt, Human
cugaccugcugacc

SEQ ID NO: 3836185 - RNA, 20 nt, Human
cugaccugcugaccugugca

SEQ ID NO: 3836186 - RNA, 10 nt, Human
cugaccuggc

SEQ ID NO: 3836187 - RNA, 19 nt, Human
cugaccugucaugcccccc

SEQ ID NO: 3836188 - RNA, 22 nt, Human
cugaccugucaugccccccuca

SEQ ID NO: 3836189 - RNA, 18 nt, Human
cugaccugugagcccagc

SEQ ID NO: 3836190 - RNA, 22 nt, Human
cugaccuucagcucacgcuuca

SEQ ID NO: 3836191 - RNA, 16 nt, Human
cugaccuuccucgcag

SEQ ID NO: 3836192 - RNA, 20 nt, Human
cugaccuugaacuccugggc

SEQ ID NO: 3836193 - RNA, 21 nt, Human
cugaccuugaacuccugggcu

SEQ ID NO: 3836194 - RNA, 22 nt, Human
cugaccuugaacuccugggcuc

SEQ ID NO: 3836195 - RNA, 19 nt, Human
cugaccuuguaaaagacag

SEQ ID NO: 3836196 - RNA, 23 nt, Human
cugaccuuugucaucuuucuucu

SEQ ID NO: 3836197 - RNA, 21 nt, Human
cugacgaaacuggccccggau

SEQ ID NO: 3836198 - RNA, 17 nt, Human
cugacgaggcugggcca

SEQ ID NO: 3836199 - RNA, 19 nt, Human
cugacgaggcugggccaag

SEQ ID NO: 3836200 - RNA, 16 nt, Human
cugacgcaacccacgu

SEQ ID NO: 3836201 - RNA, 22 nt, Human
cugacggaagccaacuuggcuu

SEQ ID NO: 3836202 - RNA, 16 nt, Human
cugacggaguccugug

SEQ ID NO: 3836203 - RNA, 14 nt, Human
cugacggcccugca

SEQ ID NO: 3836204 - RNA, 14 nt, Human
cugacggcgccccc

SEQ ID NO: 3836205 - RNA, 19 nt, Human
cugacggcgcccccagugu

SEQ ID NO: 3836206 - RNA, 22 nt, Human
cugacgucugaagcuugacucc

SEQ ID NO: 3836207 - RNA, 13 nt, Human
cugacguuccggg

SEQ ID NO: 3836208 - RNA, 23 nt, Human
cugacguuccgggcaaaugccag

SEQ ID NO: 3836209 - RNA, 17 nt, Human
gaugguuuuaaacuuuc

SEQ ID NO: 3836210 - RNA, 15 nt, Human
gauguaaaaucuugu

SEQ ID NO: 3836211 - RNA, 16 nt, Human
gauguaaaaucuuguc

SEQ ID NO: 3836212 - RNA, 12 nt, Human
gauguaaaguga

SEQ ID NO: 3836213 - RNA, 13 nt, Human
gauguaagagcuu

SEQ ID NO: 3836214 - RNA, 14 nt, Human
gauguaauacuucu

SEQ ID NO: 3836215 - RNA, 22 nt, Human
gauguaaucucucugcagcugc

SEQ ID NO: 3836216 - RNA, 12 nt, Human
gauguaauuuag

SEQ ID NO: 3836217 - RNA, 13 nt, Human
gauguaauuuugu

SEQ ID NO: 3836218 - RNA, 19 nt, Human
gauguaauuuuguguaaga

SEQ ID NO: 3836219 - RNA, 17 nt, Human
gauguacagucugucau

SEQ ID NO: 3836220 - RNA, 19 nt, Human
gauguacagucugucauga

SEQ ID NO: 3836221 - RNA, 14 nt, Human
gauguagauuuauu

SEQ ID NO: 3836222 - RNA, 21 nt, Human
gauguagcaaacccugucaaa

SEQ ID NO: 3836223 - RNA, 15 nt, Human
gauguagcauuaugc

SEQ ID NO: 3836224 - RNA, 19 nt, Human
gauguaggguaaggugccu

SEQ ID NO: 3836225 - RNA, 20 nt, Human
gauguaugaaggcuuuuggu

SEQ ID NO: 3836226 - RNA, 19 nt, Human
gauguaugcagcuaucugg

SEQ ID NO: 3836227 - RNA, 15 nt, Human
gauguauuuugugag

SEQ ID NO: 3836228 - RNA, 18 nt, Human
gauguauuuuuguacccu

SEQ ID NO: 3836229 - RNA, 15 nt, Human
gaugucacagggcca

SEQ ID NO: 3836230 - RNA, 18 nt, Human
gaugucauacagagaagu

SEQ ID NO: 3836231 - RNA, 20 nt, Human
gaugucauacagagaaguca

SEQ ID NO: 3836232 - RNA, 14 nt, Human
gaugucauguguuc

SEQ ID NO: 3836233 - RNA, 16 nt, Human
gaugucauguguuccc

SEQ ID NO: 3836234 - RNA, 12 nt, Human
gauguccagaag

SEQ ID NO: 3836235 - RNA, 15 nt, Human
gauguccccagcaga

SEQ ID NO: 3836236 - RNA, 16 nt, Human
gaugucccugggccag

SEQ ID NO: 3836237 - RNA, 20 nt, Human
gaugucccugggccaggguc

SEQ ID NO: 3836238 - RNA, 14 nt, Human
gaugucuaauaguu

SEQ ID NO: 3836239 - RNA, 14 nt, Human
gaugucugccaauu

SEQ ID NO: 3836240 - RNA, 19 nt, Human
gaugucuguuugcugaugg

SEQ ID NO: 3836241 - RNA, 18 nt, Human
gaugucuucauaccuaca

SEQ ID NO: 3836242 - RNA, 20 nt, Human
gaugucuucguacaguucuu

SEQ ID NO: 3836243 - RNA, 13 nt, Human
gaugucuuggaac

SEQ ID NO: 3836244 - RNA, 16 nt, Human
gaugucuuuguuaaga

SEQ ID NO: 3836245 - RNA, 19 nt, Human
gaugucuuuuuauuaaaau

SEQ ID NO: 3836246 - RNA, 18 nt, Human
gaugugaauuauugacac

SEQ ID NO: 3836247 - RNA, 14 nt, Human
gaugugacauuugu

SEQ ID NO: 3836248 - RNA, 17 nt, Human
gauguccucaccacaug

SEQ ID NO: 3836249 - RNA, 14 nt, Human
gauguccuguaaac

SEQ ID NO: 3836250 - RNA, 15 nt, Human
gaugucuccuaagca

SEQ ID NO: 3836251 - RNA, 16 nt, Human
gaugucucuaaagcac

SEQ ID NO: 3836252 - RNA, 22 nt, Human
gaugucugccaauuuuugccuu

SEQ ID NO: 3836253 - RNA, 16 nt, Human
gaugucuuauuuuuag

SEQ ID NO: 3836254 - RNA, 15 nt, Human
gaugucuucugccug

SEQ ID NO: 3836255 - RNA, 16 nt, Human
gaugucuucugccugu

SEQ ID NO: 3836256 - RNA, 18 nt, Human
gaugucuucugccuguua

SEQ ID NO: 3836257 - RNA, 20 nt, Human
gaugucuucugccuguuaua

SEQ ID NO: 3836258 - RNA, 13 nt, Human
gaugucuuuuaua

SEQ ID NO: 3836259 - RNA, 14 nt, Human
gaugucuuuucuug

SEQ ID NO: 3836260 - RNA, 19 nt, Human
gaugugaaacacuuugccu

SEQ ID NO: 3836261 - RNA, 12 nt, Human
gaugugaagcca

SEQ ID NO: 3836262 - RNA, 20 nt, Human
gaugugaauuauugacacug

SEQ ID NO: 3836263 - RNA, 22 nt, Human
gaugugaauuauugacacugaa

SEQ ID NO: 3836264 - RNA, 22 nt, Human
gaugugaauugccugcagagag

SEQ ID NO: 3836265 - RNA, 14 nt, Human
gaugugagaaaacc

SEQ ID NO: 3836266 - RNA, 16 nt, Human
gaugugauuguggaau

SEQ ID NO: 3836267 - RNA, 23 nt, Human
gaugugauuuaauaguguuaauc

SEQ ID NO: 3836268 - RNA, 16 nt, Human
gaugugcaaaaauuuu

SEQ ID NO: 3836269 - RNA, 16 nt, Human
gaugugcaaaaccuuu

SEQ ID NO: 3836270 - RNA, 20 nt, Human
gaugugcaaaaccuuuuacu

SEQ ID NO: 3836271 - RNA, 12 nt, Human
gaugugcaagcg

SEQ ID NO: 3836272 - RNA, 19 nt, Human
gaugugcaagcgacgacag

SEQ ID NO: 3836273 - RNA, 11 nt, Human
gaugugcauuc

SEQ ID NO: 3836274 - RNA, 15 nt, Human
gaugugccugggugg

SEQ ID NO: 3836275 - RNA, 20 nt, Human
gaugugcuuguuaacugagu

SEQ ID NO: 3836276 - RNA, 11 nt, Human
gaugugcuuuu

SEQ ID NO: 3836277 - RNA, 16 nt, Human
gaugugcuuuucucca

SEQ ID NO: 3836278 - RNA, 21 nt, Human
gauguggaaaagccaagaggc

SEQ ID NO: 3836279 - RNA, 19 nt, Human
gauguggaacugcugccac

SEQ ID NO: 3836280 - RNA, 12 nt, Human
gauguggagcac

SEQ ID NO: 3836281 - RNA, 14 nt, Human
gauguggagccagg

SEQ ID NO: 3836282 - RNA, 13 nt, Human
gauguggcccugg

SEQ ID NO: 3836283 - RNA, 14 nt, Human
gauguggcccuggc

SEQ ID NO: 3836284 - RNA, 20 nt, Human
gauguggcccuggccugcug

SEQ ID NO: 3836285 - RNA, 16 nt, Human
gauguggcugcagcag

SEQ ID NO: 3836286 - RNA, 18 nt, Human
gauguggcugcagcagcg

SEQ ID NO: 3836287 - RNA, 23 nt, Human
gaugugggagggagcagacagga

SEQ ID NO: 3836288 - RNA, 17 nt, Human
gauguggucacagcugu

SEQ ID NO: 3836289 - RNA, 14 nt, Human
gauguggugaaaag

SEQ ID NO: 3836290 - RNA, 22 nt, Human
gauguggugaggcaggcuuugu

SEQ ID NO: 3836291 - RNA, 22 nt, Human
gauguggugccugaggucugua

SEQ ID NO: 3836292 - RNA, 13 nt, Human
gauguguaauuuu

SEQ ID NO: 3836293 - RNA, 15 nt, Human
gauguguaucagugu

SEQ ID NO: 3836294 - RNA, 17 nt, Human
gauguguccugacacug

SEQ ID NO: 3836295 - RNA, 13 nt, Human
gaugugugcaugu

SEQ ID NO: 3836296 - RNA, 20 nt, Human
gauguguguugauacuguug

SEQ ID NO: 3836297 - RNA, 21 nt, Human
gauguguguugauacuguugc

SEQ ID NO: 3836298 - RNA, 23 nt, Human
gauguguguugauacuguugcac

SEQ ID NO: 3836299 - RNA, 22 nt, Human
gauguuaaaaaaauaagaagaa

SEQ ID NO: 3836300 - RNA, 17 nt, Human
gauguuaaaauaaaugg

SEQ ID NO: 3836301 - RNA, 19 nt, Human
gauguuaacacauuuugua

SEQ ID NO: 3836302 - RNA, 21 nt, Human
gauguuaacacauuuuguaua

SEQ ID NO: 3836303 - RNA, 22 nt, Human
gauguuaacacauuuuguauaa

SEQ ID NO: 3836304 - RNA, 18 nt, Human
gauguuaguguuuuaaga

SEQ ID NO: 3836305 - RNA, 20 nt, Human
gauguuauauuuuucuuaaa

SEQ ID NO: 3836306 - RNA, 15 nt, Human
gauguucaccuccug

SEQ ID NO: 3836307 - RNA, 18 nt, Human
gauguucacuguggcauu

SEQ ID NO: 3836308 - RNA, 19 nt, Human
gauguucagauugcuuuga

SEQ ID NO: 3836309 - RNA, 20 nt, Human
gauguucagauugcuuugau

SEQ ID NO: 3836310 - RNA, 12 nt, Human
gauguucuaagg

SEQ ID NO: 3836311 - RNA, 16 nt, Human
gauguucuaaggcucu

SEQ ID NO: 3836312 - RNA, 18 nt, Human
gauguucuaaggcucuga

SEQ ID NO: 3836313 - RNA, 21 nt, Human
gauguucuacuuuguucugcu

SEQ ID NO: 3836314 - RNA, 18 nt, Human
gauguucuagcauggcug

SEQ ID NO: 3836315 - RNA, 22 nt, Human
gauguucuauuuuuuguuuugu

SEQ ID NO: 3836316 - RNA, 14 nt, Human
gauguucuggcccu

SEQ ID NO: 3836317 - RNA, 19 nt, Human
gauguugaaaaaguucugc

SEQ ID NO: 3836318 - RNA, 18 nt, Human
gauguugaagaauacagu

SEQ ID NO: 3836319 - RNA, 16 nt, Human
gauguugagaaaccug

SEQ ID NO: 3836320 - RNA, 16 nt, Human
gauguugcuaacagca

SEQ ID NO: 3836321 - RNA, 14 nt, Human
gauguuuaaaacac

SEQ ID NO: 3836322 - RNA, 23 nt, Human
gauguuuaaaacaccuucuauag

SEQ ID NO: 3836323 - RNA, 23 nt, Human
gauguuuacagguggacacacaa

SEQ ID NO: 3836324 - RNA, 16 nt, Human
gauguuuaguaaucau

SEQ ID NO: 3836325 - RNA, 14 nt, Human
gauguuuauucuuc

SEQ ID NO: 3836326 - RNA, 23 nt, Human
gauguuuauucuucuagaguuca

SEQ ID NO: 3836327 - RNA, 13 nt, Human
gauguuucauuuu

SEQ ID NO: 3836328 - RNA, 16 nt, Human
gauguuugagcagugg

SEQ ID NO: 3836329 - RNA, 13 nt, Human
gauguuugcccaa

SEQ ID NO: 3836330 - RNA, 18 nt, Human
gauguuugcccaaaauuu

SEQ ID NO: 3836331 - RNA, 22 nt, Human
gauguuugcucuuguuuuuauu

SEQ ID NO: 3836332 - RNA, 15 nt, Human
gauguuuguggccuc

SEQ ID NO: 3836333 - RNA, 17 nt, Human
gauguuuguggccucag

SEQ ID NO: 3836334 - RNA, 23 nt, Human
gauguuuuagccauuguuggcuu

SEQ ID NO: 3836335 - RNA, 22 nt, Human
gauguuuugguagauuaaauau

SEQ ID NO: 3836336 - RNA, 18 nt, Human
gauguuuuuaaaaguuuc

SEQ ID NO: 3836337 - RNA, 16 nt, Human
gauguuuuuaaaaucu

SEQ ID NO: 3836338 - RNA, 17 nt, Human
gauuaaacuuaugaaug

SEQ ID NO: 3836339 - RNA, 16 nt, Human
gauuaaauaagauucu

SEQ ID NO: 3836340 - RNA, 19 nt, Human
gauuaaauucuugcaaagu

SEQ ID NO: 3836341 - RNA, 13 nt, Human
gauuaacaaauau

SEQ ID NO: 3836342 - RNA, 21 nt, Human
gauuaaccacuucagcugacu

SEQ ID NO: 3836343 - RNA, 19 nt, Human
gauuaacuuauuuagagau

SEQ ID NO: 3836344 - RNA, 17 nt, Human
gauuaaggucucucuuu

SEQ ID NO: 3836345 - RNA, 19 nt, Human
gauuaaggucucucuuugg

SEQ ID NO: 3836346 - RNA, 15 nt, Human
gauuaauuccuuucc

SEQ ID NO: 3836347 - RNA, 20 nt, Human
gauuaauuugcaucugaaau

SEQ ID NO: 3836348 - RNA, 21 nt, Human
gauuacaaaucagaagucauc

SEQ ID NO: 3836349 - RNA, 23 nt, Human
gauuacaggcaugggccaccacg

SEQ ID NO: 3836350 - RNA, 18 nt, Human
gauuacaggcuccugcca

SEQ ID NO: 3836351 - RNA, 18 nt, Human
gauuacagggaugagcca

SEQ ID NO: 3836352 - RNA, 20 nt, Human
gauuacaggugugaaccacc

SEQ ID NO: 3836353 - RNA, 15 nt, Human
gauuacauucaguug

SEQ ID NO: 3836354 - RNA, 21 nt, Human
gauuacaagcgugagccacug

SEQ ID NO: 3836355 - RNA, 14 nt, Human
gauuacacacguga

SEQ ID NO: 3836356 - RNA, 13 nt, Human
gauuacagaggaa

SEQ ID NO: 3836357 - RNA, 18 nt, Human
gauuacaggcgugagcca

SEQ ID NO: 3836358 - RNA, 20 nt, Human
gauuacaggcgugagccacc

SEQ ID NO: 3836359 - RNA, 21 nt, Human
gauuacaggcuccugccacca

SEQ ID NO: 3836360 - RNA, 20 nt, Human
gauuacagggaugagccacc

SEQ ID NO: 3836361 - RNA, 14 nt, Human
gauuacauaaucug

SEQ ID NO: 3836362 - RNA, 21 nt, Human
gauuacccaagcaaaaucaug

SEQ ID NO: 3836363 - RNA, 14 nt, Human
gauuaccuccugag

SEQ ID NO: 3836364 - RNA, 17 nt, Human
gauuacugucaauaaac

SEQ ID NO: 3836365 - RNA, 19 nt, Human
gauuacuucucuauaaaaa

SEQ ID NO: 3836366 - RNA, 19 nt, Human
gauuagaaaaauuccuaag

SEQ ID NO: 3836367 - RNA, 14 nt, Human
gauuagaauucugu

SEQ ID NO: 3836368 - RNA, 14 nt, Human
gauuagacagaaca

SEQ ID NO: 3836369 - RNA, 19 nt, Human
gauuagacagaacaccuau

SEQ ID NO: 3836370 - RNA, 19 nt, Human
gauuagacuggacagcuug

SEQ ID NO: 3836371 - RNA, 14 nt, Human
gauuagagaguguu

SEQ ID NO: 3836372 - RNA, 18 nt, Human
gauuagaggcagaucugg

SEQ ID NO: 3836373 - RNA, 17 nt, Human
gauuagagggagguguu

SEQ ID NO: 3836374 - RNA, 15 nt, Human
gauuagaucuuuuaa

SEQ ID NO: 3836375 - RNA, 16 nt, Human
gauuagcucuggacca

SEQ ID NO: 3836376 - RNA, 12 nt, Human
gauuagcuuugu

SEQ ID NO: 3836377 - RNA, 19 nt, Human
gauuagguuucagcagagc

SEQ ID NO: 3836378 - RNA, 20 nt, Human
gauuagguuucagcagagcu

SEQ ID NO: 3836379 - RNA, 15 nt, Human
gauuaguaaagaaau

SEQ ID NO: 3836380 - RNA, 15 nt, Human
gauuaguuuagaaca

SEQ ID NO: 3836381 - RNA, 16 nt, Human
gauuaguuuucuuguu

SEQ ID NO: 3836382 - RNA, 22 nt, Human
gauuaguuuucuuguugcuuug

SEQ ID NO: 3836383 - RNA, 17 nt, Human
gauuauaacuugucuaa

SEQ ID NO: 3836384 - RNA, 13 nt, Human
gauuauacagaau

SEQ ID NO: 3836385 - RNA, 21 nt, Human
gauuauaguugugggugggag

SEQ ID NO: 3836386 - RNA, 21 nt, Human
gauuauauaaagaccuauaaa

SEQ ID NO: 3836387 - RNA, 18 nt, Human
gauuauauaucccugaua

SEQ ID NO: 3836388 - RNA, 18 nt, Human
gauuauaucaaaguauuu

SEQ ID NO: 3836389 - RNA, 19 nt, Human
gauuauauugagacaaaaa

SEQ ID NO: 3836390 - RNA, 21 nt, Human
gauuaucguuuucuuaaagug

SEQ ID NO: 3836391 - RNA, 20 nt, Human
gauuauggaaaaauaaaacu

SEQ ID NO: 3836392 - RNA, 17 nt, Human
gauuaugggucacagga

SEQ ID NO: 3836393 - RNA, 16 nt, Human
gauuaugguuuuguga

SEQ ID NO: 3836394 - RNA, 18 nt, Human
gauuaugucuuuuauauu

SEQ ID NO: 3836395 - RNA, 20 nt, Human
gauuaugucuuuuauauuug

SEQ ID NO: 3836396 - RNA, 15 nt, Human
gauuauucacugauu

SEQ ID NO: 3836397 - RNA, 16 nt, Human
gauuauucacugauuu

SEQ ID NO: 3836398 - RNA, 21 nt, Human
gauuauucacugauuugacau

SEQ ID NO: 3836399 - RNA, 16 nt, Human
gauuauucauuuaaaa

SEQ ID NO: 3836400 - RNA, 23 nt, Human
gauuauucccuguacaauauuua

SEQ ID NO: 3836401 - RNA, 13 nt, Human
gauuauugaaaua

SEQ ID NO: 3836402 - RNA, 14 nt, Human
gauuauuguauuua

SEQ ID NO: 3836403 - RNA, 17 nt, Human
gauuauuuaagacuaaa

SEQ ID NO: 3836404 - RNA, 17 nt, Human
gauuauuuaauaacauu

SEQ ID NO: 3836405 - RNA, 18 nt, Human
gauuauuuaauaacauua

SEQ ID NO: 3836406 - RNA, 11 nt, Human
gauuauuugca

SEQ ID NO: 3836407 - RNA, 12 nt, Human
gauuauuugcau

SEQ ID NO: 3836408 - RNA, 23 nt, Human
gauuauuuguuauuuguacaguu

SEQ ID NO: 3836409 - RNA, 14 nt, Human
gauuauuuuggaaa

SEQ ID NO: 3836410 - RNA, 15 nt, Human
gauuauuuuuuauga

SEQ ID NO: 3836411 - RNA, 17 nt, Human
gauuauuuuuucagacc

SEQ ID NO: 3836412 - RNA, 14 nt, Human
gauuggacauuuuc

SEQ ID NO: 3836413 - RNA, 14 nt, Human
gauuggaccaggcc

SEQ ID NO: 3836414 - RNA, 15 nt, Human
gauuggaccaggcca

SEQ ID NO: 3836415 - RNA, 22 nt, Human
gauuggauacgcaucagacaga

SEQ ID NO: 3836416 - RNA, 20 nt, Human
gauuggauuauucauuuaaa

SEQ ID NO: 3836417 - RNA, 20 nt, Human
gauuggauuauuuaauaaca

SEQ ID NO: 3836418 - RNA, 16 nt, Human
gauuggccuguagagu

SEQ ID NO: 3836419 - RNA, 12 nt, Human
gauuggcucacc

SEQ ID NO: 3836420 - RNA, 18 nt, Human
gauuggcucacccaagca

SEQ ID NO: 3836421 - RNA, 20 nt, Human
gauuggcuuguagaauuguu

SEQ ID NO: 3836422 - RNA, 13 nt, Human
gauugggacagag

SEQ ID NO: 3836423 - RNA, 19 nt, Human
gauugggugggcaggaaaa

SEQ ID NO: 3836424 - RNA, 21 nt, Human
gauuggguuuuuggacuucug

SEQ ID NO: 3836425 - RNA, 17 nt, Human
gauugguuucucuucuc

SEQ ID NO: 3836426 - RNA, 20 nt, Human
gauugguuuuaauugaagga

SEQ ID NO: 3836427 - RNA, 13 nt, Human
gauuguaaaaaaa

SEQ ID NO: 3836428 - RNA, 18 nt, Human
gauuguaaaaaaaaaugc

SEQ ID NO: 3836429 - RNA, 22 nt, Human
gauuguaaaaaaaaaugccuuu

SEQ ID NO: 3836430 - RNA, 23 nt, Human
gauuguaaaccgcuuuggccuga

SEQ ID NO: 3836431 - RNA, 22 nt, Human
gauuguaacguugcugugggaa

SEQ ID NO: 3836432 - RNA, 23 nt, Human
gauuguaacguugcugugggaac

SEQ ID NO: 3836433 - RNA, 22 nt, Human
gauuguacagaaucauugcuua

SEQ ID NO: 3836434 - RNA, 15 nt, Human
gauuguauuguugaa

SEQ ID NO: 3836435 - RNA, 21 nt, Human
gauugucaccaugaucacuua

SEQ ID NO: 3836436 - RNA, 19 nt, Human
gauuguccucauuucucca

SEQ ID NO: 3836437 - RNA, 13 nt, Human
gauugugccccug

SEQ ID NO: 3836438 - RNA, 18 nt, Human
gauugugccuaauguguu

SEQ ID NO: 3836439 - RNA, 16 nt, Human
gauuguggaauguugg

SEQ ID NO: 3836440 - RNA, 21 nt, Human
gauuguggaauguuggauaag

SEQ ID NO: 3836441 - RNA, 23 nt, Human
gauugugggaauuaaggaaguga

SEQ ID NO: 3836442 - RNA, 16 nt, Human
gauuguuaaaauaacu

SEQ ID NO: 3836443 - RNA, 15 nt, Human
gauuguuaauuucag

SEQ ID NO: 3836444 - RNA, 14 nt, Human
gauuguuauuaaau

SEQ ID NO: 3836445 - RNA, 21 nt, Human
gauuguuuaucuagauguaaa

SEQ ID NO: 3836446 - RNA, 15 nt, Human
gauuguuucuauaca

SEQ ID NO: 3836447 - RNA, 12 nt, Human
gauuguuuuauc

SEQ ID NO: 3836448 - RNA, 18 nt, Human
gauuguuuuaucaugaca

SEQ ID NO: 3836449 - RNA, 22 nt, Human
gauuguuuuuuaaaaauggaua

SEQ ID NO: 3836450 - RNA, 16 nt, Human
gauuuaaacacacaga

SEQ ID NO: 3836451 - RNA, 17 nt, Human
gauuuaaacacacagau

SEQ ID NO: 3836452 - RNA, 14 nt, Human
gauuuaaacucuga

SEQ ID NO: 3836453 - RNA, 20 nt, Human
gauuuaacagaaauguacag

SEQ ID NO: 3836454 - RNA, 17 nt, Human
gauuuaacagucauuua

SEQ ID NO: 3836455 - RNA, 18 nt, Human
gauuuaagacacuuuuug

SEQ ID NO: 3836456 - RNA, 16 nt, Human
gauuuaagcacaaacu

SEQ ID NO: 3836457 - RNA, 15 nt, Human
gauuuaagguauuua

SEQ ID NO: 3836458 - RNA, 13 nt, Human
gauuuaauaaaau

SEQ ID NO: 3836459 - RNA, 17 nt, Human
gauuuaauaaaauaauu

SEQ ID NO: 3836460 - RNA, 22 nt, Human
gauuuaauaaaauaauucuaaa

SEQ ID NO: 3836461 - RNA, 19 nt, Human
gauuuaauaguguuaauca

SEQ ID NO: 3836462 - RNA, 23 nt, Human
gauuuaauaguguuaaucaauuu

SEQ ID NO: 3836463 - RNA, 23 nt, Human
gauuuaauauaaaguuuuauaua

SEQ ID NO: 3836464 - RNA, 15 nt, Human
gauuuaauucucuug

SEQ ID NO: 3836465 - RNA, 20 nt, Human
gauuuaauuugccaaaauaa

SEQ ID NO: 3836466 - RNA, 15 nt, Human
gauuuaccacuugug

SEQ ID NO: 3836467 - RNA, 16 nt, Human
gauuuaccacuugugu

SEQ ID NO: 3836468 - RNA, 20 nt, Human
gauuuacccagaaugucaga

SEQ ID NO: 3836469 - RNA, 22 nt, Human
gauuuacccagaaugucagauu

SEQ ID NO: 3836470 - RNA, 15 nt, Human
gauuuagaaguguca

SEQ ID NO: 3836471 - RNA, 22 nt, Human
gauuuagugaaagcuagagaua

SEQ ID NO: 3836472 - RNA, 13 nt, Human
gauuuaguuucag

SEQ ID NO: 3836473 - RNA, 13 nt, Human
gauuuauaaaugc

SEQ ID NO: 3836474 - RNA, 18 nt, Human
gauuuauaaaugcuauuu

SEQ ID NO: 3836475 - RNA, 19 nt, Human
gauuuauauaaauguaaaa

SEQ ID NO: 3836476 - RNA, 12 nt, Human
gauuuaucaaau

SEQ ID NO: 3836477 - RNA, 14 nt, Human
gauuuaucaaauca

SEQ ID NO: 3836478 - RNA, 17 nt, Human
gauuuaucacacaaagc

SEQ ID NO: 3836479 - RNA, 20 nt, Human
gauuuaucacacaaagcaga

SEQ ID NO: 3836480 - RNA, 16 nt, Human
gauuuauuaaagaaaa

SEQ ID NO: 3836481 - RNA, 17 nt, Human
gauuuauuaaagaaaaa

SEQ ID NO: 3836482 - RNA, 12 nt, Human
gauuuauuaacu

SEQ ID NO: 3836483 - RNA, 17 nt, Human
gauuuauuugcuucuuc

SEQ ID NO: 3836484 - RNA, 19 nt, Human
gauuucaagaaaaaauaaa

SEQ ID NO: 3836485 - RNA, 11 nt, Human
gauuucacucu

SEQ ID NO: 3836486 - RNA, 17 nt, Human
gauuucacucuccuugg

SEQ ID NO: 3836487 - RNA, 18 nt, Human
gauuucacucuccuuggu

SEQ ID NO: 3836488 - RNA, 12 nt, Human
gauuucagaaac

SEQ ID NO: 3836489 - RNA, 15 nt, Human
gauuucagcucacug

SEQ ID NO: 3836490 - RNA, 22 nt, Human
gauuucaggauacucugucaga

SEQ ID NO: 3836491 - RNA, 16 nt, Human
gauuucagucuuuucc

SEQ ID NO: 3836492 - RNA, 17 nt, Human
gauuucagucuuuuccu

SEQ ID NO: 3836493 - RNA, 23 nt, Human
gauuucauaccucagaauguaaa

SEQ ID NO: 3836494 - RNA, 17 nt, Human
gauuucaucugcucucc

SEQ ID NO: 3836495 - RNA, 20 nt, Human
gauuucaugcuaucucugug

SEQ ID NO: 3836496 - RNA, 12 nt, Human
gauuucauguac

SEQ ID NO: 3836497 - RNA, 21 nt, Human
gauuucauguacugcauuauu

SEQ ID NO: 3836498 - RNA, 20 nt, Human
gauuucauuucaacuguuug

SEQ ID NO: 3836499 - RNA, 15 nt, Human
cugcaccccccuggg

SEQ ID NO: 3836500 - RNA, 16 nt, Human
cugcaccccccugggc

SEQ ID NO: 3836501 - RNA, 17 nt, Human
cugcacccccuccugcu

SEQ ID NO: 3836502 - RNA, 14 nt, Human
cugcaccccuuccu

SEQ ID NO: 3836503 - RNA, 19 nt, Human
cugcaccccuuccugggca

SEQ ID NO: 3836504 - RNA, 19 nt, Human
cugcaccccuucucuccuc

SEQ ID NO: 3836505 - RNA, 21 nt, Human
cugcaccccuucucuccuccc

SEQ ID NO: 3836506 - RNA, 13 nt, Human
cugcacccuccac

SEQ ID NO: 3836507 - RNA, 15 nt, Human
cugcacccuccaccc

SEQ ID NO: 3836508 - RNA, 18 nt, Human
cugcacccuccacccugu

SEQ ID NO: 3836509 - RNA, 13 nt, Human
cugcacccuucuu

SEQ ID NO: 3836510 - RNA, 22 nt, Human
cugcaccggcuggccuggcccc

SEQ ID NO: 3836511 - RNA, 12 nt, Human
cugcaccgggcc

SEQ ID NO: 3836512 - RNA, 14 nt, Human
cugcaccgggccac

SEQ ID NO: 3836513 - RNA, 18 nt, Human
cugcaccgggccacagag

SEQ ID NO: 3836514 - RNA, 23 nt, Human
cugcaccgggccacagagaaagu

SEQ ID NO: 3836515 - RNA, 14 nt, Human
cugcaccggggccu

SEQ ID NO: 3836516 - RNA, 20 nt, Human
cugcaccuccccccacugca

SEQ ID NO: 3836517 - RNA, 13 nt, Human
cugcaccugugca

SEQ ID NO: 3836518 - RNA, 15 nt, Human
cugcaccuuaucuua

SEQ ID NO: 3836519 - RNA, 22 nt, Human
cugcacgaauggaagaggcacc

SEQ ID NO: 3836520 - RNA, 18 nt, Human
cugcacggugggccuugc

SEQ ID NO: 3836521 - RNA, 19 nt, Human
cugcacggugggccuugcu

SEQ ID NO: 3836522 - RNA, 18 nt, Human
cugcacuaaagccagccu

SEQ ID NO: 3836523 - RNA, 21 nt, Human
cugcacuaaagccagccugac

SEQ ID NO: 3836524 - RNA, 23 nt, Human
cugcacuaaagccagccugaccu

SEQ ID NO: 3836525 - RNA, 17 nt, Human
cugcacuaacagagugg

SEQ ID NO: 3836526 - RNA, 23 nt, Human
cugcacuacuccucugcagugcc

SEQ ID NO: 3836527 - RNA, 14 nt, Human
cugcacuacugaca

SEQ ID NO: 3836528 - RNA, 17 nt, Human
cugcacuauagccuagg

SEQ ID NO: 3836529 - RNA, 20 nt, Human
cugcacuauagccuagguga

SEQ ID NO: 3836530 - RNA, 22 nt, Human
cugcacuauagccuaggugaca

SEQ ID NO: 3836531 - RNA, 14 nt, Human
cugcacucaagcuu

SEQ ID NO: 3836532 - RNA, 20 nt, Human
cugcacuccagccugggcga

SEQ ID NO: 3836533 - RNA, 19 nt, Human
cugcacuccagccugggug

SEQ ID NO: 3836534 - RNA, 16 nt, Human
cugcacucccaccuga

SEQ ID NO: 3836535 - RNA, 13 nt, Human
cugcacuccccug

SEQ ID NO: 3836536 - RNA, 16 nt, Human
cugcacuccccugcug

SEQ ID NO: 3836537 - RNA, 17 nt, Human
cugcacuccccugcugg

SEQ ID NO: 3836538 - RNA, 18 nt, Human
cugcacuccccugcuggg

SEQ ID NO: 3836539 - RNA, 19 nt, Human
cugcacuccccugcugggu

SEQ ID NO: 3836540 - RNA, 23 nt, Human
cugcacucuaacccuaggcauca

SEQ ID NO: 3836541 - RNA, 16 nt, Human
cugcacucuagccgga

SEQ ID NO: 3836542 - RNA, 20 nt, Human
cugcacucuagccuggguga

SEQ ID NO: 3836543 - RNA, 13 nt, Human
cugcacucugugc

SEQ ID NO: 3836544 - RNA, 16 nt, Human
cugcacucugugccca

SEQ ID NO: 3836545 - RNA, 22 nt, Human
cugcacucugugcccaugggca

SEQ ID NO: 3836546 - RNA, 14 nt, Human
cugcacugaaaagg

SEQ ID NO: 3836547 - RNA, 14 nt, Human
cugcacuguaaaau

SEQ ID NO: 3836548 - RNA, 15 nt, Human
cugcacuguaaaaug

SEQ ID NO: 3836549 - RNA, 16 nt, Human
cugcacuguccugcuc

SEQ ID NO: 3836550 - RNA, 17 nt, Human
cugcacuguccugcucc

SEQ ID NO: 3836551 - RNA, 20 nt, Human
cugcacuguccugcuccaca

SEQ ID NO: 3836552 - RNA, 16 nt, Human
cugcacuuacuugcuu

SEQ ID NO: 3836553 - RNA, 23 nt, Human
cugcacuugcagacucuacagag

SEQ ID NO: 3836554 - RNA, 23 nt, Human
cugcacuugcgguuccggcaugg

SEQ ID NO: 3836555 - RNA, 15 nt, Human
cugcacuugggggcu

SEQ ID NO: 3836556 - RNA, 21 nt, Human
cugcacuugggggcucagcaa

SEQ ID NO: 3836557 - RNA, 23 nt, Human
cugcacuugggggcucagcaagg

SEQ ID NO: 3836558 - RNA, 20 nt, Human
cugcacuuugaugucaugug

SEQ ID NO: 3836559 - RNA, 23 nt, Human
cugcacuuugaugucauguguuc

SEQ ID NO: 3836560 - RNA, 19 nt, Human
cugcagaaccggagagcca

SEQ ID NO: 3836561 - RNA, 21 nt, Human
cugcagaacguauugguccag

SEQ ID NO: 3836562 - RNA, 23 nt, Human
cugcagaacguauugguccagcu

SEQ ID NO: 3836563 - RNA, 15 nt, Human
cugcagacccugccc

SEQ ID NO: 3836564 - RNA, 21 nt, Human
cugcagacccugcccuuguuu

SEQ ID NO: 3836565 - RNA, 14 nt, Human
cugcagaccugucc

SEQ ID NO: 3836566 - RNA, 20 nt, Human
cugcagaccuguccuccugg

SEQ ID NO: 3836567 - RNA, 15 nt, Human
cugcagacgcccaga

SEQ ID NO: 3836568 - RNA, 13 nt, Human
cugcagacugcua

SEQ ID NO: 3836569 - RNA, 14 nt, Human
cugcagacugcuag

SEQ ID NO: 3836570 - RNA, 14 nt, Human
cugcagacuuccca

SEQ ID NO: 3836571 - RNA, 17 nt, Human
cugcagacuucccagcu

SEQ ID NO: 3836572 - RNA, 14 nt, Human
cugcagagagaagc

SEQ ID NO: 3836573 - RNA, 15 nt, Human
cugcagagcaccuuu

SEQ ID NO: 3836574 - RNA, 21 nt, Human
cugcagagcaguaagggaaca

SEQ ID NO: 3836575 - RNA, 12 nt, Human
cugcagagcugc

SEQ ID NO: 3836576 - RNA, 23 nt, Human
cugcagagcugcgggcugggugu

SEQ ID NO: 3836577 - RNA, 12 nt, Human
cugcagaggacg

SEQ ID NO: 3836578 - RNA, 13 nt, Human
cugcagaggccag

SEQ ID NO: 3836579 - RNA, 21 nt, Human
cugcagaggccagaggccccc

SEQ ID NO: 3836580 - RNA, 23 nt, Human
cugcagaggggaaaccaguguag

SEQ ID NO: 3836581 - RNA, 23 nt, Human
cugcagaggggcaggcccugcac

SEQ ID NO: 3836582 - RNA, 13 nt, Human
cugcagaggguua

SEQ ID NO: 3836583 - RNA, 22 nt, Human
cugcagaggguuaggagugggu

SEQ ID NO: 3836584 - RNA, 17 nt, Human
cugcagaggucugugcu

SEQ ID NO: 3836585 - RNA, 14 nt, Human
cugcagaguuugga

SEQ ID NO: 3836586 - RNA, 18 nt, Human
cugcagauagaaagcauu

SEQ ID NO: 3836587 - RNA, 21 nt, Human
cugcagaugccacccuagcca

SEQ ID NO: 3836588 - RNA, 18 nt, Human
cugcagauuugggcugga

SEQ ID NO: 3836589 - RNA, 17 nt, Human
cugcagcaaacacucca

SEQ ID NO: 3836590 - RNA, 15 nt, Human
cugcagcaauaaagc

SEQ ID NO: 3836591 - RNA, 17 nt, Human
cugcagcaauaaagcag

SEQ ID NO: 3836592 - RNA, 12 nt, Human
cugcagcaccuc

SEQ ID NO: 3836593 - RNA, 17 nt, Human
cugcagcaccuccaggc

SEQ ID NO: 3836594 - RNA, 20 nt, Human
cugcagcaccuccaggccug

SEQ ID NO: 3836595 - RNA, 14 nt, Human
cugcagcacggaca

SEQ ID NO: 3836596 - RNA, 20 nt, Human
cugcagcacggacaauaaac

SEQ ID NO: 3836597 - RNA, 13 nt, Human
cugcagcagaggc

SEQ ID NO: 3836598 - RNA, 18 nt, Human
cugcagcagaggcacugg

SEQ ID NO: 3836599 - RNA, 20 nt, Human
cugcagcagcgguggccucu

SEQ ID NO: 3836600 - RNA, 19 nt, Human
cugcagcaugaccugugac

SEQ ID NO: 3836601 - RNA, 22 nt, Human
cugcagcauguugcugaggagu

SEQ ID NO: 3836602 - RNA, 16 nt, Human
cugcagccaggccacu

SEQ ID NO: 3836603 - RNA, 12 nt, Human
cugcagcccugg

SEQ ID NO: 3836604 - RNA, 17 nt, Human
cugcagcccuggcccau

SEQ ID NO: 3836605 - RNA, 13 nt, Human
cugcagccucaga

SEQ ID NO: 3836606 - RNA, 16 nt, Human
cugcagccucaggacu

SEQ ID NO: 3836607 - RNA, 17 nt, Human
cugcagccucaggacug

SEQ ID NO: 3836608 - RNA, 18 nt, Human
cugcagccucaggacugg

SEQ ID NO: 3836609 - RNA, 20 nt, Human
cugcagccucaggacuggga

SEQ ID NO: 3836610 - RNA, 21 nt, Human
cugcagccucaggacugggag

SEQ ID NO: 3836611 - RNA, 13 nt, Human
cugcagccucccu

SEQ ID NO: 3836612 - RNA, 21 nt, Human
cugcagccuccgcuucccugg

SEQ ID NO: 3836613 - RNA, 20 nt, Human
cugcagccuccuccugacca

SEQ ID NO: 3836614 - RNA, 18 nt, Human
cugcagccuccuucuccu

SEQ ID NO: 3836615 - RNA, 12 nt, Human
cugcagccugca

SEQ ID NO: 3836616 - RNA, 15 nt, Human
cugcagccugcagga

SEQ ID NO: 3836617 - RNA, 15 nt, Human
cugcagccuggaggc

SEQ ID NO: 3836618 - RNA, 23 nt, Human
gcaaauaaguguauuuugaaauu

SEQ ID NO: 3836619 - RNA, 22 nt, Human
gcaaauaauuuccuggugugaa

SEQ ID NO: 3836620 - RNA, 22 nt, Human
gcaaauacuuagcaaaaagugg

SEQ ID NO: 3836621 - RNA, 14 nt, Human
gcaaauauaaacau

SEQ ID NO: 3836622 - RNA, 15 nt, Human
gcaaauauaaacauc

SEQ ID NO: 3836623 - RNA, 17 nt, Human
gcaaauauaaacaucuc

SEQ ID NO: 3836624 - RNA, 20 nt, Human
gcaaaucagaaacuugugaa

SEQ ID NO: 3836625 - RNA, 15 nt, Human
gcaaaucauagcugg

SEQ ID NO: 3836626 - RNA, 14 nt, Human
gcaaaucauuuguu

SEQ ID NO: 3836627 - RNA, 17 nt, Human
gcaaauccuaugugauu

SEQ ID NO: 3836628 - RNA, 23 nt, Human
gcaaauccuaugugauuuuaacu

SEQ ID NO: 3836629 - RNA, 17 nt, Human
gcaaauccuuugugaaa

SEQ ID NO: 3836630 - RNA, 22 nt, Human
gcaaaucgaaugaaauuaacug

SEQ ID NO: 3836631 - RNA, 12 nt, Human
gcaaaugacuuu

SEQ ID NO: 3836632 - RNA, 16 nt, Human
gcaaaugagcucugaa

SEQ ID NO: 3836633 - RNA, 15 nt, Human
gcaaaugccagggcc

SEQ ID NO: 3836634 - RNA, 20 nt, Human
gcaaaugcccaagggaaaga

SEQ ID NO: 3836635 - RNA, 11 nt, Human
gcaaaugcccu

SEQ ID NO: 3836636 - RNA, 14 nt, Human
gcaaauggccucau

SEQ ID NO: 3836637 - RNA, 19 nt, Human
gcaaaugucaugcugccuu

SEQ ID NO: 3836638 - RNA, 15 nt, Human
gcaaauguuacauag

SEQ ID NO: 3836639 - RNA, 16 nt, Human
gcaaauguuuaaacau

SEQ ID NO: 3836640 - RNA, 17 nt, Human
gcaaauguuuaaacauu

SEQ ID NO: 3836641 - RNA, 19 nt, Human
gcaaauguuuauuuaaaag

SEQ ID NO: 3836642 - RNA, 16 nt, Human
gcaaauugucacagga

SEQ ID NO: 3836643 - RNA, 19 nt, Human
gcaaggggugccugggaac

SEQ ID NO: 3836644 - RNA, 14 nt, Human
gcaaggucauuuuu

SEQ ID NO: 3836645 - RNA, 18 nt, Human
gcaagguccggcccaucc

SEQ ID NO: 3836646 - RNA, 19 nt, Human
gcaagguuaagcaaggugg

SEQ ID NO: 3836647 - RNA, 17 nt, Human
gcaagguuuaaguuauu

SEQ ID NO: 3836648 - RNA, 22 nt, Human
gcaagguuuaaguuauuaagag

SEQ ID NO: 3836649 - RNA, 20 nt, Human
gcaagguuuaggcugguggc

SEQ ID NO: 3836650 - RNA, 23 nt, Human
gcaagguuuaggcugguggccca

SEQ ID NO: 3836651 - RNA, 18 nt, Human
gcaaguagauaaauauuu

SEQ ID NO: 3836652 - RNA, 19 nt, Human
gcaaguagauaaauauuug

SEQ ID NO: 3836653 - RNA, 14 nt, Human
gcaaguaugugagu

SEQ ID NO: 3836654 - RNA, 18 nt, Human
gcaaguaugugagugugu

SEQ ID NO: 3836655 - RNA, 12 nt, Human
gcaagucaggac

SEQ ID NO: 3836656 - RNA, 20 nt, Human
gcaagucccugacucucugu

SEQ ID NO: 3836657 - RNA, 21 nt, Human
gcaaguccuaagccuguuagc

SEQ ID NO: 3836658 - RNA, 19 nt, Human
gcaaguccuuuuguaaagu

SEQ ID NO: 3836659 - RNA, 19 nt, Human
gcaagucucuuuauauggc

SEQ ID NO: 3836660 - RNA, 21 nt, Human
gcaagucugcagcccggcgcc

SEQ ID NO: 3836661 - RNA, 22 nt, Human
gcaagucuuuaggucuuuguaa

SEQ ID NO: 3836662 - RNA, 21 nt, Human
gcaagugaagguuuacaauuu

SEQ ID NO: 3836663 - RNA, 13 nt, Human
gcaagugaauuug

SEQ ID NO: 3836664 - RNA, 20 nt, Human
gcaagugaauuuuucucuaa

SEQ ID NO: 3836665 - RNA, 17 nt, Human
gcaagugagagagaugg

SEQ ID NO: 3836666 - RNA, 22 nt, Human
gcaagugagagagaugggagcu

SEQ ID NO: 3836667 - RNA, 13 nt, Human
gcaagugagagcu

SEQ ID NO: 3836668 - RNA, 21 nt, Human
gcaaguguaugcacgugugca

SEQ ID NO: 3836669 - RNA, 23 nt, Human
gcaaguguguaugugcgugugug

SEQ ID NO: 3836670 - RNA, 12 nt, Human
gcaagugugugc

SEQ ID NO: 3836671 - RNA, 13 nt, Human
gcaagugugugca

SEQ ID NO: 3836672 - RNA, 20 nt, Human
gcaaguuaagagaaacuuua

SEQ ID NO: 3836673 - RNA, 22 nt, Human
gcaaguuucuagcuagaaauau

SEQ ID NO: 3836674 - RNA, 20 nt, Human
gcaaguuuucccugaaguua

SEQ ID NO: 3836675 - RNA, 16 nt, Human
gcaauaaaagcccagg

SEQ ID NO: 3836676 - RNA, 19 nt, Human
gcaauaaaagcccaggagc

SEQ ID NO: 3836677 - RNA, 16 nt, Human
gcaauaaaauggguuu

SEQ ID NO: 3836678 - RNA, 13 nt, Human
gcaauaaaauuua

SEQ ID NO: 3836679 - RNA, 15 nt, Human
gcaauaaaauuuaaa

SEQ ID NO: 3836680 - RNA, 13 nt, Human
gcaauaaagaaga

SEQ ID NO: 3836681 - RNA, 11 nt, Human
gcaauaaagca

SEQ ID NO: 3836682 - RNA, 13 nt, Human
gcaauaaaguaua

SEQ ID NO: 3836683 - RNA, 19 nt, Human
gcaauaaaucugacccagu

SEQ ID NO: 3836684 - RNA, 21 nt, Human
gcaauaaaucugacccagugc

SEQ ID NO: 3836685 - RNA, 16 nt, Human
gcaauaaauuuugaaa

SEQ ID NO: 3836686 - RNA, 16 nt, Human
gcaauaacagcugcaa

SEQ ID NO: 3836687 - RNA, 22 nt, Human
gcaauaacaguaguguuacaug

SEQ ID NO: 3836688 - RNA, 21 nt, Human
gcaauaacguuuaagccaaaa

SEQ ID NO: 3836689 - RNA, 23 nt, Human
gcaauaaggggagaguaacccug

SEQ ID NO: 3836690 - RNA, 13 nt, Human
gcaauaaugcagu

SEQ ID NO: 3836691 - RNA, 18 nt, Human
gcaauaauggucccaucc

SEQ ID NO: 3836692 - RNA, 20 nt, Human
gcaauaauggucccauccag

SEQ ID NO: 3836693 - RNA, 17 nt, Human
gcaauagugggcccucc

SEQ ID NO: 3836694 - RNA, 17 nt, Human
gcaauaguguguucuga

SEQ ID NO: 3836695 - RNA, 14 nt, Human
gcaauauaaccaau

SEQ ID NO: 3836696 - RNA, 17 nt, Human
gcaauauaaccaauguu

SEQ ID NO: 3836697 - RNA, 20 nt, Human
gcaauauacuggaaagcuuu

SEQ ID NO: 3836698 - RNA, 17 nt, Human
gcaauauagaaacacga

SEQ ID NO: 3836699 - RNA, 13 nt, Human
gcaauauauuuug

SEQ ID NO: 3836700 - RNA, 18 nt, Human
gcaauauauuuuguaugc

SEQ ID NO: 3836701 - RNA, 19 nt, Human
gcaauaucuucguuaguaa

SEQ ID NO: 3836702 - RNA, 22 nt, Human
gcaauauuguauauuuuuaucu

SEQ ID NO: 3836703 - RNA, 17 nt, Human
gcaauauuuaaggagau

SEQ ID NO: 3836704 - RNA, 19 nt, Human
gcaauauuuccucauguga

SEQ ID NO: 3836705 - RNA, 18 nt, Human
gcaauauuugaauuuuaa

SEQ ID NO: 3836706 - RNA, 15 nt, Human
gcaaucaaaucugcu

SEQ ID NO: 3836707 - RNA, 15 nt, Human
gcaaucacagaugag

SEQ ID NO: 3836708 - RNA, 20 nt, Human
gcaauccauguuaguuuuua

SEQ ID NO: 3836709 - RNA, 22 nt, Human
gcaauccauguuaguuuuuacu

SEQ ID NO: 3836710 - RNA, 10 nt, Human
gcaauccuaa

SEQ ID NO: 3836711 - RNA, 12 nt, Human
gcaauccuccug

SEQ ID NO: 3836712 - RNA, 13 nt, Human
gcaauccuccuga

SEQ ID NO: 3836713 - RNA, 17 nt, Human
gcaauccugcaagaaca

SEQ ID NO: 3836714 - RNA, 16 nt, Human
gcaauccuuacaaaug

SEQ ID NO: 3836715 - RNA, 21 nt, Human
gcaaucguaauguacagaugg

SEQ ID NO: 3836716 - RNA, 14 nt, Human
gcaaucuauaauau

SEQ ID NO: 3836717 - RNA, 23 nt, Human
gcaaucuauuaauagcugccuua

SEQ ID NO: 3836718 - RNA, 19 nt, Human
gcaaucucggcucauugaa

SEQ ID NO: 3836719 - RNA, 17 nt, Human
gcaaucucuucauuauu

SEQ ID NO: 3836720 - RNA, 23 nt, Human
gcaaucucuucauuauucucugc

SEQ ID NO: 3836721 - RNA, 22 nt, Human
gcaaucugacccuaugggucua

SEQ ID NO: 3836722 - RNA, 16 nt, Human
gcaaugaaagguacua

SEQ ID NO: 3836723 - RNA, 18 nt, Human
gcaaugacagguaaauua

SEQ ID NO: 3836724 - RNA, 19 nt, Human
gcaaugacaucucaggggc

SEQ ID NO: 3836725 - RNA, 14 nt, Human
gcaaugaccuuuca

SEQ ID NO: 3836726 - RNA, 20 nt, Human
gcaaugaguguguuggcuug

SEQ ID NO: 3836727 - RNA, 16 nt, Human
gcaaugaugaaugaga

SEQ ID NO: 3836728 - RNA, 15 nt, Human
gcaaugauguccaga

SEQ ID NO: 3836729 - RNA, 19 nt, Human
gcaaugccaucaucuccug

SEQ ID NO: 3836730 - RNA, 13 nt, Human
gcaauggcagccu

SEQ ID NO: 3836731 - RNA, 14 nt, Human
gcaauggcagccuu

SEQ ID NO: 3836732 - RNA, 15 nt, Human
gcaauggcagccuug

SEQ ID NO: 3836733 - RNA, 14 nt, Human
gcaaugggcacugg

SEQ ID NO: 3836734 - RNA, 19 nt, Human
gcaaugguaguuucugugg

SEQ ID NO: 3836735 - RNA, 20 nt, Human
gcaaugguguugcccugagu

SEQ ID NO: 3836736 - RNA, 15 nt, Human
gcaauguaaauauuu

SEQ ID NO: 3836737 - RNA, 18 nt, Human
gcaauguaaauauuuuaa

SEQ ID NO: 3836738 - RNA, 14 nt, Human
gcaaugucugugcu

SEQ ID NO: 3836739 - RNA, 15 nt, Human
gcaaugucugugcua

SEQ ID NO: 3836740 - RNA, 14 nt, Human
gcaaugugaaaaau

SEQ ID NO: 3836741 - RNA, 14 nt, Human
gcaaugugauaaaa

SEQ ID NO: 3836742 - RNA, 14 nt, Human
gcaaugugcuacug

SEQ ID NO: 3836743 - RNA, 16 nt, Human
gcaauguguauaaaca

SEQ ID NO: 3836744 - RNA, 20 nt, Human
gcaauguguguauauggaca

SEQ ID NO: 3836745 - RNA, 21 nt, Human
gcaauuaaagugauacugaaa

SEQ ID NO: 3836746 - RNA, 20 nt, Human
gcaauuacaacggagucaaa

SEQ ID NO: 3836747 - RNA, 16 nt, Human
gcaauuaggauuuuga

SEQ ID NO: 3836748 - RNA, 19 nt, Human
gcaauuaggauuuugaugu

SEQ ID NO: 3836749 - RNA, 16 nt, Human
gcaauuaugaaaauaa

SEQ ID NO: 3836750 - RNA, 22 nt, Human
gcaauucaaaaguuccaagagu

SEQ ID NO: 3836751 - RNA, 18 nt, Human
gcaauuccccucugcugc

SEQ ID NO: 3836752 - RNA, 16 nt, Human
gcaauucuccugccuc

SEQ ID NO: 3836753 - RNA, 18 nt, Human
gcaauucuccugccucag

SEQ ID NO: 3836754 - RNA, 12 nt, Human
gcaauugccuuu

SEQ ID NO: 3836755 - RNA, 15 nt, Human
gcaauugcuuaggau

SEQ ID NO: 3836756 - RNA, 18 nt, Human
gcaauuggaacaaaguga

SEQ ID NO: 3836757 - RNA, 13 nt, Human
gcaauugucuauu

SEQ ID NO: 3836758 - RNA, 24 nt, Human
gcaauugugcucuucauuuaggau

SEQ ID NO: 3836759 - RNA, 17 nt, Human
gcaauuuauuaaaauga

SEQ ID NO: 3836760 - RNA, 18 nt, Human
gcaauuuguuugugcuuc

SEQ ID NO: 3836761 - RNA, 21 nt, Human
gcaauuuuaacacacauaaag

SEQ ID NO: 3836762 - RNA, 19 nt, Human
gcaauuuuccuugaagccg

SEQ ID NO: 3836763 - RNA, 22 nt, Human
gcaauuuucuaagcaauuucuu

SEQ ID NO: 3836764 - RNA, 16 nt, Human
gcaauuuuuauauuaa

SEQ ID NO: 3836765 - RNA, 17 nt, Human
gcacaaacacaagguca

SEQ ID NO: 3836766 - RNA, 17 nt, Human
gcacaaacauuuuucaa

SEQ ID NO: 3836767 - RNA, 18 nt, Human
gcacaaacauuuuucaac

SEQ ID NO: 3836768 - RNA, 23 nt, Human
gcacaaagaugggugaaggcugg

SEQ ID NO: 3836769 - RNA, 13 nt, Human
gcacaaaguggca

SEQ ID NO: 3836770 - RNA, 14 nt, Human
gcacaaaguggcau

SEQ ID NO: 3836771 - RNA, 17 nt, Human
gcacaacccccagcucc

SEQ ID NO: 3836772 - RNA, 17 nt, Human
gcacaaccugcaucuuu

SEQ ID NO: 3836773 - RNA, 19 nt, Human
gcacaacuuuaagaggaca

SEQ ID NO: 3836774 - RNA, 17 nt, Human
gcacaagaagcgugaga

SEQ ID NO: 3836775 - RNA, 14 nt, Human
gcacaagaauggau

SEQ ID NO: 3836776 - RNA, 19 nt, Human
gcacaagacugacgccagg

SEQ ID NO: 3836777 - RNA, 23 nt, Human
gcacaagcaaaagggugucugag

SEQ ID NO: 3836778 - RNA, 12 nt, Human
gcacaagccagg

SEQ ID NO: 3836779 - RNA, 15 nt, Human
gcacaaggauugaaa

SEQ ID NO: 3836780 - RNA, 21 nt, Human
gcacaaguguaaugaauaccu

SEQ ID NO: 3836781 - RNA, 17 nt, Human
gcacaaguuauuuaaau

SEQ ID NO: 3836782 - RNA, 16 nt, Human
gcacaauaaaaauguu

SEQ ID NO: 3836783 - RNA, 18 nt, Human
gcacaauaaauggcugua

SEQ ID NO: 3836784 - RNA, 17 nt, Human
aacauccauguccuaug

SEQ ID NO: 3836785 - RNA, 22 nt, Human
aacauccauguccuauguguga

SEQ ID NO: 3836786 - RNA, 16 nt, Human
aacaucccauugcccu

SEQ ID NO: 3836787 - RNA, 18 nt, Human
gcagagcugauggagaag

SEQ ID NO: 3836788 - RNA, 21 nt, Human
gcagagcugauggagaaggaa

SEQ ID NO: 3836789 - RNA, 17 nt, Human
gcagagcugcgggcugg

SEQ ID NO: 3836790 - RNA, 12 nt, Human
gcagagcuggcu

SEQ ID NO: 3836791 - RNA, 12 nt, Human
gcagagcuggug

SEQ ID NO: 3836792 - RNA, 15 nt, Human
gcagagcuuuucaga

SEQ ID NO: 3836793 - RNA, 18 nt, Human
gcagaggaaagcaaagga

SEQ ID NO: 3836794 - RNA, 12 nt, Human
gcagaggagggg

SEQ ID NO: 3836795 - RNA, 12 nt, Human
gcagaggcacug

SEQ ID NO: 3836796 - RNA, 21 nt, Human
gcagaggcaguaccugggcaa

SEQ ID NO: 3836797 - RNA, 17 nt, Human
gcagaggccugggcugg

SEQ ID NO: 3836798 - RNA, 22 nt, Human
gcagaggccugggcugggaaaa

SEQ ID NO: 3836799 - RNA, 11 nt, Human
gcagaggcugg

SEQ ID NO: 3836800 - RNA, 21 nt, Human
gcagaggcuggaggcagggcc

SEQ ID NO: 3836801 - RNA, 22 nt, Human
gcagaggcuggaggcagggccu

SEQ ID NO: 3836802 - RNA, 17 nt, Human
gcagaggcuggccucag

SEQ ID NO: 3836803 - RNA, 18 nt, Human
gcagaggcuggccucaga

SEQ ID NO: 3836804 - RNA, 14 nt, Human
gcagagggcacaga

SEQ ID NO: 3836805 - RNA, 21 nt, Human
gcagagggcuggaggcccagg

SEQ ID NO: 3836806 - RNA, 24 nt, Human
gcagagggcuggaggcccaggcug

SEQ ID NO: 3836807 - RNA, 13 nt, Human
gcagaggggcaga

SEQ ID NO: 3836808 - RNA, 17 nt, Human
gcagaggggcaggcccu

SEQ ID NO: 3836809 - RNA, 18 nt, Human
gcagaggggcaggcccug

SEQ ID NO: 3836810 - RNA, 18 nt, Human
gcagaggggcuuucugga

SEQ ID NO: 3836811 - RNA, 21 nt, Human
gcagagguaaaagugugagca

SEQ ID NO: 3836812 - RNA, 14 nt, Human
gcagagguacccug

SEQ ID NO: 3836813 - RNA, 16 nt, Human
gcagagguacccuggg

SEQ ID NO: 3836814 - RNA, 16 nt, Human
gcagaggucugugcug

SEQ ID NO: 3836815 - RNA, 18 nt, Human
gcagaggucugugcugag

SEQ ID NO: 3836816 - RNA, 18 nt, Human
gcagagguugcagugagc

SEQ ID NO: 3836817 - RNA, 14 nt, Human
gcagagucagcaga

SEQ ID NO: 3836818 - RNA, 13 nt, Human
gcagaguggcagu

SEQ ID NO: 3836819 - RNA, 17 nt, Human
gcagaguuacaguucug

SEQ ID NO: 3836820 - RNA, 18 nt, Human
gcagaguuacaguucugu

SEQ ID NO: 3836821 - RNA, 21 nt, Human
gcagaguuacaguucuguggu

SEQ ID NO: 3836822 - RNA, 15 nt, Human
gcagaguuacuugau

SEQ ID NO: 3836823 - RNA, 21 nt, Human
gcagaguugaagacagagcua

SEQ ID NO: 3836824 - RNA, 14 nt, Human
gcagaguuguaaau

SEQ ID NO: 3836825 - RNA, 16 nt, Human
gcagaguuguaaauau

SEQ ID NO: 3836826 - RNA, 20 nt, Human
gcagaguuuguguguugucu

SEQ ID NO: 3836827 - RNA, 24 nt, Human
gcagaguuuguguguugucuugaa

SEQ ID NO: 3836828 - RNA, 21 nt, Human
gcagauaacauuuguguguua

SEQ ID NO: 3836829 - RNA, 16 nt, Human
gcagauaaucagccuc

SEQ ID NO: 3836830 - RNA, 17 nt, Human
gcagauaaucagccucu

SEQ ID NO: 3836831 - RNA, 18 nt, Human
gcagauaccucacccugc

SEQ ID NO: 3836832 - RNA, 22 nt, Human
gcagauacuacugaccagacaa

SEQ ID NO: 3836833 - RNA, 16 nt, Human
gcagauacugcugugu

SEQ ID NO: 3836834 - RNA, 17 nt, Human
gcagaucaccugagguc

SEQ ID NO: 3836835 - RNA, 14 nt, Human
gcagauccaggacu

SEQ ID NO: 3836836 - RNA, 15 nt, Human
gcagauccaggacua

SEQ ID NO: 3836837 - RNA, 15 nt, Human
gcagaucccagcuca

SEQ ID NO: 3836838 - RNA, 13 nt, Human
gcagaucugugcc

SEQ ID NO: 3836839 - RNA, 23 nt, Human
gcagcugggcccaacccugucug

SEQ ID NO: 3836840 - RNA, 14 nt, Human
gcagcuguuagagu

SEQ ID NO: 3836841 - RNA, 16 nt, Human
gcagcuguuuaaaugu

SEQ ID NO: 3836842 - RNA, 20 nt, Human
gcagcuguuuuguugacauu

SEQ ID NO: 3836843 - RNA, 20 nt, Human
gcagcuuagggcccuggagg

SEQ ID NO: 3836844 - RNA, 14 nt, Human
gcagcuucaccaga

SEQ ID NO: 3836845 - RNA, 14 nt, Human
gcagcuuccuguca

SEQ ID NO: 3836846 - RNA, 14 nt, Human
gcagcuucugccac

SEQ ID NO: 3836847 - RNA, 17 nt, Human
gcagcuucugccacuuc

SEQ ID NO: 3836848 - RNA, 16 nt, Human
gcagcuucugcccccu

SEQ ID NO: 3836849 - RNA, 16 nt, Human
gcagcuugaggguugg

SEQ ID NO: 3836850 - RNA, 21 nt, Human
gcagcuugggagagccccugg

SEQ ID NO: 3836851 - RNA, 16 nt, Human
gcagcuuguagccagc

SEQ ID NO: 3836852 - RNA, 19 nt, Human
gcagcuuguagccagccgg

SEQ ID NO: 3836853 - RNA, 17 nt, Human
gcagcuuuaaacucagg

SEQ ID NO: 3836854 - RNA, 19 nt, Human
gcagcuuuaaacucaggga

SEQ ID NO: 3836855 - RNA, 21 nt, Human
gcagcuuuaaccauuaaaacu

SEQ ID NO: 3836856 - RNA, 13 nt, Human
gcagcuuugcuca

SEQ ID NO: 3836857 - RNA, 14 nt, Human
gcagcuuugcucau

SEQ ID NO: 3836858 - RNA, 15 nt, Human
gcagcuuugcucaua

SEQ ID NO: 3836859 - RNA, 18 nt, Human
gcaggaaauggcugugga

SEQ ID NO: 3836860 - RNA, 16 nt, Human
gcaggaacaaacaggg

SEQ ID NO: 3836861 - RNA, 17 nt, Human
gcaggaacaaugacuac

SEQ ID NO: 3836862 - RNA, 16 nt, Human
gcaggaacucccagca

SEQ ID NO: 3836863 - RNA, 18 nt, Human
gcaggaaggagcugccug

SEQ ID NO: 3836864 - RNA, 20 nt, Human
gcaggaaggagcugccugga

SEQ ID NO: 3836865 - RNA, 23 nt, Human
gcaggaaggagcugccuggaccc

SEQ ID NO: 3836866 - RNA, 15 nt, Human
gcaggaaggccuggg

SEQ ID NO: 3836867 - RNA, 17 nt, Human
gcaggaaggccugggug

SEQ ID NO: 3836868 - RNA, 11 nt, Human
gcaggaaggcu

SEQ ID NO: 3836869 - RNA, 19 nt, Human
gcaggacaacgaggaagcc

SEQ ID NO: 3836870 - RNA, 19 nt, Human
gcaggacacugcagaacag

SEQ ID NO: 3836871 - RNA, 22 nt, Human
gcaggaccagccagcagcagcc

SEQ ID NO: 3836872 - RNA, 13 nt, Human
gcaggaccagccc

SEQ ID NO: 3836873 - RNA, 14 nt, Human
gcaggaccagccca

SEQ ID NO: 3836874 - RNA, 16 nt, Human
gcaggaccagcccacg

SEQ ID NO: 3836875 - RNA, 11 nt, Human
gcaggaccuca

SEQ ID NO: 3836876 - RNA, 15 nt, Human
gcaggaccucgugcc

SEQ ID NO: 3836877 - RNA, 14 nt, Human
gcaggaccugccug

SEQ ID NO: 3836878 - RNA, 15 nt, Human
gcaggaccugccugu

SEQ ID NO: 3836879 - RNA, 20 nt, Human
gcaggaccuucgggcugugc

SEQ ID NO: 3836880 - RNA, 13 nt, Human
gcaggacgacugu

SEQ ID NO: 3836881 - RNA, 17 nt, Human
gcaggacgugggcuggg

SEQ ID NO: 3836882 - RNA, 23 nt, Human
gcaggacucacagguuggaagag

SEQ ID NO: 3836883 - RNA, 13 nt, Human
gcaggacugaugu

SEQ ID NO: 3836884 - RNA, 19 nt, Human
gcaggacuuugaggcaagu

SEQ ID NO: 3836885 - RNA, 16 nt, Human
gcaggagaggagagcc

SEQ ID NO: 3836886 - RNA, 18 nt, Human
gcaggagaggagagccag

SEQ ID NO: 3836887 - RNA, 19 nt, Human
gcaggagaggagagccaga

SEQ ID NO: 3836888 - RNA, 16 nt, Human
gcaggagcacacccag

SEQ ID NO: 3836889 - RNA, 20 nt, Human
gcaggagcacacccagcccc

SEQ ID NO: 3836890 - RNA, 13 nt, Human
gcaggagcaguau

SEQ ID NO: 3836891 - RNA, 17 nt, Human
gcaggagcaguaucaug

SEQ ID NO: 3836892 - RNA, 14 nt, Human
gcaggagccugagc

SEQ ID NO: 3836893 - RNA, 13 nt, Human
gcaggagcucaga

SEQ ID NO: 3836894 - RNA, 16 nt, Human
gcaggagcucagauga

SEQ ID NO: 3836895 - RNA, 22 nt, Human
gcaggagcuucugggagauuuu

SEQ ID NO: 3836896 - RNA, 15 nt, Human
gcaggaggaggugcc

SEQ ID NO: 3836897 - RNA, 20 nt, Human
gcaggaggaucacuugaguc

SEQ ID NO: 3836898 - RNA, 23 nt, Human
gcaggaggaucacuugaguccag

SEQ ID NO: 3836899 - RNA, 14 nt, Human
gcaggaggccaggc

SEQ ID NO: 3836900 - RNA, 14 nt, Human
gcaggaggccccug

SEQ ID NO: 3836901 - RNA, 11 nt, Human
gcaggagggag

SEQ ID NO: 3836902 - RNA, 18 nt, Human
gcaggagggcccuaccug

SEQ ID NO: 3836903 - RNA, 13 nt, Human
gcaggaggggagu

SEQ ID NO: 3836904 - RNA, 15 nt, Human
gcaggaggggggagg

SEQ ID NO: 3836905 - RNA, 17 nt, Human
gcaggaguagcugagcu

SEQ ID NO: 3836906 - RNA, 19 nt, Human
gcaggaguagcugagcuca

SEQ ID NO: 3836907 - RNA, 15 nt, Human
gcaggaguggugcag

SEQ ID NO: 3836908 - RNA, 20 nt, Human
gcaggaguuucguuuucaaa

SEQ ID NO: 3836909 - RNA, 21 nt, Human
gcaggaguuucguuuucaaaa

SEQ ID NO: 3836910 - RNA, 18 nt, Human
gcaggaucucaccaggca

SEQ ID NO: 3836911 - RNA, 20 nt, Human
gcaggaucucagaucacugc

SEQ ID NO: 3836912 - RNA, 16 nt, Human
gcaggauggccuggcc

SEQ ID NO: 3836913 - RNA, 21 nt, Human
gcaggauugauuaugcagaau

SEQ ID NO: 3836914 - RNA, 21 nt, Human
gcaggauuggggaagagagcc

SEQ ID NO: 3836915 - RNA, 16 nt, Human
gcaggauuuguucucu

SEQ ID NO: 3836916 - RNA, 17 nt, Human
gcaggauuuguucucug

SEQ ID NO: 3836917 - RNA, 18 nt, Human
gcaggcacagcacaggga

SEQ ID NO: 3836918 - RNA, 20 nt, Human
gcaggcaccuuaguggcuuu

SEQ ID NO: 3836919 - RNA, 10 nt, Human
gcaggcagac

SEQ ID NO: 3836920 - RNA, 11 nt, Human
gcaggcagaca

SEQ ID NO: 3836921 - RNA, 14 nt, Human
gcaggcagccagca

SEQ ID NO: 3836922 - RNA, 19 nt, Human
gcaggcagccagcaucugg

SEQ ID NO: 3836923 - RNA, 21 nt, Human
gcaggcagcgccaagcaaccu

SEQ ID NO: 3836924 - RNA, 22 nt, Human
gcaggcagcgccaagcaaccug

SEQ ID NO: 3836925 - RNA, 18 nt, Human
gcaggcaggaacaaacag

SEQ ID NO: 3836926 - RNA, 22 nt, Human
gcaggcaggaacaaacagggcu

SEQ ID NO: 3836927 - RNA, 18 nt, Human
gcaggcaggcucccaggg

SEQ ID NO: 3836928 - RNA, 13 nt, Human
gcaggcagggcug

SEQ ID NO: 3836929 - RNA, 20 nt, Human
gcaggcagguguuuauuaaa

SEQ ID NO: 3836930 - RNA, 17 nt, Human
gcaggcauagaggcuuc

SEQ ID NO: 3836931 - RNA, 21 nt, Human
gcaggcaucggggagccggga

SEQ ID NO: 3836932 - RNA, 20 nt, Human
cugccucucugcaggucccu

SEQ ID NO: 3836933 - RNA, 22 nt, Human
cugccucucugcaggucccuaa

SEQ ID NO: 3836934 - RNA, 21 nt, Human
cugccucugagggaaagccca

SEQ ID NO: 3836935 - RNA, 12 nt, Human
cugccucugcca

SEQ ID NO: 3836936 - RNA, 20 nt, Human
cugccucugccacacucuga

SEQ ID NO: 3836937 - RNA, 14 nt, Human
cugccucugccugc

SEQ ID NO: 3836938 - RNA, 18 nt, Human
cugccucugccugcauuc

SEQ ID NO: 3836939 - RNA, 13 nt, Human
cugccucugccuu

SEQ ID NO: 3836940 - RNA, 20 nt, Human
cugccucuguuugacaaacc

SEQ ID NO: 3836941 - RNA, 23 nt, Human
cugccucuuagacuucugcuuuc

SEQ ID NO: 3836942 - RNA, 13 nt, Human
cugccucuucucu

SEQ ID NO: 3836943 - RNA, 22 nt, Human
cugccucuucugggagggcagc

SEQ ID NO: 3836944 - RNA, 16 nt, Human
cugccucuucuguggg

SEQ ID NO: 3836945 - RNA, 16 nt, Human
cugccugagggccccu

SEQ ID NO: 3836946 - RNA, 20 nt, Human
cugccugagggccccucugc

SEQ ID NO: 3836947 - RNA, 22 nt, Human
cugccugagggccccucugccc

SEQ ID NO: 3836948 - RNA, 20 nt, Human
cugccugagucgugaccugc

SEQ ID NO: 3836949 - RNA, 18 nt, Human
cugccugcaauauuugaa

SEQ ID NO: 3836950 - RNA, 16 nt, Human
cugccugcagaggucu

SEQ ID NO: 3836951 - RNA, 20 nt, Human
cugccugcaguacuuuaccu

SEQ ID NO: 3836952 - RNA, 17 nt, Human
cugccugccauguaccu

SEQ ID NO: 3836953 - RNA, 13 nt, Human
cugccugcccagg

SEQ ID NO: 3836954 - RNA, 15 nt, Human
cugccugccccgccc

SEQ ID NO: 3836955 - RNA, 14 nt, Human
cugccugcccuggu

SEQ ID NO: 3836956 - RNA, 21 nt, Human
cugccugcccugucaggaggc

SEQ ID NO: 3836957 - RNA, 14 nt, Human
cugccugccugucu

SEQ ID NO: 3836958 - RNA, 16 nt, Human
cugccugccugucugu

SEQ ID NO: 3836959 - RNA, 20 nt, Human
cugccugccuuaagugagga

SEQ ID NO: 3836960 - RNA, 17 nt, Human
cugccugcgucuuccgc

SEQ ID NO: 3836961 - RNA, 18 nt, Human
cugccugcucgcucccug

SEQ ID NO: 3836962 - RNA, 13 nt, Human
cugccugcuuggg

SEQ ID NO: 3836963 - RNA, 22 nt, Human
cugccugcuuuucacugcugca

SEQ ID NO: 3836964 - RNA, 22 nt, Human
cugccugcuuuuuauggccugu

SEQ ID NO: 3836965 - RNA, 20 nt, Human
cugccuggaagagcagcccu

SEQ ID NO: 3836966 - RNA, 17 nt, Human
cugccuggaccagccuc

SEQ ID NO: 3836967 - RNA, 18 nt, Human
cugccuggacuagaggga

SEQ ID NO: 3836968 - RNA, 10 nt, Human
cugccuggag

SEQ ID NO: 3836969 - RNA, 19 nt, Human
cugccuggagccccacugc

SEQ ID NO: 3836970 - RNA, 12 nt, Human
cugccuggagga

SEQ ID NO: 3836971 - RNA, 15 nt, Human
cugccuggaggaccu

SEQ ID NO: 3836972 - RNA, 17 nt, Human
cugccuggaggaccuga

SEQ ID NO: 3836973 - RNA, 20 nt, Human
cugccuggaggaccugagcc

SEQ ID NO: 3836974 - RNA, 21 nt, Human
cugccuggaggaccugagccu

SEQ ID NO: 3836975 - RNA, 18 nt, Human
cugccuggccacugcucc

SEQ ID NO: 3836976 - RNA, 16 nt, Human
cugccuggccaggcag

SEQ ID NO: 3836977 - RNA, 11 nt, Human
cugccuggccc

SEQ ID NO: 3836978 - RNA, 12 nt, Human
cugccuggcccc

SEQ ID NO: 3836979 - RNA, 14 nt, Human
cugccuggccccca

SEQ ID NO: 3836980 - RNA, 19 nt, Human
cugccuggcccccaaccuc

SEQ ID NO: 3836981 - RNA, 16 nt, Human
cugccuggcccccagc

SEQ ID NO: 3836982 - RNA, 15 nt, Human
cugccuggccggcca

SEQ ID NO: 3836983 - RNA, 12 nt, Human
cugccuggccuu

SEQ ID NO: 3836984 - RNA, 16 nt, Human
cugccugggcuguugg

SEQ ID NO: 3836985 - RNA, 19 nt, Human
cugccugggcuguuggcac

SEQ ID NO: 3836986 - RNA, 22 nt, Human
cugccuggggcgggccccucau

SEQ ID NO: 3836987 - RNA, 22 nt, Human
cugccuggguuccaauccuggc

SEQ ID NO: 3836988 - RNA, 12 nt, Human
cugccuggguuu

SEQ ID NO: 3836989 - RNA, 20 nt, Human
cugccuggguuuuguucccu

SEQ ID NO: 3836990 - RNA, 17 nt, Human
cugccugguccucacac

SEQ ID NO: 3836991 - RNA, 17 nt, Human
cugccuggucuccugcc

SEQ ID NO: 3836992 - RNA, 16 nt, Human
cugccuguagcaguga

SEQ ID NO: 3836993 - RNA, 15 nt, Human
cugccuguagcccac

SEQ ID NO: 3836994 - RNA, 14 nt, Human
gcagaugacaagau

SEQ ID NO: 3836995 - RNA, 21 nt, Human
gcagaugacaagaugguacaa

SEQ ID NO: 3836996 - RNA, 13 nt, Human
gcagaugcaauga

SEQ ID NO: 3836997 - RNA, 19 nt, Human
gcagaugcagcucuuccug

SEQ ID NO: 3836998 - RNA, 14 nt, Human
gcagaugccacccu

SEQ ID NO: 3836999 - RNA, 22 nt, Human
gcagauggaaugcuguguuaaa

SEQ ID NO: 3837000 - RNA, 16 nt, Human
gcagaugugcagcaga

SEQ ID NO: 3837001 - RNA, 22 nt, Human
gcagaugugcagcagauuggaa

SEQ ID NO: 3837002 - RNA, 16 nt, Human
gcagauuauucacuga

SEQ ID NO: 3837003 - RNA, 19 nt, Human
gcagauucagaaaugaggc

SEQ ID NO: 3837004 - RNA, 21 nt, Human
gcagauucagaaaugaggcca

SEQ ID NO: 3837005 - RNA, 19 nt, Human
gcagauucauuuuucuuuc

SEQ ID NO: 3837006 - RNA, 19 nt, Human
gcagauugagaccuacagg

SEQ ID NO: 3837007 - RNA, 16 nt, Human
gcagauuggaaggaga

SEQ ID NO: 3837008 - RNA, 22 nt, Human
gcagauuggaaggagacacaga

SEQ ID NO: 3837009 - RNA, 20 nt, Human
gcagauuuagugaaagcuag

SEQ ID NO: 3837010 - RNA, 16 nt, Human
gcagauuuuacaaaag

SEQ ID NO: 3837011 - RNA, 16 nt, Human
gcagauuuuacagagc

SEQ ID NO: 3837012 - RNA, 17 nt, Human
gcagauuuuaguuuuau

SEQ ID NO: 3837013 - RNA, 15 nt, Human
gcagcaaaaauauaa

SEQ ID NO: 3837014 - RNA, 16 nt, Human
gcagcaaaaauauaaa

SEQ ID NO: 3837015 - RNA, 19 nt, Human
gcagcaaaaauauaaaaua

SEQ ID NO: 3837016 - RNA, 14 nt, Human
gcagcaacacacau

SEQ ID NO: 3837017 - RNA, 15 nt, Human
gcagcaacuuguccu

SEQ ID NO: 3837018 - RNA, 18 nt, Human
gcagcaacuuguccuagc

SEQ ID NO: 3837019 - RNA, 14 nt, Human
gcagcaagaaaaaa

SEQ ID NO: 3837020 - RNA, 15 nt, Human
gcagcaagaaaaaaa

SEQ ID NO: 3837021 - RNA, 19 nt, Human
gcagcaagaaaaaaaaaug

SEQ ID NO: 3837022 - RNA, 17 nt, Human
gcagcaaggcccgagca

SEQ ID NO: 3837023 - RNA, 21 nt, Human
gcagcaaggcccgagcagcug

SEQ ID NO: 3837024 - RNA, 12 nt, Human
gcagcaauaaag

SEQ ID NO: 3837025 - RNA, 12 nt, Human
gcagcaauuuaa

SEQ ID NO: 3837026 - RNA, 22 nt, Human
gcagcacagcaaggaggcuggc

SEQ ID NO: 3837027 - RNA, 16 nt, Human
gcagcaccgccucuuc

SEQ ID NO: 3837028 - RNA, 19 nt, Human
gcagcaccguucugugcac

SEQ ID NO: 3837029 - RNA, 14 nt, Human
gcagcaccuccagg

SEQ ID NO: 3837030 - RNA, 18 nt, Human
gcagcaccuccaggccug

SEQ ID NO: 3837031 - RNA, 17 nt, Human
gcagcaccuccucagcc

SEQ ID NO: 3837032 - RNA, 20 nt, Human
gcagcaccuccucagccuga

SEQ ID NO: 3837033 - RNA, 17 nt, Human
gcagcagacacaugcca

SEQ ID NO: 3837034 - RNA, 18 nt, Human
gcagcagagccuggaaga

SEQ ID NO: 3837035 - RNA, 21 nt, Human
gcagcagauuggaaggagaca

SEQ ID NO: 3837036 - RNA, 17 nt, Human
gcagcagccagcccugc

SEQ ID NO: 3837037 - RNA, 20 nt, Human
gcagcagccagcccugccug

SEQ ID NO: 3837038 - RNA, 13 nt, Human
gcagcagccccca

SEQ ID NO: 3837039 - RNA, 22 nt, Human
gcagcagcccccagcucccacc

SEQ ID NO: 3837040 - RNA, 20 nt, Human
gcagcagccucgccccuggc

SEQ ID NO: 3837041 - RNA, 21 nt, Human
gcagcaggaauauaugugugc

SEQ ID NO: 3837042 - RNA, 18 nt, Human
gcagcaggacuguccccu

SEQ ID NO: 3837043 - RNA, 15 nt, Human
gcagcaggagggggg

SEQ ID NO: 3837044 - RNA, 19 nt, Human
gcagcaggaggggggaggg

SEQ ID NO: 3837045 - RNA, 21 nt, Human
gcagcaggaggggggagggaa

SEQ ID NO: 3837046 - RNA, 19 nt, Human
gcagcagggagggcuucug

SEQ ID NO: 3837047 - RNA, 20 nt, Human
gcagcagggagggcuucugc

SEQ ID NO: 3837048 - RNA, 12 nt, Human
gcagcagggcua

SEQ ID NO: 3837049 - RNA, 19 nt, Human
gcagcagggcuacccugag

SEQ ID NO: 3837050 - RNA, 19 nt, Human
gcagcagguagccugcugg

SEQ ID NO: 3837051 - RNA, 14 nt, Human
gcagcaggugcugc

SEQ ID NO: 3837052 - RNA, 17 nt, Human
gcagcaggugcugcuac

SEQ ID NO: 3837053 - RNA, 20 nt, Human
gcagcaggugcugcuacccu

SEQ ID NO: 3837054 - RNA, 20 nt, Human
gcagcagguggcagaauggg

SEQ ID NO: 3837055 - RNA, 18 nt, Human
gcagcagugaaaacaagu

SEQ ID NO: 3837056 - RNA, 23 nt, Human
gcagcagugugaggccagggcag

SEQ ID NO: 3837057 - RNA, 17 nt, Human
gcagcauaaagaauuug

SEQ ID NO: 3837058 - RNA, 12 nt, Human
gcagcauaaagg

SEQ ID NO: 3837059 - RNA, 18 nt, Human
gcagcauauucaggaagc

SEQ ID NO: 3837060 - RNA, 19 nt, Human
gcagcauauucaggaagcu

SEQ ID NO: 3837061 - RNA, 23 nt, Human
gcagcauauucaggaagcucagg

SEQ ID NO: 3837062 - RNA, 22 nt, Human
gcagcaucucuaccuucucccc

SEQ ID NO: 3837063 - RNA, 15 nt, Human
gcagcaucugcuaau

SEQ ID NO: 3837064 - RNA, 15 nt, Human
gcagcaucuucaaac

SEQ ID NO: 3837065 - RNA, 21 nt, Human
gcagcaucuucaaacauguac

SEQ ID NO: 3837066 - RNA, 15 nt, Human
gcagcauuugauaau

SEQ ID NO: 3837067 - RNA, 18 nt, Human
gcagcauuugauaaugau

SEQ ID NO: 3837068 - RNA, 21 nt, Human
gcagccaaacccaugaggcaa

SEQ ID NO: 3837069 - RNA, 20 nt, Human
gcagccaagcuccuugggag

SEQ ID NO: 3837070 - RNA, 12 nt, Human
gcagccaaggcc

SEQ ID NO: 3837071 - RNA, 21 nt, Human
gcagccaaggccgaagcucug

SEQ ID NO: 3837072 - RNA, 23 nt, Human
gcagccaaggccgaagcucuggc

SEQ ID NO: 3837073 - RNA, 12 nt, Human
gcagccaaggga

SEQ ID NO: 3837074 - RNA, 22 nt, Human
gcagccacacuucucaggacac

SEQ ID NO: 3837075 - RNA, 12 nt, Human
gcagccacccug

SEQ ID NO: 3837076 - RNA, 16 nt, Human
gcauuuuacuguacag

SEQ ID NO: 3837077 - RNA, 17 nt, Human
gcauuuuacuguacaga

SEQ ID NO: 3837078 - RNA, 18 nt, Human
gcauuuuccucugcuuug

SEQ ID NO: 3837079 - RNA, 13 nt, Human
gcauuuucugaaa

SEQ ID NO: 3837080 - RNA, 17 nt, Human
gcauuuucugaaacuaa

SEQ ID NO: 3837081 - RNA, 21 nt, Human
gcauuuucugaaacuaaugaa

SEQ ID NO: 3837082 - RNA, 19 nt, Human
gcauuuugcuauuguaaau

SEQ ID NO: 3837083 - RNA, 22 nt, Human
gcauuuuggagaguuuccugaa

SEQ ID NO: 3837084 - RNA, 23 nt, Human
gcauuuuggagaguuuccugaaa

SEQ ID NO: 3837085 - RNA, 13 nt, Human
gcauuuuggucca

SEQ ID NO: 3837086 - RNA, 22 nt, Human
gcauuuuguaaguugaagcaaa

SEQ ID NO: 3837087 - RNA, 23 nt, Human
gcauuuuguauuugucuaacugg

SEQ ID NO: 3837088 - RNA, 21 nt, Human
gcauuuuguuugguauuguau

SEQ ID NO: 3837089 - RNA, 17 nt, Human
gcauuuuugcaggagca

SEQ ID NO: 3837090 - RNA, 18 nt, Human
gcauuuuugugaaaugaa

SEQ ID NO: 3837091 - RNA, 21 nt, Human
gcauuuuugugaaaugaaaac

SEQ ID NO: 3837092 - RNA, 16 nt, Human
gcauuuuuuaaaacaa

SEQ ID NO: 3837093 - RNA, 17 nt, Human
gcauuuuuuaaaacaag

SEQ ID NO: 3837094 - RNA, 18 nt, Human
gcauuuuuuaaaacaaga

SEQ ID NO: 3837095 - RNA, 19 nt, Human
gcauuuuuuaaccuccuaa

SEQ ID NO: 3837096 - RNA, 16 nt, Human
gccaaaaaaagacagg

SEQ ID NO: 3837097 - RNA, 22 nt, Human
gccaaaaagugaaauaaugugu

SEQ ID NO: 3837098 - RNA, 13 nt, Human
gccaaaacccagc

SEQ ID NO: 3837099 - RNA, 20 nt, Human
gccaaaagcuucccucccug

SEQ ID NO: 3837100 - RNA, 22 nt, Human
gccaaaagcuucccucccugcu

SEQ ID NO: 3837101 - RNA, 11 nt, Human
gccaaacauua

SEQ ID NO: 3837102 - RNA, 23 nt, Human
gccaaacauuaauguugauuucu

SEQ ID NO: 3837103 - RNA, 24 nt, Human
gccaaacauuaauguugauuucua

SEQ ID NO: 3837104 - RNA, 17 nt, Human
gccaaaccucaccaacu

SEQ ID NO: 3837105 - RNA, 17 nt, Human
gccaaaccucuguucag

SEQ ID NO: 3837106 - RNA, 17 nt, Human
gccaaacucugccagcc

SEQ ID NO: 3837107 - RNA, 15 nt, Human
gccaaagacaaauag

SEQ ID NO: 3837108 - RNA, 14 nt, Human
gccaaagaccaaau

SEQ ID NO: 3837109 - RNA, 14 nt, Human
gccaaagaucacuu

SEQ ID NO: 3837110 - RNA, 16 nt, Human
gccaaagccuccucca

SEQ ID NO: 3837111 - RNA, 19 nt, Human
gccaaagccuccuccagcc

SEQ ID NO: 3837112 - RNA, 14 nt, Human
gccaaaggaagcac

SEQ ID NO: 3837113 - RNA, 18 nt, Human
gccaaaggaugugauaua

SEQ ID NO: 3837114 - RNA, 22 nt, Human
gccaaauaaugucucugugaga

SEQ ID NO: 3837115 - RNA, 14 nt, Human
gccaaauagcaaag

SEQ ID NO: 3837116 - RNA, 17 nt, Human
gccaaauauauucucuu

SEQ ID NO: 3837117 - RNA, 18 nt, Human
gccaaauccgcucucuuc

SEQ ID NO: 3837118 - RNA, 22 nt, Human
gccaaaugcucucucaaauugu

SEQ ID NO: 3837119 - RNA, 18 nt, Human
gccaaauguaauugaaua

SEQ ID NO: 3837120 - RNA, 16 nt, Human
gccaaauuaaaaaaga

SEQ ID NO: 3837121 - RNA, 22 nt, Human
gccaaauuaaaaaagauaaaca

SEQ ID NO: 3837122 - RNA, 18 nt, Human
gccaaauuauuuguguaa

SEQ ID NO: 3837123 - RNA, 14 nt, Human
gccaaauuuuggcc

SEQ ID NO: 3837124 - RNA, 19 nt, Human
gccaacaagaaugcauuga

SEQ ID NO: 3837125 - RNA, 21 nt, Human
gccaacacgcaccugccucag

SEQ ID NO: 3837126 - RNA, 23 nt, Human
gccaacacgcaccugccucagga

SEQ ID NO: 3837127 - RNA, 20 nt, Human
gccaacacucaagaagcagg

SEQ ID NO: 3837128 - RNA, 22 nt, Human
gccaacagcuacaacagccuca

SEQ ID NO: 3837129 - RNA, 16 nt, Human
gccaacagguggcagg

SEQ ID NO: 3837130 - RNA, 21 nt, Human
gccaacaguguuaggccuggc

SEQ ID NO: 3837131 - RNA, 23 nt, Human
gccaacaguguuaggccuggcac

SEQ ID NO: 3837132 - RNA, 23 nt, Human
gccaacaucgugaaacccugucu

SEQ ID NO: 3837133 - RNA, 23 nt, Human
gccaaccccgcccuaggccuggc

SEQ ID NO: 3837134 - RNA, 15 nt, Human
gccaaccucgcucca

SEQ ID NO: 3837135 - RNA, 22 nt, Human
gccaaccuguaauaaauaugag

SEQ ID NO: 3837136 - RNA, 15 nt, Human
gccaacuagccccug

SEQ ID NO: 3837137 - RNA, 16 nt, Human
gccaacuagccccugg

SEQ ID NO: 3837138 - RNA, 20 nt, Human
gccaacuagccccuggggug

SEQ ID NO: 3837139 - RNA, 12 nt, Human
gccaacugcugc

SEQ ID NO: 3837140 - RNA, 17 nt, Human
gccaacugguguuugaa

SEQ ID NO: 3837141 - RNA, 14 nt, Human
gccaacuuguaaau

SEQ ID NO: 3837142 - RNA, 17 nt, Human
gccaacuuguaaauaca

SEQ ID NO: 3837143 - RNA, 19 nt, Human
gccaagaaagauguauaua

SEQ ID NO: 3837144 - RNA, 13 nt, Human
gccaagaacugaa

SEQ ID NO: 3837145 - RNA, 16 nt, Human
gccaagaauauugcaa

SEQ ID NO: 3837146 - RNA, 19 nt, Human
gccaagaauauugcaaaau

SEQ ID NO: 3837147 - RNA, 13 nt, Human
gccaagaauguac

SEQ ID NO: 3837148 - RNA, 15 nt, Human
gccaagacaaaucaa

SEQ ID NO: 3837149 - RNA, 15 nt, Human
gccaagacugcugug

SEQ ID NO: 3837150 - RNA, 22 nt, Human
gccaagacugcuguggccagga

SEQ ID NO: 3837151 - RNA, 20 nt, Human
gccaagagcagaggcagcga

SEQ ID NO: 3837152 - RNA, 14 nt, Human
gccaagaggcugca

SEQ ID NO: 3837153 - RNA, 18 nt, Human
gccaagaguggccccacc

SEQ ID NO: 3837154 - RNA, 22 nt, Human
gccaagaguggccccaccuggc

SEQ ID NO: 3837155 - RNA, 20 nt, Human
gccaagauaggaccuugggc

SEQ ID NO: 3837156 - RNA, 15 nt, Human
gccaagauuuuccuc

SEQ ID NO: 3837157 - RNA, 20 nt, Human
gccaagcaaccuggguccaa

SEQ ID NO: 3837158 - RNA, 21 nt, Human
gccaagcacagugguggcagg

SEQ ID NO: 3837159 - RNA, 18 nt, Human
gccaagcacugugcucag

SEQ ID NO: 3837160 - RNA, 14 nt, Human
gccaagcagccaag

SEQ ID NO: 3837161 - RNA, 13 nt, Human
gccaagccaggga

SEQ ID NO: 3837162 - RNA, 21 nt, Human
gccaagccccauccugccgcc

SEQ ID NO: 3837163 - RNA, 22 nt, Human
gccaagcccuccccaucccaug

SEQ ID NO: 3837164 - RNA, 21 nt, Human
gccaagcugaggugcccagga

SEQ ID NO: 3837165 - RNA, 22 nt, Human
gccaagcugaggugcccaggag

SEQ ID NO: 3837166 - RNA, 23 nt, Human
gccaagcugaggugcccaggaga

SEQ ID NO: 3837167 - RNA, 15 nt, Human
gccaaggaccugaga

SEQ ID NO: 3837168 - RNA, 14 nt, Human
gccaaggacugccg

SEQ ID NO: 3837169 - RNA, 15 nt, Human
gccaaggagcugcua

SEQ ID NO: 3837170 - RNA, 20 nt, Human
gccaaggagcugcuauagcc

SEQ ID NO: 3837171 - RNA, 20 nt, Human
gccaaggaggugaggagcag

SEQ ID NO: 3837172 - RNA, 16 nt, Human
gccaaggcagaggccu

SEQ ID NO: 3837173 - RNA, 19 nt, Human
gccaaggccgaagcucugg

SEQ ID NO: 3837174 - RNA, 17 nt, Human
gccaaggcucuguuuau

SEQ ID NO: 3837175 - RNA, 18 nt, Human
gccaagggaaaggggugc

SEQ ID NO: 3837176 - RNA, 21 nt, Human
gccaagggauggacaucuugu

SEQ ID NO: 3837177 - RNA, 16 nt, Human
gccaagggcuuuguuu

SEQ ID NO: 3837178 - RNA, 22 nt, Human
gccaaggggagucaccuucccu

SEQ ID NO: 3837179 - RNA, 15 nt, Human
gccaaggugggagga

SEQ ID NO: 3837180 - RNA, 18 nt, Human
gccaaggugggcugagcc

SEQ ID NO: 3837181 - RNA, 19 nt, Human
gccaaggugggcugagccc

SEQ ID NO: 3837182 - RNA, 21 nt, Human
gccaaggugggcugagcccug

SEQ ID NO: 3837183 - RNA, 16 nt, Human
gccaagguguccuaca

SEQ ID NO: 3837184 - RNA, 19 nt, Human
gccaagguguccuacagaa

SEQ ID NO: 3837185 - RNA, 21 nt, Human
gccaagguguccuacagaaaa

SEQ ID NO: 3837186 - RNA, 22 nt, Human
gccaagucagcuuugccuucca

SEQ ID NO: 3837187 - RNA, 18 nt, Human
gccaaguccagguccugg

SEQ ID NO: 3837188 - RNA, 15 nt, Human
gccaagugcaggcug

SEQ ID NO: 3837189 - RNA, 18 nt, Human
gccaagugccaaaugcuc

SEQ ID NO: 3837190 - RNA, 12 nt, Human
gccaaguuccuc

SEQ ID NO: 3837191 - RNA, 20 nt, Human
gccaaguuuauauacaauua

SEQ ID NO: 3837192 - RNA, 16 nt, Human
gccaauagugucaucc

SEQ ID NO: 3837193 - RNA, 20 nt, Human
gccaauauccuaauaaaaag

SEQ ID NO: 3837194 - RNA, 22 nt, Human
gccaauauccuaauaaaaaggu

SEQ ID NO: 3837195 - RNA, 18 nt, Human
gccaauauuaaaucugcu

SEQ ID NO: 3837196 - RNA, 22 nt, Human
cugcugcaaggccuuucugugu

SEQ ID NO: 3837197 - RNA, 18 nt, Human
cugcugcaccaacccagc

SEQ ID NO: 3837198 - RNA, 21 nt, Human
cugcugcagagcaguaaggga

SEQ ID NO: 3837199 - RNA, 16 nt, Human
cugcugcagaggggca

SEQ ID NO: 3837200 - RNA, 13 nt, Human
cugcugcaggggc

SEQ ID NO: 3837201 - RNA, 15 nt, Human
cugcugcaguagggg

SEQ ID NO: 3837202 - RNA, 14 nt, Human
cugcugcaguugcc

SEQ ID NO: 3837203 - RNA, 16 nt, Human
cugcugcaugcccucu

SEQ ID NO: 3837204 - RNA, 16 nt, Human
cugcugcauggggugg

SEQ ID NO: 3837205 - RNA, 16 nt, Human
cugcugccacugaggg

SEQ ID NO: 3837206 - RNA, 17 nt, Human
cugcugccacugagggg

SEQ ID NO: 3837207 - RNA, 16 nt, Human
cugcugccaugaacug

SEQ ID NO: 3837208 - RNA, 15 nt, Human
cugcugcccagccuc

SEQ ID NO: 3837209 - RNA, 12 nt, Human
cugcugcccagg

SEQ ID NO: 3837210 - RNA, 19 nt, Human
cugcugccccaaaggaagc

SEQ ID NO: 3837211 - RNA, 22 nt, Human
cugcugcccccaccccggggac

SEQ ID NO: 3837212 - RNA, 22 nt, Human
cugcugccccugcacagcaggc

SEQ ID NO: 3837213 - RNA, 17 nt, Human
cugcugcccuccauccc

SEQ ID NO: 3837214 - RNA, 13 nt, Human
cugcugcccuccc

SEQ ID NO: 3837215 - RNA, 14 nt, Human
cugcugcccucccc

SEQ ID NO: 3837216 - RNA, 20 nt, Human
cugcugccgccccacccaga

SEQ ID NO: 3837217 - RNA, 19 nt, Human
cugcugccgccucccagcc

SEQ ID NO: 3837218 - RNA, 14 nt, Human
cugcugccucccca

SEQ ID NO: 3837219 - RNA, 17 nt, Human
gcaugccuggauggggc

SEQ ID NO: 3837220 - RNA, 22 nt, Human
gcaugccuggauggggcugcac

SEQ ID NO: 3837221 - RNA, 15 nt, Human
gcaugccugugugac

SEQ ID NO: 3837222 - RNA, 21 nt, Human
gcaugccuuccagcacccugc

SEQ ID NO: 3837223 - RNA, 13 nt, Human
gcaugccuugugc

SEQ ID NO: 3837224 - RNA, 13 nt, Human
gcaugcggcccag

SEQ ID NO: 3837225 - RNA, 14 nt, Human
gcaugcggcccagc

SEQ ID NO: 3837226 - RNA, 18 nt, Human
gcaugcggcccagcccgg

SEQ ID NO: 3837227 - RNA, 19 nt, Human
gcaugcggcccagcccggc

SEQ ID NO: 3837228 - RNA, 18 nt, Human
gcaugcgggcuuccuccu

SEQ ID NO: 3837229 - RNA, 18 nt, Human
gcaugcucucugcagcca

SEQ ID NO: 3837230 - RNA, 13 nt, Human
gcaugcugcuuua

SEQ ID NO: 3837231 - RNA, 17 nt, Human
gcaugcuggugagccaa

SEQ ID NO: 3837232 - RNA, 18 nt, Human
gcaugcuuaaauuuuaac

SEQ ID NO: 3837233 - RNA, 14 nt, Human
gcaugcuuuccaua

SEQ ID NO: 3837234 - RNA, 16 nt, Human
gcauggaaaucagcca

SEQ ID NO: 3837235 - RNA, 14 nt, Human
gcauggacaaugga

SEQ ID NO: 3837236 - RNA, 18 nt, Human
gcauggacaauggaccgg

SEQ ID NO: 3837237 - RNA, 23 nt, Human
gcauggacaccccuuauccagga

SEQ ID NO: 3837238 - RNA, 14 nt, Human
gcauggagaacagu

SEQ ID NO: 3837239 - RNA, 15 nt, Human
gcauggagaauaaac

SEQ ID NO: 3837240 - RNA, 19 nt, Human
gcauggagaaugcaccaua

SEQ ID NO: 3837241 - RNA, 15 nt, Human
gcauggagcuggccg

SEQ ID NO: 3837242 - RNA, 19 nt, Human
gcauggaguguguauuguu

SEQ ID NO: 3837243 - RNA, 22 nt, Human
gcauggaguguguauuguuccc

SEQ ID NO: 3837244 - RNA, 23 nt, Human
gcauggaguguguauuguuccca

SEQ ID NO: 3837245 - RNA, 18 nt, Human
gcauggaguugggcguua

SEQ ID NO: 3837246 - RNA, 20 nt, Human
gcauggauauaguuuuacuu

SEQ ID NO: 3837247 - RNA, 20 nt, Human
gcauggcaaggacugcaggg

SEQ ID NO: 3837248 - RNA, 21 nt, Human
gcauggcaagucacaugcgua

SEQ ID NO: 3837249 - RNA, 17 nt, Human
gcauggcauccuccagc

SEQ ID NO: 3837250 - RNA, 14 nt, Human
gcauggccaggugg

SEQ ID NO: 3837251 - RNA, 14 nt, Human
gcauggcccugggc

SEQ ID NO: 3837252 - RNA, 18 nt, Human
gcauggcuccagaaaugu

SEQ ID NO: 3837253 - RNA, 13 nt, Human
gcauggcuccagu

SEQ ID NO: 3837254 - RNA, 15 nt, Human
gcauggcugugagga

SEQ ID NO: 3837255 - RNA, 13 nt, Human
gcaugggaaugaa

SEQ ID NO: 3837256 - RNA, 13 nt, Human
gcaugggccuggc

SEQ ID NO: 3837257 - RNA, 22 nt, Human
gcauggggauaaaggagaaggc

SEQ ID NO: 3837258 - RNA, 18 nt, Human
gcaugggggccucagggc

SEQ ID NO: 3837259 - RNA, 18 nt, Human
gcauggggggugggggga

SEQ ID NO: 3837260 - RNA, 16 nt, Human
gcauggguuuuguagg

SEQ ID NO: 3837261 - RNA, 20 nt, Human
gcaugguaccagcccugggg

SEQ ID NO: 3837262 - RNA, 22 nt, Human
gcaugguccauucucaagggac

SEQ ID NO: 3837263 - RNA, 19 nt, Human
gcauggucccacaucccug

SEQ ID NO: 3837264 - RNA, 21 nt, Human
gcauggucccacaucccuggg

SEQ ID NO: 3837265 - RNA, 13 nt, Human
gcauggugcaguu

SEQ ID NO: 3837266 - RNA, 14 nt, Human
gcauggugcaugcc

SEQ ID NO: 3837267 - RNA, 13 nt, Human
gcaugguggccag

SEQ ID NO: 3837268 - RNA, 14 nt, Human
gcaugguggccaga

SEQ ID NO: 3837269 - RNA, 20 nt, Human
gcauggugguugggacccag

SEQ ID NO: 3837270 - RNA, 13 nt, Human
gcaugguuucagc

SEQ ID NO: 3837271 - RNA, 14 nt, Human
gcaugguuucagca

SEQ ID NO: 3837272 - RNA, 21 nt, Human
gcaugguuuugugccaucugu

SEQ ID NO: 3837273 - RNA, 22 nt, Human
gcauguaaaagccuaggucuau

SEQ ID NO: 3837274 - RNA, 17 nt, Human
gcauguaaaagcggaaa

SEQ ID NO: 3837275 - RNA, 17 nt, Human
gcauguaaacacgccug

SEQ ID NO: 3837276 - RNA, 19 nt, Human
gcauguaaacacgccugca

SEQ ID NO: 3837277 - RNA, 14 nt, Human
gcauguaggacccu

SEQ ID NO: 3837278 - RNA, 15 nt, Human
gcauguaggagaauc

SEQ ID NO: 3837279 - RNA, 22 nt, Human
gcauguaguaacacuaauauau

SEQ ID NO: 3837280 - RNA, 23 nt, Human
gcauguaguaacacuaauauauu

SEQ ID NO: 3837281 - RNA, 22 nt, Human
gcauguagugugggaggcuccu

SEQ ID NO: 3837282 - RNA, 15 nt, Human
gcauguauuggccug

SEQ ID NO: 3837283 - RNA, 16 nt, Human
gcauguauuggccugg

SEQ ID NO: 3837284 - RNA, 20 nt, Human
gcauguauuggccuggaggu

SEQ ID NO: 3837285 - RNA, 21 nt, Human
gcauguauugugucuuuugca

SEQ ID NO: 3837286 - RNA, 18 nt, Human
gcauguauuuuugucaau

SEQ ID NO: 3837287 - RNA, 21 nt, Human
gcaugugaaaaucaaauacau

SEQ ID NO: 3837288 - RNA, 20 nt, Human
gcaugugacucugaagcuga

SEQ ID NO: 3837289 - RNA, 21 nt, Human
gcaugugacucugaagcugac

SEQ ID NO: 3837290 - RNA, 20 nt, Human
gcaugugguuugguuccucu

SEQ ID NO: 3837291 - RNA, 15 nt, Human
gcaugugucaugcau

SEQ ID NO: 3837292 - RNA, 12 nt, Human
gcauguguguau

SEQ ID NO: 3837293 - RNA, 15 nt, Human
gcauguguguauaag

SEQ ID NO: 3837294 - RNA, 16 nt, Human
gcaugugugugcucag

SEQ ID NO: 3837295 - RNA, 21 nt, Human
gcauguucucugaggacacua

SEQ ID NO: 3837296 - RNA, 18 nt, Human
gcauguugaccaugucua

SEQ ID NO: 3837297 - RNA, 16 nt, Human
gcauguugcugaggag

SEQ ID NO: 3837298 - RNA, 17 nt, Human
gcauguugucuaagaaa

SEQ ID NO: 3837299 - RNA, 15 nt, Human
gcauguuucauguuu

SEQ ID NO: 3837300 - RNA, 20 nt, Human
gcauguuucauguuuuguga

SEQ ID NO: 3837301 - RNA, 18 nt, Human
gcauguuugaaaugaggu

SEQ ID NO: 3837302 - RNA, 14 nt, Human
gcauguuuuguaua

SEQ ID NO: 3837303 - RNA, 17 nt, Human
gcauguuuuguauacaa

SEQ ID NO: 3837304 - RNA, 15 nt, Human
gcauguuuuguugcu

SEQ ID NO: 3837305 - RNA, 14 nt, Human
gcauuaaaagaaaa

SEQ ID NO: 3837306 - RNA, 14 nt, Human
gcauuaaauuacag

SEQ ID NO: 3837307 - RNA, 19 nt, Human
gcauuaaauuuuaagguag

SEQ ID NO: 3837308 - RNA, 16 nt, Human
gcauuacauuuccaaa

SEQ ID NO: 3837309 - RNA, 21 nt, Human
gcauuacccccaaccucauuu

SEQ ID NO: 3837310 - RNA, 19 nt, Human
gcauuaccgcguuguaaaa

SEQ ID NO: 3837311 - RNA, 23 nt, Human
gcauuaccgcguuguaaaauaua

SEQ ID NO: 3837312 - RNA, 16 nt, Human
gcauuacucuuguaag

SEQ ID NO: 3837313 - RNA, 18 nt, Human
gcauuacucuuguaagau

SEQ ID NO: 3837314 - RNA, 19 nt, Human
gcauuacucuuguaagauu

SEQ ID NO: 3837315 - RNA, 16 nt, Human
gcauuagaaauagaca

SEQ ID NO: 3837316 - RNA, 18 nt, Human
gcauuagaauuauuuaaa

SEQ ID NO: 3837317 - RNA, 21 nt, Human
gcauuagagucaacuacacaa

SEQ ID NO: 3837318 - RNA, 14 nt, Human
gcauuagcacagau

SEQ ID NO: 3837319 - RNA, 19 nt, Human
gcauuagcacagauuuuaa

SEQ ID NO: 3837320 - RNA, 22 nt, Human
gcauuagcacagauuuuaauug

SEQ ID NO: 3837321 - RNA, 15 nt, Human
gcauuauauaccauu

SEQ ID NO: 3837322 - RNA, 19 nt, Human
gcauuauauaccauuuauc

SEQ ID NO: 3837323 - RNA, 18 nt, Human
gcauuauauuuguaaauu

SEQ ID NO: 3837324 - RNA, 21 nt, Human
gcauuauguccacuguguaua

SEQ ID NO: 3837325 - RNA, 14 nt, Human
gcauuauuaaauug

SEQ ID NO: 3837326 - RNA, 18 nt, Human
gcauuauuaaauuguaaa

SEQ ID NO: 3837327 - RNA, 12 nt, Human
gcauuauucauu

SEQ ID NO: 3837328 - RNA, 16 nt, Human
gcauuauucucuuuua

SEQ ID NO: 3837329 - RNA, 14 nt, Human
gcauuauugcauua

SEQ ID NO: 3837330 - RNA, 23 nt, Human
gcauuauuggaauauaauuguuu

SEQ ID NO: 3837331 - RNA, 22 nt, Human
gcauucaauuuauucaagaaaa

SEQ ID NO: 3837332 - RNA, 19 nt, Human
gcauucacauuuagaaaag

SEQ ID NO: 3837333 - RNA, 19 nt, Human
gcauucacccagacagcuc

SEQ ID NO: 3837334 - RNA, 16 nt, Human
gcauucagagagcagc

SEQ ID NO: 3837335 - RNA, 18 nt, Human
gcauucauuuuuauagca

SEQ ID NO: 3837336 - RNA, 17 nt, Human
gcauuccaacaaagggu

SEQ ID NO: 3837337 - RNA, 19 nt, Human
gcauuccagccccucuggu

SEQ ID NO: 3837338 - RNA, 12 nt, Human
gcauuccaggcu

SEQ ID NO: 3837339 - RNA, 13 nt, Human
gcauuccaggcuc

SEQ ID NO: 3837340 - RNA, 14 nt, Human
gcauuccaggcucc

SEQ ID NO: 3837341 - RNA, 12 nt, Human
gcauucccaggu

SEQ ID NO: 3837342 - RNA, 13 nt, Human
gcauucccaggua

SEQ ID NO: 3837343 - RNA, 16 nt, Human
gcauuccccaggaggc

SEQ ID NO: 3837344 - RNA, 18 nt, Human
gcauuccccaggaggcca

SEQ ID NO: 3837345 - RNA, 21 nt, Human
gcauucccugagucaccagga

SEQ ID NO: 3837346 - RNA, 22 nt, Human
gcauucccugagucaccaggaa

SEQ ID NO: 3837347 - RNA, 21 nt, Human
gcauuccugauaugauuuaaa

SEQ ID NO: 3837348 - RNA, 13 nt, Human
gcauuccuucuuu

SEQ ID NO: 3837349 - RNA, 14 nt, Human
gcauuccuucuuug

SEQ ID NO: 3837350 - RNA, 23 nt, Human
gcauuccuucuuugauaauguua

SEQ ID NO: 3837351 - RNA, 17 nt, Human
gcauucuaaccuggagg

SEQ ID NO: 3837352 - RNA, 15 nt, Human
gccaaucaagggcaa

SEQ ID NO: 3837353 - RNA, 15 nt, Human
gccaaucagaagcua

SEQ ID NO: 3837354 - RNA, 22 nt, Human
gccaaucccucaccuucugagu

SEQ ID NO: 3837355 - RNA, 12 nt, Human
gccaaugagguc

SEQ ID NO: 3837356 - RNA, 19 nt, Human
gccaaugaggucugaaaug

SEQ ID NO: 3837357 - RNA, 22 nt, Human
gccaaugaggucugaaauggag

SEQ ID NO: 3837358 - RNA, 21 nt, Human
gccaaugcaccuaaagaaaaa

SEQ ID NO: 3837359 - RNA, 18 nt, Human
gccaaugccccacuggca

SEQ ID NO: 3837360 - RNA, 13 nt, Human
gccaauggaaacc

SEQ ID NO: 3837361 - RNA, 19 nt, Human
gccaauggaaaccucacgc

SEQ ID NO: 3837362 - RNA, 19 nt, Human
gccaauggaaccuccuuuc

SEQ ID NO: 3837363 - RNA, 16 nt, Human
gccaauggagacuguc

SEQ ID NO: 3837364 - RNA, 19 nt, Human
gccaacagguggcaggacc

SEQ ID NO: 3837365 - RNA, 20 nt, Human
gccaacagucaaaacagaga

SEQ ID NO: 3837366 - RNA, 20 nt, Human
gccaacaguguuaggccugg

SEQ ID NO: 3837367 - RNA, 15 nt, Human
gccaccugucugucu

SEQ ID NO: 3837368 - RNA, 13 nt, Human
gccacgcagccag

SEQ ID NO: 3837369 - RNA, 14 nt, Human
gccacgcagccagg

SEQ ID NO: 3837370 - RNA, 15 nt, Human
gccacgcagccagga

SEQ ID NO: 3837371 - RNA, 18 nt, Human
gccacgcagccaggacac

SEQ ID NO: 3837372 - RNA, 14 nt, Human
gccacgcuccagcu

SEQ ID NO: 3837373 - RNA, 16 nt, Human
gccacggacgcuggcu

SEQ ID NO: 3837374 - RNA, 18 nt, Human
gccacggacgcuggcucc

SEQ ID NO: 3837375 - RNA, 14 nt, Human
gccacggcagccua

SEQ ID NO: 3837376 - RNA, 17 nt, Human
gccacggccaggccaga

SEQ ID NO: 3837377 - RNA, 18 nt, Human
gccacggggacucagccc

SEQ ID NO: 3837378 - RNA, 22 nt, Human
gccacgggucuguguucgacuc

SEQ ID NO: 3837379 - RNA, 23 nt, Human
gccacguguuugugcuguggugu

SEQ ID NO: 3837380 - RNA, 23 nt, Human
gccacuaaccuugccugguacag

SEQ ID NO: 3837381 - RNA, 23 nt, Human
gccacuaagcagaggaggggccg

SEQ ID NO: 3837382 - RNA, 18 nt, Human
gccacuaauuuuaguauu

SEQ ID NO: 3837383 - RNA, 18 nt, Human
gccacuacacuccagccu

SEQ ID NO: 3837384 - RNA, 21 nt, Human
gccacuacacuccagccugag

SEQ ID NO: 3837385 - RNA, 17 nt, Human
gccacucacacagccag

SEQ ID NO: 3837386 - RNA, 20 nt, Human
gccacucacacagccaggug

SEQ ID NO: 3837387 - RNA, 20 nt, Human
gccacucaggaggcugaggc

SEQ ID NO: 3837388 - RNA, 14 nt, Human
gccacucauuucau

SEQ ID NO: 3837389 - RNA, 15 nt, Human
gccacucauuucauc

SEQ ID NO: 3837390 - RNA, 19 nt, Human
gccacuccagaccccuggc

SEQ ID NO: 3837391 - RNA, 21 nt, Human
gccacuccagaccccuggcuu

SEQ ID NO: 3837392 - RNA, 16 nt, Human
gccacuccccuccacu

SEQ ID NO: 3837393 - RNA, 16 nt, Human
gccacuccucccuccg

SEQ ID NO: 3837394 - RNA, 15 nt, Human
gccacuccugaaccc

SEQ ID NO: 3837395 - RNA, 17 nt, Human
gccacuccuuccugccc

SEQ ID NO: 3837396 - RNA, 23 nt, Human
gccacucgggaggcugagacagg

SEQ ID NO: 3837397 - RNA, 23 nt, Human
gccacucuaccagugcaggcugg

SEQ ID NO: 3837398 - RNA, 14 nt, Human
gccacucugccucu

SEQ ID NO: 3837399 - RNA, 17 nt, Human
gccacugaagcugggau

SEQ ID NO: 3837400 - RNA, 19 nt, Human
gccacugaagcugggauuc

SEQ ID NO: 3837401 - RNA, 18 nt, Human
gccacugacugcagggac

SEQ ID NO: 3837402 - RNA, 17 nt, Human
gccacugcacagagcuc

SEQ ID NO: 3837403 - RNA, 18 nt, Human
gccacugcaccgggccac

SEQ ID NO: 3837404 - RNA, 12 nt, Human
gccacugcacuc

SEQ ID NO: 3837405 - RNA, 19 nt, Human
gccacugcacuccagccug

SEQ ID NO: 3837406 - RNA, 20 nt, Human
gccacugcacuccagccugg

SEQ ID NO: 3837407 - RNA, 19 nt, Human
gccacugccauuaaagaau

SEQ ID NO: 3837408 - RNA, 16 nt, Human
gccacugcccgagcug

SEQ ID NO: 3837409 - RNA, 18 nt, Human
gccacugcccgagcuggu

SEQ ID NO: 3837410 - RNA, 19 nt, Human
gccacugcccgagcuggug

SEQ ID NO: 3837411 - RNA, 15 nt, Human
gccacugccucuccc

SEQ ID NO: 3837412 - RNA, 13 nt, Human
gccacugccucuu

SEQ ID NO: 3837413 - RNA, 21 nt, Human
gccacugcucccuaagccagc

SEQ ID NO: 3837414 - RNA, 19 nt, Human
gccacugcuccguggagga

SEQ ID NO: 3837415 - RNA, 23 nt, Human
gccacugcuuuucccuuugugag

SEQ ID NO: 3837416 - RNA, 12 nt, Human
gccacuggccau

SEQ ID NO: 3837417 - RNA, 16 nt, Human
gccacuggccaucucc

SEQ ID NO: 3837418 - RNA, 12 nt, Human
gccacuggggcu

SEQ ID NO: 3837419 - RNA, 14 nt, Human
gccacuggggcuca

SEQ ID NO: 3837420 - RNA, 15 nt, Human
gccacuggggcucag

SEQ ID NO: 3837421 - RNA, 17 nt, Human
gccacuggggcucagag

SEQ ID NO: 3837422 - RNA, 18 nt, Human
gccacugugaagagaacc

SEQ ID NO: 3837423 - RNA, 19 nt, Human
gccacugugaagagaacca

SEQ ID NO: 3837424 - RNA, 16 nt, Human
gccacugugguggcag

SEQ ID NO: 3837425 - RNA, 15 nt, Human
gccacuguguuccuu

SEQ ID NO: 3837426 - RNA, 18 nt, Human
gccacuguguuccuuccg

SEQ ID NO: 3837427 - RNA, 19 nt, Human
gccacuuaauguauguuac

SEQ ID NO: 3837428 - RNA, 19 nt, Human
gccacuuaccuucaauaaa

SEQ ID NO: 3837429 - RNA, 22 nt, Human
gccacuuaccuucaauaaagua

SEQ ID NO: 3837430 - RNA, 23 nt, Human
gccacuuaccuucaauaaaguau

SEQ ID NO: 3837431 - RNA, 18 nt, Human
gccacuuccuuuuaacug

SEQ ID NO: 3837432 - RNA, 13 nt, Human
gccacuucuaaga

SEQ ID NO: 3837433 - RNA, 22 nt, Human
gccacuugaacaaaaucuguug

SEQ ID NO: 3837434 - RNA, 21 nt, Human
gccacuugaugacccccaacc

SEQ ID NO: 3837435 - RNA, 17 nt, Human
gccacuuuaagagagaa

SEQ ID NO: 3837436 - RNA, 18 nt, Human
gccacuuuacccaccuag

SEQ ID NO: 3837437 - RNA, 22 nt, Human
gccacuuugguacauggccagu

SEQ ID NO: 3837438 - RNA, 10 nt, Human
gccagaaaaa

SEQ ID NO: 3837439 - RNA, 20 nt, Human
gccagaaaaacguguugccu

SEQ ID NO: 3837440 - RNA, 18 nt, Human
gccagaacaguuuguaca

SEQ ID NO: 3837441 - RNA, 16 nt, Human
gccagaacucuguguc

SEQ ID NO: 3837442 - RNA, 19 nt, Human
gccagaagauccccucagg

SEQ ID NO: 3837443 - RNA, 19 nt, Human
gccagaagaugaacagacu

SEQ ID NO: 3837444 - RNA, 20 nt, Human
gccagaagaugaacagacug

SEQ ID NO: 3837445 - RNA, 18 nt, Human
gccagaaguagcuuugca

SEQ ID NO: 3837446 - RNA, 23 nt, Human
gccagaaguuguggauuucaguu

SEQ ID NO: 3837447 - RNA, 20 nt, Human
gccagaaucagcacagauaa

SEQ ID NO: 3837448 - RNA, 17 nt, Human
gccagacacaggcccuc

SEQ ID NO: 3837449 - RNA, 22 nt, Human
gccagacaucaacagauaaaua

SEQ ID NO: 3837450 - RNA, 18 nt, Human
gccagacaugccacaagg

SEQ ID NO: 3837451 - RNA, 13 nt, Human
gccagaccagagc

SEQ ID NO: 3837452 - RNA, 17 nt, Human
gccagaccagagcucug

SEQ ID NO: 3837453 - RNA, 19 nt, Human
gccagaccagagcucugga

SEQ ID NO: 3837454 - RNA, 16 nt, Human
gccagaccauggacac

SEQ ID NO: 3837455 - RNA, 22 nt, Human
gccagacggcacccacccagca

SEQ ID NO: 3837456 - RNA, 21 nt, Human
gccagacuucccacggcuccu

SEQ ID NO: 3837457 - RNA, 13 nt, Human
gccagagaaguga

SEQ ID NO: 3837458 - RNA, 17 nt, Human
gccagagaagugacagg

SEQ ID NO: 3837459 - RNA, 18 nt, Human
gccagagaagugacaggg

SEQ ID NO: 3837460 - RNA, 19 nt, Human
gccagagaagugacaggga

SEQ ID NO: 3837461 - RNA, 16 nt, Human
gccagagacacaagcc

SEQ ID NO: 3837462 - RNA, 21 nt, Human
gccagagacacaagccuucgg

SEQ ID NO: 3837463 - RNA, 20 nt, Human
gccagagacggaagccuuuu

SEQ ID NO: 3837464 - RNA, 21 nt, Human
gccagagagccuggugcugcu

SEQ ID NO: 3837465 - RNA, 22 nt, Human
gccagagccaaggggcuucagg

SEQ ID NO: 3837466 - RNA, 14 nt, Human
gccagagccgggca

SEQ ID NO: 3837467 - RNA, 13 nt, Human
gccagagccuggg

SEQ ID NO: 3837468 - RNA, 18 nt, Human
gccagagccuggggcucu

SEQ ID NO: 3837469 - RNA, 19 nt, Human
gccagagccuggggcucua

SEQ ID NO: 3837470 - RNA, 15 nt, Human
gccagagcugggagg

SEQ ID NO: 3837471 - RNA, 20 nt, Human
gccagaggaacuguccagag

SEQ ID NO: 3837472 - RNA, 22 nt, Human
gccagaggaacuguccagagag

SEQ ID NO: 3837473 - RNA, 17 nt, Human
gccagaggaauccuggc

SEQ ID NO: 3837474 - RNA, 15 nt, Human
gccagaggagagagg

SEQ ID NO: 3837475 - RNA, 15 nt, Human
gccagaggcccccag

SEQ ID NO: 3837476 - RNA, 18 nt, Human
gccagaggcccccagccc

SEQ ID NO: 3837477 - RNA, 19 nt, Human
gccagagggcuugugaaca

SEQ ID NO: 3837478 - RNA, 19 nt, Human
gccagaggugggcaggugg

SEQ ID NO: 3837479 - RNA, 17 nt, Human
gccagaguggccuggcc

SEQ ID NO: 3837480 - RNA, 23 nt, Human
gccagaguggccuggccaggagc

SEQ ID NO: 3837481 - RNA, 24 nt, Human
gccagaguggccuggccaggagcu

SEQ ID NO: 3837482 - RNA, 22 nt, Human
gccagaguuccugcggagugaa

SEQ ID NO: 3837483 - RNA, 24 nt, Human
gccagaguuccugcggagugaaga

SEQ ID NO: 3837484 - RNA, 16 nt, Human
gccagauccagccugg

SEQ ID NO: 3837485 - RNA, 17 nt, Human
gccagauccagccuggg

SEQ ID NO: 3837486 - RNA, 20 nt, Human
gccagauccagccugggguc

SEQ ID NO: 3837487 - RNA, 15 nt, Human
gccagauccucuugg

SEQ ID NO: 3837488 - RNA, 21 nt, Human
gccagaugcacaucccuggaa

SEQ ID NO: 3837489 - RNA, 12 nt, Human
gccagaugcuga

SEQ ID NO: 3837490 - RNA, 24 nt, Human
gccagaugcugauguucaguguaa

SEQ ID NO: 3837491 - RNA, 15 nt, Human
gccagaugcugcaga

SEQ ID NO: 3837492 - RNA, 18 nt, Human
gccagauggggccucugu

SEQ ID NO: 3837493 - RNA, 15 nt, Human
gccagauguccuaau

SEQ ID NO: 3837494 - RNA, 15 nt, Human
gccagauugccaucc

SEQ ID NO: 3837495 - RNA, 15 nt, Human
gccagauuugucuuu

SEQ ID NO: 3837496 - RNA, 20 nt, Human
gccagauuugucuuuuuguu

SEQ ID NO: 3837497 - RNA, 20 nt, Human
gccagcaaaacuuagaugug

SEQ ID NO: 3837498 - RNA, 14 nt, Human
gccagcaaagcccc

SEQ ID NO: 3837499 - RNA, 16 nt, Human
gccagcaaagccccau

SEQ ID NO: 3837500 - RNA, 23 nt, Human
gccagcaaagccccaugcuggag

SEQ ID NO: 3837501 - RNA, 13 nt, Human
gccagcaacgcuu

SEQ ID NO: 3837502 - RNA, 14 nt, Human
gccagcaacgcuug

SEQ ID NO: 3837503 - RNA, 18 nt, Human
gccagcaacgcuuguaga

SEQ ID NO: 3837504 - RNA, 22 nt, Human
gccagcaacgcuuguagaacuc

SEQ ID NO: 3837505 - RNA, 13 nt, Human
gccagcaacugaa

SEQ ID NO: 3837506 - RNA, 14 nt, Human
gccagcaacugaau

SEQ ID NO: 3837507 - RNA, 19 nt, Human
gccagggucucucccucag

SEQ ID NO: 3837508 - RNA, 23 nt, Human
gccagggucucucccucaggugu

SEQ ID NO: 3837509 - RNA, 18 nt, Human
gccagggucugugugaau

SEQ ID NO: 3837510 - RNA, 20 nt, Human
gccagggucugugugaaugu

SEQ ID NO: 3837511 - RNA, 21 nt, Human
gccagggucugugugaaugug

SEQ ID NO: 3837512 - RNA, 22 nt, Human
gccagggucugugugaaugugg

SEQ ID NO: 3837513 - RNA, 20 nt, Human
gccaggguggucuugaucuc

SEQ ID NO: 3837514 - RNA, 14 nt, Human
gccaggguguggcc

SEQ ID NO: 3837515 - RNA, 21 nt, Human
gccaggucacccuuugcugug

SEQ ID NO: 3837516 - RNA, 15 nt, Human
gccagguccagagag

SEQ ID NO: 3837517 - RNA, 13 nt, Human
gccaggucccucu

SEQ ID NO: 3837518 - RNA, 15 nt, Human
gccaggugagaaacu

SEQ ID NO: 3837519 - RNA, 13 nt, Human
gccaggugccuug

SEQ ID NO: 3837520 - RNA, 18 nt, Human
gccaggugggcgggcagc

SEQ ID NO: 3837521 - RNA, 19 nt, Human
gccaggugggcgggcagca

SEQ ID NO: 3837522 - RNA, 23 nt, Human
gccagguucuauuuggaauuuau

SEQ ID NO: 3837523 - RNA, 23 nt, Human
gccagguucuccguuagcuccug

SEQ ID NO: 3837524 - RNA, 14 nt, Human
gccagguugcuaag

SEQ ID NO: 3837525 - RNA, 22 nt, Human
gccagguuucugcccacauugg

SEQ ID NO: 3837526 - RNA, 19 nt, Human
gccagguuuucuggguguc

SEQ ID NO: 3837527 - RNA, 22 nt, Human
gccaguaacacaggccacccug

SEQ ID NO: 3837528 - RNA, 16 nt, Human
gccaguaacaggcuca

SEQ ID NO: 3837529 - RNA, 19 nt, Human
gccaguaacgcgucuuccu

SEQ ID NO: 3837530 - RNA, 19 nt, Human
gccaguaauccuguaggaa

SEQ ID NO: 3837531 - RNA, 21 nt, Human
gccaguaucuauauaugugua

SEQ ID NO: 3837532 - RNA, 17 nt, Human
gccaguauuuuaaaaua

SEQ ID NO: 3837533 - RNA, 20 nt, Human
gccagucaccccggccaccu

SEQ ID NO: 3837534 - RNA, 12 nt, Human
gccagucaggcc

SEQ ID NO: 3837535 - RNA, 13 nt, Human
gccaguccaggcu

SEQ ID NO: 3837536 - RNA, 14 nt, Human
gccaguccaggcug

SEQ ID NO: 3837537 - RNA, 20 nt, Human
gccaguccaggcugccgugg

SEQ ID NO: 3837538 - RNA, 21 nt, Human
gccaguccaggcugccguggg

SEQ ID NO: 3837539 - RNA, 13 nt, Human
gccagucccaggg

SEQ ID NO: 3837540 - RNA, 16 nt, Human
gccagucccugaggca

SEQ ID NO: 3837541 - RNA, 16 nt, Human
gccaguccuagcugca

SEQ ID NO: 3837542 - RNA, 14 nt, Human
gccagucgcgcugc

SEQ ID NO: 3837543 - RNA, 16 nt, Human
gccagucgcgcugccu

SEQ ID NO: 3837544 - RNA, 18 nt, Human
gccagucgcgcugccugu

SEQ ID NO: 3837545 - RNA, 15 nt, Human
gccagucuaguuccu

SEQ ID NO: 3837546 - RNA, 22 nt, Human
gccagucucacugugggaaggc

SEQ ID NO: 3837547 - RNA, 15 nt, Human
gccagucugggcugc

SEQ ID NO: 3837548 - RNA, 16 nt, Human
gccagucugggcugcc

SEQ ID NO: 3837549 - RNA, 12 nt, Human
gccagucugugg

SEQ ID NO: 3837550 - RNA, 13 nt, Human
gccagucugugga

SEQ ID NO: 3837551 - RNA, 17 nt, Human
gccagugaccaaccuuu

SEQ ID NO: 3837552 - RNA, 18 nt, Human
gccagugacuccaggaga

SEQ ID NO: 3837553 - RNA, 20 nt, Human
gccagugaugcuaaagguug

SEQ ID NO: 3837554 - RNA, 13 nt, Human
gccagugcccuga

SEQ ID NO: 3837555 - RNA, 14 nt, Human
gccagugcccugag

SEQ ID NO: 3837556 - RNA, 12 nt, Human
gccagugccugg

SEQ ID NO: 3837557 - RNA, 14 nt, Human
gccagugccugggu

SEQ ID NO: 3837558 - RNA, 17 nt, Human
gccagugccuuaccucc

SEQ ID NO: 3837559 - RNA, 20 nt, Human
gccagugccuuaccuccugc

SEQ ID NO: 3837560 - RNA, 22 nt, Human
gccagugccuuaccuccugccc

SEQ ID NO: 3837561 - RNA, 15 nt, Human
gccagugcuccagcc

SEQ ID NO: 3837562 - RNA, 18 nt, Human
gccaguguaaucccccag

SEQ ID NO: 3837563 - RNA, 15 nt, Human
gccagugucuguccc

SEQ ID NO: 3837564 - RNA, 14 nt, Human
gccagugucuuucu

SEQ ID NO: 3837565 - RNA, 15 nt, Human
gccagugucuuucuu

SEQ ID NO: 3837566 - RNA, 18 nt, Human
gccagugucuuucuuugg

SEQ ID NO: 3837567 - RNA, 17 nt, Human
gccagugugaucccaag

SEQ ID NO: 3837568 - RNA, 17 nt, Human
gccagugugcugauggg

SEQ ID NO: 3837569 - RNA, 18 nt, Human
gccaguguugccuaagua

SEQ ID NO: 3837570 - RNA, 17 nt, Human
gccaguguuuaaaacuu

SEQ ID NO: 3837571 - RNA, 13 nt, Human
gccaguugguccc

SEQ ID NO: 3837572 - RNA, 15 nt, Human
cuggccgggcacagc

SEQ ID NO: 3837573 - RNA, 20 nt, Human
cuggccggugugggggcccc

SEQ ID NO: 3837574 - RNA, 13 nt, Human
cuggccguacuug

SEQ ID NO: 3837575 - RNA, 15 nt, Human
cuggccgugggccug

SEQ ID NO: 3837576 - RNA, 22 nt, Human
cuggccguugauguuggcuggg

SEQ ID NO: 3837577 - RNA, 16 nt, Human
cuggccuaaaaucuug

SEQ ID NO: 3837578 - RNA, 19 nt, Human
cuggccuaaaaucuuggaa

SEQ ID NO: 3837579 - RNA, 14 nt, Human
cuggccuagcauac

SEQ ID NO: 3837580 - RNA, 22 nt, Human
cuggccuauccgcugccagccu

SEQ ID NO: 3837581 - RNA, 16 nt, Human
cuggccucaaagcaag

SEQ ID NO: 3837582 - RNA, 12 nt, Human
cuggccucagac

SEQ ID NO: 3837583 - RNA, 22 nt, Human
cuggccucagacugcacccagg

SEQ ID NO: 3837584 - RNA, 22 nt, Human
cuggccucaggugggccgcagg

SEQ ID NO: 3837585 - RNA, 11 nt, Human
cuggccuccag

SEQ ID NO: 3837586 - RNA, 12 nt, Human
cuggccuccagg

SEQ ID NO: 3837587 - RNA, 15 nt, Human
cuggccuccaggccc

SEQ ID NO: 3837588 - RNA, 16 nt, Human
cuggccucccaaauga

SEQ ID NO: 3837589 - RNA, 14 nt, Human
cuggccucccacag

SEQ ID NO: 3837590 - RNA, 13 nt, Human
cuggccucccacc

SEQ ID NO: 3837591 - RNA, 22 nt, Human
cuggccucccacccgaugcugc

SEQ ID NO: 3837592 - RNA, 22 nt, Human
cuggccuccggcgucagccucc

SEQ ID NO: 3837593 - RNA, 13 nt, Human
cuggccuccugcc

SEQ ID NO: 3837594 - RNA, 18 nt, Human
cuggccucgccuggccug

SEQ ID NO: 3837595 - RNA, 20 nt, Human
cuggccucgccuggccugag

SEQ ID NO: 3837596 - RNA, 13 nt, Human
cuggccucugcac

SEQ ID NO: 3837597 - RNA, 12 nt, Human
cuggccucugcg

SEQ ID NO: 3837598 - RNA, 14 nt, Human
cuggccucugcuuu

SEQ ID NO: 3837599 - RNA, 15 nt, Human
cuggccucugcuuuc

SEQ ID NO: 3837600 - RNA, 17 nt, Human
cuggccucuggcucuca

SEQ ID NO: 3837601 - RNA, 17 nt, Human
cuggccucugucauauc

SEQ ID NO: 3837602 - RNA, 13 nt, Human
cuggccucugugc

SEQ ID NO: 3837603 - RNA, 14 nt, Human
cuggccucugugcc

SEQ ID NO: 3837604 - RNA, 16 nt, Human
cuggccucugugccuu

SEQ ID NO: 3837605 - RNA, 15 nt, Human
cuggccucuucuaga

SEQ ID NO: 3837606 - RNA, 18 nt, Human
cuggccugacuuggggga

SEQ ID NO: 3837607 - RNA, 15 nt, Human
cuggccugagaguca

SEQ ID NO: 3837608 - RNA, 13 nt, Human
cuggccugagcug

SEQ ID NO: 3837609 - RNA, 18 nt, Human
cuggccugagcugggaug

SEQ ID NO: 3837610 - RNA, 13 nt, Human
cuggccugaggag

SEQ ID NO: 3837611 - RNA, 15 nt, Human
cuggccugcugggcu

SEQ ID NO: 3837612 - RNA, 19 nt, Human
cuggccugcugggcucucc

SEQ ID NO: 3837613 - RNA, 23 nt, Human
cuggccuggacaguaucccacau

SEQ ID NO: 3837614 - RNA, 14 nt, Human
cuggccuggacugu

SEQ ID NO: 3837615 - RNA, 22 nt, Human
cuggccuggcacacaucaggag

SEQ ID NO: 3837616 - RNA, 19 nt, Human
cuggccuggccauacugug

SEQ ID NO: 3837617 - RNA, 14 nt, Human
cuggccuggccccu

SEQ ID NO: 3837618 - RNA, 19 nt, Human
cuggccuggccccucaggg

SEQ ID NO: 3837619 - RNA, 14 nt, Human
cuggccuggcccug

SEQ ID NO: 3837620 - RNA, 15 nt, Human
cuggccuggcccugc

SEQ ID NO: 3837621 - RNA, 16 nt, Human
cuggccuggcccugcc

SEQ ID NO: 3837622 - RNA, 14 nt, Human
cuggccuggccggc

SEQ ID NO: 3837623 - RNA, 15 nt, Human
cuggccuggccuggc

SEQ ID NO: 3837624 - RNA, 18 nt, Human
cuggccuggccuggcccu

SEQ ID NO: 3837625 - RNA, 14 nt, Human
cuggccuggcuucu

SEQ ID NO: 3837626 - RNA, 17 nt, Human
cuggccuggcuucuccu

SEQ ID NO: 3837627 - RNA, 18 nt, Human
cuggccuggggucaggcc

SEQ ID NO: 3837628 - RNA, 14 nt, Human
cuggccugugucua

SEQ ID NO: 3837629 - RNA, 13 nt, Human
cuggccuuacacc

SEQ ID NO: 3837630 - RNA, 14 nt, Human
cuggccuuacaccu

SEQ ID NO: 3837631 - RNA, 18 nt, Human
cuggccuucggccuccau

SEQ ID NO: 3837632 - RNA, 20 nt, Human
cuggccuugggcccucuggu

SEQ ID NO: 3837633 - RNA, 21 nt, Human
cuggccuugugguccaaauag

SEQ ID NO: 3837634 - RNA, 14 nt, Human
cuggccuuuuccua

SEQ ID NO: 3837635 - RNA, 22 nt, Human
cuggcgacacguagcagcuuag

SEQ ID NO: 3837636 - RNA, 19 nt, Human
cuggcgagagucuggcccu

SEQ ID NO: 3837637 - RNA, 22 nt, Human
cuggcgagugaaugccagugug

SEQ ID NO: 3837638 - RNA, 23 nt, Human
cuggcgagugaaugccagugugc

SEQ ID NO: 3837639 - RNA, 24 nt, Human
cuggcgcagaacgaaccuuggccu

SEQ ID NO: 3837640 - RNA, 12 nt, Human
cuggcgcagcca

SEQ ID NO: 3837641 - RNA, 14 nt, Human
cuggcgcagguggg

SEQ ID NO: 3837642 - RNA, 16 nt, Human
cuggcgcaggugggcu

SEQ ID NO: 3837643 - RNA, 20 nt, Human
cuggcgccucugcaagggca

SEQ ID NO: 3837644 - RNA, 18 nt, Human
cuggcggcuacucagcag

SEQ ID NO: 3837645 - RNA, 23 nt, Human
cuggcggcuacucagcagcccuc

SEQ ID NO: 3837646 - RNA, 20 nt, Human
cuggcgggaugggccaccgc

SEQ ID NO: 3837647 - RNA, 19 nt, Human
cuggcgucaugcaaaguca

SEQ ID NO: 3837648 - RNA, 23 nt, Human
cuggcgucugucuucaagggcuu

SEQ ID NO: 3837649 - RNA, 22 nt, Human
cuggcgugaacccaggaggcgg

SEQ ID NO: 3837650 - RNA, 14 nt, Human
cuggcuaacaaggc

SEQ ID NO: 3837651 - RNA, 16 nt, Human
cuggcuaacuggaagc

SEQ ID NO: 3837652 - RNA, 17 nt, Human
cuggcuaacuggaagca

SEQ ID NO: 3837653 - RNA, 21 nt, Human
gccccaaguuuugugaaauuu

SEQ ID NO: 3837654 - RNA, 16 nt, Human
gccccacacagcuaca

SEQ ID NO: 3837655 - RNA, 21 nt, Human
gccccacaccagggccagccu

SEQ ID NO: 3837656 - RNA, 22 nt, Human
gccccacaccagggccagccuc

SEQ ID NO: 3837657 - RNA, 11 nt, Human
gccccacagcc

SEQ ID NO: 3837658 - RNA, 23 nt, Human
gccccacagcccacguccuguca

SEQ ID NO: 3837659 - RNA, 11 nt, Human
gccccaccacc

SEQ ID NO: 3837660 - RNA, 14 nt, Human
gccccaccaccuag

SEQ ID NO: 3837661 - RNA, 18 nt, Human
gccccaccaccuaggcca

SEQ ID NO: 3837662 - RNA, 14 nt, Human
gccccaccagugcc

SEQ ID NO: 3837663 - RNA, 17 nt, Human
gccccaccagugccucu

SEQ ID NO: 3837664 - RNA, 18 nt, Human
gccccaccagugccucuc

SEQ ID NO: 3837665 - RNA, 11 nt, Human
gccccacccag

SEQ ID NO: 3837666 - RNA, 19 nt, Human
gccccaccccagggcagcc

SEQ ID NO: 3837667 - RNA, 20 nt, Human
gccccaccccagggcagcca

SEQ ID NO: 3837668 - RNA, 22 nt, Human
gccccaccccagggcagccagg

SEQ ID NO: 3837669 - RNA, 18 nt, Human
gccccacccucagaugca

SEQ ID NO: 3837670 - RNA, 23 nt, Human
gccccacccucguggacaccugc

SEQ ID NO: 3837671 - RNA, 23 nt, Human
gccccacccugggcccugggcug

SEQ ID NO: 3837672 - RNA, 17 nt, Human
gccccaccugcagcucc

SEQ ID NO: 3837673 - RNA, 12 nt, Human
gccccaccugcc

SEQ ID NO: 3837674 - RNA, 15 nt, Human
gccccaccuggcccu

SEQ ID NO: 3837675 - RNA, 22 nt, Human
gccccaccuggcugaggcgcca

SEQ ID NO: 3837676 - RNA, 20 nt, Human
gccccaccuuuauuaaaauc

SEQ ID NO: 3837677 - RNA, 20 nt, Human
gccccacucccuugcuggcc

SEQ ID NO: 3837678 - RNA, 13 nt, Human
gccccacucucag

SEQ ID NO: 3837679 - RNA, 16 nt, Human
gccccacucucagagg

SEQ ID NO: 3837680 - RNA, 17 nt, Human
gccccacucucagaggc

SEQ ID NO: 3837681 - RNA, 19 nt, Human
gccccacucucagaggccc

SEQ ID NO: 3837682 - RNA, 21 nt, Human
gccccacucucagaggcccca

SEQ ID NO: 3837683 - RNA, 12 nt, Human
gccccacugaug

SEQ ID NO: 3837684 - RNA, 13 nt, Human
gccccacugaugc

SEQ ID NO: 3837685 - RNA, 18 nt, Human
gccccacugaugcuguuc

SEQ ID NO: 3837686 - RNA, 15 nt, Human
gccccacugccagca

SEQ ID NO: 3837687 - RNA, 23 nt, Human
gccccacugccagcagcagcagg

SEQ ID NO: 3837688 - RNA, 14 nt, Human
gccccacuggggaa

SEQ ID NO: 3837689 - RNA, 15 nt, Human
gccccacuggggaaa

SEQ ID NO: 3837690 - RNA, 14 nt, Human
gccccacuuaccgc

SEQ ID NO: 3837691 - RNA, 15 nt, Human
gccccagaaggcagg

SEQ ID NO: 3837692 - RNA, 22 nt, Human
gccccagagcaggguguuggga

SEQ ID NO: 3837693 - RNA, 14 nt, Human
gccccagagcuguu

SEQ ID NO: 3837694 - RNA, 23 nt, Human
gccccagagcuguuuauggccuc

SEQ ID NO: 3837695 - RNA, 15 nt, Human
gccccagaggccucu

SEQ ID NO: 3837696 - RNA, 19 nt, Human
gccccagauaccagccccu

SEQ ID NO: 3837697 - RNA, 18 nt, Human
gccccagaucaccagccc

SEQ ID NO: 3837698 - RNA, 20 nt, Human
gccccagcacagcuugaccu

SEQ ID NO: 3837699 - RNA, 18 nt, Human
gccccagcaccaccaggu

SEQ ID NO: 3837700 - RNA, 21 nt, Human
gccccagcaccucagccugca

SEQ ID NO: 3837701 - RNA, 12 nt, Human
gccccagcacua

SEQ ID NO: 3837702 - RNA, 17 nt, Human
gccccagcacuaaagca

SEQ ID NO: 3837703 - RNA, 20 nt, Human
gccccagccagaguuccugc

SEQ ID NO: 3837704 - RNA, 15 nt, Human
gccccagcccaaguc

SEQ ID NO: 3837705 - RNA, 16 nt, Human
gccccagcccaagucc

SEQ ID NO: 3837706 - RNA, 14 nt, Human
gccccagcccaccc

SEQ ID NO: 3837707 - RNA, 15 nt, Human
gccccagcccacccu

SEQ ID NO: 3837708 - RNA, 21 nt, Human
gccccagcccacccuccuguc

SEQ ID NO: 3837709 - RNA, 12 nt, Human
gccccagcccag

SEQ ID NO: 3837710 - RNA, 14 nt, Human
gccccagcccagau

SEQ ID NO: 3837711 - RNA, 19 nt, Human
gccccagcccagccccacu

SEQ ID NO: 3837712 - RNA, 22 nt, Human
gccccagcccagccccacuccu

SEQ ID NO: 3837713 - RNA, 15 nt, Human
gccccagcccugcug

SEQ ID NO: 3837714 - RNA, 20 nt, Human
gccccagcccugcuggggau

SEQ ID NO: 3837715 - RNA, 21 nt, Human
gccccagccucccugaagccu

SEQ ID NO: 3837716 - RNA, 14 nt, Human
gccccagccugcua

SEQ ID NO: 3837717 - RNA, 17 nt, Human
gccccagccugcuagcu

SEQ ID NO: 3837718 - RNA, 12 nt, Human
gccccagccugg

SEQ ID NO: 3837719 - RNA, 13 nt, Human
gccccagccuggc

SEQ ID NO: 3837720 - RNA, 19 nt, Human
gccccagccuggcccagcu

SEQ ID NO: 3837721 - RNA, 21 nt, Human
gccccagccuggcccagcucc

SEQ ID NO: 3837722 - RNA, 23 nt, Human
gccccagcgcugacgugucagga

SEQ ID NO: 3837723 - RNA, 13 nt, Human
gccccagcucugg

SEQ ID NO: 3837724 - RNA, 17 nt, Human
gccccagcugacaugga

SEQ ID NO: 3837725 - RNA, 15 nt, Human
gccccaggaaaggcc

SEQ ID NO: 3837726 - RNA, 12 nt, Human
gccccaggacca

SEQ ID NO: 3837727 - RNA, 16 nt, Human
gccccaggaccagcuc

SEQ ID NO: 3837728 - RNA, 23 nt, Human
gccaguuggucccccuuccaugg

SEQ ID NO: 3837729 - RNA, 20 nt, Human
gccaguuuuguuuccuuuca

SEQ ID NO: 3837730 - RNA, 22 nt, Human
gccauaaaacauuaagaaaauc

SEQ ID NO: 3837731 - RNA, 15 nt, Human
gccauacuggccucg

SEQ ID NO: 3837732 - RNA, 20 nt, Human
gccauacuuaucucucugug

SEQ ID NO: 3837733 - RNA, 17 nt, Human
gccauagaguacacugc

SEQ ID NO: 3837734 - RNA, 18 nt, Human
gccauagcuccugcucca

SEQ ID NO: 3837735 - RNA, 23 nt, Human
gccauauaaguuugaaggaaaca

SEQ ID NO: 3837736 - RNA, 16 nt, Human
gccauaugaaaaggcu

SEQ ID NO: 3837737 - RNA, 16 nt, Human
gccauaugauuuacau

SEQ ID NO: 3837738 - RNA, 17 nt, Human
gccauaugauuuacauu

SEQ ID NO: 3837739 - RNA, 14 nt, Human
gccauauuaaauuu

SEQ ID NO: 3837740 - RNA, 21 nt, Human
gccauauugcacaugucuuaa

SEQ ID NO: 3837741 - RNA, 22 nt, Human
gccauauugcacaugucuuaau

SEQ ID NO: 3837742 - RNA, 17 nt, Human
gccauauuuaccucagc

SEQ ID NO: 3837743 - RNA, 21 nt, Human
gccauauuuaccucagccugg

SEQ ID NO: 3837744 - RNA, 17 nt, Human
gccauauuuacuaccuu

SEQ ID NO: 3837745 - RNA, 13 nt, Human
gccauauuuguaa

SEQ ID NO: 3837746 - RNA, 15 nt, Human
gccaucaaaaugcuu

SEQ ID NO: 3837747 - RNA, 18 nt, Human
gccaucaaaaugcuuuuu

SEQ ID NO: 3837748 - RNA, 14 nt, Human
gccaucaaacugua

SEQ ID NO: 3837749 - RNA, 21 nt, Human
gccaucaacuaaaguuguacu

SEQ ID NO: 3837750 - RNA, 24 nt, Human
gccaucaauaaaaaauuaugacau

SEQ ID NO: 3837751 - RNA, 14 nt, Human
gccaucaccuuaga

SEQ ID NO: 3837752 - RNA, 23 nt, Human
gccaucaucuccugccuuccucc

SEQ ID NO: 3837753 - RNA, 17 nt, Human
gccaucauguuuacaga

SEQ ID NO: 3837754 - RNA, 18 nt, Human
gccaucauugcugucugc

SEQ ID NO: 3837755 - RNA, 19 nt, Human
gccaucauugcugucugca

SEQ ID NO: 3837756 - RNA, 13 nt, Human
gccaucauuucug

SEQ ID NO: 3837757 - RNA, 17 nt, Human
gccaucccagccccaau

SEQ ID NO: 3837758 - RNA, 17 nt, Human
gccaucccagccuuggc

SEQ ID NO: 3837759 - RNA, 15 nt, Human
gccaucccucccucc

SEQ ID NO: 3837760 - RNA, 14 nt, Human
gccaucccucgugg

SEQ ID NO: 3837761 - RNA, 15 nt, Human
gccaucccugugagg

SEQ ID NO: 3837762 - RNA, 19 nt, Human
gccauccuaaaagccaccc

SEQ ID NO: 3837763 - RNA, 23 nt, Human
gccauccucaaacacugcaggca

SEQ ID NO: 3837764 - RNA, 18 nt, Human
gccauccuggcccagggc

SEQ ID NO: 3837765 - RNA, 23 nt, Human
gccaucgccgggacuccagaacc

SEQ ID NO: 3837766 - RNA, 16 nt, Human
gccaucuagccagccc

SEQ ID NO: 3837767 - RNA, 19 nt, Human
gccaucucaccuccugcug

SEQ ID NO: 3837768 - RNA, 21 nt, Human
gccaucucaccuccugcuggg

SEQ ID NO: 3837769 - RNA, 18 nt, Human
gccaucucaugaggggag

SEQ ID NO: 3837770 - RNA, 20 nt, Human
gccaucucaugaggggagag

SEQ ID NO: 3837771 - RNA, 22 nt, Human
gccaucuccacccccagcugcu

SEQ ID NO: 3837772 - RNA, 14 nt, Human
gccaucucugcucc

SEQ ID NO: 3837773 - RNA, 12 nt, Human
gccaucugccca

SEQ ID NO: 3837774 - RNA, 13 nt, Human
gccaucugcccag

SEQ ID NO: 3837775 - RNA, 12 nt, Human
gccaucugcucc

SEQ ID NO: 3837776 - RNA, 19 nt, Human
gccaucuggagagcccaga

SEQ ID NO: 3837777 - RNA, 18 nt, Human
gccaucuggggcuccuuc

SEQ ID NO: 3837778 - RNA, 23 nt, Human
gccaucugguuaggauggcagga

SEQ ID NO: 3837779 - RNA, 12 nt, Human
gccaucuguggg

SEQ ID NO: 3837780 - RNA, 13 nt, Human
gccaucugugggc

SEQ ID NO: 3837781 - RNA, 15 nt, Human
gccaucugugggcac

SEQ ID NO: 3837782 - RNA, 15 nt, Human
gccaucuugguaaau

SEQ ID NO: 3837783 - RNA, 22 nt, Human
gccaucuugguaaauuucccca

SEQ ID NO: 3837784 - RNA, 16 nt, Human
gccaugaacuggaggc

SEQ ID NO: 3837785 - RNA, 12 nt, Human
gccaugaacugu

SEQ ID NO: 3837786 - RNA, 13 nt, Human
gccaugaacuuug

SEQ ID NO: 3837787 - RNA, 23 nt, Human
gccaugaagaggaugcugugaaa

SEQ ID NO: 3837788 - RNA, 23 nt, Human
gccaugacaacuucuaauugcca

SEQ ID NO: 3837789 - RNA, 17 nt, Human
gccaugacccugccucu

SEQ ID NO: 3837790 - RNA, 21 nt, Human
gccaugacccugccucuccca

SEQ ID NO: 3837791 - RNA, 18 nt, Human
gccaugaccuuacauuuc

SEQ ID NO: 3837792 - RNA, 22 nt, Human
gccaugagaauguuuuagcaca

SEQ ID NO: 3837793 - RNA, 14 nt, Human
gccaugagcuccag

SEQ ID NO: 3837794 - RNA, 15 nt, Human
gccaugagcuccaga

SEQ ID NO: 3837795 - RNA, 19 nt, Human
gccaugagcuccagacccc

SEQ ID NO: 3837796 - RNA, 20 nt, Human
gccaugaggaacaaggcaag

SEQ ID NO: 3837797 - RNA, 14 nt, Human
gcccugcuccuccc

SEQ ID NO: 3837798 - RNA, 17 nt, Human
gcccugcuccucccugg

SEQ ID NO: 3837799 - RNA, 18 nt, Human
gcccugcuccucccuggc

SEQ ID NO: 3837800 - RNA, 21 nt, Human
gcccugcuccucccuggcugc

SEQ ID NO: 3837801 - RNA, 17 nt, Human
gcccugcuccugcagca

SEQ ID NO: 3837802 - RNA, 19 nt, Human
gcccugcugagucaucugu

SEQ ID NO: 3837803 - RNA, 17 nt, Human
gcccugcugcccucccc

SEQ ID NO: 3837804 - RNA, 18 nt, Human
gcccugcugcugccugcc

SEQ ID NO: 3837805 - RNA, 18 nt, Human
gcccugcuggccgccuca

SEQ ID NO: 3837806 - RNA, 20 nt, Human
gcccugcuggccgccucacc

SEQ ID NO: 3837807 - RNA, 22 nt, Human
gcccugcuggccgccucacccc

SEQ ID NO: 3837808 - RNA, 14 nt, Human
gcccugcuuucaga

SEQ ID NO: 3837809 - RNA, 20 nt, Human
gcccugcuuugggcugcccu

SEQ ID NO: 3837810 - RNA, 22 nt, Human
gcccugcuuugggcugcccugg

SEQ ID NO: 3837811 - RNA, 20 nt, Human
gcccuggaacauccuuugca

SEQ ID NO: 3837812 - RNA, 21 nt, Human
gcccuggaacucuaucugggc

SEQ ID NO: 3837813 - RNA, 22 nt, Human
gcccuggagaccccaccagccu

SEQ ID NO: 3837814 - RNA, 20 nt, Human
gcccuggagccaacugcugc

SEQ ID NO: 3837815 - RNA, 23 nt, Human
gcccuggagccaacugcugcuuu

SEQ ID NO: 3837816 - RNA, 22 nt, Human
gcccuggaggugccagcaaagc

SEQ ID NO: 3837817 - RNA, 15 nt, Human
gcccuggagguggcu

SEQ ID NO: 3837818 - RNA, 15 nt, Human
gcccuggcagggggc

SEQ ID NO: 3837819 - RNA, 16 nt, Human
gcccuggcagggggca

SEQ ID NO: 3837820 - RNA, 21 nt, Human
gcccuggcagggucauccugu

SEQ ID NO: 3837821 - RNA, 15 nt, Human
gcccuggcaugucaa

SEQ ID NO: 3837822 - RNA, 15 nt, Human
gcccuggccagaggc

SEQ ID NO: 3837823 - RNA, 16 nt, Human
gcccuggccagaggcu

SEQ ID NO: 3837824 - RNA, 16 nt, Human
gcccuggcccccacau

SEQ ID NO: 3837825 - RNA, 14 nt, Human
gcccuggccucccc

SEQ ID NO: 3837826 - RNA, 17 nt, Human
gcccuggccuccccugc

SEQ ID NO: 3837827 - RNA, 19 nt, Human
gcccuggccuccccugcca

SEQ ID NO: 3837828 - RNA, 24 nt, Human
gcccuggccuccccugccaccagg

SEQ ID NO: 3837829 - RNA, 12 nt, Human
gcccuggccugc

SEQ ID NO: 3837830 - RNA, 13 nt, Human
gcccuggccugcu

SEQ ID NO: 3837831 - RNA, 16 nt, Human
gcccuggccugcuggg

SEQ ID NO: 3837832 - RNA, 15 nt, Human
gcccuggcucccaca

SEQ ID NO: 3837833 - RNA, 14 nt, Human
gcccuggcucugca

SEQ ID NO: 3837834 - RNA, 10 nt, Human
gcccuggcug

SEQ ID NO: 3837835 - RNA, 16 nt, Human
gcccuggcugaaggac

SEQ ID NO: 3837836 - RNA, 17 nt, Human
gcccuggcugaaggacu

SEQ ID NO: 3837837 - RNA, 19 nt, Human
gcccuggcugaaggacugu

SEQ ID NO: 3837838 - RNA, 12 nt, Human
gcccuggcugac

SEQ ID NO: 3837839 - RNA, 16 nt, Human
gcccuggcugccggca

SEQ ID NO: 3837840 - RNA, 14 nt, Human
gcccuggcugcugc

SEQ ID NO: 3837841 - RNA, 16 nt, Human
gcccuggcugcugccc

SEQ ID NO: 3837842 - RNA, 22 nt, Human
gcccuggcugcugcccccaccc

SEQ ID NO: 3837843 - RNA, 23 nt, Human
gcccuggcuguucugugguuccu

SEQ ID NO: 3837844 - RNA, 22 nt, Human
gcccugggaaaccccuucucug

SEQ ID NO: 3837845 - RNA, 16 nt, Human
gcccugggaggcagug

SEQ ID NO: 3837846 - RNA, 23 nt, Human
gcccugggaggcucuggagccca

SEQ ID NO: 3837847 - RNA, 17 nt, Human
gcccugggaucacugug

SEQ ID NO: 3837848 - RNA, 15 nt, Human
gcccugggccugccu

SEQ ID NO: 3837849 - RNA, 16 nt, Human
gcccugggccugccuc

SEQ ID NO: 3837850 - RNA, 23 nt, Human
gcccugggcucggaggcugcccc

SEQ ID NO: 3837851 - RNA, 13 nt, Human
gcccugggcugga

SEQ ID NO: 3837852 - RNA, 14 nt, Human
gcccuggggccugu

SEQ ID NO: 3837853 - RNA, 17 nt, Human
gcccuggggccuguaca

SEQ ID NO: 3837854 - RNA, 18 nt, Human
gcccuggggccuguacug

SEQ ID NO: 3837855 - RNA, 21 nt, Human
gcccuggggccuguacugccu

SEQ ID NO: 3837856 - RNA, 22 nt, Human
gcccuggggccuguacugccug

SEQ ID NO: 3837857 - RNA, 23 nt, Human
gcccuggggccuguacugccugc

SEQ ID NO: 3837858 - RNA, 16 nt, Human
gcccuggggcugggcc

SEQ ID NO: 3837859 - RNA, 21 nt, Human
gcccugggucuaagggguugg

SEQ ID NO: 3837860 - RNA, 17 nt, Human
gcccugguccagggaag

SEQ ID NO: 3837861 - RNA, 15 nt, Human
gcccugguccuucca

SEQ ID NO: 3837862 - RNA, 16 nt, Human
gcccuggugcugccac

SEQ ID NO: 3837863 - RNA, 19 nt, Human
gcccugguggcagugggag

SEQ ID NO: 3837864 - RNA, 20 nt, Human
gcccugguggcccucucccc

SEQ ID NO: 3837865 - RNA, 18 nt, Human
gcccugguguuucuagca

SEQ ID NO: 3837866 - RNA, 16 nt, Human
gcccugguuucacugg

SEQ ID NO: 3837867 - RNA, 18 nt, Human
gcccugguuucacuggcc

SEQ ID NO: 3837868 - RNA, 17 nt, Human
gcccugguuuccugccc

SEQ ID NO: 3837869 - RNA, 21 nt, Human
gcccuguaucaacccagaaac

SEQ ID NO: 3837870 - RNA, 22 nt, Human
gcccuguaucaacccagaaaca

SEQ ID NO: 3837871 - RNA, 17 nt, Human
gcccugucaggaggcag

SEQ ID NO: 3837872 - RNA, 15 nt, Human
gcccugucagugcag

SEQ ID NO: 3837873 - RNA, 13 nt, Human
gcccugucccucc

SEQ ID NO: 3837874 - RNA, 17 nt, Human
gcccuguccugguggua

SEQ ID NO: 3837875 - RNA, 22 nt, Human
gcccuguccuggugguauuuuc

SEQ ID NO: 3837876 - RNA, 21 nt, Human
gcccugucgagacacuugccu

SEQ ID NO: 3837877 - RNA, 19 nt, Human
gcccugugaggcugggucc

SEQ ID NO: 3837878 - RNA, 13 nt, Human
gcccugugcucca

SEQ ID NO: 3837879 - RNA, 23 nt, Human
gcccuguggaagggacuaggagc

SEQ ID NO: 3837880 - RNA, 22 nt, Human
gcccuguggaugagcccucaga

SEQ ID NO: 3837881 - RNA, 19 nt, Human
gcccugugggaccccaggc

SEQ ID NO: 3837882 - RNA, 21 nt, Human
gcccugugggcccccaaaugg

SEQ ID NO: 3837883 - RNA, 12 nt, Human
gcccugugugca

SEQ ID NO: 3837884 - RNA, 13 nt, Human
gcccugugugcag

SEQ ID NO: 3837885 - RNA, 14 nt, Human
gcccuguuaaaaga

SEQ ID NO: 3837886 - RNA, 17 nt, Human
gcccuguuaaaagauga

SEQ ID NO: 3837887 - RNA, 20 nt, Human
gcccuguugaauuuuguucu

SEQ ID NO: 3837888 - RNA, 16 nt, Human
gcccuguugacacagg

SEQ ID NO: 3837889 - RNA, 20 nt, Human
gcccuuaccugccaggaagc

SEQ ID NO: 3837890 - RNA, 13 nt, Human
gcccuuaccuucc

SEQ ID NO: 3837891 - RNA, 18 nt, Human
gcccuuacuucuugcccu

SEQ ID NO: 3837892 - RNA, 23 nt, Human
gcccuuagucccccaacucugag

SEQ ID NO: 3837893 - RNA, 18 nt, Human
gcccuuauuuucaagaaa

SEQ ID NO: 3837894 - RNA, 20 nt, Human
gcccuuauuuucaagaaacu

SEQ ID NO: 3837895 - RNA, 15 nt, Human
gcccuuccaaacucu

SEQ ID NO: 3837896 - RNA, 16 nt, Human
gcccuucccugucccu

SEQ ID NO: 3837897 - RNA, 19 nt, Human
gcccuuccuccuccaccac

SEQ ID NO: 3837898 - RNA, 20 nt, Human
gcccuuccuccuccaccacc

SEQ ID NO: 3837899 - RNA, 23 nt, Human
gcccuuccucuccacccucccag

SEQ ID NO: 3837900 - RNA, 20 nt, Human
gcccuuccucuccacugccu

SEQ ID NO: 3837901 - RNA, 21 nt, Human
gcccuuccucuccacugccuu

SEQ ID NO: 3837902 - RNA, 12 nt, Human
gcccuuccugga

SEQ ID NO: 3837903 - RNA, 14 nt, Human
gcccuuccuggaca

SEQ ID NO: 3837904 - RNA, 19 nt, Human
gcccuuccuggacagcugu

SEQ ID NO: 3837905 - RNA, 22 nt, Human
gcccuuccuggacagcugugcc

SEQ ID NO: 3837906 - RNA, 22 nt, Human
gcccuucuauacccacccagaa

SEQ ID NO: 3837907 - RNA, 14 nt, Human
gcccuucucuccag

SEQ ID NO: 3837908 - RNA, 17 nt, Human
gcccuucucuccagccc

SEQ ID NO: 3837909 - RNA, 18 nt, Human
gcccuucucuccagcccc

SEQ ID NO: 3837910 - RNA, 23 nt, Human
gcccuucuugcugcccugcccca

SEQ ID NO: 3837911 - RNA, 17 nt, Human
gcccuugagcuccccaa

SEQ ID NO: 3837912 - RNA, 20 nt, Human
gcccuugcaguucagcacca

SEQ ID NO: 3837913 - RNA, 21 nt, Human
gcccuugcaguucagcaccac

SEQ ID NO: 3837914 - RNA, 13 nt, Human
gcccuugcccuga

SEQ ID NO: 3837915 - RNA, 14 nt, Human
gcccuugcccugac

SEQ ID NO: 3837916 - RNA, 16 nt, Human
gcccuugccuccccau

SEQ ID NO: 3837917 - RNA, 12 nt, Human
gcccuuggagcg

SEQ ID NO: 3837918 - RNA, 16 nt, Human
gcccuuggaggccagc

SEQ ID NO: 3837919 - RNA, 16 nt, Human
gcccuuggccaugggu

SEQ ID NO: 3837920 - RNA, 24 nt, Human
gcccuugucccacucaagccaagc

SEQ ID NO: 3837921 - RNA, 21 nt, Human
gcccuuguuuggggcaggagu

SEQ ID NO: 3837922 - RNA, 22 nt, Human
gcccuuguuuggggcaggagua

SEQ ID NO: 3837923 - RNA, 20 nt, Human
gcccuuuacuugucuuucug

SEQ ID NO: 3837924 - RNA, 22 nt, Human
gcccuuuccccgacgcccaccc

SEQ ID NO: 3837925 - RNA, 13 nt, Human
gcccuuuccucag

SEQ ID NO: 3837926 - RNA, 22 nt, Human
gcccuuucggauccagggaggc

SEQ ID NO: 3837927 - RNA, 12 nt, Human
gcccuuucugug

SEQ ID NO: 3837928 - RNA, 21 nt, Human
gcccuuugggaggcugaggcg

SEQ ID NO: 3837929 - RNA, 14 nt, Human
gcccuuuuuaagga

SEQ ID NO: 3837930 - RNA, 17 nt, Human
gcccuuuuuucugccuc

SEQ ID NO: 3837931 - RNA, 19 nt, Human
gcccuuuuuucugccuccu

SEQ ID NO: 3837932 - RNA, 12 nt, Human
gccgaaccagga

SEQ ID NO: 3837933 - RNA, 16 nt, Human
gcccccaccuggcuca

SEQ ID NO: 3837934 - RNA, 12 nt, Human
gcccccacugac

SEQ ID NO: 3837935 - RNA, 15 nt, Human
gcccccacuggcugu

SEQ ID NO: 3837936 - RNA, 12 nt, Human
gcccccacuggu

SEQ ID NO: 3837937 - RNA, 16 nt, Human
gcccccagagcccagg

SEQ ID NO: 3837938 - RNA, 13 nt, Human
gcccccagccugu

SEQ ID NO: 3837939 - RNA, 22 nt, Human
gcccccagccugucagauccag

SEQ ID NO: 3837940 - RNA, 22 nt, Human
gcccccagcuaagaaccuggaa

SEQ ID NO: 3837941 - RNA, 12 nt, Human
gccguggcuucc

SEQ ID NO: 3837942 - RNA, 15 nt, Human
gccguggcuucccgc

SEQ ID NO: 3837943 - RNA, 22 nt, Human
gccguggcuucccgcucagccc

SEQ ID NO: 3837944 - RNA, 18 nt, Human
gccguggggguugaggca

SEQ ID NO: 3837945 - RNA, 23 nt, Human
gccguggugauuuagcaggaagc

SEQ ID NO: 3837946 - RNA, 14 nt, Human
gccgugugagugug

SEQ ID NO: 3837947 - RNA, 18 nt, Human
gccgugugagugugacag

SEQ ID NO: 3837948 - RNA, 19 nt, Human
gccgugugagugugacagg

SEQ ID NO: 3837949 - RNA, 15 nt, Human
gccccugcccggcug

SEQ ID NO: 3837950 - RNA, 18 nt, Human
gccccugccucucugcag

SEQ ID NO: 3837951 - RNA, 15 nt, Human
gccccugccugccau

SEQ ID NO: 3837952 - RNA, 21 nt, Human
gccccugccugccauguaccu

SEQ ID NO: 3837953 - RNA, 14 nt, Human
gccccugcuacugc

SEQ ID NO: 3837954 - RNA, 17 nt, Human
gccccugcuacugccaa

SEQ ID NO: 3837955 - RNA, 13 nt, Human
gccccugcugccu

SEQ ID NO: 3837956 - RNA, 15 nt, Human
gccccugcugccucc

SEQ ID NO: 3837957 - RNA, 19 nt, Human
gccccugcugccuccccaa

SEQ ID NO: 3837958 - RNA, 22 nt, Human
gccccugcugcugucaccucuc

SEQ ID NO: 3837959 - RNA, 21 nt, Human
gccccugcugguucaggguug

SEQ ID NO: 3837960 - RNA, 14 nt, Human
gccccugcuucucc

SEQ ID NO: 3837961 - RNA, 15 nt, Human
gccccugcuucucca

SEQ ID NO: 3837962 - RNA, 16 nt, Human
gccccugcuucuccag

SEQ ID NO: 3837963 - RNA, 13 nt, Human
gccccuggagcca

SEQ ID NO: 3837964 - RNA, 14 nt, Human
gccccuggagccag

SEQ ID NO: 3837965 - RNA, 22 nt, Human
gccccuggaggcugccucccaa

SEQ ID NO: 3837966 - RNA, 22 nt, Human
gccccuggaugcagccucacag

SEQ ID NO: 3837967 - RNA, 23 nt, Human
gccccuggcagagaugccucccu

SEQ ID NO: 3837968 - RNA, 15 nt, Human
gccccuggcagcccc

SEQ ID NO: 3837969 - RNA, 16 nt, Human
gccccuggcagccccu

SEQ ID NO: 3837970 - RNA, 20 nt, Human
gccccuggccgcgcuccggg

SEQ ID NO: 3837971 - RNA, 12 nt, Human
gccccuggcugg

SEQ ID NO: 3837972 - RNA, 12 nt, Human
gccccugggcuu

SEQ ID NO: 3837973 - RNA, 20 nt, Human
gccccugggcuuggccugcu

SEQ ID NO: 3837974 - RNA, 21 nt, Human
gccccugggcuuggccugcug

SEQ ID NO: 3837975 - RNA, 15 nt, Human
gccccugucccaccc

SEQ ID NO: 3837976 - RNA, 18 nt, Human
gccccugucuagagaggg

SEQ ID NO: 3837977 - RNA, 19 nt, Human
gccccugucuagagaggga

SEQ ID NO: 3837978 - RNA, 13 nt, Human
gccccuguucucu

SEQ ID NO: 3837979 - RNA, 22 nt, Human
gccccuuagcccccacccacuu

SEQ ID NO: 3837980 - RNA, 20 nt, Human
gccccuucacuucugaccac

SEQ ID NO: 3837981 - RNA, 21 nt, Human
gccccuucacuucugaccaca

SEQ ID NO: 3837982 - RNA, 15 nt, Human
gccccuuccgccacu

SEQ ID NO: 3837983 - RNA, 18 nt, Human
gccccuucuacacucucc

SEQ ID NO: 3837984 - RNA, 22 nt, Human
gccccuucuacacucuccuggg

SEQ ID NO: 3837985 - RNA, 23 nt, Human
gccccuucuacacucuccugggc

SEQ ID NO: 3837986 - RNA, 19 nt, Human
gccccuucucucccugcca

SEQ ID NO: 3837987 - RNA, 23 nt, Human
gccccuucucucccugccagagg

SEQ ID NO: 3837988 - RNA, 14 nt, Human
gccccuucugcuca

SEQ ID NO: 3837989 - RNA, 17 nt, Human
gccccuucugcucagcu

SEQ ID NO: 3837990 - RNA, 20 nt, Human
gccccuugcucuccccugcc

SEQ ID NO: 3837991 - RNA, 12 nt, Human
gccccuuuauaa

SEQ ID NO: 3837992 - RNA, 13 nt, Human
gccccuuuauaaa

SEQ ID NO: 3837993 - RNA, 18 nt, Human
gccccuuugcugacccuc

SEQ ID NO: 3837994 - RNA, 16 nt, Human
gccccuuuuuacuccc

SEQ ID NO: 3837995 - RNA, 18 nt, Human
gccccuuuuuacuccccu

SEQ ID NO: 3837996 - RNA, 20 nt, Human
gccccuuuuuacuccccuug

SEQ ID NO: 3837997 - RNA, 13 nt, Human
gcccgaauacaaa

SEQ ID NO: 3837998 - RNA, 14 nt, Human
gcccgacagccugg

SEQ ID NO: 3837999 - RNA, 19 nt, Human
gcccgacagccuggcacag

SEQ ID NO: 3838000 - RNA, 23 nt, Human
gcccgacuugcuguuuuguucug

SEQ ID NO: 3838001 - RNA, 18 nt, Human
gcccgagcagcugagcag

SEQ ID NO: 3838002 - RNA, 20 nt, Human
gcccgaggaggugucucagg

SEQ ID NO: 3838003 - RNA, 23 nt, Human
gcccgagggaggggaagcuucug

SEQ ID NO: 3838004 - RNA, 13 nt, Human
gcccgcacacccu

SEQ ID NO: 3838005 - RNA, 14 nt, Human
gcccgcacacccuc

SEQ ID NO: 3838006 - RNA, 21 nt, Human
gcccgcacccccacccuuugg

SEQ ID NO: 3838007 - RNA, 16 nt, Human
gcccgcagaccucugg

SEQ ID NO: 3838008 - RNA, 18 nt, Human
gcccgcagaccucuggau

SEQ ID NO: 3838009 - RNA, 22 nt, Human
gcccgcagagcgcgccccuagc

SEQ ID NO: 3838010 - RNA, 15 nt, Human
gcccgcaucagcugc

SEQ ID NO: 3838011 - RNA, 17 nt, Human
gcccgcaugcggcccag

SEQ ID NO: 3838012 - RNA, 18 nt, Human
gcccgcccacuguccugg

SEQ ID NO: 3838013 - RNA, 21 nt, Human
gcccgcgauguggaacugcug

SEQ ID NO: 3838014 - RNA, 15 nt, Human
gcccgcgccacagga

SEQ ID NO: 3838015 - RNA, 23 nt, Human
gcccgcgccacaggacccucgcc

SEQ ID NO: 3838016 - RNA, 13 nt, Human
gcccgcgcccgcg

SEQ ID NO: 3838017 - RNA, 18 nt, Human
gcccgcggggacauuggg

SEQ ID NO: 3838018 - RNA, 12 nt, Human
gcccgcucccag

SEQ ID NO: 3838019 - RNA, 15 nt, Human
gcccgcucugcagac

SEQ ID NO: 3838020 - RNA, 13 nt, Human
gcccgcugggcug

SEQ ID NO: 3838021 - RNA, 14 nt, Human
gcccgcugggcuga

SEQ ID NO: 3838022 - RNA, 15 nt, Human
gcccgcugggcugag

SEQ ID NO: 3838023 - RNA, 16 nt, Human
gcccgcugggcugagc

SEQ ID NO: 3838024 - RNA, 22 nt, Human
gcccgcuugccucggcuccugc

SEQ ID NO: 3838025 - RNA, 23 nt, Human
gcccgcuugccucggcuccugcu

SEQ ID NO: 3838026 - RNA, 14 nt, Human
gcccggaccuuggc

SEQ ID NO: 3838027 - RNA, 21 nt, Human
gcccggacgcccaggacccca

SEQ ID NO: 3838028 - RNA, 19 nt, Human
gcccggagauuggacggcc

SEQ ID NO: 3838029 - RNA, 19 nt, Human
gcccggagcugccccucuc

SEQ ID NO: 3838030 - RNA, 15 nt, Human
gcccggaugcugcuu

SEQ ID NO: 3838031 - RNA, 14 nt, Human
gcccggaugcuucu

SEQ ID NO: 3838032 - RNA, 16 nt, Human
gcccggauucugggag

SEQ ID NO: 3838033 - RNA, 12 nt, Human
gcccggccagcc

SEQ ID NO: 3838034 - RNA, 17 nt, Human
gcccggcgccccugcca

SEQ ID NO: 3838035 - RNA, 17 nt, Human
gcccggcgcccucuguc

SEQ ID NO: 3838036 - RNA, 18 nt, Human
gcccggcgcccucugucc

SEQ ID NO: 3838037 - RNA, 21 nt, Human
gcccggcgcgguggcucacgc

SEQ ID NO: 3838038 - RNA, 12 nt, Human
gcccggcuccag

SEQ ID NO: 3838039 - RNA, 13 nt, Human
gcccggcuccagg

SEQ ID NO: 3838040 - RNA, 15 nt, Human
gcccggcuccaggcu

SEQ ID NO: 3838041 - RNA, 13 nt, Human
gcccggcuccugg

SEQ ID NO: 3838042 - RNA, 15 nt, Human
gcccggcuccugguc

SEQ ID NO: 3838043 - RNA, 15 nt, Human
gcccgggagccuagg

SEQ ID NO: 3838044 - RNA, 20 nt, Human
gcccgggagccuaggaccac

SEQ ID NO: 3838045 - RNA, 15 nt, Human
gcccgggagcucagg

SEQ ID NO: 3838046 - RNA, 15 nt, Human
gcccgggcccagagg

SEQ ID NO: 3838047 - RNA, 19 nt, Human
gcccgggcgcggccagccc

SEQ ID NO: 3838048 - RNA, 13 nt, Human
gcccgggcucugc

SEQ ID NO: 3838049 - RNA, 15 nt, Human
gcccgggcucugccu

SEQ ID NO: 3838050 - RNA, 21 nt, Human
gcccgggcucugccucccauc

SEQ ID NO: 3838051 - RNA, 23 nt, Human
gcccgggcucugccucccaucac

SEQ ID NO: 3838052 - RNA, 12 nt, Human
gcccgggcugcc

SEQ ID NO: 3838053 - RNA, 15 nt, Human
gcccgggcugccugg

SEQ ID NO: 3838054 - RNA, 16 nt, Human
gcccgggcugccuggg

SEQ ID NO: 3838055 - RNA, 23 nt, Human
gcccgggcugccugggcuguugg

SEQ ID NO: 3838056 - RNA, 20 nt, Human
gcccggggcagcagcagccc

SEQ ID NO: 3838057 - RNA, 14 nt, Human
gcccggggcagcug

SEQ ID NO: 3838058 - RNA, 22 nt, Human
gcccggggcagcugccagagaa

SEQ ID NO: 3838059 - RNA, 13 nt, Human
gcccguccugccu

SEQ ID NO: 3838060 - RNA, 17 nt, Human
gcccguccugccugugg

SEQ ID NO: 3838061 - RNA, 18 nt, Human
gcccguccugccuguggc

SEQ ID NO: 3838062 - RNA, 17 nt, Human
gcccgucucucucccau

SEQ ID NO: 3838063 - RNA, 15 nt, Human
gcccgucuucagccu

SEQ ID NO: 3838064 - RNA, 13 nt, Human
gcccgugacagac

SEQ ID NO: 3838065 - RNA, 19 nt, Human
gcccgugacagacuccuga

SEQ ID NO: 3838066 - RNA, 19 nt, Human
gcccguggggccggggcuu

SEQ ID NO: 3838067 - RNA, 17 nt, Human
gcccguguacauagugc

SEQ ID NO: 3838068 - RNA, 23 nt, Human
gcccguguaguccccaaccgugu

SEQ ID NO: 3838069 - RNA, 13 nt, Human
gcccguguggccc

SEQ ID NO: 3838070 - RNA, 19 nt, Human
gcccguugucucccuggcc

SEQ ID NO: 3838071 - RNA, 21 nt, Human
gcccguugucucccuggcccu

SEQ ID NO: 3838072 - RNA, 23 nt, Human
gcccguugucucccuggcccuca

SEQ ID NO: 3838073 - RNA, 19 nt, Human
gcccuaaaauuccacugcg

SEQ ID NO: 3838074 - RNA, 18 nt, Human
gcccuaaccccuuccaga

SEQ ID NO: 3838075 - RNA, 15 nt, Human
gcccuaagcagaaag

SEQ ID NO: 3838076 - RNA, 21 nt, Human
gcccuaagcagaaagugccuu

SEQ ID NO: 3838077 - RNA, 16 nt, Human
gcccuaauucagccau

SEQ ID NO: 3838078 - RNA, 22 nt, Human
gcccuaauucagccauguacag

SEQ ID NO: 3838079 - RNA, 21 nt, Human
gcccuacagaggucucugccg

SEQ ID NO: 3838080 - RNA, 13 nt, Human
gcccuaccagcgc

SEQ ID NO: 3838081 - RNA, 21 nt, Human
gcccuaccagcgcccgcuggg

SEQ ID NO: 3838082 - RNA, 23 nt, Human
gcccuaccagcgcccgcugggcu

SEQ ID NO: 3838083 - RNA, 16 nt, Human
gcccuaccugccccac

SEQ ID NO: 3838084 - RNA, 15 nt, Human
gcccuacucauuggg

SEQ ID NO: 3838085 - RNA, 16 nt, Human
gcccuacucccugcag

SEQ ID NO: 3838086 - RNA, 16 nt, Human
cugugacccccagcuc

SEQ ID NO: 3838087 - RNA, 18 nt, Human
cugugacccccagcuccg

SEQ ID NO: 3838088 - RNA, 17 nt, Human
cugugaccucaggcacu

SEQ ID NO: 3838089 - RNA, 16 nt, Human
cugugaccugccccgc

SEQ ID NO: 3838090 - RNA, 17 nt, Human
cugugaccugcugagcu

SEQ ID NO: 3838091 - RNA, 20 nt, Human
cugugaccugcugagcucug

SEQ ID NO: 3838092 - RNA, 23 nt, Human
cugugaccugcugagcucugaga

SEQ ID NO: 3838093 - RNA, 18 nt, Human
cugugaccuugagaagau

SEQ ID NO: 3838094 - RNA, 14 nt, Human
cugugacugauguu

SEQ ID NO: 3838095 - RNA, 19 nt, Human
cugugagaagguuuauugu

SEQ ID NO: 3838096 - RNA, 22 nt, Human
cugugagaagguuuauuguuaa

SEQ ID NO: 3838097 - RNA, 15 nt, Human
cugugagacaguggg

SEQ ID NO: 3838098 - RNA, 13 nt, Human
cugugagauuuug

SEQ ID NO: 3838099 - RNA, 13 nt, Human
cugugagccaguc

SEQ ID NO: 3838100 - RNA, 15 nt, Human
cugugagcccagcug

SEQ ID NO: 3838101 - RNA, 16 nt, Human
cugugaggagccccau

SEQ ID NO: 3838102 - RNA, 17 nt, Human
cugugaggagccccauc

SEQ ID NO: 3838103 - RNA, 18 nt, Human
cugugaggcaggggcgga

SEQ ID NO: 3838104 - RNA, 18 nt, Human
cugugaggccccuggaca

SEQ ID NO: 3838105 - RNA, 12 nt, Human
cugugaggcugu

SEQ ID NO: 3838106 - RNA, 17 nt, Human
cugugaggcuguccugu

SEQ ID NO: 3838107 - RNA, 14 nt, Human
cugugagggagggg

SEQ ID NO: 3838108 - RNA, 17 nt, Human
cugugagguuucccaau

SEQ ID NO: 3838109 - RNA, 17 nt, Human
cugugaguaaauauuga

SEQ ID NO: 3838110 - RNA, 21 nt, Human
cugugagucuuugguucuaag

SEQ ID NO: 3838111 - RNA, 19 nt, Human
cugugaguguaagugugag

SEQ ID NO: 3838112 - RNA, 21 nt, Human
cugugauacagaacucuuaaa

SEQ ID NO: 3838113 - RNA, 20 nt, Human
cugugaucaauauuuuuaua

SEQ ID NO: 3838114 - RNA, 13 nt, Human
cugugaucuuauu

SEQ ID NO: 3838115 - RNA, 15 nt, Human
cugugaucuuauuuu

SEQ ID NO: 3838116 - RNA, 18 nt, Human
cugugaucuuuuaaagug

SEQ ID NO: 3838117 - RNA, 14 nt, Human
cugugaugagcuga

SEQ ID NO: 3838118 - RNA, 18 nt, Human
cugugaugagcugaucug

SEQ ID NO: 3838119 - RNA, 14 nt, Human
cugugaugccacac

SEQ ID NO: 3838120 - RNA, 16 nt, Human
cugugaugccacacag

SEQ ID NO: 3838121 - RNA, 17 nt, Human
cugugaugccacacaga

SEQ ID NO: 3838122 - RNA, 14 nt, Human
cugugaugcccugc

SEQ ID NO: 3838123 - RNA, 18 nt, Human
cugugaugcuuugaagua

SEQ ID NO: 3838124 - RNA, 21 nt, Human
cugugauggggcccugccucc

SEQ ID NO: 3838125 - RNA, 16 nt, Human
cugugcaaauccuuga

SEQ ID NO: 3838126 - RNA, 18 nt, Human
cugugcaacgccgugggc

SEQ ID NO: 3838127 - RNA, 22 nt, Human
cugugcaacggucuccugacug

SEQ ID NO: 3838128 - RNA, 22 nt, Human
cugugcacaaaacccagaccug

SEQ ID NO: 3838129 - RNA, 19 nt, Human
cugugcacaaaguggcaua

SEQ ID NO: 3838130 - RNA, 12 nt, Human
cugugcacacac

SEQ ID NO: 3838131 - RNA, 15 nt, Human
cugugcacacccacc

SEQ ID NO: 3838132 - RNA, 17 nt, Human
cugugcacaccccacuc

SEQ ID NO: 3838133 - RNA, 19 nt, Human
cugugcacaucugugucuu

SEQ ID NO: 3838134 - RNA, 23 nt, Human
cugugcagaagggagcuggcucc

SEQ ID NO: 3838135 - RNA, 17 nt, Human
cugugcagccgcugagc

SEQ ID NO: 3838136 - RNA, 21 nt, Human
cugugcagccgcugagcgagg

SEQ ID NO: 3838137 - RNA, 15 nt, Human
cugugcagcgcagcu

SEQ ID NO: 3838138 - RNA, 21 nt, Human
cugugcagcgcagcuggacuc

SEQ ID NO: 3838139 - RNA, 15 nt, Human
cugugcagggaggag

SEQ ID NO: 3838140 - RNA, 18 nt, Human
cugugcauagugcuggga

SEQ ID NO: 3838141 - RNA, 15 nt, Human
cugugcauguauguc

SEQ ID NO: 3838142 - RNA, 15 nt, Human
cugugcauugggauu

SEQ ID NO: 3838143 - RNA, 17 nt, Human
cugugcauuucugguug

SEQ ID NO: 3838144 - RNA, 11 nt, Human
cugugccaccc

SEQ ID NO: 3838145 - RNA, 13 nt, Human
cugugccacccug

SEQ ID NO: 3838146 - RNA, 17 nt, Human
cugugccacccugggcu

SEQ ID NO: 3838147 - RNA, 18 nt, Human
cugugccacccugggcuc

SEQ ID NO: 3838148 - RNA, 13 nt, Human
cugugccagagcc

SEQ ID NO: 3838149 - RNA, 14 nt, Human
cugugccaggugag

SEQ ID NO: 3838150 - RNA, 13 nt, Human
cugugccaugugc

SEQ ID NO: 3838151 - RNA, 18 nt, Human
cugugccaugugccaggu

SEQ ID NO: 3838152 - RNA, 15 nt, Human
cugugccauguguuu

SEQ ID NO: 3838153 - RNA, 14 nt, Human
cugugccauuuugu

SEQ ID NO: 3838154 - RNA, 13 nt, Human
cugugcccagcuc

SEQ ID NO: 3838155 - RNA, 15 nt, Human
cugugcccagcucag

SEQ ID NO: 3838156 - RNA, 21 nt, Human
gccuggcgaaaccccaucucu

SEQ ID NO: 3838157 - RNA, 19 nt, Human
gccuggcgacagagcgaga

SEQ ID NO: 3838158 - RNA, 20 nt, Human
gccuggcgggaugggccacc

SEQ ID NO: 3838159 - RNA, 23 nt, Human
gccuggcgggaugggccaccgcc

SEQ ID NO: 3838160 - RNA, 16 nt, Human
gccuggcucagagcca

SEQ ID NO: 3838161 - RNA, 13 nt, Human
gccuggcucaggu

SEQ ID NO: 3838162 - RNA, 20 nt, Human
gccuggcucccacaggcagc

SEQ ID NO: 3838163 - RNA, 22 nt, Human
gccuggcucccacaggcagcuu

SEQ ID NO: 3838164 - RNA, 23 nt, Human
gccuggcucccacaggcagcuuu

SEQ ID NO: 3838165 - RNA, 19 nt, Human
gccuggcucccucacucuc

SEQ ID NO: 3838166 - RNA, 23 nt, Human
gccuggcucccucacucucagga

SEQ ID NO: 3838167 - RNA, 23 nt, Human
gccuggcucuuucgucacccuug

SEQ ID NO: 3838168 - RNA, 21 nt, Human
gccuggcugcugaucgccuuc

SEQ ID NO: 3838169 - RNA, 14 nt, Human
gccuggcuucugga

SEQ ID NO: 3838170 - RNA, 17 nt, Human
gccuggcuucuggagcc

SEQ ID NO: 3838171 - RNA, 18 nt, Human
gccuggcuucuggagccc

SEQ ID NO: 3838172 - RNA, 22 nt, Human
gccuggcuucuggagcccuugg

SEQ ID NO: 3838173 - RNA, 23 nt, Human
gccuggcuucuggagcccuuggg

SEQ ID NO: 3838174 - RNA, 16 nt, Human
gccugggacaacugcu

SEQ ID NO: 3838175 - RNA, 10 nt, Human
gccugggagg

SEQ ID NO: 3838176 - RNA, 17 nt, Human
gccugggauaggggcag

SEQ ID NO: 3838177 - RNA, 23 nt, Human
gccugggcaacaaagugagacuc

SEQ ID NO: 3838178 - RNA, 19 nt, Human
gccugggcaacagagcaag

SEQ ID NO: 3838179 - RNA, 15 nt, Human
gccugggcaauaaag

SEQ ID NO: 3838180 - RNA, 22 nt, Human
gccugggcaauaaagugagacc

SEQ ID NO: 3838181 - RNA, 13 nt, Human
gccugggcagcau

SEQ ID NO: 3838182 - RNA, 16 nt, Human
gccugggccgcugcca

SEQ ID NO: 3838183 - RNA, 17 nt, Human
gccugggccgcugccac

SEQ ID NO: 3838184 - RNA, 18 nt, Human
gccugggccgcugccacg

SEQ ID NO: 3838185 - RNA, 22 nt, Human
gccugggccguaucuccggcuc

SEQ ID NO: 3838186 - RNA, 14 nt, Human
gccugggccuaugg

SEQ ID NO: 3838187 - RNA, 23 nt, Human
gccugggccuauggagagcccug

SEQ ID NO: 3838188 - RNA, 16 nt, Human
gccugggccuggcucc

SEQ ID NO: 3838189 - RNA, 20 nt, Human
gccugggcgcugguccuuuc

SEQ ID NO: 3838190 - RNA, 14 nt, Human
gccugggcuccugg

SEQ ID NO: 3838191 - RNA, 21 nt, Human
gccugggcugaccccgguggc

SEQ ID NO: 3838192 - RNA, 17 nt, Human
gccuggggccugagaga

SEQ ID NO: 3838193 - RNA, 18 nt, Human
gccuggggccugagagaa

SEQ ID NO: 3838194 - RNA, 13 nt, Human
gccuggggccugg

SEQ ID NO: 3838195 - RNA, 14 nt, Human
gccuggggccuggc

SEQ ID NO: 3838196 - RNA, 15 nt, Human
gccuggggccuggca

SEQ ID NO: 3838197 - RNA, 21 nt, Human
gccuggggcucuaacgccuga

SEQ ID NO: 3838198 - RNA, 22 nt, Human
gccuggggcugaggcugaggca

SEQ ID NO: 3838199 - RNA, 20 nt, Human
gccugggggacagaaagaga

SEQ ID NO: 3838200 - RNA, 22 nt, Human
gccugggggcagggagaggagu

SEQ ID NO: 3838201 - RNA, 14 nt, Human
gccugggggccugg

SEQ ID NO: 3838202 - RNA, 20 nt, Human
gccugggggcugggcagagg

SEQ ID NO: 3838203 - RNA, 14 nt, Human
gccuggggucugga

SEQ ID NO: 3838204 - RNA, 22 nt, Human
gccuggggugacccggcacccc

SEQ ID NO: 3838205 - RNA, 21 nt, Human
gccugggucacacacggaggc

SEQ ID NO: 3838206 - RNA, 19 nt, Human
gccugggucugugucucuu

SEQ ID NO: 3838207 - RNA, 21 nt, Human
gccugggugcuggcugcccag

SEQ ID NO: 3838208 - RNA, 15 nt, Human
gccuggguggacaug

SEQ ID NO: 3838209 - RNA, 23 nt, Human
gccuggguggaucggccuccucu

SEQ ID NO: 3838210 - RNA, 15 nt, Human
gccuggguggggcug

SEQ ID NO: 3838211 - RNA, 18 nt, Human
gccuggguggggcugcuc

SEQ ID NO: 3838212 - RNA, 20 nt, Human
gccuggguggggcugcuccu

SEQ ID NO: 3838213 - RNA, 19 nt, Human
gccuggguguaaaaccugg

SEQ ID NO: 3838214 - RNA, 14 nt, Human
gccuggucagccca

SEQ ID NO: 3838215 - RNA, 15 nt, Human
gccuggucagcccaa

SEQ ID NO: 3838216 - RNA, 18 nt, Human
gccuggucaggcccuggu

SEQ ID NO: 3838217 - RNA, 14 nt, Human
gccuggucccuggg

SEQ ID NO: 3838218 - RNA, 17 nt, Human
gccuggucgccuuccac

SEQ ID NO: 3838219 - RNA, 18 nt, Human
gccuggucucacccugga

SEQ ID NO: 3838220 - RNA, 20 nt, Human
gccuggucucacccuggagg

SEQ ID NO: 3838221 - RNA, 22 nt, Human
gccuggucucacccuggaggca

SEQ ID NO: 3838222 - RNA, 19 nt, Human
gccuggucuccugccccca

SEQ ID NO: 3838223 - RNA, 13 nt, Human
gccugguggcagc

SEQ ID NO: 3838224 - RNA, 14 nt, Human
gccugguggcagcu

SEQ ID NO: 3838225 - RNA, 19 nt, Human
gccuguaacaagccagauu

SEQ ID NO: 3838226 - RNA, 17 nt, Human
gccuguaaucccagcua

SEQ ID NO: 3838227 - RNA, 18 nt, Human
gccuguaaucccagcuac

SEQ ID NO: 3838228 - RNA, 20 nt, Human
gccuguaauccuagcacuuu

SEQ ID NO: 3838229 - RNA, 20 nt, Human
gccuguaauucaguguauuu

SEQ ID NO: 3838230 - RNA, 22 nt, Human
gccuuccuaagccuguggcugu

SEQ ID NO: 3838231 - RNA, 13 nt, Human
gccuuccuccugg

SEQ ID NO: 3838232 - RNA, 14 nt, Human
gccuuccuccuggg

SEQ ID NO: 3838233 - RNA, 16 nt, Human
gccuuccucucuccag

SEQ ID NO: 3838234 - RNA, 17 nt, Human
gccuuccucugcagcug

SEQ ID NO: 3838235 - RNA, 19 nt, Human
gccuuccucugcagcugac

SEQ ID NO: 3838236 - RNA, 20 nt, Human
gccuuccucugcagcugacc

SEQ ID NO: 3838237 - RNA, 19 nt, Human
gccuuccuguuuuucacau

SEQ ID NO: 3838238 - RNA, 13 nt, Human
gccuuccuugacc

SEQ ID NO: 3838239 - RNA, 18 nt, Human
gccuuccuugaccuuccu

SEQ ID NO: 3838240 - RNA, 13 nt, Human
gccuuccuuucuc

SEQ ID NO: 3838241 - RNA, 17 nt, Human
gccuucgcuucuugccu

SEQ ID NO: 3838242 - RNA, 21 nt, Human
gccuucgcuucuugccucugu

SEQ ID NO: 3838243 - RNA, 22 nt, Human
gccuucgcuucuugccucugug

SEQ ID NO: 3838244 - RNA, 19 nt, Human
gccuucggacaacucaguc

SEQ ID NO: 3838245 - RNA, 19 nt, Human
gccuucggccuccauccug

SEQ ID NO: 3838246 - RNA, 20 nt, Human
gccuucggccuccauccuga

SEQ ID NO: 3838247 - RNA, 14 nt, Human
gccuucgugccccc

SEQ ID NO: 3838248 - RNA, 12 nt, Human
gccuucucacca

SEQ ID NO: 3838249 - RNA, 16 nt, Human
gccuucucaccagcug

SEQ ID NO: 3838250 - RNA, 23 nt, Human
gccuucucaccagcugcaaagug

SEQ ID NO: 3838251 - RNA, 19 nt, Human
gccuucugacggcccugca

SEQ ID NO: 3838252 - RNA, 19 nt, Human
gccuucugaggacauucca

SEQ ID NO: 3838253 - RNA, 21 nt, Human
gccuucuggauucuuggcccg

SEQ ID NO: 3838254 - RNA, 16 nt, Human
gccuucuguccuggug

SEQ ID NO: 3838255 - RNA, 18 nt, Human
gccuucuguccugguguc

SEQ ID NO: 3838256 - RNA, 14 nt, Human
gccuucugugggga

SEQ ID NO: 3838257 - RNA, 18 nt, Human
gccuucuuauucucacuc

SEQ ID NO: 3838258 - RNA, 19 nt, Human
gccuucuuauucucacucc

SEQ ID NO: 3838259 - RNA, 15 nt, Human
gccuucuucacccag

SEQ ID NO: 3838260 - RNA, 17 nt, Human
gccuucuucacccagcu

SEQ ID NO: 3838261 - RNA, 18 nt, Human
gccuucuucuuuuugcug

SEQ ID NO: 3838262 - RNA, 19 nt, Human
gccuucuuugcuugccucu

SEQ ID NO: 3838263 - RNA, 21 nt, Human
gccuucuuuucucccuuuuaa

SEQ ID NO: 3838264 - RNA, 23 nt, Human
gccuucuuuugggggucaacagu

SEQ ID NO: 3838265 - RNA, 18 nt, Human
gccuugaaccacuucccu

SEQ ID NO: 3838266 - RNA, 19 nt, Human
gccuugaaccacuucccuc

SEQ ID NO: 3838267 - RNA, 16 nt, Human
gccuugaacucugggc

SEQ ID NO: 3838268 - RNA, 14 nt, Human
gccuugaacuuuga

SEQ ID NO: 3838269 - RNA, 22 nt, Human
gccuugaauauccccucccagu

SEQ ID NO: 3838270 - RNA, 16 nt, Human
gccuugacaucaguuc

SEQ ID NO: 3838271 - RNA, 16 nt, Human
gccuugaccauucucc

SEQ ID NO: 3838272 - RNA, 15 nt, Human
gccuugaguuccagu

SEQ ID NO: 3838273 - RNA, 13 nt, Human
gccuugcagaacu

SEQ ID NO: 3838274 - RNA, 22 nt, Human
gccuugcccacuccugcucugc

SEQ ID NO: 3838275 - RNA, 23 nt, Human
gccuugcccacuccugcucugcu

SEQ ID NO: 3838276 - RNA, 14 nt, Human
gccuugcccagaga

SEQ ID NO: 3838277 - RNA, 14 nt, Human
gccuugcccagccu

SEQ ID NO: 3838278 - RNA, 19 nt, Human
gccuugcccagccuggaug

SEQ ID NO: 3838279 - RNA, 23 nt, Human
gccuugccuaaauuuaaugcugc

SEQ ID NO: 3838280 - RNA, 18 nt, Human
gccuugcggcuccucagg

SEQ ID NO: 3838281 - RNA, 18 nt, Human
gccuugcgguauccgccc

SEQ ID NO: 3838282 - RNA, 19 nt, Human
gccuugcgguauccgcccc

SEQ ID NO: 3838283 - RNA, 19 nt, Human
gccuugcuguuuguccuga

SEQ ID NO: 3838284 - RNA, 15 nt, Human
gccuuggccucccaa

SEQ ID NO: 3838285 - RNA, 14 nt, Human
gccuuggccuggag

SEQ ID NO: 3838286 - RNA, 20 nt, Human
gccuuggcugacaugaagcu

SEQ ID NO: 3838287 - RNA, 19 nt, Human
gccuugggauccaggcccc

SEQ ID NO: 3838288 - RNA, 21 nt, Human
gccuugggcuccgugugggag

SEQ ID NO: 3838289 - RNA, 15 nt, Human
gccuugggcucugcu

SEQ ID NO: 3838290 - RNA, 15 nt, Human
gccuugggcugcucc

SEQ ID NO: 3838291 - RNA, 22 nt, Human
gccuugggcugcuccucauggu

SEQ ID NO: 3838292 - RNA, 18 nt, Human
gccuuggggaauuuccuc

SEQ ID NO: 3838293 - RNA, 20 nt, Human
gccuuggggaggacaaaacu

SEQ ID NO: 3838294 - RNA, 21 nt, Human
gccuuggggaggacaaaacuu

SEQ ID NO: 3838295 - RNA, 17 nt, Human
gccuuggggucagguug

SEQ ID NO: 3838296 - RNA, 18 nt, Human
gccuuggucuaacuuuug

SEQ ID NO: 3838297 - RNA, 16 nt, Human
gccuugguguccaccu

SEQ ID NO: 3838298 - RNA, 22 nt, Human
gccuugguguccaccuggcccc

SEQ ID NO: 3838299 - RNA, 19 nt, Human
gccuugguucaucaguguu

SEQ ID NO: 3838300 - RNA, 21 nt, Human
gccuuguauaauauugaaaau

SEQ ID NO: 3838301 - RNA, 17 nt, Human
gccuugucacgccagac

SEQ ID NO: 3838302 - RNA, 18 nt, Human
gccuuguccucagccagu

SEQ ID NO: 3838303 - RNA, 14 nt, Human
gccuugucuccuac

SEQ ID NO: 3838304 - RNA, 22 nt, Human
gccuugugaugucauacagaga

SEQ ID NO: 3838305 - RNA, 17 nt, Human
gccuugugcuguuaaua

SEQ ID NO: 3838306 - RNA, 14 nt, Human
gccuugugguccaa

SEQ ID NO: 3838307 - RNA, 17 nt, Human
gccuugugguccaaaua

SEQ ID NO: 3838308 - RNA, 17 nt, Human
gccuugugucuacagag

SEQ ID NO: 3838309 - RNA, 16 nt, Human
gccuuguucugucacc

SEQ ID NO: 3838310 - RNA, 15 nt, Human
gccuuguuuaauggu

SEQ ID NO: 3838311 - RNA, 13 nt, Human
gccuuuaaaauuu

SEQ ID NO: 3838312 - RNA, 19 nt, Human
gccuuuagugaucacagca

SEQ ID NO: 3838313 - RNA, 22 nt, Human
gccuuuaucuaccaacuuucaa

SEQ ID NO: 3838314 - RNA, 19 nt, Human
gccuuuauuuccacugugc

SEQ ID NO: 3838315 - RNA, 20 nt, Human
gccuuuauuuccacugugca

SEQ ID NO: 3838316 - RNA, 15 nt, Human
gccuuuccauccaug

SEQ ID NO: 3838317 - RNA, 20 nt, Human
gccuuuccauccauggccag

SEQ ID NO: 3838318 - RNA, 18 nt, Human
gccuuucccaacucuagc

SEQ ID NO: 3838319 - RNA, 19 nt, Human
gccuuucccaacucuagcu

SEQ ID NO: 3838320 - RNA, 14 nt, Human
gccuuuccucucua

SEQ ID NO: 3838321 - RNA, 13 nt, Human
gccuuuccuguuc

SEQ ID NO: 3838322 - RNA, 16 nt, Human
gccuuuccuguucagc

SEQ ID NO: 3838323 - RNA, 19 nt, Human
gccuuuccuguucagcauu

SEQ ID NO: 3838324 - RNA, 12 nt, Human
gccuuucugugu

SEQ ID NO: 3838325 - RNA, 17 nt, Human
gccuuucuucucuccag

SEQ ID NO: 3838326 - RNA, 15 nt, Human
gccuuugacauuuaa

SEQ ID NO: 3838327 - RNA, 20 nt, Human
gccuuugagacaguuucuua

SEQ ID NO: 3838328 - RNA, 23 nt, Human
gccuuugagacaguuucuuagcu

SEQ ID NO: 3838329 - RNA, 14 nt, Human
gccuuugagcucag

SEQ ID NO: 3838330 - RNA, 17 nt, Human
gccuuugauguuacaga

SEQ ID NO: 3838331 - RNA, 15 nt, Human
gccuuugcaaaucag

SEQ ID NO: 3838332 - RNA, 21 nt, Human
gccuuugcagcucagaaccac

SEQ ID NO: 3838333 - RNA, 16 nt, Human
gccuuugccaggugac

SEQ ID NO: 3838334 - RNA, 16 nt, Human
gccuuugcgcuccugg

SEQ ID NO: 3838335 - RNA, 18 nt, Human
gccuuugcucuggucuau

SEQ ID NO: 3838336 - RNA, 16 nt, Human
gccuuuggccuuggcu

SEQ ID NO: 3838337 - RNA, 22 nt, Human
gccuuugggugcuguuuugcca

SEQ ID NO: 3838338 - RNA, 15 nt, Human
gccuuuguaaguuau

SEQ ID NO: 3838339 - RNA, 18 nt, Human
gccuuuguuccccacugg

SEQ ID NO: 3838340 - RNA, 23 nt, Human
gccuuuguuccccacuggagcag

SEQ ID NO: 3838341 - RNA, 14 nt, Human
gccuuuguucuggg

SEQ ID NO: 3838342 - RNA, 13 nt, Human
gccuuuuaacauu

SEQ ID NO: 3838343 - RNA, 17 nt, Human
gccuuuuaguuccugug

SEQ ID NO: 3838344 - RNA, 20 nt, Human
gccuuuuaguuccugugcac

SEQ ID NO: 3838345 - RNA, 12 nt, Human
gccuuuucuauu

SEQ ID NO: 3838346 - RNA, 22 nt, Human
gccuuuucuggcaccgcaguuu

SEQ ID NO: 3838347 - RNA, 14 nt, Human
gccuuuugcacccc

SEQ ID NO: 3838348 - RNA, 16 nt, Human
gccuuuugcagaagag

SEQ ID NO: 3838349 - RNA, 21 nt, Human
gccuuuugggggugggucugg

SEQ ID NO: 3838350 - RNA, 12 nt, Human
gccuuuuguaua

SEQ ID NO: 3838351 - RNA, 18 nt, Human
gccuuuuuaaaacacaug

SEQ ID NO: 3838352 - RNA, 12 nt, Human
gccuuuuucauu

SEQ ID NO: 3838353 - RNA, 20 nt, Human
gccuuuuucauuauuuuauu

SEQ ID NO: 3838354 - RNA, 22 nt, Human
gccuuuuucauuauuuuauuau

SEQ ID NO: 3838355 - RNA, 23 nt, Human
gccuuuuucauuauuuuauuaug

SEQ ID NO: 3838356 - RNA, 19 nt, Human
gccuuuuucauuuaucuau

SEQ ID NO: 3838357 - RNA, 14 nt, Human
gccuuuuuucccca

SEQ ID NO: 3838358 - RNA, 17 nt, Human
gccuuuuuuccccagac

SEQ ID NO: 3838359 - RNA, 19 nt, Human
gccuuuuuuccccagacuu

SEQ ID NO: 3838360 - RNA, 14 nt, Human
gcgaaagaaaacuc

SEQ ID NO: 3838361 - RNA, 23 nt, Human
gcgaaaggauguaaacagugccu

SEQ ID NO: 3838362 - RNA, 21 nt, Human
gcgaacggaacguuggacuuu

SEQ ID NO: 3838363 - RNA, 17 nt, Human
gcgaagcguuguccuca

SEQ ID NO: 3838364 - RNA, 14 nt, Human
gcgaaggggcccug

SEQ ID NO: 3838365 - RNA, 14 nt, Human
gcgaaguccuaugg

SEQ ID NO: 3838366 - RNA, 11 nt, Human
gcgaaugguag

SEQ ID NO: 3838367 - RNA, 14 nt, Human
gcgaauuuuaaaag

SEQ ID NO: 3838368 - RNA, 13 nt, Human
gcgacaaagauga

SEQ ID NO: 3838369 - RNA, 21 nt, Human
gcgacaaugcaaaccaucauu

SEQ ID NO: 3838370 - RNA, 13 nt, Human
gcgacagagcagu

SEQ ID NO: 3838371 - RNA, 19 nt, Human
gcgaccaccccugccucca

SEQ ID NO: 3838372 - RNA, 12 nt, Human
gcgaccaccgcc

SEQ ID NO: 3838373 - RNA, 14 nt, Human
gcgaccccaucugc

SEQ ID NO: 3838374 - RNA, 17 nt, Human
gcucagcucugggccau

SEQ ID NO: 3838375 - RNA, 12 nt, Human
gcucagcuucuc

SEQ ID NO: 3838376 - RNA, 11 nt, Human
gcucaggaaaa

SEQ ID NO: 3838377 - RNA, 19 nt, Human
gcucaggaaccgaggcagg

SEQ ID NO: 3838378 - RNA, 20 nt, Human
gcucaggaaccgaggcaggg

SEQ ID NO: 3838379 - RNA, 21 nt, Human
gcucaggaaccgaggcaggga

SEQ ID NO: 3838380 - RNA, 16 nt, Human
gcucaggaggcuugga

SEQ ID NO: 3838381 - RNA, 19 nt, Human
gcucaggcaggggccucca

SEQ ID NO: 3838382 - RNA, 20 nt, Human
gcucagggaccacagcaagg

SEQ ID NO: 3838383 - RNA, 12 nt, Human
gccuuccccuca

SEQ ID NO: 3838384 - RNA, 19 nt, Human
gccuuccccuggcacuggc

SEQ ID NO: 3838385 - RNA, 22 nt, Human
gccuuccccuuauccucccugu

SEQ ID NO: 3838386 - RNA, 21 nt, Human
gccuuccuaagccuguggcug

SEQ ID NO: 3838387 - RNA, 13 nt, Human
gccuuccucugca

SEQ ID NO: 3838388 - RNA, 21 nt, Human
gccuuccucugcagcugaccu

SEQ ID NO: 3838389 - RNA, 19 nt, Human
gccuuccugcccuacagag

SEQ ID NO: 3838390 - RNA, 17 nt, Human
gccuuccuuucuccagg

SEQ ID NO: 3838391 - RNA, 16 nt, Human
gccuucgaggucagag

SEQ ID NO: 3838392 - RNA, 18 nt, Human
gccuucgauacaccgggc

SEQ ID NO: 3838393 - RNA, 22 nt, Human
gccuucgauacaccgggccugg

SEQ ID NO: 3838394 - RNA, 18 nt, Human
gccuucggccuccauccu

SEQ ID NO: 3838395 - RNA, 21 nt, Human
gccuucggccuccauccugag

SEQ ID NO: 3838396 - RNA, 19 nt, Human
gccuucgucuuucccaugg

SEQ ID NO: 3838397 - RNA, 13 nt, Human
gccuucucaccag

SEQ ID NO: 3838398 - RNA, 17 nt, Human
gccuucucaccagcugc

SEQ ID NO: 3838399 - RNA, 17 nt, Human
gccuucucaugauccaa

SEQ ID NO: 3838400 - RNA, 14 nt, Human
gccuucuccucccc

SEQ ID NO: 3838401 - RNA, 19 nt, Human
gccuucucuaaacauuuca

SEQ ID NO: 3838402 - RNA, 15 nt, Human
gccuucucugaagga

SEQ ID NO: 3838403 - RNA, 18 nt, Human
gccuucugacggcccugc

SEQ ID NO: 3838404 - RNA, 17 nt, Human
gccuucugaugaaaugu

SEQ ID NO: 3838405 - RNA, 13 nt, Human
gccuucugugggg

SEQ ID NO: 3838406 - RNA, 19 nt, Human
gccuucuguggggacuccg

SEQ ID NO: 3838407 - RNA, 14 nt, Human
gccuucuucagggc

SEQ ID NO: 3838408 - RNA, 18 nt, Human
gccuucuucagggccugg

SEQ ID NO: 3838409 - RNA, 17 nt, Human
gccuucuuccaucccag

SEQ ID NO: 3838410 - RNA, 20 nt, Human
gccuucuuccaucccaggac

SEQ ID NO: 3838411 - RNA, 22 nt, Human
gccuucuuccaucccaggacac

SEQ ID NO: 3838412 - RNA, 22 nt, Human
gccuucuucggggaacuccugg

SEQ ID NO: 3838413 - RNA, 11 nt, Human
gccuucuucuu

SEQ ID NO: 3838414 - RNA, 13 nt, Human
gccuucuuugaag

SEQ ID NO: 3838415 - RNA, 15 nt, Human
gccuucuuugcuugc

SEQ ID NO: 3838416 - RNA, 15 nt, Human
gccuucuuuugauua

SEQ ID NO: 3838417 - RNA, 22 nt, Human
gccuucuuuugauuauguuuuu

SEQ ID NO: 3838418 - RNA, 16 nt, Human
gccuucuuuuucugga

SEQ ID NO: 3838419 - RNA, 17 nt, Human
gccuucuuuuucuggac

SEQ ID NO: 3838420 - RNA, 14 nt, Human
gccuugaaccugug

SEQ ID NO: 3838421 - RNA, 14 nt, Human
gccuugaagccacu

SEQ ID NO: 3838422 - RNA, 15 nt, Human
gccuugaagccacug

SEQ ID NO: 3838423 - RNA, 17 nt, Human
gccuugaauauccccuc

SEQ ID NO: 3838424 - RNA, 18 nt, Human
gccuugacaucaguuccu

SEQ ID NO: 3838425 - RNA, 23 nt, Human
gccuugaccauucuccaccugcc

SEQ ID NO: 3838426 - RNA, 15 nt, Human
gccuugcagaacugc

SEQ ID NO: 3838427 - RNA, 14 nt, Human
gccuugcauaccca

SEQ ID NO: 3838428 - RNA, 17 nt, Human
gccuugcccacuccugc

SEQ ID NO: 3838429 - RNA, 20 nt, Human
gccuugcccagagaugccuc

SEQ ID NO: 3838430 - RNA, 17 nt, Human
gccuugcccagccugga

SEQ ID NO: 3838431 - RNA, 18 nt, Human
gccuugcccagccuggau

SEQ ID NO: 3838432 - RNA, 16 nt, Human
gccuugcggcuccuca

SEQ ID NO: 3838433 - RNA, 17 nt, Human
gccuugcggcuccucag

SEQ ID NO: 3838434 - RNA, 17 nt, Human
gccuugcuguuuguccu

SEQ ID NO: 3838435 - RNA, 22 nt, Human
gccuugcuguuuguccugagau

SEQ ID NO: 3838436 - RNA, 13 nt, Human
gccuugcuuguua

SEQ ID NO: 3838437 - RNA, 14 nt, Human
gccuuggaaauucc

SEQ ID NO: 3838438 - RNA, 23 nt, Human
gccuuggauaaugcuguugccuc

SEQ ID NO: 3838439 - RNA, 15 nt, Human
gccuuggccucagag

SEQ ID NO: 3838440 - RNA, 20 nt, Human
gccuuggccuccccugcuga

SEQ ID NO: 3838441 - RNA, 23 nt, Human
gccuuggccuguguucuuccugg

SEQ ID NO: 3838442 - RNA, 12 nt, Human
gccuuggcucag

SEQ ID NO: 3838443 - RNA, 14 nt, Human
gccuuggcucagac

SEQ ID NO: 3838444 - RNA, 15 nt, Human
gccuuggcucagaca

SEQ ID NO: 3838445 - RNA, 16 nt, Human
gccuuggcucagacau

SEQ ID NO: 3838446 - RNA, 22 nt, Human
gccuugggcuauuuggacucag

SEQ ID NO: 3838447 - RNA, 17 nt, Human
gccuugggcuccgugug

SEQ ID NO: 3838448 - RNA, 18 nt, Human
gccuugggcuccgugugg

SEQ ID NO: 3838449 - RNA, 20 nt, Human
gccuugggcuccguguggga

SEQ ID NO: 3838450 - RNA, 14 nt, Human
gccuugggcucugc

SEQ ID NO: 3838451 - RNA, 15 nt, Human
gccuuggggacaacc

SEQ ID NO: 3838452 - RNA, 17 nt, Human
gccuuggggaggacaaa

SEQ ID NO: 3838453 - RNA, 23 nt, Human
gccuuggggaggacaaaacuucu

SEQ ID NO: 3838454 - RNA, 18 nt, Human
gccuuggggcugaugcag

SEQ ID NO: 3838455 - RNA, 17 nt, Human
gccuugguguccaccug

SEQ ID NO: 3838456 - RNA, 22 nt, Human
gccuugguuuuuacugcucuga

SEQ ID NO: 3838457 - RNA, 20 nt, Human
gccuuguaauucuaaaugaa

SEQ ID NO: 3838458 - RNA, 22 nt, Human
gccuuguauaauauugaaaauu

SEQ ID NO: 3838459 - RNA, 15 nt, Human
gccuugucacgccag

SEQ ID NO: 3838460 - RNA, 23 nt, Human
gccuugucuccuacuccugacuc

SEQ ID NO: 3838461 - RNA, 21 nt, Human
gccuugugaugucauacagag

SEQ ID NO: 3838462 - RNA, 23 nt, Human
gccuugugaugucauacagagaa

SEQ ID NO: 3838463 - RNA, 13 nt, Human
gccuuguguauau

SEQ ID NO: 3838464 - RNA, 16 nt, Human
gccuuguuuuuuucua

SEQ ID NO: 3838465 - RNA, 21 nt, Human
gccuuuaaaauuuuuuuagaa

SEQ ID NO: 3838466 - RNA, 15 nt, Human
gccuuuaaaguauga

SEQ ID NO: 3838467 - RNA, 18 nt, Human
gccuuuaaaguaugaauc

SEQ ID NO: 3838468 - RNA, 21 nt, Human
gccuuuaauggacuuauuucu

SEQ ID NO: 3838469 - RNA, 21 nt, Human
gccuuuacugacccuggggcu

SEQ ID NO: 3838470 - RNA, 22 nt, Human
gccuuuagugaucacagcagcu

SEQ ID NO: 3838471 - RNA, 21 nt, Human
gccuuuaucuaccaacuuuca

SEQ ID NO: 3838472 - RNA, 14 nt, Human
gccuuuaugguuuc

SEQ ID NO: 3838473 - RNA, 14 nt, Human
gccuuuauuguguu

SEQ ID NO: 3838474 - RNA, 22 nt, Human
gccuuuauuguguuugucauua

SEQ ID NO: 3838475 - RNA, 14 nt, Human
gccuuucaggaucu

SEQ ID NO: 3838476 - RNA, 21 nt, Human
gccuuuccauaaggaauguag

SEQ ID NO: 3838477 - RNA, 22 nt, Human
gccuuuccauaaggaauguagc

SEQ ID NO: 3838478 - RNA, 19 nt, Human
gccuuuccauccauggcca

SEQ ID NO: 3838479 - RNA, 18 nt, Human
gccuuucccuaagccagc

SEQ ID NO: 3838480 - RNA, 20 nt, Human
gccuuuccucaaaacuggag

SEQ ID NO: 3838481 - RNA, 21 nt, Human
gccuuuccucaaaacuggagu

SEQ ID NO: 3838482 - RNA, 18 nt, Human
gccuuuccucucuccugu

SEQ ID NO: 3838483 - RNA, 21 nt, Human
gccuuuccuguagccuucugu

SEQ ID NO: 3838484 - RNA, 15 nt, Human
gccuuuccuguucag

SEQ ID NO: 3838485 - RNA, 20 nt, Human
gccuuuccuguucagcauuc

SEQ ID NO: 3838486 - RNA, 22 nt, Human
gccuuucucccaggccaggcuc

SEQ ID NO: 3838487 - RNA, 15 nt, Human
gccuuucuguguuua

SEQ ID NO: 3838488 - RNA, 20 nt, Human
gccuuugaagagugaaauac

SEQ ID NO: 3838489 - RNA, 21 nt, Human
gccuuugagacaguuucuuag

SEQ ID NO: 3838490 - RNA, 16 nt, Human
gccuuugcagaaacag

SEQ ID NO: 3838491 - RNA, 15 nt, Human
gccuuugccagguga

SEQ ID NO: 3838492 - RNA, 15 nt, Human
gccuuugccuccccg

SEQ ID NO: 3838493 - RNA, 21 nt, Human
gccuuugcgcuccuggcccag

SEQ ID NO: 3838494 - RNA, 18 nt, Human
gccuuuggacuugucccg

SEQ ID NO: 3838495 - RNA, 11 nt, Human
gccuuuguaag

SEQ ID NO: 3838496 - RNA, 15 nt, Human
gccuuuguugcucag

SEQ ID NO: 3838497 - RNA, 14 nt, Human
gccuuuuaacauuu

SEQ ID NO: 3838498 - RNA, 16 nt, Human
gccuuuuaacauuuug

SEQ ID NO: 3838499 - RNA, 20 nt, Human
gccuuuuaacauuuuguucu

SEQ ID NO: 3838500 - RNA, 16 nt, Human
gccuuuuaagaagaaa

SEQ ID NO: 3838501 - RNA, 22 nt, Human
gccuuuuaucccaaaguuguug

SEQ ID NO: 3838502 - RNA, 16 nt, Human
gccuuuuauuucuuaa

SEQ ID NO: 3838503 - RNA, 14 nt, Human
gccuuuucuagccc

SEQ ID NO: 3838504 - RNA, 17 nt, Human
gccuuuucuuuaacuuu

SEQ ID NO: 3838505 - RNA, 13 nt, Human
gccuuuugacagc

SEQ ID NO: 3838506 - RNA, 18 nt, Human
gccuuuugcaaccaggaa

SEQ ID NO: 3838507 - RNA, 18 nt, Human
gccuuuugcaccccuccc

SEQ ID NO: 3838508 - RNA, 19 nt, Human
gccuuuugcaccccuccca

SEQ ID NO: 3838509 - RNA, 20 nt, Human
gccuuuugcaccccucccau

SEQ ID NO: 3838510 - RNA, 22 nt, Human
gccuuuuguauacauccugggu

SEQ ID NO: 3838511 - RNA, 21 nt, Human
gccuuuuguucauuucauccu

SEQ ID NO: 3838512 - RNA, 16 nt, Human
gccuuuuucauuauuu

SEQ ID NO: 3838513 - RNA, 22 nt, Human
gccuuuuucauuuaucuauaau

SEQ ID NO: 3838514 - RNA, 20 nt, Human
gccuuuuuucacggaaguuu

SEQ ID NO: 3838515 - RNA, 23 nt, Human
gccuuuuuucacggaaguuuuca

SEQ ID NO: 3838516 - RNA, 20 nt, Human
gccuuuuuuccccagacuug

SEQ ID NO: 3838517 - RNA, 23 nt, Human
gcucggaggcugcccccggcccc

SEQ ID NO: 3838518 - RNA, 15 nt, Human
gcucggccugccccc

SEQ ID NO: 3838519 - RNA, 21 nt, Human
gcucggccugcccccacccca

SEQ ID NO: 3838520 - RNA, 16 nt, Human
gcucggcucagcucgg

SEQ ID NO: 3838521 - RNA, 23 nt, Human
gcucgguacccggggcccagggc

SEQ ID NO: 3838522 - RNA, 24 nt, Human
gcucgguacccggggcccagggca

SEQ ID NO: 3838523 - RNA, 14 nt, Human
gcucgguggaccca

SEQ ID NO: 3838524 - RNA, 15 nt, Human
gcucguguauccugg

SEQ ID NO: 3838525 - RNA, 16 nt, Human
gcucguguauccuggg

SEQ ID NO: 3838526 - RNA, 17 nt, Human
gcucguguauccugggg

SEQ ID NO: 3838527 - RNA, 18 nt, Human
gcucguguauccuggggc

SEQ ID NO: 3838528 - RNA, 15 nt, Human
gcucgugugccuggc

SEQ ID NO: 3838529 - RNA, 23 nt, Human
gcucuaaaauauuuaugaagaaa

SEQ ID NO: 3838530 - RNA, 16 nt, Human
gcucuaacgccugagc

SEQ ID NO: 3838531 - RNA, 20 nt, Human
gcucuaacgccugagcccag

SEQ ID NO: 3838532 - RNA, 12 nt, Human
gcucuaauaaaa

SEQ ID NO: 3838533 - RNA, 12 nt, Human
gcucuaauacau

SEQ ID NO: 3838534 - RNA, 16 nt, Human
gcucuaauguuugcau

SEQ ID NO: 3838535 - RNA, 19 nt, Human
gcucuaauguuugcauaua

SEQ ID NO: 3838536 - RNA, 18 nt, Human
gcucuaauucacagugcu

SEQ ID NO: 3838537 - RNA, 19 nt, Human
gcucuacaucuucugccuu

SEQ ID NO: 3838538 - RNA, 14 nt, Human
gcucuacccagggc

SEQ ID NO: 3838539 - RNA, 22 nt, Human
gcucuacuuccccauggcccug

SEQ ID NO: 3838540 - RNA, 16 nt, Human
gcucuagacaacccug

SEQ ID NO: 3838541 - RNA, 18 nt, Human
gcucuagacaacccugca

SEQ ID NO: 3838542 - RNA, 20 nt, Human
gcucuagaucauaaggcuuc

SEQ ID NO: 3838543 - RNA, 21 nt, Human
gcucuaggguugcuggagccu

SEQ ID NO: 3838544 - RNA, 20 nt, Human
gcucuagugggacagcccag

SEQ ID NO: 3838545 - RNA, 18 nt, Human
gcucuaucucucaaaacu

SEQ ID NO: 3838546 - RNA, 18 nt, Human
gcucuaugagucuagaug

SEQ ID NO: 3838547 - RNA, 21 nt, Human
gcucucaccuugguuccuggg

SEQ ID NO: 3838548 - RNA, 23 nt, Human
gcucucacggccacacagcugcc

SEQ ID NO: 3838549 - RNA, 11 nt, Human
gcucucagaag

SEQ ID NO: 3838550 - RNA, 12 nt, Human
gcucucagaagg

SEQ ID NO: 3838551 - RNA, 16 nt, Human
gcucucagcucagcgc

SEQ ID NO: 3838552 - RNA, 15 nt, Human
gcucucaggccagcu

SEQ ID NO: 3838553 - RNA, 12 nt, Human
gcggagcuggcc

SEQ ID NO: 3838554 - RNA, 14 nt, Human
gcggagcuggcccc

SEQ ID NO: 3838555 - RNA, 17 nt, Human
gcggagcuggccccgcc

SEQ ID NO: 3838556 - RNA, 21 nt, Human
gcggagguguggagccgaggc

SEQ ID NO: 3838557 - RNA, 16 nt, Human
gcggagguugcaggga

SEQ ID NO: 3838558 - RNA, 15 nt, Human
gcggauggauggaag

SEQ ID NO: 3838559 - RNA, 19 nt, Human
gcggauuaauuugcaucug

SEQ ID NO: 3838560 - RNA, 20 nt, Human
gcggauuaauuugcaucuga

SEQ ID NO: 3838561 - RNA, 14 nt, Human
gcggcaaaaggaaa

SEQ ID NO: 3838562 - RNA, 15 nt, Human
gcggcacuccaaccu

SEQ ID NO: 3838563 - RNA, 16 nt, Human
gcggcagauggggaga

SEQ ID NO: 3838564 - RNA, 16 nt, Human
gcggcaggggccugga

SEQ ID NO: 3838565 - RNA, 21 nt, Human
gcggccaagauaggaccuugg

SEQ ID NO: 3838566 - RNA, 16 nt, Human
gcggcccaauccaagg

SEQ ID NO: 3838567 - RNA, 13 nt, Human
gcggcccagcccg

SEQ ID NO: 3838568 - RNA, 16 nt, Human
gcggcccagcccggcu

SEQ ID NO: 3838569 - RNA, 18 nt, Human
gcggccgcauucccugag

SEQ ID NO: 3838570 - RNA, 13 nt, Human
gcggccggccagc

SEQ ID NO: 3838571 - RNA, 23 nt, Human
gcggccuaugacuugggcacccc

SEQ ID NO: 3838572 - RNA, 20 nt, Human
gcggccuuuguugcucagca

SEQ ID NO: 3838573 - RNA, 16 nt, Human
gcggcgaccgcccucc

SEQ ID NO: 3838574 - RNA, 18 nt, Human
gcggcgaccgcccuccgc

SEQ ID NO: 3838575 - RNA, 20 nt, Human
gcggcggagcuggccccgcc

SEQ ID NO: 3838576 - RNA, 16 nt, Human
gcggcggucccagcuc

SEQ ID NO: 3838577 - RNA, 22 nt, Human
gcggcucccggggcagggcagc

SEQ ID NO: 3838578 - RNA, 14 nt, Human
gcggcuccucaggg

SEQ ID NO: 3838579 - RNA, 21 nt, Human
gcggcugagagccccagcuga

SEQ ID NO: 3838580 - RNA, 16 nt, Human
gcggcuggccauggag

SEQ ID NO: 3838581 - RNA, 20 nt, Human
gcggcuggccauggagaaag

SEQ ID NO: 3838582 - RNA, 16 nt, Human
gcggcuggggucccag

SEQ ID NO: 3838583 - RNA, 18 nt, Human
gcggcuggggucccagca

SEQ ID NO: 3838584 - RNA, 20 nt, Human
gcggcuggggucccagcagc

SEQ ID NO: 3838585 - RNA, 15 nt, Human
gcggcuggugcaggg

SEQ ID NO: 3838586 - RNA, 12 nt, Human
gcggcugugcuu

SEQ ID NO: 3838587 - RNA, 14 nt, Human
gcgggaaggagggu

SEQ ID NO: 3838588 - RNA, 16 nt, Human
gcgggacagugcugca

SEQ ID NO: 3838589 - RNA, 15 nt, Human
gcgggaccuguggcu

SEQ ID NO: 3838590 - RNA, 21 nt, Human
gcgggagcgguggcccugucc

SEQ ID NO: 3838591 - RNA, 21 nt, Human
gcgggaggauguucugggaca

SEQ ID NO: 3838592 - RNA, 22 nt, Human
gcgggaggauguucugggacac

SEQ ID NO: 3838593 - RNA, 16 nt, Human
gcgggauggggcuccc

SEQ ID NO: 3838594 - RNA, 17 nt, Human
gcgggcacaccuccucc

SEQ ID NO: 3838595 - RNA, 15 nt, Human
gcgggcagagggcug

SEQ ID NO: 3838596 - RNA, 17 nt, Human
gcgggcagagggcugga

SEQ ID NO: 3838597 - RNA, 13 nt, Human
gcgggccaaggac

SEQ ID NO: 3838598 - RNA, 16 nt, Human
gcgggccagccaggcg

SEQ ID NO: 3838599 - RNA, 20 nt, Human
gcgggccccucaucgcgucc

SEQ ID NO: 3838600 - RNA, 16 nt, Human
gcgggcccugcccaca

SEQ ID NO: 3838601 - RNA, 17 nt, Human
gcggggacagcuccuuc

SEQ ID NO: 3838602 - RNA, 19 nt, Human
gcggggacagcuccuucug

SEQ ID NO: 3838603 - RNA, 23 nt, Human
gcggggacagcuccuucuguccu

SEQ ID NO: 3838604 - RNA, 23 nt, Human
gcggggaucagagcgcacaggga

SEQ ID NO: 3838605 - RNA, 20 nt, Human
gcggggcgaagcccaggccc

SEQ ID NO: 3838606 - RNA, 11 nt, Human
gcggggggagg

SEQ ID NO: 3838607 - RNA, 15 nt, Human
gcgguagccagcaca

SEQ ID NO: 3838608 - RNA, 21 nt, Human
gcgguagccagcacacagggc

SEQ ID NO: 3838609 - RNA, 22 nt, Human
gcgguagccagcacacagggca

SEQ ID NO: 3838610 - RNA, 16 nt, Human
gcgguccacccaggag

SEQ ID NO: 3838611 - RNA, 14 nt, Human
gcggucccagcucc

SEQ ID NO: 3838612 - RNA, 23 nt, Human
gcggucuucaacauccugccagc

SEQ ID NO: 3838613 - RNA, 16 nt, Human
gcggugcuguccucag

SEQ ID NO: 3838614 - RNA, 14 nt, Human
gcgguggaaggccc

SEQ ID NO: 3838615 - RNA, 18 nt, Human
gcgguggaaggcccgagg

SEQ ID NO: 3838616 - RNA, 15 nt, Human
gcgguggcccugucc

SEQ ID NO: 3838617 - RNA, 15 nt, Human
gcgguggcucacgcc

SEQ ID NO: 3838618 - RNA, 18 nt, Human
gcggugggcacccacccu

SEQ ID NO: 3838619 - RNA, 14 nt, Human
gcggugggggagga

SEQ ID NO: 3838620 - RNA, 22 nt, Human
gcgguuauaaaaaaugguucag

SEQ ID NO: 3838621 - RNA, 23 nt, Human
gcgguuaugaaauucacccccuu

SEQ ID NO: 3838622 - RNA, 18 nt, Human
gcgguuccggcauggaca

SEQ ID NO: 3838623 - RNA, 19 nt, Human
gcgguuccucguucucccu

SEQ ID NO: 3838624 - RNA, 14 nt, Human
gcgguuuggggagc

SEQ ID NO: 3838625 - RNA, 21 nt, Human
gcgguuugguuugcagcgacu

SEQ ID NO: 3838626 - RNA, 16 nt, Human
gcguaaguacagagaa

SEQ ID NO: 3838627 - RNA, 19 nt, Human
gcguaaguacagagaagcc

SEQ ID NO: 3838628 - RNA, 20 nt, Human
gcguaaguacagagaagcca

SEQ ID NO: 3838629 - RNA, 14 nt, Human
gcguacaggcuggc

SEQ ID NO: 3838630 - RNA, 21 nt, Human
gcguagaucaccagaauaaac

SEQ ID NO: 3838631 - RNA, 20 nt, Human
gcguagcgugcccgugugca

SEQ ID NO: 3838632 - RNA, 14 nt, Human
gcguaggcuacaga

SEQ ID NO: 3838633 - RNA, 19 nt, Human
gcguaggcuacagagaagc

SEQ ID NO: 3838634 - RNA, 21 nt, Human
gcguaugucuguuaccauguc

SEQ ID NO: 3838635 - RNA, 17 nt, Human
gcgucagccuccagccu

SEQ ID NO: 3838636 - RNA, 18 nt, Human
gcgucagccuccagccuc

SEQ ID NO: 3838637 - RNA, 19 nt, Human
gcgucagucuuuuucuguu

SEQ ID NO: 3838638 - RNA, 14 nt, Human
gcgucaucuggucc

SEQ ID NO: 3838639 - RNA, 23 nt, Human
gcgucauuacagggcacaggcca

SEQ ID NO: 3838640 - RNA, 14 nt, Human
gcguccagaaaugg

SEQ ID NO: 3838641 - RNA, 17 nt, Human
gcgucccaagauguuga

SEQ ID NO: 3838642 - RNA, 14 nt, Human
gcgucccccugccg

SEQ ID NO: 3838643 - RNA, 18 nt, Human
gcgucccccugccggccg

SEQ ID NO: 3838644 - RNA, 19 nt, Human
gcguccgcgcgccagcaca

SEQ ID NO: 3838645 - RNA, 19 nt, Human
gcguccugucggagcccug

SEQ ID NO: 3838646 - RNA, 16 nt, Human
gcgucgcccucccagg

SEQ ID NO: 3838647 - RNA, 19 nt, Human
gcgucucauacucaccuca

SEQ ID NO: 3838648 - RNA, 20 nt, Human
gcgucuccuguuuuucuggg

SEQ ID NO: 3838649 - RNA, 21 nt, Human
gcgucuggaaguccaaugugg

SEQ ID NO: 3838650 - RNA, 21 nt, Human
gcgucuggaggggccccugcu

SEQ ID NO: 3838651 - RNA, 16 nt, Human
gcgucuguucccccuu

SEQ ID NO: 3838652 - RNA, 13 nt, Human
gcgucuuccugag

SEQ ID NO: 3838653 - RNA, 21 nt, Human
gcgucuuccugaguggugcca

SEQ ID NO: 3838654 - RNA, 19 nt, Human
gcgugaaacacaccaggcu

SEQ ID NO: 3838655 - RNA, 23 nt, Human
gcgugaaacacaccaggcugugg

SEQ ID NO: 3838656 - RNA, 20 nt, Human
gcgugaacccaggaggcgga

SEQ ID NO: 3838657 - RNA, 13 nt, Human
gcgugaaggccga

SEQ ID NO: 3838658 - RNA, 15 nt, Human
gcgugaaggccgaga

SEQ ID NO: 3838659 - RNA, 12 nt, Human
gcgugaaucugu

SEQ ID NO: 3838660 - RNA, 13 nt, Human
gcgugacaauaaa

SEQ ID NO: 3838661 - RNA, 18 nt, Human
cuuccagaucacugccac

SEQ ID NO: 3838662 - RNA, 19 nt, Human
cuuccagauccuggaaauc

SEQ ID NO: 3838663 - RNA, 18 nt, Human
cuuccagauggucaucca

SEQ ID NO: 3838664 - RNA, 15 nt, Human
cuuccagcacccugc

SEQ ID NO: 3838665 - RNA, 12 nt, Human
cuuccagcagga

SEQ ID NO: 3838666 - RNA, 23 nt, Human
cuuccagcaggagggacagucuc

SEQ ID NO: 3838667 - RNA, 13 nt, Human
cuuccagcauuua

SEQ ID NO: 3838668 - RNA, 13 nt, Human
cuuccagcccaga

SEQ ID NO: 3838669 - RNA, 16 nt, Human
cuuccagcuagugacc

SEQ ID NO: 3838670 - RNA, 13 nt, Human
cuuccagcuccug

SEQ ID NO: 3838671 - RNA, 15 nt, Human
cuuccagcuccugua

SEQ ID NO: 3838672 - RNA, 14 nt, Human
cuuccagcugcugu

SEQ ID NO: 3838673 - RNA, 20 nt, Human
cuuccaggaaaaaggacagg

SEQ ID NO: 3838674 - RNA, 13 nt, Human
cuuccaggaaacu

SEQ ID NO: 3838675 - RNA, 17 nt, Human
cuuccaggaaacuccac

SEQ ID NO: 3838676 - RNA, 23 nt, Human
cuuccaggaaacuccacaucugc

SEQ ID NO: 3838677 - RNA, 14 nt, Human
cuuccaggccauca

SEQ ID NO: 3838678 - RNA, 16 nt, Human
cuuccaggccaucaga

SEQ ID NO: 3838679 - RNA, 12 nt, Human
cuuccaggcugg

SEQ ID NO: 3838680 - RNA, 19 nt, Human
cuuccaggcugggagagcc

SEQ ID NO: 3838681 - RNA, 21 nt, Human
cuuccaggggagguucaguga

SEQ ID NO: 3838682 - RNA, 13 nt, Human
cuuccagggggaa

SEQ ID NO: 3838683 - RNA, 20 nt, Human
cuuccagggggaaggccaag

SEQ ID NO: 3838684 - RNA, 17 nt, Human
cuuccaggggugggaca

SEQ ID NO: 3838685 - RNA, 21 nt, Human
cuuccaggggugggacacccu

SEQ ID NO: 3838686 - RNA, 22 nt, Human
cuuccaggggugggacacccug

SEQ ID NO: 3838687 - RNA, 20 nt, Human
cuuccagguaucuccaggau

SEQ ID NO: 3838688 - RNA, 19 nt, Human
cuuccaggugcccagcuau

SEQ ID NO: 3838689 - RNA, 16 nt, Human
cuuccagguguuacug

SEQ ID NO: 3838690 - RNA, 20 nt, Human
cuuccagguguuacuguaau

SEQ ID NO: 3838691 - RNA, 22 nt, Human
cuuccagguguuacuguaauuc

SEQ ID NO: 3838692 - RNA, 21 nt, Human
cuuccagucuuccugacacuu

SEQ ID NO: 3838693 - RNA, 20 nt, Human
cuuccagugaggcucugccc

SEQ ID NO: 3838694 - RNA, 23 nt, Human
cuuccagugaggcucugcccuug

SEQ ID NO: 3838695 - RNA, 23 nt, Human
cuuccagugguuugagacacugg

SEQ ID NO: 3838696 - RNA, 17 nt, Human
cuuccagugucauuucu

SEQ ID NO: 3838697 - RNA, 16 nt, Human
cuuccaguuacuuucc

SEQ ID NO: 3838698 - RNA, 11 nt, Human
cuuccauaauc

SEQ ID NO: 3838699 - RNA, 17 nt, Human
cuuccauagcugcugcc

SEQ ID NO: 3838700 - RNA, 16 nt, Human
cuuccauaugaccuca

SEQ ID NO: 3838701 - RNA, 21 nt, Human
cuuccauaugaccucaugcau

SEQ ID NO: 3838702 - RNA, 14 nt, Human
cuuccauauggauc

SEQ ID NO: 3838703 - RNA, 12 nt, Human
cuuccaucaugu

SEQ ID NO: 3838704 - RNA, 17 nt, Human
cuuccaucccaaccagu

SEQ ID NO: 3838705 - RNA, 21 nt, Human
cuuccaucccaaccagugcca

SEQ ID NO: 3838706 - RNA, 17 nt, Human
cuuccaucccaggacac

SEQ ID NO: 3838707 - RNA, 17 nt, Human
cuuccaucccuaccccc

SEQ ID NO: 3838708 - RNA, 18 nt, Human
cuuccaucuuuccugaug

SEQ ID NO: 3838709 - RNA, 22 nt, Human
cuuccaucuuuccugauggcag

SEQ ID NO: 3838710 - RNA, 18 nt, Human
cuuccaugaauuuuaaaa

SEQ ID NO: 3838711 - RNA, 20 nt, Human
cuuccaugaauuuuaaaauc

SEQ ID NO: 3838712 - RNA, 17 nt, Human
cuuccaugauucuauuu

SEQ ID NO: 3838713 - RNA, 16 nt, Human
cuuccauggacuuugu

SEQ ID NO: 3838714 - RNA, 19 nt, Human
cuuccauguaucuuuugaa

SEQ ID NO: 3838715 - RNA, 18 nt, Human
cuuccaugucgccucugc

SEQ ID NO: 3838716 - RNA, 14 nt, Human
cuuccaugugaggg

SEQ ID NO: 3838717 - RNA, 16 nt, Human
cuuccauuccacaucc

SEQ ID NO: 3838718 - RNA, 14 nt, Human
cuuccauuugcaag

SEQ ID NO: 3838719 - RNA, 23 nt, Human
cuuccauuuucccccacuacugc

SEQ ID NO: 3838720 - RNA, 21 nt, Human
cuucccaaaggacuccaccca

SEQ ID NO: 3838721 - RNA, 23 nt, Human
cuucccaaaguccugggauuaca

SEQ ID NO: 3838722 - RNA, 20 nt, Human
cuucccaaaugugugcccag

SEQ ID NO: 3838723 - RNA, 17 nt, Human
cuucccaagggcugccg

SEQ ID NO: 3838724 - RNA, 20 nt, Human
cuucccaaucagcacugaaa

SEQ ID NO: 3838725 - RNA, 17 nt, Human
cuucccacccaucgcug

SEQ ID NO: 3838726 - RNA, 13 nt, Human
cuucccacccugc

SEQ ID NO: 3838727 - RNA, 21 nt, Human
cuucccaccucccugcccagg

SEQ ID NO: 3838728 - RNA, 23 nt, Human
cuucccaccucucucacuccuug

SEQ ID NO: 3838729 - RNA, 22 nt, Human
cuucccacucuagggcagugga

SEQ ID NO: 3838730 - RNA, 14 nt, Human
cuucccacuggagg

SEQ ID NO: 3838731 - RNA, 19 nt, Human
cuucccagaggggccugcc

SEQ ID NO: 3838732 - RNA, 21 nt, Human
cuucccagaggggccugccac

SEQ ID NO: 3838733 - RNA, 11 nt, Human
cuucccagcuu

SEQ ID NO: 3838734 - RNA, 18 nt, Human
cuucccaguggcugcugc

SEQ ID NO: 3838735 - RNA, 22 nt, Human
cuucccaguucaggagucccaa

SEQ ID NO: 3838736 - RNA, 11 nt, Human
cuucccaucac

SEQ ID NO: 3838737 - RNA, 14 nt, Human
cuucccauccccag

SEQ ID NO: 3838738 - RNA, 12 nt, Human
cuucccauccua

SEQ ID NO: 3838739 - RNA, 15 nt, Human
cuucccauccuaccc

SEQ ID NO: 3838740 - RNA, 19 nt, Human
cuucccauccuacccucgg

SEQ ID NO: 3838741 - RNA, 15 nt, Human
cuucccaucgcuguc

SEQ ID NO: 3838742 - RNA, 15 nt, Human
cuucccaugacccag

SEQ ID NO: 3838743 - RNA, 22 nt, Human
cuucccaugacccaggcugggc

SEQ ID NO: 3838744 - RNA, 23 nt, Human
cuucccaugacccaggcugggca

SEQ ID NO: 3838745 - RNA, 13 nt, Human
cuucccaugcauu

SEQ ID NO: 3838746 - RNA, 14 nt, Human
cuucccauucucca

SEQ ID NO: 3838747 - RNA, 18 nt, Human
cuucccauuguggcuccu

SEQ ID NO: 3838748 - RNA, 23 nt, Human
cuuccccaacgaaaagcacaucc

SEQ ID NO: 3838749 - RNA, 11 nt, Human
cuuccccacug

SEQ ID NO: 3838750 - RNA, 18 nt, Human
cuuccccacugcacacac

SEQ ID NO: 3838751 - RNA, 19 nt, Human
cuuccccacugccugccca

SEQ ID NO: 3838752 - RNA, 20 nt, Human
cuuccccacugccugcccac

SEQ ID NO: 3838753 - RNA, 22 nt, Human
cuuccccacugccugcccaccc

SEQ ID NO: 3838754 - RNA, 19 nt, Human
cuuccccaugcuuccuugc

SEQ ID NO: 3838755 - RNA, 13 nt, Human
cuucccccaccac

SEQ ID NO: 3838756 - RNA, 23 nt, Human
cuucccccaccgguccagcuggc

SEQ ID NO: 3838757 - RNA, 15 nt, Human
cuucccccauagcca

SEQ ID NO: 3838758 - RNA, 13 nt, Human
gcugcugcccagg

SEQ ID NO: 3838759 - RNA, 13 nt, Human
gcugcugccccug

SEQ ID NO: 3838760 - RNA, 12 nt, Human
gcugcugccugc

SEQ ID NO: 3838761 - RNA, 17 nt, Human
gcugcugccuggccacu

SEQ ID NO: 3838762 - RNA, 12 nt, Human
gcugcugcgccc

SEQ ID NO: 3838763 - RNA, 20 nt, Human
gcugcugcuaaucuucaggg

SEQ ID NO: 3838764 - RNA, 12 nt, Human
gcugcugcucug

SEQ ID NO: 3838765 - RNA, 12 nt, Human
gcugcugcugcu

SEQ ID NO: 3838766 - RNA, 13 nt, Human
gcugcugcugggc

SEQ ID NO: 3838767 - RNA, 13 nt, Human
gcugcuggagacu

SEQ ID NO: 3838768 - RNA, 14 nt, Human
gcugcuggagacuc

SEQ ID NO: 3838769 - RNA, 22 nt, Human
gcugcuggaggaaaacugagac

SEQ ID NO: 3838770 - RNA, 12 nt, Human
gcugcuggcgcc

SEQ ID NO: 3838771 - RNA, 19 nt, Human
gcugcuggcgccucugcaa

SEQ ID NO: 3838772 - RNA, 13 nt, Human
gcugcuggcuggu

SEQ ID NO: 3838773 - RNA, 11 nt, Human
gcugcuggcuu

SEQ ID NO: 3838774 - RNA, 18 nt, Human
gcugcuggggaagacagu

SEQ ID NO: 3838775 - RNA, 19 nt, Human
gcugcuggggaagacagug

SEQ ID NO: 3838776 - RNA, 18 nt, Human
gcugcuggggccucagac

SEQ ID NO: 3838777 - RNA, 22 nt, Human
gcugcugggggcaacuggccau

SEQ ID NO: 3838778 - RNA, 21 nt, Human
gcugcugucaccucucccacg

SEQ ID NO: 3838779 - RNA, 16 nt, Human
gcugcugucugggugc

SEQ ID NO: 3838780 - RNA, 20 nt, Human
gcugcugucugggugcuacu

SEQ ID NO: 3838781 - RNA, 24 nt, Human
gcugcugucugggugcuacugggg

SEQ ID NO: 3838782 - RNA, 20 nt, Human
gcugcuguggccaucaaccu

SEQ ID NO: 3838783 - RNA, 18 nt, Human
gcugcuuagacauaacaa

SEQ ID NO: 3838784 - RNA, 12 nt, Human
gcugcuucccuc

SEQ ID NO: 3838785 - RNA, 23 nt, Human
gcugcuucccucugccugucccu

SEQ ID NO: 3838786 - RNA, 19 nt, Human
gcugcuucccugaagcucc

SEQ ID NO: 3838787 - RNA, 16 nt, Human
gcugcuuccuccugga

SEQ ID NO: 3838788 - RNA, 17 nt, Human
gcugcuuccuccuggaa

SEQ ID NO: 3838789 - RNA, 23 nt, Human
gcugcuuggaccucgugcuuuaa

SEQ ID NO: 3838790 - RNA, 17 nt, Human
gcugcuugggcuucauc

SEQ ID NO: 3838791 - RNA, 22 nt, Human
gcugcuugugucccuccuggga

SEQ ID NO: 3838792 - RNA, 14 nt, Human
gcugcuuuccccug

SEQ ID NO: 3838793 - RNA, 19 nt, Human
gcugcuuuccccugugggg

SEQ ID NO: 3838794 - RNA, 15 nt, Human
gcugcuuugauauau

SEQ ID NO: 3838795 - RNA, 23 nt, Human
gcugcuuuguuaccuuaaaacua

SEQ ID NO: 3838796 - RNA, 12 nt, Human
gcugcuuuucuu

SEQ ID NO: 3838797 - RNA, 21 nt, Human
gcuggaaaaguauguuagugc

SEQ ID NO: 3838798 - RNA, 17 nt, Human
gcuggaaaauaauacug

SEQ ID NO: 3838799 - RNA, 20 nt, Human
gcuggaaacagacucgauuc

SEQ ID NO: 3838800 - RNA, 18 nt, Human
gcuggaagauccugcggg

SEQ ID NO: 3838801 - RNA, 22 nt, Human
gcuggaagcccagccccuacug

SEQ ID NO: 3838802 - RNA, 16 nt, Human
gcuggaagcugggagg

SEQ ID NO: 3838803 - RNA, 20 nt, Human
gcuggaauuuuuuauucuug

SEQ ID NO: 3838804 - RNA, 15 nt, Human
gcuggacaggucugg

SEQ ID NO: 3838805 - RNA, 15 nt, Human
cuucccuccugcuuu

SEQ ID NO: 3838806 - RNA, 16 nt, Human
cuucccucuccccaag

SEQ ID NO: 3838807 - RNA, 14 nt, Human
cuucccucucugga

SEQ ID NO: 3838808 - RNA, 11 nt, Human
cuucccucugc

SEQ ID NO: 3838809 - RNA, 13 nt, Human
cuucccucugccu

SEQ ID NO: 3838810 - RNA, 17 nt, Human
cuucccucugccugucc

SEQ ID NO: 3838811 - RNA, 18 nt, Human
cuucccucugccuguccc

SEQ ID NO: 3838812 - RNA, 22 nt, Human
cuucccucuuccuucccugcug

SEQ ID NO: 3838813 - RNA, 15 nt, Human
cuucccugaagcucc

SEQ ID NO: 3838814 - RNA, 13 nt, Human
cuucccugacuca

SEQ ID NO: 3838815 - RNA, 20 nt, Human
cuucccugauugaccugcuc

SEQ ID NO: 3838816 - RNA, 18 nt, Human
cuucccugcgccugugau

SEQ ID NO: 3838817 - RNA, 12 nt, Human
cuucccugggcu

SEQ ID NO: 3838818 - RNA, 22 nt, Human
cuucccuggguuagacugccag

SEQ ID NO: 3838819 - RNA, 18 nt, Human
cuucccugguaagaaaaa

SEQ ID NO: 3838820 - RNA, 22 nt, Human
cuucccuguauuuucuuucucu

SEQ ID NO: 3838821 - RNA, 16 nt, Human
cuucccugugccuccu

SEQ ID NO: 3838822 - RNA, 23 nt, Human
cuucccuguuuuccccccaaggg

SEQ ID NO: 3838823 - RNA, 15 nt, Human
cuucccuuccacugc

SEQ ID NO: 3838824 - RNA, 17 nt, Human
cuucccuuccacugccu

SEQ ID NO: 3838825 - RNA, 23 nt, Human
cuucccuuccacugccucugccu

SEQ ID NO: 3838826 - RNA, 16 nt, Human
cuucccuugagcccuc

SEQ ID NO: 3838827 - RNA, 15 nt, Human
cuucccuugccacuu

SEQ ID NO: 3838828 - RNA, 16 nt, Human
cuucccuugccacuuu

SEQ ID NO: 3838829 - RNA, 14 nt, Human
cuucccuuuucugu

SEQ ID NO: 3838830 - RNA, 17 nt, Human
cuuccgacccucuggga

SEQ ID NO: 3838831 - RNA, 15 nt, Human
cuuccgcaguguggc

SEQ ID NO: 3838832 - RNA, 15 nt, Human
cuuccgccacugggg

SEQ ID NO: 3838833 - RNA, 14 nt, Human
cuuccgccccugcc

SEQ ID NO: 3838834 - RNA, 15 nt, Human
cuuccgccccugccu

SEQ ID NO: 3838835 - RNA, 18 nt, Human
cuuccgccccuucccuuc

SEQ ID NO: 3838836 - RNA, 19 nt, Human
cuuccgccccuucccuucc

SEQ ID NO: 3838837 - RNA, 22 nt, Human
cuuccgcuuggagcuauuuucc

SEQ ID NO: 3838838 - RNA, 23 nt, Human
cuuccgcuuggagcuauuuucca

SEQ ID NO: 3838839 - RNA, 15 nt, Human
cuuccggagauguag

SEQ ID NO: 3838840 - RNA, 13 nt, Human
cuuccggccccuc

SEQ ID NO: 3838841 - RNA, 17 nt, Human
cuuccguaacccaacuc

SEQ ID NO: 3838842 - RNA, 23 nt, Human
cuuccguaacccaacucuccugg

SEQ ID NO: 3838843 - RNA, 19 nt, Human
cuuccuaaauauuaugaga

SEQ ID NO: 3838844 - RNA, 16 nt, Human
cuuccuaaauuuuccu

SEQ ID NO: 3838845 - RNA, 15 nt, Human
cuuccuaagccugug

SEQ ID NO: 3838846 - RNA, 16 nt, Human
cuuccuaagccugugg

SEQ ID NO: 3838847 - RNA, 21 nt, Human
cuuccuaauuucccuucuugc

SEQ ID NO: 3838848 - RNA, 22 nt, Human
cuuccuaccacccgguccccac

SEQ ID NO: 3838849 - RNA, 16 nt, Human
cuuccuacccacaccu

SEQ ID NO: 3838850 - RNA, 23 nt, Human
cuuccuacccacaccucugccag

SEQ ID NO: 3838851 - RNA, 16 nt, Human
cuuccuacccuccugc

SEQ ID NO: 3838852 - RNA, 17 nt, Human
cuuccuacccugccucc

SEQ ID NO: 3838853 - RNA, 14 nt, Human
cuuccuacucuucu

SEQ ID NO: 3838854 - RNA, 18 nt, Human
cuuccuacucuucucucu

SEQ ID NO: 3838855 - RNA, 17 nt, Human
cuuccuaguucaucccu

SEQ ID NO: 3838856 - RNA, 24 nt, Human
cuuccuaguucaucccuucucuuc

SEQ ID NO: 3838857 - RNA, 22 nt, Human
cuuccuaguuuucuccucccag

SEQ ID NO: 3838858 - RNA, 14 nt, Human
cuuccuauaacuug

SEQ ID NO: 3838859 - RNA, 22 nt, Human
cuuccuauaacuugaugcaugu

SEQ ID NO: 3838860 - RNA, 20 nt, Human
cuuccuauaauuuugauagu

SEQ ID NO: 3838861 - RNA, 22 nt, Human
cuuccuauuccaagcuuccaua

SEQ ID NO: 3838862 - RNA, 14 nt, Human
cuuccuauuucaga

SEQ ID NO: 3838863 - RNA, 16 nt, Human
cuuccucacugcccaa

SEQ ID NO: 3838864 - RNA, 13 nt, Human
cuuccucacuucc

SEQ ID NO: 3838865 - RNA, 14 nt, Human
cuuccucacuucca

SEQ ID NO: 3838866 - RNA, 11 nt, Human
cuuccucagcc

SEQ ID NO: 3838867 - RNA, 16 nt, Human
cuuccucagccagccu

SEQ ID NO: 3838868 - RNA, 20 nt, Human
cuuccucaguuuaauccuuc

SEQ ID NO: 3838869 - RNA, 21 nt, Human
cuuccucccaaguggugccua

SEQ ID NO: 3838870 - RNA, 23 nt, Human
cuuccucccaaguggugccuaaa

SEQ ID NO: 3838871 - RNA, 21 nt, Human
cuuccuccgaggccaguaccu

SEQ ID NO: 3838872 - RNA, 14 nt, Human
cuuccuccucccuc

SEQ ID NO: 3838873 - RNA, 19 nt, Human
cuuccuccucccuccugcc

SEQ ID NO: 3838874 - RNA, 14 nt, Human
cuuccuccugacac

SEQ ID NO: 3838875 - RNA, 14 nt, Human
cuuccuccuggaaa

SEQ ID NO: 3838876 - RNA, 13 nt, Human
cuuccuccuggug

SEQ ID NO: 3838877 - RNA, 22 nt, Human
cuuccucucauccuuuucuccu

SEQ ID NO: 3838878 - RNA, 13 nt, Human
cuuccucuccacu

SEQ ID NO: 3838879 - RNA, 15 nt, Human
cuuccucuccacugc

SEQ ID NO: 3838880 - RNA, 17 nt, Human
cuuccucuccacugccu

SEQ ID NO: 3838881 - RNA, 12 nt, Human
cuuccucuccuu

SEQ ID NO: 3838882 - RNA, 19 nt, Human
cuuccucugaggcuggauc

SEQ ID NO: 3838883 - RNA, 14 nt, Human
cuuccucugcagcu

SEQ ID NO: 3838884 - RNA, 14 nt, Human
cuuccucugcuaaa

SEQ ID NO: 3838885 - RNA, 12 nt, Human
cuuccucugcuc

SEQ ID NO: 3838886 - RNA, 13 nt, Human
cuuccucugcucc

SEQ ID NO: 3838887 - RNA, 15 nt, Human
cuuccucugcucccc

SEQ ID NO: 3838888 - RNA, 13 nt, Human
cuuccucugcuga

SEQ ID NO: 3838889 - RNA, 20 nt, Human
cuuccucuggggcucuaggg

SEQ ID NO: 3838890 - RNA, 17 nt, Human
cuuccucuucccccaag

SEQ ID NO: 3838891 - RNA, 18 nt, Human
cuuccucuugacccugca

SEQ ID NO: 3838892 - RNA, 20 nt, Human
cuuccucuugacccugcacc

SEQ ID NO: 3838893 - RNA, 22 nt, Human
cuuccucuugacccugcacccu

SEQ ID NO: 3838894 - RNA, 16 nt, Human
cuuccucuugucugau

SEQ ID NO: 3838895 - RNA, 18 nt, Human
cuuccucuugucugauuu

SEQ ID NO: 3838896 - RNA, 13 nt, Human
cuuccugaagcug

SEQ ID NO: 3838897 - RNA, 15 nt, Human
cuuccugagcuuuau

SEQ ID NO: 3838898 - RNA, 17 nt, Human
cuuccugcaacaccuug

SEQ ID NO: 3838899 - RNA, 17 nt, Human
cuuccugcauucaccca

SEQ ID NO: 3838900 - RNA, 22 nt, Human
cuuccugcauucacccagacag

SEQ ID NO: 3838901 - RNA, 13 nt, Human
cuuccugccacca

SEQ ID NO: 3838902 - RNA, 18 nt, Human
cuuccugccaccagucac

SEQ ID NO: 3838903 - RNA, 21 nt, Human
cuuccugccaccagucacugu

SEQ ID NO: 3838904 - RNA, 14 nt, Human
cuuccugccagccc

SEQ ID NO: 3838905 - RNA, 20 nt, Human
cuuccugccagccccugcca

SEQ ID NO: 3838906 - RNA, 13 nt, Human
cuuccugccccuc

SEQ ID NO: 3838907 - RNA, 16 nt, Human
cuuccugccccucuuu

SEQ ID NO: 3838908 - RNA, 22 nt, Human
cuuccugccccucuuucucuuu

SEQ ID NO: 3838909 - RNA, 17 nt, Human
cuuccugccuggucucc

SEQ ID NO: 3838910 - RNA, 15 nt, Human
cuuccugcguccucc

SEQ ID NO: 3838911 - RNA, 18 nt, Human
cuuccugcguccuccuca

SEQ ID NO: 3838912 - RNA, 20 nt, Human
cuuccugcguccuccucacc

SEQ ID NO: 3838913 - RNA, 18 nt, Human
cuuccugcuuccucagag

SEQ ID NO: 3838914 - RNA, 12 nt, Human
cuuccugcuugc

SEQ ID NO: 3838915 - RNA, 16 nt, Human
cuuccugcuugccaag

SEQ ID NO: 3838916 - RNA, 23 nt, Human
cuuccuggacagcugugccucgc

SEQ ID NO: 3838917 - RNA, 12 nt, Human
cuuccuggagca

SEQ ID NO: 3838918 - RNA, 21 nt, Human
cuuccuggagcagaagcagca

SEQ ID NO: 3838919 - RNA, 11 nt, Human
cuuccuggccg

SEQ ID NO: 3838920 - RNA, 12 nt, Human
cuuccuggccug

SEQ ID NO: 3838921 - RNA, 22 nt, Human
cuuccugggcacacgcugcucu

SEQ ID NO: 3838922 - RNA, 16 nt, Human
cuuccugucuagucuc

SEQ ID NO: 3838923 - RNA, 23 nt, Human
cuuccugucuagucucuccugua

SEQ ID NO: 3838924 - RNA, 12 nt, Human
gcugguggccca

SEQ ID NO: 3838925 - RNA, 15 nt, Human
gcugguggcucccgg

SEQ ID NO: 3838926 - RNA, 21 nt, Human
gcuggugggaagcgucugucc

SEQ ID NO: 3838927 - RNA, 12 nt, Human
gcuggugggagg

SEQ ID NO: 3838928 - RNA, 14 nt, Human
gcuggugggagggg

SEQ ID NO: 3838929 - RNA, 21 nt, Human
gcuggugggcaccaagagcca

SEQ ID NO: 3838930 - RNA, 19 nt, Human
gcuggugggugaaagaaau

SEQ ID NO: 3838931 - RNA, 18 nt, Human
gcugguguagcuacagag

SEQ ID NO: 3838932 - RNA, 20 nt, Human
gcugguguagcuacagagaa

SEQ ID NO: 3838933 - RNA, 23 nt, Human
gcugguguagcuacagagaaacc

SEQ ID NO: 3838934 - RNA, 16 nt, Human
gcugguguccugacca

SEQ ID NO: 3838935 - RNA, 17 nt, Human
gcuggugugguacagag

SEQ ID NO: 3838936 - RNA, 18 nt, Human
gcuggugugguacagaga

SEQ ID NO: 3838937 - RNA, 19 nt, Human
gcuggugugguacagagaa

SEQ ID NO: 3838938 - RNA, 21 nt, Human
gcuggugugguacagagaagc

SEQ ID NO: 3838939 - RNA, 13 nt, Human
gcugguguuaaca

SEQ ID NO: 3838940 - RNA, 18 nt, Human
gcugguguuaacagaagg

SEQ ID NO: 3838941 - RNA, 23 nt, Human
gcugguucaggguuggccccugc

SEQ ID NO: 3838942 - RNA, 16 nt, Human
gcugguuccugcuaga

SEQ ID NO: 3838943 - RNA, 19 nt, Human
gcugguuccugcuagaaau

SEQ ID NO: 3838944 - RNA, 14 nt, Human
gcugguugcugugu

SEQ ID NO: 3838945 - RNA, 17 nt, Human
gcugguuggagagcuag

SEQ ID NO: 3838946 - RNA, 18 nt, Human
gcugguuggagagcuaga

SEQ ID NO: 3838947 - RNA, 15 nt, Human
gcugguuuaauguuu

SEQ ID NO: 3838948 - RNA, 15 nt, Human
gcugguuuccucauu

SEQ ID NO: 3838949 - RNA, 14 nt, Human
gcuguaaaaucuug

SEQ ID NO: 3838950 - RNA, 12 nt, Human
cuugaaaaaugu

SEQ ID NO: 3838951 - RNA, 18 nt, Human
cuugaaaaaugugcaaaa

SEQ ID NO: 3838952 - RNA, 15 nt, Human
cuugaaaagagacag

SEQ ID NO: 3838953 - RNA, 16 nt, Human
cuugaaaauaagaaua

SEQ ID NO: 3838954 - RNA, 23 nt, Human
cuugaaaauauuuuuuauauaua

SEQ ID NO: 3838955 - RNA, 18 nt, Human
cuugaaacuuugggaaaa

SEQ ID NO: 3838956 - RNA, 23 nt, Human
cuugaaacuuugggaaaacaugu

SEQ ID NO: 3838957 - RNA, 21 nt, Human
cuugaaagaagaaaagguucu

SEQ ID NO: 3838958 - RNA, 17 nt, Human
cuugaaagaauuuuccu

SEQ ID NO: 3838959 - RNA, 16 nt, Human
cuugaaagcauccaug

SEQ ID NO: 3838960 - RNA, 17 nt, Human
cuugaaagcauccaugu

SEQ ID NO: 3838961 - RNA, 18 nt, Human
cuugaaagcauccaugug

SEQ ID NO: 3838962 - RNA, 13 nt, Human
cuugaaagcugug

SEQ ID NO: 3838963 - RNA, 19 nt, Human
cuugaaauauccugcuuga

SEQ ID NO: 3838964 - RNA, 20 nt, Human
cuugaaauuaagaaggcaaa

SEQ ID NO: 3838965 - RNA, 17 nt, Human
cuugaaauuauaucugu

SEQ ID NO: 3838966 - RNA, 16 nt, Human
cuugaaauuuuaaccu

SEQ ID NO: 3838967 - RNA, 17 nt, Human
cuugaaauuuuaaccua

SEQ ID NO: 3838968 - RNA, 17 nt, Human
cuugaacaaaaggguca

SEQ ID NO: 3838969 - RNA, 20 nt, Human
cuugaacaaaagggucagag

SEQ ID NO: 3838970 - RNA, 17 nt, Human
cuugaacaaaaucuguu

SEQ ID NO: 3838971 - RNA, 15 nt, Human
cuugaacacaguauu

SEQ ID NO: 3838972 - RNA, 19 nt, Human
cuugaacacucaugcugaa

SEQ ID NO: 3838973 - RNA, 20 nt, Human
cuugaacacucaugcugaaa

SEQ ID NO: 3838974 - RNA, 13 nt, Human
cuugaacacuggg

SEQ ID NO: 3838975 - RNA, 18 nt, Human
cuugaacauguuuuguau

SEQ ID NO: 3838976 - RNA, 15 nt, Human
cuugaacccaggagg

SEQ ID NO: 3838977 - RNA, 23 nt, Human
cuugaacccaggucucccuggau

SEQ ID NO: 3838978 - RNA, 20 nt, Human
cuugaacccgggaggcagag

SEQ ID NO: 3838979 - RNA, 16 nt, Human
cuugaaccugggaggu

SEQ ID NO: 3838980 - RNA, 13 nt, Human
ggaaaaauguuug

SEQ ID NO: 3838981 - RNA, 18 nt, Human
ggaaaacaugcuacacac

SEQ ID NO: 3838982 - RNA, 12 nt, Human
ggaaaacauuug

SEQ ID NO: 3838983 - RNA, 12 nt, Human
ggaaaaccagac

SEQ ID NO: 3838984 - RNA, 16 nt, Human
ggaaaaccugaagacu

SEQ ID NO: 3838985 - RNA, 16 nt, Human
ggaaaacugacagagg

SEQ ID NO: 3838986 - RNA, 13 nt, Human
ggaaaacuguguu

SEQ ID NO: 3838987 - RNA, 14 nt, Human
ggaaaacuguguug

SEQ ID NO: 3838988 - RNA, 23 nt, Human
ggaaaaggaagguaguucaagaa

SEQ ID NO: 3838989 - RNA, 13 nt, Human
ggaaaaggccugg

SEQ ID NO: 3838990 - RNA, 14 nt, Human
ggaaaaggccuggg

SEQ ID NO: 3838991 - RNA, 22 nt, Human
ggaaaaggccuggggugacccg

SEQ ID NO: 3838992 - RNA, 16 nt, Human
ggaaaaggcugguaca

SEQ ID NO: 3838993 - RNA, 15 nt, Human
ggaaaagguugaaua

SEQ ID NO: 3838994 - RNA, 17 nt, Human
ggaaaauaaaaaaagaa

SEQ ID NO: 3838995 - RNA, 22 nt, Human
ggaaaauaccccaucauucaug

SEQ ID NO: 3838996 - RNA, 19 nt, Human
ggaaaaucagccugcucca

SEQ ID NO: 3838997 - RNA, 12 nt, Human
ggaaaauuauuu

SEQ ID NO: 3838998 - RNA, 14 nt, Human
ggaaaauucauuuu

SEQ ID NO: 3838999 - RNA, 18 nt, Human
ggaaaauuuuaaaaauac

SEQ ID NO: 3839000 - RNA, 15 nt, Human
ggaaacaacauuuau

SEQ ID NO: 3839001 - RNA, 17 nt, Human
ggaaacacuaaauguua

SEQ ID NO: 3839002 - RNA, 21 nt, Human
ggaaacacuaaauguuaaaga

SEQ ID NO: 3839003 - RNA, 15 nt, Human
ggaaacacuccuugc

SEQ ID NO: 3839004 - RNA, 13 nt, Human
ggaaacagacucg

SEQ ID NO: 3839005 - RNA, 15 nt, Human
ggaaacagguuggga

SEQ ID NO: 3839006 - RNA, 18 nt, Human
ggaaacaguugcauguag

SEQ ID NO: 3839007 - RNA, 20 nt, Human
ggaaacaugacucguauaug

SEQ ID NO: 3839008 - RNA, 16 nt, Human
ggaaaccacagcugcu

SEQ ID NO: 3839009 - RNA, 18 nt, Human
ggaaaccacagcugcugg

SEQ ID NO: 3839010 - RNA, 19 nt, Human
ggaaaccacagcugcugga

SEQ ID NO: 3839011 - RNA, 23 nt, Human
ggaaacccauaggcccacacaca

SEQ ID NO: 3839012 - RNA, 19 nt, Human
ggaaaccccuucucuguga

SEQ ID NO: 3839013 - RNA, 12 nt, Human
ggaaaccugccc

SEQ ID NO: 3839014 - RNA, 13 nt, Human
ggaaaccugcccu

SEQ ID NO: 3839015 - RNA, 14 nt, Human
ggaaaccugcccug

SEQ ID NO: 3839016 - RNA, 18 nt, Human
ggaaaccugcccugccug

SEQ ID NO: 3839017 - RNA, 17 nt, Human
ggaaaccuuccacccag

SEQ ID NO: 3839018 - RNA, 18 nt, Human
ggaaaccuuccacccagu

SEQ ID NO: 3839019 - RNA, 22 nt, Human
ggaaacuaauaaaauauuuucu

SEQ ID NO: 3839020 - RNA, 16 nt, Human
ggaaacuagcuuacau

SEQ ID NO: 3839021 - RNA, 21 nt, Human
ggaaacucaccugcuggcccc

SEQ ID NO: 3839022 - RNA, 17 nt, Human
ggaaacuccugugacca

SEQ ID NO: 3839023 - RNA, 17 nt, Human
ggaaacuggaugagguc

SEQ ID NO: 3839024 - RNA, 18 nt, Human
ggaaacuggguuccugca

SEQ ID NO: 3839025 - RNA, 15 nt, Human
ggaaagaagagccgg

SEQ ID NO: 3839026 - RNA, 23 nt, Human
ggaaagaauuccuacaauauaua

SEQ ID NO: 3839027 - RNA, 20 nt, Human
ggaaagacuuuuccaacccu

SEQ ID NO: 3839028 - RNA, 16 nt, Human
ggaaagaguaggaaga

SEQ ID NO: 3839029 - RNA, 19 nt, Human
ggaaagcaaaggagauugg

SEQ ID NO: 3839030 - RNA, 15 nt, Human
ggaaagcaauaaaug

SEQ ID NO: 3839031 - RNA, 12 nt, Human
ggaaagcacaga

SEQ ID NO: 3839032 - RNA, 17 nt, Human
ggaaagcacaggugggc

SEQ ID NO: 3839033 - RNA, 19 nt, Human
ggaaagccagugacuccag

SEQ ID NO: 3839034 - RNA, 14 nt, Human
ggaaagccucugcu

SEQ ID NO: 3839035 - RNA, 19 nt, Human
ggaaagcgccuccaacccu

SEQ ID NO: 3839036 - RNA, 23 nt, Human
ggaaagcucagcuacugauuuuu

SEQ ID NO: 3839037 - RNA, 13 nt, Human
ggaaaggaaugca

SEQ ID NO: 3839038 - RNA, 21 nt, Human
ggaaaggagccuaggccaggu

SEQ ID NO: 3839039 - RNA, 18 nt, Human
ggaaaggcaaaugcccaa

SEQ ID NO: 3839040 - RNA, 18 nt, Human
ggaaaggccagcuggcag

SEQ ID NO: 3839041 - RNA, 23 nt, Human
ggaaaggcucagucucaggagca

SEQ ID NO: 3839042 - RNA, 17 nt, Human
ggaaaggcuccaggagc

SEQ ID NO: 3839043 - RNA, 20 nt, Human
ggaaaggcuccaggagcagc

SEQ ID NO: 3839044 - RNA, 12 nt, Human
ggaaagggagga

SEQ ID NO: 3839045 - RNA, 12 nt, Human
ggaaaggggaga

SEQ ID NO: 3839046 - RNA, 14 nt, Human
ggaaaggggagagc

SEQ ID NO: 3839047 - RNA, 21 nt, Human
ggaaaggggcaggccagagcu

SEQ ID NO: 3839048 - RNA, 14 nt, Human
ggaaaggggggagc

SEQ ID NO: 3839049 - RNA, 22 nt, Human
ggaaagggggucccagugggag

SEQ ID NO: 3839050 - RNA, 21 nt, Human
ggaaagggguuggggugacag

SEQ ID NO: 3839051 - RNA, 20 nt, Human
ggaaagggugcugcuucccu

SEQ ID NO: 3839052 - RNA, 20 nt, Human
ggaaaggugugagacuggga

SEQ ID NO: 3839053 - RNA, 21 nt, Human
ggaaaguacauuuuuugaaau

SEQ ID NO: 3839054 - RNA, 18 nt, Human
ggaaagugaauuugaaug

SEQ ID NO: 3839055 - RNA, 16 nt, Human
ggaaaguguaaagcau

SEQ ID NO: 3839056 - RNA, 19 nt, Human
ggaaaguguaaagcauucc

SEQ ID NO: 3839057 - RNA, 21 nt, Human
ggaaaguuuacccaugaagau

SEQ ID NO: 3839058 - RNA, 14 nt, Human
ggaaaguuucuuug

SEQ ID NO: 3839059 - RNA, 22 nt, Human
ggaaauaaaaaagucucuauuu

SEQ ID NO: 3839060 - RNA, 19 nt, Human
ggaaauaaaaccuuucaaa

SEQ ID NO: 3839061 - RNA, 20 nt, Human
ggaaauaauaaagaugcucu

SEQ ID NO: 3839062 - RNA, 16 nt, Human
ggaaauaccaguucug

SEQ ID NO: 3839063 - RNA, 23 nt, Human
ggaaauaggcccaaccaccagau

SEQ ID NO: 3839064 - RNA, 23 nt, Human
ggaaauauauacaaaaagaaaau

SEQ ID NO: 3839065 - RNA, 20 nt, Human
ggaaauauuuagcaaauaau

SEQ ID NO: 3839066 - RNA, 13 nt, Human
ggaaauauuuauu

SEQ ID NO: 3839067 - RNA, 20 nt, Human
ggaaauauuuugauaauaaa

SEQ ID NO: 3839068 - RNA, 16 nt, Human
ggaaaucaaauaugca

SEQ ID NO: 3839069 - RNA, 18 nt, Human
ggaaaucaaauguaaagu

SEQ ID NO: 3839070 - RNA, 14 nt, Human
ggaaaucaccgaaa

SEQ ID NO: 3839071 - RNA, 23 nt, Human
ggaaaucagccaaguuuuauaau

SEQ ID NO: 3839072 - RNA, 19 nt, Human
ggaaaucaggguuaguauu

SEQ ID NO: 3839073 - RNA, 16 nt, Human
ggaaauccaggguggu

SEQ ID NO: 3839074 - RNA, 15 nt, Human
ggaaaucccuucaua

SEQ ID NO: 3839075 - RNA, 20 nt, Human
ggaaauccuaguuuccucuc

SEQ ID NO: 3839076 - RNA, 22 nt, Human
ggaaauccuaguuuccucuccu

SEQ ID NO: 3839077 - RNA, 18 nt, Human
ggaaaucucaccccaucc

SEQ ID NO: 3839078 - RNA, 13 nt, Human
ggaaaucuuaaac

SEQ ID NO: 3839079 - RNA, 16 nt, Human
ggaaaugaaugugugu

SEQ ID NO: 3839080 - RNA, 14 nt, Human
ggaaaugcugauuu

SEQ ID NO: 3839081 - RNA, 15 nt, Human
ggaaaugcugggcug

SEQ ID NO: 3839082 - RNA, 14 nt, Human
ggaaaugggcagag

SEQ ID NO: 3839083 - RNA, 17 nt, Human
ggaaaugggcagagcag

SEQ ID NO: 3839084 - RNA, 18 nt, Human
ggaaaugguauccagaau

SEQ ID NO: 3839085 - RNA, 18 nt, Human
ggaaaugucacagaagca

SEQ ID NO: 3839086 - RNA, 20 nt, Human
ggaaauguuuucauauuuuu

SEQ ID NO: 3839087 - RNA, 20 nt, Human
ggaaauuagguugaaacaua

SEQ ID NO: 3839088 - RNA, 23 nt, Human
ggaaauucaggugaaaauguuca

SEQ ID NO: 3839089 - RNA, 22 nt, Human
ggaaauucccuucaucuggaac

SEQ ID NO: 3839090 - RNA, 14 nt, Human
ggaaauuuagcauu

SEQ ID NO: 3839091 - RNA, 15 nt, Human
ggaacaaacagggcu

SEQ ID NO: 3839092 - RNA, 13 nt, Human
ggaacaaaucuuc

SEQ ID NO: 3839093 - RNA, 15 nt, Human
ggaacaaauuauuuu

SEQ ID NO: 3839094 - RNA, 17 nt, Human
gcugccagcucuguauc

SEQ ID NO: 3839095 - RNA, 17 nt, Human
gcugccaggccugggac

SEQ ID NO: 3839096 - RNA, 10 nt, Human
gcugccagua

SEQ ID NO: 3839097 - RNA, 15 nt, Human
gcugccaguaccagc

SEQ ID NO: 3839098 - RNA, 17 nt, Human
gcugccaguaccagccc

SEQ ID NO: 3839099 - RNA, 13 nt, Human
gcugccagugccu

SEQ ID NO: 3839100 - RNA, 18 nt, Human
gcugccaguguccugagc

SEQ ID NO: 3839101 - RNA, 19 nt, Human
gcugccaguguccugagcc

SEQ ID NO: 3839102 - RNA, 21 nt, Human
gcugccauccagguucagcuu

SEQ ID NO: 3839103 - RNA, 23 nt, Human
gcugccaucucaccuccugcugg

SEQ ID NO: 3839104 - RNA, 23 nt, Human
gcugccauggcgugucccucucg

SEQ ID NO: 3839105 - RNA, 17 nt, Human
gcugccaugugaagagg

SEQ ID NO: 3839106 - RNA, 17 nt, Human
gcugcccacacacccca

SEQ ID NO: 3839107 - RNA, 17 nt, Human
gcugcccacagcaggcc

SEQ ID NO: 3839108 - RNA, 23 nt, Human
gcugcccacuguuucucuugagc

SEQ ID NO: 3839109 - RNA, 19 nt, Human
gcugcccaggggagcccuc

SEQ ID NO: 3839110 - RNA, 19 nt, Human
gcugcccaucauguggccc

SEQ ID NO: 3839111 - RNA, 17 nt, Human
gcugccccaaccugcug

SEQ ID NO: 3839112 - RNA, 23 nt, Human
gcugccccaugaagccacagccc

SEQ ID NO: 3839113 - RNA, 15 nt, Human
gcugcccccaccccg

SEQ ID NO: 3839114 - RNA, 15 nt, Human
gcugcccccaccucu

SEQ ID NO: 3839115 - RNA, 21 nt, Human
gcugcccccagagccacaguu

SEQ ID NO: 3839116 - RNA, 15 nt, Human
gcugccccggccccu

SEQ ID NO: 3839117 - RNA, 22 nt, Human
gcugccccucccugccagcacc

SEQ ID NO: 3839118 - RNA, 12 nt, Human
gcugccccucuc

SEQ ID NO: 3839119 - RNA, 13 nt, Human
gcugccccucuca

SEQ ID NO: 3839120 - RNA, 14 nt, Human
gcugccccucucac

SEQ ID NO: 3839121 - RNA, 16 nt, Human
gcugccccucucacca

SEQ ID NO: 3839122 - RNA, 18 nt, Human
gcugccccucucaccaaa

SEQ ID NO: 3839123 - RNA, 16 nt, Human
gcugccccugcacagc

SEQ ID NO: 3839124 - RNA, 20 nt, Human
gcugccccugcacagcaggc

SEQ ID NO: 3839125 - RNA, 13 nt, Human
gcugccccugccu

SEQ ID NO: 3839126 - RNA, 14 nt, Human
gcugccccugccuu

SEQ ID NO: 3839127 - RNA, 17 nt, Human
gcugccccuggcagccc

SEQ ID NO: 3839128 - RNA, 18 nt, Human
gcugccccuggcagcccc

SEQ ID NO: 3839129 - RNA, 15 nt, Human
gcugcccgcucccag

SEQ ID NO: 3839130 - RNA, 17 nt, Human
gcugcccggcgcccucu

SEQ ID NO: 3839131 - RNA, 23 nt, Human
gcugcccggcgcccucuguccug

SEQ ID NO: 3839132 - RNA, 21 nt, Human
gcugcccgucuucagccuagc

SEQ ID NO: 3839133 - RNA, 20 nt, Human
gcugcccuaguuuucuuucc

SEQ ID NO: 3839134 - RNA, 16 nt, Human
gcugcccuaugggccu

SEQ ID NO: 3839135 - RNA, 15 nt, Human
gcugcccuccauccc

SEQ ID NO: 3839136 - RNA, 23 nt, Human
gcugcccuccccuccggacuggu

SEQ ID NO: 3839137 - RNA, 12 nt, Human
gcugcccuccug

SEQ ID NO: 3839138 - RNA, 13 nt, Human
gcugcccucuccu

SEQ ID NO: 3839139 - RNA, 17 nt, Human
gcugcccucuccugggc

SEQ ID NO: 3839140 - RNA, 22 nt, Human
gcugcccucuccugggcagcug

SEQ ID NO: 3839141 - RNA, 13 nt, Human
gcugcccugagaa

SEQ ID NO: 3839142 - RNA, 13 nt, Human
gcugcccugccca

SEQ ID NO: 3839143 - RNA, 16 nt, Human
gcugcccugcccaccu

SEQ ID NO: 3839144 - RNA, 20 nt, Human
gcugcccugcccaccuggcc

SEQ ID NO: 3839145 - RNA, 21 nt, Human
gcugcccugcccaccuggccu

SEQ ID NO: 3839146 - RNA, 23 nt, Human
gcugcccugcccaccuggccucu

SEQ ID NO: 3839147 - RNA, 14 nt, Human
gcugcccugcccca

SEQ ID NO: 3839148 - RNA, 15 nt, Human
gcugcccugcggccc

SEQ ID NO: 3839149 - RNA, 14 nt, Human
gcugcccuggcccu

SEQ ID NO: 3839150 - RNA, 16 nt, Human
gcugcccuggcccuga

SEQ ID NO: 3839151 - RNA, 17 nt, Human
gcugcccuggcccugag

SEQ ID NO: 3839152 - RNA, 12 nt, Human
gcugcccuggug

SEQ ID NO: 3839153 - RNA, 14 nt, Human
gcugcccuggugcu

SEQ ID NO: 3839154 - RNA, 18 nt, Human
gcugcccuggugcugcca

SEQ ID NO: 3839155 - RNA, 18 nt, Human
gcugcccuguaccccagc

SEQ ID NO: 3839156 - RNA, 11 nt, Human
gcugcccugug

SEQ ID NO: 3839157 - RNA, 18 nt, Human
gcugcccuugggccaccc

SEQ ID NO: 3839158 - RNA, 22 nt, Human
gcugccgcaccccagagugugg

SEQ ID NO: 3839159 - RNA, 17 nt, Human
gcugccgccccacccag

SEQ ID NO: 3839160 - RNA, 19 nt, Human
gcugccgccucccagccug

SEQ ID NO: 3839161 - RNA, 16 nt, Human
gcugccgcgcagugug

SEQ ID NO: 3839162 - RNA, 19 nt, Human
gcugccgggccugauuugg

SEQ ID NO: 3839163 - RNA, 17 nt, Human
gcugccggggcagcccc

SEQ ID NO: 3839164 - RNA, 13 nt, Human
gcugccguggggc

SEQ ID NO: 3839165 - RNA, 15 nt, Human
gcugccuaagaggca

SEQ ID NO: 3839166 - RNA, 17 nt, Human
gcugccuaaguggcugc

SEQ ID NO: 3839167 - RNA, 22 nt, Human
gcugccuagcaagcuggccucu

SEQ ID NO: 3839168 - RNA, 21 nt, Human
gcugccucauuuagagaggaa

SEQ ID NO: 3839169 - RNA, 12 nt, Human
gcugccuccacu

SEQ ID NO: 3839170 - RNA, 21 nt, Human
gcugccuccacucccacuucc

SEQ ID NO: 3839171 - RNA, 12 nt, Human
gcugccucccaa

SEQ ID NO: 3839172 - RNA, 13 nt, Human
gcugccuccccaa

SEQ ID NO: 3839173 - RNA, 21 nt, Human
gcugccuccccaacccugccc

SEQ ID NO: 3839174 - RNA, 23 nt, Human
gcugccuccccaacccugccccu

SEQ ID NO: 3839175 - RNA, 16 nt, Human
gcugccuccccuccuc

SEQ ID NO: 3839176 - RNA, 17 nt, Human
gcugccuccccuccucu

SEQ ID NO: 3839177 - RNA, 21 nt, Human
gcugccuccccuccucugcuu

SEQ ID NO: 3839178 - RNA, 22 nt, Human
gcugccuccccuccucugcuug

SEQ ID NO: 3839179 - RNA, 21 nt, Human
gcugccuccccucuccuuccu

SEQ ID NO: 3839180 - RNA, 18 nt, Human
gcugccucccucugcugu

SEQ ID NO: 3839181 - RNA, 21 nt, Human
gcugccucccuuguggcagca

SEQ ID NO: 3839182 - RNA, 16 nt, Human
gcugccucucccauca

SEQ ID NO: 3839183 - RNA, 13 nt, Human
gcugccucuucug

SEQ ID NO: 3839184 - RNA, 15 nt, Human
gcugccugagcaccu

SEQ ID NO: 3839185 - RNA, 22 nt, Human
gcugccugagucgugaccugcu

SEQ ID NO: 3839186 - RNA, 13 nt, Human
gcugccugcccac

SEQ ID NO: 3839187 - RNA, 15 nt, Human
gcugccugcccacac

SEQ ID NO: 3839188 - RNA, 18 nt, Human
gcugccugcccacacagg

SEQ ID NO: 3839189 - RNA, 13 nt, Human
gcugccugccccu

SEQ ID NO: 3839190 - RNA, 20 nt, Human
gcugccugcccgcacagcag

SEQ ID NO: 3839191 - RNA, 14 nt, Human
gcugccugccuguc

SEQ ID NO: 3839192 - RNA, 12 nt, Human
gcugccuggacc

SEQ ID NO: 3839193 - RNA, 14 nt, Human
gcugccuggacccg

SEQ ID NO: 3839194 - RNA, 13 nt, Human
gcugccuggagcc

SEQ ID NO: 3839195 - RNA, 14 nt, Human
gcugccuggagccc

SEQ ID NO: 3839196 - RNA, 16 nt, Human
gcugccugggaucccu

SEQ ID NO: 3839197 - RNA, 19 nt, Human
gcugccugggaucccucau

SEQ ID NO: 3839198 - RNA, 21 nt, Human
gcugccugggaucccucaucc

SEQ ID NO: 3839199 - RNA, 12 nt, Human
gcugccugggcu

SEQ ID NO: 3839200 - RNA, 13 nt, Human
gcugccugggcug

SEQ ID NO: 3839201 - RNA, 20 nt, Human
gcugccuguaguuaggaaau

SEQ ID NO: 3839202 - RNA, 18 nt, Human
gcugccuguucagcucca

SEQ ID NO: 3839203 - RNA, 19 nt, Human
gcugccuguucagcuccag

SEQ ID NO: 3839204 - RNA, 22 nt, Human
gcugccuguucagcuccagcuc

SEQ ID NO: 3839205 - RNA, 16 nt, Human
gcugccuucccuagcu

SEQ ID NO: 3839206 - RNA, 20 nt, Human
gcugccuucugacggcccug

SEQ ID NO: 3839207 - RNA, 21 nt, Human
gcugccuucugacggcccugc

SEQ ID NO: 3839208 - RNA, 17 nt, Human
gcugccuucuggauucu

SEQ ID NO: 3839209 - RNA, 16 nt, Human
gcugccuuggcucaga

SEQ ID NO: 3839210 - RNA, 18 nt, Human
gcugcgacgcuugcucug

SEQ ID NO: 3839211 - RNA, 14 nt, Human
gcugcgcacugugu

SEQ ID NO: 3839212 - RNA, 16 nt, Human
gcugcgcuugcuuuuc

SEQ ID NO: 3839213 - RNA, 14 nt, Human
gcugcggcacccuu

SEQ ID NO: 3839214 - RNA, 16 nt, Human
gcugcgguccacccag

SEQ ID NO: 3839215 - RNA, 14 nt, Human
gcugcgugccugug

SEQ ID NO: 3839216 - RNA, 18 nt, Human
gcugcuaauauuuuccuc

SEQ ID NO: 3839217 - RNA, 21 nt, Human
gcugcuaauauuuuccuccug

SEQ ID NO: 3839218 - RNA, 24 nt, Human
gcugcuaauauuuuccuccugagu

SEQ ID NO: 3839219 - RNA, 16 nt, Human
gcugcuacccucccug

SEQ ID NO: 3839220 - RNA, 22 nt, Human
gcugcuacccucccugcugucc

SEQ ID NO: 3839221 - RNA, 12 nt, Human
gcugcuagaacu

SEQ ID NO: 3839222 - RNA, 15 nt, Human
gcugcuagaacuuuu

SEQ ID NO: 3839223 - RNA, 17 nt, Human
gcugcuagaacuuuuuu

SEQ ID NO: 3839224 - RNA, 13 nt, Human
gcugcuagaguga

SEQ ID NO: 3839225 - RNA, 20 nt, Human
gcugcuagcacuuggagcca

SEQ ID NO: 3839226 - RNA, 23 nt, Human
gcugcuagcacuuggagccaagg

SEQ ID NO: 3839227 - RNA, 16 nt, Human
gcugcuauagccuggg

SEQ ID NO: 3839228 - RNA, 21 nt, Human
gcugcuauccccaucucccug

SEQ ID NO: 3839229 - RNA, 23 nt, Human
gcugcucacuaccuccucaggga

SEQ ID NO: 3839230 - RNA, 21 nt, Human
gcugcucagggaaaagcagcu

SEQ ID NO: 3839231 - RNA, 23 nt, Human
gcugcuccaggccugcagcagga

SEQ ID NO: 3839232 - RNA, 24 nt, Human
gcugcucccaccuggcucuguggc

SEQ ID NO: 3839233 - RNA, 22 nt, Human
gcugcuccccacgucagcuggg

SEQ ID NO: 3839234 - RNA, 20 nt, Human
gcugcuccccucccuccucu

SEQ ID NO: 3839235 - RNA, 12 nt, Human
gcugcucccuca

SEQ ID NO: 3839236 - RNA, 14 nt, Human
gcugcucccucaga

SEQ ID NO: 3839237 - RNA, 15 nt, Human
gcugcuccuagaggg

SEQ ID NO: 3839238 - RNA, 16 nt, Human
gcugcuccuagaggga

SEQ ID NO: 3839239 - RNA, 22 nt, Human
cuuguguauccauuaucaugug

SEQ ID NO: 3839240 - RNA, 23 nt, Human
cuuguguauccauuaucaugugu

SEQ ID NO: 3839241 - RNA, 14 nt, Human
cuugugucccauga

SEQ ID NO: 3839242 - RNA, 18 nt, Human
cuugugucucugugcuuu

SEQ ID NO: 3839243 - RNA, 13 nt, Human
cuugugucugcgu

SEQ ID NO: 3839244 - RNA, 18 nt, Human
cuugugucuguacacgug

SEQ ID NO: 3839245 - RNA, 23 nt, Human
cuugugucuuuggaggugcugcu

SEQ ID NO: 3839246 - RNA, 20 nt, Human
cuugugugugggcugugagu

SEQ ID NO: 3839247 - RNA, 21 nt, Human
cuugugugugggcugugagug

SEQ ID NO: 3839248 - RNA, 21 nt, Human
cuuguguguuuauugucaaag

SEQ ID NO: 3839249 - RNA, 17 nt, Human
cuuguguguuucacuuu

SEQ ID NO: 3839250 - RNA, 14 nt, Human
cuuguguuggcugu

SEQ ID NO: 3839251 - RNA, 20 nt, Human
cuuguguuguccuuuugucu

SEQ ID NO: 3839252 - RNA, 13 nt, Human
cuuguuaauauuc

SEQ ID NO: 3839253 - RNA, 17 nt, Human
cuuguuaaugcuuucug

SEQ ID NO: 3839254 - RNA, 17 nt, Human
cuuguuacccaugaaaa

SEQ ID NO: 3839255 - RNA, 18 nt, Human
cuuguuacccaugaaaaa

SEQ ID NO: 3839256 - RNA, 19 nt, Human
cuuguuacccaugaaaaac

SEQ ID NO: 3839257 - RNA, 15 nt, Human
cuuguuacuucugag

SEQ ID NO: 3839258 - RNA, 13 nt, Human
cuuguuagaaaac

SEQ ID NO: 3839259 - RNA, 13 nt, Human
cuuguuagaucua

SEQ ID NO: 3839260 - RNA, 22 nt, Human
cuuguuagaucuaguucacucu

SEQ ID NO: 3839261 - RNA, 16 nt, Human
cuuguuauugugaaug

SEQ ID NO: 3839262 - RNA, 15 nt, Human
cuuguuauuuauaac

SEQ ID NO: 3839263 - RNA, 20 nt, Human
cuuguucaaaauauguucuu

SEQ ID NO: 3839264 - RNA, 16 nt, Human
cuuguucaucauccag

SEQ ID NO: 3839265 - RNA, 17 nt, Human
cuuguuccaaggccagg

SEQ ID NO: 3839266 - RNA, 18 nt, Human
cuuguuccaaugccacau

SEQ ID NO: 3839267 - RNA, 16 nt, Human
cuuguuccagcucuuu

SEQ ID NO: 3839268 - RNA, 22 nt, Human
cuuguucucucuaugguaaaga

SEQ ID NO: 3839269 - RNA, 16 nt, Human
cuuguucugagauuca

SEQ ID NO: 3839270 - RNA, 12 nt, Human
cuuguucuguca

SEQ ID NO: 3839271 - RNA, 12 nt, Human
cuuguucuguuu

SEQ ID NO: 3839272 - RNA, 13 nt, Human
cuuguucuguuuu

SEQ ID NO: 3839273 - RNA, 16 nt, Human
cuuguucuguuuuguu

SEQ ID NO: 3839274 - RNA, 14 nt, Human
cuuguucuuacuuu

SEQ ID NO: 3839275 - RNA, 21 nt, Human
cuuguugacacggccaugacc

SEQ ID NO: 3839276 - RNA, 19 nt, Human
cuuguugagccgugggcaa

SEQ ID NO: 3839277 - RNA, 19 nt, Human
cuuguugcaugauguauuu

SEQ ID NO: 3839278 - RNA, 20 nt, Human
cuuguugcucaaaaaaugag

SEQ ID NO: 3839279 - RNA, 21 nt, Human
cuuguugcuuuguugcacuga

SEQ ID NO: 3839280 - RNA, 14 nt, Human
cuuguuggagccug

SEQ ID NO: 3839281 - RNA, 22 nt, Human
cuuguuggcguaggcuacagag

SEQ ID NO: 3839282 - RNA, 20 nt, Human
cuuguugggauuccugaccc

SEQ ID NO: 3839283 - RNA, 17 nt, Human
cuuguuguaaagcaaua

SEQ ID NO: 3839284 - RNA, 15 nt, Human
cuuguugugcuuuua

SEQ ID NO: 3839285 - RNA, 17 nt, Human
cuuguugugcuuuuagu

SEQ ID NO: 3839286 - RNA, 16 nt, Human
cuuguuguuuuacuaa

SEQ ID NO: 3839287 - RNA, 16 nt, Human
cuuguuuacaugcuua

SEQ ID NO: 3839288 - RNA, 21 nt, Human
cuuguuuacaugcuuauucca

SEQ ID NO: 3839289 - RNA, 19 nt, Human
cuuguuuauugaguuugua

SEQ ID NO: 3839290 - RNA, 13 nt, Human
cuuguuucauauu

SEQ ID NO: 3839291 - RNA, 12 nt, Human
cuuguuucuugg

SEQ ID NO: 3839292 - RNA, 14 nt, Human
cuuguuucuuuuca

SEQ ID NO: 3839293 - RNA, 23 nt, Human
cuuguuugauuuuagcugcagaa

SEQ ID NO: 3839294 - RNA, 17 nt, Human
cuuguuugcuucaacug

SEQ ID NO: 3839295 - RNA, 17 nt, Human
cuuguuuggggcaggag

SEQ ID NO: 3839296 - RNA, 22 nt, Human
cuuguuuuauaaaauuuugcuu

SEQ ID NO: 3839297 - RNA, 14 nt, Human
cuuguuuucaguuu

SEQ ID NO: 3839298 - RNA, 20 nt, Human
cuuguuuucuuucuuuaaau

SEQ ID NO: 3839299 - RNA, 21 nt, Human
cuuguuuucuuucuuuaaaug

SEQ ID NO: 3839300 - RNA, 17 nt, Human
cuuguuuugcuuccccu

SEQ ID NO: 3839301 - RNA, 13 nt, Human
cuuguuuuggaug

SEQ ID NO: 3839302 - RNA, 14 nt, Human
cuuguuuuggaugc

SEQ ID NO: 3839303 - RNA, 21 nt, Human
cuuguuuuggauggcuugucu

SEQ ID NO: 3839304 - RNA, 13 nt, Human
cuuguuuuguuug

SEQ ID NO: 3839305 - RNA, 22 nt, Human
cuuguuuuguuugucucuccuu

SEQ ID NO: 3839306 - RNA, 23 nt, Human
cuuguuuuguuugucucuccuuu

SEQ ID NO: 3839307 - RNA, 20 nt, Human
cuuguuuuuauuaauuuaua

SEQ ID NO: 3839308 - RNA, 18 nt, Human
cuuguuuuuccacuacug

SEQ ID NO: 3839309 - RNA, 12 nt, Human
cuuguuuuugca

SEQ ID NO: 3839310 - RNA, 21 nt, Human
cuuguuuuuguaaagaaaaau

SEQ ID NO: 3839311 - RNA, 19 nt, Human
cuuguuuuuuuuuuccacu

SEQ ID NO: 3839312 - RNA, 21 nt, Human
cuuguuuuuuuuuuccacuua

SEQ ID NO: 3839313 - RNA, 20 nt, Human
cuuuaaaaaaaaaaguuaca

SEQ ID NO: 3839314 - RNA, 20 nt, Human
cuuuaaaaaaaauccuucua

SEQ ID NO: 3839315 - RNA, 22 nt, Human
cuuuaaaaaagcuauaaauuau

SEQ ID NO: 3839316 - RNA, 19 nt, Human
cuuuaaaaaauauuuauua

SEQ ID NO: 3839317 - RNA, 14 nt, Human
cuuuaaaaacuguu

SEQ ID NO: 3839318 - RNA, 16 nt, Human
cuuuaaaaaugucuua

SEQ ID NO: 3839319 - RNA, 12 nt, Human
cuuuaaaagaau

SEQ ID NO: 3839320 - RNA, 16 nt, Human
cuuuaaaagagagaga

SEQ ID NO: 3839321 - RNA, 21 nt, Human
cuuuaaaagagagagagagaa

SEQ ID NO: 3839322 - RNA, 17 nt, Human
cuuuaaaaggaaagaaa

SEQ ID NO: 3839323 - RNA, 18 nt, Human
cuuuaaaaggaaagaaaa

SEQ ID NO: 3839324 - RNA, 17 nt, Human
cuuuaaaauaucuacau

SEQ ID NO: 3839325 - RNA, 20 nt, Human
cuuuaaaauuacaacuaagu

SEQ ID NO: 3839326 - RNA, 23 nt, Human
cuuuaaaauuuuuuuagaaagca

SEQ ID NO: 3839327 - RNA, 18 nt, Human
cuuuaaacaguauuucau

SEQ ID NO: 3839328 - RNA, 13 nt, Human
cuuuaaacucagg

SEQ ID NO: 3839329 - RNA, 20 nt, Human
cuuuaaacugucgugucaua

SEQ ID NO: 3839330 - RNA, 20 nt, Human
cuuuaaagaugaacucugaa

SEQ ID NO: 3839331 - RNA, 18 nt, Human
cuuuaaaggaaaaaaugu

SEQ ID NO: 3839332 - RNA, 14 nt, Human
cuuuaaaggcccag

SEQ ID NO: 3839333 - RNA, 15 nt, Human
cuuuaaaggcccagc

SEQ ID NO: 3839334 - RNA, 18 nt, Human
cuuuaaaggcccagcccc

SEQ ID NO: 3839335 - RNA, 19 nt, Human
cuuuaaaggcccagccccu

SEQ ID NO: 3839336 - RNA, 20 nt, Human
cuuuaaagggauggcaagau

SEQ ID NO: 3839337 - RNA, 22 nt, Human
cuuuaaaguaugaaucuaugcc

SEQ ID NO: 3839338 - RNA, 21 nt, Human
cuuuaaaguguaauaauauga

SEQ ID NO: 3839339 - RNA, 15 nt, Human
cuuuaaauaauuuaa

SEQ ID NO: 3839340 - RNA, 16 nt, Human
cuuuaaauaauuuaac

SEQ ID NO: 3839341 - RNA, 18 nt, Human
cuuuaaauaauuuaacua

SEQ ID NO: 3839342 - RNA, 15 nt, Human
cuuuaaaugcugcuu

SEQ ID NO: 3839343 - RNA, 11 nt, Human
cuuuaaauguu

SEQ ID NO: 3839344 - RNA, 13 nt, Human
cuuuaaauugugu

SEQ ID NO: 3839345 - RNA, 15 nt, Human
cuuuaacaacauguu

SEQ ID NO: 3839346 - RNA, 22 nt, Human
cuuuaacaacauguuuccagca

SEQ ID NO: 3839347 - RNA, 17 nt, Human
cuuuaaccagucugaag

SEQ ID NO: 3839348 - RNA, 17 nt, Human
cuuuaaccuuguauaaa

SEQ ID NO: 3839349 - RNA, 18 nt, Human
cuuuaaccuuguauaaau

SEQ ID NO: 3839350 - RNA, 14 nt, Human
gcuucaguggagaa

SEQ ID NO: 3839351 - RNA, 14 nt, Human
gcuucaguggcagc

SEQ ID NO: 3839352 - RNA, 16 nt, Human
gcuucaguggcagcug

SEQ ID NO: 3839353 - RNA, 20 nt, Human
gcuucaguggcagcugcuuu

SEQ ID NO: 3839354 - RNA, 15 nt, Human
gcuucaguugcuugu

SEQ ID NO: 3839355 - RNA, 18 nt, Human
gcuucaguuguuuucccg

SEQ ID NO: 3839356 - RNA, 22 nt, Human
gcuucauaaaugaagcagcuuu

SEQ ID NO: 3839357 - RNA, 10 nt, Human
gcuucauaca

SEQ ID NO: 3839358 - RNA, 11 nt, Human
gcuucauacag

SEQ ID NO: 3839359 - RNA, 17 nt, Human
gcuucauagagacuugg

SEQ ID NO: 3839360 - RNA, 12 nt, Human
gcuucauccucc

SEQ ID NO: 3839361 - RNA, 15 nt, Human
gcuucauccuccuca

SEQ ID NO: 3839362 - RNA, 16 nt, Human
gcuucaugacauuccu

SEQ ID NO: 3839363 - RNA, 15 nt, Human
gcuucaugccuuugu

SEQ ID NO: 3839364 - RNA, 16 nt, Human
gcuucaugccuuugua

SEQ ID NO: 3839365 - RNA, 18 nt, Human
gcuucaugcucagcccug

SEQ ID NO: 3839366 - RNA, 17 nt, Human
gcuucauggcagaaggc

SEQ ID NO: 3839367 - RNA, 16 nt, Human
gcuucaugugucccag

SEQ ID NO: 3839368 - RNA, 22 nt, Human
gcuucauguucccaaaaucacc

SEQ ID NO: 3839369 - RNA, 16 nt, Human
gcuucauuagagcagg

SEQ ID NO: 3839370 - RNA, 17 nt, Human
gcuucauuagagcaggc

SEQ ID NO: 3839371 - RNA, 15 nt, Human
gcuucauucuccuug

SEQ ID NO: 3839372 - RNA, 10 nt, Human
gcuucauugu

SEQ ID NO: 3839373 - RNA, 15 nt, Human
gcuuccaaauauugu

SEQ ID NO: 3839374 - RNA, 21 nt, Human
gcuuccaaggcagaagcagca

SEQ ID NO: 3839375 - RNA, 12 nt, Human
gcuuccaauuuu

SEQ ID NO: 3839376 - RNA, 14 nt, Human
gcuuccaccucacc

SEQ ID NO: 3839377 - RNA, 17 nt, Human
gcuuccaccucacccca

SEQ ID NO: 3839378 - RNA, 19 nt, Human
gcuuccaccucaccccacu

SEQ ID NO: 3839379 - RNA, 21 nt, Human
gcuuccacguacugcagccuc

SEQ ID NO: 3839380 - RNA, 20 nt, Human
gcuuccagagaguccucugg

SEQ ID NO: 3839381 - RNA, 14 nt, Human
gcuuccagcaggag

SEQ ID NO: 3839382 - RNA, 21 nt, Human
gcuuccagguaucuccaggau

SEQ ID NO: 3839383 - RNA, 23 nt, Human
gcuuccaucccaaccagugccaa

SEQ ID NO: 3839384 - RNA, 15 nt, Human
gcuugccugcagggc

SEQ ID NO: 3839385 - RNA, 16 nt, Human
gcuugccugcagggcc

SEQ ID NO: 3839386 - RNA, 16 nt, Human
gcuugccugccugcuc

SEQ ID NO: 3839387 - RNA, 18 nt, Human
gcuugcggcaaaaggaaa

SEQ ID NO: 3839388 - RNA, 16 nt, Human
gcuugcuaauuauuuu

SEQ ID NO: 3839389 - RNA, 14 nt, Human
gcuugcucauuuuu

SEQ ID NO: 3839390 - RNA, 19 nt, Human
gcuugcucuguuugugggg

SEQ ID NO: 3839391 - RNA, 21 nt, Human
gcuugcugcaccccaagucca

SEQ ID NO: 3839392 - RNA, 14 nt, Human
gcuugcuucaaccc

SEQ ID NO: 3839393 - RNA, 15 nt, Human
gcuuggaagagccug

SEQ ID NO: 3839394 - RNA, 16 nt, Human
gcuuggaccagaucua

SEQ ID NO: 3839395 - RNA, 14 nt, Human
gcuuggagcagagg

SEQ ID NO: 3839396 - RNA, 18 nt, Human
gcuuggagcagaggggcu

SEQ ID NO: 3839397 - RNA, 18 nt, Human
gcuuggccacagccaggg

SEQ ID NO: 3839398 - RNA, 18 nt, Human
gcuuggccagaagggggc

SEQ ID NO: 3839399 - RNA, 13 nt, Human
gcuuggcccagga

SEQ ID NO: 3839400 - RNA, 14 nt, Human
gcuuggcccaggag

SEQ ID NO: 3839401 - RNA, 15 nt, Human
gcuuggcccaggagu

SEQ ID NO: 3839402 - RNA, 12 nt, Human
gcuuggcccugg

SEQ ID NO: 3839403 - RNA, 15 nt, Human
gcuuggcccuggcag

SEQ ID NO: 3839404 - RNA, 16 nt, Human
gcuuggccuaucuccu

SEQ ID NO: 3839405 - RNA, 19 nt, Human
gcuuggcguggagcaggcg

SEQ ID NO: 3839406 - RNA, 22 nt, Human
gcuugggaaaggugguguuucu

SEQ ID NO: 3839407 - RNA, 14 nt, Human
gcuugggauuugcu

SEQ ID NO: 3839408 - RNA, 14 nt, Human
gcuugggcccagcu

SEQ ID NO: 3839409 - RNA, 19 nt, Human
gcuugggcccagcugggcu

SEQ ID NO: 3839410 - RNA, 18 nt, Human
gcuugggccuaggcugca

SEQ ID NO: 3839411 - RNA, 16 nt, Human
gcuugggcgccgugcu

SEQ ID NO: 3839412 - RNA, 16 nt, Human
gcuuggggaccagagc

SEQ ID NO: 3839413 - RNA, 20 nt, Human
gcuuggggaccagagcugcc

SEQ ID NO: 3839414 - RNA, 15 nt, Human
gcuuggggcaacauu

SEQ ID NO: 3839415 - RNA, 23 nt, Human
gcuuggggccaccaaagcugccc

SEQ ID NO: 3839416 - RNA, 16 nt, Human
gcuuggggcucacaca

SEQ ID NO: 3839417 - RNA, 20 nt, Human
gcuuggggcucacacaccug

SEQ ID NO: 3839418 - RNA, 17 nt, Human
gcuuggggcuggagagg

SEQ ID NO: 3839419 - RNA, 14 nt, Human
gcuuggggggugau

SEQ ID NO: 3839420 - RNA, 13 nt, Human
gcuuggguggaga

SEQ ID NO: 3839421 - RNA, 18 nt, Human
gcuuggguggagaagcca

SEQ ID NO: 3839422 - RNA, 21 nt, Human
gcuuggguguaacaggucucc

SEQ ID NO: 3839423 - RNA, 15 nt, Human
gcuugguucugugaa

SEQ ID NO: 3839424 - RNA, 13 nt, Human
gcuuguaaauacc

SEQ ID NO: 3839425 - RNA, 17 nt, Human
gcuuguaaauaccagga

SEQ ID NO: 3839426 - RNA, 17 nt, Human
gcuuguaaauagcucag

SEQ ID NO: 3839427 - RNA, 14 nt, Human
gcuuguaacaagaa

SEQ ID NO: 3839428 - RNA, 16 nt, Human
gcuuguaacaagaaaa

SEQ ID NO: 3839429 - RNA, 18 nt, Human
gcuuguaacaagaaaaca

SEQ ID NO: 3839430 - RNA, 16 nt, Human
gcuuguacauaaugcg

SEQ ID NO: 3839431 - RNA, 19 nt, Human
gcuuguaccacuuuugcaa

SEQ ID NO: 3839432 - RNA, 22 nt, Human
gcuuguaccucuggcugacuaa

SEQ ID NO: 3839433 - RNA, 22 nt, Human
gcuuguagaacucacucugggc

SEQ ID NO: 3839434 - RNA, 13 nt, Human
gcuuguaggagcu

SEQ ID NO: 3839435 - RNA, 17 nt, Human
gcuuguaucaacacugu

SEQ ID NO: 3839436 - RNA, 16 nt, Human
gcuugucauagccagu

SEQ ID NO: 3839437 - RNA, 16 nt, Human
gcuuguccagcgccua

SEQ ID NO: 3839438 - RNA, 19 nt, Human
gcuuguccccuccucacuc

SEQ ID NO: 3839439 - RNA, 12 nt, Human
gcuugugaacag

SEQ ID NO: 3839440 - RNA, 17 nt, Human
gcuugugaucugggaac

SEQ ID NO: 3839441 - RNA, 15 nt, Human
gcuugugcaacaaua

SEQ ID NO: 3839442 - RNA, 21 nt, Human
gcuugugcagaaaacauuguu

SEQ ID NO: 3839443 - RNA, 14 nt, Human
gcuuguggagcccc

SEQ ID NO: 3839444 - RNA, 19 nt, Human
gcuuguggagccccacacu

SEQ ID NO: 3839445 - RNA, 20 nt, Human
gcuuguggagccccacacug

SEQ ID NO: 3839446 - RNA, 18 nt, Human
gcuuguggcaagugaauu

SEQ ID NO: 3839447 - RNA, 13 nt, Human
gcuuguggcucca

SEQ ID NO: 3839448 - RNA, 17 nt, Human
gcuuguggggacccagg

SEQ ID NO: 3839449 - RNA, 21 nt, Human
gcuuguggggacccaggcucc

SEQ ID NO: 3839450 - RNA, 16 nt, Human
gcuuguggggccuggg

SEQ ID NO: 3839451 - RNA, 11 nt, Human
gcuuguguauc

SEQ ID NO: 3839452 - RNA, 21 nt, Human
gcuuguguguuucacuuuuag

SEQ ID NO: 3839453 - RNA, 12 nt, Human
gcuuguguuaag

SEQ ID NO: 3839454 - RNA, 17 nt, Human
gcuuguuauauuaagca

SEQ ID NO: 3839455 - RNA, 14 nt, Human
gcuuguuggauuuu

SEQ ID NO: 3839456 - RNA, 21 nt, Human
gcuuguugggauuccugaccc

SEQ ID NO: 3839457 - RNA, 23 nt, Human
gcuuguugggauuccugacccag

SEQ ID NO: 3839458 - RNA, 24 nt, Human
gcuuguugggauuccugacccagg

SEQ ID NO: 3839459 - RNA, 19 nt, Human
gcuuguuuacaugcuuauu

SEQ ID NO: 3839460 - RNA, 16 nt, Human
gcuuguuuaccuuucu

SEQ ID NO: 3839461 - RNA, 18 nt, Human
gcuuguuuaccuuucucu

SEQ ID NO: 3839462 - RNA, 23 nt, Human
gcuuguuuuauaaaauuuugcuu

SEQ ID NO: 3839463 - RNA, 14 nt, Human
gcuuguuuuccagu

SEQ ID NO: 3839464 - RNA, 20 nt, Human
gcuuuaaaaacuauuuaacu

SEQ ID NO: 3839465 - RNA, 23 nt, Human
gcuuuaaaaacuauuuaacuuga

SEQ ID NO: 3839466 - RNA, 21 nt, Human
gcuuuaaacucagggacagag

SEQ ID NO: 3839467 - RNA, 16 nt, Human
gcuuuaaaguguaaua

SEQ ID NO: 3839468 - RNA, 13 nt, Human
gcuuuaauauaaa

SEQ ID NO: 3839469 - RNA, 14 nt, Human
gcuuuaauauaaau

SEQ ID NO: 3839470 - RNA, 15 nt, Human
gcuuuaauauaaaug

SEQ ID NO: 3839471 - RNA, 19 nt, Human
gcuuuaauauaaaugcaaa

SEQ ID NO: 3839472 - RNA, 22 nt, Human
gcuuuaauaucaucaguauuga

SEQ ID NO: 3839473 - RNA, 13 nt, Human
gcuuuaaucagaa

SEQ ID NO: 3839474 - RNA, 14 nt, Human
gcuuuacaaaaaga

SEQ ID NO: 3839475 - RNA, 15 nt, Human
gcuuuacaaaaagac

SEQ ID NO: 3839476 - RNA, 12 nt, Human
gcuuuacacaca

SEQ ID NO: 3839477 - RNA, 21 nt, Human
gcuuuaccaaacagcaaacca

SEQ ID NO: 3839478 - RNA, 21 nt, Human
gcuuuaccuuuucagggcugg

SEQ ID NO: 3839479 - RNA, 22 nt, Human
gcuuuaccuuuucagggcuggc

SEQ ID NO: 3839480 - RNA, 16 nt, Human
gcuuuacuauuuuuau

SEQ ID NO: 3839481 - RNA, 16 nt, Human
gcuuuacuuagcuuau

SEQ ID NO: 3839482 - RNA, 12 nt, Human
gcuuuagaaaca

SEQ ID NO: 3839483 - RNA, 20 nt, Human
gcuuuagaaacagugcaaca

SEQ ID NO: 3839484 - RNA, 15 nt, Human
gcuuuagacccuggg

SEQ ID NO: 3839485 - RNA, 12 nt, Human
gcuuuagacuug

SEQ ID NO: 3839486 - RNA, 15 nt, Human
gcuuuagacuugaaa

SEQ ID NO: 3839487 - RNA, 11 nt, Human
gcuuuagagcu

SEQ ID NO: 3839488 - RNA, 14 nt, Human
gcuuuagagcuagg

SEQ ID NO: 3839489 - RNA, 23 nt, Human
gcuuuaguccuagaggaccugag

SEQ ID NO: 3839490 - RNA, 18 nt, Human
gcuuuauauauggacaug

SEQ ID NO: 3839491 - RNA, 19 nt, Human
gcuuuauauauggacaugg

SEQ ID NO: 3839492 - RNA, 15 nt, Human
gcuuuauccucuuua

SEQ ID NO: 3839493 - RNA, 17 nt, Human
gcuuuauccucuuuaga

SEQ ID NO: 3839494 - RNA, 14 nt, Human
gcuuuaugauuuuc

SEQ ID NO: 3839495 - RNA, 16 nt, Human
gcuuuaugauuuucau

SEQ ID NO: 3839496 - RNA, 18 nt, Human
gcuuuaugauuuucauaa

SEQ ID NO: 3839497 - RNA, 20 nt, Human
gcuuuauggguguuaauuga

SEQ ID NO: 3839498 - RNA, 12 nt, Human
gcuuuauguuca

SEQ ID NO: 3839499 - RNA, 23 nt, Human
gcuuuauguucauuuguuuguuu

SEQ ID NO: 3839500 - RNA, 16 nt, Human
gcuuuauuaauguuuu

SEQ ID NO: 3839501 - RNA, 13 nt, Human
gcuuuauucuuca

SEQ ID NO: 3839502 - RNA, 17 nt, Human
gcuuuauuuguaaauuu

SEQ ID NO: 3839503 - RNA, 19 nt, Human
gcuuuauuuuuuaaguauu

SEQ ID NO: 3839504 - RNA, 18 nt, Human
gcuuucaaagcauuuaca

SEQ ID NO: 3839505 - RNA, 15 nt, Human
gcuuucaagugccuu

SEQ ID NO: 3839506 - RNA, 14 nt, Human
gcuuucagauacug

SEQ ID NO: 3839507 - RNA, 18 nt, Human
gcuuucagauacuggauu

SEQ ID NO: 3839508 - RNA, 15 nt, Human
gcuuucaggagcucc

SEQ ID NO: 3839509 - RNA, 12 nt, Human
gcuuucaugauu

SEQ ID NO: 3839510 - RNA, 12 nt, Human
gcuuucauguaa

SEQ ID NO: 3839511 - RNA, 20 nt, Human
gcuuucauguaaacugugca

SEQ ID NO: 3839512 - RNA, 17 nt, Human
gcuuucauuuucucuca

SEQ ID NO: 3839513 - RNA, 14 nt, Human
gcuuuccaaagcca

SEQ ID NO: 3839514 - RNA, 14 nt, Human
gcuuuccagcucac

SEQ ID NO: 3839515 - RNA, 21 nt, Human
gcuuuccauauuuuuuuccuu

SEQ ID NO: 3839516 - RNA, 17 nt, Human
cuuuaacucccauuacc

SEQ ID NO: 3839517 - RNA, 21 nt, Human
cuuuaacucccauuaccaugu

SEQ ID NO: 3839518 - RNA, 23 nt, Human
cuuuaacugccguaauuuaacuu

SEQ ID NO: 3839519 - RNA, 15 nt, Human
cuuuaagagagaaau

SEQ ID NO: 3839520 - RNA, 14 nt, Human
cuuuaagaggacau

SEQ ID NO: 3839521 - RNA, 20 nt, Human
cuuuaagaguuuaaaaucau

SEQ ID NO: 3839522 - RNA, 20 nt, Human
cuuuaagcacuacauaaacu

SEQ ID NO: 3839523 - RNA, 14 nt, Human
cuuuaagcagcucu

SEQ ID NO: 3839524 - RNA, 18 nt, Human
cuuuaagccuucaaaacu

SEQ ID NO: 3839525 - RNA, 20 nt, Human
cuuuaagccuucaaaacuau

SEQ ID NO: 3839526 - RNA, 12 nt, Human
cuuuaaggaaaa

SEQ ID NO: 3839527 - RNA, 20 nt, Human
cuuuaagggcaugccuugug

SEQ ID NO: 3839528 - RNA, 17 nt, Human
cuuuaagugcacaacau

SEQ ID NO: 3839529 - RNA, 14 nt, Human
cuuuaauauaaaug

SEQ ID NO: 3839530 - RNA, 14 nt, Human
ggaauuaaaacaau

SEQ ID NO: 3839531 - RNA, 14 nt, Human
ggaauuaaccuggu

SEQ ID NO: 3839532 - RNA, 17 nt, Human
ggaauuaaccuggugcu

SEQ ID NO: 3839533 - RNA, 19 nt, Human
ggaauuacauguaaaacau

SEQ ID NO: 3839534 - RNA, 19 nt, Human
ggaauuacgugcucugugg

SEQ ID NO: 3839535 - RNA, 20 nt, Human
ggaauuagcuuggggccagg

SEQ ID NO: 3839536 - RNA, 17 nt, Human
ggaauucuguauagauu

SEQ ID NO: 3839537 - RNA, 20 nt, Human
ggaauugacuucgacuguga

SEQ ID NO: 3839538 - RNA, 18 nt, Human
ggaauugauuugcauuga

SEQ ID NO: 3839539 - RNA, 23 nt, Human
ggaauuguggcuauccugauuau

SEQ ID NO: 3839540 - RNA, 17 nt, Human
ggaauuucccaggaccc

SEQ ID NO: 3839541 - RNA, 18 nt, Human
ggaauuucccaggacccu

SEQ ID NO: 3839542 - RNA, 23 nt, Human
ggaauuucucccagucauuuaau

SEQ ID NO: 3839543 - RNA, 19 nt, Human
ggaauuuguaaguuuaugu

SEQ ID NO: 3839544 - RNA, 19 nt, Human
ggaauuuucaucuaggauu

SEQ ID NO: 3839545 - RNA, 13 nt, Human
ggaauuuuuuugu

SEQ ID NO: 3839546 - RNA, 21 nt, Human
ggacaaaacuucuugucagac

SEQ ID NO: 3839547 - RNA, 11 nt, Human
ggacaaaauga

SEQ ID NO: 3839548 - RNA, 17 nt, Human
ggacaaaauggaauacu

SEQ ID NO: 3839549 - RNA, 15 nt, Human
ggacaaacccuucuu

SEQ ID NO: 3839550 - RNA, 13 nt, Human
ggacaaagaaccu

SEQ ID NO: 3839551 - RNA, 17 nt, Human
ggacaaaggagccugug

SEQ ID NO: 3839552 - RNA, 18 nt, Human
ggacaaaggagccuguga

SEQ ID NO: 3839553 - RNA, 17 nt, Human
ggacaaauugagacagu

SEQ ID NO: 3839554 - RNA, 20 nt, Human
ggacaaauugagacagugca

SEQ ID NO: 3839555 - RNA, 17 nt, Human
ggacaaauuuaaaacaa

SEQ ID NO: 3839556 - RNA, 21 nt, Human
ggacaacugcucccaccuccu

SEQ ID NO: 3839557 - RNA, 13 nt, Human
ggacaagagcagg

SEQ ID NO: 3839558 - RNA, 13 nt, Human
ggacaagcauggu

SEQ ID NO: 3839559 - RNA, 15 nt, Human
ggacaaggaguguga

SEQ ID NO: 3839560 - RNA, 17 nt, Human
ggacaaggugcaggcag

SEQ ID NO: 3839561 - RNA, 19 nt, Human
ggacaauaaaccuccgcca

SEQ ID NO: 3839562 - RNA, 16 nt, Human
ggacaaucaguccccu

SEQ ID NO: 3839563 - RNA, 19 nt, Human
ggacaaucaugaaauaugc

SEQ ID NO: 3839564 - RNA, 15 nt, Human
ggacaauuguuuuaa

SEQ ID NO: 3839565 - RNA, 23 nt, Human
ggacacaaaacuccgcccccagc

SEQ ID NO: 3839566 - RNA, 13 nt, Human
ggacacacaaggu

SEQ ID NO: 3839567 - RNA, 12 nt, Human
ggacacacuaau

SEQ ID NO: 3839568 - RNA, 15 nt, Human
ggacacagcucuucu

SEQ ID NO: 3839569 - RNA, 11 nt, Human
ggacacaggcc

SEQ ID NO: 3839570 - RNA, 22 nt, Human
cuuugauaauguuaaauuugua

SEQ ID NO: 3839571 - RNA, 15 nt, Human
cuuugauauuucaau

SEQ ID NO: 3839572 - RNA, 15 nt, Human
cuuugaucccuucug

SEQ ID NO: 3839573 - RNA, 18 nt, Human
cuuugaugucauauggaa

SEQ ID NO: 3839574 - RNA, 12 nt, Human
cuuugauguguu

SEQ ID NO: 3839575 - RNA, 20 nt, Human
cuuugauguuaacacauuuu

SEQ ID NO: 3839576 - RNA, 21 nt, Human
cuuugauguuaacacauuuug

SEQ ID NO: 3839577 - RNA, 14 nt, Human
cuuugauguuccuu

SEQ ID NO: 3839578 - RNA, 16 nt, Human
cuuugauuaauccaga

SEQ ID NO: 3839579 - RNA, 19 nt, Human
cuuugauuaguuuucuugu

SEQ ID NO: 3839580 - RNA, 20 nt, Human
cuuugauuaguuuucuuguu

SEQ ID NO: 3839581 - RNA, 16 nt, Human
cuuugauuauuugcau

SEQ ID NO: 3839582 - RNA, 17 nt, Human
cuuugauuauuugcaug

SEQ ID NO: 3839583 - RNA, 21 nt, Human
cuuugauuauuugcauguuau

SEQ ID NO: 3839584 - RNA, 22 nt, Human
cuuugauuauuugcauguuaug

SEQ ID NO: 3839585 - RNA, 16 nt, Human
cuuugauucacauguu

SEQ ID NO: 3839586 - RNA, 12 nt, Human
cuuugauucaua

SEQ ID NO: 3839587 - RNA, 15 nt, Human
cuuugauuccaucuc

SEQ ID NO: 3839588 - RNA, 16 nt, Human
cuuugauuccaucucc

SEQ ID NO: 3839589 - RNA, 19 nt, Human
cuuugauucuccuucagcc

SEQ ID NO: 3839590 - RNA, 22 nt, Human
cuuugauucuccuucagcccuc

SEQ ID NO: 3839591 - RNA, 23 nt, Human
cuuugauucuccuuuuaugugua

SEQ ID NO: 3839592 - RNA, 18 nt, Human
cuuugauuuacagcaagu

SEQ ID NO: 3839593 - RNA, 20 nt, Human
cuuugauuuccaaguaauau

SEQ ID NO: 3839594 - RNA, 16 nt, Human
cuuugcaaaggagcuc

SEQ ID NO: 3839595 - RNA, 21 nt, Human
cuuugcaaaguauuguaaauu

SEQ ID NO: 3839596 - RNA, 15 nt, Human
cuuugcacacuuugg

SEQ ID NO: 3839597 - RNA, 16 nt, Human
cuuugcacaggaugcu

SEQ ID NO: 3839598 - RNA, 15 nt, Human
cuuugcacauuuuga

SEQ ID NO: 3839599 - RNA, 17 nt, Human
cuuugcacgacgcccuc

SEQ ID NO: 3839600 - RNA, 18 nt, Human
cuuugcacgacgcccucu

SEQ ID NO: 3839601 - RNA, 15 nt, Human
cuuugcagaaacaga

SEQ ID NO: 3839602 - RNA, 14 nt, Human
cuuugcagacaggc

SEQ ID NO: 3839603 - RNA, 22 nt, Human
cuuugcagccggcacagggucu

SEQ ID NO: 3839604 - RNA, 14 nt, Human
cuuugcaggaaauc

SEQ ID NO: 3839605 - RNA, 13 nt, Human
cuuugcaggcuca

SEQ ID NO: 3839606 - RNA, 14 nt, Human
cuuugcagggcagc

SEQ ID NO: 3839607 - RNA, 18 nt, Human
cuuugcauaugagccgug

SEQ ID NO: 3839608 - RNA, 17 nt, Human
cuuugcaucguccccuc

SEQ ID NO: 3839609 - RNA, 22 nt, Human
cuuugcaucucaguaugaauua

SEQ ID NO: 3839610 - RNA, 21 nt, Human
cuuugcauggagacuugagga

SEQ ID NO: 3839611 - RNA, 17 nt, Human
cuuugcauggauuucuu

SEQ ID NO: 3839612 - RNA, 22 nt, Human
cuuugcauggauuucuuugaaa

SEQ ID NO: 3839613 - RNA, 14 nt, Human
cuuugcauuuggaa

SEQ ID NO: 3839614 - RNA, 22 nt, Human
cuuugcauuuggaauuuuugcu

SEQ ID NO: 3839615 - RNA, 22 nt, Human
cuuugcauuuuaaaaaugaaau

SEQ ID NO: 3839616 - RNA, 17 nt, Human
cuuugccaagaccuuuc

SEQ ID NO: 3839617 - RNA, 18 nt, Human
cuuugccagaaagcauaa

SEQ ID NO: 3839618 - RNA, 18 nt, Human
cuuugccagcugcugcug

SEQ ID NO: 3839619 - RNA, 20 nt, Human
cuuugccagcuuuuccuccc

SEQ ID NO: 3839620 - RNA, 19 nt, Human
cuuugccagucauucagca

SEQ ID NO: 3839621 - RNA, 19 nt, Human
cuuugccaucucugcucca

SEQ ID NO: 3839622 - RNA, 15 nt, Human
cuuugccaugugcuu

SEQ ID NO: 3839623 - RNA, 19 nt, Human
cuuugcccaacaccagccc

SEQ ID NO: 3839624 - RNA, 22 nt, Human
cuuugcccaacaccagccccug

SEQ ID NO: 3839625 - RNA, 14 nt, Human
cuuugcccacaaug

SEQ ID NO: 3839626 - RNA, 20 nt, Human
cuuugcccugcugcccuccc

SEQ ID NO: 3839627 - RNA, 22 nt, Human
cuuugcccugcugcccuccccc

SEQ ID NO: 3839628 - RNA, 16 nt, Human
cuuugcccuucuuucu

SEQ ID NO: 3839629 - RNA, 12 nt, Human
cuuugccucaaa

SEQ ID NO: 3839630 - RNA, 12 nt, Human
cuuugccuccag

SEQ ID NO: 3839631 - RNA, 22 nt, Human
cuuugccuuccacgcugucucc

SEQ ID NO: 3839632 - RNA, 23 nt, Human
cuuugccuuccacgcugucucca

SEQ ID NO: 3839633 - RNA, 16 nt, Human
cuuugccuugggcugc

SEQ ID NO: 3839634 - RNA, 12 nt, Human
cuuugccuuugc

SEQ ID NO: 3839635 - RNA, 15 nt, Human
cuuugcgcuccuggc

SEQ ID NO: 3839636 - RNA, 22 nt, Human
cuuugcgcuccuggcccagccu

SEQ ID NO: 3839637 - RNA, 17 nt, Human
cuuugcgugcccggggc

SEQ ID NO: 3839638 - RNA, 21 nt, Human
cuuugcgugcccggggcagca

SEQ ID NO: 3839639 - RNA, 11 nt, Human
cuuugcucuga

SEQ ID NO: 3839640 - RNA, 16 nt, Human
cuuugcucuuguccca

SEQ ID NO: 3839641 - RNA, 14 nt, Human
cuuugcucuuucuu

SEQ ID NO: 3839642 - RNA, 13 nt, Human
cuuugcugacccu

SEQ ID NO: 3839643 - RNA, 23 nt, Human
cuuugcugacccuccccaaaggc

SEQ ID NO: 3839644 - RNA, 18 nt, Human
cuuugcugagccuguaaa

SEQ ID NO: 3839645 - RNA, 11 nt, Human
cuuugcugcua

SEQ ID NO: 3839646 - RNA, 18 nt, Human
cuuugcuguaagaugucu

SEQ ID NO: 3839647 - RNA, 19 nt, Human
cuuugcuguaagaugucug

SEQ ID NO: 3839648 - RNA, 20 nt, Human
cuuugcuguaagaugucugu

SEQ ID NO: 3839649 - RNA, 14 nt, Human
cuuugcugucccau

SEQ ID NO: 3839650 - RNA, 23 nt, Human
cuuugcugucccauagucccugc

SEQ ID NO: 3839651 - RNA, 12 nt, Human
cuuugcuucauu

SEQ ID NO: 3839652 - RNA, 23 nt, Human
cuuugcuucauucaagucagcuc

SEQ ID NO: 3839653 - RNA, 15 nt, Human
cuuugcuucccauug

SEQ ID NO: 3839654 - RNA, 17 nt, Human
cuuugcuugaacacagu

SEQ ID NO: 3839655 - RNA, 19 nt, Human
cuuugcuugaacacaguau

SEQ ID NO: 3839656 - RNA, 17 nt, Human
cuuugcuugccucucug

SEQ ID NO: 3839657 - RNA, 12 nt, Human
cuuugcuugcuu

SEQ ID NO: 3839658 - RNA, 18 nt, Human
cuuugcuugcuuugaagu

SEQ ID NO: 3839659 - RNA, 11 nt, Human
cuuugcuuugc

SEQ ID NO: 3839660 - RNA, 16 nt, Human
cuuugcuuugcccagc

SEQ ID NO: 3839661 - RNA, 17 nt, Human
cuuugcuuugcuuucug

SEQ ID NO: 3839662 - RNA, 18 nt, Human
cuuuggaaaaauguuugu

SEQ ID NO: 3839663 - RNA, 20 nt, Human
cuuuggaaaaugcauuguau

SEQ ID NO: 3839664 - RNA, 12 nt, Human
cuuuggaaagac

SEQ ID NO: 3839665 - RNA, 23 nt, Human
cuuuggaaagacuuuuccaaccc

SEQ ID NO: 3839666 - RNA, 22 nt, Human
cuuuggaaaguacacucugcug

SEQ ID NO: 3839667 - RNA, 12 nt, Human
cuuuggaagcag

SEQ ID NO: 3839668 - RNA, 17 nt, Human
cuuuggaaggagugaga

SEQ ID NO: 3839669 - RNA, 20 nt, Human
cuuuggaaguuuagcucuga

SEQ ID NO: 3839670 - RNA, 21 nt, Human
cuuuggaaguuuagcucugag

SEQ ID NO: 3839671 - RNA, 19 nt, Human
cuuuggacagaagcagcuc

SEQ ID NO: 3839672 - RNA, 17 nt, Human
cuuuggacccugaggcc

SEQ ID NO: 3839673 - RNA, 12 nt, Human
cuuuggacuugu

SEQ ID NO: 3839674 - RNA, 23 nt, Human
cuuuggagaucaaggagaggagg

SEQ ID NO: 3839675 - RNA, 18 nt, Human
ggcaucagucccuaugua

SEQ ID NO: 3839676 - RNA, 20 nt, Human
ggcaucaucaauaaaacagu

SEQ ID NO: 3839677 - RNA, 17 nt, Human
ggcaucaucucagcuca

SEQ ID NO: 3839678 - RNA, 23 nt, Human
ggcaucaugcaucuuacugaagg

SEQ ID NO: 3839679 - RNA, 12 nt, Human
ggcaucauucca

SEQ ID NO: 3839680 - RNA, 22 nt, Human
ggcauccagagucccugccugg

SEQ ID NO: 3839681 - RNA, 18 nt, Human
ggcauccaguaucuugaa

SEQ ID NO: 3839682 - RNA, 21 nt, Human
ggcaucccaguggccucaacc

SEQ ID NO: 3839683 - RNA, 14 nt, Human
ggcaucccugggcc

SEQ ID NO: 3839684 - RNA, 13 nt, Human
ggcauccugugaa

SEQ ID NO: 3839685 - RNA, 16 nt, Human
ggcauccuucugccuu

SEQ ID NO: 3839686 - RNA, 22 nt, Human
ggcaucuagagcuugaugccag

SEQ ID NO: 3839687 - RNA, 18 nt, Human
ggcaucuaucugugcuag

SEQ ID NO: 3839688 - RNA, 12 nt, Human
ggcaucuccagg

SEQ ID NO: 3839689 - RNA, 21 nt, Human
ggcaucuccugugcaugggug

SEQ ID NO: 3839690 - RNA, 18 nt, Human
ggcaucucuaauuggaag

SEQ ID NO: 3839691 - RNA, 12 nt, Human
ggcaucucuggg

SEQ ID NO: 3839692 - RNA, 17 nt, Human
ggcaucucugggcugga

SEQ ID NO: 3839693 - RNA, 17 nt, Human
ggcaucugacacaaaaa

SEQ ID NO: 3839694 - RNA, 19 nt, Human
ggcaucugccccuccccca

SEQ ID NO: 3839695 - RNA, 13 nt, Human
ggcaucuggccuu

SEQ ID NO: 3839696 - RNA, 15 nt, Human
ggcaucuugcuggcu

SEQ ID NO: 3839697 - RNA, 17 nt, Human
ggcaucuuugccuuggg

SEQ ID NO: 3839698 - RNA, 19 nt, Human
ggcaucuuugccuugggcu

SEQ ID NO: 3839699 - RNA, 13 nt, Human
ggcaucuuugggg

SEQ ID NO: 3839700 - RNA, 13 nt, Human
ggcaugagaaaua

SEQ ID NO: 3839701 - RNA, 14 nt, Human
ggcaugagggauca

SEQ ID NO: 3839702 - RNA, 21 nt, Human
ggcaugaguuacugugcauug

SEQ ID NO: 3839703 - RNA, 15 nt, Human
ggcaugaugcgggcc

SEQ ID NO: 3839704 - RNA, 14 nt, Human
ggcaugcaccugca

SEQ ID NO: 3839705 - RNA, 18 nt, Human
ggcaugccccggccaccu

SEQ ID NO: 3839706 - RNA, 23 nt, Human
ggcaugccucugauaugggacug

SEQ ID NO: 3839707 - RNA, 13 nt, Human
ggcaugccugugu

SEQ ID NO: 3839708 - RNA, 16 nt, Human
ggcaugccugugugac

SEQ ID NO: 3839709 - RNA, 14 nt, Human
ggcaugcuggggca

SEQ ID NO: 3839710 - RNA, 12 nt, Human
ggcauggaaauu

SEQ ID NO: 3839711 - RNA, 16 nt, Human
ggcauggcccugggcg

SEQ ID NO: 3839712 - RNA, 16 nt, Human
ggcauggcccuggggu

SEQ ID NO: 3839713 - RNA, 14 nt, Human
ggcauggcugggaa

SEQ ID NO: 3839714 - RNA, 21 nt, Human
ggcauggcuuuauuuguuuuu

SEQ ID NO: 3839715 - RNA, 20 nt, Human
ggcauggggugggccucugg

SEQ ID NO: 3839716 - RNA, 19 nt, Human
ggcaugguacggagauguu

SEQ ID NO: 3839717 - RNA, 19 nt, Human
ggcaugguauuugagacau

SEQ ID NO: 3839718 - RNA, 15 nt, Human
ggcauggucugcccu

SEQ ID NO: 3839719 - RNA, 18 nt, Human
ggcaugguuuugugccau

SEQ ID NO: 3839720 - RNA, 16 nt, Human
ggcauguaggacccug

SEQ ID NO: 3839721 - RNA, 18 nt, Human
ggcauguauuggccugga

SEQ ID NO: 3839722 - RNA, 21 nt, Human
ggcaugugccuauagucccag

SEQ ID NO: 3839723 - RNA, 19 nt, Human
ggcauguggccuguggccu

SEQ ID NO: 3839724 - RNA, 14 nt, Human
ggcaugugggcuuc

SEQ ID NO: 3839725 - RNA, 23 nt, Human
ggcauguguuuacuuuauguuac

SEQ ID NO: 3839726 - RNA, 14 nt, Human
ggcauguuccucug

SEQ ID NO: 3839727 - RNA, 23 nt, Human
ggcauguucucugaggacacuaa

SEQ ID NO: 3839728 - RNA, 17 nt, Human
ggcauuagaauuauuua

SEQ ID NO: 3839729 - RNA, 18 nt, Human
ggcauuccccaggaggcc

SEQ ID NO: 3839730 - RNA, 19 nt, Human
ggcauucuggaccucuggg

SEQ ID NO: 3839731 - RNA, 20 nt, Human
ggcauucuggaccucugggu

SEQ ID NO: 3839732 - RNA, 14 nt, Human
ggcauucuuguaca

SEQ ID NO: 3839733 - RNA, 20 nt, Human
ggcauugacaaaucugugua

SEQ ID NO: 3839734 - RNA, 18 nt, Human
ggcauuggcagcaggugc

SEQ ID NO: 3839735 - RNA, 17 nt, Human
cuuuguauacuuuaaau

SEQ ID NO: 3839736 - RNA, 19 nt, Human
cuuuguauacuuuaaauaa

SEQ ID NO: 3839737 - RNA, 13 nt, Human
cuuuguauauuac

SEQ ID NO: 3839738 - RNA, 15 nt, Human
cuuuguauauuauuu

SEQ ID NO: 3839739 - RNA, 14 nt, Human
cuuuguaugauauu

SEQ ID NO: 3839740 - RNA, 15 nt, Human
cuuuguaugauauuc

SEQ ID NO: 3839741 - RNA, 22 nt, Human
cuuuguauucucuccuguaccu

SEQ ID NO: 3839742 - RNA, 22 nt, Human
cuuuguauuguauauuacaaug

SEQ ID NO: 3839743 - RNA, 17 nt, Human
cuuuguauuuugauuau

SEQ ID NO: 3839744 - RNA, 18 nt, Human
cuuuguauuuugauuauu

SEQ ID NO: 3839745 - RNA, 23 nt, Human
cuuuguauuuuuacuuuuaaaug

SEQ ID NO: 3839746 - RNA, 14 nt, Human
cuuugucaaaagga

SEQ ID NO: 3839747 - RNA, 18 nt, Human
cuuugucaucuuucuucu

SEQ ID NO: 3839748 - RNA, 15 nt, Human
cuuuguccccaccgc

SEQ ID NO: 3839749 - RNA, 14 nt, Human
cuuuguccccugcu

SEQ ID NO: 3839750 - RNA, 15 nt, Human
cuuuguccccugcuu

SEQ ID NO: 3839751 - RNA, 16 nt, Human
cuuuguccccugcuuc

SEQ ID NO: 3839752 - RNA, 13 nt, Human
cuuuguccuccug

SEQ ID NO: 3839753 - RNA, 18 nt, Human
cuuuguccuccugcugcc

SEQ ID NO: 3839754 - RNA, 21 nt, Human
cuuuguccuccugcugccagu

SEQ ID NO: 3839755 - RNA, 19 nt, Human
cuuugucuaaaacaauaaa

SEQ ID NO: 3839756 - RNA, 17 nt, Human
cuuugucuaagaaacau

SEQ ID NO: 3839757 - RNA, 18 nt, Human
cuuugucuaagaaacauu

SEQ ID NO: 3839758 - RNA, 21 nt, Human
cuuugucuaagaaacauugga

SEQ ID NO: 3839759 - RNA, 23 nt, Human
cuuugucuaagaaacauuggaag

SEQ ID NO: 3839760 - RNA, 23 nt, Human
cuuugucuacaccauuaugugcg

SEQ ID NO: 3839761 - RNA, 14 nt, Human
cuuugucuuucaaa

SEQ ID NO: 3839762 - RNA, 22 nt, Human
cuuugugaauagaacucugaaa

SEQ ID NO: 3839763 - RNA, 15 nt, Human
cuuugugaggaagcc

SEQ ID NO: 3839764 - RNA, 23 nt, Human
cuuugugaggaagccgcuggggc

SEQ ID NO: 3839765 - RNA, 13 nt, Human
cuuugugauaauu

SEQ ID NO: 3839766 - RNA, 16 nt, Human
cuuugugauaauuuaa

SEQ ID NO: 3839767 - RNA, 23 nt, Human
cuuugugauucaaucuguaaacu

SEQ ID NO: 3839768 - RNA, 17 nt, Human
cuuugugauuuuuguaa

SEQ ID NO: 3839769 - RNA, 16 nt, Human
cuuugugcacauuuau

SEQ ID NO: 3839770 - RNA, 23 nt, Human
cuuugugcacauuuauuuccucc

SEQ ID NO: 3839771 - RNA, 13 nt, Human
cuuugugcccuau

SEQ ID NO: 3839772 - RNA, 17 nt, Human
cuuugugcuguggggcu

SEQ ID NO: 3839773 - RNA, 16 nt, Human
cuuuguggaugucuuc

SEQ ID NO: 3839774 - RNA, 20 nt, Human
cuuuguggaugucuuccuug

SEQ ID NO: 3839775 - RNA, 11 nt, Human
cuuuguggcca

SEQ ID NO: 3839776 - RNA, 13 nt, Human
cuuuguggccaag

SEQ ID NO: 3839777 - RNA, 22 nt, Human
cuuuguggccaaggagcugcua

SEQ ID NO: 3839778 - RNA, 15 nt, Human
cuuuguggugagaau

SEQ ID NO: 3839779 - RNA, 22 nt, Human
cuuuguguauuuuucaauaaua

SEQ ID NO: 3839780 - RNA, 15 nt, Human
cuuuguguguguguc

SEQ ID NO: 3839781 - RNA, 20 nt, Human
cuuugugugugugucagcug

SEQ ID NO: 3839782 - RNA, 15 nt, Human
cuuuguguuguaauu

SEQ ID NO: 3839783 - RNA, 22 nt, Human
cuuuguguuguaauucuucagu

SEQ ID NO: 3839784 - RNA, 14 nt, Human
cuuuguguuucuau

SEQ ID NO: 3839785 - RNA, 17 nt, Human
cuuuguguuugguuuac

SEQ ID NO: 3839786 - RNA, 18 nt, Human
cuuuguguuugguuuaca

SEQ ID NO: 3839787 - RNA, 20 nt, Human
cuuuguguuugguuuacauu

SEQ ID NO: 3839788 - RNA, 21 nt, Human
cuuuguguuugguuuacauuu

SEQ ID NO: 3839789 - RNA, 18 nt, Human
cuuuguuaagacugcuga

SEQ ID NO: 3839790 - RNA, 13 nt, Human
cuuuguuacacug

SEQ ID NO: 3839791 - RNA, 18 nt, Human
cuuuguuaguuucuccaa

SEQ ID NO: 3839792 - RNA, 16 nt, Human
cuuuguuccccacugg

SEQ ID NO: 3839793 - RNA, 20 nt, Human
cuuuguucugcuguucucua

SEQ ID NO: 3839794 - RNA, 16 nt, Human
cuuuguucuggcucuu

SEQ ID NO: 3839795 - RNA, 17 nt, Human
cuuuguugaacuguuag

SEQ ID NO: 3839796 - RNA, 21 nt, Human
cuuuguugcaaguacugcugu

SEQ ID NO: 3839797 - RNA, 20 nt, Human
cuuuguugcucagcaagggg

SEQ ID NO: 3839798 - RNA, 13 nt, Human
cuuuguugugugc

SEQ ID NO: 3839799 - RNA, 19 nt, Human
cuuuguuuagucuuuauac

SEQ ID NO: 3839800 - RNA, 16 nt, Human
cuuuguuucuccccca

SEQ ID NO: 3839801 - RNA, 15 nt, Human
cuuuguuucuuguuu

SEQ ID NO: 3839802 - RNA, 15 nt, Human
cuuuguuuggcuggg

SEQ ID NO: 3839803 - RNA, 15 nt, Human
cuuuguuuguucuug

SEQ ID NO: 3839804 - RNA, 21 nt, Human
cuuuguuuguucuuguuuuua

SEQ ID NO: 3839805 - RNA, 15 nt, Human
cuuuguuuuauuuuc

SEQ ID NO: 3839806 - RNA, 19 nt, Human
cuuuguuuugcacacuuug

SEQ ID NO: 3839807 - RNA, 18 nt, Human
cuuuguuuugugucucuu

SEQ ID NO: 3839808 - RNA, 23 nt, Human
cuuuguuuuuuuuuccuguccuu

SEQ ID NO: 3839809 - RNA, 15 nt, Human
cuuuuaaaaaguauu

SEQ ID NO: 3839810 - RNA, 16 nt, Human
cuuuuaaaaaguauug

SEQ ID NO: 3839811 - RNA, 21 nt, Human
cuuuuaaaaaguauugccaaa

SEQ ID NO: 3839812 - RNA, 23 nt, Human
cuuuuaaaaaguauugccaaaca

SEQ ID NO: 3839813 - RNA, 19 nt, Human
cuuuuaaaacuacuuagca

SEQ ID NO: 3839814 - RNA, 22 nt, Human
cuuuuaaaagacaagacuucag

SEQ ID NO: 3839815 - RNA, 17 nt, Human
cuuuuaaaccauuuucu

SEQ ID NO: 3839816 - RNA, 11 nt, Human
cuuuuaaacuc

SEQ ID NO: 3839817 - RNA, 12 nt, Human
cuuuuaaacugu

SEQ ID NO: 3839818 - RNA, 15 nt, Human
cuuuuaaagaaaaaa

SEQ ID NO: 3839819 - RNA, 22 nt, Human
cuuuuaaagaaaaaaauugaaa

SEQ ID NO: 3839820 - RNA, 14 nt, Human
gaaaaagaaaauaa

SEQ ID NO: 3839821 - RNA, 13 nt, Human
gaaaaagaaaugc

SEQ ID NO: 3839822 - RNA, 15 nt, Human
gaaaaagacauucag

SEQ ID NO: 3839823 - RNA, 20 nt, Human
gaaaaagacuuuaaaaguga

SEQ ID NO: 3839824 - RNA, 16 nt, Human
gaaaaagcacaagaag

SEQ ID NO: 3839825 - RNA, 13 nt, Human
gaaaaagcaugua

SEQ ID NO: 3839826 - RNA, 16 nt, Human
gaaaaagcauguacag

SEQ ID NO: 3839827 - RNA, 13 nt, Human
gaaaaagcgaaaa

SEQ ID NO: 3839828 - RNA, 12 nt, Human
gaaaaaggagga

SEQ ID NO: 3839829 - RNA, 17 nt, Human
gaaaaaggaugcacaga

SEQ ID NO: 3839830 - RNA, 23 nt, Human
gaaaaaggaugcacagaguuguu

SEQ ID NO: 3839831 - RNA, 15 nt, Human
gaaaaaggcugugcu

SEQ ID NO: 3839832 - RNA, 16 nt, Human
gaaaaaggcugugcug

SEQ ID NO: 3839833 - RNA, 12 nt, Human
gaaaaaguaacu

SEQ ID NO: 3839834 - RNA, 13 nt, Human
gaaaaauaaagaa

SEQ ID NO: 3839835 - RNA, 14 nt, Human
gaaaaauaaagaaa

SEQ ID NO: 3839836 - RNA, 17 nt, Human
gaaaaauagugucuuug

SEQ ID NO: 3839837 - RNA, 11 nt, Human
gaaaaauauga

SEQ ID NO: 3839838 - RNA, 16 nt, Human
gaaaaauauguaccaa

SEQ ID NO: 3839839 - RNA, 15 nt, Human
gaaaaauaugugaag

SEQ ID NO: 3839840 - RNA, 16 nt, Human
gaaaaauaugugaagg

SEQ ID NO: 3839841 - RNA, 15 nt, Human
gaaaaauauuuaaug

SEQ ID NO: 3839842 - RNA, 19 nt, Human
gaaaaaucacauccuggcc

SEQ ID NO: 3839843 - RNA, 21 nt, Human
gaaaaaucacuugauucauaa

SEQ ID NO: 3839844 - RNA, 18 nt, Human
gaaaaauccucuuccucu

SEQ ID NO: 3839845 - RNA, 19 nt, Human
gaaaaaucgcgaguguuuc

SEQ ID NO: 3839846 - RNA, 22 nt, Human
gaaaaaucuugugcuagaauac

SEQ ID NO: 3839847 - RNA, 17 nt, Human
gaaaaaugaaagaugau

SEQ ID NO: 3839848 - RNA, 18 nt, Human
gaaaaaugagagaaggga

SEQ ID NO: 3839849 - RNA, 16 nt, Human
gaaaaaugagccuggc

SEQ ID NO: 3839850 - RNA, 17 nt, Human
gaaaaaugcuccccaca

SEQ ID NO: 3839851 - RNA, 22 nt, Human
gaaaaauggauccccagugaaa

SEQ ID NO: 3839852 - RNA, 17 nt, Human
gaaaaauguaggagacu

SEQ ID NO: 3839853 - RNA, 20 nt, Human
gaaaaauguguauuuuaaga

SEQ ID NO: 3839854 - RNA, 16 nt, Human
gaaaaauguuaggaca

SEQ ID NO: 3839855 - RNA, 20 nt, Human
gaaaaauucagcaaaccauu

SEQ ID NO: 3839856 - RNA, 16 nt, Human
gaaaaauuggggagga

SEQ ID NO: 3839857 - RNA, 16 nt, Human
gaaaaauuuaagcauu

SEQ ID NO: 3839858 - RNA, 15 nt, Human
gaaaaauuucacgau

SEQ ID NO: 3839859 - RNA, 18 nt, Human
gaaaacaacaaaaaauaa

SEQ ID NO: 3839860 - RNA, 12 nt, Human
gaaaacaaggaa

SEQ ID NO: 3839861 - RNA, 14 nt, Human
gaaaacaaggauga

SEQ ID NO: 3839862 - RNA, 12 nt, Human
gaaaacaaugca

SEQ ID NO: 3839863 - RNA, 13 nt, Human
gaaaacacauuuu

SEQ ID NO: 3839864 - RNA, 17 nt, Human
gaaaacacccagggaac

SEQ ID NO: 3839865 - RNA, 14 nt, Human
gaaaacacugugca

SEQ ID NO: 3839866 - RNA, 21 nt, Human
gaaaacacugugcacaucugu

SEQ ID NO: 3839867 - RNA, 18 nt, Human
gaaaacacuguucucugc

SEQ ID NO: 3839868 - RNA, 20 nt, Human
gaaaacacuguucucugccc

SEQ ID NO: 3839869 - RNA, 22 nt, Human
gaaaacacuguucucugcccuc

SEQ ID NO: 3839870 - RNA, 14 nt, Human
gaaaacagaaauug

SEQ ID NO: 3839871 - RNA, 15 nt, Human
gaaaacagaacacuu

SEQ ID NO: 3839872 - RNA, 17 nt, Human
gaaaacagacucagguu

SEQ ID NO: 3839873 - RNA, 21 nt, Human
gaaaacaggaaaaaaacuuuu

SEQ ID NO: 3839874 - RNA, 21 nt, Human
gaaaacagucaaccaacccca

SEQ ID NO: 3839875 - RNA, 18 nt, Human
gaaaacaguguguaaaca

SEQ ID NO: 3839876 - RNA, 23 nt, Human
gaaaacaucucaucaugucuauu

SEQ ID NO: 3839877 - RNA, 14 nt, Human
gaaaacaugcagaa

SEQ ID NO: 3839878 - RNA, 16 nt, Human
gaaaacaugcuacaca

SEQ ID NO: 3839879 - RNA, 18 nt, Human
gaaaacaugcuacacacu

SEQ ID NO: 3839880 - RNA, 14 nt, Human
gaaaacauguuaau

SEQ ID NO: 3839881 - RNA, 21 nt, Human
gaaaaccaaaaugacaucuuu

SEQ ID NO: 3839882 - RNA, 13 nt, Human
gaaaaccaaacaa

SEQ ID NO: 3839883 - RNA, 15 nt, Human
gaaaaccaacaccau

SEQ ID NO: 3839884 - RNA, 21 nt, Human
gaaaaccaacaccaucacagc

SEQ ID NO: 3839885 - RNA, 18 nt, Human
gaaaaccaagccguggcu

SEQ ID NO: 3839886 - RNA, 21 nt, Human
gaaaaccaagccguggcuucc

SEQ ID NO: 3839887 - RNA, 20 nt, Human
gaaaaccagcucagcacugc

SEQ ID NO: 3839888 - RNA, 16 nt, Human
gaaaaccaucacauga

SEQ ID NO: 3839889 - RNA, 19 nt, Human
gaaaaccaucuggccuggc

SEQ ID NO: 3839890 - RNA, 21 nt, Human
gaaaaccaucuggccuggccu

SEQ ID NO: 3839891 - RNA, 15 nt, Human
gaaaacccagagagg

SEQ ID NO: 3839892 - RNA, 17 nt, Human
gaaaacccuugggccag

SEQ ID NO: 3839893 - RNA, 22 nt, Human
gaaaacccuugggccagaagua

SEQ ID NO: 3839894 - RNA, 13 nt, Human
gaaaacggagcug

SEQ ID NO: 3839895 - RNA, 17 nt, Human
gaaaacgguuaaaacug

SEQ ID NO: 3839896 - RNA, 18 nt, Human
gaaaacguuuuauugugu

SEQ ID NO: 3839897 - RNA, 19 nt, Human
gaaaacguuuuauuguguu

SEQ ID NO: 3839898 - RNA, 20 nt, Human
gaaaacguuuuauuguguuu

SEQ ID NO: 3839899 - RNA, 14 nt, Human
gaaaacuauacaac

SEQ ID NO: 3839900 - RNA, 16 nt, Human
gaaaacucuuugcugc

SEQ ID NO: 3839901 - RNA, 16 nt, Human
gaaaacugaaaaucua

SEQ ID NO: 3839902 - RNA, 20 nt, Human
gaaaacugaaaaucuaauau

SEQ ID NO: 3839903 - RNA, 19 nt, Human
gaaaacugcaacuuguaaa

SEQ ID NO: 3839904 - RNA, 23 nt, Human
gaaaacuuaugaccucuuccuuu

SEQ ID NO: 3839905 - RNA, 15 nt, Human
gaaaacuuauuugag

SEQ ID NO: 3839906 - RNA, 13 nt, Human
gaaaacuuauuuu

SEQ ID NO: 3839907 - RNA, 20 nt, Human
gaaaacuugaauucauagaa

SEQ ID NO: 3839908 - RNA, 21 nt, Human
gaaaacuugaauucauagaaa

SEQ ID NO: 3839909 - RNA, 22 nt, Human
gaaaacuugugugaaauuuucu

SEQ ID NO: 3839910 - RNA, 13 nt, Human
gaaaacuuuguua

SEQ ID NO: 3839911 - RNA, 9 nt, Human
gaaaagaaa

SEQ ID NO: 3839912 - RNA, 11 nt, Human
gaaaagaaaaa

SEQ ID NO: 3839913 - RNA, 12 nt, Human
gaaaagaaaaaa

SEQ ID NO: 3839914 - RNA, 22 nt, Human
gaaaagaaaccccaaacucagg

SEQ ID NO: 3839915 - RNA, 14 nt, Human
gaaaagaaacucua

SEQ ID NO: 3839916 - RNA, 15 nt, Human
gaaaagaaguagugu

SEQ ID NO: 3839917 - RNA, 18 nt, Human
gaaaagaauacagaaaga

SEQ ID NO: 3839918 - RNA, 16 nt, Human
gaaaagagaagaagaa

SEQ ID NO: 3839919 - RNA, 15 nt, Human
gaaaagagauauuuu

SEQ ID NO: 3839920 - RNA, 21 nt, Human
gaaaagaggaguuucgaggua

SEQ ID NO: 3839921 - RNA, 19 nt, Human
gaaaagauacgacuuuauu

SEQ ID NO: 3839922 - RNA, 22 nt, Human
gaaaagauacgacuuuauuuuc

SEQ ID NO: 3839923 - RNA, 20 nt, Human
gaaaagauguaccuggugga

SEQ ID NO: 3839924 - RNA, 19 nt, Human
gaaaagauguagauuuauu

SEQ ID NO: 3839925 - RNA, 21 nt, Human
gaaaagauguagauuuauuuc

SEQ ID NO: 3839926 - RNA, 13 nt, Human
gaaaagauuuuaa

SEQ ID NO: 3839927 - RNA, 16 nt, Human
gaaaagcaccugccga

SEQ ID NO: 3839928 - RNA, 17 nt, Human
gaaaagcaccugccgac

SEQ ID NO: 3839929 - RNA, 15 nt, Human
gaaaagcagacauuu

SEQ ID NO: 3839930 - RNA, 20 nt, Human
gaaaagcagcccuuggccag

SEQ ID NO: 3839931 - RNA, 14 nt, Human
gaaaagcagcucuc

SEQ ID NO: 3839932 - RNA, 19 nt, Human
gaaaagcaguucuggaugg

SEQ ID NO: 3839933 - RNA, 16 nt, Human
gaaaagccauguuuaa

SEQ ID NO: 3839934 - RNA, 21 nt, Human
gaaaagccauguuuaagauuu

SEQ ID NO: 3839935 - RNA, 21 nt, Human
gaaaagccucugugucacugg

SEQ ID NO: 3839936 - RNA, 19 nt, Human
gaaaagccucuguuuugau

SEQ ID NO: 3839937 - RNA, 20 nt, Human
gaaaagcggacaucagcugg

SEQ ID NO: 3839938 - RNA, 11 nt, Human
gaaaagcuauu

SEQ ID NO: 3839939 - RNA, 14 nt, Human
gaaaagcuauuagc

SEQ ID NO: 3839940 - RNA, 14 nt, Human
gaaaagcugaaucc

SEQ ID NO: 3839941 - RNA, 13 nt, Human
gaaaagcugcuga

SEQ ID NO: 3839942 - RNA, 19 nt, Human
ggagguugaucagaucuga

SEQ ID NO: 3839943 - RNA, 12 nt, Human
ggagguugcagg

SEQ ID NO: 3839944 - RNA, 17 nt, Human
ggagguugcagggagcc

SEQ ID NO: 3839945 - RNA, 20 nt, Human
ggagguuuaggucaagaaga

SEQ ID NO: 3839946 - RNA, 20 nt, Human
ggaguagaccccuggcuggu

SEQ ID NO: 3839947 - RNA, 17 nt, Human
ggaguagcugagcucac

SEQ ID NO: 3839948 - RNA, 13 nt, Human
ggagucacacagu

SEQ ID NO: 3839949 - RNA, 22 nt, Human
ggagucaccuucccuugccacu

SEQ ID NO: 3839950 - RNA, 15 nt, Human
ggagucacugagacc

SEQ ID NO: 3839951 - RNA, 19 nt, Human
ggagucagccaggagcugu

SEQ ID NO: 3839952 - RNA, 15 nt, Human
ggagucagugccagg

SEQ ID NO: 3839953 - RNA, 23 nt, Human
ggagucaucucaaccauccccuc

SEQ ID NO: 3839954 - RNA, 17 nt, Human
ggagucccaaggaaagc

SEQ ID NO: 3839955 - RNA, 20 nt, Human
ggagucccaccuuggcugca

SEQ ID NO: 3839956 - RNA, 21 nt, Human
ggaguccccuccccggcccua

SEQ ID NO: 3839957 - RNA, 23 nt, Human
ggaguccccuccccggcccuacc

SEQ ID NO: 3839958 - RNA, 16 nt, Human
ggagucccgucaggac

SEQ ID NO: 3839959 - RNA, 15 nt, Human
ggagucugaagcaga

SEQ ID NO: 3839960 - RNA, 20 nt, Human
ggagucugagguccugagca

SEQ ID NO: 3839961 - RNA, 18 nt, Human
ggagucuguccugugacg

SEQ ID NO: 3839962 - RNA, 18 nt, Human
ggagugaagaggggcagc

SEQ ID NO: 3839963 - RNA, 23 nt, Human
ggagugaagaggggcagcccuug

SEQ ID NO: 3839964 - RNA, 21 nt, Human
ggagugaguugauagcacaga

SEQ ID NO: 3839965 - RNA, 20 nt, Human
ggaugauccccacgccacag

SEQ ID NO: 3839966 - RNA, 16 nt, Human
ggaugaucuaggaaga

SEQ ID NO: 3839967 - RNA, 18 nt, Human
ggaugaucuaggaagacu

SEQ ID NO: 3839968 - RNA, 18 nt, Human
ggaugaugacuauggaaa

SEQ ID NO: 3839969 - RNA, 14 nt, Human
ggaugaugccacac

SEQ ID NO: 3839970 - RNA, 21 nt, Human
ggaugcaacacgcauggucaa

SEQ ID NO: 3839971 - RNA, 17 nt, Human
ggaugcagccucacagu

SEQ ID NO: 3839972 - RNA, 22 nt, Human
ggaugcagugcucgcuguugcu

SEQ ID NO: 3839973 - RNA, 16 nt, Human
ggaugcauggagauag

SEQ ID NO: 3839974 - RNA, 21 nt, Human
ggaugcauguuuuccagcucc

SEQ ID NO: 3839975 - RNA, 19 nt, Human
ggaugccaagaaguuuaag

SEQ ID NO: 3839976 - RNA, 19 nt, Human
ggaugcccaaagaugcagc

SEQ ID NO: 3839977 - RNA, 17 nt, Human
ggaugccccgucccccu

SEQ ID NO: 3839978 - RNA, 21 nt, Human
ggaugcccuggagguggcuga

SEQ ID NO: 3839979 - RNA, 13 nt, Human
ggaugccuggugg

SEQ ID NO: 3839980 - RNA, 17 nt, Human
ggaugccugguggcagc

SEQ ID NO: 3839981 - RNA, 16 nt, Human
ggaugcgcagugccuu

SEQ ID NO: 3839982 - RNA, 16 nt, Human
ggaugcggauggccgg

SEQ ID NO: 3839983 - RNA, 22 nt, Human
ggaugcuucaugugaacguggg

SEQ ID NO: 3839984 - RNA, 19 nt, Human
ggauggaaaaggaagacua

SEQ ID NO: 3839985 - RNA, 19 nt, Human
ggauggaagguuggaugga

SEQ ID NO: 3839986 - RNA, 13 nt, Human
ggauggacaucuu

SEQ ID NO: 3839987 - RNA, 19 nt, Human
ggauggaggggugguccug

SEQ ID NO: 3839988 - RNA, 13 nt, Human
ggauggccccagc

SEQ ID NO: 3839989 - RNA, 16 nt, Human
ggauggccccagcaca

SEQ ID NO: 3839990 - RNA, 20 nt, Human
ggauggccgcagggcugugc

SEQ ID NO: 3839991 - RNA, 12 nt, Human
ggauggccgugg

SEQ ID NO: 3839992 - RNA, 21 nt, Human
ggauggccuggccagggccug

SEQ ID NO: 3839993 - RNA, 16 nt, Human
ggauggcggguggggg

SEQ ID NO: 3839994 - RNA, 22 nt, Human
ggaugggcagucauuuugcaga

SEQ ID NO: 3839995 - RNA, 16 nt, Human
ggaugggcugcagcag

SEQ ID NO: 3839996 - RNA, 15 nt, Human
ggauggggccacagc

SEQ ID NO: 3839997 - RNA, 13 nt, Human
ggauggggcuccc

SEQ ID NO: 3839998 - RNA, 22 nt, Human
ggaugggggcuggccucuggcu

SEQ ID NO: 3839999 - RNA, 15 nt, Human
ggaugggucagagcu

SEQ ID NO: 3840000 - RNA, 16 nt, Human
ggaugguaguuuuuuc

SEQ ID NO: 3840001 - RNA, 16 nt, Human
ggaugguccuggggcu

SEQ ID NO: 3840002 - RNA, 13 nt, Human
ggauggugcccug

SEQ ID NO: 3840003 - RNA, 15 nt, Human
ggauggugggcuuca

SEQ ID NO: 3840004 - RNA, 17 nt, Human
ggauggugugccuucca

SEQ ID NO: 3840005 - RNA, 21 nt, Human
ggaugguguuacugcaguuga

SEQ ID NO: 3840006 - RNA, 13 nt, Human
ggauguccccagc

SEQ ID NO: 3840007 - RNA, 22 nt, Human
ggaugucccugggccagggucu

SEQ ID NO: 3840008 - RNA, 14 nt, Human
ggaugucugccaau

SEQ ID NO: 3840009 - RNA, 14 nt, Human
ggaugucuuccuug

SEQ ID NO: 3840010 - RNA, 15 nt, Human
ggaugugacaguggc

SEQ ID NO: 3840011 - RNA, 16 nt, Human
ggaugugacaguggcg

SEQ ID NO: 3840012 - RNA, 18 nt, Human
ggaugugauuguggaaug

SEQ ID NO: 3840013 - RNA, 15 nt, Human
ggauguguccugaca

SEQ ID NO: 3840014 - RNA, 13 nt, Human
ggauguucuggga

SEQ ID NO: 3840015 - RNA, 22 nt, Human
ggauguugaaaaaguucugcag

SEQ ID NO: 3840016 - RNA, 23 nt, Human
ggauguuucugucacaucagcuc

SEQ ID NO: 3840017 - RNA, 19 nt, Human
ggauuaaacuuaugaaugu

SEQ ID NO: 3840018 - RNA, 21 nt, Human
ggauuaaacuuaugaauguuu

SEQ ID NO: 3840019 - RNA, 17 nt, Human
ggauuaaccucugcacu

SEQ ID NO: 3840020 - RNA, 18 nt, Human
ggauuaaccucugcacua

SEQ ID NO: 3840021 - RNA, 14 nt, Human
ggauuaauaugaaa

SEQ ID NO: 3840022 - RNA, 23 nt, Human
ggauuacaagcgugagccacugc

SEQ ID NO: 3840023 - RNA, 18 nt, Human
ggauuacuucucuauaaa

SEQ ID NO: 3840024 - RNA, 19 nt, Human
ggauuagucccuggccucu

SEQ ID NO: 3840025 - RNA, 12 nt, Human
ggauuauauuau

SEQ ID NO: 3840026 - RNA, 13 nt, Human
ggauuauccugag

SEQ ID NO: 3840027 - RNA, 19 nt, Human
ggauuaugggucacaggaa

SEQ ID NO: 3840028 - RNA, 19 nt, Human
ggauuauuagaaucaaaca

SEQ ID NO: 3840029 - RNA, 17 nt, Human
ggauuauucauuuaaaa

SEQ ID NO: 3840030 - RNA, 17 nt, Human
ggauuauuuaauaacau

SEQ ID NO: 3840031 - RNA, 18 nt, Human
ggauuauuuuuucagacc

SEQ ID NO: 3840032 - RNA, 11 nt, Human
ggauucaaauu

SEQ ID NO: 3840033 - RNA, 12 nt, Human
ggauucagccuu

SEQ ID NO: 3840034 - RNA, 19 nt, Human
ggauucaggaaaaggccug

SEQ ID NO: 3840035 - RNA, 20 nt, Human
ggauucaggaaaaggccugg

SEQ ID NO: 3840036 - RNA, 14 nt, Human
ggauucaggcugcu

SEQ ID NO: 3840037 - RNA, 20 nt, Human
ggauucaguuucuaaaauug

SEQ ID NO: 3840038 - RNA, 15 nt, Human
ggauucauuuccugc

SEQ ID NO: 3840039 - RNA, 22 nt, Human
ggauucccaccaaggucuucag

SEQ ID NO: 3840040 - RNA, 18 nt, Human
ggauuccccaucucaggc

SEQ ID NO: 3840041 - RNA, 13 nt, Human
ggauuccucuuuu

SEQ ID NO: 3840042 - RNA, 15 nt, Human
ggauuccucuuuucu

SEQ ID NO: 3840043 - RNA, 13 nt, Human
ggauuccugaccc

SEQ ID NO: 3840044 - RNA, 15 nt, Human
ggauuccugacccag

SEQ ID NO: 3840045 - RNA, 16 nt, Human
ggauuccugacccagg

SEQ ID NO: 3840046 - RNA, 19 nt, Human
ggauuccugacccaggccg

SEQ ID NO: 3840047 - RNA, 20 nt, Human
ggauucuacuuuaagcacua

SEQ ID NO: 3840048 - RNA, 16 nt, Human
ggauucugagagcugu

SEQ ID NO: 3840049 - RNA, 21 nt, Human
ggauucuggccuagucccuuc

SEQ ID NO: 3840050 - RNA, 14 nt, Human
ggauucugguucca

SEQ ID NO: 3840051 - RNA, 18 nt, Human
ggauucugguuccagggu

SEQ ID NO: 3840052 - RNA, 23 nt, Human
ggauucuguacaugcauugagcu

SEQ ID NO: 3840053 - RNA, 18 nt, Human
ggauucuuaaaguugaau

SEQ ID NO: 3840054 - RNA, 16 nt, Human
ggauucuuccaucuga

SEQ ID NO: 3840055 - RNA, 21 nt, Human
ggauucuuccucccucccucu

SEQ ID NO: 3840056 - RNA, 14 nt, Human
ggauucuuuccauu

SEQ ID NO: 3840057 - RNA, 18 nt, Human
ggauucuuuccauuauga

SEQ ID NO: 3840058 - RNA, 20 nt, Human
ggauugaacuucuuugaauu

SEQ ID NO: 3840059 - RNA, 20 nt, Human
ggauugaucggagccuccuc

SEQ ID NO: 3840060 - RNA, 14 nt, Human
ggauugauuuuaaa

SEQ ID NO: 3840061 - RNA, 15 nt, Human
ggauugcacguggcc

SEQ ID NO: 3840062 - RNA, 17 nt, Human
ggauugcacguggccuc

SEQ ID NO: 3840063 - RNA, 18 nt, Human
ggauugcacguggccucu

SEQ ID NO: 3840064 - RNA, 15 nt, Human
ggauugccucugaaa

SEQ ID NO: 3840065 - RNA, 18 nt, Human
ggauugcgagagaugugu

SEQ ID NO: 3840066 - RNA, 19 nt, Human
ggauugcgagagaugugug

SEQ ID NO: 3840067 - RNA, 16 nt, Human
ggauugcuaugaauga

SEQ ID NO: 3840068 - RNA, 15 nt, Human
ggauugggccccugc

SEQ ID NO: 3840069 - RNA, 17 nt, Human
ggauuggggucccucua

SEQ ID NO: 3840070 - RNA, 22 nt, Human
ggauuguaaaaaaaaaugccuu

SEQ ID NO: 3840071 - RNA, 16 nt, Human
ggauuguuaauuucag

SEQ ID NO: 3840072 - RNA, 18 nt, Human
ggauuuaaaagccugcuc

SEQ ID NO: 3840073 - RNA, 12 nt, Human
ggauuuaacaga

SEQ ID NO: 3840074 - RNA, 17 nt, Human
ggauuuaacagaaaugu

SEQ ID NO: 3840075 - RNA, 21 nt, Human
ggauuuaacagucauuuaaaa

SEQ ID NO: 3840076 - RNA, 14 nt, Human
ggauuuagaagugu

SEQ ID NO: 3840077 - RNA, 12 nt, Human
ggauuucuuagg

SEQ ID NO: 3840078 - RNA, 13 nt, Human
ggauuugaagcaa

SEQ ID NO: 3840079 - RNA, 18 nt, Human
ggauuugaugcuguuuga

SEQ ID NO: 3840080 - RNA, 18 nt, Human
ggauuuggagagaaauau

SEQ ID NO: 3840081 - RNA, 19 nt, Human
ggauuuuaaacuagaugac

SEQ ID NO: 3840082 - RNA, 15 nt, Human
ggauuuuauguugac

SEQ ID NO: 3840083 - RNA, 21 nt, Human
ggauuuuauguugacauuugu

SEQ ID NO: 3840084 - RNA, 16 nt, Human
ggauuuucaucagggg

SEQ ID NO: 3840085 - RNA, 16 nt, Human
ggauuuugucaagcag

SEQ ID NO: 3840086 - RNA, 15 nt, Human
ggauuuuuaauuaaa

SEQ ID NO: 3840087 - RNA, 16 nt, Human
ggauuuuuagaauuaa

SEQ ID NO: 3840088 - RNA, 16 nt, Human
ggcaaaagccuugugu

SEQ ID NO: 3840089 - RNA, 20 nt, Human
ggcaaaagccuuguguauau

SEQ ID NO: 3840090 - RNA, 11 nt, Human
ggcaaaauaau

SEQ ID NO: 3840091 - RNA, 23 nt, Human
ggcaaacaggcaguuggccagag

SEQ ID NO: 3840092 - RNA, 14 nt, Human
ggcaaacagggccu

SEQ ID NO: 3840093 - RNA, 18 nt, Human
ggcaaacagggccucugc

SEQ ID NO: 3840094 - RNA, 17 nt, Human
ggcaaacuucagacuga

SEQ ID NO: 3840095 - RNA, 11 nt, Human
ggcaaagccag

SEQ ID NO: 3840096 - RNA, 18 nt, Human
ggcaaagcuuuuagaaau

SEQ ID NO: 3840097 - RNA, 19 nt, Human
ggcaaaggguccagaagga

SEQ ID NO: 3840098 - RNA, 17 nt, Human
ggcaaauaaaauucccu

SEQ ID NO: 3840099 - RNA, 13 nt, Human
ggcaaauauaaaa

SEQ ID NO: 3840100 - RNA, 19 nt, Human
ggcaaaugacaugcacuga

SEQ ID NO: 3840101 - RNA, 20 nt, Human
ggcaaaugacaugcacugac

SEQ ID NO: 3840102 - RNA, 13 nt, Human
ggcaaaugcccaa

SEQ ID NO: 3840103 - RNA, 16 nt, Human
ggcaaaugcccaaggg

SEQ ID NO: 3840104 - RNA, 20 nt, Human
ggcaaauuaacuugaguuuu

SEQ ID NO: 3840105 - RNA, 14 nt, Human
ggcaaauucuuuug

SEQ ID NO: 3840106 - RNA, 21 nt, Human
ggcaaauuuuuauuuuuuagu

SEQ ID NO: 3840107 - RNA, 21 nt, Human
ggcaacacagcgagacuccgu

SEQ ID NO: 3840108 - RNA, 18 nt, Human
ggcgugagaccugccccu

SEQ ID NO: 3840109 - RNA, 17 nt, Human
ggcgugagccaccucgc

SEQ ID NO: 3840110 - RNA, 20 nt, Human
ggcauccucagguggucagg

SEQ ID NO: 3840111 - RNA, 19 nt, Human
ggcauccuucugccuuuuu

SEQ ID NO: 3840112 - RNA, 18 nt, Human
ggcaucgcaccauucuga

SEQ ID NO: 3840113 - RNA, 21 nt, Human
ggcaucgcaccauucugacuc

SEQ ID NO: 3840114 - RNA, 22 nt, Human
ggcaucggggagccgggagccu

SEQ ID NO: 3840115 - RNA, 15 nt, Human
ggcaucuaucugugc

SEQ ID NO: 3840116 - RNA, 16 nt, Human
ggcaucuccaggaagg

SEQ ID NO: 3840117 - RNA, 17 nt, Human
ggcaucuccugugcaug

SEQ ID NO: 3840118 - RNA, 15 nt, Human
ggcaucucuaauugg

SEQ ID NO: 3840119 - RNA, 13 nt, Human
ggcaucucugggc

SEQ ID NO: 3840120 - RNA, 14 nt, Human
ggcaucucugggcu

SEQ ID NO: 3840121 - RNA, 16 nt, Human
ggcaucucugggcugg

SEQ ID NO: 3840122 - RNA, 21 nt, Human
ggcaucucugucccauucccu

SEQ ID NO: 3840123 - RNA, 22 nt, Human
ggcaucucugucccauucccug

SEQ ID NO: 3840124 - RNA, 23 nt, Human
ggcaucucugucccauucccugg

SEQ ID NO: 3840125 - RNA, 15 nt, Human
ggcaucugacacaaa

SEQ ID NO: 3840126 - RNA, 19 nt, Human
ggcaucugauuugcauauu

SEQ ID NO: 3840127 - RNA, 22 nt, Human
ggcaucugcacccucgaugaag

SEQ ID NO: 3840128 - RNA, 16 nt, Human
ggcaucuggccuggcc

SEQ ID NO: 3840129 - RNA, 23 nt, Human
ggcaucuuugccuugggcugcuc

SEQ ID NO: 3840130 - RNA, 20 nt, Human
ggcaucuuugcuauggggac

SEQ ID NO: 3840131 - RNA, 17 nt, Human
ggcaucuuuuguauuaa

SEQ ID NO: 3840132 - RNA, 21 nt, Human
ggcaucuuuuguauuaagaaa

SEQ ID NO: 3840133 - RNA, 19 nt, Human
ggcaugaaaugaacacaaa

SEQ ID NO: 3840134 - RNA, 15 nt, Human
ggcaugaagacagau

SEQ ID NO: 3840135 - RNA, 21 nt, Human
ggcaugagacucagugcagau

SEQ ID NO: 3840136 - RNA, 16 nt, Human
ggcaugauccaagcaa

SEQ ID NO: 3840137 - RNA, 18 nt, Human
ggcaugauccaagcaaga

SEQ ID NO: 3840138 - RNA, 16 nt, Human
ggcaugcaccugcaau

SEQ ID NO: 3840139 - RNA, 21 nt, Human
ggcaugcaccugcaaucccag

SEQ ID NO: 3840140 - RNA, 20 nt, Human
ggcaugccccggccaccucu

SEQ ID NO: 3840141 - RNA, 13 nt, Human
ggcaugccuugug

SEQ ID NO: 3840142 - RNA, 16 nt, Human
ggcaugcuggggcaag

SEQ ID NO: 3840143 - RNA, 17 nt, Human
ggcauggccagguggcc

SEQ ID NO: 3840144 - RNA, 13 nt, Human
ggcauggcccugg

SEQ ID NO: 3840145 - RNA, 23 nt, Human
ggcauggcuuuauuuguuuuuuu

SEQ ID NO: 3840146 - RNA, 21 nt, Human
ggcaugggaaagccaccucuc

SEQ ID NO: 3840147 - RNA, 18 nt, Human
ggcaugggaaggugggcg

SEQ ID NO: 3840148 - RNA, 23 nt, Human
ggcaugggggccucagggcagcc

SEQ ID NO: 3840149 - RNA, 18 nt, Human
ggcauggggugggccucu

SEQ ID NO: 3840150 - RNA, 16 nt, Human
ggcaugguguucuccu

SEQ ID NO: 3840151 - RNA, 18 nt, Human
ggcauguaaauguaaacu

SEQ ID NO: 3840152 - RNA, 17 nt, Human
ggcauguauuggccugg

SEQ ID NO: 3840153 - RNA, 21 nt, Human
ggcauguauuggccuggaggu

SEQ ID NO: 3840154 - RNA, 24 nt, Human
ggcaugucaacagcguuccuagag

SEQ ID NO: 3840155 - RNA, 13 nt, Human
ggcauguggccug

SEQ ID NO: 3840156 - RNA, 15 nt, Human
ggcauguggccugug

SEQ ID NO: 3840157 - RNA, 17 nt, Human
ggcauguggccuguggc

SEQ ID NO: 3840158 - RNA, 23 nt, Human
ggcauguuagcccuuccuccaau

SEQ ID NO: 3840159 - RNA, 19 nt, Human
ggcauguuuugugcauuug

SEQ ID NO: 3840160 - RNA, 16 nt, Human
ggcauuaauguuucua

SEQ ID NO: 3840161 - RNA, 20 nt, Human
ggcauuagaauuauuuaaac

SEQ ID NO: 3840162 - RNA, 24 nt, Human
ggcauuagcuaaaaccuuccaugu

SEQ ID NO: 3840163 - RNA, 23 nt, Human
ggcauuccagcuccuccgugcuu

SEQ ID NO: 3840164 - RNA, 17 nt, Human
ggcauuccccaggaggc

SEQ ID NO: 3840165 - RNA, 16 nt, Human
ggcauugauggggaag

SEQ ID NO: 3840166 - RNA, 12 nt, Human
ggcauugcuuuc

SEQ ID NO: 3840167 - RNA, 13 nt, Human
ggcauugcuuucc

SEQ ID NO: 3840168 - RNA, 14 nt, Human
ggcauuucccccac

SEQ ID NO: 3840169 - RNA, 15 nt, Human
ggcauuuccugggug

SEQ ID NO: 3840170 - RNA, 16 nt, Human
ggcauuuccugggugg

SEQ ID NO: 3840171 - RNA, 18 nt, Human
ggcauuuccuggguggcu

SEQ ID NO: 3840172 - RNA, 20 nt, Human
ggcauuugcaggguccucuu

SEQ ID NO: 3840173 - RNA, 14 nt, Human
ggcauuugcugaau

SEQ ID NO: 3840174 - RNA, 12 nt, Human
ggcauuuguuca

SEQ ID NO: 3840175 - RNA, 17 nt, Human
ggcauuuguuucuuucu

SEQ ID NO: 3840176 - RNA, 17 nt, Human
ggcauuuguuugaacug

SEQ ID NO: 3840177 - RNA, 21 nt, Human
ggcauuuuuaccaucacugag

SEQ ID NO: 3840178 - RNA, 17 nt, Human
ggccaaaagcuagacag

SEQ ID NO: 3840179 - RNA, 15 nt, Human
ggccaaaaggaaaaa

SEQ ID NO: 3840180 - RNA, 14 nt, Human
ggccaaacugcugg

SEQ ID NO: 3840181 - RNA, 17 nt, Human
ggccaaacugcuggacg

SEQ ID NO: 3840182 - RNA, 16 nt, Human
ggccaaaggcuggugg

SEQ ID NO: 3840183 - RNA, 20 nt, Human
ggccaaaggggaccuggaag

SEQ ID NO: 3840184 - RNA, 13 nt, Human
ggccaaaguguua

SEQ ID NO: 3840185 - RNA, 18 nt, Human
ggccaacaccagggaugg

SEQ ID NO: 3840186 - RNA, 19 nt, Human
ggccaacaucgugaaaccc

SEQ ID NO: 3840187 - RNA, 13 nt, Human
ggccaagaggcug

SEQ ID NO: 3840188 - RNA, 23 nt, Human
ggccaagagguuuggcuccugcc

SEQ ID NO: 3840189 - RNA, 14 nt, Human
ggccaagcagggag

SEQ ID NO: 3840190 - RNA, 23 nt, Human
ggccaagcugaggugcccaggag

SEQ ID NO: 3840191 - RNA, 15 nt, Human
ggccaaggacugccg

SEQ ID NO: 3840192 - RNA, 15 nt, Human
ggccaagguguccua

SEQ ID NO: 3840193 - RNA, 16 nt, Human
ggccaagucccaccgg

SEQ ID NO: 3840194 - RNA, 16 nt, Human
ggccaaguccgcagaa

SEQ ID NO: 3840195 - RNA, 20 nt, Human
ggccaagugcaggcuggcac

SEQ ID NO: 3840196 - RNA, 13 nt, Human
ggccaaguuccuc

SEQ ID NO: 3840197 - RNA, 15 nt, Human
ggccacacugugaca

SEQ ID NO: 3840198 - RNA, 17 nt, Human
ggccacacugugacaca

SEQ ID NO: 3840199 - RNA, 17 nt, Human
ggccacacuucaaacua

SEQ ID NO: 3840200 - RNA, 20 nt, Human
ggccacacuucaaacuacuu

SEQ ID NO: 3840201 - RNA, 14 nt, Human
ggccacagaaaauu

SEQ ID NO: 3840202 - RNA, 22 nt, Human
ggccacagaggacucacuugcc

SEQ ID NO: 3840203 - RNA, 23 nt, Human
ggccacagggcgagacuccgucu

SEQ ID NO: 3840204 - RNA, 20 nt, Human
ggccacaguagucuugauga

SEQ ID NO: 3840205 - RNA, 20 nt, Human
ggccacaugagucccagugg

SEQ ID NO: 3840206 - RNA, 20 nt, Human
ggccacaugggagcagucca

SEQ ID NO: 3840207 - RNA, 18 nt, Human
ggccacaugggaggcuca

SEQ ID NO: 3840208 - RNA, 19 nt, Human
ggccacauggggcugggca

SEQ ID NO: 3840209 - RNA, 14 nt, Human
ggccacauuuaaua

SEQ ID NO: 3840210 - RNA, 20 nt, Human
ggccacauuuucagccaaag

SEQ ID NO: 3840211 - RNA, 14 nt, Human
ggccaccacccccc

SEQ ID NO: 3840212 - RNA, 17 nt, Human
ggccaccaccccccacu

SEQ ID NO: 3840213 - RNA, 18 nt, Human
ggccaccaccccccacuc

SEQ ID NO: 3840214 - RNA, 12 nt, Human
ggccaccaggcu

SEQ ID NO: 3840215 - RNA, 21 nt, Human
ggccacccguucugcuggccu

SEQ ID NO: 3840216 - RNA, 24 nt, Human
ggccacccguucugcuggccugga

SEQ ID NO: 3840217 - RNA, 18 nt, Human
ggccacccugugcagaag

SEQ ID NO: 3840218 - RNA, 18 nt, Human
ggccaccgccuugcccag

SEQ ID NO: 3840219 - RNA, 13 nt, Human
ggccaccucccca

SEQ ID NO: 3840220 - RNA, 16 nt, Human
ggccaccuccccagca

SEQ ID NO: 3840221 - RNA, 17 nt, Human
ggccaccuccccagcau

SEQ ID NO: 3840222 - RNA, 11 nt, Human
ggccaccuccu

SEQ ID NO: 3840223 - RNA, 23 nt, Human
ggccaccuccuaaaaggcccaga

SEQ ID NO: 3840224 - RNA, 18 nt, Human
ggccaccucuccaagggc

SEQ ID NO: 3840225 - RNA, 20 nt, Human
ggccaccucuccaagggcuu

SEQ ID NO: 3840226 - RNA, 12 nt, Human
ggccaccucugc

SEQ ID NO: 3840227 - RNA, 17 nt, Human
ggccaccugaggugggc

SEQ ID NO: 3840228 - RNA, 12 nt, Human
ggccaccugcag

SEQ ID NO: 3840229 - RNA, 13 nt, Human
ggccaccugcagg

SEQ ID NO: 3840230 - RNA, 13 nt, Human
ggccaccugcccc

SEQ ID NO: 3840231 - RNA, 14 nt, Human
ggccaccugccccc

SEQ ID NO: 3840232 - RNA, 17 nt, Human
ggccaccuggcucucac

SEQ ID NO: 3840233 - RNA, 14 nt, Human
ggccacgcagccag

SEQ ID NO: 3840234 - RNA, 15 nt, Human
ggccacgcagccagg

SEQ ID NO: 3840235 - RNA, 11 nt, Human
ggccacgugcc

SEQ ID NO: 3840236 - RNA, 24 nt, Human
ggccacuccagaccccuggcuuuu

SEQ ID NO: 3840237 - RNA, 13 nt, Human
ggccacuccucca

SEQ ID NO: 3840238 - RNA, 15 nt, Human
ggccacuccuuccug

SEQ ID NO: 3840239 - RNA, 19 nt, Human
ggccacuccuuccugcccc

SEQ ID NO: 3840240 - RNA, 21 nt, Human
ggccacucugccucugccugc

SEQ ID NO: 3840241 - RNA, 14 nt, Human
ggccacugaagaua

SEQ ID NO: 3840242 - RNA, 22 nt, Human
ggccacugcucccuaagccagc

SEQ ID NO: 3840243 - RNA, 11 nt, Human
ggccacuguga

SEQ ID NO: 3840244 - RNA, 20 nt, Human
ggccacugugaagagaacca

SEQ ID NO: 3840245 - RNA, 14 nt, Human
ggccacuucugucc

SEQ ID NO: 3840246 - RNA, 14 nt, Human
ggccagaagaugaa

SEQ ID NO: 3840247 - RNA, 21 nt, Human
ggccagaagaugaacagacug

SEQ ID NO: 3840248 - RNA, 16 nt, Human
ggccagaaguaccaga

SEQ ID NO: 3840249 - RNA, 17 nt, Human
ggccagaaguagcuuug

SEQ ID NO: 3840250 - RNA, 17 nt, Human
ggccagacacaggcccu

SEQ ID NO: 3840251 - RNA, 14 nt, Human
ggccagaccagagc

SEQ ID NO: 3840252 - RNA, 15 nt, Human
ggccagaccagagcu

SEQ ID NO: 3840253 - RNA, 16 nt, Human
ggccagaccagagcuc

SEQ ID NO: 3840254 - RNA, 16 nt, Human
ggccagaccauggaca

SEQ ID NO: 3840255 - RNA, 23 nt, Human
gaaagugccuuugcagcucagaa

SEQ ID NO: 3840256 - RNA, 21 nt, Human
gaaaguggccaugccacccug

SEQ ID NO: 3840257 - RNA, 18 nt, Human
gaaagugggcaaaagcuu

SEQ ID NO: 3840258 - RNA, 22 nt, Human
gaaagugggcuuaauggaguuc

SEQ ID NO: 3840259 - RNA, 15 nt, Human
gaaaguguaaagcau

SEQ ID NO: 3840260 - RNA, 19 nt, Human
gaaaguguauaauaagaaa

SEQ ID NO: 3840261 - RNA, 15 nt, Human
gaaaguguauuugga

SEQ ID NO: 3840262 - RNA, 18 nt, Human
gaaaguguucuguuacaa

SEQ ID NO: 3840263 - RNA, 22 nt, Human
gaaaguugcaaggcaaauguuu

SEQ ID NO: 3840264 - RNA, 20 nt, Human
gaaaguugcacggcugcuga

SEQ ID NO: 3840265 - RNA, 13 nt, Human
gaaaguuguacau

SEQ ID NO: 3840266 - RNA, 23 nt, Human
gaaaguuuccccaccagugaaug

SEQ ID NO: 3840267 - RNA, 20 nt, Human
gaaaguuucguuauauuaaa

SEQ ID NO: 3840268 - RNA, 23 nt, Human
gaaaguuuugaguagauauuacu

SEQ ID NO: 3840269 - RNA, 21 nt, Human
gaaaguuuuguaaaagaaauc

SEQ ID NO: 3840270 - RNA, 15 nt, Human
gaaauaaaaaagucu

SEQ ID NO: 3840271 - RNA, 18 nt, Human
gaaauaaaaaagucucua

SEQ ID NO: 3840272 - RNA, 14 nt, Human
gaaauaaaaccuuu

SEQ ID NO: 3840273 - RNA, 16 nt, Human
gaaauaaaaccuuuca

SEQ ID NO: 3840274 - RNA, 17 nt, Human
gaaauaaaaccuuucaa

SEQ ID NO: 3840275 - RNA, 23 nt, Human
gaaauaaaaggaagccaaagagu

SEQ ID NO: 3840276 - RNA, 17 nt, Human
gaaauaaacgucuuaaa

SEQ ID NO: 3840277 - RNA, 18 nt, Human
gaaauaaacgucuuaaau

SEQ ID NO: 3840278 - RNA, 14 nt, Human
gaaauaaagucaga

SEQ ID NO: 3840279 - RNA, 18 nt, Human
gaaauaaaguuggugaca

SEQ ID NO: 3840280 - RNA, 17 nt, Human
gaaauaaaguuugcuua

SEQ ID NO: 3840281 - RNA, 23 nt, Human
gaaauaaauagcuauauccaugu

SEQ ID NO: 3840282 - RNA, 15 nt, Human
gaaauaaaugcccca

SEQ ID NO: 3840283 - RNA, 20 nt, Human
gaaauaaauguaccugaugu

SEQ ID NO: 3840284 - RNA, 17 nt, Human
gaaauaacaauguuaag

SEQ ID NO: 3840285 - RNA, 20 nt, Human
gaaauaacaauguuaaggaa

SEQ ID NO: 3840286 - RNA, 17 nt, Human
gaaauaacagaagaaaa

SEQ ID NO: 3840287 - RNA, 19 nt, Human
gaaauaacagaagaaaaua

SEQ ID NO: 3840288 - RNA, 21 nt, Human
gaaauaagaaaaaucauguuu

SEQ ID NO: 3840289 - RNA, 18 nt, Human
gaaauaagugcccucucc

SEQ ID NO: 3840290 - RNA, 13 nt, Human
gaaauaauaaauc

SEQ ID NO: 3840291 - RNA, 13 nt, Human
gaaauaauaauau

SEQ ID NO: 3840292 - RNA, 21 nt, Human
gaaauaaugcuacaauuuuaa

SEQ ID NO: 3840293 - RNA, 18 nt, Human
gaaauaauuuuauuccag

SEQ ID NO: 3840294 - RNA, 12 nt, Human
gaaauacauauu

SEQ ID NO: 3840295 - RNA, 21 nt, Human
gaaauacauauuuccaagaag

SEQ ID NO: 3840296 - RNA, 17 nt, Human
gaaauacauggacaaua

SEQ ID NO: 3840297 - RNA, 14 nt, Human
gaaauacccuucuu

SEQ ID NO: 3840298 - RNA, 16 nt, Human
gaaauaccucauguuu

SEQ ID NO: 3840299 - RNA, 21 nt, Human
gaaauaccucauguuuaugaa

SEQ ID NO: 3840300 - RNA, 19 nt, Human
gaaauacuacuccuguaau

SEQ ID NO: 3840301 - RNA, 17 nt, Human
gaaauacuacuguguaa

SEQ ID NO: 3840302 - RNA, 20 nt, Human
gaaauacuagauuugggaga

SEQ ID NO: 3840303 - RNA, 14 nt, Human
gaaauacuauuuaa

SEQ ID NO: 3840304 - RNA, 20 nt, Human
gaaauagaaaaacccugccc

SEQ ID NO: 3840305 - RNA, 21 nt, Human
gaaauagaaaaacccugcccc

SEQ ID NO: 3840306 - RNA, 19 nt, Human
gaaauagacaaaaaguaua

SEQ ID NO: 3840307 - RNA, 18 nt, Human
gaaauagacagcaugaga

SEQ ID NO: 3840308 - RNA, 19 nt, Human
gaaauagcuuaugaaaaga

SEQ ID NO: 3840309 - RNA, 15 nt, Human
gaaauagguuagagu

SEQ ID NO: 3840310 - RNA, 17 nt, Human
gaaauagucugugugaa

SEQ ID NO: 3840311 - RNA, 15 nt, Human
gaaauauaauaaaau

SEQ ID NO: 3840312 - RNA, 13 nt, Human
gaaauauaauuga

SEQ ID NO: 3840313 - RNA, 23 nt, Human
gaaauauacuuuuacaaguaaca

SEQ ID NO: 3840314 - RNA, 19 nt, Human
gaaauauauacaaaaagaa

SEQ ID NO: 3840315 - RNA, 15 nt, Human
gaaauauauauacau

SEQ ID NO: 3840316 - RNA, 12 nt, Human
gaaauauauauu

SEQ ID NO: 3840317 - RNA, 15 nt, Human
gaaauauauauuaua

SEQ ID NO: 3840318 - RNA, 23 nt, Human
gaaauauauggucuaauguuuaa

SEQ ID NO: 3840319 - RNA, 13 nt, Human
gaaauauauguga

SEQ ID NO: 3840320 - RNA, 14 nt, Human
gaaauauaugugaa

SEQ ID NO: 3840321 - RNA, 23 nt, Human
gaaauaucaguuacucagcccug

SEQ ID NO: 3840322 - RNA, 22 nt, Human
gaaauaucaucacguauguuau

SEQ ID NO: 3840323 - RNA, 17 nt, Human
ggccaggcugcucucaa

SEQ ID NO: 3840324 - RNA, 14 nt, Human
ggccaggcuggucu

SEQ ID NO: 3840325 - RNA, 15 nt, Human
ggccagggagaagcu

SEQ ID NO: 3840326 - RNA, 13 nt, Human
ggccagggcagag

SEQ ID NO: 3840327 - RNA, 21 nt, Human
ggccagggccacgcuccagcu

SEQ ID NO: 3840328 - RNA, 17 nt, Human
ggccagggcccugcaga

SEQ ID NO: 3840329 - RNA, 18 nt, Human
ggccagggcccugcagag

SEQ ID NO: 3840330 - RNA, 12 nt, Human
ggccagggccug

SEQ ID NO: 3840331 - RNA, 20 nt, Human
ggccagggcuauagcucagg

SEQ ID NO: 3840332 - RNA, 17 nt, Human
ggccagggcugcccuga

SEQ ID NO: 3840333 - RNA, 18 nt, Human
ggccagggcugcccugag

SEQ ID NO: 3840334 - RNA, 17 nt, Human
ggccagggucuguguga

SEQ ID NO: 3840335 - RNA, 19 nt, Human
ggccagggucugugugaau

SEQ ID NO: 3840336 - RNA, 22 nt, Human
ggccagggucugugugaaugug

SEQ ID NO: 3840337 - RNA, 23 nt, Human
ggccagggucugugugaaugugg

SEQ ID NO: 3840338 - RNA, 14 nt, Human
ggccaggugcacag

SEQ ID NO: 3840339 - RNA, 14 nt, Human
ggccaggugccucc

SEQ ID NO: 3840340 - RNA, 18 nt, Human
ggccaguaccuuuccauu

SEQ ID NO: 3840341 - RNA, 14 nt, Human
ggccaguccaggcu

SEQ ID NO: 3840342 - RNA, 22 nt, Human
ggccaguccugccuggccaggc

SEQ ID NO: 3840343 - RNA, 17 nt, Human
ggccagucugggcugcc

SEQ ID NO: 3840344 - RNA, 15 nt, Human
ggccagucuguggau

SEQ ID NO: 3840345 - RNA, 15 nt, Human
ggccagugcuccagc

SEQ ID NO: 3840346 - RNA, 19 nt, Human
ggccaguggggccugugga

SEQ ID NO: 3840347 - RNA, 14 nt, Human
ggccaguguuuaaa

SEQ ID NO: 3840348 - RNA, 17 nt, Human
ggccaguuggucccccu

SEQ ID NO: 3840349 - RNA, 22 nt, Human
ggccauacuggccucgccuggc

SEQ ID NO: 3840350 - RNA, 20 nt, Human
ggccauauuuaccucagccu

SEQ ID NO: 3840351 - RNA, 16 nt, Human
ggccaucccaaggucu

SEQ ID NO: 3840352 - RNA, 20 nt, Human
ggccauccuucccugucugc

SEQ ID NO: 3840353 - RNA, 23 nt, Human
ggccaucuccacccccagcugcu

SEQ ID NO: 3840354 - RNA, 21 nt, Human
ggccaucucugaacuucagcu

SEQ ID NO: 3840355 - RNA, 20 nt, Human
ggccaucuggagagcccaga

SEQ ID NO: 3840356 - RNA, 15 nt, Human
ggccaugaacuuugu

SEQ ID NO: 3840357 - RNA, 22 nt, Human
ggccaugacccugccucuccca

SEQ ID NO: 3840358 - RNA, 18 nt, Human
ggccaugagcuccagacc

SEQ ID NO: 3840359 - RNA, 15 nt, Human
ggccaugauggcaac

SEQ ID NO: 3840360 - RNA, 18 nt, Human
ggccaugauggcaacaga

SEQ ID NO: 3840361 - RNA, 21 nt, Human
ggccaugauucgcccaaagcc

SEQ ID NO: 3840362 - RNA, 17 nt, Human
ggccaugccuccucagg

SEQ ID NO: 3840363 - RNA, 18 nt, Human
ggccaugccuccucagga

SEQ ID NO: 3840364 - RNA, 13 nt, Human
ggccaugccugcc

SEQ ID NO: 3840365 - RNA, 15 nt, Human
ggccaugcuccucuu

SEQ ID NO: 3840366 - RNA, 17 nt, Human
ggccaugcugaagggac

SEQ ID NO: 3840367 - RNA, 21 nt, Human
ggccauggacucuguccugaa

SEQ ID NO: 3840368 - RNA, 22 nt, Human
ggccauggacucuguccugaag

SEQ ID NO: 3840369 - RNA, 16 nt, Human
ggccauggagaaagcu

SEQ ID NO: 3840370 - RNA, 18 nt, Human
ggccauggagaaagcuga

SEQ ID NO: 3840371 - RNA, 16 nt, Human
ggccauggagagcugg

SEQ ID NO: 3840372 - RNA, 22 nt, Human
ggccauggagagcuggagccug

SEQ ID NO: 3840373 - RNA, 13 nt, Human
ggccaugggaggc

SEQ ID NO: 3840374 - RNA, 15 nt, Human
ggccaugggaggccu

SEQ ID NO: 3840375 - RNA, 16 nt, Human
ggccaugggccuccug

SEQ ID NO: 3840376 - RNA, 19 nt, Human
ggccaugguacccccuucu

SEQ ID NO: 3840377 - RNA, 20 nt, Human
ggccaugguacccccuucug

SEQ ID NO: 3840378 - RNA, 16 nt, Human
ggccauguaugaagcc

SEQ ID NO: 3840379 - RNA, 22 nt, Human
ggccauguccaaagaggcugcc

SEQ ID NO: 3840380 - RNA, 23 nt, Human
ggccauguuccaauaaacaggag

SEQ ID NO: 3840381 - RNA, 14 nt, Human
ggccauuugcaaua

SEQ ID NO: 3840382 - RNA, 19 nt, Human
ggcccaacaggggcuccau

SEQ ID NO: 3840383 - RNA, 16 nt, Human
ggcccaacccugucug

SEQ ID NO: 3840384 - RNA, 20 nt, Human
ggcccaagagucuggggacc

SEQ ID NO: 3840385 - RNA, 11 nt, Human
ggcccacacac

SEQ ID NO: 3840386 - RNA, 14 nt, Human
ggcccacacacagg

SEQ ID NO: 3840387 - RNA, 23 nt, Human
ggcccacagcaggugcugagcaa

SEQ ID NO: 3840388 - RNA, 16 nt, Human
ggcccacauuggaaga

SEQ ID NO: 3840389 - RNA, 12 nt, Human
ggcccacccugc

SEQ ID NO: 3840390 - RNA, 22 nt, Human
ggcccacccugcuuggcccagg

SEQ ID NO: 3840391 - RNA, 14 nt, Human
ggcccaccuggcca

SEQ ID NO: 3840392 - RNA, 16 nt, Human
ggcccaccuggccacc

SEQ ID NO: 3840393 - RNA, 17 nt, Human
ggcccacgugguugggg

SEQ ID NO: 3840394 - RNA, 13 nt, Human
ggcccacugugcc

SEQ ID NO: 3840395 - RNA, 17 nt, Human
ggcccacugugccucag

SEQ ID NO: 3840396 - RNA, 18 nt, Human
ggcccacugugccucaga

SEQ ID NO: 3840397 - RNA, 20 nt, Human
ggcccagagagaagagcccc

SEQ ID NO: 3840398 - RNA, 23 nt, Human
ggcccagagagaagagccccacu

SEQ ID NO: 3840399 - RNA, 20 nt, Human
ggggaguuucuuuccugccu

SEQ ID NO: 3840400 - RNA, 20 nt, Human
ggggauaaaaugacuacuua

SEQ ID NO: 3840401 - RNA, 13 nt, Human
ggggauaugcuua

SEQ ID NO: 3840402 - RNA, 22 nt, Human
ggggaucaucugccgugccugg

SEQ ID NO: 3840403 - RNA, 13 nt, Human
ggggauguguccu

SEQ ID NO: 3840404 - RNA, 11 nt, Human
ggggauucuua

SEQ ID NO: 3840405 - RNA, 15 nt, Human
ggggauucuuaaagu

SEQ ID NO: 3840406 - RNA, 13 nt, Human
ggggcacagggag

SEQ ID NO: 3840407 - RNA, 13 nt, Human
ggggcagaacagc

SEQ ID NO: 3840408 - RNA, 14 nt, Human
ggggcagagccucc

SEQ ID NO: 3840409 - RNA, 23 nt, Human
ggggcagaggcaguaccugggca

SEQ ID NO: 3840410 - RNA, 18 nt, Human
ggggcagcacccuauaaa

SEQ ID NO: 3840411 - RNA, 15 nt, Human
ggggcagcagcagcc

SEQ ID NO: 3840412 - RNA, 16 nt, Human
ggggcagcagcagccc

SEQ ID NO: 3840413 - RNA, 19 nt, Human
ggggcagcagcagcccugc

SEQ ID NO: 3840414 - RNA, 20 nt, Human
ggggcagcagcagcccugcc

SEQ ID NO: 3840415 - RNA, 12 nt, Human
ggggcagccccc

SEQ ID NO: 3840416 - RNA, 14 nt, Human
ggggcagccugccu

SEQ ID NO: 3840417 - RNA, 23 nt, Human
ggggcagcuucuauuagccaguc

SEQ ID NO: 3840418 - RNA, 16 nt, Human
ggggcaggagcucaga

SEQ ID NO: 3840419 - RNA, 16 nt, Human
ggggcaggagggcccu

SEQ ID NO: 3840420 - RNA, 11 nt, Human
ggggcaggagu

SEQ ID NO: 3840421 - RNA, 17 nt, Human
ggggcaggcacagcaca

SEQ ID NO: 3840422 - RNA, 22 nt, Human
ggggcaggcccugcacuguccu

SEQ ID NO: 3840423 - RNA, 19 nt, Human
ggggcagggagcugggccc

SEQ ID NO: 3840424 - RNA, 14 nt, Human
ggggcagucaccug

SEQ ID NO: 3840425 - RNA, 19 nt, Human
ggggcagucugagagaggc

SEQ ID NO: 3840426 - RNA, 13 nt, Human
ggggcagugcuca

SEQ ID NO: 3840427 - RNA, 17 nt, Human
ggggcagugcucaccca

SEQ ID NO: 3840428 - RNA, 21 nt, Human
ggggcagugcuuggcccagga

SEQ ID NO: 3840429 - RNA, 14 nt, Human
ggggcaucugcccc

SEQ ID NO: 3840430 - RNA, 16 nt, Human
ggggcaugcuggggca

SEQ ID NO: 3840431 - RNA, 23 nt, Human
ggggccagaggaacuguccagag

SEQ ID NO: 3840432 - RNA, 12 nt, Human
ggggccagaggc

SEQ ID NO: 3840433 - RNA, 19 nt, Human
ggggccagauccagccugg

SEQ ID NO: 3840434 - RNA, 16 nt, Human
ggggccaggcuggguc

SEQ ID NO: 3840435 - RNA, 19 nt, Human
ggggccaguuggucccccu

SEQ ID NO: 3840436 - RNA, 17 nt, Human
ggggccaugccuccuca

SEQ ID NO: 3840437 - RNA, 19 nt, Human
ggggcccaaggcggccccu

SEQ ID NO: 3840438 - RNA, 16 nt, Human
ggggccccagucagcc

SEQ ID NO: 3840439 - RNA, 21 nt, Human
ggggccccgucucaggucuga

SEQ ID NO: 3840440 - RNA, 18 nt, Human
ggggccccucucagcccu

SEQ ID NO: 3840441 - RNA, 22 nt, Human
ggggccccuuuuuacuccccuu

SEQ ID NO: 3840442 - RNA, 23 nt, Human
ggggcccgccuggcagaacugag

SEQ ID NO: 3840443 - RNA, 20 nt, Human
ggggcccgcuugccucggcu

SEQ ID NO: 3840444 - RNA, 21 nt, Human
ggggcccguugucucccuggc

SEQ ID NO: 3840445 - RNA, 23 nt, Human
ggggcccguugucucccuggccc

SEQ ID NO: 3840446 - RNA, 16 nt, Human
ggggcccugccuccuu

SEQ ID NO: 3840447 - RNA, 23 nt, Human
ggggcccugccuccuuugugagg

SEQ ID NO: 3840448 - RNA, 12 nt, Human
ggggcccugguc

SEQ ID NO: 3840449 - RNA, 18 nt, Human
ggggcccuuggagcgugg

SEQ ID NO: 3840450 - RNA, 19 nt, Human
ggggccgaugcccagagac

SEQ ID NO: 3840451 - RNA, 14 nt, Human
ggggccgcugccac

SEQ ID NO: 3840452 - RNA, 13 nt, Human
ggggccgggcaca

SEQ ID NO: 3840453 - RNA, 13 nt, Human
ggggccucagacg

SEQ ID NO: 3840454 - RNA, 12 nt, Human
ggggccucaggu

SEQ ID NO: 3840455 - RNA, 14 nt, Human
ggggccugacugcu

SEQ ID NO: 3840456 - RNA, 19 nt, Human
ggggccugccaccuggacc

SEQ ID NO: 3840457 - RNA, 14 nt, Human
ggggccuggaccug

SEQ ID NO: 3840458 - RNA, 11 nt, Human
ggggccuggcu

SEQ ID NO: 3840459 - RNA, 19 nt, Human
ggggccuggcuggcugagg

SEQ ID NO: 3840460 - RNA, 23 nt, Human
ggggccugggacuuccaugccuu

SEQ ID NO: 3840461 - RNA, 12 nt, Human
ggggccugggag

SEQ ID NO: 3840462 - RNA, 20 nt, Human
ggggccuuagggcacugggc

SEQ ID NO: 3840463 - RNA, 17 nt, Human
ggggccuuaucgggcuc

SEQ ID NO: 3840464 - RNA, 17 nt, Human
ggggcgaggcagaggac

SEQ ID NO: 3840465 - RNA, 13 nt, Human
ggggcgaggcagg

SEQ ID NO: 3840466 - RNA, 22 nt, Human
ggggcgccgcaaaccacacugg

SEQ ID NO: 3840467 - RNA, 13 nt, Human
ggggcgcuggccc

SEQ ID NO: 3840468 - RNA, 13 nt, Human
ggggcguccaggc

SEQ ID NO: 3840469 - RNA, 20 nt, Human
ggggcgucuguucccccuuc

SEQ ID NO: 3840470 - RNA, 15 nt, Human
ggggcuaagacuucc

SEQ ID NO: 3840471 - RNA, 14 nt, Human
ggggcuaauuuaac

SEQ ID NO: 3840472 - RNA, 11 nt, Human
ggggcucagag

SEQ ID NO: 3840473 - RNA, 12 nt, Human
ggggcucagcaa

SEQ ID NO: 3840474 - RNA, 14 nt, Human
ggggcucagcaagg

SEQ ID NO: 3840475 - RNA, 16 nt, Human
ggggcucccuccgccc

SEQ ID NO: 3840476 - RNA, 12 nt, Human
ggggcuccugga

SEQ ID NO: 3840477 - RNA, 13 nt, Human
ggggcuccuggaa

SEQ ID NO: 3840478 - RNA, 21 nt, Human
ggggcuccuggaaaggcucag

SEQ ID NO: 3840479 - RNA, 15 nt, Human
ggggcucgccaugcc

SEQ ID NO: 3840480 - RNA, 17 nt, Human
ggggcucuaacgccuga

SEQ ID NO: 3840481 - RNA, 18 nt, Human
ggggcucuaacgccugag

SEQ ID NO: 3840482 - RNA, 23 nt, Human
ggggcucuaacgccugagcccag

SEQ ID NO: 3840483 - RNA, 22 nt, Human
ggggcucuaggguugcuggagc

SEQ ID NO: 3840484 - RNA, 23 nt, Human
ggggcucuaggguugcuggagcc

SEQ ID NO: 3840485 - RNA, 16 nt, Human
ggggcucucagcucag

SEQ ID NO: 3840486 - RNA, 24 nt, Human
ggggcucucauguuuucaacugcc

SEQ ID NO: 3840487 - RNA, 23 nt, Human
ggggcucugcccucccuccuucc

SEQ ID NO: 3840488 - RNA, 19 nt, Human
ggggcugaggugggaggau

SEQ ID NO: 3840489 - RNA, 21 nt, Human
ggggcugcaccggcuggccug

SEQ ID NO: 3840490 - RNA, 18 nt, Human
ggggcugcccuugggcca

SEQ ID NO: 3840491 - RNA, 18 nt, Human
ggggcugcucccaccugg

SEQ ID NO: 3840492 - RNA, 22 nt, Human
ggggcugcugcugggcucagug

SEQ ID NO: 3840493 - RNA, 18 nt, Human
ggggcugcuuccuccugg

SEQ ID NO: 3840494 - RNA, 19 nt, Human
ggggcugcuuccuccugga

SEQ ID NO: 3840495 - RNA, 13 nt, Human
ggggcuggaggag

SEQ ID NO: 3840496 - RNA, 16 nt, Human
ggggcuggccuuccug

SEQ ID NO: 3840497 - RNA, 19 nt, Human
ggggcuggccuuccugccc

SEQ ID NO: 3840498 - RNA, 13 nt, Human
ggggcugggacau

SEQ ID NO: 3840499 - RNA, 12 nt, Human
ggggcuggggca

SEQ ID NO: 3840500 - RNA, 16 nt, Human
ggggcuggggcaggag

SEQ ID NO: 3840501 - RNA, 19 nt, Human
ggggcuggguuggcgcacc

SEQ ID NO: 3840502 - RNA, 19 nt, Human
ggggcugguagcucaggug

SEQ ID NO: 3840503 - RNA, 22 nt, Human
ggggcuuagggucggaacccaa

SEQ ID NO: 3840504 - RNA, 22 nt, Human
ggggcuucaaccuugagacagc

SEQ ID NO: 3840505 - RNA, 13 nt, Human
ggggcuuccuggu

SEQ ID NO: 3840506 - RNA, 21 nt, Human
ggggcuuccuggugcuggagg

SEQ ID NO: 3840507 - RNA, 22 nt, Human
ggggcuucugugcaccugggcu

SEQ ID NO: 3840508 - RNA, 17 nt, Human
ggggcuugaagccaaag

SEQ ID NO: 3840509 - RNA, 14 nt, Human
ggggcuugccuucu

SEQ ID NO: 3840510 - RNA, 20 nt, Human
ggggcuuucguccacagcuu

SEQ ID NO: 3840511 - RNA, 18 nt, Human
gggggaacgaugugucug

SEQ ID NO: 3840512 - RNA, 19 nt, Human
gggggaagagcacagcccu

SEQ ID NO: 3840513 - RNA, 12 nt, Human
gggggaaugagc

SEQ ID NO: 3840514 - RNA, 16 nt, Human
gggggaaugagcccag

SEQ ID NO: 3840515 - RNA, 21 nt, Human
gggggaaugagcccagagaac

SEQ ID NO: 3840516 - RNA, 18 nt, Human
gggggacagggcuggccc

SEQ ID NO: 3840517 - RNA, 23 nt, Human
gggggacagggcuggcccagccc

SEQ ID NO: 3840518 - RNA, 15 nt, Human
gggggacccagugca

SEQ ID NO: 3840519 - RNA, 16 nt, Human
gggggacuagccccug

SEQ ID NO: 3840520 - RNA, 22 nt, Human
gggggagccccuucugcucagc

SEQ ID NO: 3840521 - RNA, 22 nt, Human
gggggagccgguaacuguccug

SEQ ID NO: 3840522 - RNA, 14 nt, Human
gggggagggggagg

SEQ ID NO: 3840523 - RNA, 13 nt, Human
gggggaguggaau

SEQ ID NO: 3840524 - RNA, 16 nt, Human
gggggcacaagacuga

SEQ ID NO: 3840525 - RNA, 23 nt, Human
gggggcacaugcugagucuccca

SEQ ID NO: 3840526 - RNA, 11 nt, Human
gggggcagagg

SEQ ID NO: 3840527 - RNA, 12 nt, Human
gggggcagaggg

SEQ ID NO: 3840528 - RNA, 22 nt, Human
gggggcagaucuuggacucaug

SEQ ID NO: 3840529 - RNA, 15 nt, Human
gaacuguuagaaugu

SEQ ID NO: 3840530 - RNA, 13 nt, Human
gaacuguuguaua

SEQ ID NO: 3840531 - RNA, 14 nt, Human
gaacuguuguauaa

SEQ ID NO: 3840532 - RNA, 18 nt, Human
gaacuuaaauaaauguca

SEQ ID NO: 3840533 - RNA, 20 nt, Human
gaacuuacuguagccucaga

SEQ ID NO: 3840534 - RNA, 17 nt, Human
gaacuucaccugcaaag

SEQ ID NO: 3840535 - RNA, 18 nt, Human
gaacuucagaaagacuug

SEQ ID NO: 3840536 - RNA, 18 nt, Human
gaacuucgcaucaaaaga

SEQ ID NO: 3840537 - RNA, 13 nt, Human
gaacuucuaauau

SEQ ID NO: 3840538 - RNA, 15 nt, Human
gaacuucuaauauau

SEQ ID NO: 3840539 - RNA, 22 nt, Human
gaacuugaaauauccugcuuga

SEQ ID NO: 3840540 - RNA, 13 nt, Human
gaacuugaaauuu

SEQ ID NO: 3840541 - RNA, 18 nt, Human
gaacuugaagccugcucc

SEQ ID NO: 3840542 - RNA, 14 nt, Human
gaacuugaaugugu

SEQ ID NO: 3840543 - RNA, 17 nt, Human
gaacuugaaugugucag

SEQ ID NO: 3840544 - RNA, 20 nt, Human
gggggccuggcuggcugagg

SEQ ID NO: 3840545 - RNA, 15 nt, Human
gggggcgccuguggu

SEQ ID NO: 3840546 - RNA, 18 nt, Human
gggggcgcggcugggagg

SEQ ID NO: 3840547 - RNA, 16 nt, Human
gggggcugaggagcag

SEQ ID NO: 3840548 - RNA, 13 nt, Human
gggggcuggccua

SEQ ID NO: 3840549 - RNA, 14 nt, Human
gggggcuggugcca

SEQ ID NO: 3840550 - RNA, 13 nt, Human
ggggggcagagcc

SEQ ID NO: 3840551 - RNA, 15 nt, Human
ggggggccaaaagga

SEQ ID NO: 3840552 - RNA, 14 nt, Human
ggggguagagcuga

SEQ ID NO: 3840553 - RNA, 18 nt, Human
gggggucaggaggcaggg

SEQ ID NO: 3840554 - RNA, 18 nt, Human
gggggucccagugggagg

SEQ ID NO: 3840555 - RNA, 16 nt, Human
ggggguccuccuccag

SEQ ID NO: 3840556 - RNA, 18 nt, Human
gggggugaugagggcagc

SEQ ID NO: 3840557 - RNA, 22 nt, Human
gggggugaugagggcagcagcc

SEQ ID NO: 3840558 - RNA, 19 nt, Human
gggggugcugggccccugc

SEQ ID NO: 3840559 - RNA, 15 nt, Human
gggguagcagcugga

SEQ ID NO: 3840560 - RNA, 13 nt, Human
gggguagggggcu

SEQ ID NO: 3840561 - RNA, 21 nt, Human
ggggucaugcccuccucuccc

SEQ ID NO: 3840562 - RNA, 12 nt, Human
ggggucccagca

SEQ ID NO: 3840563 - RNA, 11 nt, Human
gggguccuggc

SEQ ID NO: 3840564 - RNA, 13 nt, Human
gggguccuggcca

SEQ ID NO: 3840565 - RNA, 14 nt, Human
gggguccuggccau

SEQ ID NO: 3840566 - RNA, 19 nt, Human
gggguccuguggcaggcag

SEQ ID NO: 3840567 - RNA, 15 nt, Human
ggggucucucacaga

SEQ ID NO: 3840568 - RNA, 23 nt, Human
ggggucucuucugaauaaagcaa

SEQ ID NO: 3840569 - RNA, 13 nt, Human
ggggucuggcugg

SEQ ID NO: 3840570 - RNA, 14 nt, Human
ggggucuuaccuug

SEQ ID NO: 3840571 - RNA, 13 nt, Human
ggggugaggacca

SEQ ID NO: 3840572 - RNA, 14 nt, Human
ggggugaggagcug

SEQ ID NO: 3840573 - RNA, 23 nt, Human
ggggugaugagggcagcagccag

SEQ ID NO: 3840574 - RNA, 13 nt, Human
ggggugcccccuc

SEQ ID NO: 3840575 - RNA, 20 nt, Human
ggggugcccccuccucuccc

SEQ ID NO: 3840576 - RNA, 21 nt, Human
ggggugcccuccacugcccuc

SEQ ID NO: 3840577 - RNA, 17 nt, Human
ggggugccgccugcccg

SEQ ID NO: 3840578 - RNA, 20 nt, Human
ggggugcggcggucccagcu

SEQ ID NO: 3840579 - RNA, 12 nt, Human
ggggugcugggc

SEQ ID NO: 3840580 - RNA, 16 nt, Human
ggggugcuuccuugua

SEQ ID NO: 3840581 - RNA, 13 nt, Human
gggguggccugug

SEQ ID NO: 3840582 - RNA, 15 nt, Human
gggguggguauaaaa

SEQ ID NO: 3840583 - RNA, 21 nt, Human
gggguguguuccaacugcccc

SEQ ID NO: 3840584 - RNA, 16 nt, Human
gggguguuaauuuaug

SEQ ID NO: 3840585 - RNA, 16 nt, Human
gggguuauuuucuggu

SEQ ID NO: 3840586 - RNA, 16 nt, Human
gggguucagccccucc

SEQ ID NO: 3840587 - RNA, 17 nt, Human
gggguucagccccuccu

SEQ ID NO: 3840588 - RNA, 22 nt, Human
gggguucagccccuccucugcc

SEQ ID NO: 3840589 - RNA, 14 nt, Human
gggguucaggcccg

SEQ ID NO: 3840590 - RNA, 21 nt, Human
gggguucgagaccagucuggc

SEQ ID NO: 3840591 - RNA, 22 nt, Human
gggguucuuucuuccucugcug

SEQ ID NO: 3840592 - RNA, 13 nt, Human
gggguuggcuggg

SEQ ID NO: 3840593 - RNA, 21 nt, Human
gggguugggauugggggcugg

SEQ ID NO: 3840594 - RNA, 22 nt, Human
gggguugggauugggggcuggu

SEQ ID NO: 3840595 - RNA, 17 nt, Human
gggguuggggugacagu

SEQ ID NO: 3840596 - RNA, 19 nt, Human
gggguuuccuggcacugga

SEQ ID NO: 3840597 - RNA, 18 nt, Human
gggguuugccauuugaua

SEQ ID NO: 3840598 - RNA, 11 nt, Human
gggguuuuucu

SEQ ID NO: 3840599 - RNA, 15 nt, Human
ggguaaaauacuuuu

SEQ ID NO: 3840600 - RNA, 13 nt, Human
ggguaaacugugg

SEQ ID NO: 3840601 - RNA, 13 nt, Human
ggguaaauuauuc

SEQ ID NO: 3840602 - RNA, 16 nt, Human
ggguaagggauuucuu

SEQ ID NO: 3840603 - RNA, 14 nt, Human
ggguaaggugccuu

SEQ ID NO: 3840604 - RNA, 17 nt, Human
ggguaagugagagaggg

SEQ ID NO: 3840605 - RNA, 21 nt, Human
ggguaauaaacuuagaauaaa

SEQ ID NO: 3840606 - RNA, 17 nt, Human
ggguacauggugcuggg

SEQ ID NO: 3840607 - RNA, 22 nt, Human
ggguaccacugaaucuguacag

SEQ ID NO: 3840608 - RNA, 15 nt, Human
ggguacccacugcuc

SEQ ID NO: 3840609 - RNA, 19 nt, Human
ggguagaguuuacagcucu

SEQ ID NO: 3840610 - RNA, 13 nt, Human
ggguagcagcugg

SEQ ID NO: 3840611 - RNA, 21 nt, Human
ggguagcccgccugccagucc

SEQ ID NO: 3840612 - RNA, 16 nt, Human
ggguagcuagaggaac

SEQ ID NO: 3840613 - RNA, 23 nt, Human
ggguagcuguaaggcaugaagga

SEQ ID NO: 3840614 - RNA, 19 nt, Human
ggguagcuucugaccucag

SEQ ID NO: 3840615 - RNA, 18 nt, Human
ggguaggaggaugggcuc

SEQ ID NO: 3840616 - RNA, 13 nt, Human
ggguaggcaggau

SEQ ID NO: 3840617 - RNA, 18 nt, Human
ggguagggggcuggagga

SEQ ID NO: 3840618 - RNA, 12 nt, Human
ggguagugagca

SEQ ID NO: 3840619 - RNA, 13 nt, Human
ggguauauucauu

SEQ ID NO: 3840620 - RNA, 20 nt, Human
ggguauauuuuuguuuguuu

SEQ ID NO: 3840621 - RNA, 19 nt, Human
ggguauccaaguuggacug

SEQ ID NO: 3840622 - RNA, 21 nt, Human
ggguaugaagagcuugcuuug

SEQ ID NO: 3840623 - RNA, 10 nt, Human
ggguauuuuu

SEQ ID NO: 3840624 - RNA, 19 nt, Human
gggucaagaaacagccagc

SEQ ID NO: 3840625 - RNA, 13 nt, Human
gggucaaguuauu

SEQ ID NO: 3840626 - RNA, 20 nt, Human
gggucacucuggcagcucag

SEQ ID NO: 3840627 - RNA, 23 nt, Human
gggucacugaggccugagaccca

SEQ ID NO: 3840628 - RNA, 14 nt, Human
gggucagaagagag

SEQ ID NO: 3840629 - RNA, 18 nt, Human
gggucagccagggccugc

SEQ ID NO: 3840630 - RNA, 19 nt, Human
gggucaggaaggaugagca

SEQ ID NO: 3840631 - RNA, 15 nt, Human
gggucaggcagccag

SEQ ID NO: 3840632 - RNA, 12 nt, Human
gggucaggccuu

SEQ ID NO: 3840633 - RNA, 19 nt, Human
gggucaggccuuugagcuc

SEQ ID NO: 3840634 - RNA, 12 nt, Human
gggucaggcucc

SEQ ID NO: 3840635 - RNA, 20 nt, Human
gggucagguugacaggaggu

SEQ ID NO: 3840636 - RNA, 21 nt, Human
gggucauccugugcucggagg

SEQ ID NO: 3840637 - RNA, 21 nt, Human
gggucaucuguaccucugccu

SEQ ID NO: 3840638 - RNA, 21 nt, Human
gggucaugcccuccucuccca

SEQ ID NO: 3840639 - RNA, 21 nt, Human
gggucauguuugcagggguga

SEQ ID NO: 3840640 - RNA, 13 nt, Human
ggguccaaauaaa

SEQ ID NO: 3840641 - RNA, 20 nt, Human
ggguccaggauuccucuuuu

SEQ ID NO: 3840642 - RNA, 17 nt, Human
ggguccagggagcaggc

SEQ ID NO: 3840643 - RNA, 19 nt, Human
ggguccaggggaugggagg

SEQ ID NO: 3840644 - RNA, 15 nt, Human
gggucccaagcuggg

SEQ ID NO: 3840645 - RNA, 20 nt, Human
gggucccaagcugggcccca

SEQ ID NO: 3840646 - RNA, 17 nt, Human
gggucccacuuccccuc

SEQ ID NO: 3840647 - RNA, 13 nt, Human
gggucccagcagc

SEQ ID NO: 3840648 - RNA, 13 nt, Human
ggguccccagggc

SEQ ID NO: 3840649 - RNA, 16 nt, Human
ggguccccuccaggag

SEQ ID NO: 3840650 - RNA, 17 nt, Human
ggguccccuccaggagu

SEQ ID NO: 3840651 - RNA, 18 nt, Human
gggucccggcucuguggg

SEQ ID NO: 3840652 - RNA, 16 nt, Human
gggucccugcuguguu

SEQ ID NO: 3840653 - RNA, 16 nt, Human
ggguccuccuccaggg

SEQ ID NO: 3840654 - RNA, 17 nt, Human
ggguccuggccauccca

SEQ ID NO: 3840655 - RNA, 13 nt, Human
ggguccuggcucc

SEQ ID NO: 3840656 - RNA, 18 nt, Human
ggguccuggcuccugagg

SEQ ID NO: 3840657 - RNA, 16 nt, Human
ggguccuucccucucc

SEQ ID NO: 3840658 - RNA, 23 nt, Human
ggguccuucccucuccccaagac

SEQ ID NO: 3840659 - RNA, 15 nt, Human
ggguccuucuccaca

SEQ ID NO: 3840660 - RNA, 22 nt, Human
ggguccuuuugacacugcucua

SEQ ID NO: 3840661 - RNA, 17 nt, Human
gggucgacuucgggcug

SEQ ID NO: 3840662 - RNA, 13 nt, Human
gggucgcccauga

SEQ ID NO: 3840663 - RNA, 15 nt, Human
gggucgcccuggacu

SEQ ID NO: 3840664 - RNA, 14 nt, Human
gggucgccuguccu

SEQ ID NO: 3840665 - RNA, 15 nt, Human
gggucuauuccagcu

SEQ ID NO: 3840666 - RNA, 22 nt, Human
gggucucacuauguugcccagg

SEQ ID NO: 3840667 - RNA, 12 nt, Human
gggucucacucu

SEQ ID NO: 3840668 - RNA, 22 nt, Human
gggucucagggugucccagacc

SEQ ID NO: 3840669 - RNA, 15 nt, Human
gggucucccuggagu

SEQ ID NO: 3840670 - RNA, 17 nt, Human
gggucucccuggcuccc

SEQ ID NO: 3840671 - RNA, 21 nt, Human
gggucucccuggcucccuccu

SEQ ID NO: 3840672 - RNA, 15 nt, Human
gggucucuagugcug

SEQ ID NO: 3840673 - RNA, 22 nt, Human
gggucucucacagacaggaccc

SEQ ID NO: 3840674 - RNA, 17 nt, Human
gggucucucccucaggu

SEQ ID NO: 3840675 - RNA, 13 nt, Human
gggucucugcugc

SEQ ID NO: 3840676 - RNA, 16 nt, Human
gggucugagcuccagc

SEQ ID NO: 3840677 - RNA, 12 nt, Human
gggucugaggaa

SEQ ID NO: 3840678 - RNA, 21 nt, Human
gggucugaggaauccagaccc

SEQ ID NO: 3840679 - RNA, 20 nt, Human
gggucugccaccauccugcu

SEQ ID NO: 3840680 - RNA, 12 nt, Human
gggucuggcugg

SEQ ID NO: 3840681 - RNA, 14 nt, Human
gggucuggcuggug

SEQ ID NO: 3840682 - RNA, 23 nt, Human
gggucugggcggcgggcggcugg

SEQ ID NO: 3840683 - RNA, 13 nt, Human
gggucuguaaaau

SEQ ID NO: 3840684 - RNA, 14 nt, Human
gggucuguaaaauc

SEQ ID NO: 3840685 - RNA, 20 nt, Human
gggucuguagguugcacacu

SEQ ID NO: 3840686 - RNA, 21 nt, Human
gggucuguagguugcacacuu

SEQ ID NO: 3840687 - RNA, 20 nt, Human
gggucuucagcauucccucc

SEQ ID NO: 3840688 - RNA, 20 nt, Human
gggucuucagggggccaggu

SEQ ID NO: 3840689 - RNA, 19 nt, Human
gggucuugauucagucaca

SEQ ID NO: 3840690 - RNA, 19 nt, Human
gggauccccgccuggccag

SEQ ID NO: 3840691 - RNA, 17 nt, Human
gggauccgacugcuuug

SEQ ID NO: 3840692 - RNA, 14 nt, Human
gggauccugccugc

SEQ ID NO: 3840693 - RNA, 19 nt, Human
gggaucugguccuacccau

SEQ ID NO: 3840694 - RNA, 23 nt, Human
gggaucugguccuacccaucccc

SEQ ID NO: 3840695 - RNA, 20 nt, Human
gggaugacaugcacucagcu

SEQ ID NO: 3840696 - RNA, 15 nt, Human
gggaugagccgcugu

SEQ ID NO: 3840697 - RNA, 15 nt, Human
gggaugauugaagaa

SEQ ID NO: 3840698 - RNA, 16 nt, Human
gggaugauugaagaaa

SEQ ID NO: 3840699 - RNA, 17 nt, Human
gggaugauugaagaaac

SEQ ID NO: 3840700 - RNA, 16 nt, Human
gggaugcccuggaggu

SEQ ID NO: 3840701 - RNA, 12 nt, Human
gggaugcuucau

SEQ ID NO: 3840702 - RNA, 19 nt, Human
gggauggacgaucucccac

SEQ ID NO: 3840703 - RNA, 15 nt, Human
gggauggaggggagu

SEQ ID NO: 3840704 - RNA, 23 nt, Human
gggauggggggggauguggauca

SEQ ID NO: 3840705 - RNA, 19 nt, Human
gggaugguaagagaaaaga

SEQ ID NO: 3840706 - RNA, 15 nt, Human
gggaugguccugggg

SEQ ID NO: 3840707 - RNA, 12 nt, Human
gggauggugccc

SEQ ID NO: 3840708 - RNA, 22 nt, Human
gggauguucagcacugucccuu

SEQ ID NO: 3840709 - RNA, 13 nt, Human
gggauguucuggc

SEQ ID NO: 3840710 - RNA, 16 nt, Human
gggauguucuggcccu

SEQ ID NO: 3840711 - RNA, 13 nt, Human
gggauguuuuucu

SEQ ID NO: 3840712 - RNA, 16 nt, Human
gggauuaaccucugca

SEQ ID NO: 3840713 - RNA, 20 nt, Human
gggauuacaggcgugagcca

SEQ ID NO: 3840714 - RNA, 18 nt, Human
gggauuaugggucacagg

SEQ ID NO: 3840715 - RNA, 14 nt, Human
gggauucaggcugc

SEQ ID NO: 3840716 - RNA, 21 nt, Human
gggauuccugacccaggccgc

SEQ ID NO: 3840717 - RNA, 15 nt, Human
gggauugcugccacu

SEQ ID NO: 3840718 - RNA, 16 nt, Human
gggauuguaaaauggu

SEQ ID NO: 3840719 - RNA, 22 nt, Human
gggauuucaccacucaaaggcc

SEQ ID NO: 3840720 - RNA, 15 nt, Human
gggauuuccaugaug

SEQ ID NO: 3840721 - RNA, 14 nt, Human
gggauuucuuaggg

SEQ ID NO: 3840722 - RNA, 14 nt, Human
gggauuucuuugcu

SEQ ID NO: 3840723 - RNA, 23 nt, Human
gggauuuguugauucucuccauu

SEQ ID NO: 3840724 - RNA, 21 nt, Human
gggauuuucagcccucagaau

SEQ ID NO: 3840725 - RNA, 16 nt, Human
gggcaaaacugaauua

SEQ ID NO: 3840726 - RNA, 13 nt, Human
gggcaaauaauga

SEQ ID NO: 3840727 - RNA, 20 nt, Human
gggcaacaaagugagacucc

SEQ ID NO: 3840728 - RNA, 22 nt, Human
gggcaacagagcaagauccugu

SEQ ID NO: 3840729 - RNA, 16 nt, Human
gggcaacccccagccu

SEQ ID NO: 3840730 - RNA, 18 nt, Human
gggcaacccccagccugc

SEQ ID NO: 3840731 - RNA, 17 nt, Human
gggcaacccuggugacc

SEQ ID NO: 3840732 - RNA, 14 nt, Human
gggcaacgaagaaa

SEQ ID NO: 3840733 - RNA, 23 nt, Human
gggcaacgaagaaaaaaaauaac

SEQ ID NO: 3840734 - RNA, 21 nt, Human
gggcaagaagaucacgcuccc

SEQ ID NO: 3840735 - RNA, 19 nt, Human
gggcaauauucucuguaca

SEQ ID NO: 3840736 - RNA, 20 nt, Human
gggcaauauucucuguacau

SEQ ID NO: 3840737 - RNA, 18 nt, Human
gggcaauuuagaaaaaga

SEQ ID NO: 3840738 - RNA, 17 nt, Human
gggcacaaagggcccag

SEQ ID NO: 3840739 - RNA, 16 nt, Human
gggcacaagacugacg

SEQ ID NO: 3840740 - RNA, 12 nt, Human
gggcacacacug

SEQ ID NO: 3840741 - RNA, 23 nt, Human
gggcacaccgggcacucagaaga

SEQ ID NO: 3840742 - RNA, 15 nt, Human
gggcacaccuccucc

SEQ ID NO: 3840743 - RNA, 13 nt, Human
gggcacacgcugc

SEQ ID NO: 3840744 - RNA, 19 nt, Human
gggcacacgcugcucugcc

SEQ ID NO: 3840745 - RNA, 20 nt, Human
gggcacacgcugcucugccc

SEQ ID NO: 3840746 - RNA, 12 nt, Human
gguggacccagg

SEQ ID NO: 3840747 - RNA, 13 nt, Human
gguggacccaggg

SEQ ID NO: 3840748 - RNA, 15 nt, Human
gguggacucgccugu

SEQ ID NO: 3840749 - RNA, 17 nt, Human
gguggacuuagaaagca

SEQ ID NO: 3840750 - RNA, 20 nt, Human
gguggacuuagaaagcaggg

SEQ ID NO: 3840751 - RNA, 21 nt, Human
gguggacuugaacuuuccugg

SEQ ID NO: 3840752 - RNA, 21 nt, Human
gguggagaaagcacugaccug

SEQ ID NO: 3840753 - RNA, 15 nt, Human
gguggagaagccauu

SEQ ID NO: 3840754 - RNA, 18 nt, Human
gguggaggagagccuggu

SEQ ID NO: 3840755 - RNA, 15 nt, Human
gguggaggcuuccug

SEQ ID NO: 3840756 - RNA, 13 nt, Human
gguggagggccac

SEQ ID NO: 3840757 - RNA, 20 nt, Human
gguggagguugcauugagcu

SEQ ID NO: 3840758 - RNA, 22 nt, Human
gguggaucacgaggucaggaga

SEQ ID NO: 3840759 - RNA, 14 nt, Human
gguggauggcccca

SEQ ID NO: 3840760 - RNA, 13 nt, Human
gguggcaagagcc

SEQ ID NO: 3840761 - RNA, 20 nt, Human
gguggcaaggcugugcuccc

SEQ ID NO: 3840762 - RNA, 17 nt, Human
gguggcacaggcccccu

SEQ ID NO: 3840763 - RNA, 20 nt, Human
gguggcaccagcagccugga

SEQ ID NO: 3840764 - RNA, 23 nt, Human
gguggcaccagcgaagggagugc

SEQ ID NO: 3840765 - RNA, 18 nt, Human
gguggcagcccuguaggg

SEQ ID NO: 3840766 - RNA, 11 nt, Human
gguggcagcug

SEQ ID NO: 3840767 - RNA, 15 nt, Human
gguggcaggaccagg

SEQ ID NO: 3840768 - RNA, 18 nt, Human
gguggcaggaccaggacu

SEQ ID NO: 3840769 - RNA, 21 nt, Human
gguggcagugcagcaaccaga

SEQ ID NO: 3840770 - RNA, 16 nt, Human
gguggcagugggagcu

SEQ ID NO: 3840771 - RNA, 19 nt, Human
gguggcagugggagcugcc

SEQ ID NO: 3840772 - RNA, 22 nt, Human
gguggcagugggagcugccugu

SEQ ID NO: 3840773 - RNA, 21 nt, Human
gguggcaucauuccaggcccg

SEQ ID NO: 3840774 - RNA, 13 nt, Human
gguggcaucccag

SEQ ID NO: 3840775 - RNA, 19 nt, Human
gguggcaugugccuauagu

SEQ ID NO: 3840776 - RNA, 23 nt, Human
gguggcaugugccuauaguccca

SEQ ID NO: 3840777 - RNA, 16 nt, Human
gguggccaggccggga

SEQ ID NO: 3840778 - RNA, 17 nt, Human
gguggccaugccucagc

SEQ ID NO: 3840779 - RNA, 22 nt, Human
gguggcccauccccccucacca

SEQ ID NO: 3840780 - RNA, 18 nt, Human
gguggcccucuccccugc

SEQ ID NO: 3840781 - RNA, 19 nt, Human
gguggcccucuccccugcc

SEQ ID NO: 3840782 - RNA, 23 nt, Human
gguggcccugucccucccaccuc

SEQ ID NO: 3840783 - RNA, 21 nt, Human
gguggccgcugaguggcaggg

SEQ ID NO: 3840784 - RNA, 13 nt, Human
gguggccucccaa

SEQ ID NO: 3840785 - RNA, 22 nt, Human
gguggccucgggacaccugccc

SEQ ID NO: 3840786 - RNA, 23 nt, Human
gguggccucuccuuguggccugg

SEQ ID NO: 3840787 - RNA, 21 nt, Human
gguggcgacucuauagacucu

SEQ ID NO: 3840788 - RNA, 19 nt, Human
gguggcgggcaccuauagu

SEQ ID NO: 3840789 - RNA, 16 nt, Human
gguggcuacucugugc

SEQ ID NO: 3840790 - RNA, 23 nt, Human
gguggcuacucugugccagagcc

SEQ ID NO: 3840791 - RNA, 22 nt, Human
gguggcuagucaagcuccuccu

SEQ ID NO: 3840792 - RNA, 16 nt, Human
gguggcuagucagaga

SEQ ID NO: 3840793 - RNA, 14 nt, Human
gguggcucuggaau

SEQ ID NO: 3840794 - RNA, 15 nt, Human
gguggcugacccagu

SEQ ID NO: 3840795 - RNA, 22 nt, Human
gguggcuggagacgggugggcg

SEQ ID NO: 3840796 - RNA, 12 nt, Human
gguggcugggca

SEQ ID NO: 3840797 - RNA, 12 nt, Human
gguggcuggguu

SEQ ID NO: 3840798 - RNA, 15 nt, Human
gguggcuucagcucc

SEQ ID NO: 3840799 - RNA, 16 nt, Human
gguggcuucagcucca

SEQ ID NO: 3840800 - RNA, 17 nt, Human
gguggcuucagcuccag

SEQ ID NO: 3840801 - RNA, 21 nt, Human
gguggcuucuuuucuuuguau

SEQ ID NO: 3840802 - RNA, 23 nt, Human
gguggcuuuugcgguucaggaaa

SEQ ID NO: 3840803 - RNA, 16 nt, Human
ggugggagcaggagau

SEQ ID NO: 3840804 - RNA, 20 nt, Human
ggugggaggaucucuugagc

SEQ ID NO: 3840805 - RNA, 17 nt, Human
ggugggaggaugugaau

SEQ ID NO: 3840806 - RNA, 18 nt, Human
ggugggcaccaagagcca

SEQ ID NO: 3840807 - RNA, 18 nt, Human
ggugggcacccacccugg

SEQ ID NO: 3840808 - RNA, 20 nt, Human
ggugggcagaucacgagguc

SEQ ID NO: 3840809 - RNA, 14 nt, Human
ggugggcaggaaaa

SEQ ID NO: 3840810 - RNA, 20 nt, Human
ggugggccagccccucccac

SEQ ID NO: 3840811 - RNA, 13 nt, Human
ggugggccucugg

SEQ ID NO: 3840812 - RNA, 13 nt, Human
ggugggcucugug

SEQ ID NO: 3840813 - RNA, 15 nt, Human
ggugggcugagcccu

SEQ ID NO: 3840814 - RNA, 17 nt, Human
ggugggcugagcccugg

SEQ ID NO: 3840815 - RNA, 18 nt, Human
ggugggcugagcccuggc

SEQ ID NO: 3840816 - RNA, 14 nt, Human
ggugggcuucccag

SEQ ID NO: 3840817 - RNA, 22 nt, Human
ggugggcuugucauagccagug

SEQ ID NO: 3840818 - RNA, 21 nt, Human
gguggggagagacgggcccug

SEQ ID NO: 3840819 - RNA, 12 nt, Human
gguggggcggga

SEQ ID NO: 3840820 - RNA, 20 nt, Human
gguggggggaucacaagguc

SEQ ID NO: 3840821 - RNA, 22 nt, Human
gguggggggggggcgcggcugg

SEQ ID NO: 3840822 - RNA, 15 nt, Human
gguggggucaugccc

SEQ ID NO: 3840823 - RNA, 19 nt, Human
gguggggucaugcccuccu

SEQ ID NO: 3840824 - RNA, 23 nt, Human
ggugggguccuggagcagaccac

SEQ ID NO: 3840825 - RNA, 10 nt, Human
ggugggucca

SEQ ID NO: 3840826 - RNA, 20 nt, Human
gguggguccaggggccccuc

SEQ ID NO: 3840827 - RNA, 18 nt, Human
ggugggucccggcucugu

SEQ ID NO: 3840828 - RNA, 16 nt, Human
gguggguuuucuuccc

SEQ ID NO: 3840829 - RNA, 14 nt, Human
ggugguaacccugg

SEQ ID NO: 3840830 - RNA, 16 nt, Human
ggugguacccucugga

SEQ ID NO: 3840831 - RNA, 14 nt, Human
ggugguaugugugu

SEQ ID NO: 3840832 - RNA, 15 nt, Human
gguggucugaauguu

SEQ ID NO: 3840833 - RNA, 16 nt, Human
gguggucugcaggcag

SEQ ID NO: 3840834 - RNA, 21 nt, Human
guaaaauauuuugaaucaaua

SEQ ID NO: 3840835 - RNA, 15 nt, Human
guaaaaucuuucuuu

SEQ ID NO: 3840836 - RNA, 21 nt, Human
guaaaaucuuucuuucuuaga

SEQ ID NO: 3840837 - RNA, 15 nt, Human
guaaaaugucuuucc

SEQ ID NO: 3840838 - RNA, 23 nt, Human
guaaaaugugggauuauggguca

SEQ ID NO: 3840839 - RNA, 14 nt, Human
guaaaauugcaugg

SEQ ID NO: 3840840 - RNA, 16 nt, Human
guaaaauugccauauu

SEQ ID NO: 3840841 - RNA, 21 nt, Human
guaaaauugccauauugcaca

SEQ ID NO: 3840842 - RNA, 15 nt, Human
guaaacaaaaugaag

SEQ ID NO: 3840843 - RNA, 19 nt, Human
guaaacaaacucuugaaga

SEQ ID NO: 3840844 - RNA, 19 nt, Human
guaaacagccucuuuuuga

SEQ ID NO: 3840845 - RNA, 13 nt, Human
guaaacagugccu

SEQ ID NO: 3840846 - RNA, 17 nt, Human
guaaacagugccugcug

SEQ ID NO: 3840847 - RNA, 22 nt, Human
guaaacagugccugcugaauga

SEQ ID NO: 3840848 - RNA, 15 nt, Human
guaaacaucucagag

SEQ ID NO: 3840849 - RNA, 20 nt, Human
guaaacauguguuuuaauuc

SEQ ID NO: 3840850 - RNA, 12 nt, Human
guaaacauuuau

SEQ ID NO: 3840851 - RNA, 23 nt, Human
guaaaccaauccuaugcaugguu

SEQ ID NO: 3840852 - RNA, 15 nt, Human
guaaaccaauuuuuu

SEQ ID NO: 3840853 - RNA, 12 nt, Human
guaaaccacuga

SEQ ID NO: 3840854 - RNA, 13 nt, Human
guaaaccacugaa

SEQ ID NO: 3840855 - RNA, 14 nt, Human
guaaaccacugaaa

SEQ ID NO: 3840856 - RNA, 19 nt, Human
guaaaccacugaaaaaaua

SEQ ID NO: 3840857 - RNA, 22 nt, Human
guaaaccacugaaaaaauauau

SEQ ID NO: 3840858 - RNA, 21 nt, Human
guaaaccgcuuuggccugagu

SEQ ID NO: 3840859 - RNA, 20 nt, Human
guaaacgcugucccuaguaa

SEQ ID NO: 3840860 - RNA, 22 nt, Human
guaaacgggaacaugcccccug

SEQ ID NO: 3840861 - RNA, 21 nt, Human
guaaacuauuuaucuguguuu

SEQ ID NO: 3840862 - RNA, 14 nt, Human
guaaacugcccugu

SEQ ID NO: 3840863 - RNA, 17 nt, Human
guaaagaaaaauauuua

SEQ ID NO: 3840864 - RNA, 17 nt, Human
guaaagaaagagagaaa

SEQ ID NO: 3840865 - RNA, 19 nt, Human
guaaagaaagagagaaaau

SEQ ID NO: 3840866 - RNA, 23 nt, Human
guaaagaaagagagaaaauaaaa

SEQ ID NO: 3840867 - RNA, 16 nt, Human
guaaagaaaugucuua

SEQ ID NO: 3840868 - RNA, 14 nt, Human
guaaagacuggcuu

SEQ ID NO: 3840869 - RNA, 19 nt, Human
guaaagacugguuuucugc

SEQ ID NO: 3840870 - RNA, 16 nt, Human
guaaagacuguagaag

SEQ ID NO: 3840871 - RNA, 19 nt, Human
guaaagagaaacuuugugc

SEQ ID NO: 3840872 - RNA, 14 nt, Human
guaaagagaccuac

SEQ ID NO: 3840873 - RNA, 21 nt, Human
guaaagagaccuaccucaggu

SEQ ID NO: 3840874 - RNA, 22 nt, Human
guaaagagaccuaccucagguu

SEQ ID NO: 3840875 - RNA, 14 nt, Human
guaaagauuucugu

SEQ ID NO: 3840876 - RNA, 16 nt, Human
guaaagcauuccaaca

SEQ ID NO: 3840877 - RNA, 21 nt, Human
guaaagcccauuuuuaaaaua

SEQ ID NO: 3840878 - RNA, 15 nt, Human
guaaagcuagaaaug

SEQ ID NO: 3840879 - RNA, 15 nt, Human
guaaagggcaaauaa

SEQ ID NO: 3840880 - RNA, 15 nt, Human
guaaaguacuuguag

SEQ ID NO: 3840881 - RNA, 16 nt, Human
guaaaguauguaaaca

SEQ ID NO: 3840882 - RNA, 15 nt, Human
guaaaguauguauua

SEQ ID NO: 3840883 - RNA, 23 nt, Human
guaaaguauguauuauuuacauu

SEQ ID NO: 3840884 - RNA, 14 nt, Human
guaaaguccccaga

SEQ ID NO: 3840885 - RNA, 16 nt, Human
guaaaguccccagaga

SEQ ID NO: 3840886 - RNA, 18 nt, Human
guaaaguccccagagaaa

SEQ ID NO: 3840887 - RNA, 14 nt, Human
guaaagugaagaau

SEQ ID NO: 3840888 - RNA, 19 nt, Human
guaaagugaagaauccuuu

SEQ ID NO: 3840889 - RNA, 17 nt, Human
guaaagugauaauuucu

SEQ ID NO: 3840890 - RNA, 20 nt, Human
guaaaguguaacauaugcaa

SEQ ID NO: 3840891 - RNA, 21 nt, Human
guaaaguguggucccaacagg

SEQ ID NO: 3840892 - RNA, 22 nt, Human
guaaaguguggucccaacagga

SEQ ID NO: 3840893 - RNA, 18 nt, Human
guaaaguuagucuacucu

SEQ ID NO: 3840894 - RNA, 15 nt, Human
guaaauaaaaagaaa

SEQ ID NO: 3840895 - RNA, 16 nt, Human
guaaauaaaggaacca

SEQ ID NO: 3840896 - RNA, 12 nt, Human
guaaauaaugcu

SEQ ID NO: 3840897 - RNA, 13 nt, Human
guaaauaauucuu

SEQ ID NO: 3840898 - RNA, 21 nt, Human
guaaauacaauuuuguuucug

SEQ ID NO: 3840899 - RNA, 16 nt, Human
guaaauaccauugaca

SEQ ID NO: 3840900 - RNA, 21 nt, Human
guaaauaggaaucauucagaa

SEQ ID NO: 3840901 - RNA, 21 nt, Human
guaaauagguuucuaaaaagu

SEQ ID NO: 3840902 - RNA, 23 nt, Human
guaaauagguuucuaaaaaguca

SEQ ID NO: 3840903 - RNA, 15 nt, Human
guaaauaguauuuga

SEQ ID NO: 3840904 - RNA, 19 nt, Human
guaaauauauaaauauaua

SEQ ID NO: 3840905 - RNA, 14 nt, Human
guaaauauucuaua

SEQ ID NO: 3840906 - RNA, 12 nt, Human
guaaauauuuau

SEQ ID NO: 3840907 - RNA, 19 nt, Human
guaaaucagauguugaauu

SEQ ID NO: 3840908 - RNA, 14 nt, Human
guaaaucaguaaga

SEQ ID NO: 3840909 - RNA, 12 nt, Human
guaaaucugcca

SEQ ID NO: 3840910 - RNA, 13 nt, Human
guaaaucugccac

SEQ ID NO: 3840911 - RNA, 22 nt, Human
guaaaugaaguaacuugucuua

SEQ ID NO: 3840912 - RNA, 11 nt, Human
guaaaugccac

SEQ ID NO: 3840913 - RNA, 16 nt, Human
guaaaugguaugucau

SEQ ID NO: 3840914 - RNA, 16 nt, Human
guaaaugguguacaua

SEQ ID NO: 3840915 - RNA, 20 nt, Human
guaaaugguguacauaaugu

SEQ ID NO: 3840916 - RNA, 15 nt, Human
gaaucagugcaaaga

SEQ ID NO: 3840917 - RNA, 17 nt, Human
gaaucaguuuaaaagca

SEQ ID NO: 3840918 - RNA, 19 nt, Human
gaaucauaugauucugcuu

SEQ ID NO: 3840919 - RNA, 16 nt, Human
gaaucaugagccugcu

SEQ ID NO: 3840920 - RNA, 17 nt, Human
gaaucaugagccugcug

SEQ ID NO: 3840921 - RNA, 19 nt, Human
gaaucaugagccugcugga

SEQ ID NO: 3840922 - RNA, 11 nt, Human
gaaucauguag

SEQ ID NO: 3840923 - RNA, 14 nt, Human
gaaucauguaguau

SEQ ID NO: 3840924 - RNA, 21 nt, Human
gaaucaugucaggccugugug

SEQ ID NO: 3840925 - RNA, 21 nt, Human
gaaucauuauuuauuaaauuu

SEQ ID NO: 3840926 - RNA, 21 nt, Human
gaaucauuguccagagcugcu

SEQ ID NO: 3840927 - RNA, 22 nt, Human
gaaucauuucuauuucuccucc

SEQ ID NO: 3840928 - RNA, 12 nt, Human
gaauccaaacuu

SEQ ID NO: 3840929 - RNA, 12 nt, Human
gaauccaagauu

SEQ ID NO: 3840930 - RNA, 16 nt, Human
gaauccaagcgagguc

SEQ ID NO: 3840931 - RNA, 17 nt, Human
gaauccacucccaggca

SEQ ID NO: 3840932 - RNA, 18 nt, Human
gaauccagacccggcugc

SEQ ID NO: 3840933 - RNA, 20 nt, Human
gaauccagacccggcugcgu

SEQ ID NO: 3840934 - RNA, 13 nt, Human
gaauccaugcuug

SEQ ID NO: 3840935 - RNA, 16 nt, Human
gaaucccaaauuugau

SEQ ID NO: 3840936 - RNA, 16 nt, Human
gaaucccacuguauga

SEQ ID NO: 3840937 - RNA, 16 nt, Human
gaauccccgaaggugc

SEQ ID NO: 3840938 - RNA, 16 nt, Human
gaauccccucccuguc

SEQ ID NO: 3840939 - RNA, 17 nt, Human
gaaucccuguucauugu

SEQ ID NO: 3840940 - RNA, 14 nt, Human
gaauccuggcagcc

SEQ ID NO: 3840941 - RNA, 22 nt, Human
gaauccuguccucagcuucuua

SEQ ID NO: 3840942 - RNA, 14 nt, Human
gaauccugucgauu

SEQ ID NO: 3840943 - RNA, 12 nt, Human
gaauccuuucag

SEQ ID NO: 3840944 - RNA, 14 nt, Human
gaaucgaggaacca

SEQ ID NO: 3840945 - RNA, 18 nt, Human
gaaucgaggaaccagagc

SEQ ID NO: 3840946 - RNA, 21 nt, Human
gaaucuagaagaaaugaaauu

SEQ ID NO: 3840947 - RNA, 17 nt, Human
gaaucuauauuuaacaa

SEQ ID NO: 3840948 - RNA, 15 nt, Human
gaaucuauuauacug

SEQ ID NO: 3840949 - RNA, 16 nt, Human
gaaucuauuuaaguaa

SEQ ID NO: 3840950 - RNA, 20 nt, Human
gaaucuauuuaucuucauuu

SEQ ID NO: 3840951 - RNA, 15 nt, Human
gaaucuauuuucuau

SEQ ID NO: 3840952 - RNA, 16 nt, Human
gaaucuauuuucuaug

SEQ ID NO: 3840953 - RNA, 19 nt, Human
gaaucucaagaugggggca

SEQ ID NO: 3840954 - RNA, 23 nt, Human
gaaucucaguugauuuucuggau

SEQ ID NO: 3840955 - RNA, 19 nt, Human
gaaucucauaauuuauaca

SEQ ID NO: 3840956 - RNA, 18 nt, Human
gaaucucccacuccagcg

SEQ ID NO: 3840957 - RNA, 14 nt, Human
gaaucugaauguaa

SEQ ID NO: 3840958 - RNA, 22 nt, Human
gaaucugcaauucaaaaguucc

SEQ ID NO: 3840959 - RNA, 16 nt, Human
gaaucuggagaccagg

SEQ ID NO: 3840960 - RNA, 16 nt, Human
gaaucuguauauauuu

SEQ ID NO: 3840961 - RNA, 16 nt, Human
gaaucuguaugauucu

SEQ ID NO: 3840962 - RNA, 14 nt, Human
gaaucugugugaaa

SEQ ID NO: 3840963 - RNA, 15 nt, Human
gaaucuugguuugcc

SEQ ID NO: 3840964 - RNA, 15 nt, Human
gaaucuugucucaau

SEQ ID NO: 3840965 - RNA, 18 nt, Human
gaaucuugucucaaugcu

SEQ ID NO: 3840966 - RNA, 20 nt, Human
gaaucuugucucaaugcuca

SEQ ID NO: 3840967 - RNA, 22 nt, Human
gaaucuugucucaaugcucaua

SEQ ID NO: 3840968 - RNA, 13 nt, Human
gaaucuuuaauua

SEQ ID NO: 3840969 - RNA, 18 nt, Human
gaaucuuuauugagaaag

SEQ ID NO: 3840970 - RNA, 22 nt, Human
gaaucuuuauugagaaagagca

SEQ ID NO: 3840971 - RNA, 14 nt, Human
gaaugaaaaaugaa

SEQ ID NO: 3840972 - RNA, 19 nt, Human
gaaugaaaaaugaaagaug

SEQ ID NO: 3840973 - RNA, 20 nt, Human
gaaugaaaauaacugaauuu

SEQ ID NO: 3840974 - RNA, 16 nt, Human
gaaugaaacccccaca

SEQ ID NO: 3840975 - RNA, 18 nt, Human
gaaugaaauacuguuuga

SEQ ID NO: 3840976 - RNA, 16 nt, Human
gaaugaaauugcugaa

SEQ ID NO: 3840977 - RNA, 18 nt, Human
gaaugaaccacaucuugc

SEQ ID NO: 3840978 - RNA, 22 nt, Human
gaaugaaccacaucuugcucug

SEQ ID NO: 3840979 - RNA, 12 nt, Human
guacaguguuac

SEQ ID NO: 3840980 - RNA, 16 nt, Human
guacaguguucuguuu

SEQ ID NO: 3840981 - RNA, 22 nt, Human
guacaguucaguuccucuuugc

SEQ ID NO: 3840982 - RNA, 12 nt, Human
guacaguucuuc

SEQ ID NO: 3840983 - RNA, 12 nt, Human
guacaguuuuua

SEQ ID NO: 3840984 - RNA, 22 nt, Human
guacauaaaggugguaugugug

SEQ ID NO: 3840985 - RNA, 20 nt, Human
guacauaaauugcauaaagc

SEQ ID NO: 3840986 - RNA, 22 nt, Human
guacauaaauugcauaaagcau

SEQ ID NO: 3840987 - RNA, 23 nt, Human
guacauaauacacuugcccugcu

SEQ ID NO: 3840988 - RNA, 18 nt, Human
guacauaauacugaacca

SEQ ID NO: 3840989 - RNA, 20 nt, Human
guacauaaugcgugcauacc

SEQ ID NO: 3840990 - RNA, 14 nt, Human
guacauacuuuuug

SEQ ID NO: 3840991 - RNA, 13 nt, Human
guacauagccuau

SEQ ID NO: 3840992 - RNA, 22 nt, Human
guacauagccuauauuuacagu

SEQ ID NO: 3840993 - RNA, 14 nt, Human
guacauaggcagca

SEQ ID NO: 3840994 - RNA, 18 nt, Human
guacauauguaaaauaaa

SEQ ID NO: 3840995 - RNA, 14 nt, Human
guacauaugugcug

SEQ ID NO: 3840996 - RNA, 19 nt, Human
guacauauuuauuuucuuu

SEQ ID NO: 3840997 - RNA, 20 nt, Human
guacauauuuguggaauaau

SEQ ID NO: 3840998 - RNA, 17 nt, Human
guacaucccauguaaca

SEQ ID NO: 3840999 - RNA, 20 nt, Human
guacaucccauguaacagaa

SEQ ID NO: 3841000 - RNA, 23 nt, Human
guacaucccauguaacagaaagg

SEQ ID NO: 3841001 - RNA, 14 nt, Human
guacaucuggccuu

SEQ ID NO: 3841002 - RNA, 11 nt, Human
guacaugaaau

SEQ ID NO: 3841003 - RNA, 11 nt, Human
guacaugagaa

SEQ ID NO: 3841004 - RNA, 13 nt, Human
guacaugugaggc

SEQ ID NO: 3841005 - RNA, 19 nt, Human
guacauguguagccugugc

SEQ ID NO: 3841006 - RNA, 18 nt, Human
guacauguucgggugugg

SEQ ID NO: 3841007 - RNA, 21 nt, Human
guacauguucggguguggguu

SEQ ID NO: 3841008 - RNA, 15 nt, Human
guacauucucaguuu

SEQ ID NO: 3841009 - RNA, 14 nt, Human
guacauuuaaauuu

SEQ ID NO: 3841010 - RNA, 14 nt, Human
guacauuuaugauu

SEQ ID NO: 3841011 - RNA, 20 nt, Human
guacauuuaugauuuaauaa

SEQ ID NO: 3841012 - RNA, 21 nt, Human
guacauuuaugauuuaauaaa

SEQ ID NO: 3841013 - RNA, 18 nt, Human
guacauuucuaagucaaa

SEQ ID NO: 3841014 - RNA, 15 nt, Human
guacauuuuguaaca

SEQ ID NO: 3841015 - RNA, 18 nt, Human
guacauuuuguuguaaaa

SEQ ID NO: 3841016 - RNA, 19 nt, Human
guacauuuuguuguaaaaa

SEQ ID NO: 3841017 - RNA, 22 nt, Human
guacauuuuguuguaaaaagaa

SEQ ID NO: 3841018 - RNA, 19 nt, Human
guacauuuuucaacuuuga

SEQ ID NO: 3841019 - RNA, 20 nt, Human
guacauuuuucaacuuugaa

SEQ ID NO: 3841020 - RNA, 21 nt, Human
guacauuuuucaacuuugaau

SEQ ID NO: 3841021 - RNA, 16 nt, Human
guaccaaaauuuuaaa

SEQ ID NO: 3841022 - RNA, 21 nt, Human
guaccaaaguuuuaucaaguu

SEQ ID NO: 3841023 - RNA, 20 nt, Human
guaccaagacuacuagggaa

SEQ ID NO: 3841024 - RNA, 23 nt, Human
guaccaagacuacuagggaaaug

SEQ ID NO: 3841025 - RNA, 16 nt, Human
guaccacuuuugcaaa

SEQ ID NO: 3841026 - RNA, 16 nt, Human
guaccagauaacuuuu

SEQ ID NO: 3841027 - RNA, 16 nt, Human
guaccagcccagaugu

SEQ ID NO: 3841028 - RNA, 13 nt, Human
guaccagccccac

SEQ ID NO: 3841029 - RNA, 16 nt, Human
guaccagccccacccu

SEQ ID NO: 3841030 - RNA, 16 nt, Human
guaccagcccuggggc

SEQ ID NO: 3841031 - RNA, 17 nt, Human
guaccagcccuggggcu

SEQ ID NO: 3841032 - RNA, 14 nt, Human
guaccagcugcgcu

SEQ ID NO: 3841033 - RNA, 16 nt, Human
guaccagcugcgcuug

SEQ ID NO: 3841034 - RNA, 19 nt, Human
guaccagcugcgcuugcuu

SEQ ID NO: 3841035 - RNA, 18 nt, Human
guaccaggucuccuccac

SEQ ID NO: 3841036 - RNA, 11 nt, Human
guaccaguuaa

SEQ ID NO: 3841037 - RNA, 16 nt, Human
guaccaguuaauuuuu

SEQ ID NO: 3841038 - RNA, 22 nt, Human
guaccauuuaauggggaggaca

SEQ ID NO: 3841039 - RNA, 19 nt, Human
guaccauuuauacaaauua

SEQ ID NO: 3841040 - RNA, 21 nt, Human
guaccauuuauacaaauuaga

SEQ ID NO: 3841041 - RNA, 18 nt, Human
guacccaaaagcucagcc

SEQ ID NO: 3841042 - RNA, 22 nt, Human
guacccaauagcugcccauuuc

SEQ ID NO: 3841043 - RNA, 14 nt, Human
guacccaccugagc

SEQ ID NO: 3841044 - RNA, 15 nt, Human
guacccacugcucug

SEQ ID NO: 3841045 - RNA, 20 nt, Human
guacccagccaucugcccag

SEQ ID NO: 3841046 - RNA, 17 nt, Human
guacccaucuaguacuu

SEQ ID NO: 3841047 - RNA, 13 nt, Human
guaccccacccuc

SEQ ID NO: 3841048 - RNA, 13 nt, Human
guacccccaggac

SEQ ID NO: 3841049 - RNA, 13 nt, Human
guacccccgccca

SEQ ID NO: 3841050 - RNA, 19 nt, Human
guacccccgcccaggcugg

SEQ ID NO: 3841051 - RNA, 17 nt, Human
guacccggggcccaggg

SEQ ID NO: 3841052 - RNA, 18 nt, Human
guacccggggcccagggc

SEQ ID NO: 3841053 - RNA, 17 nt, Human
guacccucucagcucca

SEQ ID NO: 3841054 - RNA, 13 nt, Human
guaccuaagggag

SEQ ID NO: 3841055 - RNA, 19 nt, Human
guaccuauaaaguaaagcu

SEQ ID NO: 3841056 - RNA, 21 nt, Human
guaccuauaaaguaaagcuaa

SEQ ID NO: 3841057 - RNA, 14 nt, Human
guaccuauuuucau

SEQ ID NO: 3841058 - RNA, 20 nt, Human
guaccuccccugccuugcug

SEQ ID NO: 3841059 - RNA, 16 nt, Human
guaccuccucucagug

SEQ ID NO: 3841060 - RNA, 21 nt, Human
guaccucuugagccuugaacu

SEQ ID NO: 3841061 - RNA, 12 nt, Human
guaccugagggu

SEQ ID NO: 3841062 - RNA, 15 nt, Human
guaccugagggucug

SEQ ID NO: 3841063 - RNA, 19 nt, Human
guaccuguuccuuagaccu

SEQ ID NO: 3841064 - RNA, 23 nt, Human
guaccuugaacacugggggaggg

SEQ ID NO: 3841065 - RNA, 18 nt, Human
guaccuugaccuuuguac

SEQ ID NO: 3841066 - RNA, 19 nt, Human
guaccuugaccuuuguaca

SEQ ID NO: 3841067 - RNA, 13 nt, Human
guaccuuugucac

SEQ ID NO: 3841068 - RNA, 23 nt, Human
guaccuuuuuuguuuuuucaaaa

SEQ ID NO: 3841069 - RNA, 23 nt, Human
guacgaaccuacaguuuuaacug

SEQ ID NO: 3841070 - RNA, 15 nt, Human
guacgaagaguauuu

SEQ ID NO: 3841071 - RNA, 21 nt, Human
guacgacucuuuuccaaacac

SEQ ID NO: 3841072 - RNA, 15 nt, Human
guacgaugacagugu

SEQ ID NO: 3841073 - RNA, 17 nt, Human
guacggacauaaaagca

SEQ ID NO: 3841074 - RNA, 14 nt, Human
guacgucugacagg

SEQ ID NO: 3841075 - RNA, 15 nt, Human
guacguggagaggga

SEQ ID NO: 3841076 - RNA, 17 nt, Human
guacguugugcauuugg

SEQ ID NO: 3841077 - RNA, 14 nt, Human
guacguuuguaugu

SEQ ID NO: 3841078 - RNA, 22 nt, Human
guacuaacuccuaggaaaauac

SEQ ID NO: 3841079 - RNA, 15 nt, Human
guacuaaggaaucuu

SEQ ID NO: 3841080 - RNA, 23 nt, Human
guacuaaggaaucuuucugcuuu

SEQ ID NO: 3841081 - RNA, 17 nt, Human
guacuaauauuucugua

SEQ ID NO: 3841082 - RNA, 12 nt, Human
guacuacaauuu

SEQ ID NO: 3841083 - RNA, 23 nt, Human
guacuacacauuuuuaaauuguu

SEQ ID NO: 3841084 - RNA, 18 nt, Human
guacuaggauacugcugc

SEQ ID NO: 3841085 - RNA, 22 nt, Human
guacuaggauacugcugcguca

SEQ ID NO: 3841086 - RNA, 17 nt, Human
guacuaguacuguguac

SEQ ID NO: 3841087 - RNA, 17 nt, Human
guacuaguguucuguuu

SEQ ID NO: 3841088 - RNA, 17 nt, Human
guacuaguuacacaucu

SEQ ID NO: 3841089 - RNA, 21 nt, Human
guacuauaaugaaaacauccu

SEQ ID NO: 3841090 - RNA, 21 nt, Human
guacuauaucuguuuuacugc

SEQ ID NO: 3841091 - RNA, 21 nt, Human
guacuaucugugcguagaagu

SEQ ID NO: 3841092 - RNA, 17 nt, Human
guacucaggaggcugag

SEQ ID NO: 3841093 - RNA, 14 nt, Human
guacucauuaaaaa

SEQ ID NO: 3841094 - RNA, 21 nt, Human
guacuccacacugcacaauaa

SEQ ID NO: 3841095 - RNA, 16 nt, Human
guacucccucucagga

SEQ ID NO: 3841096 - RNA, 15 nt, Human
guacuccugcaaaau

SEQ ID NO: 3841097 - RNA, 16 nt, Human
guacuccugcaaaauu

SEQ ID NO: 3841098 - RNA, 21 nt, Human
guacucucaucacuacaguau

SEQ ID NO: 3841099 - RNA, 11 nt, Human
guacucuccua

SEQ ID NO: 3841100 - RNA, 14 nt, Human
guacucugaaacac

SEQ ID NO: 3841101 - RNA, 21 nt, Human
guacucugaaacacacugaaa

SEQ ID NO: 3841102 - RNA, 13 nt, Human
guacucuggccuc

SEQ ID NO: 3841103 - RNA, 14 nt, Human
guacucuggccucu

SEQ ID NO: 3841104 - RNA, 13 nt, Human
guacucuuccgaa

SEQ ID NO: 3841105 - RNA, 22 nt, Human
guacucuuccgaaaaauccucu

SEQ ID NO: 3841106 - RNA, 14 nt, Human
guacugaauuuuuu

SEQ ID NO: 3841107 - RNA, 19 nt, Human
guacugaauuuuuuuguaa

SEQ ID NO: 3841108 - RNA, 20 nt, Human
guacugaauuuuuuuguaau

SEQ ID NO: 3841109 - RNA, 18 nt, Human
guacugacuuugcuugcu

SEQ ID NO: 3841110 - RNA, 17 nt, Human
guacugagcagugauau

SEQ ID NO: 3841111 - RNA, 17 nt, Human
guacugauugagaaguu

SEQ ID NO: 3841112 - RNA, 20 nt, Human
guacugauuucaguaagucu

SEQ ID NO: 3841113 - RNA, 19 nt, Human
guacugccccccaugagga

SEQ ID NO: 3841114 - RNA, 16 nt, Human
guacugccugcuuggg

SEQ ID NO: 3841115 - RNA, 17 nt, Human
guacugcucaggcugca

SEQ ID NO: 3841116 - RNA, 23 nt, Human
gacacagcagcuucaccagagca

SEQ ID NO: 3841117 - RNA, 13 nt, Human
gacacagcguccc

SEQ ID NO: 3841118 - RNA, 21 nt, Human
gacacagcgucccuagcagug

SEQ ID NO: 3841119 - RNA, 22 nt, Human
gacacagcgucccuagcaguga

SEQ ID NO: 3841120 - RNA, 13 nt, Human
gacacagcucuuc

SEQ ID NO: 3841121 - RNA, 16 nt, Human
gacacagcucuucucc

SEQ ID NO: 3841122 - RNA, 17 nt, Human
gacacagcucuucucca

SEQ ID NO: 3841123 - RNA, 16 nt, Human
gacaucacaggguggg

SEQ ID NO: 3841124 - RNA, 19 nt, Human
gacaucacagggugggccu

SEQ ID NO: 3841125 - RNA, 13 nt, Human
gacaucacuggca

SEQ ID NO: 3841126 - RNA, 11 nt, Human
gacaucacugu

SEQ ID NO: 3841127 - RNA, 22 nt, Human
gacaucacuuguacaaaauaaa

SEQ ID NO: 3841128 - RNA, 15 nt, Human
gacaucagccagcug

SEQ ID NO: 3841129 - RNA, 13 nt, Human
gacaucagcuggu

SEQ ID NO: 3841130 - RNA, 19 nt, Human
gacaucaguggcauggcuc

SEQ ID NO: 3841131 - RNA, 13 nt, Human
gacauccaggagg

SEQ ID NO: 3841132 - RNA, 14 nt, Human
guacuggauuuaac

SEQ ID NO: 3841133 - RNA, 16 nt, Human
guacuggcaugguacg

SEQ ID NO: 3841134 - RNA, 19 nt, Human
guacuggcugauggaguaa

SEQ ID NO: 3841135 - RNA, 20 nt, Human
guacugggauuacaggcgug

SEQ ID NO: 3841136 - RNA, 21 nt, Human
guacuggggguugcgggggga

SEQ ID NO: 3841137 - RNA, 15 nt, Human
guacugguaagauug

SEQ ID NO: 3841138 - RNA, 19 nt, Human
guacuguaauaauaccuca

SEQ ID NO: 3841139 - RNA, 12 nt, Human
guacuguacuaa

SEQ ID NO: 3841140 - RNA, 16 nt, Human
guacuguauagacagu

SEQ ID NO: 3841141 - RNA, 18 nt, Human
guacuguaugaucaaaug

SEQ ID NO: 3841142 - RNA, 23 nt, Human
guacuguaugaucaaauguuuaa

SEQ ID NO: 3841143 - RNA, 15 nt, Human
guacuguaugugaug

SEQ ID NO: 3841144 - RNA, 16 nt, Human
guacugugggcaauuu

SEQ ID NO: 3841145 - RNA, 17 nt, Human
guacugugggcaauuua

SEQ ID NO: 3841146 - RNA, 20 nt, Human
guacugugggcaauuuagaa

SEQ ID NO: 3841147 - RNA, 22 nt, Human
guacugugggcaauuuagaaaa

SEQ ID NO: 3841148 - RNA, 17 nt, Human
guacuguucggaagggg

SEQ ID NO: 3841149 - RNA, 22 nt, Human
guacuguucggaagggguuccu

SEQ ID NO: 3841150 - RNA, 14 nt, Human
guacuuaacuauuc

SEQ ID NO: 3841151 - RNA, 19 nt, Human
guacuuagaguuucuguuu

SEQ ID NO: 3841152 - RNA, 15 nt, Human
guacuuauuacugcu

SEQ ID NO: 3841153 - RNA, 19 nt, Human
guacuucagcaagagagaa

SEQ ID NO: 3841154 - RNA, 21 nt, Human
guacuucagcaagagagaacc

SEQ ID NO: 3841155 - RNA, 15 nt, Human
guacuucaugcuguc

SEQ ID NO: 3841156 - RNA, 16 nt, Human
guacuucuccacccug

SEQ ID NO: 3841157 - RNA, 15 nt, Human
guacuucuucuguaa

SEQ ID NO: 3841158 - RNA, 18 nt, Human
guacuucuucuguaauau

SEQ ID NO: 3841159 - RNA, 18 nt, Human
guacuucuugaauauaaa

SEQ ID NO: 3841160 - RNA, 19 nt, Human
guacuucuugaauauaaaa

SEQ ID NO: 3841161 - RNA, 22 nt, Human
guacuugaaaucuaggauuauu

SEQ ID NO: 3841162 - RNA, 22 nt, Human
guacuugcucuugaugccuggc

SEQ ID NO: 3841163 - RNA, 21 nt, Human
guacuugcugcuauuuuacug

SEQ ID NO: 3841164 - RNA, 15 nt, Human
guacuuggccuuugg

SEQ ID NO: 3841165 - RNA, 13 nt, Human
guacuugguccaa

SEQ ID NO: 3841166 - RNA, 19 nt, Human
guacuugguccaacugcaa

SEQ ID NO: 3841167 - RNA, 12 nt, Human
guacuuguaguu

SEQ ID NO: 3841168 - RNA, 23 nt, Human
guacuuuauuuucuauaauuuaa

SEQ ID NO: 3841169 - RNA, 12 nt, Human
guacuuucuguu

SEQ ID NO: 3841170 - RNA, 13 nt, Human
guacuuucuguua

SEQ ID NO: 3841171 - RNA, 20 nt, Human
guacuuugauucacauguuu

SEQ ID NO: 3841172 - RNA, 14 nt, Human
guacuuuggaggcc

SEQ ID NO: 3841173 - RNA, 16 nt, Human
guacuuuuggaaucua

SEQ ID NO: 3841174 - RNA, 22 nt, Human
guacuuuuggaaucuagaagaa

SEQ ID NO: 3841175 - RNA, 15 nt, Human
guacuuuuugugaag

SEQ ID NO: 3841176 - RNA, 12 nt, Human
guagaaaaacau

SEQ ID NO: 3841177 - RNA, 18 nt, Human
guagaaaagaacuggaaa

SEQ ID NO: 3841178 - RNA, 20 nt, Human
guagaaaagggaacugaaca

SEQ ID NO: 3841179 - RNA, 13 nt, Human
guagaaaauguga

SEQ ID NO: 3841180 - RNA, 15 nt, Human
guagaaaaugugacc

SEQ ID NO: 3841181 - RNA, 19 nt, Human
guagaaacugcagggaaaa

SEQ ID NO: 3841182 - RNA, 17 nt, Human
guagaaaggccuuuaaa

SEQ ID NO: 3841183 - RNA, 22 nt, Human
guagaaaggggcccaguccugg

SEQ ID NO: 3841184 - RNA, 17 nt, Human
guagaaaugguuguauu

SEQ ID NO: 3841185 - RNA, 20 nt, Human
guagaaaugguuguauuaga

SEQ ID NO: 3841186 - RNA, 23 nt, Human
guagaaauuuuacaauaggugcu

SEQ ID NO: 3841187 - RNA, 22 nt, Human
guagaacacaaggucauuugcu

SEQ ID NO: 3841188 - RNA, 22 nt, Human
guagaacgccagggaccccaga

SEQ ID NO: 3841189 - RNA, 18 nt, Human
guagaacucacucugggc

SEQ ID NO: 3841190 - RNA, 20 nt, Human
guagaacucacucugggcug

SEQ ID NO: 3841191 - RNA, 14 nt, Human
guagaacuuuguau

SEQ ID NO: 3841192 - RNA, 21 nt, Human
guagaacuuuguauaguuaug

SEQ ID NO: 3841193 - RNA, 13 nt, Human
guagaagagggau

SEQ ID NO: 3841194 - RNA, 18 nt, Human
guagaagcccuucuaccu

SEQ ID NO: 3841195 - RNA, 14 nt, Human
guagaagggaaagc

SEQ ID NO: 3841196 - RNA, 17 nt, Human
guagaaggguuauauuu

SEQ ID NO: 3841197 - RNA, 15 nt, Human
guagaaggucggagg

SEQ ID NO: 3841198 - RNA, 21 nt, Human
guagaagucuuagauguauau

SEQ ID NO: 3841199 - RNA, 15 nt, Human
guagaaguuuuugua

SEQ ID NO: 3841200 - RNA, 19 nt, Human
guagaauagccuguggccu

SEQ ID NO: 3841201 - RNA, 14 nt, Human
guagaaucugugua

SEQ ID NO: 3841202 - RNA, 22 nt, Human
guagaaugaccuuguaauguaa

SEQ ID NO: 3841203 - RNA, 19 nt, Human
guagaauguaaagcuuguc

SEQ ID NO: 3841204 - RNA, 21 nt, Human
guagaauguaaagcuugucug

SEQ ID NO: 3841205 - RNA, 20 nt, Human
guagaauguauuguaccuuu

SEQ ID NO: 3841206 - RNA, 16 nt, Human
guagaauuguuauaga

SEQ ID NO: 3841207 - RNA, 15 nt, Human
guagacaucuguccu

SEQ ID NO: 3841208 - RNA, 15 nt, Human
guagacauuuauaac

SEQ ID NO: 3841209 - RNA, 21 nt, Human
guagacauuuuaacaagaaga

SEQ ID NO: 3841210 - RNA, 22 nt, Human
guagacauuuuaacaagaagau

SEQ ID NO: 3841211 - RNA, 15 nt, Human
guagaccccuggcug

SEQ ID NO: 3841212 - RNA, 16 nt, Human
guagaccccuggcugg

SEQ ID NO: 3841213 - RNA, 16 nt, Human
guagaccuagggagga

SEQ ID NO: 3841214 - RNA, 21 nt, Human
guagaccugucuccuggcggu

SEQ ID NO: 3841215 - RNA, 16 nt, Human
guagacuauauacaug

SEQ ID NO: 3841216 - RNA, 11 nt, Human
guagagacagg

SEQ ID NO: 3841217 - RNA, 13 nt, Human
guagagacagggu

SEQ ID NO: 3841218 - RNA, 23 nt, Human
guagagacaggguuucaccaugu

SEQ ID NO: 3841219 - RNA, 17 nt, Human
guagagauggaggagga

SEQ ID NO: 3841220 - RNA, 15 nt, Human
guagaggaaggaugc

SEQ ID NO: 3841221 - RNA, 15 nt, Human
guagaggcuuguuua

SEQ ID NO: 3841222 - RNA, 19 nt, Human
guagagguacacuugugaa

SEQ ID NO: 3841223 - RNA, 15 nt, Human
guagagucaucucca

SEQ ID NO: 3841224 - RNA, 23 nt, Human
guagagucaucuccaucagcugu

SEQ ID NO: 3841225 - RNA, 14 nt, Human
guagagucugaggg

SEQ ID NO: 3841226 - RNA, 15 nt, Human
guagagugggagcug

SEQ ID NO: 3841227 - RNA, 20 nt, Human
guagaguguagacuguggcu

SEQ ID NO: 3841228 - RNA, 14 nt, Human
guagaguuaagaag

SEQ ID NO: 3841229 - RNA, 23 nt, Human
guagaguugcugagagggcucga

SEQ ID NO: 3841230 - RNA, 21 nt, Human
guagauaaguguucugucuga

SEQ ID NO: 3841231 - RNA, 23 nt, Human
guagauaguaugcacuauauaca

SEQ ID NO: 3841232 - RNA, 13 nt, Human
guagauauuacuu

SEQ ID NO: 3841233 - RNA, 14 nt, Human
guagauauuuggcu

SEQ ID NO: 3841234 - RNA, 17 nt, Human
guagaucaccagaauaa

SEQ ID NO: 3841235 - RNA, 19 nt, Human
guagaucaccagaauaaac

SEQ ID NO: 3841236 - RNA, 17 nt, Human
guagaucagagcagcag

SEQ ID NO: 3841237 - RNA, 17 nt, Human
guagaucaguggucucc

SEQ ID NO: 3841238 - RNA, 15 nt, Human
guagauccauuucca

SEQ ID NO: 3841239 - RNA, 23 nt, Human
guagaugaaaaagcauguacagu

SEQ ID NO: 3841240 - RNA, 14 nt, Human
guagauuaaaaauu

SEQ ID NO: 3841241 - RNA, 13 nt, Human
guagauucugugg

SEQ ID NO: 3841242 - RNA, 19 nt, Human
guagauucuguggaacaag

SEQ ID NO: 3841243 - RNA, 21 nt, Human
guagauugcagaaaauucugu

SEQ ID NO: 3841244 - RNA, 23 nt, Human
guagauugcagaaaauucugugc

SEQ ID NO: 3841245 - RNA, 16 nt, Human
guagauugcuucugua

SEQ ID NO: 3841246 - RNA, 16 nt, Human
guagauuuauuucauc

SEQ ID NO: 3841247 - RNA, 16 nt, Human
guagauuugauuuuuu

SEQ ID NO: 3841248 - RNA, 21 nt, Human
guagauuuuaaaaguuauuaa

SEQ ID NO: 3841249 - RNA, 13 nt, Human
guagauuuucuuu

SEQ ID NO: 3841250 - RNA, 15 nt, Human
guagauuuucuuuaa

SEQ ID NO: 3841251 - RNA, 20 nt, Human
guagcaaacccugucaaaca

SEQ ID NO: 3841252 - RNA, 20 nt, Human
guagcaaguucuagagaaga

SEQ ID NO: 3841253 - RNA, 12 nt, Human
guagcacaggcu

SEQ ID NO: 3841254 - RNA, 17 nt, Human
guagcacucaggcucuc

SEQ ID NO: 3841255 - RNA, 14 nt, Human
guagcacugacaga

SEQ ID NO: 3841256 - RNA, 15 nt, Human
guagcacugacagau

SEQ ID NO: 3841257 - RNA, 15 nt, Human
guagcagaguuaaau

SEQ ID NO: 3841258 - RNA, 14 nt, Human
guagcagcuggacu

SEQ ID NO: 3841259 - RNA, 17 nt, Human
guagcaugcuuguugca

SEQ ID NO: 3841260 - RNA, 21 nt, Human
guagcauguugagccaggccu

SEQ ID NO: 3841261 - RNA, 21 nt, Human
guagcauucuuuggaguuaaa

SEQ ID NO: 3841262 - RNA, 20 nt, Human
guagcauuuacugugucuuu

SEQ ID NO: 3841263 - RNA, 15 nt, Human
guagcauuucauucu

SEQ ID NO: 3841264 - RNA, 19 nt, Human
guagccaaggugggcugag

SEQ ID NO: 3841265 - RNA, 16 nt, Human
guagccacaccaggau

SEQ ID NO: 3841266 - RNA, 21 nt, Human
guagccaccugaguuccugag

SEQ ID NO: 3841267 - RNA, 15 nt, Human
guagccagcacacag

SEQ ID NO: 3841268 - RNA, 22 nt, Human
guaacagaaagggcaacaauaa

SEQ ID NO: 3841269 - RNA, 14 nt, Human
guaacagaacagcu

SEQ ID NO: 3841270 - RNA, 13 nt, Human
guaacagcuccuu

SEQ ID NO: 3841271 - RNA, 22 nt, Human
guaacaggaaaauuuuaaaaau

SEQ ID NO: 3841272 - RNA, 13 nt, Human
guaacauccuuuc

SEQ ID NO: 3841273 - RNA, 17 nt, Human
guaacauucauguucua

SEQ ID NO: 3841274 - RNA, 14 nt, Human
guaacauuugcugu

SEQ ID NO: 3841275 - RNA, 11 nt, Human
guaaccagcca

SEQ ID NO: 3841276 - RNA, 13 nt, Human
guaaccagccaga

SEQ ID NO: 3841277 - RNA, 20 nt, Human
guaaccagccagauccucuu

SEQ ID NO: 3841278 - RNA, 20 nt, Human
guaaccauuuuauaaagugc

SEQ ID NO: 3841279 - RNA, 15 nt, Human
guaaccucagcucug

SEQ ID NO: 3841280 - RNA, 12 nt, Human
guaacuacuuua

SEQ ID NO: 3841281 - RNA, 14 nt, Human
guaacuacuuuaua

SEQ ID NO: 3841282 - RNA, 22 nt, Human
guaacuauagacuggaaaaaau

SEQ ID NO: 3841283 - RNA, 14 nt, Human
guaacuauguuuua

SEQ ID NO: 3841284 - RNA, 12 nt, Human
guaacuccacca

SEQ ID NO: 3841285 - RNA, 23 nt, Human
guaacucuaauucccauuuugca

SEQ ID NO: 3841286 - RNA, 14 nt, Human
guaacucuguaauu

SEQ ID NO: 3841287 - RNA, 13 nt, Human
guaacugacaacu

SEQ ID NO: 3841288 - RNA, 19 nt, Human
guaacugcauugagaacug

SEQ ID NO: 3841289 - RNA, 16 nt, Human
guaacugccuagaaac

SEQ ID NO: 3841290 - RNA, 20 nt, Human
guaacugccuagaaacaaca

SEQ ID NO: 3841291 - RNA, 22 nt, Human
guaacugcucuugggcaauauu

SEQ ID NO: 3841292 - RNA, 14 nt, Human
guaacugcugaaaa

SEQ ID NO: 3841293 - RNA, 14 nt, Human
guaacugcuuucug

SEQ ID NO: 3841294 - RNA, 23 nt, Human
guaacugucaggcugaaaacaau

SEQ ID NO: 3841295 - RNA, 20 nt, Human
guaacuguccguaguaucag

SEQ ID NO: 3841296 - RNA, 19 nt, Human
guaacuguuaaauugcugu

SEQ ID NO: 3841297 - RNA, 13 nt, Human
guaacuguuacca

SEQ ID NO: 3841298 - RNA, 20 nt, Human
guaacuguuaccauuggaaa

SEQ ID NO: 3841299 - RNA, 14 nt, Human
guaacuuauauuga

SEQ ID NO: 3841300 - RNA, 22 nt, Human
guaacuuauauugaagacaauu

SEQ ID NO: 3841301 - RNA, 19 nt, Human
guaacuuccaaauaaauaa

SEQ ID NO: 3841302 - RNA, 18 nt, Human
guaacuucuuauggaauu

SEQ ID NO: 3841303 - RNA, 18 nt, Human
guaacuuggauguagcca

SEQ ID NO: 3841304 - RNA, 12 nt, Human
guaacuuuaugu

SEQ ID NO: 3841305 - RNA, 14 nt, Human
guaacuuuugugaa

SEQ ID NO: 3841306 - RNA, 17 nt, Human
guaagaaaagugguugu

SEQ ID NO: 3841307 - RNA, 14 nt, Human
guaagaaaauauuu

SEQ ID NO: 3841308 - RNA, 19 nt, Human
guaagaaaaugcuagaaga

SEQ ID NO: 3841309 - RNA, 20 nt, Human
guaagaaacacacugaggca

SEQ ID NO: 3841310 - RNA, 20 nt, Human
guaagaaagugaagcaaauc

SEQ ID NO: 3841311 - RNA, 13 nt, Human
guaagaaauacag

SEQ ID NO: 3841312 - RNA, 16 nt, Human
guaagaaauacagacu

SEQ ID NO: 3841313 - RNA, 12 nt, Human
guaagaaauacu

SEQ ID NO: 3841314 - RNA, 17 nt, Human
guaagaaccuugccuga

SEQ ID NO: 3841315 - RNA, 15 nt, Human
guaagacaaagguuu

SEQ ID NO: 3841316 - RNA, 19 nt, Human
guaagaccggaagcuccug

SEQ ID NO: 3841317 - RNA, 14 nt, Human
guaagagacagaau

SEQ ID NO: 3841318 - RNA, 23 nt, Human
guaagagacagaauguaucugug

SEQ ID NO: 3841319 - RNA, 20 nt, Human
guaagagcaccuuccucacu

SEQ ID NO: 3841320 - RNA, 13 nt, Human
guaagaggcugga

SEQ ID NO: 3841321 - RNA, 17 nt, Human
guaagaguguagaagca

SEQ ID NO: 3841322 - RNA, 22 nt, Human
guaagauaucucaaugaaccau

SEQ ID NO: 3841323 - RNA, 13 nt, Human
guaagaucacugu

SEQ ID NO: 3841324 - RNA, 18 nt, Human
guaagaucacuguuuaga

SEQ ID NO: 3841325 - RNA, 12 nt, Human
guaagaugcugg

SEQ ID NO: 3841326 - RNA, 20 nt, Human
guaagaugcuggguuggugc

SEQ ID NO: 3841327 - RNA, 17 nt, Human
guaagauugauaucuau

SEQ ID NO: 3841328 - RNA, 13 nt, Human
guaagauuguuau

SEQ ID NO: 3841329 - RNA, 17 nt, Human
guaagauuuugaaaacu

SEQ ID NO: 3841330 - RNA, 13 nt, Human
guaagccaaagaa

SEQ ID NO: 3841331 - RNA, 22 nt, Human
guaagccaaagaaaugaacauu

SEQ ID NO: 3841332 - RNA, 13 nt, Human
guaagcucuggcu

SEQ ID NO: 3841333 - RNA, 17 nt, Human
guaagcugcucuauugu

SEQ ID NO: 3841334 - RNA, 19 nt, Human
guaagcuguuuauuuuaua

SEQ ID NO: 3841335 - RNA, 22 nt, Human
guaagcuguuugguuuuaaaau

SEQ ID NO: 3841336 - RNA, 17 nt, Human
guaagcuuccaggaaaa

SEQ ID NO: 3841337 - RNA, 21 nt, Human
guaaggaauaccugucccccu

SEQ ID NO: 3841338 - RNA, 15 nt, Human
guaaggaaugcuugg

SEQ ID NO: 3841339 - RNA, 23 nt, Human
guaaggcagggucccauuucuca

SEQ ID NO: 3841340 - RNA, 14 nt, Human
guaaggcucuagau

SEQ ID NO: 3841341 - RNA, 16 nt, Human
guaaggcucuagauca

SEQ ID NO: 3841342 - RNA, 13 nt, Human
guaaggcugugua

SEQ ID NO: 3841343 - RNA, 17 nt, Human
guaagggaaacugccag

SEQ ID NO: 3841344 - RNA, 16 nt, Human
guauuucauguggcug

SEQ ID NO: 3841345 - RNA, 22 nt, Human
guauuucuuauacgcuuuucuu

SEQ ID NO: 3841346 - RNA, 20 nt, Human
guauuugaaaacagaaauug

SEQ ID NO: 3841347 - RNA, 17 nt, Human
guauuugaaagugccuu

SEQ ID NO: 3841348 - RNA, 21 nt, Human
guauuugaauuaaaacuucuu

SEQ ID NO: 3841349 - RNA, 23 nt, Human
guauuugaauuaaaacuucuuaa

SEQ ID NO: 3841350 - RNA, 21 nt, Human
guauuugagaguucuaaauuu

SEQ ID NO: 3841351 - RNA, 19 nt, Human
guauuugauucaaaauauu

SEQ ID NO: 3841352 - RNA, 17 nt, Human
guauuuggaauuagaac

SEQ ID NO: 3841353 - RNA, 12 nt, Human
guauuuggguuu

SEQ ID NO: 3841354 - RNA, 20 nt, Human
guauuugugacuaauuguau

SEQ ID NO: 3841355 - RNA, 17 nt, Human
guauuuguuaauuuaga

SEQ ID NO: 3841356 - RNA, 22 nt, Human
guauuuguuaauuuagaaaacu

SEQ ID NO: 3841357 - RNA, 17 nt, Human
guauuuuaaaagaauga

SEQ ID NO: 3841358 - RNA, 13 nt, Human
guauuuuaaucac

SEQ ID NO: 3841359 - RNA, 20 nt, Human
guauuuuagugaacuugaaa

SEQ ID NO: 3841360 - RNA, 23 nt, Human
guauuuuaguggacccugaaaug

SEQ ID NO: 3841361 - RNA, 23 nt, Human
guauuuuaucuuugauucuccuu

SEQ ID NO: 3841362 - RNA, 15 nt, Human
guauuuuauguaugu

SEQ ID NO: 3841363 - RNA, 23 nt, Human
guauuuuauguauguuuacacug

SEQ ID NO: 3841364 - RNA, 13 nt, Human
guauuuucaauag

SEQ ID NO: 3841365 - RNA, 16 nt, Human
guauuuucaugaaaau

SEQ ID NO: 3841366 - RNA, 19 nt, Human
guauuuucaugaaaauacc

SEQ ID NO: 3841367 - RNA, 16 nt, Human
guauuuucuucucugu

SEQ ID NO: 3841368 - RNA, 13 nt, Human
guauuuugaaaau

SEQ ID NO: 3841369 - RNA, 12 nt, Human
guauuuugaagu

SEQ ID NO: 3841370 - RNA, 18 nt, Human
guauuuugaaguuuacau

SEQ ID NO: 3841371 - RNA, 16 nt, Human
guauuuugaauaccau

SEQ ID NO: 3841372 - RNA, 17 nt, Human
guauuuuggagaaauua

SEQ ID NO: 3841373 - RNA, 23 nt, Human
guauuuugugugaccaacugugu

SEQ ID NO: 3841374 - RNA, 18 nt, Human
guauuuuuaaugggggua

SEQ ID NO: 3841375 - RNA, 22 nt, Human
guauuuuuagaauaagaauuug

SEQ ID NO: 3841376 - RNA, 18 nt, Human
guauuuuuauacaaaccu

SEQ ID NO: 3841377 - RNA, 18 nt, Human
guauuuuucaauaaagca

SEQ ID NO: 3841378 - RNA, 21 nt, Human
guauuuuucaauaaagcauuu

SEQ ID NO: 3841379 - RNA, 19 nt, Human
guauuuuucaauaauaaaa

SEQ ID NO: 3841380 - RNA, 17 nt, Human
guauuuuucuuuaacca

SEQ ID NO: 3841381 - RNA, 15 nt, Human
guauuuuugacagaa

SEQ ID NO: 3841382 - RNA, 14 nt, Human
guauuuuuuuacua

SEQ ID NO: 3841383 - RNA, 17 nt, Human
guauuuuuuuacuaaua

SEQ ID NO: 3841384 - RNA, 23 nt, Human
guauuuuuuuaucuugggacugg

SEQ ID NO: 3841385 - RNA, 17 nt, Human
guauuuuuuuguaauug

SEQ ID NO: 3841386 - RNA, 18 nt, Human
guauuuuuuuuucuaaga

SEQ ID NO: 3841387 - RNA, 23 nt, Human
gucaaaaaguuugguucuguguc

SEQ ID NO: 3841388 - RNA, 13 nt, Human
gucaaaaauuaaa

SEQ ID NO: 3841389 - RNA, 16 nt, Human
gucaaaacucaaaugc

SEQ ID NO: 3841390 - RNA, 15 nt, Human
gucaaaaggugccug

SEQ ID NO: 3841391 - RNA, 15 nt, Human
gucaaaaguuggacu

SEQ ID NO: 3841392 - RNA, 21 nt, Human
gucaaaaguuggacuaaaugc

SEQ ID NO: 3841393 - RNA, 18 nt, Human
gucaaaauagugccacua

SEQ ID NO: 3841394 - RNA, 20 nt, Human
gucaaacaaacucucugaac

SEQ ID NO: 3841395 - RNA, 16 nt, Human
gucaaacaaagccaga

SEQ ID NO: 3841396 - RNA, 17 nt, Human
gucaaacaaagccagaa

SEQ ID NO: 3841397 - RNA, 12 nt, Human
gucaaacaaaua

SEQ ID NO: 3841398 - RNA, 15 nt, Human
gucaaacaugaagug

SEQ ID NO: 3841399 - RNA, 11 nt, Human
gucaaacauua

SEQ ID NO: 3841400 - RNA, 19 nt, Human
gucaaacauuaguacuuua

SEQ ID NO: 3841401 - RNA, 20 nt, Human
gucaaacuguagaaaugaug

SEQ ID NO: 3841402 - RNA, 13 nt, Human
gucaaacuuggau

SEQ ID NO: 3841403 - RNA, 12 nt, Human
gucaaagaaaug

SEQ ID NO: 3841404 - RNA, 22 nt, Human
gucaaagcuuugacucuauaag

SEQ ID NO: 3841405 - RNA, 13 nt, Human
gucaaaguaaaac

SEQ ID NO: 3841406 - RNA, 18 nt, Human
gucaaaguggugagaggc

SEQ ID NO: 3841407 - RNA, 14 nt, Human
gucaaauaaacacu

SEQ ID NO: 3841408 - RNA, 15 nt, Human
gucaaauaaacacug

SEQ ID NO: 3841409 - RNA, 22 nt, Human
gucaaaugcauacaaguuucau

SEQ ID NO: 3841410 - RNA, 20 nt, Human
gucaacagaaugaaaaauga

SEQ ID NO: 3841411 - RNA, 18 nt, Human
gucaacagagaaggcagg

SEQ ID NO: 3841412 - RNA, 23 nt, Human
gucaacagagaaggcaggaaugu

SEQ ID NO: 3841413 - RNA, 21 nt, Human
guacagugguucuacaaucua

SEQ ID NO: 3841414 - RNA, 22 nt, Human
guacagugucuuuuuuuguaua

SEQ ID NO: 3841415 - RNA, 16 nt, Human
guacaguguguaaagu

SEQ ID NO: 3841416 - RNA, 14 nt, Human
guacaguguucugu

SEQ ID NO: 3841417 - RNA, 17 nt, Human
guacaguguucuguuua

SEQ ID NO: 3841418 - RNA, 14 nt, Human
guacaguuaucuaa

SEQ ID NO: 3841419 - RNA, 23 nt, Human
guacaguucaguuccucuuugca

SEQ ID NO: 3841420 - RNA, 23 nt, Human
guacaguugcuguugugugauca

SEQ ID NO: 3841421 - RNA, 20 nt, Human
guacaguugggaaaauaugu

SEQ ID NO: 3841422 - RNA, 21 nt, Human
guacaguugggaaaauauguc

SEQ ID NO: 3841423 - RNA, 15 nt, Human
guacaguuugcugua

SEQ ID NO: 3841424 - RNA, 16 nt, Human
guacaguuuguuuaca

SEQ ID NO: 3841425 - RNA, 18 nt, Human
guacaguuuguuuacaca

SEQ ID NO: 3841426 - RNA, 19 nt, Human
guacaguuuguuuacacac

SEQ ID NO: 3841427 - RNA, 12 nt, Human
guacauaaaaga

SEQ ID NO: 3841428 - RNA, 15 nt, Human
guacauaaacaauga

SEQ ID NO: 3841429 - RNA, 21 nt, Human
guacauaaauugcauaaagca

SEQ ID NO: 3841430 - RNA, 22 nt, Human
guacauaauacacuugcccugc

SEQ ID NO: 3841431 - RNA, 14 nt, Human
guacauaauacuga

SEQ ID NO: 3841432 - RNA, 19 nt, Human
guacauacccuggccgccc

SEQ ID NO: 3841433 - RNA, 17 nt, Human
guacauacgauuuaagg

SEQ ID NO: 3841434 - RNA, 13 nt, Human
guacauacuuuuu

SEQ ID NO: 3841435 - RNA, 18 nt, Human
guacauaguuauuuauuu

SEQ ID NO: 3841436 - RNA, 21 nt, Human
guacaucccauguaacagaaa

SEQ ID NO: 3841437 - RNA, 22 nt, Human
guacaucccauguaacagaaag

SEQ ID NO: 3841438 - RNA, 18 nt, Human
guacaucuauuuuggauu

SEQ ID NO: 3841439 - RNA, 22 nt, Human
guacaucuggcuuauuuuaaug

SEQ ID NO: 3841440 - RNA, 15 nt, Human
guacaugaaaacaca

SEQ ID NO: 3841441 - RNA, 18 nt, Human
guacaugaaaacacauuu

SEQ ID NO: 3841442 - RNA, 20 nt, Human
guacaugaaaacacauuuuu

SEQ ID NO: 3841443 - RNA, 19 nt, Human
guacaugaaauuuuuguaa

SEQ ID NO: 3841444 - RNA, 16 nt, Human
guacauggcagaguuu

SEQ ID NO: 3841445 - RNA, 18 nt, Human
guacauucaauguuuaug

SEQ ID NO: 3841446 - RNA, 15 nt, Human
guacauuuaaaauug

SEQ ID NO: 3841447 - RNA, 13 nt, Human
guacauuuaaauu

SEQ ID NO: 3841448 - RNA, 15 nt, Human
guacauuuauaauug

SEQ ID NO: 3841449 - RNA, 18 nt, Human
guacauuuaugauuuaau

SEQ ID NO: 3841450 - RNA, 19 nt, Human
guacauuuaugauuuaaua

SEQ ID NO: 3841451 - RNA, 14 nt, Human
guacauuucccugu

SEQ ID NO: 3841452 - RNA, 17 nt, Human
guacauuucugaaauga

SEQ ID NO: 3841453 - RNA, 15 nt, Human
guacauuuggagaca

SEQ ID NO: 3841454 - RNA, 16 nt, Human
guacauuuuguuguaa

SEQ ID NO: 3841455 - RNA, 21 nt, Human
guacauuuuguuguaaaaaga

SEQ ID NO: 3841456 - RNA, 23 nt, Human
guacauuuuguuguaaaaagaaa

SEQ ID NO: 3841457 - RNA, 16 nt, Human
guacauuuuucaacuu

SEQ ID NO: 3841458 - RNA, 22 nt, Human
guacauuuuucaacuuugaaua

SEQ ID NO: 3841459 - RNA, 19 nt, Human
guacauuuuuugaaaugcu

SEQ ID NO: 3841460 - RNA, 20 nt, Human
guacauuuuuugaaaugcug

SEQ ID NO: 3841461 - RNA, 13 nt, Human
guaccaaaguuuu

SEQ ID NO: 3841462 - RNA, 18 nt, Human
guaccaaaguuuuaucaa

SEQ ID NO: 3841463 - RNA, 17 nt, Human
guaccaaccauccaauu

SEQ ID NO: 3841464 - RNA, 21 nt, Human
guaccaaucauuuuaauuauu

SEQ ID NO: 3841465 - RNA, 14 nt, Human
guaccacucaggcc

SEQ ID NO: 3841466 - RNA, 19 nt, Human
guaccacugaaucuguaca

SEQ ID NO: 3841467 - RNA, 17 nt, Human
guaccagcugcgcuugc

SEQ ID NO: 3841468 - RNA, 22 nt, Human
guaccaggucuccuccaccgcc

SEQ ID NO: 3841469 - RNA, 22 nt, Human
guaccaguuaauuuuuccaacu

SEQ ID NO: 3841470 - RNA, 21 nt, Human
guaccaugugcuacaggggcc

SEQ ID NO: 3841471 - RNA, 14 nt, Human
guaccauuaaaaua

SEQ ID NO: 3841472 - RNA, 18 nt, Human
guaccauuaaaauaugca

SEQ ID NO: 3841473 - RNA, 23 nt, Human
guaccauuuaauggggaggacaa

SEQ ID NO: 3841474 - RNA, 13 nt, Human
guacccacugcuc

SEQ ID NO: 3841475 - RNA, 14 nt, Human
guacccacugcucu

SEQ ID NO: 3841476 - RNA, 16 nt, Human
guacccacugcucugg

SEQ ID NO: 3841477 - RNA, 20 nt, Human
guacccacuuagucauguaa

SEQ ID NO: 3841478 - RNA, 15 nt, Human
guacccagccaucug

SEQ ID NO: 3841479 - RNA, 21 nt, Human
guacccagccaucugcccagg

SEQ ID NO: 3841480 - RNA, 14 nt, Human
guaccccacccuca

SEQ ID NO: 3841481 - RNA, 19 nt, Human
guaccccacccucagcacc

SEQ ID NO: 3841482 - RNA, 17 nt, Human
guaccccagcucugcuu

SEQ ID NO: 3841483 - RNA, 18 nt, Human
guaccccagcucugcuug

SEQ ID NO: 3841484 - RNA, 19 nt, Human
guaccccagcucugcuugc

SEQ ID NO: 3841485 - RNA, 14 nt, Human
guacccccaggacc

SEQ ID NO: 3841486 - RNA, 15 nt, Human
guacccccaggacca

SEQ ID NO: 3841487 - RNA, 16 nt, Human
guacccccaggaccag

SEQ ID NO: 3841488 - RNA, 20 nt, Human
guacccccgcccaggcuggc

SEQ ID NO: 3841489 - RNA, 23 nt, Human
guacccccgcccaggcuggccag

SEQ ID NO: 3841490 - RNA, 12 nt, Human
guacccccuucu

SEQ ID NO: 3841491 - RNA, 17 nt, Human
guacccuccuggcucuu

SEQ ID NO: 3841492 - RNA, 19 nt, Human
guacccucucagcuccagg

SEQ ID NO: 3841493 - RNA, 16 nt, Human
guacccucugaaauac

SEQ ID NO: 3841494 - RNA, 15 nt, Human
guacccucuggaggg

SEQ ID NO: 3841495 - RNA, 23 nt, Human
guaccgccuugcacacucagaag

SEQ ID NO: 3841496 - RNA, 13 nt, Human
guaccuauaaagu

SEQ ID NO: 3841497 - RNA, 14 nt, Human
guaccuauaaagua

SEQ ID NO: 3841498 - RNA, 20 nt, Human
guaccuauaaaguaaagcua

SEQ ID NO: 3841499 - RNA, 18 nt, Human
guaccuauuuucauugua

SEQ ID NO: 3841500 - RNA, 14 nt, Human
guaccucaucccau

SEQ ID NO: 3841501 - RNA, 18 nt, Human
guaccuccccugccuugc

SEQ ID NO: 3841502 - RNA, 13 nt, Human
guaccuccucuca

SEQ ID NO: 3841503 - RNA, 21 nt, Human
guaccucuggcugacuaaauu

SEQ ID NO: 3841504 - RNA, 14 nt, Human
guaccugaaaagua

SEQ ID NO: 3841505 - RNA, 18 nt, Human
guaccugaaaaguaacuu

SEQ ID NO: 3841506 - RNA, 14 nt, Human
guaccugagggucu

SEQ ID NO: 3841507 - RNA, 15 nt, Human
guaccugauguaccu

SEQ ID NO: 3841508 - RNA, 17 nt, Human
guaccugcccccaaucc

SEQ ID NO: 3841509 - RNA, 15 nt, Human
guaccuggaggagga

SEQ ID NO: 3841510 - RNA, 16 nt, Human
guaccuggguccccag

SEQ ID NO: 3841511 - RNA, 12 nt, Human
guaccuggugga

SEQ ID NO: 3841512 - RNA, 21 nt, Human
guaccuucagaauaagcuucc

SEQ ID NO: 3841513 - RNA, 22 nt, Human
gacuaauuguauaacagguuau

SEQ ID NO: 3841514 - RNA, 12 nt, Human
gacuaauuucaa

SEQ ID NO: 3841515 - RNA, 13 nt, Human
gacuaauuucaaa

SEQ ID NO: 3841516 - RNA, 18 nt, Human
gacuaauuuuacauguuu

SEQ ID NO: 3841517 - RNA, 12 nt, Human
gacuacaggcac

SEQ ID NO: 3841518 - RNA, 18 nt, Human
gacuacaggcacccacca

SEQ ID NO: 3841519 - RNA, 14 nt, Human
gacuacaggcguga

SEQ ID NO: 3841520 - RNA, 13 nt, Human
gacuacaggugug

SEQ ID NO: 3841521 - RNA, 18 nt, Human
gacuacucccccaggugg

SEQ ID NO: 3841522 - RNA, 23 nt, Human
gacuacugggcaaagaguguaga

SEQ ID NO: 3841523 - RNA, 21 nt, Human
gacuacuuagcauccuaagaa

SEQ ID NO: 3841524 - RNA, 18 nt, Human
gacuacuugggagcaccg

SEQ ID NO: 3841525 - RNA, 20 nt, Human
gacuacuugggagcaccgcc

SEQ ID NO: 3841526 - RNA, 20 nt, Human
gacuagaaccuggagggcug

SEQ ID NO: 3841527 - RNA, 16 nt, Human
gacuagaauucuagug

SEQ ID NO: 3841528 - RNA, 14 nt, Human
gacuagacacacaa

SEQ ID NO: 3841529 - RNA, 12 nt, Human
gacuagagaaac

SEQ ID NO: 3841530 - RNA, 18 nt, Human
gacuagagcuuucuuuca

SEQ ID NO: 3841531 - RNA, 15 nt, Human
gacuagaggcaggga

SEQ ID NO: 3841532 - RNA, 20 nt, Human
gacuagaggcagggagggga

SEQ ID NO: 3841533 - RNA, 22 nt, Human
gacuagaggcagggaggggacu

SEQ ID NO: 3841534 - RNA, 16 nt, Human
gacuagaggcuugcau

SEQ ID NO: 3841535 - RNA, 17 nt, Human
gacuagagggaccucuc

SEQ ID NO: 3841536 - RNA, 20 nt, Human
gacuagagggaccucuccca

SEQ ID NO: 3841537 - RNA, 17 nt, Human
gacuagauguaguauuu

SEQ ID NO: 3841538 - RNA, 23 nt, Human
gacuagccccuguggagacuggg

SEQ ID NO: 3841539 - RNA, 18 nt, Human
gacuagggauucaggcug

SEQ ID NO: 3841540 - RNA, 15 nt, Human
gacuaggguccuggg

SEQ ID NO: 3841541 - RNA, 16 nt, Human
gacuaggguccugggg

SEQ ID NO: 3841542 - RNA, 13 nt, Human
gacuaguacaaau

SEQ ID NO: 3841543 - RNA, 14 nt, Human
gacuaguacaaauu

SEQ ID NO: 3841544 - RNA, 17 nt, Human
gacuaguacaaauuaua

SEQ ID NO: 3841545 - RNA, 13 nt, Human
gacuauauacaug

SEQ ID NO: 3841546 - RNA, 19 nt, Human
gacuauauagagauguuuu

SEQ ID NO: 3841547 - RNA, 20 nt, Human
gacuauauauauaaauguau

SEQ ID NO: 3841548 - RNA, 19 nt, Human
gacuauauuugggccugcu

SEQ ID NO: 3841549 - RNA, 22 nt, Human
gacuaucaaacugaagccagaa

SEQ ID NO: 3841550 - RNA, 18 nt, Human
gacuaucugucugguggc

SEQ ID NO: 3841551 - RNA, 17 nt, Human
gacuaucuuacuauuuc

SEQ ID NO: 3841552 - RNA, 16 nt, Human
gacuaugaaugggcaa

SEQ ID NO: 3841553 - RNA, 13 nt, Human
gacuaugacauaa

SEQ ID NO: 3841554 - RNA, 15 nt, Human
gacuauucaaacagu

SEQ ID NO: 3841555 - RNA, 14 nt, Human
gacuauucaguuuu

SEQ ID NO: 3841556 - RNA, 21 nt, Human
gacuauucuugauguaaaauc

SEQ ID NO: 3841557 - RNA, 20 nt, Human
gacuauuuaaacuuauaaau

SEQ ID NO: 3841558 - RNA, 20 nt, Human
gucucuuuuuuacaaaggcu

SEQ ID NO: 3841559 - RNA, 11 nt, Human
gucugaaaugg

SEQ ID NO: 3841560 - RNA, 20 nt, Human
gucugaaggacacuuccugc

SEQ ID NO: 3841561 - RNA, 22 nt, Human
gucugaaggacacuuccugccu

SEQ ID NO: 3841562 - RNA, 16 nt, Human
gucugaagugguuguu

SEQ ID NO: 3841563 - RNA, 14 nt, Human
gucugaauguucug

SEQ ID NO: 3841564 - RNA, 18 nt, Human
gucugaauguucugacau

SEQ ID NO: 3841565 - RNA, 12 nt, Human
gucugacaggca

SEQ ID NO: 3841566 - RNA, 14 nt, Human
gucugacaggcaau

SEQ ID NO: 3841567 - RNA, 18 nt, Human
gucugacaggcaaugcug

SEQ ID NO: 3841568 - RNA, 21 nt, Human
gucugacaggcaaugcuggcu

SEQ ID NO: 3841569 - RNA, 22 nt, Human
gucugacaggcaaugcuggcug

SEQ ID NO: 3841570 - RNA, 14 nt, Human
gucugacccucucc

SEQ ID NO: 3841571 - RNA, 23 nt, Human
gucugagacucucuuaggagcag

SEQ ID NO: 3841572 - RNA, 17 nt, Human
gagaaaccagcuuccuu

SEQ ID NO: 3841573 - RNA, 18 nt, Human
gagaaaccuguaucuuuc

SEQ ID NO: 3841574 - RNA, 23 nt, Human
gagaaaccuuauuguaccucucu

SEQ ID NO: 3841575 - RNA, 19 nt, Human
gagaaacuggcaaagcaga

SEQ ID NO: 3841576 - RNA, 24 nt, Human
gagaaacuuaaauguuauuaucug

SEQ ID NO: 3841577 - RNA, 18 nt, Human
gagaaagaagagacagga

SEQ ID NO: 3841578 - RNA, 18 nt, Human
gagaaagaaguaggcaug

SEQ ID NO: 3841579 - RNA, 17 nt, Human
gagaaagacuauucaaa

SEQ ID NO: 3841580 - RNA, 19 nt, Human
gagaaagagcacuuaagag

SEQ ID NO: 3841581 - RNA, 16 nt, Human
gagaaagaggaagcuu

SEQ ID NO: 3841582 - RNA, 16 nt, Human
gagaaagcauauugac

SEQ ID NO: 3841583 - RNA, 22 nt, Human
gagaaagcugacuuggcuggug

SEQ ID NO: 3841584 - RNA, 18 nt, Human
gagaaaggccugcacaca

SEQ ID NO: 3841585 - RNA, 21 nt, Human
gagaaagggcccugggccugc

SEQ ID NO: 3841586 - RNA, 23 nt, Human
gagaaaguacuucuccacccugc

SEQ ID NO: 3841587 - RNA, 15 nt, Human
gagaaauacaaaaau

SEQ ID NO: 3841588 - RNA, 17 nt, Human
gagaaauauuuuaauuu

SEQ ID NO: 3841589 - RNA, 13 nt, Human
gagaaaugggacu

SEQ ID NO: 3841590 - RNA, 17 nt, Human
gagaaauguaaugcgau

SEQ ID NO: 3841591 - RNA, 23 nt, Human
gagaaauguguagcugcaaaaau

SEQ ID NO: 3841592 - RNA, 17 nt, Human
gagaaauucguguguuu

SEQ ID NO: 3841593 - RNA, 16 nt, Human
gagaaauucuguuaaa

SEQ ID NO: 3841594 - RNA, 17 nt, Human
gagaaauucuguuaaaa

SEQ ID NO: 3841595 - RNA, 14 nt, Human
gagaaauugacaga

SEQ ID NO: 3841596 - RNA, 13 nt, Human
gagaacaaagaug

SEQ ID NO: 3841597 - RNA, 14 nt, Human
gagaacaaagcugu

SEQ ID NO: 3841598 - RNA, 17 nt, Human
gagaacauguugguauu

SEQ ID NO: 3841599 - RNA, 17 nt, Human
gagaaccaaaucuggaa

SEQ ID NO: 3841600 - RNA, 18 nt, Human
gagaaccaaaucuggaag

SEQ ID NO: 3841601 - RNA, 12 nt, Human
gagaaccaccua

SEQ ID NO: 3841602 - RNA, 19 nt, Human
gagaaccacuacaugcagc

SEQ ID NO: 3841603 - RNA, 20 nt, Human
gagaacccagcccacccccg

SEQ ID NO: 3841604 - RNA, 20 nt, Human
gagaacccugcguggggaca

SEQ ID NO: 3841605 - RNA, 20 nt, Human
gagaaccgagcaaagaucaa

SEQ ID NO: 3841606 - RNA, 14 nt, Human
gagaacgcagcccu

SEQ ID NO: 3841607 - RNA, 16 nt, Human
gagaacgcagcccuag

SEQ ID NO: 3841608 - RNA, 16 nt, Human
gagaacuaaagguggc

SEQ ID NO: 3841609 - RNA, 19 nt, Human
gagaacuagaaccuggagg

SEQ ID NO: 3841610 - RNA, 15 nt, Human
gagaacuccuagggu

SEQ ID NO: 3841611 - RNA, 20 nt, Human
gagaacucgcgcucaguaaa

SEQ ID NO: 3841612 - RNA, 14 nt, Human
gagaacucuggcuu

SEQ ID NO: 3841613 - RNA, 20 nt, Human
gagaacuuauggccacagcc

SEQ ID NO: 3841614 - RNA, 14 nt, Human
gagaacuugcugcc

SEQ ID NO: 3841615 - RNA, 17 nt, Human
gagaacuuucauuuuuu

SEQ ID NO: 3841616 - RNA, 15 nt, Human
gagaagaagaaaaaa

SEQ ID NO: 3841617 - RNA, 23 nt, Human
gagaagaauagccuagauaugaa

SEQ ID NO: 3841618 - RNA, 22 nt, Human
gagaagagcuguucacagccag

SEQ ID NO: 3841619 - RNA, 21 nt, Human
gagaagaggcuggugcugugg

SEQ ID NO: 3841620 - RNA, 15 nt, Human
gagaagauaaggucu

SEQ ID NO: 3841621 - RNA, 23 nt, Human
gagaagcaagaaagaaacccgac

SEQ ID NO: 3841622 - RNA, 21 nt, Human
gagaagcacacucuggucuug

SEQ ID NO: 3841623 - RNA, 12 nt, Human
gagaagcacugu

SEQ ID NO: 3841624 - RNA, 14 nt, Human
gagaagcagugagc

SEQ ID NO: 3841625 - RNA, 21 nt, Human
gagaagcaucggagggaauug

SEQ ID NO: 3841626 - RNA, 13 nt, Human
gagaagcaugaaa

SEQ ID NO: 3841627 - RNA, 18 nt, Human
gagaagccaaaagauugg

SEQ ID NO: 3841628 - RNA, 13 nt, Human
gagaagccacagg

SEQ ID NO: 3841629 - RNA, 20 nt, Human
gagaagccacaggccugaga

SEQ ID NO: 3841630 - RNA, 16 nt, Human
gagaagccagcuuguu

SEQ ID NO: 3841631 - RNA, 20 nt, Human
gagaagccagcuuguuuaca

SEQ ID NO: 3841632 - RNA, 17 nt, Human
gagaagccaucaccuca

SEQ ID NO: 3841633 - RNA, 20 nt, Human
gagaagccauugucuucgga

SEQ ID NO: 3841634 - RNA, 17 nt, Human
gagaagcggcuggcagc

SEQ ID NO: 3841635 - RNA, 19 nt, Human
gagaagcuaaaaccugagc

SEQ ID NO: 3841636 - RNA, 13 nt, Human
gagaagcucugaa

SEQ ID NO: 3841637 - RNA, 23 nt, Human
gagaagcugaugcuuugcuucaa

SEQ ID NO: 3841638 - RNA, 13 nt, Human
gagaagcugcuga

SEQ ID NO: 3841639 - RNA, 22 nt, Human
gagaagcuuuugaauaaaaacu

SEQ ID NO: 3841640 - RNA, 15 nt, Human
gagaaggaaagcuuu

SEQ ID NO: 3841641 - RNA, 21 nt, Human
gagaaggaaggagacucaccu

SEQ ID NO: 3841642 - RNA, 16 nt, Human
gagaaggaaugucuuu

SEQ ID NO: 3841643 - RNA, 11 nt, Human
gagaaggcagc

SEQ ID NO: 3841644 - RNA, 16 nt, Human
gagaaggcagccacca

SEQ ID NO: 3841645 - RNA, 12 nt, Human
gagaaggcagga

SEQ ID NO: 3841646 - RNA, 23 nt, Human
gagaaggcaggaauguguggcag

SEQ ID NO: 3841647 - RNA, 22 nt, Human
gagaaggggaggaccucugggc

SEQ ID NO: 3841648 - RNA, 15 nt, Human
gagaagguccuuaau

SEQ ID NO: 3841649 - RNA, 17 nt, Human
gagaagucacagggcag

SEQ ID NO: 3841650 - RNA, 22 nt, Human
gagaagucacagggcaguaccu

SEQ ID NO: 3841651 - RNA, 14 nt, Human
gagaagucucagcu

SEQ ID NO: 3841652 - RNA, 21 nt, Human
gagaagucucagcuaagcuca

SEQ ID NO: 3841653 - RNA, 20 nt, Human
gagaagucuuucaagaauga

SEQ ID NO: 3841654 - RNA, 19 nt, Human
gagaagugaauaacugcaa

SEQ ID NO: 3841655 - RNA, 19 nt, Human
gagaagugaaugcugggac

SEQ ID NO: 3841656 - RNA, 15 nt, Human
gagaagugacaggga

SEQ ID NO: 3841657 - RNA, 16 nt, Human
gagaagugacagggaa

SEQ ID NO: 3841658 - RNA, 19 nt, Human
gagaagugacagggaagcu

SEQ ID NO: 3841659 - RNA, 18 nt, Human
gagaagugacgguuccua

SEQ ID NO: 3841660 - RNA, 18 nt, Human
gagaaguucauauuucuu

SEQ ID NO: 3841661 - RNA, 18 nt, Human
gagaaguuuuguacagag

SEQ ID NO: 3841662 - RNA, 20 nt, Human
gagaauaagagagucauaaa

SEQ ID NO: 3841663 - RNA, 22 nt, Human
gagaauagaaggaaacuagcuu

SEQ ID NO: 3841664 - RNA, 12 nt, Human
gagaauauauac

SEQ ID NO: 3841665 - RNA, 21 nt, Human
gagaauauuuuaaguauugca

SEQ ID NO: 3841666 - RNA, 15 nt, Human
gagaaucacaggcug

SEQ ID NO: 3841667 - RNA, 16 nt, Human
gagaaucacaggcugg

SEQ ID NO: 3841668 - RNA, 15 nt, Human
gagaaucacuugaac

SEQ ID NO: 3841669 - RNA, 17 nt, Human
gagaaucauguuucuuu

SEQ ID NO: 3841670 - RNA, 19 nt, Human
gagaaucauguuucuuuga

SEQ ID NO: 3841671 - RNA, 17 nt, Human
gagaaugaacaaagacc

SEQ ID NO: 3841672 - RNA, 22 nt, Human
gagaaugaacaaagaccaauuu

SEQ ID NO: 3841673 - RNA, 13 nt, Human
gagaaugaggguc

SEQ ID NO: 3841674 - RNA, 20 nt, Human
gagaaugcacaaacagaggc

SEQ ID NO: 3841675 - RNA, 21 nt, Human
gagaaugcacaaacagaggcc

SEQ ID NO: 3841676 - RNA, 23 nt, Human
gagaaugcacaaacagaggccgc

SEQ ID NO: 3841677 - RNA, 20 nt, Human
gagaauggcgugaacccggg

SEQ ID NO: 3841678 - RNA, 19 nt, Human
gagaauggcuuuggucucu

SEQ ID NO: 3841679 - RNA, 21 nt, Human
gagaauguagauauugugaag

SEQ ID NO: 3841680 - RNA, 17 nt, Human
gagaaugucaguaugug

SEQ ID NO: 3841681 - RNA, 16 nt, Human
gagaauguuauaguga

SEQ ID NO: 3841682 - RNA, 17 nt, Human
gagaauguuauagugaa

SEQ ID NO: 3841683 - RNA, 15 nt, Human
gagaauucagcugcc

SEQ ID NO: 3841684 - RNA, 16 nt, Human
gagaauucagcugccc

SEQ ID NO: 3841685 - RNA, 18 nt, Human
gagaauucagcugccccc

SEQ ID NO: 3841686 - RNA, 18 nt, Human
gagaauucuuacauguuu

SEQ ID NO: 3841687 - RNA, 21 nt, Human
gagaauuguaucauuugaaca

SEQ ID NO: 3841688 - RNA, 23 nt, Human
gagaauuucuaaaaagauuagca

SEQ ID NO: 3841689 - RNA, 18 nt, Human
gagacaaaauauuuccca

SEQ ID NO: 3841690 - RNA, 19 nt, Human
gagacaaacaccucccagg

SEQ ID NO: 3841691 - RNA, 22 nt, Human
gagacaaacaccucccaggaga

SEQ ID NO: 3841692 - RNA, 11 nt, Human
gagacaaagcu

SEQ ID NO: 3841693 - RNA, 21 nt, Human
gagacaaugcagaugccagag

SEQ ID NO: 3841694 - RNA, 20 nt, Human
gagacaaugucugcagcccu

SEQ ID NO: 3841695 - RNA, 22 nt, Human
gagacaaugucugcagcccuga

SEQ ID NO: 3841696 - RNA, 20 nt, Human
gagacacaacaacuccuagg

SEQ ID NO: 3841697 - RNA, 17 nt, Human
gagacacaagccuucgg

SEQ ID NO: 3841698 - RNA, 13 nt, Human
gagacacagaugu

SEQ ID NO: 3841699 - RNA, 14 nt, Human
gagacacagauguu

SEQ ID NO: 3841700 - RNA, 17 nt, Human
gagacacagggcaucca

SEQ ID NO: 3841701 - RNA, 21 nt, Human
gagacaccucagagccccgca

SEQ ID NO: 3841702 - RNA, 16 nt, Human
gucaagugaaaaagga

SEQ ID NO: 3841703 - RNA, 18 nt, Human
gucaagugaaaaaggagg

SEQ ID NO: 3841704 - RNA, 17 nt, Human
gucaagugcguccacga

SEQ ID NO: 3841705 - RNA, 14 nt, Human
gucaagugggaucu

SEQ ID NO: 3841706 - RNA, 16 nt, Human
gucaagugggaucugu

SEQ ID NO: 3841707 - RNA, 18 nt, Human
gucaaguuauuaauuucu

SEQ ID NO: 3841708 - RNA, 17 nt, Human
gucaaguuccuuugggu

SEQ ID NO: 3841709 - RNA, 16 nt, Human
gucaaguugugcuugu

SEQ ID NO: 3841710 - RNA, 23 nt, Human
gucaauaaaauccauacauuugu

SEQ ID NO: 3841711 - RNA, 18 nt, Human
gucaauaaacaacagcug

SEQ ID NO: 3841712 - RNA, 20 nt, Human
gucaauaaacagcuucaugc

SEQ ID NO: 3841713 - RNA, 21 nt, Human
gucaauaauuauuugucucag

SEQ ID NO: 3841714 - RNA, 19 nt, Human
gucaauacaguacaggcag

SEQ ID NO: 3841715 - RNA, 20 nt, Human
gucaauacaguacaggcagc

SEQ ID NO: 3841716 - RNA, 18 nt, Human
gucaaucaagucuguuua

SEQ ID NO: 3841717 - RNA, 17 nt, Human
gucaauccccucauuca

SEQ ID NO: 3841718 - RNA, 16 nt, Human
gucaauccugugggug

SEQ ID NO: 3841719 - RNA, 16 nt, Human
gucaauuacaggaagu

SEQ ID NO: 3841720 - RNA, 17 nt, Human
gucaauuuaugaauaua

SEQ ID NO: 3841721 - RNA, 22 nt, Human
gucaauuucccugacuccucua

SEQ ID NO: 3841722 - RNA, 17 nt, Human
gucaauuucuguguugc

SEQ ID NO: 3841723 - RNA, 22 nt, Human
gucaauuucuguguugccaagc

SEQ ID NO: 3841724 - RNA, 23 nt, Human
gucacaaagaacauguagaaaac

SEQ ID NO: 3841725 - RNA, 15 nt, Human
gucacaaauuucucu

SEQ ID NO: 3841726 - RNA, 17 nt, Human
gucacaauguucuuuau

SEQ ID NO: 3841727 - RNA, 16 nt, Human
gucacacacuuuggcu

SEQ ID NO: 3841728 - RNA, 14 nt, Human
gucacacagggcag

SEQ ID NO: 3841729 - RNA, 20 nt, Human
gucacacaguauuacuucug

SEQ ID NO: 3841730 - RNA, 21 nt, Human
gucacacaguauuacuucugc

SEQ ID NO: 3841731 - RNA, 14 nt, Human
gucugagagaggcc

SEQ ID NO: 3841732 - RNA, 15 nt, Human
gucugagccacagca

SEQ ID NO: 3841733 - RNA, 18 nt, Human
gucugaggaauccagacc

SEQ ID NO: 3841734 - RNA, 21 nt, Human
gucugaggaauccagacccgg

SEQ ID NO: 3841735 - RNA, 18 nt, Human
gucugaggccguugcuga

SEQ ID NO: 3841736 - RNA, 20 nt, Human
gucugagggcuuguaguucu

SEQ ID NO: 3841737 - RNA, 21 nt, Human
gucugagggcuuguaguucuu

SEQ ID NO: 3841738 - RNA, 16 nt, Human
gucugagguccugagc

SEQ ID NO: 3841739 - RNA, 21 nt, Human
gucugagguccugagcacugc

SEQ ID NO: 3841740 - RNA, 14 nt, Human
gucugagucauggc

SEQ ID NO: 3841741 - RNA, 21 nt, Human
gucugagucauggccgggugg

SEQ ID NO: 3841742 - RNA, 14 nt, Human
gucugagugaaccu

SEQ ID NO: 3841743 - RNA, 14 nt, Human
gucugauauucaaa

SEQ ID NO: 3841744 - RNA, 21 nt, Human
gucugaucgugacgcugaaua

SEQ ID NO: 3841745 - RNA, 24 nt, Human
gucugaucugugcuuuccagcuca

SEQ ID NO: 3841746 - RNA, 17 nt, Human
gucugauucccaagcuc

SEQ ID NO: 3841747 - RNA, 20 nt, Human
gucugauuggcucacccaag

SEQ ID NO: 3841748 - RNA, 13 nt, Human
gucugauuucuua

SEQ ID NO: 3841749 - RNA, 16 nt, Human
gucugauuugugauga

SEQ ID NO: 3841750 - RNA, 23 nt, Human
gucugcaaaaugaggaauguaua

SEQ ID NO: 3841751 - RNA, 20 nt, Human
gucugcaacuuuaagcagcu

SEQ ID NO: 3841752 - RNA, 19 nt, Human
gucugcagcccggcgccac

SEQ ID NO: 3841753 - RNA, 15 nt, Human
gucugcagcccugag

SEQ ID NO: 3841754 - RNA, 16 nt, Human
gucugcaggugcacca

SEQ ID NO: 3841755 - RNA, 16 nt, Human
gucugcauuggaaaga

SEQ ID NO: 3841756 - RNA, 21 nt, Human
gucugcauuucgguggcuagu

SEQ ID NO: 3841757 - RNA, 21 nt, Human
gucugccaauuuuugccuuca

SEQ ID NO: 3841758 - RNA, 18 nt, Human
gucugccaccauccugcu

SEQ ID NO: 3841759 - RNA, 14 nt, Human
gucugccagccagc

SEQ ID NO: 3841760 - RNA, 15 nt, Human
gucugccagccagca

SEQ ID NO: 3841761 - RNA, 10 nt, Human
gucugccagg

SEQ ID NO: 3841762 - RNA, 12 nt, Human
gucugccagggc

SEQ ID NO: 3841763 - RNA, 13 nt, Human
gucugccagggcc

SEQ ID NO: 3841764 - RNA, 21 nt, Human
gucugccagggccccucuccc

SEQ ID NO: 3841765 - RNA, 16 nt, Human
gucugccauguugccc

SEQ ID NO: 3841766 - RNA, 15 nt, Human
gucugcccccuccug

SEQ ID NO: 3841767 - RNA, 17 nt, Human
gucugccccgcccucau

SEQ ID NO: 3841768 - RNA, 13 nt, Human
gucugccuggagg

SEQ ID NO: 3841769 - RNA, 17 nt, Human
gucugcuauauuuucau

SEQ ID NO: 3841770 - RNA, 16 nt, Human
gucugcuaucauuauu

SEQ ID NO: 3841771 - RNA, 14 nt, Human
gucugcuccagcuc

SEQ ID NO: 3841772 - RNA, 16 nt, Human
gucugcuccagcucug

SEQ ID NO: 3841773 - RNA, 18 nt, Human
gucugcuccagcucuggc

SEQ ID NO: 3841774 - RNA, 17 nt, Human
gucugcuccuuuccccu

SEQ ID NO: 3841775 - RNA, 19 nt, Human
gucugcucgggcccaggcc

SEQ ID NO: 3841776 - RNA, 22 nt, Human
gucugcucgggcccaggccauc

SEQ ID NO: 3841777 - RNA, 15 nt, Human
gucugcucuuucucu

SEQ ID NO: 3841778 - RNA, 22 nt, Human
gucugcucuuucucugccagug

SEQ ID NO: 3841779 - RNA, 15 nt, Human
gucugcugcccucca

SEQ ID NO: 3841780 - RNA, 18 nt, Human
gucugcugcccuccaucc

SEQ ID NO: 3841781 - RNA, 13 nt, Human
gucugcuguagaa

SEQ ID NO: 3841782 - RNA, 14 nt, Human
gucuggaagauggg

SEQ ID NO: 3841783 - RNA, 16 nt, Human
gucuggaaugcagugg

SEQ ID NO: 3841784 - RNA, 14 nt, Human
gucuggacugacag

SEQ ID NO: 3841785 - RNA, 17 nt, Human
gucuggacugacagcau

SEQ ID NO: 3841786 - RNA, 14 nt, Human
gucuggagaagcag

SEQ ID NO: 3841787 - RNA, 23 nt, Human
gucuggagaagcucccaggaaca

SEQ ID NO: 3841788 - RNA, 17 nt, Human
gucuggagaccaccagg

SEQ ID NO: 3841789 - RNA, 21 nt, Human
gucuggagaccaccagggcau

SEQ ID NO: 3841790 - RNA, 18 nt, Human
gucuggaggggccccugc

SEQ ID NO: 3841791 - RNA, 19 nt, Human
gucuggaucaguaaaauua

SEQ ID NO: 3841792 - RNA, 22 nt, Human
gucuggaucugggacccuuucc

SEQ ID NO: 3841793 - RNA, 23 nt, Human
gucuggcaaugccacagcccugu

SEQ ID NO: 3841794 - RNA, 19 nt, Human
gucuggcacagccuggcug

SEQ ID NO: 3841795 - RNA, 20 nt, Human
gucuggcccuagacucgggg

SEQ ID NO: 3841796 - RNA, 13 nt, Human
gucuggcugcaga

SEQ ID NO: 3841797 - RNA, 13 nt, Human
gucuggcuggugu

SEQ ID NO: 3841798 - RNA, 14 nt, Human
gucuggcugguguu

SEQ ID NO: 3841799 - RNA, 16 nt, Human
gucuggcugguguuaa

SEQ ID NO: 3841800 - RNA, 15 nt, Human
gucuggcuucacaga

SEQ ID NO: 3841801 - RNA, 18 nt, Human
gucugggaaaugagcagg

SEQ ID NO: 3841802 - RNA, 21 nt, Human
gucugggacuuccuugcucuc

SEQ ID NO: 3841803 - RNA, 24 nt, Human
gucugggacuuccuugcucucccu

SEQ ID NO: 3841804 - RNA, 17 nt, Human
gucugggagaggcagag

SEQ ID NO: 3841805 - RNA, 22 nt, Human
gucugggcagcugucccuugcu

SEQ ID NO: 3841806 - RNA, 22 nt, Human
gucuggggagcgggucugcucc

SEQ ID NO: 3841807 - RNA, 23 nt, Human
gucuggggagcgggucugcuccc

SEQ ID NO: 3841808 - RNA, 16 nt, Human
gucugggguucagccc

SEQ ID NO: 3841809 - RNA, 23 nt, Human
gucugggguucagccccuccucu

SEQ ID NO: 3841810 - RNA, 13 nt, Human
gucuggugggagg

SEQ ID NO: 3841811 - RNA, 17 nt, Human
gucugguuucaccgagg

SEQ ID NO: 3841812 - RNA, 14 nt, Human
gucugguuucuaga

SEQ ID NO: 3841813 - RNA, 18 nt, Human
gucugguuuuaacaauuu

SEQ ID NO: 3841814 - RNA, 11 nt, Human
gucuguaaaau

SEQ ID NO: 3841815 - RNA, 12 nt, Human
gucuguaaaauc

SEQ ID NO: 3841816 - RNA, 13 nt, Human
gucuguaaaaucu

SEQ ID NO: 3841817 - RNA, 14 nt, Human
gucuguaagcugaa

SEQ ID NO: 3841818 - RNA, 20 nt, Human
gucuguaauaauagacugua

SEQ ID NO: 3841819 - RNA, 12 nt, Human
gucuguaaugac

SEQ ID NO: 3841820 - RNA, 20 nt, Human
gucuguacacguguccugua

SEQ ID NO: 3841821 - RNA, 21 nt, Human
gucuguacacguguccuguag

SEQ ID NO: 3841822 - RNA, 15 nt, Human
gucuguacuaaaaau

SEQ ID NO: 3841823 - RNA, 16 nt, Human
gucuguaucacucugu

SEQ ID NO: 3841824 - RNA, 22 nt, Human
gucuguaucaguggauuuccca

SEQ ID NO: 3841825 - RNA, 23 nt, Human
gucuguaucaguggauuucccau

SEQ ID NO: 3841826 - RNA, 19 nt, Human
gucuguauuuaugugugag

SEQ ID NO: 3841827 - RNA, 22 nt, Human
gucuguccaucugcccgccugc

SEQ ID NO: 3841828 - RNA, 19 nt, Human
gucugucccgggguccugu

SEQ ID NO: 3841829 - RNA, 16 nt, Human
gucugucgugaugggg

SEQ ID NO: 3841830 - RNA, 14 nt, Human
gucugucucuguca

SEQ ID NO: 3841831 - RNA, 16 nt, Human
gucugucugucugucc

SEQ ID NO: 3841832 - RNA, 14 nt, Human
gucugucuucugua

SEQ ID NO: 3841833 - RNA, 15 nt, Human
gucugucuucuguau

SEQ ID NO: 3841834 - RNA, 17 nt, Human
gucugucuuuuaaacuc

SEQ ID NO: 3841835 - RNA, 21 nt, Human
gucugugagaugcuagaacuc

SEQ ID NO: 3841836 - RNA, 13 nt, Human
gucugugccccuu

SEQ ID NO: 3841837 - RNA, 19 nt, Human
gucugugccccuuccgcca

SEQ ID NO: 3841838 - RNA, 20 nt, Human
gucugugccccuuccgccac

SEQ ID NO: 3841839 - RNA, 13 nt, Human
gucuguggaucag

SEQ ID NO: 3841840 - RNA, 21 nt, Human
gucuguggcuuucagccucug

SEQ ID NO: 3841841 - RNA, 13 nt, Human
gucugugugaaug

SEQ ID NO: 3841842 - RNA, 15 nt, Human
gucugugugcugugg

SEQ ID NO: 3841843 - RNA, 17 nt, Human
gucugugugcugugguu

SEQ ID NO: 3841844 - RNA, 20 nt, Human
gucugugugggacuguacac

SEQ ID NO: 3841845 - RNA, 11 nt, Human
gucugugugug

SEQ ID NO: 3841846 - RNA, 13 nt, Human
gugcaacugacac

SEQ ID NO: 3841847 - RNA, 18 nt, Human
gugcaagagacucuggcc

SEQ ID NO: 3841848 - RNA, 22 nt, Human
gugcaagagacucuggccucca

SEQ ID NO: 3841849 - RNA, 14 nt, Human
gugcaagugugugc

SEQ ID NO: 3841850 - RNA, 21 nt, Human
gugcaauaaaucugacccagu

SEQ ID NO: 3841851 - RNA, 14 nt, Human
gugcaauauauuuu

SEQ ID NO: 3841852 - RNA, 18 nt, Human
gugcaaugaccuuucaau

SEQ ID NO: 3841853 - RNA, 13 nt, Human
gugcaauguaaau

SEQ ID NO: 3841854 - RNA, 19 nt, Human
gugcaauguguauaaacaa

SEQ ID NO: 3841855 - RNA, 20 nt, Human
gugcaauguguguauaugga

SEQ ID NO: 3841856 - RNA, 18 nt, Human
gugcaauuucaagguucu

SEQ ID NO: 3841857 - RNA, 19 nt, Human
gugcaauuucaagguucua

SEQ ID NO: 3841858 - RNA, 20 nt, Human
gugcaauuuguuugugcuuc

SEQ ID NO: 3841859 - RNA, 23 nt, Human
gugcaauuuguuugugcuucuaa

SEQ ID NO: 3841860 - RNA, 13 nt, Human
gugcacacacaca

SEQ ID NO: 3841861 - RNA, 17 nt, Human
gugcacacaccagagcc

SEQ ID NO: 3841862 - RNA, 12 nt, Human
gugcacagcugu

SEQ ID NO: 3841863 - RNA, 14 nt, Human
gugcacagcugucc

SEQ ID NO: 3841864 - RNA, 14 nt, Human
gugcacagugauuu

SEQ ID NO: 3841865 - RNA, 18 nt, Human
gugcacaucugugucuug

SEQ ID NO: 3841866 - RNA, 17 nt, Human
gugcacaucuguuuugu

SEQ ID NO: 3841867 - RNA, 19 nt, Human
gugcacccaugggcucuga

SEQ ID NO: 3841868 - RNA, 13 nt, Human
gugcaccugcccc

SEQ ID NO: 3841869 - RNA, 22 nt, Human
gugcaccugggacagggagcag

SEQ ID NO: 3841870 - RNA, 21 nt, Human
gugcaccuguacucaggaggc

SEQ ID NO: 3841871 - RNA, 20 nt, Human
gugcaccuuaccaacuuucu

SEQ ID NO: 3841872 - RNA, 18 nt, Human
gugcacguacacacacau

SEQ ID NO: 3841873 - RNA, 15 nt, Human
gugcacguggagagc

SEQ ID NO: 3841874 - RNA, 16 nt, Human
gugcacguggagagcu

SEQ ID NO: 3841875 - RNA, 21 nt, Human
gugcacguggcauguggccug

SEQ ID NO: 3841876 - RNA, 20 nt, Human
gugcacugcccauggacagg

SEQ ID NO: 3841877 - RNA, 13 nt, Human
gugcacuggcccc

SEQ ID NO: 3841878 - RNA, 16 nt, Human
gugcacuggccccacc

SEQ ID NO: 3841879 - RNA, 13 nt, Human
gugcacugggagg

SEQ ID NO: 3841880 - RNA, 13 nt, Human
gugcacuuuguaa

SEQ ID NO: 3841881 - RNA, 14 nt, Human
gugcacuuuguaaa

SEQ ID NO: 3841882 - RNA, 15 nt, Human
gugcagaaaacauug

SEQ ID NO: 3841883 - RNA, 23 nt, Human
gugcagaagggagcuggcuccag

SEQ ID NO: 3841884 - RNA, 13 nt, Human
gugcagaauguaa

SEQ ID NO: 3841885 - RNA, 14 nt, Human
gugcagaggcugug

SEQ ID NO: 3841886 - RNA, 15 nt, Human
gugcagagguacccu

SEQ ID NO: 3841887 - RNA, 17 nt, Human
gugcagaugagguugcu

SEQ ID NO: 3841888 - RNA, 17 nt, Human
gugcagcauaugaggau

SEQ ID NO: 3841889 - RNA, 20 nt, Human
gugcagcccguguggccccu

SEQ ID NO: 3841890 - RNA, 17 nt, Human
gugcagccgcugagcga

SEQ ID NO: 3841891 - RNA, 15 nt, Human
gugcagccuguccug

SEQ ID NO: 3841892 - RNA, 19 nt, Human
gugcagcgcggcgccgccc

SEQ ID NO: 3841893 - RNA, 22 nt, Human
gugcagcucaaggaaaggccug

SEQ ID NO: 3841894 - RNA, 16 nt, Human
gugcagcugauuuuaa

SEQ ID NO: 3841895 - RNA, 11 nt, Human
gugcaggcagg

SEQ ID NO: 3841896 - RNA, 12 nt, Human
gugcaggcaggc

SEQ ID NO: 3841897 - RNA, 15 nt, Human
gugcaggcuggccag

SEQ ID NO: 3841898 - RNA, 16 nt, Human
gugcaggcuggccagc

SEQ ID NO: 3841899 - RNA, 17 nt, Human
gugcagggacaaagagg

SEQ ID NO: 3841900 - RNA, 15 nt, Human
gugcagggauguggg

SEQ ID NO: 3841901 - RNA, 21 nt, Human
gugcagguagaccugucuccu

SEQ ID NO: 3841902 - RNA, 22 nt, Human
gugcagguagaccugucuccug

SEQ ID NO: 3841903 - RNA, 18 nt, Human
gugcaggugcuauuguua

SEQ ID NO: 3841904 - RNA, 15 nt, Human
gugcagguggggaga

SEQ ID NO: 3841905 - RNA, 15 nt, Human
gugcaguacuuugug

SEQ ID NO: 3841906 - RNA, 13 nt, Human
gugcaguagugca

SEQ ID NO: 3841907 - RNA, 22 nt, Human
gugcaguaucaugcccugugca

SEQ ID NO: 3841908 - RNA, 16 nt, Human
gugcaguccugaucag

SEQ ID NO: 3841909 - RNA, 12 nt, Human
gugcaguccugg

SEQ ID NO: 3841910 - RNA, 24 nt, Human
gugcaguggcgcgaucucagcuca

SEQ ID NO: 3841911 - RNA, 16 nt, Human
gugcaguuauuugcuu

SEQ ID NO: 3841912 - RNA, 24 nt, Human
gugcaguucccccaaccucagacu

SEQ ID NO: 3841913 - RNA, 20 nt, Human
gugcaguugacagcaggugg

SEQ ID NO: 3841914 - RNA, 16 nt, Human
gugcaguugcuguuua

SEQ ID NO: 3841915 - RNA, 17 nt, Human
gugcaguugcuguuuac

SEQ ID NO: 3841916 - RNA, 19 nt, Human
gugcauaaaaacaagaaca

SEQ ID NO: 3841917 - RNA, 14 nt, Human
gugcauagugcugg

SEQ ID NO: 3841918 - RNA, 16 nt, Human
gugcauauuccuuucu

SEQ ID NO: 3841919 - RNA, 14 nt, Human
gugcauauuguaca

SEQ ID NO: 3841920 - RNA, 18 nt, Human
gugcauauuguacacuuu

SEQ ID NO: 3841921 - RNA, 20 nt, Human
gugcaucaggcuuucuuuuu

SEQ ID NO: 3841922 - RNA, 13 nt, Human
gugcaucucagcc

SEQ ID NO: 3841923 - RNA, 18 nt, Human
gugcaucucagcccacau

SEQ ID NO: 3841924 - RNA, 15 nt, Human
gugcaugcucucugc

SEQ ID NO: 3841925 - RNA, 16 nt, Human
gugcaugcucucugca

SEQ ID NO: 3841926 - RNA, 19 nt, Human
gugcaugcucucugcagcc

SEQ ID NO: 3841927 - RNA, 22 nt, Human
gugcaugcugucccuuacguga

SEQ ID NO: 3841928 - RNA, 23 nt, Human
gugcauguaugucuuggacacug

SEQ ID NO: 3841929 - RNA, 15 nt, Human
gugcaugugugugcu

SEQ ID NO: 3841930 - RNA, 23 nt, Human
gugcauuacagagaggagaaaca

SEQ ID NO: 3841931 - RNA, 18 nt, Human
gugcauuagcacagauuu

SEQ ID NO: 3841932 - RNA, 11 nt, Human
guccccuucuc

SEQ ID NO: 3841933 - RNA, 15 nt, Human
gucccggggccagca

SEQ ID NO: 3841934 - RNA, 21 nt, Human
gucccgugcagcuucuguccu

SEQ ID NO: 3841935 - RNA, 21 nt, Human
gucccuacaccccuccccugc

SEQ ID NO: 3841936 - RNA, 21 nt, Human
gucccuaccccauggugcuag

SEQ ID NO: 3841937 - RNA, 20 nt, Human
gucccucaaaugacccaaag

SEQ ID NO: 3841938 - RNA, 23 nt, Human
gucccucaaaugacccaaagacc

SEQ ID NO: 3841939 - RNA, 20 nt, Human
gucccuccacguucaccccu

SEQ ID NO: 3841940 - RNA, 17 nt, Human
gucccucccaccucugu

SEQ ID NO: 3841941 - RNA, 14 nt, Human
gucccuccugggau

SEQ ID NO: 3841942 - RNA, 19 nt, Human
gucccuccuggugucaccc

SEQ ID NO: 3841943 - RNA, 11 nt, Human
gucccucugcc

SEQ ID NO: 3841944 - RNA, 13 nt, Human
gucccucugugua

SEQ ID NO: 3841945 - RNA, 17 nt, Human
gucccugacucucugug

SEQ ID NO: 3841946 - RNA, 18 nt, Human
gucccugacucucuguga

SEQ ID NO: 3841947 - RNA, 19 nt, Human
gucccugcacuugcagacu

SEQ ID NO: 3841948 - RNA, 15 nt, Human
gucccugccaaugga

SEQ ID NO: 3841949 - RNA, 13 nt, Human
gucccugccugga

SEQ ID NO: 3841950 - RNA, 14 nt, Human
gucccugccuggac

SEQ ID NO: 3841951 - RNA, 14 nt, Human
gucccugggccagg

SEQ ID NO: 3841952 - RNA, 17 nt, Human
gucccugguggcagcuc

SEQ ID NO: 3841953 - RNA, 19 nt, Human
gucccugguggcagcucac

SEQ ID NO: 3841954 - RNA, 16 nt, Human
gucccugguuuucagu

SEQ ID NO: 3841955 - RNA, 17 nt, Human
gucccuguuuucugagc

SEQ ID NO: 3841956 - RNA, 18 nt, Human
gucccuuacgugaguccu

SEQ ID NO: 3841957 - RNA, 15 nt, Human
gucccuucaccuccu

SEQ ID NO: 3841958 - RNA, 18 nt, Human
gucccuuccccucccugg

SEQ ID NO: 3841959 - RNA, 21 nt, Human
gucccuugagaccucagccau

SEQ ID NO: 3841960 - RNA, 22 nt, Human
gucccuugagaccucagccaug

SEQ ID NO: 3841961 - RNA, 16 nt, Human
gucccuugaugcacag

SEQ ID NO: 3841962 - RNA, 13 nt, Human
gucccuugccccc

SEQ ID NO: 3841963 - RNA, 15 nt, Human
gucccuugccccccu

SEQ ID NO: 3841964 - RNA, 18 nt, Human
gucccuugccccccuggc

SEQ ID NO: 3841965 - RNA, 21 nt, Human
gucccuugccccccuggccuc

SEQ ID NO: 3841966 - RNA, 13 nt, Human
gucccuugccuca

SEQ ID NO: 3841967 - RNA, 11 nt, Human
gucccuugcug

SEQ ID NO: 3841968 - RNA, 19 nt, Human
gucccuuguauccccugca

SEQ ID NO: 3841969 - RNA, 20 nt, Human
gucccuuguauccccugcag

SEQ ID NO: 3841970 - RNA, 17 nt, Human
gucccuuguuuccagcu

SEQ ID NO: 3841971 - RNA, 17 nt, Human
gucccuuucagagacag

SEQ ID NO: 3841972 - RNA, 15 nt, Human
gucccuuucuucucc

SEQ ID NO: 3841973 - RNA, 20 nt, Human
gucccuuucuucucccccau

SEQ ID NO: 3841974 - RNA, 15 nt, Human
gucccuuucuuggcc

SEQ ID NO: 3841975 - RNA, 17 nt, Human
gucccuuucuuggccag

SEQ ID NO: 3841976 - RNA, 22 nt, Human
gucccuuucuuggccaguuauc

SEQ ID NO: 3841977 - RNA, 21 nt, Human
guccgaaagggacuuggaagc

SEQ ID NO: 3841978 - RNA, 23 nt, Human
guccgcgcgccagcacagaaaca

SEQ ID NO: 3841979 - RNA, 16 nt, Human
guccggaaugccaccc

SEQ ID NO: 3841980 - RNA, 17 nt, Human
guccggacacuccuaga

SEQ ID NO: 3841981 - RNA, 15 nt, Human
guccggcagcuucug

SEQ ID NO: 3841982 - RNA, 17 nt, Human
guccgguguccuuuuca

SEQ ID NO: 3841983 - RNA, 24 nt, Human
guccgguguccuuuucacuacacc

SEQ ID NO: 3841984 - RNA, 14 nt, Human
guccgguguucuaa

SEQ ID NO: 3841985 - RNA, 17 nt, Human
guccgguuuacuuuaac

SEQ ID NO: 3841986 - RNA, 22 nt, Human
guccguaguaucagagaugucc

SEQ ID NO: 3841987 - RNA, 16 nt, Human
guccgugcuaaggacu

SEQ ID NO: 3841988 - RNA, 17 nt, Human
guccgugcuaaggacuu

SEQ ID NO: 3841989 - RNA, 13 nt, Human
guccuaaaacacc

SEQ ID NO: 3841990 - RNA, 15 nt, Human
guccuaaaagcaaaa

SEQ ID NO: 3841991 - RNA, 12 nt, Human
gagccugcaguu

SEQ ID NO: 3841992 - RNA, 13 nt, Human
gagccugccccag

SEQ ID NO: 3841993 - RNA, 13 nt, Human
gagccugccgagc

SEQ ID NO: 3841994 - RNA, 23 nt, Human
gagccugccgagcaaccguggcc

SEQ ID NO: 3841995 - RNA, 13 nt, Human
gagccugccugga

SEQ ID NO: 3841996 - RNA, 16 nt, Human
gagccugccuggagcg

SEQ ID NO: 3841997 - RNA, 18 nt, Human
gagccugcucccccaccc

SEQ ID NO: 3841998 - RNA, 19 nt, Human
gagccugcucccccacccc

SEQ ID NO: 3841999 - RNA, 12 nt, Human
gagccugcugga

SEQ ID NO: 3842000 - RNA, 15 nt, Human
gagccugcuggaagc

SEQ ID NO: 3842001 - RNA, 20 nt, Human
gagccugcuggaagcccagc

SEQ ID NO: 3842002 - RNA, 21 nt, Human
gagccugcuggucacagccuc

SEQ ID NO: 3842003 - RNA, 12 nt, Human
gagccuggagaa

SEQ ID NO: 3842004 - RNA, 17 nt, Human
gagccuggcacaggacu

SEQ ID NO: 3842005 - RNA, 17 nt, Human
gagccuggcccauagaa

SEQ ID NO: 3842006 - RNA, 23 nt, Human
gagccuggcuccguccaggagcc

SEQ ID NO: 3842007 - RNA, 16 nt, Human
gagccuggcugcccau

SEQ ID NO: 3842008 - RNA, 13 nt, Human
gagccuggggcuc

SEQ ID NO: 3842009 - RNA, 23 nt, Human
gagccuggggcucuaacgccuga

SEQ ID NO: 3842010 - RNA, 23 nt, Human
gagccuggucccacgagggugcc

SEQ ID NO: 3842011 - RNA, 12 nt, Human
gagccuggugcc

SEQ ID NO: 3842012 - RNA, 15 nt, Human
gagccuguaaacuuu

SEQ ID NO: 3842013 - RNA, 11 nt, Human
gagccuguccu

SEQ ID NO: 3842014 - RNA, 17 nt, Human
gagccuguccugccugu

SEQ ID NO: 3842015 - RNA, 19 nt, Human
gagccugugccuccucacc

SEQ ID NO: 3842016 - RNA, 14 nt, Human
gagccuguguaaca

SEQ ID NO: 3842017 - RNA, 16 nt, Human
gagccuguguaacagc

SEQ ID NO: 3842018 - RNA, 18 nt, Human
gagccuguguaacagcuc

SEQ ID NO: 3842019 - RNA, 19 nt, Human
gagccuguguaacagcucc

SEQ ID NO: 3842020 - RNA, 20 nt, Human
gagccuucgugcccccccuu

SEQ ID NO: 3842021 - RNA, 22 nt, Human
gagccuucugaggacauuccaa

SEQ ID NO: 3842022 - RNA, 19 nt, Human
gagccuugaacuuugaccu

SEQ ID NO: 3842023 - RNA, 22 nt, Human
gagccuugaacuuugaccucug

SEQ ID NO: 3842024 - RNA, 22 nt, Human
gagccuugguguccaccuggcc

SEQ ID NO: 3842025 - RNA, 23 nt, Human
gagccuuugguucuggccagaau

SEQ ID NO: 3842026 - RNA, 18 nt, Human
gagccuuuuaacugugca

SEQ ID NO: 3842027 - RNA, 15 nt, Human
gagcgacagugagac

SEQ ID NO: 3842028 - RNA, 21 nt, Human
gagcgagacuugguuucaaaa

SEQ ID NO: 3842029 - RNA, 17 nt, Human
gagcgagagaucaaaga

SEQ ID NO: 3842030 - RNA, 18 nt, Human
gagcgaggagaugcuccu

SEQ ID NO: 3842031 - RNA, 18 nt, Human
gagcgcaccugcccccug

SEQ ID NO: 3842032 - RNA, 23 nt, Human
gagcgcccagcuccugacacugc

SEQ ID NO: 3842033 - RNA, 17 nt, Human
gagcgcccgcgcccgcg

SEQ ID NO: 3842034 - RNA, 21 nt, Human
gagcgccgugaguucucaggg

SEQ ID NO: 3842035 - RNA, 22 nt, Human
gagcgccugccccucccagaac

SEQ ID NO: 3842036 - RNA, 21 nt, Human
gagcgcuccugccgcagagcu

SEQ ID NO: 3842037 - RNA, 18 nt, Human
gagcgcuuucuggaaaag

SEQ ID NO: 3842038 - RNA, 13 nt, Human
gagcggaaagcag

SEQ ID NO: 3842039 - RNA, 16 nt, Human
gagcggaaagcagcuc

SEQ ID NO: 3842040 - RNA, 21 nt, Human
gagcggagaaaggaagggcug

SEQ ID NO: 3842041 - RNA, 20 nt, Human
gagcggagacgggaggccug

SEQ ID NO: 3842042 - RNA, 16 nt, Human
gagcgggguaugaaga

SEQ ID NO: 3842043 - RNA, 17 nt, Human
gagcggucucaggcugg

SEQ ID NO: 3842044 - RNA, 22 nt, Human
gagcggucucaggcugguggga

SEQ ID NO: 3842045 - RNA, 23 nt, Human
gagcgguggcccugucccuccca

SEQ ID NO: 3842046 - RNA, 13 nt, Human
gagcgguggggga

SEQ ID NO: 3842047 - RNA, 23 nt, Human
gagcgucaggguuggugugcuga

SEQ ID NO: 3842048 - RNA, 16 nt, Human
gagcgugaaucuguau

SEQ ID NO: 3842049 - RNA, 19 nt, Human
gagcgugagcugagcaggc

SEQ ID NO: 3842050 - RNA, 17 nt, Human
gagcguucaccagugac

SEQ ID NO: 3842051 - RNA, 21 nt, Human
gagcuaaauuacaauugucau

SEQ ID NO: 3842052 - RNA, 15 nt, Human
gagcuaacacuggcc

SEQ ID NO: 3842053 - RNA, 13 nt, Human
gagcuacaaaugc

SEQ ID NO: 3842054 - RNA, 18 nt, Human
gagcuacccgcagaguuc

SEQ ID NO: 3842055 - RNA, 15 nt, Human
gagcuacguauuuaa

SEQ ID NO: 3842056 - RNA, 17 nt, Human
gagcuagaaccuggagg

SEQ ID NO: 3842057 - RNA, 13 nt, Human
gagcuagccagag

SEQ ID NO: 3842058 - RNA, 14 nt, Human
gagcuagccagagg

SEQ ID NO: 3842059 - RNA, 14 nt, Human
gagcuauguauuaa

SEQ ID NO: 3842060 - RNA, 20 nt, Human
gagcuauuaaaacucagccu

SEQ ID NO: 3842061 - RNA, 13 nt, Human
gagcuauugcugu

SEQ ID NO: 3842062 - RNA, 20 nt, Human
gagcuauuuccauuccagaa

SEQ ID NO: 3842063 - RNA, 17 nt, Human
gagcucacaaggcagca

SEQ ID NO: 3842064 - RNA, 18 nt, Human
gagcucacaaggcagcaa

SEQ ID NO: 3842065 - RNA, 16 nt, Human
gagcucacucggcacc

SEQ ID NO: 3842066 - RNA, 15 nt, Human
gagcucagaccccca

SEQ ID NO: 3842067 - RNA, 21 nt, Human
gagcucagacccccacucuca

SEQ ID NO: 3842068 - RNA, 13 nt, Human
gagcucagcgugg

SEQ ID NO: 3842069 - RNA, 20 nt, Human
gagcucaggaaccgaggcag

SEQ ID NO: 3842070 - RNA, 11 nt, Human
gagcucaggau

SEQ ID NO: 3842071 - RNA, 13 nt, Human
gagcucaggauga

SEQ ID NO: 3842072 - RNA, 18 nt, Human
gagcuccaacucagaagg

SEQ ID NO: 3842073 - RNA, 12 nt, Human
gagcuccacucu

SEQ ID NO: 3842074 - RNA, 16 nt, Human
gagcuccacucugcuu

SEQ ID NO: 3842075 - RNA, 22 nt, Human
gagcuccacucugcuucucuga

SEQ ID NO: 3842076 - RNA, 17 nt, Human
gagcuccagacccccag

SEQ ID NO: 3842077 - RNA, 14 nt, Human
gagcuccagcuccu

SEQ ID NO: 3842078 - RNA, 22 nt, Human
gagcuccaguguccugagcuca

SEQ ID NO: 3842079 - RNA, 16 nt, Human
gagcucccaggugcag

SEQ ID NO: 3842080 - RNA, 20 nt, Human
gagcucccaggugcagccag

SEQ ID NO: 3842081 - RNA, 15 nt, Human
gagcuccccucccca

SEQ ID NO: 3842082 - RNA, 19 nt, Human
gagcuccccuccccaacug

SEQ ID NO: 3842083 - RNA, 19 nt, Human
gagcucccggcguggugga

SEQ ID NO: 3842084 - RNA, 12 nt, Human
gagcuccucccu

SEQ ID NO: 3842085 - RNA, 23 nt, Human
gagcuccucccucucaacaccca

SEQ ID NO: 3842086 - RNA, 16 nt, Human
gagcuccucuccugga

SEQ ID NO: 3842087 - RNA, 19 nt, Human
gagcuccucuguccugcuu

SEQ ID NO: 3842088 - RNA, 19 nt, Human
gagcuccuguccccugcua

SEQ ID NO: 3842089 - RNA, 16 nt, Human
gagcucgugggacagu

SEQ ID NO: 3842090 - RNA, 16 nt, Human
gagcucguguauccug

SEQ ID NO: 3842091 - RNA, 18 nt, Human
gagcucguguauccuggg

SEQ ID NO: 3842092 - RNA, 19 nt, Human
gagcucuaugggcagaucu

SEQ ID NO: 3842093 - RNA, 15 nt, Human
gagcucucugcccuu

SEQ ID NO: 3842094 - RNA, 17 nt, Human
gagcucucugcccuuga

SEQ ID NO: 3842095 - RNA, 12 nt, Human
gagcucugagag

SEQ ID NO: 3842096 - RNA, 15 nt, Human
gagcucugagaggcc

SEQ ID NO: 3842097 - RNA, 17 nt, Human
gagcucugagaggcccu

SEQ ID NO: 3842098 - RNA, 19 nt, Human
gagcucugagaggcccugg

SEQ ID NO: 3842099 - RNA, 17 nt, Human
gagcucuggagccaccu

SEQ ID NO: 3842100 - RNA, 17 nt, Human
gagcucuucaggccucc

SEQ ID NO: 3842101 - RNA, 20 nt, Human
gugcgcaucuugccuccagg

SEQ ID NO: 3842102 - RNA, 22 nt, Human
gugcgccgagucugucucuguc

SEQ ID NO: 3842103 - RNA, 14 nt, Human
gugcgccuacagga

SEQ ID NO: 3842104 - RNA, 15 nt, Human
gugcgcucuguggau

SEQ ID NO: 3842105 - RNA, 23 nt, Human
gugcgcugggcacuucccugcug

SEQ ID NO: 3842106 - RNA, 15 nt, Human
gugcggaccacccuc

SEQ ID NO: 3842107 - RNA, 15 nt, Human
gugcguccacgagcu

SEQ ID NO: 3842108 - RNA, 21 nt, Human
gugcgugaaacacaccaggcu

SEQ ID NO: 3842109 - RNA, 13 nt, Human
gugcgugaauauu

SEQ ID NO: 3842110 - RNA, 16 nt, Human
gugcgugccgugugag

SEQ ID NO: 3842111 - RNA, 22 nt, Human
gugcgugccgugugagugugac

SEQ ID NO: 3842112 - RNA, 13 nt, Human
gugcgugugucca

SEQ ID NO: 3842113 - RNA, 14 nt, Human
gugcguguuugcac

SEQ ID NO: 3842114 - RNA, 18 nt, Human
gugcuaaaaaugggacuu

SEQ ID NO: 3842115 - RNA, 20 nt, Human
gugcuaaacguguauguuuu

SEQ ID NO: 3842116 - RNA, 16 nt, Human
gugcuaaauuuucagu

SEQ ID NO: 3842117 - RNA, 12 nt, Human
gugcuaaggacu

SEQ ID NO: 3842118 - RNA, 13 nt, Human
gugcuaaggacuu

SEQ ID NO: 3842119 - RNA, 14 nt, Human
gugcuaaggacuug

SEQ ID NO: 3842120 - RNA, 20 nt, Human
gugcuaaggacuuguuagau

SEQ ID NO: 3842121 - RNA, 14 nt, Human
gugcuaagugugaa

SEQ ID NO: 3842122 - RNA, 18 nt, Human
gugcuaagugugaacugg

SEQ ID NO: 3842123 - RNA, 21 nt, Human
gugcuacaaaaacacagcaag

SEQ ID NO: 3842124 - RNA, 21 nt, Human
gugcuacacccuuuuccagcu

SEQ ID NO: 3842125 - RNA, 20 nt, Human
gugcuacaggggccagaaga

SEQ ID NO: 3842126 - RNA, 21 nt, Human
gugcuacaugacgacaaagcu

SEQ ID NO: 3842127 - RNA, 19 nt, Human
gugcuaggaagaggagugg

SEQ ID NO: 3842128 - RNA, 18 nt, Human
gugcuauaggcuggagaa

SEQ ID NO: 3842129 - RNA, 19 nt, Human
gugcuauggauggcuucua

SEQ ID NO: 3842130 - RNA, 23 nt, Human
gugcuauuguagagccagagguc

SEQ ID NO: 3842131 - RNA, 16 nt, Human
gugcucagaagggcua

SEQ ID NO: 3842132 - RNA, 22 nt, Human
gugcucagaauaaggcaggcau

SEQ ID NO: 3842133 - RNA, 12 nt, Human
gugcucagcccu

SEQ ID NO: 3842134 - RNA, 15 nt, Human
gugcucaggagcccu

SEQ ID NO: 3842135 - RNA, 19 nt, Human
gugcucaggagcccuggga

SEQ ID NO: 3842136 - RNA, 22 nt, Human
gaggcugugugccugggggagu

SEQ ID NO: 3842137 - RNA, 15 nt, Human
gaggcuuaacaaugu

SEQ ID NO: 3842138 - RNA, 14 nt, Human
gaggcuuccuucau

SEQ ID NO: 3842139 - RNA, 22 nt, Human
gaggcuucuccgccagccuccu

SEQ ID NO: 3842140 - RNA, 22 nt, Human
gaggcuucuucagaucagugcu

SEQ ID NO: 3842141 - RNA, 20 nt, Human
gaggcuugcugagaggggcu

SEQ ID NO: 3842142 - RNA, 19 nt, Human
gaggcuugucagagcuggg

SEQ ID NO: 3842143 - RNA, 23 nt, Human
gaggcuuuaugauaauagauucu

SEQ ID NO: 3842144 - RNA, 14 nt, Human
gaggcuuuggauuu

SEQ ID NO: 3842145 - RNA, 16 nt, Human
gaggcuuuggauuuga

SEQ ID NO: 3842146 - RNA, 20 nt, Human
gaggcuuuggauuugacauu

SEQ ID NO: 3842147 - RNA, 11 nt, Human
gaggcuuugug

SEQ ID NO: 3842148 - RNA, 19 nt, Human
gagggaacggaaauaaagg

SEQ ID NO: 3842149 - RNA, 19 nt, Human
gagggaagaguggaggugg

SEQ ID NO: 3842150 - RNA, 14 nt, Human
gagggaagggagcc

SEQ ID NO: 3842151 - RNA, 17 nt, Human
gagggaagggagccaag

SEQ ID NO: 3842152 - RNA, 21 nt, Human
gagggaauccccgaaggugcu

SEQ ID NO: 3842153 - RNA, 22 nt, Human
gagggacaaaggagccugugaa

SEQ ID NO: 3842154 - RNA, 16 nt, Human
gagggacagucucacc

SEQ ID NO: 3842155 - RNA, 23 nt, Human
gagggacagucucaccauuuccc

SEQ ID NO: 3842156 - RNA, 23 nt, Human
gagggacaugcuuagcagucccc

SEQ ID NO: 3842157 - RNA, 19 nt, Human
gagggaccaacugggccca

SEQ ID NO: 3842158 - RNA, 14 nt, Human
gugaacccuggggc

SEQ ID NO: 3842159 - RNA, 18 nt, Human
gugaacccuggggccuga

SEQ ID NO: 3842160 - RNA, 15 nt, Human
gugaaccucaccccg

SEQ ID NO: 3842161 - RNA, 20 nt, Human
gugaacuauuucuacacagu

SEQ ID NO: 3842162 - RNA, 15 nt, Human
gugaacucagccaag

SEQ ID NO: 3842163 - RNA, 18 nt, Human
gugaacucagccaagcac

SEQ ID NO: 3842164 - RNA, 19 nt, Human
gugaacucagccaagcaca

SEQ ID NO: 3842165 - RNA, 22 nt, Human
gugaacucagccaagcacagug

SEQ ID NO: 3842166 - RNA, 16 nt, Human
gugaacugacaggcag

SEQ ID NO: 3842167 - RNA, 19 nt, Human
gugaacuggacccuguugc

SEQ ID NO: 3842168 - RNA, 21 nt, Human
gugaacugugaggguaaaggc

SEQ ID NO: 3842169 - RNA, 15 nt, Human
gugaacuugaaauuu

SEQ ID NO: 3842170 - RNA, 14 nt, Human
gugaacuuggaagc

SEQ ID NO: 3842171 - RNA, 15 nt, Human
gugaacuuguagcug

SEQ ID NO: 3842172 - RNA, 20 nt, Human
gugaacuuguagcuguaaaa

SEQ ID NO: 3842173 - RNA, 21 nt, Human
gugaacuuguagcuguaaaac

SEQ ID NO: 3842174 - RNA, 22 nt, Human
gugaagaaagccuguuguuuaa

SEQ ID NO: 3842175 - RNA, 23 nt, Human
gugaagaaugcacaagaauggau

SEQ ID NO: 3842176 - RNA, 14 nt, Human
gugaagacuccaga

SEQ ID NO: 3842177 - RNA, 19 nt, Human
gugaagagggagaagcaug

SEQ ID NO: 3842178 - RNA, 21 nt, Human
gugaagagugacuaguacaaa

SEQ ID NO: 3842179 - RNA, 20 nt, Human
gugaagauacuuuguauugu

SEQ ID NO: 3842180 - RNA, 10 nt, Human
gugaagccaa

SEQ ID NO: 3842181 - RNA, 20 nt, Human
gugaagccaauucagacagg

SEQ ID NO: 3842182 - RNA, 17 nt, Human
gugaaggcuucucucug

SEQ ID NO: 3842183 - RNA, 18 nt, Human
gugaaggcuucucuguuc

SEQ ID NO: 3842184 - RNA, 16 nt, Human
gugaaguccuucaccu

SEQ ID NO: 3842185 - RNA, 16 nt, Human
gugaagugaaugaaac

SEQ ID NO: 3842186 - RNA, 14 nt, Human
gugaaguugcugcu

SEQ ID NO: 3842187 - RNA, 23 nt, Human
gugaaguugcugcuucucccagg

SEQ ID NO: 3842188 - RNA, 14 nt, Human
gugaaguuuacauu

SEQ ID NO: 3842189 - RNA, 18 nt, Human
gugaauaaccugaggauu

SEQ ID NO: 3842190 - RNA, 15 nt, Human
gugaauaauaaaagu

SEQ ID NO: 3842191 - RNA, 21 nt, Human
gugaauacugcuacagcaauu

SEQ ID NO: 3842192 - RNA, 23 nt, Human
gugaauagccauauuuguaaaau

SEQ ID NO: 3842193 - RNA, 14 nt, Human
gugaauauaaaugu

SEQ ID NO: 3842194 - RNA, 16 nt, Human
gugaauauuguucaua

SEQ ID NO: 3842195 - RNA, 22 nt, Human
gugaauauuuccauauggauuu

SEQ ID NO: 3842196 - RNA, 13 nt, Human
gugaaucaagggu

SEQ ID NO: 3842197 - RNA, 18 nt, Human
gugaaucacguaaagcua

SEQ ID NO: 3842198 - RNA, 15 nt, Human
gugaaucuaaaagcu

SEQ ID NO: 3842199 - RNA, 18 nt, Human
gugaaugaaagauuaaac

SEQ ID NO: 3842200 - RNA, 13 nt, Human
gugaaugaacacu

SEQ ID NO: 3842201 - RNA, 15 nt, Human
gugaaugccagugug

SEQ ID NO: 3842202 - RNA, 19 nt, Human
gugaaugccagugugcuga

SEQ ID NO: 3842203 - RNA, 21 nt, Human
gugaaugcugggacucagccu

SEQ ID NO: 3842204 - RNA, 14 nt, Human
gugaauggcuuugu

SEQ ID NO: 3842205 - RNA, 17 nt, Human
gugaauggcuuuguaua

SEQ ID NO: 3842206 - RNA, 15 nt, Human
gugaaugggaaaaga

SEQ ID NO: 3842207 - RNA, 12 nt, Human
gugaaugggugc

SEQ ID NO: 3842208 - RNA, 14 nt, Human
gugaaugugggcac

SEQ ID NO: 3842209 - RNA, 23 nt, Human
gugaaugugggcacuggcccagg

SEQ ID NO: 3842210 - RNA, 16 nt, Human
gugaauuacuaacuuc

SEQ ID NO: 3842211 - RNA, 16 nt, Human
gugaauuaguuuuaaa

SEQ ID NO: 3842212 - RNA, 19 nt, Human
gugaauuaucccuuuucuu

SEQ ID NO: 3842213 - RNA, 14 nt, Human
gugaauucccucac

SEQ ID NO: 3842214 - RNA, 17 nt, Human
gugaauugauaauaaac

SEQ ID NO: 3842215 - RNA, 19 nt, Human
gugaauugugaccaaguua

SEQ ID NO: 3842216 - RNA, 14 nt, Human
gugaauuguuugaa

SEQ ID NO: 3842217 - RNA, 20 nt, Human
gugaauuuauaccuaccugu

SEQ ID NO: 3842218 - RNA, 19 nt, Human
gugaauuucuucacuguug

SEQ ID NO: 3842219 - RNA, 13 nt, Human
gugaauuugaauc

SEQ ID NO: 3842220 - RNA, 14 nt, Human
gugaauuugaauga

SEQ ID NO: 3842221 - RNA, 13 nt, Human
gugaauuuuuaag

SEQ ID NO: 3842222 - RNA, 14 nt, Human
gugaauuuuucucu

SEQ ID NO: 3842223 - RNA, 23 nt, Human
gugaauuuuugcaauaaugcagu

SEQ ID NO: 3842224 - RNA, 13 nt, Human
gugacaaaaaauu

SEQ ID NO: 3842225 - RNA, 18 nt, Human
gugacaaaauuuuauaag

SEQ ID NO: 3842226 - RNA, 23 nt, Human
gugacaaaccauccaguggaggu

SEQ ID NO: 3842227 - RNA, 16 nt, Human
gugacaagcucacaga

SEQ ID NO: 3842228 - RNA, 14 nt, Human
gugacaaggcccca

SEQ ID NO: 3842229 - RNA, 17 nt, Human
gugacaaggccccagag

SEQ ID NO: 3842230 - RNA, 19 nt, Human
gugacaaggccccagagac

SEQ ID NO: 3842231 - RNA, 12 nt, Human
gugacaauaaaa

SEQ ID NO: 3842232 - RNA, 14 nt, Human
gugacaauaaaaca

SEQ ID NO: 3842233 - RNA, 21 nt, Human
gugacacaaacacacacaaaa

SEQ ID NO: 3842234 - RNA, 21 nt, Human
gugacacacuacaccacacac

SEQ ID NO: 3842235 - RNA, 22 nt, Human
gugacacacuacaccacacaca

SEQ ID NO: 3842236 - RNA, 12 nt, Human
gugacacagcag

SEQ ID NO: 3842237 - RNA, 19 nt, Human
gugacacagcagcuucacc

SEQ ID NO: 3842238 - RNA, 21 nt, Human
gugacacuucagagagcuggu

SEQ ID NO: 3842239 - RNA, 22 nt, Human
gugacacuucagagagcuggua

SEQ ID NO: 3842240 - RNA, 15 nt, Human
gugacagacaggcuc

SEQ ID NO: 3842241 - RNA, 16 nt, Human
gugacagacaggcucu

SEQ ID NO: 3842242 - RNA, 23 nt, Human
gugacagaccacaucuuuaucug

SEQ ID NO: 3842243 - RNA, 12 nt, Human
gugacagaggca

SEQ ID NO: 3842244 - RNA, 20 nt, Human
gugacagagugagacucugu

SEQ ID NO: 3842245 - RNA, 14 nt, Human
gugacagcuuccuu

SEQ ID NO: 3842246 - RNA, 13 nt, Human
gugacagggaagc

SEQ ID NO: 3842247 - RNA, 19 nt, Human
gugacagggaagcuacagg

SEQ ID NO: 3842248 - RNA, 22 nt, Human
gugacagggcggggguggcggc

SEQ ID NO: 3842249 - RNA, 11 nt, Human
gugacagucau

SEQ ID NO: 3842250 - RNA, 13 nt, Human
gugacagucauca

SEQ ID NO: 3842251 - RNA, 18 nt, Human
gugacagucaucaucagg

SEQ ID NO: 3842252 - RNA, 19 nt, Human
gugacagucaucaucaggg

SEQ ID NO: 3842253 - RNA, 20 nt, Human
gugacagucaucaucagggc

SEQ ID NO: 3842254 - RNA, 23 nt, Human
gugacagucaucaucagggccug

SEQ ID NO: 3842255 - RNA, 21 nt, Human
gugacagugagguccuggggg

SEQ ID NO: 3842256 - RNA, 15 nt, Human
gugacagugccuggg

SEQ ID NO: 3842257 - RNA, 12 nt, Human
gugacaguguug

SEQ ID NO: 3842258 - RNA, 15 nt, Human
gugacaucaguggca

SEQ ID NO: 3842259 - RNA, 18 nt, Human
gugacaucggaaaaauaa

SEQ ID NO: 3842260 - RNA, 20 nt, Human
gugacaugcgggcugggcag

SEQ ID NO: 3842261 - RNA, 21 nt, Human
gugacaugcgggcugggcagc

SEQ ID NO: 3842262 - RNA, 22 nt, Human
gugacaugcgggcugggcagcu

SEQ ID NO: 3842263 - RNA, 20 nt, Human
gugacauggugccugagagg

SEQ ID NO: 3842264 - RNA, 13 nt, Human
gugacauguaaca

SEQ ID NO: 3842265 - RNA, 14 nt, Human
gugacaugugaaac

SEQ ID NO: 3842266 - RNA, 16 nt, Human
gugacaugugaaaccu

SEQ ID NO: 3842267 - RNA, 21 nt, Human
gugacauugcaucaaagcauc

SEQ ID NO: 3842268 - RNA, 17 nt, Human
gugacauuuuacauuaa

SEQ ID NO: 3842269 - RNA, 19 nt, Human
gugaccaacuagacauucu

SEQ ID NO: 3842270 - RNA, 13 nt, Human
gugaccaacugug

SEQ ID NO: 3842271 - RNA, 20 nt, Human
gugaccaacuguguuguauu

SEQ ID NO: 3842272 - RNA, 15 nt, Human
gugaccaaugucuug

SEQ ID NO: 3842273 - RNA, 17 nt, Human
gugaccacucugucuug

SEQ ID NO: 3842274 - RNA, 18 nt, Human
gugaccauguuuuguuua

SEQ ID NO: 3842275 - RNA, 14 nt, Human
gugacccaaugauu

SEQ ID NO: 3842276 - RNA, 18 nt, Human
gugacccacuucucauca

SEQ ID NO: 3842277 - RNA, 15 nt, Human
gugaccccagggcac

SEQ ID NO: 3842278 - RNA, 19 nt, Human
gugaccccagggcacagga

SEQ ID NO: 3842279 - RNA, 15 nt, Human
gugacccccagcucc

SEQ ID NO: 3842280 - RNA, 17 nt, Human
gagggggucguggagag

SEQ ID NO: 3842281 - RNA, 19 nt, Human
gagggggucguggagagcu

SEQ ID NO: 3842282 - RNA, 15 nt, Human
gaggggguuacaaac

SEQ ID NO: 3842283 - RNA, 18 nt, Human
gagggguaggcagagccu

SEQ ID NO: 3842284 - RNA, 19 nt, Human
gagggguaggggcugggaa

SEQ ID NO: 3842285 - RNA, 18 nt, Human
gaggggugcagaggcugu

SEQ ID NO: 3842286 - RNA, 14 nt, Human
gaggggugcucugc

SEQ ID NO: 3842287 - RNA, 14 nt, Human
gagggguguggcag

SEQ ID NO: 3842288 - RNA, 21 nt, Human
gagggguguggcuccuuccca

SEQ ID NO: 3842289 - RNA, 15 nt, Human
gagggguuccucccc

SEQ ID NO: 3842290 - RNA, 15 nt, Human
gaggguaaauaaacc

SEQ ID NO: 3842291 - RNA, 16 nt, Human
gaggguaauaaacuua

SEQ ID NO: 3842292 - RNA, 19 nt, Human
gaggguaauaaccagacac

SEQ ID NO: 3842293 - RNA, 17 nt, Human
gaggguacagcugggcu

SEQ ID NO: 3842294 - RNA, 18 nt, Human
gaggguaggcaggauugg

SEQ ID NO: 3842295 - RNA, 13 nt, Human
gagggucagagag

SEQ ID NO: 3842296 - RNA, 15 nt, Human
gagggucagagagga

SEQ ID NO: 3842297 - RNA, 16 nt, Human
gagggucagccagggc

SEQ ID NO: 3842298 - RNA, 18 nt, Human
gagggucagccagggccu

SEQ ID NO: 3842299 - RNA, 17 nt, Human
gaggguccugcagccug

SEQ ID NO: 3842300 - RNA, 18 nt, Human
gaggguccugcagccugc

SEQ ID NO: 3842301 - RNA, 21 nt, Human
gaggguccugcagccugcagg

SEQ ID NO: 3842302 - RNA, 15 nt, Human
gaggguccuggcucc

SEQ ID NO: 3842303 - RNA, 17 nt, Human
gaggguccuggcuccug

SEQ ID NO: 3842304 - RNA, 21 nt, Human
gaggguccuggcuccugaggg

SEQ ID NO: 3842305 - RNA, 17 nt, Human
gagggucuagaggccug

SEQ ID NO: 3842306 - RNA, 21 nt, Human
gagggugaagugaagacaaug

SEQ ID NO: 3842307 - RNA, 18 nt, Human
gagggugacagcuuccuu

SEQ ID NO: 3842308 - RNA, 23 nt, Human
gagggugccguguccccugacag

SEQ ID NO: 3842309 - RNA, 14 nt, Human
gaggguggugaccu

SEQ ID NO: 3842310 - RNA, 21 nt, Human
gaggguggugaccucugccug

SEQ ID NO: 3842311 - RNA, 20 nt, Human
gagggugguucaacaaagaa

SEQ ID NO: 3842312 - RNA, 22 nt, Human
gagggugucccaaaaagaaagg

SEQ ID NO: 3842313 - RNA, 15 nt, Human
gaggguuagggaggg

SEQ ID NO: 3842314 - RNA, 12 nt, Human
gaggguuccugu

SEQ ID NO: 3842315 - RNA, 18 nt, Human
gaggguugauuaaggcag

SEQ ID NO: 3842316 - RNA, 14 nt, Human
gaggguugggcugg

SEQ ID NO: 3842317 - RNA, 17 nt, Human
gaggguuguucuccuag

SEQ ID NO: 3842318 - RNA, 22 nt, Human
gagguaaaagugugagcaguga

SEQ ID NO: 3842319 - RNA, 15 nt, Human
gagguaaagauaugg

SEQ ID NO: 3842320 - RNA, 13 nt, Human
gagguaacagaac

SEQ ID NO: 3842321 - RNA, 18 nt, Human
gagguacacuugugaaua

SEQ ID NO: 3842322 - RNA, 23 nt, Human
gagguagaguuugaaggagguga

SEQ ID NO: 3842323 - RNA, 14 nt, Human
gagguauauuggaa

SEQ ID NO: 3842324 - RNA, 21 nt, Human
guguugccuugaaccacuucc

SEQ ID NO: 3842325 - RNA, 22 nt, Human
guguuggcuugugaucugggaa

SEQ ID NO: 3842326 - RNA, 21 nt, Human
guguugggauacugcagggcc

SEQ ID NO: 3842327 - RNA, 14 nt, Human
guguuggucuguac

SEQ ID NO: 3842328 - RNA, 22 nt, Human
guguugguuuugacuggauauu

SEQ ID NO: 3842329 - RNA, 17 nt, Human
guguuguaauucuucag

SEQ ID NO: 3842330 - RNA, 14 nt, Human
guguuguaugccuu

SEQ ID NO: 3842331 - RNA, 18 nt, Human
guguuguccuuuugucuu

SEQ ID NO: 3842332 - RNA, 20 nt, Human
guguugugauagcuaacauu

SEQ ID NO: 3842333 - RNA, 21 nt, Human
guguuguugcuucuugugaag

SEQ ID NO: 3842334 - RNA, 14 nt, Human
guguuuaagacauu

SEQ ID NO: 3842335 - RNA, 22 nt, Human
guguuuaagacauuuuuggaag

SEQ ID NO: 3842336 - RNA, 14 nt, Human
guguuuacagagau

SEQ ID NO: 3842337 - RNA, 15 nt, Human
guguuuagaauugaa

SEQ ID NO: 3842338 - RNA, 15 nt, Human
guguuuaguugcaga

SEQ ID NO: 3842339 - RNA, 13 nt, Human
guguuuauaaaau

SEQ ID NO: 3842340 - RNA, 16 nt, Human
guguuuaugugcuauu

SEQ ID NO: 3842341 - RNA, 19 nt, Human
guguuuauuaaaauucuga

SEQ ID NO: 3842342 - RNA, 14 nt, Human
guguuuauucuuga

SEQ ID NO: 3842343 - RNA, 16 nt, Human
guguuuauuuuucaua

SEQ ID NO: 3842344 - RNA, 20 nt, Human
guguuuauuuuucauauugu

SEQ ID NO: 3842345 - RNA, 18 nt, Human
guguuuccauauuuuaua

SEQ ID NO: 3842346 - RNA, 23 nt, Human
guguuuccuggcacugcuuccag

SEQ ID NO: 3842347 - RNA, 11 nt, Human
guguuucuagg

SEQ ID NO: 3842348 - RNA, 17 nt, Human
guguuucuauugacuuc

SEQ ID NO: 3842349 - RNA, 13 nt, Human
guguuucucccuc

SEQ ID NO: 3842350 - RNA, 18 nt, Human
guguuucuguaagaaacc

SEQ ID NO: 3842351 - RNA, 13 nt, Human
guguuucuguccu

SEQ ID NO: 3842352 - RNA, 13 nt, Human
guguuucugugca

SEQ ID NO: 3842353 - RNA, 14 nt, Human
guguuucuugccuc

SEQ ID NO: 3842354 - RNA, 16 nt, Human
guguuucuugccucau

SEQ ID NO: 3842355 - RNA, 12 nt, Human
guguuugaagca

SEQ ID NO: 3842356 - RNA, 15 nt, Human
guguuugucauuagc

SEQ ID NO: 3842357 - RNA, 11 nt, Human
guguuuguguu

SEQ ID NO: 3842358 - RNA, 18 nt, Human
guguuuguugcuggcuug

SEQ ID NO: 3842359 - RNA, 15 nt, Human
guguuuuaauuccaa

SEQ ID NO: 3842360 - RNA, 15 nt, Human
guguuuuaauuuaaa

SEQ ID NO: 3842361 - RNA, 18 nt, Human
guguuuucugaauaacau

SEQ ID NO: 3842362 - RNA, 12 nt, Human
guguuuuggucc

SEQ ID NO: 3842363 - RNA, 16 nt, Human
guguuuuguucaccau

SEQ ID NO: 3842364 - RNA, 13 nt, Human
guguuuuguuuug

SEQ ID NO: 3842365 - RNA, 18 nt, Human
guguuuuucauaaagcag

SEQ ID NO: 3842366 - RNA, 18 nt, Human
guguuuuucuauuaaaag

SEQ ID NO: 3842367 - RNA, 21 nt, Human
guguuuuucuauuaaaagacu

SEQ ID NO: 3842368 - RNA, 21 nt, Human
guguuuuuguaaagugugguc

SEQ ID NO: 3842369 - RNA, 15 nt, Human
guguuuuuuaagaug

SEQ ID NO: 3842370 - RNA, 23 nt, Human
guguuuuuucuuuuuuuuuaagu

SEQ ID NO: 3842371 - RNA, 13 nt, Human
guuaaaaaaaaaa

SEQ ID NO: 3842372 - RNA, 21 nt, Human
guuaaaaaaaaaaaaaggaaa

SEQ ID NO: 3842373 - RNA, 14 nt, Human
guuaaaaaaaauaa

SEQ ID NO: 3842374 - RNA, 16 nt, Human
guuaaaaaaaauaaua

SEQ ID NO: 3842375 - RNA, 18 nt, Human
guuaaaaaaaauaauaaa

SEQ ID NO: 3842376 - RNA, 19 nt, Human
guuaaaaaaauggcaguga

SEQ ID NO: 3842377 - RNA, 20 nt, Human
guuaaaaacagauuuggaaa

SEQ ID NO: 3842378 - RNA, 14 nt, Human
guuaaaaagaaaag

SEQ ID NO: 3842379 - RNA, 22 nt, Human
guuaaaaagaaaaguuuauaaa

SEQ ID NO: 3842380 - RNA, 20 nt, Human
guuaaaacuguacauuuaaa

SEQ ID NO: 3842381 - RNA, 22 nt, Human
guuaaaacuguacauuuaaaau

SEQ ID NO: 3842382 - RNA, 23 nt, Human
guuaaaacuguacauuuaaaauu

SEQ ID NO: 3842383 - RNA, 16 nt, Human
guuaaaagaugaaaau

SEQ ID NO: 3842384 - RNA, 19 nt, Human
guuaaaaugugaggaagaa

SEQ ID NO: 3842385 - RNA, 21 nt, Human
guuaaaccauccauguauuuu

SEQ ID NO: 3842386 - RNA, 21 nt, Human
guuaaacuagcauaucugccu

SEQ ID NO: 3842387 - RNA, 12 nt, Human
guuaaagaugca

SEQ ID NO: 3842388 - RNA, 16 nt, Human
guuaaagauguagcaa

SEQ ID NO: 3842389 - RNA, 15 nt, Human
guuaaagcugccggc

SEQ ID NO: 3842390 - RNA, 23 nt, Human
guuaaaggcucgauuuuguaucu

SEQ ID NO: 3842391 - RNA, 18 nt, Human
guuaaaggugaacauugg

SEQ ID NO: 3842392 - RNA, 20 nt, Human
guuaaagucagugggaacgu

SEQ ID NO: 3842393 - RNA, 20 nt, Human
guuaaauaaauuguauauuc

SEQ ID NO: 3842394 - RNA, 19 nt, Human
guuaaauagaguauaugca

SEQ ID NO: 3842395 - RNA, 22 nt, Human
guuaaauauuuacauaugaaau

SEQ ID NO: 3842396 - RNA, 20 nt, Human
guuaaaugaaauuguaaaac

SEQ ID NO: 3842397 - RNA, 13 nt, Human
guuaaauguuuug

SEQ ID NO: 3842398 - RNA, 18 nt, Human
guuaaauguuuuguaaac

SEQ ID NO: 3842399 - RNA, 22 nt, Human
guuaaauguuuuguaaacuuug

SEQ ID NO: 3842400 - RNA, 17 nt, Human
guuaaauuucuggaccu

SEQ ID NO: 3842401 - RNA, 19 nt, Human
guuaacaaugccuauugua

SEQ ID NO: 3842402 - RNA, 18 nt, Human
guuaacacauuuuguaua

SEQ ID NO: 3842403 - RNA, 23 nt, Human
guuaacagaagggagggcagagc

SEQ ID NO: 3842404 - RNA, 12 nt, Human
guuaacagauuu

SEQ ID NO: 3842405 - RNA, 15 nt, Human
guuaacaucaguuuu

SEQ ID NO: 3842406 - RNA, 18 nt, Human
guuaacaucaugaauuua

SEQ ID NO: 3842407 - RNA, 18 nt, Human
guuaacauugaccaagaa

SEQ ID NO: 3842408 - RNA, 23 nt, Human
guuaacauugaccaagaacugca

SEQ ID NO: 3842409 - RNA, 20 nt, Human
guuaaccagaauaaaguucu

SEQ ID NO: 3842410 - RNA, 12 nt, Human
guuaaccuaccu

SEQ ID NO: 3842411 - RNA, 16 nt, Human
guuaacuauguacaau

SEQ ID NO: 3842412 - RNA, 21 nt, Human
guuaacuauuuuauuuucuaa

SEQ ID NO: 3842413 - RNA, 14 nt, Human
guuaacugaauacc

SEQ ID NO: 3842414 - RNA, 16 nt, Human
guuaagaaaaaaauaa

SEQ ID NO: 3842415 - RNA, 15 nt, Human
guuaagaagcuguug

SEQ ID NO: 3842416 - RNA, 17 nt, Human
guuaagaagcuguugua

SEQ ID NO: 3842417 - RNA, 19 nt, Human
guuaagaagcuguuguaca

SEQ ID NO: 3842418 - RNA, 22 nt, Human
guuaagacaugauuuccuugaa

SEQ ID NO: 3842419 - RNA, 15 nt, Human
guuaagacuugacag

SEQ ID NO: 3842420 - RNA, 17 nt, Human
guuaagagaaacuuuau

SEQ ID NO: 3842421 - RNA, 22 nt, Human
guuaagagaaacuuuauacauu

SEQ ID NO: 3842422 - RNA, 17 nt, Human
guuaagagaaaugagcu

SEQ ID NO: 3842423 - RNA, 19 nt, Human
guuaagcagccgccacauc

SEQ ID NO: 3842424 - RNA, 15 nt, Human
guggaguggggcagu

SEQ ID NO: 3842425 - RNA, 17 nt, Human
guggaguucaucuugaa

SEQ ID NO: 3842426 - RNA, 14 nt, Human
guggauaacaaaga

SEQ ID NO: 3842427 - RNA, 21 nt, Human
guggauagaugcccugcuaga

SEQ ID NO: 3842428 - RNA, 13 nt, Human
guggauauaaaua

SEQ ID NO: 3842429 - RNA, 15 nt, Human
guggauauaaauaua

SEQ ID NO: 3842430 - RNA, 16 nt, Human
guggauauaaauauau

SEQ ID NO: 3842431 - RNA, 14 nt, Human
guggaucacagagg

SEQ ID NO: 3842432 - RNA, 16 nt, Human
guggaucacagaggcu

SEQ ID NO: 3842433 - RNA, 15 nt, Human
guggaucaccugagg

SEQ ID NO: 3842434 - RNA, 21 nt, Human
guggaucacgaggucaggaga

SEQ ID NO: 3842435 - RNA, 22 nt, Human
guggaucacgaggucaggagau

SEQ ID NO: 3842436 - RNA, 16 nt, Human
guggaugcaauuuuuc

SEQ ID NO: 3842437 - RNA, 21 nt, Human
guggaugccacagcccagcuu

SEQ ID NO: 3842438 - RNA, 18 nt, Human
guggaugccgauuucugu

SEQ ID NO: 3842439 - RNA, 20 nt, Human
guggaugccgauuucuguaa

SEQ ID NO: 3842440 - RNA, 20 nt, Human
guggaugccugguggcagcu

SEQ ID NO: 3842441 - RNA, 21 nt, Human
guggaugccugguggcagcug

SEQ ID NO: 3842442 - RNA, 22 nt, Human
guggauggccccagcacagcuu

SEQ ID NO: 3842443 - RNA, 18 nt, Human
guggauggccguggaugc

SEQ ID NO: 3842444 - RNA, 21 nt, Human
guggauggguuuuaugagaug

SEQ ID NO: 3842445 - RNA, 15 nt, Human
guggaugucuuccuu

SEQ ID NO: 3842446 - RNA, 19 nt, Human
guggaugucuuccuuggag

SEQ ID NO: 3842447 - RNA, 17 nt, Human
guggauuauuucauuuu

SEQ ID NO: 3842448 - RNA, 18 nt, Human
guggauuuaacagaaaug

SEQ ID NO: 3842449 - RNA, 20 nt, Human
guggauuuaacagaaaugua

SEQ ID NO: 3842450 - RNA, 23 nt, Human
guggauuuaacagaaauguacag

SEQ ID NO: 3842451 - RNA, 21 nt, Human
guggauuuugguuuuguuccc

SEQ ID NO: 3842452 - RNA, 21 nt, Human
guggcaaagcagcaacuauuc

SEQ ID NO: 3842453 - RNA, 14 nt, Human
guggcaaccugcuu

SEQ ID NO: 3842454 - RNA, 15 nt, Human
guggcaagaccaaaa

SEQ ID NO: 3842455 - RNA, 17 nt, Human
guggcaagaguguggag

SEQ ID NO: 3842456 - RNA, 13 nt, Human
guggcaaggcugu

SEQ ID NO: 3842457 - RNA, 20 nt, Human
guggcaccagcgaagggagu

SEQ ID NO: 3842458 - RNA, 15 nt, Human
guggcaccugucugc

SEQ ID NO: 3842459 - RNA, 18 nt, Human
guggcaccugucugcucc

SEQ ID NO: 3842460 - RNA, 20 nt, Human
guggcaccugucugcuccag

SEQ ID NO: 3842461 - RNA, 22 nt, Human
guggcacucagucucucuucuc

SEQ ID NO: 3842462 - RNA, 12 nt, Human
guggcacugcca

SEQ ID NO: 3842463 - RNA, 21 nt, Human
guggcacugguagguugggac

SEQ ID NO: 3842464 - RNA, 22 nt, Human
guggcacugguagguugggaca

SEQ ID NO: 3842465 - RNA, 13 nt, Human
guggcagagagag

SEQ ID NO: 3842466 - RNA, 17 nt, Human
guggcagagagagagaa

SEQ ID NO: 3842467 - RNA, 15 nt, Human
guggcagaguuacag

SEQ ID NO: 3842468 - RNA, 19 nt, Human
guggcagcaacggcacagc

SEQ ID NO: 3842469 - RNA, 14 nt, Human
guggcagcccagcc

SEQ ID NO: 3842470 - RNA, 15 nt, Human
guggcagcccagcca

SEQ ID NO: 3842471 - RNA, 18 nt, Human
guggcagcccagccagcg

SEQ ID NO: 3842472 - RNA, 19 nt, Human
guggcagcugcgguccacc

SEQ ID NO: 3842473 - RNA, 12 nt, Human
guggcagcugcu

SEQ ID NO: 3842474 - RNA, 13 nt, Human
guggcaggaccag

SEQ ID NO: 3842475 - RNA, 15 nt, Human
guggcaggcagaggc

SEQ ID NO: 3842476 - RNA, 23 nt, Human
guggcaggcagaggcccaggcug

SEQ ID NO: 3842477 - RNA, 24 nt, Human
guggcaggcagaggcccaggcugc

SEQ ID NO: 3842478 - RNA, 18 nt, Human
guggcagggccuagcugc

SEQ ID NO: 3842479 - RNA, 22 nt, Human
guggcagggccuagcugcuaca

SEQ ID NO: 3842480 - RNA, 23 nt, Human
guggcagggccuagcugcuacaa

SEQ ID NO: 3842481 - RNA, 20 nt, Human
guggcaggggacaggagucc

SEQ ID NO: 3842482 - RNA, 23 nt, Human
guggcagguggaggugucaggcu

SEQ ID NO: 3842483 - RNA, 17 nt, Human
guggcagugcagcaacc

SEQ ID NO: 3842484 - RNA, 17 nt, Human
guggcagugggagcugc

SEQ ID NO: 3842485 - RNA, 21 nt, Human
guggcagugggagcugccugu

SEQ ID NO: 3842486 - RNA, 16 nt, Human
guggcaugcaccugca

SEQ ID NO: 3842487 - RNA, 18 nt, Human
guggcauguggccugugg

SEQ ID NO: 3842488 - RNA, 18 nt, Human
guggcauuggcagcaggu

SEQ ID NO: 3842489 - RNA, 18 nt, Human
guggccaagagaaacuuc

SEQ ID NO: 3842490 - RNA, 15 nt, Human
guggccaaggagcug

SEQ ID NO: 3842491 - RNA, 17 nt, Human
guggccaaggagcugcu

SEQ ID NO: 3842492 - RNA, 19 nt, Human
guggccaaggagcugcuau

SEQ ID NO: 3842493 - RNA, 22 nt, Human
guggccacaauccacgcuucuc

SEQ ID NO: 3842494 - RNA, 16 nt, Human
guggccacagcgccag

SEQ ID NO: 3842495 - RNA, 17 nt, Human
guggccacagcgccagc

SEQ ID NO: 3842496 - RNA, 13 nt, Human
guggccaccagua

SEQ ID NO: 3842497 - RNA, 17 nt, Human
guggccagaccagagcu

SEQ ID NO: 3842498 - RNA, 18 nt, Human
guggccagaccagagcuc

SEQ ID NO: 3842499 - RNA, 13 nt, Human
guggccagaggug

SEQ ID NO: 3842500 - RNA, 11 nt, Human
guggccagccc

SEQ ID NO: 3842501 - RNA, 14 nt, Human
guggccagccugga

SEQ ID NO: 3842502 - RNA, 13 nt, Human
guggccaggaggu

SEQ ID NO: 3842503 - RNA, 15 nt, Human
guggccaucccugug

SEQ ID NO: 3842504 - RNA, 17 nt, Human
guggccaucccugugag

SEQ ID NO: 3842505 - RNA, 20 nt, Human
guggccaugacccugccucu

SEQ ID NO: 3842506 - RNA, 21 nt, Human
guggccaugacccugccucuc

SEQ ID NO: 3842507 - RNA, 13 nt, Human
guggccaugcucc

SEQ ID NO: 3842508 - RNA, 18 nt, Human
guggccaugcuccucuuc

SEQ ID NO: 3842509 - RNA, 23 nt, Human
guggccauuuagccaccaucuuu

SEQ ID NO: 3842510 - RNA, 18 nt, Human
guggcccaaggcuggcag

SEQ ID NO: 3842511 - RNA, 17 nt, Human
guggcccauccccccuc

SEQ ID NO: 3842512 - RNA, 21 nt, Human
guggcccauccccccucacca

SEQ ID NO: 3842513 - RNA, 19 nt, Human
guggccccacccugggccc

SEQ ID NO: 3842514 - RNA, 21 nt, Human
guggccccacccugggcccug

SEQ ID NO: 3842515 - RNA, 14 nt, Human
guggccccagccug

SEQ ID NO: 3842516 - RNA, 17 nt, Human
guggccccagccuggcc

SEQ ID NO: 3842517 - RNA, 19 nt, Human
guggccccagccuggccca

SEQ ID NO: 3842518 - RNA, 16 nt, Human
guggccccguuucugg

SEQ ID NO: 3842519 - RNA, 23 nt, Human
guggccccguuucugguggucug

SEQ ID NO: 3842520 - RNA, 17 nt, Human
guggcccgacagccugg

SEQ ID NO: 3842521 - RNA, 18 nt, Human
guggcccgacagccuggc

SEQ ID NO: 3842522 - RNA, 22 nt, Human
guggcccgguugaacucacucc

SEQ ID NO: 3842523 - RNA, 15 nt, Human
guggcccucuccccu

SEQ ID NO: 3842524 - RNA, 19 nt, Human
guggcccucuccccugccc

SEQ ID NO: 3842525 - RNA, 19 nt, Human
guggcccucucccuuaccc

SEQ ID NO: 3842526 - RNA, 11 nt, Human
guggcccuggc

SEQ ID NO: 3842527 - RNA, 18 nt, Human
guggcccuggccugcugg

SEQ ID NO: 3842528 - RNA, 21 nt, Human
guggcccugucccucccaccu

SEQ ID NO: 3842529 - RNA, 22 nt, Human
guggcccugucccucccaccuc

SEQ ID NO: 3842530 - RNA, 23 nt, Human
guugcauagcaguauauguuaau

SEQ ID NO: 3842531 - RNA, 16 nt, Human
guugcaugauguauuu

SEQ ID NO: 3842532 - RNA, 16 nt, Human
guugcauguaguaaca

SEQ ID NO: 3842533 - RNA, 20 nt, Human
guugcauguaguaacacuaa

SEQ ID NO: 3842534 - RNA, 23 nt, Human
guugcauuuguuuuguuuacaga

SEQ ID NO: 3842535 - RNA, 21 nt, Human
guugccaagaacugaaaacau

SEQ ID NO: 3842536 - RNA, 16 nt, Human
guugccaagacaaauc

SEQ ID NO: 3842537 - RNA, 17 nt, Human
guugccaagacaaauca

SEQ ID NO: 3842538 - RNA, 14 nt, Human
guugccacaggaca

SEQ ID NO: 3842539 - RNA, 17 nt, Human
guugccacaggccuccc

SEQ ID NO: 3842540 - RNA, 14 nt, Human
guugccagucaccc

SEQ ID NO: 3842541 - RNA, 16 nt, Human
guugccaguuguccuc

SEQ ID NO: 3842542 - RNA, 14 nt, Human
guugcccaggcagg

SEQ ID NO: 3842543 - RNA, 15 nt, Human
guugcccaggcaggu

SEQ ID NO: 3842544 - RNA, 17 nt, Human
guugcccaggcaggucu

SEQ ID NO: 3842545 - RNA, 12 nt, Human
guugcccaggcu

SEQ ID NO: 3842546 - RNA, 16 nt, Human
guugcccaggcuggcg

SEQ ID NO: 3842547 - RNA, 11 nt, Human
guugccccaga

SEQ ID NO: 3842548 - RNA, 17 nt, Human
guugccuaaguauuaaa

SEQ ID NO: 3842549 - RNA, 18 nt, Human
guugccuaaguauuaaaa

SEQ ID NO: 3842550 - RNA, 21 nt, Human
guugccuaaguauuaaaacau

SEQ ID NO: 3842551 - RNA, 14 nt, Human
guugccugucgcuu

SEQ ID NO: 3842552 - RNA, 19 nt, Human
guugccuugaaccacuucc

SEQ ID NO: 3842553 - RNA, 12 nt, Human
guugccuuuuau

SEQ ID NO: 3842554 - RNA, 23 nt, Human
guugcguggacucugcacauguc

SEQ ID NO: 3842555 - RNA, 21 nt, Human
guugcuaacugaacuuugaag

SEQ ID NO: 3842556 - RNA, 22 nt, Human
guugcuaagaagcgagcacuga

SEQ ID NO: 3842557 - RNA, 22 nt, Human
guugcuaagccccagcaagcaa

SEQ ID NO: 3842558 - RNA, 22 nt, Human
guugcucagcaaggggcucugc

SEQ ID NO: 3842559 - RNA, 23 nt, Human
guugcucuaugcuuuccaaaccu

SEQ ID NO: 3842560 - RNA, 13 nt, Human
guugcugaauagg

SEQ ID NO: 3842561 - RNA, 15 nt, Human
guugcugacuuagaa

SEQ ID NO: 3842562 - RNA, 18 nt, Human
guugcugcuucucccagg

SEQ ID NO: 3842563 - RNA, 23 nt, Human
guugcugcuucucccaggcaagg

SEQ ID NO: 3842564 - RNA, 22 nt, Human
guugcugggagcugaaaaauca

SEQ ID NO: 3842565 - RNA, 14 nt, Human
guugcugguacaca

SEQ ID NO: 3842566 - RNA, 16 nt, Human
guugcugguugcugug

SEQ ID NO: 3842567 - RNA, 17 nt, Human
guugcugguugcugugu

SEQ ID NO: 3842568 - RNA, 18 nt, Human
guugcugguugcugugug

SEQ ID NO: 3842569 - RNA, 17 nt, Human
guugcugucagucuuga

SEQ ID NO: 3842570 - RNA, 16 nt, Human
guugcugugugguuug

SEQ ID NO: 3842571 - RNA, 15 nt, Human
guugcuguuucacaa

SEQ ID NO: 3842572 - RNA, 23 nt, Human
guugcuguuuuccucccuucugc

SEQ ID NO: 3842573 - RNA, 15 nt, Human
guugcuuacaauuuu

SEQ ID NO: 3842574 - RNA, 16 nt, Human
guugcuucuugugaag

SEQ ID NO: 3842575 - RNA, 17 nt, Human
guugcuucuugugaagg

SEQ ID NO: 3842576 - RNA, 21 nt, Human
guugcuugccugauauaaaug

SEQ ID NO: 3842577 - RNA, 14 nt, Human
guugcuugucuucu

SEQ ID NO: 3842578 - RNA, 16 nt, Human
guugcuuuguugcacu

SEQ ID NO: 3842579 - RNA, 20 nt, Human
guuggaaaagaauacagaaa

SEQ ID NO: 3842580 - RNA, 14 nt, Human
guuggaaacacuaa

SEQ ID NO: 3842581 - RNA, 23 nt, Human
guuggaaacacuaaauguuaaag

SEQ ID NO: 3842582 - RNA, 23 nt, Human
guuggaaauagaaauuuccagag

SEQ ID NO: 3842583 - RNA, 18 nt, Human
guuggaaauauucaugcu

SEQ ID NO: 3842584 - RNA, 14 nt, Human
guuggaagagaauc

SEQ ID NO: 3842585 - RNA, 16 nt, Human
guuggaagagaaucac

SEQ ID NO: 3842586 - RNA, 23 nt, Human
guuggaaucacuguuuagaacac

SEQ ID NO: 3842587 - RNA, 22 nt, Human
guuggaauggauuuuucuuuaa

SEQ ID NO: 3842588 - RNA, 17 nt, Human
guuggaauuaaaacaau

SEQ ID NO: 3842589 - RNA, 14 nt, Human
guuggaccccagag

SEQ ID NO: 3842590 - RNA, 17 nt, Human
guuggaccccagagauu

SEQ ID NO: 3842591 - RNA, 13 nt, Human
guuggacuaaaug

SEQ ID NO: 3842592 - RNA, 14 nt, Human
guuggacuaaaugc

SEQ ID NO: 3842593 - RNA, 23 nt, Human
guuggacuuuucguuaacauuga

SEQ ID NO: 3842594 - RNA, 19 nt, Human
guuggagccacucuguucc

SEQ ID NO: 3842595 - RNA, 14 nt, Human
guuggagccugcag

SEQ ID NO: 3842596 - RNA, 22 nt, Human
guuggaggugauuccagugaag

SEQ ID NO: 3842597 - RNA, 16 nt, Human
guuggaguagaaugua

SEQ ID NO: 3842598 - RNA, 20 nt, Human
guuggaguagaauguaguuu

SEQ ID NO: 3842599 - RNA, 20 nt, Human
guuggaguucauucauauua

SEQ ID NO: 3842600 - RNA, 22 nt, Human
guuggaguuugagguuggaaaa

SEQ ID NO: 3842601 - RNA, 12 nt, Human
guuggauuuguu

SEQ ID NO: 3842602 - RNA, 18 nt, Human
guuggcaaaaaggcagga

SEQ ID NO: 3842603 - RNA, 18 nt, Human
guuggcaccuucccccuc

SEQ ID NO: 3842604 - RNA, 20 nt, Human
guuggcacucacagaccugg

SEQ ID NO: 3842605 - RNA, 20 nt, Human
guuggcagaaauacagucuu

SEQ ID NO: 3842606 - RNA, 23 nt, Human
guuggcagaugcagcucuuccug

SEQ ID NO: 3842607 - RNA, 15 nt, Human
guuggcaggcuggcc

SEQ ID NO: 3842608 - RNA, 22 nt, Human
guuggcagugagugagccuggc

SEQ ID NO: 3842609 - RNA, 15 nt, Human
guuggccaggcuggu

SEQ ID NO: 3842610 - RNA, 18 nt, Human
guuggccaggcuggucuc

SEQ ID NO: 3842611 - RNA, 23 nt, Human
guuggccauauuuaccucagccu

SEQ ID NO: 3842612 - RNA, 19 nt, Human
guuggcgcacccuccccuc

SEQ ID NO: 3842613 - RNA, 24 nt, Human
guuggcguaggcuacagagaagcc

SEQ ID NO: 3842614 - RNA, 15 nt, Human
guuggcuagauuaac

SEQ ID NO: 3842615 - RNA, 12 nt, Human
guuggcuggccu

SEQ ID NO: 3842616 - RNA, 17 nt, Human
guuggcugggaacucac

SEQ ID NO: 3842617 - RNA, 13 nt, Human
guuggcugggccc

SEQ ID NO: 3842618 - RNA, 23 nt, Human
guuggcugggggccucagugcca

SEQ ID NO: 3842619 - RNA, 11 nt, Human
guuggcugggu

SEQ ID NO: 3842620 - RNA, 17 nt, Human
guuggcuuaccuggccc

SEQ ID NO: 3842621 - RNA, 23 nt, Human
guugggacccaguggcagggcac

SEQ ID NO: 3842622 - RNA, 18 nt, Human
guugggacuacaggcgug

SEQ ID NO: 3842623 - RNA, 21 nt, Human
guugggagaaugucaguaugu

SEQ ID NO: 3842624 - RNA, 20 nt, Human
guugggagagggcgcaggcc

SEQ ID NO: 3842625 - RNA, 16 nt, Human
guugggagcacuggag

SEQ ID NO: 3842626 - RNA, 16 nt, Human
guugggauuccugacc

SEQ ID NO: 3842627 - RNA, 20 nt, Human
guugggauuccugacccagg

SEQ ID NO: 3842628 - RNA, 23 nt, Human
guugggauuccugacccaggccg

SEQ ID NO: 3842629 - RNA, 18 nt, Human
guugggccauacuggccu

SEQ ID NO: 3842630 - RNA, 19 nt, Human
guugggccauacuggccuc

SEQ ID NO: 3842631 - RNA, 17 nt, Human
guugggcccagaucugg

SEQ ID NO: 3842632 - RNA, 17 nt, Human
guugggcuggugucacc

SEQ ID NO: 3842633 - RNA, 23 nt, Human
guuggggaaacagcaucuccaag

SEQ ID NO: 3842634 - RNA, 18 nt, Human
guuggggaagggccugcc

SEQ ID NO: 3842635 - RNA, 21 nt, Human
guugggguggguauaaaagau

SEQ ID NO: 3842636 - RNA, 14 nt, Human
guugggucaccaga

SEQ ID NO: 3842637 - RNA, 15 nt, Human
guuggguucaucuga

SEQ ID NO: 3842638 - RNA, 14 nt, Human
guugguaaacaguu

SEQ ID NO: 3842639 - RNA, 14 nt, Human
guuggucaggcugg

SEQ ID NO: 3842640 - RNA, 23 nt, Human
guugguccagagcggaggcugug

SEQ ID NO: 3842641 - RNA, 18 nt, Human
guugguguuccacguguu

SEQ ID NO: 3842642 - RNA, 15 nt, Human
guugguguugcagaa

SEQ ID NO: 3842643 - RNA, 19 nt, Human
guugguuccaagcccugga

SEQ ID NO: 3842644 - RNA, 22 nt, Human
guugguuccaagucuuugcuau

SEQ ID NO: 3842645 - RNA, 18 nt, Human
guugguugcacuuuguag

SEQ ID NO: 3842646 - RNA, 14 nt, Human
guugguuuacuuuc

SEQ ID NO: 3842647 - RNA, 16 nt, Human
guuguaaaccaaguga

SEQ ID NO: 3842648 - RNA, 17 nt, Human
guuguaaagcaauaaaa

SEQ ID NO: 3842649 - RNA, 21 nt, Human
guuguaaaguauguauuauuu

SEQ ID NO: 3842650 - RNA, 18 nt, Human
guuguaaauaauuuauuu

SEQ ID NO: 3842651 - RNA, 20 nt, Human
guuguaaauauuuauguaaa

SEQ ID NO: 3842652 - RNA, 22 nt, Human
guuguaaauuggcauggaaauu

SEQ ID NO: 3842653 - RNA, 13 nt, Human
guuguaacuaggc

SEQ ID NO: 3842654 - RNA, 23 nt, Human
guuguacaaauaaagucccaggu

SEQ ID NO: 3842655 - RNA, 16 nt, Human
guuguacauuuaugau

SEQ ID NO: 3842656 - RNA, 14 nt, Human
guuguaccaaguga

SEQ ID NO: 3842657 - RNA, 16 nt, Human
guuguacuguauguga

SEQ ID NO: 3842658 - RNA, 14 nt, Human
guuguacuucauuu

SEQ ID NO: 3842659 - RNA, 18 nt, Human
guuguacuuuggaauucu

SEQ ID NO: 3842660 - RNA, 20 nt, Human
guuguagaauguauuguacc

SEQ ID NO: 3842661 - RNA, 20 nt, Human
guuguagagaaaacaugcag

SEQ ID NO: 3842662 - RNA, 16 nt, Human
guuguagauacaauca

SEQ ID NO: 3842663 - RNA, 18 nt, Human
guuguagauacaaucagc

SEQ ID NO: 3842664 - RNA, 21 nt, Human
guuguagauacaaucagcugc

SEQ ID NO: 3842665 - RNA, 14 nt, Human
guuguaguaaagaa

SEQ ID NO: 3842666 - RNA, 12 nt, Human
guuguauaauuu

SEQ ID NO: 3842667 - RNA, 23 nt, Human
guuguauacuuccuuaugcuucu

SEQ ID NO: 3842668 - RNA, 14 nt, Human
guuguaugccuuua

SEQ ID NO: 3842669 - RNA, 16 nt, Human
guuguauuaacaaaag

SEQ ID NO: 3842670 - RNA, 14 nt, Human
guuguauucuuuga

SEQ ID NO: 3842671 - RNA, 23 nt, Human
guuguauuuuaacucauaccuuu

SEQ ID NO: 3842672 - RNA, 16 nt, Human
guugucaaagagaggg

SEQ ID NO: 3842673 - RNA, 14 nt, Human
guugucaagaauag

SEQ ID NO: 3842674 - RNA, 15 nt, Human
guugucaauauuaaa

SEQ ID NO: 3842675 - RNA, 19 nt, Human
guugucaauauuaaauaca

SEQ ID NO: 3842676 - RNA, 16 nt, Human
guugucaccagaucug

SEQ ID NO: 3842677 - RNA, 21 nt, Human
guugucacugcuuuuggccug

SEQ ID NO: 3842678 - RNA, 22 nt, Human
gauagcagccuggcuccccugg

SEQ ID NO: 3842679 - RNA, 13 nt, Human
gauagcauugcuu

SEQ ID NO: 3842680 - RNA, 14 nt, Human
gauagccuguggcc

SEQ ID NO: 3842681 - RNA, 20 nt, Human
gauagcuaacauuuuaaaua

SEQ ID NO: 3842682 - RNA, 23 nt, Human
gauagcuucaccccaaucccagc

SEQ ID NO: 3842683 - RNA, 17 nt, Human
gauaggaaggucauuuc

SEQ ID NO: 3842684 - RNA, 22 nt, Human
gauaggaaggucauuuccaugu

SEQ ID NO: 3842685 - RNA, 23 nt, Human
gauaggccugugggccagauugc

SEQ ID NO: 3842686 - RNA, 16 nt, Human
gauaggccuucuugug

SEQ ID NO: 3842687 - RNA, 14 nt, Human
gauaggcucugcac

SEQ ID NO: 3842688 - RNA, 20 nt, Human
gauaggcucugcacagaugg

SEQ ID NO: 3842689 - RNA, 15 nt, Human
gauaguaacaaugaa

SEQ ID NO: 3842690 - RNA, 17 nt, Human
gauaguacuaagcauuu

SEQ ID NO: 3842691 - RNA, 19 nt, Human
gauagugggauuuccagaa

SEQ ID NO: 3842692 - RNA, 23 nt, Human
gauaguggggagacuucuuggcu

SEQ ID NO: 3842693 - RNA, 20 nt, Human
gauagugucccacggugccu

SEQ ID NO: 3842694 - RNA, 17 nt, Human
gauaguuacuguuguga

SEQ ID NO: 3842695 - RNA, 15 nt, Human
gauaguugcuauuuu

SEQ ID NO: 3842696 - RNA, 22 nt, Human
gauaguuuucauccauaacuga

SEQ ID NO: 3842697 - RNA, 15 nt, Human
gauauaaauaaaaca

SEQ ID NO: 3842698 - RNA, 22 nt, Human
gauauaaauauauauaaauaua

SEQ ID NO: 3842699 - RNA, 16 nt, Human
gauauaacuuuagaaa

SEQ ID NO: 3842700 - RNA, 15 nt, Human
gauauaagugugugu

SEQ ID NO: 3842701 - RNA, 14 nt, Human
gauauaaucuuuca

SEQ ID NO: 3842702 - RNA, 21 nt, Human
gauauacagaugaaaauuuga

SEQ ID NO: 3842703 - RNA, 14 nt, Human
gauauacaugaaaa

SEQ ID NO: 3842704 - RNA, 16 nt, Human
gauauaccaaauuaaa

SEQ ID NO: 3842705 - RNA, 18 nt, Human
gauauacuuuuuucuuau

SEQ ID NO: 3842706 - RNA, 16 nt, Human
gauauagaacagugcu

SEQ ID NO: 3842707 - RNA, 15 nt, Human
gauauagaauugcaa

SEQ ID NO: 3842708 - RNA, 16 nt, Human
gauauagccagaaaaa

SEQ ID NO: 3842709 - RNA, 23 nt, Human
gauauaggucagugaggcccagg

SEQ ID NO: 3842710 - RNA, 24 nt, Human
gauauaguuuuacuuuuaaacugu

SEQ ID NO: 3842711 - RNA, 18 nt, Human
guuguggguucuauguuu

SEQ ID NO: 3842712 - RNA, 17 nt, Human
guuguggugcugacaaa

SEQ ID NO: 3842713 - RNA, 14 nt, Human
guugugguuaaucu

SEQ ID NO: 3842714 - RNA, 21 nt, Human
guuguguaagagaauguugaa

SEQ ID NO: 3842715 - RNA, 16 nt, Human
guuguguacucuggcc

SEQ ID NO: 3842716 - RNA, 12 nt, Human
guugugucuuuu

SEQ ID NO: 3842717 - RNA, 19 nt, Human
guuguuacuaacuaaacuc

SEQ ID NO: 3842718 - RNA, 14 nt, Human
guuguuagagaaaa

SEQ ID NO: 3842719 - RNA, 18 nt, Human
guuguucuguuaacugaa

SEQ ID NO: 3842720 - RNA, 19 nt, Human
guuguucuuggcaauaaau

SEQ ID NO: 3842721 - RNA, 21 nt, Human
guuguucuuggcaauaaauuu

SEQ ID NO: 3842722 - RNA, 10 nt, Human
guuguucuuu

SEQ ID NO: 3842723 - RNA, 15 nt, Human
guuguucuuucagaa

SEQ ID NO: 3842724 - RNA, 23 nt, Human
guuguucuuuucccccaaagugg

SEQ ID NO: 3842725 - RNA, 24 nt, Human
guuguuguuaaugaaaaugucaga

SEQ ID NO: 3842726 - RNA, 12 nt, Human
guuguuucagug

SEQ ID NO: 3842727 - RNA, 23 nt, Human
guuguuucagugaauaugccugu

SEQ ID NO: 3842728 - RNA, 14 nt, Human
guuguuucuguucc

SEQ ID NO: 3842729 - RNA, 17 nt, Human
guuguuucuguuccaaa

SEQ ID NO: 3842730 - RNA, 11 nt, Human
guuguuucuuu

SEQ ID NO: 3842731 - RNA, 14 nt, Human
guuguuucuuucua

SEQ ID NO: 3842732 - RNA, 23 nt, Human
guuguuugaaaauauuaucuuug

SEQ ID NO: 3842733 - RNA, 20 nt, Human
guuguuuguaaauaagagau

SEQ ID NO: 3842734 - RNA, 13 nt, Human
guuguuugugccu

SEQ ID NO: 3842735 - RNA, 12 nt, Human
guuguuuguuua

SEQ ID NO: 3842736 - RNA, 20 nt, Human
guuuaaaacuaguuagauuc

SEQ ID NO: 3842737 - RNA, 11 nt, Human
guuuaaaacuu

SEQ ID NO: 3842738 - RNA, 13 nt, Human
guuuaaaagaaaa

SEQ ID NO: 3842739 - RNA, 18 nt, Human
guuuaaaagaaaaaauga

SEQ ID NO: 3842740 - RNA, 19 nt, Human
guuuaaaagacacacuugu

SEQ ID NO: 3842741 - RNA, 22 nt, Human
guuuaaaauaaaaugaaaauug

SEQ ID NO: 3842742 - RNA, 13 nt, Human
guuuaaaauguaa

SEQ ID NO: 3842743 - RNA, 21 nt, Human
guuuaaaauguaauuuaaaug

SEQ ID NO: 3842744 - RNA, 21 nt, Human
guuuaaacugauucauaauaa

SEQ ID NO: 3842745 - RNA, 17 nt, Human
guuuaaacuucucugaa

SEQ ID NO: 3842746 - RNA, 23 nt, Human
guuuaaacuucucugaagggagg

SEQ ID NO: 3842747 - RNA, 15 nt, Human
guuuaaagagagguu

SEQ ID NO: 3842748 - RNA, 13 nt, Human
guuuaaaguucug

SEQ ID NO: 3842749 - RNA, 17 nt, Human
guuuaaaguucugugua

SEQ ID NO: 3842750 - RNA, 16 nt, Human
guuuaaauaaaguauc

SEQ ID NO: 3842751 - RNA, 19 nt, Human
guuuaaauaaaguaucaug

SEQ ID NO: 3842752 - RNA, 23 nt, Human
guuuaaauaaaguaucaugcauu

SEQ ID NO: 3842753 - RNA, 19 nt, Human
guuuaaaugaacaagagaa

SEQ ID NO: 3842754 - RNA, 22 nt, Human
guuuaacauuugccuugcagaa

SEQ ID NO: 3842755 - RNA, 23 nt, Human
guuuaaccaaaaagaccagacua

SEQ ID NO: 3842756 - RNA, 22 nt, Human
guuuaacggcacuguggccuug

SEQ ID NO: 3842757 - RNA, 22 nt, Human
guuuaacuuaaucaauuaauuu

SEQ ID NO: 3842758 - RNA, 21 nt, Human
guuuaagaaaaguauuuugaa

SEQ ID NO: 3842759 - RNA, 22 nt, Human
guuuaagaaaaguauuuugaag

SEQ ID NO: 3842760 - RNA, 21 nt, Human
guuuaagauuuaauuugccaa

SEQ ID NO: 3842761 - RNA, 12 nt, Human
guuuaaguguug

SEQ ID NO: 3842762 - RNA, 13 nt, Human
guuuaauauuaaa

SEQ ID NO: 3842763 - RNA, 15 nt, Human
guuuaauauuaaagc

SEQ ID NO: 3842764 - RNA, 12 nt, Human
guuuaauauuua

SEQ ID NO: 3842765 - RNA, 15 nt, Human
guuuaauauuuaaac

SEQ ID NO: 3842766 - RNA, 20 nt, Human
guuuaaucauaguuacugug

SEQ ID NO: 3842767 - RNA, 17 nt, Human
guuuaaucauauaaaua

SEQ ID NO: 3842768 - RNA, 12 nt, Human
guuuaaugguag

SEQ ID NO: 3842769 - RNA, 17 nt, Human
guuuaaugguaguuuua

SEQ ID NO: 3842770 - RNA, 23 nt, Human
guuuaauugaaagaauguaaagc

SEQ ID NO: 3842771 - RNA, 19 nt, Human
guuuaauuguuuguccuca

SEQ ID NO: 3842772 - RNA, 18 nt, Human
guuuaauuuuuauuucuu

SEQ ID NO: 3842773 - RNA, 18 nt, Human
guuuacaagcccccccuu

SEQ ID NO: 3842774 - RNA, 16 nt, Human
guuuacaaguguauau

SEQ ID NO: 3842775 - RNA, 15 nt, Human
guuuacaauuuacaa

SEQ ID NO: 3842776 - RNA, 19 nt, Human
guuuacaauuuacaaagug

SEQ ID NO: 3842777 - RNA, 15 nt, Human
guuuacacugucaaa

SEQ ID NO: 3842778 - RNA, 18 nt, Human
guuuacacugucaaacau

SEQ ID NO: 3842779 - RNA, 18 nt, Human
guuuacagaaaaaucuug

SEQ ID NO: 3842780 - RNA, 11 nt, Human
guuuacagaau

SEQ ID NO: 3842781 - RNA, 15 nt, Human
guuuacaguaaauaa

SEQ ID NO: 3842782 - RNA, 19 nt, Human
guuuacaguaaauaaauug

SEQ ID NO: 3842783 - RNA, 17 nt, Human
guuuacagugaagaaag

SEQ ID NO: 3842784 - RNA, 19 nt, Human
guuuacaugcuuauuccau

SEQ ID NO: 3842785 - RNA, 13 nt, Human
guuuacaugugua

SEQ ID NO: 3842786 - RNA, 17 nt, Human
guuuacauuuaaagcau

SEQ ID NO: 3842787 - RNA, 15 nt, Human
guuuacauuuuaugg

SEQ ID NO: 3842788 - RNA, 12 nt, Human
guuuacauuuuu

SEQ ID NO: 3842789 - RNA, 20 nt, Human
guuuacauuuuuauuuauga

SEQ ID NO: 3842790 - RNA, 15 nt, Human
guuuaccagaaagca

SEQ ID NO: 3842791 - RNA, 15 nt, Human
guuuaccaguugccu

SEQ ID NO: 3842792 - RNA, 18 nt, Human
guuuaccaguugccuuuu

SEQ ID NO: 3842793 - RNA, 16 nt, Human
guuuaccauuuuucau

SEQ ID NO: 3842794 - RNA, 16 nt, Human
guuuacccgguuucuu

SEQ ID NO: 3842795 - RNA, 20 nt, Human
guuuacuaugccugugucuu

SEQ ID NO: 3842796 - RNA, 22 nt, Human
guuuacuuaaagauuuaucaaa

SEQ ID NO: 3842797 - RNA, 16 nt, Human
guuuacuuguuucaga

SEQ ID NO: 3842798 - RNA, 15 nt, Human
guuuacuuucaaauc

SEQ ID NO: 3842799 - RNA, 16 nt, Human
guuuagaacacacaca

SEQ ID NO: 3842800 - RNA, 14 nt, Human
guuuagaagcugag

SEQ ID NO: 3842801 - RNA, 15 nt, Human
guuuagaagcugaga

SEQ ID NO: 3842802 - RNA, 16 nt, Human
guuuagaauugaaggu

SEQ ID NO: 3842803 - RNA, 15 nt, Human
guuuagaccaaggaa

SEQ ID NO: 3842804 - RNA, 20 nt, Human
guuuagauuuaugguuguua

SEQ ID NO: 3842805 - RNA, 12 nt, Human
guuuagccugga

SEQ ID NO: 3842806 - RNA, 13 nt, Human
guuuagcucugag

SEQ ID NO: 3842807 - RNA, 14 nt, Human
guuuagcugacaaa

SEQ ID NO: 3842808 - RNA, 20 nt, Human
guuuagcuggaaaaguaugu

SEQ ID NO: 3842809 - RNA, 21 nt, Human
guuuagcuggaaaaguauguu

SEQ ID NO: 3842810 - RNA, 19 nt, Human
guuuaggaacuacugagga

SEQ ID NO: 3842811 - RNA, 14 nt, Human
guuuaggcuauuug

SEQ ID NO: 3842812 - RNA, 23 nt, Human
guuuaggcuauuuguaaaucugc

SEQ ID NO: 3842813 - RNA, 21 nt, Human
guuuaggcugguggcccagga

SEQ ID NO: 3842814 - RNA, 15 nt, Human
guuuaggugaauuaa

SEQ ID NO: 3842815 - RNA, 19 nt, Human
guuuauaaaauauaaacaa

SEQ ID NO: 3842816 - RNA, 14 nt, Human
guuuauaaacagaa

SEQ ID NO: 3842817 - RNA, 13 nt, Human
guuuauaaaucuu

SEQ ID NO: 3842818 - RNA, 17 nt, Human
guuuauaacuauucagu

SEQ ID NO: 3842819 - RNA, 19 nt, Human
guuuauaacuauucaguug

SEQ ID NO: 3842820 - RNA, 13 nt, Human
guuuauaauaaaa

SEQ ID NO: 3842821 - RNA, 15 nt, Human
guuuauacacugugu

SEQ ID NO: 3842822 - RNA, 15 nt, Human
guuuauacaguacag

SEQ ID NO: 3842823 - RNA, 15 nt, Human
guuuauaccuuugcc

SEQ ID NO: 3842824 - RNA, 19 nt, Human
guuuauaucuccuuuguau

SEQ ID NO: 3842825 - RNA, 21 nt, Human
guuuauauggaagaaaguaag

SEQ ID NO: 3842826 - RNA, 15 nt, Human
guuuaucagauacau

SEQ ID NO: 3842827 - RNA, 18 nt, Human
guuuaucagauacaucac

SEQ ID NO: 3842828 - RNA, 21 nt, Human
guuuaucagauacaucacugc

SEQ ID NO: 3842829 - RNA, 14 nt, Human
guuuaucauucaag

SEQ ID NO: 3842830 - RNA, 16 nt, Human
guuuaucauucaagug

SEQ ID NO: 3842831 - RNA, 17 nt, Human
guuuaucccuuaagaau

SEQ ID NO: 3842832 - RNA, 22 nt, Human
guuuaucgcccuggcaggcagg

SEQ ID NO: 3842833 - RNA, 17 nt, Human
guuuaucuagauguaaa

SEQ ID NO: 3842834 - RNA, 18 nt, Human
guuuaugagaugcugguu

SEQ ID NO: 3842835 - RNA, 14 nt, Human
guuuaugauuccac

SEQ ID NO: 3842836 - RNA, 23 nt, Human
guuuauggccacauuuaauaucu

SEQ ID NO: 3842837 - RNA, 20 nt, Human
guuuauguaaacaaaucuuu

SEQ ID NO: 3842838 - RNA, 15 nt, Human
guuuauguaauuuca

SEQ ID NO: 3842839 - RNA, 19 nt, Human
guuuaugucccuucacaua

SEQ ID NO: 3842840 - RNA, 15 nt, Human
guuuaugucuaaaga

SEQ ID NO: 3842841 - RNA, 22 nt, Human
guuuauguuccauuaaacgauu

SEQ ID NO: 3842842 - RNA, 23 nt, Human
guuuauguuuugguccacuuuuc

SEQ ID NO: 3842843 - RNA, 15 nt, Human
gaucagccugggcaa

SEQ ID NO: 3842844 - RNA, 16 nt, Human
gaucagcguggccuug

SEQ ID NO: 3842845 - RNA, 17 nt, Human
gaucagcguggccuugu

SEQ ID NO: 3842846 - RNA, 23 nt, Human
gaucagcuuauugucuagugaaa

SEQ ID NO: 3842847 - RNA, 17 nt, Human
gaucaggaagagaagga

SEQ ID NO: 3842848 - RNA, 15 nt, Human
gaucaggcacagguc

SEQ ID NO: 3842849 - RNA, 15 nt, Human
gaucaggcucccagg

SEQ ID NO: 3842850 - RNA, 14 nt, Human
gaucagguggggag

SEQ ID NO: 3842851 - RNA, 23 nt, Human
gaucaguccuuugaucaguauaa

SEQ ID NO: 3842852 - RNA, 22 nt, Human
gaucagucugauucccaagcuc

SEQ ID NO: 3842853 - RNA, 21 nt, Human
gaucaguuaagaaauuucaca

SEQ ID NO: 3842854 - RNA, 19 nt, Human
gaucauaagugaauuuaua

SEQ ID NO: 3842855 - RNA, 16 nt, Human
gaucauagauuucuga

SEQ ID NO: 3842856 - RNA, 20 nt, Human
guuuuucuauuaaaagacuc

SEQ ID NO: 3842857 - RNA, 18 nt, Human
guuuuucugugugucagu

SEQ ID NO: 3842858 - RNA, 17 nt, Human
guuuuugaaacagaacc

SEQ ID NO: 3842859 - RNA, 14 nt, Human
guuuuugagauauu

SEQ ID NO: 3842860 - RNA, 16 nt, Human
guuuuugagauauuaa

SEQ ID NO: 3842861 - RNA, 19 nt, Human
guuuuugauagcauuguaa

SEQ ID NO: 3842862 - RNA, 16 nt, Human
guuuuuguaaagugug

SEQ ID NO: 3842863 - RNA, 14 nt, Human
guuuuuguaaauua

SEQ ID NO: 3842864 - RNA, 23 nt, Human
guuuuuguucuuaauugcacucu

SEQ ID NO: 3842865 - RNA, 17 nt, Human
guuuuuguuuuguugca

SEQ ID NO: 3842866 - RNA, 19 nt, Human
guuuuuuaagauaguguaa

SEQ ID NO: 3842867 - RNA, 16 nt, Human
guuuuuuagaucaaau

SEQ ID NO: 3842868 - RNA, 16 nt, Human
guuuuuuaguugaauu

SEQ ID NO: 3842869 - RNA, 22 nt, Human
guuuuuucaucuucaguugucu

SEQ ID NO: 3842870 - RNA, 20 nt, Human
guuuuuuccucagugcauuu

SEQ ID NO: 3842871 - RNA, 16 nt, Human
guuuuuuccuuugcuc

SEQ ID NO: 3842872 - RNA, 21 nt, Human
guuuuuucuuccuuuucacug

SEQ ID NO: 3842873 - RNA, 9 nt, Human
guuuuuuga

SEQ ID NO: 3842874 - RNA, 17 nt, Human
guuuuuugaaguguugg

SEQ ID NO: 3842875 - RNA, 14 nt, Human
guuuuuuguaccaa

SEQ ID NO: 3842876 - RNA, 18 nt, Human
guuuuuuguucuugcgau

SEQ ID NO: 3842877 - RNA, 16 nt, Human
guuuuuuuccuguuuc

SEQ ID NO: 3842878 - RNA, 14 nt, Human
guuuuuuucuaaua

SEQ ID NO: 3842879 - RNA, 12 nt, Human
guuuuuuucuau

SEQ ID NO: 3842880 - RNA, 19 nt, Human
guuuuuuuguauaguaaag

SEQ ID NO: 3842881 - RNA, 15 nt, Human
guuuuuuuuuaaaga

SEQ ID NO: 3842882 - RNA, 23 nt, Human
guuuuuuuuuauacacuguaaug

SEQ ID NO: 3842883 - RNA, 19 nt, Human
guuuuuuuuuccuguccuu

SEQ ID NO: 3842884 - RNA, 17 nt, Human
guuuuuuuuuucuuguc

SEQ ID NO: 3842885 - RNA, 21 nt, Human
guuuuuuuuuucuugucuaua

SEQ ID NO: 3842886 - RNA, 16 nt, Human
guuuuuuuuuuuaaaa

SEQ ID NO: 3842887 - RNA, 20 nt, Human
guuuuuuuuuuuuuuaugug

SEQ ID NO: 3842888 - RNA, 21 nt, Human
guuacagaaaguggugcucag

SEQ ID NO: 3842889 - RNA, 13 nt, Human
guuacagacaaag

SEQ ID NO: 3842890 - RNA, 17 nt, Human
guuacagagaccuaugu

SEQ ID NO: 3842891 - RNA, 18 nt, Human
guuacagccuguuaguaa

SEQ ID NO: 3842892 - RNA, 21 nt, Human
guuacagccuguuaguaacau

SEQ ID NO: 3842893 - RNA, 21 nt, Human
guuacagcgagaggcagagaa

SEQ ID NO: 3842894 - RNA, 22 nt, Human
guuacaggcaccgagaauguug

SEQ ID NO: 3842895 - RNA, 16 nt, Human
guuacaguaaugucau

SEQ ID NO: 3842896 - RNA, 18 nt, Human
guuacauaagauaaaugu

SEQ ID NO: 3842897 - RNA, 17 nt, Human
guuacaucacaguguuu

SEQ ID NO: 3842898 - RNA, 13 nt, Human
guuacauuaaugu

SEQ ID NO: 3842899 - RNA, 23 nt, Human
guuacauugcuggucuuguaaga

SEQ ID NO: 3842900 - RNA, 13 nt, Human
guuaccauucaca

SEQ ID NO: 3842901 - RNA, 20 nt, Human
guuaccauuggaaauuucac

SEQ ID NO: 3842902 - RNA, 16 nt, Human
guuacccaaauuaaga

SEQ ID NO: 3842903 - RNA, 20 nt, Human
guuacccaggguggagugca

SEQ ID NO: 3842904 - RNA, 17 nt, Human
guuacccuccuguaaau

SEQ ID NO: 3842905 - RNA, 16 nt, Human
guuaccgccugucucu

SEQ ID NO: 3842906 - RNA, 20 nt, Human
guuaccuaaaguauuuuuau

SEQ ID NO: 3842907 - RNA, 15 nt, Human
guuaccuccuauaaa

SEQ ID NO: 3842908 - RNA, 21 nt, Human
guuaccucuauauaccaaagc

SEQ ID NO: 3842909 - RNA, 13 nt, Human
guuaccuguagau

SEQ ID NO: 3842910 - RNA, 23 nt, Human
guuaccuuucuaggucaaggccu

SEQ ID NO: 3842911 - RNA, 23 nt, Human
guuacgcacacguacuuaaauga

SEQ ID NO: 3842912 - RNA, 18 nt, Human
guuacguagccuaaggcu

SEQ ID NO: 3842913 - RNA, 13 nt, Human
guuacucagcccu

SEQ ID NO: 3842914 - RNA, 14 nt, Human
guuacucagggcuc

SEQ ID NO: 3842915 - RNA, 18 nt, Human
guuacucuccaaccugga

SEQ ID NO: 3842916 - RNA, 22 nt, Human
guuacucuccaaccuggacaac

SEQ ID NO: 3842917 - RNA, 11 nt, Human
guuacucucuu

SEQ ID NO: 3842918 - RNA, 15 nt, Human
guuacucucuugcac

SEQ ID NO: 3842919 - RNA, 21 nt, Human
guuacucucuugcaccaaauu

SEQ ID NO: 3842920 - RNA, 14 nt, Human
guuacucugguucu

SEQ ID NO: 3842921 - RNA, 18 nt, Human
guuacugaucaugcauug

SEQ ID NO: 3842922 - RNA, 22 nt, Human
guuacuggauuuguuguucuuu

SEQ ID NO: 3842923 - RNA, 9 nt, Human
guuacuguu

SEQ ID NO: 3842924 - RNA, 13 nt, Human
guuacuguucuug

SEQ ID NO: 3842925 - RNA, 14 nt, Human
guuacuguucuugc

SEQ ID NO: 3842926 - RNA, 15 nt, Human
guuacuguucuugcu

SEQ ID NO: 3842927 - RNA, 16 nt, Human
guuacuguucuugcug

SEQ ID NO: 3842928 - RNA, 22 nt, Human
guuacuguucuugcugcuagaa

SEQ ID NO: 3842929 - RNA, 23 nt, Human
guuacuucacuuuaauucucaug

SEQ ID NO: 3842930 - RNA, 14 nt, Human
guuacuucucuaau

SEQ ID NO: 3842931 - RNA, 14 nt, Human
guuacuucugaggu

SEQ ID NO: 3842932 - RNA, 16 nt, Human
guuacuugaaauacca

SEQ ID NO: 3842933 - RNA, 19 nt, Human
guuacuugaaauaccagug

SEQ ID NO: 3842934 - RNA, 20 nt, Human
guuacuuuccaauucuccuu

SEQ ID NO: 3842935 - RNA, 18 nt, Human
guuacuuucuuaauguga

SEQ ID NO: 3842936 - RNA, 17 nt, Human
guuacuuuuccuugcau

SEQ ID NO: 3842937 - RNA, 14 nt, Human
guuagaaugaggag

SEQ ID NO: 3842938 - RNA, 15 nt, Human
guuagaaugaggagg

SEQ ID NO: 3842939 - RNA, 15 nt, Human
guuagaauguaaggu

SEQ ID NO: 3842940 - RNA, 22 nt, Human
guuagaccgcucucuuuucugu

SEQ ID NO: 3842941 - RNA, 22 nt, Human
guuagacugacuuguuugucuu

SEQ ID NO: 3842942 - RNA, 20 nt, Human
guuagagaacuaaacuaguu

SEQ ID NO: 3842943 - RNA, 15 nt, Human
guuagagaauaaauu

SEQ ID NO: 3842944 - RNA, 20 nt, Human
guuagagacuuuuuucuagu

SEQ ID NO: 3842945 - RNA, 22 nt, Human
guuagagagggaccauguguca

SEQ ID NO: 3842946 - RNA, 17 nt, Human
guuagaggaaaaauauu

SEQ ID NO: 3842947 - RNA, 14 nt, Human
guuagagggaacag

SEQ ID NO: 3842948 - RNA, 22 nt, Human
guuagaguccaacguggggcag

SEQ ID NO: 3842949 - RNA, 21 nt, Human
guuagauuuuguauucagggg

SEQ ID NO: 3842950 - RNA, 15 nt, Human
guuagcaaacuuugu

SEQ ID NO: 3842951 - RNA, 11 nt, Human
guuagcugagc

SEQ ID NO: 3842952 - RNA, 21 nt, Human
guuaggaaauaaaaccuuuca

SEQ ID NO: 3842953 - RNA, 23 nt, Human
guuaggaaauaaaaccuuucaaa

SEQ ID NO: 3842954 - RNA, 15 nt, Human
guuaggaaugagaag

SEQ ID NO: 3842955 - RNA, 20 nt, Human
guuaggagugggugacaaga

SEQ ID NO: 3842956 - RNA, 18 nt, Human
guuaggcauuaauguuuc

SEQ ID NO: 3842957 - RNA, 20 nt, Human
guuaggcauugugggaaggg

SEQ ID NO: 3842958 - RNA, 16 nt, Human
guuaggcugggcccag

SEQ ID NO: 3842959 - RNA, 15 nt, Human
guuagggaaaacauu

SEQ ID NO: 3842960 - RNA, 14 nt, Human
guuagggaagagaa

SEQ ID NO: 3842961 - RNA, 11 nt, Human
guuagggaggg

SEQ ID NO: 3842962 - RNA, 13 nt, Human
guuagggaggggu

SEQ ID NO: 3842963 - RNA, 22 nt, Human
guuaggggccuuagggcacugg

SEQ ID NO: 3842964 - RNA, 13 nt, Human
guuaguaaucugu

SEQ ID NO: 3842965 - RNA, 17 nt, Human
guuaguaaucuguauaa

SEQ ID NO: 3842966 - RNA, 16 nt, Human
guuaguagcauguuga

SEQ ID NO: 3842967 - RNA, 17 nt, Human
guuaguaucuaacaugu

SEQ ID NO: 3842968 - RNA, 22 nt, Human
guuagucauuugcugagcaugu

SEQ ID NO: 3842969 - RNA, 22 nt, Human
guuagucgugagcucuugugag

SEQ ID NO: 3842970 - RNA, 16 nt, Human
guuagucuacucuuaa

SEQ ID NO: 3842971 - RNA, 17 nt, Human
guuaguuaccuuauagu

SEQ ID NO: 3842972 - RNA, 13 nt, Human
guuaguucccaac

SEQ ID NO: 3842973 - RNA, 22 nt, Human
guuaguuucuccaagcaggaca

SEQ ID NO: 3842974 - RNA, 17 nt, Human
guuaguuuguauauauu

SEQ ID NO: 3842975 - RNA, 14 nt, Human
guuaguuuuuacuu

SEQ ID NO: 3842976 - RNA, 15 nt, Human
guuauaaaaaauggu

SEQ ID NO: 3842977 - RNA, 16 nt, Human
guuauaaaaaaugguu

SEQ ID NO: 3842978 - RNA, 14 nt, Human
guuauaaaagugau

SEQ ID NO: 3842979 - RNA, 16 nt, Human
guuauaaaagugauug

SEQ ID NO: 3842980 - RNA, 11 nt, Human
guuauaaaauu

SEQ ID NO: 3842981 - RNA, 15 nt, Human
guuauaaagauacag

SEQ ID NO: 3842982 - RNA, 14 nt, Human
guuauaacuuaaug

SEQ ID NO: 3842983 - RNA, 17 nt, Human
guuauaaugaaugacuu

SEQ ID NO: 3842984 - RNA, 12 nt, Human
guuauaauuuuu

SEQ ID NO: 3842985 - RNA, 23 nt, Human
guuauaauuuuuuuuaaaauaga

SEQ ID NO: 3842986 - RNA, 20 nt, Human
guuauacaaccuucauuuaa

SEQ ID NO: 3842987 - RNA, 17 nt, Human
guuauacaguuauaaaa

SEQ ID NO: 3842988 - RNA, 18 nt, Human
guuauacaugacacugaa

SEQ ID NO: 3842989 - RNA, 20 nt, Human
guuauacaugacacugaaau

SEQ ID NO: 3842990 - RNA, 19 nt, Human
guuauacugucgguuuuuu

SEQ ID NO: 3842991 - RNA, 16 nt, Human
guuauagugcaauaua

SEQ ID NO: 3842992 - RNA, 13 nt, Human
guuauauaaagag

SEQ ID NO: 3842993 - RNA, 14 nt, Human
guuauauaaagaga

SEQ ID NO: 3842994 - RNA, 22 nt, Human
guuauauaaagagaaaauugaa

SEQ ID NO: 3842995 - RNA, 23 nt, Human
guuauauaaagagaaaauugaau

SEQ ID NO: 3842996 - RNA, 13 nt, Human
guuauauaaaugg

SEQ ID NO: 3842997 - RNA, 22 nt, Human
guuauauauggggaugguaguu

SEQ ID NO: 3842998 - RNA, 16 nt, Human
guuauaucauauguau

SEQ ID NO: 3842999 - RNA, 14 nt, Human
guuauaugaauaua

SEQ ID NO: 3843000 - RNA, 19 nt, Human
guuauauugaaaaaauaga

SEQ ID NO: 3843001 - RNA, 20 nt, Human
guuccuguucaguaauaaaa

SEQ ID NO: 3843002 - RNA, 15 nt, Human
guuccuucugggcau

SEQ ID NO: 3843003 - RNA, 18 nt, Human
guuccuuggccaugcaga

SEQ ID NO: 3843004 - RNA, 13 nt, Human
guuccuuucuuuu

SEQ ID NO: 3843005 - RNA, 14 nt, Human
guuccuuuuuauga

SEQ ID NO: 3843006 - RNA, 16 nt, Human
guucgagaccagccug

SEQ ID NO: 3843007 - RNA, 17 nt, Human
guucgagaccagccugg

SEQ ID NO: 3843008 - RNA, 19 nt, Human
guucgagaccagccuggcc

SEQ ID NO: 3843009 - RNA, 16 nt, Human
guucgagaccagucug

SEQ ID NO: 3843010 - RNA, 19 nt, Human
guucgagaccagucuggcc

SEQ ID NO: 3843011 - RNA, 13 nt, Human
guucgcagccacc

SEQ ID NO: 3843012 - RNA, 19 nt, Human
guucgcagccacccugagg

SEQ ID NO: 3843013 - RNA, 14 nt, Human
guucgcauggucac

SEQ ID NO: 3843014 - RNA, 20 nt, Human
guucgcauggucacacacug

SEQ ID NO: 3843015 - RNA, 16 nt, Human
guucgggugugcaaug

SEQ ID NO: 3843016 - RNA, 17 nt, Human
guucgguuuuuuuccug

SEQ ID NO: 3843017 - RNA, 19 nt, Human
guucgguuuuuuuccuguu

SEQ ID NO: 3843018 - RNA, 22 nt, Human
guucuaaaaucuuauuuuucaa

SEQ ID NO: 3843019 - RNA, 23 nt, Human
guucuaaagauggaaaaaccacc

SEQ ID NO: 3843020 - RNA, 16 nt, Human
guucuaaaguucuaag

SEQ ID NO: 3843021 - RNA, 18 nt, Human
guucuaaaguucuaagau

SEQ ID NO: 3843022 - RNA, 19 nt, Human
guucuaaaguucuaagauu

SEQ ID NO: 3843023 - RNA, 21 nt, Human
guucuaaaguucuaagauucu

SEQ ID NO: 3843024 - RNA, 15 nt, Human
guucuaagacucaaa

SEQ ID NO: 3843025 - RNA, 21 nt, Human
guucuaagacucaaauguucu

SEQ ID NO: 3843026 - RNA, 21 nt, Human
guucuaagaugugauauucua

SEQ ID NO: 3843027 - RNA, 15 nt, Human
guucuaagauucuaa

SEQ ID NO: 3843028 - RNA, 20 nt, Human
guucuaagauucuaaugaug

SEQ ID NO: 3843029 - RNA, 11 nt, Human
guucuaaggcc

SEQ ID NO: 3843030 - RNA, 21 nt, Human
guucuaaggccuaggauucua

SEQ ID NO: 3843031 - RNA, 11 nt, Human
guucuaaggcu

SEQ ID NO: 3843032 - RNA, 14 nt, Human
guucuaaggcucug

SEQ ID NO: 3843033 - RNA, 14 nt, Human
guucuaagggggag

SEQ ID NO: 3843034 - RNA, 22 nt, Human
guucuaaguuucuaagauucua

SEQ ID NO: 3843035 - RNA, 17 nt, Human
guucuaauaauuucuaa

SEQ ID NO: 3843036 - RNA, 18 nt, Human
guucuaauuuuggaugga

SEQ ID NO: 3843037 - RNA, 15 nt, Human
guucuacaaucuauu

SEQ ID NO: 3843038 - RNA, 16 nt, Human
guucuacacucaucuu

SEQ ID NO: 3843039 - RNA, 21 nt, Human
guucuagaaaaacaggcacuu

SEQ ID NO: 3843040 - RNA, 22 nt, Human
guucuagacauggagguucuaa

SEQ ID NO: 3843041 - RNA, 23 nt, Human
guucuagacauggagguucuaag

SEQ ID NO: 3843042 - RNA, 23 nt, Human
guucuagcacuucaucuggcugc

SEQ ID NO: 3843043 - RNA, 22 nt, Human
guucuagcauggcauauuuuuc

SEQ ID NO: 3843044 - RNA, 19 nt, Human
guucuagcauggcugccaa

SEQ ID NO: 3843045 - RNA, 22 nt, Human
guucuaggcacuguaguucuaa

SEQ ID NO: 3843046 - RNA, 16 nt, Human
guucuagguuucaaag

SEQ ID NO: 3843047 - RNA, 19 nt, Human
guucuagguuucaaagaug

SEQ ID NO: 3843048 - RNA, 14 nt, Human
guucuagucucucu

SEQ ID NO: 3843049 - RNA, 17 nt, Human
guucuaguguuuucaau

SEQ ID NO: 3843050 - RNA, 14 nt, Human
guucuaguugcuug

SEQ ID NO: 3843051 - RNA, 13 nt, Human
guucuaguuuuca

SEQ ID NO: 3843052 - RNA, 14 nt, Human
guucuaguuuucag

SEQ ID NO: 3843053 - RNA, 15 nt, Human
guucuaguuuucagu

SEQ ID NO: 3843054 - RNA, 14 nt, Human
guucuauccaaaca

SEQ ID NO: 3843055 - RNA, 16 nt, Human
guucuaugguuaugaa

SEQ ID NO: 3843056 - RNA, 20 nt, Human
guucuaugguuaugaaagaa

SEQ ID NO: 3843057 - RNA, 15 nt, Human
guucuauuuaaugga

SEQ ID NO: 3843058 - RNA, 11 nt, Human
uaaaacuaaga

SEQ ID NO: 3843059 - RNA, 16 nt, Human
uaaaacucacugugau

SEQ ID NO: 3843060 - RNA, 20 nt, Human
uaaaacugaagucugaaauu

SEQ ID NO: 3843061 - RNA, 13 nt, Human
uaaaacugaauug

SEQ ID NO: 3843062 - RNA, 14 nt, Human
uaaaacugauguga

SEQ ID NO: 3843063 - RNA, 10 nt, Human
uaaaacugcg

SEQ ID NO: 3843064 - RNA, 13 nt, Human
uaaaacugcuuuu

SEQ ID NO: 3843065 - RNA, 21 nt, Human
uaaaacugcuuuuuuuuuucc

SEQ ID NO: 3843066 - RNA, 18 nt, Human
uaaaacuggcuuuggcuu

SEQ ID NO: 3843067 - RNA, 20 nt, Human
uaaaacugggccuguagcuc

SEQ ID NO: 3843068 - RNA, 13 nt, Human
uaaaacuguacuu

SEQ ID NO: 3843069 - RNA, 14 nt, Human
uaaaacuguacuuu

SEQ ID NO: 3843070 - RNA, 15 nt, Human
uaaaacuguacuuug

SEQ ID NO: 3843071 - RNA, 17 nt, Human
uaaaacuguacuuugau

SEQ ID NO: 3843072 - RNA, 16 nt, Human
uaaaacugucacuguu

SEQ ID NO: 3843073 - RNA, 17 nt, Human
uaaaacuguuaaagucu

SEQ ID NO: 3843074 - RNA, 15 nt, Human
uaaaacuucuuaaau

SEQ ID NO: 3843075 - RNA, 19 nt, Human
uaaaacuucuuaaauaucu

SEQ ID NO: 3843076 - RNA, 20 nt, Human
uaaaacuucuuaaauaucuu

SEQ ID NO: 3843077 - RNA, 21 nt, Human
uaaaacuucuuaaauaucuuu

SEQ ID NO: 3843078 - RNA, 22 nt, Human
uaaaacuugauguguuaucucu

SEQ ID NO: 3843079 - RNA, 17 nt, Human
uaaaacuuuauuuuaua

SEQ ID NO: 3843080 - RNA, 14 nt, Human
uaaaacuuugcugc

SEQ ID NO: 3843081 - RNA, 12 nt, Human
uaaaacuuuuua

SEQ ID NO: 3843082 - RNA, 15 nt, Human
uaaaacuuuuuaaaa

SEQ ID NO: 3843083 - RNA, 13 nt, Human
uaaaacuuuuuau

SEQ ID NO: 3843084 - RNA, 23 nt, Human
uaaaagaaaaagaaaaaaaaagu

SEQ ID NO: 3843085 - RNA, 12 nt, Human
uaaaagaaaauu

SEQ ID NO: 3843086 - RNA, 17 nt, Human
uaaaagaaacccugcac

SEQ ID NO: 3843087 - RNA, 17 nt, Human
uaaaagaaacuuucuuu

SEQ ID NO: 3843088 - RNA, 14 nt, Human
uaaaagaaauaaac

SEQ ID NO: 3843089 - RNA, 15 nt, Human
uaaaagaaauuuauu

SEQ ID NO: 3843090 - RNA, 18 nt, Human
uaaaagaacaguaaacau

SEQ ID NO: 3843091 - RNA, 21 nt, Human
uaaaagaagaaauaguucugu

SEQ ID NO: 3843092 - RNA, 15 nt, Human
uaaaagacaagacuu

SEQ ID NO: 3843093 - RNA, 12 nt, Human
uaaaagacucau

SEQ ID NO: 3843094 - RNA, 13 nt, Human
uaaaagacucauc

SEQ ID NO: 3843095 - RNA, 14 nt, Human
uaaaagacucaucc

SEQ ID NO: 3843096 - RNA, 13 nt, Human
uaaaagacuuuuu

SEQ ID NO: 3843097 - RNA, 19 nt, Human
uaaaagagacaaacuguaa

SEQ ID NO: 3843098 - RNA, 19 nt, Human
uaaaagagagagagagaaa

SEQ ID NO: 3843099 - RNA, 20 nt, Human
uaaaagauacaguuacucag

SEQ ID NO: 3843100 - RNA, 13 nt, Human
uaaaagauauaag

SEQ ID NO: 3843101 - RNA, 18 nt, Human
uaaaagauauaagugcug

SEQ ID NO: 3843102 - RNA, 13 nt, Human
uaaaagaucgcag

SEQ ID NO: 3843103 - RNA, 23 nt, Human
uaaaagaucuucaaaaguaaugc

SEQ ID NO: 3843104 - RNA, 14 nt, Human
uaaaagaugaaaau

SEQ ID NO: 3843105 - RNA, 12 nt, Human
uaaaagaugcuu

SEQ ID NO: 3843106 - RNA, 22 nt, Human
uaaaagauggggucuguaaaau

SEQ ID NO: 3843107 - RNA, 13 nt, Human
uaaaagauucacc

SEQ ID NO: 3843108 - RNA, 12 nt, Human
uaaaagcaaaaa

SEQ ID NO: 3843109 - RNA, 13 nt, Human
uaaaagcaaaaua

SEQ ID NO: 3843110 - RNA, 16 nt, Human
uaaaagcaacaucagc

SEQ ID NO: 3843111 - RNA, 18 nt, Human
uaaaagcaacaucagcuu

SEQ ID NO: 3843112 - RNA, 18 nt, Human
uaaaagcagcauaaagaa

SEQ ID NO: 3843113 - RNA, 21 nt, Human
uaaaagcagcauaaagaauuu

SEQ ID NO: 3843114 - RNA, 17 nt, Human
uaaaagcaggcuucuau

SEQ ID NO: 3843115 - RNA, 18 nt, Human
uaaaagcauaaaugcaaa

SEQ ID NO: 3843116 - RNA, 15 nt, Human
uaaaagcauuuugua

SEQ ID NO: 3843117 - RNA, 13 nt, Human
uaaaagccacaua

SEQ ID NO: 3843118 - RNA, 15 nt, Human
uaaaagccacauaga

SEQ ID NO: 3843119 - RNA, 16 nt, Human
uaaaagcccaggagcc

SEQ ID NO: 3843120 - RNA, 19 nt, Human
uaaaagcccaggagcccau

SEQ ID NO: 3843121 - RNA, 12 nt, Human
uaaaagccugcu

SEQ ID NO: 3843122 - RNA, 14 nt, Human
uaaaaggaagccaa

SEQ ID NO: 3843123 - RNA, 18 nt, Human
uaaaaggaagcuuacaug

SEQ ID NO: 3843124 - RNA, 12 nt, Human
uaaaaggcccag

SEQ ID NO: 3843125 - RNA, 14 nt, Human
uaaaaggcccagag

SEQ ID NO: 3843126 - RNA, 18 nt, Human
uaaaaggcuugaagcugu

SEQ ID NO: 3843127 - RNA, 21 nt, Human
uaaaagggacugagaaauuua

SEQ ID NO: 3843128 - RNA, 19 nt, Human
uaaaagggauuacccaagc

SEQ ID NO: 3843129 - RNA, 20 nt, Human
uaaaagggcucuuuagccag

SEQ ID NO: 3843130 - RNA, 14 nt, Human
uaaaaguaaacauu

SEQ ID NO: 3843131 - RNA, 22 nt, Human
uaaaagucacaauguucuuuau

SEQ ID NO: 3843132 - RNA, 23 nt, Human
uaaaagucacaauguucuuuaua

SEQ ID NO: 3843133 - RNA, 21 nt, Human
uaaaagucauuuaacugaaga

SEQ ID NO: 3843134 - RNA, 19 nt, Human
uaaaagugaaugaaagauu

SEQ ID NO: 3843135 - RNA, 15 nt, Human
uaaaagugaucuaca

SEQ ID NO: 3843136 - RNA, 22 nt, Human
uaaaagugggcuugauucugca

SEQ ID NO: 3843137 - RNA, 14 nt, Human
uaaaagugugagca

SEQ ID NO: 3843138 - RNA, 17 nt, Human
uaaaaguuauuaauauu

SEQ ID NO: 3843139 - RNA, 21 nt, Human
uaaaaguucauaacagugcca

SEQ ID NO: 3843140 - RNA, 17 nt, Human
uaaaaguugcauuuuaa

SEQ ID NO: 3843141 - RNA, 13 nt, Human
uaaaaguuucaau

SEQ ID NO: 3843142 - RNA, 15 nt, Human
uaaaaguuucaaugu

SEQ ID NO: 3843143 - RNA, 19 nt, Human
uaaaaguuucaaugugauu

SEQ ID NO: 3843144 - RNA, 20 nt, Human
uaaaaguuugaaaagcaaua

SEQ ID NO: 3843145 - RNA, 22 nt, Human
uaaaaguuuuuuauuaugcauu

SEQ ID NO: 3843146 - RNA, 21 nt, Human
uaaaauaaaaauucugaaugu

SEQ ID NO: 3843147 - RNA, 20 nt, Human
gcaaauuucaaaagacaugu

SEQ ID NO: 3843148 - RNA, 14 nt, Human
gcaacaaaauacau

SEQ ID NO: 3843149 - RNA, 23 nt, Human
gcaacaaacugcacaugauuuca

SEQ ID NO: 3843150 - RNA, 21 nt, Human
gcaacaacaauugguaaaacu

SEQ ID NO: 3843151 - RNA, 22 nt, Human
gcaacaacaauugguaaaacuc

SEQ ID NO: 3843152 - RNA, 23 nt, Human
gcaacaauucucccgggacucug

SEQ ID NO: 3843153 - RNA, 16 nt, Human
gcaacaauuuucagau

SEQ ID NO: 3843154 - RNA, 17 nt, Human
gcaacacaagcuggaag

SEQ ID NO: 3843155 - RNA, 12 nt, Human
gcaacacacaga

SEQ ID NO: 3843156 - RNA, 14 nt, Human
gcaacacacaugcu

SEQ ID NO: 3843157 - RNA, 16 nt, Human
gcaacacagaggaauu

SEQ ID NO: 3843158 - RNA, 15 nt, Human
gcaacacagccuggg

SEQ ID NO: 3843159 - RNA, 16 nt, Human
gcaacacagccugggc

SEQ ID NO: 3843160 - RNA, 15 nt, Human
gcaacagaaaaaugg

SEQ ID NO: 3843161 - RNA, 13 nt, Human
gcaacagacaagu

SEQ ID NO: 3843162 - RNA, 15 nt, Human
gcaacagaucaguaa

SEQ ID NO: 3843163 - RNA, 17 nt, Human
gcaacagaucuggaacc

SEQ ID NO: 3843164 - RNA, 19 nt, Human
gcaacagcaaaucacgacc

SEQ ID NO: 3843165 - RNA, 21 nt, Human
gcaacaggaaucaagagcugc

SEQ ID NO: 3843166 - RNA, 13 nt, Human
gcaacagguuuua

SEQ ID NO: 3843167 - RNA, 14 nt, Human
gcaacaugaugagg

SEQ ID NO: 3843168 - RNA, 16 nt, Human
gcaacaugaugaggua

SEQ ID NO: 3843169 - RNA, 21 nt, Human
gcaacauuguucaccuuugua

SEQ ID NO: 3843170 - RNA, 23 nt, Human
gcaacauuuacaguccuucaaaa

SEQ ID NO: 3843171 - RNA, 15 nt, Human
gcaaccaaacuccca

SEQ ID NO: 3843172 - RNA, 18 nt, Human
gcaaccaccaccaaccac

SEQ ID NO: 3843173 - RNA, 14 nt, Human
gcaaccacuaagaa

SEQ ID NO: 3843174 - RNA, 16 nt, Human
gcaaccagagcacugu

SEQ ID NO: 3843175 - RNA, 17 nt, Human
gcaaccagagcacugua

SEQ ID NO: 3843176 - RNA, 17 nt, Human
gcaaccagggagcugca

SEQ ID NO: 3843177 - RNA, 23 nt, Human
gcaaccagggagcugcaggggca

SEQ ID NO: 3843178 - RNA, 16 nt, Human
gcaaccaguuggcuag

SEQ ID NO: 3843179 - RNA, 16 nt, Human
gcaacccaaggacuga

SEQ ID NO: 3843180 - RNA, 22 nt, Human
gcaaccccaguucugcuccucu

SEQ ID NO: 3843181 - RNA, 15 nt, Human
gcaacccccagccug

SEQ ID NO: 3843182 - RNA, 17 nt, Human
gcaacccccagccugcu

SEQ ID NO: 3843183 - RNA, 21 nt, Human
gcaaccccuggaccccagccu

SEQ ID NO: 3843184 - RNA, 22 nt, Human
gcaaccccuggaccccagccuc

SEQ ID NO: 3843185 - RNA, 22 nt, Human
gcaacccgugccaaguccaggu

SEQ ID NO: 3843186 - RNA, 12 nt, Human
gcaacccuccua

SEQ ID NO: 3843187 - RNA, 22 nt, Human
gcaacccuggugaccagcacca

SEQ ID NO: 3843188 - RNA, 19 nt, Human
gcaaccuaccuguugagca

SEQ ID NO: 3843189 - RNA, 12 nt, Human
gcaaccucccaa

SEQ ID NO: 3843190 - RNA, 16 nt, Human
gcaaccucuuggccug

SEQ ID NO: 3843191 - RNA, 23 nt, Human
gcaaccucuuggccugaucagac

SEQ ID NO: 3843192 - RNA, 20 nt, Human
gcaaccuucgccaccugggu

SEQ ID NO: 3843193 - RNA, 16 nt, Human
gcaacgaucacaaaug

SEQ ID NO: 3843194 - RNA, 23 nt, Human
gcaacgaucacaaaugacuuuau

SEQ ID NO: 3843195 - RNA, 22 nt, Human
gcaacgccgugggcugcguccu

SEQ ID NO: 3843196 - RNA, 22 nt, Human
gcaacuacccaaaacaagccug

SEQ ID NO: 3843197 - RNA, 23 nt, Human
gcaacuaucagacuaagccagca

SEQ ID NO: 3843198 - RNA, 13 nt, Human
gcaacugaggcag

SEQ ID NO: 3843199 - RNA, 18 nt, Human
gcaacuguuaugaaauaa

SEQ ID NO: 3843200 - RNA, 14 nt, Human
gcaacuucuucucc

SEQ ID NO: 3843201 - RNA, 18 nt, Human
gcaacuucuucuccaucc

SEQ ID NO: 3843202 - RNA, 15 nt, Human
gcaacuugaaauuau

SEQ ID NO: 3843203 - RNA, 19 nt, Human
gcaacuuguccuagcacag

SEQ ID NO: 3843204 - RNA, 22 nt, Human
gcaacuuguccuagcacagaug

SEQ ID NO: 3843205 - RNA, 19 nt, Human
gcaacuugucuuuuucugg

SEQ ID NO: 3843206 - RNA, 23 nt, Human
gcaacuuucuggggccuaauaaa

SEQ ID NO: 3843207 - RNA, 20 nt, Human
gcaacuuuuguguaaugaaa

SEQ ID NO: 3843208 - RNA, 19 nt, Human
gcaagaaaaaaaaaugcca

SEQ ID NO: 3843209 - RNA, 17 nt, Human
gcaagaaagaaacccga

SEQ ID NO: 3843210 - RNA, 16 nt, Human
gcaagaacucaucacu

SEQ ID NO: 3843211 - RNA, 21 nt, Human
gcaagaagaucacgcuccccg

SEQ ID NO: 3843212 - RNA, 14 nt, Human
gcaagaaggaauug

SEQ ID NO: 3843213 - RNA, 17 nt, Human
gcaagaauugaagcagg

SEQ ID NO: 3843214 - RNA, 14 nt, Human
gcaagacgcugugc

SEQ ID NO: 3843215 - RNA, 18 nt, Human
gcaagacuguugcucaaa

SEQ ID NO: 3843216 - RNA, 13 nt, Human
gcaagagagaacc

SEQ ID NO: 3843217 - RNA, 14 nt, Human
gcaagagagauguu

SEQ ID NO: 3843218 - RNA, 17 nt, Human
gcaagagagauguuuug

SEQ ID NO: 3843219 - RNA, 22 nt, Human
gcaagagauauuuugggcaugu

SEQ ID NO: 3843220 - RNA, 13 nt, Human
gcaagagccuugg

SEQ ID NO: 3843221 - RNA, 23 nt, Human
gcaagagccuugguguccaccug

SEQ ID NO: 3843222 - RNA, 20 nt, Human
gcaagaggggguggaggggu

SEQ ID NO: 3843223 - RNA, 23 nt, Human
gcaagaggggguggaggggugug

SEQ ID NO: 3843224 - RNA, 13 nt, Human
gcaagauauuuau

SEQ ID NO: 3843225 - RNA, 19 nt, Human
gcaagauggcacagggcau

SEQ ID NO: 3843226 - RNA, 22 nt, Human
gcaagauggcacagggcaugaa

SEQ ID NO: 3843227 - RNA, 23 nt, Human
gcaagauggggagugagaggcug

SEQ ID NO: 3843228 - RNA, 21 nt, Human
gcaagaugugaauuauugaca

SEQ ID NO: 3843229 - RNA, 21 nt, Human
gcaagcaacuugcaggcucca

SEQ ID NO: 3843230 - RNA, 22 nt, Human
gcaagcaacuugcaggcuccau

SEQ ID NO: 3843231 - RNA, 20 nt, Human
gcaagcaauccuagguaggg

SEQ ID NO: 3843232 - RNA, 17 nt, Human
gcaagcaccauccccuc

SEQ ID NO: 3843233 - RNA, 15 nt, Human
gcaagcaccuccugc

SEQ ID NO: 3843234 - RNA, 16 nt, Human
gcaagcaccuccugcc

SEQ ID NO: 3843235 - RNA, 13 nt, Human
gcaagcagaggac

SEQ ID NO: 3843236 - RNA, 16 nt, Human
gcaagcagaggaccag

SEQ ID NO: 3843237 - RNA, 22 nt, Human
gcaagcaguuucaauaaaguuu

SEQ ID NO: 3843238 - RNA, 11 nt, Human
gcaagcaugcu

SEQ ID NO: 3843239 - RNA, 20 nt, Human
gcaagccaggcucacucaca

SEQ ID NO: 3843240 - RNA, 16 nt, Human
gcaagccccucuuucu

SEQ ID NO: 3843241 - RNA, 15 nt, Human
gcaagcccuguugac

SEQ ID NO: 3843242 - RNA, 23 nt, Human
gcaagcccuguugacacaggucu

SEQ ID NO: 3843243 - RNA, 24 nt, Human
gcaagccugcguucuugugacaga

SEQ ID NO: 3843244 - RNA, 19 nt, Human
gcaagcuagaaccuggagg

SEQ ID NO: 3843245 - RNA, 17 nt, Human
gcaagcugaaauuuuag

SEQ ID NO: 3843246 - RNA, 17 nt, Human
gcaagcugauuaaauga

SEQ ID NO: 3843247 - RNA, 19 nt, Human
gcaagcugauuaaaugaca

SEQ ID NO: 3843248 - RNA, 12 nt, Human
gcaagcuggccu

SEQ ID NO: 3843249 - RNA, 14 nt, Human
gcaagcuggccucu

SEQ ID NO: 3843250 - RNA, 17 nt, Human
gcaagcuggcggcuggg

SEQ ID NO: 3843251 - RNA, 23 nt, Human
gcaagcuuaauggcugauaauuu

SEQ ID NO: 3843252 - RNA, 21 nt, Human
gcaagcuuggcuguagaagga

SEQ ID NO: 3843253 - RNA, 9 nt, Human
gcaaggaaa

SEQ ID NO: 3843254 - RNA, 16 nt, Human
gcaaggaaaaacaggu

SEQ ID NO: 3843255 - RNA, 19 nt, Human
gcaaggaaaaagaaaauaa

SEQ ID NO: 3843256 - RNA, 20 nt, Human
gcaaggaagguaaaaaguua

SEQ ID NO: 3843257 - RNA, 21 nt, Human
gcaaggacacagaugaaacac

SEQ ID NO: 3843258 - RNA, 21 nt, Human
gcaaggaccaggacucccucc

SEQ ID NO: 3843259 - RNA, 19 nt, Human
gcaaggaggcuggcugggg

SEQ ID NO: 3843260 - RNA, 14 nt, Human
gcaaggcaccugca

SEQ ID NO: 3843261 - RNA, 15 nt, Human
gcaaggcagccgugg

SEQ ID NO: 3843262 - RNA, 19 nt, Human
gcaaggcaggugccuccag

SEQ ID NO: 3843263 - RNA, 20 nt, Human
gcaaggcaggugccuccagg

SEQ ID NO: 3843264 - RNA, 14 nt, Human
gcaaggcccacagg

SEQ ID NO: 3843265 - RNA, 18 nt, Human
uaaaguuucaaaaaucug

SEQ ID NO: 3843266 - RNA, 24 nt, Human
uaaaguuucaaaaaucugaagauu

SEQ ID NO: 3843267 - RNA, 17 nt, Human
uaaaguuugcuuagaaa

SEQ ID NO: 3843268 - RNA, 20 nt, Human
uaaauaaaaaauaauaauac

SEQ ID NO: 3843269 - RNA, 16 nt, Human
uaaauaaaaagaaagg

SEQ ID NO: 3843270 - RNA, 17 nt, Human
uaaauaaaaagaaaggc

SEQ ID NO: 3843271 - RNA, 14 nt, Human
uaaauaaaacccuu

SEQ ID NO: 3843272 - RNA, 20 nt, Human
uaaauaaaagaaaugcacaa

SEQ ID NO: 3843273 - RNA, 19 nt, Human
uaaauaaaagcagcaucug

SEQ ID NO: 3843274 - RNA, 20 nt, Human
uaaauaaaagcagcaucugc

SEQ ID NO: 3843275 - RNA, 19 nt, Human
uaaauaaaagugaucaaua

SEQ ID NO: 3843276 - RNA, 11 nt, Human
uaaauaaaaua

SEQ ID NO: 3843277 - RNA, 12 nt, Human
uaaauaaaauaa

SEQ ID NO: 3843278 - RNA, 14 nt, Human
uaaauaaaauaacc

SEQ ID NO: 3843279 - RNA, 14 nt, Human
uaaauaaaaucaau

SEQ ID NO: 3843280 - RNA, 15 nt, Human
uaaauaaaaugacca

SEQ ID NO: 3843281 - RNA, 22 nt, Human
uaaauaaaaugcacaaaacuuu

SEQ ID NO: 3843282 - RNA, 21 nt, Human
uaaauaaaaugcuagguucua

SEQ ID NO: 3843283 - RNA, 22 nt, Human
uaaauaaaaugcuagguucuac

SEQ ID NO: 3843284 - RNA, 13 nt, Human
uaaauaaaauuug

SEQ ID NO: 3843285 - RNA, 18 nt, Human
uaaauaaacacauagauu

SEQ ID NO: 3843286 - RNA, 15 nt, Human
uaaauaaaccacugu

SEQ ID NO: 3843287 - RNA, 13 nt, Human
uaaauaaacccuu

SEQ ID NO: 3843288 - RNA, 20 nt, Human
uaaauaaacuguugcucguu

SEQ ID NO: 3843289 - RNA, 14 nt, Human
uaaauaaacuuuuu

SEQ ID NO: 3843290 - RNA, 15 nt, Human
uaaauaaacuuuuuu

SEQ ID NO: 3843291 - RNA, 22 nt, Human
gcaaggucuggccucagguggg

SEQ ID NO: 3843292 - RNA, 14 nt, Human
gcaaggugcucaca

SEQ ID NO: 3843293 - RNA, 18 nt, Human
gcaagguggaguggaugc

SEQ ID NO: 3843294 - RNA, 13 nt, Human
gcaagguuccaca

SEQ ID NO: 3843295 - RNA, 16 nt, Human
gcaagguuccacagag

SEQ ID NO: 3843296 - RNA, 17 nt, Human
gcaagguuccacagagu

SEQ ID NO: 3843297 - RNA, 23 nt, Human
gcaagguuccacagaguaagaca

SEQ ID NO: 3843298 - RNA, 22 nt, Human
gcaagguuuaggcugguggccc

SEQ ID NO: 3843299 - RNA, 14 nt, Human
gcaaguagauaaau

SEQ ID NO: 3843300 - RNA, 20 nt, Human
gcaaguauuagaauaccaca

SEQ ID NO: 3843301 - RNA, 18 nt, Human
gcaagucagaauagaaau

SEQ ID NO: 3843302 - RNA, 14 nt, Human
gcaagucauguaaa

SEQ ID NO: 3843303 - RNA, 15 nt, Human
gcaaguccuuuugua

SEQ ID NO: 3843304 - RNA, 11 nt, Human
gcaagucucuu

SEQ ID NO: 3843305 - RNA, 18 nt, Human
gcaagucugagggucugg

SEQ ID NO: 3843306 - RNA, 17 nt, Human
gcaagucuggaucuggg

SEQ ID NO: 3843307 - RNA, 22 nt, Human
gcaagugagcaaaccugcccca

SEQ ID NO: 3843308 - RNA, 20 nt, Human
gcaagugauugggacagagg

SEQ ID NO: 3843309 - RNA, 17 nt, Human
gcaagugucugugugca

SEQ ID NO: 3843310 - RNA, 13 nt, Human
gcaagugugaaua

SEQ ID NO: 3843311 - RNA, 16 nt, Human
gcaagugugaauacug

SEQ ID NO: 3843312 - RNA, 19 nt, Human
gcaagugugaauacugcuu

SEQ ID NO: 3843313 - RNA, 16 nt, Human
gcaaguucaauuuguu

SEQ ID NO: 3843314 - RNA, 19 nt, Human
gcaaguuuuccauauuuuu

SEQ ID NO: 3843315 - RNA, 19 nt, Human
gcaaguuuucccugaaguu

SEQ ID NO: 3843316 - RNA, 17 nt, Human
gcaauaaaagcccagga

SEQ ID NO: 3843317 - RNA, 18 nt, Human
gcaauaaaagcccaggag

SEQ ID NO: 3843318 - RNA, 16 nt, Human
gcaauaaaauuauuug

SEQ ID NO: 3843319 - RNA, 18 nt, Human
gcaauaaaauuauuugca

SEQ ID NO: 3843320 - RNA, 19 nt, Human
gcaauaaacgcauuaucag

SEQ ID NO: 3843321 - RNA, 16 nt, Human
gcaauaaaucugaccc

SEQ ID NO: 3843322 - RNA, 12 nt, Human
gcaauaaaugaa

SEQ ID NO: 3843323 - RNA, 13 nt, Human
gcaauaaauuuug

SEQ ID NO: 3843324 - RNA, 20 nt, Human
gcaauaaccucaaagugacu

SEQ ID NO: 3843325 - RNA, 15 nt, Human
gcaauaacuucugac

SEQ ID NO: 3843326 - RNA, 17 nt, Human
gcaauaacuucugaccu

SEQ ID NO: 3843327 - RNA, 14 nt, Human
gcaauaaugcagua

SEQ ID NO: 3843328 - RNA, 19 nt, Human
gcaauaaugcaguauggua

SEQ ID NO: 3843329 - RNA, 21 nt, Human
gcaauaauggucccauccagg

SEQ ID NO: 3843330 - RNA, 22 nt, Human
gcaauaauggucccauccaggc

SEQ ID NO: 3843331 - RNA, 17 nt, Human
gcaauacaaguuucauc

SEQ ID NO: 3843332 - RNA, 13 nt, Human
gcaauaccaagua

SEQ ID NO: 3843333 - RNA, 12 nt, Human
gcaauagaaaca

SEQ ID NO: 3843334 - RNA, 19 nt, Human
gcaauagaagugcuccccu

SEQ ID NO: 3843335 - RNA, 11 nt, Human
gcaauagagac

SEQ ID NO: 3843336 - RNA, 15 nt, Human
gcaauagagacugua

SEQ ID NO: 3843337 - RNA, 18 nt, Human
gcaauagucaaauugugu

SEQ ID NO: 3843338 - RNA, 22 nt, Human
gcaauagucaaauugugugaaa

SEQ ID NO: 3843339 - RNA, 20 nt, Human
gcaauaguguguucugauua

SEQ ID NO: 3843340 - RNA, 14 nt, Human
gcaauauagaaaca

SEQ ID NO: 3843341 - RNA, 23 nt, Human
gcaauauaucuaaauugaauaau

SEQ ID NO: 3843342 - RNA, 12 nt, Human
gcaauauauuuu

SEQ ID NO: 3843343 - RNA, 15 nt, Human
gcaauauauuuugua

SEQ ID NO: 3843344 - RNA, 17 nt, Human
gcaauauauuuuguaug

SEQ ID NO: 3843345 - RNA, 20 nt, Human
gcaauauauuuuguaugcaa

SEQ ID NO: 3843346 - RNA, 17 nt, Human
gcaauauucucuguaca

SEQ ID NO: 3843347 - RNA, 19 nt, Human
gcaauauucucuguacaua

SEQ ID NO: 3843348 - RNA, 22 nt, Human
gcaauauucucuguacauauua

SEQ ID NO: 3843349 - RNA, 22 nt, Human
gcaauauuuaaggagauguaag

SEQ ID NO: 3843350 - RNA, 17 nt, Human
gcaaucaaaucugcuuu

SEQ ID NO: 3843351 - RNA, 19 nt, Human
gcaaucaagguuauaauuu

SEQ ID NO: 3843352 - RNA, 14 nt, Human
gcaauccuccugag

SEQ ID NO: 3843353 - RNA, 15 nt, Human
gcaaugaaaaauucu

SEQ ID NO: 3843354 - RNA, 23 nt, Human
gcaaugaaaagucguuuuccaaa

SEQ ID NO: 3843355 - RNA, 23 nt, Human
gcaaugaaagguacuauauuugc

SEQ ID NO: 3843356 - RNA, 17 nt, Human
gcaaugaagucucugaa

SEQ ID NO: 3843357 - RNA, 20 nt, Human
gcaaugaccuuucaauagga

SEQ ID NO: 3843358 - RNA, 23 nt, Human
gcaaugaccuuucaauaggaaaa

SEQ ID NO: 3843359 - RNA, 17 nt, Human
gcaaugauguccagaag

SEQ ID NO: 3843360 - RNA, 14 nt, Human
gcaaugauuacucu

SEQ ID NO: 3843361 - RNA, 17 nt, Human
gcaaugccacagcccug

SEQ ID NO: 3843362 - RNA, 19 nt, Human
gcaaugccacagcccuguc

SEQ ID NO: 3843363 - RNA, 15 nt, Human
gcaaugccaucaucu

SEQ ID NO: 3843364 - RNA, 18 nt, Human
gcaaugccaucaucuccu

SEQ ID NO: 3843365 - RNA, 13 nt, Human
gcaaugcuggcug

SEQ ID NO: 3843366 - RNA, 14 nt, Human
gcaaugcuggcugu

SEQ ID NO: 3843367 - RNA, 13 nt, Human
gcaauguaaauau

SEQ ID NO: 3843368 - RNA, 23 nt, Human
gcaauguaaauauuuuaaagaau

SEQ ID NO: 3843369 - RNA, 15 nt, Human
gcaauguaucccuuc

SEQ ID NO: 3843370 - RNA, 22 nt, Human
gcaauguaucccuucucacagc

SEQ ID NO: 3843371 - RNA, 20 nt, Human
gcaaugucaggaacagaagg

SEQ ID NO: 3843372 - RNA, 19 nt, Human
gcaaugucugagugaaccu

SEQ ID NO: 3843373 - RNA, 17 nt, Human
gcaaugugaaaaaucug

SEQ ID NO: 3843374 - RNA, 16 nt, Human
gcaauguguguauaug

SEQ ID NO: 3843375 - RNA, 20 nt, Human
gcaauguuaauuuaguggaa

SEQ ID NO: 3843376 - RNA, 15 nt, Human
gcaauguuuugcuuu

SEQ ID NO: 3843377 - RNA, 22 nt, Human
gcaauuaaacuuccaaagaaag

SEQ ID NO: 3843378 - RNA, 14 nt, Human
gcaauuaugaaaau

SEQ ID NO: 3843379 - RNA, 14 nt, Human
gcaauucauaaaaa

SEQ ID NO: 3843380 - RNA, 11 nt, Human
gcaauuccaau

SEQ ID NO: 3843381 - RNA, 15 nt, Human
gcaauucuccugccu

SEQ ID NO: 3843382 - RNA, 19 nt, Human
gcaauucuccugccucagc

SEQ ID NO: 3843383 - RNA, 18 nt, Human
gcaauugaauuaaauuag

SEQ ID NO: 3843384 - RNA, 13 nt, Human
gcaauugccuuuu

SEQ ID NO: 3843385 - RNA, 14 nt, Human
gcaauugggauggc

SEQ ID NO: 3843386 - RNA, 22 nt, Human
gcaauugucuauuuaucuuuua

SEQ ID NO: 3843387 - RNA, 13 nt, Human
gcaauuuaaaugu

SEQ ID NO: 3843388 - RNA, 19 nt, Human
gcaauuuaacuagacacag

SEQ ID NO: 3843389 - RNA, 19 nt, Human
gcaauuuauacaauaucau

SEQ ID NO: 3843390 - RNA, 18 nt, Human
gcaauuucaagguucuaa

SEQ ID NO: 3843391 - RNA, 23 nt, Human
gcaauuuuauaaggacuuccuga

SEQ ID NO: 3843392 - RNA, 10 nt, Human
gcaauuuucc

SEQ ID NO: 3843393 - RNA, 13 nt, Human
gcaauuuuccuug

SEQ ID NO: 3843394 - RNA, 15 nt, Human
gcaauuuuccuugaa

SEQ ID NO: 3843395 - RNA, 20 nt, Human
gcacaaaaugauggcagugg

SEQ ID NO: 3843396 - RNA, 23 nt, Human
gcacaaaauucgaccugauuuac

SEQ ID NO: 3843397 - RNA, 14 nt, Human
gcacaaacagaggc

SEQ ID NO: 3843398 - RNA, 15 nt, Human
gcacaaacagaggcc

SEQ ID NO: 3843399 - RNA, 16 nt, Human
gcacaaacagaggccg

SEQ ID NO: 3843400 - RNA, 22 nt, Human
gcacaaacuuuaggguaaaaau

SEQ ID NO: 3843401 - RNA, 18 nt, Human
gcacaaagacccuggcuu

SEQ ID NO: 3843402 - RNA, 16 nt, Human
gcacaaagggcccaga

SEQ ID NO: 3843403 - RNA, 14 nt, Human
gcacaaauauuuau

SEQ ID NO: 3843404 - RNA, 16 nt, Human
gcacaaauauuuauuu

SEQ ID NO: 3843405 - RNA, 19 nt, Human
gcacaaauuaguuauauau

SEQ ID NO: 3843406 - RNA, 18 nt, Human
gcacaaccuucaagcugc

SEQ ID NO: 3843407 - RNA, 11 nt, Human
gcacaagaagc

SEQ ID NO: 3843408 - RNA, 18 nt, Human
gcacaagaaucacuugaa

SEQ ID NO: 3843409 - RNA, 12 nt, Human
gcacaagacuga

SEQ ID NO: 3843410 - RNA, 20 nt, Human
gcacaagacugacgccaggg

SEQ ID NO: 3843411 - RNA, 21 nt, Human
gcacaagcagagugcacagcu

SEQ ID NO: 3843412 - RNA, 22 nt, Human
gcacaagccacaagucuuccag

SEQ ID NO: 3843413 - RNA, 13 nt, Human
gcacaagccaggg

SEQ ID NO: 3843414 - RNA, 17 nt, Human
gcacaagccagggugug

SEQ ID NO: 3843415 - RNA, 23 nt, Human
gcacaagcuccaagcucccaggc

SEQ ID NO: 3843416 - RNA, 22 nt, Human
gcacaagcugcacccucaggca

SEQ ID NO: 3843417 - RNA, 17 nt, Human
gcacaaguguaaugaau

SEQ ID NO: 3843418 - RNA, 11 nt, Human
gcacaauaaau

SEQ ID NO: 3843419 - RNA, 19 nt, Human
gcacaauaacuccucccag

SEQ ID NO: 3843420 - RNA, 15 nt, Human
gcacaauaguaaccu

SEQ ID NO: 3843421 - RNA, 17 nt, Human
gcacaauauugaacuuu

SEQ ID NO: 3843422 - RNA, 19 nt, Human
gcacaauauugaacuuuuu

SEQ ID NO: 3843423 - RNA, 22 nt, Human
gcacaaucucggcucacugcau

SEQ ID NO: 3843424 - RNA, 16 nt, Human
gcacaauucuguuuua

SEQ ID NO: 3843425 - RNA, 14 nt, Human
gcacaauuugcacu

SEQ ID NO: 3843426 - RNA, 19 nt, Human
gcacaauuugcacuaaauc

SEQ ID NO: 3843427 - RNA, 12 nt, Human
gcacacacacac

SEQ ID NO: 3843428 - RNA, 21 nt, Human
gcacacacacacacacacauc

SEQ ID NO: 3843429 - RNA, 19 nt, Human
gcacacacacacacaggag

SEQ ID NO: 3843430 - RNA, 15 nt, Human
gcacacacacacaua

SEQ ID NO: 3843431 - RNA, 16 nt, Human
gcacacaccucagagg

SEQ ID NO: 3843432 - RNA, 15 nt, Human
guuuggggagcagag

SEQ ID NO: 3843433 - RNA, 20 nt, Human
guuuggggagcagagacacu

SEQ ID NO: 3843434 - RNA, 18 nt, Human
guuuggggaugagaaagg

SEQ ID NO: 3843435 - RNA, 18 nt, Human
guuuggggcaagucaugu

SEQ ID NO: 3843436 - RNA, 12 nt, Human
uaaggugcaguu

SEQ ID NO: 3843437 - RNA, 13 nt, Human
uaaggugccuucu

SEQ ID NO: 3843438 - RNA, 21 nt, Human
uaagguuaucuacuuuuacuc

SEQ ID NO: 3843439 - RNA, 21 nt, Human
uaagguuauuuauuuaaaugu

SEQ ID NO: 3843440 - RNA, 22 nt, Human
uaagguuucguuucuguauaca

SEQ ID NO: 3843441 - RNA, 16 nt, Human
uaaguaaaaccacagc

SEQ ID NO: 3843442 - RNA, 18 nt, Human
uaaguaaaucucuucugu

SEQ ID NO: 3843443 - RNA, 22 nt, Human
uaaguaaaucucuucuguguuu

SEQ ID NO: 3843444 - RNA, 20 nt, Human
uaaguaacuucacauuaaaa

SEQ ID NO: 3843445 - RNA, 13 nt, Human
uaaguaagaaaau

SEQ ID NO: 3843446 - RNA, 20 nt, Human
uaaguaagaaaauauuuugu

SEQ ID NO: 3843447 - RNA, 20 nt, Human
uaaguaaucaauaaagaaaa

SEQ ID NO: 3843448 - RNA, 20 nt, Human
uaaguaaugauaacuggaaa

SEQ ID NO: 3843449 - RNA, 22 nt, Human
uaaguaauguggaagaaaaugg

SEQ ID NO: 3843450 - RNA, 13 nt, Human
uaaguacagagaa

SEQ ID NO: 3843451 - RNA, 18 nt, Human
uaaguacagagaagccau

SEQ ID NO: 3843452 - RNA, 22 nt, Human
uaaguacagagaagccaucacc

SEQ ID NO: 3843453 - RNA, 19 nt, Human
uaaguacuacacauuuuua

SEQ ID NO: 3843454 - RNA, 14 nt, Human
uaaguacuguguac

SEQ ID NO: 3843455 - RNA, 16 nt, Human
uaaguacuguuuacca

SEQ ID NO: 3843456 - RNA, 15 nt, Human
uaaguagauaagcag

SEQ ID NO: 3843457 - RNA, 16 nt, Human
uaaguauaaaauacaa

SEQ ID NO: 3843458 - RNA, 14 nt, Human
uaaguauacaguuc

SEQ ID NO: 3843459 - RNA, 20 nt, Human
uaaguauacaguucaauaaa

SEQ ID NO: 3843460 - RNA, 15 nt, Human
uaaguauaucaugua

SEQ ID NO: 3843461 - RNA, 22 nt, Human
uaaguauaucauguaaagaaau

SEQ ID NO: 3843462 - RNA, 17 nt, Human
uaaguaucaaguauaga

SEQ ID NO: 3843463 - RNA, 20 nt, Human
uaaguaucaaguauagaaaa

SEQ ID NO: 3843464 - RNA, 16 nt, Human
uaaguauucaagaaag

SEQ ID NO: 3843465 - RNA, 21 nt, Human
uaaguauucuuauuuaaugaa

SEQ ID NO: 3843466 - RNA, 19 nt, Human
uaaguauugcaucuguaua

SEQ ID NO: 3843467 - RNA, 20 nt, Human
uaaguauuuagguuuuuguu

SEQ ID NO: 3843468 - RNA, 13 nt, Human
uaaguauuuauau

SEQ ID NO: 3843469 - RNA, 18 nt, Human
uaaguauuuauauauuua

SEQ ID NO: 3843470 - RNA, 23 nt, Human
uaaguauuuauauauuuauaacu

SEQ ID NO: 3843471 - RNA, 15 nt, Human
uaagucaaccugccu

SEQ ID NO: 3843472 - RNA, 17 nt, Human
uaagucaaccugccuga

SEQ ID NO: 3843473 - RNA, 16 nt, Human
uaagucaacuuagcau

SEQ ID NO: 3843474 - RNA, 23 nt, Human
uaagucagaaacuaaaacaaaua

SEQ ID NO: 3843475 - RNA, 14 nt, Human
uaagucagaacagc

SEQ ID NO: 3843476 - RNA, 19 nt, Human
uaagucaguauggucuaac

SEQ ID NO: 3843477 - RNA, 18 nt, Human
uaagucauguauguuucu

SEQ ID NO: 3843478 - RNA, 13 nt, Human
uaagucccuguca

SEQ ID NO: 3843479 - RNA, 15 nt, Human
uaaguccuacuuuua

SEQ ID NO: 3843480 - RNA, 20 nt, Human
uaaguccuacuuuuaaagaa

SEQ ID NO: 3843481 - RNA, 21 nt, Human
uaagucuaucugguauuaaau

SEQ ID NO: 3843482 - RNA, 22 nt, Human
uaagucuaucugguauuaaaug

SEQ ID NO: 3843483 - RNA, 11 nt, Human
uaagucucugu

SEQ ID NO: 3843484 - RNA, 19 nt, Human
uaagucucuuuuuuacaaa

SEQ ID NO: 3843485 - RNA, 20 nt, Human
uaagucucuuuuuuacaaag

SEQ ID NO: 3843486 - RNA, 21 nt, Human
uaagucucuuuuuuacaaagg

SEQ ID NO: 3843487 - RNA, 19 nt, Human
uaagucuguuuuaugacuu

SEQ ID NO: 3843488 - RNA, 17 nt, Human
uaagucuugccuauauu

SEQ ID NO: 3843489 - RNA, 13 nt, Human
uaagugaaauuua

SEQ ID NO: 3843490 - RNA, 14 nt, Human
uaagugaauuuaua

SEQ ID NO: 3843491 - RNA, 15 nt, Human
uaagugagagagaca

SEQ ID NO: 3843492 - RNA, 23 nt, Human
uaagugaggaugaaaaaauaaca

SEQ ID NO: 3843493 - RNA, 18 nt, Human
uaagugauuuuuuugucc

SEQ ID NO: 3843494 - RNA, 19 nt, Human
uaagugcacacagaaauau

SEQ ID NO: 3843495 - RNA, 22 nt, Human
uaagugcacacagaaauauaua

SEQ ID NO: 3843496 - RNA, 15 nt, Human
uaagugcccucuccc

SEQ ID NO: 3843497 - RNA, 21 nt, Human
uaagugcccucucccacccuc

SEQ ID NO: 3843498 - RNA, 15 nt, Human
uaagugccuacauua

SEQ ID NO: 3843499 - RNA, 21 nt, Human
uaaagccugcuuuuuaagugu

SEQ ID NO: 3843500 - RNA, 17 nt, Human
uaaagcgauauacagau

SEQ ID NO: 3843501 - RNA, 21 nt, Human
uaaagcguuugcacagaucaa

SEQ ID NO: 3843502 - RNA, 15 nt, Human
uaaagcuaaaauaac

SEQ ID NO: 3843503 - RNA, 19 nt, Human
uaaagcuacugauuuccuu

SEQ ID NO: 3843504 - RNA, 14 nt, Human
uaaagcugaaaacu

SEQ ID NO: 3843505 - RNA, 21 nt, Human
uaaagcugccuguaguuagga

SEQ ID NO: 3843506 - RNA, 22 nt, Human
uaaagcuuacucuguccauuua

SEQ ID NO: 3843507 - RNA, 19 nt, Human
uaaagcuugcaacaaaauu

SEQ ID NO: 3843508 - RNA, 17 nt, Human
uaaaggaaaagacacau

SEQ ID NO: 3843509 - RNA, 20 nt, Human
uaaaggaagcacucuguaua

SEQ ID NO: 3843510 - RNA, 14 nt, Human
uaaaggacuguaau

SEQ ID NO: 3843511 - RNA, 22 nt, Human
uaaaggagaaggcaugaaauug

SEQ ID NO: 3843512 - RNA, 17 nt, Human
uaaaggaguuuauguuc

SEQ ID NO: 3843513 - RNA, 14 nt, Human
uaaaggauaaagaa

SEQ ID NO: 3843514 - RNA, 16 nt, Human
uaaaggcaaaggcaau

SEQ ID NO: 3843515 - RNA, 15 nt, Human
uaaaggcagcuguug

SEQ ID NO: 3843516 - RNA, 14 nt, Human
uaaaggcaguuuuc

SEQ ID NO: 3843517 - RNA, 17 nt, Human
uaaaggcaguuuucuaa

SEQ ID NO: 3843518 - RNA, 16 nt, Human
uaaaggcccagccccu

SEQ ID NO: 3843519 - RNA, 21 nt, Human
uaaaggcccuaucuguuuaca

SEQ ID NO: 3843520 - RNA, 20 nt, Human
uaaaggccucugccucacaa

SEQ ID NO: 3843521 - RNA, 20 nt, Human
uaaaggccucuuccuugcug

SEQ ID NO: 3843522 - RNA, 21 nt, Human
uaaaggcuaccuuuguauucu

SEQ ID NO: 3843523 - RNA, 18 nt, Human
uaaaggcucgauuuugua

SEQ ID NO: 3843524 - RNA, 17 nt, Human
uaaagggaagaaaacac

SEQ ID NO: 3843525 - RNA, 23 nt, Human
uaaagggaagaaaacacuguuau

SEQ ID NO: 3843526 - RNA, 18 nt, Human
uaaagggcccaaugaauu

SEQ ID NO: 3843527 - RNA, 14 nt, Human
uaaagggccugccu

SEQ ID NO: 3843528 - RNA, 22 nt, Human
uaaaggggagaccucagaagua

SEQ ID NO: 3843529 - RNA, 14 nt, Human
uaaaggggggaggg

SEQ ID NO: 3843530 - RNA, 18 nt, Human
uaaaggggucugaaauuu

SEQ ID NO: 3843531 - RNA, 19 nt, Human
uaaagguccacaggucuag

SEQ ID NO: 3843532 - RNA, 21 nt, Human
uaaagguccacaggucuagac

SEQ ID NO: 3843533 - RNA, 14 nt, Human
uaaagguguauuua

SEQ ID NO: 3843534 - RNA, 22 nt, Human
uaaagguuacaagccugcacaa

SEQ ID NO: 3843535 - RNA, 20 nt, Human
uaaagguuaccgauuucaaa

SEQ ID NO: 3843536 - RNA, 21 nt, Human
uaaaguaaaaagggaauuaug

SEQ ID NO: 3843537 - RNA, 14 nt, Human
uaaaguaaagcuaa

SEQ ID NO: 3843538 - RNA, 20 nt, Human
uaaaguaauuguuccagaga

SEQ ID NO: 3843539 - RNA, 19 nt, Human
uaaaguacugagcagugau

SEQ ID NO: 3843540 - RNA, 22 nt, Human
uaaaguacugagcagugauauu

SEQ ID NO: 3843541 - RNA, 15 nt, Human
uaaaguacuugagug

SEQ ID NO: 3843542 - RNA, 21 nt, Human
uaaaguaguaaaagaagaaau

SEQ ID NO: 3843543 - RNA, 18 nt, Human
uaaaguauagagagaagu

SEQ ID NO: 3843544 - RNA, 17 nt, Human
uaaaguauauauuuauu

SEQ ID NO: 3843545 - RNA, 16 nt, Human
uaaaguaucaugcauu

SEQ ID NO: 3843546 - RNA, 17 nt, Human
uaaaguaucaugcauuc

SEQ ID NO: 3843547 - RNA, 15 nt, Human
uaaaguaugaaucua

SEQ ID NO: 3843548 - RNA, 19 nt, Human
uaaaguaugaaucuaugcc

SEQ ID NO: 3843549 - RNA, 21 nt, Human
uaaaguaugcauuauuaaauu

SEQ ID NO: 3843550 - RNA, 13 nt, Human
uaaaguauguaaa

SEQ ID NO: 3843551 - RNA, 15 nt, Human
uaaaguauguaaaca

SEQ ID NO: 3843552 - RNA, 16 nt, Human
uaaaguauguaaacag

SEQ ID NO: 3843553 - RNA, 14 nt, Human
uaaaguauucuucu

SEQ ID NO: 3843554 - RNA, 14 nt, Human
uaaaguauuuaauu

SEQ ID NO: 3843555 - RNA, 21 nt, Human
uaaaguauuuaauuagugcua

SEQ ID NO: 3843556 - RNA, 13 nt, Human
uaaagucagaugg

SEQ ID NO: 3843557 - RNA, 15 nt, Human
uaaagucagauggaa

SEQ ID NO: 3843558 - RNA, 13 nt, Human
uaaagucccaggu

SEQ ID NO: 3843559 - RNA, 16 nt, Human
uaaagucuauggacag

SEQ ID NO: 3843560 - RNA, 21 nt, Human
uaaagucuguugauuaaagau

SEQ ID NO: 3843561 - RNA, 19 nt, Human
uaaagucuugcuguggucu

SEQ ID NO: 3843562 - RNA, 16 nt, Human
uaaagugaagaauccu

SEQ ID NO: 3843563 - RNA, 14 nt, Human
uaaagugaauuguu

SEQ ID NO: 3843564 - RNA, 17 nt, Human
uaaagugacccugcucu

SEQ ID NO: 3843565 - RNA, 18 nt, Human
uaaagugagaaaacugug

SEQ ID NO: 3843566 - RNA, 20 nt, Human
uaaagugagcucuaugggca

SEQ ID NO: 3843567 - RNA, 11 nt, Human
uaaagugauua

SEQ ID NO: 3843568 - RNA, 22 nt, Human
uaaagugauuaaacgugcagac

SEQ ID NO: 3843569 - RNA, 17 nt, Human
uaaagugcuaagguucu

SEQ ID NO: 3843570 - RNA, 15 nt, Human
uaaagugcuugugua

SEQ ID NO: 3843571 - RNA, 17 nt, Human
uaaagugcuuguguaau

SEQ ID NO: 3843572 - RNA, 21 nt, Human
uaaaguggguuauucuggagu

SEQ ID NO: 3843573 - RNA, 12 nt, Human
uaaaguguaaua

SEQ ID NO: 3843574 - RNA, 18 nt, Human
uaaaguguaauaauauga

SEQ ID NO: 3843575 - RNA, 13 nt, Human
uaaaguguauuau

SEQ ID NO: 3843576 - RNA, 14 nt, Human
uaaaguguauuuuu

SEQ ID NO: 3843577 - RNA, 19 nt, Human
uaaaguguauuuuuuuacu

SEQ ID NO: 3843578 - RNA, 17 nt, Human
uaaaguguccauugaca

SEQ ID NO: 3843579 - RNA, 18 nt, Human
uaaaguguccauugacau

SEQ ID NO: 3843580 - RNA, 22 nt, Human
uaaaucaugaugcuagccagca

SEQ ID NO: 3843581 - RNA, 22 nt, Human
uaaaucauguuaauccuagcug

SEQ ID NO: 3843582 - RNA, 16 nt, Human
uaaaucauguugauca

SEQ ID NO: 3843583 - RNA, 12 nt, Human
uaaaucauuuua

SEQ ID NO: 3843584 - RNA, 15 nt, Human
uaaaucauuuuaugu

SEQ ID NO: 3843585 - RNA, 14 nt, Human
uaaauccauuugga

SEQ ID NO: 3843586 - RNA, 19 nt, Human
uaaauccauuuggaaaucu

SEQ ID NO: 3843587 - RNA, 23 nt, Human
uaaauccauuuggaaaucuuuaa

SEQ ID NO: 3843588 - RNA, 23 nt, Human
uaaaucccauuauucaaaguugc

SEQ ID NO: 3843589 - RNA, 23 nt, Human
uaaaucccauucauaacuuucau

SEQ ID NO: 3843590 - RNA, 16 nt, Human
uaaauccugaagagca

SEQ ID NO: 3843591 - RNA, 14 nt, Human
uaaauccuguugaa

SEQ ID NO: 3843592 - RNA, 15 nt, Human
uaaauccuguugaaa

SEQ ID NO: 3843593 - RNA, 17 nt, Human
uaaauccuguugaaaag

SEQ ID NO: 3843594 - RNA, 23 nt, Human
uaaauccuguugaaaagccaugu

SEQ ID NO: 3843595 - RNA, 17 nt, Human
uaaauccuuuuucuuua

SEQ ID NO: 3843596 - RNA, 13 nt, Human
uaaaucuacacac

SEQ ID NO: 3843597 - RNA, 21 nt, Human
uaaaucuaguauacauugucu

SEQ ID NO: 3843598 - RNA, 16 nt, Human
uaaaucuauuuauuaa

SEQ ID NO: 3843599 - RNA, 19 nt, Human
uaaaucuccaaaauaaaac

SEQ ID NO: 3843600 - RNA, 16 nt, Human
uaaaucuccuauuuuu

SEQ ID NO: 3843601 - RNA, 15 nt, Human
uaaaucucuaauaug

SEQ ID NO: 3843602 - RNA, 14 nt, Human
uaaaucucuucugu

SEQ ID NO: 3843603 - RNA, 21 nt, Human
uaaaucuguccaacugagaag

SEQ ID NO: 3843604 - RNA, 17 nt, Human
uaaaucugugaacuuga

SEQ ID NO: 3843605 - RNA, 21 nt, Human
uaaaucugugaacuugaaauu

SEQ ID NO: 3843606 - RNA, 20 nt, Human
uaaaucuguugccaagcugg

SEQ ID NO: 3843607 - RNA, 16 nt, Human
uaaaucuuaauguucc

SEQ ID NO: 3843608 - RNA, 17 nt, Human
uaaaucuuaauguuccu

SEQ ID NO: 3843609 - RNA, 19 nt, Human
uaaaucuuaauguuccuca

SEQ ID NO: 3843610 - RNA, 14 nt, Human
uaaaucuuuuacaa

SEQ ID NO: 3843611 - RNA, 23 nt, Human
uaaaucuuuuauaggauuuauuu

SEQ ID NO: 3843612 - RNA, 13 nt, Human
uaaaugaaaaaau

SEQ ID NO: 3843613 - RNA, 14 nt, Human
uaaaugaaagaaaa

SEQ ID NO: 3843614 - RNA, 13 nt, Human
uaaaugaacaaga

SEQ ID NO: 3843615 - RNA, 17 nt, Human
uaaaugaacaagagaag

SEQ ID NO: 3843616 - RNA, 23 nt, Human
uaaaugaagcagcuuuaaacaaa

SEQ ID NO: 3843617 - RNA, 22 nt, Human
uaaaugaaguaacuugucuuaa

SEQ ID NO: 3843618 - RNA, 23 nt, Human
uaaaugaaguuuauacaguacag

SEQ ID NO: 3843619 - RNA, 13 nt, Human
uaaaugacacuca

SEQ ID NO: 3843620 - RNA, 16 nt, Human
uaaaugacucuucccu

SEQ ID NO: 3843621 - RNA, 18 nt, Human
uaaaugagcuauguauua

SEQ ID NO: 3843622 - RNA, 17 nt, Human
uaaaugaggggccucag

SEQ ID NO: 3843623 - RNA, 14 nt, Human
uaaaugauguugaa

SEQ ID NO: 3843624 - RNA, 17 nt, Human
uaaaugauuucauucaa

SEQ ID NO: 3843625 - RNA, 21 nt, Human
uaaaugcaaaguucuguguuu

SEQ ID NO: 3843626 - RNA, 13 nt, Human
uaaaugcagccca

SEQ ID NO: 3843627 - RNA, 14 nt, Human
uaaaugcauuauag

SEQ ID NO: 3843628 - RNA, 13 nt, Human
uaaaugcccagcc

SEQ ID NO: 3843629 - RNA, 14 nt, Human
uaaaugcccagccc

SEQ ID NO: 3843630 - RNA, 16 nt, Human
uaaaugcccagccccu

SEQ ID NO: 3843631 - RNA, 14 nt, Human
uaaaugccuaguuu

SEQ ID NO: 3843632 - RNA, 17 nt, Human
uaaaugccuaguuuuua

SEQ ID NO: 3843633 - RNA, 15 nt, Human
uaaaugcuauuuuuu

SEQ ID NO: 3843634 - RNA, 17 nt, Human
uaaaugcugcuuuuucu

SEQ ID NO: 3843635 - RNA, 13 nt, Human
uaaaugcuuaugu

SEQ ID NO: 3843636 - RNA, 21 nt, Human
uaaaugcuuugugugauugaa

SEQ ID NO: 3843637 - RNA, 16 nt, Human
uaaauggaaacugaaa

SEQ ID NO: 3843638 - RNA, 16 nt, Human
uaaauggccucaugug

SEQ ID NO: 3843639 - RNA, 20 nt, Human
uaaauggcuuccuggcaaua

SEQ ID NO: 3843640 - RNA, 15 nt, Human
uaaaugggaacauuu

SEQ ID NO: 3843641 - RNA, 17 nt, Human
uaaauggggcucacaaa

SEQ ID NO: 3843642 - RNA, 20 nt, Human
uaaaugguauagcaaauguu

SEQ ID NO: 3843643 - RNA, 17 nt, Human
uaaaugguguacauaau

SEQ ID NO: 3843644 - RNA, 12 nt, Human
uaaauguaaacu

SEQ ID NO: 3843645 - RNA, 14 nt, Human
uaaauguaaacuca

SEQ ID NO: 3843646 - RNA, 15 nt, Human
uaaauguaaacucag

SEQ ID NO: 3843647 - RNA, 17 nt, Human
uaaauguaaagacaaaa

SEQ ID NO: 3843648 - RNA, 17 nt, Human
uaaauguaacagucuga

SEQ ID NO: 3843649 - RNA, 18 nt, Human
uaaauguaacagucugau

SEQ ID NO: 3843650 - RNA, 19 nt, Human
uaaauguaacagucugauc

SEQ ID NO: 3843651 - RNA, 16 nt, Human
uaaauguaagaaucau

SEQ ID NO: 3843652 - RNA, 23 nt, Human
uaaauguagcuucagucauuaaa

SEQ ID NO: 3843653 - RNA, 16 nt, Human
uaaauguagguaugaa

SEQ ID NO: 3843654 - RNA, 13 nt, Human
uaaauguauaccu

SEQ ID NO: 3843655 - RNA, 13 nt, Human
uaaauguauacua

SEQ ID NO: 3843656 - RNA, 17 nt, Human
uaaauguauacuauagu

SEQ ID NO: 3843657 - RNA, 17 nt, Human
uaaauguauauacacau

SEQ ID NO: 3843658 - RNA, 17 nt, Human
uaaaugucaaaugugaa

SEQ ID NO: 3843659 - RNA, 15 nt, Human
uaaaugucucacuga

SEQ ID NO: 3843660 - RNA, 17 nt, Human
uaaaugucucacugagc

SEQ ID NO: 3843661 - RNA, 14 nt, Human
uaaaugucuuauau

SEQ ID NO: 3843662 - RNA, 18 nt, Human
uaaaugucuuuaaugcaa

SEQ ID NO: 3843663 - RNA, 22 nt, Human
uaaaugucuuuguaagucagug

SEQ ID NO: 3843664 - RNA, 15 nt, Human
uaaaugugaauuacu

SEQ ID NO: 3843665 - RNA, 16 nt, Human
uaauagacaauuuauu

SEQ ID NO: 3843666 - RNA, 22 nt, Human
uaauagacaauuuauuauggca

SEQ ID NO: 3843667 - RNA, 22 nt, Human
uaauagauguuugauagauuuu

SEQ ID NO: 3843668 - RNA, 18 nt, Human
uaauagauugugaauaau

SEQ ID NO: 3843669 - RNA, 23 nt, Human
uaauagauuuuuucagacuuguc

SEQ ID NO: 3843670 - RNA, 14 nt, Human
uaauagcagccuuu

SEQ ID NO: 3843671 - RNA, 18 nt, Human
uaauagcuuuuauuguau

SEQ ID NO: 3843672 - RNA, 16 nt, Human
uaauagggaauauauc

SEQ ID NO: 3843673 - RNA, 20 nt, Human
uaauagggcaauuaauuccu

SEQ ID NO: 3843674 - RNA, 17 nt, Human
uaauaguguuaaucaau

SEQ ID NO: 3843675 - RNA, 21 nt, Human
uaauaguucagguaacaggca

SEQ ID NO: 3843676 - RNA, 17 nt, Human
uaauaguuugucuauuu

SEQ ID NO: 3843677 - RNA, 19 nt, Human
uaauaguuugucuauuuua

SEQ ID NO: 3843678 - RNA, 20 nt, Human
uaauaguuugucuauuuuaa

SEQ ID NO: 3843679 - RNA, 16 nt, Human
uaauauaaaagaucuu

SEQ ID NO: 3843680 - RNA, 14 nt, Human
uaauauaaaguugg

SEQ ID NO: 3843681 - RNA, 15 nt, Human
uaauauaaaguuuua

SEQ ID NO: 3843682 - RNA, 22 nt, Human
uaauauaaaguuuuauauauua

SEQ ID NO: 3843683 - RNA, 12 nt, Human
uaauauaaaugc

SEQ ID NO: 3843684 - RNA, 14 nt, Human
uaauauaaauucac

SEQ ID NO: 3843685 - RNA, 21 nt, Human
uaauauaaauucacuuucauu

SEQ ID NO: 3843686 - RNA, 22 nt, Human
uaauauaacugccuuaaaacuu

SEQ ID NO: 3843687 - RNA, 22 nt, Human
uaauauaaguuucuuugcuuca

SEQ ID NO: 3843688 - RNA, 19 nt, Human
uaauauaauggaagagaaa

SEQ ID NO: 3843689 - RNA, 20 nt, Human
uaauauaauggaagagaaau

SEQ ID NO: 3843690 - RNA, 16 nt, Human
uaauauagcugagacu

SEQ ID NO: 3843691 - RNA, 19 nt, Human
uaauauauauauauaucag

SEQ ID NO: 3843692 - RNA, 22 nt, Human
uaauauauauauauaucaguuu

SEQ ID NO: 3843693 - RNA, 16 nt, Human
uaauauauauuaucuu

SEQ ID NO: 3843694 - RNA, 19 nt, Human
uaauauauauuaucuuuuc

SEQ ID NO: 3843695 - RNA, 17 nt, Human
uaauauaucccagaaau

SEQ ID NO: 3843696 - RNA, 20 nt, Human
uaauauauguauuauuuaua

SEQ ID NO: 3843697 - RNA, 12 nt, Human
uaauauauuaaa

SEQ ID NO: 3843698 - RNA, 21 nt, Human
uaauauauuaaaauuccaaau

SEQ ID NO: 3843699 - RNA, 21 nt, Human
uaauauauucugaagcaacau

SEQ ID NO: 3843700 - RNA, 12 nt, Human
uaauauauugcu

SEQ ID NO: 3843701 - RNA, 14 nt, Human
uaauauauugcugc

SEQ ID NO: 3843702 - RNA, 18 nt, Human
uaauauauuuaaagggaa

SEQ ID NO: 3843703 - RNA, 13 nt, Human
uaauauauuuucu

SEQ ID NO: 3843704 - RNA, 21 nt, Human
uaauauauuuucuguuuucuu

SEQ ID NO: 3843705 - RNA, 21 nt, Human
uaauaucaaaugcaguauauu

SEQ ID NO: 3843706 - RNA, 14 nt, Human
uaauaucacucauu

SEQ ID NO: 3843707 - RNA, 18 nt, Human
uaauaucacucauuaauu

SEQ ID NO: 3843708 - RNA, 20 nt, Human
uaauauccaggucaacagaa

SEQ ID NO: 3843709 - RNA, 23 nt, Human
uaauaucccacugggagaaagga

SEQ ID NO: 3843710 - RNA, 17 nt, Human
uaauaucccuacaugua

SEQ ID NO: 3843711 - RNA, 18 nt, Human
uaauaucccuacauguau

SEQ ID NO: 3843712 - RNA, 15 nt, Human
uaauaucuaaaguua

SEQ ID NO: 3843713 - RNA, 21 nt, Human
uaauaucuaaaguuauauuuc

SEQ ID NO: 3843714 - RNA, 16 nt, Human
uaauaucuucauuucu

SEQ ID NO: 3843715 - RNA, 15 nt, Human
uaauaucuuucugca

SEQ ID NO: 3843716 - RNA, 19 nt, Human
uaauaucuuucugcacaca

SEQ ID NO: 3843717 - RNA, 16 nt, Human
uaauaugaaaacuuau

SEQ ID NO: 3843718 - RNA, 14 nt, Human
uaauaugaaauuuu

SEQ ID NO: 3843719 - RNA, 15 nt, Human
uaauaugcaaagucu

SEQ ID NO: 3843720 - RNA, 19 nt, Human
uaauaugcacacauuuuuu

SEQ ID NO: 3843721 - RNA, 22 nt, Human
uaauaugcugcaacaaaaugua

SEQ ID NO: 3843722 - RNA, 12 nt, Human
uaauauggauuu

SEQ ID NO: 3843723 - RNA, 16 nt, Human
uaauauggcaaaaaug

SEQ ID NO: 3843724 - RNA, 20 nt, Human
uaauauggcuaugcuuaaaa

SEQ ID NO: 3843725 - RNA, 20 nt, Human
uacacuaaggguguaaguaa

SEQ ID NO: 3843726 - RNA, 18 nt, Human
uacacucaggcuuucacu

SEQ ID NO: 3843727 - RNA, 13 nt, Human
uacacucuccugg

SEQ ID NO: 3843728 - RNA, 14 nt, Human
uacacucuccuggg

SEQ ID NO: 3843729 - RNA, 15 nt, Human
uacacucuccugggc

SEQ ID NO: 3843730 - RNA, 17 nt, Human
uacacucuccugggccc

SEQ ID NO: 3843731 - RNA, 18 nt, Human
uacacucuccugggcccc

SEQ ID NO: 3843732 - RNA, 15 nt, Human
uacacucugcuguuu

SEQ ID NO: 3843733 - RNA, 23 nt, Human
uacacucugcuguuugacaccuc

SEQ ID NO: 3843734 - RNA, 23 nt, Human
uacacugacaccuuugcaggcau

SEQ ID NO: 3843735 - RNA, 20 nt, Human
uacacugcaaucauauguga

SEQ ID NO: 3843736 - RNA, 17 nt, Human
uacacugccugccuuaa

SEQ ID NO: 3843737 - RNA, 15 nt, Human
uacacugccuguaua

SEQ ID NO: 3843738 - RNA, 18 nt, Human
uacacugccuguauacuu

SEQ ID NO: 3843739 - RNA, 20 nt, Human
uacacugccuguauacuuua

SEQ ID NO: 3843740 - RNA, 23 nt, Human
uacacugccuguauacuuuagua

SEQ ID NO: 3843741 - RNA, 19 nt, Human
uacacuggaggagagaaga

SEQ ID NO: 3843742 - RNA, 22 nt, Human
uacacugggagaggugccagca

SEQ ID NO: 3843743 - RNA, 21 nt, Human
uacacugguuugagcuuagug

SEQ ID NO: 3843744 - RNA, 15 nt, Human
uacacuguaccauau

SEQ ID NO: 3843745 - RNA, 20 nt, Human
uacacuguauguuauagaac

SEQ ID NO: 3843746 - RNA, 16 nt, Human
uacacuguauuuguau

SEQ ID NO: 3843747 - RNA, 15 nt, Human
uacacugucaaacau

SEQ ID NO: 3843748 - RNA, 22 nt, Human
uacacugugacuuaagaagccu

SEQ ID NO: 3843749 - RNA, 18 nt, Human
uacacuguuagaacacua

SEQ ID NO: 3843750 - RNA, 21 nt, Human
uacacuguuagaacacuauuu

SEQ ID NO: 3843751 - RNA, 23 nt, Human
uacacuguuagaacacuauuuuc

SEQ ID NO: 3843752 - RNA, 13 nt, Human
uacacuguuauuu

SEQ ID NO: 3843753 - RNA, 21 nt, Human
uacacuguuauuuucagcaug

SEQ ID NO: 3843754 - RNA, 18 nt, Human
uacacuguuucaaacuuu

SEQ ID NO: 3843755 - RNA, 22 nt, Human
uacacuguuucaaacuuuacua

SEQ ID NO: 3843756 - RNA, 14 nt, Human
uacacuuacuguug

SEQ ID NO: 3843757 - RNA, 14 nt, Human
uacacuugcccugc

SEQ ID NO: 3843758 - RNA, 16 nt, Human
uacacuugcccugcuc

SEQ ID NO: 3843759 - RNA, 21 nt, Human
uacacuugcccugcucccucu

SEQ ID NO: 3843760 - RNA, 16 nt, Human
uacacuuguauaaaug

SEQ ID NO: 3843761 - RNA, 17 nt, Human
uacacuuguauaaaugu

SEQ ID NO: 3843762 - RNA, 18 nt, Human
uacacuuguauaaaugua

SEQ ID NO: 3843763 - RNA, 21 nt, Human
uacacuuguauaaauguauau

SEQ ID NO: 3843764 - RNA, 22 nt, Human
uacacuuguauaaauguauaua

SEQ ID NO: 3843765 - RNA, 13 nt, Human
uacacuugugaau

SEQ ID NO: 3843766 - RNA, 23 nt, Human
uacacuuuaugccggaugugcuu

SEQ ID NO: 3843767 - RNA, 20 nt, Human
uacagaaaaaccuuggguua

SEQ ID NO: 3843768 - RNA, 15 nt, Human
uacagaaaaagacuu

SEQ ID NO: 3843769 - RNA, 15 nt, Human
uacagaaaaaucuug

SEQ ID NO: 3843770 - RNA, 14 nt, Human
uacagaaagcugcc

SEQ ID NO: 3843771 - RNA, 16 nt, Human
uacagaaauauccaug

SEQ ID NO: 3843772 - RNA, 17 nt, Human
uacagaaauuagccggg

SEQ ID NO: 3843773 - RNA, 23 nt, Human
uacagaacccauuccauuuaucu

SEQ ID NO: 3843774 - RNA, 19 nt, Human
uacagaacuucagaaagac

SEQ ID NO: 3843775 - RNA, 11 nt, Human
uacagaaucau

SEQ ID NO: 3843776 - RNA, 18 nt, Human
uacagaaucuuguuuuga

SEQ ID NO: 3843777 - RNA, 16 nt, Human
uacagaauuugaauua

SEQ ID NO: 3843778 - RNA, 13 nt, Human
uacagacaaagcg

SEQ ID NO: 3843779 - RNA, 15 nt, Human
uacagacaaagcgug

SEQ ID NO: 3843780 - RNA, 22 nt, Human
uacagacaacaaaccuguuucu

SEQ ID NO: 3843781 - RNA, 14 nt, Human
uacagacacuaagu

SEQ ID NO: 3843782 - RNA, 15 nt, Human
uacagacauauuuaa

SEQ ID NO: 3843783 - RNA, 19 nt, Human
uacagacauauuuaacugg

SEQ ID NO: 3843784 - RNA, 21 nt, Human
uacagaccgaacuguuguaua

SEQ ID NO: 3843785 - RNA, 15 nt, Human
uacagaccugcuuuu

SEQ ID NO: 3843786 - RNA, 21 nt, Human
uacagaccugcuuuuugaaau

SEQ ID NO: 3843787 - RNA, 23 nt, Human
uacagaccugcuuuuugaaauga

SEQ ID NO: 3843788 - RNA, 19 nt, Human
uacagacuggauguaccac

SEQ ID NO: 3843789 - RNA, 15 nt, Human
uacagagaaagaaau

SEQ ID NO: 3843790 - RNA, 22 nt, Human
uacagagaacuaacacuauuuu

SEQ ID NO: 3843791 - RNA, 13 nt, Human
uacagagaagcca

SEQ ID NO: 3843792 - RNA, 14 nt, Human
uacagagaagccag

SEQ ID NO: 3843793 - RNA, 15 nt, Human
uacagagaagccagc

SEQ ID NO: 3843794 - RNA, 18 nt, Human
uacagagaagccaucacc

SEQ ID NO: 3843795 - RNA, 23 nt, Human
uacagagaagccaucaccucaga

SEQ ID NO: 3843796 - RNA, 16 nt, Human
uacagagaagccuuca

SEQ ID NO: 3843797 - RNA, 20 nt, Human
uacagagaagccuucaagcu

SEQ ID NO: 3843798 - RNA, 13 nt, Human
uacagagaaggaa

SEQ ID NO: 3843799 - RNA, 23 nt, Human
uacagagaaggaaugucuuuggu

SEQ ID NO: 3843800 - RNA, 21 nt, Human
uacagagaagucacagggcag

SEQ ID NO: 3843801 - RNA, 18 nt, Human
uacagagaggagaaacac

SEQ ID NO: 3843802 - RNA, 22 nt, Human
uacagagaugucucuuauaucu

SEQ ID NO: 3843803 - RNA, 23 nt, Human
uacagagcccacgcccccacugg

SEQ ID NO: 3843804 - RNA, 13 nt, Human
uacagagcugugg

SEQ ID NO: 3843805 - RNA, 11 nt, Human
uacagaggaaa

SEQ ID NO: 3843806 - RNA, 14 nt, Human
uacagaggacagua

SEQ ID NO: 3843807 - RNA, 18 nt, Human
uacagaggccaugggccu

SEQ ID NO: 3843808 - RNA, 20 nt, Human
uacagauaggccuucuugug

SEQ ID NO: 3843809 - RNA, 14 nt, Human
uacagaugaaaauu

SEQ ID NO: 3843810 - RNA, 16 nt, Human
uacagaugugggccac

SEQ ID NO: 3843811 - RNA, 17 nt, Human
uacagauugcugcuucu

SEQ ID NO: 3843812 - RNA, 17 nt, Human
uacagauuuauuccuuu

SEQ ID NO: 3843813 - RNA, 19 nt, Human
uacagauuuauuccuuugu

SEQ ID NO: 3843814 - RNA, 23 nt, Human
uacagauuuugauagcaaagcga

SEQ ID NO: 3843815 - RNA, 12 nt, Human
uacagcaaauuu

SEQ ID NO: 3843816 - RNA, 14 nt, Human
uacagcaaauuuau

SEQ ID NO: 3843817 - RNA, 15 nt, Human
uacagcaaauuuaua

SEQ ID NO: 3843818 - RNA, 22 nt, Human
uacagcaacaauuuaugaauug

SEQ ID NO: 3843819 - RNA, 22 nt, Human
uacagcaaggagauuuacaacu

SEQ ID NO: 3843820 - RNA, 19 nt, Human
uacagcacuacucugugcc

SEQ ID NO: 3843821 - RNA, 22 nt, Human
uacagcacuacugggugucauu

SEQ ID NO: 3843822 - RNA, 14 nt, Human
uacagcagcaagaa

SEQ ID NO: 3843823 - RNA, 16 nt, Human
uacagcagcaagaaaa

SEQ ID NO: 3843824 - RNA, 22 nt, Human
uacagcagcaagaaaaaaaaau

SEQ ID NO: 3843825 - RNA, 20 nt, Human
uacagcgagaggcagagaaa

SEQ ID NO: 3843826 - RNA, 21 nt, Human
uacagcucagaaguuucuucu

SEQ ID NO: 3843827 - RNA, 21 nt, Human
uacagcucauuaaacuuuuuu

SEQ ID NO: 3843828 - RNA, 11 nt, Human
uacagcucccc

SEQ ID NO: 3843829 - RNA, 14 nt, Human
uacagcucccccag

SEQ ID NO: 3843830 - RNA, 20 nt, Human
uacagcucuggccacaacag

SEQ ID NO: 3843831 - RNA, 15 nt, Human
uacagcugagcuaug

SEQ ID NO: 3843832 - RNA, 13 nt, Human
uacagcugccugc

SEQ ID NO: 3843833 - RNA, 10 nt, Human
uacagcuggg

SEQ ID NO: 3843834 - RNA, 21 nt, Human
uacagcuggguggcacugcca

SEQ ID NO: 3843835 - RNA, 14 nt, Human
uacagcuguauugu

SEQ ID NO: 3843836 - RNA, 12 nt, Human
uacagcuguguu

SEQ ID NO: 3843837 - RNA, 20 nt, Human
uacagcuugaccgugaggcc

SEQ ID NO: 3843838 - RNA, 21 nt, Human
uacagcuugaccgugaggcca

SEQ ID NO: 3843839 - RNA, 17 nt, Human
uacaggaaaagcugcug

SEQ ID NO: 3843840 - RNA, 18 nt, Human
uacaggaaaagcugcuga

SEQ ID NO: 3843841 - RNA, 13 nt, Human
uacaggaaguacu

SEQ ID NO: 3843842 - RNA, 20 nt, Human
uacaggauuugaacucagau

SEQ ID NO: 3843843 - RNA, 16 nt, Human
uacaggcacccaccau

SEQ ID NO: 3843844 - RNA, 14 nt, Human
uacaggcaccgaga

SEQ ID NO: 3843845 - RNA, 20 nt, Human
uacaggcaccgagaauguug

SEQ ID NO: 3843846 - RNA, 14 nt, Human
uacaggcagucucu

SEQ ID NO: 3843847 - RNA, 15 nt, Human
uacaggcauagaguu

SEQ ID NO: 3843848 - RNA, 19 nt, Human
uacaggcccugcuccugca

SEQ ID NO: 3843849 - RNA, 22 nt, Human
uacaggcgugagccaccgugcc

SEQ ID NO: 3843850 - RNA, 15 nt, Human
uacaggcuccugcca

SEQ ID NO: 3843851 - RNA, 21 nt, Human
uacaggcuggcgcagaacgaa

SEQ ID NO: 3843852 - RNA, 13 nt, Human
uacagggagccuc

SEQ ID NO: 3843853 - RNA, 15 nt, Human
uacagggagccuccu

SEQ ID NO: 3843854 - RNA, 20 nt, Human
uacagggagccuccugccca

SEQ ID NO: 3843855 - RNA, 16 nt, Human
uacagggagcugggac

SEQ ID NO: 3843856 - RNA, 22 nt, Human
uacagggcgagacucugucuca

SEQ ID NO: 3843857 - RNA, 14 nt, Human
uacagggggucugg

SEQ ID NO: 3843858 - RNA, 22 nt, Human
uacagggggucuggcugguguu

SEQ ID NO: 3843859 - RNA, 20 nt, Human
uacagguacuuugucuaaga

SEQ ID NO: 3843860 - RNA, 22 nt, Human
uacaggugugugccaccacacc

SEQ ID NO: 3843861 - RNA, 16 nt, Human
uacaguaacuuuaugu

SEQ ID NO: 3843862 - RNA, 17 nt, Human
uacaguaacuuuaugug

SEQ ID NO: 3843863 - RNA, 20 nt, Human
uacaguaacuuuauguguaa

SEQ ID NO: 3843864 - RNA, 23 nt, Human
uacaguaacuuuauguguaaaua

SEQ ID NO: 3843865 - RNA, 21 nt, Human
uacaguaagcugcucuauugu

SEQ ID NO: 3843866 - RNA, 17 nt, Human
uacaguaaugucauaaa

SEQ ID NO: 3843867 - RNA, 18 nt, Human
uacaguaaugucauaaag

SEQ ID NO: 3843868 - RNA, 15 nt, Human
uacaguaggagccca

SEQ ID NO: 3843869 - RNA, 22 nt, Human
gcaggcuggcagcucuccaguc

SEQ ID NO: 3843870 - RNA, 23 nt, Human
gcaggcuggcagcucuccaguca

SEQ ID NO: 3843871 - RNA, 12 nt, Human
gcaggcuggcca

SEQ ID NO: 3843872 - RNA, 14 nt, Human
gcaggcuggccagc

SEQ ID NO: 3843873 - RNA, 16 nt, Human
gcaggcuggccagccg

SEQ ID NO: 3843874 - RNA, 20 nt, Human
gcaggcuggccagccgcucu

SEQ ID NO: 3843875 - RNA, 14 nt, Human
gcaggcuggccagu

SEQ ID NO: 3843876 - RNA, 16 nt, Human
gcaggcuggcccugcc

SEQ ID NO: 3843877 - RNA, 18 nt, Human
gcaggcuggcccugcccu

SEQ ID NO: 3843878 - RNA, 19 nt, Human
gcaggcuggcccugcccug

SEQ ID NO: 3843879 - RNA, 20 nt, Human
gcaggcuggcccugcccugg

SEQ ID NO: 3843880 - RNA, 14 nt, Human
uacaguauaauuaa

SEQ ID NO: 3843881 - RNA, 18 nt, Human
uacaguauaauuaacaug

SEQ ID NO: 3843882 - RNA, 23 nt, Human
uacaguauaauuaacauguuaaa

SEQ ID NO: 3843883 - RNA, 16 nt, Human
uacaguaugcuugcuc

SEQ ID NO: 3843884 - RNA, 13 nt, Human
uacagucugucau

SEQ ID NO: 3843885 - RNA, 12 nt, Human
uacagucugucu

SEQ ID NO: 3843886 - RNA, 13 nt, Human
uacagucugucuu

SEQ ID NO: 3843887 - RNA, 21 nt, Human
uacagucugucuucuguauau

SEQ ID NO: 3843888 - RNA, 15 nt, Human
uacagucuuccacaa

SEQ ID NO: 3843889 - RNA, 18 nt, Human
uacagucuuccauuugca

SEQ ID NO: 3843890 - RNA, 13 nt, Human
uacagucuuguau

SEQ ID NO: 3843891 - RNA, 15 nt, Human
uacagugaaaaugua

SEQ ID NO: 3843892 - RNA, 23 nt, Human
uacagugaaaauguaagcuguuu

SEQ ID NO: 3843893 - RNA, 21 nt, Human
uacagugguuuuauacugaag

SEQ ID NO: 3843894 - RNA, 23 nt, Human
uacaguuacucagaauucucuag

SEQ ID NO: 3843895 - RNA, 22 nt, Human
uacaguucaguuccucuuugca

SEQ ID NO: 3843896 - RNA, 11 nt, Human
uacaguucuuc

SEQ ID NO: 3843897 - RNA, 17 nt, Human
uacaguugaaaaacagc

SEQ ID NO: 3843898 - RNA, 19 nt, Human
uacaguugaaaaacagcug

SEQ ID NO: 3843899 - RNA, 20 nt, Human
uacaguugaaaaacagcuga

SEQ ID NO: 3843900 - RNA, 19 nt, Human
uacaguuggaaauccaucc

SEQ ID NO: 3843901 - RNA, 15 nt, Human
uacaguuguuggccu

SEQ ID NO: 3843902 - RNA, 17 nt, Human
uacaguuugcuguacua

SEQ ID NO: 3843903 - RNA, 21 nt, Human
uacaguuugcuguacuagaga

SEQ ID NO: 3843904 - RNA, 22 nt, Human
uacaguuuggggcaagucaugu

SEQ ID NO: 3843905 - RNA, 17 nt, Human
uacaguuugucacauga

SEQ ID NO: 3843906 - RNA, 21 nt, Human
uacaguuuguuaguaugaggc

SEQ ID NO: 3843907 - RNA, 16 nt, Human
uacaguuuguuuacac

SEQ ID NO: 3843908 - RNA, 14 nt, Human
uacaguuuuaacug

SEQ ID NO: 3843909 - RNA, 15 nt, Human
uacaguuuuaacugu

SEQ ID NO: 3843910 - RNA, 20 nt, Human
uacaguuuuaacuguggaua

SEQ ID NO: 3843911 - RNA, 15 nt, Human
uacaguuuuccuaaa

SEQ ID NO: 3843912 - RNA, 13 nt, Human
uacauaaaagaaa

SEQ ID NO: 3843913 - RNA, 12 nt, Human
uacauaaacauc

SEQ ID NO: 3843914 - RNA, 13 nt, Human
uacauaaacauca

SEQ ID NO: 3843915 - RNA, 14 nt, Human
uacauaaagacuaa

SEQ ID NO: 3843916 - RNA, 21 nt, Human
uacauaaaggugguaugugug

SEQ ID NO: 3843917 - RNA, 19 nt, Human
uacauaacaagaaaaucaa

SEQ ID NO: 3843918 - RNA, 19 nt, Human
uacauaacuaaauuugaua

SEQ ID NO: 3843919 - RNA, 17 nt, Human
uacauaacugaaaaugu

SEQ ID NO: 3843920 - RNA, 16 nt, Human
uacauaacugccuuga

SEQ ID NO: 3843921 - RNA, 16 nt, Human
uacauaagauaaaugu

SEQ ID NO: 3843922 - RNA, 18 nt, Human
uacauaagauaaaugugc

SEQ ID NO: 3843923 - RNA, 16 nt, Human
uacauaaguaauucaa

SEQ ID NO: 3843924 - RNA, 17 nt, Human
uacauaaguaauucaag

SEQ ID NO: 3843925 - RNA, 15 nt, Human
uacauaaguuuagga

SEQ ID NO: 3843926 - RNA, 17 nt, Human
uacauaaugcgugcaua

SEQ ID NO: 3843927 - RNA, 19 nt, Human
uacauaaugcgugcauacc

SEQ ID NO: 3843928 - RNA, 20 nt, Human
uacauaaugcgugcauacca

SEQ ID NO: 3843929 - RNA, 23 nt, Human
uacauaaugggccacugaaaucu

SEQ ID NO: 3843930 - RNA, 16 nt, Human
uacauaauucacucug

SEQ ID NO: 3843931 - RNA, 19 nt, Human
uacauaauuuuuuauucaa

SEQ ID NO: 3843932 - RNA, 22 nt, Human
uacauaauuuuuuauucaaguu

SEQ ID NO: 3843933 - RNA, 13 nt, Human
uacauacacugua

SEQ ID NO: 3843934 - RNA, 14 nt, Human
uacauacacuugua

SEQ ID NO: 3843935 - RNA, 23 nt, Human
uacauaccacgcuagggcuggcu

SEQ ID NO: 3843936 - RNA, 16 nt, Human
uacauacgauuuaagg

SEQ ID NO: 3843937 - RNA, 17 nt, Human
uacauacgauuuaaggu

SEQ ID NO: 3843938 - RNA, 20 nt, Human
uacauacuaugaaauaugua

SEQ ID NO: 3843939 - RNA, 15 nt, Human
uacauagccuauauu

SEQ ID NO: 3843940 - RNA, 20 nt, Human
uacauagccuauauuuacag

SEQ ID NO: 3843941 - RNA, 21 nt, Human
uacauagugcuaacaugaaga

SEQ ID NO: 3843942 - RNA, 22 nt, Human
uacauagugcuaacaugaagac

SEQ ID NO: 3843943 - RNA, 21 nt, Human
uacauagugcugcugugugcu

SEQ ID NO: 3843944 - RNA, 21 nt, Human
uacauaguuuuaaacucauuu

SEQ ID NO: 3843945 - RNA, 11 nt, Human
uacauauauau

SEQ ID NO: 3843946 - RNA, 14 nt, Human
uacauauauuuuua

SEQ ID NO: 3843947 - RNA, 22 nt, Human
uacauauauuuuuaaaaaauga

SEQ ID NO: 3843948 - RNA, 20 nt, Human
uacauaucaccucauggccu

SEQ ID NO: 3843949 - RNA, 19 nt, Human
uacauaucccuuccagaug

SEQ ID NO: 3843950 - RNA, 22 nt, Human
uacauaucgcugacuucaugga

SEQ ID NO: 3843951 - RNA, 16 nt, Human
uacauaucuuuauuaa

SEQ ID NO: 3843952 - RNA, 16 nt, Human
uacauauggauguuac

SEQ ID NO: 3843953 - RNA, 20 nt, Human
uacauauggauguuacucuc

SEQ ID NO: 3843954 - RNA, 15 nt, Human
uacauauguaaaaua

SEQ ID NO: 3843955 - RNA, 21 nt, Human
uacauauguagacuauauaca

SEQ ID NO: 3843956 - RNA, 22 nt, Human
uacauauguagacuauauacau

SEQ ID NO: 3843957 - RNA, 17 nt, Human
uacauauguauacaugu

SEQ ID NO: 3843958 - RNA, 18 nt, Human
uacauauguauacaugug

SEQ ID NO: 3843959 - RNA, 23 nt, Human
uacauauguauacaugugccaug

SEQ ID NO: 3843960 - RNA, 21 nt, Human
uacauaugugcuggaauucua

SEQ ID NO: 3843961 - RNA, 19 nt, Human
uacauauuaggaaaauaug

SEQ ID NO: 3843962 - RNA, 15 nt, Human
uacauauucuuuaaa

SEQ ID NO: 3843963 - RNA, 12 nt, Human
uacauauugaau

SEQ ID NO: 3843964 - RNA, 17 nt, Human
uacauauuugagacuag

SEQ ID NO: 3843965 - RNA, 16 nt, Human
uacauauuuguggaau

SEQ ID NO: 3843966 - RNA, 17 nt, Human
uacauauuuuuguagca

SEQ ID NO: 3843967 - RNA, 13 nt, Human
uacaucacugcuu

SEQ ID NO: 3843968 - RNA, 18 nt, Human
uacaucaguuauucauuc

SEQ ID NO: 3843969 - RNA, 20 nt, Human
uacaucauuucuuuuuggga

SEQ ID NO: 3843970 - RNA, 17 nt, Human
uacaucccauguaacag

SEQ ID NO: 3843971 - RNA, 19 nt, Human
uacaucccauguaacagaa

SEQ ID NO: 3843972 - RNA, 20 nt, Human
uacaucccuuaccugggaaa

SEQ ID NO: 3843973 - RNA, 13 nt, Human
uacauccugggua

SEQ ID NO: 3843974 - RNA, 12 nt, Human
uacauccuugug

SEQ ID NO: 3843975 - RNA, 18 nt, Human
uacaucuauuuuggauug

SEQ ID NO: 3843976 - RNA, 19 nt, Human
uacaucugagguccuguga

SEQ ID NO: 3843977 - RNA, 14 nt, Human
uacaucuggcuuau

SEQ ID NO: 3843978 - RNA, 23 nt, Human
uacaucuggcuuauuuuaaugug

SEQ ID NO: 3843979 - RNA, 18 nt, Human
uacaucuuuuuucacaaa

SEQ ID NO: 3843980 - RNA, 17 nt, Human
uacaugaaaacacauuu

SEQ ID NO: 3843981 - RNA, 23 nt, Human
uacaugaaaacacauuuuucuua

SEQ ID NO: 3843982 - RNA, 14 nt, Human
uacaugaaauucaa

SEQ ID NO: 3843983 - RNA, 18 nt, Human
uacaugaagcuucaugca

SEQ ID NO: 3843984 - RNA, 18 nt, Human
uacaugaauugcauuuua

SEQ ID NO: 3843985 - RNA, 19 nt, Human
uacaugacacugaaaugcc

SEQ ID NO: 3843986 - RNA, 18 nt, Human
uacaugagaacaaacaga

SEQ ID NO: 3843987 - RNA, 13 nt, Human
uacaugagaacag

SEQ ID NO: 3843988 - RNA, 17 nt, Human
uacaugagaacagacug

SEQ ID NO: 3843989 - RNA, 23 nt, Human
uacaugaggaacuguagaugaug

SEQ ID NO: 3843990 - RNA, 21 nt, Human
uacaugagguacugagaguga

SEQ ID NO: 3843991 - RNA, 22 nt, Human
uacaugagguacugagagugaa

SEQ ID NO: 3843992 - RNA, 17 nt, Human
uacaugaugauuucaga

SEQ ID NO: 3843993 - RNA, 19 nt, Human
uacaugcaauuuauuaaaa

SEQ ID NO: 3843994 - RNA, 17 nt, Human
uacaugcagcccaugcc

SEQ ID NO: 3843995 - RNA, 21 nt, Human
uacaugcauacuucaaaagua

SEQ ID NO: 3843996 - RNA, 14 nt, Human
uacaugcauuugag

SEQ ID NO: 3843997 - RNA, 14 nt, Human
uacaugccagugac

SEQ ID NO: 3843998 - RNA, 17 nt, Human
uacaugcuaagagaagu

SEQ ID NO: 3843999 - RNA, 15 nt, Human
uacaugcucuuagaa

SEQ ID NO: 3844000 - RNA, 12 nt, Human
uacaugcugcua

SEQ ID NO: 3844001 - RNA, 14 nt, Human
uacaugcugggguc

SEQ ID NO: 3844002 - RNA, 12 nt, Human
uacaugcuuauu

SEQ ID NO: 3844003 - RNA, 17 nt, Human
uacaugcuuauuccaug

SEQ ID NO: 3844004 - RNA, 14 nt, Human
uacaugcuuguuga

SEQ ID NO: 3844005 - RNA, 15 nt, Human
uacaugcuuugugaa

SEQ ID NO: 3844006 - RNA, 14 nt, Human
uacauggaauaaca

SEQ ID NO: 3844007 - RNA, 13 nt, Human
uacaugggacuau

SEQ ID NO: 3844008 - RNA, 19 nt, Human
uacaugggacuaugcuuuu

SEQ ID NO: 3844009 - RNA, 19 nt, Human
uacauguauuaaauuacau

SEQ ID NO: 3844010 - RNA, 22 nt, Human
uacauguauuauuucauuaugu

SEQ ID NO: 3844011 - RNA, 16 nt, Human
uacaugugcacauugu

SEQ ID NO: 3844012 - RNA, 13 nt, Human
uacaugugggagc

SEQ ID NO: 3844013 - RNA, 21 nt, Human
uaauucagcacugauuucaca

SEQ ID NO: 3844014 - RNA, 15 nt, Human
uaauucagcucuuga

SEQ ID NO: 3844015 - RNA, 17 nt, Human
uaauucaggcauauuuu

SEQ ID NO: 3844016 - RNA, 14 nt, Human
uaauucagguuuuu

SEQ ID NO: 3844017 - RNA, 13 nt, Human
uaauucauguugc

SEQ ID NO: 3844018 - RNA, 15 nt, Human
uaauuccaauaugau

SEQ ID NO: 3844019 - RNA, 20 nt, Human
uaauuccaauaugaugacuc

SEQ ID NO: 3844020 - RNA, 10 nt, Human
uaauuccaug

SEQ ID NO: 3844021 - RNA, 19 nt, Human
uaauucccauuuugcaaaa

SEQ ID NO: 3844022 - RNA, 23 nt, Human
uaauucccauuuugcaaaauuuc

SEQ ID NO: 3844023 - RNA, 22 nt, Human
uaauuccguagguuauuuucag

SEQ ID NO: 3844024 - RNA, 16 nt, Human
uaauuccuacagcacu

SEQ ID NO: 3844025 - RNA, 21 nt, Human
uaauuccuacagcacuacugg

SEQ ID NO: 3844026 - RNA, 22 nt, Human
uaauuccucucacuaaacuuua

SEQ ID NO: 3844027 - RNA, 20 nt, Human
uaauuccuucagcacuuuag

SEQ ID NO: 3844028 - RNA, 12 nt, Human
uaauucuaaagg

SEQ ID NO: 3844029 - RNA, 11 nt, Human
uaauucuaaau

SEQ ID NO: 3844030 - RNA, 18 nt, Human
uaauucuaaaugaauguu

SEQ ID NO: 3844031 - RNA, 17 nt, Human
uaauucuaaccagagca

SEQ ID NO: 3844032 - RNA, 22 nt, Human
uaauucuaaccagagcaagcuu

SEQ ID NO: 3844033 - RNA, 13 nt, Human
uaauucuaaggaa

SEQ ID NO: 3844034 - RNA, 21 nt, Human
uaauucuaaggaauaugagcu

SEQ ID NO: 3844035 - RNA, 23 nt, Human
uaauucuauuaaagugcuaaggu

SEQ ID NO: 3844036 - RNA, 19 nt, Human
uaauucucagaaaggcaag

SEQ ID NO: 3844037 - RNA, 16 nt, Human
uaauucucuuucaaag

SEQ ID NO: 3844038 - RNA, 20 nt, Human
uaauucugaaguuauauuuc

SEQ ID NO: 3844039 - RNA, 23 nt, Human
uaauucugaaguuauauuuccua

SEQ ID NO: 3844040 - RNA, 17 nt, Human
uaauucugaguuuugug

SEQ ID NO: 3844041 - RNA, 15 nt, Human
uaauucuguaaaugu

SEQ ID NO: 3844042 - RNA, 18 nt, Human
uaauucuuagcucauucu

SEQ ID NO: 3844043 - RNA, 19 nt, Human
uaauucuuauuccauauua

SEQ ID NO: 3844044 - RNA, 14 nt, Human
uaauucuuauucuu

SEQ ID NO: 3844045 - RNA, 17 nt, Human
uaauucuuauuuugugg

SEQ ID NO: 3844046 - RNA, 22 nt, Human
uaauucuucagcguaaaauggu

SEQ ID NO: 3844047 - RNA, 13 nt, Human
uaauucuucaguu

SEQ ID NO: 3844048 - RNA, 15 nt, Human
uaauucuuguauauu

SEQ ID NO: 3844049 - RNA, 11 nt, Human
uaauucuuuaa

SEQ ID NO: 3844050 - RNA, 12 nt, Human
uaauucuuuaau

SEQ ID NO: 3844051 - RNA, 12 nt, Human
uaauucuuucaa

SEQ ID NO: 3844052 - RNA, 21 nt, Human
uaauucuuucaauacagauau

SEQ ID NO: 3844053 - RNA, 11 nt, Human
uaauucuuugc

SEQ ID NO: 3844054 - RNA, 16 nt, Human
uaauucuuugcaaaaa

SEQ ID NO: 3844055 - RNA, 17 nt, Human
uaauucuuugcaaaaau

SEQ ID NO: 3844056 - RNA, 21 nt, Human
uaauucuuugcaaaaauccaa

SEQ ID NO: 3844057 - RNA, 18 nt, Human
uaauucuuuuuuauuaau

SEQ ID NO: 3844058 - RNA, 20 nt, Human
uaauucuuuuuuauuaauca

SEQ ID NO: 3844059 - RNA, 23 nt, Human
uaauugaaaagaaguagugucug

SEQ ID NO: 3844060 - RNA, 22 nt, Human
uaauugaauuuucaagcaucuc

SEQ ID NO: 3844061 - RNA, 20 nt, Human
uaauugacaggauuauugga

SEQ ID NO: 3844062 - RNA, 22 nt, Human
uaauugacaggauuauuggaaa

SEQ ID NO: 3844063 - RNA, 21 nt, Human
uaauugagaagcguauguuuu

SEQ ID NO: 3844064 - RNA, 19 nt, Human
uaauugauuucaagaccuu

SEQ ID NO: 3844065 - RNA, 21 nt, Human
uaauugcaaaaacauagaaau

SEQ ID NO: 3844066 - RNA, 22 nt, Human
uaauugcagauaacuuugacuu

SEQ ID NO: 3844067 - RNA, 13 nt, Human
uaauugcauucau

SEQ ID NO: 3844068 - RNA, 22 nt, Human
uaauugcauucaucuuguguuu

SEQ ID NO: 3844069 - RNA, 12 nt, Human
uaauugcuauuu

SEQ ID NO: 3844070 - RNA, 12 nt, Human
uaauugcugcaa

SEQ ID NO: 3844071 - RNA, 22 nt, Human
uaauugcugugugucccaggca

SEQ ID NO: 3844072 - RNA, 17 nt, Human
uaauugcuguugaaagc

SEQ ID NO: 3844073 - RNA, 21 nt, Human
uaauugcuguugaaagcaaaa

SEQ ID NO: 3844074 - RNA, 16 nt, Human
uaauugcuuacauuuu

SEQ ID NO: 3844075 - RNA, 20 nt, Human
uaauugcuuauuuauuguau

SEQ ID NO: 3844076 - RNA, 22 nt, Human
uaauugcuuauuuauuguauuc

SEQ ID NO: 3844077 - RNA, 20 nt, Human
uaauuggaagaaauuccugu

SEQ ID NO: 3844078 - RNA, 17 nt, Human
uaauuggauuuccuaau

SEQ ID NO: 3844079 - RNA, 23 nt, Human
uaauuggauuuccuaauacuguc

SEQ ID NO: 3844080 - RNA, 18 nt, Human
uaauugggccagcuuuuc

SEQ ID NO: 3844081 - RNA, 21 nt, Human
uaauugggccagcuuuucaaa

SEQ ID NO: 3844082 - RNA, 18 nt, Human
uaauugguccgaucuuug

SEQ ID NO: 3844083 - RNA, 15 nt, Human
uaauuguaaacugua

SEQ ID NO: 3844084 - RNA, 19 nt, Human
uaauuguaucguauagcug

SEQ ID NO: 3844085 - RNA, 14 nt, Human
uaauugucaugguu

SEQ ID NO: 3844086 - RNA, 23 nt, Human
uaauugugauuagacagaacacc

SEQ ID NO: 3844087 - RNA, 22 nt, Human
uaauugugcaagcuuuuccuaa

SEQ ID NO: 3844088 - RNA, 21 nt, Human
uaauugugugauauuucagaa

SEQ ID NO: 3844089 - RNA, 13 nt, Human
uaauuguguuuac

SEQ ID NO: 3844090 - RNA, 16 nt, Human
gcaugcuggggcaagu

SEQ ID NO: 3844091 - RNA, 11 nt, Human
gcauggaaauu

SEQ ID NO: 3844092 - RNA, 13 nt, Human
gcauggaauuugu

SEQ ID NO: 3844093 - RNA, 17 nt, Human
gcauggaauuuguaagu

SEQ ID NO: 3844094 - RNA, 22 nt, Human
gcauggacauuuagaagaaaga

SEQ ID NO: 3844095 - RNA, 16 nt, Human
gcauggaccuaacauu

SEQ ID NO: 3844096 - RNA, 17 nt, Human
gcauggaccuaacauuc

SEQ ID NO: 3844097 - RNA, 18 nt, Human
gcauggaguguguauugu

SEQ ID NO: 3844098 - RNA, 14 nt, Human
gcauggauuucugu

SEQ ID NO: 3844099 - RNA, 22 nt, Human
gcauggcaccugucgcccagug

SEQ ID NO: 3844100 - RNA, 15 nt, Human
gcauggcacuugcau

SEQ ID NO: 3844101 - RNA, 20 nt, Human
gcauggcacuugcaucugug

SEQ ID NO: 3844102 - RNA, 19 nt, Human
gcauggcagggggcugcug

SEQ ID NO: 3844103 - RNA, 18 nt, Human
gcauggcauauuuuucac

SEQ ID NO: 3844104 - RNA, 18 nt, Human
gcauggcauccuccagcc

SEQ ID NO: 3844105 - RNA, 19 nt, Human
gcauggcauccuccagccc

SEQ ID NO: 3844106 - RNA, 17 nt, Human
gcauggccagcagcuug

SEQ ID NO: 3844107 - RNA, 17 nt, Human
gcauggccagguggcca

SEQ ID NO: 3844108 - RNA, 13 nt, Human
gcauggcccuggg

SEQ ID NO: 3844109 - RNA, 17 nt, Human
gcauggcccuggggucc

SEQ ID NO: 3844110 - RNA, 22 nt, Human
gcauggcccuggggucccacga

SEQ ID NO: 3844111 - RNA, 22 nt, Human
gcauggcguagagggugcugcc

SEQ ID NO: 3844112 - RNA, 21 nt, Human
gcauggcuccagucugcugcc

SEQ ID NO: 3844113 - RNA, 17 nt, Human
gcauggcuuuauuuguu

SEQ ID NO: 3844114 - RNA, 20 nt, Human
gcaugggaaagccaccucuc

SEQ ID NO: 3844115 - RNA, 19 nt, Human
gcaugggaaugaaugucag

SEQ ID NO: 3844116 - RNA, 22 nt, Human
gcaugggccuggccaccucucu

SEQ ID NO: 3844117 - RNA, 13 nt, Human
gcaugggcuugcu

SEQ ID NO: 3844118 - RNA, 23 nt, Human
gcauggggauaaaggagaaggca

SEQ ID NO: 3844119 - RNA, 18 nt, Human
gcauggggugggccucug

SEQ ID NO: 3844120 - RNA, 17 nt, Human
gcaugguaccagcccug

SEQ ID NO: 3844121 - RNA, 22 nt, Human
gcaugguaccagcccuggggcu

SEQ ID NO: 3844122 - RNA, 23 nt, Human
gcaugguaccagcccuggggcug

SEQ ID NO: 3844123 - RNA, 18 nt, Human
gcauggucacacacugau

SEQ ID NO: 3844124 - RNA, 15 nt, Human
gcaugguccauucuc

SEQ ID NO: 3844125 - RNA, 18 nt, Human
gcauggucccugccuuag

SEQ ID NO: 3844126 - RNA, 16 nt, Human
gcaugguggccagagg

SEQ ID NO: 3844127 - RNA, 19 nt, Human
gcaugguggcgcaagccug

SEQ ID NO: 3844128 - RNA, 22 nt, Human
gcauggugguugggacccagug

SEQ ID NO: 3844129 - RNA, 15 nt, Human
gcaugguguucuccu

SEQ ID NO: 3844130 - RNA, 16 nt, Human
gcaugguguucuccug

SEQ ID NO: 3844131 - RNA, 17 nt, Human
gcaugguguucuccugc

SEQ ID NO: 3844132 - RNA, 18 nt, Human
gcaugguguucuccugcu

SEQ ID NO: 3844133 - RNA, 20 nt, Human
gcaugguguucuccugcugc

SEQ ID NO: 3844134 - RNA, 19 nt, Human
gcauguaaauguaaacuca

SEQ ID NO: 3844135 - RNA, 11 nt, Human
gcauguacagu

SEQ ID NO: 3844136 - RNA, 20 nt, Human
gcauguacaguguucuguuu

SEQ ID NO: 3844137 - RNA, 20 nt, Human
gcauguaccauuugcauggc

SEQ ID NO: 3844138 - RNA, 22 nt, Human
gcauguacccuaaggucauuac

SEQ ID NO: 3844139 - RNA, 16 nt, Human
gcauguaguaacacua

SEQ ID NO: 3844140 - RNA, 17 nt, Human
gcauguaguaacacuaa

SEQ ID NO: 3844141 - RNA, 19 nt, Human
gcauguauaguugcuuuug

SEQ ID NO: 3844142 - RNA, 14 nt, Human
gcauguaugucuug

SEQ ID NO: 3844143 - RNA, 15 nt, Human
gcauguaugucuugg

SEQ ID NO: 3844144 - RNA, 21 nt, Human
gcaugucagacagaacuugaa

SEQ ID NO: 3844145 - RNA, 16 nt, Human
gcaugucccaucacgu

SEQ ID NO: 3844146 - RNA, 23 nt, Human
gcaugucccuaccgagucucuuc

SEQ ID NO: 3844147 - RNA, 14 nt, Human
gcaugucuuuuaaa

SEQ ID NO: 3844148 - RNA, 19 nt, Human
gcaugucuuuuuuucuguu

SEQ ID NO: 3844149 - RNA, 12 nt, Human
gcaugugaagaa

SEQ ID NO: 3844150 - RNA, 20 nt, Human
gcaugugaucacgccuggcu

SEQ ID NO: 3844151 - RNA, 19 nt, Human
gcaugugaugagaggaaau

SEQ ID NO: 3844152 - RNA, 21 nt, Human
gcaugugaugagaggaaauca

SEQ ID NO: 3844153 - RNA, 14 nt, Human
gcaugugcccuccu

SEQ ID NO: 3844154 - RNA, 16 nt, Human
gcauguggccuguggc

SEQ ID NO: 3844155 - RNA, 13 nt, Human
gcaugugggcuuc

SEQ ID NO: 3844156 - RNA, 14 nt, Human
gccaccugcggugc

SEQ ID NO: 3844157 - RNA, 22 nt, Human
gccaccugcggugcuaucuccc

SEQ ID NO: 3844158 - RNA, 15 nt, Human
gccaccuggaccccu

SEQ ID NO: 3844159 - RNA, 19 nt, Human
gccaccuggaccccugcau

SEQ ID NO: 3844160 - RNA, 20 nt, Human
gccaccuggcucucaccucu

SEQ ID NO: 3844161 - RNA, 16 nt, Human
gccaccuggggcaguc

SEQ ID NO: 3844162 - RNA, 19 nt, Human
gccaccugucccaccucaa

SEQ ID NO: 3844163 - RNA, 17 nt, Human
gccacgcagccaggaca

SEQ ID NO: 3844164 - RNA, 15 nt, Human
gccacgcuccagcug

SEQ ID NO: 3844165 - RNA, 16 nt, Human
gccacgcuccagcugc

SEQ ID NO: 3844166 - RNA, 23 nt, Human
gccacgggugccagaagcuacug

SEQ ID NO: 3844167 - RNA, 14 nt, Human
gccacgugccaggc

SEQ ID NO: 3844168 - RNA, 16 nt, Human
gccacgugccaggccc

SEQ ID NO: 3844169 - RNA, 18 nt, Human
gccacgugccaggcccgg

SEQ ID NO: 3844170 - RNA, 21 nt, Human
gccacguguuuagaccuagau

SEQ ID NO: 3844171 - RNA, 16 nt, Human
gccacguuccuuacug

SEQ ID NO: 3844172 - RNA, 22 nt, Human
gccacguucuuacuaguuuccc

SEQ ID NO: 3844173 - RNA, 14 nt, Human
gccacuaagcagag

SEQ ID NO: 3844174 - RNA, 19 nt, Human
gccacuaagcagaggaggg

SEQ ID NO: 3844175 - RNA, 17 nt, Human
gccacuacacuccagcc

SEQ ID NO: 3844176 - RNA, 19 nt, Human
gccacuacacuccagccug

SEQ ID NO: 3844177 - RNA, 20 nt, Human
gccacuacacuccagccuga

SEQ ID NO: 3844178 - RNA, 23 nt, Human
gccacuacacuccagccugagca

SEQ ID NO: 3844179 - RNA, 23 nt, Human
gccacuacauuugcuccauccuc

SEQ ID NO: 3844180 - RNA, 13 nt, Human
gccacuaggcugg

SEQ ID NO: 3844181 - RNA, 15 nt, Human
gccacuaggcugggu

SEQ ID NO: 3844182 - RNA, 20 nt, Human
gccacuaggcugggugccca

SEQ ID NO: 3844183 - RNA, 21 nt, Human
gccacuaggcugggugcccac

SEQ ID NO: 3844184 - RNA, 20 nt, Human
gccacuauuguuagucucuu

SEQ ID NO: 3844185 - RNA, 21 nt, Human
gccacuauuguuagucucuug

SEQ ID NO: 3844186 - RNA, 22 nt, Human
gccacucagaguucuauacugu

SEQ ID NO: 3844187 - RNA, 15 nt, Human
gccacucagcuuccu

SEQ ID NO: 3844188 - RNA, 12 nt, Human
gccacucauuuc

SEQ ID NO: 3844189 - RNA, 13 nt, Human
gccacucauuuca

SEQ ID NO: 3844190 - RNA, 16 nt, Human
gccacucauuucaucu

SEQ ID NO: 3844191 - RNA, 16 nt, Human
gccacuccagaccccu

SEQ ID NO: 3844192 - RNA, 18 nt, Human
gccacuccagaccccugg

SEQ ID NO: 3844193 - RNA, 20 nt, Human
gccacuccagaccccuggcu

SEQ ID NO: 3844194 - RNA, 22 nt, Human
gccacucccggcacuccaugcu

SEQ ID NO: 3844195 - RNA, 14 nt, Human
gccacuccucugac

SEQ ID NO: 3844196 - RNA, 15 nt, Human
gccacuccucugacu

SEQ ID NO: 3844197 - RNA, 23 nt, Human
gccacuccucugacucagggcuc

SEQ ID NO: 3844198 - RNA, 18 nt, Human
gccacuccuuccugcccc

SEQ ID NO: 3844199 - RNA, 20 nt, Human
gccacucgggaggcugagac

SEQ ID NO: 3844200 - RNA, 22 nt, Human
gccacucuaccagugcaggcug

SEQ ID NO: 3844201 - RNA, 13 nt, Human
gccacucugccuc

SEQ ID NO: 3844202 - RNA, 17 nt, Human
gccacucugccucugcc

SEQ ID NO: 3844203 - RNA, 21 nt, Human
gccacucugccucugccugca

SEQ ID NO: 3844204 - RNA, 13 nt, Human
gccacugaagagg

SEQ ID NO: 3844205 - RNA, 15 nt, Human
gccacugaagcuggg

SEQ ID NO: 3844206 - RNA, 19 nt, Human
gccacugacugcagggaca

SEQ ID NO: 3844207 - RNA, 15 nt, Human
gccacugcacagagc

SEQ ID NO: 3844208 - RNA, 22 nt, Human
gccacugcaccgggccacagag

SEQ ID NO: 3844209 - RNA, 23 nt, Human
gccacugcaccgggccacagaga

SEQ ID NO: 3844210 - RNA, 22 nt, Human
gccacugcacuccagccugggc

SEQ ID NO: 3844211 - RNA, 15 nt, Human
gccacugcacuccgg

SEQ ID NO: 3844212 - RNA, 17 nt, Human
gccacugcccgagcugg

SEQ ID NO: 3844213 - RNA, 21 nt, Human
gccacugcccgagcuggugca

SEQ ID NO: 3844214 - RNA, 16 nt, Human
gccacugccucuuccu

SEQ ID NO: 3844215 - RNA, 22 nt, Human
gccacugccuucgcuucuugcc

SEQ ID NO: 3844216 - RNA, 12 nt, Human
gccacugcuccc

SEQ ID NO: 3844217 - RNA, 15 nt, Human
gccacugcuccgugg

SEQ ID NO: 3844218 - RNA, 19 nt, Human
gccacugcucuccagccug

SEQ ID NO: 3844219 - RNA, 16 nt, Human
gccacuguuguuuugg

SEQ ID NO: 3844220 - RNA, 18 nt, Human
gccacuuaaaauguucac

SEQ ID NO: 3844221 - RNA, 15 nt, Human
gccacuucccaggua

SEQ ID NO: 3844222 - RNA, 14 nt, Human
gccacuucugggug

SEQ ID NO: 3844223 - RNA, 23 nt, Human
gccacuucuggguggggcagugg

SEQ ID NO: 3844224 - RNA, 15 nt, Human
gccacuucuguccau

SEQ ID NO: 3844225 - RNA, 16 nt, Human
gccacuucuguccaua

SEQ ID NO: 3844226 - RNA, 17 nt, Human
gccacuucuguccauau

SEQ ID NO: 3844227 - RNA, 19 nt, Human
gccacuuuaagagagaaau

SEQ ID NO: 3844228 - RNA, 22 nt, Human
gccacuuuaagagagaaaucug

SEQ ID NO: 3844229 - RNA, 20 nt, Human
gccacuuuacccaccuagaa

SEQ ID NO: 3844230 - RNA, 22 nt, Human
gccacuuuacccaccuagaaca

SEQ ID NO: 3844231 - RNA, 23 nt, Human
gccacuuuacccaccuagaacac

SEQ ID NO: 3844232 - RNA, 18 nt, Human
gccacuuuccaagucacu

SEQ ID NO: 3844233 - RNA, 23 nt, Human
gccacuuugguacauggccagug

SEQ ID NO: 3844234 - RNA, 23 nt, Human
gccacuuuuuuuuuuaaucucca

SEQ ID NO: 3844235 - RNA, 16 nt, Human
gccagaacaguuugua

SEQ ID NO: 3844236 - RNA, 14 nt, Human
gccagaaccccgag

SEQ ID NO: 3844237 - RNA, 15 nt, Human
gccagaaccccgagc

SEQ ID NO: 3844238 - RNA, 17 nt, Human
gccagaaccuggagggc

SEQ ID NO: 3844239 - RNA, 17 nt, Human
gccagaagauccccuca

SEQ ID NO: 3844240 - RNA, 21 nt, Human
gccagaagcugagcaccaggg

SEQ ID NO: 3844241 - RNA, 18 nt, Human
gccagaagggggccauga

SEQ ID NO: 3844242 - RNA, 14 nt, Human
gccagaaguaccag

SEQ ID NO: 3844243 - RNA, 17 nt, Human
gccagaaguaccagacu

SEQ ID NO: 3844244 - RNA, 21 nt, Human
gccagaaguaccagacuagau

SEQ ID NO: 3844245 - RNA, 16 nt, Human
gccagaaguagcuuug

SEQ ID NO: 3844246 - RNA, 20 nt, Human
gccagaagucaaggcuuaga

SEQ ID NO: 3844247 - RNA, 22 nt, Human
gccagaagucaaggcuuagacc

SEQ ID NO: 3844248 - RNA, 22 nt, Human
gccagaaucagcacagauaaaa

SEQ ID NO: 3844249 - RNA, 16 nt, Human
gccagacacaggcccu

SEQ ID NO: 3844250 - RNA, 13 nt, Human
gccagacacucug

SEQ ID NO: 3844251 - RNA, 18 nt, Human
gccagaccagcaggcugg

SEQ ID NO: 3844252 - RNA, 13 nt, Human
gccagaccaugga

SEQ ID NO: 3844253 - RNA, 17 nt, Human
gccagaccauggacacu

SEQ ID NO: 3844254 - RNA, 21 nt, Human
gccagaccugcagacgcccag

SEQ ID NO: 3844255 - RNA, 23 nt, Human
gccagacggcacccacccagcac

SEQ ID NO: 3844256 - RNA, 18 nt, Human
gccagacuggcacaguuu

SEQ ID NO: 3844257 - RNA, 19 nt, Human
gccagacuggcacaguuuu

SEQ ID NO: 3844258 - RNA, 10 nt, Human
gccagagaag

SEQ ID NO: 3844259 - RNA, 15 nt, Human
gccagagaagugaca

SEQ ID NO: 3844260 - RNA, 17 nt, Human
gccagagacacaagccu

SEQ ID NO: 3844261 - RNA, 15 nt, Human
gccagagcccacucc

SEQ ID NO: 3844262 - RNA, 20 nt, Human
gccagagcccacuccaucug

SEQ ID NO: 3844263 - RNA, 24 nt, Human
gccagagcccacuccaucugguag

SEQ ID NO: 3844264 - RNA, 15 nt, Human
gccagagccuggggc

SEQ ID NO: 3844265 - RNA, 17 nt, Human
gccagagccuggggcuc

SEQ ID NO: 3844266 - RNA, 22 nt, Human
gccagagcuacccgcagaguuc

SEQ ID NO: 3844267 - RNA, 17 nt, Human
gccagagcugaagaguu

SEQ ID NO: 3844268 - RNA, 23 nt, Human
gccagaggaacuguccagagagc

SEQ ID NO: 3844269 - RNA, 18 nt, Human
gccagaggaauccuggca

SEQ ID NO: 3844270 - RNA, 22 nt, Human
gccagaggaauccuggcagccc

SEQ ID NO: 3844271 - RNA, 23 nt, Human
gccagaggaauccuggcagccca

SEQ ID NO: 3844272 - RNA, 10 nt, Human
gccagaggag

SEQ ID NO: 3844273 - RNA, 22 nt, Human
gccagaggagagaggacccccu

SEQ ID NO: 3844274 - RNA, 14 nt, Human
gccagaggccccca

SEQ ID NO: 3844275 - RNA, 20 nt, Human
gccagaggcccccagcccag

SEQ ID NO: 3844276 - RNA, 22 nt, Human
gccagaggcucguugacuggcu

SEQ ID NO: 3844277 - RNA, 12 nt, Human
gccagaggcugg

SEQ ID NO: 3844278 - RNA, 20 nt, Human
gccagagggagugacagagg

SEQ ID NO: 3844279 - RNA, 14 nt, Human
gccagaggggaagg

SEQ ID NO: 3844280 - RNA, 12 nt, Human
gccagagguggg

SEQ ID NO: 3844281 - RNA, 16 nt, Human
gccagaggugggcagg

SEQ ID NO: 3844282 - RNA, 22 nt, Human
gccagaggugggcagguggugg

SEQ ID NO: 3844283 - RNA, 17 nt, Human
gccagaguccuuuccaa

SEQ ID NO: 3844284 - RNA, 13 nt, Human
gccagaguggccu

SEQ ID NO: 3844285 - RNA, 14 nt, Human
gccagaguggccug

SEQ ID NO: 3844286 - RNA, 15 nt, Human
gccagaguggccugg

SEQ ID NO: 3844287 - RNA, 18 nt, Human
gccagaguggccuggcca

SEQ ID NO: 3844288 - RNA, 13 nt, Human
gccagaguuccug

SEQ ID NO: 3844289 - RNA, 18 nt, Human
gccagaguuccugcggag

SEQ ID NO: 3844290 - RNA, 11 nt, Human
gccagauccag

SEQ ID NO: 3844291 - RNA, 15 nt, Human
gccagauccagccug

SEQ ID NO: 3844292 - RNA, 16 nt, Human
gccagauccucuuggu

SEQ ID NO: 3844293 - RNA, 22 nt, Human
gccagaugcacaucccuggaag

SEQ ID NO: 3844294 - RNA, 14 nt, Human
gccagaugcaccag

SEQ ID NO: 3844295 - RNA, 15 nt, Human
gccagaugcaccagc

SEQ ID NO: 3844296 - RNA, 11 nt, Human
gccagaugcug

SEQ ID NO: 3844297 - RNA, 15 nt, Human
gccagaugcugaugu

SEQ ID NO: 3844298 - RNA, 12 nt, Human
uacauguuugca

SEQ ID NO: 3844299 - RNA, 22 nt, Human
uacauguuugcaccuuucuagu

SEQ ID NO: 3844300 - RNA, 19 nt, Human
gccaggcuccuuccugucu

SEQ ID NO: 3844301 - RNA, 12 nt, Human
gccaggcucugu

SEQ ID NO: 3844302 - RNA, 16 nt, Human
gccaggcugaccacag

SEQ ID NO: 3844303 - RNA, 20 nt, Human
gccaggcugaccacagcaca

SEQ ID NO: 3844304 - RNA, 14 nt, Human
gccaggcugccaag

SEQ ID NO: 3844305 - RNA, 18 nt, Human
gccaggcugccuggccuu

SEQ ID NO: 3844306 - RNA, 22 nt, Human
gccaggcugcucuugaacuccu

SEQ ID NO: 3844307 - RNA, 13 nt, Human
gccaggcuggguc

SEQ ID NO: 3844308 - RNA, 13 nt, Human
gccaggcuggucu

SEQ ID NO: 3844309 - RNA, 20 nt, Human
gccagggaaagacuggcaag

SEQ ID NO: 3844310 - RNA, 18 nt, Human
gccagggaaguccccgag

SEQ ID NO: 3844311 - RNA, 13 nt, Human
gccagggacagag

SEQ ID NO: 3844312 - RNA, 21 nt, Human
gccagggagacagagcucaca

SEQ ID NO: 3844313 - RNA, 22 nt, Human
gccagggagaccuggacacagg

SEQ ID NO: 3844314 - RNA, 13 nt, Human
gccagggagagcc

SEQ ID NO: 3844315 - RNA, 14 nt, Human
gccagggagcgagu

SEQ ID NO: 3844316 - RNA, 21 nt, Human
gccagggauggggccacagcc

SEQ ID NO: 3844317 - RNA, 20 nt, Human
gccagggcaaugaugaauga

SEQ ID NO: 3844318 - RNA, 12 nt, Human
uagcuccugugg

SEQ ID NO: 3844319 - RNA, 17 nt, Human
uagcucucuaggccucu

SEQ ID NO: 3844320 - RNA, 12 nt, Human
uagcucugagaa

SEQ ID NO: 3844321 - RNA, 13 nt, Human
uagcucugagaac

SEQ ID NO: 3844322 - RNA, 22 nt, Human
uagcucuuuuuuguuuguuucu

SEQ ID NO: 3844323 - RNA, 23 nt, Human
uagcucuuuuuuguuuguuucuu

SEQ ID NO: 3844324 - RNA, 15 nt, Human
uagcugaagaauuga

SEQ ID NO: 3844325 - RNA, 18 nt, Human
uagcugaauguuuuucua

SEQ ID NO: 3844326 - RNA, 12 nt, Human
uagcugagcuca

SEQ ID NO: 3844327 - RNA, 23 nt, Human
uagcugcacagggcagcugggcc

SEQ ID NO: 3844328 - RNA, 21 nt, Human
uagcugcagauaaguggccuu

SEQ ID NO: 3844329 - RNA, 20 nt, Human
uagcugcauuugucuggccu

SEQ ID NO: 3844330 - RNA, 12 nt, Human
uagcugccaagu

SEQ ID NO: 3844331 - RNA, 23 nt, Human
uagcugcccauuucgugagcccc

SEQ ID NO: 3844332 - RNA, 13 nt, Human
uagcugcuacaaa

SEQ ID NO: 3844333 - RNA, 19 nt, Human
uagcugcuacaaagaagac

SEQ ID NO: 3844334 - RNA, 20 nt, Human
uagcugcuacaaagaagaca

SEQ ID NO: 3844335 - RNA, 12 nt, Human
uagcugcuguca

SEQ ID NO: 3844336 - RNA, 17 nt, Human
uagcuggagaggagccc

SEQ ID NO: 3844337 - RNA, 16 nt, Human
uagcuggcaagaaugg

SEQ ID NO: 3844338 - RNA, 18 nt, Human
uagcugggaaagcauaaa

SEQ ID NO: 3844339 - RNA, 11 nt, Human
uagcugggacu

SEQ ID NO: 3844340 - RNA, 14 nt, Human
uagcugggacuaca

SEQ ID NO: 3844341 - RNA, 18 nt, Human
uagcugggggugggccag

SEQ ID NO: 3844342 - RNA, 14 nt, Human
uagcuggugguuuc

SEQ ID NO: 3844343 - RNA, 17 nt, Human
uagcuggugguuucacg

SEQ ID NO: 3844344 - RNA, 18 nt, Human
uagcugguuccugcuaga

SEQ ID NO: 3844345 - RNA, 23 nt, Human
uagcugguuccugcuagaaaugg

SEQ ID NO: 3844346 - RNA, 20 nt, Human
uagcugguuggagagcuaga

SEQ ID NO: 3844347 - RNA, 12 nt, Human
uagcuguaaaac

SEQ ID NO: 3844348 - RNA, 19 nt, Human
uagcuguaaggcaugaagg

SEQ ID NO: 3844349 - RNA, 12 nt, Human
uagcuguacaaa

SEQ ID NO: 3844350 - RNA, 17 nt, Human
uagcuguacuucuugaa

SEQ ID NO: 3844351 - RNA, 23 nt, Human
uagcuguacuucuugaauauaaa

SEQ ID NO: 3844352 - RNA, 12 nt, Human
uagcuguauuga

SEQ ID NO: 3844353 - RNA, 14 nt, Human
uagcuguauugaau

SEQ ID NO: 3844354 - RNA, 16 nt, Human
uagcuguauugaauca

SEQ ID NO: 3844355 - RNA, 21 nt, Human
uagcugucccaucuggucauu

SEQ ID NO: 3844356 - RNA, 22 nt, Human
uagcuguccuuuuuccucucca

SEQ ID NO: 3844357 - RNA, 17 nt, Human
uagcugucuagaguagc

SEQ ID NO: 3844358 - RNA, 15 nt, Human
uagcugugaccugcu

SEQ ID NO: 3844359 - RNA, 17 nt, Human
uagcugugaccugcuga

SEQ ID NO: 3844360 - RNA, 22 nt, Human
uagcugugaccugcugagcucu

SEQ ID NO: 3844361 - RNA, 10 nt, Human
uagcuguggg

SEQ ID NO: 3844362 - RNA, 18 nt, Human
uagcuguggugagguggg

SEQ ID NO: 3844363 - RNA, 20 nt, Human
uagcuguuauuucuauuuuu

SEQ ID NO: 3844364 - RNA, 16 nt, Human
uagcuuaccagaagcu

SEQ ID NO: 3844365 - RNA, 15 nt, Human
uagcuuagaccucag

SEQ ID NO: 3844366 - RNA, 19 nt, Human
uagcuuagaccucagccug

SEQ ID NO: 3844367 - RNA, 13 nt, Human
uagcuuagagccu

SEQ ID NO: 3844368 - RNA, 19 nt, Human
uagcuuaucaauuugucau

SEQ ID NO: 3844369 - RNA, 15 nt, Human
uagcuuaucuacuuc

SEQ ID NO: 3844370 - RNA, 19 nt, Human
uagcuuauuuuuacaguua

SEQ ID NO: 3844371 - RNA, 21 nt, Human
uagcuucaccccaaucccagc

SEQ ID NO: 3844372 - RNA, 12 nt, Human
uagcuucaggaa

SEQ ID NO: 3844373 - RNA, 14 nt, Human
uagcuucagucauu

SEQ ID NO: 3844374 - RNA, 16 nt, Human
uagcuucagucauuaa

SEQ ID NO: 3844375 - RNA, 21 nt, Human
uagcuucagucauuaaauuac

SEQ ID NO: 3844376 - RNA, 22 nt, Human
uagcuucugcuuuucugcccug

SEQ ID NO: 3844377 - RNA, 19 nt, Human
uagcuugcgcauucucaug

SEQ ID NO: 3844378 - RNA, 15 nt, Human
uagcuugggacaaau

SEQ ID NO: 3844379 - RNA, 13 nt, Human
uagcuuguauagu

SEQ ID NO: 3844380 - RNA, 19 nt, Human
uagcuuguauaguguaaaa

SEQ ID NO: 3844381 - RNA, 16 nt, Human
uagcuuuaacuuaaau

SEQ ID NO: 3844382 - RNA, 19 nt, Human
uagcuuuauauauggacau

SEQ ID NO: 3844383 - RNA, 20 nt, Human
uagcuuuauauauggacaug

SEQ ID NO: 3844384 - RNA, 21 nt, Human
uagcuuuauauauggacaugg

SEQ ID NO: 3844385 - RNA, 18 nt, Human
uagcuuuauuuuuuaagu

SEQ ID NO: 3844386 - RNA, 13 nt, Human
uagcuuuguguuu

SEQ ID NO: 3844387 - RNA, 14 nt, Human
uagcuuuguguuug

SEQ ID NO: 3844388 - RNA, 15 nt, Human
uagcuuuguguuugg

SEQ ID NO: 3844389 - RNA, 21 nt, Human
uagcuuuguguuugguuuaca

SEQ ID NO: 3844390 - RNA, 14 nt, Human
uagcuuuuauugua

SEQ ID NO: 3844391 - RNA, 13 nt, Human
uagcuuuucaccu

SEQ ID NO: 3844392 - RNA, 12 nt, Human
uagcuuuugugg

SEQ ID NO: 3844393 - RNA, 19 nt, Human
uagcuuuugugucuuacau

SEQ ID NO: 3844394 - RNA, 15 nt, Human
uagcuuuuuaaaaca

SEQ ID NO: 3844395 - RNA, 18 nt, Human
uagcuuuuuaaaacauua

SEQ ID NO: 3844396 - RNA, 20 nt, Human
uagcuuuuuaauuaagcaaa

SEQ ID NO: 3844397 - RNA, 16 nt, Human
uaggaaaaacugauuu

SEQ ID NO: 3844398 - RNA, 22 nt, Human
uaggaaaagaaaucuauagaaa

SEQ ID NO: 3844399 - RNA, 13 nt, Human
uaggaaaauaaaa

SEQ ID NO: 3844400 - RNA, 13 nt, Human
uaggaaaauauuu

SEQ ID NO: 3844401 - RNA, 14 nt, Human
uaggaaauaaaacc

SEQ ID NO: 3844402 - RNA, 19 nt, Human
uaggaaauaaaaccuuuca

SEQ ID NO: 3844403 - RNA, 20 nt, Human
uaggaaauaaaaccuuucaa

SEQ ID NO: 3844404 - RNA, 18 nt, Human
uaggaaauauuuauuuua

SEQ ID NO: 3844405 - RNA, 20 nt, Human
uaggaaaucuagaaguaguc

SEQ ID NO: 3844406 - RNA, 14 nt, Human
uaggaaaugaaugu

SEQ ID NO: 3844407 - RNA, 18 nt, Human
uaggaaaugaaugugugu

SEQ ID NO: 3844408 - RNA, 19 nt, Human
uaggaaaugaaugugugug

SEQ ID NO: 3844409 - RNA, 21 nt, Human
uaggaaauguuuuuaauaaaa

SEQ ID NO: 3844410 - RNA, 13 nt, Human
uaggaacacuccu

SEQ ID NO: 3844411 - RNA, 14 nt, Human
uaggaacacuccuu

SEQ ID NO: 3844412 - RNA, 16 nt, Human
uaggaacauaugaaaa

SEQ ID NO: 3844413 - RNA, 22 nt, Human
uaggaaccgugguaugucugcc

SEQ ID NO: 3844414 - RNA, 19 nt, Human
uaggaagaaagaagacaaa

SEQ ID NO: 3844415 - RNA, 23 nt, Human
uaggaagaacguuuuuuccucag

SEQ ID NO: 3844416 - RNA, 13 nt, Human
uaggaagacuuug

SEQ ID NO: 3844417 - RNA, 14 nt, Human
uaggaagacuuugg

SEQ ID NO: 3844418 - RNA, 15 nt, Human
uaggaagacuuugga

SEQ ID NO: 3844419 - RNA, 16 nt, Human
uaggaagacuuuggaa

SEQ ID NO: 3844420 - RNA, 17 nt, Human
uaggaagacuuuggaaa

SEQ ID NO: 3844421 - RNA, 19 nt, Human
uaggaagagaaaccaggga

SEQ ID NO: 3844422 - RNA, 22 nt, Human
uaggaagaguagcauuucauuc

SEQ ID NO: 3844423 - RNA, 19 nt, Human
uaggaaggcacuucugccu

SEQ ID NO: 3844424 - RNA, 14 nt, Human
uaggaagguacugu

SEQ ID NO: 3844425 - RNA, 15 nt, Human
uaggaagguacugua

SEQ ID NO: 3844426 - RNA, 23 nt, Human
uaggaaggucauuuccauguaug

SEQ ID NO: 3844427 - RNA, 21 nt, Human
uaggaaggucucauucuucca

SEQ ID NO: 3844428 - RNA, 17 nt, Human
uaggaaguguaacagcu

SEQ ID NO: 3844429 - RNA, 22 nt, Human
uaggaaguugacuuauaguaca

SEQ ID NO: 3844430 - RNA, 22 nt, Human
uaggaauaucaauauaauguuu

SEQ ID NO: 3844431 - RNA, 17 nt, Human
uaggaauauuauauuug

SEQ ID NO: 3844432 - RNA, 23 nt, Human
uaggaauauuauauuuggaugca

SEQ ID NO: 3844433 - RNA, 12 nt, Human
uaggaaucagca

SEQ ID NO: 3844434 - RNA, 22 nt, Human
uaggaaucauucagaaauguug

SEQ ID NO: 3844435 - RNA, 16 nt, Human
uaggaauggaaaggau

SEQ ID NO: 3844436 - RNA, 17 nt, Human
uaggaaugugaaagcac

SEQ ID NO: 3844437 - RNA, 17 nt, Human
uaggaauucaucuuuug

SEQ ID NO: 3844438 - RNA, 21 nt, Human
uaggaauucccagcccaaagc

SEQ ID NO: 3844439 - RNA, 14 nt, Human
uaggaauuguguuu

SEQ ID NO: 3844440 - RNA, 16 nt, Human
uaggaauuguguuuau

SEQ ID NO: 3844441 - RNA, 18 nt, Human
uaggacaaaguauuugaa

SEQ ID NO: 3844442 - RNA, 15 nt, Human
uaggacaaggugcag

SEQ ID NO: 3844443 - RNA, 20 nt, Human
uaggacaaggugcaggcagg

SEQ ID NO: 3844444 - RNA, 18 nt, Human
uaggacaaucaguccccu

SEQ ID NO: 3844445 - RNA, 19 nt, Human
uagaagguucucuccuccc

SEQ ID NO: 3844446 - RNA, 21 nt, Human
uagaaguaacuggugauauau

SEQ ID NO: 3844447 - RNA, 17 nt, Human
uagaaguagaauugaca

SEQ ID NO: 3844448 - RNA, 18 nt, Human
uagaagucuuagauguau

SEQ ID NO: 3844449 - RNA, 24 nt, Human
uagaagucuucaugaaaugcuaug

SEQ ID NO: 3844450 - RNA, 16 nt, Human
uagaagugcuccccuc

SEQ ID NO: 3844451 - RNA, 16 nt, Human
uagaaguggaccagga

SEQ ID NO: 3844452 - RNA, 19 nt, Human
uagaagugggccaggacag

SEQ ID NO: 3844453 - RNA, 20 nt, Human
uagaagugggccaggacagg

SEQ ID NO: 3844454 - RNA, 18 nt, Human
uagaaguuguuugucauc

SEQ ID NO: 3844455 - RNA, 14 nt, Human
uagaaguuugucca

SEQ ID NO: 3844456 - RNA, 22 nt, Human
uagaaguuuuuguacuguaaag

SEQ ID NO: 3844457 - RNA, 14 nt, Human
uagaauaaaauugu

SEQ ID NO: 3844458 - RNA, 15 nt, Human
uagaauaaaauugua

SEQ ID NO: 3844459 - RNA, 19 nt, Human
uagaauaaaggcaguuuuc

SEQ ID NO: 3844460 - RNA, 21 nt, Human
uagaauaaaggcaguuuucua

SEQ ID NO: 3844461 - RNA, 15 nt, Human
uagaauaaaguugaa

SEQ ID NO: 3844462 - RNA, 17 nt, Human
uagaauaagaauuugca

SEQ ID NO: 3844463 - RNA, 17 nt, Human
uagaauaaucuugcuca

SEQ ID NO: 3844464 - RNA, 23 nt, Human
uagaauaccacaggaaccacaag

SEQ ID NO: 3844465 - RNA, 18 nt, Human
uagaauacuuuuuaaaag

SEQ ID NO: 3844466 - RNA, 18 nt, Human
uagaauagcauguuguag

SEQ ID NO: 3844467 - RNA, 18 nt, Human
uagaauauaauuaucgga

SEQ ID NO: 3844468 - RNA, 21 nt, Human
uagaauauaggucucuucucc

SEQ ID NO: 3844469 - RNA, 13 nt, Human
uagaauaugccuu

SEQ ID NO: 3844470 - RNA, 17 nt, Human
uagaauauucagacaaa

SEQ ID NO: 3844471 - RNA, 22 nt, Human
uagaauauucagacaaaaugga

SEQ ID NO: 3844472 - RNA, 20 nt, Human
uagaauauuuauuaccucug

SEQ ID NO: 3844473 - RNA, 15 nt, Human
uagaaucaaucagua

SEQ ID NO: 3844474 - RNA, 14 nt, Human
uagaaucaauuuaa

SEQ ID NO: 3844475 - RNA, 21 nt, Human
uagaaucccagcccccugacc

SEQ ID NO: 3844476 - RNA, 22 nt, Human
uagaaucccagcccccugacca

SEQ ID NO: 3844477 - RNA, 16 nt, Human
uagaaucccuguguua

SEQ ID NO: 3844478 - RNA, 18 nt, Human
uagaaucugcaauucaaa

SEQ ID NO: 3844479 - RNA, 17 nt, Human
uagaaugaaaacucauu

SEQ ID NO: 3844480 - RNA, 15 nt, Human
uagaaugaccuugua

SEQ ID NO: 3844481 - RNA, 16 nt, Human
uagaaugaccuuguaa

SEQ ID NO: 3844482 - RNA, 14 nt, Human
uagaaugagaucug

SEQ ID NO: 3844483 - RNA, 15 nt, Human
uagaauggugauuuu

SEQ ID NO: 3844484 - RNA, 17 nt, Human
uagaauggugauuuuaa

SEQ ID NO: 3844485 - RNA, 21 nt, Human
uagaauggugauuuuaaaugu

SEQ ID NO: 3844486 - RNA, 15 nt, Human
uagaauguaaagcuu

SEQ ID NO: 3844487 - RNA, 13 nt, Human
uagaauguauugu

SEQ ID NO: 3844488 - RNA, 17 nt, Human
uagaauguauuguaccu

SEQ ID NO: 3844489 - RNA, 18 nt, Human
uagaauguguuuucugaa

SEQ ID NO: 3844490 - RNA, 16 nt, Human
uagaauguuucauuug

SEQ ID NO: 3844491 - RNA, 14 nt, Human
uagaauguuuuccu

SEQ ID NO: 3844492 - RNA, 21 nt, Human
uagaauuaaaaaagcauacuu

SEQ ID NO: 3844493 - RNA, 15 nt, Human
uagaauuaacacaug

SEQ ID NO: 3844494 - RNA, 18 nt, Human
uagaauuaacacaugauc

SEQ ID NO: 3844495 - RNA, 16 nt, Human
uagaauuaccauuugu

SEQ ID NO: 3844496 - RNA, 23 nt, Human
uagaauuaguggcacuugcuuuu

SEQ ID NO: 3844497 - RNA, 15 nt, Human
uagaauuaucuaauu

SEQ ID NO: 3844498 - RNA, 19 nt, Human
uagaauuaucuaauuuaua

SEQ ID NO: 3844499 - RNA, 21 nt, Human
uagaauuaucuaauuuauaaa

SEQ ID NO: 3844500 - RNA, 23 nt, Human
uagaauuaucuaauuuauaaaaa

SEQ ID NO: 3844501 - RNA, 16 nt, Human
uagaauuauuuaaaca

SEQ ID NO: 3844502 - RNA, 23 nt, Human
uagaauuauuucacaaauaauag

SEQ ID NO: 3844503 - RNA, 19 nt, Human
uagaauuauuuuucacucu

SEQ ID NO: 3844504 - RNA, 14 nt, Human
uagaauucuguaua

SEQ ID NO: 3844505 - RNA, 16 nt, Human
uagaauucuguauaga

SEQ ID NO: 3844506 - RNA, 21 nt, Human
uagaauucuguauuggauaua

SEQ ID NO: 3844507 - RNA, 16 nt, Human
uagaauugaagguuuu

SEQ ID NO: 3844508 - RNA, 21 nt, Human
uagaauugacauugaaaucua

SEQ ID NO: 3844509 - RNA, 14 nt, Human
uagaauugcauuga

SEQ ID NO: 3844510 - RNA, 19 nt, Human
uagaauuggcugaacucau

SEQ ID NO: 3844511 - RNA, 13 nt, Human
uagaauuguuaua

SEQ ID NO: 3844512 - RNA, 15 nt, Human
uagaauuuauucaau

SEQ ID NO: 3844513 - RNA, 20 nt, Human
uagaauuuauucaauuccuc

SEQ ID NO: 3844514 - RNA, 20 nt, Human
uagaauuugauaugugaaca

SEQ ID NO: 3844515 - RNA, 13 nt, Human
uagaauuugauua

SEQ ID NO: 3844516 - RNA, 18 nt, Human
uagaauuuuuaauguuuu

SEQ ID NO: 3844517 - RNA, 14 nt, Human
uagacaaaguacau

SEQ ID NO: 3844518 - RNA, 15 nt, Human
uagacaaauacucau

SEQ ID NO: 3844519 - RNA, 17 nt, Human
uagacaaauacucaugu

SEQ ID NO: 3844520 - RNA, 19 nt, Human
uagacaaauacucaugugu

SEQ ID NO: 3844521 - RNA, 21 nt, Human
uagacaaauacucauguguau

SEQ ID NO: 3844522 - RNA, 17 nt, Human
uagacaaauagaaaaug

SEQ ID NO: 3844523 - RNA, 19 nt, Human
uagacaaauagaaaauggu

SEQ ID NO: 3844524 - RNA, 20 nt, Human
uauaauguguguauguguau

SEQ ID NO: 3844525 - RNA, 16 nt, Human
uauaauguuaguagaa

SEQ ID NO: 3844526 - RNA, 20 nt, Human
uauaauguuuauuaaaugcu

SEQ ID NO: 3844527 - RNA, 16 nt, Human
uauaauuaacauguua

SEQ ID NO: 3844528 - RNA, 17 nt, Human
uauaauuauguuauuga

SEQ ID NO: 3844529 - RNA, 22 nt, Human
uauaauuauguuauugaaaaaa

SEQ ID NO: 3844530 - RNA, 20 nt, Human
uauaauucacauuguauuca

SEQ ID NO: 3844531 - RNA, 21 nt, Human
uauaauucagaaggaucuuca

SEQ ID NO: 3844532 - RNA, 13 nt, Human
uauaauucccuau

SEQ ID NO: 3844533 - RNA, 12 nt, Human
uauaauucugua

SEQ ID NO: 3844534 - RNA, 15 nt, Human
uauaauucuguaaau

SEQ ID NO: 3844535 - RNA, 19 nt, Human
uauaauucuguacauagcc

SEQ ID NO: 3844536 - RNA, 21 nt, Human
uauaauucuguacauagccua

SEQ ID NO: 3844537 - RNA, 16 nt, Human
uauaauucuuucaaua

SEQ ID NO: 3844538 - RNA, 18 nt, Human
uauaauuguaucagaggc

SEQ ID NO: 3844539 - RNA, 22 nt, Human
uauaauuguaucguauagcugu

SEQ ID NO: 3844540 - RNA, 12 nt, Human
uauaauugugug

SEQ ID NO: 3844541 - RNA, 20 nt, Human
uauaauugugugauauuuca

SEQ ID NO: 3844542 - RNA, 16 nt, Human
uauaauuguugcauag

SEQ ID NO: 3844543 - RNA, 22 nt, Human
uauaauuguuuuaucugaauuu

SEQ ID NO: 3844544 - RNA, 21 nt, Human
uauaauuguuuuuuaucuuuu

SEQ ID NO: 3844545 - RNA, 22 nt, Human
uauaauuguuuuuuaucuuuuc

SEQ ID NO: 3844546 - RNA, 11 nt, Human
uauaauuuaau

SEQ ID NO: 3844547 - RNA, 16 nt, Human
uauaauuuaccuaaga

SEQ ID NO: 3844548 - RNA, 18 nt, Human
uauaauuuaccuaagauu

SEQ ID NO: 3844549 - RNA, 18 nt, Human
uauaauuuaccugaaguc

SEQ ID NO: 3844550 - RNA, 21 nt, Human
uauaauuuaccugaagucuuu

SEQ ID NO: 3844551 - RNA, 19 nt, Human
uauaauuuauuuccacuaa

SEQ ID NO: 3844552 - RNA, 20 nt, Human
uauaauuuccauuuacuuaa

SEQ ID NO: 3844553 - RNA, 16 nt, Human
uauaauuucgagauuu

SEQ ID NO: 3844554 - RNA, 18 nt, Human
uauaauuuuaagauuccu

SEQ ID NO: 3844555 - RNA, 15 nt, Human
uauaauuuugauagu

SEQ ID NO: 3844556 - RNA, 14 nt, Human
uauaauuuugugaa

SEQ ID NO: 3844557 - RNA, 20 nt, Human
uauaauuuuuuuauguuuug

SEQ ID NO: 3844558 - RNA, 20 nt, Human
uauaauuuuuuuauuacuga

SEQ ID NO: 3844559 - RNA, 22 nt, Human
uauacaaaccuaccaaaaugga

SEQ ID NO: 3844560 - RNA, 12 nt, Human
uauacaaauaua

SEQ ID NO: 3844561 - RNA, 16 nt, Human
uauacaaauauauugu

SEQ ID NO: 3844562 - RNA, 16 nt, Human
uauacaaauuaaaaag

SEQ ID NO: 3844563 - RNA, 17 nt, Human
uauacaaauuaaaaaga

SEQ ID NO: 3844564 - RNA, 16 nt, Human
uauacaacaaaggcaa

SEQ ID NO: 3844565 - RNA, 13 nt, Human
uauacaacagugc

SEQ ID NO: 3844566 - RNA, 14 nt, Human
uauacaacagugcu

SEQ ID NO: 3844567 - RNA, 20 nt, Human
uauacaacagugcuaaaaau

SEQ ID NO: 3844568 - RNA, 22 nt, Human
uauacaacccuggcauuauguc

SEQ ID NO: 3844569 - RNA, 17 nt, Human
uauacaaccuucauuua

SEQ ID NO: 3844570 - RNA, 19 nt, Human
uauacaaccuucauuuaaa

SEQ ID NO: 3844571 - RNA, 13 nt, Human
uauacaagauaag

SEQ ID NO: 3844572 - RNA, 17 nt, Human
uauacaagauaagcuuc

SEQ ID NO: 3844573 - RNA, 19 nt, Human
uauacaagauaagcuucca

SEQ ID NO: 3844574 - RNA, 13 nt, Human
uauacaaguacug

SEQ ID NO: 3844575 - RNA, 14 nt, Human
uauacaauauauaa

SEQ ID NO: 3844576 - RNA, 15 nt, Human
uauacaauauauaaa

SEQ ID NO: 3844577 - RNA, 11 nt, Human
uauacacacac

SEQ ID NO: 3844578 - RNA, 19 nt, Human
uauacacacacaaagagag

SEQ ID NO: 3844579 - RNA, 20 nt, Human
uauacacacacaaagagagu

SEQ ID NO: 3844580 - RNA, 12 nt, Human
uauacacacagc

SEQ ID NO: 3844581 - RNA, 11 nt, Human
uauacacauaa

SEQ ID NO: 3844582 - RNA, 17 nt, Human
uauacacauauaccuau

SEQ ID NO: 3844583 - RNA, 21 nt, Human
uauacacgaauagacaucaaa

SEQ ID NO: 3844584 - RNA, 14 nt, Human
uauacacuguaaug

SEQ ID NO: 3844585 - RNA, 22 nt, Human
uauacacuuacacuuuaugcac

SEQ ID NO: 3844586 - RNA, 18 nt, Human
uauacaggcauaaaauag

SEQ ID NO: 3844587 - RNA, 20 nt, Human
uauacaguaacuuuaugugu

SEQ ID NO: 3844588 - RNA, 22 nt, Human
uauacauaacaggguaaauuau

SEQ ID NO: 3844589 - RNA, 17 nt, Human
gcccauguguucccucu

SEQ ID NO: 3844590 - RNA, 14 nt, Human
gcccauguucugcc

SEQ ID NO: 3844591 - RNA, 15 nt, Human
gcccauguucugccc

SEQ ID NO: 3844592 - RNA, 16 nt, Human
gcccauguucugcccc

SEQ ID NO: 3844593 - RNA, 23 nt, Human
gcccauucauuccauucuggaag

SEQ ID NO: 3844594 - RNA, 22 nt, Human
gcccauuccccagccucucuuc

SEQ ID NO: 3844595 - RNA, 16 nt, Human
gcccauuccucaccuu

SEQ ID NO: 3844596 - RNA, 18 nt, Human
gcccauucuacuugcucu

SEQ ID NO: 3844597 - RNA, 15 nt, Human
gcccauucucucucc

SEQ ID NO: 3844598 - RNA, 21 nt, Human
gcccauuuacacuuuugagac

SEQ ID NO: 3844599 - RNA, 18 nt, Human
gcccauuucaauucucaa

SEQ ID NO: 3844600 - RNA, 15 nt, Human
gcccauuucgugagc

SEQ ID NO: 3844601 - RNA, 15 nt, Human
gcccauuucuccaga

SEQ ID NO: 3844602 - RNA, 20 nt, Human
gcccauuuggagggccuggg

SEQ ID NO: 3844603 - RNA, 15 nt, Human
gcccauuugggcaga

SEQ ID NO: 3844604 - RNA, 15 nt, Human
gccccaaaaccacag

SEQ ID NO: 3844605 - RNA, 23 nt, Human
gccccaaaaccacagcccuguca

SEQ ID NO: 3844606 - RNA, 21 nt, Human
gccccaaaacucuccucugcu

SEQ ID NO: 3844607 - RNA, 18 nt, Human
gccccaaacaaauaugca

SEQ ID NO: 3844608 - RNA, 20 nt, Human
gccccaaaggaaaaagcaca

SEQ ID NO: 3844609 - RNA, 15 nt, Human
gccccaaaggaagcu

SEQ ID NO: 3844610 - RNA, 22 nt, Human
gccccaaaguaaaagaaaccac

SEQ ID NO: 3844611 - RNA, 22 nt, Human
gccccaacccaaaccuggagau

SEQ ID NO: 3844612 - RNA, 15 nt, Human
gccccaacccuucuu

SEQ ID NO: 3844613 - RNA, 16 nt, Human
gccccaacccuucuuc

SEQ ID NO: 3844614 - RNA, 13 nt, Human
gccccaaccugcu

SEQ ID NO: 3844615 - RNA, 14 nt, Human
gccccaaccugcug

SEQ ID NO: 3844616 - RNA, 19 nt, Human
gccccaacuccuuccagcu

SEQ ID NO: 3844617 - RNA, 16 nt, Human
gccccaacucgggcuc

SEQ ID NO: 3844618 - RNA, 17 nt, Human
gccccaagaaggcuggg

SEQ ID NO: 3844619 - RNA, 21 nt, Human
gccccaagggguuucuguuuc

SEQ ID NO: 3844620 - RNA, 22 nt, Human
gccccaagggguuucuguuucu

SEQ ID NO: 3844621 - RNA, 16 nt, Human
gccccaaguccugaag

SEQ ID NO: 3844622 - RNA, 20 nt, Human
gccccaaguccugaagaggc

SEQ ID NO: 3844623 - RNA, 18 nt, Human
gccccaaucccuuuauua

SEQ ID NO: 3844624 - RNA, 15 nt, Human
gccccacaccagccc

SEQ ID NO: 3844625 - RNA, 16 nt, Human
gccccacaccuccucu

SEQ ID NO: 3844626 - RNA, 19 nt, Human
gccccacacuggggugccg

SEQ ID NO: 3844627 - RNA, 13 nt, Human
gccccacagccca

SEQ ID NO: 3844628 - RNA, 14 nt, Human
gccccacagcccac

SEQ ID NO: 3844629 - RNA, 15 nt, Human
gccccacauguccag

SEQ ID NO: 3844630 - RNA, 23 nt, Human
gccccacauguccagcaccuugu

SEQ ID NO: 3844631 - RNA, 20 nt, Human
gccccaccaccuaggccacu

SEQ ID NO: 3844632 - RNA, 12 nt, Human
gccccacccaga

SEQ ID NO: 3844633 - RNA, 13 nt, Human
gccccacccagau

SEQ ID NO: 3844634 - RNA, 15 nt, Human
gccccacccaggagg

SEQ ID NO: 3844635 - RNA, 16 nt, Human
gccccacccaggccag

SEQ ID NO: 3844636 - RNA, 15 nt, Human
gccccaccccagggc

SEQ ID NO: 3844637 - RNA, 15 nt, Human
gccccacccucagau

SEQ ID NO: 3844638 - RNA, 19 nt, Human
gccccacccugggcccugg

SEQ ID NO: 3844639 - RNA, 21 nt, Human
gccccaccggcgcgcucuucg

SEQ ID NO: 3844640 - RNA, 11 nt, Human
gccccaccugc

SEQ ID NO: 3844641 - RNA, 16 nt, Human
gccccaccugcagcuc

SEQ ID NO: 3844642 - RNA, 17 nt, Human
gccccaccugccacuag

SEQ ID NO: 3844643 - RNA, 18 nt, Human
gccccaccuggcccucuc

SEQ ID NO: 3844644 - RNA, 21 nt, Human
gccccaccuuuauuaaaaucu

SEQ ID NO: 3844645 - RNA, 22 nt, Human
gccccacucccuugcuggcccc

SEQ ID NO: 3844646 - RNA, 23 nt, Human
gccccacucccuugcuggcccca

SEQ ID NO: 3844647 - RNA, 12 nt, Human
gccccacuccuc

SEQ ID NO: 3844648 - RNA, 23 nt, Human
gccccacugaugcuguucucuuc

SEQ ID NO: 3844649 - RNA, 20 nt, Human
gccccacugccagcagcagc

SEQ ID NO: 3844650 - RNA, 11 nt, Human
gccccagagac

SEQ ID NO: 3844651 - RNA, 17 nt, Human
gccccagagacucagag

SEQ ID NO: 3844652 - RNA, 12 nt, Human
gccccagagcug

SEQ ID NO: 3844653 - RNA, 19 nt, Human
gccccagaggccucucucu

SEQ ID NO: 3844654 - RNA, 19 nt, Human
gccccagaucaccagcccg

SEQ ID NO: 3844655 - RNA, 20 nt, Human
gccccagaucaccagcccgg

SEQ ID NO: 3844656 - RNA, 19 nt, Human
gccccagcaccucagccug

SEQ ID NO: 3844657 - RNA, 23 nt, Human
gccccagcacuaaagcaguggac

SEQ ID NO: 3844658 - RNA, 19 nt, Human
gccccagcacuaacguaaa

SEQ ID NO: 3844659 - RNA, 10 nt, Human
gccccagcca

SEQ ID NO: 3844660 - RNA, 12 nt, Human
gccccagcccac

SEQ ID NO: 3844661 - RNA, 20 nt, Human
gccccagcccacccuccugu

SEQ ID NO: 3844662 - RNA, 16 nt, Human
gccccagcccugcugg

SEQ ID NO: 3844663 - RNA, 17 nt, Human
gccccagcccugcuggg

SEQ ID NO: 3844664 - RNA, 16 nt, Human
gccccagccucccuga

SEQ ID NO: 3844665 - RNA, 11 nt, Human
gccccagccug

SEQ ID NO: 3844666 - RNA, 12 nt, Human
gccccagccugc

SEQ ID NO: 3844667 - RNA, 15 nt, Human
gccccagccugcuag

SEQ ID NO: 3844668 - RNA, 16 nt, Human
gccccagccuggccca

SEQ ID NO: 3844669 - RNA, 18 nt, Human
gccccagccuggcccagc

SEQ ID NO: 3844670 - RNA, 14 nt, Human
gccccagcucuggc

SEQ ID NO: 3844671 - RNA, 11 nt, Human
gccccagcuga

SEQ ID NO: 3844672 - RNA, 11 nt, Human
gccccaggacc

SEQ ID NO: 3844673 - RNA, 18 nt, Human
gccccaggaccagcucag

SEQ ID NO: 3844674 - RNA, 19 nt, Human
gccccaggaccagcucagg

SEQ ID NO: 3844675 - RNA, 15 nt, Human
gccccaggcaggcug

SEQ ID NO: 3844676 - RNA, 20 nt, Human
gccccaggcaggcugugcgc

SEQ ID NO: 3844677 - RNA, 12 nt, Human
gccccaggccug

SEQ ID NO: 3844678 - RNA, 12 nt, Human
gccccagggcac

SEQ ID NO: 3844679 - RNA, 18 nt, Human
gccccaggggaacacugg

SEQ ID NO: 3844680 - RNA, 20 nt, Human
gccccagggucuucccuacc

SEQ ID NO: 3844681 - RNA, 21 nt, Human
gccccagggucuucccuaccu

SEQ ID NO: 3844682 - RNA, 16 nt, Human
gccccagguagaaacu

SEQ ID NO: 3844683 - RNA, 13 nt, Human
gccccagucagcc

SEQ ID NO: 3844684 - RNA, 13 nt, Human
gccccagugccca

SEQ ID NO: 3844685 - RNA, 14 nt, Human
gccccagugcccac

SEQ ID NO: 3844686 - RNA, 16 nt, Human
gccccaucagcuccag

SEQ ID NO: 3844687 - RNA, 17 nt, Human
gccccaucagcuccagc

SEQ ID NO: 3844688 - RNA, 19 nt, Human
gccccaucaggacucuugu

SEQ ID NO: 3844689 - RNA, 18 nt, Human
gccccaucccaaacccuu

SEQ ID NO: 3844690 - RNA, 14 nt, Human
gccccauccuccag

SEQ ID NO: 3844691 - RNA, 12 nt, Human
gccccaucuccc

SEQ ID NO: 3844692 - RNA, 17 nt, Human
gccccaucuccccucag

SEQ ID NO: 3844693 - RNA, 15 nt, Human
gccccaucugcgggg

SEQ ID NO: 3844694 - RNA, 15 nt, Human
gccccaucuucaccc

SEQ ID NO: 3844695 - RNA, 18 nt, Human
gccccaugaccuccagcu

SEQ ID NO: 3844696 - RNA, 16 nt, Human
gccccaugccugucca

SEQ ID NO: 3844697 - RNA, 20 nt, Human
gccccaugccuguccagccu

SEQ ID NO: 3844698 - RNA, 23 nt, Human
gccccaugccuguccagccuggg

SEQ ID NO: 3844699 - RNA, 13 nt, Human
gccccaugcugga

SEQ ID NO: 3844700 - RNA, 14 nt, Human
uauaucaguuugau

SEQ ID NO: 3844701 - RNA, 13 nt, Human
uauaucaugcaaa

SEQ ID NO: 3844702 - RNA, 14 nt, Human
uauaucaugcaaaa

SEQ ID NO: 3844703 - RNA, 20 nt, Human
uauaucaugcuuuaaagugu

SEQ ID NO: 3844704 - RNA, 18 nt, Human
uauaucauguaaagaaau

SEQ ID NO: 3844705 - RNA, 15 nt, Human
uauauccauguacug

SEQ ID NO: 3844706 - RNA, 14 nt, Human
uauaucccagaaau

SEQ ID NO: 3844707 - RNA, 14 nt, Human
uauauccccugcua

SEQ ID NO: 3844708 - RNA, 20 nt, Human
uauauccuuucuaacaaaaa

SEQ ID NO: 3844709 - RNA, 19 nt, Human
uauauccuuuucuguguuu

SEQ ID NO: 3844710 - RNA, 17 nt, Human
uauaucguuaucacugu

SEQ ID NO: 3844711 - RNA, 18 nt, Human
uauaucuaaauugaauaa

SEQ ID NO: 3844712 - RNA, 22 nt, Human
uauaucuagguuuaugacagua

SEQ ID NO: 3844713 - RNA, 23 nt, Human
uauaucugaggaauucuguauag

SEQ ID NO: 3844714 - RNA, 17 nt, Human
uauaucugcuucagugg

SEQ ID NO: 3844715 - RNA, 20 nt, Human
uauaucugggcuggccaguu

SEQ ID NO: 3844716 - RNA, 11 nt, Human
uauaucuguau

SEQ ID NO: 3844717 - RNA, 14 nt, Human
uauaucuguaugua

SEQ ID NO: 3844718 - RNA, 17 nt, Human
uauaucuguuuuacugc

SEQ ID NO: 3844719 - RNA, 21 nt, Human
uauaucuuggcagguaggaau

SEQ ID NO: 3844720 - RNA, 19 nt, Human
uauaugaaaacuauacaac

SEQ ID NO: 3844721 - RNA, 15 nt, Human
uauaugaacauagac

SEQ ID NO: 3844722 - RNA, 16 nt, Human
uauaugagaagaauag

SEQ ID NO: 3844723 - RNA, 17 nt, Human
uauaugagaagaauagc

SEQ ID NO: 3844724 - RNA, 15 nt, Human
uauaugauuuauagu

SEQ ID NO: 3844725 - RNA, 19 nt, Human
uauaugcauauauauaugu

SEQ ID NO: 3844726 - RNA, 22 nt, Human
uauaugcauauauauaugugug

SEQ ID NO: 3844727 - RNA, 17 nt, Human
uauaugccuuuuuccua

SEQ ID NO: 3844728 - RNA, 18 nt, Human
uauaugcuauuucuauau

SEQ ID NO: 3844729 - RNA, 17 nt, Human
uauaugcuuacugauau

SEQ ID NO: 3844730 - RNA, 21 nt, Human
uauaugcuuacugauauauuu

SEQ ID NO: 3844731 - RNA, 17 nt, Human
uauauggaaauucugcu

SEQ ID NO: 3844732 - RNA, 15 nt, Human
uauauggaagaaagu

SEQ ID NO: 3844733 - RNA, 16 nt, Human
uauauggaagaaagua

SEQ ID NO: 3844734 - RNA, 19 nt, Human
uauauggcagaguuguaaa

SEQ ID NO: 3844735 - RNA, 15 nt, Human
gcccuaauucagcca

SEQ ID NO: 3844736 - RNA, 15 nt, Human
gcccuacaccuugag

SEQ ID NO: 3844737 - RNA, 22 nt, Human
gcccuaccagcgcccgcugggc

SEQ ID NO: 3844738 - RNA, 14 nt, Human
gcccuacuauucag

SEQ ID NO: 3844739 - RNA, 15 nt, Human
gcccuagagccugcc

SEQ ID NO: 3844740 - RNA, 21 nt, Human
gcccuagagccugccuggagc

SEQ ID NO: 3844741 - RNA, 21 nt, Human
gcccuaggauaaaaagccagg

SEQ ID NO: 3844742 - RNA, 12 nt, Human
gcccuaggcucc

SEQ ID NO: 3844743 - RNA, 21 nt, Human
gcccuaugggccugccgggcu

SEQ ID NO: 3844744 - RNA, 15 nt, Human
gcccuauuuuugcaa

SEQ ID NO: 3844745 - RNA, 19 nt, Human
gcccucaaaaugacagcca

SEQ ID NO: 3844746 - RNA, 15 nt, Human
gcccucaaggccucc

SEQ ID NO: 3844747 - RNA, 21 nt, Human
gcccucaaggccucccacagu

SEQ ID NO: 3844748 - RNA, 22 nt, Human
gcccucaaggccucccacagug

SEQ ID NO: 3844749 - RNA, 17 nt, Human
gcccucaccacccacuu

SEQ ID NO: 3844750 - RNA, 20 nt, Human
gcccucaccccugcccuggg

SEQ ID NO: 3844751 - RNA, 21 nt, Human
gcccucaccccugguucucau

SEQ ID NO: 3844752 - RNA, 16 nt, Human
gcccucacccuggggc

SEQ ID NO: 3844753 - RNA, 14 nt, Human
gcccucagaacccu

SEQ ID NO: 3844754 - RNA, 18 nt, Human
gcccucagaacccuuggc

SEQ ID NO: 3844755 - RNA, 16 nt, Human
gcccucagaugucccu

SEQ ID NO: 3844756 - RNA, 13 nt, Human
uagucacuuuuuu

SEQ ID NO: 3844757 - RNA, 19 nt, Human
uagucagaauuagcugcuu

SEQ ID NO: 3844758 - RNA, 15 nt, Human
uagucauagaagaac

SEQ ID NO: 3844759 - RNA, 17 nt, Human
uagucauauauuaaaca

SEQ ID NO: 3844760 - RNA, 13 nt, Human
uagucaugugacc

SEQ ID NO: 3844761 - RNA, 19 nt, Human
uagucauuuacuaaacaua

SEQ ID NO: 3844762 - RNA, 13 nt, Human
uagucauuuauuu

SEQ ID NO: 3844763 - RNA, 17 nt, Human
uagucauuuucaagacu

SEQ ID NO: 3844764 - RNA, 21 nt, Human
uaguccaaaaagcuccugggg

SEQ ID NO: 3844765 - RNA, 13 nt, Human
uaguccaaaauua

SEQ ID NO: 3844766 - RNA, 18 nt, Human
uaguccaaugucuuuuua

SEQ ID NO: 3844767 - RNA, 22 nt, Human
uaguccagcuuuguucuucuua

SEQ ID NO: 3844768 - RNA, 21 nt, Human
uagucccccaacucugagccc

SEQ ID NO: 3844769 - RNA, 16 nt, Human
uagucccuuccccucc

SEQ ID NO: 3844770 - RNA, 20 nt, Human
uagucccuuccccucccugg

SEQ ID NO: 3844771 - RNA, 12 nt, Human
uaguccugugaa

SEQ ID NO: 3844772 - RNA, 14 nt, Human
uaguccuuggcaua

SEQ ID NO: 3844773 - RNA, 21 nt, Human
uagucgugagcucuugugagg

SEQ ID NO: 3844774 - RNA, 18 nt, Human
uagucuaaccaaaugcau

SEQ ID NO: 3844775 - RNA, 19 nt, Human
uagucuaaccaaaugcauc

SEQ ID NO: 3844776 - RNA, 23 nt, Human
uagucuaaggaugcuaaaccuua

SEQ ID NO: 3844777 - RNA, 20 nt, Human
uagucuacucuuaagccauc

SEQ ID NO: 3844778 - RNA, 19 nt, Human
uagucucaguuuguguguc

SEQ ID NO: 3844779 - RNA, 21 nt, Human
uagucuccuuugcacugaggg

SEQ ID NO: 3844780 - RNA, 22 nt, Human
uagucuccuuugcacugagggc

SEQ ID NO: 3844781 - RNA, 23 nt, Human
uagucucucuggggccacacaga

SEQ ID NO: 3844782 - RNA, 13 nt, Human
uagucucuugauu

SEQ ID NO: 3844783 - RNA, 21 nt, Human
uagucucuuguauuaaacucu

SEQ ID NO: 3844784 - RNA, 12 nt, Human
uagucucuuuau

SEQ ID NO: 3844785 - RNA, 13 nt, Human
uagucucuuuauu

SEQ ID NO: 3844786 - RNA, 21 nt, Human
uagucugaagugaaguacaga

SEQ ID NO: 3844787 - RNA, 12 nt, Human
uagucugcucac

SEQ ID NO: 3844788 - RNA, 13 nt, Human
uagucuuaccuaa

SEQ ID NO: 3844789 - RNA, 15 nt, Human
uagucuucaagcaga

SEQ ID NO: 3844790 - RNA, 14 nt, Human
uagucuucucauag

SEQ ID NO: 3844791 - RNA, 19 nt, Human
uagucuucucauagcauua

SEQ ID NO: 3844792 - RNA, 12 nt, Human
uagucuuuugcu

SEQ ID NO: 3844793 - RNA, 13 nt, Human
uagucuuuugcuu

SEQ ID NO: 3844794 - RNA, 16 nt, Human
uagucuuuugcuuuug

SEQ ID NO: 3844795 - RNA, 17 nt, Human
uagucuuuugcuuuugc

SEQ ID NO: 3844796 - RNA, 14 nt, Human
uagugaaacuuuuc

SEQ ID NO: 3844797 - RNA, 21 nt, Human
uagugaaaggaagauaaacgu

SEQ ID NO: 3844798 - RNA, 23 nt, Human
uagugaaaugaauauuuaaauaa

SEQ ID NO: 3844799 - RNA, 14 nt, Human
uagugaacuugaaa

SEQ ID NO: 3844800 - RNA, 21 nt, Human
uagugaaggcuucucucugug

SEQ ID NO: 3844801 - RNA, 17 nt, Human
uagugacccggaggcca

SEQ ID NO: 3844802 - RNA, 13 nt, Human
uagugagaagaau

SEQ ID NO: 3844803 - RNA, 19 nt, Human
uagugagaagaauauuguu

SEQ ID NO: 3844804 - RNA, 17 nt, Human
uagugauauuucucuag

SEQ ID NO: 3844805 - RNA, 14 nt, Human
uagugaucacagca

SEQ ID NO: 3844806 - RNA, 15 nt, Human
uagugaucacagcag

SEQ ID NO: 3844807 - RNA, 19 nt, Human
uagugaugaugguucacgu

SEQ ID NO: 3844808 - RNA, 22 nt, Human
uagugauuuuuaugccaccuga

SEQ ID NO: 3844809 - RNA, 14 nt, Human
uagugcaauauauu

SEQ ID NO: 3844810 - RNA, 16 nt, Human
uagugcaauauauuuu

SEQ ID NO: 3844811 - RNA, 15 nt, Human
uagugcagcagggca

SEQ ID NO: 3844812 - RNA, 20 nt, Human
uagugcagcugaaauugaaa

SEQ ID NO: 3844813 - RNA, 21 nt, Human
uagugcagcugaaauugaaaa

SEQ ID NO: 3844814 - RNA, 22 nt, Human
uagugcagcugaaauugaaaag

SEQ ID NO: 3844815 - RNA, 13 nt, Human
uagugcagcugau

SEQ ID NO: 3844816 - RNA, 14 nt, Human
uagugcagcugauu

SEQ ID NO: 3844817 - RNA, 22 nt, Human
uagugcauccaguuaaccaagu

SEQ ID NO: 3844818 - RNA, 16 nt, Human
uagugcaucuuugccu

SEQ ID NO: 3844819 - RNA, 20 nt, Human
uagugcauuguuucuguggg

SEQ ID NO: 3844820 - RNA, 21 nt, Human
uagugcauuguuucugugggc

SEQ ID NO: 3844821 - RNA, 20 nt, Human
uagugccagaauuuuaggaa

SEQ ID NO: 3844822 - RNA, 21 nt, Human
uagugcgauguuucaggaggc

SEQ ID NO: 3844823 - RNA, 14 nt, Human
uagugcugaagcuu

SEQ ID NO: 3844824 - RNA, 18 nt, Human
uagugcugaagcuuauua

SEQ ID NO: 3844825 - RNA, 13 nt, Human
uagugcugcugaa

SEQ ID NO: 3844826 - RNA, 12 nt, Human
uagugcugggau

SEQ ID NO: 3844827 - RNA, 21 nt, Human
uagugcuuaaaaaucauugau

SEQ ID NO: 3844828 - RNA, 15 nt, Human
uagugcuuugagaga

SEQ ID NO: 3844829 - RNA, 14 nt, Human
uaguggaaaaacac

SEQ ID NO: 3844830 - RNA, 17 nt, Human
uaguggacccugaaaug

SEQ ID NO: 3844831 - RNA, 17 nt, Human
uaguggauuacugccau

SEQ ID NO: 3844832 - RNA, 15 nt, Human
uaguggcauggagaa

SEQ ID NO: 3844833 - RNA, 14 nt, Human
uaguggcuucaaaa

SEQ ID NO: 3844834 - RNA, 20 nt, Human
uaguggcuucauuagagcag

SEQ ID NO: 3844835 - RNA, 16 nt, Human
uaguggcuuguccuca

SEQ ID NO: 3844836 - RNA, 19 nt, Human
uaguggucuuuguaagagu

SEQ ID NO: 3844837 - RNA, 14 nt, Human
uaguguaauaagac

SEQ ID NO: 3844838 - RNA, 17 nt, Human
uaguguaauaagacuua

SEQ ID NO: 3844839 - RNA, 23 nt, Human
uaguguacauuucuauaaauaga

SEQ ID NO: 3844840 - RNA, 22 nt, Human
uaguguaccuccucucaguguu

SEQ ID NO: 3844841 - RNA, 18 nt, Human
uaguguaggcuuuacuua

SEQ ID NO: 3844842 - RNA, 15 nt, Human
uaguguaugauuacu

SEQ ID NO: 3844843 - RNA, 14 nt, Human
uagugucacugcuu

SEQ ID NO: 3844844 - RNA, 17 nt, Human
uagugucacuuaccuag

SEQ ID NO: 3844845 - RNA, 17 nt, Human
uaguguccuaugcaaua

SEQ ID NO: 3844846 - RNA, 19 nt, Human
uagugucuggaucaguaaa

SEQ ID NO: 3844847 - RNA, 22 nt, Human
uagugugggaggcuccuguuag

SEQ ID NO: 3844848 - RNA, 19 nt, Human
uaguguguucugauuagaa

SEQ ID NO: 3844849 - RNA, 20 nt, Human
uaguguguucugauuagaaa

SEQ ID NO: 3844850 - RNA, 16 nt, Human
uaguguuaaucaauuu

SEQ ID NO: 3844851 - RNA, 16 nt, Human
uaguguuauaugaaca

SEQ ID NO: 3844852 - RNA, 17 nt, Human
uaguguuauaugaacau

SEQ ID NO: 3844853 - RNA, 18 nt, Human
uaguguuauaugaacaua

SEQ ID NO: 3844854 - RNA, 14 nt, Human
uaguguuauugcca

SEQ ID NO: 3844855 - RNA, 13 nt, Human
uaguguucauaaa

SEQ ID NO: 3844856 - RNA, 16 nt, Human
uaguguuggagaagaa

SEQ ID NO: 3844857 - RNA, 17 nt, Human
uaguguuggagaagaac

SEQ ID NO: 3844858 - RNA, 23 nt, Human
uaguguuggagaagaacugaaau

SEQ ID NO: 3844859 - RNA, 16 nt, Human
uaguguuuuaaaacac

SEQ ID NO: 3844860 - RNA, 18 nt, Human
uaguguuuuaagaaaugu

SEQ ID NO: 3844861 - RNA, 20 nt, Human
uaguguuuuaagaaauguag

SEQ ID NO: 3844862 - RNA, 21 nt, Human
uaguguuuucaauuuuaaaca

SEQ ID NO: 3844863 - RNA, 22 nt, Human
uaguguuuucaauuuuaaacau

SEQ ID NO: 3844864 - RNA, 23 nt, Human
uaguguuuucaauuuuaaacaua

SEQ ID NO: 3844865 - RNA, 21 nt, Human
uaguuaaaaaaaaaaaaagga

SEQ ID NO: 3844866 - RNA, 17 nt, Human
uaguuaaagaaaggaaa

SEQ ID NO: 3844867 - RNA, 21 nt, Human
uaguuaaagaaaggaaaagaa

SEQ ID NO: 3844868 - RNA, 20 nt, Human
uaguuaacacacuaccgaau

SEQ ID NO: 3844869 - RNA, 19 nt, Human
uaguuaagacaugauuucc

SEQ ID NO: 3844870 - RNA, 23 nt, Human
uaguuaagacaugauuuccuuga

SEQ ID NO: 3844871 - RNA, 20 nt, Human
uaguuaaucaucaagagaau

SEQ ID NO: 3844872 - RNA, 13 nt, Human
uaguuaauucugu

SEQ ID NO: 3844873 - RNA, 12 nt, Human
uaguuaauuuau

SEQ ID NO: 3844874 - RNA, 14 nt, Human
uaguuaauuuaucu

SEQ ID NO: 3844875 - RNA, 14 nt, Human
uaguuacagcugug

SEQ ID NO: 3844876 - RNA, 14 nt, Human
uaguuaccuuauag

SEQ ID NO: 3844877 - RNA, 18 nt, Human
uaguuaccuuauaguuac

SEQ ID NO: 3844878 - RNA, 15 nt, Human
uaguuacuauaugcc

SEQ ID NO: 3844879 - RNA, 11 nt, Human
uaguuacugug

SEQ ID NO: 3844880 - RNA, 20 nt, Human
uauauucauucuuuuugaaa

SEQ ID NO: 3844881 - RNA, 21 nt, Human
uauauuccagguuuaaguaga

SEQ ID NO: 3844882 - RNA, 22 nt, Human
uauauuccagguuuaaguagau

SEQ ID NO: 3844883 - RNA, 19 nt, Human
uauauuccauauauuagca

SEQ ID NO: 3844884 - RNA, 18 nt, Human
uauauucccaauagcaac

SEQ ID NO: 3844885 - RNA, 19 nt, Human
uauauuccucuugcauuuc

SEQ ID NO: 3844886 - RNA, 16 nt, Human
uauauucuauuuuaca

SEQ ID NO: 3844887 - RNA, 19 nt, Human
uauauucucagcagagugc

SEQ ID NO: 3844888 - RNA, 17 nt, Human
uauauugaagacaauuu

SEQ ID NO: 3844889 - RNA, 18 nt, Human
uauauugaagacaauuug

SEQ ID NO: 3844890 - RNA, 23 nt, Human
uauauugauaacagcacugacua

SEQ ID NO: 3844891 - RNA, 16 nt, Human
uauauugauaagaucu

SEQ ID NO: 3844892 - RNA, 16 nt, Human
uauauugauccagaaa

SEQ ID NO: 3844893 - RNA, 18 nt, Human
uauauugguaacauccuu

SEQ ID NO: 3844894 - RNA, 21 nt, Human
uauauugguaacauccuuucu

SEQ ID NO: 3844895 - RNA, 19 nt, Human
uauauugguuuuaugauga

SEQ ID NO: 3844896 - RNA, 12 nt, Human
uauauuguaaga

SEQ ID NO: 3844897 - RNA, 15 nt, Human
uauauuguaagaaau

SEQ ID NO: 3844898 - RNA, 12 nt, Human
uauauuguaauu

SEQ ID NO: 3844899 - RNA, 17 nt, Human
uauauuguucacuucuu

SEQ ID NO: 3844900 - RNA, 19 nt, Human
uauauuguucagcaugcaa

SEQ ID NO: 3844901 - RNA, 20 nt, Human
uauauuuaagcaacaucuuu

SEQ ID NO: 3844902 - RNA, 22 nt, Human
uauauuuaaguauucaagaaag

SEQ ID NO: 3844903 - RNA, 11 nt, Human
uauauuuaaug

SEQ ID NO: 3844904 - RNA, 15 nt, Human
uauauuuaaugauaa

SEQ ID NO: 3844905 - RNA, 19 nt, Human
uauauuuaaugcauuaaac

SEQ ID NO: 3844906 - RNA, 12 nt, Human
uauauuuacaaa

SEQ ID NO: 3844907 - RNA, 14 nt, Human
uauauuuacaaaug

SEQ ID NO: 3844908 - RNA, 24 nt, Human
uauauuuacagugaaaauguaagc

SEQ ID NO: 3844909 - RNA, 19 nt, Human
uauauuuacuaaaauggac

SEQ ID NO: 3844910 - RNA, 21 nt, Human
uauauuuacuaaaauggacug

SEQ ID NO: 3844911 - RNA, 23 nt, Human
uauauuuagcuccaaaccuucac

SEQ ID NO: 3844912 - RNA, 14 nt, Human
uauauuuagugcug

SEQ ID NO: 3844913 - RNA, 15 nt, Human
uauauuuauaacuca

SEQ ID NO: 3844914 - RNA, 23 nt, Human
uauauuuauaacucaucauaaaa

SEQ ID NO: 3844915 - RNA, 24 nt, Human
uauauuuauaacucaucauaaaau

SEQ ID NO: 3844916 - RNA, 19 nt, Human
uauauuuauuacuguaaga

SEQ ID NO: 3844917 - RNA, 16 nt, Human
uauauuucacuauuuu

SEQ ID NO: 3844918 - RNA, 18 nt, Human
uauauuuccuauaccauu

SEQ ID NO: 3844919 - RNA, 11 nt, Human
uauauuuccuu

SEQ ID NO: 3844920 - RNA, 16 nt, Human
uauauuuccuuuaugu

SEQ ID NO: 3844921 - RNA, 17 nt, Human
uauauuuccuuuaugug

SEQ ID NO: 3844922 - RNA, 23 nt, Human
uauauuucuauuuuauuaugaag

SEQ ID NO: 3844923 - RNA, 13 nt, Human
uauauuugaaaua

SEQ ID NO: 3844924 - RNA, 16 nt, Human
uauauuugugcuauag

SEQ ID NO: 3844925 - RNA, 14 nt, Human
uauauuuuaauuug

SEQ ID NO: 3844926 - RNA, 18 nt, Human
uauauuuuauauaaagua

SEQ ID NO: 3844927 - RNA, 23 nt, Human
uauauuuucaugacuuuuccaug

SEQ ID NO: 3844928 - RNA, 14 nt, Human
uauauuuuccuaua

SEQ ID NO: 3844929 - RNA, 16 nt, Human
uauauuuucguaugaa

SEQ ID NO: 3844930 - RNA, 20 nt, Human
uauauuuucguaugaaaaug

SEQ ID NO: 3844931 - RNA, 11 nt, Human
uauauuuugac

SEQ ID NO: 3844932 - RNA, 17 nt, Human
uauauuuuguaugcaag

SEQ ID NO: 3844933 - RNA, 22 nt, Human
uauauuuugugugaaauugcau

SEQ ID NO: 3844934 - RNA, 19 nt, Human
uauauuuuuaagauaauaa

SEQ ID NO: 3844935 - RNA, 18 nt, Human
uauauuuuuaauaaaagu

SEQ ID NO: 3844936 - RNA, 13 nt, Human
uauauuuuuauau

SEQ ID NO: 3844937 - RNA, 18 nt, Human
uauauuuuuauauuuagu

SEQ ID NO: 3844938 - RNA, 18 nt, Human
uauauuuuugguugucaa

SEQ ID NO: 3844939 - RNA, 19 nt, Human
uauauuuuugguugucaau

SEQ ID NO: 3844940 - RNA, 21 nt, Human
uauauuuuuguuuguuuugug

SEQ ID NO: 3844941 - RNA, 19 nt, Human
uauauuuuuuguuaaauga

SEQ ID NO: 3844942 - RNA, 16 nt, Human
uauauuuuuuuaacuu

SEQ ID NO: 3844943 - RNA, 21 nt, Human
uauauuuuuuuuuaagcucug

SEQ ID NO: 3844944 - RNA, 19 nt, Human
uaucaaaacuuucuuuucu

SEQ ID NO: 3844945 - RNA, 18 nt, Human
uaucaaaauaaauugaaa

SEQ ID NO: 3844946 - RNA, 22 nt, Human
uaucaaaaugcucuuauuucau

SEQ ID NO: 3844947 - RNA, 16 nt, Human
uaucaaacugaagcca

SEQ ID NO: 3844948 - RNA, 18 nt, Human
uaucaaagaauaagaaaa

SEQ ID NO: 3844949 - RNA, 21 nt, Human
uaucaaagaccuuguguguau

SEQ ID NO: 3844950 - RNA, 21 nt, Human
uaucaaaggcacauggaauau

SEQ ID NO: 3844951 - RNA, 18 nt, Human
uaucaaagucauuaaaga

SEQ ID NO: 3844952 - RNA, 20 nt, Human
uaucaaagucauuaaagaca

SEQ ID NO: 3844953 - RNA, 19 nt, Human
uaucaaauauuagauguga

SEQ ID NO: 3844954 - RNA, 21 nt, Human
uaucaaauauuagaugugauu

SEQ ID NO: 3844955 - RNA, 23 nt, Human
uaucaaauauuagaugugauuua

SEQ ID NO: 3844956 - RNA, 15 nt, Human
uaucaaaucuaccac

SEQ ID NO: 3844957 - RNA, 17 nt, Human
uaucaaccccagacacu

SEQ ID NO: 3844958 - RNA, 19 nt, Human
uaucaacuuccuaaauauu

SEQ ID NO: 3844959 - RNA, 13 nt, Human
uaucaacuuuaau

SEQ ID NO: 3844960 - RNA, 15 nt, Human
uaucaacuuuaauca

SEQ ID NO: 3844961 - RNA, 12 nt, Human
uaucaagaaagu

SEQ ID NO: 3844962 - RNA, 15 nt, Human
uaucaagcuaauaaa

SEQ ID NO: 3844963 - RNA, 17 nt, Human
uaucaaguggcaugugc

SEQ ID NO: 3844964 - RNA, 14 nt, Human
uaucaagugucuuc

SEQ ID NO: 3844965 - RNA, 15 nt, Human
gccggcagccccagc

SEQ ID NO: 3844966 - RNA, 21 nt, Human
gccggcagccccagccugcua

SEQ ID NO: 3844967 - RNA, 11 nt, Human
gccggccagcc

SEQ ID NO: 3844968 - RNA, 13 nt, Human
gccggccagccag

SEQ ID NO: 3844969 - RNA, 14 nt, Human
gccggccagccagc

SEQ ID NO: 3844970 - RNA, 17 nt, Human
gccggccaguggccuuc

SEQ ID NO: 3844971 - RNA, 12 nt, Human
gccggccccagg

SEQ ID NO: 3844972 - RNA, 12 nt, Human
gccggcccuggg

SEQ ID NO: 3844973 - RNA, 14 nt, Human
gccggcccuggggc

SEQ ID NO: 3844974 - RNA, 17 nt, Human
gccggcccugugugcag

SEQ ID NO: 3844975 - RNA, 15 nt, Human
gccggccuccagaac

SEQ ID NO: 3844976 - RNA, 20 nt, Human
gccggccucucuggccuccc

SEQ ID NO: 3844977 - RNA, 15 nt, Human
gccggcgagcccugu

SEQ ID NO: 3844978 - RNA, 13 nt, Human
gccggcuggaaau

SEQ ID NO: 3844979 - RNA, 18 nt, Human
gccggcugugcucagaga

SEQ ID NO: 3844980 - RNA, 19 nt, Human
gccggcuucaugccagcua

SEQ ID NO: 3844981 - RNA, 14 nt, Human
gccgggagccugac

SEQ ID NO: 3844982 - RNA, 16 nt, Human
gccgggcaaacuggcc

SEQ ID NO: 3844983 - RNA, 17 nt, Human
gccgggcacagcugugg

SEQ ID NO: 3844984 - RNA, 22 nt, Human
gccgggcacauugagcugugca

SEQ ID NO: 3844985 - RNA, 17 nt, Human
gccgggcagagcacagc

SEQ ID NO: 3844986 - RNA, 17 nt, Human
gccgggcaggguguggg

SEQ ID NO: 3844987 - RNA, 14 nt, Human
gccgggccccuggg

SEQ ID NO: 3844988 - RNA, 19 nt, Human
gccgggccccugggcuugg

SEQ ID NO: 3844989 - RNA, 12 nt, Human
gccgggccuggg

SEQ ID NO: 3844990 - RNA, 14 nt, Human
gccgggccuguaca

SEQ ID NO: 3844991 - RNA, 15 nt, Human
gccgggccuguacag

SEQ ID NO: 3844992 - RNA, 18 nt, Human
gccgggcgcgguggcuca

SEQ ID NO: 3844993 - RNA, 22 nt, Human
gccgggcgcgguggcucacgcc

SEQ ID NO: 3844994 - RNA, 18 nt, Human
gccgggcugagggccugc

SEQ ID NO: 3844995 - RNA, 20 nt, Human
gccggggaacuggccaagcu

SEQ ID NO: 3844996 - RNA, 23 nt, Human
gccggggaacuggccaagcugag

SEQ ID NO: 3844997 - RNA, 22 nt, Human
gccggggaagagauccaaagac

SEQ ID NO: 3844998 - RNA, 19 nt, Human
gccggggacagaggccugc

SEQ ID NO: 3844999 - RNA, 21 nt, Human
gccggggacagaggccugccc

SEQ ID NO: 3845000 - RNA, 15 nt, Human
gccggggcagccccc

SEQ ID NO: 3845001 - RNA, 15 nt, Human
gccggggcugagacu

SEQ ID NO: 3845002 - RNA, 12 nt, Human
gccgggguggau

SEQ ID NO: 3845003 - RNA, 14 nt, Human
gccgggucugccuc

SEQ ID NO: 3845004 - RNA, 21 nt, Human
gccgggucugccucuucuggg

SEQ ID NO: 3845005 - RNA, 16 nt, Human
gccgguaacuguccug

SEQ ID NO: 3845006 - RNA, 22 nt, Human
gccgguaacuguccuguccugc

SEQ ID NO: 3845007 - RNA, 16 nt, Human
gccggucaggcacaca

SEQ ID NO: 3845008 - RNA, 12 nt, Human
gccggucauuuu

SEQ ID NO: 3845009 - RNA, 18 nt, Human
gccggucugcaagucaga

SEQ ID NO: 3845010 - RNA, 19 nt, Human
gccggucugcaagucagag

SEQ ID NO: 3845011 - RNA, 12 nt, Human
gccgguuccugu

SEQ ID NO: 3845012 - RNA, 14 nt, Human
gccguaccccaccc

SEQ ID NO: 3845013 - RNA, 19 nt, Human
gccguaccccacccucagc

SEQ ID NO: 3845014 - RNA, 15 nt, Human
gccguaguagauguu

SEQ ID NO: 3845015 - RNA, 22 nt, Human
gccguaguagauguucuacuuu

SEQ ID NO: 3845016 - RNA, 15 nt, Human
gccgucaccaccacc

SEQ ID NO: 3845017 - RNA, 18 nt, Human
gccgucaccaccaccccu

SEQ ID NO: 3845018 - RNA, 23 nt, Human
gccgucaccaccaccccuaccac

SEQ ID NO: 3845019 - RNA, 18 nt, Human
gccgucagccaaauguaa

SEQ ID NO: 3845020 - RNA, 18 nt, Human
gccguccucccgggcccu

SEQ ID NO: 3845021 - RNA, 20 nt, Human
gccguccucccgggcccucc

SEQ ID NO: 3845022 - RNA, 18 nt, Human
gccgucuaccugaggggc

SEQ ID NO: 3845023 - RNA, 16 nt, Human
gccgucuccaggggcu

SEQ ID NO: 3845024 - RNA, 21 nt, Human
gccgucuccaggggcugcuuc

SEQ ID NO: 3845025 - RNA, 19 nt, Human
uauuuuucauauugugcca

SEQ ID NO: 3845026 - RNA, 12 nt, Human
uauuuuucauga

SEQ ID NO: 3845027 - RNA, 20 nt, Human
uauuuuucaugauuuugaaa

SEQ ID NO: 3845028 - RNA, 14 nt, Human
uauuuuucuaaggu

SEQ ID NO: 3845029 - RNA, 20 nt, Human
uauuuuucuacauuauugcu

SEQ ID NO: 3845030 - RNA, 14 nt, Human
uauuuuucucauga

SEQ ID NO: 3845031 - RNA, 15 nt, Human
uauuuuucuguuacc

SEQ ID NO: 3845032 - RNA, 13 nt, Human
uauuuuucuuaaa

SEQ ID NO: 3845033 - RNA, 12 nt, Human
uauuuuucuuga

SEQ ID NO: 3845034 - RNA, 22 nt, Human
uauuuuugaaaggcauguuccu

SEQ ID NO: 3845035 - RNA, 23 nt, Human
uauuuuugacagaauauguuuca

SEQ ID NO: 3845036 - RNA, 17 nt, Human
uauuuuugcauggcacu

SEQ ID NO: 3845037 - RNA, 12 nt, Human
uauuuuuggagg

SEQ ID NO: 3845038 - RNA, 13 nt, Human
uauuuuuguacau

SEQ ID NO: 3845039 - RNA, 15 nt, Human
uauuuuuguagcacu

SEQ ID NO: 3845040 - RNA, 23 nt, Human
uauuuuuguagugaccuguuuau

SEQ ID NO: 3845041 - RNA, 19 nt, Human
uauuuuuguuguguucugu

SEQ ID NO: 3845042 - RNA, 13 nt, Human
uauuuuuguuguu

SEQ ID NO: 3845043 - RNA, 12 nt, Human
uauuuuuuaaag

SEQ ID NO: 3845044 - RNA, 13 nt, Human
uauuuuuuaagua

SEQ ID NO: 3845045 - RNA, 21 nt, Human
uauuuuuuaaguauuuauaua

SEQ ID NO: 3845046 - RNA, 12 nt, Human
uauuuuuuaauu

SEQ ID NO: 3845047 - RNA, 15 nt, Human
uauuuuuuaauuauu

SEQ ID NO: 3845048 - RNA, 11 nt, Human
uauuuuuucaa

SEQ ID NO: 3845049 - RNA, 15 nt, Human
uauuuuuucagaccg

SEQ ID NO: 3845050 - RNA, 16 nt, Human
uauuuuuucaguauua

SEQ ID NO: 3845051 - RNA, 19 nt, Human
uauuuuuucuuuucuuuac

SEQ ID NO: 3845052 - RNA, 22 nt, Human
uauuuuuugaggcuaugaauau

SEQ ID NO: 3845053 - RNA, 16 nt, Human
uauuuuuuguauaauu

SEQ ID NO: 3845054 - RNA, 17 nt, Human
uauuuuuuguauaauug

SEQ ID NO: 3845055 - RNA, 17 nt, Human
uauuuuuuuaaaaucac

SEQ ID NO: 3845056 - RNA, 15 nt, Human
uauuuuuuuaaaauu

SEQ ID NO: 3845057 - RNA, 17 nt, Human
uauuuuuuuaacuuuac

SEQ ID NO: 3845058 - RNA, 21 nt, Human
uauuuuuuuaacuuuaccaug

SEQ ID NO: 3845059 - RNA, 15 nt, Human
uauuuuuuuaagcgu

SEQ ID NO: 3845060 - RNA, 14 nt, Human
uauuuuuuuacuaa

SEQ ID NO: 3845061 - RNA, 19 nt, Human
uauuuuuuuagauugagaa

SEQ ID NO: 3845062 - RNA, 19 nt, Human
uauuuuuuuccuuacauaa

SEQ ID NO: 3845063 - RNA, 15 nt, Human
uauuuuuuucuaccu

SEQ ID NO: 3845064 - RNA, 14 nt, Human
uauuuuuuucucuc

SEQ ID NO: 3845065 - RNA, 13 nt, Human
uauuuuuuucuga

SEQ ID NO: 3845066 - RNA, 17 nt, Human
uauuuuuuucugaaauu

SEQ ID NO: 3845067 - RNA, 15 nt, Human
uauuuuuuucugauu

SEQ ID NO: 3845068 - RNA, 17 nt, Human
uauuuuuuucugauugu

SEQ ID NO: 3845069 - RNA, 13 nt, Human
uauuuuuuugaac

SEQ ID NO: 3845070 - RNA, 16 nt, Human
uauuuuuuugcaagug

SEQ ID NO: 3845071 - RNA, 17 nt, Human
uauuuuuuugcaaguga

SEQ ID NO: 3845072 - RNA, 18 nt, Human
uauuuuuuuuaauuguau

SEQ ID NO: 3845073 - RNA, 18 nt, Human
uauuuuuuuuuaagcucu

SEQ ID NO: 3845074 - RNA, 19 nt, Human
uauuuuuuuuucuaagaga

SEQ ID NO: 3845075 - RNA, 15 nt, Human
uauuuuuuuuuuccu

SEQ ID NO: 3845076 - RNA, 17 nt, Human
uauuuuuuuuuucuucu

SEQ ID NO: 3845077 - RNA, 12 nt, Human
ucaaaaaaggca

SEQ ID NO: 3845078 - RNA, 15 nt, Human
ucaaaaacauucuua

SEQ ID NO: 3845079 - RNA, 13 nt, Human
ucaaaaacuauuu

SEQ ID NO: 3845080 - RNA, 13 nt, Human
ucaaaaacuguuu

SEQ ID NO: 3845081 - RNA, 17 nt, Human
ucaaaaagaaaucaaua

SEQ ID NO: 3845082 - RNA, 19 nt, Human
ucaaaaaggcuuauaaaac

SEQ ID NO: 3845083 - RNA, 20 nt, Human
ucaaaaaggcuuauaaaaca

SEQ ID NO: 3845084 - RNA, 21 nt, Human
ucaaaaaggcuuauaaaacag

SEQ ID NO: 3845085 - RNA, 14 nt, Human
ucaaaaaguguuua

SEQ ID NO: 3845086 - RNA, 15 nt, Human
ucaaaaauacaaaau

SEQ ID NO: 3845087 - RNA, 21 nt, Human
ucaaaaauacaaaauaaaaac

SEQ ID NO: 3845088 - RNA, 13 nt, Human
ucaaaaauauaac

SEQ ID NO: 3845089 - RNA, 15 nt, Human
ucaaaacacugugga

SEQ ID NO: 3845090 - RNA, 16 nt, Human
ucaaaacacuguggaa

SEQ ID NO: 3845091 - RNA, 17 nt, Human
ucaaaacacuguggaac

SEQ ID NO: 3845092 - RNA, 16 nt, Human
ucaaaacagauuguuu

SEQ ID NO: 3845093 - RNA, 19 nt, Human
ucaaaacccaucugggcuc

SEQ ID NO: 3845094 - RNA, 20 nt, Human
ucaaaaccuuucaaauauca

SEQ ID NO: 3845095 - RNA, 16 nt, Human
ucaaaacuacaaauca

SEQ ID NO: 3845096 - RNA, 13 nt, Human
ucaaaacugcacu

SEQ ID NO: 3845097 - RNA, 14 nt, Human
ucaaaagacaauuc

SEQ ID NO: 3845098 - RNA, 18 nt, Human
ucaaaagacaauucuuua

SEQ ID NO: 3845099 - RNA, 13 nt, Human
ucaaaagacaugu

SEQ ID NO: 3845100 - RNA, 16 nt, Human
ucaaaagagaugaaag

SEQ ID NO: 3845101 - RNA, 16 nt, Human
ucaaaagauaauauuu

SEQ ID NO: 3845102 - RNA, 13 nt, Human
ucaaaagcauuua

SEQ ID NO: 3845103 - RNA, 17 nt, Human
ucaaaagcauuuaucau

SEQ ID NO: 3845104 - RNA, 11 nt, Human
ucaaaaggaac

SEQ ID NO: 3845105 - RNA, 20 nt, Human
ucaaaagggccaaagaacca

SEQ ID NO: 3845106 - RNA, 20 nt, Human
ucaaaagguauuauacaugu

SEQ ID NO: 3845107 - RNA, 23 nt, Human
ucaaaaguagaacuuuguauagu

SEQ ID NO: 3845108 - RNA, 14 nt, Human
ucaaaaguauuuuc

SEQ ID NO: 3845109 - RNA, 20 nt, Human
ucaaaaguauuuuccuguaa

SEQ ID NO: 3845110 - RNA, 15 nt, Human
ucaaaaguugaaauu

SEQ ID NO: 3845111 - RNA, 13 nt, Human
ucaaaauaaaaac

SEQ ID NO: 3845112 - RNA, 21 nt, Human
ucaaaauaaaaagugacacag

SEQ ID NO: 3845113 - RNA, 19 nt, Human
ucaaaauagaaaaguuauu

SEQ ID NO: 3845114 - RNA, 17 nt, Human
ucaaaauagugccacua

SEQ ID NO: 3845115 - RNA, 21 nt, Human
ucaaaauauuuaaaaaugucu

SEQ ID NO: 3845116 - RNA, 18 nt, Human
ucaaaauauuuguacaua

SEQ ID NO: 3845117 - RNA, 18 nt, Human
ucaaaauauuuuuaaaag

SEQ ID NO: 3845118 - RNA, 23 nt, Human
ucaaaauccaaaaagaaaugaug

SEQ ID NO: 3845119 - RNA, 21 nt, Human
ucaaaaucucuccacuuucag

SEQ ID NO: 3845120 - RNA, 16 nt, Human
ucaaaaugcucuuauu

SEQ ID NO: 3845121 - RNA, 20 nt, Human
ucaaaaugcucuuauuucau

SEQ ID NO: 3845122 - RNA, 21 nt, Human
ucaaaaugcucuuauuucauc

SEQ ID NO: 3845123 - RNA, 12 nt, Human
ucaaaaugcuuc

SEQ ID NO: 3845124 - RNA, 13 nt, Human
ucaaaauguauau

SEQ ID NO: 3845125 - RNA, 22 nt, Human
ucaaaauguuaucuucucaagu

SEQ ID NO: 3845126 - RNA, 14 nt, Human
ucaaaauuaaaucu

SEQ ID NO: 3845127 - RNA, 15 nt, Human
ucaaaauuaaaucug

SEQ ID NO: 3845128 - RNA, 13 nt, Human
ucaaaauuacaua

SEQ ID NO: 3845129 - RNA, 22 nt, Human
ucaaaauuguuuaaaaauucuu

SEQ ID NO: 3845130 - RNA, 19 nt, Human
ucaaacaaacucucugaac

SEQ ID NO: 3845131 - RNA, 15 nt, Human
ucaaacaacacuggu

SEQ ID NO: 3845132 - RNA, 14 nt, Human
ucaaacaagaaugu

SEQ ID NO: 3845133 - RNA, 23 nt, Human
uauccugugacugucucacuuaa

SEQ ID NO: 3845134 - RNA, 17 nt, Human
uauccuuaugccacccc

SEQ ID NO: 3845135 - RNA, 14 nt, Human
uauccuucagccug

SEQ ID NO: 3845136 - RNA, 22 nt, Human
uauccuucaucuuuuaaagaaa

SEQ ID NO: 3845137 - RNA, 22 nt, Human
uauccuuuguggcaccuuuucu

SEQ ID NO: 3845138 - RNA, 21 nt, Human
uaucgaaauaacaauguuaag

SEQ ID NO: 3845139 - RNA, 16 nt, Human
uaucgauguuuuauua

SEQ ID NO: 3845140 - RNA, 17 nt, Human
uaucgccuuuugacagc

SEQ ID NO: 3845141 - RNA, 17 nt, Human
uaucggcacuguacaaa

SEQ ID NO: 3845142 - RNA, 14 nt, Human
uaucgggaacagug

SEQ ID NO: 3845143 - RNA, 17 nt, Human
uaucgggaacaguguuu

SEQ ID NO: 3845144 - RNA, 14 nt, Human
uaucgggagcagug

SEQ ID NO: 3845145 - RNA, 17 nt, Human
uaucgggagcagugucu

SEQ ID NO: 3845146 - RNA, 18 nt, Human
uaucgggagcagugucuu

SEQ ID NO: 3845147 - RNA, 18 nt, Human
uaucguaaaauuaagaaa

SEQ ID NO: 3845148 - RNA, 21 nt, Human
uaucguaaccagccagauccu

SEQ ID NO: 3845149 - RNA, 16 nt, Human
uaucguauucaccuuc

SEQ ID NO: 3845150 - RNA, 12 nt, Human
uaucguuuuugu

SEQ ID NO: 3845151 - RNA, 18 nt, Human
uaucguuuuuguauuuuc

SEQ ID NO: 3845152 - RNA, 13 nt, Human
uaucuaaaagugu

SEQ ID NO: 3845153 - RNA, 13 nt, Human
uaucuaaaguuau

SEQ ID NO: 3845154 - RNA, 14 nt, Human
uaucuaaaguuaua

SEQ ID NO: 3845155 - RNA, 15 nt, Human
uaucuaaauguugaa

SEQ ID NO: 3845156 - RNA, 16 nt, Human
uaucuaaauguugaaa

SEQ ID NO: 3845157 - RNA, 13 nt, Human
uaucuaaauugaa

SEQ ID NO: 3845158 - RNA, 19 nt, Human
uaucuaagaauacagcuuu

SEQ ID NO: 3845159 - RNA, 23 nt, Human
uaucuaagaauacagcuuucuga

SEQ ID NO: 3845160 - RNA, 20 nt, Human
uaucuaaguuaauuuaaagu

SEQ ID NO: 3845161 - RNA, 22 nt, Human
uaucuaaguuaauuuaaaguug

SEQ ID NO: 3845162 - RNA, 20 nt, Human
uaucuaauauauaugaauaa

SEQ ID NO: 3845163 - RNA, 15 nt, Human
uaucuaauuuggauu

SEQ ID NO: 3845164 - RNA, 21 nt, Human
uaucuacaucuuuuuucacaa

SEQ ID NO: 3845165 - RNA, 18 nt, Human
uaucuaccaacuuucaag

SEQ ID NO: 3845166 - RNA, 22 nt, Human
uaucuaccccagacuagaugua

SEQ ID NO: 3845167 - RNA, 20 nt, Human
uaucuacucuccucaucucu

SEQ ID NO: 3845168 - RNA, 17 nt, Human
uaucuacuuccaaacua

SEQ ID NO: 3845169 - RNA, 20 nt, Human
uaucuagcaaucacaacacu

SEQ ID NO: 3845170 - RNA, 18 nt, Human
uaucuagcugcauaucuu

SEQ ID NO: 3845171 - RNA, 22 nt, Human
gccugcccuccccagagcacug

SEQ ID NO: 3845172 - RNA, 12 nt, Human
gccugcccuggu

SEQ ID NO: 3845173 - RNA, 14 nt, Human
gccugccgggcuga

SEQ ID NO: 3845174 - RNA, 12 nt, Human
gccugccucacc

SEQ ID NO: 3845175 - RNA, 22 nt, Human
gccugccuccccugccucacca

SEQ ID NO: 3845176 - RNA, 16 nt, Human
gccugccuggcaggcu

SEQ ID NO: 3845177 - RNA, 15 nt, Human
gccugccuggccccu

SEQ ID NO: 3845178 - RNA, 15 nt, Human
gccugccuucguuaa

SEQ ID NO: 3845179 - RNA, 16 nt, Human
gccugccuugaagcca

SEQ ID NO: 3845180 - RNA, 22 nt, Human
gccugccuuuccauccauggcc

SEQ ID NO: 3845181 - RNA, 23 nt, Human
gccugccuuuccauccauggcca

SEQ ID NO: 3845182 - RNA, 20 nt, Human
gccugccuuuggcacucuga

SEQ ID NO: 3845183 - RNA, 16 nt, Human
gccugcgacccugggg

SEQ ID NO: 3845184 - RNA, 14 nt, Human
gccugcgagggcag

SEQ ID NO: 3845185 - RNA, 21 nt, Human
gccugcgccaccgcccagaga

SEQ ID NO: 3845186 - RNA, 22 nt, Human
gccugcgccaccgcccagagac

SEQ ID NO: 3845187 - RNA, 15 nt, Human
uauuaacaauuaauu

SEQ ID NO: 3845188 - RNA, 19 nt, Human
uauuaacaauuaauugucu

SEQ ID NO: 3845189 - RNA, 15 nt, Human
uauuaacuacauuua

SEQ ID NO: 3845190 - RNA, 19 nt, Human
uauuaacugcucaguguuu

SEQ ID NO: 3845191 - RNA, 22 nt, Human
uauuaacugcucaguguuucau

SEQ ID NO: 3845192 - RNA, 20 nt, Human
uauuaacuuaauaaucaaga

SEQ ID NO: 3845193 - RNA, 17 nt, Human
uauuaacuuuaauguuu

SEQ ID NO: 3845194 - RNA, 16 nt, Human
uauuaagaaagacuau

SEQ ID NO: 3845195 - RNA, 12 nt, Human
uauuaagaauga

SEQ ID NO: 3845196 - RNA, 19 nt, Human
uauuaagauggauucucag

SEQ ID NO: 3845197 - RNA, 20 nt, Human
uauuaagauggauucucaga

SEQ ID NO: 3845198 - RNA, 21 nt, Human
uauuaagauggauucucagau

SEQ ID NO: 3845199 - RNA, 15 nt, Human
uauuaagauuuccaa

SEQ ID NO: 3845200 - RNA, 17 nt, Human
uauuaagauuuccaagu

SEQ ID NO: 3845201 - RNA, 19 nt, Human
uauuaagcaguaaaaacug

SEQ ID NO: 3845202 - RNA, 16 nt, Human
uauuaagcuuuuugga

SEQ ID NO: 3845203 - RNA, 17 nt, Human
uauuaagggauuuagua

SEQ ID NO: 3845204 - RNA, 20 nt, Human
uauuaaguaagucucaaggu

SEQ ID NO: 3845205 - RNA, 13 nt, Human
uauuaauaaaaag

SEQ ID NO: 3845206 - RNA, 14 nt, Human
uauuaauaaauaga

SEQ ID NO: 3845207 - RNA, 21 nt, Human
uauuaauaaauagagcaauua

SEQ ID NO: 3845208 - RNA, 21 nt, Human
uauuaauacaaugaugcuauu

SEQ ID NO: 3845209 - RNA, 23 nt, Human
uauuaauacaaugaugcuauuug

SEQ ID NO: 3845210 - RNA, 15 nt, Human
uauuaauacugguau

SEQ ID NO: 3845211 - RNA, 17 nt, Human
uauuaauagcugccuua

SEQ ID NO: 3845212 - RNA, 20 nt, Human
uauuaauauauaucugcugu

SEQ ID NO: 3845213 - RNA, 14 nt, Human
uauuaauauaugua

SEQ ID NO: 3845214 - RNA, 17 nt, Human
uauuaauauucauugua

SEQ ID NO: 3845215 - RNA, 19 nt, Human
uauuaaucacuguguauau

SEQ ID NO: 3845216 - RNA, 20 nt, Human
uauuaaucacuguguauauu

SEQ ID NO: 3845217 - RNA, 22 nt, Human
uauuaaucacuguguauauuug

SEQ ID NO: 3845218 - RNA, 17 nt, Human
uauuaaucagaagaaaa

SEQ ID NO: 3845219 - RNA, 16 nt, Human
uauuaaucuuggauag

SEQ ID NO: 3845220 - RNA, 12 nt, Human
uauuaaugcacu

SEQ ID NO: 3845221 - RNA, 22 nt, Human
uauuaaugccuuuaaaguauga

SEQ ID NO: 3845222 - RNA, 23 nt, Human
uauuaaugccuuuaaaguaugaa

SEQ ID NO: 3845223 - RNA, 17 nt, Human
uauuaauguuuucaaaa

SEQ ID NO: 3845224 - RNA, 21 nt, Human
uauuaauuguuuugcacuuuu

SEQ ID NO: 3845225 - RNA, 19 nt, Human
uauuaauuuucuacaaaua

SEQ ID NO: 3845226 - RNA, 14 nt, Human
uauuacaaaaacaa

SEQ ID NO: 3845227 - RNA, 21 nt, Human
uauuacacaaauacuuauuca

SEQ ID NO: 3845228 - RNA, 17 nt, Human
uauuacacuguauuugu

SEQ ID NO: 3845229 - RNA, 12 nt, Human
uauuacaguaua

SEQ ID NO: 3845230 - RNA, 16 nt, Human
uauuacaguauaauua

SEQ ID NO: 3845231 - RNA, 21 nt, Human
uauuacaguauaauuaacaug

SEQ ID NO: 3845232 - RNA, 23 nt, Human
uauuacaguggggaaugaagaua

SEQ ID NO: 3845233 - RNA, 14 nt, Human
uauuacauaaauaa

SEQ ID NO: 3845234 - RNA, 18 nt, Human
uauuacauccuuguggca

SEQ ID NO: 3845235 - RNA, 17 nt, Human
uauuacaucuuucacau

SEQ ID NO: 3845236 - RNA, 16 nt, Human
uauuacauggcagugu

SEQ ID NO: 3845237 - RNA, 18 nt, Human
uauuacauguaauuugau

SEQ ID NO: 3845238 - RNA, 16 nt, Human
uauuaccacagacaua

SEQ ID NO: 3845239 - RNA, 14 nt, Human
uauuaccucugaua

SEQ ID NO: 3845240 - RNA, 19 nt, Human
uauuaccucugauaccuca

SEQ ID NO: 3845241 - RNA, 14 nt, Human
uauuacucaguuua

SEQ ID NO: 3845242 - RNA, 17 nt, Human
uauuacugacauuucuu

SEQ ID NO: 3845243 - RNA, 14 nt, Human
uauuacuguaagaa

SEQ ID NO: 3845244 - RNA, 21 nt, Human
uauuacuguuuauuucuguuu

SEQ ID NO: 3845245 - RNA, 23 nt, Human
uauuacuuauuuuugacaguguu

SEQ ID NO: 3845246 - RNA, 14 nt, Human
uauuacuuccauga

SEQ ID NO: 3845247 - RNA, 15 nt, Human
uauuacuuccaugaa

SEQ ID NO: 3845248 - RNA, 18 nt, Human
uauuacuuccaugaauuu

SEQ ID NO: 3845249 - RNA, 18 nt, Human
uauuacuuguaaauauaa

SEQ ID NO: 3845250 - RNA, 21 nt, Human
uauuacuuguaaauauaaaga

SEQ ID NO: 3845251 - RNA, 23 nt, Human
uauuacuuguaaauauaaagacg

SEQ ID NO: 3845252 - RNA, 18 nt, Human
uauuacuuuaucacuuuu

SEQ ID NO: 3845253 - RNA, 23 nt, Human
uauuagaaauuagaaaaaaauua

SEQ ID NO: 3845254 - RNA, 21 nt, Human
uauuagacuucuguuuucaau

SEQ ID NO: 3845255 - RNA, 15 nt, Human
uauuagagugucuuu

SEQ ID NO: 3845256 - RNA, 18 nt, Human
uauuagagugucuuucca

SEQ ID NO: 3845257 - RNA, 15 nt, Human
uauuagaugugauuu

SEQ ID NO: 3845258 - RNA, 17 nt, Human
uauuagccaggaucaug

SEQ ID NO: 3845259 - RNA, 18 nt, Human
uauuagccaggaucaugg

SEQ ID NO: 3845260 - RNA, 14 nt, Human
uauuagcuuuacug

SEQ ID NO: 3845261 - RNA, 14 nt, Human
uauuaguaccauag

SEQ ID NO: 3845262 - RNA, 20 nt, Human
uauuagugauauuucucuag

SEQ ID NO: 3845263 - RNA, 16 nt, Human
uauuagugaugucauc

SEQ ID NO: 3845264 - RNA, 18 nt, Human
uauuaguguuauaugaac

SEQ ID NO: 3845265 - RNA, 22 nt, Human
uauuaguuccccaaauacaaag

SEQ ID NO: 3845266 - RNA, 22 nt, Human
uauuaguucccugucucuugaa

SEQ ID NO: 3845267 - RNA, 14 nt, Human
uauuaguugcuuug

SEQ ID NO: 3845268 - RNA, 14 nt, Human
uauuaguuuugauu

SEQ ID NO: 3845269 - RNA, 13 nt, Human
uauuauaaaaaua

SEQ ID NO: 3845270 - RNA, 23 nt, Human
uauuauaaacaagaaugaagguu

SEQ ID NO: 3845271 - RNA, 14 nt, Human
uauuauaaacugua

SEQ ID NO: 3845272 - RNA, 18 nt, Human
uauuauaaaggauaaaga

SEQ ID NO: 3845273 - RNA, 20 nt, Human
uauuauaaaggauaaagaag

SEQ ID NO: 3845274 - RNA, 23 nt, Human
uauuauaaauauauauaaagaau

SEQ ID NO: 3845275 - RNA, 14 nt, Human
uauuauaaauuaug

SEQ ID NO: 3845276 - RNA, 16 nt, Human
uauuauaaauuauguu

SEQ ID NO: 3845277 - RNA, 20 nt, Human
uauuauaaauuauguuuaua

SEQ ID NO: 3845278 - RNA, 19 nt, Human
uauuauaacaagugugucu

SEQ ID NO: 3845279 - RNA, 20 nt, Human
uauuauaacaagugugucuu

SEQ ID NO: 3845280 - RNA, 15 nt, Human
uauuauaacuuaaaa

SEQ ID NO: 3845281 - RNA, 18 nt, Human
uauuauaagucuuacaua

SEQ ID NO: 3845282 - RNA, 14 nt, Human
uauuauaauuguau

SEQ ID NO: 3845283 - RNA, 13 nt, Human
uauuauacuguau

SEQ ID NO: 3845284 - RNA, 16 nt, Human
uauuauauauauaaua

SEQ ID NO: 3845285 - RNA, 17 nt, Human
uauuauauguacccucu

SEQ ID NO: 3845286 - RNA, 13 nt, Human
uauuauauucauu

SEQ ID NO: 3845287 - RNA, 17 nt, Human
uauuauauuuacaaaug

SEQ ID NO: 3845288 - RNA, 13 nt, Human
uauuauauuugga

SEQ ID NO: 3845289 - RNA, 14 nt, Human
uauuauauuuggau

SEQ ID NO: 3845290 - RNA, 22 nt, Human
uauuaucaaagggauaaagaaa

SEQ ID NO: 3845291 - RNA, 12 nt, Human
uauuaucuuuuc

SEQ ID NO: 3845292 - RNA, 14 nt, Human
uauuaucuuuucau

SEQ ID NO: 3845293 - RNA, 21 nt, Human
uauuaugaaugugaagccuuc

SEQ ID NO: 3845294 - RNA, 22 nt, Human
uauuaugaaugugaagccuucc

SEQ ID NO: 3845295 - RNA, 14 nt, Human
uauuaugagaugcu

SEQ ID NO: 3845296 - RNA, 14 nt, Human
uauuaugauuagcu

SEQ ID NO: 3845297 - RNA, 13 nt, Human
uauuaugcaaauu

SEQ ID NO: 3845298 - RNA, 16 nt, Human
uauuaugcaaauuccc

SEQ ID NO: 3845299 - RNA, 14 nt, Human
uauuaugcauaacu

SEQ ID NO: 3845300 - RNA, 20 nt, Human
uauuaugcauaacugacaaa

SEQ ID NO: 3845301 - RNA, 20 nt, Human
uauuauggaaaacuguguug

SEQ ID NO: 3845302 - RNA, 12 nt, Human
uauuauguaaau

SEQ ID NO: 3845303 - RNA, 22 nt, Human
uauuauguaaaucccauuauuc

SEQ ID NO: 3845304 - RNA, 18 nt, Human
uauuauguagguaagacu

SEQ ID NO: 3845305 - RNA, 15 nt, Human
uauuauguaguuguu

SEQ ID NO: 3845306 - RNA, 19 nt, Human
uauuauguccugugagaug

SEQ ID NO: 3845307 - RNA, 21 nt, Human
uauuaugucucuucugagcua

SEQ ID NO: 3845308 - RNA, 17 nt, Human
uauuauguuguuagaga

SEQ ID NO: 3845309 - RNA, 15 nt, Human
uauuauuaaugcuuu

SEQ ID NO: 3845310 - RNA, 19 nt, Human
uauuauuacuuauuuuuga

SEQ ID NO: 3845311 - RNA, 19 nt, Human
uauuauuagaaauuagaaa

SEQ ID NO: 3845312 - RNA, 15 nt, Human
uauuauuauaaucuu

SEQ ID NO: 3845313 - RNA, 12 nt, Human
uauuauuaucuu

SEQ ID NO: 3845314 - RNA, 18 nt, Human
uauuauucaccauguaaa

SEQ ID NO: 3845315 - RNA, 13 nt, Human
uauugacaaaaug

SEQ ID NO: 3845316 - RNA, 20 nt, Human
uauugacaauaaaauauuau

SEQ ID NO: 3845317 - RNA, 13 nt, Human
uauugacacagaa

SEQ ID NO: 3845318 - RNA, 23 nt, Human
uauugacacagaaaauguugaga

SEQ ID NO: 3845319 - RNA, 11 nt, Human
uauugacacug

SEQ ID NO: 3845320 - RNA, 12 nt, Human
uauugacacuga

SEQ ID NO: 3845321 - RNA, 16 nt, Human
uauugacacugaacuu

SEQ ID NO: 3845322 - RNA, 19 nt, Human
uauugacacugaacuuaau

SEQ ID NO: 3845323 - RNA, 24 nt, Human
uauugacacugaacuuaauaacug

SEQ ID NO: 3845324 - RNA, 17 nt, Human
uauugacauuuguaguu

SEQ ID NO: 3845325 - RNA, 14 nt, Human
uauugaccauuuuu

SEQ ID NO: 3845326 - RNA, 22 nt, Human
uauugacuaacaggccaaagag

SEQ ID NO: 3845327 - RNA, 19 nt, Human
uauugagauuucuuaaaua

SEQ ID NO: 3845328 - RNA, 18 nt, Human
uauugagcagaauucauu

SEQ ID NO: 3845329 - RNA, 15 nt, Human
uauugaggaaaaaua

SEQ ID NO: 3845330 - RNA, 21 nt, Human
uauugaggaaaaauaugugaa

SEQ ID NO: 3845331 - RNA, 17 nt, Human
uauugaggccaagaaua

SEQ ID NO: 3845332 - RNA, 21 nt, Human
uauugaggccaagaauauugc

SEQ ID NO: 3845333 - RNA, 16 nt, Human
uauugaggcuuugugu

SEQ ID NO: 3845334 - RNA, 20 nt, Human
uauugaggcuuuguguugua

SEQ ID NO: 3845335 - RNA, 14 nt, Human
uauugaguuuguag

SEQ ID NO: 3845336 - RNA, 18 nt, Human
uauugauaacagcacuga

SEQ ID NO: 3845337 - RNA, 18 nt, Human
uauugauaagaucuuuua

SEQ ID NO: 3845338 - RNA, 16 nt, Human
uauugauaaguucaua

SEQ ID NO: 3845339 - RNA, 13 nt, Human
uauugauauauau

SEQ ID NO: 3845340 - RNA, 14 nt, Human
uauugauauauauu

SEQ ID NO: 3845341 - RNA, 18 nt, Human
uauugauauauauuauaa

SEQ ID NO: 3845342 - RNA, 17 nt, Human
uauugaugaaaagauuu

SEQ ID NO: 3845343 - RNA, 23 nt, Human
uauugaugaaaagauuuaagcac

SEQ ID NO: 3845344 - RNA, 20 nt, Human
uauugauguacagucuguca

SEQ ID NO: 3845345 - RNA, 19 nt, Human
uauugauucugcuugagaa

SEQ ID NO: 3845346 - RNA, 22 nt, Human
gccugcgcccaccccgcucugc

SEQ ID NO: 3845347 - RNA, 22 nt, Human
gccugcgccugcugcaugcccu

SEQ ID NO: 3845348 - RNA, 17 nt, Human
gccugcggucaaggcca

SEQ ID NO: 3845349 - RNA, 16 nt, Human
gccugcgucuuccgcc

SEQ ID NO: 3845350 - RNA, 17 nt, Human
gccugcguggcugaccc

SEQ ID NO: 3845351 - RNA, 18 nt, Human
gccugcguugguccagag

SEQ ID NO: 3845352 - RNA, 17 nt, Human
gccugcuaauuccccag

SEQ ID NO: 3845353 - RNA, 16 nt, Human
gccugcuagcuagcuc

SEQ ID NO: 3845354 - RNA, 16 nt, Human
gccugcuccagaccug

SEQ ID NO: 3845355 - RNA, 13 nt, Human
gccugcucccagc

SEQ ID NO: 3845356 - RNA, 13 nt, Human
gccugcucccugu

SEQ ID NO: 3845357 - RNA, 18 nt, Human
gccugcugcaugcccucu

SEQ ID NO: 3845358 - RNA, 21 nt, Human
gccugcugcaugcccucucag

SEQ ID NO: 3845359 - RNA, 14 nt, Human
gccugcugcugaga

SEQ ID NO: 3845360 - RNA, 17 nt, Human
gccugcugcugagaacc

SEQ ID NO: 3845361 - RNA, 18 nt, Human
gccugcugcugagaaccu

SEQ ID NO: 3845362 - RNA, 21 nt, Human
gccugcugcugagaaccuggc

SEQ ID NO: 3845363 - RNA, 17 nt, Human
gccugcuggaagcccag

SEQ ID NO: 3845364 - RNA, 19 nt, Human
gccugcuggaagcccagcc

SEQ ID NO: 3845365 - RNA, 13 nt, Human
gccugcuggaggc

SEQ ID NO: 3845366 - RNA, 22 nt, Human
gccugcuggaucucccagggcu

SEQ ID NO: 3845367 - RNA, 10 nt, Human
gccugcuggc

SEQ ID NO: 3845368 - RNA, 13 nt, Human
gccugcugggcuc

SEQ ID NO: 3845369 - RNA, 16 nt, Human
gccugcugggcucucc

SEQ ID NO: 3845370 - RNA, 21 nt, Human
gccugcugggcucuccaccuc

SEQ ID NO: 3845371 - RNA, 17 nt, Human
gccugcuggucacagcc

SEQ ID NO: 3845372 - RNA, 19 nt, Human
gccugcuggucacagccuc

SEQ ID NO: 3845373 - RNA, 23 nt, Human
gccugcugguuuuaucugaguga

SEQ ID NO: 3845374 - RNA, 21 nt, Human
gccugcuuugaauaaaugugu

SEQ ID NO: 3845375 - RNA, 18 nt, Human
gccugcuuuucacugcug

SEQ ID NO: 3845376 - RNA, 20 nt, Human
gccugcuuuucacugcugca

SEQ ID NO: 3845377 - RNA, 18 nt, Human
gccugcuuuuuauggccu

SEQ ID NO: 3845378 - RNA, 17 nt, Human
gccuggaaaccugucug

SEQ ID NO: 3845379 - RNA, 13 nt, Human
gccuggaagacag

SEQ ID NO: 3845380 - RNA, 15 nt, Human
gccuggaagacagag

SEQ ID NO: 3845381 - RNA, 22 nt, Human
gccuggaagacagagaccuccu

SEQ ID NO: 3845382 - RNA, 16 nt, Human
gccuggaagcuuuguc

SEQ ID NO: 3845383 - RNA, 22 nt, Human
gccuggaagcuuuguccccugc

SEQ ID NO: 3845384 - RNA, 14 nt, Human
gccuggacaaaccc

SEQ ID NO: 3845385 - RNA, 16 nt, Human
gccuggacaaacccuu

SEQ ID NO: 3845386 - RNA, 22 nt, Human
gccuggaccucugacagcagca

SEQ ID NO: 3845387 - RNA, 17 nt, Human
gccuggacuuuccugca

SEQ ID NO: 3845388 - RNA, 12 nt, Human
gccuggagaagc

SEQ ID NO: 3845389 - RNA, 16 nt, Human
gccuggagauccuccu

SEQ ID NO: 3845390 - RNA, 19 nt, Human
gccuggagauccuccugca

SEQ ID NO: 3845391 - RNA, 15 nt, Human
gccuggagcacaaag

SEQ ID NO: 3845392 - RNA, 19 nt, Human
gccuggagccccacugccc

SEQ ID NO: 3845393 - RNA, 20 nt, Human
gccuggagccccacugcccu

SEQ ID NO: 3845394 - RNA, 12 nt, Human
gccuggagcccu

SEQ ID NO: 3845395 - RNA, 15 nt, Human
gccuggagcccugga

SEQ ID NO: 3845396 - RNA, 14 nt, Human
gccuggagcuccug

SEQ ID NO: 3845397 - RNA, 20 nt, Human
gccuggagcuccugggaagg

SEQ ID NO: 3845398 - RNA, 13 nt, Human
gccuggaggaccu

SEQ ID NO: 3845399 - RNA, 15 nt, Human
gccuggaggaccuga

SEQ ID NO: 3845400 - RNA, 19 nt, Human
gccuggaggaccugagccu

SEQ ID NO: 3845401 - RNA, 16 nt, Human
gccuggauggggcugc

SEQ ID NO: 3845402 - RNA, 18 nt, Human
gccuggauggggcugcac

SEQ ID NO: 3845403 - RNA, 14 nt, Human
gccuggauucauuu

SEQ ID NO: 3845404 - RNA, 18 nt, Human
gccuggcaagugggugaa

SEQ ID NO: 3845405 - RNA, 13 nt, Human
gccuggcacacau

SEQ ID NO: 3845406 - RNA, 13 nt, Human
gccuggcacagga

SEQ ID NO: 3845407 - RNA, 16 nt, Human
gccuggcacaggacug

SEQ ID NO: 3845408 - RNA, 18 nt, Human
gccuggcacagggcagug

SEQ ID NO: 3845409 - RNA, 14 nt, Human
gccuggcacagugu

SEQ ID NO: 3845410 - RNA, 16 nt, Human
gccuggcacagugucu

SEQ ID NO: 3845411 - RNA, 22 nt, Human
gccuggcacagugucugggcug

SEQ ID NO: 3845412 - RNA, 18 nt, Human
gccuggcacaucagaaag

SEQ ID NO: 3845413 - RNA, 22 nt, Human
gccuggcagaacugagcuccuc

SEQ ID NO: 3845414 - RNA, 22 nt, Human
gccuggcagccgugccuucagc

SEQ ID NO: 3845415 - RNA, 14 nt, Human
gccuggcaggcugu

SEQ ID NO: 3845416 - RNA, 19 nt, Human
gccuggcagggaggucagg

SEQ ID NO: 3845417 - RNA, 20 nt, Human
gccuggcagggaggucaggc

SEQ ID NO: 3845418 - RNA, 20 nt, Human
gccuggcauucuuguacagu

SEQ ID NO: 3845419 - RNA, 16 nt, Human
gccuggccaccucucu

SEQ ID NO: 3845420 - RNA, 19 nt, Human
gccuggccaccucucuccu

SEQ ID NO: 3845421 - RNA, 23 nt, Human
gccuggccacgcagccaggacac

SEQ ID NO: 3845422 - RNA, 13 nt, Human
gccuggccacgcc

SEQ ID NO: 3845423 - RNA, 17 nt, Human
gccuggccagacacagg

SEQ ID NO: 3845424 - RNA, 21 nt, Human
gccuggccagacacaggcccu

SEQ ID NO: 3845425 - RNA, 14 nt, Human
gccuggccagaugc

SEQ ID NO: 3845426 - RNA, 23 nt, Human
gccuggccagcagguccccagcu

SEQ ID NO: 3845427 - RNA, 12 nt, Human
gccuggccaggc

SEQ ID NO: 3845428 - RNA, 23 nt, Human
gccuggccaggcagaucugugcc

SEQ ID NO: 3845429 - RNA, 15 nt, Human
gccuggccagugccc

SEQ ID NO: 3845430 - RNA, 17 nt, Human
gccuggcccagcucccc

SEQ ID NO: 3845431 - RNA, 22 nt, Human
gccuggcccauguauggccagg

SEQ ID NO: 3845432 - RNA, 16 nt, Human
gccuggccccaugguc

SEQ ID NO: 3845433 - RNA, 16 nt, Human
gccuggccccucaggg

SEQ ID NO: 3845434 - RNA, 16 nt, Human
gccuggcccugcccug

SEQ ID NO: 3845435 - RNA, 17 nt, Human
gccuggcccugcccuga

SEQ ID NO: 3845436 - RNA, 15 nt, Human
gccuggccggcaacc

SEQ ID NO: 3845437 - RNA, 13 nt, Human
gccuggccggcca

SEQ ID NO: 3845438 - RNA, 15 nt, Human
gccuggccggccagc

SEQ ID NO: 3845439 - RNA, 15 nt, Human
gccuggccuccaggc

SEQ ID NO: 3845440 - RNA, 14 nt, Human
gccuggccugagcu

SEQ ID NO: 3845441 - RNA, 20 nt, Human
gccuggccugagcugggaug

SEQ ID NO: 3845442 - RNA, 15 nt, Human
gccuggccuggcccu

SEQ ID NO: 3845443 - RNA, 16 nt, Human
gccuggccuggcccug

SEQ ID NO: 3845444 - RNA, 15 nt, Human
gccuggcgggauggg

SEQ ID NO: 3845445 - RNA, 22 nt, Human
gccuggcgggaugggccaccgc

SEQ ID NO: 3845446 - RNA, 23 nt, Human
gccuggcucacacuuggcucuga

SEQ ID NO: 3845447 - RNA, 23 nt, Human
gccuggcuccaaacccucgaggc

SEQ ID NO: 3845448 - RNA, 19 nt, Human
gccuggcucccacaggcag

SEQ ID NO: 3845449 - RNA, 21 nt, Human
gccuggcucccacaggcagcu

SEQ ID NO: 3845450 - RNA, 16 nt, Human
gccuggcucccaggac

SEQ ID NO: 3845451 - RNA, 15 nt, Human
gccuggcuccccugg

SEQ ID NO: 3845452 - RNA, 12 nt, Human
gccuggcucccu

SEQ ID NO: 3845453 - RNA, 22 nt, Human
gccuggcucccucacucucagg

SEQ ID NO: 3845454 - RNA, 16 nt, Human
gccuggcuccguccag

SEQ ID NO: 3845455 - RNA, 10 nt, Human
gccuggcucu

SEQ ID NO: 3845456 - RNA, 21 nt, Human
gccuggcucuugugcuggaug

SEQ ID NO: 3845457 - RNA, 17 nt, Human
gccuggcuggcugaggg

SEQ ID NO: 3845458 - RNA, 20 nt, Human
gccuggcuggcugagggcag

SEQ ID NO: 3845459 - RNA, 16 nt, Human
gccugggaaagccccu

SEQ ID NO: 3845460 - RNA, 16 nt, Human
ucacuguggugucugu

SEQ ID NO: 3845461 - RNA, 14 nt, Human
ucacuguguauauu

SEQ ID NO: 3845462 - RNA, 18 nt, Human
ucacuguguauauuugau

SEQ ID NO: 3845463 - RNA, 17 nt, Human
ucacuguucccucugcu

SEQ ID NO: 3845464 - RNA, 20 nt, Human
ucacuguucccucugcuccu

SEQ ID NO: 3845465 - RNA, 22 nt, Human
ucacuguucccucugcuccugg

SEQ ID NO: 3845466 - RNA, 22 nt, Human
ucacuguucuauucaucucaag

SEQ ID NO: 3845467 - RNA, 19 nt, Human
ucacuguugaaaauuauuu

SEQ ID NO: 3845468 - RNA, 14 nt, Human
ucacuguugcccag

SEQ ID NO: 3845469 - RNA, 19 nt, Human
ucacuguugcccaggcugg

SEQ ID NO: 3845470 - RNA, 23 nt, Human
ucacuguugcccaggcuggcgug

SEQ ID NO: 3845471 - RNA, 12 nt, Human
ucacuguuuaga

SEQ ID NO: 3845472 - RNA, 17 nt, Human
ucacuguuuagaacaca

SEQ ID NO: 3845473 - RNA, 15 nt, Human
ucacuguuucacuac

SEQ ID NO: 3845474 - RNA, 13 nt, Human
ucacuuaaaacac

SEQ ID NO: 3845475 - RNA, 18 nt, Human
ucacuuaaaaugugcagu

SEQ ID NO: 3845476 - RNA, 22 nt, Human
ucacuuaaacuugcaucacuua

SEQ ID NO: 3845477 - RNA, 13 nt, Human
ucacuuacuauug

SEQ ID NO: 3845478 - RNA, 22 nt, Human
ucacuuacuguuucugucagga

SEQ ID NO: 3845479 - RNA, 21 nt, Human
ucacuuaggaaauggcuuugu

SEQ ID NO: 3845480 - RNA, 19 nt, Human
ucacuuaucccaagagaau

SEQ ID NO: 3845481 - RNA, 16 nt, Human
ucacuucauaauccag

SEQ ID NO: 3845482 - RNA, 15 nt, Human
ucacuucaucuucuc

SEQ ID NO: 3845483 - RNA, 20 nt, Human
ucacuucaucuucucagcuc

SEQ ID NO: 3845484 - RNA, 19 nt, Human
ucacuuccauacagcucua

SEQ ID NO: 3845485 - RNA, 22 nt, Human
ucacuucgcgugcccucgcugc

SEQ ID NO: 3845486 - RNA, 19 nt, Human
ucacuucggccagagcuga

SEQ ID NO: 3845487 - RNA, 16 nt, Human
ucacuucgugggaucu

SEQ ID NO: 3845488 - RNA, 16 nt, Human
ucacuucuaaaugcau

SEQ ID NO: 3845489 - RNA, 14 nt, Human
ucacuucuuucccu

SEQ ID NO: 3845490 - RNA, 19 nt, Human
ucacuucuuucccuuccuc

SEQ ID NO: 3845491 - RNA, 10 nt, Human
ucacuugagu

SEQ ID NO: 3845492 - RNA, 18 nt, Human
ucacuugaugugccauuu

SEQ ID NO: 3845493 - RNA, 14 nt, Human
ucacuugauucaua

SEQ ID NO: 3845494 - RNA, 13 nt, Human
ucacuugcauguc

SEQ ID NO: 3845495 - RNA, 18 nt, Human
ucacuugugcuuugcucu

SEQ ID NO: 3845496 - RNA, 20 nt, Human
ucacuugugcuuugcucuug

SEQ ID NO: 3845497 - RNA, 13 nt, Human
ucacuuguguuuu

SEQ ID NO: 3845498 - RNA, 16 nt, Human
ucacuuuaauucucau

SEQ ID NO: 3845499 - RNA, 22 nt, Human
ucacuuuaauucucaugugauc

SEQ ID NO: 3845500 - RNA, 19 nt, Human
ucacuuucacauagauguc

SEQ ID NO: 3845501 - RNA, 14 nt, Human
ucacuuucauuuuu

SEQ ID NO: 3845502 - RNA, 14 nt, Human
ucacuuugcucuga

SEQ ID NO: 3845503 - RNA, 15 nt, Human
ucacuuugcucuggg

SEQ ID NO: 3845504 - RNA, 19 nt, Human
ucacuuugucuaacucaga

SEQ ID NO: 3845505 - RNA, 13 nt, Human
ucacuuuuaggga

SEQ ID NO: 3845506 - RNA, 13 nt, Human
ucacuuuugcaag

SEQ ID NO: 3845507 - RNA, 22 nt, Human
ucacuuuuuaugcuauuucugu

SEQ ID NO: 3845508 - RNA, 14 nt, Human
ucacuuuuucugau

SEQ ID NO: 3845509 - RNA, 16 nt, Human
ucacuuuuucugauaa

SEQ ID NO: 3845510 - RNA, 15 nt, Human
ucacuuuuugaacua

SEQ ID NO: 3845511 - RNA, 21 nt, Human
ucacuuuuugaacuaagaaac

SEQ ID NO: 3845512 - RNA, 22 nt, Human
ucacuuuuugaggcaaaagaag

SEQ ID NO: 3845513 - RNA, 22 nt, Human
gccugggguggggucaugcccu

SEQ ID NO: 3845514 - RNA, 22 nt, Human
gccugggguguuaguggcaccg

SEQ ID NO: 3845515 - RNA, 21 nt, Human
gccugggucucaccggcucuc

SEQ ID NO: 3845516 - RNA, 16 nt, Human
gccugggucugugucu

SEQ ID NO: 3845517 - RNA, 23 nt, Human
gccugggucugugucucuuuucu

SEQ ID NO: 3845518 - RNA, 17 nt, Human
gccugggugcuggcugc

SEQ ID NO: 3845519 - RNA, 19 nt, Human
gccuggguggaucggccuc

SEQ ID NO: 3845520 - RNA, 19 nt, Human
gccuggguggggcugcucc

SEQ ID NO: 3845521 - RNA, 23 nt, Human
gccuggguggggcugcuccucca

SEQ ID NO: 3845522 - RNA, 24 nt, Human
gccuggguggggcugcuccuccag

SEQ ID NO: 3845523 - RNA, 15 nt, Human
gccuggguugggggc

SEQ ID NO: 3845524 - RNA, 23 nt, Human
gccugguaggaaagggcaagucu

SEQ ID NO: 3845525 - RNA, 21 nt, Human
gccuggucccacgagggugcc

SEQ ID NO: 3845526 - RNA, 12 nt, Human
gccuggucuccu

SEQ ID NO: 3845527 - RNA, 16 nt, Human
gccuggucuccugccc

SEQ ID NO: 3845528 - RNA, 22 nt, Human
gccuggugaugcgcaguugcug

SEQ ID NO: 3845529 - RNA, 20 nt, Human
gccuggugcccagcacaugu

SEQ ID NO: 3845530 - RNA, 20 nt, Human
gccuggugcuuccaaauauu

SEQ ID NO: 3845531 - RNA, 16 nt, Human
gccugguggcagcugc

SEQ ID NO: 3845532 - RNA, 15 nt, Human
gccuggugggccucc

SEQ ID NO: 3845533 - RNA, 16 nt, Human
gccuggugguuuucaa

SEQ ID NO: 3845534 - RNA, 14 nt, Human
gccugguuagaggc

SEQ ID NO: 3845535 - RNA, 14 nt, Human
gccugguuuagccu

SEQ ID NO: 3845536 - RNA, 15 nt, Human
gccuguaaucccagc

SEQ ID NO: 3845537 - RNA, 17 nt, Human
gccuguaaucccagcac

SEQ ID NO: 3845538 - RNA, 18 nt, Human
gccuguaaucccagcacu

SEQ ID NO: 3845539 - RNA, 15 nt, Human
gccuguaauccuagc

SEQ ID NO: 3845540 - RNA, 12 nt, Human
gccuguacaguc

SEQ ID NO: 3845541 - RNA, 17 nt, Human
gccuguacagucugucu

SEQ ID NO: 3845542 - RNA, 16 nt, Human
gccuguacugccugcu

SEQ ID NO: 3845543 - RNA, 20 nt, Human
gccuguagaauagccugugg

SEQ ID NO: 3845544 - RNA, 17 nt, Human
gccuguagaguugcuga

SEQ ID NO: 3845545 - RNA, 14 nt, Human
gccuguaguuagga

SEQ ID NO: 3845546 - RNA, 16 nt, Human
gccuguaguuaggaaa

SEQ ID NO: 3845547 - RNA, 18 nt, Human
gccuguauacuuuaguau

SEQ ID NO: 3845548 - RNA, 14 nt, Human
gccugucaagaggc

SEQ ID NO: 3845549 - RNA, 20 nt, Human
gccugucagauccaggagcu

SEQ ID NO: 3845550 - RNA, 21 nt, Human
gccugucagauccaggagcuc

SEQ ID NO: 3845551 - RNA, 17 nt, Human
gccugucagcuaaagaa

SEQ ID NO: 3845552 - RNA, 19 nt, Human
gccugucauccuuggucuu

SEQ ID NO: 3845553 - RNA, 18 nt, Human
gccuguccacaggcuucu

SEQ ID NO: 3845554 - RNA, 12 nt, Human
gccuguccagcc

SEQ ID NO: 3845555 - RNA, 13 nt, Human
gccuguccagccu

SEQ ID NO: 3845556 - RNA, 17 nt, Human
gccuguccagccugggc

SEQ ID NO: 3845557 - RNA, 13 nt, Human
gccugucccccug

SEQ ID NO: 3845558 - RNA, 14 nt, Human
gccugucccucuca

SEQ ID NO: 3845559 - RNA, 18 nt, Human
gccugucccuggccaucu

SEQ ID NO: 3845560 - RNA, 21 nt, Human
gccugucccuggccaucucug

SEQ ID NO: 3845561 - RNA, 22 nt, Human
gccuguccuccaacaccaagca

SEQ ID NO: 3845562 - RNA, 13 nt, Human
gccuguccugccu

SEQ ID NO: 3845563 - RNA, 18 nt, Human
gccugucucauccccagg

SEQ ID NO: 3845564 - RNA, 19 nt, Human
gccugucucauccccaggg

SEQ ID NO: 3845565 - RNA, 19 nt, Human
gccugucucuuuaagggca

SEQ ID NO: 3845566 - RNA, 15 nt, Human
gccugucugccccag

SEQ ID NO: 3845567 - RNA, 12 nt, Human
gccugucugucu

SEQ ID NO: 3845568 - RNA, 16 nt, Human
gccugugaacccagga

SEQ ID NO: 3845569 - RNA, 17 nt, Human
gccugugaacccaggac

SEQ ID NO: 3845570 - RNA, 19 nt, Human
gccugugaacccaggacaa

SEQ ID NO: 3845571 - RNA, 21 nt, Human
gccugugaacccaggacaagc

SEQ ID NO: 3845572 - RNA, 23 nt, Human
gccugugacauacccccuccccc

SEQ ID NO: 3845573 - RNA, 23 nt, Human
gccugugagcuaggaauuguguu

SEQ ID NO: 3845574 - RNA, 24 nt, Human
gccugugaggugcagagugcccag

SEQ ID NO: 3845575 - RNA, 10 nt, Human
gccugugcca

SEQ ID NO: 3845576 - RNA, 16 nt, Human
gccugugccucuggga

SEQ ID NO: 3845577 - RNA, 18 nt, Human
gccugugccucugggacu

SEQ ID NO: 3845578 - RNA, 20 nt, Human
gccugugccuuuugccaucc

SEQ ID NO: 3845579 - RNA, 23 nt, Human
gccugugcugcccgucuucagcc

SEQ ID NO: 3845580 - RNA, 24 nt, Human
gccuguggaaucuggagugagggg

SEQ ID NO: 3845581 - RNA, 23 nt, Human
gccuguggcgccgucuccagggg

SEQ ID NO: 3845582 - RNA, 23 nt, Human
gccuguggcugucggugggacuc

SEQ ID NO: 3845583 - RNA, 16 nt, Human
gccugugguucugaga

SEQ ID NO: 3845584 - RNA, 16 nt, Human
gccuguguaacagcuc

SEQ ID NO: 3845585 - RNA, 22 nt, Human
gccuguguaacagcuccuuggg

SEQ ID NO: 3845586 - RNA, 15 nt, Human
gccuguguagcugug

SEQ ID NO: 3845587 - RNA, 16 nt, Human
gccuguguagcuguga

SEQ ID NO: 3845588 - RNA, 12 nt, Human
gccuguguccau

SEQ ID NO: 3845589 - RNA, 14 nt, Human
gccuguguccaugc

SEQ ID NO: 3845590 - RNA, 21 nt, Human
gccugugucccaugacccacc

SEQ ID NO: 3845591 - RNA, 22 nt, Human
gccugugucccaugacccaccc

SEQ ID NO: 3845592 - RNA, 13 nt, Human
gccugugucuuua

SEQ ID NO: 3845593 - RNA, 22 nt, Human
gccugugugacaucaguggcau

SEQ ID NO: 3845594 - RNA, 23 nt, Human
gccuguguggccacuucugucca

SEQ ID NO: 3845595 - RNA, 18 nt, Human
gccuguguucuuccuggc

SEQ ID NO: 3845596 - RNA, 22 nt, Human
gccuguuagacucuuacuuuuu

SEQ ID NO: 3845597 - RNA, 21 nt, Human
gccuguuagcaugcuggugag

SEQ ID NO: 3845598 - RNA, 14 nt, Human
gccuguucagcucc

SEQ ID NO: 3845599 - RNA, 17 nt, Human
gccuguucagcuccagc

SEQ ID NO: 3845600 - RNA, 19 nt, Human
gccuguucagcuccagcuc

SEQ ID NO: 3845601 - RNA, 11 nt, Human
gccuguucagu

SEQ ID NO: 3845602 - RNA, 19 nt, Human
gccuguucaguuacagaaa

SEQ ID NO: 3845603 - RNA, 24 nt, Human
gccuguucaguuacagaaaguggu

SEQ ID NO: 3845604 - RNA, 12 nt, Human
ucaacugggcug

SEQ ID NO: 3845605 - RNA, 23 nt, Human
ucaacugucuuccucaaaauaaa

SEQ ID NO: 3845606 - RNA, 19 nt, Human
ucaacuuaacuaucaucuu

SEQ ID NO: 3845607 - RNA, 20 nt, Human
ucaacuuagucaauaagaaa

SEQ ID NO: 3845608 - RNA, 16 nt, Human
ucaacuugcaaaauca

SEQ ID NO: 3845609 - RNA, 19 nt, Human
ucaacuugcaaaaucaguu

SEQ ID NO: 3845610 - RNA, 16 nt, Human
ucaacuuuguaaaaau

SEQ ID NO: 3845611 - RNA, 17 nt, Human
ucaacuuuuuauugccu

SEQ ID NO: 3845612 - RNA, 19 nt, Human
ucaacuuuuuauugccuuc

SEQ ID NO: 3845613 - RNA, 18 nt, Human
ucaagaaaaauuauugua

SEQ ID NO: 3845614 - RNA, 23 nt, Human
ucaagaaaacaggcacugcccug

SEQ ID NO: 3845615 - RNA, 15 nt, Human
ucaagaaacagccag

SEQ ID NO: 3845616 - RNA, 16 nt, Human
ucaagaaacagccagc

SEQ ID NO: 3845617 - RNA, 17 nt, Human
ucaagaaacagccagca

SEQ ID NO: 3845618 - RNA, 12 nt, Human
ucaagaaacuga

SEQ ID NO: 3845619 - RNA, 17 nt, Human
ucaagaaacugaggaau

SEQ ID NO: 3845620 - RNA, 18 nt, Human
ucaagaaacugaggaauu

SEQ ID NO: 3845621 - RNA, 17 nt, Human
ucaagaaauaaguuuuu

SEQ ID NO: 3845622 - RNA, 14 nt, Human
ucaagaaccuggaa

SEQ ID NO: 3845623 - RNA, 12 nt, Human
ucaagaagacau

SEQ ID NO: 3845624 - RNA, 20 nt, Human
ucaagaagggcugcaugaug

SEQ ID NO: 3845625 - RNA, 22 nt, Human
ucaagaaguucuuugauucugu

SEQ ID NO: 3845626 - RNA, 19 nt, Human
ucaagaauagcauuguaaa

SEQ ID NO: 3845627 - RNA, 21 nt, Human
ucaagacauagcauccaagug

SEQ ID NO: 3845628 - RNA, 17 nt, Human
ucaagacauuaaaucua

SEQ ID NO: 3845629 - RNA, 16 nt, Human
ucaagaccagccuggc

SEQ ID NO: 3845630 - RNA, 16 nt, Human
ucaagaccuucucccc

SEQ ID NO: 3845631 - RNA, 16 nt, Human
ucaagacugaauucca

SEQ ID NO: 3845632 - RNA, 15 nt, Human
ucaagagauuuaauu

SEQ ID NO: 3845633 - RNA, 18 nt, Human
ucaagagauuuaauuaau

SEQ ID NO: 3845634 - RNA, 17 nt, Human
ucaagagccuuaaaaca

SEQ ID NO: 3845635 - RNA, 20 nt, Human
ucaagagccuuaaaacauca

SEQ ID NO: 3845636 - RNA, 22 nt, Human
ucaagaggaaugaaaaaagcuu

SEQ ID NO: 3845637 - RNA, 12 nt, Human
ucaagaggcuga

SEQ ID NO: 3845638 - RNA, 18 nt, Human
ucaagaggcugagacagg

SEQ ID NO: 3845639 - RNA, 20 nt, Human
ucaagagggcacugguggcc

SEQ ID NO: 3845640 - RNA, 17 nt, Human
ucaagagggucugagga

SEQ ID NO: 3845641 - RNA, 19 nt, Human
ucaagaggugggagggccc

SEQ ID NO: 3845642 - RNA, 21 nt, Human
ucaagagguucucgacuggag

SEQ ID NO: 3845643 - RNA, 20 nt, Human
ucaagagugaauucccucac

SEQ ID NO: 3845644 - RNA, 18 nt, Human
ucaagagugguaucuugc

SEQ ID NO: 3845645 - RNA, 21 nt, Human
ucaagauacugcuacuguaau

SEQ ID NO: 3845646 - RNA, 16 nt, Human
ucaagaucaaugaaau

SEQ ID NO: 3845647 - RNA, 22 nt, Human
ucaagaugaugaugaucuuuaa

SEQ ID NO: 3845648 - RNA, 19 nt, Human
ucaagaugggggcagggcu

SEQ ID NO: 3845649 - RNA, 20 nt, Human
ucaagaugggggcagggcug

SEQ ID NO: 3845650 - RNA, 21 nt, Human
ucaagaugggggcagggcugu

SEQ ID NO: 3845651 - RNA, 17 nt, Human
ucaagaugucagacugg

SEQ ID NO: 3845652 - RNA, 18 nt, Human
ucaagaugucagacuggc

SEQ ID NO: 3845653 - RNA, 14 nt, Human
ucaagauucagcua

SEQ ID NO: 3845654 - RNA, 19 nt, Human
ucaagauucccaggaguuc

SEQ ID NO: 3845655 - RNA, 16 nt, Human
ucaagauuuugaaugc

SEQ ID NO: 3845656 - RNA, 14 nt, Human
ucaagcaauccucc

SEQ ID NO: 3845657 - RNA, 23 nt, Human
ucaagcagcgaccgcccccuccu

SEQ ID NO: 3845658 - RNA, 14 nt, Human
ucaagcaugaagau

SEQ ID NO: 3845659 - RNA, 16 nt, Human
ucaagcaugaagauaa

SEQ ID NO: 3845660 - RNA, 17 nt, Human
ucaagccaauccccucc

SEQ ID NO: 3845661 - RNA, 18 nt, Human
ucaagccaauccccuccu

SEQ ID NO: 3845662 - RNA, 20 nt, Human
ucaagccaauccccuccuug

SEQ ID NO: 3845663 - RNA, 12 nt, Human
ucaagccaccaa

SEQ ID NO: 3845664 - RNA, 14 nt, Human
ucaagcccaggagg

SEQ ID NO: 3845665 - RNA, 19 nt, Human
ucaagcccaggaggacugc

SEQ ID NO: 3845666 - RNA, 17 nt, Human
ucaagccgcaucccaga

SEQ ID NO: 3845667 - RNA, 14 nt, Human
ucaagccucugguc

SEQ ID NO: 3845668 - RNA, 13 nt, Human
ucaagcuaauaaa

SEQ ID NO: 3845669 - RNA, 20 nt, Human
ucaagcuaauaaaauaucau

SEQ ID NO: 3845670 - RNA, 23 nt, Human
ucaagcuaauaaaauaucauuca

SEQ ID NO: 3845671 - RNA, 18 nt, Human
ucaagcuagaaggccaca

SEQ ID NO: 3845672 - RNA, 19 nt, Human
ucaagcuagaaggccacau

SEQ ID NO: 3845673 - RNA, 18 nt, Human
ucaagcuccaucuuauuu

SEQ ID NO: 3845674 - RNA, 12 nt, Human
ucaagcucugag

SEQ ID NO: 3845675 - RNA, 21 nt, Human
ucaagcucugagggaaagggc

SEQ ID NO: 3845676 - RNA, 20 nt, Human
ucaagcugaguauuaaaaug

SEQ ID NO: 3845677 - RNA, 14 nt, Human
ucaagcugcuugga

SEQ ID NO: 3845678 - RNA, 21 nt, Human
ucaaggaaagggggucccagu

SEQ ID NO: 3845679 - RNA, 18 nt, Human
ucaaggaauaaugggcuu

SEQ ID NO: 3845680 - RNA, 18 nt, Human
ucaaggacaaagucucca

SEQ ID NO: 3845681 - RNA, 19 nt, Human
ucaaggacaaagucuccag

SEQ ID NO: 3845682 - RNA, 20 nt, Human
ucaaggacaaagucuccagc

SEQ ID NO: 3845683 - RNA, 22 nt, Human
ucaaggacaaagucuccagccc

SEQ ID NO: 3845684 - RNA, 23 nt, Human
ucaaggacaaagucuccagccca

SEQ ID NO: 3845685 - RNA, 22 nt, Human
ucaaggaccaacaagggcagug

SEQ ID NO: 3845686 - RNA, 22 nt, Human
ucaaggacucugguuucucauu

SEQ ID NO: 3845687 - RNA, 20 nt, Human
ucaaggacuuucugaagccu

SEQ ID NO: 3845688 - RNA, 13 nt, Human
ucaaggauccuga

SEQ ID NO: 3845689 - RNA, 17 nt, Human
ucaaggauccugagcca

SEQ ID NO: 3845690 - RNA, 19 nt, Human
ucaaggauccugagccaga

SEQ ID NO: 3845691 - RNA, 23 nt, Human
ucaaggauccugagccagauuuc

SEQ ID NO: 3845692 - RNA, 17 nt, Human
ucaaggcacucuagauu

SEQ ID NO: 3845693 - RNA, 22 nt, Human
ucaaggccagcaagguggagug

SEQ ID NO: 3845694 - RNA, 17 nt, Human
ucaaggccucccacagu

SEQ ID NO: 3845695 - RNA, 18 nt, Human
ucaaggccugucccuggc

SEQ ID NO: 3845696 - RNA, 18 nt, Human
ucaaggcugcuuagaauc

SEQ ID NO: 3845697 - RNA, 14 nt, Human
ucaaggcuuagacc

SEQ ID NO: 3845698 - RNA, 17 nt, Human
ucaaggcuuauauucaa

SEQ ID NO: 3845699 - RNA, 14 nt, Human
ucaaggcuuccacu

SEQ ID NO: 3845700 - RNA, 20 nt, Human
ucaagggaauguaacugcug

SEQ ID NO: 3845701 - RNA, 21 nt, Human
ucaagggaauguaacugcuga

SEQ ID NO: 3845702 - RNA, 17 nt, Human
ucaagggcuuacuauuu

SEQ ID NO: 3845703 - RNA, 19 nt, Human
ucaagggcuuuccugugcc

SEQ ID NO: 3845704 - RNA, 16 nt, Human
ucaagggugcgucugg

SEQ ID NO: 3845705 - RNA, 16 nt, Human
ucaagguaaaauucua

SEQ ID NO: 3845706 - RNA, 17 nt, Human
ucaagguaaaauucuaa

SEQ ID NO: 3845707 - RNA, 15 nt, Human
ucaaggucguuuuuu

SEQ ID NO: 3845708 - RNA, 18 nt, Human
ucaagguuuuagguucua

SEQ ID NO: 3845709 - RNA, 20 nt, Human
ucaagguuuuagguucuaaa

SEQ ID NO: 3845710 - RNA, 22 nt, Human
ucaagguuuuagguucuaaagu

SEQ ID NO: 3845711 - RNA, 23 nt, Human
ucaagguuuuagguucuaaaguu

SEQ ID NO: 3845712 - RNA, 16 nt, Human
ucaaguaagaagacau

SEQ ID NO: 3845713 - RNA, 18 nt, Human
ucaaguaagaagacauga

SEQ ID NO: 3845714 - RNA, 12 nt, Human
ucaaguauuacu

SEQ ID NO: 3845715 - RNA, 15 nt, Human
ucaaguauuauaaac

SEQ ID NO: 3845716 - RNA, 16 nt, Human
ucaaguauuauaaaca

SEQ ID NO: 3845717 - RNA, 21 nt, Human
gcguguggcucacguguguga

SEQ ID NO: 3845718 - RNA, 15 nt, Human
gcguguguagaguua

SEQ ID NO: 3845719 - RNA, 22 nt, Human
gcguguguagaguuaagaagcu

SEQ ID NO: 3845720 - RNA, 16 nt, Human
gcguguguggguggau

SEQ ID NO: 3845721 - RNA, 23 nt, Human
gcguguguggguggauauaaaua

SEQ ID NO: 3845722 - RNA, 23 nt, Human
gcguguucauaucuacucuuuac

SEQ ID NO: 3845723 - RNA, 18 nt, Human
gcguuagaaugaggagga

SEQ ID NO: 3845724 - RNA, 18 nt, Human
gcguuauaguaacuccca

SEQ ID NO: 3845725 - RNA, 19 nt, Human
gcguuauaguaacucccau

SEQ ID NO: 3845726 - RNA, 22 nt, Human
gcguuauuggucggcagccuuc

SEQ ID NO: 3845727 - RNA, 22 nt, Human
gcguucauggaacgcguugaaa

SEQ ID NO: 3845728 - RNA, 17 nt, Human
gcguuccaugaugcugg

SEQ ID NO: 3845729 - RNA, 13 nt, Human
gcguuccuuucuu

SEQ ID NO: 3845730 - RNA, 15 nt, Human
gcguuccuuucuuuu

SEQ ID NO: 3845731 - RNA, 22 nt, Human
gcguucuuguaauuuuacacgc

SEQ ID NO: 3845732 - RNA, 23 nt, Human
gcguugaaauuguaauuauaucu

SEQ ID NO: 3845733 - RNA, 24 nt, Human
gcguugaaauuguaauuauaucug

SEQ ID NO: 3845734 - RNA, 14 nt, Human
gcguugcuuucacu

SEQ ID NO: 3845735 - RNA, 14 nt, Human
gcguuggaauuaaa

SEQ ID NO: 3845736 - RNA, 15 nt, Human
gcguuggucucugca

SEQ ID NO: 3845737 - RNA, 14 nt, Human
gcguuguaaaauau

SEQ ID NO: 3845738 - RNA, 15 nt, Human
gcguuguaaaauaua

SEQ ID NO: 3845739 - RNA, 16 nt, Human
gcguuuagaccaagga

SEQ ID NO: 3845740 - RNA, 18 nt, Human
gcguuucuaugacacaug

SEQ ID NO: 3845741 - RNA, 22 nt, Human
gcguuugaccuuuuauguagua

SEQ ID NO: 3845742 - RNA, 13 nt, Human
gcuaaaaagcaac

SEQ ID NO: 3845743 - RNA, 18 nt, Human
gcuaaaaaugagcuugau

SEQ ID NO: 3845744 - RNA, 14 nt, Human
gcuaaaaaugggac

SEQ ID NO: 3845745 - RNA, 17 nt, Human
gcuaaaauaaagaaaua

SEQ ID NO: 3845746 - RNA, 12 nt, Human
gcuaaaauguuu

SEQ ID NO: 3845747 - RNA, 19 nt, Human
ucaguacccucucagcucc

SEQ ID NO: 3845748 - RNA, 13 nt, Human
ucaguaccuggag

SEQ ID NO: 3845749 - RNA, 14 nt, Human
ucaguaccuggagg

SEQ ID NO: 3845750 - RNA, 16 nt, Human
ucaguacuucagcaag

SEQ ID NO: 3845751 - RNA, 19 nt, Human
ucaguacuucagcaagaga

SEQ ID NO: 3845752 - RNA, 23 nt, Human
ucaguacuugugaaacacagcug

SEQ ID NO: 3845753 - RNA, 24 nt, Human
ucaguacuugugaaacacagcugu

SEQ ID NO: 3845754 - RNA, 19 nt, Human
ucaguaguuugcauuucag

SEQ ID NO: 3845755 - RNA, 20 nt, Human
ucaguaguuugcauuucaga

SEQ ID NO: 3845756 - RNA, 21 nt, Human
ucaguaguuugcauuucagaa

SEQ ID NO: 3845757 - RNA, 15 nt, Human
ucaguauaaacaaag

SEQ ID NO: 3845758 - RNA, 17 nt, Human
ucaguauaaacaaaguu

SEQ ID NO: 3845759 - RNA, 13 nt, Human
ucaguaucaggcc

SEQ ID NO: 3845760 - RNA, 16 nt, Human
ucaguauguauucuuu

SEQ ID NO: 3845761 - RNA, 18 nt, Human
ucaguauguuuuacacug

SEQ ID NO: 3845762 - RNA, 21 nt, Human
ucaguauuaauacuaaaauau

SEQ ID NO: 3845763 - RNA, 14 nt, Human
ucaguauugaagca

SEQ ID NO: 3845764 - RNA, 18 nt, Human
ucaguauugaagcauuuu

SEQ ID NO: 3845765 - RNA, 24 nt, Human
ucaguauuguuuugguuugcuacu

SEQ ID NO: 3845766 - RNA, 20 nt, Human
ucaguauuuaacuaauuaua

SEQ ID NO: 3845767 - RNA, 16 nt, Human
ucaguauuuucccugc

SEQ ID NO: 3845768 - RNA, 18 nt, Human
ucaguauuuucccugcua

SEQ ID NO: 3845769 - RNA, 22 nt, Human
ucaguauuuuggagaaauuauu

SEQ ID NO: 3845770 - RNA, 14 nt, Human
ucagucaaaacuuu

SEQ ID NO: 3845771 - RNA, 23 nt, Human
ucagucagaaaacuuuaaaaaau

SEQ ID NO: 3845772 - RNA, 15 nt, Human
ucagucaugcauaaa

SEQ ID NO: 3845773 - RNA, 13 nt, Human
ucagucauuaaau

SEQ ID NO: 3845774 - RNA, 12 nt, Human
ucaguccaggau

SEQ ID NO: 3845775 - RNA, 14 nt, Human
ucaguccauuuaua

SEQ ID NO: 3845776 - RNA, 23 nt, Human
ucaguccauuuauauaugaaaac

SEQ ID NO: 3845777 - RNA, 13 nt, Human
ucagucccuaugu

SEQ ID NO: 3845778 - RNA, 16 nt, Human
ucagucccuauguauu

SEQ ID NO: 3845779 - RNA, 16 nt, Human
ucaguccugcuccaga

SEQ ID NO: 3845780 - RNA, 18 nt, Human
ucaguccuguaguuuuau

SEQ ID NO: 3845781 - RNA, 15 nt, Human
ucagucuauccacag

SEQ ID NO: 3845782 - RNA, 18 nt, Human
ucagucuauccacagaga

SEQ ID NO: 3845783 - RNA, 18 nt, Human
ucagucucagaaugucau

SEQ ID NO: 3845784 - RNA, 19 nt, Human
ucagucucccuucucccau

SEQ ID NO: 3845785 - RNA, 23 nt, Human
ucagucucccuuucccuucuugg

SEQ ID NO: 3845786 - RNA, 21 nt, Human
ucagucucuauaccaauaaag

SEQ ID NO: 3845787 - RNA, 19 nt, Human
ucagucugcuuagaaauaa

SEQ ID NO: 3845788 - RNA, 13 nt, Human
ucagucugguggg

SEQ ID NO: 3845789 - RNA, 19 nt, Human
ucagucuggugggaggacg

SEQ ID NO: 3845790 - RNA, 20 nt, Human
ucagucuucucucacuuuga

SEQ ID NO: 3845791 - RNA, 22 nt, Human
ucagucuuuaaucugagaggcc

SEQ ID NO: 3845792 - RNA, 17 nt, Human
ucagugaaguugcugcu

SEQ ID NO: 3845793 - RNA, 11 nt, Human
ucagugacaga

SEQ ID NO: 3845794 - RNA, 16 nt, Human
ucagugagccaagauc

SEQ ID NO: 3845795 - RNA, 17 nt, Human
ucagugaggcccaggga

SEQ ID NO: 3845796 - RNA, 15 nt, Human
ucagugaugugccua

SEQ ID NO: 3845797 - RNA, 17 nt, Human
ucagugcaaccucugcu

SEQ ID NO: 3845798 - RNA, 23 nt, Human
ucagugcagcccguguggccccu

SEQ ID NO: 3845799 - RNA, 21 nt, Human
ucagugccaacuguggcuggu

SEQ ID NO: 3845800 - RNA, 14 nt, Human
ucagugccgccgcc

SEQ ID NO: 3845801 - RNA, 23 nt, Human
ucagugccgccgccucgcccacc

SEQ ID NO: 3845802 - RNA, 9 nt, Human
ucagugccu

SEQ ID NO: 3845803 - RNA, 16 nt, Human
ucagugccuuauggaa

SEQ ID NO: 3845804 - RNA, 19 nt, Human
ucagugcugccugucccca

SEQ ID NO: 3845805 - RNA, 19 nt, Human
ucagugcuguggccugggc

SEQ ID NO: 3845806 - RNA, 16 nt, Human
ucaguggaagaagcag

SEQ ID NO: 3845807 - RNA, 12 nt, Human
ucaguggcagcu

SEQ ID NO: 3845808 - RNA, 20 nt, Human
ucaguggcuucaucugucaa

SEQ ID NO: 3845809 - RNA, 15 nt, Human
ucagugggaacguga

SEQ ID NO: 3845810 - RNA, 17 nt, Human
ucaguggguuaacauca

SEQ ID NO: 3845811 - RNA, 20 nt, Human
ucaguggguuaacaucaguu

SEQ ID NO: 3845812 - RNA, 23 nt, Human
ucagugguuggcaauuguuucaa

SEQ ID NO: 3845813 - RNA, 18 nt, Human
ucaguguaccauuugccu

SEQ ID NO: 3845814 - RNA, 17 nt, Human
ucaguguacccccgccc

SEQ ID NO: 3845815 - RNA, 21 nt, Human
ucaguguacccccgcccaggc

SEQ ID NO: 3845816 - RNA, 15 nt, Human
ucaguguagccccaa

SEQ ID NO: 3845817 - RNA, 14 nt, Human
ucaguguaguuaau

SEQ ID NO: 3845818 - RNA, 15 nt, Human
ucaguguauuucagu

SEQ ID NO: 3845819 - RNA, 14 nt, Human
ucagugucucacac

SEQ ID NO: 3845820 - RNA, 22 nt, Human
ucagugugccccccauccuggc

SEQ ID NO: 3845821 - RNA, 15 nt, Human
ucaguguuaaaaaau

SEQ ID NO: 3845822 - RNA, 17 nt, Human
ucaguguuaccugugug

SEQ ID NO: 3845823 - RNA, 18 nt, Human
ucaguguuaccugugugc

SEQ ID NO: 3845824 - RNA, 14 nt, Human
ucaguguuauuagu

SEQ ID NO: 3845825 - RNA, 18 nt, Human
ucaguguuguugcucuag

SEQ ID NO: 3845826 - RNA, 18 nt, Human
ucaguguuuaugugcuau

SEQ ID NO: 3845827 - RNA, 20 nt, Human
ucaguguuuuggacuccauc

SEQ ID NO: 3845828 - RNA, 23 nt, Human
ucaguguuuuggacuccaucucu

SEQ ID NO: 3845829 - RNA, 14 nt, Human
ucaguguuuuuccu

SEQ ID NO: 3845830 - RNA, 20 nt, Human
ucaguuaacuauugcauuua

SEQ ID NO: 3845831 - RNA, 16 nt, Human
ucaguuaagaaaaaaa

SEQ ID NO: 3845832 - RNA, 13 nt, Human
ucaguuaagaaau

SEQ ID NO: 3845833 - RNA, 16 nt, Human
ucaguuaagccuuugg

SEQ ID NO: 3845834 - RNA, 14 nt, Human
ucaguuacagaaag

SEQ ID NO: 3845835 - RNA, 15 nt, Human
ucaguuacucagccc

SEQ ID NO: 3845836 - RNA, 19 nt, Human
ucaguuacucagcccuggg

SEQ ID NO: 3845837 - RNA, 22 nt, Human
ucaguuagagcugacacaaacc

SEQ ID NO: 3845838 - RNA, 13 nt, Human
ucaguuauucauu

SEQ ID NO: 3845839 - RNA, 17 nt, Human
ucaguuauugguggaau

SEQ ID NO: 3845840 - RNA, 21 nt, Human
ucaguucaaagucaugauguu

SEQ ID NO: 3845841 - RNA, 22 nt, Human
ucaguucaaagucaugauguuu

SEQ ID NO: 3845842 - RNA, 19 nt, Human
ucaguucauugugguccuu

SEQ ID NO: 3845843 - RNA, 17 nt, Human
ucaguucccagaaucaa

SEQ ID NO: 3845844 - RNA, 20 nt, Human
ucaguucccuuggccucaga

SEQ ID NO: 3845845 - RNA, 22 nt, Human
ucaguucccuuggccucagaau

SEQ ID NO: 3845846 - RNA, 19 nt, Human
ucaguuccgucagaaagug

SEQ ID NO: 3845847 - RNA, 17 nt, Human
ucaguuccucuuugcau

SEQ ID NO: 3845848 - RNA, 21 nt, Human
ucaguuccucuuugcauggaa

SEQ ID NO: 3845849 - RNA, 20 nt, Human
ucaguuccugcagcagagcc

SEQ ID NO: 3845850 - RNA, 16 nt, Human
ucaguuccuuugugug

SEQ ID NO: 3845851 - RNA, 20 nt, Human
ucaguuccuuuguguguacu

SEQ ID NO: 3845852 - RNA, 22 nt, Human
ucaguuccuuuguguguacuca

SEQ ID NO: 3845853 - RNA, 13 nt, Human
ucaguucuaggaa

SEQ ID NO: 3845854 - RNA, 15 nt, Human
ucaguucuaggaaaa

SEQ ID NO: 3845855 - RNA, 18 nt, Human
ucaguugauuuucuggau

SEQ ID NO: 3845856 - RNA, 16 nt, Human
ucaguugcaauaauac

SEQ ID NO: 3845857 - RNA, 17 nt, Human
ucaguugcuaaacacug

SEQ ID NO: 3845858 - RNA, 14 nt, Human
ucaguuggcugacu

SEQ ID NO: 3845859 - RNA, 18 nt, Human
ucaguuguagaauguauu

SEQ ID NO: 3845860 - RNA, 21 nt, Human
ucaguuguagaauguauugua

SEQ ID NO: 3845861 - RNA, 13 nt, Human
ucaguugucucug

SEQ ID NO: 3845862 - RNA, 13 nt, Human
ucaguuguguuuu

SEQ ID NO: 3845863 - RNA, 14 nt, Human
ucaguuguguuuuu

SEQ ID NO: 3845864 - RNA, 17 nt, Human
ucaguuguuaguguguc

SEQ ID NO: 3845865 - RNA, 12 nt, Human
ucaguuguuuuc

SEQ ID NO: 3845866 - RNA, 19 nt, Human
ucaguuuaauccuucuagu

SEQ ID NO: 3845867 - RNA, 14 nt, Human
ucaguuuauguuuu

SEQ ID NO: 3845868 - RNA, 16 nt, Human
ucaguuuauguuuugg

SEQ ID NO: 3845869 - RNA, 20 nt, Human
ucaguuuccaauuauuugac

SEQ ID NO: 3845870 - RNA, 20 nt, Human
ucaguuuccuggucuguaga

SEQ ID NO: 3845871 - RNA, 18 nt, Human
ucaguuuguccuguagag

SEQ ID NO: 3845872 - RNA, 19 nt, Human
ucaguuuguuggaaaguaa

SEQ ID NO: 3845873 - RNA, 14 nt, Human
ucaguuuuaucuuu

SEQ ID NO: 3845874 - RNA, 18 nt, Human
ucaguuuuuuguuuuaca

SEQ ID NO: 3845875 - RNA, 22 nt, Human
ucaguuuuuuuuuauacacugu

SEQ ID NO: 3845876 - RNA, 16 nt, Human
ucauaaaccuuaagua

SEQ ID NO: 3845877 - RNA, 13 nt, Human
ucauaaacugugu

SEQ ID NO: 3845878 - RNA, 14 nt, Human
ucauaaacugugug

SEQ ID NO: 3845879 - RNA, 11 nt, Human
ucauaaaugaa

SEQ ID NO: 3845880 - RNA, 22 nt, Human
ucauaaauuauuugauuauuua

SEQ ID NO: 3845881 - RNA, 18 nt, Human
gcuaccuguguggacagg

SEQ ID NO: 3845882 - RNA, 23 nt, Human
gcuaccuugccccaacccuucuu

SEQ ID NO: 3845883 - RNA, 21 nt, Human
gcuaccuugugacccagcacu

SEQ ID NO: 3845884 - RNA, 17 nt, Human
gcuaccuuucaaagcuu

SEQ ID NO: 3845885 - RNA, 20 nt, Human
gcuaccuuuguauucucucc

SEQ ID NO: 3845886 - RNA, 21 nt, Human
gcuacuaaguucacauuagaa

SEQ ID NO: 3845887 - RNA, 18 nt, Human
gcuacuaaugauguuuuc

SEQ ID NO: 3845888 - RNA, 17 nt, Human
gcuacucacucaaguuc

SEQ ID NO: 3845889 - RNA, 22 nt, Human
gcuacucacucaaguucaagga

SEQ ID NO: 3845890 - RNA, 14 nt, Human
gcuacucagaagcc

SEQ ID NO: 3845891 - RNA, 23 nt, Human
ucauugccuuaacuggagcccca

SEQ ID NO: 3845892 - RNA, 23 nt, Human
ucauugcugaaaaugguauuuuc

SEQ ID NO: 3845893 - RNA, 15 nt, Human
ucauugcugagccuc

SEQ ID NO: 3845894 - RNA, 21 nt, Human
ucauugcugucugcagccuug

SEQ ID NO: 3845895 - RNA, 12 nt, Human
ucauugcuucuu

SEQ ID NO: 3845896 - RNA, 11 nt, Human
ucauugcuuua

SEQ ID NO: 3845897 - RNA, 23 nt, Human
ucauugcuuugaagcaguugugu

SEQ ID NO: 3845898 - RNA, 21 nt, Human
ucauuggauucugagagcugu

SEQ ID NO: 3845899 - RNA, 14 nt, Human
ucauuggcuuuauc

SEQ ID NO: 3845900 - RNA, 17 nt, Human
ucauuggucuaauuuau

SEQ ID NO: 3845901 - RNA, 13 nt, Human
ucauuguaauguu

SEQ ID NO: 3845902 - RNA, 19 nt, Human
ucauuguaauguugugaau

SEQ ID NO: 3845903 - RNA, 14 nt, Human
ucauuguacaguuu

SEQ ID NO: 3845904 - RNA, 17 nt, Human
ucauuguacaguuuguu

SEQ ID NO: 3845905 - RNA, 21 nt, Human
ucauuguacuaccuguguaua

SEQ ID NO: 3845906 - RNA, 14 nt, Human
ucauuguagaaaag

SEQ ID NO: 3845907 - RNA, 14 nt, Human
ucauuguauaaaaa

SEQ ID NO: 3845908 - RNA, 16 nt, Human
ucauuguauaaaaaua

SEQ ID NO: 3845909 - RNA, 22 nt, Human
ucauuguauauauguguguuua

SEQ ID NO: 3845910 - RNA, 15 nt, Human
ucauuguaugaugug

SEQ ID NO: 3845911 - RNA, 14 nt, Human
ucauuguauguggu

SEQ ID NO: 3845912 - RNA, 15 nt, Human
ucauuguauguuauu

SEQ ID NO: 3845913 - RNA, 15 nt, Human
ucauugugaaauuau

SEQ ID NO: 3845914 - RNA, 23 nt, Human
ucauuguuuauuaacaaauuaug

SEQ ID NO: 3845915 - RNA, 13 nt, Human
ucauuguuuugaa

SEQ ID NO: 3845916 - RNA, 14 nt, Human
ucauuuaaaaugau

SEQ ID NO: 3845917 - RNA, 17 nt, Human
ucauuuaaaaugauuag

SEQ ID NO: 3845918 - RNA, 16 nt, Human
ucauuuaagggaaaaa

SEQ ID NO: 3845919 - RNA, 11 nt, Human
ucauuuaauaa

SEQ ID NO: 3845920 - RNA, 21 nt, Human
ucauuuacaagacaacauugu

SEQ ID NO: 3845921 - RNA, 15 nt, Human
ucauuuacuaaacau

SEQ ID NO: 3845922 - RNA, 13 nt, Human
ucauuuacugugg

SEQ ID NO: 3845923 - RNA, 17 nt, Human
ucauuuagcauguuguu

SEQ ID NO: 3845924 - RNA, 16 nt, Human
ucauuuagccuguccu

SEQ ID NO: 3845925 - RNA, 17 nt, Human
ucauuuagugaguuauu

SEQ ID NO: 3845926 - RNA, 21 nt, Human
ucauuuauaaaaccaucaaaa

SEQ ID NO: 3845927 - RNA, 19 nt, Human
ucauuuauaucgcuggcca

SEQ ID NO: 3845928 - RNA, 15 nt, Human
ucauuuaugaaaaga

SEQ ID NO: 3845929 - RNA, 18 nt, Human
ucauuuauuguuuaugua

SEQ ID NO: 3845930 - RNA, 13 nt, Human
ucauuuauuuuuu

SEQ ID NO: 3845931 - RNA, 19 nt, Human
ucauuucaaauacaucuuu

SEQ ID NO: 3845932 - RNA, 15 nt, Human
ucauuucaccccucc

SEQ ID NO: 3845933 - RNA, 23 nt, Human
gcucagguacagagaaggaaugu

SEQ ID NO: 3845934 - RNA, 16 nt, Human
gcucagguacuuguaa

SEQ ID NO: 3845935 - RNA, 17 nt, Human
gcucaggugcuggggcc

SEQ ID NO: 3845936 - RNA, 23 nt, Human
gcucagguggggucacucuggca

SEQ ID NO: 3845937 - RNA, 22 nt, Human
gcucaguaaacgggaacaugcc

SEQ ID NO: 3845938 - RNA, 23 nt, Human
gcucagucccaucagagagcgag

SEQ ID NO: 3845939 - RNA, 19 nt, Human
gcucagugaaguugcugcu

SEQ ID NO: 3845940 - RNA, 19 nt, Human
gcucagugcaaccucugcu

SEQ ID NO: 3845941 - RNA, 20 nt, Human
gcucagugcaaccucugcuu

SEQ ID NO: 3845942 - RNA, 19 nt, Human
gcucaguugcuaaacacug

SEQ ID NO: 3845943 - RNA, 19 nt, Human
gcucauauggggcugggag

SEQ ID NO: 3845944 - RNA, 16 nt, Human
gcucauauuccugcag

SEQ ID NO: 3845945 - RNA, 22 nt, Human
gcucauauuccugcagccugga

SEQ ID NO: 3845946 - RNA, 14 nt, Human
gcucauauuuugua

SEQ ID NO: 3845947 - RNA, 18 nt, Human
gcucauauuuuguauaua

SEQ ID NO: 3845948 - RNA, 22 nt, Human
gcucaucucugucccacuuggc

SEQ ID NO: 3845949 - RNA, 18 nt, Human
gcucaugcauagucccag

SEQ ID NO: 3845950 - RNA, 20 nt, Human
gcucaugggccccucugacu

SEQ ID NO: 3845951 - RNA, 21 nt, Human
gcucaugggccccucugacuc

SEQ ID NO: 3845952 - RNA, 15 nt, Human
gcucauguagcaauc

SEQ ID NO: 3845953 - RNA, 16 nt, Human
gcucauuaugccacuu

SEQ ID NO: 3845954 - RNA, 22 nt, Human
gcucauucauuuuauauugaaa

SEQ ID NO: 3845955 - RNA, 15 nt, Human
gcucauuuuuucuua

SEQ ID NO: 3845956 - RNA, 21 nt, Human
gcuccaaaccuucacacacag

SEQ ID NO: 3845957 - RNA, 17 nt, Human
gcuccaaagucauaauu

SEQ ID NO: 3845958 - RNA, 18 nt, Human
gcuccaaccugcaaagau

SEQ ID NO: 3845959 - RNA, 13 nt, Human
gcuccaacuccaa

SEQ ID NO: 3845960 - RNA, 14 nt, Human
gcuccaagaauuuc

SEQ ID NO: 3845961 - RNA, 16 nt, Human
gcuccaagaccuguug

SEQ ID NO: 3845962 - RNA, 18 nt, Human
gcuccaagaccuguuggu

SEQ ID NO: 3845963 - RNA, 18 nt, Human
gcuccaagauucuagaug

SEQ ID NO: 3845964 - RNA, 19 nt, Human
gcuccaagcucccaggcau

SEQ ID NO: 3845965 - RNA, 20 nt, Human
gcuccaaggggaaucagaac

SEQ ID NO: 3845966 - RNA, 16 nt, Human
gcuccacacccucucc

SEQ ID NO: 3845967 - RNA, 19 nt, Human
gcuccacacccucucccag

SEQ ID NO: 3845968 - RNA, 21 nt, Human
gcuccacacccucucccagga

SEQ ID NO: 3845969 - RNA, 16 nt, Human
gcuccacagccauccc

SEQ ID NO: 3845970 - RNA, 12 nt, Human
gcuccacagugu

SEQ ID NO: 3845971 - RNA, 23 nt, Human
gcuccaccagcaucaccugccug

SEQ ID NO: 3845972 - RNA, 20 nt, Human
gcuccaccccacucacagag

SEQ ID NO: 3845973 - RNA, 16 nt, Human
gcuccacccuuggccu

SEQ ID NO: 3845974 - RNA, 22 nt, Human
gcuccacccuuggccugucuca

SEQ ID NO: 3845975 - RNA, 13 nt, Human
gcuccacucugcu

SEQ ID NO: 3845976 - RNA, 19 nt, Human
gcuccacucugcuucucug

SEQ ID NO: 3845977 - RNA, 20 nt, Human
gcuccagaaaugucuaaaug

SEQ ID NO: 3845978 - RNA, 21 nt, Human
gcuccagacacauguccaaga

SEQ ID NO: 3845979 - RNA, 20 nt, Human
gcuccagaccugauccugga

SEQ ID NO: 3845980 - RNA, 23 nt, Human
gcuccagaccugauccuggaggc

SEQ ID NO: 3845981 - RNA, 23 nt, Human
gcuccagccaaccccuguggagc

SEQ ID NO: 3845982 - RNA, 17 nt, Human
gcuccagccugacauca

SEQ ID NO: 3845983 - RNA, 15 nt, Human
gcuccagccuggcuc

SEQ ID NO: 3845984 - RNA, 14 nt, Human
gcuccagcucacca

SEQ ID NO: 3845985 - RNA, 20 nt, Human
gcuccagcucaccagcccca

SEQ ID NO: 3845986 - RNA, 20 nt, Human
gcuccagcugcucugucuuc

SEQ ID NO: 3845987 - RNA, 23 nt, Human
gcuccagcuggccgggagccuga

SEQ ID NO: 3845988 - RNA, 20 nt, Human
gcuccagcuguucagcuggu

SEQ ID NO: 3845989 - RNA, 21 nt, Human
gcuccagcuguucagcugguu

SEQ ID NO: 3845990 - RNA, 21 nt, Human
gcuccagcuuucugccaucua

SEQ ID NO: 3845991 - RNA, 12 nt, Human
gcuccaggagca

SEQ ID NO: 3845992 - RNA, 14 nt, Human
gcuccaggagcagc

SEQ ID NO: 3845993 - RNA, 17 nt, Human
gcuccaggagcagccac

SEQ ID NO: 3845994 - RNA, 22 nt, Human
gcuccaggcagcacccagguuu

SEQ ID NO: 3845995 - RNA, 13 nt, Human
gcuccaggcaggc

SEQ ID NO: 3845996 - RNA, 21 nt, Human
gcuccaggcaggcuaaggcgu

SEQ ID NO: 3845997 - RNA, 17 nt, Human
gcuccaggccagggggc

SEQ ID NO: 3845998 - RNA, 16 nt, Human
gcuccaggccugcagc

SEQ ID NO: 3845999 - RNA, 22 nt, Human
gcuccaggccugcagcaggagu

SEQ ID NO: 3846000 - RNA, 15 nt, Human
gcuccagggccagau

SEQ ID NO: 3846001 - RNA, 21 nt, Human
gcuccagguaccuugaccuuu

SEQ ID NO: 3846002 - RNA, 21 nt, Human
gcuccagucaacaaacuauuu

SEQ ID NO: 3846003 - RNA, 18 nt, Human
gcuccaguccugcucucu

SEQ ID NO: 3846004 - RNA, 23 nt, Human
gcuccaguccugcucucuaccca

SEQ ID NO: 3846005 - RNA, 20 nt, Human
gcuccagucugcugcccucc

SEQ ID NO: 3846006 - RNA, 21 nt, Human
gcuccaguggaagaagaaaac

SEQ ID NO: 3846007 - RNA, 16 nt, Human
gcuccaguguccugag

SEQ ID NO: 3846008 - RNA, 20 nt, Human
gcuccaguguccugagcuca

SEQ ID NO: 3846009 - RNA, 17 nt, Human
gcuccauacacacgcug

SEQ ID NO: 3846010 - RNA, 19 nt, Human
gcuccauaguuuggcauuu

SEQ ID NO: 3846011 - RNA, 14 nt, Human
gcuccaucaaugag

SEQ ID NO: 3846012 - RNA, 14 nt, Human
gcuccaucuccacu

SEQ ID NO: 3846013 - RNA, 19 nt, Human
gcuccaugcuccucacugc

SEQ ID NO: 3846014 - RNA, 23 nt, Human
gcuccaugcuccucacugcccgc

SEQ ID NO: 3846015 - RNA, 15 nt, Human
gcuccauggcugcca

SEQ ID NO: 3846016 - RNA, 16 nt, Human
gcuccauuuaaacaga

SEQ ID NO: 3846017 - RNA, 17 nt, Human
gcuccauuuacaaacua

SEQ ID NO: 3846018 - RNA, 20 nt, Human
gcuccauuuuuagugaaaua

SEQ ID NO: 3846019 - RNA, 11 nt, Human
gcucccaaggg

SEQ ID NO: 3846020 - RNA, 19 nt, Human
gcucccaaggggccugagc

SEQ ID NO: 3846021 - RNA, 20 nt, Human
gcucccaaggggccugagca

SEQ ID NO: 3846022 - RNA, 23 nt, Human
gcucccacaagccucugcccagg

SEQ ID NO: 3846023 - RNA, 15 nt, Human
gcucccacaagccug

SEQ ID NO: 3846024 - RNA, 17 nt, Human
gcucccacaagccugag

SEQ ID NO: 3846025 - RNA, 15 nt, Human
gcucccacaggcagc

SEQ ID NO: 3846026 - RNA, 15 nt, Human
gcucccacaggcccu

SEQ ID NO: 3846027 - RNA, 17 nt, Human
gcucccacaggcccuuc

SEQ ID NO: 3846028 - RNA, 18 nt, Human
gcucccaccccacccccu

SEQ ID NO: 3846029 - RNA, 18 nt, Human
gcucccaccuggcucugu

SEQ ID NO: 3846030 - RNA, 17 nt, Human
gcucccacuucugccag

SEQ ID NO: 3846031 - RNA, 12 nt, Human
gcucccagcagc

SEQ ID NO: 3846032 - RNA, 23 nt, Human
gcucccagcagcccuaaggaucu

SEQ ID NO: 3846033 - RNA, 14 nt, Human
gcucccagccaggc

SEQ ID NO: 3846034 - RNA, 16 nt, Human
uccaaagcuucccacg

SEQ ID NO: 3846035 - RNA, 19 nt, Human
uccaaagcuuuccuggaga

SEQ ID NO: 3846036 - RNA, 22 nt, Human
uccaaaggccauggagagcugg

SEQ ID NO: 3846037 - RNA, 14 nt, Human
uccaaaggcccccu

SEQ ID NO: 3846038 - RNA, 16 nt, Human
uccaaagguuucaacu

SEQ ID NO: 3846039 - RNA, 14 nt, Human
uccaaaguacacug

SEQ ID NO: 3846040 - RNA, 16 nt, Human
uccaaaguacacuguu

SEQ ID NO: 3846041 - RNA, 23 nt, Human
uccaaagucucuggaauuugaaa

SEQ ID NO: 3846042 - RNA, 13 nt, Human
uccaaauaaaaac

SEQ ID NO: 3846043 - RNA, 18 nt, Human
uccaaauaaaaacuaaau

SEQ ID NO: 3846044 - RNA, 17 nt, Human
uccaaauaagaaaccua

SEQ ID NO: 3846045 - RNA, 14 nt, Human
uccaaauaauaaag

SEQ ID NO: 3846046 - RNA, 19 nt, Human
uccaaaugaaugaccuugu

SEQ ID NO: 3846047 - RNA, 14 nt, Human
uccaaaugcagcuu

SEQ ID NO: 3846048 - RNA, 19 nt, Human
uccaaaugcagcuuuaaaa

SEQ ID NO: 3846049 - RNA, 19 nt, Human
uccaaauguccuccagaag

SEQ ID NO: 3846050 - RNA, 19 nt, Human
uccaaauucaguuucauaa

SEQ ID NO: 3846051 - RNA, 23 nt, Human
uccaaauuguuuaaauucacaau

SEQ ID NO: 3846052 - RNA, 16 nt, Human
uccaacaccacagaca

SEQ ID NO: 3846053 - RNA, 20 nt, Human
uccaacacugauuuccccuu

SEQ ID NO: 3846054 - RNA, 14 nt, Human
uccaacaggagcug

SEQ ID NO: 3846055 - RNA, 17 nt, Human
uccaacaggagcuggga

SEQ ID NO: 3846056 - RNA, 13 nt, Human
uccaacagugagu

SEQ ID NO: 3846057 - RNA, 18 nt, Human
uccaacaguuuaaugaag

SEQ ID NO: 3846058 - RNA, 20 nt, Human
uccaacaucacagcccagcc

SEQ ID NO: 3846059 - RNA, 15 nt, Human
uccaacccaugauga

SEQ ID NO: 3846060 - RNA, 17 nt, Human
uccaacccauuagccau

SEQ ID NO: 3846061 - RNA, 20 nt, Human
uccaaccccccagcacugag

SEQ ID NO: 3846062 - RNA, 24 nt, Human
uccaaccccucgcccagucccagc

SEQ ID NO: 3846063 - RNA, 16 nt, Human
uccaacccgaggcccg

SEQ ID NO: 3846064 - RNA, 14 nt, Human
uccaacccuagcaa

SEQ ID NO: 3846065 - RNA, 23 nt, Human
uccaacccucaucaccaacgucu

SEQ ID NO: 3846066 - RNA, 16 nt, Human
uccaaccuaaccugug

SEQ ID NO: 3846067 - RNA, 17 nt, Human
uccaaccuaaccugugu

SEQ ID NO: 3846068 - RNA, 17 nt, Human
uccaaccuggacaacaa

SEQ ID NO: 3846069 - RNA, 22 nt, Human
uccaacgaggcuaaguuaaugc

SEQ ID NO: 3846070 - RNA, 14 nt, Human
uccaacguggccca

SEQ ID NO: 3846071 - RNA, 16 nt, Human
uccaacguggcccaga

SEQ ID NO: 3846072 - RNA, 17 nt, Human
uccaacguggggcagca

SEQ ID NO: 3846073 - RNA, 21 nt, Human
uccaacguuuggaagauccug

SEQ ID NO: 3846074 - RNA, 20 nt, Human
uccaacuacuaauagaauaa

SEQ ID NO: 3846075 - RNA, 21 nt, Human
uccaacuaucucauuuccaag

SEQ ID NO: 3846076 - RNA, 14 nt, Human
uccaacuccagcaa

SEQ ID NO: 3846077 - RNA, 24 nt, Human
uccaacucuucccccucucccagu

SEQ ID NO: 3846078 - RNA, 16 nt, Human
uccaacugcugcccca

SEQ ID NO: 3846079 - RNA, 19 nt, Human
uccaacuguguucauuaga

SEQ ID NO: 3846080 - RNA, 15 nt, Human
uccaacuucauuuga

SEQ ID NO: 3846081 - RNA, 23 nt, Human
uccaacuuggcugcaggaaucuu

SEQ ID NO: 3846082 - RNA, 16 nt, Human
uccaagaaagaugaau

SEQ ID NO: 3846083 - RNA, 14 nt, Human
uccaagaagcccag

SEQ ID NO: 3846084 - RNA, 16 nt, Human
uccaagaauccacauu

SEQ ID NO: 3846085 - RNA, 20 nt, Human
uccaagaauccacauuucua

SEQ ID NO: 3846086 - RNA, 12 nt, Human
uccaagaaugcu

SEQ ID NO: 3846087 - RNA, 16 nt, Human
uccaagacauugucaa

SEQ ID NO: 3846088 - RNA, 20 nt, Human
uccaagacucuagaguccaa

SEQ ID NO: 3846089 - RNA, 18 nt, Human
uccaagagucuaaagaug

SEQ ID NO: 3846090 - RNA, 18 nt, Human
uccaagauauuuuaaaau

SEQ ID NO: 3846091 - RNA, 10 nt, Human
gcucccucag

SEQ ID NO: 3846092 - RNA, 12 nt, Human
gcucccucagac

SEQ ID NO: 3846093 - RNA, 19 nt, Human
gcucccucccaggacucug

SEQ ID NO: 3846094 - RNA, 20 nt, Human
gcucccuccccugcccuggu

SEQ ID NO: 3846095 - RNA, 19 nt, Human
gcucccuccgcccccaggu

SEQ ID NO: 3846096 - RNA, 20 nt, Human
gcucccuccgggucuuccua

SEQ ID NO: 3846097 - RNA, 18 nt, Human
gcucccuccuccaggccu

SEQ ID NO: 3846098 - RNA, 12 nt, Human
gcucccugaagc

SEQ ID NO: 3846099 - RNA, 17 nt, Human
gcucccugaagccagcc

SEQ ID NO: 3846100 - RNA, 20 nt, Human
gcucccugaagccagccuuc

SEQ ID NO: 3846101 - RNA, 12 nt, Human
gcucccugacug

SEQ ID NO: 3846102 - RNA, 13 nt, Human
gcucccugacugg

SEQ ID NO: 3846103 - RNA, 22 nt, Human
gcucccuguguccaccuguggg

SEQ ID NO: 3846104 - RNA, 12 nt, Human
gcucccuucagc

SEQ ID NO: 3846105 - RNA, 13 nt, Human
gcucccuucagcc

SEQ ID NO: 3846106 - RNA, 23 nt, Human
gcucccuucagcccccagccccu

SEQ ID NO: 3846107 - RNA, 21 nt, Human
gcucccuucaucuccagggag

SEQ ID NO: 3846108 - RNA, 16 nt, Human
gcucccuucccaccuc

SEQ ID NO: 3846109 - RNA, 18 nt, Human
gcucccuucccaccucuc

SEQ ID NO: 3846110 - RNA, 21 nt, Human
gcucccuucuacagccucaga

SEQ ID NO: 3846111 - RNA, 16 nt, Human
gcucccuucucuguag

SEQ ID NO: 3846112 - RNA, 14 nt, Human
gcucccuucuuccc

SEQ ID NO: 3846113 - RNA, 13 nt, Human
gcuccgcaggacu

SEQ ID NO: 3846114 - RNA, 13 nt, Human
gcuccgccucugc

SEQ ID NO: 3846115 - RNA, 22 nt, Human
gcuccgcugcuccuuggcuuac

SEQ ID NO: 3846116 - RNA, 14 nt, Human
gcuccgcugugugg

SEQ ID NO: 3846117 - RNA, 24 nt, Human
gcuccgcuuucuacccagcgagcc

SEQ ID NO: 3846118 - RNA, 23 nt, Human
gcuccggaggacucaccacugcc

SEQ ID NO: 3846119 - RNA, 21 nt, Human
gcuccgggacguggcaccucc

SEQ ID NO: 3846120 - RNA, 23 nt, Human
gcuccguccaggagccugugccu

SEQ ID NO: 3846121 - RNA, 15 nt, Human
gcuccgugccuccac

SEQ ID NO: 3846122 - RNA, 16 nt, Human
gcuccguggaggaggu

SEQ ID NO: 3846123 - RNA, 22 nt, Human
gcuccgugugggagaccggccu

SEQ ID NO: 3846124 - RNA, 23 nt, Human
gcuccgugugggagaccggccug

SEQ ID NO: 3846125 - RNA, 15 nt, Human
gcuccuaagcuucaa

SEQ ID NO: 3846126 - RNA, 13 nt, Human
gcuccuagaggga

SEQ ID NO: 3846127 - RNA, 14 nt, Human
gcuccuagagggag

SEQ ID NO: 3846128 - RNA, 19 nt, Human
gcuccuagagggaggggcc

SEQ ID NO: 3846129 - RNA, 21 nt, Human
gcuccuaggacccgucuccag

SEQ ID NO: 3846130 - RNA, 21 nt, Human
gcuccucaaccccuccccucc

SEQ ID NO: 3846131 - RNA, 15 nt, Human
gcuccucacuguggu

SEQ ID NO: 3846132 - RNA, 18 nt, Human
gcuccucagggacucagg

SEQ ID NO: 3846133 - RNA, 18 nt, Human
gcuccucauccagggcuc

SEQ ID NO: 3846134 - RNA, 19 nt, Human
gcuccucaugguggguuca

SEQ ID NO: 3846135 - RNA, 21 nt, Human
gcuccuccaggguggcagcaa

SEQ ID NO: 3846136 - RNA, 13 nt, Human
gcuccucccagcu

SEQ ID NO: 3846137 - RNA, 15 nt, Human
gcuccuccccuggag

SEQ ID NO: 3846138 - RNA, 22 nt, Human
gcuccucccucucaacacccag

SEQ ID NO: 3846139 - RNA, 19 nt, Human
gcuccucccuggcugcccu

SEQ ID NO: 3846140 - RNA, 21 nt, Human
gcuccucccuggcugcccugg

SEQ ID NO: 3846141 - RNA, 22 nt, Human
gcuccucccuggcugcccuggc

SEQ ID NO: 3846142 - RNA, 14 nt, Human
gcuccuccgugcuu

SEQ ID NO: 3846143 - RNA, 14 nt, Human
gcuccuccucccug

SEQ ID NO: 3846144 - RNA, 17 nt, Human
gcuccucgagggcaggg

SEQ ID NO: 3846145 - RNA, 20 nt, Human
gcuccucgagggcagggacu

SEQ ID NO: 3846146 - RNA, 13 nt, Human
gcuccucuccagg

SEQ ID NO: 3846147 - RNA, 22 nt, Human
gcuccucuccaggcacccuucu

SEQ ID NO: 3846148 - RNA, 19 nt, Human
gcuccucuccccagcaagu

SEQ ID NO: 3846149 - RNA, 16 nt, Human
gcuccucuccccagcc

SEQ ID NO: 3846150 - RNA, 23 nt, Human
gcuccucuccccagcccagagac

SEQ ID NO: 3846151 - RNA, 16 nt, Human
gcuccucuccuggagg

SEQ ID NO: 3846152 - RNA, 17 nt, Human
gcuccucuccuggagga

SEQ ID NO: 3846153 - RNA, 12 nt, Human
gcuccucugcuu

SEQ ID NO: 3846154 - RNA, 14 nt, Human
gcuccucugggcag

SEQ ID NO: 3846155 - RNA, 19 nt, Human
gcuccucugggcaggaccu

SEQ ID NO: 3846156 - RNA, 21 nt, Human
gcuccucugucucgagcgccc

SEQ ID NO: 3846157 - RNA, 22 nt, Human
gcuccucugucucgagcgcccu

SEQ ID NO: 3846158 - RNA, 20 nt, Human
gcuccucuguggugucugcc

SEQ ID NO: 3846159 - RNA, 14 nt, Human
gcuccucuucccca

SEQ ID NO: 3846160 - RNA, 15 nt, Human
gcuccucuuccccag

SEQ ID NO: 3846161 - RNA, 16 nt, Human
gcuccugacacugcug

SEQ ID NO: 3846162 - RNA, 15 nt, Human
gcuccugaccaguug

SEQ ID NO: 3846163 - RNA, 19 nt, Human
gcuccugaccaguugcagu

SEQ ID NO: 3846164 - RNA, 24 nt, Human
gcuccugaccaguugcagucacuc

SEQ ID NO: 3846165 - RNA, 18 nt, Human
gcuccugaggggcaucug

SEQ ID NO: 3846166 - RNA, 21 nt, Human
gcuccugaggggcaucugccc

SEQ ID NO: 3846167 - RNA, 20 nt, Human
gcuccugcacuuacuugcuu

SEQ ID NO: 3846168 - RNA, 12 nt, Human
gcuccugcccac

SEQ ID NO: 3846169 - RNA, 11 nt, Human
gcuccugcccc

SEQ ID NO: 3846170 - RNA, 18 nt, Human
gcuccugccgcagagcug

SEQ ID NO: 3846171 - RNA, 18 nt, Human
gcuccugccuucuguccu

SEQ ID NO: 3846172 - RNA, 23 nt, Human
gcuccugcuaacggugcucaggg

SEQ ID NO: 3846173 - RNA, 14 nt, Human
gcuccugcuccaca

SEQ ID NO: 3846174 - RNA, 12 nt, Human
gcuccugcugca

SEQ ID NO: 3846175 - RNA, 14 nt, Human
gcuccugcugcacc

SEQ ID NO: 3846176 - RNA, 18 nt, Human
gcuccuggaaaggcucag

SEQ ID NO: 3846177 - RNA, 11 nt, Human
gcuccuggacc

SEQ ID NO: 3846178 - RNA, 15 nt, Human
gcugagucugaaggc

SEQ ID NO: 3846179 - RNA, 19 nt, Human
gcugagucugaaggcuggg

SEQ ID NO: 3846180 - RNA, 15 nt, Human
gcugagugcaggccc

SEQ ID NO: 3846181 - RNA, 16 nt, Human
gcugagugcaggccca

SEQ ID NO: 3846182 - RNA, 20 nt, Human
gcugagugcaggcccacccu

SEQ ID NO: 3846183 - RNA, 13 nt, Human
gcugaguuggugu

SEQ ID NO: 3846184 - RNA, 18 nt, Human
gcugaguuguugagucug

SEQ ID NO: 3846185 - RNA, 13 nt, Human
gcugauaaaagau

SEQ ID NO: 3846186 - RNA, 15 nt, Human
gcugauaauuuuaaa

SEQ ID NO: 3846187 - RNA, 18 nt, Human
gcugauacauaacuaaau

SEQ ID NO: 3846188 - RNA, 17 nt, Human
gcugauauauguguuuu

SEQ ID NO: 3846189 - RNA, 18 nt, Human
gcugauauauguguuuuu

SEQ ID NO: 3846190 - RNA, 20 nt, Human
gcugauauauguguuuuuca

SEQ ID NO: 3846191 - RNA, 16 nt, Human
gcugaucgccuucccc

SEQ ID NO: 3846192 - RNA, 19 nt, Human
gcugaucgccuuccccacc

SEQ ID NO: 3846193 - RNA, 22 nt, Human
gcugaucucagggaagcccagc

SEQ ID NO: 3846194 - RNA, 22 nt, Human
gcugaucugcggaucucagcuu

SEQ ID NO: 3846195 - RNA, 21 nt, Human
gcugaugaacuuauucuguag

SEQ ID NO: 3846196 - RNA, 21 nt, Human
gcugaugaaucacuguuuuua

SEQ ID NO: 3846197 - RNA, 21 nt, Human
gcugaugacccccccagcuuc

SEQ ID NO: 3846198 - RNA, 13 nt, Human
gcugaugacucaa

SEQ ID NO: 3846199 - RNA, 22 nt, Human
gcugaugacucaagauucccag

SEQ ID NO: 3846200 - RNA, 15 nt, Human
gcugaugcucauggu

SEQ ID NO: 3846201 - RNA, 14 nt, Human
gcugaugcugggcu

SEQ ID NO: 3846202 - RNA, 20 nt, Human
gcugaugcugggcugggugc

SEQ ID NO: 3846203 - RNA, 16 nt, Human
gcugauggagaaggaa

SEQ ID NO: 3846204 - RNA, 17 nt, Human
gcugauggagaaggaag

SEQ ID NO: 3846205 - RNA, 18 nt, Human
gcugauggugcaaugacc

SEQ ID NO: 3846206 - RNA, 22 nt, Human
gcugaugguguggccuguggcu

SEQ ID NO: 3846207 - RNA, 23 nt, Human
gcugaugucaauuucuguguugc

SEQ ID NO: 3846208 - RNA, 19 nt, Human
gcugaugucccuagaaaac

SEQ ID NO: 3846209 - RNA, 20 nt, Human
gcugauguccucaccacaug

SEQ ID NO: 3846210 - RNA, 14 nt, Human
gcugauguucagug

SEQ ID NO: 3846211 - RNA, 18 nt, Human
gcugauguucaguguaau

SEQ ID NO: 3846212 - RNA, 15 nt, Human
gcugauuaaaugaca

SEQ ID NO: 3846213 - RNA, 14 nt, Human
gcugauuacuguca

SEQ ID NO: 3846214 - RNA, 21 nt, Human
gcugauuacugucaauaaaca

SEQ ID NO: 3846215 - RNA, 22 nt, Human
gcugauuacugucaauaaacag

SEQ ID NO: 3846216 - RNA, 13 nt, Human
gcugauucucagg

SEQ ID NO: 3846217 - RNA, 20 nt, Human
gcugauucucagggucucug

SEQ ID NO: 3846218 - RNA, 23 nt, Human
gcugauuucuagguaggaaaugu

SEQ ID NO: 3846219 - RNA, 20 nt, Human
gcugauuuuaacaauaacua

SEQ ID NO: 3846220 - RNA, 18 nt, Human
gcugauuuuauucuugau

SEQ ID NO: 3846221 - RNA, 22 nt, Human
gcugcaaaggguaucaggugcu

SEQ ID NO: 3846222 - RNA, 23 nt, Human
gcugcaaaggguaucaggugcug

SEQ ID NO: 3846223 - RNA, 12 nt, Human
gcugcaaagugu

SEQ ID NO: 3846224 - RNA, 20 nt, Human
gcugcaaggacauucuugua

SEQ ID NO: 3846225 - RNA, 16 nt, Human
gcugcaaggccuuucu

SEQ ID NO: 3846226 - RNA, 23 nt, Human
gcugcaagguggcuccagcacca

SEQ ID NO: 3846227 - RNA, 19 nt, Human
gcugcacagggcagcuggg

SEQ ID NO: 3846228 - RNA, 23 nt, Human
gcugcacagggcagcugggccca

SEQ ID NO: 3846229 - RNA, 15 nt, Human
gcugcaccagguaga

SEQ ID NO: 3846230 - RNA, 13 nt, Human
gcugcacccucag

SEQ ID NO: 3846231 - RNA, 19 nt, Human
gcugcacccucaggcaggu

SEQ ID NO: 3846232 - RNA, 14 nt, Human
gcugcaccggcugg

SEQ ID NO: 3846233 - RNA, 19 nt, Human
gcugcaccugccagccugg

SEQ ID NO: 3846234 - RNA, 20 nt, Human
gcugcaccugccagccuggc

SEQ ID NO: 3846235 - RNA, 22 nt, Human
gcugcaccugccagccuggcuu

SEQ ID NO: 3846236 - RNA, 18 nt, Human
gcugcacucugugcccau

SEQ ID NO: 3846237 - RNA, 23 nt, Human
gcugcacucugugcccaugggca

SEQ ID NO: 3846238 - RNA, 18 nt, Human
gcugcagagauuucucau

SEQ ID NO: 3846239 - RNA, 13 nt, Human
gcugcagagcagu

SEQ ID NO: 3846240 - RNA, 20 nt, Human
gcugcagagcagugggccug

SEQ ID NO: 3846241 - RNA, 13 nt, Human
gcugcagagccac

SEQ ID NO: 3846242 - RNA, 15 nt, Human
gcugcagaggccaga

SEQ ID NO: 3846243 - RNA, 21 nt, Human
gcugcagaggggcaggcccug

SEQ ID NO: 3846244 - RNA, 22 nt, Human
gcugcagaggggcaggcccugc

SEQ ID NO: 3846245 - RNA, 23 nt, Human
gcugcagauaacagaaaggcuuu

SEQ ID NO: 3846246 - RNA, 22 nt, Human
gcugcagauacuacugaccaga

SEQ ID NO: 3846247 - RNA, 16 nt, Human
gcugcagcaccgaggg

SEQ ID NO: 3846248 - RNA, 16 nt, Human
gcugcagcagaggcac

SEQ ID NO: 3846249 - RNA, 18 nt, Human
gcugcagcagaggcacug

SEQ ID NO: 3846250 - RNA, 12 nt, Human
gcugcagcagcg

SEQ ID NO: 3846251 - RNA, 12 nt, Human
gcugcagcaugu

SEQ ID NO: 3846252 - RNA, 15 nt, Human
gcugcagccaggcca

SEQ ID NO: 3846253 - RNA, 15 nt, Human
gcugcagcucaccca

SEQ ID NO: 3846254 - RNA, 15 nt, Human
gcugcagcucccugg

SEQ ID NO: 3846255 - RNA, 16 nt, Human
gcugcagcucccuggc

SEQ ID NO: 3846256 - RNA, 19 nt, Human
gcugcagcucccuggcuuc

SEQ ID NO: 3846257 - RNA, 18 nt, Human
gcugcagcuggacagagg

SEQ ID NO: 3846258 - RNA, 12 nt, Human
gcugcagcuucc

SEQ ID NO: 3846259 - RNA, 12 nt, Human
gcugcagcuugg

SEQ ID NO: 3846260 - RNA, 16 nt, Human
gcugcaggaaucaaaa

SEQ ID NO: 3846261 - RNA, 21 nt, Human
gcugcaggaaucaaaaauuga

SEQ ID NO: 3846262 - RNA, 17 nt, Human
gcugcaggaaucuuuaa

SEQ ID NO: 3846263 - RNA, 16 nt, Human
gcugcaggggcucugg

SEQ ID NO: 3846264 - RNA, 23 nt, Human
gcugcaguccguguggauccaau

SEQ ID NO: 3846265 - RNA, 22 nt, Human
gcugcaguucuacucaggcugg

SEQ ID NO: 3846266 - RNA, 13 nt, Human
gcugcaguugcca

SEQ ID NO: 3846267 - RNA, 14 nt, Human
gcugcaguugccag

SEQ ID NO: 3846268 - RNA, 21 nt, Human
gcugcaguugccagucacccc

SEQ ID NO: 3846269 - RNA, 18 nt, Human
gcugcauagaaggaggag

SEQ ID NO: 3846270 - RNA, 16 nt, Human
gcugcauccgugagca

SEQ ID NO: 3846271 - RNA, 21 nt, Human
gcugcauccgugagcagugug

SEQ ID NO: 3846272 - RNA, 18 nt, Human
gcugcauccuccaagaau

SEQ ID NO: 3846273 - RNA, 22 nt, Human
gcugcauccuccaagaaucuau

SEQ ID NO: 3846274 - RNA, 19 nt, Human
gcugcaucuuauagcacuu

SEQ ID NO: 3846275 - RNA, 23 nt, Human
gcugcaucuuauagcacuuugaa

SEQ ID NO: 3846276 - RNA, 21 nt, Human
gcugcaugcccucucaggccg

SEQ ID NO: 3846277 - RNA, 15 nt, Human
gcugcauuagaaaaa

SEQ ID NO: 3846278 - RNA, 19 nt, Human
gcugcauugaaaagagcug

SEQ ID NO: 3846279 - RNA, 20 nt, Human
gcugcauugaaaagagcuga

SEQ ID NO: 3846280 - RNA, 17 nt, Human
gcugcauuuaaaagaua

SEQ ID NO: 3846281 - RNA, 15 nt, Human
gcugccaaauuuugg

SEQ ID NO: 3846282 - RNA, 18 nt, Human
gcugccaaggccagagug

SEQ ID NO: 3846283 - RNA, 23 nt, Human
gcugccaaggccagaguggccug

SEQ ID NO: 3846284 - RNA, 15 nt, Human
gcugccaauauccua

SEQ ID NO: 3846285 - RNA, 16 nt, Human
gcugccaaugggagcu

SEQ ID NO: 3846286 - RNA, 21 nt, Human
gcugccacaaccagccaggca

SEQ ID NO: 3846287 - RNA, 15 nt, Human
gcugccacacuucag

SEQ ID NO: 3846288 - RNA, 18 nt, Human
gcugccacacuucaggcu

SEQ ID NO: 3846289 - RNA, 23 nt, Human
gcugccacacuucaggcucuucu

SEQ ID NO: 3846290 - RNA, 13 nt, Human
gcugccaccugcc

SEQ ID NO: 3846291 - RNA, 12 nt, Human
gcugccagagaa

SEQ ID NO: 3846292 - RNA, 20 nt, Human
gcugccagccuugagcccug

SEQ ID NO: 3846293 - RNA, 17 nt, Human
gcugccaggugagaaac

SEQ ID NO: 3846294 - RNA, 22 nt, Human
gcugccaguggggccugaggcu

SEQ ID NO: 3846295 - RNA, 12 nt, Human
gcugccauccag

SEQ ID NO: 3846296 - RNA, 13 nt, Human
gcugccauccagg

SEQ ID NO: 3846297 - RNA, 23 nt, Human
gcugccauccagguucagcuugu

SEQ ID NO: 3846298 - RNA, 14 nt, Human
uccauugacaugua

SEQ ID NO: 3846299 - RNA, 19 nt, Human
uccauugacauguacagag

SEQ ID NO: 3846300 - RNA, 16 nt, Human
uccauugguccaagau

SEQ ID NO: 3846301 - RNA, 15 nt, Human
uccauuuaaacagau

SEQ ID NO: 3846302 - RNA, 18 nt, Human
uccauuuaauaauuauau

SEQ ID NO: 3846303 - RNA, 14 nt, Human
uccauuuaguucuu

SEQ ID NO: 3846304 - RNA, 20 nt, Human
uccauuuaguucuuuguuau

SEQ ID NO: 3846305 - RNA, 21 nt, Human
uccauuuauauaugaaaacua

SEQ ID NO: 3846306 - RNA, 21 nt, Human
uccauuucaucuauuucugag

SEQ ID NO: 3846307 - RNA, 19 nt, Human
uccauuuccauugcuuauu

SEQ ID NO: 3846308 - RNA, 18 nt, Human
uccauuuccccuccuucc

SEQ ID NO: 3846309 - RNA, 20 nt, Human
uccauuucgccccucauuua

SEQ ID NO: 3846310 - RNA, 14 nt, Human
uccauuugaaagaa

SEQ ID NO: 3846311 - RNA, 12 nt, Human
uccauuugcaag

SEQ ID NO: 3846312 - RNA, 15 nt, Human
uccauuugcaaggga

SEQ ID NO: 3846313 - RNA, 14 nt, Human
uccauuugcucuuc

SEQ ID NO: 3846314 - RNA, 15 nt, Human
uccauuugcucuuca

SEQ ID NO: 3846315 - RNA, 13 nt, Human
uccauuuguaaaa

SEQ ID NO: 3846316 - RNA, 13 nt, Human
uccauuuuauaaa

SEQ ID NO: 3846317 - RNA, 19 nt, Human
uccauuuuccuacaggcag

SEQ ID NO: 3846318 - RNA, 23 nt, Human
uccauuuuccuacaggcagucuc

SEQ ID NO: 3846319 - RNA, 22 nt, Human
uccauuuucuuauugcgcugcu

SEQ ID NO: 3846320 - RNA, 22 nt, Human
uccauuuuggcgcuauuacaaa

SEQ ID NO: 3846321 - RNA, 22 nt, Human
ucaguccuccccucacagccuc

SEQ ID NO: 3846322 - RNA, 22 nt, Human
ucaguccuguaguuuuauuuua

SEQ ID NO: 3846323 - RNA, 17 nt, Human
ucagucucccuuucccu

SEQ ID NO: 3846324 - RNA, 13 nt, Human
ucagucucugagc

SEQ ID NO: 3846325 - RNA, 17 nt, Human
ucagucucugagcagug

SEQ ID NO: 3846326 - RNA, 23 nt, Human
ucagucugauuaaagguggugcc

SEQ ID NO: 3846327 - RNA, 19 nt, Human
ucagucugauucccaagcu

SEQ ID NO: 3846328 - RNA, 21 nt, Human
ucagucugauucccaagcucu

SEQ ID NO: 3846329 - RNA, 16 nt, Human
ucagucugcuuagaaa

SEQ ID NO: 3846330 - RNA, 16 nt, Human
ucagucuggugggagg

SEQ ID NO: 3846331 - RNA, 13 nt, Human
ucagucuugccuu

SEQ ID NO: 3846332 - RNA, 12 nt, Human
ucagucuuuucc

SEQ ID NO: 3846333 - RNA, 20 nt, Human
ucagucuuuuucuguuguaa

SEQ ID NO: 3846334 - RNA, 14 nt, Human
ucagugaaguugcu

SEQ ID NO: 3846335 - RNA, 18 nt, Human
ucagugaaguugcugcuu

SEQ ID NO: 3846336 - RNA, 14 nt, Human
ucagugaggcccag

SEQ ID NO: 3846337 - RNA, 16 nt, Human
ucagugaugugccuaa

SEQ ID NO: 3846338 - RNA, 14 nt, Human
ucagugcauuugug

SEQ ID NO: 3846339 - RNA, 20 nt, Human
ucagugccaacuguggcugg

SEQ ID NO: 3846340 - RNA, 16 nt, Human
ucagugcccaacuguu

SEQ ID NO: 3846341 - RNA, 20 nt, Human
ucagugcccuccaggauaga

SEQ ID NO: 3846342 - RNA, 10 nt, Human
ucagugccuu

SEQ ID NO: 3846343 - RNA, 15 nt, Human
ucagugccuuaugga

SEQ ID NO: 3846344 - RNA, 23 nt, Human
ucagugccuuauggaacacucug

SEQ ID NO: 3846345 - RNA, 12 nt, Human
ucagugcucccu

SEQ ID NO: 3846346 - RNA, 14 nt, Human
ucagugcugugcug

SEQ ID NO: 3846347 - RNA, 16 nt, Human
ucagugcugugcugug

SEQ ID NO: 3846348 - RNA, 22 nt, Human
ucagugcugugcugugcuaugg

SEQ ID NO: 3846349 - RNA, 15 nt, Human
ucagugcuguggccu

SEQ ID NO: 3846350 - RNA, 19 nt, Human
ucaguggacuuuccacccc

SEQ ID NO: 3846351 - RNA, 23 nt, Human
ucaguggacuuuccacccccucc

SEQ ID NO: 3846352 - RNA, 11 nt, Human
ucaguggcagc

SEQ ID NO: 3846353 - RNA, 15 nt, Human
ucaguggcagcugcu

SEQ ID NO: 3846354 - RNA, 14 nt, Human
ucaguggcagggcu

SEQ ID NO: 3846355 - RNA, 22 nt, Human
ucagugggaacgugacugcccc

SEQ ID NO: 3846356 - RNA, 14 nt, Human
ucagugggagaaaa

SEQ ID NO: 3846357 - RNA, 16 nt, Human
ucaguggggaggggcu

SEQ ID NO: 3846358 - RNA, 17 nt, Human
ucaguggggcucucuga

SEQ ID NO: 3846359 - RNA, 21 nt, Human
ucagugguccacaucccggga

SEQ ID NO: 3846360 - RNA, 14 nt, Human
ucaguguaaagugu

SEQ ID NO: 3846361 - RNA, 11 nt, Human
ucaguguacau

SEQ ID NO: 3846362 - RNA, 19 nt, Human
ucaguguaccauuugccuc

SEQ ID NO: 3846363 - RNA, 19 nt, Human
ucaguguagccccaagaag

SEQ ID NO: 3846364 - RNA, 17 nt, Human
ucaguguauuucaguuc

SEQ ID NO: 3846365 - RNA, 16 nt, Human
ucaguguauuuguauu

SEQ ID NO: 3846366 - RNA, 15 nt, Human
ucagugucaaauaaa

SEQ ID NO: 3846367 - RNA, 21 nt, Human
ucagugucaaauaaacacugu

SEQ ID NO: 3846368 - RNA, 17 nt, Human
ucagugucccgggcccg

SEQ ID NO: 3846369 - RNA, 19 nt, Human
ucaguguccucuugcucaa

SEQ ID NO: 3846370 - RNA, 15 nt, Human
ucagugucucacacu

SEQ ID NO: 3846371 - RNA, 19 nt, Human
ucagugugccccccauccu

SEQ ID NO: 3846372 - RNA, 19 nt, Human
ucagugugucuaaauuuga

SEQ ID NO: 3846373 - RNA, 16 nt, Human
ucaguguuaaaaaauu

SEQ ID NO: 3846374 - RNA, 15 nt, Human
ucaguguuaccugug

SEQ ID NO: 3846375 - RNA, 19 nt, Human
ucaguguuaccugugugcu

SEQ ID NO: 3846376 - RNA, 15 nt, Human
ucaguguuucugggg

SEQ ID NO: 3846377 - RNA, 22 nt, Human
ucaguguuugggucaccccucc

SEQ ID NO: 3846378 - RNA, 16 nt, Human
ucaguguuuuggacuc

SEQ ID NO: 3846379 - RNA, 14 nt, Human
ucaguuaagaaaaa

SEQ ID NO: 3846380 - RNA, 19 nt, Human
ucaguuaagaaaaaaauaa

SEQ ID NO: 3846381 - RNA, 13 nt, Human
ucaguuacagaaa

SEQ ID NO: 3846382 - RNA, 18 nt, Human
ucaguuacccacucgguc

SEQ ID NO: 3846383 - RNA, 14 nt, Human
ucaguuacuaagaa

SEQ ID NO: 3846384 - RNA, 16 nt, Human
ucaguuacucagcccu

SEQ ID NO: 3846385 - RNA, 17 nt, Human
ucaguuacucagcccug

SEQ ID NO: 3846386 - RNA, 18 nt, Human
ucaguuacucagcccugg

SEQ ID NO: 3846387 - RNA, 15 nt, Human
ucaguuacucuucag

SEQ ID NO: 3846388 - RNA, 23 nt, Human
ucaguuauugucccuggcuuccu

SEQ ID NO: 3846389 - RNA, 20 nt, Human
ucaguucaaagucaugaugu

SEQ ID NO: 3846390 - RNA, 20 nt, Human
ucaguucagaaucacuucug

SEQ ID NO: 3846391 - RNA, 14 nt, Human
ucaguucccagaau

SEQ ID NO: 3846392 - RNA, 18 nt, Human
ucaguucccagaaucaaa

SEQ ID NO: 3846393 - RNA, 15 nt, Human
ucaguucccuuggcc

SEQ ID NO: 3846394 - RNA, 16 nt, Human
ucaguucccuuggccu

SEQ ID NO: 3846395 - RNA, 19 nt, Human
ucaguucccuuggccucag

SEQ ID NO: 3846396 - RNA, 19 nt, Human
ucaguuccucuuugcaugg

SEQ ID NO: 3846397 - RNA, 19 nt, Human
ucaguucuacggaucauca

SEQ ID NO: 3846398 - RNA, 23 nt, Human
ucaguugagcuucauauaccagc

SEQ ID NO: 3846399 - RNA, 22 nt, Human
ucaguugcuaaacacugcgcuu

SEQ ID NO: 3846400 - RNA, 17 nt, Human
ucaguugguugugucuu

SEQ ID NO: 3846401 - RNA, 13 nt, Human
ucaguuguacagu

SEQ ID NO: 3846402 - RNA, 13 nt, Human
ucaguugugcagc

SEQ ID NO: 3846403 - RNA, 12 nt, Human
ucaguuguguuu

SEQ ID NO: 3846404 - RNA, 18 nt, Human
ucaguuguguuuuuuaag

SEQ ID NO: 3846405 - RNA, 19 nt, Human
ucaguuguuagugugucuu

SEQ ID NO: 3846406 - RNA, 15 nt, Human
ucaguuguucuuuuu

SEQ ID NO: 3846407 - RNA, 19 nt, Human
ucaguuuaaaagcacgaca

SEQ ID NO: 3846408 - RNA, 16 nt, Human
ucaguuuaauccuucu

SEQ ID NO: 3846409 - RNA, 23 nt, Human
ucaguuuauccaagguguaacuc

SEQ ID NO: 3846410 - RNA, 14 nt, Human
ucaguuuaucuguu

SEQ ID NO: 3846411 - RNA, 21 nt, Human
ucaguuuauguuguacaaugu

SEQ ID NO: 3846412 - RNA, 15 nt, Human
ucaguuuauguuuug

SEQ ID NO: 3846413 - RNA, 12 nt, Human
ucaguuucuaca

SEQ ID NO: 3846414 - RNA, 16 nt, Human
ucaguuugaucacacu

SEQ ID NO: 3846415 - RNA, 16 nt, Human
ucaguuugcagaguag

SEQ ID NO: 3846416 - RNA, 12 nt, Human
ucaguuugguug

SEQ ID NO: 3846417 - RNA, 15 nt, Human
ucaguuuguauauac

SEQ ID NO: 3846418 - RNA, 15 nt, Human
ucaguuugugugucu

SEQ ID NO: 3846419 - RNA, 14 nt, Human
ucaguuuguuggaa

SEQ ID NO: 3846420 - RNA, 16 nt, Human
ucaguuuguuggaaag

SEQ ID NO: 3846421 - RNA, 19 nt, Human
ucaguuuuaucauuuucaa

SEQ ID NO: 3846422 - RNA, 16 nt, Human
ucaguuuucaggagug

SEQ ID NO: 3846423 - RNA, 13 nt, Human
ucaguuuucauuu

SEQ ID NO: 3846424 - RNA, 13 nt, Human
ucauaaaagagac

SEQ ID NO: 3846425 - RNA, 12 nt, Human
ucauaaaauaaa

SEQ ID NO: 3846426 - RNA, 16 nt, Human
ucauaaaauaaaguau

SEQ ID NO: 3846427 - RNA, 21 nt, Human
ucauaaaauaaaguauauaua

SEQ ID NO: 3846428 - RNA, 21 nt, Human
ucauaaacaacuuaauguucu

SEQ ID NO: 3846429 - RNA, 19 nt, Human
ucauaaacagaugaauaaa

SEQ ID NO: 3846430 - RNA, 15 nt, Human
ucauaaacugugugc

SEQ ID NO: 3846431 - RNA, 24 nt, Human
ucauaaagcaggcagaacucaucu

SEQ ID NO: 3846432 - RNA, 22 nt, Human
ucauaaagugagaaaacuguga

SEQ ID NO: 3846433 - RNA, 20 nt, Human
ucauaaaguuagaaucuauu

SEQ ID NO: 3846434 - RNA, 18 nt, Human
ucauaaauaaaguuuguu

SEQ ID NO: 3846435 - RNA, 14 nt, Human
ucauaaaugaauuu

SEQ ID NO: 3846436 - RNA, 19 nt, Human
ucauaacauccagagcuuu

SEQ ID NO: 3846437 - RNA, 14 nt, Human
ucauaaccuagccu

SEQ ID NO: 3846438 - RNA, 16 nt, Human
ucauaacggaucagaa

SEQ ID NO: 3846439 - RNA, 19 nt, Human
ucauaacggaucagaaaua

SEQ ID NO: 3846440 - RNA, 20 nt, Human
ucauaacuuauugcugauuu

SEQ ID NO: 3846441 - RNA, 22 nt, Human
ucauaagagccacaggucuuua

SEQ ID NO: 3846442 - RNA, 21 nt, Human
ucauaagccaauuuuucugca

SEQ ID NO: 3846443 - RNA, 15 nt, Human
ucauaaggcuucaaa

SEQ ID NO: 3846444 - RNA, 20 nt, Human
ucauaaguauuaugucucuu

SEQ ID NO: 3846445 - RNA, 16 nt, Human
ucauaaguauuuggaa

SEQ ID NO: 3846446 - RNA, 16 nt, Human
ucauaauaaguugcau

SEQ ID NO: 3846447 - RNA, 14 nt, Human
ucauaaucuuugcu

SEQ ID NO: 3846448 - RNA, 13 nt, Human
ucauaauggccug

SEQ ID NO: 3846449 - RNA, 12 nt, Human
ucauaauuacca

SEQ ID NO: 3846450 - RNA, 18 nt, Human
ucauaauuccuacagcac

SEQ ID NO: 3846451 - RNA, 12 nt, Human
ucauaauucuaa

SEQ ID NO: 3846452 - RNA, 23 nt, Human
ucauaauugcauugacuuucccc

SEQ ID NO: 3846453 - RNA, 14 nt, Human
ucauacacuuccuu

SEQ ID NO: 3846454 - RNA, 16 nt, Human
ucauacagaagguggg

SEQ ID NO: 3846455 - RNA, 15 nt, Human
ucauacagagaaguc

SEQ ID NO: 3846456 - RNA, 22 nt, Human
ucauaccaggccgccccagccu

SEQ ID NO: 3846457 - RNA, 20 nt, Human
ucauacccacccccacccaa

SEQ ID NO: 3846458 - RNA, 21 nt, Human
ucauaccuaaguacuguaaua

SEQ ID NO: 3846459 - RNA, 14 nt, Human
ucauaccucagaau

SEQ ID NO: 3846460 - RNA, 18 nt, Human
ucauaccucagaauguaa

SEQ ID NO: 3846461 - RNA, 14 nt, Human
ucauacguccacca

SEQ ID NO: 3846462 - RNA, 20 nt, Human
ucauacuaucuacucuccuc

SEQ ID NO: 3846463 - RNA, 15 nt, Human
ucauacucaccucac

SEQ ID NO: 3846464 - RNA, 23 nt, Human
ucauacucuagauuuuguuuugc

SEQ ID NO: 3846465 - RNA, 16 nt, Human
gcugcccaaucuccau

SEQ ID NO: 3846466 - RNA, 22 nt, Human
gcugcccacuguuucucuugag

SEQ ID NO: 3846467 - RNA, 16 nt, Human
gcugugcugcccugaa

SEQ ID NO: 3846468 - RNA, 19 nt, Human
gcugugcugcccugcccac

SEQ ID NO: 3846469 - RNA, 22 nt, Human
gcuguggaccauggaguggcag

SEQ ID NO: 3846470 - RNA, 14 nt, Human
gcuguggccaggag

SEQ ID NO: 3846471 - RNA, 18 nt, Human
gcuguggccaggaggugc

SEQ ID NO: 3846472 - RNA, 14 nt, Human
gcuguggccagggu

SEQ ID NO: 3846473 - RNA, 19 nt, Human
gcuguggccagggugagag

SEQ ID NO: 3846474 - RNA, 21 nt, Human
gcuguggccagggugagagcu

SEQ ID NO: 3846475 - RNA, 22 nt, Human
gcuguggccagggugagagcug

SEQ ID NO: 3846476 - RNA, 20 nt, Human
gcuguggccuaaccugccga

SEQ ID NO: 3846477 - RNA, 15 nt, Human
gcuguggccugggca

SEQ ID NO: 3846478 - RNA, 15 nt, Human
gcuguggcuggugag

SEQ ID NO: 3846479 - RNA, 15 nt, Human
gcugugggaaauggu

SEQ ID NO: 3846480 - RNA, 17 nt, Human
gcugugggcagguggga

SEQ ID NO: 3846481 - RNA, 19 nt, Human
gcugugggccucaaggacu

SEQ ID NO: 3846482 - RNA, 21 nt, Human
gcugugggcgugagaccugcc

SEQ ID NO: 3846483 - RNA, 22 nt, Human
gcugugggcgugagaccugccc

SEQ ID NO: 3846484 - RNA, 18 nt, Human
gcugugggcucccuuccu

SEQ ID NO: 3846485 - RNA, 21 nt, Human
gcuguggggcugguagcucag

SEQ ID NO: 3846486 - RNA, 16 nt, Human
gcuguggucucuuugu

SEQ ID NO: 3846487 - RNA, 22 nt, Human
gcugugguuuucuuuugccaug

SEQ ID NO: 3846488 - RNA, 23 nt, Human
gcuguguaagauuuguuuuuaaa

SEQ ID NO: 3846489 - RNA, 17 nt, Human
gcuguguccaacuccag

SEQ ID NO: 3846490 - RNA, 18 nt, Human
gcuguguccaacuccagu

SEQ ID NO: 3846491 - RNA, 18 nt, Human
gcugugugaauaccugcu

SEQ ID NO: 3846492 - RNA, 13 nt, Human
gcugugugaccuu

SEQ ID NO: 3846493 - RNA, 16 nt, Human
gcugugugucccaggc

SEQ ID NO: 3846494 - RNA, 18 nt, Human
gcugugugucccaggcag

SEQ ID NO: 3846495 - RNA, 22 nt, Human
gcuguguguuaguucccaacau

SEQ ID NO: 3846496 - RNA, 14 nt, Human
gcuguguuccccaa

SEQ ID NO: 3846497 - RNA, 23 nt, Human
gcuguguucuugccacugcacuc

SEQ ID NO: 3846498 - RNA, 17 nt, Human
gcuguguuugagcucug

SEQ ID NO: 3846499 - RNA, 18 nt, Human
gcuguguuugcagccugc

SEQ ID NO: 3846500 - RNA, 16 nt, Human
gcuguguuugcucccc

SEQ ID NO: 3846501 - RNA, 23 nt, Human
gcuguguuuggcuuucagggagg

SEQ ID NO: 3846502 - RNA, 14 nt, Human
gcuguuaaacuguu

SEQ ID NO: 3846503 - RNA, 13 nt, Human
gcuguuaaauaca

SEQ ID NO: 3846504 - RNA, 16 nt, Human
gcuguuaaauacagga

SEQ ID NO: 3846505 - RNA, 19 nt, Human
gcuguuacaguuuucuuca

SEQ ID NO: 3846506 - RNA, 15 nt, Human
gcuguuaccauucac

SEQ ID NO: 3846507 - RNA, 17 nt, Human
gcuguuaccgccugucu

SEQ ID NO: 3846508 - RNA, 21 nt, Human
gcuguuaccgccugucucuuu

SEQ ID NO: 3846509 - RNA, 13 nt, Human
gcuguuagagucc

SEQ ID NO: 3846510 - RNA, 14 nt, Human
gcuguucagcuggu

SEQ ID NO: 3846511 - RNA, 12 nt, Human
gcuguucaugaa

SEQ ID NO: 3846512 - RNA, 22 nt, Human
gcuguucccauguagcccccug

SEQ ID NO: 3846513 - RNA, 14 nt, Human
gcuguucuagcacu

SEQ ID NO: 3846514 - RNA, 15 nt, Human
gcuguucugcacuga

SEQ ID NO: 3846515 - RNA, 21 nt, Human
gcuguucugugguuccucugc

SEQ ID NO: 3846516 - RNA, 13 nt, Human
gcuguugaaagca

SEQ ID NO: 3846517 - RNA, 14 nt, Human
gcuguugaaagcaa

SEQ ID NO: 3846518 - RNA, 17 nt, Human
gcuguugacauauuuaa

SEQ ID NO: 3846519 - RNA, 23 nt, Human
gcuguugacauauuuaauguuuu

SEQ ID NO: 3846520 - RNA, 22 nt, Human
gcuguugacucuaguacuguga

SEQ ID NO: 3846521 - RNA, 15 nt, Human
gcuguugagcuguuu

SEQ ID NO: 3846522 - RNA, 16 nt, Human
gcuguugauugcuaaa

SEQ ID NO: 3846523 - RNA, 13 nt, Human
gcuguugcaguga

SEQ ID NO: 3846524 - RNA, 13 nt, Human
gcuguugcugaau

SEQ ID NO: 3846525 - RNA, 14 nt, Human
gcuguugcugaaua

SEQ ID NO: 3846526 - RNA, 21 nt, Human
gcuguugcugauuuuauucuu

SEQ ID NO: 3846527 - RNA, 23 nt, Human
gcuguuggcacucacagaccugg

SEQ ID NO: 3846528 - RNA, 22 nt, Human
gcuguuggcagugagugagccu

SEQ ID NO: 3846529 - RNA, 20 nt, Human
uccacaguugccaccaccuc

SEQ ID NO: 3846530 - RNA, 13 nt, Human
uccacauccucca

SEQ ID NO: 3846531 - RNA, 19 nt, Human
uccacauccuccacguucu

SEQ ID NO: 3846532 - RNA, 15 nt, Human
uccacaucugccuua

SEQ ID NO: 3846533 - RNA, 14 nt, Human
uccacaugcucuga

SEQ ID NO: 3846534 - RNA, 14 nt, Human
uccacauuguuuua

SEQ ID NO: 3846535 - RNA, 14 nt, Human
uccacauuucuaaa

SEQ ID NO: 3846536 - RNA, 14 nt, Human
uccaccaccacugg

SEQ ID NO: 3846537 - RNA, 18 nt, Human
uccaccaccacuggccac

SEQ ID NO: 3846538 - RNA, 19 nt, Human
uccaccaccacuggccacc

SEQ ID NO: 3846539 - RNA, 13 nt, Human
uccaccacccaaa

SEQ ID NO: 3846540 - RNA, 13 nt, Human
uccaccaccgccc

SEQ ID NO: 3846541 - RNA, 22 nt, Human
uccaccaccgcccgucugugug

SEQ ID NO: 3846542 - RNA, 22 nt, Human
uccaccagcccauggcccugug

SEQ ID NO: 3846543 - RNA, 14 nt, Human
uccaccagccugca

SEQ ID NO: 3846544 - RNA, 15 nt, Human
uccaccagccugcac

SEQ ID NO: 3846545 - RNA, 16 nt, Human
uccaccagccugcacu

SEQ ID NO: 3846546 - RNA, 14 nt, Human
uccaccagucauuu

SEQ ID NO: 3846547 - RNA, 21 nt, Human
uccaccaugggguccuaccaa

SEQ ID NO: 3846548 - RNA, 23 nt, Human
uccaccaugggguccuaccaaua

SEQ ID NO: 3846549 - RNA, 19 nt, Human
uccacccaacccuaucucc

SEQ ID NO: 3846550 - RNA, 12 nt, Human
uccacccaccuc

SEQ ID NO: 3846551 - RNA, 17 nt, Human
uccacccaccuuggccu

SEQ ID NO: 3846552 - RNA, 13 nt, Human
uccacccagccca

SEQ ID NO: 3846553 - RNA, 12 nt, Human
uccacccaggag

SEQ ID NO: 3846554 - RNA, 12 nt, Human
uccacccagggg

SEQ ID NO: 3846555 - RNA, 20 nt, Human
uccacccauaauccuuucug

SEQ ID NO: 3846556 - RNA, 22 nt, Human
uccaccccaauccucccagaaa

SEQ ID NO: 3846557 - RNA, 13 nt, Human
uccaccccaggac

SEQ ID NO: 3846558 - RNA, 19 nt, Human
uccaccccaggacgccacu

SEQ ID NO: 3846559 - RNA, 23 nt, Human
uccaccccccagaaccuguccuu

SEQ ID NO: 3846560 - RNA, 18 nt, Human
uccacccccgccucccuc

SEQ ID NO: 3846561 - RNA, 15 nt, Human
uccacccccucccug

SEQ ID NO: 3846562 - RNA, 20 nt, Human
uccacccccucccuggccug

SEQ ID NO: 3846563 - RNA, 21 nt, Human
uccacccccucccuggccugu

SEQ ID NO: 3846564 - RNA, 14 nt, Human
uccacccuccaccu

SEQ ID NO: 3846565 - RNA, 14 nt, Human
uccacccucugagc

SEQ ID NO: 3846566 - RNA, 16 nt, Human
uccacccucugagcuu

SEQ ID NO: 3846567 - RNA, 14 nt, Human
uccacccugcucuc

SEQ ID NO: 3846568 - RNA, 21 nt, Human
uccacccugcucuccgaccag

SEQ ID NO: 3846569 - RNA, 12 nt, Human
uccacccuggaa

SEQ ID NO: 3846570 - RNA, 22 nt, Human
uccacccuggccgaguccaagc

SEQ ID NO: 3846571 - RNA, 16 nt, Human
uccacccuguccccca

SEQ ID NO: 3846572 - RNA, 17 nt, Human
uccacccugucccccag

SEQ ID NO: 3846573 - RNA, 22 nt, Human
uccacccugucccccagcucug

SEQ ID NO: 3846574 - RNA, 13 nt, Human
uccacccuuggcc

SEQ ID NO: 3846575 - RNA, 15 nt, Human
uccacccuuggccug

SEQ ID NO: 3846576 - RNA, 16 nt, Human
uccacccuuggccugu

SEQ ID NO: 3846577 - RNA, 15 nt, Human
uccaccgcagaagga

SEQ ID NO: 3846578 - RNA, 18 nt, Human
uccaccgcagaaggaagg

SEQ ID NO: 3846579 - RNA, 23 nt, Human
uccaccgucuuucuuuuauacug

SEQ ID NO: 3846580 - RNA, 17 nt, Human
uccaccuaguggcuguc

SEQ ID NO: 3846581 - RNA, 16 nt, Human
uccaccucaccccacu

SEQ ID NO: 3846582 - RNA, 11 nt, Human
uccaccucagc

SEQ ID NO: 3846583 - RNA, 14 nt, Human
uccaccucagccuu

SEQ ID NO: 3846584 - RNA, 17 nt, Human
uccaccucagccuugga

SEQ ID NO: 3846585 - RNA, 13 nt, Human
uccaccuccaucu

SEQ ID NO: 3846586 - RNA, 12 nt, Human
uccaccucccug

SEQ ID NO: 3846587 - RNA, 16 nt, Human
uccaccucccugcaau

SEQ ID NO: 3846588 - RNA, 18 nt, Human
uccaccucgacguuuaca

SEQ ID NO: 3846589 - RNA, 18 nt, Human
uccaccucuucacccccc

SEQ ID NO: 3846590 - RNA, 17 nt, Human
uccaccugagcugccau

SEQ ID NO: 3846591 - RNA, 12 nt, Human
uccaccugccag

SEQ ID NO: 3846592 - RNA, 16 nt, Human
uccaccugcucccagg

SEQ ID NO: 3846593 - RNA, 14 nt, Human
uccaccugcucugc

SEQ ID NO: 3846594 - RNA, 15 nt, Human
uccaccugcucugcu

SEQ ID NO: 3846595 - RNA, 21 nt, Human
uccaccugguacucccucuca

SEQ ID NO: 3846596 - RNA, 14 nt, Human
uccaccuuaaauua

SEQ ID NO: 3846597 - RNA, 16 nt, Human
uccaccuucccaugcc

SEQ ID NO: 3846598 - RNA, 17 nt, Human
uccacgacugucuccau

SEQ ID NO: 3846599 - RNA, 17 nt, Human
uccacgauccugccacc

SEQ ID NO: 3846600 - RNA, 19 nt, Human
uccacgcacaugcgacccc

SEQ ID NO: 3846601 - RNA, 15 nt, Human
uccacgcugucucca

SEQ ID NO: 3846602 - RNA, 13 nt, Human
uccacggacucaa

SEQ ID NO: 3846603 - RNA, 21 nt, Human
uccacggagccacuccucuga

SEQ ID NO: 3846604 - RNA, 17 nt, Human
uccacguacugcagccu

SEQ ID NO: 3846605 - RNA, 19 nt, Human
uccacguucugcucaucau

SEQ ID NO: 3846606 - RNA, 11 nt, Human
uccacuaaccc

SEQ ID NO: 3846607 - RNA, 15 nt, Human
uccacuagugcaaau

SEQ ID NO: 3846608 - RNA, 18 nt, Human
uccacuagugcaaaucau

SEQ ID NO: 3846609 - RNA, 22 nt, Human
uccacucagcuguccugcagca

SEQ ID NO: 3846610 - RNA, 17 nt, Human
uccacucaggucuguuu

SEQ ID NO: 3846611 - RNA, 12 nt, Human
uccacucccacu

SEQ ID NO: 3846612 - RNA, 13 nt, Human
uccacuccuuccu

SEQ ID NO: 3846613 - RNA, 18 nt, Human
uccgaaaccaaagaagaa

SEQ ID NO: 3846614 - RNA, 17 nt, Human
uccgaaaugcugucuuu

SEQ ID NO: 3846615 - RNA, 19 nt, Human
uccgaacacccucgaagcg

SEQ ID NO: 3846616 - RNA, 20 nt, Human
uccgacaaccgaugcuccag

SEQ ID NO: 3846617 - RNA, 20 nt, Human
uccgacagcccccucugccg

SEQ ID NO: 3846618 - RNA, 17 nt, Human
uccgaccagacaccuug

SEQ ID NO: 3846619 - RNA, 18 nt, Human
uccgacccucugggaacc

SEQ ID NO: 3846620 - RNA, 21 nt, Human
uccgacuugugcacaggcaga

SEQ ID NO: 3846621 - RNA, 12 nt, Human
uccgagaacuaa

SEQ ID NO: 3846622 - RNA, 24 nt, Human
uccgagccggggaguuucuuuccu

SEQ ID NO: 3846623 - RNA, 13 nt, Human
uccgaggcagggu

SEQ ID NO: 3846624 - RNA, 15 nt, Human
uccgaggggcgggac

SEQ ID NO: 3846625 - RNA, 12 nt, Human
uccgagugguga

SEQ ID NO: 3846626 - RNA, 15 nt, Human
uccgauccuuccucc

SEQ ID NO: 3846627 - RNA, 15 nt, Human
uccgaugaauucuua

SEQ ID NO: 3846628 - RNA, 15 nt, Human
uccgccacuggggcu

SEQ ID NO: 3846629 - RNA, 14 nt, Human
uccgccagccuccu

SEQ ID NO: 3846630 - RNA, 16 nt, Human
uccgccagccuccucu

SEQ ID NO: 3846631 - RNA, 18 nt, Human
uccgccagccuccucugg

SEQ ID NO: 3846632 - RNA, 20 nt, Human
uccgccagccuccucuggac

SEQ ID NO: 3846633 - RNA, 21 nt, Human
uccgcccacaggaagccugca

SEQ ID NO: 3846634 - RNA, 16 nt, Human
uccgcccccagccuau

SEQ ID NO: 3846635 - RNA, 16 nt, Human
uccgcccccagguagg

SEQ ID NO: 3846636 - RNA, 14 nt, Human
uccgccccugagcc

SEQ ID NO: 3846637 - RNA, 21 nt, Human
uccgccccugagcccacugug

SEQ ID NO: 3846638 - RNA, 16 nt, Human
uccgccccugccugcc

SEQ ID NO: 3846639 - RNA, 22 nt, Human
uccgcccucaaaaugacagcca

SEQ ID NO: 3846640 - RNA, 13 nt, Human
uccgcccugccac

SEQ ID NO: 3846641 - RNA, 14 nt, Human
uccgcccugcuccu

SEQ ID NO: 3846642 - RNA, 19 nt, Human
uccgcccuuagucccccaa

SEQ ID NO: 3846643 - RNA, 14 nt, Human
uccgccucuugggu

SEQ ID NO: 3846644 - RNA, 19 nt, Human
uccgccuuaccaggagaag

SEQ ID NO: 3846645 - RNA, 11 nt, Human
uccgccuucac

SEQ ID NO: 3846646 - RNA, 13 nt, Human
uccgccuuuugua

SEQ ID NO: 3846647 - RNA, 18 nt, Human
uccgccuuuuguauacau

SEQ ID NO: 3846648 - RNA, 18 nt, Human
uccgcgugugccugugug

SEQ ID NO: 3846649 - RNA, 20 nt, Human
uccgcuccccugcuccuguc

SEQ ID NO: 3846650 - RNA, 13 nt, Human
uccgcucucuucc

SEQ ID NO: 3846651 - RNA, 16 nt, Human
uccgcugccagccuug

SEQ ID NO: 3846652 - RNA, 12 nt, Human
uccgcugcuccu

SEQ ID NO: 3846653 - RNA, 12 nt, Human
uccgcuucccug

SEQ ID NO: 3846654 - RNA, 13 nt, Human
uccgcuucccugg

SEQ ID NO: 3846655 - RNA, 18 nt, Human
uccgcuuucuacccagcg

SEQ ID NO: 3846656 - RNA, 20 nt, Human
uccgcuuucuacccagcgag

SEQ ID NO: 3846657 - RNA, 17 nt, Human
uccggaaugccacccac

SEQ ID NO: 3846658 - RNA, 16 nt, Human
uccggacuggugcccu

SEQ ID NO: 3846659 - RNA, 21 nt, Human
uccggaggagaagaaggaaau

SEQ ID NO: 3846660 - RNA, 16 nt, Human
uccggauuuaauuuga

SEQ ID NO: 3846661 - RNA, 22 nt, Human
uccggccaggugccuccugaca

SEQ ID NO: 3846662 - RNA, 14 nt, Human
uccggcccuccaga

SEQ ID NO: 3846663 - RNA, 21 nt, Human
uccggcccuccuacccugcgc

SEQ ID NO: 3846664 - RNA, 14 nt, Human
uccggccuccccuc

SEQ ID NO: 3846665 - RNA, 18 nt, Human
uccggccucugccuuugc

SEQ ID NO: 3846666 - RNA, 15 nt, Human
uccggcuaagcaggc

SEQ ID NO: 3846667 - RNA, 16 nt, Human
uccggcuaagcaggcg

SEQ ID NO: 3846668 - RNA, 16 nt, Human
uccggcuccugugcuu

SEQ ID NO: 3846669 - RNA, 22 nt, Human
uccggcuccugugcuuucccug

SEQ ID NO: 3846670 - RNA, 21 nt, Human
uccgggcaaaugccagggccc

SEQ ID NO: 3846671 - RNA, 15 nt, Human
uccggggccagcucc

SEQ ID NO: 3846672 - RNA, 22 nt, Human
uccggguuugagauggacacac

SEQ ID NO: 3846673 - RNA, 19 nt, Human
uccgguagggaggcagccu

SEQ ID NO: 3846674 - RNA, 18 nt, Human
uccgguggaaggccuucu

SEQ ID NO: 3846675 - RNA, 12 nt, Human
uccggugugccu

SEQ ID NO: 3846676 - RNA, 17 nt, Human
uccggugugccugcagc

SEQ ID NO: 3846677 - RNA, 18 nt, Human
uccggugugccugcagcc

SEQ ID NO: 3846678 - RNA, 19 nt, Human
uccggugugccugcagccc

SEQ ID NO: 3846679 - RNA, 22 nt, Human
uccguaacccaacucuccugga

SEQ ID NO: 3846680 - RNA, 20 nt, Human
uccguaauaacacccuuccu

SEQ ID NO: 3846681 - RNA, 20 nt, Human
uccguagccagcugcucccc

SEQ ID NO: 3846682 - RNA, 21 nt, Human
uccguagccagcugcucccca

SEQ ID NO: 3846683 - RNA, 22 nt, Human
uccguagguagauguguaaccu

SEQ ID NO: 3846684 - RNA, 14 nt, Human
uccguauuucagac

SEQ ID NO: 3846685 - RNA, 15 nt, Human
uccguauuucagacu

SEQ ID NO: 3846686 - RNA, 17 nt, Human
uccgucacuaccuggcu

SEQ ID NO: 3846687 - RNA, 17 nt, Human
uccgucagaaaguguaa

SEQ ID NO: 3846688 - RNA, 22 nt, Human
uccgucuaagucaugagcugag

SEQ ID NO: 3846689 - RNA, 23 nt, Human
uccgucuaguuaacauuucaagg

SEQ ID NO: 3846690 - RNA, 20 nt, Human
uccgucucccccguguuccc

SEQ ID NO: 3846691 - RNA, 18 nt, Human
uccgugaaaacggagcug

SEQ ID NO: 3846692 - RNA, 18 nt, Human
uccgugcugacagcugcu

SEQ ID NO: 3846693 - RNA, 22 nt, Human
uccguggaggagguugggaggg

SEQ ID NO: 3846694 - RNA, 17 nt, Human
uccgugggacggugccc

SEQ ID NO: 3846695 - RNA, 20 nt, Human
uccagaggguugugauuuug

SEQ ID NO: 3846696 - RNA, 15 nt, Human
uccagagucccugcc

SEQ ID NO: 3846697 - RNA, 21 nt, Human
uccagagucccugccuggacc

SEQ ID NO: 3846698 - RNA, 17 nt, Human
uccagaucacugccaca

SEQ ID NO: 3846699 - RNA, 16 nt, Human
uccagauccuggaaau

SEQ ID NO: 3846700 - RNA, 17 nt, Human
uccagaucuuucagaaa

SEQ ID NO: 3846701 - RNA, 16 nt, Human
uccagaugcagggcag

SEQ ID NO: 3846702 - RNA, 19 nt, Human
uccagaugcagggcaguca

SEQ ID NO: 3846703 - RNA, 17 nt, Human
uccagauuagagccugu

SEQ ID NO: 3846704 - RNA, 19 nt, Human
uccagauuaucuauuugug

SEQ ID NO: 3846705 - RNA, 16 nt, Human
uccagauuuacacugg

SEQ ID NO: 3846706 - RNA, 19 nt, Human
uccagauuuuucggaggcc

SEQ ID NO: 3846707 - RNA, 17 nt, Human
uccagcaacacagccug

SEQ ID NO: 3846708 - RNA, 21 nt, Human
uccagcaacacagccugggcc

SEQ ID NO: 3846709 - RNA, 22 nt, Human
uccagcaacacagccugggccc

SEQ ID NO: 3846710 - RNA, 19 nt, Human
uccagcaacuucuucucca

SEQ ID NO: 3846711 - RNA, 19 nt, Human
uccagcaauucuccugccu

SEQ ID NO: 3846712 - RNA, 22 nt, Human
uccagcaauucuccugccucag

SEQ ID NO: 3846713 - RNA, 14 nt, Human
uccagcacaaacac

SEQ ID NO: 3846714 - RNA, 15 nt, Human
uccagcacaaacaca

SEQ ID NO: 3846715 - RNA, 15 nt, Human
uccagcaccuugugc

SEQ ID NO: 3846716 - RNA, 18 nt, Human
uccagcaccuugugccug

SEQ ID NO: 3846717 - RNA, 23 nt, Human
uccagcagaagacaaaaagacaa

SEQ ID NO: 3846718 - RNA, 14 nt, Human
uccagcagauuauu

SEQ ID NO: 3846719 - RNA, 12 nt, Human
uccagcaggagg

SEQ ID NO: 3846720 - RNA, 17 nt, Human
uccagcaggagggacag

SEQ ID NO: 3846721 - RNA, 13 nt, Human
uccagcaggccca

SEQ ID NO: 3846722 - RNA, 20 nt, Human
uccagcagucacuucggcca

SEQ ID NO: 3846723 - RNA, 17 nt, Human
uccagcauucccaggua

SEQ ID NO: 3846724 - RNA, 20 nt, Human
uccagcauuuagcuggccac

SEQ ID NO: 3846725 - RNA, 14 nt, Human
uccagccaaccccu

SEQ ID NO: 3846726 - RNA, 10 nt, Human
uccagccagc

SEQ ID NO: 3846727 - RNA, 23 nt, Human
uccagccagcaaugauguccaga

SEQ ID NO: 3846728 - RNA, 12 nt, Human
uccagccagcgc

SEQ ID NO: 3846729 - RNA, 19 nt, Human
uccagccagcgccucccuc

SEQ ID NO: 3846730 - RNA, 14 nt, Human
uccagccagggcug

SEQ ID NO: 3846731 - RNA, 15 nt, Human
uccagccagggcugc

SEQ ID NO: 3846732 - RNA, 17 nt, Human
uccagccagggcugcua

SEQ ID NO: 3846733 - RNA, 21 nt, Human
uccagccaucaagagacugag

SEQ ID NO: 3846734 - RNA, 15 nt, Human
uccagccaucucaug

SEQ ID NO: 3846735 - RNA, 15 nt, Human
uccagcccacauugg

SEQ ID NO: 3846736 - RNA, 15 nt, Human
uccagccccucuggu

SEQ ID NO: 3846737 - RNA, 13 nt, Human
uccagccccugga

SEQ ID NO: 3846738 - RNA, 19 nt, Human
uccagccccuggaugcagc

SEQ ID NO: 3846739 - RNA, 22 nt, Human
uccagccccuggaugcagccuc

SEQ ID NO: 3846740 - RNA, 13 nt, Human
uccagccccuguc

SEQ ID NO: 3846741 - RNA, 14 nt, Human
uccagccccugucc

SEQ ID NO: 3846742 - RNA, 21 nt, Human
uccagccccuucucagaaucu

SEQ ID NO: 3846743 - RNA, 15 nt, Human
uccagcccgggagcc

SEQ ID NO: 3846744 - RNA, 20 nt, Human
uccagcccgggagccuagga

SEQ ID NO: 3846745 - RNA, 21 nt, Human
uccagcccgggagccuaggac

SEQ ID NO: 3846746 - RNA, 20 nt, Human
uccagcccugaguuccuagc

SEQ ID NO: 3846747 - RNA, 22 nt, Human
uccagcccugaguuccuagcca

SEQ ID NO: 3846748 - RNA, 17 nt, Human
uccagcccuggcugaag

SEQ ID NO: 3846749 - RNA, 20 nt, Human
uccagcccuggcugaaggac

SEQ ID NO: 3846750 - RNA, 21 nt, Human
uccagcccuggcugaaggacu

SEQ ID NO: 3846751 - RNA, 14 nt, Human
uccagccucagcuc

SEQ ID NO: 3846752 - RNA, 16 nt, Human
uccagccucuguuccc

SEQ ID NO: 3846753 - RNA, 13 nt, Human
uccagccugacau

SEQ ID NO: 3846754 - RNA, 21 nt, Human
uccagccugacaucaaaaaag

SEQ ID NO: 3846755 - RNA, 21 nt, Human
uccagccugagcgacagugag

SEQ ID NO: 3846756 - RNA, 11 nt, Human
uccagccugcc

SEQ ID NO: 3846757 - RNA, 20 nt, Human
uccagccugcccaagcccag

SEQ ID NO: 3846758 - RNA, 15 nt, Human
ucccaauuaggaagu

SEQ ID NO: 3846759 - RNA, 20 nt, Human
ucccaauucauccucacuca

SEQ ID NO: 3846760 - RNA, 16 nt, Human
ucccaauugagaaaaa

SEQ ID NO: 3846761 - RNA, 23 nt, Human
ucccaauuucagacucccauucc

SEQ ID NO: 3846762 - RNA, 21 nt, Human
ucccacaagccugagggaaag

SEQ ID NO: 3846763 - RNA, 17 nt, Human
ucccacacccaaagcug

SEQ ID NO: 3846764 - RNA, 13 nt, Human
ucccacacccugg

SEQ ID NO: 3846765 - RNA, 15 nt, Human
ucccacaccuccaca

SEQ ID NO: 3846766 - RNA, 17 nt, Human
ucccacaccuccacagu

SEQ ID NO: 3846767 - RNA, 22 nt, Human
ucccacacugcuaggugggcca

SEQ ID NO: 3846768 - RNA, 16 nt, Human
ucccacagccacgugu

SEQ ID NO: 3846769 - RNA, 23 nt, Human
ucccacagugacucgggcuccug

SEQ ID NO: 3846770 - RNA, 22 nt, Human
ucccacauccaacuccagcaac

SEQ ID NO: 3846771 - RNA, 20 nt, Human
ucccacaucccugggccugc

SEQ ID NO: 3846772 - RNA, 22 nt, Human
ucccacauuaaagaagaccuga

SEQ ID NO: 3846773 - RNA, 15 nt, Human
ucccaccacagcagg

SEQ ID NO: 3846774 - RNA, 15 nt, Human
ucccaccacccugag

SEQ ID NO: 3846775 - RNA, 19 nt, Human
ucccacccaauucaaaaca

SEQ ID NO: 3846776 - RNA, 18 nt, Human
ucccacccacaugugaca

SEQ ID NO: 3846777 - RNA, 12 nt, Human
ucccacccaccg

SEQ ID NO: 3846778 - RNA, 16 nt, Human
ucccaccccacccccu

SEQ ID NO: 3846779 - RNA, 22 nt, Human
ucccaccccacccccuucagug

SEQ ID NO: 3846780 - RNA, 22 nt, Human
ucccacccccuucucugcucca

SEQ ID NO: 3846781 - RNA, 13 nt, Human
ucccaccccuccc

SEQ ID NO: 3846782 - RNA, 21 nt, Human
ucccacccucuuccuacuggu

SEQ ID NO: 3846783 - RNA, 13 nt, Human
ucccacccuguuc

SEQ ID NO: 3846784 - RNA, 16 nt, Human
ucccaccuagcagcac

SEQ ID NO: 3846785 - RNA, 13 nt, Human
ucccaccucagcc

SEQ ID NO: 3846786 - RNA, 14 nt, Human
ucccaccucagccu

SEQ ID NO: 3846787 - RNA, 15 nt, Human
ucccaccucagccuc

SEQ ID NO: 3846788 - RNA, 16 nt, Human
ucccaccucagccucc

SEQ ID NO: 3846789 - RNA, 18 nt, Human
ucccaccucagccucccg

SEQ ID NO: 3846790 - RNA, 13 nt, Human
ucccaccuccagc

SEQ ID NO: 3846791 - RNA, 22 nt, Human
ucccaccuccagcccgggagcc

SEQ ID NO: 3846792 - RNA, 15 nt, Human
ucccaccuccauccc

SEQ ID NO: 3846793 - RNA, 23 nt, Human
ucccaccucccccucccccuucu

SEQ ID NO: 3846794 - RNA, 14 nt, Human
ucccaccucccugc

SEQ ID NO: 3846795 - RNA, 20 nt, Human
ucccaccucccugcccaggc

SEQ ID NO: 3846796 - RNA, 20 nt, Human
ucccaccuccugacacccuu

SEQ ID NO: 3846797 - RNA, 11 nt, Human
ucccaccucug

SEQ ID NO: 3846798 - RNA, 13 nt, Human
ucccaccucugug

SEQ ID NO: 3846799 - RNA, 20 nt, Human
ucccaccucugugaccucag

SEQ ID NO: 3846800 - RNA, 15 nt, Human
ucccaccuggcucug

SEQ ID NO: 3846801 - RNA, 19 nt, Human
ucccaccuggcucuguggc

SEQ ID NO: 3846802 - RNA, 16 nt, Human
ucccaccuuggcugca

SEQ ID NO: 3846803 - RNA, 15 nt, Human
ucccacgaauuugcu

SEQ ID NO: 3846804 - RNA, 18 nt, Human
ucccacgaauuugcuggg

SEQ ID NO: 3846805 - RNA, 15 nt, Human
ucccacggccuuucu

SEQ ID NO: 3846806 - RNA, 14 nt, Human
ucccacgugggaga

SEQ ID NO: 3846807 - RNA, 18 nt, Human
ucccacgugucuuccacu

SEQ ID NO: 3846808 - RNA, 14 nt, Human
ucccacucagucca

SEQ ID NO: 3846809 - RNA, 12 nt, Human
ucccacuccaag

SEQ ID NO: 3846810 - RNA, 13 nt, Human
ucccacuccaagc

SEQ ID NO: 3846811 - RNA, 19 nt, Human
ucccacuccaagccagcaa

SEQ ID NO: 3846812 - RNA, 17 nt, Human
ucccacuccaagcccag

SEQ ID NO: 3846813 - RNA, 22 nt, Human
ucccacucuagggcaguggagu

SEQ ID NO: 3846814 - RNA, 15 nt, Human
ucccacucuucucau

SEQ ID NO: 3846815 - RNA, 21 nt, Human
ucccacugcacccccuccugc

SEQ ID NO: 3846816 - RNA, 15 nt, Human
ucccacuucugccag

SEQ ID NO: 3846817 - RNA, 23 nt, Human
ucccacuuggcaucagcuggcgu

SEQ ID NO: 3846818 - RNA, 13 nt, Human
ucccacuuggcca

SEQ ID NO: 3846819 - RNA, 23 nt, Human
ucccacuuggccaagcagggagg

SEQ ID NO: 3846820 - RNA, 12 nt, Human
ucccacuuguca

SEQ ID NO: 3846821 - RNA, 23 nt, Human
ucccacuuugcuguuccuuacuu

SEQ ID NO: 3846822 - RNA, 16 nt, Human
ucccacuuuugccaga

SEQ ID NO: 3846823 - RNA, 19 nt, Human
ucccagaacacacuccauc

SEQ ID NO: 3846824 - RNA, 18 nt, Human
ucccagaaggaccuccug

SEQ ID NO: 3846825 - RNA, 19 nt, Human
ucccagaaucaaagcaaug

SEQ ID NO: 3846826 - RNA, 22 nt, Human
ucccagaaucaaagcaaugcau

SEQ ID NO: 3846827 - RNA, 23 nt, Human
ucccagaaucaaagcaaugcauu

SEQ ID NO: 3846828 - RNA, 18 nt, Human
ucccagacacccacccuc

SEQ ID NO: 3846829 - RNA, 22 nt, Human
ucccagaccugccucuuccccc

SEQ ID NO: 3846830 - RNA, 15 nt, Human
ucccagagagcccga

SEQ ID NO: 3846831 - RNA, 12 nt, Human
ucccagagcagg

SEQ ID NO: 3846832 - RNA, 21 nt, Human
ucccagagcaggaggccccug

SEQ ID NO: 3846833 - RNA, 21 nt, Human
ucccagagcugguggacccag

SEQ ID NO: 3846834 - RNA, 17 nt, Human
ucccagaggcugcccca

SEQ ID NO: 3846835 - RNA, 19 nt, Human
ucccagaggggccugccac

SEQ ID NO: 3846836 - RNA, 22 nt, Human
ucccagaggggccugccaccug

SEQ ID NO: 3846837 - RNA, 13 nt, Human
ucccagaggucca

SEQ ID NO: 3846838 - RNA, 16 nt, Human
ucccagagguccagcc

SEQ ID NO: 3846839 - RNA, 19 nt, Human
ucccagagguccagcccau

SEQ ID NO: 3846840 - RNA, 23 nt, Human
ucccagagguccagcccaucucg

SEQ ID NO: 3846841 - RNA, 15 nt, Human
ucccagagugcuggg

SEQ ID NO: 3846842 - RNA, 12 nt, Human
ucccagaguuug

SEQ ID NO: 3846843 - RNA, 16 nt, Human
ucccagauacuugggg

SEQ ID NO: 3846844 - RNA, 21 nt, Human
ucccagauuggcucacacuga

SEQ ID NO: 3846845 - RNA, 12 nt, Human
ucccagcaauuu

SEQ ID NO: 3846846 - RNA, 22 nt, Human
ucccagcacuaugcuuuccuuc

SEQ ID NO: 3846847 - RNA, 13 nt, Human
ucccagcacuuug

SEQ ID NO: 3846848 - RNA, 21 nt, Human
ucccagcacuuugggaggccu

SEQ ID NO: 3846849 - RNA, 15 nt, Human
ucccagcagccagcc

SEQ ID NO: 3846850 - RNA, 16 nt, Human
ucccagcagccagcca

SEQ ID NO: 3846851 - RNA, 13 nt, Human
ucccagcagcccu

SEQ ID NO: 3846852 - RNA, 17 nt, Human
ucccagcaucgcacucu

SEQ ID NO: 3846853 - RNA, 12 nt, Human
ucccagccaccc

SEQ ID NO: 3846854 - RNA, 16 nt, Human
ucccagccacucggga

SEQ ID NO: 3846855 - RNA, 20 nt, Human
ucccagccacucgggaggcu

SEQ ID NO: 3846856 - RNA, 13 nt, Human
ucccagccaggcc

SEQ ID NO: 3846857 - RNA, 15 nt, Human
ucccagcccaaagcu

SEQ ID NO: 3846858 - RNA, 18 nt, Human
ucccagcccaauccaggu

SEQ ID NO: 3846859 - RNA, 12 nt, Human
ucccagccccaa

SEQ ID NO: 3846860 - RNA, 14 nt, Human
ucccagcccccuga

SEQ ID NO: 3846861 - RNA, 21 nt, Human
ucccagccggccaauggaaac

SEQ ID NO: 3846862 - RNA, 15 nt, Human
ucccagccucagcgc

SEQ ID NO: 3846863 - RNA, 13 nt, Human
ucccagccuuggc

SEQ ID NO: 3846864 - RNA, 19 nt, Human
ucccagcggcuggugcagg

SEQ ID NO: 3846865 - RNA, 20 nt, Human
ucccagcggcuggugcaggg

SEQ ID NO: 3846866 - RNA, 21 nt, Human
ucccagcggcuggugcagggc

SEQ ID NO: 3846867 - RNA, 16 nt, Human
ucccagcuaccucaac

SEQ ID NO: 3846868 - RNA, 13 nt, Human
ucccagcuacuca

SEQ ID NO: 3846869 - RNA, 21 nt, Human
ucccagcuacucagaagccug

SEQ ID NO: 3846870 - RNA, 15 nt, Human
ucccagcuacucagg

SEQ ID NO: 3846871 - RNA, 16 nt, Human
ucccagcuacucggga

SEQ ID NO: 3846872 - RNA, 23 nt, Human
ucccagcuacucgggaggcugag

SEQ ID NO: 3846873 - RNA, 17 nt, Human
ucccagcuacuugggag

SEQ ID NO: 3846874 - RNA, 18 nt, Human
ucccagcuacuugggagg

SEQ ID NO: 3846875 - RNA, 16 nt, Human
ucccagcuaggaagag

SEQ ID NO: 3846876 - RNA, 10 nt, Human
ucccagcucc

SEQ ID NO: 3846877 - RNA, 14 nt, Human
ucccagcuccaccc

SEQ ID NO: 3846878 - RNA, 20 nt, Human
ucccagcucuagacaacccu

SEQ ID NO: 3846879 - RNA, 21 nt, Human
ucccagcucuagacaacccug

SEQ ID NO: 3846880 - RNA, 14 nt, Human
ucccagcucucccu

SEQ ID NO: 3846881 - RNA, 16 nt, Human
ucccagcucucccucu

SEQ ID NO: 3846882 - RNA, 22 nt, Human
ucccagcucucccucuggcccu

SEQ ID NO: 3846883 - RNA, 17 nt, Human
ucccagcugaaauacug

SEQ ID NO: 3846884 - RNA, 16 nt, Human
ucccagcugacagucc

SEQ ID NO: 3846885 - RNA, 17 nt, Human
ucccagcugacaguccu

SEQ ID NO: 3846886 - RNA, 18 nt, Human
ucccagcugccauguuuc

SEQ ID NO: 3846887 - RNA, 19 nt, Human
ucccagcugccccucccug

SEQ ID NO: 3846888 - RNA, 14 nt, Human
ucccagcugucugu

SEQ ID NO: 3846889 - RNA, 22 nt, Human
ucccagcugucugugucagccu

SEQ ID NO: 3846890 - RNA, 21 nt, Human
ucccagcugugcucuggacag

SEQ ID NO: 3846891 - RNA, 23 nt, Human
ucccagcugugcucuggacaggc

SEQ ID NO: 3846892 - RNA, 18 nt, Human
ucccagcuuguaggagcu

SEQ ID NO: 3846893 - RNA, 15 nt, Human
ucccaggaagcccag

SEQ ID NO: 3846894 - RNA, 19 nt, Human
ucccaggacaccacaccca

SEQ ID NO: 3846895 - RNA, 21 nt, Human
ucccaggacaccacacccagc

SEQ ID NO: 3846896 - RNA, 22 nt, Human
ucccaggacaccacacccagcc

SEQ ID NO: 3846897 - RNA, 19 nt, Human
ucccaggaccacaggcuca

SEQ ID NO: 3846898 - RNA, 23 nt, Human
ucccaggaccacaggcucaggca

SEQ ID NO: 3846899 - RNA, 22 nt, Human
uccugaugacccaggcugccug

SEQ ID NO: 3846900 - RNA, 19 nt, Human
uccugaugcuucuucagag

SEQ ID NO: 3846901 - RNA, 20 nt, Human
uccugauggucagcucccuu

SEQ ID NO: 3846902 - RNA, 19 nt, Human
ggaagggguuccucaaauu

SEQ ID NO: 3846903 - RNA, 15 nt, Human
ggaaggguaaacaau

SEQ ID NO: 3846904 - RNA, 15 nt, Human
ggaaggguuucucua

SEQ ID NO: 3846905 - RNA, 18 nt, Human
ggaaggguuuguggcugg

SEQ ID NO: 3846906 - RNA, 16 nt, Human
ggaagguggggacagg

SEQ ID NO: 3846907 - RNA, 13 nt, Human
ggaaguaguuauc

SEQ ID NO: 3846908 - RNA, 16 nt, Human
ggaaguaguuaucaug

SEQ ID NO: 3846909 - RNA, 13 nt, Human
ggaaguccucugg

SEQ ID NO: 3846910 - RNA, 19 nt, Human
ggaaguccuuaucuagcug

SEQ ID NO: 3846911 - RNA, 18 nt, Human
ggaagugacaaggcccca

SEQ ID NO: 3846912 - RNA, 20 nt, Human
ggaagugacgguuuaauggg

SEQ ID NO: 3846913 - RNA, 21 nt, Human
ggaaguguaacagcugagguc

SEQ ID NO: 3846914 - RNA, 20 nt, Human
uccugggcgcccuggaagcc

SEQ ID NO: 3846915 - RNA, 20 nt, Human
uccugggcuuuuguuuugcu

SEQ ID NO: 3846916 - RNA, 18 nt, Human
uccuggggaaccugaccc

SEQ ID NO: 3846917 - RNA, 12 nt, Human
uccuggggccag

SEQ ID NO: 3846918 - RNA, 22 nt, Human
uccuggggcccaaaugcuggcu

SEQ ID NO: 3846919 - RNA, 13 nt, Human
uccuggggccucg

SEQ ID NO: 3846920 - RNA, 22 nt, Human
uccuggggccucggagccucau

SEQ ID NO: 3846921 - RNA, 18 nt, Human
uccuggggcucugugcag

SEQ ID NO: 3846922 - RNA, 11 nt, Human
uccugggggcc

SEQ ID NO: 3846923 - RNA, 23 nt, Human
uccugggggccuggguugggggc

SEQ ID NO: 3846924 - RNA, 23 nt, Human
uccuggggguucuuucuuccucu

SEQ ID NO: 3846925 - RNA, 23 nt, Human
uccugggguauaaaacuuuccuc

SEQ ID NO: 3846926 - RNA, 22 nt, Human
uccuggggugcccuccacugcc

SEQ ID NO: 3846927 - RNA, 14 nt, Human
uccuggguaaugag

SEQ ID NO: 3846928 - RNA, 13 nt, Human
uccuggguggcua

SEQ ID NO: 3846929 - RNA, 24 nt, Human
uccuggguggcuacucugugccag

SEQ ID NO: 3846930 - RNA, 21 nt, Human
uccuggguuuuguauucucug

SEQ ID NO: 3846931 - RNA, 15 nt, Human
uccugguacccagcc

SEQ ID NO: 3846932 - RNA, 16 nt, Human
uccugguacccagcca

SEQ ID NO: 3846933 - RNA, 13 nt, Human
uccugguagaaua

SEQ ID NO: 3846934 - RNA, 17 nt, Human
uccuggucaccuaggaa

SEQ ID NO: 3846935 - RNA, 23 nt, Human
uccugguccccucagcucugccu

SEQ ID NO: 3846936 - RNA, 17 nt, Human
uccuggucuugagaugu

SEQ ID NO: 3846937 - RNA, 20 nt, Human
uccuggugccaauuucaagu

SEQ ID NO: 3846938 - RNA, 12 nt, Human
uccuggugcccu

SEQ ID NO: 3846939 - RNA, 18 nt, Human
uccuggugcucucugcca

SEQ ID NO: 3846940 - RNA, 19 nt, Human
uccuggugcucucugccac

SEQ ID NO: 3846941 - RNA, 19 nt, Human
uccugguggggcagcuccu

SEQ ID NO: 3846942 - RNA, 21 nt, Human
uccugguggggcagcuccucu

SEQ ID NO: 3846943 - RNA, 16 nt, Human
uccugguggguccagg

SEQ ID NO: 3846944 - RNA, 16 nt, Human
uccuggugguauuuuc

SEQ ID NO: 3846945 - RNA, 22 nt, Human
uccugguuucauaacuuccugu

SEQ ID NO: 3846946 - RNA, 23 nt, Human
uccugguuucauaacuuccugua

SEQ ID NO: 3846947 - RNA, 22 nt, Human
uccuguaaaaaaaaaaaaguua

SEQ ID NO: 3846948 - RNA, 10 nt, Human
uccuguaaac

SEQ ID NO: 3846949 - RNA, 20 nt, Human
uccuguaaaugguguacaua

SEQ ID NO: 3846950 - RNA, 18 nt, Human
uccuguaacuguuacagu

SEQ ID NO: 3846951 - RNA, 23 nt, Human
uccuguaagccaaagaaaugaac

SEQ ID NO: 3846952 - RNA, 15 nt, Human
uccuguaauuccuac

SEQ ID NO: 3846953 - RNA, 16 nt, Human
uccuguacacugaaua

SEQ ID NO: 3846954 - RNA, 14 nt, Human
uccuguagcaucuu

SEQ ID NO: 3846955 - RNA, 17 nt, Human
uccuguagcaucuucug

SEQ ID NO: 3846956 - RNA, 13 nt, Human
uccuguagcccua

SEQ ID NO: 3846957 - RNA, 22 nt, Human
uccuguaggaagguacuguaug

SEQ ID NO: 3846958 - RNA, 22 nt, Human
uccuguaguugcguggacucug

SEQ ID NO: 3846959 - RNA, 23 nt, Human
uccuguaguugcguggacucugc

SEQ ID NO: 3846960 - RNA, 22 nt, Human
uccuguauaagcacugaaaaac

SEQ ID NO: 3846961 - RNA, 15 nt, Human
uccuguaugucuguc

SEQ ID NO: 3846962 - RNA, 15 nt, Human
uccuguauucacccg

SEQ ID NO: 3846963 - RNA, 22 nt, Human
uccuguauuuguucccaagagc

SEQ ID NO: 3846964 - RNA, 12 nt, Human
uccugucagugc

SEQ ID NO: 3846965 - RNA, 14 nt, Human
uccuguccagagag

SEQ ID NO: 3846966 - RNA, 13 nt, Human
uccuguccagcuc

SEQ ID NO: 3846967 - RNA, 14 nt, Human
uccuguccagcucc

SEQ ID NO: 3846968 - RNA, 17 nt, Human
uccuguccccaucuguc

SEQ ID NO: 3846969 - RNA, 19 nt, Human
uccugucccucauccauag

SEQ ID NO: 3846970 - RNA, 16 nt, Human
uccuguccucagcuuc

SEQ ID NO: 3846971 - RNA, 15 nt, Human
uccuguccucuuuca

SEQ ID NO: 3846972 - RNA, 17 nt, Human
uccuguccucuuucagc

SEQ ID NO: 3846973 - RNA, 19 nt, Human
uccuguccucuuucagcuc

SEQ ID NO: 3846974 - RNA, 22 nt, Human
uccugucggagcccugucuccu

SEQ ID NO: 3846975 - RNA, 18 nt, Human
uccugucuccccucugcu

SEQ ID NO: 3846976 - RNA, 15 nt, Human
uccugucucuggccu

SEQ ID NO: 3846977 - RNA, 22 nt, Human
uccugucugccagccagcagcc

SEQ ID NO: 3846978 - RNA, 13 nt, Human
uccugucuguuca

SEQ ID NO: 3846979 - RNA, 21 nt, Human
uccugucuuauccuccaccgu

SEQ ID NO: 3846980 - RNA, 15 nt, Human
uccugucuuccugca

SEQ ID NO: 3846981 - RNA, 14 nt, Human
uccugucuucugcu

SEQ ID NO: 3846982 - RNA, 15 nt, Human
uccugucuucugcuu

SEQ ID NO: 3846983 - RNA, 21 nt, Human
uccugucuuuaaagccugccu

SEQ ID NO: 3846984 - RNA, 17 nt, Human
uccugucuuuaaggaaa

SEQ ID NO: 3846985 - RNA, 19 nt, Human
uccugucuuuaaggaaaaa

SEQ ID NO: 3846986 - RNA, 15 nt, Human
uccugucuuucugag

SEQ ID NO: 3846987 - RNA, 22 nt, Human
uccugucuuucugagcacacuu

SEQ ID NO: 3846988 - RNA, 18 nt, Human
uccugugacauguaacag

SEQ ID NO: 3846989 - RNA, 17 nt, Human
uccugugagauguguau

SEQ ID NO: 3846990 - RNA, 13 nt, Human
uccugugcacagc

SEQ ID NO: 3846991 - RNA, 15 nt, Human
uccugugcaugggug

SEQ ID NO: 3846992 - RNA, 18 nt, Human
uccugugcaugggugaag

SEQ ID NO: 3846993 - RNA, 19 nt, Human
uccugugccuccaucagcu

SEQ ID NO: 3846994 - RNA, 18 nt, Human
uccugugcucagcccuga

SEQ ID NO: 3846995 - RNA, 22 nt, Human
uccuguggaacccagcaguucu

SEQ ID NO: 3846996 - RNA, 21 nt, Human
uccuguggaaggcagagaaau

SEQ ID NO: 3846997 - RNA, 22 nt, Human
uccuguggaaggcagagaaauc

SEQ ID NO: 3846998 - RNA, 18 nt, Human
uccuguggagaugacuug

SEQ ID NO: 3846999 - RNA, 19 nt, Human
uccuguggcauaaauugca

SEQ ID NO: 3847000 - RNA, 20 nt, Human
uccuguggcauaaauugcau

SEQ ID NO: 3847001 - RNA, 12 nt, Human
uccuguggcccc

SEQ ID NO: 3847002 - RNA, 14 nt, Human
uccuguggcucccu

SEQ ID NO: 3847003 - RNA, 13 nt, Human
uccugugggagcc

SEQ ID NO: 3847004 - RNA, 16 nt, Human
uccugugggagccucg

SEQ ID NO: 3847005 - RNA, 18 nt, Human
uccugugggagccucgca

SEQ ID NO: 3847006 - RNA, 22 nt, Human
uccuguguaaucauuucuuggg

SEQ ID NO: 3847007 - RNA, 13 nt, Human
uccuguguacagg

SEQ ID NO: 3847008 - RNA, 17 nt, Human
uccuguguacuguguca

SEQ ID NO: 3847009 - RNA, 13 nt, Human
uccuguguagcau

SEQ ID NO: 3847010 - RNA, 14 nt, Human
uccugugucaguuu

SEQ ID NO: 3847011 - RNA, 24 nt, Human
uccugugucuugcaauggcagccu

SEQ ID NO: 3847012 - RNA, 18 nt, Human
uccugugugugcgccuac

SEQ ID NO: 3847013 - RNA, 20 nt, Human
uccuguguguuaagcucugc

SEQ ID NO: 3847014 - RNA, 21 nt, Human
uccuguguguuaagcucugcu

SEQ ID NO: 3847015 - RNA, 21 nt, Human
uccuguugaaugacaaaguau

SEQ ID NO: 3847016 - RNA, 13 nt, Human
uccuguugcaccc

SEQ ID NO: 3847017 - RNA, 16 nt, Human
uccuguugcacccagc

SEQ ID NO: 3847018 - RNA, 21 nt, Human
uccuguugcacccagcccugg

SEQ ID NO: 3847019 - RNA, 13 nt, Human
uccuguugggaga

SEQ ID NO: 3847020 - RNA, 14 nt, Human
uccuguugggagag

SEQ ID NO: 3847021 - RNA, 18 nt, Human
uccuguuuauucccaucu

SEQ ID NO: 3847022 - RNA, 21 nt, Human
uccuguuucccuucccuucca

SEQ ID NO: 3847023 - RNA, 22 nt, Human
uccuguuucugaaaagaaauaa

SEQ ID NO: 3847024 - RNA, 17 nt, Human
uccuguuugucuacaua

SEQ ID NO: 3847025 - RNA, 20 nt, Human
uccuguuuuauaaugaaccc

SEQ ID NO: 3847026 - RNA, 21 nt, Human
uccuguuuugcacagccaaau

SEQ ID NO: 3847027 - RNA, 16 nt, Human
uccuguuuuuauuauu

SEQ ID NO: 3847028 - RNA, 20 nt, Human
uccuguuuuuauuauuaaca

SEQ ID NO: 3847029 - RNA, 17 nt, Human
uccuguuuuucugggug

SEQ ID NO: 3847030 - RNA, 18 nt, Human
uccuuaaaaaucacacug

SEQ ID NO: 3847031 - RNA, 23 nt, Human
uccuuaaacuguguggacuguga

SEQ ID NO: 3847032 - RNA, 23 nt, Human
uccuuaaagaguguggcaaaaua

SEQ ID NO: 3847033 - RNA, 17 nt, Human
uccuuaaaucuuaaugu

SEQ ID NO: 3847034 - RNA, 16 nt, Human
uccuuaagaacacaaa

SEQ ID NO: 3847035 - RNA, 16 nt, Human
uccuuaagagacaauu

SEQ ID NO: 3847036 - RNA, 20 nt, Human
uccuuaagcugcagagauuu

SEQ ID NO: 3847037 - RNA, 16 nt, Human
uccuuaaggcucuuuu

SEQ ID NO: 3847038 - RNA, 17 nt, Human
uccuuaauccagcugau

SEQ ID NO: 3847039 - RNA, 16 nt, Human
uccuuacaaaugauug

SEQ ID NO: 3847040 - RNA, 18 nt, Human
uccuuacaaaugauugcu

SEQ ID NO: 3847041 - RNA, 22 nt, Human
uccuuacaaguuagaaaacaua

SEQ ID NO: 3847042 - RNA, 14 nt, Human
uccuuaccagcaga

SEQ ID NO: 3847043 - RNA, 17 nt, Human
uccuuaccagcagagca

SEQ ID NO: 3847044 - RNA, 14 nt, Human
uccuuacccaucug

SEQ ID NO: 3847045 - RNA, 21 nt, Human
uccuuaccuuuaccccauccc

SEQ ID NO: 3847046 - RNA, 18 nt, Human
ucccuuucuccccugccc

SEQ ID NO: 3847047 - RNA, 19 nt, Human
ucccuuucugcuuguguua

SEQ ID NO: 3847048 - RNA, 16 nt, Human
ucccuuucuucucccc

SEQ ID NO: 3847049 - RNA, 16 nt, Human
ucccuuucuuggccag

SEQ ID NO: 3847050 - RNA, 15 nt, Human
ucccuuugaaaugaa

SEQ ID NO: 3847051 - RNA, 13 nt, Human
ucccuuugcucca

SEQ ID NO: 3847052 - RNA, 15 nt, Human
ucccuuugcuccacc

SEQ ID NO: 3847053 - RNA, 17 nt, Human
ucccuuugucuuucaaa

SEQ ID NO: 3847054 - RNA, 17 nt, Human
ucccuuuuacauacugc

SEQ ID NO: 3847055 - RNA, 20 nt, Human
ucccuuuucaccuuuucagg

SEQ ID NO: 3847056 - RNA, 12 nt, Human
ucccuuuuccuu

SEQ ID NO: 3847057 - RNA, 20 nt, Human
ucccuuuucuguucuaguuu

SEQ ID NO: 3847058 - RNA, 23 nt, Human
ucccuuuugcggaugggaggggu

SEQ ID NO: 3847059 - RNA, 15 nt, Human
ucccuuuuugaagug

SEQ ID NO: 3847060 - RNA, 17 nt, Human
ucccuuuuuuggcugcu

SEQ ID NO: 3847061 - RNA, 19 nt, Human
ucccuuuuuuggcugcuga

SEQ ID NO: 3847062 - RNA, 23 nt, Human
ucccuuuuuuggcugcugaaggc

SEQ ID NO: 3847063 - RNA, 16 nt, Human
ucccuuuuuuuaagua

SEQ ID NO: 3847064 - RNA, 19 nt, Human
uccgaaaccaaagaagaaa

SEQ ID NO: 3847065 - RNA, 18 nt, Human
uccgaaccuccucuguga

SEQ ID NO: 3847066 - RNA, 22 nt, Human
uccgaaccuccucugugaagca

SEQ ID NO: 3847067 - RNA, 21 nt, Human
uccgaaguaugagggaaaaug

SEQ ID NO: 3847068 - RNA, 21 nt, Human
uccgacaaccgaugcuccagc

SEQ ID NO: 3847069 - RNA, 19 nt, Human
uccgaccuggccugucugu

SEQ ID NO: 3847070 - RNA, 16 nt, Human
uccgacucacaccacu

SEQ ID NO: 3847071 - RNA, 23 nt, Human
uccgacucuuucugagugccuuc

SEQ ID NO: 3847072 - RNA, 15 nt, Human
uccgacugcuuugga

SEQ ID NO: 3847073 - RNA, 21 nt, Human
uccgacuugaauuuucccacu

SEQ ID NO: 3847074 - RNA, 13 nt, Human
uccgagagggaga

SEQ ID NO: 3847075 - RNA, 16 nt, Human
uccgagaggugggcca

SEQ ID NO: 3847076 - RNA, 12 nt, Human
uccgaggcaggg

SEQ ID NO: 3847077 - RNA, 14 nt, Human
uccgaggcaggguc

SEQ ID NO: 3847078 - RNA, 20 nt, Human
uccgaggggcgggacccagg

SEQ ID NO: 3847079 - RNA, 20 nt, Human
uccgauggaugaaucuccca

SEQ ID NO: 3847080 - RNA, 16 nt, Human
uccgcacuuuccacuu

SEQ ID NO: 3847081 - RNA, 22 nt, Human
uccgcacuuuccacuucuuccu

SEQ ID NO: 3847082 - RNA, 23 nt, Human
uccgcacuuuccacuucuuccuu

SEQ ID NO: 3847083 - RNA, 23 nt, Human
uccgcagcccccacccccaaggu

SEQ ID NO: 3847084 - RNA, 12 nt, Human
uccgcaggacuu

SEQ ID NO: 3847085 - RNA, 21 nt, Human
uccgccacuggggcucagagc

SEQ ID NO: 3847086 - RNA, 11 nt, Human
uccgccagccu

SEQ ID NO: 3847087 - RNA, 13 nt, Human
uccgccagccucc

SEQ ID NO: 3847088 - RNA, 17 nt, Human
uccgccagccuccucug

SEQ ID NO: 3847089 - RNA, 13 nt, Human
uccgccagggccc

SEQ ID NO: 3847090 - RNA, 12 nt, Human
uccgcccccagc

SEQ ID NO: 3847091 - RNA, 13 nt, Human
uccgcccccagcc

SEQ ID NO: 3847092 - RNA, 20 nt, Human
uccgccccugagcccacugu

SEQ ID NO: 3847093 - RNA, 14 nt, Human
uccgccccugccug

SEQ ID NO: 3847094 - RNA, 15 nt, Human
uccgccccuucccuu

SEQ ID NO: 3847095 - RNA, 14 nt, Human
uccgcccugccacu

SEQ ID NO: 3847096 - RNA, 15 nt, Human
uccgcccugcuccuc

SEQ ID NO: 3847097 - RNA, 19 nt, Human
uccgcccugcuccucccug

SEQ ID NO: 3847098 - RNA, 22 nt, Human
uccgcccugcuccucccuggcu

SEQ ID NO: 3847099 - RNA, 21 nt, Human
uccgcccuuagucccccaacu

SEQ ID NO: 3847100 - RNA, 13 nt, Human
uccgccuccagga

SEQ ID NO: 3847101 - RNA, 17 nt, Human
uccgccucugcuggcac

SEQ ID NO: 3847102 - RNA, 13 nt, Human
uccgccucugucc

SEQ ID NO: 3847103 - RNA, 17 nt, Human
uccgccuucacauuccc

SEQ ID NO: 3847104 - RNA, 14 nt, Human
uccgccuuuuguau

SEQ ID NO: 3847105 - RNA, 12 nt, Human
uccgcgaaaaua

SEQ ID NO: 3847106 - RNA, 19 nt, Human
uccgcgaaaauaguuuguu

SEQ ID NO: 3847107 - RNA, 14 nt, Human
uccgcgugugccug

SEQ ID NO: 3847108 - RNA, 19 nt, Human
uccgcgugugccugugugc

SEQ ID NO: 3847109 - RNA, 15 nt, Human
uccgcuauccaccaa

SEQ ID NO: 3847110 - RNA, 16 nt, Human
uccgcugcuccuuggc

SEQ ID NO: 3847111 - RNA, 20 nt, Human
uccgcuuggagcuauuuucc

SEQ ID NO: 3847112 - RNA, 21 nt, Human
uccgcuuucuacccagcgagc

SEQ ID NO: 3847113 - RNA, 19 nt, Human
uccggaaacuaguguacau

SEQ ID NO: 3847114 - RNA, 12 nt, Human
uccggaaagaag

SEQ ID NO: 3847115 - RNA, 18 nt, Human
uccggaauccuguccuca

SEQ ID NO: 3847116 - RNA, 22 nt, Human
uccggaauccuguccucagcuu

SEQ ID NO: 3847117 - RNA, 18 nt, Human
ucgucuuucccaugggga

SEQ ID NO: 3847118 - RNA, 14 nt, Human
ucgugaaacccugu

SEQ ID NO: 3847119 - RNA, 18 nt, Human
ucgugaaacccugucucu

SEQ ID NO: 3847120 - RNA, 22 nt, Human
ucgugaaagugcauuuuuguaa

SEQ ID NO: 3847121 - RNA, 19 nt, Human
ucgugaaguauacuguauu

SEQ ID NO: 3847122 - RNA, 13 nt, Human
ucgugacaacacu

SEQ ID NO: 3847123 - RNA, 18 nt, Human
ucgugacaauguuuacaa

SEQ ID NO: 3847124 - RNA, 21 nt, Human
ucgugaccaacuagacauucu

SEQ ID NO: 3847125 - RNA, 20 nt, Human
ucgugacgcugaauaaaugu

SEQ ID NO: 3847126 - RNA, 15 nt, Human
ucgugagcucuugug

SEQ ID NO: 3847127 - RNA, 15 nt, Human
ucgugauaaacuuug

SEQ ID NO: 3847128 - RNA, 16 nt, Human
ucgugauugauaagaa

SEQ ID NO: 3847129 - RNA, 19 nt, Human
ucgugccagucgcgcugcc

SEQ ID NO: 3847130 - RNA, 23 nt, Human
ucgugccagucgcgcugccugug

SEQ ID NO: 3847131 - RNA, 20 nt, Human
ucgugcccccccuucccccu

SEQ ID NO: 3847132 - RNA, 20 nt, Human
ucgugccuccuuccaccucc

SEQ ID NO: 3847133 - RNA, 22 nt, Human
ucgugcuacugcacuccagccu

SEQ ID NO: 3847134 - RNA, 20 nt, Human
ucguggacugagugggaagc

SEQ ID NO: 3847135 - RNA, 24 nt, Human
ucguggagagcuaggagcaaagcc

SEQ ID NO: 3847136 - RNA, 22 nt, Human
ucguggcagauaaucagccucu

SEQ ID NO: 3847137 - RNA, 12 nt, Human
ucguggccagcc

SEQ ID NO: 3847138 - RNA, 18 nt, Human
ucguggccagcccggcug

SEQ ID NO: 3847139 - RNA, 18 nt, Human
ucguggggugugcuggga

SEQ ID NO: 3847140 - RNA, 19 nt, Human
ucgugggucuguuuuccuu

SEQ ID NO: 3847141 - RNA, 14 nt, Human
ucguguauccuggg

SEQ ID NO: 3847142 - RNA, 18 nt, Human
ucguguauccuggggcuc

SEQ ID NO: 3847143 - RNA, 22 nt, Human
ucguguauccuggggcucccuu

SEQ ID NO: 3847144 - RNA, 22 nt, Human
ucgugucauacucgagucugag

SEQ ID NO: 3847145 - RNA, 14 nt, Human
ucgugucucugguc

SEQ ID NO: 3847146 - RNA, 14 nt, Human
ucgugucuggcaca

SEQ ID NO: 3847147 - RNA, 17 nt, Human
ucguuaaaaaguuguuu

SEQ ID NO: 3847148 - RNA, 17 nt, Human
ucguuaacauugaccaa

SEQ ID NO: 3847149 - RNA, 17 nt, Human
ucguuagggaagagaaa

SEQ ID NO: 3847150 - RNA, 13 nt, Human
ucguucucccugg

SEQ ID NO: 3847151 - RNA, 13 nt, Human
ucguucucugccu

SEQ ID NO: 3847152 - RNA, 12 nt, Human
ucguuucaaaaa

SEQ ID NO: 3847153 - RNA, 17 nt, Human
ucguuugaaucacagua

SEQ ID NO: 3847154 - RNA, 13 nt, Human
ucguuuguuuguu

SEQ ID NO: 3847155 - RNA, 20 nt, Human
ucguuuuccaaacugacuca

SEQ ID NO: 3847156 - RNA, 21 nt, Human
ucguuuucuuaaagugccagu

SEQ ID NO: 3847157 - RNA, 20 nt, Human
ucguuuuuguauuuucauga

SEQ ID NO: 3847158 - RNA, 13 nt, Human
ucuaaaaacuucu

SEQ ID NO: 3847159 - RNA, 15 nt, Human
ucuaaaaagucagau

SEQ ID NO: 3847160 - RNA, 22 nt, Human
ucuaaaaauaaaccaaaggaca

SEQ ID NO: 3847161 - RNA, 18 nt, Human
ucuaaaaauaacuguaau

SEQ ID NO: 3847162 - RNA, 15 nt, Human
ucuaaaacuaaauag

SEQ ID NO: 3847163 - RNA, 21 nt, Human
ucuaaaacuaaauagcaugua

SEQ ID NO: 3847164 - RNA, 19 nt, Human
ucuaaaacuguacuuugau

SEQ ID NO: 3847165 - RNA, 16 nt, Human
ucuaaaagcagaaaau

SEQ ID NO: 3847166 - RNA, 13 nt, Human
ucuaaaaguguca

SEQ ID NO: 3847167 - RNA, 21 nt, Human
ucuaaaagugucaccuuuucu

SEQ ID NO: 3847168 - RNA, 23 nt, Human
ucuaaaaucuuauaguucuaggc

SEQ ID NO: 3847169 - RNA, 13 nt, Human
ucuaaaaugaguu

SEQ ID NO: 3847170 - RNA, 18 nt, Human
ucuaaaaugugauguucu

SEQ ID NO: 3847171 - RNA, 21 nt, Human
ucuaaaaugugauguucuaag

SEQ ID NO: 3847172 - RNA, 18 nt, Human
ucuaaacaagaaucaguc

SEQ ID NO: 3847173 - RNA, 16 nt, Human
ucuaaacccaauccaa

SEQ ID NO: 3847174 - RNA, 20 nt, Human
ucuaaacguaagcacuguuu

SEQ ID NO: 3847175 - RNA, 18 nt, Human
ucuaaacuaggcuccuuc

SEQ ID NO: 3847176 - RNA, 16 nt, Human
ucuaaacugcccccuc

SEQ ID NO: 3847177 - RNA, 22 nt, Human
ucuaaacugcccccucugcccu

SEQ ID NO: 3847178 - RNA, 23 nt, Human
ucuaaacugcccccucugcccug

SEQ ID NO: 3847179 - RNA, 13 nt, Human
ucuaaacuggaga

SEQ ID NO: 3847180 - RNA, 14 nt, Human
ucuaaacuggagac

SEQ ID NO: 3847181 - RNA, 15 nt, Human
ucuaaacuggagacu

SEQ ID NO: 3847182 - RNA, 19 nt, Human
ucuaaacuuuaauauguau

SEQ ID NO: 3847183 - RNA, 13 nt, Human
ucuaaagagcauc

SEQ ID NO: 3847184 - RNA, 18 nt, Human
ucuaaagauaauauuacu

SEQ ID NO: 3847185 - RNA, 24 nt, Human
ucuaaagauagagucauugcugua

SEQ ID NO: 3847186 - RNA, 13 nt, Human
ucuaaagauucua

SEQ ID NO: 3847187 - RNA, 15 nt, Human
ucuaaagauucuaua

SEQ ID NO: 3847188 - RNA, 16 nt, Human
ucuaaagauucuauag

SEQ ID NO: 3847189 - RNA, 23 nt, Human
ucuaaagauucuauaguucuaga

SEQ ID NO: 3847190 - RNA, 22 nt, Human
ucuacaaucucuuuuuguuugc

SEQ ID NO: 3847191 - RNA, 15 nt, Human
ucuacaaugugaacu

SEQ ID NO: 3847192 - RNA, 17 nt, Human
ucuacaaugugaacuuu

SEQ ID NO: 3847193 - RNA, 20 nt, Human
ucuacaaugugaacuuuauu

SEQ ID NO: 3847194 - RNA, 18 nt, Human
ucuacacagugggaacuc

SEQ ID NO: 3847195 - RNA, 16 nt, Human
ucuacaccuugcuuuu

SEQ ID NO: 3847196 - RNA, 17 nt, Human
ucuacacuccagugaga

SEQ ID NO: 3847197 - RNA, 12 nt, Human
ucuacacucucc

SEQ ID NO: 3847198 - RNA, 14 nt, Human
ucuacacucuccug

SEQ ID NO: 3847199 - RNA, 16 nt, Human
ucuacacucuccuggg

SEQ ID NO: 3847200 - RNA, 19 nt, Human
ucuacacucuuguaauaaa

SEQ ID NO: 3847201 - RNA, 16 nt, Human
ucuacacugcaaucau

SEQ ID NO: 3847202 - RNA, 19 nt, Human
ucuacacugcaaucauaug

SEQ ID NO: 3847203 - RNA, 20 nt, Human
ucuacacugcaaucauaugu

SEQ ID NO: 3847204 - RNA, 15 nt, Human
ucuacacugugcuga

SEQ ID NO: 3847205 - RNA, 21 nt, Human
ucuacacugugcugagucuga

SEQ ID NO: 3847206 - RNA, 12 nt, Human
ucuacagaaaaa

SEQ ID NO: 3847207 - RNA, 18 nt, Human
ucuacagacuucuccaga

SEQ ID NO: 3847208 - RNA, 16 nt, Human
ucuacagagcuucccu

SEQ ID NO: 3847209 - RNA, 17 nt, Human
ucuacagagcuucccug

SEQ ID NO: 3847210 - RNA, 18 nt, Human
ucuacagagcuucccuga

SEQ ID NO: 3847211 - RNA, 21 nt, Human
ucuacagaggccaugggccuc

SEQ ID NO: 3847212 - RNA, 14 nt, Human
ucuacagcaaauuu

SEQ ID NO: 3847213 - RNA, 18 nt, Human
ucuacagcaaauuuauaa

SEQ ID NO: 3847214 - RNA, 19 nt, Human
ucuacagcaaauuuauaau

SEQ ID NO: 3847215 - RNA, 13 nt, Human
ucuacagugguuu

SEQ ID NO: 3847216 - RNA, 22 nt, Human
ucuacagugguuuuauacugaa

SEQ ID NO: 3847217 - RNA, 12 nt, Human
ucuacaucacuc

SEQ ID NO: 3847218 - RNA, 17 nt, Human
ucuacaucuucugccuu

SEQ ID NO: 3847219 - RNA, 20 nt, Human
ucuaccaagcuauccuggcu

SEQ ID NO: 3847220 - RNA, 17 nt, Human
ucuaccagacuguguau

SEQ ID NO: 3847221 - RNA, 14 nt, Human
ucuacccaaacccu

SEQ ID NO: 3847222 - RNA, 20 nt, Human
ucuacccaagggcagaaagu

SEQ ID NO: 3847223 - RNA, 17 nt, Human
ucuacccagcccaucuu

SEQ ID NO: 3847224 - RNA, 21 nt, Human
ucuacccagcccaucuugccu

SEQ ID NO: 3847225 - RNA, 14 nt, Human
ucuacccaggugcu

SEQ ID NO: 3847226 - RNA, 19 nt, Human
ucuacccaucuuaaaaaca

SEQ ID NO: 3847227 - RNA, 21 nt, Human
ucuacccaucuuaaaaacaac

SEQ ID NO: 3847228 - RNA, 16 nt, Human
ucuaccccagacuaga

SEQ ID NO: 3847229 - RNA, 22 nt, Human
ucuaccccucccggcccugccu

SEQ ID NO: 3847230 - RNA, 23 nt, Human
ucuaccccucccggcccugccug

SEQ ID NO: 3847231 - RNA, 16 nt, Human
ucuacccucccacccc

SEQ ID NO: 3847232 - RNA, 12 nt, Human
ucuacccuggga

SEQ ID NO: 3847233 - RNA, 16 nt, Human
ucuaccuagauuuaau

SEQ ID NO: 3847234 - RNA, 17 nt, Human
ucuaccuagauuuaaua

SEQ ID NO: 3847235 - RNA, 15 nt, Human
ucuaccucaggcagc

SEQ ID NO: 3847236 - RNA, 19 nt, Human
ucuaccucaggcagcucaa

SEQ ID NO: 3847237 - RNA, 12 nt, Human
ucuaccugaggg

SEQ ID NO: 3847238 - RNA, 14 nt, Human
ucuaccugccacuc

SEQ ID NO: 3847239 - RNA, 18 nt, Human
ucuaccuggagggaagag

SEQ ID NO: 3847240 - RNA, 21 nt, Human
ucuaccuggucucuccuuguu

SEQ ID NO: 3847241 - RNA, 15 nt, Human
ucuaccuucucccca

SEQ ID NO: 3847242 - RNA, 18 nt, Human
ucuaccuucuccccagcu

SEQ ID NO: 3847243 - RNA, 14 nt, Human
ucuaccuucuguag

SEQ ID NO: 3847244 - RNA, 16 nt, Human
ucuaccuucuguaguu

SEQ ID NO: 3847245 - RNA, 14 nt, Human
ucuaccuuuucucu

SEQ ID NO: 3847246 - RNA, 15 nt, Human
ucuacgcucuccuuu

SEQ ID NO: 3847247 - RNA, 16 nt, Human
ucuacgcucuccuuuc

SEQ ID NO: 3847248 - RNA, 17 nt, Human
ucuacgcucuccuuucu

SEQ ID NO: 3847249 - RNA, 14 nt, Human
ucuacguuucuuua

SEQ ID NO: 3847250 - RNA, 14 nt, Human
ucuacuaaaaagaa

SEQ ID NO: 3847251 - RNA, 19 nt, Human
ucuacuaaaaauacaaaaa

SEQ ID NO: 3847252 - RNA, 16 nt, Human
ucuacuaaaaaugcaa

SEQ ID NO: 3847253 - RNA, 17 nt, Human
ucuacuagauugugauc

SEQ ID NO: 3847254 - RNA, 21 nt, Human
ucuacucacuuuucccacucc

SEQ ID NO: 3847255 - RNA, 20 nt, Human
ucuacucgaguuacagacaa

SEQ ID NO: 3847256 - RNA, 18 nt, Human
ucuacucuuaagccaucu

SEQ ID NO: 3847257 - RNA, 24 nt, Human
ucuacugcauuuagggaguauucu

SEQ ID NO: 3847258 - RNA, 21 nt, Human
ucuacuguauggaauacaaug

SEQ ID NO: 3847259 - RNA, 23 nt, Human
ucuacugucaaaugaugugcaaa

SEQ ID NO: 3847260 - RNA, 23 nt, Human
ucuacuguguaauauaaaagauc

SEQ ID NO: 3847261 - RNA, 20 nt, Human
ucuacuuacacaucuuccac

SEQ ID NO: 3847262 - RNA, 22 nt, Human
ucuacuuccaaacuaauuuuua

SEQ ID NO: 3847263 - RNA, 15 nt, Human
ucuacuuccaagacu

SEQ ID NO: 3847264 - RNA, 14 nt, Human
ucuacuuccccaug

SEQ ID NO: 3847265 - RNA, 22 nt, Human
ucuacuugccagaaccaaauua

SEQ ID NO: 3847266 - RNA, 14 nt, Human
ucuacuugcucugg

SEQ ID NO: 3847267 - RNA, 22 nt, Human
ucuacuugcugucccuuggaac

SEQ ID NO: 3847268 - RNA, 14 nt, Human
ucuacuuuuaaaga

SEQ ID NO: 3847269 - RNA, 12 nt, Human
ucuagaaaacca

SEQ ID NO: 3847270 - RNA, 13 nt, Human
ucuagaacacagg

SEQ ID NO: 3847271 - RNA, 19 nt, Human
ucuagaacaucccugccag

SEQ ID NO: 3847272 - RNA, 21 nt, Human
ucuagaacaucccugccagcu

SEQ ID NO: 3847273 - RNA, 17 nt, Human
ucuagaagaaaugaaau

SEQ ID NO: 3847274 - RNA, 18 nt, Human
ucuagaagaaaugaaauu

SEQ ID NO: 3847275 - RNA, 19 nt, Human
ucuagaagagucuauuguc

SEQ ID NO: 3847276 - RNA, 20 nt, Human
ucuagaagccaagggaaagg

SEQ ID NO: 3847277 - RNA, 23 nt, Human
ucuagaagccaagggaaaggggu

SEQ ID NO: 3847278 - RNA, 16 nt, Human
ucuagaaguuguuugu

SEQ ID NO: 3847279 - RNA, 23 nt, Human
ucuagaaucugcaauucaaaagu

SEQ ID NO: 3847280 - RNA, 17 nt, Human
ucuagaauuauaaguca

SEQ ID NO: 3847281 - RNA, 14 nt, Human
uccuaguuccacca

SEQ ID NO: 3847282 - RNA, 17 nt, Human
uccuaguucuagaaaaa

SEQ ID NO: 3847283 - RNA, 16 nt, Human
uccuaguucuguagaa

SEQ ID NO: 3847284 - RNA, 16 nt, Human
uccuaguucuucaucc

SEQ ID NO: 3847285 - RNA, 21 nt, Human
uccuaguuggugagaaaccug

SEQ ID NO: 3847286 - RNA, 13 nt, Human
uccuauaacuuga

SEQ ID NO: 3847287 - RNA, 18 nt, Human
uccuauaacuugaugcau

SEQ ID NO: 3847288 - RNA, 17 nt, Human
uccuauaaggaagauuu

SEQ ID NO: 3847289 - RNA, 20 nt, Human
uccuauaauauaauaaauau

SEQ ID NO: 3847290 - RNA, 16 nt, Human
uccuauaaucugucaa

SEQ ID NO: 3847291 - RNA, 17 nt, Human
uccuauaaucugucaaa

SEQ ID NO: 3847292 - RNA, 23 nt, Human
uccuauaaucugucaaaacacug

SEQ ID NO: 3847293 - RNA, 14 nt, Human
uccuauauauuucu

SEQ ID NO: 3847294 - RNA, 15 nt, Human
uccuauauauuucua

SEQ ID NO: 3847295 - RNA, 19 nt, Human
uccuaucaccuauuuccau

SEQ ID NO: 3847296 - RNA, 17 nt, Human
uccuaucaccuccccuc

SEQ ID NO: 3847297 - RNA, 19 nt, Human
uccuaucaccuccccuccu

SEQ ID NO: 3847298 - RNA, 15 nt, Human
uccuauccacugggc

SEQ ID NO: 3847299 - RNA, 17 nt, Human
uccuauccacugggcac

SEQ ID NO: 3847300 - RNA, 21 nt, Human
uccuauccacugggcacaacu

SEQ ID NO: 3847301 - RNA, 14 nt, Human
uccuaucccauccc

SEQ ID NO: 3847302 - RNA, 13 nt, Human
uccuauccuccua

SEQ ID NO: 3847303 - RNA, 23 nt, Human
uccuaucuccagcggcccuguca

SEQ ID NO: 3847304 - RNA, 13 nt, Human
uccuaucugggcu

SEQ ID NO: 3847305 - RNA, 15 nt, Human
uccuaugaaugcuuu

SEQ ID NO: 3847306 - RNA, 18 nt, Human
uccuaugaaugcuuugca

SEQ ID NO: 3847307 - RNA, 22 nt, Human
uccuaugauguauacugccacu

SEQ ID NO: 3847308 - RNA, 20 nt, Human
uccuaugcuauugacaauaa

SEQ ID NO: 3847309 - RNA, 14 nt, Human
uccuaugcuuugaa

SEQ ID NO: 3847310 - RNA, 22 nt, Human
uccuauggcuggccacugcaca

SEQ ID NO: 3847311 - RNA, 12 nt, Human
uccuauguguga

SEQ ID NO: 3847312 - RNA, 12 nt, Human
uccuauuagugu

SEQ ID NO: 3847313 - RNA, 14 nt, Human
uccuauuaguguua

SEQ ID NO: 3847314 - RNA, 17 nt, Human
uccuauuaguguuauau

SEQ ID NO: 3847315 - RNA, 12 nt, Human
uccuauuauauu

SEQ ID NO: 3847316 - RNA, 14 nt, Human
uccuauucaguucc

SEQ ID NO: 3847317 - RNA, 22 nt, Human
uccuauucaguucccagaauca

SEQ ID NO: 3847318 - RNA, 23 nt, Human
uccuauucaguucccagaaucaa

SEQ ID NO: 3847319 - RNA, 15 nt, Human
uccuauucucaccag

SEQ ID NO: 3847320 - RNA, 21 nt, Human
uccuauucuuucgaaagaaga

SEQ ID NO: 3847321 - RNA, 17 nt, Human
uccuauugucauuaaag

SEQ ID NO: 3847322 - RNA, 15 nt, Human
uccuauugugauuug

SEQ ID NO: 3847323 - RNA, 20 nt, Human
uccuauugugauuugacugu

SEQ ID NO: 3847324 - RNA, 14 nt, Human
uccuauuuagaugg

SEQ ID NO: 3847325 - RNA, 14 nt, Human
uccuauuucagaag

SEQ ID NO: 3847326 - RNA, 16 nt, Human
uccuauuucagaaguu

SEQ ID NO: 3847327 - RNA, 21 nt, Human
uccuauuucaguacuucagca

SEQ ID NO: 3847328 - RNA, 15 nt, Human
uccuauuucuuauag

SEQ ID NO: 3847329 - RNA, 17 nt, Human
uccuauuuguuuucaug

SEQ ID NO: 3847330 - RNA, 13 nt, Human
uccuauuuuugua

SEQ ID NO: 3847331 - RNA, 14 nt, Human
uccuauuuuuguaa

SEQ ID NO: 3847332 - RNA, 17 nt, Human
uccuauuuuuguaaacu

SEQ ID NO: 3847333 - RNA, 15 nt, Human
uccucaaagaaagug

SEQ ID NO: 3847334 - RNA, 19 nt, Human
uccucaaccccuccccucc

SEQ ID NO: 3847335 - RNA, 14 nt, Human
ucuccuccccuucc

SEQ ID NO: 3847336 - RNA, 16 nt, Human
ucuccuccccuugaau

SEQ ID NO: 3847337 - RNA, 14 nt, Human
ucuccuccugccca

SEQ ID NO: 3847338 - RNA, 16 nt, Human
ucuccucucagccccu

SEQ ID NO: 3847339 - RNA, 19 nt, Human
uccuggacauuuuuucagu

SEQ ID NO: 3847340 - RNA, 14 nt, Human
uccuggacugaggg

SEQ ID NO: 3847341 - RNA, 20 nt, Human
uccuggacugagggggccug

SEQ ID NO: 3847342 - RNA, 14 nt, Human
uccuggagagucuc

SEQ ID NO: 3847343 - RNA, 18 nt, Human
uccuggagagucucacuc

SEQ ID NO: 3847344 - RNA, 19 nt, Human
uccuggagcagaccacccc

SEQ ID NO: 3847345 - RNA, 15 nt, Human
uccuggagcccagag

SEQ ID NO: 3847346 - RNA, 21 nt, Human
uccuggagcccgaggcaccag

SEQ ID NO: 3847347 - RNA, 18 nt, Human
uccuggaggcccaguuca

SEQ ID NO: 3847348 - RNA, 23 nt, Human
uccuggaggcucaaauuuugagu

SEQ ID NO: 3847349 - RNA, 11 nt, Human
uccuggagggg

SEQ ID NO: 3847350 - RNA, 19 nt, Human
uccuggaggggcuggggac

SEQ ID NO: 3847351 - RNA, 22 nt, Human
uccuggagguuccccagcccca

SEQ ID NO: 3847352 - RNA, 22 nt, Human
uccuggaugauacuaauaaacu

SEQ ID NO: 3847353 - RNA, 23 nt, Human
uccuggcaauaguguguucugau

SEQ ID NO: 3847354 - RNA, 19 nt, Human
uccuggcacccggccccug

SEQ ID NO: 3847355 - RNA, 16 nt, Human
uccuggcacugcuucc

SEQ ID NO: 3847356 - RNA, 17 nt, Human
uccuggcacugcuucca

SEQ ID NO: 3847357 - RNA, 21 nt, Human
uccuggcacuggaccccagca

SEQ ID NO: 3847358 - RNA, 22 nt, Human
uccuggcaugggaaugaauguc

SEQ ID NO: 3847359 - RNA, 17 nt, Human
uccuggcccacugcauc

SEQ ID NO: 3847360 - RNA, 13 nt, Human
uccuggcccagcc

SEQ ID NO: 3847361 - RNA, 13 nt, Human
uccuggcccaggg

SEQ ID NO: 3847362 - RNA, 16 nt, Human
uccuggcccagggcau

SEQ ID NO: 3847363 - RNA, 19 nt, Human
uccuggcccagggcaucug

SEQ ID NO: 3847364 - RNA, 22 nt, Human
uccuggcccagggcaucuggga

SEQ ID NO: 3847365 - RNA, 16 nt, Human
uccuggcccucugugu

SEQ ID NO: 3847366 - RNA, 19 nt, Human
uccuggccggugugggggc

SEQ ID NO: 3847367 - RNA, 18 nt, Human
uccuggccuauccgcugc

SEQ ID NO: 3847368 - RNA, 23 nt, Human
uccuggccuauccgcugccagcc

SEQ ID NO: 3847369 - RNA, 22 nt, Human
uccuggccucagacugcaccca

SEQ ID NO: 3847370 - RNA, 13 nt, Human
uccuggccugaga

SEQ ID NO: 3847371 - RNA, 13 nt, Human
uccuggcuccuga

SEQ ID NO: 3847372 - RNA, 14 nt, Human
uccuggcuucccau

SEQ ID NO: 3847373 - RNA, 16 nt, Human
uccuggcuuugcccaa

SEQ ID NO: 3847374 - RNA, 17 nt, Human
uccuggcuuugcccaac

SEQ ID NO: 3847375 - RNA, 23 nt, Human
uccuggcuuugcccaaccucagc

SEQ ID NO: 3847376 - RNA, 14 nt, Human
uccugggaaauauu

SEQ ID NO: 3847377 - RNA, 16 nt, Human
uccugggaaauauucc

SEQ ID NO: 3847378 - RNA, 17 nt, Human
uccugggagaaccucag

SEQ ID NO: 3847379 - RNA, 14 nt, Human
uccugggagugagc

SEQ ID NO: 3847380 - RNA, 17 nt, Human
uccugggagugagcugg

SEQ ID NO: 3847381 - RNA, 22 nt, Human
uccugggcagcugccuccccuc

SEQ ID NO: 3847382 - RNA, 18 nt, Human
uccugggccccucccuac

SEQ ID NO: 3847383 - RNA, 23 nt, Human
uccugggccccucccuaccucaa

SEQ ID NO: 3847384 - RNA, 12 nt, Human
uccugggccugc

SEQ ID NO: 3847385 - RNA, 13 nt, Human
uccugggccugca

SEQ ID NO: 3847386 - RNA, 14 nt, Human
uccugggcgcccug

SEQ ID NO: 3847387 - RNA, 16 nt, Human
uccugggcgcccugga

SEQ ID NO: 3847388 - RNA, 12 nt, Human
uccugggcucag

SEQ ID NO: 3847389 - RNA, 12 nt, Human
uccugggcuggu

SEQ ID NO: 3847390 - RNA, 19 nt, Human
uccuggggcauccaugggg

SEQ ID NO: 3847391 - RNA, 13 nt, Human
uccuggggccagg

SEQ ID NO: 3847392 - RNA, 21 nt, Human
uccuggggccucggagccuca

SEQ ID NO: 3847393 - RNA, 15 nt, Human
uccuggggccucuug

SEQ ID NO: 3847394 - RNA, 14 nt, Human
uccuggggcucccu

SEQ ID NO: 3847395 - RNA, 15 nt, Human
uccuggggcucugug

SEQ ID NO: 3847396 - RNA, 16 nt, Human
uccuggggcucugugc

SEQ ID NO: 3847397 - RNA, 19 nt, Human
uccuggggcucugugcagg

SEQ ID NO: 3847398 - RNA, 18 nt, Human
uccugggggccugaccuc

SEQ ID NO: 3847399 - RNA, 19 nt, Human
uccugggggccugaccucc

SEQ ID NO: 3847400 - RNA, 17 nt, Human
uccuggggugcccucca

SEQ ID NO: 3847401 - RNA, 15 nt, Human
uccuggguggcuacu

SEQ ID NO: 3847402 - RNA, 21 nt, Human
uccuggguggucugcaggcag

SEQ ID NO: 3847403 - RNA, 18 nt, Human
uccuggguucaagugauu

SEQ ID NO: 3847404 - RNA, 17 nt, Human
uccugguacccagccau

SEQ ID NO: 3847405 - RNA, 22 nt, Human
uccugguauggguuucucccag

SEQ ID NO: 3847406 - RNA, 16 nt, Human
uccuggucaccuagga

SEQ ID NO: 3847407 - RNA, 15 nt, Human
uccuggugccaccuc

SEQ ID NO: 3847408 - RNA, 13 nt, Human
uccuggugcccug

SEQ ID NO: 3847409 - RNA, 14 nt, Human
uccuggugcucucu

SEQ ID NO: 3847410 - RNA, 13 nt, Human
uccugguggggca

SEQ ID NO: 3847411 - RNA, 19 nt, Human
uccugguggguccaggggc

SEQ ID NO: 3847412 - RNA, 21 nt, Human
uccuggugguauuuagccacu

SEQ ID NO: 3847413 - RNA, 17 nt, Human
uccuggugucaccccag

SEQ ID NO: 3847414 - RNA, 20 nt, Human
uccuggugucaccccagagc

SEQ ID NO: 3847415 - RNA, 24 nt, Human
uccuggugucaccccagagccaca

SEQ ID NO: 3847416 - RNA, 11 nt, Human
uccugguuccu

SEQ ID NO: 3847417 - RNA, 19 nt, Human
uccuguaaagguuacaagc

SEQ ID NO: 3847418 - RNA, 20 nt, Human
uccuguaacacaagccacag

SEQ ID NO: 3847419 - RNA, 21 nt, Human
uccuguaacacaagccacaga

SEQ ID NO: 3847420 - RNA, 13 nt, Human
uccuguaacuguu

SEQ ID NO: 3847421 - RNA, 21 nt, Human
uccuguaagccaaagaaauga

SEQ ID NO: 3847422 - RNA, 14 nt, Human
uccuguacauugug

SEQ ID NO: 3847423 - RNA, 22 nt, Human
uccuguaccucuugagccuuga

SEQ ID NO: 3847424 - RNA, 23 nt, Human
uccuguagaccuagggaggaccu

SEQ ID NO: 3847425 - RNA, 19 nt, Human
uccuguagcaucuucugga

SEQ ID NO: 3847426 - RNA, 11 nt, Human
uccuguagccc

SEQ ID NO: 3847427 - RNA, 20 nt, Human
uccuguaggaagguacugua

SEQ ID NO: 3847428 - RNA, 21 nt, Human
uccuguaguugcguggacucu

SEQ ID NO: 3847429 - RNA, 17 nt, Human
uccuguaguuuuauuuu

SEQ ID NO: 3847430 - RNA, 21 nt, Human
uccuguaguuuuauuuuaugu

SEQ ID NO: 3847431 - RNA, 19 nt, Human
uccuguauaccuccuccag

SEQ ID NO: 3847432 - RNA, 13 nt, Human
uccuguauguugu

SEQ ID NO: 3847433 - RNA, 20 nt, Human
uccuguauucagacagauga

SEQ ID NO: 3847434 - RNA, 17 nt, Human
uccuguauuuguuccca

SEQ ID NO: 3847435 - RNA, 19 nt, Human
uccuguauuuguucccaag

SEQ ID NO: 3847436 - RNA, 21 nt, Human
uccuguauuuguucccaagag

SEQ ID NO: 3847437 - RNA, 19 nt, Human
uccugucaagcaaucaaga

SEQ ID NO: 3847438 - RNA, 13 nt, Human
uccugucagugcc

SEQ ID NO: 3847439 - RNA, 17 nt, Human
uccugucaucugagaau

SEQ ID NO: 3847440 - RNA, 19 nt, Human
uccugucaucugagaauga

SEQ ID NO: 3847441 - RNA, 22 nt, Human
uccuguccacacccagcucagc

SEQ ID NO: 3847442 - RNA, 16 nt, Human
uccugucccaccaugc

SEQ ID NO: 3847443 - RNA, 16 nt, Human
uccuguccccaucugu

SEQ ID NO: 3847444 - RNA, 16 nt, Human
uccuguccccugcuac

SEQ ID NO: 3847445 - RNA, 17 nt, Human
uccuguccccugcuaca

SEQ ID NO: 3847446 - RNA, 22 nt, Human
uccugucccugcgccuuuccuu

SEQ ID NO: 3847447 - RNA, 17 nt, Human
uccugucccuugaccuu

SEQ ID NO: 3847448 - RNA, 19 nt, Human
uccuguccgcccucuuccc

SEQ ID NO: 3847449 - RNA, 22 nt, Human
uccuguccgcccucuuccccuc

SEQ ID NO: 3847450 - RNA, 11 nt, Human
uccuguccucc

SEQ ID NO: 3847451 - RNA, 13 nt, Human
uccuguccucccu

SEQ ID NO: 3847452 - RNA, 15 nt, Human
uccuguccucccuca

SEQ ID NO: 3847453 - RNA, 20 nt, Human
uccuguccucuuucagcucc

SEQ ID NO: 3847454 - RNA, 24 nt, Human
uccuguccugcucauuaugccacu

SEQ ID NO: 3847455 - RNA, 19 nt, Human
uccuguccuuuaccaaaga

SEQ ID NO: 3847456 - RNA, 22 nt, Human
uccuguccuuuaccaaagauga

SEQ ID NO: 3847457 - RNA, 15 nt, Human
uccugucuaacugcu

SEQ ID NO: 3847458 - RNA, 12 nt, Human
uccugucucccc

SEQ ID NO: 3847459 - RNA, 14 nt, Human
uccugucuccccuc

SEQ ID NO: 3847460 - RNA, 19 nt, Human
uccugucuccccucugcug

SEQ ID NO: 3847461 - RNA, 15 nt, Human
uccugucucccuccu

SEQ ID NO: 3847462 - RNA, 23 nt, Human
uccugucucccuccucugcccgg

SEQ ID NO: 3847463 - RNA, 12 nt, Human
uccugucugcca

SEQ ID NO: 3847464 - RNA, 13 nt, Human
uccugucugccag

SEQ ID NO: 3847465 - RNA, 16 nt, Human
uccugucugccagcca

SEQ ID NO: 3847466 - RNA, 17 nt, Human
uccugucugccagccag

SEQ ID NO: 3847467 - RNA, 14 nt, Human
uccugucuucccag

SEQ ID NO: 3847468 - RNA, 15 nt, Human
uccugucuucccagg

SEQ ID NO: 3847469 - RNA, 16 nt, Human
uccugucuucccaggg

SEQ ID NO: 3847470 - RNA, 16 nt, Human
uccugucuucugcuuu

SEQ ID NO: 3847471 - RNA, 16 nt, Human
uccugucuuuucaggu

SEQ ID NO: 3847472 - RNA, 14 nt, Human
uccugugacaugua

SEQ ID NO: 3847473 - RNA, 11 nt, Human
uccugugagga

SEQ ID NO: 3847474 - RNA, 18 nt, Human
uccugugaggagccccau

SEQ ID NO: 3847475 - RNA, 22 nt, Human
uccugugaggagccccaucugu

SEQ ID NO: 3847476 - RNA, 16 nt, Human
uccugugcauggguga

SEQ ID NO: 3847477 - RNA, 16 nt, Human
uccugugcucagcccu

SEQ ID NO: 3847478 - RNA, 14 nt, Human
uccugugcuggggg

SEQ ID NO: 3847479 - RNA, 19 nt, Human
uccuguggcaggcagcgcc

SEQ ID NO: 3847480 - RNA, 13 nt, Human
ucucucucuacaa

SEQ ID NO: 3847481 - RNA, 14 nt, Human
ucucucucucuccc

SEQ ID NO: 3847482 - RNA, 15 nt, Human
ucucucugccuguga

SEQ ID NO: 3847483 - RNA, 19 nt, Human
ucucucuggcccucuaccc

SEQ ID NO: 3847484 - RNA, 21 nt, Human
ucucucuggcccucuaccccu

SEQ ID NO: 3847485 - RNA, 16 nt, Human
ucucucuuaaaguugg

SEQ ID NO: 3847486 - RNA, 13 nt, Human
ucucucuuacccu

SEQ ID NO: 3847487 - RNA, 14 nt, Human
ucucucuucccuca

SEQ ID NO: 3847488 - RNA, 12 nt, Human
ucucucuucucu

SEQ ID NO: 3847489 - RNA, 14 nt, Human
ucucucuucugcuc

SEQ ID NO: 3847490 - RNA, 17 nt, Human
ucucucuucugcuccac

SEQ ID NO: 3847491 - RNA, 16 nt, Human
ucucucuuuauacagc

SEQ ID NO: 3847492 - RNA, 17 nt, Human
ucucucuuuauacagcu

SEQ ID NO: 3847493 - RNA, 16 nt, Human
ucucugaacacaggca

SEQ ID NO: 3847494 - RNA, 21 nt, Human
ucucugaagcauguuucaugu

SEQ ID NO: 3847495 - RNA, 20 nt, Human
ucucugaaggaggccaccuc

SEQ ID NO: 3847496 - RNA, 11 nt, Human
ucucugaaggg

SEQ ID NO: 3847497 - RNA, 13 nt, Human
ucucugaagggag

SEQ ID NO: 3847498 - RNA, 14 nt, Human
ucucugaagggagg

SEQ ID NO: 3847499 - RNA, 16 nt, Human
ucucugaagugaaacu

SEQ ID NO: 3847500 - RNA, 21 nt, Human
ucucugaccuacucgagggac

SEQ ID NO: 3847501 - RNA, 14 nt, Human
uccugugugugcgc

SEQ ID NO: 3847502 - RNA, 12 nt, Human
uccuguguguua

SEQ ID NO: 3847503 - RNA, 18 nt, Human
uccuguguguuaagcucu

SEQ ID NO: 3847504 - RNA, 12 nt, Human
uccuguguuucu

SEQ ID NO: 3847505 - RNA, 21 nt, Human
uccuguuaauguauuuguuca

SEQ ID NO: 3847506 - RNA, 18 nt, Human
uccuguuacuuaccuaaa

SEQ ID NO: 3847507 - RNA, 14 nt, Human
uccuguucagcauu

SEQ ID NO: 3847508 - RNA, 19 nt, Human
uccuguucccaugagauga

SEQ ID NO: 3847509 - RNA, 17 nt, Human
uccuguugaaaagccau

SEQ ID NO: 3847510 - RNA, 18 nt, Human
uccuguugaaaagccaug

SEQ ID NO: 3847511 - RNA, 19 nt, Human
uccuguugcacccagcccu

SEQ ID NO: 3847512 - RNA, 16 nt, Human
uccuguuucaaguuca

SEQ ID NO: 3847513 - RNA, 22 nt, Human
uccuguuucccuucccuuccac

SEQ ID NO: 3847514 - RNA, 20 nt, Human
uccuguuucucagucucaca

SEQ ID NO: 3847515 - RNA, 17 nt, Human
uccuguuucugaaaaga

SEQ ID NO: 3847516 - RNA, 18 nt, Human
uccuguuucugaaaagaa

SEQ ID NO: 3847517 - RNA, 22 nt, Human
uccuguuugggccccucuccca

SEQ ID NO: 3847518 - RNA, 15 nt, Human
uccuguuuuuauuau

SEQ ID NO: 3847519 - RNA, 21 nt, Human
uccuguuuuuauuauuaacaa

SEQ ID NO: 3847520 - RNA, 16 nt, Human
uccuguuuuucugggu

SEQ ID NO: 3847521 - RNA, 14 nt, Human
uccuguuuuuguua

SEQ ID NO: 3847522 - RNA, 12 nt, Human
uccuuaaaaauc

SEQ ID NO: 3847523 - RNA, 15 nt, Human
uccuuaaacagggca

SEQ ID NO: 3847524 - RNA, 18 nt, Human
uccuuaaagaguguggca

SEQ ID NO: 3847525 - RNA, 22 nt, Human
uccuuaaaggcaccaucuaaua

SEQ ID NO: 3847526 - RNA, 15 nt, Human
uccuuaaaucuuaau

SEQ ID NO: 3847527 - RNA, 21 nt, Human
uccuuaaaucuuaauguuccu

SEQ ID NO: 3847528 - RNA, 17 nt, Human
uccuuaagcugcagaga

SEQ ID NO: 3847529 - RNA, 17 nt, Human
uccuuaagucagaacag

SEQ ID NO: 3847530 - RNA, 14 nt, Human
uccuuaaugauccg

SEQ ID NO: 3847531 - RNA, 18 nt, Human
uccuuaauucacucccac

SEQ ID NO: 3847532 - RNA, 19 nt, Human
uccuuaauucacucccaca

SEQ ID NO: 3847533 - RNA, 20 nt, Human
uccuuacaaaugauugcuuu

SEQ ID NO: 3847534 - RNA, 21 nt, Human
uccuuacaaguuagaaaacau

SEQ ID NO: 3847535 - RNA, 18 nt, Human
uccuuacccaucugcacc

SEQ ID NO: 3847536 - RNA, 15 nt, Human
uccuuaccuuuuuau

SEQ ID NO: 3847537 - RNA, 16 nt, Human
uccuuacuccuguggg

SEQ ID NO: 3847538 - RNA, 20 nt, Human
uccuuacuccugugggagcc

SEQ ID NO: 3847539 - RNA, 18 nt, Human
uccuuacuuuuuauauau

SEQ ID NO: 3847540 - RNA, 16 nt, Human
uccuuagaaaagccau

SEQ ID NO: 3847541 - RNA, 15 nt, Human
uccuuagaacauuuu

SEQ ID NO: 3847542 - RNA, 15 nt, Human
uccuuagcaacagcc

SEQ ID NO: 3847543 - RNA, 21 nt, Human
uccuuagccuggaccucugac

SEQ ID NO: 3847544 - RNA, 17 nt, Human
uccuuaucaaaggacac

SEQ ID NO: 3847545 - RNA, 21 nt, Human
uccuuaucacugacacaaaaa

SEQ ID NO: 3847546 - RNA, 15 nt, Human
uccuuaucagagcua

SEQ ID NO: 3847547 - RNA, 14 nt, Human
uccuuaucuagcug

SEQ ID NO: 3847548 - RNA, 19 nt, Human
uccuucaaaauccuuccaa

SEQ ID NO: 3847549 - RNA, 19 nt, Human
uccuucaagaacucugggc

SEQ ID NO: 3847550 - RNA, 20 nt, Human
uccuucaagaucauguaccc

SEQ ID NO: 3847551 - RNA, 23 nt, Human
uccuucaaguuagcucaggaggc

SEQ ID NO: 3847552 - RNA, 23 nt, Human
uccuucaauuccauauauccuuu

SEQ ID NO: 3847553 - RNA, 20 nt, Human
uccuucacauccuguguuuc

SEQ ID NO: 3847554 - RNA, 17 nt, Human
uccuucaccucacugaa

SEQ ID NO: 3847555 - RNA, 13 nt, Human
uccuucacugcuc

SEQ ID NO: 3847556 - RNA, 13 nt, Human
uccuucacuguuu

SEQ ID NO: 3847557 - RNA, 19 nt, Human
uccuucagagagcagugcu

SEQ ID NO: 3847558 - RNA, 20 nt, Human
uccuucagagagcagugcuu

SEQ ID NO: 3847559 - RNA, 21 nt, Human
uccuucagagagcagugcuuu

SEQ ID NO: 3847560 - RNA, 17 nt, Human
uccuucagauauuuuua

SEQ ID NO: 3847561 - RNA, 15 nt, Human
uccuucagcacuuua

SEQ ID NO: 3847562 - RNA, 13 nt, Human
uccuucagcccuc

SEQ ID NO: 3847563 - RNA, 14 nt, Human
uccuucagcccuca

SEQ ID NO: 3847564 - RNA, 19 nt, Human
uccuucagcccucaccccu

SEQ ID NO: 3847565 - RNA, 13 nt, Human
uccuucagccuga

SEQ ID NO: 3847566 - RNA, 12 nt, Human
uccuucagugca

SEQ ID NO: 3847567 - RNA, 16 nt, Human
uccuucagugccuuau

SEQ ID NO: 3847568 - RNA, 17 nt, Human
uccuucagugccuuaug

SEQ ID NO: 3847569 - RNA, 22 nt, Human
uccuucagugccuuauggaaca

SEQ ID NO: 3847570 - RNA, 23 nt, Human
uccuucauaugaaaggugccaug

SEQ ID NO: 3847571 - RNA, 20 nt, Human
uccuuccaacaggagcuggg

SEQ ID NO: 3847572 - RNA, 14 nt, Human
uccuuccaacugcu

SEQ ID NO: 3847573 - RNA, 20 nt, Human
uccuuccaaugucuggagac

SEQ ID NO: 3847574 - RNA, 15 nt, Human
uccuuccagcccaga

SEQ ID NO: 3847575 - RNA, 16 nt, Human
uccuuccaggccccca

SEQ ID NO: 3847576 - RNA, 24 nt, Human
uccuuccagugucauuucucaucc

SEQ ID NO: 3847577 - RNA, 17 nt, Human
uccuuccaucccuaccc

SEQ ID NO: 3847578 - RNA, 13 nt, Human
uccuuccaugaaa

SEQ ID NO: 3847579 - RNA, 23 nt, Human
uccuucccaaaggacuccaccca

SEQ ID NO: 3847580 - RNA, 22 nt, Human
uccuucccaaguaagaggcugg

SEQ ID NO: 3847581 - RNA, 12 nt, Human
uccuucccagag

SEQ ID NO: 3847582 - RNA, 23 nt, Human
uccuucccagaggggccugccac

SEQ ID NO: 3847583 - RNA, 20 nt, Human
uccuuccuaauuucccuucu

SEQ ID NO: 3847584 - RNA, 22 nt, Human
uccuuccuaguucaucccuucu

SEQ ID NO: 3847585 - RNA, 14 nt, Human
uccuuccugaaacu

SEQ ID NO: 3847586 - RNA, 12 nt, Human
uccuuccugucu

SEQ ID NO: 3847587 - RNA, 17 nt, Human
uccuuccugucuuccug

SEQ ID NO: 3847588 - RNA, 16 nt, Human
uccuuccuguucugaa

SEQ ID NO: 3847589 - RNA, 15 nt, Human
uccuuccuucccacc

SEQ ID NO: 3847590 - RNA, 15 nt, Human
uccuuccuucccugg

SEQ ID NO: 3847591 - RNA, 16 nt, Human
uccuuccuucccuggc

SEQ ID NO: 3847592 - RNA, 16 nt, Human
uccuuccuugaccagc

SEQ ID NO: 3847593 - RNA, 17 nt, Human
uccuucguaucccgagu

SEQ ID NO: 3847594 - RNA, 23 nt, Human
uccuucguaucccgagucuggga

SEQ ID NO: 3847595 - RNA, 21 nt, Human
uccuucgugaacauccccucc

SEQ ID NO: 3847596 - RNA, 14 nt, Human
uccuucuacuuaca

SEQ ID NO: 3847597 - RNA, 14 nt, Human
uccuucuccacccc

SEQ ID NO: 3847598 - RNA, 14 nt, Human
uccuucucccaucu

SEQ ID NO: 3847599 - RNA, 20 nt, Human
uccuucucugaacacaggca

SEQ ID NO: 3847600 - RNA, 22 nt, Human
uccuucucugaacacaggcagc

SEQ ID NO: 3847601 - RNA, 13 nt, Human
uccuucugggcau

SEQ ID NO: 3847602 - RNA, 12 nt, Human
uccuucuuuaaa

SEQ ID NO: 3847603 - RNA, 16 nt, Human
uccuucuuugauaaug

SEQ ID NO: 3847604 - RNA, 22 nt, Human
uccuugaaaacacuguucucug

SEQ ID NO: 3847605 - RNA, 23 nt, Human
uccuugaaaacacuguucucugc

SEQ ID NO: 3847606 - RNA, 21 nt, Human
uccuugaagaacugcaggccc

SEQ ID NO: 3847607 - RNA, 13 nt, Human
uccuugaccagca

SEQ ID NO: 3847608 - RNA, 19 nt, Human
uccuugaccuuccucuggg

SEQ ID NO: 3847609 - RNA, 17 nt, Human
uccuugagacacggagc

SEQ ID NO: 3847610 - RNA, 19 nt, Human
uccuugaggggagccagga

SEQ ID NO: 3847611 - RNA, 16 nt, Human
uccuugaguguaugag

SEQ ID NO: 3847612 - RNA, 17 nt, Human
uccuugauaauauauug

SEQ ID NO: 3847613 - RNA, 22 nt, Human
uccuugauaauguugugguuug

SEQ ID NO: 3847614 - RNA, 13 nt, Human
uccuugauauuug

SEQ ID NO: 3847615 - RNA, 17 nt, Human
uccuugauauuuguauu

SEQ ID NO: 3847616 - RNA, 19 nt, Human
uccuugauauuuguauuua

SEQ ID NO: 3847617 - RNA, 13 nt, Human
uccuugaucauuu

SEQ ID NO: 3847618 - RNA, 22 nt, Human
uccuugaucuguauauacaaua

SEQ ID NO: 3847619 - RNA, 22 nt, Human
uccuugauuucaaaguuuuguu

SEQ ID NO: 3847620 - RNA, 20 nt, Human
uccuugcaccccucacucug

SEQ ID NO: 3847621 - RNA, 24 nt, Human
uccuugcaccccucacucuggccu

SEQ ID NO: 3847622 - RNA, 14 nt, Human
uccuugcaccugca

SEQ ID NO: 3847623 - RNA, 23 nt, Human
uccuugcaucaaggggucacuua

SEQ ID NO: 3847624 - RNA, 17 nt, Human
uccuugccuccugugua

SEQ ID NO: 3847625 - RNA, 15 nt, Human
ucugcacccuccacc

SEQ ID NO: 3847626 - RNA, 23 nt, Human
ucugcacccuggggccuggaccu

SEQ ID NO: 3847627 - RNA, 16 nt, Human
ucugcacccuucuuuu

SEQ ID NO: 3847628 - RNA, 18 nt, Human
ucugcaccguacugugga

SEQ ID NO: 3847629 - RNA, 14 nt, Human
ucugcaccuuaucu

SEQ ID NO: 3847630 - RNA, 20 nt, Human
ucugcacuacuccucugcag

SEQ ID NO: 3847631 - RNA, 21 nt, Human
ucugcacuacuccucugcagu

SEQ ID NO: 3847632 - RNA, 23 nt, Human
ucugcacuacuccucugcagugc

SEQ ID NO: 3847633 - RNA, 21 nt, Human
ucugcacucccaccugacaca

SEQ ID NO: 3847634 - RNA, 22 nt, Human
ucugcacuccccugcugggugu

SEQ ID NO: 3847635 - RNA, 21 nt, Human
ucugcacucuaacccuaggca

SEQ ID NO: 3847636 - RNA, 15 nt, Human
ucugcacuuaaauau

SEQ ID NO: 3847637 - RNA, 23 nt, Human
ucugcacuugcgguuccggcaug

SEQ ID NO: 3847638 - RNA, 10 nt, Human
ucugcagaag

SEQ ID NO: 3847639 - RNA, 19 nt, Human
ucugcagacacgccuuccc

SEQ ID NO: 3847640 - RNA, 16 nt, Human
ucugcagacuucccag

SEQ ID NO: 3847641 - RNA, 19 nt, Human
ucugcagacuucccagcua

SEQ ID NO: 3847642 - RNA, 18 nt, Human
ucugcagauaaacaguag

SEQ ID NO: 3847643 - RNA, 20 nt, Human
ucugcagcaugaccugugac

SEQ ID NO: 3847644 - RNA, 15 nt, Human
ucugcagccagccca

SEQ ID NO: 3847645 - RNA, 16 nt, Human
ucugcagccagcccag

SEQ ID NO: 3847646 - RNA, 20 nt, Human
ucugcagcugaccucuguug

SEQ ID NO: 3847647 - RNA, 15 nt, Human
ucugcagcuguuuua

SEQ ID NO: 3847648 - RNA, 22 nt, Human
ucugcaggauugauuaugcaga

SEQ ID NO: 3847649 - RNA, 14 nt, Human
ucugcaggcaccuu

SEQ ID NO: 3847650 - RNA, 14 nt, Human
ucugcaggcagaca

SEQ ID NO: 3847651 - RNA, 15 nt, Human
ucugcaggcagacac

SEQ ID NO: 3847652 - RNA, 15 nt, Human
ucugcaggucccuaa

SEQ ID NO: 3847653 - RNA, 16 nt, Human
ucugcaggucccuaau

SEQ ID NO: 3847654 - RNA, 21 nt, Human
ucugcaggucccuaauaaagc

SEQ ID NO: 3847655 - RNA, 23 nt, Human
ucugcaggucccuaauaaagcug

SEQ ID NO: 3847656 - RNA, 22 nt, Human
ucugcagguugaagccaugucu

SEQ ID NO: 3847657 - RNA, 18 nt, Human
ucugcaguagucucugug

SEQ ID NO: 3847658 - RNA, 20 nt, Human
ucugcaguagucucugugcu

SEQ ID NO: 3847659 - RNA, 20 nt, Human
ucugcagucucuauaccaau

SEQ ID NO: 3847660 - RNA, 21 nt, Human
ucugcagucucuauaccaaua

SEQ ID NO: 3847661 - RNA, 16 nt, Human
ucugcagugugccccc

SEQ ID NO: 3847662 - RNA, 14 nt, Human
ucugcaucagcugc

SEQ ID NO: 3847663 - RNA, 21 nt, Human
ucugcaucagcugcugaaaca

SEQ ID NO: 3847664 - RNA, 18 nt, Human
ucugcaucaucuguagau

SEQ ID NO: 3847665 - RNA, 21 nt, Human
ucugcaucaucuguagauacu

SEQ ID NO: 3847666 - RNA, 23 nt, Human
ucugcauccagagauucauuuuc

SEQ ID NO: 3847667 - RNA, 22 nt, Human
ucugcaucccagcaccugccuc

SEQ ID NO: 3847668 - RNA, 13 nt, Human
ucugcaucuccac

SEQ ID NO: 3847669 - RNA, 17 nt, Human
ucugcaugcggcccagc

SEQ ID NO: 3847670 - RNA, 22 nt, Human
ucugcaugcggcccagcccggc

SEQ ID NO: 3847671 - RNA, 15 nt, Human
ucugcauuuagcaca

SEQ ID NO: 3847672 - RNA, 15 nt, Human
ucugcauuucggugg

SEQ ID NO: 3847673 - RNA, 18 nt, Human
ucugcauuucgguggcua

SEQ ID NO: 3847674 - RNA, 16 nt, Human
ucugcauuuucugggu

SEQ ID NO: 3847675 - RNA, 16 nt, Human
ucugcauuuugcuauu

SEQ ID NO: 3847676 - RNA, 20 nt, Human
ucugcauuuuucugcagaag

SEQ ID NO: 3847677 - RNA, 19 nt, Human
ucugccaaaggaugugaua

SEQ ID NO: 3847678 - RNA, 17 nt, Human
ucugccaaccuaaaacu

SEQ ID NO: 3847679 - RNA, 19 nt, Human
ucugccaauuuuugccuuc

SEQ ID NO: 3847680 - RNA, 15 nt, Human
ucugccacacucuga

SEQ ID NO: 3847681 - RNA, 16 nt, Human
ucugccaccaaaggcc

SEQ ID NO: 3847682 - RNA, 19 nt, Human
ucugccaccaaaggccagg

SEQ ID NO: 3847683 - RNA, 17 nt, Human
ucugccaccauccugcu

SEQ ID NO: 3847684 - RNA, 14 nt, Human
ucugccacccuacc

SEQ ID NO: 3847685 - RNA, 17 nt, Human
ucugccacccuaccugu

SEQ ID NO: 3847686 - RNA, 18 nt, Human
ucugccacccuaccuguu

SEQ ID NO: 3847687 - RNA, 14 nt, Human
ucugccaccucccc

SEQ ID NO: 3847688 - RNA, 15 nt, Human
ucugccacuucccag

SEQ ID NO: 3847689 - RNA, 16 nt, Human
ucugccacuucccagg

SEQ ID NO: 3847690 - RNA, 21 nt, Human
ucugccagaagauccccucag

SEQ ID NO: 3847691 - RNA, 22 nt, Human
ucugccagaagauccccucagg

SEQ ID NO: 3847692 - RNA, 17 nt, Human
ucugccagcaaagagga

SEQ ID NO: 3847693 - RNA, 16 nt, Human
ucugccagccagcagc

SEQ ID NO: 3847694 - RNA, 14 nt, Human
ucugccaggccccc

SEQ ID NO: 3847695 - RNA, 20 nt, Human
ucugccaggcccccaccaca

SEQ ID NO: 3847696 - RNA, 11 nt, Human
ucugccagggc

SEQ ID NO: 3847697 - RNA, 16 nt, Human
ucugccagggcagugc

SEQ ID NO: 3847698 - RNA, 22 nt, Human
ucugccagggccccucucccca

SEQ ID NO: 3847699 - RNA, 14 nt, Human
ucugccauuucaug

SEQ ID NO: 3847700 - RNA, 19 nt, Human
ucugcccaaaaauaugguu

SEQ ID NO: 3847701 - RNA, 21 nt, Human
ucuacccuggcacuauaaugu

SEQ ID NO: 3847702 - RNA, 19 nt, Human
ucuaccuagauuuaauaua

SEQ ID NO: 3847703 - RNA, 15 nt, Human
ucuaccucuuggcug

SEQ ID NO: 3847704 - RNA, 16 nt, Human
ucuaccugccacucac

SEQ ID NO: 3847705 - RNA, 21 nt, Human
ucuaccugccacucacacagc

SEQ ID NO: 3847706 - RNA, 18 nt, Human
ucuaccugcccucaaggg

SEQ ID NO: 3847707 - RNA, 21 nt, Human
ucuaccuuccagucaggauga

SEQ ID NO: 3847708 - RNA, 14 nt, Human
ucuaccuuccugca

SEQ ID NO: 3847709 - RNA, 23 nt, Human
ucuaccuucuccccagcucccag

SEQ ID NO: 3847710 - RNA, 15 nt, Human
ucuacuaaaaauaca

SEQ ID NO: 3847711 - RNA, 20 nt, Human
ucuacuaaaaauacaaaaau

SEQ ID NO: 3847712 - RNA, 15 nt, Human
ucuacuaauuccaca

SEQ ID NO: 3847713 - RNA, 21 nt, Human
ucuacucagaaauuuuuauuu

SEQ ID NO: 3847714 - RNA, 18 nt, Human
ucuacucauauauaucua

SEQ ID NO: 3847715 - RNA, 21 nt, Human
ucuacucccaaguaugggguu

SEQ ID NO: 3847716 - RNA, 18 nt, Human
ucuacucuagggaaaaac

SEQ ID NO: 3847717 - RNA, 18 nt, Human
ucuacucucccauggcuu

SEQ ID NO: 3847718 - RNA, 20 nt, Human
ucuacucuccucaucucuaa

SEQ ID NO: 3847719 - RNA, 18 nt, Human
ucuacugaggugcuaugu

SEQ ID NO: 3847720 - RNA, 16 nt, Human
ucuacugggagccuac

SEQ ID NO: 3847721 - RNA, 19 nt, Human
ucuacugggagccuaccca

SEQ ID NO: 3847722 - RNA, 23 nt, Human
ucuacuggucuuguggaauuggg

SEQ ID NO: 3847723 - RNA, 21 nt, Human
ucuacuuaauccaauggguuu

SEQ ID NO: 3847724 - RNA, 20 nt, Human
ucuacuucauguaauccaaa

SEQ ID NO: 3847725 - RNA, 18 nt, Human
ucuacuucuggagucuau

SEQ ID NO: 3847726 - RNA, 21 nt, Human
ucuacuugcucuggaccugcc

SEQ ID NO: 3847727 - RNA, 22 nt, Human
ucuacuugcucuggaccugccc

SEQ ID NO: 3847728 - RNA, 14 nt, Human
ucuacuuuaauaaa

SEQ ID NO: 3847729 - RNA, 15 nt, Human
ucuacuuuaauaaau

SEQ ID NO: 3847730 - RNA, 14 nt, Human
ucuacuuuauuaau

SEQ ID NO: 3847731 - RNA, 12 nt, Human
ucuacuuugaag

SEQ ID NO: 3847732 - RNA, 20 nt, Human
ucuacuuugaagucauacca

SEQ ID NO: 3847733 - RNA, 15 nt, Human
ucuacuuuuacucau

SEQ ID NO: 3847734 - RNA, 22 nt, Human
ucuagaaaaacaggcacuuggc

SEQ ID NO: 3847735 - RNA, 11 nt, Human
ucuagaaagaa

SEQ ID NO: 3847736 - RNA, 16 nt, Human
ucuagaacacaggcaa

SEQ ID NO: 3847737 - RNA, 17 nt, Human
ucuagaacacaggcaaa

SEQ ID NO: 3847738 - RNA, 20 nt, Human
ucuagaacaucccugccagc

SEQ ID NO: 3847739 - RNA, 15 nt, Human
ucuagaagaaaugaa

SEQ ID NO: 3847740 - RNA, 23 nt, Human
ucuagaagaaaugaaauuuuacc

SEQ ID NO: 3847741 - RNA, 21 nt, Human
ucuagaagacugucagcuucc

SEQ ID NO: 3847742 - RNA, 18 nt, Human
ucuagaagagucuauugu

SEQ ID NO: 3847743 - RNA, 20 nt, Human
ucuagaaguuguuugucauc

SEQ ID NO: 3847744 - RNA, 20 nt, Human
ucuagaauguguuuucugaa

SEQ ID NO: 3847745 - RNA, 23 nt, Human
ucuagaauuauaagucacaaaga

SEQ ID NO: 3847746 - RNA, 16 nt, Human
ucuagaauuuuaagcc

SEQ ID NO: 3847747 - RNA, 17 nt, Human
ucuagaauuuuaagccu

SEQ ID NO: 3847748 - RNA, 19 nt, Human
ucuagaauuuuaagccuuu

SEQ ID NO: 3847749 - RNA, 21 nt, Human
ucuagacaagauauuguacau

SEQ ID NO: 3847750 - RNA, 20 nt, Human
ucuagacauggagguucuaa

SEQ ID NO: 3847751 - RNA, 13 nt, Human
ucuagacuuucug

SEQ ID NO: 3847752 - RNA, 13 nt, Human
ucuagagaagagg

SEQ ID NO: 3847753 - RNA, 16 nt, Human
ucuagagaagaggcug

SEQ ID NO: 3847754 - RNA, 23 nt, Human
ucuagagagggaauucucuuggc

SEQ ID NO: 3847755 - RNA, 23 nt, Human
ucuagagagggaggcaagcccug

SEQ ID NO: 3847756 - RNA, 15 nt, Human
ucuagagcagggauu

SEQ ID NO: 3847757 - RNA, 18 nt, Human
ucuagagccuucagccuu

SEQ ID NO: 3847758 - RNA, 21 nt, Human
ucuagagcuuaaugcuacaug

SEQ ID NO: 3847759 - RNA, 17 nt, Human
ucuagagcuuagcauau

SEQ ID NO: 3847760 - RNA, 17 nt, Human
ucuagagcuugaugcca

SEQ ID NO: 3847761 - RNA, 20 nt, Human
ucuagaguccaagguuuaaa

SEQ ID NO: 3847762 - RNA, 18 nt, Human
ucuagaguucagaguccu

SEQ ID NO: 3847763 - RNA, 15 nt, Human
ucuagauacaauaaa

SEQ ID NO: 3847764 - RNA, 22 nt, Human
ucuagauaccuaaaacauaaga

SEQ ID NO: 3847765 - RNA, 15 nt, Human
ucuagauaucgacuu

SEQ ID NO: 3847766 - RNA, 18 nt, Human
ucuagaucagaugcucca

SEQ ID NO: 3847767 - RNA, 19 nt, Human
ucuagaucuuugugccaaa

SEQ ID NO: 3847768 - RNA, 19 nt, Human
ucuaucuuguuccaaggcc

SEQ ID NO: 3847769 - RNA, 13 nt, Human
ucuaugaaauauu

SEQ ID NO: 3847770 - RNA, 23 nt, Human
ucuaugaacucuguuuucuuucu

SEQ ID NO: 3847771 - RNA, 14 nt, Human
ucuaugacacaugc

SEQ ID NO: 3847772 - RNA, 18 nt, Human
ucuaugagucuagauguu

SEQ ID NO: 3847773 - RNA, 22 nt, Human
ucuaugauuccagguggcauca

SEQ ID NO: 3847774 - RNA, 16 nt, Human
ucuaugccaaagauca

SEQ ID NO: 3847775 - RNA, 17 nt, Human
ucuaugccaaagaucac

SEQ ID NO: 3847776 - RNA, 18 nt, Human
ucuaugccccaaauauag

SEQ ID NO: 3847777 - RNA, 15 nt, Human
ucuaugcucauaacu

SEQ ID NO: 3847778 - RNA, 16 nt, Human
ucuaugcugaguuugu

SEQ ID NO: 3847779 - RNA, 17 nt, Human
ucuaugcuuuccaaacc

SEQ ID NO: 3847780 - RNA, 15 nt, Human
ucuauggguguuauc

SEQ ID NO: 3847781 - RNA, 15 nt, Human
ucuauggguuuaguu

SEQ ID NO: 3847782 - RNA, 21 nt, Human
ucuauggguuuaguuacuuua

SEQ ID NO: 3847783 - RNA, 17 nt, Human
ucuaugguaaagauauu

SEQ ID NO: 3847784 - RNA, 16 nt, Human
ucuaugguuaugaaag

SEQ ID NO: 3847785 - RNA, 18 nt, Human
ucuaugguuaugaaagaa

SEQ ID NO: 3847786 - RNA, 22 nt, Human
ucuauguacuaguacuguguac

SEQ ID NO: 3847787 - RNA, 16 nt, Human
ucuauguauauacauu

SEQ ID NO: 3847788 - RNA, 22 nt, Human
ucuauguaucaaauguaacuua

SEQ ID NO: 3847789 - RNA, 11 nt, Human
ucuauuaaaag

SEQ ID NO: 3847790 - RNA, 15 nt, Human
ucuauuaaaagacuc

SEQ ID NO: 3847791 - RNA, 16 nt, Human
ucuauuaaaagacuca

SEQ ID NO: 3847792 - RNA, 18 nt, Human
ucuauuaaaagacucauc

SEQ ID NO: 3847793 - RNA, 19 nt, Human
ucuauuaaaagacucaucc

SEQ ID NO: 3847794 - RNA, 22 nt, Human
ucuauuaaaagacucauccguc

SEQ ID NO: 3847795 - RNA, 16 nt, Human
ucuauuaagauuucca

SEQ ID NO: 3847796 - RNA, 18 nt, Human
ucuauuaagauuuccaag

SEQ ID NO: 3847797 - RNA, 12 nt, Human
ucuauuaauaua

SEQ ID NO: 3847798 - RNA, 21 nt, Human
ucuauuaauauauguauuauu

SEQ ID NO: 3847799 - RNA, 17 nt, Human
ucuauuacauuuucagu

SEQ ID NO: 3847800 - RNA, 14 nt, Human
ucuauuagacuuua

SEQ ID NO: 3847801 - RNA, 18 nt, Human
ucuauuagacuuuagaaa

SEQ ID NO: 3847802 - RNA, 22 nt, Human
ucuauuauacuguauuaagagu

SEQ ID NO: 3847803 - RNA, 15 nt, Human
ucuauuauggaaaac

SEQ ID NO: 3847804 - RNA, 14 nt, Human
ucuauuccaauaaa

SEQ ID NO: 3847805 - RNA, 14 nt, Human
ucuauuccagcuca

SEQ ID NO: 3847806 - RNA, 15 nt, Human
ucuauuccagcucau

SEQ ID NO: 3847807 - RNA, 16 nt, Human
ucuauuccuucuggcc

SEQ ID NO: 3847808 - RNA, 17 nt, Human
ucuauuccuucuggccu

SEQ ID NO: 3847809 - RNA, 18 nt, Human
ucuauuccuucuggccuu

SEQ ID NO: 3847810 - RNA, 19 nt, Human
ucuauucgccacacaguau

SEQ ID NO: 3847811 - RNA, 19 nt, Human
ucuauucugagaaaacaag

SEQ ID NO: 3847812 - RNA, 21 nt, Human
ucuauugauaauuuagacauu

SEQ ID NO: 3847813 - RNA, 21 nt, Human
ucuauugccucugagagcauc

SEQ ID NO: 3847814 - RNA, 16 nt, Human
ucuauugccuucuuug

SEQ ID NO: 3847815 - RNA, 18 nt, Human
ucuauugccuucuuugaa

SEQ ID NO: 3847816 - RNA, 19 nt, Human
ucuauugccuucuuugaag

SEQ ID NO: 3847817 - RNA, 20 nt, Human
ucuauugccuucuuugaaga

SEQ ID NO: 3847818 - RNA, 16 nt, Human
ucuauugggauuuucu

SEQ ID NO: 3847819 - RNA, 14 nt, Human
ucuauuguagcauu

SEQ ID NO: 3847820 - RNA, 19 nt, Human
ucuauuguagcauuucuug

SEQ ID NO: 3847821 - RNA, 18 nt, Human
ucuauugugggacuuauu

SEQ ID NO: 3847822 - RNA, 16 nt, Human
ucuauuguuacucugg

SEQ ID NO: 3847823 - RNA, 14 nt, Human
ucuauuuauaauac

SEQ ID NO: 3847824 - RNA, 18 nt, Human
ucuauuuauauguacaug

SEQ ID NO: 3847825 - RNA, 14 nt, Human
ucuauuuaugccuu

SEQ ID NO: 3847826 - RNA, 13 nt, Human
ucuauuuauuuau

SEQ ID NO: 3847827 - RNA, 11 nt, Human
ucuauuucuag

SEQ ID NO: 3847828 - RNA, 15 nt, Human
ucuauuucuccucca

SEQ ID NO: 3847829 - RNA, 20 nt, Human
ucuauuucuccuccauggga

SEQ ID NO: 3847830 - RNA, 12 nt, Human
ucuauuucugag

SEQ ID NO: 3847831 - RNA, 13 nt, Human
ucuauuucugaga

SEQ ID NO: 3847832 - RNA, 20 nt, Human
ucuauuucugagaagguccu

SEQ ID NO: 3847833 - RNA, 13 nt, Human
ucuauuucugcug

SEQ ID NO: 3847834 - RNA, 18 nt, Human
ucuauuugacuugugguu

SEQ ID NO: 3847835 - RNA, 12 nt, Human
ucuauuuggaau

SEQ ID NO: 3847836 - RNA, 13 nt, Human
ucuauuuggaauu

SEQ ID NO: 3847837 - RNA, 20 nt, Human
ucuauuuuaauaaaaauaau

SEQ ID NO: 3847838 - RNA, 16 nt, Human
ucuauuuucauuuucu

SEQ ID NO: 3847839 - RNA, 14 nt, Human
ucuauuuucuaugu

SEQ ID NO: 3847840 - RNA, 18 nt, Human
ucuauuuucuauguacua

SEQ ID NO: 3847841 - RNA, 15 nt, Human
ucuauuuugaugcag

SEQ ID NO: 3847842 - RNA, 17 nt, Human
ucuauuuuguaaacuca

SEQ ID NO: 3847843 - RNA, 24 nt, Human
ucuauuuuguaacuuucucuauga

SEQ ID NO: 3847844 - RNA, 22 nt, Human
ucucaaaaaaaaaaaaaugcac

SEQ ID NO: 3847845 - RNA, 14 nt, Human
ucucaaaaauaaau

SEQ ID NO: 3847846 - RNA, 17 nt, Human
ucucaaaacugcacugu

SEQ ID NO: 3847847 - RNA, 14 nt, Human
ucucaaaagaacuu

SEQ ID NO: 3847848 - RNA, 20 nt, Human
ucucaaacaaggggcuguua

SEQ ID NO: 3847849 - RNA, 23 nt, Human
ucucaaacacaguuacacuugug

SEQ ID NO: 3847850 - RNA, 17 nt, Human
ucucaaacuaaaagaca

SEQ ID NO: 3847851 - RNA, 19 nt, Human
ucucaaacuaaaagacauu

SEQ ID NO: 3847852 - RNA, 17 nt, Human
ucucaaacuaacaggcu

SEQ ID NO: 3847853 - RNA, 13 nt, Human
ucucaaacucuug

SEQ ID NO: 3847854 - RNA, 22 nt, Human
ucucaaagaaauuuccacucag

SEQ ID NO: 3847855 - RNA, 16 nt, Human
ucucaaaggagcgagc

SEQ ID NO: 3847856 - RNA, 16 nt, Human
ucucaaaguuuugaaa

SEQ ID NO: 3847857 - RNA, 13 nt, Human
ucucaaauuucua

SEQ ID NO: 3847858 - RNA, 18 nt, Human
ucucaaauuucuaaaucu

SEQ ID NO: 3847859 - RNA, 21 nt, Human
ucucaaauuuggauugcuaau

SEQ ID NO: 3847860 - RNA, 14 nt, Human
ucucaacacccagu

SEQ ID NO: 3847861 - RNA, 23 nt, Human
ucucaacaggccucagggcuccu

SEQ ID NO: 3847862 - RNA, 14 nt, Human
ucucaacaugucuc

SEQ ID NO: 3847863 - RNA, 18 nt, Human
ucucaacaugucuccuac

SEQ ID NO: 3847864 - RNA, 14 nt, Human
ucugcuucagccuc

SEQ ID NO: 3847865 - RNA, 13 nt, Human
ucugcuucagugg

SEQ ID NO: 3847866 - RNA, 13 nt, Human
ucugcuucucuca

SEQ ID NO: 3847867 - RNA, 14 nt, Human
ucugcuucucucac

SEQ ID NO: 3847868 - RNA, 16 nt, Human
ucugcuucucucaccu

SEQ ID NO: 3847869 - RNA, 19 nt, Human
ucugcuucucugacuucug

SEQ ID NO: 3847870 - RNA, 15 nt, Human
ucugcuucugcaccu

SEQ ID NO: 3847871 - RNA, 19 nt, Human
ucugcuugacaacaucuga

SEQ ID NO: 3847872 - RNA, 12 nt, Human
ucugcuugaguc

SEQ ID NO: 3847873 - RNA, 14 nt, Human
ucugcuugagucag

SEQ ID NO: 3847874 - RNA, 20 nt, Human
ucugcuugccaucccucccu

SEQ ID NO: 3847875 - RNA, 20 nt, Human
ucugcuugccgaaacuggaa

SEQ ID NO: 3847876 - RNA, 14 nt, Human
ucugcuuguguuaa

SEQ ID NO: 3847877 - RNA, 20 nt, Human
ucugcuuuaaaaaugucuua

SEQ ID NO: 3847878 - RNA, 22 nt, Human
ucugcuuuaaagggccugccug

SEQ ID NO: 3847879 - RNA, 16 nt, Human
ucugcuuuagacuuga

SEQ ID NO: 3847880 - RNA, 18 nt, Human
ucugcuuuagacuugaaa

SEQ ID NO: 3847881 - RNA, 15 nt, Human
ucugcuuuauguugc

SEQ ID NO: 3847882 - RNA, 13 nt, Human
ucugcuuuccaca

SEQ ID NO: 3847883 - RNA, 12 nt, Human
ucugcuuuccuc

SEQ ID NO: 3847884 - RNA, 17 nt, Human
ucugcuuucuccuuuaa

SEQ ID NO: 3847885 - RNA, 22 nt, Human
ucugcuuucuuugauucuccuu

SEQ ID NO: 3847886 - RNA, 18 nt, Human
ucugcuuugacugagcag

SEQ ID NO: 3847887 - RNA, 23 nt, Human
ucugcuuuuuaaagaaugcucuu

SEQ ID NO: 3847888 - RNA, 19 nt, Human
ucuggaaaagaacuguuua

SEQ ID NO: 3847889 - RNA, 14 nt, Human
ucuggaaagcaaag

SEQ ID NO: 3847890 - RNA, 14 nt, Human
ucuggaaaggagga

SEQ ID NO: 3847891 - RNA, 16 nt, Human
ucuggaacccagacuc

SEQ ID NO: 3847892 - RNA, 17 nt, Human
ucuggaacccagacuca

SEQ ID NO: 3847893 - RNA, 18 nt, Human
ucuggaacccagacucag

SEQ ID NO: 3847894 - RNA, 16 nt, Human
ucuggaaccucagccu

SEQ ID NO: 3847895 - RNA, 21 nt, Human
ucuggaaccucagccuggcca

SEQ ID NO: 3847896 - RNA, 20 nt, Human
ucuggaagagaggaaugccu

SEQ ID NO: 3847897 - RNA, 22 nt, Human
ucuggaagugacuuuggcugca

SEQ ID NO: 3847898 - RNA, 14 nt, Human
ucuggaauacauga

SEQ ID NO: 3847899 - RNA, 19 nt, Human
ucuggaaucuggagaccag

SEQ ID NO: 3847900 - RNA, 14 nt, Human
ucuggaaugagccu

SEQ ID NO: 3847901 - RNA, 16 nt, Human
ucuggaaugcaguggu

SEQ ID NO: 3847902 - RNA, 14 nt, Human
ucuggaauuugaaa

SEQ ID NO: 3847903 - RNA, 18 nt, Human
ucuggacagccccacccu

SEQ ID NO: 3847904 - RNA, 19 nt, Human
ucuggacaggauguguuug

SEQ ID NO: 3847905 - RNA, 20 nt, Human
ucuggaccccaucugugaau

SEQ ID NO: 3847906 - RNA, 14 nt, Human
ucuggaccucuggg

SEQ ID NO: 3847907 - RNA, 15 nt, Human
ucuggaccucugggu

SEQ ID NO: 3847908 - RNA, 12 nt, Human
ucuggaccugcc

SEQ ID NO: 3847909 - RNA, 13 nt, Human
ucuggaccugccc

SEQ ID NO: 3847910 - RNA, 22 nt, Human
ucuggacggcaggcucacugcc

SEQ ID NO: 3847911 - RNA, 14 nt, Human
ucuggacuaaaacu

SEQ ID NO: 3847912 - RNA, 18 nt, Human
ucuggacuccucugucca

SEQ ID NO: 3847913 - RNA, 14 nt, Human
ucuggacucuaaag

SEQ ID NO: 3847914 - RNA, 13 nt, Human
ucuuccuguaauc

SEQ ID NO: 3847915 - RNA, 13 nt, Human
ucuuccugugauc

SEQ ID NO: 3847916 - RNA, 16 nt, Human
ucuuccuguguccuga

SEQ ID NO: 3847917 - RNA, 21 nt, Human
ucuuccuguuuuguacauaga

SEQ ID NO: 3847918 - RNA, 15 nt, Human
ucuuccuuaaacucc

SEQ ID NO: 3847919 - RNA, 14 nt, Human
ucuuccuucccugc

SEQ ID NO: 3847920 - RNA, 17 nt, Human
ucuuccuucccugcugu

SEQ ID NO: 3847921 - RNA, 18 nt, Human
ucuuccuuucucuuucuc

SEQ ID NO: 3847922 - RNA, 14 nt, Human
ucuuccuuuuauca

SEQ ID NO: 3847923 - RNA, 18 nt, Human
ucuuccuuuucacugcug

SEQ ID NO: 3847924 - RNA, 18 nt, Human
ucuucgaagccuugccua

SEQ ID NO: 3847925 - RNA, 19 nt, Human
ucucugcccauuccccagc

SEQ ID NO: 3847926 - RNA, 15 nt, Human
ucucugcccuccaag

SEQ ID NO: 3847927 - RNA, 21 nt, Human
ucucugccugugagccagucu

SEQ ID NO: 3847928 - RNA, 14 nt, Human
ucucugccuugccu

SEQ ID NO: 3847929 - RNA, 17 nt, Human
ucucugccuugccuuua

SEQ ID NO: 3847930 - RNA, 21 nt, Human
ucucugccuuugacauuuaau

SEQ ID NO: 3847931 - RNA, 12 nt, Human
ucucugcuccac

SEQ ID NO: 3847932 - RNA, 15 nt, Human
ucucugcuccaccac

SEQ ID NO: 3847933 - RNA, 21 nt, Human
ucucugcucugcgugucaccu

SEQ ID NO: 3847934 - RNA, 13 nt, Human
ucucugcugaagg

SEQ ID NO: 3847935 - RNA, 12 nt, Human
ucucugcugccg

SEQ ID NO: 3847936 - RNA, 13 nt, Human
ucucugcuggacg

SEQ ID NO: 3847937 - RNA, 12 nt, Human
ucucugcuggcc

SEQ ID NO: 3847938 - RNA, 16 nt, Human
ucucuggaaaggagga

SEQ ID NO: 3847939 - RNA, 22 nt, Human
ucucuggaaaggggggagcugg

SEQ ID NO: 3847940 - RNA, 20 nt, Human
ucucuggaagccccugggcc

SEQ ID NO: 3847941 - RNA, 19 nt, Human
ucucuggaauuugaaacac

SEQ ID NO: 3847942 - RNA, 20 nt, Human
ucucuggagccaaguccaga

SEQ ID NO: 3847943 - RNA, 22 nt, Human
ucucuggagccaaguccagauu

SEQ ID NO: 3847944 - RNA, 22 nt, Human
ucucuggagugagcucuguuuc

SEQ ID NO: 3847945 - RNA, 14 nt, Human
ucucuggaugccug

SEQ ID NO: 3847946 - RNA, 15 nt, Human
ucucuggaugccuga

SEQ ID NO: 3847947 - RNA, 15 nt, Human
ucucuggccccaagg

SEQ ID NO: 3847948 - RNA, 11 nt, Human
ucucuggccuc

SEQ ID NO: 3847949 - RNA, 13 nt, Human
ucucuggccuucg

SEQ ID NO: 3847950 - RNA, 21 nt, Human
ucucuggccuucggccuccau

SEQ ID NO: 3847951 - RNA, 17 nt, Human
ucucuggccuuuuccua

SEQ ID NO: 3847952 - RNA, 17 nt, Human
ucucuggcuaaggacag

SEQ ID NO: 3847953 - RNA, 12 nt, Human
ucucuggcuggg

SEQ ID NO: 3847954 - RNA, 14 nt, Human
ucucugggagaaaa

SEQ ID NO: 3847955 - RNA, 18 nt, Human
ucucugggagaaaaucau

SEQ ID NO: 3847956 - RNA, 22 nt, Human
ucucugggagaaaaucaucaag

SEQ ID NO: 3847957 - RNA, 17 nt, Human
ucucugggccucagagg

SEQ ID NO: 3847958 - RNA, 20 nt, Human
ucucuggggcaggcugcuuc

SEQ ID NO: 3847959 - RNA, 21 nt, Human
ucucugggggcugaggagcag

SEQ ID NO: 3847960 - RNA, 17 nt, Human
ucucugguaauauugac

SEQ ID NO: 3847961 - RNA, 14 nt, Human
ucucuguacauauu

SEQ ID NO: 3847962 - RNA, 18 nt, Human
ucucuguagggaacucug

SEQ ID NO: 3847963 - RNA, 15 nt, Human
ucucuguauaaacau

SEQ ID NO: 3847964 - RNA, 20 nt, Human
ucucugucccauucccuggg

SEQ ID NO: 3847965 - RNA, 21 nt, Human
ucucugucccauucccuggga

SEQ ID NO: 3847966 - RNA, 17 nt, Human
ucucugucccuugcugu

SEQ ID NO: 3847967 - RNA, 18 nt, Human
ucucugucccuugcugua

SEQ ID NO: 3847968 - RNA, 17 nt, Human
ucucugucuaccaucuc

SEQ ID NO: 3847969 - RNA, 14 nt, Human
ucucugucucaucc

SEQ ID NO: 3847970 - RNA, 23 nt, Human
ucucugucucauccaucaucaug

SEQ ID NO: 3847971 - RNA, 16 nt, Human
ucucugucucaugugu

SEQ ID NO: 3847972 - RNA, 23 nt, Human
ucucugugaacgauuuagaaaga

SEQ ID NO: 3847973 - RNA, 18 nt, Human
ucucugugacccacuucu

SEQ ID NO: 3847974 - RNA, 15 nt, Human
ucucugugagaaggu

SEQ ID NO: 3847975 - RNA, 14 nt, Human
ucucugugagacuc

SEQ ID NO: 3847976 - RNA, 21 nt, Human
ucucugugcuuugacucaccu

SEQ ID NO: 3847977 - RNA, 18 nt, Human
ucucuguggcuccaggcc

SEQ ID NO: 3847978 - RNA, 21 nt, Human
ucucugugucuaagauucuag

SEQ ID NO: 3847979 - RNA, 22 nt, Human
ucucugugucuaagauucuaga

SEQ ID NO: 3847980 - RNA, 18 nt, Human
ucucugugugcacaaaua

SEQ ID NO: 3847981 - RNA, 13 nt, Human
ucucuguucauuu

SEQ ID NO: 3847982 - RNA, 18 nt, Human
ucucuguucauuuccuca

SEQ ID NO: 3847983 - RNA, 14 nt, Human
ucucuguuccaugu

SEQ ID NO: 3847984 - RNA, 21 nt, Human
ucucuguuccauugaaucugu

SEQ ID NO: 3847985 - RNA, 22 nt, Human
ucucuguucuacccguuccaaa

SEQ ID NO: 3847986 - RNA, 18 nt, Human
ucucuguugucguaaaga

SEQ ID NO: 3847987 - RNA, 13 nt, Human
ucucuuaaaguug

SEQ ID NO: 3847988 - RNA, 18 nt, Human
ucucuuaauuuaaucuuu

SEQ ID NO: 3847989 - RNA, 21 nt, Human
ucucuuacccuucugugccca

SEQ ID NO: 3847990 - RNA, 23 nt, Human
ucucuuacccuucugugcccagc

SEQ ID NO: 3847991 - RNA, 13 nt, Human
ucucuuacugcaa

SEQ ID NO: 3847992 - RNA, 15 nt, Human
ucucuuacugcaaau

SEQ ID NO: 3847993 - RNA, 12 nt, Human
ucucuuagaaaa

SEQ ID NO: 3847994 - RNA, 16 nt, Human
ucucuuagaaaaggug

SEQ ID NO: 3847995 - RNA, 16 nt, Human
ucucuuagcuccccuc

SEQ ID NO: 3847996 - RNA, 17 nt, Human
ucucuuagcuccccucc

SEQ ID NO: 3847997 - RNA, 15 nt, Human
ucucuuauagaauau

SEQ ID NO: 3847998 - RNA, 17 nt, Human
ucucuuauagaauauuu

SEQ ID NO: 3847999 - RNA, 18 nt, Human
ucucuuauagaauauuua

SEQ ID NO: 3848000 - RNA, 20 nt, Human
ucucuuauagaauauuuauu

SEQ ID NO: 3848001 - RNA, 23 nt, Human
ucucuuauucaguaaaaaacaac

SEQ ID NO: 3848002 - RNA, 15 nt, Human
ucucuuauugccuca

SEQ ID NO: 3848003 - RNA, 13 nt, Human
ucucuucagucuc

SEQ ID NO: 3848004 - RNA, 18 nt, Human
ucucuuccaggcagccgc

SEQ ID NO: 3848005 - RNA, 17 nt, Human
ucucuuccauaugaccu

SEQ ID NO: 3848006 - RNA, 21 nt, Human
ucucuuccauaugaccucaug

SEQ ID NO: 3848007 - RNA, 15 nt, Human
ucucuuccccucuca

SEQ ID NO: 3848008 - RNA, 17 nt, Human
ucucuucccugcgccug

SEQ ID NO: 3848009 - RNA, 12 nt, Human
ucucuucccuuu

SEQ ID NO: 3848010 - RNA, 19 nt, Human
ucucuucccuuuccccagc

SEQ ID NO: 3848011 - RNA, 11 nt, Human
ucucuuccuac

SEQ ID NO: 3848012 - RNA, 16 nt, Human
ucucuuccuaucccau

SEQ ID NO: 3848013 - RNA, 20 nt, Human
ucucuuccuaucccauccca

SEQ ID NO: 3848014 - RNA, 19 nt, Human
ucucuuccuccgaggccag

SEQ ID NO: 3848015 - RNA, 11 nt, Human
ucucuuccugc

SEQ ID NO: 3848016 - RNA, 11 nt, Human
ucucuuccugu

SEQ ID NO: 3848017 - RNA, 12 nt, Human
ucucuuccugua

SEQ ID NO: 3848018 - RNA, 12 nt, Human
ucucuuccuuga

SEQ ID NO: 3848019 - RNA, 20 nt, Human
ucucuuccuuuuaucaguag

SEQ ID NO: 3848020 - RNA, 19 nt, Human
ucucuucucagaguggugg

SEQ ID NO: 3848021 - RNA, 16 nt, Human
ucucuucuccacugga

SEQ ID NO: 3848022 - RNA, 13 nt, Human
ucucuucucccag

SEQ ID NO: 3848023 - RNA, 13 nt, Human
ucucuucuccuua

SEQ ID NO: 3848024 - RNA, 15 nt, Human
ucucuucucuccagc

SEQ ID NO: 3848025 - RNA, 16 nt, Human
ucucuucucuccagcu

SEQ ID NO: 3848026 - RNA, 14 nt, Human
ucucuucucugcca

SEQ ID NO: 3848027 - RNA, 21 nt, Human
ucucuucuggguuccuuccuc

SEQ ID NO: 3848028 - RNA, 13 nt, Human
ucucuucuguguu

SEQ ID NO: 3848029 - RNA, 12 nt, Human
ucucuucuucau

SEQ ID NO: 3848030 - RNA, 12 nt, Human
ucucuucuuuaa

SEQ ID NO: 3848031 - RNA, 15 nt, Human
ucucuugagccuggg

SEQ ID NO: 3848032 - RNA, 15 nt, Human
ucucuugagcuggcc

SEQ ID NO: 3848033 - RNA, 17 nt, Human
ucucuugagcuggccuc

SEQ ID NO: 3848034 - RNA, 13 nt, Human
ucucuugccucaa

SEQ ID NO: 3848035 - RNA, 13 nt, Human
ucucuugcuuucu

SEQ ID NO: 3848036 - RNA, 23 nt, Human
ucucuugggaacugaacucacuu

SEQ ID NO: 3848037 - RNA, 18 nt, Human
ucucuuuaaaaggaaaga

SEQ ID NO: 3848038 - RNA, 19 nt, Human
ucucuuuaaaaggaaagaa

SEQ ID NO: 3848039 - RNA, 14 nt, Human
ucucuuuaaaaugc

SEQ ID NO: 3848040 - RNA, 22 nt, Human
ucucuuuaagggcaugccuugu

SEQ ID NO: 3848041 - RNA, 21 nt, Human
ucucuuuaaugucacaggcag

SEQ ID NO: 3848042 - RNA, 19 nt, Human
ucucuuuaugucuguggau

SEQ ID NO: 3848043 - RNA, 17 nt, Human
ucucuuucuuccuuuac

SEQ ID NO: 3848044 - RNA, 19 nt, Human
ucucuuucuucucugcugc

SEQ ID NO: 3848045 - RNA, 12 nt, Human
ucucuuucuuua

SEQ ID NO: 3848046 - RNA, 13 nt, Human
ucucuuucuuuac

SEQ ID NO: 3848047 - RNA, 18 nt, Human
ucucuuucuuuacaagau

SEQ ID NO: 3848048 - RNA, 12 nt, Human
ucucuuugaaac

SEQ ID NO: 3848049 - RNA, 14 nt, Human
ucucuuugaaacau

SEQ ID NO: 3848050 - RNA, 20 nt, Human
ucucuuugaauuuucugugu

SEQ ID NO: 3848051 - RNA, 14 nt, Human
ucucuuuguucuca

SEQ ID NO: 3848052 - RNA, 17 nt, Human
ucucuuuguucucagcu

SEQ ID NO: 3848053 - RNA, 19 nt, Human
ucucuuuguucucagcucc

SEQ ID NO: 3848054 - RNA, 21 nt, Human
ucucuuuguucucagcucccc

SEQ ID NO: 3848055 - RNA, 20 nt, Human
ucucuuuuauauuuguagga

SEQ ID NO: 3848056 - RNA, 15 nt, Human
ucucuuuucaaaaca

SEQ ID NO: 3848057 - RNA, 11 nt, Human
ucucuuuucua

SEQ ID NO: 3848058 - RNA, 17 nt, Human
ucucuuuucuguacuuc

SEQ ID NO: 3848059 - RNA, 13 nt, Human
ucucuuuucuuua

SEQ ID NO: 3848060 - RNA, 16 nt, Human
ucuuuaaauguuuuau

SEQ ID NO: 3848061 - RNA, 17 nt, Human
ucuuuaaccaaacaaua

SEQ ID NO: 3848062 - RNA, 21 nt, Human
ucuuuaaccagucugaaguuu

SEQ ID NO: 3848063 - RNA, 16 nt, Human
ucuuuaaccuuguaua

SEQ ID NO: 3848064 - RNA, 16 nt, Human
ucuuuaacucaggacu

SEQ ID NO: 3848065 - RNA, 23 nt, Human
ucuuuaacucaggacuccagccc

SEQ ID NO: 3848066 - RNA, 21 nt, Human
ucuuuaacugccguaauuuaa

SEQ ID NO: 3848067 - RNA, 23 nt, Human
ucuuuaaucacuuaacauuccua

SEQ ID NO: 3848068 - RNA, 11 nt, Human
ucuuuaaugcu

SEQ ID NO: 3848069 - RNA, 16 nt, Human
ucuuuaaugcuuuuau

SEQ ID NO: 3848070 - RNA, 15 nt, Human
ucuuuaaugucacag

SEQ ID NO: 3848071 - RNA, 19 nt, Human
ucuuuaaugucacaggcag

SEQ ID NO: 3848072 - RNA, 20 nt, Human
ucuuuaaugucacaggcagg

SEQ ID NO: 3848073 - RNA, 13 nt, Human
ucuuuaauuuugg

SEQ ID NO: 3848074 - RNA, 15 nt, Human
ucuuuaauuuuggaa

SEQ ID NO: 3848075 - RNA, 22 nt, Human
ucuuuacaaaacaaacucauuc

SEQ ID NO: 3848076 - RNA, 16 nt, Human
ucuuuagaaaaggcau

SEQ ID NO: 3848077 - RNA, 22 nt, Human
ucuuuagagaacugaaaagaga

SEQ ID NO: 3848078 - RNA, 17 nt, Human
ucuuuagaguuagacug

SEQ ID NO: 3848079 - RNA, 19 nt, Human
ucuuuagaguuagacuguu

SEQ ID NO: 3848080 - RNA, 23 nt, Human
ucuuuagauagcccuguccuggu

SEQ ID NO: 3848081 - RNA, 16 nt, Human
ucuuuaggagauuuau

SEQ ID NO: 3848082 - RNA, 22 nt, Human
ucuuuaguuuuugguugggaau

SEQ ID NO: 3848083 - RNA, 15 nt, Human
ucuuuaguuuuugug

SEQ ID NO: 3848084 - RNA, 14 nt, Human
ucuuuauaagaaag

SEQ ID NO: 3848085 - RNA, 17 nt, Human
ucuuuauaagaaagccu

SEQ ID NO: 3848086 - RNA, 14 nt, Human
ucuuuauacaacag

SEQ ID NO: 3848087 - RNA, 20 nt, Human
ucuuuauacaacagugcuaa

SEQ ID NO: 3848088 - RNA, 14 nt, Human
ucuuuauacagcug

SEQ ID NO: 3848089 - RNA, 16 nt, Human
ucuuuauacagcugua

SEQ ID NO: 3848090 - RNA, 17 nt, Human
ucuuuauagugcacaaa

SEQ ID NO: 3848091 - RNA, 16 nt, Human
ucuuuauauacaauaa

SEQ ID NO: 3848092 - RNA, 17 nt, Human
ucugaaacagcugccuu

SEQ ID NO: 3848093 - RNA, 23 nt, Human
ucugaaacccuggaccagugguc

SEQ ID NO: 3848094 - RNA, 22 nt, Human
ucugaaacugggcuccugcuuu

SEQ ID NO: 3848095 - RNA, 23 nt, Human
ucugaaagcacaggagacacugu

SEQ ID NO: 3848096 - RNA, 14 nt, Human
ucugaaagccacgu

SEQ ID NO: 3848097 - RNA, 13 nt, Human
ucugaaagggacg

SEQ ID NO: 3848098 - RNA, 17 nt, Human
ucugaaaguuguacaug

SEQ ID NO: 3848099 - RNA, 20 nt, Human
ucugaaauaggaaacaagug

SEQ ID NO: 3848100 - RNA, 16 nt, Human
ucugaaauaucccggg

SEQ ID NO: 3848101 - RNA, 13 nt, Human
ucugaaaugaaga

SEQ ID NO: 3848102 - RNA, 21 nt, Human
ucugaaaugucaguucugaua

SEQ ID NO: 3848103 - RNA, 21 nt, Human
ucugaaaugugauaaguucuu

SEQ ID NO: 3848104 - RNA, 15 nt, Human
ucugaaauguuacaa

SEQ ID NO: 3848105 - RNA, 18 nt, Human
ucugaaauguuacaaaaa

SEQ ID NO: 3848106 - RNA, 20 nt, Human
ucugaaauguuacaaaaaua

SEQ ID NO: 3848107 - RNA, 16 nt, Human
ucugaacacaggcagc

SEQ ID NO: 3848108 - RNA, 13 nt, Human
ucugaacacauug

SEQ ID NO: 3848109 - RNA, 16 nt, Human
ucugaacagcuggugu

SEQ ID NO: 3848110 - RNA, 17 nt, Human
ucugaacagcuggugua

SEQ ID NO: 3848111 - RNA, 16 nt, Human
ucugaacucaaacuga

SEQ ID NO: 3848112 - RNA, 21 nt, Human
ucugaacucaaacugaggaau

SEQ ID NO: 3848113 - RNA, 21 nt, Human
ucugaacucgcuucucuguga

SEQ ID NO: 3848114 - RNA, 14 nt, Human
ucugaacuggagcc

SEQ ID NO: 3848115 - RNA, 18 nt, Human
ucugaacuugcauuguga

SEQ ID NO: 3848116 - RNA, 19 nt, Human
ucugaacuugcauugugau

SEQ ID NO: 3848117 - RNA, 12 nt, Human
ucugaacuugcc

SEQ ID NO: 3848118 - RNA, 12 nt, Human
ucugaacuuugg

SEQ ID NO: 3848119 - RNA, 15 nt, Human
ucugaacuuuggaga

SEQ ID NO: 3848120 - RNA, 14 nt, Human
ucugaacuuuggga

SEQ ID NO: 3848121 - RNA, 12 nt, Human
ucugaagaagau

SEQ ID NO: 3848122 - RNA, 14 nt, Human
ucugaagauuguuu

SEQ ID NO: 3848123 - RNA, 18 nt, Human
ucugaagauuguuuaucu

SEQ ID NO: 3848124 - RNA, 19 nt, Human
ucugaagauuguuuaucua

SEQ ID NO: 3848125 - RNA, 12 nt, Human
ucugaagcaugu

SEQ ID NO: 3848126 - RNA, 14 nt, Human
ucugaagcuugacu

SEQ ID NO: 3848127 - RNA, 17 nt, Human
ucugaagcuugacuccc

SEQ ID NO: 3848128 - RNA, 12 nt, Human
ucugaaggagau

SEQ ID NO: 3848129 - RNA, 20 nt, Human
ucugaaggagccccauuccu

SEQ ID NO: 3848130 - RNA, 19 nt, Human
ucugaaggaggccaccucc

SEQ ID NO: 3848131 - RNA, 14 nt, Human
ucugaagggaggug

SEQ ID NO: 3848132 - RNA, 19 nt, Human
ucugaaggggcaaauucuu

SEQ ID NO: 3848133 - RNA, 17 nt, Human
ucugaagucacaucaca

SEQ ID NO: 3848134 - RNA, 15 nt, Human
ucugaagucagaucu

SEQ ID NO: 3848135 - RNA, 19 nt, Human
ucugaagucagaucugccu

SEQ ID NO: 3848136 - RNA, 16 nt, Human
ucugaagugaaacugc

SEQ ID NO: 3848137 - RNA, 14 nt, Human
ucugaaguuauauu

SEQ ID NO: 3848138 - RNA, 14 nt, Human
ucugaauaaagcaa
